(19) United States
(12) Patent Application Publication
(10) Pub. No.: US 2010/0226854 A1
(43) Pub. Date: Sep. 9, 2010

(54) MHC Peptide Complexes and Uses Thereof in Infectious Diseases

(75) Inventors: Jørgen Schøller, Lyngby (DK); Henrik Pedersen, Lynge (DK); Liselotte Brix, Bagsvaerd (DK)

Correspondence Address: KING & SPALDING, 1185 AVENUE OF THE AMERICAS, NEW YORK, NY, 10036-4003, US

(73) Assignee: DAKO DENMARK A/S, Glostrup (DK)

(21) Appl. No.: 12/619,039

(22) Filed: Nov. 16, 2009

Related U.S. Application Data
(63) Continuation of application No. 12/567,126, filed on Sep. 25, 2009, now abandoned.
Application No. 12/567,126 is a continuation of application No. PCT/DK2008/000118, filed on Mar. 26, 2008.
(60) Provisional application No. 60/907,217, filed on Mar. 26, 2007.
(60) Provisional application No. 60/929,583, filed on Jul. 3, 2007.
(60) Provisional application No. 60/929,581, filed on Jul. 3, 2007.
(60) Provisional application No. 60/929,582, filed on Jul. 3, 2007.
(60) Provisional application No. 60/929,586, filed on Jul. 3, 2007.

(30) Foreign Application Priority Data
Mar. 26, 2007 (DK) PA 2007 00461
Jul. 3, 2007 (DK) PA 2007 00972
Jul. 3, 2007 (DK) PA 2007 00973
Jul. 3, 2007 (DK) PA 2007 00974
Jul. 3, 2007 (DK) PA 2007 00975

(51) Int. Cl. A61K 39/00; C07K 14/74; A61P 31/12; C12N 9/96; C07K 16/00; C12N 5/07; A61K 51/08; A61K 39/395; C12Q 1/02; C12N 5/0783

(52) U.S. Cl. 424/1.69; 530/350; 424/185.1; 435/188; 530/391.1; 530/395; 530/387.1; 435/325; 424/178.1; 435/29

(57) ABSTRACT

Novel compounds carrying ligands capable of binding to counter receptors on relevant target cells are disclosed. The compounds possess a number of advantageous features, rendering them very suitable for a wide range of applications, including use as detection systems, detection of relevant target cells as well as a number of other methods. In particular, novel MHC complexes comprising one or more MHC molecules are disclosed. The affinity and specificity of the MHC-peptide complexes are surprisingly high. The possibility of presenting to the target cells a plurality of MHC-peptide complexes makes the MHC complexes according to the present invention an extremely powerful tool e.g. in the field of therapy and diagnosis. The invention generally relates to the field of therapy, including therapeutic methods and therapeutic compositions. Also comprised by the present invention is the sample-mounted use of MHC complexes and MHC multimers.

[0001] This application claims priority under 35 U.S.C. §120 as a continuation of U.S. application Ser. No. 12/567,126 filed Sep. 25, 2009 which is a continuation of PCT Application No. PCT/DK2008/000118 filed Mar. 26, 2008, which claims priority to the following Danish Patent applications Nos.—PA 2007 00461, filed Mar. 26, 2007, PA 2007 00973, filed Jul. 3, 2007, PA 2007 00975, filed Jul. 3, 2007, PA 2007 00972, filed Jul. 3, 2007, and PA 2007 00974, filed Jul. 3, 2007 and also claims priority to the following U.S. Provisional Patent Applications Nos.—U.S. 60/907,217 filed Mar. 26, 2007, U.S. 60/929,583, filed Jul. 3, 2007, U.S. 60/929,581, filed Jul. 3, 2007, U.S. 60/929,582, filed Jul. 3, 2007, and U.S. 60/929,586, Jul. 3, 2007, the contents of each of which are hereby incorporated by reference.

[0002] All patent and non-patent references cited in U.S. 60/907,217 as well as in this application are hereby incorporated by reference in their entirety. U.S. 60/907,217 is hereby also incorporated herein by reference in its entirety.

### FIELD OF INVENTION

[0003] The present invention relates to MHC-peptide complexes and uses thereof in the treatment of a disease in an individual.

### BACKGROUND OF INVENTION

[0004] Biochemical interactions between peptide epitope specific membrane molecules encoded by the Major Histocompatibility Complex (MHC, in humans HLA) and T-cell receptors (TCR) are required to elicit specific immune responses. This requires activation of T-cells by presentation to the T-cells of peptides against which a T-cell response should be raised. The peptides are presented to the T-cells by the MHC complexes.

### The Immune Response

[0005] The immune response is divided into two parts termed the innate immune response and the adaptive immune response. Both responses work together to eliminate pathogens (antigens). Innate immunity is present at all times and is the first line of defense against invading pathogens. The immediate response by means of pre-existing elements, i.e. various proteins and phagocytic cells that recognize conserved features on the pathogens, is important in clearing and control of spreading of pathogens. If a pathogen is persistent in the body and thus only partially cleared by the actions of the innate immune system, the adaptive immune system initiate a response against the pathogen. The adaptive immune system is capable of eliciting a response against virtually any type of pathogen and is unlike the innate immune system capable of establishing immunological memory.

[0006] The adaptive response is highly specific to the particular pathogen that activated it but it is not so quickly launched as the innate when first encountering a pathogen. However, due to the generation of memory cells, a fast and more efficient response is generated upon repeated exposure to the same pathogen. The adaptive response is carried out by two distinct sets of lymphocytes, the B cells producing antibodies leading to the humoral or antibody mediated immune response, and the T cells leading to the cell mediated immune response.

[0007] T cells express a clonotypic T cell receptor (TCR) on the surface. This receptor enable the T cell to recognize peptide antigens bound to major histocompatibility complex (MHC) molecules, called human leukocyte antigens (HLA) in man. Depending on the type of pathogen, being intracellular or extracellular, the antigenic peptides are bound to MHC class I or MHC class II, respectively. The two classes of MHC complexes are recognized by different subsets of T cells; Cytotoxic CD8+ T cells recognizing MHC class I and CD4+ helper cells recognizing MHC class II. In general, TCR recognition of MHC-peptide complexes result in T cell activation, clonal expansion and differentiation of the T cells into effector, memory and regulatory T cells.

[0008] B cells express a membrane bound form of immunoglobulin (Ig) called the B cell receptor (BCR). The BCR recognizes an epitope that is part of an intact three dimensional antigenic molecule. Upon BCR recognition of an antigen the BCR:antigen complex is internalized and fragments from the internalized antigen is presented in the context of MHC class II on the surface of the B cell to CD4+ helper T-cells (Th). The specific Th cell will then activate the B cell leading to differentiation into an antibody producing plasma cell.

[0009] A very important feature of the adaptive immune system is its ability to distinguish between self and non-self antigens, and preferably respond against non-self. If the immune system fails to discriminate between the two, specific immune responses against self-antigens are generated. These autoimmune reactions can lead to damage of self-tissue.

[0010] The adaptive immune response is initiated when antigens are taken up by professional antigen presenting cells such as dendritic cells, Macrophages, Langerhans cells and B-cells. These cells present peptide fragments, resulting from the degradation of proteins, in the context of MHC class II proteins (Major Histocompatibility Complex) to helper T cells. The T helper cells then mediate help to B-cells and antigen specific cytotoxic T cells, both of which have received primary activation signals via their BCR respective TCR. The help from the Th-cell is mediated by means of soluble mediators e.g. cytokines.

[0011] In general the interactions between the various cells of the cellular immune response is governed by receptor-ligand interactions directly between the cells and by production of various soluble reporter substances e.g. cytokines by activated cells.

### MHC-Peptide Complexes.

[0012] MHC complexes function as antigenic peptide receptors, collecting peptides inside the cell and transporting them to the cell surface, where the MHC-peptide complex can be recognized by T-lymphocytes. Two classes of classical MHC complexes exist, MHC class I and II. The most important difference between these two molecules lies in the protein source from which they obtain their associated peptides. MHC class I molecules present peptides derived from endogenous antigens degraded in the cytosol and are thus able to display fragments of viral proteins and unique proteins derived from cancerous cells. Almost all nucleated cells express MHC class I on their surface even though the expression level varies among different cell types. MHC class II molecules bind peptides derived from exogenous antigens. Exogenous proteins enter the cells by endocytosis or phagocytosis, and these proteins are degraded by proteases in acidified intracellular vesicles before presentation by MHC class II molecules. MHC class II molecules are only expressed on professional antigen presenting cells like B cells and macrophages.

[0013] The three-dimensional structure of MHC class I and II molecules are very similar but important differences exist. MHC class I molecules consist of two polypeptide chains, a heavy chain, α, spanning the membrane and a light chain, β2-microglobulin (β2m). The heavy chain is encoded in the gene complex termed the major histocompatibility complex (MHC), and its extracellular portion comprises three domains, α1, α2 and α3. The β2m chain is not encoded in the MHC gene and consists of a single domain, which together with the α3 domain of the heavy chain make up a folded structure that closely resembles that of the immunoglobulin. The α1 and α2 domains pair to form the peptide binding cleft, consisting of two segmented α helices lying on a sheet of eight β-strands. In humans as well as in mice three different types of MHC class I molecule exist. HLA-A, B, C are found in humans while MHC class I molecules in mice are designated H-2K, H-2D and H-2L.

[0014] The MHC class II molecule is composed of two membrane spanning polypeptide chains, α and β, of similar size (about 30000 Da). Genes located in the major histocompatibility complex encode both chains. Each chain consists of two domains, where α1 and β1 forms a 9-pocket peptide-binding cleft, where pocket 1, 4, 6 and 9 are considered as major peptide binding pockets. The α2 and β2, like the α2 and β2m in the MHC class I molecules, have amino acid sequence and structural similarities to immunoglobulin constant domains. In contrast to MHC class I complexes, where the ends of the antigenic peptide is buried, peptide-ends in MHC class II complexes are not. HLA-DR, DQ and DP are the human class II molecules, H-2A, M and E are those of the mice.

[0015] A remarkable feature of MHC genes is their polymorphism accomplished by multiple alleles at each gene. The polygenic and polymorphic nature of MHC genes is reflected in the peptide-binding cleft so that different MHC complexes bind different sets of peptides. The variable amino acids in the peptide binding cleft form pockets where the amino acid side chains of the bound peptide can be buried. This permits a specific variant of MHC to bind some peptides better than others.

### MHC Multimers

[0016] Due to the short half-life of the peptide-MHC-T cell receptor ternary complex (typically between 10 and 25 seconds) it is difficult to label specific T cells with labelled MHC-peptide complexes, and like-wise, it is difficult to employ such monomers of MHC-peptide for therapeutic and vaccine purposes because of their weak binding. In order to circumvent this problem, MHC multimers have been developed. These are complexes that include multiple copies of MHC-peptide complexes, providing these complexes with an increased affinity and half-life of interaction, compared to that of the monomer MHC-peptide complex. The multiple copies of MHC-peptide complexes are attached, covalently or non-covalently, to a multimerization domain. Known examples of such MHC multimers include the following:
[0017] MHC-dimers: Each MHC dimer contains two copies of MHC-peptide. IgG is used as multimerization domain, and one of the domains of the MHC protein is covalently linked to IgG.
[0018] MHC-tetramers: Each MHC-tetramer contains four copies of MHC-peptide, each of which is biotinylated. The MHC complexes are held together in a complex by the streptavidin tetramer protein, providing a non-covalent linkage between a streptavidin monomer and the MHC protein. Tetramers are described in U.S. Pat. No. 5,635,363.
[0019] MHC pentamers: Five copies of MHC-peptide complexes are multimerised by a self-assembling coiled-coil domain, to form a MHC pentamer. MHC pentamers are described in the US patent 2004209295
[0020] MHC dextramers: A large number of MHC-peptide complexes, typically more than ten, are attached to a dextran polymer. MHC-dextramers are described in the patent application WO 02/072631 A2.
[0021] MHC streptamers: 8-12 MHC-peptide complexes attached to Streptactin. MHC streptamers are described in Knabel M et al. Reversibel MHC multimer staining for functional isolation of T-cell populations and effective adoptive transfer. Nature medicine 6. 631-637 (2002).

### Use of MHC Multimers in Flow Cytometry and Related Techniques

[0022] The concentration of antigen specific T-cells in samples from e.g. peripheral blood can be very low. Flow cytometry and related methods offer the ability to analyze a large number of cells and simultaneously identify the few of interest. MHC multimers have turned out to be very valuable reagents for detection and characterization of antigen specific T-cells in flow cytometer experiments. The relative amount of antigen specific T cells in a sample can be determined and also the affinity of the binding of MHC multimer to the T-cell receptor can be determined The basic function of a flow cytometer is its ability to analyse and identify fluorochrome labelled entities in a liquid sample, by means of its excitation, using a light source such as a laser beam and the light emission from the bound fluorochrome.

[0023] MHC multimers is used as detections molecule for identification of antigen specific T-cells in flow cytometry, by labelling the MHC multimer with a specific fluorochrome, which is detectable, by the flow cytometer used.

[0024] In order to facilitate the identification of a small amount of cells, the cells can be sub-categorized using antibodies or other fluorochrome labelled detections molecules directed against surface markers other than the TCR on the specific T-cells population. Antibodies or other fluorochrome labelled detections molecules can also be used to identify cells known not to be antigen specific T-cells. Both kinds of detections molecules are in the following referred to as gating reagents. Gating reagents, helps identify the “true” antigen specific T cells bound by MHC multimers by identifying specific subpopulations in a sample, e.g. T cells and by excluding cells that for some reason bind MHC multimers without being antigen specific T-cells. Other cytometry methods, e.g. fluorescence microscopy and IHC can like flow cytometry be employed in identification of antigen specific T cells in a cell sample using MHC multimers.

### Application of MHC Multimers in Immune Monitoring, Diagnostics, Prognostics, Therapy and Vaccines

[0025] T cells are pivotal for mounting an adaptive immune response. It is therefore of importance to be able to measure the number of specific T cells when performing a monitoring of a given immune response, for example in connection with vaccine development, autologous cancer therapy, transplantation, infectious diseases, toxicity studies etc.

[0026] Accordingly, the present invention further provides powerful tools in the fields of vaccines, therapy and diagnosis. One objective of the present invention is to provide methods for anti-tumour and anti-virus immunotherapy by generating antigen-specific T-cells capable of inactivating or eliminating undesirable target cells. Another objective is to isolate antigen-specific T-cells and culture these in the presence of co-stimulatory molecules. Ex vivo priming and expansion of T-cell populations allows the T-cells to be used in immunotherapy of various types of cancer and infectious diseases. A third objective of the present invention is to identify and label specific subsets of cells with relevance for the development or treatment of diseases.

### SUMMARY OF INVENTION

[0027] Measurement of antigen specific T cells during an immune response are important parameters in vaccine development, autologous cancer therapy, transplantation, infectious diseases, inflammation, autoimmunity, toxicity studies etc. MHC multimers are crucial reagents in monitoring of antigen specific T cells. The present invention describes novel methods to generate MHC multimers and methods to improve existing and new MHC multimers. The invention also describes improved methods for the use of MHC multimers in analysis of T cells in samples including diagnostic and prognostic methods. Furthermore the use of MHC multimers in therapy are described, e.g. anti-tumour and anti-virus therapy, including isolation of antigen specific T cells capable of inactivation or elimination of undesirable target cells or isolation of specific T cells capable of regulation of other immune cells.

[0028] The present invention in one aspect refers to a MHC monomer comprising a-b-P, or a MHC multimer comprising (a-b-P)ₙ, wherein n>1,

wherein a and b together form a functional MHC protein capable of binding the peptide P,
wherein (a-b-P) is the MHC-peptide complex formed when the peptide P binds to the functional MHC protein, and
wherein each MHC peptide complex of a MHC multimer is associated with one or more multimerization domains.

[0029] MHC monomers and MHC multimers comprising one or more MHC peptide complexes of class 1 or class 2 MHC are covered by the present invention. Accordingly, the peptide P can have a length of e.g. 8, 9, 10, 11, 12, 13, 14, 15, 16, 16-20, or 20-30 amino acid residues.

[0030] Examples of the peptide P is provided herein below. In one embodiment, the peptide P can be selected from the group consisting of sequences disclosed in the electronically enclosed “Sequence Listing” and annotated consecutively (using integers) starting with SEQ ID NO:1 and ending with SEQ ID NO:52252.

[0031] In another aspect the present invention is directed to a composition comprising a plurality of MHC monomers and/or MHC multimers according to the present invention, wherein the MHC multimers are identical or different, and a carrier.

[0032] In yet another aspect there is provided a kit comprising a MHC monomer or a MHC multimer according to the present invention, or a composition according to the present invention, and at least one additional component, such as a positive control and/or instructions for use.

[0033] In a still further aspect there is provided a method for immune monitoring one or more diseases comprising monitoring of antigen specific T cells, said method comprising the steps of
[0034] i) providing the MHC monomer or MHC multimer or individual components thereof according to the present invention, or the individual components thereof,
[0035] ii) providing a population of antigen specific T cells or individual antigen specific T cells, and
[0036] iii) measuring the number, activity or state and/or presence of antigen specific of T cells specific for the peptide P of the said MHC monomer or MHC multimer, thereby immune monitoring said one or more diseases.

[0037] In yet another aspect there is provided a method for diagnosing one or more diseases comprising immune monitoring of antigen specific T cells, said method comprising the following steps: of
[0038] i) providing the MHC monomer or MHC multimer or individual components thereof according to the present invention, or individual components thereof,
[0039] ii) providing a population of antigen specific T cells or individual antigen specific T cells, and
[0040] iii) measuring the number, activity or state and/or presence of T cells specific for said MHC monomer or the peptide P of the MHC multimer, thereby diagnosing said one or more diseases.

[0041] There is also provided a method for isolation of one or more antigen specific T cells, said method comprising the steps of
[0042] i) providing the MHC monomer or MHC multimer or individual components thereof according to the present invention, or individual components thereof, and
[0043] ii) providing a population of antigen specific T cells or individual antigen specific T cells, and
[0044] iii) thereby isolating said T cells specific for the peptide P of the said MHC monomer or MHC multimer.

[0045] The present invention makes it possible to pursue different immune monitoring methods using the MHC monomers and MHC multimers according to the present invention. The immune monitoring methods include e.g. flow cytometry, ELISPOT, LDA, Quantaferon and Quantaferon-like methods. Using the above-cited methods, the MHC monomers and/or the MHC multimers can be provided as a MHC peptide complex, or the peptide and the MHC monomer and/or multimer can be provided separately.

[0046] Accordingly, recognition of TCR's can be achieved by direct or indirect detection, e.g. by using one or more of the following methods:

[0047] ELISPOT technique using indirect detection, e.g. by adding the antigenic peptide optionally associated with a MHC monomer or MHC multimer, followed by measurement of INF-gamma secretion from a population of cells or from individual cells.

[0048] Another technique involves a Quantaferon-like detection assays, e.g. by using indirect detection, e.g. by adding the antigenic peptide optionally associated with a MHC monomer or MHC multimer, followed by measurement of INF-gamma secretion from a population of cells or from individual cells.

[0049] Flow cytometry offers another alternative for performing detection assays, e.g. by using direct detection (e.g. of MHC tetramers), e.g. by adding the antigenic peptide optionally associated with a MHC monomer or MHC multimer, followed by detection of a fluorescein label, thereby measuring the number of TCRs on specific T-cells.

[0050] Flow cytometry can also be used for indirect detection, e.g. by adding the antigenic peptide optionally associated with a MHC monomer or MHC multimer, followed by addition of a “cell-permeabilizing factor”, and subsequent measurement of an intracellular component (e.g. INF-gamma mRNA), from individual cells or populations of cells.

[0051] By using the above-mentioned and other techniques, one can diagnose and/or monitor e.g. infectious diseases caused e.g. by mycobacetrium, Gram positive bacteria, Gram negative bacteria, Spirochetes, intracellular bacterium, extracelular bacterium, Borrelia, TB, CMV, HPV, Hepatitis, BK, fungal organisms and microorganisms. The diagnosis and/or monitoring of a particular disease can greatly aid in directing an optimal treatment of said disease in an individual. Cancer diagnostic methods and/or cancer monitoring methods also fall within the scope of the present invention.

[0052] In still further aspects of the present invention there is provided a method for performing a vaccination of an individual in need thereof, said method comprising the steps of
[0053] providing a MHC monomer or a MHC multimer according to the present invention, or the individual components thereof, and
[0054] administering said MHC monomer or MHC multimer to said individual and
[0055] obtaining a protective immune response, thereby performing a vaccination of the said individual.

[0056] In yet another embodiment there is provided a method for performing therapeutic treatment of an individual comprising the steps of
[0057] Providing the MHC multimer according to the present invention, or individual components thereof, and
[0058] Isolating or obtaining T-cells from a source, such as an individual or an ex-vivo library or cell bank, wherein said isolated or obtained T-cells are specific for said provided MHC multimer,
[0059] Optionally manipulating said T-cells, and
[0060] Introducing said isolated or obtained T-cells into an individual to be subjected to a therapeutic treatment, wherein the individual can be the same individual or a different individual from the source individual.

[0061] There is also provided in accordance with the present invention a method for immune monitoring one or more cancer diseases comprising the step of monitoring one or more cancer antigen specific T-cells, said method comprising the steps of
[0062] providing a MHC monomer or MHC multimer, or individual components thereof, according to any of the claims 1 to 797,
[0063] providing a population of cancer antigen specific T cells, or individual cancer antigen specific T cells, and
[0064] measuring the number and/or presence of cancer antigen specific T cells specific for the peptide P of the MHC monomer or MHC multimer, thereby immune monitoring said one or more cancer diseases.

[0065] In a still further aspect there is provided a method for diagnosing one or more cancer diseases in an individual, said method comprising the step of performing an immune monitoration of one or more cancer antigen specific T cell(s), said method comprising the further steps of
[0066] providing the MHC multimer or individual components thereof according to the present invention,
[0067] providing a population of cancer antigen specific T cells, or individual cancer antigen specific T cells, and
[0068] measuring the number and/or presence of T cells specific for the peptide P of the MHC monomer or MHC multimer, thereby diagnosing said one or more cancer diseases.

[0069] In yet another aspect of the present invention there is provided a method for performing a cancer vaccination of an individual in need thereof, said method comprising the steps of
[0070] providing a MHC monomer or MHC multimer according to any of the present invention, and
[0071] administering said MHC monomer or said MHC multimer to said individual, thereby performing a cancer vaccination of the said individual.

[0072] In a still further aspect of the present invention there is provided a method for performing a cancer therapeutic treatment of an individual comprising the steps of
[0073] Providing the MHC multimer according to the present invention, and
[0074] Isolation of T cells specific for said MHC multimer, and
[0075] Optionally manipulation of said T cell and
[0076] Introduction of said T cells into the same or a different individual to obtain a cancer therapeutic treatment.

[0077] There is also provided a method comprising one or more steps for minimizing undesired binding of the MHC multimer according to the present invention. This method is disclosed herein below in more detail.

[0078] In further aspects the present invention provides:

[0079] A method for performing a control experiment comprising the step of counting of particles comprising the MHC multimer according to the present invention.

[0080] A method for performing a control experiment comprising the step of sorting of particles comprising the MHC multimer according to the present invention.

[0081] A method for performing a control experiment comprising the step of performing flow cytometry analysis of particles comprising the MHC multimer according to the present invention.

[0082] A method for performing a control experiment comprising the step of performing a immunohistochemistry analysis comprising the MHC multimer according to the present invention.

[0083] A method for performing a control experiment comprising the step of performing a immunocytochemistry analysis comprising the MHC multimer according to the present invention.

[0084] A method for performing a control experiment comprising the step of performing an ELISA analysis comprising the MHC multimer according to the present invention.

[0085] In a still further aspect of the present invention there is provided a method for generating MHC multimers according to the present invention, said method comprising the steps of
[0086] i) providing one or more peptides P; and/or
[0087] ii) providing one or more functional MHC proteins,
[0088] iii) optionally providing one or more multimerization domains, and
[0089] iv) contacting the one or more peptides P and the one or more functional MHC proteins and the one or more multimerization domains simultaneously or sequentially in any order, thereby obtaining MHC multimers according to the present invention.

[0090] The method can also be performed by initially providing one or more antigenic peptide(s) P and one or more functional MHC proteins to generate a MHC-peptide complex (a-b-P); subsequently providing one or more multimerisation domain(s); and reacting the one or more MHC-peptide complexes and the one or more multimerization domain(s) to generate a MHC multimer according to the present invention.

### DEFINITIONS

[0091] As used everywhere herein, the term“a”, “an” or“the” is meant to be one or more, i.e. at least one.

[0092] Adjuvant: adjuvants are drugs that have few or no pharmacological effects by themselves, but can increase the efficacy or potency of other drugs when given at the same time. In another embodiment, an adjuvant is an agent which, while not having any specific antigenic effect in itself, can stimulate the immune system, increasing the response to a vaccine.

[0093] Agonist: agonist as used herein is a substance that binds to a specific receptor and triggers a response in the cell. It mimics the action of an endogenous ligand that binds to the same receptor.

[0094] Antagonist: antagonist as used herein is a substance that binds to a specific receptor and blocks the response in the cell. It blocks the action of an endogenous ligand that binds to the same receptor.

[0095] Antibodies: As used herein, the term “antibody” means an isolated or recombinant binding agent that comprises the necessary variable region sequences to specifically bind an antigenic epitope. Therefore, an antibody is any form of antibody or fragment thereof that exhibits the desired biological activity, e.g., binding the specific target antigen. Antibodies can derive from multiple species. For example, antibodies include rodent (such as mouse and rat), rabbit, sheep, camel, and human antibodies. Antibodies can also include chimeric antibodies, which join variable regions from one species to constant regions from another species. Likewise, antibodies can be humanized, that is constructed by recombinant DNA technology to produce immunoglobulins which have human framework regions from one species combined with complementarity determining regions (CDR's) from a another species' immunoglobulin. The antibody can be monoclonal or polyclonal.

[0096] Antibodies can be divided into isotypes (IgA, IgG, IgM, IgD, IgE, IgG1, IgG2, IgG3, IgG4, IgA1, IgA2, IgM1, IgM2)

[0097] Antibodies: In another embodiment the term “antibody” refers to an intact antibody, or a fragment of an antibody that competes with the intact antibody for antigen binding. In certain embodiments, antibody fragments are produced by recombinant DNA techniques. In certain embodiments, antibody fragments are produced by enzymatic or chemical cleavage of intact antibodies. Exemplary antibody fragments include, but are not limited to, Fab, Fab′, F(ab′)₂, Fv, and scFv. Exemplary antibody fragments also include, but are not limited to, domain antibodies, nanobodies, minibodies ((scFv-C.sub.H3).sub.2), maxibodies ((scFv-C.sub.H2-C.sub.H3).sub.2), diabodies (noncovalent dimer of scFv).

[0098] Antigen presenting cell: An antigen-presenting cell (APC) as used herein is a cell that displays foreign antigen complexed with MHC on its surface.

[0099] Antigenic peptide: Any peptide molecule that is bound or able to bind into the binding groove of either MHC class 1 or MHC class 2.

[0100] Aptamer: the term aptamer as used herein is defined as oligonucleic acid or peptide molecules that bind a specific target molecule. Aptamers are usually created by selecting them from a large random sequence pool, but natural aptamers also exist. Aptamers can be divided into DNA aptamers, RNA aptamers and peptide aptamers.

[0101] Avidin: Avidin as used herein is a glycoprotein found in the egg white and tissues of birds, reptiles and amphibians. It contains four identical subunits having a combined mass of 67,000-68,000 daltons. Each subunit consists of 128 amino acids and binds one molecule of biotin.

[0102] Biologically active molecule: A biologically active molecule is a molecule having itself a biological activity/effect or is able to induce a biological activity/effect when administered to a biological system. Biologically active molecules include adjuvants, immune targets (e.g. antigens), enzymes, regulators of receptor activity, receptor ligands, immune potentiators, drugs, toxins, cytotoxic molecules, co-receptors, proteins and peptides in general, sugar moieties, lipid groups, nucleic acids including siRNA, nanoparticles, small molecules.

[0103] Bioluminescent: Bioluminescence, as used herein, is the production and emission of light by a living organism as the result of a chemical reaction during which chemical energy is converted to light energy.

[0104] Biotin: Biotin, as used herein, is also known as vitamin H or B₇. Niotin has the chemical formula C₁₀H₁₆N₂O₃S.

[0105] Bispecific antibodies: The term bispecific antibodies as used herein is defined as monoclonal, preferably but not limited to human or humanized, antibodies that have binding specificities for at least two different antigens. The antibody can also be trispecific or multispecific.

[0106] Carrier: A carrier as used herein can be any type of molecule that is directly or indirectly associated with the MHC peptide complex. In this invention, a carrier will typically refer to a functionalized polymer (e.g. dextran) that is capable of reacting with MHC-peptide complexes, thus covalently attaching the MHC-peptide complex to the carrier, or that is capable of reacting with scaffold molecules (e.g. streptavidin), thus covalently attaching streptavidin to the carrier; the streptavidin then may bind MHC-peptide complexes. Carrier and scaffold are used interchangeably herein where scaffold typically refers to smaller molecules of a multimerization domain and carrier typically refers to larger molecule and/or cell like structures.

[0107] Chelating chemical compound: Chelating chemical compound, as used herein, is the process of reversible binding of a ligand to a metal ion, forming a metal complex.

[0108] Chemiluminescent: Chemiluminescence, as used herein, is the emission of light (luminescence) without emission of heat as the result of a chemical reaction.

[0109] Chromophore: A chromophore, as used herein, is the part of a visibly coloured molecule responsible for light absorption over a range of wavelengths thus giving rise to the colour. By extension the term can be applied to uv or it absorbing parts of molecules.

[0110] Coiled-coil polypeptide: the term coiled-coil polypeptide as used herein is a structural motif in proteins, in which 2-7 alpha-helices are coiled together like the strands of a rope

[0111] Covalent binding: The term covalent binding is used herein to describe a form of chemical bonding that is characterized by the sharing of pairs of electrons between atoms. Attraction-to-repulsion stability that forms between atoms when they share electrons is known as covalent bonding.

[0112] Crosslinking is the process of chemically joining two or more molecules by a covalent bond. Crosslinking reagents contain reactive ends to specific functional groups (primary amines, sulfhydryls, etc.) on proteins or other molecules.

[0113] Diagnosis: The act or process of identifying or determining the nature and cause of a disease or injury through evaluation

[0114] Diabodies: The term “diabodies” refers to small antibody fragments with two antigen-binding sites, which fragments comprise a heavy-chain variable domain (VH) connected to a light-chain variable domain (VL) in the same polypeptide chain (VH-VL). By using a linker that is too short to allow pairing between the two domains on the same chain, the domains are forced to pair with the complementary domains of another chain and create two antigen-binding sites.

[0115] Dendritic cell: The term dendritic cell as used herein is a type of immune cells. Their main function is to process antigen material and present it on the surface to other cells of the immune system, thus functioning as antigen-presenting cells.

[0116] Detection: In this invention detection means any method capable of measuring one molecule bound to another molecule. The molecules are typically proteins but can be any type of molecule

[0117] Dextran: the term dextran as used herein is a complex, branched polysaccharide made of many glucose molecules joined into chains of varying lengths. The straight chain consists of α1->6 glycosidic linkages between glucose molecules, while branches begin from α1->3 linkages (and in some cases, α1->2 and α1->4 linkages as well).

[0118] Direct detection of T cells: Direct detection of T cells is used herein interchangeably with direct detection of TCR and direct detection of T cell receptor. As used herein direct detection of T cells is detection directly of the binding interaction between a specific T cell receptor and a MHC multimer.

[0119] DNA: The term DNA (Deoxyribonucleic acid) duplex as used herein is a polymer of simple units called nucleotides, with a backbone made of sugars and phosphate atoms joined by ester bonds. Attached to each sugar is one of four types of molecules called bases.

[0120] DNA duplex: In living organisms, DNA does not usually exist as a single molecule, but instead as a tightly-associated pair of molecules. These two long strands entwine like vines, in the shape of a double helix.

[0121] Electrophilic: electrophile, as used herein, is a reagent attracted to electrons that participates in a chemical reaction by accepting an electron pair in order to bond to a nucleophile.

[0122] Enzyme label: enzyme labelling, as used herein, involves a detection method comprising a reaction catalysed by an enzyme.

[0123] Epitope-focused antibody: Antibodies also include epitope-focused antibodies, which have at least one minimal essential binding specificity determinant from a heavy chain or light chain CDR3 from a reference antibody, methods for making such epitope-focused antibodies are described in U.S. patent application Ser. No. 11/040,159, which is incorporated herein by reference in its entirety.

[0124] Flow cytometry: The analysis of single cells using a flow cytometer.

[0125] Flow cytometer: Instrument that measures cell size, granularity and fluorescence due to bound fluorescent marker molecules as single cells pass in a stream past photodetectors. A flow cytometer carry out the measurements and/or sorting of individual cells.

[0126] Fluorescent: the term fluorescent as used herein is to have the ability to emit light of a certain wavelength when activated by light of another wavelength.

[0127] Fluorochromes: fluorochrome, as used herein, is any fluorescent compound used as a dye to mark e.g. protein with a fluorescent label.

[0128] Fluorophore: A fluorophore, as used herein, is a component of a molecule which causes a molecule to be fluorescent.

[0129] Folding: In this invention folding means in vitro or in vivo folding of proteins in a tertiery structure.

[0130] Fusion antibody: As used herein, the term “fusion antibody” refers to a molecule in which an antibody is fused to a non-antibody polypeptide at the N- or C-terminus of the antibody polypeptide.

[0131] Glycosylated: Glycosylation, as used herein, is the process or result of addition of saccharides to proteins and lipids.

[0132] Hapten: A residue on a molecule for which there is a specific molecule that can bind, e.g. an antibody.

[0133] Heteroconjugate antibodies are composed of two covalently joined antibodies. Such antibodies have, for example, been proposed to target immune system cells to unwanted cells.

[0134] IgG: IgG as used herein is a monomeric immunoglobulin, built of two heavy chains and two light chains. Each molecule has two antigen binding sites.

[0135] Isolated antibody: The term “isolated” antibody as used herein is an antibody which has been identified and separated and/or recovered from a component of its natural environment.

[0136] Immunoconjugates: The invention also pertains to immunoconjugates comprising an antibody conjugated to a cytotoxic agent such as a chemotherapeutic agent, toxin (e.g., an enzymatically active toxin of bacterial, fungal, plant, or animal origin, or fragments thereof), or a radioactive isotope (i.e., a radioconjugate). Enzymatically active toxins and fragments thereof that can be used include diphtheria A chain, nonbinding active fragments of diphtheria toxin, exotoxin A chain (from Pseudomonas aeruginosa), ricin A chain, abrin A chain, modeccin A chain, alpha-sarcin, Aleurites fordii proteins, dianthin proteins, Phytolaca americana proteins (PAPI, PAPII, and PAP-S), momordica charantia inhibitor, curcin, crotin, sapaonaria officinalis inhibitor, gelonin, mitogellin, restrictocin, phenomycin, enomycin, and the tricothecenes. A variety of radionuclides are available for the production of radioconjugated antibodies. Conjugates of the antibody and cytotoxic agent are made using a variety of bifunctional protein-coupling agents such as N-succinimidyl-3-(2-pyridyldithiol) propionate (SPDP), iminothiolane (IT), bifunctional derivatives of imidoesters (such as dimethyl adipimidate HCL), active esters (such as disuccinimidyl suberate), aldehydes (such as glutaraldehyde), bis-azido compounds (such as bis(p-azidobenzoyl)hexanediamine), bis-diazonium derivatives (such as bis-(p-diazoniumbenzoyl)-ethylenediamine), diisocyanates (such as tolyene 2,6-diisocyanate), and bis-active fluorine compounds (such as 1,5-difluoro-2,4-dinitrobenzene).

[0137] Immune monitoring: Immune monitoring of the present invention refers to testing of immune status in the diagnosis and therapy of diseases like but not limited to cancer, immunoproliferative and immunodeficiency disorders, autoimmune abnormalities, and infectious disease. It also refers to testing of immune status before, during and after vaccination and transplantation procedures.

[0138] Immune monitoring process: a series of one or more immune monitoring analysis

[0139] Indirect detection of T cells: Indirect detection of T cells is used interchangeably herein with Indirect detection of TCR and indirect detection of T cell receptor. As used herein indirect detection of T cells is detection of the binding interaction between a specific T cell receptor and a MHC multimer by measurement of the effect of the binding interaction.

[0140] Ionophore: ionophore, as used herein, is a lipid-soluble molecule usually synthesized by microorganisms capable of transporting ions.

[0141] Label: Label herein is used interchangeable with labeling molecule. Label as described herein is an identifiable substance that is detectable in an assay and that can be attached to a molecule creating a labeled molecule. The behavior of the labeled molecule can then be studied.

[0142] Labelling: Labelling herein means attachment of a label to a molecule.

[0143] Lanthanide: lanthanide, as used herein, series comprises the 15 elements with atomic numbers 57 through 71, from lanthanum to lutetium.

[0144] Linker molecule: Linker molecule and linker is used interchangeable herein. A linker molecule is a molecule that covalently or non-covalently connects two or more molecules, thereby creating a larger complex consisting of all molecules including the linker molecule.

[0145] Liposomes: The term liposomes as used herein is defined as a spherical vesicle with a membrane composed of a phospholipid and cholesterol bilayer. Liposomes, usually but not by definition, contain a core of aqueous solution; lipid spheres that contain no aqueous material are called micelles.

[0146] Immunoliposomes: The antibodies disclosed herein can also be formulated as immunoliposomes. Liposomes comprising the antibody are prepared by methods known in the art, such as described in Epstein et al., Proc. Natl. Acad. Sci. USA 82: 3688 (1985); Hwang et al., Proc. Natl. Acad. Sci. USA 77: 4030 (1980); and U.S. Pat. Nos. 4,485,045 and 4,544,545. Particularly useful liposomes can be generated by the reverse-phase evaporation method with a lipid composition comprising phosphatidylcholine, cholesterol, and PEG-derivatized phosphatidylethanolamine (PEG-PE).

[0147] Marker: Marker is used interchangeably with marker molecule herein. A marker is molecule that specifically associates covalently or non-covalently with a molecule belonging to or associated with an entity.

[0148] MHC: Denotes the major histocompatibility complex.

[0149] A “MHC Class I molecule” as used everywhere herein is defined as a molecule which comprises 1-3 subunits, including a heavy chain, a heavy chain combined with a light chain (beta₂m), a heavy chain combined with a light chain (beta₂m) through a flexible linker, a heavy chain combined with a peptide, a heavy chain combined with a peptide through a flexible linker, a heavy chain/beta₂m dimer combined with a peptide, and a heavy chain/beta₂m dimer with a peptide through a flexible linker to the heavy or light chain. The MHC molecule chain can be changed by substitution of single or by cohorts of native amino acids or by inserts, or deletions to enhance or impair the functions attributed to said molecule. By example, it has been shown that substitution of XX with YY in position nn of human beta₂m enhance the biochemical stability of MHC Class I molecule complexes and thus can lead to more efficient antigen presentation of subdominant peptide epitopes.

[0150] MHC complex: MHC complex is herein used interchangeably with MHC-peptide complex, unless it is specified that the MHC complex is empty, i.e. is not complexed with peptide.

[0151] MHC Class I like molecules (including non-classical MHC Class I molecules) include CD1d, HLA E, HLA G, HLA F, HLA H, MIC A, MIC B, ULBP-1, ULBP-2, and ULBP-3.

[0152] A “MHC Class II molecule” as used everywhere herein is defined as a molecule which comprises 2-3 subunits including an alpha-chain and a beta-chain (alpha/beta-dimer), an alpha/beta dimer with a peptide, and an alpha/beta dimer combined with a peptide through a flexible linker to the alpha or beta chain, an alpha/beta dimer combined through an interaction by affinity tags e.g. jun-fos, an alpha/beta dimer combined through an interaction by affinity tags e.g. jun-fos and further combined with a peptide through a flexible linker to the alpha or beta chain. The MHC molecule chains can be changed by substitution of single or by cohorts of native amino acids or by inserts, or deletions to enhance or impair the functions attributed to said molecule. Under circumstances where the alpha-chain and beta-chain have been fused, to form one subunit, the “MHC Class II molecule” can comprise only 1 subunit.

[0153] MHC Class II like molecules (including non-classical MHC Class II molecules) include HLA DM, HLA DO, I-A beta2, and I-E beta2.

[0154] A “peptide free MHC Class I molecule” as used everywhere herein is meant to be a MHC Class I molecule as defined above with no peptide.

[0155] A “peptide free MHC Class II molecule” as used everywhere herein is meant to be a MHC Class II molecule as defined above with no peptide.

[0156] Such peptide free MHC Class I and II molecules are also called “empty” MHC Class I and II molecules.

[0157] The MHC molecule may suitably be a vertebrate MHC molecule such as a human, a mouse, a rat, a porcine, a bovine or an avian MHC molecule. Such MHC complexes from different species have different names. E.g. in humans, MHC complexes are denoted HLA. The person skilled in the art will readily know the name of the MHC complexes from various species.

[0158] In general, the term “MHC molecule” is intended to include alleles. By way of example, in humans e.g. HLA A, HLA B, HLA C, HLA D, HLA E, HLA F, HLA G, HLA H, HLA DR, HLA DQ and HLA DP alleles are of interest, and in the mouse system, H-2 alleles are of interest. Likewise, in the rat system RT1-alleles, in the porcine system SLA-alleles, in the bovine system BoLA, in the avian system e.g. chicken-B alleles, are of interest.

[0159] “MHC complexes” and “MHC constructs” are used interchangably herein.

[0160] “MHC protein” and “MHC molecule” are used interchangably herein. Accordingly, a functional MHC peptide complex comprises a MHC protein or MHC molecule associated with a peptide to be presented for cells or binding partners having an affinity for said peptide.

[0161] By the terms “MHC complexes” and “MHC multimers” as used herein are meant such complexes and multimers thereof, which are capable of performing at least one of the functions attributed to said complex or multimer. The terms include both classical and non-classical MHC complexes. The meaning of “classical” and “non-classical” in connection with MHC complexes is well known to the person skilled in the art. Non-classical MHC complexes are subgroups of MHC-like complexes. The term “MHC complex” includes MHC Class I molecules, MHC Class II molecules, as well as MHC-like molecules (both Class I and Class II), including the subgroup non-classical MHC Class I and Class II molecules.

[0162] The MHC molecule can suitably be a vertebrate MHC molecule such as a human, a mouse, a rat, a porcine, a bovine or an avian MHC molecule. Such MHC complexes from different species have different names. E.g. in humans, MHC complexes are denoted HLA. The person skilled in the art will readily know the name of the MHC complexes from various species.

[0163] MHC multimer: The terms MHC multimer, MHCmer and MHC'mer herein are used interchangeably, to denote a complex comprising more than one MHC-peptide complexes, held together by covalent or non-covalent bonds.

[0164] Monoclonal antibodies: Monoclonal antibodies, as used herein, are antibodies that are identical because they were produced by one type of immune cell and are all clones of a single parent cell.

[0165] Monovalent antibodies: The antibodies in the present invention can be monovalent antibodies. Methods for preparing monovalent antibodies are well known in the art. For example, one method involves recombinant expression of immunoglobulin light chain and modified heavy chain. The heavy chain is truncated generally at any point in the Fc region so as to prevent heavy chain crosslinking. Alternatively, the relevant cysteine residues are substituted with another amino acid residue or are deleted so as to prevent crosslinking. In vitro methods are also suitable for preparing monovalent antibodies. Digestion of antibodies to produce fragments thereof, particularly, Fab fragments, can be accomplished using routine techniques known in the art.

[0166] Multimerization domain: A multimerization domain is a molecule, a complex of molecules, or a solid support, to which one or more MHC or MHC-peptide complexes can be attached. A multimerization domain consist of one or more carriers and/or one or more scaffolds and may also contain one or more linkers connecting carrier to scaffold, carrier to carrier, scaffold to scaffold. The multimerization domain may also contain one or more linkers that can be used for attachment of MHC complexes and/or other molecules to the multimerization domain. Multimerization domains thus include IgG, streptavidin, streptactin, micelles, cells, polymers, beads and other types of solid support, and small organic molecules carrying reactive groups or carrying chemical motifs that can bind MHC complexes and other molecules.

[0167] Nanobodies: Nanobodies as used herein is a type of antibodies derived from camels, and are much smaller than traditional antibodies.

[0168] Neutralizing antibodies: neutralizing antibodies as used herein is an antibody which, on mixture with the homologous infectious agent, reduces the infectious titer.

[0169] NMR: NMR (Nuclear magnetic resonance), as used herein, is a physical phenomenon based upon the quantum mechanical magnetic properties of an atom's nucleus. NMR refers to a family of scientific methods that exploit nuclear magnetic resonance to study molecules.

[0170] Non-covalent: The term noncovalent bond as used herein is a type of chemical bond, that does not involve the sharing of pairs of electrons, but rather involves more dispersed variations of electromagnetic interactions.

[0171] Nucleic acid duplex: A nucleic acid is a complex, high-molecular-weight biochemical macromolecule composed of nucleotide chains that convey genetic information. The most common nucleic acids are deoxyribonucleic acid (DNA) and ribonucleic acid (RNA).

[0172] Nucleophilic: a nucleophile, as used herein, is a reagent that forms a chemical bond to its reaction partner (the electrophile) by donating both bonding electrons.

[0173] “One or more” as used everywhere herein is intended to include one and a plurality.

[0174] A “peptide free MHC Class I molecule” as used everywhere herein is meant to be a MHC Class I molecule as defined above with no peptide.

[0175] A “peptide free MHC Class II molecule” as used everywhere herein is meant to be a MHC Class II molecule as defined above with no peptide.

[0176] Such peptide free MHC Class I and II molecules are also called “empty” MHC Class I and II molecules.

[0177] Pegylated: pegylated, as used herein, is conjugation of Polyethylene glycol (PEG) to proteins.

[0178] Peptide or protein: Any molecule composed of at least two amino acids. Peptide normally refers to smaller molecules of up to around 30 amino acids and protein to larger molecules containing more amino acids.

[0179] Phosphorylated; phosphorylated, as used herein, is the addition of a phosphate (PO₄) group to a protein molecule or a small molecule.

[0180] “A plurality” as used everywhere herein should be interpreted as two or more.

[0181] PNA: PNA (Peptide nucleic acid) as used herein is a chemical similar to DNA or RNA. PNA is not known to occur naturally in existing life on Earth but is artificially synthesized and used in some biological research and medical treatments. DNA and RNA have a deoxyribose and ribose sugar backbone, respectively, whereas PNA's backbone is composed of repeating N-(2-aminoethyl)-glycine units linked by peptide bonds. The various purine and pyrimidine bases are linked to the backbone by methylene carbonyl bonds. PNAs are depicted like peptides, with the N-terminus at the first (left) position and the C-terminus at the right.

[0182] “A plurality” as used everywhere herein should be interpreted as two or more. This applies i.a. to the MHC peptide complex and the binding entity. When a plurality of MHC peptide complexes is attached to the multimerization domain, such as a scaffold or a carrier molecule, the number of MHC peptide complexes need only be limited by the capacity of the multimerization domain.

[0183] Polyclonal antibodies: a polyclonal antibody as used herein is an antibody that is derived from different B-cell lines. They are a mixture of immunoglobulin molecules secreted against a specific antigen, each recognising a different epitope.

[0184] Polymer: the tern polymer as used herein is defined as a compound composed of repeating structural units, or monomers, connected by covalent chemical bonds.

[0185] Polypeptide: Peptides are the family of short molecules formed from the linking, in a defined order, of various α-amino acids. The link between one amino acid residue and the next is an amide bond and is sometimes referred to as a peptide bond. Longer peptides are referred to as proteins or polypeptide.

[0186] Polysaccharide: The term polysaccharide as used herein is defined as polymers made up of many monosaccharides joined together by glycosidic linkages.

[0187] Radicals: radicals, as used herein, are atomic or molecular species with unpaired electrons on an otherwise open shell configuration. These unpaired electrons are usually highly reactive, so radicals are likely to take part in chemical reactions.

[0188] Radioactivity: Radioactive decay is the process in which an unstable atomic nucleus loses energy by emitting radiation in the form of particles or electromagnetic waves. RNA: RNA (Ribonucleic acid) as used herein is a nucleic acid polymer consisting of nucleotide monomers that plays several important roles in the processes that translate genetic information from deoxyribonucleic acid (DNA) into protein products

[0189] Scaffold: A scaffold is typically an organic molecule carrying reactive groups, capable of reacting with reactive groups on a MHC-peptide complex. Particularly small organic molecules of cyclic structure (e.g. functionalized cycloalkanes or functionalized aromatic ring structures) are termed scaffolds. Scaffold and carrier are used interchangeably herein where scaffold typically refers to smaller molecules of a multimerization domain and carrier typically refers to larger molecule and/or cell like structures.

[0190] Staining: In this invention staining means specific or unspecific labelling of cells by binding labeled molecules to defined proteins or other structures on the surface of cells or inside cells. The cells are either in suspension or part of a tissue. The labeled molecules can be MHC multimers, antibodies or similar molecules capable of binding specific structures on the surface of cells.

[0191] Streptavidin: Streptavidin as used herein is a tetrameric protein purified from the bacterium Streptomyces avidinii. Streptavidin is widely use in molecular biology through its extraordinarily strong affinity for biotin.

[0192] Sugar: Sugars as used herein include monosaccharides, disaccharides, trisaccharides and the oligosaccharides—comprising 1, 2, 3, and 4 or more monosaccharide units respectively.

[0193] Therapy: Treatment of illness or disability

[0194] Vaccine: A vaccine is an antigenic preparation used to establish immunity to a disease or illness and thereby protects or cure the body from a specific disease or illness. Vaccines are either prophylactic and prevent disease or therapeutic and treat disease. Vaccines may contain more than one type of antigen and is then called a combined vaccine.

[0195] Vaccination: The introduction of vaccine into the body of human or animals for the purpose of inducing immunity.

[0196] B.L. is an abbreviation for Bind level.

[0197] Aff. is an abbreviation for affinity.

### DETAILED DESCRIPTION OF THE INVENTION

[0198] In one aspect, the present invention is directed to novel MHC complexes optionally comprising a multimerization domain preferably comprising a carrier molecule and/or a scaffold.

[0199] There is also provided a MHC multimer comprising 2 or more MHC-peptide complexes and a multimerization domain to which the 2 or more MHC-peptide complexes are associated. The MHC multimer can generally be formed by association of the 2 or more MHC-peptide complexes with the multimerization domain to which the 2 or more MHC-peptide complexes are capable of associating.

[0200] The multimerization domain can be a scaffold associated with one or more MHC-peptide complexes, or a carrier associated with one or more, preferably more than one, MHC-peptide complex(es), or a carrier associated with a plurality of scaffolds each associated with one or more MHC-peptide complexes, such as 2 MHC-peptide complexes, 3 MHC-peptide complexes, 4 MHC-peptide complexes, 5 MHC-peptide complexes or more than 5 MHC-peptide complexes. Accordingly, multimerization domain collectively refers to each and every of the above. It will be clear from the detailed description of the invention provided herein below when the multimerization domain refers to a scaffold or a carrier or a carrier comprising one or more scaffolds.

[0201] Generally, when a multimerization domain comprising a carrier and/or a scaffold is present, the MHC complexes can be associated with this domain either directly or via one or more binding entities. The association can be covalent or non-covalent.

[0202] Accordingly, there is provided in one embodiment a MHC complex comprising one or more entities (a-b-P)ₙ, wherein a and b together form a functional MHC protein capable of binding a peptide P, and wherein (a-b-P) is the MHC-peptide complex formed when the peptide P binds to the functional MHC protein, said MHC complex optionally further comprising a multimerization domain comprising a carrier molecule and/or a scaffold. “MHC complex” refers to any MHC complex, including MHC monomers in the form of a single MHC-peptide complex and MHC multimers comprising a multimerization domain to which more than one MHC peptide complex is associated.

[0203] When the invention is directed to complexes comprising a MHC multimer, i.e. a plurality of MHC peptide complexes of the general composition (a-b-P)ₙ associated with a multimerization domain, n is by definition more than 1, i.e. at least 2 or more. Accordingly, the term “MHC multimer” is used herein specifically to indicate that more than one MHC-peptide complex is associated with a multimerization domain, such as a scaffold or carrier or carrier comprising one or more scaffolds. Accordingly, a single MHC-peptide complex can be associated with a scaffold or a carrier or a carrier comprising a scaffold and a MHC-multimer comprising 2 or more MHC-peptide complexes can be formed by association of the individual MHC-peptide complexes with a scaffold or a carrier or a carrier comprising one or more scaffolds each associated with one or more MHC-peptide complexes.

[0204] When the MHC complex comprises a multimerization domain to which the n MHC-peptide complexes are associated, the association can be a covalent linkage so that each or at least some of the n MHC-peptide complexes is covalently linked to the multimerization domain, or the association can be a non-covalent association so that each or at least some of the n MHC-peptide complexes are non-covalently associated with the multimerization domain.

[0205] The MHC complexes of the invention may be provided in non-soluble or soluble form, depending on the intended application.

[0206] Effective methods to produce a variety of MHC complexes comprising highly polymorphic human HLA encoded proteins makes it possible to perform advanced analyses of complex immune responses, which may comprise a variety of peptide epitope specific T-cell clones.

[0207] One of the benefits of the MHC complexes of the present invention is that the MHC complexes overcome low intrinsic affinities of monomer ligands and counter receptors. The MHC complexes have a large variety of applications that include targeting of high affinity receptors (e.g. hormone peptide receptors for insulin) on target cells. Taken together poly-ligand binding to target cells has numerous practical, clinical and scientifically uses.

[0208] Thus, the present invention provides MHC complexes which present mono-valent or multi-valent binding sites for MHC recognising cells, such as MHC complexes optionally comprising a multimerization domain, such as a scaffold or a carrier molecule, which multimerization domain have attached thereto, directly or indirectly via one or more linkers, covalently or non-covalently, one or more MHC peptide complexes. “One or more” as used herein is intended to include one as well as a plurality, such as at least 2. This applies i.a. to the MHC peptide complexes and to the binding entities of the multimerization domain. The scaffold or carrier molecule may thus have attached thereto a MHC peptide complex or a plurality of such MHC peptide complexes, and/or a linker or a plurality of linkers.

### Product

[0209] The product of the present invention is a MHC multimer as described above. As used in the description of this invention, the term “MHC multimers” will be used interchangeably with the terms MHC'mers and MHCmers, and will include any number, (larger than one) of MHC-peptide complexes, held together in a large complex by covalent or non-covalent interactions between a multimerization domain and one or more MHC-peptide complexes, and will also include the monomeric form of the MHC-peptide complex, i.e. a MHC-peptide complex that is not attached to a multimerization domain. The multimerization domain consists of one or more carriers and/or one or more scaffolds while the MHC-peptide complex consists of MHC molecule and antigenic peptide. MHC-peptide complexes may be attached to the multimerization domain through one or more linkers. A schematic representation of a MHC multimer is presented in FIG. 1.

[0210] In one preferred embodiment the MHC multimer is between 50,000 Da and 1,000,000 Da, such as from 50,000 Da to 980,000; for example from 50,000 Da to 960,000; such as from 50,000 Da to 940,000; for example from 50,000 Da to 920,000; such as from 50,000 Da to 900,000; for example from 50,000 Da to 880,000; such as from 50,000 Da to 860,000; for example from 50,000 Da to 840,000; such as from 50,000 Da to 820,000; for example from 50,000 Da to 800,000; such as from 50,000 Da to 780,000; for example from 50,000 Da to 760,000; such as from 50,000 Da to 740,000; for example from 50,000 Da to 720,000; such as from 50,000 Da to 700,000; for example from 50,000 Da to 680,000; such as from 50,000 Da to 660,000; for example from 50,000 Da to 640,000; such as from 50,000 Da to 620,000; for example from 50,000 Da to 600,000; such as from 50,000 Da to 580,000; for example from 50,000 Da to 560,000; such as from 50,000 Da to 540,000; for example from 50,000 Da to 520,000; such as from 50,000 Da to 500,000; for example from 50,000 Da to 480,000; such as from 50,000 Da to 460,000; for example from 50,000 Da to 440,000; such as from 50,000 Da to 420,000; for example from 50,000 Da to 400,000; such as from 50,000 Da to 380,000; for example from 50,000 Da to 360,000; such as from 50,000 Da to 340,000; for example from 50,000 Da to 320,000; such as from 50,000 Da to 300,000; for example from 50,000 Da to 280,000; such as from 50,000 Da to 260,000; for example from 50,000 Da to 240,000; such as from 50,000 Da to 220,000; for example from 50,000 Da to 200,000; such as from 50,000 Da to 180,000; for example from 50,000 Da to 160,000; such as from 50,000 Da to 140,000; for example from 50,000 Da to 120,000; such as from 50,000 Da to 100,000; for example from 50,000 Da to 80,000; such as from 50,000 Da to 60,000; such as from 100,000 Da to 980,000; for example from 100,000 Da to 960,000; such as from 100,000 Da to 940,000; for example from 100,000 Da to 920,000; such as from 100,000 Da to 900,000; for example from 100,000 Da to 880,000; such as from 100,000 Da to 860,000; for example from 100,000 Da to 840,000; such as from 100,000 Da to 820,000; for example from 100,000 Da to 800,000; such as from 100,000 Da to 780,000; for example from 100,000 Da to 760,000; such as from 100,000 Da to 740,000; for example from 100,000 Da to 720,000; such as from 100,000 Da to 700,000; for example from 100,000 Da to 680,000; such as from 100,000 Da to 660,000; for example from 100,000 Da to 640,000; such as from 100,000 Da to 620,000; for example from 100,000 Da to 600,000; such as from 100,000 Da to 580,000; for example from 100,000 Da to 560,000; such as from 100,000 Da to 540,000; for example from 100,000 Da to 520,000; such as from 100,000 Da to 500,000; for example from 100,000 Da to 480,000; such as from 100,000 Da to 460,000; for example from 100,000 Da to 440,000; such as from 100,000 Da to 420,000; for example from 100,000 Da to 400,000; such as from 100,000 Da to 380,000; for example from 100,000 Da to 360,000; such as from 100,000 Da to 340,000; for example from 100,000 Da to 320,000; such as from 100,000 Da to 300,000; for example from 100,000 Da to 280,000; such as from 100,000 Da to 260,000; for example from 100,000 Da to 240,000; such as from 100,000 Da to 220,000; for example from 100,000 Da to 200,000; such as from 100,000 Da to 180,000; for example from 100,000 Da to 160,000; such as from 100,000 Da to 140,000; for example from 100,000 Da to 120,000; such as from 150,000 Da to 980,000; for example from 150,000 Da to 960,000; such as from 150,000 Da to 940,000; for example from 150,000 Da to 920,000; such as from 150,000 Da to 900,000; for example from 150,000 Da to 880,000; such as from 150,000 Da to 860,000; for example from 150,000 Da to 840,000; such as from 150,000 Da to 820,000; for example from 150,000 Da to 800,000; such as from 150,000 Da to 780,000; for example from 150,000 Da to 760,000; such as from 150,000 Da to 740,000; for example from 150,000 Da to 720,000; such as from 150,000 Da to 700,000; for example from 150,000 Da to 680,000; such as from 150,000 Da to 660,000; for example from 150,000 Da to 640,000; such as from 150,000 Da to 620,000; for example from 150,000 Da to 600,000; such as from 150,000 Da to 580,000; for example from 150,000 Da to 560,000; such as from 150,000 Da to 540,000; for example from 150,000 Da to 520,000; such as from 150,000 Da to 500,000; for example from 150,000 Da to 480,000; such as from 150,000 Da to 460,000; for example from 150,000 Da to 440,000; such as from 150,000 Da to 420,000; for example from 150,000 Da to 400,000; such as from 150,000 Da to 380,000; for example from 150,000 Da to 360,000; such as from 150,000 Da to 340,000; for example from 150,000 Da to 320,000; such as from 150,000 Da to 300,000; for example from 150,000 Da to 280,000; such as from 150,000 Da to 260,000; for example from 150,000 Da to 240,000; such as from 150,000 Da to 220,000; for example from 150,000 Da to 200,000; such as from 150,000 Da to 180,000; for example from 150,000 Da to 160,000.

[0211] In another preferred embodiment the MHC multimer is between 1,000,000 Da and 3,000,000 Da, such as from 1,000,000 Da to 2,800,000; for example from 1,000,000 Da to 2,600,000; such as from 1,000,000 Da to 2,400,000; for example from 1,000,000 Da to 2,200,000; such as from 1,000,000 Da to 2,000,000; for example from 1,000,000 Da to 1,800,000; such as from 1,000,000 Da to 1,600,000; for example from 1,000,000 Da to 1,400,000.

[0212] In the following it is described how to generate the product of the present invention.

### Number of MHC Complexes Per Multimer

[0213] A non-exhaustive list of possible MHC mono- and multimers illustrates the possibilities. n indicates the number of MHC complexes comprised in the multimer:

a) n=1, Monomers
b) n=2, Dimers, multimerization can be based on IgG scaffold, SA with two MHC's, coiled-coil dimerization e.g. Fos.Jun dimerization
c) n=3, Trimers, multimerization can be based on SA as scaffold with three MHC's, TNFalpha-MHC hybrids, triplex DNA-MHC konjugates or other trimer structures
d) n=4, Tetramers, multimerization can be based on SA with all four binding sites occupied by MHC molecules or on dimeric IgA
e) n=5, Pentamers, multimerization can take place around a pentameric coil-coil structure
f) n=6, Hexamers
g) n=7, Heptamers
h) n=8-12, Octa-dodecamers, multimerization can take place using Streptactin
i) n=10, Decamers, multimerization could take place using IgM
j) 1<n<100, Dextramers, as multimerization domain polymers such as polypeptide, polysaccharides and Dextrans can be used.
k) 1<n<1000, Multimerization make use of DC, APC, micelles, liposomes, beads, surfaces e.g. microtiterplate, tubes, microarray devices, micro-fluidic systems
l) 1<n, n in billions or trillions or higher, multimerization take place on beads, and surfaces e.g. microtiterplate, tubes, microarray devices, micro-fluidic systems

### MHC Origin

[0214] Any of the three components of a MHC complex can be of any of the below mentioned origins.

[0215] The list is non-exhaustive. A complete list would encompass all Chordate species. By origin is meant that the sequence is identical or highly homologous to a naturally occurring sequence of the specific species.

### List of Origins:

[0216] Human
[0217] Mouse
[0218] Primate
   [0219] Chimpansee
   [0220] Gorilla
   [0221] Orang Utan
[0222] Monkey
   [0223] Macaques
[0224] Porcine (Swine/Pig)
[0225] Bovine (Cattle/Antilopes)
[0226] Equine (Horse)
[0227] Camelides (Camels)
[0228] Ruminants (Deears)
[0229] Canine (Dog)
[0230] Feline (Cat)
[0231] Bird
   [0232] Chicken
   [0233] Turkey
[0234] Fish
[0235] Reptiles
[0236] Amphibians

### Generation of MHC Multimers

[0237] Different approaches to the generation of various types of MHC multimers are described in U.S. Pat. No. 5,635,363 (Altmann et al.), patent application WO 02/072631 A2 (Winther et al.), patent application WO 99/42597, US patent 2004209295, U.S. Pat. No. 5,635,363, and is described elsewhere in the present patent application as well. In brief, MHC multimers can be generated by first expressing and purifying the individual protein components of the MHC protein, and then combining the MHC protein components and the peptide, to form the MHC-peptide complex. Then an appropriate number of MHC-peptide complexes are linked together by covalent or non-covalent bonds to a multimerization domain. This can be done by chemical reactions between reactive groups of the multimerization domain (e.g. vinyl sulfone functionalities on a dextran polymer) and reactive groups on the MHC protein (e.g. amino groups on the protein surface), or by non-covalent interaction between a part of the MHC protein (e.g. a biotinylated peptide component) and the multimerization domain (e.g. four binding sites for biotin on the strepavidin tetrameric protein). As an alternative, the MHC multimer can be formed by the non-covalent association of amino acid helices fused to one component of the MHC protein, to form a pentameric MHC multimer, held together by five helices in a coiled-coil structure making up the multimerization domain.

[0238] Appropriate chemical reactions for the covalent coupling of MHC and the multimerization domain include nucleophilic substitution by activation of electrophiles (e.g. acylation such as amide formation, pyrazolone formation, isoxazolone formation; alkylation; vinylation; disulfide formation), addition to carbon-hetero multiple bonds (e.g. alkene formation by reaction of phosphonates with aldehydes or ketones; arylation; alkylation of arenes/hetarenes by reaction with alkyl boronates or enolethers), nucleophilic substitution using activation of nucleophiles (e.g. condensations; alkylation of aliphatic halides or tosylates with enolethers or enamines), and cycloadditions.

[0239] Appropriate molecules, capable of providing non covalent interactions between the multimerization domain and the MHC-peptide complex, involve the following molecule pairs and molecules: streptavidin/biotin, avidin/biotin, antibody/antigen, DNA/DNA, DNA/PNA, DNA/RNA, PNA/PNA, LNA/DNA, leucine zipper e.g. Fos/Jun, IgG dimeric protein, IgM multivalent protein, acid/base coiled-coil helices, chelate/metal ion-bound chelate, streptavidin (SA) and avidin and derivatives thereof, biotin, immunoglobulins, antibodies (monoclonal, polyclonal, and recombinant), antibody fragments and derivatives thereof, leucine zipper domain of AP-1 (jun and fos), hexa-his (metal chelate moiety), hexa-hat GST (glutathione S-transferase) glutathione affinity, Calmodulin-binding peptide (CBP), Strep-tag, Cellulose Binding Domain, Maltose Binding Protein, S-Peptide Tag, Chitin Binding Tag, Immunoreactive Epitopes, Epitope Tags, E2Tag, HA Epitope Tag, Myc Epitope, FLAG Epitope, AU1 and AU5 Epitopes, Glu-Glu Epitope, KT3 Epitope, IRS Epitope, Btag Epitope, Protein Kinase-C Epitope, VSV Epitope, lectins that mediate binding to a diversity of compounds, including carbohydrates, lipids and proteins, e.g. Con A (Canavalia ensiformis) or WGA (wheat germ agglutinin) and tetranectin or Protein A or G (antibody affinity). Combinations of such binding entities are also comprised. In particular, when the MHC complex is tagged, the binding entity can be an “anti-tag”. By “anti-tag” is meant an antibody binding to the tag and any other molecule capable of binding to such tag.

### Generation of Components of MHC

[0240] When employing MHC multimers for diagnostic purposes, it is preferable to use a MHC allele that corresponds to the tissue type of the person or animal to be diagnosed. Once the MHC allele has been chosen, a peptide derived from the antigenic protein may be chosen. The choice will depend on factors such as known or expected binding affinity of the MHC protein and the various possible peptide fragments that may be derived from the full sequence of the antigenic peptide, and will depend on the expected or known binding affinity and specificity of the MHC-peptide complex for the TCR. Preferably, the affinity of the peptide for the MHC molecule, and the affinity and specificity of the MHC-peptide complex for the TCR, should be high.

[0241] Similar considerations apply to the choice of MHC allele and peptide for therapeutic and vaccine purposes. In addition, for some of these applications the effect of binding the MHC multimer to the TCR is also important. Thus, in these cases the effect on the T-cell's general state must be considered, e.g. it must be decided whether the desired end result is apoptosis or proliferation of the T-cell.

[0242] Likewise, it must be decided whether stability is important. For some applications low stability may be an advantage, e.g. when a short-term effect is desired; in other instances, a long-term effect is desired and MHC multimers of high stability is desired. Stabilities of the MHC protein and of the MHC-peptide complex may be modified as described elsewhere herein.

[0243] Finally, modifications to the protein structure may be advantageous for some diagnostics purposes, because of e.g. increased stability, while in for vaccine purposes modifications to the MHC protein structure may induce undesired allergenic responses.

### Generation of Protein Chains of MHC

### Generation of MHC Class I Heavy Chain and 132-Microglobulin

[0244] MHC class I heavy chain (HC) and β2-mircroglobulin (β2m) can be obtained from a variety of sources.
[0245] a) Natural sources by means of purification from eukaryotic cells naturally expressing the MHC class 1 or β2m molecules in question.
[0246] b) The molecules can be obtained by recombinant means e.g. using.
   [0247] a. in vitro translation of mRNA obtained from cells naturally expressing the MHC or β2m molecules in question
   [0248] b. by expression and purification of HC and/or β2m gene transfected cells of mammalian, yeast, bacterial or other origin. This last method will normally be the method of choise. The genetic material used for transfection/transformation can be:
      [0249] i. of natural origin isolated from cells, tissue or organisms
      [0250] ii. of synthetical origin i.e. synthetic genes identical to the natural DNA sequence or it could be modified to introduce molecular changes or to ease recombinant expression.
      [0251] The genetic material can encode all or only a fragment of β2m, all or only a fragment of MHC class 1 heavy chain. Of special interest are MHC class 1 heavy chain fragments consisting of, the complete chain minus the intramembrane domain, a chain consisting of only the extracellular α1 and α2 class 1 heavy chain domains, or any of the mentioned β2m and heavy chain fragments containing modified or added designer domain(s) or sequence(s).

### Generation of MHC Class 2α- and β-Chains

[0252] MHC class 2 α- and β-chains can be obtained from a variety of sources:
[0253] a) Natural sources by means of purification from eukaryotic cells naturally expressing the MHC class 2 molecules in question.
[0254] b) By recombinant means e.g. using:
   [0255] a. in vitro translation of mRNA obtained from cells naturally expressing the MHC class 2 molecules in question
   [0256] b. By purification from MHC class 2 gene transfected cells of mammalian, yeast, bacterial or other origin. This last method will normally be the method of choise. The genetic material used for transfection/transformation can be
      [0257] i. of natural origin isolated from cells, tissue or organisms
      [0258] ii. of synthetical origin i.e. synthetic genes identical to the natural DNA sequence or it could be modified to introduce molecular changes or to ease recombinant expression.
      [0259] The genetic material can encode all or only a fragment of MHC class 2 α- and β-chains. Of special interest are MHC class 2 α- and β-chain fragments consisting of, the complete α- and β-chains minus the intramembrane domains of either or both chains; and α- and β-chains consisting of only the extracellular domains of either or both, i.e α1 plus α2 and β1 plus β2 domains, respectively.
      [0260] The genetic material can be modified to encode the interesting MHC class 2 molecule fragments consisting of domains starting from the amino terminal in consecutive order, MHC class 2 β1 plus MHC class 2 α1 plus MHC class 1 α3 domains or in alternative order, MHC class 2 α1 plus MHC class 2 β1 plus MHC class 1 α3 domains.
      [0261] Lastly, the genetic material can encode any of the above mentioned MHC class 2 α- and β-chain molecules or fragments containing modified or added designer domain(s) or sequence(s).
[0262] c) The MHC material may also be of exclusively synthetic origin manufactured by solid phase protein synthesis. Any of the above mentioned molecules can be made this way.

### Modified MHC I or MHC II Complexes

[0263] MHC I and MHC II complexes modified in any way as described above, can bind TCR. Modifications include mutations (substitutions, deletions or insertions of natural or non-natural amino acids, or any other organic molecule. The mutations are not limited to those that increase the stability of the MHC complex, and could be introduced anywhere in the MHC complex. One example of special interest is mutations introduced in the α3 subunit of MHC I heavy chain. The α3-subunit interacts with CD8 molecules on the surface of T cells. To minimize binding of MHC multimer to CD8 molecules on the surface of non-specific T cells, amino acids in α3 domain involved in the interaction with CD8 can be mutated. Such a mutation can result in altered or abrogated binding of MHC to CD8 molecules. Another example of special interest is mutations in areas of the β2-domain of MHC II molecules responsible for binding CD4 molecules.

[0264] Another embodiment is chemically modified MHC complexes where the chemical modification could be introduced anywhere in the complex, e.g. a MHC complex where the peptide in the peptide-binding cleft has a dinitrophenyl group attached.

[0265] Modified MHC complexes could also be MHC I or MHC II fusion proteins where the fusion protein is not necessarily more stable than the native protein. Of special interest is MHC complexes fused with genes encoding an amino acid sequence capable of being biotinylated with a Bir A enzyme (Schatz, P. J., (1993), Biotechnology 11(10):1138-1143). This biotinylation sequence could be fused with the COOH-terminal of β2m or the heavy chain of MHC I molecules or the COOH-terminal of either the α-chain or β-chain of MHC II. Similarly, other sequences capable of being enzymatically or chemically modified, can be fused to the NH₂ or COOH-terminal ends of the MHC complex.

### Stabilization of Empty MHC Complexes and MHC-Peptide Complexes.

[0266] Classical MHC complexes are in nature embedded in the membrane. A preferred embodiment includes multimers comprising a soluble form of MHC II or I where the transmembrane and cytosolic domains of the membrane-anchored MHC complexes are removed. The removal of the membrane-anchoring parts of the molecules can influence the stability of the MHC complexes. The stability of MHC complexes is an important parameter when generating and using MHC multimers.

[0267] MHC I complexes consist of a single membrane-anchored heavy chain that contains the complete peptide binding groove and is stable in the soluble form when complexed with β2m. The long-term stability is dependent on the binding of peptide in the peptide-binding groove. Without a peptide in the peptide binding groove the heavy chain and β2m tend to dissociate. Similarly, peptides with high affinity for binding in the peptide-binding groove will typically stabilize the soluble form of the MHC complex while peptides with low affinity for the peptide-binding groove will typically have a smaller stabilizing effect.

[0268] In contrast, MHC II complexes consist of two membrane-anchored chains of almost equal size. When not attached to the cell membrane the two chains tend to dissociate and are therefore not stable in the soluble form unless a high affinity peptide is bound in the peptide-binding groove or the two chains are held together in another way.

[0269] In nature MHC I molecules consist of a heavy chain combined with β2m, and a peptide of typically 8-11 amino acids. Herein, MHC I molecules also include molecules consisting of a heavy chain and β2m (empty MHC), or a heavy chain combined with a peptide or a truncated heavy chain comprising α1 and α2 subunits combined with a peptide, or a full-length or truncated heavy chain combined with a full-length or truncated β2m chain. These MHC I molecules can be produced in E. coli as recombinant proteins, purified and refolded in vitro (Garboczi et al., (1992), Proc. Natl. Acad. Sci. 89, 3429-33). Alternatively, insect cell systems or mammalian cell systems can be used. To produce stable MHC I complexes and thereby generate reliable MHC I multimers several strategies can be followed. Stabilization strategies for MHC I complexes are described in the following.

### Stabilization Strategies for MHC I Complexes

[0270] Generation of covalent protein-fusions.
[0271] MHC I molecules can be stabilized by introduction of one or more linkers between the individual components of the MHC I complex. This could be a complex consisting of a heavy chain fused with β2m through a linker and a soluble peptide, a heavy chain fused to β2m through a linker, a heavy chain/β2m dimer covalently linked to a peptide through a linker to either heavy chain or β2m, and where there can or can not be a linker between the heavy chain and β2m, a heavy chain fused to a peptide through a linker, or the α1 and α2 subunits of the heavy chain fused to a peptide through a linker. In all of these example protein-fusions, each of the heavy chain, β2m and the peptide can be truncated.
[0272] The linker could be a flexible linker, e.g. made of glycine and serine and e.g. between 5-20 residues long. The linker could also be rigid with a defined structure, e.g. made of amino acids like glutamate, alanine, lysine, and leucine creating e.g. a more rigid structure.
[0273] In heavy chain-β2m fusion proteins the COOH terminus of β2m can be covalently linked to the NH₂ terminus of the heavy chain, or the NH₂ terminus of β2m can be linked to the COOH terminus of the heavy chain. The fusion-protein can also comprise a β2m domain, or a truncated β2m domain, inserted into the heavy chain, to form a fusion-protein of the form “heavy chain (first part)-β2m-heavy chain (last part)”.
[0274] Likewise, the fusion-protein can comprise a heavy chain domain, or a truncated heavy chain, inserted into the β2m chain, to form a fusion-protein of the form “β2m(first part)-heavy chain-β2m(last part)”.
[0275] In peptide-β2m fusion proteins the COOH terminus of the peptide is preferable linked to the NH₂ terminus of β2m but the peptide can also be linked to the COOH terminal of β2m via its NH₂ terminus In heavy chain-peptide fusion proteins it is preferred to fuse the NH₂ terminus of the heavy chain to the COOH terminus of the peptide, but the fusion can also be between the COOH terminus of the heavy chain and the NH₂ terminus of the peptide. In heavy chain-β2m-peptide fusion proteins the NH₂ terminus of the heavy chain can be fused to the COOH terminus of β2m and the NH₂ terminus of β2m can be fused to the COOH terminus of the peptide.
[0276] Non-covalent stabilization by binding to an unnatural component
[0277] Non-covalent binding of unnatural components to the MHC I complexes can lead to increased stability. The unnatural component can bind to both the heavy chain and the β2m, and in this way promote the assemble of the complex, and/or stabilize the formed complex. Alternatively, the unnatural component can bind to either β2m or heavy chain, and in this way stabilize the polypeptide in its correct conformation, and in this way increase the affinity of the heavy chain for β2m and/or peptide, or increase the affinity of β2m for peptide.
[0278] Here, unnatural components mean antibodies, peptides, aptamers or any other molecule with the ability to bind peptides stretches of the MHC complex. Antibody is here to be understood as truncated or full-length antibodies (of isotype IgG, IgM, IgA, IgE), Fab, scFv or bi-Fab fragments or diabodies.
[0279] An example of special interest is an antibody binding the MHC I molecule by interaction with the heavy chain as well as β2m. The antibody can be a bispecific antibody that binds with one arm to the heavy chain and the other arm to the β2m of the MHC complex. Alternatively the antibody can be monospecific, and bind at the interface between heavy chain and β2m.
[0280] Another example of special interest is an antibody binding the heavy chain but only when the heavy chain is correct folded. Correct folded is here a conformation where the MHC complex is able to bind and present peptide in such a way that a restricted T cell can recognize the MHC-peptide complex and be activated. This type of antibody can be an antibody like the one produced by the clone W6/32 (M0736 from Dako, Denmark) that recognizes a conformational epitope on intact human and some monkey MHC complexes containing β2m, heavy chain and peptide.
[0281] Generation of modified proteins or protein components
[0282] One way to improve stability of a MHC I complex am to increase the affinity of the binding peptide for the MHC complex. This can be done by mutation/substitution of amino acids at relevant positions in the peptide, by chemical modifications of amino acids at relevant positions in the peptide or introduction by synthesis of non-natural amino acids at relevant positions in the peptide. Alternatively, mutations, chemical modifications, insertion of natural or non-natural amino acids or deletions could be introduced in the peptide binding cleft, i.e. in the binding pockets that accommodate peptide side chains responsible for anchoring the peptide to the peptide binding cleft. Moreover, reactive groups can be introduced into the antigenic peptide; before, during or upon binding of the peptide, the reactive groups can react with amino acid residues of the peptide binding cleft, thus covalently linking the peptide to the binding pocket.
[0283] Mutations/substitutions, chemical modifications, insertion of natural or non-natural amino acids or deletions could also be introduced in the heavy chain and/or β2m at positions outside the peptide-binding cleft. By example, it has been shown that substitution of XX with YY in position nn of human β₂m enhance the biochemical stability of MHC Class I molecule complexes and thus may lead to more efficient antigen presentation of subdominant peptide epitopes.
[0284] A preferred embodiment is removal of “unwanted cysteine residues” in the heavy chain by mutation, chemical modification, amino acid exchange or deletion. “Unwanted cysteine residues” is here to be understood as cysteines not involved in the correct folding of the final MHC I molecule. The presence of cysteine not directly involved in the formation of correctly folded MHC I molecules can lead to formation of intra molecular disulfide bridges resulting in a non correct folded MHC complex during in vitro refolding.
[0285] Another method for covalent stabilization of MHC I complex am to covalently attach a linker between two of the subunits of the MHC complex. This can be a linker between peptide and heavy chain or between heavy chain and beta2 microglobulin.
   Stabilization with Soluble Additives.
[0286] The stability of proteins in aqueous solution depends on the composition of the solution. Addition of salts, detergents organic solvent, polymers ect. can influence the stability. Of special interest are additives that increase surface tension of the MHC molecule without binding the molecule. Examples are sucrose, mannose, glycine, betaine, alanine, glutamine, glutamic acid and ammoniumsulfate. Glycerol, mannitol and sorbitol are also included in this group even though they are able to bind polar regions.
[0287] Another group of additives of special interest are able to increase surface tension of the MHC molecule and simultaneously interact with charged groups in the protein. Examples are MgSO₄, NaCl, polyethylenglycol, 2-methyl-2,4-pentandiol and guanidiniumsulfate.
[0288] Correct folding of MHC I complexes is very dependent on binding of peptide in the peptide-binding cleft and the peptide binding stabilises correct conformation. Addition of molar excess of peptide will force the equilibrium against correct folded MHC-peptide complexes. Likewise is excess β2m also expected to drive the folding process in direction of correct folded MHC I complexes. Therefore peptide identical to the peptide bound in the peptide-binding cleft and β2m are included as stabilizing soluble additives.
[0289] Other additives of special interest for stabilization of MHC I molecules are BSA, fetal and bovine calf serum or individual protein components in serum with a protein stabilizing effect.
[0290] All of the above mentioned soluble additives could be added to any solution containing MHC I molecules in order to increase the stability of the molecule. That could be during the refolding process, to the soluble monomer or to a solutions containing MHC I bound to a carrier.

[0291] MHC II molecules as used herein are defined as classical MHC II molecule consisting of a α-chain and a β-chain combined with a peptide. It could also be a molecule only consisting of α-chain and β-chain (α/β dimer or empty MHC II), a truncated α-chain (e.g. α1 domain alone) combined with full-length β-chain either empty or loaded with a peptide, a truncated β-chain (e.g. β1 domain alone) combined with a full-length α-chain either empty or loaded with a peptide or a truncated α-chain combined with a truncated β-chain (e.g. α1 and β1 domain) either empty or loaded with a peptide.

[0292] In contrast to MHC I molecules MHC II molecules are not easily refolded in vitro. Only some MHC II alleles may be produced in E. coli followed by refolding in vitro.

[0293] Therefore preferred expression systems for production of MHC II molecules are eukaryotic systems where refolding after expression of protein is not necessary. Such expression systems could be stable Drosophila cell transfectants, baculovirus infected insect cells, CHO cells or other mammalian cell lines suitable for expression of proteins.

[0294] Stabilization of soluble MHC II molecules is even more important than for MHC I molecules since both α- and β-chain are participants in formation of the peptide binding groove and tend to dissociate when not embedded in the cell membrane.

### Stabilization Strategies for MHC II Complexes

[0295] Generation of covalent protein-fusions.
[0296] MHC II complexes can be stabilized by introduction of one or more linkers between the individual components of the MHC II complex. This can be a α/β dimer with a linker between α-chain and β-chain; a α/β dimer covalently linked to the peptide via a linker to either the α-chain or β-chain; a α/β dimer, covalently linked by a linker between the α-chain and β-chain, and where the dimer is covalently linked to the peptide; a α/β dimer with a linker between α-chain and β-chain, where the dimer is combined with a peptide covalently linked to either α-chain or β-chain.
[0297] The linker can be a flexible linker, e.g. made of glycine and serine, and is typically between 5-20 residues long, but can be shorter or longer. The linker can also be more rigid with a more defined structure, e.g. made of amino acids like glutamate, alanine, lysine, and leucine.
[0298] The peptides can be linked to the NH₂— or COOH-terminus of either α-chain or β-chain. Of special interest are peptides linked to the NH₂-terminus of the β-chain via their COOH-terminus, since the linker required is shorter than if the peptide is linked to the COOH-terminus of the β-chain.
[0299] Linkage of α-chain to β-chain can be via the COOH-terminus of the β-chain to the NH₂-terminus of the α-chain or from the COOH-terminus of the α-chain to the NH₂-terminus of the β-chain.
[0300] In a three-molecule fusion protein consisting of α-chain, β-chain and peptide a preferred construct is where one linker connect the COOH-terminus of the β-chain with the NH₂-terminus of the α-chain and another linker connects the COOH-terminal of the peptide with the NH₂-terminal of the β-chain. Alternatively one linker joins the COOH-terminus of the α-chain with the NH₂-terminus of the β-chain and the second linker joins the NH₂-terminus of the peptide with the COOH-terminus of the β-chain. The three peptides of the MHC complex can further be linked as described above for the three peptides of the MHC complex, including internal fusion points for the proteins.
[0301] Non-covalent stabilization by binding ligand.
[0302] Non-covalent binding of ligands to the MHC II complex can promote assembly of α- and β-chain by bridging the two chains, or by binding to either of the α- or β-chains, and in this way stabilize the conformation of α or β, that binds β or α, respectively, and/or that binds the peptide. Ligands here mean antibodies, peptides, aptamers or any other molecules with the ability to bind proteins.
[0303] A particular interesting example is an antibody binding the MHC complex distal to the interaction site with TCR, i.e. distal to the peptide-binding cleft. An antibody in this example can be any truncated or full length antibody of any isotype (e.g. IgG, IgM, IgA or IgE), a bi-Fab fragment or a diabody. The antibody could be bispecific with one arm binding to the α-chain and the other arm binding to the β-chain. Alternatively the antibody could be monospecific and directed to a sequence fused to the α-chain as well as to the β-chain.
[0304] Another example of interest is an antibody binding more central in the MHC II molecule, but still interacting with both α- and β-chain. Preferable the antibody binds a conformational epitope, thereby forcing the MHC molecule into a correct folded configuration. The antibody can be bispecific binding with one arm to the α-chain and the other arm to the β-chain. Alternatively the antibody is monospecific and binds to a surface of the complex that involves both the α- and β-chain, e.g. both the α2- and β2-domain or both the α1- and β1-domain.
[0305] The antibodies described above can be substituted with any other ligand that binds at the α/β-chain interface, e.g. peptides and aptamers. The ligand can also bind the peptide, although, in this case it is important that the ligand does not interfere with the interaction of the peptide or binding cleft with the TCR.
[0306] Non-covalent stabilization by induced multimerization.
[0307] In nature the anchoring of the α- and β-chains in the cell membrane stabilizes the MHC II complexes considerably. As mentioned above, a similar concept for stabilization of the α/β-dimer was employed by attachment of the MHC II chains to the Fc regions of an antibody, leading to a stable α/β-dimer, where α and β are held together by the tight interactions between two Fc domains of an antibody. Other dimerization domains can be used as well. In one other example of special interest MHC II molecules are incorporated into artificial membrane spheres like liposomes or lipospheres. MHC II molecules can be incorporated as monomers in the membrane or as dimers like the MHC II-antibody constructs describes above. In addition to stabilization of the MHC II complex an increased avidity is obtained. The stabilization of the dimer will in most cases also stabilize the trimeric MHC-peptide complex.
[0308] Induced multimerization can also be achieved by biotinylation of α- as well as β-chain and the two chains brought together by binding to streptavidin. Long flexible linkers such as extended glycine-serine tracts can be used to extend both chains, and the chains can be biotinylated at the end of such extended linkers. Then streptavidin can be used as a scaffold to bring the chains together in the presence of the peptide, while the flexible linkers still allow the chains to orientate properly.
[0309] Generation of modified proteins or protein components
[0310] Stability of MHC II complexes can be increased by covalent modifications of the protein. One method is to increase the affinity of the peptide for the MHC complex. This can be done by exchange of the natural amino acids with other natural or non-natural amino acids at relevant positions in the peptide or by chemical modifications of amino acids at relevant positions in the peptide. Alternatively, mutations, chemical modifications, insertion of natural or non-natural amino acids or deletions can be introduced in the peptide-binding cleft.
[0311] Mutations, chemical modifications, insertion of natural or non-natural amino acids or deletions can alternatively be introduced in α- and/or β-chain at positions outside the peptide-binding cleft.
[0312] In this respect a preferred embodiment is to replace the hydrophobic transmembrane regions of α-chain and β-chain by leucine zipper dimerisation domains (e.g. Fos-Jun leucine zipper; acid-base coiled-coil structure) to promote assembly of α-chain and β-chain.

[0313] Another preferred embodiment is to introduce one or more cysteine residues by amino acid exchange at the COOH-terminal of both α-chain and β-chain, to create disulfide bridges between the two chains upon assembly of the MHC complex.
[0314] Another embodiment is removal of “unwanted cysteine residues” in either of the chains by mutation, chemical modification, amino acid exchange or deletion. “Unwanted cysteine residues” is here to be understood as cysteines not involved in correct folding of the MHC II-peptide complex. The presence of cysteines not directly involved in the formation of correctly folded MHC II complexes can lead to formation of intra molecular disulfide bridges and incorrectly folded MHC complexes.
[0315] MHC II complexes can also be stabilized by chemically linking together the subunits and the peptide. That can be a linker between peptide and α-chain, between peptide and β-chain, between α-chain and β-chain, and combination thereof.
[0316] Such linkages can be introduced prior to folding by linking two of the complex constituents together, then folding this covalent hetero-dimer in the presence of the third constituent. An advantage of this method is that it only requires complex formation between two, rather than three species.

[0317] Another possibility is to allow all three constituents to fold, and then to introduce covalent cross-links on the folded MHC-complex, stabilizing the structure. An advantage of this method is that the two chains and the peptide will be correctly positioned relatively to each other when the cross linkages are introduced.
[0318] Stabilization with soluble additives.
[0319] Salts, detergents, organic solvent, polymers and any other soluble additives can be added to increase the stability of MHC complexes. Of special interest are additives that increase surface tension of the MHC complex. Examples are sucrose, mannose, glycine, betaine, alanine, glutamine, glutamic acid and ammonium sulfate. Glycerol, mannitol and sorbitol are also included in this group even though they are able to bind polar regions.
[0320] Another group of additives of special interest increases surface tension of the MHC complex and simultaneously can interact with charged groups in the protein. Examples are MgSO₄, NaCl, polyethylenglycol, 2-methyl-2,4-pentanediol and guanidiniumsulphate.
[0321] Correct formation of MHC complexes is dependent on binding of peptide in the peptide-binding cleft; the bound peptide appears to stabilize the complex in its correct conformation. Addition of molar excess of peptide will force the equilibrium towards correctly folded MHC-peptide complexes. Likewise, excess β2m is also expected to drive the folding process in direction of correctly folded MHC complexes. Therefore peptide identical to the peptide bound in the peptide-binding cleft and β2m can be included as stabilizing soluble additives.
[0322] Other additives of special interest for stabilization of MHC complexes are BSA, fetal and bovine calf serum, and other protein components in serum with a protein stabilizing effect.
[0323] All of the above mentioned soluble additives could be added to any solution containing MHC complexes in order to increase the stability of the molecule. This can be during the refolding process, to the formed MHC complex or to a solution of MHC multimers comprising several MHC complexes That could be to the soluble monomer, to a solution containing MHC II bound to a carrier or to solutions used during analysis of MHC II specific T cells with MHC II multimers.
[0324] Other additives of special interest for stabilization of MHC II molecules are BSA, fetal and bovine calf serum or individual protein components in serum with a protein stabilizing effect.
[0325] All of the above mentioned soluble additives could be added to any solution containing MHC II molecules in order to increase the stability of the molecule. That could be to the soluble monomer, to a solution containing MHC II bound to a carrier or to solutions used during analysis of MHC II specific T cells with MHC II multimers.
[0326] Chemically modified MHC I and II complexes
[0327] There are a number of amino acids that are particularly reactive towards chemical cross linkers. In the following, chemical reactions are described that are particularly preferable for the cross-linking or modification of MHC I or MHC II complexes.
[0328] The amino group at the N-terminal of both chains and of the peptide, as well as amino groups of lysine side chains, are nucleophilic and can be used in a number of chemical reactions, including nucleophilic substitution by activation of electrophiles (e.g. acylation such as amide formation, pyrazolone formation, isoxazolone formation; alkylation; vinylation; disulfide formation), addition to carbon-hetero multiple bonds (e.g. alkene formation by reaction of phosphonates with aldehydes or ketones; arylation; alkylation of arenes/hetarenes by reaction with alkyl boronates or enolethers), nucleophilic substitution using activation of nucleophiles (e.g. condensations; alkylation of aliphatic halides or tosylates with enolethers or enamines), and cycloadditions. Example reagents that can be used in a reaction with the amino groups are activated carboxylic acids such as NHS-ester, tetra and pentafluoro phenolic esters, anhydrides, acid chlorides and fluorides, to form stable amide bonds. Likewise, sulphonyl chlorides can react with these amino groups to form stable sulphone-amides. Iso-Cyanates can also react with amino groups to form stable ureas, and isothiocyanates can be used to introduce thio-urea linkages.
[0329] Aldehydes, such as formaldehyde and glutardialdehyde will react with amino groups to form shift's bases, than can be further reduced to secondary amines.
[0330] The guanidino group on the side chain of arginine will undergo similar reactions with the same type of reagents.
[0331] Another very useful amino acid is cysteine. The thiol on the side chain is readily alkylated by maleimides, vinyl sulphones and halides to form stable thioethers, and reaction with other thiols will give rise to disulphides.
[0332] Carboxylic acids at the C-terminal of both chains and peptide, as well as on the side chains of glutamic and aspartic acid, can also be used to introduce cross-links. They will require activation with reagents such as carbodiimides, and can then react with amino groups to give stable amides.
[0333] Thus, a large number of chemistries can be employed to form covalent cross-links. The crucial point is that the chemical reagents are bi-functional, being capable of reacting with two amino acid residues.
[0334] They can be either homo bi-functional, possessing two identical reactive moieties, such as glutardialdehyde or can be hetero bi-functional with two different reactive moieties, such as GMBS (MaleimidoButyryloxy-Succinimide ester).
[0335] Alternatively, two or more reagents can be used; i.e. GMBS can be used to introduce maleimides on the α-chain, and iminothiolane can be used to introduce thiols on the β-chain; the malemide and thiol can then form a thioether link between the two chains. For the present invention some types of cross-links are particularly useful. The folded MHC-complex can be reacted with dextrans possessing a large number (up to many hundreds) of vinyl sulphones. These can react with lysine residues on both the α and β chains as well as with lysine residues on the peptide protruding from the binding site, effectively cross linking the entire MHC-complex. Such cross linking is indeed a favored reaction because as the first lysine residue reacts with the dextran, the MHC-complex becomes anchored to the dextran favoring further reactions between the MHC complex and the dextran multimerization domain. Another great advantage of this dextran chemistry is that it can be combined with fluorochrome labelling; i.e. the dextran is reacted both with one or several MHC-complexes and one or more fluorescent protein such as APC.
[0336] Another valuable approach is to combine the molecular biological tools described above with chemical cross linkers. As an example, one or more lysine residues can be inserted into the α-chain, juxtaposed with glutamic acids in the β-chain, where after the introduced amino groups and carboxylic acids are reacted by addition of carbodiimide. Such reactions are usually not very effective in water, unless as in this case, the groups are well positioned towards reaction. This implies that one avoids excessive reactions that could otherwise end up denaturing or changing the conformation of the MHC-complex.
[0337] Likewise a dextran multimerization domain can be cross-linked with appropriately modified MHC-complexes; i.e. one or both chains of the MHC complex can be enriched with lysine residues, increasing reactivity towards the vinylsulphone dextran. The lysine's can be inserted at positions opposite the peptide binding cleft, orienting the MHC-complexes favorably for T-cell recognition.
[0338] Another valuable chemical tool is to use extended and flexible cross-linkers. An extended linker will allow the two chains to interact with little or no strain resulting from the linker that connects them, while keeping the chains in the vicinity of each other should the complex dissociate. An excess of peptide should further favor reformation of dissociated MHC-complex.

### Other TCR Binding Molecules

[0339] MHC I and MHC II complexes bind to TCRs. However, other molecules also bind TCR. Some TCR-biding molecules are described in the following. MHC I and MHC II complexes binding to TCRs may be substituted with other molecules capable of binding TCR or molecules that have homology to the classical MHC molecules and therefore potentially could be TCR binding molecules. These other TCR binding or MHC like molecules include:

Non-Classical MHC Complexes and other MHC-Like Molecules:

[0340] Non-classical MHC complexes include protein products of MHC Ib and MHC IIb genes. MHC Ib genes encode β2m-associated cell-surface molecules but show little polymorphism in contrast to classical MHC class I genes. Protein products of MHC class Ib genes include HLA-E, HLA-G, HLA-F, HLA-H, MIC A, MIC B, ULBP-1, ULBP-2, ULBP-3 in humans and H2-M, H2-Q, H2-T and Rae1 in mice.

[0341] Non-classical MHC II molecules (protein products of MHC IIb genes) include HLA-DM, HLA-DO in humans and H2-DM and H2-DO in mice that are involved in regulation of peptide loading into MHC II molecules.

[0342] Another MHC-like molecule of special interest is the MHC I-like molecule CD1. CD1 is similar to MHC I molecules in its organization of subunits and association with β2m but presents glycolipids and lipids instead of peptides.

### Artificial Molecules Capable of Binding Specific TCRs

[0343] Of special interest are antibodies that bind TCRs. Antibodies herein include full length antibodies of isotype IgG, IgM, IgE, IgA and truncated versions of these, antibody fragments like Fab fragments and scFv. Antibodies also include antibodies of antibody fragments displayed on various supramolecular structures or solid supports, including filamentous phages, yeast, mammalian cells, fungi, artificial cells or micelles, and beads with various surface chemistries.

### Peptide Binding TCR

[0344] Another embodiment of special interest is peptides that bind TCRs. Peptides herein include peptides composed of natural, non-natural and/or chemically modified amino acids with a length of 8-20 amino acid. The peptides could also be longer than 20 amino acids or shorter than 8 amino acids. The peptides can or can not have a defined tertiary structure.

### Aptamers

[0345] Aptamers are another preferred group of TCR ligands. Aptamers are herein understood as natural nucleic acids (e.g. RNA and DNA) or unnatural nucleic acids (e.g. PNA, LNA, morpholinos) capable of binding TCR. The aptamer molecules consist of natural or modified nucleotides in various lengths.

[0346] Other TCR-binding molecules can be ankyrin repeat proteins or other repeat proteins, Avimers, or small chemical molecules, as long as they are capable of binding TCR with a dissociation constant smaller than 10⁻³ M.

### Generation of Antigenic Peptide

### Approaches and Methods for the Identification and Design of Appropriate Peptides

[0347] MHC class I molecules normally binds octa-, nona-, deca- or ondecamer (8-, 9-, 10,-11-mer) peptides in their peptide binding groove. The individual MHC class 1 alleles have individual preferences for the peptide length within the given range. MHC class 2 molecules bind peptides most often with a total length of 13-18 amino acids around a 9-mer core motif containing the important amino acid anchor residues. However the total length is not strictly defined as for most MHC class I molecules.

[0348] For some of the MHC alleles the optimal peptide length is known and also the demands for specific amino acid residues in the so called anchor positions.

[0349] To identify binding peptides derived from a specific protein for a given MHC allele it is necessary to systematically work through the amino acid sequence of the protein to identify the putative binding peptides. Although a given peptide is a binder it is not necessarily a functional T-cell epitope. Functionality needs to be confirmed by a functional analysis e.g. ELISPOT, CTL killing assay or flow cytometry assay.

[0350] A measure for binding affinity of the peptide to the MHC molecules can for some MHC molecules be found in databases such as www.syfpeithi.de; http://www-bimas.cit.nih.gov/molbio/hlabind/; www.cbs.dtu.dk/services/NetMHC/; www.cbs.dtu.dk/services/NetMHCII/

### Design of Binding Peptides

[0351] a) from Genomic DNA Sequences without Introns

[0352] When only the genomic DNA sequences are known and thereby reading frame and direction of transcription of the genes are unknown, the DNA sequence needs to be translated in all three reading frames in both directions leading to a total of six amino acid sequences for a given genome. From these amino acid sequences binding peptides can then be identified.

b) from Genomic DNA Sequences with Introns

[0353] In organisms having intron/exon gene structure the present approach will not be able to identify peptide sequence motifs that are derived by combination of amino acid sequences derived partly from two separate introns.

c) from cDNA Sequences

[0354] cDNA sequences can be translated into the actual amino acid sequences to allow peptide identification.

d) from known Amino Acid Sequences

[0355] In the case of known protein sequences these can directly be applied to software analysis for prediction of peptide epitopes.

[0356] Binding peptide sequences can be predicted from any protein sequence by either a total approach generating binding peptide sequences for potentially any MHC allele or by a directed approach using software that specifically can predict the binding peptide sequences for a subset of MHC alleles for which the binding characteristics of the peptide is known.

### Design of MHC Class 1 Binding Peptide Sequence

### a) Total Approach

[0357] The MHC class 1 binding peptide prediction is done as follows using the total approach. The actual protein sequence is split up into 8-, 9-, 10-, and 11-mer peptide sequences. This is performed by starting at amino acid position 1 identifying the first 8-mer; then move the start position by one amino acid identifying the second 8-mer; then move the start position by one amino acid, identifying the third 8-mer. This procedure continues by moving start position by one amino acid for each round of peptide identification. Generated peptides will be amino acid position 1-8, 2-9, 3-10 etc. All peptides carrying one or more stop codons are omitted for further consideration. This procedure can be carried out manually or by means of a software program (FIG. 2). This procedure is then repeated in an identical fashion for 9-, 10 and 11-mers, respectively.

### b) Directed Approach

[0358] Using a directed approach is only possible when working on prediction of peptide sequences binding to MHC class I alleles with known binding preferences. Examples of such programs are www.syfpeithi.de; www.imtech.res.in/raghava/propredl/index.html; www.cbs.dtu.dk/services/NetMHC/. Identified peptides can then be tested for biological relevance in functional assays such as Cytokine release assays, ELISPOT and CTL killing assays.

[0359] Prediction of good HLA class 1 peptide binders can be done at the HLA superfamily level even taking the combioned action of endocolic and membrane bound protease activities as well as the TAP1 and TAP2 transporter specificities into consideration using the program www.cbs.dtu.dk/services/NetCTL/.

### Design of MHC Class 2 Binding Peptide Sequence.

### a) Total Approach and b) Directed Approach

[0360] The approach to predict putative peptide binders for MHC class 2 is similar as given above for MHC class 1 binding peptide prediction. The only change is the different size of the peptides, which is preferably 13-16 amino acids long for MHC class 2. The putative binding peptide sequences only describe the central part of the peptide including the 9-mer core peptide; in other words, the peptide sequences shown represent the core of the binding peptide with a few important flanking amino acids, which in some cases may be of considerably length generating binding peptides longer than the 13-16 amino acids.

### Choice of MHC Allele

[0361] More than 600 MHC alleles (class 1 and 2) are known in humans; for many of these, the peptide binding characteristics are known. FIG. 3 presents an updated list of the HLA class 1 alleles. The frequency of the different HLA alleles varies considerably, also between different ethnic groups (FIG. 4). Thus it is of outmost importance to carefully select the MHC alleles that corresponds to the human group that one wish to study.

### Peptide Modifications

### Homologous Peptides

[0362] Predictions of the primary amino acid sequence for the binding peptides of MHC class I and class II molecules can be done as described above on the basis of the genetic information. Peptides homologous to the predicted peptide sequences may also be bound if they are sufficiently homologous i.e. are having an amino acid sequence identity greater than e.g. more than 90%, more than 80% or more than 70%. Identity being most important for the anchor residues.

[0363] Homologues MHC peptide sequences may arise from the existence of multiple strongly homologous alleles, from small insertions, deletions, inversions or substitutions.

### Uncommon Amino Acids

[0364] Peptides having un-common amino acids may be bound in the MHC groove as well. Two un-common amino acids found in nature are selenocysteine and pyrrolysine.

### Artificial Amino Acids

[0365] Artificial amino acids e.g. having the isomeric D-form may also make up isomeric D-peptides that can bind in the binding groove of the MHC molecules.

### Chemically Modified Amino Acids

[0366] Bound peptides may also contain amino acids that are chemically modified or being linked to reactive groups that can be activated to induce changes in or disrupt the peptide.

### Split or Combinatorial Peptide

[0367] A MHC binding peptide may also be of split- or combinatorial epitope origin i.e. formed by linkage of peptide fragments derived from two different peptide fragments and/or proteins. Such peptides can be the result of either genetic recombination on the DNA level or due to peptide fragment association during the complex break down of proteins during protein turnover. Possibly it could also be the result of faulty reactions during protein synthesis i.e. caused by some kind of mixed RNA handling. A kind of combinatorial peptide epitope can also be seen if a portion of a longer peptide make a loop out leaving only the terminal part of the peptide bound in the groove.

### Position in Peptide of Amino Acid Change

[0368] Any of the mentioned changes of the bound peptide amino acid sequence, can be found individually or in combination at any position of the peptide e.g. position 1, 2, 3, 4, 5, 6, etc up to n, n being the final amino acid of the peptide.

TABLE 1
Post translational modification of peptides
Protein primary structure and posttranslational modifications

| | |
|---|---|
| N-terminus | Acetylation, Formylation, Pyroglutamate, Methylation, Glycation, Myristoylation |
| | (Gly), carbamylation |
| C-terminus | Amidation, Glycosyl phosphatidylinositol (GPI), O-methylation, Glypiation, |
| | Ubiquitination, Sumoylation |
| Lysine | Methylation, Acetylation, Acylation, Hydroxylation, Ubiquitination, |
| | SUMOylation, Desmosine formation, ADP-ribosylation, Deamination and |
| | Oxidation to aldehyde |
| Cysteine | Disulfide bond, Prenylation, Palmitoylation |
| Serine/Threonine | Phosphorylation, Glycosylation |
| Tyrosine | Phosphorylation, Sulfation, Porphyrin ring linkage, Flavin linkage GFP prosthetic |
| | group (Thr-Tyr-Gly sequence) formation, Lysine tyrosine quinone (LTQ) |
| | formation, Topaquinone (TPQ) formation |
| Asparagine | Deamidation, Glycosylation |
| Aspartate | Succinimide formation |
| Glutamine | Transglutamination |
| Glutamate | Carboxylation, Methylation, Polyglutamylation, Polyglycylation |
| Arginine | Citrullination, Methylation |
| Proline | Hydroxylation |

### Post Translationally Modified Peptides

[0369] The amino acids of the MHC bound peptides can also be modified in various ways dependent on the amino acid in question or the modification can affect the amino- or carboxy-terminal end of the peptide. See table 1. Such peptide modifications are occurring naturally as the result of post translational processing of the parental protein. A non-exhaustive description of the major post translational modifications is given below, divided into three main types

### a) Involving Addition Include:

[0370] acylation, the addition of an acetyl group, usually at the N-terminus of the protein
[0371] alkylation, the addition of an alkyl group (e.g. methyl, ethyl). Methylation, the addition of a methyl group, usually at lysine or arginine residues is a type of alkylation. Demethylation involves the removal of a methyl-group.
[0372] amidation at C-terminus
[0373] biotinylation, acylation of conserved lysine residues with a biotin appendage formylation
[0374] gamma-carboxylation dependent on Vitamin K
[0375] glutamylation, covalent linkage of glutamic acid residues to tubulin and some other proteins by means of tubulin polyglutamylase
[0376] glycosylation, the addition of a glycosyl group to either asparagine, hydroxylysine, serine, or threonine, resulting in a glycoprotein. Distinct from glycation, which is regarded as a nonenzymatic attachment of sugars.
[0377] glycylation, covalent linkage of one to more than 40 glycine residues to the tubulin C-terminal tail
[0378] heme moiety may be covalently attached
[0379] hydroxylation, is any chemical process that introduces one or more hydroxyl groups (—OH) into a compound (or radical) thereby oxidizing it. The principal residue to be hydroxylated is Proline. The hydroxilation occurs at the C^{γ} atom, forming hydroxyproline (Hyp). In some cases, proline may be hydroxylated instead on its C^{β} atom. Lysine may also be hydroxylated on its C^{δ} atom, forming hydroxylysine (Hyl).
[0380] iodination (e.g. of thyroid hormones)
[0381] isoprenylation, the addition of an isoprenoid group (e.g. farnesol and geranylgeraniol)
[0382] lipoylation, attachment of a lipoate functionality, as in prenylation, GPI anchor formation, myristoylation, farnesylation, geranylation
[0383] nucleotides or derivatives thereof may be covalently attached, as in ADP-ribosylation and flavin attachment
[0384] oxidation, lysine can be oxidized to aldehyde
[0385] pegylation, addition of poly-ethylen-glycol groups to a protein. Typical reactive amino acids include lysine, cysteine, histidine, arginine, aspartic acid, glutamic acid, serine, threonine, tyrosine. The N-terminal amino group and the C-terminal carboxylic acid can also be used
[0386] phosphatidylinositol may be covalently attached
[0387] phosphopantetheinylation, the addition of a 4′-phosphopantetheinyl moiety from coenzyme A, as in fatty acid, polyketide, non-ribosomal peptide and leucine biosynthesis
[0388] phosphorylation, the addition of a phosphate group, usually to serine, tyrosine, threonine or histidine
[0389] pyroglutamate formation as a result of N-terminal glutamine self-attack, resulting in formation of a cyclic pyroglutamate group.
[0390] racemization of proline by prolyl isomerase
[0391] tRNA-mediated addition of amino acids such as arginylation
[0392] sulfation, the addition of a sulfate group to a tyrosine.
[0393] Selenoylation (co-translational incorporation of selenium in selenoproteins)

### b) Involving Addition of Other Proteins or Peptides

[0394] ISGylation, the covalent linkage to the ISG15 protein (Interferon-Stimulated Gene 15)
[0395] SUMOylation, the covalent linkage to the SUMO protein (Small Ubiquitin-related MOdifier)
[0396] ubiquitination, the covalent linkage to the protein ubiquitin.

### c) Involving Changing the Chemical Nature of Amino Acids

[0397] citrullination, or deimination the conversion of arginine to citrulline
[0398] deamidation, the conversion of glutamine to glutamic acid or asparagine to aspartic acid

[0399] The peptide modifications can occur as modification of a single amino acid or more than one i.e. in combinations. Modifications can be present on any position within the peptide i.e. on position 1, 2, 3, 4, 5,etc. for the entire length of the peptide.

### Sources of Peptides

### a) From Natural Sources

[0400] Peptides can be obtained from natural sources by enzymatic digestion or proteolysis of natural proteins or proteins derived by in vitro translation of mRNA. Peptides may also be eluted from the MHC binding groove.

### b) From Recombinant Sources

[0401] 1) as monomeric or multimeric peptide

[0402] Alternatively peptides can be produced recombinantly by transfected cells either as monomeric antigenic peptides or as multimeric (contatemeric) antigenic peptides.
[0403] 2) as part of a bigger recombinant protein

[0404] Binding peptides may also constitute a part of a bigger recombinant protein e.g. consisting of,
[0405] 2a) For MHC class 1 binding peptides,

[0406] Peptide-linker-β2m, β2m being full length or truncated;

[0407] Peptide-linker-MHC class 1 heavy chain, the heavy chain being full length or truncated. Most importantly the truncated class I heavy chain will consist of the extracellular part i.e the α1, α2, and a domains. The heavy chain fragment may also only contain the α1 and α2 domains, or al domain alone, or any fragment or full length β2m or heavy chain attached to a designer domain(s) or protein fragment(s).
[0408] 2b) For MHC class 2 binding peptides the recombinant construction can consist of,

[0409] Peptide-linker-MHC class 2-chain, full length or truncated;

[0410] Peptide-linker-MHC class 2-chain, full length or truncated;

[0411] Peptide-linker-MHC class 2-chain-linker-MHC class 2-chain, both chains can be full length or truncated, truncation may involve, omission of—and/or—chain intermembrane domain, or omission of—and/or—chain intermembrane plus cytoplasmic domains. MHC class 2 part of the construction may consist of fused domains from NH₂-terminal, MHC class 2 1 domain-MHC class 2 1 domain-constant 3 of MHC class 1, or alternatively of fused domains from NH₂-terminal, MHC class 2 1 domain-MHC class 2 1 domain-constant 3 of MHC class 1. In both cases 2m will be associated non-covalently in the folded MHC complex. 2m can also be covalently associated in the folded MHC class 2 complex if the following constructs are used from NH₂ terminal, MHC class 2 1 domain-MHC class 2 1 domain-constant 3 of MHC class 1-linker-2m, or alternatively of fused domains from NH₂-terminal, MHC class 2 1 domain-MHC class 2 1 domain-constant 3 of MHC class 1-linker-2m; the construct may also consist of any of the above MHC class 2 constructs with added designer domain(s) or sequence(s).

### c) From Chemical Synthesis

[0412] MHC binding peptide may also be chemically synthesized by solid phase or fluid phase synthesis.

Loading of the Peptide into the MHCmer

[0413] Loading of the peptides into the MHCmer being either MHC class 1 or class 2 can be performed in a number of ways depending on the source of the peptide and the MHC. MHC class 2 molecules can in principle be loaded with peptides in similar ways as MHC class 1. However, due to complex instability the most successful approach have been to make the complexes recombinant in toto in eukaryotic cells from a gene construct encoding the following form chain-flexible linker-chain-flexible linker-peptide

### a) During MHC Complex Folding

[0414] a1) as a Free Peptide

[0415] MHC class I molecules are most often loaded with peptide during assembly in vitro by the individual components in a folding reaction i.e. consisting of purified recombinant heavy chain with the purified recombinant 2 microglobulin and a peptide or a peptide mix.

a2) as Part of a Recombinant Protein Construct

[0416] Alternatively the peptide to be folded into the binding groove can be encoded together with e.g. the heavy chain or fragment hereof by a gene construct having the structure, heavy chain-flexible linker-peptide. This recombinant molecule is then folded in vitro with 2-microglobulin.

### b) by Exchange Reaction

[0417] b1) in Solution

[0418] Loading of desired peptide can also be made by an in vitro exchange reaction where a peptide already in place in the binding groove are being exchanged by another peptide species.

b2) “In Situ”

[0419] Peptide exchange reactions can also take place when the parent molecule is attached to other molecules, structures, surfaces, artificial or natural membranes and nano-particles.

b3) by Aided Exchange

[0420] This method can be refined by making the parent construct with a peptide containing a meta-stable amino acid analog that is split by either light or chemically induction thereby leaving the parent structure free for access of the desired peptide in the binding groove.

b4) by In Vivo Loading

[0421] Loading of MHC class I and II molecules expressed on the cell surface with the desired peptides can be performed by an exchange reaction. Alternatively cells can be transfected by the peptides themselves or by the mother proteins that are then being processed leading to an in vivo analogous situation where the peptides are bound in the groove during the natural cause of MHC expression by the transfected cells. In the case of professional antigen presenting cells e.g. dendritic cells, macrophages, Langerhans cells, the proteins and peptides can be taken up by the cells themselves by phagocytosis and then bound to the MHC complexes the natural way and expressed on the cell surface in the correct MHC context.

### Verification of Correctly Folded MHC-Peptide Complexes

### Quantitative ELISA and Other Techniques to Quantify Correctly Folded MHC Complexes

[0422] When producing MHC multimers, it is desirable to determine the degree of correctly folded MHC.

[0423] The fraction or amount of functional and/or correctly folded MHC can be tested in a number of different ways, including:
[0424] Measurement of correctly folded MHC in a quantitative ELISA, e.g. where the MHC bind to immobilized molecules recognizing the correctly folded complex.
[0425] Measurement of functional MHC in an assay where the total protein concentration is measured before functional MHC is captured, by binding to e.g. immobilized TCR, and the excess, non-bound protein are measured. If the dissociation constant for the interaction is known, the amount of total and the amount of non-bound protein can be determined. From these numbers, the fraction of functional MHC complex can be determined.
[0426] Measurement of functional MHC complex by a non-denaturing gel-shift assay, where functional MHC complexes bind to TCR (or another molecule that recognize correctly folded MHC complex), and thereby shifts the TCR to another position in the gel.

[symbol]

### Multimerization Domain

[0427] A number of MHC complexes associate with a multimerization domain to form a MHC multimer. The size of the multimerization domain spans a wide range, from multimerisation domains based on small organic molecule scaffolds to large multimers based on a cellular structure or solid support. The multimerization domain may thus be based on different types of carriers or scaffolds, and likewise, the attachment of MHC complexes to the multimerization domain may involve covalent or non-covalent linkers.

[0428] Characteristics of different kinds of multimerization domains are described below.

### Molecular Weight of Multimerization Domain.

[0429] In one embodiment the multimerization domain(s) in the present invention is preferably less than 1,000 Da (small molecule scaffold). Examples include short peptides (e.g. comprising 10 amino acids), and various small molecule scaffolds (e.g. aromatic ring structures).
[0430] In another embodiment the multimerization domain(s) is preferably between 1,000 Da and 10,000 Da (small molecule scaffold, small peptides, small polymers). Examples include polycyclic structures of both aliphatic and aromatic compounds, peptides comprising e.g. 10-100 amino acids, and other polymers such as dextran, polyethylenglycol, and polyureas.
[0431] In another embodiment the multimerization domain(s) is between 10,000 Da and 100,000 Da (Small molecule scaffold, polymers e.g. dextran, streptavidin, IgG, pentamer structure). Examples include proteins and large polypeptides, small molecule scaffolds such as steroids, dextran, dimeric streptavidin, and multi-subunit proteins such as used in Pentamers.
[0432] In another embodiment the multimerization domain(s) is preferably between 100,000 Da and 1,000,000 Da (Small molecule scaffold, polymers e.g. dextran, streptavidin, IgG, pentamer structure). Typical examples include larger polymers such as dextran (used in e.g. Dextramers), and streptavidin tetramers.
[0433] In another embodiment the multimerization domain(s) is preferably larger than 1,000,000 Da (Small molecule scaffold, polymers e.g. dextran, streptavidin, IgG, pentamer structure, cells, liposomes, artificial lipid bilayers, polystyrene beads and other beads. Most examples of this size involve cells or cell-based structures such as micelles and liposomes, as well as beads and other solid supports.

[0434] As mentioned elsewhere herein multimerisation domains can comprise carrier molecules, scaffolds or combinations of the two.

[0435] Type of Multimerization Domain.
[0436] In principle any kind of carrier or scaffold can be used as multimerization domain, including any kind of cell, polymer, protein or other molecular structure, or particles and solid supports. Below different types and specific examples of multimerization domains are listed.
   [0437] Cell. Cells can be used as carriers. Cells can be either alive and mitotic active, alive and mitotic inactive as a result of irradiation or chemically treatment, or the cells may be dead. The MHC expression may be natural (i.e. not stimulated) or may be induced/stimulated by e.g. Inf-γ. Of special interest are natural antigen presenting cells (APCs) such as dendritic cells, macrophages, Kupfer cells, Langerhans cells, B-cells and any MHC expressing cell either naturally expressing, being transfected or being a hybridoma.
   [0438] Cell-like structures. Cell-like carriers include membrane-based structures carrying MHC-peptide complexes in their membranes such as micelles, liposomes, and other structures of membranes, and phages such as filamentous phages.
   [0439] Solid support. Solid support includes beads, particulate matters and other surfaces. A preferred embodiment include beads (magnetic or non-magnetic beads) that carry electrophilic groups e.g. divinyl sulfone activated polysaccharide, polystyrene beads that have been functionalized with tosyl-activated esters, magnetic polystyrene beads functionalized with tosyl-activated esters), and where MHC complexes may be covalently immobilized to these by reaction of nucleophiles comprised within the MHC complex with the electrophiles of the beads. Beads may be made of sepharose, sephacryl, polystyrene, agarose, polysaccharide, polycarbamate or any other kind of beads that can be suspended in aqueous buffer.
   [0440] Another embodiment includes surfaces, i.e. solid supports and particles carrying immobilized MHC complexes on the surface. Of special interest are wells of a microtiter plate or other plate formats, reagent tubes, glass slides or other supports for use in microarray analysis, tubings or channels of micro fluidic chambers or devices, Biacore chips and beads
   [0441] Molecule. Multimerization domains may also be molecules or complexes of molecules held together by non-covalent bonds. The molecules constituting the multimerization domain can be small organic molecules or large polymers, and may be flexible linear molecules or rigid, globular structures such as e.g. proteins. Different kinds of molecules used in multimerization domains are described below.
      [0442] Small organic molecules. Small organic molecules here includes steroids, peptides, linear or cyclic structures, and aromatic or aliphatic structures, and many others. The prototypical small organic scaffold is a functionalized benzene ring, i.e. a benzene ring functionalized with a number of reactive groups such as amines, to which a number of MHC molecules may be covalently linked. However, the types of reactive groups constituting the linker connecting the MHC complex and the multimerization domain, as well as the type of scaffold structure, can be chosen from a long list of chemical structures. A non-comprehensive list of scaffold structures are listed below. Typical scaffolds include aromatic structures, benzodiazepines, hydantoins, piperazines, indoles, furans, thiazoles, steroids, diketopiperazines, morpholines, tropanes, coumarines, qinolines, pyrroles, oxazoles, amino acid precursors, cyclic or aromatic ring structures, and many others. Typical carriers include linear and branched polymers such as peptides, polysaccharides, nucleic acids, and many others. Multimerization domains based on small organic or polymer molecules thus include a wealth of different structures, including small compact molecules, linear structures, polymers, polypeptides, polyureas, polycarbamates, cyclic structures, natural compound derivatives, alpha-, beta-, gamma-, and omega-peptides, mono-, di- and tri-substituted peptides, L- and D-form peptides, cyclohexane- and cyclopentane-backbone modified beta-peptides, vinylogous polypeptides, glycopolypeptides, polyamides, vinylogous sulfonamide peptide, Polysulfonamide-conjugated peptide (i.e., having prosthetic groups), Polyesters, Polysaccharides such as dextran and aminodextran, polycarbamates, polycarbonates, polyureas, polypeptidylphosphonates, Azatides, peptoids (oligo N-substituted glycines), Polyethers, ethoxyformacetal oligomers, poly-thioethers, polyethylene, glycols (PEG), polyethylenes, polydisulfides, polyarylene sulfides, Polynucleotides, PNAs, LNAs, Morpholinos, oligo pyrrolinone, polyoximes, Polyimines, Polyethyleneimine, Polyacetates, Polystyrenes, Polyacetylene, Polyvinyl, Lipids, Phospholipids, Glycolipids, polycycles, (aliphatic), polycycles (aromatic), polyheterocycles, Proteoglycan, Polysiloxanes, Polyisocyanides, Polyisocyanates, polymethacrylates, Monofunctional, Difunctional, Trifunctional and Oligofunctional open-chain hydrocarbons, Monofunctional, Difunctional, Trifunctional and Oligofunctional Nonaromat Carbocycles, Monocyclic, Bicyclic, Tricyclic and Polycyclic Hydrocarbons, Bridged Polycyclic Hydrocarbones, Monofunctional, Difunctional, Trifunctional and Oligofunctional Nonaromatic, Heterocycles, Monocyclic, Bicyclic, Tricyclic and Polycyclic Heterocycles, bridged Polycyclic Heterocycles, Monofunctional, Difunctional, Trifunctional and Oligofunctional Aromatic Carbocycles, Monocyclic, Bicyclic, Tricyclic and Polycyclic Aromatic Carbocycles, Monofunctional, Difunctional, Trifunctional and Oligofunctional Aromatic Hetero-cycles. Monocyclic, Bicyclic, Tricyclic and Polycyclic Heterocycles. Chelates, fullerenes, and any combination of the above and many others.
      [0443] Biological polymers. Biological molecules here include peptides, proteins (including antibodies, coiled-coil helices, streptavidin and many others), nucleic acids such as DNA and RNA, and polysaccharides such as dextran. The biological polymers may be reacted with MHC complexes (e.g. a number of MHC complexes chemically coupled to e.g. the amino groups of a protein), or may be linked through e.g. DNA duplex formation between a carrier DNA molecule and a number of DNA oligonucleotides each coupled to a MHC complex. Another type of multimerization domain based on a biological polymer is the streptavidin-based tetramer, where a streptavidin binds up to four biotinylated MHC complexes, as described above (see Background of the invention).
      [0444] Self-assembling multimeric structures. Several examples of commercial MHC multimers exist where the multimer is formed through self-assembling. Thus, the Pentamers are formed through formation of a coiled-coil structure that holds together 5 MHC complexes in an apparently planar structure. In a similar way, the Streptamers are based on the Streptactin protein which oligomerizes to form a MHC multimer comprising several MHC complexes (see Background of the invention).

[0445] In the following, alternative ways to make MHC multimers based on a molecule multimerization domain are described. They involve one or more of the abovementoned types of multimerization domains.

[0446] MHC dextramers can be made by coupling MHC complexes to dextran via a streptavidin-biotin interaction. In principle, biotin-streptavdin can be replaced by any dimerization domain, where one half of the dimerization domain is coupled to the MHC-peptide complex and the other half is coupled to dextran. For example, an acidic helix (one half of a coiled-coil dimer) is coupled or fused to MHC, and a basic helix (other half of a coiled-coil dimmer) is coupled to dextran. Mixing the two results in MHC binding to dextran by forming the acid/base coiled-coil structure.

[0447] Antibodies can be used as scaffolds by using their capacity to bind to a carefully selected antigen found naturally or added as a tag to a part of the MHC molecule not involved in peptide binding. For example, IgG and IgE will be able to bind two MHC molecules, IgM having a pentameric structure will be able to bind 10 MHC molecules. The antibodies can be full-length or truncated; a standard antibody-fragment includes the Fab2 fragment.

[0448] Peptides involved in coiled-coil structures can act as scaffold by making stable dimeric, trimeric, tetrameric and pentameric interactions. Examples hereof are the Fos-Jun heterodimeric coiled coil, the E. coli homo-trimeric coiled-coil domain Lpp-56, the engineered Trp-zipper protein forming a discrete, stable, a-helical pentamer in water at physiological pH.

[0449] Further examples of suitable scaffolds, carriers and linkers are streptavidin (SA) and avidin and derivatives thereof, biotin, immunoglobulins, antibodies (monoclonal, polyclonal, and recombinant), antibody fragments and derivatives thereof, leucine zipper domain of AP-1 (jun and fos), hexa-his (metal chelate moiety), hexa-hat GST (glutathione S-tranferase), glutathione, Calmodulin-binding peptide (CBP), Strep-tag, Cellulose Binding Domain, Maltose Binding Protein, S-Peptide Tag, Chitin Binding Tag, Immuno-reactive Epitopes, Epitope Tags, E2Tag, HA Epitope Tag, Myc Epitope, FLAG Epitope, AU1 and AU5 Epitopes, Glu-Glu Epitope, KT3 Epitope, IRS Epitope, Btag Epitope, Protein Kinase-C Epitope, VSV Epitope, lectins that mediate binding to a diversity of compounds, including carbohydrates, lipids and proteins, e.g. Con A (Canavalia ensiformis) or WGA (wheat germ agglutinin) and tetranectin or Protein A or G (antibody affinity). Combinations of such binding entities are also comprised. Non-limiting examples are streptavidin-biotin and jun-fos. In particular, when the MHC molecule is tagged, the binding entity may be an “anti-tag”. By “anti-tag” is meant an antibody binding to the tag, or any other molecule capable of binding to such tag.

[0450] MHC complexes can be multimerized by other means than coupling or binding to a multimerization domain. Thus, the multimerization domain may be formed during the multimerization of MHCs. One such method is to extend the bound antigenic peptide with dimerization domains. One end of the antigenic peptide is extended with dimerization domain A (e.g. acidic helix, half of a coiled-coil dimer) and the other end is extended with dimerization domain B (e.g. basic helix, other half of a coiled-coil dimer). When MHC complexes are loaded/mixed with these extended peptides the following multimer structure will be formed: A-MHC-BA-MHC-BA-MHC-B etc. The antigenic peptides in the mixture can either be identical or a mixture of peptides with comparable extended dimerization domains. Alternatively both ends of a peptide are extended with the same dimerization domain A and another peptide (same amino acid sequence or a different amino acid sequence) is extended with dimerization domain B. When MHC and peptides are mixed the following structures are formed: A-MHC-AB-MHC-BA-MHC-AB-MHC-B etc. Multimerization of MHC complexes by extension of peptides are restricted to MHC II molecules since the peptide binding groove of MHC I molecules is typically closed in both ends thereby limiting the size of peptide that can be embedded in the groove, and therefore preventing the peptide from extending out of the groove.

[0451] Another multimerization approach applicable to both MHC I and MHC II complexes is based on extension of N- and C-terminal of the MHC complex. For example the N-terminal of the MHC complex is extended with dimerization domain A and the C-terminal is extended with dimerization domain B. When MHC complexes are incubated together they pair with each other and form multimers like: A-MHC-BA-MHC-BA-MHC-BA-MHC-B etc. Alternatively the N-terminal and the C-terminal of a MHC complex are both extended with dimerization domain A and the N-terminal and C-terminal of another preparation of MHC complex (either the same or a different MHC) are extended with dimerization domain B. When these two types of MHC complexes are incubated together multimers will be formed: A-MHC-AB-MHC-BA-MHC-AB-MHC-B etc.

[0452] In all the above-described examples the extension can be either chemically coupled to the peptide/MHC complex or introduced as extension by gene fusion.

[0453] Dimerization domain AB can be any molecule pair able to bind to each other, such as acid/base coiled-coil helices, antibody-antigen, DNA-DNA, PNA-PNA, DNA-PNA, DNA-RNA, LNA-DNA, leucine zipper e.g. Fos/Jun, streptavidin-biotin and other molecule pairs as described elsewhere herein.

### Linker Molecules.

[0454] A number of MHC complexes associate with a multimerization domain to form a MHC multimer. The attachment of MHC complexes to the multimerization domain may involve covalent or non-covalent linkers, and may involve small reactive groups as well as large protein-protein interactions.

[0455] The coupling of multimerization domains and MHC complexes involve the association of an entity X (attached to or part of the multimerization domain) and an entity Y (attached to or part of the MHC complex). Thus, the linker that connects the multimerization domain and the MHC complex comprises an XY portion.
[0456] Covalent linker. The XY linkage can be covalent, in which case X and Y are reactive groups. In this case, X can be a nucleophilic group (such as —NH₂, —OH, —SH, —NH—NH₂), and Y an electrophilic group (such as CHO, COOH, CO) that react to form a covalent bond XY; or Y can be a nucleophilic group and X an electrophilic group that react to form a covalent bond XY. Other possibilities exist, e.g either of the reactive groups can be a radical, capable of reacting with the other reactive group. A number of reactive groups X and Y, and the bonds that are formed upon reaction of X and Y, are shown in FIG. 5.
[0457] X and Y can be reactive groups naturally comprised within the multimerization domain and/or the MHC complex, or they can be artificially added reactive groups. Thus, linkers containing reactive groups can be linked to either of the multimerization domain and MHC complex; subsequently the introduced reactive group(s) can be used to covalently link the multimerization domain and MHC complex.
[0458] Example natural reactive groups of MHC complexes include amino acid side chains comprising —NH₂, —OH, —SH, and —NH—. Example natural reactive groups of multimerization domains include hydroxyls of polysaccharides such as dextrans, but also include amino acid side chains comprising —NH₂, —OH, —SH, and —NH— of polypeptides, when the polypeptide is used as a multimerization domain. In some MHC multimers, one of the polypeptides of the MHC complex (i.e. the β2M, heavy chain or the antigenic peptide) is linked by a protein fusion to the multimerization domain. Thus, during the translation of the fusion protein, an acyl group (reactive group X or Y) and an amino group (reactive group Y or X) react to form an amide bond. Example MHC multimers where the bond between the multimerization domain and the MHC complex is covalent and results from reaction between natural reactive groups, include MHC-pentamers (described in US patent 2004209295) and MHC-dimers, where the linkage between multimerization domain and MHC complex is in both cases generated during the translation of the fusion protein.
[0459] Example artificial reactive groups include reactive groups that are attached to the multimerization domain or MHC complex, through association of a linker molecule comprising the reactive group. The activation of dextran by reaction of the dextran hydroxyls with divinyl sulfone, introduces a reactive vinyl group that can react with e.g. amines of the MHC complex, to form an amine that now links the multimerization domain (the dextran polymer) and the MHC complex. An alternative activation of the dextran multimerization domain involves a multistep reaction that results in the decoration of the dextran with maleimide groups, as described in the patent Siiman et al. U.S. Pat. No. 6,387,622. In this approach, the amino groups of MHC complexes are converted to —SH groups, capable of reacting with the maleimide groups of the activated dextran. Thus, in the latter example, both the reactive group of the multimerization domain (the maleimide) and the reactive group of the MHC complex (the thiol) are artificially introduced.
[0460] Sometimes activating reagents are used in order to make the reactive groups more reactive. For example, acids such as glutamate or aspartate can be converted to activated esters by addition of e.g. carbodiimid and NHS or nitrophenol, or by converting the acid moiety to a tosyl-activated ester. The activated ester reacts efficiently with a nucleophile such as —NH₂, —SH, —OH, etc.
[0461] For the purpose of this invention, the multimerization domains (including small organic scaffold molecules, proteins, protein complexes, polymers, beads, liposomes, micelles, cells) that form a covalent bond with the MHC complexes can be divided into separate groups, depending on the nature of the reactive group that the multimerization domain contains. One group comprise multimerization domains that carry nucleophilic groups (e.g. —NH₂, —OH, —SH, —CN, —NH—NH₂), exemplified by polysaccharides, polypeptides containing e.g. lysine, serine, and cysteine; another group of multimerization domains carry electrophilic groups (e.g. —COOH, —CHO, —CO, NHS-ester, tosyl-activated ester, and other activated esters, acid-anhydrides), exemplified by polypeptides containing e.g. glutamate and aspartate, or vinyl sulfone activated dextran; yet another group of multimerization domains carry radicals or conjugated double bonds.
[0462] The multimerization domains appropriate for this invention thus include those that contain any of the reactive groups shown in FIG. 5 or that can react with other reactive groups to form the bonds shown in FIG. 5.
[0463] Likewise, MHC complexes can be divided into separate groups, depending on the nature of the reactive group comprised within the MHC complex. One group comprise MHCs that carry nucleophilic groups (e.g. —NH₂, —OH, —SH, —CN, —NH—NH₂), e.g. lysine, serine, and cysteine; another group of MHCs carry electrophilic groups (e.g. —COOH, —CHO, —CO, NHS-ester, tosyl-activated ester, and other activated esters, acid-anhydrides), exemplified by e.g. glutamate and aspartate; yet another group of MHCs carry radicals or conjugated double bonds.
[0464] The reactive groups of the MHC complex are either carried by the amino acids of the MHC-peptide complex (and may be comprised by any of the peptides of the MHC-peptide complex, including the antigenic peptide), or alternatively, the reactive group of the MHC complex has been introduced by covalent or non-covalent attachment of a molecule containing the appropriate reactive group.
[0465] Preferred reactive groups in this regard include —CSO₂OH, phenylchloride, —SH, —SS, aldehydes, hydroxyls, isocyanate, thiols, amines, esters, thioesters, carboxylic acids, triple bonds, double bonds, ethers, acid chlorides, phosphates, imidazoles, halogenated aromatic rings, any precursors thereof, or any protected reactive groups, and many others. Example pairs of reactive groups, and the resulting bonds formed, are shown in FIG. 5.
[0466] Reactions that may be employed include acylation (formation of amide, pyrazolone, isoxazolone, pyrimidine, comarine, quinolinon, phthalhydrazide, diketopiperazine, benzodiazepinone, and hydantoin), alkylation, vinylation, disulfide formation, Wittig reaction, Horner-Wittig-Emmans reaction, arylation (formation of biaryl or vinylarene), condensation reactions, cycloadditions ((2+4), (3+2)), addition to carbon-carbon multiplebonds, cycloaddition to multiple bonds, addition to carbon-hetero multiple bonds, nucleophilic aromatic substitution, transition metal catalyzed reactions, and may involve formation of ethers, thioethers, secondary amines, tertiary amines, beta-hydroxy ethers, beta-hydroxy thioethers, beta-hydroxy amines, beta-amino ethers, amides, thioamides, oximes, sulfonamides, di- and tri-functional compounds, substituted aromatic compounds, vinyl substituted aromatic compounds, alkyn substituted aromatic compounds, biaryl compounds, hydrazines, hydroxylamine ethers, substituted cycloalkenes, substituted cyclodienes, substituted 1, 2, 3 triazoles, substituted cycloalkenes, beta-hydroxy ketones, beta-hydroxy aldehydes, vinyl ketones, vinyl aldehydes, substituted alkenes, substituted alkenes, substituted amines, and many others.
[0467] MHC dextramers can be made by covalent coupling of MHC complexes to the dextran backbone, e.g. by chemical coupling of MHC complexes to dextran backbones. The MHC complexes can be coupled through either heavy chain or β2-microglobulin if the MHC complexes are MHC I or through α-chain or β-chain if the MHC complexes are MHC II. MHC complexes can be coupled as folded complexes comprising heavy chain/beta2 microglobulin or α-chain/β-chain or either combination together with peptide in the peptide-binding cleft. Alternatively either of the protein chains can be coupled to dextran and then folded in vitro together with the other chain of the MHC complex not coupled to dextran and together with peptide. Direct coupling of MHC complexes to dextran multimerization domain can be via an amino group or via a sulphide group. Either group can be a natural component of the MHC complex or attached to the MHC complex chemically. Alternatively, a cysteine may be introduced into the genes of either chain of the MHC complex.
[0468] Another way to covalently link MHC complexes to dextran multimerization domains is to use the antigenic peptide as a linker between MHC and dextran. Linker containing antigenic peptide at one end is coupled to dextran. Antigenic peptide here means a peptide able to bind MHC complexes in the peptide-binding cleft. As an example, 10 or more antigenic peptides may be coupled to one dextran molecule. When MHC complexes are added to such peptide-dextran construct the MHC complexes will bind the antigenic peptides and thereby MHC-peptide complexes are displayed around the dextran multimerization domain. The antigenic peptides can be identical or different from each other. Similarly MHC complexes can be either identical or different from each other as long as they are capable of binding one or more of the peptides on the dextran multimerization domain.
[0469] Non-covalent linker. The linker that connects the multimerization domain and the MHC complex comprises an XY portion. Above different kinds of covalent linkages XY were described. However, the XY linkage can also be non-covalent. Non-covalent XY linkages can comprise natural dimerization pairs such as antigen-antibody pairs, DNA-DNA interactions, or can include natural interactions between small molecules and proteins, e.g. between biotin and streptavidin. Artificial XY examples include XY pairs such as His₆ tag (X) interacting with Ni-NTA (Y) and PNA-PNA interactions.
[0470] Protein-protein interactions. The non-covalent linker may comprise a complex of two or more polypeptides or proteins, held together by non-covalent interactions. Example polypeptides and proteins belonging to this group include Fos/Jun, Acid/Base coiled coil structure, antibody/antigen (where the antigen is a peptide), and many others.
[0471] A preferred embodiment involving non-covalent interactions between polypeptides and/or proteins are represented by the Pentamer structure described in US patent 2004209295.
[0472] Another preferred embodiment involves the use of antibodies, with affinity for the surface of MHC opposite to the peptide-binding groove. Thus, an anti-MHC antibody, with its two binding site, will bind two MHC complexes and in this way generate a bivalent MHC multimer. In addition, the antibody can stabilize the MHC complex through the binding interactions. This is particularly relevant for MHC class II complexes, as these are less stable than class I MHC complexes.
[0473] Polynucleotide-polynucleotide interactions. The non-covalent linker may comprise nucleotides that interact non-covalently. Example interactions include PNA/PNA, DNA/DNA, RNA/RNA, LNA/DNA, and any other nucleic acid duplex structure, and any combination of such natural and unnatural polynucleotides such as DNA/PNA, RNA/DNA, and PNA/LNA.
[0474] Protein-small molecule interactions. The non-covalent linker may comprise a macromolecule (e.g. protein, polynucleotide) and a small molecule ligand of the macromolecule. The interaction may be natural (i.e., found in Nature, such as the Streptavidin/biotin interaction) or non-natural (e.g. His-tag peptide/Ni-NTA interaction). Example interactions include Streptavidin/biotin and anti-biotin antibody/biotin.
[0475] Combinations—non-covalent linker molecules. Other combinations of proteins, polynucleotides, small organic molecules, and other molecules, may be used to link the MHC to the multimerization domain. These other combinations include protein-DNA interactions (e.g. DNA binding protein such as the gene regulatory protein CRP interacting with its DNA recognition sequence), RNA aptamer-protein interactions (e.g. RNA aptamer specific for growth hormone interacting with growth hormone)
[0476] Synthetic molecule-synthetic molecule interaction. The non-covalent linker may comprise a complex of two or more organic molecules, held together by non-covalent interactions. Example interactions are two chelate molecules binding to the same metal ion (e.g. EDTA-Ni⁺⁺-NTA), or a short polyhistidine peptide (e.g. His₆) bound to NTA-Ni⁺⁺.

[0477] In another preferred embodiment the multimerization domain is a bead. The bead is covalently or non-covalently coated with MHC multimers or single MHC complexes, through non-cleavable or cleavable linkers. As an example, the bead can be coated with streptavidin monomers, which in turn are associated with biotinylated MHC complexes; or the bead can be coated with streptavidin tetramers, each of which are associated with 0, 1, 2, 3, or 4 biotinylated MHC complexes; or the bead can be coated with MHC-dextramers where e.g. the reactive groups of the MHC-dextramer (e.g. the divinyl sulfone-activated dextran backbone) has reacted with nucleophilic groups on the bead, to form a covalent linkage between the dextran of the dextramer and the beads.

[0478] In another preferred embodiment, the MHC multimers described above (e.g. where the multimerization domain is a bead) further contains a flexible or rigid, and water soluble, linker that allows for the immobilized MHC complexes to interact efficiently with cells, such as T-cells with affinity for the MHC complexes. In yet another embodiment, the linker is cleavable, allowing for release of the MHC complexes from the bead. If T-cells have been immobilized, by binding to the MHC complexes, the T-cells can very gently be released by cleavage of this cleavable linker. Appropriate cleavable linkers are shown in FIG. 6. Most preferably, the linker is cleaved at physiological conditions, allowing for the integrity of the isolated cells.

[0479] Further examples of linker molecules that may be employed in the present invention include Calmodulin-binding peptide (CBP), 6×HIS, Protein A, Protein G, biotin, Avidine, Streptavidine, Strep-tag, Cellulose Binding Domain, Maltose Binding Protein, S-Peptide Tag, Chitin Binding Tag, Immuno-reactive Epitopes, Epitope Tags, GST tagged proteins, E2Tag, HA Epitope Tag, Myc Epitope, FLAG Epitope, AU1 and AU5 Epitopes, Glu-Glu Epitope, KT3 Epitope, IRS Epitope, Btag Epitope, Protein Kinase-C Epitope, VSV Epitope.

[0480] The list of dimerization- and multimerization domains, described elsewhere in this document, define alternative non-covalent linkers between the multimerization domain and the MHC complex.

[0481] The abovementioned dimerization- and multimerization domains represent specific binding interactions. Another type of non-covalent interactions involves the non-specific adsorption of e.g. proteins onto surfaces. As an example, the non-covalent adsorption of proteins onto glass beads represents this class of XY interactions. Likewise, the interaction of MHC complexes (comprising full-length polypeptide chains, including the transmembrane portion) with the cell membrane of for example dendritic cells is an example of a non-covalent, primarily non-specific XY interaction.

[0482] In some of the abovementioned embodiments, several multimerization domains (e.g. streptavidin tetramers bound to biotinylated MHC complexes) are linked to another multimerization domain (e.g. the bead). For the purpose of this invention we shall call both the smaller and the bigger multimerization domain, as well as the combined multimerization domain, for multimerization domain

### Additional Features of Product

[0483] Additional components may be coupled to carrier or added as individual components not coupled to carrier

### Attachment of Biologically Active Molecules to MHC Multimers

[0484] Engagement of MHC complex to the specific T cell receptor leads to a signaling cascade in the T cell. However, T-cells normally respond to a single signal stimulus by going into apoptosis. T cells needs a second signal in order to become activated and start development into a specific activation state e.g. become an active cytotoxic T cell, helper T cell or regulatory T cell.

[0485] It is to be understood that the MHC multimer of the invention may further comprise one or more additional substituents. The definition of the terms “one or more”, “a plurality”, “a”, “an”, and “the” also apply here. Such biologically active molecules may be attached to the construct in order to affect the characteristics of the constructs, e.g. with respect to binding properties, effects, MHC molecule specificities, solubility, stability, or detectability. For instance, spacing could be provided between the MHC complexes, one or both chromophores of a Fluorescence Resonance Energy Transfer (FRET) donor/acceptor pair could be inserted, functional groups could be attached, or groups having a biological activity could be attached.

[0486] MHC multimers can be covalently or non-covalently associated with various molecules: having adjuvant effects; being immune targets e.g. antigens; having biological activity e.g. enzymes, regulators of receptor activity, receptor ligands, immune potentiators, drugs, toxins, co-receptors, proteins and peptides in general; sugar moieties; lipid groups; nucleic acids including siRNA; nano particles; small molecules. In the following these molecules are collectively called biologically active molecules. Such molecules can be attached to the MHC multimer using the same principles as those described for attachment of MHC complexes to multimerisation domains as described elsewhere herein. In brief, attachment can be done by chemical reactions between reactive groups on the biologically active molecule and reactive groups of the multimerisation domain and/or between reactive groups on the biologically active molecule and reactive groups of the MHC-peptide complex. Alternatively, attachment is done by non-covalent interaction between part of the multimerisation domain and part of the biological active molecule or between part of the MHC-peptide complex and part of the biological active molecule. In both covalent and non-covalent attachment of the biologically molecule to the multimerisation domain a linker molecule can connect the two. The linker molecule can be covalent or non-covalent attached to both molecules. Examples of linker molecules are described elsewhere herein. Some of the MHCmer structures better allows these kind of modifications than others.

[0487] Biological active molecules can be attached repetitively aiding to recognition by and stimulation of the innate immune system via Toll or other receptors.

[0488] MHC multimers carrying one or more additional groups can be used as therapeutic or vaccine reagents.

[0489] In particular, the biologically active molecule may be selected from

[0490] proteins such as MHC Class I-like proteins like MIC A, MIC B, CD1d, HLA E, HLA F, HLA G, HLA H, ULBP-1, ULBP-2, and ULBP-3,

[0491] co-stimulatory molecules such as CD2, CD3, CD4, CD5, CD8, CD9, CD27, CD28, CD30, CD69, CD134 (OX40), CD137 (4-1BB), CD147, CDw150 (SLAM), CD152 (CTLA-4), CD153 (CD30L), CD40L (CD154), NKG2D, ICOS, HVEM, HLA Class II, PD-1, Fas (CD95), FasL expressed on T and/or NK cells, CD40, CD48, CD58, CD70, CD72, B7.1 (CD80), B7.2 (CD86), B7RP-1, B7-H3, PD-L1, PD-L2, CD134L, CD137L, ICOSL, LIGHT expressed on APC and/or tumour cells,

[0492] cell modulating molecules such as CD16, NKp30, NKp44, NKp46, NKp80, 2B4, KIR, LIR, CD94/NKG2A, CD94/NKG2C expressed on NK cells, IFN-alpha, IFN-beta, IFN-gamma, IL-1, IL-2, IL-3, IL-4, IL-6, IL-7, IL-8, IL-10, IL-11, IL-12, IL-15, CSFs (colony-stimulating factors), vitamin D3, IL-2 toxins, cyclosporin, FK-506, rapamycin, TGF-beta, clotrimazole, nitrendipine, and charybdotoxin,

[0493] accessory molecules such as LFA-1, CD11a/18, CD54 (ICAM-1), CD106 (VCAM), and CD49a,b,c,d,e,f/CD29 (VLA-4),

[0494] adhesion molecules such as ICAM-1, ICAM-2, GlyCAM-1, CD34, anti-LFA-1, anti-CD44, anti-beta7, chemokines, CXCR4, CCR5, anti-selectin L, anti-selectin E, and anti-selectin P,

[0495] toxic molecules selected from toxins, enzymes, antibodies, radioisotopes, chemiluminescent substances, bioluminescent substances, polymers, metal particles, and haptens, such as cyclophosphamide, methrotrexate, Azathioprine, mizoribine, 15-deoxuspergualin, neomycin, staurosporine, genestein, herbimycin A, Pseudomonas exotoxin A, saporin, Rituxan, Ricin, gemtuzumab ozogamicin, Shiga toxin, heavy metals like inorganic and organic mercurials, and FN18-CRM9, radioisotopes such as incorporated isotopes of iodide, cobalt, selenium, tritium, and phosphor, and haptens such as DNP, and digoxiginin,

[0496] and combinations of any of the foregoing, as well as antibodies (monoclonal, polyclonal, and recombinant) to the foregoing, where relevant. Antibody derivatives or fragments thereof may also be used.

### Design and Generation of Product to be Used for Immune Monitoring, Diagnosis, Therapy or Vaccination

[0497] The product of the present invention may be used for immune monitoring, diagnosis, therapy and/or vaccination. Generation of a useful product includes the following basic steps:
[0498] 1. Design of antigenic peptides
[0499] 2. Choise of MHC allele
[0500] 3. Generation of product
[0501] 4. Validation and optimization of product

[0502] In the following strategies for generation of products are given:

### How to Make a MHC Multimer Diagnostic or Immune Monitoring Reagent

[0503] 1. Identify disease of interest. Most relevant diseases in this regard are infectious-, cancer-, auto immune-, transplantation-, or immuno-suppression-related diseases.
[0504] 2. Identify relevant protein targets. This may be individual proteins, a group of proteins from a given tissue or all or subgroups of proteins from a complete organism.
[0505] 3. Identify the protein sequence Amino acid sequences can be directly found in databases or deduced from gene- or mRNA sequence e.g. using the following link http://www.ncbi.nlm.nih.gov/Genbank/index.html. If not in databases relevant proteins or genes encoding relevant proteins may be isolated and sequenced. In some cases only DNA sequences will be available without knowing which part of the sequence is protein coding. Then DNA sequence is translated into amino acid sequence in all reading frames.
[0506] 4. Choose MHC allele. Decide on needed MHC allele population coverage. If a broad coverage of a given population is needed (i.e. when a generally applicable reagent is sought) the most frequently expressed MHC alleles by the population of interest may be chosen e.g. using the database http://www.allelefrequencies.net/test/default1.asp or http://epitope.liai.org:8080/tools/population/iedb_input. In case of personalized medicine the patient is tissue typed (HLA type) and then MHC alleles may be selected according to that.
[0507] 5. Run the general peptide epitope generator program described elsewhere herein on all selected amino acid sequences from step 3, thereby generating all possible epitopes of defined length (8, 9, 10 and/or 11'mers). This procedure is particularly useful when the amino acid sequence is derived from a DNA sequence not knowing the protein encoding areas.
[0508] 6. If searching for broadly applicable epitope sequences, a good alternative to step 5 is to run the “intelligent” peptide epitope prediction programs on the selected amino acid sequences of step 3 using the selected MHC alleles from step 4 e.g. using epitope prediction programs like http://www.syfpeithi.de/, http://www.cbs.dtu.dk/services/NetMHC/, and http://www.cbs.dtu.dk/services/NetMHCII/. This step can also be used supplementary to step 5 by running selected or all epitopes from the general peptide epitope generator program through one or more of the intelligent peptide epitope prediction programs.
[0509] 7. If searching for broadly applicable epitope sequences, select the best peptide epitopes (the epitopes with highest binding score) for the chosen MHC alleles and run them through the BLAST program (http://www.ncbi.nlm.nih.gov/blast/Blast.cgi) to validate the uniqueness of the peptides. If the peptide sequences are present in other species, evaluate the potential risk of disease states caused by the non-relevant species in relation to causing false positive results. If considered being a potential problem for evaluating the future analysis outcome, leave out the peptide. In general, favour unique peptide sequences only present in the selected protein.
[0510] 8. Make selected peptides as described elsewhere herein, and optionally test for binding to the desired MHC alleles by e.g in vitro folding, peptide exchange of already preloaded MHC complexes or another method able to test of peptide binding to MHC I or II molecules.
[0511] 9. Generate desired MHC multimer as described elsewhere herein and test efficacy in detecting specific T-cells using methods described in the section “Detection”.
[0512] The MHC multimer reagents may be used in a diagnostic procedure or kit for testing patient and control samples e.g. by flow cytometry, immune histochemistry, Elispot or other methods as described herein.

### How to Make a MHC Multimer Therapeutic Reagent

[0513] 1. As step 1-8 above for diagnostic reagent.
[0514] 9. Select additional molecules (e.g. biologically active molecules, toxins) to attach to the MHC multimer as described elsewhere herein. The additional molecules can have different functionalities as e.g. adjuvants, specific activators, toxins etc.
[0515] 10. Test the therapeutic reagent following general guidelines
[0516] 11. Use for therapy

### Processes Involving MHC Multimers

[0517] Thus, the present invention relates to methods for detecting the presence of MHC recognising cells in a sample comprising the steps of

[0518] (a) providing a sample suspected of comprising MHC recognising cells,

[0519] (b) contacting the sample with a MHC multimer as defined above, and

[0520] (c) determining any binding of the MHC multimer, which binding indicates the presence of MHC recognising cells.

[0521] Such methods are a powerful tool in diagnosing various diseases. Establishing a diagnosis is important in several ways. A diagnosis gives information about the disease, thus the patient can be offered a suitable treatment regime. Also, establishing a more specific diagnosis may give important information about a subtype of a disease for which a particular treatment will be beneficial (i.e. various subtypes of diseases may involve display of different peptides which are recognised by MHC recognising cells, and thus treatment can be targeted effectively against a particular subtype). In this way, it may also be possible to gain information about aberrant cells, which emerge through the progress of the disease or condition, or to investigate whether and how T-cell specificity is affected. The binding of the MHC multimer makes possible these options, since the binding is indicative for the presence of the MHC recognising cells in the sample, and accordingly the presence of MHC multimers displaying the peptide.

[0522] The present invention also relates to methods for monitoring MHC recognising cells comprising the steps of

[0523] (a) providing a sample suspected of comprising MHC recognising cells,

[0524] (b) contacting the sample with a MHC complex as defined above, and

[0525] (c) determining any binding of the MHC multimer, thereby monitoring MHC recognising cells.

[0526] Such methods are a powerful tool in monitoring the progress of a disease, e.g. to closely follow the effect of a treatment. The method can i.a. be used to manage or control the disease in a better way, to ensure the patient receives the optimum treatment regime, to adjust the treatment, to confirm remission or recurrence, and to ensure the patient is not treated with a medicament which does not cure or alleviate the disease. In this way, it may also be possible to monitor aberrant cells, which emerge through the progress of the disease or condition, or to investigate whether and how T-cell specificity is affected during treatment. The binding of the MHC multimer makes possible these options, since the binding is indicative for the presence of the MHC recognising cells in the sample, and accordingly the presence of MHC multimers displaying the peptide.

[0527] The present invention also relates to methods for establishing a prognosis of a disease involving MHC recognising cells comprising the steps of

[0528] (a) providing a sample suspected of comprising MHC recognising cells,

[0529] (b) contacting the sample with a MHC multimer as defined above, and

[0530] (c) determining any binding of the MHC multimer, thereby establishing a prognosis of a disease involving MHC recognising cells.

[0531] Such methods are a valuable tool in order to manage diseases, i.a. to ensure the patient is not treated without effect, to ensure the disease is treated in the optimum way, and to predict the chances of survival or cure. In this way, it may also be possible to gain information about aberrant cells, which emerge through the progress of the disease or condition, or to investigate whether and how T-cell specificity is affected, thereby being able to establish a prognosis. The binding of the MHC multimer makes possible these options, since the binding is indicative for the presence of the MHC recognising cells in the sample, and accordingly the presence of MHC complexes displaying the peptide.

[0532] The present invention also relates to methods for determining the status of a disease involving MHC recognising cells comprising the steps of

[0533] (a) providing a sample suspected of comprising MHC recognising cells,

[0534] (b) contacting the sample with a MHC complex as defined above, and

[0535] (c) determining any binding of the MHC complex, thereby determining the status of a disease involving MHC recognising cells.

[0536] Such methods are a valuable tool in managing and controlling various diseases. A disease could, e.g. change from one stage to another, and thus it is important to be able to determine the disease status. In this way, it may also be possible to gain information about aberrant cells which emerge through the progress of the disease or condition, or to investigate whether and how T-cell specificity is affected, thereby determining the status of a disease or condition. The binding of the MHC complex makes possible these options, since the binding is indicative for the presence of the MHC recognising cells in the sample, and accordingly the presence of MHC complexes displaying the peptide.

[0537] The present invention also relates to methods for the diagnosis of a disease involving MHC recognising cells comprising the steps of

[0538] (a) providing a sample suspected of comprising MHC recognising cells,

[0539] (b) contacting the sample with a MHC multimer as defined above, and

[0540] (c) determining any binding of the MHC multimer, thereby diagnosing a disease involving MHC recognising cells.

[0541] Such diagnostic methods are a powerful tool in the diagnosis of various diseases. Establishing a diagnosis is important in several ways. A diagnosis gives information about the disease, thus the patient can be offered a suitable treatment regime. Also, establishing a more specific diagnosis may give important information about a subtype of a disease for which a particular treatment will be beneficial (i.e. various subtypes of diseases may involve display of different peptides which are recognised by MHC recognising cells, and thus treatment can be targeted effectively against a particular subtype). Valuable information may also be obtained about aberrant cells emerging through the progress of the disease or condition as well as whether and how T-cell specificity is affected. The binding of the MHC multimer makes possible these options, since the binding is indicative for the presence of the MHC recognising cells in the sample, and accordingly the presence of MHC multimers displaying the peptide.

[0542] The present invention also relates to methods of correlating cellular morphology with the presence of MHC recognising cells in a sample comprising the steps of

[0543] (a) providing a sample suspected of comprising MHC recognising cells,

[0544] (b) contacting the sample with a MHC multimer as defined above, and

[0545] (c) determining any binding of the MHC multimer, thereby correlating the binding of the MHC multimer with the cellular morphology.

[0546] Such methods are especially valuable as applied in the field of histochemical methods, as the binding pattern and distribution of the MHC multimers can be observed directly. In such methods, the sample is treated so as to preserve the morphology of the individual cells of the sample. The information gained is important i.a. in diagnostic procedures as sites affected can be observed directly.

[0547] The present invention also relates to methods for determining the effectiveness of a medicament against a disease involving MHC recognising cells comprising the steps of

[0548] (a) providing a sample from a subject receiving treatment with a medicament,

[0549] (b) contacting the sample with a as defined herein, and

[0550] (c) determining any binding of the MHC multimer, thereby determining the effectiveness of the medicament.

[0551] Such methods are a valuable tool in several ways. The methods may be used to determine whether a treatment is effectively combating the disease. The method may also provide information about aberrant cells which emerge through the progress of the disease or condition as well as whether and how T-cell specificity is affected, thereby providing information of the effectiveness of a medicament in question. The binding of the MHC multimer makes possible these options, since the binding is indicative for the presence of the MHC recognising cells in the sample, and accordingly the presence of MHC multimers displaying the peptide.

[0552] The present invention also relates to methods for manipulating MHC recognising cells populations comprising the steps of

[0553] (a) providing a sample comprising MHC recognising cells,

[0554] (b) contacting the sample with a MHC multimer immobilised onto a solid support as defined above,

[0555] (c) isolating the relevant MHC recognising cells, and

[0556] (d) expanding such cells to a clinically relevant number, with or without further manipulation.

[0557] Such ex vivo methods are a powerful tool to generate antigen-specific, long-lived human effector T-cell populations that, when re-introduced to the subject, enable killing of target cells and has a great potential for use in immunotherapy applications against various types of cancer and infectious diseases.

[0558] As used everywhere herein, the term “MHC recognising cells” are intended to mean such which are able to recognise and bind to MHC multimers. The intended meaning of “MHC multimers” is given above. Such MHC recognising cells may also be called MHC recognising cell clones, target cells, target MHC recognising cells, target MHC molecule recognising cells, MHC molecule receptors, MHC receptors, MHC peptide specific receptors, or peptide-specific cells. The term “MHC recognising cells” is intended to include all subsets of normal, abnormal and defect cells, which recognise and bind to the MHC molecule. Actually, it is the receptor on the MHC recognising cell that binds to the MHC molecule.

[0559] As described above, in diseases and various conditions, peptides are displayed by means of MHC multimers, which are recognised by the immune system, and cells targeting such MHC multimers are produced (MHC recognising cells). Thus, the presence of such MHC protein recognising cells is a direct indication of the presence of MHC multimers displaying the peptides recognised by the MHC protein recognising cells. The peptides displayed are indicative and may involved in various diseases and conditions.

[0560] For instance, such MHC recognising cells may be involved in diseases of inflammatory, autoimmune, allergic, viral, cancerous, infectious, allo- or xenogene (graft versus host and host versus graft) origin.

[0561] The MHC multimers of the present invention have numerous uses and are a valuable and powerful tool e.g. in the fields of therapy, diagnosis, prognosis, monitoring, stratification, and determining the status of diseases or conditions. Thus, the MHC multimers may be applied in the various methods involving the detection of MHC recognising cells.

[0562] Furthermore, the present invention relates to compositions comprising the MHC multimers in a solubilising medium. The present invention also relates to compositions comprising the MHC multimers immobilised onto a solid or semi-solid support.

[0563] The MHC multimers can be used in a number of applications, including analyses such as flow cytometry, immunohistochemistry (1HC), and ELISA-like analyses, and can be used for diagnostic, prognostic or therapeutic purposes including autologous cancer therapy or vaccines such as HIV vaccine or cancer vaccine.

[0564] The MHC multimers are very suitable as detection systems. Thus, the present invention relates to the use of the MHC multimers as defined herein as detection systems.

[0565] In another aspect, the present invention relates to the general use of MHC peptide complexes and multimers of such MHC peptide complexes in various methods. These methods include therapeutic methods, diagnostic methods, prognostic methods, methods for determining the progress and status of a disease or condition, and methods for the stratification of a patient.

[0566] The MHC multimers of the present invention are also of value in testing the expected efficacy of medicaments against or for the treatment of various diseases. Thus, the present invention relates to methods of testing the effect of medicaments or treatments, the methods comprising detecting the binding of the MHC multimers to MHC recognising cells and establishing the effectiveness of the medicament or the treatment in question based on the specificity of the MHC recognising cells.

[0567] As mentioned above, the present invention also relates generally to the field of therapy. Thus, the present invention relates per se to the MHC multimer as defined herein for use as medicaments, and to the MHC multimers for use in in vivo and ex vivo therapy.

[0568] The present invention relates to therapeutic compositions comprising as active ingredients the MHC multimers as defined herein.

[0569] An important aspect of the present invention is therapeutic compositions comprising as active ingredients effective amounts of MHC recognising cells obtained using the MHC multimers as defined herein to isolate relevant MHC recognising cells, and expanding such cells to a clinically relevant number.

[0570] The present invention further relates to methods for treating, preventing or alleviating diseases, methods for inducing anergy of cells, as well as to methods for up-regulating, down-regulating, modulating, stimulating, inhibiting, restoring, enhancing and/or otherwise manipulating immune responses.

[0571] The invention also relates to methods for obtaining MHC recognising cells by using the MHC multimers as described herein.

[0572] Also encompassed by the present invention are methods for preparing the therapeutic compositions of the invention.

[0573] The present invention is also directed to generating MHC multimers for detecting and analysing receptors on MHC recognising cells, such as epitope specific T-cell clones or other immune competent effector cells.

[0574] It is a further object of the present invention to provide new and powerful strategies for the development of curative vaccines. This in turn will improve the possibilities for directed and efficient immune manipulations against diseases caused by tumour genesis or infection by pathogenic agent like viruses and bacteria. HIV is an important example. The ability to generate and optionally attach recombinant MHC multimers to multimerization domains, such as scaffolds and/or carrier molecules, will enable the development of a novel analytical and therapeutical tool for monitoring immune responses and contribute to a rational platform for novel therapy and “vaccine” applications.

[0575] Therapeutic compositions (e.g. “therapeutical vaccines”) that stimulate specific T-cell proliferation by peptide-specific stimulation is indeed a possibility within the present invention. Thus, quantitative analysis and ligand-based detection of specific T-cells that proliferate by the peptide specific stimulation should be performed simultaneously to monitoring the generated response.

[0576] For all of those applications, it is important to choose the right MHC allele as well as a peptide that binds well to the MHC protein. It is also important that the chosen MHC allele and peptide forms a MHC-peptide complex that is efficiently and specifically recognized by the TCR. For applications that involve binding as well as activation of cells, further restrictions on the choice of MHC and peptide can apply.

### Application of MHC Multimers in Immune Monitoring, Diagnostics, Therapy, Vaccine

[0577] MHC multimers detect antigen specific T cells of the various T cell subsets. T cells are pivotal for mounting an adaptive immune response. It is therefore of importance to be able to measure the number of specific T cells when performing a monitoring of a given immune response. Typically, the adaptive immune response is monitored by measuring the specific antibody response, which is only one of the effector arms of the immune system. This can lead to miss-interpretation of the actual clinical immune status.

[0578] In many cases intruders of the organism can hide away inside the cells, which can not provoke a humoral response. In other cases, e.g. in the case of certain viruses the intruder mutates fast, particularly in the genes encoding the proteins that are targets for the humoral response. Examples include the influenza and HIV viruses. The high rate of mutagenesis renders the humoral response unable to cope with the infection. In these cases the immune system relies on the cellular immune response. When developing vaccines against such targets one needs to provoke the cellular response in order to get an efficient vaccine.

[0579] Developing vaccines that should give rise to lifelong protection is another case where the cellular immune system needs to be activated. Commonly, various childhood vaccines are expected to give lifelong protection but will only come to trial many years after the vaccination has been performed and then there is only to hope that it actually have created effective immunity.

[0580] Therapeutically cancer vaccines generally rely on cytotoxic effector T cells and have short duration of function. Therefore, continuous monitoring is important.

[0581] MHC multimers are therefore very important for immune monitoring of vaccine responses both during vaccine development, as a means to verify the obtained immunity for lifelong vaccines and to follow cancer patients under treatment with therapeutically cancer vaccines.

[0582] The number of antigen specific cytotoxic T cells can be used as surrogate markers for the overall wellness of the immune system. The immune system can be compromised severely by natural causes such as HIV infections or big traumas or by immuno suppressive therapy in relation to transplantation. The efficacy of an anti HIV treatment can be evaluated by studying the number of common antigen-specific cytotoxic T cells, specific against for example Cytomegalovirus (CMV) and Epstein-Barr virus. In this case the measured T cells can be conceived as surrogate markers. The treatment can then be corrected accordingly and a prognosis can be made.

[0583] A similar situation is found for patients undergoing transplantation as they are severely immune compromised due to pharmaceutical immune suppression to avoid organ rejection. The suppression can lead to outbreak of opportunistic infections caused by reactivation of otherwise dormant viruses residing in the transplanted patients or the grafts. This can be the case for CMV and EBV viruses. Therefore measurement of the number of virus specific T cells can be used to give a prognosis for the outcome of the transplantation and adjustment of the immune suppressive treatment. Similarly, the BK virus has been implied as a causative reagent for kidney rejection. Therefore measurement of BK-virus specific T cells can have prognostic value.

[0584] In relation to transplantation, the presence of specific T cells directed against minor histocompatibility antigens (mHAgs) are important as they can cause graft versus host reaction/disease that can develop to a fatal situation for the patient. Again, a well-adjusted immune suppressive treatment is important. A similar reaction denoted graft versus cancer is sometimes employed in the treatment of malignancies of the lymphoid system. It is evident that such treatment is balancing on the edge of a knife and will benefit of specific measurement of relevant effector T cells.

[0585] Due to lack of organs, transplantations across greater mismatches are increasingly making harsher immune suppressive treatment more common This calls for more efficient methods to monitor the immune status of the patient so that corrective measures in the treatment can be applied in due cause.

[0586] MHC multimers can be of importance in diagnosis of infections caused by bacteria, virus and parasites that hide away inside cells. Serum titers can be very low and direct measurement of the disease-causing organisms by PCR can be very difficult because the host cells are not identified or are inaccessible. Other clinical symptoms of a chronical infection can be unrecognizable in an otherwise healthy individuals, even though such persons still are disease-carriers and at risk of becoming spontaneously ill if being compromised by other diseases or stress. Likewise, cancers can also be diagnosed early in its development if increased numbers of cancer specific T cells can be measured in circulation, even though the tumor is not yet localized.

[0587] Antigen specific tumor infiltrating lymphocytes can be used to identify tumor lesions and metastases as the antigen specific T cells will migrate/home to the tumor site to exert their help or immuno modulatory action (CD4+ T helper cells) or cytotoxic killing of tumor cells expressing the tumor specific/tumor associated peptide MHC multimer (CD8+ T-cells). Likewise identification of sites of infection tumor lesions can be identified as they typically attract antigen specific T-cells.

[0588] Localization of tumors and sites of infection can be carried out using antigen specific T-cells labelled with a paramagnetic isotope in conjunction with magnetic resonance imaging (MRI) or electron spin resonance (ESR). In general, any conventional method for diagnostic imaging visualization can be utilized. Usually gamma and positron emitting radioisotopes are used for camera and paramagnetic isotopes for MRI.

[0589] For peripheral cancer lesion in skin (e.g. melanoma) fluorescently labeled antigen specific T-cells can be used likewise.

[0590] MHC multimers may be used to label the tumor infiltration lymphocytes, e.g. MHC multimers may be labeled with a paramagnetic isotope are injected into the patient, the labeled MHC multimer binds specific T cells and are then internalized thereby introducing the paragmagnetic isotope to the T cell in this way labelleing the T cell.

[0591] Antigen-specific T helper cells and regulatory T cells have been implicated in the development of autoimmune disorders. In most cases the timing of events leading to autoimmune disease is unknown and the exact role of the immune cells not clear. Use of MHC multimers to study these diseases will lead to greater understanding of the disease-causing scenario and make provisions for development of therapies and vaccines for these diseases.

[0592] Therapeutically use of MHC multimers can be possible, either directly or as part of therapeutically vaccines. When performing autologous cancer therapy it is often recognized that the in vitro amplified cancer-specific effector T cells do not home effectively to the correct target sites but ends up in the lungs. If the molecules responsible for interaction with the correct homing receptor can be identified these can be added to the MHC multimer making a dual, triple or multiple molecular structure that are able to aid the antigen-specific T cells home to the correct target, as the MHC multimer will bind to the specific T cell and the additional molecules will mediate binding to the target cells.

[0593] In a preferable embodiment, MHC multimers bound to other functional molecules are employed to directly block, regulate or kill these cells.

[0594] When it become possible to identify and pinpoint the exact function of regulatory T cells it may be possible to directly block, regulate or kill these cells by means of MHCmers bound other functional molecules. The MHC multimers specifically recognize the target T cells and direct the action of the other molecules to the target.

[0595] Derivatives of MHC multimers can be useful as vaccines, as vaccine components or as engineered intelligent adjuvant. The possibility of combining MHC multimers that specifically bind certain T cells with molecules that trigger, e.g. the humoral response or the innate immune response, can accelerate vaccine development and improve the efficiency of vaccines.

### Diseases

[0596] In relation to the use and application of MHCmers in immune monitoring, diagnostics, prognostics, therapy and vaccines in relation to diseases several organisms and human proteins are of relevance, comprising but not limited to the following;

### Infectious Diseases

[0597] a) Caused by Virus such as,

[0598] Adenovirus (subgropus A-F), BK-virus, CMV (Cytomegalo virus, HHV-5), EBV (Epstein Barr Virus, HHV-4), HBV (Hepatitis B Virus), HCV (Hepatitis C virus), HHV-6a and b (Human Herpes Virus-6a and b), HHV-7, HHV-8, HSV-1 (Herpes simplex virus-1, HHV-1), HSV-2 (HHV-2), JC-virus, SV-40 (Simian virus 40), VZV (Varizella-Zoster-Virus, HHV-3), Parvovirus B19, Haemophilus influenza, HIV-1 (Human immunodeficiency Virus-1), HTLV-1 (Human T-lymphotrophic virus-1), HPV (Human Papillomavirus giving rise to clinical manifestions such as Hepatitis, AIDS, Measles, Pox, Chicken pox, Rubella, Herpes and others

b) Caused by Bacteria such as,

[0599] Gram positive bacteria, gram negative bacteria, intracellular bacterium, extracellular bacterium, Mycobacterium tuberculosis, Mycobacterium bovis, Mycobacterium avium subsp. paratuberculosis Borrelia burgdorferi, other spirochetes, Helicobacter pylori, Streptococcus pneumoniae, Listeria monocytogenes, Histoplasma capsulatum, Bartonella henselae, Bartonella quintana giving rise to clinical manifestations such as Tuberculosis, Pneumonia, Stomach ulcers, Paratuberculosis and others

c) Caused by Fungus such as,

[0600] Aspergillus fumigatus, Candida albicans, Cryptococcus neoformans, Pneumocystis carinii giving rise to clinical manifestations such as skin-, nail-, and mucosal infections, Meningitis, Sepsis and others

Parasitic Diseases Caused by Parasites such as,

[0601] Plasmodium falciparum, Plasmodium vivax, Plasmodium malariae, Schistosoma mansoni, Schistosoma japonicum, Schistosoma haematobium, Trypanosoma cruzi, Trypanosoma rhodesiense, Trypanosoma gambiense, Leishmania donovani, Leishmania tropica giving rise to clinical manifestations such as

Allergic Diseases Caused by Allergens such as,

[0602] Birch, Hazel, Elm, Ragweed, Wormwood, Grass, Mould, Dust Mite giving rise to clinical manifestations such as Asthma

### Transplantation Related Disease Caused by

[0603] reactions to minor histocompatibility antigens such as HA-1, HA-8, USP9Y, SMCY, TPR-protein, HB-1Y and other antigens in relation to, Graft-versus-host-related disease, allo- or xenogene reactions i.e. graft-versus-host and host-versus-graft disease.

Cancerous Diseases Associated with Antigens such as

[0604] Survivin, Survivin-2B, Livin/ML-IAP, Bcl-2, Mcl-1, Bcl-X(L), Mucin-1, NY-ESO-1, Telomerase, CEA, MART-1, HER-2/neu, bcr-abl, PSA, PSCA, Tyrosinase, p53, hTRT, Leukocyte Proteinase-3, hTRT, gp100, MAGE antigens, GASC, JMJD2C, JARD2 (JMJ), JHDM3a, WT-1,CA 9, Protein kinases, in relation to clinical manifestations such as malignant melanoma, renal carcinoma, breast cancer, lung cancer, cancer of the uterus, cervical cancer, prostatic cancer, pancreatic cancer, brain cancer, head and neck cancer, leukemia, cutaneous lymphoma, hepatic carcinoma, colorectal cancer, bladder cancer

Autoimmune and Inflammatory Diseases, Associated with Antigens Such as

[0605] GAD64, Collagen, human cartilage glycoprotein 39, -amyloid, A 42, APP, Presenilin 1, in relation to clinical manifestations such as Diabetes type 1, Rheumatoid arthritis, Alzheimer, chronic inflammatory bowel disease, Crohn's disease, ulcerative colitis uterosa, Multiple Sclerosis, Psoriasis

### Approaches to the Analysis or Treatment of Diseases.

[0606] For each application of a MHC multimer, a number of choices must be made. These include:
[0607] A. Disease (to be e.g. treated, prevented, diagnosed, monitored).
[0608] B. Application (e.g. analyze by flow cytometry, isolate specific cells, induce an immune response)
[0609] C. Label (e.g. should the MHC multimer be labelled with a fluorophore or a chromophore)
[0610] D. Biologically active molecule (e.g. should a biologically active molecule such as an interleukin be added or chemically linked to the complex)
[0611] E. Peptide (e.g. decide on a peptide to be complexed with MHC)
[0612] F. MHC (e.g. use a MHC allele that does not interfere with the patient's immune system in an undesired way).

[0613] A number of diseases A₁-Aₙ, relevant in connection with MHC multimers, have been described herein; a number of applications B₁-Bₙ, relevant in connection with MHC multimers, have been described herein; a number of Labels C₁-Cₙ, relevant in connection with MHC multimers, have been described herein; a number of biologically active molecules D₁-Dₙ, relevant in connection with MHC multimers, have been described herein; a number of peptides E₁-Eₙ, relevant in connection with MHC multimers, have been described herein; and a number of MHC molecules F₁-Fₙ, relevant in connection with MHC multimers, have been described herein.

[0614] Thus, each approach involves a choice to be made regarding all or some of the parameters A-F. A given application and the choices it involves can thus be described as follows:

### Ai×Bi×Ci×Di×Ei×Fi

[0615] Where i specifies a number between 1 and n. n is different for different choices A, B, C, D, E, or F. Consequently, the present invention describes a large number of approaches to the diagnosis, monitoring, prognosis, therapeutic or vaccine treatment of diseases. The total number of approaches, as defined by these parameters, are

n(A)×n(B)×n(C)×n(D)×n(E)×n(F),
where n(A) describes the number of different diseases A described herein, n(B) describes the number of different applications B described herein, etc.

### Detection

[0616] Diagnostic procedures, immune monitoring and some therapeutic processes all involve identification and/or enumeration and/or isolation of antigen specific T cells. Identification and enumeration of antigen specific T cells may be done in a number of ways, and several assays are currently employed to provide this information.

[0617] In the following it is described how MHC multimers as described in the present invention can be used to detect specific T cell receptors (TCRs) and thereby antigen specific T cells in a variety of methods and assays. In the present invention detection includes detection of the presence of antigen specific T cell receptors/T cells in a sample, detection of and isolation of cells or entities with antigen specific T cell receptor from a sample and detection and enrichment of cells or entities with antigen specific T cell receptor in a sample.

[0618] The sample may be a biologic sample including solid tissue, solid tissue section or a fluid such as, but not limited to, whole blood, serum, plasma, nasal secretions, sputum, urine, sweat, saliva, transdermal exudates, pharyngeal exudates, bronchoalveolar lavage, tracheal aspirations, cerebrospinal fluid, synovial fluid, fluid from joints, vitreous fluid, vaginal or urethral secretions, or the like. Herein, disaggregated cellular tissues such as, for example, hair, skin, synovial tissue, tissue biopsies and nail scrapings are also considered as biological samples.

[0619] Many of the assays are particularly useful for assaying T-cells in blood samples. Blood samples are whole blood samples or blood processed to remove erythrocytes and platelets (e.g., by Ficoll density centrifugation or other such methods known to one of skill in the art) and the remaining PBMC sample, which includes the T-cells of interest, as well as B-cells, macrophages and dendritic cells, is used directly.

[0620] In order to be able to measure detection of specific T cells by MHC multimers, labels and marker molecules can be used.

### Marker Molecules

[0621] Marker molecules are molecules or complexes of molecules that bind to other molecules. Marker molecules thus may bind to molecules on entities, including the desired entities as well as undesired entities. Labeling molecules are molecules that may be detected in a certain analysis, i.e. the labeling molecules provide a signal detectable by the used method. Marker molecules, linked to labeling molecules, constitute detection molecules. Likewise labeling molecules linked to MHC multimers also constitute detection molecules but in contrast to detection molecules made up of marker and lebelling molecule labeled MHC multimers are specific for TCR.

[0622] Sometimes a marker molecule in itself provides a detectable signal, wherefore attachment to a labeling molecule is not necessary.

[0623] Marker molecules are typically antibodies or antibody fragments but can also be aptamers, proteins, peptides, small organic molecules, natural compounds (e.g. steroids), non-peptide polymers, or any other molecules that specifically and efficiently bind to other molecules are also marker molecules.

### Labelling Molecules

[0624] Labelling molecules are molecules that can be detected in a certain analysis, i.e. the labelling molecules provide a signal detectable by the used method. The amount of labelling molecules can be quantified.

[0625] The labelling molecule is preferably such which is directly or indirectly detectable.

[0626] The labelling molecule may be any labelling molecule suitable for direct or indirect detection. By the term “direct” is meant that the labelling molecule can be detected per se without the need for a secondary molecule, i.e. is a “primary” labelling molecule. By the term “indirect” is meant that the labelling molecule can be detected by using one or more “secondary” molecules, i.e. the detection is performed by the detection of the binding of the secondary molecule(s) to the primary molecule.

[0627] The labelling molecule may further be attached via a suitable linker. Linkers suitable for attachment to labelling molecules would be readily known by the person skilled in the art and as described elsewhere herein for attachment of MHC molecules to multimerisation domains.

[0628] Examples of such suitable labelling compounds are fluorescent labels, enzyme labels, radioisotopes, chemiluminescent labels, bioluminescent labels, polymers, metal particles, haptens, antibodies, and dyes.

[0629] The labelling compound may suitably be selected:

[0630] from fluorescent labels such as 5-(and 6)-carboxyfluorescein, 5- or 6-carboxyfluorescein, 6-(fluorescein)-5-(and 6)-carboxamido hexanoic acid, fluorescein isothiocyanate (FITC), rhodamine, tetramethylrhodamine, and dyes such as Cy2, Cy3, and Cy5, optionally substituted coumarin including AMCA, PerCP, phycobiliproteins including R-phycoerythrin (RPE) and allophycoerythrin (APC), Texas Red, Princeston Red, Green fluorescent protein (GFP) and analogues thereof, and conjugates of R-phycoerythrin or allophycoerythrin and e.g. Cy5 or Texas Red, and inorganic fluorescent labels based on semiconductor nanocrystals (like quantum dot and Qdot™ nanocrystals), and time-resolved fluorescent labels based on lanthanides like Eu3+ and Sm3+,

[0631] from haptens such as DNP, biotin, and digoxiginin,

[0632] from enzymic labels such as horse radish peroxidase (HRP), alkaline phosphatase (AP), beta-galactosidase (GAL), glucose-6-phosphate dehydrogenase, beta-N-acetylglucosaminidase, β-glucuronidase, invertase, Xanthine Oxidase, firefly luciferase and glucose oxidase (GO),

[0633] from luminiscence labels such as luminol, isoluminol, acridinium esters, 1,2-dioxetanes and pyridopyridazines, and

[0634] from radioactivity labels such as incorporated isotopes of iodide, cobalt, selenium, tritium, and phosphor.

[0635] Radioactive labels may in particular be interesting in connection with labelling of the peptides harboured by the MHC multimers.

[0636] Different principles of labelling and detection exist, based on the specific property of the labelling molecule. Examples of different types of labelling are emission of radioactive radiation (radionuclide, isotopes), absorption of light (e.g. dyes, chromophores), emission of light after excitation (fluorescence from fluorochromes), NMR (nuclear magnetic resonance form paramagnetic molecules) and reflection of light (scatter from e.g. such as gold-, plastic- or glass-beads/particles of various sizes and shapes). Alternatively, the labelling molecules can have an enzymatic activity, by which they catalyze a reaction between chemicals in the near environment of the labelling molecules, producing a signal, which include production of light (chemi-luminescence), precipitation of chromophor dyes, or precipitates that can be detected by an additional layer of detection molecules. The enzymatic product can deposit at the location of the enzyme or, in a cell based analysis system, react with the membrane of the cell or diffuse into the cell to which it is attached. Examples of labelling molecules and associated detection principles are shown in table 2 below.

TABLE 2
Examples of labelling molecules and associated detection principles.

| Labelling substance | Effect | Assay-principle |
|---|---|---|
| Fluorochromes | emission of light having a | [symbol] Photometry, Microscopy, |
| | specific spectra | spectroscopy |
| | | PMT, photographic film, CCD's |
| | | (Color-Capture Device or |
| | | Charge-coupled device). |
| Radionuclide | irradiation, α, β or gamma rays | Scintillation counting, GM-tube, |
| | | photographic film, excitation of |
| | | phosphor-imager screen |
| Enzyme; | catalysis of H₂O₂ reduction using | [symbol] Photometry, Microscopy, |
| HRP, (horse reddish peroxidase), | luminol as Oxygen acceptor, | spectroscopy |
| peroxidases in general | resulting in oxidized luminal + | PMT, photographic film, CCD's |
| | light | (Colour-Capture Device or |
| | catalysis of H₂O₂ reduction using | Charge-coupled device), |
| | a soluble dye, or molecule | Secondary label linked antibody |
| | containing a hapten, such as a | |
| | biotin residue as Oxygen | |
| | acceptor, resulting in | |
| | precipitation. The habten can be | |
| | recognized by a detection | |
| | molecule. | |
| Particles; gold, polystyrene | Change of scatter, reflection and | Microscopy, cytometry, electron |
| beads, pollen and other particles | transparency of the associated | microscopy |
| | entity | PMT's, light detecting devices, |
| | | flowcytometry scatter |
| AP (Alkaline Phosphatase) | Catalyze a chemical conversion | [symbol] Photometry, Microscopy, |
| | of a non-detectable to a | spectroscopy |
| | precipitated detectable molecule, | Secondary label linked antibody |
| | such as a dye or a hapten | |
| Ionophores or chelating chemical | Change in absorption and | [symbol] Photometry, Cytometry, |
| compounds binding to specificions, | emission spectrums when | spectroscopy |
| e.g. Ca²⁺ | binding. | |
| | Change in intensity | |
| Lanthanides | Fluorescence | [symbol] photometry, cytometry, |
| | Phosphorescence | spectroscopy |
| | Paramagnetic | NMR (Nuclear magnetic |
| | | resonance) |
| DNA fluorescing stains | Propidium iodide | [symbol] Photometry, cytometry, |
| | Hoechst stain | spectroscopy |
| | DAPI | |
| | AMC | |
| | DraQ5 ™ | |
| | Acridine orange | |
| | 7-AAD | |

[symbol]

Photometry; is to be understood as any method that can be applied to detect the intensity, analyze the wavelength spectra, and or measure the accumulation of light derived form a source emitting light of one or multiple wavelength or spectra.

[0637] Labelling molecules can be used to label MHC multimers as well as other reagents used together with MHC multimers, e.g. antibodies, aptamers or other proteins or molecules able to bind specific structures in another protein, in sugars, in DNA or in other molecules. In the following molecules able to bind a specific structure in another molecule are named a marker. Labelling molecules can be attached to a given MHC multimer or any other protein marker by covalent linkage as described for attachment of MHC multimers to multimerization domains elsewhere herein. The attachment can be directly between reactive groups in the labelling molecule and reactive groups in the marker molecule or the attachment can be through a linker covalently attached to labelling molecule and marker, both as described elsewhere herein. When labelling MHC multimers the label can be attached either to the MHC complex (heavy chain, β2m or peptide) or to the multimerization domain.

[0638] In particular,

[0639] one or more labelling molecules may be attached to the carrier molecule, or

[0640] one or more labelling molecules may be attached to one or more of the scaffolds, or

[0641] one or more labelling compounds may be attached to one or more of the MHC complexes, or

[0642] one or more labelling compounds may be attached to the carrier molecule and/or one or more of the scaffolds and/or one or more of the MHC complexes, or

[0643] one or more labelling compounds may be attached to the peptide harboured by the MHC molecule.

[0644] A single labelling molecule on a marker does not always generate sufficient signal intensity. The signal intensity can be improved by assembling single label molecules into large multi-labelling compounds, containing two or more label molecule residues. Generation of multi-label compounds can be achived by covalent or non-covalent, association of labelling molecules with a major structural molecule. Examples of such structures are synthetic or natural polymers (e.g. dextramers), proteins (e.g. streptavidin), or polymers. The labelling molecules in a multi-labelling compound can all be of the same type or can be a mixture of different labelling molecules.

[0645] In some applications, it may be advantageous to apply different MHC complexes, either as a combination or in individual steps. Such different MHC multimers can be differently labelled (i.e. by labelling with different labelling compounds) enabling visualisation of different target MHC recognising cells. Thus, if several different MHC multimers with different labelling compounds are present, it is possible simultaneously to identify more than one specific receptor, if each of the MHC multimers present a different peptide.

[0646] Detection principles, such as listed in Table 2, can be applied to flow cytometry, stationary cytometry, and batch-based analysis. Most batch-based approaches can use any of the labelling substances depending on the purpose of the assay. Flow cytometry primarily employs fluorescence, whereas stationary cytometry primarily employs light absorption, e.g. dyes or chromophore deposit from enzymatic activity. In the following section, principles involving fluorescence detection will be exemplified for flow cytometry, and principles involving chromophore detection will be exemplified in the context of stationary cytometry. However, the labelling molecules can be applied to any of the analyses described in this invention.

### Labelling Molecules of Particular Utility in Flow Cytometry:

[0647] In flow cytometry the typical label is detected by its fluorescence. Most often a positive detection is based on the presents of light from a single fluorochrome, but in other techniques the signal is detected by a shift in wavelength of emitted light; as in FRET based techniques, where the exited fluorochrome transfer its energy to an adjacent bound fluorochrome that emits light, or when using Ca²⁺ chelating fluorescent props, which change the emission (and absorption) spectra upon binding to calcium.

[0648] Preferably labelling molecules employed in flow cytometry are illustrated in Table 3 and 4 and described in the following.

[0649] Simple fluorescent labels:
[0650] Fluor dyes, Pacific Blue™, Pacific Orange™, Cascade Yellow™
[0651] AlexaFluor® (AF);
   [0652] AF405, AF488,AF500, AF514, AF532, AF546, AF555, AF568, AF594, AF610, AF633, AF635, AF647, AF680, AF700, AF710, AF750, AF800
[0653] Quantum Dot based dyes, QDot® Nanocrystals (Invitrogen, MolecularProbs)
   [0654] Qdot®525, Qdot®565, Qdot®585, Qdot®605, Qdot®655, Qdot®705, Qdot®800
[0655] DyLight™ Dyes (Pierce) (DL);
   [0656] DL549, DL649, DL680, DL800
[0657] Fluorescein (Flu) or any derivate of that, ex. FITC
[0658] Cy-Dyes
   [0659] Cy2, Cy3, Cy3.5, Cy5, Cy5.5, Cy7
[0660] Fluorescent Proteins;
   [0661] RPE, PerCp, APC
   [0662] Green fluorescent proteins;
      [0663] GFP and GFP derivated mutant proteins; BFP,CFP, YFP, DsRed, T1, Dimer2, mRFP1,MBanana, mOrange, dTomato, tdTomato, mTangerine, mStrawberry, mCherry
[0664] Tandem dyes:
   [0665] RPE-Cy5, RPE-Cy5.5, RPE-Cy7, RPE-AlexaFluor® tandem conjugates; RPE-Alexa610, RPE-TxRed
   [0666] APC-Aleca600, APC-Alexa610, APC-Alexa750, APC-Cy5, APC-Cy5.5
[0667] Ionophors; ion chelating fluorescent props
   [0668] Props that change wavelength when binding a specific ion, such as Calcium Props that change intensity when binding to a specific ion, such as Calcium
[0669] Combinations of fluorochromes on the same marker. Thus, the marker is not identified by a single fluorochrome but by a code of identification being a specific combination of fluorochromes, as well as inter related ratio of intensities.
[0670] Example: Antibody Abl and Ab2, are conjugated to both. FITC and BP but Abl have 1 FITC to 1 BP whereas Ab2 have 2 FITC to 1 BP. Each antibody may then be identified individually by the relative intensity of each fluorochrome. Any such combinations of n fluorochromes with m different ratios can be generated.

TABLE 3
Examples of preferable fluorochromes

| | Excitation | Emission |
|---|---|---|
| Fluorofor/Fluorochrome | nm | nm |
| 2-(4′-maleimidylanilino)naphthalene-6- | 322 | 417 |
| sulfonic acid, sodium salt | | |
| 5-((((2- | 336 | 490 |
| iodoacetyl)amino)ethyl)amino)naphthalene- | | |
| 1-sulfonic acid | | |
| Pyrene-1-butanoic acid | 340 | 376 |
| AlexaFluor 350 (7-amino-6-sulfonic acid-4- | 346 | 442 |
| methyl coumarin-3-acetic acid) | | |
| AMCA (7-amino-4-methyl coumarin-3-acetic | 353 | 442 |
| acid) | | |
| 7-hydroxy-4-methyl coumarin-3-acetic acid | 360 | 455 |
| Marina Blue (6,8-difluoro-7-hydroxy-4-methyl | 362 | 459 |
| coumarin-3-acetic acid) | | |
| 7-dimethylamino-coumarin-4-acetic acid | 370 | 459 |
| Fluorescamin-N-butyl amine adduct | 380 | 464 |
| 7-hydroxy-coumarine-3-carboxylic acid | 386 | 448 |
| CascadeBlue (pyrene-trisulphonic acid acetyl | 396 | 410 |
| azide) | | |
| Cascade Yellow | 409 | 558 |
| Pacific Blue (6,8 difluoro-7-hydroxy coumarin- | 416 | 451 |
| 3-carboxylic acid) | | |
| 7-diethylamino-coumarin-3-carboxylic acid | 420 | 468 |
| N-(((4-azidobenzoyl)amino)ethyl)-4-amino- | 426 | 534 |
| 3,6-disulfo-1,8-naphthalimide, dipotassium salt | | |
| Alexa Fluor 430 | 434 | 539 |
| 3-perylenedodecanoic acid | 440 | 448 |
| 8-hydroxypyrene-1,3,6-trisulfonic acid, | 454 | 511 |
| trisodium salt | | |
| 12-(N-(7-nitrobenz-2-oxa-1,3-diazol-4- | 467 | 536 |
| yl)amino)dodecanoic acid | | |
| N,N′-dimethyl-N-(iodoacetyl)-N′-(7-nitrobenz- | 478 | 541 |
| 2-oxa-1,3-diazol-4-yl)ethylenediamine | | |
| Oregon Green 488 (difluoro carboxy | 488 | 518 |
| fluorescein) | | |
| 5-iodoacetamidofluorescein | 492 | 515 |
| propidium iodide-DNA adduct | 493 | 636 |
| Carboxy fluorescein | 495 | 519 |

TABLE 4
Examples of preferable fluorochrome families

| Fluorochrome family | Example fluorochrome |
|---|---|
| AlexaFluor ®(AF) | AF ® 350, AF405, AF430, AF488, AF500, AF514, AF532, |
| | AF546, AF555, AF568, AF594, AF610, AF633, AF635, |
| | AF647, AF680, AF700, AF710, AF750, AF800 |
| Quantum Dot (Qdot ®) based | Qdot ® 525, Qdot ® 565, Qdot ® 585, Qdot ® 605, Qdot ® 655, |
| dyes | Qdot ® 705, Qdot ® 800 |
| DyLight ™ Dyes (DL) | DL549, DL649, DL680, DL800 |
| Small fluorescing dyes | FITC, Pacific Blue ™, Pacific Orange ™, Cascade Yellow ™, |
| | Marina blue ™, DSred, DSred-2, 7-AAD, TO-Pro-3, |
| Cy-Dyes | Cy2, Cy3, Cy3.5, Cy5, Cy5.5, Cy7 |
| Phycobili Proteins: | R-Phycoerythrin (RPE), PerCP, Allophycocyanin (APC), B- |
| | Phycoerythrin, C-Phycocyanin |
| Fluorescent Proteins | (E)GFP and GFP ((enhanced) green fluorescent protein) |
| | derived mutant proteins; BFP, CFP, YFP, DsRed, T1, Dimer2, |
| | mRFP1, MBanana, mOrange, dTomato, tdTomato, |
| | mTangerine, mStrawberry, mCherry |
| Tandem dyes with RPE | RPE-Cy5, RPE-Cy5.5, RPE-Cy7, RPE-AlexaFluor ® tandem |
| | conjugates; RPE-Alexa610, RPE-TxRed |
| Tandem dyes with APC | APC-Aleca600, APC-Alexa610, APC-Alexa750, APC-Cy5, |
| | APC-Cy5.5 |
| Calcium dyes | Indo-1-Ca2+ Indo-2-Ca2+ |

### Preferably Labelling Molecules Employed in Stationary Cytometry and IHC

[0671] Enzymatic labelling, as exemplified in Table 5:
   [0672] Horse radish peroxidase; reduces peroxides (H₂O₂), and the signal is generated by the Oxygen acceptor when being oxidized.
      [0673] Precipitating dyes; Dyes that when they are reduced they are soluble, and precipitate when oxidized, generating a coloured deposit at the site of the reaction.
      [0674] Precipitating agent, carrying a chemical residue, a hapten, for second layer binding of marker molecules, for amplification of the primary signal.
      [0675] Luminol reaction, generating a light signal at the site of reaction.
   [0676] Other enzymes, such as Alkaline Phosphatase, capable of converting a chemical compound from a non-detectable molecule to a precipitated detectable molecule, which can be coloured, or carries a hapten as described above.
[0677] Fluorescent labels, as exemplified in Table 3 and 4; as those described for Flow cytometry are likewise important for used in stationary cytometry, such as in fluorescent microscopy.

TABLE 5
Examples of preferable labels for stationary cytometry

| | Enzyme substrate, | Precipitate or | |
|---|---|---|---|
| | Oxygen acceptor | Residue, hapten* for | |
| | Chromogen/ | secondary detection | Binding partner to |
| Label | precipitating agent | layer | hapten |
| HRP | diaminobenzidine | Colored precipitate | — |
| | (DAB) | | |
| HRP | 3-amino-9-ethyl- | Colored precipitate | — |
| | carbazole (AEC+) | | |
| AP | Fast red dye | Red precipitate | — |
| HRP | biotinyl tyramide | Exposed Biotin residue | Streptavidin, avidine |
| HRP | fluorescein tyramide | Exposed Fluorescein | Anti-Fluorecein Antibody |
| | | residue | |
| “Enzyme” | Substrate that when | Primary label; being a | Secondary label in case |
| | reacted precipitate | dye, | the primary label is a |
| | | chemiluminescence's, | hapten |
| | | or exposure of a hapten | |

### Detection Methods and Principles

[0678] Detection of TCRs with multimers may be direct or indirect.

### Direct Detection

[0679] Direct detection of TCRs is detection directly of the binding interaction between the specific T cell receptor and the MHC multimer. Direct detection includes detection of TCR when TCR is attached to lipid bilayer, when TCR is attached to or in a solid medium or when TCR is in solution.

### Direct Detection of TCR Attached to Lipid Bilayer

[0680] One type of TCRs to detect and measure are TCRs attached to lipid bilayer including but is not limited to naturally occurring T cells (from blood, spleen, lymphnode, brain or any other tissue containing T cells), TCR transfected cells, T cell hybridomas, TCRs embedded in liposomes or any other membrane structure. In the following methods for direct detection of entities of TCRs attached to lipid bilayer will be described and any entity consisting of TCR attached to lipid bilayer will be referred to as T cells.

[0681] T cells can be directly detected either when in a fluid solution or when immobilized to a support.

### Direct Detection of T Cells in Fluid Sample.

[0682] T cells can be detected in fluid samples as described elsewhere herein and in suspension of disrupted tissue, in culture media, in buffers or in other liquids. T cells in fluid samples can be detected individually or detected as populations of T cells. In the following different methods for direct detection of T cells in fluid samples are shown.

### Direct Detection of Individual T Cells

[0683] Direct detection of individual T cells using flow cytometry.
[0684] A suspension of T cells are added MHC multimers, the sample washed and then the amount of MHC multimer bound to each cell are measured. Bound MHC multimers may be labelled directly or measured through addition of labelled marker molecules. The sample is analyzed using a flow cytometer, able to detect and count individual cells passing in a stream through a laser beam. For identification of specific T cells using MHC multimers, cells are stained with fluorescently labeled MHC multimer by incubating cells with MHC multimer and then forcing the cells with a large volume of liquid through a nozzle creating a stream of spaced cells. Each cell passes through a laser beam and any fluorochrome bound to the cell is excited and thereby fluoresces. Sensitive photomultipliers detect emitted fluorescence, providing information about the amount of MHC multimer bound to the cell. By this method MHC multimers can be used to identify specific T cell populations in liquid samples such as synovial fluid or blood.
[0685] When analyzing blood samples whole blood can be used with or without lysis of red blood cells. Alternatively lymphocytes can be purified before flow cytometry analysis using standard procedures like a Ficoll-Hypaque gradient. Another possibility is to isolate T cells from the blood sample for example by binding to antibody coated plastic surfaces, followed by elution of bound cells. This purified T cell population can then be used for flow cytometry analysis together with MHC multimers. Instead of actively isolating T cells unwanted cells like B cells and NK cells can be removed prior to the analysis. One way to do this is by affinity chromatography using columns coated with antibodies specific for the unwanted cells. Alternatively, specific antibodies can be added to the blood sample together with complement, thereby killing cells recognized by the antibodies.
[0686] Various gating reagents can be included in the analysis. Gating reagents here means labeled antibodies or other labeled markers identifying subsets of cells by binding to unique surface proteins. Preferred gating reagents when using MHC multimers are antibodies directed against CD3, CD4, and CD8 identifying major subsets of T cells. Other preferred gating reagents are antibodies against CD14, CD15, CD19, CD25, CD56, CD27, CD28, CD45, CD45RA, CD45RO, CCR7, CCR5, CD62L, Foxp3 recognizing specific proteins unique for different lymphocytes of the immune system. Following labelling with MHC multimers and before analysis on a flow cytometer stained cells can be treated with a fixation reagent like formaldehyde to cross-link bound MHC multimer to the cell surface. Stained cells can also be analyzed directly without fixation.

[0687] The number of cells in a sample can vary. When the target cells are rare, it is preferable to analyze large amounts of cells. In contrast, fewer cells are required when looking at T cell lines or samples containing many cells of the target cell type.

[0688] The flow cytometer can be equipped to separate and collect particular types of cells. This is called cell sorting. MHC multimers in combination with sorting on a flowcytometer can be used to isolate specific T cell populations. Isolated specific T cell populations can then be expanded in vitro. This can be useful in autologous cancer therapy.

[0689] Direct determination of the concentration of MHC-peptide specific T cells in a sample can be obtained by staining blood cells or other cell samples with MHC multimers and relevant gating reagents followed by addition of an exact amount of counting beads of known concentration. Counting beads is here to be understood as any fluorescent bead with a size that can be visualized by flow cytometry in a sample containing T cells. The beads could be made of polystyrene with a size of about 1-10 μm They could also be made of agarose, polyacrylamide, silica, or any other material, and have any size between 0.1 μm and 100 m. The counting beads are used as reference population to measure the exact volume of analyzed sample. The sample are analyzed on a flow cytometer and the amount of MHC-specific T cell determined using a predefined gating strategy and then correlating this number to the number of counted counting beads in the same sample using the following equation: Amounts of MHC-peptide specific T cells in a blood sample can be determined by flow cytometry by calculating the amount of MHC'mer labeled cells in a given volume n of sample with a given cell density and then back calculate. Exact enumeration of specific T cells is better achieved by staining with MHC'mers together with an exact amount of counting beads followed by flow cytometry analysis. The amount of T cells detected can then be correlated with the amount of counting beads in the same volume of the sample and an exact number of MHC-peptide specific T cells determined:

Concentration of MHC-specific T-cell in sample=(number of MHC-peptide specific T cells counted/number of counting beads counted)×concentration of counting beads in sample
[0690] Direct detection of individual T cells in fluid sample by microscopy
[0691] A suspension of T cells are added MHC multimers, the sample washed and then the amount of MHC multimer bound to each cell are measured. Bound MHC multimers may be labelled directly or measured through addition of labelled marker molecules. The sample is then spread out on a slide or similar in a thin layer able to distinguish individual cells and labelled cells identified using a microscope. Depending on the type of label different types of microscopes may be used, e.g. if fluorescent labels are used a fluorescent microscope is used for the analysis. For example MHC multimers can be labeled with a fluorochrome or bound MHC multimer detected with a fluorescent antibody. Cells with bound fluorescent MHC multimers can then be visualized using an immunofluorescence microscope or a confocal fluorescence microscope.
[0692] Direct detection of individual T cells in fluid sample by capture on solid support followed by elution.
[0693] MHC multimers are immobilized to a support e.g. beads, immunotubes, wells of a microtiterplate, CD, microchip or similar and as described elsewhere herein, then a suspension of T cells are added allowing specific T cells to bind MHC multimer molecules. Following washing bound T cells are recovered/eluted (e.g. using acid or competition with a competitor molecules) and counted.

### Direct Detection of Populations of T Cells

[0694] Cell suspensions are added labeled MHC multimer, samples are washed and then total signal from label are measured. The MHC multimers may be labeled themselves or detected through a labeled marker molecule.
[0695] Cell suspensions are added labeled MHC multimer, samples are washed and then signal from label are amplified and then total signal from label and/or amplifier are measured.

### Direct Detection of Immobilized T Cells.

[0696] T cells may be immobilized and then detected directly Immobilization can be on solid support, in solid tissue or in fixator (e.g. paraffin, a sugar matrix or another medium fixing the T cells).

### Direct Detection of T Cells Immobilized on Solid Support.

[0697] In a number of applications, it may be advantageous immobilise the T cell onto a solid or semi-solid support. Such support may be any which is suited for immobilisation, separation etc. Non-limiting examples include particles, beads, biodegradable particles, sheets, gels, filters, membranes (e.g. nylon membranes), fibres, capillaries, needles, microtitre strips, tubes, plates or wells, combs, pipette tips, micro arrays, chips, slides, or indeed any solid surface material. The solid or semi-solid support may be labelled, if this is desired. The support may also have scattering properties or sizes, which enable discrimination among supports of the same nature, e.g. particles of different sizes or scattering properties, colour or intensities.

[0698] Conveniently the support may be made of glass, silica, latex, plastic or any polymeric material. The support may also be made from a biodegradable material.

[0699] Generally speaking, the nature of the support is not critical and a variety of materials may be used. The surface of support may be hydrophobic or hydrophilic.

[0700] Preferred are materials presenting a high surface area for binding of the T cells. Such supports may be for example be porous or particulate e.g. particles, beads, fibres, webs, sinters or sieves. Particulate materials like particles and beads are generally preferred due to their greater binding capacity. Particularly polymeric beads and particles may be of interest.

[0701] Conveniently, a particulate support (e.g. beads or particles) may be substantially spherical. The size of the particulate support is not critical, but it may for example have a diameter of at least 1 μm and preferably at least 2 μm, and have a maximum diameter of preferably not more than 10 μm and more preferably not more than 6 μm. For example, particulate supports having diameters of 2.8 μm and 4.5 μm will work well.

[0702] An example of a particulate support is monodisperse particles, i.e. such which are substantially uniform in size (e.g. size having a diameter standard deviation of less than 5%). Such have the advantage that they provide very uniform reproducibility of reaction. Monodisperse particles, e.g. made of a polymeric material, produced by the technique described in U.S. Pat. No. 4,336,173 (ref. 25) are especially suitable.

[0703] Non-magnetic polymer beads may also be applicable. Such are available from a wide range of manufactures, e.g. Dynal Particles AS, Qiagen, Amersham Biosciences, Serotec, Seradyne, Merck, Nippon Paint, Chemagen, Promega, Prolabo, Polysciences, Agowa, and Bangs Laboratories.

[0704] Another example of a suitable support is magnetic beads or particles. The term “magnetic” as used everywhere herein is intended to mean that the support is capable of having a magnetic moment imparted to it when placed in a magnetic field, and thus is displaceable under the action of that magnetic field. In other words, a support comprising magnetic beads or particles may readily be removed by magnetic aggregation, which provides a quick, simple and efficient way of separating out the beads or particles from a solution. Magnetic beads and particles may suitably be paramagnetic or superparamagnetic. Superparamagnetic beads and particles are e.g. described in EP 0 106 873 (Sintef, ref 26). Magnetic beads and particles are available from several manufacturers, e.g. Dynal Biotech ASA (Oslo, Norway, previously Dynal AS, e.g. Dynabeads®).

[0705] The support may suitably have a functionalised surface. Different types of functionalisation include making the surface of the support positively or negatively charged, or hydrophilic or hydrophobic. This applies in particular to beads and particles. Various methods therefore are e.g. described in U.S. Pat. No. 4,336,173 (ref. 25), U.S. Pat. No. 4,459,378 (ref. 27) and U.S. Pat. No. 4,654,267 (ref 28).

[0706] Immobilized T cells may be detected in several ways including:
[0707] Direct detection of T cells directly immobilized on solid support.
[0708] T cells may be directly immobilized on solid support e.g. by non-specifically adhesion. Then MHC multimers are added to the immobilized T cells thereby allowing specific T cells to bind the MHC multimers. Bound MHC multimer may be measured through label directly attached to the multimer or through labeled marker molecules. Individual T cells may be detected if the method for analysis is able to distinguish individual labeled cells, e.g. cells are immobilized in a monolayer on a cell culture well or a glass slide. Following staining with labeled multimer a digital picture is taken and labeled cells identified and counted.
[0709] Alternatively a population of T cells is detected by measurement of total signal from all labeled T cells, e.g. cells are plated to wells of a microtiter plate, stained with labeled MHC multimer and total signal from each well are measured.
[0710] Direct detection of T cells immobilized on solid support through linker molecule
[0711] T cell can also be immobilized to solid support through a linker molecule. The linker molecule can be an antibody specific for the T cell, the linker can be MHC multimer or the linker can be any molecule able to bind the T cells. In any case the linker may be attached directly to the solid support, the linker may be attached to the solid support through another linker or the linker is embedded in a matrix, e.g. a sugar matrix. Then MHC multimers are added to the immobilized T cells thereby allowing specific T cells to bind the MHC multimers. Bound MHC multimer may be measured through label directly attached to the multimer or through labeled marker molecules. Individual T cells may be detected if the method for analysis is able to distinguish individual labeled cells, e.g. a digital picture is taken and labeled cells identified and counted. Alternatively a population of T cells is detected by measurement of total signal from all labeled T cells.
[0712] Phenotyping T cell sample using MHC multimer beads.
[0713] Different MHC multimers are immobilized to different beads with different characteristics (e.g. different size, different fluorescence's or different fluorescence intensities) where each kind of bead has a specific type of MHC multimer molecule immobilized. The immobilization may be direct or through a linker molecule as described above. The amount of bound T cells to a specific populations of beads can be analyzed, thereby, phenotyping the sample. The TCR on the T cell is defined by the bead to which it binds.
[0714] Direct detection of T cells immobilized to solid support in a defined pattern.
[0715] Different MHC multimers are immobilized to a support to form a spatial array in a defined pattern, where the position specifies the identity of the MHC multimer immobilized at this position. The immobilization may be direct or through a linker molecule as described above. Then a suspension of labeled T cells are added or passed over the array of MHC multimers and specific T cells will bind the immobilized MHC multimer molecules. The label will thus be located at specific regions of the array, which will allow identification of the MHC multimers that bind the cells, and thus, allows the identification of T cells with recognition specificity for the immobilized MHC multimers. Alternatively, the cells can be labelled after they have been bound to the MHC multimers. The label can be specific for the type of cell that is expected to bind the MHC multimer (e.g. anti-CD4 for the labelling of T-helper cells in general, where some of the T-helper cells can be specific for a Class II MHC complex), or the label can stain cells in general (e.g. a label that binds DNA).
[0716] In this way T cells bound to the defined areas of the support are analyzed, thereby, phenotyping the sample. Each individual T cell is defined by the TCR it expose and depending on these TCRs each entity will bind to different types of MHC multimer molecules immobilized at defined positions on the solid support.

### Direct Detection of Immobilized T Cells Followed by Sorting

[0717] T cells immobilized to solid support in either of the ways described above can following washing be eluted from the solid support and treated further. This is a method to sort out specific T cells from a population of different T cells. Specific T-cells can e.g. be isolated through the use of bead-based MHC multimers. Bead-based MHC multimers are beads whereto monomer MHC-peptide complexes or MHC multimers are immobilized. After the cells have been isolated they can be manipulated in many different ways. The isolated cells can be activated (to differentiate or proliferate), they can undergo induced apoptosis, or undesired cells of the isolated cell population can be removed. Then, the manipulated cell population can be re-introduced into the patient, or can be introduced into another patient.

[0718] A typical cell sorting experiment, based on bead-based MHC multimers, would follow some of the steps of the general procedure outlined in general terms in the following:

[0719] Acquire the sample, e.g. a cell sample from the bone marrow of a cancer patient.

[0720] Block the sample with a protein solution, e.g. BSA or skim milk.

[0721] Block the beads coated with MHC complexes, with BSA or skim milk.

[0722] Mix MHC-coated beads and the cell sample, and incubate.

[0723] Wash the beads with washing buffer, to remove unbound cells and non-specifically bound cells.

[0724] Isolate the immobilized cells, by either cleavage of the linker that connects MHC complex and bead; or alternatively, release the cells by a change in pH, salt-concentration addition of competitive binder or the like. Preferably, the cells are released under conditions that do not disrupt the integrity of the cells.

[0725] Manipulate the isolated cells (induce apoptosis, proliferation or differentiation)

### Direct Detection of T Cells in Solid Tissue.

[0726] Direct detection of T cells in solid tissue in vitro.
[0727] For in vitro methods of the present invention solid tissue includes tissue, tissue biopsies, frozen tissue or tissue biopsies, paraffin embedded tissue or tissue biopsies and sections of either of the above mentioned. In a preferred method of this invention sections of fixed or frozen tissues are incubated with MHC multimer, allowing MHC multimer to bind to specific T cells in the tissue section. The MHC multimer may be labeled directly or through a labeled marker molecule. As an example, the MHC multimer can be labeled with a tag that can be recognized by e.g. a secondary antibody, optionally labeled with HRP or another label. The bound MHC multimer is then detected by its fluorescence or absorbance (for fluorophore or chromophore), or by addition of an enzyme-labeled antibody directed against this tag, or another component of the MHC multimer (e.g. one of the protein chains, a label on the multimerization domain). The enzyme can be Horse Raddish Peroxidase (HRP) or Alkaline Phosphatase (AP), both of which convert a colorless substrate into a colored reaction product in situ. This colored deposit identifies the binding site of the MHC multimer, and can be visualized under a light microscope. The MHC multimer can also be directly labeled with e.g. HRP or AP, and used in IHC without an additional antibody.
[0728] The tissue sections may derive from blocks of tissue or tissue biopsies embedded in paraffin, and tissue sections from this paraffin-tissue block fixed in formalin before staining. This procedure may influence the structure of the TCR in the fixed T cells and thereby influence the ability to recognize specific MHC complexes. In this case, the native structure of TCR needs to be at least partly preserved in the fixed tissue. Fixation of tissue therefore should be gentle. Alternatively, the staining is performed on frozen tissue sections, and the fixation is done after MHC multimer staining.
[0729] Direct detection of T cells in solid tissue in vivo
[0730] For in vivo detection of T cells labeled MHC multimers are injected in to the body of the individual to be investigated. The MHC multimers may be labeled with e.g. a paramagnetic isotope. Using a magnetic resonance imaging (MRI) scanner or electron spin resonance (ESR) scanner MHC multimer binding T cells can then be measured and localized. In general, any conventional method for diagnostic imaging visualization can be utilized. Usually gamma and positron emitting radioisotopes are used for camera and paramagnetic isotopes for MRI.

[0731] The methods described above for direct detection of TCR embedded in lipid bilayers collectively called T cells using MHC multimers also applies to detection of TCR in solution and detection of TCR attached to or in a solid medium. Though detection of individual TCRs may not be possible when TCR is in solution.

### Indirect Detection of TCR

[0732] Indirect detection of TCR is primarily useful for detection of TCRs embedded in lipid bilayer, preferably natural occurring T cells, T cell hybridomas or transfected T cells. In indirect detection, the number or activity of T cells are measured, by detection of events that are the result of TCR-MHC-peptide complex interaction. Interaction between MHC multimer and T cell may stimulate the T cell resulting in activation of T cells, in cell division and proliferation of T cell populations or alternatively result in inactivation of T cells. All these mechanism can be measured using various detection methods.

### Indirect Detection of T Cells by Measurement of Activation.

[0733] MHC multimers, e.g. antigen presenting cells, can stimulate T cells resulting in activation of the stimulated T cells. Activation of T cell can be detected by measurement of secretion of specific soluble factor from the stimulated T cell, e.g. secretion of cytokines like INFγ and IL2. Stimulation of T cells can also be detected by measurement of changes in expression of specific surface receptors, or by measurement of T cell effector functions. Measurement of activation of T cells involves the following steps:
[0734] a) To a sample of T cells, preferably a suspension of cells, is added MHC multimer to induce either secretion of soluble factor, up- or down-regulation of surface receptor or other changes in the T cell.
   [0735] Alternatively, a sample of T cells containing antigen presenting cells is added antigenic peptide or protein/protein fragments that can be processed into antigenic peptides by the antigen presenting cell and that are able to bind MHC I or MHC II molecules expressed by the antigen presenting cells thereby generating a cell based MHC multimer in the sample. Several different peptides and proteins be added to the sample. The peptide-loaded antigen presenting cells can then stimulate specific T cells, and thereby induce the secretion of soluble factor, up- or down-regulation of surface receptors, or mediate other changes in the T cell, e.g. enhancing effector functions.
   [0736] Optionally a second soluble factor, e.g. cytokine and/or growth factor(s) may be added to facilitate continued activation and expansion of T cell population.
[0737] b) Detect the presence of soluble factor, the presence/absence of surface receptor or detect effector function
[0738] c) Correlate the measured result with presence of T cells. The measured signal/response indicate the presence of specific T cells that have been stimulated with particular MHC multimer.
   [0739] The signal/response of a T lymphocyte population is a measure of the overall response. The frequency of specific T cells able to respond to a given MHC multimer can be determined by including a limiting-dilution culture in the assay also called a Limiting dilution assay.
   [0740] The limiting-dilution culture method involves the following steps:
      [0741] a) Sample of T cells in suspension are plated into culture wells at increasing dilutions
      [0742] b) MHC multimers are added to stimulate specific T cells. Alternatively antigen presenting cells are provided in the sample and then antigenic peptide I added to the sample as described above.
         [0743] Optionally growth factors, cytokines or other factors helping T cells to proliferate are added.
      [0744] c) Cells are allowed to grow and proliferate (½-several days). Each well that initially contained a specific T cell will make a response to the MHC multimer and divide.
      [0745] d) Wells are tested for a specific response e.g. secretion of soluble factors, cell proliferation, cytotoxicity or other effector function.
      [0746] The assay is replicated with different numbers of T cells in the sample, and each well that originally contained a specific T cell will make a response to the MHC multimer. The frequency of specific T cells in the sample equals the reciprocal of the number of cells added to each well when 37% of the wells are negative, because due to Poisson distribution each well then on average contained one specific T cell at the beginning of the culture.

[0747] In the following various methods to measure secretion of specific soluble factor, expression of surface receptors, effector functions or proliferation is described.

### Indirect Detection of T Cells by Measurement of Secretion of Soluble Factors.

### Indirect Detection of T Cells by Measurement of Extracellular Secreted Soluble Factors.

[0748] Secreted soluble factors can be measured directly in fluid suspension, captured by immobilization on solid support and then detected or an effect of the secreted soluble factor can be detected.
[0749] Indirect detection of T cells by measurement of extracellular secreted soluble factor directly in fluid sample.
[0750] A sample of T cells are added MHC multimer or antigenic peptide as described above to induce secretion of soluble factors from antigen specific T cells. The secreted soluble factors can be measured directly in the supernatant using e.g. mass spectrometry.
[0751] Indirect detection of T cells by capture of extracellular secreted soluble factor on solid support.
[0752] A sample of T cells are added MHC multimer or antigenic peptide as described above to induce secretion of soluble factors from antigen specific T cells. Secreted soluble factors in the supernatant are then immobilized on a solid support either directly or through a linker as described for immobilization of T cells elsewhere herein. Then immobilized soluble factors can be detected using labeled marker molecules.
[0753] Soluble factors secreted from individual T cells can be detected by capturing of the secreted soluble factors locally by marker molecules, e.g antibodies specific for the soluble factor. Soluble factor recognising marker molecules are then immobilised on a solid support together with T cells and soluble factors secreted by individual T cells are thereby captured in the proximity of each T cell. Bound soluble factor can be measured using labelled marker molecule specific for the captured soluble factor. The number of T cells that has given rise to labelled spots on solid support can then be enumerated and these spots indicate the presence of specific T cells that may be stimulated with particular MHC multimer.
[0754] Soluble factors secreted from a population of T cells are detected by capture and detection of soluble factor secreted from the entire population of specific T cells. In this case soluble factor do not have to be captured locally close to each T cell but the secreted soluble factors my be captured and detected in the same well as where the T cells are or transferred to another solid support with marker molecules for capture and detection e.g. beads or wells of ELISA plate.
[0755] Indirect detection of T cells immobilized to solid support in a defined pattern.
[0756] Different MHC multimers of MHC-peptide complexes are immobilized to a support to form a spatial array in a defined pattern, where the position specifies the identity of the MHC multimer/MHC-peptide complex immobilized at this position. Marker molecules able to bind T cell secreted soluble factors are co-spotted together with MHC multimer/MHC-peptide complex. Such marker molecules can e.g. be antibodies specific for cytokines like INFγ or IL-2. The immobilization may be direct or through a linker molecule as described above. Then a suspension of labeled T cells are added or passed over the array of MHC multimers/MHC-peptide complexes and specific T cells will bind to the immobilized MHC multimers/MHC-peptide complexes and upon binding be stimulated to secrete soluble factors e.g. cytokines like INFγ ord IL-2. Soluble factors secreted by individual T cells are then captured in the proximity of each T cell and bound soluble factor can be measured using labelled marker molecule specific for the soluble factor. The number and position of different specific T cells that has given rise to labelled spots on solid support can then be identified and enumerated. In this way T cells bound to defined areas of the support are analyzed, thereby, phenotyping the sample. Each individual T cell is defined by the TCR it expose and depending on these TCRs each entity will bind to different types of MHC multimers/MHC-peptide complexes immobilized at defined positions on the solid support.
[0757] Indirect detection of T cells by measurement of effect of extracellular secreted soluble factor.
[0758] Secreted soluble factors can be measured and quantified indirectly by measurement of the effect of the soluble factor on other cell systems. Briefly, a sample of T cells are added MHC multimer or antigenic peptide as described above to induce secretion of soluble factors from antigen specific T cells. The supernatant containing secreted soluble factor are transferred to another cell system and the effect measured. The soluble factor may induce proliferation, secretion of other soluble factors, expression/downregulation of receptors, or the soluble factor may have cytotoxic effects on these other cells. All effects can be measured as described elsewhere herein.

### Indirect Detection of T Cells by Measurement of Intracellular Secreted Soluble Factors

[0759] Soluble factor production by stimulated T cells can be also be measured intracellular by e.g. flow cytometry. This can be done using block of secretion of soluble factor (e.g. by monensin), permeabilization of cell (by e.g. saponine) followed by immunofluorescent staining. The method involves the following steps: 1) Stimulation of T cells by binding specific MHC multimers, e.g. antigen presenting cells loaded with antigenic peptide. An reagent able to block extracellular secretion of cytokine is added, e.g. monensin that interrupt intracellular transport processes leading to accumulation of produced soluble factor, e.g. cytokine in the Golgi complex. During stimulation other soluble factors may be added to the T cell sample during stimulation to enhance activation and/or expansion. This other soluble factor can be cytokine and or growth factors. 2) addition of one or more labelled marker able to detect special surface receptors (e.g. CD8, CD4, CD3, CD27, CD28, CD2). 3) Fixation of cell membrane using mild fixator followed by permeabilization of cell membrane by. e.g. saponine. 4) Addition of labelled marker specific for the produced soluble factor to be determined, e.g. INFγ, IL-2, IL-4, IL-10. 5) Measurement of labelled cells using a flow cytometer.

[0760] An alternative to this procedure is to trap secreted soluble factors on the surface of the secreting T cell as described by Manz, R. et al., Proc. Natl. Acad. Sci. USA 92:1921 (1995).

### Indirect Detection of T Cells by Measurement of Expression of Receptors

[0761] Activation of T cells can be detected by measurement of expression and/or down regulation of specific surface receptors. The method includes the following steps. A sample of T cells are added MHC multimer or antigenic peptide as described above to induce expression or downregulation of specific surface receptors on antigen specific T cells. These receptors include but are not limited to CD28, CD27, CCR7, CD45RO, CD45RA, IL2-receptor, CD62L, CCR5. Their expression level can be detected by addition of labelled marker specific for the desired receptor and then measure the amount of label using flow cytometry, microscopy, immobilization of activated T cell on solid support or any other method like those described for direct detection of TCR in lipid bilayer.

### Indirect Detection of T Cells by Measurement of Effector Function

[0762] Activation of T cells can be detected indirectly by measurement of effector functions. A sample of T cells are added MHC multimer or antigenic peptide as described above to induce the T cell to be able to do effector function. The effector function is then measured. E.g. activation of antigen specific CD8 positive T cells can be measured in a cytotoxicity assay.

### Indirect Detection of T Cells by Measurement of Proliferation

[0763] T cells can be stimulated to proliferate upon binding specific MHC multimers. Proliferation of T cells can be measured several ways including but not limited to:
[0764] Detection of mRNA
[0765] Proliferation of T cells can be detected by measurement of mRNA inside cell. Cell division and proliferation requires production of new protein in each cell which as an initial step requires production of mRNA encoding the proteins to be synthesized.
[0766] A sample of T cells are added MHC multimer or antigenic peptide as described above to induce proliferation of antigen specific T cells. Detection of levels of mRNA inside the proliferating T cells can be done by quantitative PCR and indirectly measure activation of a T cell population as a result of interaction with MHC multimer. An example is measurement of cytokine mRNA by in situ hybridization.
[0767] Detection of incorporation of thymidine
[0768] The proliferative capacity of T cells in response to stimulation by MHC multimer can be determined by a radioactive assay based on incorporation of [³H]thymidine ([³H]TdR) into newly generated DNA followed by measurement of radioactive signal.
[0769] Detection of incorporation of BrdU
[0770] T cell proliferation can also be detected by of incorporation of bromo-2′-deoxyuridine (BrdU) followed by measurement of incorporated BrdU using a labeled anti-BrdU antibody in an ELISA based analysis.

[0771] Viability of cells may be measured by measurement ATP in a cell culture.

### Indirect Detection of T Cells by Measurement of Inactivation

[0772] Not all MHC multimers will lead to activation of the T cells they bind. Under certain circumstances some MHC multimers may rather inactivate the T cells they bind to.

### Indirect Detection of T Cells by Measurement of Effect of Blockade of TCR

[0773] Inactivation of T cells by MHC multimers may be measured be measuring the effect of blocking TCR on antigen specific T cells. MHC multimers, e.g. MHC-peptide complexes coupled to IgG scaffold can block the TCR of an antigen specific T cell by binding the TCR, thereby prevent the blocked T cell receptor interacting with e.g. antigen presenting cells. Blockade of TCRs of a T cell can be detected in any of the above described methods for detection of TCR by addition of an unlabeled blocking MHC multimer together with the labelled MHC multimer and then measuring the effect of the blockade on the readout.

### Indirect Detection of T Cells B Measurement of Induction of Apoptosis

[0774] Inactivation of T cells by MHC multimers may be measured be measuring apoptosis of the antigen specific T cell. Binding of some MHC multimers to specific T cells may lead to induction of apoptosis. Inactivation of T cells by binding MHC multimer may therefore be detected by measuring apoptosis in the T cell population. Methods to measure apoptosis in T cells include but are not limited to measurement of the following:
[0775] DNA fragmentation
[0776] Alterations in membrane asymmetry (phosphatidylserine translocation)
[0777] Activation of apoptotic caspases
[0778] Release of cytochrome C and AIF from mitochondria into the cytoplasm

### Positive Control Experiments for the Use of MHC Multimers in Flow Cytometry and Related Techniques

[0779] When performing flow cytometry experiments, or when using similar technologies, it is important to include appropriate positive and negative controls. In addition to establishing proper conditions for the experiments, positive and negative control reagents can also be used to evaluate the quality (e.g. specificity and affinity) and stability (e.g. shelf life) of produced MHC multimers.

[0780] The quality and stability of a given MHC multimer can be tested in a number of different ways, including:
[0781] Measurement of specific MHC multimer binding to beads, other types of solid support, or micelles and liposomes, to which TCR's have been immobilized. Other kinds of molecules that recognize specifically the MHC-peptide complex can be immobilized and used as well. Depending on the nature of the solid support or membrane structure to which the TCR is immobilized, the TCR can be full-length (i.e. comprise the intracellular- and intra-membrane domains), or can be truncated (e.g. only comprise the extracellular domains). Likewise, the TCR can be recombinant, and can be chemically or enzymatically modified.
[0782] Measurement of MHC multimer binding to beads, other types of solid support, or micelles and liposomes, to which aptamers, antibodies or other kinds of molecules that recognize correctly folded MHC-peptide complexes have been immobilized.
[0783] Measurement of specific MHC multimer binding to specific cell lines (e.g. T-cell lines) displaying MHC multimer-binding molecules, e.g. displaying TCRs with appropriate specificity and affinity for the MHC multimer in question.
[0784] Measurement of specific MHC multimer binding to cells in blood samples, preparations of purified lymphocytes (HPBMCs), or other bodily fluids that contain cells carrying receptor molecules specific for the MHC multimer in question.
[0785] Measurement of specific MHC multimer binding to soluble TCRs, aptamers, antibodies, or other soluble MHC-peptide complex-binding molecules, by density-gradient centrifugation (e.g. in CsCl) or by size exclusion chromatography, PAGE or other type of chromatographic method.

[0786] Measurement of specific MHC binding to TCRs, aptamers, antibodies, streptavidin, or other MHC-peptide complex-binding molecules immobilized on a solid surface (e.g. a microtiter plate). The degree of MHC multimer binding can be visualized with a secondary component that binds the MHC multimer, e.g. a biotinylated fluorophore in cases where the MHC multimer contains streptavidin proteins, not fully loaded with biotin. Alternatively, the secondary component is unlabelled, and a labelled second component-specific compound is employed (e.g. EnVision System, Dako) for visualization. This solid surface can be beads, immunotubes, microtiterplates act. The principle for purification are basically the same I.e. T cells are added to the solid with immobilized MHC'mer, non-binding T cells are washed away and MHC-peptide specific T cells can be retrieved by elution with mild acid or a competitive binding reagent.
[0787] Measurement of specific MHC multimer binding to TCRs, aptamers, antibodies, streptavidin, or other MHC-peptide complex-binding molecules immobilized on a solid surface (e.g. a microtiter plate) visualized with a secondary component specific to MHC multimer (e.g. TCRs, aptamers, antibodies, streptavidin, or other MHC-peptide binding complex-binding molecules). Alternatively the secondary receptor is unlabelled, and a labelled second receptor-specific compound is employed (e.g. EnVision System, Dako) before visualization.

[0788] In the above mentioned approaches, positive control reagents include MHC multimers comprising correctly folded MHC, complexed with an appropriate peptide that allows the MHC multimer to interact specifically and efficiently with its cognate TCR. Negative control reagents include empty MHC multimers, or correctly folded MHC multimers complexed with so-called nonsense peptides that support a correct conformation of the MHC-peptide complex, but that do not efficiently bind TCRs through the peptide-binding site of the MHC complex.

### Negative Control Reagents and Negative Control Experiments for the Use of MHC Multimers in Flow Cytometry and Related Techniques

[0789] Experiments with MHC multimers require a negative control in order to determine background staining with MHC multimer. Background staining can be due to unwanted binding of any of the individual components of the MHC multimer, e.g., MHC complex or individual components of the MHC complex, multimerization domain or label molecules. The unwanted binding can be to any surface or intracellular protein or other cellular structure of any cell in the test sample, e.g. undesired binding to B cells, NK cells or T cells. Unwanted binding to certain cells or certain components on cells can normally be corrected for during the analysis, by staining with antibodies that bind to unique surface markers of these specific cells, and thus identifies these as false positives, or alternatively, that bind to other components of the target cells, and thus identifies these cells as true positives. A negative control reagent can be used in any experiment involving MHC multimers, e.g. flow cytometry analysis, other cytometric methods, immunohistochemistry (IHC) and ELISA. Negative control reagents include the following:
[0790] MHC complexes or MHC multimers comprising MHC complexes carrying nonsense peptides. A nonsense peptide is here to be understood as a peptide that binds the MHC protein efficiently, but that does not support binding of the resultant MHC-peptide complex to the desired TCR. An example nonsense peptide is a peptide with an amino acid sequence different from the linear sequence of any peptide derived from any known protein. When choosing an appropriate nonsense peptide the following points are taken into consideration. The peptide should ideally have appropriate amino acids at relevant positions that can anchor the peptide to the peptide-binding groove of the MHC. The remaining amino acids should ideally be chosen in such a way that possible binding to TCR (through interactions with the peptide or peptide-binding site of MHC) are minimized. The peptide should ideally be soluble in water to make proper folding with MHC alpha chain and β2m possible in aqueous buffer. The length of the peptide should ideally match the type and allele of MHC complex. The final peptide sequence should ideally be taken through a blast search or similar analysis, to ensure that it is not identical with any peptide sequence found in any known naturally occurring proteins.
[0791] MHC complexes or MHC multimers comprising MHC complexes carrying a chemically modified peptide in the peptide-binding groove. The modification should ideally allow proper conformation of the MHC-peptide structure, yet should not allow efficient interaction of the peptide or peptide-binding site of MHC with the TCR.
[0792] MHC complexes or MHC multimers comprising MHC complexes carrying a naturally occurring peptide different from the peptide used for analysis of specific T cells in the sample. When choosing the appropriate natural peptide the following should be taken into consideration. The peptide in complex with the MHC protein should ideally not be likely to bind a TCR of any T cell in the sample with such an affinity that it can be detected with the applied analysis method. The peptide should ideally be soluble in water to make proper folding with MHC alpha chain and β2m possible in aqueous buffer. The length of the peptide should match the type and allele of MHC complex.
[0793] Empty MHC complexes or MHC multimers comprising empty MHC complexes, meaning any correctly folded MHC complex without a peptide in the peptide-binding groove.
[0794] MHC heavy chain or MHC multimers comprising MHC heavy chain, where MHC heavy chain should be understood as full-length MHC I or MHC II heavy chain or any truncated version of MHC I or MHC II heavy chain. The MHC heavy chains can be either folded or unfolded. Of special interest is MHC I alpha chains containing the α3 domain that binds CD8 molecules on cytotoxic T cells. Another embodiment of special interest is MHC II β chains containing the β2 domain that binds CD4 on the surface of helper T cells.
[0795] Beta2 microglobulin or subunits of beta2 microglobulin, or MHC multimers comprising Beta2 microglobulin or subunits of beta2 microglobulin, folded or unfolded.
[0796] MHC-like complexes or MHC multimers comprising MHC-like complexes, folded or unfolded. An example could be CD1 molecules that are able to bind peptides in a peptide-binding groove that can be recognized by T cells (Russano et al. (2007). CD1-restricted recognition of exogenous and self-lipid antigens by duodenal gammadelta+ T lymphocytes. J. Immunol. 178(6):3620-6)
[0797] Multimerization domains without MHC or MHC-like molecules, e.g. dextran, streptavidin, IgG, coiled-coil-domain liposomes.
[0798] Labels, e.g. FITC, PE, APC, pacific blue, cascade yellow, or any other label listed elsewhere herein.

[0799] Negative controls 1-4 can provide information about potentially undesired binding of the MHC multimer, through interaction of a surface of the MHC-peptide complex different from the peptide-binding groove and its surroundings. Negative control 5 and 6 can provide information about binding through interactions through the MHC I or MHC II proteins (in the absence of peptide). Negative control 7 can provide information about binding through surfaces of the MHC complex that is not unique to the MHC complex. Negative controls 8 and 9 provide information about potential undesired interactions between non-MHC-peptide complex components of the MHC multimer and cell constituents.

### Minimization of Undesired Binding of the MHC Multimer

[0800] Identification of MHC-peptide specific T cells can give rise to background signals due to unwanted binding to cells that do not carry TCRs. This undesired binding can result from binding to cells or other material, by various components of the MHC multimer, e.g. the dextran in a MHC dextramer construct, the labelling molecule (e.g. FITC), or surface regions of the MHC-peptide complex that do not include the peptide and the peptide-binding cleft. MHC-peptide complexes bind to specific T cells through interaction with at least two receptors in the cell membrane of the T-cell. These two receptors are the T-cell receptor (TCR) and CD8 for MHC I-peptide complexes and TCR and CD4 receptor protein for MHC II-peptide complexes. Therefore, a particularly interesting example of undesired binding of a MHC multimer is its binding to the CD8 or CD4 molecules of T cells that do not carry a TCR specific for the actual MHC-peptide complex. The interaction of CD8 or CD4 molecules with the MHC is not very strong; however, because of the avidity gained from the binding of several MHC complexes of a MHC multimer, the interaction between the MHC multimer and several CD8 or CD4 receptors potentially can result in undesired but efficient binding of the MHC multimer to these T cells. In an analytical experiment this would give rise to an unwanted background signal; in a cell sorting experiment undesired cells might become isolated.

[0801] Other particular interesting examples of undesired binding is binding to lymphoid cells different from T cells, e.g. NK-cells, B-cells, monocytes, dendritic cells, and granulocytes like eosinophils, neutrophils and basophiles.

[0802] Apart from the MHC complex, other components in the MHC multimer can give rise to unspecific binding. Of special interest are the multimerization domain, multimerization domain molecules, and labelling molecules.

[0803] One way to overcome the problem with unwanted binding is to include negative controls in the experiment and subtract this signal from signals derived from the analyzed sample, as described elsewhere in the invention.

[0804] Alternatively, unwanted binding could be minimized or eliminated during the experiment. Methods to minimize or eliminate background signals include:
[0805] Mutations in areas of the MHC complex responsible for binding to unwanted cells can be introduced. Mutations here mean substitution, insertion, or deletion of natural or non-natural amino acids. Sub-domains in the MHC complex can be responsible for unwanted binding of the MHC multimer to cells without a TCR specific for the MHC-peptide complex contained in the MHC multimer. One example of special interest is a small region in the α3-domain of the α-chain of MHC I molecules that is responsible for binding to CD8 on all cytotoxic T cells. Mutations in this area can alter or completely abolish the interaction between CD8 on cytotoxic T cells and MHC multimer (Neveu et al. (2006) Int Immunol. 18, 1139-45). Similarly a sub domain in the β2 domain of the β-chain of MHC II molecules is responsible for binding CD4 molecules on all CD4 positive T cells. Mutations in this sub domain can alter or completely abolish the interaction between MHC II and CD4. Another embodiment is to mutate other areas of MHC I/MHC II complexes that are involved in interactions with T cell surface receptors different from TCR, CD8 and CD4, or that bind surface receptors on B cells, NK cells, Eosiniophils, Neutrophils, Basophiles, Dendritic cells or monocytes.
[0806] Chemical alterations in areas of the MHC complex responsible for binding to unwanted cells can be employed in order to minimize unwanted binding of MHC multimer to irrelevant cells. Chemical alteration here means any chemical modification of one or more amino acids. Regions in MHC complexes that are of special interest are as mentioned above the α3 domain of the α-chain in MHC I molecules and β2 domains in the β-chain of MHC II molecules. Other regions in MHC I/MHC II molecules that can be chemically modified to decrease the extent of undesired binding are regions involved in interaction with T cell surface receptors different from TCR, CD8 and CD4, or that bind surface receptors on B cells, NK cells, Eosiniophils, Neutrophils, Basophiles, Dendritic cells or monocytes.
[0807] Another method to minimize undesired binding involves the addition of one or more components of a MHC multimer, predicted to be responsible for the unwanted binding. The added component is not labeled, or carries a label different from the label of the MHC multimer used for analysis. Of special interest is addition of MHC multimers that contain nonsense peptides, i.e. peptides that interact efficiently with the MHC protein, but that expectably do not support specific binding of the MHC multimer to the TCR in question. Another example of interest is addition of soluble MHC complexes not coupled to a multimerization domain, and with or without peptide bound in the peptide binding cleft. In another embodiment, individual components of the MHC complex can be added to the sample, e.g. I α-chain or subunits of MHC I α-chain either folded or unfolded, beta2 microglobulin or subunits thereof either folded or unfolded, α/β-chain of MHC II or subunits thereof either folded or unfolded. Any of the above mentioned individual components can also be attached to a multimerization domain identical or different from the one used in the MHC multimer employed in the analysis.
[0808] Of special interest is also addition of multimerization domain similar or identical to the multimerization domain used in the MHC multimer or individual components of the multimerization domain.
[0809] Reagents able to identify specific cell types either by selection or exclusion can be included in the analysis to help identify the population of T cells of interest, and in this way deselect the signal arising from binding of the MHC multimer to undesired cells.
[0810] Of special interest is the use of appropriate gating reagents in flow cytometry experiments. Thus, fluorescent antibodies directed against specific surface markers can be used for identification of specific subpopulations of cells, and in this way help to deselect signals resulting from MHC-multimers binding to undesired cells.
[0811] Gating reagents of special interest that helps identify the subset of T cells of interest when using MHC I multimers are reagents binding to CD3 and CD8 identifying all cytotoxic T cells. These reagents are preferably antibodies but can be any labeled molecule capable of binding CD3 or CD8. Gating reagents directed against CD3 and CD8 are preferably used together. As they stain overlapping cell populations they are preferably labeled with distinct fluorochromes. However, they can also be used individually in separate samples. In experiments with MHC II multimers reagents binding to CD3 and CD4 identifying T helper cells can be used. These reagents are preferably antibodies but can be any labeled molecule capable of binding CD3 or CD4. Gating reagents directed against CD3 and CD4 are preferable used together. As they stain overlapping cell populations they are preferably labeled with distinct fluorochromes. However, they can also be used individually in separate samples.

[0812] Other gating reagents of special interest in experiments with any MHC multimer, are reagents binding to the cell surface markers CD2, CD27, CD28, CD45RA, CD45RO, CD62L and CCR7. These surface markers are unique to T cells in various differentiation states. Co staining with either of these reagents or combinations thereof together with MHC multimers helps to select MHC multimer binding T cells expressing a correct TCR. These reagents can also be combined with reagents directed against CD3, CD4 and/or CD8.

[0813] Another flow cytometric method of special interest to remove signals from MHC multimer stained cells not expressing the specific TCR, is to introduce an exclusion gate. Antibodies or other reagents specific for surface markers unique to the unwanted cells are labeled with a fluorochrome and added to the test sample together with the MHC multimer. The number of antibodies or surface marker specific reagents are not limited to one but can be two, three, four, five, six, seven, eight, nine, ten or more individual reagents recognizing different surface markers, all of which are unique to the unwanted cells. During or after collection of data all events representing cells labeled with these antibodies are dumped in the same gate and removed from the dataset. This is possible because all the antibodies/reagents that bind to the wrong cells are labeled with the same fluorochrome.

[0814] Reagents of special interest that exclude irrelevant cells include reagents against CD45 expressed on red blood cells, CD19 expressed on B cells, CD56 expressed on NK cells, CD4 expressed on T helper cells and CD8 expressed on cytotoxic T cells, CD14 expressed on monocytes and CD15 expressed on granulocytes and monocytes.

### Vaccine Treatment

[0815] For the purpose of making cancer vaccines or other types of vaccines it can be desirable to employ MHC multimers that comprise a polymer such as dextran, or that are cell-based (e.g. specialized dendritic cells such as described by Banchereau and Palucka, Nature Reviews, Immunology, 2005, vol. 5, p. 296-306).
[0816] Preventive vaccination leading to prophylaxis/sterile immunity by inducing memory in the immune system may be obtained by immunizing/vaccinating an individual or animal with MHC alone, or with MHC in combination with other molecules as mentioned elsewhere in the patent.
   [0817] Vaccine antigens can be administered alone
   [0818] Vaccine can be administered in combination with adjuvant(s).
      [0819] Adjuvant can be mixed with vaccine component or administered alone, simultaneously or in any order.
      [0820] Adjuvant can be administered by the same route as the other vaccine components
   [0821] Vaccine administered more than once may change composition from 1^{st} administration to the 2^{nd}, 3^{rd}, etc.
   [0822] Vaccine administered more than once can be administered by alternating routes
   [0823] Vaccine components can be administered alone or in combinations by the same route or by alternating/mixed routes
   [0824] Vaccine can be administered by the following routes
      [0825] Cutaneously
      [0826] Subcutaneously (SC)
      [0827] Intramuscular (IM)
      [0828] Intravenous (IV)
      [0829] Per-oral (PO)
      [0830] Inter peritoneally
      [0831] Pulmonally
      [0832] Vaginally
      [0833] Rectally
[0834] Therapeutic vaccination i.e. vaccination “teaching” the immune system to fight an existing infection or disease, may be obtained by immunizing/vaccinating an individual or animal with MHC alone, or with MHC in combination with other molecules as mentioned elsewhere in the patent.
   [0835] Vaccine antigens can be administered alone
   [0836] Vaccine can be administered in combination with adjuvant(s).
      [0837] Adjuvant can be mixed with vaccine component or administered alone, simultaneously or in any order.
      [0838] Adjuvant can be administered by the same route as the other vaccine components
   [0839] Vaccine administered more than once may change composition from 1^{st} administration to the 2^{nd}, 3^{rd}, etc.
   [0840] Vaccine administered more than once can be administered by alternating routes
   [0841] Vaccine components can be administered alone or in combinations by the same route or by alternating/mixed routes
   [0842] Vaccine can be administered by the following routes
      [0843] Cutaneously
      [0844] Subcutaneously (SC)
      [0845] Intramuscular (IM)
      [0846] Intravenous (IV)
      [0847] Per-oral (PO)
      [0848] Inter peritoneally
      [0849] Pulmonally
      [0850] Vaginally
      [0851] Rectally

### Therapeutic Treatment

[0852] Therapeutic treatment includes the use of MHC molecules alone or in any molecular combination mentioned elsewhere in the patent application for the purpose of treating a disease in any state. Treatment may be in the form of
   [0853] Per-orally intake
      [0854] Pills
      [0855] Capsules
   [0856] Injections
      [0857] Systemic
      [0858] Local
   [0859] Jet-infusion (micro-drops, micro-spheres, micro-beads) through skin
   [0860] Drinking solution, suspension or gel
   [0861] Inhalation
   [0862] Nose-drops
   [0863] Eye-drops
   [0864] Ear-drops
   [0865] Skin application as ointment, gel or creme
   [0866] Vaginal application as ointment, gel, crème or washing
   [0867] Gastro-Intestinal flushing
   [0868] Rectal washings or by use of suppositories
[0869] Treatment can be performed as
   [0870] Single intake, injection, application, washing
   [0871] Multiple intake, injection, application, washing
      [0872] On single day basis
      [0873] Over prolonged time as days, month, years
[0874] Treatment dose and regimen can be modified during the course
   Personalized Medicine Takes Advantage of the Large Diversity of Peptide Epitopes that May be Generated from a Given Antigen.

[0875] The immune system is very complex. Each individual has a very large repertoire of specific T cells (on the order of 10⁶-10⁹ different T cell specificities), which again is only a small subset of the total T cell repertoire of a population of individuals. It is estimated that the Caucasian population represents a T cell diversity of 10¹⁰-10¹². MHC allele diversity combined with large variation among individuals' proteolytic metabolism further enhances the variation among different individuals' immune responses. As a result, each individual has its own characteristic immune response profile.

[0876] This is important when designing a MHC multimer-based immune monitoring reagent or immunotherapeutic agent. If an agent is sought that should be as generally applicable as possible, one should try to identify peptide epitopes and MHC alleles that are common for the majority of individuals of a population. As described elsewhere in this application, such peptide epitopes can be identified through computerized search algorithms developed for that same purpose, and may be further strengthened by experimental testing of a large set of individuals.

[0877] This approach will be advantageous in many cases, but because of the variability among immune responses of different individuals, is likely to be inefficient or inactive in certain individuals, because of these individuals' non-average profile. In these latter cases one may have to turn to personalized medicine. In the case of immune monitoring and immunotherapy, this may involve testing a large number of different epitopes from a given antigen, in order to find peptide epitopes that may provide MHC multimers with efficiency for a given individual.

[0878] Thus, personalized medicine takes advantage of the wealth of peptide epitopes that may be generated from a given antigen. A large number of the e.g. 8-, 9-, 10-, and 11-mer epitopes that may be generated from a given antigen to be included in a class 1 MHC multimer reagent, for use in immune monitoring or immunotherapy, are therefore of relevance in personalized medicine. Only in the case where one wants to generate a therapeutic agent or diagnostic reagent that is applicable to the majority of individuals of a population can the large majority of epitope sequences be said to be irrelevant, and only those identified by computerized search algorithms and experimental testing be said to be of value. For the odd individual with the odd immune response these disregarded peptide epitopes may be the epitopes that provide an efficient diagnostic reagent or cures that individual from a deadly disease.

### Antigenic Peptides

[0879] The present invention relates to one or more MHC multimers and/or one or more MHC complexes comprising one or more antigenic peptides such as the antigenic peptides listed in table A, B, C, D, E, F, G, H, I, J, K, L, M, N, O, P, Q, R, S, T, U, V, X and Y.

[0880] The one or more antigenic peptides can in one embodiment comprise a fragment of one or more cancer antigens.

[0881] The one or more cancer antigens can be selected from Table A.

TABLE A

Protein designation and accession numbers for the four
selected cancer antigens Bcl-2, BclX(L), Survivin and Mcl-1.
The amino acid sequence of each protein is displayed.

| Protein and accession | |
|---|---|
| number | Cancer antigen |
| AAH27258.1 | MAHAGRTGYDNREIVMKYIHYKLSQRGYEWDAGDVGAAPP |
| B-cell CLL/lymphoma 2, | GAAPAPGIFSSQPGHTPHPAASRDPVARTSPLQTPAAPGAAAG |
| Bcl-2 [Homo sapiens] | PALSPVPPVVHLTLRQAGDDFSRRYRRDFAEMSSQLHLTPFTA |
| | RGRFATVVEELFRDGVNWGRIVAFFEFGGVMCVESVNREMS |
| | PLVDNIALWMTEYLNRHLHTWIQDNGGWDAFVELYGPSMRP |
| | LFDFSWLSLKTLLSLALVGACITLGAYLGHK |
| NP_612815.1 | MSQSNRELVVDFLSYKLSQKGYSWSQFSDVEENRTEAPEGTE |
| Bcl-X(L) | SEMETPSAINGNPSWHLADSPAVNGATGHSSSLDAREVIPMA |
| (BCL2-like 1 isoform | AVKQALREAGDEFELRYRRAFSDLTSQLHITPGTAYQSFEQV |
| 1)[Homo sapiens] | VNELFRDGVNWGRIVAFFSFGGALCVESVDKEMQVLVSRIAA |
| | WMATYLNDHLEPWIQENGGWDTFVELYGNNAAAESRKGQE |
| | RFNRWFLTGMTVAGVVLLGSLFSRK |
| AAC51660.1 | MGAPTLPPAWQPFLKDHRISTFKNWPFLEGCACTPERMAEAG |
| apoptosis inhibitor | FIHCPTENEPDLAQCFFCFKELEGWEPDDDPIEEHKKHSSGCA |
| survivin [Homo sapiens] | FLSVKKQFEELTLGEFLKLDRERAKNKIAKETNNKKKEFEETA |
| | KKVRRAIEQLAAMD |
| AAF64255.1 | MFGLKRNAVIGLNLYCGGAGLGAGSGGATRPGGRLLATEKE |
| Mcl-1 [Homo sapiens] | ASARREIGGGEAGAVIGGSAGASPPSTLTPDSRRVARPPPIGAE |
| | VPDVTATPARLLFFAPTRRAAPLEEMEAPAADAIMSPEEELDG |
| | YEPEPLGKRPAVLPLLELVGESGNNTSTDGSLPSTPPPAEEEED |
| | DLYRQSLEIISRYLREQATGAKDTKPMGRSGATSRKALETLRR |
| | VGDGVQRNHETAFQGMLRKLDIKNEDDVKSLSRVMIHVFSD |
| | GVTNWGRIVTLISFGAFVAKHLKTINQESCIEPLAESITDVLVR |
| | TKRDWLVKQRGWDGFVEFFHVEDLEGGIRNVLLAFAGVAGV |
| | GAGLAYLIR |

[0882] The one or more antigenic peptides can in one embodiment comprise one or more fragments from one or more cancer antigens capable of interacting with one or more MHC class 1 molecules.

[0883] The one or more antigenic peptides can in another embodiment comprise one or more fragments from one or more cancer antigens capable of interacting with one or more MHC class 2 molecules.

[0884] The one or more antigenic peptides can in one embodiment comprise one or more fragments from BclX(L).

[0885] The one or more antigenic peptides can in one embodiment comprise one or more fragments from Bcl-2.

[0886] The one or more antigenic peptides can in one embodiment comprise one or more fragments from Survivin.

[0887] The one or more antigenic peptides can in one embodiment comprise one or more fragments from Mcl-1.

[0888] Preferred fragments of BclX(L) capable of interacting with one or more MHC class I molecules are listed in table B.

TABLE B

Prediction of cancer antigen BclX(L) specific MHC
class 1, 8-, 9-, 10-, 11-mer peptide binders for 42 MHC
class 1 alleles (see FIG. 11) using the http://www.cbs.dtu.dk/
services/NetMHC/ database. The MHC class 1 molecules for
which no binders were found are not listed

| | | | | | | |
|---|---|---|---|---|---|---|
| pos | peptide | logscore | affinity (nM) | Bind Level | Protein Name | Allele |

8-mers

| | | | | | | |
|---|---|---|---|---|---|---|
| 57 | HLADSPAV | 0.691 | 28 | SB | Sequence | A0201 |
| 213 | FLTGMTVA | 0.687 | 29 | SB | Sequence | A0201 |
| 166 | AAWMATYL | 0.477 | 285 | WB | Sequence | A0201 |
| 160 | VLVSRIAA | 0.463 | 333 | WB | Sequence | A0201 |
| 119 | YQSFEQVV | 0.436 | 448 | WB | Sequence | A0201 |
| 147 | GALCVESV | 0.431 | 472 | WB | Sequence | A0201 |
| 223 | VLLGSLFS | 0.427 | 494 | WB | Sequence | A0201 |
| 213 | FLTGMTVA | 0.777 | 11 | SB | Sequence | A0202 |
| 57 | HLADSPAV | 0.771 | 11 | SB | Sequence | A0202 |
| 119 | YQSFEQVV | 0.590 | 84 | WB | Sequence | A0202 |
| 218 | TVAGVVLL | 0.565 | 110 | WB | Sequence | A0202 |
| 11 | FLSYKLSQ | 0.545 | 137 | WB | Sequence | A0202 |
| 82 | MAAVKQAL | 0.512 | 195 | WB | Sequence | A0202 |
| 73 | SLDAREVI | 0.475 | 294 | WB | Sequence | A0202 |
| 192 | ELYGNNAA | 0.444 | 410 | WB | Sequence | A0202 |
| 217 | MTVAGVVL | 0.440 | 425 | WB | Sequence | A0202 |
| 160 | VLVSRIAA | 0.434 | 454 | WB | Sequence | A0202 |
| 1 | SQSNRELV | 0.434 | 457 | WB | Sequence | A0202 |
| 213 | FLTGMTVA | 0.852 | 4 | SB | Sequence | A0203 |
| 57 | HLADSPAV | 0.831 | 6 | SB | Sequence | A0203 |
| 160 | VLVSRIAA | 0.642 | 48 | SB | Sequence | A0203 |
| 158 | MQVLVSRI | 0.602 | 74 | WB | Sequence | A0203 |
| 11 | FLSYKLSQ | 0.582 | 92 | WB | Sequence | A0203 |
| 133 | GVNWGRIV | 0.581 | 92 | WB | Sequence | A0203 |
| 216 | GMTVAGVV | 0.579 | 94 | WB | Sequence | A0203 |
| 119 | YQSFEQVV | 0.578 | 96 | WB | Sequence | A0203 |
| 164 | RIAAWMAT | 0.573 | 101 | WB | Sequence | A0203 |
| 78 | EVIPMAAV | 0.486 | 261 | WB | Sequence | A0203 |
| 1 | SQSNRELV | 0.481 | 274 | WB | Sequence | A0203 |
| 217 | MTVAGVVL | 0.467 | 318 | WB | Sequence | A0203 |
| 147 | GALCVESV | 0.464 | 328 | WB | Sequence | A0203 |
| 221 | GVVLLGSL | 0.443 | 412 | WB | Sequence | A0203 |
| 218 | TVAGVVLL | 0.440 | 429 | WB | Sequence | A0203 |
| 57 | HLADSPAV | 0.555 | 122 | WB | Sequence | A0204 |
| 153 | SVDKEMQV | 0.431 | 469 | WB | Sequence | A0204 |
| 57 | HLADSPAV | 0.780 | 10 | SB | Sequence | A0206 |
| 158 | MQVLVSRI | 0.733 | 18 | SB | Sequence | A0206 |
| 213 | FLTGMTVA | 0.682 | 31 | SB | Sequence | A0206 |
| 1 | SQSNRELV | 0.677 | 32 | SB | Sequence | A0206 |
| 119 | YQSFEQVV | 0.677 | 33 | SB | Sequence | A0206 |
| 138 | RIVAFFSF | 0.653 | 42 | SB | Sequence | A0206 |
| 164 | RIAAWMAT | 0.575 | 99 | WB | Sequence | A0206 |
| 147 | GALCVESV | 0.568 | 106 | WB | Sequence | A0206 |
| 166 | AAWMATYL | 0.567 | 108 | WB | Sequence | A0206 |
| 217 | MTVAGVVL | 0.563 | 112 | WB | Sequence | A0206 |
| 160 | VLVSRIAA | 0.517 | 185 | WB | Sequence | A0206 |
| 42 | SEMETPSA | 0.514 | 191 | WB | Sequence | A0206 |
| 78 | EVIPMAAV | 0.496 | 233 | WB | Sequence | A0206 |
| 153 | SVDKEMQV | 0.493 | 240 | WB | Sequence | A0206 |
| 57 | HLADSPAV | 0.955 | 1 | SB | Sequence | A0211 |
| 153 | SVDKEMQV | 0.898 | 3 | SB | Sequence | A0211 |
| 213 | FLTGMTVA | 0.893 | 3 | SB | Sequence | A0211 |
| 73 | SLDAREVI | 0.877 | 3 | SB | Sequence | A0211 |
| 192 | ELYGNNAA | 0.834 | 6 | SB | Sequence | A0211 |
| 218 | TVAGVVLL | 0.797 | 8 | SB | Sequence | A0211 |
| 172 | YLNDHLEP | 0.751 | 14 | SB | Sequence | A0211 |
| 78 | EVIPMAAV | 0.739 | 16 | SB | Sequence | A0211 |
| 216 | GMTVAGVV | 0.718 | 21 | SB | Sequence | A0211 |
| 160 | VLVSRIAA | 0.684 | 30 | SB | Sequence | A0211 |
| 223 | VLLGSLFS | 0.683 | 30 | SB | Sequence | A0211 |
| 133 | GVNWGRIV | 0.668 | 36 | SB | Sequence | A0211 |
| 212 | WFLTGMTV | 0.668 | 36 | SB | Sequence | A0211 |
| 144 | SFGGALCV | 0.591 | 83 | WB | Sequence | A0211 |
| 72 | SSLDAREV | 0.590 | 84 | WB | Sequence | A0211 |
| 106 | DLTSQLHI | 0.564 | 111 | WB | Sequence | A0211 |
| 119 | YQSFEQVV | 0.545 | 136 | WB | Sequence | A0211 |
| 81 | PMAAVKQA | 0.532 | 158 | WB | Sequence | A0211 |
| 11 | FLSYKLSQ | 0.511 | 198 | WB | Sequence | A0211 |
| 166 | AAWMATYL | 0.456 | 360 | WB | Sequence | A0211 |
| 1 | SQSNRELV | 0.439 | 431 | WB | Sequence | A0211 |
| 147 | GALCVESV | 0.439 | 434 | WB | Sequence | A0211 |
| 57 | HLADSPAV | 0.915 | 2 | SB | Sequence | A0212 |
| 192 | ELYGNNAA | 0.813 | 7 | SB | Sequence | A0212 |
| 213 | FLTGMTVA | 0.801 | 8 | SB | Sequence | A0212 |
| 153 | SVDKEMQV | 0.732 | 18 | SB | Sequence | A0212 |
| 73 | SLDAREVI | 0.714 | 22 | SB | Sequence | A0212 |
| 160 | VLVSRIAA | 0.662 | 38 | SB | Sequence | A0212 |
| 172 | YLNDHLEP | 0.662 | 38 | SB | Sequence | A0212 |
| 119 | YQSFEQVV | 0.586 | 88 | WB | Sequence | A0212 |
| 78 | EVIPMAAV | 0.585 | 88 | WB | Sequence | A0212 |
| 223 | VLLGSLFS | 0.582 | 92 | WB | Sequence | A0212 |
| 11 | FLSYKLSQ | 0.573 | 101 | WB | Sequence | A0212 |
| 212 | WFLTGMTV | 0.541 | 142 | WB | Sequence | A0212 |
| 216 | GMTVAGVV | 0.466 | 321 | WB | Sequence | A0212 |
| 57 | HLADSPAV | 0.892 | 3 | SB | Sequence | A0216 |
| 153 | SVDKEMQV | 0.817 | 7 | SB | Sequence | A0216 |
| 213 | FLTGMTVA | 0.761 | 13 | SB | Sequence | A0216 |
| 192 | ELYGNNAA | 0.715 | 21 | SB | Sequence | A0216 |
| 78 | EVIPMAAV | 0.666 | 37 | SB | Sequence | A0216 |
| 218 | TVAGVVLL | 0.657 | 41 | SB | Sequence | A0216 |
| 73 | SLDAREVI | 0.640 | 49 | SB | Sequence | A0216 |
| 144 | SFGGALCV | 0.630 | 54 | WB | Sequence | A0216 |
| 216 | GMTVAGVV | 0.613 | 65 | WB | Sequence | A0216 |
| 166 | AAWMATYL | 0.603 | 73 | WB | Sequence | A0216 |
| 160 | VLVSRIAA | 0.583 | 91 | WB | Sequence | A0216 |
| 212 | WFLTGMTV | 0.565 | 110 | WB | Sequence | A0216 |
| 11 | FLSYKLSQ | 0.488 | 255 | WB | Sequence | A0216 |
| 106 | DLTSQLHI | 0.487 | 258 | WB | Sequence | A0216 |
| 133 | GVNWGRIV | 0.470 | 308 | WB | Sequence | A0216 |
| 81 | PMAAVKQA | 0.469 | 311 | WB | Sequence | A0216 |
| 118 | AYQSFEQV | 0.461 | 342 | WB | Sequence | A0216 |
| 223 | VLLGSLFS | 0.442 | 417 | WB | Sequence | A0216 |
| 147 | GALCVESV | 0.438 | 436 | WB | Sequence | A0216 |
| 57 | HLADSPAV | 0.924 | 2 | SB | Sequence | A0219 |
| 213 | FLTGMTVA | 0.668 | 36 | SB | Sequence | A0219 |
| 153 | SVDKEMQV | 0.597 | 78 | WB | Sequence | A0219 |
| 73 | SLDAREVI | 0.576 | 98 | WB | Sequence | A0219 |
| 218 | TVAGVVLL | 0.517 | 185 | WB | Sequence | A0219 |
| 192 | ELYGNNAA | 0.486 | 259 | WB | Sequence | A0219 |
| 212 | WFLTGMTV | 0.458 | 352 | WB | Sequence | A0219 |
| 166 | AAWMATYL | 0.455 | 362 | WB | Sequence | A0219 |
| 106 | DLTSQLHI | 0.448 | 390 | WB | Sequence | A0219 |
| 223 | VLLGSLFS | 0.431 | 471 | WB | Sequence | A0219 |
| 12 | LSYKLSQK | 0.761 | 13 | SB | Sequence | A0301 |
| 8 | VVDFLSYK | 0.551 | 128 | WB | Sequence | A0301 |
| 224 | LLGSLFSR | 0.487 | 257 | WB | Sequence | A0301 |
| 8 | VVDFLSYK | 0.751 | 14 | SB | Sequence | A1101 |
| 12 | LSYKLSQK | 0.721 | 20 | SB | Sequence | A1101 |
| 79 | VIPMAAVK | 0.509 | 203 | WB | Sequence | A1101 |
| 124 | QVVNELFR | 0.472 | 302 | WB | Sequence | A1101 |
| 7 | LVVDFLSY | 0.457 | 355 | WB | Sequence | A1101 |
| 197 | NAAAESRK | 0.455 | 363 | WB | Sequence | A1101 |
| 135 | NWGRIVAF | 0.600 | 75 | WB | Sequence | A2301 |
| 138 | RIVAFFSF | 0.466 | 321 | WB | Sequence | A2301 |
| 222 | VVLLGSLF | 0.461 | 339 | WB | Sequence | A2301 |
| 135 | NWGRIVAF | 0.617 | 62 | WB | Sequence | A2402 |
| 118 | AYQSFEQV | 0.569 | 105 | WB | Sequence | A2403 |
| 78 | EVIPMAAV | 0.598 | 77 | WB | Sequence | A2601 |
| 7 | LVVDFLSY | 0.541 | 144 | WB | Sequence | A2601 |
| 78 | EVIPMAAV | 0.862 | 4 | SB | Sequence | A2602 |
| 7 | LVVDFLSY | 0.797 | 9 | SB | Sequence | A2602 |
| 112 | HITPGTAY | 0.755 | 14 | SB | Sequence | A2602 |
| 97 | ELRYRRAF | 0.589 | 85 | WB | Sequence | A2602 |
| 138 | RIVAFFSF | 0.529 | 164 | WB | Sequence | A2602 |
| 112 | HITPGTAY | 0.597 | 78 | WB | Sequence | A2902 |
| 7 | LVVDFLSY | 0.480 | 276 | WB | Sequence | A2902 |
| 204 | KGQERFNR | 0.743 | 16 | SB | Sequence | A3101 |
| 224 | LLGSLFSR | 0.697 | 26 | SB | Sequence | A3101 |
| 157 | EMQVLVSR | 0.583 | 90 | WB | Sequence | A3101 |
| 70 | HSSSLDAR | 0.577 | 97 | WB | Sequence | A3101 |
| 83 | AAVKQALR | 0.539 | 146 | WB | Sequence | A3101 |
| 95 | EFELRYRR | 0.509 | 201 | WB | Sequence | A3101 |
| 124 | QVVNELFR | 0.453 | 369 | WB | Sequence | A3101 |
| 12 | LSYKLSQK | 0.447 | 397 | WB | Sequence | A3101 |
| 95 | EFELRYRR | 0.823 | 6 | SB | Sequence | A3301 |
| 157 | EMQVLVSR | 0.738 | 16 | SB | Sequence | A3301 |
| 94 | DEFELRYR | 0.650 | 43 | SB | Sequence | A3301 |
| 201 | ESRKGQER | 0.606 | 71 | WB | Sequence | A3301 |
| 224 | LLGSLFSR | 0.538 | 148 | WB | Sequence | A3301 |
| 70 | HSSSLDAR | 0.463 | 332 | WB | Sequence | A3301 |
| 124 | QVVNELFR | 0.803 | 8 | SB | Sequence | A6801 |
| 70 | HSSSLDAR | 0.775 | 11 | SB | Sequence | A6801 |
| 197 | NAAAESRK | 0.681 | 31 | SB | Sequence | A6801 |
| 12 | LSYKLSQK | 0.647 | 45 | SB | Sequence | A6801 |
| 157 | EMQVLVSR | 0.599 | 76 | WB | Sequence | A6801 |
| 196 | NNAAAESR | 0.585 | 88 | WB | Sequence | A6801 |
| 83 | AAVKQALR | 0.535 | 153 | WB | Sequence | A6801 |
| 201 | ESRKGQER | 0.532 | 158 | WB | Sequence | A6801 |
| 165 | IAAWMATY | 0.532 | 158 | WB | Sequence | A6801 |
| 95 | EFELRYRR | 0.511 | 198 | WB | Sequence | A6801 |
| 117 | TAYQSFEQ | 0.507 | 208 | WB | Sequence | A6801 |
| 8 | VVDFLSYK | 0.481 | 273 | WB | Sequence | A6801 |
| 94 | DEFELRYR | 0.457 | 357 | WB | Sequence | A6801 |
| 26 | FSDVEENR | 0.442 | 418 | WB | Sequence | A6801 |
| 224 | LLGSLFSR | 0.430 | 476 | WB | Sequence | A6801 |
| 78 | EVIPMAAV | 0.888 | 3 | SB | Sequence | A6802 |
| 218 | TVAGVVLL | 0.790 | 9 | SB | Sequence | A6802 |
| 215 | TGMTVAGV | 0.742 | 16 | SB | Sequence | A6802 |
| 217 | MTVAGVVL | 0.697 | 26 | SB | Sequence | A6802 |
| 82 | MAAVKQAL | 0.633 | 52 | WB | Sequence | A6802 |
| 57 | HLADSPAV | 0.549 | 131 | WB | Sequence | A6802 |
| 207 | ERFNRWFL | 0.481 | 273 | WB | Sequence | A6802 |
| 60 | DSPAVNGA | 0.473 | 300 | WB | Sequence | A6802 |
| 192 | ELYGNNAA | 0.447 | 395 | WB | Sequence | A6802 |
| 91 | EAGDEFEL | 0.436 | 444 | WB | Sequence | A6802 |
| 78 | EVIPMAAV | 0.812 | 7 | SB | Sequence | A6901 |
| 57 | HLADSPAV | 0.740 | 16 | SB | Sequence | A6901 |
| 192 | ELYGNNAA | 0.570 | 104 | WB | Sequence | A6901 |
| 217 | MTVAGVVL | 0.544 | 138 | WB | Sequence | A6901 |
| 218 | TVAGVVLL | 0.507 | 206 | WB | Sequence | A6901 |
| 91 | EAGDEFEL | 0.489 | 252 | WB | Sequence | A6901 |
| 153 | SVDKEMQV | 0.437 | 441 | WB | Sequence | A6901 |
| 212 | WFLTGMTV | 0.436 | 445 | WB | Sequence | A6901 |
| 61 | SPAVNGAT | 0.657 | 41 | SB | Sequence | B0702 |
| 82 | MAAVKQAL | 0.468 | 316 | WB | Sequence | B0702 |
| 166 | AAWMATYL | 0.430 | 477 | WB | Sequence | B0702 |
| 97 | ELRYRRAF | 0.589 | 85 | WB | Sequence | B0801 |
| 7 | LVVDFLSY | 0.511 | 198 | WB | Sequence | B1501 |
| 138 | RIVAFFSF | 0.493 | 240 | WB | Sequence | B1501 |
| 112 | HITPGTAY | 0.492 | 243 | WB | Sequence | B1501 |
| 165 | IAAWMATY | 0.473 | 300 | WB | Sequence | B1501 |
| 97 | ELRYRRAF | 0.439 | 430 | WB | Sequence | B1501 |
| 222 | VVLLGSLF | 0.433 | 461 | WB | Sequence | B1501 |
| 206 | QERFNRWF | 0.528 | 165 | WB | Sequence | B1801 |
| 5 | RELVVDFL | 0.517 | 185 | WB | Sequence | B1801 |
| 122 | FEQVVNEL | 0.508 | 205 | WB | Sequence | B1801 |
| 210 | NRWFLTGM | 0.510 | 200 | WB | Sequence | B2705 |
| 165 | IAAWMATY | 0.806 | 8 | SB | Sequence | B3501 |
| 7 | LVVDFLSY | 0.629 | 55 | WB | Sequence | B3501 |
| 82 | MAAVKQAL | 0.591 | 83 | WB | Sequence | B3501 |
| 112 | HITPGTAY | 0.543 | 140 | WB | Sequence | B3501 |
| 75 | DAREVIPM | 0.516 | 187 | WB | Sequence | B3501 |
| 142 | FFSFGGAL | 0.499 | 226 | WB | Sequence | B3501 |
| 61 | SPAVNGAT | 0.478 | 283 | WB | Sequence | B3501 |
| 166 | AAWMATYL | 0.476 | 289 | WB | Sequence | B3501 |
| 217 | MTVAGVVL | 0.470 | 307 | WB | Sequence | B3501 |
| 5 | RELVVDFL | 0.624 | 58 | WB | Sequence | B4001 |
| 122 | FEQVVNEL | 0.618 | 62 | WB | Sequence | B4001 |
| 5 | RELVVDFL | 0.442 | 420 | WB | Sequence | B4002 |
| 156 | KEMQVLVS | 0.430 | 478 | WB | Sequence | B4403 |
| 77 | REVIPMAA | 0.434 | 456 | WB | Sequence | B4501 |
| 161 | LVSRIAAW | 0.626 | 57 | WB | Sequence | B5801 |
| 165 | IAAWMATY | 0.593 | 81 | WB | Sequence | B5801 |
| 16 | LSQKGYSW | 0.586 | 88 | WB | Sequence | B5801 |
| 19 | KGYSWSQF | 0.543 | 141 | WB | Sequence | B5801 |
| 138 | RIVAFFSF | 0.467 | 320 | WB | Sequence | B5801 |
| 49 | AINGNPSW | 0.447 | 394 | WB | Sequence | B5801 |

9.mers

| | | | | | | |
|---|---|---|---|---|---|---|
| 104 | FSDLTSQLH | 0.482 | 270 | WB | Sequence | A0101 |
| 143 | FSFGGALCV | 0.518 | 183 | WB | Sequence | A0201 |
| 217 | MTVAGVVLL | 0.478 | 282 | WB | Sequence | A0201 |
| 172 | YLNDHLEPW | 0.739 | 16 | SB | Sequence | A0202 |
| 217 | MTVAGVVLL | 0.604 | 72 | WB | Sequence | A0202 |
| 165 | IAAWMATYL | 0.568 | 107 | WB | Sequence | A0202 |
| 213 | FLTGMTVAG | 0.564 | 111 | WB | Sequence | A0202 |
| 11 | FLSYKLSQK | 0.520 | 179 | WB | Sequence | A0202 |
| 161 | LVSRIAAWM | 0.450 | 382 | WB | Sequence | A0202 |
| 8 | VVDFLSYKL | 0.449 | 387 | WB | Sequence | A0202 |
| 192 | ELYGNNAAA | 0.447 | 394 | WB | Sequence | A0202 |
| 81 | PMAAVKQAL | 0.437 | 441 | WB | Sequence | A0202 |
| 216 | GMTVAGVVL | 0.436 | 448 | WB | Sequence | A0202 |
| 214 | LTGMTVAGV | 0.691 | 28 | SB | Sequence | A0203 |
| 217 | MTVAGVVLL | 0.609 | 69 | WB | Sequence | A0203 |
| 165 | IAAWMATYL | 0.530 | 161 | WB | Sequence | A0203 |
| 84 | AVKQALREA | 0.518 | 183 | WB | Sequence | A0203 |
| 110 | QLHITPGTA | 0.507 | 206 | WB | Sequence | A0203 |
| 172 | YLNDHLEPW | 0.493 | 240 | WB | Sequence | A0203 |
| 117 | TAYQSFEQV | 0.473 | 300 | WB | Sequence | A0203 |
| 11 | FLSYKLSQK | 0.447 | 396 | WB | Sequence | A0203 |
| 214 | LTGMTVAGV | 0.504 | 213 | WB | Sequence | A0204 |
| 217 | MTVAGVVLL | 0.475 | 291 | WB | Sequence | A0204 |
| 109 | SQLHITPGT | 0.712 | 22 | SB | Sequence | A0206 |
| 217 | MTVAGVVLL | 0.675 | 33 | SB | Sequence | A0206 |
| 117 | TAYQSFEQV | 0.650 | 43 | SB | Sequence | A0206 |
| 1 | SQSNRELVV | 0.648 | 45 | SB | Sequence | A0206 |
| 143 | FSFGGALCV | 0.584 | 90 | WB | Sequence | A0206 |
| 77 | REVIPMAAV | 0.572 | 103 | WB | Sequence | A0206 |
| 165 | IAAWMATYL | 0.551 | 128 | WB | Sequence | A0206 |
| 158 | MQVLVSRIA | 0.544 | 138 | WB | Sequence | A0206 |
| 214 | LTGMTVAGV | 0.492 | 244 | WB | Sequence | A0206 |
| 172 | YLNDHLEPW | 0.464 | 331 | WB | Sequence | A0206 |
| 42 | SEMETPSAI | 0.440 | 426 | WB | Sequence | A0206 |
| 192 | ELYGNNAAA | 0.863 | 4 | SB | Sequence | A0211 |
| 143 | FSFGGALCV | 0.797 | 8 | SB | Sequence | A0211 |
| 81 | PMAAVKQAL | 0.794 | 9 | SB | Sequence | A0211 |
| 172 | YLNDHLEPW | 0.715 | 21 | SB | Sequence | A0211 |
| 153 | SVDKEMQVL | 0.703 | 24 | SB | Sequence | A0211 |
| 8 | VVDFLSYKL | 0.696 | 26 | SB | Sequence | A0211 |
| 217 | MTVAGVVLL | 0.634 | 52 | WB | Sequence | A0211 |
| 112 | HITPGTAYQ | 0.618 | 62 | WB | Sequence | A0211 |
| 117 | TAYQSFEQV | 0.617 | 63 | WB | Sequence | A0211 |
| 223 | VLLGSLFSR | 0.581 | 93 | WB | Sequence | A0211 |
| 213 | FLTGMTVAG | 0.581 | 93 | WB | Sequence | A0211 |
| 133 | GVNWGRIVA | 0.575 | 99 | WB | Sequence | A0211 |
| 216 | GMTVAGVVL | 0.553 | 126 | WB | Sequence | A0211 |
| 185 | GGWDTFVEL | 0.550 | 130 | WB | Sequence | A0211 |
| 103 | AFSDLTSQL | 0.472 | 302 | WB | Sequence | A0211 |
| 176 | HLEPWIQEN | 0.427 | 493 | WB | Sequence | A0211 |
| 192 | ELYGNNAAA | 0.845 | 5 | SB | Sequence | A0212 |
| 81 | PMAAVKQAL | 0.789 | 9 | SB | Sequence | A0212 |
| 143 | FSFGGALCV | 0.702 | 25 | SB | Sequence | A0212 |
| 172 | YLNDHLEPW | 0.673 | 34 | SB | Sequence | A0212 |
| 223 | VLLGSLFSR | 0.573 | 101 | WB | Sequence | A0212 |
| 8 | VVDFLSYKL | 0.561 | 115 | WB | Sequence | A0212 |
| 153 | SVDKEMQVL | 0.535 | 153 | WB | Sequence | A0212 |
| 213 | FLTGMTVAG | 0.521 | 178 | WB | Sequence | A0212 |
| 118 | AYQSFEQVV | 0.476 | 290 | WB | Sequence | A0212 |
| 192 | ELYGNNAAA | 0.741 | 16 | SB | Sequence | A0216 |
| 81 | PMAAVKQAL | 0.710 | 22 | SB | Sequence | A0216 |
| 143 | FSFGGALCV | 0.652 | 42 | SB | Sequence | A0216 |
| 117 | TAYQSFEQV | 0.593 | 81 | WB | Sequence | A0216 |
| 112 | HITPGTAYQ | 0.512 | 196 | WB | Sequence | A0216 |
| 216 | GMTVAGVVL | 0.430 | 479 | WB | Sequence | A0216 |
| 81 | PMAAVKQAL | 0.675 | 33 | SB | Sequence | A0219 |
| 143 | FSFGGALCV | 0.652 | 43 | SB | Sequence | A0219 |
| 192 | ELYGNNAAA | 0.541 | 142 | WB | Sequence | A0219 |
| 117 | TAYQSFEQV | 0.497 | 232 | WB | Sequence | A0219 |
| 172 | YLNDHLEPW | 0.459 | 348 | WB | Sequence | A0219 |
| 223 | VLLGSLFSR | 0.456 | 361 | WB | Sequence | A0219 |
| 214 | LTGMTVAGV | 0.450 | 384 | WB | Sequence | A0219 |
| --- | | | | | | |
| 224 | LLGSLFSRK | 0.762 | 13 | SB | Sequence | A0301 |
| 11 | FLSYKLSQK | 0.710 | 23 | SB | Sequence | A0301 |
| 164 | RIAAWMATY | 0.698 | 26 | SB | Sequence | A0301 |
| 223 | VLLGSLFSR | 0.615 | 64 | WB | Sequence | A0301 |
| 7 | LVVDFLSYK | 0.497 | 231 | WB | Sequence | A0301 |
| 7 | LVVDFLSYK | 0.767 | 12 | SB | Sequence | A1101 |
| 224 | LLGSLFSRK | 0.612 | 66 | WB | Sequence | A1101 |
| 223 | VLLGSLFSR | 0.595 | 79 | WB | Sequence | A1101 |
| 164 | RIAAWMATY | 0.575 | 99 | WB | Sequence | A1101 |
| 148 | ALCVESVDK | 0.529 | 163 | WB | Sequence | A1101 |
| 78 | EVIPMAAVK | 0.509 | 201 | WB | Sequence | A1101 |
| 11 | FLSYKLSQK | 0.430 | 477 | WB | Sequence | A1101 |
| 99 | RYRRAFSDL | 0.690 | 28 | SB | Sequence | A2301 |
| 135 | NWGRIVAFF | 0.644 | 47 | SB | Sequence | A2301 |
| 137 | GRIVAFFSF | 0.459 | 346 | WB | Sequence | A2301 |
| 135 | NWGRIVAFF | 0.739 | 16 | SB | Sequence | A2402 |
| 99 | RYRRAFSDL | 0.550 | 129 | WB | Sequence | A2402 |
| 99 | RYRRAFSDL | 0.748 | 15 | SB | Sequence | A2403 |
| 121 | SFEQVVNEL | 0.557 | 120 | WB | Sequence | A2403 |
| 118 | AYQSFEQVV | 0.487 | 256 | WB | Sequence | A2403 |
| 6 | ELVVDFLSY | 0.532 | 158 | WB | Sequence | A2601 |
| 164 | RIAAWMATY | 0.495 | 235 | WB | Sequence | A2601 |
| 164 | RIAAWMATY | 0.923 | 2 | SB | Sequence | A2602 |
| 6 | ELVVDFLSY | 0.873 | 3 | SB | Sequence | A2602 |
| 161 | LVSRIAAWM | 0.677 | 32 | SB | Sequence | A2602 |
| 153 | SVDKEMQVL | 0.639 | 49 | SB | Sequence | A2602 |
| 78 | EVIPMAAVK | 0.496 | 234 | WB | Sequence | A2602 |
| 217 | MTVAGVVLL | 0.481 | 273 | WB | Sequence | A2602 |
| 111 | LHITPGTAY | 0.553 | 125 | WB | Sequence | A2902 |
| 6 | ELVVDFLSY | 0.539 | 146 | WB | Sequence | A2902 |
| 164 | RIAAWMATY | 0.463 | 334 | WB | Sequence | A3002 |
| 82 | MAAVKQALR | 0.766 | 12 | SB | Sequence | A3101 |
| 223 | VLLGSLFSR | 0.686 | 30 | SB | Sequence | A3101 |
| 7 | LVVDFLSYK | 0.573 | 101 | WB | Sequence | A3101 |
| 156 | KEMQVLVSR | 0.474 | 296 | WB | Sequence | A3101 |
| 94 | DEFELRYRR | 0.721 | 20 | SB | Sequence | A3301 |
| 82 | MAAVKQALR | 0.665 | 37 | SB | Sequence | A3301 |
| 97 | ELRYRRAFS | 0.614 | 65 | WB | Sequence | A3301 |
| 223 | VLLGSLFSR | 0.581 | 92 | WB | Sequence | A3301 |
| 91 | EAGDEFELR | 0.532 | 157 | WB | Sequence | A3301 |
| 25 | QFSDVEENR | 0.531 | 159 | WB | Sequence | A3301 |
| 78 | EVIPMAAVK | 0.848 | 5 | SB | Sequence | A6801 |
| 82 | MAAVKQALR | 0.813 | 7 | SB | Sequence | A6801 |
| 7 | LVVDFLSYK | 0.786 | 10 | SB | Sequence | A6801 |
| 91 | EAGDEFELR | 0.710 | 23 | SB | Sequence | A6801 |
| 123 | EQVVNELFR | 0.635 | 51 | WB | Sequence | A6801 |
| 11 | FLSYKLSQK | 0.558 | 119 | WB | Sequence | A6801 |
| 94 | DEFELRYRR | 0.544 | 139 | WB | Sequence | A6801 |
| 25 | QFSDVEENR | 0.540 | 145 | WB | Sequence | A6801 |
| 196 | NNAAAESRK | 0.474 | 295 | WB | Sequence | A6801 |
| 223 | VLLGSLFSR | 0.430 | 477 | WB | Sequence | A6801 |
| 217 | MTVAGVVLL | 0.796 | 9 | SB | Sequence | A6802 |
| 117 | TAYQSFEQV | 0.729 | 18 | SB | Sequence | A6802 |
| 215 | TGMTVAGVV | 0.654 | 42 | SB | Sequence | A6802 |
| 0 | MSQSNRELV | 0.587 | 86 | WB | Sequence | A6802 |
| 21 | YSWSQFSDV | 0.549 | 131 | WB | Sequence | A6802 |
| 143 | FSFGGALCV | 0.526 | 169 | WB | Sequence | A6802 |
| 152 | ESVDKEMQV | 0.525 | 171 | WB | Sequence | A6802 |
| 169 | MATYLNDHL | 0.520 | 180 | WB | Sequence | A6802 |
| 192 | ELYGNNAAA | 0.509 | 202 | WB | Sequence | A6802 |
| 140 | VAFFSFGGA | 0.500 | 222 | WB | Sequence | A6802 |
| 214 | LTGMTVAGV | 0.464 | 330 | WB | Sequence | A6802 |
| 165 | IAAWMATYL | 0.451 | 378 | WB | Sequence | A6802 |
| 217 | MTVAGVVLL | 0.705 | 24 | SB | Sequence | A6901 |
| 117 | TAYQSFEQV | 0.623 | 58 | WB | Sequence | A6901 |
| 192 | ELYGNNAAA | 0.604 | 72 | WB | Sequence | A6901 |
| 143 | FSFGGALCV | 0.589 | 85 | WB | Sequence | A6901 |
| 214 | LTGMTVAGV | 0.557 | 120 | WB | Sequence | A6901 |
| 21 | YSWSQFSDV | 0.489 | 252 | WB | Sequence | A6901 |
| 36 | APEGTESEM | 0.519 | 181 | WB | Sequence | B0702 |
| 61 | SPAVNGATG | 0.454 | 369 | WB | Sequence | B0702 |
| 114 | TPGTAYQSF | 0.450 | 382 | WB | Sequence | B0702 |
| 96 | FELRYRRAF | 0.497 | 229 | WB | Sequence | B0801 |
| 164 | RIAAWMATY | 0.586 | 87 | WB | Sequence | B1501 |
| 88 | ALREAGDEF | 0.520 | 180 | WB | Sequence | B1501 |
| 96 | FELRYRRAF | 0.752 | 14 | SB | Sequence | B1801 |
| 206 | QERFNRWFL | 0.592 | 82 | WB | Sequence | B1801 |
| 122 | FEQVVNELF | 0.523 | 174 | WB | Sequence | B1801 |
| 182 | QENGGWDTF | 0.476 | 290 | WB | Sequence | B1801 |
| 137 | GRIVAFFSF | 0.554 | 124 | WB | Sequence | B2705 |
| 101 | RRAFSDLTS | 0.434 | 459 | WB | Sequence | B2705 |
| 114 | TPGTAYQSF | 0.705 | 24 | SB | Sequence | B3501 |
| 165 | IAAWMATYL | 0.649 | 44 | SB | Sequence | B3501 |
| 36 | APEGTESEM | 0.540 | 144 | WB | Sequence | B3501 |
| 6 | ELVVDFLSY | 0.531 | 159 | WB | Sequence | B3501 |
| 111 | LHITPGTAY | 0.437 | 441 | WB | Sequence | B3501 |
| 53 | NPSWHLADS | 0.429 | 480 | WB | Sequence | B3501 |
| 164 | RIAAWMATY | 0.428 | 485 | WB | Sequence | B3501 |
| 90 | REAGDEFEL | 0.788 | 9 | SB | Sequence | B4001 |
| 206 | QERFNRWFL | 0.597 | 78 | WB | Sequence | B4001 |
| 182 | QENGGWDTF | 0.525 | 170 | WB | Sequence | B4001 |
| 122 | FEQVVNELF | 0.453 | 370 | WB | Sequence | B4001 |
| 96 | FELRYRRAF | 0.446 | 399 | WB | Sequence | B4001 |
| 42 | SEMETPSAI | 0.504 | 215 | WB | Sequence | B4002 |
| 96 | FELRYRRAF | 0.473 | 299 | WB | Sequence | B4002 |
| 182 | QENGGWDTF | 0.434 | 455 | WB | Sequence | B4402 |
| 42 | SEMETPSAI | 0.467 | 319 | WB | Sequence | B4403 |
| 5 | RELVVDFLS | 0.444 | 407 | WB | Sequence | B4403 |
| 77 | REVIPMAAV | 0.438 | 438 | WB | Sequence | B4501 |
| 165 | IAAWMATYL | 0.442 | 416 | WB | Sequence | B5301 |
| 80 | IPMAAVKQA | 0.716 | 21 | SB | Sequence | B5401 |
| 48 | SAINGNPSW | 0.641 | 48 | SB | Sequence | B5801 |
| 15 | KLSQKGYSW | 0.596 | 79 | WB | Sequence | B5801 |
| 165 | IAAWMATYL | 0.559 | 118 | WB | Sequence | B5801 |
| 172 | YLNDHLEPW | 0.506 | 208 | WB | Sequence | B5801 |

10-mers

| | | | | | | |
|---|---|---|---|---|---|---|
| 104 | FSDLTSQLHI | 0.427 | 492 | WB | Sequence | A0101 |
| 172 | YLNDHLEPWI | 0.866 | 4 | SB | Sequence | A0201 |
| 213 | FLTGMTVAGV | 0.841 | 5 | SB | Sequence | A0201 |
| 164 | RIAAWMATYL | 0.651 | 43 | SB | Sequence | A0201 |
| 168 | WMATYLNDHL | 0.573 | 101 | WB | Sequence | A0201 |
| 7 | LVVDFLSYKL | 0.524 | 173 | WB | Sequence | A0201 |
| 73 | SLDAREVIPM | 0.491 | 246 | WB | Sequence | A0201 |
| 160 | VLVSRIAAWM | 0.486 | 259 | WB | Sequence | A0201 |
| 153 | SVDKEMQVLV | 0.473 | 298 | WB | Sequence | A0201 |
| 216 | GMTVAGVVLL | 0.444 | 411 | WB | Sequence | A0201 |
| 213 | FLTGMTVAGV | 0.811 | 7 | SB | Sequence | A0202 |
| 168 | WMATYLNDHL | 0.772 | 11 | SB | Sequence | A0202 |
| 164 | RIAAWMATYL | 0.763 | 13 | SB | Sequence | A0202 |
| 7 | LVVDFLSYKL | 0.651 | 43 | SB | Sequence | A0202 |
| 102 | RAFSDLTSQL | 0.617 | 63 | WB | Sequence | A0202 |
| 73 | SLDAREVIPM | 0.616 | 63 | WB | Sequence | A0202 |
| 172 | YLNDHLEPWI | 0.587 | 87 | WB | Sequence | A0202 |
| 216 | GMTVAGVVLL | 0.496 | 233 | WB | Sequence | A0202 |
| 145 | FGGALCVESV | 0.480 | 276 | WB | Sequence | A0202 |
| 160 | VLVSRIAAWM | 0.430 | 476 | WB | Sequence | A0202 |
| 213 | FLTGMTVAGV | 0.936 | 2 | SB | Sequence | A0203 |
| 172 | YLNDHLEPWI | 0.891 | 3 | SB | Sequence | A0203 |
| 164 | RIAAWMATYL | 0.837 | 5 | SB | Sequence | A0203 |
| 168 | WMATYLNDHL | 0.647 | 45 | SB | Sequence | A0203 |
| 160 | VLVSRIAAWM | 0.613 | 66 | WB | Sequence | A0203 |
| 139 | IVAFFSFGGA | 0.596 | 79 | WB | Sequence | A0203 |
| 7 | LVVDFLSYKL | 0.581 | 92 | WB | Sequence | A0203 |
| 125 | VVNELFRDGV | 0.570 | 105 | WB | Sequence | A0203 |
| 216 | GMTVAGVVLL | 0.476 | 289 | WB | Sequence | A0203 |
| 102 | RAFSDLTSQL | 0.470 | 308 | WB | Sequence | A0203 |
| 214 | LTGMTVAGVV | 0.468 | 315 | WB | Sequence | A0203 |
| 116 | GTAYQSFEQV | 0.463 | 335 | WB | Sequence | A0203 |
| 213 | FLTGMTVAGV | 0.697 | 26 | SB | Sequence | A0204 |
| 172 | YLNDHLEPWI | 0.664 | 37 | SB | Sequence | A0204 |
| 73 | SLDAREVIPM | 0.477 | 287 | WB | Sequence | A0204 |
| 164 | RIAAWMATYL | 0.476 | 290 | WB | Sequence | A0204 |
| 7 | LVVDFLSYKL | 0.468 | 317 | WB | Sequence | A0204 |
| 49 | AINGNPSWHL | 0.452 | 374 | WB | Sequence | A0204 |
| 213 | FLTGMTVAGV | 0.869 | 4 | SB | Sequence | A0206 |
| 164 | RIAAWMATYL | 0.809 | 7 | SB | Sequence | A0206 |
| 172 | YLNDHLEPWI | 0.722 | 20 | SB | Sequence | A0206 |
| 158 | MQVLVSRIAA | 0.689 | 28 | SB | Sequence | A0206 |
| 7 | LVVDFLSYKL | 0.684 | 30 | SB | Sequence | A0206 |
| 168 | WMATYLNDHL | 0.680 | 31 | SB | Sequence | A0206 |
| 109 | SQLHITPGTA | 0.652 | 43 | SB | Sequence | A0206 |
| 116 | GTAYQSFEQV | 0.572 | 102 | WB | Sequence | A0206 |
| 153 | SVDKEMQVLV | 0.558 | 119 | WB | Sequence | A0206 |
| 102 | RAFSDLTSQL | 0.543 | 140 | WB | Sequence | A0206 |
| 156 | KEMQVLVSRI | 0.508 | 204 | WB | Sequence | A0206 |
| 181 | IQENGGWDTF | 0.508 | 205 | WB | Sequence | A0206 |
| 139 | IVAFFSFGGA | 0.495 | 235 | WB | Sequence | A0206 |
| 125 | VVNELFRDGV | 0.483 | 269 | WB | Sequence | A0206 |
| 117 | TAYQSFEQVV | 0.450 | 383 | WB | Sequence | A0206 |
| 213 | FLTGMTVAGV | 0.966 | 1 | SB | Sequence | A0211 |
| 172 | YLNDHLEPWI | 0.951 | 1 | SB | Sequence | A0211 |
| 153 | SVDKEMQVLV | 0.905 | 2 | SB | Sequence | A0211 |
| 73 | SLDAREVIPM | 0.826 | 6 | SB | Sequence | A0211 |
| 216 | GMTVAGVVLL | 0.737 | 17 | SB | Sequence | A0211 |
| 7 | LVVDFLSYKL | 0.730 | 18 | SB | Sequence | A0211 |
| 164 | RIAAWMATYL | 0.711 | 22 | SB | Sequence | A0211 |
| 125 | VVNELFRDGV | 0.687 | 29 | SB | Sequence | A0211 |
| 49 | AINGNPSWHL | 0.686 | 29 | SB | Sequence | A0211 |
| 168 | WMATYLNDHL | 0.685 | 30 | SB | Sequence | A0211 |
| 117 | TAYQSFEQVV | 0.633 | 52 | WB | Sequence | A0211 |
| 160 | VLVSRIAAWM | 0.632 | 53 | WB | Sequence | A0211 |
| 142 | FFSFGGALCV | 0.567 | 107 | WB | Sequence | A0211 |
| 223 | VLLGSLFSRK | 0.498 | 228 | WB | Sequence | A0211 |
| 102 | RAFSDLTSQL | 0.453 | 372 | WB | Sequence | A0211 |
| 116 | GTAYQSFEQV | 0.429 | 481 | WB | Sequence | A0211 |
| 213 | FLTGMTVAGV | 0.932 | 2 | SB | Sequence | A0212 |
| 172 | YLNDHLEPWI | 0.916 | 2 | SB | Sequence | A0212 |
| 153 | SVDKEMQVLV | 0.742 | 16 | SB | Sequence | A0212 |
| 168 | WMATYLNDHL | 0.697 | 26 | SB | Sequence | A0212 |
| 125 | VVNELFRDGV | 0.695 | 27 | SB | Sequence | A0212 |
| 7 | LVVDFLSYKL | 0.648 | 45 | SB | Sequence | A0212 |
| 160 | VLVSRIAAWM | 0.604 | 72 | WB | Sequence | A0212 |
| 73 | SLDAREVIPM | 0.594 | 80 | WB | Sequence | A0212 |
| 49 | AINGNPSWHL | 0.570 | 104 | WB | Sequence | A0212 |
| 164 | RIAAWMATYL | 0.550 | 129 | WB | Sequence | A0212 |
| 142 | FFSFGGALCV | 0.494 | 238 | WB | Sequence | A0212 |
| 223 | VLLGSLFSRK | 0.487 | 258 | WB | Sequence | A0212 |
| 117 | TAYQSFEQVV | 0.482 | 270 | WB | Sequence | A0212 |
| 192 | ELYGNNAAAE | 0.475 | 293 | WB | Sequence | A0212 |
| 216 | GMTVAGVVLL | 0.440 | 426 | WB | Sequence | A0212 |
| 213 | FLTGMTVAGV | 0.911 | 2 | SB | Sequence | A0216 |
| 172 | YLNDHLEPWI | 0.869 | 4 | SB | Sequence | A0216 |
| 153 | SVDKEMQVLV | 0.772 | 11 | SB | Sequence | A0216 |
| 168 | WMATYLNDHL | 0.696 | 26 | SB | Sequence | A0216 |
| 164 | RIAAWMATYL | 0.695 | 27 | SB | Sequence | A0216 |
| 49 | AINGNPSWHL | 0.680 | 31 | SB | Sequence | A0216 |
| 160 | VLVSRIAAWM | 0.657 | 41 | SB | Sequence | A0216 |
| 7 | LVVDFLSYKL | 0.643 | 47 | SB | Sequence | A0216 |
| 73 | SLDAREVIPM | 0.617 | 62 | WB | Sequence | A0216 |
| 216 | GMTVAGVVLL | 0.588 | 85 | WB | Sequence | A0216 |
| 117 | TAYQSFEQVV | 0.530 | 161 | WB | Sequence | A0216 |
| 142 | FFSFGGALCV | 0.487 | 256 | WB | Sequence | A0216 |
| 116 | GTAYQSFEQV | 0.444 | 408 | WB | Sequence | A0216 |
| 213 | FLTGMTVAGV | 0.927 | 2 | SB | Sequence | A0219 |
| 172 | YLNDHLEPWI | 0.884 | 3 | SB | Sequence | A0219 |
| 168 | WMATYLNDHL | 0.611 | 67 | WB | Sequence | A0219 |
| 49 | AINGNPSWHL | 0.543 | 140 | WB | Sequence | A0219 |
| 7 | LVVDFLSYKL | 0.539 | 146 | WB | Sequence | A0219 |
| 153 | SVDKEMQVLV | 0.533 | 156 | WB | Sequence | A0219 |
| 164 | RIAAWMATYL | 0.449 | 387 | WB | Sequence | A0219 |
| 73 | SLDAREVIPM | 0.445 | 404 | WB | Sequence | A0219 |
| 160 | VLVSRIAAWM | 0.441 | 421 | WB | Sequence | A0219 |
| 223 | VLLGSLFSRK | 0.767 | 12 | SB | Sequence | A0301 |
| 6 | ELVVDFLSYK | 0.504 | 213 | WB | Sequence | A0301 |
| 147 | GALCVESVDK | 0.488 | 253 | WB | Sequence | A0301 |
| 222 | VVLLGSLFSR | 0.457 | 356 | WB | Sequence | A0301 |
| 77 | REVIPMAAVK | 0.453 | 372 | WB | Sequence | A0301 |
| 223 | VLLGSLFSRK | 0.742 | 16 | SB | Sequence | A1101 |
| 222 | VVLLGSLFSR | 0.681 | 31 | SB | Sequence | A1101 |
| 147 | GALCVESVDK | 0.515 | 190 | WB | Sequence | A1101 |
| 24 | SQFSDVEENR | 0.470 | 310 | WB | Sequence | A1101 |
| 121 | SFEQVVNELF | 0.581 | 92 | WB | Sequence | A2301 |
| 171 | TYLNDHLEPW | 0.547 | 134 | WB | Sequence | A2301 |
| 121 | SFEQVVNELF | 0.528 | 165 | WB | Sequence | A2402 |
| 171 | TYLNDHLEPW | 0.520 | 180 | WB | Sequence | A2402 |
| 113 | ITPGTAYQSF | 0.460 | 343 | WB | Sequence | A2402 |
| 171 | TYLNDHLEPW | 0.739 | 16 | SB | Sequence | A2403 |
| 121 | SFEQVVNELF | 0.546 | 136 | WB | Sequence | A2403 |
| 113 | ITPGTAYQSF | 0.508 | 204 | WB | Sequence | A2403 |
| 35 | EAPEGTESEM | 0.448 | 390 | WB | Sequence | A2601 |
| 164 | RIAAWMATYL | 0.626 | 57 | WB | Sequence | A2602 |
| 113 | ITPGTAYQSF | 0.581 | 92 | WB | Sequence | A2602 |
| 160 | VLVSRIAAWM | 0.553 | 126 | WB | Sequence | A2602 |
| 35 | EAPEGTESEM | 0.507 | 207 | WB | Sequence | A2602 |
| 152 | ESVDKEMQVL | 0.490 | 249 | WB | Sequence | A2602 |
| 95 | EFELRYRRAF | 0.483 | 268 | WB | Sequence | A2602 |
| 110 | QLHITPGTAY | 0.506 | 209 | WB | Sequence | A2902 |
| 222 | VVLLGSLFSR | 0.683 | 30 | SB | Sequence | A3101 |
| 129 | LFRDGVNWGR | 0.667 | 36 | SB | Sequence | A3101 |
| 202 | SRKGQERFNR | 0.608 | 69 | WB | Sequence | A3101 |
| 81 | PMAAVKQALR | 0.521 | 177 | WB | Sequence | A3101 |
| 222 | VVLLGSLFSR | 0.572 | 103 | WB | Sequence | A3301 |
| 129 | LFRDGVNWGR | 0.553 | 126 | WB | Sequence | A3301 |
| 10 | DFLSYKLSQK | 0.470 | 308 | WB | Sequence | A3301 |
| 6 | ELVVDFLSYK | 0.702 | 25 | SB | Sequence | A6801 |
| 24 | SQFSDVEENR | 0.532 | 158 | WB | Sequence | A6801 |
| 222 | VVLLGSLFSR | 0.516 | 188 | WB | Sequence | A6801 |
| 194 | YGNNAAAESR | 0.493 | 240 | WB | Sequence | A6801 |
| 78 | EVIPMAAVKQ | 0.454 | 368 | WB | Sequence | A6801 |
| 169 | MATYLNDHLE | 0.448 | 394 | WB | Sequence | A6801 |
| 139 | IVAFFSFGGA | 0.742 | 16 | SB | Sequence | A6802 |
| 116 | GTAYQSFEQV | 0.673 | 34 | SB | Sequence | A6802 |
| 7 | LVVDFLSYKL | 0.659 | 39 | SB | Sequence | A6802 |
| 120 | QSFEQVVNEL | 0.618 | 62 | WB | Sequence | A6802 |
| 213 | FLTGMTVAGV | 0.577 | 96 | WB | Sequence | A6802 |
| 117 | TAYQSFEQVV | 0.561 | 115 | WB | Sequence | A6802 |
| 164 | RIAAWMATYL | 0.519 | 182 | WB | Sequence | A6802 |
| 65 | NGATGHSSSL | 0.496 | 234 | WB | Sequence | A6802 |
| 218 | TVAGVVLLGS | 0.491 | 246 | WB | Sequence | A6802 |
| 145 | FGGALCVESV | 0.474 | 294 | WB | Sequence | A6802 |
| 125 | VVNELFRDGV | 0.465 | 328 | WB | Sequence | A6802 |
| 161 | LVSRIAAWMA | 0.451 | 380 | WB | Sequence | A6802 |
| 215 | TGMTVAGVVL | 0.450 | 382 | WB | Sequence | A6802 |
| 153 | SVDKEMQVLV | 0.534 | 155 | WB | Sequence | A6901 |
| 213 | FLTGMTVAGV | 0.527 | 166 | WB | Sequence | A6901 |
| 117 | TAYQSFEQVV | 0.466 | 324 | WB | Sequence | A6901 |
| 7 | LVVDFLSYKL | 0.451 | 378 | WB | Sequence | A6901 |
| 164 | RIAAWMATYL | 0.443 | 412 | WB | Sequence | A6901 |
| 116 | GTAYQSFEQV | 0.427 | 493 | WB | Sequence | A6901 |
| 80 | IPMAAVKQAL | 0.704 | 24 | SB | Sequence | B0702 |
| 17 | SQKGYSWSQF | 0.572 | 102 | WB | Sequence | B1501 |
| 110 | QLHITPGTAY | 0.557 | 121 | WB | Sequence | B1501 |
| 133 | GVNWGRIVAF | 0.548 | 132 | WB | Sequence | B1501 |
| 181 | IQENGGWDTF | 0.522 | 175 | WB | Sequence | B1501 |
| 12 | LSYKLSQKGY | 0.455 | 364 | WB | Sequence | B1501 |
| 5 | RELVVDFLSY | 0.759 | 13 | SB | Sequence | B1801 |
| 163 | SRIAAWMATY | 0.588 | 86 | WB | Sequence | B2705 |
| 101 | RRAFSDLTSQ | 0.461 | 340 | WB | Sequence | B2705 |
| 80 | IPMAAVKQAL | 0.609 | 69 | WB | Sequence | B3501 |
| 178 | EPWIQENGGW | 0.604 | 72 | WB | Sequence | B3501 |
| 91 | EAGDEFELRY | 0.566 | 109 | WB | Sequence | B3501 |
| 35 | EAPEGTESEM | 0.563 | 112 | WB | Sequence | B3501 |
| 87 | QALREAGDEF | 0.508 | 206 | WB | Sequence | B3501 |
| 61 | SPAVNGATGH | 0.490 | 249 | WB | Sequence | B3501 |
| 46 | TPSAINGNPS | 0.483 | 269 | WB | Sequence | B3501 |
| 133 | GVNWGRIVAF | 0.455 | 362 | WB | Sequence | B3501 |
| 140 | VAFFSFGGAL | 0.454 | 367 | WB | Sequence | B3501 |
| 190 | FVELYGNNAA | 0.439 | 430 | WB | Sequence | B3501 |
| 200 | AESRKGQERF | 0.453 | 370 | WB | Sequence | B4501 |
| 178 | EPWIQENGGW | 0.603 | 73 | WB | Sequence | B5301 |
| 2 | QSNRELVVDF | 0.474 | 295 | WB | Sequence | B5801 |
| 159 | QVLVSRIAAW | 0.467 | 320 | WB | Sequence | B5801 |
| 47 | PSAINGNPSW | 0.437 | 444 | WB | Sequence | B5801 |

11-mers

| | | | | | | |
|---|---|---|---|---|---|---|
| 213 | FLTGMTVAGVV | 0.627 | 56 | WB | Sequence | A0201 |
| 73 | SLDAREVIPMA | 0.561 | 115 | WB | Sequence | A0201 |
| 160 | VLVSRIAAWMA | 0.547 | 135 | WB | Sequence | A0201 |
| 57 | HLADSPAVNGA | 0.539 | 147 | WB | Sequence | A0201 |
| 172 | YLNDHLEPWIQ | 0.480 | 278 | WB | Sequence | A0201 |
| 88 | ALREAGDEFEL | 0.470 | 309 | WB | Sequence | A0201 |
| 119 | YQSFEQVVNEL | 0.426 | 497 | WB | Sequence | A0201 |
| 57 | HLADSPAVNGA | 0.763 | 12 | SB | Sequence | A0202 |
| 213 | FLTGMTVAGVV | 0.754 | 14 | SB | Sequence | A0202 |
| 119 | YQSFEQVVNEL | 0.734 | 17 | SB | Sequence | A0202 |
| 88 | ALREAGDEFEL | 0.679 | 32 | SB | Sequence | A0202 |
| 172 | YLNDHLEPWIQ | 0.611 | 67 | WB | Sequence | A0202 |
| 139 | IVAFFSFGGAL | 0.558 | 119 | WB | Sequence | A0202 |
| 218 | TVAGVVLLGSL | 0.537 | 149 | WB | Sequence | A0202 |
| 160 | VLVSRIAAWMA | 0.525 | 170 | WB | Sequence | A0202 |
| 15 | KLSQKGYSWSQ | 0.450 | 382 | WB | Sequence | A0202 |
| 6 | ELVVDFLSYKL | 0.449 | 387 | WB | Sequence | A0202 |
| 73 | SLDAREVIPMA | 0.446 | 401 | WB | Sequence | A0202 |
| 213 | FLTGMTVAGVV | 0.864 | 4 | SB | Sequence | A0203 |
| 57 | HLADSPAVNGA | 0.844 | 5 | SB | Sequence | A0203 |
| 138 | RIVAFFSFGGA | 0.752 | 14 | SB | Sequence | A0203 |
| 160 | VLVSRIAAWMA | 0.649 | 44 | SB | Sequence | A0203 |
| 218 | TVAGVVLLGSL | 0.619 | 61 | WB | Sequence | A0203 |
| 88 | ALREAGDEFEL | 0.604 | 72 | WB | Sequence | A0203 |
| 119 | YQSFEQVVNEL | 0.567 | 108 | WB | Sequence | A0203 |
| 172 | YLNDHLEPWIQ | 0.565 | 110 | WB | Sequence | A0203 |
| 49 | AINGNPSWHLA | 0.562 | 114 | WB | Sequence | A0203 |
| 209 | FNRWFLTGMTV | 0.494 | 239 | WB | Sequence | A0203 |
| 139 | IVAFFSFGGAL | 0.487 | 257 | WB | Sequence | A0203 |
| 73 | SLDAREVIPMA | 0.480 | 276 | WB | Sequence | A0203 |
| 82 | MAAVKQALREA | 0.430 | 477 | WB | Sequence | A0203 |
| 124 | QVVNELFRDGV | 0.426 | 496 | WB | Sequence | A0203 |
| 213 | FLTGMTVAGVV | 0.584 | 90 | WB | Sequence | A0204 |
| 88 | ALREAGDEFEL | 0.526 | 168 | WB | Sequence | A0204 |
| 160 | VLVSRIAAWMA | 0.517 | 185 | WB | Sequence | A0204 |
| 172 | YLNDHLEPWIQ | 0.517 | 186 | WB | Sequence | A0204 |
| 73 | SLDAREVIPMA | 0.485 | 263 | WB | Sequence | A0204 |
| 213 | FLTGMTVAGVV | 0.746 | 15 | SB | Sequence | A0206 |
| 138 | RIVAFFSFGGA | 0.725 | 19 | SB | Sequence | A0206 |
| 181 | IQENGGWDTFV | 0.704 | 24 | SB | Sequence | A0206 |
| 119 | YQSFEQVVNEL | 0.671 | 35 | SB | Sequence | A0206 |
| 48 | SAINGNPSWHL | 0.664 | 38 | SB | Sequence | A0206 |
| 124 | QVVNELFRDGV | 0.619 | 62 | WB | Sequence | A0206 |
| 160 | VLVSRIAAWMA | 0.584 | 90 | WB | Sequence | A0206 |
| 86 | KQALREAGDEF | 0.547 | 134 | WB | Sequence | A0206 |
| 57 | HLADSPAVNGA | 0.509 | 201 | WB | Sequence | A0206 |
| 218 | TVAGVVLLGSL | 0.456 | 358 | WB | Sequence | A0206 |
| 88 | ALREAGDEFEL | 0.442 | 420 | WB | Sequence | A0206 |
| 109 | SQLHITPGTAY | 0.441 | 422 | WB | Sequence | A0206 |
| 213 | FLTGMTVAGVV | 0.943 | 1 | SB | Sequence | A0211 |
| 73 | SLDAREVIPMA | 0.876 | 3 | SB | Sequence | A0211 |
| 172 | YLNDHLEPWIQ | 0.852 | 4 | SB | Sequence | A0211 |
| 88 | ALREAGDEFEL | 0.799 | 8 | SB | Sequence | A0211 |
| 57 | HLADSPAVNGA | 0.787 | 10 | SB | Sequence | A0211 |
| 160 | VLVSRIAAWMA | 0.759 | 13 | SB | Sequence | A0211 |
| 15 | KLSQKGYSWSQ | 0.743 | 16 | SB | Sequence | A0211 |
| 6 | ELVVDFLSYKL | 0.682 | 31 | SB | Sequence | A0211 |
| 218 | TVAGVVLLGSL | 0.628 | 55 | WB | Sequence | A0211 |
| 49 | AINGNPSWHLA | 0.612 | 66 | WB | Sequence | A0211 |
| 212 | WFLTGMTVAGV | 0.577 | 97 | WB | Sequence | A0211 |
| 141 | AFFSFGGALCV | 0.571 | 103 | WB | Sequence | A0211 |
| 144 | SFGGALCVESV | 0.569 | 105 | WB | Sequence | A0211 |
| 79 | VIPMAAVKQAL | 0.568 | 107 | WB | Sequence | A0211 |
| 124 | QVVNELFRDGV | 0.535 | 152 | WB | Sequence | A0211 |
| 130 | FRDGVNWGRIV | 0.516 | 187 | WB | Sequence | A0211 |
| 48 | SAINGNPSWHL | 0.515 | 189 | WB | Sequence | A0211 |
| 192 | ELYGNNAAAES | 0.504 | 214 | WB | Sequence | A0211 |
| 150 | CVESVDKEMQV | 0.489 | 252 | WB | Sequence | A0211 |
| 116 | GTAYQSFEQVV | 0.452 | 376 | WB | Sequence | A0211 |
| 139 | IVAFFSFGGAL | 0.444 | 411 | WB | Sequence | A0211 |
| 213 | FLTGMTVAGVV | 0.824 | 6 | SB | Sequence | A0212 |
| 172 | YLNDHLEPWIQ | 0.812 | 7 | SB | Sequence | A0212 |
| 88 | ALREAGDEFEL | 0.779 | 10 | SB | Sequence | A0212 |
| 73 | SLDAREVIPMA | 0.745 | 15 | SB | Sequence | A0212 |
| 57 | HLADSPAVNGA | 0.714 | 22 | SB | Sequence | A0212 |
| 160 | VLVSRIAAWMA | 0.681 | 31 | SB | Sequence | A0212 |
| 79 | VIPMAAVKQAL | 0.604 | 72 | WB | Sequence | A0212 |
| 15 | KLSQKGYSWSQ | 0.568 | 107 | WB | Sequence | A0212 |
| 212 | WFLTGMTVAGV | 0.504 | 213 | WB | Sequence | A0212 |
| 6 | ELVVDFLSYKL | 0.451 | 380 | WB | Sequence | A0212 |
| 130 | FRDGVNWGRIV | 0.431 | 473 | WB | Sequence | A0212 |
| 213 | FLTGMTVAGVV | 0.862 | 4 | SB | Sequence | A0216 |
| 88 | ALREAGDEFEL | 0.821 | 6 | SB | Sequence | A0216 |
| 73 | SLDAREVIPMA | 0.744 | 16 | SB | Sequence | A0216 |
| 160 | VLVSRIAAWMA | 0.649 | 44 | SB | Sequence | A0216 |
| 150 | CVESVDKEMQV | 0.641 | 48 | SB | Sequence | A0216 |
| 57 | HLADSPAVNGA | 0.595 | 79 | WB | Sequence | A0216 |
| 144 | SFGGALCVESV | 0.591 | 83 | WB | Sequence | A0216 |
| 172 | YLNDHLEPWIQ | 0.581 | 92 | WB | Sequence | A0216 |
| 15 | KLSQKGYSWSQ | 0.561 | 115 | WB | Sequence | A0216 |
| 6 | ELVVDFLSYKL | 0.544 | 138 | WB | Sequence | A0216 |
| 218 | TVAGVVLLGSL | 0.534 | 154 | WB | Sequence | A0216 |
| 141 | AFFSFGGALCV | 0.526 | 168 | WB | Sequence | A0216 |
| 181 | IQENGGWDTFV | 0.497 | 231 | WB | Sequence | A0216 |
| 124 | QVVNELFRDGV | 0.490 | 249 | WB | Sequence | A0216 |
| 79 | VIPMAAVKQAL | 0.487 | 257 | WB | Sequence | A0216 |
| 192 | ELYGNNAAAES | 0.478 | 283 | WB | Sequence | A0216 |
| 48 | SAINGNPSWHL | 0.468 | 315 | WB | Sequence | A0216 |
| 212 | WFLTGMTVAGV | 0.437 | 441 | WB | Sequence | A0216 |
| 49 | AINGNPSWHLA | 0.436 | 447 | WB | Sequence | A0216 |
| 213 | FLTGMTVAGVV | 0.781 | 10 | SB | Sequence | A0219 |
| 57 | HLADSPAVNGA | 0.730 | 18 | SB | Sequence | A0219 |
| 172 | YLNDHLEPWIQ | 0.695 | 27 | SB | Sequence | A0219 |
| 73 | SLDAREVIPMA | 0.609 | 68 | WB | Sequence | A0219 |
| 88 | ALREAGDEFEL | 0.549 | 131 | WB | Sequence | A0219 |
| 212 | WFLTGMTVAGV | 0.524 | 172 | WB | Sequence | A0219 |
| 160 | VLVSRIAAWMA | 0.499 | 225 | WB | Sequence | A0219 |
| 222 | VVLLGSLFSRK | 0.688 | 29 | SB | Sequence | A0301 |
| 222 | VVLLGSLFSRK | 0.786 | 10 | SB | Sequence | A1101 |
| 221 | GVVLLGSLFSR | 0.596 | 78 | WB | Sequence | A1101 |
| 67 | ATGHSSSLDAR | 0.505 | 212 | WB | Sequence | A1101 |
| 5 | RELVVDFLSYK | 0.428 | 489 | WB | Sequence | A1101 |
| 135 | NWGRIVAFFSF | 0.695 | 26 | SB | Sequence | A2301 |
| 171 | TYLNDHLEPWI | 0.576 | 98 | WB | Sequence | A2301 |
| 167 | AWMATYLNDHL | 0.534 | 154 | WB | Sequence | A2301 |
| 13 | SYKLSQKGYSW | 0.531 | 159 | WB | Sequence | A2301 |
| 135 | NWGRIVAFFSF | 0.746 | 15 | SB | Sequence | A2402 |
| 171 | TYLNDHLEPWI | 0.746 | 15 | SB | Sequence | A2402 |
| 167 | AWMATYLNDHL | 0.520 | 180 | WB | Sequence | A2402 |
| 171 | TYLNDHLEPWI | 0.660 | 39 | SB | Sequence | A2403 |
| 167 | AWMATYLNDHL | 0.523 | 174 | WB | Sequence | A2403 |
| 13 | SYKLSQKGYSW | 0.523 | 174 | WB | Sequence | A2403 |
| 112 | HITPGTAYQSF | 0.431 | 473 | WB | Sequence | A2403 |
| 159 | QVLVSRIAAWM | 0.640 | 49 | SB | Sequence | A2602 |
| 112 | HITPGTAYQSF | 0.573 | 101 | WB | Sequence | A2602 |
| 180 | WIQENGGWDTF | 0.518 | 183 | WB | Sequence | A2602 |
| 11 | FLSYKLSQKGY | 0.516 | 188 | WB | Sequence | A2602 |
| 132 | DGVNWGRIVAF | 0.462 | 336 | WB | Sequence | A2602 |
| 218 | TVAGVVLLGSL | 0.443 | 415 | WB | Sequence | A2602 |
| 109 | SQLHITPGTAY | 0.516 | 188 | WB | Sequence | A2902 |
| 222 | VVLLGSLFSRK | 0.435 | 453 | WB | Sequence | A3001 |
| 99 | RYRRAFSDLTS | 0.428 | 486 | WB | Sequence | A3001 |
| 221 | GVVLLGSLFSR | 0.598 | 77 | WB | Sequence | A3101 |
| 121 | SFEQVVNELFR | 0.552 | 127 | WB | Sequence | A3101 |
| 201 | ESRKGQERFNR | 0.511 | 198 | WB | Sequence | A3101 |
| 67 | ATGHSSSLDAR | 0.475 | 292 | WB | Sequence | A3101 |
| 5 | RELVVDFLSYK | 0.442 | 417 | WB | Sequence | A3101 |
| 193 | LYGNNAAAESR | 0.435 | 449 | WB | Sequence | A3101 |
| 201 | ESRKGQERFNR | 0.690 | 28 | SB | Sequence | A3301 |
| 128 | ELFRDGVNWGR | 0.634 | 52 | WB | Sequence | A3301 |
| 91 | EAGDEFELRYR | 0.538 | 148 | WB | Sequence | A3301 |
| 121 | SFEQVVNELFR | 0.472 | 303 | WB | Sequence | A3301 |
| 221 | GVVLLGSLFSR | 0.447 | 396 | WB | Sequence | A3301 |
| 95 | EFELRYRRAFS | 0.435 | 449 | WB | Sequence | A3301 |
| 128 | ELFRDGVNWGR | 0.739 | 16 | SB | Sequence | A6801 |
| 23 | WSQFSDVEENR | 0.667 | 36 | SB | Sequence | A6801 |
| 201 | ESRKGQERFNR | 0.666 | 36 | SB | Sequence | A6801 |
| 91 | EAGDEFELRYR | 0.643 | 47 | SB | Sequence | A6801 |
| 221 | GVVLLGSLFSR | 0.638 | 49 | SB | Sequence | A6801 |
| 80 | IPMAAVKQALR | 0.566 | 109 | WB | Sequence | A6801 |
| 121 | SFEQVVNELFR | 0.536 | 151 | WB | Sequence | A6801 |
| 218 | TVAGVVLLGSL | 0.796 | 9 | SB | Sequence | A6802 |
| 124 | QVVNELFRDGV | 0.712 | 22 | SB | Sequence | A6802 |
| 139 | IVAFFSFGGAL | 0.684 | 30 | SB | Sequence | A6802 |
| 152 | ESVDKEMQVLV | 0.613 | 65 | WB | Sequence | A6802 |
| 215 | TGMTVAGVVLL | 0.561 | 116 | WB | Sequence | A6802 |
| 6 | ELVVDFLSYKL | 0.551 | 129 | WB | Sequence | A6802 |
| 138 | RIVAFFSFGGA | 0.548 | 132 | WB | Sequence | A6802 |
| 188 | DTFVELYGNNA | 0.530 | 161 | WB | Sequence | A6802 |
| 78 | EVIPMAAVKQA | 0.516 | 188 | WB | Sequence | A6802 |
| 116 | GTAYQSFEQVV | 0.514 | 191 | WB | Sequence | A6802 |
| 75 | DAREVIPMAAV | 0.509 | 203 | WB | Sequence | A6802 |
| 57 | HLADSPAVNGA | 0.508 | 206 | WB | Sequence | A6802 |
| 217 | MTVAGVVLLGS | 0.480 | 277 | WB | Sequence | A6802 |
| 45 | ETPSAINGNPS | 0.479 | 279 | WB | Sequence | A6802 |
| 213 | FLTGMTVAGVV | 0.470 | 308 | WB | Sequence | A6802 |
| 70 | HSSSLDAREVI | 0.447 | 397 | WB | Sequence | A6802 |
| 48 | SAINGNPSWHL | 0.541 | 143 | WB | Sequence | A6901 |
| 75 | DAREVIPMAAV | 0.527 | 166 | WB | Sequence | A6901 |
| 152 | ESVDKEMQVLV | 0.511 | 199 | WB | Sequence | A6901 |
| 57 | HLADSPAVNGA | 0.485 | 263 | WB | Sequence | A6901 |
| 54 | PSWHLADSPAV | 0.469 | 312 | WB | Sequence | A6901 |
| 212 | WFLTGMTVAGV | 0.453 | 369 | WB | Sequence | A6901 |
| 78 | EVIPMAAVKQA | 0.442 | 417 | WB | Sequence | A6901 |
| 6 | ELVVDFLSYKL | 0.442 | 417 | WB | Sequence | A6901 |
| 218 | TVAGVVLLGSL | 0.430 | 475 | WB | Sequence | A6901 |
| 188 | DTFVELYGNNA | 0.427 | 494 | WB | Sequence | A6901 |
| 139 | IVAFFSFGGAL | 0.518 | 183 | WB | Sequence | B0702 |
| 53 | NPSWHLADSPA | 0.499 | 224 | WB | Sequence | B0702 |
| 61 | SPAVNGATGHS | 0.457 | 355 | WB | Sequence | B0702 |
| 109 | SQLHITPGTAY | 0.605 | 72 | WB | Sequence | B1501 |
| 86 | KQALREAGDEF | 0.567 | 108 | WB | Sequence | B1501 |
| 1 | SQSNRELVVDF | 0.540 | 144 | WB | Sequence | B1501 |
| 119 | YQSFEQVVNEL | 0.515 | 189 | WB | Sequence | B1501 |
| 158 | MQVLVSRIAAW | 0.512 | 196 | WB | Sequence | B1501 |
| 162 | VSRIAAWMATY | 0.477 | 285 | WB | Sequence | B1501 |
| 11 | FLSYKLSQKGY | 0.474 | 294 | WB | Sequence | B1501 |
| 180 | WIQENGGWDTF | 0.473 | 299 | WB | Sequence | B1501 |
| 120 | QSFEQVVNELF | 0.450 | 386 | WB | Sequence | B1501 |
| 112 | HITPGTAYQSF | 0.447 | 394 | WB | Sequence | B1501 |
| 133 | GVNWGRIVAFF | 0.433 | 463 | WB | Sequence | B1501 |
| 94 | DEFELRYRRAF | 0.829 | 6 | SB | Sequence | B1801 |
| 90 | REAGDEFELRY | 0.560 | 116 | WB | Sequence | B1801 |
| 109 | SQLHITPGTAY | 0.539 | 146 | WB | Sequence | B1801 |
| 151 | VESVDKEMQVL | 0.476 | 288 | WB | Sequence | B1801 |
| 177 | LEPWIQENGGW | 0.466 | 321 | WB | Sequence | B1801 |
| 209 | FNRWFLTGMTV | 0.444 | 409 | WB | Sequence | B1801 |
| 101 | RRAFSDLTSQL | 0.563 | 113 | WB | Sequence | B2705 |
| 163 | SRIAAWMATYL | 0.470 | 310 | WB | Sequence | B2705 |
| 53 | NPSWHLADSPA | 0.623 | 59 | WB | Sequence | B3501 |
| 46 | TPSAINGNPSW | 0.485 | 263 | WB | Sequence | B3501 |
| 180 | WIQENGGWDTF | 0.474 | 297 | WB | Sequence | B3501 |
| 132 | DGVNWGRIVAF | 0.442 | 419 | WB | Sequence | B3501 |
| 119 | YQSFEQVVNEL | 0.610 | 68 | WB | Sequence | B3901 |
| 151 | VESVDKEMQVL | 0.492 | 243 | WB | Sequence | B4001 |
| 40 | TESEMETPSAI | 0.446 | 402 | WB | Sequence | B4002 |
| 30 | EENRTEAPEGT | 0.498 | 228 | WB | Sequence | B4501 |
| 46 | TPSAINGNPSW | 0.772 | 11 | SB | Sequence | B5301 |
| 53 | NPSWHLADSPA | 0.430 | 474 | WB | Sequence | B5401 |
| 170 | ATYLNDHLEPW | 0.540 | 145 | WB | Sequence | B5701 |
| 170 | ATYLNDHLEPW | 0.537 | 150 | WB | Sequence | B5801 |
| 120 | QSFEQVVNELF | 0.495 | 235 | WB | Sequence | B5801 |

[0889] Preferred fragments of Bcl-2 capable of interacting with one or more MHC class I molecules are listed in table C below.

TABLE C

Prediction of cancer antigen Bcl-2 specific MHC
class 1, 8-, 9-, 10-, 11-mer peptide binders for 42
MHC class 1 alleles (see FIG. 11) using the http://
www.cbs.dtu.dk/services/NetMHC/ database. The MHC
class 1 molecules for which no binders were found are not listed.

| | | | | | | |
|---|---|---|---|---|---|---|
| pos | peptide | logscore | affinity (nM) | Bind Level | Protein Name | Allele |

8-mer

| | | | | | | |
|---|---|---|---|---|---|---|
| 84 | ALSPVPPV | 0.783 | 10 | SB | Sequence | A0201 |
| 218 | TLLSLALV | 0.723 | 20 | SB | Sequence | A0201 |
| 173 | ALWMTEYL | 0.682 | 31 | SB | Sequence | A0201 |
| 154 | GVMCVESV | 0.630 | 54 | WB | Sequence | A0201 |
| 207 | PLFDFSWL | 0.488 | 253 | WB | Sequence | A0201 |
| 215 | SLKTLLSL | 0.449 | 387 | WB | Sequence | A0201 |
| 84 | ALSPVPPV | 0.710 | 23 | SB | Sequence | A0202 |
| 213 | WLSLKTLL | 0.709 | 23 | SB | Sequence | A0202 |
| 215 | SLKTLLSL | 0.661 | 39 | SB | Sequence | A0202 |
| 207 | PLFDFSWL | 0.653 | 42 | SB | Sequence | A0202 |
| 173 | ALWMTEYL | 0.631 | 54 | WB | Sequence | A0202 |
| 154 | GVMCVESV | 0.630 | 55 | WB | Sequence | A0202 |
| 218 | TLLSLALV | 0.610 | 68 | WB | Sequence | A0202 |
| 113 | EMSSQLHL | 0.570 | 105 | WB | Sequence | A0202 |
| 224 | LVGACITL | 0.534 | 154 | WB | Sequence | A0202 |
| 129 | FATVVEEL | 0.512 | 195 | WB | Sequence | A0202 |
| 167 | PLVDNIAL | 0.508 | 204 | WB | Sequence | A0202 |
| 179 | YLNRHLHT | 0.435 | 453 | WB | Sequence | A0202 |
| 209 | FDFSWLSL | 0.432 | 464 | WB | Sequence | A0202 |
| 84 | ALSPVPPV | 0.909 | 2 | SB | Sequence | A0203 |
| 215 | SLKTLLSL | 0.853 | 4 | SB | Sequence | A0203 |
| 154 | GVMCVESV | 0.754 | 14 | SB | Sequence | A0203 |
| 179 | YLNRHLHT | 0.682 | 31 | SB | Sequence | A0203 |
| 218 | TLLSLALV | 0.673 | 34 | SB | Sequence | A0203 |
| 213 | WLSLKTLL | 0.665 | 37 | SB | Sequence | A0203 |
| 140 | GVNWGRIV | 0.581 | 92 | WB | Sequence | A0203 |
| 123 | FTARGRFA | 0.523 | 174 | WB | Sequence | A0203 |
| 173 | ALWMTEYL | 0.497 | 229 | WB | Sequence | A0203 |
| 207 | PLFDFSWL | 0.478 | 284 | WB | Sequence | A0203 |
| 84 | ALSPVPPV | 0.763 | 13 | SB | Sequence | A0204 |
| 173 | ALWMTEYL | 0.541 | 144 | WB | Sequence | A0204 |
| 218 | TLLSLALV | 0.526 | 168 | WB | Sequence | A0204 |
| 154 | GVMCVESV | 0.478 | 283 | WB | Sequence | A0204 |
| 224 | LVGACITL | 0.451 | 381 | WB | Sequence | A0204 |
| 84 | ALSPVPPV | 0.764 | 12 | SB | Sequence | A0206 |
| 154 | GVMCVESV | 0.743 | 16 | SB | Sequence | A0206 |
| 116 | SQLHLTPF | 0.737 | 17 | SB | Sequence | A0206 |
| 218 | TLLSLALV | 0.714 | 21 | SB | Sequence | A0206 |
| 145 | RIVAFFEF | 0.623 | 58 | WB | Sequence | A0206 |
| 217 | KTLLSLAL | 0.574 | 100 | WB | Sequence | A0206 |
| 173 | ALWMTEYL | 0.538 | 148 | WB | Sequence | A0206 |
| 224 | LVGACITL | 0.463 | 334 | WB | Sequence | A0206 |
| 123 | FTARGRFA | 0.462 | 335 | WB | Sequence | A0206 |
| 213 | WLSLKTLL | 0.451 | 378 | WB | Sequence | A0206 |
| 129 | FATVVEEL | 0.450 | 383 | WB | Sequence | A0206 |
| 97 | RQAGDDFS | 0.436 | 445 | WB | Sequence | A0206 |
| 84 | ALSPVPPV | 0.956 | 1 | SB | Sequence | A0211 |
| 218 | TLLSLALV | 0.954 | 1 | SB | Sequence | A0211 |
| 173 | ALWMTEYL | 0.935 | 2 | SB | Sequence | A0211 |
| 207 | PLFDFSWL | 0.934 | 2 | SB | Sequence | A0211 |
| 167 | PLVDNIAL | 0.888 | 3 | SB | Sequence | A0211 |
| 215 | SLKTLLSL | 0.819 | 7 | SB | Sequence | A0211 |
| 213 | WLSLKTLL | 0.780 | 10 | SB | Sequence | A0211 |
| 179 | YLNRHLHT | 0.716 | 21 | SB | Sequence | A0211 |
| 113 | EMSSQLHL | 0.686 | 29 | SB | Sequence | A0211 |
| 140 | GVNWGRIV | 0.668 | 36 | SB | Sequence | A0211 |
| 154 | GVMCVESV | 0.578 | 95 | WB | Sequence | A0211 |
| 148 | AFFEFGGV | 0.534 | 154 | WB | Sequence | A0211 |
| 87 | PVPPVVHL | 0.512 | 197 | WB | Sequence | A0211 |
| 228 | CITLGAYL | 0.500 | 223 | WB | Sequence | A0211 |
| 224 | LVGACITL | 0.500 | 223 | WB | Sequence | A0211 |
| 223 | ALVGACIT | 0.479 | 281 | WB | Sequence | A0211 |
| 27 | YEWDAGDV | 0.472 | 303 | WB | Sequence | A0211 |
| 151 | EFGGVMCV | 0.452 | 377 | WB | Sequence | A0211 |
| 221 | SLALVGAC | 0.445 | 405 | WB | Sequence | A0211 |
| 84 | ALSPVPPV | 0.874 | 3 | SB | Sequence | A0212 |
| 173 | ALWMTEYL | 0.860 | 4 | SB | Sequence | A0212 |
| 218 | TLLSLALV | 0.857 | 4 | SB | Sequence | A0212 |
| 207 | PLFDFSWL | 0.836 | 5 | SB | Sequence | A0212 |
| 167 | PLVDNIAL | 0.787 | 9 | SB | Sequence | A0212 |
| 215 | SLKTLLSL | 0.756 | 13 | SB | Sequence | A0212 |
| 179 | YLNRHLHT | 0.720 | 20 | SB | Sequence | A0212 |
| 113 | EMSSQLHL | 0.594 | 80 | WB | Sequence | A0212 |
| 213 | WLSLKTLL | 0.564 | 112 | WB | Sequence | A0212 |
| 27 | YEWDAGDV | 0.477 | 288 | WB | Sequence | A0212 |
| 154 | GVMCVESV | 0.460 | 344 | WB | Sequence | A0212 |
| 84 | ALSPVPPV | 0.926 | 2 | SB | Sequence | A0216 |
| 173 | ALWMTEYL | 0.916 | 2 | SB | Sequence | A0216 |
| 218 | TLLSLALV | 0.902 | 2 | SB | Sequence | A0216 |
| 207 | PLFDFSWL | 0.889 | 3 | SB | Sequence | A0216 |
| 167 | PLVDNIAL | 0.767 | 12 | SB | Sequence | A0216 |
| 215 | SLKTLLSL | 0.723 | 20 | SB | Sequence | A0216 |
| 213 | WLSLKTLL | 0.718 | 21 | SB | Sequence | A0216 |
| 113 | EMSSQLHL | 0.665 | 37 | SB | Sequence | A0216 |
| 154 | GVMCVESV | 0.646 | 46 | SB | Sequence | A0216 |
| 179 | YLNRHLHT | 0.631 | 53 | WB | Sequence | A0216 |
| 223 | ALVGACIT | 0.591 | 83 | WB | Sequence | A0216 |
| 224 | LVGACITL | 0.531 | 159 | WB | Sequence | A0216 |
| 87 | PVPPVVHL | 0.526 | 168 | WB | Sequence | A0216 |
| 151 | EFGGVMCV | 0.524 | 173 | WB | Sequence | A0216 |
| 228 | CITLGAYL | 0.522 | 176 | WB | Sequence | A0216 |
| 140 | GVNWGRIV | 0.470 | 308 | WB | Sequence | A0216 |
| 84 | ALSPVPPV | 0.898 | 3 | SB | Sequence | A0219 |
| 173 | ALWMTEYL | 0.871 | 4 | SB | Sequence | A0219 |
| 218 | TLLSLALV | 0.847 | 5 | SB | Sequence | A0219 |
| 207 | PLFDFSWL | 0.785 | 10 | SB | Sequence | A0219 |
| 167 | PLVDNIAL | 0.713 | 22 | SB | Sequence | A0219 |
| 113 | EMSSQLHL | 0.613 | 65 | WB | Sequence | A0219 |
| 213 | WLSLKTLL | 0.599 | 76 | WB | Sequence | A0219 |
| 154 | GVMCVESV | 0.468 | 317 | WB | Sequence | A0219 |
| 215 | SLKTLLSL | 0.466 | 322 | WB | Sequence | A0219 |
| 27 | YEWDAGDV | 0.437 | 440 | WB | Sequence | A0219 |
| 179 | YLNRHLHT | 0.436 | 447 | WB | Sequence | A0219 |
| 14 | VMKYIHYK | 0.629 | 55 | WB | Sequence | A0301 |
| 13 | IVMKYIHY | 0.514 | 193 | WB | Sequence | A0301 |
| 119 | HLTPFTAR | 0.467 | 319 | WB | Sequence | A0301 |
| 199 | ELYGPSMR | 0.456 | 360 | WB | Sequence | A0301 |
| 14 | VMKYIHYK | 0.645 | 46 | SB | Sequence | A1101 |
| 131 | TVVEELFR | 0.616 | 63 | WB | Sequence | A1101 |
| 13 | IVMKYIHY | 0.577 | 97 | WB | Sequence | A1101 |
| 142 | NWGRIVAF | 0.600 | 75 | WB | Sequence | A2301 |
| 145 | RIVAFFEF | 0.518 | 184 | WB | Sequence | A2301 |
| 204 | SMRPLFDF | 0.469 | 312 | WB | Sequence | A2301 |
| 122 | PFTARGRF | 0.441 | 424 | WB | Sequence | A2301 |
| 142 | NWGRIVAF | 0.617 | 62 | WB | Sequence | A2402 |
| 212 | SWLSLKTL | 0.459 | 349 | WB | Sequence | A2402 |
| 204 | SMRPLFDF | 0.547 | 135 | WB | Sequence | A2403 |
| 145 | RIVAFFEF | 0.437 | 441 | WB | Sequence | A2403 |
| 13 | IVMKYIHY | 0.638 | 50 | WB | Sequence | A2602 |
| 113 | EMSSQLHL | 0.445 | 406 | WB | Sequence | A2602 |
| 145 | RIVAFFEF | 0.436 | 445 | WB | Sequence | A2602 |
| 12 | EIVMKYIH | 0.430 | 478 | WB | Sequence | A2602 |
| 130 | ATVVEELF | 0.428 | 489 | WB | Sequence | A2602 |
| 13 | IVMKYIHY | 0.603 | 73 | WB | Sequence | A2902 |
| 227 | ACITLGAY | 0.449 | 387 | WB | Sequence | A2902 |
| 14 | VMKYIHYK | 0.593 | 81 | WB | Sequence | A3001 |
| 60 | ASRDPVAR | 0.498 | 229 | WB | Sequence | A3001 |
| 126 | RGRFATVV | 0.480 | 276 | WB | Sequence | A3001 |
| 113 | EMSSQLHL | 0.446 | 401 | WB | Sequence | A3002 |
| 204 | SMRPLFDF | 0.444 | 410 | WB | Sequence | A3002 |
| 14 | VMKYIHYK | 0.842 | 5 | SB | Sequence | A3101 |
| 119 | HLTPFTAR | 0.709 | 23 | SB | Sequence | A3101 |
| 60 | ASRDPVAR | 0.692 | 28 | SB | Sequence | A3101 |
| 102 | DFSRRYRR | 0.622 | 59 | WB | Sequence | A3101 |
| 175 | WMTEYLNR | 0.564 | 112 | WB | Sequence | A3101 |
| 131 | TVVEELFR | 0.458 | 351 | WB | Sequence | A3101 |
| 102 | DFSRRYRR | 0.883 | 3 | SB | Sequence | A3301 |
| 119 | HLTPFTAR | 0.746 | 15 | SB | Sequence | A3301 |
| 210 | DFSWLSLK | 0.672 | 34 | SB | Sequence | A3301 |
| 101 | DDFSRRYR | 0.622 | 60 | WB | Sequence | A3301 |
| 199 | ELYGPSMR | 0.615 | 64 | WB | Sequence | A3301 |
| 131 | TVVEELFR | 0.546 | 136 | WB | Sequence | A3301 |
| 14 | VMKYIHYK | 0.510 | 199 | WB | Sequence | A3301 |
| 131 | TVVEELFR | 0.843 | 5 | SB | Sequence | A6801 |
| 199 | ELYGPSMR | 0.792 | 9 | SB | Sequence | A6801 |
| 119 | HLTPFTAR | 0.733 | 18 | SB | Sequence | A6801 |
| 210 | DFSWLSLK | 0.637 | 50 | WB | Sequence | A6801 |
| 121 | TPFTARGR | 0.625 | 58 | WB | Sequence | A6801 |
| 55 | TPHPAASR | 0.581 | 93 | WB | Sequence | A6801 |
| 101 | DDFSRRYR | 0.526 | 168 | WB | Sequence | A6801 |
| 14 | VMKYIHYK | 0.524 | 171 | WB | Sequence | A6801 |
| 98 | QAGDDFSR | 0.522 | 176 | WB | Sequence | A6801 |
| 175 | WMTEYLNR | 0.505 | 211 | WB | Sequence | A6801 |
| 156 | MCVESVNR | 0.502 | 219 | WB | Sequence | A6801 |
| 102 | DFSRRYRR | 0.491 | 247 | WB | Sequence | A6801 |
| 90 | PVVHLTLR | 0.456 | 358 | WB | Sequence | A6801 |
| 154 | GVMCVESV | 0.630 | 54 | WB | Sequence | A6802 |
| 165 | MSPLVDNI | 0.606 | 70 | WB | Sequence | A6802 |
| 123 | FTARGRFA | 0.594 | 80 | WB | Sequence | A6802 |
| 129 | FATVVEEL | 0.501 | 220 | WB | Sequence | A6802 |
| 72 | QTPAAPGA | 0.474 | 297 | WB | Sequence | A6802 |
| 218 | TLLSLALV | 0.607 | 70 | WB | Sequence | A6901 |
| 123 | FTARGRFA | 0.486 | 261 | WB | Sequence | A6901 |
| 113 | EMSSQLHL | 0.470 | 309 | WB | Sequence | A6901 |
| 84 | ALSPVPPV | 0.444 | 409 | WB | Sequence | A6901 |
| 202 | GPSMRPLF | 0.599 | 76 | WB | Sequence | B0702 |
| 73 | TPAAPGAA | 0.598 | 77 | WB | Sequence | B0702 |
| 69 | SPLQTPAA | 0.539 | 146 | WB | Sequence | B0702 |
| 89 | PPVVHLTL | 0.503 | 216 | WB | Sequence | B0702 |
| 206 | RPLFDFSW | 0.445 | 403 | WB | Sequence | B0702 |
| 116 | SQLHLTPF | 0.583 | 91 | WB | Sequence | B1501 |
| 204 | SMRPLFDF | 0.523 | 173 | WB | Sequence | B1501 |
| 13 | IVMKYIHY | 0.492 | 243 | WB | Sequence | B1501 |
| 145 | RIVAFFEF | 0.447 | 397 | WB | Sequence | B1501 |
| 198 | VELYGPSM | 0.595 | 80 | WB | Sequence | B1801 |
| 177 | TEYLNRHL | 0.498 | 228 | WB | Sequence | B1801 |
| 172 | IALWMTEY | 0.475 | 292 | WB | Sequence | B1801 |
| 116 | SQLHLTPF | 0.464 | 328 | WB | Sequence | B1801 |
| 150 | FEFGGVMC | 0.452 | 375 | WB | Sequence | B1801 |
| 172 | IALWMTEY | 0.767 | 12 | SB | Sequence | B3501 |
| 149 | FFEFGGVM | 0.548 | 132 | WB | Sequence | B3501 |
| 69 | SPLQTPAA | 0.503 | 215 | WB | Sequence | B3501 |
| 111 | FAEMSSQL | 0.488 | 253 | WB | Sequence | B3501 |
| 86 | SPVPPVVH | 0.443 | 413 | WB | Sequence | B3501 |
| 73 | TPAAPGAA | 0.435 | 452 | WB | Sequence | B3501 |
| 129 | FATVVEEL | 0.430 | 475 | WB | Sequence | B3501 |
| 177 | TEYLNRHL | 0.547 | 133 | WB | Sequence | B4001 |
| 11 | REIVMKYI | 0.513 | 194 | WB | Sequence | B4001 |
| 150 | FEFGGVMC | 0.466 | 324 | WB | Sequence | B4001 |
| 11 | REIVMKYI | 0.497 | 231 | WB | Sequence | B4002 |
| 112 | AEMSSQLH | 0.471 | 305 | WB | Sequence | B4501 |
| 134 | EELFRDGV | 0.465 | 326 | WB | Sequence | B4501 |
| 11 | REIVMKYI | 0.435 | 450 | WB | Sequence | B4501 |
| 222 | LALVGACI | 0.470 | 308 | WB | Sequence | B5101 |
| 89 | PPVVHLTL | 0.448 | 391 | WB | Sequence | B5101 |
| 206 | RPLFDFSW | 0.768 | 12 | SB | Sequence | B5301 |
| 202 | GPSMRPLF | 0.430 | 474 | WB | Sequence | B5301 |
| 73 | TPAAPGAA | 0.677 | 32 | SB | Sequence | B5401 |
| 69 | SPLQTPAA | 0.605 | 71 | WB | Sequence | B5401 |
| 37 | APPGAAPA | 0.557 | 120 | WB | Sequence | B5401 |
| 166 | SPLVDNIA | 0.470 | 309 | WB | Sequence | B5401 |
| 88 | VPPVVHLT | 0.450 | 382 | WB | Sequence | B5401 |
| 22 | LSQRGYEW | 0.648 | 45 | SB | Sequence | B5801 |
| 145 | RIVAFFEF | 0.512 | 196 | WB | Sequence | B5801 |
| 168 | LVDNIALW | 0.475 | 292 | WB | Sequence | B5801 |
| 172 | IALWMTEY | 0.460 | 345 | WB | Sequence | B5801 |

9-mer

| | | | | | | |
|---|---|---|---|---|---|---|
| 171 | NIALWMTEY | 0.497 | 230 | WB | Sequence | A0101 |
| 84 | ALSPVPPVV | 0.676 | 33 | SB | Sequence | A0201 |
| 223 | ALVGACITL | 0.631 | 54 | WB | Sequence | A0201 |
| 217 | KTLLSLALV | 0.613 | 65 | WB | Sequence | A0201 |
| 219 | LLSLALVGA | 0.542 | 141 | WB | Sequence | A0201 |
| 172 | IALWMTEYL | 0.487 | 258 | WB | Sequence | A0201 |
| 219 | LLSLALVGA | 0.824 | 6 | SB | Sequence | A0202 |
| 14 | VMKYIHYKL | 0.705 | 24 | SB | Sequence | A0202 |
| 223 | ALVGACITL | 0.654 | 42 | SB | Sequence | A0202 |
| 215 | SLKTLLSLA | 0.635 | 52 | WB | Sequence | A0202 |
| 160 | SVNREMSPL | 0.619 | 61 | WB | Sequence | A0202 |
| 80 | AAGPALSPV | 0.617 | 62 | WB | Sequence | A0202 |
| 84 | ALSPVPPVV | 0.593 | 81 | WB | Sequence | A0202 |
| 164 | EMSPLVDNI | 0.582 | 91 | WB | Sequence | A0202 |
| 221 | SLALVGACI | 0.579 | 94 | WB | Sequence | A0202 |
| 67 | RTSPLQTPA | 0.554 | 124 | WB | Sequence | A0202 |
| 204 | SMRPLFDFS | 0.495 | 234 | WB | Sequence | A0202 |
| 179 | YLNRHLHTW | 0.479 | 280 | WB | Sequence | A0202 |
| 172 | IALWMTEYL | 0.459 | 346 | WB | Sequence | A0202 |
| 217 | KTLLSLALV | 0.443 | 414 | WB | Sequence | A0202 |
| 113 | EMSSQLHLT | 0.432 | 464 | WB | Sequence | A0202 |
| 215 | SLKTLLSLA | 0.875 | 3 | SB | Sequence | A0203 |
| 84 | ALSPVPPVV | 0.842 | 5 | SB | Sequence | A0203 |
| 219 | LLSLALVGA | 0.839 | 5 | SB | Sequence | A0203 |
| 80 | AAGPALSPV | 0.770 | 11 | SB | Sequence | A0203 |
| 160 | SVNREMSPL | 0.699 | 26 | SB | Sequence | A0203 |
| 124 | TARGRFATV | 0.666 | 37 | SB | Sequence | A0203 |
| 14 | VMKYIHYKL | 0.642 | 48 | SB | Sequence | A0203 |
| 223 | ALVGACITL | 0.629 | 55 | WB | Sequence | A0203 |
| 221 | SLALVGACI | 0.605 | 71 | WB | Sequence | A0203 |
| 217 | KTLLSLALV | 0.584 | 90 | WB | Sequence | A0203 |
| 67 | RTSPLQTPA | 0.539 | 146 | WB | Sequence | A0203 |
| 147 | VAFFEFGGV | 0.520 | 180 | WB | Sequence | A0203 |
| 164 | EMSPLVDNI | 0.516 | 187 | WB | Sequence | A0203 |
| 117 | QLHLTPFTA | 0.490 | 249 | WB | Sequence | A0203 |
| 204 | SMRPLFDFS | 0.441 | 425 | WB | Sequence | A0203 |
| 179 | YLNRHLHTW | 0.432 | 468 | WB | Sequence | A0203 |
| 84 | ALSPVPPVV | 0.766 | 12 | SB | Sequence | A0204 |
| 223 | ALVGACITL | 0.571 | 103 | WB | Sequence | A0204 |
| 80 | AAGPALSPV | 0.454 | 366 | WB | Sequence | A0204 |
| 217 | KTLLSLALV | 0.742 | 16 | SB | Sequence | A0206 |
| 80 | AAGPALSPV | 0.729 | 18 | SB | Sequence | A0206 |
| 116 | SQLHLTPFT | 0.684 | 30 | SB | Sequence | A0206 |
| 71 | LQTPAAPGA | 0.676 | 33 | SB | Sequence | A0206 |
| 150 | FEFGGVMCV | 0.650 | 44 | SB | Sequence | A0206 |
| 223 | ALVGACITL | 0.635 | 52 | WB | Sequence | A0206 |
| 219 | LLSLALVGA | 0.624 | 58 | WB | Sequence | A0206 |
| 84 | ALSPVPPVV | 0.621 | 60 | WB | Sequence | A0206 |
| 123 | FTARGRFAT | 0.598 | 77 | WB | Sequence | A0206 |
| 188 | IQDNGGWDA | 0.594 | 80 | WB | Sequence | A0206 |
| 172 | IALWMTEYL | 0.589 | 85 | WB | Sequence | A0206 |
| 36 | AAPPGAAPA | 0.569 | 106 | WB | Sequence | A0206 |
| 124 | TARGRFATV | 0.543 | 140 | WB | Sequence | A0206 |
| 147 | VAFFEFGGV | 0.511 | 198 | WB | Sequence | A0206 |
| 67 | RTSPLQTPA | 0.462 | 336 | WB | Sequence | A0206 |
| 84 | ALSPVPPVV | 0.951 | 1 | SB | Sequence | A0211 |
| 223 | ALVGACITL | 0.929 | 2 | SB | Sequence | A0211 |
| 207 | PLFDFSWLS | 0.902 | 2 | SB | Sequence | A0211 |
| 150 | FEFGGVMCV | 0.812 | 7 | SB | Sequence | A0211 |
| 179 | YLNRHLHTW | 0.742 | 16 | SB | Sequence | A0211 |
| 221 | SLALVGACI | 0.715 | 21 | SB | Sequence | A0211 |
| 219 | LLSLALVGA | 0.627 | 56 | WB | Sequence | A0211 |
| 164 | EMSPLVDNI | 0.626 | 57 | WB | Sequence | A0211 |
| 117 | QLHLTPFTA | 0.626 | 57 | WB | Sequence | A0211 |
| 215 | SLKTLLSLA | 0.620 | 61 | WB | Sequence | A0211 |
| 168 | LVDNIALWM | 0.592 | 82 | WB | Sequence | A0211 |
| 217 | KTLLSLALV | 0.581 | 93 | WB | Sequence | A0211 |
| 140 | GVNWGRIVA | 0.575 | 99 | WB | Sequence | A0211 |
| 14 | VMKYIHYKL | 0.561 | 115 | WB | Sequence | A0211 |
| 80 | AAGPALSPV | 0.551 | 128 | WB | Sequence | A0211 |
| 113 | EMSSQLHLT | 0.531 | 159 | WB | Sequence | A0211 |
| 6 | TGYDNREIV | 0.513 | 194 | WB | Sequence | A0211 |
| 119 | HLTPFTARG | 0.505 | 211 | WB | Sequence | A0211 |
| 199 | ELYGPSMRP | 0.504 | 213 | WB | Sequence | A0211 |
| 192 | GGWDAFVEL | 0.503 | 216 | WB | Sequence | A0211 |
| 172 | IALWMTEYL | 0.462 | 337 | WB | Sequence | A0211 |
| 173 | ALWMTEYLN | 0.459 | 347 | WB | Sequence | A0211 |
| 36 | AAPPGAAPA | 0.432 | 467 | WB | Sequence | A0211 |
| 84 | ALSPVPPVV | 0.914 | 2 | SB | Sequence | A0212 |
| 223 | ALVGACITL | 0.760 | 13 | SB | Sequence | A0212 |
| 179 | YLNRHLHTW | 0.739 | 16 | SB | Sequence | A0212 |
| 150 | FEFGGVMCV | 0.735 | 17 | SB | Sequence | A0212 |
| 207 | PLFDFSWLS | 0.676 | 33 | SB | Sequence | A0212 |
| 14 | VMKYIHYKL | 0.596 | 79 | WB | Sequence | A0212 |
| 219 | LLSLALVGA | 0.587 | 87 | WB | Sequence | A0212 |
| 221 | SLALVGACI | 0.529 | 162 | WB | Sequence | A0212 |
| 164 | EMSPLVDNI | 0.520 | 180 | WB | Sequence | A0212 |
| 117 | QLHLTPFTA | 0.476 | 290 | WB | Sequence | A0212 |
| 123 | FTARGRFAT | 0.464 | 328 | WB | Sequence | A0212 |
| 84 | ALSPVPPVV | 0.915 | 2 | SB | Sequence | A0216 |
| 223 | ALVGACITL | 0.909 | 2 | SB | Sequence | A0216 |
| 80 | AAGPALSPV | 0.699 | 25 | SB | Sequence | A0216 |
| 150 | FEFGGVMCV | 0.640 | 49 | SB | Sequence | A0216 |
| 221 | SLALVGACI | 0.630 | 54 | WB | Sequence | A0216 |
| 14 | VMKYIHYKL | 0.570 | 104 | WB | Sequence | A0216 |
| 207 | PLFDFSWLS | 0.530 | 162 | WB | Sequence | A0216 |
| 117 | QLHLTPFTA | 0.490 | 250 | WB | Sequence | A0216 |
| 215 | SLKTLLSLA | 0.489 | 251 | WB | Sequence | A0216 |
| 179 | YLNRHLHTW | 0.461 | 340 | WB | Sequence | A0216 |
| 124 | TARGRFATV | 0.448 | 393 | WB | Sequence | A0216 |
| 84 | ALSPVPPVV | 0.899 | 2 | SB | Sequence | A0219 |
| 150 | FEFGGVMCV | 0.686 | 29 | SB | Sequence | A0219 |
| 223 | ALVGACITL | 0.683 | 30 | SB | Sequence | A0219 |
| 80 | AAGPALSPV | 0.557 | 120 | WB | Sequence | A0219 |
| 219 | LLSLALVGA | 0.542 | 142 | WB | Sequence | A0219 |
| 83 | PALSPVPPV | 0.498 | 229 | WB | Sequence | A0219 |
| 164 | EMSPLVDNI | 0.460 | 345 | WB | Sequence | A0219 |
| 113 | EMSSQLHLT | 0.437 | 443 | WB | Sequence | A0219 |
| 179 | YLNRHLHTW | 0.428 | 485 | WB | Sequence | A0219 |
| 13 | IVMKYIHYK | 0.758 | 13 | SB | Sequence | A0301 |
| 230 | TLGAYLGHK | 0.655 | 41 | SB | Sequence | A0301 |
| 209 | FDFSWLSLK | 0.457 | 357 | WB | Sequence | A0301 |
| 13 | IVMKYIHYK | 0.834 | 6 | SB | Sequence | A1101 |
| 230 | TLGAYLGHK | 0.708 | 23 | SB | Sequence | A1101 |
| 130 | ATVVEELFR | 0.574 | 100 | WB | Sequence | A1101 |
| 142 | NWGRIVAFF | 0.644 | 47 | SB | Sequence | A2301 |
| 203 | PSMRPLFDF | 0.530 | 161 | WB | Sequence | A2301 |
| 144 | GRIVAFFEF | 0.530 | 162 | WB | Sequence | A2301 |
| 13 | IVMKYIHYK | 0.499 | 226 | WB | Sequence | A2301 |
| 106 | RYRRDFAEM | 0.467 | 321 | WB | Sequence | A2301 |
| 128 | RFATVVEEL | 0.454 | 366 | WB | Sequence | A2301 |
| 142 | NWGRIVAFF | 0.739 | 16 | SB | Sequence | A2402 |
| 128 | RFATVVEEL | 0.568 | 107 | WB | Sequence | A2402 |
| 212 | SWLSLKTLL | 0.536 | 151 | WB | Sequence | A2402 |
| 106 | RYRRDFAEM | 0.669 | 35 | SB | Sequence | A2403 |
| 128 | RFATVVEEL | 0.626 | 57 | WB | Sequence | A2403 |
| 200 | LYGPSMRPL | 0.553 | 125 | WB | Sequence | A2403 |
| 12 | EIVMKYIHY | 0.628 | 55 | WB | Sequence | A2601 |
| 171 | NIALWMTEY | 0.622 | 60 | WB | Sequence | A2601 |
| 12 | EIVMKYIHY | 0.935 | 2 | SB | Sequence | A2602 |
| 171 | NIALWMTEY | 0.866 | 4 | SB | Sequence | A2602 |
| 160 | SVNREMSPL | 0.849 | 5 | SB | Sequence | A2602 |
| 179 | YLNRHLHTW | 0.538 | 148 | WB | Sequence | A2602 |
| 197 | FVELYGPSM | 0.520 | 180 | WB | Sequence | A2602 |
| 168 | LVDNIALWM | 0.432 | 464 | WB | Sequence | A2602 |
| 171 | NIALWMTEY | 0.586 | 88 | WB | Sequence | A2902 |
| 12 | EIVMKYIHY | 0.516 | 188 | WB | Sequence | A2902 |
| 13 | IVMKYIHYK | 0.758 | 13 | SB | Sequence | A3001 |
| 0 | MAHAGRTGY | 0.487 | 258 | WB | Sequence | A3001 |
| 230 | TLGAYLGHK | 0.475 | 293 | WB | Sequence | A3001 |
| 171 | NIALWMTEY | 0.427 | 491 | WB | Sequence | A3002 |
| 13 | IVMKYIHYK | 0.797 | 8 | SB | Sequence | A3101 |
| 17 | YIHYKLSQR | 0.715 | 21 | SB | Sequence | A3101 |
| 155 | VMCVESVNR | 0.631 | 54 | WB | Sequence | A3101 |
| 97 | RQAGDDFSR | 0.588 | 85 | WB | Sequence | A3101 |
| 14 | VMKYIHYKL | 0.497 | 230 | WB | Sequence | A3101 |
| 130 | ATVVEELFR | 0.471 | 307 | WB | Sequence | A3101 |
| 101 | DDFSRRYRR | 0.698 | 26 | SB | Sequence | A3301 |
| 17 | YIHYKLSQR | 0.649 | 44 | SB | Sequence | A3301 |
| 54 | HTPHPAASR | 0.476 | 290 | WB | Sequence | A3301 |
| 13 | IVMKYIHYK | 0.427 | 493 | WB | Sequence | A3301 |
| 13 | IVMKYIHYK | 0.790 | 9 | SB | Sequence | A6801 |
| 17 | YIHYKLSQR | 0.747 | 15 | SB | Sequence | A6801 |
| 54 | HTPHPAASR | 0.729 | 18 | SB | Sequence | A6801 |
| 120 | LTPFTARGR | 0.703 | 24 | SB | Sequence | A6801 |
| 130 | ATVVEELFR | 0.655 | 41 | SB | Sequence | A6801 |
| 101 | DDFSRRYRR | 0.571 | 103 | WB | Sequence | A6801 |
| 209 | FDFSWLSLK | 0.540 | 145 | WB | Sequence | A6801 |
| 98 | QAGDDFSRR | 0.529 | 163 | WB | Sequence | A6801 |
| 171 | NIALWMTEY | 0.477 | 288 | WB | Sequence | A6801 |
| 230 | TLGAYLGHK | 0.449 | 388 | WB | Sequence | A6801 |
| 0 | MAHAGRTGY | 0.447 | 398 | WB | Sequence | A6801 |
| 123 | FTARGRFAT | 0.692 | 27 | SB | Sequence | A6802 |
| 147 | VAFFEFGGV | 0.641 | 48 | SB | Sequence | A6802 |
| 57 | HPAASRDPV | 0.627 | 56 | WB | Sequence | A6802 |
| 72 | QTPAAPGAA | 0.604 | 72 | WB | Sequence | A6802 |
| 160 | SVNREMSPL | 0.570 | 104 | WB | Sequence | A6802 |
| 124 | TARGRFATV | 0.531 | 160 | WB | Sequence | A6802 |
| 6 | TGYDNREIV | 0.513 | 193 | WB | Sequence | A6802 |
| 164 | EMSPLVDNI | 0.512 | 196 | WB | Sequence | A6802 |
| 67 | RTSPLQTPA | 0.488 | 254 | WB | Sequence | A6802 |
| 225 | VGACITLGA | 0.472 | 303 | WB | Sequence | A6802 |
| 165 | MSPLVDNIA | 0.466 | 322 | WB | Sequence | A6802 |
| 150 | FEFGGVMCV | 0.449 | 388 | WB | Sequence | A6802 |
| 83 | PALSPVPPV | 0.726 | 19 | SB | Sequence | A6901 |
| 33 | DVGAAPPGA | 0.535 | 152 | WB | Sequence | A6901 |
| 57 | HPAASRDPV | 0.495 | 235 | WB | Sequence | A6901 |
| 164 | EMSPLVDNI | 0.485 | 262 | WB | Sequence | A6901 |
| 123 | FTARGRFAT | 0.483 | 267 | WB | Sequence | A6901 |
| 217 | KTLLSLALV | 0.460 | 344 | WB | Sequence | A6901 |
| 73 | TPAAPGAAA | 0.460 | 344 | WB | Sequence | A6901 |
| 172 | IALWMTEYL | 0.426 | 497 | WB | Sequence | A6901 |
| 57 | HPAASRDPV | 0.770 | 12 | SB | Sequence | B0702 |
| 63 | DPVARTSPL | 0.750 | 14 | SB | Sequence | B0702 |
| 166 | SPLVDNIAL | 0.674 | 33 | SB | Sequence | B0702 |
| 73 | TPAAPGAAA | 0.652 | 43 | SB | Sequence | B0702 |
| 206 | RPLFDFSWL | 0.627 | 56 | WB | Sequence | B0702 |
| 86 | SPVPPVVHL | 0.606 | 71 | WB | Sequence | B0702 |
| 76 | APGAAAGPA | 0.573 | 101 | WB | Sequence | B0702 |
| 88 | VPPVVHLTL | 0.542 | 142 | WB | Sequence | B0702 |
| 121 | TPFTARGRF | 0.505 | 210 | WB | Sequence | B0702 |
| 124 | TARGRFATV | 0.449 | 389 | WB | Sequence | B0702 |
| 0 | MAHAGRTGY | 0.532 | 158 | WB | Sequence | B1501 |
| 115 | SSQLHLTPF | 0.427 | 490 | WB | Sequence | B1501 |
| 150 | FEFGGVMCV | 0.633 | 53 | WB | Sequence | B1801 |
| 9 | DNREIVMKY | 0.541 | 143 | WB | Sequence | B1801 |
| 172 | IALWMTEYL | 0.505 | 211 | WB | Sequence | B1801 |
| 144 | GRIVAFFEF | 0.456 | 360 | WB | Sequence | B2705 |
| 105 | RRYRRDFAE | 0.456 | 361 | WB | Sequence | B2705 |
| 166 | SPLVDNIAL | 0.680 | 31 | SB | Sequence | B3501 |
| 0 | MAHAGRTGY | 0.658 | 40 | SB | Sequence | B3501 |
| 197 | FVELYGPSM | 0.628 | 55 | WB | Sequence | B3501 |
| 121 | TPFTARGRF | 0.610 | 67 | WB | Sequence | B3501 |
| 172 | IALWMTEYL | 0.584 | 90 | WB | Sequence | B3501 |
| 63 | DPVARTSPL | 0.584 | 90 | WB | Sequence | B3501 |
| 129 | FATVVEELF | 0.562 | 113 | WB | Sequence | B3501 |
| 73 | TPAAPGAAA | 0.551 | 128 | WB | Sequence | B3501 |
| 171 | NIALWMTEY | 0.523 | 174 | WB | Sequence | B3501 |
| 111 | FAEMSSQLH | 0.460 | 343 | WB | Sequence | B3501 |
| 112 | AEMSSQLHL | 0.740 | 16 | SB | Sequence | B4001 |
| 150 | FEFGGVMCV | 0.588 | 86 | WB | Sequence | B4001 |
| 112 | AEMSSQLHL | 0.554 | 124 | WB | Sequence | B4002 |
| 150 | FEFGGVMCV | 0.466 | 323 | WB | Sequence | B4002 |
| 112 | AEMSSQLHL | 0.454 | 368 | WB | Sequence | B4402 |
| 112 | AEMSSQLHL | 0.533 | 157 | WB | Sequence | B4403 |
| 112 | AEMSSQLHL | 0.587 | 87 | WB | Sequence | B4501 |
| 88 | VPPVVHLTL | 0.548 | 132 | WB | Sequence | B5101 |
| 206 | RPLFDFSWL | 0.470 | 307 | WB | Sequence | B5301 |
| 166 | SPLVDNIAL | 0.459 | 348 | WB | Sequence | B5301 |
| 172 | IALWMTEYL | 0.450 | 382 | WB | Sequence | B5301 |
| 73 | TPAAPGAAA | 0.715 | 21 | SB | Sequence | B5401 |
| 57 | HPAASRDPV | 0.684 | 30 | SB | Sequence | B5401 |
| 76 | APGAAAGPA | 0.625 | 57 | WB | Sequence | B5401 |
| 51 | QPGHTPHPA | 0.515 | 189 | WB | Sequence | B5401 |
| 179 | YLNRHLHTW | 0.682 | 31 | SB | Sequence | B5801 |
| 21 | KLSQRGYEW | 0.649 | 44 | SB | Sequence | B5801 |
| 129 | FATVVEELF | 0.547 | 134 | WB | Sequence | B5801 |
| 40 | GAAPAPGIF | 0.483 | 268 | WB | Sequence | B5801 |

10-mer

| | | | | | | |
|---|---|---|---|---|---|---|
| 179 | YLNRHLHTWI | 0.735 | 17 | SB | Sequence | A0201 |
| 13 | IVMKYIHYKL | 0.638 | 50 | WB | Sequence | A0201 |
| 218 | TLLSLALVGA | 0.571 | 103 | WB | Sequence | A0201 |
| 207 | PLFDFSWLSL | 0.536 | 151 | WB | Sequence | A0201 |
| 213 | WLSLKTLLSL | 0.530 | 161 | WB | Sequence | A0201 |
| 123 | FTARGRFATV | 0.522 | 175 | WB | Sequence | A0201 |
| 171 | NIALWMTEYL | 0.521 | 178 | WB | Sequence | A0201 |
| 175 | WMTEYLNRHL | 0.486 | 260 | WB | Sequence | A0201 |
| 218 | TLLSLALVGA | 0.731 | 18 | SB | Sequence | A0202 |
| 171 | NIALWMTEYL | 0.727 | 19 | SB | Sequence | A0202 |
| 213 | WLSLKTLLSL | 0.700 | 25 | SB | Sequence | A0202 |
| 215 | SLKTLLSLAL | 0.646 | 46 | SB | Sequence | A0202 |
| 175 | WMTEYLNRHL | 0.642 | 47 | SB | Sequence | A0202 |
| 207 | PLFDFSWLSL | 0.637 | 50 | WB | Sequence | A0202 |
| 79 | AAAGPALSPV | 0.588 | 86 | WB | Sequence | A0202 |
| 13 | IVMKYIHYKL | 0.569 | 106 | WB | Sequence | A0202 |
| 123 | FTARGRFATV | 0.568 | 106 | WB | Sequence | A0202 |
| 199 | ELYGPSMRPL | 0.541 | 143 | WB | Sequence | A0202 |
| 179 | YLNRHLHTWI | 0.540 | 145 | WB | Sequence | A0202 |
| 224 | LVGACITLGA | 0.483 | 267 | WB | Sequence | A0202 |
| 146 | IVAFFEFGGV | 0.439 | 431 | WB | Sequence | A0202 |
| 179 | YLNRHLHTWI | 0.933 | 2 | SB | Sequence | A0203 |
| 123 | FTARGRFATV | 0.821 | 6 | SB | Sequence | A0203 |
| 213 | WLSLKTLLSL | 0.782 | 10 | SB | Sequence | A0203 |
| 215 | SLKTLLSLAL | 0.773 | 11 | SB | Sequence | A0203 |
| 171 | NIALWMTEYL | 0.682 | 31 | SB | Sequence | A0203 |
| 160 | SVNREMSPLV | 0.680 | 31 | SB | Sequence | A0203 |
| 146 | IVAFFEFGGV | 0.667 | 36 | SB | Sequence | A0203 |
| 79 | AAAGPALSPV | 0.606 | 71 | WB | Sequence | A0203 |
| 175 | WMTEYLNRHL | 0.569 | 106 | WB | Sequence | A0203 |
| 218 | TLLSLALVGA | 0.545 | 137 | WB | Sequence | A0203 |
| 13 | IVMKYIHYKL | 0.532 | 157 | WB | Sequence | A0203 |
| 224 | LVGACITLGA | 0.532 | 158 | WB | Sequence | A0203 |
| 199 | ELYGPSMRPL | 0.519 | 182 | WB | Sequence | A0203 |
| 50 | SQPGHTPHPA | 0.447 | 398 | WB | Sequence | A0203 |
| 219 | LLSLALVGAC | 0.444 | 410 | WB | Sequence | A0203 |
| 124 | TARGRFATVV | 0.428 | 489 | WB | Sequence | A0203 |
| 179 | YLNRHLHTWI | 0.655 | 41 | SB | Sequence | A0204 |
| 123 | FTARGRFATV | 0.613 | 66 | WB | Sequence | A0204 |
| 13 | IVMKYIHYKL | 0.509 | 203 | WB | Sequence | A0204 |
| 79 | AAAGPALSPV | 0.474 | 296 | WB | Sequence | A0204 |
| 160 | SVNREMSPLV | 0.450 | 384 | WB | Sequence | A0204 |
| 123 | FTARGRFATV | 0.867 | 4 | SB | Sequence | A0206 |
| 116 | SQLHLTPFTA | 0.776 | 11 | SB | Sequence | A0206 |
| 188 | IQDNGGWDAF | 0.673 | 34 | SB | Sequence | A0206 |
| 213 | WLSLKTLLSL | 0.667 | 36 | SB | Sequence | A0206 |
| 50 | SQPGHTPHPA | 0.621 | 60 | WB | Sequence | A0206 |
| 179 | YLNRHLHTWI | 0.619 | 61 | WB | Sequence | A0206 |
| 79 | AAAGPALSPV | 0.602 | 74 | WB | Sequence | A0206 |
| 175 | WMTEYLNRHL | 0.600 | 75 | WB | Sequence | A0206 |
| 160 | SVNREMSPLV | 0.567 | 108 | WB | Sequence | A0206 |
| 171 | NIALWMTEYL | 0.562 | 114 | WB | Sequence | A0206 |
| 218 | TLLSLALVGA | 0.560 | 116 | WB | Sequence | A0206 |
| 146 | IVAFFEFGGV | 0.553 | 125 | WB | Sequence | A0206 |
| 71 | LQTPAAPGAA | 0.546 | 135 | WB | Sequence | A0206 |
| 13 | IVMKYIHYKL | 0.525 | 171 | WB | Sequence | A0206 |
| 27 | YEWDAGDVGA | 0.511 | 199 | WB | Sequence | A0206 |
| 207 | PLFDFSWLSL | 0.486 | 260 | WB | Sequence | A0206 |
| 67 | RTSPLQTPAA | 0.477 | 286 | WB | Sequence | A0206 |
| 224 | LVGACITLGA | 0.471 | 304 | WB | Sequence | A0206 |
| 207 | PLFDFSWLSL | 0.935 | 2 | SB | Sequence | A0211 |
| 179 | YLNRHLHTWI | 0.925 | 2 | SB | Sequence | A0211 |
| 199 | ELYGPSMRPL | 0.888 | 3 | SB | Sequence | A0211 |
| 213 | WLSLKTLLSL | 0.835 | 5 | SB | Sequence | A0211 |
| 218 | TLLSLALVGA | 0.829 | 6 | SB | Sequence | A0211 |
| 123 | FTARGRFATV | 0.823 | 6 | SB | Sequence | A0211 |
| 167 | PLVDNIALWM | 0.802 | 8 | SB | Sequence | A0211 |
| 215 | SLKTLLSLAL | 0.799 | 8 | SB | Sequence | A0211 |
| 175 | WMTEYLNRHL | 0.796 | 9 | SB | Sequence | A0211 |
| 160 | SVNREMSPLV | 0.788 | 9 | SB | Sequence | A0211 |
| 87 | PVPPVVHLTL | 0.705 | 24 | SB | Sequence | A0211 |
| 79 | AAAGPALSPV | 0.635 | 51 | WB | Sequence | A0211 |
| 13 | IVMKYIHYKL | 0.601 | 74 | WB | Sequence | A0211 |
| 146 | IVAFFEFGGV | 0.568 | 107 | WB | Sequence | A0211 |
| 132 | VVEELFRDGV | 0.549 | 131 | WB | Sequence | A0211 |
| 171 | NIALWMTEYL | 0.547 | 133 | WB | Sequence | A0211 |
| 164 | EMSPLVDNIA | 0.488 | 254 | WB | Sequence | A0211 |
| 168 | LVDNIALWMT | 0.484 | 266 | WB | Sequence | A0211 |
| 149 | FFEFGGVMCV | 0.475 | 292 | WB | Sequence | A0211 |
| 221 | SLALVGACIT | 0.462 | 336 | WB | Sequence | A0211 |
| 187 | WIQDNGGWDA | 0.453 | 370 | WB | Sequence | A0211 |
| 179 | YLNRHLHTWI | 0.878 | 3 | SB | Sequence | A0212 |
| 207 | PLFDFSWLSL | 0.859 | 4 | SB | Sequence | A0212 |
| 123 | FTARGRFATV | 0.849 | 5 | SB | Sequence | A0212 |
| 215 | SLKTLLSLAL | 0.730 | 18 | SB | Sequence | A0212 |
| 199 | ELYGPSMRPL | 0.726 | 19 | SB | Sequence | A0212 |
| 175 | WMTEYLNRHL | 0.716 | 21 | SB | Sequence | A0212 |
| 213 | WLSLKTLLSL | 0.697 | 26 | SB | Sequence | A0212 |
| 218 | TLLSLALVGA | 0.692 | 27 | SB | Sequence | A0212 |
| 132 | VVEELFRDGV | 0.601 | 74 | WB | Sequence | A0212 |
| 167 | PLVDNIALWM | 0.560 | 116 | WB | Sequence | A0212 |
| 13 | IVMKYIHYKL | 0.533 | 156 | WB | Sequence | A0212 |
| 160 | SVNREMSPLV | 0.509 | 202 | WB | Sequence | A0212 |
| 187 | WIQDNGGWDA | 0.479 | 280 | WB | Sequence | A0212 |
| 146 | IVAFFEFGGV | 0.476 | 288 | WB | Sequence | A0212 |
| 87 | PVPPVVHLTL | 0.475 | 294 | WB | Sequence | A0212 |
| 27 | YEWDAGDVGA | 0.467 | 321 | WB | Sequence | A0212 |
| 179 | YLNRHLHTWI | 0.854 | 4 | SB | Sequence | A0216 |
| 207 | PLFDFSWLSL | 0.849 | 5 | SB | Sequence | A0216 |
| 123 | FTARGRFATV | 0.812 | 7 | SB | Sequence | A0216 |
| 199 | ELYGPSMRPL | 0.767 | 12 | SB | Sequence | A0216 |
| 213 | WLSLKTLLSL | 0.745 | 15 | SB | Sequence | A0216 |
| 167 | PLVDNIALWM | 0.702 | 25 | SB | Sequence | A0216 |
| 160 | SVNREMSPLV | 0.685 | 30 | SB | Sequence | A0216 |
| 13 | IVMKYIHYKL | 0.676 | 33 | SB | Sequence | A0216 |
| 175 | WMTEYLNRHL | 0.675 | 33 | SB | Sequence | A0216 |
| 79 | AAAGPALSPV | 0.661 | 39 | SB | Sequence | A0216 |
| 87 | PVPPVVHLTL | 0.638 | 50 | WB | Sequence | A0216 |
| 215 | SLKTLLSLAL | 0.634 | 52 | WB | Sequence | A0216 |
| 218 | TLLSLALVGA | 0.574 | 100 | WB | Sequence | A0216 |
| 171 | NIALWMTEYL | 0.557 | 120 | WB | Sequence | A0216 |
| 221 | SLALVGACIT | 0.472 | 301 | WB | Sequence | A0216 |
| 146 | IVAFFEFGGV | 0.429 | 483 | WB | Sequence | A0216 |
| 207 | PLFDFSWLSL | 0.805 | 8 | SB | Sequence | A0219 |
| 179 | YLNRHLHTWI | 0.789 | 9 | SB | Sequence | A0219 |
| 213 | WLSLKTLLSL | 0.766 | 12 | SB | Sequence | A0219 |
| 123 | FTARGRFATV | 0.703 | 24 | SB | Sequence | A0219 |
| 199 | ELYGPSMRPL | 0.585 | 88 | WB | Sequence | A0219 |
| 167 | PLVDNIALWM | 0.574 | 100 | WB | Sequence | A0219 |
| 79 | AAAGPALSPV | 0.563 | 112 | WB | Sequence | A0219 |
| 218 | TLLSLALVGA | 0.551 | 129 | WB | Sequence | A0219 |
| 175 | WMTEYLNRHL | 0.521 | 178 | WB | Sequence | A0219 |
| 83 | PALSPVPPVV | 0.486 | 259 | WB | Sequence | A0219 |
| 13 | IVMKYIHYKL | 0.461 | 341 | WB | Sequence | A0219 |
| 171 | NIALWMTEYL | 0.446 | 401 | WB | Sequence | A0219 |
| 229 | ITLGAYLGHK | 0.760 | 13 | SB | Sequence | A0301 |
| 208 | LFDFSWLSLK | 0.497 | 232 | WB | Sequence | A0301 |
| 12 | EIVMKYIHYK | 0.475 | 292 | WB | Sequence | A0301 |
| 154 | GVMCVESVNR | 0.444 | 411 | WB | Sequence | A0301 |
| 173 | ALWMTEYLNR | 0.429 | 480 | WB | Sequence | A0301 |
| 229 | ITLGAYLGHK | 0.752 | 14 | SB | Sequence | A1101 |
| 154 | GVMCVESVNR | 0.637 | 50 | WB | Sequence | A1101 |
| 12 | EIVMKYIHYK | 0.540 | 145 | WB | Sequence | A1101 |
| 173 | ALWMTEYLNR | 0.455 | 363 | WB | Sequence | A1101 |
| 208 | LFDFSWLSLK | 0.435 | 453 | WB | Sequence | A1101 |
| 178 | EYLNRHLHTW | 0.686 | 29 | SB | Sequence | A2301 |
| 200 | LYGPSMRPLF | 0.686 | 29 | SB | Sequence | A2301 |
| 128 | RFATVVEELF | 0.620 | 60 | WB | Sequence | A2301 |
| 7 | GYDNREIVMK | 0.595 | 80 | WB | Sequence | A2301 |
| 102 | DFSRRYRRDF | 0.499 | 226 | WB | Sequence | A2301 |
| 13 | IVMKYIHYKL | 0.451 | 381 | WB | Sequence | A2301 |
| 94 | LTLRQAGDDF | 0.437 | 441 | WB | Sequence | A2301 |
| 128 | RFATVVEELF | 0.764 | 12 | SB | Sequence | A2402 |
| 200 | LYGPSMRPLF | 0.733 | 17 | SB | Sequence | A2402 |
| 178 | EYLNRHLHTW | 0.715 | 21 | SB | Sequence | A2402 |
| 178 | EYLNRHLHTW | 0.718 | 21 | SB | Sequence | A2403 |
| 128 | RFATVVEELF | 0.657 | 41 | SB | Sequence | A2403 |
| 200 | LYGPSMRPLF | 0.636 | 51 | WB | Sequence | A2403 |
| 170 | DNIALWMTEY | 0.478 | 283 | WB | Sequence | A2601 |
| 159 | ESVNREMSPL | 0.621 | 60 | WB | Sequence | A2602 |
| 199 | ELYGPSMRPL | 0.595 | 79 | WB | Sequence | A2602 |
| 171 | NIALWMTEYL | 0.549 | 131 | WB | Sequence | A2602 |
| 170 | DNIALWMTEY | 0.487 | 258 | WB | Sequence | A2602 |
| 229 | ITLGAYLGHK | 0.718 | 21 | SB | Sequence | A3001 |
| 16 | KYIHYKLSQR | 0.837 | 5 | SB | Sequence | A3101 |
| 136 | LFRDGVNWGR | 0.667 | 36 | SB | Sequence | A3101 |
| 154 | GVMCVESVNR | 0.576 | 98 | WB | Sequence | A3101 |
| 119 | HLTPFTARGR | 0.573 | 101 | WB | Sequence | A3101 |
| 173 | ALWMTEYLNR | 0.509 | 203 | WB | Sequence | A3101 |
| 99 | AGDDFSRRYR | 0.507 | 207 | WB | Sequence | A3101 |
| 129 | FATVVEELFR | 0.493 | 241 | WB | Sequence | A3101 |
| 117 | QLHLTPFTAR | 0.431 | 471 | WB | Sequence | A3101 |
| 136 | LFRDGVNWGR | 0.553 | 126 | WB | Sequence | A3301 |
| 16 | KYIHYKLSQR | 0.520 | 180 | WB | Sequence | A3301 |
| 129 | FATVVEELFR | 0.516 | 188 | WB | Sequence | A3301 |
| 173 | ALWMTEYLNR | 0.441 | 423 | WB | Sequence | A3301 |
| 129 | FATVVEELFR | 0.829 | 6 | SB | Sequence | A6801 |
| 12 | EIVMKYIHYK | 0.780 | 10 | SB | Sequence | A6801 |
| 119 | HLTPFTARGR | 0.721 | 20 | SB | Sequence | A6801 |
| 197 | FVELYGPSMR | 0.688 | 29 | SB | Sequence | A6801 |
| 154 | GVMCVESVNR | 0.646 | 46 | SB | Sequence | A6801 |
| 229 | ITLGAYLGHK | 0.568 | 106 | WB | Sequence | A6801 |
| 176 | MTEYLNRHLH | 0.485 | 262 | WB | Sequence | A6801 |
| 117 | QLHLTPFTAR | 0.466 | 322 | WB | Sequence | A6801 |
| 2 | HAGRTGYDNR | 0.446 | 399 | WB | Sequence | A6801 |
| 123 | FTARGRFATV | 0.861 | 4 | SB | Sequence | A6802 |
| 146 | IVAFFEFGGV | 0.809 | 7 | SB | Sequence | A6802 |
| 171 | NIALWMTEYL | 0.728 | 18 | SB | Sequence | A6802 |
| 13 | IVMKYIHYKL | 0.680 | 31 | SB | Sequence | A6802 |
| 79 | AAAGPALSPV | 0.644 | 47 | SB | Sequence | A6802 |
| 72 | QTPAAPGAAA | 0.617 | 63 | WB | Sequence | A6802 |
| 165 | MSPLVDNIAL | 0.591 | 83 | WB | Sequence | A6802 |
| 199 | ELYGPSMRPL | 0.582 | 92 | WB | Sequence | A6802 |
| 159 | ESVNREMSPL | 0.550 | 129 | WB | Sequence | A6802 |
| 205 | MRPLFDFSWL | 0.522 | 175 | WB | Sequence | A6802 |
| 160 | SVNREMSPLV | 0.471 | 306 | WB | Sequence | A6802 |
| 124 | TARGRFATVV | 0.441 | 421 | WB | Sequence | A6802 |
| 123 | FTARGRFATV | 0.792 | 9 | SB | Sequence | A6901 |
| 199 | ELYGPSMRPL | 0.714 | 22 | SB | Sequence | A6901 |
| 83 | PALSPVPPVV | 0.580 | 94 | WB | Sequence | A6901 |
| 171 | NIALWMTEYL | 0.558 | 119 | WB | Sequence | A6901 |
| 160 | SVNREMSPLV | 0.537 | 149 | WB | Sequence | A6901 |
| 79 | AAAGPALSPV | 0.502 | 219 | WB | Sequence | A6901 |
| 33 | DVGAAPPGAA | 0.489 | 251 | WB | Sequence | A6901 |
| 146 | IVAFFEFGGV | 0.464 | 330 | WB | Sequence | A6901 |
| 13 | IVMKYIHYKL | 0.441 | 422 | WB | Sequence | A6901 |
| 76 | APGAAAGPAL | 0.708 | 23 | SB | Sequence | B0702 |
| 82 | GPALSPVPPV | 0.604 | 72 | WB | Sequence | B0702 |
| 57 | HPAASRDPVA | 0.536 | 152 | WB | Sequence | B0702 |
| 202 | GPSMRPLFDF | 0.468 | 317 | WB | Sequence | B0702 |
| 124 | TARGRFATVV | 0.465 | 327 | WB | Sequence | B0702 |
| 42 | APAPGIFSSQ | 0.451 | 378 | WB | Sequence | B0702 |
| 140 | GVNWGRIVAF | 0.548 | 132 | WB | Sequence | B1501 |
| 114 | MSSQLHLTPF | 0.504 | 214 | WB | Sequence | B1501 |
| 188 | IQDNGGWDAF | 0.490 | 249 | WB | Sequence | B1501 |
| 11 | REIVMKYIHY | 0.603 | 73 | WB | Sequence | B1801 |
| 105 | RRYRRDFAEM | 0.622 | 59 | WB | Sequence | B2705 |
| 127 | GRFATVVEEL | 0.493 | 241 | WB | Sequence | B2705 |
| 114 | MSSQLHLTPF | 0.582 | 91 | WB | Sequence | B3501 |
| 147 | VAFFEFGGVM | 0.561 | 115 | WB | Sequence | B3501 |
| 76 | APGAAAGPAL | 0.526 | 168 | WB | Sequence | B3501 |
| 222 | LALVGACITL | 0.473 | 297 | WB | Sequence | B3501 |
| 156 | MCVESVNREM | 0.473 | 299 | WB | Sequence | B3501 |
| 98 | QAGDDFSRRY | 0.461 | 340 | WB | Sequence | B3501 |
| 73 | TPAAPGAAAG | 0.459 | 346 | WB | Sequence | B3501 |
| 140 | GVNWGRIVAF | 0.455 | 362 | WB | Sequence | B3501 |
| 166 | SPLVDNIALW | 0.453 | 371 | WB | Sequence | B3501 |
| 11 | REIVMKYIHY | 0.502 | 218 | WB | Sequence | B4002 |
| 112 | AEMSSQLHLT | 0.472 | 303 | WB | Sequence | B4002 |
| 11 | REIVMKYIHY | 0.476 | 289 | WB | Sequence | B4402 |
| 11 | REIVMKYIHY | 0.481 | 273 | WB | Sequence | B4403 |
| 134 | EELFRDGVNW | 0.473 | 300 | WB | Sequence | B4403 |
| 112 | AEMSSQLHLT | 0.523 | 175 | WB | Sequence | B4501 |
| 11 | REIVMKYIHY | 0.438 | 437 | WB | Sequence | B4501 |
| 134 | EELFRDGVNW | 0.367 | 946 | | Sequence | B4501 |
| 222 | LALVGACITL | 0.480 | 277 | WB | Sequence | B5101 |
| 38 | PPGAAPAPGI | 0.427 | 490 | WB | Sequence | B5101 |
| 166 | SPLVDNIALW | 0.744 | 15 | SB | Sequence | B5301 |
| 57 | HPAASRDPVA | 0.665 | 37 | SB | Sequence | B5401 |
| 121 | TPFTARGRFA | 0.661 | 39 | SB | Sequence | B5401 |
| 51 | QPGHTPHPAA | 0.476 | 289 | WB | Sequence | B5401 |
| 82 | GPALSPVPPV | 0.461 | 340 | WB | Sequence | B5401 |
| 86 | SPVPPVVHLT | 0.434 | 456 | WB | Sequence | B5401 |
| 185 | HTWIQDNGGW | 0.427 | 491 | WB | Sequence | B5701 |
| 114 | MSSQLHLTPF | 0.611 | 67 | WB | Sequence | B5801 |
| 185 | HTWIQDNGGW | 0.580 | 94 | WB | Sequence | B5801 |
| 204 | SMRPLFDFSW | 0.474 | 294 | WB | Sequence | B5801 |

11-mer

| | | | | | | |
|---|---|---|---|---|---|---|
| 223 | ALVGACITLGA | 0.632 | 53 | WB | Sequence | A0201 |
| 84 | ALSPVPPVVHL | 0.586 | 88 | WB | Sequence | A0201 |
| 215 | SLKTLLSLALV | 0.543 | 141 | WB | Sequence | A0201 |
| 188 | IQDNGGWDAFV | 0.504 | 215 | WB | Sequence | A0201 |
| 219 | LLSLALVGACI | 0.481 | 275 | WB | Sequence | A0201 |
| 221 | SLALVGACITL | 0.473 | 299 | WB | Sequence | A0201 |
| 145 | RIVAFFEFGGV | 0.453 | 373 | WB | Sequence | A0201 |
| 21 | KLSQRGYEWDA | 0.449 | 388 | WB | Sequence | A0201 |
| 204 | SMRPLFDFSWL | 0.772 | 11 | SB | Sequence | A0202 |
| 215 | SLKTLLSLALV | 0.763 | 12 | SB | Sequence | A0202 |
| 221 | SLALVGACITL | 0.710 | 23 | SB | Sequence | A0202 |
| 84 | ALSPVPPVVHL | 0.708 | 23 | SB | Sequence | A0202 |
| 219 | LLSLALVGACI | 0.692 | 28 | SB | Sequence | A0202 |
| 164 | EMSPLVDNIAL | 0.657 | 41 | SB | Sequence | A0202 |
| 223 | ALVGACITLGA | 0.630 | 54 | WB | Sequence | A0202 |
| 213 | WLSLKTLLSLA | 0.616 | 63 | WB | Sequence | A0202 |
| 123 | FTARGRFATVV | 0.602 | 74 | WB | Sequence | A0202 |
| 78 | GAAAGPALSPV | 0.597 | 78 | WB | Sequence | A0202 |
| 145 | RIVAFFEFGGV | 0.569 | 105 | WB | Sequence | A0202 |
| 179 | YLNRHLHTWIQ | 0.529 | 163 | WB | Sequence | A0202 |
| 21 | KLSQRGYEWDA | 0.499 | 226 | WB | Sequence | A0202 |
| 131 | TVVEELFRDGV | 0.478 | 284 | WB | Sequence | A0202 |
| 225 | VGACITLGAYL | 0.469 | 312 | WB | Sequence | A0202 |
| 215 | SLKTLLSLALV | 0.899 | 2 | SB | Sequence | A0203 |
| 204 | SMRPLFDFSWL | 0.853 | 4 | SB | Sequence | A0203 |
| 145 | RIVAFFEFGGV | 0.813 | 7 | SB | Sequence | A0203 |
| 78 | GAAAGPALSPV | 0.774 | 11 | SB | Sequence | A0203 |
| 213 | WLSLKTLLSLA | 0.765 | 12 | SB | Sequence | A0203 |
| 84 | ALSPVPPVVHL | 0.765 | 12 | SB | Sequence | A0203 |
| 223 | ALVGACITLGA | 0.751 | 14 | SB | Sequence | A0203 |
| 219 | LLSLALVGACI | 0.707 | 23 | SB | Sequence | A0203 |
| 123 | FTARGRFATVV | 0.672 | 34 | SB | Sequence | A0203 |
| 221 | SLALVGACITL | 0.617 | 63 | WB | Sequence | A0203 |
| 179 | YLNRHLHTWIQ | 0.565 | 110 | WB | Sequence | A0203 |
| 131 | TVVEELFRDGV | 0.507 | 206 | WB | Sequence | A0203 |
| 21 | KLSQRGYEWDA | 0.476 | 291 | WB | Sequence | A0203 |
| 84 | ALSPVPPVVHL | 0.633 | 53 | WB | Sequence | A0204 |
| 221 | SLALVGACITL | 0.593 | 82 | WB | Sequence | A0204 |
| 123 | FTARGRFATVV | 0.587 | 87 | WB | Sequence | A0204 |
| 78 | GAAAGPALSPV | 0.495 | 235 | WB | Sequence | A0204 |
| 21 | KLSQRGYEWDA | 0.488 | 255 | WB | Sequence | A0204 |
| 179 | YLNRHLHTWIQ | 0.461 | 340 | WB | Sequence | A0204 |
| 145 | RIVAFFEFGGV | 0.868 | 4 | SB | Sequence | A0206 |
| 188 | IQDNGGWDAFV | 0.822 | 6 | SB | Sequence | A0206 |
| 123 | FTARGRFATVV | 0.729 | 18 | SB | Sequence | A0206 |
| 131 | TVVEELFRDGV | 0.725 | 19 | SB | Sequence | A0206 |
| 223 | ALVGACITLGA | 0.670 | 35 | SB | Sequence | A0206 |
| 50 | SQPGHTPHPAA | 0.659 | 40 | SB | Sequence | A0206 |
| 71 | LQTPAAPGAAA | 0.657 | 40 | SB | Sequence | A0206 |
| 78 | GAAAGPALSPV | 0.598 | 77 | WB | Sequence | A0206 |
| 217 | KTLLSLALVGA | 0.537 | 149 | WB | Sequence | A0206 |
| 84 | ALSPVPPVVHL | 0.533 | 157 | WB | Sequence | A0206 |
| 204 | SMRPLFDFSWL | 0.494 | 239 | WB | Sequence | A0206 |
| 215 | SLKTLLSLALV | 0.477 | 286 | WB | Sequence | A0206 |
| 213 | WLSLKTLLSLA | 0.475 | 293 | WB | Sequence | A0206 |
| 27 | YEWDAGDVGAA | 0.474 | 295 | WB | Sequence | A0206 |
| 21 | KLSQRGYEWDA | 0.453 | 373 | WB | Sequence | A0206 |
| 84 | ALSPVPPVVHL | 0.906 | 2 | SB | Sequence | A0211 |
| 215 | SLKTLLSLALV | 0.896 | 3 | SB | Sequence | A0211 |
| 221 | SLALVGACITL | 0.892 | 3 | SB | Sequence | A0211 |
| 179 | YLNRHLHTWIQ | 0.853 | 4 | SB | Sequence | A0211 |
| 164 | EMSPLVDNIAL | 0.832 | 6 | SB | Sequence | A0211 |
| 204 | SMRPLFDFSWL | 0.813 | 7 | SB | Sequence | A0211 |
| 223 | ALVGACITLGA | 0.803 | 8 | SB | Sequence | A0211 |
| 123 | FTARGRFATVV | 0.782 | 10 | SB | Sequence | A0211 |
| 188 | IQDNGGWDAFV | 0.746 | 15 | SB | Sequence | A0211 |
| 148 | AFFEFGGVMCV | 0.730 | 18 | SB | Sequence | A0211 |
| 207 | PLFDFSWLSLK | 0.720 | 20 | SB | Sequence | A0211 |
| 131 | TVVEELFRDGV | 0.717 | 21 | SB | Sequence | A0211 |
| 167 | PLVDNIALWMT | 0.706 | 24 | SB | Sequence | A0211 |
| 21 | KLSQRGYEWDA | 0.702 | 25 | SB | Sequence | A0211 |
| 213 | WLSLKTLLSLA | 0.655 | 41 | SB | Sequence | A0211 |
| 145 | RIVAFFEFGGV | 0.634 | 52 | WB | Sequence | A0211 |
| 199 | ELYGPSMRPLF | 0.626 | 56 | WB | Sequence | A0211 |
| 219 | LLSLALVGACI | 0.581 | 92 | WB | Sequence | A0211 |
| 78 | GAAAGPALSPV | 0.533 | 156 | WB | Sequence | A0211 |
| 137 | FRDGVNWGRIV | 0.516 | 187 | WB | Sequence | A0211 |
| 218 | TLLSLALVGAC | 0.500 | 223 | WB | Sequence | A0211 |
| 119 | HLTPFTARGRF | 0.462 | 335 | WB | Sequence | A0211 |
| 175 | WMTEYLNRHLH | 0.458 | 352 | WB | Sequence | A0211 |
| 84 | ALSPVPPVVHL | 0.817 | 7 | SB | Sequence | A0212 |
| 179 | YLNRHLHTWIQ | 0.794 | 9 | SB | Sequence | A0212 |
| 123 | FTARGRFATVV | 0.784 | 10 | SB | Sequence | A0212 |
| 204 | SMRPLFDFSWL | 0.781 | 10 | SB | Sequence | A0212 |
| 215 | SLKTLLSLALV | 0.719 | 20 | SB | Sequence | A0212 |
| 221 | SLALVGACITL | 0.719 | 20 | SB | Sequence | A0212 |
| 164 | EMSPLVDNIAL | 0.714 | 22 | SB | Sequence | A0212 |
| 21 | KLSQRGYEWDA | 0.616 | 63 | WB | Sequence | A0212 |
| 223 | ALVGACITLGA | 0.604 | 72 | WB | Sequence | A0212 |
| 131 | TVVEELFRDGV | 0.602 | 74 | WB | Sequence | A0212 |
| 188 | IQDNGGWDAFV | 0.569 | 106 | WB | Sequence | A0212 |
| 148 | AFFEFGGVMCV | 0.548 | 133 | WB | Sequence | A0212 |
| 145 | RIVAFFEFGGV | 0.511 | 198 | WB | Sequence | A0212 |
| 219 | LLSLALVGACI | 0.504 | 213 | WB | Sequence | A0212 |
| 167 | PLVDNIALWMT | 0.483 | 269 | WB | Sequence | A0212 |
| 207 | PLFDFSWLSLK | 0.472 | 301 | WB | Sequence | A0212 |
| 137 | FRDGVNWGRIV | 0.431 | 473 | WB | Sequence | A0212 |
| 84 | ALSPVPPVVHL | 0.878 | 3 | SB | Sequence | A0216 |
| 221 | SLALVGACITL | 0.855 | 4 | SB | Sequence | A0216 |
| 215 | SLKTLLSLALV | 0.806 | 8 | SB | Sequence | A0216 |
| 204 | SMRPLFDFSWL | 0.753 | 14 | SB | Sequence | A0216 |
| 123 | FTARGRFATVV | 0.739 | 16 | SB | Sequence | A0216 |
| 223 | ALVGACITLGA | 0.697 | 26 | SB | Sequence | A0216 |
| 188 | IQDNGGWDAFV | 0.637 | 50 | WB | Sequence | A0216 |
| 164 | EMSPLVDNIAL | 0.625 | 57 | WB | Sequence | A0216 |
| 179 | YLNRHLHTWIQ | 0.613 | 65 | WB | Sequence | A0216 |
| 131 | TVVEELFRDGV | 0.586 | 88 | WB | Sequence | A0216 |
| 78 | GAAAGPALSPV | 0.571 | 103 | WB | Sequence | A0216 |
| 148 | AFFEFGGVMCV | 0.563 | 112 | WB | Sequence | A0216 |
| 167 | PLVDNIALWMT | 0.535 | 153 | WB | Sequence | A0216 |
| 145 | RIVAFFEFGGV | 0.503 | 216 | WB | Sequence | A0216 |
| 151 | EFGGVMCVESV | 0.502 | 217 | WB | Sequence | A0216 |
| 213 | WLSLKTLLSLA | 0.493 | 241 | WB | Sequence | A0216 |
| 21 | KLSQRGYEWDA | 0.490 | 248 | WB | Sequence | A0216 |
| 219 | LLSLALVGACI | 0.478 | 285 | WB | Sequence | A0216 |
| 207 | PLFDFSWLSLK | 0.436 | 445 | WB | Sequence | A0216 |
| 84 | ALSPVPPVVHL | 0.786 | 10 | SB | Sequence | A0219 |
| 188 | IQDNGGWDAFV | 0.605 | 71 | WB | Sequence | A0219 |
| 123 | FTARGRFATVV | 0.594 | 81 | WB | Sequence | A0219 |
| 164 | EMSPLVDNIAL | 0.584 | 89 | WB | Sequence | A0219 |
| 179 | YLNRHLHTWIQ | 0.574 | 100 | WB | Sequence | A0219 |
| 221 | SLALVGACITL | 0.561 | 115 | WB | Sequence | A0219 |
| 219 | LLSLALVGACI | 0.551 | 128 | WB | Sequence | A0219 |
| 167 | PLVDNIALWMT | 0.537 | 149 | WB | Sequence | A0219 |
| 78 | GAAAGPALSPV | 0.496 | 233 | WB | Sequence | A0219 |
| 215 | SLKTLLSLALV | 0.490 | 248 | WB | Sequence | A0219 |
| 204 | SMRPLFDFSWL | 0.486 | 259 | WB | Sequence | A0219 |
| 223 | ALVGACITLGA | 0.467 | 320 | WB | Sequence | A0219 |
| 207 | PLFDFSWLSLK | 0.604 | 72 | WB | Sequence | A0301 |
| 228 | CITLGAYLGHK | 0.462 | 339 | WB | Sequence | A0301 |
| 207 | PLFDFSWLSLK | 0.626 | 57 | WB | Sequence | A1101 |
| 116 | SQLHLTPFTAR | 0.586 | 88 | WB | Sequence | A1101 |
| 228 | CITLGAYLGHK | 0.580 | 94 | WB | Sequence | A1101 |
| 172 | IALWMTEYLNR | 0.524 | 172 | WB | Sequence | A1101 |
| 6 | TGYDNREIVMK | 0.437 | 439 | WB | Sequence | A1101 |
| 142 | NWGRIVAFFEF | 0.733 | 18 | SB | Sequence | A2301 |
| 178 | EYLNRHLHTWI | 0.592 | 82 | WB | Sequence | A2301 |
| 19 | HYKLSQRGYEW | 0.563 | 112 | WB | Sequence | A2301 |
| 174 | LWMTEYLNRHL | 0.457 | 355 | WB | Sequence | A2301 |
| 212 | SWLSLKTLLSL | 0.439 | 431 | WB | Sequence | A2301 |
| 178 | EYLNRHLHTWI | 0.794 | 9 | SB | Sequence | A2402 |
| 142 | NWGRIVAFFEF | 0.744 | 15 | SB | Sequence | A2402 |
| 212 | SWLSLKTLLSL | 0.514 | 192 | WB | Sequence | A2402 |
| 174 | LWMTEYLNRHL | 0.497 | 230 | WB | Sequence | A2402 |
| 178 | EYLNRHLHTWI | 0.599 | 76 | WB | Sequence | A2403 |
| 19 | HYKLSQRGYEW | 0.573 | 101 | WB | Sequence | A2403 |
| 142 | NWGRIVAFFEF | 0.486 | 260 | WB | Sequence | A2403 |
| 17 | YIHYKLSQRGY | 0.524 | 172 | WB | Sequence | A2601 |
| 113 | EMSSQLHLTPF | 0.866 | 4 | SB | Sequence | A2602 |
| 17 | YIHYKLSQRGY | 0.817 | 7 | SB | Sequence | A2602 |
| 12 | EIVMKYIHYKL | 0.760 | 13 | SB | Sequence | A2602 |
| 187 | WIQDNGGWDAF | 0.631 | 54 | WB | Sequence | A2602 |
| 199 | ELYGPSMRPLF | 0.568 | 106 | WB | Sequence | A2602 |
| 224 | LVGACITLGAY | 0.545 | 137 | WB | Sequence | A2602 |
| 139 | DGVNWGRIVAF | 0.462 | 336 | WB | Sequence | A2602 |
| 207 | PLFDFSWLSLK | 0.456 | 359 | WB | Sequence | A3001 |
| 11 | REIVMKYIHYK | 0.439 | 434 | WB | Sequence | A3001 |
| 113 | EMSSQLHLTPF | 0.533 | 156 | WB | Sequence | A3002 |
| 128 | RFATVVEELFR | 0.765 | 12 | SB | Sequence | A3101 |
| 116 | SQLHLTPFTAR | 0.741 | 16 | SB | Sequence | A3101 |
| 196 | AFVELYGPSMR | 0.640 | 48 | SB | Sequence | A3101 |
| 172 | IALWMTEYLNR | 0.614 | 64 | WB | Sequence | A3101 |
| 11 | REIVMKYIHYK | 0.571 | 104 | WB | Sequence | A3101 |
| 15 | MKYIHYKLSQR | 0.500 | 224 | WB | Sequence | A3101 |
| 98 | QAGDDFSRRYR | 0.483 | 269 | WB | Sequence | A3101 |
| 135 | ELFRDGVNWGR | 0.634 | 52 | WB | Sequence | A3301 |
| 128 | RFATVVEELFR | 0.492 | 244 | WB | Sequence | A3301 |
| 172 | IALWMTEYLNR | 0.481 | 273 | WB | Sequence | A3301 |
| 196 | AFVELYGPSMR | 0.467 | 318 | WB | Sequence | A3301 |
| 135 | ELFRDGVNWGR | 0.739 | 16 | SB | Sequence | A6801 |
| 228 | CITLGAYLGHK | 0.618 | 62 | WB | Sequence | A6801 |
| 172 | IALWMTEYLNR | 0.593 | 81 | WB | Sequence | A6801 |
| 57 | HPAASRDPVAR | 0.579 | 95 | WB | Sequence | A6801 |
| 15 | MKYIHYKLSQR | 0.540 | 145 | WB | Sequence | A6801 |
| 98 | QAGDDFSRRYR | 0.525 | 170 | WB | Sequence | A6801 |
| 6 | TGYDNREIVMK | 0.515 | 190 | WB | Sequence | A6801 |
| 128 | RFATVVEELFR | 0.507 | 207 | WB | Sequence | A6801 |
| 95 | TLRQAGDDFSR | 0.490 | 249 | WB | Sequence | A6801 |
| 207 | PLFDFSWLSLK | 0.470 | 308 | WB | Sequence | A6801 |
| 123 | FTARGRFATVV | 0.809 | 7 | SB | Sequence | A6802 |
| 131 | TVVEELFRDGV | 0.784 | 10 | SB | Sequence | A6802 |
| 145 | RIVAFFEFGGV | 0.727 | 19 | SB | Sequence | A6802 |
| 12 | EIVMKYIHYKL | 0.592 | 83 | WB | Sequence | A6802 |
| 78 | GAAAGPALSPV | 0.560 | 116 | WB | Sequence | A6802 |
| 164 | EMSPLVDNIAL | 0.520 | 179 | WB | Sequence | A6802 |
| 159 | ESVNREMSPLV | 0.488 | 254 | WB | Sequence | A6802 |
| 225 | VGACITLGAYL | 0.459 | 349 | WB | Sequence | A6802 |
| 55 | TPHPAASRDPV | 0.435 | 453 | WB | Sequence | A6802 |
| 123 | FTARGRFATVV | 0.710 | 23 | SB | Sequence | A6901 |
| 164 | EMSPLVDNIAL | 0.541 | 144 | WB | Sequence | A6901 |
| 131 | TVVEELFRDGV | 0.510 | 201 | WB | Sequence | A6901 |
| 159 | ESVNREMSPLV | 0.485 | 263 | WB | Sequence | A6901 |
| 206 | RPLFDFSWLSL | 0.747 | 15 | SB | Sequence | B0702 |
| 86 | SPVPPVVHLTL | 0.717 | 21 | SB | Sequence | B0702 |
| 55 | TPHPAASRDPV | 0.567 | 108 | WB | Sequence | B0702 |
| 82 | GPALSPVPPVV | 0.559 | 118 | WB | Sequence | B0702 |
| 166 | SPLVDNIALWM | 0.469 | 312 | WB | Sequence | B0702 |
| 126 | RGRFATVVEEL | 0.463 | 332 | WB | Sequence | B0702 |
| 121 | TPFTARGRFAT | 0.443 | 416 | WB | Sequence | B0702 |
| 97 | RQAGDDFSRRY | 0.600 | 75 | WB | Sequence | B1501 |
| 187 | WIQDNGGWDAF | 0.499 | 226 | WB | Sequence | B1501 |
| 224 | LVGACITLGAY | 0.491 | 245 | WB | Sequence | B1501 |
| 17 | YIHYKLSQRGY | 0.476 | 290 | WB | Sequence | B1501 |
| 113 | EMSSQLHLTPF | 0.433 | 461 | WB | Sequence | B1501 |
| 140 | GVNWGRIVAFF | 0.433 | 463 | WB | Sequence | B1501 |
| 177 | TEYLNRHLHTW | 0.585 | 89 | WB | Sequence | B1801 |
| 198 | VELYGPSMRPL | 0.558 | 119 | WB | Sequence | B1801 |
| 158 | VESVNREMSPL | 0.514 | 191 | WB | Sequence | B1801 |
| 133 | VEELFRDGVNW | 0.459 | 348 | WB | Sequence | B1801 |
| 127 | GRFATVVEELF | 0.512 | 196 | WB | Sequence | B2705 |
| 108 | RRDFAEMSSQL | 0.481 | 273 | WB | Sequence | B2705 |
| 97 | RQAGDDFSRRY | 0.445 | 405 | WB | Sequence | B2705 |
| 166 | SPLVDNIALWM | 0.573 | 101 | WB | Sequence | B3501 |
| 187 | WIQDNGGWDAF | 0.544 | 139 | WB | Sequence | B3501 |
| 195 | DAFVELYGPSM | 0.543 | 140 | WB | Sequence | B3501 |
| 113 | EMSSQLHLTPF | 0.543 | 140 | WB | Sequence | B3501 |
| 121 | TPFTARGRFAT | 0.503 | 217 | WB | Sequence | B3501 |
| 224 | LVGACITLGAY | 0.502 | 218 | WB | Sequence | B3501 |
| 146 | IVAFFEFGGVM | 0.500 | 222 | WB | Sequence | B3501 |
| 86 | SPVPPVVHLTL | 0.443 | 416 | WB | Sequence | B3501 |
| 139 | DGVNWGRIVAF | 0.442 | 419 | WB | Sequence | B3501 |
| 61 | SRDPVARTSPL | 0.500 | 223 | WB | Sequence | B3901 |
| 198 | VELYGPSMRPL | 0.547 | 134 | WB | Sequence | B4001 |
| 158 | VESVNREMSPL | 0.471 | 306 | WB | Sequence | B4001 |
| 177 | TEYLNRHLHTW | 0.520 | 180 | WB | Sequence | B4402 |
| 112 | AEMSSQLHLTP | 0.529 | 163 | WB | Sequence | B4501 |
| 37 | APPGAAPAPGI | 0.507 | 207 | WB | Sequence | B5101 |
| 82 | GPALSPVPPVV | 0.465 | 326 | WB | Sequence | B5101 |
| 86 | SPVPPVVHLTL | 0.433 | 461 | WB | Sequence | B5101 |
| 166 | SPLVDNIALWM | 0.453 | 373 | WB | Sequence | B5301 |
| 206 | RPLFDFSWLSL | 0.436 | 448 | WB | Sequence | B5301 |
| 121 | TPFTARGRFAT | 0.638 | 50 | WB | Sequence | B5401 |
| 69 | SPLQTPAAPGA | 0.557 | 121 | WB | Sequence | B5401 |
| 89 | PPVVHLTLRQA | 0.501 | 220 | WB | Sequence | B5401 |
| 55 | TPHPAASRDPV | 0.428 | 489 | WB | Sequence | B5401 |
| 165 | MSPLVDNIALW | 0.462 | 335 | WB | Sequence | B5701 |
| 203 | PSMRPLFDFSW | 0.635 | 51 | WB | Sequence | B5801 |

[0890] Preferred fragments of BclX(L) capable of interacting with one or more MHC class 2 molecules are listed in table D.

TABLE D

Prediction of cancer antigen BclX(L) specific MHC class 2, 15-mer peptide
binders for 14 MHC class 2 alleles (see FIG. 11) using the
http://www.cbs.dtu.dk/services/NetMHCII/ database. The MHC class 2 molecules for
which no binders were found are not listed

| | | | | | |
|---|---|---|---|---|---|
| Allele | pos | peptide | core | 1-log 50k (aff) affinity (nM) | Bind Level Identity |

| | | | | | |
|---|---|---|---|---|---|
| DRB1_0101 | 212 | RWFLTGMTVAGVVLL LTGMTVAGV | 0.8028 | 8 | SB BclX(L) |
| DRB1_0101 | 209 | RFNRWFLTGMTVAGV FLTGMTVAG | 0.7932 | 9 | SB BclX(L) |
| DRB1_0101 | 210 | FNRWFLTGMTVAGVV LTGMTVAGV | 0.7940 | 9 | SB BclX(L) |
| DRB1_0101 | 211 | NRWFLTGMTVAGVVL LTGMTVAGV | 0.7970 | 9 | SB BclX(L) |
| DRB1_0101 | 213 | WFLTGMTVAGVVLLG LTGMTVAGV | 0.7753 | 11 | SB BclX(L) |
| DRB1_0101 | 76 | DAREVIPMAAVKQAL VIPMAAVKQ | 0.7755 | 11 | SB BclX(L) |
| DRB1_0101 | 77 | AREVIPMAAVKQALR VIPMAAVKQ | 0.7788 | 11 | SB BclX(L) |
| DRB1_0101 | 78 | REVIPMAAVKQALRE VIPMAAVKQ | 0.7772 | 11 | SB BclX(L) |
| DRB1_0101 | 75 | LDAREVIPMAAVKQA VIPMAAVKQ | 0.7730 | 12 | SB BclX(L) |
| DRB1_0101 | 157 | KEMQVLVSRIAAWMA MQVLVSRIA | 0.7458 | 16 | SB BclX(L) |
| DRB1_0101 | 108 | LTSQLHITPGTAYQS LHITPGTAY | 0.7338 | 18 | SB BclX(L) |
| DRB1_0101 | 109 | TSQLHITPGTAYQSF ITPGTAYQS | 0.7313 | 18 | SB BclX(L) |
| DRB1_0101 | 74 | SLDAREVIPMAAVKQ AREVIPMAA | 0.7348 | 18 | SB BclX(L) |
| DRB1_0101 | 110 | SQLHITPGTAYQSFE ITPGTAYQS | 0.7287 | 19 | SB BclX(L) |
| DRB1_0101 | 214 | FLTGMTVAGVVLLGS LTGMTVAGV | 0.7282 | 19 | SB BclX(L) |
| DRB1_0101 | 156 | DKEMQVLVSRIAAWM MQVLVSRIA | 0.7226 | 20 | SB BclX(L) |
| DRB1_0101 | 111 | QLHITPGTAYQSFEQ ITPGTAYQS | 0.7202 | 21 | SB BclX(L) |
| DRB1_0101 | 112 | LHITPGTAYQSFEQV ITPGTAYQS | 0.7189 | 21 | SB BclX(L) |
| DRB1_0101 | 154 | SVDKEMQVLVSRIAA MQVLVSRIA | 0.7165 | 21 | SB BclX(L) |
| DRB1_0101 | 79 | EVIPMAAVKQALREA IPMAAVKQA | 0.7208 | 21 | SB BclX(L) |
| DRB1_0101 | 153 | ESVDKEMQVLVSRIA VDKEMQVLV | 0.7145 | 22 | SB BclX(L) |
| DRB1_0101 | 155 | VDKEMQVLVSRIAAW MQVLVSRIA | 0.7141 | 22 | SB BclX(L) |
| DRB1_0101 | 215 | LTGMTVAGVVLLGSL LTGMTVAGV | 0.7090 | 23 | SB BclX(L) |
| DRB1_0101 | 208 | ERFNRWFLTGMTVAG FNRWFLTGM | 0.7077 | 24 | SB BclX(L) |
| DRB1_0101 | 46 | ETPSAINGNPSWHLA INGNPSWHL | 0.7051 | 24 | SB BclX(L) |
| DRB1_0101 | 47 | TPSAINGNPSWHLAD INGNPSWHL | 0.7051 | 24 | SB BclX(L) |
| DRB1_0101 | 48 | PSAINGNPSWHLADS INGNPSWHL | 0.7076 | 24 | SB BclX(L) |
| DRB1_0101 | 49 | SAINGNPSWHLADSP INGNPSWHL | 0.7072 | 24 | SB BclX(L) |
| DRB1_0101 | 45 | METPSAINGNPSWHL PSAINGNPS | 0.7034 | 25 | SB BclX(L) |
| DRB1_0101 | 158 | EMQVLVSRIAAWMAT MQVLVSRIA | 0.6845 | 30 | SB BclX(L) |
| DRB1_0101 | 80 | VIPMAAVKQALREAG VIPMAAVKQ | 0.6856 | 30 | SB BclX(L) |
| DRB1_0101 | 159 | MQVLVSRIAAWMATY MQVLVSRIA | 0.6834 | 31 | SB BclX(L) |
| DRB1_0101 | 161 | VLVSRIAAWMATYLN IAAWMATYL | 0.6838 | 31 | SB BclX(L) |
| DRB1_0101 | 217 | GMTVAGVVLLGSLFS MTVAGVVLL | 0.6800 | 32 | SB BclX(L) |
| DRB1_0101 | 218 | MTVAGVVLLGSLFSR VVLLGSLFS | 0.6800 | 32 | SB BclX(L) |
| DRB1_0101 | 51 | INGNPSWHLADSPAV INGNPSWHL | 0.6778 | 33 | SB BclX(L) |
| DRB1_0101 | 192 | VELYGNNAAAESRKG YGNNAAAES | 0.6693 | 36 | SB BclX(L) |
| DRB1_0101 | 219 | TVAGVVLLGSLFSRK VVLLGSLFS | 0.6677 | 36 | SB BclX(L) |
| DRB1_0101 | 160 | QVLVSRIAAWMATYL VSRIAAWMA | 0.6652 | 37 | SB BclX(L) |
| DRB1_0101 | 191 | FVELYGNNAAAESRK YGNNAAAES | 0.6658 | 37 | SB BclX(L) |
| DRB1_0101 | 193 | ELYGNNAAAESRKGQ YGNNAAAES | 0.6661 | 37 | SB BclX(L) |
| DRB1_0101 | 99 | LRYRRAFSDLTSQLH YRRAFSDLT | 0.6657 | 37 | SB BclX(L) |
| DRB1_0101 | 162 | LVSRIAAWMATYLND IAAWMATYL | 0.6627 | 38 | SB BclX(L) |
| DRB1_0101 | 190 | TFVELYGNNAAAESR YGNNAAAES | 0.6628 | 38 | SB BclX(L) |
| DRB1_0101 | 189 | DTFVELYGNNAAAES FVELYGNNA | 0.6613 | 39 | SB BclX(L) |
| DRB1_0101 | 54 | NPSWHLADSPAVNGA WHLADSPAV | 0.6617 | 39 | SB BclX(L) |
| DRB1_0101 | 55 | PSWHLADSPAVNGAT WHLADSPAV | 0.6611 | 39 | SB BclX(L) |
| DRB1_0101 | 216 | TGMTVAGVVLLGSLF MTVAGVVLL | 0.6543 | 42 | SB BclX(L) |
| DRB1_0101 | 163 | VSRIAAWMATYLNDH IAAWMATYL | 0.6531 | 43 | SB BclX(L) |
| DRB1_0101 | 53 | GNPSWHLADSPAVNG WHLADSPAV | 0.6532 | 43 | SB BclX(L) |
| DRB1_0101 | 59 | LADSPAVNGATGHSS LADSPAVNG | 0.6361 | 51 | WB BclX(L) |
| DRB1_0101 | 98 | ELRYRRAFSDLTSQL YRRAFSDLT | 0.6357 | 51 | WB BclX(L) |
| DRB1_0101 | 164 | SRIAAWMATYLNDHL IAAWMATYL | 0.6357 | 52 | WB BclX(L) |
| DRB1_0101 | 97 | FELRYRRAFSDLTSQ YRRAFSDLT | 0.6337 | 53 | WB BclX(L) |
| DRB1_0101 | 96 | EFELRYRRAFSDLTS YRRAFSDLT | 0.6321 | 54 | WB BclX(L) |
| DRB1_0101 | 95 | DEFELRYRRAFSDLT LRYRRAFSD | 0.6294 | 55 | WB BclX(L) |
| DRB1_0101 | 140 | IVAFFSFGGALCVES FSFGGALCV | 0.6203 | 61 | WB BclX(L) |
| DRB1_0101 | 56 | SWHLADSPAVNGATG LADSPAVNG | 0.6196 | 61 | WB BclX(L) |
| DRB1_0101 | 61 | DSPAVNGATGHSSSL VNGATGHSS | 0.6197 | 61 | WB BclX(L) |
| DRB1_0101 | 62 | SPAVNGATGHSSSLD VNGATGHSS | 0.6205 | 61 | WB BclX(L) |
| DRB1_0101 | 141 | VAFFSFGGALCVESV FSFGGALCV | 0.6191 | 62 | WB BclX(L) |
| DRB1_0101 | 60 | ADSPAVNGATGHSSS VNGATGHSS | 0.6174 | 63 | WB BclX(L) |
| DRB1_0101 | 142 | AFFSFGGALCVESVD FSFGGALCV | 0.6153 | 64 | WB BclX(L) |
| DRB1_0101 | 57 | WHLADSPAVNGATGH LADSPAVNG | 0.6162 | 64 | WB BclX(L) |
| DRB1_0101 | 113 | HITPGTAYQSFEQVV ITPGTAYQS | 0.6121 | 66 | WB BclX(L) |
| DRB1_0101 | 114 | ITPGTAYQSFEQVVN ITPGTAYQS | 0.6131 | 66 | WB BclX(L) |
| DRB1_0101 | 50 | AINGNPSWHLADSPA INGNPSWHL | 0.6133 | 66 | WB BclX(L) |
| DRB1_0101 | 63 | PAVNGATGHSSSLDA VNGATGHSS | 0.6078 | 70 | WB BclX(L) |
| DRB1_0101 | 100 | RYRRAFSDLTSQLHI YRRAFSDLT | 0.6026 | 74 | WB BclX(L) |
| DRB1_0101 | 101 | YRRAFSDLTSQLHIT YRRAFSDLT | 0.6021 | 74 | WB BclX(L) |
| DRB1_0101 | 52 | NGNPSWHLADSPAVN WHLADSPAV | 0.6004 | 75 | WB BclX(L) |
| DRB1_0101 | 138 | GRIVAFFSFGGALCV IVAFFSFGG | 0.5864 | 88 | WB BclX(L) |
| DRB1_0101 | 194 | LYGNNAAAESRKGQE YGNNAAAES | 0.5808 | 93 | WB BclX(L) |
| DRB1_0101 | 165 | RIAAWMATYLNDHLE AAWMATYLN | 0.5762 | 98 | WB BclX(L) |
| DRB1_0101 | 195 | YGNNAAAESRKGQER YGNNAAAES | 0.5731 | 101 | WB BclX(L) |
| DRB1_0101 | 139 | RIVAFFSFGGALCVE FSFGGALCV | 0.5729 | 102 | WB BclX(L) |
| DRB1_0101 | 131 | FRDGVNWGRIVAFFS VNWGRIVAF | 0.5627 | 114 | WB BclX(L) |
| DRB1_0101 | 143 | FFSFGGALCVESVDK FSFGGALCV | 0.5613 | 115 | WB BclX(L) |
| DRB1_0101 | 144 | FSFGGALCVESVDKE FSFGGALCV | 0.5583 | 119 | WB BclX(L) |
| DRB1_0101 | 132 | RDGVNWGRIVAFFSF VNWGRIVAF | 0.5561 | 122 | WB BclX(L) |
| DRB1_0101 | 133 | DGVNWGRIVAFFSFG VNWGRIVAF | 0.5558 | 122 | WB BclX(L) |
| DRB1_0101 | 81 | IPMAAVKQALREAGD IPMAAVKQA | 0.5527 | 126 | WB BclX(L) |
| DRB1_0101 | 102 | RRAFSDLTSQLHITP FSDLTSQLH | 0.5334 | 156 | WB BclX(L) |
| DRB1_0101 | 103 | RAFSDLTSQLHITPG FSDLTSQLH | 0.5314 | 159 | WB BclX(L) |
| DRB1_0101 | 58 | HLADSPAVNGATGHS LADSPAVNG | 0.5293 | 163 | WB BclX(L) |
| DRB1_0101 | 134 | GVNWGRIVAFFSFGG VNWGRIVAF | 0.5282 | 165 | WB BclX(L) |
| DRB1_0101 | 166 | IAAWMATYLNDHLEP IAAWMATYL | 0.5271 | 167 | WB BclX(L) |
| DRB1_0101 | 64 | AVNGATGHSSSLDAR VNGATGHSS | 0.5266 | 168 | WB BclX(L) |
| DRB1_0101 | 135 | VNWGRIVAFFSFGGA VNWGRIVAF | 0.5248 | 171 | WB BclX(L) |
| DRB1_0101 | 7 | ELVVDFLSYKLSQKG VVDFLSYKL | 0.5243 | 172 | WB BclX(L) |
| DRB1_0101 | 129 | ELFRDGVNWGRIVAF FRDGVNWGR | 0.5154 | 189 | WB BclX(L) |
| DRB1_0101 | 65 | VNGATGHSSSLDARE VNGATGHSS | 0.5156 | 189 | WB BclX(L) |
| DRB1_0101 | 130 | LFRDGVNWGRIVAFF VNWGRIVAF | 0.5023 | 218 | WB BclX(L) |
| DRB1_0101 | 8 | LVVDFLSYKLSQKGY LSYKLSQKG | 0.4921 | 244 | WB BclX(L) |
| DRB1_0101 | 9 | VVDFLSYKLSQKGYS LSYKLSQKG | 0.4892 | 251 | WB BclX(L) |
| DRB1_0101 | 207 | QERFNRWFLTGMTVA FNRWFLTGM | 0.4845 | 264 | WB BclX(L) |
| DRB1_0101 | 42 | ESEMETPSAINGNPS METPSAING | 0.4626 | 335 | WB BclX(L) |
| DRB1_0101 | 40 | GTESEMETPSAINGN METPSAING | 0.4622 | 337 | WB BclX(L) |
| DRB1_0101 | 107 | DLTSQLHITPGTAYQ LHITPGTAY | 0.4593 | 347 | WB BclX(L) |
| DRB1_0101 | 39 | EGTESEMETPSAING ESEMETPSA | 0.4591 | 348 | WB BclX(L) |
| DRB1_0101 | 43 | SEMETPSAINGNPSW METPSAING | 0.4590 | 348 | WB BclX(L) |
| DRB1_0101 | 106 | SDLTSQLHITPGTAY SQLHITPGT | 0.4569 | 356 | WB BclX(L) |
| DRB1_0101 | 10 | VDFLSYKLSQKGYSW LSYKLSQKG | 0.4565 | 358 | WB BclX(L) |
| DRB1_0101 | 41 | TESEMETPSAINGNP METPSAING | 0.4564 | 358 | WB BclX(L) |
| DRB1_0101 | 167 | AAWMATYLNDHLEPW AAWMATYLN | 0.4556 | 361 | WB BclX(L) |
| DRB1_0101 | 11 | DFLSYKLSQKGYSWS LSYKLSQKG | 0.4515 | 378 | WB BclX(L) |
| DRB1_0101 | 104 | AFSDLTSQLHITPGT FSDLTSQLH | 0.4453 | 404 | WB BclX(L) |
| DRB1_0101 | 105 | FSDLTSQLHITPGTA FSDLTSQLH | 0.4451 | 405 | WB BclX(L) |
| DRB1_0101 | 137 | WGRIVAFFSFGGALC IVAFFSFGG | 0.4311 | 471 | WB BclX(L) |
| DRB1_0101 | 206 | GQERFNRWFLTGMTV FNRWFLTGM | 0.4277 | 489 | WB BclX(L) |
| DRB1_0401 | 99 | LRYRRAFSDLTSQLH YRRAFSDLT | 0.5618 | 115 | WB BclX(L) |
| DRB1_0401 | 97 | FELRYRRAFSDLTSQ YRRAFSDLT | 0.5300 | 162 | WB BclX(L) |
| DRB1_0401 | 96 | EFELRYRRAFSDLTS YRRAFSDLT | 0.5284 | 164 | WB BclX(L) |
| DRB1_0401 | 95 | DEFELRYRRAFSDLT DEFELRYRR | 0.5275 | 166 | WB BclX(L) |
| DRB1_0401 | 98 | ELRYRRAFSDLTSQL YRRAFSDLT | 0.5259 | 169 | WB BclX(L) |
| DRB1_0401 | 185 | NGGWDTFVELYGNNA WDTFVELYG | 0.5189 | 182 | WB BclX(L) |
| DRB1_0401 | 186 | GGWDTFVELYGNNAA FVELYGNNA | 0.5180 | 184 | WB BclX(L) |
| DRB1_0401 | 188 | WDTFVELYGNNAAAE FVELYGNNA | 0.5159 | 188 | WB BclX(L) |
| DRB1_0401 | 187 | GWDTFVELYGNNAAA FVELYGNNA | 0.5157 | 189 | WB BclX(L) |
| DRB1_0401 | 189 | DTFVELYGNNAAAES FVELYGNNA | 0.5154 | 189 | WB BclX(L) |
| DRB1_0401 | 100 | RYRRAFSDLTSQLHI YRRAFSDLT | 0.4844 | 265 | WB BclX(L) |
| DRB1_0401 | 101 | YRRAFSDLTSQLHIT YRRAFSDLT | 0.4813 | 274 | WB BclX(L) |
| DRB1_0401 | 153 | ESVDKEMQVLVSRIA KEMQVLVSR | 0.4561 | 360 | WB BclX(L) |
| DRB1_0401 | 155 | VDKEMQVLVSRIAAW MQVLVSRIA | 0.4519 | 376 | WB BclX(L) |
| DRB1_0401 | 208 | ERFNRWFLTGMTVAG WFLTGMTVA | 0.4512 | 379 | WB BclX(L) |
| DRB1_0401 | 154 | SVDKEMQVLVSRIAA MQVLVSRIA | 0.4495 | 386 | WB BclX(L) |
| DRB1_0401 | 209 | RFNRWFLTGMTVAGV FLTGMTVAG | 0.4467 | 398 | WB BclX(L) |
| DRB1_0401 | 210 | FNRWFLTGMTVAGVV FLTGMTVAG | 0.4427 | 416 | WB BclX(L) |
| DRB1_0401 | 157 | KEMQVLVSRIAAWMA MQVLVSRIA | 0.4419 | 419 | WB BclX(L) |
| DRB1_0401 | 156 | DKEMQVLVSRIAAWM MQVLVSRIA | 0.4413 | 422 | WB BclX(L) |
| DRB1_0401 | 211 | NRWFLTGMTVAGVVL FLTGMTVAG | 0.4327 | 463 | WB BclX(L) |
| DRB1_0404 | 167 | AAWMATYLNDHLEPW WMATYLNDH | 0.5484 | 132 | WB BclX(L) |
| DRB1_0404 | 164 | SRIAAWMATYLNDHL WMATYLNDH | 0.5424 | 141 | WB BclX(L) |
| DRB1_0404 | 165 | RIAAWMATYLNDHLE WMATYLNDH | 0.5417 | 142 | WB BclX(L) |
| DRB1_0404 | 166 | IAAWMATYLNDHLEP WMATYLNDH | 0.5330 | 156 | WB BclX(L) |
| DRB1_0404 | 163 | VSRIAAWMATYLNDH AAWMATYLN | 0.5217 | 177 | WB BclX(L) |
| DRB1_0404 | 219 | TVAGVVLLGSLFSRK VVLLGSLFS | 0.5094 | 202 | WB BclX(L) |
| DRB1_0404 | 209 | RFNRWFLTGMTVAGV FLTGMTVAG | 0.4902 | 249 | WB BclX(L) |
| DRB1_0404 | 210 | FNRWFLTGMTVAGVV FLTGMTVAG | 0.4853 | 262 | WB BclX(L) |
| DRB1_0404 | 211 | NRWFLTGMTVAGVVL FLTGMTVAG | 0.4826 | 270 | WB BclX(L) |
| DRB1_0404 | 208 | ERFNRWFLTGMTVAG WFLTGMTVA | 0.4761 | 290 | WB BclX(L) |
| DRB1_0404 | 168 | AWMATYLNDHLEPWI WMATYLNDH | 0.4694 | 311 | WB BclX(L) |
| DRB1_0404 | 212 | RWFLTGMTVAGVVLL FLTGMTVAG | 0.4547 | 365 | WB BclX(L) |
| DRB1_0404 | 189 | DTFVELYGNNAAAES FVELYGNNA | 0.4505 | 382 | WB BclX(L) |
| DRB1_0404 | 187 | GWDTFVELYGNNAAA FVELYGNNA | 0.4498 | 385 | WB BclX(L) |
| DRB1_0404 | 169 | WMATYLNDHLEPWIQ WMATYLNDH | 0.4478 | 393 | WB BclX(L) |
| DRB1_0404 | 188 | WDTFVELYGNNAAAE FVELYGNNA | 0.4462 | 400 | WB BclX(L) |
| DRB1_0404 | 186 | GGWDTFVELYGNNAA FVELYGNNA | 0.4437 | 411 | WB BclX(L) |
| DRB1_0404 | 185 | NGGWDTFVELYGNNA GWDTFVELY | 0.4388 | 434 | WB BclX(L) |
| DRB1_0405 | 118 | TAYQSFEQVVNELFR YQSFEQVVN | 0.5794 | 95 | WB BclX(L) |
| DRB1_0405 | 117 | GTAYQSFEQVVNELF YQSFEQVVN | 0.5772 | 97 | WB BclX(L) |
| DRB1_0405 | 115 | TPGTAYQSFEQVVNE YQSFEQVVN | 0.5541 | 124 | WB BclX(L) |
| DRB1_0405 | 116 | PGTAYQSFEQVVNEL YQSFEQVVN | 0.5538 | 125 | WB BclX(L) |
| DRB1_0405 | 114 | ITPGTAYQSFEQVVN AYQSFEQVV | 0.5505 | 129 | WB BclX(L) |
| DRB1_0405 | 163 | VSRIAAWMATYLNDH AAWMATYLN | 0.5510 | 129 | WB BclX(L) |
| DRB1_0405 | 162 | LVSRIAAWMATYLND AAWMATYLN | 0.5473 | 134 | WB BclX(L) |
| DRB1_0405 | 161 | VLVSRIAAWMATYLN IAAWMATYL | 0.5442 | 139 | WB BclX(L) |
| DRB1_0405 | 164 | SRIAAWMATYLNDHL AAWMATYLN | 0.5402 | 145 | WB BclX(L) |
| DRB1_0405 | 99 | LRYRRAFSDLTSQLH YRRAFSDLT | 0.5100 | 201 | WB BclX(L) |
| DRB1_0405 | 97 | FELRYRRAFSDLTSQ YRRAFSDLT | 0.5085 | 204 | WB BclX(L) |
| DRB1_0405 | 96 | EFELRYRRAFSDLTS YRRAFSDLT | 0.5069 | 208 | WB BclX(L) |
| DRB1_0405 | 165 | RIAAWMATYLNDHLE AAWMATYLN | 0.5055 | 211 | WB BclX(L) |
| DRB1_0405 | 119 | AYQSFEQVVNELFRD YQSFEQVVN | 0.4974 | 230 | WB BclX(L) |
| DRB1_0405 | 120 | YQSFEQVVNELFRDG YQSFEQVVN | 0.4968 | 231 | WB BclX(L) |
| DRB1_0405 | 98 | ELRYRRAFSDLTSQL YRRAFSDLT | 0.4923 | 243 | WB BclX(L) |
| DRB1_0405 | 18 | SQKGYSWSQFSDVEE GYSWSQFSD | 0.4575 | 354 | WB BclX(L) |
| DRB1_0405 | 95 | DEFELRYRRAFSDLT LRYRRAFSD | 0.4574 | 355 | WB BclX(L) |
| DRB1_0405 | 19 | QKGYSWSQFSDVEEN WSQFSDVEE | 0.4562 | 359 | WB BclX(L) |
| DRB1_0405 | 100 | RYRRAFSDLTSQLHI YRRAFSDLT | 0.4475 | 395 | WB BclX(L) |
| DRB1_0405 | 20 | KGYSWSQFSDVEENR WSQFSDVEE | 0.4430 | 414 | WB BclX(L) |
| DRB1_0405 | 166 | IAAWMATYLNDHLEP AAWMATYLN | 0.4423 | 418 | WB BclX(L) |
| DRB1_0405 | 21 | GYSWSQFSDVEENRT WSQFSDVEE | 0.4353 | 450 | WB BclX(L) |
| DRB1_0701 | 157 | KEMQVLVSRIAAWMA VLVSRIAAW | 0.5228 | 175 | WB BclX(L) |
| DRB1_0701 | 159 | MQVLVSRIAAWMATY VLVSRIAAW | 0.5194 | 181 | WB BclX(L) |
| DRB1_0701 | 158 | EMQVLVSRIAAWMAT VLVSRIAAW | 0.5191 | 182 | WB BclX(L) |
| DRB1_0701 | 156 | DKEMQVLVSRIAAWM VLVSRIAAW | 0.4971 | 231 | WB BclX(L) |
| DRB1_0701 | 160 | QVLVSRIAAWMATYL VLVSRIAAW | 0.4833 | 268 | WB BclX(L) |
| DRB1_0701 | 46 | ETPSAINGNPSWHLA INGNPSWHL | 0.4783 | 283 | WB BclX(L) |
| DRB1_0701 | 45 | METPSAINGNPSWHL AINGNPSWH | 0.4779 | 284 | WB BclX(L) |
| DRB1_0701 | 155 | VDKEMQVLVSRIAAW MQVLVSRIA | 0.4772 | 286 | WB BclX(L) |
| DRB1_0701 | 47 | TPSAINGNPSWHLAD INGNPSWHL | 0.4774 | 286 | WB BclX(L) |
| DRB1_0701 | 48 | PSAINGNPSWHLADS INGNPSWHL | 0.4764 | 289 | WB BclX(L) |
| DRB1_0701 | 161 | VLVSRIAAWMATYLN VLVSRIAAW | 0.4745 | 295 | WB BclX(L) |
| DRB1_0701 | 49 | SAINGNPSWHLADSP INGNPSWHL | 0.4718 | 303 | WB BclX(L) |
| DRB1_0701 | 99 | LRYRRAFSDLTSQLH YRRAFSDLT | 0.4627 | 335 | WB BclX(L) |
| DRB1_0701 | 100 | RYRRAFSDLTSQLHI FSDLTSQLH | 0.4416 | 420 | WB BclX(L) |
| DRB1_0701 | 101 | YRRAFSDLTSQLHIT FSDLTSQLH | 0.4344 | 455 | WB BclX(L) |
| DRB1_0701 | 51 | INGNPSWHLADSPAV INGNPSWHL | 0.4291 | 481 | WB BclX(L) |
| DRB1_0901 | 55 | PSWHLADSPAVNGAT WHLADSPAV | 0.5482 | 133 | WB BclX(L) |
| DRB1_0901 | 54 | NPSWHLADSPAVNGA WHLADSPAV | 0.5414 | 143 | WB BclX(L) |
| DRB1_0901 | 53 | GNPSWHLADSPAVNG WHLADSPAV | 0.5408 | 144 | WB BclX(L) |
| DRB1_0901 | 51 | INGNPSWHLADSPAV SWHLADSPA | 0.5289 | 164 | WB BclX(L) |
| DRB1_0901 | 52 | NGNPSWHLADSPAVN WHLADSPAV | 0.5284 | 164 | WB BclX(L) |
| DRB1_0901 | 56 | SWHLADSPAVNGATG WHLADSPAV | 0.4678 | 317 | WB BclX(L) |
| DRB1_0901 | 57 | WHLADSPAVNGATGH WHLADSPAV | 0.4636 | 331 | WB BclX(L) |
| DRB1_0901 | 212 | RWFLTGMTVAGVVLL FLTGMTVAG | 0.4483 | 391 | WB BclX(L) |
| DRB1_0901 | 213 | WFLTGMTVAGVVLLG MTVAGVVLL | 0.4445 | 408 | WB BclX(L) |
| DRB1_0901 | 214 | FLTGMTVAGVVLLGS MTVAGVVLL | 0.4327 | 463 | WB BclX(L) |
| DRB1_1101 | 157 | KEMQVLVSRIAAWMA MQVLVSRIA | 0.4319 | 467 | WB BclX(L) |
| DRB1_1101 | 131 | FRDGVNWGRIVAFFS GVNWGRIVA | 0.4310 | 472 | WB BclX(L) |
| DRB1_1101 | 156 | DKEMQVLVSRIAAWM MQVLVSRIA | 0.4308 | 473 | WB BclX(L) |
| DRB1_1101 | 155 | VDKEMQVLVSRIAAW MQVLVSRIA | 0.4292 | 481 | WB BclX(L) |
| DRB1_1101 | 132 | RDGVNWGRIVAFFSF GVNWGRIVA | 0.4283 | 486 | WB BclX(L) |
| DRB1_1101 | 154 | SVDKEMQVLVSRIAA MQVLVSRIA | 0.4267 | 494 | WB BclX(L) |
| DRB1_1302 | 218 | MTVAGVVLLGSLFSR VVLLGSLFS | 0.4945 | 237 | WB BclX(L) |
| DRB1_1302 | 216 | TGMTVAGVVLLGSLF MTVAGVVLL | 0.4855 | 262 | WB BclX(L) |
| DRB1_1302 | 214 | FLTGMTVAGVVLLGS MTVAGVVLL | 0.4842 | 265 | WB BclX(L) |
| DRB1_1302 | 217 | GMTVAGVVLLGSLFS MTVAGVVLL | 0.4840 | 266 | WB BclX(L) |
| DRB1_1302 | 212 | RWFLTGMTVAGVVLL FLTGMTVAG | 0.4832 | 268 | WB BclX(L) |
| DRB1_1302 | 215 | LTGMTVAGVVLLGSL MTVAGVVLL | 0.4775 | 285 | WB BclX(L) |
| DRB1_1302 | 213 | WFLTGMTVAGVVLLG MTVAGVVLL | 0.4716 | 304 | WB BclX(L) |
| DRB1_1302 | 189 | DTFVELYGNNAAAES VELYGNNAA | 0.4688 | 313 | WB BclX(L) |
| DRB1_1302 | 190 | TFVELYGNNAAAESR YGNNAAAES | 0.4615 | 339 | WB BclX(L) |
| DRB1_1302 | 191 | FVELYGNNAAAESRK YGNNAAAES | 0.4526 | 373 | WB BclX(L) |
| DRB1_1302 | 192 | VELYGNNAAAESRKG YGNNAAAES | 0.4415 | 421 | WB BclX(L) |
| DRB1_1302 | 219 | TVAGVVLLGSLFSRK VVLLGSLFS | 0.4384 | 436 | WB BclX(L) |
| DRB1_1302 | 193 | ELYGNNAAAESRKGQ YGNNAAAES | 0.4275 | 490 | WB BclX(L) |
| DRB1_1501 | 219 | TVAGVVLLGSLFSRK VLLGSLFSR | 0.6681 | 36 | SB BclX(L) |
| DRB1_1501 | 218 | MTVAGVVLLGSLFSR VVLLGSLFS | 0.6441 | 47 | SB BclX(L) |
| DRB1_1501 | 6 | RELVVDFLSYKLSQK LVVDFLSYK | 0.5208 | 179 | WB BclX(L) |
| DRB1_1501 | 7 | ELVVDFLSYKLSQKG FLSYKLSQK | 0.5009 | 221 | WB BclX(L) |
| DRB1_1501 | 157 | KEMQVLVSRIAAWMA MQVLVSRIA | 0.4968 | 231 | WB BclX(L) |
| DRB1_1501 | 156 | DKEMQVLVSRIAAWM MQVLVSRIA | 0.4965 | 232 | WB BclX(L) |
| DRB1_1501 | 209 | RFNRWFLTGMTVAGV FNRWFLTGM | 0.4870 | 257 | WB BclX(L) |
| DRB1_1501 | 164 | SRIAAWMATYLNDHL WMATYLNDH | 0.4849 | 263 | WB BclX(L) |
| DRB1_1501 | 210 | FNRWFLTGMTVAGVV LTGMTVAGV | 0.4836 | 267 | WB BclX(L) |
| DRB1_1501 | 8 | LVVDFLSYKLSQKGY FLSYKLSQK | 0.4778 | 284 | WB BclX(L) |
| DRB1_1501 | 5 | NRELVVDFLSYKLSQ LVVDFLSYK | 0.4777 | 285 | WB BclX(L) |
| DRB1_1501 | 135 | VNWGRIVAFFSFGGA IVAFFSFGG | 0.4756 | 291 | WB BclX(L) |
| DRB1_1501 | 4 | SNRELVVDFLSYKLS LVVDFLSYK | 0.4755 | 291 | WB BclX(L) |
| DRB1_1501 | 159 | MQVLVSRIAAWMATY LVSRIAAWM | 0.4693 | 312 | WB BclX(L) |
| DRB1_1501 | 163 | VSRIAAWMATYLNDH IAAWMATYL | 0.4691 | 312 | WB BclX(L) |
| DRB1_1501 | 158 | EMQVLVSRIAAWMAT VLVSRIAAW | 0.4683 | 315 | WB BclX(L) |
| DRB1_1501 | 165 | RIAAWMATYLNDHLE WMATYLNDH | 0.4685 | 315 | WB BclX(L) |
| DRB1_1501 | 128 | NELFRDGVNWGRIVA LFRDGVNWG | 0.4675 | 318 | WB BclX(L) |
| DRB1_1501 | 125 | QVVNELFRDGVNWGR LFRDGVNWG | 0.4668 | 320 | WB BclX(L) |
| DRB1_1501 | 126 | VVNELFRDGVNWGRI LFRDGVNWG | 0.4668 | 320 | WB BclX(L) |
| DRB1_1501 | 166 | IAAWMATYLNDHLEP WMATYLNDH | 0.4649 | 327 | WB BclX(L) |
| DRB1_1501 | 137 | WGRIVAFFSFGGALC IVAFFSFGG | 0.4643 | 329 | WB BclX(L) |
| DRB1_1501 | 136 | NWGRIVAFFSFGGAL IVAFFSFGG | 0.4638 | 331 | WB BclX(L) |
| DRB1_1501 | 207 | QERFNRWFLTGMTVA FNRWFLTGM | 0.4608 | 342 | WB BclX(L) |
| DRB1_1501 | 208 | ERFNRWFLTGMTVAG FNRWFLTGM | 0.4602 | 344 | WB BclX(L) |
| DRB1_1501 | 138 | GRIVAFFSFGGALCV IVAFFSFGG | 0.4587 | 350 | WB BclX(L) |
| DRB1_1501 | 9 | VVDFLSYKLSQKGYS FLSYKLSQK | 0.4584 | 351 | WB BclX(L) |
| DRB1_1501 | 155 | VDKEMQVLVSRIAAW MQVLVSRIA | 0.4570 | 356 | WB BclX(L) |
| DRB1_1501 | 167 | AAWMATYLNDHLEPW WMATYLNDH | 0.4551 | 364 | WB BclX(L) |
| DRB1_1501 | 3 | QSNRELVVDFLSYKL LVVDFLSYK | 0.4543 | 367 | WB BclX(L) |
| DRB1_1501 | 127 | VNELFRDGVNWGRIV LFRDGVNWG | 0.4431 | 414 | WB BclX(L) |
| DRB1_1501 | 134 | GVNWGRIVAFFSFGG VNWGRIVAF | 0.4391 | 432 | WB BclX(L) |
| DRB1_1501 | 129 | ELFRDGVNWGRIVAF LFRDGVNWG | 0.4390 | 433 | WB BclX(L) |
| DRB1_1501 | 217 | GMTVAGVVLLGSLFS VAGVVLLGS | 0.4377 | 439 | WB BclX(L) |
| DRB1_1501 | 124 | EQVVNELFRDGVNWG VVNELFRDG | 0.4373 | 441 | WB BclX(L) |
| DRB1_1501 | 139 | RIVAFFSFGGALCVE IVAFFSFGG | 0.4300 | 477 | WB BclX(L) |
| DRB1_1501 | 211 | NRWFLTGMTVAGVVL LTGMTVAGV | 0.4264 | 496 | WB BclX(L) |
| DRB4_0101 | 99 | LRYRRAFSDLTSQLH YRRAFSDLT | 0.4654 | 325 | WB BclX(L) |
| DRB4_0101 | 100 | RYRRAFSDLTSQLHI FSDLTSQLH | 0.4328 | 463 | WB BclX(L) |

[0891] Preferred fragments of Bcl-2 capable of interacting with one or more MHC class 2 molecules are listed in table E.

TABLE E

Prediction of cancer antigen Bcl-2 specific MHC class 2, 15-mer peptide binders
for 14 MHC class 2 alleles (see FIG. 11) using the http://www.cbs.dtu.dk/
services/NetMHCII/ database. The MHC class 2 molecules for which no
binders were found are not listed

| | | | | | |
|---|---|---|---|---|---|
| Allele | pos | peptide | core | 1-log50k(aff) affinity(nM) | Bind Level Identity |

| | | | | | |
|---|---|---|---|---|---|
| DRB1_0101 | 211 | DFSWLSLKTLLSLAL WLSLKTLLS | 0.8912 | 3 | SB Bcl-2 |
| DRB1_0101 | 212 | FSWLSLKTLLSLALV LKTLLSLAL | 0.8917 | 3 | SB Bcl-2 |
| DRB1_0101 | 214 | WLSLKTLLSLALVGA LKTLLSLAL | 0.8933 | 3 | SB Bcl-2 |
| DRB1_0101 | 215 | LSLKTLLSLALVGAC LKTLLSLAL | 0.8867 | 3 | SB Bcl-2 |
| DRB1_0101 | 213 | SWLSLKTLLSLALVG LKTLLSLAL | 0.8776 | 4 | SB Bcl-2 |
| DRB1_0101 | 216 | SLKTLLSLALVGACI LKTLLSLAL | 0.8024 | 8 | SB Bcl-2 |
| DRB1_0101 | 217 | LKTLLSLALVGACIT LKTLLSLAL | 0.8038 | 8 | SB Bcl-2 |
| DRB1_0101 | 68 | RTSPLQTPAAPGAAA LQTPAAPGA | 0.7623 | 13 | SB Bcl-2 |
| DRB1_0101 | 69 | TSPLQTPAAPGAAAG LQTPAAPGA | 0.7650 | 13 | SB Bcl-2 |
| DRB1_0101 | 70 | SPLQTPAAPGAAAGP LQTPAAPGA | 0.7631 | 13 | SB Bcl-2 |
| DRB1_0101 | 66 | VARTSPLQTPAAPGA TSPLQTPAA | 0.7565 | 14 | SB Bcl-2 |
| DRB1_0101 | 67 | ARTSPLQTPAAPGAA LQTPAAPGA | 0.7584 | 14 | SB Bcl-2 |
| DRB1_0101 | 209 | LFDFSWLSLKTLLSL WLSLKTLLS | 0.7419 | 16 | SB Bcl-2 |
| DRB1_0101 | 208 | PLFDFSWLSLKTLLS FSWLSLKTL | 0.7389 | 17 | SB Bcl-2 |
| DRB1_0101 | 210 | FDFSWLSLKTLLSLA WLSLKTLLS | 0.7403 | 17 | SB Bcl-2 |
| DRB1_0101 | 219 | TLLSLALVGACITLG LLSLALVGA | 0.7270 | 19 | SB Bcl-2 |
| DRB1_0101 | 220 | LLSLALVGACITLGA LVGACITLG | 0.7299 | 19 | SB Bcl-2 |
| DRB1_0101 | 223 | LALVGACITLGAYLG LVGACITLG | 0.7079 | 24 | SB Bcl-2 |
| DRB1_0101 | 221 | LSLALVGACITLGAY LVGACITLG | 0.7021 | 25 | SB Bcl-2 |
| DRB1_0101 | 222 | SLALVGACITLGAYL LVGACITLG | 0.7016 | 25 | SB Bcl-2 |
| DRB1_0101 | 106 | RRYRRDFAEMSSQLH YRRDFAEMS | 0.6774 | 33 | SB Bcl-2 |
| DRB1_0101 | 72 | LQTPAAPGAAAGPAL LQTPAAPGA | 0.6778 | 33 | SB Bcl-2 |
| DRB1_0101 | 71 | PLQTPAAPGAAAGPA LQTPAAPGA | 0.6750 | 34 | SB Bcl-2 |
| DRB1_0101 | 108 | YRRDFAEMSSQLHLT FAEMSSQLH | 0.6686 | 36 | SB Bcl-2 |
| DRB1_0101 | 107 | RYRRDFAEMSSQLHL FAEMSSQLH | 0.6670 | 37 | SB Bcl-2 |
| DRB1_0101 | 218 | KTLLSLALVGACITL LLSLALVGA | 0.6642 | 38 | SB Bcl-2 |
| DRB1_0101 | 109 | RRDFAEMSSQLHLTP FAEMSSQLH | 0.6615 | 39 | SB Bcl-2 |
| DRB1_0101 | 110 | RDFAEMSSQLHLTPF FAEMSSQLH | 0.6572 | 41 | SB Bcl-2 |
| DRB1_0101 | 31 | DAGDVGAAPPGAAPA VGAAPPGAA | 0.6561 | 41 | SB Bcl-2 |
| DRB1_0101 | 32 | AGDVGAAPPGAAPAP VGAAPPGAA | 0.6565 | 41 | SB Bcl-2 |
| DRB1_0101 | 29 | EWDAGDVGAAPPGAA DVGAAPPGA | 0.6512 | 44 | SB Bcl-2 |
| DRB1_0101 | 30 | WDAGDVGAAPPGAAP VGAAPPGAA | 0.6504 | 44 | SB Bcl-2 |
| DRB1_0101 | 33 | GDVGAAPPGAAPAPG VGAAPPGAA | 0.6438 | 47 | SB Bcl-2 |
| DRB1_0101 | 207 | RPLFDFSWLSLKTLL FSWLSLKTL | 0.6332 | 53 | WB Bcl-2 |
| DRB1_0101 | 224 | ALVGACITLGAYLGH LVGACITLG | 0.6316 | 54 | WB Bcl-2 |
| DRB1_0101 | 206 | MRPLFDFSWLSLKTL DFSWLSLKT | 0.6303 | 55 | WB Bcl-2 |
| DRB1_0101 | 225 | LVGACITLGAYLGHK LVGACITLG | 0.6212 | 60 | WB Bcl-2 |
| DRB1_0101 | 13 | EIVMKYIHYKLSQRG MKYIHYKLS | 0.6124 | 66 | WB Bcl-2 |
| DRB1_0101 | 14 | IVMKYIHYKLSQRGY IHYKLSQRG | 0.6114 | 67 | WB Bcl-2 |
| DRB1_0101 | 15 | VMKYIHYKLSQRGYE IHYKLSQRG | 0.6087 | 69 | WB Bcl-2 |
| DRB1_0101 | 16 | MKYIHYKLSQRGYEW IHYKLSQRG | 0.6059 | 71 | WB Bcl-2 |
| DRB1_0101 | 17 | KYIHYKLSQRGYEWD IHYKLSQRG | 0.6042 | 72 | WB Bcl-2 |
| DRB1_0101 | 164 | REMSPLVDNIALWMT LVDNIALWM | 0.5967 | 79 | WB Bcl-2 |
| DRB1_0101 | 165 | EMSPLVDNIALWMTE VDNIALWMT | 0.5914 | 83 | WB Bcl-2 |
| DRB1_0101 | 167 | SPLVDNIALWMTEYL VDNIALWMT | 0.5912 | 83 | WB Bcl-2 |
| DRB1_0101 | 166 | MSPLVDNIALWMTEY VDNIALWMT | 0.5908 | 84 | WB Bcl-2 |
| DRB1_0101 | 63 | RDPVARTSPLQTPAA VARTSPLQT | 0.5908 | 84 | WB Bcl-2 |
| DRB1_0101 | 64 | DPVARTSPLQTPAAP VARTSPLQT | 0.5876 | 87 | WB Bcl-2 |
| DRB1_0101 | 168 | PLVDNIALWMTEYLN VDNIALWMT | 0.5794 | 95 | WB Bcl-2 |
| DRB1_0101 | 196 | DAFVELYGPSMRPLF FVELYGPSM | 0.5684 | 107 | WB Bcl-2 |
| DRB1_0101 | 34 | DVGAAPPGAAPAPGI VGAAPPGAA | 0.5672 | 108 | WB Bcl-2 |
| DRB1_0101 | 62 | SRDPVARTSPLQTPA VARTSPLQT | 0.5669 | 108 | WB Bcl-2 |
| DRB1_0101 | 195 | WDAFVELYGPSMRPL FVELYGPSM | 0.5666 | 109 | WB Bcl-2 |
| DRB1_0101 | 61 | ASRDPVARTSPLQTP VARTSPLQT | 0.5637 | 112 | WB Bcl-2 |
| DRB1_0101 | 86 | LSPVPPVVHLTLRQA LSPVPPVVH | 0.5639 | 112 | WB Bcl-2 |
| DRB1_0101 | 111 | DFAEMSSQLHLTPFT FAEMSSQLH | 0.5615 | 115 | WB Bcl-2 |
| DRB1_0101 | 89 | VPPVVHLTLRQAGDD VVHLTLRQA | 0.5593 | 118 | WB Bcl-2 |
| DRB1_0101 | 87 | SPVPPVVHLTLRQAG VVHLTLRQA | 0.5579 | 119 | WB Bcl-2 |
| DRB1_0101 | 88 | PVPPVVHLTLRQAGD VVHLTLRQA | 0.5581 | 119 | WB Bcl-2 |
| DRB1_0101 | 112 | FAEMSSQLHLTPFTA FAEMSSQLH | 0.5577 | 120 | WB Bcl-2 |
| DRB1_0101 | 35 | VGAAPPGAAPAPGIF VGAAPPGAA | 0.5569 | 121 | WB Bcl-2 |
| DRB1_0101 | 90 | PPVVHLTLRQAGDDF VVHLTLRQA | 0.5563 | 122 | WB Bcl-2 |
| DRB1_0101 | 80 | AAAGPALSPVPPVVH AAAGPALSP | 0.5545 | 124 | WB Bcl-2 |
| DRB1_0101 | 160 | ESVNREMSPLVDNIA VNREMSPLV | 0.5523 | 127 | WB Bcl-2 |
| DRB1_0101 | 60 | AASRDPVARTSPLQT SRDPVARTS | 0.5524 | 127 | WB Bcl-2 |
| DRB1_0101 | 117 | SQLHLTPFTARGRFA LTPFTARGR | 0.5480 | 133 | WB Bcl-2 |
| DRB1_0101 | 115 | MSSQLHLTPFTARGR LHLTPFTAR | 0.5456 | 137 | WB Bcl-2 |
| DRB1_0101 | 116 | SSQLHLTPFTARGRF LTPFTARGR | 0.5418 | 142 | WB Bcl-2 |
| DRB1_0101 | 81 | AAGPALSPVPPVVHL LSPVPPVVH | 0.5390 | 147 | WB Bcl-2 |
| DRB1_0101 | 118 | QLHLTPFTARGRFAT LTPFTARGR | 0.5379 | 148 | WB Bcl-2 |
| DRB1_0101 | 197 | AFVELYGPSMRPLFD LYGPSMRPL | 0.5381 | 148 | WB Bcl-2 |
| DRB1_0101 | 156 | VMCVESVNREMSPLV VMCVESVNR | 0.5366 | 151 | WB Bcl-2 |
| DRB1_0101 | 158 | CVESVNREMSPLVDN VNREMSPLV | 0.5360 | 151 | WB Bcl-2 |
| DRB1_0101 | 159 | VESVNREMSPLVDNI VNREMSPLV | 0.5364 | 151 | WB Bcl-2 |
| DRB1_0101 | 198 | FVELYGPSMRPLFDF LYGPSMRPL | 0.5345 | 154 | WB Bcl-2 |
| DRB1_0101 | 157 | MCVESVNREMSPLVD VNREMSPLV | 0.5315 | 159 | WB Bcl-2 |
| DRB1_0101 | 119 | LHLTPFTARGRFATV LTPFTARGR | 0.5307 | 160 | WB Bcl-2 |
| DRB1_0101 | 82 | AGPALSPVPPVVHLT LSPVPPVVH | 0.5312 | 160 | WB Bcl-2 |
| DRB1_0101 | 83 | GPALSPVPPVVHLTL LSPVPPVVH | 0.5307 | 160 | WB Bcl-2 |
| DRB1_0101 | 148 | VAFFEFGGVMCVESV FEFGGVMCV | 0.5291 | 163 | WB Bcl-2 |
| DRB1_0101 | 149 | AFFEFGGVMCVESVN FEFGGVMCV | 0.5288 | 164 | WB Bcl-2 |
| DRB1_0101 | 46 | PGIFSSQPGHTPHPA FSSQPGHTP | 0.5270 | 167 | WB Bcl-2 |
| DRB1_0101 | 170 | VDNIALWMTEYLNRH VDNIALWMT | 0.5265 | 168 | WB Bcl-2 |
| DRB1_0101 | 43 | APAPGIFSSQPGHTP IFSSQPGHT | 0.5223 | 176 | WB Bcl-2 |
| DRB1_0101 | 84 | PALSPVPPVVHLTLR LSPVPPVVH | 0.5195 | 181 | WB Bcl-2 |
| DRB1_0101 | 147 | IVAFFEFGGVMCVES FEFGGVMCV | 0.5190 | 182 | WB Bcl-2 |
| DRB1_0101 | 65 | PVARTSPLQTPAAPG VARTSPLQT | 0.5190 | 182 | WB Bcl-2 |
| DRB1_0101 | 45 | APGIFSSQPGHTPHP FSSQPGHTP | 0.5186 | 183 | WB Bcl-2 |
| DRB1_0101 | 120 | HLTPFTARGRFATVV LTPFTARGR | 0.5178 | 184 | WB Bcl-2 |
| DRB1_0101 | 121 | LTPFTARGRFATVVE ARGRFATVV | 0.5182 | 184 | WB Bcl-2 |
| DRB1_0101 | 136 | ELFRDGVNWGRIVAF FRDGVNWGR | 0.5154 | 189 | WB Bcl-2 |
| DRB1_0101 | 44 | PAPGIFSSQPGHTPH FSSQPGHTP | 0.5142 | 192 | WB Bcl-2 |
| DRB1_0101 | 138 | FRDGVNWGRIVAFFE VNWGRIVAF | 0.5122 | 196 | WB Bcl-2 |
| DRB1_0101 | 169 | LVDNIALWMTEYLNR VDNIALWMT | 0.5062 | 209 | WB Bcl-2 |
| DRB1_0101 | 18 | YIHYKLSQRGYEWDA IHYKLSQRG | 0.5057 | 210 | WB Bcl-2 |
| DRB1_0101 | 137 | LFRDGVNWGRIVAFF VNWGRIVAF | 0.5023 | 218 | WB Bcl-2 |
| DRB1_0101 | 19 | IHYKLSQRGYEWDAG IHYKLSQRG | 0.5022 | 218 | WB Bcl-2 |
| DRB1_0101 | 47 | GIFSSQPGHTPHPAA FSSQPGHTP | 0.5023 | 218 | WB Bcl-2 |
| DRB1_0101 | 76 | AAPGAAAGPALSPVP AAAGPALSP | 0.5005 | 222 | WB Bcl-2 |
| DRB1_0101 | 139 | RDGVNWGRIVAFFEF VNWGRIVAF | 0.4998 | 224 | WB Bcl-2 |
| DRB1_0101 | 74 | TPAAPGAAAGPALSP GAAAGPALS | 0.4991 | 226 | WB Bcl-2 |
| DRB1_0101 | 194 | GWDAFVELYGPSMRP FVELYGPSM | 0.4987 | 227 | WB Bcl-2 |
| DRB1_0101 | 75 | PAAPGAAAGPALSPV AAAGPALSP | 0.4981 | 228 | WB Bcl-2 |
| DRB1_0101 | 77 | APGAAAGPALSPVPP AAAGPALSP | 0.4980 | 229 | WB Bcl-2 |
| DRB1_0101 | 140 | DGVNWGRIVAFFEFG VNWGRIVAF | 0.4959 | 234 | WB Bcl-2 |
| DRB1_0101 | 105 | SRRYRRDFAEMSSQL YRRDFAEMS | 0.4945 | 237 | WB Bcl-2 |
| DRB1_0101 | 91 | PVVHLTLRQAGDDFS VVHLTLRQA | 0.4935 | 240 | WB Bcl-2 |
| DRB1_0101 | 199 | VELYGPSMRPLFDFS LYGPSMRPL | 0.4895 | 251 | WB Bcl-2 |
| DRB1_0101 | 92 | VVHLTLRQAGDDFSR VVHLTLRQA | 0.4870 | 257 | WB Bcl-2 |
| DRB1_0101 | 104 | FSRRYRRDFAEMSSQ YRRDFAEMS | 0.4851 | 263 | WB Bcl-2 |
| DRB1_0101 | 103 | DFSRRYRRDFAEMSS YRRDFAEMS | 0.4834 | 268 | WB Bcl-2 |
| DRB1_0101 | 102 | DDFSRRYRRDFAEMS RYRRDFAEM | 0.4800 | 278 | WB Bcl-2 |
| DRB1_0101 | 145 | GRIVAFFEFGGVMCV FFEFGGVMC | 0.4796 | 279 | WB Bcl-2 |
| DRB1_0101 | 146 | RIVAFFEFGGVMCVE FEFGGVMCV | 0.4791 | 280 | WB Bcl-2 |
| DRB1_0101 | 78 | PGAAAGPALSPVPPV AAAGPALSP | 0.4771 | 286 | WB Bcl-2 |
| DRB1_0101 | 161 | SVNREMSPLVDNIAL VNREMSPLV | 0.4763 | 289 | WB Bcl-2 |
| DRB1_0101 | 150 | FFEFGGVMCVESVNR FEFGGVMCV | 0.4737 | 297 | WB Bcl-2 |
| DRB1_0101 | 162 | VNREMSPLVDNIALW VNREMSPLV | 0.4734 | 298 | WB Bcl-2 |
| DRB1_0101 | 151 | FEFGGVMCVESVNRE FEFGGVMCV | 0.4731 | 299 | WB Bcl-2 |
| DRB1_0101 | 114 | EMSSQLHLTPFTARG LHLTPFTAR | 0.4711 | 306 | WB Bcl-2 |
| DRB1_0101 | 122 | TPFTARGRFATVVEE ARGRFATVV | 0.4638 | 331 | WB Bcl-2 |
| DRB1_0101 | 73 | QTPAAPGAAAGPALS APGAAAGPA | 0.4635 | 332 | WB Bcl-2 |
| DRB1_0101 | 49 | FSSQPGHTPHPAASR FSSQPGHTP | 0.4615 | 339 | WB Bcl-2 |
| DRB1_0101 | 48 | IFSSQPGHTPHPAAS FSSQPGHTP | 0.4531 | 371 | WB Bcl-2 |
| DRB1_0101 | 36 | GAAPPGAAPAPGIFS PGAAPAPGI | 0.4518 | 376 | WB Bcl-2 |
| DRB1_0101 | 123 | PFTARGRFATVVEEL ARGRFATVV | 0.4516 | 377 | WB Bcl-2 |
| DRB1_0101 | 124 | FTARGRFATVVEELF ARGRFATVV | 0.4490 | 388 | WB Bcl-2 |
| DRB1_0101 | 174 | ALWMTEYLNRHLHTW WMTEYLNRH | 0.4444 | 408 | WB Bcl-2 |
| DRB1_0101 | 85 | ALSPVPPVVHLTLRQ LSPVPPVVH | 0.4436 | 411 | WB Bcl-2 |
| DRB1_0101 | 113 | AEMSSQLHLTPFTAR SQLHLTPFT | 0.4430 | 414 | WB Bcl-2 |
| DRB1_0101 | 171 | DNIALWMTEYLNRHL WMTEYLNRH | 0.4414 | 421 | WB Bcl-2 |
| DRB1_0101 | 193 | GGWDAFVELYGPSMR FVELYGPSM | 0.4396 | 430 | WB Bcl-2 |
| DRB1_0101 | 200 | ELYGPSMRPLFDFSW LYGPSMRPL | 0.4395 | 430 | WB Bcl-2 |
| DRB1_0101 | 37 | AAPPGAAPAPGIFSS AAPAPGIFS | 0.4393 | 431 | WB Bcl-2 |
| DRB1_0101 | 79 | GAAAGPALSPVPPVV AAAGPALSP | 0.4394 | 431 | WB Bcl-2 |
| DRB1_0101 | 172 | NIALWMTEYLNRHLH WMTEYLNRH | 0.4279 | 488 | WB Bcl-2 |
| DRB1_0101 | 28 | YEWDAGDVGAAPPGA WDAGDVGAA | 0.4274 | 490 | WB Bcl-2 |
| DRB1_0101 | 42 | AAPAPGIFSSQPGHT AAPAPGIFS | 0.4268 | 494 | WB Bcl-2 |
| DRB1_0101 | 163 | NREMSPLVDNIALWM MSPLVDNIA | 0.4266 | 495 | WB Bcl-2 |
| DRB1_0401 | 208 | PLFDFSWLSLKTLLS DFSWLSLKT | 0.5448 | 138 | WB Bcl-2 |
| DRB1_0401 | 211 | DFSWLSLKTLLSLAL WLSLKTLLS | 0.5436 | 139 | WB Bcl-2 |
| DRB1_0401 | 212 | FSWLSLKTLLSLALV WLSLKTLLS | 0.5395 | 146 | WB Bcl-2 |
| DRB1_0401 | 209 | LFDFSWLSLKTLLSL WLSLKTLLS | 0.5358 | 152 | WB Bcl-2 |
| DRB1_0401 | 210 | FDFSWLSLKTLLSLA WLSLKTLLS | 0.5305 | 161 | WB Bcl-2 |
| DRB1_0401 | 156 | VMCVESVNREMSPLV MCVESVNRE | 0.4924 | 243 | WB Bcl-2 |
| DRB1_0401 | 158 | CVESVNREMSPLVDN VNREMSPLV | 0.4915 | 245 | WB Bcl-2 |
| DRB1_0401 | 157 | MCVESVNREMSPLVD VNREMSPLV | 0.4907 | 247 | WB Bcl-2 |
| DRB1_0401 | 160 | ESVNREMSPLVDNIA VNREMSPLV | 0.4909 | 247 | WB Bcl-2 |
| DRB1_0401 | 159 | VESVNREMSPLVDNI VNREMSPLV | 0.4870 | 257 | WB Bcl-2 |
| DRB1_0401 | 214 | WLSLKTLLSLALVGA WLSLKTLLS | 0.4662 | 322 | WB Bcl-2 |
| DRB1_0401 | 213 | SWLSLKTLLSLALVG WLSLKTLLS | 0.4661 | 323 | WB Bcl-2 |
| DRB1_0401 | 106 | RRYRRDFAEMSSQLH YRRDFAEMS | 0.4563 | 359 | WB Bcl-2 |
| DRB1_0401 | 170 | VDNIALWMTEYLNRH NIALWMTEY | 0.4319 | 467 | WB Bcl-2 |
| DRB1_0404 | 174 | ALWMTEYLNRHLHTW WMTEYLNRH | 0.5813 | 93 | WB Bcl-2 |
| DRB1_0404 | 170 | VDNIALWMTEYLNRH IALWMTEYL | 0.5418 | 142 | WB Bcl-2 |
| DRB1_0404 | 171 | DNIALWMTEYLNRHL WMTEYLNRH | 0.5422 | 142 | WB Bcl-2 |
| DRB1_0404 | 172 | NIALWMTEYLNRHLH WMTEYLNRH | 0.5371 | 150 | WB Bcl-2 |
| DRB1_0404 | 173 | IALWMTEYLNRHLHT WMTEYLNRH | 0.5341 | 155 | WB Bcl-2 |
| DRB1_0404 | 175 | LWMTEYLNRHLHTWI WMTEYLNRH | 0.5171 | 186 | WB Bcl-2 |
| DRB1_0404 | 115 | MSSQLHLTPFTARGR HLTPFTARG | 0.5121 | 196 | WB Bcl-2 |
| DRB1_0404 | 114 | EMSSQLHLTPFTARG LHLTPFTAR | 0.5118 | 197 | WB Bcl-2 |
| DRB1_0404 | 176 | WMTEYLNRHLHTWIQ WMTEYLNRH | 0.5110 | 199 | WB Bcl-2 |
| DRB1_0404 | 116 | SSQLHLTPFTARGRF HLTPFTARG | 0.5043 | 213 | WB Bcl-2 |
| DRB1_0404 | 117 | SQLHLTPFTARGRFA HLTPFTARG | 0.5004 | 223 | WB Bcl-2 |
| DRB1_0404 | 118 | QLHLTPFTARGRFAT HLTPFTARG | 0.4918 | 244 | WB Bcl-2 |
| DRB1_0404 | 45 | APGIFSSQPGHTPHP FSSQPGHTP | 0.4688 | 313 | WB Bcl-2 |
| DRB1_0404 | 46 | PGIFSSQPGHTPHPA FSSQPGHTP | 0.4665 | 321 | WB Bcl-2 |
| DRB1_0404 | 47 | GIFSSQPGHTPHPAA SQPGHTPHP | 0.4485 | 390 | WB Bcl-2 |
| DRB1_0404 | 109 | RRDFAEMSSQLHLTP FAEMSSQLH | 0.4422 | 418 | WB Bcl-2 |
| DRB1_0404 | 210 | FDFSWLSLKTLLSLA WLSLKTLLS | 0.4405 | 426 | WB Bcl-2 |
| DRB1_0404 | 110 | RDFAEMSSQLHLTPF FAEMSSQLH | 0.4393 | 431 | WB Bcl-2 |
| DRB1_0404 | 211 | DFSWLSLKTLLSLAL WLSLKTLLS | 0.4316 | 469 | WB Bcl-2 |
| DRB1_0404 | 212 | FSWLSLKTLLSLALV WLSLKTLLS | 0.4313 | 470 | WB Bcl-2 |
| DRB1_0405 | 208 | PLFDFSWLSLKTLLS FSWLSLKTL | 0.6517 | 43 | SB Bcl-2 |
| DRB1_0405 | 209 | LFDFSWLSLKTLLSL WLSLKTLLS | 0.6415 | 48 | SB Bcl-2 |
| DRB1_0405 | 210 | FDFSWLSLKTLLSLA WLSLKTLLS | 0.6398 | 49 | SB Bcl-2 |
| DRB1_0405 | 211 | DFSWLSLKTLLSLAL WLSLKTLLS | 0.6392 | 50 | WB Bcl-2 |
| DRB1_0405 | 212 | FSWLSLKTLLSLALV WLSLKTLLS | 0.6381 | 50 | WB Bcl-2 |
| DRB1_0405 | 213 | SWLSLKTLLSLALVG WLSLKTLLS | 0.5584 | 119 | WB Bcl-2 |
| DRB1_0405 | 214 | WLSLKTLLSLALVGA WLSLKTLLS | 0.5575 | 120 | WB Bcl-2 |
| DRB1_0405 | 160 | ESVNREMSPLVDNIA NREMSPLVD | 0.5021 | 219 | WB Bcl-2 |
| DRB1_0405 | 158 | CVESVNREMSPLVDN NREMSPLVD | 0.4974 | 230 | WB Bcl-2 |
| DRB1_0405 | 159 | VESVNREMSPLVDNI NREMSPLVD | 0.4930 | 241 | WB Bcl-2 |
| DRB1_0405 | 170 | VDNIALWMTEYLNRH IALWMTEYL | 0.4903 | 248 | WB Bcl-2 |
| DRB1_0405 | 168 | PLVDNIALWMTEYLN IALWMTEYL | 0.4841 | 266 | WB Bcl-2 |
| DRB1_0405 | 171 | DNIALWMTEYLNRHL IALWMTEYL | 0.4841 | 266 | WB Bcl-2 |
| DRB1_0405 | 169 | LVDNIALWMTEYLNR IALWMTEYL | 0.4812 | 274 | WB Bcl-2 |
| DRB1_0405 | 157 | MCVESVNREMSPLVD VNREMSPLV | 0.4756 | 291 | WB Bcl-2 |
| DRB1_0405 | 167 | SPLVDNIALWMTEYL NIALWMTEY | 0.4744 | 295 | WB Bcl-2 |
| DRB1_0405 | 161 | SVNREMSPLVDNIAL NREMSPLVD | 0.4718 | 303 | WB Bcl-2 |
| DRB1_0405 | 106 | RRYRRDFAEMSSQLH YRRDFAEMS | 0.4486 | 390 | WB Bcl-2 |
| DRB1_0405 | 162 | VNREMSPLVDNIALW NREMSPLVD | 0.4294 | 480 | WB Bcl-2 |
| DRB1_0701 | 83 | GPALSPVPPVVHLTL LSPVPPVVH | 0.5316 | 159 | WB Bcl-2 |
| DRB1_0701 | 82 | AGPALSPVPPVVHLT LSPVPPVVH | 0.5286 | 164 | WB Bcl-2 |
| DRB1_0701 | 81 | AAGPALSPVPPVVHL LSPVPPVVH | 0.5256 | 169 | WB Bcl-2 |
| DRB1_0701 | 84 | PALSPVPPVVHLTLR LSPVPPVVH | 0.5210 | 178 | WB Bcl-2 |
| DRB1_0701 | 80 | AAAGPALSPVPPVVH ALSPVPPVV | 0.5179 | 184 | WB Bcl-2 |
| DRB1_0701 | 85 | ALSPVPPVVHLTLRQ LSPVPPVVH | 0.4370 | 442 | WB Bcl-2 |
| DRB1_0701 | 86 | LSPVPPVVHLTLRQA LSPVPPVVH | 0.4291 | 482 | WB Bcl-2 |
| DRB1_0901 | 196 | DAFVELYGPSMRPLF VELYGPSMR | 0.4599 | 345 | WB Bcl-2 |
| DRB1_0901 | 197 | AFVELYGPSMRPLFD YGPSMRPLF | 0.4582 | 352 | WB Bcl-2 |
| DRB1_0901 | 198 | FVELYGPSMRPLFDF YGPSMRPLF | 0.4429 | 415 | WB Bcl-2 |
| DRB1_0901 | 199 | VELYGPSMRPLFDFS YGPSMRPLF | 0.4428 | 415 | WB Bcl-2 |
| DRB1_1302 | 212 | FSWLSLKTLLSLALV WLSLKTLLS | 0.5351 | 153 | WB Bcl-2 |
| DRB1_1302 | 211 | DFSWLSLKTLLSLAL WLSLKTLLS | 0.5323 | 158 | WB Bcl-2 |
| DRB1_1302 | 209 | LFDFSWLSLKTLLSL WLSLKTLLS | 0.4963 | 233 | WB Bcl-2 |
| DRB1_1302 | 210 | FDFSWLSLKTLLSLA WLSLKTLLS | 0.4951 | 236 | WB Bcl-2 |
| DRB1_1302 | 208 | PLFDFSWLSLKTLLS FSWLSLKTL | 0.4783 | 283 | WB Bcl-2 |
| DRB1_1302 | 213 | SWLSLKTLLSLALVG WLSLKTLLS | 0.4770 | 287 | WB Bcl-2 |
| DRB1_1302 | 214 | WLSLKTLLSLALVGA WLSLKTLLS | 0.4769 | 287 | WB Bcl-2 |
| DRB1_1302 | 196 | DAFVELYGPSMRPLF VELYGPSMR | 0.4640 | 330 | WB Bcl-2 |
| DRB1_1302 | 197 | AFVELYGPSMRPLFD VELYGPSMR | 0.4607 | 342 | WB Bcl-2 |
| DRB1_1302 | 167 | SPLVDNIALWMTEYL VDNIALWMT | 0.4494 | 387 | WB Bcl-2 |
| DRB1_1302 | 168 | PLVDNIALWMTEYLN VDNIALWMT | 0.4385 | 435 | WB Bcl-2 |
| DRB1_1501 | 13 | EIVMKYIHYKLSQRG YIHYKLSQR | 0.6338 | 53 | WB Bcl-2 |
| DRB1_1501 | 14 | IVMKYIHYKLSQRGY YIHYKLSQR | 0.6318 | 54 | WB Bcl-2 |
| DRB1_1501 | 15 | VMKYIHYKLSQRGYE YIHYKLSQR | 0.6170 | 63 | WB Bcl-2 |
| DRB1_1501 | 16 | MKYIHYKLSQRGYEW YIHYKLSQR | 0.6121 | 66 | WB Bcl-2 |
| DRB1_1501 | 12 | REIVMKYIHYKLSQR IVMKYIHYK | 0.6057 | 71 | WB Bcl-2 |
| DRB1_1501 | 17 | KYIHYKLSQRGYEWD YIHYKLSQR | 0.5372 | 150 | WB Bcl-2 |
| DRB1_1501 | 115 | MSSQLHLTPFTARGR LHLTPFTAR | 0.5174 | 185 | WB Bcl-2 |
| DRB1_1501 | 116 | SSQLHLTPFTARGRF LHLTPFTAR | 0.5162 | 188 | WB Bcl-2 |
| DRB1_1501 | 18 | YIHYKLSQRGYEWDA YIHYKLSQR | 0.5136 | 193 | WB Bcl-2 |
| DRB1_1501 | 117 | SQLHLTPFTARGRFA LHLTPFTAR | 0.5054 | 211 | WB Bcl-2 |
| DRB1_1501 | 119 | LHLTPFTARGRFATV LTPFTARGR | 0.4756 | 291 | WB Bcl-2 |
| DRB1_1501 | 135 | EELFRDGVNWGRIVA LFRDGVNWG | 0.4694 | 311 | WB Bcl-2 |
| DRB1_1501 | 212 | FSWLSLKTLLSLALV WLSLKTLLS | 0.4694 | 312 | WB Bcl-2 |
| DRB1_1501 | 211 | DFSWLSLKTLLSLAL WLSLKTLLS | 0.4655 | 325 | WB Bcl-2 |
| DRB1_1501 | 118 | QLHLTPFTARGRFAT LHLTPFTAR | 0.4592 | 348 | WB Bcl-2 |
| DRB1_1501 | 87 | SPVPPVVHLTLRQAG VVHLTLRQA | 0.4553 | 363 | WB Bcl-2 |
| DRB1_1501 | 88 | PVPPVVHLTLRQAGD VVHLTLRQA | 0.4528 | 373 | WB Bcl-2 |
| DRB1_1501 | 214 | WLSLKTLLSLALVGA LKTLLSLAL | 0.4517 | 377 | WB Bcl-2 |
| DRB1_1501 | 209 | LFDFSWLSLKTLLSL WLSLKTLLS | 0.4495 | 386 | WB Bcl-2 |
| DRB1_1501 | 156 | VMCVESVNREMSPLV VMCVESVNR | 0.4490 | 388 | WB Bcl-2 |
| DRB1_1501 | 193 | GGWDAFVELYGPSMR FVELYGPSM | 0.4489 | 389 | WB Bcl-2 |
| DRB1_1501 | 195 | WDAFVELYGPSMRPL VELYGPSMR | 0.4483 | 391 | WB Bcl-2 |
| DRB1_1501 | 196 | DAFVELYGPSMRPLF FVELYGPSM | 0.4482 | 392 | WB Bcl-2 |
| DRB1_1501 | 132 | TVVEELFRDGVNWGR LFRDGVNWG | 0.4470 | 397 | WB Bcl-2 |
| DRB1_1501 | 133 | VVEELFRDGVNWGRI LFRDGVNWG | 0.4467 | 398 | WB Bcl-2 |
| DRB1_1501 | 194 | GWDAFVELYGPSMRP VELYGPSMR | 0.4467 | 398 | WB Bcl-2 |
| DRB1_1501 | 174 | ALWMTEYLNRHLHTW WMTEYLNRH | 0.4463 | 400 | WB Bcl-2 |
| DRB1_1501 | 208 | PLFDFSWLSLKTLLS LFDFSWLSL | 0.4459 | 401 | WB Bcl-2 |
| DRB1_1501 | 172 | NIALWMTEYLNRHLH WMTEYLNRH | 0.4448 | 406 | WB Bcl-2 |
| DRB1_1501 | 173 | IALWMTEYLNRHLHT WMTEYLNRH | 0.4448 | 407 | WB Bcl-2 |
| DRB1_1501 | 134 | VEELFRDGVNWGRIV LFRDGVNWG | 0.4431 | 414 | WB Bcl-2 |
| DRB1_1501 | 171 | DNIALWMTEYLNRHL WMTEYLNRH | 0.4431 | 414 | WB Bcl-2 |
| DRB1_1501 | 89 | VPPVVHLTLRQAGDD VVHLTLRQA | 0.4422 | 418 | WB Bcl-2 |
| DRB1_1501 | 210 | FDFSWLSLKTLLSLA WLSLKTLLS | 0.4399 | 429 | WB Bcl-2 |
| DRB1_1501 | 136 | ELFRDGVNWGRIVAF LFRDGVNWG | 0.4390 | 433 | WB Bcl-2 |
| DRB1_1501 | 86 | LSPVPPVVHLTLRQA PPVVHLTLR | 0.4378 | 438 | WB Bcl-2 |
| DRB1_1501 | 213 | SWLSLKTLLSLALVG LKTLLSLAL | 0.4330 | 461 | WB Bcl-2 |
| DRB1_1501 | 90 | PPVVHLTLRQAGDDF VVHLTLRQA | 0.4313 | 470 | WB Bcl-2 |
| DRB4_0101 | 196 | DAFVELYGPSMRPLF VELYGPSMR | 0.5364 | 151 | WB Bcl-2 |
| DRB4_0101 | 197 | AFVELYGPSMRPLFD VELYGPSMR | 0.5361 | 151 | WB Bcl-2 |
| DRB4_0101 | 195 | WDAFVELYGPSMRPL VELYGPSMR | 0.5323 | 158 | WB Bcl-2 |
| DRB4_0101 | 193 | GGWDAFVELYGPSMR FVELYGPSM | 0.4796 | 279 | WB Bcl-2 |
| DRB4_0101 | 194 | GWDAFVELYGPSMRP VELYGPSMR | 0.4785 | 282 | WB Bcl-2 |
| DRB4_0101 | 198 | FVELYGPSMRPLFDF VELYGPSMR | 0.4761 | 289 | WB Bcl-2 |
| DRB4_0101 | 199 | VELYGPSMRPLFDFS VELYGPSMR | 0.4763 | 289 | WB Bcl-2 |
| DRB4_0101 | 81 | AAGPALSPVPPVVHL LSPVPPVVH | 0.4638 | 331 | WB Bcl-2 |
| DRB4_0101 | 80 | AAAGPALSPVPPVVH ALSPVPPVV | 0.4614 | 339 | WB Bcl-2 |
| DRB4_0101 | 170 | VDNIALWMTEYLNRH IALWMTEYL | 0.4593 | 347 | WB Bcl-2 |
| DRB4_0101 | 83 | GPALSPVPPVVHLTL LSPVPPVVH | 0.4589 | 349 | WB Bcl-2 |
| DRB4_0101 | 82 | AGPALSPVPPVVHLT LSPVPPVVH | 0.4574 | 354 | WB Bcl-2 |
| DRB4_0101 | 84 | PALSPVPPVVHLTLR LSPVPPVVH | 0.4565 | 358 | WB Bcl-2 |
| DRB4_0101 | 171 | DNIALWMTEYLNRHL WMTEYLNRH | 0.4552 | 363 | WB Bcl-2 |
| DRB4_0101 | 172 | NIALWMTEYLNRHLH LWMTEYLNR | 0.4326 | 464 | WB Bcl-2 |
| DRB4_0101 | 173 | IALWMTEYLNRHLHT WMTEYLNRH | 0.4273 | 491 | WB Bcl-2 |
| DRB5_0101 | 16 | MKYIHYKLSQRGYEW YIHYKLSQR | 0.4394 | 431 | WB Bcl-2 |
| DRB5_0101 | 15 | VMKYIHYKLSQRGYE YIHYKLSQR | 0.4386 | 435 | WB Bcl-2 |

[0892] Preferred fragments of Survivin capable of interacting with one or more MHC class I molecules are listed in table F.

TABLE F

Prediction of cancer antigen Survivin specific MHC class 1 peptide
sequences. Prediction of 8-, 9-, 10-, 11-mers using the program
displayed in FIG. 2.
8 mers:

MGAPTLPP; GAPTLPPA; APTLPPAW; PTLPPAWQ; TLPPAWQP; LPPAWQPF;
PPAWQPFL; PAWQPFLK; AWQPFLKD; WQPFLKDH; QPFLKDHR; PFLKDHRI;
FLKDHRIS; LKDHRIST; KDHRISTF; DHRISTFK; HRISTFKN; RISTFKNW; ISTFKNWP;
STFKNWPF; TFKNWPFL; FKNWPFLE; KNWPFLEG; NWPFLEGC; WPFLEGCA;
PFLEGCAC; FLEGCACT; LEGCACTP; EGCACTPE; GCACTPER; CACTPERM;
ACTPERMA; CTPERMAE; TPERMAEA; PERMAEAG; ERMAEAGF; RMAEAGFI;
MAEAGFIH; AEAGFIHC; EAGFIHCP; AGFIHCPT; GFIHCPTE; FIHCPTEN; IHCPTENE;
HCPTENEP; CPTENEPD; PTENEPDL; TENEPDLA; ENEPDLAQ; NEPDLAQC; EPDLAQCF;
PDLAQCFF; DLAQCFFC; LAQCFFCF; AQCFFCFK; QCFFCFKE; CFFCFKEL; FFCFKELE;
FCFKELEG; CFKELEGW; FKELEGWE; KELEGWEP; ELEGWEPD; LEGWEPDD;
EGWEPDDD; GWEPDDDP; WEPDDDPI; EPDDDPIE; PDDDPIEE; DDDPIEEH; DDPIEEHK;
DPIEEHKK; PIEEHKKH; IEEHKKHS; EEHKKHSS; EHKKHSSG; HKKHSSGC; KKHSSGCA;
KHSSGCAF; HSSGCAFL; SSGCAFLS; SGCAFLSV; GCAFLSVK; CAFLSVKK; AFLSVKKQ;
FLSVKKQF; LSVKKQFE; SVKKQFEE; VKKQFEEL; KKQFEELT; KQFEELTL; QFEELTLG;
FEELTLGE; EELTLGEF; ELTLGEFL; LTLGEFLK; TLGEFLKL; LGEFLKLD; GEFLKLDR;
EFLKLDRE; FLKLDRER; LKLDRERA; KLDRERAK; LDRERAKN; DRERAKNK;
RERAKNKI; ERAKNKIA; RAKNKIAK; AKNKIAKE; KNKIAKET; NKIAKETN; KIAKETNN;
IAKETNNK; AKETNNKK; KETNNKKK; ETNNKKKE; TNNKKKEF; NNKKKEFE;
NKKKEFEE; KKKEFEET; KKEFEETA; KEFEETAK; EFEETAKK; FEETAKKV;
EETAKKVR; ETAKKVRR; TAKKVRRA; AKKVRRAI; KKVRRAIE; KVRRAIEQ;
VRRAIEQL; RRAIEQLA; RAIEQLAA; AIEQLAAM; IEQLAAMD; EQLAAMD

9 mers:

MGAPTLPPA; GAPTLPPAW; APTLPPAWQ; PTLPPAWQP; TLPPAWQPF; LPPAWQPFL;
PPAWQPFLK; PAWQPFLKD; AWQPFLKDH; WQPFLKDHR; QPFLKDHRI; PFLKDHRIS;
FLKDHRIST; LKDHRISTF; KDHRISTFK; DHRISTFKN; HRISTFKNW; RISTFKNWP;
ISTFKNWPF; STFKNWPFL; TFKNWPFLE; FKNWPFLEG; KNWPFLEGC; NWPFLEGCA;
WPFLEGCAC; PFLEGCACT; FLEGCACTP; LEGCACTPE; EGCACTPER; GCACTPERM;
CACTPERMA; ACTPERMAE; CTPERMAEA; TPERMAEAG; PERMAEAGF; ERMAEAGFI;
RMAEAGFIH; MAEAGFIHC; AEAGFIHCP; EAGFIHCPT; AGFIHCPTE; GFIHCPTEN;
FIHCPTENE; IHCPTENEP; HCPTENEPD; CPTENEPDL; PIENEPDLA; TENEPDLAQ;
ENEPDLAQC; NEPDLAQCF; EPDLAQCFF; PDLAQCFFC; DLAQCFFCF; LAQCFFCFK;
AQCFFCFKE; QCFFCFKEL; CFFCFKELE; FFCFKELEG; FCFKELEGW; CFKELEGWE;
FKELEGWEP; KELEGWEPD; ELEGWEPDD; LEGWEPDDD; EGWEPDDDP; GWEPDDDPI;
WEPDDDPIE; EPDDDPIEE; PDDDPIEEH; DDDPIEEHK; DDPIEEHKK; DPIEEHKKH;
PIEEHKKHS; IEEHKKHSS; EEHKKHSSG; EHKKHSSGC; HKKHSSGCA; KKHSSGCAF;
KHSSGCAFL; HSSGCAFLS; SSGCAFLSV; SGCAFLSVK; GCAFLSVKK; CAFLSVKKQ;
AFLSVKKQF; FLSVKKQFE; LSVKKQFEE; SVKKQFEEL; VKKQFEELT; KKQFEELTL;
KQFEELTLG; QFEELTLGE; FEELTLGEF; EELTLGEFL; ELTLGEFLK; LTLGEFLKL;
TLGEFLKLD; LGEFLKLDR; GEFLKLDRE; EFLKLDRER; FLKLDRERA; LKLDRERAK;
KLDRERAKN; LDRERAKNK; DRERAKNKI; RERAKNKIA; ERAKNKIAK; RAKNKIAKE;
AKNKIAKET; KNKIAKETN; NKIAKETNN; KIAKETNNK; IAKETNNKK; AKETNNKKK;
KETNNKKKE; ETNNKKKEF; TNNKKKEFE; NNKKKEFEE; NKKKEFEET; KKKEFEETA;
KKEFEETAK; KEFEETAKK; EFEETAKKV; FEETAKKVR; EETAKKVRR; ETAKKVRRA;
TAKKVRRAI; AKKVRRAIE; KKVRRAIEQ; KVRRAIEQL; VRRAIEQLA; RRAIEQLAA;
RAIEQLAAM; AIEQLAAMD;

10 mers:

MGAPTLPPAW; GAPTLPPAWQ; APTLPPAWQP; PTLPPAWQPF; TLPPAWQPFL;
LPPAWQPFLK; PPAWQPFLKD; PAWQPFLKDH; AWQPFLKDHR; WQPFLKDHRI;
QPFLKDHRIS; PFLKDHRIST; FLKDHRISTF; LKDHRISTFK; KDHRISTFKN;
DHRISTFKNW; HRISTFKNWP; RISTFKNWPF; ISTFKNWPFL; STFKNWPFLE;
TFKNWPFLEG; FKNWPFLEGC; KNWPFLEGCA; NWPFLEGCAC; WPFLEGCACT;
PFLEGCACTP; FLEGCACTPE; LEGCACTPER; EGCACTPERM; GCACTPERMA;
CACTPERMAE; ACTPERMAEA; CTPERMAEAG; TPERMAEAGF; PERMAEAGFI;
ERMAEAGFIH; RMAEAGFIHC; MAEAGFIHCP; AEAGFIHCPT; EAGFIHCPTE;
AGFIHCPTEN; GFIHCPTENE; FIHCPTENEP; IHCPTENEPD; HCPTENEPDL;
CPTENEPDLA; PTENEPDLAQ; TENEPDLAQC; ENEPDLAQCF; NEPDLAQCFF;
EPDLAQCFFC; PDLAQCFFCF; DLAQCFFCFK; LAQCFFCFKE; AQCFFCFKEL;
QCFFCFKELE; CFFCFKELEG; FFCFKELEGW; FCFKELEGWE; CFKELEGWEP;
FKELEGWEPD; KELEGWEPDD; ELEGWEPDDD; LEGWEPDDDP; EGWEPDDDPI;
GWEPDDDPIE; WEPDDDPIEE; EPDDDPIEEH; PDDDPIEEHK; DDDPIEEHKK;
DDPIEEHKKH; DPIEEHKKHS; PIEEHKKHSS; IEEHKKHSSG; EEHKKHSSGC;
EHKKHSSGCA; HKKHSSGCAF; KKHSSGCAFL; KHSSGCAFLS; HSSGCAFLSV;
SSGCAFLSVK; SGCAFLSVKK; GCAFLSVKKQ; CAFLSVKKQF; AFLSVKKQFE;
FLSVKKQFEE; LSVKKQFEEL; SVKKQFEELT; VKKQFEELTL; KKQFEELTLG;
KQFEELTLGE; QFEELTLGEF; FEELTLGEFL; EELTLGEFLK; ELTLGEFLKL;
LTLGEFLKLD; TLGEFLKLDR; LGEFLKLDRE; GEFLKLDRER; EFLKLDRERA;
FLKLDRERAK; LKLDRERAKN; KLDRERAKNK; LDRERAKNKI; DRERAKNKIA;
RERAKNKIAK; ERAKNKIAKE; RAKNKIAKET; AKNKIAKETN; KNKIAKETNN;
NKIAKETNNK; KIAKETNNKK; IAKETNNKKK; AKETNNKKKE; KETNNKKKEF;
ETNNKKKEFE; TNNKKKEFEE; NNKKKEFEET; NKKKEFEETA; KKKEFEETAK;
KKEFEETAKK; KEFEETAKKV; EFEETAKKVR; FEETAKKVRR; EETAKKVRRA;
ETAKKVRRAI; TAKKVRRAIE; AKKVRRAIEQ; KKVRRAIEQL; KVRRAIEQLA;
VRRAIEQLAA; RRAIEQLAAM; RAIEQLAAMD;

11 mers:

MGAPTLPPAWQ; GAPTLPPAWQP; APTLPPAWQPF; PTLPPAWQPFL; TLPPAWQPFLK;
LPPAWQPFLKD; PPAWQPFLKDH; PAWQPFLKDHR; AWQPFLKDHRI; WQPFLKDHRIS;
QPFLKDHRIST; PFLKDHRISTF; FLKDHRISTFK; LKDHRISTFKN; KDHRISTFKNW;
DHRISTFKNWP; HRISTFKNWPF; RISTFKNWPFL; ISTFKNWPFLE; STFKNWPFLEG;
TFKNWPFLEGC; FKNWPFLEGCA; KNWPFLEGCAC; NWPFLEGCACT; WPFLEGCACTP;
PFLEGCACTPE; FLEGCACTPER; LEGCACTPERM; EGCACTPERMA; GCACTPERMAE;
CACTPERMAEA; ACTPERMAEAG; CTPERMAEAGF; TPERMAEAGFI; PERMAEAGFIH;
ERMAEAGFIHC; RMAEAGFIHCP; MAEAGFIHCPT; AEAGFIHCPTE; EAGFIHCPTEN;
AGFIHCPTENE; GFIHCPTENEP; FIHCPTENEPD; IHCPTENEPDL; HCPTENEPDLA;
CPTENEPDLAQ; PTENEPDLAQC; TENEPDLAQCF; ENEPDLAQCFF; NEPDLAQCFFC;
EPDLAQCFFCF; PDLAQCFFCFK; DLAQCFFCFKE; LAQCFFCFKEL; AQCFFCFKELE;
QCFFCFKELEG; CFFCFKELEGW; FFCFKELEGWE; FCFKELEGWEP; CFKELEGWEPD;
FKELEGWEPDD; KELEGWEPDDD; ELEGWEPDDDP; LEGWEPDDDPI; EGWEPDDDPIE;
GWEPDDDPIEE; WEPDDDPIEEH; EPDDDPIEEHK; PDDDPIEEHKK; DDDPIEEHKKH;
DDPIEEHKKHS; DPIEEHKKHSS; PIEEHKKHSSG; IEEHKKHSSGC; EEHKKHSSGCA;
EHKKHSSGCAF; HKKHSSGCAFL; KKHSSGCAFLS; KHSSGCAFLSV; HSSGCAFLSVK;
SSGCAFLSVKK; SGCAFLSVKKQ; GCAFLSVKKQF; CAFLSVKKQFE; AFLSVKKQFEE;
FLSVKKQFEEL; LSVKKQFEELT; SVKKQFEELTL; VKKQFEELTLG; KKQFEELTLGE;
KQFEELTLGEF; QFEELTLGEFL; FEELTLGEFLK; EELTLGEFLKL; ELTLGEFLKLD;
LTLGEFLKLDR; TLGEFLKLDRE; LGEFLKLDRER; GEFLKLDRERA; EFLKLDRERAK;
FLKLDRERAKN; LKLDRERAKNK; KLDRERAKNKI; LDRERAKNKIA; DRERAKNKIAK;
RERAKNKIAKE; ERAKNKIAKET; RAKNKIAKETN; AKNKIAKETNN; KNKIAKETNNK;
NKIAKETNNKK; KIAKETNNKKK; IAKETNNKKKE; AKETNNKKKEF; KETNNKKKEFE;
ETNNKKKEFEE; TNNKKKEFEET; NNKKKEFEETA; NKKKEFEETAK; KKKEFEETAKK;
KKEFEETAKKV; KEFEETAKKVR; EFEETAKKVRR; FEETAKKVRRA; EETAKKVRRAI;
ETAKKVRRAIE; TAKKVRRAIEQ; AKKVRRAIEQL; KKVRRAIEQLA; KVRRAIEQLAA;
VRRAIEQLAAM; RRAIEQLAAMD

[0893] Preferred fragments of Mcl-1 capable of interacting with one or more MHC class 2 molecules are listed in table G.

TABLE G

Prediction of cancer antigen Mcl-1 specific MHC
class 2 peptide sequences. Prediction of 13-, 14-,
15-, 16-mers using the program displayed in FIG. 2.
13 mers:

MFGLKRNAVIGLN; FGLKRNAVIGLNL; GLKRNAVIGLNLY; LKRNAVIGLNLYC;
KRNAVIGLNLYCG; RNAVIGLNLYCGG; NAVIGLNLYCGGA; AVIGLNLYCGGAG;
VIGLNLYCGGAGL; IGLNLYCGGAGLG; GLNLYCGGAGLGA; LNLYCGGAGLGAG;
NLYCGGAGLGAGS; LYCGGAGLGAGSG; YCGGAGLGAGSGG; CGGAGLGAGSGGA;
GGAGLGAGSGGAT; GAGLGAGSGGATR; AGLGAGSGGATRP; GLGAGSGGATRPG;
LGAGSGGATRPGG; GAGSGGATRPGGR; AGSGGATRPGGRL; GSGGATRPGGRLL;
SGGATRPGGRLLA; GGATRPGGRLLAT; GATRPGGRLLATE; ATRPGGRLLATEK;
TRPGGRLLATEKE; RPGGRLLATEKEA; PGGRLLATEKEAS; GGRLLATEKEASA;
GRLLATEKEASAR; RLLATEKEASARR; LLATEKEASARRE; LATEKEASARREI;
ATEKEASARREIG; TEKEASARREIGG; EKEASARREIGGG; KEASARREIGGGE;
EASARREIGGGEA; ASARREIGGGEAG; SARREIGGGEAGA; ARREIGGGEAGAV;
RREIGGGEAGAVI; REIGGGEAGAVIG; EIGGGEAGAVIGG; IGGGEAGAVIGGS;
GGGEAGAVIGGSA; GGEAGAVIGGSAG; GEAGAVIGGSAGA; EAGAVIGGSAGAS;
AGAVIGGSAGASP; GAVIGGSAGASPP; AVIGGSAGASPPS; VIGGSAGASPPST;
IGGSAGASPPSTL; GGSAGASPPSTLT; GSAGASPPSTLTP; SAGASPPSTLTPD;
AGASPPSTLTPDS; GASPPSTLTPDSR; ASPPSTLTPDSRR; SPPSTLTPDSRRV;
PPSTLTPDSRRVA; PSTLTPDSRRVAR; STLTPDSRRVARP; TLTPDSRRVARPP;
LTPDSRRVARPPP; TPDSRRVARPPPI; PDSRRVARPPPIG; DSRRVARPPPIGA;
SRRVARPPPIGAE; RRVARPPPIGAEV; RVARPPPIGAEVP; VARPPPIGAEVPD;
ARPPPIGAEVPDV; RPPPIGAEVPDVT; PPPIGAEVPDVTA; PPIGAEVPDVTAT;
PIGAEVPDVTATP; IGAEVPDVTATPA; GAEVPDVTATPAR; AEVPDVTATPARL;
EVPDVTATPARLL; VPDVTATPARLLF; PDVTATPARLLFF; DVTATPARLLFFA;
VTATPARLLFFAP; TATPARLLFFAPT; ATPARLLFFAPTR; TPARLLFFAPTRR;
PARLLFFAPTRRA; ARLLFFAPTRRAA; RLLFFAPTRRAAP; LLFFAPTRRAAPL;
LFFAPTRRAAPLE; FFAPTRRAAPLEE; FAPTRRAAPLEEM; APTRRAAPLEEME;
PTRRAAPLEEMEA; TRRAAPLEEMEAP; RRAAPLEEMEAPA; RAAPLEEMEAPAA;
AAPLEEMEAPAAD; APLEEMEAPAADA; PLEEMEAPAADAI; LEEMEAPAADAIM;
EEMEAPAADAIMS; EMEAPAADAIMSP; MEAPAADAIMSPE; EAPAADAIMSPEE;
APAADAIMSPEEE; PAADAIMSPEEEL; AADAIMSPEEELD; ADAIMSPEEELDG;
DAIMSPEEELDGY; AIMSPEEELDGYE; IMSPEEELDGYEP; MSPEEELDGYEPE;
SPEEELDGYEPEP; PEEELDGYEPEPL; EEELDGYEPEPLG; EELDGYEPEPLGK;
ELDGYEPEPLGKR; LDGYEPEPLGKRP; DGYEPEPLGKRPA; GYEPEPLGKRPAV;
YEPEPLGKRPAVL; EPEPLGKRPAVLP; PEPLGKRPAVLPL; EPLGKRPAVLPLL;
PLGKRPAVLPLLE; LGKRPAVLPLLEL; GKRPAVLPLLELV; KRPAVLPLLELVG;
RPAVLPLLELVGE; PAVLPLLELVGES; AVLPLLELVGESG; VLPLLELVGESGN;
LPLLELVGESGNN; PLLELVGESGNNT; LLELVGESGNNTS; LELVGESGNNTST;
ELVGESGNNTSTD; LVGESGNNTSTDG; VGESGNNTSTDGS; GESGNNTSTDGSL;
ESGNNTSTDGSLP; SGNNTSTDGSLPS; GNNTSTDGSLPST; NNTSTDGSLPSTP;
NTSTDGSLPSTPP; TSTDGSLPSTPPP; STDGSLPSTPPPA; TDGSLPSTPPPAE;
DGSLPSTPPPAEE; GSLPSTPPPAEEE; SLPSTPPPAEEEE; LPSTPPPAEEEED;
PSTPPPAEEEEDD; STPPPAEEEEDDL; TPPPAEEEEDDLY; PPPAEEEEDDLYR;
PPAEEEEDDLYRQ; PAEEEEDDLYRQS; AEEEEDDLYRQSL; EEEEDDLYRQSLE;
EEEDDLYRQSLEI; EEDDLYRQSLEII; EDDLYRQSLEIIS; DDLYRQSLEIISR;
DLYRQSLEIISRY; LYRQSLEIISRYL; YRQSLEIISRYLR; RQSLEIISRYLRE;
QSLEIISRYLREQ; SLEIISRYLREQA; LEIISRYLREQAT; EIISRYLREQATG;
IISRYLREQATGA; ISRYLREQATGAK; SRYLREQATGAKD; RYLREQATGAKDT;
YLREQATGAKDTK; LREQATGAKDTKP; REQATGAKDTKPM; EQATGAKDTKPMG;
QATGAKDTKPMGR; ATGAKDTKPMGRS; TGAKDTKPMGRSG; GAKDTKPMGRSGA;
AKDTKPMGRSGAT; KDTKPMGRSGATS; DTKPMGRSGATSR; TKPMGRSGATSRK;
KPMGRSGATSRKA; PMGRSGATSRKAL; MGRSGATSRKALE; GRSGATSRKALET;
RSGATSRKALETL; SGATSRKALETLR; GATSRKALETLRR; ATSRKALETLRRV;
TSRKALETLRRVG; SRKALETLRRVGD; RKALETLRRVGDG; KALETLRRVGDGV;
ALETLRRVGDGVQ; LETLRRVGDGVQR; ETLRRVGDGVQRN; TLRRVGDGVQRNH;
LRRVGDGVQRNHE; RRVGDGVQRNHET; RVGDGVQRNHETA; VGDGVQRNHETAF;
GDGVQRNHETAFQ; DGVQRNHETAFQG; GVQRNHETAFQGM; VQRNHETAFQGML;
QRNHETAFQGMLR; RNHETAFQGMLRK; NHETAFQGMLRKL; HETAFQGMLRKLD;
ETAFQGMLRKLDI; TAFQGMLRKLDIK; AFQGMLRKLDIKN; FQGMLRKLDIKNE;
QGMLRKLDIKNED; GMLRKLDIKNEDD; MLRKLDIKNEDDV; LRKLDIKNEDDVK;
RKLDIKNEDDVKS; KLDIKNEDDVKSL; LDIKNEDDVKSLS; DIKNEDDVKSLSR;
IKNEDDVKSLSRV; KNEDDVKSLSRVM; NEDDVKSLSRVMI; EDDVKSLSRVMIH;
DDVKSLSRVMIHV; DVKSLSRVMIHVF; VKSLSRVMIHVFS; KSLSRVMIHVFSD;
SLSRVMIHVFSDG; LSRVMIHVFSDGV; SRVMIHVFSDGVT; RVMIHVFSDGVTN;
VMIHVFSDGVTNW; MIHVFSDGVTNWG; IHVFSDGVTNWGR; HVFSDGVTNWGRI;
VFSDGVTNWGRIV; FSDGVTNWGRIVT; SDGVTNWGRIVTL; DGVTNWGRIVTLI;
GVTNWGRIVTLIS; VTNWGRIVTLISF; TNWGRIVTLISFG; NWGRIVTLISFGA;
WGRIVTLISFGAF; GRIVTLISFGAFV; RIVTLISFGAFVA; IVTLISFGAFVAK;
VTLISFGAFVAKH; TLISFGAFVAKHL; LISFGAFVAKHLK; ISFGAFVAKHLKT;
SFGAFVAKHLKTI; FGAFVAKHLKTIN; GAFVAKHLKTINQ; AFVAKHLKTINQE;
FVAKHLKTINQES; VAKHLKTINQESC; AKHLKTINQESCI; KHLKTINQESCIE;
HLKTINQESCIEP; LKTINQESCIEPL; KTINQESCIEPLA; TINQESCIEPLAE;
INQESCIEPLAES; NQESCIEPLAESI; QESCIEPLAESIT; ESCIEPLAESITD;
SCIEPLAESITDV; CIEPLAESITDVL; IEPLAESITDVLV; EPLAESITDVLVR;
PLAESITDVLVRT; LAESITDVLVRTK; AESITDVLVRTKR; ESITDVLVRTKRD;
SITDVLVRTKRDW; ITDVLVRTKRDWL; TDVLVRTKRDWLV; DVLVRTKRDWLVK;
VLVRTKRDWLVKQ; LVRTKRDWLVKQR; VRTKRDWLVKQRG;
RTKRDWLVKQRGW; TKRDWLVKQRGWD; KRDWLVKQRGWDG;
RDWLVKQRGWDGF; DWLVKQRGWDGFV; WLVKQRGWDGFVE;
LVKQRGWDGFVEF; VKQRGWDGFVEFF; KQRGWDGFVEFFH; QRGWDGFVEFFHV;
RGWDGFVEFFHVE; GWDGFVEFFHVED; WDGFVEFFHVEDL; DGFVEFFHVEDLE;
GFVEFFHVEDLEG; FVEFFHVEDLEGG; VEFFHVEDLEGGI; EFFHVEDLEGGIR;
FFHVEDLEGGIRN; FHVEDLEGGIRNV; HVEDLEGGIRNVL; VEDLEGGIRNVLL;
EDLEGGIRNVLLA; DLEGGIRNVLLAF; LEGGIRNVLLAFA; EGGIRNVLLAFAG;
GGIRNVLLAFAGV; GIRNVLLAFAGVA; IRNVLLAFAGVAG; RNVLLAFAGVAGV;
NVLLAFAGVAGVG; VLLAFAGVAGVGA; LLAFAGVAGVGAG; LAFAGVAGVGAGL;
AFAGVAGVGAGLA; FAGVAGVGAGLAY; AGVAGVGAGLAYL; GVAGVGAGLAYLI;
VAGVGAGLAYLIR

14 mers:

MFGLKRNAVIGLNL; FGLKRNAVIGLNLY; GLKRNAVIGLNLYC;
LKRNAVIGLNLYCG; KRNAVIGLNLYCGG; RNAVIGLNLYCGGA;
NAVIGLNLYCGGAG; AVIGLNLYCGGAGL; VIGLNLYCGGAGLG;
IGLNLYCGGAGLGA; GLNLYCGGAGLGAG; LNLYCGGAGLGAGS;
NLYCGGAGLGAGSG; LYCGGAGLGAGSGG; YCGGAGLGAGSGGA;
CGGAGLGAGSGGAT; GGAGLGAGSGGATR; GAGLGAGSGGATRP;
AGLGAGSGGATRPG; GLGAGSGGATRPGG; LGAGSGGATRPGGR;
GAGSGGATRPGGRL; AGSGGATRPGGRLL; GSGGATRPGGRLLA;
SGGATRPGGRLLAT; GGATRPGGRLLATE; GATRPGGRLLATEK;
ATRPGGRLLATEKE; TRPGGRLLATEKEA; RPGGRLLATEKEAS;
PGGRLLATEKEASA; GGRLLATEKEASAR; GRLLATEKEASARR;
RLLATEKEASARRE; LLATEKEASARREI; LATEKEASARREIG; ATEKEASARREIGG;
TEKEASARREIGGG; EKEASARREIGGGE; KEASARREIGGGEA; EASARREIGGGEAG;
ASARREIGGGEAGA; SARREIGGGEAGAV; ARREIGGGEAGAVI;
RREIGGGEAGAVIG; REIGGGEAGAVIGG; EIGGGEAGAVIGGS; IGGGEAGAVIGGSA;
GGGEAGAVIGGSAG; GGEAGAVIGGSAGA; GEAGAVIGGSAGAS;
EAGAVIGGSAGASP; AGAVIGGSAGASPP; GAVIGGSAGASPPS; AVIGGSAGASPPST;
VIGGSAGASPPSTL; IGGSAGASPPSTLT; GGSAGASPPSTLTP; GSAGASPPSTLTPD;
SAGASPPSTLTPDS; AGASPPSTLTPDSR; GASPPSTLTPDSRR; ASPPSTLTPDSRRV;
SPPSTLTPDSRRVA; PPSTLTPDSRRVAR; PSTLTPDSRRVARP; STLTPDSRRVARPP;
TLTPDSRRVARPPP; LTPDSRRVARPPPI; TPDSRRVARPPPIG; PDSRRVARPPPIGA;
DSRRVARPPPIGAE; SRRVARPPPIGAEV; RRVARPPPIGAEVP; RVARPPPIGAEVPD;
VARPPPIGAEVPDV; ARPPPIGAEVPDVT; RPPPIGAEVPDVTA; PPPIGAEVPDVTAT;
PPIGAEVPDVTATP; PIGAEVPDVTATPA; IGAEVPDVTATPAR; GAEVPDVTATPARL;
AEVPDVTATPARLL; EVPDVTATPARLLF; VPDVTATPARLLFF; PDVTATPARLLFFA;
DVTATPARLLFFAP; VTATPARLLFFAPT; TATPARLLFFAPTR; ATPARLLFFAPTRR;
TPARLLFFAPTRRA; PARLLFFAPTRRAA; ARLLFFAPTRRAAP; RLLFFAPTRRAAPL;
LLFFAPTRRAAPLE; LFFAPTRRAAPLEE; FFAPTRRAAPLEEM; FAPTRRAAPLEEME;
APTRRAAPLEEMEA; PTRRAAPLEEMEAP; TRRAAPLEEMEAPA;
RRAAPLEEMEAPAA; RAAPLEEMEAPAAD; AAPLEEMEAPAADA;
APLEEMEAPAADAI; PLEEMEAPAADAIM; LEEMEAPAADAIMS;
EEMEAPAADAIMSP; EMEAPAADAIMSPE; MEAPAADAIMSPEE;
EAPAADAIMSPEEE; APAADAIMSPEEEL; PAADAIMSPEEELD; AADAIMSPEEELDG;
ADAIMSPEEELDGY; DAIMSPEEELDGYE; AIMSPEEELDGYEP; IMSPEEELDGYEPE;
MSPEEELDGYEPEP; SPEEELDGYEPEPL; PEEELDGYEPEPLG; EEELDGYEPEPLGK;
EELDGYEPEPLGKR; ELDGYEPEPLGKRP; LDGYEPEPLGKRPA;
DGYEPEPLGKRPAV; GYEPEPLGKRPAVL; YEPEPLGKRPAVLP; EPEPLGKRPAVLPL;
PEPLGKRPAVLPLL; EPLGKRPAVLPLLE; PLGKRPAVLPLLEL; LGKRPAVLPLLELV;
GKRPAVLPLLELVG; KRPAVLPLLELVGE; RPAVLPLLELVGES; PAVLPLLELVGESG;
AVLPLLELVGESGN; VLPLLELVGESGNN; LPLLELVGESGNNT; PLLELVGESGNNTS;
LLELVGESGNNTST; LELVGESGNNTSTD; ELVGESGNNTSTDG;
LVGESGNNTSTDGS; VGESGNNTSTDGSL; GESGNNTSTDGSLP; ESGNNTSTDGSLPS;
SGNNTSTDGSLPST; GNNTSTDGSLPSTP; NNTSTDGSLPSTPP; NTSTDGSLPSTPPP;
TSTDGSLPSTPPPA; STDGSLPSTPPPAE; TDGSLPSTPPPAEE; DGSLPSTPPPAEEE;
GSLPSTPPPAEEEE; SLPSTPPPAEEEED; LPSTPPPAEEEEDD; PSTPPPAEEEEDDL;
STPPPAEEEEDDLY; TPPPAEEEEDDLYR; PPPAEEEEDDLYRQ; PPAEEEEDDLYRQS;
PAEEEEDDLYRQSL; AEEEEDDLYRQSLE; EEEEDDLYRQSLEI; EEEDDLYRQSLEII;
EEDDLYRQSLEIIS; EDDLYRQSLEIISR; DDLYRQSLEIISRY; DLYRQSLEIISRYL;
LYRQSLEIISRYLR; YRQSLEIISRYLRE; RQSLEIISRYLREQ; QSLEIISRYLREQA;
SLEIISRYLREQAT; LEIISRYLREQATG; EIISRYLREQATGA; IISRYLREQATGAK;
ISRYLREQATGAKD; SRYLREQATGAKDT; RYLREQATGAKDTK;
YLREQATGAKDTKP; LREQATGAKDTKPM; REQATGAKDTKPMG;
EQATGAKDTKPMGR; QATGAKDTKPMGRS; ATGAKDTKPMGRSG;
TGAKDTKPMGRSGA; GAKDTKPMGRSGAT; AKDTKPMGRSGATS;
KDTKPMGRSGATSR; DTKPMGRSGATSRK; TKPMGRSGATSRKA;
KPMGRSGATSRKAL; PMGRSGATSRKALE; MGRSGATSRKALET;
GRSGATSRKALETL; RSGATSRKALETLR; SGATSRKALETLRR;
GATSRKALETLRRV; ATSRKALETLRRVG; TSRKALETLRRVGD;
SRKALETLRRVGDG; RKALETLRRVGDGV; KALETLRRVGDGVQ;
ALETLRRVGDGVQR; LETLRRVGDGVQRN; ETLRRVGDGVQRNH;
TLRRVGDGVQRNHE; LRRVGDGVQRNHET; RRVGDGVQRNHETA;
RVGDGVQRNHETAF; VGDGVQRNHETAFQ; GDGVQRNHETAFQG;
DGVQRNHETAFQGM; GVQRNHETAFQGML; VQRNHETAFQGMLR;
QRNHETAFQGMLRK; RNHETAFQGMLRKL; NHETAFQGMLRKLD;
HETAFQGMLRKLDI; ETAFQGMLRKLDIK; TAFQGMLRKLDIKN;
AFQGMLRKLDIKNE; FQGMLRKLDIKNED; QGMLRKLDIKNEDD;
GMLRKLDIKNEDDV; MLRKLDIKNEDDVK; LRKLDIKNEDDVKS;
RKLDIKNEDDVKSL; KLDIKNEDDVKSLS; LDIKNEDDVKSLSR;
DIKNEDDVKSLSRV; IKNEDDVKSLSRVM; KNEDDVKSLSRVMI;
NEDDVKSLSRVMIH; EDDVKSLSRVMIHV; DDVKSLSRVMIHVF;
DVKSLSRVMIHVFS; VKSLSRVMIHVFSD; KSLSRVMIHVFSDG; SLSRVMIHVFSDGV;
LSRVMIHVFSDGVT; SRVMIHVFSDGVTN; RVMIHVFSDGVTNW;
VMIHVFSDGVTNWG; MIHVFSDGVTNWGR; IHVFSDGVTNWGRI;
HVFSDGVTNWGRIV; VFSDGVTNWGRIVT; FSDGVTNWGRIVTL;
SDGVTNWGRIVTLI; DGVTNWGRIVTLIS; GVTNWGRIVTLISF; VTNWGRIVTLISFG;
TNWGRIVTLISFGA; NWGRIVTLISFGAF; WGRIVTLISFGAFV; GRIVTLISFGAFVA;
RIVTLISFGAFVAK; IVTLISFGAFVAKH; VTLISFGAFVAKHL; TLISFGAFVAKHLK;
LISFGAFVAKHLKT; ISFGAFVAKHLKTI; SFGAFVAKHLKTIN; FGAFVAKHLKTINQ;
GAFVAKHLKTINQE; AFVAKHLKTINQES; FVAKHLKTINQESC; VAKHLKTINQESCI;
AKHLKTINQESCIE; KHLKTINQESCIEP; HLKTINQESCIEPL; LKTINQESCIEPLA;
KTINQESCIEPLAE; TINQESCIEPLAES; INQESCIEPLAESI; NQESCIEPLAESIT;
QESCIEPLAESITD; ESCIEPLAESITDV; SCIEPLAESITDVL; CIEPLAESITDVLV;
IEPLAESITDVLVR; EPLAESITDVLVRT; PLAESITDVLVRTK; LAESITDVLVRTKR;
AESITDVLVRTKRD; ESITDVLVRTKRDW; SITDVLVRTKRDWL;
ITDVLVRTKRDWLV; TDVLVRTKRDWLVK; DVLVRTKRDWLVKQ;
VLVRTKRDWLVKQR; LVRTKRDWLVKQRG; VRTKRDWLVKQRGW;
RTKRDWLVKQRGWD; TKRDWLVKQRGWDG; KRDWLVKQRGWDGF;
RDWLVKQRGWDGFV; DWLVKQRGWDGFVE; WLVKQRGWDGFVEF;
LVKQRGWDGFVEFF; VKQRGWDGFVEFFH; KQRGWDGFVEFFHV;
QRGWDGFVEFFHVE; RGWDGFVEFFHVED; GWDGFVEFFHVEDL;
WDGFVEFFHVEDLE; DGFVEFFHVEDLEG; GFVEFFHVEDLEGG;
FVEFFHVEDLEGGI; VEFFHVEDLEGGIR; EFFHVEDLEGGIRN; FFHVEDLEGGIRNV;
FHVEDLEGGIRNVL; HVEDLEGGIRNVLL; VEDLEGGIRNVLLA; EDLEGGIRNVLLAF;
DLEGGIRNVLLAFA; LEGGIRNVLLAFAG; EGGIRNVLLAFAGV;
GGIRNVLLAFAGVA; GIRNVLLAFAGVAG; IRNVLLAFAGVAGV;
RNVLLAFAGVAGVG; NVLLAFAGVAGVGA; VLLAFAGVAGVGAG;
LLAFAGVAGVGAGL; LAFAGVAGVGAGLA; AFAGVAGVGAGLAY;
FAGVAGVGAGLAYL; AGVAGVGAGLAYLI; GVAGVGAGLAYLIR

15 mers:

MFGLKRNAVIGLNLY; FGLKRNAVIGLNLYC; GLKRNAVIGLNLYCG;
LKRNAVIGLNLYCGG; KRNAVIGLNLYCGGA; RNAVIGLNLYCGGAG;
NAVIGLNLYCGGAGL; AVIGLNLYCGGAGLG; VIGLNLYCGGAGLGA;
IGLNLYCGGAGLGAG; GLNLYCGGAGLGAGS; LNLYCGGAGLGAGSG;
NLYCGGAGLGAGSGG; LYCGGAGLGAGSGGA; YCGGAGLGAGSGGAT;
CGGAGLGAGSGGATR; GGAGLGAGSGGATRP; GAGLGAGSGGATRPG;
AGLGAGSGGATRPGG; GLGAGSGGATRPGGR; LGAGSGGATRPGGRL;
GAGSGGATRPGGRLL; AGSGGATRPGGRLLA; GSGGATRPGGRLLAT;
SGGATRPGGRLLATE; GGATRPGGRLLATEK; GATRPGGRLLATEKE;
ATRPGGRLLATEKEA; TRPGGRLLATEKEAS; RPGGRLLATEKEASA;
PGGRLLATEKEASAR; GGRLLATEKEASARR; GRLLATEKEASARRE;
RLLATEKEASARREI; LLATEKEASARREIG; LATEKEASARREIGG;
ATEKEASARREIGGG; TEKEASARREIGGGE; EKEASARREIGGGEA;
KEASARREIGGGEAG; EASARREIGGGEAGA; ASARREIGGGEAGAV;
SARREIGGGEAGAVI; ARREIGGGEAGAVIG; RREIGGGEAGAVIGG;
REIGGGEAGAVIGGS; EIGGGEAGAVIGGSA; IGGGEAGAVIGGSAG;
GGGEAGAVIGGSAGA; GGEAGAVIGGSAGAS; GEAGAVIGGSAGASP;
EAGAVIGGSAGASPP; AGAVIGGSAGASPPS; GAVIGGSAGASPPST;
AVIGGSAGASPPSTL; VIGGSAGASPPSTLT; IGGSAGASPPSTLTP;
GGSAGASPPSTLTPD; GSAGASPPSTLTPDS; SAGASPPSTLTPDSR;
AGASPPSTLTPDSRR; GASPPSTLTPDSRRV; ASPPSTLTPDSRRVA;
SPPSTLTPDSRRVAR; PPSTLTPDSRRVARP; PSTLTPDSRRVARPP;
STLTPDSRRVARPPP; TLTPDSRRVARPPPI; LTPDSRRVARPPPIG;
TPDSRRVARPPPIGA; PDSRRVARPPPIGAE; DSRRVARPPPIGAEV;
SRRVARPPPIGAEVP; RRVARPPPIGAEVPD; RVARPPPIGAEVPDV;
VARPPPIGAEVPDVT; ARPPPIGAEVPDVTA; RPPPIGAEVPDVTAT;
PPPIGAEVPDVTATP; PPIGAEVPDVTATPA; PIGAEVPDVTATPAR;
IGAEVPDVTATPARL; GAEVPDVTATPARLL; AEVPDVTATPARLLF;
EVPDVTATPARLLFF; VPDVTATPARLLFFA; PDVTATPARLLFFAP;
DVTATPARLLFFAPT; VTATPARLLFFAPTR; TATPARLLFFAPTRR;
ATPARLLFFAPTRRA; TPARLLFFAPTRRAA; PARLLFFAPTRRAAP;
ARLLFFAPTRRAAPL; RLLFFAPTRRAAPLE; LLFFAPTRRAAPLEE;
LFFAPTRRAAPLEEM; FFAPTRRAAPLEEME; FAPTRRAAPLEEMEA;
APTRRAAPLEEMEAP; PTRRAAPLEEMEAPA; TRRAAPLEEMEAPAA;
RRAAPLEEMEAPAAD; RAAPLEEMEAPAADA; AAPLEEMEAPAADAI;
APLEEMEAPAADAIM; PLEEMEAPAADAIMS; LEEMEAPAADAIMSP;
EEMEAPAADAIMSPE; EMEAPAADAIMSPEE; MEAPAADAIMSPEEE;
EAPAADAIMSPEEEL; APAADAIMSPEEELD; PAADAIMSPEEELDG;
AADAIMSPEEELDGY; ADAIMSPEEELDGYE; DAIMSPEEELDGYEP;
AIMSPEEELDGYEPE; IMSPEEELDGYEPEP; MSPEEELDGYEPEPL;
SPEEELDGYEPEPLG; PEEELDGYEPEPLGK; EEELDGYEPEPLGKR;
EELDGYEPEPLGKRP; ELDGYEPEPLGKRPA; LDGYEPEPLGKRPAV;
DGYEPEPLGKRPAVL; GYEPEPLGKRPAVLP; YEPEPLGKRPAVLPL;
EPEPLGKRPAVLPLL; PEPLGKRPAVLPLLE; EPLGKRPAVLPLLEL;
PLGKRPAVLPLLELV; LGKRPAVLPLLELVG; GKRPAVLPLLELVGE;
KRPAVLPLLELVGES; RPAVLPLLELVGESG; PAVLPLLELVGESGN;
AVLPLLELVGESGNN; VLPLLELVGESGNNT; LPLLELVGESGNNTS;
PLLELVGESGNNTST; LLELVGESGNNTSTD; LELVGESGNNTSTDG;
ELVGESGNNTSTDGS; LVGESGNNTSTDGSL; VGESGNNTSTDGSLP;
GESGNNTSTDGSLPS; ESGNNTSTDGSLPST; SGNNTSTDGSLPSTP;
GNNTSTDGSLPSTPP; NNTSTDGSLPSTPPP; NTSTDGSLPSTPPPA;
TSTDGSLPSTPPPAE; STDGSLPSTPPPAEE; TDGSLPSTPPPAEEE;
DGSLPSTPPPAEEEE; GSLPSTPPPAEEEED; SLPSTPPPAEEEEDD;
LPSTPPPAEEEEDDL; PSTPPPAEEEEDDLY; STPPPAEEEEDDLYR;
TPPPAEEEEDDLYRQ; PPPAEEEEDDLYRQS; PPAEEEEDDLYRQSL;
PAEEEEDDLYRQSLE; AEEEEDDLYRQSLEI; EEEEDDLYRQSLEII;
EEEDDLYRQSLEIIS; EEDDLYRQSLEIISR; EDDLYRQSLEIISRY;
DDLYRQSLEIISRYL; DLYRQSLEIISRYLR; LYRQSLEIISRYLRE;
YRQSLEIISRYLREQ; RQSLEIISRYLREQA; QSLEIISRYLREQAT;
SLEIISRYLRFQATG; LEIISRYLREQATGA; EIISRYLRFQATGAK;
IISRYLREQATGAKD; ISRYLREQATGAKDT; SRYLREQATGAKDTK;
RYLREQATGAKDTKP; YLREQATGAKDTKPM; LREQATGAKDTKPMG;
REQATGAKDTKPMGR; EQATGAKDTKPMGRS; QATGAKDTKPMGRSG;
ATGAKDTKPMGRSGA; TGAKDTKPMGRSGAT; GAKDTKPMGRSGATS;
AKDTKPMGRSGATSR; KDTKPMGRSGATSRK; DTKPMGRSGATSRKA;
TKPMGRSGATSRKAL; KPMGRSGATSRKALE; PMGRSGATSRKALET;
MGRSGATSRKALETL; GRSGATSRKALETLR; RSGATSRKALETLRR;
SGATSRKALETLRRV; GATSRKALETLRRVG; ATSRKALETLRRVGD;
TSRKALETLRRVGDG; SRKALETLRRVGDGV; RKALETLRRVGDGVQ;
KALETLRRVGDGVQR; ALETLRRVGDGVQRN; LETLRRVGDGVQRNH;
ETLRRVGDGVQRNHE; TLRRVGDGVQRNHET; LRRVGDGVQRNHETA;
RRVGDGVQRNHETAF; RVGDGVQRNHETAFQ; VGDGVQRNHETAFQG;
GDGVQRNHETAFQGM; DGVQRNHETAFQGML; GVQRNHETAFQGMLR;
VQRNHETAFQGMLRK; QRNHETAFQGMLRKL; RNHETAFQGMLRKLD;
NHETAFQGMLRKLDI; HETAFQGMLRKLDIK; ETAFQGMLRKLDIKN;
TAFQGMLRKLDIKNE; AFQGMLRKLDIKNED; FQGMLRKLDIKNEDD;
QGMLRKLDIKNEDDV; GMLRKLDIKNEDDVK; MLRKLDIKNEDDVKS;
LRKLDIKNEDDVKSL; RKLDIKNEDDVKSLS; KLDIKNEDDVKSLSR;
LDIKNEDDVKSLSRV; DIKNEDDVKSLSRVM; IKNEDDVKSLSRVMI;
KNEDDVKSLSRVMIH; NEDDVKSLSRVMIHV; EDDVKSLSRVMIHVF;
DDVKSLSRVMIHVFS; DVKSLSRVMIHVFSD; VKSLSRVMIHVFSDG;
KSLSRVMIHVFSDGV; SLSRVMIHVFSDGVT; LSRVMIHVFSDGVTN;
SRVMIHVFSDGVTNW; RVMIHVFSDGVTNWG; VMIHVFSDGVTNWGR;
MIHVFSDGVTNWGRI; IHVFSDGVTNWGRIV; HVFSDGVTNWGRIVT;
VFSDGVTNWGRIVTL; FSDGVTNWGRIVTLI; SDGVTNWGRIVTLIS;
DGVTNWGRIVTLISF; GVTNWGRIVTLISFG; VTNWGRIVTLISFGA;
TNWGRIVTLISFGAF; NWGRIVTLISFGAFV; WGRIVTLISFGAFVA;
GRIVTLISFGAFVAK; RIVTLISFGAFVAKH; IVTLISFGAFVAKHL;
VTLISFGAFVAKHLK; TLISFGAFVAKHLKT; LISFGAFVAKHLKTI;
ISFGAFVAKHLKTIN; SFGAFVAKHLKTINQ; FGAFVAKHLKTINQE;
GAFVAKHLKTINQES; AFVAKHLKTINQESC; FVAKHLKTINQESCI;
VAKHLKTINQESCIE; AKHLKTINQESCIEP; KHLKTINQESCIEPL;
HLKTINQESCIEPLA; LKTINQESCIEPLAE; KTINQESCIEPLAES; TINQESCIEPLAESI;
INQESCIEPLAESIT; NQESCIEPLAESITD; QESCIEPLAESITDV; ESCIEPLAESITDVL;
SCIEPLAESITDVLV; CIEPLAESITDVLVR; IEPLAESITDVLVRT;
EPLAESITDVLVRTK; PLAESITDVLVRTKR; LAESITDVLVRTKRD;
AESITDVLVRTKRDW; ESITDVLVRTKRDWL; SITDVLVRTKRDWLV;
ITDVLVRTKRDWLVK; TDVLVRTKRDWLVKQ; DVLVRTKRDWLVKQR;
VLVRTKRDWLVKQRG; LVRTKRDWLVKQRGW; VRTKRDWLVKQRGWD;
RTKRDWLVKQRGWDG; TKRDWLVKQRGWDGF; KRDWLVKQRGWDGFV;
RDWLVKQRGWDGFVE; DWLVKQRGWDGFVEF; WLVKQRGWDGFVEFF;
LVKQRGWDGFVEFFH; VKQRGWDGFVEFFHV; KQRGWDGFVEFFHVE;
QRGWDGFVEFFHVED; RGWDGFVEFFHVEDL; GWDGFVEFFHVEDLE;
WDGFVEFFHVEDLEG; DGFVEFFHVEDLEGG; GFVEFFHVEDLEGGI;
FVEFFHVEDLEGGIR; VEFFHVEDLEGGIRN; EFFHVEDLEGGIRNV;
FFHVEDLEGGIRNVL; FHVEDLEGGIRNVLL; HVEDLEGGIRNVLLA;
VEDLEGGIRNVLLAF; EDLEGGIRNVLLAFA; DLEGGIRNVLLAFAG;
LEGGIRNVLLAFAGV; EGGIRNVLLAFAGVA; GGIRNVLLAFAGVAG;
GIRNVLLAFAGVAGV; IRNVLLAFAGVAGVG; RNVLLAFAGVAGVGA;
NVLLAFAGVAGVGAG; VLLAFAGVAGVGAGL; LLAFAGVAGVGAGLA;
LAFAGVAGVGAGLAY; AFAGVAGVGAGLAYL; FAGVAGVGAGLAYLI;
AGVAGVGAGLAYLIR

16 mers:

MFGLKRNAVIGLNLYC; FGLKRNAVIGLNLYCG; GLKRNAVIGLNLYCGG;
LKRNAVIGLNLYCGGA; KRNAVIGLNLYCGGAG; RNAVIGLNLYCGGAGL;
NAVIGLNLYCGGAGLG; AVIGLNLYCGGAGLGA; VIGLNLYCGGAGLGAG;
IGLNLYCGGAGLGAGS; GLNLYCGGAGLGAGSG; LNLYCGGAGLGAGSGG;
NLYCGGAGLGAGSGGA; LYCGGAGLGAGSGGAT; YCGGAGLGAGSGGATR;
CGGAGLGAGSGGATRP; GGAGLGAGSGGATRPG; GAGLGAGSGGATRPGG;
AGLGAGSGGATRPGGR; GLGAGSGGATRPGGRL; LGAGSGGATRPGGRLL;
GAGSGGATRPGGRLLA; AGSGGATRPGGRLLAT; GSGGATRPGGRLLATE;
SGGATRPGGRLLATEK; GGATRPGGRLLATEKE; GATRPGGRLLATEKEA;
ATRPGGRLLATEKEAS; TRPGGRLLATEKEASA; RPGGRLLATEKEASAR;
PGGRLLATEKEASARR; GGRLLATEKEASARRE; GRLLATEKEASARREI;
RLLATEKEASARREIG; LLATEKEASARREIGG; LATEKEASARREIGGG;
ATEKEASARREIGGGE; TEKEASARREIGGGEA; EKEASARREIGGGEAG;
KEASARREIGGGEAGA; EASARREIGGGEAGAV; ASARREIGGGEAGAVI;
SARREIGGGEAGAVIG; ARREIGGGEAGAVIGG; RREIGGGEAGAVIGGS;
REIGGGEAGAVIGGSA; EIGGGEAGAVIGGSAG; IGGGEAGAVIGGSAGA;
GGGEAGAVIGGSAGAS; GGEAGAVIGGSAGASP; GEAGAVIGGSAGASPP;
EAGAVIGGSAGASPPS; AGAVIGGSAGASPPST; GAVIGGSAGASPPSTL;
AVIGGSAGASPPSTLT; VIGGSAGASPPSTLTP; IGGSAGASPPSTLTPD;
GGSAGASPPSTLTPDS; GSAGASPPSTLTPDSR; SAGASPPSTLTPDSRR;
AGASPPSTLTPDSRRV; GASPPSTLTPDSRRVA; ASPPSTLTPDSRRVAR;
SPPSTLTPDSRRVARP; PPSTLTPDSRRVARPP; PSTLTPDSRRVARPPP;
STLTPDSRRVARPPPI; TLTPDSRRVARPPPIG; LTPDSRRVARPPPIGA;
TPDSRRVARPPPIGAE; PDSRRVARPPPIGAEV; DSRRVARPPPIGAEVP;
SRRVARPPPIGAEVPD; RRVARPPPIGAEVPDV; RVARPPPIGAEVPDVT;
VARPPPIGAEVPDVTA; ARPPPIGAEVPDVTAT; RPPPIGAEVPDVTATP;
PPPIGAEVPDVTATPA; PPIGAEVPDVTATPAR; PIGAEVPDVTATPARL;
IGAEVPDVTATPARLL; GAEVPDVTATPARLLF; AEVPDVTATPARLLFF;
EVPDVTATPARLLFFA; VPDVTATPARLLFFAP; PDVTATPARLLFFAPT;
DVTATPARLLFFAPTR; VTATPARLLFFAPTRR; TATPARLLFFAPTRRA;
ATPARLLFFAPTRRAA; TPARLLFFAPTRRAAP; PARLLFFAPTRRAAPL;
ARLLFFAPTRRAAPLE; RLLFFAPTRRAAPLEE; LLFFAPTRRAAPLEEM;
LFFAPTRRAAPLEEME; FFAPTRRAAPLEEMEA; FAPTRRAAPLEEMEAP;
APTRRAAPLEEMEAPA; PTRRAAPLEEMEAPAA; TRRAAPLEEMEAPAAD;
RRAAPLEEMEAPAADA; RAAPLEEMEAPAADAI; AAPLEEMEAPAADAIM;
APLEEMEAPAADAIMS; PLEEMEAPAADAIMSP; LEEMEAPAADAIMSPE;
EEMEAPAADAIMSPEE; EMEAPAADAIMSPEEE; MEAPAADAIMSPEEEL;
EAPAADAIMSPEEELD; APAADAIMSPEEELDG; PAADAIMSPEEELDGY;
AADAIMSPEEELDGYE; ADAIMSPEEELDGYEP; DAIMSPEEELDGYEPE;
AIMSPEEELDGYEPEP; IMSPEEELDGYEPEPL; MSPEEELDGYEPEPLG;
SPEEELDGYEPEPLGK; PEEELDGYEPEPLGKR; EEELDGYEPEPLGKRP;
EELDGYEPEPLGKRPA; ELDGYEPEPLGKRPAV; LDGYEPEPLGKRPAVL;
DGYEPEPLGKRPAVLP; GYEPEPLGKRPAVLPL; YEPEPLGKRPAVLPLL;
EPEPLGKRPAVLPLLE; PEPLGKRPAVLPLLEL; EPLGKRPAVLPLLELV;
PLGKRPAVLPLLELVG; LGKRPAVLPLLELVGE; GKRPAVLPLLELVGES;
KRPAVLPLLELVGESG; RPAVLPLLELVGESGN; PAVLPLLELVGESGNN;
AVLPLLELVGESGNNT; VLPLLELVGESGNNTS; LPLLELVGESGNNTST;
PLLELVGESGNNTSTD; LLELVGESGNNTSTDG; LELVGESGNNTSTDGS;
ELVGESGNNTSTDGSL; LVGESGNNTSTDGSLP; VGESGNNTSTDGSLPS;
GESGNNTSTDGSLPST; ESGNNTSTDGSLPSTP; SGNNTSTDGSLPSTPP;
GNNTSTDGSLPSTPPP; NNTSTDGSLPSTPPPA; NTSTDGSLPSTPPPAE;
TSTDGSLPSTPPPAEE; STDGSLPSTPPPAEEE; TDGSLPSTPPPAEEEE;
DGSLPSTPPPAEEEED; GSLPSTPPPAEEEEDD; SLPSTPPPAEEEEDDL;
LPSTPPPAEEEEDDLY; PSTPPPAEEEEDDLYR; STPPPAEEEEDDLYRQ;
TPPPAEEEEDDLYRQS; PPPAEEEEDDLYRQSL; PPAEEEEDDLYRQSLE;
PAEEEEDDLYRQSLEI; AEEEEDDLYRQSLEII; EEEEDDLYRQSLEIIS;
EEEDDLYRQSLEIISR; EEDDLYRQSLEIISRY; EDDLYRQSLEIISRYL;
DDLYRQSLEIISRYLR; DLYRQSLEIISRYLRE; LYRQSLEIISRYLREQ;
YRQSLEIISRYLREQA; RQSLEIISRYLREQAT; QSLEIISRYLREQATG;
SLEIISRYLREQATGA; LEIISRYLREQATGAK; EIISRYLREQATGAKD;
IISRYLREQATGAKDT; ISRYLREQATGAKDTK; SRYLREQATGAKDTKP;
RYLREQATGAKDTKPM; YLREQATGAKDTKPMG; LRFQATGAKDTKPMGR;
REQATGAKDTKPMGRS; EQATGAKDTKPMGRSG; QATGAKDTKPMGRSGA;
ATGAKDTKPMGRSGAT; TGAKDTKPMGRSGATS; GAKDTKPMGRSGATSR;
AKDTKPMGRSGATSRK; KDTKPMGRSGATSRKA; DTKPMGRSGATSRKAL;
TKPMGRSGATSRKALE; KPMGRSGATSRKALET; PMGRSGATSRKALETL;
MGRSGATSRKALETLR; GRSGATSRKALETLRR; RSGATSRKALETLRRV;
SGATSRKALETLRRVG; GATSRKALETLRRVGD; ATSRKALETLRRVGDG;
TSRKALETLRRVGDGV; SRKALETLRRVGDGVQ; RKALETLRRVGDGVQR;
KALETLRRVGDGVQRN; ALETLRRVGDGVQRNH; LETLRRVGDGVQRNHE;
ETLRRVGDGVQRNHET; TLRRVGDGVQRNHETA; LRRVGDGVQRNHETAF;
RRVGDGVQRNHETAFQ; RVGDGVQRNHETAFQG; VGDGVQRNHETAFQGM;
GDGVQRNHETAFQGML; DGVQRNHETAFQGMLR; GVQRNHETAFQGMLRK;
VQRNHETAFQGMLRKL; QRNHETAFQGMLRKLD; RNHETAFQGMLRKLDI;
NHETAFQGMLRKLDIK; HETAFQGMLRKLDIKN; ETAFQGMLRKLDIKNE;
TAFQGMLRKLDIKNED; AFQGMLRKLDIKNEDD; FQGMLRKLDIKNEDDV;
QGMLRKLDIKNEDDVK; GMLRKLDIKNEDDVKS; MLRKLDIKNEDDVKSL;
LRKLDIKNEDDVKSLS; RKLDIKNEDDVKSLSR; KLDIKNEDDVKSLSRV;
LDIKNEDDVKSLSRVM; DIKNEDDVKSLSRVMI; IKNEDDVKSLSRVMIH;
KNEDDVKSLSRVMIHV; NEDDVKSLSRVMIHVF; EDDVKSLSRVMIHVFS;
DDVKSLSRVMIHVFSD; DVKSLSRVMIHVFSDG; VKSLSRVMIHVFSDGV;
KSLSRVMIHVFSDGVT; SLSRVMIHVFSDGVTN; LSRVMIHVFSDGVTNW;
SRVMIHVFSDGVTNWG; RVMIHVFSDGVTNWGR; VMIHVFSDGVTNWGRI;
MIHVFSDGVTNWGRIV; IHVFSDGVTNWGRIVT; HVFSDGVTNWGRIVTL;
VFSDGVTNWGRIVTLI; FSDGVTNWGRIVTLIS; SDGVTNWGRIVTLISF;
DGVTNWGRIVTLISFG; GVTNWGRIVTLISFGA; VTNWGRIVTLISFGAF;
TNWGRIVTLISFGAFV; NWGRIVTLISFGAFVA; WGRIVTLISFGAFVAK;
GRIVTLISFGAFVAKH; RIVTLISFGAFVAKHL; IVTLISFGAFVAKHLK;
VTLISFGAFVAKHLKT; TLISFGAFVAKHLKTI; LISFGAFVAKHLKTIN;
ISFGAFVAKHLKTINQ; SFGAFVAKHLKTINQE; FGAFVAKHLKTINQES;
GAFVAKHLKTINQESC; AFVAKHLKTINQESCI; FVAKHLKTINQESCIE;
VAKHLKTINQESCIEP; AKHLKTINQESCIEPL; KHLKTINQESCIEPLA;
HLKTINQESCIEPLAE; LKTINQESCIEPLAES; KTINQESCIEPLAESI;
TINQESCIEPLAESIT; INQESCIEPLAESITD; NQESCIEPLAESITDV;
QESCIEPLAESITDVL; ESCIEPLAESITDVLV; SCIEPLAESITDVLVR;
CIEPLAESITDVLVRT; IEPLAESITDVLVRTK; EPLAESITDVLVRTKR;
PLAESITDVLVRTKRD; LAESITDVLVRTKRDW; AESITDVLVRTKRDWL;
ESITDVLVRTKRDWLV; SITDVLVRTKRDWLVK; ITDVLVRTKRDWLVKQ;
TDVLVRTKRDWLVKQR; DVLVRTKRDWLVKQRG; VLVRTKRDWLVKQRGW;
LVRTKRDWLVKQRGWD; VRTKRDWLVKQRGWDG; RTKRDWLVKQRGWDGF;
TKRDWLVKQRGWDGFV; KRDWLVKQRGWDGFVE; RDWLVKQRGWDGFVEF;
DWLVKQRGWDGFVEFF; WLVKQRGWDGFVEFFH; LVKQRGWDGFVEFFHV;
VKQRGWDGFVEFFHVE; KQRGWDGFVEFFHVED; QRGWDGFVEFFHVEDL;
RGWDGFVEFFHVEDLE; GWDGFVEFFHVEDLEG; WDGFVEFFHVEDLEGG;
DGFVEFFHVEDLEGGI; GFVEFFHVEDLEGGIR; FVEFFHVEDLEGGIRN;
VEFFHVEDLEGGIRNV; EFFHVEDLEGGIRNVL; FFHVEDLEGGIRNVLL;
FHVEDLEGGIRNVLLA; HVEDLEGGIRNVLLAF; VEDLEGGIRNVLLAFA;
EDLEGGIRNVLLAFAG; DLEGGIRNVLLAFAGV; LEGGIRNVLLAFAGVA;
EGGIRNVLLAFAGVAG; GGIRNVLLAFAGVAGV; GIRNVLLAFAGVAGVG;
IRNVLLAFAGVAGVGA; RNVLLAFAGVAGVGAG; NVLLAFAGVAGVGAGL;
VLLAFAGVAGVGAGLA; LLAFAGVAGVGAGLAY; LAFAGVAGVGAGLAYL;
AFAGVAGVGAGLAYLI; FAGVAGVGAGLAYLIR

[0894] The one or more antigenic peptides can in one embodiment comprise a fragment of one or more BK virus antigens.

[0895] The one or more BK virus antigens can be selected from Table H.

TABLE H

Protein designation and accession numbers for the proteins
encoded by the BK virus genome. The amino acid
sequence of each protein is displayed.

| BK virus protein accession | |
|---|---|
| data | Amino acid sequence |
| >gi\|118752\|sp\|P14998\|DNBI_POVBA | MFCEPKNLVVLRQLSRQASVKVGKTWTGTKKRAQRIFIFILELLL |
| DNA-binding | EFCRGEDSVDGKNKSTTALPAVKDSVKDS |
| protein (Agnoprotein) | |
| >gi\|135313\|sp\|P15000\|TASM_POVBA | MDKVLNREESMELMDLLGLERAAWGNLPLMRKAYLKKCKEFH |
| Small T antigen | PDKGGDEDKMKRMNTLYKKMEQDVKVAHQPDFGTWNSSEVCA |
| | DFPLCPDTLYCKEWPICSKKPSVHCPCMLCQLRLRHLNRKFLRKE |
| | PLVWIDCYCIDCFTQWFGLDLTEETLQWWVQIIGETPFRDLKL |
| >gi\|135279\|sp\|P14999\|TALA_POVBA | MDKVLNREESMELMDLLGLERAAWGNLPLMRKAYLKKCKEFH |
| Large T antigen | PDKGGDEDKMKRMNTLYKKMEQDVKVAHQPDFGTWNSSEVPT |
| | YGTEEWESWWSSFNEKWDEDLFCHEDMFASDEEATADSQHSTP |
| | PKKKRKVEDPKDFPSDLHQFLSQAVFSNRTLACFAVYTTKEKAQI |
| | LYKKLMEKYSVTFISRHMCAGHNIIFFLTPHRHRVSAINNFCQKL |
| | CTFSFLICKGVNKEYLLYSALTRDPYHIIEESIQGGLKEHDFNPEEP |
| | EETKQVSWKLITEYAVETKCEDVFLLLGMYLEFQYNVEECKKCQ |
| | KKDQPYHFKYHEKHFANAIIFAESKNQKSICQQAVDTVLAKKRV |
| | DTLHMTREEMLTERFNHILDKMDLIFGAHGNAVLEQYMAGVAW |
| | LHCLLPKMDSVIFDFLHCVVFNVPKRRYWLFKGPIDSGKTTLAAG |
| | LLDLCGGKALNVNLPMERLTFELGVAIDQYMVVFEDVKGTGAES |
| | KDLPSGHGINNLDSLRDYLDGSVKVNLEKKHLNKRTQIFPPGLVT |
| | MNEYPVPKTLQARFVRQIDFRPKIYLRKSLQNSEFLLEKRILQSGM |
| | TLLLLLIWFRPVADFSKDIQSRIVEWKERLDSEISMYTFSRMKYNI |
| | CMGKCILDITREEDSETEDSGHGSSTESQSQCSSQVSDTSAPDSEN |
| | PHSQELHLCKGFQCFKRPKTPPPK |
| >gi\|116622\|sp\|P14996\|COA1_POVBA | MAPTKRKGECPGAAPKKPKEPVQVPKLLIKGGVEVLEVKTGVDA |
| Coat protein | ITEVECFLNPEMGDPDDNLRGYSQHLSAENAFESDSPDRKMLPCY |
| VP1 | STARIPLPNLNEDLTCGNLLMWEAVTVKTEVIGITSMLNLHAGSQ |
| | KVHENGGGKPVQGSNFHFFAVGGDPLEMQGVLMNYRTKYPQGT |
| | ITPKNPTAQSQVMNTDHKAYLDKNNAYPVECWIPDPSRNENTRY |
| | FGTYTGGENVPPVLHVTNTATTVLLDEQGVGPLCKADSLYVSAA |
| | DICGLFTNSSGTQQWRGLARYFKIRLRKRSVKNPYPISFLLSDLIN |
| | RRTQKVDGQPMYGMESQVEEVRVFDGTEQLPGDPDMIRYIDRQ |
| | GQLQTKMV |
| >gi\|116641\|sp\|P14997\|COA2_POVBA | MGAALALLGDLVASVSEAAAATGFSVAEIAAGEAAAAIEVQIAS |
| Coat protein | LATVEGITTTSEAIAAIGLTPQTYAVIAGAPGAIAGFAALIQTVTGI |
| VP2/VP3 | SSLAQVGYRFFSDWDHKVSTVGLYQQSGMALELFNPDEYYDILF |
| | PGVNTFVNNIQYLDPRHWGPSLFATISQALWHVIRDDIPAITSQEL |
| | QRRTERFFRDSLARFLEETTWTIVNAPINFYNYIQDYYSNLSPIRPS |
| | MVRQVAEREGTHVNFGHTYSIDNADSIEEVTQRMDLRNKESVHS |
| | GEFIEKTIAPGGANQRTAPQWMLPLLLGLYGTVTPALEAYEDGPN |
| | QKKRRVSRGSSQKAKGTRASAKTTNKRRSRSSRS |
| | MAHAGRTGYDNREIVMKYIHYKLSQRGYEWDAGDVGAAPPGA |
| | APAPGIFSSQPGHTPHPAASRDPVARTS |
| | PLQTPAAPGAAAGPALSPVPPVVHLTLRQAGDDFSRRYRRDFAE |
| | MSSQLHLTPFTARGRFATVVEELFRD |
| | GVNWGRIVAFFEFGGVMCVESVNREMSPLVDNIALWMTEYLNR |
| | HLHTWIQDNGGWDAFVELYGPSMRPLF |
| | DFSWLSLKTLLSLALVGACITLGAYLGHK |

[0896] Preferred BK virus fragments capable of interacting with one or more MHC class I molecules are listed in Table I.

TABLE I

Predicted MHC class 1 BK virus peptide sequences.
Prediction of 8-, 9-, 10-, 11-mers from all 6 reading frames of the genome (access no
#V01108) obtained using the program displayed in FIG. 2.
BK virus reading frame 1
8 mers:

FCKNCKRI; CKNCKRIG; KNCKRIGI; NCKRIGIS; CKRIGISP; KRIGISPN; RIGISPNS; IGISPNSF; GISPNSFA;
ISPNSFAR; SPNSFARP; PNSFARPQ; NSFARPQK; SFARPQKK; FARPQKKP; ARPQKKPP; RPQKKPPH;
PQKKPPHP; QKKPPHPY; KKPPHPYY; KPPHPYYL; PPHPYYLR; PHPYYLRE; HPYYLRER; PYYLRERV;
YYLRERVE; YLRERVEA; LRERVEAE; RERVEAEA; ERVEAEAA; RVEAEAAS; VEAEAASA; EAEAASAS;
AEAASASY; EAASASYI; AASASYIL; KKRPQGGA; KRPQGGAA; RPQGGAAY; PQGGAAYP; QGGAAYPW;
GGAAYPWN; GAAYPWNA; AAYPWNAA; AYPWNAAK; YPWNAAKP; PQEGKCMT; QEGKCMTH;
EGKCMTHR; GKCMTHRG; KCMTHRGM; CMTHRGMQ; MTHRGMQP; THRGMQPN; HRGMQPNH;
RGMQPNHD; GMQPNHDL; MQPNHDLR; QPNHDLRK; PNHDLRKE; NHDLRKES; HDLRKESA;
LTGRSCLP; TGRSCLPM; GRSCLPME; RSCLPMEC; SCLPMECS; CLPMECSQ; LPMECSQT; PMECSQTM;
MECSQTMT; ECSQTMTS; CSQTMTSG; SQTMTSGR; QTMTSGRK; TMTSGRKV; MTSGRKVH;
TSGRKVHD; SGRKVHDR; GRKVHDRH; RKVHDRHV; KVHDRHVL; VHDRHVLR; HDRHVLRA;
ESWPCPQL; SWPCPQLN; WPCPQLNW; PCPQLNWT; CPQLNWTK; PQLNWTKA; QLNWTKAM;
LNWTKAMV; NWTKAMVL; WTKAMVLR; TKAMVLRQ; KAMVLRQL; AMVLRQLS; MVLRQLSR;
VLRQLSRQ; LRQLSRQA; RQLSRQAS; QLSRQASV; LSRQASVK; SRQASVKV; RQASVKVG; QASVKVGK;
ASVKVGKT; SVKVGKTW; VKVGKTWT; KVGKTWTG; VGKTWTGT; GKTWTGTK; KTWTGTKK;
TWTGTKKR; WTGTKKRA; TGTKKRAQ; GTKKRAQR; TKKRAQRI; KKRAQRIF; KRAQRIFI; RAQRIFIF;
AQRIFIFI; QRIFIFIL; RIFIFILE; IFIFILEL; FIFILELL; IFILELLL; FILELLLE; ILELLLEF; LELLLEFC;
ELLLEFCR; LLLEFCRG; LLEFCRGE; LEFCRGED; EFCRGEDS; FCRGEDSV; CRGEDSVD; RGEDSVDG;
GEDSVDGK; EDSVDGKN; DSVDGKNK; SVDGKNKS; VDGKNKST; DGKNKSTT; GKNKSTTA;
KNKSTTAL; NKSTTALP; KSTTALPA; STTALPAV; TTALPAVK; TALPAVKD; ALPAVKDS; LPAVKDSV;
PAVKDSVK; AVKDSVKD; VKDSVKDS; VSNPFFFV; SNPFFFVF; NPFFFVFP; PFFFVFPG; FFFVFPGS;
FFVFPGSW; FVFPGSWV; VFPGSWVL; FPGSWVLL; LPVYLRLL; PVYLRLLL; VYLRLLLP; YLRLLLPQ;
LRLLLPQD; RLLLPQDF; LLLPQDFQ; LLPQDFQW; LPQDFQWL; PQDFQWLK; QDFQWLKL; DFQWLKLL;
FQWLKLLL; QWLKLLLG; WLKLLLGR; LKLLLGRL; KLLLGRLL; LLLGRLLL; LLGRLLLL; KFKLHPLL;
FKLHPLLL; LLVLLGLL; LVLLGLLL; VLLGLLLG; LLGLLLGL; LGLLLGLL; GLLLGLLL; FKLLVVLV;
KLLVVLVP; GISSLMIG; ISSLMIGI; SSLMIGIT; SLMIGITK; LMIGITKF; MIGITKFP; IGITKFPL;
ASISNQAW; SISNQAWL; ISNQAWLW; SNQAWLWN; NQAWLWNC; QAWLWNCL; AWLWNCLT;
WLWNCLTQ; LWNCLTQM; WNCLTQMS; NCLTQMST; CLTQMSTM; LTQMSTMI; TQMSTMIF;
QMSTMIFC; MSTMIFCF; STMIFCFL; TMIFCFLV; ILLLIIFN; LLLIIFNT; LLIIFNTL; LIIFNTLI; IIFNTLIL;
IFNTLILG; FNTLILGI; NTLILGIG; TLILGIGV; LILGIGVL; ILGIGVLL; LGIGVLLC; GIGVLLCL; IGVLLCLL;
GVLLCLLL; VLLCLLLF; LLCLLLFP; LCLLLFPR; CLLLFPRL; LLLFPRLC; LLFPRLCG; LFPRLCGM;
FPRLCGML; PRLCGMLL; RLCGMLLG; LCGMLLGM; CGMLLGMI; GMLLGMIY; MLLGMIYL;
LLGMIYLL; PHRNCREE; HRNCREEQ; RNCREEQK; NCREEQKD; CREEQKDF; REEQKDFL; EEQKDFLE;
EQKDFLET; QKDFLETP; KDFLETPW; DFLETPWL; FLETPWLD; LETPWLDF; ETPWLDFW; TPWLDFWR;
PWLDFWRK; WLDFWRKL; LDFWRKLP; DFWRKLPG; FWRKLPGQ; WRKLPGQL; TFIIIFNN; FIIIFNNI;
IIIFNNII; IIFNNIIL; IFNNIILI; FNNIILIF; NNIILIFP; NIILIFPL; IILIFPLL;
ILIFPLLG; LIFPLLGP; IFPLLGPQ;
FPLLGPQW; PLLGPQWL; LLGPQWLD; LGPQWLDK; LKGKVPVY; KGKVPVYI; GKVPVYIL; KVPVYILA;
VPVYILAI; PVYILAIL; VYILAILI; YILAILIV; KKLHKEWT; EINKVYIQ; INKVYIQE; NKVYIQES;
KVYIQESL; KKLLPQEV; KLLPQEVL; LLPQEVLI; LPQEVLIK; PQEVLIKE; QEVLIKEL; EVLIKELL;
VLIKELLL; LIKELLLN; IKELLLNG; KELLLNGC; ELLLNGCC; LLLNGCCL; LLNGCCLY; LNGCCLYF;
HLLLKHMK; LLLKHMKM; LLKHMKMA; LKHMKMAP; KHMKMAPT; HMKMAPTK; MKMAPTKR;
KMAPTKRK; MAPTKRKG; APTKRKGE; PTKRKGEC; TKRKGECP; KRKGECPG; RKGECPGA;
KGECPGAA; GECPGAAP; ECPGAAPK; CPGAAPKK; PGAAPKKP; GAAPKKPK; AAPKKPKE; APKKPKEP;
PKKPKEPV; KKPKEPVQ; KPKEPVQV; PKEPVQVP; KEPVQVPK; EPVQVPKL; PVQVPKLL; VQVPKLLI;
QVPKLLIK; VPKLLIKG; PKLLIKGG; KLLIKGGV; LLIKGGVE; LIKGGVEV; IKGGVEVL; KGGVEVLE;
GGVEVLEV; GVEVLEVK; VEVLEVKT; EVLEVKTG; VLEVKTGV; LEVKTGVD; EVKTGVDA;
VKTGVDAI; KTGVDAIT; TGVDAITE; GVDAITEV; VDAITEVE; DAITEVEC; AITEVECF; ITEVECFL;
TEVECFLN; EVECFLNP; VECFLNPE; ECFLNPEM; CFLNPEMG; FLNPEMGD; LNPEMGDP; NPEMGDPD;
PEMGDPDE; EMGDPDEN; MGDPDENL; GDPDENLR; DPDENLRG; PDENLRGF; DENLRGFS; ENLRGFSL;
NLRGFSLK; LRGFSLKL; RGFSLKLS; GFSLKLSA; FSLKLSAE; SLKLSAEN; LKLSAEND; KLSAENDF;
LSAENDFS; SAENDFSS; AENDFSSD; ENDFSSDS; NDFSSDSP; DFSSDSPE; FSSDSPER; SSDSPERK;
SDSPERKM; DSPERKML; SPERKMLP; PERKMLPC; ERKMLPCY; RKMLPCYS; KMLPCYST; MLPCYSTA;
LPCYSTAR; PCYSTARI; CYSTARIP; YSTARIPL; STARIPLP; TARIPLPN; ARIPLPNL; RIPLPNLN;
IPLPNLNE; PLPNLNED; LPNLNEDL; PNLNEDLT; NLNEDLTC; LNEDLTCG; NEDLTCGN; EDLTCGNL;
DLTCGNLL; LTCGNLLM; TCGNLLMW; CGNLLMWE; GNLLMWEA; NLLMWEAV; LLMWEAVT;
LMWEAVTV; MWEAVTVQ; WEAVTVQT; EAVTVQTE; AVTVQTEV; VTVQTEVI; TVQTEVIG; VQTEVIGI;
QTEVIGIT; TEVIGITS; EVIGITSM; VIGITSML; IGITSMLN; GITSMLNL; ITSMLNLH; TSMLNLHA;
SMLNLHAG; MLNLHAGS; LNLHAGSQ; NLHAGSQK; LHAGSQKV; HAGSQKVH; AGSQKVHE;
GSQKVHEH; SQKVHEHG; QKVHEHGG; KVHEHGGG; VHEHGGGK; HEHGGGKP; EHGGGKPI;
HGGGKPIQ; GGGKPIQG; GGKPIQGS; GKPIQGSN; KPIQGSNF; PIQGSNFH; IQGSNFHF; QGSNFHFF;
GSNFHFFA; SNFHFFAV; NFHFFAVG; FHFFAVGG; HFFAVGGE; FFAVGGEP; FAVGGEPL; AVGGEPLE;
VGGEPLEM; GGEPLEMQ; GEPLEMQG; EPLEMQGV; PLEMQGVL; LEMQGVLM; EMQGVLMN;
MQGVLMNY; QGVLMNYR; GVLMNYRS; VLMNYRSK; LMNYRSKY; MNYRSKYP; NYRSKYPD;
YRSKYPDG; RSKYPDGT; SKYPDGTI; KYPDGTIT; YPDGTITP; PDGTITPK; DGTITPKN; GTITPKNP;
TITPKNPT; ITPKNPTA; TPKNPTAQ; PKNPTAQS; KNPTAQSQ; NPTAQSQV; PTAQSQVM; TAQSQVMN;
AQSQVMNT; QSQVMNTD; SQVMNTDH; QVMNTDHK; VMNTDHKA; MNTDHKAY; NTDHKAYL;
TDHKAYLD; DHKAYLDK; HKAYLDKN; KAYLDKNN; AYLDKNNA; YLDKNNAY; LDKNNAYP;
DKNNAYPV; KNNAYPVE; NNAYPVEC; NAYPVECW; AYPVECWV; YPVECWVP; PVECWVPD;
VECWVPDP; ECWVPDPS; CWVPDPSR; WVPDPSRN; VPDPSRNE; PDPSRNEN; DPSRNENA; PSRNENAR;
SRNENARY; RNENARYF; NENARYFG; ENARYFGT; NARYFGTF; ARYFGTFT; RYFGTFTG; YFGTFTGG;
FGTFTGGE; GTFTGGEN; TFTGGENV; FTGGENVP; TGGENVPP; GGENVPPV; GENVPPVL; ENVPPVLH;
NVPPVLHV; VPPVLHVT; PPVLHVTN; PVLHVTNT; VLHVTNTA; LHVTNTAT; HVTNTATT; VTNTATTV;
TNTATTVL; NTATTVLL; TATTVLLD; ATTVLLDE; TTVLLDEQ; TVLLDEQG; VLLDEQGV; LLDEQGVG;
LDEQGVGP; DEQGVGPL; EQGVGPLC; QGVGPLCK; GVGPLCKA; VGPLCKAD; GPLCKADS; PLCKADSL;
LCKADSLY; CKADSLYV; KADSLYVS; ADSLYVSA; DSLYVSAA; SLYVSAAD; LYVSAADI; YVSAADIC;
VSAADICG; SAADICGL; AADICGLF; ADICGLFT; DICGLFTN; ICGLFTNS; CGLFTNSS; GLFTNSSG;
LFTNSSGT; FTNSSGTQ; TNSSGTQQ; NSSGTQQW; SSGTQQWR; SGTQQWRG; GTQQWRGL;
TQQWRGLA; QQWRGLAR; QWRGLARY; WRGLARYF; RGLARYFK; GLARYFKI; LARYFKIR;
ARYFKIRL; RYFKIRLR; YFKIRLRK; FKIRLRKR; KIRLRKRS; IRLRKRSV; RLRKRSVK; LRKRSVKN;
RKRSVKNP; KRSVKNPY; RSVKNPYP; SVKNPYPI; VKNPYPIS; KNPYPISF; NPYPISFL; PYPISFLL;
YPISFLLS; PISFLLSD; ISFLLSDL; SFLLSDLI; FLLSDLIN; LLSDLINR; LSDLINRR; SDLINRRT; DLINRRTQ;
LINRRTQR; INRRTQRV; NRRTQRVD; RRTQRVDG; RTQRVDGQ; TQRVDGQP; QRVDGQPM;
RVDGQPMY; VDGQPMYG; DGQPMYGM; GQPMYGME; QPMYGMES; PMYGMESQ; MYGMESQV;
YGMESQVE; GMESQVEE; MESQVEEV; ESQVEEVR; SQVEEVRV; QVEEVRVF; VEEVRVFD; EEVRVFDG;
EVRVFDGT; VRVFDGTE; RVFDGTER; VFDGTERL; FDGTERLP; DGTERLPG; GTERLPGD; TERLPGDP;
ERLPGDPD; RLPGDPDM; LPGDPDMI; PGDPDMIR; GDPDMIRY; DPDMIRYI; PDMIRYID; DMIRYIDK;
MIRYIDKQ; IRYIDKQG; RYIDKQGQ; YIDKQGQL; IDKQGQLQ; DKQGQLQT; KQGQLQTK; QGQLQTKM;
GQLQTKML; TGAFIVHI; GAFIVHIH; AFIVHIHL; FIVHIHLI; IVHIHLIN; VHIHLINA; HIHLINAA;
IHLINAAF; HLINAAFV; ATFKLVLF; TFKLVLFW; FKLVLFWG; KLVLFWGW; LVLFWGWC; VLFWGWCF;
LFWGWCFR; FWGWCFRP; WGWCFRPF; GWCFRPFK; WCFRPFKT; CFRPFKTL; FRPFKTLK; RPFKTLKA;
PFKTLKAF; FKTLKAFT; KTLKAFTQ; TLKAFTQM; LKAFTQMQ; KAFTQMQL; AFTQMQLL; FTQMQLLT;
TQMQLLTM; QMQLLTMG; MQLLTMGV; PLGIFSRG; SMSRVFSF; ILFSCNIK; LFSCNIKN; FSCNIKNT;
SCNIKNTF; CNIKNTFP; NIKNTFPH; IKNTFPHA; KNTFPHAY; NTFPHAYI; TFPHAYII; FPHAYIIF;
PHAYIIFH; HAYIIFHP; KSIHTYLR; SIHTYLRI; IHTYLRIQ; HTYLRIQP; TYLRIQPF; YLRIQPFL; LRIQPFLP;
RIQPFLPF; IQPFLPFN; QPFLPFNN; PFLPFNNS; FLPFNNSR; LPFNNSRL; PFNNSRLY; FNNSRLYI;
NNSRLYIS; NSRLYISC; SRLYISCK; RLYISCKI; LYISCKIS; YISCKISY; ISCKISYR; SCKISYRP; CKISYRPK;
KISYRPKP; ISYRPKPN; IYFGPKIY; YFGPKIYL; FGPKIYLS; GPKIYLSY; PKIYLSYK; KIYLSYKS;
IYLSYKSS; YLSYKSSL; LSYKSSLQ; SYKSSLQG; YKSSLQGF; KSSLQGFR; SSLQGFRD; SLQGFRDR;
LQGFRDRI; QGFRDRIL; GFRDRILI; FRDRILIH; RDRILIHC; DRILIHCN; RILIHCNQ; ILIHCNQA;
LIHCNQAW; IHCNQAWW; HCNQAWWK; CNQAWWKY; NQAWWKYL; QAWWKYLG; AWWKYLGS;
WWKYLGSF; WKYLGSFV; FSSCPFYI; SSCPFYIF; SCPFYIFK; CPFYIFKN; PFYIFKNN; FYIFKNNH;
YIFKNNHV; IFKNNHVL; FKNNHVLI; KNNHVLIY; NNHVLIYS; NHVLIYSY; HYLIYSYT; CCFSTING;
CFSTINGT; FSTINGTF; STINGTFK; PVSSFRYI; VSSFRYIE; SSFRYIEN; SFRYIENN; FRYIENNT;
RYIENNTV; YIENNTVQ; IENNTVQK; ENNTVQKI; NNTVQKIK; NTVQKIKY; TVQKIKYY; VQKIKYYR;
QKIKYYRI; KIKYYRIH; IKYYRIHF; KYYRIHFR; QTVQPSNT; TVQPSNTC; VQPSNTCH; QPSNTCHI;
PSNTCHIL; SNTCHILF; YSISMSSK; SISMSSKY; HFFPGHMK; FFPGHMKG; FPGHMKGI; PGHMKGIY;
GHMKGIYS; HMKGIYSF; MKGIYSFF; KGIYSFFS; NCIYCLLT; CIYCLLTN; IYCLLTNT; YCLLTNTF;
CLLTNTFL; LLTNTFLI; LTNTFLIF; TNTFLIFT; NTFLIFTF; TFLIFTFC; FLIFTFCK; LIFTFCKN; IFTFCKNN;
FTFCKNNS; TFCKNNSI; FCKNNSIC; CKNNSICK; KNNSICKV; NNSICKVL; NSICKVLF; SICKVLFM;
ICKVLFMI; CKVLFMIL; KVLFMILK; VLFMILKV; LFMILKVI; FMILKVIR; MILKVIRL; ILKVIRLV;
LKVIRLVF; KVIRLVFF; VIRLVFFL; IRLVFFLT; RLVFFLTL; LVFFLTLF; VFFLTLFT; FFLTLFTL;
FLTLFTLL; LTLFTLLY; TLFTLLYI; LFTLLYIV; FTLLYIVL; TLLYIVLK; LLYIVLKF; KHILTLCL;
HILTLCLY; ILTLCLYC; LTLCLYCI; TLCLYCIL; LCLYCILS; CLYCILSN; FPRHLLCF; PRHLLCFF;
RHLLCFFR; HLLCFFRL; LLCFFRLF; LCFFRLFW; CFFRLFWA; FFRLFWAK; FRLFWAKI; RLFWAKIM;
LFWAKIML; FWAKIMLL; APLNAFFY; PLNAFFYS; LNAFFYSM; NAFFYSMV; AFFYSMVW; FFYSMVWI;
FYSMYWIS; YSMVWISS; VFLINTLT; FLINTLTN; KTKGTQLL; TKGTQLLT; KGTQLLTE; GTQLLTEI;
TQLLTEII; QLLTEIIN; LLTEIINC; LTEIINCR; TEIINCRN; EIINCRNS; IINCRNSM; INCRNSMS;
NCRNSMSM; CRNSMSMW; RNSMSMWS; KEYNIMPS; EYNIMPST; YNIMPSTH; NIMPSTHV; IMPSTHVS;
MPSTHVST; PSTHVSTN; STHVSTNK; THVSTNKS; HVSTNKSY; VSTNKSYR; STNKSYRI; TNKSYRIF;
NKSYRIFF; KSYRIFFH; SYRIFFHK; YRIFFHKF; RIFFHKFF; IFFHKFFI; FFHKFFIQ; FHKFFIQN;
HKFFIQNL; KFFIQNLS; FFIQNLSF; FIQNLSFF; IQNLSFFF; QNLSFFFS; NLSFFFSS; LSFFFSSI; SFFFSSIH;
FFFSSIHS; FFSSIHSK; FSSIHSKA; SSIHSKAG; SIHSKAGK; IHSKAGKG; HSKAGKGS; SKAGKGSI;
KAGKGSIT; AGKGSITK; GKGSITKY; KGSITKYS; GSITKYSL; SITKYSLT; ITKYSLTK; TKYSLTKK;
KYSLTKKL; YSLTKKLV; IRGKVFRV; RGKVFRVF; GKVFRVFY; KVFRVFYL; VFRVFYLS; FRVFYLSF;
RVFYLSFF; VFYLSFFF; FYLSFFFG; YLSFFFGW; LSFFFGWC; VLRICCCF; LRICCCFF; RICCCFFI;
ICCCFFIT; CCCFFITG; CCFFITGK; CFFITGKH; FFITGKHI; FITGKHIF; ITGKHIFM; TGKHIFMA;
GKHIFMAK; IFIPFFIK; FIPFFIKG; IPFFIKGT; PFFIKGTP; FFIKGTPP; FIKGTPPG; IKGTPPGL; KGTPPGLP;
GTPPGLPL; TPPGLPLF; PPGLPLFC; PGLPLFCS; GLPLFCSI; LPLFCSIG; PLFCSIGW; LFCSIGWH;
FCSIGWHL; YFIIYLNI; FIIYLNIS; SFRSLKGV; FRSLKGVS; RSLKGVSP; SLKGVSPI; LKGVSPII;
KGVSPIIW; GVSPIIWT; VSPIIWTH; SPIIWTHH; PIIWTHHC; IIWTHHCR; IWTHHCRV; WTHHCRVS;
THHCRVSS; HHCRVSSV; HCRVSSVR; CRVSSVRS; RVSSVRSK; VSSVRSKP; SSVRSKPN; SVRSKPNH;
VRSKPNHC; RSKPNHCV; SKPNHCVK; KPNHCVKQ; PNHCVKQS; NHCVKQSM; HCVKQSMQ;
QSIQTKGS; SIQTKGSF; IQTKGSFL; QTKGSFLK; TKGSFLKN; KGSFLKNF; GSFLKNFL; SFLKNFLF;
FLKNFLFK; LKNFLFKC; KNFLFKCL; NFLFKCLN; FLFKCLNL; LFKCLNLS; HSMQGQCT; SMQGQCTE;
MQGQCTEG; QGQCTEGF; GQCTEGFL; QCTEGFLE; CTEGFLEQ; TEGFLEQI; EGFLEQIG; GFLEQIGH;
FLEQIGHS; LEQIGHSL; EQIGHSLQ; QIGHSLQY; IGHSLQYR; GHSLQYRV; HSLQYRVS; SLQYRVSG;
LQYRVSGQ; QYRVSGQR; YRVSGQRG; RVSGQRGK; VSGQRGKS; SGQRGKSA; GQRGKSAQ;
QRGKSAQT; RGKSAQTS; GKSAQTSE; KSAQTSEL; SAQTSELL; AQTSELLQ; QTSELLQV; TSELLQVP;
SELLQVPK; ELLQVPKS; LLQVPKSG; ATFTSCSI; TFTSCSIF; FTSCSIFL; TSCSIFLY; SCSIFLYK;
CSIFLYKV; SIFLYKVF; IFLYKVFI; FLYKVFIL; LYKVFILF; YKVFILFI; KVFILFIL; VFILFILS; FILFILSS;
ILFILSSS; LFILSSSP; FILSSSPP; ILSSSPPL; LSSSPPLS; SSSPPLSG; AFLIKGRF; FLIKGRFP; LIKGRFPQ;
IKGRFPQA; KGRFPQAA; GRFPQAAL; RFPQAALS; FPQAALSR; PQAALSRP; QAALSRPK; AALSRPKR;
ALSRPKRS; LSRPKRSM; SRPKRSMS; RPKRSMSS; PKRSMSSM; KRSMSSMD; RSMSSMDS; SMSSMDSS;
MSSMDSSL; SSMDSSLL; SMDSSLLR; MDSSLLRT; DSSLLRTL; SSLLRTLS

9 mers:

FCKNCKRIG; CKNCKRIGI; KNCKRIGIS; NCKRIGISP; CKRIGISPN; KRIGISPNS; RIGISPNSF; IGISPNSFA;
GISPNSFAR; ISPNSFARP; SPNSFARPQ; PNSFARPQK; NSFARPQKK; SFARPQKKP; FARPQKKPP;
ARPQKKPPH; RPQKKPPHP; PQKKPPHPY; QKKPPHPYY; KKPPHPYYL; KPPHPYYLR; PPHPYYLRE;
PHPYYLRER; HPYYLRERV; PYYLRERVE; YYLRERVEA; YLRERVEAE; LRERVEAEA; RERVEAEAA;
ERVEAEAAS; RVEAEAASA; VEAEAASAS; EAEAASASY; AEAASASYI; EAASASYIL; KKRPQGGAA;
KRPQGGAAY; RPQGGAAYP; PQGGAAYPW; QGGAAYPWN; GGAAYPWNA; GAAYPWNAA;
AAYPWNAAK; AYPWNAAKP; PQEGKCMTH; QEGKCMTHR; EGKCMTHRG; GKCMTHRGM;
KCMTHRGMQ; CMTHRGMQP; MTHRGMQPN; THRGMQPNH; HRGMQPNHD; RGMQPNHDL;
GMQPNHDLR; MQPNHDLRK; QPNHDLRKE; PNHDLRKES; NHDLRKESA; LTGRSCLPM; TGRSCLPME;
GRSCLPMEC; RSCLPMECS; SCLPMECSQ; CLPMECSQT; LPMECSQTM; PMECSQTMT; MECSQTMTS;
ECSQTMTSG; CSQTMTSGR; SQTMTSGRK; QTMTSGRKV; TMTSGRKVH; MTSGRKVHD; TSGRKVHDR;
SGRKVHDRH; GRKVHDRHV; RKVHDRHVL; KVHDRHVLR; VHDRHVLRA; ESWPCPQLN; SWPCPQLNW;
WPCPQLNWT; PCPQLNWTK; CPQLNWTKA; PQLNWTKAM; QLNWTKAMV; LNWTKAMVL;
NWTKAMVLR; WTKAMVLRQ; TKAMVLRQL; KAMVLRQLS; AMVLRQLSR; MVLRQLSRQ;
VLRQLSRQA; LRQLSRQAS; RQLSRQASV; QLSRQASVK; LSRQASVKV; SRQASVKVG; RQASVKVGK;
QASVKVGKT; ASVKVGKTW; SVKVGKTWT; VKVGKTWTG; KVGKTWTGT; VGKTWTGTK;
GKTWTGTKK; KTWTGTKKR; TWTGTKKRA; WTGTKKRAQ; TGTKKRAQR; GTKKRAQRI; TKKRAQRIF;
KKRAQRIFI; KRAQRIFIF; RAQRIFIFI; AQRIFIFIL; QRIFIFILE; RIFIFILEL; IFIFILELL; FIFILELLL;
IFILELLLE; FILELLLEF; ILELLLEFC; LELLLEFCR; ELLLEFCRG; LLLEFCRGE; LLEFCRGED;
LEFCRGEDS; EFCRGEDSV; FCRGEDSVD; CRGEDSVDG; RGEDSVDGK; GEDSVDGKN; EDSVDGKNK;
DSVDGKNKS; SVDGKNKST; VDGKNKSTT; DGKNKSTTA; GKNKSTTAL; KNKSTTALP; NKSTTALPA;
KSTTALPAV; STTALPAVK; TTALPAVKD; TALPAVKDS; ALPAVKDSV; LPAVKDSVK; PAVKDSVKD;
AVKDSVKDS; VSNPFFFVF; SNPFFFVFP; NPFFFVFPG; PFFFVFPGS; FFFVFPGSW; FFVFPGSWV;
FVFPGSWVL; VFPGSWVLL; LPVYLRLLL; PVYLRLLLP; VYLRLLLPQ; YLRLLLPQD; LRLLLPQDF;
RLLLPQDFQ; LLLPQDFQW; LLPQDFQWL; LPQDFQWLK; PQDFQWLKL; QDFQWLKLL; DFQWLKLLL;
FQWLKLLLG; QWLKLLLGR; WLKLLLGRL; LKLLLGRLL; KLLLGRLLL; LLLGRLLLL; KFKLHPLLL;
LLVLLGLLL; LVLLGLLLG; VLLGLLLGL; LLGLLLGLL; LGLLLGLLL; FKLLVVLVP; GISSLMIGI;
ISSLMIGIT; SSLMIGITK; SLMIGITKF; LMIGITKFP; MIGITKFPL; ASISNQAWL; SISNQAWLW;
ISNQAWLWN; SNQAWLWNC; NQAWLWNCL; QAWLWNCLT; AWLWNCLTQ; WLWNCLTQM;
LWNCLTQMS; WNCLTQMST; NCLTQMSTM; CLTQMSTMI; LTQMSTMIF; TQMSTMIFC; QMSTMIFCF;
MSTMIFCFL; STMIFCFLV; ILLLIIFNT; LLLIIFNTL; LLIIFNTLI; LIIFNTLIL; IIFNTLILG; IFNTLILGI;
FNTLILGIG; NTLILGIGV; TLILGIGVL; LILGIGVLL; ILGIGVLLC; LGIGVLLCL; GIGVLLCLL; IGVLLCLLL;
GVLLCLLLF; VLLCLLLFP; LLCLLLFPR; LCLLLFPRL; CLLLFPRLC; LLLFPRLCG; LLFPRLCGM;
LFPRLCGML; FPRLCGMLL; PRLCGMLLG; RLCGMLLGM; LCGMLLGMI; CGMLLGMIY; GMLLGMIYL;
MLLGMIYLL; PHRNCREEQ; HRNCREEQK; RNCREEQKD; NCREEQKDF; CREEQKDFL; REEQKDFLE;
EEQKDFLET; EQKDFLETP; QKDFLETPW; KDFLETPWL; DFLETPWLD; FLETPWLDF; LETPWLDFW;
ETPWLDFWR; TPWLDFWRK; PWLDFWRKL; WLDFWRKLP; LDFWRKLPG; DFWRKLPGQ; FWRKLPGQL;
TFIIIFNNI; FIIIFNNII; IIIFNNIIL; IIFNNIILI; IFNNIILIF; FNNIILIFP;
NNIILIFPL; NIILIFPLL; IILIFPLLG;
ILIFPLLGP; LIFPLLGPQ; IFPLLGPQW; FPLLGPQWL; PLLGPQWLD; LLGPQWLDK; LKGKVPVYI;
KGKVPVYIL; GKVPVYILA; KVPVYILAI; VPVYILAIL; PVYILAILI; VYILAILIV; EINKVYIQE;
INKVYIQES; NKVYIQESL; KKLLPQEVL; KLLPQEVLI; LLPQEVLIK; LPQEVLIKE; PQEVLIKEL;
QEVLIKELL; EVLIKELLL; VLIKELLLN; LIKELLLNG; IKELLLNGC; KELLLNGCC; ELLLNGCCL;
LLLNGCCLY; LLNGCCLYF; HLLLKHMKM; LLLKHMKMA; LLKHMKMAP; LKHMKMAPT;
KHMKMAPTK; HMKMAPTKR; MKMAPTKRK; KMAPTKRKG; MAPTKRKGE; APTKRKGEC;
PTKRKGECP; TKRKGECPG; KRKGECPGA; RKGECPGAA; KGECPGAAP; GECPGAAPK; ECPGAAPKK;
CPGAAPKKP; PGAAPKKPK; GAAPKKPKE; AAPKKPKEP; APKKPKEPV; PKKPKEPVQ; KKPKEPVQV;
KPKEPVQVP; PKEPVQVPK; KEPVQVPKL; EPVQVPKLL; PVQVPKLLI; VQVPKLLIK; QVPKLLIKG;
VPKLLIKGG; PKLLIKGGV; KLLIKGGVE; LLIKGGVEV; LIKGGVEVL; IKGGVEVLE; KGGVEVLEV;
GGVEVLEVK; GVEVLEVKT; VEVLEVKTG; EVLEVKTGV; VLEVKTGVD; LEVKTGVDA; EVKTGVDAI;
VKTGVDAIT; KTGVDAITE; TGVDAITEV; GVDAITEVE; VDAITEVEC; DAITEVECF; AITEVECFL;
ITEVECFLN; TEVECFLNP; EVECFLNPE; VECFLNPEM; ECFLNPEMG; CFLNPEMGD; FLNPEMGDP;
LNPEMGDPD; NPEMGDPDE; PEMGDPDEN; EMGDPDENL; MGDPDENLR; GDPDENLRG; DPDENLRGF;
PDENLRGFS; DENLRGFSL; ENLRGFSLK; NLRGFSLKL; LRGFSLKLS; RGFSLKLSA; GFSLKLSAE;
FSLKLSAEN; SLKLSAEND; LKLSAENDF; KLSAENDFS; LSAENDFSS; SAENDFSSD; AENDFSSDS;
ENDFSSDSP; NDFSSDSPE; DFSSDSPER; FSSDSPERK; SSDSPERKM; SDSPERKML; DSPERKMLP;
SPERKMLPC; PERKMLPCY; ERKMLPCYS; RKMLPCYST; KMLPCYSTA; MLPCYSTAR; LPCYSTARI;
PCYSTARIP; CYSTARIPL; YSTARIPLP; STARIPLPN; TARIPLPNL; ARIPLPNLN; RIPLPNLNE
IPLPNLNED; PLPNLNEDL; LPNLNEDLT; PNLNEDLTC; NLNEDLTCG; LNEDLTCGN; NEDLTCGNL;
EDLTCGNLL; DLTCGNLLM; LTCGNLLMW; TCGNLLMWE; CGNLLMWEA; GNLLMWEAV;
NLLMWEAVT; LLMWEAVTV; LMWEAVTVQ; MWEAVTVQT; WEAVTVQTE; EAVTVQTEV;
AVTVQTEVI; VTVQTEVIG; TVQTEVIGI; VQTEVIGIT; QTEVIGITS; TEVIGITSM; EVIGITSML;
VIGITSMLN; IGITSMLNL; GITSMLNLH; ITSMLNLHA; TSMLNLHAG; SMLNLHAGS; MLNLHAGSQ;
LNLHAGSQK; NLHAGSQKV; LHAGSQKVH; HAGSQKVHE; AGSQKVHEH; GSQKVHEHG; SQKVHEHGG;
QKVHEHGGG; KVHEHGGGK; VHEHGGGKP; HEHGGGKPI; EHGGGKPIQ; HGGGKPIQG; GGGKPIQGS;
GGKPIQGSN; GKPIQGSNF; KPIQGSNFH; PIQGSNFHF; IQGSNFHFF; QGSNFHFFA; GSNFHFFAV;
SNFHFFAVG; NFHFFAVGG; FHFFAVGGE; HFFAVGGEP; FFAVGGEPL; FAVGGEPLE; AVGGEPLEM;
VGGEPLEMQ; GGEPLEMQG; GEPLEMQGV; EPLEMQGVL; PLEMQGVLM; LEMQGVLMN;
EMQGVLMNY; MQGVLMNYR; QGVLMNYRS; GVLMNYRSK; VLMNYRSKY; LMNYRSKYP;
MNYRSKYPD; NYRSKYPDG; YRSKYPDGT; RSKYPDGTI; SKYPDGTIT; KYPDGTITP; YPDGTITPK;
PDGTITPKN; DGTITPKNP; GTITPKNPT; TITPKNPTA; ITPKNPTAQ; TPKNPTAQS; PKNPTAQSQ;
KNPTAQSQV; NPTAQSQVM; PTAQSQVMN; TAQSQVMNT; AQSQVMNTD; QSQVMNTDH;
SQVMNTDHK; QVMNTDHKA; VMNTDHKAY; MNTDHKAYL; NTDHKAYLD; TDHKAYLDK
DHKAYLDKN; HKAYLDKNN; KAYLDKNNA; AYLDKNNAY; YLDKNNAYP; LDKNNAYPV;
DKNNAYPVE; KNNAYPVEC; NNAYPVECW; NAYPVECWV; AYPVECWVP; YPVECWVPD; PVECWVPDP;
VECWVPDPS; ECWVPDPSR; CWVPDPSRN; WVPDPSRNE; VPDPSRNEN; PDPSRNENA; DPSRNENAR;
PSRNENARY; SRNENARYF; RNENARYFG; NENARYFGT; ENARYFGTF; NARYFGTFT; ARYFGTFTG;
RYFGTFTGG; YFGTFTGGE; FGTFTGGEN; GTFTGGENV; TFTGGENVP; FTGGENVPP; TGGENVPPV;
GGENVPPVL; GENVPPVLH; ENVPPVLHV; NVPPVLHVT; VPPVLHVTN; PPVLHVTNT; PVLHVTNTA;
VLHVTNTAT; LHVTNTATT; HVTNTATTV; VTNTATTVL; TNTATTVLL; NTATTVLLD; TATTVLLDE;
ATTVLLDEQ; TTVLLDEQG; TVLLDEQGV; VLLDEQGVG; LLDEQGVGP; LDEQGVGPL; DEQGVGPLC;
EQGVGPLCK; QGVGPLCKA; GVGPLCKAD; VGPLCKADS; GPLCKADSL; PLCKADSLY; LCKADSLYV;
CKADSLYVS; KADSLYVSA; ADSLYVSAA; DSLYVSAAD; SLYVSAADI; LYVSAADIC; YVSAADICG;
VSAADICGL; SAADICGLF; AADICGLFT; ADICGLFTN; DICGLFTNS; ICGLFTNSS; CGLFTNSSG;
GLFTNSSGT; LFTNSSGTQ; FTNSSGTQQ; TNSSGTQQW; NSSGTQQWR; SSGTQQWRG; SGTQQWRGL;
GTQQWRGLA; TQQWRGLAR; QQWRGLARY; QWRGLARYF; WRGLARYFK; RGLARYFKI; GLARYFKIR;
LARYFKIRL; ARYFKIRLR; RYFKIRLRK; YFKIRLRKR; FKIRLRKRS; KIRLRKRSV; IRLRKRSVK;
RLRKRSVKN; LRKRSVKNP; RKRSVKNPY; KRSVKNPYP; RSVKNPYPI; SVKNPYPIS; VKNPYPISF;
KNPYPISFL; NPYPISFLL; PYPISFLLS; YPISFLLSD; PISFLLSDL; ISFLLSDLI; SFLLSDLIN; FLLSDLINR;
LLSDLINRR; LSDLINRRT; SDLINRRTQ; DLINRRTQR; LINRRTQRV; INRRTQRVD; NRRTQRVDG;
RRTQRVDGQ; RTQRVDGQP; TQRVDGQPM; QRVDGQPMY; RVDGQPMYG; VDGQPMYGM;
DGQPMYGME; GQPMYGMES; QPMYGMESQ; PMYGMESQV; MYGMESQVE; YGMESQVEE;
GMESQVEEV; MESQVEEVR; ESQVEEVRV; SQVEEVRVF; QVEEVRVFD; VEEVRVFDG; EEVRVFDGT;
EVRVFDGTE; VRVFDGTER; RVFDGTERL; VFDGTERLP; FDGTERLPG; DGTERLPGD; GTERLPGDP;
TERLPGDPD; ERLPGDPDM; RLPGDPDMI; LPGDPDMIR; PGDPDMIRY; GDPDMIRYI; DPDMIRYID;
PDMIRYIDK; DMIRYIDKQ; MIRYIDKQG; IRYIDKQGQ; RYIDKQGQL; YIDKQGQLQ; IDKQGQLQT;
DKQGQLQTK; KQGQLQTKM; QGQLQTKML; TGAFIVHIH; GAFIVHIHL; AFIVHIHLI; FIVHIHLIN;
IVHIHLINA; VHIHLINAA; HIHLINAAF; IHLINAAFV; ATFKLVLFW; TFKLVLFWG; FKLVLFWGW;
KLVLFWGWC; LVLFWGWCF; VLFWGWCFR; LFWGWCFRP; FWGWCFRPF; WGWCFRPFK;
GWCFRPFKT; WCFRPFKTL; CFRPFKTLK; FRPFKTLKA; RPFKTLKAF; PFKTLKAFT; FKTLKAFTQ;
KTLKAFTQM; TLKAFTQMQ; LKAFTQMQL; KAFTQMQLL; AFTQMQLLT; FTQMQLLTM; TQMQLLTMG;
QMQLLTMGV; ILFSCNIKN; LFSCNIKNT; FSCNIKNTF; SCNIKNTFP; CNIKNTFPH; NIKNTFPHA;
IKNTFPHAY; KNTFPHAYI; NTFPHAYII; TFPHAYIIF; FPHAYIIFH; PHAYIIFHP; KSIHTYLRI; SIHTYLRIQ;
IHTYLRIQP; HTYLRIQPF; TYLRIQPFL; YLRIQPFLP; LRIQPFLPF; RIQPFLPFN; IQPFLPFNN; QPFLPFNNS;
PFLPFNNSR; FLPFNNSRL; LPFNNSRLY; PFNNSRLYI; FNNSRLYIS; NNSRLYISC; NSRLYISCK;
SRLYISCKI; RLYISCKIS; LYISCKISY; YISCKISYR; ISCKISYRP; SCKISYRPK; CKISYRPKP; KISYRPKPN;
IYFGPKIYL; YFGPKIYLS; FGPKIYLSY; GPKIYLSYK; PKIYLSYKS; KIYLSYKSS; IYLSYKSSL;
YLSYKSSLQ; LSYKSSLQG; SYKSSLQGF; YKSSLQGFR; KSSLQGFRD; SSLQGFRDR; SLQGFRDRI;
LQGFRDRIL; QGFRDRILI; GFRDRILIH; FRDRILIHC; RDRILIHCN; DRILIHCNQ; RILIHCNQA;
ILIHCNQAW; LIHCNQAWW; IHCNQAWWK; HCNQAWWKY; CNQAWWKYL; NQAWWKYLG;
QAWWKYLGS; AWWKYLGSF; WWKYLGSFV; FSSCPFYIF; SSCPFYIFK; SCPFYIFKN; CPFYIFKNN;
PFYIFKNNH; FYIFKNNHV; YIFKNNHVL; IFKNNHVLI; FKNNHVLIY; KNNHVLIYS; NNHVLIYSY;
NHVLIYSYT; CCFSTINGT; CFSTINGTF; FSTINGTFK; PVSSFRYIE; VSSFRYIEN; SSFRYIENN;
SFRYIENNT; FRYIENNTV; RYIENNTVQ; YIENNTVQK; IENNTVQKI; ENNTVQKIK; NNTVQKIKY;
NTVQKIKYY; TVQKIKYYR; VQKIKYYRI; QKIKYYRIH; KIKYYRIHF; IKYYRIHFR; QTVQPSNTC;
TVQPSNTCH; VQPSNTCHI; QPSNTCHIL; PSNTCHILF; YSISMSSKY; HFFPGHMKG; FFPGHMKGI;
FPGHMKGIY; PGHMKGIYS; GHMKGIYSF; HMKGIYSFF; MKGIYSFFS; NCIYCLLTN; CIYCLLTNT;
IYCLLTNTF; YCLLTNTFL; CLLTNTFLI; LLTNTFLIF; LTNTFLIFT; TNTFLIFTF; NTFLIFTFC; TFLIFTFCK;
FLIFTFCKN; LIFTFCKNN; IFTFCKNNS; FTFCKNNSI; TFCKNNSIC; FCKNNSICK; CKNNSICKV;
KNNSICKVL; NNSICKVLF; NSICKVLFM; SICKVLFMI; ICKVLFMIL; CKVLFMILK; KVLFMILKV;
VLFMILKVI; LFMILKVIR; FMILKVIRL; MILKVIRLV; ILKVIRLVF; LKVIRLVFF; KVIRLVFFL;
VIRLVFFLT; IRLVFFLTL; RLVFFLTLF; LVFFLTLFT; VFFLTLFTL; FFLTLFTLL; FLTLFTLLY; LTLFTLLYI;
TLFTLLYIV; LFTLLYIVL; FTLLYIVLK; TLLYIVLKF; KHILTLCLY; HILTLCLYC; ILTLCLYCI;
LTLCLYCIL; TLCLYCILS; LCLYCILSN; FPRHLLCFF; PRHLLCFFR; RHLLCFFRL; HLLCFFRLF;
LLCFFRLFW; LCFFRLFWA; CFFRLFWAK; FFRLFWAKI; FRLFWAKIM; RLFWAKIML; LFWAKIMLL;
APLNAFFYS; PLNAFFYSM; LNAFFYSMV; NAFFYSMVW; AFFYSMVWI; FFYSMVWIS; FYSMVWISS;
VFLINTLTN; KTKGTQLLT; TKGTQLLTE; KGTQLLTEI; GTQLLTEII; TQLLTEIIN; QLLTEIINC;
LLTEIINCR; LTEIINCRN; TEIINCRNS; EIINCRNSM; IINCRNSMS; INCRNSMSM; NCRNSMSMW;
CRNSMSMWS; KEYNIMPST; EYNIMPSTH; YNIMPSTHV; NIMPSTHVS; IMPSTHVST; MPSTHVSTN;
PSTHVSTNK; STHVSTNKS; THVSTNKSY; HVSTNKSYR; VSTNKSYRI; STNKSYRIF; TNKSYRIFF;
NKSYRIFFH; KSYRIFFHK; SYRIFFHKF; YRIFFHKFF; RIFFHKFFI; IFFHKFFIQ; FFHKFFIQN; FHKFFIQNL;
HKFFIQNLS; KFFIQNLSF; FFIQNLSFF; FIQNLSFFF; IQNLSFFFS; QNLSFFFSS; NLSFFFSSI; LSFFFSSIH;
SFFFSSIHS; FFFSSIHSK; FFSSIHSKA; FSSIHSKAG; SSIHSKAGK; SIHSKAGKG; IHSKAGKGS;
HSKAGKGSI; SKAGKGSIT; KAGKGSITK; AGKGSITKY; GKGSITKYS; KGSITKYSL; GSITKYSLT;
SITKYSLTK; ITKYSLTKK; TKYSLTKKL; KYSLTKKLV; IRGKVFRVF; RGKVFRVFY; GKVFRVFYL;
KVFRVFYLS; VFRVFYLSF; FRVFYLSFF; RVFYLSFFF; VFYLSFFFG; FYLSFFFGW; YLSFFFGWC;
VLRICCCFF; LRICCCFFI; RICCCFFIT; ICCCFFITG; CCCFFITGK; CCFFITGKH; CFFITGKHI; FFITGKHIF;
FITGKHIFM; ITGKHIFMA; TGKHIFMAK; IFIPFFIKG; FIPFFIKGT; IPFFIKGTP; PFFIKGTPP; FFIKGTPPG;
FIKGTPPGL; IKGTPPGLP; KGTPPGLPL; GTPPGLPLF; TPPGLPLFC; PPGLPLFCS; PGLPLFCSI;
GLPLFCSIG; LPLFCSIGW; PLFCSIGWH; LFCSIGWHL; YFIIYLNIS; SFRSLKGVS; FRSLKGVSP;
RSLKGVSPI; SLKGVSPII; LKGVSPIIW; KGVSPIIWT; GVSPIIWTH; VSPIIWTHH; SPIIWTHHC;
PIIWTHHCR; IIWTHHCRV; IWTHHCRVS; WTHHCRVSS; THHCRVSSV; HHCRVSSVR; HCRVSSVRS;
CRVSSVRSK; RVSSVRSKP; VSSVRSKPN; SSVRSKPNH; SVRSKPNHC; VRSKPNHCV; RSKPNHCVK;
SKPNHCVKQ; KPNHCVKQS; PNHCVKQSM; NHCVKQSMQ; QSIQTKGSF; SIQTKGSFL; IQTKGSFLK;
QTKGSFLKN; TKGSFLKNF; KGSFLKNFL; GSFLKNFLF; SFLKNFLFK; FLKNFLFKC; LKNFLFKCL;
KNFLFKCLN; NFLFKCLNL; FLFKCLNLS; HSMQGQCTE; SMQGQCTEG; MQGQCTEGF; QGQCTEGFL;
GQCTEGFLE; QCTEGFLEQ; CTEGFLEQI; TEGFLEQIG; EGFLEQIGH; GFLEQIGHS; FLEQIGHSL;
LEQIGHSLQ; EQIGHSLQY; QIGHSLQYR; IGHSLQYRV; GHSLQYRVS; HSLQYRVSG; SLQYRVSGQ;
LQYRVSGQR; QYRVSGQRG; YRVSGQRGK; RVSGQRGKS; VSGQRGKSA; SGQRGKSAQ; GQRGKSAQT;
QRGKSAQTS; RGKSAQTSE; GKSAQTSEL; KSAQTSELL; SAQTSELLQ; AQTSELLQV; QTSELLQVP;
TSELLQVPK; SELLQVPKS; ELLQVPKSG; ATFTSCSIF; TFTSCSIFL; FTSCSIFLY; TSCSIFLYK;
SCSIFLYKV; CSIFLYKVF; SIFLYKVFI; IFLYKVFIL; FLYKVFILF; LYKVFILFI; YKVFILFIL; KVFILFILS;
VFILFILSS; FILFILSSS; ILFILSSSP; LFILSSSPP; FILSSSPPL; ILSSSPPLS; LSSSPPLSG; AFLIKGRFP;
FLIKGRFPQ; LIKGRFPQA; IKGRFPQAA; KGRFPQAAL; GRFPQAALS; RFPQAALSR; FPQAALSRP;
PQAALSRPK; QAALSRPKR; AALSRPKRS; ALSRPKRSM; LSRPKRSMS; SRPKRSMSS; RPKRSMSSM;
PKRSMSSMD; KRSMSSMDS; RSMSSMDSS; SMSSMDSSL; MSSMDSSLL; SSMDSSLLR; SMDSSLLRT;
MDSSLLRTL; DSSLLRTLS

10 mers:

FCKNCKRIGI; CKNCKRIGIS; KNCKRIGISP; NCKRIGISPN; CKRIGISPNS; KRIGISPNSF; RIGISPNSFA;
IGISPNSFAR; GISPNSFARP; ISPNSFARPQ; SPNSFARPQK; PNSFARPQKK; NSFARPQKKP; SFARPQKKPP;
FARPQKKPPH; ARPQKKPPHP; RPQKKPPHPY; PQKKPPHPYY; QKKPPHPYYL; KKPPHPYYLR;
KPPHPYYLRE; PPHPYYLRER; PHPYYLRERV; HPYYLRERVE; PYYLRERVEA; YYLRERVEAE;
YLRERVEAEA; LRERVEAEAA; RERVEAEAAS; ERVEAEAASA; RVEAEAASAS; VEAEAASASY;
EAEAASASYI; AEAASASYIL; KKRPQGGAAY; KRPQGGAAYP; RPQGGAAYPW; PQGGAAYPWN;
QGGAAYPWNA; GGAAYPWNAA; GAAYPWNAAK; AAYPWNAAKP; PQEGKCMTHR; QEGKCMTHRG;
EGKCMTHRGM; GKCMTHRGMQ; KCMTHRGMQP; CMTHRGMQPN; MTHRGMQPNH; THRGMQPNHD;
HRGMQPNHDL; RGMQPNHDLR; GMQPNHDLRK; MQPNHDLRKE; QPNHDLRKES; PNHDLRKESA;
LTGRSCLPME; TGRSCLPMEC; GRSCLPMECS; RSCLPMECSQ; SCLPMECSQT; CLPMECSQTM;
LPMECSQTMT; PMECSQTMTS; MECSQTMTSG; ECSQTMTSGR; CSQTMTSGRK; SQTMTSGRKV;
QTMTSGRKVH; TMTSGRKVHD; MTSGRKVHDR; TSGRKVHDRH; SGRKVHDRHV; GRKVHDRHVL;
RKVHDRHVLR; KVHDRHVLRA; ESWPCPQLNW; SWPCPQLNWT; WPCPQLNWTK; PCPQLNWTKA;
CPQLNWTKAM; PQLNWTKAMV; QLNWTKAMVL; LNWTKAMVLR; NWTKAMVLRQ; WTKAMVLRQL;
TKAMVLRQLS; KAMVLRQLSR; AMVLRQLSRQ; MVLRQLSRQA; VLRQLSRQAS; LRQLSRQASV;
RQLSRQASVK; QLSRQASVKV; LSRQASVKVG; SRQASVKVGK; RQASVKVGKT; QASVKVGKTW;
ASVKVGKTWT; SVKVGKTWTG; VKVGKTWTGT; KVGKTWTGTK; VGKTWTGTKK; GKTWTGTKKR;
KTWTGTKKRA; TWTGTKKRAQ; WTGTKKRAQR; TGTKKRAQRI; GTKKRAQRIF; TKKRAQRIFI;
KKRAQRIFIF; KRAQRIFIFI; RAQRIFIFIL; AQRIFIFILE; QRIFIFILEL; RIFIFILELL; IFIFILELLL;
FIFILELLLE; IFILELLLEF; FILELLLEFC; ILELLLEFCR; LELLLEFCRG; ELLLEFCRGE; LLLEFCRGED;
LLEFCRGEDS; LEFCRGEDSV; EFCRGEDSVD; FCRGEDSVDG; CRGEDSVDGK; RGEDSVDGKN;
GEDSVDGKNK; EDSVDGKNKS; DSVDGKNKST; SVDGKNKSTT; VDGKNKSTTA; DGKNKSTTAL;
GKNKSTTALP; KNKSTTALPA; NKSTTALPAV; KSTTALPAVK; STTALPAVKD; TTALPAVKDS;
TALPAVKDSV; ALPAVKDSVK; LPAVKDSVKD; PAVKDSVKDS; VSNPFFFVFP; SNPFFFVFPG;
NPFFFVFPGS; PFFFVFPGSW; FFFVFPGSWV; FFVFPGSWVL; FVFPGSWVLL; LPVYLRLLLP;
PVYLRLLLPQ; VYLRLLLPQD; YLRLLLPQDF; LRLLLPQDFQ; RLLLPQDFQW; LLLPQDFQWL;
LLPQDFQWLK; LPQDFQWLKL; PQDFQWLKLL; QDFQWLKLLL; DFQWLKLLLG; FQWLKLLLGR;
QWLKLLLGRL; WLKLLLGRLL; LKLLLGRLLL; KLLLGRLLLL; LLVLLGLLLG; LVLLGLLLGL;
VLLGLLLGLL; LLGLLLGLLL; GISSLMIGIT; ISSLMIGITK; SSLMIGITKF; SLMIGITKFP; LMIGITKFPL;
ASISNQAWLW; SISNQAWLWN; ISNQAWLWNC; SNQAWLWNCL; NQAWLWNCLT; QAWLWNCLTQ;
AWLWNCLTQM; WLWNCLTQMS; LWNCLTQMST; WNCLTQMSTM; NCLTQMSTMI; CLTQMSTMIF;
LTQMSTMIFC; TQMSTMIFCF; QMSTMIFCFL; MSTMIFCFLV; ILLLIIFNTL; LLLIIFNTLI; LLIIFNTLIL;
LIIFNTLILG; IIFNTLILGI; IFNTLILGIG; FNTLILGIGV; NTLILGIGVL; TLILGIGVLL; LILGIGVLLC;
ILGIGVLLCL; LGIGVLLCLL; GIGVLLCLLL; IGVLLCLLLF; GVLLCLLLFP; VLLCLLLFPR; LLCLLLFPRL;
LCLLLFPRLC; CLLLFPRLCG; LLLFPRLCGM; LLFPRLCGML; LFPRLCGMLL; FPRLCGMLLG;
PRLCGMLLGM; RLCGMLLGMI; LCGMLLGMIY; CGMLLGMIYL; GMLLGMIYLL; PHRNCREEQK;
HRNCREEQKD; RNCREEQKDF; NCREEQKDFL; CREEQKDFLE; REEQKDFLET; EEQKDFLETP;
EQKDFLETPW; QKDFLETPWL; KDFLETPWLD; DFLETPWLDF; FLETPWLDFW; LETPWLDFWR;
ETPWLDFWRK; TPWLDFWRKL; PWLDFWRKLP; WLDFWRKLPG; LDFWRKLPGQ; DFWRKLPGQL;
TFIIIFNNII; FIIIFNNIIL; IIIFNNIILI; IIFNNIILIF; IFNNIILIFP; FNNIILIFPL; NNIILIFPLL; NIILIFPLLG;
IILIFPLLGP; ILIFPLLGPQ; LIFPLLGPQW; IFPLLGPQWL; FPLLGPQWLD; PLLGPQWLDK; LKGKVPVYIL;
KGKVPVYILA; GKVPVYILAI; KVPVYILAIL; VPVYILAILI; PVYILAILIV; EINKVYIQES; INKVYIQESL;
KKLLPQEVLI; KLLPQEVLIK; LLPQEVLIKE; LPQEVLIKEL; PQEVLIKELL; QEVLIKELLL; EVLIKELLLN;
VLIKELLLNG; LIKELLLNGC; IKELLLNGCC; KELLLNGCCL; ELLLNGCCLY; LLLNGCCLYF;
HLLLKHMKMA; LLLKHMKMAP; LLKHMKMAPT; LKHMKMAPTK; KHMKMAPTKR; HMKMAPTKRK;
MKMAPTKRKG; KMAPTKRKGE; MAPTKRKGEC; APTKRKGECP; PTKRKGECPG; TKRKGECPGA;
KRKGECPGAA; RKGECPGAAP; KGECPGAAPK; GECPGAAPKK; ECPGAAPKKP; CPGAAPKKPK;
PGAAPKKPKE; GAAPKKPKEP; AAPKKPKEPV; APKKPKEPVQ; PKKPKEPVQV; KKPKEPVQVP;
KPKEPVQVPK; PKEPVQVPKL; KEPVQVPKLL; EPVQVPKLLI; PVQVPKLLIK; VQVPKLLIKG;
QVPKLLIKGG; VPKLLIKGGV; PKLLIKGGVE; KLLIKGGVEV; LLIKGGVEVL; LIKGGVEVLE;
IKGGVEVLEV; KGGVEVLEVK; GGVEVLEVKT; GVEVLEVKTG; VEVLEVKTGV; EVLEVKTGVD;
VLEVKTGVDA; LEVKTGVDAI; EVKTGVDAIT; VKTGVDAITE; KTGVDAITEV; TGVDAITEVE;
GVDAITEVEC; VDAITEVECF; DAITEVECFL; AITEVECFLN; ITEVECFLNP; TEVECFLNPE;
EVECFLNPEM; VECFLNPEMG; ECFLNPEMGD; CFLNPEMGDP; FLNPEMGDPD; LNPEMGDPDE;
NPEMGDPDEN; PEMGDPDENL; EMGDPDENLR; MGDPDENLRG; GDPDENLRGF; DPDENLRGFS;
PDENLRGFSL; DENLRGFSLK; ENLRGFSLKL; NLRGFSLKLS; LRGFSLKLSA; RGFSLKLSAE;
GFSLKLSAEN; FSLKLSAEND; SLKLSAENDF; LKLSAENDFS; KLSAENDFSS; LSAENDFSSD;
SAENDFSSDS; AENDFSSDSP; ENDFSSDSPE; NDFSSDSPER; DFSSDSPERK; FSSDSPERKM;
SSDSPERKML; SDSPERKMLP; DSPERKMLPC; SPERKMLPCY; PERKMLPCYS; ERKMLPCYST;
RKMLPCYSTA; KMLPCYSTAR; MLPCYSTARI; LPCYSTARIP; PCYSTARIPL; CYSTARIPLP;
YSTARIPLPN; STARIPLPNL; TARIPLPNLN; ARIPLPNLNE; RIPLPNLNED; IPLPNLNEDL; PLPNLNEDLT;
LPNLNEDLTC; PNLNEDLTCG; NLNEDLTCGN; LNEDLTCGNL; NEDLTCGNLL; EDLTCGNLLM;
DLTCGNLLMW; LTCGNLLMWE; TCGNLLMWEA; CGNLLMWEAV; GNLLMWEAVT; NLLMWEAVTV;
LLMWEAVTVQ; LMWEAVTVQT; MWEAVTVQTE; WEAVTVQTEV; EAVTVQTEVI; AVTVQTEVIG;
VTVQTEVIGI; TVQTEVIGIT; VQTEVIGITS; QTEVIGITSM; TEVIGITSML; EVIGITSMLN; VIGITSMLNL;
IGITSMLNLH; GITSMLNLHA; ITSMLNLHAG; TSMLNLHAGS; SMLNLHAGSQ; MLNLHAGSQK;
LNLHAGSQKV; NLHAGSQKVH; LHAGSQKVHE; HAGSQKVHEH; AGSQKVHEHG; GSQKVHEHGG;
SQKVHEHGGG; QKVHEHGGGK; KVHEHGGGKP; VHEHGGGKPI; HEHGGGKPIQ; EHGGGKPIQG;
HGGGKPIQGS; GGGKPIQGSN; GGKPIQGSNF; GKPIQGSNFH; KPIQGSNFHF; PIQGSNFHFF;
IQGSNFHFFA; QGSNFHFFAV; GSNFHFFAVG; SNFHFFAVGG; NFHFFAVGGE; FHFFAVGGEP;
HFFAVGGEPL; FFAVGGEPLE; FAVGGEPLEM; AVGGEPLEMQ; VGGEPLEMQG; GGEPLEMQGV;
GEPLEMQGVL; EPLEMQGVLM; PLEMQGVLMN; LEMQGVLMNY; EMQGVLMNYR; MQGVLMNYRS;
QGVLMNYRSK; GVLMNYRSKY; VLMNYRSKYP; LMNYRSKYPD; MNYRSKYPDG; NYRSKYPDGT;
YRSKYPDGTI; RSKYPDGTIT; SKYPDGTITP; KYPDGTITPK; YPDGTITPKN; PDGTITPKNP; DGTITPKNPT;
GTITPKNPTA; TITPKNPTAQ; ITPKNPTAQS; TPKNPTAQSQ; PKNPTAQSQV; KNPTAQSQVM;
NPTAQSQVMN; PTAQSQVMNT; TAQSQVMNTD; AQSQVMNTDH; QSQVMNTDHK; SQVMNTDHKA;
QVMNTDHKAY; VMNTDHKAYL; MNTDHKAYLD; NTDHKAYLDK; TDHKAYLDKN; DHKAYLDKNN;
HKAYLDKNNA; KAYLDKNNAY; AYLDKNNAYP; YLDKNNAYPV; LDKNNAYPVE; DKNNAYPVEC;
KNNAYPVECW; NNAYPVECWV; NAYPVECWVP; AYPVECWVPD; YPVECWVPDP; PVECWVPDPS;
VECWVPDPSR; ECWVPDPSRN; CWVPDPSRNE; WVPDPSRNEN; VPDPSRNENA; PDPSRNENAR;
DPSRNENARY; PSRNENARYF; SRNENARYFG; RNENARYFGT; NENARYFGTF; ENARYFGTFT;
NARYFGTFTG; ARYFGTFTGG; RYFGTFTGGE; YFGTFTGGEN; FGTFTGGENV; GTFTGGENVP;
TFTGGENVPP; FTGGENVPPV; TGGENVPPVL; GGENVPPVLH; GENVPPVLHV; ENVPPVLHVT;
NVPPVLHVTN; VPPVLHVTNT; PPVLHVTNTA; PVLHVTNTAT; VLHVTNTATT; LHVTNTATTV;
HVTNTATTVL; VTNTATTVLL; TNTATTVLLD; NTATTVLLDE; TATTVLLDEQ; ATTVLLDEQG;
TTVLLDEQGV; TVLLDEQGVG; VLLDEQGVGP; LLDEQGVGPL; LDEQGVGPLC; DEQGVGPLCK;
EQGVGPLCKA; QGVGPLCKAD; GVGPLCKADS; VGPLCKADSL; GPLCKADSLY; PLCKADSLYV;
LCKADSLYVS; CKADSLYVSA; KADSLYVSAA; ADSLYVSAAD; DSLYVSAADI; SLYVSAADIC;
LYVSAADICG; YVSAADICGL; VSAADICGLF; SAADICGLFT; AADICGLFTN; ADICGLFTNS;
DICGLFTNSS; ICGLFTNSSG; CGLFTNSSGT; GLFTNSSGTQ; LFTNSSGTQQ; FTNSSGTQQW;
TNSSGTQQWR; NSSGTQQWRG; SSGTQQWRGL; SGTQQWRGLA; GTQQWRGLAR; TQQWRGLARY;
QQWRGLARYF; QWRGLARYFK; WRGLARYFKI; RGLARYFKIR; GLARYFKIRL; LARYFKIRLR;
ARYFKIRLRK; RYFKIRLRKR; YFKIRLRKRS; FKIRLRKRSV; KIRLRKRSVK; IRLRKRSVKN;
RLRKRSVKNP; LRKRSVKNPY; RKRSVKNPYP; KRSVKNPYPI; RSVKNPYPIS; SVKNPYPISF;
VKNPYPISFL; KNPYPISFLL; NPYPISFLLS; PYPISFLLSD; YPISFLLSDL; PISFLLSDLI; ISFLLSDLIN;
SFLLSDLINR; FLLSDLINRR; LLSDLINRRT; LSDLINRRTQ; SDLINRRTQR; DLINRRTQRV; LINRRTQRVD;
INRRTQRVDG; NRRTQRVDGQ; RRTQRVDGQP; RTQRVDGQPM; TQRVDGQPMY; QRVDGQPMYG;
RVDGQPMYGM; VDGQPMYGME; DGQPMYGMES; GQPMYGMESQ; QPMYGMESQV; PMYGMESQVE;
MYGMESQVEE; YGMESQVEEV; GMESQVEEVR; MESQVEEVRV; ESQVEEVRVF; SQVEEVRVFD;
QVEEVRVFDG; VEEVRVFDGT; EEVRVFDGTE; EVRVFDGTER; VRVFDGTERL; RVFDGTERLP;
VFDGTERLPG; FDGTERLPGD; DGTERLPGDP; GTERLPGDPD; TERLPGDPDM; ERLPGDPDMI;
RLPGDPDMIR; LPGDPDMIRY; PGDPDMIRYI; GDPDMIRYID; DPDMIRYIDK; PDMIRYIDKQ;
DMIRYIDKQG; MIRYIDKQGQ; IRYIDKQGQL; RYIDKQGQLQ; YIDKQGQLQT; IDKQGQLQTK;
DKQGQLQTKM; KQGQLQTKML; TGAFIVHIHL; GAFIVHIHLI; AFIVHIHLIN; FIVHIHLINA; IVHIHLINAA;
VHIHLINAAF; HIHLINAAFV; ATFKLVLFWG; TFKLVLFWGW; FKLVLFWGWC; KLVLFWGWCF;
LVLFWGWCFR; VLFWGWCFRP; LFWGWCFRPF; FWGWCFRPFK; WGWCFRPFKT; GWCFRPFKTL;
WCFRPFKTLK; CFRPFKTLKA; FRPFKTLKAF; RPFKTLKAFT; PFKTLKAFTQ; FKTLKAFTQM;
KTLKAFTQMQ; TLKAFTQMQL; LKAFTQMQLL; KAFTQMQLLT; AFTQMQLLTM; FTQMQLLTMG;
TQMQLLTMGV; ILFSCNIKNT; LFSCNIKNTF; FSCNIKNTFP; SCNIKNTFPH; CNIKNTFPHA;
NIKNTFPHAY; IKNTFPHAYI; KNTFPHAYII; NTFPHAYIIF; TFPHAYIIFH; FPHAYIIFHP; KSIHTYLRIQ;
SIHTYLRIQP; IHTYLRIQPF; HTYLRIQPFL; TYLRIQPFLP; YLRIQPFLPF; LRIQPFLPFN; RIQPFLPFNN;
IQPFLPFNNS; QPFLPFNNSR; PFLPFNNSRL; FLPFNNSRLY; LPFNNSRLYI; PFNNSRLYIS; FNNSRLYISC;
NNSRLYISCK; NSRLYISCKI; SRLYISCKIS; RLYISCKISY; LYISCKISYR; YISCKISYRP; ISCKISYRPK;
SCKISYRPKP; CKISYRPKPN; IYFGPKIYLS; YFGPKIYLSY; FGPKIYLSYK; GPKIYLSYKS; PKIYLSYKSS;
KIYLSYKSSL; IYLSYKSSLQ; YLSYKSSLQG; LSYKSSLQGF; SYKSSLQGFR; YKSSLQGFRD;
KSSLQGFRDR; SSLQGFRDRI; SLQGFRDRIL; LQGFRDRILI; QGFRDRILIH; GFRDRILIHC; FRDRILIHCN;
RDRILIHCNQ; DRILIHCNQA; RILIHCNQAW; ILIHCNQAWW; LIHCNQAWWK; IHCNQAWWKY;
HCNQAWWKYL; CNQAWWKYLG; NQAWWKYLGS; QAWWKYLGSF; AWWKYLGSFV; FSSCPFYIFK;
SSCPFYIFKN; SCPFYIFKNN; CPFYIFKNNH; PFYIFKNNHV; FYIFKNNHVL; YIFKNNHVLI; IFKNNHVLIY;
FKNNHVLIYS; KNNHVLIYSY; NNHVLIYSYT; CCFSTINGTF; CFSTINGTFK; PVSSFRYIEN; VSSFRYIENN;
SSFRYIENNT; SFRYIENNTV; FRYIENNTVQ; RYIENNTVQK; YIENNTVQKI; IENNTVQKIK;
ENNTVQKIKY; NNTVQKIKYY; NTVQKIKYYR; TVQKIKYYRI; VQKIKYYRIH; QKIKYYRIHF;
KIKYYRIHFR; QTVQPSNTCH; TVQPSNTCHI; VQPSNTCHIL; QPSNTCHILF; HFFPGHMKGI;
FFPGHMKGIY; FPGHMKGIYS; PGHMKGIYSF; GHMKGIYSFF; HMKGIYSFFS; NCIYCLLTNT;
CIYCLLTNTF; IYCLLTNTFL; YCLLTNTFLI; CLLTNTFLIF; LLTNTFLIFT; LTNTFLIFTF; TNTFLIFTFC;
NTFLIFTFCK; TFLIFTFCKN; FLIFTFCKNN; LIFTFCKNNS; IFTFCKNNSI; FTFCKNNSIC; TFCKNNSICK;
FCKNNSICKV; CKNNSICKVL; KNNSICKVLF; NNSICKVLFM; NSICKVLFMI; SICKVLFMIL;
ICKVLFMILK; CKVLFMILKV; KVLFMILKVI; VLFMILKVIR; LFMILKVIRL; FMILKVIRLV; MILKVIRLVF;
ILKVIRLVFF; LKVIRLVFFL; KVIRLVFFLT; VIRLVFFLTL; IRLVFFLTLF; RLVFFLTLFT; LVFFLTLFTL;
VFFLTLFTLL; FFLTLFTLLY; FLTLFTLLYI; LTLFTLLYIV; TLFTLLYIVL; LFTLLYIVLK; FTLLYIVLKF;
KHILTLCLYC; HILTLCLYCI; ILTLCLYCIL; LTLCLYCILS; TLCLYCILSN; FPRHLLCFFR; PRHLLCFFRL;
RHLLCFFRLF; HLLCFFRLFW; LLCFFRLFWA; LCFFRLFWAK; CFFRLFWAKI; FFRLFWAKIM;
FRLFWAKIML; RLFWAKIMLL; APLNAFFYSM; PLNAFFYSMV; LNAFFYSMVW; NAFFYSMVWI;
AFFYSMVWIS; FFYSMVWISS; KTKGTQLLTE; TKGTQLLTEI; KGTQLLTEII; GTQLLTEIIN; TQLLTEIINC;
QLLTEIINCR; LLTEIINCRN; LTEIINCRNS; TEIINCRNSM; EIINCRNSMS; IINCRNSMSM; INCRNSMSMW;
NCRNSMSMWS; KEYNIMPSTH; EYNIMPSTHV; YNIMPSTHVS; NIMPSTHVST; IMPSTHVSTN;
MPSTHVSTNK; PSTHVSTNKS; STHVSTNKSY; THVSTNKSYR; HVSTNKSYRI; VSTNKSYRIF;
STNKSYRIFF; TNKSYRIFFH; NKSYRIFFHK; KSYRIFFHKF; SYRIFFHKFF; YRIFFHKFFI; RIFFHKFFIQ;
IFFHKFFIQN; FFHKFFIQNL; FHKFFIQNLS; HKFFIQNLSF; KFFIQNLSFF; FFIQNLSFFF; FIQNLSFFFS;
IQNLSFFFSS; QNLSFFFSSI; NLSFFFSSIH; LSFFFSSIHS; SFFFSSIHSK; FFFSSIHSKA; FFSSIHSKAG;
FSSIHSKAGK; SSIHSKAGKG; SIHSKAGKGS; IHSKAGKGSI; HSKAGKGSIT; SKAGKGSITK;
KAGKGSITKY; AGKGSITKYS; GKGSITKYSL; KGSITKYSLT; GSITKYSLTK; SITKYSLTKK;
ITKYSLTKKL; TKYSLTKKLV; IRGKVFRVFY; RGKVFRVFYL; GKVFRVFYLS; KVFRVFYLSF;
VFRVFYLSFF; FRVFYLSFFF; RVFYLSFFFG; VFYLSFFFGW; FYLSFFFGWC; VLRICCCFFI; LRICCCFFIT;
RICCCFFITG; ICCCFFITGK; CCCFFITGKH; CCFFITGKHI; CFFITGKHIF; FFITGKHIFM; FITGKHIFMA;
ITGKHIFMAK; IFIPFFIKGT; FIPFFIKGTP; IPFFIKGTPP; PFFIKGTPPG; FFIKGTPPGL; FIKGTPPGLP;
IKGTPPGLPL; KGTPPGLPLF; GTPPGLPLFC; TPPGLPLFCS; PPGLPLFCSI; PGLPLFCSIG; GLPLFCSIGW;
LPLFCSIGWH; PLFCSIGWHL; SFRSLKGVSP; FRSLKGVSPI; RSLKGVSPII; SLKGVSPIIW; LKGVSPIIWT;
KGVSPIIWTH; GVSPIIWTHH; VSPIIWTHHC; SPIIWTHHCR; PIIWTHHCRV; IIWTHHCRVS;
IWTHHCRVSS; WTHHCRVSSV; THHCRVSSVR; HHCRVSSVRS; HCRVSSVRSK; CRVSSVRSKP;
RVSSVRSKPN; VSSVRSKPNH; SSVRSKPNHC; SVRSKPNHCV; VRSKPNHCVK; RSKPNHCVKQ;
SKPNHCVKQS; KPNHCVKQSM; PNHCVKQSMQ; QSIQTKGSFL; SIQTKGSFLK; IQTKGSFLKN;
QTKGSFLKNF; TKGSFLKNFL; KGSFLKNFLF; GSFLKNFLFK; SFLKNFLFKC; FLKNFLFKCL;
LKNFLFKCLN; KNFLFKCLNL; NFLFKCLNLS; HSMQGQCTEG; SMQGQCTEGF; MQGQCTEGFL;
QGQCTEGFLE; GQCTEGFLEQ; QCTEGFLEQI; CTEGFLEQIG; TEGFLEQIGH; EGFLEQIGHS;
GFLEQIGHSL; FLEQIGHSLQ; LEQIGHSLQY; EQIGHSLQYR; QIGHSLQYRV; IGHSLQYRVS;
GHSLQYRVSG; HSLQYRVSGQ; SLQYRVSGQR; LQYRVSGQRG; QYRVSGQRGK; YRVSGQRGKS;
RVSGQRGKSA; VSGQRGKSAQ; SGQRGKSAQT; GQRGKSAQTS; QRGKSAQTSE; RGKSAQTSEL;
GKSAQTSELL; KSAQTSELLQ; SAQTSELLQV; AQTSELLQVP; QTSELLQVPK; TSELLQVPKS;
SELLQVPKSG; ATFTSCSIFL; TFTSCSIFLY; FTSCSIFLYK; TSCSIFLYKV; SCSIFLYKVF; CSIFLYKVFI;
SIFLYKVFIL; IFLYKVFILF; FLYKVFILFI; LYKVFILFIL; YKVFILFILS; KVFILFILSS; VFILFILSSS;
FILFILSSSP; ILFILSSSPP; LFILSSSPPL; FILSSSPPLS; ILSSSPPLSG; AFLIKGRFPQ; FLIKGRFPQA;
LIKGRFPQAA; IKGRFPQAAL; KGRFPQAALS; GRFPQAALSR; RFPQAALSRP; FPQAALSRPK;
PQAALSRPKR; QAALSRPKRS; AALSRPKRSM; ALSRPKRSMS; LSRPKRSMSS; SRPKRSMSSM;
RPKRSMSSMD; PKRSMSSMDS; KRSMSSMDSS; RSMSSMDSSL; SMSSMDSSLL; MSSMDSSLLR;
SSMDSSLLRT; SMDSSLLRTL; MDSSLLRTLS

11 mers:

FCKNCKRIGIS; CKNCKRIGISP; KNCKRIGISPN; NCKRIGISPNS; CKRIGISPNSF; KRIGISPNSFA;
RIGISPNSFAR; IGISPNSFARP; GISPNSFARPQ; ISPNSFARPQK; SPNSFARPQKK; PNSFARPQKKP;
NSFARPQKKPP; SFARPQKKPPH; FARPQKKPPHP; ARPQKKPPHPY; RPQKKPPHPYY; PQKKPPHPYYL;
QKKPPHPYYLR; KKPPHPYYLRE; KPPHPYYLRER; PPHPYYLRERV; PHPYYLRERVE; HPYYLRERVEA;
PYYLRERVEAE; YYLRERVEAEA; YLRERVEAEAA; LRERVEAEAAS; RERVEAEAASA; ERVEAEAASAS;
RVEAEAASASY; VEAEAASASYI; EAEAASASYIL; KKRPQGGAAYP; KRPQGGAAYPW;
RPQGGAAYPWN; PQGGAAYPWNA; QGGAAYPWNAA; GGAAYPWNAAK; GAAYPWNAAKP;
PQEGKCMTHRG; QEGKCMTHRGM; EGKCMTHRGMQ; GKCMTHRGMQP; KCMTHRGMQPN;
CMTHRGMQPNH; MTHRGMQPNHD; THRGMQPNHDL; HRGMQPNHDLR; RGMQPNHDLRK;
GMQPNHDLRKE; MQPNHDLRKES; QPNHDLRKESA; LTGRSCLPMEC; TGRSCLPMECS; GRSCLPMECSQ;
RSCLPMECSQT; SCLPMECSQTM; CLPMECSQTMT; LPMECSQTMTS; PMECSQTMTSG; MECSQTMTSGR;
ECSQTMTSGRK; CSQTMTSGRKV; SQTMTSGRKVH; QTMTSGRKVHD; TMTSGRKVHDR;
MTSGRKVHDRH; TSGRKVHDRHV; SGRKVHDRHVL; GRKVHDRHVLR; RKVHDRHVLRA;
ESWPCPQLNWT; SWPCPQLNWTK; WPCPQLNWTKA; PCPQLNWTKAM; CPQLNWTKAMV;
PQLNWTKAMVL; QLNWTKAMVLR; LNWTKAMVLRQ; NWTKAMVLRQL; WTKAMVLRQLS;
TKAMVLRQLSR; KAMVLRQLSRQ; AMVLRQLSRQA; MVLRQLSRQAS; VLRQLSRQASV;
LRQLSRQASVK; RQLSRQASVKV; QLSRQASVKVG; LSRQASVKVGK; SRQASVKVGKT;
RQASVKVGKTW; QASVKVGKTWT; ASVKVGKTWTG; SVKVGKTWTGT; VKVGKTWTGTK;
KVGKTWTGTKK; VGKTWTGTKKR; GKTWTGTKKRA; KTWTGTKKRAQ; TWTGTKKRAQR;
WTGTKKRAQRI; TGTKKRAQRIF; GTKKRAQRIFI; TKKRAQRIFIF; KKRAQRIFIFI; KRAQRIFIFIL;
RAQRIFIFILE; AQRIFIFILEL; QRIFIFILELL; RIFIFILELLL; IFIFILELLLE; FIFILELLLEF; IFILELLLEFC;
FILELLLEFCR; ILELLLEFCRG; LELLLEFCRGE; ELLLEFCRGED; LLLEFCRGEDS; LLEFCRGEDSV;
LEFCRGEDSVD; EFCRGEDSVDG; FCRGEDSVDGK; CRGEDSVDGKN; RGEDSVDGKNK;
GEDSVDGKNKS; EDSVDGKNKST; DSVDGKNKSTT; SVDGKNKSTTA; VDGKNKSTTAL;
DGKNKSTTALP; GKNKSTTALPA; KNKSTTALPAV; NKSTTALPAVK; KSTTALPAVKD; STTALPAVKDS;
TTALPAVKDSV; TALPAVKDSVK; ALPAVKDSVKD; LPAVKDSVKDS; VSNPFFFVFPG; SNPFFFVFPGS;
NPFFFVFPGSW; PFFFVFPGSWV; FFFVFPGSWVL; FFVFPGSWVLL; LPVYLRLLLPQ; PVYLRLLLPQD;
VYLRLLLPQDF; YLRLLLPQDFQ; LRLLLPQDFQW; RLLLPQDFQWL; LLLPQDFQWLK; LLPQDFQWLKL;
LPQDFQWLKLL; PQDFQWLKLLL; QDFQWLKLLLG; DFQWLKLLLGR; FQWLKLLLGRL;
QWLKLLLGRLL; WLKLLLGRLLL; LKLLLGRLLLL; LLVLLGLLLGL; LVLLGLLLGLL; VLLGLLLGLLL;
GISSLMIGITK; ISSLMIGITKF; SSLMIGITKFP; SLMIGITKFPL; ASISNQAWLWN; SISNQAWLWNC;
ISNQAWLWNCL; SNQAWLWNCLT; NQAWLWNCLTQ; QAWLWNCLTQM; AWLWNCLTQMS;
WLWNCLTQMST; LWNCLTQMSTM; WNCLTQMSTMI; NCLTQMSTMIF; CLTQMSTMIFC;
LTQMSTMIFCF; TQMSTMIFCFL; QMSTMIFCFLV; ILLLIIFNTLI; LLLIIFNTLIL; LLIIFNTLILG;
LIIFNTLILGI; IIFNTLILGIG; IFNTLILGIGV; FNTLILGIGVL; NTLILGIGVLL; TLILGIGVLLC;
LILGIGVLLCL; ILGIGVLLCLL; LGIGVLLCLLL; GIGVLLCLLLF; IGVLLCLLLFP; GVLLCLLLFPR;
VLLCLLLFPRL; LLCLLLFPRLC; LCLLLFPRLCG; CLLLFPRLCGM; LLLFPRLCGML; LLFPRLCGMLL;
LFPRLCGMLLG; FPRLCGMLLGM; PRLCGMLLGMI; RLCGMLLGMIY; LCGMLLGMIYL; CGMLLGMIYLL;
PHRNCREEQKD; HRNCREEQKDF; RNCREEQKDFL; NCREEQKDFLE; CREEQKDFLET; REEQKDFLETP;
EEQKDFLETPW; EQKDFLETPWL; QKDFLETPWLD; KDFLETPWLDF; DFLETPWLDFW; FLETPWLDFWR;
LETPWLDFWRK; ETPWLDFWRKL; TPWLDFWRKLP; PWLDFWRKLPG; WLDFWRKLPGQ;
LDFWRKLPGQL; TFIIIFNNIIL; FIIIFNNIILI; IIIFNNIILIF; IIFNNIILIFP; IFNNIILIFPL; FNNIILIFPLL;
NNIILIFPLLG; NIILIFPLLGP; IILIFPLLGPQ; ILIFPLLGPQW; LIFPLLGPQWL; IFPLLGPQWLD;
FPLLGPQWLDK; LKGKVPVYILA; KGKVPVYILAI; GKVPVYILAIL; KVPVYILAILI; VPVYILAILIV;
EINKVYIQESL; KKLLPQEVLIK; KLLPQEVLIKE; LLPQEVLIKEL; LPQEVLIKELL; PQEVLIKELLL;
QEVLIKELLLN; EVLIKELLLNG; VLIKELLLNGC; LIKELLLNGCC; IKELLLNGCCL; KELLLNGCCLY;
ELLLNGCCLYF; HLLLKHMKMAP; LLLKHMKMAPT; LLKHMKMAPTK; LKHMKMAPTKR;
KHMKMAPTKRK; HMKMAPTKRKG; MKMAPTKRKGE; KMAPTKRKGEC; MAPTKRKGECP;
APTKRKGECPG; PTKRKGECPGA; TKRKGECPGAA; KRKGECPGAAP; RKGECPGAAPK; KGECPGAAPKK;
GECPGAAPKKP; ECPGAAPKKPK; CPGAAPKKPKE; PGAAPKKPKEP; GAAPKKPKEPV; AAPKKPKEPVQ;
APKKPKEPVQV; PKKPKEPVQVP; KKPKEPVQVPK; KPKEPVQVPKL; PKEPVQVPKLL; KEPVQVPKLLI;
EPVQVPKLLIK; PVQVPKLLIKG; VQVPKLLIKGG; QVPKLLIKGGV; VPKLLIKGGVE; PKLLIKGGVEV;
KLLIKGGVEVL; LLIKGGVEVLE; LIKGGVEVLEV; IKGGVEVLEVK; KGGVEVLEVKT; GGVEVLEVKTG;
GVEVLEVKTGV; VEVLEVKTGVD; EVLEVKTGVDA; VLEVKTGVDAI; LEVKTGVDAIT; EVKTGVDAITE;
VKTGVDAITEV; KTGVDAITEVE; TGVDAITEVEC; GVDAITEVECF; VDAITEVECFL; DAITEVECFLN;
AITEVECFLNP; ITEVECFLNPE; TEVECFLNPEM; EVECFLNPEMG; VECFLNPEMGD; ECFLNPEMGDP;
CFLNPEMGDPD; FLNPEMGDPDE; LNPEMGDPDEN; NPEMGDPDENL; PEMGDPDENLR;
EMGDPDENLRG; MGDPDENLRGF; GDPDENLRGFS; DPDENLRGFSL; PDENLRGFSLK; DENLRGFSLKL;
ENLRGFSLKLS; NLRGFSLKLSA; LRGFSLKLSAE; RGFSLKLSAEN; GFSLKLSAEND; FSLKLSAENDF;
SLKLSAENDFS; LKLSAENDFSS; KLSAENDFSSD; LSAENDFSSDS; SAENDFSSDSP; AENDFSSDSPE;
ENDFSSDSPER; NDFSSDSPERK; DFSSDSPERKM; FSSDSPERKML; SSDSPERKMLP; SDSPERKMLPC;
DSPERKMLPCY; SPERKMLPCYS; PERKMLPCYST; ERKMLPCYSTA; RKMLPCYSTAR; KMLPCYSTARI;
MLPCYSTARIP; LPCYSTARIPL; PCYSTARIPLP; CYSTARIPLPN; YSTARIPLPNL; STARIPLPNLN;
TARIPLPNLNE; ARIPLPNLNED; RIPLPNLNEDL; IPLPNLNEDLT; PLPNLNEDLTC; LPNLNEDLTCG;
PNLNEDLTCGN; NLNEDLTCGNL; LNEDLTCGNLL; NEDLTCGNLLM; EDLTCGNLLMW;
DLTCGNLLMWE; LTCGNLLMWEA; TCGNLLMWEAV; CGNLLMWEAVT; GNLLMWEAVTV;
NLLMWEAVTVQ; LLMWEAVTVQT; LMWEAVTVQTE; MWEAVTVQTEV; WEAVTVQTEVI;
EAVTVQTEVIG; AVTVQTEVIGI; VTVQTEVIGIT; TVQTEVIGITS; VQTEVIGITSM; QTEVIGITSML;
TEVIGITSMLN; EVIGITSMLNL; VIGITSMLNLH; IGITSMLNLHA; GITSMLNLHAG; ITSMLNLHAGS;
TSMLNLHAGSQ; SMLNLHAGSQK; MLNLHAGSQKV; LNLHAGSQKVH; NLHAGSQKVHE;
LHAGSQKVHEH; HAGSQKVHEHG; AGSQKVHEHGG; GSQKVHEHGGG; SQKVHEHGGGK;
QKVHEHGGGKP; KVHEHGGGKPI; VHEHGGGKPIQ; HEHGGGKPIQG; EHGGGKPIQGS; HGGGKPIQGSN;
GGGKPIQGSNF; GGKPIQGSNFH; GKPIQGSNFHF; KPIQGSNFHFF; PIQGSNFHFFA; IQGSNFHFFAV;
QGSNFHFFAVG; GSNFHFFAVGG; SNFHFFAVGGE; NFHFFAVGGEP; FHFFAVGGEPL; HFFAVGGEPLE;
FFAVGGEPLEM; FAVGGEPLEMQ; AVGGEPLEMQG; VGGEPLEMQGV; GGEPLEMQGVL;
GEPLEMQGVLM; EPLEMQGVLMN; PLEMQGVLMNY; LEMQGVLMNYR; EMQGVLMNYRS;
MQGVLMNYRSK; QGVLMNYRSKY; GVLMNYRSKYP; VLMNYRSKYPD; LMNYRSKYPDG;
MNYRSKYPDGT; NYRSKYPDGTI; YRSKYPDGTIT; RSKYPDGTITP; SKYPDGTITPK; KYPDGTITPKN;
YPDGTITPKNP; PDGTITPKNPT; DGTITPKNPTA; GTITPKNPTAQ; TITPKNPTAQS; ITPKNPTAQSQ;
TPKNPTAQSQV; PKNPTAQSQVM; KNPTAQSQVMN; NPTAQSQVMNT; PTAQSQVMNTD;
TAQSQVMNTDH; AQSQVMNTDHK; QSQVMNTDHKA; SQVMNTDHKAY; QVMNTDHKAYL;
VMNTDHKAYLD; MNTDHKAYLDK; NTDHKAYLDKN; TDHKAYLDKNN; DHKAYLDKNNA;
HKAYLDKNNAY; KAYLDKNNAYP; AYLDKNNAYPV; YLDKNNAYPVE; LDKNNAYPVEC;
DKNNAYPVECW; KNNAYPVECWV; NNAYPVECWVP; NAYPVECWVPD; AYPVECWVPDP;
YPVECWVPDPS; PVECWVPDPSR; VECWVPDPSRN; ECWVPDPSRNE; CWVPDPSRNEN;
WVPDPSRNENA; VPDPSRNENAR; PDPSRNENARY; DPSRNENARYF; PSRNENARYFG; SRNENARYFGT;
RNENARYFGTF; NENARYFGTFT; ENARYFGTFTG; NARYFGTFTGG; ARYFGTFTGGE; RYFGTFTGGEN;
YFGTFTGGENV; FGTFTGGENVP; GTFTGGENVPP; TFTGGENVPPV; FTGGENVPPVL; TGGENVPPVLH;
GGENVPPVLHV; GENVPPVLHVT; ENVPPVLHVTN; NVPPVLHVTNT; VPPVLHVTNTA; PPVLHVTNTAT;
PVLHVTNTATT; VLHVTNTATTV; LHVTNTATTVL; HVTNTATTVLL; VTNTATTVLLD; TNTATTVLLDE;
NTATTVLLDEQ; TATTVLLDEQG; ATTVLLDEQGV; TTVLLDEQGVG; TVLLDEQGVGP; VLLDEQGVGPL;
LLDEQGVGPLC; LDEQGVGPLCK; DEQGVGPLCKA; EQGVGPLCKAD; QGVGPLCKADS;
GVGPLCKADSL; VGPLCKADSLY; GPLCKADSLYV; PLCKADSLYVS; LCKADSLYVSA; CKADSLYVSAA;
KADSLYVSAAD; ADSLYVSAADI; DSLYVSAADIC; SLYVSAADICG; LYVSAADICGL; YVSAADICGLF;
VSAADICGLFT; SAADICGLFTN; AADICGLFTNS; ADICGLFTNSS; DICGLFTNSSG; ICGLFTNSSGT;
CGLFTNSSGTQ; GLFTNSSGTQQ; LFTNSSGTQQW; FTNSSGTQQWR; TNSSGTQQWRG; NSSGTQQWRGL;
SSGTQQWRGLA; SGTQQWRGLAR; GTQQWRGLARY; TQQWRGLARYF; QQWRGLARYFK;
QWRGLARYFKI; WRGLARYFKIR; RGLARYFKIRL; GLARYFKIRLR; LARYFKIRLRK; ARYFKIRLRKR;
RYFKIRLRKRS; YFKIRLRKRSV; FKIRLRKRSVK; KIRLRKRSVKN; IRLRKRSVKNP; RLRKRSVKNPY;
LRKRSVKNPYP; RKRSVKNPYPI; KRSVKNPYPIS; RSVKNPYPISF; SVKNPYPISFL; VKNPYPISFLL;
KNPYPISFLLS; NPYPISFLLSD; PYPISFLLSDL; YPISFLLSDLI; PISFLLSDLiN; ISFLLSDLINR;
SFLLSDLINRR; FLLSDLINRRT; LLSDLINRRTQ; LSDLINRRTQR; SDLINRRTQRV; DLINRRTQRVD;
LINRRTQRVDG; INRRTQRVDGQ; NRRTQRVDGQP; RRTQRVDGQPM; RTQRVDGQPMY;
TQRVDGQPMYG; QRVDGQPMYGM; RVDGQPMYGME; VDGQPMYGMES; DGQPMYGMESQ;
GQPMYGMESQV; QPMYGMESQVE; PMYGMESQVEE; MYGMESQVEEV; YGMESQVEEVR;
GMESQVEEVRV; MESQVEEVRVF; ESQVEEVRVFD; SQVEEVRVFDG; QVEEVRVFDGT; VEEVRVFDGTE;
EEVRVFDGTER; EVRVFDGTERL; VRVFDGTERLP; RVFDGTERLPG; VFDGTERLPGD; FDGTERLPGDP;
DGTERLPGDPD; GTERLPGDPDM; TERLPGDPDMI; ERLPGDPDMIR; RLPGDPDMIRY; LPGDPDMIRYI;
PGDPDMIRYID; GDPDMIRYIDK; DPDMIRYIDKQ; PDMIRYIDKQG; DMIRYIDKQGQ; MIRYIDKQGQL;
IRYIDKQGQLQ; RYIDKQGQLQT; YIDKQGQLQTK; IDKQGQLQTKM; DKQGQLQTKML; TGAFIVHIHLI;
GAFIVHIHLIN; AFIVHIHLINA; FIVHIHLINAA; IVHIHLINAAF; VHIHLINAAFV; ATFKLVLFWGW;
TFKLVLFWGWC; FKLVLFWGWCF; KLVLFWGWCFR; LVLFWGWCFRP; VLFWGWCFRPF;
LFWGWCFRPFK; FWGWCFRPFKT; WGWCFRPFKTL; GWCFRPFKTLK; WCFRPFKTLKA; CFRPFKTLKAF;
FRPFKTLKAFT; RPFKTLKAFTQ; PFKTLKAFTQM; FKTLKAFTQMQ; KTLKAFTQMQL; TLKAFTQMQLL;
LKAFTQMQLLT; KAFTQMQLLTM; AFTQMQLLTMG; FTQMQLLTMGV; ILFSCNIKNTF; LFSCNIKNTFP;
FSCNIKNTFPH; SCNIKNTFPHA; CNIKNTFPHAY; NIKNTFPHAYI; IKNTFPHAYII; KNTFPHAYIIF;
NTFPHAYIIFH; TFPHAYIIFHP; KSIHTYLRIQP; SIHTYLRIQPF; IHTYLRIQPFL; HTYLRIQPFLP;
TYLRIQPFLPF; YLRIQPFLPFN; LRIQPFLPFNN; RIQPFLPFNNS; IQPFLPFNNSR; QPFLPFNNSRL;
PFLPFNNSRLY; FLPFNNSRLYI; LPFNNSRLYIS; PFNNSRLYISC; FNNSRLYISCK; NNSRLYISCKI;
NSRLYISCKIS; SRLYISCKISY; RLYISCKISYR; LYISCKISYRP; YISCKISYRPK; ISCKISYRPKP;
SCKISYRPKPN; IYFGPKIYLSY; YFGPKIYLSYK; FGPKIYLSYKS; GPKIYLSYKSS; PKIYLSYKSSL;
KIYLSYKSSLQ; IYLSYKSSLQG; YLSYKSSLQGF; LSYKSSLQGFR; SYKSSLQGFRD; YKSSLQGFRDR;
KSSLQGFRDRI; SSLQGFRDRIL; SLQGFRDRILI; LQGFRDRILIH; QGFRDRILIHC; GFRDRILIHCN;
FRDRILIHCNQ; RDRILIHCNQA; DRILIHCNQAW; RILIHCNQAWW; ILIHCNQAWWK; LIHCNQAWWKY;
IHCNQAWWKYL; HCNQAWWKYLG; CNQAWWKYLGS; NQAWWKYLGSF; QAWWKYLGSFV;
FSSCPFYIFKN; SSCPFYIFKNN; SCPFYIFKNNH; CPFYIFKNNHV; PFYIFKNNHVL; FYIFKNNHVLI;
YIFKNNHVLIY; IFKNNHVLIYS; FKNNHVLIYSY; KNNHVLIYSYT; CCFSTINGTFK; PVSSFRYIENN;
VSSFRYIENNT; SSFRYIENNTV; SFRYIENNTVQ; FRYIENNTVQK; RYIENNTVQKI; YIENNTVQKIK;
IENNTVQKIKY; ENNTVQKIKYY; NNTVQKIKYYR; NTVQKIKYYRI; TVQKIKYYRIH; VQKIKYYRIHF;
QKIKYYRIHFR; QTVQPSNTCHI; TVQPSNTCHIL; VQPSNTCHILF; HFFPGHMKGIY; FFPGHMKGIYS;
FPGHMKGIYSF; PGHMKGIYSFF; GHMKGIYSFFS; NCIYCLLTNTF; CIYCLLTNTFL; IYCLLTNTFLI;
YCLLTNTFLIF; CLLTNTFLIFT; LLTNTFLIFTF; LTNTFLIFTFC; TNTFLIFTFCK; NTFLIFTFCKN;
TFLIFTFCKNN; FLIFTFCKNNS; LIFTFCKNNSI; IFTFCKNNSIC; FTFCKNNSICK; TFCKNNSICKV;
FCKNNSICKVL; CKNNSICKVLF; KNNSICKVLFM; NNSICKVLFMI; NSICKVLFMIL; SICKVLFMILK;
ICKVLFMILKV; CKVLFMILKVI; KVLFMILKVIR; VLFMILKVIRL; LFMILKVIRLV; FMILKVIRLVF;
MILKVIRLVFF; ILKVIRLVFFL; LKVIRLVFFLT; KVIRLVFFLTL; VIRLVFFLTLF; IRLVFFLTLFT;
RLVFFLTLFTL; LVFFLTLFTLL; VFFLTLFTLLY; FFLTLFTLLYI; FLTLFTLLYIV; LTLFTLLYIVL;
TLFTLLYIVLK; LFTLLYIVLKF; KHILTLCLYCI; HILTLCLYCIL; ILTLCLYCILS; LTLCLYCILSN;
FPRHLLCFFRL; PRHLLCFFRLF; RHLLCFFRLFW; HLLCFFRLFWA; LLCFFRLFWAK; LCFFRLFWAKI;
CFFRLFWAKIM; FFRLFWAKIML; FRLFWAKIMLL; APLNAFFYSMV; PLNAFFYSMYW; LNAFFYSMVWI;
NAFFYSMVWIS; AFFYSMVWISS; KTKGTQLLTEI; TKGTQLLTEII; KGTQLLTEIIN; GTQLLTEIINC;
TQLLTEIINCR; QLLTEIINCRN; LLTEIINCRNS; LTEIINCRNSM; TEIINCRNSMS; EIINCRNSMSM;
IINCRNSMSMW; INCRNSMSMWS; KEYNIMPSTHV; EYNIMPSTHVS; YNIMPSTHVST; NIMPSTHVSTN;
IMPSTHVSTNK; MPSTHVSTNKS; PSTHVSTNKSV; STHVSTNKSYR; THVSTNKSYRI; HVSTNKSYRIF;
VSTNKSYRIFF; STNKSYRIFFH; TNKSYRIFFHK; NKSYRIFFHKF; KSYRIFFHKFF; SYRIFFHKFFI;
YRIFFHKFFIQ; RIFFHKFFIQN; IFFHKFFIQNL; FFHKFFIQNLS; FHKFFIQNLSF; HKFFIQNLSFF;
KFFIQNLSFFF; FFIQNLSFFFS; FIQNLSFFFSS; IQNLSFFFSSI; QNLSFFFSSIH; NLSFFFSSIHS;
LSFFFSSIHSK; SFFFSSIHSKA; FFFSSIHSKAG; FFSSIHSKAGK; FSSIHSKAGKG; SSIHSKAGKGS;
SIHSKAGKGSI; IHSKAGKGSIT; HSKAGKGSITK; SKAGKGSITKY; KAGKGSITKYS; AGKGSITKYSL;
GKGSITKYSLT; KGSITKYSLTK; GSITKYSLTKK; SITKYSLTKKL; ITKYSLTKKLV; IRGKVFRVFYL;
RGKVFRVFYLS; GKVFRVFYLSF; KVFRVFYLSFF; VFRVFYLSFFF; FRVFYLSFFFG; RVFYLSFFFGW;
VFYLSFFFGWC; VLRICCCFFIT; LRICCCFFITG; RICCCFFITGK; ICCCFFITGKH; CCCFFITGKHI;
CCFFITGKHIF; CFFITGKHIFM; FFITGKHIFMA; FITGKHIFMAK; IFIPFFIKGTP; FIPFFIKGTPP;
IPFFIKGTPPG; PFFIKGTPPGL; FFIKGTPPGLP; FIKGTPPGLPL; IKGTPPGLPLF; KGTPPGLPLFC;
GTPPGLPLFCS; TPPGLPLFCSI; PPGLPLFCSIG; PGLPLFCSIGW; GLPLFCSIGWH; LPLFCSIGWHL;
SFRSLKGVSPI; FRSLKGVSPII; RSLKGVSPIIW; SLKGVSPIIWT; LKGVSPIIWTH; KGVSPIIWTHH;
GVSPIIWTHHC; VSPIIWTHHCR; SPIIWTHHCRV; PIIWTHHCRVS; IIWTHHCRVSS; IWTHHCRVSSV;
WTHHCRVSSVR; THHCRVSSVRS; HHCRVSSVRSK; HCRVSSVRSKP; CRVSSVRSKPN; RVSSVRSKPNH;
VSSVRSKPNHC; SSVRSKPNHCV; SVRSKPNHCVK; VRSKPNHCVKQ; RSKPNHCVKQS; SKPNHCVKQSM;
KPNHCVKQSMQ; QSIQTKGSFLK; SIQTKGSFLKN; IQTKGSFLKNF; QTKGSFLKNFL; TKGSFLKNFLF;
KGSFLKNFLFK; GSFLKNFLFKC; SFLKNFLFKCL; FLKNFLFKCLN; LKNFLFKCLNL; KNFLFKCLNLS;
HSMQGQCTEGF; SMQGQCTEGFL; MQGQCTEGFLE; QGQCTEGFLEQ; GQCTEGFLEQI; QCTEGFLEQIG;
CTEGFLEQIGH; TEGFLEQIGHS; EGFLEQIGHSL; GFLEQIGHSLQ; FLEQIGHSLQY; LEQIGHSLQYR;
EQIGHSLQYRV; QIGHSLQYRVS; IGHSLQYRVSG; GHSLQYRVSGQ; HSLQYRVSGQR; SLQYRVSGQRG;
LQYRVSGQRGK; QYRVSGQRGKS; YRVSGQRGKSA; RVSGQRGKSAQ; VSGQRGKSAQT;
SGQRGKSAQTS; GQRGKSAQTSE; QRGKSAQTSEL; RGKSAQTSELL; GKSAQTSELLQ; KSAQTSELLQV;
SAQTSELLQVP; AQTSELLQVPK; QTSELLQVPKS; TSELLQVPKSG; ATFTSCSIFLY; TFTSCSIFLYK;
FTSCSIFLYKV; TSCSIFLYKVF; SCSIFLYKVFI; CSIFLYKVFIL; SIFLYKVFILF; IFLYKVFILFI;
FLYKVFILFIL; LYKVFILFILS; YKVFILFILSS; KVFILFILSSS; VFILFILSSSP; FILFILSSSPP; ILFILSSSPPL;
LFILSSSPPLS; FILSSSPPLSG; AFLIKGRFPQA; FLIKGRFPQAA; LIKGRFPQAAL; IKGRFPQAALS;
KGRFPQAALSR; GRFPQAALSRP; RFPQAALSRPK; FPQAALSRPKR; PQAALSRPKRS; QAALSRPKRSM;
AALSRPKRSMS; ALSRPKRSMSS; LSRPKRSMSSM; SRPKRSMSSMD; RPKRSMSSMDS; PKRSMSSMDSS;
KRSMSSMDSSL; RSMSSMDSSLL; SMSSMDSSLLR; MSSMDSSLLRT; SSMDSSLLRTL; SMDSSLLRTLS

BK virus reading frame 2
8 mers:

GFPQIVLL; FPQIVLLG; PQIVLLGL; QIVLLGLR; IVLLGLRK; VLLGLRKS; LLGLRKSL; LGLRKSLH;
GLRKSLHT; LRKSLHTL; RKSLHTLT; KSLHTLTT; EKGWRQRR; KGWRQRRP; GWRQRRPR; WRQRRPRP;
RQRRPRPL; QRRPRPLI; RRPRPLIY; RPRPLIYY; PRPLIYYK; RPLIYYKK; PLIYYKKK; LIYYKKKG;
IYYKKKGH; YYKKKGHR; YKKKGHRE; KKKGHREE; KKGHREEL; KGHREELL; GHREELLT;
HREELLTH; REELLTHG; EELLTHGM; ELLTHGMQ; LLTHGMQP; LTHGMQPN; THGMQPNH;
HGMQPNHD; GMQPNHDL; MQPNHDLR; QPNHDLRK; PNHDLRKE; NHDLRKES; HDLRKESA;
LTGECSQT; TGECSQTM; GECSQTMT; ECSQTMTS; CSQTMTSG; SQTMTSGR; QTMTSGRK; TMTSGRKV;
MTSGRKVH; TSGRKVHD; SGRKVHDS; GRKVHDSQ; RKVHDSQG; KVHDSQGG; VHDSQGGA;
HDSQGGAA; DSQGGAAY; SQGGAAYP; QGGAAYPW; GGAAYPWN; GAAYPWNA; AAYPWNAA;
AYPWNAAK; YPWNAAKP; PQEGKCMT; QEGKCMTD; EGKCMTDM; GKCMTDMF; KCMTDMFC;
CMTDMFCE; MTDMFCEP; TDMFCEPR; DMFCEPRN; MFCEPRNL; FCEPRNLG; CEPRNLGL; EPRNLGLV;
PRNLGLVP; RNLGLVPS; TGQRPWFC; GQRPWFCA; QRPWFCAS; RPWFCASC; PWFCASCH; WFCASCHD;
FCASCHDK; CASCHDKL; ASCHDKLQ; KLVKPGLE; LVKPGLEQ; VKPGLEQK; KPGLEQKK; PGLEQKKE;
GLEQKKEL; LEQKKELR; EQKKELRG; QKKELRGF; KKELRGFL; KELRGFLF; ELRGFLFL; LRGFLFLF;
SFCWNFVE; FCWNFVEV; CWNFVEVK; WNFVEVKT; NFVEVKTV; TGKTKVPL; GKTKVPLL;
KTKVPLLY; TKVPLLYL; KVPLLYLL; VIPFFLYF; IPFFLYFQ; PFFLYFQV; FFLYFQVH; FLYFQVHG;
LYFQVHGC; YFQVHGCC; FQVHGCCS; QVHGCCSS; VHGCCSST; HGCCSSTF; GCCSSTFG; CCSSTFGG;
CSSTFGGP; SSTFGGPS; STFGGPSC; TFGGPSCQ; FGGPSCQC; GGPSCQCI; GCCCHRIF; CCCHRIFS;
CCHRIFSG; NCCWGGCC; CCWGGCCC; CWGGCCCY; WGGCCCYR; GGCCCYRS; GCCCYRSS;
CCCYRSSN; CCYRSSNC; CYRSSNCI; YRSSNCIP; RSSNCIPC; SSNCIPCY; SNCIPCYC; NCIPCYCR;
CIPCYCRG; IPCYCRGH; PCYCRGHN; CYCRGHNK; YCRGHNKY; CRGHNKYL; RGHNKYLR;
GHNKYLRG; HNKYLRGY; NKYLRGYS; KYLRGYSC; YLRGYSCY; LRGYSCYR; RGYSCYRP;
GYSCYRPN; YSCYRPNS; SCYRPNSS; CYRPNSSN; YRPNSSNI; RPNSSNIC; PNSSNICC; NSSNICCN;
SSNICCNC; SNICCNCW; NICCNCWC; ICCNCWCS; CCNCWCSW; CNCWCSWG; NCWCSWGY;
CWCSWGYC; WCSWGYCW; CSWGYCWV; SWGYCWVC; WGYCWVCC; GYCWVCCF; YCWVCCFN;
CWVCCFNS; WVCCFNSN; VCCFNSNC; LGSQSFHC; GSQSFHCR; SQSFHCRP; QSFHCRPL; SFHCRPLS;
FHCRPLSA; HCRPLSAI; CRPLSAIR; RPLSAIRH; PLSAIRHG; LSAIRHGF; SAIRHGFG; AIRHGFGI;
IRHGFGIV; YSVSWCKY; SVSWCKYF; VSWCKYFC; ALGSFFVC; LGSFFVCY; GSFFVCYY; SFFVCYYF;
FFVCYYFP; FVCYYFPG; VCYYFPGF; CYYFPGFV; YYFPGFVA; YFPGFVAC; FPGFVACY; YTFYNLTG;
TFYNLTGI; FYNLTGIA; YNLTGIAE; NLTGIAEK; LTGIAEKN; TGIAEKNR; GIAEKNRK; IAEKNRKI;
AEKNRKIF; IFGGNYLD; FGGNYLDN; GGNYLDNC; GNYLDNCK; NYLDNCKC; YLDNCKCP;
LDNCKCPY; DNCKCPYK; NCKCPYKL; CKCPYKLL; KGRYPCTF; GRYPCTFW; RYPCTFWP; YPCTFWPY;
PCTFWPYL; QYRRSYTK; YRRSYTKN; RRSYTKNG; RSYTKNGL; SYTKNGLK; YTKNGLKK; TKNGLKKS;
KNGLKKST; NGLKKSTK; GLKKSTKC; LKKSTKCT; KKSTKCTF; KSTKCTFR; STKCTFRR; TKCTFRRV;
KCTFRRVY; CTFRRVYR; TFRRVYRK; FRRVYRKN; RRVYRKNY; RVYRKNYC; VYRKNYCP;
YRKNYCPR; RKNYCPRR; KNYCPRRC; SKNCSSMD; KNCSSMDV; NCSSMDVA; CSSMDVAF;
SSMDVAFT; SMDVAFTS; MDVAFTSR; DVAFTSRP; VAFTSRPV; AFTSRPVR; FTSRPVRD; TSRPVRDC;
SRPVRDCN; RPVRDCNT; PVRDCNTC; VRDCNTCS; RWPQPKEK; WPQPKEKE; PQPKEKES; QPKEKESV;
PKEKESVQ; KEKESVQG; EKESVQGQ; KESVQGQL; ESVQGQLP; SVQGQLPK; VQGQLPKS; QGQLPKSQ;
GQLPKSQR; QLPKSQRN; LPKSQRNP; PKSQRNPC; KSQRNPCK; SQRNPCKC; QRNPCKCQ; RNPCKCQN;
NPCKCQNY; TQKWGIQM; QKWGIQMK; KWGIQMKT; WGIQMKTL; GIQMKTLG; IQMKTLGA;
QMKTLGAL; MKTLGALV; VLKMTLAV; LKMTLAVI; KMTLAVIA; MTLAVIAQ; TLAVIAQR; LAVIAQRE;
AVIAQREK; VIAQREKC; IAQREKCF; AQREKCFP; QREKCFPV; REKCFPVT; EKCFPVTA; KCFPVTAQ;
CFPVTAQQ; FPVTAQQE; PVTAQQEF; VTAQQEFP; TAQQEFPS; AQQEFPSP; QQEFPSPI; LYKQRLLE;
LACLTFMQ; ACLTFMQG; CLTFMQGH; LTFMQGHK; TFMQGHKK; FMQGHKKC; MQGHKKCM;
QGHKKCMS; GHKKCMSM; HKKCMSMV; KKCMSMVE; KCMSMVEE; CMSMVEEN; MSMVEENL;
SMVEENLF; MVEENLFK; VEENLFKA; EENLFKAV; ENLFKAVI; NLFKAVIS; LFKAVIST; FKAVISTS;
KAVISTSL; AVISTSLL; VENPWKCR; ENPWKCRE; NPWKCREC; ITGQSTLM; TGQSTLMV; GQSTLMVL;
PLKTQQPS; LKTQQPSP; KTQQPSPR; ILTIRPIW; LTIRPIWT; TIRPIWTK; IRPIWTKT; RPIWTKTM;
PIWTKTML; IWTKTMLI; WTKTMLIQ; TKTMLIQL; KTMLIQLS; TMLIQLSA; MLIQLSAG; LIQLSAGY;
IQLSAGYL; QLSAGYLI; LSAGYLIP; SAGYLIPV; AGYLIPVE; GYLIPVEM; YLIPVEMK; LIPVEMKM;
IPVEMKML; PVEMKMLG; VEMKMLGI; EMKMLGIL; MKMLGILG; KMLGILGL; MLGILGLS; LGILGLSQ;
GILGLSQE; ILGLSQEG; LGLSQEGK; GLSQEGKM; LSQEGKMF; SQEGKMFP; QEGKMFPQ; EGKMFPQY;
GKMFPQYF; KMFPQYFM; PTQLPQCC; MNRVWGLF; NRVWGLFV; RVWGLFVK; VWGLFVKL;
WGLFVKLI; GLFVKLIA; LFVKLIAC; FVKLIACM; VKLIACMF; KLIACMFQ; LIACMFQL; IACMFQLL;
ACMFQLLI; CMFQLLIF; MFQLLIFV; FQLLIFVA; QLLIFVAC; LLIFVACL; LIFVACLL; IFVACLLT;
FVACLLTA; VACLLTAL; ACLLTALE; CLLTALEH; LLTALEHN; LTALEHNS; TALEHNSG; ALEHNSGE;
LEHNSGEA; EHNSGEAL; HNSGEALQ; NSGEALQD; SGEALQDI; GEALQDIL; EALQDILR; ALQDILRS;
LQDILRSA; RILTQFPF; ILTQFPFC; TGEPREWM; GEPREWMG; EPREWMGS; PREWMGSL; REWMGSLC;
EWMGSLCM; WMGSLCMV; MGSLCMVW; GSLCMVWN; SLCMVWNP; LCMVWNPR; KRLGCLMA;
RLGCLMAQ; LGCLMAQK; GCLMAQKD; CLMAQKDF; LMAQKDFQ; MAQKDFQG; AQKDFQGT;
QKDFQGTQ; KDFQGTQI; DILTNRDN; ILTNRDNC; LTNRDNCK; TNRDNCKP; NRDNCKPK; RDNCKPKC;
DNCKPKCF; NCKPKCFK; CKPKCFKQ; KPKCFKQV; PKCFKQVL; KCFKQVLL; CFKQVLLL; FKQVLLLY;
KQVLLLYI; QVLLLYIY; VLLLYIYI; MLLLYKPL; LLLYKPLL; LLYKPLLS; LYKPLLSL; YKPLLSLC;
KPLLSLCY; PLLSLCYF; LLSLCYFG; LSLCYFGG; SLCYFGGG; LCYFGGGV; CYFGGGVL; YFGGGVLG;
FGGGVLGL; GGGVLGLL; GGVLGLLK; GVLGLLKH; KPLHKCNS; LWGSDLWE; WGSDLWES;
GSDLWESS; SDLWESSA; DLWESSAG; LWESSAGA; WESSAGAE; ESSAGAEV; SSAGAEVS; SAGAEVSE;
AGAEVSET; GAEVSETW; AEVSETWE; EVSETWEE; VSETWEEH; SETWEEHC; ETWEEHCD;
TWEEHCDW; WEEHCDWD; EEHCDWDS; EHCDWDSV; HCDWDSVL; CDWDSVLD; DWDSVLDP;
WDSVLDPC; DSVLDPCP; SVLDPCPE; VLDPCPES; LDPCPESS; DPCPESSV; PCPESSVS; CPESSVSE;
PESSVSES; ESSVSESS; SSVSESSS; SVSESSSL; VSESSSLV; SESSSLVI; ESSSLVIS; SSSLVISR; SSLVISRI;
SLVISRIH; LVISRIHF; VISRIHFP; ISRIHFPM; SRIHFPMH; RIHFPMHI; IHFPMHIL; HFPMHILY; FPMHILYF;
PMHILYFI; MHILYFIL; HILYFILE; ILYFILEK; LYFILEKV; YFILEKVY; FILEKVYI; ILEKVYIL; LEKVYILI;
EKVYILIS; KVYILISE; VYILISES; YILISESS; ILISESSL; LISESSLS; ISESSLSF; SESSLSFH; ESSLSFHS;
SSLSFHST; SLSFHSTI; LSFHSTIL; SFHSTILD; FHSTILDC; HSTILDCI; STILDCIS; TILDCISV; ILDCISVA;
LDCISVAK; DCISVAKS; CISVAKSA; ISVAKSAT; SVAKSATG; VAKSATGL; AKSATGLN; KSATGLNQ;
SATGLNQI; ATGLNQIS; TGLNQISS; GLNQISSS; LNQISSSN; NQISSSNK; QISSSNKV; ISSSNKVI;
SSSNKVIP; SSNKVIPL; SNKVIPLC; NKVIPLCK; KVIPLCKI; VIPLCKIL; IPLCKILF; PLCKILFS; LCKILFSS;
CKILFSSK; KILFSSKN; ILFSSKNS; LFSSKNSE; FSSKNSEF; SSKNSEFC; SKNSEFCK; KNSEFCKD;
NSEFCKDF; SEFCKDFL; EFCKDFLK; FCKDFLKY; CKDFLKYI; KDFLKYIL; DFLKYILG; FLKYILGL;
LKYILGLK; KYILGLKS; YILGLKSI; ILGLKSIC; LGLKSICL; GLKSICLT; LKSICLTN; KSICLTNL;
SICLTNLA; ICLTNLAC; CLTNLACR; LTNLACRV; TNLACRVL; NLACRVLG; LACRVLGT; ACRVLGTG;
CRVLGTGY; RVLGTGYS; VLGTGYSF; LGTGYSFI; GTGYSFIV; TGYSFIVT; GYSFIVTK; YSFIVTKP;
SFTVTKPG; FIVTKPGG; IVTKPGGN; VTKPGGNI; TKPGGNIW; KPGGNIWV; PGGNIWVL; GGNIWVLL;
GNIWVLLF; NIWVLLFK; IWVLLFKC; WVLLFKCF; VLLFKCFF; LLFKCFFS; LFKCFFSK; FKCFFSKF;
KCFFSKFT; CFFSKFTL; FFSKFTLT; FSKFTLTL; SKFTLTLP; KFTLTLPS; FTLTLPSK; SLKLSKLF;
LKLSKLFI; KLSKLFIP; LSKLFIPC; SKLFIPCP; KLFIPCPE; LFIPCPEG; FIPCPEGK; IPCPEGKS; PCPEGKSF;
CPEGKSFD; PEGKSFDS; EGKSFDSA; GKSFDSAP; KSFDSAPV; SFDSAPVP; FDSAPVPF; DSAPVPFT;
SAPVPFTS; APVPFTSS; PVPFTSSK; VPFTSSKT; PFTSSKTT; FTSSKTTM; TSSKTTMY; SIATPSSK;
IATPSSKV; ATPSSKVS; TPSSKVSL; PSSKVSLS; SSKVSLSM; SKVSLSMG; KVSLSMGR; VSLSMGRF;
SLSMGRFT; LSMGRFTF; SMGRFTFK; MGRFTFKA; GRFTFKAL; RFTFKALP; FTFKALPP; TFKALPPH;
FKALPPHK; KALPPHKS; ALPPHKSN; LPPHKSNN; PPHKSNNP; PHKSNNPA; HKSNNPAA; KSNNPAAS;
SNNPAASV; NNPAASVV; NPAASVVF; PAASVVFP; AASVVFPL; ASVVFPLS; SVVFPLSM; VVFPLSMG;
VFPLSMGP; FPLSMGPL; PLSMGPLN; LSMGPLNN; SMGPLNNQ; MGPLNNQY; GPLNNQYL; PLNNQYLL;
LNNQYLLL; NNQYLLLG; NQYLLLGT; QYLLLGTL; YLLLGTLK; LLLGTLKT; LLGTLKTI; LGTLKTIQ;
GTLKTIQC; TLKTIQCK; LKTIQCKK; KTIQCKKS; TIQCKKSN; IQCKKSNI; QCKKSNIT; CKKSNITE;
KKSNITES; KSNITESI; SNITESIL; NITESILG; ITESILGS; TESILGSK; ESILGSKQ; SILGSKQC; ILGSKQCS;
LGSKQCSQ; GSKQCSQA; SKQCSQAT; KQCSQATP; QCSQATPA; CSQATPAI; SQATPAIY; QATPAIYC;
ATPAIYCS; TPAIYCSS; PAIYCSST; AIYCSSTA; IYCSSTAF; YCSSTAFP; APNIKSIL; PNIKSILS; NIKSILSN;
IKSILSNI; LNLSVSIS; NLSVSISS; LSVSISSL; SVSISSLV; VSISSLVI; RVSTLFLA; VSTLFLAK; STLFLAKT;
TLFLAKTV; LFLAKTVS; FLAKTVST; LAKTVSTA; AKTVSTAC; FLLSAKII; LLSAKIIA; LSAKIIAF;
SAKIIAFA; AKIIAFAK; KIIAFAKC; IIAFAKCF; IAFAKCFS; HFLHSSTL; FLHSSTLY; NSKYIPNN;
SKYIPNNK; KYIPNNKN; YIPNNKNT; IPNNKNTS; PNNKNTSS; NNKNTSSH; NKNTSSHF; KNTSSHFV;
NTSSHFVS; TSSHFVST; SSHFVSTA; SHFVSTAY; HFVSTAYS; FVSTAYSV; VSTAYSVI; STAYSVIN;
TAYSVINF; AYSVTNFQ; YSVTNFQD; SVINFQDT; VINFQDTC; INFQDTCF; NFQDTCFV; FQDTCFVS;
QDTCFVSS; DTCFVSSG; TCFVSSGS; CFVSSGSS; FVSSGSSG; VSSGSSGL; SSGSSGLK; SGSSGLKS;
GSSGLKSC; SSGLKSCS; SGLKSCSF; GLKSCSFK; LKSCSFKP; KSCSFKPP; MLSSIVWY; LSSIVWYG;
SSIVWYGS; SIVWYGSL; IVWYGSLV; VWYGSLVK; WYGSLVKA; YGSLVKAL; GSLVKALY; SLVKALYS;
LVKALYSK; VKALYSKY; KALYSKYS; ALYSKYSL; LYSKYSLL; YSKYSLLT; SKYSLLTP; KYSLLTPL;
YSLLTPLQ; SLLTPLQI; LLTPLQIK; LTPLQIKK; TPLQIKKL; PLQIKKLK; LQIKKLKV; QIKKLKVH;
IKKLKVHS; KKLKVHSF; QKLLIAET; KLLIAETL; LLIAETLC; LIAETLCL; IAETLCLC; AETLCLCG;
ETLCLCGV; TLCLCGVK; LCLCGVKK; CLCGVKKN; LCGVKKNI; CGVKKNII; GVKKNIIL; VKKNIILC;
KKNIILCP; KNIILCPA; NIILCPAH; IILCPAHM; ILCPAHMC; LCPAHMCL; CPAHMCLL; PAHMCLLI;
AHMCLLIK; HMCLLIKV; MCLLIKVT; CLLIKVTE; LLIKVTEY; LIKVTEYF; IKVTEYFS; KVTEYFSI;
VTEYFSIS; TEYFSISF; EYFSISFL; YFSISFLY; FSISFLYR; SISFLYRI; AFSLVVYT; FSLVVYTA;
SLVVYTAK; LVVYTAKQ; VVYTAKQA; VYTAKQAR; YTAKQARV; TAKQARVL; AKQARVLL;
KQARVLLL; QARVLLLN; ARVLLLNT; RVLLLNTA; LRNWCRSE; RNWCRSEG; NWCRSEGK;
WCRSEGKS; CRSEGKSL; RSEGKSLG; SEGKSLGS; EGKSLGSS; GKSLGSST; KSLGSSTF; SLGSSTFL;
LGSSTFLF; GSSTFLFF; SSTFLFFL; STFLFFLG; TFLFFLGG; FLFFLGGV; LFFLGGVE; FFLGGVEC;
ESAVASSS; SAVASSSL; AVASSSLA; VASSSLAN; ASSSLANI; SSSLANIS; SSLANISS; SLANISSW;
LANISSWQ; ANISSWQN; NISSWQNK; ISSWQNKS; SSWQNKSS; SWQNKSSS; WQNKSSSH; QNKSSSHF;
NKSSSHFS; KSSSHFSL; SSSHFSLK; SSHFSLKE; SHFSLKEL; HFSLKELH; FSLKELHQ; SLKELHQD;
LKELHQDS; KELHQDSH; ELHQDSHS; LHQDSHSS; HQDSHSSV; QDSHSSVP; VGTYKKNN; GTYKKNNY;
TYKKNNYL; YKKNNYLG; KKNNYLGP; KNNYLGPF; NNYLGPFN; NYLGPFNI; YLGPFNIL; LGPFNILL;
GPFNILLF; PFNILLFI; VSYLKALD; SYLKALDL; REFLQLFG; EFLQLFGP; FLQLFGPT; LQLFGPTI;
QLFGPTIA; LFGPTIAE; FGPTIAEF; GPTIAEFL; PTIAEFLQ; TIAEFLQL; IAEFLQLG; AEFLQLGL;
EFLQLGLS; FLQLGLSQ; LQLGLSQT; QLGLSQTT; LGLSQTTV; SSQCSSNL; SQCSSNLS; QCSSNLSK;
CSSNLSKP; SSNLSKPR; SNLSKPRA; NLSKPRAL; LSKPRALF; SKPRALFL; KPRALFLK; PRALFLKI;
RALFLKIF; ALFLKIFY; LFLKIFYL; FLKIFYLN; LKIFYLNA; KIFYLNAL; IFYLNALI; ADIACKGS;
DIACKGSA; IACKGSAQ; ACKGSAQK; CKGSAQKA; KGSAQKAF; GSAQKAFW; SAQKAFWN;
AQKAFWNK; AIPCSTGY; IPCSTGYL; PCSTGYLG; CSTGYLGK; STGYLGKE; TGYLGKEE; GYLGKEEN;
YLGKEENQ; LGKEENQH; GKEENQHK; KEENQHKP; EENQHKPL; ENQHKPLS; NQHKPLSY; QHKPLSYS;
HKPLSYSR; KPLSYSRF; PLSYSRFQ; LSYSRFQN; SYSRFQNQ; YSRFQNQA; SRFQNQAD; RFQNQADE;
FQNQADEL; QNQADELP; NQADELPL; QADELPLH; ADELPLHP; DELPLHPA; ELPLHPAP; LPLHPAPF;
PLHPAPFF; LHPAPFFY; HPAPFFYT; PAPFFYTK; APFFYTKY; PFFYTKYS; FFYTKYSF; FYTKYSFS;
YTKYSFSS; TKYSFSSF; KYSFSSFY; YSFSSFYP; SFSSFYPR; FSSFYPRR; SSFYPRRP; SFYPRRPL;
FYPRRPLC; YPRRPLCQ; PRRPLCQG; RRPLCQGE; RPLCQGEI; PLCQGEIP; LCQGEIPY; CQGEIPYT;
QGEIPYTS; GEIPYTSL; EIPYTSLN; IPYTSLNK; PYTSLNKL; YTSLNKLF; TSLNKLFS; SLNKLFSL;
LNKLFSLR; NKLFSLRE; KLFSLRED; LFSLREDF; FSLREDFP; SLREDFPR; LREDFPRQ; REDFPRQL;
EDFPRQLF; DFPRQLFQ; FPRQLFQG; PRQLFQGL; RQLFQGLK; QLFQGLKG; LFQGLKGP

9 mers:

GFPQIVLLG; FPQIVLLGL; PQIVLLGLR; QIVLLGLRK; IVLLGLRKS; VLLGLRKSL; LLGLRKSLH;
LGLRKSLHT; GLRKSLHTL; LRKSLHTLT; RKSLHTLTT; EKGWRQRRP; KGWRQRRPR; GWRQRRPRP;
WRQRRPRPL; RQRRPRPLI; QRRPRPLIY; RRPRPLIYY; RPRPLIYYK; PRPLTYYKK; RPLIYYKKK;
PLIYYKKKG; LIYYKKKGH; IYYKKKGHR; YYKKKGHRE; YKKKGHREE; KKKGHREEL; KKGHREELL;
KGHREELLT; GHREELLTH; HREELLTHG; REELLTHGM; EELLTHGMQ; ELLTHGMQP; LLTHGMQPN;
LTHGMQPNH; THGMQPNHD; HGMQPNHDL; GMQPNHDLR; MQPNHDLRK; QPNHDLRKE; PNHDLRKES;
NHDLRKESA; LTGECSQTM; TGECSQTMT; GECSQTMTS; ECSQTMTSG; CSQTMTSGR; SQTMTSGRK;
QTMTSGRKV; TMTSGRKVH; MTSGRKVHD; TSGRKVHDS; SGRKVHDSQ; GRKVHDSQG; RKVHDSQGG;
KVHDSQGGA; VHDSQGGAA; HDSQGGAAY; DSQGGAAYP; SQGGAAYPW; QGGAAYPWN;
GGAAYPWNA; GAAYPWNAA; AAYPWNAAK; AYPWNAAKP; PQEGKCMTD; QEGKCMTDM;
EGKCMTDMF; GKCMTDMFC; KCMTDMFCE; CMTDMFCEP; MTDMFCEPR; TDMFCEPRN; DMFCEPRNL;
MFCEPRNLG; FCEPRNLGL; CEPRNLGLV; EPRNLGLVP; PRNLGLVPS; TGQRPWFCA; GQRPWFCAS;
QRPWFCASC; RPWFCASCH; PWFCASCHD; WFCASCHDK; FCASCHDKL; CASCHDKLQ; KLVKPGLEQ;
LVKPGLEQK; VKPGLEQKK; KPGLEQKKE; PGLEQKKEL; GLEQKKELR; LEQKKELRG; EQKKELRGF;
QKKELRGFL; KKELRGFLF; KELRGFLFL; ELRGFLFLF; SFCWNFVEV; FCWNFVEVK; CWNFVEVKT;
WNFVEVKTV; TGKTKVPLL; GKTKVPLLY; KTKVPLLYL; TKVPLLYLL; VIPFFLYFQ; IPFFLYFQV;
PFFLYFQVH; FFLYFQVHG; FLYFQVHGC; LYFQVHGCC; YFQVHGCCS; FQVHGCCSS; QVHGCCSST;
VHGCCSSTF; HGCCSSTFG; GCCSSTFGG; CCSSTFGGP; CSSTFGGPS; SSTFGGPSC; STFGGPSCQ;
TFGGPSCQC; FGGPSCQCI; GCCCHRIFS; CCCHRIFSG; NCCWGGCCC; CCWGGCCCY; CWGGCCCYR;
WGGCCCYRS; GGCCCYRSS; GCCCYRSSN; CCCYRSSNC; CCYRSSNCI; CYRSSNCIP; YRSSNCIPC;
RSSNCIPCY; SSNCIPCYC; SNCIPCYCR; NCIPCYCRG; CIPCYCRGH; IPCYCRGHN; PCYCRGHNK;
CYCRGHNKY; YCRGHNKYL; CRGHNKYLR; RGHNKYLRG; GHNKYLRGY; HNKYLRGYS; NKYLRGYSC;
KYLRGYSCY; YLRGYSCYR; LRGYSCYRP; RGYSCYRPN; GYSCYRPNS; YSCYRPNSS; SCYRPNSSN;
CYRPNSSNI; YRPNSSNIC; RPNSSNICC; PNSSNICCN; NSSNICCNC; SSNICCNCW; SNICCNCWC;
NICCNCWCS; ICCNCWCSW; CCNCWCSWG; CNCWCSWGY; NCWCSWGYC; CWCSWGYCW;
WCSWGYCWV; CSWGYCWVC; SWGYCWVCC; WGYCWVCCF; GYCWVCCFN; YCWVCCFNS;
CWVCCFNSN; WVCCFNSNC; LGSQSFHCR; GSQSFHCRP; SQSFHCRPL; QSFHCRPLS; SFHCRPLSA;
FHCRPLSAI; HCRPLSAIR; CRPLSAIRH; RPLSAIRHG; PLSAIRHGF; LSAIRHGFG; SAIRHGFGI;
AIRHGFGIV; YSVSWCKYF; SVSWCKYFC; ALGSFFVCY; LGSFFVCYY; GSFFVCYYF; SFFVCYYFP;
FFVCYYFPG; FVCYYFPGF; VCYYFPGFV; CYYFPGFVA; YYFPGFVAC; YFPGFVACY; YTFYNLTGI;
TFYNLTGIA; FYNLTGIAE; YNLTGIAEK; NLTGIAEKN; LTGIAEKNR; TGIAEKNRK; GIAEKNRKI;
IAEKNRKIF; IFGGNYLDN; FGGNYLDNC; GGNYLDNCK; GNYLDNCKC; NYLDNCKCP; YLDNCKCPY;
LDNCKCPYK; DNCKCPYKL; NCKCPYKLL; KGRYPCTFW; GRYPCTFWP; RYPCTFWPY; YPCTFWPYL;
QYRRSYTKN; YRRSYTKNG; RRSYTKNGL; RSYTKNGLK; SYTKNGLKK; YTKNGLKKS; TKNGLKKST;
KNGLKKSTK; NGLKKSTKC; GLKKSTKCT; LKKSTKCTF; KKSTKCTFR; KSTKCTFRR; STKCTFRRV;
TKCTFRRVY; KCTFRRVYR; CTFRRVYRK; TFRRVYRKN; FRRVYRKNY; RRVYRKNYC; RVYRKNYCP;
VYRKNYCPR; YRKNYCPRR; RKNYCPRRC; SKNCSSMDV; KNCSSMDVA; NCSSMDVAF; CSSMDVAFT;
SSMDVAFTS; SMDVAFTSR; MDVAFTSRP; DVAFTSRPV; VAFTSRPVR; AFTSRPVRD; FTSRPVRDC;
TSRPVRDCN; SRPVRDCNT; RPVRDCNTC; PVRDCNTCS; RWPQPKEKE; WPQPKEKES; PQPKEKESV;
QPKEKESVQ; PKEKESVQG; KEKESVQGQ; EKESVQGQL; KESVQGQLP; ESVQGQLPK; SVQGQLPKS;
VQGQLPKSQ; QGQLPKSQR; GQLPKSQRN; QLPKSQRNP; LPKSQRNPC; PKSQRNPCK; KSQRNPCKC;
SQRNPCKCQ; QRNPCKCQN; RNPCKCQNY; TQKWGIQMK; QKWGIQMKT; KWGIQMKTL; WGIQMKTLG;
GIQMKTLGA; IQMKTLGAL; QMKTLGALV; VLKMTLAVI; LKMTLAVIA; KMTLAVIAQ; MTLAVIAQR;
TLAVIAQRE; LAVIAQREK; AVIAQREKC; VIAQREKCF; IAQREKCFP; AQREKCFPV; QREKCFPVT;
REKCFPVTA; EKCFPVTAQ; KCFPVTAQQ; CFPVTAQQE; FPVTAQQEF; PVTAQQEFP; VTAQQEFPS;
TAQQEFPSP; AQQEFPSPI; LACLTFMQG; ACLTFMQGH; CLTFMQGHK; LTFMQGHKK; TFMQGHKKC;
FMQGHKKCM; MQGHKKCMS; QGHKKCMSM; GHKKCMSMV; HKKCMSMVE; KKCMSMVEE;
KCMSMVEEN; CMSMVEENL; MSMVEENLF; SMVEENLFK; MVEENLFKA; VEENLFKAV; EENLFKAVI;
ENLFKAVIS; NLFKAVIST; LFKAVISTS; FKAVISTSL; KAVISTSLL; VENPWKCRE; ENPWKCREC;
ITGQSTLMV; TGQSTLMVL; PLKTQQPSP; LKTQQPSPR; ILTIRPIWT; LTIRPIWTK; TIRPIWTKT;
IRPIWTKTM; RPIWTKTML; PIWTKTMLI; IWTKTMLIQ; WTKTMLIQL; TKTMLIQLS; KTMLIQLSA;
TMLIQLSAG; MLIQLSAGY; LIQLSAGYL; IQLSAGYLI; QLSAGYLIP; LSAGYLIPV; SAGYLIPVE;
AGYLIPVEM; GYLIPVEMK; YLIPVEMKM; LIPVEMKML; IPVEMKMLG; PVEMKMLGI; VEMKMLGIL;
EMKMLGILG; MKMLGILGL; KMLGILGLS; MLGILGLSQ; LGILGLSQE; GILGLSQEG; ILGLSQEGK;
LGLSQEGKM; GLSQEGKMF; LSQEGKMFP; SQEGKMFPQ; QEGKMFPQY; EGKMFPQYF; GKMFPQYFM;
MNRVWGLFV; NRVWGLFVK; RVWGLFVKL; VWGLFVKLI; WGLFVKLIA; GLFVKLIAC; LFVKLIACM;
FVKLIACMF; VKLIACMFQ; KLIACMFQL; LIACMFQLL; IACMFQLLI; ACMFQLLIF; CMFQLLIFV;
MFQLLIFVA; FQLLIFVAC; QLLIFVACL; LLIFVACLL; LIFVACLLT; IFVACLLTA; FVACLLTAL;
VACLLTALE; ACLLTALEH; CLLTALEHN; LLTALEHNS; LTALEHNSG; TALEHNSGE; ALEHNSGEA;
LEHNSGEAL; EHNSGEALQ; HNSGEALQD; NSGEALQDI; SGEALQDIL; GEALQDILR; EALQDILRS;
ALQDILRSA; RILTQFPFC; TGEPREWMG; GEPREWMGS; EPREWMGSL; PREWMGSLC; REWMGSLCM;
EWMGSLCMV; WMGSLCMYW; MGSLCMYWN; GSLCMVWNP; SLCMVWNPR; KRLGCLMAQ;
RLGCLMAQK; LGCLMAQKD; GCLMAQKDF; CLMAQKDFQ; LMAQKDFQG; MAQKDFQGT;
AQKDFQGTQ; QKDFQGTQI; DILTNRDNC; ILTNRDNCK; LTNRDNCKP; TNRDNCKPK; NRDNCKPKC;
RDNCKPKCF; DNCKPKCFK; NCKPKCFKQ; CKPKCFKQV; KPKCFKQVL; PKCFKQVLL; KCFKQVLLL;
CFKQVLLLY; FKQVLLLYI; KQVLLLYIY; QVLLLYIYI; MLLLYKPLL; LLLYKPLLS; LLYKPLLSL;
LYKPLLSLC; YKPLLSLCY; KPLLSLCYF; PLLSLCYFG; LLSLCYFGG; LSLCYFGGG; SLCYFGGGV;
LCYFGGGVL; CYFGGGVLG; YFGGGVLGL; FGGGVLGLL; GGGVLGLLK; GGVLGLLKH; LWGSDLWES;
WGSDLWESS; GSDLWESSA; SDLWESSAG; DLWESSAGA; LWESSAGAE; WESSAGAEV; ESSAGAEVS;
SSAGAEVSE; SAGAEVSET; AGAEVSETW; GAEVSETWE; AEVSETWEE; EVSETWEEH; VSETWEEHC;
SETWEEHCD; ETWEEHCDW; TWEEHCDWD; WEEHCDWDS; EEHCDWDSV; EHCDWDSVL;
HCDWDSVLD; CDWDSVLDP; DWDSVLDPC; WDSVLDPCP; DSVLDPCPE; SVLDPCPES; VLDPCPESS;
LDPCPESSV; DPCPESSVS; PCPESSVSE; CPESSVSES; PESSVSESS; ESSVSESSS; SSVSESSSL; SVSESSSLV;
VSESSSLVI; SESSSLVIS; ESSSLVISR; SSSLVISRI; SSLVISRIH; SLVISRIHF; LVISRIHFP; VISRIHFPM;
ISRIHFPMH; SRIHFPMHI; RIHFPMHIL; IHFPMHILY; HFPMHILYF; FPMHILYFI; PMHILYFIL; MHILYFILE;
HILYFILEK; ILYFILEKV; LYFILEKVY; YFILEKVYI; FILEKVYIL; ILEKVYILI; LEKVYILIS; EKVYILISE;
KVYILISES; VYILISESS; YILISESSL; ILISESSLS; LISESSLSF; ISESSLSFH; SESSLSFHS; ESSLSFHST;
SSLSFHSTI; SLSFHSTIL; LSFHSTILD; SFHSTILDC; FHSTILDCI; HSTILDCIS; STILDCISV; TILDCISVA;
ILDCISVAK; LDCISVAKS; DCISVAKSA; CISVAKSAT; ISVAKSATG; SVAKSATGL; VAKSATGLN;
AKSATGLNQ; KSATGLNQI; SATGLNQIS; ATGLNQISS; TGLNQISSS; GLNQISSSN; LNQISSSNK;
NQISSSNKV; QISSSNKVI; ISSSNKVIP; SSSNKVIPL; SSNKVIPLC; SNKVIPLCK; NKVIPLCKI; KVIPLCKIL;
VIPLCKILF; IPLCKILFS; PLCKILFSS; LCKILFSSK; CKILFSSKN; KILFSSKNS; ILFSSKNSE; LFSSKNSEF;
FSSKNSEFC; SSKNSEFCK; SKNSEFCKD; KNSEFCKDF; NSEFCKDFL; SEFCKDFLK; EFCKDFLKY;
FCKDFLKYI; CKDFLKYIL; KDFLKYILG; DFLKYILGL; FLKYILGLK; LKYILGLKS; KYILGLKSI;
YILGLKSIC; ILGLKSICL; LGLKSICLT; GLKSICLTN; LKSICLTNL; KSICLTNLA; SICLTNLAC;
ICLTNLACR; CLTNLACRV; LTNLACRVL; TNLACRVLG; NLACRVLGT; LACRVLGTG; ACRVLGTGY;
CRVLGTGYS; RVLGTGYSF; VLGTGYSFI; LGTGYSFIV; GTGYSFIVT; TGYSFTVTK; GYSFIVTKP;
YSFIVTKPG; SFIVTKPGG; FIVTKPGGN; IVTKPGGNI; VTKPGGNIW; TKPGGNIWV; KPGGNIWVL;
PGGNIWVLL; GGNIWVLLF; GNIWVLLFK; NIWVLLFKC; IWVLLFKCF; WVLLFKCFF; VLLFKCFFS;
LLFKCFFSK; LFKCFFSKF; FKCFFSKFT; KCFFSKFTL; CFFSKFTLT; FFSKFTLTL; FSKFTLTLP;
SKFTLTLPS; KFTLTLPSK; SLKLSKLFI; LKLSKLFIP; KLSKLFIPC; LSKLFIPCP; SKLFIPCPE; KLFIPCPEG;
LFIPCPEGK; FIPCPEGKS; IPCPEGKSF; PCPEGKSFD; CPEGKSFDS; PEGKSFDSA; EGKSFDSAP;
GKSFDSAPV; KSFDSAPVP; SFDSAPVPF; FDSAPVPFT; DSAPVPFTS; SAPVPFTSS; APVPFTSSK;
PVPFTSSKT; VPFTSSKTT; PFTSSKTTM; FTSSKTTMY; SIATPSSKV; IATPSSKVS; ATPSSKVSL;
TPSSKVSLS; PSSKVSLSM; SSKVSLSMG; SKVSLSMGR; KVSLSMGRF; VSLSMGRFT; SLSMGRFTF;
LSMGRFTFK; SMGRFTFKA; MGRFTFKAL; GRFTFKALP; RFTFKALPP; FTFKALPPH; TFKALPPHK;
FKALPPHKS; KALPPHKSN; ALPPHKSNN; LPPHKSNNP; PPHKSNNPA; PHKSNNPAA; HKSNNPAAS;
KSNNPAASV; SNNPAASVV; NNPAASVVF; NPAASVVFP; PAASVVFPL; AASVVFPLS; ASVVFPLSM;
SVVFPLSMG; VVFPLSMGP; VFPLSMGPL; FPLSMGPLN; PLSMGPLNN; LSMGPLNNQ; SMGPLNNQY;
MGPLNNQYL; GPLNNQYLL; PLNNQYLLL; LNNQYLLLG; NNQYLLLGT; NQYLLLGTL; QYLLLGTLK;
YLLLGTLKT; LLLGTLKTI; LLGTLKTIQ; LGTLKTIQC; GTLKTIQCK; TLKTIQCKK; LKTIQCKKS;
KTIQCKKSN; TIQCKKSNI; IQCKKSNIT; QCKKSNITE; CKKSNITES; KKSNITESI; KSNITESIL; SNITESILG;
NITESILGS; ITESILGSK; TESILGSKQ; ESILGSKQC; SILGSKQCS; ILGSKQCSQ; LGSKQCSQA;
GSKQCSQAT; SKQCSQATP; KQCSQATPA; QCSQATPAI; CSQATPAIY; SQATPAIYC; QATPAIYCS;
ATPAIYCSS; TPAIYCSST; PAIYCSSTA; AIYCSSTAF; IYCSSTAFP; APNIKSILS; PNIKSILSN; NIKSILSNI;
LNLSVSISS; NLSVSISSL; LSVSISSLV; SVSISSLVI; RVSTLFLAK; VSTLFLAKT; STLFLAKTV;
TLFLAKTVS; LFLAKTVST; FLAKTVSTA; LAKTVSTAC; FLLSAKIIA; LLSAKIIAF; LSAKIIAFA;
SAKIIAFAK; AKIIAFAKC; KIIAFAKCF; IIAFAKCFS; HFLHSSTLY; NSKYIPNNK; SKYIPNNKN;
KYIPNNKNT; YIPNNKNTS; IPNNKNTSS; PNNKNTSSH; NNKNTSSHF; NKNTSSHFV; KNTSSHFVS;
NTSSHFVST; TSSHFVSTA; SSHFVSTAY; SHFVSTAYS; HFVSTAYSV; FVSTAYSVI; VSTAYSVIN;
STAYSVINF; TAYSVINFQ; AYSVINFQD; YSVINFQDT; SVINFQDTC; VINFQDTCF; INFQDTCFV;
NFQDTCFVS; FQDTCFVSS; QDTCFVSSG; DTCFVSSGS; TCFVSSGSS; CFVSSGSSG; FVSSGSSGL;
VSSGSSGLK; SSGSSGLKS; SGSSGLKSC; GSSGLKSCS; SSGLKSCSF; SGLKSCSFK; GLKSCSFKP;
LKSCSFKPP; MLSSIVWYG; LSSIVWYGS; SSIVWYGSL; SIVWYGSLV; IVWYGSLVK; VWYGSLVKA;
WYGSLVKAL; YGSLVKALY; GSLVKALYS; SLVKALYSK; LVKALYSKY; VKALYSKYS; KALYSKYSL;
ALYSKYSLL; LYSKYSLLT; YSKYSLLTP; SKYSLLTPL; KYSLLTPLQ; YSLLTPLQI; SLLTPLQIK;
LLTPLQIKK; LTPLQIKKL; TPLQIKKLK; PLQIKKLKV; LQIKKLKVH; QIKKLKVHS; IKKLKVHSF;
QKLLIAETL; KLLIAETLC; LLIAETLCL; LIAETLCLC; IAETLCLCG; AETLCLCGV; ETLCLCGVK;
TLCLCGVKK; LCLCGVKKN; CLCGVKKNI; LCGVKKNII; CGVKKNIIL; GVKKNIILC; VKKNIILCP;
KKNIILCPA; KNIILCPAH; NIILCPAHM; IILCPAHMC; ILCPAHMCL; LCPAHMCLL; CPAHMCLLI;
PAHMCLLIK; AHMCLLIKV; HMCLLIKVT; MCLLIKVTE; CLLIKVTEY; LLIKVTEYF; LIKVTEYFS;
IKVTEYFSI; KVTEYFSIS; VTEYFSISF; TEYFSISFL; EYFSISFLY; YFSISFLYR; FSISFLYRI; AFSLVVYTA;
FSLVVYTAK; SLVVYTAKQ; LVVYTAKQA; VVYTAKQAR; VYTAKQARV; YTAKQARVL; TAKQARVLL;
AKQARVLLL; KQARVLLLN; QARVLLLNT; ARVLLLNTA; LRNWCRSEG; RNWCRSEGK; NWCRSEGKS;
WCRSEGKSL; CRSEGKSLG; RSEGKSLGS; SEGKSLGSS; EGKSLGSST; GKSLGSSTF; KSLGSSTFL;
SLGSSTFLF; LGSSTFLFF; GSSTFLFFL; SSTFLFFLG; STFLFFLGG; TFLFFLGGV; FLFFLGGVE;
LFFLGGVEC; ESAVASSSL; SAVASSSLA; AVASSSLAN; VASSSLANI; ASSSLANIS; SSSLANISS;
SSLANISSW; SLANISSWQ; LANISSWQN; ANISSWQNK; NISSWQNKS; ISSWQNKSS; SSWQNKSSS;
SWQNKSSSH; WQNKSSSHF; QNKSSSHFS; NKSSSHFSL; KSSSHFSLK; SSSHFSLKE; SSHFSLKEL;
SHFSLKELH; HFSLKELHQ; FSLKELHQD; SLKELHQDS; LKELHQDSH; KELHQDSHS; ELHQDSHSS;
LHQDSHSSV; HQDSHSSVP; VGTYKKNNY; GTYKKNNYL; TYKKNNYLG; YKKNNYLGP; KKNNYLGPF;
KNNYLGPFN; NNYLGPFNI; NYLGPFNIL; YLGPFNILL; LGPFNILLF; GPFNILLFI; VSYLKALDL;
REFLQLFGP; EFLQLFGPT; FLQLFGPTI; LQLFGPTIA; QLFGPTIAE; LFGPTIAEF; FGPTIAEFL;
GPTIAEFLQ; PTIAEFLQL; TIAEFLQLG; IAEFLQLGL; AEFLQLGLS; EFLQLGLSQ; FLQLGLSQT;
LQLGLSQTT; QLGLSQTTV; SSQCSSNLS; SQCSSNLSK; QCSSNLSKP; CSSNLSKPR; SSNLSKPRA;
SNLSKPRAL; NLSKPRALF; LSKPRALFL; SKPRALFLK; KPRALFLKI; PRALFLKIF; RALFLKIFY;
ALFLKIFYL; LFLKIFYLN; FLKIFYLNA; LKIFYLNAL; KIFYLNALI; ADIACKGSA; DIACKGSAQ;
IACKGSAQK; ACKGSAQKA; CKGSAQKAF; KGSAQKAFW; GSAQKAFWN; SAQKAFWNK; AIPCSTGYL;
IPCSTGYLG; PCSTGYLGK; CSTGYLGKE; STGYLGKEE; TGYLGKEEN; GYLGKEENQ; YLGKEENQH;
LGKEENQHK; GKEENQHKP; KEENQHKPL; EENQHKPLS; ENQHKPLSY; NQHKPLSYS; QHKPLSYSR;
HKPLSYSRF; KPLSYSRFQ; PLSYSRFQN; LSYSRFQNQ; SYSRFQNQA; YSRFQNQAD; SRFQNQADE;
RFQNQADEL; FQNQADELP; QNQADELPL; NQADELPLH; QADELPLHP; ADELPLHPA; DELPLHPAP;
ELPLHPAPF; LPLHPAPFF; PLHPAPFFY; LHPAPFFYT; HPAPFFYTK; PAPFFYTKY; APFFYTKYS;
PFFYTKYSF; FFYTKYSFS; FYTKYSFSS; YTKYSFSSF; TKYSFSSFY; KYSFSSFYP; YSFSSFYPR;
SFSSFYPRR; FSSFYPRRP; SSFYPRRPL; SFYPRRPLC; FYPRRPLCQ; YPRRPLCQG; PRRPLCQGE;
RRPLCQGEI; RPLCQGEIP; PLCQGEIPY; LCQGEIPYT; CQGEIPYTS; QGEIPYTSL; GEIPYTSLN;
EIPYTSLNK; IPYTSLNKL; PYTSLNKLF; YTSLNKLFS; TSLNKLFSL; SLNKLFSLR; LNKLFSLRE;
NKLFSLRED; KLFSLREDF; LFSLREDFP; FSLREDFPR; SLREDFPRQ; LREDFPRQL; REDFPRQLF;
EDFPRQLFQ; DFPRQLFQG; FPRQLFQGL; PRQLFQGLK; RQLFQGLKG; QLFQGLKGP

10 mers:

GFPQIVLLGL; FPQIVLLGLR; PQIVLLGLRK; QIVLLGLRKS; IVLLGLRKSL; VLLGLRKSLH;
LLGLRKSLHT; LGLRKSLHTL; GLRKSLHTLT; LRKSLHTLTT; EKGWRQRRPR; KGWRQRRPRP;
GWRQRRPRPL; WRQRRPRPLI; RQRRPRPLIY; QRRPRPLIYY; RRPRPLIYYK; RPRPLIYYKK;
PRPLIYYKKK; RPLIYYKKKG; PLIYYKKKGH; LIYYKKKGHR; IYYKKKGHRE; YYKKKGHREE;
YKKKGHREEL; KKKGHREELL; KKGHREELLT; KGHREELLTH; GHREELLTHG; HREELLTHGM;
REELLTHGMQ; EELLTHGMQP; ELLTHGMQPN; LLTHGMQPNH; LTHGMQPNHD; THGMQPNHDL;
HGMQPNHDLR; GMQPNHDLRK; MQPNHDLRKE; QPNHDLRKES; PNHDLRKESA; LTGECSQTMT;
TGECSQTMTS; GECSQTMTSG; ECSQTMTSGR; CSQTMTSGRK; SQTMTSGRKV; QTMTSGRKVH;
TMTSGRKVHD; MTSGRKVHDS; TSGRKVHDSQ; SGRKVHDSQG; GRKVHDSQGG; RKVHDSQGGA;
KVHDSQGGAA; VHDSQGGAAY; HDSQGGAAYP; DSQGGAAYPW; SQGGAAYPWN; QGGAAYPWNA;
GGAAYPWNAA; GAAYPWNAAK; AAYPWNAAKP; PQEGKCMTDM; QEGKCMTDMF; EGKCMTDMFC;
GKCMTDMFCE; KCMTDMFCEP; CMTDMFCEPR; MTDMFCEPRN; TDMFCEPRNL; DMFCEPRNLG;
MFCEPRNLGL; FCEPRNLGLV; CEPRNLGLVP; EPRNLGLVPS; TGQRPWFCAS; GQRPWFCASC;
QRPWFCASCH; RPWFCASCHD; PWFCASCHDK; WFCASCHDKL; FCASCHDKLQ; KLVKPGLEQK;
LVKPGLEQKK; VKPGLEQKKE; KPGLEQKKEL; PGLEQKKELR; GLEQKKELRG; LEQKKELRGF;
EQKKELRGFL; QKKELRGFLF; KKELRGFLFL; KELRGFLFLF; SFCWNFVEVK; FCWNFVEVKT;
CWNFVEVKTV; TGKTKVPLLY; GKTKVPLLYL; KTKVPLLYLL; VIPFFLYFQV; IPFFLYFQVH;
PFFLYFQVHG; FFLYFQVHGC; FLYFQVHGCC; LYFQVHGCCS; YFQVHGCCSS; FQVHGCCSST;
QVHGCCSSTF; VHGCCSSTFG; HGCCSSTFGG; GCCSSTFGGP; CCSSTFGGPS; CSSTFGGPSC;
SSTFGGPSCQ; STFGGPSCQC; TFGGPSCQCI; GCCCHRIFSG; NCCWGGCCCY; CCWGGCCCYR;
CWGGCCCYRS; WGGCCCYRSS; GGCCCYRSSN; GCCCYRSSNC; CCCYRSSNCI; CCYRSSNCIP;
CYRSSNCIPC; YRSSNCIPCY; RSSNCIPCYC; SSNCIPCYCR; SNCIPCYCRG; NCIPCYCRGH; CIPCYCRGHN;
IPCYCRGHNK; PCYCRGHNKY; CYCRGHNKYL; YCRGHNKYLR; CRGHNKYLRG; RGHNKYLRGY;
GHNKYLRGYS; HNKYLRGYSC; NKYLRGYSCY; KYLRGYSCYR; YLRGYSCYRP; LRGYSCYRPN;
RGYSCYRPNS; GYSCYRPNSS; YSCYRPNSSN; SCYRPNSSNI; CYRPNSSNIC; YRPNSSNICC;
RPNSSNICCN; PNSSNICCNC; NSSNICCNCW; SSNICCNCWC; SNICCNCWCS; NICCNCWCSW;
ICCNCWCSWG; CCNCWCSWGY; CNCWCSWGYC; NCWCSWGYCW; CWCSWGYCWV; WCSWGYCWVC;
CSWGYCWVCC; SWGYCWVCCF; WGYCWVCCFN; GYCWVCCFNS; YCWVCCFNSN; CWVCCFNSNC;
LGSQSFHCRP; GSQSFHCRPL; SQSFHCRPLS; QSFHCRPLSA; SFHCRPLSAI; FHCRPLSAIR; HCRPLSAIRH;
CRPLSAIRHG; RPLSAIRHGF; PLSAIRHGFG; LSAIRHGFGI; SAIRHGFGIV; YSVSWCKYFC;
ALGSFFVCYY; LGSFFVCYYF; GSFFVCYYFP; SFFVCYYFPG; FFVCYYFPGF; FVCYYFPGFV;
VCYYFPGFVA; CYYFPGFVAC; YYFPGFVACY; YTFYNLTGIA; TFYNLTGIAE; FYNLTGIAEK;
YNLTGIAEKN; NLTGIAEKNR; LTGIAEKNRK; TGIAEKNRKI; GIAEKNRKIF; IFGGNYLDNC;
FGGNYLDNCK; GGNYLDNCKC; GNYLDNCKCP; NYLDNCKCPY; YLDNCKCPYK; LDNCKCPYKL;
DNCKCPYKLL; KGRYPCTFWP; GRYPCTFWPY; RYPCTFWPYL; QYRRSYTKNG; YRRSYTKNGL;
RRSYTKNGLK; RSYTKNGLKK; SYTKNGLKKS; YTKNGLKKST; TKNGLKKSTK; KNGLKKSTKC;
NGLKKSTKCT; GLKKSTKCTF; LKKSTKCTFR; KKSTKCTFRR; KSTKCTFRRV; STKCTFRRVY;
TKCTFRRVYR; KCTFRRVYRK; CTFRRVYRKN; TFRRVYRKNY; FRRVYRKNYC; RRVYRKNYCP;
RVYRKNYCPR; VYRKNYCPRR; YRKNYCPRRC; SKNCSSMDVA; KNCSSMDVAF; NCSSMDVAFT;
CSSMDVAFTS; SSMDVAFTSR; SMDVAFTSRP; MDVAFTSRPV; DVAFTSRPVR; VAFTSRPVRD;
AFTSRPVRDC; FTSRPVRDCN; TSRPVRDCNT; SRPVRDCNTC; RPVRDCNTCS; RWPQPKEKES;
WPQPKEKESV; PQPKEKESVQ; QPKEKESVQG; PKEKESVQGQ; KEKESVQGQL; EKESVQGQLP;
KESVQGQLPK; ESVQGQLPKS; SVQGQLPKSQ; VQGQLPKSQR; QGQLPKSQRN; GQLPKSQRNP;
QLPKSQRNPC; LPKSQRNPCK; PKSQRNPCKC; KSQRNPCKCQ; SQRNPCKCQN; QRNPCKCQNY;
TQKWGIQMKT; QKWGIQMKTL; KWGIQMKTLG; WGIQMKTLGA; GIQMKTLGAL; IQMKTLGALV;
VLKMTLAVIA; LKMTLAVIAQ; KMTLAVIAQR; MTLAVIAQRE; TLAVIAQREK; LAVIAQREKC;
AVIAQREKCF; VIAQREKCFP; IAQREKCFPV; AQREKCFPVT; QREKCFPVTA; REKCFPVTAQ;
EKCFPVTAQQ; KCFPVTAQQE; CFPVTAQQEF; FPVTAQQEFP; PVTAQQEFPS; VTAQQEFPSP;
TAQQEFPSPI; LACLTFMQGH; ACLTFMQGHK; CLTFMQGHKK; LTFMQGHKKC; TFMQGHKKCM;
FMQGHKKCMS; MQGHKKCMSM; QGHKKCMSMV; GHKKCMSMVE; HKKCMSMVEE; KKCMSMVEEN;
KCMSMVEENL; CMSMVEENLF; MSMVEENLFK; SMVEENLFKA; MVEENLFKAV; VEENLFKAVI;
EENLFKAVIS; ENLFKAVIST; NLFKAVISTS; LFKAVISTSL; FKAVISTSLL; VENPWKCREC; ITGQSTLMVL;
PLKTQQPSPR; ILTIRPIWTK; LTIRPIWTKT; TIRPIWTKTM; IRPIWTKTML; RPIWTKTMLI; PIWTKTMLIQ;
IWTKTMLIQL; WTKTMLIQLS; TKTMLIQLSA; KTMLIQLSAG; TMLIQLSAGY; MLIQLSAGYL;
LIQLSAGYLI; IQLSAGYLIP; QLSAGYLIPV; LSAGYLIPVE; SAGYLIPVEM; AGYLIPVEMK;
GYLIPVEMKM; YLIPVEMKML; LIPVEMKMLG; IPVEMKMLGI; PVEMKMLGIL; VEMKMLGILG;
EMKMLGILGL; MKMLGILGLS; KMLGILGLSQ; MLGILGLSQE; LGILGLSQEG; GILGLSQEGK;
ILGLSQEGKM; LGLSQEGKMF; GLSQEGKMFP; LSQEGKMFPQ; SQEGKMFPQY; QEGKMFPQYF;
EGKMFPQYFM; MNRVWGLFVK; NRVWGLFVKL; RVWGLFVKLI; VWGLFVKLIA; WGLFVKLIAC;
GLFVKLIACM; LFVKLIACMF; FVKLIACMFQ; VKLIACMFQL; KLIACMFQLL; LIACMFQLLI;
IACMFQLLIF; ACMFQLLIFV; CMFQLLIFVA; MFQLLIFVAC; FQLLIFVACL; QLLIFVACLL; LLIFVACLLT;
LIFVACLLTA; IFVACLLTAL; FVACLLTALE; VACLLTALEH; ACLLTALEHN; CLLTALEHNS;
LLTALEHNSG; LTALEHNSGE; TALEHNSGEA; ALEHNSGEAL; LEHNSGEALQ; EHNSGEALQD;
HNSGEALQDI; NSGEALQDIL; SGEALQDILR; GEALQDILRS; EALQDILRSA; TGEPREWMGS;
GEPREWMGSL; EPREWMGSLC; PREWMGSLCM; REWMGSLCMV; EWMGSLCMVW; WMGSLCMYWN;
MGSLCMVWNP; GSLCMVWNPR; KRLGCLMAQK; RLGCLMAQKD; LGCLMAQKDF; GCLMAQKDFQ;
CLMAQKDFQG; LMAQKDFQGT; MAQKDFQGTQ; AQKDFQGTQI; DILTNRDNCK; ILTNRDNCKP;
LTNRDNCKPK; TNRDNCKPKC; NRDNCKPKCF; RDNCKPKCFK; DNCKPKCFKQ; NCKPKCFKQV;
CKPKCFKQVL; KPKCFKQVLL; PKCFKQVLLL; KCFKQVLLLY; CFKQVLLLYI; FKQVLLLYIY;
KQVLLLYIYI; MLLLYKPLLS; LLLYKPLLSL; LLYKPLLSLC; LYKPLLSLCY; YKPLLSLCYF;
KPLLSLCYFG; PLLSLCYFGG; LLSLCYFGGG; LSLCYFGGGV; SLCYFGGGVL; LCYFGGGVLG;
CYFGGGVLGL; YFGGGVLGLL; FGGGVLGLLK; GGGVLGLLKH; LWGSDLWESS; WGSDLWESSA;
GSDLWESSAG; SDLWESSAGA; DLWESSAGAE; LWESSAGAEV; WESSAGAEVS; ESSAGAEVSE;
SSAGAEVSET; SAGAEVSETW; AGAEVSETWE; GAEVSETWEE; AEVSETWEEH; EVSETWEEHC;
VSETWEEHCD; SETWEEHCDW; ETWEEHCDWD; TWEEHCDWDS; WEEHCDWDSV; EEHCDWDSVL;
EHCDWDSVLD; HCDWDSVLDP; CDWDSVLDPC; DWDSVLDPCP; WDSVLDPCPE; DSVLDPCPES;
SVLDPCPESS; VLDPCPESSV; LDPCPESSVS; DPCPESSVSE; PCPESSVSES; CPESSVSESS; PESSVSESSS;
ESSVSESSSL; SSVSESSSLV; SVSESSSLVI; VSESSSLVIS; SESSSLVISR; ESSSLVISRI; SSSLVISRIH;
SSLVISRIHF; SLVISRIHFP; LVISRIHFPM; VISRIHFPMH; ISRIHFPMHI; SRIHFPMHIL; RIHFPMHILY;
IHFPMHILYF; HFPMHILYFI; FPMHILYFIL; PMHILYFILE; MHILYFILEK; HILYFILEKV; ILYFILEKVY;
LYFILEKVYI; YFILEKVYIL; FILEKVYILI; ILEKVYILIS; LEKVYILISE; EKVYILISES; KVYILISESS;
VYILISESSL; YILISESSLS; ILISESSLSF; LISESSLSFH; ISESSLSFHS; SESSLSFHST; ESSLSFHSTI;
SSLSFHSTIL; SLSFHSTILD; LSFHSTILDC; SFHSTILDCI; FHSTILDCIS; HSTILDCISV; STILDCISVA;
TILDCISVAK; ILDCISVAKS; LDCISVAKSA; DCISVAKSAT; CISVAKSATG; ISVAKSATGL;
SVAKSATGLN; VAKSATGLNQ; AKSATGLNQI; KSATGLNQIS; SATGLNQISS; ATGLNQISSS;
TGLNQISSSN; GLNQISSSNK; LNQISSSNKV; NQISSSNKVI; QISSSNKVIP; ISSSNKVIPL; SSSNKVIPLC;
SSNKVIPLCK; SNKVIPLCKI; NKVIPLCKIL; KVIPLCKILF; VIPLCKILFS; IPLCKILFSS; PLCKILFSSK;
LCKILFSSKN; CKILFSSKNS; KILFSSKNSE; ILFSSKNSEF; LFSSKNSEFC; FSSKNSEFCK; SSKNSEFCKD;
SKNSEFCKDF; KNSEFCKDFL; NSEFCKDFLK; SEFCKDFLKY; EFCKDFLKYI; FCKDFLKYIL;
CKDFLKYILG; KDFLKYILGL; DFLKYILGLK; FLKYILGLKS; LKYILGLKSI; KYILGLKSIC; YILGLKSICL;
ILGLKSICLT; LGLKSICLTN; GLKSICLTNL; LKSICLTNLA; KSICLTNLAC; SICLTNLACR; ICLTNLACRV;
CLTNLACRVL; LTNLACRVLG; TNLACRVLGT; NLACRVLGTG; LACRVLGTGY; ACRVLGTGYS;
CRVLGTGYSF; RVLGTGYSFI; VLGTGYSFIV; LGTGYSFTVT; GTGYSFIVTK; TGYSFIVTKP;
GYSFIVTKPG; YSFIVTKPGG; SFIVTKPGGN; FTVTKPGGNI; IVTKPGGNIW; VTKPGGNIWV;
TKPGGNIWVL; KPGGNIWVLL; PGGNIWVLLF; GGNIWVLLFK; GNIWVLLFKC; NIWVLLFKCF;
IWVLLFKCFF; WVLLFKCFFS; VLLFKCFFSK; LLFKCFFSKF; LFKCFFSKFT; FKCFFSKFTL; KCFFSKFTLT;
CFFSKFTLTL; FFSKFTLTLP; FSKFTLTLPS; SKFTLTLPSK; SLKLSKLFIP; LKLSKLFIPC; KLSKLFIPCP;
LSKLFIPCPE; SKLFIPCPEG; KLFIPCPEGK; LFIPCPEGKS; FIPCPEGKSF; IPCPEGKSFD; PCPEGKSFDS;
CPEGKSFDSA; PEGKSFDSAP; EGKSFDSAPV; GKSFDSAPVP; KSFDSAPVPF; SFDSAPVPFT;
FDSAPVPFTS; DSAPVPFTSS; SAPVPFTSSK; APVPFTSSKT; PVPFTSSKTT; VPFTSSKTTM; PFTSSKTTMY;
SIATPSSKVS; IATPSSKVSL; ATPSSKVSLS; TPSSKVSLSM; PSSKVSLSMG; SSKVSLSMGR;
SKVSLSMGRF; KVSLSMGRFT; VSLSMGRFTF; SLSMGRFTFK; LSMGRFTFKA; SMGRFTFKAL;
MGRFTFKALP; GRFTFKALPP; RFTFKALPPH; FTFKALPPHK; TFKALPPHKS; FKALPPHKSN;
KALPPHKSNN; ALPPHKSNNP; LPPHKSNNPA; PPHKSNNPAA; PHKSNNPAAS; HKSNNPAASV;
KSNNPAASVV; SNNPAASVVF; NNPAASVVFP; NPAASVVFPL; PAASVVFPLS; AASVVFPLSM;
ASVVFPLSMG; SVVFPLSMGP; VVFPLSMGPL; VFPLSMGPLN; FPLSMGPLNN; PLSMGPLNNQ;
LSMGPLNNQY; SMGPLNNQYL; MGPLNNQYLL; GPLNNQYLLL; PLNNQYLLLG; LNNQYLLLGT;
NNQYLLLGTL; NQYLLLGTLK; QYLLLGTLKT; YLLLGTLKTI; LLLGTLKTIQ; LLGTLKTIQC;
LGTLKTIQCK; GTLKTIQCKK; TLKTIQCKKS; LKTIQCKKSN; KTIQCKKSNI; TIQCKKSNIT; IQCKKSNITE;
QCKKSNITES; CKKSNITESI; KKSNITESIL; KSNITESILG; SNITESILGS; NITESILGSK; ITESILGSKQ;
TESILGSKQC; ESILGSKQCS; SILGSKQCSQ; ILGSKQCSQA; LGSKQCSQAT; GSKQCSQATP;
SKQCSQATPA; KQCSQATPAI; QCSQATPAIY; CSQATPAIYC; SQATPAIYCS; QATPAIYCSS;
ATPAIYCSST; TPAIYCSSTA; PAIYCSSTAF; AIYCSSTAFP; APNIKSILSN; PNIKSILSNI; LNLSVSISSL;
NLSVSISSLV; LSVSISSLVI; RVSTLFLAKT; VSTLFLAKTV; STLFLAKTVS; TLFLAKTVST; LFLAKTVSTA;
FLAKTVSTAC; FLLSAKIIAF; LLSAKIIAFA; LSAKIIAFAK; SAKIIAFAKC; AKIIAFAKCF; KIIAFAKCFS;
NSKYIPNNKN; SKYIPNNKNT; KYIPNNKNTS; YIPNNKNTSS; IPNNKNTSSH; PNNKNTSSHF;
NNKNTSSHFV; NKNTSSHFVS; KNTSSHFVST; NTSSHFVSTA; TSSHFVSTAY; SSHFVSTAYS;
SHFVSTAYSV; HFVSTAYSVI; FVSTAYSVIN; VSTAYSVINF; STAYSVINFQ; TAYSVINFQD;
AYSVINFQDT; YSVINFQDTC; SVINFQDTCF; VINFQDTCFV; INFQDTCFVS; NFQDTCFVSS;
FQDTCFVSSG; QDTCFVSSGS; DTCFVSSGSS; TCFVSSGSSG; CFVSSGSSGL; FVSSGSSGLK;
VSSGSSGLKS; SSGSSGLKSC; SGSSGLKSCS; GSSGLKSCSF; SSGLKSCSFK; SGLKSCSFKP; GLKSCSFKPP;
MLSSIVWYGS; LSSIVWYGSL; SSIVWYGSLV; SIVWYGSLVK; IVWYGSLVKA; VWYGSLVKAL;
WYGSLVKALY; YGSLVKALYS; GSLVKALYSK; SLVKALYSKY; LVKALYSKYS; VKALYSKYSL;
KALYSKYSLL; ALYSKYSLLT; LYSKYSLLTP; YSKYSLLTPL; SKYSLLTPLQ; KYSLLTPLQI;
YSLLTPLQIK; SLLTPLQIKK; LLTPLQIKKL; LTPLQIKKLK; TPLQIKKLKV; PLQIKKLKVH; LQIKKLKVHS;
QIKKLKVHSF; QKLLIAETLC; KLLIAETLCL; LLIAETLCLC; LIAETLCLCG; IAETLCLCGV;
AETLCLCGVK; ETLCLCGVKK; TLCLCGVKKN; LCLCGVKKNI; CLCGVKKNII; LCGVKKNIIL;
CGVKKNIILC; GVKKNIILCP; VKKNIILCPA; KKNIILCPAH; KNIILCPAHM; NIILCPAHMC; IILCPAHMCL;
ILCPAHMCLL; LCPAHMCLLI; CPAHMCLLIK; PAHMCLLIKV; AHMCLLIKVT; HMCLLIKVTE;
MCLLIKVTEY; CLLIKVTEYF; LLIKVTEYFS; LIKVTEYFSI; IKVTEYFSIS; KVTEYFSISF; VTEYFSISFL;
TEYFSISFLY; EYFSISFLYR; YFSISFLYRI; AFSLVVYTAK; FSLVVYTAKQ; SLVVYTAKQA;
LVVYTAKQAR; VVYTAKQARV; VYTAKQARVL; YTAKQARVLL; TAKQARVLLL; AKQARVLLLN;
KQARVLLLNT; QARVLLLNTA; LRNWCRSEGK; RNWCRSEGKS; NWCRSEGKSL; WCRSEGKSLG;
CRSEGKSLGS; RSEGKSLGSS; SEGKSLGSST; EGKSLGSSTF; GKSLGSSTFL; KSLGSSTFLF; SLGSSTFLFF;
LGSSTFLFFL; GSSTFLFFLG; SSTFLFFLGG; STFLFFLGGV; TFLFFLGGVE; FLFFLGGVEC; ESAVASSSLA;
SAVASSSLAN; AVASSSLANI; VASSSLANIS; ASSSLANISS; SSSLANISSW; SSLANISSWQ; SLANISSWQN;
LANISSWQNK; ANISSWQNKS; NISSWQNKSS; ISSWQNKSSS; SSWQNKSSSH; SWQNKSSSHF;
WQNKSSSHFS; QNKSSSHFSL; NKSSSHFSLK; KSSSHFSLKE; SSSHFSLKEL; SSHFSLKELH;
SHFSLKELHQ; HFSLKELHQD; FSLKELHQDS; SLKELHQDSH; LKELHQDSHS; KELHQDSHSS;
ELHQDSHSSV; LHQDSHSSVP; VGTYKKNNYL; GTYKKNNYLG; TYKKNNYLGP; YKKNNYLGPF;
KKNNYLGPFN; KNNYLGPFNI; NNYLGPFNIL; NYLGPFNILL; YLGPFNILLF; LGPFNILLFI; REFLQLFGPT;
EFLQLFGPTI; FLQLFGPTIA; LQLFGPTIAE; QLFGPTIAEF; LFGPTIAEFL; FGPTIAEFLQ; GPTIAEFLQL;
PTIAEFLQLG; TIAEFLQLGL; IAEFLQLGLS; AEFLQLGLSQ; EFLQLGLSQT; FLQLGLSQTT;
LQLGLSQTTV; SSQCSSNLSK; SQCSSNLSKP; QCSSNLSKPR; CSSNLSKPRA; SSNLSKPRAL;
SNLSKPRALF; NLSKPRALFL; LSKPRALFLK; SKPRALFLKI; KPRALFLKIF; PRALFLKIFY; RALFLKIFYL;
ALFLKIFYLN; LFLKIFYLNA; FLKIFYLNAL; LKIFYLNALI; ADIACKGSAQ; DIACKGSAQK;
IACKGSAQKA; ACKGSAQKAF; CKGSAQKAFW; KGSAQKAFWN; GSAQKAFWNK; AIPCSTGYLG;
IPCSTGYLGK; PCSTGYLGKE; CSTGYLGKEE; STGYLGKEEN; TGYLGKEENQ; GYLGKEENQH;
YLGKEENQHK; LGKEENQHKP; GKEENQHKPL; KEENQHKPLS; EENQHKPLSY; ENQHKPLSYS;
NQHKPLSYSR; QHKPLSYSRF; HKPLSYSRFQ; KPLSYSRFQN; PLSYSRFQNQ; LSYSRFQNQA;
SYSRFQNQAD; YSRFQNQADE; SRFQNQADEL; RFQNQADELP; FQNQADELPL; QNQADELPLH;
NQADELPLHP; QADELPLHPA; ADELPLHPAP; DELPLHPAPF; ELPLHPAPFF; LPLHPAPFFY;
PLHPAPFFYT; LHPAPFFYTK; HPAPFFYTKY; PAPFFYTKYS; APFFYTKYSF; PFFYTKYSFS;
FFYTKYSFSS; FYTKYSFSSF; YTKYSFSSFY; TKYSFSSFYP; KYSFSSFYPR; YSFSSFYPRR; SFSSFYPRRP;
FSSFYPRRPL; SSFYPRRPLC; SFYPRRPLCQ; FYPRRPLCQG; YPRRPLCQGE; PRRPLCQGEI; RRPLCQGEIP;
RPLCQGEIPY; PLCQGEIPYT; LCQGEIPYTS; CQGEIPYTSL; QGEIPYTSLN; GEIPYTSLNK; EIPYTSLNKL;
IPYTSLNKLF; PYTSLNKLFS; YTSLNKLFSL; TSLNKLFSLR; SLNKLFSLRE; LNKLFSLRED; NKLFSLREDF;
KLFSLREDFP; LFSLREDFPR; FSLREDFPRQ; SLREDFPRQL; LREDFPRQLF; REDFPRQLFQ;
EDFPRQLFQG; DFPRQLFQGL; FPRQLFQGLK; PRQLFQGLKG; RQLFQGLKGP

11 mers:

GFPQIVLLGLR; FPQIVLLGLRK; PQIVLLGLRKS; QIVLLGLRKSL; IVLLGLRKSLH; VLLGLRKSLHT;
LLGLRKSLHTL; LGLRKSLHTLT; GLRKSLHTLTT; EKGWRQRRPRP; KGWRQRRPRPL; GWRQRRPRPLI;
WRQRRPRPLIY; RQRRPRPLIYY; QRRPRPLIYYK; RRPRPLIYYKK; RPRPLIYYKKK; PRPLIYYKKKG;
RPLIYYKKKGH; PLIYYKKKGHR; LIYYKKKGHRE; IYYKKKGHREE; YYKKKGHREEL; YKKKGHREELL;
KKKGHREELLT; KKGHREELLTH; KGHREELLTHG; GHREELLTHGM; HREELLTHGMQ;
REELLTHGMQP; EELLTHGMQPN; ELLTHGMQPNH; LLTHGMQPNHD; LTHGMQPNHDL;
THGMQPNHDLR; HGMQPNHDLRK; GMQPNHDLRKE; MQPNHDLRKES; QPNHDLRKESA;
LTGECSQTMTS; TGECSQTMTSG; GECSQTMTSGR; ECSQTMTSGRK; CSQTMTSGRKV; SQTMTSGRKVH;
QTMTSGRKVHD; TMTSGRKVHDS; MTSGRKVHDSQ; TSGRKVHDSQG; SGRKVHDSQGG;
GRKVHDSQGGA; RKVHDSQGGAA; KVHDSQGGAAY; VHDSQGGAAYP; HDSQGGAAYPW;
DSQGGAAYPWN; SQGGAAYPWNA; QGGAAYPWNAA; GGAAYPWNAAK; GAAYPWNAAKP;
PQEGKCMTDMF; QEGKCMTDMFC; EGKCMTDMFCE; GKCMTDMFCEP; KCMTDMFCEPR;
CMTDMFCEPRN; MTDMFCEPRNL; TDMFCEPRNLG; DMFCEPRNLGL; MFCEPRNLGLV; FCEPRNLGLVP;
CEPRNLGLVPS; TGQRPWFCASC; GQRPWFCASCH; QRPWFCASCHD; RPWFCASCHDK;
PWFCASCHDKL; WFCASCHDKLQ; KLVKPGLEQKK; LVKPGLEQKKE; VKPGLEQKKEL;
KPGLEQKKELR; PGLEQKKELRG; GLEQKKELRGF; LEQKKELRGFL; EQKKELRGFLF; QKKELRGFLFL;
KKELRGFLFLF; SFCWNFVEVKT; FCWNFVEVKTV; TGKTKVPLLYL; GKTKVPLLYLL; VIPFFLYFQVH;
IPFFLYFQVHG; PFFLYFQVHGC; FFLYFQVHGCC; FLYFQVHGCCS; LYFQVHGCCSS; YFQVHGCCSST;
FQVHGCCSSTF; QVHGCCSSTFG; VHGCCSSTFGG; HGCCSSTFGGP; GCCSSTFGGPS; CCSSTFGGPSC;
CSSTFGGPSCQ; SSTFGGPSCQC; STFGGPSCQCI; NCCWGGCCCYR; CCWGGCCCYRS; CWGGCCCYRSS;
WGGCCCYRSSN; GGCCCYRSSNC; GCCCYRSSNCI; CCCYRSSNCIP; CCYRSSNCIPC; CYRSSNCIPCY;
YRSSNCIPCYC; RSSNCIPCYCR; SSNCIPCYCRG; SNCIPCYCRGH; NCIPCYCRGHN; CIPCYCRGHNK;
IPCYCRGHNKY; PCYCRGHNKYL; CYCRGHNKYLR; YCRGHNKYLRG; CRGHNKYLRGY;
RGHNKYLRGYS; GHNKYLRGYSC; HNKYLRGYSCY; NKYLRGYSCYR; KYLRGYSCYRP;
YLRGYSCYRPN; LRGYSCYRPNS; RGYSCYRPNSS; GYSCYRPNSSN; YSCYRPNSSNI; SCYRPNSSNIC;
CYRPNSSNICC; YRPNSSNICCN; RPNSSNICCNC; PNSSNICCNCW; NSSNICCNCWC; SSNICCNCWCS;
SNICCNCWCSW; NICCNCWCSWG; ICCNCWCSWGY; CCNCWCSWGYC; CNCWCSWGYCW;
NCWCSWGYCWV; CWCSWGYCWVC; WCSWGYCWVCC; CSWGYCWVCCF; SWGYCWVCCFN;
WGYCWVCCFNS; GYCWVCCFNSN; YCWVCCFNSNC; LGSQSFHCRPL; GSQSFHCRPLS; SQSFHCRPLSA;
QSFHCRPLSAI; SFHCRPLSAIR; FHCRPLSAIRH; HCRPLSAIRHG; CRPLSAIRHGF; RPLSAIRHGFG;
PLSAIRHGFGI; LSAIRHGFGIV; ALGSFFVCYYF; LGSFFVCYYFP; GSFFVCYYFPG; SFFVCYYFPGF;
FFVCYYFPGFV; FVCYYFPGFVA; VCYYFPGFVAC; CYYFPGFVACY; YTFYNLTGIAE; TFYNLTGIAEK;
FYNLTGIAEKN; YNLTGIAEKNR; NLTGIAEKNRK; LTGIAEKNRKI; TGIAEKNRKIF; IFGGNYLDNCK;
FGGNYLDNCKC; GGNYLDNCKCP; GNYLDNCKCPY; NYLDNCKCPYK; YLDNCKCPYKL;
LDNCKCPYKLL; KGRYPCTFWPY; GRYPCTFWPYL; QYRRSYTKNGL; YRRSYTKNGLK;
RRSYTKNGLKK; RSYTKNGLKKS; SYTKNGLKKST; YTKNGLKKSTK; TKNGLKKSTKC;
KNGLKKSTKCT; NGLKKSTKCTF; GLKKSTKCTFR; LKKSTKCTFRR; KKSTKCTFRRV; KSTKCTFRRVY;
STKCTFRRVYR; TKCTFRRVYRK; KCTFRRVYRKN; CTFRRVYRKNY; TFRRVYRKNYC; FRRVYRKNYCP;
RRVYRKNYCPR; RVYRKNYCPRR; VYRKNYCPRRC; SKNCSSMDVAF; KNCSSMDVAFT;
NCSSMDVAFTS; CSSMDVAFTSR; SSMDVAFTSRP; SMDVAFTSRPV; MDVAFTSRPVR; DVAFTSRPVRD;
VAFTSRPVRDC; AFTSRPVRDCN; FTSRPVRDCNT; TSRPVRDCNTC; SRPVRDCNTCS; RWPQPKEKESV;
WPQPKEKESVQ; PQPKEKESVQG; QPKEKESVQGQ; PKEKESVQGQL; KEKESVQGQLP; EKESVQGQLPK;
KESVQGQLPKS; ESVQGQLPKSQ; SVQGQLPKSQR; VQGQLPKSQRN; QGQLPKSQRNP; GQLPKSQRNPC;
QLPKSQRNPCK; LPKSQRNPCKC; PKSQRNPCKCQ; KSQRNPCKCQN; SQRNPCKCQNY; TQKWGIQMKTL;
QKWGIQMKTLG; KWGIQMKTLGA; WGIQMKTLGAL; GIQMKTLGALV; VLKMTLAVIAQ;
LKMTLAVIAQR; KMTLAVIAQRE; MTLAVIAQREK; TLAVIAQREKC; LAVIAQREKCF; AVIAQREKCFP;
VIAQREKCFPV; IAQREKCFPVT; AQREKCFPVTA; QREKCFPVTAQ; REKCFPVTAQQ; EKCFPVTAQQE;
KCFPVTAQQEF; CFPVTAQQEFP; FPVTAQQEFPS; PVTAQQEFPSP; VTAQQEFPSPI; LACLTFMQGHK;
ACLTFMQGHKK; CLTFMQGHKKC; LTFMQGHKKCM; TFMQGHKKCMS; FMQGHKKCMSM;
MQGHKKCMSMV; QGHKKCMSMVE; GHKKCMSMVEE; HKKCMSMVEEN; KKCMSMVEENL;
KCMSMVEENLF; CMSMVEENLFK; MSMVEENLFKA; SMVEENLFKAV; MVEENLFKAVI;
VEENLFKAVIS; EENLFKAVIST; ENLFKAVISTS; NLFKAVISTSL; LFKAVISTSLL; ILTIRPIWTKT;
LTIRPIWTKTM; TIRPIWTKTML; IRPIWTKTMLI; RPIWTKTMLIQ; PIWTKTMLIQL; IWTKTMLIQLS;
WTKTMLIQLSA; TKTMLIQLSAG; KTMLIQLSAGY; TMLIQLSAGYL; MLIQLSAGYLI; LIQLSAGYLIP;
IQLSAGYLIPV; QLSAGYLIPVE; LSAGYLIPVEM; SAGYLIPVEMK; AGYLIPVEMKM; GYLIPVEMKML;
YLIPVEMKMLG; LIPVEMKMLGI; IPVEMKMLGIL; PVEMKMLGILG; VEMKMLGILGL; EMKMLGILGLS;
MKMLGILGLSQ; KMLGILGLSQE; MLGILGLSQEG; LGILGLSQEGK; GILGLSQEGKM; ILGLSQEGKMF;
LGLSQEGKMFP; GLSQEGKMFPQ; LSQEGKMFPQY; SQEGKMFPQYF; QEGKMFPQYFM;
MNRVWGLFVKL; NRVWGLFVKLI; RVWGLFVKLIA; VWGLFVKLIAC; WGLFVKLIACM;
GLFVKLIACMF; LFVKLIACMFQ; FVKLIACMFQL; VKLIACMFQLL; KLIACMFQLLI; LIACMFQLLIF;
IACMFQLLIFV; ACMFQLLIFVA; CMFQLLIFVAC; MFQLLIFVACL; FQLLIFVACLL; QLLIFVACLLT;
LLIFVACLLTA; LIFVACLLTAL; IFVACLLTALE; FVACLLTALEH; VACLLTALEHN; ACLLTALEHNS;
CLLTALEHNSG; LLTALEHNSGE; LTALEHNSGEA; TALEHNSGEAL; ALEHNSGEALQ; LEHNSGEALQD;
EHNSGEALQDI; HNSGEALQDIL; NSGEALQDILR; SGEALQDILRS; GEALQDILRSA; TGEPREWMGSL;
GEPREWMGSLC; EPREWMGSLCM; PREWMGSLCMV; REWMGSLCMVW; EWMGSLCMYWN;
WMGSLCMVWNP; MGSLCMVWNPR; KRLGCLMAQKD; RLGCLMAQKDF; LGCLMAQKDFQ;
GCLMAQKDFQG; CLMAQKDFQGT; LMAQKDFQGTQ; MAQKDFQGTQI; DILTNRDNCKP;
ILTNRDNCKPK; LTNRDNCKPKC; TNRDNCKPKCF; NRDNCKPKCFK; RDNCKPKCFKQ; DNCKPKCFKQV;
NCKPKCFKQVL; CKPKCFKQVLL; KPKCFKQVLLL; PKCFKQVLLLY; KCFKQVLLLYI; CFKQVLLLYIY;
FKQVLLLYIYI; MLLLYKPLLSL; LLLYKPLLSLC; LLYKPLLSLCY; LYKPLLSLCYF; YKPLLSLCYFG;
KPLLSLCYFGG; PLLSLCYFGGG; LLSLCYFGGGV; LSLCYFGGGVL; SLCYFGGGVLG; LCYFGGGVLGL;
CYFGGGVLGLL; YFGGGVLGLLK; FGGGVLGLLKH; LWGSDLWESSA; WGSDLWESSAG;
GSDLWESSAGA; SDLWESSAGAE; DLWESSAGAEV; LWESSAGAEVS; WESSAGAEVSE; ESSAGAEVSET;
SSAGAEVSETW; SAGAEVSETWE; AGAEVSETWEE; GAEVSETWEEH; AEVSETWEEHC;
EVSETWEEHCD; VSETWEEHCDW; SETWEEHCDWD; ETWEEHCDWDS; TWEEHCDWDSV;
WEEHCDWDSVL; EEHCDWDSVLD; EHCDWDSVLDP; HCDWDSVLDPC; CDWDSVLDPCP;
DWDSVLDPCPE; WDSVLDPCPES; DSVLDPCPESS; SVLDPCPESSV; VLDPCPESSVS; LDPCPESSVSE;
DPCPESSVSES; PCPESSVSESS; CPESSVSESSS; PESSVSESSSL; ESSVSESSSLV; SSVSESSSLVI;
SVSESSSLVIS; VSESSSLVISR; SESSSLVISRI; ESSSLVISRIH; SSSLVISRIHF; SSLVISRIHFP;
SLVISRIHFPM; LVISRIHFPMH; VISRIHFPMHI; ISRIHFPMHIL; SRIHFPMHILY; RIHFPMHILYF;
IHFPMHILYFI; HFPMHILYFIL; FPMHILYFILE; PMHILYFILEK; MHILYFILEKV; HILYFILEKVY;
ILYFILEKVYI; LYFILEKVYIL; YFILEKVYILI; FILEKVYILIS; ILEKVYILISE; LEKVYILISES;
EKVYILISESS; KVYILISESSL; VYILISESSLS; YILISESSLSF; ILISESSLSFH; LISESSLSFHS; ISESSLSFHST;
SESSLSFHSTI; ESSLSFHSTIL; SSLSFHSTILD; SLSFHSTILDC; LSFHSTILDCI; SFHSTILDCIS;
FHSTILDCISV; HSTILDCISVA; STILDCISVAK; TILDCISVAKS; ILDCISVAKSA; LDCISVAKSAT;
DCISVAKSATG; CISVAKSATGL; ISVAKSATGLN; SVAKSATGLNQ; VAKSATGLNQI; AKSATGLNQIS;
KSATGLNQISS; SATGLNQISSS; ATGLNQISSSN; TGLNQISSSNK; GLNQISSSNKV; LNQISSSNKVI;
NQISSSNKVIP; QISSSNKVIPL; ISSSNKVIPLC; SSSNKVIPLCK; SSNKVIPLCKI; SNKVIPLCKIL;
NKVIPLCKILF; KVIPLCKILFS; VIPLCKILFSS; IPLCKILFSSK; PLCKILFSSKN; LCKILFSSKNS;
CKILFSSKNSE; KILFSSKNSEF; ILFSSKNSEFC; LFSSKNSEFCK; FSSKNSEFCKD; SSKNSEFCKDF;
SKNSEFCKDFL; KNSEFCKDFLK; NSEFCKDFLKY; SEFCKDFLKYI; EFCKDFLKYIL; FCKDFLKYILG;
CKDFLKYILGL; KDFLKYILGLK; DFLKYILGLKS; FLKYILGLKSI; LKYILGLKSIC; KYILGLKSICL;
YILGLKSICLT; ILGLKSICLTN; LGLKSICLTNL; GLKSICLTNLA; LKSICLTNLAC; KSICLTNLACR;
SICLTNLACRV; ICLTNLACRVL; CLTNLACRVLG; LTNLACRVLGT; TNLACRVLGTG; NLACRVLGTGY;
LACRVLGTGYS; ACRVLGTGYSF; CRVLGTGYSFI; RVLGTGYSFIV; VLGTGYSFIVT; LGTGYSFIVTK;
GTGYSFIVTKP; TGYSFIVTKPG; GYSFIVTKPGG; YSFIVTKPGGN; SFIVTKPGGNI; FTVTKPGGNIW;
IVTKPGGNIWV; VTKPGGNIWVL; TKPGGNIWVLL; KPGGNIWVLLF; PGGNIWVLLFK; GGNIWVLLFKC;
GNIWVLLFKCF; NIWVLLFKCFF; IWVLLFKCFFS; WVLLFKCFFSK; VLLFKCFFSKF; LLFKCFFSKFT;
LFKCFFSKFTL; FKCFFSKFTLT; KCFFSKFTLTL; CFFSKFTLTLP; FFSKFTLTLPS; FSKFTLTLPSK;
SLKLSKLFIPC; LKLSKLFIPCP; KLSKLFIPCPE; LSKLFIPCPEG; SKLFIPCPEGK; KLFIPCPEGKS;
LFIPCPEGKSF; FIPCPEGKSFD; IPCPEGKSFDS; PCPEGKSFDSA; CPEGKSFDSAP; PEGKSFDSAPV;
EGKSFDSAPVP; GKSFDSAPVPF; KSFDSAPVPFT; SFDSAPVPFTS; FDSAPVPFTSS; DSAPVPFTSSK;
SAPVPFTSSKT; APVPFTSSKTT; PVPFTSSKTTM; VPFTSSKTTMY; SIATPSSKVSL; IATPSSKVSLS;
ATPSSKVSLSM; TPSSKVSLSMG; PSSKVSLSMGR; SSKVSLSMGRF; SKVSLSMGRFT; KVSLSMGRFTF;
VSLSMGRFTFK; SLSMGRFTFKA; LSMGRFTFKAL; SMGRFTFKALP; MGRFTFKALPP; GRFTFKALPPH;
RFTFKALPPHK; FTFKALPPHKS; TFKALPPHKSN; FKALPPHKSNN; KALPPHKSNNP; ALPPHKSNNPA;
LPPHKSNNPAA; PPHKSNNPAAS; PHKSNNPAASV; HKSNNPAASVV; KSNNPAASVVF; SNNPAASVVFP;
NNPAASVVFPL; NPAASVVFPLS; PAASVVFPLSM; AASVVFPLSMG; ASVVFPLSMGP; SVVFPLSMGPL;
VVFPLSMGPLN; VFPLSMGPLNN; FPLSMGPLNNQ; PLSMGPLNNQY; LSMGPLNNQYL; SMGPLNNQYLL;
MGPLNNQYLLL; GPLNNQYLLLG; PLNNQYLLLGT; LNNQYLLLGTL; NNQYLLLGTLK; NQYLLLGTLKT;
QYLLLGTLKTI; YLLLGTLKTIQ; LLLGTLKTIQC; LLGTLKTIQCK; LGTLKTIQCKK; GTLKTIQCKKS;
TLKTIQCKKSN; LKTIQCKKSNI; KTIQCKKSNIT; TIQCKKSNITE; IQCKKSNITES; QCKKSNITESI;
CKKSNITESIL; KKSNITESILG; KSNITESILGS; SNITESILGSK; NITESILGSKQ; ITESILGSKQC;
TESILGSKQCS; ESILGSKQCSQ; SILGSKQCSQA; ILGSKQCSQAT; LGSKQCSQATP; GSKQCSQATPA;
SKQCSQATPAI; KQCSQATPAIY; QCSQATPAIYC; CSQATPAIYCS; SQATPAIYCSS; QATPAIYCSST;
ATPAIYCSSTA; TPAIYCSSTAF; PAIYCSSTAFP; APNIKSILSNI; LNLSVSISSLV; NLSVSISSLVI;
RVSTLFLAKTV; VSTLFLAKTVS; STLFLAKTVST; TLFLAKTVSTA; LFLAKTVSTAC; FLLSAKIIAFA;
LLSAKIIAFAK; LSAKIIAFAKC; SAKIIAFAKCF; AKIIAFAKCFS; NSKYIPNNKNT; SKYIPNNKNTS;
KYIPNNKNTSS; YIPNNKNTSSH; IPNNKNTSSHF; PNNKNTSSHFV; NNKNTSSHFVS; NKNTSSHFVST;
KNTSSHFVSTA; NTSSHFVSTAY; TSSHFVSTAYS; SSHFVSTAYSV; SHFVSTAYSVI; HFVSTAYSVIN;
FVSTAYSVINF; VSTAYSVINFQ; STAYSVINFQD; TAYSVINFQDT; AYSVINFQDTC; YSVINFQDTCF;
SVINFQDTCFV; VINFQDTCFVS; INFQDTCFVSS; NFQDTCFVSSG; FQDTCFVSSGS; QDTCFVSSGSS;
DTCFVSSGSSG; TCFVSSGSSGL; CFVSSGSSGLK; FVSSGSSGLKS; VSSGSSGLKSC; SSGSSGLKSCS;
SGSSGLKSCSF; GSSGLKSCSFK; SSGLKSCSFKP; SGLKSCSFKPP; MLSSIVWYGSL; LSSIVWYGSLV;
SSIVWYGSLVK; SIVWYGSLVKA; IVWYGSLVKAL; VWYGSLVKALY; WYGSLVKALYS;
YGSLVKALYSK; GSLVKALYSKY; SLVKALYSKYS; LVKALYSKYSL; VKALYSKYSLL; KALYSKYSLLT;
ALYSKYSLLTP; LYSKYSLLTPL; YSKYSLLTPLQ; SKYSLLTPLQI; KYSLLTPLQIK; YSLLTPLQIKK;
SLLTPLQIKKL; LLTPLQIKKLK; LTPLQIKKLKV; TPLQIKKLKVH; PLQIKKLKVHS; LQIKKLKVHSF;
QKLLIAETLCL; KLLIAETLCLC; LLIAETLCLCG; LIAETLCLCGV; IAETLCLCGVK; AETLCLCGVKK;
ETLCLCGVKKN; TLCLCGVKKNI; LCLCGVKKNII; CLCGVKKNIIL; LCGVKKNIILC; CGVKKNIILCP;
GVKKNIILCPA; VKKNIILCPAH; KKNIILCPAHM; KNIILCPAHMC; NIILCPAHMCL; IILCPAHMCLL;
ILCPAHMCLLI; LCPAHMCLLIK; CPAHMCLLIKV; PAHMCLLIKVT; AHMCLLIKVTE; HMCLLIKVTEY;
MCLLIKVTEYF; CLLIKVTEYFS; LLIKVTEYFSI; LIKVTEYFSIS; IKVTEYFSISF; KVTEYFSISFL;
VTEYFSISFLY; TEYFSISFLYR; EYFSISFLYRI; AFSLVVYTAKQ; FSLVVYTAKQA; SLVVYTAKQAR;
LVVYTAKQARV; VVYTAKQARVL; VYTAKQARVLL; YTAKQARVLLL; TAKQARVLLLN;
AKQARVLLLNT; KQARVLLLNTA; LRNWCRSEGKS; RNWCRSEGKSL; NWCRSEGKSLG;
WCRSEGKSLGS; CRSEGKSLGSS; RSEGKSLGSST; SEGKSLGSSTF; EGKSLGSSTFL; GKSLGSSTFLF;
KSLGSSTFLFF; SLGSSTFLFFL; LGSSTFLFFLG; GSSTFLFFLGG; SSTFLFFLGGV; STFLFFLGGVE;
TFLFFLGGVEC; ESAVASSSLAN; SAVASSSLANI; AVASSSLANIS; VASSSLANISS; ASSSLANISSW;
SSSLANISSWQ; SSLANISSWQN; SLANISSWQNK; LANISSWQNKS; ANISSWQNKSS; NISSWQNKSSS;
ISSWQNKSSSH; SSWQNKSSSHF; SWQNKSSSHFS; WQNKSSSHFSL; QNKSSSHFSLK; NKSSSHFSLKE;
KSSSHFSLKEL; SSSHFSLKELH; SSHFSLKELHQ; SHFSLKELHQD; HFSLKELHQDS; FSLKELHQDSH;
SLKELHQDSHS; LKELHQDSHSS; KELHQDSHSSV; ELHQDSHSSVP; VGTYKKNNYLG; GTYKKNNYLGP;
TYKKNNYLGPF; YKKNNYLGPFN; KKNNYLGPFNI; KNNYLGPFNIL; NNYLGPFNILL; NYLGPFNILLF;
YLGPFNILLFI; REFLQLFGPTI; EFLQLFGPTIA; FLQLFGPTIAE; LQLFGPTIAEF; QLFGPTIAEFL;
LFGPTIAEFLQ; FGPTIAEFLQL; GPTIAEFLQLG; PTIAEFLQLGL; TIAEFLQLGLS; IAEFLQLGLSQ;
AEFLQLGLSQT; EFLQLGLSQTT; FLQLGLSQTTV; SSQCSSNLSKP; SQCSSNLSKPR; QCSSNLSKPRA;
CSSNLSKPRAL; SSNLSKPRALF; SNLSKPRALFL; NLSKPRALFLK; LSKPRALFLKI; SKPRALFLKIF;
KPRALFLKIFY; PRALFLKIFYL; RALFLKIFYLN; ALFLKIFYLNA; LFLKIFYLNAL; FLKIFYLNALI;
ADIACKGSAQK; DIACKGSAQKA; IACKGSAQKAF; ACKGSAQKAFW; CKGSAQKAFWN;
KGSAQKAFWNK; AIPCSTGYLGK; IPCSTGYLGKE; PCSTGYLGKEE; CSTGYLGKEEN; STGYLGKEENQ;
TGYLGKEENQH; GYLGKEENQHK; YLGKEENQHKP; LGKEENQHKPL; GKEENQHKPLS;
KEENQHKPLSY; EENQHKPLSYS; ENQHKPLSYSR; NQHKPLSYSRF; QHKPLSYSRFQ; HKPLSYSRFQN;
KPLSYSRFQNQ; PLSYSRFQNQA; LSYSRFQNQAD; SYSRFQNQADE; YSRFQNQADEL; SRFQNQADELP;
RFQNQADELPL; FQNQADELPLH; QNQADELPLHP; NQADELPLHPA; QADELPLHPAP; ADELPLHPAPF;
DELPLHPAPFF; ELPLHPAPFFY; LPLHPAPFFYT; PLHPAPFFYTK; LHPAPFFYTKY; HPAPFFYTKYS;
PAPFFYTKYSF; APFFYTKYSFS; PFFYTKYSFSS; FFYTKYSFSSF; FYTKYSFSSFY; YTKYSFSSFYP;
TKYSFSSFYPR; KYSFSSFYPRR; YSFSSFYPRRP; SFSSFYPRRPL; FSSFYPRRPLC; SSFYPRRPLCQ;
SFYPRRPLCQG; FYPRRPLCQGE; YPRRPLCQGEI; PRRPLCQGEIP; RRPLCQGEIPY; RPLCQGEIPYT;
PLCQGEIPYTS; LCQGEIPYTSL; CQGEIPYTSLN; QGEIPYTSLNK; GEIPYTSLNKL; EIPYTSLNKLF;
IPYTSLNKLFS; PYTSLNKLFSL; YTSLNKLFSLR; TSLNKLFSLRE; SLNKLFSLRED; LNKLFSLREDF;
NKLFSLREDFP; KLFSLREDFPR; LFSLREDFPRQ; FSLREDFPRQL; SLREDFPRQLF; LREDFPRQLFQ;
REDFPRQLFQG; EDFPRQLFQGL; DFPRQLFQGLK; FPRQLFQGLKG; PRQLFQGLKGP

BK reading frame 3
8 mers:

LQKLQKNR; QKLQKNRD; KLQKNRDF; LQKNRDFP; QKNRDFPK; ASEKASTP; SEKASTPL; EKASTPLL;
KASTPLLL; ASTPLLLE; STPLLLER; TPLLLERK; PLLLERKG; LLLERKGG; LLERKGGG; LERKGGGR;
ERKGGGRG; RKGGGRGG; KGGGRGGL; GGGRGGLG; GGRGGLGL; GRGGLGLL; RGGLGLLY;
GGLGLLYI; GLGLLYII; LGLLYIIK; GLLYIIKK; LLYIIKKK; LYIIKKKA; YIIKKKAT; IIKKKATG;
IKKKATGR; KKKATGRS; KKATGRSC; KATGRSCL; ATGRSCLP; TGRSCLPM; GRSCLPME; RSCLPMEC;
SCLPMECS; CLPMECSQ; LPMECSQT; PMECSQTM; MECSQTMT; ECSQTMTS; CSQTMTSG; SQTMTSGR;
QTMTSGRK; TMTSGRKV; MTSGRKVH; TSGRKVHD; SGRKVHDS; GRKVHDSQ; RKVHDSQG;
KVHDSQGN; VHDSQGNA; HDSQGNAA; DSQGNAAK; SQGNAAKP; PQEGKCMT; QEGKCMTH;
EGKCMTHR; GKCMTHRE; KCMTHREE; CMTHREEL; MTHREELL; THREELLT; HREELLTH; REELLTHG;
EELLTHGM; ELLTHGMQ; LLTHGMQP; LTHGMQPN; THGMQPNH; HGMQPNHD; GMQPNHDL;
MQPNHDLR; QPNHDLRK; PNHDLRKE; NHDLRKES; HDLRKESA; QTCFASLG; TCFASLGI; CFASLGIL;
FASLGILA; ASLGILAL; SLGILALS; LGILALSP; GILALSPV; ILALSPVK; LALSPVKL; ALSPVKLD;
LSPVKLDK; SPVKLDKG; PVKLDKGH; VKLDKGHG; KLDKGHGS; LDKGHGSA; DKGHGSAP;
KGHGSAPA; GHGSAPAV; HGSAPAVT; GSAPAVTT; SAPAVTTS; APAVTTSF; PAVTTSFS; AVTTSFSE;
VTTSFSES; TTSFSESW; NLDWNKKK; LDWNKKKS; DWNKKKSS; WNKKKSSE; NKKKSSED; KKKSSEDF;
KKSSEDFY; KSSEDFYF; SSEDFYFY; SEDFYFYF; EDFYFYFR; DFYFYFRA; FYFYFRAF; YFYFRAFA;
FYFRAFAG; YFRAFAGI; FRAFAGIL; RQCRREKQ; QCRREKQK; CRREKQKY; RREKQKYH; REKQKYHC;
EKQKYHCF; KQKYHCFT; QKYHCFTC; KYHCFTCC; YHCFTCCK; HCFTCCKR; CFTCCKRL; FTCCKRLC;
TCCKRLCK; CCKRLCKR; CKRLCKRL; KRLCKRLL; RLCKRLLG; LCKRLLGK; SLFFCISR; LFFCISRF;
FFCISRFM; FCISRFMG; CISRFMGA; ISRFMGAA; SRFMGAAL; RFMGAALA; FMGAALAL; MGAALALL;
GAALALLG; AALALLGD; ALALLGDL; LALLGDLV; ALLGDLVA; LLGDLVAS; LGDLVASV; GDLVASVS;
DLVASVSE; LVASVSEA; VASVSEAA; ASVSEAAA; SVSEAAAA; VSEAAAAT; SEAAAATG; EAAAATGF;
AAAATGFS; AAATGFSV; AATGFSVA; ATGFSVAE; TGFSVAEI; GFSVAEIA; FSVAEIAA; SVAEIAAG;
VAEIAAGE; AEIAAGEA; EIAAGEAA; IAAGEAAA; AAGEAAAA; AGEAAAAI; GEAAAAIE; EAAAAIEV;
AAAAIEVQ; AAAIEVQI; AAIEVQIA; AIEVQIAS; IEVQIASL; EVQIASLA; VQIASLAT; QIASLATV;
IASLATVE; ASLATVEG; SLATVEGI; LATVEGIT; ATVEGITS; TVEGITST; VEGITSTS; EGITSTSE;
GITSTSEA; ITSTSEAI; TSTSEAIA; STSEAIAA; TSEAIAAI; SEAIAAIG; EAIAAIGL; AIAAIGLT; IAAIGLTP;
AAIGLTPQ; AIGLTPQT; IGLTPQTY; GLTPQTYA; LTPQTYAV; TPQTYAVI; PQTYAVIA; QTYAVIAG;
TYAVIAGA; YAVIAGAP; AVIAGAPG; VIAGAPGA; IAGAPGAI; AGAPGAIA; GAPGAIAG; APGAIAGF;
PGAIAGFA; GAIAGFAA; AIAGFAAL; IAGFAALI; AGFAALIQ; GFAALIQT; FAALIQTV; AALIQTVS;
ALIQTVSG; LIQTVSGI; IQTVSGIS; QTVSGISS; TVSGISSL; VSGISSLA; SGISSLAQ; GISSLAQV;
ISSLAQVG; SSLAQVGY; SLAQVGYK; LAQVGYKF; AQVGYKFF; QVGYKFFD; VGYKFFDD;
GYKFFDDW; YKFFDDWD; KFFDDWDH; FFDDWDHK; FDDWDHKV; DDWDHKVS; DWDHKVST;
WDHKVSTV; DHKVSTVG; HKVSTVGL; KVSTVGLY; VSTVGLYQ; STVGLYQQ; TVGLYQQS;
VGLYQQSG; GLYQQSGM; LYQQSGMA; YQQSGMAL; QQSGMALE; QSGMALEL; SGMALELF;
GMALELFN; MALELFNP; ALELFNPD; LELFNPDE; ELFNPDEY; LFNPDEYY; FNPDEYYD; NPDEYYDI;
PDEYYDIL; DEYYDILF; EYYDILFP; YYDILFPG; YDILFPGV; DILFPGVN; ILFPGVNT; LFPGVNTF;
FPGVNTFV; PGVNTFVN; GVNTFVNN; VNTFVNNI; NTFVNNIQ; TFVNNIQY; FVNNIQYL; VNNIQYLD;
NNIQYLDP; NIQYLDPR; IQYLDPRH; QYLDPRHW; YLDPRHWG; LDPRHWGP; DPRHWGPS; PRHWGPSL;
RHWGPSLF; HWGPSLFA; WGPSLFAT; GPSLFATI; PSLFATIS; SLFATISQ; LFATISQA; FATISQAL;
ATISQALW; TISQALWH; ISQALWHV; SQALWHVI; QALWHVIR; ALWHVIRD; LWHVIRDD; WHVIRDDI;
HVIRDDIP; VIRDDIPS; IRDDIPSI; RDDIPSIT; DDIPSITS; DIPSITSQ; IPSITSQE; PSITSQEL; SITSQELQ;
ITSQELQR; TSQELQRR; SQELQRRT; QELQRRTE; ELQRRTER; LQRRTERF; QRRTERFF; RRTERFFR;
RTERFFRD; TERFFRDS; ERFFRDSL; RFFRDSLA; FFRDSLAR; FRDSLARF; RDSLARFL; DSLARFLE;
SLARFLEE; LARFLEET; ARFLEETT; RFLEETTW; FLEETTWT; LEETTWTI; EETTWTIV; ETTWTIVN;
TTWTIVNA; TWTIVNAP; WTIVNAPI; TIVNAPIN; IVNAPINF; VNAPINFY; NAPINFYN; APINFYNY;
PINFYNYI; INFYNYIQ; NFYNYIQQ; FYNYIQQY; YNYIQQYY; NYIQQYYS; YIQQYYSD; IQQYYSDL;
QQYYSDLS; QYYSDLSP; YYSDLSPI; YSDLSPIR; SDLSPIRP; DLSPIRPS; LSPIRPSM; SPIRPSMV;
PIRPSMVR; IRPSMVRQ; RPSMVRQV; PSMVRQVA; SMVRQVAE; MVRQVAER; VRQVAERE;
RQVAEREG; QVAEREGT; VAEREGTR; AEREGTRV; EREGTRVH; REGTRVHF; EGTRVHFG; GTRVHFGH;
TRVHFGHT; RVHFGHTY; VHFGHTYS; HFGHTYSI; FGHTYSID; GHTYSIDD; HTYSIDDA; TYSIDDAD;
YSIDDADS; SIDDADSI; IDDADSIE; DDADSIEE; DADSIEEV; ADSIEEVT; DSIEEVTQ; SIEEVTQR;
IEEVTQRM; EEVTQRMD; EVTQRMDL; VTQRMDLR; TQRMDLRN; QRMDLRNQ; RMDLRNQQ;
MDLRNQQS; DLRNQQSV; LRNQQSVH; RNQQSVHS; NQQSVHSG; QQSVHSGE; QSVHSGEF; SVHSGEFI;
VHSGEFIE; HSGEFIEK; SGEFIEKT; GEFIEKTI; EFIEKTIA; FIEKTIAP; IEKTIAPG; EKTIAPGG; KTIAPGGA;
TIAPGGAN; IAPGGANQ; APGGANQR; PGGANQRT; GGANQRTA; GANQRTAP; ANQRTAPQ;
NQRTAPQW; QRTAPQWM; RTAPQWML; TAPQWMLP; APQWMLPL; PQWMLPLL; QWMLPLLL;
WMLPLLLG; MLPLLLGL; LPLLLGLY; PLLLGLYG; LLLGLYGT; LLGLYGTV; LGLYGTVT; GLYGTVTP;
LYGTVTPA; YGTVTPAL; GTVTPALE; TVTPALEA; VTPALEAY; TPALEAYE; PALEAYED; ALEAYEDG;
LEAYEDGP; EAYEDGPN; AYEDGPNQ; YEDGPNQK; EDGPNQKK; DGPNQKKR; GPNQKKRR;
PNQKKRRV; NQKKRRVS; QKKRRVSR; KKRRVSRG; KRRVSRGS; RRVSRGSS; RVSRGSSQ; VSRGSSQK;
SRGSSQKA; RGSSQKAK; GSSQKAKG; SSQKAKGT; SQKAKGTR; QKAKGTRA; KAKGTRAS;
AKGTRASA; KGTRASAK; GTRASAKT; TRASAKTT; RASAKTTN; ASAKTTNK; SAKTTNKR; AKTTNKRR;
KTTNKRRS; TTNKRRSR; TNKRRSRS; NKRRSRSS; KRRSRSSR; RRSRSSRS; NWGRCYYR; WGRCYYRG;
GRCYYRGR; RCYYRGRM; CYYRGRML; YYRGRMLP; YRGRMLPK; RGRMLPKP; GRMLPKPR;
RMLPKPRN; MLPKPRNG; LPKPRNGG; PKPRNGGS; KPRNGGSR; PREKNASL; REKNASLL; EKNASLLQ;
KNASLLQH; NASLLQHS; ASLLQHSK; SLLQHSKN; LLQHSKNS; LQHSKNSP; QHSKNSPP; HSKNSPPQ;
SKNSPPQF; KNSPPQFK; GPNLWKST; PNLWKSTD; NLWKSTDV; LWKSTDVG; WKSTDVGG;
KSTDVGGC; STDVGGCN; TDVGGCNC; DVGGCNCT; VGGCNCTN; GGCNCTNR; GCNCTNRG;
CNCTNRGY; NCTNRGYW; CTNRGYWN; TNRGYWNN; PSCRVTKS; SCRVTKSA; AWWRKTYS;
WWRKTYSR; WRKTYSRQ; FPLLCCRW; PLLCCRWR; LLCCRWRT; LCCRWRTL; CCRWRTLG;
CRWRTLGN; RWRTLGNA; WRTLGNAG; RTLGNAGS; TLGNAGSA; LGNAGSAN; GNAGSANE;
NAGSANEL; AGSANELQ; GSANELQV; SANELQVK; ANELQVKV; NELQVKVP; KPNSPVPG; PNSPVPGN;
NSPVPGNE; SPVPGNEY; GLFGQKQC; LFGQKQCL; FGQKQCLS; GQKQCLSS; VFWDFHRR; FWDFHRRG;
WDFHRRGK; DFHRRGKC; FHRRGKCS; HRRGKCSP; RRGKCSPS; RGKCSPST; GKCSPSTS; KCSPSTSC;
CSPSTSCD; SPSTSCDQ; PSTSCDQH; STSCDQHS; TSCDQHSY; SCDQHSYH; CDQHSYHS; DQHSYHSV;
QHSYHSVA; HSYHSVAR; QLWNTTVE; LWNTTVER; WNTTVERP; NTTVERPC; TTVERPCK; TVERPCKI;
VERPCKIF; DPPEKKIC; PPEKKICK; PEKKICKE; EKKICKES; KKICKESL; KICKESLP; ICKESLPN;
CKESLPNF; KESLPNFL; ESLPNFLF; SLPNFLFA; LPNFLFAK; PYKQENPE; YKQENPES; KQENPESG;
QENPESGW; ENPESGWA; NPESGWAA; PESGWAAY; ESGWAAYV; SGWAAYVW; GWAAYVWY;
WAAYVWYG; AAYVWYGI; AYVWYGIP; YVWYGIPG; VWYGIPGR; WYGIPGRR; YGIPGRRG;
WHRKTSRG; HRKTSRGP; RKTSRGPR; KTSRGPRY; TSRGPRYD; SRGPRYDK; RGPRYDKI; GPRYDKIY;
QTGTIANQ; TGTIANQN; GTIANQNA; TIANQNAL; IANQNALN; ANQNALNR; NQNALNRC; QNALNRCF;
NALNRCFY; ALNRCFYC; LNRCFYCT; NRCFYCTY; RCFYCTYT; CFYCTYTF; FYCTYTFN; YCTYTFNK;
CTYTFNKC; TYTFNKCC; YTFNKCCF; TFNKCCFC; FNKCCFCI; NKCCFCIS; KCCFCISH; CCFCISHF;
ACVILGVV; CVILGVVF; NTESLYTN; TESLYTNA; ESLYTNAT; SLYTNATL; LYTNATLD; YTNATLDY;
TNATLDYG; NATLDYGG; ATLDYGGL; TLDYGGLT; LDYGGLTF; DYGGLTFG; YGGLTFGN; GGLTFGNL;
GLTFGNLQ; LTFGNLQQ; TFGNLQQG; FGNLQQGL; GNLQQGLK; NLQQGLKY; LQQGLKYL;
QQGLKYLR; QGLKYLRL; GLKYLRLG; LKYLRLGK; KYLRLGKS; YLRLGKSI; LRLGKSIV; RLGKSIVI;
LGKSIVIG; GKSIVIGI; KSIVIGIQ; SIVIGIQC; IVIGIQCL; VIGIQCLI; IGIQCLIH; GIQCLIHV; IQCLIHVQ;
QCLIHVQS; CLIHVQSL; LIHVQSLQ; IHVQSLQF; HVQSLQFL; VQSLQFLN; QSLQFLNP; SLQFLNPL;
LQFLNPLL; QFLNPLLL; YQEYISPC; QEYISPCI; EYISPCIY; YISPCIYY; ISPCIYYI; SPCIYYIS; PCIYYISS;
CIYYISSL; IYYISSLK; YYISSLKK; YISSLKKY; ISSLKKYT; SSLKKYTY; SLKKYTYL; LKKYTYLS;
KKYTYLSQ; KYTYLSQN; YTYLSQNP; TYLSQNPA; YLSQNPAF; LSQNPAFP; SQNPAFPS; QNPAFPSI;
NPAFPSIQ; PAFPSIQQ; AFPSIQQF; IVYQLQNQ; VYQLQNQL; YQLQNQLQ; QLQNQLQA; TKLAVATR;
KLAVATRS; LAVATRSF; AVATRSFH; VATRSFHF; ATRSFHFV; TRSFHFVK; RSFHFVKF; SFHFVKFF;
FHFVKFFF; HFVKFFFQ; FVKFFFQV; VKFFFQVR; KFFFQVRT; FFFQVRTL; FFQVRTLS; FQVRTLSF;
QVRTLSFV; VRTLSFVR; RTLSFVRI; TLSFVRIF; LSFVRIFL; SFVRIFLN; FVRIFLNI; VRIFLNIF; RIFLNIFW;
IFLNIFWA; PSLVEIFG; SLVEIFGF; LVEIFGFF; VEIFGFFC; EIFGFFCL; IFGFFCLN; FGFFCLNV;
GFFCLNVS; FFCLNVSF; FCLNVSFL; CLNVSFLN; LNVSFLNL; NVSFLNLP; HFHLNNLS; FHLNNLSN;
HLNNLSNC; LNNLSNCL; NNLSNCLN; NLSNCLNC; LSNCLNCL; SNCLNCLF; NCLNCLFH; CLNCLFHV;
LNCLFHVL; NCLFHVLK; CLFHVLKA; LFHVLKAN; FHVLKANP; HVLKANPL; VLKANPLI; LKANPLIQ;
KANPLIQL; ANPLIQLL; NPLIQLLS; PLIQLLSL; LIQLLSLL; IQLLSLLH; QLLSLLHL; LLSLLHLQ;
LSLLHLQK; SLLHLQKQ; LLHLQKQP; LHLQKQPC; HLQKQPCT; LQKQPCTD; QKQPCTDL; LHLAQRLA;
HLAQRLAF; LAQRLAFP; AQRLAFPW; QRLAFPWV; RLAFPWVG; LAFPWVGL; AFPWVGLH;
FPWVGLHL; PWVGLHLR; WVGLHLRL; VGLHLRLY; GLHLRLYH; LHLRLYHH; HLRLYHHT;
LRLYHHTN; RLYHHTNL; LYHHTNLI; YHHTNLIT; HHTNLITL; HTNLITLQ; TNLITLQL; NLITLQLV;
LITLQLVL; ITLQLVLF; TLQLVLFF; LQLVLFFH; QLVLFFHY; LVLFFHYQ; VLFFHYQW; LFFHYQWD;
FFHYQWDL; KQYSAKNQ; QYSAKNQI; YSAKNQIL; SAKNQILQ; AKNQILQN; KNQILQNP; NQILQNPF;
VANSAAKQ; ANSAAKQH; NSAAKQHL; SAAKQHLP; AAKQHLPY; AKQHLPYI; KQHLPYIV; QHLPYIVL;
HLPYIVLV; LPYIVLVQ; PYIVLVQH; YIVLVQHF; IVLVQHFH; VLVQHFHE; LVQHFHEL; VQHFHELQ;
QHFHELQI; HFHELQIL; FHELQILN; HELQILNP; ELQILNPF; LQILNPFY; QILNPFYL; ILNPFYLI;
LNPFYLIY; NPFYLIYD; IFLLAFLP; FLLAFLPW; LLAFLPWS; LAFLPWSY; AFLPWSYE; FLPWSYEG;
LPWSYEGY; PWSYEGYL; WSYEGYLL; SYEGYLLF; YEGYLLFF; LKLYLLLA; KLYLLLAD; LYLLLADK;
YLLLADKY; LLLADKYF; LLADKYFF; LADKYFFD; ADKYFFDF; DKYFFDFY; KYFFDFYF; YFFDFYFL;
FFDFYFLQ; FDFYFLQK; HLQSAFHD; LQSAFHDT; SDKAGLFS; DKAGLFSD; KAGLFSDT; AGLFSDTF;
GLFSDTFY; LFSDTFYT; FSDTFYTP; SDTFYTPL; DTFYTPLH; TFYTPLHC; FYTPLHCI; YTPLHCIE;
TPLHCIEI; PLHCIEIL; LHCIEILN; HCIEILNT; CIEILNTY; IEILNTYL; EILNTYLI; ILNTYLII; LNTYLIIK;
NTYLIIKT; TYLIIKTH; YLIIKTHP; LIIKTHPH; IIKTHPHT; IKTHPHTL; KTHPHTLS; THPHTLSL;
HPHTLSLL; PHTLSLLH; HTLSLLHT; TLSLLHTQ; LISKTPAL; ISKTPALF; SKTPALFL; KTPALFLQ;
TPALFLQA; PALFLQAL; ALFLQALL; LFLQALLG; NHAPLSPL; HAPLSPLE; APLSPLEC; PLSPLECF;
LSPLECFL; SPLECFLL; LRHYIVSI; RHYIVSIP; HYTVSIPY; RYTAFDRN; YTAFDRNY; LQKLYVYV;
QKLYVYVE; KLYVYVEL; LYVYVELK; YVYVELKR; VYVELKRI; YYAQHTCV; YAQHTCVY;
VFYTEFEL; FYTEFELF; YTEFELFL; YTQQSRQG; TQQSRQGF; QQSRQGFY; QSRQGFYY; ETGVDQRE;
TGVDQRES; GVDQRESL; GLLPFFFF; LLPFFFFW; LPFFFFWV; PFFFFWVV; FFFFWVVL; FFFWVVLS;
FFWVVLSV; FWVVLSVE; WVVLSVEN; VVLSVENL; VLSVENLL; LSVENLLL; SVENLLLL; VENLLLLL;
ENLLLLLH; NLLLLLHH; LLLLLHHW; LLLLHHWQ; LLLHHWQT; LLHHWQTY; LHHWQTYL;
HHWQTYLH; HWQTYLHG; WQTYLHGK; QTYLHGKI; TYLHGKIN; YLHGKINL; LHGKINLH; HGKINLHP;
GKINLHPI; KINLHPIF; INLHPIFH; RNSTRTPT; NSTRTPTL; STRTPTLL; TRTPTLLF; RTPTLLFH;
TPTLLFHR; PTLLFHRL; TLLFHRLA; LLFHRLAP; LFHRLAPI; FHRLAPIK; HRLAPIKK; RLAPIKKI;
LAPIKKII; APIKKIIT; GLLIFYYL; LLIFYYLS; LIFYYLSK; IFYYLSKY; FYYLSKYK; YYLSKYKL;
YLSKYKLV; LSKYKLVT; SKYKLVTL; KYKLVTLK; YKLVTLKL; ISEGSFSN; SEGSFSNY; EGSFSNYL;
GSFSNYLD; SFSNYLDP; FSNYLDPP; SNYLDPPL; NYLDPPLQ; YLDPPLQS; LDPPLQSF; DPPLQSFF;
PPLQSFFS; AKPLCEAV; KPLCEAVN; PLCEAVNA; LCEAVNAV; CEAVNAVA; EAVNAVAI; AVNAVATY;
VNAVAIYP; NAVAIYPN; AVAIYPNQ; VAIYPNQG; AIYPNQGL; IYPNQGLF; YPNQGLFS; HARAVHRR;
ARAVHRRL; RAVHRRLF; AVHRRLFG; VHRRLFGT; HRRLFGTN; RRLFGTNR; RLFGTNRP; LFGTNRPF;
FGTNRPFL; GTNRPFLA; TNRPFLAV; NRPFLAVQ; RPFLAVQG; PFLAVQGI; FLAVQGIW; LAVQGIWA;
AVQGIWAK; VQGIWAKR; QGIWAKRK; GIWAKRKI; IWAKRKIS; WAKRKIST; AKRKISTN; KRKISTNL;
ATPGSKIR; TPGSKIRL; PGSKIRLM; GSKIRLMS; SKIRLMSY; KIRLMSYL; IRLMSYLY; RLMSYLYI;
LMSYLYIL; MSYLYILL; SYLYILLH; YLYILLHF; LYILLHFF; YILLHFFI; ILLHFFIQ; LLHFFIQS; LHFFIQSI;
HFFIQSIH; FFIQSIHS; FIQSIHSL; IQSIHSLH; QSIHSLHF; SIHSLHFI; IHSLHFIL; HSLHFILV; SLHFILVA;
LHFILVAP; HFILVAPF; FILVAPFV; ILVAPFVR; LVAPFVRV; VAPFVRVK; APFVRVKF; PFVRVKFL;
FVRVKFLT; VRVKFLTL; RVKFLTLP; GKISPGSS; KISPGSSF; ISPGSSFK; SPGSSFKA; KVHELHGF;
VHELHGFF; HELHGFFP; ELHGFFPV; LHGFFPVK; HGFFPVKN; GFFPVKNF; FFPVKNFI; FPVKNFIH

9 mers:

LQKLQKNRD; QKLQKNRDF; KLQKNRDFP; LQKNRDFPK; ASEKASTPL; SEKASTPLL; EKASTPLLL;
KASTPLLLE; ASTPLLLER; STPLLLERK; TPLLLERKG; PLLLERKGG; LLLERKGGG; LLERKGGGR;
LERKGGGRG; ERKGGGRGG; RKGGGRGGL; KGGGRGGLG; GGGRGGLGL; GGRGGLGLL; GRGGLGLLY;
RGGLGLLYI; GGLGLLYII; GLGLLYIIK; LGLLYIIKK; GLLYIIKKK; LLYIIKKKA; LYIIKKKAT;
YIIKKKATG; IIKKKATGR; IKKKATGRS; KKKATGRSC; KKATGRSCL; KATGRSCLP; ATGRSCLPM;
TGRSCLPME; GRSCLPMEC; RSCLPMECS; SCLPMECSQ; CLPMECSQT; LPMECSQTM; PMECSQTMT;
MECSQTMTS; ECSQTMTSG; CSQTMTSGR; SQTMTSGRK; QTMTSGRKV; TMTSGRKVH; MTSGRKVHD;
TSGRKVHDS; SGRKVHDSQ; GRKVHDSQG; RKVHDSQGN; KVHDSQGNA; VHDSQGNAA; HDSQGNAAK;
DSQGNAAKP; PQEGKCMTH; QEGKCMTHR; EGKCMTHRE; GKCMTHREE; KCMTHREEL; CMTHREELL;
MTHREELLT; THREELLTH; HREELLTHG; REELLTHGM; EELLTHGMQ; ELLTHGMQP; LLTHGMQPN;
LTHGMQPNH; THGMQPNHD; HGMQPNHDL; GMQPNHDLR; MQPNHDLRK; QPNHDLRKE; PNHDLRKES;
NHDLRKESA; QTCFASLGI; TCFASLGIL; CFASLGILA; FASLGILAL; ASLGILALS; SLGILALSP;
LGILALSPV; GILALSPVK; ILALSPVKL; LALSPVKLD; ALSPVKLDK; LSPVKLDKG; SPVKLDKGH;
PVKLDKGHG; VKLDKGHGS; KLDKGHGSA; LDKGHGSAP; DKGHGSAPA; KGHGSAPAV; GHGSAPAVT;
HGSAPAVTT; GSAPAVTTS; SAPAVTTSF; APAVTTSFS; PAVTTSFSE; AVTTSFSES; VTTSFSESW;
NLDWNKKKS; LDWNKKKSS; DWNKKKSSE; WNKKKSSED; NKKKSSEDF; KKKSSEDFY; KKSSEDFYF;
KSSEDFYFY; SSEDFYFYF; SEDFYFYFR; EDFYFYFRA; DFYFYFRAF; FYFYFRAFA; YFYFRAFAG;
FYFRAFAGI; YFRAFAGIL; RQCRREKQK; QCRREKQKY; CRREKQKYH; RREKQKYHC; REKQKYHCF;
EKQKYHCFT; KQKYHCFTC; QKYHCFTCC; KYHCFTCCK; YHCFTCCKR; HCFTCCKRL; CFTCCKRLC;
FTCCKRLCK; TCCKRLCKR; CCKRLCKRL; CKRLCKRLL; KRLCKRLLG; RLCKRLLGK; SLFFCISRF;
LFFCISRFM; FFCISRFMG; FCISRFMGA; CISRFMGAA; ISRFMGAAL; SRFMGAALA; RFMGAALAL;
FMGAALALL; MGAALALLG; GAALALLGD; AALALLGDL; ALALLGDLV; LALLGDLVA; ALLGDLVAS;
LLGDLVASV; LGDLVASVS; GDLVASVSE; DLVASVSEA; LVASVSEAA; VASVSEAAA; ASVSEAAAA;
SVSEAAAAT; VSEAAAATG; SEAAAATGF; EAAAATGFS; AAAATGFSV; AAATGFSVA; AATGFSVAE;
ATGFSVAEI; TGFSVAEIA; GFSVAEIAA; FSVAEIAAG; SVAEIAAGE; VAEIAAGEA; AEIAAGEAA;
EIAAGEAAA; IAAGEAAAA; AAGEAAAAI; AGEAAAAIE; GEAAAAIEV; EAAAAIEVQ; AAAAIEVQI;
AAAIEVQIA; AAIEVQIAS; AIEVQIASL; IEVQIASLA; EVQIASLAT; VQIASLATV; QIASLATVE;
IASLATVEG; ASLATVEGI; SLATVEGIT; LATVEGITS; ATVEGITST; TVEGITSTS; VEGITSTSE;
EGITSTSEA; GITSTSEAI; ITSTSEAIA; TSTSEAIAA; STSEAIAAI; TSEAIAAIG; SEAIAAIGL; EAIAAIGLT;
AIAAIGLTP; IAAIGLTPQ; AAIGLTPQT; AIGLTPQTY; IGLTPQTYA; GLTPQTYAV; LTPQTYAVI;
TPQTYAVIA; PQTYAVIAG; QTYAVIAGA; TYAVIAGAP; YAVIAGAPG; AVIAGAPGA; VIAGAPGAI;
IAGAPGAIA; AGAPGAIAG; GAPGAIAGF; APGAIAGFA; PGAIAGFAA; GAIAGFAAL; AIAGFAALI;
IAGFAALIQ; AGFAALIQT; GFAALIQTV; FAALIQTVS; AALIQTVSG; ALIQTVSGI; LIQTVSGIS;
IQTVSGISS; QTVSGISSL; TVSGISSLA; VSGISSLAQ; SGISSLAQV; GISSLAQVG; ISSLAQVGY;
SSLAQVGYK; SLAQVGYKF; LAQVGYKFF; AQVGYKFFD; QVGYKFFDD; VGYKFFDDW; GYKFFDDWD;
YKFFDDWDH; KFFDDWDHK; FFDDWDHKV; FDDWDHKVS; DDWDHKVST; DWDHKVSTV;
WDHKVSTVG; DHKVSTVGL; HKVSTVGLY; KVSTVGLYQ; VSTVGLYQQ; STVGLYQQS; TVGLYQQSG;
VGLYQQSGM; GLYQQSGMA; LYQQSGMAL; YQQSGMALE; QQSGMALEL; QSGMALELF; SGMALELFN;
GMALELFNP; MALELFNPD; ALELFNPDE; LELFNPDEY; ELFNPDEYY; LFNPDEYYD; FNPDEYYDI;
NPDEYYDIL; PDEYYDILF; DEYYDILFP; EYYDILFPG; YYDILFPGV; YDILFPGVN; DILFPGVNT;
ILFPGVNTF; LFPGVNTFV; FPGVNTFVN; PGVNTFVNN; GVNTFVNNI; VNTFVNNIQ; NTFVNNIQY;
TFVNNIQYL; FVNNIQYLD; VNNIQYLDP; NNIQYLDPR; NIQYLDPRH; IQYLDPRHW; QYLDPRHWG;
YLDPRHWGP; LDPRHWGPS; DPRHWGPSL; PRHWGPSLF; RHWGPSLFA; HWGPSLFAT; WGPSLFATI;
GPSLFATIS; PSLFATISQ; SLFATISQA; LFATISQAL; FATISQALW; ATISQALWH; TISQALWHV;
ISQALWHVI; SQALWHVIR; QALWHVIRD; ALWHVIRDD; LWHVIRDDI; WHVIRDDIP; HVIRDDIPS;
VIRDDIPSI; IRDDIPSIT; RDDIPSITS; DDIPSITSQ; DIPSITSQE; IPSITSQEL; PSITSQELQ; SITSQELQR;
ITSQELQRR; TSQELQRRT; SQELQRRTE; QELQRRTER; ELQRRTERF; LQRRTERFF; QRRTERFFR;
RRTERFFRD; RTERFFRDS; TERFFRDSL; ERFFRDSLA; RFFRDSLAR; FFRDSLARF; FRDSLARFL;
RDSLARFLE; DSLARFLEE; SLARFLEET; LARFLEETT; ARFLEETTW; RFLEETTWT; FLEETTWTI;
LEETTWTIV; EETTWTIVN; ETTWTIVNA; TTWTIVNAP; TWTIVNAPI; WTIVNAPIN; TIVNAPINF;
IVNAPINFY; VNAPINFYN; NAPINFYNY; APINFYNYI; PINFYNYIQ; INFYNYIQQ; NFYNYIQQY;
FYNYIQQYY; YNYIQQYYS; NYIQQYYSD; YIQQYYSDL; IQQYYSDLS; QQYYSDLSP; QYYSDLSPI;
YYSDLSPIR; YSDLSPIRP; SDLSPIRPS; DLSPIRPSM; LSPIRPSMV; SPIRPSMVR; PIRPSMVRQ;
IRPSMVRQV; RPSMVRQVA; PSMVRQVAE; SMVRQVAER; MVRQVAERE; VRQVAEREG; RQVAEREGT;
QVAEREGTR; VAEREGTRV; AEREGTRVH; EREGTRVHF; REGTRVHFG; EGTRVHFGH; GTRVHFGHT;
TRVHFGHTY; RVHFGHTYS; VHFGHTYSI; HFGHTYSID; FGHTYSIDD; GHTYSIDDA; HTYSIDDAD;
TYSIDDADS; YSIDDADSI; SIDDADSIE; IDDADSIEE; DDADSIEEV; DADSIEEVT; ADSIEEVTQ;
DSIEEVTQR; SIEEVTQRM; IEEVTQRMD; EEVTQRMDL; EVTQRMDLR; VTQRMDLRN; TQRMDLRNQ;
QRMDLRNQQ; RMDLRNQQS; MDLRNQQSV; DLRNQQSVH; LRNQQSVHS; RNQQSVHSG; NQQSVHSGE;
QQSVHSGEF; QSVHSGEFI; SVHSGEFIE; VHSGEFIEK; HSGEFIEKT; SGEFIEKTI; GEFIEKTIA; EFIEKTIAP;
FIEKTIAPG; IEKTIAPGG; EKTIAPGGA; KTIAPGGAN; TIAPGGANQ; IAPGGANQR; APGGANQRT;
PGGANQRTA; GGANQRTAP; GANQRTAPQ; ANQRTAPQW; NQRTAPQWM; QRTAPQWML;
RTAPQWMLP; TAPQWMLPL; APQWMLPLL; PQWMLPLLL; QWMLPLLLG; WMLPLLLGL; MLPLLLGLY;
LPLLLGLYG; PLLLGLYGT; LLLGLYGTV; LLGLYGTVT; LGLYGTVTP; GLYGTVTPA; LYGTVTPAL;
YGTVTPALE; GTVTPALEA; TVTPALEAY; VTPALEAYE; TPALEAYED; PALEAYEDG; ALEAYEDGP;
LEAYEDGPN; EAYEDGPNQ; AYEDGPNQK; YEDGPNQKK; EDGPNQKKR; DGPNQKKRR; GPNQKKRRV;
PNQKKRRVS; NQKKRRVSR; QKKRRVSRG; KKRRVSRGS; KRRVSRGSS; RRVSRGSSQ; RVSRGSSQK;
VSRGSSQKA; SRGSSQKAK; RGSSQKAKG; GSSQKAKGT; SSQKAKGTR; SQKAKGTRA; QKAKGTRAS;
KAKGTRASA; AKGTRASAK; KGTRASAKT; GTRASAKTT; TRASAKTTN; RASAKTTNK; ASAKTTNKR;
SAKTTNKRR; AKTTNKRRS; KTTNKRRSR; TTNKRRSRS; TNKRRSRSS; NKRRSRSSR; KRRSRSSRS;
NWGRCYYRG; WGRCYYRGR; GRCYYRGRM; RCYYRGRML; CYYRGRMLP; YYRGRMLPK;
YRGRMLPKP; RGRMLPKPR; GRMLPKPRN; RMLPKPRNG; MLPKPRNGG; LPKPRNGGS; PKPRNGGSR;
PREKNASLL; REKNASLLQ; EKNASLLQH; KNASLLQHS; NASLLQHSK; ASLLQHSKN; SLLQHSKNS;
LLQHSKNSP; LQHSKNSPP; QHSKNSPPQ; HSKNSPPQF; SKNSPPQFK; GPNLWKSTD; PNLWKSTDV;
NLWKSTDVG; LWKSTDVGG; WKSTDVGGC; KSTDVGGCN; STDVGGCNC; TDVGGCNCT;
DVGGCNCTN; VGGCNCTNR; GGCNCTNRG; GCNCTNRGY; CNCTNRGYW; NCTNRGYWN;
CTNRGYWNN; PSCRVTKSA; AWWRKTYSR; WWRKTYSRQ; FPLLCCRWR; PLLCCRWRT; LLCCRWRTL;
LCCRWRTLG; CCRWRTLGN; CRWRTLGNA; RWRTLGNAG; WRTLGNAGS; RTLGNAGSA; TLGNAGSAN;
LGNAGSANE; GNAGSANEL; NAGSANELQ; AGSANELQV; GSANELQVK; SANELQVKV; ANELQVKVP;
KPNSPVPGN; PNSPVPGNE; NSPVPGNEY; GLFGQKQCL; LFGQKQCLS; FGQKQCLSS; VFWDFHRRG;
FWDFHRRGK; WDFHRRGKC; DFHRRGKCS; FHRRGKCSP; HRRGKCSPS; RRGKCSPST; RGKCSPSTS;
GKCSPSTSC; KCSPSTSCD; CSPSTSCDQ; SPSTSCDQH; PSTSCDQHS; STSCDQHSY; TSCDQHSYH;
SCDQHSYHS; CDQHSYHSV; DQHSYHSVA; QHSYHSVAR; QLWNTTVER; LWNTTVERP; WNTTVERPC;
NTTVERPCK; TTVERPCKI; TVERPCKIF; DPPEKKICK; PPEKKICKE; PEKKICKES; EKKICKESL;
KKICKESLP; KICKESLPN; ICKESLPNF; CKESLPNFL; KESLPNFLF; ESLPNFLFA; SLPNFLFAK;
PYKQENPES; YKQENPESG; KQENPESGW; QENPESGWA; ENPESGWAA; NPESGWAAY; PESGWAAYV;
ESGWAAYVW; SGWAAYVWY; GWAAYVWYG; WAAYVWYGI; AAYVWYGIP; AYVWYGIPG;
YVWYGIPGR; VWYGIPGRR; WYGIPGRRG; WHRKTSRGP; HRKTSRGPR; RKTSRGPRY; KTSRGPRYD;
TSRGPRYDK; SRGPRYDKI; RGPRYDKIY; QTGTIANQN; TGTIANQNA; GTIANQNAL; TIANQNALN;
IANQNALNR; ANQNALNRC; NQNALNRCF; QNALNRCFY; NALNRCFYC; ALNRCFYCT; LNRCFYCTY;
NRCFYCTYT; RCFYCTYTF; CFYCTYTFN; FYCTYTFNK; YCTYTFNKC; CTYTFNKCC; TYTFNKCCF;
YTFNKCCFC; TFNKCCFCI; FNKCCFCIS; NKCCFCISH; KCCFCISHF; ACVILGVVF; NTESLYTNA;
TESLYTNAT; ESLYTNATL; SLYTNATLD; LYTNATLDY; YTNATLDYG; TNATLDYGG; NATLDYGGL;
ATLDYGGLT; TLDYGGLTF; LDYGGLTFG; DYGGLTFGN; YGGLTFGNL; GGLTFGNLQ; GLTFGNLQQ;
LTFGNLQQG; TFGNLQQGL; FGNLQQGLK; GNLQQGLKY; NLQQGLKYL; LQQGLKYLR; QQGLKYLRL;
QGLKYLRLG; GLKYLRLGK; LKYLRLGKS; KYLRLGKSI; YLRLGKSIV; LRLGKSIVI; RLGKSIVIG;
LGKSIVIGI; GKSIVIGIQ; KSIVIGIQC; SIVIGIQCL; IVIGIQCLI; VIGIQCLIH; IGIQCLIHV; GIQCLIHVQ;
IQCLIHVQS; QCLIHVQSL; CLIHVQSLQ; LIHVQSLQF; IHVQSLQFL; HVQSLQFLN; VQSLQFLNP;
QSLQFLNPL; SLQFLNPLL; LQFLNPLLL; YQEYISPCI; QEYISPCIY; EYISPCIYY; YISPCIYYI; ISPCIYYIS;
SPCIYYISS; PCIYYISSL; CIYYISSLK; IYYISSLKK; YYISSLKKY; YISSLKKYT; ISSLKKYTY; SSLKKYTYL;
SLKKYTYLS; LKKYTYLSQ; KKYTYLSQN; KYTYLSQNP; YTYLSQNPA; TYLSQNPAF; YLSQNPAFP;
LSQNPAFPS; SQNPAFPSI; QNPAFPSIQ; NPAFPSIQQ; PAFPSIQQF; IVYQLQNQL; VYQLQNQLQ;
YQLQNQLQA; TKLAVATRS; KLAVATRSF; LAVATRSFH; AVATRSFHF; VATRSFHFV; ATRSFHFVK;
TRSFHFVKF; RSFHFVKFF; SFHFVKFFF; FHFVKFFFQ; HFVKFFFQV; FVKFFFQVR; VKFFFQVRT;
KFFFQVRTL; FFFQVRTLS; FFQVRTLSF; FQVRTLSFV; QVRTLSFVR; VRTLSFVRI; RTLSFVRIF;
TLSFVRIFL; LSFVRIFLN; SFVRIFLNI; FVRIFLNIF; VRIFLNIFW; RIFLNIFWA; PSLVEIFGF; SLVEIFGFF;
LVEIFGFFC; VEIFGFFCL; EIFGFFCLN; IFGFFCLNV; FGFFCLNVS; GFFCLNVSF; FFCLNVSFL;
FCLNVSFLN; CLNVSFLNL; LNVSFLNLP; HFHLNNLSN; FHLNNLSNC; HLNNLSNCL; LNNLSNCLN;
NNLSNCLNC; NLSNCLNCL; LSNCLNCLF; SNCLNCLFH; NCLNCLFHV; CLNCLFHVL; LNCLFHVLK;
NCLFHVLKA; CLFHVLKAN; LFHVLKANP; FHVLKANPL; HVLKANPLI; VLKANPLIQ; LKANPLIQL;
KANPLIQLL; ANPLIQLLS; NPLIQLLSL; PLIQLLSLL; LIQLLSLLH; IQLLSLLHL; QLLSLLHLQ;
LLSLLHLQK; LSLLHLQKQ; SLLHLQKQP; LLHLQKQPC; LHLQKQPCT; HLQKQPCTD; LQKQPCTDL;
LHLAQRLAF; HLAQRLAFP; LAQRLAFPW; AQRLAFPWV; QRLAFPWVG; RLAFPWVGL; LAFPWVGLH;
AFPWVGLHL; FPWVGLHLR; PWVGLHLRL; WVGLHLRLY; VGLHLRLYH; GLHLRLYHH; LHLRLYHHT;
HLRLYHHTN; LRLYHHTNL; RLYHHTNLI; LYHHTNLIT; YHHTNLITL; HHTNLITLQ; HTNLITLQL;
TNLITLQLV; NLITLQLVL; LITLQLVLF; ITLQLVLFF; TLQLVLFFH; LQLVLFFHY; QLVLFFHYQ;
LVLFFHYQW; VLFFHYQWD; LFFHYQWDL; KQYSAKNQI; QYSAKNQIL; YSAKNQILQ; SAKNQILQN;
AKNQILQNP; KNQILQNPF; VANSAAKQH; ANSAAKQHL; NSAAKQHLP; SAAKQHLPY; AAKQHLPYI;
AKQHLPYIV; KQHLPYIVL; QHLPYIVLV; HLPYIVLVQ; LPYIVLVQH; PYIVLVQHF; YIVLVQHFH;
IVLVQHFHE; VLVQHFHEL; LVQHFHELQ; VQHFHELQI; QHFHELQIL; HFHELQILN; FHELQILNP;
HELQILNPF; ELQILNPFY; LQILNPFYL; QILNPFYLI; ILNPFYLIY; LNPFYLIYD; IFLLAFLPW;
FLLAFLPWS; LLAFLPWSY; LAFLPWSYE; AFLPWSYEG; FLPWSYEGY; LPWSYEGYL; PWSYEGYLL;
WSYEGYLLF; SYEGYLLFF; LKLYLLLAD; KLYLLLADK; LYLLLADKY; YLLLADKYF; LLLADKYFF;
LLADKYFFD; LADKYFFDF; ADKYFFDFY; DKYFFDFYF; KYFFDFYFL; YFFDFYFLQ; FFDFYFLQK;
HLQSAFHDT; SDKAGLFSD; DKAGLFSDT; KAGLFSDTF; AGLFSDTFY; GLFSDTFYT; LFSDTFYTP;
FSDTFYTPL; SDTFYTPLH; DTFYTPLHC; TFYTPLHCI; FYTPLHCIE; YTPLHCIEI; TPLHCIEIL; PLHCIEILN;
LHCIEILNT; HCIEILNTY; CIEILNTYL; IEILNTYLI; EILNTYLII; ILNTYLIIK; LNTYLIIKT; NTYLIIKTH;
TYLIIKTHP; YLIIKTHPH; LIIKTHPHT; IIKTHPHTL; IKTHPHTLS; KTHPHTLSL; THPHTLSLL;
HPHTLSLLH; PHTLSLLHT; HTLSLLHTQ; LISKTPALF; ISKTPALFL; SKTPALFLQ; KTPALFLQA;
TPALFLQAL; PALFLQALL; ALFLQALLG; NHAPLSPLE; HAPLSPLEC; APLSPLECF; PLSPLECFL;
LSPLECFLL; LRHYIVSIP; RHYIVSIPY; RYTAFDRNY; LQKLYVYVE; QKLYVYVEL; KLYVYVELK;
LYVYVELKR; YVYVELKRI; YYAQHTCVY; VFYTEFELF; FYTEFELFL; YTQQSRQGF; TQQSRQGFY;
QQSRQGFYY; ETGVDQRES; TGVDQRESL; GLLPFFFFW; LLPFFFFWV; LPFFFFWVV; PFFFFWVVL;
FFFFWVVLS; FFFWVVLSV; FFWVVLSVE; FWVVLSVEN; WVVLSVENL; VVLSVENLL; VLSVENLLL;
LSVENLLLL; SVENLLLLL; VENLLLLLH; ENLLLLLHH; NLLLLLHHW; LLLLLHHWQ; LLLLHHWQT;
LLLHHWQTY; LLHHWQTYL; LHHWQTYLH; HHWQTYLHG; HWQTYLHGK; WQTYLHGKI;
QTYLHGKIN; TYLHGKINL; YLHGKINLH; LHGKINLHP; HGKINLHPI; GKINLHPIF; KINLHPIFH;
RNSTRTPTL; NSTRTPTLL; STRTPTLLF; TRTPTLLFH; RTPTLLFHR; TPTLLFHRL; PTLLFHRLA;
TLLFHRLAP; LLFHRLAPI; LFHRLAPIK; FHRLAPIKK; HRLAPIKKI; RLAPIKKII; LAPIKKIIT; GLLIFYYLS;
LLIFYYLSK; LIFYYLSKY; IFYYLSKYK; FYYLSKYKL; YYLSKYKLV; YLSKYKLVT; LSKYKLVTL;
SKYKLVTLK; KYKLVTLKL; ISEGSFSNY; SEGSFSNYL; EGSFSNYLD; GSFSNYLDP; SFSNYLDPP;
FSNYLDPPL; SNYLDPPLQ; NYLDPPLQS; YLDPPLQSF; LDPPLQSFF; DPPLQSFFS; AKPLCEAVN;
KPLCEAVNA; PLCEAVNAV; LCEAVNAVA; CEAVNAVAI; EAVNAVAIY; AVNAVAIYP; VNAVAIYPN;
NAVAIYPNQ; AVAIYPNQG; VAIYPNQGL; AIYPNQGLF; IYPNQGLFS; HARAVHRRL; ARAVHRRLF;
RAVHRRLFG; AVHRRLFGT; VHRRLFGTN; HRRLFGTNR; RRLFGTNRP; RLFGTNRPF; LFGTNRPFL;
FGTNRPFLA; GTNRPFLAV; TNRPFLAVQ; NRPFLAVQG; RPFLAVQGI; PFLAVQGIW; FLAVQGIWA;
LAVQGIWAK; AVQGIWAKR; VQGIWAKRK; QGIWAKRKI; GIWAKRKIS; IWAKRKIST; WAKRKISTN;
AKRKISTNL; ATPGSKIRL; TPGSKIRLM; PGSKIRLMS; GSKIRLMSY; SKIRLMSYL; KIRLMSYLY;
IRLMSYLYI; RLMSYLYIL; LMSYLYILL; MSYLYILLH; SYLYILLHF; YLYILLHFF; LYILLHFFI;
YILLHFFIQ; ILLHFFIQS; LLHFFIQSI; LHFFIQSIH; HFFIQSIHS; FFIQSIHSL; FIQSIHSLH; IQSIHSLHF;
QSIHSLHFI; SIHSLHFIL; IHSLHFILV; HSLHFILVA; SLHFILVAP; LHFILVAPF; HFILVAPFV; FILVAPFVR;
ILVAPFVRV; LVAPFVRVK; VAPFVRVKF; APFVRVKFL; PFVRVKFLT; FVRVKFLTL; VRVKFLTLP;
GKISPGSSF; KISPGSSFK; ISPGSSFKA; KVHELHGFF; VHELHGFFP; HELHGFFPV; ELHGFFPVK;
LHGFFPVKN; HGFFPVKNF; GFFPVKNFI; FFPVKNFIH

10 mers:

LQKLQKNRDF; QKLQKNRDFP; KLQKNRDFPK; ASEKASTPLL; SEKASTPLLL; EKASTPLLLE;
KASTPLLLER; ASTPLLLERK; STPLLLERKG; TPLLLERKGG; PLLLERKGGG; LLLERKGGGR;
LLERKGGGRG; LERKGGGRGG; ERKGGGRGGL; RKGGGRGGLG; KGGGRGGLGL; GGGRGGLGLL;
GGRGGLGLLY; GRGGLGLLYI; RGGLGLLYII; GGLGLLYIIK; GLGLLYIIKK; LGLLYIIKKK;
GLLYIIKKKA; LLYIIKKKAT; LYIIKKKATG; YIIKKKATGR; IIKKKATGRS; IKKKATGRSC;
KKKATGRSCL; KKATGRSCLP; KATGRSCLPM; ATGRSCLPME; TGRSCLPMEC; GRSCLPMECS;
RSCLPMECSQ; SCLPMECSQT; CLPMECSQTM; LPMECSQTMT; PMECSQTMTS; MECSQTMTSG;
ECSQTMTSGR; CSQTMTSGRK; SQTMTSGRKV; QTMTSGRKVH; TMTSGRKVHD; MTSGRKVHDS;
TSGRKVHDSQ; SGRKVHDSQG; GRKVHDSQGN; RKVHDSQGNA; KVHDSQGNAA; VHDSQGNAAK;
HDSQGNAAKP; PQEGKCMTHR; QEGKCMTHRE; EGKCMTHREE; GKCMTHREEL; KCMTHREELL;
CMTHREELLT; MTHREELLTH; THREELLTHG; HREELLTHGM; REELLTHGMQ; EELLTHGMQP;
ELLTHGMQPN; LLTHGMQPNH; LTHGMQPNHD; THGMQPNHDL; HGMQPNHDLR; GMQPNHDLRK;
MQPNHDLRKE; QPNHDLRKES; PNHDLRKESA; QTCFASLGIL; TCFASLGILA; CFASLGILAL;
FASLGILALS; ASLGILALSP; SLGILALSPV; LGILALSPVK; GILALSPVKL; ILALSPVKLD; LALSPVKLDK;
ALSPVKLDKG; LSPVKLDKGH; SPVKLDKGHG; PVKLDKGHGS; VKLDKGHGSA; KLDKGHGSAP;
LDKGHGSAPA; DKGHGSAPAV; KGHGSAPAVT; GHGSAPAVTT; HGSAPAVTTS; GSAPAVTTSF;
SAPAVTTSFS; APAVTTSFSE; PAVTTSFSES; AVTTSFSESW; NLDWNKKKSS; LDWNKKKSSE;
DWNKKKSSED; WNKKKSSEDF; NKKKSSEDFY; KKKSSEDFYF; KKSSEDFYFY; KSSEDFYFYF;
SSEDFYFYFR; SEDFYFYFRA; EDFYFYFRAF; DFYFYFRAFA; FYFYFRAFAG; YFYFRAFAGI;
FYFRAFAGIL; RQCRREKQKY; QCRREKQKYH; CRREKQKYHC; RREKQKYHCF; REKQKYHCFT;
EKQKYHCFTC; KQKYHCFTCC; QKYHCFTCCK; KYHCFTCCKR; YHCFTCCKRL; HCFTCCKRLC;
CFTCCKRLCK; FTCCKRLCKR; TCCKRLCKRL; CCKRLCKRLL; CKRLCKRLLG; KRLCKRLLGK;
SLFFCISRFM; LFFCISRFMG; FFCISRFMGA; FCISRFMGAA; CISRFMGAAL; ISRFMGAALA;
SRFMGAALAL; RFMGAALALL; FMGAALALLG; MGAALALLGD; GAALALLGDL; AALALLGDLV;
ALALLGDLVA; LALLGDLVAS; ALLGDLVASV; LLGDLVASVS; LGDLVASVSE; GDLVASVSEA;
DLVASVSEAA; LVASVSEAAA; VASVSEAAAA; ASVSEAAAAT; SVSEAAAATG; VSEAAAATGF;
SEAAAATGFS; EAAAATGFSV; AAAATGFSVA; AAATGFSVAE; AATGFSVAEI; ATGFSVAEIA;
TGFSVAEIAA; GFSVAEIAAG; FSVAEIAAGE; SVAEIAAGEA; VAEIAAGEAA; AEIAAGEAAA;
EIAAGEAAAA; IAAGEAAAAI; AAGEAAAAIE; AGEAAAAIEV; GEAAAAIEVQ; EAAAAIEVQI;
AAAAIEVQIA; AAAIEVQIAS; AAIEVQIASL; AIEVQIASLA; IEVQIASLAT; EVQIASLATV; VQIASLATVE;
QIASLATVEG; IASLATVEGI; ASLATVEGIT; SLATVEGITS; LATVEGITST; ATVEGITSTS; TVEGITSTSE;
VEGITSTSEA; EGITSTSEAI; GITSTSEAIA; ITSTSEAIAA; TSTSEAIAAI; STSEAIAAIG; TSEAIAAIGL;
SEAIAAIGLT; EAIAAIGLTP; AIAAIGLTPQ; IAAIGLTPQT; AAIGLTPQTY; AIGLTPQTYA; IGLTPQTYAV;
GLTPQTYAVI; LTPQTYAVIA; TPQTYAVIAG; PQTYAVIAGA; QTYAVIAGAP; TYAVIAGAPG;
YAVIAGAPGA; AVIAGAPGAI; VIAGAPGAIA; IAGAPGAIAG; AGAPGAIAGF; GAPGAIAGFA;
APGAIAGFAA; PGAIAGFAAL; GAIAGFAALI; AIAGFAALIQ; IAGFAALIQT; AGFAALIQTV;
GFAALIQTVS; FAALIQTVSG; AALIQTVSGI; ALIQTVSGIS; LIQTVSGISS; IQTVSGISSL; QTVSGISSLA;
TVSGISSLAQ; VSGISSLAQV; SGISSLAQVG; GISSLAQVGY; ISSLAQVGYK; SSLAQVGYKF;
SLAQVGYKFF; LAQVGYKFFD; AQVGYKFFDD; QVGYKFFDDW; VGYKFFDDWD; GYKFFDDWDH;
YKFFDDWDHK; KFFDDWDHKV; FFDDWDHKVS; FDDWDHKVST; DDWDHKVSTV; DWDHKVSTVG;
WDHKVSTVGL; DHKVSTVGLY; HKVSTVGLYQ; KVSTVGLYQQ; VSTVGLYQQS; STVGLYQQSG;
TVGLYQQSGM; VGLYQQSGMA; GLYQQSGMAL; LYQQSGMALE; YQQSGMALEL; QQSGMALELF;
QSGMALELFN; SGMALELFNP; GMALELFNPD; MALELFNPDE; ALELFNPDEY; LELFNPDEYY;
ELFNPDEYYD; LFNPDEYYDI; FNPDEYYDIL; NPDEYYDILF; PDEYYDILFP; DEYYDILFPG;
EYYDILFPGV; YYDILFPGVN; YDILFPGVNT; DILFPGVNTF; ILFPGVNTFV; LFPGVNTFVN;
FPGVNTFVNN; PGVNTFVNNI; GVNTFVNNIQ; VNTFVNNIQY; NTFVNNIQYL; TFVNNIQYLD;
FVNNIQYLDP; VNNIQYLDPR; NNIQYLDPRH; NIQYLDPRHW; IQYLDPRHWG; QYLDPRHWGP;
YLDPRHWGPS; LDPRHWGPSL; DPRHWGPSLF; PRHWGPSLFA; RHWGPSLFAT; HWGPSLFATI;
WGPSLFATIS; GPSLFATISQ; PSLFATISQA; SLFATISQAL; LFATISQALW; FATISQALWH; ATISQALWHV;
TISQALWHVI; ISQALWHVIR; SQALWHVIRD; QALWHVIRDD; ALWHVIRDDI; LWHVIRDDIP;
WHVIRDDIPS; HVIRDDIPSI; VIRDDIPSIT; IRDDIPSITS; RDDIPSITSQ; DDIPSITSQE; DIPSITSQEL;
IPSITSQELQ; PSITSQELQR; SITSQELQRR; ITSQELQRRT; TSQELQRRTE; SQELQRRTER; QELQRRTERF;
ELQRRTERFF; LQRRTERFFR; QRRTERFFRD; RRTERFFRDS; RTERFFRDSL; TERFFRDSLA;
ERFFRDSLAR; RFFRDSLARF; FFRDSLARFL; FRDSLARFLE; RDSLARFLEE; DSLARFLEET;
SLARFLEETT; LARFLEETTW; ARFLEETTWT; RFLEETTWTI; FLEETTWTIV; LEETTWTIVN;
EETTWTIVNA; ETTWTIVNAP; TTWTIVNAPI; TWTIVNAPIN; WTIVNAPINF; TIVNAPINFY; IVNAPINFYN;
VNAPINFYNY; NAPINFYNYI; APINFYNYIQ; PINFYNYIQQ; INFYNYIQQY; NFYNYIQQYY;
FYNYIQQYYS; YNYIQQYYSD; NYIQQYYSDL; YIQQYYSDLS; IQQYYSDLSP; QQYYSDLSPI;
QYYSDLSPIR; YYSDLSPIRP; YSDLSPIRPS; SDLSPIRPSM; DLSPIRPSMV; LSPIRPSMVR; SPIRPSMVRQ;
PIRPSMVRQV; IRPSMVRQVA; RPSMVRQVAE; PSMVRQVAER; SMVRQVAERE; MVRQVAEREG;
VRQVAEREGT; RQVAEREGTR; QVAEREGTRV; VAEREGTRVH; AEREGTRVHF; EREGTRVHFG;
REGTRVHFGH; EGTRVHFGHT; GTRVHFGHTY; TRVHFGHTYS; RVHFGHTYSI; VHFGHTYSID;
HFGHTYSIDD; FGHTYSIDDA; GHTYSIDDAD; HTYSIDDADS; TYSIDDADSI; YSIDDADSIE; SIDDADSIEE;
IDDADSIEEV; DDADSIEEVT; DADSIEEVTQ; ADSIEEVTQR; DSIEEVTQRM; SIEEVTQRMD;
IEEVTQRMDL; EEVTQRMDLR; EVTQRMDLRN; VTQRMDLRNQ; TQRMDLRNQQ; QRMDLRNQQS;
RMDLRNQQSV; MDLRNQQSVH; DLRNQQSVHS; LRNQQSVHSG; RNQQSVHSGE; NQQSVHSGEF;
QQSVHSGEFI; QSVHSGEFIE; SVHSGEFIEK; VHSGEFIEKT; HSGEFIEKTI; SGEFIEKTIA; GEFIEKTIAP;
EFIEKTIAPG; FIEKTIAPGG; IEKTIAPGGA; EKTIAPGGAN; KTIAPGGANQ; TIAPGGANQR; IAPGGANQRT;
APGGANQRTA; PGGANQRTAP; GGANQRTAPQ; GANQRTAPQW; ANQRTAPQWM; NQRTAPQWML;
QRTAPQWMLP; RTAPQWMLPL; TAPQWMLPLL; APQWMLPLLL; PQWMLPLLLG; QWMLPLLLGL;
WMLPLLLGLY; MLPLLLGLYG; LPLLLGLYGT; PLLLGLYGTV; LLLGLYGTVT; LLGLYGTVTP;
LGLYGTVTPA; GLYGTVTPAL; LYGTVTPALE; YGTVTPALEA; GTVTPALEAY; TVTPALEAYE;
VTPALEAYED; TPALEAYEDG; PALEAYEDGP; ALEAYEDGPN; LEAYEDGPNQ; EAYEDGPNQK;
AYEDGPNQKK; YEDGPNQKKR; EDGPNQKKRR; DGPNQKKRRV; GPNQKKRRVS; PNQKKRRVSR;
NQKKRRVSRG; QKKRRVSRGS; KKRRVSRGSS; KRRVSRGSSQ; RRVSRGSSQK; RVSRGSSQKA;
VSRGSSQKAK; SRGSSQKAKG; RGSSQKAKGT; GSSQKAKGTR; SSQKAKGTRA; SQKAKGTRAS;
QKAKGTRASA; KAKGTRASAK; AKGTRASAKT; KGTRASAKTT; GTRASAKTTN; TRASAKTTNK;
RASAKTTNKR; ASAKTTNKRR; SAKTTNKRRS; AKTTNKRRSR; KTTNKRRSRS; TTNKRRSRSS;
TNKRRSRSSR; NKRRSRSSRS; NWGRCYYRGR; WGRCYYRGRM; GRCYYRGRML; RCYYRGRMLP;
CYYRGRMLPK; YYRGRMLPKP; YRGRMLPKPR; RGRMLPKPRN; GRMLPKPRNG; RMLPKPRNGG;
MLPKPRNGGS; LPKPRNGGSR; PREKNASLLQ; REKNASLLQH; EKNASLLQHS; KNASLLQHSK;
NASLLQHSKN; ASLLQHSKNS; SLLQHSKNSP; LLQHSKNSPP; LQHSKNSPPQ; QHSKNSPPQF;
HSKNSPPQFK; GPNLWKSTDV; PNLWKSTDVG; NLWKSTDVGG; LWKSTDVGGC; WKSTDVGGCN;
KSTDVGGCNC; STDVGGCNCT; TDVGGCNCTN; DVGGCNCTNR; VGGCNCTNRG; GGCNCTNRGY;
GCNCTNRGYW; CNCTNRGYWN; NCTNRGYWNN; AWWRKTYSRQ; FPLLCCRWRT; PLLCCRWRTL;
LLCCRWRTLG; LCCRWRTLGN; CCRWRTLGNA; CRWRTLGNAG; RWRTLGNAGS; WRTLGNAGSA;
RTLGNAGSAN; TLGNAGSANE; LGNAGSANEL; GNAGSANELQ; NAGSANELQV; AGSANELQVK;
GSANELQVKV; SANELQVKVP; KPNSPVPGNE; PNSPVPGNEY; GLFGQKQCLS; LFGQKQCLSS;
VFWDFHRRGK; FWDFHRRGKC; WDFHRRGKCS; DFHRRGKCSP; FHRRGKCSPS; HRRGKCSPST;
RRGKCSPSTS; RGKCSPSTSC; GKCSPSTSCD; KCSPSTSCDQ; CSPSTSCDQH; SPSTSCDQHS;
PSTSCDQHSY; STSCDQHSYH; TSCDQHSYHS; SCDQHSYHSV; CDQHSYHSVA; DQHSYHSVAR;
QLWNTTVERP; LWNTTVERPC; WNTTVERPCK; NTTVERPCKI; TTVERPCKIF; DPPEKKICKE;
PPEKKICKES; PEKKICKESL; EKKICKESLP; KKICKESLPN; KICKESLPNF; ICKESLPNFL; CKESLPNFLF;
KESLPNFLFA; ESLPNFLFAK; PYKQENPESG; YKQENPESGW; KQENPESGWA; QENPESGWAA;
ENPESGWAAY; NPESGWAAYV; PESGWAAYVW; ESGWAAYVWY; SGWAAYVWYG; GWAAYVWYGI;
WAAYVWYGIP; AAYVWYGIPG; AYVWYGIPGR; YVWYGIPGRR; VWYGIPGRRG; WHRKTSRGPR;
HRKTSRGPRY; RKTSRGPRYD; KTSRGPRYDK; TSRGPRYDKI; SRGPRYDKIY; QTGTIANQNA;
TGTIANQNAL; GTIANQNALN; TIANQNALNR; IANQNALNRC; ANQNALNRCF; NQNALNRCFY;
QNALNRCFYC; NALNRCFYCT; ALNRCFYCTY; LNRCFYCTYT; NRCFYCTYTF; RCFYCTYTFN;
CFYCTYTFNK; FYCTYTFNKC; YCTYTFNKCC; CTYTFNKCCF; TYTFNKCCFC; YTFNKCCFCI;
TFNKCCFCIS; FNKCCFCISH; NKCCFCISHF; NTESLYTNAT; TESLYTNATL; ESLYTNATLD;
SLYTNATLDY; LYTNATLDYG; YTNATLDYGG; TNATLDYGGL; NATLDYGGLT; ATLDYGGLTF;
TLDYGGLTFG; LDYGGLTFGN; DYGGLTFGNL; YGGLTFGNLQ; GGLTFGNLQQ; GLTFGNLQQG;
LTFGNLQQGL; TFGNLQQGLK; FGNLQQGLKY; GNLQQGLKYL; NLQQGLKYLR; LQQGLKYLRL;
QQGLKYLRLG; QGLKYLRLGK; GLKYLRLGKS; LKYLRLGKSI; KYLRLGKSIV; YLRLGKSIVI;
LRLGKSIVIG; RLGKSIVIGI; LGKSIVIGIQ; GKSIVIGIQC; KSIVIGIQCL; SIVIGIQCLI; IVIGIQCLIH;
VIGIQCLIHV; IGIQCLIHVQ; GIQCLIHVQS; IQCLIHVQSL; QCLIHVQSLQ; CLIHVQSLQF; LIHVQSLQFL;
IHVQSLQFLN; HVQSLQFLNP; VQSLQFLNPL; QSLQFLNPLL; SLQFLNPLLL; YQEYISPCIY; QEYISPCIYY;
EYISPCIYYI; YISPCIYYIS; ISPCIYYISS; SPCIYYISSL; PCIYYISSLK; CIYYISSLKK; IYYISSLKKY;
YYISSLKKYT; YISSLKKYTY; ISSLKKYTYL; SSLKKYTYLS; SLKKYTYLSQ; LKKYTYLSQN;
KKYTYLSQNP; KYTYLSQNPA; YTYLSQNPAF; TYLSQNPAFP; YLSQNPAFPS; LSQNPAFPSI;
SQNPAFPSIQ; QNPAFPSIQQ; NPAFPSIQQF; IVYQLQNQLQ; VYQLQNQLQA; TKLAVATRSF;
KLAVATRSFH; LAVATRSFHF; AVATRSFHFV; VATRSFHFVK; ATRSFHFVKF; TRSFHFVKFF;
RSFHFVKFFF; SFHFVKFFFQ; FHFVKFFFQV; HFVKFFFQVR; FVKFFFQVRT; VKFFFQVRTL;
KFFFQVRTLS; FFFQVRTLSF; FFQVRTLSFV; FQVRTLSFVR; QVRTLSFVRI; VRTLSFVRIF; RTLSFVRIFL;
TLSFVRIFLN; LSFVRIFLNI; SFVRIFLNIF; FVRIFLNIFW; VRIFLNIFWA; PSLVEIFGFF; SLVEIFGFFC;
LVEIFGFFCL; VEIFGFFCLN; EIFGFFCLNV; IFGFFCLNVS; FGFFCLNVSF; GFFCLNVSFL; FFCLNVSFLN;
FCLNVSFLNL; CLNVSFLNLP; HFHLNNLSNC; FHLNNLSNCL; HLNNLSNCLN; LNNLSNCLNC;
NNLSNCLNCL; NLSNCLNCLF; LSNCLNCLFH; SNCLNCLFHV; NCLNCLFHVL; CLNCLFHVLK;
LNCLFHVLKA; NCLFHVLKAN; CLFHVLKANP; LFHVLKANPL; FHVLKANPLI; HVLKANPLIQ;
VLKANPLIQL; LKANPLIQLL; KANPLIQLLS; ANPLIQLLSL; NPLIQLLSLL; PLIQLLSLLH; LIQLLSLLHL;
IQLLSLLHLQ; QLLSLLHLQK; LLSLLHLQKQ; LSLLHLQKQP; SLLHLQKQPC; LLHLQKQPCT;
LHLQKQPCTD; HLQKQPCTDL; LHLAQRLAFP; HLAQRLAFPW; LAQRLAFPWV; AQRLAFPWVG;
QRLAFPWVGL; RLAFPWVGLH; LAFPWVGLHL; AFPWVGLHLR; FPWVGLHLRL; PWVGLHLRLY;
WVGLHLRLYH; VGLHLRLYHH; GLHLRLYHHT; LHLRLYHHTN; HLRLYHHTNL; LRLYHHTNLI;
RLYHHTNLIT; LYHHTNLITL; YHHTNLITLQ; HHTNLITLQL; HTNLITLQLV; TNLITLQLVL;
NLITLQLVLF; LITLQLVLFF; ITLQLVLFFH; TLQLVLFFHY; LQLVLFFHYQ; QLVLFFHYQW;
LVLFFHYQWD; VLFFHYQWDL; KQYSAKNQIL; QYSAKNQILQ; YSAKNQILQN; SAKNQILQNP;
AKNQILQNPF; VANSAAKQHL; ANSAAKQHLP; NSAAKQHLPY; SAAKQHLPYI; AAKQHLPYIV;
AKQHLPYIVL; KQHLPYIVLV; QHLPYIVLVQ; HLPYIVLVQH; LPYIVLVQHF; PYIVLVQHFH;
YIVLVQHFHE; IVLVQHFHEL; VLVQHFHELQ; LVQHFHELQI; VQHFHELQIL; QHFHELQILN;
HFHELQILNP; FHELQILNPF; HELQILNPFY; ELQILNPFYL; LQILNPFYLI; QILNPFYLIY; ILNPFYLIYD;
IFLLAFLPWS; FLLAFLPWSY; LLAFLPWSYE; LAFLPWSYEG; AFLPWSYEGY; FLPWSYEGYL;
LPWSYEGYLL; PWSYEGYLLF; WSYEGYLLFF; LKLYLLLADK; KLYLLLADKY; LYLLLADKYF;
YLLLADKYFF; LLLADKYFFD; LLADKYFFDF; LADKYFFDFY; ADKYFFDFYF; DKYFFDFYFL;
KYFFDFYFLQ; YFFDFYFLQK; SDKAGLFSDT; DKAGLFSDTF; KAGLFSDTFY; AGLFSDTFYT;
GLFSDTFYTP; LFSDTFYTPL; FSDTFYTPLH; SDTFYTPLHC; DTFYTPLHCI; TFYTPLHCIE; FYTPLHCIEI;
YTPLHCIEIL; TPLHCIEILN; PLHCIEILNT; LHCIEILNTY; HCIEILNTYL; CIEILNTYLI; IEILNTYLII;
EILNTYLIIK; ILNTYLIIKT; LNTYLIIKTH; NTYLIIKTHP; TYLIIKTHPH; YLIIKTHPHT; LIIKTHPHTL;
IIKTHPHTLS; IKTHPHTLSL; KTHPHTLSLL; THPHTLSLLH; HPHTLSLLHT; PHTLSLLHTQ; LISKTPALFL;
ISKTPALFLQ; SKTPALFLQA; KTPALFLQAL; TPALFLQALL; PALFLQALLG; NHAPLSPLEC;
HAPLSPLECF; APLSPLECFL; PLSPLECFLL; LRHYIVSIPY; LQKLYVYVEL; QKLYVYVELK;
KLYVYVELKR; LYVYVELKRI; VFYTEFELFL; YTQQSRQGFY; TQQSRQGFYY; ETGVDQRESL;
GLLPFFFFWV; LLPFFFFWVV; LPFFFFWVVL; PFFFFWVVLS; FFFFWVVLSV; FFFWVVLSVE;
FFWVVLSVEN; FWVVLSVENL; WVVLSVENLL; VVLSVENLLL; VLSVENLLLL; LSVENLLLLL;
SVENLLLLLH; VENLLLLLHH; ENLLLLLHHW; NLLLLLHHWQ; LLLLLHHWQT; LLLLHHWQTY;
LLLHHWQTYL; LLHHWQTYLH; LHHWQTYLHG; HHWQTYLHGK; HWQTYLHGKI; WQTYLHGKIN;
QTYLHGKINL; TYLHGKINLH; YLHGKINLHP; LHGKINLHPI; HGKINLHPIF; GKINLHPIFH; RNSTRTPTLL;
NSTRTPTLLF; STRTPTLLFH; TRTPTLLFHR; RTPTLLFHRL; TPTLLFHRLA; PTLLFHRLAP; TLLFHRLAPI;
LLFHRLAPIK; LFHRLAPIKK; FHRLAPIKKI; HRLAPIKKII; RLAPIKKIIT; GLLIFYYLSK; LLIFYYLSKY;
LIFYYLSKYK; IFYYLSKYKL; FYYLSKYKLV; YYLSKYKLVT; YLSKYKLVTL; LSKYKLVTLK;
SKYKLVTLKL; ISEGSFSNYL; SEGSFSNYLD; EGSFSNYLDP; GSFSNYLDPP; SFSNYLDPPL;
FSNYLDPPLQ; SNYLDPPLQS; NYLDPPLQSF; YLDPPLQSFF; LDPPLQSFFS; AKPLCEAVNA;
KPLCEAVNAV; PLCEAVNAVA; LCEAVNAVAI; CEAVNAVAIY; EAVNAVAIYP; AVNAVAIYPN;
VNAVAIYPNQ; NAVAIYPNQG; AVAIYPNQGL; VAIYPNQGLF; AIYPNQGLFS; HARAVHRRLF;
ARAVHRRLFG; RAVHRRLFGT; AVHRRLFGTN; VHRRLFGTNR; HRRLFGTNRP; RRLFGTNRPF;
RLFGTNRPFL; LFGTNRPFLA; FGTNRPFLAV; GTNRPFLAVQ; TNRPFLAVQG; NRPFLAVQGI;
RPFLAVQGIW; PFLAVQGIWA; FLAVQGIWAK; LAVQGIWAKR; AVQGIWAKRK; VQGIWAKRKI;
QGIWAKRKIS; GIWAKRKIST; IWAKRKISTN; WAKRKISTNL; ATPGSKIRLM; TPGSKIRLMS;
PGSKIRLMSY; GSKIRLMSYL; SKIRLMSYLY; KIRLMSYLYI; IRLMSYLYIL; RLMSYLYILL;
LMSYLYILLH; MSYLYILLHF; SYLYILLHFF; YLYILLHFFI; LYILLHFFIQ; YILLHFFIQS; ILLHFFIQSI;
LLHFFIQSIH; LHFFIQSIHS; HFFIQSIHSL; FFIQSIHSLH; FIQSIHSLHF; IQSIHSLHFI; QSIHSLHFIL;
SIHSLHFILV; IHSLHFILVA; HSLHFILVAP; SLHFILVAPF; LHFILVAPFV; HFILVAPFVR; FILVAPFVRV;
ILVAPFVRVK; LVAPFVRVKF; VAPFVRVKFL; APFVRVKFLT; PFVRVKFLTL; FVRVKFLTLP;
GKISPGSSFK; KISPGSSFKA; KVHELHGFFP; VHELHGFFPV; HELHGFFPVK; ELHGFFPVKN;
LHGFFPVKNF; HGFFPVKNFI; GFFPVKNFIH

11 mers:

LQKLQKNRDFP; QKLQKNRDFPK; ASEKASTPLLL; SEKASTPLLLE; EKASTPLLLER; KASTPLLLERK;
ASTPLLLERKG; STPLLLERKGG; TPLLLERKGGG; PLLLERKGGGR; LLLERKGGGRG; LLERKGGGRGG;
LERKGGGRGGL; ERKGGGRGGLG; RKGGGRGGLGL; KGGGRGGLGLL; GGGRGGLGLLY;
GGRGGLGLLYI; GRGGLGLLYII; RGGLGLLYIIK; GGLGLLYIIKK; GLGLLYIIKKK; LGLLYIIKKKA;
GLLYIIKKKAT; LLYIIKKKATG; LYIIKKKATGR; YIIKKKATGRS; IIKKKATGRSC; IKKKATGRSCL;
KKKATGRSCLP; KKATGRSCLPM; KATGRSCLPME; ATGRSCLPMEC; TGRSCLPMECS; GRSCLPMECSQ;
RSCLPMECSQT; SCLPMECSQTM; CLPMECSQTMT; LPMECSQTMTS; PMECSQTMTSG; MECSQTMTSGR;
ECSQTMTSGRK; CSQTMTSGRKV; SQTMTSGRKVH; QTMTSGRKVHD; TMTSGRKVHDS;
MTSGRKVHDSQ; TSGRKVHDSQG; SGRKVHDSQGN; GRKVHDSQGNA; RKVHDSQGNAA;
KVHDSQGNAAK; VHDSQGNAAKP; PQEGKCMTHRE; QEGKCMTHREE; EGKCMTHREEL;
GKCMTHREELL; KCMTHREELLT; CMTHREELLTH; MTHREELLTHG; THREELLTHGM;
HREELLTHGMQ; REELLTHGMQP; EELLTHGMQPN; ELLTHGMQPNH; LLTHGMQPNHD;
LTHGMQPNHDL; THGMQPNHDLR; HGMQPNHDLRK; GMQPNHDLRKE; MQPNHDLRKES;
QPNHDLRKESA; QTCFASLGILA; TCFASLGILAL; CFASLGILALS; FASLGILALSP; ASLGILALSPV;
SLGILALSPVK; LGILALSPVKL; GILALSPVKLD; ILALSPVKLDK; LALSPVKLDKG; ALSPVKLDKGH;
LSPVKLDKGHG; SPVKLDKGHGS; PVKLDKGHGSA; VKLDKGHGSAP; KLDKGHGSAPA;
LDKGHGSAPAV; DKGHGSAPAVT; KGHGSAPAVTT; GHGSAPAVTTS; HGSAPAVTTSF; GSAPAVTTSFS;
SAPAVTTSFSE; APAVTTSFSES; PAVTTSFSESW; NLDWNKKKSSE; LDWNKKKSSED; DWNKKKSSEDF;
WNKKKSSEDFY; NKKKSSEDFYF; KKKSSEDFYFY; KKSSEDFYFYF; KSSEDFYFYFR; SSEDFYFYFRA;
SEDFYFYFRAF; EDFYFYFRAFA; DFYFYFRAFAG; FYFYFRAFAGI; YFYFRAFAGIL; RQCRREKQKYH;
QCRREKQKYHC; CRREKQKYHCF; RREKQKYHCFT; REKQKYHCFTC; EKQKYHCFTCC;
KQKYHCFTCCK; QKYHCFTCCKR; KYHCFTCCKRL; YHCFTCCKRLC; HCFTCCKRLCK; CFTCCKRLCKR;
FTCCKRLCKRL; TCCKRLCKRLL; CCKRLCKRLLG; CKRLCKRLLGK; SLFFCISRFMG; LFFCISRFMGA;
FFCISRFMGAA; FCISRFMGAAL; CISRFMGAALA; ISRFMGAALAL; SRFMGAALALL; RFMGAALALLG;
FMGAALALLGD; MGAALALLGDL; GAALALLGDLV; AALALLGDLVA; ALALLGDLVAS;
LALLGDLVASV; ALLGDLVASVS; LLGDLVASVSE; LGDLVASVSEA; GDLVASVSEAA; DLVASVSEAAA;
LVASVSEAAAA; VASVSEAAAAT; ASVSEAAAATG; SVSEAAAATGF; VSEAAAATGFS; SEAAAATGFSV;
EAAAATGFSVA; AAAATGFSVAE; AAATGFSVAEI; AATGFSVAEIA; ATGFSVAEIAA; TGFSVAEIAAG;
GFSVAEIAAGE; FSVAEIAAGEA; SVAEIAAGEAA; VAEIAAGEAAA; AEIAAGEAAAA; EIAAGEAAAAI;
IAAGEAAAAIE; AAGEAAAAIEV; AGEAAAAIEVQ; GEAAAAIEVQI; EAAAAIEVQIA; AAAAIEVQIAS;
AAAIEVQIASL; AAIEVQIASLA; AIEVQIASLAT; IEVQIASLATV; EVQIASLATVE; VQIASLATVEG;
QIASLATVEGI; IASLATVEGIT; ASLATVEGITS; SLATVEGITST; LATVEGITSTS; ATVEGITSTSE;
TVEGITSTSEA; VEGITSTSEAI; EGITSTSEAIA; GITSTSEAIAA; ITSTSEAIAAI; TSTSEAIAAIG;
STSEAIAAIGL; TSEAIAAIGLT; SEAIAAIGLTP; EAIAAIGLTPQ; AIAAIGLTPQT; IAAIGLTPQTY;
AAIGLTPQTYA; AIGLTPQTYAV; IGLTPQTYAVI; GLTPQTYAVIA; LTPQTYAVIAG; TPQTYAVIAGA;
PQTYAVIAGAP; QTYAVIAGAPG; TYAVIAGAPGA; YAVIAGAPGAI; AVIAGAPGAIA; VIAGAPGAIAG;
IAGAPGAIAGF; AGAPGAIAGFA; GAPGAIAGFAA; APGAIAGFAAL; PGAIAGFAALI; GAIAGFAALIQ;
AIAGFAALIQT; IAGFAALIQTV; AGFAALIQTVS; GFAALIQTVSG; FAALIQTVSGI; AALIQTVSGIS;
ALIQTVSGISS; LIQTVSGISSL; IQTVSGISSLA; QTVSGISSLAQ; TVSGISSLAQV; VSGISSLAQVG;
SGISSLAQVGY; GISSLAQVGYK; ISSLAQVGYKF; SSLAQVGYKFF; SLAQVGYKFFD; LAQVGYKFFDD;
AQVGYKFFDDW; QVGYKFFDDWD; VGYKFFDDWDH; GYKFFDDWDHK; YKFFDDWDHKV;
KFFDDWDHKVS; FFDDWDHKVST; FDDWDHKVSTV; DDWDHKVSTVG; DWDHKVSTVGL;
WDHKVSTVGLY; DHKVSTVGLYQ; HKVSTVGLYQQ; KVSTVGLYQQS; VSTVGLYQQSG;
STVGLYQQSGM; TVGLYQQSGMA; VGLYQQSGMAL; GLYQQSGMALE; LYQQSGMALEL;
YQQSGMALELF; QQSGMALELFN; QSGMALELFNP; SGMALELFNPD; GMALELFNPDE; MALELFNPDEY;
ALELFNPDEYY; LELFNPDEYYD; ELFNPDEYYDI; LFNPDEYYDIL; FNPDEYYDILF; NPDEYYDILFP;
PDEYYDILFPG; DEYYDILFPGV; EYYDILFPGVN; YYDILFPGVNT; YDILFPGVNTF; DILFPGVNTFV;
ILFPGVNTFVN; LFPGVNTFVNN; FPGVNTFVNNI; PGVNTFVNNIQ; GVNTFVNNIQY; VNTFVNNIQYL;
NTFVNNIQYLD; TFVNNIQYLDP; FVNNIQYLDPR; VNNIQYLDPRH; NNIQYLDPRHW; NIQYLDPRHWG;
IQYLDPRHWGP; QYLDPRHWGPS; YLDPRHWGPSL; LDPRHWGPSLF; DPRHWGPSLFA; PRHWGPSLFAT;
RHWGPSLFATI; HWGPSLFATIS; WGPSLFATISQ; GPSLFATISQA; PSLFATISQAL; SLFATISQALW;
LFATISQALWH; FATISQALWHV; ATISQALWHVI; TISQALWHVIR; ISQALWHVIRD; SQALWHVIRDD;
QALWHVIRDDI; ALWHVIRDDIP; LWHVIRDDIPS; WHVIRDDIPSI; HVIRDDIPSIT; VIRDDIPSITS;
IRDDIPSITSQ; RDDIPSITSQE; DDIPSITSQEL; DIPSITSQELQ; IPSITSQELQR; PSITSQELQRR;
SITSQELQRRT; ITSQELQRRTE; TSQELQRRTER; SQELQRRTERF; QELQRRTERFF; ELQRRTERFFR;
LQRRTERFFRD; QRRTERFFRDS; RRTERFFRDSL; RTERFFRDSLA; TERFFRDSLAR; ERFFRDSLARF;
RFFRDSLARFL; FFRDSLARFLE; FRDSLARFLEE; RDSLARFLEET; DSLARFLEETT; SLARFLEETTW;
LARFLEETTWT; ARFLEETTWTI; RFLEETTWTIV; FLEETTWTIVN; LEETTWTIVNA; EETTWTIVNAP;
ETTWTIVNAPI; TTWTIVNAPIN; TWTIVNAPINF; WTIVNAPINFY; TIVNAPINFYN; IVNAPINFYNY;
VNAPINFYNYI; NAPINFYNYIQ; APINFYNYIQQ; PINFYNYIQQY; INFYNYIQQYY; NFYNYIQQYYS;
FYNYIQQYYSD; YNYIQQYYSDL; NYIQQYYSDLS; YIQQYYSDLSP; IQQYYSDLSPI; QQYYSDLSPIR;
QYYSDLSPIRP; YYSDLSPIRPS; YSDLSPIRPSM; SDLSPIRPSMV; DLSPIRPSMVR; LSPIRPSMVRQ;
SPIRPSMVRQV; PIRPSMVRQVA; IRPSMVRQVAE; RPSMVRQVAER; PSMVRQVAERE; SMVRQVAEREG;
MVRQVAEREGT; VRQVAEREGTR; RQVAEREGTRV; QVAEREGTRVH; VAEREGTRVHF;
AEREGTRVHFG; EREGTRVHFGH; REGTRVHFGHT; EGTRVHFGHTY; GTRVHFGHTYS; TRVHFGHTYSI;
RVHFGHTYSID; VHFGHTYSIDD; HFGHTYSIDDA; FGHTYSIDDAD; GHTYSIDDADS; HTYSIDDADSI;
TYSIDDADSIE; YSIDDADSIEE; SIDDADSIEEV; IDDADSIEEVT; DDADSIEEVTQ; DADSIEEVTQR;
ADSIEEVTQRM; DSIEEVTQRMD; SIEEVTQRMDL; IEEVTQRMDLR; EEVTQRMDLRN; EVTQRMDLRNQ;
VTQRMDLRNQQ; TQRMDLRNQQS; QRMDLRNQQSV; RMDLRNQQSVH; MDLRNQQSVHS;
DLRNQQSVHSG; LRNQQSVHSGE; RNQQSVHSGEF; NQQSVHSGEFI; QQSVHSGEFIE; QSVHSGEFIEK;
SVHSGEFIEKT; VHSGEFIEKTI; HSGEFIEKTIA; SGEFIEKTIAP; GEFIEKTIAPG; EFIEKTIAPGG;
FIEKTIAPGGA; IEKTIAPGGAN; EKTIAPGGANQ; KTIAPGGANQR; TIAPGGANQRT; IAPGGANQRTA;
APGGANQRTAP; PGGANQRTAPQ; GGANQRTAPQW; GANQRTAPQWM; ANQRTAPQWML;
NQRTAPQWMLP; QRTAPQWMLPL; RTAPQWMLPLL; TAPQWMLPLLL; APQWMLPLLLG;
PQWMLPLLLGL; QWMLPLLLGLY; WMLPLLLGLYG; MLPLLLGLYGT; LPLLLGLYGTV; PLLLGLYGTVT;
LLLGLYGTVTP; LLGLYGTVTPA; LGLYGTVTPAL; GLYGTVTPALE; LYGTVTPALEA; YGTVTPALEAY;
GTVTPALEAYE; TVTPALEAYED; VTPALEAYEDG; TPALEAYEDGP; PALEAYEDGPN; ALEAYEDGPNQ;
LEAYEDGPNQK; EAYEDGPNQKK; AYEDGPNQKKR; YEDGPNQKKRR; EDGPNQKKRRV;
DGPNQKKRRVS; GPNQKKRRVSR; PNQKKRRVSRG; NQKKRRVSRGS; QKKRRVSRGSS;
KKRRVSRGSSQ; KRRVSRGSSQK; RRVSRGSSQKA; RVSRGSSQKAK; VSRGSSQKAKG; SRGSSQKAKGT;
RGSSQKAKGTR; GSSQKAKGTRA; SSQKAKGTRAS; SQKAKGTRASA; QKAKGTRASAK;
KAKGTRASAKT; AKGTRASAKTT; KGTRASAKTTN; GTRASAKTTNK; TRASAKTTNKR;
RASAKTTNKRR; ASAKTTNKRRS; SAKTTNKRRSR; AKTTNKRRSRS; KTTNKRRSRSS; TTNKRRSRSSR;
TNKRRSRSSRS; NWGRCYYRGRM; WGRCYYRGRML; GRCYYRGRMLP; RCYYRGRMLPK;
CYYRGRMLPKP; YYRGRMLPKPR; YRGRMLPKPRN; RGRMLPKPRNG; GRMLPKPRNGG;
RMLPKPRNGGS; MLPKPRNGGSR; PREKNASLLQH; REKNASLLQHS; EKNASLLQHSK; KNASLLQHSKN;
NASLLQHSKNS; ASLLQHSKNSP; SLLQHSKNSPP; LLQHSKNSPPQ; LQHSKNSPPQF; QHSKNSPPQFK;
GPNLWKSTDVG; PNLWKSTDVGG; NLWKSTDVGGC; LWKSTDVGGCN; WKSTDVGGCNC;
KSTDVGGCNCT; STDVGGCNCTN; TDVGGCNCTNR; DVGGCNCTNRG; VGGCNCTNRGY;
GGCNCTNRGYW; GCNCTNRGYWN; CNCTNRGYWNN; FPLLCCRWRTL; PLLCCRWRTLG;
LLCCRWRTLGN; LCCRWRTLGNA; CCRWRTLGNAG; CRWRTLGNAGS; RWRTLGNAGSA;
WRTLGNAGSAN; RTLGNAGSANE; TLGNAGSANEL; LGNAGSANELQ; GNAGSANELQV;
NAGSANELQVK; AGSANELQVKV; GSANELQVKVP; KPNSPVPGNEY; GLFGQKQCLSS;
VFWDFHRRGKC; FWDFHRRGKCS; WDFHRRGKCSP; DFHRRGKCSPS; FHRRGKCSPST; HRRGKCSPSTS;
RRGKCSPSTSC; RGKCSPSTSCD; GKCSPSTSCDQ; KCSPSTSCDQH; CSPSTSCDQHS; SPSTSCDQHSY;
PSTSCDQHSYH; STSCDQHSYHS; TSCDQHSYHSV; SCDQHSYHSVA; CDQHSYHSVAR; QLWNTTVERPC;
LWNTTVERPCK; WNTTVERPCKI; NTTVERPCKIF; DPPEKKICKES; PPEKKICKESL; PEKKICKESLP;
EKKICKESLPN; KKICKESLPNF; KICKESLPNFL; ICKESLPNFLF; CKESLPNFLFA; KESLPNFLFAK;
PYKQENPESGW; YKQENPESGWA; KQENPESGWAA; QENPESGWAAY; ENPESGWAAYV;
NPESGWAAYVW; PESGWAAYVWY; ESGWAAYVWYG; SGWAAYVWYGI; GWAAYVWYGIP;
WAAYVWYGIPG; AAYVWYGIPGR; AYVWYGIPGRR; YVWYGIPGRRG; WHRKTSRGPRY;
HRKTSRGPRYD; RKTSRGPRYDK; KTSRGPRYDKI; TSRGPRYDKIY; QTGTIANQNAL; TGTIANQNALN;
GTIANQNALNR; TIANQNALNRC; IANQNALNRCF; ANQNALNRCFY; NQNALNRCFYC; QNALNRCFYCT;
NALNRCFYCTY; ALNRCFYCTYT; LNRCFYCTYTF; NRCFYCTYTFN; RCFYCTYTFNK; CFYCTYTFNKC;
FYCTYTFNKCC; YCTYTFNKCCF; CTYTFNKCCFC; TYTFNKCCFCI; YTFNKCCFCIS; TFNKCCFCISH;
FNKCCFCISHF; NTESLYTNATL; TESLYTNATLD; ESLYTNATLDY; SLYTNATLDYG; LYTNATLDYGG;
YTNATLDYGGL; TNATLDYGGLT; NATLDYGGLTF; ATLDYGGLTFG; TLDYGGLTFGN; LDYGGLTFGNL;
DYGGLTFGNLQ; YGGLTFGNLQQ; GGLTFGNLQQG; GLTFGNLQQGL; LTFGNLQQGLK;
TFGNLQQGLKY; FGNLQQGLKYL; GNLQQGLKYLR; NLQQGLKYLRL; LQQGLKYLRLG;
QQGLKYLRLGK; QGLKYLRLGKS; GLKYLRLGKSI; LKYLRLGKSIV; KYLRLGKSIVI; YLRLGKSIVIG;
LRLGKSIVIGI; RLGKSIVIGIQ; LGKSIVIGIQC; GKSIVIGIQCL; KSIVIGIQCLI; SIVIGIQCLIH;
IVIGIQCLIHV; VIGIQCLIHVQ; IGIQCLIHVQS; GIQCLIHVQSL; IQCLIHVQSLQ; QCLIHVQSLQF;
CLIHVQSLQFL; LIHVQSLQFLN; IHVQSLQFLNP; HVQSLQFLNPL; VQSLQFLNPLL; QSLQFLNPLLL;
YQEYISPCIYY; QEYISPCIYYI; EYISPCIYYIS; YISPCIYYISS; ISPCIYYISSL; SPCIYYISSLK;
PCIYYISSLKK; CIYYISSLKKY; IYYISSLKKYT; YYISSLKKYTY; YISSLKKYTYL; ISSLKKYTYLS;
SSLKKYTYLSQ; SLKKYTYLSQN; LKKYTYLSQNP; KKYTYLSQNPA; KYTYLSQNPAF; YTYLSQNPAFP;
TYLSQNPAFPS; YLSQNPAFPSI; LSQNPAFPSIQ; SQNPAFPSIQQ; QNPAFPSIQQF; IVYQLQNQLQA;
TKLAVATRSFH; KLAVATRSFHF; LAVATRSFHFV; AVATRSFHFVK; VATRSFHFVKF; ATRSFHFVKFF;
TRSFHFVKFFF; RSFHFVKFFFQ; SFHFVKFFFQV; FHFVKFFFQVR; HFVKFFFQVRT; FVKFFFQVRTL;
VKFFFQVRTLS; KFFFQVRTLSF; FFFQVRTLSFV; FFQVRTLSFVR; FQVRTLSFVRI; QVRTLSFVRIF;
VRTLSFVRIFL; RTLSFVRIFLN; TLSFVRIFLNI; LSFVRIFLNIF; SFVRIFLNIFW; FVRIFLNIFWA;
PSLVEIFGFFC; SLVEIFGFFCL; LVEIFGFFCLN; VEIFGFFCLNV; EIFGFFCLNVS; IFGFFCLNVSF;
FGFFCLNVSFL; GFFCLNVSFLN; FFCLNVSFLNL; FCLNVSFLNLP; HFHLNNLSNCL; FHLNNLSNCLN;
HLNNLSNCLNC; LNNLSNCLNCL; NNLSNCLNCLF; NLSNCLNCLFH; LSNCLNCLFHV; SNCLNCLFHVL;
NCLNCLFHVLK; CLNCLFHVLKA; LNCLFHVLKAN; NCLFHVLKANP; CLFHVLKANPL; LFHVLKANPLI;
FHVLKANPLIQ; HVLKANPLIQL; VLKANPLIQLL; LKANPLIQLLS; KANPLIQLLSL; ANPLIQLLSLL;
NPLIQLLSLLH; PLIQLLSLLHL; LIQLLSLLHLQ; IQLLSLLHLQK; QLLSLLHLQKQ; LLSLLHLQKQP;
LSLLHLQKQPC; SLLHLQKQPCT; LLHLQKQPCTD; LHLQKQPCTDL; LHLAQRLAFPW; HLAQRLAFPWV;
LAQRLAFPWVG; AQRLAFPWVGL; QRLAFPWVGLH; RLAFPWVGLHL; LAFPWVGLHLR;
AFPWVGLHLRL; FPWVGLHLRLY; PWVGLHLRLYH; WVGLHLRLYHH; VGLHLRLYHHT;
GLHLRLYHHTN; LHLRLYHHTNL; HLRLYHHTNLI; LRLYHHTNLIT; RLYHHTNLITL; LYHHTNLITLQ;
YHHTNLITLQL; HHTNLITLQLV; HTNLITLQLVL; TNLITLQLVLF; NLITLQLVLFF; LITLQLVLFFH;
ITLQLVLFFHY; TLQLVLFFHYQ; LQLVLFFHYQW; QLVLFFHYQWD; LVLFFHYQWDL; KQYSAKNQILQ;
QYSAKNQILQN; YSAKNQILQNP; SAKNQILQNPF; VANSAAKQHLP; ANSAAKQHLPY; NSAAKQHLPYI;
SAAKQHLPYIV; AAKQHLPYIVL; AKQHLPYIVLV; KQHLPYIVLVQ; QHLPYIVLVQH; HLPYIVLVQHF;
LPYIVLVQHFH; PYIVLVQHFHE; YIVLVQHFHEL; IVLVQHFHELQ; VLVQHFHELQI; LVQHFHELQIL;
VQHFHELQILN; QHFHELQILNP; HFHELQILNPF; FHELQILNPFY; HELQILNPFYL; ELQILNPFYLI;
LQILNPFYLIY; QILNPFYLIYD; IFLLAFLPWSY; FLLAFLPWSYE; LLAFLPWSYEG; LAFLPWSYEGY;
AFLPWSYEGYL; FLPWSYEGYLL; LPWSYEGYLLF; PWSYEGYLLFF; LKLYLLLADKY; KLYLLLADKYF;
LYLLLADKYFF; YLLLADKYFFD; LLLADKYFFDF; LLADKYFFDFY; LADKYFFDFYF; ADKYFFDFYFL;
DKYFFDFYFLQ; KYFFDFYFLQK; SDKAGLFSDTF; DKAGLFSDTFY; KAGLFSDTFYT; AGLFSDTFYTP;
GLFSDTFYTPL; LFSDTFYTPLH; FSDTFYTPLHC; SDTFYTPLHCI; DTFYTPLHCIE; TFYTPLHCIEI;
FYTPLHCIEIL; YTPLHCIEILN; TPLHCIEILNT; PLHCIEILNTY; LHCIEILNTYL; HCIEILNTYLI;
CIEILNTYLII; IEILNTYLIIK; EILNTYLIIKT; ILNTYLIIKTH; LNTYLIIKTHP; NTYLIIKTHPH;
TYLIIKTHPHT; YLIIKTHPHTL; LIIKTHPHTLS; IIKTHPHTLSL; IKTHPHTLSLL; KTHPHTLSLLH;
THPHTLSLLHT; HPHTLSLLHTQ; LISKTPALFLQ; ISKTPALFLQA; SKTPALFLQAL; KTPALFLQALL;
TPALFLQALLG; NHAPLSPLECF; HAPLSPLECFL; APLSPLECFLL; LQKLYVYVELK; QKLYVYVELKR;
KLYVYVELKRI; YTQQSRQGFYY; GLLPFFFFWVV; LLPFFFFWVVL; LPFFFFWVVLS; PFFFFWVVLSV;
FFFFWVVLSVE; FFFWVVLSVEN; FFWVVLSVENL; FWVVLSVENLL; WVVLSVENLLL; VVLSVENLLLL;
VLSVENLLLLL; LSVENLLLLLH; SVENLLLLLHH; VENLLLLLHHW; ENLLLLLHHWQ; NLLLLLHHWQT;
LLLLLHHWQTY; LLLLHHWQTYL; LLLHHWQTYLH; LLHHWQTYLHG; LHHWQTYLHGK;
HHWQTYLHGKI; HWQTYLHGKIN; WQTYLHGKINL; QTYLHGKINLH; TYLHGKINLHP; YLHGKINLHPI;
LHGKINLHPIF; HGKINLHPIFH; RNSTRTPTLLF; NSTRTPTLLFH; STRTPTLLFHR; TRTPTLLFHRL;
RTPTLLFHRLA; TPTLLFHRLAP; PTLLFHRLAPI; TLLFHRLAPIK; LLFHRLAPIKK; LFHRLAPIKKI;
FHRLAPIKKII; HRLAPIKKIIT; GLLIFYYLSKY; LLIFYYLSKYK; LIFYYLSKYKL; IFYYLSKYKLV;
FYYLSKYKLVT; YYLSKYKLVTL; YLSKYKLVTLK; LSKYKLVTLKL; ISEGSFSNYLD; SEGSFSNYLDP;
EGSFSNYLDPP; GSFSNYLDPPL; SFSNYLDPPLQ; FSNYLDPPLQS; SNYLDPPLQSF; NYLDPPLQSFF;
YLDPPLQSFFS; AKPLCEAVNAV; KPLCEAVNAVA; PLCEAVNAVAI; LCEAVNAVAIY; CEAVNAVAIYP;
EAVNAVAIYPN; AVNAVAIYPNQ; VNAVAIYPNQG; NAVAIYPNQGL; AVAIYPNQGLF; VAIYPNQGLFS;
HARAVHRRLFG; ARAVHRRLFGT; RAVHRRLFGTN; AVHRRLFGTNR; VHRRLFGTNRP; HRRLFGTNRPF;
RRLFGTNRPFL; RLFGTNRPFLA; LFGTNRPFLAV; FGTNRPFLAVQ; GTNRPFLAVQG; TNRPFLAVQGI;
NRPFLAVQGIW; RPFLAVQGIWA; PFLAVQGIWAK; FLAVQGIWAKR; LAVQGIWAKRK;
AVQGIWAKRKI; VQGIWAKRKIS; QGIWAKRKIST; GIWAKRKISTN; IWAKRKISTNL; ATPGSKIRLMS;
TPGSKIRLMSY; PGSKIRLMSYL; GSKIRLMSYLY; SKIRLMSYLYI; KIRLMSYLYIL; IRLMSYLYILL;
RLMSYLYILLH; LMSYLYILLHF; MSYLYILLHFF; SYLYILLHFFI; YLYILLHFFIQ; LYILLHFFIQS;
YILLHFFIQSI; ILLHFFIQSIH; LLHFFIQSIHS; LHFFIQSIHSL; HFFIQSIHSLH; FFIQSIHSLHF; FIQSIHSLHFI;
IQSIHSLHFIL; QSIHSLHFILV; SIHSLHFILVA; IHSLHFILVAP; HSLHFILVAPF; SLHFILVAPFV;
LHFILVAPFVR; HFILVAPFVRV; FILVAPFVRVK; ILVAPFVRVKF; LVAPFVRVKFL; VAPFVRVKFLT;
APFVRVKFLTL; PFVRVKFLTLP; GKISPGSSFKA; KVHELHGFFPV; VHELHGFFPVK; HELHGFFPVKN;
ELHGFFPVKNF; LHGFFPVKNFI; HGFFPVKNFIH

BK virus complementary reading frame 1
8 mers:

MDKVLNRE; DKVLNREE; KVLNREES; VLNREESM; LNREESME; NREESMEL; REESMELM; EESMELMD;
ESMELMDL; SMELMDLL; MELMDLLG; ELMDLLGL; LMDLLGLE; MDLLGLER; DLLGLERA;
LLGLERAA; LGLERAAW; GLERAAWG; LERAAWGN; ERAAWGNL; RAAWGNLP; AAWGNLPL;
AWGNLPLM; WGNLPLMR; GNLPLMRK; NLPLMRKA; LPLMRKAY; PLMRKAYL; LMRKAYLR;
MRKAYLRK; RKAYLRKC; KAYLRKCK; AYLRKCKE; YLRKCKEF; LRKCKEFH; RKCKEFHP;
KCKEFHPD; CKEFHPDK; KEFHPDKG; EFHPDKGG; FHPDKGGD; HPDKGGDE; PDKGGDED;
DKGGDEDK; KGGDEDKM; GGDEDKMK; GDEDKMKR; DEDKMKRM; EDKMKRMN; DKMKRMNT;
KMKRMNTL; MKRMNTLY; KRMNTLYK; RMNTLYKK; MNTLYKKM; NTLYKKME; TLYKKMEQ;
LYKKMEQD; YKKMEQDV; KKMEQDVK; KMEQDVKV; MEQDVKVA; EQDVKVAH; QDVKVAHQ;
DVKVAHQP; VKVAHQPD; KVAHQPDF; VAHQPDFG; AHQPDFGT; HQPDFGTW; QPDFGTWS;
PDFGTWSS; DFGTWSSS; FGTWSSSE; GTWSSSEV; TWSSSEVC; WSSSEVCA; SSSEVCAD; SSEVCADF;
SEVCADFP; EVCADFPL; VCADFPLC; CADFPLCP; ADFPLCPD; DFPLCPDT; FPLCPDTL; PLCPDTLY;
LCPDTLYC; CPDTLYCK; PDTLYCKE; DTLYCKEW; TLYCKEWP; LYCKEWPI; YCKEWPIC; CKEWPICS;
KEWPICSK; EWPICSKK; WPICSKKP; PICSKKPS; ICSKKPSV; CSKKPSVH; SKKPSVHC; KKPSVHCP;
KPSVHCPC; PSVHCPCM; SVHCPCML; VHCPCMLC; HCPCMLCQ; CPCMLCQL; PCMLCQLR; CMLCQLRL;
MLCQLRLR; LCQLRLRH; CQLRLRHL; QLRLRHLN; LRLRHLNR; RLRHLNRK; LRHLNRKF; RHLNRKFL;
HLNRKFLR; LNRKFLRK; NRKFLRKE; RKFLRKEP; KFLRKEPL; FLRKEPLV; LRKEPLVW; RKEPLVWI;
KEPLVWID; EPLVWIDC; PLVWIDCY; LVWIDCYC; VWIDCYCI; WIDCYCID; IDCYCIDC; DCYCIDCF;
CYCIDCFT; YCIDCFTQ; CIDCFTQW; IDCFTQWF; DCFTQWFG; CFTQWFGL; FTQWFGLD; TQWFGLDL;
QWFGLDLT; WFGLDLTE; FGLDLTEE; GLDLTEET; LDLTEETL; DLTEETLQ; LTEETLQW; TEETLQWW;
EETLQWWV; ETLQWWVQ; TLQWWVQI; LQWWVQII; QWWVQIIG; WWVQIIGE; WVQIIGET; VQIIGETP;
QIIGETPF; IIGETPFR; IGETPFRD; GETPFRDL; ETPFRDLK; TPFRDLKL; KALSNYFF; ALSNYFFY;
LSNYFFYR; SNYFFYRC; NYFFYRCQ; YFFYRCQP; FFYRCQPM; FYRCQPME; YRCQPMEQ; RCQPMEQK;
CQPMEQKS; QPMEQKSG; PMEQKSGS; MEQKSGSP; EQKSGSPG; QKSGSPGG; KSGSPGGV; SGSPGGVP;
GSPGGVPL; SPGGVPLM; PGGVPLMK; GGVPLMKN; GVPLMKNG; VPLMKNGM; PLMKNGMK;
LMKNGMKI; MKNGMKIY; KNGMKIYF; NGMKIYFA; GMKIYFAM; MKIYFAMK; KIYFAMKI; IYFAMKIC;
YFAMKICL; FAMKICLP; AMKICLPV; MKICLPVM; KICLPVMK; ICLPVMKK; CLPVMKKQ; LPVMKKQQ;
PVMKKQQQ; VMKKQQQI; MKKQQQIL; KKQQQILN; KQQQILNT; QQQILNTQ; QQILNTQH; QILNTQHH;
ILNTQHHP; LNTQHHPK; NTQHHPKK; TQHHPKKK; QHHPKKKE; HHPKKKER; KTLKTFPL; TLKTFPLI;
LKTFPLIY; KTFPLIYT; TFPLIYTS; FPLIYTSF; PLIYTSFL; LIYTSFLV; IYTSFLVK; YTSFLVKL;
TSFLVKLY; SFLVKLYL; FLVKLYLV; LVKLYLVI; VKLYLVIE; KLYLVIEP; LYLVIEPL; YLVIEPLP;
LVIEPLPA; VIEPLPAL; IEPLPALL; EPLPALLC; PLPALLCI; LPALLCIL; PALLCILL; ALLCILLK;
LLCILLKK; LCILLKKK; CILLKKKL; ILLKKKLK; LLKKKLKF; LKKKLKFC; KKKLKFCI; KKLKFCIK;
KLKFCIKN; LKFCIKNL; KFCIKNLW; FCIKNLWK; CIKNLWKN; IKNLWKNI; KNLWKNIL; LLLVDTCV;
LLVDTCVL; LVDTCVLG; VDTCVLGI; DTCVLGII; TCVLGIIL; CVLGIILY; VLGIILYS; LGIILYSF;
LHIDIEFL; HIDIEFLQ; IDIEFLQL; DIEFLQLI; IEFLQLII; EFLQLIIS; FLQLIISV; LQLIISVK; QLIISVKS;
LIISVKSC; IISVKSCV; ISVKSCVP; SVKSCVPL; VKSCVPLV; KSCVPLVF; FVRVLIRN; VRVLIRNT;
RVLIRNTY; VLIRNTYY; LIRNTYYI; IRNTYYIV; RNTYYIVP; RSMILAQK; SMILAQKS; MILAQKSL;
ILAQKSLK; LAQKSLKK; AQKSLKKQ; QKSLKKQS; KSLKKQSR; SLKKQSRC; LKKQSRCL; KKQSRCLG;
KQSRCLGN; RQSVRMCF; QSVRMCFY; SVRMCFYY; RSVKSVRK; SVKSVRKK; VKSVRKKT;
KSVRKKTS; SVRKKTSL; VRKKTSLI; RKKTSLIT; KKTSLITL; KTSLITLS; TSLITLSI; SLITLSIM;
LITLSIMK; ITLSIMKS; TLSIMKST; LSIMKSTL; SIMKSTLQ; IMKSTLQM; MKSTLQML; KSTLQMLL;
STLQMLLF; TLQMLLFL; LQMLLFLQ; QMLLFLQK; MLLFLQKV; LLFLQKVK; LFLQKVKI; FLQKVKIK;
LQKVKIKK; QKVKIKKV; KVKIKKVF; VKIKKVFV; KIKKVFVS; IKKVFVSK; KKVFVSKQ; YLELMEML;
LELMEMLY; NNIWQVLL; NIWQVLLG; IWQVLLGC; WQVLLGCT; QVLLGCTV; VLLGCTVC;
LLGCTVCY; LGCTVCYL; GCTVCYLK; CTVCYLKW; TVCYLKWI; VCYLKWIL; YLIFCTVL; LIFCTVLF;
IFCTVLFS; FCTVLFSM; CTVLFSMY; TVLFSMYL; VLFSMYLK; LFSMYLKE; FSMYLKED; SMYLKEDT;
MYLKEDTG; YLKEDTGY; LKEDTGYL; KEDTGYLK; EDTGYLKV; DTGYLKVP; TGYLKVPL; GYLKVPLI;
YLKVPLIV; LKVPLIVE; KVPLIVEK; VPLIVEKQ; PLIVEKQH; ISTWLFLK; STWLFLKM; KGQELNQR;
GQELNQRI; QELNQRIC; ELNQRICL; LNQRICLQ; NQRICLQD; QRICLQDM; RICLQDME; TKEPKYFH;
KEPKYFHQ; EPKYFHQA; PKYFHQAW; KYFHQAWL; YFHQAWLQ; MSILSLKP; SILSLKPC; ILSLKPCK;
LSLKPCKL; SLKPCKLD; LKPCKLDL; ENPYKTQS; NPYKTQSS; PYKTQSSY; YKTQSSYL; KTQSSYLK;
TQSSYLKK; QSSYLKKE; SSYLKKEF; SYLKKEFY; YLKKEFYK; LKKEFYKV; KKEFYKVE; LILQLIYN;
ILQLIYNL; LQLIYNLE; QLIYNLEL; LIYNLELL; IYNLELLN; YNLELLNG; NLELLNGR; LELLNGRK;
ELLNGRKG; LLNGRKGW; LNGRKGWI; NGRKGWIL; GRKGWILR; NIIYAWGN; IIYAWGNV;
IYAWGNVF; YAWGNVFL; AWGNVFLI; WGNVFLIL; GNVFLILQ; NVFLILQE; VFLILQEK; FLILQEKR;
LILQEKRI; ILQEKRIQ; LQEKRIQK; QEKRIQKL; EKRIQKLK; KRIQKLKT; RIQKLKTL; IQKLKTLD;
QKLKTLDM; KLKTLDMD; LKTLDMDQ; KTLDMDQA; TLDMDQAL; LDMDQALN; DMDQALNP;
MDQALNPN; DQALNPNH; QALNPNHN; ALNPNHNA; LNPNHNAL; NPNHNALP; PNHNALPK;
NHNALPKS; HNALPKSQ; NALPKSQI; ALPKSQIL; LPKSQILQ; PKSQILQP; KSQILQPL; SQILQPLL;
QILQPLLK; ILQPLLKI; LQPLLKIP; QPLLKIPK; PLLKIPKG; LLKIPKGQ; LKIPKGQT; KIPKGQTP;
IPKGQTPI; PKGQTPIV; KGQTPIVK; GQTPIVKS; QTPIVKSC; TPIVKSCI; PTVKSCIC; IVKSCICV;
VKSCICVK; KSCICVKA; SCICVKAF; CICVKAFS; ICVKAFSV; CVKAFSVL; VKAFSVLK; KAFSVLKG;
AFSVLKGL; FSVLKGLK; SVLKGLKH; VLKGLKHH; LKGLKHHP; KGLKHHPQ; GLKHHPQN;
LKHHPQNN; KHHPQNNT; HHPQNNTS; HPQNNTSL; PQNNTSLK; QNNTSLKV; NNTSLKVA; NTSLKVAY;
TSLKVAYT; SLKVAYTK; LKVAYTKA; KVAYTKAA; VAYTKAAF; AYTKAAFI; YTKAAFIK; TKAAFIKC;
KAAFIKCI; AAFIKCIC; AFIKCICT; FIKCICTI; IKCICTIK; KCICTIKA; CICTIKAP; ICTIKAPV; SILVCNCP;
ILVCNCPC; LVCNCPCL; VCNCPCLS; CNCPCLSI; NCPCLSIY; CPCLSIYL; PCLSIYLI; CLSIYLII; LSIYLIIS;
SIYLIISG; IYLIISGS; YLIISGSP; LIISGSPG; IISGSPGS; ISGSPGSL; SGSPGSLS; GSPGSLSV; SPGSLSVP;
PGSLSVPS; GSLSVPSN; SLSVPSNT; LSVPSNTL; SVPSNTLT; VPSNTLTS; PSNTLTSS; SNTLTSST;
NTLTSSTW; TLTSSTWD; LTSSTWDS; TSSTWDSI; SSTWDSIP; STWDSIPY; TWDSIPYI; WDSIPYIG;
DSIPYIGC; SIPYIGCP; IPYIGCPS; PYIGCPST; YIGCPSTL; IGCPSTLW; GCPSTLWV; CPSTLWVL;
PSTLWVLL; STLWVLLF; TLWVLLFI; LWVLLFIR; WVLLFIRS; VLLFIRSL; LLFIRSLS; LFIRSLSK;
FIRSLSKK; IRSLSKKE; RSLSKKEI; SLSKKEIG; GFFTDLFL; FFTDLFLR; FTDLFLRR; TDLFLRRI;
DLFLRRIL; LFLRRILK; FLRRILKY; LRRILKYL; RRILKYLA; RILKYLAR; ILKYLARP; LKYLARPL;
KYLARPLH; YLARPLHC; LARPLHCC; ARPLHCCV; RPLHCCVP; PLHCCVPE; LHCCVPEL; HCCVPELL;
CCVPELLV; CVPELLVN; VPELLVNR; PELLVNRP; ELLVNRPQ; LLVNRPQI; LVNRPQIS; VNRPQISA;
NRPQISAA; RPQISAAE; PQISAAET; QISAAETY; ISAAETYR; SAAETYRL; AAETYRLS; AETYRLSA;
ETYRLSAL; TYRLSALQ; YRLSALQR; RLSALQRG; LSALQRGP; SALQRGPT; ALQRGPTP; LQRGPTPC;
QRGPTPCS; RGPTPCSS; GPTPCSSS; PTPCSSSN; TPCSSSNT; PCSSSNTV; CSSSNTVV; SSSNTVVA;
SSNTVVAV; SNTVVAVL; NTVVAVLV; TVVAVLVT; STGGTFSP; TGGTFSPP; GGTFSPPV; GTFSPPVK;
TFSPPVKV; FSPPVKVP; SPPVKVPK; PPVKVPKY; PVKVPKYL; VKVPKYLA; KVPKYLAF; VPKYLAFS;
PKYLAFSF; KYLAFSFL; YLAFSFLL; LAFSFLLG; AFSFLLGS; FSFLLGSG; SFLLGSGT; FLLGSGTQ;
LLGSGTQH; LGSGTQHS; GSGTQHST; SGTQHSTG; ALWSVFIT; LWSVFITW; WSVFITWD; SVFITWDW;
VFITWDWA; FITWDWAV; ITWDWAVG; TWDWAVGF; WDWAVGFL; DWAVGFLG; WAVGFLGV;
AVGFLGVI; VGFLGVIV; GFLGVIVP; FLGVIVPS; LGVIVPSG; GVIVPSGY; VIVPSGYF; IVPSGYFD;
VPSGYFDL; FISTPCIS; ISTPCISK; STPCISKG; TPCISKGS; PCISKGSP; CISKGSPP; ISKGSPPT; SKGSPPTA;
KGSPPTAK; GSPPTAKK; SPPTAKKW; PPTAKKWK; PTAKKWKL; TAKKWKLL; AKKWKLLP; IGFPPPCS;
GFPPPCSC; FPPPCSCT; PPPCSCTF; PPCSCTFC; PCSCTFCD; CSCTFCDP; SCTFCDPA; RLSMLVIP;
LSMLVIPI; SMLVIPIT; MLVIPITS; LVIPITSV; VIPITSVC; IPITSVCT; PITSVCTV; ITSVCTVT; TSVCTVTA;
SVCTVTAS; VCTVTASH; CTVTASHI; TVTASHIS; VTASHISR; TASHISRF; ASHISRFP; SHISRFPQ;
HISRFPQV; ISRFPQVR; SRFPQVRS; RFPQVRSS; FPQVRSSF; PQVRSSFK; QVRSSFKL; VRSSFKLG;
RSSFKLGR; SSFKLGRG; SFKLGRGI; FKLGRGIL; KLGRGILA; LGRGILAV; GRGILAVL; QGSIFLSG;
GSIFLSGL; SIFLSGLS; IFLSGLSL; FLSGLSLL; LSGLSLLK; SGLSLLKS; GLSLLKSF; LSLLKSFS;
SLLKSFSA; LLKSFSAL; LKSFSALS; KSFSALSF; SFSALSFR; FSALSFRL; SALSFRLK; ALSFRLKP;
LSFRLKPL; SFRLKPLR; FRLKPLRF; RLKPLRFS; LKPLRFSS; KPLRFSSG; PLRFSSGS; LRFSSGSP;
RFSSGSPI; FSSGSPIS; SSGSPISG; SGSPISGF; GSPISGFR; SPISGFRK; PISGFRKH; ISGFRKHS; SGFRKHST;
GFRKHSTS; FRKHSTSV; RKHSTSVI; KHSTSVIA; HSTSVIAS; STSVIAST; TSVIASTP; SVIASTPV;
VIASTPVL; IASTPVLT; ASTPVLTS; STPVLTSR; TPVLTSRT; PVLTSRTS; VLTSRTST; LTSRTSTP;
TSRTSTPP; SRTSTPPF; RTSTPPFI; TSTPPFIS; STPPFISS; TPPFISSF; PPFISSFG; PFISSFGT; FISSFGTC;
ISSFGTCT; SSFGTCTG; SFGTCTGS; FGTCTGSF; GTCTGSFG; TCTGSFGF; CTGSFGFL; TGSFGFLG;
GSFGFLGA; SFGFLGAA; FGFLGAAP; GFLGAAPG; FLGAAPGH; LGAAPGHS; GAAPGHSP; AAPGHSPF;
APGHSPFL; PGHSPFLL; GHSPFLLV; HSPFLLVG; SPFLLVGA; PFLLVGAI; FLLVGAIF; LLVGAIFI;
LVGAIFIC; VGAIFICF; GAIFICFK; AIFICFKS; IFICFKSR; FICFKSRC; ICFKSRCY; CFKSRCYS; FKSRCYSP;
KSRCYSPV; SRCYSPVQ; RCYSPVQA; RQHPLRSS; QHPLRSSS; HPLRSSSL; PLRSSSLI; LRSSSLIS;
RSSSLIST; SSSLISTS; SSLISTSW; SLISTSWG; LISTSWGN; ISTSWGNS; STSWGNSF; TSWGNSFF;
SWGNSFFY; WGNSFFYK; GNSFFYKL; NSFFYKLS; VHSLCNFF; HSLCNFFY; SLCNFFYT; LCNFFYTV;
CNFFYTVS; NFFYTVSI; FFYTVSII; FYTVSIIY; YTVSIIYT; TVSIIYTI; VSIIYTIS; SIIYTISM; IIYTISMA;
IYTISMAK; YTISMAKM; TISMAKMY; ISMAKMYT; SMAKMYTG; MAKMYTGT; AKMYTGTF;
KMYTGTFP; MYTGTFPF; YTGTFPFS; TGTFPFSY; GTFPFSYL; TFPFSYLS; FPFSYLSN; PFSYLSNH;
GPNRGKIR; PNRGKIRI; NRGKIRII; RGKIRIIL; GKIRIILL; KIRIILLN; IRIILLNI; RIILLNII; IILLNIII;
ILLNIIIK; LLNIIIKV; LNIIIKVY; NIIIKVYR; IIIKVYRG; IIKVYRGI; IKVYRGIY; KVYRGIYN; VYRGIYNC;
YRGIYNCP; RGIYNCPG; GIYNCPGS; IYNCPGSF; YNCPGSFL; NCPGSFLQ; CPGSFLQK; PGSFLQKS;
GSFLQKSS; SFLQKSSQ; FLQKSSQG; LQKSSQGV; QKSSQGVS; KSSQGVSK; SSQGVSKK; SQGVSKKS;
QGVSKKSF; GVSKKSFC; VSKKSFCS; SKKSFCSS; KKSFCSSL; KSFCSSLQ; SFCSSLQF; FCSSLQFL;
GYRRYIIP; YRRYIIPN; RRYIIPNN; RYIIPNNM; YIIPNNMP; IIPNNMPQ; IPNNMPQS; PNNMPQSL;
NNMPQSLG; NMPQSLGN; MPQSLGNS; PQSLGNSS; QSLGNSSK; SLGNSSKQ; LGNSSKQR; GNSSKQRR;
NSSKQRRT; SSKQRRTP; SKQRRTPM; KQRRTPMP; QRRTPMPR; RRTPMPRI; RTPMPRIK; TPMPRIKV;
PMPRIKVL; MPRIKVLN; PRIKVLNI; RIKVLNII; IKVLNIIN; KVLNIINK; VLNIINKS; LNIINKSI; NIINKSIY;
IINKSIYT; INKSIYTR; NKSIYTRK; KSIYTRKQ; SIYTRKQN; IYTRKQNI; YTRKQNII; TRKQNIIV;
RKQNIIVL; KQNIIVLI; QNIIVLIW; NIIVLIWV; IIVLIWVK; IVLIWVKQ; VLIWVKQF; LIWVKQFQ;
IWVKQFQS; WVKQFQSH; VKQFQSHA; LLIEAYSG; LIEAYSGN; IEAYSGNF; EAYSGNFV; AYSGNFVI;
YSGNFVIP; SGNFVIPI; GNFVIPII; NFVIPIIK; FVIPIIKE; VIPIIKEL; IPIIKELI; PIIKELIP; IIKELIPY;
IKELIPYL; KELIPYLS; GTNTTNSL; TNTTNSLN; SSKPSNSP; SKPSNSPR; KPSNSPRS; PSNSPRST;
SNSPRSTS; NSPRSTSN; SPRSTSNY; PRSTSNYS; RSTSNYSI; STSNYSIC; TSNYSICL; SNYSICLR;
NYSICLRS; GTCYALYS; TCYALYSS; CYALYSSK; YALYSSKG; ALYSSKGC; LYSSKGCN; YSSKGCNL;
SSKGCNLN; SKGCNLNF; KGCNLNFY; GCNLNFYS; CNLNFYSS; NLNFYSSS; LNFYSSSS; NFYSSSSL;
FYSSSSLP; YSSSSLPS; SSSSLPSS; SSSLPSSN; SSLPSSNF; SLPSSNFS; LPSSNFSH; KSCGSSSL; SCGSSSLR;
CGSSSLRY; GSSSLRYT; SSSLRYTG; SSLRYTGN; SSTHEPGN; STHEPGNT; THEPGNTK; HEPGNTKK;
EPGNTKKK; PGNTKKKG; GNTKKKGL; NTKKKGLL; TKKKGLLT; ESFTESFT; SFTESFTA; FTESFTAG;
TESFTAGK; ESFTAGKA; SFTAGKAV; FTAGKAVV; TAGKAVVL; AGKAVVLL; GKAVVLLF; KAVVLLFF;
AVVLLFFP; VVLLFFPS; VLLFFPST; LLFFPSTL; LFFPSTLS; FFPSTLSS; FPSTLSSP; PSTLSSPL; STLSSPLQ;
TLSSPLQN; LSSPLQNS; SSPLQNSS; SPLQNSSK; PLQNSSKS; LQNSSKSS; QNSSKSSK; NSSKSSKI;
SSKSSKIK; SKSSKIKI; KSSKIKIK; SSKIKIKI; SKIKIKIL; ALFFVPVQ; LFFVPVQV; FFVPVQVL;
FVPVQVLP; VPVQVLPT; PVQVLPTF; VQVLPTFT; QVLPTFTE; VLPTFTEA; LPTFTEAC; PTFTEACR;
TFTEACRD; FTEACRDS; TEACRDSW; EACRDSWR; ACRDSWRR; CRDSWRRT; RDSWRRTM;
DSWRRTMA; SWRRTMAF; WRRTMAFV; RRTMAFVQ; RTMAFVQF; TMAFVQFN; MAFVQFNW;
AFVQFNWG; FVQFNWGQ; VQFNWGQG; QFNWGQGQ; FNWGQGQD; NWGQGQDS; ARKTCLSC;
RKTCLSCT; KTCLSCTF; TCLSCTFL; CLSCTFLP; LSCTFLPE; SCTFLPEV; CTFLPEVM; TFLPEVMV;
FLPEVMVW; LPEVMVWL; PEVMVWLH; EVMVWLHS; VMVWLHSM; MVWLHSMG; VWLHSMGK;
WLHSMGKQ; LHSMGKQL; HSMGKQLL; SMGKQLLP; MGKQLLPV; GKQLLPVS; KQLLPVSH;
QLLPVSHA; LLPVSHAL; LPVSHALS; PVSHALSF; VSHALSFL; SHALSFLR; HALSFLRS; ALSFLRSW;
LSFLRSWF; SFLRSWFG; FLRSWFGC; LRSWFGCI; RSWFGCIP; SWFGCIPL; GHGLAAFH; HGLAAFHG;
AAPPCGLF; APPCGLFF; PPCGLFFY; PCGLFFYN; CGLFFYNI; EAEAASAS; AEAASAST; EAASASTL;
AASASTLS; ASASTLSL; SASTLSLK; GLAKLFGE; LAKLFGEI; AKLFGEIP; KLFGEIPI; LFGEIPIL;
FGEIPILL; GEIPILLQ; EIPILLQF; IPILLQFL; PILLQFLQ

9 mers:

MDKVLNREE; DKVLNREES; KVLNREESM; VLNREESME; LNREESMEL; NREESMELM; REESMELMD;
EESMELMDL; ESMELMDLL; SMELMDLLG; MELMDLLGL; ELMDLLGLE; LMDLLGLER; MDLLGLERA;
DLLGLERAA; LLGLERAAW; LGLERAAWG; GLERAAWGN; LERAAWGNL; ERAAWGNLP;
RAAWGNLPL; AAWGNLPLM; AWGNLPLMR; WGNLPLMRK; GNLPLMRKA; NLPLMRKAY;
LPLMRKAYL; PLMRKAYLR; LMRKAYLRK; MRKAYLRKC; RKAYLRKCK; KAYLRKCKE; AYLRKCKEF;
YLRKCKEFH; LRKCKEFHP; RKCKEFHPD; KCKEFHPDK; CKEFHPDKG; KEFHPDKGG; EFHPDKGGD;
FHPDKGGDE; HPDKGGDED; PDKGGDEDK; DKGGDEDKM; KGGDEDKMK; GGDEDKMKR;
GDEDKMKRM; DEDKMKRMN; EDKMKRMNT; DKMKRMNTL; KMKRMNTLY; MKRMNTLYK;
KRMNTLYKK; RMNTLYKKM; MNTLYKKME; NTLYKKMEQ; TLYKKMEQD; LYKKMEQDV;
YKKMEQDVK; KKMEQDVKV; KMEQDVKVA; MEQDVKVAH; EQDVKVAHQ; QDVKVAHQP;
DVKVAHQPD; VKVAHQPDF; KVAHQPDFG; VAHQPDFGT; AHQPDFGTW; HQPDFGTWS; QPDFGTWSS;
PDFGTWSSS; DFGTWSSSE; FGTWSSSEV; GTWSSSEVC; TWSSSEVCA; WSSSEVCAD; SSSEVCADF;
SSEVCADFP; SEVCADFPL; EVCADFPLC; VCADFPLCP; CADFPLCPD; ADFPLCPDT; DFPLCPDTL;
FPLCPDTLY; PLCPDTLYC; LCPDTLYCK; CPDTLYCKE; PDTLYCKEW; DTLYCKEWP; TLYCKEWPI;
LYCKEWPIC; YCKEWPICS; CKEWPICSK; KEWPICSKK; EWPICSKKP; WPICSKKPS; PICSKKPSV;
ICSKKPSVH; CSKKPSVHC; SKKPSVHCP; KKPSVHCPC; KPSVHCPCM; PSVHCPCML; SVHCPCMLC;
VHCPCMLCQ; HCPCMLCQL; CPCMLCQLR; PCMLCQLRL; CMLCQLRLR; MLCQLRLRH; LCQLRLRHL;
CQLRLRHLN; QLRLRHLNR; LRLRHLNRK; RLRHLNRKF; LRHLNRKFL; RHLNRKFLR; HLNRKFLRK;
LNRKFLRKE; NRKFLRKEP; RKFLRKEPL; KFLRKEPLV; FLRKEPLVW; LRKEPLVWI; RKEPLVWID;
KEPLVWIDC; EPLVWIDCY; PLVWIDCYC; LVWIDCYCI; VWIDCYCID; WIDCYCIDC; IDCYCIDCF;
DCYCIDCFT; CYCIDCFTQ; YCIDCFTQW; CIDCFTQWF; IDCFTQWFG; DCFTQWFGL; CFTQWFGLD;
FTQWFGLDL; TQWFGLDLT; QWFGLDLTE; WFGLDLTEE; FGLDLTEET; GLDLTEETL; LDLTEETLQ;
DLTEETLQW; LTEETLQWW; TEETLQWWV; EETLQWWVQ; ETLQWWVQI; TLQWWVQII; LQWWVQIIG;
QWWVQIIGE; WWVQIIGET; WVQIIGETP; VQIIGETPF; QIIGETPFR; IIGETPFRD; IGETPFRDL;
GETPFRDLK; ETPFRDLKL; KALSNYFFY; ALSNYFFYR; LSNYFFYRC; SNYFFYRCQ; NYFFYRCQP;
YFFYRCQPM; FFYRCQPME; FYRCQPMEQ; YRCQPMEQK; RCQPMEQKS; CQPMEQKSG; QPMEQKSGS;
PMEQKSGSP; MEQKSGSPG; EQKSGSPGG; QKSGSPGGV; KSGSPGGVP; SGSPGGVPL; GSPGGVPLM;
SPGGVPLMK; PGGVPLMKN; GGVPLMKNG; GVPLMKNGM; VPLMKNGMK; PLMKNGMKI;
LMKNGMKIY; MKNGMKIYF; KNGMKIYFA; NGMKIYFAM; GMKIYFAMK; MKIYFAMKI; KIYFAMKIC;
IYFAMKICL; YFAMKICLP; FAMKICLPV; AMKICLPVM; MKICLPVMK; KICLPVMKK; ICLPVMKKQ;
CLPVMKKQQ; LPVMKKQQQ; PVMKKQQQI; VMKKQQQIL; MKKQQQILN; KKQQQILNT; KQQQILNTQ;
QQQILNTQH; QQILNTQHH; QILNTQHHP; ILNTQHHPK; LNTQHHPKK; NTQHHPKKK; TQHHPKKKE;
QHHPKKKER; KTLKTFPLI; TLKTFPLIY; LKTFPLIYT; KTFPLIYTS; TFPLIYTSF; FPLIYTSFL; PLIYTSFLV;
LIYTSFLVK; IYTSFLVKL; YTSFLVKLY; TSFLVKLYL; SFLVKLYLV; FLVKLYLVI; LVKLYLVIE;
VKLYLVIEP; KLYLVIEPL; LYLVIEPLP; YLVIEPLPA; LVIEPLPAL; VIEPLPALL; IEPLPALLC; EPLPALLCI;
PLPALLCIL; LPALLCILL; PALLCILLK; ALLCILLKK; LLCILLKKK; LCILLKKKL; CILLKKKLK;
ILLKKKLKF; LLKKKLKFC; LKKKLKFCI; KKKLKFCIK; KKLKFCIKN; KLKFCIKNL; LKFCIKNLW;
KFCIKNLWK; FCIKNLWKN; CIKNLWKNI; IKNLWKNIL; LLLVDTCVL; LLVDTCVLG; LVDTCVLGI;
VDTCVLGII; DTCVLGIIL; TCVLGIILY; CVLGIILYS; VLGIILYSF; LHIDIEFLQ; HIDIEFLQL; IDIEFLQLI;
DIEFLQLII; IEFLQLIIS; EFLQLIISV; FLQLIISVK; LQLIISVKS; QLIISVKSC; LIISVKSCV; IISVKSCVP;
ISVKSCVPL; SVKSCVPLV; VKSCVPLVF; FVRVLIRNT; VRVLIRNTY; RVLIRNTYY; VLIRNTYYI;
LIRNTYYIV; IRNTYYIVP; RSMILAQKS; SMILAQKSL; MILAQKSLK; ILAQKSLKK; LAQKSLKKQ;
AQKSLKKQS; QKSLKKQSR; KSLKKQSRC; SLKKQSRCL; LKKQSRCLG; KKQSRCLGN; RQSVRMCFY;
QSVRMCFYY; RSVKSVRKK; SVKSVRKKT; VKSVRKKTS; KSVRKKTSL; SVRKKTSLI; VRKKTSLIT;
RKKTSLITL; KKTSLITLS; KTSLITLSI; TSLITLSIM; SLITLSIMK; LITLSIMKS; ITLSIMKST; TLSIMKSTL;
LSIMKSTLQ; SIMKSTLQM; IMKSTLQML; MKSTLQMLL; KSTLQMLLF; STLQMLLFL; TLQMLLFLQ;
LQMLLFLQK; QMLLFLQKV; MLLFLQKVK; LLFLQKVKI; LFLQKVKIK; FLQKVKIKK; LQKVKIKKV;
QKVKIKKVF; KVKIKKVFV; VKIKKVFVS; KIKKVFVSK; IKKVFVSKQ; YLELMEMLY; NNIWQVLLG;
NIWQVLLGC; IWQVLLGCT; WQVLLGCTV; QVLLGCTVC; VLLGCTVCY; LLGCTVCYL; LGCTVCYLK;
GCTVCYLKW; CTVCYLKWI; TVCYLKWIL; YLIFCTVLF; LIFCTVLFS; IFCTVLFSM; FCTVLFSMY;
CTVLFSMYL; TVLFSMYLK; VLFSMYLKE; LFSMYLKED; FSMYLKEDT; SMYLKEDTG; MYLKEDTGY;
YLKEDTGYL; LKEDTGYLK; KEDTGYLKV; EDTGYLKVP; DTGYLKVPL; TGYLKVPLI; GYLKVPLIV;
YLKVPLIVE; LKVPLIVEK; KVPLIVEKQ; VPLIVEKQH; ISTWLFLKM; KGQELNQRI; GQELNQRIC;
QELNQRICL; ELNQRICLQ; LNQRICLQD; NQRICLQDM; QRICLQDME; TKEPKYFHQ; KEPKYFHQA;
EPKYFHQAW; PKYFHQAWL; KYFHQAWLQ; MSILSLKPC; SILSLKPCK; ILSLKPCKL; LSLKPCKLD;
SLKPCKLDL; ENPYKTQSS; NPYKTQSSY; PYKTQSSYL; YKTQSSYLK; KTQSSYLKK; TQSSYLKKE;
QSSYLKKEF; SSYLKKEFY; SYLKKEFYK; YLKKEFYKV; LKKEFYKVE; LILQLIYNL; ILQLIYNLE;
LQLIYNLEL; QLIYNLELL; LIYNLELLN; IYNLELLNG; YNLELLNGR; NLELLNGRK; LELLNGRKG;
ELLNGRKGW; LLNGRKGWI; LNGRKGWIL; NGRKGWILR; NIIYAWGNV; IIYAWGNVF; IYAWGNVFL;
YAWGNVFLI; AWGNVFLIL; WGNVFLILQ; GNVFLILQE; NVFLILQEK; VFLILQEKR; FLILQEKRI;
LILQEKRIQ; ILQEKRIQK; LQEKRIQKL; QEKRIQKLK; EKRIQKLKT; KRIQKLKTL; RIQKLKTLD;
IQKLKTLDM; QKLKTLDMD; KLKTLDMDQ; LKTLDMDQA; KTLDMDQAL; TLDMDQALN;
LDMDQALNP; DMDQALNPN; MDQALNPNH; DQALNPNHN; QALNPNHNA; ALNPNHNAL; LNPNHNALP;
NPNHNALPK; PNHNALPKS; NHNALPKSQ; HNALPKSQI; NALPKSQIL; ALPKSQILQ; LPKSQILQP;
PKSQILQPL; KSQILQPLL; SQILQPLLK; QILQPLLKI; ILQPLLKIP; LQPLLKIPK; QPLLKIPKG; PLLKIPKGQ;
LLKIPKGQT; LKIPKGQTP; KIPKGQTPI; IPKGQTPIV; PKGQTPIVK; KGQTPIVKS; GQTPTVKSC;
QTPIVKSCI; TPIVKSCIC; PTVKSCICV; IVKSCICVK; VKSCICVKA; KSCICVKAF; SCICVKAFS;
CICVKAFSV; ICVKAFSVL; CVKAFSVLK; VKAFSVLKG; KAFSVLKGL; AFSVLKGLK; FSVLKGLKH;
SVLKGLKHH; VLKGLKHHP; LKGLKHHPQ; KGLKHHPQN; GLKHHPQNN; LKHHPQNNT; KHHPQNNTS;
HHPQNNTSL; HPQNNTSLK; PQNNTSLKV; QNNTSLKVA; NNTSLKVAY; NTSLKVAYT; TSLKVAYTK;
SLKVAYTKA; LKVAYTKAA; KVAYTKAAF; VAYTKAAFI; AYTKAAFIK; YTKAAFIKC; TKAAFIKCI;
KAAFIKCIC; AAFIKCICT; AFIKCICTI; FIKCICTIK; IKCICTIKA; KCICTIKAP; CICTIKAPV; SILVCNCPC;
ILVCNCPCL; LVCNCPCLS; VCNCPCLSI; CNCPCLSIY; NCPCLSIYL; CPCLSIYLI; PCLSIYLII; CLSIYLIIS;
LSIYLIISG; SIYLIISGS; IYLIISGSP; YLIISGSPG; LIISGSPGS; IISGSPGSL; ISGSPGSLS; SGSPGSLSV;
GSPGSLSVP; SPGSLSVPS; PGSLSVPSN; GSLSVPSNT; SLSVPSNTL; LSVPSNTLT; SVPSNTLTS;
VPSNTLTSS; PSNTLTSST; SNTLTSSTW; NTLTSSTWD; TLTSSTWDS; LTSSTWDSI; TSSTWDSIP;
SSTWDSIPY; STWDSIPYI; TWDSIPYIG; WDSIPYIGC; DSIPYIGCP; SIPYIGCPS; IPYIGCPST; PYIGCPSTL;
YIGCPSTLW; IGCPSTLWV; GCPSTLWVL; CPSTLWVLL; PSTLWVLLF; STLWVLLFI; TLWVLLFIR;
LWVLLFIRS; WVLLFIRSL; VLLFIRSLS; LLFIRSLSK; LFIRSLSKK; FIRSLSKKE; IRSLSKKEI; RSLSKKEIG;
GFFTDLFLR; FFTDLFLRR; FTDLFLRRI; TDLFLRRIL; DLFLRRILK; LFLRRILKY; FLRRILKYL;
LRRILKYLA; RRILKYLAR; RILKYLARP; ILKYLARPL; LKYLARPLH; KYLARPLHC; YLARPLHCC;
LARPLHCCV; ARPLHCCVP; RPLHCCVPE; PLHCCVPEL; LHCCVPELL; HCCVPELLV; CCVPELLVN;
CVPELLVNR; VPELLVNRP; PELLVNRPQ; ELLVNRPQI; LLVNRPQIS; LVNRPQISA; VNRPQISAA;
NRPQISAAE; RPQISAAET; PQISAAETY; QISAAETYR; ISAAETYRL; SAAETYRLS; AAETYRLSA;
AETYRLSAL; ETYRLSALQ; TYRLSALQR; YRLSALQRG; RLSALQRGP; LSALQRGPT; SALQRGPTP;
ALQRGPTPC; LQRGPTPCS; QRGPTPCSS; RGPTPCSSS; GPTPCSSSN; PTPCSSSNT; TPCSSSNTV;
PCSSSNTVV; CSSSNTVVA; SSSNTVVAV; SSNTVVAVL; SNTVVAVLV; NTVVAVLVT; STGGTFSPP;
TGGTFSPPV; GGTFSPPVK; GTFSPPVKV; TFSPPVKVP; FSPPVKVPK; SPPVKVPKY; PPVKVPKYL;
PVKVPKYLA; VKVPKYLAF; KVPKYLAFS; VPKYLAFSF; PKYLAFSFL; KYLAFSFLL; YLAFSFLLG;
LAFSFLLGS; AFSFLLGSG; FSFLLGSGT; SFLLGSGTQ; FLLGSGTQH; LLGSGTQHS; LGSGTQHST;
GSGTQHSTG; ALWSVFITW; LWSVFITWD; WSVFITWDW; SVFITWDWA; VFITWDWAV; FITWDWAVG;
ITWDWAVGF; TWDWAVGFL; WDWAVGFLG; DWAVGFLGV; WAVGFLGVI; AVGFLGVIV; VGFLGVIVP;
GFLGVIVPS; FLGVIVPSG; LGVIVPSGY; GVIVPSGYF; VIVPSGYFD; IVPSGYFDL; FISTPCISK;
ISTPCISKG; STPCISKGS; TPCISKGSP; PCISKGSPP; CISKGSPPT; ISKGSPPTA; SKGSPPTAK; KGSPPTAKK;
GSPPTAKKW; SPPTAKKWK; PPTAKKWKL; PTAKKWKLL; TAKKWKLLP; IGFPPPCSC; GFPPPCSCT;
FPPPCSCTF; PPPCSCTFC; PPCSCTFCD; PCSCTFCDP; CSCTFCDPA; RLSMLVIPI; LSMLVIPIT; SMLVIPITS;
MLVIPITSV; LVIPITSVC; VIPITSVCT; IPITSVCTV; PITSVCTVT; ITSVCTVTA; TSVCTVTAS;
SVCTVTASH; VCTVTASHI; CTVTASHIS; TVTASHISR; VTASHISRF; TASHISRFP; ASHISRFPQ;
SHISRFPQV; HISRFPQVR; ISRFPQVRS; SRFPQVRSS; RFPQVRSSF; FPQVRSSFK; PQVRSSFKL;
QVRSSFKLG; VRSSFKLGR; RSSFKLGRG; SSFKLGRGI; SFKLGRGIL; FKLGRGILA; KLGRGILAV;
LGRGILAVL; QGSIFLSGL; GSIFLSGLS; SIFLSGLSL; IFLSGLSLL; FLSGLSLLK; LSGLSLLKS;
SGLSLLKSF; GLSLLKSFS; LSLLKSFSA; SLLKSFSAL; LLKSFSALS; LKSFSALSF; KSFSALSFR;
SFSALSFRL; FSALSFRLK; SALSFRLKP; ALSFRLKPL; LSFRLKPLR; SFRLKPLRF; FRLKPLRFS;
RLKPLRFSS; LKPLRFSSG; KPLRFSSGS; PLRFSSGSP; LRFSSGSPI; RFSSGSPIS; FSSGSPISG; SSGSPISGF;
SGSPISGFR; GSPISGFRK; SPISGFRKH; PISGFRKHS; ISGFRKHST; SGFRKHSTS; GFRKHSTSV;
FRKHSTSVI; RKHSTSVIA; KHSTSVIAS; HSTSVIAST; STSVIASTP; TSVIASTPV; SVIASTPVL;
VIASTPVLT; IASTPVLTS; ASTPVLTSR; STPVLTSRT; TPVLTSRTS; PVLTSRTST; VLTSRTSTP;
LTSRTSTPP; TSRTSTPPF; SRTSTPPFI; RTSTPPFIS; TSTPPFISS; STPPFISSF; TPPFISSFG; PPFISSFGT;
PFISSFGTC; FISSFGTCT; ISSFGTCTG; SSFGTCTGS; SFGTCTGSF; FGTCTGSFG; GTCTGSFGF;
TCTGSFGFL; CTGSFGFLG; TGSFGFLGA; GSFGFLGAA; SFGFLGAAP; FGFLGAAPG; GFLGAAPGH;
FLGAAPGHS; LGAAPGHSP; GAAPGHSPF; AAPGHSPFL; APGHSPFLL; PGHSPFLLV; GHSPFLLVG;
HSPFLLVGA; SPFLLVGAI; PFLLVGAIF; FLLVGAIFI; LLVGAIFIC; LVGAIFICF; VGAIFICFK; GAIFICFKS;
AIFICFKSR; IFICFKSRC; FICFKSRCY; ICFKSRCYS; CFKSRCYSP; FKSRCYSPV; KSRCYSPVQ;
SRCYSPVQA; RQHPLRSSS; QHPLRSSSL; HPLRSSSLI; PLRSSSLIS; LRSSSLIST; RSSSLISTS; SSSLISTSW;
SSLISTSWG; SLISTSWGN; LISTSWGNS; ISTSWGNSF; STSWGNSFF; TSWGNSFFY; SWGNSFFYK;
WGNSFFYKL; GNSFFYKLS; VHSLCNFFY; HSLCNFFYT; SLCNFFYTV; LCNFFYTVS; CNFFYTVSI;
NFFYTVSII; FFYTVSIIY; FYTVSIIYT; YTVSIIYTI; TVSIIYTIS; VSIIYTISM; SIIYTISMA; IIYTISMAK;
IYTISMAKM; YTISMAKMY; TISMAKMYT; ISMAKMYTG; SMAKMYTGT; MAKMYTGTF; AKMYTGTFP;
KMYTGTFPF; MYTGTFPFS; YTGTFPFSY; TGTFPFSYL; GTFPFSYLS; TFPFSYLSN; FPFSYLSNH;
GPNRGKIRI; PNRGKIRII; NRGKIRIIL; RGKIRIILL; GKIRIILLN; KIRIILLNI; IRIILLNII; RIILLNIII;
IILLNIIIK; ILLNIIIKV; LLNIIIKVY; LNIIIKVYR; NIIIKVYRG; IIIKVYRGI; IIKVYRGIY; IKVYRGIYN;
KVYRGIYNC; VYRGIYNCP; YRGIYNCPG; RGIYNCPGS; GIYNCPGSF; IYNCPGSFL; YNCPGSFLQ;
NCPGSFLQK; CPGSFLQKS; PGSFLQKSS; GSFLQKSSQ; SFLQKSSQG; FLQKSSQGV; LQKSSQGVS;
QKSSQGVSK; KSSQGVSKK; SSQGVSKKS; SQGVSKKSF; QGVSKKSFC; GVSKKSFCS; VSKKSFCSS;
SKKSFCSSL; KKSFCSSLQ; KSFCSSLQF; SFCSSLQFL; GYRRYIIPN; YRRYIIPNN; RRYIIPNNM;
RYIIPNNMP; YIIPNNMPQ; IIPNNMPQS; IPNNMPQSL; PNNMPQSLG; NNMPQSLGN; NMPQSLGNS;
MPQSLGNSS; PQSLGNSSK; QSLGNSSKQ; SLGNSSKQR; LGNSSKQRR; GNSSKQRRT; NSSKQRRTP;
SSKQRRTPM; SKQRRTPMP; KQRRTPMPR; QRRTPMPRI; RRTPMPRIK; RTPMPRIKV; TPMPRIKVL;
PMPRIKVLN; MPRIKVLNI; PRIKVLNII; RIKVLNIIN; IKVLNIINK; KVLNIINKS; VLNIINKSI; LNIINKSIY;
NIINKSIYT; IINKSIYTR; INKSIYTRK; NKSIYTRKQ; KSIYTRKQN; SIYTRKQNI; IYTRKQNII; YTRKQNIIV;
TRKQNIIVL; RKQNIIVLI; KQNIIVLIW; QNIIVLIWV; NIIVLIWVK; IIVLIWVKQ; IVLIWVKQF;
VLIWVKQFQ; LIWVKQFQS; IWVKQFQSH; WVKQFQSHA; LLIEAYSGN; LIEAYSGNF; IEAYSGNFV;
EAYSGNFVI; AYSGNFVIP; YSGNFVIPI; SGNFVIPII; GNFVIPIIK; NFVIPIIKE; FVIPIIKEL; VIPIIKELI;
IPIIKELIP; PIIKELIPY; IIKELIPYL; IKELIPYLS; GTNTTNSLN; SSKPSNSPR; SKPSNSPRS; KPSNSPRST;
PSNSPRSTS; SNSPRSTSN; NSPRSTSNY; SPRSTSNYS; PRSTSNYSI; RSTSNYSIC; STSNYSICL;
TSNYSICLR; SNYSICLRS; GTCYALYSS; TCYALYSSK; CYALYSSKG; YALYSSKGC; ALYSSKGCN;
LYSSKGCNL; YSSKGCNLN; SSKGCNLNF; SKGCNLNFY; KGCNLNFYS; GCNLNFYSS; CNLNFYSSS;
NLNFYSSSS; LNFYSSSSL; NFYSSSSLP; FYSSSSLPS; YSSSSLPSS; SSSSLPSSN; SSSLPSSNF; SSLPSSNFS;
SLPSSNFSH; KSCGSSSLR; SCGSSSLRY; CGSSSLRYT; GSSSLRYTG; SSSLRYTGN; SSTHEPGNT;
STHEPGNTK; THEPGNTKK; HEPGNTKKK; EPGNTKKKG; PGNTKKKGL; GNTKKKGLL; NTKKKGLLT;
ESFTESFTA; SFTESFTAG; FTESFTAGK; TESFTAGKA; ESFTAGKAV; SFTAGKAVV; FTAGKAVVL;
TAGKAVVLL; AGKAVVLLF; GKAVVLLFF; KAVVLLFFP; AVVLLFFPS; VVLLFFPST; VLLFFPSTL;
LLFFPSTLS; LFFPSTLSS; FFPSTLSSP; FPSTLSSPL; PSTLSSPLQ; STLSSPLQN; TLSSPLQNS; LSSPLQNSS;
SSPLQNSSK; SPLQNSSKS; PLQNSSKSS; LQNSSKSSK; QNSSKSSKI; NSSKSSKIK; SSKSSKIKI;
SKSSKIKIK; KSSKIKIKI; SSKIKIKIL; ALFFVPVQV; LFFVPVQVL; FFVPVQVLP; FVPVQVLPT;
VPVQVLPTF; PVQVLPTFT; VQVLPTFTE; QVLPTFTEA; VLPTFTEAC; LPTFTEACR; PTFTEACRD;
TFTEACRDS; FTEACRDSW; TEACRDSWR; EACRDSWRR; ACRDSWRRT; CRDSWRRTM; RDSWRRTMA;
DSWRRTMAF; SWRRTMAFV; WRRTMAFVQ; RRTMAFVQF; RTMAFVQFN; TMAFVQFNW;
MAFVQFNWG; AFVQFNWGQ; FVQFNWGQG; VQFNWGQGQ; QFNWGQGQD; FNWGQGQDS;
ARKTCLSCT; RKTCLSCTF; KTCLSCTFL; TCLSCTFLP; CLSCTFLPE; LSCTFLPEV; SCTFLPEVM;
CTFLPEVMV; TFLPEVMVW; FLPEVMVWL; LPEVMVWLH; PEVMVWLHS; EVMVWLHSM;
VMVWLHSMG; MVWLHSMGK; VWLHSMGKQ; WLHSMGKQL; LHSMGKQLL; HSMGKQLLP;
SMGKQLLPV; MGKQLLPVS; GKQLLPVSH; KQLLPVSHA; QLLPVSHAL; LLPVSHALS; LPVSHALSF;
PVSHALSFL; VSHALSFLR; SHALSFLRS; HALSFLRSW; ALSFLRSWF; LSFLRSWFG; SFLRSWFGC;
FLRSWFGCI; LRSWFGCIP; RSWFGCIPL; GHGLAAFHG; AAPPCGLFF; APPCGLFFY; PPCGLFFYN;
PCGLFFYNI; EAEAASAST; AEAASASTL; EAASASTLS; AASASTLSL; ASASTLSLK; GLAKLFGEI;
LAKLFGEIP; AKLFGEIPI; KLFGEIPIL; LFGEIPILL; FGEIPILLQ; GEIPILLQF; EIPILLQFL; IPILLQFLQ

10 mers:

MDKVLNREES; DKVLNREESM; KVLNREESME; VLNREESMEL; LNREESMELM; NREESMELMD;
REESMELMDL; EESMELMDLL; ESMELMDLLG; SMELMDLLGL; MELMDLLGLE; ELMDLLGLER;
LMDLLGLERA; MDLLGLERAA; DLLGLERAAW; LLGLERAAWG; LGLERAAWGN; GLERAAWGNL;
LERAAWGNLP; ERAAWGNLPL; RAAWGNLPLM; AAWGNLPLMR; AWGNLPLMRK; WGNLPLMRKA;
GNLPLMRKAY; NLPLMRKAYL; LPLMRKAYLR; PLMRKAYLRK; LMRKAYLRKC; MRKAYLRKCK;
RKAYLRKCKE; KAYLRKCKEF; AYLRKCKEFH; YLRKCKEFHP; LRKCKEFHPD; RKCKEFHPDK;
KCKEFHPDKG; CKEFHPDKGG; KEFHPDKGGD; EFHPDKGGDE; FHPDKGGDED; HPDKGGDEDK;
PDKGGDEDKM; DKGGDEDKMK; KGGDEDKMKR; GGDEDKMKRM; GDEDKMKRMN; DEDKMKRMNT;
EDKMKRMNTL; DKMKRMNTLY; KMKRMNTLYK; MKRMNTLYKK; KRMNTLYKKM; RMNTLYKKME;
MNTLYKKMEQ; NTLYKKMEQD; TLYKKMEQDV; LYKKMEQDVK; YKKMEQDVKV; KKMEQDVKVA;
KMEQDVKVAH; MEQDVKVAHQ; EQDVKVAHQP; QDVKVAHQPD; DVKVAHQPDF; VKVAHQPDFG;
KVAHQPDFGT; VAHQPDFGTW; AHQPDFGTWS; HQPDFGTWSS; QPDFGTWSSS; PDFGTWSSSE;
DFGTWSSSEV; FGTWSSSEVC; GTWSSSEVCA; TWSSSEVCAD; WSSSEVCADF; SSSEVCADFP;
SSEVCADFPL; SEVCADFPLC; EVCADFPLCP; VCADFPLCPD; CADFPLCPDT; ADFPLCPDTL;
DFPLCPDTLY; FPLCPDTLYC; PLCPDTLYCK; LCPDTLYCKE; CPDTLYCKEW; PDTLYCKEWP;
DTLYCKEWPI; TLYCKEWPIC; LYCKEWPICS; YCKEWPICSK; CKEWPICSKK; KEWPICSKKP;
EWPICSKKPS; WPICSKKPSV; PICSKKPSVH; ICSKKPSVHC; CSKKPSVHCP; SKKPSVHCPC;
KKPSVHCPCM; KPSVHCPCML; PSVHCPCMLC; SVHCPCMLCQ; VHCPCMLCQL; HCPCMLCQLR;
CPCMLCQLRL; PCMLCQLRLR; CMLCQLRLRH; MLCQLRLRHL; LCQLRLRHLN; CQLRLRHLNR;
QLRLRHLNRK; LRLRHLNRKF; RLRHLNRKFL; LRHLNRKFLR; RHLNRKFLRK; HLNRKFLRKE;
LNRKFLRKEP; NRKFLRKEPL; RKFLRKEPLV; KFLRKEPLVW; FLRKEPLVWI; LRKEPLVWID;
RKEPLVWIDC; KEPLVWIDCY; EPLVWIDCYC; PLVWIDCYCI; LVWIDCYCID; VWIDCYCIDC;
WIDCYCIDCF; IDCYCIDCFT; DCYCIDCFTQ; CYCIDCFTQW; YCIDCFTQWF; CIDCFTQWFG;
IDCFTQWFGL; DCFTQWFGLD; CFTQWFGLDL; FTQWFGLDLT; TQWFGLDLTE; QWFGLDLTEE;
WFGLDLTEET; FGLDLTEETL; GLDLTEETLQ; LDLTEETLQW; DLTEETLQWW; LTEETLQWWV;
TEETLQWWVQ; EETLQWWVQI; ETLQWWVQII; TLQWWVQIIG; LQWWVQIIGE; QWWVQIIGET;
WWVQIIGETP; WVQIIGETPF; VQIIGETPFR; QIIGETPFRD; IIGETPFRDL; IGETPFRDLK; GETPFRDLKL;
KALSNYFFYR; ALSNYFFYRC; LSNYFFYRCQ; SNYFFYRCQP; NYFFYRCQPM; YFFYRCQPME;
FFYRCQPMEQ; FYRCQPMEQK; YRCQPMEQKS; RCQPMEQKSG; CQPMEQKSGS; QPMEQKSGSP;
PMEQKSGSPG; MEQKSGSPGG; EQKSGSPGGV; QKSGSPGGVP; KSGSPGGVPL; SGSPGGVPLM;
GSPGGVPLMK; SPGGVPLMKN; PGGVPLMKNG; GGVPLMKNGM; GVPLMKNGMK; VPLMKNGMKI;
PLMKNGMKIY; LMKNGMKIYF; MKNGMKIYFA; KNGMKIYFAM; NGMKIYFAMK; GMKIYFAMKI;
MKIYFAMKIC; KIYFAMKICL; IYFAMKICLP; YFAMKICLPV; FAMKICLPVM; AMKICLPVMK;
MKICLPVMKK; KICLPVMKKQ; ICLPVMKKQQ; CLPVMKKQQQ; LPVMKKQQQI; PVMKKQQQIL;
VMKKQQQILN; MKKQQQILNT; KKQQQILNTQ; KQQQILNTQH; QQQILNTQHH; QQILNTQHHP;
QILNTQHHPK; ILNTQHHPKK; LNTQHHPKKK; NTQHHPKKKE; TQHHPKKKER; KTLKTFPLIY;
TLKTFPLIYT; LKTFPLIYTS; KTFPLIYTSF; TFPLIYTSFL; FPLIYTSFLV; PLIYTSFLVK; LIYTSFLVKL;
IYTSFLVKLY; YTSFLVKLYL; TSFLVKLYLV; SFLVKLYLVI; FLVKLYLVIE; LVKLYLVIEP;
VKLYLVIEPL; KLYLVIEPLP; LYLVIEPLPA; YLVIEPLPAL; LVIEPLPALL; VIEPLPALLC; IEPLPALLCI;
EPLPALLCIL; PLPALLCILL; LPALLCILLK; PALLCILLKK; ALLCILLKKK; LLCILLKKKL; LCILLKKKLK;
CILLKKKLKF; ILLKKKLKFC; LLKKKLKFCI; LKKKLKFCIK; KKKLKFCIKN; KKLKFCIKNL;
KLKFCIKNLW; LKFCIKNLWK; KFCIKNLWKN; FCIKNLWKNI; CIKNLWKNIL; LLLVDTCVLG;
LLVDTCVLGI; LVDTCVLGII; VDTCVLGIIL; DTCVLGIILY; TCVLGIILYS; CVLGIILYSF; LHIDIEFLQL;
HIDIEFLQLI; IDIEFLQLII; DIEFLQLIIS; IEFLQLIISV; EFLQLIISVK; FLQLIISVKS; LQLIISVKSC;
QLIISVKSCV; LIISVKSCVP; IISVKSCVPL; ISVKSCVPLV; SVKSCVPLVF; FVRVLIRNTY; VRVLIRNTYY;
RVLIRNTYYI; VLIRNTYYIV; LIRNTYYIVP; RSMILAQKSL; SMILAQKSLK; MILAQKSLKK;
ILAQKSLKKQ; LAQKSLKKQS; AQKSLKKQSR; QKSLKKQSRC; KSLKKQSRCL; SLKKQSRCLG;
LKKQSRCLGN; RQSVRMCFYY; RSVKSVRKKT; SVKSVRKKTS; VKSVRKKTSL; KSVRKKTSLI;
SVRKKTSLIT; VRKKTSLITL; RKKTSLITLS; KKTSLITLSI; KTSLITLSIM; TSLITLSIMK; SLITLSIMKS;
LITLSIMKST; ITLSIMKSTL; TLSIMKSTLQ; LSIMKSTLQM; SIMKSTLQML; IMKSTLQMLL;
MKSTLQMLLF; KSTLQMLLFL; STLQMLLFLQ; TLQMLLFLQK; LQMLLFLQKV; QMLLFLQKVK;
MLLFLQKVKI; LLFLQKVKIK; LFLQKVKIKK; FLQKVKIKKV; LQKVKIKKVF; QKVKIKKVFV;
KVKIKKVFVS; VKIKKVFVSK; KIKKVFVSKQ; NNIWQVLLGC; NIWQVLLGCT; IWQVLLGCTV;
WQVLLGCTVC; QVLLGCTVCY; VLLGCTVCYL; LLGCTVCYLK; LGCTVCYLKW; GCTVCYLKWI;
CTVCYLKWIL; YLIFCTVLFS; LIFCTVLFSM; IFCTVLFSMY; FCTVLFSMYL; CTVLFSMYLK;
TVLFSMYLKE; VLFSMYLKED; LFSMYLKEDT; FSMYLKEDTG; SMYLKEDTGY; MYLKEDTGYL;
YLKEDTGYLK; LKEDTGYLKV; KEDTGYLKVP; EDTGYLKVPL; DTGYLKVPLI; TGYLKVPLIV;
GYLKVPLIVE; YLKVPLIVEK; LKVPLIVEKQ; KVPLIVEKQH; KGQELNQRIC; GQELNQRICL;
QELNQRICLQ; ELNQRICLQD; LNQRICLQDM; NQRICLQDME; TKEPKYFHQA; KEPKYFHQAW;
EPKYFHQAWL; PKYFHQAWLQ; MSILSLKPCK; SILSLKPCKL; ILSLKPCKLD; LSLKPCKLDL;
ENPYKTQSSY; NPYKTQSSYL; PYKTQSSYLK; YKTQSSYLKK; KTQSSYLKKE; TQSSYLKKEF;
QSSYLKKEFY; SSYLKKEFYK; SYLKKEFYKV; YLKKEFYKVE; LILQLIYNLE; ILQLIYNLEL;
LQLIYNLELL; QLIYNLELLN; LIYNLELLNG; IYNLELLNGR; YNLELLNGRK; NLELLNGRKG;
LELLNGRKGW; ELLNGRKGWI; LLNGRKGWIL; LNGRKGWILR; NIIYAWGNVF; IIYAWGNVFL;
IYAWGNVFLI; YAWGNVFLIL; AWGNVFLILQ; WGNVFLILQE; GNVFLILQEK; NVFLILQEKR;
VFLILQEKRI; FLILQEKRIQ; LILQEKRIQK; ILQEKRIQKL; LQEKRIQKLK; QEKRIQKLKT; EKRIQKLKTL;
KRIQKLKTLD; RIQKLKTLDM; IQKLKTLDMD; QKLKTLDMDQ; KLKTLDMDQA; LKTLDMDQAL;
KTLDMDQALN; TLDMDQALNP; LDMDQALNPN; DMDQALNPNH; MDQALNPNHN; DQALNPNHNA;
QALNPNHNAL; ALNPNHNALP; LNPNHNALPK; NPNHNALPKS; PNHNALPKSQ; NHNALPKSQI;
HNALPKSQIL; NALPKSQILQ; ALPKSQILQP; LPKSQILQPL; PKSQILQPLL; KSQILQPLLK; SQILQPLLKI;
QILQPLLKIP; ILQPLLKIPK; LQPLLKIPKG; QPLLKIPKGQ; PLLKIPKGQT; LLKIPKGQTP; LKIPKGQTPI;
KIPKGQTPIV; IPKGQTPIVK; PKGQTPIVKS; KGQTPIVKSC; GQTPIVKSCI; QTPIVKSCIC; TPIVKSCICV;
PIVKSCICVK; IVKSCICVKA; VKSCICVKAF; KSCICVKAFS; SCICVKAFSV; CICVKAFSVL; ICVKAFSVLK;
CVKAFSVLKG; VKAFSVLKGL; KAFSVLKGLK; AFSVLKGLKH; FSVLKGLKHH; SVLKGLKHHP;
VLKGLKHHPQ; LKGLKHHPQN; KGLKHHPQNN; GLKHHPQNNT; LKHHPQNNTS; KHHPQNNTSL;
HHPQNNTSLK; HPQNNTSLKV; PQNNTSLKVA; QNNTSLKVAY; NNTSLKVAYT; NTSLKVAYTK;
TSLKVAYTKA; SLKVAYTKAA; LKVAYTKAAF; KVAYTKAAFI; VAYTKAAFIK; AYTKAAFIKC;
YTKAAFIKCI; TKAAFIKCIC; KAAFIKCICT; AAFIKCICTI; AFIKCICTIK; FIKCICTIKA; IKCICTIKAP;
KCICTIKAPV; SILVCNCPCL; ILVCNCPCLS; LVCNCPCLSI; VCNCPCLSIY; CNCPCLSIYL; NCPCLSIYLI;
CPCLSIYLII; PCLSIYLIIS; CLSIYLIISG; LSIYLIISGS; SIYLIISGSP; IYLIISGSPG; YLIISGSPGS;
LIISGSPGSL; IISGSPGSLS; ISGSPGSLSV; SGSPGSLSVP; GSPGSLSVPS; SPGSLSVPSN; PGSLSVPSNT;
GSLSVPSNTL; SLSVPSNTLT; LSVPSNTLTS; SVPSNTLTSS; VPSNTLTSST; PSNTLTSSTW; SNTLTSSTWD;
NTLTSSTWDS; TLTSSTWDSI; LTSSTWDSIP; TSSTWDSIPY; SSTWDSIPYI; STWDSIPYIG; TWDSIPYIGC;
WDSIPYIGCP; DSIPYIGCPS; SIPYIGCPST; IPYIGCPSTL; PYIGCPSTLW; YIGCPSTLWV; IGCPSTLWVL;
GCPSTLWVLL; CPSTLWVLLF; PSTLWVLLFI; STLWVLLFIR; TLWVLLFIRS; LWVLLFIRSL;
WVLLFIRSLS; VLLFIRSLSK; LLFIRSLSKK; LFIRSLSKKE; FIRSLSKKEI; IRSLSKKEIG; GFFTDLFLRR;
FFTDLFLRRI; FTDLFLRRIL; TDLFLRRILK; DLFLRRILKY; LFLRRILKYL; FLRRILKYLA; LRRILKYLAR;
RRILKYLARP; RILKYLARPL; ILKYLARPLH; LKYLARPLHC; KYLARPLHCC; YLARPLHCCV;
LARPLHCCVP; ARPLHCCVPE; RPLHCCVPEL; PLHCCVPELL; LHCCVPELLV; HCCVPELLVN;
CCVPELLVNR; CVPELLVNRP; VPELLVNRPQ; PELLVNRPQI; ELLVNRPQIS; LLVNRPQISA;
LVNRPQISAA; VNRPQISAAE; NRPQISAAET; RPQISAAETY; PQISAAETYR; QISAAETYRL; ISAAETYRLS;
SAAETYRLSA; AAETYRLSAL; AETYRLSALQ; ETYRLSALQR; TYRLSALQRG; YRLSALQRGP;
RLSALQRGPT; LSALQRGPTP; SALQRGPTPC; ALQRGPTPCS; LQRGPTPCSS; QRGPTPCSSS;
RGPTPCSSSN; GPTPCSSSNT; PTPCSSSNTV; TPCSSSNTVV; PCSSSNTVVA; CSSSNTVVAV;
SSSNTVVAVL; SSNTVVAVLV; SNTVVAVLVT; STGGTFSPPV; TGGTFSPPVK; GGTFSPPVKV;
GTFSPPVKVP; TFSPPVKVPK; FSPPVKVPKY; SPPVKVPKYL; PPVKVPKYLA; PVKVPKYLAF;
VKVPKYLAFS; KVPKYLAFSF; VPKYLAFSFL; PKYLAFSFLL; KYLAFSFLLG; YLAFSFLLGS;
LAFSFLLGSG; AFSFLLGSGT; FSFLLGSGTQ; SFLLGSGTQH; FLLGSGTQHS; LLGSGTQHST;
LGSGTQHSTG; ALWSVFITWD; LWSVFITWDW; WSVFITWDWA; SVFITWDWAV; VFITWDWAVG;
FITWDWAVGF; ITWDWAVGFL; TWDWAVGFLG; WDWAVGFLGV; DWAVGFLGVI; WAVGFLGVIV;
AVGFLGVIVP; VGFLGVIVPS; GFLGVIVPSG; FLGVIVPSGY; LGVIVPSGYF; GVIVPSGYFD;
VIVPSGYFDL; FISTPCISKG; ISTPCISKGS; STPCISKGSP; TPCISKGSPP; PCISKGSPPT; CISKGSPPTA;
ISKGSPPTAK; SKGSPPTAKK; KGSPPTAKKW; GSPPTAKKWK; SPPTAKKWKL; PPTAKKWKLL;
PTAKKWKLLP; IGFPPPCSCT; GFPPPCSCTF; FPPPCSCTFC; PPPCSCTFCD; PPCSCTFCDP; PCSCTFCDPA;
RLSMLVIPIT; LSMLVIPITS; SMLVIPITSV; MLVIPITSVC; LVIPITSVCT; VIPITSVCTV; IPITSVCTVT;
PITSVCTVTA; ITSVCTVTAS; TSVCTVTASH; SVCTVTASHI; VCTVTASHIS; CTVTASHISR; TVTASHISRF;
VTASHISRFP; TASHISRFPQ; ASHISRFPQV; SHISRFPQVR; HISRFPQVRS; ISRFPQVRSS; SRFPQVRSSF;
RFPQVRSSFK; FPQVRSSFKL; PQVRSSFKLG; QVRSSFKLGR; VRSSFKLGRG; RSSFKLGRGI;
SSFKLGRGIL; SFKLGRGILA; FKLGRGILAV; KLGRGILAVL; QGSIFLSGLS; GSIFLSGLSL; SIFLSGLSLL;
IFLSGLSLLK; FLSGLSLLKS; LSGLSLLKSF; SGLSLLKSFS; GLSLLKSFSA; LSLLKSFSAL; SLLKSFSALS;
LLKSFSALSF; LKSFSALSFR; KSFSALSFRL; SFSALSFRLK; FSALSFRLKP; SALSFRLKPL; ALSFRLKPLR;
LSFRLKPLRF; SFRLKPLRFS; FRLKPLRFSS; RLKPLRFSSG; LKPLRFSSGS; KPLRFSSGSP; PLRFSSGSPI;
LRFSSGSPIS; RFSSGSPISG; FSSGSPISGF; SSGSPISGFR; SGSPISGFRK; GSPISGFRKH; SPISGFRKHS;
PISGFRKHST; ISGFRKHSTS; SGFRKHSTSV; GFRKHSTSVI; FRKHSTSVIA; RKHSTSVIAS; KHSTSVIAST;
HSTSVIASTP; STSVIASTPV; TSVIASTPVL; SVIASTPVLT; VIASTPVLTS; IASTPVLTSR; ASTPVLTSRT;
STPVLTSRTS; TPVLTSRTST; PVLTSRTSTP; VLTSRTSTPP; LTSRTSTPPF; TSRTSTPPFI; SRTSTPPFIS;
RTSTPPFISS; TSTPPFISSF; STPPFISSFG; TPPFISSFGT; PPFISSFGTC; PFISSFGTCT; FISSFGTCTG;
ISSFGTCTGS; SSFGTCTGSF; SFGTCTGSFG; FGTCTGSFGF; GTCTGSFGFL; TCTGSFGFLG; CTGSFGFLGA;
TGSFGFLGAA; GSFGFLGAAP; SFGFLGAAPG; FGFLGAAPGH; GFLGAAPGHS; FLGAAPGHSP;
LGAAPGHSPF; GAAPGHSPFL; AAPGHSPFLL; APGHSPFLLV; PGHSPFLLVG; GHSPFLLVGA;
HSPFLLVGAI; SPFLLVGAIF; PFLLVGAIFI; FLLVGAIFIC; LLVGAIFICF; LVGAIFICFK; VGAIFICFKS;
GAIFICFKSR; AIFICFKSRC; IFICFKSRCY; FICFKSRCYS; ICFKSRCYSP; CFKSRCYSPV; FKSRCYSPVQ;
KSRCYSPVQA; RQHPLRSSSL; QHPLRSSSLI; HPLRSSSLIS; PLRSSSLIST; LRSSSLISTS; RSSSLISTSW;
SSSLISTSWG; SSLISTSWGN; SLISTSWGNS; LISTSWGNSF; ISTSWGNSFF; STSWGNSFFY;
TSWGNSFFYK; SWGNSFFYKL; WGNSFFYKLS; VHSLCNFFYT; HSLCNFFYTV; SLCNFFYTVS;
LCNFFYTVSI; CNFFYTVSII; NFFYTVSIIY; FFYTVSIIYT; FYTVSIIYTI; YTVSIIYTIS; TVSIIYTISM;
VSIIYTISMA; SIIYTISMAK; IIYTISMAKM; IYTISMAKMY; YTISMAKMYT; TISMAKMYTG;
ISMAKMYTGT; SMAKMYTGTF; MAKMYTGTFP; AKMYTGTFPF; KMYTGTFPFS; MYTGTFPFSY;
YTGTFPFSYL; TGTFPFSYLS; GTFPFSYLSN; TFPFSYLSNH; GPNRGKIRII; PNRGKIRIIL; NRGKIRIILL;
RGKIRIILLN; GKIRIILLNI; KIRIILLNII; IRIILLNIII; RIILLNIIIK; IILLNIIIKV; ILLNIIIKVY; LLNIIIKVYR;
LNIIIKVYRG; NIIIKVYRGI; IIIKVYRGIY; IIKVYRGIYN; IKVYRGIYNC; KVYRGIYNCP; VYRGIYNCPG;
YRGIYNCPGS; RGIYNCPGSF; GIYNCPGSFL; IYNCPGSFLQ; YNCPGSFLQK; NCPGSFLQKS;
CPGSFLQKSS; PGSFLQKSSQ; GSFLQKSSQG; SFLQKSSQGV; FLQKSSQGVS; LQKSSQGVSK;
QKSSQGVSKK; KSSQGVSKKS; SSQGVSKKSF; SQGVSKKSFC; QGVSKKSFCS; GVSKKSFCSS;
VSKKSFCSSL; SKKSFCSSLQ; KKSFCSSLQF; KSFCSSLQFL; GYRRYIIPNN; YRRYIIPNNM; RRYIIPNNMP;
RYIIPNNMPQ; YIIPNNMPQS; IIPNNMPQSL; IPNNMPQSLG; PNNMPQSLGN; NNMPQSLGNS;
NMPQSLGNSS; MPQSLGNSSK; PQSLGNSSKQ; QSLGNSSKQR; SLGNSSKQRR; LGNSSKQRRT;
GNSSKQRRTP; NSSKQRRTPM; SSKQRRTPMP; SKQRRTPMPR; KQRRTPMPRI; QRRTPMPRIK;
RRTPMPRIKV; RTPMPRIKVL; TPMPRIKVLN; PMPRIKVLNI; MPRIKVLNII; PRIKVLNIIN; RIKVLNIINK;
IKVLNIINKS; KVLNIINKSI; VLNIINKSIY; LNIINKSIYT; NIINKSIYTR; IINKSIYTRK; INKSIYTRKQ;
NKSIYTRKQN; KSIYTRKQNI; SIYTRKQNII; IYTRKQNIIV; YTRKQNIIVL; TRKQNIIVLI; RKQNIIVLIW;
KQNIIVLIWV; QNIIVLIWVK; NIIVLIWVKQ; IIVLIWVKQF; IVLIWVKQFQ; VLIWVKQFQS;
LIWVKQFQSH; IWVKQFQSHA; LLIEAYSGNF; LIEAYSGNFV; IEAYSGNFVI; EAYSGNFVIP;
AYSGNFVIPI; YSGNFVIPII; SGNFVIPIIK; GNFVIPIIKE; NFVIPIIKEL; FVIPIIKELI; VIPIIKELIP;
IPIIKELIPY; PIIKELIPYL; IIKELIPYLS; SSKPSNSPRS; SKPSNSPRST; KPSNSPRSTS; PSNSPRSTSN;
SNSPRSTSNY; NSPRSTSNYS; SPRSTSNYSI; PRSTSNYSIC; RSTSNYSICL; STSNYSICLR; TSNYSICLRS;
GTCYALYSSK; TCYALYSSKG; CYALYSSKGC; YALYSSKGCN; ALYSSKGCNL; LYSSKGCNLN;
YSSKGCNLNF; SSKGCNLNFY; SKGCNLNFYS; KGCNLNFYSS; GCNLNFYSSS; CNLNFYSSSS;
NLNFYSSSSL; LNFYSSSSLP; NFYSSSSLPS; FYSSSSLPSS; YSSSSLPSSN; SSSSLPSSNF; SSSLPSSNFS;
SSLPSSNFSH; KSCGSSSLRY; SCGSSSLRYT; CGSSSLRYTG; GSSSLRYTGN; SSTHEPGNTK;
STHEPGNTKK; THEPGNTKKK; HEPGNTKKKG; EPGNTKKKGL; PGNTKKKGLL; GNTKKKGLLT;
ESFTESFTAG; SFTESFTAGK; FTESFTAGKA; TESFTAGKAV; ESFTAGKAVV; SFTAGKAVVL;
FTAGKAVVLL; TAGKAVVLLF; AGKAVVLLFF; GKAVVLLFFP; KAVVLLFFPS; AVVLLFFPST;
VVLLFFPSTL; VLLFFPSTLS; LLFFPSTLSS; LFFPSTLSSP; FFPSTLSSPL; FPSTLSSPLQ; PSTLSSPLQN;
STLSSPLQNS; TLSSPLQNSS; LSSPLQNSSK; SSPLQNSSKS; SPLQNSSKSS; PLQNSSKSSK; LQNSSKSSKI;
QNSSKSSKIK; NSSKSSKIKI; SSKSSKIKIK; SKSSKIKIKI; KSSKIKIKIL; ALFFVPVQVL; LFFVPVQVLP;
FFVPVQVLPT; FVPVQVLPTF; VPVQVLPTFT; PVQVLPTFTE; VQVLPTFTEA; QVLPTFTEAC;
VLPTFTEACR; LPTFTEACRD; PTFTEACRDS; TFTEACRDSW; FTEACRDSWR; TEACRDSWRR;
EACRDSWRRT; ACRDSWRRTM; CRDSWRRTMA; RDSWRRTMAF; DSWRRTMAFV; SWRRTMAFVQ;
WRRTMAFVQF; RRTMAFVQFN; RTMAFVQFNW; TMAFVQFNWG; MAFVQFNWGQ; AFVQFNWGQG;
FVQFNWGQGQ; VQFNWGQGQD; QFNWGQGQDS; ARKTCLSCTF; RKTCLSCTFL; KTCLSCTFLP;
TCLSCTFLPE; CLSCTFLPEV; LSCTFLPEVM; SCTFLPEVMV; CTFLPEVMVW; TFLPEVMVWL;
FLPEVMVWLH; LPEVMVWLHS; PEVMVWLHSM; EVMVWLHSMG; VMVWLHSMGK; MVWLHSMGKQ;
VWLHSMGKQL; WLHSMGKQLL; LHSMGKQLLP; HSMGKQLLPV; SMGKQLLPVS; MGKQLLPVSH;
GKQLLPVSHA; KQLLPVSHAL; QLLPVSHALS; LLPVSHALSF; LPVSHALSFL; PVSHALSFLR;
VSHALSFLRS; SHALSFLRSW; HALSFLRSWF; ALSFLRSWFG; LSFLRSWFGC; SFLRSWFGCI;
FLRSWFGCIP; LRSWFGCIPL; AAPPCGLFFY; APPCGLFFYN; PPCGLFFYNI; EAEAASASTL;
AEAASASTLS; EAASASTLSL; AASASTLSLK; GLAKLFGEIP; LAKLFGEIPI; AKLFGEIPIL; KLFGEIPILL;
LFGEIPILLQ; FGEIPILLQF; GEIPILLQFL; EIPILLQFLQ

11 mers:

MDKVLNREESM; DKVLNREESME; KVLNREESMEL; VLNREESMELM; LNREESMELMD;
NREESMELMDL; REESMELMDLL; EESMELMDLLG; ESMELMDLLGL; SMELMDLLGLE;
MELMDLLGLER; ELMDLLGLERA; LMDLLGLERAA; MDLLGLERAAW; DLLGLERAAWG;
LLGLERAAWGN; LGLERAAWGNL; GLERAAWGNLP; LERAAWGNLPL; ERAAWGNLPLM;
RAAWGNLPLMR; AAWGNLPLMRK; AWGNLPLMRKA; WGNLPLMRKAY; GNLPLMRKAYL;
NLPLMRKAYLR; LPLMRKAYLRK; PLMRKAYLRKC; LMRKAYLRKCK; MRKAYLRKCKE;
RKAYLRKCKEF; KAYLRKCKEFH; AYLRKCKEFHP; YLRKCKEFHPD; LRKCKEFHPDK; RKCKEFHPDKG;
KCKEFHPDKGG; CKEFHPDKGGD; KEFHPDKGGDE; EFHPDKGGDED; FHPDKGGDEDK;
HPDKGGDEDKM; PDKGGDEDKMK; DKGGDEDKMKR; KGGDEDKMKRM; GGDEDKMKRMN;
GDEDKMKRMNT; DEDKMKRMNTL; EDKMKRMNTLY; DKMKRMNTLYK; KMKRMNTLYKK;
MKRMNTLYKKM; KRMNTLYKKME; RMNTLYKKMEQ; MNTLYKKMEQD; NTLYKKMEQDV;
TLYKKMEQDVK; LYKKMEQDVKV; YKKMEQDVKVA; KKMEQDVKVAH; KMEQDVKVAHQ;
MEQDVKVAHQP; EQDVKVAHQPD; QDVKVAHQPDF; DVKVAHQPDFG; VKVAHQPDFGT;
KVAHQPDFGTW; VAHQPDFGTWS; AHQPDFGTWSS; HQPDFGTWSSS; QPDFGTWSSSE; PDFGTWSSSEV;
DFGTWSSSEVC; FGTWSSSEVCA; GTWSSSEVCAD; TWSSSEVCADF; WSSSEVCADFP; SSSEVCADFPL;
SSEVCADFPLC; SEVCADFPLCP; EVCADFPLCPD; VCADFPLCPDT; CADFPLCPDTL; ADFPLCPDTLY;
DFPLCPDTLYC; FPLCPDTLYCK; PLCPDTLYCKE; LCPDTLYCKEW; CPDTLYCKEWP; PDTLYCKEWPI;
DTLYCKEWPIC; TLYCKEWPICS; LYCKEWPICSK; YCKEWPICSKK; CKEWPICSKKP; KEWPICSKKPS;
EWPICSKKPSV; WPICSKKPSVH; PICSKKPSVHC; ICSKKPSVHCP; CSKKPSVHCPC; SKKPSVHCPCM;
KKPSVHCPCML; KPSVHCPCMLC; PSVHCPCMLCQ; SVHCPCMLCQL; VHCPCMLCQLR;
HCPCMLCQLRL; CPCMLCQLRLR; PCMLCQLRLRH; CMLCQLRLRHL; MLCQLRLRHLN;
LCQLRLRHLNR; CQLRLRHLNRK; QLRLRHLNRKF; LRLRHLNRKFL; RLRHLNRKFLR; LRHLNRKFLRK;
RHLNRKFLRKE; HLNRKFLRKEP; LNRKFLRKEPL; NRKFLRKEPLV; RKFLRKEPLVW; KFLRKEPLVWI;
FLRKEPLVWID; LRKEPLVWIDC; RKEPLVWIDCY; KEPLVWIDCYC; EPLVWIDCYCI; PLVWIDCYCID;
LVWIDCYCIDC; VWIDCYCIDCF; WIDCYCIDCFT; IDCYCIDCFTQ; DCYCIDCFTQW; CYCIDCFTQWF;
YCIDCFTQWFG; CIDCFTQWFGL; IDCFTQWFGLD; DCFTQWFGLDL; CFTQWFGLDLT; FTQWFGLDLTE;
TQWFGLDLTEE; QWFGLDLTEET; WFGLDLTEETL; FGLDLTEETLQ; GLDLTEETLQW; LDLTEETLQWW;
DLTEETLQWWV; LTEETLQWWVQ; TEETLQWWVQI; EETLQWWVQII; ETLQWWVQIIG;
TLQWWVQIIGE; LQWWVQIIGET; QWWVQIIGETP; WWVQIIGETPF; WVQIIGETPFR; VQIIGETPFRD;
QIIGETPFRDL; IIGETPFRDLK; IGETPFRDLKL; KALSNYFFYRC; ALSNYFFYRCQ; LSNYFFYRCQP;
SNYFFYRCQPM; NYFFYRCQPME; YFFYRCQPMEQ; FFYRCQPMEQK; FYRCQPMEQKS;
YRCQPMEQKSG; RCQPMEQKSGS; CQPMEQKSGSP; QPMEQKSGSPG; PMEQKSGSPGG;
MEQKSGSPGGV; EQKSGSPGGVP; QKSGSPGGVPL; KSGSPGGVPLM; SGSPGGVPLMK; GSPGGVPLMKN;
SPGGVPLMKNG; PGGVPLMKNGM; GGVPLMKNGMK; GVPLMKNGMKI; VPLMKNGMKIY;
PLMKNGMKIYF; LMKNGMKIYFA; MKNGMKIYFAM; KNGMKIYFAMK; NGMKIYFAMKI;
GMKIYFAMKIC; MKIYFAMKICL; KIYFAMKICLP; IYFAMKICLPV; YFAMKICLPVM; FAMKICLPVMK;
AMKICLPVMKK; MKICLPVMKKQ; KICLPVMKKQQ; ICLPVMKKQQQ; CLPVMKKQQQI;
LPVMKKQQQIL; PVMKKQQQILN; VMKKQQQILNT; MKKQQQILNTQ; KKQQQILNTQH;
KQQQILNTQHH; QQQILNTQHHP; QQILNTQHHPK; QILNTQHHPKK; ILNTQHHPKKK; LNTQHHPKKKE;
NTQHHPKKKER; KTLKTFPLIYT; TLKTFPLIYTS; LKTFPLIYTSF; KTFPLIYTSFL; TFPLIYTSFLV;
FPLIYTSFLVK; PLIYTSFLVKL; LIYTSFLVKLY; IYTSFLVKLYL; YTSFLVKLYLV; TSFLVKLYLVI;
SFLVKLYLVIE; FLVKLYLVIEP; LVKLYLVIEPL; VKLYLVIEPLP; KLYLVIEPLPA; LYLVIEPLPAL;
YLVIEPLPALL; LVIEPLPALLC; VIEPLPALLCI; IEPLPALLCIL; EPLPALLCILL; PLPALLCILLK;
LPALLCILLKK; PALLCILLKKK; ALLCILLKKKL; LLCILLKKKLK; LCILLKKKLKF; CILLKKKLKFC;
ILLKKKLKFCI; LLKKKLKFCIK; LKKKLKFCIKN; KKKLKFCIKNL; KKLKFCIKNLW; KLKFCIKNLWK;
LKFCIKNLWKN; KFCIKNLWKNI; FCIKNLWKNIL; LLLVDTCVLGI; LLVDTCVLGII; LVDTCVLGIIL;
VDTCVLGIILY; DTCVLGIILYS; TCVLGIILYSF; LHIDIEFLQLI; HIDIEFLQLII; IDIEFLQLIIS; DIEFLQLIISV;
IEFLQLIISVK; EFLQLIISVKS; FLQLIISVKSC; LQLIISVKSCV; QLIISVKSCVP; LIISVKSCVPL;
IISVKSCVPLV; ISVKSCVPLVF; FVRVLIRNTYY; VRVLIRNTYYI; RVLIRNTYYIV; VLIRNTYYIVP;
RSMILAQKSLK; SMILAQKSLKK; MILAQKSLKKQ; ILAQKSLKKQS; LAQKSLKKQSR; AQKSLKKQSRC;
QKSLKKQSRCL; KSLKKQSRCLG; SLKKQSRCLGN; RSVKSVRKKTS; SVKSVRKKTSL; VKSVRKKTSLI;
KSVRKKTSLIT; SVRKKTSLITL; VRKKTSLITLS; RKKTSLITLSI; KKTSLITLSIM; KTSLITLSIMK;
TSLITLSIMKS; SLITLSIMKST; LITLSIMKSTL; ITLSIMKSTLQ; TLSIMKSTLQM; LSIMKSTLQML;
SIMKSTLQMLL; IMKSTLQMLLF; MKSTLQMLLFL; KSTLQMLLFLQ; STLQMLLFLQK; TLQMLLFLQKV;
LQMLLFLQKVK; QMLLFLQKVKI; MLLFLQKVKIK; LLFLQKVKIKK; LFLQKVKIKKV; FLQKVKIKKVF;
LQKVKIKKVFV; QKVKIKKVFVS; KVKIKKVFVSK; VKIKKVFVSKQ; NNIWQVLLGCT; NIWQVLLGCTV;
IWQVLLGCTVC; WQVLLGCTVCY; QVLLGCTVCYL; VLLGCTVCYLK; LLGCTVCYLKW;
LGCTVCYLKWI; GCTVCYLKWIL; YLIFCTVLFSM; LIFCTVLFSMY; IFCTVLFSMYL; FCTVLFSMYLK;
CTVLFSMYLKE; TVLFSMYLKED; VLFSMYLKEDT; LFSMYLKEDTG; FSMYLKEDTGY; SMYLKEDTGYL;
MYLKEDTGYLK; YLKEDTGYLKV; LKEDTGYLKVP; KEDTGYLKVPL; EDTGYLKVPLI; DTGYLKVPLIV;
TGYLKVPLIVE; GYLKVPLIVEK; YLKVPLIVEKQ; LKVPLIVEKQH; KGQELNQRICL; GQELNQRICLQ;
QELNQRICLQD; ELNQRICLQDM; LNQRICLQDME; TKEPKYFHQAW; KEPKYFHQAWL;
EPKYFHQAWLQ; MSILSLKPCKL; SILSLKPCKLD; ILSLKPCKLDL; ENPYKTQSSYL; NPYKTQSSYLK;
PYKTQSSYLKK; YKTQSSYLKKE; KTQSSYLKKEF; TQSSYLKKEFY; QSSYLKKEFYK; SSYLKKEFYKV;
SYLKKEFYKVE; LILQLIYNLEL; ILQLIYNLELL; LQLIYNLELLN; QLIYNLELLNG; LIYNLELLNGR;
IYNLELLNGRK; YNLELLNGRKG; NLELLNGRKGW; LELLNGRKGWI; ELLNGRKGWIL; LLNGRKGWILR;
NIIYAWGNVFL; IIYAWGNVFLI; IYAWGNVFLIL; YAWGNVFLILQ; AWGNVFLILQE; WGNVFLILQEK;
GNVFLILQEKR; NVFLILQEKRI; VFLILQEKRIQ; FLILQEKRIQK; LILQEKRIQKL; ILQEKRIQKLK;
LQEKRIQKLKT; QEKRIQKLKTL; EKRIQKLKTLD; KRIQKLKTLDM; RIQKLKTLDMD; IQKLKTLDMDQ;
QKLKTLDMDQA; KLKTLDMDQAL; LKTLDMDQALN; KTLDMDQALNP; TLDMDQALNPN;
LDMDQALNPNH; DMDQALNPNHN; MDQALNPNHNA; DQALNPNHNAL; QALNPNHNALP;
ALNPNHNALPK; LNPNHNALPKS; NPNHNALPKSQ; PNHNALPKSQI; NHNALPKSQIL; HNALPKSQILQ;
NALPKSQILQP; ALPKSQILQPL; LPKSQILQPLL; PKSQILQPLLK; KSQILQPLLKI; SQILQPLLKIP;
QILQPLLKIPK; ILQPLLKIPKG; LQPLLKIPKGQ; QPLLKIPKGQT; PLLKIPKGQTP; LLKIPKGQTPI;
LKIPKGQTPIV; KIPKGQTPIVK; IPKGQTPIVKS; PKGQTPIVKSC; KGQTPIVKSCI; GQTPIVKSCIC;
QTPIVKSCICV; TPIVKSCICVK; PIVKSCICVKA; IVKSCICVKAF; VKSCICVKAFS; KSCICVKAFSV;
SCICVKAFSVL; CICVKAFSVLK; ICVKAFSVLKG; CVKAFSVLKGL; VKAFSVLKGLK; KAFSVLKGLKH;
AFSVLKGLKHH; FSVLKGLKHHP; SVLKGLKHHPQ; VLKGLKHHPQN; LKGLKHHPQNN;
KGLKHHPQNNT; GLKHHPQNNTS; LKHHPQNNTSL; KHHPQNNTSLK; HHPQNNTSLKV;
HPQNNTSLKVA; PQNNTSLKVAY; QNNTSLKVAYT; NNTSLKVAYTK; NTSLKVAYTKA;
TSLKVAYTKAA; SLKVAYTKAAF; LKVAYTKAAFI; KVAYTKAAFIK; VAYTKAAFIKC; AYTKAAFIKCI;
YTKAAFIKCIC; TKAAFIKCICT; KAAFIKCICTI; AAFIKCICTIK; AFIKCICTIKA; FIKCICTIKAP;
IKCICTIKAPV; SILVCNCPCLS; ILVCNCPCLSI; LVCNCPCLSIY; VCNCPCLSIYL; CNCPCLSIYLI;
NCPCLSIYLII; CPCLSIYLIIS; PCLSIYLIISG; CLSIYLIISGS; LSIYLIISGSP; SIYLIISGSPG; IYLIISGSPGS;
YLIISGSPGSL; LIISGSPGSLS; IISGSPGSLSV; ISGSPGSLSVP; SGSPGSLSVPS; GSPGSLSVPSN;
SPGSLSVPSNT; PGSLSVPSNTL; GSLSVPSNTLT; SLSVPSNTLTS; LSVPSNTLTSS; SVPSNTLTSST;
VPSNTLTSSTW; PSNTLTSSTWD; SNTLTSSTWDS; NTLTSSTWDSI; TLTSSTWDSIP; LTSSTWDSIPY;
TSSTWDSIPYI; SSTWDSIPYIG; STWDSIPYIGC; TWDSIPYIGCP; WDSIPYIGCPS; DSIPYIGCPST;
SIPYIGCPSTL; IPYIGCPSTLW; PYIGCPSTLWV; YIGCPSTLWVL; IGCPSTLWVLL; GCPSTLWVLLF;
CPSTLWVLLFI; PSTLWVLLFIR; STLWVLLFIRS; TLWVLLFIRSL; LWVLLFIRSLS; WVLLFIRSLSK;
VLLFIRSLSKK; LLFIRSLSKKE; LFIRSLSKKEI; FIRSLSKKEIG; GFFTDLFLRRI; FFTDLFLRRIL;
FTDLFLRRILK; TDLFLRRILKY; DLFLRRILKYL; LFLRRILKYLA; FLRRILKYLAR; LRRILKYLARP;
RRILKYLARPL; RILKYLARPLH; ILKYLARPLHC; LKYLARPLHCC; KYLARPLHCCV; YLARPLHCCVP;
LARPLHCCVPE; ARPLHCCVPEL; RPLHCCVPELL; PLHCCVPELLV; LHCCVPELLVN; HCCVPELLVNR;
CCVPELLVNRP; CVPELLVNRPQ; VPELLVNRPQI; PELLVNRPQIS; ELLVNRPQISA; LLVNRPQISAA;
LVNRPQISAAE; VNRPQISAAET; NRPQISAAETY; RPQISAAETYR; PQISAAETYRL; QISAAETYRLS;
ISAAETYRLSA; SAAETYRLSAL; AAETYRLSALQ; AETYRLSALQR; ETYRLSALQRG; TYRLSALQRGP;
YRLSALQRGPT; RLSALQRGPTP; LSALQRGPTPC; SALQRGPTPCS; ALQRGPTPCSS; LQRGPTPCSSS;
QRGPTPCSSSN; RGPTPCSSSNT; GPTPCSSSNTV; PTPCSSSNTVV; TPCSSSNTVVA; PCSSSNTVVAV;
CSSSNTVVAVL; SSSNTVVAVLV; SSNTVVAVLVT; STGGTFSPPVK; TGGTFSPPVKV; GGTFSPPVKVP;
GTFSPPVKVPK; TFSPPVKVPKY; FSPPVKVPKYL; SPPVKVPKYLA; PPVKVPKYLAF; PVKVPKYLAFS;
VKVPKYLAFSF; KVPKYLAFSFL; VPKYLAFSFLL; PKYLAFSFLLG; KYLAFSFLLGS; YLAFSFLLGSG;
LAFSFLLGSGT; AFSFLLGSGTQ; FSFLLGSGTQH; SFLLGSGTQHS; FLLGSGTQHST; LLGSGTQHSTG;
ALWSVFITWDW; LWSVFITWDWA; WSVFITWDWAV; SVFITWDWAVG; VFITWDWAVGF;
FITWDWAVGFL; ITWDWAVGFLG; TWDWAVGFLGV; WDWAVGFLGVI; DWAVGFLGVIV;
WAVGFLGVIVP; AVGFLGVIVPS; VGFLGVIVPSG; GFLGVIVPSGY; FLGVIVPSGYF; LGVIVPSGYFD;
GVIVPSGYFDL; FISTPCISKGS; ISTPCISKGSP; STPCISKGSPP; TPCISKGSPPT; PCISKGSPPTA;
CISKGSPPTAK; ISKGSPPTAKK; SKGSPPTAKKW; KGSPPTAKKWK; GSPPTAKKWKL; SPPTAKKWKLL;
PPTAKKWKLLP; IGFPPPCSCTF; GFPPPCSCTFC; FPPPCSCTFCD; PPPCSCTFCDP; PPCSCTFCDPA;
RLSMLVIPITS; LSMLVIPITSV; SMLVIPITSVC; MLVIPITSVCT; LVIPITSVCTV; VIPITSVCTVT;
IPITSVCTVTA; PITSVCTVTAS; ITSVCTVTASH; TSVCTVTASHI; SVCTVTASHIS; VCTVTASHISR;
CTVTASHISRF; TVTASHISRFP; VTASHISRFPQ; TASHISRFPQV; ASHISRFPQVR; SHISRFPQVRS;
HISRFPQVRSS; ISRFPQVRSSF; SRFPQVRSSFK; RFPQVRSSFKL; FPQVRSSFKLG; PQVRSSFKLGR;
QVRSSFKLGRG; VRSSFKLGRGI; RSSFKLGRGIL; SSFKLGRGILA; SFKLGRGILAV; FKLGRGILAVL;
QGSIFLSGLSL; GSIFLSGLSLL; SIFLSGLSLLK; IFLSGLSLLKS; FLSGLSLLKSF; LSGLSLLKSFS;
SGLSLLKSFSA; GLSLLKSFSAL; LSLLKSFSALS; SLLKSFSALSF; LLKSFSALSFR; LKSFSALSFRL;
KSFSALSFRLK; SFSALSFRLKP; FSALSFRLKPL; SALSFRLKPLR; ALSFRLKPLRF; LSFRLKPLRFS;
SFRLKPLRFSS; FRLKPLRFSSG; RLKPLRFSSGS; LKPLRFSSGSP; KPLRFSSGSPI; PLRFSSGSPIS;
LRFSSGSPISG; RFSSGSPISGF; FSSGSPISGFR; SSGSPISGFRK; SGSPISGFRKH; GSPISGFRKHS;
SPISGFRKHST; PISGFRKHSTS; ISGFRKHSTSV; SGFRKHSTSVI; GFRKHSTSVIA; FRKHSTSVIAS;
RKHSTSVIAST; KHSTSVIASTP; HSTSVIASTPV; STSVIASTPVL; TSVIASTPVLT; SVIASTPVLTS;
VIASTPVLTSR; IASTPVLTSRT; ASTPVLTSRTS; STPVLTSRTST; TPVLTSRTSTP; PVLTSRTSTPP;
VLTSRTSTPPF; LTSRTSTPPFI; TSRTSTPPFIS; SRTSTPPFISS; RTSTPPFISSF; TSTPPFISSFG; STPPFISSFGT;
TPPFISSFGTC; PPFISSFGTCT; PFISSFGTCTG; FISSFGTCTGS; ISSFGTCTGSF; SSFGTCTGSFG;
SFGTCTGSFGF; FGTCTGSFGFL; GTCTGSFGFLG; TCTGSFGFLGA; CTGSFGFLGAA; TGSFGFLGAAP;
GSFGFLGAAPG; SFGFLGAAPGH; FGFLGAAPGHS; GFLGAAPGHSP; FLGAAPGHSPF; LGAAPGHSPFL;
GAAPGHSPFLL; AAPGHSPFLLV; APGHSPFLLVG; PGHSPFLLVGA; GHSPFLLVGAI; HSPFLLVGAIF;
SPFLLVGAIFI; PFLLVGAIFIC; FLLVGAIFICF; LLVGAIFICFK; LVGAIFICFKS; VGAIFICFKSR;
GAIFICFKSRC; AIFICFKSRCY; IFICFKSRCYS; FICFKSRCYSP; ICFKSRCYSPV; CFKSRCYSPVQ;
FKSRCYSPVQA; RQHPLRSSSLI; QHPLRSSSLIS; HPLRSSSLIST; PLRSSSLISTS; LRSSSLISTSW;
RSSSLISTSWG; SSSLISTSWGN; SSLISTSWGNS; SLISTSWGNSF; LISTSWGNSFF; ISTSWGNSFFY;
STSWGNSFFYK; TSWGNSFFYKL; SWGNSFFYKLS; VHSLCNFFYTV; HSLCNFFYTVS; SLCNFFYTVSI;
LCNFFYTVSII; CNFFYTVSIIY; NFFYTVSIIYT; FFYTVSIIYTI; FYTVSIIYTIS; YTVSIIYTISM;
TVSIIYTISMA; VSIIYTISMAK; SIIYTISMAKM; IIYTISMAKMY; IYTISMAKMYT; YTISMAKMYTG;
TISMAKMYTGT; ISMAKMYTGTF; SMAKMYTGTFP; MAKMYTGTFPF; AKMYTGTFPFS;
KMYTGTFPFSY; MYTGTFPFSYL; YTGTFPFSYLS; TGTFPFSYLSN; GTFPFSYLSNH; GPNRGKIRIIL;
PNRGKIRIILL; NRGKIRIILLN; RGKIRIILLNI; GKIRIILLNII; KIRIILLNIII; IRIILLNIIIK; RIILLNIIIKV;
IILLNIIIKVY; ILLNIIIKVYR; LLNIIIKVYRG; LNIIIKVYRGI; NIIIKVYRGIY; IIIKVYRGIYN;
IIKVYRGIYNC; IKVYRGIYNCP; KVYRGIYNCPG; VYRGIYNCPGS; YRGIYNCPGSF; RGIYNCPGSFL;
GIYNCPGSFLQ; IYNCPGSFLQK; YNCPGSFLQKS; NCPGSFLQKSS; CPGSFLQKSSQ; PGSFLQKSSQG;
GSFLQKSSQGV; SFLQKSSQGVS; FLQKSSQGVSK; LQKSSQGVSKK; QKSSQGVSKKS; KSSQGVSKKSF;
SSQGVSKKSFC; SQGVSKKSFCS; QGVSKKSFCSS; GVSKKSFCSSL; VSKKSFCSSLQ; SKKSFCSSLQF;
KKSFCSSLQFL; GYRRYIIPNNM; YRRYIIPNNMP; RRYIIPNNMPQ; RYIIPNNMPQS; YIIPNNMPQSL;
IIPNNMPQSLG; IPNNMPQSLGN; PNNMPQSLGNS; NNMPQSLGNSS; NMPQSLGNSSK; MPQSLGNSSKQ;
PQSLGNSSKQR; QSLGNSSKQRR; SLGNSSKQRRT; LGNSSKQRRTP; GNSSKQRRTPM; NSSKQRRTPMP;
SSKQRRTPMPR; SKQRRTPMPRI; KQRRTPMPRIK; QRRTPMPRIKV; RRTPMPRIKVL; RTPMPRIKVLN;
TPMPRIKVLNI; PMPRIKVLNII; MPRIKVLNIIN; PRIKVLNIINK; RIKVLNIINKS; IKVLNIINKSI;
KVLNIINKSIY; VLNIINKSIYT; LNIINKSIYTR; NIINKSIYTRK; IINKSIYTRKQ; INKSIYTRKQN;
NKSIYTRKQNI; KSIYTRKQNII; SIYTRKQNIIV; IYTRKQNIIVL; YTRKQNIIVLI; TRKQNIIVLIW;
RKQNIIVLIWV; KQNIIVLIWVK; QNIIVLIWVKQ; NIIVLIWVKQF; IIVLIWVKQFQ; IVLIWVKQFQS;
VLIWVKQFQSH; LIWVKQFQSHA; LLIEAYSGNFV; LIEAYSGNFVI; IEAYSGNFVIP; EAYSGNFVIPI;
AYSGNFVIPII; YSGNFVIPIIK; SGNFVIPIIKE; GNFVIPIIKEL; NFVIPIIKELI; FVIPIIKELIP; VIPIIKELIPY;
IPIIKELIPYL; PIIKELIPYLS; SSKPSNSPRST; SKPSNSPRSTS; KPSNSPRSTSN; PSNSPRSTSNY;
SNSPRSTSNYS; NSPRSTSNYSI; SPRSTSNYSIC; PRSTSNYSICL; RSTSNYSICLR; STSNYSICLRS;
GTCYALYSSKG; TCYALYSSKGC; CYALYSSKGCN; YALYSSKGCNL; ALYSSKGCNLN; LYSSKGCNLNF;
YSSKGCNLNFY; SSKGCNLNFYS; SKGCNLNFYSS; KGCNLNFYSSS; GCNLNFYSSSS; CNLNFYSSSSL;
NLNFYSSSSLP; LNFYSSSSLPS; NFYSSSSLPSS; FYSSSSLPSSN; YSSSSLPSSNF; SSSSLPSSNFS;
SSSLPSSNFSH; KSCGSSSLRYT; SCGSSSLRYTG; CGSSSLRYTGN; SSTHEPGNTKK; STHEPGNTKKK;
THEPGNTKKKG; HEPGNTKKKGL; EPGNTKKKGLL; PGNTKKKGLLT; ESFTESFTAGK; SFTESFTAGKA;
FTESFTAGKAV; TESFTAGKAVV; ESFTAGKAVVL; SFTAGKAVVLL; FTAGKAVVLLF; TAGKAVVLLFF;
AGKAVVLLFFP; GKAVVLLFFPS; KAVVLLFFPST; AVVLLFFPSTL; VVLLFFPSTLS; VLLFFPSTLSS;
LLFFPSTLSSP; LFFPSTLSSPL; FFPSTLSSPLQ; FPSTLSSPLQN; PSTLSSPLQNS; STLSSPLQNSS;
TLSSPLQNSSK; LSSPLQNSSKS; SSPLQNSSKSS; SPLQNSSKSSK; PLQNSSKSSKI; LQNSSKSSKIK;
QNSSKSSKIKI; NSSKSSKIKIK; SSKSSKIKIKI; SKSSKIKIKIL; ALFFVPVQVLP; LFFVPVQVLPT;
FFVPVQVLPTF; FVPVQVLPTFT; VPVQVLPTFTE; PVQVLPTFTEA; VQVLPTFTEAC; QVLPTFTEACR;
VLPTFTEACRD; LPTFTEACRDS; PTFTEACRDSW; TFTEACRDSWR; FTEACRDSWRR; TEACRDSWRRT;
EACRDSWRRTM; ACRDSWRRTMA; CRDSWRRTMAF; RDSWRRTMAFV; DSWRRTMAFVQ;
SWRRTMAFVQF; WRRTMAFVQFN; RRTMAFVQFNW; RTMAFVQFNWG; TMAFVQFNWGQ;
MAFVQFNWGQG; AFVQFNWGQGQ; FVQFNWGQGQD; VQFNWGQGQDS; ARKTCLSCTFL;
RKTCLSCTFLP; KTCLSCTFLPE; TCLSCTFLPEV; CLSCTFLPEVM; LSCTFLPEVMV; SCTFLPEVMVW;
CTFLPEVMVWL; TFLPEVMVWLH; FLPEVMVWLHS; LPEVMVWLHSM; PEVMVWLHSMG;
EVMVWLHSMGK; VMVWLHSMGKQ; MVWLHSMGKQL; VWLHSMGKQLL; WLHSMGKQLLP;
LHSMGKQLLPV; HSMGKQLLPVS; SMGKQLLPVSH; MGKQLLPVSHA; GKQLLPVSHAL; KQLLPVSHALS;
QLLPVSHALSF; LLPVSHALSFL; LPVSHALSFLR; PVSHALSFLRS; VSHALSFLRSW; SHALSFLRSWF;
HALSFLRSWFG; ALSFLRSWFGC; LSFLRSWFGCI; SFLRSWFGCIP; FLRSWFGCIPL; AAPPCGLFFYN;
APPCGLFFYNI; EAEAASASTLS; AEAASASTLSL; EAASASTLSLK; GLAKLFGEIPI; LAKLFGEIPIL;
AKLFGEIPILL; KLFGEIPILLQ; LFGEIPILLQF; FGEIPILLQFL; GEIPILLQFLQ

BK virus complementary reading frame 2
8 mers:

WIKFLTGK; IKFLTGKN; KFLTGKNP; FLTGKNPW; LTGKNPWS; TGKNPWSS; GKNPWSSW; KNPWSSWT;
NPWSSWTF; ALKELPGE; LKELPGEI; KELPGEIF; ELPGEIFP; GSVRNFTL; SVRNFTLT; VRNFTLTK;
RNFTLTKG; NFTLTKGA; FTLTKGAT; TLTKGATR; LTKGATRI; TKGATRIK; ILCIKKWS; LCIKKWSR;
CIKKWSRM; LISLILEP; ISLILEPG; SLILEPGV; LILEPGVA; ILEPGVAQ; LEPGVAQR; EPGVAQRF;
PGVAQRFV; GVAQRFVL; VAQRFVLI; AQRFVLIF; QRFVLIFL; RFVLIFLF; FVLIFLFA; VLIFLFAQ;
LIFLFAQI; IFLFAQIP; FLFAQIPC; LFAQIPCT; FAQIPCTA; AQIPCTAR; QIPCTARN; IPCTARNG;
PCTARNGL; CTARNGLF; TARNGLFV; ARNGLFVP; RNGLFVPK; NGLFVPKS; GLFVPKSL; LFVPKSLL;
FVPKSLLC; VPKSLLCT; PKSLLCTA; KSLLCTAL; SLLCTALA; LLCTALAC; LCTALACY; CTALACYV;
TALACYVS; ALACYVSL; LACYVSLD; IATALTAS; ATALTASH; TALTASHS; ALTASHSG; LTASHSGL;
TASHSGLA; LKKLCNGG; KKLCNGGS; KLCNGGSK; LEKLPSEI; SFKVTNLY; FKVTNLYL; KVTNLYLD;
VTNLYLDK; VIIFFIGA; IIFFIGAN; IFFIGANL; FFIGANLW; FIGANLWN; IGANLWNR; GANLWNRR;
ANLWNRRV; NLWNRRVG; LWNRRVGV; WNRRVGVL; NRRVGVLV; RRVGVLVE; RVGVLVEF;
VGVLVEFL; RSNSRFST; SNSRFSTL; NSRFSTLN; SRFSTLNT; RFSTLNTT; FSTLNTTQ; STLNTTQK;
TLNTTQKK; LNTTQKKK; NTTQKKKK; TTQKKKKG; TQKKKKGR; QKKKKGRR; KKKKGRRP;
NPCLLCCV; PCLLCCVY; CLLCCVYY; KTYGKIFC; TYGKIFCN; YGKIFCNF; GKIFCNFY; YYILFNST;
FLSKAVYL; RSIPYYRR; SIPYYRRK; IPYYRRKH; PYYRRKHS; YYRRKHSR; YRRKHSRG; RRKHSRGL;
RKHSRGLK; KHSRGLKG; HSRGLKGA; RNKAGVLE; NKAGVLEI; KAGVLEIN; AGVLEINY; GCVFIIRY;
CVFIIRYV; VFIIRYVF; FIIRYVFR; IIRYVFRI; IRYVFRIS; RYVFRISI; YVFRISIQ; VFRISIQC; FRISIQCR;
RISIQCRG; ISIQCRGV; KVSEKRPA; VSEKRPAL; SEKRPALS; EKRPALSL; KALCKCYY; ALCKCYYF;
LCKCYYFC; CKCYYFCR; KCYYFCRK; KSKKYLSA; SKKYLSAS; KKYLSASS; KYLSASSR; YLSASSRY;
LSASSRYS; SASSRYSF; ASSRYSFS; KKSRYPSY; KSRYPSYD; SRYPSYDQ; RYPSYDQG; YPSYDQGR;
PSYDQGRN; SYDQGRNA; YDQGRNAN; DQGRNANR; QGRNANRK; GRNANRKI; RNANRKIQ;
NANRKIQS; ANRKIQSY; NRKIQSYI; RKIQSYIR; NGFNIWSS; GFNIWSSW; FNIWSSWK; NIWSSWKC;
IWSSWKCC; WSSWKCCT; SSWKCCTR; SWKCCTRT; WKCCTRTI; KCCTRTIY; CCTRTIYG; CTRTIYGR;
TRTIYGRC; RTIYGRCC; TIYGRCCL; IYGRCCLA; YGRCCLAA; GRCCLAAL; RCCLAALF; CCLAALFA;
CLAALFAT; FFALYCFQ; FALYCFQC; ALYCFQCT; WKNNTSCR; KNNTSCRV; NNTSCRVI; NTSCRVIR;
TSCRVIRF; SCRVIRFV; CRVIRFVW; RVIRFVWW; SLKCKPTH; LKCKPTHG; KCKPTHGK; CKPTHGKA;
KPTHGKAN; PTHGKANL; ARCSYRSV; RCSYRSVH; CSYRSVHG; SYRSVHGC; YRSVHGCF; IKGFAFRT;
KGFAFRTW; GFAFRTWN; FAFRTWNK; AFRTWNKQ; FRTWNKQF; RTWNKQFR; TWNKQFRQ;
WNKQFRQF; NKQFRQFE; KQFRQFER; QFRQFERL; FRQFERLF; RQFERLFR; QFERLFRW; FERLFRWK;
ERLFRWKC; GKFRKETF; KFRKETFK; FRKETFKQ; RKETFKQK; KETFKQKN; ETFKQKNP; TFKQKNPN;
FKQKNPNI; KQKNPNIS; QKNPNIST; KNPNISTR; NPNISTRL; PNISTRLG; NISTRLGY; ISTRLGYN;
STRLGYNE; AQNIFKKI; QNIFKKIL; NIFKKILT; IFKKILTK; FKKILTKL; KKILTKLR; KILTKLRV;
ILTKLRVL; LTKLRVLT; KKNFTKWN; KNFTKWND; NFTKWNDL; FTKWNDLV; TKWNDLVA;
KWNDLVAT; WNDLVATA; NDLVATAN; DLVATANL; LVATANLV; DKYVYFFK; KYVYFFKD;
YVYFFKDE; VYFFKDEI; YMHGEMYS; YYKRRGFR; YKRRGFRN; RLWTWIKH; IPITMLFP; PITMLFPS;
ITMLFPSL; TMLFPSLR; MLFPSLRY; LFPSLRYF; FPSLRYFS; PSLRYFSP; SLRYFSPC; RFPKVRPP;
NTTPKITQ; TTPKITQA; KWLIQKQH; WLIQKQHL; LIQKQHLL; IQKQHLLN; QKQHLLNV; KQHLLNVY;
QHLLNVYV; HLLNVYVQ; KHLFKAFW; HLFKAFWF; LFKAFWFA; FKAFWFAI; KAFWFAIV; AFWFAIVP;
FWFAIVPV; WFAIVPVC; FAIVPVCQ; AIVPVCQY; IVPVCQYI; VPVCQYIL; PVCQYILS; VCQYILSY;
CQYILSYL; QYILSYLG; YILSYLGP; ILSYLGPL; LSYLGPLE; SYLGPLEV; YLGPLEVF; LGPLEVFL;
GPLEVFLC; PLEVFLCH; LEVFLCHQ; EVFLCHQT; VFLCHQTP; PLLPGIPY; LLPGIPYH; LPGIPYHT;
AAHPLSGF; AHPLSGFS; HPLSGFSC; PLSGFSCL; GHLAKRKL; HLAKRKLG; LAKRKLGK; AKRKLGKD;
KRKLGKDS; RKLGKDSL; KLGKDSLQ; LGKDSLQI; GKDSLQIF; KDSLQIFF; DSLQIFFS; SLQIFFSG;
LQIFFSGG; QIFFSGGS; NILQGLST; ILQGLSTV; LQGLSTVV; QGLSTVVF; GLSTVVFQ; LSTVVFQS;
STVVFQSC; TGHKYQQL; GHKYQQLK; HKYQQLKH; KYQQLKHT; YQQLKHTG; QQLKHTGY;
QLKHTGYQ; LKHTGYQL; KHTGYQLY; HTGYQLYK; TGYQLYKE; GYQLYKEA; YQLYKEAP;
QLYKEAPH; LYKEAPHP; YKEAPHPV; KEAPHPVH; EAPHPVHL; APHPVHLA; PHPVHLAT; HPVHLATL;
PVHLATLW; LCWSHEVL; CWSHEVLG; WSHEVLGE; SHEVLGEH; HEVLGEHF; EVLGEHFP; VLGEHFPL;
LGEHFPLL; HFHFYWDQ; FHFYWDQV; HFYWDQVP; FYWDQVPS; YWDQVPST; WDQVPSTQ;
DQVPSTQL; QVPSTQLD; VPSTQLDK; PSTQLDKH; STQLDKHC; TQLDKHCF; QLDKHCFC; LDKHCFCP;
DKHCFCPN; KHCFCPNR; HCFCPNRP; CFCPNRPY; FCPNRPYG; CPNRPYGQ; PNRPYGQY; NRPYGQYS;
RPYGQYSL; PYGQYSLP; YGQYSLPG; GQYSLPGT; QYSLPGTG; YSLPGTGL; SLPGTGLL; LPGTGLLG;
PGTGLLGF; YHQGTLTC; HQGTLTCN; QGTLTCNS; GTLTCNSL; TLTCNSLA; LTCNSLAL; TCNSLALP;
CNSLALPA; NSLALPAF; SLALPAFP; LALPAFPR; ALPAFPRV; LPAFPRVL; PAFPRVLH; AFPRVLHL;
FPRVLHLQ; PRVLHLQQ; RVLHLQQR; VLHLQQRS; LHLQQRSG; HLQQRSGN; LQQRSGNY; QQRSGNYC;
QRSGNYCL; RSGNYCLE; VFLHHAHA; FLHHAHAL; LHHAHALF; HHAHALFV; HAHALFVT; AHALFVTL;
HALFVTLH; ALFVTLHE; LFVTLHEG; PLFVQLQP; LFVQLQPP; FVQLQPPT; VQLQPPTS; QLQPPTSV;
LQPPTSVD; QPPTSVDF; PPTSVDFH; PTSVDFHR; TSVDFHRL; SVDFHRLG; VDFHRLGP; DFHRLGPH;
FHRLGPHL; HRLGPHLN; RLGPHLNW; LGPHLNWG; GPHLNWGG; PHLNWGGE; HLNWGGEF;
LNWGGEFL; NWGGEFLL; WGGEFLLC; GGEFLLCC; GEFLLCCN; EFLLCCNR; FLLCCNRE; LLCCNREA;
LCCNREAF; CCNREAFF; CNREAFFS; NREAFFSL; REAFFSLG; EAFFSLGY; AFFSLGYH; FFSLGYHC;
SHFQHLAL; HFQHLALD; GFHLDPPF; FHLDPPFL; HLDPPFLG; LDPPFLGL; DPPFLGLG; PPFLGLGS;
PFLGLGSI; FLGLGSIL; LGLGSILP; GLGSILPL; LLELLLLL; LELLLLLL; ELLLLLLL; LLLLLLLV;
LLLLLLVV; LLLLLVVL; LLLLVVLA; LLLVVLAL; LLVVLALA; LVVLALAR; VVLALARV; VLALARVP;
LALARVPL; ALARVPLA; LARVPLAF; ARVPLAFW; RVPLAFWE; VPLAFWEL; PLAFWELP; LAFWELPL;
AFWELPLD; FWELPLDT; WELPLDTL; ELPLDTLL; LPLDTLLF; PLDTLLFF; LDTLLFFW; DTLLFFWL;
TLLFFWLG; LLFFWLGP; LFFWLGPS; FFWLGPSS; FWLGPSSY; WLGPSSYA; LGPSSYAS; GPSSYASR;
PSSYASRA; SSYASRAG; SYASRAGV; YASRAGVT; ASRAGVTV; SRAGVTVP; RAGVTVPY; AGVTVPYR;
GVTVPYRP; VTVPYRPR; TVPYRPRS; VPYRPRSK; PYRPRSKG; YRPRSKGN; RPRSKGNI; PRSKGNIH;
LAPPGAIV; APPGAIVF; PPGAIVFS; PGAIVFSI; GAIVFSIN; AIVFSINS; IVFSINSP; VFSINSPE; FSINSPEC;
SINSPECT; INSPECTL; NSPECTLC; FLKSILCV; LKSILCVT; KSILCVTS; SILCVTSS; ILCVTSSI; LCVTSSIL;
CVTSSILS; VTSSILSA; TSSILSAS; SSILSASS; SILSASSI; ILSASSIL; VWPKCTRV; WPKCTRVP;
PKCTRVPS; KCTRVPSL; CTRVPSLS; TRVPSLSA; RVPSLSAT; VPSLSATC; PSLSATCL; SLSATCLT;
LSATCLTI; SATCLTIE; ATCLTIEG; TCLTIEGL; CLTIEGLI; LTIEGLIG; TIEGLIGE; IEGLIGER; EGLIGERS;
GLIGERSE; KFIGAFTI; FIGAFTIV; IGAFTIVQ; GAFTIVQV; AFTIVQVV; FTIVQVVS; TIVQVVSS;
IVQVVSSK; VQVVSSKN; QVVSSKNL; VVSSKNLA; VSSKNLAK; SSKNLAKE; SKNLAKES; KNLAKESL;
NLAKESLK; LAKESLKN; AKESLKNL; KESLKNLS; ESLKNLSV; SLKNLSVL; LKNLSVLL; KNLSVLLC;
NLSVLLCN; LSVLLCNS; SVLLCNSC; VLLCNSCE; LLCNSCEV; LCNSCEVI; CNSCEVIE; NSCEVIEG;
SCEVIEGI; CEVIEGIS; EVIEGISS; VIEGISSL; IEGISSLI; EGISSLIT; GISSLITC; ISSLITCH; SSLITCHK;
SLITCHKA; LITCHKAW; ITCHKAWE; TCHKAWEI; CHKAWEIV; HKAWEIVA; KAWEIVAN; AWEIVANK;
WEIVANKE; EIVANKEG; IVANKEGP; VANKEGPQ; ANKEGPQC; NKEGPQCL; KEGPQCLG; EGPQCLGS;
GPQCLGSR; PQCLGSRY; ILLTKVFT; LLTKVFTP; LTKVFTPG; TKVFTPGN; KVFTPGNR; VFTPGNRI;
FTPGNRIS; YSSGLNNS; SSGLNNSK; SGLNNSKA; GLNNSKAM; LNNSKAMP; NNSKAMPD; NSKAMPDC;
SQSSKNLY; QSSKNLYP; SSKNLYPT; AKELIPLT; KELIPLTV; IKAANPAI; KAANPAIA; AANPAIAP;
ANPAIAPG; NPAIAPGA; PAIAPGAP; AIAPGAPA; IAPGAPAI; APGAPAIT; PGAPAITA; GAPAITAY;
APAITAYV; GVRPIAAI; VRPIAAIA; RPIAAIAS; PIAAIASE; IAAIASEV; AAIASEVL; AIASEVLV;
IASEVLVM; ASEVLVMP; SEVLVMPS; EVLVMPST; VLVMPSTV; LVMPSTVA; VMPSTVAR; MPSTVARD;
PSTVARDA; STVARDAI; TSIAAAAS; SIAAAASP; IAAAASPA; AAAASPAA; AAASPAAI; AASPAAIS;
ASPAAISA; SPAAISAT; PAAISATE; AAISATEN; AISATENP; ISATENPV; SATENPVA; ATENPVAA;
TENPVAAA; ENPVAAAA; NPVAAAAS; PVAAAASD; VAAAASDT; AAAASDTL; AAASDTLA;
AASDTLAT; ASDTLATR; SDTLATRS; DTLATRSP; TLATRSPK; LATRSPKS; ATRSPKSA; TRSPKSAR;
RSPKSARA; SPKSARAA; PKSARAAP; KSARAAPM; SARAAPMN; ARAAPMNL; RAAPMNLE; AAPMNLEI;
APMNLEIQ; PMNLEIQK; MNLEIQKK; NLEIQKKR; LEIQKKRD; EIQKKRDY; IQKKRDYL; QKKRDYLP;
KKRDYLPR; KRDYLPRS; RDYLPRSL; DYLPRSLL; YLPRSLLQ; LPRSLLQS; PRSLLQSL; RSLLQSLL;
SLLQSLLQ; LLQSLLQQ; LQSLLQQV; QSLLQQVK; SLLQQVKQ; LLQQVKQW; LQQVKQWY;
QQVKQWYF; QVKQWYFC; VKQWYFCF; KQWYFCFS; QWYFCFSR; WYFCFSRL; YFCFSRLH;
FCFSRLHC; CFSRLHCL; FSRLHCLH; SRLHCLHL; RLHCLHLY; LHCLHLYK; HCLHLYKI; CLHLYKIP;
LHLYKIPA; HLYKIPAK; LYKIPAKA; YKIPAKAL; KIPAKALK; KSSELFFL; SSELFFLF; SELFFLFQ;
ELFFLFQS; LFFLFQSR; FFLFQSRF; FLFQSRFY; LFQSRFYQ; FQSRFYQL; QSRFYQLS; SRFYQLSL;
RFYQLSLK; FYQLSLKL; YQLSLKLV; QLSLKLVV; LSLKLVVT; SLKLVVTA; LKLVVTAG; KLVVTAGA;
LVVTAGAE; VVTAGAEP; VTAGAEPW; TAGAEPWP; AGAEPWPL; GAEPWPLS; AEPWPLSS; EPWPLSSL;
PWPLSSLT; WPLSSLTG; PLSSLTGD; LSSLTGDK; SSLTGDKA; SLTGDKAK; LTGDKAKI; TGDKAKIP;
GDKAKIPR; DKAKIPRL; KAKIPRLA; AKIPRLAK; KIPRLAKH; IPRLAKHV; PRLAKHVC; RLAKHVCH;
LAKHVCHA; AKHVCHAL; KHVCHALS; HVCHALSF; VCHALSFL; CHALSFLR; HALSFLRS; ALSFLRSW;
LSFLRSWF; SFLRSWFG; FLRSWFGC; LRSWFGCI; RSWFGCIP; SWFGCIPW; WFGCIPWV; FGCIPWVS;
GCIPWVSS; CIPWVSSS; IPWVSSSS; PWVSSSSL; GHGLAAFP; HGLAAFPC; GLAAFPCE; LAAFPCES;
AAFPCESC; AFPCESCT; FPCESCTF; PCESCTFL; CESCTFLP; ESCTFLPE; SCTFLPEV; CTFLPEVM;
TFLPEVMV; FLPEVMVW; LPEVMVWL; PEVMVWLH; EVMVWLHS; VMVWLHSM; MVWLHSMG;
VWLHSMGK; WLHSMGKQ; LHSMGKQL; HSMGKQLL; SMGKQLLP; MGKQLLPV; GKQLLPVA;
KQLLPVAF; QLLPVAFF; LLPVAFFF; LPVAFFFI; PVAFFFII; VAFFFIIY; AFFFIIYK; FFFIIYKR; FFIIYKRP;
FIIYKRPR; IIYKRPRP; IYKRPRPP; YKRPRPPL; KRPRPPLP; RPRPPLPP; PRPPLPPP; RPPLPPPF; PPLPPPFL;
PLPPPFLS; LPPPFLSS; PPPFLSSS; PPFLSSSK; PFLSSSKG; FLSSSKGV; LSSSKGVE; SSSKGVEA;
SSKGVEAF; SKGVEAFS; KGVEAFSE; GVEAFSEA; QNYLGKSL; NYLGKSLF; YLGKSLFF; LGKSLFFC;
GKSLFFCN; KSLFFCNF; SLFFCNFC; LFFCNFCK

9 mers:

WIKFLTGKN; IKFLTGKNP; KFLTGKNPW; FLTGKNPWS; LTGKNPWSS; TGKNPWSSW; GKNPWSSWT;
KNPWSSWTF; ALKELPGEI; LKELPGEIF; KELPGEIFP; GSVRNFTLT; SVRNFTLTK; VRNFTLTKG;
RNFTLTKGA; NFTLTKGAT; FTLTKGATR; TLTKGATRI; LTKGATRIK; ILCIKKWSR; LCIKKWSRM;
LISLILEPG; ISLILEPGV; SLILEPGVA; LILEPGVAQ; ILEPGVAQR; LEPGVAQRF; EPGVAQRFV;
PGVAQRFVL; GVAQRFVLI; VAQRFVLIF; AQRFVLIFL; QRFVLIFLF; RFVLIFLFA; FVLIFLFAQ;
VLIFLFAQI; LIFLFAQIP; IFLFAQIPC; FLFAQIPCT; LFAQIPCTA; FAQIPCTAR; AQIPCTARN; QIPCTARNG;
IPCTARNGL; PCTARNGLF; CTARNGLFV; TARNGLFVP; ARNGLFVPK; RNGLFVPKS; NGLFVPKSL;
GLFVPKSLL; LFVPKSLLC; FVPKSLLCT; VPKSLLCTA; PKSLLCTAL; KSLLCTALA; SLLCTALAC;
LLCTALACY; LCTALACYV; CTALACYVS; TALACYVSL; ALACYVSLD; IATALTASH; ATALTASHS;
TALTASHSG; ALTASHSGL; LTASHSGLA; LKKLCNGGS; KKLCNGGSK; SFKVTNLYL; FKVTNLYLD;
KVTNLYLDK; VIIFFIGAN; IIFFIGANL; IFFIGANLW; FFIGANLWN; FIGANLWNR; IGANLWNRR;
GANLWNRRV; ANLWNRRVG; NLWNRRVGV; LWNRRVGVL; WNRRVGVLV; NRRVGVLVE;
RRVGVLVEF; RVGVLVEFL; RSNSRFSTL; SNSRFSTLN; NSRFSTLNT; SRFSTLNTT; RFSTLNTTQ;
FSTLNTTQK; STLNTTQKK; TLNTTQKKK; LNTTQKKKK; NTTQKKKKG; TTQKKKKGR; TQKKKKGRR;
QKKKKGRRP; NPCLLCCVY; PCLLCCVYY; KTYGKIFCN; TYGKIFCNF; YGKIFCNFY; RSIPYYRRK;
SIPYYRRKH; IPYYRRKHS; PYYRRKHSR; YYRRKHSRG; YRRKHSRGL; RRKHSRGLK; RKHSRGLKG;
KHSRGLKGA; RNKAGVLEI; NKAGVLEIN; KAGVLEINY; GCVFIIRYV; CVFIIRYVF; VFIIRYVFR;
FIIRYVFRI; IIRYVFRIS; IRYVFRISI; RYVFRISIQ; YVFRISIQC; VFRISIQCR; FRISIQCRG; RISIQCRGV;
KVSEKRPAL; VSEKRPALS; SEKRPALSL; KALCKCYYF; ALCKCYYFC; LCKCYYFCR; CKCYYFCRK;
KSKKYLSAS; SKKYLSASS; KKYLSASSR; KYLSASSRY; YLSASSRYS; LSASSRYSF; SASSRYSFS;
KKSRYPSYD; KSRYPSYDQ; SRYPSYDQG; RYPSYDQGR; YPSYDQGRN; PSYDQGRNA; SYDQGRNAN;
YDQGRNANR; DQGRNANRK; QGRNANRKI; GRNANRKIQ; RNANRKIQS; NANRKIQSY; ANRKIQSYI;
NRKIQSYIR; NGFNIWSSW; GFNIWSSWK; FNIWSSWKC; NIWSSWKCC; IWSSWKCCT; WSSWKCCTR;
SSWKCCTRT; SWKCCTRTI; WKCCTRTIY; KCCTRTIYG; CCTRTIYGR; CTRTIYGRC; TRTIYGRCC;
RTIYGRCCL; TIYGRCCLA; IYGRCCLAA; YGRCCLAAL; GRCCLAALF; RCCLAALFA; CCLAALFAT;
FFALYCFQC; FALYCFQCT; WKNNTSCRV; KNNTSCRVI; NNTSCRVIR; NTSCRVIRF; TSCRVIRFV;
SCRVIRFVW; CRVIRFVWW; SLKCKPTHG; LKCKPTHGK; KCKPTHGKA; CKPTHGKAN; KPTHGKANL;
ARCSYRSVH; RCSYRSVHG; CSYRSVHGC; SYRSVHGCF; IKGFAFRTW; KGFAFRTWN; GFAFRTWNK;
FAFRTWNKQ; AFRTWNKQF; FRTWNKQFR; RTWNKQFRQ; TWNKQFRQF; WNKQFRQFE; NKQFRQFER;
KQFRQFERL; QFRQFERLF; FRQFERLFR; RQFERLFRW; QFERLFRWK; FERLFRWKC; GKFRKETFK;
KFRKETFKQ; FRKETFKQK; RKETFKQKN; KETFKQKNP; ETFKQKNPN; TFKQKNPNI; FKQKNPNIS;
KQKNPNIST; QKNPNISTR; KNPNISTRL; NPNISTRLG; PNISTRLGY; NISTRLGYN; ISTRLGYNE;
AQNIFKKIL; QNIFKKILT; NIFKKILTK; IFKKILTKL; FKKILTKLR; KKILTKLRV; KILTKLRVL;
ILTKLRVLT; KKNFTKWND; KNFTKWNDL; NFTKWNDLV; FTKWNDLVA; TKWNDLVAT;
KWNDLVATA; WNDLVATAN; NDLVATANL; DLVATANLV; DKYVYFFKD; KYVYFFKDE; YVYFFKDEI;
YYKRRGFRN; IPITMLFPS; PITMLFPSL; ITMLFPSLR; TMLFPSLRY; MLFPSLRYF; LFPSLRYFS;
FPSLRYFSP; PSLRYFSPC; NTTPKITQA; KWLIQKQHL; WLIQKQHLL; LIQKQHLLN; IQKQHLLNV;
QKQHLLNVY; KQHLLNVYV; QHLLNVYVQ; KHLFKAFWF; HLFKAFWFA; LFKAFWFAI; FKAFWFAIV;
KAFWFAIVP; AFWFAIVPV; FWFAIVPVC; WFAIVPVCQ; FAIVPVCQY; AIVPVCQYI; IVPVCQYIL;
VPVCQYILS; PVCQYILSY; VCQYILSYL; CQYILSYLG; QYILSYLGP; YILSYLGPL; ILSYLGPLE;
LSYLGPLEV; SYLGPLEVF; YLGPLEVFL; LGPLEVFLC; GPLEVFLCH; PLEVFLCHQ; LEVFLCHQT;
EVFLCHQTP; PLLPGIPYH; LLPGIPYHT; AAHPLSGFS; AHPLSGFSC; HPLSGFSCL; GHLAKRKLG;
HLAKRKLGK; LAKRKLGKD; AKRKLGKDS; KRKLGKDSL; RKLGKDSLQ; KLGKDSLQI; LGKDSLQIF;
GKDSLQIFF; KDSLQIFFS; DSLQIFFSG; SLQIFFSGG; LQIFFSGGS; NILQGLSTV; ILQGLSTVV;
LQGLSTVVF; QGLSTVVFQ; GLSTVVFQS; LSTVVFQSC; TGHKYQQLK; GHKYQQLKH; HKYQQLKHT;
KYQQLKHTG; YQQLKHTGY; QQLKHTGYQ; QLKHTGYQL; LKHTGYQLY; KHTGYQLYK; HTGYQLYKE;
TGYQLYKEA; GYQLYKEAP; YQLYKEAPH; QLYKEAPHP; LYKEAPHPV; YKEAPHPVH; KEAPHPVHL;
EAPHPVHLA; APHPVHLAT; PHPVHLATL; HPVHLATLW; LCWSHEVLG; CWSHEVLGE; WSHEVLGEH;
SHEVLGEHF; HEVLGEHFP; EVLGEHFPL; VLGEHFPLL; HFHFYWDQV; FHFYWDQVP; HFYWDQVPS;
FYWDQVPST; YWDQVPSTQ; WDQVPSTQL; DQVPSTQLD; QVPSTQLDK; VPSTQLDKH; PSTQLDKHC;
STQLDKHCF; TQLDKHCFC; QLDKHCFCP; LDKHCFCPN; DKHCFCPNR; KHCFCPNRP; HCFCPNRPY;
CFCPNRPYG; FCPNRPYGQ; CPNRPYGQY; PNRPYGQYS; NRPYGQYSL; RPYGQYSLP; PYGQYSLPG;
YGQYSLPGT; GQYSLPGTG; QYSLPGTGL; YSLPGTGLL; SLPGTGLLG; LPGTGLLGF; YHQGTLTCN;
HQGTLTCNS; QGTLTCNSL; GTLTCNSLA; TLTCNSLAL; LTCNSLALP; TCNSLALPA; CNSLALPAF;
NSLALPAFP; SLALPAFPR; LALPAFPRV; ALPAFPRVL; LPAFPRVLH; PAFPRVLHL; AFPRVLHLQ;
FPRVLHLQQ; PRVLHLQQR; RVLHLQQRS; VLHLQQRSG; LHLQQRSGN; HLQQRSGNY; LQQRSGNYC;
QQRSGNYCL; QRSGNYCLE; VFLHHAHAL; FLHHAHALF; LHHAHALFV; HHAHALFVT; HAHALFVTL;
AHALFVTLH; HALFVTLHE; ALFVTLHEG; PLFVQLQPP; LFVQLQPPT; FVQLQPPTS; VQLQPPTSV;
QLQPPTSVD; LQPPTSVDF; QPPTSVDFH; PPTSVDFHR; PTSVDFHRL; TSVDFHRLG; SVDFHRLGP;
VDFHRLGPH; DFHRLGPHL; FHRLGPHLN; HRLGPHLNW; RLGPHLNWG; LGPHLNWGG; GPHLNWGGE;
PHLNWGGEF; HLNWGGEFL; LNWGGEFLL; NWGGEFLLC; WGGEFLLCC; GGEFLLCCN; GEFLLCCNR;
EFLLCCNRE; FLLCCNREA; LLCCNREAF; LCCNREAFF; CCNREAFFS; CNREAFFSL; NREAFFSLG;
REAFFSLGY; EAFFSLGYH; AFFSLGYHC; SHFQHLALD; GFHLDPPFL; FHLDPPFLG; HLDPPFLGL;
LDPPFLGLG; DPPFLGLGS; PPFLGLGSI; PFLGLGSIL; FLGLGSILP; LGLGSILPL; LLELLLLLL;
LELLLLLLL; ELLLLLLLV; LLLLLLLVV; LLLLLLVVL; LLLLLVVLA; LLLLVVLAL; LLLVVLALA;
LLVVLALAR; LVVLALARV; VVLALARVP; VLALARVPL; LALARVPLA; ALARVPLAF; LARVPLAFW;
ARVPLAFWE; RVPLAFWEL; VPLAFWELP; PLAFWELPL; LAFWELPLD; AFWELPLDT; FWELPLDTL;
WELPLDTLL; ELPLDTLLF; LPLDTLLFF; PLDTLLFFW; LDTLLFFWL; DTLLFFWLG; TLLFFWLGP;
LLFFWLGPS; LFFWLGPSS; FFWLGPSSY; FWLGPSSYA; WLGPSSYAS; LGPSSYASR; GPSSYASRA;
PSSYASRAG; SSYASRAGV; SYASRAGVT; YASRAGVTV; ASRAGVTVP; SRAGVTVPY; RAGVTVPYR;
AGVTVPYRP; GVTVPYRPR; VTVPYRPRS; TVPYRPRSK; VPYRPRSKG; PYRPRSKGN; YRPRSKGNI;
RPRSKGNIH; LAPPGAIVF; APPGAIVFS; PPGAIVFSI; PGAIVFSIN; GAIVFSINS; AIVFSINSP; IVFSINSPE;
VFSINSPEC; FSINSPECT; SINSPECTL; INSPECTLC; FLKSILCVT; LKSILCVTS; KSILCVTSS; SILCVTSSI;
ILCVTSSIL; LCVTSSILS; CVTSSILSA; VTSSILSAS; TSSILSASS; SSILSASSI; SILSASSIL; VWPKCTRVP;
WPKCTRVPS; PKCTRVPSL; KCTRVPSLS; CTRVPSLSA; TRVPSLSAT; RVPSLSATC; VPSLSATCL;
PSLSATCLT; SLSATCLTI; LSATCLTIE; SATCLTIEG; ATCLTIEGL; TCLTIEGLI; CLTIEGLIG; LTIEGLIGE;
TIEGLIGER; IEGLIGERS; EGLIGERSE; KFIGAFTIV; FIGAFTIVQ; IGAFTIVQV; GAFTIVQVV;
AFTIVQVVS; FTIVQVVSS; TIVQVVSSK; IVQVVSSKN; VQVVSSKNL; QVVSSKNLA; VVSSKNLAK;
VSSKNLAKE; SSKNLAKES; SKNLAKESL; KNLAKESLK; NLAKESLKN; LAKESLKNL; AKESLKNLS;
KESLKNLSV; ESLKNLSVL; SLKNLSVLL; LKNLSVLLC; KNLSVLLCN; NLSVLLCNS; LSVLLCNSC;
SVLLCNSCE; VLLCNSCEV; LLCNSCEVI; LCNSCEVIE; CNSCEVIEG; NSCEVIEGI; SCEVIEGIS;
CEVIEGISS; EVIEGISSL; VIEGISSLI; IEGISSLIT; EGISSLITC; GISSLITCH; ISSLITCHK; SSLITCHKA;
SLITCHKAW; LITCHKAWE; ITCHKAWEI; TCHKAWEIV; CHKAWEIVA; HKAWEIVAN; KAWEIVANK;
AWEIVANKE; WEIVANKEG; EIVANKEGP; IVANKEGPQ; VANKEGPQC; ANKEGPQCL; NKEGPQCLG;
KEGPQCLGS; EGPQCLGSR; GPQCLGSRY; ILLTKVFTP; LLTKVFTPG; LTKVFTPGN; TKVFTPGNR;
KVFTPGNRI; VFTPGNRIS; YSSGLNNSK; SSGLNNSKA; SGLNNSKAM; GLNNSKAMP; LNNSKAMPD;
NNSKAMPDC; SQSSKNLYP; QSSKNLYPT; AKELIPLTV; IKAANPAIA; KAANPAIAP; AANPAIAPG;
ANPAIAPGA; NPAIAPGAP; PAIAPGAPA; AIAPGAPAI; IAPGAPAIT; APGAPAITA; PGAPAITAY;
GAPAITAYV; GVRPIAAIA; VRPIAAIAS; RPIAAIASE; PIAAIASEV; IAAIASEVL; AAIASEVLV;
AIASEVLVM; IASEVLVMP; ASEVLVMPS; SEVLVMPST; EVLVMPSTV; VLVMPSTVA; LVMPSTVAR;
VMPSTVARD; MPSTVARDA; PSTVARDAI; TSIAAAASP; SIAAAASPA; IAAAASPAA; AAAASPAAI;
AAASPAAIS; AASPAAISA; ASPAAISAT; SPAAISATE; PAAISATEN; AAISATENP; AISATENPV;
ISATENPVA; SATENPVAA; ATENPVAAA; TENPVAAAA; ENPVAAAAS; NPVAAAASD; PVAAAASDT;
VAAAASDTL; AAAASDTLA; AAASDTLAT; AASDTLATR; ASDTLATRS; SDTLATRSP; DTLATRSPK;
TLATRSPKS; LATRSPKSA; ATRSPKSAR; TRSPKSARA; RSPKSARAA; SPKSARAAP; PKSARAAPM;
KSARAAPMN; SARAAPMNL; ARAAPMNLE; RAAPMNLEI; AAPMNLEIQ; APMNLEIQK; PMNLEIQKK;
MNLEIQKKR; NLEIQKKRD; LEIQKKRDY; EIQKKRDYL; IQKKRDYLP; QKKRDYLPR; KKRDYLPRS;
KRDYLPRSL; RDYLPRSLL; DYLPRSLLQ; YLPRSLLQS; LPRSLLQSL; PRSLLQSLL; RSLLQSLLQ;
SLLQSLLQQ; LLQSLLQQV; LQSLLQQVK; QSLLQQVKQ; SLLQQVKQW; LLQQVKQWY; LQQVKQWYF;
QQVKQWYFC; QVKQWYFCF; VKQWYFCFS; KQWYFCFSR; QWYFCFSRL; WYFCFSRLH; YFCFSRLHC;
FCFSRLHCL; CFSRLHCLH; FSRLHCLHL; SRLHCLHLY; RLHCLHLYK; LHCLHLYKI; HCLHLYKIP;
CLHLYKIPA; LHLYKIPAK; HLYKIPAKA; LYKIPAKAL; YKIPAKALK; KSSELFFLF; SSELFFLFQ;
SELFFLFQS; ELFFLFQSR; LFFLFQSRF; FFLFQSRFY; FLFQSRFYQ; LFQSRFYQL; FQSRFYQLS;
QSRFYQLSL; SRFYQLSLK; RFYQLSLKL; FYQLSLKLV; YQLSLKLVV; QLSLKLVVT; LSLKLVVTA;
SLKLVVTAG; LKLVVTAGA; KLVVTAGAE; LVVTAGAEP; VVTAGAEPW; VTAGAEPWP; TAGAEPWPL;
AGAEPWPLS; GAEPWPLSS; AEPWPLSSL; EPWPLSSLT; PWPLSSLTG; WPLSSLTGD; PLSSLTGDK;
LSSLTGDKA; SSLTGDKAK; SLTGDKAKI; LTGDKAKIP; TGDKAKIPR; GDKAKIPRL; DKAKIPRLA;
KAKIPRLAK; AKIPRLAKH; KIPRLAKHV; IPRLAKHVC; PRLAKHVCH; RLAKHVCHA; LAKHVCHAL;
AKHVCHALS; KHVCHALSF; HVCHALSFL; VCHALSFLR; CHALSFLRS; HALSFLRSW; ALSFLRSWF;
LSFLRSWFG; SFLRSWFGC; FLRSWFGCI; LRSWFGCIP; RSWFGCIPW; SWFGCIPWV; WFGCIPWVS;
FGCIPWVSS; GCIPWVSSS; CIPWVSSSS; IPWVSSSSL; GHGLAAFPC; HGLAAFPCE; GLAAFPCES;
LAAFPCESC; AAFPCESCT; AFPCESCTF; FPCESCTFL; PCESCTFLP; CESCTFLPE; ESCTFLPEV;
SCTFLPEVM; CTFLPEVMV; TFLPEVMVW; FLPEVMVWL; LPEVMVWLH; PEVMVWLHS; EVMVWLHSM;
VMVWLHSMG; MVWLHSMGK; VWLHSMGKQ; WLHSMGKQL; LHSMGKQLL; HSMGKQLLP;
SMGKQLLPV; MGKQLLPVA; GKQLLPVAF; KQLLPVAFF; QLLPVAFFF; LLPVAFFFI; LPVAFFFII;
PVAFFFIIY; VAFFFIIYK; AFFFIIYKR; FFFIIYKRP; FFIIYKRPR; FIIYKRPRP; IIYKRPRPP; IYKRPRPPL;
YKRPRPPLP; KRPRPPLPP; RPRPPLPPP; PRPPLPPPF; RPPLPPPFL; PPLPPPFLS; PLPPPFLSS; LPPPFLSSS;
PPPFLSSSK; PPFLSSSKG; PFLSSSKGV; FLSSSKGVE; LSSSKGVEA; SSSKGVEAF; SSKGVEAFS;
SKGVEAFSE; KGVEAFSEA; QNYLGKSLF; NYLGKSLFF; YLGKSLFFC; LGKSLFFCN; GKSLFFCNF;
KSLFFCNFC; SLFFCNFCK

10 mers:

WIKFLTGKNP; IKFLTGKNPW; KFLTGKNPWS; FLTGKNPWSS; LTGKNPWSSW; TGKNPWSSWT;
GKNPWSSWTF; ALKELPGEIF; LKELPGEIFP; GSVRNFTLTK; SVRNFTLTKG; VRNFTLTKGA;
RNFTLTKGAT; NFTLTKGATR; FTLTKGATRI; TLTKGATRIK; ILCIKKWSRM; LISLILEPGV; ISLILEPGVA;
SLILEPGVAQ; LILEPGVAQR; ILEPGVAQRF; LEPGVAQRFV; EPGVAQRFVL; PGVAQRFVLI;
GVAQRFVLIF; VAQRFVLIFL; AQRFVLIFLF; QRFVLIFLFA; RFVLIFLFAQ; FVLIFLFAQI; VLIFLFAQIP;
LIFLFAQIPC; IFLFAQIPCT; FLFAQIPCTA; LFAQIPCTAR; FAQIPCTARN; AQIPCTARNG; QIPCTARNGL;
IPCTARNGLF; PCTARNGLFV; CTARNGLFVP; TARNGLFVPK; ARNGLFVPKS; RNGLFVPKSL;
NGLFVPKSLL; GLFVPKSLLC; LFVPKSLLCT; FVPKSLLCTA; VPKSLLCTAL; PKSLLCTALA;
KSLLCTALAC; SLLCTALACY; LLCTALACYV; LCTALACYVS; CTALACYVSL; TALACYVSLD;
IATALTASHS; ATALTASHSG; TALTASHSGL; ALTASHSGLA; LKKLCNGGSK; SFKVTNLYLD;
FKVTNLYLDK; VIIFFIGANL; IIFFIGANLW; IFFIGANLWN; FFIGANLWNR; FIGANLWNRR;
IGANLWNRRV; GANLWNRRVG; ANLWNRRVGV; NLWNRRVGVL; LWNRRVGVLV; WNRRVGVLVE;
NRRVGVLVEF; RRVGVLVEFL; RSNSRFSTLN; SNSRFSTLNT; NSRFSTLNTT; SRFSTLNTTQ;
RFSTLNTTQK; FSTLNTTQKK; STLNTTQKKK; TLNTTQKKKK; LNTTQKKKKG; NTTQKKKKGR;
TTQKKKKGRR; TQKKKKGRRP; NPCLLCCVYY; KTYGKIFCNF; TYGKIFCNFY; RSIPYYRRKH;
SIPYYRRKHS; IPYYRRKHSR; PYYRRKHSRG; YYRRKHSRGL; YRRKHSRGLK; RRKHSRGLKG;
RKHSRGLKGA; RNKAGVLEIN; NKAGVLEINY; GCVFIIRYVF; CVFIIRYVFR; VFIIRYVFRI; FIIRYVFRIS;
IIRYVFRISI; IRYVFRISIQ; RYVFRISIQC; YVFRISIQCR; VFRISIQCRG; FRISIQCRGV; KVSEKRPALS;
VSEKRPALSL; KALCKCYYFC; ALCKCYYFCR; LCKCYYFCRK; KSKKYLSASS; SKKYLSASSR;
KKYLSASSRY; KYLSASSRYS; YLSASSRYSF; LSASSRYSFS; KKSRYPSYDQ; KSRYPSYDQG;
SRYPSYDQGR; RYPSYDQGRN; YPSYDQGRNA; PSYDQGRNAN; SYDQGRNANR; YDQGRNANRK;
DQGRNANRKI; QGRNANRKIQ; GRNANRKIQS; RNANRKIQSY; NANRKIQSYI; ANRKIQSYIR;
NGFNIWSSWK; GFNIWSSWKC; FNIWSSWKCC; NIWSSWKCCT; IWSSWKCCTR; WSSWKCCTRT;
SSWKCCTRTI; SWKCCTRTIY; WKCCTRTIYG; KCCTRTIYGR; CCTRTIYGRC; CTRTIYGRCC;
TRTIYGRCCL; RTIYGRCCLA; TIYGRCCLAA; IYGRCCLAAL; YGRCCLAALF; GRCCLAALFA;
RCCLAALFAT; FFALYCFQCT; WKNNTSCRVI; KNNTSCRVIR; NNTSCRVIRF; NTSCRVIRFV;
TSCRVIRFVW; SCRVIRFVWW; SLKCKPTHGK; LKCKPTHGKA; KCKPTHGKAN; CKPTHGKANL;
ARCSYRSVHG; RCSYRSVHGC; CSYRSVHGCF; IKGFAFRTWN; KGFAFRTWNK; GFAFRTWNKQ;
FAFRTWNKQF; AFRTWNKQFR; FRTWNKQFRQ; RTWNKQFRQF; TWNKQFRQFE; WNKQFRQFER;
NKQFRQFERL; KQFRQFERLF; QFRQFERLFR; FRQFERLFRW; RQFERLFRWK; QFERLFRWKC;
GKFRKETFKQ; KFRKETFKQK; FRKETFKQKN; RKETFKQKNP; KETFKQKNPN; ETFKQKNPNI;
TFKQKNPNIS; FKQKNPNIST; KQKNPNISTR; QKNPNISTRL; KNPNISTRLG; NPNISTRLGY; PNISTRLGYN;
NISTRLGYNE; AQNIFKKILT; QNIFKKILTK; NIFKKILTKL; IFKKILTKLR; FKKILTKLRV; KKILTKLRVL;
KILTKLRVLT; KKNFTKWNDL; KNFTKWNDLV; NFTKWNDLVA; FTKWNDLVAT; TKWNDLVATA;
KWNDLVATAN; WNDLVATANL; NDLVATANLV; DKYVYFFKDE; KYVYFFKDEI; IPITMLFPSL;
PITMLFPSLR; ITMLFPSLRY; TMLFPSLRYF; MLFPSLRYFS; LFPSLRYFSP; FPSLRYFSPC; KWLIQKQHLL;
WLIQKQHLLN; LIQKQHLLNV; IQKQHLLNVY; QKQHLLNVYV; KQHLLNVYVQ; KHLFKAFWFA;
HLFKAFWFAI; LFKAFWFAIV; FKAFWFAIVP; KAFWFAIVPV; AFWFAIVPVC; FWFAIVPVCQ;
WFAIVPVCQY; FAIVPVCQYI; AIVPVCQYIL; IVPVCQYILS; VPVCQYILSY; PVCQYILSYL; VCQYILSYLG;
CQYILSYLGP; QYILSYLGPL; YILSYLGPLE; ILSYLGPLEV; LSYLGPLEVF; SYLGPLEVFL; YLGPLEVFLC;
LGPLEVFLCH; GPLEVFLCHQ; PLEVFLCHQT; LEVFLCHQTP; PLLPGIPYHT; AAHPLSGFSC;
AHPLSGFSCL; GHLAKRKLGK; HLAKRKLGKD; LAKRKLGKDS; AKRKLGKDSL; KRKLGKDSLQ;
RKLGKDSLQI; KLGKDSLQIF; LGKDSLQIFF; GKDSLQIFFS; KDSLQIFFSG; DSLQIFFSGG; SLQIFFSGGS;
NILQGLSTVV; ILQGLSTVVF; LQGLSTVVFQ; QGLSTVVFQS; GLSTVVFQSC; TGHKYQQLKH;
GHKYQQLKHT; HKYQQLKHTG; KYQQLKHTGY; YQQLKHTGYQ; QQLKHTGYQL; QLKHTGYQLY;
LKHTGYQLYK; KHTGYQLYKE; HTGYQLYKEA; TGYQLYKEAP; GYQLYKEAPH; YQLYKEAPHP;
QLYKEAPHPV; LYKEAPHPVH; YKEAPHPVHL; KEAPHPVHLA; EAPHPVHLAT; APHPVHLATL;
PHPVHLATLW; LCWSHEVLGE; CWSHEVLGEH; WSHEVLGEHF; SHEVLGEHFP; HEVLGEHFPL;
EVLGEHFPLL; HFHFYWDQVP; FHFYWDQVPS; HFYWDQVPST; FYWDQVPSTQ; YWDQVPSTQL;
WDQVPSTQLD; DQVPSTQLDK; QVPSTQLDKH; VPSTQLDKHC; PSTQLDKHCF; STQLDKHCFC;
TQLDKHCFCP; QLDKHCFCPN; LDKHCFCPNR; DKHCFCPNRP; KHCFCPNRPY; HCFCPNRPYG;
CFCPNRPYGQ; FCPNRPYGQY; CPNRPYGQYS; PNRPYGQYSL; NRPYGQYSLP; RPYGQYSLPG;
PYGQYSLPGT; YGQYSLPGTG; GQYSLPGTGL; QYSLPGTGLL; YSLPGTGLLG; SLPGTGLLGF;
YHQGTLTCNS; HQGTLTCNSL; QGTLTCNSLA; GTLTCNSLAL; TLTCNSLALP; LTCNSLALPA;
TCNSLALPAF; CNSLALPAFP; NSLALPAFPR; SLALPAFPRV; LALPAFPRVL; ALPAFPRVLH;
LPAFPRVLHL; PAFPRVLHLQ; AFPRVLHLQQ; FPRVLHLQQR; PRVLHLQQRS; RVLHLQQRSG;
VLHLQQRSGN; LHLQQRSGNY; HLQQRSGNYC; LQQRSGNYCL; QQRSGNYCLE; VFLHHAHALF;
FLHHAHALFV; LHHAHALFVT; HHAHALFVTL; HAHALFVTLH; AHALFVTLHE; HALFVTLHEG;
PLFVQLQPPT; LFVQLQPPTS; FVQLQPPTSV; VQLQPPTSVD; QLQPPTSVDF; LQPPTSVDFH;
QPPTSVDFHR; PPTSVDFHRL; PTSVDFHRLG; TSVDFHRLGP; SVDFHRLGPH; VDFHRLGPHL;
DFHRLGPHLN; FHRLGPHLNW; HRLGPHLNWG; RLGPHLNWGG; LGPHLNWGGE; GPHLNWGGEF;
PHLNWGGEFL; HLNWGGEFLL; LNWGGEFLLC; NWGGEFLLCC; WGGEFLLCCN; GGEFLLCCNR;
GEFLLCCNRE; EFLLCCNREA; FLLCCNREAF; LLCCNREAFF; LCCNREAFFS; CCNREAFFSL;
CNREAFFSLG; NREAFFSLGY; REAFFSLGYH; EAFFSLGYHC; GFHLDPPFLG; FHLDPPFLGL;
HLDPPFLGLG; LDPPFLGLGS; DPPFLGLGSI; PPFLGLGSIL; PFLGLGSILP; FLGLGSILPL; LLELLLLLLL;
LELLLLLLLV; ELLLLLLLVV; LLLLLLLVVL; LLLLLLVVLA; LLLLLVVLAL; LLLLVVLALA;
LLLVVLALAR; LLVVLALARV; LVVLALARVP; VVLALARVPL; VLALARVPLA; LALARVPLAF;
ALARVPLAFW; LARVPLAFWE; ARVPLAFWEL; RVPLAFWELP; VPLAFWELPL; PLAFWELPLD;
LAFWELPLDT; AFWELPLDTL; FWELPLDTLL; WELPLDTLLF; ELPLDTLLFF; LPLDTLLFFW;
PLDTLLFFWL; LDTLLFFWLG; DTLLFFWLGP; TLLFFWLGPS; LLFFWLGPSS; LFFWLGPSSY;
FFWLGPSSYA; FWLGPSSYAS; WLGPSSYASR; LGPSSYASRA; GPSSYASRAG; PSSYASRAGV;
SSYASRAGVT; SYASRAGVTV; YASRAGVTVP; ASRAGVTVPY; SRAGVTVPYR; RAGVTVPYRP;
AGVTVPYRPR; GVTVPYRPRS; VTVPYRPRSK; TVPYRPRSKG; VPYRPRSKGN; PYRPRSKGNI;
YRPRSKGNIH; LAPPGAIVFS; APPGAIVFSI; PPGAIVFSIN; PGAIVFSINS; GAWFSINSP; AIVFSINSPE;
IVFSINSPEC; VFSINSPECT; FSINSPECTL; SINSPECTLC; FLKSILCVTS; LKSILCVTSS; KSILCVTSSI;
SILCVTSSIL; ILCVTSSILS; LCVTSSILSA; CVTSSILSAS; VTSSILSASS; TSSILSASSI; SSILSASSIL;
VWPKCTRVPS; WPKCTRVPSL; PKCTRVPSLS; KCTRVPSLSA; CTRVPSLSAT; TRVPSLSATC;
RVPSLSATCL; VPSLSATCLT; PSLSATCLTI; SLSATCLTIE; LSATCLTIEG; SATCLTIEGL; ATCLTIEGLI;
TCLTIEGLIG; CLTIEGLIGE; LTIEGLIGER; TIEGLIGERS; IEGLIGERSE; KFIGAFTIVQ; FIGAFTIVQV;
IGAFTIVQVV; GAFTIVQVVS; AFTIVQVVSS; FTIVQVVSSK; TIVQVVSSKN; IVQVVSSKNL;
VQVVSSKNLA; QVVSSKNLAK; VVSSKNLAKE; VSSKNLAKES; SSKNLAKESL; SKNLAKESLK;
KNLAKESLKN; NLAKESLKNL; LAKESLKNLS; AKESLKNLSV; KESLKNLSVL; ESLKNLSVLL;
SLKNLSVLLC; LKNLSVLLCN; KNLSVLLCNS; NLSVLLCNSC; LSVLLCNSCE; SVLLCNSCEV;
VLLCNSCEVI; LLCNSCEVIE; LCNSCEVIEG; CNSCEVIEGI; NSCEVIEGIS; SCEVIEGISS; CEVIEGISSL;
EVIEGISSLI; VIEGISSLIT; IEGISSLITC; EGISSLITCH; GISSLITCHK; ISSLITCHKA; SSLITCHKAW;
SLITCHKAWE; LITCHKAWEI; ITCHKAWEIV; TCHKAWEIVA; CHKAWEIVAN; HKAWEIVANK;
KAWEIVANKE; AWEIVANKEG; WEIVANKEGP; EIVANKEGPQ; IVANKEGPQC; VANKEGPQCL;
ANKEGPQCLG; NKEGPQCLGS; KEGPQCLGSR; EGPQCLGSRY; ILLTKVFTPG; LLTKVFTPGN;
LTKVFTPGNR; TKVFTPGNRI; KVFTPGNRIS; YSSGLNNSKA; SSGLNNSKAM; SGLNNSKAMP;
GLNNSKAMPD; LNNSKAMPDC; SQSSKNLYPT; IKAANPAIAP; KAANPAIAPG; AANPAIAPGA;
ANPAIAPGAP; NPAIAPGAPA; PAIAPGAPAI; AIAPGAPAIT; IAPGAPAITA; APGAPAITAY; PGAPAITAYV;
GVRPIAAIAS; VRPIAAIASE; RPIAAIASEV; PIAAIASEVL; IAAIASEVLV; AAIASEVLVM; AIASEVLVMP;
IASEVLVMPS; ASEVLVMPST; SEVLVMPSTV; EVLVMPSTVA; VLVMPSTVAR; LVMPSTVARD;
VMPSTVARDA; MPSTVARDAI; TSIAAAASPA; SIAAAASPAA; IAAAASPAAI; AAAASPAAIS;
AAASPAAISA; AASPAAISAT; ASPAAISATE; SPAAISATEN; PAAISATENP; AAISATENPV; AISATENPVA;
ISATENPVAA; SATENPVAAA; ATENPVAAAA; TENPVAAAAS; ENPVAAAASD; NPVAAAASDT;
PVAAAASDTL; VAAAASDTLA; AAAASDTLAT; AAASDTLATR; AASDTLATRS; ASDTLATRSP;
SDTLATRSPK; DTLATRSPKS; TLATRSPKSA; LATRSPKSAR; ATRSPKSARA; TRSPKSARAA;
RSPKSARAAP; SPKSARAAPM; PKSARAAPMN; KSARAAPMNL; SARAAPMNLE; ARAAPMNLEI;
RAAPMNLEIQ; AAPMNLEIQK; APMNLEIQKK; PMNLEIQKKR; MNLEIQKKRD; NLEIQKKRDY;
LEIQKKRDYL; EIQKKRDYLP; IQKKRDYLPR; QKKRDYLPRS; KKRDYLPRSL; KRDYLPRSLL;
RDYLPRSLLQ; DYLPRSLLQS; YLPRSLLQSL; LPRSLLQSLL; PRSLLQSLLQ; RSLLQSLLQQ;
SLLQSLLQQV; LLQSLLQQVK; LQSLLQQVKQ; QSLLQQVKQW; SLLQQVKQWY; LLQQVKQWYF;
LQQVKQWYFC; QQVKQWYFCF; QVKQWYFCFS; VKQWYFCFSR; KQWYFCFSRL; QWYFCFSRLH;
WYFCFSRLHC; YFCFSRLHCL; FCFSRLHCLH; CFSRLHCLHL; FSRLHCLHLY; SRLHCLHLYK;
RLHCLHLYKI; LHCLHLYKIP; HCLHLYKIPA; CLHLYKIPAK; LHLYKIPAKA; HLYKIPAKAL;
LYKIPAKALK; KSSELFFLFQ; SSELFFLFQS; SELFFLFQSR; ELFFLFQSRF; LFFLFQSRFY; FFLFQSRFYQ;
FLFQSRFYQL; LFQSRFYQLS; FQSRFYQLSL; QSRFYQLSLK; SRFYQLSLKL; RFYQLSLKLV;
FYQLSLKLVV; YQLSLKLVVT; QLSLKLVVTA; LSLKLVVTAG; SLKLVVTAGA; LKLVVTAGAE;
KLVVTAGAEP; LVVTAGAEPW; VVTAGAEPWP; VTAGAEPWPL; TAGAEPWPLS; AGAEPWPLSS;
GAEPWPLSSL; AEPWPLSSLT; EPWPLSSLTG; PWPLSSLTGD; WPLSSLTGDK; PLSSLTGDKA;
LSSLTGDKAK; SSLTGDKAKI; SLTGDKAKIP; LTGDKAKIPR; TGDKAKIPRL; GDKAKIPRLA;
DKAKIPRLAK; KAKIPRLAKH; AKIPRLAKHV; KIPRLAKHVC; IPRLAKHVCH; PRLAKHVCHA;
RLAKHVCHAL; LAKHVCHALS; AKHVCHALSF; KHVCHALSFL; HVCHALSFLR; VCHALSFLRS;
CHALSFLRSW; HALSFLRSWF; ALSFLRSWFG; LSFLRSWFGC; SFLRSWFGCI; FLRSWFGCIP;
LRSWFGCIPW; RSWFGCIPWV; SWFGCIPWVS; WFGCIPWVSS; FGCIPWVSSS; GCIPWVSSSS;
CIPWVSSSSL; GHGLAAFPCE; HGLAAFPCES; GLAAFPCESC; LAAFPCESCT; AAFPCESCTF;
AFPCESCTFL; FPCESCTFLP; PCESCTFLPE; CESCTFLPEV; ESCTFLPEVM; SCTFLPEVMV;
CTFLPEVMVW; TFLPEVMVWL; FLPEVMVWLH; LPEVMVWLHS; PEVMVWLHSM; EVMVWLHSMG;
VMVWLHSMGK; MYWLHSMGKQ; VWLHSMGKQL; WLHSMGKQLL; LHSMGKQLLP; HSMGKQLLPV;
SMGKQLLPVA; MGKQLLPVAF; GKQLLPVAFF; KQLLPVAFFF; QLLPVAFFFI; LLPVAFFFII; LPVAFFFIIY;
PVAFFFIIYK; VAFFFIIYKR; AFFFIIYKRP; FFFIIYKRPR; FFIIYKRPRP; FIIYKRPRPP; IIYKRPRPPL;
IYKRPRPPLP; YKRPRPPLPP; KRPRPPLPPP; RPRPPLPPPF; PRPPLPPPFL; RPPLPPPFLS; PPLPPPFLSS;
PLPPPFLSSS; LPPPFLSSSK; PPPFLSSSKG; PPFLSSSKGV; PFLSSSKGVE; FLSSSKGVEA; LSSSKGVEAF;
SSSKGVEAFS; SSKGVEAFSE; SKGVEAFSEA; QNYLGKSLFF; NYLGKSLFFC; YLGKSLFFCN;
LGKSLFFCNF; GKSLFFCNFC; KSLFFCNFCK

11 mers:

WIKFLTGKNPW; IKFLTGKNPWS; KFLTGKNPWSS; FLTGKNPWSSW; LTGKNPWSSWT;
TGKNPWSSWTF; ALKELPGEIFP; GSVRNFTLTKG; SVRNFTLTKGA; VRNFTLTKGAT; RNFTLTKGATR;
NFTLTKGATRI; FTLTKGATRIK; LISLILEPGVA; ISLILEPGVAQ; SLILEPGVAQR; LILEPGVAQRF;
ILEPGVAQRFV; LEPGVAQRFVL; EPGVAQRFVLI; PGVAQRFVLIF; GVAQRFVLIFL; VAQRFVLIFLF;
AQRFVLIFLFA; QRFVLIFLFAQ; RFVLIFLFAQI; FVLIFLFAQIP; VLIFLFAQIPC; LIFLFAQIPCT;
IFLFAQIPCTA; FLFAQIPCTAR; LFAQIPCTARN; FAQIPCTARNG; AQIPCTARNGL; QIPCTARNGLF;
IPCTARNGLFV; PCTARNGLFVP; CTARNGLFVPK; TARNGLFVPKS; ARNGLFVPKSL; RNGLFVPKSLL;
NGLFVPKSLLC; GLFVPKSLLCT; LFVPKSLLCTA; FVPKSLLCTAL; VPKSLLCTALA; PKSLLCTALAC;
KSLLCTALACY; SLLCTALACYV; LLCTALACYVS; LCTALACYVSL; CTALACYVSLD; IATALTASHSG;
ATALTASHSGL; TALTASHSGLA; SFKVTNLYLDK; VIIFFIGANLW; IIFFIGANLWN; IFFIGANLWNR;
FFIGANLWNRR; FIGANLWNRRV; IGANLWNRRVG; GANLWNRRVGV; ANLWNRRVGVL;
NLWNRRVGVLV; LWNRRVGVLVE; WNRRVGVLVEF; NRRVGVLVEFL; RSNSRFSTLNT; SNSRFSTLNTT;
NSRFSTLNTTQ; SRFSTLNTTQK; RFSTLNTTQKK; FSTLNTTQKKK; STLNTTQKKKK; TLNTTQKKKKG;
LNTTQKKKKGR; NTTQKKKKGRR; TTQKKKKGRRP; KTYGKIFCNFY; RSIPYYRRKHS; SIPYYRRKHSR;
IPYYRRKHSRG; PYYRRKHSRGL; YYRRKHSRGLK; YRRKHSRGLKG; RRKHSRGLKGA; RNKAGVLEINY;
GCVFIIRYVFR; CVFIIRYVFRI; VFIIRYVFRIS; FIIRYVFRISI; IIRYVFRISIQ; IRYVFRISIQC; RYVFRISIQCR;
YVFRISIQCRG; VFRISIQCRGV; KVSEKRPALSL; KALCKCYYFCR; ALCKCYYFCRK; KSKKYLSASSR;
SKKYLSASSRY; KKYLSASSRYS; KYLSASSRYSF; YLSASSRYSFS; KKSRYPSYDQG; KSRYPSYDQGR;
SRYPSYDQGRN; RYPSYDQGRNA; YPSYDQGRNAN; PSYDQGRNANR; SYDQGRNANRK;
YDQGRNANRKI; DQGRNANRKIQ; QGRNANRKIQS; GRNANRKIQSY; RNANRKIQSYI; NANRKIQSYIR;
NGFNIWSSWKC; GFNIWSSWKCC; FNIWSSWKCCT; NIWSSWKCCTR; IWSSWKCCTRT; WSSWKCCTRTI;
SSWKCCTRTIY; SWKCCTRTIYG; WKCCTRTIYGR; KCCTRTIYGRC; CCTRTIYGRCC; CTRTIYGRCCL;
TRTIYGRCCLA; RTIYGRCCLAA; TIYGRCCLAAL; IYGRCCLAALF; YGRCCLAALFA; GRCCLAALFAT;
WKNNTSCRVIR; KNNTSCRVIRF; NNTSCRVIRFV; NTSCRVIRFVW; TSCRVIRFVWW; SLKCKPTHGKA;
LKCKPTHGKAN; KCKPTHGKANL; ARCSYRSVHGC; RCSYRSVHGCF; IKGFAFRTWNK;
KGFAFRTWNKQ; GFAFRTWNKQF; FAFRTWNKQFR; AFRTWNKQFRQ; FRTWNKQFRQF;
RTWNKQFRQFE; TWNKQFRQFER; WNKQFRQFERL; NKQFRQFERLF; KQFRQFERLFR; QFRQFERLFRW;
FRQFERLFRWK; RQFERLFRWKC; GKFRKETFKQK; KFRKETFKQKN; FRKETFKQKNP; RKETFKQKNPN;
KETFKQKNPNI; ETFKQKNPNIS; TFKQKNPNIST; FKQKNPNISTR; KQKNPNISTRL; QKNPNISTRLG;
KNPNISTRLGY; NPNISTRLGYN; PNISTRLGYNE; AQNIFKKILTK; QNIFKKILTKL; NIFKKILTKLR;
IFKKILTKLRV; FKKILTKLRVL; KKILTKLRVLT; KKNFTKWNDLV; KNFTKWNDLVA; NFTKWNDLVAT;
FTKWNDLVATA; TKWNDLVATAN; KWNDLVATANL; WNDLVATANLV; DKYVYFFKDEI;
IPITMLFPSLR; PITMLFPSLRY; ITMLFPSLRYF; TMLFPSLRYFS; MLFPSLRYFSP; LFPSLRYFSPC;
KWLIQKQHLLN; WLIQKQHLLNV; LIQKQHLLNVY; IQKQHLLNVYV; QKQHLLNVYVQ;
KHLFKAFWFAI; HLFKAFWFAIV; LFKAFWFAIVP; FKAFWFAIVPV; KAFWFAIVPVC; AFWFAIVPVCQ;
FWFAIVPVCQY; WFAIVPVCQYI; FAIVPVCQYIL; AIVPVCQYILS; IVPVCQYILSY; VPVCQYILSYL;
PVCQYILSYLG; VCQYILSYLGP; CQYILSYLGPL; QYILSYLGPLE; YILSYLGPLEV; ILSYLGPLEVF;
LSYLGPLEVFL; SYLGPLEVFLC; YLGPLEVFLCH; LGPLEVFLCHQ; GPLEVFLCHQT; PLEVFLCHQTP;
AAHPLSGFSCL; GHLAKRKLGKD; HLAKRKLGKDS; LAKRKLGKDSL; AKRKLGKDSLQ; KRKLGKDSLQI;
RKLGKDSLQIF; KLGKDSLQIFF; LGKDSLQIFFS; GKDSLQIFFSG; KDSLQIFFSGG; DSLQIFFSGGS;
NILQGLSTVVF; ILQGLSTVVFQ; LQGLSTVVFQS; QGLSTVVFQSC; TGHKYQQLKHT; GHKYQQLKHTG;
HKYQQLKHTGY; KYQQLKHTGYQ; YQQLKHTGYQL; QQLKHTGYQLY; QLKHTGYQLYK;
LKHTGYQLYKE; KHTGYQLYKEA; HTGYQLYKEAP; TGYQLYKEAPH; GYQLYKEAPHP;
YQLYKEAPHPV; QLYKEAPHPVH; LYKEAPHPVHL; YKEAPHPVHLA; KEAPHPVHLAT; EAPHPVHLATL;
APHPVHLATLW; LCWSHEVLGEH; CWSHEVLGEHF; WSHEVLGEHFP; SHEVLGEHFPL; HEVLGEHFPLL;
HFHFYWDQVPS; FHFYWDQVPST; HFYWDQVPSTQ; FYWDQVPSTQL; YWDQVPSTQLD;
WDQVPSTQLDK; DQVPSTQLDKH; QVPSTQLDKHC; VPSTQLDKHCF; PSTQLDKHCFC; STQLDKHCFCP;
TQLDKHCFCPN; QLDKHCFCPNR; LDKHCFCPNRP; DKHCFCPNRPY; KHCFCPNRPYG; HCFCPNRPYGQ;
CFCPNRPYGQY; FCPNRPYGQYS; CPNRPYGQYSL; PNRPYGQYSLP; NRPYGQYSLPG; RPYGQYSLPGT;
PYGQYSLPGTG; YGQYSLPGTGL; GQYSLPGTGLL; QYSLPGTGLLG; YSLPGTGLLGF; YHQGTLTCNSL;
HQGTLTCNSLA; QGTLTCNSLAL; GTLTCNSLALP; TLTCNSLALPA; LTCNSLALPAF; TCNSLALPAFP;
CNSLALPAFPR; NSLALPAFPRV; SLALPAFPRVL; LALPAFPRVLH; ALPAFPRVLHL; LPAFPRVLHLQ;
PAFPRVLHLQQ; AFPRVLHLQQR; FPRVLHLQQRS; PRVLHLQQRSG; RVLHLQQRSGN; VLHLQQRSGNY;
LHLQQRSGNYC; HLQQRSGNYCL; LQQRSGNYCLE; VFLHHAHALFV; FLHHAHALFVT; LHHAHALFVTL;
HHAHALFVTLH; HAHALFVTLHE; AHALFVTLHEG; PLFVQLQPPTS; LFVQLQPPTSV; FVQLQPPTSVD;
VQLQPPTSVDF; QLQPPTSVDFH; LQPPTSVDFHR; QPPTSVDFHRL; PPTSVDFHRLG; PTSVDFHRLGP;
TSVDFHRLGPH; SVDFHRLGPHL; VDFHRLGPHLN; DFHRLGPHLNW; FHRLGPHLNWG;
HRLGPHLNWGG; RLGPHLNWGGE; LGPHLNWGGEF; GPHLNWGGEFL; PHLNWGGEFLL;
HLNWGGEFLLC; LNWGGEFLLCC; NWGGEFLLCCN; WGGEFLLCCNR; GGEFLLCCNRE;
GEFLLCCNREA; EFLLCCNREAF; FLLCCNREAFF; LLCCNREAFFS; LCCNREAFFSL; CCNREAFFSLG;
CNREAFFSLGY; NREAFFSLGYH; REAFFSLGYHC; GFHLDPPFLGL; FHLDPPFLGLG; HLDPPFLGLGS;
LDPPFLGLGSI; DPPFLGLGSIL; PPFLGLGSILP; PFLGLGSILPL; LLELLLLLLLV; LELLLLLLLVV;
ELLLLLLLVVL; LLLLLLLVVLA; LLLLLLVVLAL; LLLLLVVLALA; LLLLVVLALAR; LLLVVLALARV;
LLVVLALARVP; LVVLALARVPL; VVLALARVPLA; VLALARVPLAF; LALARVPLAFW; ALARVPLAFWE;
LARVPLAFWEL; ARVPLAFWELP; RVPLAFWELPL; VPLAFWELPLD; PLAFWELPLDT; LAFWELPLDTL;
AFWELPLDTLL; FWELPLDTLLF; WELPLDTLLFF; ELPLDTLLFFW; LPLDTLLFFWL; PLDTLLFFWLG;
LDTLLFFWLGP; DTLLFFWLGPS; TLLFFWLGPSS; LLFFWLGPSSY; LFFWLGPSSYA; FFWLGPSSYAS;
FWLGPSSYASR; WLGPSSYASRA; LGPSSYASRAG; GPSSYASRAGV; PSSYASRAGVT; SSYASRAGVTV;
SYASRAGVTVP; YASRAGVTVPY; ASRAGVTVPYR; SRAGVTVPYRP; RAGVTVPYRPR; AGVTVPYRPRS;
GVTVPYRPRSK; VTVPYRPRSKG; TVPYRPRSKGN; VPYRPRSKGNI; PYRPRSKGNIH; LAPPGAIVFSI;
APPGAIVFSIN; PPGAIVFSINS; PGAIVFSINSP; GAIVFSINSPE; AIVFSINSPEC; IVFSINSPECT;
VFSINSPECTL; FSINSPECTLC; FLKSILCVTSS; LKSILCVTSSI; KSILCVTSSIL; SILCVTSSILS;
ILCVTSSILSA; LCVTSSILSAS; CVTSSILSASS; VTSSILSASSI; TSSILSASSIL; VWPKCTRVPSL;
WPKCTRVPSLS; PKCTRVPSLSA; KCTRVPSLSAT; CTRVPSLSATC; TRVPSLSATCL; RVPSLSATCLT;
VPSLSATCLTI; PSLSATCLTIE; SLSATCLTIEG; LSATCLTIEGL; SATCLTIEGLI; ATCLTIEGLIG;
TCLTIEGLIGE; CLTIEGLIGER; LTIEGLIGERS; TIEGLIGERSE; KFIGAFTIVQV; FIGAFTIVQVV;
IGAFTIVQVVS; GAFTIVQVVSS; AFTIVQVVSSK; FTIVQVVSSKN; TIVQVVSSKNL; IVQVVSSKNLA;
VQVVSSKNLAK; QVVSSKNLAKE; VVSSKNLAKES; VSSKNLAKESL; SSKNLAKESLK; SKNLAKESLKN;
KNLAKESLKNL; NLAKESLKNLS; LAKESLKNLSV; AKESLKNLSVL; KESLKNLSVLL; ESLKNLSVLLC;
SLKNLSVLLCN; LKNLSVLLCNS; KNLSVLLCNSC; NLSVLLCNSCE; LSVLLCNSCEV; SVLLCNSCEVI;
VLLCNSCEVIE; LLCNSCEVIEG; LCNSCEVIEGI; CNSCEVIEGIS; NSCEVIEGISS; SCEVIEGISSL;
CEVIEGISSLI; EVIEGISSLIT; VIEGISSLITC; IEGISSLITCH; EGISSLITCHK; GISSLITCHKA;
ISSLITCHKAW; SSLITCHKAWE; SLITCHKAWEI; LITCHKAWEIV; ITCHKAWEIVA; TCHKAWEIVAN;
CHKAWEIVANK; HKAWEIVANKE; KAWEIVANKEG; AWEIVANKEGP; WEIVANKEGPQ;
EIVANKEGPQC; IVANKEGPQCL; VANKEGPQCLG; ANKEGPQCLGS; NKEGPQCLGSR; KEGPQCLGSRY;
ILLTKVFTPGN; LLTKVFTPGNR; LTKVFTPGNRI; TKVFTPGNRIS; YSSGLNNSKAM; SSGLNNSKAMP;
SGLNNSKAMPD; GLNNSKAMPDC; IKAANPAIAPG; KAANPAIAPGA; AANPAIAPGAP; ANPAIAPGAPA;
NPAIAPGAPAI; PAIAPGAPAIT; AIAPGAPAITA; IAPGAPAITAY; APGAPAITAYV; GVRPIAAIASE;
VRPIAAIASEV; RPIAAIASEVL; PIAAIASEVLV; IAAIASEVLVM; AAIASEVLVMP; AIASEVLVMPS;
IASEVLVMPST; ASEVLVMPSTV; SEVLVMPSTVA; EVLVMPSTVAR; VLVMPSTVARD; LVMPSTVARDA;
VMPSTVARDAI; TSIAAAASPAA; SIAAAASPAAI; IAAAASPAAIS; AAAASPAAISA; AAASPAAISAT;
AASPAAISATE; ASPAAISATEN; SPAAISATENP; PAAISATENPV; AAISATENPVA; AISATENPVAA;
ISATENPVAAA; SATENPVAAAA; ATENPVAAAAS; TENPVAAAASD; ENPVAAAASDT; NPVAAAASDTL;
PVAAAASDTLA; VAAAASDTLAT; AAAASDTLATR; AAASDTLATRS; AASDTLATRSP; ASDTLATRSPK;
SDTLATRSPKS; DTLATRSPKSA; TLATRSPKSAR; LATRSPKSARA; ATRSPKSARAA; TRSPKSARAAP;
RSPKSARAAPM; SPKSARAAPMN; PKSARAAPMNL; KSARAAPMNLE; SARAAPMNLEI; ARAAPMNLEIQ;
RAAPMNLEIQK; AAPMNLEIQKK; APMNLEIQKKR; PMNLEIQKKRD; MNLEIQKKRDY; NLEIQKKRDYL;
LEIQKKRDYLP; EIQKKRDYLPR; IQKKRDYLPRS; QKKRDYLPRSL; KKRDYLPRSLL; KRDYLPRSLLQ;
RDYLPRSLLQS; DYLPRSLLQSL; YLPRSLLQSLL; LPRSLLQSLLQ; PRSLLQSLLQQ; RSLLQSLLQQV;
SLLQSLLQQVK; LLQSLLQQVKQ; LQSLLQQVKQW; QSLLQQVKQWY; SLLQQVKQWYF;
LLQQVKQWYFC; LQQVKQWYFCF; QQVKQWYFCFS; QVKQWYFCFSR; VKQWYFCFSRL;
KQWYFCFSRLH; QWYFCFSRLHC; WYFCFSRLHCL; YFCFSRLHCLH; FCFSRLHCLHL; CFSRLHCLHLY;
FSRLHCLHLYK; SRLHCLHLYKI; RLHCLHLYKIP; LHCLHLYKIPA; HCLHLYKIPAK; CLHLYKIPAKA;
LHLYKIPAKAL; HLYKIPAKALK; KSSELFFLFQS; SSELFFLFQSR; SELFFLFQSRF; ELFFLFQSRFY;
LFFLFQSRFYQ; FFLFQSRFYQL; FLFQSRFYQLS; LFQSRFYQLSL; FQSRFYQLSLK; QSRFYQLSLKL;
SRFYQLSLKLV; RFYQLSLKLVV; FYQLSLKLVVT; YQLSLKLVVTA; QLSLKLVVTAG; LSLKLVVTAGA;
SLKLVVTAGAE; LKLVVTAGAEP; KLVVTAGAEPW; LVVTAGAEPWP; VVTAGAEPWPL;
VTAGAEPWPLS; TAGAEPWPLSS; AGAEPWPLSSL; GAEPWPLSSLT; AEPWPLSSLTG; EPWPLSSLTGD;
PWPLSSLTGDK; WPLSSLTGDKA; PLSSLTGDKAK; LSSLTGDKAKI; SSLTGDKAKIP; SLTGDKAKIPR;
LTGDKAKIPRL; TGDKAKIPRLA; GDKAKIPRLAK; DKAKIPRLAKH; KAKIPRLAKHV; AKIPRLAKHVC;
KIPRLAKHVCH; IPRLAKHVCHA; PRLAKHVCHAL; RLAKHVCHALS; LAKHVCHALSF; AKHVCHALSFL;
KHVCHALSFLR; HVCHALSFLRS; VCHALSFLRSW; CHALSFLRSWF; HALSFLRSWFG; ALSFLRSWFGC;
LSFLRSWFGCI; SFLRSWFGCIP; FLRSWFGCIPW; LRSWFGCIPWV; RSWFGCIPWVS; SWFGCIPWVSS;
WFGCIPWVSSS; FGCIPWVSSSS; GCIPWVSSSSL; GHGLAAFPCES; HGLAAFPCESC; GLAAFPCESCT;
LAAFPCESCTF; AAFPCESCTFL; AFPCESCTFLP; FPCESCTFLPE; PCESCTFLPEV; CESCTFLPEVM;
ESCTFLPEVMV; SCTFLPEVMVW; CTFLPEVMVWL; TFLPEVMVWLH; FLPEVMVWLHS;
LPEVMVWLHSM; PEVMVWLHSMG; EVMVWLHSMGK; VMVWLHSMGKQ; MVWLHSMGKQL;
VWLHSMGKQLL; WLHSMGKQLLP; LHSMGKQLLPV; HSMGKQLLPVA; SMGKQLLPVAF;
MGKQLLPVAFF; GKQLLPVAFFF; KQLLPVAFFFI; QLLPVAFFFII; LLPVAFFFIIY; LPVAFFFIIYK;
PVAFFFIIYKR; VAFFFIIYKRP; AFFFIIYKRPR; FFFIIYKRPRP; FFIIYKRPRPP; FIIYKRPRPPL;
IIYKRPRPPLP; IYKRPRPPLPP; YKRPRPPLPPP; KRPRPPLPPPF; RPRPPLPPPFL; PRPPLPPPFLS;
RPPLPPPFLSS; PPLPPPFLSSS; PLPPPFLSSSK; LPPPFLSSSKG; PPPFLSSSKGV; PPFLSSSKGVE;
PFLSSSKGVEA; FLSSSKGVEAF; LSSSKGVEAFS; SSSKGVEAFSE; SSKGVEAFSEA; QNYLGKSLFFC;
NYLGKSLFFCN; YLGKSLFFCNF; LGKSLFFCNFC; GKSLFFCNFCK

BK virus complementary reading frame 3
8 mers:

QGRIHGAH; GRIHGAHG; RIHGAHGP; IHGAHGPF; HGAHGPFR; GAHGPFRP; KSCLGKSS; SCLGKSSL;
CLGKSSLN; LGKSSLNE; GKSSLNEK; KSSLNEKS; SSLNEKSL; SLNEKSLF; LNEKSLFK; NEKSLFKE;
EKSLFKEV; NEENEYFV; KNGAGCKG; NGAGCKGS; GAGCKGSS; AGCKGSSS; GCKGSSSA; FSSLPRYP;
SSLPRYPV; SLPRYPVL; LPRYPVLQ; PRYPVLQG; RYPVLQGM; YPVLQGMA; PVLQGMAY; VLQGMAYL;
LQGMAYLF; QGMAYLFQ; GMAYLFQK; MAYLFQKA; AYLFQKAF; YLFQKAFC; LFQKAFCA;
FQKAFCAL; QKAFCALP; KAFCALPL; AFCALPLH; FCALPLHA; CALPLHAM; ALPLHAMS; LPLHAMSA;
KIFKKRAL; IFKKRALG; FKKRALGL; KKRALGLD; KRALGLDR; RALGLDRL; ALGLDRLL; LGLDRLLL;
GLDRLLLH; LLHTVVWL; LHTVVWLR; HTVVWLRP; TVVWLRPN; RNSAMVGP; NSAMVGPN;
SAMVGPNN; AMVGPNNW; MVGPNNWR; VGPNNWRN; GPNNWRNS; PNNWRNSL; NNWRNSLQ;
NWRNSLQR; WRNSLQRS; RNSLQRSK; NSLQRSKA; SLQRSKAL; LQRSKALR; INNKILKG; NNKILKGP;
NKILKGPK; VPTYGTEE; PTYGTEEW; TYGTEEWE; YGTEEWES; GTEEWESW; TEEWESWW;
EEWESWWS; EWESWWSS; WESWWSSF; ESWWSSFN; SWWSSFNE; WWSSFNEK; WSSFNEKW;
SSFNEKWD; SFNEKWDE; FNEKWDED; NEKWDEDL; EKWDEDLF; KWDEDLFC; WDEDLFCH;
DEDLFCHE; EDLFCHED; DLFCHEDM; LFCHEDMF; FCHEDMFA; CHEDMFAS; HEDMFASD; EDMFASDE;
DMFASDEE; MFASDEEA; FASDEEAT; ASDEEATA; SDEEATAD; DEEATADS; EEATADSQ; EATADSQH;
ATADSQHS; TADSQHST; ADSQHSTP; DSQHSTPP; SQHSTPPK; QHSTPPKK; HSTPPKKK; STPPKKKR;
TPPKKKRK; PPKKKRKV; PKKKRKVE; KKKRKVED; KKRKVEDP; KRKVEDPK; RKVEDPKD;
KVEDPKDF; VEDPKDFP; EDPKDFPS; DPKDFPSD; PKDFPSDL; KDFPSDLH; DFPSDLHQ; FPSDLHQF;
PSDLHQFL; SDLHQFLS; DLHQFLSQ; LHQFLSQA; HQFLSQAV; QFLSQAVF; FLSQAVFS; LSQAVFSN;
SQAVFSNR; QAVFSNRT; AVFSNRTL; VFSNRTLA; FSNRTLAC; SNRTLACF; NRTLACFA; RTLACFAV;
TLACFAVY; LACFAVYT; ACFAVYTT; CFAVYTTK; FAVYTTKE; AVYTTKEK; VYTTKEKA; YTTKEKAQ;
TTKEKAQI; TKEKAQIL; KEKAQILY; EKAQILYK; KAQILYKK; AQILYKKL; QILYKKLM; ILYKKLME;
LYKKLMEK; YKKLMEKY; KKLMEKYS; KLMEKYSV; LMEKYSVT; MEKYSVTF; EKYSVTFI; KYSVTFIS;
YSVTFISR; SVTFISRH; VTFISRHM; TFISRHMC; FISRHMCA; ISRHMCAG; SRHMCAGH; RHMCAGHN;
HMCAGHNI; MCAGHNII; CAGHNIIF; AGHNIIFF; GHNIIFFL; HNIIFFLT; NIIFFLTP; IIFFLTPH; IFFLTPHR;
FFLTPHRH; FLTPHRHR; LTPHRHRV; TPHRHRVS; PHRHRVSA; HRHRVSAI; RHRVSAIN; HRVSAINN;
RVSAINNF; VSAINNFC; SAINNFCQ; AINNFCQK; INNFCQKL; NNFCQKLC; NFCQKLCT; FCQKLCTF;
CQKLCTFS; QKLCTFSF; KLCTFSFL; LCTFSFLI; CTFSFLIC; TFSFLICK; FSFLICKG; SFLICKGV;
FLICKGVN; LICKGVNK; ICKGVNKE; CKGVNKEY; KGVNKEYL; GVNKEYLL; VNKEYLLY; NKEYLLYS;
KEYLLYSA; EYLLYSAL; YLLYSALT; LLYSALTR; LYSALTRD; YSALTRDP; SALTRDPY; ALTRDPYH;
LTRDPYHT; TRDPYHTI; RDPYHTIE; DPYHTIEE; PYHTIEES; YHTIEESI; HTIEESIQ; TIEESIQG;
IEESIQGG; EESIQGGL; ESIQGGLK; SIQGGLKE; IQGGLKEH; QGGLKEHD; GGLKEHDF; GLKEHDFS;
LKEHDFSP; KEHDFSPE; EHDFSPEE; HDFSPEEP; DFSPEEPE; FSPEEPEE; SPEEPEET; PEEPEETK;
EEPEETKQ; EPEETKQV; PEETKQVS; EETKQVSW; ETKQVSWK; TKQVSWKL; KQVSWKLI; QVSWKLIT;
VSWKLITE; SWKLITEY; WKLITEYA; KLITEYAV; LITFYAVE; ITFYAVET; TEYAVETK; EYAVETKC;
YAVETKCE; AVETKCED; VETKCEDV; ETKCEDVF; TKCEDVFL; KCEDVFLL; CEDVFLLL; EDVFLLLG;
DVFLLLGM; VFLLLGMY; FLLLGMYL; LLLGMYLE; LLGMYLEF; LGMYLEFQ; GMYLEFQY;
MYLEFQYN; YLEFQYNV; LEFQYNVE; EFQYNVEE; FQYNVEEC; QYNVEECK; YNVEECKK;
NVEECKKC; VEECKKCQ; EECKKCQK; ECKKCQKK; CKKCQKKD; KKCQKKDQ; KCQKKDQP;
CQKKDQPY; QKKDQPYH; KKDQPYHF; KDQPYHFK; DQPYHFKY; QPYHFKYH; PYHFKYHE;
YHFKYHEK; HFKYHEKH; FKYHEKHF; KYHEKHFA; YHEKHFAN; HEKHFANA; EKHFANAI; KHFANAII;
HFANAIIF; FANAIIFA; ANAIIFAE; NAIIFAES; AIIFAESK; IIFAESKN; IFAESKNQ; FAESKNQK;
AESKNQKS; ESKNQKSI; SKNQKSIC; KNQKSICQ; NQKSICQQ; QKSICQQA; KSICQQAV; SICQQAVD;
ICQQAVDT; CQQAVDTV; QQAVDTVL; QAVDTVLA; AVDTVLAK; VDTVLAKK; DTVLAKKR;
TVLAKKRV; VLAKKRVD; LAKKRVDT; AKKRVDTL; KKRVDTLH; KRVDTLHM; RVDTLHMT;
VDTLHMTR; DTLHMTRE; TLHMTREE; LHMTREEM; HMTREEML; MTREEMLT; TREEMLTE;
REEMLTER; EEMLTERF; EMLTERFN; MLTERFNH; LTERFNHI; TERFNHIL; ERFNHILD; RFNHILDK;
FNHILDKM; NHILDKMD; HILDKMDL; ILDKMDLI; LDKMDLIF; DKMDLIFG; KMDLIFGA; MDLIFGAH;
DLIFGAHG; LIFGAHGN; IFGAHGNA; FGAHGNAV; GAHGNAVL; AHGNAVLE; HGNAVLEQ;
GNAVLEQY; NAVLEQYM; AVLEQYMA; VLEQYMAG; LEQYMAGV; EQYMAGVA; QYMAGVAW;
YMAGVAWL; MAGVAWLH; AGVAWLHC; GVAWLHCL; VAWLHCLL; AWLHCLLP; WLHCLLPK;
LHCLLPKM; HCLLPKMD; CLLPKMDS; LLPKMDSV; LPKMDSVI; PKMDSVIF; KMDSVIFD; MDSVIFDF;
DSVIFDFL; SVIFDFLH; VIFDFLHC; IFDFLHCI; FDFLHCIV; DFLHCIVF; FLHCIVFN; LHCWFNV;
HCIVFNVP; CIVFNVPK; IVFNVPKR; VFNVPKRR; FNVPKRRY; NVPKRRYW; VPKRRYWL; PKRRYWLF;
KRRYWLFK; RRYWLFKG; RYWLFKGP; YWLFKGPI; WLFKGPID; LFKGPIDS; FKGPIDSG; KGPIDSGK;
GPIDSGKT; PIDSGKTT; IDSGKTTL; DSGKTTLA; SGKTTLAA; GKTTLAAG; KTTLAAGL; TTLAAGLL;
TLAAGLLD; LAAGLLDL; AAGLLDLC; AGLLDLCG; GLLDLCGG; LLDLCGGK; LDLCGGKA;
DLCGGKAL; LCGGKALN; CGGKALNV; GGKALNVN; GKALNVNL; KALNVNLP; ALNVNLPM;
LNVNLPME; NVNLPMER; VNLPMERL; NLPMERLT; LPMERLTF; PMERLTFE; MERLTFEL; ERLTFELG;
RLTFELGV; LTFELGVA; TFELGVAI; FELGVAID; ELGVAIDQ; LGVAIDQY; GVAIDQYM; VAIDQYMV;
AIDQYMVV; IDQYMVVF; DQYMVVFE; QYMVVFED; YMVVFEDV; MVVFEDVK; VVFEDVKG;
VFEDVKGT; FEDVKGTG; EDVKGTGA; DVKGTGAE; VKGTGAES; KGTGAESK; GTGAESKD;
TGAESKDL; GAESKDLP; AESKDLPS; ESKDLPSG; SKDLPSGH; KDLPSGHG; DLPSGHGI; LPSGHGIN;
PSGHGINN; SGHGINNL; GHGINNLD; HGINNLDS; GINNLDSL; INNLDSLR; NNLDSLRD; NLDSLRDY;
LDSLRDYL; DSLRDYLD; SLRDYLDG; LRDYLDGS; RDYLDGSV; DYLDGSVK; YLDGSVKV; LDGSVKVN;
DGSVKVNL; GSVKVNLE; SVKVNLEK; VKVNLEKK; KVNLEKKH; VNLEKKHL; NLEKKHLN;
LEKKHLNK; EKKHLNKR; KKHLNKRT; KHLNKRTQ; HLNKRTQI; LNKRTQIF; NKRTQIFP; KRTQIFPP;
RTQIFPPG; TQIFPPGL; QIFPPGLV; IFPPGLVT; FPPGLVTM; PPGLVTMN; PGLVTMNE; GLVTMNEY;
LVTMNEYP; VTMNEYPV; TMNEYPVP; MNEYPVPK; NEYPVPKT; EYPVPKTL; YPVPKTLQ; PVPKTLQA;
VPKTLQAR; PKTLQARF; KTLQARFV; TLQARFVR; LQARFVRQ; QARFVRQI; ARFVRQID; RFVRQIDF;
FVRQIDFR; VRQIDFRP; RQIDFRPK; QIDFRPKI; IDFRPKIY; DFRPKIYL; FRPKIYLR; RPKIYLRK;
PKIYLRKS; KIYLRKSL; IYLRKSLQ; YLRKSLQN; LRKSLQNS; RKSLQNSE; KSLQNSEF; SLQNSEFL;
LQNSEFLL; QNSEFLLE; NSEFLLEK; SEFLLEKR; EFLLEKRI; FLLEKRIL; LLEKRILQ; LEKRILQS;
EKRILQSG; KRILQSGM; RILQSGMT; ILQSGMTL; LQSGMTLL; QSGMTLLL; SGMTLLLL; GMTLLLLL;
MTLLLLLI; TLLLLLIW; LLLLLIWF; LLLLIWFR; LLLIWFRP; LLIWFRPV; LIWFRPVA; IWFRPVAD;
WFRPVADF; FRPVADFA; RPVADFAT; PVADFATD; VADFATDI; ADFATDIQ; DFATDIQS; FATDIQSR;
ATDIQSRI; TDIQSRIV; DIQSRIVE; IQSRTVEW; QSRIVEWK; SRIVEWKE; RTVEWKER; IVEWKERL;
VEWKERLD; EWKERLDS; WKERLDSE; KERLDSEI; ERLDSEIS; RLDSEISM; LDSEISMY; DSEISMYT;
SEISMYTF; EISMYTFS; ISMYTFSR; SMYTFSRM; MYTFSRMK; YTFSRMKY; TFSRMKYN; FSRMKYNI;
SRMKYNIC; RMKYNICM; MKYNICMG; KYNICMGK; YNICMGKC; NICMGKCI; ICMGKCIL; CMGKCILD;
MGKCILDI; GKCILDIT; KCILDITR; CILDITRE; ILDITREE; LDITREED; DITREEDS; ITREEDSE;
TREEDSET; REEDSETE; EEDSETED; EDSETEDS; DSETEDSG; SETEDSGH; ETEDSGHG; TEDSGHGS;
EDSGHGSS; DSGHGSST; SGHGSSTE; GHGSSTES; HGSSTESQ; GSSTESQS; SSTESQSQ; STESQSQC;
TESQSQCS; ESQSQCSS; SQSQCSSQ; QSQCSSQV; SQCSSQVS; QCSSQVSD; CSSQVSDT; SSQVSDTS;
SQVSDTSA; QVSDTSAP; VSDTSAPA; SDTSAPAE; DTSAPAED; TSAPAEDS; SAPAEDSQ; APAEDSQR;
PAEDSQRS; AEDSQRSD; EDSQRSDP; DSQRSDPH; SQRSDPHS; QRSDPHSQ; RSDPHSQE; SDPHSQEL;
DPHSQELH; PHSQELHL; HSQELHLC; SQELHLCK; QELHLCKG; ELHLCKGF; LHLCKGFQ; HLCKGFQC;
LCKGFQCF; CKGFQCFK; KGFQCFKR; GFQCFKRP; FQCFKRPK; QCFKRPKT; CFKRPKTP; FKRPKTPP;
KRPKTPPP; RPKTPPPK; HKLKSGLY; KLKSGLYK; LKSGLYKS; KSGLYKSS; SGLYKSSI; GLYKSSIY;
MYMYNKST; YMYNKSTC; MYNKSTCL; YNKSTCLK; NKSTCLKH; KSTCLKHF; STCLKHFG; TCLKHFGL;
CLKHFGLQ; LKHFGLQL; KHFGLQLS; HFGLQLSL; FGLQLSLF; GLQLSLFV; LQLSLFVN; QLSLFVNI;
LSLFVNIS; SLFVNISY; LFVNISYH; FVNISYHI; VNISYHIW; NISYHIWV; ISYHIWVP; SYHIWVPW;
YHIWVPWK; HIWVPWKS; IWVPWKSF; WVPWKSFC; VPWKSFCA; PWKSFCAI; WKSFCAIK; KSFCAIKH;
SFCAIKHP; FCAIKHPN; CAIKHPNL; AIKHPNLF; IKHPNLFY; KHPNLFYL; HPNLFYLG; PNLFYLGF;
NLFYLGFH; LFYLGFHT; FYLGFHTI; YLGFHTIH; LGFHTIHR; GFHTIHRL; FHTIHRLP; HTIHRLPI;
TIHRLPIH; IHRLPIHS; HRLPIHSL; RLPIHSLG; LPIHSLGS; PIHSLGSP; IHSLGSPV; HSLGSPVY;
SLGSPVYK; LGSPVYKV; GSPVYKVT; QKGNWVRI; KGNWVRIL; GNWVRILY; NWVRILYR; WVRILYRS;
VRILYRSF; RILYRSFS; ILYRSFSQ; LYRSFSQA; YRSFSQAD; RSFSQADL; SFSQADLK; FSQADLKI;
SQADLKIS; QADLKISC; ADLKISCK; DLKISCKA; LKISCKAS; KISCKASP; ISCKASPL; SCKASPLL;
CKASPLLC; KASPLLCS; ASPLLCSR; SPLLCSRA; PLLCSRAV; LLCSRAVS; LCSRAVSK; CSRAVSKQ;
SRAVSKQA; RAVSKQAT; AVSKQATN; VSKQATNI; SKQATNIS; KQATNISS; NIQAISFT; IQAISFTK;
QAISFTKR; AISFTKRP; ISFTKRPH; SFTKRPHT; FTKRPHTL; TKRPHTLF; KRPHTLFI; QHCGSCVG;
HCGSCVGH; CGSCVGHM; GSCVGHMK; SCVGHMKY; CVGHMKYW; VGHMKYWG; GHMKYWGN;
HMKYWGNI; MKYWGNIF; KYWGNIFP; YWGNIFPS; WGNIFPSC; GNIFPSCE; NIFPSCES; IFPSCESP;
FPSCESPK; PSCESPKI; SCESPKIP; CESPKIPS; ESPKIPSI; SPKIPSIF; PKIPSIFI; KIPSIFIS; IPSIFIST;
PSIFISTG; SIFISTGI; IFISTGIR; FISTGIRY; ISTGIRYP; STGIRYPA; TGIRYPAL; GIRYPALN; IRYPALNW;
RYPALNWI; YPALNWIS; PALNWISI; ALNWISIV; LNWISIVF; NWISIVFV; WISIVFVQ; ISIVFVQI;
SIVFVQIG; IVFVQIGL; VFVQIGLM; FVQIGLMV; VQIGLMVS; QIGLMVSI; IGLMVSIH; GLMVSIHY;
LMVSIHYL; MVSIHYLG; VSIHYLGL; SIHYLGLG; IHYLGLGC; HYLGLGCW; YLGLGCWV; LGLGCWVF;
GLGCWVFR; LGCWVFRG; GCWVFRGY; CWVFRGYS; WVFRGYST; VFRGYSTI; FRGYSTIR; RGYSTIRV;
GYSTIRVL; HSLHFQGF; SLHFQGFS; LHFQGFST; HFQGFSTY; FQGFSTYS; QGFSTYSK; GFSTYSKE;
FSTYSKEV; STYSKEVE; TYSKEVEI; YSKEVEIT; SKEVEITA; KEVEITAL; EVEITALN; VEITALNR;
EITALNRF; ITALNRFS; TALNRFSS; ALNRFSST; LNRFSSTM; NRFSSTML; RFSSTMLM; FSSTMLMH;
SSTMLMHF; STMLMHFL; PCMKVKHA; CMKVKHAS; MKVKHASY; KVKHASYS; VKHASYSN;
KHASYSNN; HASYSNNL; ASYSNNLC; SYSNNLCL; YSNNLCLY; SNNLCLYS; NNLCLYSY; NLCLYSYS;
LCLYSYSL; CLYSYSLP; LYSYSLPH; YSYSLPHQ; IGEGNSCC; GEGNSCCA; EGNSCCAV; GNSCCAVT;
NSCCAVTG; SCCAVTGK; CCAVTGKH; CAVTGKHF; AVTGKHFS; VTGKHFSL; TGKHFSLW;
GKHFSLWA; KHFSLWAI; HFSLWAIT; FSLWAITA; SLWAITAK; LWAITAKV; WAITAKVI; AITAKVIF;
ITAKVIFS; TAKVIFST; TKAPKVFI; KAPKVFIW; APKVFIWI; PKVFIWIP; KVFIWIPH; VFIWIPHF;
FIWIPHFW; IWIPHFWV; EAFYLCNS; AFYLCNSI; FYLCNSIY; YLCNSIYP; LCNSIYPS; CNSIYPSF;
NSIYPSFN; SIYPSFNF; FWHLHGFL; WHLHGFLW; HLHGFLWL; LHGFLWLF; HGFLWLFG; GFLWLFGS;
FLWLFGSC; LWLFGSCP; WLFGSCPW; LFGSCPWT; FGSCPWTL; GSCPWTLS; SCPWTLSF; CPWTLSFS;
PWTLSFSF; WTLSFSFG; TLSFSFGW; LSFSFGWG; SFSFGWGH; FSFGWGHL; SFGWGHLH; FGWGHLHM;
GWGHLHML; WGHLHMLQ; GHLHMLQE; HLHMLQEQ; LHMLQEQV; HMLQEQVL; MLQEQVLQ;
LQEQVLQS; QEQVLQSR; EQVLQSRT; QVLQSRTG; VLQSRTGL; LQSRTGLE; QSRTGLEV; SRTGLEVK;
RTGLEVKA; TGLEVKAT; GLEVKATS; LEVKATSI; EVKATSIE; VKATSIEE; KATSIEEQ; ATSIEEQF;
TSIEEQFF; SIEEQFFD; TLLNVHFV; LLNVHFVD; LNVHFVDF; NVHFVDFL; VHFVDFLS; HFVDFLSP;
FVDFLSPF; VDFLSPFF; DFLSPFFV; LLLYCQHH; LLYCQHHL; LYCQHHLY; YCQHHLYY; CQHHLYYK;
QHHLYYKY; HHLYYKYG; HLYYKYGQ; LYYKYGQN; YYKYGQNV; YKYGQNVH; KYGQNVHG;
YGQNVHGY; GQNVHGYL; QNVHGYLP; NVHGYLPF; VHGYLPFQ; HGYLPFQL; GYLPFQLL; YLPFQLLV;
GKDQNNIV; KDQNNIVE; DQNNIVEY; QNNIVEYN; NNIVEYNY; NIVEYNYK; IVEYNYKS; VEYNYKSL;
KIFLFFSA; IFLFFSAI; FLFFSAIP; LFFSAIPV; FFSAIPVR; FSAIPVRL; QTKKDPNA; QKYLHQET;
KYLHQETE; YLHQETEY; LHQETEYH; HQETEYHS; QETEYHST; ETEYHSTH; TEYHSTHL; EYHSTHLG;
TIPKPCLI; IPKPCLIA; PKPCLIAD; KPCLIADR; PCLIADRG; CLIADRGL; LIADRGLQ; IADRGLQW;
ADRGLQWK; DRGLQWKL; RGLQWKLC; GLQWKLCD; LQWKLCDP; QWKLCDPN; WKLCDPNH;
KLCDPNHQ; LCDPNHQR; CDPNHQRT; DPNHQRTY; PNHQRTYT; NHQRTYTL; HQRTYTLL; QRTYTLLE;
RTYTLLEL; TYTLLELR; YTLLELRN; QFELKQQT; FELKQQTQ; ELKQQTQQ; PQEHQQLQ; QEHQQLQH;
EHQQLQHM; HQQLQHMF; QQLQHMFE; QLQHMFEE; LQHMFEEL; QHMFEELG; HMFEELGL;
PLRYLLCP; LRYLLCPL; RYLLCPLQ; QGMQFELL; QQQPPQQQ; QQPPQQQF; QPPQQQFQ; PPQQQFQP;
PQQQFQPL; QQQFQPLK; QQFQPLKI; QFQPLKIL; FQPLKILW; QPLKILWQ; PLKILWQQ; LKILWQQQ;
KILWQQQP; ILWQQQPQ; LWQQQPQI; WQQQPQIH; QQQPQIHW; QQPQIHWQ; QPQIHWQL; PQIHWQLG;
QIHWQLGP; IHWQLGPP; HWQLGPPK; WQLGPPKV; QLGPPKVL; LGPPKVLE; GPPKVLEQ; PPKVLEQH;
PKVLEQHP; TWKYKKKG; WKYKKKGI; KYKKKGIT; YKKKGITY; KKKGITYL; KKGITYLG; KGITYLGV;
GITYLGVF; ITYLGVFY; TYLGVFYR; YLGVFYRV; LGVFYRVF; GVFYRVFY; VFYRVFYS; FYRVFYSR;
SSGTFVFP; SGTFVFPV; GTFVFPVY; TFVFPVYT; FVFPVYTV; VFPVYTVF; FPVYTVFT; PVYTVFTS;
VYTVFTST; YTVFTSTK; TVFTSTKF; VFTSTKFQ; FTSTKFQQ; TSTKFQQK; STKFQQKL; NKNKNPLS;
KNKNPLSS; NKNPLSSF; KNPLSSFF; NPLSSFFC; PLSSFFCS; LSSFFCSS; SSFFCSSP; SFFCSSPG;
FFCSSPGF; FCSSPGFT; CSSPGFTN; SSPGFTNF; SPGFTNFH; QLAQNHGL; LAQNHGLC; AQNHGLCP;
QNHGLCPV; LGTRPRFL; GTRPRFLG; TRPRFLGS; RPRFLGSQ; PRFLGSQN; RFLGSQNM; FLGSQNMS;
LGSQNMSV; GSQNMSVM; SQNMSVMH; QNMSVMHF; NMSVMHFP; MSVMHFPS; GHGLAAFH;
HGLAAFHG; AAPPCESC; APPCESCT; PPCESCTF; PCESCTFL; CESCTFLP; ESCTFLPE; SCTFLPEV;
CTFLPEVM; TFLPEVMV; FLPEVMVW; LPEVMVWL; PEVMVWLH; EVMVWLHS; VMVWLHSP;
MVWLHSPV; VWLHSPVS; WLHSPVSH; LHSPVSHA; HSPVSHAL; SPVSHALS; PVSHALSF; VSHALSFL;
SHALSFLR; HALSFLRS; ALSFLRSW; LSFLRSWF; SFLRSWFG; FLRSWFGC; LRSWFGCI; RSWFGCIP;
SWFGCIPW; WFGCIPWV; FGCIPWVS; GCIPWVSS; CIPWVSSS; IPWVSSSS; PWVSSSSL; WVSSSSLW;
VSSSSLWP; SSSSLWPF; SSSLWPFF; SSLWPFFL; YIRGRGRL; IRGRGRLC; RGRGRLCL; GRGRLCLH;
RGRLCLHP; GRLCLHPF; RLCLHPFS; LCLHPFSQ; CLHPFSQV; LHPFSQVV; HPFSQVVR; PFSQVVRV;
FSQVVRVW; SQVVRVWR; QVVRVWRL; VVRVWRLF; VRVWRLFL; RVWRLFLR; VWRLFLRP;
WRLFLRPS; RLFLRPSK; LFLRPSKT; FLRPSKTI; LRPSKTIW; RPSKTIWG; PSKTIWGN; SKTIWGNP;
KTIWGNPY; TIWGNPYS; IWGNPYSF; WGNPYSFA; GNPYSFAI; NPYSFAIF; PYSFAIFA; YSFAIFAK

9 mers:

QGRIHGAHG; GRIHGAHGP; RIHGAHGPF; IHGAHGPFR; HGAHGPFRP; KSCLGKSSL; SCLGKSSLN;
CLGKSSLNE; LGKSSLNEK; GKSSLNEKS; KSSLNEKSL; SSLNEKSLF; SLNEKSLFK; LNEKSLFKE;
NEKSLFKEV; KNGAGCKGS; NGAGCKGSS; GAGCKGSSS; AGCKGSSSA; FSSLPRYPV; SSLPRYPVL;
SLPRYPVLQ; LPRYPVLQG; PRYPVLQGM; RYPVLQGMA; YPVLQGMAY; PVLQGMAYL; VLQGMAYLF;
LQGMAYLFQ; QGMAYLFQK; GMAYLFQKA; MAYLFQKAF; AYLFQKAFC; YLFQKAFCA; LFQKAFCAL;
FQKAFCALP; QKAFCALPL; KAFCALPLH; AFCALPLHA; FCALPLHAM; CALPLHAMS; ALPLHAMSA;
KIFKKRALG; IFKKRALGL; FKKRALGLD; KKRALGLDR; KRALGLDRL; RALGLDRLL; ALGLDRLLL;
LGLDRLLLH; LLHTVVWLR; LHTVVWLRP; HTVVWLRPN; RNSAMVGPN; NSAMVGPNN; SAMVGPNNW;
AMVGPNNWR; MVGPNNWRN; VGPNNWRNS; GPNNWRNSL; PNNWRNSLQ; NNWRNSLQR;
NWRNSLQRS; WRNSLQRSK; RNSLQRSKA; NSLQRSKAL; SLQRSKALR; INNKILKGP; NNKILKGPK;
VPTYGTEEW; PTYGTEEWE; TYGTEEWES; YGTEEWESW; GTEEWESWW; TEEWESWWS; EEWESWWSS;
EWESWWSSF; WESWWSSFN; ESWWSSFNE; SWWSSFNEK; WWSSFNEKW; WSSFNEKWD;
SSFNEKWDE; SFNEKWDED; FNEKWDEDL; NEKWDEDLF; EKWDEDLFC; KWDEDLFCH; WDEDLFCHE;
DEDLFCHED; EDLFCHEDM; DLFCHEDMF; LFCHEDMFA; FCHEDMFAS; CHEDMFASD; HEDMFASDE;
EDMFASDEE; DMFASDEEA; MFASDEEAT; FASDEEATA; ASDEEATAD; SDEEATADS; DEEATADSQ;
EEATADSQH; EATADSQHS; ATADSQHST; TADSQHSTP; ADSQHSTPP; DSQHSTPPK; SQHSTPPKK;
QHSTPPKKK; HSTPPKKKR; STPPKKKRK; TPPKKKRKV; PPKKKRKVE; PKKKRKVED; KKKRKVEDP;
KKRKVEDPK; KRKVEDPKD; RKVEDPKDF; KVEDPKDFP; VEDPKDFPS; EDPKDFPSD; DPKDFPSDL;
PKDFPSDLH; KDFPSDLHQ; DFPSDLHQF; FPSDLHQFL; PSDLHQFLS; SDLHQFLSQ; DLHQFLSQA;
LHQFLSQAV; HQFLSQAVF; QFLSQAVFS; FLSQAVFSN; LSQAVFSNR; SQAVFSNRT; QAVFSNRTL;
AVFSNRTLA; VFSNRTLAC; FSNRTLACF; SNRTLACFA; NRTLACFAV; RTLACFAVY; TLACFAVYT;
LACFAVYTT; ACFAVYTTK; CFAVYTTKE; FAVYTTKEK; AVYTTKEKA; VYTTKEKAQ; YTTKEKAQI;
TTKEKAQIL; TKEKAQILY; KEKAQILYK; EKAQILYKK; KAQILYKKL; AQILYKKLM; QILYKKLME;
ILYKKLMEK; LYKKLMEKY; YKKLMEKYS; KKLMEKYSV; KLMEKYSVT; LMEKYSVTF; MEKYSVTFI;
EKYSVTFIS; KYSVTFISR; YSVTFISRH; SVTFISRHM; VTFISRHMC; TFISRHMCA; FISRHMCAG;
ISRHMCAGH; SRHMCAGHN; RHMCAGHNI; HMCAGHNII; MCAGHNIIF; CAGHNIIFF; AGHNIIFFL;
GHNIIFFLT; HNIIFFLTP; NIIFFLTPH; IIFFLTPHR; IFFLTPHRH; FFLTPHRHR; FLTPHRHRV; LTPHRHRVS;
TPHRHRVSA; PHRHRVSAI; HRHRVSAIN; RHRVSAINN; HRVSAINNF; RVSAINNFC; VSAINNFCQ;
SAINNFCQK; AINNFCQKL; INNFCQKLC; NNFCQKLCT; NFCQKLCTF; FCQKLCTFS; CQKLCTFSF;
QKLCTFSFL; KLCTFSFLI; LCTFSFLIC; CTFSFLICK; TFSFLICKG; FSFLICKGV; SFLICKGVN;
FLICKGVNK; LICKGVNKE; ICKGVNKEY; CKGVNKEYL; KGVNKEYLL; GVNKEYLLY; VNKEYLLYS;
NKEYLLYSA; KEYLLYSAL; EYLLYSALT; YLLYSALTR; LLYSALTRD; LYSALTRDP; YSALTRDPY;
SALTRDPYH; ALTRDPYHT; LTRDPYHTI; TRDPYHTIE; RDPYHTIEE; DPYHTIEES; PYHTIEESI;
YHTIEESIQ; HTIEESIQG; TIEESIQGG; IEESIQGGL; EESIQGGLK; ESIQGGLKE; SIQGGLKEH;
IQGGLKEHD; QGGLKEHDF; GGLKEHDFS; GLKEHDFSP; LKEHDFSPE; KEHDFSPEE; EHDFSPEEP;
HDFSPEEPE; DFSPEEPEE; FSPEEPEET; SPEEPEETK; PEEPEETKQ; EEPEETKQV; EPEETKQVS;
PEETKQVSW; EETKQVSWK; ETKQVSWKL; TKQVSWKLI; KQVSWKLIT; QVSWKLITE; VSWKLITEY;
SWKLITEYA; WKLITEYAV; KLITEYAVE; LITEYAVET; ITEYAVETK; TEYAVETKC; EYAVETKCE;
YAVETKCED; AVETKCEDV; VETKCEDVF; ETKCEDVFL; TKCEDVFLL; KCEDVFLLL; CEDVFLLLG;
EDVFLLLGM; DVFLLLGMY; VFLLLGMYL; FLLLGMYLE; LLLGMYLEF; LLGMYLEFQ; LGMYLEFQY;
GMYLEFQYN; MYLEFQYNV; YLEFQYNVE; LEFQYNVEE; EFQYNVEEC; FQYNVEECK; QYNVEECKK;
YNVEECKKC; NVEECKKCQ; VEECKKCQK; EECKKCQKK; ECKKCQKKD; CKKCQKKDQ; KKCQKKDQP;
KCQKKDQPY; CQKKDQPYH; QKKDQPYHF; KKDQPYHFK; KDQPYHFKY; DQPYHFKYH; QPYHFKYHE;
PYHFKYHEK; YHFKYHEKH; HFKYHEKHF; FKYHEKHFA; KYHEKHFAN; YHEKHFANA; HEKHFANAI;
EKHFANAII; KHFANAIIF; HFANAIIFA; FANAIIFAE; ANAIIFAES; NAIIFAESK; AIIFAESKN; IIFAESKNQ;
IFAESKNQK; FAESKNQKS; AESKNQKSI; ESKNQKSIC; SKNQKSICQ; KNQKSICQQ; NQKSICQQA;
QKSICQQAV; KSICQQAVD; SICQQAVDT; ICQQAVDTV; CQQAVDTVL; QQAVDTVLA; QAVDTVLAK;
AVDTVLAKK; VDTVLAKKR; DTVLAKKRV; TVLAKKRVD; VLAKKRVDT; LAKKRVDTL; AKKRVDTLH;
KKRVDTLHM; KRVDTLHMT; RVDTLHMTR; VDTLHMTRE; DTLHMTREE; TLHMTREEM; LHMTREEML;
HMTREEMLT; MTREEMLTE; TREEMLTER; REEMLTERF; EEMLTERFN; EMLTERFNH; MLTERFNHI;
LTERFNHIL; TERFNHILD; ERFNHILDK; RFNHILDKM; FNHILDKMD; NHILDKMDL; HILDKMDLI;
ILDKMDLIF; LDKMDLIFG; DKMDLIFGA; KMDLIFGAH; MDLIFGAHG; DLIFGAHGN; LIFGAHGNA;
IFGAHGNAV; FGAHGNAVL; GAHGNAVLE; AHGNAVLEQ; HGNAVLEQY; GNAVLEQYM;
NAVLEQYMA; AVLEQYMAG; VLEQYMAGV; LEQYMAGVA; EQYMAGVAW; QYMAGVAWL;
YMAGVAWLH; MAGVAWLHC; AGVAWLHCL; GVAWLHCLL; VAWLHCLLP; AWLHCLLPK;
WLHCLLPKM; LHCLLPKMD; HCLLPKMDS; CLLPKMDSV; LLPKMDSVI; LPKMDSVIF; PKMDSVIFD;
KMDSVIFDF; MDSVIFDFL; DSVIFDFLH; SVIFDFLHC; VIFDFLHCI; IFDFLHCIV; FDFLHCIVF;
DFLHCIVFN; FLHCIVFNV; LHCIVFNVP; HCIVFNVPK; CIVFNVPKR; IVFNVPKRR; VFNVPKRRY;
FNVPKRRYW; NVPKRRYWL; VPKRRYWLF; PKRRYWLFK; KRRYWLFKG; RRYWLFKGP; RYWLFKGPI;
YWLFKGPID; WLFKGPIDS; LFKGPIDSG; FKGPIDSGK; KGPIDSGKT; GPIDSGKTT; PIDSGKTTL;
IDSGKTTLA; DSGKTTLAA; SGKTTLAAG; GKTTLAAGL; KTTLAAGLL; TTLAAGLLD; TLAAGLLDL;
LAAGLLDLC; AAGLLDLCG; AGLLDLCGG; GLLDLCGGK; LLDLCGGKA; LDLCGGKAL; DLCGGKALN;
LCGGKALNV; CGGKALNVN; GGKALNVNL; GKALNVNLP; KALNVNLPM; ALNVNLPME; LNVNLPMER;
NVNLPMERL; VNLPMERLT; NLPMERLTF; LPMERLTFE; PMERLTFEL; MERLTFELG; ERLTFELGV;
RLTFELGVA; LTFELGVAI; TFELGVAID; FELGVAIDQ; ELGVAIDQY; LGVAIDQYM; GVAIDQYMV;
VAIDQYMVV; AIDQYMVVF; IDQYMVVFE; DQYMVVFED; QYMVVFEDV; YMVVFEDVK;
MVVFEDVKG; VVFEDVKGT; VFEDVKGTG; FEDVKGTGA; EDVKGTGAE; DVKGTGAES; VKGTGAESK;
KGTGAESKD; GTGAESKDL; TGAESKDLP; GAESKDLPS; AESKDLPSG; ESKDLPSGH; SKDLPSGHG;
KDLPSGHGI; DLPSGHGIN; LPSGHGINN; PSGHGINNL; SGHGINNLD; GHGINNLDS; HGINNLDSL;
GINNLDSLR; INNLDSLRD; NNLDSLRDY; NLDSLRDYL; LDSLRDYLD; DSLRDYLDG; SLRDYLDGS;
LRDYLDGSV; RDYLDGSVK; DYLDGSVKV; YLDGSVKVN; LDGSVKVNL; DGSVKVNLE; GSVKVNLEK;
SVKVNLEKK; VKVNLEKKH; KVNLEKKHL; VNLEKKHLN; NLEKKHLNK; LEKKHLNKR; EKKHLNKRT;
KKHLNKRTQ; KHLNKRTQI; HLNKRTQIF; LNKRTQIFP; NKRTQIFPP; KRTQIFPPG; RTQIFPPGL;
TQIFPPGLV; QIFPPGLVT; IFPPGLVTM; FPPGLVTMN; PPGLVTMNE; PGLVTMNEY; GLVTMNEYP;
LVTMNEYPV; VTMNEYPVP; TMNEYPVPK; MNEYPVPKT; NEYPVPKTL; EYPVPKTLQ; YPVPKTLQA;
PVPKTLQAR; VPKTLQARF; PKTLQARFV; KTLQARFVR; TLQARFVRQ; LQARFVRQI; QARFVRQID;
ARFVRQIDF; RFVRQIDFR; FVRQIDFRP; VRQIDFRPK; RQIDFRPKI; QIDFRPKIY; IDFRPKIYL;
DFRPKIYLR; FRPKIYLRK; RPKIYLRKS; PKIYLRKSL; KIYLRKSLQ; IYLRKSLQN; YLRKSLQNS;
LRKSLQNSE; RKSLQNSEF; KSLQNSEFL; SLQNSEFLL; LQNSEFLLE; QNSEFLLEK; NSEFLLEKR;
SEFLLEKRI; EFLLEKRIL; FLLEKRILQ; LLEKRILQS; LEKRILQSG; EKRILQSGM; KRILQSGMT;
RILQSGMTL; ILQSGMTLL; LQSGMTLLL; QSGMTLLLL; SGMTLLLLL; GMTLLLLLI; MTLLLLLIW;
TLLLLLIWF; LLLLLIWFR; LLLLIWFRP; LLLIWFRPV; LLIWFRPVA; LIWFRPVAD; IWFRPVADF;
WFRPVADFA; FRPVADFAT; RPVADFATD; PVADFATDI; VADFATDIQ; ADFATDIQS; DFATDIQSR;
FATDIQSRI; ATDIQSRIV; TDIQSRIVE; DIQSRIVEW; IQSRIVEWK; QSRIVEWKE; SRIVEWKER;
RIVEWKERL; IVEWKERLD; VEWKERLDS; EWKERLDSE; WKERLDSEI; KERLDSEIS; ERLDSEISM;
RLDSEISMY; LDSEISMYT; DSEISMYTF; SEISMYTFS; EISMYTFSR; ISMYTFSRM; SMYTFSRMK;
MYTFSRMKY; YTFSRMKYN; TFSRMKYNI; FSRMKYNIC; SRMKYNICM; RMKYNICMG; MKYNICMGK;
KYNICMGKC; YNICMGKCI; NICMGKCIL; ICMGKCILD; CMGKCILDI; MGKCILDIT; GKCILDITR;
KCILDITRE; CILDITREE; ILDITREED; LDITREEDS; DITREEDSE; ITREEDSET; TREEDSETE;
REEDSETED; EEDSETEDS; EDSETEDSG; DSETEDSGH; SETEDSGHG; ETEDSGHGS; TEDSGHGSS;
EDSGHGSST; DSGHGSSTE; SGHGSSTES; GHGSSTESQ; HGSSTESQS; GSSTESQSQ; SSTESQSQC;
STESQSQCS; TESQSQCSS; ESQSQCSSQ; SQSQCSSQV; QSQCSSQVS; SQCSSQVSD; QCSSQVSDT;
CSSQVSDTS; SSQVSDTSA; SQVSDTSAP; QVSDTSAPA; VSDTSAPAE; SDTSAPAED; DTSAPAEDS;
TSAPAEDSQ; SAPAEDSQR; APAEDSQRS; PAEDSQRSD; AEDSQRSDP; EDSQRSDPH; DSQRSDPHS;
SQRSDPHSQ; QRSDPHSQE; RSDPHSQEL; SDPHSQELH; DPHSQELHL; PHSQELHLC; HSQELHLCK;
SQELHLCKG; QELHLCKGF; ELHLCKGFQ; LHLCKGFQC; HLCKGFQCF; LCKGFQCFK; CKGFQCFKR;
KGFQCFKRP; GFQCFKRPK; FQCFKRPKT; QCFKRPKTP; CFKRPKTPP; FKRPKTPPP; KRPKTPPPK;
HKLKSGLYK; KLKSGLYKS; LKSGLYKSS; KSGLYKSSI; SGLYKSSIY; MYMYNKSTC; YMYNKSTCL;
MYNKSTCLK; YNKSTCLKH; NKSTCLKHF; KSTCLKHFG; STCLKHFGL; TCLKHFGLQ; CLKHFGLQL;
LKHFGLQLS; KHFGLQLSL; HFGLQLSLF; FGLQLSLFV; GLQLSLFVN; LQLSLFVNI; QLSLFVNIS;
LSLFVNISY; SLFVNISYH; LFVNISYHI; FVNISYHIW; VNISYHIWV; NISYHIWVP; ISYHIWVPW;
SYHIWVPWK; YHIWVPWKS; HIWVPWKSF; IWVPWKSFC; WVPWKSFCA; VPWKSFCAI; PWKSFCAIK;
WKSFCAIKH; KSFCAIKHP; SFCAIKHPN; FCAIKHPNL; CAIKHPNLF; AIKHPNLFY; IKHPNLFYL;
KHPNLFYLG; HPNLFYLGF; PNLFYLGFH; NLFYLGFHT; LFYLGFHTI; FYLGFHTIH; YLGFHTIHR;
LGFHTIHRL; GFHTIHRLP; FHTIHRLPI; HTIHRLPIH; TIHRLPIHS; IHRLPIHSL; HRLPIHSLG; RLPIHSLGS;
LPIHSLGSP; PIHSLGSPV; IHSLGSPVY; HSLGSPVYK; SLGSPVYKV; LGSPVYKVT; QKGNWVRIL;
KGNWVRILY; GNWVRILYR; NWVRILYRS; WVRILYRSF; VRILYRSFS; RILYRSFSQ; ILYRSFSQA;
LYRSFSQAD; YRSFSQADL; RSFSQADLK; SFSQADLKI; FSQADLKIS; SQADLKISC; QADLKISCK;
ADLKISCKA; DLKISCKAS; LKISCKASP; KISCKASPL; ISCKASPLL; SCKASPLLC; CKASPLLCS;
KASPLLCSR; ASPLLCSRA; SPLLCSRAV; PLLCSRAVS; LLCSRAVSK; LCSRAVSKQ; CSRAVSKQA;
SRAVSKQAT; RAVSKQATN; AVSKQATNI; VSKQATNIS; SKQATNISS; NIQAISFTK; IQAISFTKR;
QAISFTKRP; AISFTKRPH; ISFTKRPHT; SFTKRPHTL; FTKRPHTLF; TKRPHTLFI; QHCGSCVGH;
HCGSCVGHM; CGSCVGHMK; GSCVGHMKY; SCVGHMKYW; CVGHMKYWG; VGHMKYWGN;
GHMKYWGNI; HMKYWGNIF; MKYWGNIFP; KYWGNIFPS; YWGNIFPSC; WGNIFPSCE; GNIFPSCES;
NIFPSCESP; IFPSCESPK; FPSCESPKI; PSCESPKIP; SCESPKIPS; CESPKIPSI; ESPKIPSIF; SPKIPSIFI;
PKIPSIFIS; KIPSIFIST; IPSIFISTG; PSIFISTGI; SIFISTGIR; IFISTGIRY; FISTGIRYP; ISTGIRYPA;
STGIRYPAL; TGIRYPALN; GIRYPALNW; IRYPALNWI; RYPALNWIS; YPALNWISI; PALNWISIV;
ALNWISIVF; LNWISIVFV; NWISIVFVQ; WISIVFVQI; ISIVFVQIG; SIVFVQIGL; IVFVQIGLM;
VFVQIGLMV; FVQIGLMVS; VQIGLMVSI; QIGLMVSIH; IGLMVSIHY; GLMVSIHYL; LMVSIHYLG;
MVSIHYLGL; VSIHYLGLG; SIHYLGLGC; IHYLGLGCW; HYLGLGCWV; YLGLGCWVF; LGLGCWVFR;
GLGCWVFRG; LGCWVFRGY; GCWVFRGYS; CWVFRGYST; WVFRGYSTI; VFRGYSTIR; FRGYSTIRV;
RGYSTIRVL; HSLHFQGFS; SLHFQGFST; LHFQGFSTY; HFQGFSTYS; FQGFSTYSK; QGFSTYSKE;
GFSTYSKEV; FSTYSKEVE; STYSKEVEI; TYSKEVEIT; YSKEVEITA; SKEVEITAL; KEVEITALN;
EVEITALNR; VEITALNRF; EITALNRFS; ITALNRFSS; TALNRFSST; ALNRFSSTM; LNRFSSTML;
NRFSSTMLM; RFSSTMLMH; FSSTMLMHF; SSTMLMHFL; PCMKVKHAS; CMKVKHASY; MKVKHASYS;
KVKHASYSN; VKHASYSNN; KHASYSNNL; HASYSNNLC; ASYSNNLCL; SYSNNLCLY; YSNNLCLYS;
SNNLCLYSY; NNLCLYSYS; NLCLYSYSL; LCLYSYSLP; CLYSYSLPH; LYSYSLPHQ; IGEGNSCCA;
GEGNSCCAV; EGNSCCAVT; GNSCCAVTG; NSCCAVTGK; SCCAVTGKH; CCAVTGKHF; CAVTGKHFS;
AVTGKHFSL; VTGKHFSLW; TGKHFSLWA; GKHFSLWAI; KHFSLWAIT; HFSLWAITA; FSLWAITAK;
SLWAITAKV; LWAITAKVI; WAITAKVIF; AITAKVIFS; ITAKVIFST; TKAPKVFIW; KAPKVFIWI;
APKVFIWIP; PKVFIWIPH; KVFIWIPHF; VFIWIPHFW; FIWIPHFWV; EAFYLCNSI; AFYLCNSIY;
FYLCNSIYP; YLCNSIYPS; LCNSIYPSF; CNSIYPSFN; NSIYPSFNF; FWHLHGFLW; WHLHGFLWL;
HLHGFLWLF; LHGFLWLFG; HGFLWLFGS; GFLWLFGSC; FLWLFGSCP; LWLFGSCPW; WLFGSCPWT;
LFGSCPWTL; FGSCPWTLS; GSCPWTLSF; SCPWTLSFS; CPWTLSFSF; PWTLSFSFG; WTLSFSFGW;
TLSFSFGWG; LSFSFGWGH; SFSFGWGHL; FSFGWGHLH; SFGWGHLHM; FGWGHLHML; GWGHLHMLQ;
WGHLHMLQE; GHLHMLQEQ; HLHMLQEQV; LHMLQEQVL; HMLQEQVLQ; MLQEQVLQS;
LQEQVLQSR; QEQVLQSRT; EQVLQSRTG; QVLQSRTGL; VLQSRTGLE; LQSRTGLEV; QSRTGLEVK;
SRTGLEVKA; RTGLEVKAT; TGLEVKATS; GLEVKATSI; LEVKATSIE; EVKATSIEE; VKATSIEEQ;
KATSIEEQF; ATSIEEQFF; TSIEEQFFD; TLLNVHFVD; LLNVHFVDF; LNVHFVDFL; NVHFVDFLS;
VHFVDFLSP; HFVDFLSPF; FVDFLSPFF; VDFLSPFFV; LLLYCQHHL; LLYCQHHLY; LYCQHHLYY;
YCQHHLYYK; CQHHLYYKY; QHHLYYKYG; HHLYYKYGQ; HLYYKYGQN; LYYKYGQNV;
YYKYGQNVH; YKYGQNVHG; KYGQNVHGY; YGQNVHGYL; GQNVHGYLP; QNVHGYLPF;
NVHGYLPFQ; VHGYLPFQL; HGYLPFQLL; GYLPFQLLV; GKDQNNIVE; KDQNNIVEY; DQNNIVEYN;
QNNIVEYNY; NNIVEYNYK; NIVEYNYKS; IVEYNYKSL; KIFLFFSAI; IFLFFSAIP; FLFFSAIPV;
LFFSAIPVR; FFSAIPVRL; QKYLHQETE; KYLHQETEY; YLHQETEYH; LHQETEYHS; HQETEYHST;
QETEYHSTH; ETEYHSTHL; TEYHSTHLG; TIPKPCLIA; IPKPCLIAD; PKPCLIADR; KPCLIADRG;
PCLIADRGL; CLIADRGLQ; LIADRGLQW; IADRGLQWK; ADRGLQWKL; DRGLQWKLC; RGLQWKLCD;
GLQWKLCDP; LQWKLCDPN; QWKLCDPNH; WKLCDPNHQ; KLCDPNHQR; LCDPNHQRT; CDPNHQRTY;
DPNHQRTYT; PNHQRTYTL; NHQRTYTLL; HQRTYTLLE; QRTYTLLEL; RTYTLLELR; TYTLLELRN;
QFELKQQTQ; FELKQQTQQ; PQEHQQLQH; QEHQQLQHM; EHQQLQHMF; HQQLQHMFE; QQLQHMFEE;
QLQHMFEEL; LQHMFEELG; QHMFEELGL; PLRYLLCPL; LRYLLCPLQ; QQQPPQQQF; QQPPQQQFQ;
QPPQQQFQP; PPQQQFQPL; PQQQFQPLK; QQQFQPLKI; QQFQPLKIL; QFQPLKILW; FQPLKILWQ;
QPLKILWQQ; PLKILWQQQ; LKILWQQQP; KILWQQQPQ; ILWQQQPQI; LWQQQPQIH; WQQQPQIHW;
QQQPQIHWQ; QQPQIHWQL; QPQIHWQLG; PQIHWQLGP; QIHWQLGPP; IHWQLGPPK; HWQLGPPKV;
WQLGPPKVL; QLGPPKVLE; LGPPKVLEQ; GPPKVLEQH; PPKVLEQHP; TWKYKKKGI; WKYKKKGIT;
KYKKKGITY; YKKKGITYL; KKKGITYLG; KKGITYLGV; KGITYLGVF; GITYLGVFY; ITYLGVFYR;
TYLGVFYRV; YLGVFYRVF; LGVFYRVFY; GVFYRVFYS; VFYRVFYSR; SSGTFVFPV; SGTFVFPVY;
GTFVFPVYT; TFVFPVYTV; FVFPVYTVF; VFPVYTVFT; FPVYTVFTS; PVYTVFTST; VYTVFTSTK;
YTVFTSTKF; TVFTSTKFQ; VFTSTKFQQ; FTSTKFQQK; TSTKFQQKL; NKNKNPLSS; KNKNPLSSF;
NKNPLSSFF; KNPLSSFFC; NPLSSFFCS; PLSSFFCSS; LSSFFCSSP; SSFFCSSPG; SFFCSSPGF; FFCSSPGFT;
FCSSPGFTN; CSSPGFTNF; SSPGFTNFH; QLAQNHGLC; LAQNHGLCP; AQNHGLCPV; LGTRPRFLG;
GTRPRFLGS; TRPRFLGSQ; RPRFLGSQN; PRFLGSQNM; RFLGSQNMS; FLGSQNMSV; LGSQNMSVM;
GSQNMSVMH; SQNMSVMHF; QNMSVMHFP; NMSVMHFPS; GHGLAAFHG; AAPPCESCT; APPCESCTF;
PPCESCTFL; PCESCTFLP; CESCTFLPE; ESCTFLPEV; SCTFLPEVM; CTFLPEVMV; TFLPEVMVW;
FLPEVMVWL; LPEVMVWLH; PEVMVWLHS; EVMVWLHSP; VMVWLHSPV; MVWLHSPVS;
VWLHSPVSH; WLHSPVSHA; LHSPVSHAL; HSPVSHALS; SPVSHALSF; PVSHALSFL; VSHALSFLR;
SHALSFLRS; HALSFLRSW; ALSFLRSWF; LSFLRSWFG; SFLRSWFGC; FLRSWFGCI; LRSWFGCIP;
RSWFGCIPW; SWFGCIPWV; WFGCIPWVS; FGCIPWVSS; GCIPWVSSS; CIPWVSSSS; IPWVSSSSL;
PWVSSSSLW; WVSSSSLWP; VSSSSLWPF; SSSSLWPFF; SSSLWPFFL; YIRGRGRLC; IRGRGRLCL;
RGRGRLCLH; GRGRLCLHP; RGRLCLHPF; GRLCLHPFS; RLCLHPFSQ; LCLHPFSQV; CLHPFSQVV;
LHPFSQVVR; HPFSQVVRV; PFSQVVRVW; FSQVVRVWR; SQVVRVWRL; QVVRVWRLF; VVRVWRLFL;
VRVWRLFLR; RVWRLFLRP; VWRLFLRPS; WRLFLRPSK; RLFLRPSKT; LFLRPSKTI; FLRPSKTIW;
LRPSKTIWG; RPSKTIWGN; PSKTIWGNP; SKTIWGNPY; KTIWGNPYS; TIWGNPYSF; IWGNPYSFA;
WGNPYSFAI; GNPYSFAIF; NPYSFAIFA; PYSFAIFAK

10 mers:

QGRIHGAHGP; GRIHGAHGPF; RIHGAHGPFR; IHGAHGPFRP; KSCLGKSSLN; SCLGKSSLNE;
CLGKSSLNEK; LGKSSLNEKS; GKSSLNEKSL; KSSLNEKSLF; SSLNEKSLFK; SLNEKSLFKE;
LNEKSLFKEV; KNGAGCKGSS; NGAGCKGSSS; GAGCKGSSSA; FSSLPRYPVL; SSLPRYPVLQ;
SLPRYPVLQG; LPRYPVLQGM; PRYPVLQGMA; RYPVLQGMAY; YPVLQGMAYL; PVLQGMAYLF;
VLQGMAYLFQ; LQGMAYLFQK; QGMAYLFQKA; GMAYLFQKAF; MAYLFQKAFC; AYLFQKAFCA;
YLFQKAFCAL; LFQKAFCALP; FQKAFCALPL; QKAFCALPLH; KAFCALPLHA; AFCALPLHAM;
FCALPLHAMS; CALPLHAMSA; KIFKKRALGL; IFKKRALGLD; FKKRALGLDR; KKRALGLDRL;
KRALGLDRLL; RALGLDRLLL; ALGLDRLLLH; LLHTVVWLRP; LHTVVWLRPN; RNSAMVGPNN;
NSAMVGPNNW; SAMVGPNNWR; AMVGPNNWRN; MVGPNNWRNS; VGPNNWRNSL; GPNNWRNSLQ;
PNNWRNSLQR; NNWRNSLQRS; NWRNSLQRSK; WRNSLQRSKA; RNSLQRSKAL; NSLQRSKALR;
INNKILKGPK; VPTYGTEEWE; PTYGTEEWES; TYGTEEWESW; YGTEEWESWW; GTEEWESWWS;
TEEWESWWSS; EEWESWWSSF; EWESWWSSFN; WESWWSSFNE; ESWWSSFNEK; SWWSSFNEKW;
WWSSFNEKWD; WSSFNEKWDE; SSFNEKWDED; SFNEKWDEDL; FNEKWDEDLF; NEKWDEDLFC;
EKWDEDLFCH; KWDEDLFCHE; WDEDLFCHED; DEDLFCHEDM; EDLFCHEDMF; DLFCHEDMFA;
LFCHEDMFAS; FCHEDMFASD; CHEDMFASDE; HEDMFASDEE; EDMFASDEEA; DMFASDEEAT;
MFASDEEATA; FASDEEATAD; ASDEEATADS; SDEEATADSQ; DEEATADSQH; EEATADSQHS;
EATADSQHST; ATADSQHSTP; TADSQHSTPP; ADSQHSTPPK; DSQHSTPPKK; SQHSTPPKKK;
QHSTPPKKKR; HSTPPKKKRK; STPPKKKRKV; TPPKKKRKVE; PPKKKRKVED; PKKKRKVEDP;
KKKRKVEDPK; KKRKVEDPKD; KRKVEDPKDF; RKVEDPKDFP; KVEDPKDFPS; VEDPKDFPSD;
EDPKDFPSDL; DPKDFPSDLH; PKDFPSDLHQ; KDFPSDLHQF; DFPSDLHQFL; FPSDLHQFLS;
PSDLHQFLSQ; SDLHQFLSQA; DLHQFLSQAV; LHQFLSQAVF; HQFLSQAVFS; QFLSQAVFSN;
FLSQAVFSNR; LSQAVFSNRT; SQAVFSNRTL; QAVFSNRTLA; AVFSNRTLAC; VFSNRTLACF;
FSNRTLACFA; SNRTLACFAV; NRTLACFAVY; RTLACFAVYT; TLACFAVYTT; LACFAVYTTK;
ACFAVYTTKE; CFAVYTTKEK; FAVYTTKEKA; AVYTTKEKAQ; VYTTKEKAQI; YTTKEKAQIL;
TTKEKAQILY; TKEKAQILYK; KEKAQILYKK; EKAQILYKKL; KAQILYKKLM; AQILYKKLME;
QILYKKLMEK; ILYKKLMEKY; LYKKLMEKYS; YKKLMEKYSV; KKLMEKYSVT; KLMEKYSVTF;
LMEKYSVTFI; MEKYSVTFIS; EKYSVTFISR; KYSVTFISRH; YSVTFISRHM; SVTFISRHMC;
VTFISRHMCA; TFISRHMCAG; FISRHMCAGH; ISRHMCAGHN; SRHMCAGHNI; RHMCAGHNII;
HMCAGHNIIF; MCAGHNIIFF; CAGHNIIFFL; AGHNIIFFLT; GHNIIFFLTP; HNIIFFLTPH; NIIFFLTPHR;
IIFFLTPHRH; IFFLTPHRHR; FFLTPHRHRV; FLTPHRHRVS; LTPHRHRVSA; TPHRHRVSAI; PHRHRVSAIN;
HRHRVSAINN; RHRVSAINNF; HRVSAINNFC; RVSAINNFCQ; VSAINNFCQK; SAINNFCQKL;
AINNFCQKLC; INNFCQKLCT; NNFCQKLCTF; NFCQKLCTFS; FCQKLCTFSF; CQKLCTFSFL;
QKLCTFSFLI; KLCTFSFLIC; LCTFSFLICK; CTFSFLICKG; TFSFLICKGV; FSFLICKGVN; SFLICKGVNK;
FLICKGVNKE; LICKGVNKEY; ICKGVNKEYL; CKGVNKEYLL; KGVNKEYLLY; GVNKEYLLYS;
VNKEYLLYSA; NKEYLLYSAL; KEYLLYSALT; EYLLYSALTR; YLLYSALTRD; LLYSALTRDP;
LYSALTRDPY; YSALTRDPYH; SALTRDPYHT; ALTRDPYHTI; LTRDPYHTIE; TRDPYHTIEE;
RDPYHTIEES; DPYHTIEESI; PYHTIEESIQ; YHTIEESIQG; HTIEESIQGG; TIEESIQGGL; IEESIQGGLK;
EESIQGGLKE; ESIQGGLKEH; SIQGGLKEHD; IQGGLKEHDF; QGGLKEHDFS; GGLKEHDFSP;
GLKEHDFSPE; LKEHDFSPEE; KEHDFSPEEP; EHDFSPEEPE; HDFSPEEPEE; DFSPEEPEET; FSPEEPEETK;
SPEEPEETKQ; PEEPEETKQV; EEPEETKQVS; EPEETKQVSW; PEETKQVSWK; EETKQVSWKL;
ETKQVSWKLI; TKQVSWKLIT; KQVSWKLITE; QVSWKLITEY; VSWKLITEYA; SWKLITEYAV;
WKLITEYAVE; KLITEYAVET; LITEYAVETK; ITEYAVETKC; TEYAVETKCE; EYAVETKCED;
YAVETKCEDV; AVETKCEDVF; VETKCEDVFL; ETKCEDVFLL; TKCEDVFLLL; KCEDVFLLLG;
CEDVFLLLGM; EDVFLLLGMY; DVFLLLGMYL; VFLLLGMYLE; FLLLGMYLEF; LLLGMYLEFQ;
LLGMYLEFQY; LGMYLEFQYN; GMYLEFQYNV; MYLEFQYNVE; YLEFQYNVEE; LEFQYNVEEC;
EFQYNVEECK; FQYNVEECKK; QYNVEECKKC; YNVEECKKCQ; NVEECKKCQK; VEECKKCQKK;
EECKKCQKKD; ECKKCQKKDQ; CKKCQKKDQP; KKCQKKDQPY; KCQKKDQPYH; CQKKDQPYHF;
QKKDQPYHFK; KKDQPYHFKY; KDQPYHFKYH; DQPYHFKYHE; QPYHFKYHEK; PYHFKYHEKH;
YHFKYHEKHF; HFKYHEKHFA; FKYHEKHFAN; KYHEKHFANA; YHEKHFANAI; HEKHFANAII;
EKHFANAIIF; KHFANAIIFA; HFANAIIFAE; FANAIIFAES; ANAIIFAESK; NAIIFAESKN; AIIFAESKNQ;
IIFAESKNQK; IFAESKNQKS; FAESKNQKSI; AESKNQKSIC; ESKNQKSICQ; SKNQKSICQQ;
KNQKSICQQA; NQKSICQQAV; QKSICQQAVD; KSICQQAVDT; SICQQAVDTV; ICQQAVDTVL;
CQQAVDTVLA; QQAVDTVLAK; QAVDTVLAKK; AVDTVLAKKR; VDTVLAKKRV; DTVLAKKRVD;
TVLAKKRVDT; VLAKKRVDTL; LAKKRVDTLH; AKKRVDTLHM; KKRVDTLHMT; KRVDTLHMTR;
RVDTLHMTRE; VDTLHMTREE; DTLHMTREEM; TLHMTREEML; LHMTREEMLT; HMTREEMLTE;
MTREEMLTER; TREEMLTERF; REEMLTERFN; EEMLTERFNH; EMLTERFNHI; MLTERFNHIL;
LTERFNHILD; TERFNHILDK; ERFNHILDKM; RFNHILDKMD; FNHILDKMDL; NHILDKMDLI;
HILDKMDLIF; ILDKMDLIFG; LDKMDLIFGA; DKMDLIFGAH; KMDLIFGAHG; MDLIFGAHGN;
DLIFGAHGNA; LIFGAHGNAV; IFGAHGNAVL; FGAHGNAVLE; GAHGNAVLEQ; AHGNAVLEQY;
HGNAVLEQYM; GNAVLEQYMA; NAVLEQYMAG; AVLEQYMAGV; VLEQYMAGVA; LEQYMAGVAW;
EQYMAGVAWL; QYMAGVAWLH; YMAGVAWLHC; MAGVAWLHCL; AGVAWLHCLL; GVAWLHCLLP;
VAWLHCLLPK; AWLHCLLPKM; WLHCLLPKMD; LHCLLPKMDS; HCLLPKMDSV; CLLPKMDSVI;
LLPKMDSVIF; LPKMDSVIFD; PKMDSVIFDF; KMDSVIFDFL; MDSVIFDFLH; DSVIFDFLHC; SVIFDFLHCI;
VIFDFLHCIV; IFDFLHCIVF; FDFLHCIVFN; DFLHCIVFNV; FLHCIVFNVP; LHCIVFNVPK; HCIVFNVPKR;
CIVFNVPKRR; IVFNVPKRRY; VFNVPKRRYW; FNVPKRRYWL; NVPKRRYWLF; VPKRRYWLFK;
PKRRYWLFKG; KRRYWLFKGP; RRYWLFKGPI; RYWLFKGPID; YWLFKGPIDS; WLFKGPIDSG;
LFKGPIDSGK; FKGPIDSGKT; KGPIDSGKTT; GPIDSGKTTL; PIDSGKTTLA; IDSGKTTLAA;
DSGKTTLAAG; SGKTTLAAGL; GKTTLAAGLL; KTTLAAGLLD; TTLAAGLLDL; TLAAGLLDLC;
LAAGLLDLCG; AAGLLDLCGG; AGLLDLCGGK; GLLDLCGGKA; LLDLCGGKAL; LDLCGGKALN;
DLCGGKALNV; LCGGKALNVN; CGGKALNVNL; GGKALNVNLP; GKALNVNLPM; KALNVNLPME;
ALNVNLPMER; LNVNLPMERL; NVNLPMERLT; VNLPMERLTF; NLPMERLTFE; LPMERLTFEL;
PMERLTFELG; MERLTFELGV; ERLTFELGVA; RLTFELGVAI; LTFELGVAID; TFELGVAIDQ;
FELGVAIDQY; ELGVAIDQYM; LGVAIDQYMV; GVAIDQYMVV; VAIDQYMVVF; AIDQYMVVFE;
IDQYMVVFED; DQYMVVFEDV; QYMVVFEDVK; YMVVFEDVKG; MVVFEDVKGT; VVFEDVKGTG;
VFEDVKGTGA; FEDVKGTGAE; EDVKGTGAES; DVKGTGAESK; VKGTGAESKD; KGTGAESKDL;
GTGAESKDLP; TGAESKDLPS; GAESKDLPSG; AESKDLPSGH; ESKDLPSGHG; SKDLPSGHGI;
KDLPSGHGIN; DLPSGHGINN; LPSGHGINNL; PSGHGINNLD; SGHGINNLDS; GHGINNLDSL;
HGINNLDSLR; GINNLDSLRD; INNLDSLRDY; NNLDSLRDYL; NLDSLRDYLD; LDSLRDYLDG;
DSLRDYLDGS; SLRDYLDGSV; LRDYLDGSVK; RDYLDGSVKV; DYLDGSVKVN; YLDGSVKVNL;
LDGSVKVNLE; DGSVKVNLEK; GSVKVNLEKK; SVKVNLEKKH; VKVNLEKKHL; KVNLEKKHLN;
VNLEKKHLNK; NLEKKHLNKR; LEKKHLNKRT; EKKHLNKRTQ; KKHLNKRTQI; KHLNKRTQIF;
HLNKRTQIFP; LNKRTQIFPP; NKRTQIFPPG; KRTQIFPPGL; RTQIFPPGLV; TQIFPPGLVT; QIFPPGLVTM;
IFPPGLVTMN; FPPGLVTMNE; PPGLVTMNEY; PGLVTMNEYP; GLVTMNEYPV; LVTMNEYPVP;
VTMNEYPVPK; TMNEYPVPKT; MNEYPVPKTL; NEYPVPKTLQ; EYPVPKTLQA; YPVPKTLQAR;
PVPKTLQARF; VPKTLQARFV; PKTLQARFVR; KTLQARFVRQ; TLQARFVRQI; LQARFVRQID;
QARFVRQIDF; ARFVRQIDFR; RFVRQIDFRP; FVRQIDFRPK; VRQIDFRPKI; RQIDFRPKIY; QIDFRPKIYL;
IDFRPKIYLR; DFRPKIYLRK; FRPKIYLRKS; RPKIYLRKSL; PKIYLRKSLQ; KIYLRKSLQN; IYLRKSLQNS;
YLRKSLQNSE; LRKSLQNSEF; RKSLQNSEFL; KSLQNSEFLL; SLQNSEFLLE; LQNSEFLLEK;
QNSEFLLEKR; NSEFLLEKRI; SEFLLEKRIL; EFLLEKRILQ; FLLEKRILQS; LLEKRILQSG; LEKRILQSGM;
EKRILQSGMT; KRILQSGMTL; RILQSGMTLL; ILQSGMTLLL; LQSGMTLLLL; QSGMTLLLLL;
SGMTLLLLLI; GMTLLLLLIW; MTLLLLLIWF; TLLLLLIWFR; LLLLLIWFRP; LLLLIWFRPV;
LLLIWFRPVA; LLIWFRPVAD; LIWFRPVADF; IWFRPVADFA; WFRPVADFAT; FRPVADFATD;
RPVADFATDI; PVADFATDIQ; VADFATDIQS; ADFATDIQSR; DFATDIQSRI; FATDIQSRIV; ATDIQSRIVE;
TDIQSRIVEW; DIQSRIVEWK; IQSRIVEWKE; QSRIVEWKER; SRIVEWKERL; RIVEWKERLD;
IVEWKERLDS; VEWKERLDSE; EWKERLDSEI; WKERLDSEIS; KERLDSEISM; ERLDSEISMY;
RLDSEISMYT; LDSEISMYTF; DSEISMYTFS; SEISMYTFSR; EISMYTFSRM; ISMYTFSRMK;
SMYTFSRMKY; MYTFSRMKYN; YTFSRMKYNI; TFSRMKYNIC; FSRMKYNICM; SRMKYNICMG;
RMKYNICMGK; MKYNICMGKC; KYNICMGKCI; YNICMGKCIL; NICMGKCILD; ICMGKCILDI;
CMGKCILDIT; MGKCILDITR; GKCILDITRE; KCILDITREE; CILDITREED; ILDITREEDS; LDITREEDSE;
DITREEDSET; ITREEDSETE; TREEDSETED; REEDSETEDS; EEDSETEDSG; EDSETEDSGH;
DSETEDSGHG; SETEDSGHGS; ETEDSGHGSS; TEDSGHGSST; EDSGHGSSTE; DSGHGSSTES;
SGHGSSTESQ; GHGSSTESQS; HGSSTESQSQ; GSSTESQSQC; SSTESQSQCS; STESQSQCSS;
TESQSQCSSQ; ESQSQCSSQV; SQSQCSSQVS; QSQCSSQVSD; SQCSSQVSDT; QCSSQVSDTS;
CSSQVSDTSA; SSQVSDTSAP; SQVSDTSAPA; QVSDTSAPAE; VSDTSAPAED; SDTSAPAEDS;
DTSAPAEDSQ; TSAPAEDSQR; SAPAEDSQRS; APAEDSQRSD; PAEDSQRSDP; AEDSQRSDPH;
EDSQRSDPHS; DSQRSDPHSQ; SQRSDPHSQE; QRSDPHSQEL; RSDPHSQELH; SDPHSQELHL;
DPHSQELHLC; PHSQELHLCK; HSQELHLCKG; SQELHLCKGF; QELHLCKGFQ; ELHLCKGFQC;
LHLCKGFQCF; HLCKGFQCFK; LCKGFQCFKR; CKGFQCFKRP; KGFQCFKRPK; GFQCFKRPKT;
FQCFKRPKTP; QCFKRPKTPP; CFKRPKTPPP; FKRPKTPPPK; HKLKSGLYKS; KLKSGLYKSS;
LKSGLYKSSI; KSGLYKSSIY; MYMYNKSTCL; YMYNKSTCLK; MYNKSTCLKH; YNKSTCLKHF;
NKSTCLKHFG; KSTCLKHFGL; STCLKHFGLQ; TCLKHFGLQL; CLKHFGLQLS; LKHFGLQLSL;
KHFGLQLSLF; HFGLQLSLFV; FGLQLSLFVN; GLQLSLFVNI; LQLSLFVNIS; QLSLFVNISY; LSLFVNISYH;
SLFVNISYHI; LFVNISYHIW; FVNISYHIWV; VNISYHIWVP; NISYHIWVPW; ISYHIWVPWK;
SYHIWVPWKS; YHIWVPWKSF; HIWVPWKSFC; IWVPWKSFCA; WVPWKSFCAI; VPWKSFCAIK;
PWKSFCAIKH; WKSFCAIKHP; KSFCAIKHPN; SFCAIKHPNL; FCAIKHPNLF; CAIKHPNLFY;
AIKHPNLFYL; IKHPNLFYLG; KHPNLFYLGF; HPNLFYLGFH; PNLFYLGFHT; NLFYLGFHTI;
LFYLGFHTIH; FYLGFHTIHR; YLGFHTIHRL; LGFHTIHRLP; GFHTIHRLPI; FHTIHRLPIH; HTIHRLPIHS;
TIHRLPIHSL; IHRLPIHSLG; HRLPIHSLGS; RLPIHSLGSP; LPIHSLGSPV; PIHSLGSPVY; IHSLGSPVYK;
HSLGSPVYKV; SLGSPVYKVT; QKGNWVRILY; KGNWVRILYR; GNWVRILYRS; NWVRILYRSF;
WVRILYRSFS; VRILYRSFSQ; RILYRSFSQA; ILYRSFSQAD; LYRSFSQADL; YRSFSQADLK;
RSFSQADLKI; SFSQADLKIS; FSQADLKISC; SQADLKISCK; QADLKISCKA; ADLKISCKAS; DLKISCKASP;
LKISCKASPL; KISCKASPLL; ISCKASPLLC; SCKASPLLCS; CKASPLLCSR; KASPLLCSRA; ASPLLCSRAV;
SPLLCSRAVS; PLLCSRAVSK; LLCSRAVSKQ; LCSRAVSKQA; CSRAVSKQAT; SRAVSKQATN;
RAVSKQATNI; AVSKQATNIS; VSKQATNISS; NIQAISFTKR; IQAISFTKRP; QAISFTKRPH; AISFTKRPHT;
ISFTKRPHTL; SFTKRPHTLF; FTKRPHTLFI; QHCGSCVGHM; HCGSCVGHMK; CGSCVGHMKY;
GSCVGHMKYW; SCVGHMKYWG; CVGHMKYWGN; VGHMKYWGNI; GHMKYWGNIF; HMKYWGNIFP;
MKYWGNIFPS; KYWGNIFPSC; YWGNIFPSCE; WGNIFPSCES; GNIFPSCESP; NIFPSCESPK; IFPSCESPKI;
FPSCESPKIP; PSCESPKIPS; SCESPKIPSI; CESPKIPSIF; ESPKIPSIFI; SPKIPSIFIS; PKIPSIFIST; KIPSIFISTG;
IPSIFISTGI; PSIFISTGIR; SIFISTGIRY; IFISTGIRYP; FISTGIRYPA; ISTGIRYPAL; STGIRYPALN;
TGIRYPALNW; GIRYPALNWI; IRYPALNWIS; RYPALNWISI; YPALNWISIV; PALNWISIVF;
ALNWISIVFV; LNWISIVFVQ; NWISIVFVQI; WISIVFVQIG; ISIVFVQIGL; SIVFVQIGLM; IVFVQIGLMV;
VFVQIGLMVS; FVQIGLMVSI; VQIGLMVSIH; QIGLMVSIHY; IGLMVSIHYL; GLMVSIHYLG;
LMVSIHYLGL; MVSIHYLGLG; VSIHYLGLGC; SIHYLGLGCW; IHYLGLGCWV; HYLGLGCWVF;
YLGLGCWVFR; LGLGCWVFRG; GLGCWVFRGY; LGCWVFRGYS; GCWVFRGYST; CWVFRGYSTI;
WVFRGYSTIR; VFRGYSTIRV; FRGYSTIRVL; HSLHFQGFST; SLHFQGFSTY; LHFQGFSTYS;
HFQGFSTYSK; FQGFSTYSKE; QGFSTYSKEV; GFSTYSKEVE; FSTYSKEVEI; STYSKEVEIT;
TYSKEVEITA; YSKEVEITAL; SKEVEITALN; KEVEITALNR; EVEITALNRF; VEITALNRFS; EITALNRFSS;
ITALNRFSST; TALNRFSSTM; ALNRFSSTML; LNRFSSTMLM; NRFSSTMLMH; RFSSTMLMHF;
FSSTMLMHFL; PCMKVKHASY; CMKVKHASYS; MKVKHASYSN; KVKHASYSNN; VKHASYSNNL;
KHASYSNNLC; HASYSNNLCL; ASYSNNLCLY; SYSNNLCLYS; YSNNLCLYSY; SNNLCLYSYS;
NNLCLYSYSL; NLCLYSYSLP; LCLYSYSLPH; CLYSYSLPHQ; IGEGNSCCAV; GEGNSCCAVT;
EGNSCCAVTG; GNSCCAVTGK; NSCCAVTGKH; SCCAVTGKHF; CCAVTGKHFS; CAVTGKHFSL;
AVTGKHFSLW; VTGKHFSLWA; TGKHFSLWAI; GKHFSLWAIT; KHFSLWAITA; HFSLWAITAK;
FSLWAITAKV; SLWAITAKVI; LWAITAKVIF; WAITAKVIFS; AITAKVIFST; TKAPKVFIWI; KAPKVFIWIP;
APKVFIWIPH; PKVFIWIPHF; KVFIWIPHFW; VFIWIPHFWV; EAFYLCNSIY; AFYLCNSIYP; FYLCNSIYPS;
YLCNSIYPSF; LCNSIYPSFN; CNSIYPSFNF; FWHLHGFLWL; WHLHGFLWLF; HLHGFLWLFG;
LHGFLWLFGS; HGFLWLFGSC; GFLWLFGSCP; FLWLFGSCPW; LWLFGSCPWT; WLFGSCPWTL;
LFGSCPWTLS; FGSCPWTLSF; GSCPWTLSFS; SCPWTLSFSF; CPWTLSFSFG; PWTLSFSFGW;
WTLSFSFGWG; TLSFSFGWGH; LSFSFGWGHL; SFSFGWGHLH; FSFGWGHLHM; SFGWGHLHML;
FGWGHLHMLQ; GWGHLHMLQE; WGHLHMLQEQ; GHLHMLQEQV; HLHMLQEQVL; LHMLQEQVLQ;
HMLQEQVLQS; MLQEQVLQSR; LQEQVLQSRT; QEQVLQSRTG; EQVLQSRTGL; QVLQSRTGLE;
VLQSRTGLEV; LQSRTGLEVK; QSRTGLEVKA; SRTGLEVKAT; RTGLEVKATS; TGLEVKATSI;
GLEVKATSIE; LEVKATSIEE; EVKATSIEEQ; VKATSIEEQF; KATSIEEQFF; ATSIEEQFFD; TLLNVHFVDF;
LLNVHFVDFL; LNVHFVDFLS; NVHFVDFLSP; VHFVDFLSPF; HFVDFLSPFF; FVDFLSPFFV;
LLLYCQHHLY; LLYCQHHLYY; LYCQHHLYYK; YCQHHLYYKY; CQHHLYYKYG; QHHLYYKYGQ;
HHLYYKYGQN; HLYYKYGQNV; LYYKYGQNVH; YYKYGQNVHG; YKYGQNVHGY; KYGQNVHGYL;
YGQNVHGYLP; GQNVHGYLPF; QNVHGYLPFQ; NVHGYLPFQL; VHGYLPFQLL; HGYLPFQLLV;
GKDQNNIVEY; KDQNNIVEYN; DQNNIVEYNY; QNNIVEYNYK; NNIVEYNYKS; NIVEYNYKSL;
KIFLFFSAIP; IFLFFSAIPV; FLFFSAIPVR; LFFSAIPVRL; QKYLHQETEY; KYLHQETEYH; YLHQETEYHS;
LHQETEYHST; HQETEYHSTH; QETEYHSTHL; ETEYHSTHLG; TIPKPCLIAD; IPKPCLIADR;
PKPCLIADRG; KPCLIADRGL; PCLIADRGLQ; CLIADRGLQW; LIADRGLQWK; IADRGLQWKL;
ADRGLQWKLC; DRGLQWKLCD; RGLQWKLCDP; GLQWKLCDPN; LQWKLCDPNH; QWKLCDPNHQ;
WKLCDPNHQR; KLCDPNHQRT; LCDPNHQRTY; CDPNHQRTYT; DPNHQRTYTL; PNHQRTYTLL;
NHQRTYTLLE; HQRTYTLLEL; QRTYTLLELR; RTYTLLELRN; QFELKQQTQQ; PQEHQQLQHM;
QEHQQLQHMF; EHQQLQHMFE; HQQLQHMFEE; QQLQHMFEEL; QLQHMFEELG; LQHMFEELGL;
PLRYLLCPLQ; QQQPPQQQFQ; QQPPQQQFQP; QPPQQQFQPL; PPQQQFQPLK; PQQQFQPLKI;
QQQFQPLKIL; QQFQPLKILW; QFQPLKILWQ; FQPLKILWQQ; QPLKILWQQQ; PLKILWQQQP;
LKILWQQQPQ; KILWQQQPQI; ILWQQQPQIH; LWQQQPQIHW; WQQQPQIHWQ; QQQPQIHWQL;
QQPQIHWQLG; QPQIHWQLGP; PQIHWQLGPP; QIHWQLGPPK; IHWQLGPPKV; HWQLGPPKVL;
WQLGPPKVLE; QLGPPKVLEQ; LGPPKVLEQH; GPPKVLEQHP; TWKYKKKGIT; WKYKKKGITY;
KYKKKGITYL; YKKKGITYLG; KKKGITYLGV; KKGITYLGVF; KGITYLGVFY; GITYLGVFYR;
ITYLGVFYRV; TYLGVFYRVF; YLGVFYRVFY; LGVFYRVFYS; GVFYRVFYSR; SSGTFVFPVY;
SGTFVFPVYT; GTFVFPVYTV; TFVFPVYTVF; FVFPVYTVFT; VFPVYTVFTS; FPVYTVFTST;
PVYTVFTSTK; VYTVFTSTKF; YTVFTSTKFQ; TVFTSTKFQQ; VFTSTKFQQK; FTSTKFQQKL;
NKNKNPLSSF; KNKNPLSSFF; NKNPLSSFFC; KNPLSSFFCS; NPLSSFFCSS; PLSSFFCSSP; LSSFFCSSPG;
SSFFCSSPGF; SFFCSSPGFT; FFCSSPGFTN; FCSSPGFTNF; CSSPGFTNFH; QLAQNHGLCP; LAQNHGLCPV;
LGTRPRFLGS; GTRPRFLGSQ; TRPRFLGSQN; RPRFLGSQNM; PRFLGSQNMS; RFLGSQNMSV;
FLGSQNMSVM; LGSQNMSVMH; GSQNMSVMHF; SQNMSVMHFP; QNMSVMHFPS; AAPPCESCTF;
APPCESCTFL; PPCESCTFLP; PCESCTFLPE; CESCTFLPEV; ESCTFLPEVM; SCTFLPEVMV;
CTFLPEVMVW; TFLPEVMVWL; FLPEVMVWLH; LPEVMVWLHS; PEVMVWLHSP; EVMVWLHSPV;
VMVWLHSPVS; MVWLHSPVSH; VWLHSPVSHA; WLHSPVSHAL; LHSPVSHALS; HSPVSHALSF;
SPVSHALSFL; PVSHALSFLR; VSHALSFLRS; SHALSFLRSW; HALSFLRSWF; ALSFLRSWFG;
LSFLRSWFGC; SFLRSWFGCI; FLRSWFGCIP; LRSWFGCIPW; RSWFGCIPWV; SWFGCIPWVS;
WFGCIPWVSS; FGCIPWVSSS; GCIPWVSSSS; CIPWVSSSSL; IPWVSSSSLW; PWVSSSSLWP;
WVSSSSLWPF; VSSSSLWPFF; SSSSLWPFFL; YIRGRGRLCL; IRGRGRLCLH; RGRGRLCLHP;
GRGRLCLHPF; RGRLCLHPFS; GRLCLHPFSQ; RLCLHPFSQV; LCLHPFSQVV; CLHPFSQVVR;
LHPFSQVVRV; HPFSQVVRVW; PFSQVVRVWR; FSQVVRVWRL; SQVVRVWRLF; QVVRVWRLFL;
VVRVWRLFLR; VRVWRLFLRP; RVWRLFLRPS; VWRLFLRPSK; WRLFLRPSKT; RLFLRPSKTI;
LFLRPSKTIW; FLRPSKTIWG; LRPSKTIWGN; RPSKTIWGNP; PSKTIWGNPY; SKTIWGNPYS;
KTIWGNPYSF; TIWGNPYSFA; IWGNPYSFAI; WGNPYSFAIF; GNPYSFAIFA; NPYSFAIFAK

11 mers:

QGRIHGAHGPF; GRIHGAHGPFR; RIHGAHGPFRP; KSCLGKSSLNE; SCLGKSSLNEK; CLGKSSLNEKS;
LGKSSLNEKSL; GKSSLNEKSLF; KSSLNEKSLFK; SSLNEKSLFKE; SLNEKSLFKEV; KNGAGCKGSSS;
NGAGCKGSSSA; FSSLPRYPVLQ; SSLPRYPVLQG; SLPRYPVLQGM; LPRYPVLQGMA; PRYPVLQGMAY;
RYPVLQGMAYL; YPVLQGMAYLF; PVLQGMAYLFQ; VLQGMAYLFQK; LQGMAYLFQKA;
QGMAYLFQKAF; GMAYLFQKAFC; MAYLFQKAFCA; AYLFQKAFCAL; YLFQKAFCALP;
LFQKAFCALPL; FQKAFCALPLH; QKAFCALPLHA; KAFCALPLHAM; AFCALPLHAMS; FCALPLHAMSA;
KIFKKRALGLD; IFKKRALGLDR; FKKRALGLDRL; KKRALGLDRLL; KRALGLDRLLL; RALGLDRLLLH;
LLHTVVWLRPN; RNSAMVGPNNW; NSAMVGPNNWR; SAMVGPNNWRN; AMVGPNNWRNS;
MVGPNNWRNSL; VGPNNWRNSLQ; GPNNWRNSLQR; PNNWRNSLQRS; NNWRNSLQRSK;
NWRNSLQRSKA; WRNSLQRSKAL; RNSLQRSKALR; VPTYGTEEWES; PTYGTEEWESW;
TYGTEEWESWW; YGTEEWESWWS; GTEEWESWWSS; TEEWESWWSSF; EEWESWWSSFN;
EWESWWSSFNE; WESWWSSFNEK; ESWWSSFNEKW; SWWSSFNEKWD; WWSSFNEKWDE;
WSSFNEKWDED; SSFNEKWDEDL; SFNEKWDEDLF; FNEKWDEDLFC; NEKWDEDLFCH;
EKWDEDLFCHE; KWDEDLFCHED; WDEDLFCHEDM; DEDLFCHEDMF; EDLFCHEDMFA;
DLFCHEDMFAS; LFCHEDMFASD; FCHEDMFASDE; CHEDMFASDEE; HEDMFASDEEA; EDMFASDEEAT;
DMFASDEEATA; MFASDEEATAD; FASDEEATADS; ASDEEATADSQ; SDEEATADSQH; DEEATADSQHS;
EEATADSQHST; EATADSQHSTP; ATADSQHSTPP; TADSQHSTPPK; ADSQHSTPPKK; DSQHSTPPKKK;
SQHSTPPKKKR; QHSTPPKKKRK; HSTPPKKKRKV; STPPKKKRKVE; TPPKKKRKVED; PPKKKRKVEDP;
PKKKRKVEDPK; KKKRKVEDPKD; KKRKVEDPKDF; KRKVEDPKDFP; RKVEDPKDFPS; KVEDPKDFPSD;
VEDPKDFPSDL; EDPKDFPSDLH; DPKDFPSDLHQ; PKDFPSDLHQF; KDFPSDLHQFL; DFPSDLHQFLS;
FPSDLHQFLSQ; PSDLHQFLSQA; SDLHQFLSQAV; DLHQFLSQAVF; LHQFLSQAVFS; HQFLSQAVFSN;
QFLSQAVFSNR; FLSQAVFSNRT; LSQAVFSNRTL; SQAVFSNRTLA; QAVFSNRTLAC; AVFSNRTLACF;
VFSNRTLACFA; FSNRTLACFAV; SNRTLACFAVY; NRTLACFAVYT; RTLACFAVYTT; TLACFAVYTTK;
LACFAVYTTKE; ACFAVYTTKEK; CFAVYTTKEKA; FAVYTTKEKAQ; AVYTTKEKAQI; VYTTKEKAQIL;
YTTKEKAQILY; TTKEKAQILYK; TKEKAQILYKK; KEKAQILYKKL; EKAQILYKKLM; KAQILYKKLME;
AQILYKKLMEK; QILYKKLMEKY; ILYKKLMEKYS; LYKKLMEKYSV; YKKLMEKYSVT;
KKLMEKYSVTF; KLMEKYSVTFI; LMEKYSVTFIS; MEKYSVTFISR; EKYSVTFISRH; KYSVTFISRHM;
YSVTFISRHMC; SVTFISRHMCA; VTFISRHMCAG; TFISRHMCAGH; FISRHMCAGHN; ISRHMCAGHNI;
SRHMCAGHNII; RHMCAGHNIIF; HMCAGHNIIFF; MCAGHNIIFFL; CAGHNIIFFLT; AGHNIIFFLTP;
GHNIIFFLTPH; HNIIFFLTPHR; NIIFFLTPHRH; IIFFLTPHRHR; IFFLTPHRHRV; FFLTPHRHRVS;
FLTPHRHRVSA; LTPHRHRVSAI; TPHRHRVSAIN; PHRHRVSAINN; HRHRVSAINNF; RHRVSAINNFC;
HRVSAINNFCQ; RVSAINNFCQK; VSAINNFCQKL; SAINNFCQKLC; AINNFCQKLCT; INNFCQKLCTF;
NNFCQKLCTFS; NFCQKLCTFSF; FCQKLCTFSFL; CQKLCTFSFLI; QKLCTFSFLIC; KLCTFSFLICK;
LCTFSFLICKG; CTFSFLICKGV; TFSFLICKGVN; FSFLICKGVNK; SFLICKGVNKE; FLICKGVNKEY;
LICKGVNKEYL; ICKGVNKEYLL; CKGVNKEYLLY; KGVNKEYLLYS; GVNKEYLLYSA; VNKEYLLYSAL;
NKEYLLYSALT; KEYLLYSALTR; EYLLYSALTRD; YLLYSALTRDP; LLYSALTRDPY; LYSALTRDPYH;
YSALTRDPYHT; SALTRDPYHTI; ALTRDPYHTIE; LTRDPYHTIEE; TRDPYHTIEES; RDPYHTIEESI;
DPYHTIEESIQ; PYHTIEESIQG; YHTIEESIQGG; HTIEESIQGGL; TIEESIQGGLK; IEESIQGGLKE;
EESIQGGLKEH; ESIQGGLKEHD; SIQGGLKEHDF; IQGGLKEHDFS; QGGLKEHDFSP; GGLKEHDFSPE;
GLKEHDFSPEE; LKEHDFSPEEP; KEHDFSPEEPE; EHDFSPEEPEE; HDFSPEEPEET; DFSPEEPEETK;
FSPEEPEETKQ; SPEEPEETKQV; PEEPEETKQVS; EEPEETKQVSW; EPEETKQVSWK; PEETKQVSWKL;
EETKQVSWKLI; ETKQVSWKLIT; TKQVSWKLITE; KQVSWKLITEY; QVSWKLITEYA; VSWKLITEYAV;
SWKLITEYAVE; WKLITEYAVET; KLITEYAVETK; LITEYAVETKC; ITEYAVETKCE; TEYAVETKCED;
EYAVETKCEDV; YAVETKCEDVF; AVETKCEDVFL; VETKCEDVFLL; ETKCEDVFLLL; TKCEDVFLLLG;
KCEDVFLLLGM; CEDVFLLLGMY; EDVFLLLGMYL; DVFLLLGMYLE; VFLLLGMYLEF; FLLLGMYLEFQ;
LLLGMYLEFQY; LLGMYLEFQYN; LGMYLEFQYNV; GMYLEFQYNVE; MYLEFQYNVEE;
YLEFQYNVEEC; LEFQYNVEECK; EFQYNVEECKK; FQYNVEECKKC; QYNVEECKKCQ;
YNVEECKKCQK; NVEECKKCQKK; VEECKKCQKKD; EECKKCQKKDQ; ECKKCQKKDQP;
CKKCQKKDQPY; KKCQKKDQPYH; KCQKKDQPYHF; CQKKDQPYHFK; QKKDQPYHFKY;
KKDQPYHFKYH; KDQPYHFKYHE; DQPYHFKYHEK; QPYHFKYHEKH; PYHFKYHEKHF;
YHFKYHEKHFA; HFKYHEKHFAN; FKYHEKHFANA; KYHEKHFANAI; YHEKHFANAII; HEKHFANAIIF;
EKHFANAIIFA; KHFANAIIFAE; HFANAIIFAES; FANAIIFAESK; ANAIIFAESKN; NAIIFAESKNQ;
AIIFAESKNQK; IIFAESKNQKS; IFAESKNQKSI; FAESKNQKSIC; AESKNQKSICQ; ESKNQKSICQQ;
SKNQKSICQQA; KNQKSICQQAV; NQKSICQQAVD; QKSICQQAVDT; KSICQQAVDTV; SICQQAVDTVL;
ICQQAVDTVLA; CQQAVDTVLAK; QQAVDTVLAKK; QAVDTVLAKKR; AVDTVLAKKRV;
VDTVLAKKRVD; DTVLAKKRVDT; TVLAKKRVDTL; VLAKKRVDTLH; LAKKRVDTLHM;
AKKRVDTLHMT; KKRVDTLHMTR; KRVDTLHMTRE; RVDTLHMTREE; VDTLHMTREEM;
DTLHMTREEML; TLHMTREEMLT; LHMTREEMLTE; HMTREEMLTER; MTREEMLTERF;
TREEMLTERFN; REEMLTERFNH; EEMLTERFNHI; EMLTERFNHIL; MLTERFNHILD; LTERFNHILDK;
TERFNHILDKM; ERFNHILDKMD; RFNHILDKMDL; FNHILDKMDLI; NHILDKMDLIF; HILDKMDLIFG;
ILDKMDLIFGA; LDKMDLIFGAH; DKMDLIFGAHG; KMDLIFGAHGN; MDLIFGAHGNA; DLIFGAHGNAV;
LIFGAHGNAVL; IFGAHGNAVLE; FGAHGNAVLEQ; GAHGNAVLEQY; AHGNAVLEQYM;
HGNAVLEQYMA; GNAVLEQYMAG; NAVLEQYMAGV; AVLEQYMAGVA; VLEQYMAGVAW;
LEQYMAGVAWL; EQYMAGVAWLH; QYMAGVAWLHC; YMAGVAWLHCL; MAGVAWLHCLL;
AGVAWLHCLLP; GVAWLHCLLPK; VAWLHCLLPKM; AWLHCLLPKMD; WLHCLLPKMDS;
LHCLLPKMDSV; HCLLPKMDSVI; CLLPKMDSVIF; LLPKMDSVIFD; LPKMDSVIFDF; PKMDSVIFDFL;
KMDSVIFDFLH; MDSVIFDFLHC; DSVIFDFLHCI; SVIFDFLHCIV; VIFDFLHCIVF; IFDFLHCTVFN;
FDFLHCIVFNV; DFLHCIVFNVP; FLHCIVFNVPK; LHCIVFNVPKR; HCIVFNVPKRR; CIVFNVPKRRY;
IVFNVPKRRYW; VFNVPKRRYWL; FNVPKRRYWLF; NVPKRRYWLFK; VPKRRYWLFKG;
PKRRYWLFKGP; KRRYWLFKGPI; RRYWLFKGPID; RYWLFKGPIDS; YWLFKGPIDSG; WLFKGPIDSGK;
LFKGPIDSGKT; FKGPIDSGKTT; KGPIDSGKTTL; GPIDSGKTTLA; PIDSGKTTLAA; IDSGKTTLAAG;
DSGKTTLAAGL; SGKTTLAAGLL; GKTTLAAGLLD; KTTLAAGLLDL; TTLAAGLLDLC; TLAAGLLDLCG;
LAAGLLDLCGG; AAGLLDLCGGK; AGLLDLCGGKA; GLLDLCGGKAL; LLDLCGGKALN;
LDLCGGKALNV; DLCGGKALNVN; LCGGKALNVNL; CGGKALNVNLP; GGKALNVNLPM;
GKALNVNLPME; KALNVNLPMER; ALNVNLPMERL; LNVNLPMERLT; NVNLPMERLTF;
VNLPMERLTFE; NLPMERLTFEL; LPMERLTFELG; PMERLTFELGV; MERLTFELGVA; ERLTFELGVAI;
RLTFELGVAID; LTFELGVAIDQ; TFELGVAIDQY; FELGVAIDQYM; ELGVAIDQYMV; LGVAIDQYMVV;
GVAIDQYMVVF; VAIDQYMVVFE; AIDQYMYVFED; IDQYMVVFEDV; DQYMVVFEDVK;
QYMVVFEDVKG; YMVVFEDVKGT; MVVFEDVKGTG; VVFEDVKGTGA; VFEDVKGTGAE;
FEDVKGTGAES; EDVKGTGAESK; DVKGTGAESKD; VKGTGAESKDL; KGTGAESKDLP; GTGAESKDLPS;
TGAESKDLPSG; GAESKDLPSGH; AESKDLPSGHG; ESKDLPSGHGI; SKDLPSGHGIN; KDLPSGHGINN;
DLPSGHGINNL; LPSGHGINNLD; PSGHGINNLDS; SGHGINNLDSL; GHGINNLDSLR; HGINNLDSLRD;
GINNLDSLRDY; INNLDSLRDYL; NNLDSLRDYLD; NLDSLRDYLDG; LDSLRDYLDGS; DSLRDYLDGSV;
SLRDYLDGSVK; LRDYLDGSVKV; RDYLDGSVKVN; DYLDGSVKVNL; YLDGSVKVNLE;
LDGSVKVNLEK; DGSVKVNLEKK; GSVKVNLEKKH; SVKVNLEKKHL; VKVNLEKKHLN;
KVNLEKKHLNK; VNLEKKHLNKR; NLEKKHLNKRT; LEKKHLNKRTQ; EKKHLNKRTQI;
KKHLNKRTQIF; KHLNKRTQIFP; HLNKRTQIFPP; LNKRTQIFPPG; NKRTQIFPPGL; KRTQIFPPGLV;
RTQIFPPGLVT; TQIFPPGLVTM; QIFPPGLVTMN; IFPPGLVTMNE; FPPGLVTMNEY; PPGLVTMNEYP;
PGLVTMNEYPV; GLVTMNEYPVP; LVTMNEYPVPK; VTMNEYPVPKT; TMNEYPVPKTL;
MNEYPVPKTLQ; NEYPVPKTLQA; EYPVPKTLQAR; YPVPKTLQARF; PVPKTLQARFV; VPKTLQARFVR;
PKTLQARFVRQ; KTLQARFVRQI; TLQARFVRQID; LQARFVRQIDF; QARFVRQIDFR; ARFVRQIDFRP;
RFVRQIDFRPK; FVRQIDFRPKI; VRQIDFRPKTY; RQIDFRPKIYL; QIDFRPKIYLR; IDFRPKIYLRK;
DFRPKIYLRKS; FRPKIYLRKSL; RPKIYLRKSLQ; PKIYLRKSLQN; KIYLRKSLQNS; IYLRKSLQNSE;
YLRKSLQNSEF; LRKSLQNSEFL; RKSLQNSEFLL; KSLQNSEFLLE; SLQNSEFLLEK; LQNSEFLLEKR;
QNSEFLLEKRI; NSEFLLEKRIL; SEFLLEKRILQ; EFLLEKRILQS; FLLEKRILQSG; LLEKRILQSGM;
LEKRILQSGMT; EKRILQSGMTL; KRILQSGMTLL; RILQSGMTLLL; ILQSGMTLLLL; LQSGMTLLLLL;
QSGMTLLLLLI; SGMTLLLLLIW; GMTLLLLLIWF; MTLLLLLIWFR; TLLLLLIWFRP; LLLLLIWFRPV;
LLLLIWFRPVA; LLLIWFRPVAD; LLIWFRPVADF; LIWFRPVADFA; IWFRPVADFAT; WFRPVADFATD;
FRPVADFATDI; RPVADFATDIQ; PVADFATDIQS; VADFATDIQSR; ADFATDIQSRI; DFATDIQSRIV;
FATDIQSRIVE; ATDIQSRIVEW; TDIQSRIVEWK; DIQSRIVEWKE; IQSRIVEWKER; QSRIVEWKERL;
SRIVEWKERLD; RIVEWKERLDS; IVEWKERLDSE; VEWKERLDSEI; EWKERLDSEIS; WKERLDSEISM;
KERLDSEISMY; ERLDSEISMYT; RLDSEISMYTF; LDSEISMYTFS; DSEISMYTFSR; SEISMYTFSRM;
EISMYTFSRMK; ISMYTFSRMKY; SMYTFSRMKYN; MYTFSRMKYNI; YTFSRMKYNIC; TFSRMKYNICM;
FSRMKYNICMG; SRMKYNICMGK; RMKYNICMGKC; MKYNICMGKCI; KYNICMGKCIL;
YNICMGKCILD; NICMGKCILDI; ICMGKCILDIT; CMGKCILDITR; MGKCILDITRE; GKCILDITREE;
KCILDITREED; CILDITREEDS; ILDITREEDSE; LDITREEDSET; DITREEDSETE; ITREEDSETED;
TREEDSETEDS; REEDSETEDSG; EEDSETEDSGH; EDSETEDSGHG; DSETEDSGHGS; SETEDSGHGSS;
ETEDSGHGSST; TEDSGHGSSTE; EDSGHGSSTES; DSGHGSSTESQ; SGHGSSTESQS; GHGSSTESQSQ;
HGSSTESQSQC; GSSTESQSQCS; SSTESQSQCSS; STESQSQCSSQ; TESQSQCSSQV; ESQSQCSSQVS;
SQSQCSSQVSD; QSQCSSQVSDT; SQCSSQVSDTS; QCSSQVSDTSA; CSSQVSDTSAP; SSQVSDTSAPA;
SQVSDTSAPAE; QVSDTSAPAED; VSDTSAPAEDS; SDTSAPAEDSQ; DTSAPAEDSQR; TSAPAEDSQRS;
SAPAEDSQRSD; APAEDSQRSDP; PAEDSQRSDPH; AEDSQRSDPHS; EDSQRSDPHSQ; DSQRSDPHSQE;
SQRSDPHSQEL; QRSDPHSQELH; RSDPHSQELHL; SDPHSQELHLC; DPHSQELHLCK; PHSQELHLCKG;
HSQELHLCKGF; SQELHLCKGFQ; QELHLCKGFQC; ELHLCKGFQCF; LHLCKGFQCFK; HLCKGFQCFKR;
LCKGFQCFKRP; CKGFQCFKRPK; KGFQCFKRPKT; GFQCFKRPKTP; FQCFKRPKTPP; QCFKRPKTPPP;
CFKRPKTPPPK; HKLKSGLYKSS; KLKSGLYKSSI; LKSGLYKSSIY; MYMYNKSTCLK; YMYNKSTCLKH;
MYNKSTCLKHF; YNKSTCLKHFG; NKSTCLKHFGL; KSTCLKHFGLQ; STCLKHFGLQL; TCLKHFGLQLS;
CLKHFGLQLSL; LKHFGLQLSLF; KHFGLQLSLFV; HFGLQLSLFVN; FGLQLSLFVNI; GLQLSLFVNIS;
LQLSLFVNISY; QLSLFVNISYH; LSLFVNISYHI; SLFVNISYHIW; LFVNISYHIWV; FVNISYHIWVP;
VNISYHIWVPW; NISYHIWVPWK; ISYHIWVPWKS; SYHIWVPWKSF; YHIWVPWKSFC; HIWVPWKSFCA;
IWVPWKSFCAI; WVPWKSFCAIK; VPWKSFCAIKH; PWKSFCAIKHP; WKSFCAIKHPN; KSFCAIKHPNL;
SFCAIKHPNLF; FCAIKHPNLFY; CAIKHPNLFYL; AIKHPNLFYLG; IKHPNLFYLGF; KHPNLFYLGFH;
HPNLFYLGFHT; PNLFYLGFHTI; NLFYLGFHTIH; LFYLGFHTIHR; FYLGFHTIHRL; YLGFHTIHRLP;
LGFHTIHRLPI; GFHTIHRLPIH; FHTIHRLPIHS; HTIHRLPIHSL; TIHRLPIHSLG; IHRLPIHSLGS;
HRLPIHSLGSP; RLPIHSLGSPV; LPIHSLGSPVY; PIHSLGSPVYK; IHSLGSPVYKV; HSLGSPVYKVT;
QKGNWVRILYR; KGNWVRILYRS; GNWVRILYRSF; NWVRILYRSFS; WVRILYRSFSQ; VRILYRSFSQA;
RILYRSFSQAD; ILYRSFSQADL; LYRSFSQADLK; YRSFSQADLKI; RSFSQADLKIS; SFSQADLKISC;
FSQADLKISCK; SQADLKISCKA; QADLKISCKAS; ADLKISCKASP; DLKISCKASPL; LKISCKASPLL;
KISCKASPLLC; ISCKASPLLCS; SCKASPLLCSR; CKASPLLCSRA; KASPLLCSRAV; ASPLLCSRAVS;
SPLLCSRAVSK; PLLCSRAVSKQ; LLCSRAVSKQA; LCSRAVSKQAT; CSRAVSKQATN; SRAVSKQATNI;
RAVSKQATNIS; AVSKQATNISS; NIQAISFTKRP; IQAISFTKRPH; QAISFTKRPHT; AISFTKRPHTL;
ISFTKRPHTLF; SFTKRPHTLFI; QHCGSCVGHMK; HCGSCVGHMKY; CGSCVGHMKYW;
GSCVGHMKYWG; SCVGHMKYWGN; CVGHMKYWGNI; VGHMKYWGNIF; GHMKYWGNIFP;
HMKYWGNIFPS; MKYWGNIFPSC; KYWGNIFPSCE; YWGNIFPSCES; WGNIFPSCESP; GNIFPSCESPK;
NIFPSCESPKI; IFPSCESPKIP; FPSCESPKIPS; PSCESPKIPSI; SCESPKIPSIF; CESPKIPSIFI; ESPKIPSIFIS;
SPKIPSIFIST; PKIPSIFISTG; KIPSIFISTGI; IPSIFISTGIR; PSIFISTGIRY; SIFISTGIRYP; IFISTGIRYPA;
FISTGIRYPAL; ISTGIRYPALN; STGIRYPALNW; TGIRYPALNWI; GIRYPALNWIS; IRYPALNWISI;
RYPALNWISIV; YPALNWISIVF; PALNWISIVFV; ALNWISIVFVQ; LNWISIVFVQI; NWISIVFVQIG;
WISIVFVQIGL; ISIVFVQIGLM; SIVFVQIGLMV; IVFVQIGLMVS; VFVQIGLMVSI; FVQIGLMVSIH;
VQIGLMVSIHY; QIGLMVSIHYL; IGLMVSIHYLG; GLMVSIHYLGL; LMVSIHYLGLG; MVSIHYLGLGC;
VSIHYLGLGCW; SIHYLGLGCWV; IHYLGLGCWVF; HYLGLGCWVFR; YLGLGCWVFRG;
LGLGCWVFRGY; GLGCWVFRGYS; LGCWVFRGYST; GCWVFRGYSTI; CWVFRGYSTIR;
WVFRGYSTIRV; VFRGYSTIRVL; HSLHFQGFSTY; SLHFQGFSTYS; LHFQGFSTYSK; HFQGFSTYSKE;
FQGFSTYSKEV; QGFSTYSKEVE; GFSTYSKEVEI; FSTYSKEVEIT; STYSKEVEITA; TYSKEVEITAL;
YSKEVEITALN; SKEVEITALNR; KEVEITALNRF; EVEITALNRFS; VEITALNRFSS; EITALNRFSST;
ITALNRFSSTM; TALNRFSSTML; ALNRFSSTMLM; LNRFSSTMLMH; NRFSSTMLMHF; RFSSTMLMHFL;
PCMKVKHASYS; CMKVKHASYSN; MKVKHASYSNN; KVKHASYSNNL; VKHASYSNNLC;
KHASYSNNLCL; HASYSNNLCLY; ASYSNNLCLYS; SYSNNLCLYSY; YSNNLCLYSYS; SNNLCLYSYSL;
NNLCLYSYSLP; NLCLYSYSLPH; LCLYSYSLPHQ; IGEGNSCCAVT; GEGNSCCAVTG; EGNSCCAVTGK;
GNSCCAVTGKH; NSCCAVTGKHF; SCCAVTGKHFS; CCAVTGKHFSL; CAVTGKHFSLW;
AVTGKHFSLWA; VTGKHFSLWAI; TGKHFSLWAIT; GKHFSLWAITA; KHFSLWAITAK; HFSLWAITAKV;
FSLWAITAKVI; SLWAITAKVIF; LWAITAKVIFS; WAITAKVIFST; TKAPKVFIWIP; KAPKVFIWIPH;
APKVFIWIPHF; PKVFIWIPHFW; KVFIWIPHFWV; EAFYLCNSIYP; AFYLCNSIYPS; FYLCNSIYPSF;
YLCNSIYPSFN; LCNSIYPSFNF; FWHLHGFLWLF; WHLHGFLWLFG; HLHGFLWLFGS; LHGFLWLFGSC;
HGFLWLFGSCP; GFLWLFGSCPW; FLWLFGSCPWT; LWLFGSCPWTL; WLFGSCPWTLS; LFGSCPWTLSF;
FGSCPWTLSFS; GSCPWTLSFSF; SCPWTLSFSFG; CPWTLSFSFGW; PWTLSFSFGWG; WTLSFSFGWGH;
TLSFSFGWGHL; LSFSFGWGHLH; SFSFGWGHLHM; FSFGWGHLHML; SFGWGHLHMLQ;
FGWGHLHMLQE; GWGHLHMLQEQ; WGHLHMLQEQV; GHLHMLQEQVL; HLHMLQEQVLQ;
LHMLQEQVLQS; HMLQEQVLQSR; MLQEQVLQSRT; LQEQVLQSRTG; QEQVLQSRTGL; EQVLQSRTGLE;
QVLQSRTGLEV; VLQSRTGLEVK; LQSRTGLEVKA; QSRTGLEVKAT; SRTGLEVKATS; RTGLEVKATSI;
TGLEVKATSIE; GLEVKATSIEE; LEVKATSIEEQ; EVKATSIEEQF; VKATSIEEQFF; KATSIEEQFFD;
TLLNVHFVDFL; LLNVHFVDFLS; LNVHFVDFLSP; NVHFVDFLSPF; VHFVDFLSPFF; HFVDFLSPFFV;
LLLYCQHHLYY; LLYCQHHLYYK; LYCQHHLYYKY; YCQHHLYYKYG; CQHHLYYKYGQ;
QHHLYYKYGQN; HHLYYKYGQNV; HLYYKYGQNVH; LYYKYGQNVHG; YYKYGQNVHGY;
YKYGQNVHGYL; KYGQNVHGYLP; YGQNVHGYLPF; GQNVHGYLPFQ; QNVHGYLPFQL;
NVHGYLPFQLL; VHGYLPFQLLV; GKDQNNIVEYN; KDQNNIVEYNY; DQNNIVEYNYK; QNNIVEYNYKS;
NNIVEYNYKSL; KIFLFFSAIPV; IFLFFSAIPVR; FLFFSAIPVRL; QKYLHQETEYH; KYLHQETEYHS;
YLHQETEYHST; LHQETEYHSTH; HQETEYHSTHL; QETEYHSTHLG; TIPKPCLIADR; IPKPCLIADRG;
PKPCLIADRGL; KPCLIADRGLQ; PCLIADRGLQW; CLIADRGLQWK; LIADRGLQWKL; IADRGLQWKLC;
ADRGLQWKLCD; DRGLQWKLCDP; RGLQWKLCDPN; GLQWKLCDPNH; LQWKLCDPNHQ;
QWKLCDPNHQR; WKLCDPNHQRT; KLCDPNHQRTY; LCDPNHQRTYT; CDPNHQRTYTL;
DPNHQRTYTLL; PNHQRTYTLLE; NHQRTYTLLEL; HQRTYTLLELR; QRTYTLLELRN; PQEHQQLQHMF;
QEHQQLQHMFE; EHQQLQHMFEE; HQQLQHMFEEL; QQLQHMFEELG; QLQHMFEELGL;
QQQPPQQQFQP; QQPPQQQFQPL; QPPQQQFQPLK; PPQQQFQPLKI; PQQQFQPLKIL; QQQFQPLKILW;
QQFQPLKILWQ; QFQPLKILWQQ; FQPLKILWQQQ; QPLKILWQQQP; PLKILWQQQPQ; LKILWQQQPQI;
KILWQQQPQIH; ILWQQQPQIHW; LWQQQPQIHWQ; WQQQPQIHWQL; QQQPQIHWQLG;
QQPQIHWQLGP; QPQIHWQLGPP; PQIHWQLGPPK; QIHWQLGPPKV; IHWQLGPPKVL; HWQLGPPKVLE;
WQLGPPKVLEQ; QLGPPKVLEQH; LGPPKVLEQHP; TWKYKKKGITY; WKYKKKGITYL;
KYKKKGITYLG; YKKKGITYLGV; KKKGITYLGVF; KKGITYLGVFY; KGITYLGVFYR; GITYLGVFYRV;
ITYLGVFYRVF; TYLGVFYRVFY; YLGVFYRVFYS; LGVFYRVFYSR; SSGTFVFPVYT; SGTFVFPVYTV;
GTFVFPVYTVF; TFVFPVYTVFT; FVFPVYTVFTS; VFPVYTVFTST; FPVYTVFTSTK; PVYTVFTSTKF;
VYTVFTSTKFQ; YTVFTSTKFQQ; TVFTSTKFQQK; VFTSTKFQQKL; NKNKNPLSSFF; KNKNPLSSFFC;
NKNPLSSFFCS; KNPLSSFFCSS; NPLSSFFCSSP; PLSSFFCSSPG; LSSFFCSSPGF; SSFFCSSPGFT;
SFFCSSPGFTN; FFCSSPGFTNF; FCSSPGFTNFH; QLAQNHGLCPV; LGTRPRFLGSQ; GTRPRFLGSQN;
TRPRFLGSQNM; RPRFLGSQNMS; PRFLGSQNMSV; RFLGSQNMSVM; FLGSQNMSVMH;
LGSQNMSVMHF; GSQNMSVMHFP; SQNMSVMHFPS; AAPPCESCTFL; APPCESCTFLP; PPCESCTFLPE;
PCESCTFLPEV; CESCTFLPEVM; ESCTFLPEVMV; SCTFLPEVMVW; CTFLPEVMVWL; TFLPEVMVWLH;
FLPEVMVWLHS; LPEVMVWLHSP; PEVMVWLHSPV; EVMVWLHSPVS; VMVWLHSPVSH;
MVWLHSPVSHA; VWLHSPVSHAL; WLHSPVSHALS; LHSPVSHALSF; HSPVSHALSFL; SPVSHALSFLR;
PVSHALSFLRS; VSHALSFLRSW; SHALSFLRSWF; HALSFLRSWFG; ALSFLRSWFGC; LSFLRSWFGCI;
SFLRSWFGCIP; FLRSWFGCIPW; LRSWFGCIPWV; RSWFGCIPWVS; SWFGCIPWVSS; WFGCIPWVSSS;
FGCIPWVSSSS; GCIPWVSSSSL; CIPWVSSSSLW; IPWVSSSSLWP; PWVSSSSLWPF; WVSSSSLWPFF;
VSSSSLWPFFL; YIRGRGRLCLH; IRGRGRLCLHP; RGRGRLCLHPF; GRGRLCLHPFS; RGRLCLHPFSQ;
GRLCLHPFSQV; RLCLHPFSQVV LCLHPFSQVVR; CLHPFSQVVRV; LHPFSQVVRVW; HPFSQVVRVWR;
PFSQVVRVWRL; FSQVVRVWRLF; SQVVRVWRLFL; QVVRVWRLFLR; VVRVWRLFLRP;
VRVWRLFLRPS; RVWRLFLRPSK; VWRLFLRPSKT; WRLFLRPSKTI; RLFLRPSKTIW; LFLRPSKTIWG;
FLRPSKTIWGN; LRPSKTIWGNP; RPSKTIWGNPY; PSKTIWGNPYS; SKTIWGNPYSF; KTIWGNPYSFA;
TIWGNPYSFAI; IWGNPYSFAIF; WGNPYSFAIFA; GNPYSFAIFAK

[0897] Preferred BK virus fragments of VP2-3 capable of interacting with one or more MHC class 1 molecules are listed in Table J.

TABLE J

Prediction of BK virus VP2-3 protein specific MHC class
1, 8-, 9-, 10-, 11-mer peptide binders for 42 MHC class 1
alleles (see FIG. 11) using the http://www.cbs.dtu.dk/
services/NetMHC/ database. The MHC class 1 molecules
for which no binders were found are not listed

| | | | | | | |
|---|---|---|---|---|---|---|
| pos | peptide | logscore | affinity (nM) | Bind Level | Protein Name | Allele |

8-mers

| | | | | | | |
|---|---|---|---|---|---|---|
| 107 | KVSTVGLY | 0.435 | 454 | WB | VP2-3 | A0101 |
| 140 | FVNNIQYL | 0.674 | 33 | SB | VP2-3 | A0201 |
| 80 | FAALIQTV | 0.581 | 93 | WB | VP2-3 | A0201 |
| 195 | FLEETTWT | 0.576 | 98 | WB | VP2-3 | A0201 |
| 5 | ALLGDLVA | 0.564 | 111 | WB | VP2-3 | A0201 |
| 43 | SLATVEGI | 0.559 | 118 | WB | VP2-3 | A0201 |
| 293 | MLPLLLGL | 0.552 | 127 | WB | VP2-3 | A0201 |
| 40 | QIASLATV | 0.533 | 155 | WB | VP2-3 | A0201 |
| 61 | GLTPQTYA | 0.533 | 155 | WB | VP2-3 | A0201 |
| 296 | LLLGLYGT | 0.529 | 163 | WB | VP2-3 | A0201 |
| 76 | AIAGFAAL | 0.469 | 311 | WB | VP2-3 | A0201 |
| 89 | GISSLAQV | 0.456 | 358 | WB | VP2-3 | A0201 |
| 297 | LLGLYGTV | 0.439 | 433 | WB | VP2-3 | A0201 |
| 132 | ILFPGVNT | 0.434 | 457 | WB | VP2-3 | A0201 |
| 140 | FVNNIQYL | 0.869 | 4 | SB | VP2-3 | A0202 |
| 293 | MLPLLLGL | 0.799 | 8 | SB | VP2-3 | A0202 |
| 80 | FAALIQTV | 0.745 | 15 | SB | VP2-3 | A0202 |
| 43 | SLATVEGI | 0.730 | 18 | SB | VP2-3 | A0202 |
| 61 | GLTPQTYA | 0.709 | 23 | SB | VP2-3 | A0202 |
| 195 | FLEETTWT | 0.686 | 29 | SB | VP2-3 | A0202 |
| 76 | AIAGFAAL | 0.667 | 36 | SB | VP2-3 | A0202 |
| 89 | GISSLAQV | 0.640 | 49 | SB | VP2-3 | A0202 |
| 3 | ALALLGDL | 0.630 | 54 | WB | VP2-3 | A0202 |
| 297 | LLGLYGTV | 0.607 | 69 | WB | VP2-3 | A0202 |
| 40 | QIASLATV | 0.606 | 71 | WB | VP2-3 | A0202 |
| 0 | MGAALALL | 0.581 | 92 | WB | VP2-3 | A0202 |
| 112 | GLYQQSGM | 0.575 | 99 | WB | VP2-3 | A0202 |
| 287 | RTAPQWML | 0.543 | 139 | WB | VP2-3 | A0202 |
| 6 | LLGDLVAS | 0.539 | 146 | WB | VP2-3 | A0202 |
| 157 | FATISQAL | 0.530 | 162 | WB | VP2-3 | A0202 |
| 10 | LVASVSEA | 0.524 | 173 | WB | VP2-3 | A0202 |
| 296 | LLLGLYGT | 0.477 | 287 | WB | VP2-3 | A0202 |
| 155 | SLFATISQ | 0.473 | 298 | WB | VP2-3 | A0202 |
| 86 | TVTGISSL | 0.461 | 341 | WB | VP2-3 | A0202 |
| 62 | LTPQTYAV | 0.458 | 352 | WB | VP2-3 | A0202 |
| 114 | YQQSGMAL | 0.445 | 405 | WB | VP2-3 | A0202 |
| 13 | SVSEAAAA | 0.433 | 461 | WB | VP2-3 | A0202 |
| 18 | AAATGFSV | 0.427 | 490 | WB | VP2-3 | A0202 |
| 132 | ILFPGVNT | 0.427 | 491 | WB | VP2-3 | A0202 |
| 43 | SLATVEGI | 0.798 | 8 | SB | VP2-3 | A0203 |
| 140 | FVNNIQYL | 0.775 | 11 | SB | VP2-3 | A0203 |
| 297 | LLGLYGTV | 0.773 | 11 | SB | VP2-3 | A0203 |
| 40 | QIASLATV | 0.748 | 15 | SB | VP2-3 | A0203 |
| 80 | FAALIQTV | 0.730 | 18 | SB | VP2-3 | A0203 |
| 61 | GLTPQTYA | 0.706 | 24 | SB | VP2-3 | A0203 |
| 89 | GISSLAQV | 0.701 | 25 | SB | VP2-3 | A0203 |
| 76 | AIAGFAAL | 0.701 | 25 | SB | VP2-3 | A0203 |
| 83 | LIQTVTGI | 0.666 | 37 | SB | VP2-3 | A0203 |
| 18 | AAATGFSV | 0.649 | 44 | SB | VP2-3 | A0203 |
| 3 | ALALLGDL | 0.643 | 47 | SB | VP2-3 | A0203 |
| 112 | GLYQQSGM | 0.624 | 58 | WB | VP2-3 | A0203 |
| 10 | LVASVSEA | 0.604 | 72 | WB | VP2-3 | A0203 |
| 114 | YQQSGMAL | 0.558 | 119 | WB | VP2-3 | A0203 |
| 296 | LLLGLYGT | 0.552 | 127 | WB | VP2-3 | A0203 |
| 195 | FLEETTWT | 0.540 | 144 | WB | VP2-3 | A0203 |
| 132 | ILFPGVNT | 0.534 | 154 | WB | VP2-3 | A0203 |
| 62 | LTPQTYAV | 0.523 | 175 | WB | VP2-3 | A0203 |
| 69 | VIAGAPGA | 0.516 | 187 | WB | VP2-3 | A0203 |
| 161 | SQALWHVI | 0.493 | 241 | WB | VP2-3 | A0203 |
| 86 | TVTGISSL | 0.464 | 330 | WB | VP2-3 | A0203 |
| 5 | ALLGDLVA | 0.455 | 364 | WB | VP2-3 | A0203 |
| 13 | SVSEAAAA | 0.454 | 368 | WB | VP2-3 | A0203 |
| 268 | SVHSGEFI | 0.440 | 426 | WB | VP2-3 | A0203 |
| 167 | VIRDDIPA | 0.435 | 450 | WB | VP2-3 | A0203 |
| 297 | LLGLYGTV | 0.613 | 66 | WB | VP2-3 | A0204 |
| 43 | SLATVEGI | 0.584 | 90 | WB | VP2-3 | A0204 |
| 140 | FVNNIQYL | 0.522 | 175 | WB | VP2-3 | A0204 |
| 80 | FAALIQTV | 0.522 | 176 | WB | VP2-3 | A0204 |
| 287 | RTAPQWML | 0.509 | 203 | WB | VP2-3 | A0204 |
| 114 | YQQSGMAL | 0.793 | 9 | SB | VP2-3 | A0206 |
| 80 | FAALIQTV | 0.748 | 15 | SB | VP2-3 | A0206 |
| 18 | AAATGFSV | 0.743 | 16 | SB | VP2-3 | A0206 |
| 140 | FVNNIQYL | 0.719 | 20 | SB | VP2-3 | A0206 |
| 39 | VQIASLAT | 0.713 | 22 | SB | VP2-3 | A0206 |
| 161 | SQALWHVI | 0.700 | 25 | SB | VP2-3 | A0206 |
| 40 | QIASLATV | 0.665 | 37 | SB | VP2-3 | A0206 |
| 75 | GAIAGFAA | 0.665 | 37 | SB | VP2-3 | A0206 |
| 76 | AIAGFAAL | 0.657 | 40 | SB | VP2-3 | A0206 |
| 293 | MLPLLLGL | 0.644 | 47 | SB | VP2-3 | A0206 |
| 94 | AQVGYRFF | 0.637 | 50 | WB | VP2-3 | A0206 |
| 62 | LTPQTYAV | 0.598 | 77 | WB | VP2-3 | A0206 |
| 214 | IQDYYSNL | 0.578 | 96 | WB | VP2-3 | A0206 |
| 201 | WTIVNAPI | 0.563 | 112 | WB | VP2-3 | A0206 |
| 195 | FLEETTWT | 0.551 | 129 | WB | VP2-3 | A0206 |
| 296 | LLLGLYGT | 0.550 | 129 | WB | VP2-3 | A0206 |
| 89 | GISSLAQV | 0.537 | 149 | WB | VP2-3 | A0206 |
| 5 | ALLGDLVA | 0.535 | 153 | WB | VP2-3 | A0206 |
| 157 | FATISQAL | 0.507 | 207 | WB | VP2-3 | A0206 |
| 13 | SVSEAAAA | 0.502 | 217 | WB | VP2-3 | A0206 |
| 287 | RTAPQWML | 0.501 | 221 | WB | VP2-3 | A0206 |
| 61 | GLTPQTYA | 0.499 | 226 | WB | VP2-3 | A0206 |
| 23 | FSVAEIAA | 0.479 | 279 | WB | VP2-3 | A0206 |
| 297 | LLGLYGTV | 0.477 | 286 | WB | VP2-3 | A0206 |
| 45 | ATVEGITT | 0.475 | 292 | WB | VP2-3 | A0206 |
| 4 | LALLGDLV | 0.460 | 346 | WB | VP2-3 | A0206 |
| 101 | FSDWDHKV | 0.454 | 366 | WB | VP2-3 | A0206 |
| 10 | LVASVSEA | 0.443 | 412 | WB | VP2-3 | A0206 |
| 132 | ILFPGVNT | 0.441 | 425 | WB | VP2-3 | A0206 |
| 247 | SIDNADSI | 0.437 | 440 | WB | VP2-3 | A0206 |
| 303 | TVTPALEA | 0.437 | 443 | WB | VP2-3 | A0206 |
| 43 | SLATVEGI | 0.433 | 463 | WB | VP2-3 | A0206 |
| 35 | AAIEVQIA | 0.427 | 493 | WB | VP2-3 | A0206 |
| 5 | ALLGDLVA | 0.884 | 3 | SB | VP2-3 | A0211 |
| 293 | MLPLLLGL | 0.861 | 4 | SB | VP2-3 | A0211 |
| 61 | GLTPQTYA | 0.856 | 4 | SB | VP2-3 | A0211 |
| 297 | LLGLYGTV | 0.852 | 4 | SB | VP2-3 | A0211 |
| 146 | YLDPRHWG | 0.842 | 5 | SB | VP2-3 | A0211 |
| 89 | GISSLAQV | 0.841 | 5 | SB | VP2-3 | A0211 |
| 155 | SLFATISQ | 0.823 | 6 | SB | VP2-3 | A0211 |
| 76 | AIAGFAAL | 0.819 | 7 | SB | VP2-3 | A0211 |
| 43 | SLATVEGI | 0.812 | 7 | SB | VP2-3 | A0211 |
| 40 | QIASLATV | 0.801 | 8 | SB | VP2-3 | A0211 |
| 296 | LLLGLYGT | 0.762 | 13 | SB | VP2-3 | A0211 |
| 140 | FVNNIQYL | 0.727 | 19 | SB | VP2-3 | A0211 |
| 132 | ILFPGVNT | 0.718 | 21 | SB | VP2-3 | A0211 |
| 80 | FAALIQTV | 0.692 | 27 | SB | VP2-3 | A0211 |
| 195 | FLEETTWT | 0.687 | 29 | SB | VP2-3 | A0211 |
| 86 | TVTGISSL | 0.686 | 29 | SB | VP2-3 | A0211 |
| 101 | FSDWDHKV | 0.685 | 30 | SB | VP2-3 | A0211 |
| 62 | LTPQTYAV | 0.680 | 32 | SB | VP2-3 | A0211 |
| 18 | AAATGFSV | 0.673 | 34 | SB | VP2-3 | A0211 |
| 112 | GLYQQSGM | 0.663 | 38 | SB | VP2-3 | A0211 |
| 287 | RTAPQWML | 0.657 | 40 | SB | VP2-3 | A0211 |
| 247 | SIDNADSI | 0.657 | 40 | SB | VP2-3 | A0211 |
| 250 | NADSIEEV | 0.652 | 43 | SB | VP2-3 | A0211 |
| 262 | DLRNKESV | 0.628 | 56 | WB | VP2-3 | A0211 |
| 299 | GLYGTVTP | 0.595 | 79 | WB | VP2-3 | A0211 |
| 6 | LLGDLVAS | 0.595 | 79 | WB | VP2-3 | A0211 |
| 292 | WMLPLLLG | 0.555 | 123 | WB | VP2-3 | A0211 |
| 268 | SVHSGEFI | 0.540 | 145 | WB | VP2-3 | A0211 |
| 303 | TVTPALEA | 0.519 | 182 | WB | VP2-3 | A0211 |
| 3 | ALALLGDL | 0.514 | 191 | WB | VP2-3 | A0211 |
| 32 | EAAAAIEV | 0.514 | 192 | WB | VP2-3 | A0211 |
| 191 | SLARFLEE | 0.502 | 217 | WB | VP2-3 | A0211 |
| 13 | SVSEAAAA | 0.493 | 240 | WB | VP2-3 | A0211 |
| 69 | VIAGAPGA | 0.467 | 317 | WB | VP2-3 | A0211 |
| 4 | LALLGDLV | 0.450 | 382 | WB | VP2-3 | A0211 |
| 167 | VIRDDIPA | 0.450 | 384 | WB | VP2-3 | A0211 |
| 293 | MLPLLLGL | 0.799 | 8 | SB | VP2-3 | A0212 |
| 297 | LLGLYGTV | 0.778 | 11 | SB | VP2-3 | A0212 |
| 5 | ALLGDLVA | 0.772 | 11 | SB | VP2-3 | A0212 |
| 76 | AIAGFAAL | 0.741 | 16 | SB | VP2-3 | A0212 |
| 146 | YLDPRHWG | 0.731 | 18 | SB | VP2-3 | A0212 |
| 43 | SLATVEGI | 0.730 | 18 | SB | VP2-3 | A0212 |
| 296 | LLLGLYGT | 0.725 | 19 | SB | VP2-3 | A0212 |
| 140 | FVNNIQYL | 0.685 | 30 | SB | VP2-3 | A0212 |
| 40 | QIASLATV | 0.664 | 37 | SB | VP2-3 | A0212 |
| 112 | GLYQQSGM | 0.661 | 39 | SB | VP2-3 | A0212 |
| 132 | ILFPGVNT | 0.661 | 39 | SB | VP2-3 | A0212 |
| 80 | FAALIQTV | 0.654 | 42 | SB | VP2-3 | A0212 |
| 155 | SLFATISQ | 0.649 | 44 | SB | VP2-3 | A0212 |
| 62 | LTPQTYAV | 0.635 | 51 | WB | VP2-3 | A0212 |
| 61 | GLTPQTYA | 0.635 | 51 | WB | VP2-3 | A0212 |
| 195 | FLEETTWT | 0.616 | 63 | WB | VP2-3 | A0212 |
| 89 | GISSLAQV | 0.615 | 64 | WB | VP2-3 | A0212 |
| 262 | DLRNKESV | 0.607 | 70 | WB | VP2-3 | A0212 |
| 6 | LLGDLVAS | 0.562 | 114 | WB | VP2-3 | A0212 |
| 114 | YQQSGMAL | 0.562 | 114 | WB | VP2-3 | A0212 |
| 69 | VIAGAPGA | 0.521 | 178 | WB | VP2-3 | A0212 |
| 101 | FSDWDHKV | 0.505 | 211 | WB | VP2-3 | A0212 |
| 18 | AAATGFSV | 0.490 | 249 | WB | VP2-3 | A0212 |
| 287 | RTAPQWML | 0.482 | 270 | WB | VP2-3 | A0212 |
| 299 | GLYGTVTP | 0.463 | 335 | WB | VP2-3 | A0212 |
| 3 | ALALLGDL | 0.450 | 383 | WB | VP2-3 | A0212 |
| 213 | YIQDYYSN | 0.440 | 430 | WB | VP2-3 | A0212 |
| 297 | LLGLYGTV | 0.869 | 4 | SB | VP2-3 | A0216 |
| 61 | GLTPQTYA | 0.801 | 8 | SB | VP2-3 | A0216 |
| 89 | GISSLAQV | 0.801 | 8 | SB | VP2-3 | A0216 |
| 40 | QIASLATV | 0.770 | 11 | SB | VP2-3 | A0216 |
| 262 | DLRNKESV | 0.743 | 16 | SB | VP2-3 | A0216 |
| 76 | AIAGFAAL | 0.723 | 20 | SB | VP2-3 | A0216 |
| 155 | SLFATISQ | 0.689 | 28 | SB | VP2-3 | A0216 |
| 140 | FVNNIQYL | 0.684 | 30 | SB | VP2-3 | A0216 |
| 293 | MLPLLLGL | 0.670 | 35 | SB | VP2-3 | A0216 |
| 5 | ALLGDLVA | 0.656 | 41 | SB | VP2-3 | A0216 |
| 80 | FAALIQTV | 0.647 | 45 | SB | VP2-3 | A0216 |
| 195 | FLEETTWT | 0.641 | 48 | SB | VP2-3 | A0216 |
| 43 | SLATVEGI | 0.614 | 64 | WB | VP2-3 | A0216 |
| 18 | AAATGFSV | 0.614 | 65 | WB | VP2-3 | A0216 |
| 86 | TVTGISSL | 0.612 | 66 | WB | VP2-3 | A0216 |
| 112 | GLYQQSGM | 0.597 | 78 | WB | VP2-3 | A0216 |
| 132 | ILFPGVNT | 0.596 | 79 | WB | VP2-3 | A0216 |
| 62 | LTPQTYAV | 0.580 | 93 | WB | VP2-3 | A0216 |
| 250 | NADSIEEV | 0.545 | 136 | WB | VP2-3 | A0216 |
| 296 | LLLGLYGT | 0.536 | 152 | WB | VP2-3 | A0216 |
| 146 | YLDPRHWG | 0.527 | 167 | WB | VP2-3 | A0216 |
| 32 | EAAAAIEV | 0.507 | 206 | WB | VP2-3 | A0216 |
| 247 | SIDNADSI | 0.502 | 219 | WB | VP2-3 | A0216 |
| 268 | SVHSGEFI | 0.451 | 380 | WB | VP2-3 | A0216 |
| 250 | NADSIEEV | 0.620 | 61 | WB | VP2-3 | A0219 |
| 40 | QIASLATV | 0.614 | 65 | WB | VP2-3 | A0219 |
| 18 | AAATGFSV | 0.612 | 66 | WB | VP2-3 | A0219 |
| 293 | MLPLLLGL | 0.609 | 68 | WB | VP2-3 | A0219 |
| 43 | SLATVEGI | 0.596 | 78 | WB | VP2-3 | A0219 |
| 146 | YLDPRHWG | 0.579 | 95 | WB | VP2-3 | A0219 |
| 80 | FAALIQTV | 0.579 | 95 | WB | VP2-3 | A0219 |
| 296 | LLLGLYGT | 0.567 | 108 | WB | VP2-3 | A0219 |
| 140 | FVNNIQYL | 0.565 | 110 | WB | VP2-3 | A0219 |
| 89 | GISSLAQV | 0.562 | 114 | WB | VP2-3 | A0219 |
| 297 | LLGLYGTV | 0.543 | 139 | WB | VP2-3 | A0219 |
| 61 | GLTPQTYA | 0.537 | 150 | WB | VP2-3 | A0219 |
| 76 | AIAGFAAL | 0.526 | 168 | WB | VP2-3 | A0219 |
| 5 | ALLGDLVA | 0.523 | 174 | WB | VP2-3 | A0219 |
| 62 | LTPQTYAV | 0.508 | 205 | WB | VP2-3 | A0219 |
| 86 | TVTGISSL | 0.502 | 220 | WB | VP2-3 | A0219 |
| 195 | FLEETTWT | 0.500 | 223 | WB | VP2-3 | A0219 |
| 32 | EAAAAIEV | 0.455 | 364 | WB | VP2-3 | A0219 |
| 132 | ILFPGVNT | 0.452 | 374 | WB | VP2-3 | A0219 |
| 114 | YQQSGMAL | 0.451 | 378 | WB | VP2-3 | A0219 |
| 262 | DLRNKESV | 0.442 | 418 | WB | VP2-3 | A0219 |
| 107 | KVSTVGLY | 0.604 | 72 | WB | VP2-3 | A0301 |
| 322 | VSRGSSQK | 0.592 | 83 | WB | VP2-3 | A0301 |
| 335 | ASAKTTNK | 0.580 | 93 | WB | VP2-3 | A0301 |
| 239 | HVNFGHTY | 0.472 | 302 | WB | VP2-3 | A0301 |
| 335 | ASAKTTNK | 0.732 | 18 | SB | VP2-3 | A1101 |
| 270 | HSGEFIEK | 0.611 | 67 | WB | VP2-3 | A1101 |
| 257 | VTQRMDLR | 0.584 | 90 | WB | VP2-3 | A1101 |
| 107 | KVSTVGLY | 0.575 | 98 | WB | VP2-3 | A1101 |
| 339 | TTNKRRSR | 0.528 | 165 | WB | VP2-3 | A1101 |
| 92 | SLAQVGYR | 0.509 | 202 | WB | VP2-3 | A1101 |
| 175 | ITSQELQR | 0.479 | 280 | WB | VP2-3 | A1101 |
| 91 | SSLAQVGY | 0.475 | 293 | WB | VP2-3 | A1101 |
| 322 | VSRGSSQK | 0.474 | 297 | WB | VP2-3 | A1101 |
| 176 | TSQELQRR | 0.469 | 312 | WB | VP2-3 | A1101 |
| 97 | GYRFFSDW | 0.582 | 91 | WB | VP2-3 | A2301 |
| 145 | QYLDPRHW | 0.515 | 190 | WB | VP2-3 | A2301 |
| 133 | LFPGVNTF | 0.508 | 205 | WB | VP2-3 | A2301 |
| 100 | FFSDWDHK | 0.478 | 283 | WB | VP2-3 | A2301 |
| 217 | YYSNLSPI | 0.443 | 412 | WB | VP2-3 | A2301 |
| 194 | RFLEETTW | 0.435 | 453 | WB | VP2-3 | A2301 |
| 217 | YYSNLSPI | 0.742 | 16 | SB | VP2-3 | A2402 |
| 133 | LFPGVNTF | 0.635 | 51 | WB | VP2-3 | A2402 |
| 291 | QWMLPLLL | 0.529 | 163 | WB | VP2-3 | A2402 |
| 97 | GYRFFSDW | 0.659 | 40 | SB | VP2-3 | A2403 |
| 194 | RFLEETTW | 0.644 | 47 | SB | VP2-3 | A2403 |
| 217 | YYSNLSPI | 0.636 | 51 | WB | VP2-3 | A2403 |
| 133 | LFPGVNTF | 0.624 | 58 | WB | VP2-3 | A2403 |
| 145 | QYLDPRHW | 0.611 | 67 | WB | VP2-3 | A2403 |
| 304 | VTPALEAY | 0.815 | 7 | SB | VP2-3 | A2602 |
| 256 | EVTQRMDL | 0.685 | 30 | SB | VP2-3 | A2602 |
| 122 | ELFNPDEY | 0.657 | 40 | SB | VP2-3 | A2602 |
| 287 | RTAPQWML | 0.612 | 66 | WB | VP2-3 | A2602 |
| 239 | HVNFGHTY | 0.607 | 69 | WB | VP2-3 | A2602 |
| 107 | KVSTVGLY | 0.569 | 105 | WB | VP2-3 | A2602 |
| 76 | AIAGFAAL | 0.544 | 138 | WB | VP2-3 | A2602 |
| 267 | ESVHSGEF | 0.496 | 232 | WB | VP2-3 | A2602 |
| 158 | ATISQALW | 0.474 | 296 | WB | VP2-3 | A2602 |
| 140 | FVNNIQYL | 0.465 | 324 | WB | VP2-3 | A2602 |
| 210 | FYNYIQDY | 0.674 | 34 | SB | VP2-3 | A2902 |
| 239 | HVNFGHTY | 0.663 | 38 | SB | VP2-3 | A2902 |
| 123 | LFNPDEYY | 0.588 | 86 | WB | VP2-3 | A2902 |
| 139 | TFVNNIQY | 0.582 | 91 | WB | VP2-3 | A2902 |
| 122 | ELFNPDEY | 0.546 | 136 | WB | VP2-3 | A2902 |
| 211 | YNYIQDYY | 0.522 | 177 | WB | VP2-3 | A2902 |
| 107 | KVSTVGLY | 0.502 | 219 | WB | VP2-3 | A2902 |
| 204 | VNAPINFY | 0.450 | 383 | WB | VP2-3 | A2902 |
| 322 | VSRGSSQK | 0.699 | 26 | SB | VP2-3 | A3001 |
| 331 | KGTRASAK | 0.573 | 101 | WB | VP2-3 | A3001 |
| 228 | MVRQVAER | 0.521 | 178 | WB | VP2-3 | A3001 |
| 342 | KRRSRSSR | 0.469 | 312 | WB | VP2-3 | A3001 |
| 335 | ASAKTTNK | 0.448 | 393 | WB | VP2-3 | A3001 |
| 324 | RGSSQKAK | 0.442 | 420 | WB | VP2-3 | A3001 |
| 107 | KVSTVGLY | 0.586 | 88 | WB | VP2-3 | A3002 |
| 210 | FYNYIQDY | 0.499 | 226 | WB | VP2-3 | A3002 |
| 339 | TTNKRRSR | 0.798 | 8 | SB | VP2-3 | A3101 |
| 228 | MVRQVAER | 0.756 | 13 | SB | VP2-3 | A3101 |
| 327 | SQKAKGTR | 0.755 | 14 | SB | VP2-3 | A3101 |
| 257 | VTQRMDLR | 0.637 | 50 | WB | VP2-3 | A3101 |
| 336 | SAKTTNKR | 0.631 | 53 | WB | VP2-3 | A3101 |
| 187 | FFRDSLAR | 0.594 | 80 | WB | VP2-3 | A3101 |
| 92 | SLAQVGYR | 0.593 | 81 | WB | VP2-3 | A3101 |
| 218 | YSNLSPIR | 0.579 | 95 | WB | VP2-3 | A3101 |
| 162 | QALWHVIR | 0.557 | 120 | WB | VP2-3 | A3101 |
| 176 | TSQELQRR | 0.511 | 198 | WB | VP2-3 | A3101 |
| 179 | ELQRRTER | 0.476 | 288 | WB | VP2-3 | A3101 |
| 182 | RRTERFFR | 0.473 | 299 | WB | VP2-3 | A3101 |
| 143 | NIQYLDPR | 0.430 | 474 | WB | VP2-3 | A3101 |
| 179 | ELQRRTER | 0.741 | 16 | SB | VP2-3 | A3301 |
| 228 | MVRQVAER | 0.701 | 25 | SB | VP2-3 | A3301 |
| 187 | FFRDSLAR | 0.688 | 29 | SB | VP2-3 | A3301 |
| 339 | TTNKRRSR | 0.662 | 38 | SB | VP2-3 | A3301 |
| 143 | NIQYLDPR | 0.508 | 205 | WB | VP2-3 | A3301 |
| 228 | MVRQVAER | 0.823 | 6 | SB | VP2-3 | A6801 |
| 339 | TTNKRRSR | 0.774 | 11 | SB | VP2-3 | A6801 |
| 175 | ITSQELQR | 0.722 | 20 | SB | VP2-3 | A6801 |
| 92 | SLAQVGYR | 0.704 | 24 | SB | VP2-3 | A6801 |
| 218 | YSNLSPIR | 0.701 | 25 | SB | VP2-3 | A6801 |
| 253 | SIEEVTQR | 0.642 | 48 | SB | VP2-3 | A6801 |
| 143 | NIQYLDPR | 0.634 | 52 | WB | VP2-3 | A6801 |
| 162 | QALWHVIR | 0.599 | 76 | WB | VP2-3 | A6801 |
| 179 | ELQRRTER | 0.592 | 82 | WB | VP2-3 | A6801 |
| 257 | VTQRMDLR | 0.581 | 92 | WB | VP2-3 | A6801 |
| 336 | SAKTTNKR | 0.571 | 103 | WB | VP2-3 | A6801 |
| 176 | TSQELQRR | 0.567 | 107 | WB | VP2-3 | A6801 |
| 270 | HSGEFIEK | 0.558 | 119 | WB | VP2-3 | A6801 |
| 239 | HVNFGHTY | 0.520 | 180 | WB | VP2-3 | A6801 |
| 138 | NTFVNNIQ | 0.471 | 305 | WB | VP2-3 | A6801 |
| 122 | ELFNPDEY | 0.441 | 425 | WB | VP2-3 | A6801 |
| 100 | FFSDWDHK | 0.434 | 458 | WB | VP2-3 | A6801 |
| 32 | EAAAAIEV | 0.852 | 4 | SB | VP2-3 | A6802 |
| 80 | FAALIQTV | 0.773 | 11 | SB | VP2-3 | A6802 |
| 86 | TVTGISSL | 0.765 | 12 | SB | VP2-3 | A6802 |
| 201 | WTIVNAPI | 0.749 | 15 | SB | VP2-3 | A6802 |
| 55 | EAIAAIGL | 0.732 | 18 | SB | VP2-3 | A6802 |
| 140 | FVNNIQYL | 0.714 | 22 | SB | VP2-3 | A6802 |
| 199 | TTWTIVNA | 0.686 | 29 | SB | VP2-3 | A6802 |
| 62 | LTPQTYAV | 0.667 | 36 | SB | VP2-3 | A6802 |
| 244 | HTYSIDNA | 0.652 | 43 | SB | VP2-3 | A6802 |
| 287 | RTAPQWML | 0.650 | 44 | SB | VP2-3 | A6802 |
| 40 | QIASLATV | 0.640 | 49 | SB | VP2-3 | A6802 |
| 0 | MGAALALL | 0.635 | 51 | WB | VP2-3 | A6802 |
| 52 | TTSEAIAA | 0.624 | 58 | WB | VP2-3 | A6802 |
| 27 | EIAAGEAA | 0.616 | 63 | WB | VP2-3 | A6802 |
| 21 | TGFSVAEI | 0.588 | 86 | WB | VP2-3 | A6802 |
| 10 | LVASVSEA | 0.583 | 90 | WB | VP2-3 | A6802 |
| 18 | AAATGFSV | 0.561 | 115 | WB | VP2-3 | A6802 |
| 76 | AIAGFAAL | 0.537 | 149 | WB | VP2-3 | A6802 |
| 53 | TSEAIAAI | 0.500 | 223 | WB | VP2-3 | A6802 |
| 303 | TVTPALEA | 0.475 | 293 | WB | VP2-3 | A6802 |
| 185 | ERFFRDSL | 0.472 | 301 | WB | VP2-3 | A6802 |
| 256 | EVTQRMDL | 0.455 | 363 | WB | VP2-3 | A6802 |
| 157 | FATISQAL | 0.452 | 375 | WB | VP2-3 | A6802 |
| 23 | FSVAEIAA | 0.451 | 380 | WB | VP2-3 | A6802 |
| 13 | SVSEAAAA | 0.446 | 400 | WB | VP2-3 | A6802 |
| 38 | EVQIASLA | 0.440 | 427 | WB | VP2-3 | A6802 |
| 43 | SLATVEGI | 0.440 | 430 | WB | VP2-3 | A6802 |
| 250 | NADSIEEV | 0.433 | 460 | WB | VP2-3 | A6802 |
| 32 | EAAAAIEV | 0.788 | 9 | SB | VP2-3 | A6901 |
| 199 | TTWTIVNA | 0.689 | 28 | SB | VP2-3 | A6901 |
| 201 | WTIVNAPI | 0.671 | 35 | SB | VP2-3 | A6901 |
| 40 | QIASLATV | 0.635 | 52 | WB | VP2-3 | A6901 |
| 55 | EAIAAIGL | 0.619 | 61 | WB | VP2-3 | A6901 |
| 134 | FPGVNTFV | 0.612 | 66 | WB | VP2-3 | A6901 |
| 80 | FAALIQTV | 0.611 | 67 | WB | VP2-3 | A6901 |
| 101 | FSDWDHKV | 0.563 | 112 | WB | VP2-3 | A6901 |
| 27 | EIAAGEAA | 0.546 | 135 | WB | VP2-3 | A6901 |
| 62 | LTPQTYAV | 0.541 | 143 | WB | VP2-3 | A6901 |
| 140 | FVNNIQYL | 0.534 | 154 | WB | VP2-3 | A6901 |
| 244 | HTYSIDNA | 0.533 | 156 | WB | VP2-3 | A6901 |
| 250 | NADSIEEV | 0.521 | 178 | WB | VP2-3 | A6901 |
| 52 | TTSEAIAA | 0.511 | 198 | WB | VP2-3 | A6901 |
| 18 | AAATGFSV | 0.493 | 241 | WB | VP2-3 | A6901 |
| 287 | RTAPQWML | 0.476 | 289 | WB | VP2-3 | A6901 |
| 222 | SPIRPSMV | 0.469 | 313 | WB | VP2-3 | A6901 |
| 289 | APQWMLPL | 0.773 | 11 | SB | VP2-3 | B0702 |
| 225 | RPSMVRQV | 0.705 | 24 | SB | VP2-3 | B0702 |
| 222 | SPIRPSMV | 0.604 | 72 | WB | VP2-3 | B0702 |
| 153 | GPSLFATI | 0.482 | 272 | WB | VP2-3 | B0702 |
| 134 | FPGVNTFV | 0.477 | 287 | WB | VP2-3 | B0702 |
| 63 | TPQTYAVI | 0.476 | 289 | WB | VP2-3 | B0702 |
| 73 | APGAIAGF | 0.460 | 343 | WB | VP2-3 | B0702 |
| 114 | YQQSGMAL | 0.579 | 94 | WB | VP2-3 | B1501 |
| 180 | LQRRTERF | 0.557 | 120 | WB | VP2-3 | B1501 |
| 94 | AQVGYRFF | 0.550 | 129 | WB | VP2-3 | B1501 |
| 239 | HVNFGHTY | 0.550 | 130 | WB | VP2-3 | B1501 |
| 203 | IVNAPINF | 0.498 | 228 | WB | VP2-3 | B1501 |
| 39 | VQIASLAT | 0.466 | 321 | WB | VP2-3 | B1501 |
| 107 | KVSTVGLY | 0.464 | 331 | WB | VP2-3 | B1501 |
| 161 | SQALWHVI | 0.446 | 400 | WB | VP2-3 | B1501 |
| 127 | DEYYDILF | 0.753 | 14 | SB | VP2-3 | B1801 |
| 37 | IEVQIASL | 0.745 | 15 | SB | VP2-3 | B1801 |
| 233 | AEREGTHV | 0.477 | 286 | WB | VP2-3 | B1801 |
| 182 | RRTERFFR | 0.519 | 182 | WB | VP2-3 | B2705 |
| 342 | KRRSRSSR | 0.514 | 192 | WB | VP2-3 | B2705 |
| 259 | QRMDLRNK | 0.511 | 197 | WB | VP2-3 | B2705 |
| 320 | RRVSRGSS | 0.459 | 349 | WB | VP2-3 | B2705 |
| 294 | LPLLLGLY | 0.729 | 18 | SB | VP2-3 | B3501 |
| 16 | EAAAATGF | 0.672 | 34 | SB | VP2-3 | B3501 |
| 239 | HVNFGHTY | 0.639 | 49 | SB | VP2-3 | B3501 |
| 206 | APINFYNY | 0.606 | 71 | WB | VP2-3 | B3501 |
| 157 | FATISQAL | 0.598 | 77 | WB | VP2-3 | B3501 |
| 289 | APQWMLPL | 0.579 | 95 | WB | VP2-3 | B3501 |
| 139 | TFVNNIQY | 0.501 | 221 | WB | VP2-3 | B3501 |
| 93 | LAQVGYRF | 0.486 | 261 | WB | VP2-3 | B3501 |
| 123 | LFNPDEYY | 0.476 | 289 | WB | VP2-3 | B3501 |
| 73 | APGAIAGF | 0.469 | 313 | WB | VP2-3 | B3501 |
| 114 | YQQSGMAL | 0.547 | 134 | WB | VP2-3 | B3901 |
| 37 | IEVQIASL | 0.623 | 59 | WB | VP2-3 | B4001 |
| 272 | GEFIEKTI | 0.558 | 118 | WB | VP2-3 | B4001 |
| 127 | DEYYDILF | 0.459 | 346 | WB | VP2-3 | B4001 |
| 235 | REGTHVNF | 0.445 | 404 | WB | VP2-3 | B4001 |
| 233 | AEREGTHV | 0.430 | 476 | WB | VP2-3 | B4001 |
| 235 | REGTHVNF | 0.564 | 111 | WB | VP2-3 | B4002 |
| 197 | EETTWTIV | 0.485 | 263 | WB | VP2-3 | B4002 |
| 272 | GEFIEKTI | 0.467 | 318 | WB | VP2-3 | B4002 |
| 26 | AEIAAGEA | 0.493 | 240 | WB | VP2-3 | B4403 |
| 235 | REGTHVNF | 0.426 | 497 | WB | VP2-3 | B4403 |
| 26 | AEIAAGEA | 0.624 | 58 | WB | VP2-3 | B4501 |
| 233 | AEREGTHV | 0.483 | 269 | WB | VP2-3 | B4501 |
| 197 | EETTWTIV | 0.443 | 413 | WB | VP2-3 | B4501 |
| 153 | GPSLFATI | 0.494 | 238 | WB | VP2-3 | B5101 |
| 63 | TPQTYAVI | 0.493 | 241 | WB | VP2-3 | B5101 |
| 294 | LPLLLGLY | 0.483 | 269 | WB | VP2-3 | B5101 |
| 134 | FPGVNTFV | 0.466 | 321 | WB | VP2-3 | B5101 |
| 222 | SPIRPSMV | 0.440 | 427 | WB | VP2-3 | B5101 |
| 206 | APINFYNY | 0.677 | 32 | SB | VP2-3 | B5301 |
| 134 | FPGVNTFV | 0.594 | 81 | WB | VP2-3 | B5301 |
| 63 | TPQTYAVI | 0.488 | 254 | WB | VP2-3 | B5301 |
| 153 | GPSLFATI | 0.467 | 320 | WB | VP2-3 | B5301 |
| 134 | FPGVNTFV | 0.703 | 24 | SB | VP2-3 | B5401 |
| 294 | LPLLLGLY | 0.526 | 168 | WB | VP2-3 | B5401 |
| 80 | FAALIQTV | 0.437 | 443 | WB | VP2-3 | B5401 |
| 158 | ATISQALW | 0.681 | 31 | SB | VP2-3 | B5801 |
| 194 | RFLEETTW | 0.580 | 93 | WB | VP2-3 | B5801 |
| 287 | RTAPQWML | 0.551 | 129 | WB | VP2-3 | B5801 |
| 203 | IVNAPINF | 0.463 | 332 | WB | VP2-3 | B5801 |

9-mers

| | | | | | | |
|---|---|---|---|---|---|---|
| 138 | NTFVNNIQY | 0.453 | 373 | WB | VP2-3 | A0101 |
| 195 | FLEETTWTI | 0.822 | 6 | SB | VP2-3 | A0201 |
| 6 | LLGDLVASV | 0.810 | 7 | SB | VP2-3 | A0201 |
| 292 | WMLPLLLGL | 0.786 | 10 | SB | VP2-3 | A0201 |
| 213 | YIQDYYSNL | 0.758 | 13 | SB | VP2-3 | A0201 |
| 61 | GLTPQTYAV | 0.678 | 32 | SB | VP2-3 | A0201 |
| 82 | ALIQTVTGI | 0.643 | 47 | SB | VP2-3 | A0201 |
| 299 | GLYGTVTPA | 0.622 | 59 | WB | VP2-3 | A0201 |
| 159 | TISQALWHV | 0.608 | 69 | WB | VP2-3 | A0201 |
| 39 | VQIASLATV | 0.593 | 81 | WB | VP2-3 | A0201 |
| 296 | LLLGLYGTV | 0.532 | 157 | WB | VP2-3 | A0201 |
| 155 | SLFATISQA | 0.509 | 203 | WB | VP2-3 | A0201 |
| 3 | ALALLGDLV | 0.509 | 203 | WB | VP2-3 | A0201 |
| 76 | AIAGFAALI | 0.477 | 288 | WB | VP2-3 | A0201 |
| 17 | AAAATGFSV | 0.471 | 307 | WB | VP2-3 | A0201 |
| 100 | FFSDWDHKV | 0.465 | 327 | WB | VP2-3 | A0201 |
| 191 | SLARFLEET | 0.427 | 492 | WB | VP2-3 | A0201 |
| 61 | GLTPQTYAV | 0.877 | 3 | SB | VP2-3 | A0202 |
| 6 | LLGDLVASV | 0.801 | 8 | SB | VP2-3 | A0202 |
| 195 | FLEETTWTI | 0.800 | 8 | SB | VP2-3 | A0202 |
| 3 | ALALLGDLV | 0.789 | 9 | SB | VP2-3 | A0202 |
| 213 | YIQDYYSNL | 0.759 | 13 | SB | VP2-3 | A0202 |
| 159 | TISQALWHV | 0.692 | 27 | SB | VP2-3 | A0202 |
| 155 | SLFATISQA | 0.675 | 33 | SB | VP2-3 | A0202 |
| 292 | WMLPLLLGL | 0.671 | 35 | SB | VP2-3 | A0202 |
| 299 | GLYGTVTPA | 0.656 | 41 | SB | VP2-3 | A0202 |
| 82 | ALIQTVTGI | 0.656 | 41 | SB | VP2-3 | A0202 |
| 191 | SLARFLEET | 0.649 | 44 | SB | VP2-3 | A0202 |
| 10 | LVASVSEAA | 0.578 | 96 | WB | VP2-3 | A0202 |
| 52 | TTSEAIAAI | 0.559 | 118 | WB | VP2-3 | A0202 |
| 76 | AIAGFAALI | 0.550 | 130 | WB | VP2-3 | A0202 |
| 296 | LLLGLYGTV | 0.537 | 149 | WB | VP2-3 | A0202 |
| 39 | VQIASLATV | 0.505 | 211 | WB | VP2-3 | A0202 |
| 33 | AAAAIEVQI | 0.497 | 231 | WB | VP2-3 | A0202 |
| 220 | NLSPIRPSM | 0.483 | 269 | WB | VP2-3 | A0202 |
| 80 | FAALIQTVT | 0.482 | 272 | WB | VP2-3 | A0202 |
| 112 | GLYQQSGMA | 0.457 | 356 | WB | VP2-3 | A0202 |
| 75 | GAIAGFAAL | 0.449 | 388 | WB | VP2-3 | A0202 |
| 17 | AAAATGFSV | 0.447 | 396 | WB | VP2-3 | A0202 |
| 65 | QTYAVIAGA | 0.445 | 405 | WB | VP2-3 | A0202 |
| 36 | AIEVQIASL | 0.443 | 413 | WB | VP2-3 | A0202 |
| 136 | GVNTFVNNI | 0.436 | 444 | WB | VP2-3 | A0202 |
| 132 | ILFPGVNTF | 0.435 | 454 | WB | VP2-3 | A0202 |
| 100 | FFSDWDHKV | 0.428 | 488 | WB | VP2-3 | A0202 |
| 6 | LLGDLVASV | 0.941 | 1 | SB | VP2-3 | A0203 |
| 299 | GLYGTVTPA | 0.900 | 2 | SB | VP2-3 | A0203 |
| 61 | GLTPQTYAV | 0.878 | 3 | SB | VP2-3 | A0203 |
| 82 | ALIQTVTGI | 0.870 | 4 | SB | VP2-3 | A0203 |
| 39 | VQIASLATV | 0.845 | 5 | SB | VP2-3 | A0203 |
| 213 | YIQDYYSNL | 0.840 | 5 | SB | VP2-3 | A0203 |
| 292 | WMLPLLLGL | 0.787 | 10 | SB | VP2-3 | A0203 |
| 296 | LLLGLYGTV | 0.779 | 10 | SB | VP2-3 | A0203 |
| 195 | FLEETTWTI | 0.757 | 13 | SB | VP2-3 | A0203 |
| 112 | GLYQQSGMA | 0.739 | 16 | SB | VP2-3 | A0203 |
| 155 | SLFATISQA | 0.730 | 18 | SB | VP2-3 | A0203 |
| 65 | QTYAVIAGA | 0.690 | 28 | SB | VP2-3 | A0203 |
| 3 | ALALLGDLV | 0.687 | 29 | SB | VP2-3 | A0203 |
| 69 | VIAGAPGAI | 0.670 | 35 | SB | VP2-3 | A0203 |
| 136 | GVNTFVNNI | 0.666 | 37 | SB | VP2-3 | A0203 |
| 76 | AIAGFAALI | 0.664 | 37 | SB | VP2-3 | A0203 |
| 191 | SLARFLEET | 0.663 | 38 | SB | VP2-3 | A0203 |
| 159 | TISQALWHV | 0.608 | 69 | WB | VP2-3 | A0203 |
| 85 | QTVTGISSL | 0.606 | 70 | WB | VP2-3 | A0203 |
| 52 | TTSEAIAAI | 0.586 | 88 | WB | VP2-3 | A0203 |
| 167 | VIRDDIPAI | 0.553 | 125 | WB | VP2-3 | A0203 |
| 17 | AAAATGFSV | 0.540 | 145 | WB | VP2-3 | A0203 |
| 75 | GAIAGFAAL | 0.515 | 190 | WB | VP2-3 | A0203 |
| 10 | LVASVSEAA | 0.487 | 258 | WB | VP2-3 | A0203 |
| 18 | AAATGFSVA | 0.483 | 269 | WB | VP2-3 | A0203 |
| 20 | ATGFSVAEI | 0.460 | 344 | WB | VP2-3 | A0203 |
| 79 | GFAALIQTV | 0.447 | 396 | WB | VP2-3 | A0203 |
| 220 | NLSPIRPSM | 0.428 | 485 | WB | VP2-3 | A0203 |
| 6 | LLGDLVASV | 0.693 | 27 | SB | VP2-3 | A0204 |
| 195 | FLEETTWTI | 0.675 | 33 | SB | VP2-3 | A0204 |
| 61 | GLTPQTYAV | 0.670 | 35 | SB | VP2-3 | A0204 |
| 82 | ALIQTVTGI | 0.615 | 64 | WB | VP2-3 | A0204 |
| 155 | SLFATISQA | 0.590 | 84 | WB | VP2-3 | A0204 |
| 296 | LLLGLYGTV | 0.582 | 91 | WB | VP2-3 | A0204 |
| 100 | FFSDWDHKV | 0.570 | 104 | WB | VP2-3 | A0204 |
| 17 | AAAATGFSV | 0.494 | 238 | WB | VP2-3 | A0204 |
| 292 | WMLPLLLGL | 0.493 | 241 | WB | VP2-3 | A0204 |
| 213 | YIQDYYSNL | 0.491 | 246 | WB | VP2-3 | A0204 |
| 299 | GLYGTVTPA | 0.468 | 317 | WB | VP2-3 | A0204 |
| 159 | TISQALWHV | 0.463 | 333 | WB | VP2-3 | A0204 |
| 191 | SLARFLEET | 0.455 | 365 | WB | VP2-3 | A0204 |
| 39 | VQIASLATV | 0.928 | 2 | SB | VP2-3 | A0206 |
| 292 | WMLPLLLGL | 0.907 | 2 | SB | VP2-3 | A0206 |
| 195 | FLEETTWTI | 0.894 | 3 | SB | VP2-3 | A0206 |
| 61 | GLTPQTYAV | 0.849 | 5 | SB | VP2-3 | A0206 |
| 159 | TISQALWHV | 0.830 | 6 | SB | VP2-3 | A0206 |
| 6 | LLGDLVASV | 0.811 | 7 | SB | VP2-3 | A0206 |
| 75 | GAIAGFAAL | 0.805 | 8 | SB | VP2-3 | A0206 |
| 68 | AVIAGAPGA | 0.768 | 12 | SB | VP2-3 | A0206 |
| 17 | AAAATGFSV | 0.719 | 20 | SB | VP2-3 | A0206 |
| 82 | ALIQTVTGI | 0.701 | 25 | SB | VP2-3 | A0206 |
| 296 | LLLGLYGTV | 0.688 | 29 | SB | VP2-3 | A0206 |
| 45 | ATVEGITTT | 0.678 | 32 | SB | VP2-3 | A0206 |
| 94 | AQVGYRFFS | 0.625 | 57 | WB | VP2-3 | A0206 |
| 146 | YLDPRHWGP | 0.622 | 59 | WB | VP2-3 | A0206 |
| 213 | YIQDYYSNL | 0.593 | 81 | WB | VP2-3 | A0206 |
| 52 | TTSEAIAAI | 0.579 | 94 | WB | VP2-3 | A0206 |
| 10 | LVASVSEAA | 0.547 | 133 | WB | VP2-3 | A0206 |
| 129 | YYDILFPGV | 0.545 | 137 | WB | VP2-3 | A0206 |
| 288 | TAPQWMLPL | 0.544 | 139 | WB | VP2-3 | A0206 |
| 114 | YQQSGMALE | 0.542 | 141 | WB | VP2-3 | A0206 |
| 246 | YSIDNADSI | 0.520 | 180 | WB | VP2-3 | A0206 |
| 18 | AAATGFSVA | 0.517 | 186 | WB | VP2-3 | A0206 |
| 299 | GLYGTVTPA | 0.516 | 189 | WB | VP2-3 | A0206 |
| 85 | QTVTGISSL | 0.511 | 198 | WB | VP2-3 | A0206 |
| 76 | AIAGFAALI | 0.511 | 198 | WB | VP2-3 | A0206 |
| 29 | AAGEAAAAI | 0.508 | 205 | WB | VP2-3 | A0206 |
| 132 | ILFPGVNTF | 0.505 | 210 | WB | VP2-3 | A0206 |
| 230 | RQVAEREGT | 0.497 | 230 | WB | VP2-3 | A0206 |
| 3 | ALALLGDLV | 0.496 | 234 | WB | VP2-3 | A0206 |
| 65 | QTYAVIAGA | 0.478 | 282 | WB | VP2-3 | A0206 |
| 5 | ALLGDLVAS | 0.462 | 337 | WB | VP2-3 | A0206 |
| 167 | VIRDDIPAI | 0.444 | 409 | WB | VP2-3 | A0206 |
| 115 | QQSGMALEL | 0.438 | 437 | WB | VP2-3 | A0206 |
| 61 | GLTPQTYAV | 0.969 | 1 | SB | VP2-3 | A0211 |
| 6 | LLGDLVASV | 0.968 | 1 | SB | VP2-3 | A0211 |
| 296 | LLLGLYGTV | 0.950 | 1 | SB | VP2-3 | A0211 |
| 292 | WMLPLLLGL | 0.944 | 1 | SB | VP2-3 | A0211 |
| 195 | FLEETTWTI | 0.936 | 2 | SB | VP2-3 | A0211 |
| 159 | TISQALWHV | 0.904 | 2 | SB | VP2-3 | A0211 |
| 155 | SLFATISQA | 0.891 | 3 | SB | VP2-3 | A0211 |
| 299 | GLYGTVTPA | 0.884 | 3 | SB | VP2-3 | A0211 |
| 100 | FFSDWDHKV | 0.872 | 4 | SB | VP2-3 | A0211 |
| 146 | YLDPRHWGP | 0.871 | 4 | SB | VP2-3 | A0211 |
| 3 | ALALLGDLV | 0.860 | 4 | SB | VP2-3 | A0211 |
| 213 | YIQDYYSNL | 0.850 | 5 | SB | VP2-3 | A0211 |
| 220 | NLSPIRPSM | 0.829 | 6 | SB | VP2-3 | A0211 |
| 132 | ILFPGVNTF | 0.826 | 6 | SB | VP2-3 | A0211 |
| 76 | AIAGFAALI | 0.816 | 7 | SB | VP2-3 | A0211 |
| 191 | SLARFLEET | 0.802 | 8 | SB | VP2-3 | A0211 |
| 82 | ALIQTVTGI | 0.775 | 11 | SB | VP2-3 | A0211 |
| 129 | YYDILFPGV | 0.734 | 17 | SB | VP2-3 | A0211 |
| 92 | SLAQVGYRF | 0.679 | 32 | SB | VP2-3 | A0211 |
| 79 | GFAALIQTV | 0.662 | 38 | SB | VP2-3 | A0211 |
| 5 | ALLGDLVAS | 0.660 | 39 | SB | VP2-3 | A0211 |
| 112 | GLYQQSGMA | 0.658 | 40 | SB | VP2-3 | A0211 |
| 17 | AAAATGFSV | 0.657 | 41 | SB | VP2-3 | A0211 |
| 295 | PLLLGLYGT | 0.632 | 53 | WB | VP2-3 | A0211 |
| 133 | LFPGVNTFV | 0.594 | 80 | WB | VP2-3 | A0211 |
| 167 | VIRDDIPAI | 0.594 | 81 | WB | VP2-3 | A0211 |
| 253 | SIEEVTQRM | 0.567 | 108 | WB | VP2-3 | A0211 |
| 86 | TVTGISSLA | 0.472 | 303 | WB | VP2-3 | A0211 |
| 288 | TAPQWMLPL | 0.472 | 304 | WB | VP2-3 | A0211 |
| 27 | EIAAGEAAA | 0.450 | 383 | WB | VP2-3 | A0211 |
| 6 | LLGDLVASV | 0.931 | 2 | SB | VP2-3 | A0212 |
| 61 | GLTPQTYAV | 0.924 | 2 | SB | VP2-3 | A0212 |
| 296 | LLLGLYGTV | 0.910 | 2 | SB | VP2-3 | A0212 |
| 292 | WMLPLLLGL | 0.910 | 2 | SB | VP2-3 | A0212 |
| 213 | YIQDYYSNL | 0.894 | 3 | SB | VP2-3 | A0212 |
| 195 | FLEETTWTI | 0.892 | 3 | SB | VP2-3 | A0212 |
| 146 | YLDPRHWGP | 0.842 | 5 | SB | VP2-3 | A0212 |
| 100 | FFSDWDHKV | 0.833 | 6 | SB | VP2-3 | A0212 |
| 299 | GLYGTVTPA | 0.769 | 12 | SB | VP2-3 | A0212 |
| 159 | TISQALWHV | 0.717 | 21 | SB | VP2-3 | A0212 |
| 132 | ILFPGVNTF | 0.716 | 21 | SB | VP2-3 | A0212 |
| 167 | VIRDDIPAI | 0.698 | 26 | SB | VP2-3 | A0212 |
| 155 | SLFATISQA | 0.679 | 32 | SB | VP2-3 | A0212 |
| 82 | ALIQTVTGI | 0.678 | 32 | SB | VP2-3 | A0212 |
| 191 | SLARFLEET | 0.662 | 38 | SB | VP2-3 | A0212 |
| 3 | ALALLGDLV | 0.654 | 42 | SB | VP2-3 | A0212 |
| 129 | YYDILFPGV | 0.650 | 43 | SB | VP2-3 | A0212 |
| 220 | NLSPIRPSM | 0.622 | 59 | WB | VP2-3 | A0212 |
| 5 | ALLGDLVAS | 0.593 | 82 | WB | VP2-3 | A0212 |
| 79 | GFAALIQTV | 0.532 | 157 | WB | VP2-3 | A0212 |
| 133 | LFPGVNTFV | 0.528 | 164 | WB | VP2-3 | A0212 |
| 295 | PLLLGLYGT | 0.485 | 261 | WB | VP2-3 | A0212 |
| 27 | EIAAGEAAA | 0.471 | 306 | WB | VP2-3 | A0212 |
| 17 | AAAATGFSV | 0.450 | 383 | WB | VP2-3 | A0212 |
| 76 | AIAGFAALI | 0.448 | 393 | WB | VP2-3 | A0212 |
| 253 | SIEEVTQRM | 0.430 | 475 | WB | VP2-3 | A0212 |
| 6 | LLGDLVASV | 0.934 | 2 | SB | VP2-3 | A0216 |
| 61 | GLTPQTYAV | 0.916 | 2 | SB | VP2-3 | A0216 |
| 296 | LLLGLYGTV | 0.886 | 3 | SB | VP2-3 | A0216 |
| 159 | TISQALWHV | 0.864 | 4 | SB | VP2-3 | A0216 |
| 195 | FLEETTWTI | 0.847 | 5 | SB | VP2-3 | A0216 |
| 155 | SLFATISQA | 0.847 | 5 | SB | VP2-3 | A0216 |
| 299 | GLYGTVTPA | 0.835 | 5 | SB | VP2-3 | A0216 |
| 213 | YIQDYYSNL | 0.801 | 8 | SB | VP2-3 | A0216 |
| 100 | FFSDWDHKV | 0.789 | 9 | SB | VP2-3 | A0216 |
| 133 | LFPGVNTFV | 0.782 | 10 | SB | VP2-3 | A0216 |
| 292 | WMLPLLLGL | 0.764 | 12 | SB | VP2-3 | A0216 |
| 3 | ALALLGDLV | 0.763 | 12 | SB | VP2-3 | A0216 |
| 191 | SLARFLEET | 0.721 | 20 | SB | VP2-3 | A0216 |
| 82 | ALIQTVTGI | 0.677 | 33 | SB | VP2-3 | A0216 |
| 220 | NLSPIRPSM | 0.650 | 44 | SB | VP2-3 | A0216 |
| 76 | AIAGFAALI | 0.635 | 51 | WB | VP2-3 | A0216 |
| 17 | AAAATGFSV | 0.610 | 67 | WB | VP2-3 | A0216 |
| 132 | ILFPGVNTF | 0.584 | 90 | WB | VP2-3 | A0216 |
| 112 | GLYQQSGMA | 0.570 | 104 | WB | VP2-3 | A0216 |
| 92 | SLAQVGYRF | 0.552 | 127 | WB | VP2-3 | A0216 |
| 79 | GFAALIQTV | 0.522 | 176 | WB | VP2-3 | A0216 |
| 6 | LLGDLVASV | 0.930 | 2 | SB | VP2-3 | A0219 |
| 292 | WMLPLLLGL | 0.899 | 2 | SB | VP2-3 | A0219 |
| 61 | GLTPQTYAV | 0.888 | 3 | SB | VP2-3 | A0219 |
| 195 | FLEETTWTI | 0.848 | 5 | SB | VP2-3 | A0219 |
| 159 | TISQALWHV | 0.840 | 5 | SB | VP2-3 | A0219 |
| 100 | FFSDWDHKV | 0.782 | 10 | SB | VP2-3 | A0219 |
| 213 | YIQDYYSNL | 0.736 | 17 | SB | VP2-3 | A0219 |
| 296 | LLLGLYGTV | 0.726 | 19 | SB | VP2-3 | A0219 |
| 146 | YLDPRHWGP | 0.682 | 31 | SB | VP2-3 | A0219 |
| 82 | ALIQTVTGI | 0.643 | 47 | SB | VP2-3 | A0219 |
| 17 | AAAATGFSV | 0.629 | 55 | WB | VP2-3 | A0219 |
| 155 | SLFATISQA | 0.603 | 73 | WB | VP2-3 | A0219 |
| 299 | GLYGTVTPA | 0.564 | 111 | WB | VP2-3 | A0219 |
| 295 | PLLLGLYGT | 0.553 | 125 | WB | VP2-3 | A0219 |
| 129 | YYDILFPGV | 0.529 | 163 | WB | VP2-3 | A0219 |
| 220 | NLSPIRPSM | 0.528 | 164 | WB | VP2-3 | A0219 |
| 167 | VIRDDIPAI | 0.507 | 208 | WB | VP2-3 | A0219 |
| 132 | ILFPGVNTF | 0.504 | 214 | WB | VP2-3 | A0219 |
| 3 | ALALLGDLV | 0.475 | 291 | WB | VP2-3 | A0219 |
| 321 | RVSRGSSQK | 0.719 | 20 | SB | VP2-3 | A0301 |
| 334 | RASAKTTNK | 0.651 | 43 | SB | VP2-3 | A0301 |
| 203 | IVNAPINFY | 0.555 | 123 | WB | VP2-3 | A0301 |
| 293 | MLPLLLGLY | 0.473 | 299 | WB | VP2-3 | A0301 |
| 334 | RASAKTTNK | 0.729 | 18 | SB | VP2-3 | A1101 |
| 321 | RVSRGSSQK | 0.724 | 19 | SB | VP2-3 | A1101 |
| 91 | SSLAQVGYR | 0.688 | 29 | SB | VP2-3 | A1101 |
| 203 | IVNAPINFY | 0.666 | 37 | SB | VP2-3 | A1101 |
| 99 | RFFSDWDHK | 0.496 | 234 | WB | VP2-3 | A1101 |
| 158 | ATISQALWH | 0.460 | 345 | WB | VP2-3 | A1101 |
| 161 | SQALWHVIR | 0.457 | 356 | WB | VP2-3 | A1101 |
| 174 | AITSQELQR | 0.448 | 392 | WB | VP2-3 | A1101 |
| 139 | TFVNNIQYL | 0.584 | 90 | WB | VP2-3 | A2301 |
| 187 | FFRDSLARF | 0.577 | 97 | WB | VP2-3 | A2301 |
| 113 | LYQQSGMAL | 0.564 | 111 | WB | VP2-3 | A2301 |
| 132 | ILFPGVNTF | 0.521 | 178 | WB | VP2-3 | A2301 |
| 300 | LYGTVTPAL | 0.518 | 183 | WB | VP2-3 | A2301 |
| 216 | DYYSNLSPI | 0.482 | 271 | WB | VP2-3 | A2301 |
| 310 | AYEDGPNQK | 0.478 | 283 | WB | VP2-3 | A2301 |
| 202 | TIVNAPINF | 0.466 | 322 | WB | VP2-3 | A2301 |
| 99 | RFFSDWDHK | 0.466 | 323 | WB | VP2-3 | A2301 |
| 92 | SLAQVGYRF | 0.459 | 348 | WB | VP2-3 | A2301 |
| 300 | LYGTVTPAL | 0.661 | 39 | SB | VP2-3 | A2402 |
| 216 | DYYSNLSPI | 0.637 | 50 | WB | VP2-3 | A2402 |
| 156 | LFATISQAL | 0.560 | 116 | WB | VP2-3 | A2402 |
| 113 | LYQQSGMAL | 0.530 | 160 | WB | VP2-3 | A2402 |
| 200 | TWTIVNAPI | 0.452 | 374 | WB | VP2-3 | A2402 |
| 113 | LYQQSGMAL | 0.743 | 16 | SB | VP2-3 | A2403 |
| 139 | TFVNNIQYL | 0.591 | 83 | WB | VP2-3 | A2403 |
| 187 | FFRDSLARF | 0.572 | 102 | WB | VP2-3 | A2403 |
| 300 | LYGTVTPAL | 0.502 | 218 | WB | VP2-3 | A2403 |
| 292 | WMLPLLLGL | 0.426 | 498 | WB | VP2-3 | A2403 |
| 122 | ELFNPDEYY | 0.557 | 120 | WB | VP2-3 | A2601 |
| 303 | TVTPALEAY | 0.843 | 5 | SB | VP2-3 | A2602 |
| 203 | IVNAPINFY | 0.823 | 6 | SB | VP2-3 | A2602 |
| 122 | ELFNPDEYY | 0.792 | 9 | SB | VP2-3 | A2602 |
| 85 | QTVTGISSL | 0.778 | 11 | SB | VP2-3 | A2602 |
| 213 | YIQDYYSNL | 0.629 | 55 | WB | VP2-3 | A2602 |
| 293 | MLPLLLGLY | 0.578 | 96 | WB | VP2-3 | A2602 |
| 179 | ELQRRTERF | 0.551 | 128 | WB | VP2-3 | A2602 |
| 36 | AIEVQIASL | 0.518 | 183 | WB | VP2-3 | A2602 |
| 138 | NTFVNNIQY | 0.503 | 215 | WB | VP2-3 | A2602 |
| 187 | FFRDSLARF | 0.468 | 316 | WB | VP2-3 | A2602 |
| 202 | TIVNAPINF | 0.447 | 398 | WB | VP2-3 | A2602 |
| 62 | LTPQTYAVI | 0.442 | 416 | WB | VP2-3 | A2602 |
| 210 | FYNYIQDYY | 0.765 | 12 | SB | VP2-3 | A2902 |
| 122 | ELFNPDEYY | 0.716 | 21 | SB | VP2-3 | A2902 |
| 138 | NTFVNNIQY | 0.580 | 94 | WB | VP2-3 | A2902 |
| 203 | IVNAPINFY | 0.465 | 327 | WB | VP2-3 | A2902 |
| 209 | NFYNYIQDY | 0.457 | 357 | WB | VP2-3 | A2902 |
| 293 | MLPLLLGLY | 0.446 | 402 | WB | VP2-3 | A2902 |
| 99 | RFFSDWDHK | 0.765 | 12 | SB | VP2-3 | A3001 |
| 321 | RVSRGSSQK | 0.639 | 49 | SB | VP2-3 | A3001 |
| 334 | RASAKTTNK | 0.593 | 81 | WB | VP2-3 | A3001 |
| 186 | RFFRDSLAR | 0.501 | 222 | WB | VP2-3 | A3001 |
| 329 | KAKGTRASA | 0.446 | 401 | WB | VP2-3 | A3001 |
| 210 | FYNYIQDYY | 0.594 | 80 | WB | VP2-3 | A3002 |
| 203 | IVNAPINFY | 0.508 | 205 | WB | VP2-3 | A3002 |
| 293 | MLPLLLGLY | 0.466 | 321 | WB | VP2-3 | A3002 |
| 338 | KTTNKRRSR | 0.829 | 6 | SB | VP2-3 | A3101 |
| 316 | NQKKRRVSR | 0.804 | 8 | SB | VP2-3 | A3101 |
| 227 | SMVRQVAER | 0.772 | 11 | SB | VP2-3 | A3101 |
| 186 | RFFRDSLAR | 0.765 | 12 | SB | VP2-3 | A3101 |
| 91 | SSLAQVGYR | 0.756 | 13 | SB | VP2-3 | A3101 |
| 161 | SQALWHVIR | 0.641 | 48 | SB | VP2-3 | A3101 |
| 326 | SSQKAKGTR | 0.632 | 53 | WB | VP2-3 | A3101 |
| 334 | RASAKTTNK | 0.583 | 91 | WB | VP2-3 | A3101 |
| 217 | YYSNLSPIR | 0.570 | 105 | WB | VP2-3 | A3101 |
| 336 | SAKTTNKRR | 0.537 | 149 | WB | VP2-3 | A3101 |
| 99 | RFFSDWDHK | 0.504 | 214 | WB | VP2-3 | A3101 |
| 335 | ASAKTTNKR | 0.479 | 280 | WB | VP2-3 | A3101 |
| 321 | RVSRGSSQK | 0.435 | 453 | WB | VP2-3 | A3101 |
| 256 | EVTQRMDLR | 0.709 | 23 | SB | VP2-3 | A3301 |
| 316 | NQKKRRVSR | 0.703 | 24 | SB | VP2-3 | A3301 |
| 252 | DSIEEVTQR | 0.585 | 89 | WB | VP2-3 | A3301 |
| 341 | NKRRSRSSR | 0.463 | 333 | WB | VP2-3 | A3301 |
| 256 | EVTQRMDLR | 0.844 | 5 | SB | VP2-3 | A6801 |
| 252 | DSIEEVTQR | 0.787 | 10 | SB | VP2-3 | A6801 |
| 138 | NTFVNNIQY | 0.711 | 22 | SB | VP2-3 | A6801 |
| 175 | ITSQELQRR | 0.650 | 44 | SB | VP2-3 | A6801 |
| 279 | IAPGGANQR | 0.616 | 63 | WB | VP2-3 | A6801 |
| 217 | YYSNLSPIR | 0.607 | 70 | WB | VP2-3 | A6801 |
| 91 | SSLAQVGYR | 0.605 | 71 | WB | VP2-3 | A6801 |
| 227 | SMVRQVAER | 0.599 | 76 | WB | VP2-3 | A6801 |
| 335 | ASAKTTNKR | 0.531 | 160 | WB | VP2-3 | A6801 |
| 122 | ELFNPDEYY | 0.510 | 201 | WB | VP2-3 | A6801 |
| 210 | FYNYIQDYY | 0.503 | 217 | WB | VP2-3 | A6801 |
| 174 | AITSQELQR | 0.462 | 338 | WB | VP2-3 | A6801 |
| 142 | NNIQYLDPR | 0.461 | 341 | WB | VP2-3 | A6801 |
| 326 | SSQKAKGTR | 0.457 | 357 | WB | VP2-3 | A6801 |
| 321 | RVSRGSSQK | 0.456 | 360 | WB | VP2-3 | A6801 |
| 303 | TVTPALEAY | 0.454 | 367 | WB | VP2-3 | A6801 |
| 161 | SQALWHVIR | 0.451 | 379 | WB | VP2-3 | A6801 |
| 203 | IVNAPINFY | 0.449 | 388 | WB | VP2-3 | A6801 |
| 338 | KTTNKRRSR | 0.428 | 487 | WB | VP2-3 | A6801 |
| 336 | SAKTTNKRR | 0.427 | 493 | WB | VP2-3 | A6801 |
| 65 | QTYAVIAGA | 0.846 | 5 | SB | VP2-3 | A6802 |
| 52 | TTSEAIAAI | 0.827 | 6 | SB | VP2-3 | A6802 |
| 86 | TVTGISSLA | 0.764 | 12 | SB | VP2-3 | A6802 |
| 10 | LVASVSEAA | 0.709 | 23 | SB | VP2-3 | A6802 |
| 198 | ETTWTIVNA | 0.691 | 28 | SB | VP2-3 | A6802 |
| 85 | QTVTGISSL | 0.677 | 32 | SB | VP2-3 | A6802 |
| 16 | EAAAATGFS | 0.649 | 44 | SB | VP2-3 | A6802 |
| 267 | ESVHSGEFI | 0.602 | 73 | WB | VP2-3 | A6802 |
| 27 | EIAAGEAAA | 0.596 | 79 | WB | VP2-3 | A6802 |
| 17 | AAAATGFSV | 0.574 | 100 | WB | VP2-3 | A6802 |
| 249 | DNADSIEEV | 0.562 | 114 | WB | VP2-3 | A6802 |
| 166 | HVIRDDIPA | 0.561 | 115 | WB | VP2-3 | A6802 |
| 159 | TISQALWHV | 0.550 | 130 | WB | VP2-3 | A6802 |
| 88 | TGISSLAQV | 0.536 | 151 | WB | VP2-3 | A6802 |
| 48 | EGITTTSEA | 0.535 | 152 | WB | VP2-3 | A6802 |
| 246 | YSIDNADSI | 0.523 | 174 | WB | VP2-3 | A6802 |
| 76 | AIAGFAALI | 0.521 | 177 | WB | VP2-3 | A6802 |
| 55 | EAIAAIGLT | 0.484 | 267 | WB | VP2-3 | A6802 |
| 80 | FAALIQTVT | 0.481 | 273 | WB | VP2-3 | A6802 |
| 152 | WGPSLFATI | 0.478 | 284 | WB | VP2-3 | A6802 |
| 33 | AAAAIEVQI | 0.458 | 353 | WB | VP2-3 | A6802 |
| 288 | TAPQWMLPL | 0.443 | 416 | WB | VP2-3 | A6802 |
| 51 | TTTSEAIAA | 0.433 | 463 | WB | VP2-3 | A6802 |
| 65 | QTYAVIAGA | 0.710 | 23 | SB | VP2-3 | A6901 |
| 198 | ETTWTIVNA | 0.703 | 24 | SB | VP2-3 | A6901 |
| 52 | TTSEAIAAI | 0.684 | 30 | SB | VP2-3 | A6901 |
| 159 | TISQALWHV | 0.622 | 59 | WB | VP2-3 | A6901 |
| 292 | WMLPLLLGL | 0.604 | 72 | WB | VP2-3 | A6901 |
| 17 | AAAATGFSV | 0.601 | 74 | WB | VP2-3 | A6901 |
| 27 | EIAAGEAAA | 0.579 | 94 | WB | VP2-3 | A6901 |
| 195 | FLEETTWTI | 0.570 | 104 | WB | VP2-3 | A6901 |
| 288 | TAPQWMLPL | 0.545 | 137 | WB | VP2-3 | A6901 |
| 6 | LLGDLVASV | 0.506 | 209 | WB | VP2-3 | A6901 |
| 296 | LLLGLYGTV | 0.472 | 301 | WB | VP2-3 | A6901 |
| 100 | FFSDWDHKV | 0.429 | 484 | WB | VP2-3 | A6901 |
| 225 | RPSMVRQVA | 0.705 | 24 | SB | VP2-3 | B0702 |
| 172 | IPAITSQEL | 0.628 | 55 | WB | VP2-3 | B0702 |
| 148 | DPRHWGPSL | 0.610 | 67 | WB | VP2-3 | B0702 |
| 289 | APQWMLPLL | 0.598 | 77 | WB | VP2-3 | B0702 |
| 314 | GPNQKKRRV | 0.530 | 162 | WB | VP2-3 | B0702 |
| 206 | APINFYNYI | 0.475 | 294 | WB | VP2-3 | B0702 |
| 132 | ILFPGVNTF | 0.606 | 70 | WB | VP2-3 | B1501 |
| 203 | IVNAPINFY | 0.578 | 96 | WB | VP2-3 | B1501 |
| 180 | LQRRTERFF | 0.558 | 118 | WB | VP2-3 | B1501 |
| 115 | QQSGMALEL | 0.503 | 216 | WB | VP2-3 | B1501 |
| 39 | VQIASLATV | 0.477 | 287 | WB | VP2-3 | B1501 |
| 122 | ELFNPDEYY | 0.439 | 432 | WB | VP2-3 | B1501 |
| 92 | SLAQVGYRF | 0.428 | 489 | WB | VP2-3 | B1501 |
| 184 | TERFFRDSL | 0.622 | 59 | WB | VP2-3 | B1801 |
| 292 | WMLPLLLGL | 0.590 | 84 | WB | VP2-3 | B1801 |
| 148 | DPRHWGPSL | 0.584 | 90 | WB | VP2-3 | B1801 |
| 54 | SEAIAAIGL | 0.546 | 135 | WB | VP2-3 | B1801 |
| 255 | EEVTQRMDL | 0.451 | 380 | WB | VP2-3 | B1801 |
| 15 | SEAAAATGF | 0.435 | 449 | WB | VP2-3 | B1801 |
| 320 | RRVSRGSSQ | 0.507 | 206 | WB | VP2-3 | B2705 |
| 303 | TVTPALEAY | 0.686 | 29 | SB | VP2-3 | B3501 |
| 172 | IPAITSQEL | 0.611 | 67 | WB | VP2-3 | B3501 |
| 125 | NPDEYYDIL | 0.606 | 71 | WB | VP2-3 | B3501 |
| 238 | THVNFGHTY | 0.550 | 130 | WB | VP2-3 | B3501 |
| 156 | LFATISQAL | 0.521 | 178 | WB | VP2-3 | B3501 |
| 67 | YAVIAGAPG | 0.510 | 199 | WB | VP2-3 | B3501 |
| 288 | TAPQWMLPL | 0.508 | 204 | WB | VP2-3 | B3501 |
| 289 | APQWMLPLL | 0.499 | 225 | WB | VP2-3 | B3501 |
| 132 | ILFPGVNTF | 0.484 | 265 | WB | VP2-3 | B3501 |
| 80 | FAALIQTVT | 0.470 | 310 | WB | VP2-3 | B3501 |
| 63 | TPQTYAVIA | 0.453 | 372 | WB | VP2-3 | B3501 |
| 28 | IAAGEAAAA | 0.446 | 400 | WB | VP2-3 | B3501 |
| 134 | FPGVNTFVN | 0.445 | 405 | WB | VP2-3 | B3501 |
| 205 | NAPINFYNY | 0.437 | 442 | WB | VP2-3 | B3501 |
| 13 | SVSEAAAAT | 0.433 | 461 | WB | VP2-3 | B3501 |
| 75 | GAIAGFAAL | 0.429 | 483 | WB | VP2-3 | B3501 |
| 54 | SEAIAAIGL | 0.703 | 24 | SB | VP2-3 | B4001 |
| 31 | GEAAAAIEV | 0.632 | 53 | WB | VP2-3 | B4001 |
| 255 | EEVTQRMDL | 0.542 | 141 | WB | VP2-3 | B4001 |
| 15 | SEAAAATGF | 0.509 | 202 | WB | VP2-3 | B4001 |
| 184 | TERFFRDSL | 0.467 | 319 | WB | VP2-3 | B4001 |
| 266 | KESVHSGEF | 0.574 | 99 | WB | VP2-3 | B4002 |
| 255 | EEVTQRMDL | 0.532 | 158 | WB | VP2-3 | B4002 |
| 272 | GEFIEKTIA | 0.496 | 232 | WB | VP2-3 | B4002 |
| 15 | SEAAAATGF | 0.495 | 235 | WB | VP2-3 | B4002 |
| 54 | SEAIAAIGL | 0.445 | 405 | WB | VP2-3 | B4002 |
| 54 | SEAIAAIGL | 0.492 | 243 | WB | VP2-3 | B4403 |
| 15 | SEAAAATGF | 0.476 | 288 | WB | VP2-3 | B4403 |
| 26 | AEIAAGEAA | 0.466 | 322 | WB | VP2-3 | B4403 |
| 26 | AEIAAGEAA | 0.639 | 49 | SB | VP2-3 | B4501 |
| 255 | EEVTQRMDL | 0.521 | 178 | WB | VP2-3 | B4501 |
| 31 | GEAAAAIEV | 0.456 | 361 | WB | VP2-3 | B4501 |
| 197 | EETTWTIVN | 0.432 | 464 | WB | VP2-3 | B4501 |
| 206 | APINFYNYI | 0.497 | 230 | WB | VP2-3 | B5101 |
| 294 | LPLLLGLYG | 0.451 | 381 | WB | VP2-3 | B5101 |
| 206 | APINFYNYI | 0.608 | 69 | WB | VP2-3 | B5301 |
| 289 | APQWMLPLL | 0.545 | 136 | WB | VP2-3 | B5301 |
| 157 | FATISQALW | 0.522 | 176 | WB | VP2-3 | B5301 |
| 206 | APINFYNYI | 0.614 | 64 | WB | VP2-3 | B5401 |
| 73 | APGAIAGFA | 0.573 | 100 | WB | VP2-3 | B5401 |
| 119 | MALELFNPD | 0.511 | 199 | WB | VP2-3 | B5401 |
| 134 | FPGVNTFVN | 0.502 | 218 | WB | VP2-3 | B5401 |
| 294 | LPLLLGLYG | 0.488 | 254 | WB | VP2-3 | B5401 |
| 63 | TPQTYAVIA | 0.478 | 282 | WB | VP2-3 | B5401 |
| 80 | FAALIQTVT | 0.464 | 329 | WB | VP2-3 | B5401 |
| 157 | FATISQALW | 0.723 | 19 | SB | VP2-3 | B5801 |
| 90 | ISSLAQVGY | 0.546 | 136 | WB | VP2-3 | B5801 |
| 96 | VGYRFFSDW | 0.481 | 274 | WB | VP2-3 | B5801 |

10-mers

| | | | | | | |
|---|---|---|---|---|---|---|
| 237 | GTHVNFGHTY | 0.517 | 185 | WB | VP2-3 | A0101 |
| 5 | ALLGDLVASV | 0.820 | 6 | SB | VP2-3 | A0201 |
| 132 | ILFPGVNTFV | 0.785 | 10 | SB | VP2-3 | A0201 |
| 299 | GLYGTVTPAL | 0.721 | 20 | SB | VP2-3 | A0201 |
| 195 | FLEETTWTIV | 0.703 | 24 | SB | VP2-3 | A0201 |
| 155 | SLFATISQAL | 0.632 | 53 | WB | VP2-3 | A0201 |
| 114 | YQQSGMALEL | 0.529 | 162 | WB | VP2-3 | A0201 |
| 158 | ATISQALWHV | 0.476 | 288 | WB | VP2-3 | A0201 |
| 199 | TTWTIVNAPI | 0.473 | 298 | WB | VP2-3 | A0201 |
| 61 | GLTPQTYAVI | 0.471 | 305 | WB | VP2-3 | A0201 |
| 112 | GLYQQSGMAL | 0.455 | 364 | WB | VP2-3 | A0201 |
| 260 | RMDLRNKESV | 0.442 | 418 | WB | VP2-3 | A0201 |
| 220 | NLSPIRPSMV | 0.436 | 445 | WB | VP2-3 | A0201 |
| 163 | ALWHVIRDDI | 0.430 | 476 | WB | VP2-3 | A0201 |
| 132 | ILFPGVNTFV | 0.798 | 8 | SB | VP2-3 | A0202 |
| 5 | ALLGDLVASV | 0.785 | 10 | SB | VP2-3 | A0202 |
| 155 | SLFATISQAL | 0.742 | 16 | SB | VP2-3 | A0202 |
| 299 | GLYGTVTPAL | 0.680 | 32 | SB | VP2-3 | A0202 |
| 112 | GLYQQSGMAL | 0.654 | 42 | SB | VP2-3 | A0202 |
| 195 | FLEETTWTIV | 0.589 | 85 | WB | VP2-3 | A0202 |
| 3 | ALALLGDLVA | 0.583 | 91 | WB | VP2-3 | A0202 |
| 191 | SLARFLEETT | 0.557 | 120 | WB | VP2-3 | A0202 |
| 114 | YQQSGMALEL | 0.554 | 124 | WB | VP2-3 | A0202 |
| 296 | LLLGLYGTVT | 0.537 | 149 | WB | VP2-3 | A0202 |
| 138 | NTFVNNIQYL | 0.525 | 170 | WB | VP2-3 | A0202 |
| 220 | NLSPIRPSMV | 0.519 | 182 | WB | VP2-3 | A0202 |
| 158 | ATISQALWHV | 0.501 | 222 | WB | VP2-3 | A0202 |
| 10 | LVASVSEAAA | 0.479 | 280 | WB | VP2-3 | A0202 |
| 61 | GLTPQTYAVI | 0.466 | 322 | WB | VP2-3 | A0202 |
| 124 | FNPDEYYDIL | 0.461 | 342 | WB | VP2-3 | A0202 |
| 295 | PLLLGLYGTV | 0.450 | 382 | WB | VP2-3 | A0202 |
| 260 | RMDLRNKESV | 0.447 | 397 | WB | VP2-3 | A0202 |
| 293 | MLPLLLGLYG | 0.427 | 492 | WB | VP2-3 | A0202 |
| 2 | AALALLGDLV | 0.426 | 498 | WB | VP2-3 | A0202 |
| 132 | ILFPGVNTFV | 0.888 | 3 | SB | VP2-3 | A0203 |
| 5 | ALLGDLVASV | 0.868 | 4 | SB | VP2-3 | A0203 |
| 195 | FLEETTWTIV | 0.820 | 7 | SB | VP2-3 | A0203 |
| 299 | GLYGTVTPAL | 0.803 | 8 | SB | VP2-3 | A0203 |
| 220 | NLSPIRPSMV | 0.788 | 9 | SB | VP2-3 | A0203 |
| 112 | GLYQQSGMAL | 0.756 | 14 | SB | VP2-3 | A0203 |
| 61 | GLTPQTYAVI | 0.703 | 24 | SB | VP2-3 | A0203 |
| 155 | SLFATISQAL | 0.700 | 25 | SB | VP2-3 | A0203 |
| 239 | HVNFGHTYSI | 0.663 | 38 | SB | VP2-3 | A0203 |
| 287 | RTAPQWMLPL | 0.629 | 55 | WB | VP2-3 | A0203 |
| 260 | RMDLRNKESV | 0.533 | 156 | WB | VP2-3 | A0203 |
| 191 | SLARFLEETT | 0.530 | 161 | WB | VP2-3 | A0203 |
| 68 | AVIAGAPGAI | 0.529 | 163 | WB | VP2-3 | A0203 |
| 158 | ATISQALWHV | 0.516 | 187 | WB | VP2-3 | A0203 |
| 24 | SVAEIAAGEA | 0.513 | 193 | WB | VP2-3 | A0203 |
| 114 | YQQSGMALEL | 0.513 | 194 | WB | VP2-3 | A0203 |
| 35 | AAIEVQIASL | 0.509 | 203 | WB | VP2-3 | A0203 |
| 295 | PLLLGLYGTV | 0.503 | 217 | WB | VP2-3 | A0203 |
| 69 | VIAGAPGAIA | 0.490 | 248 | WB | VP2-3 | A0203 |
| 3 | ALALLGDLVA | 0.472 | 303 | WB | VP2-3 | A0203 |
| 10 | LVASVSEAAA | 0.471 | 304 | WB | VP2-3 | A0203 |
| 75 | GAIAGFAALI | 0.453 | 373 | WB | VP2-3 | A0203 |
| 85 | QTVTGISSLA | 0.440 | 425 | WB | VP2-3 | A0203 |
| 43 | SLATVEGITT | 0.431 | 473 | WB | VP2-3 | A0203 |
| 132 | ILFPGVNTFV | 0.738 | 17 | SB | VP2-3 | A0204 |
| 195 | FLEETTWTIV | 0.686 | 30 | SB | VP2-3 | A0204 |
| 5 | ALLGDLVASV | 0.678 | 32 | SB | VP2-3 | A0204 |
| 155 | SLFATISQAL | 0.630 | 54 | WB | VP2-3 | A0204 |
| 158 | ATISQALWHV | 0.567 | 108 | WB | VP2-3 | A0204 |
| 299 | GLYGTVTPAL | 0.485 | 263 | WB | VP2-3 | A0204 |
| 112 | GLYQQSGMAL | 0.468 | 317 | WB | VP2-3 | A0204 |
| 287 | RTAPQWMLPL | 0.457 | 356 | WB | VP2-3 | A0204 |
| 5 | ALLGDLVASV | 0.873 | 3 | SB | VP2-3 | A0206 |
| 195 | FLEETTWTIV | 0.869 | 4 | SB | VP2-3 | A0206 |
| 132 | ILFPGVNTFV | 0.865 | 4 | SB | VP2-3 | A0206 |
| 114 | YQQSGMALEL | 0.803 | 8 | SB | VP2-3 | A0206 |
| 158 | ATISQALWHV | 0.779 | 10 | SB | VP2-3 | A0206 |
| 35 | AAIEVQIASL | 0.711 | 22 | SB | VP2-3 | A0206 |
| 75 | GAIAGFAALI | 0.649 | 44 | SB | VP2-3 | A0206 |
| 287 | RTAPQWMLPL | 0.626 | 57 | WB | VP2-3 | A0206 |
| 299 | GLYGTVTPAL | 0.599 | 76 | WB | VP2-3 | A0206 |
| 68 | AVIAGAPGAI | 0.591 | 83 | WB | VP2-3 | A0206 |
| 67 | YAVIAGAPGA | 0.588 | 86 | WB | VP2-3 | A0206 |
| 84 | IQTVTGISSL | 0.569 | 105 | WB | VP2-3 | A0206 |
| 2 | AALALLGDLV | 0.550 | 129 | WB | VP2-3 | A0206 |
| 94 | AQVGYRFFSD | 0.537 | 150 | WB | VP2-3 | A0206 |
| 146 | YLDPRHWGPS | 0.525 | 169 | WB | VP2-3 | A0206 |
| 260 | RMDLRNKESV | 0.525 | 170 | WB | VP2-3 | A0206 |
| 166 | HVIRDDIPAI | 0.513 | 193 | WB | VP2-3 | A0206 |
| 288 | TAPQWMLPLL | 0.507 | 208 | WB | VP2-3 | A0206 |
| 155 | SLFATISQAL | 0.500 | 223 | WB | VP2-3 | A0206 |
| 39 | VQIASLATVE | 0.488 | 254 | WB | VP2-3 | A0206 |
| 24 | SVAEIAAGEA | 0.488 | 255 | WB | VP2-3 | A0206 |
| 194 | RFLEETTWTI | 0.480 | 276 | WB | VP2-3 | A0206 |
| 10 | LVASVSEAAA | 0.470 | 309 | WB | VP2-3 | A0206 |
| 112 | GLYQQSGMAL | 0.466 | 322 | WB | VP2-3 | A0206 |
| 220 | NLSPIRPSMV | 0.460 | 344 | WB | VP2-3 | A0206 |
| 159 | TISQALWHVI | 0.458 | 353 | WB | VP2-3 | A0206 |
| 17 | AAAATGFSVA | 0.457 | 354 | WB | VP2-3 | A0206 |
| 45 | ATVEGITTTS | 0.454 | 365 | WB | VP2-3 | A0206 |
| 231 | QVAEREGTHV | 0.453 | 371 | WB | VP2-3 | A0206 |
| 78 | AGFAALIQTV | 0.448 | 394 | WB | VP2-3 | A0206 |
| 115 | QQSGMALELF | 0.438 | 437 | WB | VP2-3 | A0206 |
| 81 | AALIQTVTGI | 0.433 | 460 | WB | VP2-3 | A0206 |
| 61 | GLTPQTYAVI | 0.432 | 466 | WB | VP2-3 | A0206 |
| 132 | ILFPGVNTFV | 0.975 | 1 | SB | VP2-3 | A0211 |
| 5 | ALLGDLVASV | 0.972 | 1 | SB | VP2-3 | A0211 |
| 155 | SLFATISQAL | 0.940 | 1 | SB | VP2-3 | A0211 |
| 299 | GLYGTVTPAL | 0.939 | 1 | SB | VP2-3 | A0211 |
| 195 | FLEETTWTIV | 0.931 | 2 | SB | VP2-3 | A0211 |
| 260 | RMDLRNKESV | 0.912 | 2 | SB | VP2-3 | A0211 |
| 220 | NLSPIRPSMV | 0.891 | 3 | SB | VP2-3 | A0211 |
| 295 | PLLLGLYGTV | 0.885 | 3 | SB | VP2-3 | A0211 |
| 112 | GLYQQSGMAL | 0.864 | 4 | SB | VP2-3 | A0211 |
| 61 | GLTPQTYAVI | 0.850 | 5 | SB | VP2-3 | A0211 |
| 146 | YLDPRHWGPS | 0.740 | 16 | SB | VP2-3 | A0211 |
| 191 | SLARFLEETT | 0.737 | 17 | SB | VP2-3 | A0211 |
| 128 | EYYDILFPGV | 0.731 | 18 | SB | VP2-3 | A0211 |
| 159 | TISQALWHVI | 0.674 | 34 | SB | VP2-3 | A0211 |
| 102 | SDWDHKVSTV | 0.641 | 48 | SB | VP2-3 | A0211 |
| 292 | WMLPLLLGLY | 0.638 | 50 | WB | VP2-3 | A0211 |
| 163 | ALWHVIRDDI | 0.620 | 60 | WB | VP2-3 | A0211 |
| 3 | ALALLGDLVA | 0.616 | 63 | WB | VP2-3 | A0211 |
| 92 | SLAQVGYRFF | 0.615 | 64 | WB | VP2-3 | A0211 |
| 158 | ATISQALWHV | 0.598 | 77 | WB | VP2-3 | A0211 |
| 99 | RFFSDWDHKV | 0.596 | 79 | WB | VP2-3 | A0211 |
| 287 | RTAPQWMLPL | 0.585 | 89 | WB | VP2-3 | A0211 |
| 78 | AGFAALIQTV | 0.570 | 105 | WB | VP2-3 | A0211 |
| 43 | SLATVEGITT | 0.568 | 107 | WB | VP2-3 | A0211 |
| 223 | PIRPSMVRQV | 0.566 | 109 | WB | VP2-3 | A0211 |
| 296 | LLLGLYGTVT | 0.548 | 133 | WB | VP2-3 | A0211 |
| 38 | EVQIASLATV | 0.532 | 158 | WB | VP2-3 | A0211 |
| 114 | YQQSGMALEL | 0.530 | 162 | WB | VP2-3 | A0211 |
| 194 | RFLEETTWTI | 0.518 | 184 | WB | VP2-3 | A0211 |
| 239 | HVNFGHTYSI | 0.510 | 199 | WB | VP2-3 | A0211 |
| 24 | SVAEIAAGEA | 0.497 | 230 | WB | VP2-3 | A0211 |
| 171 | DIPAITSQEL | 0.484 | 265 | WB | VP2-3 | A0211 |
| 231 | QVAEREGTHV | 0.484 | 265 | WB | VP2-3 | A0211 |
| 288 | TAPQWMLPLL | 0.470 | 310 | WB | VP2-3 | A0211 |
| 16 | EAAAATGFSV | 0.464 | 330 | WB | VP2-3 | A0211 |
| 87 | VTGISSLAQV | 0.454 | 366 | WB | VP2-3 | A0211 |
| 6 | LLGDLVASVS | 0.453 | 372 | WB | VP2-3 | A0211 |
| 35 | AAIEVQIASL | 0.437 | 439 | WB | VP2-3 | A0211 |
| 132 | ILFPGVNTFV | 0.943 | 1 | SB | VP2-3 | A0212 |
| 5 | ALLGDLVASV | 0.935 | 2 | SB | VP2-3 | A0212 |
| 195 | FLEETTWTIV | 0.906 | 2 | SB | VP2-3 | A0212 |
| 299 | GLYGTVTPAL | 0.904 | 2 | SB | VP2-3 | A0212 |
| 155 | SLFATISQAL | 0.880 | 3 | SB | VP2-3 | A0212 |
| 260 | RMDLRNKESV | 0.826 | 6 | SB | VP2-3 | A0212 |
| 220 | NLSPIRPSMV | 0.779 | 10 | SB | VP2-3 | A0212 |
| 112 | GLYQQSGMAL | 0.778 | 11 | SB | VP2-3 | A0212 |
| 295 | PLLLGLYGTV | 0.757 | 13 | SB | VP2-3 | A0212 |
| 191 | SLARFLEETT | 0.661 | 39 | SB | VP2-3 | A0212 |
| 61 | GLTPQTYAVI | 0.654 | 42 | SB | VP2-3 | A0212 |
| 163 | ALWHVIRDDI | 0.638 | 50 | WB | VP2-3 | A0212 |
| 128 | EYYDILFPGV | 0.616 | 63 | WB | VP2-3 | A0212 |
| 146 | YLDPRHWGPS | 0.615 | 64 | WB | VP2-3 | A0212 |
| 114 | YQQSGMALEL | 0.540 | 145 | WB | VP2-3 | A0212 |
| 296 | LLLGLYGTVT | 0.537 | 149 | WB | VP2-3 | A0212 |
| 102 | SDWDHKVSTV | 0.537 | 150 | WB | VP2-3 | A0212 |
| 231 | QVAEREGTHV | 0.480 | 278 | WB | VP2-3 | A0212 |
| 292 | WMLPLLLGLY | 0.456 | 358 | WB | VP2-3 | A0212 |
| 158 | ATISQALWHV | 0.442 | 419 | WB | VP2-3 | A0212 |
| 99 | RFFSDWDHKV | 0.441 | 423 | WB | VP2-3 | A0212 |
| 213 | YIQDYYSNLS | 0.431 | 472 | WB | VP2-3 | A0212 |
| 132 | ILFPGVNTFV | 0.955 | 1 | SB | VP2-3 | A0216 |
| 5 | ALLGDLVASV | 0.929 | 2 | SB | VP2-3 | A0216 |
| 299 | GLYGTVTPAL | 0.896 | 3 | SB | VP2-3 | A0216 |
| 195 | FLEETTWTIV | 0.888 | 3 | SB | VP2-3 | A0216 |
| 220 | NLSPIRPSMV | 0.866 | 4 | SB | VP2-3 | A0216 |
| 155 | SLFATISQAL | 0.857 | 4 | SB | VP2-3 | A0216 |
| 295 | PLLLGLYGTV | 0.819 | 7 | SB | VP2-3 | A0216 |
| 260 | RMDLRNKESV | 0.787 | 9 | SB | VP2-3 | A0216 |
| 112 | GLYQQSGMAL | 0.782 | 10 | SB | VP2-3 | A0216 |
| 61 | GLTPQTYAVI | 0.651 | 43 | SB | VP2-3 | A0216 |
| 191 | SLARFLEETT | 0.648 | 45 | SB | VP2-3 | A0216 |
| 158 | ATISQALWHV | 0.620 | 60 | WB | VP2-3 | A0216 |
| 102 | SDWDHKVSTV | 0.575 | 99 | WB | VP2-3 | A0216 |
| 163 | ALWHVIRDDI | 0.562 | 114 | WB | VP2-3 | A0216 |
| 231 | QVAEREGTHV | 0.553 | 125 | WB | VP2-3 | A0216 |
| 128 | EYYDILFPGV | 0.552 | 126 | WB | VP2-3 | A0216 |
| 38 | EVQIASLATV | 0.550 | 130 | WB | VP2-3 | A0216 |
| 223 | PIRPSMVRQV | 0.520 | 179 | WB | VP2-3 | A0216 |
| 43 | SLATVEGITT | 0.498 | 229 | WB | VP2-3 | A0216 |
| 99 | RFFSDWDHKV | 0.498 | 229 | WB | VP2-3 | A0216 |
| 171 | DIPAITSQEL | 0.485 | 262 | WB | VP2-3 | A0216 |
| 87 | VTGISSLAQV | 0.455 | 363 | WB | VP2-3 | A0216 |
| 16 | EAAAATGFSV | 0.451 | 379 | WB | VP2-3 | A0216 |
| 114 | YQQSGMALEL | 0.446 | 401 | WB | VP2-3 | A0216 |
| 78 | AGFAALIQTV | 0.438 | 434 | WB | VP2-3 | A0216 |
| 3 | ALALLGDLVA | 0.434 | 456 | WB | VP2-3 | A0216 |
| 59 | AIGLTPQTYA | 0.433 | 460 | WB | VP2-3 | A0216 |
| 296 | LLLGLYGTVT | 0.427 | 492 | WB | VP2-3 | A0216 |
| 5 | ALLGDLVASV | 0.918 | 2 | SB | VP2-3 | A0219 |
| 195 | FLEETTWTIV | 0.849 | 5 | SB | VP2-3 | A0219 |
| 299 | GLYGTVTPAL | 0.826 | 6 | SB | VP2-3 | A0219 |
| 220 | NLSPIRPSMV | 0.768 | 12 | SB | VP2-3 | A0219 |
| 155 | SLFATISQAL | 0.750 | 14 | SB | VP2-3 | A0219 |
| 260 | RMDLRNKESV | 0.698 | 26 | SB | VP2-3 | A0219 |
| 295 | PLLLGLYGTV | 0.664 | 37 | SB | VP2-3 | A0219 |
| 61 | GLTPQTYAVI | 0.545 | 137 | WB | VP2-3 | A0219 |
| 114 | YQQSGMALEL | 0.523 | 175 | WB | VP2-3 | A0219 |
| 128 | EYYDILFPGV | 0.521 | 177 | WB | VP2-3 | A0219 |
| 159 | TISQALWHVI | 0.498 | 228 | WB | VP2-3 | A0219 |
| 16 | EAAAATGFSV | 0.480 | 277 | WB | VP2-3 | A0219 |
| 112 | GLYQQSGMAL | 0.441 | 424 | WB | VP2-3 | A0219 |
| 158 | ATISQALWHV | 0.439 | 430 | WB | VP2-3 | A0219 |
| 268 | SVHSGEFIEK | 0.544 | 139 | WB | VP2-3 | A0301 |
| 329 | KAKGTRASAK | 0.506 | 208 | WB | VP2-3 | A0301 |
| 320 | RRVSRGSSQK | 0.471 | 306 | WB | VP2-3 | A0301 |
| 202 | TIVNAPINFY | 0.464 | 331 | WB | VP2-3 | A0301 |
| 292 | WMLPLLLGLY | 0.456 | 358 | WB | VP2-3 | A0301 |
| 268 | SVHSGEFIEK | 0.783 | 10 | SB | VP2-3 | A1101 |
| 257 | VTQRMDLRNK | 0.698 | 26 | SB | VP2-3 | A1101 |
| 160 | ISQALWHVIR | 0.561 | 115 | WB | VP2-3 | A1101 |
| 329 | KAKGTRASAK | 0.536 | 152 | WB | VP2-3 | A1101 |
| 202 | TIVNAPINFY | 0.497 | 230 | WB | VP2-3 | A1101 |
| 90 | ISSLAQVGYR | 0.464 | 329 | WB | VP2-3 | A1101 |
| 212 | NYIQDYYSNL | 0.652 | 43 | SB | VP2-3 | A2301 |
| 186 | RFFRDSLARF | 0.651 | 43 | SB | VP2-3 | A2301 |
| 194 | RFLEETTWTI | 0.548 | 132 | WB | VP2-3 | A2301 |
| 201 | WTIVNAPINF | 0.547 | 135 | WB | VP2-3 | A2301 |
| 310 | AYEDGPNQKK | 0.490 | 250 | WB | VP2-3 | A2301 |
| 245 | TYSIDNADSI | 0.489 | 252 | WB | VP2-3 | A2301 |
| 91 | SSLAQVGYRF | 0.461 | 340 | WB | VP2-3 | A2301 |
| 179 | ELQRRTERFF | 0.429 | 482 | WB | VP2-3 | A2301 |
| 212 | NYIQDYYSNL | 0.650 | 44 | SB | VP2-3 | A2402 |
| 194 | RFLEETTWTI | 0.609 | 69 | WB | VP2-3 | A2402 |
| 151 | HWGPSLFATI | 0.540 | 145 | WB | VP2-3 | A2402 |
| 245 | TYSIDNADSI | 0.529 | 162 | WB | VP2-3 | A2402 |
| 186 | RFFRDSLARF | 0.484 | 266 | WB | VP2-3 | A2402 |
| 156 | LFATISQALW | 0.476 | 290 | WB | VP2-3 | A2402 |
| 194 | RFLEETTWTI | 0.667 | 36 | SB | VP2-3 | A2403 |
| 186 | RFFRDSLARF | 0.659 | 39 | SB | VP2-3 | A2403 |
| 212 | NYIQDYYSNL | 0.619 | 62 | WB | VP2-3 | A2403 |
| 245 | TYSIDNADSI | 0.461 | 341 | WB | VP2-3 | A2403 |
| 291 | QWMLPLLLGL | 0.429 | 481 | WB | VP2-3 | A2403 |
| 202 | TIVNAPINFY | 0.620 | 60 | WB | VP2-3 | A2601 |
| 252 | DSIEEVTQRM | 0.617 | 63 | WB | VP2-3 | A2601 |
| 202 | TIVNAPINFY | 0.801 | 8 | SB | VP2-3 | A2602 |
| 302 | GTVTPALEAY | 0.771 | 11 | SB | VP2-3 | A2602 |
| 287 | RTAPQWMLPL | 0.760 | 13 | SB | VP2-3 | A2602 |
| 201 | WTIVNAPINF | 0.744 | 15 | SB | VP2-3 | A2602 |
| 179 | ELQRRTERFF | 0.735 | 17 | SB | VP2-3 | A2602 |
| 171 | DIPAITSQEL | 0.532 | 158 | WB | VP2-3 | A2602 |
| 166 | HVIRDDIPAI | 0.531 | 159 | WB | VP2-3 | A2602 |
| 131 | DILFPGVNTF | 0.488 | 253 | WB | VP2-3 | A2602 |
| 38 | EVQIASLATV | 0.471 | 304 | WB | VP2-3 | A2602 |
| 209 | NFYNYIQDYY | 0.572 | 102 | WB | VP2-3 | A2902 |
| 204 | VNAPINFYNY | 0.549 | 131 | WB | VP2-3 | A2902 |
| 292 | WMLPLLLGLY | 0.547 | 134 | WB | VP2-3 | A2902 |
| 329 | KAKGTRASAK | 0.783 | 10 | SB | VP2-3 | A3001 |
| 322 | VSRGSSQKAK | 0.757 | 13 | SB | VP2-3 | A3001 |
| 268 | SVHSGEFIEK | 0.678 | 32 | SB | VP2-3 | A3001 |
| 180 | LQRRTERFFR | 0.485 | 263 | WB | VP2-3 | A3001 |
| 237 | GTHVNFGHTY | 0.479 | 281 | WB | VP2-3 | A3001 |
| 89 | GISSLAQVGY | 0.518 | 184 | WB | VP2-3 | A3002 |
| 292 | WMLPLLLGLY | 0.511 | 198 | WB | VP2-3 | A3002 |
| 209 | NFYNYIQDYY | 0.475 | 292 | WB | VP2-3 | A3002 |
| 202 | TIVNAPINFY | 0.437 | 443 | WB | VP2-3 | A3002 |
| 180 | LQRRTERFFR | 0.756 | 14 | SB | VP2-3 | A3101 |
| 334 | RASAKTTNKR | 0.645 | 46 | SB | VP2-3 | A3101 |
| 337 | AKTTNKRRSR | 0.606 | 71 | WB | VP2-3 | A3101 |
| 160 | ISQALWHVIR | 0.591 | 83 | WB | VP2-3 | A3101 |
| 174 | AITSQELQRR | 0.577 | 97 | WB | VP2-3 | A3101 |
| 177 | SQELQRRTER | 0.543 | 140 | WB | VP2-3 | A3101 |
| 329 | KAKGTRASAK | 0.520 | 180 | WB | VP2-3 | A3101 |
| 90 | ISSLAQVGYR | 0.491 | 246 | WB | VP2-3 | A3101 |
| 340 | TNKRRSRSSR | 0.489 | 252 | WB | VP2-3 | A3101 |
| 226 | PSMVRQVAER | 0.471 | 305 | WB | VP2-3 | A3101 |
| 335 | ASAKTTNKRR | 0.455 | 363 | WB | VP2-3 | A3101 |
| 315 | PNQKKRRVSR | 0.448 | 393 | WB | VP2-3 | A3101 |
| 216 | DYYSNLSPIR | 0.588 | 86 | WB | VP2-3 | A3301 |
| 180 | LQRRTERFFR | 0.560 | 116 | WB | VP2-3 | A3301 |
| 160 | ISQALWHVIR | 0.507 | 206 | WB | VP2-3 | A3301 |
| 278 | TIAPGGANQR | 0.743 | 16 | SB | VP2-3 | A6801 |
| 309 | EAYEDGPNQK | 0.741 | 16 | SB | VP2-3 | A6801 |
| 90 | ISSLAQVGYR | 0.713 | 22 | SB | VP2-3 | A6801 |
| 216 | DYYSNLSPIR | 0.707 | 23 | SB | VP2-3 | A6801 |
| 268 | SVHSGEFIEK | 0.645 | 46 | SB | VP2-3 | A6801 |
| 185 | ERFFRDSLAR | 0.541 | 142 | WB | VP2-3 | A6801 |
| 334 | RASAKTTNKR | 0.535 | 152 | WB | VP2-3 | A6801 |
| 202 | TIVNAPINFY | 0.532 | 158 | WB | VP2-3 | A6801 |
| 160 | ISQALWHVIR | 0.498 | 228 | WB | VP2-3 | A6801 |
| 255 | EEVTQRMDLR | 0.495 | 237 | WB | VP2-3 | A6801 |
| 209 | NFYNYIQDYY | 0.464 | 329 | WB | VP2-3 | A6801 |
| 221 | LSPIRPSMVR | 0.439 | 434 | WB | VP2-3 | A6801 |
| 16 | EAAAATGFSV | 0.886 | 3 | SB | VP2-3 | A6802 |
| 199 | TTWTIVNAPI | 0.877 | 3 | SB | VP2-3 | A6802 |
| 32 | EAAAAIEVQI | 0.797 | 8 | SB | VP2-3 | A6802 |
| 138 | NTFVNNIQYL | 0.763 | 12 | SB | VP2-3 | A6802 |
| 239 | HVNFGHTYSI | 0.707 | 23 | SB | VP2-3 | A6802 |
| 287 | RTAPQWMLPL | 0.692 | 28 | SB | VP2-3 | A6802 |
| 24 | SVAEIAAGEA | 0.669 | 36 | SB | VP2-3 | A6802 |
| 51 | TTTSEAIAAI | 0.664 | 38 | SB | VP2-3 | A6802 |
| 205 | NAPINFYNYI | 0.663 | 38 | SB | VP2-3 | A6802 |
| 27 | EIAAGEAAAA | 0.642 | 47 | SB | VP2-3 | A6802 |
| 48 | EGITTTSEAI | 0.641 | 48 | SB | VP2-3 | A6802 |
| 85 | QTVTGISSLA | 0.637 | 50 | WB | VP2-3 | A6802 |
| 38 | EVQIASLATV | 0.608 | 69 | WB | VP2-3 | A6802 |
| 171 | DIPAITSQEL | 0.587 | 86 | WB | VP2-3 | A6802 |
| 10 | LVASVSEAAA | 0.570 | 105 | WB | VP2-3 | A6802 |
| 128 | EYYDILFPGV | 0.563 | 113 | WB | VP2-3 | A6802 |
| 220 | NLSPIRPSMV | 0.549 | 130 | WB | VP2-3 | A6802 |
| 132 | ILFPGVNTFV | 0.545 | 138 | WB | VP2-3 | A6802 |
| 166 | HVIRDDIPAI | 0.535 | 152 | WB | VP2-3 | A6802 |
| 155 | SLFATISQAL | 0.516 | 188 | WB | VP2-3 | A6802 |
| 159 | TISQALWHVI | 0.500 | 223 | WB | VP2-3 | A6802 |
| 28 | IAAGEAAAAI | 0.487 | 257 | WB | VP2-3 | A6802 |
| 231 | QVAEREGTHV | 0.474 | 296 | WB | VP2-3 | A6802 |
| 158 | ATISQALWHV | 0.457 | 357 | WB | VP2-3 | A6802 |
| 41 | IASLATVEGI | 0.435 | 450 | WB | VP2-3 | A6802 |
| 16 | EAAAATGFSV | 0.809 | 7 | SB | VP2-3 | A6901 |
| 199 | TTWTIVNAPI | 0.775 | 11 | SB | VP2-3 | A6901 |
| 128 | EYYDILFPGV | 0.674 | 34 | SB | VP2-3 | A6901 |
| 38 | EVQIASLATV | 0.655 | 41 | SB | VP2-3 | A6901 |
| 138 | NTFVNNIQYL | 0.647 | 45 | SB | VP2-3 | A6901 |
| 158 | ATISQALWHV | 0.607 | 69 | WB | VP2-3 | A6901 |
| 32 | EAAAAIEVQI | 0.603 | 73 | WB | VP2-3 | A6901 |
| 27 | EIAAGEAAAA | 0.569 | 105 | WB | VP2-3 | A6901 |
| 239 | HVNFGHTYSI | 0.516 | 187 | WB | VP2-3 | A6901 |
| 287 | RTAPQWMLPL | 0.511 | 198 | WB | VP2-3 | A6901 |
| 166 | HVIRDDIPAI | 0.505 | 210 | WB | VP2-3 | A6901 |
| 132 | ILFPGVNTFV | 0.497 | 229 | WB | VP2-3 | A6901 |
| 231 | QVAEREGTHV | 0.482 | 271 | WB | VP2-3 | A6901 |
| 5 | ALLGDLVASV | 0.460 | 346 | WB | VP2-3 | A6901 |
| 51 | TTTSEAIAAI | 0.451 | 381 | WB | VP2-3 | A6901 |
| 87 | VTGISSLAQV | 0.440 | 426 | WB | VP2-3 | A6901 |
| 288 | TAPQWMLPLL | 0.437 | 441 | WB | VP2-3 | A6901 |
| 24 | SVAEIAAGEA | 0.434 | 456 | WB | VP2-3 | A6901 |
| 289 | APQWMLPLLL | 0.641 | 48 | SB | VP2-3 | B0702 |
| 225 | RPSMVRQVAE | 0.621 | 60 | WB | VP2-3 | B0702 |
| 148 | DPRHWGPSLF | 0.517 | 185 | WB | VP2-3 | B0702 |
| 73 | APGAIAGFAA | 0.513 | 194 | WB | VP2-3 | B0702 |
| 292 | WMLPLLLGLY | 0.543 | 140 | WB | VP2-3 | B1501 |
| 115 | QQSGMALELF | 0.542 | 141 | WB | VP2-3 | B1501 |
| 114 | YQQSGMALEL | 0.537 | 150 | WB | VP2-3 | B1501 |
| 84 | IQTVTGISSL | 0.522 | 176 | WB | VP2-3 | B1501 |
| 155 | SLFATISQAL | 0.494 | 238 | WB | VP2-3 | B1501 |
| 230 | RQVAEREGTH | 0.480 | 276 | WB | VP2-3 | B1501 |
| 92 | SLAQVGYRFF | 0.475 | 291 | WB | VP2-3 | B1501 |
| 58 | AAIGLTPQTY | 0.469 | 311 | WB | VP2-3 | B1501 |
| 237 | GTHVNFGHTY | 0.447 | 398 | WB | VP2-3 | B1501 |
| 299 | GLYGTVTPAL | 0.434 | 457 | WB | VP2-3 | B1501 |
| 201 | WTIVNAPINF | 0.426 | 497 | WB | VP2-3 | B1501 |
| 233 | AEREGTHVNF | 0.711 | 22 | SB | VP2-3 | B1801 |
| 121 | LELFNPDEYY | 0.515 | 189 | WB | VP2-3 | B1801 |
| 178 | QELQRRTERF | 0.507 | 207 | WB | VP2-3 | B1801 |
| 37 | IEVQIASLAT | 0.487 | 257 | WB | VP2-3 | B1801 |
| 148 | DPRHWGPSLF | 0.482 | 273 | WB | VP2-3 | B1801 |
| 292 | WMLPLLLGLY | 0.445 | 407 | WB | VP2-3 | B1801 |
| 320 | RRVSRGSSQK | 0.631 | 54 | WB | VP2-3 | B2705 |
| 98 | YRFFSDWDHK | 0.450 | 383 | WB | VP2-3 | B2705 |
| 125 | NPDEYYDILF | 0.757 | 13 | SB | VP2-3 | B3501 |
| 58 | AAIGLTPQTY | 0.566 | 109 | WB | VP2-3 | B3501 |
| 148 | DPRHWGPSLF | 0.544 | 138 | WB | VP2-3 | B3501 |
| 28 | IAAGEAAAAI | 0.514 | 192 | WB | VP2-3 | B3501 |
| 202 | TIVNAPINFY | 0.476 | 289 | WB | VP2-3 | B3501 |
| 67 | YAVIAGAPGA | 0.456 | 358 | WB | VP2-3 | B3501 |
| 292 | WMLPLLLGLY | 0.447 | 397 | WB | VP2-3 | B3501 |
| 209 | NFYNYIQDYY | 0.429 | 480 | WB | VP2-3 | B3501 |
| 114 | YQQSGMALEL | 0.466 | 323 | WB | VP2-3 | B3901 |
| 233 | AEREGTHVNF | 0.508 | 204 | WB | VP2-3 | B4001 |
| 254 | IEEVTQRMDL | 0.497 | 230 | WB | VP2-3 | B4001 |
| 266 | KESVHSGEFI | 0.457 | 355 | WB | VP2-3 | B4002 |
| 233 | AEREGTHVNF | 0.450 | 382 | WB | VP2-3 | B4002 |
| 26 | AEIAAGEAAA | 0.461 | 340 | WB | VP2-3 | B4403 |
| 26 | AEIAAGEAAA | 0.637 | 50 | WB | VP2-3 | B4501 |
| 197 | EETTWTIVNA | 0.481 | 273 | WB | VP2-3 | B4501 |
| 233 | AEREGTHVNF | 0.474 | 297 | WB | VP2-3 | B4501 |
| 294 | LPLLLGLYGT | 0.583 | 91 | WB | VP2-3 | B5101 |
| 289 | APQWMLPLLL | 0.580 | 94 | WB | VP2-3 | B5301 |
| 125 | NPDEYYDILF | 0.476 | 289 | WB | VP2-3 | B5301 |
| 294 | LPLLLGLYGT | 0.816 | 7 | SB | VP2-3 | B5401 |
| 73 | APGAIAGFAA | 0.666 | 36 | SB | VP2-3 | B5401 |
| 134 | FPGVNTFVNN | 0.529 | 163 | WB | VP2-3 | B5401 |
| 192 | LARFLEETTW | 0.441 | 422 | WB | VP2-3 | B5701 |
| 283 | GANQRTAPQW | 0.661 | 39 | SB | VP2-3 | B5801 |
| 192 | LARFLEETTW | 0.570 | 105 | WB | VP2-3 | B5801 |
| 201 | WTIVNAPINF | 0.543 | 139 | WB | VP2-3 | B5801 |
| 156 | LFATISQALW | 0.490 | 247 | WB | VP2-3 | B5801 |
| 287 | RTAPQWMLPL | 0.462 | 337 | WB | VP2-3 | B5801 |
| 91 | SSLAQVGYRF | 0.439 | 432 | WB | VP2-3 | B5801 |

11-mers

| | | | | | | |
|---|---|---|---|---|---|---|
| 201 | WTIVNAPINFY | 0.505 | 212 | WB | VP2-3 | A0101 |
| 146 | YLDPRHWGPSL | 0.844 | 5 | SB | VP2-3 | A0201 |
| 247 | SIDNADSIEEV | 0.608 | 69 | WB | VP2-3 | A0201 |
| 157 | FATISQALWHV | 0.499 | 226 | WB | VP2-3 | A0201 |
| 297 | LLGLYGTVTPA | 0.443 | 413 | WB | VP2-3 | A0201 |
| 61 | GLTPQTYAVIA | 0.440 | 428 | WB | VP2-3 | A0201 |
| 80 | FAALIQTVTGI | 0.740 | 16 | SB | VP2-3 | A0202 |
| 146 | YLDPRHWGPSL | 0.686 | 29 | SB | VP2-3 | A0202 |
| 297 | LLGLYGTVTPA | 0.612 | 66 | WB | VP2-3 | A0202 |
| 293 | MLPLLLGLYGT | 0.607 | 69 | WB | VP2-3 | A0202 |
| 61 | GLTPQTYAVIA | 0.598 | 77 | WB | VP2-3 | A0202 |
| 24 | SVAEIAAGEAA | 0.577 | 96 | WB | VP2-3 | A0202 |
| 157 | FATISQALWHV | 0.572 | 102 | WB | VP2-3 | A0202 |
| 52 | TTSEAIAAIGL | 0.559 | 117 | WB | VP2-3 | A0202 |
| 40 | QIASLATVEGI | 0.554 | 124 | WB | VP2-3 | A0202 |
| 287 | RTAPQWMLPLL | 0.542 | 142 | WB | VP2-3 | A0202 |
| 247 | SIDNADSIEEV | 0.539 | 146 | WB | VP2-3 | A0202 |
| 92 | SLAQVGYRFFS | 0.525 | 170 | WB | VP2-3 | A0202 |
| 10 | LVASVSEAAAA | 0.525 | 170 | WB | VP2-3 | A0202 |
| 59 | AIGLTPQTYAV | 0.518 | 183 | WB | VP2-3 | A0202 |
| 86 | TVTGISSLAQV | 0.493 | 241 | WB | VP2-3 | A0202 |
| 43 | SLATVEGITTT | 0.487 | 258 | WB | VP2-3 | A0202 |
| 3 | ALALLGDLVAS | 0.480 | 278 | WB | VP2-3 | A0202 |
| 34 | AAAIEVQIASL | 0.471 | 305 | WB | VP2-3 | A0202 |
| 83 | LIQTVTGISSL | 0.467 | 318 | WB | VP2-3 | A0202 |
| 1 | GAALALLGDLV | 0.467 | 320 | WB | VP2-3 | A0202 |
| 244 | HTYSIDNADSI | 0.466 | 324 | WB | VP2-3 | A0202 |
| 155 | SLFATISQALW | 0.458 | 350 | WB | VP2-3 | A0202 |
| 274 | FIEKTIAPGGA | 0.427 | 490 | WB | VP2-3 | A0202 |
| 140 | FVNNIQYLDPR | 0.427 | 492 | WB | VP2-3 | A0202 |
| 146 | YLDPRHWGPSL | 0.801 | 8 | SB | VP2-3 | A0203 |
| 297 | LLGLYGTVTPA | 0.759 | 13 | SB | VP2-3 | A0203 |
| 83 | LIQTVTGISSL | 0.719 | 20 | SB | VP2-3 | A0203 |
| 293 | MLPLLLGLYGT | 0.711 | 22 | SB | VP2-3 | A0203 |
| 80 | FAALIQTVTGI | 0.669 | 36 | SB | VP2-3 | A0203 |
| 43 | SLATVEGITTT | 0.657 | 40 | SB | VP2-3 | A0203 |
| 59 | AIGLTPQTYAV | 0.639 | 49 | SB | VP2-3 | A0203 |
| 61 | GLTPQTYAVIA | 0.610 | 67 | WB | VP2-3 | A0203 |
| 18 | AAATGFSVAEI | 0.562 | 114 | WB | VP2-3 | A0203 |
| 40 | QIASLATVEGI | 0.559 | 118 | WB | VP2-3 | A0203 |
| 86 | TVTGISSLAQV | 0.542 | 141 | WB | VP2-3 | A0203 |
| 287 | RTAPQWMLPLL | 0.526 | 168 | WB | VP2-3 | A0203 |
| 274 | FIEKTIAPGGA | 0.518 | 183 | WB | VP2-3 | A0203 |
| 10 | LVASVSEAAAA | 0.513 | 193 | WB | VP2-3 | A0203 |
| 4 | LALLGDLVASV | 0.490 | 248 | WB | VP2-3 | A0203 |
| 24 | SVAEIAAGEAA | 0.488 | 253 | WB | VP2-3 | A0203 |
| 34 | AAAIEVQIASL | 0.478 | 283 | WB | VP2-3 | A0203 |
| 327 | SQKAKGTRASA | 0.474 | 294 | WB | VP2-3 | A0203 |
| 247 | SIDNADSIEEV | 0.455 | 365 | WB | VP2-3 | A0203 |
| 157 | FATISQALWHV | 0.447 | 396 | WB | VP2-3 | A0203 |
| 101 | FSDWDHKVSTV | 0.447 | 398 | WB | VP2-3 | A0203 |
| 67 | YAVIAGAPGAI | 0.430 | 477 | WB | VP2-3 | A0203 |
| 146 | YLDPRHWGPSL | 0.615 | 64 | WB | VP2-3 | A0204 |
| 29 | AAGEAAAAIEV | 0.520 | 180 | WB | VP2-3 | A0204 |
| 59 | AIGLTPQTYAV | 0.517 | 185 | WB | VP2-3 | A0204 |
| 297 | LLGLYGTVTPA | 0.495 | 236 | WB | VP2-3 | A0204 |
| 247 | SIDNADSIEEV | 0.488 | 255 | WB | VP2-3 | A0204 |
| 43 | SLATVEGITTT | 0.466 | 322 | WB | VP2-3 | A0204 |
| 146 | YLDPRHWGPSL | 0.882 | 3 | SB | VP2-3 | A0206 |
| 214 | IQDYYSNLSPI | 0.767 | 12 | SB | VP2-3 | A0206 |
| 230 | RQVAEREGTHV | 0.764 | 12 | SB | VP2-3 | A0206 |
| 157 | FATISQALWHV | 0.747 | 15 | SB | VP2-3 | A0206 |
| 114 | YQQSGMALELF | 0.741 | 16 | SB | VP2-3 | A0206 |
| 247 | SIDNADSIEEV | 0.659 | 40 | SB | VP2-3 | A0206 |
| 29 | AAGEAAAAIEV | 0.632 | 53 | WB | VP2-3 | A0206 |
| 287 | RTAPQWMLPLL | 0.614 | 64 | WB | VP2-3 | A0206 |
| 80 | FAALIQTVTGI | 0.614 | 65 | WB | VP2-3 | A0206 |
| 35 | AAIEVQIASLA | 0.587 | 86 | WB | VP2-3 | A0206 |
| 37 | IEVQIASLATV | 0.586 | 88 | WB | VP2-3 | A0206 |
| 24 | SVAEIAAGEAA | 0.580 | 93 | WB | VP2-3 | A0206 |
| 4 | LALLGDLVASV | 0.580 | 94 | WB | VP2-3 | A0206 |
| 101 | FSDWDHKVSTV | 0.577 | 97 | WB | VP2-3 | A0206 |
| 15 | SEAAAATGFSV | 0.572 | 102 | WB | VP2-3 | A0206 |
| 86 | TVTGISSLAQV | 0.557 | 120 | WB | VP2-3 | A0206 |
| 59 | AIGLTPQTYAV | 0.537 | 150 | WB | VP2-3 | A0206 |
| 293 | MLPLLLGLYGT | 0.536 | 151 | WB | VP2-3 | A0206 |
| 58 | AAIGLTPQTYA | 0.531 | 159 | WB | VP2-3 | A0206 |
| 10 | LVASVSEAAAA | 0.524 | 173 | WB | VP2-3 | A0206 |
| 18 | AAATGFSVAEI | 0.509 | 203 | WB | VP2-3 | A0206 |
| 68 | AVIAGAPGAIA | 0.503 | 215 | WB | VP2-3 | A0206 |
| 84 | IQTVTGISSLA | 0.500 | 223 | WB | VP2-3 | A0206 |
| 52 | TTSEAIAAIGL | 0.457 | 357 | WB | VP2-3 | A0206 |
| 1 | GAALALLGDLV | 0.454 | 366 | WB | VP2-3 | A0206 |
| 297 | LLGLYGTVTPA | 0.442 | 420 | WB | VP2-3 | A0206 |
| 13 | SVSEAAAATGF | 0.441 | 423 | WB | VP2-3 | A0206 |
| 45 | ATVEGITTTSE | 0.429 | 481 | WB | VP2-3 | A0206 |
| 146 | YLDPRHWGPSL | 0.969 | 1 | SB | VP2-3 | A0211 |
| 247 | SIDNADSIEEV | 0.903 | 2 | SB | VP2-3 | A0211 |
| 86 | TVTGISSLAQV | 0.868 | 4 | SB | VP2-3 | A0211 |
| 61 | GLTPQTYAVIA | 0.808 | 7 | SB | VP2-3 | A0211 |
| 92 | SLAQVGYRFFS | 0.759 | 13 | SB | VP2-3 | A0211 |
| 59 | AIGLTPQTYAV | 0.737 | 17 | SB | VP2-3 | A0211 |
| 122 | ELFNPDEYYDI | 0.669 | 35 | SB | VP2-3 | A0211 |
| 43 | SLATVEGITTT | 0.657 | 40 | SB | VP2-3 | A0211 |
| 29 | AAGEAAAAIEV | 0.644 | 46 | SB | VP2-3 | A0211 |
| 4 | LALLGDLVASV | 0.626 | 56 | WB | VP2-3 | A0211 |
| 287 | RTAPQWMLPLL | 0.626 | 57 | WB | VP2-3 | A0211 |
| 131 | DILFPGVNTFV | 0.620 | 60 | WB | VP2-3 | A0211 |
| 101 | FSDWDHKVSTV | 0.615 | 64 | WB | VP2-3 | A0211 |
| 157 | FATISQALWHV | 0.608 | 69 | WB | VP2-3 | A0211 |
| 293 | MLPLLLGLYGT | 0.597 | 78 | WB | VP2-3 | A0211 |
| 132 | ILFPGVNTFVN | 0.565 | 110 | WB | VP2-3 | A0211 |
| 297 | LLGLYGTVTPA | 0.547 | 134 | WB | VP2-3 | A0211 |
| 76 | AIAGFAALIQT | 0.537 | 150 | WB | VP2-3 | A0211 |
| 292 | WMLPLLLGLYG | 0.526 | 167 | WB | VP2-3 | A0211 |
| 24 | SVAEIAAGEAA | 0.526 | 168 | WB | VP2-3 | A0211 |
| 253 | SIEEVTQRMDL | 0.525 | 170 | WB | VP2-3 | A0211 |
| 296 | LLLGLYGTVTP | 0.523 | 174 | WB | VP2-3 | A0211 |
| 98 | YRFFSDWDHKV | 0.515 | 190 | WB | VP2-3 | A0211 |
| 6 | LLGDLVASVSE | 0.504 | 213 | WB | VP2-3 | A0211 |
| 27 | EIAAGEAAAAI | 0.496 | 234 | WB | VP2-3 | A0211 |
| 194 | RFLEETTWTIV | 0.476 | 288 | WB | VP2-3 | A0211 |
| 155 | SLFATISQALW | 0.468 | 315 | WB | VP2-3 | A0211 |
| 5 | ALLGDLVASVS | 0.465 | 325 | WB | VP2-3 | A0211 |
| 83 | LIQTVTGISSL | 0.454 | 369 | WB | VP2-3 | A0211 |
| 77 | IAGFAALIQTV | 0.449 | 386 | WB | VP2-3 | A0211 |
| 278 | TIAPGGANQRT | 0.438 | 437 | WB | VP2-3 | A0211 |
| 191 | SLARFLEETTW | 0.437 | 444 | WB | VP2-3 | A0211 |
| 299 | GLYGTVTPALE | 0.429 | 482 | WB | VP2-3 | A0211 |
| 146 | YLDPRHWGPSL | 0.942 | 1 | SB | VP2-3 | A0212 |
| 247 | SIDNADSIEEV | 0.724 | 19 | SB | VP2-3 | A0212 |
| 59 | AIGLTPQTYAV | 0.677 | 32 | SB | VP2-3 | A0212 |
| 61 | GLTPQTYAVIA | 0.591 | 83 | WB | VP2-3 | A0212 |
| 43 | SLATVEGITTT | 0.566 | 109 | WB | VP2-3 | A0212 |
| 122 | ELFNPDEYYDI | 0.556 | 121 | WB | VP2-3 | A0212 |
| 4 | LALLGDLVASV | 0.541 | 143 | WB | VP2-3 | A0212 |
| 293 | MLPLLLGLYGT | 0.513 | 194 | WB | VP2-3 | A0212 |
| 6 | LLGDLVASVSE | 0.507 | 207 | WB | VP2-3 | A0212 |
| 83 | LIQTVTGISSL | 0.499 | 226 | WB | VP2-3 | A0212 |
| 253 | SIEEVTQRMDL | 0.493 | 242 | WB | VP2-3 | A0212 |
| 292 | WMLPLLLGLYG | 0.489 | 251 | WB | VP2-3 | A0212 |
| 92 | SLAQVGYRFFS | 0.479 | 281 | WB | VP2-3 | A0212 |
| 86 | TVTGISSLAQV | 0.475 | 292 | WB | VP2-3 | A0212 |
| 157 | FATISQALWHV | 0.435 | 454 | WB | VP2-3 | A0212 |
| 132 | ILFPGVNTFVN | 0.434 | 457 | WB | VP2-3 | A0212 |
| 213 | YIQDYYSNLSP | 0.433 | 464 | WB | VP2-3 | A0212 |
| 98 | YRFFSDWDHKV | 0.432 | 468 | WB | VP2-3 | A0212 |
| 296 | LLLGLYGTVTP | 0.431 | 473 | WB | VP2-3 | A0212 |
| 146 | YLDPRHWGPSL | 0.908 | 2 | SB | VP2-3 | A0216 |
| 247 | SIDNADSIEEV | 0.852 | 4 | SB | VP2-3 | A0216 |
| 86 | TVTGISSLAQV | 0.811 | 7 | SB | VP2-3 | A0216 |
| 59 | AIGLTPQTYAV | 0.755 | 14 | SB | VP2-3 | A0216 |
| 29 | AAGEAAAAIEV | 0.714 | 22 | SB | VP2-3 | A0216 |
| 92 | SLAQVGYRFFS | 0.674 | 34 | SB | VP2-3 | A0216 |
| 131 | DILFPGVNTFV | 0.671 | 35 | SB | VP2-3 | A0216 |
| 43 | SLATVEGITTT | 0.635 | 52 | WB | VP2-3 | A0216 |
| 61 | GLTPQTYAVIA | 0.633 | 53 | WB | VP2-3 | A0216 |
| 297 | LLGLYGTVTPA | 0.621 | 60 | WB | VP2-3 | A0216 |
| 83 | LIQTVTGISSL | 0.526 | 169 | WB | VP2-3 | A0216 |
| 157 | FATISQALWHV | 0.524 | 172 | WB | VP2-3 | A0216 |
| 122 | ELFNPDEYYDI | 0.508 | 205 | WB | VP2-3 | A0216 |
| 4 | LALLGDLVASV | 0.499 | 225 | WB | VP2-3 | A0216 |
| 77 | IAGFAALIQTV | 0.459 | 350 | WB | VP2-3 | A0216 |
| 76 | AIAGFAALIQT | 0.458 | 351 | WB | VP2-3 | A0216 |
| 146 | YLDPRHWGPSL | 0.941 | 1 | SB | VP2-3 | A0219 |
| 247 | SIDNADSIEEV | 0.699 | 26 | SB | VP2-3 | A0219 |
| 86 | TVTGISSLAQV | 0.670 | 35 | SB | VP2-3 | A0219 |
| 59 | AIGLTPQTYAV | 0.566 | 109 | WB | VP2-3 | A0219 |
| 4 | LALLGDLVASV | 0.537 | 149 | WB | VP2-3 | A0219 |
| 157 | FATISQALWHV | 0.530 | 161 | WB | VP2-3 | A0219 |
| 83 | LIQTVTGISSL | 0.499 | 225 | WB | VP2-3 | A0219 |
| 332 | GTRASAKTTNK | 0.622 | 59 | WB | VP2-3 | A0301 |
| 321 | RVSRGSSQKAK | 0.580 | 93 | WB | VP2-3 | A0301 |
| 203 | IVNAPINFYNY | 0.501 | 220 | WB | VP2-3 | A0301 |
| 339 | TTNKRRSRSSR | 0.487 | 258 | WB | VP2-3 | A0301 |
| 203 | IVNAPINFYNY | 0.678 | 32 | SB | VP2-3 | A1101 |
| 339 | TTNKRRSRSSR | 0.651 | 43 | SB | VP2-3 | A1101 |
| 277 | KTIAPGGANQR | 0.634 | 52 | WB | VP2-3 | A1101 |
| 321 | RVSRGSSQKAK | 0.626 | 57 | WB | VP2-3 | A1101 |
| 332 | GTRASAKTTNK | 0.606 | 70 | WB | VP2-3 | A1101 |
| 89 | GISSLAQVGYR | 0.521 | 177 | WB | VP2-3 | A1101 |
| 136 | GVNTFVNNIQY | 0.517 | 185 | WB | VP2-3 | A1101 |
| 159 | TISQALWHVIR | 0.481 | 274 | WB | VP2-3 | A1101 |
| 176 | TSQELQRRTER | 0.476 | 289 | WB | VP2-3 | A1101 |
| 140 | FVNNIQYLDPR | 0.469 | 313 | WB | VP2-3 | A1101 |
| 267 | ESVHSGEFIEK | 0.437 | 442 | WB | VP2-3 | A1101 |
| 200 | TWTIVNAPINF | 0.630 | 54 | WB | VP2-3 | A2301 |
| 97 | GYRFFSDWDHK | 0.623 | 59 | WB | VP2-3 | A2301 |
| 113 | LYQQSGMALEL | 0.597 | 77 | WB | VP2-3 | A2301 |
| 186 | RFFRDSLARFL | 0.449 | 389 | WB | VP2-3 | A2301 |
| 200 | TWTIVNAPINF | 0.612 | 66 | WB | VP2-3 | A2402 |
| 113 | LYQQSGMALEL | 0.533 | 156 | WB | VP2-3 | A2402 |
| 113 | LYQQSGMALEL | 0.750 | 14 | SB | VP2-3 | A2403 |
| 186 | RFFRDSLARFL | 0.485 | 263 | WB | VP2-3 | A2403 |
| 91 | SSLAQVGYRFF | 0.459 | 347 | WB | VP2-3 | A2403 |
| 201 | WTIVNAPINFY | 0.672 | 34 | SB | VP2-3 | A2601 |
| 109 | STVGLYQQSGM | 0.619 | 61 | WB | VP2-3 | A2601 |
| 201 | WTIVNAPINFY | 0.930 | 2 | SB | VP2-3 | A2602 |
| 109 | STVGLYQQSGM | 0.769 | 12 | SB | VP2-3 | A2602 |
| 27 | EIAAGEAAAAI | 0.765 | 12 | SB | VP2-3 | A2602 |
| 287 | RTAPQWMLPLL | 0.678 | 32 | SB | VP2-3 | A2602 |
| 203 | IVNAPINFYNY | 0.672 | 34 | SB | VP2-3 | A2602 |
| 13 | SVSEAAAATGF | 0.566 | 109 | WB | VP2-3 | A2602 |
| 88 | TGISSLAQVGY | 0.498 | 228 | WB | VP2-3 | A2602 |
| 291 | QWMLPLLLGLY | 0.553 | 126 | WB | VP2-3 | A2902 |
| 203 | IVNAPINFYNY | 0.517 | 185 | WB | VP2-3 | A2902 |
| 236 | EGTHVNFGHTY | 0.485 | 262 | WB | VP2-3 | A2902 |
| 208 | INFYNYIQDYY | 0.471 | 304 | WB | VP2-3 | A2902 |
| 136 | GVNTFVNNIQY | 0.468 | 317 | WB | VP2-3 | A2902 |
| 319 | KRRVSRGSSQK | 0.802 | 8 | SB | VP2-3 | A3001 |
| 332 | GTRASAKTTNK | 0.790 | 9 | SB | VP2-3 | A3001 |
| 97 | GYRFFSDWDHK | 0.743 | 16 | SB | VP2-3 | A3001 |
| 321 | RVSRGSSQKAK | 0.684 | 30 | SB | VP2-3 | A3001 |
| 203 | IVNAPINFYNY | 0.460 | 345 | WB | VP2-3 | A3002 |
| 339 | TTNKRRSRSSR | 0.837 | 5 | SB | VP2-3 | A3101 |
| 277 | KTIAPGGANQR | 0.682 | 31 | SB | VP2-3 | A3101 |
| 334 | RASAKTTNKRR | 0.664 | 37 | SB | VP2-3 | A3101 |
| 336 | SAKTTNKRRSR | 0.656 | 41 | SB | VP2-3 | A3101 |
| 140 | FVNNIQYLDPR | 0.655 | 41 | SB | VP2-3 | A3101 |
| 176 | TSQELQRRTER | 0.645 | 46 | SB | VP2-3 | A3101 |
| 179 | ELQRRTERFFR | 0.636 | 51 | WB | VP2-3 | A3101 |
| 225 | RPSMVRQVAER | 0.580 | 94 | WB | VP2-3 | A3101 |
| 324 | RGSSQKAKGTR | 0.569 | 105 | WB | VP2-3 | A3101 |
| 89 | GISSLAQVGYR | 0.567 | 108 | WB | VP2-3 | A3101 |
| 159 | TISQALWHVIR | 0.483 | 268 | WB | VP2-3 | A3101 |
| 332 | GTRASAKTTNK | 0.446 | 401 | WB | VP2-3 | A3101 |
| 220 | NLSPIRPSMVR | 0.432 | 465 | WB | VP2-3 | A3101 |
| 179 | ELQRRTERFFR | 0.812 | 7 | SB | VP2-3 | A3301 |
| 339 | TTNKRRSRSSR | 0.738 | 17 | SB | VP2-3 | A3301 |
| 140 | FVNNIQYLDPR | 0.519 | 181 | WB | VP2-3 | A3301 |
| 176 | TSQELQRRTER | 0.516 | 188 | WB | VP2-3 | A3301 |
| 220 | NLSPIRPSMVR | 0.506 | 210 | WB | VP2-3 | A3301 |
| 159 | TISQALWHVIR | 0.465 | 326 | WB | VP2-3 | A3301 |
| 339 | TTNKRRSRSSR | 0.848 | 5 | SB | VP2-3 | A6801 |
| 140 | FVNNIQYLDPR | 0.795 | 9 | SB | VP2-3 | A6801 |
| 159 | TISQALWHVIR | 0.758 | 13 | SB | VP2-3 | A6801 |
| 256 | EVTQRMDLRNK | 0.719 | 20 | SB | VP2-3 | A6801 |
| 179 | ELQRRTERFFR | 0.714 | 22 | SB | VP2-3 | A6801 |
| 309 | EAYEDGPNQKK | 0.713 | 22 | SB | VP2-3 | A6801 |
| 267 | ESVHSGEFIEK | 0.706 | 24 | SB | VP2-3 | A6801 |
| 220 | NLSPIRPSMVR | 0.687 | 29 | SB | VP2-3 | A6801 |
| 250 | NADSIEEVTQR | 0.655 | 41 | SB | VP2-3 | A6801 |
| 176 | TSQELQRRTER | 0.647 | 45 | SB | VP2-3 | A6801 |
| 201 | WTIVNAPINFY | 0.600 | 75 | WB | VP2-3 | A6801 |
| 89 | GISSLAQVGYR | 0.591 | 83 | WB | VP2-3 | A6801 |
| 277 | KTIAPGGANQR | 0.588 | 86 | WB | VP2-3 | A6801 |
| 172 | IPAITSQELQR | 0.515 | 190 | WB | VP2-3 | A6801 |
| 225 | RPSMVRQVAER | 0.438 | 438 | WB | VP2-3 | A6801 |
| 215 | QDYYSNLSPIR | 0.437 | 444 | WB | VP2-3 | A6801 |
| 198 | ETTWTIVNAPI | 0.863 | 4 | SB | VP2-3 | A6802 |
| 86 | TVTGISSLAQV | 0.804 | 8 | SB | VP2-3 | A6802 |
| 16 | EAAAATGFSVA | 0.777 | 11 | SB | VP2-3 | A6802 |
| 80 | FAALIQTVTGI | 0.761 | 13 | SB | VP2-3 | A6802 |
| 27 | EIAAGEAAAAI | 0.759 | 13 | SB | VP2-3 | A6802 |
| 244 | HTYSIDNADSI | 0.756 | 13 | SB | VP2-3 | A6802 |
| 52 | TTSEAIAAIGL | 0.729 | 18 | SB | VP2-3 | A6802 |
| 24 | SVAEIAAGEAA | 0.724 | 19 | SB | VP2-3 | A6802 |
| 40 | QIASLATVEGI | 0.649 | 44 | SB | VP2-3 | A6802 |
| 32 | EAAAAIEVQIA | 0.633 | 52 | WB | VP2-3 | A6802 |
| 10 | LVASVSEAAAA | 0.605 | 71 | WB | VP2-3 | A6802 |
| 131 | DILFPGVNTFV | 0.561 | 115 | WB | VP2-3 | A6802 |
| 287 | RTAPQWMLPLL | 0.551 | 129 | WB | VP2-3 | A6802 |
| 259 | QRMDLRNKESV | 0.550 | 129 | WB | VP2-3 | A6802 |
| 122 | ELFNPDEYYDI | 0.549 | 131 | WB | VP2-3 | A6802 |
| 46 | TVEGITTTSEA | 0.537 | 150 | WB | VP2-3 | A6802 |
| 157 | FATISQALWHV | 0.500 | 223 | WB | VP2-3 | A6802 |
| 109 | STVGLYQQSGM | 0.495 | 235 | WB | VP2-3 | A6802 |
| 204 | VNAPINFYNYI | 0.467 | 319 | WB | VP2-3 | A6802 |
| 18 | AAATGFSVAEI | 0.465 | 326 | WB | VP2-3 | A6802 |
| 23 | FSVAEIAAGEA | 0.463 | 333 | WB | VP2-3 | A6802 |
| 15 | SEAAAATGFSV | 0.457 | 356 | WB | VP2-3 | A6802 |
| 98 | YRFFSDWDHKV | 0.453 | 371 | WB | VP2-3 | A6802 |
| 50 | ITTTSEAIAAI | 0.442 | 419 | WB | VP2-3 | A6802 |
| 67 | YAVIAGAPGAI | 0.439 | 430 | WB | VP2-3 | A6802 |
| 0 | MGAALALLGDL | 0.426 | 497 | WB | VP2-3 | A6802 |
| 198 | ETTWTIVNAPI | 0.765 | 12 | SB | VP2-3 | A6901 |
| 27 | EIAAGEAAAAI | 0.722 | 20 | SB | VP2-3 | A6901 |
| 131 | DILFPGVNTFV | 0.706 | 23 | SB | VP2-3 | A6901 |
| 157 | FATISQALWHV | 0.625 | 58 | WB | VP2-3 | A6901 |
| 52 | TTSEAIAAIGL | 0.581 | 93 | WB | VP2-3 | A6901 |
| 244 | HTYSIDNADSI | 0.559 | 117 | WB | VP2-3 | A6901 |
| 86 | TVTGISSLAQV | 0.494 | 237 | WB | VP2-3 | A6901 |
| 24 | SVAEIAAGEAA | 0.491 | 245 | WB | VP2-3 | A6901 |
| 67 | YAVIAGAPGAI | 0.465 | 326 | WB | VP2-3 | A6901 |
| 146 | YLDPRHWGPSL | 0.462 | 338 | WB | VP2-3 | A6901 |
| 29 | AAGEAAAAIEV | 0.456 | 360 | WB | VP2-3 | A6901 |
| 101 | FSDWDHKVSTV | 0.443 | 416 | WB | VP2-3 | A6901 |
| 294 | LPLLLGLYGTV | 0.439 | 433 | WB | VP2-3 | A6901 |
| 40 | QIASLATVEGI | 0.436 | 448 | WB | VP2-3 | A6901 |
| 287 | RTAPQWMLPLL | 0.433 | 459 | WB | VP2-3 | A6901 |
| 73 | APGAIAGFAAL | 0.671 | 35 | SB | VP2-3 | B0702 |
| 222 | SPIRPSMVRQV | 0.530 | 162 | WB | VP2-3 | B0702 |
| 67 | YAVIAGAPGAI | 0.489 | 251 | WB | VP2-3 | B0702 |
| 114 | YQQSGMALELF | 0.567 | 108 | WB | VP2-3 | B1501 |
| 201 | WTIVNAPINFY | 0.536 | 151 | WB | VP2-3 | B1501 |
| 203 | IVNAPINFYNY | 0.501 | 221 | WB | VP2-3 | B1501 |
| 13 | SVSEAAAATGF | 0.500 | 223 | WB | VP2-3 | B1501 |
| 264 | RNKESVHSGEF | 0.488 | 254 | WB | VP2-3 | B1501 |
| 57 | IAAIGLTPQTY | 0.455 | 361 | WB | VP2-3 | B1501 |
| 37 | IEVQIASLATV | 0.605 | 71 | WB | VP2-3 | B1801 |
| 127 | DEYYDILFPGV | 0.591 | 83 | WB | VP2-3 | B1801 |
| 178 | QELQRRTERFF | 0.466 | 323 | WB | VP2-3 | B1801 |
| 130 | YDILFPGVNTF | 0.426 | 495 | WB | VP2-3 | B1801 |
| 182 | RRTERFFRDSL | 0.564 | 111 | WB | VP2-3 | B2705 |
| 319 | KRRVSRGSSQK | 0.498 | 227 | WB | VP2-3 | B2705 |
| 320 | RRVSRGSSQKA | 0.461 | 342 | WB | VP2-3 | B2705 |
| 286 | QRTAPQWMLPL | 0.430 | 477 | WB | VP2-3 | B2705 |
| 119 | MALELFNPDEY | 0.799 | 8 | SB | VP2-3 | B3501 |
| 57 | IAAIGLTPQTY | 0.701 | 25 | SB | VP2-3 | B3501 |
| 67 | YAVIAGAPGAI | 0.605 | 71 | WB | VP2-3 | B3501 |
| 13 | SVSEAAAATGF | 0.558 | 119 | WB | VP2-3 | B3501 |
| 201 | WTIVNAPINFY | 0.508 | 204 | WB | VP2-3 | B3501 |
| 73 | APGAIAGFAAL | 0.500 | 224 | WB | VP2-3 | B3501 |
| 301 | YGTVTPALEAY | 0.466 | 322 | WB | VP2-3 | B3501 |
| 11 | VASVSEAAAAT | 0.445 | 404 | WB | VP2-3 | B3501 |
| 146 | YLDPRHWGPSL | 0.500 | 223 | WB | VP2-3 | B3901 |
| 211 | YNYIQDYYSNL | 0.445 | 405 | WB | VP2-3 | B3901 |
| 31 | GEAAAAIEVQI | 0.587 | 87 | WB | VP2-3 | B4001 |
| 15 | SEAAAATGFSV | 0.513 | 194 | WB | VP2-3 | B4001 |
| 37 | IEVQIASLATV | 0.477 | 287 | WB | VP2-3 | B4001 |
| 127 | DEYYDILFPGV | 0.451 | 380 | WB | VP2-3 | B4001 |
| 178 | QELQRRTERFF | 0.497 | 231 | WB | VP2-3 | B4002 |
| 26 | AEIAAGEAAAA | 0.428 | 489 | WB | VP2-3 | B4002 |
| 26 | AEIAAGEAAAA | 0.484 | 264 | WB | VP2-3 | B4403 |
| 26 | AEIAAGEAAAA | 0.620 | 61 | WB | VP2-3 | B4501 |
| 294 | LPLLLGLYGTV | 0.749 | 15 | SB | VP2-3 | B5101 |
| 134 | FPGVNTFVNNI | 0.632 | 53 | WB | VP2-3 | B5101 |
| 134 | FPGVNTFVNNI | 0.791 | 9 | SB | VP2-3 | B5301 |
| 294 | LPLLLGLYGTV | 0.479 | 281 | WB | VP2-3 | B5301 |
| 119 | MALELFNPDEY | 0.477 | 287 | WB | VP2-3 | B5301 |
| 294 | LPLLLGLYGTV | 0.839 | 5 | SB | VP2-3 | B5401 |
| 134 | FPGVNTFVNNI | 0.750 | 14 | SB | VP2-3 | B5401 |
| 63 | TPQTYAVIAGA | 0.491 | 245 | WB | VP2-3 | B5401 |
| 80 | FAALIQTVTGI | 0.454 | 369 | WB | VP2-3 | B5401 |
| 222 | SPIRPSMVRQV | 0.451 | 378 | WB | VP2-3 | B5401 |
| 90 | ISSLAQVGYRF | 0.685 | 30 | SB | VP2-3 | B5801 |
| 191 | SLARFLEETTW | 0.631 | 54 | WB | VP2-3 | B5801 |
| 155 | SLFATISQALW | 0.572 | 102 | WB | VP2-3 | B5801 |
| 57 | IAAIGLTPQTY | 0.539 | 145 | WB | VP2-3 | B5801 |
| 282 | GGANQRTAPQW | 0.529 | 162 | WB | VP2-3 | B5801 |
| 287 | RTAPQWMLPLL | 0.488 | 253 | WB | VP2-3 | B5801 |

[0898] Preferred BK virus fragments of VP1 capable of interacting with one or more MHC class 1 molecules are listed in Table K.

TABLE K
Prediction of BK virus VP1 protein specific
MHC class1, 8-, 9-, 10-, 11-mer peptide
binders for 42 MHC class 1 alleles
(see FIG. 11) using the
http://www.cbs.dtu.dk/services/NetMHC/
database. The MHC class 1 molecules for
which no binders were found are not listed.

| | | | | | | |
|---|---|---|---|---|---|---|
| | | log- | affinity | Bind | Protein | |
| pos | peptide | score | (nM) | Level | Name | Allele |

8-mers

| | | | | | | |
|---|---|---|---|---|---|---|
| 196 | YLDKNNAY | 0.756 | 14 | SB | VP1 | A0101 |
| 108 | LMWEAVTV | 0.819 | 7 | SB | VP1 | A0201 |
| 243 | VLLDEQGV | 0.703 | 24 | SB | VP1 | A0201 |
| 83 | KMLPCYST | 0.657 | 41 | SB | VP1 | A0201 |
| 40 | GVDAITEV | 0.595 | 79 | WB | VP1 | A0201 |
| 281 | GLARYFKI | 0.591 | 83 | WB | VP1 | A0201 |
| 106 | NLLMWEAV | 0.580 | 94 | WB | VP1 | A0201 |
| 84 | MLPCYSTA | 0.562 | 114 | WB | VP1 | A0201 |
| 107 | LLMWEAVT | 0.498 | 229 | WB | VP1 | A0201 |
| 281 | GLARYFKI | 0.717 | 21 | SB | VP1 | A0202 |
| 108 | LMWEAVTV | 0.668 | 36 | SB | VP1 | A0202 |
| 84 | MLPCYSTA | 0.666 | 37 | SB | VP1 | A0202 |
| 243 | VLLDEQGV | 0.663 | 38 | SB | VP1 | A0202 |
| 262 | SAADICGL | 0.662 | 38 | SB | VP1 | A0202 |
| 40 | GVDAITEV | 0.633 | 52 | WB | VP1 | A0202 |
| 34 | VLEVKTGV | 0.510 | 200 | WB | VP1 | A0202 |
| 152 | FAVGGDPL | 0.508 | 205 | WB | VP1 | A0202 |
| 121 | GITSMLNL | 0.475 | 291 | WB | VP1 | A0202 |
| 125 | MLNLHAGS | 0.470 | 310 | WB | VP1 | A0202 |
| 25 | KLLIKGGV | 0.457 | 354 | WB | VP1 | A0202 |
| 107 | LLMWEAVT | 0.451 | 379 | WB | VP1 | A0202 |
| 238 | NTATTVLL | 0.447 | 394 | WB | VP1 | A0202 |
| — | | | | | | |
| 84 | MLPCYSTA | 0.841 | 5 | SB | VP1 | A0203 |
| 108 | LMWEAVTV | 0.784 | 10 | SB | VP1 | A0203 |
| 27 | LIKGGVEV | 0.779 | 10 | SB | VP1 | A0203 |
| 281 | GLARYFKI | 0.762 | 13 | SB | VP1 | A0203 |
| 243 | VLLDEQGV | 0.746 | 15 | SB | VP1 | A0203 |
| 236 | VTNTATTV | 0.674 | 33 | SB | VP1 | A0203 |
| 25 | KLLIKGGV | 0.657 | 41 | SB | VP1 | A0203 |
| 106 | NLLMWEAV | 0.643 | 47 | SB | VP1 | A0203 |
| 34 | VLEVKTGV | 0.635 | 51 | WB | VP1 | A0203 |
| 233 | VLHVTNTA | 0.633 | 52 | WB | VP1 | A0203 |
| 107 | LLMWEAVT | 0.563 | 113 | WB | VP1 | A0203 |
| 262 | SAADICGL | 0.538 | 148 | WB | VP1 | A0203 |
| 188 | VMNTDHKA | 0.531 | 159 | WB | VP1 | A0203 |
| 83 | KMLPCYST | 0.509 | 203 | WB | VP1 | A0203 |
| 125 | MLNLHAGS | 0.509 | 203 | WB | VP1 | A0203 |
| 326 | SQVEEVRV | 0.501 | 221 | WB | VP1 | A0203 |
| 229 | NVPPVLHV | 0.492 | 244 | WB | VP1 | A0203 |
| 121 | GITSMLNL | 0.490 | 248 | WB | VP1 | A0203 |
| 40 | GVDAITEV | 0.488 | 255 | WB | VP1 | A0203 |
| 294 | SVKNPYPI | 0.470 | 308 | WB | VP1 | A0203 |
| 112 | AVTVKTEV | 0.456 | 358 | WB | VP1 | A0203 |
| 119 | VIGITSML | 0.439 | 433 | WB | VP1 | A0203 |
| 108 | LMWEAVTV | 0.780 | 10 | SB | VP1 | A0204 |
| 243 | VLLDEQGV | 0.740 | 16 | SB | VP1 | A0204 |
| 25 | KLLIKGGV | 0.582 | 91 | WB | VP1 | A0204 |
| 281 | GLARYFKI | 0.510 | 201 | WB | VP1 | A0204 |
| 34 | VLEVKTGV | 0.498 | 228 | WB | VP1 | A0204 |
| 236 | VTNTATTV | 0.489 | 253 | WB | VP1 | A0204 |
| 326 | SQVEEVRV | 0.453 | 371 | WB | VP1 | A0204 |
| 106 | NLLMWEAV | 0.441 | 423 | WB | VP1 | A0204 |
| 27 | LIKGGVEV | 0.432 | 465 | WB | VP1 | A0204 |
| 40 | GVDAITEV | 0.431 | 472 | WB | VP1 | A0204 |
| 108 | LMWEAVTV | 0.852 | 4 | SB | VP1 | A0206 |
| 326 | SQVEEVRV | 0.789 | 9 | SB | VP1 | A0206 |
| 106 | NLLMWEAV | 0.731 | 18 | SB | VP1 | A0206 |
| 152 | FAVGGDPL | 0.729 | 18 | SB | VP1 | A0206 |
| 243 | VLLDEQGV | 0.720 | 20 | SB | VP1 | A0206 |
| 40 | GVDAITEV | 0.691 | 28 | SB | VP1 | A0206 |
| 21 | VQVPKLLI | 0.685 | 30 | SB | VP1 | A0206 |
| 84 | MLPCYSTA | 0.624 | 58 | WB | VP1 | A0206 |
| 83 | KMLPCYST | 0.623 | 59 | WB | VP1 | A0206 |
| 354 | GQLQTKMV | 0.584 | 89 | WB | VP1 | A0206 |
| 229 | NVPPVLHV | 0.574 | 99 | WB | VP1 | A0206 |
| 25 | KLLIKGGV | 0.543 | 139 | WB | VP1 | A0206 |
| 262 | SAADICGL | 0.513 | 193 | WB | VP1 | A0206 |
| 236 | VTNTATTV | 0.506 | 208 | WB | VP1 | A0206 |
| 281 | GLARYFKI | 0.505 | 211 | WB | VP1 | A0206 |
| 144 | VQGSNFHF | 0.481 | 275 | WB | VP1 | A0206 |
| 112 | AVTVKTEV | 0.454 | 368 | WB | VP1 | A0206 |
| 276 | TQQWRGLA | 0.439 | 434 | WB | VP1 | A0206 |
| 184 | AQSQVMNT | 0.432 | 465 | WB | VP1 | A0206 |
| 147 | SNFHFFAV | 0.432 | 467 | WB | VP1 | A0206 |
| 108 | LMWEAVTV | 0.966 | 1 | SB | VP1 | A0211 |
| 243 | VLLDEQGV | 0.965 | 1 | SB | VP1 | A0211 |
| 106 | NLLMWEAV | 0.910 | 2 | SB | VP1 | A0211 |
| 40 | GVDAITEV | 0.856 | 4 | SB | VP1 | A0211 |
| 27 | LIKGGVEV | 0.838 | 5 | SB | VP1 | A0211 |
| 229 | NVPPVLHV | 0.830 | 6 | SB | VP1 | A0211 |
| 25 | KLLIKGGV | 0.823 | 6 | SB | VP1 | A0211 |
| 349 | YIDRQGQL | 0.819 | 7 | SB | VP1 | A0211 |
| 281 | GLARYFKI | 0.788 | 9 | SB | VP1 | A0211 |
| 84 | MLPCYSTA | 0.786 | 10 | SB | VP1 | A0211 |
| 196 | YLDKNNAY | 0.751 | 14 | SB | VP1 | A0211 |
| 83 | KMLPCYST | 0.746 | 15 | SB | VP1 | A0211 |
| 34 | VLEVKTGV | 0.731 | 18 | SB | VP1 | A0211 |
| 101 | DLTCGNLL | 0.639 | 49 | SB | VP1 | A0211 |
| 262 | SAADICGL | 0.614 | 65 | WB | VP1 | A0211 |
| 97 | NLNEDLTC | 0.603 | 73 | WB | VP1 | A0211 |
| 188 | VMNTDHKA | 0.602 | 74 | WB | VP1 | A0211 |
| 233 | VLHVTNTA | 0.594 | 80 | WB | VP1 | A0211 |
| 112 | AVTVKTEV | 0.578 | 96 | WB | VP1 | A0211 |
| 320 | PMYGMESQ | 0.573 | 102 | WB | VP1 | A0211 |
| 326 | SQVEEVRV | 0.548 | 133 | WB | VP1 | A0211 |
| 332 | RVFDGTEQ | 0.542 | 141 | WB | VP1 | A0211 |
| 333 | VFDGTEQL | 0.505 | 211 | WB | VP1 | A0211 |
| 254 | CKADSLYV | 0.500 | 224 | WB | VP1 | A0211 |
| 236 | VTNTATTV | 0.498 | 229 | WB | VP1 | A0211 |
| 124 | SMLNLHAG | 0.491 | 246 | WB | VP1 | A0211 |
| 121 | GITSMLNL | 0.481 | 276 | WB | VP1 | A0211 |
| 147 | SNFHFFAV | 0.471 | 305 | WB | VP1 | A0211 |
| 107 | LLMWEAVT | 0.456 | 358 | WB | VP1 | A0211 |
| 252 | PLCKADSL | 0.453 | 370 | WB | VP1 | A0211 |
| 223 | TYTGGENV | 0.451 | 378 | WB | VP1 | A0211 |
| 339 | QLPGDPDM | 0.440 | 428 | WB | VP1 | A0211 |
| 119 | VIGITSML | 0.437 | 439 | WB | VP1 | A0211 |
| 243 | VLLDEQGV | 0.938 | 1 | SB | VP1 | A0212 |
| 108 | LMWEAVTV | 0.932 | 2 | SB | VP1 | A0212 |
| 106 | NLLMWEAV | 0.866 | 4 | SB | VP1 | A0212 |
| 27 | LIKGGVEV | 0.758 | 13 | SB | VP1 | A0212 |
| 281 | GLARYFKI | 0.738 | 17 | SB | VP1 | A0212 |
| 34 | VLEVKTGV | 0.730 | 18 | SB | VP1 | A0212 |
| 196 | YLDKNNAY | 0.708 | 23 | SB | VP1 | A0212 |
| 25 | KLLIKGGV | 0.691 | 28 | SB | VP1 | A0212 |
| 349 | YIDRQGQL | 0.659 | 40 | SB | VP1 | A0212 |
| 84 | MLPCYSTA | 0.645 | 46 | SB | VP1 | A0212 |
| 40 | GVDAITEV | 0.626 | 57 | WB | VP1 | A0212 |
| 229 | NVPPVLHV | 0.625 | 57 | WB | VP1 | A0212 |
| 320 | PMYGMESQ | 0.570 | 104 | WB | VP1 | A0212 |
| 188 | VMNTDHKA | 0.557 | 120 | WB | VP1 | A0212 |
| 233 | VLHVTNTA | 0.537 | 149 | WB | VP1 | A0212 |
| 83 | KMLPCYST | 0.496 | 234 | WB | VP1 | A0212 |
| 339 | QLPGDPDM | 0.474 | 295 | WB | VP1 | A0212 |
| 107 | LLMWEAVT | 0.462 | 337 | WB | VP1 | A0212 |
| 124 | SMLNLHAG | 0.437 | 443 | WB | VP1 | A0212 |
| 50 | FLNPEMGD | 0.437 | 444 | WB | VP1 | A0212 |
| 236 | VTNTATTV | 0.435 | 450 | WB | VP1 | A0212 |
| 97 | NLNEDLTC | 0.431 | 469 | WB | VP1 | A0212 |
| 326 | SQVEEVRV | 0.429 | 483 | WB | VP1 | A0212 |
| 108 | LMWEAVTV | 0.930 | 2 | SB | VP1 | A0216 |
| 243 | VLLDEQGV | 0.867 | 4 | SB | VP1 | A0216 |
| 106 | NLLMWEAV | 0.829 | 6 | SB | VP1 | A0216 |
| 27 | LIKGGVEV | 0.816 | 7 | SB | VP1 | A0216 |
| 229 | NVPPVLHV | 0.794 | 9 | SB | VP1 | A0216 |
| 40 | GVDAITEV | 0.784 | 10 | SB | VP1 | A0216 |
| 281 | GLARYFKI | 0.745 | 15 | SB | VP1 | A0216 |
| 34 | VLEVKTGV | 0.709 | 23 | SB | VP1 | A0216 |
| 84 | MLPCYSTA | 0.699 | 26 | SB | VP1 | A0216 |
| 349 | YIDRQGQL | 0.698 | 26 | SB | VP1 | A0216 |
| 25 | KLLIKGGV | 0.668 | 36 | SB | VP1 | A0216 |
| 112 | AVTVKTEV | 0.647 | 45 | SB | VP1 | A0216 |
| 252 | PLCKADSL | 0.627 | 56 | WB | VP1 | A0216 |
| 101 | DLTCGNLL | 0.529 | 163 | WB | VP1 | A0216 |
| 233 | VLHVTNTA | 0.520 | 179 | WB | VP1 | A0216 |
| 119 | VIGITSML | 0.493 | 241 | WB | VP1 | A0216 |
| 83 | KMLPCYST | 0.490 | 250 | WB | VP1 | A0216 |
| 320 | PMYGMESQ | 0.474 | 296 | WB | VP1 | A0216 |
| 236 | VTNTATTV | 0.470 | 309 | WB | VP1 | A0216 |
| 196 | YLDKNNAY | 0.461 | 339 | WB | VP1 | A0216 |
| 321 | MYGMESQV | 0.456 | 360 | WB | VP1 | A0216 |
| 152 | FAVGGDPL | 0.438 | 439 | WB | VP1 | A0216 |
| 223 | TYTGGENV | 0.434 | 457 | WB | VP1 | A0216 |
| 108 | LMWEAVTV | 0.930 | 2 | SB | VP1 | A0219 |
| 243 | VLLDEQGV | 0.896 | 3 | SB | VP1 | A0219 |
| 106 | NLLMWEAV | 0.798 | 8 | SB | VP1 | A0219 |
| 40 | GVDAITEV | 0.662 | 38 | SB | VP1 | A0219 |
| 229 | NVPPVLHV | 0.606 | 70 | WB | VP1 | A0219 |
| 27 | LIKGGVEV | 0.540 | 144 | WB | VP1 | A0219 |
| 349 | YIDRQGQL | 0.526 | 168 | WB | VP1 | A0219 |
| 34 | VLEVKTGV | 0.485 | 262 | WB | VP1 | A0219 |
| 254 | CKADSLYV | 0.484 | 265 | WB | VP1 | A0219 |
| 196 | YLDKNNAY | 0.451 | 381 | WB | VP1 | A0219 |
| 236 | VTNTATTV | 0.446 | 399 | WB | VP1 | A0219 |
| 333 | VFDGTEQL | 0.439 | 432 | WB | VP1 | A0219 |
| 281 | GLARYFKI | 0.434 | 456 | WB | VP1 | A0219 |
| 101 | DLTCGNLL | 0.430 | 474 | WB | VP1 | A0219 |
| 289 | RLRKRSVK | 0.776 | 11 | SB | VP1 | A0301 |
| 308 | LINRRTQK | 0.697 | 26 | SB | VP1 | A0301 |
| 164 | VLMNYRTK | 0.693 | 27 | SB | VP1 | A0301 |
| 127 | NLHAGSQK | 0.656 | 41 | SB | VP1 | A0301 |
| 165 | LMNYRTKY | 0.467 | 318 | WB | VP1 | A0301 |
| 280 | RGLARYFK | 0.446 | 399 | WB | VP1 | A0301 |
| 352 | RQGQLQTK | 0.432 | 468 | WB | VP1 | A0301 |
| 187 | QVMNTDHK | 0.705 | 24 | SB | VP1 | A1101 |
| 164 | VLMNYRTK | 0.620 | 60 | WB | VP1 | A1101 |
| 308 | LINRRTQK | 0.613 | 65 | WB | VP1 | A1101 |
| 280 | RGLARYFK | 0.596 | 79 | WB | VP1 | A1101 |
| 22 | QVPKLLIK | 0.510 | 200 | WB | VP1 | A1101 |
| 31 | GVEVLEVK | 0.506 | 210 | WB | VP1 | A1101 |
| 11 | GAAPKKPK | 0.444 | 408 | WB | VP1 | A1101 |
| 352 | RQGQLQTK | 0.436 | 447 | WB | VP1 | A1101 |
| 298 | PYPISFLL | 0.570 | 104 | WB | VP1 | A2301 |
| 259 | LYVSAADI | 0.509 | 203 | WB | VP1 | A2301 |
| 144 | VQGSNFHF | 0.499 | 225 | WB | VP1 | A2301 |
| 109 | MWEAVTVK | 0.470 | 310 | WB | VP1 | A2301 |
| 284 | RYFKIRLR | 0.448 | 393 | WB | VP1 | A2301 |
| 298 | PYPISFLL | 0.771 | 11 | SB | VP1 | A2402 |
| 202 | AYPVECWI | 0.672 | 34 | SB | VP1 | A2402 |
| 259 | LYVSAADI | 0.538 | 148 | WB | VP1 | A2402 |
| 302 | SFLLSDLI | 0.533 | 156 | WB | VP1 | A2402 |
| 144 | VQGSNFHF | 0.441 | 422 | WB | VP1 | A2402 |
| 202 | AYPVECWI | 0.721 | 20 | SB | VP1 | A2403 |
| 298 | PYPISFLL | 0.614 | 65 | WB | VP1 | A2403 |
| 259 | LYVSAADI | 0.464 | 329 | WB | VP1 | A2403 |
| 118 | EVIGITSM | 0.834 | 6 | SB | VP1 | A2601 |
| 118 | EVIGITSM | 0.909 | 2 | SB | VP1 | A2602 |
| 315 | KVDGQPMY | 0.730 | 18 | SB | VP1 | A2602 |
| 196 | YLDKNNAY | 0.675 | 33 | SB | VP1 | A2602 |
| 182 | PTAQSQVM | 0.599 | 76 | WB | VP1 | A2602 |
| 217 | NTRYFGTY | 0.573 | 101 | WB | VP1 | A2602 |
| 349 | YIDRQGQL | 0.555 | 123 | WB | VP1 | A2602 |
| 327 | QVEEVRVF | 0.491 | 245 | WB | VP1 | A2602 |
| 190 | NTDHKAYL | 0.463 | 332 | WB | VP1 | A2602 |
| 238 | NTATTVLL | 0.462 | 338 | WB | VP1 | A2602 |
| 196 | YLDKNNAY | 0.550 | 130 | WB | VP1 | A2902 |
| 165 | LMNYRTKY | 0.498 | 228 | WB | VP1 | A2902 |
| 289 | RLRKRSVK | 0.873 | 3 | SB | VP1 | A3001 |
| 280 | RGLARYFK | 0.802 | 8 | SB | VP1 | A3001 |
| 187 | QVMNTDHK | 0.563 | 113 | WB | VP1 | A3001 |
| 308 | LINRRTQK | 0.535 | 153 | WB | VP1 | A3001 |
| 164 | VLMNYRTK | 0.534 | 153 | WB | VP1 | A3001 |
| 285 | YFKIRLRK | 0.497 | 231 | WB | VP1 | A3001 |
| 284 | RYFKIRLR | 0.452 | 377 | WB | VP1 | A3001 |
| 127 | NLHAGSQK | 0.426 | 497 | WB | VP1 | A3001 |
| 315 | KVDGQPMY | 0.436 | 447 | WB | VP1 | A3002 |
| 165 | LMNYRTKY | 0.431 | 473 | WB | VP1 | A3002 |
| 284 | RYFKIRLR | 0.898 | 3 | SB | VP1 | A3101 |
| 280 | RGLARYFK | 0.716 | 21 | SB | VP1 | A3101 |
| 289 | RLRKRSVK | 0.670 | 35 | SB | VP1 | A3101 |
| 282 | LARYFKIR | 0.663 | 38 | SB | VP1 | A3101 |
| 277 | QQWRGLAR | 0.643 | 47 | SB | VP1 | A3101 |
| 285 | YFKIRLRK | 0.581 | 93 | WB | VP1 | A3101 |
| 304 | LLSDLINR | 0.569 | 106 | WB | VP1 | A3101 |
| 308 | LINRRTQK | 0.542 | 141 | WB | VP1 | A3101 |
| 273 | SSGTQQWR | 0.503 | 215 | WB | VP1 | A3101 |
| 164 | VLMNYRTK | 0.434 | 458 | WB | VP1 | A3101 |
| 345 | DMIRYIDR | 0.767 | 12 | SB | VP1 | A3301 |
| 284 | RYFKIRLR | 0.631 | 54 | WB | VP1 | A3301 |
| 282 | LARYFKIR | 0.515 | 190 | WB | VP1 | A3301 |
| 285 | YFKIRLRK | 0.504 | 213 | WB | VP1 | A3301 |
| 277 | QQWRGLAR | 0.444 | 410 | WB | VP1 | A3301 |
| 187 | QVMNTDHK | 0.708 | 23 | SB | VP1 | A6801 |
| 345 | DMIRYIDR | 0.627 | 56 | WB | VP1 | A6801 |
| 325 | ESQVEEVR | 0.606 | 70 | WB | VP1 | A6801 |
| 85 | LPCYSTAR | 0.568 | 107 | WB | VP1 | A6801 |
| 127 | NLHAGSQK | 0.503 | 217 | WB | VP1 | A6801 |
| 304 | LLSDLINR | 0.497 | 230 | WB | VP1 | A6801 |
| 308 | LINRRTQK | 0.497 | 231 | WB | VP1 | A6801 |
| 284 | RYFKIRLR | 0.488 | 254 | WB | VP1 | A6801 |
| 162 | QGVLMNYR | 0.487 | 257 | WB | VP1 | A6801 |
| 305 | LSDLINRR | 0.439 | 431 | WB | VP1 | A6801 |
| 282 | LARYFKIR | 0.438 | 439 | WB | VP1 | A6801 |
| 238 | NTATTVLL | 0.723 | 19 | SB | VP1 | A6802 |
| 262 | SAADICGL | 0.718 | 21 | SB | VP1 | A6802 |
| 118 | EVIGITSM | 0.718 | 21 | SB | VP1 | A6802 |
| 147 | SNFHFFAV | 0.659 | 39 | SB | VP1 | A6802 |
| 229 | NVPPVLHV | 0.647 | 45 | SB | VP1 | A6802 |
| 297 | NPYPISFL | 0.515 | 191 | WB | VP1 | A6802 |
| 152 | FAVGGDPL | 0.506 | 210 | WB | VP1 | A6802 |
| 88 | YSTARIPL | 0.473 | 300 | WB | VP1 | A6802 |
| 294 | SVKNPYPI | 0.458 | 351 | WB | VP1 | A6802 |
| 254 | CKADSLYV | 0.441 | 421 | WB | VP1 | A6802 |
| 108 | LMWEAVTV | 0.730 | 18 | SB | VP1 | A6901 |
| 238 | NTATTVLL | 0.636 | 51 | WB | VP1 | A6901 |
| 157 | DPLEMQGV | 0.635 | 51 | WB | VP1 | A6901 |
| 297 | NPYPISFL | 0.557 | 120 | WB | VP1 | A6901 |
| 118 | EVIGITSM | 0.548 | 132 | WB | VP1 | A6901 |
| 229 | NVPPVLHV | 0.545 | 137 | WB | VP1 | A6901 |
| 106 | NLLMWEAV | 0.539 | 147 | WB | VP1 | A6901 |
| 262 | SAADICGL | 0.441 | 421 | WB | VP1 | A6901 |
| 19 | EPVQVPKL | 0.431 | 471 | WB | VP1 | A6901 |
| 142 | KPVQGSNF | 0.685 | 30 | SB | VP1 | B0702 |
| 297 | NPYPISFL | 0.489 | 251 | WB | VP1 | B0702 |
| 16 | KPKEPVQV | 0.433 | 462 | WB | VP1 | B0702 |
| 95 | LPNLNEDL | 0.428 | 488 | WB | VP1 | B0702 |
| 68 | HLSAENAF | 0.555 | 123 | WB | VP1 | B1501 |
| 165 | LMNYRTKY | 0.542 | 142 | WB | VP1 | B1501 |
| 161 | MQGVLMNY | 0.509 | 202 | WB | VP1 | B1501 |
| 144 | VQGSNFHF | 0.453 | 369 | WB | VP1 | B1501 |
| 196 | YLDKNNAY | 0.448 | 393 | WB | VP1 | B1501 |
| 246 | DEQGVGPL | 0.554 | 124 | WB | VP1 | B1801 |
| 324 | MESQVEEV | 0.449 | 389 | WB | VP1 | B1801 |
| 159 | LEMQGVLM | 0.439 | 432 | WB | VP1 | B1801 |
| 283 | ARYFKIRL | 0.453 | 371 | WB | VP1 | B2705 |
| 292 | KRSVKNPY | 0.436 | 446 | WB | VP1 | B2705 |
| 279 | WRGLARYF | 0.426 | 496 | WB | VP1 | B2705 |
| 152 | FAVGGDPL | 0.737 | 17 | SB | VP1 | B3501 |
| 142 | KPVQGSNF | 0.631 | 54 | WB | VP1 | B3501 |
| 19 | EPVQVPKL | 0.547 | 134 | WB | VP1 | B3501 |
| 196 | YLDKNNAY | 0.544 | 138 | WB | VP1 | B3501 |
| 118 | EVIGITSM | 0.533 | 157 | WB | VP1 | B3501 |
| 95 | LPNLNEDL | 0.482 | 270 | WB | VP1 | B3501 |
| 299 | YPISFLLS | 0.480 | 278 | WB | VP1 | B3501 |
| 68 | HLSAENAF | 0.472 | 304 | WB | VP1 | B3501 |
| 297 | NPYPISFL | 0.470 | 309 | WB | VP1 | B3501 |
| 227 | GENVPPVL | 0.576 | 98 | WB | VP1 | B4001 |
| 159 | LEMQGVLM | 0.513 | 194 | WB | VP1 | B4001 |
| 324 | MESQVEEV | 0.433 | 462 | WB | VP1 | B4001 |
| 246 | DEQGVGPL | 0.430 | 476 | WB | VP1 | B4001 |
| 227 | GENVPPVL | 0.457 | 357 | WB | VP1 | B4002 |
| 71 | AENAFESD | 0.469 | 312 | WB | VP1 | B4501 |
| 340 | LPGDPDMI | 0.621 | 60 | WB | VP1 | B5101 |
| 230 | VPPVLHVT | 0.446 | 401 | WB | VP1 | B5101 |
| 203 | YPVECWIP | 0.426 | 498 | WB | VP1 | B5101 |
| 297 | NPYPISFL | 0.568 | 107 | WB | VP1 | B5301 |
| 142 | KPVQGSNF | 0.533 | 156 | WB | VP1 | B5301 |
| 19 | EPVQVPKL | 0.525 | 171 | WB | VP1 | B5301 |
| 340 | LPGDPDMI | 0.522 | 176 | WB | VP1 | B5301 |
| 95 | LPNLNEDL | 0.434 | 456 | WB | VP1 | B5301 |
| 299 | YPISFLLS | 0.612 | 66 | WB | VP1 | B5401 |
| 203 | YPVECWIP | 0.524 | 172 | WB | VP1 | B5401 |
| 230 | VPPVLHVT | 0.521 | 178 | WB | VP1 | B5401 |
| 85 | LPCYSTAR | 0.450 | 382 | WB | VP1 | B5401 |
| 340 | LPGDPDMI | 0.436 | 448 | WB | VP1 | B5401 |
| 272 | NSSGTQQW | 0.527 | 166 | WB | VP1 | B5701 |
| 201 | NAYPVECW | 0.479 | 280 | WB | VP1 | B5701 |
| 201 | NAYPVECW | 0.691 | 28 | SB | VP1 | B5801 |
| 272 | NSSGTQQW | 0.675 | 33 | SB | VP1 | B5801 |

9-mers

| | | | | | | |
|---|---|---|---|---|---|---|
| 107 | LLMWEAVTV | 0.761 | 13 | SB | VP1 | A0201 |
| 83 | KMLPCYSTA | 0.724 | 19 | SB | VP1 | A0201 |
| 26 | LLIKGGVEV | 0.573 | 101 | WB | VP1 | A0201 |
| 323 | GMESQVEEV | 0.550 | 129 | WB | VP1 | A0201 |
| 332 | RVFDGTEQL | 0.550 | 130 | WB | VP1 | A0201 |
| 107 | LLMWEAVTV | 0.769 | 12 | SB | VP1 | A0202 |
| 332 | RVFDGTEQL | 0.681 | 31 | SB | VP1 | A0202 |
| 323 | GMESQVEEV | 0.678 | 32 | SB | VP1 | A0202 |
| 26 | LLIKGGVEV | 0.632 | 53 | WB | VP1 | A0202 |
| 83 | KMLPCYSTA | 0.540 | 145 | WB | VP1 | A0202 |
| 308 | LINRRTQKV | 0.539 | 146 | WB | VP1 | A0202 |
| 61 | NLRGYSQHL | 0.534 | 154 | WB | VP1 | A0202 |
| 127 | NLHAGSQKV | 0.529 | 163 | WB | VP1 | A0202 |
| 43 | AITEVECFL | 0.504 | 213 | WB | VP1 | A0202 |
| 118 | EVIGITSML | 0.480 | 277 | WB | VP1 | A0202 |
| 304 | LLSDLINRR | 0.474 | 295 | WB | VP1 | A0202 |
| 268 | GLFTNSSGT | 0.463 | 333 | WB | VP1 | A0202 |
| 339 | QLPGDPDMI | 0.455 | 363 | WB | VP1 | A0202 |
| 146 | GSNFHFFAV | 0.439 | 430 | WB | VP1 | A0202 |
| 236 | VTNTATTVL | 0.439 | 434 | WB | VP1 | A0202 |
| 107 | LLMWEAVTV | 0.839 | 5 | SB | VP1 | A0203 |
| 308 | LINRRTQKV | 0.820 | 6 | SB | VP1 | A0203 |
| 26 | LLIKGGVEV | 0.818 | 7 | SB | VP1 | A0203 |
| 127 | NLHAGSQKV | 0.786 | 10 | SB | VP1 | A0203 |
| 83 | KMLPCYSTA | 0.761 | 13 | SB | VP1 | A0203 |
| 27 | LIKGGVEVL | 0.623 | 59 | WB | VP1 | A0203 |
| 61 | NLRGYSQHL | 0.616 | 64 | WB | VP1 | A0203 |
| 332 | RVFDGTEQL | 0.609 | 68 | WB | VP1 | A0203 |
| 323 | GMESQVEEV | 0.604 | 72 | WB | VP1 | A0203 |
| 222 | GTYTGGENV | 0.586 | 88 | WB | VP1 | A0203 |
| 258 | SLYVSAADI | 0.570 | 104 | WB | VP1 | A0203 |
| 268 | GLFTNSSGT | 0.535 | 153 | WB | VP1 | A0203 |
| 235 | HVTNTATTV | 0.512 | 195 | WB | VP1 | A0203 |
| 320 | PMYGMESQV | 0.509 | 203 | WB | VP1 | A0203 |
| 125 | MLNLHAGSQ | 0.480 | 277 | WB | VP1 | A0203 |
| 114 | TVKTEVIGI | 0.476 | 288 | WB | VP1 | A0203 |
| 287 | KIRLRKRSV | 0.452 | 374 | WB | VP1 | A0203 |
| 236 | VTNTATTVL | 0.450 | 384 | WB | VP1 | A0203 |
| 107 | LLMWEAVTV | 0.751 | 14 | SB | VP1 | A0204 |
| 26 | LLIKGGVEV | 0.688 | 29 | SB | VP1 | A0204 |
| 323 | GMESQVEEV | 0.648 | 45 | SB | VP1 | A0204 |
| 127 | NLHAGSQKV | 0.613 | 65 | WB | VP1 | A0204 |
| 308 | LINRRTQKV | 0.547 | 133 | WB | VP1 | A0204 |
| 83 | KMLPCYSTA | 0.504 | 214 | WB | VP1 | A0204 |
| 33 | EVLEVKTGV | 0.476 | 289 | WB | VP1 | A0204 |
| 43 | AITEVECFL | 0.428 | 488 | WB | VP1 | A0204 |
| 107 | LLMWEAVTV | 0.865 | 4 | SB | VP1 | A0206 |
| 26 | LLIKGGVEV | 0.808 | 7 | SB | VP1 | A0206 |
| 332 | RVFDGTEQL | 0.797 | 8 | SB | VP1 | A0206 |
| 83 | KMLPCYSTA | 0.723 | 20 | SB | VP1 | A0206 |
| 235 | HVTNTATTV | 0.591 | 83 | WB | VP1 | A0206 |
| 144 | VQGSNFHFF | 0.586 | 88 | WB | VP1 | A0206 |
| 146 | GSNFHFFAV | 0.555 | 123 | WB | VP1 | A0206 |
| 43 | AITEVECFL | 0.542 | 142 | WB | VP1 | A0206 |
| 326 | SQVEEVRVF | 0.472 | 303 | WB | VP1 | A0206 |
| 39 | TGVDAITEV | 0.460 | 344 | WB | VP1 | A0206 |
| 127 | NLHAGSQKV | 0.451 | 378 | WB | VP1 | A0206 |
| 107 | LLMWEAVTV | 0.952 | 1 | SB | VP1 | A0211 |
| 26 | LLIKGGVEV | 0.946 | 1 | SB | VP1 | A0211 |
| 127 | NLHAGSQKV | 0.943 | 1 | SB | VP1 | A0211 |
| 320 | PMYGMESQV | 0.941 | 1 | SB | VP1 | A0211 |
| 332 | RVFDGTEQL | 0.923 | 2 | SB | VP1 | A0211 |
| 83 | KMLPCYSTA | 0.869 | 4 | SB | VP1 | A0211 |
| 43 | AITEVECFL | 0.830 | 6 | SB | VP1 | A0211 |
| 33 | EVLEVKTGV | 0.818 | 7 | SB | VP1 | A0211 |
| 61 | NLRGYSQHL | 0.804 | 8 | SB | VP1 | A0211 |
| 323 | GMESQVEEV | 0.800 | 8 | SB | VP1 | A0211 |
| 308 | LINRRTQKV | 0.688 | 29 | SB | VP1 | A0211 |
| 235 | HVTNTATTV | 0.687 | 29 | SB | VP1 | A0211 |
| 242 | TVLLDEQGV | 0.669 | 35 | SB | VP1 | A0211 |
| 196 | YLDKNNAYP | 0.642 | 48 | SB | VP1 | A0211 |
| 339 | QLPGDPDMI | 0.623 | 59 | WB | VP1 | A0211 |
| 101 | DLTCGNLLM | 0.603 | 73 | WB | VP1 | A0211 |
| 54 | EMGDPDDNL | 0.589 | 85 | WB | VP1 | A0211 |
| 27 | LIKGGVEVL | 0.568 | 107 | WB | VP1 | A0211 |
| 258 | SLYVSAADI | 0.564 | 111 | WB | VP1 | A0211 |
| 176 | TITPKNPTA | 0.543 | 140 | WB | VP1 | A0211 |
| 349 | YIDRQGQLQ | 0.525 | 169 | WB | VP1 | A0211 |
| 222 | GTYTGGENV | 0.521 | 178 | WB | VP1 | A0211 |
| 124 | SMLNLHAGS | 0.494 | 238 | WB | VP1 | A0211 |
| 108 | LMWEAVTVK | 0.489 | 251 | WB | VP1 | A0211 |
| 39 | TGVDAITEV | 0.488 | 253 | WB | VP1 | A0211 |
| 94 | PLPNLNEDL | 0.487 | 256 | WB | VP1 | A0211 |
| 255 | KADSLYVSA | 0.475 | 292 | WB | VP1 | A0211 |
| 118 | EVIGITSML | 0.472 | 304 | WB | VP1 | A0211 |
| 201 | NAYPVECWI | 0.470 | 310 | WB | VP1 | A0211 |
| 106 | NLLMWEAVT | 0.467 | 320 | WB | VP1 | A0211 |
| 268 | GLFTNSSGT | 0.463 | 332 | WB | VP1 | A0211 |
| 244 | LLDEQGVGP | 0.443 | 415 | WB | VP1 | A0211 |
| 26 | LLIKGGVEV | 0.905 | 2 | SB | VP1 | A0212 |
| 107 | LLMWEAVTV | 0.903 | 2 | SB | VP1 | A0212 |
| 127 | NLHAGSQKV | 0.895 | 3 | SB | VP1 | A0212 |
| 320 | PMYGMESQV | 0.883 | 3 | SB | VP1 | A0212 |
| 61 | NLRGYSQHL | 0.837 | 5 | SB | VP1 | A0212 |
| 33 | EVLEVKTGV | 0.810 | 7 | SB | VP1 | A0212 |
| 332 | RVFDGTEQL | 0.768 | 12 | SB | VP1 | A0212 |
| 308 | LINRRTQKV | 0.710 | 23 | SB | VP1 | A0212 |
| 43 | AITEVECFL | 0.696 | 26 | SB | VP1 | A0212 |
| 323 | GMESQVEEV | 0.680 | 31 | SB | VP1 | A0212 |
| 242 | TVLLDEQGV | 0.643 | 47 | SB | VP1 | A0212 |
| 196 | YLDKNNAYP | 0.604 | 72 | WB | VP1 | A0212 |
| 54 | EMGDPDDNL | 0.597 | 78 | WB | VP1 | A0212 |
| 83 | KMLPCYSTA | 0.575 | 99 | WB | VP1 | A0212 |
| 339 | QLPGDPDMI | 0.548 | 132 | WB | VP1 | A0212 |
| 108 | LMWEAVTVK | 0.537 | 149 | WB | VP1 | A0212 |
| 268 | GLFTNSSGT | 0.534 | 155 | WB | VP1 | A0212 |
| 222 | GTYTGGENV | 0.527 | 166 | WB | VP1 | A0212 |
| 27 | LIKGGVEVL | 0.505 | 212 | WB | VP1 | A0212 |
| 124 | SMLNLHAGS | 0.492 | 243 | WB | VP1 | A0212 |
| 244 | LLDEQGVGP | 0.484 | 266 | WB | VP1 | A0212 |
| 164 | VLMNYRTKY | 0.481 | 274 | WB | VP1 | A0212 |
| 94 | PLPNLNEDL | 0.480 | 276 | WB | VP1 | A0212 |
| 235 | HVTNTATTV | 0.457 | 356 | WB | VP1 | A0212 |
| 304 | LLSDLINRR | 0.443 | 414 | WB | VP1 | A0212 |
| 258 | SLYVSAADI | 0.436 | 449 | WB | VP1 | A0212 |
| 349 | YIDRQGQLQ | 0.435 | 452 | WB | VP1 | A0212 |
| 201 | NAYPVECWI | 0.435 | 453 | WB | VP1 | A0212 |
| 26 | LLIKGGVEV | 0.935 | 2 | SB | VP1 | A0216 |
| 320 | PMYGMESQV | 0.926 | 2 | SB | VP1 | A0216 |
| 127 | NLHAGSQKV | 0.887 | 3 | SB | VP1 | A0216 |
| 107 | LLMWEAVTV | 0.872 | 3 | SB | VP1 | A0216 |
| 332 | RVFDGTEQL | 0.838 | 5 | SB | VP1 | A0216 |
| 61 | NLRGYSQHL | 0.835 | 5 | SB | VP1 | A0216 |
| 43 | AITEVECFL | 0.834 | 6 | SB | VP1 | A0216 |
| 323 | GMESQVEEV | 0.826 | 6 | SB | VP1 | A0216 |
| 235 | HVTNTATTV | 0.762 | 13 | SB | VP1 | A0216 |
| 33 | EVLEVKTGV | 0.742 | 16 | SB | VP1 | A0216 |
| 308 | LINRRTQKV | 0.701 | 25 | SB | VP1 | A0216 |
| 83 | KMLPCYSTA | 0.653 | 42 | SB | VP1 | A0216 |
| 54 | EMGDPDDNL | 0.649 | 44 | SB | VP1 | A0216 |
| 201 | NAYPVECWI | 0.593 | 81 | WB | VP1 | A0216 |
| 111 | EAVTVKTEV | 0.540 | 145 | WB | VP1 | A0216 |
| 39 | TGVDAITEV | 0.524 | 171 | WB | VP1 | A0216 |
| 118 | EVIGITSML | 0.513 | 194 | WB | VP1 | A0216 |
| 196 | YLDKNNAYP | 0.512 | 196 | WB | VP1 | A0216 |
| 339 | QLPGDPDMI | 0.491 | 245 | WB | VP1 | A0216 |
| 222 | GTYTGGENV | 0.485 | 262 | WB | VP1 | A0216 |
| 27 | LIKGGVEVL | 0.467 | 318 | WB | VP1 | A0216 |
| 176 | TITPKNPTA | 0.462 | 336 | WB | VP1 | A0216 |
| 94 | PLPNLNEDL | 0.426 | 496 | WB | VP1 | A0216 |
| 127 | NLHAGSQKV | 0.862 | 4 | SB | VP1 | A0219 |
| 107 | LLMWEAVTV | 0.811 | 7 | SB | VP1 | A0219 |
| 320 | PMYGMESQV | 0.786 | 10 | SB | VP1 | A0219 |
| 26 | LLIKGGVEV | 0.776 | 11 | SB | VP1 | A0219 |
| 332 | RVFDGTEQL | 0.762 | 13 | SB | VP1 | A0219 |
| 323 | GMESQVEEV | 0.643 | 47 | SB | VP1 | A0219 |
| 61 | NLRGYSQHL | 0.621 | 60 | WB | VP1 | A0219 |
| 54 | EMGDPDDNL | 0.581 | 93 | WB | VP1 | A0219 |
| 235 | HVTNTATTV | 0.537 | 150 | WB | VP1 | A0219 |
| 33 | EVLEVKTGV | 0.529 | 162 | WB | VP1 | A0219 |
| 308 | LINRRTQKV | 0.528 | 165 | WB | VP1 | A0219 |
| 39 | TGVDAITEV | 0.492 | 242 | WB | VP1 | A0219 |
| 108 | LMWEAVTVK | 0.442 | 417 | WB | VP1 | A0219 |
| 27 | LIKGGVEVL | 0.438 | 437 | WB | VP1 | A0219 |
| 284 | RYFKIRLRK | 0.643 | 47 | SB | VP1 | A0301 |
| 108 | LMWEAVTVK | 0.570 | 104 | WB | VP1 | A0301 |
| 134 | KVHENGGGK | 0.525 | 170 | WB | VP1 | A0301 |
| 164 | VLMNYRTKY | 0.453 | 370 | WB | VP1 | A0301 |
| 163 | GVLMNYRTK | 0.440 | 426 | WB | VP1 | A0301 |
| 163 | GVLMNYRTK | 0.621 | 60 | WB | VP1 | A1101 |
| 186 | SQVMNTDHK | 0.599 | 76 | WB | VP1 | A1101 |
| 284 | RYFKIRLRK | 0.586 | 88 | WB | VP1 | A1101 |
| 276 | TQQWRGLAR | 0.561 | 115 | WB | VP1 | A1101 |
| 134 | KVHENGGGK | 0.556 | 121 | WB | VP1 | A1101 |
| 284 | RYFKIRLRK | 0.724 | 19 | SB | VP1 | A2301 |
| 87 | CYSTARIPL | 0.572 | 102 | WB | VP1 | A2301 |
| 143 | PVQGSNFHF | 0.555 | 123 | WB | VP1 | A2301 |
| 348 | RYIDRQGQL | 0.538 | 147 | WB | VP1 | A2301 |
| 144 | VQGSNFHFF | 0.480 | 277 | WB | VP1 | A2301 |
| 144 | VQGSNFHFF | 0.521 | 178 | WB | VP1 | A2402 |
| 348 | RYIDRQGQL | 0.506 | 210 | WB | VP1 | A2402 |
| 348 | RYIDRQGQL | 0.602 | 73 | WB | VP1 | A2403 |
| 195 | AYLDKNNAY | 0.502 | 218 | WB | VP1 | A2403 |
| 278 | QWRGLARYF | 0.434 | 457 | WB | VP1 | A2403 |
| 118 | EVIGITSML | 0.663 | 38 | SB | VP1 | A2601 |
| 160 | EMQGVLMNY | 0.553 | 126 | WB | VP1 | A2601 |
| 118 | EVIGITSML | 0.898 | 3 | SB | VP1 | A2602 |
| 160 | EMQGVLMNY | 0.659 | 39 | SB | VP1 | A2602 |
| 36 | EVKTGVDAI | 0.584 | 90 | WB | VP1 | A2602 |
| 164 | VLMNYRTKY | 0.620 | 61 | WB | VP1 | A2902 |
| 188 | VMNTDHKAY | 0.535 | 153 | WB | VP1 | A2902 |
| 195 | AYLDKNNAY | 0.524 | 172 | WB | VP1 | A2902 |
| 284 | RYFKIRLRK | 0.812 | 7 | SB | VP1 | A3001 |
| 134 | KVHENGGGK | 0.791 | 9 | SB | VP1 | A3001 |
| 163 | GVLMNYRTK | 0.563 | 113 | WB | VP1 | A3001 |
| 291 | RKRSVKNPY | 0.543 | 141 | WB | VP1 | A3001 |
| 169 | RTKYPQGTI | 0.492 | 243 | WB | VP1 | A3001 |
| 191 | TDHKAYLDK | 0.436 | 444 | WB | VP1 | A3001 |
| 287 | KIRLRKRSV | 0.436 | 446 | WB | VP1 | A3001 |
| 289 | RLRKRSVKN | 0.436 | 447 | WB | VP1 | A3001 |
| 186 | SQVMNTDHK | 0.434 | 455 | WB | VP1 | A3001 |
| 161 | MQGVLMNYR | 0.811 | 7 | SB | VP1 | A3101 |
| 285 | YFKIRLRKR | 0.800 | 8 | SB | VP1 | A3101 |
| 284 | RYFKIRLRK | 0.762 | 13 | SB | VP1 | A3101 |
| 276 | TQQWRGLAR | 0.627 | 56 | WB | VP1 | A3101 |
| 84 | MLPCYSTAR | 0.578 | 95 | WB | VP1 | A3101 |
| 304 | LLSDLINRR | 0.573 | 101 | WB | VP1 | A3101 |
| 281 | GLARYFKIR | 0.520 | 180 | WB | VP1 | A3101 |
| 108 | LMWEAVTVK | 0.502 | 219 | WB | VP1 | A3101 |
| 303 | FLLSDLINR | 0.441 | 422 | WB | VP1 | A3101 |
| 285 | YFKIRLRKR | 0.782 | 10 | SB | VP1 | A3301 |
| 307 | DLINRRTQK | 0.659 | 39 | SB | VP1 | A3301 |
| 272 | NSSGTQQWR | 0.732 | 18 | SB | VP1 | A6801 |
| 84 | MLPCYSTAR | 0.720 | 20 | SB | VP1 | A6801 |
| 307 | DLINRRTQK | 0.593 | 81 | WB | VP1 | A6801 |
| 324 | MESQVEEVR | 0.548 | 132 | WB | VP1 | A6801 |
| 304 | LLSDLINRR | 0.543 | 140 | WB | VP1 | A6801 |
| 118 | EVIGITSML | 0.509 | 202 | WB | VP1 | A6801 |
| 161 | MQGVLMNYR | 0.437 | 442 | WB | VP1 | A6801 |
| 284 | RYFKIRLRK | 0.437 | 444 | WB | VP1 | A6801 |
| 118 | EVIGITSML | 0.903 | 2 | SB | VP1 | A6802 |
| 111 | EAVTVKTEV | 0.739 | 16 | SB | VP1 | A6802 |
| 33 | EVLEVKTGV | 0.728 | 18 | SB | VP1 | A6802 |
| 39 | TGVDAITEV | 0.683 | 30 | SB | VP1 | A6802 |
| 297 | NPYPISFLL | 0.632 | 53 | WB | VP1 | A6802 |
| 332 | RVFDGTEQL | 0.578 | 95 | WB | VP1 | A6802 |
| 145 | QGSNFHFFA | 0.563 | 113 | WB | VP1 | A6802 |
| 201 | NAYPVECWI | 0.556 | 121 | WB | VP1 | A6802 |
| 187 | QVMNTDHKA | 0.527 | 167 | WB | VP1 | A6802 |
| 146 | GSNFHFFAV | 0.497 | 231 | WB | VP1 | A6802 |
| 293 | RSVKNPYPI | 0.457 | 357 | WB | VP1 | A6802 |
| 261 | VSAADICGL | 0.455 | 364 | WB | VP1 | A6802 |
| 235 | HVTNTATTV | 0.444 | 410 | WB | VP1 | A6802 |
| 229 | NVPPVLHVT | 0.441 | 422 | WB | VP1 | A6802 |
| 297 | NPYPISFLL | 0.673 | 34 | SB | VP1 | A6901 |
| 118 | EVIGITSML | 0.636 | 51 | WB | VP1 | A6901 |
| 235 | HVTNTATTV | 0.546 | 136 | WB | VP1 | A6901 |
| 107 | LLMWEAVTV | 0.499 | 225 | WB | VP1 | A6901 |
| 201 | NAYPVECWI | 0.485 | 262 | WB | VP1 | A6901 |
| 111 | EAVTVKTEV | 0.483 | 268 | WB | VP1 | A6901 |
| 225 | TGGENVPPV | 0.469 | 311 | WB | VP1 | A6901 |
| 222 | GTYTGGENV | 0.437 | 440 | WB | VP1 | A6901 |
| 127 | NLHAGSQKV | 0.433 | 463 | WB | VP1 | A6901 |
| 332 | RVFDGTEQL | 0.430 | 474 | WB | VP1 | A6901 |
| 85 | LPCYSTARI | 0.692 | 28 | SB | VP1 | B0702 |
| 13 | APKKPKEPV | 0.688 | 29 | SB | VP1 | B0702 |
| 1 | APTKRKGEC | 0.619 | 61 | WB | VP1 | B0702 |
| 282 | LARYFKIRL | 0.535 | 153 | WB | VP1 | B0702 |
| 287 | KIRLRKRSV | 0.520 | 179 | WB | VP1 | B0702 |
| 181 | NPTAQSQVM | 0.498 | 227 | WB | VP1 | B0702 |
| 79 | SPDRKMLPC | 0.482 | 272 | WB | VP1 | B0702 |
| 19 | EPVQVPKLL | 0.474 | 295 | WB | VP1 | B0702 |
| 251 | GPLCKADSL | 0.455 | 364 | WB | VP1 | B0702 |
| 287 | KIRLRKRSV | 0.431 | 472 | WB | VP1 | B0801 |
| 326 | SQVEEVRVF | 0.598 | 77 | WB | VP1 | B1501 |
| 188 | VMNTDHKAY | 0.589 | 85 | WB | VP1 | B1501 |
| 313 | TQKVDGQPM | 0.566 | 108 | WB | VP1 | B1501 |
| 277 | QQWRGLARY | 0.543 | 140 | WB | VP1 | B1501 |
| 160 | EMQGVLMNY | 0.456 | 360 | WB | VP1 | B1501 |
| 295 | VKNPYPISF | 0.595 | 79 | WB | VP1 | B1801 |
| 117 | TEVIGITSM | 0.472 | 303 | WB | VP1 | B1801 |
| 288 | IRLRKRSVK | 0.523 | 174 | WB | VP1 | B2705 |
| 279 | WRGLARYFK | 0.486 | 259 | WB | VP1 | B2705 |
| 181 | NPTAQSQVM | 0.758 | 13 | SB | VP1 | B3501 |
| 57 | DPDDNLRGY | 0.613 | 65 | WB | VP1 | B3501 |
| 157 | DPLEMQGVL | 0.577 | 97 | WB | VP1 | B3501 |
| 142 | KPVQGSNFH | 0.574 | 99 | WB | VP1 | B3501 |
| 297 | NPYPISFLL | 0.568 | 107 | WB | VP1 | B3501 |
| 151 | FFAVGGDPL | 0.565 | 110 | WB | VP1 | B3501 |
| 67 | QHLSAENAF | 0.495 | 235 | WB | VP1 | B3501 |
| 203 | YPVECWIPD | 0.491 | 247 | WB | VP1 | B3501 |
| 19 | EPVQVPKLL | 0.475 | 292 | WB | VP1 | B3501 |
| 42 | DAITEVECF | 0.468 | 317 | WB | VP1 | B3501 |
| 95 | LPNLNEDLT | 0.441 | 424 | WB | VP1 | B3501 |
| 136 | HENGGGKPV | 0.448 | 391 | WB | VP1 | B4001 |
| 47 | VECFLNPEM | 0.431 | 469 | WB | VP1 | B4001 |
| 71 | AENAFESDS | 0.600 | 75 | WB | VP1 | B4501 |
| 85 | LPCYSTARI | 0.659 | 39 | SB | VP1 | B5101 |
| 19 | EPVQVPKLL | 0.475 | 292 | WB | VP1 | B5101 |
| 297 | NPYPISFLL | 0.459 | 350 | WB | VP1 | B5101 |
| 85 | LPCYSTARI | 0.655 | 41 | SB | VP1 | B5301 |
| 297 | NPYPISFLL | 0.623 | 59 | WB | VP1 | B5301 |
| 19 | EPVQVPKLL | 0.535 | 152 | WB | VP1 | B5301 |
| 95 | LPNLNEDLT | 0.636 | 51 | WB | VP1 | B5401 |
| 85 | LPCYSTARI | 0.591 | 83 | WB | VP1 | B5401 |
| 203 | YPVECWIPD | 0.481 | 273 | WB | VP1 | B5401 |
| 299 | YPISFLLSD | 0.435 | 452 | WB | VP1 | B5401 |
| 102 | LTCGNLLMW | 0.453 | 371 | WB | VP1 | B5701 |
| 102 | LTCGNLLMW | 0.624 | 58 | WB | VP1 | B5801 |

10-mers

| | | | | | | |
|---|---|---|---|---|---|---|
| 196 | YLDKNNAYPV | 0.866 | 4 | SB | VP1 | A0201 |
| 108 | LMWEAVTVKT | 0.691 | 28 | SB | VP1 | A0201 |
| 84 | MLPCYSTARI | 0.675 | 33 | SB | VP1 | A0201 |
| 106 | NLLMWEAVTV | 0.634 | 52 | WB | VP1 | A0201 |
| 224 | YTGGENVPPV | 0.608 | 69 | WB | VP1 | A0201 |
| 260 | YVSAADICGL | 0.589 | 85 | WB | VP1 | A0201 |
| 244 | LLDEQGVGPL | 0.537 | 150 | WB | VP1 | A0201 |
| 25 | KLLIKGGVEV | 0.517 | 185 | WB | VP1 | A0201 |
| 188 | VMNTDHKAYL | 0.504 | 214 | WB | VP1 | A0201 |
| 281 | GLARYFKIRL | 0.482 | 271 | WB | VP1 | A0201 |
| 322 | YGMESQVEEV | 0.465 | 325 | WB | VP1 | A0201 |
| 26 | LLIKGGVEVL | 0.465 | 328 | WB | VP1 | A0201 |
| 196 | YLDKNNAYPV | 0.722 | 20 | SB | VP1 | A0202 |
| 260 | YVSAADICGL | 0.676 | 33 | SB | VP1 | A0202 |
| 244 | LLDEQGVGPL | 0.652 | 43 | SB | VP1 | A0202 |
| 26 | LLIKGGVEVL | 0.621 | 60 | WB | VP1 | A0202 |
| 188 | VMNTDHKAYL | 0.613 | 66 | WB | VP1 | A0202 |
| 84 | MLPCYSTARI | 0.604 | 72 | WB | VP1 | A0202 |
| 106 | NLLMWEAVTV | 0.571 | 104 | WB | VP1 | A0202 |
| 224 | YTGGENVPPV | 0.554 | 124 | WB | VP1 | A0202 |
| 281 | GLARYFKIRL | 0.520 | 179 | WB | VP1 | A0202 |
| 303 | FLLSDLINRR | 0.495 | 236 | WB | VP1 | A0202 |
| 304 | LLSDLINRRT | 0.487 | 257 | WB | VP1 | A0202 |
| 322 | YGMESQVEEV | 0.470 | 308 | WB | VP1 | A0202 |
| 25 | KLLIKGGVEV | 0.462 | 338 | WB | VP1 | A0202 |
| 38 | KTGVDAITEV | 0.453 | 372 | WB | VP1 | A0202 |
| 255 | KADSLYVSAA | 0.442 | 419 | WB | VP1 | A0202 |
| 84 | MLPCYSTARI | 0.854 | 4 | SB | VP1 | A0203 |
| 196 | YLDKNNAYPV | 0.801 | 8 | SB | VP1 | A0203 |
| 244 | LLDEQGVGPL | 0.704 | 24 | SB | VP1 | A0203 |
| 188 | VMNTDHKAYL | 0.702 | 25 | SB | VP1 | A0203 |
| 26 | LLIKGGVEVL | 0.663 | 38 | SB | VP1 | A0203 |
| 106 | NLLMWEAVTV | 0.660 | 39 | SB | VP1 | A0203 |
| 224 | YTGGENVPPV | 0.611 | 67 | WB | VP1 | A0203 |
| 260 | YVSAADICGL | 0.606 | 70 | WB | VP1 | A0203 |
| 25 | KLLIKGGVEV | 0.596 | 79 | WB | VP1 | A0203 |
| 281 | GLARYFKIRL | 0.590 | 84 | WB | VP1 | A0203 |
| 304 | LLSDLINRRT | 0.530 | 162 | WB | VP1 | A0203 |
| 108 | LMWEAVTVKT | 0.467 | 319 | WB | VP1 | A0203 |
| 233 | VLHVTNTATT | 0.462 | 338 | WB | VP1 | A0203 |
| 352 | RQGQLQTKMV | 0.448 | 391 | WB | VP1 | A0203 |
| 236 | VTNTATTVLL | 0.446 | 399 | WB | VP1 | A0203 |
| 38 | KTGVDAITEV | 0.441 | 424 | WB | VP1 | A0203 |
| 307 | DLINRRTQKV | 0.438 | 437 | WB | VP1 | A0203 |
| 196 | YLDKNNAYPV | 0.658 | 40 | SB | VP1 | A0204 |
| 25 | KLLIKGGVEV | 0.650 | 44 | SB | VP1 | A0204 |
| 244 | LLDEQGVGPL | 0.598 | 77 | WB | VP1 | A0204 |
| 224 | YTGGENVPPV | 0.596 | 78 | WB | VP1 | A0204 |
| 108 | LMWEAVTVKT | 0.548 | 133 | WB | VP1 | A0204 |
| 106 | NLLMWEAVTV | 0.541 | 142 | WB | VP1 | A0204 |
| 38 | KTGVDAITEV | 0.517 | 185 | WB | VP1 | A0204 |
| 322 | YGMESQVEEV | 0.499 | 226 | WB | VP1 | A0204 |
| 188 | VMNTDHKAYL | 0.473 | 299 | WB | VP1 | A0204 |
| 26 | LLIKGGVEVL | 0.468 | 315 | WB | VP1 | A0204 |
| 89 | STARIPLPNL | 0.433 | 459 | WB | VP1 | A0204 |
| 196 | YLDKNNAYPV | 0.873 | 3 | SB | VP1 | A0206 |
| 144 | VQGSNFHFFA | 0.733 | 17 | SB | VP1 | A0206 |
| 106 | NLLMWEAVTV | 0.694 | 27 | SB | VP1 | A0206 |
| 260 | YVSAADICGL | 0.677 | 32 | SB | VP1 | A0206 |
| 84 | MLPCYSTARI | 0.671 | 35 | SB | VP1 | A0206 |
| 244 | LLDEQGVGPL | 0.637 | 50 | WB | VP1 | A0206 |
| 224 | YTGGENVPPV | 0.606 | 71 | WB | VP1 | A0206 |
| 38 | KTGVDAITEV | 0.590 | 84 | WB | VP1 | A0206 |
| 25 | KLLIKGGVEV | 0.588 | 86 | WB | VP1 | A0206 |
| 186 | SQVMNTDHKA | 0.588 | 86 | WB | VP1 | A0206 |
| 352 | RQGQLQTKMV | 0.559 | 118 | WB | VP1 | A0206 |
| 152 | FAVGGDPLEM | 0.550 | 129 | WB | VP1 | A0206 |
| 26 | LLIKGGVEVL | 0.549 | 131 | WB | VP1 | A0206 |
| 322 | YGMESQVEEV | 0.514 | 191 | WB | VP1 | A0206 |
| 277 | QQWRGLARYF | 0.509 | 202 | WB | VP1 | A0206 |
| 108 | LMWEAVTVKT | 0.503 | 216 | WB | VP1 | A0206 |
| 161 | MQGVLMNYRT | 0.428 | 486 | WB | VP1 | A0206 |
| 196 | YLDKNNAYPV | 0.976 | 1 | SB | VP1 | A0211 |
| 106 | NLLMWEAVTV | 0.926 | 2 | SB | VP1 | A0211 |
| 244 | LLDEQGVGPL | 0.906 | 2 | SB | VP1 | A0211 |
| 25 | KLLIKGGVEV | 0.849 | 5 | SB | VP1 | A0211 |
| 26 | LLIKGGVEVL | 0.843 | 5 | SB | VP1 | A0211 |
| 224 | YTGGENVPPV | 0.820 | 7 | SB | VP1 | A0211 |
| 281 | GLARYFKIRL | 0.817 | 7 | SB | VP1 | A0211 |
| 252 | PLCKADSLYV | 0.801 | 8 | SB | VP1 | A0211 |
| 188 | VMNTDHKAYL | 0.798 | 8 | SB | VP1 | A0211 |
| 84 | MLPCYSTARI | 0.773 | 11 | SB | VP1 | A0211 |
| 307 | DLINRRTQKV | 0.751 | 14 | SB | VP1 | A0211 |
| 108 | LMWEAVTVKT | 0.740 | 16 | SB | VP1 | A0211 |
| 260 | YVSAADICGL | 0.693 | 27 | SB | VP1 | A0211 |
| 349 | YIDRQGQLQT | 0.652 | 43 | SB | VP1 | A0211 |
| 304 | LLSDLINRRT | 0.628 | 55 | WB | VP1 | A0211 |
| 322 | YGMESQVEEV | 0.608 | 69 | WB | VP1 | A0211 |
| 155 | GGDPLEMQGV | 0.597 | 78 | WB | VP1 | A0211 |
| 315 | KVDGQPMYGM | 0.593 | 82 | WB | VP1 | A0211 |
| 124 | SMLNLHAGSQ | 0.578 | 96 | WB | VP1 | A0211 |
| 38 | KTGVDAITEV | 0.533 | 156 | WB | VP1 | A0211 |
| 268 | GLFTNSSGTQ | 0.499 | 226 | WB | VP1 | A0211 |
| 243 | VLLDEQGVGP | 0.427 | 494 | WB | VP1 | A0211 |
| 196 | YLDKNNAYPV | 0.940 | 1 | SB | VP1 | A0212 |
| 106 | NLLMWEAVTV | 0.863 | 4 | SB | VP1 | A0212 |
| 26 | LLIKGGVEVL | 0.799 | 8 | SB | VP1 | A0212 |
| 244 | LLDEQGVGPL | 0.763 | 12 | SB | VP1 | A0212 |
| 281 | GLARYFKIRL | 0.762 | 13 | SB | VP1 | A0212 |
| 224 | YTGGENVPPV | 0.734 | 17 | SB | VP1 | A0212 |
| 188 | VMNTDHKAYL | 0.728 | 19 | SB | VP1 | A0212 |
| 108 | LMWEAVTVKT | 0.718 | 21 | SB | VP1 | A0212 |
| 25 | KLLIKGGVEV | 0.705 | 24 | SB | VP1 | A0212 |
| 84 | MLPCYSTARI | 0.659 | 40 | SB | VP1 | A0212 |
| 260 | YVSAADICGL | 0.646 | 46 | SB | VP1 | A0212 |
| 307 | DLINRRTQKV | 0.625 | 57 | WB | VP1 | A0212 |
| 252 | PLCKADSLYV | 0.620 | 60 | WB | VP1 | A0212 |
| 304 | LLSDLINRRT | 0.541 | 143 | WB | VP1 | A0212 |
| 349 | YIDRQGQLQT | 0.533 | 157 | WB | VP1 | A0212 |
| 155 | GGDPLEMQGV | 0.513 | 195 | WB | VP1 | A0212 |
| 243 | VLLDEQGVGP | 0.504 | 213 | WB | VP1 | A0212 |
| 303 | FLLSDLINRR | 0.481 | 274 | WB | VP1 | A0212 |
| 322 | YGMESQVEEV | 0.474 | 297 | WB | VP1 | A0212 |
| 124 | SMLNLHAGSQ | 0.430 | 477 | WB | VP1 | A0212 |
| 196 | YLDKNNAYPV | 0.945 | 1 | SB | VP1 | A0216 |
| 106 | NLLMWEAVTV | 0.882 | 3 | SB | VP1 | A0216 |
| 252 | PLCKADSLYV | 0.866 | 4 | SB | VP1 | A0216 |
| 281 | GLARYFKIRL | 0.844 | 5 | SB | VP1 | A0216 |
| 307 | DLINRRTQKV | 0.820 | 7 | SB | VP1 | A0216 |
| 26 | LLIKGGVEVL | 0.800 | 8 | SB | VP1 | A0216 |
| 25 | KLLIKGGVEV | 0.779 | 10 | SB | VP1 | A0216 |
| 244 | LLDEQGVGPL | 0.740 | 16 | SB | VP1 | A0216 |
| 224 | YTGGENVPPV | 0.726 | 19 | SB | VP1 | A0216 |
| 84 | MLPCYSTARI | 0.723 | 19 | SB | VP1 | A0216 |
| 188 | VMNTDHKAYL | 0.662 | 38 | SB | VP1 | A0216 |
| 108 | LMWEAVTVKT | 0.606 | 70 | WB | VP1 | A0216 |
| 260 | YVSAADICGL | 0.545 | 136 | WB | VP1 | A0216 |
| 38 | KTGVDAITEV | 0.510 | 199 | WB | VP1 | A0216 |
| 304 | LLSDLINRRT | 0.477 | 285 | WB | VP1 | A0216 |
| 349 | YIDRQGQLQT | 0.470 | 309 | WB | VP1 | A0216 |
| 28 | IKGGVEVLEV | 0.430 | 478 | WB | VP1 | A0216 |
| 196 | YLDKNNAYPV | 0.940 | 1 | SB | VP1 | A0219 |
| 106 | NLLMWEAVTV | 0.763 | 12 | SB | VP1 | A0219 |
| 224 | YTGGENVPPV | 0.678 | 32 | SB | VP1 | A0219 |
| 26 | LLIKGGVEVL | 0.671 | 35 | SB | VP1 | A0219 |
| 260 | YVSAADICGL | 0.656 | 41 | SB | VP1 | A0219 |
| 244 | LLDEQGVGPL | 0.644 | 46 | SB | VP1 | A0219 |
| 108 | LMWEAVTVKT | 0.615 | 64 | WB | VP1 | A0219 |
| 188 | VMNTDHKAYL | 0.555 | 122 | WB | VP1 | A0219 |
| 84 | MLPCYSTARI | 0.508 | 204 | WB | VP1 | A0219 |
| 322 | YGMESQVEEV | 0.492 | 243 | WB | VP1 | A0219 |
| 252 | PLCKADSLYV | 0.482 | 270 | WB | VP1 | A0219 |
| 307 | DLINRRTQKV | 0.457 | 354 | WB | VP1 | A0219 |
| 25 | KLLIKGGVEV | 0.429 | 484 | WB | VP1 | A0219 |
| 107 | LLMWEAVTVK | 0.689 | 28 | SB | VP1 | A0301 |
| 283 | ARYFKIRLRK | 0.645 | 46 | SB | VP1 | A0301 |
| 287 | KIRLRKRSVK | 0.641 | 48 | SB | VP1 | A0301 |
| 83 | KMLPCYSTAR | 0.532 | 157 | WB | VP1 | A0301 |
| 171 | KYPQGTITPK | 0.503 | 216 | WB | VP1 | A0301 |
| 278 | QWRGLARYFK | 0.449 | 387 | WB | VP1 | A0301 |
| 190 | NTDHKAYLDK | 0.449 | 388 | WB | VP1 | A0301 |
| 125 | MLNLHAGSQK | 0.679 | 32 | SB | VP1 | A1101 |
| 275 | GTQQWRGLAR | 0.611 | 67 | WB | VP1 | A1101 |
| 107 | LLMWEAVTVK | 0.606 | 70 | WB | VP1 | A1101 |
| 185 | QSQVMNTDHK | 0.571 | 103 | WB | VP1 | A1101 |
| 20 | PVQVPKLLIK | 0.498 | 228 | WB | VP1 | A1101 |
| 190 | NTDHKAYLDK | 0.491 | 247 | WB | VP1 | A1101 |
| 83 | KMLPCYSTAR | 0.430 | 478 | WB | VP1 | A1101 |
| 143 | PVQGSNFHFF | 0.511 | 199 | WB | VP1 | A2301 |
| 171 | KYPQGTITPK | 0.457 | 356 | WB | VP1 | A2301 |
| 284 | RYFKIRLRKR | 0.441 | 423 | WB | VP1 | A2301 |
| 187 | QVMNTDHKAY | 0.752 | 14 | SB | VP1 | A2602 |
| 46 | EVECFLNPEM | 0.733 | 17 | SB | VP1 | A2602 |
| 315 | KVDGQPMYGM | 0.715 | 21 | SB | VP1 | A2602 |
| 294 | SVKNPYPISF | 0.643 | 47 | SB | VP1 | A2602 |
| 89 | STARIPLPNL | 0.602 | 74 | WB | VP1 | A2602 |
| 143 | PVQGSNFHFF | 0.581 | 92 | WB | VP1 | A2602 |
| 260 | YVSAADICGL | 0.510 | 201 | WB | VP1 | A2602 |
| 116 | KTEVIGITSM | 0.460 | 343 | WB | VP1 | A2602 |
| 187 | QVMNTDHKAY | 0.558 | 119 | WB | VP1 | A2902 |
| 163 | GVLMNYRTKY | 0.462 | 337 | WB | VP1 | A2902 |
| 287 | KIRLRKRSVK | 0.842 | 5 | SB | VP1 | A3001 |
| 278 | QWRGLARYFK | 0.767 | 12 | SB | VP1 | A3001 |
| 6 | KGECPGAAPK | 0.695 | 27 | SB | VP1 | A3001 |
| 16 | KPKEPVQVPK | 0.691 | 28 | SB | VP1 | A3001 |
| 171 | KYPQGTITPK | 0.665 | 37 | SB | VP1 | A3001 |
| 125 | MLNLHAGSQK | 0.599 | 76 | WB | VP1 | A3001 |
| 185 | QSQVMNTDHK | 0.499 | 225 | WB | VP1 | A3001 |
| 83 | KMLPCYSTAR | 0.463 | 333 | WB | VP1 | A3001 |
| 282 | LARYFKIRLR | 0.426 | 496 | WB | VP1 | A3001 |
| 284 | RYFKIRLRKR | 0.859 | 4 | SB | VP1 | A3101 |
| 83 | KMLPCYSTAR | 0.777 | 11 | SB | VP1 | A3101 |
| 282 | LARYFKIRLR | 0.689 | 28 | SB | VP1 | A3101 |
| 287 | KIRLRKRSVK | 0.682 | 31 | SB | VP1 | A3101 |
| 160 | EMQGVLMNYR | 0.668 | 36 | SB | VP1 | A3101 |
| 278 | QWRGLARYFK | 0.657 | 40 | SB | VP1 | A3101 |
| 275 | GTQQWRGLAR | 0.580 | 93 | WB | VP1 | A3101 |
| 283 | ARYFKIRLRK | 0.575 | 99 | WB | VP1 | A3101 |
| 302 | SFLLSDLINR | 0.565 | 110 | WB | VP1 | A3101 |
| 160 | EMQGVLMNYR | 0.552 | 127 | WB | VP1 | A3301 |
| 302 | SFLLSDLINR | 0.464 | 328 | WB | VP1 | A3301 |
| 282 | LARYFKIRLR | 0.443 | 412 | WB | VP1 | A3301 |
| 284 | RYFKIRLRKR | 0.438 | 439 | WB | VP1 | A3301 |
| 73 | NAFESDSPDR | 0.798 | 8 | SB | VP1 | A6801 |
| 160 | EMQGVLMNYR | 0.747 | 15 | SB | VP1 | A6801 |
| 125 | MLNLHAGSQK | 0.647 | 45 | SB | VP1 | A6801 |
| 282 | LARYFKIRLR | 0.540 | 145 | WB | VP1 | A6801 |
| 271 | TNSSGTQQWR | 0.508 | 205 | WB | VP1 | A6801 |
| 107 | LLMWEAVTVK | 0.504 | 213 | WB | VP1 | A6801 |
| 118 | EVIGITSMLN | 0.492 | 243 | WB | VP1 | A6801 |
| 54 | EMGDPDDNLR | 0.481 | 275 | WB | VP1 | A6801 |
| 185 | QSQVMNTDHK | 0.480 | 278 | WB | VP1 | A6801 |
| 303 | FLLSDLINRR | 0.453 | 372 | WB | VP1 | A6801 |
| 275 | GTQQWRGLAR | 0.443 | 413 | WB | VP1 | A6801 |
| 145 | QGSNFHFFAV | 0.746 | 15 | SB | VP1 | A6802 |
| 241 | TTVLLDEQGV | 0.705 | 24 | SB | VP1 | A6802 |
| 260 | YVSAADICGL | 0.681 | 31 | SB | VP1 | A6802 |
| 84 | MLPCYSTARI | 0.661 | 39 | SB | VP1 | A6802 |
| 89 | STARIPLPNL | 0.658 | 40 | SB | VP1 | A6802 |
| 111 | EAVTVKTEVI | 0.641 | 48 | SB | VP1 | A6802 |
| 322 | YGMESQVEEV | 0.619 | 61 | WB | VP1 | A6802 |
| 224 | YTGGENVPPV | 0.529 | 163 | WB | VP1 | A6802 |
| 104 | CGNLLMWEAV | 0.498 | 228 | WB | VP1 | A6802 |
| 200 | NNAYPVECWI | 0.458 | 354 | WB | VP1 | A6802 |
| 42 | DAITEVECFL | 0.447 | 397 | WB | VP1 | A6802 |
| 319 | QPMYGMESQV | 0.444 | 411 | WB | VP1 | A6802 |
| 224 | YTGGENVPPV | 0.750 | 14 | SB | VP1 | A6901 |
| 196 | YLDKNNAYPV | 0.662 | 38 | SB | VP1 | A6901 |
| 89 | STARIPLPNL | 0.596 | 79 | WB | VP1 | A6901 |
| 106 | NLLMWEAVTV | 0.558 | 119 | WB | VP1 | A6901 |
| 322 | YGMESQVEEV | 0.518 | 184 | WB | VP1 | A6901 |
| 46 | EVECFLNPEM | 0.482 | 271 | WB | VP1 | A6901 |
| 19 | EPVQVPKLLI | 0.478 | 283 | WB | VP1 | A6901 |
| 319 | QPMYGMESQV | 0.476 | 289 | WB | VP1 | A6901 |
| 157 | DPLEMQGVLM | 0.439 | 432 | WB | VP1 | A6901 |
| 142 | KPVQGSNFHF | 0.666 | 37 | SB | VP1 | B0702 |
| 299 | YPISFLLSDL | 0.604 | 72 | WB | VP1 | B0702 |
| 235 | HVTNTATTVL | 0.525 | 170 | WB | VP1 | B0702 |
| 319 | QPMYGMESQV | 0.457 | 357 | WB | VP1 | B0702 |
| 93 | IPLPNLNEDL | 0.429 | 484 | WB | VP1 | B0702 |
| 66 | SQHLSAENAF | 0.595 | 79 | WB | VP1 | B1501 |
| 313 | TQKVDGQPMY | 0.589 | 85 | WB | VP1 | B1501 |
| 187 | QVMNTDHKAY | 0.570 | 104 | WB | VP1 | B1501 |
| 277 | QQWRGLARYF | 0.566 | 109 | WB | VP1 | B1501 |
| 276 | TQQWRGLARY | 0.565 | 110 | WB | VP1 | B1501 |
| 294 | SVKNPYPISF | 0.507 | 207 | WB | VP1 | B1501 |
| 194 | KAYLDKNNAY | 0.474 | 297 | WB | VP1 | B1501 |
| 261 | VSAADICGLF | 0.433 | 461 | WB | VP1 | B1501 |
| 26 | LLIKGGVEVL | 0.430 | 478 | WB | VP1 | B1501 |
| 159 | LEMQGVLMNY | 0.712 | 22 | SB | VP1 | B1801 |
| 117 | TEVIGITSML | 0.548 | 133 | WB | VP1 | B1801 |
| 215 | NENTRYFGTY | 0.514 | 192 | WB | VP1 | B1801 |
| 110 | WEAVTVKTEV | 0.509 | 202 | WB | VP1 | B1801 |
| 32 | VEVLEVKTGV | 0.462 | 335 | WB | VP1 | B1801 |
| 283 | ARYFKIRLRK | 0.558 | 119 | WB | VP1 | B2705 |
| 152 | FAVGGDPLEM | 0.756 | 13 | SB | VP1 | B3501 |
| 157 | DPLEMQGVLM | 0.715 | 21 | SB | VP1 | B3501 |
| 211 | DPSRNENTRY | 0.683 | 30 | SB | VP1 | B3501 |
| 340 | LPGDPDMIRY | 0.676 | 33 | SB | VP1 | B3501 |
| 142 | KPVQGSNFHF | 0.645 | 46 | SB | VP1 | B3501 |
| 187 | QVMNTDHKAY | 0.604 | 72 | WB | VP1 | B3501 |
| 194 | KAYLDKNNAY | 0.600 | 75 | WB | VP1 | B3501 |
| 299 | YPISFLLSDL | 0.560 | 117 | WB | VP1 | B3501 |
| 46 | EVECFLNPEM | 0.533 | 156 | WB | VP1 | B3501 |
| 79 | SPDRKMLPCY | 0.513 | 194 | WB | VP1 | B3501 |
| 95 | LPNLNEDLTC | 0.454 | 367 | WB | VP1 | B3501 |
| 251 | GPLCKADSLY | 0.435 | 453 | WB | VP1 | B3501 |
| 117 | TEVIGITSML | 0.570 | 104 | WB | VP1 | B4001 |
| 324 | MESQVEEVRV | 0.475 | 293 | WB | VP1 | B4001 |
| 53 | PEMGDPDDNL | 0.473 | 298 | WB | VP1 | B4001 |
| 99 | NEDLTCGNLL | 0.471 | 304 | WB | VP1 | B4001 |
| 110 | WEAVTVKTEV | 0.428 | 488 | WB | VP1 | B4001 |
| 215 | NENTRYFGTY | 0.430 | 476 | WB | VP1 | B4402 |
| 71 | AENAFESDSP | 0.495 | 235 | WB | VP1 | B4501 |
| 19 | EPVQVPKLLI | 0.654 | 42 | SB | VP1 | B5101 |
| 299 | YPISFLLSDL | 0.557 | 120 | WB | VP1 | B5101 |
| 19 | EPVQVPKLLI | 0.658 | 40 | SB | VP1 | B5301 |
| 299 | YPISFLLSDL | 0.604 | 72 | WB | VP1 | B5301 |
| 142 | KPVQGSNFHF | 0.531 | 159 | WB | VP1 | B5301 |
| 340 | LPGDPDMIRY | 0.523 | 174 | WB | VP1 | B5301 |
| 79 | SPDRKMLPCY | 0.468 | 315 | WB | VP1 | B5301 |
| 211 | DPSRNENTRY | 0.468 | 316 | WB | VP1 | B5301 |
| 23 | VPKLLIKGGV | 0.607 | 70 | WB | VP1 | B5401 |
| 231 | PPVLHVTNTA | 0.590 | 84 | WB | VP1 | B5401 |
| 85 | LPCYSTARIP | 0.533 | 157 | WB | VP1 | B5401 |
| 19 | EPVQVPKLLI | 0.463 | 332 | WB | VP1 | B5401 |
| 203 | YPVECWIPDP | 0.456 | 358 | WB | VP1 | B5401 |
| 270 | FTNSSGTQQW | 0.478 | 285 | WB | VP1 | B5701 |
| 270 | FTNSSGTQQW | 0.738 | 16 | SB | VP1 | B5801 |
| 199 | KNNAYPVECW | 0.634 | 52 | WB | VP1 | B5801 |
| 261 | VSAADICGLF | 0.458 | 351 | WB | VP1 | B5801 |

11-mers

| | | | | | | |
|---|---|---|---|---|---|---|
| 83 | KMLPCYSTARI | 0.778 | 11 | SB | VP1 | A0201 |
| 107 | LLMWEAVTVKT | 0.594 | 80 | WB | VP1 | A0201 |
| 243 | VLLDEQGVGPL | 0.577 | 97 | WB | VP1 | A0201 |
| 303 | FLLSDLINRRT | 0.551 | 129 | WB | VP1 | A0201 |
| 233 | VLHVTNTATTV | 0.497 | 230 | WB | VP1 | A0201 |
| 144 | VQGSNFHFFAV | 0.461 | 342 | WB | VP1 | A0201 |
| 125 | MLNLHAGSQKV | 0.459 | 348 | WB | VP1 | A0201 |
| 187 | QVMNTDHKAYL | 0.444 | 407 | WB | VP1 | A0201 |
| 323 | GMESQVEEVRV | 0.434 | 458 | WB | VP1 | A0201 |
| 125 | MLNLHAGSQKV | 0.757 | 13 | SB | VP1 | A0202 |
| 97 | NLNEDLTCGNL | 0.678 | 32 | SB | VP1 | A0202 |
| 243 | VLLDEQGVGPL | 0.618 | 62 | WB | VP1 | A0202 |
| 83 | KMLPCYSTARI | 0.597 | 78 | WB | VP1 | A0202 |
| 107 | LLMWEAVTVKT | 0.592 | 82 | WB | VP1 | A0202 |
| 323 | GMESQVEEVRV | 0.558 | 119 | WB | VP1 | A0202 |
| 144 | VQGSNFHFFAV | 0.548 | 133 | WB | VP1 | A0202 |
| 233 | VLHVTNTATTV | 0.506 | 209 | WB | VP1 | A0202 |
| 187 | QVMNTDHKAYL | 0.482 | 270 | WB | VP1 | A0202 |
| 303 | FLLSDLINRRT | 0.438 | 436 | WB | VP1 | A0202 |
| 125 | MLNLHAGSQKV | 0.897 | 3 | SB | VP1 | A0203 |
| 27 | LIKGGVEVLEV | 0.784 | 10 | SB | VP1 | A0203 |
| 83 | KMLPCYSTARI | 0.744 | 15 | SB | VP1 | A0203 |
| 233 | VLHVTNTATTV | 0.743 | 16 | SB | VP1 | A0203 |
| 97 | NLNEDLTCGNL | 0.709 | 23 | SB | VP1 | A0203 |
| 243 | VLLDEQGVGPL | 0.708 | 23 | SB | VP1 | A0203 |
| 61 | NLRGYSQHLSA | 0.693 | 27 | SB | VP1 | A0203 |
| 107 | LLMWEAVTVKT | 0.605 | 71 | WB | VP1 | A0203 |
| 134 | KVHENGGGKPV | 0.574 | 99 | WB | VP1 | A0203 |
| 144 | VQGSNFHFFAV | 0.520 | 180 | WB | VP1 | A0203 |
| 294 | SVKNPYPISFL | 0.475 | 292 | WB | VP1 | A0203 |
| 346 | MIRYIDRQGQL | 0.471 | 306 | WB | VP1 | A0203 |
| 323 | GMESQVEEVRV | 0.459 | 348 | WB | VP1 | A0203 |
| 303 | FLLSDLINRRT | 0.454 | 367 | WB | VP1 | A0203 |
| 125 | MLNLHAGSQKV | 0.687 | 29 | SB | VP1 | A0204 |
| 233 | VLHVTNTATTV | 0.655 | 41 | SB | VP1 | A0204 |
| 243 | VLLDEQGVGPL | 0.629 | 55 | WB | VP1 | A0204 |
| 134 | KVHENGGGKPV | 0.544 | 138 | WB | VP1 | A0204 |
| 323 | GMESQVEEVRV | 0.544 | 138 | WB | VP1 | A0204 |
| 83 | KMLPCYSTARI | 0.497 | 230 | WB | VP1 | A0204 |
| 144 | VQGSNFHFFAV | 0.476 | 290 | WB | VP1 | A0204 |
| 107 | LLMWEAVTVKT | 0.464 | 328 | WB | VP1 | A0204 |
| 195 | AYLDKNNAYPV | 0.460 | 345 | WB | VP1 | A0204 |
| 25 | KLLIKGGVEVL | 0.443 | 415 | WB | VP1 | A0204 |
| 224 | YTGGENVPPVL | 0.428 | 487 | WB | VP1 | A0204 |
| 144 | VQGSNFHFFAV | 0.865 | 4 | SB | VP1 | A0206 |
| 83 | KMLPCYSTARI | 0.720 | 20 | SB | VP1 | A0206 |
| 125 | MLNLHAGSQKV | 0.576 | 97 | WB | VP1 | A0206 |
| 243 | VLLDEQGVGPL | 0.571 | 103 | WB | VP1 | A0206 |
| 318 | GQPMYGMESQV | 0.519 | 181 | WB | VP1 | A0206 |
| 107 | LLMWEAVTVKT | 0.498 | 229 | WB | VP1 | A0206 |
| 187 | QVMNTDHKAYL | 0.485 | 261 | WB | VP1 | A0206 |
| 233 | VLHVTNTATTV | 0.435 | 450 | WB | VP1 | A0206 |
| 303 | FLLSDLINRRT | 0.433 | 462 | WB | VP1 | A0206 |
| 243 | VLLDEQGVGPL | 0.906 | 2 | SB | VP1 | A0211 |
| 233 | VLHVTNTATTV | 0.899 | 2 | SB | VP1 | A0211 |
| 125 | MLNLHAGSQKV | 0.897 | 3 | SB | VP1 | A0211 |
| 83 | KMLPCYSTARI | 0.831 | 6 | SB | VP1 | A0211 |
| 27 | LIKGGVEVLEV | 0.813 | 7 | SB | VP1 | A0211 |
| 323 | GMESQVEEVRV | 0.770 | 12 | SB | VP1 | A0211 |
| 244 | LLDEQGVGPLC | 0.735 | 17 | SB | VP1 | A0211 |
| 61 | NLRGYSQHLSA | 0.703 | 24 | SB | VP1 | A0211 |
| 304 | LLSDLINRRTQ | 0.696 | 26 | SB | VP1 | A0211 |
| 25 | KLLIKGGVEVL | 0.681 | 31 | SB | VP1 | A0211 |
| 134 | KVHENGGGKPV | 0.674 | 34 | SB | VP1 | A0211 |
| 97 | NLNEDLTCGNL | 0.669 | 35 | SB | VP1 | A0211 |
| 195 | AYLDKNNAYPV | 0.636 | 51 | WB | VP1 | A0211 |
| 303 | FLLSDLINRRT | 0.612 | 66 | WB | VP1 | A0211 |
| 164 | VLMNYRTKYPQ | 0.607 | 70 | WB | VP1 | A0211 |
| 223 | TYTGGENVPPV | 0.585 | 89 | WB | VP1 | A0211 |
| 196 | YLDKNNAYPVE | 0.560 | 116 | WB | VP1 | A0211 |
| 107 | LLMWEAVTVKT | 0.551 | 128 | WB | VP1 | A0211 |
| 235 | HVTNTATTVLL | 0.525 | 171 | WB | VP1 | A0211 |
| 22 | QVPKLLIKGGV | 0.523 | 174 | WB | VP1 | A0211 |
| 268 | GLFTNSSGTQQ | 0.506 | 209 | WB | VP1 | A0211 |
| 339 | QLPGDPDMIRY | 0.501 | 222 | WB | VP1 | A0211 |
| 144 | VQGSNFHFFAV | 0.500 | 224 | WB | VP1 | A0211 |
| 187 | QVMNTDHKAYL | 0.499 | 225 | WB | VP1 | A0211 |
| 11 | GAAPKKPKEPV | 0.474 | 297 | WB | VP1 | A0211 |
| 224 | YTGGENVPPVL | 0.472 | 302 | WB | VP1 | A0211 |
| 160 | EMQGVLMNYRT | 0.468 | 317 | WB | VP1 | A0211 |
| 349 | YIDRQGQLQTK | 0.450 | 385 | WB | VP1 | A0211 |
| 240 | ATTVLLDEQGV | 0.437 | 443 | WB | VP1 | A0211 |
| 233 | VLHVTNTATTV | 0.838 | 5 | SB | VP1 | A0212 |
| 243 | VLLDEQGVGPL | 0.823 | 6 | SB | VP1 | A0212 |
| 125 | MLNLHAGSQKV | 0.813 | 7 | SB | VP1 | A0212 |
| 323 | GMESQVEEVRV | 0.713 | 22 | SB | VP1 | A0212 |
| 27 | LIKGGVEVLEV | 0.697 | 26 | SB | VP1 | A0212 |
| 61 | NLRGYSQHLSA | 0.690 | 28 | SB | VP1 | A0212 |
| 144 | VQGSNFHFFAV | 0.652 | 42 | SB | VP1 | A0212 |
| 244 | LLDEQGVGPLC | 0.645 | 46 | SB | VP1 | A0212 |
| 304 | LLSDLINRRTQ | 0.599 | 76 | WB | VP1 | A0212 |
| 83 | KMLPCYSTARI | 0.596 | 79 | WB | VP1 | A0212 |
| 164 | VLMNYRTKYPQ | 0.576 | 98 | WB | VP1 | A0212 |
| 196 | YLDKNNAYPVE | 0.569 | 106 | WB | VP1 | A0212 |
| 303 | FLLSDLINRRT | 0.561 | 115 | WB | VP1 | A0212 |
| 224 | YTGGENVPPVL | 0.543 | 140 | WB | VP1 | A0212 |
| 25 | KLLIKGGVEVL | 0.530 | 161 | WB | VP1 | A0212 |
| 107 | LLMWEAVTVKT | 0.511 | 199 | WB | VP1 | A0212 |
| 97 | NLNEDLTCGNL | 0.491 | 247 | WB | VP1 | A0212 |
| 195 | AYLDKNNAYPV | 0.490 | 249 | WB | VP1 | A0212 |
| 349 | YIDRQGQLQTK | 0.465 | 325 | WB | VP1 | A0212 |
| 154 | VGGDPLEMQGV | 0.464 | 329 | WB | VP1 | A0212 |
| 160 | EMQGVLMNYRT | 0.460 | 345 | WB | VP1 | A0212 |
| 108 | LMWEAVTVKTE | 0.438 | 434 | WB | VP1 | A0212 |
| 233 | VLHVTNTATTV | 0.865 | 4 | SB | VP1 | A0216 |
| 125 | MLNLHAGSQKV | 0.827 | 6 | SB | VP1 | A0216 |
| 323 | GMESQVEEVRV | 0.804 | 8 | SB | VP1 | A0216 |
| 27 | LIKGGVEVLEV | 0.752 | 14 | SB | VP1 | A0216 |
| 243 | VLLDEQGVGPL | 0.724 | 19 | SB | VP1 | A0216 |
| 83 | KMLPCYSTARI | 0.660 | 39 | SB | VP1 | A0216 |
| 61 | NLRGYSQHLSA | 0.647 | 45 | SB | VP1 | A0216 |
| 187 | QVMNTDHKAYL | 0.643 | 47 | SB | VP1 | A0216 |
| 164 | VLMNYRTKYPQ | 0.619 | 61 | WB | VP1 | A0216 |
| 195 | AYLDKNNAYPV | 0.616 | 64 | WB | VP1 | A0216 |
| 11 | GAAPKKPKEPV | 0.542 | 142 | WB | VP1 | A0216 |
| 294 | SVKNPYPISFL | 0.530 | 162 | WB | VP1 | A0216 |
| 318 | GQPMYGMESQV | 0.525 | 170 | WB | VP1 | A0216 |
| 25 | KLLIKGGVEVL | 0.517 | 186 | WB | VP1 | A0216 |
| 223 | TYTGGENVPPV | 0.512 | 196 | WB | VP1 | A0216 |
| 268 | GLFTNSSGTQQ | 0.495 | 236 | WB | VP1 | A0216 |
| 97 | NLNEDLTCGNL | 0.481 | 274 | WB | VP1 | A0216 |
| 22 | QVPKLLIKGGV | 0.478 | 284 | WB | VP1 | A0216 |
| 304 | LLSDLINRRTQ | 0.474 | 295 | WB | VP1 | A0216 |
| 160 | EMQGVLMNYRT | 0.464 | 329 | WB | VP1 | A0216 |
| 31 | GVEVLEVKTGV | 0.459 | 348 | WB | VP1 | A0216 |
| 144 | VQGSNFHFFAV | 0.456 | 361 | WB | VP1 | A0216 |
| 235 | HVTNTATTVLL | 0.454 | 368 | WB | VP1 | A0216 |
| 303 | FLLSDLINRRT | 0.453 | 372 | WB | VP1 | A0216 |
| 249 | GVGPLCKADSL | 0.450 | 383 | WB | VP1 | A0216 |
| 220 | YFGTYTGGENV | 0.447 | 394 | WB | VP1 | A0216 |
| 37 | VKTGVDAITEV | 0.439 | 433 | WB | VP1 | A0216 |
| 134 | KVHENGGGKPV | 0.434 | 454 | WB | VP1 | A0216 |
| 233 | VLHVTNTATTV | 0.703 | 24 | SB | VP1 | A0219 |
| 125 | MLNLHAGSQKV | 0.697 | 26 | SB | VP1 | A0219 |
| 243 | VLLDEQGVGPL | 0.673 | 34 | SB | VP1 | A0219 |
| 27 | LIKGGVEVLEV | 0.581 | 93 | WB | VP1 | A0219 |
| 144 | VQGSNFHFFAV | 0.546 | 135 | WB | VP1 | A0219 |
| 323 | GMESQVEEVRV | 0.511 | 198 | WB | VP1 | A0219 |
| 83 | KMLPCYSTARI | 0.501 | 221 | WB | VP1 | A0219 |
| 223 | TYTGGENVPPV | 0.457 | 357 | WB | VP1 | A0219 |
| 154 | VGGDPLEMQGV | 0.443 | 413 | WB | VP1 | A0219 |
| 224 | YTGGENVPPVL | 0.428 | 485 | WB | VP1 | A0219 |
| 124 | SMLNLHAGSQK | 0.698 | 26 | SB | VP1 | A0301 |
| 289 | RLRKRSVKNPY | 0.560 | 117 | WB | VP1 | A0301 |
| 281 | GLARYFKIRLR | 0.520 | 180 | WB | VP1 | A0301 |
| 106 | NLLMWEAVTVK | 0.478 | 285 | WB | VP1 | A0301 |
| 270 | FTNSSGTQQWR | 0.447 | 395 | WB | VP1 | A0301 |
| 124 | SMLNLHAGSQK | 0.754 | 14 | SB | VP1 | A1101 |
| 184 | AQSQVMNTDHK | 0.640 | 49 | SB | VP1 | A1101 |
| 301 | ISFLLSDLINR | 0.631 | 54 | WB | VP1 | A1101 |
| 277 | QQWRGLARYFK | 0.573 | 101 | WB | VP1 | A1101 |
| 73 | NAFESDSPDRK | 0.538 | 148 | WB | VP1 | A1101 |
| 275 | GTQQWRGLARY | 0.477 | 288 | WB | VP1 | A1101 |
| 106 | NLLMWEAVTVK | 0.462 | 336 | WB | VP1 | A1101 |
| 161 | MQGVLMNYRTK | 0.448 | 390 | WB | VP1 | A1101 |
| 312 | RTQKVDGQPMY | 0.441 | 421 | WB | VP1 | A1101 |
| 282 | LARYFKIRLRK | 0.432 | 467 | WB | VP1 | A1101 |
| 305 | LSDLINRRTQK | 0.431 | 473 | WB | VP1 | A1101 |
| 259 | LYVSAADICGL | 0.573 | 102 | WB | VP1 | A2301 |
| 298 | PYPISFLLSDL | 0.474 | 295 | WB | VP1 | A2301 |
| 298 | PYPISFLLSDL | 0.564 | 111 | WB | VP1 | A2402 |
| 167 | NYRTKYPQGTI | 0.552 | 128 | WB | VP1 | A2402 |
| 278 | QWRGLARYFKI | 0.438 | 439 | WB | VP1 | A2402 |
| 65 | YSQHLSAENAF | 0.655 | 41 | SB | VP1 | A2403 |
| 298 | PYPISFLLSDL | 0.628 | 56 | WB | VP1 | A2403 |
| 259 | LYVSAADICGL | 0.536 | 151 | WB | VP1 | A2403 |
| 269 | LFTNSSGTQQW | 0.434 | 458 | WB | VP1 | A2403 |
| 118 | EVIGITSMLNL | 0.705 | 24 | SB | VP1 | A2601 |
| 78 | DSPDRKMLPCY | 0.602 | 74 | WB | VP1 | A2601 |
| 118 | EVIGITSMLNL | 0.894 | 3 | SB | VP1 | A2602 |
| 294 | SVKNPYPISFL | 0.778 | 11 | SB | VP1 | A2602 |
| 78 | DSPDRKMLPCY | 0.715 | 21 | SB | VP1 | A2602 |
| 260 | YVSAADICGLF | 0.691 | 28 | SB | VP1 | A2602 |
| 339 | QLPGDPDMIRY | 0.669 | 35 | SB | VP1 | A2602 |
| 187 | QVMNTDHKAYL | 0.618 | 62 | WB | VP1 | A2602 |
| 275 | GTQQWRGLARY | 0.593 | 81 | WB | VP1 | A2602 |
| 312 | RTQKVDGQPMY | 0.482 | 273 | WB | VP1 | A2602 |
| 289 | RLRKRSVKNPY | 0.805 | 8 | SB | VP1 | A3001 |
| 282 | LARYFKIRLRK | 0.787 | 10 | SB | VP1 | A3001 |
| 6 | KGECPGAAPKK | 0.656 | 41 | SB | VP1 | A3001 |
| 134 | KVHENGGGKPV | 0.525 | 169 | WB | VP1 | A3001 |
| 132 | SQKVHENGGGK | 0.508 | 205 | WB | VP1 | A3001 |
| 312 | RTQKVDGQPMY | 0.498 | 227 | WB | VP1 | A3001 |
| 277 | QQWRGLARYFK | 0.477 | 286 | WB | VP1 | A3001 |
| 161 | MQGVLMNYRTK | 0.455 | 362 | WB | VP1 | A3001 |
| 291 | RKRSVKNPYPI | 0.432 | 468 | WB | VP1 | A3001 |
| 312 | RTQKVDGQPMY | 0.474 | 295 | WB | VP1 | A3002 |
| 277 | QQWRGLARYFK | 0.695 | 27 | SB | VP1 | A3101 |
| 301 | ISFLLSDLINR | 0.646 | 46 | SB | VP1 | A3101 |
| 302 | SFLLSDLINRR | 0.634 | 52 | WB | VP1 | A3101 |
| 270 | FTNSSGTQQWR | 0.615 | 64 | WB | VP1 | A3101 |
| 124 | SMLNLHAGSQK | 0.602 | 74 | WB | VP1 | A3101 |
| 281 | GLARYFKIRLR | 0.598 | 77 | WB | VP1 | A3101 |
| 282 | LARYFKIRLRK | 0.457 | 355 | WB | VP1 | A3101 |
| 161 | MQGVLMNYRTK | 0.453 | 371 | WB | VP1 | A3101 |
| 82 | RKMLPCYSTAR | 0.428 | 486 | WB | VP1 | A3101 |
| 301 | ISFLLSDLINR | 0.516 | 187 | WB | VP1 | A3301 |
| 302 | SFLLSDLINRR | 0.486 | 259 | WB | VP1 | A3301 |
| 270 | FTNSSGTQQWR | 0.792 | 9 | SB | VP1 | A6801 |
| 301 | ISFLLSDLINR | 0.717 | 21 | SB | VP1 | A6801 |
| 73 | NAFESDSPDRK | 0.709 | 23 | SB | VP1 | A6801 |
| 72 | ENAFESDSPDR | 0.595 | 80 | WB | VP1 | A6801 |
| 322 | YGMESQVEEVR | 0.478 | 284 | WB | VP1 | A6801 |
| 282 | LARYFKIRLRK | 0.478 | 284 | WB | VP1 | A6801 |
| 118 | EVIGITSMLNL | 0.811 | 7 | SB | VP1 | A6802 |
| 187 | QVMNTDHKAYL | 0.666 | 36 | SB | VP1 | A6802 |
| 22 | QVPKLLIKGGV | 0.649 | 44 | SB | VP1 | A6802 |
| 235 | HVTNTATTVLL | 0.487 | 257 | WB | VP1 | A6802 |
| 330 | EVRVFDGTEQL | 0.471 | 306 | WB | VP1 | A6802 |
| 103 | TCGNLLMWEAV | 0.457 | 354 | WB | VP1 | A6802 |
| 118 | EVIGITSMLNL | 0.681 | 31 | SB | VP1 | A6901 |
| 33 | EVLEVKTGVDA | 0.574 | 99 | WB | VP1 | A6901 |
| 187 | QVMNTDHKAYL | 0.533 | 155 | WB | VP1 | A6901 |
| 299 | YPISFLLSDLI | 0.456 | 361 | WB | VP1 | A6901 |
| 224 | YTGGENVPPVL | 0.454 | 366 | WB | VP1 | A6901 |
| 235 | HVTNTATTVLL | 0.449 | 389 | WB | VP1 | A6901 |
| 85 | LPCYSTARIPL | 0.805 | 8 | SB | VP1 | B0702 |
| 142 | KPVQGSNFHFF | 0.686 | 29 | SB | VP1 | B0702 |
| 13 | APKKPKEPVQV | 0.564 | 112 | WB | VP1 | B0702 |
| 1 | APTKRKGECPG | 0.493 | 242 | WB | VP1 | B0702 |
| 16 | KPKEPVQVPKL | 0.491 | 245 | WB | VP1 | B0702 |
| 178 | TPKNPTAQSQV | 0.486 | 259 | WB | VP1 | B0702 |
| 299 | YPISFLLSDLI | 0.435 | 452 | WB | VP1 | B0702 |
| 285 | YFKIRLRKRSV | 0.492 | 244 | WB | VP1 | B0801 |
| 276 | TQQWRGLARYF | 0.585 | 89 | WB | VP1 | B1501 |
| 289 | RLRKRSVKNPY | 0.578 | 96 | WB | VP1 | B1501 |
| 186 | SQVMNTDHKAY | 0.565 | 110 | WB | VP1 | B1501 |
| 65 | YSQHLSAENAF | 0.559 | 118 | WB | VP1 | B1501 |
| 260 | YVSAADICGLF | 0.550 | 130 | WB | VP1 | B1501 |
| 312 | RTQKVDGQPMY | 0.427 | 492 | WB | VP1 | B1501 |
| 324 | MESQVEEVRVF | 0.678 | 32 | SB | VP1 | B1801 |
| 45 | TEVECFLNPEM | 0.554 | 124 | WB | VP1 | B1801 |
| 75 | FESDSPDRKML | 0.525 | 171 | WB | VP1 | B1801 |
| 110 | WEAVTVKTEVI | 0.483 | 267 | WB | VP1 | B1801 |
| 311 | RRTQKVDGQPM | 0.521 | 177 | WB | VP1 | B2705 |
| 277 | QQWRGLARYFK | 0.429 | 480 | WB | VP1 | B2705 |
| 142 | KPVQGSNFHFF | 0.739 | 16 | SB | VP1 | B3501 |
| 203 | YPVECWIPDPS | 0.712 | 22 | SB | VP1 | B3501 |
| 85 | LPCYSTARIPL | 0.676 | 33 | SB | VP1 | B3501 |
| 211 | DPSRNENTRYF | 0.625 | 57 | WB | VP1 | B3501 |
| 65 | YSQHLSAENAF | 0.609 | 68 | WB | VP1 | B3501 |
| 151 | FFAVGGDPLEM | 0.579 | 95 | WB | VP1 | B3501 |
| 260 | YVSAADICGLF | 0.578 | 96 | WB | VP1 | B3501 |
| 299 | YPISFLLSDLI | 0.498 | 227 | WB | VP1 | B3501 |
| 52 | NPEMGDPDDNL | 0.470 | 310 | WB | VP1 | B3501 |
| 193 | HKAYLDKNNAY | 0.461 | 342 | WB | VP1 | B3501 |
| 149 | FHFFAVGGDPL | 0.586 | 88 | WB | VP1 | B3901 |
| 234 | LHVTNTATTVL | 0.579 | 94 | WB | VP1 | B3901 |
| 224 | YTGGENVPPVL | 0.498 | 227 | WB | VP1 | B3901 |
| 75 | FESDSPDRKML | 0.556 | 121 | WB | VP1 | B4001 |
| 45 | TEVECFLNPEM | 0.446 | 402 | WB | VP1 | B4001 |
| 45 | TEVECFLNPEM | 0.451 | 379 | WB | VP1 | B4002 |
| 45 | TEVECFLNPEM | 0.477 | 287 | WB | VP1 | B4403 |
| 71 | AENAFESDSPD | 0.487 | 257 | WB | VP1 | B4501 |
| 299 | YPISFLLSDLI | 0.706 | 24 | SB | VP1 | B5101 |
| 340 | LPGDPDMIRYI | 0.600 | 75 | WB | VP1 | B5101 |
| 230 | VPPVLHVTNTA | 0.508 | 206 | WB | VP1 | B5101 |
| 85 | LPCYSTARIPL | 0.492 | 243 | WB | VP1 | B5101 |
| 299 | YPISFLLSDLI | 0.735 | 17 | SB | VP1 | B5301 |
| 340 | LPGDPDMIRYI | 0.564 | 112 | WB | VP1 | B5301 |
| 142 | KPVQGSNFHFF | 0.534 | 154 | WB | VP1 | B5301 |
| 85 | LPCYSTARIPL | 0.434 | 455 | WB | VP1 | B5301 |
| 299 | YPISFLLSDLI | 0.778 | 11 | SB | VP1 | B5401 |
| 230 | VPPVLHVTNTA | 0.720 | 20 | SB | VP1 | B5401 |
| 203 | YPVECWIPDPS | 0.657 | 40 | SB | VP1 | B5401 |
| 93 | IPLPNLNEDLT | 0.542 | 142 | WB | VP1 | B5401 |
| 85 | LPCYSTARIPL | 0.510 | 200 | WB | VP1 | B5401 |
| 340 | LPGDPDMIRYI | 0.458 | 350 | WB | VP1 | B5401 |
| 293 | RSVKNPYPISF | 0.691 | 28 | SB | VP1 | B5801 |

[0899] Preferred BK virus fragments of small T antigen capable of interacting with one or more MHC class I molecules are listed in Table L.

TABLE L
Prediction of BK virus Small t protein
specific MHC class1, 8-, 9-, 10-, 11-mer
peptide binders for 42 MHC class 1 alleles
(see FIG. 11) using the
http://www.cbs.dtu.dk/services/NetMHC/
database. The MHC class 1 molecules for
which no binders were found are not listed.

| | | | | | | |
|---|---|---|---|---|---|---|
| | | log- | affinity | Bind | Protein | |
| pos | peptide | score | (nM) | Level | Name | Allele |

8-mers

| | | | | | | |
|---|---|---|---|---|---|---|
| 124 | FLRKEPLV | 0.663 | 38 | SB | Small t | A0201 |
| 11 | ELMDLLGL | 0.599 | 76 | WB | Small t | A0201 |
| 153 | TLQWWVQI | 0.543 | 141 | WB | Small t | A0201 |
| 74 | GTWNSSEV | 0.542 | 141 | WB | Small t | A0201 |
| 154 | LQWWVQII | 0.520 | 179 | WB | Small t | A0201 |
| 110 | CMLCQLRL | 0.509 | 202 | WB | Small t | A0201 |
| 21 | AAWGNLPL | 0.473 | 297 | WB | Small t | A0201 |
| 60 | KMEQDVKV | 0.452 | 375 | WB | Small t | A0201 |
| 11 | ELMDLLGL | 0.762 | 13 | SB | Small t | A0202 |
| 124 | FLRKEPLV | 0.715 | 21 | SB | Small t | A0202 |
| 9 | SMELMDLL | 0.628 | 56 | WB | Small t | A0202 |
| 50 | KMKRMNTL | 0.586 | 88 | WB | Small t | A0202 |
| 60 | KMEQDVKV | 0.505 | 211 | WB | Small t | A0202 |
| 27 | PLMRKAYL | 0.488 | 254 | WB | Small t | A0202 |
| 110 | CMLCQLRL | 0.475 | 292 | WB | Small t | A0202 |
| 124 | FLRKEPLV | 0.863 | 4 | SB | Small t | A0203 |
| 50 | KMKRMNTL | 0.758 | 13 | SB | Small t | A0203 |
| 11 | ELMDLLGL | 0.712 | 22 | SB | Small t | A0203 |
| 153 | TLQWWVQI | 0.690 | 28 | SB | Small t | A0203 |
| 110 | CMLCQLRL | 0.515 | 189 | WB | Small t | A0203 |
| 105 | SVHCPCML | 0.430 | 474 | WB | Small t | A0203 |
| 60 | KMEQDVKV | 0.429 | 484 | WB | Small t | A0203 |
| 60 | KMEQDVKV | 0.615 | 64 | WB | Small t | A0204 |
| 124 | FLRKEPLV | 0.573 | 100 | WB | Small t | A0204 |
| 153 | TLQWWVQI | 0.524 | 172 | WB | Small t | A0204 |
| 11 | ELMDLLGL | 0.521 | 178 | WB | Small t | A0204 |
| 50 | KMKRMNTL | 0.443 | 412 | WB | Small t | A0204 |
| 154 | LQWWVQII | 0.679 | 32 | SB | Small t | A0206 |
| 74 | GTWNSSEV | 0.645 | 46 | SB | Small t | A0206 |
| 11 | ELMDLLGL | 0.594 | 80 | WB | Small t | A0206 |
| 124 | FLRKEPLV | 0.581 | 92 | WB | Small t | A0206 |
| 21 | AAWGNLPL | 0.571 | 104 | WB | Small t | A0206 |
| 110 | CMLCQLRL | 0.496 | 233 | WB | Small t | A0206 |
| 142 | TQWFGLDL | 0.494 | 239 | WB | Small t | A0206 |
| 153 | TLQWWVQI | 0.468 | 315 | WB | Small t | A0206 |
| 60 | KMEQDVKV | 0.427 | 490 | WB | Small t | A0206 |
| 11 | ELMDLLGL | 0.904 | 2 | SB | Small t | A0211 |
| 124 | FLRKEPLV | 0.865 | 4 | SB | Small t | A0211 |
| 153 | TLQWWVQI | 0.861 | 4 | SB | Small t | A0211 |
| 60 | KMEQDVKV | 0.845 | 5 | SB | Small t | A0211 |
| 14 | DLLGLERA | 0.725 | 19 | SB | Small t | A0211 |
| 74 | GTWNSSEV | 0.720 | 20 | SB | Small t | A0211 |
| 110 | CMLCQLRL | 0.666 | 37 | SB | Small t | A0211 |
| 27 | PLMRKAYL | 0.666 | 37 | SB | Small t | A0211 |
| 21 | AAWGNLPL | 0.638 | 50 | WB | Small t | A0211 |
| 9 | SMELMDLL | 0.635 | 51 | WB | Small t | A0211 |
| 56 | TLYKKMEQ | 0.625 | 57 | WB | Small t | A0211 |
| 50 | KMKRMNTL | 0.582 | 92 | WB | Small t | A0211 |
| 146 | GLDLTEET | 0.563 | 113 | WB | Small t | A0211 |
| 3 | VLNREESM | 0.494 | 239 | WB | Small t | A0211 |
| 105 | SVHCPCML | 0.430 | 474 | WB | Small t | A0211 |
| 148 | DLTEETLQ | 0.428 | 487 | WB | Small t | A0211 |
| 124 | FLRKEPLV | 0.884 | 3 | SB | Small t | A0212 |
| 11 | ELMDLLGL | 0.842 | 5 | SB | Small t | A0212 |
| 153 | TLQWWVQI | 0.692 | 28 | SB | Small t | A0212 |
| 60 | KMEQDVKV | 0.666 | 37 | SB | Small t | A0212 |
| 3 | VLNREESM | 0.639 | 49 | SB | Small t | A0212 |
| 27 | PLMRKAYL | 0.597 | 78 | WB | Small t | A0212 |
| 110 | CMLCQLRL | 0.580 | 94 | WB | Small t | A0212 |
| 50 | KMKRMNTL | 0.579 | 94 | WB | Small t | A0212 |
| 14 | DLLGLERA | 0.523 | 174 | WB | Small t | A0212 |
| 74 | GTWNSSEV | 0.521 | 178 | WB | Small t | A0212 |
| 56 | TLYKKMEQ | 0.520 | 180 | WB | Small t | A0212 |
| 21 | AAWGNLPL | 0.511 | 197 | WB | Small t | A0212 |
| 9 | SMELMDLL | 0.426 | 495 | WB | Small t | A0212 |
| 124 | FLRKEPLV | 0.876 | 3 | SB | Small t | A0216 |
| 27 | PLMRKAYL | 0.829 | 6 | SB | Small t | A0216 |
| 11 | ELMDLLGL | 0.740 | 16 | SB | Small t | A0216 |
| 74 | GTWNSSEV | 0.734 | 17 | SB | Small t | A0216 |
| 60 | KMEQDVKV | 0.732 | 18 | SB | Small t | A0216 |
| 153 | TLQWWVQI | 0.684 | 30 | SB | Small t | A0216 |
| 56 | TLYKKMEQ | 0.662 | 38 | SB | Small t | A0216 |
| 50 | KMKRMNTL | 0.651 | 43 | SB | Small t | A0216 |
| 21 | AAWGNLPL | 0.600 | 75 | WB | Small t | A0216 |
| 110 | CMLCQLRL | 0.577 | 97 | WB | Small t | A0216 |
| 14 | DLLGLERA | 0.566 | 109 | WB | Small t | A0216 |
| 9 | SMELMDLL | 0.532 | 158 | WB | Small t | A0216 |
| 146 | GLDLTEET | 0.453 | 370 | WB | Small t | A0216 |
| 3 | VLNREESM | 0.429 | 482 | WB | Small t | A0216 |
| 11 | ELMDLLGL | 0.807 | 8 | SB | Small t | A0219 |
| 124 | FLRKEPLV | 0.736 | 17 | SB | Small t | A0219 |
| 21 | AAWGNLPL | 0.637 | 51 | WB | Small t | A0219 |
| 153 | TLQWWVQI | 0.608 | 69 | WB | Small t | A0219 |
| 27 | PLMRKAYL | 0.589 | 85 | WB | Small t | A0219 |
| 110 | CMLCQLRL | 0.548 | 133 | WB | Small t | A0219 |
| 74 | GTWNSSEV | 0.540 | 145 | WB | Small t | A0219 |
| 116 | RLRHLNRK | 0.728 | 19 | SB | Small t | A0301 |
| 53 | RMNTLYKK | 0.719 | 20 | SB | Small t | A0301 |
| 119 | HLNRKFLR | 0.676 | 33 | SB | Small t | A0301 |
| 28 | LMRKAYLK | 0.671 | 35 | SB | Small t | A0301 |
| 31 | KAYLKKCK | 0.506 | 210 | WB | Small t | A0301 |
| 53 | RMNTLYKK | 0.727 | 19 | SB | Small t | A1101 |
| 31 | KAYLKKCK | 0.639 | 49 | SB | Small t | A1101 |
| 52 | KRMNTLYK | 0.454 | 367 | WB | Small t | A1101 |
| 119 | HLNRKFLR | 0.443 | 415 | WB | Small t | A1101 |
| 160 | IIGETPFR | 0.438 | 436 | WB | Small t | A1101 |
| 28 | LMRKAYLK | 0.435 | 452 | WB | Small t | A1101 |
| 131 | VWIDCYCI | 0.479 | 280 | WB | Small t | A2301 |
| 92 | LYCKEWPI | 0.458 | 351 | WB | Small t | A2301 |
| 131 | VWIDCYCI | 0.675 | 33 | SB | Small t | A2402 |
| 92 | LYCKEWPI | 0.622 | 60 | WB | Small t | A2402 |
| 11 | ELMDLLGL | 0.486 | 259 | WB | Small t | A2601 |
| 159 | QIIGETPF | 0.823 | 6 | SB | Small t | A2602 |
| 80 | EVCADFPL | 0.594 | 80 | WB | Small t | A2602 |
| 66 | KVAHQPDF | 0.563 | 112 | WB | Small t | A2602 |
| 11 | ELMDLLGL | 0.500 | 224 | WB | Small t | A2602 |
| 86 | PLCPDTLY | 0.515 | 189 | WB | Small t | A2902 |
| 116 | RLRHLNRK | 0.810 | 7 | SB | Small t | A3001 |
| 28 | LMRKAYLK | 0.805 | 8 | SB | Small t | A3001 |
| 53 | RMNTLYKK | 0.672 | 34 | SB | Small t | A3001 |
| 31 | KAYLKKCK | 0.628 | 55 | WB | Small t | A3001 |
| 52 | KRMNTLYK | 0.620 | 60 | WB | Small t | A3001 |
| 29 | MRKAYLKK | 0.612 | 66 | WB | Small t | A3001 |
| 120 | LNRKFLRK | 0.571 | 104 | WB | Small t | A3001 |
| 119 | HLNRKFLR | 0.850 | 5 | SB | Small t | A3101 |
| 53 | RMNTLYKK | 0.816 | 7 | SB | Small t | A3101 |
| 111 | MLCQLRLR | 0.684 | 30 | SB | Small t | A3101 |
| 28 | LMRKAYLK | 0.646 | 46 | SB | Small t | A3101 |
| 116 | RLRHLNRK | 0.541 | 142 | WB | Small t | A3101 |
| 160 | IIGETPFR | 0.540 | 145 | WB | Small t | A3101 |
| 31 | KAYLKKCK | 0.504 | 214 | WB | Small t | A3101 |
| 119 | HLNRKFLR | 0.745 | 15 | SB | Small t | A3301 |
| 111 | MLCQLRLR | 0.521 | 177 | WB | Small t | A3301 |
| 160 | IIGETPFR | 0.469 | 313 | WB | Small t | A3301 |
| 163 | ETPFRDLK | 0.799 | 8 | SB | Small t | A6801 |
| 111 | MLCQLRLR | 0.725 | 19 | SB | Small t | A6801 |
| 119 | HLNRKFLR | 0.654 | 42 | SB | Small t | A6801 |
| 160 | IIGETPFR | 0.568 | 107 | WB | Small t | A6801 |
| 80 | EVCADFPL | 0.773 | 11 | SB | Small t | A6802 |
| 11 | ELMDLLGL | 0.583 | 90 | WB | Small t | A6802 |
| 8 | ESMELMDL | 0.563 | 113 | WB | Small t | A6802 |
| 105 | SVHCPCML | 0.510 | 200 | WB | Small t | A6802 |
| 19 | ERAAWGNL | 0.434 | 456 | WB | Small t | A6802 |
| 11 | ELMDLLGL | 0.667 | 36 | SB | Small t | A6901 |
| 80 | EVCADFPL | 0.549 | 131 | WB | Small t | A6901 |
| 74 | GTWNSSEV | 0.545 | 137 | WB | Small t | A6901 |
| 85 | FPLCPDTL | 0.537 | 150 | WB | Small t | A6901 |
| 21 | AAWGNLPL | 0.513 | 193 | WB | Small t | A6901 |
| 8 | ESMELMDL | 0.453 | 372 | WB | Small t | A6901 |
| 103 | KPSVHCPC | 0.540 | 145 | WB | Small t | B0702 |
| 21 | AAWGNLPL | 0.482 | 270 | WB | Small t | B0702 |
| 26 | LPLMRKAY | 0.431 | 472 | WB | Small t | B0702 |
| 50 | KMKRMNTL | 0.479 | 282 | WB | Small t | B0801 |
| 33 | YLKKCKEF | 0.446 | 401 | WB | Small t | B0801 |
| 159 | QIIGETPF | 0.529 | 163 | WB | Small t | B1501 |
| 33 | YLKKCKEF | 0.496 | 232 | WB | Small t | B1501 |
| 50 | KMKRMNTL | 0.474 | 294 | WB | Small t | B1501 |
| 52 | KRMNTLYK | 0.623 | 58 | WB | Small t | B2705 |
| 29 | MRKAYLKK | 0.430 | 477 | WB | Small t | B2705 |
| 26 | LPLMRKAY | 0.749 | 15 | SB | Small t | B3501 |
| 85 | FPLCPDTL | 0.706 | 24 | SB | Small t | B3501 |
| 21 | AAWGNLPL | 0.509 | 203 | WB | Small t | B3501 |
| 159 | QIIGETPF | 0.457 | 355 | WB | Small t | B3501 |
| 5 | NREESMEL | 0.555 | 123 | WB | Small t | B3901 |
| 162 | GETPFRDL | 0.607 | 69 | WB | Small t | B4001 |
| 6 | REESMELM | 0.511 | 197 | WB | Small t | B4001 |
| 6 | REESMELM | 0.433 | 463 | WB | Small t | B4002 |
| 151 | EETLQWWV | 0.428 | 488 | WB | Small t | B4002 |
| 150 | TEETLQWW | 0.443 | 414 | WB | Small t | B4402 |
| 151 | EETLQWWV | 0.426 | 497 | WB | Small t | B4403 |
| 151 | EETLQWWV | 0.447 | 397 | WB | Small t | B4501 |
| — | | | | | | |
| 85 | FPLCPDTL | 0.509 | 202 | WB | Small t | B5101 |
| 108 | CPCMLCQL | 0.480 | 276 | WB | Small t | B5101 |
| 26 | LPLMRKAY | 0.636 | 51 | WB | Small t | B5301 |
| 85 | FPLCPDTL | 0.559 | 117 | WB | Small t | B5301 |
| 26 | LPLMRKAY | 0.482 | 271 | WB | Small t | B5401 |
| 149 | LTEETLQW | 0.602 | 74 | WB | Small t | B5701 |
| 149 | LTEETLQW | 0.555 | 123 | WB | Small t | B5801 |
| 66 | KVAHQPDF | 0.491 | 246 | WB | Small t | B5801 |
| 16 | LGLERAAW | 0.439 | 430 | WB | Small t | B5801 |

9-mers

| | | | | | | |
|---|---|---|---|---|---|---|
| 91 | TLYCKEWPI | 0.629 | 55 | WB | Small t | A0201 |
| 153 | TLQWWVQII | 0.605 | 71 | WB | Small t | A0201 |
| 130 | LVWIDCYCI | 0.509 | 201 | WB | Small t | A0201 |
| 91 | TLYCKEWPI | 0.697 | 26 | SB | Small t | A0202 |
| 146 | GLDLTEETL | 0.429 | 483 | WB | Small t | A0202 |
| 153 | TLQWWVQII | 0.838 | 5 | SB | Small t | A0203 |
| 91 | TLYCKEWPI | 0.728 | 18 | SB | Small t | A0203 |
| 20 | RAAWGNLPL | 0.491 | 246 | WB | Small t | A0203 |
| 53 | RMNTLYKKM | 0.490 | 249 | WB | Small t | A0203 |
| 153 | TLQWWVQII | 0.535 | 152 | WB | Small t | A0204 |
| 91 | TLYCKEWPI | 0.525 | 170 | WB | Small t | A0204 |
| 59 | KKMEQDVKV | 0.514 | 191 | WB | Small t | A0204 |
| 158 | VQIIGETPF | 0.700 | 25 | SB | Small t | A0206 |
| 142 | TQWFGLDLT | 0.667 | 36 | SB | Small t | A0206 |
| 91 | TLYCKEWPI | 0.660 | 39 | SB | Small t | A0206 |
| 20 | RAAWGNLPL | 0.634 | 52 | WB | Small t | A0206 |
| 79 | SEVCADFPL | 0.515 | 189 | WB | Small t | A0206 |
| 10 | MELMDLLGL | 0.496 | 233 | WB | Small t | A0206 |
| 21 | AAWGNLPLM | 0.457 | 357 | WB | Small t | A0206 |
| 146 | GLDLTEETL | 0.857 | 4 | SB | Small t | A0211 |
| 91 | TLYCKEWPI | 0.856 | 4 | SB | Small t | A0211 |
| 153 | TLQWWVQII | 0.797 | 8 | SB | Small t | A0211 |
| 20 | RAAWGNLPL | 0.620 | 61 | WB | Small t | A0211 |
| 14 | DLLGLERAA | 0.614 | 65 | WB | Small t | A0211 |
| 86 | PLCPDTLYC | 0.564 | 111 | WB | Small t | A0211 |
| 130 | LVWIDCYCI | 0.505 | 210 | WB | Small t | A0211 |
| 73 | FGTWNSSEV | 0.481 | 274 | WB | Small t | A0211 |
| 21 | AAWGNLPLM | 0.448 | 394 | WB | Small t | A0211 |
| 152 | ETLQWWVQI | 0.445 | 404 | WB | Small t | A0211 |
| 98 | PICSKKPSV | 0.436 | 448 | WB | Small t | A0211 |
| 129 | PLVWIDCYC | 0.432 | 465 | WB | Small t | A0211 |
| 146 | GLDLTEETL | 0.773 | 11 | SB | Small t | A0212 |
| 91 | TLYCKEWPI | 0.751 | 14 | SB | Small t | A0212 |
| 153 | TLQWWVQII | 0.666 | 37 | SB | Small t | A0212 |
| 14 | DLLGLERAA | 0.548 | 133 | WB | Small t | A0212 |
| 141 | FTQWFGLDL | 0.521 | 178 | WB | Small t | A0212 |
| 98 | PICSKKPSV | 0.430 | 474 | WB | Small t | A0212 |
| 146 | GLDLTEETL | 0.773 | 11 | SB | Small t | A0216 |
| 91 | TLYCKEWPI | 0.720 | 20 | SB | Small t | A0216 |
| 98 | PICSKKPSV | 0.617 | 62 | WB | Small t | A0216 |
| 153 | TLQWWVQII | 0.518 | 184 | WB | Small t | A0216 |
| 129 | PLVWIDCYC | 0.472 | 302 | WB | Small t | A0216 |
| 146 | GLDLTEETL | 0.704 | 24 | SB | Small t | A0219 |
| 153 | TLQWWVQII | 0.531 | 160 | WB | Small t | A0219 |
| 21 | AAWGNLPLM | 0.506 | 209 | WB | Small t | A0219 |
| 91 | TLYCKEWPI | 0.505 | 211 | WB | Small t | A0219 |
| 119 | HLNRKFLRK | 0.834 | 6 | SB | Small t | A0301 |
| 28 | LMRKAYLKK | 0.703 | 24 | SB | Small t | A0301 |
| 50 | KMKRMNTLY | 0.654 | 42 | SB | Small t | A0301 |
| 27 | PLMRKAYLK | 0.578 | 96 | WB | Small t | A0301 |
| 114 | QLRLRHLNR | 0.447 | 397 | WB | Small t | A0301 |
| 119 | HLNRKFLRK | 0.694 | 27 | SB | Small t | A1101 |
| 27 | PLMRKAYLK | 0.576 | 98 | WB | Small t | A1101 |
| 159 | QIIGETPFR | 0.516 | 187 | WB | Small t | A1101 |
| 32 | AYLKKCKEF | 0.708 | 23 | SB | Small t | A2301 |
| 32 | AYLKKCKEF | 0.523 | 174 | WB | Small t | A2402 |
| 32 | AYLKKCKEF | 0.859 | 4 | SB | Small t | A2403 |
| 68 | AHQPDFGTW | 0.542 | 142 | WB | Small t | A2403 |
| 8 | ESMELMDLL | 0.463 | 335 | WB | Small t | A2601 |
| 163 | ETPFRDLKL | 0.795 | 9 | SB | Small t | A2602 |
| 152 | ETLQWWVQI | 0.499 | 225 | WB | Small t | A2602 |
| 8 | ESMELMDLL | 0.476 | 290 | WB | Small t | A2602 |
| 50 | KMKRMNTLY | 0.576 | 98 | WB | Small t | A2902 |
| 85 | FPLCPDTLY | 0.475 | 291 | WB | Small t | A2902 |
| 28 | LMRKAYLKK | 0.830 | 6 | SB | Small t | A3001 |
| 51 | MKRMNTLYK | 0.827 | 6 | SB | Small t | A3001 |
| 36 | KCKEFHPDK | 0.817 | 7 | SB | Small t | A3001 |
| 114 | QLRLRHLNR | 0.516 | 187 | WB | Small t | A3001 |
| 50 | KMKRMNTLY | 0.501 | 220 | WB | Small t | A3001 |
| 119 | HLNRKFLRK | 0.445 | 405 | WB | Small t | A3001 |
| 27 | PLMRKAYLK | 0.439 | 431 | WB | Small t | A3001 |
| 52 | KRMNTLYKK | 0.435 | 453 | WB | Small t | A3001 |
| 50 | KMKRMNTLY | 0.561 | 115 | WB | Small t | A3002 |
| 118 | RHLNRKFLR | 0.820 | 7 | SB | Small t | A3101 |
| 110 | CMLCQLRLR | 0.649 | 44 | SB | Small t | A3101 |
| 114 | QLRLRHLNR | 0.628 | 56 | WB | Small t | A3101 |
| 50 | KMKRMNTLY | 0.540 | 144 | WB | Small t | A3101 |
| 119 | HLNRKFLRK | 0.514 | 191 | WB | Small t | A3101 |
| 28 | LMRKAYLKK | 0.436 | 447 | WB | Small t | A3101 |
| 114 | QLRLRHLNR | 0.699 | 25 | SB | Small t | A3301 |
| 159 | QIIGETPFR | 0.822 | 6 | SB | Small t | A6801 |
| 108 | CPCMLCQLR | 0.553 | 125 | WB | Small t | A6801 |
| 8 | ESMELMDLL | 0.767 | 12 | SB | Small t | A6802 |
| 139 | DCFTQWFGL | 0.659 | 40 | SB | Small t | A6802 |
| 73 | FGTWNSSEV | 0.580 | 94 | WB | Small t | A6802 |
| 152 | ETLQWWVQI | 0.522 | 175 | WB | Small t | A6802 |
| 134 | DCYCIDCFT | 0.491 | 247 | WB | Small t | A6802 |
| 163 | ETPFRDLKL | 0.490 | 247 | WB | Small t | A6802 |
| 152 | ETLQWWVQI | 0.832 | 6 | SB | Small t | A6901 |
| 8 | ESMELMDLL | 0.609 | 68 | WB | Small t | A6901 |
| 91 | TLYCKEWPI | 0.506 | 210 | WB | Small t | A6901 |
| 130 | LVWIDCYCI | 0.492 | 244 | WB | Small t | A6901 |
| 21 | AAWGNLPLM | 0.483 | 267 | WB | Small t | A6901 |
| 20 | RAAWGNLPL | 0.721 | 20 | SB | Small t | B0702 |
| 26 | LPLMRKAYL | 0.719 | 20 | SB | Small t | B0702 |
| 103 | KPSVHCPCM | 0.431 | 472 | WB | Small t | B0702 |
| 158 | VQIIGETPF | 0.615 | 64 | WB | Small t | B1501 |
| 50 | KMKRMNTLY | 0.561 | 115 | WB | Small t | B1501 |
| 116 | RLRHLNRKF | 0.503 | 216 | WB | Small t | B1501 |
| 20 | RAAWGNLPL | 0.444 | 411 | WB | Small t | B1501 |
| 10 | MELMDLLGL | 0.722 | 20 | SB | Small t | B1801 |
| 150 | TEETLQWWV | 0.497 | 230 | WB | Small t | B1801 |
| 79 | SEVCADFPL | 0.470 | 308 | WB | Small t | B1801 |
| 52 | KRMNTLYKK | 0.656 | 41 | SB | Small t | B2705 |
| 85 | FPLCPDTLY | 0.805 | 8 | SB | Small t | B3501 |
| 128 | EPLVWIDCY | 0.750 | 14 | SB | Small t | B3501 |
| 20 | RAAWGNLPL | 0.618 | 62 | WB | Small t | B3501 |
| 21 | AAWGNLPLM | 0.545 | 137 | WB | Small t | B3501 |
| 103 | KPSVHCPCM | 0.451 | 377 | WB | Small t | B3501 |
| 10 | MELMDLLGL | 0.751 | 14 | SB | Small t | B4001 |
| 79 | SEVCADFPL | 0.738 | 16 | SB | Small t | B4001 |
| 7 | EESMELMDL | 0.561 | 115 | WB | Small t | B4001 |
| 18 | LERAAWGNL | 0.497 | 231 | WB | Small t | B4001 |
| 79 | SEVCADFPL | 0.455 | 365 | WB | Small t | B4002 |
| 79 | SEVCADFPL | 0.591 | 83 | WB | Small t | B4403 |
| 151 | EETLQWWVQ | 0.463 | 334 | WB | Small t | B4403 |
| 85 | FPLCPDTLY | 0.710 | 23 | SB | Small t | B5301 |
| 128 | EPLVWIDCY | 0.651 | 43 | SB | Small t | B5301 |
| 26 | LPLMRKAYL | 0.625 | 57 | WB | Small t | B5301 |
| 97 | WPICSKKPS | 0.548 | 132 | WB | Small t | B5401 |
| 149 | LTEETLQWW | 0.564 | 112 | WB | Small t | B5701 |
| 124 | FLRKEPLVW | 0.534 | 154 | WB | Small t | B5801 |
| 20 | RAAWGNLPL | 0.460 | 344 | WB | Small t | B5801 |

10-mers

| | | | | | | |
|---|---|---|---|---|---|---|
| 124 | FLRKEPLVWI | 0.574 | 100 | WB | Small t | A0201 |
| 56 | TLYKKMEQDV | 0.485 | 263 | WB | Small t | A0201 |
| 12 | LMDLLGLERA | 0.456 | 361 | WB | Small t | A0201 |
| 3 | VLNREESMEL | 0.434 | 454 | WB | Small t | A0201 |
| 111 | MLCQLRLRHL | 0.647 | 45 | SB | Small t | A0202 |
| 124 | FLRKEPLVWI | 0.608 | 69 | WB | Small t | A0202 |
| 12 | LMDLLGLERA | 0.607 | 70 | WB | Small t | A0202 |
| 3 | VLNREESMEL | 0.562 | 114 | WB | Small t | A0202 |
| 56 | TLYKKMEQDV | 0.516 | 187 | WB | Small t | A0202 |
| 145 | FGLDLTEETL | 0.516 | 188 | WB | Small t | A0202 |
| 9 | SMELMDLLGL | 0.507 | 206 | WB | Small t | A0202 |
| 25 | NLPLMRKAYL | 0.483 | 269 | WB | Small t | A0202 |
| 124 | FLRKEPLVWI | 0.870 | 4 | SB | Small t | A0203 |
| 56 | TLYKKMEQDV | 0.707 | 23 | SB | Small t | A0203 |
| 3 | VLNREESMEL | 0.666 | 37 | SB | Small t | A0203 |
| 111 | MLCQLRLRHL | 0.549 | 131 | WB | Small t | A0203 |
| 12 | LMDLLGLERA | 0.468 | 314 | WB | Small t | A0203 |
| 9 | SMELMDLLGL | 0.462 | 338 | WB | Small t | A0203 |
| 116 | RLRHLNRKFL | 0.429 | 484 | WB | Small t | A0203 |
| 149 | LTEETLQWWV | 0.571 | 104 | WB | Small t | A0204 |
| 3 | VLNREESMEL | 0.557 | 120 | WB | Small t | A0204 |
| 124 | FLRKEPLVWI | 0.500 | 223 | WB | Small t | A0204 |
| 149 | LTEETLQWWV | 0.581 | 93 | WB | Small t | A0206 |
| 154 | LQWWVQIIGE | 0.521 | 177 | WB | Small t | A0206 |
| 20 | RAAWGNLPLM | 0.518 | 184 | WB | Small t | A0206 |
| 142 | TQWFGLDLTE | 0.463 | 334 | WB | Small t | A0206 |
| 124 | FLRKEPLVWI | 0.430 | 474 | WB | Small t | A0206 |
| 56 | TLYKKMEQDV | 0.875 | 3 | SB | Small t | A0211 |
| 3 | VLNREESMEL | 0.824 | 6 | SB | Small t | A0211 |
| 149 | LTEETLQWWV | 0.779 | 10 | SB | Small t | A0211 |
| 12 | LMDLLGLERA | 0.757 | 13 | SB | Small t | A0211 |
| 124 | FLRKEPLVWI | 0.715 | 21 | SB | Small t | A0211 |
| 9 | SMELMDLLGL | 0.706 | 24 | SB | Small t | A0211 |
| 111 | MLCQLRLRHL | 0.689 | 28 | SB | Small t | A0211 |
| 25 | NLPLMRKAYL | 0.682 | 31 | SB | Small t | A0211 |
| 129 | PLVWIDCYCI | 0.681 | 31 | SB | Small t | A0211 |
| 116 | RLRHLNRKFL | 0.554 | 124 | WB | Small t | A0211 |
| 146 | GLDLTEETLQ | 0.516 | 188 | WB | Small t | A0211 |
| 17 | GLERAAWGNL | 0.502 | 219 | WB | Small t | A0211 |
| 145 | FGLDLTEETL | 0.451 | 381 | WB | Small t | A0211 |
| 56 | TLYKKMEQDV | 0.893 | 3 | SB | Small t | A0212 |
| 3 | VLNREESMEL | 0.788 | 9 | SB | Small t | A0212 |
| 124 | FLRKEPLVWI | 0.756 | 13 | SB | Small t | A0212 |
| 149 | LTEETLQWWV | 0.727 | 19 | SB | Small t | A0212 |
| 12 | LMDLLGLERA | 0.604 | 72 | WB | Small t | A0212 |
| 111 | MLCQLRLRHL | 0.584 | 90 | WB | Small t | A0212 |
| 9 | SMELMDLLGL | 0.579 | 95 | WB | Small t | A0212 |
| 145 | FGLDLTEETL | 0.484 | 264 | WB | Small t | A0212 |
| 25 | NLPLMRKAYL | 0.477 | 287 | WB | Small t | A0212 |
| 116 | RLRHLNRKFL | 0.449 | 386 | WB | Small t | A0212 |
| 17 | GLERAAWGNL | 0.430 | 474 | WB | Small t | A0212 |
| 56 | TLYKKMEQDV | 0.842 | 5 | SB | Small t | A0216 |
| 3 | VLNREESMEL | 0.768 | 12 | SB | Small t | A0216 |
| 25 | NLPLMRKAYL | 0.703 | 24 | SB | Small t | A0216 |
| 124 | FLRKEPLVWI | 0.687 | 29 | SB | Small t | A0216 |
| 149 | LTEETLQWWV | 0.632 | 53 | WB | Small t | A0216 |
| 111 | MLCQLRLRHL | 0.627 | 56 | WB | Small t | A0216 |
| 116 | RLRHLNRKFL | 0.566 | 110 | WB | Small t | A0216 |
| 17 | GLERAAWGNL | 0.545 | 137 | WB | Small t | A0216 |
| 129 | PLVWIDCYCI | 0.522 | 175 | WB | Small t | A0216 |
| 12 | LMDLLGLERA | 0.484 | 265 | WB | Small t | A0216 |
| 9 | SMELMDLLGL | 0.468 | 316 | WB | Small t | A0216 |
| 149 | LTEETLQWWV | 0.627 | 56 | WB | Small t | A0219 |
| 3 | VLNREESMEL | 0.573 | 101 | WB | Small t | A0219 |
| 56 | TLYKKMEQDV | 0.570 | 104 | WB | Small t | A0219 |
| 124 | FLRKEPLVWI | 0.551 | 128 | WB | Small t | A0219 |
| 12 | LMDLLGLERA | 0.486 | 260 | WB | Small t | A0219 |
| 50 | KMKRMNTLYK | 0.754 | 14 | SB | Small t | A0301 |
| 118 | RHLNRKFLRK | 0.678 | 32 | SB | Small t | A0301 |
| 27 | PLMRKAYLKK | 0.663 | 38 | SB | Small t | A0301 |
| 114 | QLRLRHLNRK | 0.562 | 114 | WB | Small t | A0301 |
| 22 | AWGNLPLMRK | 0.533 | 156 | WB | Small t | A0301 |
| 26 | LPLMRKAYLK | 0.500 | 222 | WB | Small t | A0301 |
| 50 | KMKRMNTLYK | 0.700 | 25 | SB | Small t | A1101 |
| 27 | PLMRKAYLKK | 0.478 | 284 | WB | Small t | A1101 |
| 21 | AAWGNLPLMR | 0.475 | 293 | WB | Small t | A1101 |
| 22 | AWGNLPLMRK | 0.449 | 387 | WB | Small t | A1101 |
| 86 | PLCPDTLYCK | 0.444 | 410 | WB | Small t | A1101 |
| 135 | CYCIDCFTQW | 0.623 | 58 | WB | Small t | A2301 |
| 57 | LYKKMEQDVK | 0.531 | 160 | WB | Small t | A2301 |
| 136 | YCIDCFTQWF | 0.433 | 463 | WB | Small t | A2301 |
| 135 | CYCIDCFTQW | 0.616 | 63 | WB | Small t | A2403 |
| 123 | KFLRKEPLVW | 0.549 | 132 | WB | Small t | A2403 |
| 64 | DVKVAHQPDF | 0.665 | 37 | SB | Small t | A2602 |
| 152 | ETLQWWVQII | 0.483 | 269 | WB | Small t | A2602 |
| 84 | DFPLCPDTLY | 0.458 | 353 | WB | Small t | A2902 |
| 50 | KMKRMNTLYK | 0.848 | 5 | SB | Small t | A3001 |
| 114 | QLRLRHLNRK | 0.729 | 18 | SB | Small t | A3001 |
| 51 | MKRMNTLYKK | 0.685 | 30 | SB | Small t | A3001 |
| 27 | PLMRKAYLKK | 0.500 | 224 | WB | Small t | A3001 |
| 116 | RLRHLNRKFL | 0.497 | 231 | WB | Small t | A3001 |
| 29 | MRKAYLKKCK | 0.488 | 255 | WB | Small t | A3001 |
| 117 | LRHLNRKFLR | 0.676 | 33 | SB | Small t | A3101 |
| 113 | CQLRLRHLNR | 0.674 | 34 | SB | Small t | A3101 |
| 50 | KMKRMNTLYK | 0.640 | 49 | SB | Small t | A3101 |
| 51 | MKRMNTLYKK | 0.468 | 316 | WB | Small t | A3101 |
| 118 | RHLNRKFLRK | 0.446 | 400 | WB | Small t | A3101 |
| 11 | ELMDLLGLER | 0.512 | 196 | WB | Small t | A3301 |
| 117 | LRHLNRKFLR | 0.430 | 476 | WB | Small t | A3301 |
| 11 | ELMDLLGLER | 0.720 | 20 | SB | Small t | A6801 |
| 90 | DTLYCKEWPI | 0.574 | 99 | WB | Small t | A6802 |
| 152 | ETLQWWVQII | 0.456 | 358 | WB | Small t | A6802 |
| 19 | ERAAWGNLPL | 0.452 | 375 | WB | Small t | A6802 |
| 152 | ETLQWWVQII | 0.795 | 9 | SB | Small t | A6901 |
| 90 | DTLYCKEWPI | 0.586 | 88 | WB | Small t | A6901 |
| 149 | LTEETLQWWV | 0.575 | 98 | WB | Small t | A6901 |
| 97 | WPICSKKPSV | 0.518 | 184 | WB | Small t | A6901 |
| 103 | KPSVHCPCML | 0.703 | 24 | SB | Small t | B0702 |
| 97 | WPICSKKPSV | 0.563 | 113 | WB | Small t | B0702 |
| 116 | RLRHLNRKFL | 0.471 | 304 | WB | Small t | B0702 |
| 157 | WVQIIGETPF | 0.540 | 145 | WB | Small t | B1501 |
| 52 | KRMNTLYKKM | 0.591 | 83 | WB | Small t | B2705 |
| 157 | WVQIIGETPF | 0.638 | 50 | WB | Small t | B3501 |
| 20 | RAAWGNLPLM | 0.595 | 80 | WB | Small t | B3501 |
| 136 | YCIDCFTQWF | 0.429 | 483 | WB | Small t | B3501 |
| 19 | ERAAWGNLPL | 0.539 | 147 | WB | Small t | B3901 |
| 6 | REESMELMDL | 0.707 | 23 | SB | Small t | B4001 |
| 162 | GETPFRDLKL | 0.618 | 62 | WB | Small t | B4001 |
| 7 | EESMELMDLL | 0.488 | 253 | WB | Small t | B4001 |
| 7 | EESMELMDLL | 0.482 | 271 | WB | Small t | B4002 |
| 127 | KEPLVWIDCY | 0.429 | 481 | WB | Small t | B4402 |
| 151 | EETLQWWVQI | 0.495 | 235 | WB | Small t | B4403 |
| 127 | KEPLVWIDCY | 0.434 | 456 | WB | Small t | B4403 |
| 97 | WPICSKKPSV | 0.434 | 454 | WB | Small t | B5101 |
| 97 | WPICSKKPSV | 0.735 | 17 | SB | Small t | B5401 |
| 26 | LPLMRKAYLK | 0.511 | 197 | WB | Small t | B5401 |
| 67 | VAHQPDFGTW | 0.448 | 393 | WB | Small t | B5701 |
| 123 | KFLRKEPLVW | 0.620 | 60 | WB | Small t | B5801 |
| 67 | VAHQPDFGTW | 0.537 | 149 | WB | Small t | B5801 |
| 20 | RAAWGNLPLM | 0.485 | 263 | WB | Small t | B5801 |
| 31 | KAYLKKCKEF | 0.431 | 473 | WB | Small t | B5801 |

11-mers

| | | | | | | |
|---|---|---|---|---|---|---|
| 11 | ELMDLLGLERA | 0.458 | 351 | WB | Small t | A0201 |
| 2 | KVLNREESMEL | 0.432 | 467 | WB | Small t | A0201 |
| 11 | ELMDLLGLERA | 0.582 | 92 | WB | Small t | A0202 |
| 137 | CIDCFTQWFGL | 0.516 | 187 | WB | Small t | A0202 |
| 3 | VLNREESMELM | 0.491 | 245 | WB | Small t | A0202 |
| 148 | DLTEETLQWWV | 0.445 | 404 | WB | Small t | A0202 |
| 11 | ELMDLLGLERA | 0.652 | 42 | SB | Small t | A0203 |
| 110 | CMLCQLRLRHL | 0.520 | 180 | WB | Small t | A0203 |
| 3 | VLNREESMELM | 0.473 | 298 | WB | Small t | A0203 |
| 105 | SVHCPCMLCQL | 0.449 | 389 | WB | Small t | A0203 |
| 2 | KVLNREESMEL | 0.525 | 170 | WB | Small t | A0204 |
| 148 | DLTEETLQWWV | 0.453 | 372 | WB | Small t | A0204 |
| 105 | SVHCPCMLCQL | 0.450 | 384 | WB | Small t | A0204 |
| 2 | KVLNREESMEL | 0.620 | 61 | WB | Small t | A0206 |
| 154 | LQWWVQIIGET | 0.600 | 75 | WB | Small t | A0206 |
| 137 | CIDCFTQWFGL | 0.565 | 110 | WB | Small t | A0206 |
| 142 | TQWFGLDLTEE | 0.519 | 182 | WB | Small t | A0206 |
| 132 | WIDCYCIDCFT | 0.435 | 452 | WB | Small t | A0206 |
| 148 | DLTEETLQWWV | 0.957 | 1 | SB | Small t | A0211 |
| 11 | ELMDLLGLERA | 0.815 | 7 | SB | Small t | A0211 |
| 137 | CIDCFTQWFGL | 0.698 | 26 | SB | Small t | A0211 |
| 12 | LMDLLGLERAA | 0.669 | 35 | SB | Small t | A0211 |
| 2 | KVLNREESMEL | 0.597 | 77 | WB | Small t | A0211 |
| 105 | SVHCPCMLCQL | 0.539 | 146 | WB | Small t | A0211 |
| 3 | VLNREESMELM | 0.535 | 153 | WB | Small t | A0211 |
| 148 | DLTEETLQWWV | 0.806 | 8 | SB | Small t | A0212 |
| 11 | ELMDLLGLERA | 0.654 | 42 | SB | Small t | A0212 |
| 12 | LMDLLGLERAA | 0.577 | 96 | WB | Small t | A0212 |
| 137 | CIDCFTQWFGL | 0.551 | 128 | WB | Small t | A0212 |
| 3 | VLNREESMELM | 0.514 | 192 | WB | Small t | A0212 |
| 2 | KVLNREESMEL | 0.481 | 273 | WB | Small t | A0212 |
| 148 | DLTEETLQWWV | 0.886 | 3 | SB | Small t | A0216 |
| 11 | ELMDLLGLERA | 0.650 | 43 | SB | Small t | A0216 |
| 2 | KVLNREESMEL | 0.514 | 191 | WB | Small t | A0216 |
| 105 | SVHCPCMLCQL | 0.496 | 233 | WB | Small t | A0216 |
| 137 | CIDCFTQWFGL | 0.440 | 427 | WB | Small t | A0216 |
| 148 | DLTEETLQWWV | 0.849 | 5 | SB | Small t | A0219 |
| 11 | ELMDLLGLERA | 0.602 | 73 | WB | Small t | A0219 |
| 137 | CIDCFTQWFGL | 0.566 | 109 | WB | Small t | A0219 |
| 50 | KMKRMNTLYKK | 0.667 | 36 | SB | Small t | A0301 |
| 116 | RLRHLNRKFLR | 0.645 | 46 | SB | Small t | A0301 |
| 56 | TLYKKMEQDVK | 0.645 | 46 | SB | Small t | A0301 |
| 21 | AAWGNLPLMRK | 0.508 | 205 | WB | Small t | A0301 |
| 28 | LMRKAYLKKCK | 0.454 | 369 | WB | Small t | A0301 |
| 160 | IIGETPFRDLK | 0.432 | 464 | WB | Small t | A0301 |
| 21 | AAWGNLPLMRK | 0.742 | 16 | SB | Small t | A1101 |
| 56 | TLYKKMEQDVK | 0.640 | 49 | SB | Small t | A1101 |
| 50 | KMKRMNTLYKK | 0.634 | 52 | WB | Small t | A1101 |
| 160 | IIGETPFRDLK | 0.632 | 53 | WB | Small t | A1101 |
| 113 | CQLRLRHLNRK | 0.537 | 149 | WB | Small t | A1101 |
| 20 | RAAWGNLPLMR | 0.531 | 160 | WB | Small t | A1101 |
| 135 | CYCIDCFTQWF | 0.785 | 10 | SB | Small t | A2301 |
| 131 | VWIDCYCIDCF | 0.697 | 26 | SB | Small t | A2301 |
| 92 | LYCKEWPICSK | 0.544 | 139 | WB | Small t | A2301 |
| 156 | WWVQIIGETPF | 0.530 | 161 | WB | Small t | A2301 |
| 75 | TWNSSEVCADF | 0.493 | 240 | WB | Small t | A2301 |
| 131 | VWIDCYCIDCF | 0.708 | 23 | SB | Small t | A2402 |
| 135 | CYCIDCFTQWF | 0.672 | 34 | SB | Small t | A2402 |
| 156 | WWVQIIGETPF | 0.515 | 190 | WB | Small t | A2402 |
| 123 | KFLRKEPLVWI | 0.489 | 251 | WB | Small t | A2402 |
| 75 | TWNSSEVCADF | 0.462 | 339 | WB | Small t | A2402 |
| 135 | CYCIDCFTQWF | 0.775 | 11 | SB | Small t | A2403 |
| 123 | KFLRKEPLVWI | 0.525 | 170 | WB | Small t | A2403 |
| 75 | TWNSSEVCADF | 0.428 | 485 | WB | Small t | A2403 |
| 8 | ESMELMDLLGL | 0.474 | 297 | WB | Small t | A2601 |
| 159 | QIIGETPFRDL | 0.618 | 62 | WB | Small t | A2602 |
| 8 | ESMELMDLLGL | 0.433 | 462 | WB | Small t | A2602 |
| 50 | KMKRMNTLYKK | 0.760 | 13 | SB | Small t | A3001 |
| 28 | LMRKAYLKKCK | 0.745 | 15 | SB | Small t | A3001 |
| 116 | RLRHLNRKFLR | 0.667 | 36 | SB | Small t | A3001 |
| 117 | LRHLNRKFLRK | 0.531 | 160 | WB | Small t | A3001 |
| 34 | LKKCKEFHPDK | 0.429 | 482 | WB | Small t | A3001 |
| 116 | RLRHLNRKFLR | 0.853 | 4 | SB | Small t | A3101 |
| 50 | KMKRMNTLYKK | 0.838 | 5 | SB | Small t | A3101 |
| 20 | RAAWGNLPLMR | 0.617 | 63 | WB | Small t | A3101 |
| 157 | WVQIIGETPFR | 0.496 | 232 | WB | Small t | A3101 |
| 112 | LCQLRLRHLNR | 0.451 | 380 | WB | Small t | A3101 |
| 31 | KAYLKKCKEFH | 0.448 | 392 | WB | Small t | A3101 |
| 113 | CQLRLRHLNRK | 0.434 | 458 | WB | Small t | A3101 |
| 28 | LMRKAYLKKCK | 0.433 | 461 | WB | Small t | A3101 |
| 116 | RLRHLNRKFLR | 0.594 | 80 | WB | Small t | A3301 |
| 157 | WVQIIGETPFR | 0.716 | 21 | SB | Small t | A6801 |
| 20 | RAAWGNLPLMR | 0.562 | 114 | WB | Small t | A6801 |
| 56 | TLYKKMEQDVK | 0.549 | 131 | WB | Small t | A6801 |
| 25 | NLPLMRKAYLK | 0.482 | 272 | WB | Small t | A6801 |
| 108 | CPCMLCQLRLR | 0.467 | 319 | WB | Small t | A6801 |
| 8 | ESMELMDLLGL | 0.653 | 42 | SB | Small t | A6802 |
| 77 | NSSEVCADFPL | 0.649 | 44 | SB | Small t | A6802 |
| 11 | ELMDLLGLERA | 0.570 | 105 | WB | Small t | A6802 |
| 105 | SVHCPCMLCQL | 0.506 | 209 | WB | Small t | A6802 |
| 137 | CIDCFTQWFGL | 0.468 | 315 | WB | Small t | A6802 |
| 128 | EPLVWIDCYCI | 0.606 | 71 | WB | Small t | A6901 |
| 8 | ESMELMDLLGL | 0.560 | 116 | WB | Small t | A6901 |
| 11 | ELMDLLGLERA | 0.539 | 145 | WB | Small t | A6901 |
| 148 | DLTEETLQWWV | 0.482 | 273 | WB | Small t | A6901 |
| 55 | NTLYKKMEQDV | 0.432 | 464 | WB | Small t | A6901 |
| 114 | QLRLRHLNRKF | 0.463 | 333 | WB | Small t | B0801 |
| 114 | QLRLRHLNRKF | 0.473 | 298 | WB | Small t | B1501 |
| 18 | LERAAWGNLPL | 0.572 | 102 | WB | Small t | B1801 |
| 41 | HPDKGGDEDKM | 0.545 | 136 | WB | Small t | B3501 |
| 97 | WPICSKKPSVH | 0.529 | 164 | WB | Small t | B3501 |
| 156 | WWVQIIGETPF | 0.482 | 270 | WB | Small t | B3501 |
| 6 | REESMELMDLL | 0.673 | 34 | SB | Small t | B4001 |
| 18 | LERAAWGNLPL | 0.630 | 54 | WB | Small t | B4001 |
| 47 | DEDKMKRMNTL | 0.434 | 458 | WB | Small t | B4001 |
| 6 | REESMELMDLL | 0.511 | 198 | WB | Small t | B4002 |
| 151 | EETLQWWVQII | 0.500 | 224 | WB | Small t | B4002 |
| 128 | EPLVWIDCYCI | 0.605 | 72 | WB | Small t | B5101 |
| 128 | EPLVWIDCYCI | 0.529 | 163 | WB | Small t | B5301 |
| 85 | FPLCPDTLYCK | 0.471 | 304 | WB | Small t | B5401 |
| 66 | KVAHQPDFGTW | 0.658 | 40 | SB | Small t | B5801 |
| 122 | RKFLRKEPLVW | 0.499 | 225 | WB | Small t | B5801 |

[0900] Preferred BK virus fragments of large T antigen capable of interacting with one or more MHC class I molecules are listed in Table M.

TABLE M
Prediction of BK virus Large T protein
specific MHC class1, 8-, 9-, 10-, 11-mer
peptide binders for 42 MHC class 1 alleles
(see FIG. 11) using the
http://www.cbs.dtu.dk/services/NetMHC/
database. The MHC class 1 molecules for
which no binders were found are not listed.

| | | | | | | |
|---|---|---|---|---|---|---|
| | | log- | affinity | Bind | Protein | |
| pos | peptide | score | (nM) | Level | Name | Allele |

8-mers

| | | | | | | |
|---|---|---|---|---|---|---|
| 77 | NSSEVPTY | 0.514 | 193 | WB | Large T | A0101 |
| 611 | YTFSRMKY | 0.480 | 276 | WB | Large T | A0101 |
| 175 | KLMEKYSV | 0.847 | 5 | SB | Large T | A0201 |
| 388 | YMAGVAWL | 0.833 | 6 | SB | Large T | A0201 |
| 287 | FLLLGMYL | 0.807 | 8 | SB | Large T | A0201 |
| 501 | YLDGSVKV | 0.800 | 8 | SB | Large T | A0201 |
| 272 | KLITEYAV | 0.733 | 18 | SB | Large T | A0201 |
| 469 | YMVVFEDV | 0.711 | 22 | SB | Large T | A0201 |
| 579 | LLIWFRPV | 0.705 | 24 | SB | Large T | A0201 |
| 372 | KMDLIFGA | 0.695 | 27 | SB | Large T | A0201 |
| 155 | RTLACFAV | 0.663 | 38 | SB | Large T | A0201 |
| 293 | YLEFQYNV | 0.656 | 41 | SB | Large T | A0201 |
| 527 | VTMNEYPV | 0.629 | 55 | WB | Large T | A0201 |
| 563 | FLLEKRIL | 0.620 | 61 | WB | Large T | A0201 |
| 322 | FANAIIFA | 0.612 | 66 | WB | Large T | A0201 |
| 231 | YLLYSALT | 0.611 | 67 | WB | Large T | A0201 |
| 557 | SLQNSEFL | 0.608 | 69 | WB | Large T | A0201 |
| 11 | ELMDLLGL | 0.599 | 76 | WB | Large T | A0201 |
| 215 | KLCTFSFL | 0.590 | 84 | WB | Large T | A0201 |
| 457 | RLTFELGV | 0.587 | 86 | WB | Large T | A0201 |
| 398 | LLPKMDSV | 0.582 | 91 | WB | Large T | A0201 |
| 465 | AIDQYMVV | 0.565 | 111 | WB | Large T | A0201 |
| 369 | ILDKMDLI | 0.551 | 128 | WB | Large T | A0201 |
| 74 | GTWNSSEV | 0.542 | 141 | WB | Large T | A0201 |
| 603 | RLDSEISM | 0.535 | 153 | WB | Large T | A0201 |
| 569 | ILQSGMTL | 0.529 | 164 | WB | Large T | A0201 |
| 573 | GMTLLLLL | 0.519 | 181 | WB | Large T | A0201 |
| 146 | FLSQAVFS | 0.495 | 234 | WB | Large T | A0201 |
| 21 | AAWGNLPL | 0.473 | 297 | WB | Large T | A0201 |
| 448 | ALNVNLPM | 0.468 | 316 | WB | Large T | A0201 |
| 609 | SMYTFSRM | 0.459 | 347 | WB | Large T | A0201 |
| 574 | MTLLLLLI | 0.458 | 350 | WB | Large T | A0201 |
| 60 | KMEQDVKV | 0.452 | 375 | WB | Large T | A0201 |
| 388 | YMAGVAWL | 0.861 | 4 | SB | Large T | A0202 |
| 175 | KLMEKYSV | 0.858 | 4 | SB | Large T | A0202 |
| 293 | YLEFQYNV | 0.811 | 7 | SB | Large T | A0202 |
| 287 | FLLLGMYL | 0.800 | 8 | SB | Large T | A0202 |
| 272 | KLITEYAV | 0.772 | 11 | SB | Large T | A0202 |
| 11 | ELMDLLGL | 0.762 | 13 | SB | Large T | A0202 |
| 146 | FLSQAVFS | 0.740 | 16 | SB | Large T | A0202 |
| 322 | FANAIIFA | 0.740 | 16 | SB | Large T | A0202 |
| 215 | KLCTFSFL | 0.732 | 18 | SB | Large T | A0202 |
| 398 | LLPKMDSV | 0.721 | 20 | SB | Large T | A0202 |
| 501 | YLDGSVKV | 0.716 | 21 | SB | Large T | A0202 |
| 557 | SLQNSEFL | 0.712 | 22 | SB | Large T | A0202 |
| 570 | LQSGMTLL | 0.696 | 26 | SB | Large T | A0202 |
| 372 | KMDLIFGA | 0.672 | 34 | SB | Large T | A0202 |
| 457 | RLTFELGV | 0.666 | 37 | SB | Large T | A0202 |
| 573 | GMTLLLLL | 0.655 | 41 | SB | Large T | A0202 |
| 579 | LLIWFRPV | 0.643 | 47 | SB | Large T | A0202 |
| 9 | SMELMDLL | 0.628 | 56 | WB | Large T | A0202 |
| 469 | YMVVFEDV | 0.606 | 70 | WB | Large T | A0202 |
| 558 | LQNSEFLL | 0.596 | 78 | WB | Large T | A0202 |
| 563 | FLLEKRIL | 0.593 | 81 | WB | Large T | A0202 |
| 50 | KMKRMNTL | 0.586 | 88 | WB | Large T | A0202 |
| 369 | ILDKMDLI | 0.585 | 89 | WB | Large T | A0202 |
| 391 | GVAWLHCL | 0.577 | 96 | WB | Large T | A0202 |
| 491 | GINNLDSL | 0.576 | 98 | WB | Large T | A0202 |
| 184 | FISRHMCA | 0.571 | 103 | WB | Large T | A0202 |
| 514 | HLNKRTQI | 0.561 | 115 | WB | Large T | A0202 |
| 377 | FGAHGNAV | 0.549 | 131 | WB | Large T | A0202 |
| 569 | ILQSGMTL | 0.546 | 135 | WB | Large T | A0202 |
| 527 | VTMNEYPV | 0.533 | 156 | WB | Large T | A0202 |
| 226 | GVNKEYLL | 0.525 | 171 | WB | Large T | A0202 |
| 448 | ALNVNLPM | 0.512 | 196 | WB | Large T | A0202 |
| 355 | HMTREEML | 0.510 | 200 | WB | Large T | A0202 |
| 60 | KMEQDVKV | 0.505 | 211 | WB | Large T | A0202 |
| 27 | PLMRKAYL | 0.488 | 254 | WB | Large T | A0202 |
| 603 | RLDSEISM | 0.481 | 276 | WB | Large T | A0202 |
| 144 | HQFLSQAV | 0.472 | 301 | WB | Large T | A0202 |
| 465 | AIDQYMVV | 0.458 | 353 | WB | Large T | A0202 |
| 155 | RTLACFAV | 0.443 | 412 | WB | Large T | A0202 |
| 609 | SMYTFSRM | 0.442 | 419 | WB | Large T | A0202 |
| 464 | VAIDQYMV | 0.429 | 483 | WB | Large T | A0202 |
| 388 | YMAGVAWL | 0.893 | 3 | SB | Large T | A0203 |
| 579 | LLIWFRPV | 0.884 | 3 | SB | Large T | A0203 |
| 175 | KLMEKYSV | 0.870 | 4 | SB | Large T | A0203 |
| 501 | YLDGSVKV | 0.811 | 7 | SB | Large T | A0203 |
| 457 | RLTFELGV | 0.781 | 10 | SB | Large T | A0203 |
| 287 | FLLLGMYL | 0.780 | 10 | SB | Large T | A0203 |
| 272 | KLITEYAV | 0.779 | 10 | SB | Large T | A0203 |
| 398 | LLPKMDSV | 0.777 | 11 | SB | Large T | A0203 |
| 293 | YLEFQYNV | 0.769 | 12 | SB | Large T | A0203 |
| 50 | KMKRMNTL | 0.758 | 13 | SB | Large T | A0203 |
| 469 | YMVVFEDV | 0.736 | 17 | SB | Large T | A0203 |
| 11 | ELMDLLGL | 0.712 | 22 | SB | Large T | A0203 |
| 569 | ILQSGMTL | 0.711 | 22 | SB | Large T | A0203 |
| 322 | FANAIIFA | 0.697 | 26 | SB | Large T | A0203 |
| 184 | FISRHMCA | 0.689 | 28 | SB | Large T | A0203 |
| 514 | HLNKRTQI | 0.680 | 31 | SB | Large T | A0203 |
| 609 | SMYTFSRM | 0.642 | 48 | SB | Large T | A0203 |
| 563 | FLLEKRIL | 0.628 | 55 | WB | Large T | A0203 |
| 372 | KMDLIFGA | 0.622 | 59 | WB | Large T | A0203 |
| 570 | LQSGMTLL | 0.608 | 69 | WB | Large T | A0203 |
| 215 | KLCTFSFL | 0.607 | 70 | WB | Large T | A0203 |
| 391 | GVAWLHCL | 0.570 | 104 | WB | Large T | A0203 |
| 448 | ALNVNLPM | 0.556 | 122 | WB | Large T | A0203 |
| 188 | HMCAGHNI | 0.551 | 128 | WB | Large T | A0203 |
| 527 | VTMNEYPV | 0.548 | 132 | WB | Large T | A0203 |
| 573 | GMTLLLLL | 0.535 | 153 | WB | Large T | A0203 |
| 520 | QIFPPGLV | 0.531 | 159 | WB | Large T | A0203 |
| 146 | FLSQAVFS | 0.528 | 165 | WB | Large T | A0203 |
| 144 | HQFLSQAV | 0.527 | 166 | WB | Large T | A0203 |
| 491 | GINNLDSL | 0.526 | 168 | WB | Large T | A0203 |
| 557 | SLQNSEFL | 0.517 | 186 | WB | Large T | A0203 |
| 465 | AIDQYMVV | 0.513 | 193 | WB | Large T | A0203 |
| 155 | RTLACFAV | 0.509 | 202 | WB | Large T | A0203 |
| 464 | VAIDQYMV | 0.497 | 232 | WB | Large T | A0203 |
| 551 | KIYLRKSL | 0.489 | 252 | WB | Large T | A0203 |
| 369 | ILDKMDLI | 0.466 | 321 | WB | Large T | A0203 |
| 654 | SQVSDTSA | 0.462 | 338 | WB | Large T | A0203 |
| 231 | YLLYSALT | 0.453 | 372 | WB | Large T | A0203 |
| 199 | LTPHRHRV | 0.447 | 394 | WB | Large T | A0203 |
| 60 | KMEQDVKV | 0.429 | 484 | WB | Large T | A0203 |
| 615 | RMKYNICM | 0.427 | 490 | WB | Large T | A0203 |
| 175 | KLMEKYSV | 0.762 | 13 | SB | Large T | A0204 |
| 388 | YMAGVAWL | 0.708 | 23 | SB | Large T | A0204 |
| 272 | KLITEYAV | 0.652 | 43 | SB | Large T | A0204 |
| 527 | VTMNEYPV | 0.635 | 52 | WB | Large T | A0204 |
| 579 | LLIWFRPV | 0.627 | 56 | WB | Large T | A0204 |
| 60 | KMEQDVKV | 0.615 | 64 | WB | Large T | A0204 |
| 287 | FLLLGMYL | 0.601 | 75 | WB | Large T | A0204 |
| 569 | ILQSGMTL | 0.572 | 102 | WB | Large T | A0204 |
| 501 | YLDGSVKV | 0.571 | 104 | WB | Large T | A0204 |
| 557 | SLQNSEFL | 0.565 | 110 | WB | Large T | A0204 |
| 563 | FLLEKRIL | 0.554 | 124 | WB | Large T | A0204 |
| 293 | YLEFQYNV | 0.537 | 149 | WB | Large T | A0204 |
| 215 | KLCTFSFL | 0.534 | 154 | WB | Large T | A0204 |
| 11 | ELMDLLGL | 0.521 | 178 | WB | Large T | A0204 |
| 469 | YMVVFEDV | 0.512 | 195 | WB | Large T | A0204 |
| 464 | VAIDQYMV | 0.512 | 196 | WB | Large T | A0204 |
| 536 | KTLQARFV | 0.494 | 239 | WB | Large T | A0204 |
| 155 | RTLACFAV | 0.475 | 293 | WB | Large T | A0204 |
| 398 | LLPKMDSV | 0.460 | 345 | WB | Large T | A0204 |
| 465 | AIDQYMVV | 0.459 | 349 | WB | Large T | A0204 |
| 457 | RLTFELGV | 0.448 | 393 | WB | Large T | A0204 |
| 50 | KMKRMNTL | 0.443 | 412 | WB | Large T | A0204 |
| 175 | KLMEKYSV | 0.879 | 3 | SB | Large T | A0206 |
| 155 | RTLACFAV | 0.822 | 6 | SB | Large T | A0206 |
| 272 | KLITEYAV | 0.820 | 6 | SB | Large T | A0206 |
| 579 | LLIWFRPV | 0.813 | 7 | SB | Large T | A0206 |
| 287 | FLLLGMYL | 0.784 | 10 | SB | Large T | A0206 |
| 654 | SQVSDTSA | 0.782 | 10 | SB | Large T | A0206 |
| 501 | YLDGSVKV | 0.771 | 11 | SB | Large T | A0206 |
| 388 | YMAGVAWL | 0.737 | 17 | SB | Large T | A0206 |
| 469 | YMVVFEDV | 0.730 | 18 | SB | Large T | A0206 |
| 267 | KQVSWKLI | 0.720 | 20 | SB | Large T | A0206 |
| 144 | HQFLSQAV | 0.705 | 24 | SB | Large T | A0206 |
| 372 | KMDLIFGA | 0.695 | 27 | SB | Large T | A0206 |
| 570 | LQSGMTLL | 0.694 | 27 | SB | Large T | A0206 |
| 296 | FQYNVEEC | 0.688 | 29 | SB | Large T | A0206 |
| 457 | RLTFELGV | 0.678 | 32 | SB | Large T | A0206 |
| 398 | LLPKMDSV | 0.673 | 34 | SB | Large T | A0206 |
| 558 | LQNSEFLL | 0.665 | 37 | SB | Large T | A0206 |
| 338 | CQQAVDTV | 0.654 | 42 | SB | Large T | A0206 |
| 322 | FANAIIFA | 0.648 | 45 | SB | Large T | A0206 |
| 465 | AIDQYMVV | 0.646 | 45 | SB | Large T | A0206 |
| 74 | GTWNSSEV | 0.645 | 46 | SB | Large T | A0206 |
| 527 | VTMNEYPV | 0.615 | 64 | WB | Large T | A0206 |
| 293 | YLEFQYNV | 0.613 | 65 | WB | Large T | A0206 |
| 11 | ELMDLLGL | 0.594 | 80 | WB | Large T | A0206 |
| 536 | KTLQARFV | 0.593 | 81 | WB | Large T | A0206 |
| 464 | VAIDQYMV | 0.572 | 102 | WB | Large T | A0206 |
| 21 | AAWGNLPL | 0.571 | 104 | WB | Large T | A0206 |
| 383 | AVLEQYMA | 0.539 | 146 | WB | Large T | A0206 |
| 563 | FLLEKRIL | 0.534 | 155 | WB | Large T | A0206 |
| 574 | MTLLLLLI | 0.517 | 185 | WB | Large T | A0206 |
| 215 | KLCTFSFL | 0.512 | 195 | WB | Large T | A0206 |
| 184 | FISRHMCA | 0.511 | 197 | WB | Large T | A0206 |
| 519 | TQIFPPGL | 0.505 | 210 | WB | Large T | A0206 |
| 377 | FGAHGNAV | 0.470 | 308 | WB | Large T | A0206 |
| 335 | KSICQQAV | 0.469 | 311 | WB | Large T | A0206 |
| 369 | ILDKMDLI | 0.464 | 328 | WB | Large T | A0206 |
| 520 | QIFPPGLV | 0.458 | 352 | WB | Large T | A0206 |
| 391 | GVAWLHCL | 0.457 | 355 | WB | Large T | A0206 |
| 231 | YLLYSALT | 0.451 | 380 | WB | Large T | A0206 |
| 569 | ILQSGMTL | 0.445 | 406 | WB | Large T | A0206 |
| 339 | QQAVDTVL | 0.443 | 414 | WB | Large T | A0206 |
| 146 | FLSQAVFS | 0.438 | 436 | WB | Large T | A0206 |
| 169 | AQILYKKL | 0.435 | 453 | WB | Large T | A0206 |
| 60 | KMEQDVKV | 0.427 | 490 | WB | Large T | A0206 |
| 501 | YLDGSVKV | 0.977 | 1 | SB | Large T | A0211 |
| 388 | YMAGVAWL | 0.963 | 1 | SB | Large T | A0211 |
| 175 | KLMEKYSV | 0.945 | 1 | SB | Large T | A0211 |
| 287 | FLLLGMYL | 0.937 | 1 | SB | Large T | A0211 |
| 579 | LLIWFRPV | 0.922 | 2 | SB | Large T | A0211 |
| 465 | AIDQYMVV | 0.919 | 2 | SB | Large T | A0211 |
| 272 | KLITEYAV | 0.906 | 2 | SB | Large T | A0211 |
| 11 | ELMDLLGL | 0.904 | 2 | SB | Large T | A0211 |
| 398 | LLPKMDSV | 0.900 | 2 | SB | Large T | A0211 |
| 457 | RLTFELGV | 0.899 | 2 | SB | Large T | A0211 |
| 293 | YLEFQYNV | 0.897 | 3 | SB | Large T | A0211 |
| 557 | SLQNSEFL | 0.882 | 3 | SB | Large T | A0211 |
| 569 | ILQSGMTL | 0.870 | 4 | SB | Large T | A0211 |
| 469 | YMVVFEDV | 0.866 | 4 | SB | Large T | A0211 |
| 563 | FLLEKRIL | 0.862 | 4 | SB | Large T | A0211 |
| 603 | RLDSEISM | 0.848 | 5 | SB | Large T | A0211 |
| 60 | KMEQDVKV | 0.845 | 5 | SB | Large T | A0211 |
| 369 | ILDKMDLI | 0.828 | 6 | SB | Large T | A0211 |
| 573 | GMTLLLLL | 0.824 | 6 | SB | Large T | A0211 |
| 215 | KLCTFSFL | 0.821 | 6 | SB | Large T | A0211 |
| 520 | QIFPPGLV | 0.811 | 7 | SB | Large T | A0211 |
| 609 | SMYTFSRM | 0.780 | 10 | SB | Large T | A0211 |
| 372 | KMDLIFGA | 0.777 | 11 | SB | Large T | A0211 |
| 464 | VAIDQYMV | 0.743 | 16 | SB | Large T | A0211 |
| 14 | DLLGLERA | 0.725 | 19 | SB | Large T | A0211 |
| 74 | GTWNSSEV | 0.720 | 20 | SB | Large T | A0211 |
| 391 | GVAWLHCL | 0.719 | 20 | SB | Large T | A0211 |
| 485 | DLPSGHGI | 0.719 | 21 | SB | Large T | A0211 |
| 155 | RTLACFAV | 0.693 | 27 | SB | Large T | A0211 |
| 442 | DLCGGKAL | 0.686 | 29 | SB | Large T | A0211 |
| 231 | YLLYSALT | 0.682 | 31 | SB | Large T | A0211 |
| 536 | KTLQARFV | 0.668 | 36 | SB | Large T | A0211 |
| 355 | HMTREEML | 0.667 | 36 | SB | Large T | A0211 |
| 27 | PLMRKAYL | 0.666 | 37 | SB | Large T | A0211 |
| 406 | IFDFLHCV | 0.646 | 46 | SB | Large T | A0211 |
| 514 | HLNKRTQI | 0.642 | 48 | SB | Large T | A0211 |
| 21 | AAWGNLPL | 0.638 | 50 | WB | Large T | A0211 |
| 9 | SMELMDLL | 0.635 | 51 | WB | Large T | A0211 |
| 56 | TLYKKMEQ | 0.625 | 57 | WB | Large T | A0211 |
| 188 | HMCAGHNI | 0.618 | 62 | WB | Large T | A0211 |
| 576 | LLLLLIWF | 0.614 | 64 | WB | Large T | A0211 |
| 146 | FLSQAVFS | 0.597 | 78 | WB | Large T | A0211 |
| 383 | AVLEQYMA | 0.594 | 81 | WB | Large T | A0211 |
| 405 | VIFDFLHC | 0.587 | 87 | WB | Large T | A0211 |
| 344 | TVLAKKRV | 0.583 | 91 | WB | Large T | A0211 |
| 50 | KMKRMNTL | 0.582 | 92 | WB | Large T | A0211 |
| 288 | LLLGMYLE | 0.577 | 96 | WB | Large T | A0211 |
| 448 | ALNVNLPM | 0.573 | 100 | WB | Large T | A0211 |
| 368 | HILDKMDL | 0.570 | 104 | WB | Large T | A0211 |
| 527 | VTMNEYPV | 0.561 | 115 | WB | Large T | A0211 |
| 150 | AVFSNRTL | 0.555 | 122 | WB | Large T | A0211 |
| 184 | FISRHMCA | 0.545 | 137 | WB | Large T | A0211 |
| 199 | LTPHRHRV | 0.543 | 140 | WB | Large T | A0211 |
| 551 | KIYLRKSL | 0.523 | 173 | WB | Large T | A0211 |
| 3 | VLNREESM | 0.494 | 239 | WB | Large T | A0211 |
| 491 | GINNLDSL | 0.485 | 262 | WB | Large T | A0211 |
| 291 | GMYLEFQY | 0.468 | 315 | WB | Large T | A0211 |
| 350 | RVDTLHMT | 0.466 | 322 | WB | Large T | A0211 |
| 142 | DLHQFLSQ | 0.459 | 348 | WB | Large T | A0211 |
| 401 | KMDSVIFD | 0.458 | 350 | WB | Large T | A0211 |
| 673 | HLCKGFQC | 0.458 | 350 | WB | Large T | A0211 |
| 289 | LLGMYLEF | 0.450 | 383 | WB | Large T | A0211 |
| 577 | LLLLIWFR | 0.450 | 384 | WB | Large T | A0211 |
| 439 | GLLDLCGG | 0.448 | 390 | WB | Large T | A0211 |
| 501 | YLDGSVKV | 0.940 | 1 | SB | Large T | A0212 |
| 388 | YMAGVAWL | 0.924 | 2 | SB | Large T | A0212 |
| 175 | KLMEKYSV | 0.912 | 2 | SB | Large T | A0212 |
| 287 | FLLLGMYL | 0.903 | 2 | SB | Large T | A0212 |
| 398 | LLPKMDSV | 0.879 | 3 | SB | Large T | A0212 |
| 469 | YMVVFEDV | 0.878 | 3 | SB | Large T | A0212 |
| 293 | YLEFQYNV | 0.872 | 4 | SB | Large T | A0212 |
| 579 | LLIWFRPV | 0.853 | 4 | SB | Large T | A0212 |
| 563 | FLLEKRIL | 0.852 | 4 | SB | Large T | A0212 |
| 272 | KLITEYAV | 0.852 | 4 | SB | Large T | A0212 |
| 465 | AIDQYMVV | 0.843 | 5 | SB | Large T | A0212 |
| 11 | ELMDLLGL | 0.842 | 5 | SB | Large T | A0212 |
| 569 | ILQSGMTL | 0.821 | 6 | SB | Large T | A0212 |
| 457 | RLTFELGV | 0.787 | 10 | SB | Large T | A0212 |
| 557 | SLQNSEFL | 0.757 | 13 | SB | Large T | A0212 |
| 609 | SMYTFSRM | 0.711 | 22 | SB | Large T | A0212 |
| 464 | VAIDQYMV | 0.698 | 26 | SB | Large T | A0212 |
| 60 | KMEQDVKV | 0.666 | 37 | SB | Large T | A0212 |
| 355 | HMTREEML | 0.663 | 38 | SB | Large T | A0212 |
| 603 | RLDSEISM | 0.662 | 38 | SB | Large T | A0212 |
| 368 | HILDKMDL | 0.659 | 39 | SB | Large T | A0212 |
| 3 | VLNREESM | 0.639 | 49 | SB | Large T | A0212 |
| 184 | FISRHMCA | 0.635 | 52 | WB | Large T | A0212 |
| 405 | VIFDFLHC | 0.629 | 55 | WB | Large T | A0212 |
| 215 | KLCTFSFL | 0.615 | 64 | WB | Large T | A0212 |
| 369 | ILDKMDLI | 0.609 | 68 | WB | Large T | A0212 |
| 27 | PLMRKAYL | 0.597 | 78 | WB | Large T | A0212 |
| 372 | KMDLIFGA | 0.588 | 86 | WB | Large T | A0212 |
| 50 | KMKRMNTL | 0.579 | 94 | WB | Large T | A0212 |
| 520 | QIFPPGLV | 0.577 | 96 | WB | Large T | A0212 |
| 573 | GMTLLLLL | 0.577 | 96 | WB | Large T | A0212 |
| 527 | VTMNEYPV | 0.571 | 104 | WB | Large T | A0212 |
| 188 | HMCAGHNI | 0.546 | 135 | WB | Large T | A0212 |
| 14 | DLLGLERA | 0.523 | 174 | WB | Large T | A0212 |
| 442 | DLCGGKAL | 0.521 | 178 | WB | Large T | A0212 |
| 74 | GTWNSSEV | 0.521 | 178 | WB | Large T | A0212 |
| 56 | TLYKKMEQ | 0.520 | 180 | WB | Large T | A0212 |
| 485 | DLPSGHGI | 0.518 | 183 | WB | Large T | A0212 |
| 21 | AAWGNLPL | 0.511 | 197 | WB | Large T | A0212 |
| 391 | GVAWLHCL | 0.511 | 199 | WB | Large T | A0212 |
| 231 | YLLYSALT | 0.504 | 213 | WB | Large T | A0212 |
| 288 | LLLGMYLE | 0.486 | 259 | WB | Large T | A0212 |
| 514 | HLNKRTQI | 0.480 | 276 | WB | Large T | A0212 |
| 199 | LTPHRHRV | 0.477 | 285 | WB | Large T | A0212 |
| 155 | RTLACFAV | 0.476 | 290 | WB | Large T | A0212 |
| 377 | FGAHGNAV | 0.461 | 340 | WB | Large T | A0212 |
| 146 | FLSQAVFS | 0.442 | 418 | WB | Large T | A0212 |
| 9 | SMELMDLL | 0.426 | 495 | WB | Large T | A0212 |
| 501 | YLDGSVKV | 0.928 | 2 | SB | Large T | A0216 |
| 388 | YMAGVAWL | 0.917 | 2 | SB | Large T | A0216 |
| 175 | KLMEKYSV | 0.905 | 2 | SB | Large T | A0216 |
| 398 | LLPKMDSV | 0.895 | 3 | SB | Large T | A0216 |
| 287 | FLLLGMYL | 0.891 | 3 | SB | Large T | A0216 |
| 293 | YLEFQYNV | 0.849 | 5 | SB | Large T | A0216 |
| 557 | SLQNSEFL | 0.846 | 5 | SB | Large T | A0216 |
| 569 | ILQSGMTL | 0.836 | 5 | SB | Large T | A0216 |
| 272 | KLITEYAV | 0.832 | 6 | SB | Large T | A0216 |
| 465 | AIDQYMVV | 0.829 | 6 | SB | Large T | A0216 |
| 27 | PLMRKAYL | 0.829 | 6 | SB | Large T | A0216 |
| 579 | LLIWFRPV | 0.804 | 8 | SB | Large T | A0216 |
| 215 | KLCTFSFL | 0.784 | 10 | SB | Large T | A0216 |
| 11 | ELMDLLGL | 0.740 | 16 | SB | Large T | A0216 |
| 74 | GTWNSSEV | 0.734 | 17 | SB | Large T | A0216 |
| 60 | KMEQDVKV | 0.732 | 18 | SB | Large T | A0216 |
| 457 | RLTFELGV | 0.727 | 19 | SB | Large T | A0216 |
| 469 | YMVVFEDV | 0.718 | 21 | SB | Large T | A0216 |
| 563 | FLLEKRIL | 0.709 | 23 | SB | Large T | A0216 |
| 520 | QIFPPGLV | 0.701 | 25 | SB | Large T | A0216 |
| 514 | HLNKRTQI | 0.689 | 29 | SB | Large T | A0216 |
| 369 | ILDKMDLI | 0.673 | 34 | SB | Large T | A0216 |
| 56 | TLYKKMEQ | 0.662 | 38 | SB | Large T | A0216 |
| 50 | KMKRMNTL | 0.651 | 43 | SB | Large T | A0216 |
| 609 | SMYTFSRM | 0.647 | 45 | SB | Large T | A0216 |
| 603 | RLDSEISM | 0.626 | 56 | WB | Large T | A0216 |
| 355 | HMTREEML | 0.623 | 58 | WB | Large T | A0216 |
| 21 | AAWGNLPL | 0.600 | 75 | WB | Large T | A0216 |
| 442 | DLCGGKAL | 0.597 | 78 | WB | Large T | A0216 |
| 573 | GMTLLLLL | 0.595 | 79 | WB | Large T | A0216 |
| 464 | VAIDQYMV | 0.593 | 82 | WB | Large T | A0216 |
| 344 | TVLAKKRV | 0.583 | 91 | WB | Large T | A0216 |
| 199 | LTPHRHRV | 0.568 | 106 | WB | Large T | A0216 |
| 14 | DLLGLERA | 0.566 | 109 | WB | Large T | A0216 |
| 485 | DLPSGHGI | 0.550 | 130 | WB | Large T | A0216 |
| 536 | KTLQARFV | 0.548 | 132 | WB | Large T | A0216 |
| 9 | SMELMDLL | 0.532 | 158 | WB | Large T | A0216 |
| 391 | GVAWLHCL | 0.522 | 176 | WB | Large T | A0216 |
| 150 | AVFSNRTL | 0.516 | 187 | WB | Large T | A0216 |
| 188 | HMCAGHNI | 0.512 | 195 | WB | Large T | A0216 |
| 527 | VTMNEYPV | 0.506 | 210 | WB | Large T | A0216 |
| 146 | FLSQAVFS | 0.504 | 213 | WB | Large T | A0216 |
| 231 | YLLYSALT | 0.501 | 220 | WB | Large T | A0216 |
| 491 | GINNLDSL | 0.476 | 290 | WB | Large T | A0216 |
| 184 | FISRHMCA | 0.474 | 296 | WB | Large T | A0216 |
| 551 | KIYLRKSL | 0.468 | 315 | WB | Large T | A0216 |
| 155 | RTLACFAV | 0.465 | 327 | WB | Large T | A0216 |
| 673 | HLCKGFQC | 0.463 | 334 | WB | Large T | A0216 |
| 448 | ALNVNLPM | 0.442 | 418 | WB | Large T | A0216 |
| 372 | KMDLIFGA | 0.442 | 419 | WB | Large T | A0216 |
| 406 | IFDFLHCV | 0.433 | 460 | WB | Large T | A0216 |
| 3 | VLNREESM | 0.429 | 482 | WB | Large T | A0216 |
| 501 | YLDGSVKV | 0.939 | 1 | SB | Large T | A0219 |
| 388 | YMAGVAWL | 0.930 | 2 | SB | Large T | A0219 |
| 287 | FLLLGMYL | 0.835 | 5 | SB | Large T | A0219 |
| 11 | ELMDLLGL | 0.807 | 8 | SB | Large T | A0219 |
| 175 | KLMEKYSV | 0.800 | 8 | SB | Large T | A0219 |
| 569 | ILQSGMTL | 0.780 | 10 | SB | Large T | A0219 |
| 398 | LLPKMDSV | 0.713 | 22 | SB | Large T | A0219 |
| 293 | YLEFQYNV | 0.711 | 22 | SB | Large T | A0219 |
| 557 | SLQNSEFL | 0.660 | 39 | SB | Large T | A0219 |
| 465 | AIDQYMVV | 0.659 | 39 | SB | Large T | A0219 |
| 272 | KLITEYAV | 0.651 | 43 | SB | Large T | A0219 |
| 21 | AAWGNLPL | 0.637 | 51 | WB | Large T | A0219 |
| 457 | RLTFELGV | 0.599 | 76 | WB | Large T | A0219 |
| 27 | PLMRKAYL | 0.589 | 85 | WB | Large T | A0219 |
| 603 | RLDSEISM | 0.574 | 100 | WB | Large T | A0219 |
| 369 | ILDKMDLI | 0.567 | 108 | WB | Large T | A0219 |
| 469 | YMVVFEDV | 0.565 | 111 | WB | Large T | A0219 |
| 579 | LLIWFRPV | 0.564 | 112 | WB | Large T | A0219 |
| 563 | FLLEKRIL | 0.555 | 123 | WB | Large T | A0219 |
| 485 | DLPSGHGI | 0.542 | 142 | WB | Large T | A0219 |
| 74 | GTWNSSEV | 0.540 | 145 | WB | Large T | A0219 |
| 464 | VAIDQYMV | 0.507 | 208 | WB | Large T | A0219 |
| 355 | HMTREEML | 0.497 | 230 | WB | Large T | A0219 |
| 372 | KMDLIFGA | 0.431 | 469 | WB | Large T | A0219 |
| 406 | IFDFLHCV | 0.429 | 482 | WB | Large T | A0219 |
| 573 | GMTLLLLL | 0.426 | 497 | WB | Large T | A0219 |
| 53 | RMNTLYKK | 0.719 | 20 | SB | Large T | A0301 |
| 232 | LLYSALTR | 0.673 | 34 | SB | Large T | A0301 |
| 28 | LMRKAYLK | 0.671 | 35 | SB | Large T | A0301 |
| 394 | WLHCLLPK | 0.536 | 150 | WB | Large T | A0301 |
| 208 | AINNFCQK | 0.529 | 162 | WB | Large T | A0301 |
| 161 | AVYTTKEK | 0.526 | 169 | WB | Large T | A0301 |
| 577 | LLLLIWFR | 0.513 | 193 | WB | Large T | A0301 |
| 365 | RFNHILDK | 0.512 | 196 | WB | Large T | A0301 |
| 291 | GMYLEFQY | 0.507 | 207 | WB | Large T | A0301 |
| 31 | KAYLKKCK | 0.506 | 210 | WB | Large T | A0301 |
| 608 | ISMYTFSR | 0.489 | 252 | WB | Large T | A0301 |
| 413 | VVFNVPKR | 0.483 | 270 | WB | Large T | A0301 |
| 121 | SQHSTPPK | 0.481 | 274 | WB | Large T | A0301 |
| 156 | TLACFAVY | 0.475 | 294 | WB | Large T | A0301 |
| 222 | LICKGVNK | 0.438 | 435 | WB | Large T | A0301 |
| 195 | IIFFLTPH | 0.434 | 456 | WB | Large T | A0301 |
| 412 | CVVFNVPK | 0.428 | 486 | WB | Large T | A0301 |
| 208 | AINNFCQK | 0.764 | 12 | SB | Large T | A1101 |
| 161 | AVYTTKEK | 0.761 | 13 | SB | Large T | A1101 |
| 121 | SQHSTPPK | 0.746 | 15 | SB | Large T | A1101 |
| 325 | AIIFAESK | 0.737 | 17 | SB | Large T | A1101 |
| 341 | AVDTVLAK | 0.732 | 18 | SB | Large T | A1101 |
| 53 | RMNTLYKK | 0.727 | 19 | SB | Large T | A1101 |
| 608 | ISMYTFSR | 0.721 | 20 | SB | Large T | A1101 |
| 544 | RQIDFRPK | 0.709 | 23 | SB | Large T | A1101 |
| 505 | SVKVNLEK | 0.695 | 27 | SB | Large T | A1101 |
| 168 | KAQILYKK | 0.672 | 34 | SB | Large T | A1101 |
| 412 | CVVFNVPK | 0.665 | 37 | SB | Large T | A1101 |
| 669 | SQELHLCK | 0.657 | 40 | SB | Large T | A1101 |
| 31 | KAYLKKCK | 0.639 | 49 | SB | Large T | A1101 |
| 218 | TFSFLICK | 0.626 | 57 | WB | Large T | A1101 |
| 413 | VVFNVPKR | 0.613 | 65 | WB | Large T | A1101 |
| 537 | TLQARFVR | 0.609 | 68 | WB | Large T | A1101 |
| 470 | MVVFEDVK | 0.604 | 72 | WB | Large T | A1101 |
| 404 | SVIFDFLH | 0.596 | 79 | WB | Large T | A1101 |
| 222 | LICKGVNK | 0.581 | 93 | WB | Large T | A1101 |
| 560 | NSEFLLEK | 0.574 | 100 | WB | Large T | A1101 |
| 611 | YTFSRMKY | 0.568 | 107 | WB | Large T | A1101 |
| 148 | SQAVFSNR | 0.553 | 125 | WB | Large T | A1101 |
| 450 | NVNLPMER | 0.526 | 168 | WB | Large T | A1101 |
| 394 | WLHCLLPK | 0.499 | 226 | WB | Large T | A1101 |
| 291 | GMYLEFQY | 0.497 | 231 | WB | Large T | A1101 |
| 617 | KYNICMGK | 0.464 | 328 | WB | Large T | A1101 |
| 247 | ESIQGGLK | 0.464 | 331 | WB | Large T | A1101 |
| 577 | LLLLIWFR | 0.462 | 338 | WB | Large T | A1101 |
| 52 | KRMNTLYK | 0.454 | 367 | WB | Large T | A1101 |
| 678 | FQCFKRPK | 0.440 | 426 | WB | Large T | A1101 |
| 28 | LMRKAYLK | 0.435 | 452 | WB | Large T | A1101 |
| 365 | RFNHILDK | 0.427 | 494 | WB | Large T | A1101 |
| 408 | DFLHCVVF | 0.671 | 35 | SB | Large T | A2301 |
| 541 | RFVRQIDF | 0.664 | 37 | SB | Large T | A2301 |
| 610 | MYTFSRMK | 0.660 | 39 | SB | Large T | A2301 |
| 321 | HFANAIIF | 0.633 | 53 | WB | Large T | A2301 |
| 172 | LYKKLMEK | 0.626 | 57 | WB | Large T | A2301 |
| 104 | LFCHEDMF | 0.617 | 63 | WB | Large T | A2301 |
| 500 | DYLDGSVK | 0.609 | 68 | WB | Large T | A2301 |
| 582 | WFRPVADF | 0.608 | 69 | WB | Large T | A2301 |
| 230 | EYLLYSAL | 0.601 | 75 | WB | Large T | A2301 |
| 617 | KYNICMGK | 0.599 | 76 | WB | Large T | A2301 |
| 205 | RVSAINNF | 0.504 | 214 | WB | Large T | A2301 |
| 387 | QYMAGVAW | 0.502 | 219 | WB | Large T | A2301 |
| 576 | LLLLLIWF | 0.493 | 241 | WB | Large T | A2301 |
| 92 | WWSSFNEK | 0.492 | 243 | WB | Large T | A2301 |
| 145 | QFLSQAVF | 0.489 | 252 | WB | Large T | A2301 |
| 365 | RFNHILDK | 0.475 | 292 | WB | Large T | A2301 |
| 556 | KSLQNSEF | 0.460 | 343 | WB | Large T | A2301 |
| 159 | CFAVYTTK | 0.441 | 423 | WB | Large T | A2301 |
| 230 | EYLLYSAL | 0.680 | 32 | SB | Large T | A2402 |
| 145 | QFLSQAVF | 0.522 | 176 | WB | Large T | A2402 |
| 408 | DFLHCVVF | 0.519 | 182 | WB | Large T | A2402 |
| 531 | EYPVPKTL | 0.510 | 199 | WB | Large T | A2402 |
| 321 | HFANAIIF | 0.507 | 206 | WB | Large T | A2402 |
| 422 | YWLFKGPI | 0.506 | 210 | WB | Large T | A2402 |
| 541 | RFVRQIDF | 0.460 | 344 | WB | Large T | A2402 |
| 387 | QYMAGVAW | 0.445 | 405 | WB | Large T | A2402 |
| 387 | QYMAGVAW | 0.768 | 12 | SB | Large T | A2403 |
| 582 | WFRPVADF | 0.765 | 12 | SB | Large T | A2403 |
| 145 | QFLSQAVF | 0.713 | 22 | SB | Large T | A2403 |
| 541 | RFVRQIDF | 0.706 | 24 | SB | Large T | A2403 |
| 321 | HFANAIIF | 0.691 | 28 | SB | Large T | A2403 |
| 230 | EYLLYSAL | 0.591 | 83 | WB | Large T | A2403 |
| 408 | DFLHCVVF | 0.567 | 108 | WB | Large T | A2403 |
| 556 | KSLQNSEF | 0.546 | 135 | WB | Large T | A2403 |
| 104 | LFCHEDMF | 0.497 | 230 | WB | Large T | A2403 |
| 531 | EYPVPKTL | 0.496 | 233 | WB | Large T | A2403 |
| 611 | YTFSRMKY | 0.680 | 31 | SB | Large T | A2601 |
| 285 | DVFLLLGM | 0.588 | 86 | WB | Large T | A2601 |
| 11 | ELMDLLGL | 0.486 | 259 | WB | Large T | A2601 |
| 611 | YTFSRMKY | 0.903 | 2 | SB | Large T | A2602 |
| 285 | DVFLLLGM | 0.810 | 7 | SB | Large T | A2602 |
| 280 | ETKCEDVF | 0.737 | 17 | SB | Large T | A2602 |
| 66 | KVAHQPDF | 0.563 | 112 | WB | Large T | A2602 |
| 11 | ELMDLLGL | 0.500 | 224 | WB | Large T | A2602 |
| 463 | GVAIDQYM | 0.486 | 261 | WB | Large T | A2602 |
| 80 | EVPTYGTE | 0.485 | 262 | WB | Large T | A2602 |
| 291 | GMYLEFQY | 0.680 | 31 | SB | Large T | A2902 |
| 286 | VFLLLGMY | 0.624 | 58 | WB | Large T | A2902 |
| 611 | YTFSRMKY | 0.617 | 63 | WB | Large T | A2902 |
| 156 | TLACFAVY | 0.552 | 127 | WB | Large T | A2902 |
| 270 | SWKLITEY | 0.500 | 223 | WB | Large T | A2902 |
| 121 | SQHSTPPK | 0.836 | 5 | SB | Large T | A3001 |
| 419 | KRRYWLFK | 0.811 | 7 | SB | Large T | A3001 |
| 28 | LMRKAYLK | 0.805 | 8 | SB | Large T | A3001 |
| 544 | RQIDFRPK | 0.771 | 11 | SB | Large T | A3001 |
| 683 | RPKTPPPK | 0.740 | 16 | SB | Large T | A3001 |
| 505 | SVKVNLEK | 0.732 | 18 | SB | Large T | A3001 |
| 53 | RMNTLYKK | 0.672 | 34 | SB | Large T | A3001 |
| 394 | WLHCLLPK | 0.669 | 36 | SB | Large T | A3001 |
| 309 | KDQPYHFK | 0.647 | 45 | SB | Large T | A3001 |
| 31 | KAYLKKCK | 0.628 | 55 | WB | Large T | A3001 |
| 52 | KRMNTLYK | 0.620 | 60 | WB | Large T | A3001 |
| 161 | AVYTTKEK | 0.613 | 65 | WB | Large T | A3001 |
| 29 | MRKAYLKK | 0.612 | 66 | WB | Large T | A3001 |
| 594 | QSRIVEWK | 0.594 | 80 | WB | Large T | A3001 |
| 168 | KAQILYKK | 0.583 | 91 | WB | Large T | A3001 |
| 549 | RPKIYLRK | 0.571 | 103 | WB | Large T | A3001 |
| 172 | LYKKLMEK | 0.566 | 109 | WB | Large T | A3001 |
| 130 | KRKVEDPK | 0.560 | 116 | WB | Large T | A3001 |
| 617 | KYNICMGK | 0.549 | 131 | WB | Large T | A3001 |
| 610 | MYTFSRMK | 0.541 | 142 | WB | Large T | A3001 |
| 365 | RFNHILDK | 0.516 | 188 | WB | Large T | A3001 |
| 196 | IFFLTPHR | 0.458 | 350 | WB | Large T | A3001 |
| 208 | AINNFCQK | 0.450 | 382 | WB | Large T | A3001 |
| 237 | LTRDPYHI | 0.443 | 416 | WB | Large T | A3001 |
| 205 | RVSAINNF | 0.506 | 210 | WB | Large T | A3002 |
| 611 | YTFSRMKY | 0.440 | 428 | WB | Large T | A3002 |
| 577 | LLLLIWFR | 0.818 | 7 | SB | Large T | A3101 |
| 53 | RMNTLYKK | 0.816 | 7 | SB | Large T | A3101 |
| 608 | ISMYTFSR | 0.791 | 9 | SB | Large T | A3101 |
| 537 | TLQARFVR | 0.773 | 11 | SB | Large T | A3101 |
| 196 | IFFLTPHR | 0.772 | 11 | SB | Large T | A3101 |
| 414 | VFNVPKRR | 0.682 | 31 | SB | Large T | A3101 |
| 148 | SQAVFSNR | 0.678 | 32 | SB | Large T | A3101 |
| 180 | YSVTFISR | 0.672 | 34 | SB | Large T | A3101 |
| 676 | KGFQCFKR | 0.671 | 35 | SB | Large T | A3101 |
| 413 | VVFNVPKR | 0.665 | 37 | SB | Large T | A3101 |
| 617 | KYNICMGK | 0.648 | 45 | SB | Large T | A3101 |
| 28 | LMRKAYLK | 0.646 | 46 | SB | Large T | A3101 |
| 544 | RQIDFRPK | 0.646 | 46 | SB | Large T | A3101 |
| 232 | LLYSALTR | 0.630 | 55 | WB | Large T | A3101 |
| 168 | KAQILYKK | 0.618 | 62 | WB | Large T | A3101 |
| 542 | FVRQIDFR | 0.590 | 84 | WB | Large T | A3101 |
| 589 | FSKDIQSR | 0.590 | 84 | WB | Large T | A3101 |
| 596 | RIVEWKER | 0.580 | 93 | WB | Large T | A3101 |
| 198 | FLTPHRHR | 0.569 | 106 | WB | Large T | A3101 |
| 172 | LYKKLMEK | 0.550 | 129 | WB | Large T | A3101 |
| 365 | RFNHILDK | 0.540 | 145 | WB | Large T | A3101 |
| 610 | MYTFSRMK | 0.532 | 157 | WB | Large T | A3101 |
| 450 | NVNLPMER | 0.515 | 189 | WB | Large T | A3101 |
| 31 | KAYLKKCK | 0.504 | 214 | WB | Large T | A3101 |
| 208 | AINNFCQK | 0.461 | 339 | WB | Large T | A3101 |
| 155 | RTLACFAV | 0.460 | 345 | WB | Large T | A3101 |
| 121 | SQHSTPPK | 0.452 | 376 | WB | Large T | A3101 |
| 577 | LLLLIWFR | 0.795 | 9 | SB | Large T | A3301 |
| 196 | IFFLTPHR | 0.758 | 13 | SB | Large T | A3301 |
| 608 | ISMYTFSR | 0.631 | 54 | WB | Large T | A3301 |
| 450 | NVNLPMER | 0.631 | 54 | WB | Large T | A3301 |
| 542 | FVRQIDFR | 0.628 | 55 | WB | Large T | A3301 |
| 537 | TLQARFVR | 0.608 | 69 | WB | Large T | A3301 |
| 343 | DTVLAKKR | 0.575 | 99 | WB | Large T | A3301 |
| 180 | YSVTFISR | 0.574 | 100 | WB | Large T | A3301 |
| 589 | FSKDIQSR | 0.535 | 152 | WB | Large T | A3301 |
| 547 | DFRPKIYL | 0.526 | 169 | WB | Large T | A3301 |
| 500 | DYLDGSVK | 0.521 | 178 | WB | Large T | A3301 |
| 198 | FLTPHRHR | 0.504 | 215 | WB | Large T | A3301 |
| 265 | ETKQVSWK | 0.447 | 397 | WB | Large T | A3301 |
| 265 | ETKQVSWK | 0.836 | 5 | SB | Large T | A6801 |
| 608 | ISMYTFSR | 0.827 | 6 | SB | Large T | A6801 |
| 470 | MVVFEDVK | 0.812 | 7 | SB | Large T | A6801 |
| 180 | YSVTFISR | 0.805 | 8 | SB | Large T | A6801 |
| 343 | DTVLAKKR | 0.798 | 8 | SB | Large T | A6801 |
| 412 | CVVFNVPK | 0.772 | 11 | SB | Large T | A6801 |
| 450 | NVNLPMER | 0.771 | 11 | SB | Large T | A6801 |
| 542 | FVRQIDFR | 0.764 | 12 | SB | Large T | A6801 |
| 611 | YTFSRMKY | 0.753 | 14 | SB | Large T | A6801 |
| 610 | MYTFSRMK | 0.746 | 15 | SB | Large T | A6801 |
| 413 | VVFNVPKR | 0.728 | 19 | SB | Large T | A6801 |
| 247 | ESIQGGLK | 0.662 | 38 | SB | Large T | A6801 |
| 232 | LLYSALTR | 0.652 | 43 | SB | Large T | A6801 |
| 589 | FSKDIQSR | 0.648 | 44 | SB | Large T | A6801 |
| 537 | TLQARFVR | 0.632 | 53 | WB | Large T | A6801 |
| 196 | IFFLTPHR | 0.626 | 57 | WB | Large T | A6801 |
| 577 | LLLLIWFR | 0.606 | 71 | WB | Large T | A6801 |
| 218 | TFSFLICK | 0.597 | 78 | WB | Large T | A6801 |
| 560 | NSEFLLEK | 0.575 | 99 | WB | Large T | A6801 |
| 325 | AIIFAESK | 0.570 | 105 | WB | Large T | A6801 |
| 198 | FLTPHRHR | 0.567 | 108 | WB | Large T | A6801 |
| 505 | SVKVNLEK | 0.553 | 126 | WB | Large T | A6801 |
| 167 | EKAQILYK | 0.548 | 132 | WB | Large T | A6801 |
| 148 | SQAVFSNR | 0.536 | 151 | WB | Large T | A6801 |
| 159 | CFAVYTTK | 0.531 | 159 | WB | Large T | A6801 |
| 161 | AVYTTKEK | 0.529 | 163 | WB | Large T | A6801 |
| 208 | AINNFCQK | 0.516 | 188 | WB | Large T | A6801 |
| 328 | FAESKNQK | 0.505 | 212 | WB | Large T | A6801 |
| 596 | RIVEWKER | 0.471 | 306 | WB | Large T | A6801 |
| 492 | INNLDSLR | 0.464 | 329 | WB | Large T | A6801 |
| 156 | TLACFAVY | 0.458 | 351 | WB | Large T | A6801 |
| 124 | STPPKKKR | 0.453 | 371 | WB | Large T | A6801 |
| 275 | TEYAVETK | 0.432 | 465 | WB | Large T | A6801 |
| 123 | HSTPPKKK | 0.429 | 482 | WB | Large T | A6801 |
| 404 | SVIFDFLH | 0.427 | 492 | WB | Large T | A6801 |
| 313 | YHFKYHEK | 0.426 | 496 | WB | Large T | A6801 |
| 322 | FANAIIFA | 0.703 | 24 | SB | Large T | A6802 |
| 520 | QIFPPGLV | 0.669 | 35 | SB | Large T | A6802 |
| 155 | RTLACFAV | 0.653 | 42 | SB | Large T | A6802 |
| 377 | FGAHGNAV | 0.634 | 52 | WB | Large T | A6802 |
| 527 | VTMNEYPV | 0.617 | 63 | WB | Large T | A6802 |
| 403 | DSVIFDFL | 0.603 | 73 | WB | Large T | A6802 |
| 11 | ELMDLLGL | 0.583 | 90 | WB | Large T | A6802 |
| 189 | MCAGHNII | 0.575 | 99 | WB | Large T | A6802 |
| 8 | ESMELMDL | 0.563 | 113 | WB | Large T | A6802 |
| 199 | LTPHRHRV | 0.555 | 123 | WB | Large T | A6802 |
| 178 | EKYSVTFI | 0.531 | 160 | WB | Large T | A6802 |
| 388 | YMAGVAWL | 0.523 | 174 | WB | Large T | A6802 |
| 574 | MTLLLLLI | 0.480 | 278 | WB | Large T | A6802 |
| 464 | VAIDQYMV | 0.479 | 281 | WB | Large T | A6802 |
| 579 | LLIWFRPV | 0.477 | 286 | WB | Large T | A6802 |
| 649 | QSQCSSQV | 0.455 | 365 | WB | Large T | A6802 |
| 19 | ERAAWGNL | 0.434 | 456 | WB | Large T | A6802 |
| 434 | TTLAAGLL | 0.431 | 470 | WB | Large T | A6802 |
| 216 | LCTFSFLI | 0.428 | 489 | WB | Large T | A6802 |
| 520 | QIFPPGLV | 0.711 | 22 | SB | Large T | A6901 |
| 11 | ELMDLLGL | 0.667 | 36 | SB | Large T | A6901 |
| 155 | RTLACFAV | 0.636 | 51 | WB | Large T | A6901 |
| 574 | MTLLLLLI | 0.613 | 66 | WB | Large T | A6901 |
| 527 | VTMNEYPV | 0.575 | 99 | WB | Large T | A6901 |
| 434 | TTLAAGLL | 0.571 | 103 | WB | Large T | A6901 |
| 501 | YLDGSVKV | 0.546 | 135 | WB | Large T | A6901 |
| 74 | GTWNSSEV | 0.545 | 137 | WB | Large T | A6901 |
| 464 | VAIDQYMV | 0.523 | 175 | WB | Large T | A6901 |
| 322 | FANAIIFA | 0.514 | 192 | WB | Large T | A6901 |
| 21 | AAWGNLPL | 0.513 | 193 | WB | Large T | A6901 |
| 579 | LLIWFRPV | 0.508 | 205 | WB | Large T | A6901 |
| 287 | FLLLGMYL | 0.504 | 214 | WB | Large T | A6901 |
| 388 | YMAGVAWL | 0.494 | 238 | WB | Large T | A6901 |
| 340 | QAVDTVLA | 0.464 | 328 | WB | Large T | A6901 |
| 8 | ESMELMDL | 0.453 | 372 | WB | Large T | A6901 |
| 458 | LTFELGVA | 0.433 | 462 | WB | Large T | A6901 |
| 377 | FGAHGNAV | 0.431 | 472 | WB | Large T | A6901 |
| 383 | AVLEQYMA | 0.426 | 499 | WB | Large T | A6901 |
| 453 | LPMERLTF | 0.735 | 17 | SB | Large T | B0702 |
| 417 | VPKRRYWL | 0.608 | 69 | WB | Large T | B0702 |
| 399 | LPKMDSVI | 0.500 | 223 | WB | Large T | B0702 |
| 21 | AAWGNLPL | 0.482 | 270 | WB | Large T | B0702 |
| 139 | FPSDLHQF | 0.479 | 281 | WB | Large T | B0702 |
| 26 | LPLMRKAY | 0.431 | 472 | WB | Large T | B0702 |
| 417 | VPKRRYWL | 0.555 | 123 | WB | Large T | B0801 |
| 50 | KMKRMNTL | 0.479 | 282 | WB | Large T | B0801 |
| 33 | YLKKCKEF | 0.446 | 401 | WB | Large T | B0801 |
| 205 | RVSAINNF | 0.544 | 139 | WB | Large T | B1501 |
| 306 | CQKKDQPY | 0.511 | 199 | WB | Large T | B1501 |
| 339 | QQAVDTVL | 0.504 | 214 | WB | Large T | B1501 |
| 615 | RMKYNICM | 0.498 | 228 | WB | Large T | B1501 |
| 33 | YLKKCKEF | 0.496 | 232 | WB | Large T | B1501 |
| 388 | YMAGVAWL | 0.493 | 240 | WB | Large T | B1501 |
| 611 | YTFSRMKY | 0.492 | 244 | WB | Large T | B1501 |
| 291 | GMYLEFQY | 0.486 | 261 | WB | Large T | B1501 |
| 144 | HQFLSQAV | 0.476 | 288 | WB | Large T | B1501 |
| 50 | KMKRMNTL | 0.474 | 294 | WB | Large T | B1501 |
| 156 | TLACFAVY | 0.469 | 311 | WB | Large T | B1501 |
| 570 | LQSGMTLL | 0.441 | 424 | WB | Large T | B1501 |
| 89 | WESWWSSF | 0.814 | 7 | SB | Large T | B1801 |
| 455 | MERLTFEL | 0.686 | 29 | SB | Large T | B1801 |
| 606 | SEISMYTF | 0.646 | 45 | SB | Large T | B1801 |
| 177 | MEKYSVTF | 0.627 | 56 | WB | Large T | B1801 |
| 363 | TERFNHIL | 0.449 | 388 | WB | Large T | B1801 |
| 86 | TEEWESWW | 0.434 | 458 | WB | Large T | B1801 |
| 52 | KRMNTLYK | 0.623 | 58 | WB | Large T | B2705 |
| 567 | KRILQSGM | 0.555 | 122 | WB | Large T | B2705 |
| 544 | RQIDFRPK | 0.533 | 155 | WB | Large T | B2705 |
| 419 | KRRYWLFK | 0.506 | 209 | WB | Large T | B2705 |
| 349 | KRVDTLHM | 0.461 | 341 | WB | Large T | B2705 |
| 29 | MRKAYLKK | 0.430 | 477 | WB | Large T | B2705 |
| 139 | FPSDLHQF | 0.796 | 9 | SB | Large T | B3501 |
| 522 | FPPGLVTM | 0.773 | 11 | SB | Large T | B3501 |
| 453 | LPMERLTF | 0.752 | 14 | SB | Large T | B3501 |
| 26 | LPLMRKAY | 0.749 | 15 | SB | Large T | B3501 |
| 235 | SALTRDPY | 0.599 | 76 | WB | Large T | B3501 |
| 382 | NAVLEQYM | 0.558 | 119 | WB | Large T | B3501 |
| 111 | FASDEEAT | 0.538 | 148 | WB | Large T | B3501 |
| 156 | TLACFAVY | 0.533 | 156 | WB | Large T | B3501 |
| 321 | HFANAIIF | 0.513 | 193 | WB | Large T | B3501 |
| 21 | AAWGNLPL | 0.509 | 203 | WB | Large T | B3501 |
| 77 | NSSEVPTY | 0.502 | 218 | WB | Large T | B3501 |
| 98 | EKWDEDLF | 0.451 | 381 | WB | Large T | B3501 |
| 145 | QFLSQAVF | 0.450 | 384 | WB | Large T | B3501 |
| 89 | WESWWSSF | 0.445 | 407 | WB | Large T | B3501 |
| 5 | NREESMEL | 0.555 | 123 | WB | Large T | B3901 |
| 339 | QQAVDTVL | 0.464 | 330 | WB | Large T | B3901 |
| 388 | YMAGVAWL | 0.429 | 483 | WB | Large T | B3901 |
| 455 | MERLTFEL | 0.676 | 33 | SB | Large T | B4001 |
| 363 | TERFNHIL | 0.626 | 57 | WB | Large T | B4001 |
| 283 | CEDVFLLL | 0.595 | 80 | WB | Large T | B4001 |
| 606 | SEISMYTF | 0.593 | 81 | WB | Large T | B4001 |
| 6 | REESMELM | 0.511 | 197 | WB | Large T | B4001 |
| 177 | MEKYSVTF | 0.487 | 257 | WB | Large T | B4001 |
| 246 | EESIQGGL | 0.432 | 465 | WB | Large T | B4001 |
| 606 | SEISMYTF | 0.568 | 107 | WB | Large T | B4002 |
| 89 | WESWWSSF | 0.495 | 237 | WB | Large T | B4002 |
| 166 | KEKAQILY | 0.489 | 250 | WB | Large T | B4002 |
| 359 | EEMLTERF | 0.489 | 251 | WB | Large T | B4002 |
| 246 | EESIQGGL | 0.464 | 328 | WB | Large T | B4002 |
| 177 | MEKYSVTF | 0.454 | 367 | WB | Large T | B4002 |
| 264 | EETKQVSW | 0.446 | 403 | WB | Large T | B4002 |
| 6 | REESMELM | 0.433 | 463 | WB | Large T | B4002 |
| 264 | EETKQVSW | 0.514 | 193 | WB | Large T | B4402 |
| 606 | SEISMYTF | 0.472 | 303 | WB | Large T | B4402 |
| 86 | TEEWESWW | 0.464 | 329 | WB | Large T | B4402 |
| 166 | KEKAQILY | 0.461 | 342 | WB | Large T | B4402 |
| 359 | EEMLTERF | 0.449 | 388 | WB | Large T | B4402 |
| 606 | SEISMYTF | 0.549 | 131 | WB | Large T | B4403 |
| 359 | EEMLTERF | 0.526 | 167 | WB | Large T | B4403 |
| 359 | EEMLTERF | 0.512 | 196 | WB | Large T | B4501 |
| 329 | AESKNQKS | 0.443 | 415 | WB | Large T | B4501 |
| 246 | EESIQGGL | 0.433 | 460 | WB | Large T | B4501 |
| 481 | AESKDLPS | 0.431 | 470 | WB | Large T | B4501 |
| 522 | FPPGLVTM | 0.629 | 55 | WB | Large T | B5101 |
| 453 | LPMERLTF | 0.621 | 60 | WB | Large T | B5101 |
| 399 | LPKMDSVI | 0.598 | 77 | WB | Large T | B5101 |
| 453 | LPMERLTF | 0.755 | 14 | SB | Large T | B5301 |
| 139 | FPSDLHQF | 0.729 | 18 | SB | Large T | B5301 |
| 26 | LPLMRKAY | 0.636 | 51 | WB | Large T | B5301 |
| 399 | LPKMDSVI | 0.632 | 53 | WB | Large T | B5301 |
| 522 | FPPGLVTM | 0.582 | 91 | WB | Large T | B5301 |
| 522 | FPPGLVTM | 0.577 | 97 | WB | Large T | B5401 |
| 322 | FANAIIFA | 0.511 | 198 | WB | Large T | B5401 |
| 26 | LPLMRKAY | 0.482 | 271 | WB | Large T | B5401 |
| 82 | PTYGTEEW | 0.517 | 186 | WB | Large T | B5701 |
| 93 | WSSFNEKW | 0.678 | 32 | SB | Large T | B5801 |
| 556 | KSLQNSEF | 0.602 | 74 | WB | Large T | B5801 |
| 593 | IQSRIVEW | 0.573 | 101 | WB | Large T | B5801 |
| 205 | RVSAINNF | 0.525 | 169 | WB | Large T | B5801 |
| 82 | PTYGTEEW | 0.504 | 215 | WB | Large T | B5801 |
| 66 | KVAHQPDF | 0.491 | 246 | WB | Large T | B5801 |
| 16 | LGLERAAW | 0.439 | 430 | WB | Large T | B5801 |
| 77 | NSSEVPTY | 0.431 | 469 | WB | Large T | B5801 |

9-mers

| | | | | | | |
|---|---|---|---|---|---|---|
| 603 | RLDSEISMY | 0.648 | 44 | SB | Large T | A0101 |
| 226 | GVNKEYLLY | 0.477 | 286 | WB | Large T | A0101 |
| 234 | YSALTRDPY | 0.471 | 304 | WB | Large T | A0101 |
| 409 | FLHCVVFNV | 0.891 | 3 | SB | Large T | A0201 |
| 405 | VIFDFLHCV | 0.842 | 5 | SB | Large T | A0201 |
| 215 | KLCTFSFLI | 0.747 | 15 | SB | Large T | A0201 |
| 198 | FLTPHRHRV | 0.693 | 27 | SB | Large T | A0201 |
| 578 | LLLIWFRPV | 0.690 | 28 | SB | Large T | A0201 |
| 384 | VLEQYMAGV | 0.680 | 31 | SB | Large T | A0201 |
| 557 | SLQNSEFLL | 0.658 | 40 | SB | Large T | A0201 |
| 397 | CLLPKMDSV | 0.639 | 49 | SB | Large T | A0201 |
| 569 | ILQSGMTLL | 0.614 | 64 | WB | Large T | A0201 |
| 175 | KLMEKYSVT | 0.580 | 94 | WB | Large T | A0201 |
| 435 | TLAAGLLDL | 0.578 | 95 | WB | Large T | A0201 |
| 361 | MLTERFNHI | 0.562 | 114 | WB | Large T | A0201 |
| 579 | LLIWFRPVA | 0.505 | 212 | WB | Large T | A0201 |
| 573 | GMTLLLLLI | 0.494 | 237 | WB | Large T | A0201 |
| 368 | HILDKMDLI | 0.488 | 254 | WB | Large T | A0201 |
| 621 | CMGKCILDI | 0.465 | 327 | WB | Large T | A0201 |
| 394 | WLHCLLPKM | 0.443 | 412 | WB | Large T | A0201 |
| 156 | TLACFAVYT | 0.437 | 440 | WB | Large T | A0201 |
| 409 | FLHCVVFNV | 0.885 | 3 | SB | Large T | A0202 |
| 198 | FLTPHRHRV | 0.824 | 6 | SB | Large T | A0202 |
| 361 | MLTERFNHI | 0.774 | 11 | SB | Large T | A0202 |
| 569 | ILQSGMTLL | 0.765 | 12 | SB | Large T | A0202 |
| 405 | VIFDFLHCV | 0.742 | 16 | SB | Large T | A0202 |
| 384 | VLEQYMAGV | 0.728 | 19 | SB | Large T | A0202 |
| 494 | NLDSLRDYL | 0.687 | 29 | SB | Large T | A0202 |
| 557 | SLQNSEFLL | 0.676 | 33 | SB | Large T | A0202 |
| 570 | LQSGMTLLL | 0.676 | 33 | SB | Large T | A0202 |
| 397 | CLLPKMDSV | 0.658 | 40 | SB | Large T | A0202 |
| 402 | MDSVIFDFL | 0.642 | 48 | SB | Large T | A0202 |
| 215 | KLCTFSFLI | 0.640 | 49 | SB | Large T | A0202 |
| 497 | SLRDYLDGS | 0.630 | 54 | WB | Large T | A0202 |
| 463 | GVAIDQYMV | 0.614 | 65 | WB | Large T | A0202 |
| 435 | TLAAGLLDL | 0.605 | 71 | WB | Large T | A0202 |
| 175 | KLMEKYSVT | 0.560 | 116 | WB | Large T | A0202 |
| 573 | GMTLLLLLI | 0.558 | 119 | WB | Large T | A0202 |
| 156 | TLACFAVYT | 0.554 | 124 | WB | Large T | A0202 |
| 289 | LLGMYLEFQ | 0.542 | 142 | WB | Large T | A0202 |
| 648 | SQSQCSSQV | 0.542 | 142 | WB | Large T | A0202 |
| 391 | GVAWLHCLL | 0.529 | 163 | WB | Large T | A0202 |
| 219 | FSFLICKGV | 0.528 | 165 | WB | Large T | A0202 |
| 208 | AINNFCQKL | 0.524 | 173 | WB | Large T | A0202 |
| 191 | AGHNIIFFL | 0.514 | 191 | WB | Large T | A0202 |
| 111 | FASDEEATA | 0.506 | 208 | WB | Large T | A0202 |
| 139 | FPSDLHQFL | 0.505 | 211 | WB | Large T | A0202 |
| 236 | ALTRDPYHI | 0.501 | 220 | WB | Large T | A0202 |
| 589 | FSKDIQSRI | 0.499 | 226 | WB | Large T | A0202 |
| 526 | LVTMNEYPV | 0.493 | 240 | WB | Large T | A0202 |
| 146 | FLSQAVFSN | 0.480 | 278 | WB | Large T | A0202 |
| 578 | LLLIWFRPV | 0.466 | 321 | WB | Large T | A0202 |
| 377 | FGAHGNAVL | 0.465 | 327 | WB | Large T | A0202 |
| 458 | LTFELGVAI | 0.452 | 376 | WB | Large T | A0202 |
| 572 | SGMTLLLLL | 0.450 | 385 | WB | Large T | A0202 |
| 398 | LLPKMDSVI | 0.448 | 392 | WB | Large T | A0202 |
| 368 | HILDKMDLI | 0.438 | 438 | WB | Large T | A0202 |
| 409 | FLHCVVFNV | 0.911 | 2 | SB | Large T | A0203 |
| 198 | FLTPHRHRV | 0.891 | 3 | SB | Large T | A0203 |
| 361 | MLTERFNHI | 0.884 | 3 | SB | Large T | A0203 |
| 384 | VLEQYMAGV | 0.838 | 5 | SB | Large T | A0203 |
| 578 | LLLIWFRPV | 0.819 | 7 | SB | Large T | A0203 |
| 397 | CLLPKMDSV | 0.815 | 7 | SB | Large T | A0203 |
| 569 | ILQSGMTLL | 0.803 | 8 | SB | Large T | A0203 |
| 405 | VIFDFLHCV | 0.796 | 9 | SB | Large T | A0203 |
| 435 | TLAAGLLDL | 0.744 | 16 | SB | Large T | A0203 |
| 175 | KLMEKYSVT | 0.694 | 27 | SB | Large T | A0203 |
| 457 | RLTFELGVA | 0.683 | 30 | SB | Large T | A0203 |
| 497 | SLRDYLDGS | 0.596 | 79 | WB | Large T | A0203 |
| 579 | LLIWFRPVA | 0.575 | 99 | WB | Large T | A0203 |
| 553 | YLRKSLQNS | 0.569 | 105 | WB | Large T | A0203 |
| 215 | KLCTFSFLI | 0.566 | 108 | WB | Large T | A0203 |
| 236 | ALTRDPYHI | 0.540 | 144 | WB | Large T | A0203 |
| 375 | LIFGAHGNA | 0.540 | 145 | WB | Large T | A0203 |
| 573 | GMTLLLLLI | 0.537 | 150 | WB | Large T | A0203 |
| 570 | LQSGMTLLL | 0.528 | 165 | WB | Large T | A0203 |
| 156 | TLACFAVYT | 0.527 | 166 | WB | Large T | A0203 |
| 648 | SQSQCSSQV | 0.520 | 179 | WB | Large T | A0203 |
| 391 | GVAWLHCLL | 0.517 | 185 | WB | Large T | A0203 |
| 398 | LLPKMDSVI | 0.516 | 188 | WB | Large T | A0203 |
| 394 | WLHCLLPKM | 0.513 | 194 | WB | Large T | A0203 |
| 464 | VAIDQYMVV | 0.512 | 195 | WB | Large T | A0203 |
| 188 | HMCAGHNII | 0.510 | 199 | WB | Large T | A0203 |
| 519 | TQIFPPGLV | 0.506 | 210 | WB | Large T | A0203 |
| 208 | AINNFCQKL | 0.501 | 220 | WB | Large T | A0203 |
| 368 | HILDKMDLI | 0.496 | 232 | WB | Large T | A0203 |
| 20 | RAAWGNLPL | 0.491 | 246 | WB | Large T | A0203 |
| 53 | RMNTLYKKM | 0.490 | 249 | WB | Large T | A0203 |
| 568 | RILQSGMTL | 0.485 | 263 | WB | Large T | A0203 |
| 538 | LQARFVRQI | 0.458 | 352 | WB | Large T | A0203 |
| 289 | LLGMYLEFQ | 0.456 | 360 | WB | Large T | A0203 |
| 557 | SLQNSEFLL | 0.447 | 396 | WB | Large T | A0203 |
| 596 | RIVEWKERL | 0.441 | 423 | WB | Large T | A0203 |
| 463 | GVAIDQYMV | 0.432 | 464 | WB | Large T | A0203 |
| 198 | FLTPHRHRV | 0.766 | 12 | SB | Large T | A0204 |
| 409 | FLHCVVFNV | 0.744 | 15 | SB | Large T | A0204 |
| 405 | VIFDFLHCV | 0.645 | 46 | SB | Large T | A0204 |
| 578 | LLLIWFRPV | 0.640 | 48 | SB | Large T | A0204 |
| 384 | VLEQYMAGV | 0.607 | 70 | WB | Large T | A0204 |
| 464 | VAIDQYMVV | 0.564 | 111 | WB | Large T | A0204 |
| 557 | SLQNSEFLL | 0.552 | 127 | WB | Large T | A0204 |
| 59 | KKMEQDVKV | 0.514 | 191 | WB | Large T | A0204 |
| 526 | LVTMNEYPV | 0.512 | 196 | WB | Large T | A0204 |
| 435 | TLAAGLLDL | 0.489 | 251 | WB | Large T | A0204 |
| 292 | MYLEFQYNV | 0.488 | 255 | WB | Large T | A0204 |
| 569 | ILQSGMTLL | 0.485 | 264 | WB | Large T | A0204 |
| 208 | AINNFCQKL | 0.474 | 296 | WB | Large T | A0204 |
| 397 | CLLPKMDSV | 0.468 | 315 | WB | Large T | A0204 |
| 175 | KLMEKYSVT | 0.464 | 329 | WB | Large T | A0204 |
| 361 | MLTERFNHI | 0.447 | 395 | WB | Large T | A0204 |
| 236 | ALTRDPYHI | 0.447 | 398 | WB | Large T | A0204 |
| 215 | KLCTFSFLI | 0.445 | 404 | WB | Large T | A0204 |
| 361 | MLTERFNHI | 0.848 | 5 | SB | Large T | A0206 |
| 397 | CLLPKMDSV | 0.834 | 6 | SB | Large T | A0206 |
| 409 | FLHCVVFNV | 0.819 | 7 | SB | Large T | A0206 |
| 578 | LLLIWFRPV | 0.801 | 8 | SB | Large T | A0206 |
| 198 | FLTPHRHRV | 0.793 | 9 | SB | Large T | A0206 |
| 405 | VIFDFLHCV | 0.746 | 15 | SB | Large T | A0206 |
| 544 | RQIDFRPKI | 0.739 | 16 | SB | Large T | A0206 |
| 648 | SQSQCSSQV | 0.729 | 18 | SB | Large T | A0206 |
| 384 | VLEQYMAGV | 0.692 | 27 | SB | Large T | A0206 |
| 570 | LQSGMTLLL | 0.683 | 30 | SB | Large T | A0206 |
| 596 | RIVEWKERL | 0.674 | 34 | SB | Large T | A0206 |
| 568 | RILQSGMTL | 0.638 | 50 | WB | Large T | A0206 |
| 20 | RAAWGNLPL | 0.634 | 52 | WB | Large T | A0206 |
| 435 | TLAAGLLDL | 0.583 | 91 | WB | Large T | A0206 |
| 215 | KLCTFSFLI | 0.560 | 116 | WB | Large T | A0206 |
| 464 | VAIDQYMVV | 0.560 | 117 | WB | Large T | A0206 |
| 368 | HILDKMDLI | 0.550 | 130 | WB | Large T | A0206 |
| 339 | QQAVDTVLA | 0.549 | 131 | WB | Large T | A0206 |
| 569 | ILQSGMTLL | 0.520 | 180 | WB | Large T | A0206 |
| 111 | FASDEEATA | 0.520 | 180 | WB | Large T | A0206 |
| 267 | KQVSWKLIT | 0.516 | 188 | WB | Large T | A0206 |
| 579 | LLIWFRPVA | 0.507 | 206 | WB | Large T | A0206 |
| 458 | LTFELGVAI | 0.503 | 216 | WB | Large T | A0206 |
| 10 | MELMDLLGL | 0.496 | 233 | WB | Large T | A0206 |
| 391 | GVAWLHCLL | 0.476 | 291 | WB | Large T | A0206 |
| 287 | FLLLGMYLE | 0.473 | 298 | WB | Large T | A0206 |
| 519 | TQIFPPGLV | 0.470 | 308 | WB | Large T | A0206 |
| 288 | LLLGMYLEF | 0.469 | 312 | WB | Large T | A0206 |
| 447 | KALNVNLPM | 0.457 | 357 | WB | Large T | A0206 |
| 21 | AAWGNLPLM | 0.457 | 357 | WB | Large T | A0206 |
| 394 | WLHCLLPKM | 0.451 | 379 | WB | Large T | A0206 |
| 526 | LVTMNEYPV | 0.441 | 421 | WB | Large T | A0206 |
| 175 | KLMEKYSVT | 0.439 | 432 | WB | Large T | A0206 |
| 148 | SQAVFSNRT | 0.438 | 437 | WB | Large T | A0206 |
| 198 | FLTPHRHRV | 0.978 | 1 | SB | Large T | A0211 |
| 405 | VIFDFLHCV | 0.968 | 1 | SB | Large T | A0211 |
| 409 | FLHCVVFNV | 0.933 | 2 | SB | Large T | A0211 |
| 397 | CLLPKMDSV | 0.929 | 2 | SB | Large T | A0211 |
| 384 | VLEQYMAGV | 0.926 | 2 | SB | Large T | A0211 |
| 557 | SLQNSEFLL | 0.912 | 2 | SB | Large T | A0211 |
| 494 | NLDSLRDYL | 0.903 | 2 | SB | Large T | A0211 |
| 569 | ILQSGMTLL | 0.890 | 3 | SB | Large T | A0211 |
| 435 | TLAAGLLDL | 0.890 | 3 | SB | Large T | A0211 |
| 215 | KLCTFSFLI | 0.876 | 3 | SB | Large T | A0211 |
| 578 | LLLIWFRPV | 0.862 | 4 | SB | Large T | A0211 |
| 563 | FLLEKRILQ | 0.862 | 4 | SB | Large T | A0211 |
| 579 | LLIWFRPVA | 0.849 | 5 | SB | Large T | A0211 |
| 292 | MYLEFQYNV | 0.832 | 6 | SB | Large T | A0211 |
| 388 | YMAGVAWLH | 0.799 | 8 | SB | Large T | A0211 |
| 463 | GVAIDQYMV | 0.796 | 9 | SB | Large T | A0211 |
| 428 | PIDSGKTTL | 0.778 | 11 | SB | Large T | A0211 |
| 573 | GMTLLLLLI | 0.771 | 11 | SB | Large T | A0211 |
| 500 | DYLDGSVKV | 0.751 | 14 | SB | Large T | A0211 |
| 454 | PMERLTFEL | 0.736 | 17 | SB | Large T | A0211 |
| 288 | LLLGMYLEF | 0.733 | 17 | SB | Large T | A0211 |
| 526 | LVTMNEYPV | 0.733 | 18 | SB | Large T | A0211 |
| 391 | GVAWLHCLL | 0.725 | 19 | SB | Large T | A0211 |
| 464 | VAIDQYMVV | 0.721 | 20 | SB | Large T | A0211 |
| 568 | RILQSGMTL | 0.720 | 20 | SB | Large T | A0211 |
| 142 | DLHQFLSQA | 0.703 | 24 | SB | Large T | A0211 |
| 361 | MLTERFNHI | 0.692 | 28 | SB | Large T | A0211 |
| 236 | ALTRDPYHI | 0.685 | 30 | SB | Large T | A0211 |
| 596 | RIVEWKERL | 0.685 | 30 | SB | Large T | A0211 |
| 156 | TLACFAVYT | 0.663 | 38 | SB | Large T | A0211 |
| 287 | FLLLGMYLE | 0.659 | 40 | SB | Large T | A0211 |
| 208 | AINNFCQKL | 0.637 | 50 | WB | Large T | A0211 |
| 575 | TLLLLLIWF | 0.632 | 53 | WB | Large T | A0211 |
| 20 | RAAWGNLPL | 0.620 | 61 | WB | Large T | A0211 |
| 14 | DLLGLERAA | 0.614 | 65 | WB | Large T | A0211 |
| 289 | LLGMYLEFQ | 0.602 | 74 | WB | Large T | A0211 |
| 603 | RLDSEISMY | 0.592 | 82 | WB | Large T | A0211 |
| 368 | HILDKMDLI | 0.590 | 84 | WB | Large T | A0211 |
| 576 | LLLLLIWFR | 0.575 | 99 | WB | Large T | A0211 |
| 394 | WLHCLLPKM | 0.569 | 106 | WB | Large T | A0211 |
| 353 | TLHMTREEM | 0.558 | 119 | WB | Large T | A0211 |
| 273 | LITEYAVET | 0.545 | 137 | WB | Large T | A0211 |
| 398 | LLPKMDSVI | 0.535 | 152 | WB | Large T | A0211 |
| 401 | KMDSVIFDF | 0.531 | 160 | WB | Large T | A0211 |
| 146 | FLSQAVFSN | 0.527 | 166 | WB | Large T | A0211 |
| 188 | HMCAGHNII | 0.524 | 172 | WB | Large T | A0211 |
| 406 | IFDFLHCVV | 0.519 | 181 | WB | Large T | A0211 |
| 648 | SQSQCSSQV | 0.514 | 191 | WB | Large T | A0211 |
| 458 | LTFELGVAI | 0.508 | 204 | WB | Large T | A0211 |
| 497 | SLRDYLDGS | 0.503 | 216 | WB | Large T | A0211 |
| 501 | YLDGSVKVN | 0.501 | 220 | WB | Large T | A0211 |
| 171 | ILYKKLMEK | 0.485 | 264 | WB | Large T | A0211 |
| 73 | FGTWNSSEV | 0.481 | 274 | WB | Large T | A0211 |
| 609 | SMYTFSRMK | 0.474 | 295 | WB | Large T | A0211 |
| 416 | NVPKRRYWL | 0.464 | 330 | WB | Large T | A0211 |
| 109 | DMFASDEEA | 0.459 | 346 | WB | Large T | A0211 |
| 139 | FPSDLHQFL | 0.459 | 349 | WB | Large T | A0211 |
| 439 | GLLDLCGGK | 0.452 | 377 | WB | Large T | A0211 |
| 465 | AIDQYMVVF | 0.449 | 389 | WB | Large T | A0211 |
| 21 | AAWGNLPLM | 0.448 | 394 | WB | Large T | A0211 |
| 521 | IFPPGLVTM | 0.438 | 438 | WB | Large T | A0211 |
| 175 | KLMEKYSVT | 0.437 | 440 | WB | Large T | A0211 |
| 457 | RLTFELGVA | 0.430 | 478 | WB | Large T | A0211 |
| 150 | AVFSNRTLA | 0.428 | 486 | WB | Large T | A0211 |
| 198 | FLTPHRHRV | 0.950 | 1 | SB | Large T | A0212 |
| 405 | VIFDFLHCV | 0.944 | 1 | SB | Large T | A0212 |
| 384 | VLEQYMAGV | 0.915 | 2 | SB | Large T | A0212 |
| 397 | CLLPKMDSV | 0.909 | 2 | SB | Large T | A0212 |
| 409 | FLHCVVFNV | 0.905 | 2 | SB | Large T | A0212 |
| 435 | TLAAGLLDL | 0.836 | 5 | SB | Large T | A0212 |
| 569 | ILQSGMTLL | 0.822 | 6 | SB | Large T | A0212 |
| 292 | MYLEFQYNV | 0.776 | 11 | SB | Large T | A0212 |
| 578 | LLLIWFRPV | 0.774 | 11 | SB | Large T | A0212 |
| 557 | SLQNSEFLL | 0.763 | 12 | SB | Large T | A0212 |
| 563 | FLLEKRILQ | 0.736 | 17 | SB | Large T | A0212 |
| 464 | VAIDQYMVV | 0.723 | 20 | SB | Large T | A0212 |
| 494 | NLDSLRDYL | 0.711 | 22 | SB | Large T | A0212 |
| 361 | MLTERFNHI | 0.692 | 27 | SB | Large T | A0212 |
| 579 | LLIWFRPVA | 0.684 | 30 | SB | Large T | A0212 |
| 288 | LLLGMYLEF | 0.636 | 51 | WB | Large T | A0212 |
| 497 | SLRDYLDGS | 0.636 | 51 | WB | Large T | A0212 |
| 215 | KLCTFSFLI | 0.619 | 61 | WB | Large T | A0212 |
| 596 | RIVEWKERL | 0.610 | 68 | WB | Large T | A0212 |
| 388 | YMAGVAWLH | 0.607 | 69 | WB | Large T | A0212 |
| 287 | FLLLGMYLE | 0.598 | 77 | WB | Large T | A0212 |
| 428 | PIDSGKTTL | 0.561 | 115 | WB | Large T | A0212 |
| 14 | DLLGLERAA | 0.548 | 133 | WB | Large T | A0212 |
| 454 | PMERLTFEL | 0.545 | 137 | WB | Large T | A0212 |
| 526 | LVTMNEYPV | 0.533 | 155 | WB | Large T | A0212 |
| 458 | LTFELGVAI | 0.531 | 160 | WB | Large T | A0212 |
| 236 | ALTRDPYHI | 0.525 | 171 | WB | Large T | A0212 |
| 208 | AINNFCQKL | 0.521 | 177 | WB | Large T | A0212 |
| 500 | DYLDGSVKV | 0.517 | 185 | WB | Large T | A0212 |
| 111 | FASDEEATA | 0.507 | 206 | WB | Large T | A0212 |
| 289 | LLGMYLEFQ | 0.505 | 212 | WB | Large T | A0212 |
| 188 | HMCAGHNII | 0.504 | 214 | WB | Large T | A0212 |
| 368 | HILDKMDLI | 0.496 | 232 | WB | Large T | A0212 |
| 398 | LLPKMDSVI | 0.494 | 239 | WB | Large T | A0212 |
| 463 | GVAIDQYMV | 0.481 | 275 | WB | Large T | A0212 |
| 401 | KMDSVIFDF | 0.477 | 286 | WB | Large T | A0212 |
| 171 | ILYKKLMEK | 0.476 | 289 | WB | Large T | A0212 |
| 568 | RILQSGMTL | 0.453 | 370 | WB | Large T | A0212 |
| 139 | FPSDLHQFL | 0.450 | 385 | WB | Large T | A0212 |
| 394 | WLHCLLPKM | 0.439 | 434 | WB | Large T | A0212 |
| 198 | FLTPHRHRV | 0.957 | 1 | SB | Large T | A0216 |
| 405 | VIFDFLHCV | 0.924 | 2 | SB | Large T | A0216 |
| 384 | VLEQYMAGV | 0.898 | 2 | SB | Large T | A0216 |
| 397 | CLLPKMDSV | 0.898 | 3 | SB | Large T | A0216 |
| 409 | FLHCVVFNV | 0.881 | 3 | SB | Large T | A0216 |
| 569 | ILQSGMTLL | 0.861 | 4 | SB | Large T | A0216 |
| 494 | NLDSLRDYL | 0.860 | 4 | SB | Large T | A0216 |
| 557 | SLQNSEFLL | 0.844 | 5 | SB | Large T | A0216 |
| 454 | PMERLTFEL | 0.756 | 13 | SB | Large T | A0216 |
| 428 | PIDSGKTTL | 0.749 | 15 | SB | Large T | A0216 |
| 578 | LLLIWFRPV | 0.694 | 27 | SB | Large T | A0216 |
| 435 | TLAAGLLDL | 0.679 | 32 | SB | Large T | A0216 |
| 526 | LVTMNEYPV | 0.669 | 36 | SB | Large T | A0216 |
| 289 | LLGMYLEFQ | 0.657 | 40 | SB | Large T | A0216 |
| 215 | KLCTFSFLI | 0.657 | 41 | SB | Large T | A0216 |
| 142 | DLHQFLSQA | 0.655 | 41 | SB | Large T | A0216 |
| 292 | MYLEFQYNV | 0.655 | 41 | SB | Large T | A0216 |
| 563 | FLLEKRILQ | 0.646 | 45 | SB | Large T | A0216 |
| 596 | RIVEWKERL | 0.646 | 46 | SB | Large T | A0216 |
| 236 | ALTRDPYHI | 0.645 | 46 | SB | Large T | A0216 |
| 416 | NVPKRRYWL | 0.628 | 55 | WB | Large T | A0216 |
| 463 | GVAIDQYMV | 0.626 | 57 | WB | Large T | A0216 |
| 361 | MLTERFNHI | 0.601 | 74 | WB | Large T | A0216 |
| 156 | TLACFAVYT | 0.590 | 84 | WB | Large T | A0216 |
| 208 | AINNFCQKL | 0.578 | 96 | WB | Large T | A0216 |
| 568 | RILQSGMTL | 0.574 | 99 | WB | Large T | A0216 |
| 500 | DYLDGSVKV | 0.539 | 146 | WB | Large T | A0216 |
| 398 | LLPKMDSVI | 0.537 | 149 | WB | Large T | A0216 |
| 579 | LLIWFRPVA | 0.529 | 163 | WB | Large T | A0216 |
| 391 | GVAWLHCLL | 0.519 | 181 | WB | Large T | A0216 |
| 353 | TLHMTREEM | 0.510 | 200 | WB | Large T | A0216 |
| 619 | NICMGKCIL | 0.500 | 224 | WB | Large T | A0216 |
| 648 | SQSQCSSQV | 0.495 | 236 | WB | Large T | A0216 |
| 171 | ILYKKLMEK | 0.463 | 333 | WB | Large T | A0216 |
| 464 | VAIDQYMVV | 0.456 | 359 | WB | Large T | A0216 |
| 188 | HMCAGHNII | 0.440 | 428 | WB | Large T | A0216 |
| 368 | HILDKMDLI | 0.426 | 497 | WB | Large T | A0216 |
| 198 | FLTPHRHRV | 0.947 | 1 | SB | Large T | A0219 |
| 405 | VIFDFLHCV | 0.932 | 2 | SB | Large T | A0219 |
| 409 | FLHCVVFNV | 0.879 | 3 | SB | Large T | A0219 |
| 397 | CLLPKMDSV | 0.868 | 4 | SB | Large T | A0219 |
| 569 | ILQSGMTLL | 0.849 | 5 | SB | Large T | A0219 |
| 435 | TLAAGLLDL | 0.795 | 9 | SB | Large T | A0219 |
| 384 | VLEQYMAGV | 0.766 | 12 | SB | Large T | A0219 |
| 494 | NLDSLRDYL | 0.716 | 21 | SB | Large T | A0219 |
| 428 | PIDSGKTTL | 0.697 | 26 | SB | Large T | A0219 |
| 557 | SLQNSEFLL | 0.621 | 60 | WB | Large T | A0219 |
| 578 | LLLIWFRPV | 0.588 | 86 | WB | Large T | A0219 |
| 292 | MYLEFQYNV | 0.530 | 162 | WB | Large T | A0219 |
| 526 | LVTMNEYPV | 0.519 | 182 | WB | Large T | A0219 |
| 361 | MLTERFNHI | 0.518 | 183 | WB | Large T | A0219 |
| 500 | DYLDGSVKV | 0.508 | 205 | WB | Large T | A0219 |
| 21 | AAWGNLPLM | 0.506 | 209 | WB | Large T | A0219 |
| 454 | PMERLTFEL | 0.461 | 340 | WB | Large T | A0219 |
| 236 | ALTRDPYHI | 0.459 | 349 | WB | Large T | A0219 |
| 146 | FLSQAVFSN | 0.428 | 486 | WB | Large T | A0219 |
| 171 | ILYKKLMEK | 0.858 | 4 | SB | Large T | A0301 |
| 609 | SMYTFSRMK | 0.762 | 13 | SB | Large T | A0301 |
| 28 | LMRKAYLKK | 0.703 | 24 | SB | Large T | A0301 |
| 195 | IIFFLTPHR | 0.658 | 40 | SB | Large T | A0301 |
| 50 | KMKRMNTLY | 0.654 | 42 | SB | Large T | A0301 |
| 217 | CTFSFLICK | 0.640 | 49 | SB | Large T | A0301 |
| 221 | FLICKGVNK | 0.633 | 52 | WB | Large T | A0301 |
| 528 | TMNEYPVPK | 0.599 | 76 | WB | Large T | A0301 |
| 155 | RTLACFAVY | 0.595 | 79 | WB | Large T | A0301 |
| 27 | PLMRKAYLK | 0.578 | 96 | WB | Large T | A0301 |
| 226 | GVNKEYLLY | 0.545 | 137 | WB | Large T | A0301 |
| 121 | SQHSTPPKK | 0.490 | 248 | WB | Large T | A0301 |
| 231 | YLLYSALTR | 0.475 | 294 | WB | Large T | A0301 |
| 341 | AVDTVLAKK | 0.472 | 302 | WB | Large T | A0301 |
| 576 | LLLLLIWFR | 0.467 | 318 | WB | Large T | A0301 |
| 668 | HSQELHLCK | 0.464 | 331 | WB | Large T | A0301 |
| 504 | GSVKVNLEK | 0.452 | 376 | WB | Large T | A0301 |
| 509 | NLEKKHLNK | 0.452 | 377 | WB | Large T | A0301 |
| 350 | RVDTLHMTR | 0.444 | 409 | WB | Large T | A0301 |
| 603 | RLDSEISMY | 0.433 | 461 | WB | Large T | A0301 |
| 217 | CTFSFLICK | 0.826 | 6 | SB | Large T | A1101 |
| 528 | TMNEYPVPK | 0.817 | 7 | SB | Large T | A1101 |
| 609 | SMYTFSRMK | 0.802 | 8 | SB | Large T | A1101 |
| 207 | SAINNFCQK | 0.774 | 11 | SB | Large T | A1101 |
| 171 | ILYKKLMEK | 0.747 | 15 | SB | Large T | A1101 |
| 668 | HSQELHLCK | 0.730 | 18 | SB | Large T | A1101 |
| 341 | AVDTVLAKK | 0.703 | 24 | SB | Large T | A1101 |
| 195 | IIFFLTPHR | 0.686 | 30 | SB | Large T | A1101 |
| 504 | GSVKVNLEK | 0.679 | 32 | SB | Large T | A1101 |
| 121 | SQHSTPPKK | 0.674 | 33 | SB | Large T | A1101 |
| 147 | LSQAVFSNR | 0.654 | 42 | SB | Large T | A1101 |
| 536 | KTLQARFVR | 0.650 | 44 | SB | Large T | A1101 |
| 155 | RTLACFAVY | 0.646 | 46 | SB | Large T | A1101 |
| 340 | QAVDTVLAK | 0.602 | 74 | WB | Large T | A1101 |
| 505 | SVKVNLEKK | 0.583 | 91 | WB | Large T | A1101 |
| 27 | PLMRKAYLK | 0.576 | 98 | WB | Large T | A1101 |
| 120 | DSQHSTPPK | 0.567 | 108 | WB | Large T | A1101 |
| 393 | AWLHCLLPK | 0.566 | 109 | WB | Large T | A1101 |
| 413 | VVFNVPKRR | 0.559 | 118 | WB | Large T | A1101 |
| 439 | GLLDLCGGK | 0.551 | 129 | WB | Large T | A1101 |
| 324 | NAIIFAESK | 0.539 | 146 | WB | Large T | A1101 |
| 350 | RVDTLHMTR | 0.529 | 163 | WB | Large T | A1101 |
| 226 | GVNKEYLLY | 0.518 | 184 | WB | Large T | A1101 |
| 607 | EISMYTFSR | 0.496 | 233 | WB | Large T | A1101 |
| 274 | ITEYAVETK | 0.491 | 247 | WB | Large T | A1101 |
| 593 | IQSRIVEWK | 0.489 | 252 | WB | Large T | A1101 |
| 491 | GINNLDSLR | 0.488 | 254 | WB | Large T | A1101 |
| 296 | FQYNVEECK | 0.478 | 285 | WB | Large T | A1101 |
| 576 | LLLLLIWFR | 0.466 | 321 | WB | Large T | A1101 |
| 91 | SWWSSFNEK | 0.461 | 340 | WB | Large T | A1101 |
| 158 | ACFAVYTTK | 0.456 | 360 | WB | Large T | A1101 |
| 221 | FLICKGVNK | 0.446 | 399 | WB | Large T | A1101 |
| 32 | AYLKKCKEF | 0.708 | 23 | SB | Large T | A2301 |
| 581 | IWFRPVADF | 0.678 | 32 | SB | Large T | A2301 |
| 312 | PYHFKYHEK | 0.647 | 45 | SB | Large T | A2301 |
| 91 | SWWSSFNEK | 0.552 | 126 | WB | Large T | A2301 |
| 387 | QYMAGVAWL | 0.546 | 135 | WB | Large T | A2301 |
| 190 | CAGHNIIFF | 0.527 | 166 | WB | Large T | A2301 |
| 401 | KMDSVIFDF | 0.522 | 176 | WB | Large T | A2301 |
| 286 | VFLLLGMYL | 0.518 | 183 | WB | Large T | A2301 |
| 292 | MYLEFQYNV | 0.512 | 196 | WB | Large T | A2301 |
| 138 | DFPSDLHQF | 0.501 | 220 | WB | Large T | A2301 |
| 314 | HFKYHEKHF | 0.501 | 222 | WB | Large T | A2301 |
| 575 | TLLLLLIWF | 0.496 | 233 | WB | Large T | A2301 |
| 213 | CQKLCTFSF | 0.485 | 263 | WB | Large T | A2301 |
| 393 | AWLHCLLPK | 0.471 | 305 | WB | Large T | A2301 |
| 288 | LLLGMYLEF | 0.464 | 331 | WB | Large T | A2301 |
| 320 | KHFANAIIF | 0.463 | 334 | WB | Large T | A2301 |
| 327 | IFAESKNQK | 0.458 | 352 | WB | Large T | A2301 |
| 610 | MYTFSRMKY | 0.455 | 365 | WB | Large T | A2301 |
| 211 | NFCQKLCTF | 0.454 | 368 | WB | Large T | A2301 |
| 612 | TFSRMKYNI | 0.440 | 427 | WB | Large T | A2301 |
| 88 | EWESWWSSF | 0.597 | 78 | WB | Large T | A2402 |
| 387 | QYMAGVAWL | 0.587 | 87 | WB | Large T | A2402 |
| 138 | DFPSDLHQF | 0.544 | 138 | WB | Large T | A2402 |
| 241 | PYHIIEESI | 0.536 | 150 | WB | Large T | A2402 |
| 32 | AYLKKCKEF | 0.523 | 174 | WB | Large T | A2402 |
| 581 | IWFRPVADF | 0.503 | 216 | WB | Large T | A2402 |
| 468 | QYMVVFEDV | 0.502 | 219 | WB | Large T | A2402 |
| 612 | TFSRMKYNI | 0.451 | 381 | WB | Large T | A2402 |
| 286 | VFLLLGMYL | 0.434 | 456 | WB | Large T | A2402 |
| 417 | VPKRRYWLF | 0.432 | 466 | WB | Large T | A2402 |
| 32 | AYLKKCKEF | 0.859 | 4 | SB | Large T | A2403 |
| 387 | QYMAGVAWL | 0.773 | 11 | SB | Large T | A2403 |
| 138 | DFPSDLHQF | 0.618 | 62 | WB | Large T | A2403 |
| 320 | KHFANAIIF | 0.569 | 105 | WB | Large T | A2403 |
| 521 | IFPPGLVTM | 0.551 | 129 | WB | Large T | A2403 |
| 68 | AHQPDFGTW | 0.542 | 142 | WB | Large T | A2403 |
| 286 | VFLLLGMYL | 0.532 | 158 | WB | Large T | A2403 |
| 581 | IWFRPVADF | 0.506 | 209 | WB | Large T | A2403 |
| 401 | KMDSVIFDF | 0.462 | 338 | WB | Large T | A2403 |
| 190 | CAGHNIIFF | 0.458 | 351 | WB | Large T | A2403 |
| 468 | QYMVVFEDV | 0.446 | 400 | WB | Large T | A2403 |
| 211 | NFCQKLCTF | 0.433 | 461 | WB | Large T | A2403 |
| 285 | DVFLLLGMY | 0.689 | 29 | SB | Large T | A2601 |
| 265 | ETKQVSWKL | 0.506 | 209 | WB | Large T | A2601 |
| 8 | ESMELMDLL | 0.463 | 335 | WB | Large T | A2601 |
| 285 | DVFLLLGMY | 0.923 | 2 | SB | Large T | A2602 |
| 465 | AIDQYMVVF | 0.801 | 8 | SB | Large T | A2602 |
| 280 | ETKCEDVFL | 0.742 | 16 | SB | Large T | A2602 |
| 545 | QIDFRPKIY | 0.724 | 19 | SB | Large T | A2602 |
| 138 | DFPSDLHQF | 0.617 | 63 | WB | Large T | A2602 |
| 226 | GVNKEYLLY | 0.612 | 66 | WB | Large T | A2602 |
| 155 | RTLACFAVY | 0.609 | 68 | WB | Large T | A2602 |
| 152 | FSNRTLACF | 0.590 | 84 | WB | Large T | A2602 |
| 265 | ETKQVSWKL | 0.518 | 183 | WB | Large T | A2602 |
| 8 | ESMELMDLL | 0.476 | 290 | WB | Large T | A2602 |
| 103 | DLFCHEDMF | 0.457 | 358 | WB | Large T | A2602 |
| 450 | NVNLPMERL | 0.447 | 396 | WB | Large T | A2602 |
| 164 | TTKEKAQIL | 0.437 | 441 | WB | Large T | A2602 |
| 290 | LGMYLEFQY | 0.593 | 81 | WB | Large T | A2902 |
| 50 | KMKRMNTLY | 0.576 | 98 | WB | Large T | A2902 |
| 269 | VSWKLITEY | 0.552 | 127 | WB | Large T | A2902 |
| 285 | DVFLLLGMY | 0.538 | 148 | WB | Large T | A2902 |
| 226 | GVNKEYLLY | 0.508 | 204 | WB | Large T | A2902 |
| 610 | MYTFSRMKY | 0.474 | 295 | WB | Large T | A2902 |
| 414 | VFNVPKRRY | 0.429 | 480 | WB | Large T | A2902 |
| 28 | LMRKAYLKK | 0.830 | 6 | SB | Large T | A3001 |
| 51 | MKRMNTLYK | 0.827 | 6 | SB | Large T | A3001 |
| 36 | KCKEFHPDK | 0.817 | 7 | SB | Large T | A3001 |
| 418 | PKRRYWLFK | 0.813 | 7 | SB | Large T | A3001 |
| 121 | SQHSTPPKK | 0.755 | 14 | SB | Large T | A3001 |
| 682 | KRPKTPPPK | 0.723 | 19 | SB | Large T | A3001 |
| 528 | TMNEYPVPK | 0.716 | 21 | SB | Large T | A3001 |
| 677 | GFQCFKRPK | 0.683 | 30 | SB | Large T | A3001 |
| 120 | DSQHSTPPK | 0.675 | 33 | SB | Large T | A3001 |
| 674 | LCKGFQCFK | 0.669 | 36 | SB | Large T | A3001 |
| 129 | KKRKVEDPK | 0.666 | 37 | SB | Large T | A3001 |
| 158 | ACFAVYTTK | 0.657 | 40 | SB | Large T | A3001 |
| 536 | KTLQARFVR | 0.637 | 51 | WB | Large T | A3001 |
| 505 | SVKVNLEKK | 0.634 | 52 | WB | Large T | A3001 |
| 609 | SMYTFSRMK | 0.598 | 77 | WB | Large T | A3001 |
| 166 | KEKAQILYK | 0.579 | 95 | WB | Large T | A3001 |
| 312 | PYHFKYHEK | 0.574 | 100 | WB | Large T | A3001 |
| 195 | IIFFLTPHR | 0.569 | 105 | WB | Large T | A3001 |
| 393 | AWLHCLLPK | 0.519 | 181 | WB | Large T | A3001 |
| 50 | KMKRMNTLY | 0.501 | 220 | WB | Large T | A3001 |
| 340 | QAVDTVLAK | 0.481 | 273 | WB | Large T | A3001 |
| 274 | ITEYAVETK | 0.481 | 274 | WB | Large T | A3001 |
| 124 | STPPKKKRK | 0.478 | 282 | WB | Large T | A3001 |
| 171 | ILYKKLMEK | 0.467 | 318 | WB | Large T | A3001 |
| 411 | HCVVFNVPK | 0.465 | 325 | WB | Large T | A3001 |
| 27 | PLMRKAYLK | 0.439 | 431 | WB | Large T | A3001 |
| 544 | RQIDFRPKI | 0.437 | 440 | WB | Large T | A3001 |
| 668 | HSQELHLCK | 0.436 | 445 | WB | Large T | A3001 |
| 52 | KRMNTLYKK | 0.435 | 453 | WB | Large T | A3001 |
| 50 | KMKRMNTLY | 0.561 | 115 | WB | Large T | A3002 |
| 401 | KMDSVIFDF | 0.525 | 169 | WB | Large T | A3002 |
| 172 | LYKKLMEKY | 0.524 | 172 | WB | Large T | A3002 |
| 285 | DVFLLLGMY | 0.509 | 201 | WB | Large T | A3002 |
| 610 | MYTFSRMKY | 0.502 | 218 | WB | Large T | A3002 |
| 226 | GVNKEYLLY | 0.497 | 231 | WB | Large T | A3002 |
| 603 | RLDSEISMY | 0.483 | 269 | WB | Large T | A3002 |
| 536 | KTLQARFVR | 0.856 | 4 | SB | Large T | A3101 |
| 576 | LLLLLIWFR | 0.848 | 5 | SB | Large T | A3101 |
| 179 | KYSVTFISR | 0.844 | 5 | SB | Large T | A3101 |
| 541 | RFVRQIDFR | 0.836 | 5 | SB | Large T | A3101 |
| 147 | LSQAVFSNR | 0.821 | 6 | SB | Large T | A3101 |
| 547 | DFRPKIYLR | 0.799 | 8 | SB | Large T | A3101 |
| 195 | IIFFLTPHR | 0.720 | 20 | SB | Large T | A3101 |
| 528 | TMNEYPVPK | 0.713 | 22 | SB | Large T | A3101 |
| 350 | RVDTLHMTR | 0.712 | 22 | SB | Large T | A3101 |
| 197 | FFLTPHRHR | 0.682 | 31 | SB | Large T | A3101 |
| 491 | GINNLDSLR | 0.668 | 36 | SB | Large T | A3101 |
| 413 | VVFNVPKRR | 0.651 | 43 | SB | Large T | A3101 |
| 607 | EISMYTFSR | 0.604 | 72 | WB | Large T | A3101 |
| 155 | RTLACFAVY | 0.573 | 101 | WB | Large T | A3101 |
| 609 | SMYTFSRMK | 0.567 | 108 | WB | Large T | A3101 |
| 217 | CTFSFLICK | 0.563 | 113 | WB | Large T | A3101 |
| 50 | KMKRMNTLY | 0.540 | 144 | WB | Large T | A3101 |
| 91 | SWWSSFNEK | 0.515 | 190 | WB | Large T | A3101 |
| 123 | HSTPPKKKR | 0.487 | 257 | WB | Large T | A3101 |
| 292 | MYLEFQYNV | 0.476 | 289 | WB | Large T | A3101 |
| 677 | GFQCFKRPK | 0.472 | 301 | WB | Large T | A3101 |
| 231 | YLLYSALTR | 0.438 | 439 | WB | Large T | A3101 |
| 28 | LMRKAYLKK | 0.436 | 447 | WB | Large T | A3101 |
| 547 | DFRPKIYLR | 0.938 | 1 | SB | Large T | A3301 |
| 576 | LLLLLIWFR | 0.827 | 6 | SB | Large T | A3301 |
| 607 | EISMYTFSR | 0.826 | 6 | SB | Large T | A3301 |
| 195 | IIFFLTPHR | 0.692 | 27 | SB | Large T | A3301 |
| 588 | DFSKDIQSR | 0.669 | 35 | SB | Large T | A3301 |
| 197 | FFLTPHRHR | 0.615 | 64 | WB | Large T | A3301 |
| 147 | LSQAVFSNR | 0.592 | 82 | WB | Large T | A3301 |
| 231 | YLLYSALTR | 0.473 | 299 | WB | Large T | A3301 |
| 607 | EISMYTFSR | 0.908 | 2 | SB | Large T | A6801 |
| 412 | CVVFNVPKR | 0.851 | 5 | SB | Large T | A6801 |
| 195 | IIFFLTPHR | 0.838 | 5 | SB | Large T | A6801 |
| 217 | CTFSFLICK | 0.813 | 7 | SB | Large T | A6801 |
| 324 | NAIIFAESK | 0.796 | 9 | SB | Large T | A6801 |
| 207 | SAINNFCQK | 0.749 | 15 | SB | Large T | A6801 |
| 160 | FAVYTTKEK | 0.721 | 20 | SB | Large T | A6801 |
| 274 | ITEYAVETK | 0.648 | 44 | SB | Large T | A6801 |
| 147 | LSQAVFSNR | 0.643 | 47 | SB | Large T | A6801 |
| 536 | KTLQARFVR | 0.643 | 47 | SB | Large T | A6801 |
| 231 | YLLYSALTR | 0.628 | 56 | WB | Large T | A6801 |
| 616 | MKYNICMGK | 0.625 | 58 | WB | Large T | A6801 |
| 491 | GINNLDSLR | 0.625 | 58 | WB | Large T | A6801 |
| 413 | VVFNVPKRR | 0.622 | 60 | WB | Large T | A6801 |
| 560 | NSEFLLEKR | 0.620 | 61 | WB | Large T | A6801 |
| 609 | SMYTFSRMK | 0.595 | 80 | WB | Large T | A6801 |
| 167 | EKAQILYKK | 0.595 | 80 | WB | Large T | A6801 |
| 610 | MYTFSRMKY | 0.588 | 86 | WB | Large T | A6801 |
| 576 | LLLLLIWFR | 0.573 | 101 | WB | Large T | A6801 |
| 469 | YMVVFEDVK | 0.567 | 108 | WB | Large T | A6801 |
| 296 | FQYNVEECK | 0.534 | 153 | WB | Large T | A6801 |
| 123 | HSTPPKKKR | 0.530 | 162 | WB | Large T | A6801 |
| 340 | QAVDTVLAK | 0.527 | 167 | WB | Large T | A6801 |
| 668 | HSQELHLCK | 0.512 | 196 | WB | Large T | A6801 |
| 505 | SVKVNLEKK | 0.501 | 220 | WB | Large T | A6801 |
| 120 | DSQHSTPPK | 0.485 | 263 | WB | Large T | A6801 |
| 528 | TMNEYPVPK | 0.481 | 275 | WB | Large T | A6801 |
| 171 | ILYKKLMEK | 0.479 | 281 | WB | Large T | A6801 |
| 504 | GSVKVNLEK | 0.451 | 380 | WB | Large T | A6801 |
| 285 | DVFLLLGMY | 0.450 | 385 | WB | Large T | A6801 |
| 449 | LNVNLPMER | 0.448 | 390 | WB | Large T | A6801 |
| 350 | RVDTLHMTR | 0.441 | 422 | WB | Large T | A6801 |
| 403 | DSVIFDFLH | 0.439 | 432 | WB | Large T | A6801 |
| 388 | YMAGVAWLH | 0.437 | 440 | WB | Large T | A6801 |
| 588 | DFSKDIQSR | 0.437 | 444 | WB | Large T | A6801 |
| 547 | DFRPKIYLR | 0.427 | 492 | WB | Large T | A6801 |
| 8 | ESMELMDLL | 0.767 | 12 | SB | Large T | A6802 |
| 409 | FLHCVVFNV | 0.700 | 25 | SB | Large T | A6802 |
| 402 | MDSVIFDFL | 0.694 | 27 | SB | Large T | A6802 |
| 450 | NVNLPMERL | 0.691 | 28 | SB | Large T | A6802 |
| 219 | FSFLICKGV | 0.689 | 28 | SB | Large T | A6802 |
| 265 | ETKQVSWKL | 0.607 | 70 | WB | Large T | A6802 |
| 280 | ETKCEDVFL | 0.589 | 85 | WB | Large T | A6802 |
| 416 | NVPKRRYWL | 0.585 | 89 | WB | Large T | A6802 |
| 526 | LVTMNEYPV | 0.585 | 89 | WB | Large T | A6802 |
| 405 | VIFDFLHCV | 0.583 | 91 | WB | Large T | A6802 |
| 73 | FGTWNSSEV | 0.580 | 94 | WB | Large T | A6802 |
| 458 | LTFELGVAI | 0.577 | 96 | WB | Large T | A6802 |
| 371 | DKMDLIFGA | 0.565 | 110 | WB | Large T | A6802 |
| 589 | FSKDIQSRI | 0.558 | 119 | WB | Large T | A6802 |
| 198 | FLTPHRHRV | 0.543 | 140 | WB | Large T | A6802 |
| 519 | TQIFPPGLV | 0.515 | 189 | WB | Large T | A6802 |
| 377 | FGAHGNAVL | 0.502 | 218 | WB | Large T | A6802 |
| 156 | TLACFAVYT | 0.493 | 239 | WB | Large T | A6802 |
| 464 | VAIDQYMVV | 0.486 | 261 | WB | Large T | A6802 |
| 468 | QYMVVFEDV | 0.482 | 271 | WB | Large T | A6802 |
| 608 | ISMYTFSRM | 0.465 | 326 | WB | Large T | A6802 |
| 343 | DTVLAKKRV | 0.459 | 348 | WB | Large T | A6802 |
| 361 | MLTERFNHI | 0.450 | 382 | WB | Large T | A6802 |
| 191 | AGHNIIFFL | 0.447 | 396 | WB | Large T | A6802 |
| 154 | NRTLACFAV | 0.432 | 468 | WB | Large T | A6802 |
| 458 | LTFELGVAI | 0.702 | 25 | SB | Large T | A6901 |
| 405 | VIFDFLHCV | 0.691 | 28 | SB | Large T | A6901 |
| 409 | FLHCVVFNV | 0.683 | 30 | SB | Large T | A6901 |
| 578 | LLLIWFRPV | 0.630 | 54 | WB | Large T | A6901 |
| 8 | ESMELMDLL | 0.609 | 68 | WB | Large T | A6901 |
| 368 | HILDKMDLI | 0.587 | 87 | WB | Large T | A6901 |
| 139 | FPSDLHQFL | 0.553 | 125 | WB | Large T | A6901 |
| 292 | MYLEFQYNV | 0.522 | 176 | WB | Large T | A6901 |
| 21 | AAWGNLPLM | 0.483 | 267 | WB | Large T | A6901 |
| 198 | FLTPHRHRV | 0.481 | 274 | WB | Large T | A6901 |
| 265 | ETKQVSWKL | 0.457 | 355 | WB | Large T | A6901 |
| 500 | DYLDGSVKV | 0.449 | 389 | WB | Large T | A6901 |
| 464 | VAIDQYMVV | 0.431 | 472 | WB | Large T | A6901 |
| 20 | RAAWGNLPL | 0.721 | 20 | SB | Large T | B0702 |
| 26 | LPLMRKAYL | 0.719 | 20 | SB | Large T | B0702 |
| 200 | TPHRHRVSA | 0.662 | 38 | SB | Large T | B0702 |
| 532 | YPVPKTLQA | 0.651 | 43 | SB | Large T | B0702 |
| 399 | LPKMDSVIF | 0.516 | 187 | WB | Large T | B0702 |
| 568 | RILQSGMTL | 0.499 | 226 | WB | Large T | B0702 |
| 81 | VPTYGTEEW | 0.497 | 232 | WB | Large T | B0702 |
| 139 | FPSDLHQFL | 0.467 | 320 | WB | Large T | B0702 |
| 417 | VPKRRYWLF | 0.461 | 339 | WB | Large T | B0702 |
| 417 | VPKRRYWLF | 0.587 | 87 | WB | Large T | B0801 |
| 144 | HQFLSQAVF | 0.618 | 62 | WB | Large T | B1501 |
| 234 | YSALTRDPY | 0.569 | 105 | WB | Large T | B1501 |
| 50 | KMKRMNTLY | 0.561 | 115 | WB | Large T | B1501 |
| 213 | CQKLCTFSF | 0.528 | 165 | WB | Large T | B1501 |
| 155 | RTLACFAVY | 0.522 | 176 | WB | Large T | B1501 |
| 514 | HLNKRTQIF | 0.501 | 221 | WB | Large T | B1501 |
| 288 | LLLGMYLEF | 0.495 | 236 | WB | Large T | B1501 |
| 570 | LQSGMTLLL | 0.479 | 280 | WB | Large T | B1501 |
| 152 | FSNRTLACF | 0.468 | 315 | WB | Large T | B1501 |
| 176 | LMEKYSVTF | 0.466 | 324 | WB | Large T | B1501 |
| 20 | RAAWGNLPL | 0.444 | 411 | WB | Large T | B1501 |
| 388 | YMAGVAWLH | 0.439 | 434 | WB | Large T | B1501 |
| 10 | MELMDLLGL | 0.722 | 20 | SB | Large T | B1801 |
| 530 | NEYPVPKTL | 0.706 | 24 | SB | Large T | B1801 |
| 670 | QELHLCKGF | 0.692 | 27 | SB | Large T | B1801 |
| 229 | KEYLLYSAL | 0.571 | 104 | WB | Large T | B1801 |
| 664 | SENPHSQEL | 0.520 | 179 | WB | Large T | B1801 |
| 52 | KRMNTLYKK | 0.656 | 41 | SB | Large T | B2705 |
| 548 | FRPKIYLRK | 0.526 | 169 | WB | Large T | B2705 |
| 420 | RRYWLFKGP | 0.518 | 184 | WB | Large T | B2705 |
| 364 | ERFNHILDK | 0.460 | 343 | WB | Large T | B2705 |
| 614 | SRMKYNICM | 0.452 | 375 | WB | Large T | B2705 |
| 540 | ARFVRQIDF | 0.436 | 448 | WB | Large T | B2705 |
| 682 | KRPKTPPPK | 0.430 | 477 | WB | Large T | B2705 |
| 399 | LPKMDSVIF | 0.752 | 14 | SB | Large T | B3501 |
| 139 | FPSDLHQFL | 0.633 | 52 | WB | Large T | B3501 |
| 20 | RAAWGNLPL | 0.618 | 62 | WB | Large T | B3501 |
| 234 | YSALTRDPY | 0.565 | 111 | WB | Large T | B3501 |
| 447 | KALNVNLPM | 0.561 | 115 | WB | Large T | B3501 |
| 21 | AAWGNLPLM | 0.545 | 137 | WB | Large T | B3501 |
| 189 | MCAGHNIIF | 0.537 | 149 | WB | Large T | B3501 |
| 111 | FASDEEATA | 0.509 | 202 | WB | Large T | B3501 |
| 534 | VPKTLQARF | 0.498 | 229 | WB | Large T | B3501 |
| 81 | VPTYGTEEW | 0.486 | 260 | WB | Large T | B3501 |
| 269 | VSWKLITEY | 0.463 | 334 | WB | Large T | B3501 |
| 285 | DVFLLLGMY | 0.447 | 394 | WB | Large T | B3501 |
| 532 | YPVPKTLQA | 0.445 | 403 | WB | Large T | B3501 |
| 176 | LMEKYSVTF | 0.441 | 423 | WB | Large T | B3501 |
| 155 | RTLACFAVY | 0.434 | 455 | WB | Large T | B3501 |
| 666 | NPHSQELHL | 0.426 | 495 | WB | Large T | B3501 |
| 377 | FGAHGNAVL | 0.547 | 133 | WB | Large T | B3901 |
| 10 | MELMDLLGL | 0.751 | 14 | SB | Large T | B4001 |
| 229 | KEYLLYSAL | 0.690 | 28 | SB | Large T | B4001 |
| 664 | SENPHSQEL | 0.681 | 31 | SB | Large T | B4001 |
| 530 | NEYPVPKTL | 0.592 | 82 | WB | Large T | B4001 |
| 7 | EESMELMDL | 0.561 | 115 | WB | Large T | B4001 |
| 245 | IEESIQGGL | 0.552 | 127 | WB | Large T | B4001 |
| 561 | SEFLLEKRI | 0.498 | 227 | WB | Large T | B4001 |
| 18 | LERAAWGNL | 0.497 | 231 | WB | Large T | B4001 |
| 358 | REEMLTERF | 0.441 | 422 | WB | Large T | B4001 |
| 664 | SENPHSQEL | 0.630 | 54 | WB | Large T | B4002 |
| 229 | KEYLLYSAL | 0.583 | 91 | WB | Large T | B4002 |
| 606 | SEISMYTFS | 0.489 | 252 | WB | Large T | B4002 |
| 279 | VETKCEDVF | 0.469 | 314 | WB | Large T | B4002 |
| 177 | MEKYSVTFI | 0.462 | 335 | WB | Large T | B4002 |
| 606 | SEISMYTFS | 0.521 | 177 | WB | Large T | B4403 |
| 561 | SEFLLEKRI | 0.458 | 353 | WB | Large T | B4403 |
| 664 | SENPHSQEL | 0.446 | 403 | WB | Large T | B4403 |
| 329 | AESKNQKSI | 0.497 | 229 | WB | Large T | B4501 |
| 453 | LPMERLTFE | 0.451 | 378 | WB | Large T | B5101 |
| 139 | FPSDLHQFL | 0.438 | 437 | WB | Large T | B5101 |
| 81 | VPTYGTEEW | 0.673 | 34 | SB | Large T | B5301 |
| 399 | LPKMDSVIF | 0.628 | 55 | WB | Large T | B5301 |
| 26 | LPLMRKAYL | 0.625 | 57 | WB | Large T | B5301 |
| 666 | NPHSQELHL | 0.553 | 126 | WB | Large T | B5301 |
| 139 | FPSDLHQFL | 0.509 | 202 | WB | Large T | B5301 |
| 574 | MTLLLLLIW | 0.454 | 366 | WB | Large T | B5301 |
| 522 | FPPGLVTMN | 0.672 | 34 | SB | Large T | B5401 |
| 200 | TPHRHRVSA | 0.530 | 162 | WB | Large T | B5401 |
| 219 | FSFLICKGV | 0.453 | 373 | WB | Large T | B5401 |
| 453 | LPMERLTFE | 0.432 | 466 | WB | Large T | B5401 |
| 574 | MTLLLLLIW | 0.446 | 399 | WB | Large T | B5701 |
| 401 | KMDSVIFDF | 0.615 | 64 | WB | Large T | B5801 |
| 574 | MTLLLLLIW | 0.594 | 80 | WB | Large T | B5801 |
| 152 | FSNRTLACF | 0.562 | 114 | WB | Large T | B5801 |
| 84 | YGTEEWESW | 0.553 | 125 | WB | Large T | B5801 |
| 20 | RAAWGNLPL | 0.460 | 344 | WB | Large T | B5801 |
| 447 | KALNVNLPM | 0.442 | 419 | WB | Large T | B5801 |
| 269 | VSWKLITEY | 0.429 | 482 | WB | Large T | B5801 |

10-mers

| | | | | | | |
|---|---|---|---|---|---|---|
| 164 | TTKEKAQILY | 0.528 | 165 | WB | Large T | A0101 |
| 401 | KMDSVIFDFL | 0.830 | 6 | SB | Large T | A0201 |
| 291 | GMYLEFQYNV | 0.761 | 13 | SB | Large T | A0201 |
| 405 | VIFDFLHCVV | 0.679 | 32 | SB | Large T | A0201 |
| 525 | GLVTMNEYPV | 0.676 | 33 | SB | Large T | A0201 |
| 501 | YLDGSVKVNL | 0.671 | 35 | SB | Large T | A0201 |
| 569 | ILQSGMTLLL | 0.658 | 40 | SB | Large T | A0201 |
| 577 | LLLLIWFRPV | 0.657 | 40 | SB | Large T | A0201 |
| 383 | AVLEQYMAGV | 0.637 | 50 | WB | Large T | A0201 |
| 361 | MLTERFNHIL | 0.616 | 63 | WB | Large T | A0201 |
| 176 | LMEKYSVTFI | 0.609 | 68 | WB | Large T | A0201 |
| 404 | SVIFDFLHCV | 0.585 | 89 | WB | Large T | A0201 |
| 603 | RLDSEISMYT | 0.583 | 90 | WB | Large T | A0201 |
| 497 | SLRDYLDGSV | 0.570 | 104 | WB | Large T | A0201 |
| 272 | KLITEYAVET | 0.543 | 140 | WB | Large T | A0201 |
| 578 | LLLIWFRPVA | 0.503 | 216 | WB | Large T | A0201 |
| 563 | FLLEKRILQS | 0.500 | 222 | WB | Large T | A0201 |
| 56 | TLYKKMEQDV | 0.485 | 263 | WB | Large T | A0201 |
| 528 | TMNEYPVPKT | 0.457 | 354 | WB | Large T | A0201 |
| 12 | LMDLLGLERA | 0.456 | 361 | WB | Large T | A0201 |
| 568 | RILQSGMTLL | 0.454 | 367 | WB | Large T | A0201 |
| 288 | LLLGMYLEFQ | 0.448 | 391 | WB | Large T | A0201 |
| 3 | VLNREESMEL | 0.434 | 454 | WB | Large T | A0201 |
| 401 | KMDSVIFDFL | 0.773 | 11 | SB | Large T | A0202 |
| 603 | RLDSEISMYT | 0.720 | 20 | SB | Large T | A0202 |
| 569 | ILQSGMTLLL | 0.716 | 21 | SB | Large T | A0202 |
| 291 | GMYLEFQYNV | 0.681 | 31 | SB | Large T | A0202 |
| 525 | GLVTMNEYPV | 0.674 | 33 | SB | Large T | A0202 |
| 497 | SLRDYLDGSV | 0.665 | 37 | SB | Large T | A0202 |
| 405 | VIFDFLHCVV | 0.649 | 44 | SB | Large T | A0202 |
| 501 | YLDGSVKVNL | 0.648 | 44 | SB | Large T | A0202 |
| 288 | LLLGMYLEFQ | 0.645 | 46 | SB | Large T | A0202 |
| 577 | LLLLIWFRPV | 0.628 | 55 | WB | Large T | A0202 |
| 287 | FLLLGMYLEF | 0.618 | 62 | WB | Large T | A0202 |
| 570 | LQSGMTLLLL | 0.609 | 69 | WB | Large T | A0202 |
| 12 | LMDLLGLERA | 0.607 | 70 | WB | Large T | A0202 |
| 388 | YMAGVAWLHC | 0.582 | 91 | WB | Large T | A0202 |
| 156 | TLACFAVYTT | 0.566 | 109 | WB | Large T | A0202 |
| 175 | KLMEKYSVTF | 0.566 | 109 | WB | Large T | A0202 |
| 3 | VLNREESMEL | 0.562 | 114 | WB | Large T | A0202 |
| 397 | CLLPKMDSVI | 0.561 | 115 | WB | Large T | A0202 |
| 285 | DVFLLLGMYL | 0.560 | 117 | WB | Large T | A0202 |
| 435 | TLAAGLLDLC | 0.550 | 130 | WB | Large T | A0202 |
| 361 | MLTERFNHIL | 0.543 | 140 | WB | Large T | A0202 |
| 383 | AVLEQYMAGV | 0.535 | 153 | WB | Large T | A0202 |
| 353 | TLHMTREEML | 0.532 | 157 | WB | Large T | A0202 |
| 461 | ELGVAIDQYM | 0.520 | 180 | WB | Large T | A0202 |
| 56 | TLYKKMEQDV | 0.516 | 187 | WB | Large T | A0202 |
| 103 | DLFCHEDMFA | 0.516 | 187 | WB | Large T | A0202 |
| 463 | GVAIDQYMVV | 0.509 | 202 | WB | Large T | A0202 |
| 9 | SMELMDLLGL | 0.507 | 206 | WB | Large T | A0202 |
| 142 | DLHQFLSQAV | 0.497 | 230 | WB | Large T | A0202 |
| 611 | YTFSRMKYNI | 0.493 | 240 | WB | Large T | A0202 |
| 272 | KLITEYAVET | 0.492 | 243 | WB | Large T | A0202 |
| 375 | LIFGAHGNAV | 0.491 | 247 | WB | Large T | A0202 |
| 563 | FLLEKRILQS | 0.488 | 253 | WB | Large T | A0202 |
| 440 | LLDLCGGKAL | 0.488 | 255 | WB | Large T | A0202 |
| 25 | NLPLMRKAYL | 0.483 | 269 | WB | Large T | A0202 |
| 568 | RILQSGMTLL | 0.478 | 285 | WB | Large T | A0202 |
| 176 | LMEKYSVTFI | 0.471 | 305 | WB | Large T | A0202 |
| 236 | ALTRDPYHII | 0.461 | 341 | WB | Large T | A0202 |
| 493 | NNLDSLRDYL | 0.454 | 366 | WB | Large T | A0202 |
| 572 | SGMTLLLLLI | 0.453 | 371 | WB | Large T | A0202 |
| 148 | SQAVFSNRTL | 0.450 | 383 | WB | Large T | A0202 |
| 439 | GLLDLCGGKA | 0.445 | 406 | WB | Large T | A0202 |
| 609 | SMYTFSRMKY | 0.445 | 406 | WB | Large T | A0202 |
| 345 | VLAKKRVDTL | 0.445 | 407 | WB | Large T | A0202 |
| 360 | EMLTERFNHI | 0.440 | 427 | WB | Large T | A0202 |
| 578 | LLLIWFRPVA | 0.438 | 435 | WB | Large T | A0202 |
| 556 | KSLQNSEFLL | 0.437 | 441 | WB | Large T | A0202 |
| 213 | CQKLCTFSFL | 0.433 | 461 | WB | Large T | A0202 |
| 497 | SLRDYLDGSV | 0.883 | 3 | SB | Large T | A0203 |
| 361 | MLTERFNHIL | 0.815 | 7 | SB | Large T | A0203 |
| 291 | GMYLEFQYNV | 0.792 | 9 | SB | Large T | A0203 |
| 525 | GLVTMNEYPV | 0.769 | 12 | SB | Large T | A0203 |
| 383 | AVLEQYMAGV | 0.755 | 14 | SB | Large T | A0203 |
| 569 | ILQSGMTLLL | 0.731 | 18 | SB | Large T | A0203 |
| 375 | LIFGAHGNAV | 0.731 | 18 | SB | Large T | A0203 |
| 577 | LLLLIWFRPV | 0.708 | 23 | SB | Large T | A0203 |
| 56 | TLYKKMEQDV | 0.707 | 23 | SB | Large T | A0203 |
| 405 | VIFDFLHCVV | 0.674 | 34 | SB | Large T | A0203 |
| 3 | VLNREESMEL | 0.666 | 37 | SB | Large T | A0203 |
| 457 | RLTFELGVAI | 0.665 | 37 | SB | Large T | A0203 |
| 404 | SVIFDFLHCV | 0.654 | 42 | SB | Large T | A0203 |
| 501 | YLDGSVKVNL | 0.627 | 56 | WB | Large T | A0203 |
| 345 | VLAKKRVDTL | 0.625 | 57 | WB | Large T | A0203 |
| 176 | LMEKYSVTFI | 0.611 | 67 | WB | Large T | A0203 |
| 156 | TLACFAVYTT | 0.600 | 75 | WB | Large T | A0203 |
| 236 | ALTRDPYHII | 0.576 | 98 | WB | Large T | A0203 |
| 401 | KMDSVIFDFL | 0.549 | 132 | WB | Large T | A0203 |
| 537 | TLQARFVRQI | 0.548 | 132 | WB | Large T | A0203 |
| 439 | GLLDLCGGKA | 0.546 | 136 | WB | Large T | A0203 |
| 570 | LQSGMTLLLL | 0.542 | 142 | WB | Large T | A0203 |
| 568 | RILQSGMTLL | 0.541 | 143 | WB | Large T | A0203 |
| 397 | CLLPKMDSVI | 0.534 | 154 | WB | Large T | A0203 |
| 611 | YTFSRMKYNI | 0.521 | 177 | WB | Large T | A0203 |
| 142 | DLHQFLSQAV | 0.503 | 217 | WB | Large T | A0203 |
| 603 | RLDSEISMYT | 0.488 | 254 | WB | Large T | A0203 |
| 578 | LLLIWFRPVA | 0.485 | 261 | WB | Large T | A0203 |
| 272 | KLITEYAVET | 0.485 | 263 | WB | Large T | A0203 |
| 213 | CQKLCTFSFL | 0.480 | 277 | WB | Large T | A0203 |
| 463 | GVAIDQYMVV | 0.473 | 298 | WB | Large T | A0203 |
| 12 | LMDLLGLERA | 0.468 | 314 | WB | Large T | A0203 |
| 528 | TMNEYPVPKT | 0.465 | 326 | WB | Large T | A0203 |
| 9 | SMELMDLLGL | 0.462 | 338 | WB | Large T | A0203 |
| 333 | NQKSICQQAV | 0.456 | 361 | WB | Large T | A0203 |
| 336 | SICQQAVDTV | 0.435 | 451 | WB | Large T | A0203 |
| 383 | AVLEQYMAGV | 0.666 | 37 | SB | Large T | A0204 |
| 525 | GLVTMNEYPV | 0.603 | 73 | WB | Large T | A0204 |
| 577 | LLLLIWFRPV | 0.591 | 83 | WB | Large T | A0204 |
| 361 | MLTERFNHIL | 0.573 | 101 | WB | Large T | A0204 |
| 497 | SLRDYLDGSV | 0.565 | 110 | WB | Large T | A0204 |
| 336 | SICQQAVDTV | 0.557 | 120 | WB | Large T | A0204 |
| 3 | VLNREESMEL | 0.557 | 120 | WB | Large T | A0204 |
| 291 | GMYLEFQYNV | 0.549 | 132 | WB | Large T | A0204 |
| 405 | VIFDFLHCVV | 0.533 | 155 | WB | Large T | A0204 |
| 375 | LIFGAHGNAV | 0.515 | 190 | WB | Large T | A0204 |
| 537 | TLQARFVRQI | 0.496 | 234 | WB | Large T | A0204 |
| 236 | ALTRDPYHII | 0.494 | 238 | WB | Large T | A0204 |
| 401 | KMDSVIFDFL | 0.484 | 266 | WB | Large T | A0204 |
| 528 | TMNEYPVPKT | 0.473 | 300 | WB | Large T | A0204 |
| 345 | VLAKKRVDTL | 0.461 | 339 | WB | Large T | A0204 |
| 175 | KLMEKYSVTF | 0.451 | 380 | WB | Large T | A0204 |
| 569 | ILQSGMTLLL | 0.446 | 401 | WB | Large T | A0204 |
| 176 | LMEKYSVTFI | 0.437 | 440 | WB | Large T | A0204 |
| 463 | GVAIDQYMVV | 0.434 | 454 | WB | Large T | A0204 |
| 518 | RTQIFPPGLV | 0.431 | 473 | WB | Large T | A0204 |
| 383 | AVLEQYMAGV | 0.832 | 6 | SB | Large T | A0206 |
| 404 | SVIFDFLHCV | 0.773 | 11 | SB | Large T | A0206 |
| 401 | KMDSVIFDFL | 0.762 | 13 | SB | Large T | A0206 |
| 577 | LLLLIWFRPV | 0.744 | 15 | SB | Large T | A0206 |
| 570 | LQSGMTLLLL | 0.714 | 22 | SB | Large T | A0206 |
| 525 | GLVTMNEYPV | 0.698 | 26 | SB | Large T | A0206 |
| 291 | GMYLEFQYNV | 0.682 | 31 | SB | Large T | A0206 |
| 405 | VIFDFLHCVV | 0.674 | 33 | SB | Large T | A0206 |
| 568 | RILQSGMTLL | 0.670 | 35 | SB | Large T | A0206 |
| 361 | MLTERFNHIL | 0.650 | 43 | SB | Large T | A0206 |
| 375 | LIFGAHGNAV | 0.644 | 47 | SB | Large T | A0206 |
| 287 | FLLLGMYLEF | 0.607 | 70 | WB | Large T | A0206 |
| 497 | SLRDYLDGSV | 0.596 | 79 | WB | Large T | A0206 |
| 267 | KQVSWKLITE | 0.564 | 112 | WB | Large T | A0206 |
| 175 | KLMEKYSVTF | 0.553 | 125 | WB | Large T | A0206 |
| 148 | SQAVFSNRTL | 0.535 | 153 | WB | Large T | A0206 |
| 20 | RAAWGNLPLM | 0.518 | 184 | WB | Large T | A0206 |
| 388 | YMAGVAWLHC | 0.510 | 201 | WB | Large T | A0206 |
| 213 | CQKLCTFSFL | 0.505 | 212 | WB | Large T | A0206 |
| 272 | KLITEYAVET | 0.494 | 237 | WB | Large T | A0206 |
| 578 | LLLIWFRPVA | 0.494 | 238 | WB | Large T | A0206 |
| 336 | SICQQAVDTV | 0.493 | 242 | WB | Large T | A0206 |
| 501 | YLDGSVKVNL | 0.487 | 257 | WB | Large T | A0206 |
| 569 | ILQSGMTLLL | 0.483 | 269 | WB | Large T | A0206 |
| 520 | QIFPPGLVTM | 0.482 | 272 | WB | Large T | A0206 |
| 338 | CQQAVDTVLA | 0.481 | 275 | WB | Large T | A0206 |
| 277 | YAVETKCEDV | 0.480 | 278 | WB | Large T | A0206 |
| 155 | RTLACFAVYT | 0.469 | 312 | WB | Large T | A0206 |
| 563 | FLLEKRILQS | 0.454 | 368 | WB | Large T | A0206 |
| 603 | RLDSEISMYT | 0.445 | 405 | WB | Large T | A0206 |
| 397 | CLLPKMDSVI | 0.441 | 422 | WB | Large T | A0206 |
| 457 | RLTFELGVAI | 0.437 | 440 | WB | Large T | A0206 |
| 207 | SAINNFCQKL | 0.433 | 463 | WB | Large T | A0206 |
| 463 | GVAIDQYMVV | 0.429 | 481 | WB | Large T | A0206 |
| 501 | YLDGSVKVNL | 0.958 | 1 | SB | Large T | A0211 |
| 405 | VIFDFLHCVV | 0.936 | 2 | SB | Large T | A0211 |
| 525 | GLVTMNEYPV | 0.915 | 2 | SB | Large T | A0211 |
| 291 | GMYLEFQYNV | 0.909 | 2 | SB | Large T | A0211 |
| 569 | ILQSGMTLLL | 0.902 | 2 | SB | Large T | A0211 |
| 142 | DLHQFLSQAV | 0.898 | 3 | SB | Large T | A0211 |
| 497 | SLRDYLDGSV | 0.895 | 3 | SB | Large T | A0211 |
| 401 | KMDSVIFDFL | 0.890 | 3 | SB | Large T | A0211 |
| 577 | LLLLIWFRPV | 0.888 | 3 | SB | Large T | A0211 |
| 56 | TLYKKMEQDV | 0.875 | 3 | SB | Large T | A0211 |
| 361 | MLTERFNHIL | 0.874 | 3 | SB | Large T | A0211 |
| 383 | AVLEQYMAGV | 0.866 | 4 | SB | Large T | A0211 |
| 442 | DLCGGKALNV | 0.854 | 4 | SB | Large T | A0211 |
| 375 | LIFGAHGNAV | 0.829 | 6 | SB | Large T | A0211 |
| 3 | VLNREESMEL | 0.824 | 6 | SB | Large T | A0211 |
| 288 | LLLGMYLEFQ | 0.816 | 7 | SB | Large T | A0211 |
| 603 | RLDSEISMYT | 0.797 | 9 | SB | Large T | A0211 |
| 404 | SVIFDFLHCV | 0.791 | 9 | SB | Large T | A0211 |
| 236 | ALTRDPYHII | 0.782 | 10 | SB | Large T | A0211 |
| 388 | YMAGVAWLHC | 0.782 | 10 | SB | Large T | A0211 |
| 12 | LMDLLGLERA | 0.757 | 13 | SB | Large T | A0211 |
| 287 | FLLLGMYLEF | 0.747 | 15 | SB | Large T | A0211 |
| 463 | GVAIDQYMVV | 0.742 | 16 | SB | Large T | A0211 |
| 336 | SICQQAVDTV | 0.736 | 17 | SB | Large T | A0211 |
| 345 | VLAKKRVDTL | 0.725 | 19 | SB | Large T | A0211 |
| 353 | TLHMTREEML | 0.722 | 20 | SB | Large T | A0211 |
| 568 | RILQSGMTLL | 0.720 | 20 | SB | Large T | A0211 |
| 440 | LLDLCGGKAL | 0.713 | 22 | SB | Large T | A0211 |
| 578 | LLLIWFRPVA | 0.712 | 22 | SB | Large T | A0211 |
| 563 | FLLEKRILQS | 0.708 | 23 | SB | Large T | A0211 |
| 9 | SMELMDLLGL | 0.706 | 24 | SB | Large T | A0211 |
| 439 | GLLDLCGGKA | 0.690 | 28 | SB | Large T | A0211 |
| 520 | QIFPPGLVTM | 0.684 | 30 | SB | Large T | A0211 |
| 25 | NLPLMRKAYL | 0.682 | 31 | SB | Large T | A0211 |
| 457 | RLTFELGVAI | 0.675 | 33 | SB | Large T | A0211 |
| 156 | TLACFAVYTT | 0.669 | 35 | SB | Large T | A0211 |
| 435 | TLAAGLLDLC | 0.649 | 44 | SB | Large T | A0211 |
| 397 | CLLPKMDSVI | 0.648 | 44 | SB | Large T | A0211 |
| 197 | FFLTPHRHRV | 0.635 | 51 | WB | Large T | A0211 |
| 537 | TLQARFVRQI | 0.630 | 55 | WB | Large T | A0211 |
| 609 | SMYTFSRMKY | 0.624 | 58 | WB | Large T | A0211 |
| 176 | LMEKYSVTFI | 0.612 | 66 | WB | Large T | A0211 |
| 175 | KLMEKYSVTF | 0.575 | 98 | WB | Large T | A0211 |
| 103 | DLFCHEDMFA | 0.573 | 101 | WB | Large T | A0211 |
| 289 | LLGMYLEFQY | 0.539 | 146 | WB | Large T | A0211 |
| 428 | PIDSGKTTLA | 0.534 | 155 | WB | Large T | A0211 |
| 272 | KLITEYAVET | 0.531 | 160 | WB | Large T | A0211 |
| 545 | QIDFRPKIYL | 0.527 | 166 | WB | Large T | A0211 |
| 575 | TLLLLLIWFR | 0.518 | 183 | WB | Large T | A0211 |
| 198 | FLTPHRHRVS | 0.517 | 185 | WB | Large T | A0211 |
| 528 | TMNEYPVPKT | 0.509 | 203 | WB | Large T | A0211 |
| 17 | GLERAAWGNL | 0.502 | 219 | WB | Large T | A0211 |
| 384 | VLEQYMAGVA | 0.492 | 244 | WB | Large T | A0211 |
| 277 | YAVETKCEDV | 0.480 | 278 | WB | Large T | A0211 |
| 124 | STPPKKKRKV | 0.477 | 287 | WB | Large T | A0211 |
| 360 | EMLTERFNHI | 0.458 | 351 | WB | Large T | A0211 |
| 171 | ILYKKLMEKY | 0.456 | 358 | WB | Large T | A0211 |
| 369 | ILDKMDLIFG | 0.442 | 418 | WB | Large T | A0211 |
| 215 | KLCTFSFLIC | 0.432 | 464 | WB | Large T | A0211 |
| 461 | ELGVAIDQYM | 0.429 | 479 | WB | Large T | A0211 |
| 501 | YLDGSVKVNL | 0.900 | 2 | SB | Large T | A0212 |
| 405 | VIFDFLHCVV | 0.897 | 3 | SB | Large T | A0212 |
| 56 | TLYKKMEQDV | 0.893 | 3 | SB | Large T | A0212 |
| 291 | GMYLEFQYNV | 0.886 | 3 | SB | Large T | A0212 |
| 497 | SLRDYLDGSV | 0.867 | 4 | SB | Large T | A0212 |
| 383 | AVLEQYMAGV | 0.855 | 4 | SB | Large T | A0212 |
| 525 | GLVTMNEYPV | 0.825 | 6 | SB | Large T | A0212 |
| 361 | MLTERFNHIL | 0.824 | 6 | SB | Large T | A0212 |
| 375 | LIFGAHGNAV | 0.806 | 8 | SB | Large T | A0212 |
| 142 | DLHQFLSQAV | 0.795 | 9 | SB | Large T | A0212 |
| 3 | VLNREESMEL | 0.788 | 9 | SB | Large T | A0212 |
| 401 | KMDSVIFDFL | 0.784 | 10 | SB | Large T | A0212 |
| 569 | ILQSGMTLLL | 0.783 | 10 | SB | Large T | A0212 |
| 577 | LLLLIWFRPV | 0.783 | 10 | SB | Large T | A0212 |
| 388 | YMAGVAWLHC | 0.765 | 12 | SB | Large T | A0212 |
| 345 | VLAKKRVDTL | 0.754 | 14 | SB | Large T | A0212 |
| 288 | LLLGMYLEFQ | 0.715 | 21 | SB | Large T | A0212 |
| 287 | FLLLGMYLEF | 0.683 | 30 | SB | Large T | A0212 |
| 563 | FLLEKRILQS | 0.666 | 37 | SB | Large T | A0212 |
| 442 | DLCGGKALNV | 0.657 | 40 | SB | Large T | A0212 |
| 397 | CLLPKMDSVI | 0.632 | 53 | WB | Large T | A0212 |
| 12 | LMDLLGLERA | 0.604 | 72 | WB | Large T | A0212 |
| 404 | SVIFDFLHCV | 0.604 | 72 | WB | Large T | A0212 |
| 9 | SMELMDLLGL | 0.579 | 95 | WB | Large T | A0212 |
| 603 | RLDSEISMYT | 0.573 | 101 | WB | Large T | A0212 |
| 236 | ALTRDPYHII | 0.570 | 104 | WB | Large T | A0212 |
| 277 | YAVETKCEDV | 0.569 | 106 | WB | Large T | A0212 |
| 578 | LLLIWFRPVA | 0.558 | 119 | WB | Large T | A0212 |
| 353 | TLHMTREEML | 0.552 | 126 | WB | Large T | A0212 |
| 197 | FFLTPHRHRV | 0.549 | 131 | WB | Large T | A0212 |
| 520 | QIFPPGLVTM | 0.543 | 139 | WB | Large T | A0212 |
| 176 | LMEKYSVTFI | 0.536 | 150 | WB | Large T | A0212 |
| 175 | KLMEKYSVTF | 0.528 | 165 | WB | Large T | A0212 |
| 463 | GVAIDQYMVV | 0.500 | 222 | WB | Large T | A0212 |
| 336 | SICQQAVDTV | 0.495 | 235 | WB | Large T | A0212 |
| 457 | RLTFELGVAI | 0.489 | 252 | WB | Large T | A0212 |
| 198 | FLTPHRHRVS | 0.484 | 266 | WB | Large T | A0212 |
| 609 | SMYTFSRMKY | 0.480 | 276 | WB | Large T | A0212 |
| 171 | ILYKKLMEKY | 0.477 | 285 | WB | Large T | A0212 |
| 25 | NLPLMRKAYL | 0.477 | 287 | WB | Large T | A0212 |
| 439 | GLLDLCGGKA | 0.476 | 288 | WB | Large T | A0212 |
| 611 | YTFSRMKYNI | 0.472 | 304 | WB | Large T | A0212 |
| 435 | TLAAGLLDLC | 0.461 | 342 | WB | Large T | A0212 |
| 440 | LLDLCGGKAL | 0.459 | 349 | WB | Large T | A0212 |
| 568 | RILQSGMTLL | 0.458 | 352 | WB | Large T | A0212 |
| 360 | EMLTERFNHI | 0.457 | 354 | WB | Large T | A0212 |
| 537 | TLQARFVRQI | 0.452 | 375 | WB | Large T | A0212 |
| 17 | GLERAAWGNL | 0.430 | 474 | WB | Large T | A0212 |
| 528 | TMNEYPVPKT | 0.428 | 488 | WB | Large T | A0212 |
| 525 | GLVTMNEYPV | 0.882 | 3 | SB | Large T | A0216 |
| 405 | VIFDFLHCVV | 0.863 | 4 | SB | Large T | A0216 |
| 497 | SLRDYLDGSV | 0.861 | 4 | SB | Large T | A0216 |
| 56 | TLYKKMEQDV | 0.842 | 5 | SB | Large T | A0216 |
| 291 | GMYLEFQYNV | 0.841 | 5 | SB | Large T | A0216 |
| 569 | ILQSGMTLLL | 0.838 | 5 | SB | Large T | A0216 |
| 501 | YLDGSVKVNL | 0.833 | 6 | SB | Large T | A0216 |
| 361 | MLTERFNHIL | 0.812 | 7 | SB | Large T | A0216 |
| 142 | DLHQFLSQAV | 0.809 | 7 | SB | Large T | A0216 |
| 401 | KMDSVIFDFL | 0.806 | 8 | SB | Large T | A0216 |
| 442 | DLCGGKALNV | 0.802 | 8 | SB | Large T | A0216 |
| 375 | LIFGAHGNAV | 0.773 | 11 | SB | Large T | A0216 |
| 3 | VLNREESMEL | 0.768 | 12 | SB | Large T | A0216 |
| 345 | VLAKKRVDTL | 0.765 | 12 | SB | Large T | A0216 |
| 577 | LLLLIWFRPV | 0.743 | 16 | SB | Large T | A0216 |
| 383 | AVLEQYMAGV | 0.739 | 16 | SB | Large T | A0216 |
| 336 | SICQQAVDTV | 0.721 | 20 | SB | Large T | A0216 |
| 25 | NLPLMRKAYL | 0.703 | 24 | SB | Large T | A0216 |
| 288 | LLLGMYLEFQ | 0.679 | 32 | SB | Large T | A0216 |
| 176 | LMEKYSVTFI | 0.675 | 33 | SB | Large T | A0216 |
| 236 | ALTRDPYHII | 0.671 | 35 | SB | Large T | A0216 |
| 353 | TLHMTREEML | 0.668 | 36 | SB | Large T | A0216 |
| 404 | SVIFDFLHCV | 0.647 | 45 | SB | Large T | A0216 |
| 603 | RLDSEISMYT | 0.630 | 54 | WB | Large T | A0216 |
| 197 | FFLTPHRHRV | 0.615 | 64 | WB | Large T | A0216 |
| 388 | YMAGVAWLHC | 0.602 | 73 | WB | Large T | A0216 |
| 568 | RILQSGMTLL | 0.598 | 77 | WB | Large T | A0216 |
| 156 | TLACFAVYTT | 0.567 | 108 | WB | Large T | A0216 |
| 397 | CLLPKMDSVI | 0.562 | 114 | WB | Large T | A0216 |
| 461 | ELGVAIDQYM | 0.550 | 130 | WB | Large T | A0216 |
| 17 | GLERAAWGNL | 0.545 | 137 | WB | Large T | A0216 |
| 103 | DLFCHEDMFA | 0.537 | 149 | WB | Large T | A0216 |
| 463 | GVAIDQYMVV | 0.534 | 155 | WB | Large T | A0216 |
| 537 | TLQARFVRQI | 0.528 | 165 | WB | Large T | A0216 |
| 563 | FLLEKRILQS | 0.511 | 198 | WB | Large T | A0216 |
| 545 | QIDFRPKIYL | 0.493 | 240 | WB | Large T | A0216 |
| 12 | LMDLLGLERA | 0.484 | 265 | WB | Large T | A0216 |
| 287 | FLLLGMYLEF | 0.483 | 270 | WB | Large T | A0216 |
| 289 | LLGMYLEFQY | 0.482 | 270 | WB | Large T | A0216 |
| 439 | GLLDLCGGKA | 0.477 | 287 | WB | Large T | A0216 |
| 9 | SMELMDLLGL | 0.468 | 316 | WB | Large T | A0216 |
| 673 | HLCKGFQCFK | 0.468 | 317 | WB | Large T | A0216 |
| 520 | QIFPPGLVTM | 0.463 | 334 | WB | Large T | A0216 |
| 190 | CAGHNIIFFL | 0.447 | 397 | WB | Large T | A0216 |
| 440 | LLDLCGGKAL | 0.445 | 406 | WB | Large T | A0216 |
| 124 | STPPKKKRKV | 0.438 | 439 | WB | Large T | A0216 |
| 578 | LLLIWFRPVA | 0.428 | 485 | WB | Large T | A0216 |
| 501 | YLDGSVKVNL | 0.885 | 3 | SB | Large T | A0219 |
| 569 | ILQSGMTLLL | 0.833 | 6 | SB | Large T | A0219 |
| 401 | KMDSVIFDFL | 0.761 | 13 | SB | Large T | A0219 |
| 361 | MLTERFNHIL | 0.747 | 15 | SB | Large T | A0219 |
| 405 | VIFDFLHCVV | 0.704 | 24 | SB | Large T | A0219 |
| 291 | GMYLEFQYNV | 0.679 | 32 | SB | Large T | A0219 |
| 142 | DLHQFLSQAV | 0.676 | 33 | SB | Large T | A0219 |
| 577 | LLLLIWFRPV | 0.646 | 45 | SB | Large T | A0219 |
| 525 | GLVTMNEYPV | 0.631 | 54 | WB | Large T | A0219 |
| 497 | SLRDYLDGSV | 0.622 | 59 | WB | Large T | A0219 |
| 388 | YMAGVAWLHC | 0.582 | 91 | WB | Large T | A0219 |
| 3 | VLNREESMEL | 0.573 | 101 | WB | Large T | A0219 |
| 288 | LLLGMYLEFQ | 0.572 | 102 | WB | Large T | A0219 |
| 56 | TLYKKMEQDV | 0.570 | 104 | WB | Large T | A0219 |
| 375 | LIFGAHGNAV | 0.565 | 110 | WB | Large T | A0219 |
| 442 | DLCGGKALNV | 0.557 | 120 | WB | Large T | A0219 |
| 383 | AVLEQYMAGV | 0.556 | 122 | WB | Large T | A0219 |
| 236 | ALTRDPYHII | 0.545 | 137 | WB | Large T | A0219 |
| 345 | VLAKKRVDTL | 0.515 | 189 | WB | Large T | A0219 |
| 603 | RLDSEISMYT | 0.498 | 227 | WB | Large T | A0219 |
| 12 | LMDLLGLERA | 0.486 | 260 | WB | Large T | A0219 |
| 397 | CLLPKMDSVI | 0.475 | 293 | WB | Large T | A0219 |
| 404 | SVIFDFLHCV | 0.474 | 294 | WB | Large T | A0219 |
| 435 | TLAAGLLDLC | 0.459 | 347 | WB | Large T | A0219 |
| 197 | FFLTPHRHRV | 0.449 | 389 | WB | Large T | A0219 |
| 353 | TLHMTREEML | 0.433 | 463 | WB | Large T | A0219 |
| 537 | TLQARFVRQI | 0.427 | 492 | WB | Large T | A0219 |
| 170 | QILYKKLMEK | 0.764 | 12 | SB | Large T | A0301 |
| 50 | KMKRMNTLYK | 0.754 | 14 | SB | Large T | A0301 |
| 615 | RMKYNICMGK | 0.751 | 14 | SB | Large T | A0301 |
| 608 | ISMYTFSRMK | 0.734 | 17 | SB | Large T | A0301 |
| 609 | SMYTFSRMKY | 0.707 | 23 | SB | Large T | A0301 |
| 527 | VTMNEYPVPK | 0.691 | 28 | SB | Large T | A0301 |
| 673 | HLCKGFQCFK | 0.668 | 36 | SB | Large T | A0301 |
| 27 | PLMRKAYLKK | 0.663 | 38 | SB | Large T | A0301 |
| 157 | LACFAVYTTK | 0.654 | 42 | SB | Large T | A0301 |
| 392 | VAWLHCLLPK | 0.582 | 92 | WB | Large T | A0301 |
| 575 | TLLLLLIWFR | 0.574 | 100 | WB | Large T | A0301 |
| 220 | SFLICKGVNK | 0.554 | 124 | WB | Large T | A0301 |
| 22 | AWGNLPLMRK | 0.533 | 156 | WB | Large T | A0301 |
| 326 | IIFAESKNQK | 0.519 | 181 | WB | Large T | A0301 |
| 26 | LPLMRKAYLK | 0.500 | 222 | WB | Large T | A0301 |
| 558 | LQNSEFLLEK | 0.484 | 265 | WB | Large T | A0301 |
| 311 | QPYHFKYHEK | 0.465 | 326 | WB | Large T | A0301 |
| 417 | VPKRRYWLFK | 0.462 | 338 | WB | Large T | A0301 |
| 206 | VSAINNFCQK | 0.448 | 391 | WB | Large T | A0301 |
| 448 | ALNVNLPMER | 0.447 | 396 | WB | Large T | A0301 |
| 273 | LITEYAVETK | 0.446 | 399 | WB | Large T | A0301 |
| 171 | ILYKKLMEKY | 0.433 | 462 | WB | Large T | A0301 |
| 527 | VTMNEYPVPK | 0.811 | 7 | SB | Large T | A1101 |
| 608 | ISMYTFSRMK | 0.760 | 13 | SB | Large T | A1101 |
| 392 | VAWLHCLLPK | 0.708 | 23 | SB | Large T | A1101 |
| 558 | LQNSEFLLEK | 0.705 | 24 | SB | Large T | A1101 |
| 50 | KMKRMNTLYK | 0.700 | 25 | SB | Large T | A1101 |
| 326 | IIFAESKNQK | 0.695 | 27 | SB | Large T | A1101 |
| 206 | VSAINNFCQK | 0.692 | 28 | SB | Large T | A1101 |
| 609 | SMYTFSRMKY | 0.665 | 37 | SB | Large T | A1101 |
| 575 | TLLLLLIWFR | 0.648 | 45 | SB | Large T | A1101 |
| 170 | QILYKKLMEK | 0.643 | 47 | SB | Large T | A1101 |
| 157 | LACFAVYTTK | 0.635 | 51 | WB | Large T | A1101 |
| 673 | HLCKGFQCFK | 0.622 | 59 | WB | Large T | A1101 |
| 90 | ESWWSSFNEK | 0.565 | 110 | WB | Large T | A1101 |
| 615 | RMKYNICMGK | 0.556 | 121 | WB | Large T | A1101 |
| 121 | SQHSTPPKKK | 0.552 | 127 | WB | Large T | A1101 |
| 504 | GSVKVNLEKK | 0.541 | 143 | WB | Large T | A1101 |
| 339 | QQAVDTVLAK | 0.540 | 145 | WB | Large T | A1101 |
| 340 | QAVDTVLAKK | 0.534 | 154 | WB | Large T | A1101 |
| 448 | ALNVNLPMER | 0.528 | 165 | WB | Large T | A1101 |
| 194 | NIIFFLTPHR | 0.516 | 188 | WB | Large T | A1101 |
| 27 | PLMRKAYLKK | 0.478 | 284 | WB | Large T | A1101 |
| 21 | AAWGNLPLMR | 0.475 | 293 | WB | Large T | A1101 |
| 273 | LITEYAVETK | 0.470 | 310 | WB | Large T | A1101 |
| 120 | DSQHSTPPKK | 0.450 | 383 | WB | Large T | A1101 |
| 22 | AWGNLPLMRK | 0.449 | 387 | WB | Large T | A1101 |
| 220 | SFLICKGVNK | 0.445 | 404 | WB | Large T | A1101 |
| 468 | QYMVVFEDVK | 0.626 | 57 | WB | Large T | A2301 |
| 151 | VFSNRTLACF | 0.608 | 69 | WB | Large T | A2301 |
| 287 | FLLLGMYLEF | 0.575 | 99 | WB | Large T | A2301 |
| 582 | WFRPVADFSK | 0.548 | 133 | WB | Large T | A2301 |
| 57 | LYKKMEQDVK | 0.531 | 160 | WB | Large T | A2301 |
| 574 | MTLLLLLIWF | 0.524 | 171 | WB | Large T | A2301 |
| 83 | TYGTEEWESW | 0.500 | 224 | WB | Large T | A2301 |
| 406 | IFDFLHCVVF | 0.486 | 260 | WB | Large T | A2301 |
| 416 | NVPKRRYWLF | 0.477 | 288 | WB | Large T | A2301 |
| 220 | SFLICKGVNK | 0.469 | 311 | WB | Large T | A2301 |
| 159 | CFAVYTTKEK | 0.465 | 326 | WB | Large T | A2301 |
| 203 | RHRVSAINNF | 0.458 | 351 | WB | Large T | A2301 |
| 295 | EFQYNVEECK | 0.447 | 396 | WB | Large T | A2301 |
| 175 | KLMEKYSVTF | 0.446 | 401 | WB | Large T | A2301 |
| 91 | SWWSSFNEKW | 0.436 | 447 | WB | Large T | A2301 |
| 464 | VAIDQYMVVF | 0.430 | 478 | WB | Large T | A2301 |
| 212 | FCQKLCTFSF | 0.426 | 499 | WB | Large T | A2301 |
| 151 | VFSNRTLACF | 0.606 | 71 | WB | Large T | A2402 |
| 162 | VYTTKEKAQI | 0.518 | 183 | WB | Large T | A2402 |
| 617 | KYNICMGKCI | 0.510 | 200 | WB | Large T | A2402 |
| 416 | NVPKRRYWLF | 0.506 | 209 | WB | Large T | A2402 |
| 406 | IFDFLHCVVF | 0.483 | 269 | WB | Large T | A2402 |
| 83 | TYGTEEWESW | 0.472 | 301 | WB | Large T | A2402 |
| 138 | DFPSDLHQFL | 0.430 | 477 | WB | Large T | A2402 |
| 83 | TYGTEEWESW | 0.622 | 59 | WB | Large T | A2403 |
| 513 | KHLNKRTQIF | 0.548 | 132 | WB | Large T | A2403 |
| 287 | FLLLGMYLEF | 0.533 | 155 | WB | Large T | A2403 |
| 212 | FCQKLCTFSF | 0.510 | 201 | WB | Large T | A2403 |
| 162 | VYTTKEKAQI | 0.492 | 243 | WB | Large T | A2403 |
| 175 | KLMEKYSVTF | 0.491 | 245 | WB | Large T | A2403 |
| 151 | VFSNRTLACF | 0.479 | 280 | WB | Large T | A2403 |
| 313 | YHFKYHEKHF | 0.456 | 358 | WB | Large T | A2403 |
| 406 | IFDFLHCVVF | 0.453 | 370 | WB | Large T | A2403 |
| 416 | NVPKRRYWLF | 0.449 | 389 | WB | Large T | A2403 |
| 203 | RHRVSAINNF | 0.444 | 408 | WB | Large T | A2403 |
| 574 | MTLLLLLIWF | 0.429 | 480 | WB | Large T | A2403 |
| 164 | TTKEKAQILY | 0.552 | 127 | WB | Large T | A2601 |
| 607 | EISMYTFSRM | 0.466 | 322 | WB | Large T | A2601 |
| 607 | EISMYTFSRM | 0.857 | 4 | SB | Large T | A2602 |
| 520 | QIFPPGLVTM | 0.811 | 7 | SB | Large T | A2602 |
| 268 | QVSWKLITEY | 0.726 | 19 | SB | Large T | A2602 |
| 164 | TTKEKAQILY | 0.721 | 20 | SB | Large T | A2602 |
| 416 | NVPKRRYWLF | 0.714 | 22 | SB | Large T | A2602 |
| 533 | PVPKTLQARF | 0.685 | 30 | SB | Large T | A2602 |
| 64 | DVKVAHQPDF | 0.665 | 37 | SB | Large T | A2602 |
| 280 | ETKCEDVFLL | 0.646 | 46 | SB | Large T | A2602 |
| 285 | DVFLLLGMYL | 0.612 | 66 | WB | Large T | A2602 |
| 368 | HILDKMDLIF | 0.589 | 85 | WB | Large T | A2602 |
| 80 | EVPTYGTEEW | 0.587 | 86 | WB | Large T | A2602 |
| 184 | FISRHMCAGH | 0.532 | 158 | WB | Large T | A2602 |
| 163 | YTTKEKAQIL | 0.514 | 192 | WB | Large T | A2602 |
| 284 | EDVFLLLGMY | 0.470 | 308 | WB | Large T | A2602 |
| 138 | DFPSDLHQFL | 0.465 | 326 | WB | Large T | A2602 |
| 611 | YTFSRMKYNI | 0.465 | 327 | WB | Large T | A2602 |
| 574 | MTLLLLLIWF | 0.463 | 333 | WB | Large T | A2602 |
| 464 | VAIDQYMVVF | 0.457 | 354 | WB | Large T | A2602 |
| 404 | SVIFDFLHCV | 0.451 | 380 | WB | Large T | A2602 |
| 609 | SMYTFSRMKY | 0.700 | 25 | SB | Large T | A2902 |
| 413 | VVFNVPKRRY | 0.524 | 172 | WB | Large T | A2902 |
| 171 | ILYKKLMEKY | 0.501 | 221 | WB | Large T | A2902 |
| 289 | LLGMYLEFQY | 0.496 | 232 | WB | Large T | A2902 |
| 75 | TWNSSEVPTY | 0.466 | 321 | WB | Large T | A2902 |
| 268 | QVSWKLITEY | 0.455 | 364 | WB | Large T | A2902 |
| 50 | KMKRMNTLYK | 0.848 | 5 | SB | Large T | A3001 |
| 676 | KGFQCFKRPK | 0.733 | 17 | SB | Large T | A3001 |
| 681 | FKRPKTPPPK | 0.723 | 20 | SB | Large T | A3001 |
| 51 | MKRMNTLYKK | 0.685 | 30 | SB | Large T | A3001 |
| 615 | RMKYNICMGK | 0.677 | 33 | SB | Large T | A3001 |
| 527 | VTMNEYPVPK | 0.661 | 39 | SB | Large T | A3001 |
| 417 | VPKRRYWLFK | 0.637 | 50 | WB | Large T | A3001 |
| 121 | SQHSTPPKKK | 0.623 | 59 | WB | Large T | A3001 |
| 582 | WFRPVADFSK | 0.622 | 59 | WB | Large T | A3001 |
| 542 | FVRQIDFRPK | 0.556 | 121 | WB | Large T | A3001 |
| 608 | ISMYTFSRMK | 0.552 | 126 | WB | Large T | A3001 |
| 128 | KKKRKVEDPK | 0.548 | 132 | WB | Large T | A3001 |
| 547 | DFRPKIYLRK | 0.507 | 207 | WB | Large T | A3001 |
| 307 | QKKDQPYHFK | 0.501 | 220 | WB | Large T | A3001 |
| 27 | PLMRKAYLKK | 0.500 | 224 | WB | Large T | A3001 |
| 356 | MTREEMLTER | 0.494 | 238 | WB | Large T | A3001 |
| 29 | MRKAYLKKCK | 0.488 | 255 | WB | Large T | A3001 |
| 119 | ADSQHSTPPK | 0.460 | 344 | WB | Large T | A3001 |
| 363 | TERFNHILDK | 0.445 | 405 | WB | Large T | A3001 |
| 166 | KEKAQILYKK | 0.442 | 418 | WB | Large T | A3001 |
| 164 | TTKEKAQILY | 0.439 | 432 | WB | Large T | A3001 |
| 120 | DSQHSTPPKK | 0.428 | 485 | WB | Large T | A3001 |
| 233 | LYSALTRDPY | 0.534 | 155 | WB | Large T | A3002 |
| 609 | SMYTFSRMKY | 0.528 | 165 | WB | Large T | A3002 |
| 268 | QVSWKLITEY | 0.485 | 262 | WB | Large T | A3002 |
| 75 | TWNSSEVPTY | 0.446 | 400 | WB | Large T | A3002 |
| 575 | TLLLLLIWFR | 0.750 | 14 | SB | Large T | A3101 |
| 230 | EYLLYSALTR | 0.642 | 48 | SB | Large T | A3101 |
| 50 | KMKRMNTLYK | 0.640 | 49 | SB | Large T | A3101 |
| 674 | LCKGFQCFKR | 0.638 | 50 | WB | Large T | A3101 |
| 609 | SMYTFSRMKY | 0.623 | 58 | WB | Large T | A3101 |
| 615 | RMKYNICMGK | 0.604 | 72 | WB | Large T | A3101 |
| 194 | NIIFFLTPHR | 0.586 | 88 | WB | Large T | A3101 |
| 448 | ALNVNLPMER | 0.583 | 90 | WB | Large T | A3101 |
| 673 | HLCKGFQCFK | 0.573 | 101 | WB | Large T | A3101 |
| 146 | FLSQAVFSNR | 0.570 | 104 | WB | Large T | A3101 |
| 412 | CVVFNVPKRR | 0.565 | 110 | WB | Large T | A3101 |
| 196 | IFFLTPHRHR | 0.550 | 130 | WB | Large T | A3101 |
| 356 | MTREEMLTER | 0.548 | 132 | WB | Large T | A3101 |
| 349 | KRVDTLHMTR | 0.530 | 161 | WB | Large T | A3101 |
| 220 | SFLICKGVNK | 0.524 | 172 | WB | Large T | A3101 |
| 51 | MKRMNTLYKK | 0.468 | 316 | WB | Large T | A3101 |
| 157 | LACFAVYTTK | 0.456 | 358 | WB | Large T | A3101 |
| 535 | PKTLQARFVR | 0.445 | 403 | WB | Large T | A3101 |
| 606 | SEISMYTFSR | 0.445 | 404 | WB | Large T | A3101 |
| 594 | QSRIVEWKER | 0.442 | 417 | WB | Large T | A3101 |
| 205 | RVSAINNFCQ | 0.434 | 458 | WB | Large T | A3101 |
| 230 | EYLLYSALTR | 0.653 | 42 | SB | Large T | A3301 |
| 575 | TLLLLLIWFR | 0.600 | 76 | WB | Large T | A3301 |
| 674 | LCKGFQCFKR | 0.537 | 150 | WB | Large T | A3301 |
| 196 | IFFLTPHRHR | 0.529 | 162 | WB | Large T | A3301 |
| 194 | NIIFFLTPHR | 0.529 | 163 | WB | Large T | A3301 |
| 11 | ELMDLLGLER | 0.512 | 196 | WB | Large T | A3301 |
| 146 | FLSQAVFSNR | 0.482 | 271 | WB | Large T | A3301 |
| 178 | EKYSVTFISR | 0.464 | 330 | WB | Large T | A3301 |
| 547 | DFRPKIYLRK | 0.429 | 482 | WB | Large T | A3301 |
| | | | | | Large T | A3301 |
| 194 | NIIFFLTPHR | 0.866 | 4 | SB | Large T | A6801 |
| 412 | CVVFNVPKRR | 0.785 | 10 | SB | Large T | A6801 |
| 356 | MTREEMLTER | 0.784 | 10 | SB | Large T | A6801 |
| 90 | ESWWSSFNEK | 0.756 | 13 | SB | Large T | A6801 |
| 146 | FLSQAVFSNR | 0.739 | 16 | SB | Large T | A6801 |
| 11 | ELMDLLGLER | 0.720 | 20 | SB | Large T | A6801 |
| 178 | EKYSVTFISR | 0.713 | 22 | SB | Large T | A6801 |
| 157 | LACFAVYTTK | 0.693 | 27 | SB | Large T | A6801 |
| 608 | ISMYTFSRMK | 0.660 | 39 | SB | Large T | A6801 |
| 673 | HLCKGFQCFK | 0.645 | 46 | SB | Large T | A6801 |
| 230 | EYLLYSALTR | 0.644 | 47 | SB | Large T | A6801 |
| 575 | TLLLLLIWFR | 0.643 | 47 | SB | Large T | A6801 |
| 326 | IIFAESKNQK | 0.639 | 49 | SB | Large T | A6801 |
| 273 | LITEYAVETK | 0.632 | 53 | WB | Large T | A6801 |
| 206 | VSAINNFCQK | 0.629 | 55 | WB | Large T | A6801 |
| 340 | QAVDTVLAKK | 0.623 | 59 | WB | Large T | A6801 |
| 490 | HGINNLDSLR | 0.593 | 81 | WB | Large T | A6801 |
| 475 | DVKGTGAESK | 0.581 | 93 | WB | Large T | A6801 |
| 606 | SEISMYTFSR | 0.572 | 102 | WB | Large T | A6801 |
| 592 | DIQSRIVEWK | 0.563 | 113 | WB | Large T | A6801 |
| 311 | QPYHFKYHEK | 0.556 | 122 | WB | Large T | A6801 |
| 527 | VTMNEYPVPK | 0.541 | 143 | WB | Large T | A6801 |
| 295 | EFQYNVEECK | 0.539 | 146 | WB | Large T | A6801 |
| 299 | NVEECKKCQK | 0.534 | 155 | WB | Large T | A6801 |
| 159 | CFAVYTTKEK | 0.524 | 171 | WB | Large T | A6801 |
| 296 | FQYNVEECKK | 0.510 | 200 | WB | Large T | A6801 |
| 196 | IFFLTPHRHR | 0.505 | 212 | WB | Large T | A6801 |
| 622 | MGKCILDITR | 0.480 | 277 | WB | Large T | A6801 |
| 542 | FVRQIDFRPK | 0.478 | 282 | WB | Large T | A6801 |
| 411 | HCVVFNVPKR | 0.476 | 290 | WB | Large T | A6801 |
| 120 | DSQHSTPPKK | 0.461 | 341 | WB | Large T | A6801 |
| 546 | IDFRPKIYLR | 0.437 | 443 | WB | Large T | A6801 |
| 164 | TTKEKAQILY | 0.433 | 460 | WB | Large T | A6801 |
| 404 | SVIFDFLHCV | 0.762 | 13 | SB | Large T | A6802 |
| 611 | YTFSRMKYNI | 0.677 | 32 | SB | Large T | A6802 |
| 285 | DVFLLLGMYL | 0.632 | 53 | WB | Large T | A6802 |
| 322 | FANAIIFAES | 0.613 | 66 | WB | Large T | A6802 |
| 280 | ETKCEDVFLL | 0.609 | 69 | WB | Large T | A6802 |
| 462 | LGVAIDQYMV | 0.574 | 100 | WB | Large T | A6802 |
| 607 | EISMYTFSRM | 0.562 | 114 | WB | Large T | A6802 |
| 375 | LIFGAHGNAV | 0.557 | 120 | WB | Large T | A6802 |
| 405 | VIFDFLHCVV | 0.536 | 151 | WB | Large T | A6802 |
| 647 | ESQSQCSSQV | 0.517 | 185 | WB | Large T | A6802 |
| 190 | CAGHNIIFFL | 0.488 | 253 | WB | Large T | A6802 |
| 383 | AVLEQYMAGV | 0.479 | 281 | WB | Large T | A6802 |
| 77 | NSSEVPTYGT | 0.467 | 320 | WB | Large T | A6802 |
| 19 | ERAAWGNLPL | 0.452 | 375 | WB | Large T | A6802 |
| 108 | EDMFASDEEA | 0.451 | 379 | WB | Large T | A6802 |
| 265 | ETKQVSWKLI | 0.451 | 380 | WB | Large T | A6802 |
| 207 | SAINNFCQKL | 0.440 | 428 | WB | Large T | A6802 |
| 463 | GVAIDQYMVV | 0.433 | 459 | WB | Large T | A6802 |
| 156 | TLACFAVYTT | 0.432 | 465 | WB | Large T | A6802 |
| 383 | AVLEQYMAGV | 0.745 | 15 | SB | Large T | A6901 |
| 404 | SVIFDFLHCV | 0.639 | 49 | SB | Large T | A6901 |
| 611 | YTFSRMKYNI | 0.596 | 79 | WB | Large T | A6901 |
| 375 | LIFGAHGNAV | 0.575 | 99 | WB | Large T | A6901 |
| 405 | VIFDFLHCVV | 0.552 | 127 | WB | Large T | A6901 |
| 360 | EMLTERFNHI | 0.545 | 137 | WB | Large T | A6901 |
| 520 | QIFPPGLVTM | 0.541 | 143 | WB | Large T | A6901 |
| 453 | LPMERLTFEL | 0.477 | 287 | WB | Large T | A6901 |
| 434 | TTLAAGLLDL | 0.466 | 324 | WB | Large T | A6901 |
| 277 | YAVETKCEDV | 0.458 | 352 | WB | Large T | A6901 |
| 197 | FFLTPHRHRV | 0.452 | 374 | WB | Large T | A6901 |
| 577 | LLLLIWFRPV | 0.435 | 451 | WB | Large T | A6901 |
| 285 | DVFLLLGMYL | 0.431 | 470 | WB | Large T | A6901 |
| 549 | RPKIYLRKSL | 0.785 | 10 | SB | Large T | B0702 |
| 200 | TPHRHRVSAI | 0.752 | 14 | SB | Large T | B0702 |
| 453 | LPMERLTFEL | 0.722 | 20 | SB | Large T | B0702 |
| 427 | GPIDSGKTTL | 0.704 | 24 | SB | Large T | B0702 |
| 486 | LPSGHGINNL | 0.573 | 101 | WB | Large T | B0702 |
| 584 | RPVADFSKDI | 0.560 | 117 | WB | Large T | B0702 |
| 549 | RPKIYLRKSL | 0.479 | 280 | WB | Large T | B0801 |
| 200 | TPHRHRVSAI | 0.453 | 373 | WB | Large T | B0801 |
| 544 | RQIDFRPKIY | 0.584 | 89 | WB | Large T | B1501 |
| 188 | HMCAGHNIIF | 0.577 | 97 | WB | Large T | B1501 |
| 175 | KLMEKYSVTF | 0.568 | 107 | WB | Large T | B1501 |
| 609 | SMYTFSRMKY | 0.536 | 150 | WB | Large T | B1501 |
| 148 | SQAVFSNRTL | 0.502 | 218 | WB | Large T | B1501 |
| 268 | QVSWKLITEY | 0.478 | 284 | WB | Large T | B1501 |
| 287 | FLLLGMYLEF | 0.475 | 292 | WB | Large T | B1501 |
| 249 | IQGGLKEHDF | 0.467 | 318 | WB | Large T | B1501 |
| 464 | VAIDQYMVVF | 0.445 | 406 | WB | Large T | B1501 |
| 570 | LQSGMTLLLL | 0.439 | 434 | WB | Large T | B1501 |
| 460 | FELGVAIDQY | 0.795 | 9 | SB | Large T | B1801 |
| 87 | EEWESWWSSF | 0.653 | 42 | SB | Large T | B1801 |
| 455 | MERLTFELGV | 0.576 | 98 | WB | Large T | B1801 |
| 574 | MTLLLLLIWF | 0.498 | 227 | WB | Large T | B1801 |
| 420 | RRYWLFKGPI | 0.605 | 71 | WB | Large T | B2705 |
| 52 | KRMNTLYKKM | 0.591 | 83 | WB | Large T | B2705 |
| 567 | KRILQSGMTL | 0.564 | 111 | WB | Large T | B2705 |
| 349 | KRVDTLHMTR | 0.487 | 258 | WB | Large T | B2705 |
| 517 | KRTQIFPPGL | 0.471 | 305 | WB | Large T | B2705 |
| 464 | VAIDQYMVVF | 0.679 | 32 | SB | Large T | B3501 |
| 453 | LPMERLTFEL | 0.600 | 75 | WB | Large T | B3501 |
| 20 | RAAWGNLPLM | 0.595 | 80 | WB | Large T | B3501 |
| 268 | QVSWKLITEY | 0.558 | 119 | WB | Large T | B3501 |
| 486 | LPSGHGINNL | 0.549 | 131 | WB | Large T | B3501 |
| 287 | FLLLGMYLEF | 0.479 | 279 | WB | Large T | B3501 |
| 523 | PPGLVTMNEY | 0.479 | 281 | WB | Large T | B3501 |
| 532 | YPVPKTLQAR | 0.470 | 310 | WB | Large T | B3501 |
| 139 | FPSDLHQFLS | 0.459 | 347 | WB | Large T | B3501 |
| 189 | MCAGHNIIFF | 0.451 | 379 | WB | Large T | B3501 |
| 389 | MAGVAWLHCL | 0.449 | 390 | WB | Large T | B3501 |
| 262 | EPEETKQVSW | 0.433 | 460 | WB | Large T | B3501 |
| 317 | YHEKHFANAI | 0.608 | 69 | WB | Large T | B3901 |
| 148 | SQAVFSNRTL | 0.545 | 137 | WB | Large T | B3901 |
| 19 | ERAAWGNLPL | 0.539 | 147 | WB | Large T | B3901 |
| 501 | YLDGSVKVNL | 0.498 | 228 | WB | Large T | B3901 |
| 6 | REESMELMDL | 0.707 | 23 | SB | Large T | B4001 |
| 561 | SEFLLEKRIL | 0.683 | 30 | SB | Large T | B4001 |
| 279 | VETKCEDVFL | 0.502 | 218 | WB | Large T | B4001 |
| 264 | EETKQVSWKL | 0.500 | 224 | WB | Large T | B4001 |
| 7 | EESMELMDLL | 0.488 | 253 | WB | Large T | B4001 |
| 455 | MERLTFELGV | 0.485 | 263 | WB | Large T | B4001 |
| 561 | SEFLLEKRIL | 0.595 | 80 | WB | Large T | B4002 |
| 7 | EESMELMDLL | 0.482 | 271 | WB | Large T | B4002 |
| 229 | KEYLLYSALT | 0.482 | 272 | WB | Large T | B4002 |
| 279 | VETKCEDVFL | 0.472 | 303 | WB | Large T | B4002 |
| 87 | EEWESWWSSF | 0.458 | 353 | WB | Large T | B4002 |
| 561 | SEFLLEKRIL | 0.496 | 233 | WB | Large T | B4403 |
| 606 | SEISMYTFSR | 0.427 | 493 | WB | Large T | B4403 |
| 453 | LPMERLTFEL | 0.695 | 27 | SB | Large T | B5101 |
| 240 | DPYHIIEESI | 0.492 | 244 | WB | Large T | B5101 |
| 486 | LPSGHGINNL | 0.447 | 397 | WB | Large T | B5101 |
| 453 | LPMERLTFEL | 0.721 | 20 | SB | Large T | B5301 |
| 262 | EPEETKQVSW | 0.716 | 21 | SB | Large T | B5301 |
| 486 | LPSGHGINNL | 0.585 | 89 | WB | Large T | B5301 |
| 427 | GPIDSGKTTL | 0.470 | 308 | WB | Large T | B5301 |
| 200 | TPHRHRVSAI | 0.457 | 356 | WB | Large T | B5301 |
| 139 | FPSDLHQFLS | 0.584 | 89 | WB | Large T | B5401 |
| 26 | LPLMRKAYLK | 0.511 | 197 | WB | Large T | B5401 |
| 160 | FAVYTTKEKA | 0.489 | 252 | WB | Large T | B5401 |
| 453 | LPMERLTFEL | 0.483 | 267 | WB | Large T | B5401 |
| 67 | VAHQPDFGTW | 0.448 | 393 | WB | Large T | B5701 |
| 67 | VAHQPDFGTW | 0.537 | 149 | WB | Large T | B5801 |
| 464 | VAIDQYMVVF | 0.503 | 216 | WB | Large T | B5801 |
| 20 | RAAWGNLPLM | 0.485 | 263 | WB | Large T | B5801 |
| 556 | KSLQNSEFLL | 0.475 | 293 | WB | Large T | B5801 |
| 175 | KLMEKYSVTF | 0.437 | 440 | WB | Large T | B5801 |
| 31 | KAYLKKCKEF | 0.431 | 473 | WB | Large T | B5801 |
| 591 | KDIQSRIVEW | 0.430 | 474 | WB | Large T | B5801 |

11-mers

| | | | | | | |
|---|---|---|---|---|---|---|
| 163 | YTTKEKAQILY | 0.682 | 31 | SB | Large T | A0101 |
| 388 | YMAGVAWLHCL | 0.862 | 4 | SB | Large T | A0201 |
| 175 | KLMEKYSVTFI | 0.854 | 4 | SB | Large T | A0201 |
| 576 | LLLLLIWFRPV | 0.708 | 23 | SB | Large T | A0201 |
| 369 | ILDKMDLIFGA | 0.641 | 48 | SB | Large T | A0201 |
| 569 | ILQSGMTLLLL | 0.609 | 68 | WB | Large T | A0201 |
| 146 | FLSQAVFSNRT | 0.563 | 113 | WB | Large T | A0201 |
| 198 | FLTPHRHRVSA | 0.558 | 119 | WB | Large T | A0201 |
| 287 | FLLLGMYLEFQ | 0.530 | 162 | WB | Large T | A0201 |
| 568 | RILQSGMTLLL | 0.506 | 209 | WB | Large T | A0201 |
| 528 | TMNEYPVPKTL | 0.501 | 222 | WB | Large T | A0201 |
| 439 | GLLDLCGGKAL | 0.469 | 312 | WB | Large T | A0201 |
| 448 | ALNVNLPMERL | 0.469 | 313 | WB | Large T | A0201 |
| 577 | LLLLIWFRPVA | 0.462 | 336 | WB | Large T | A0201 |
| 11 | ELMDLLGLERA | 0.458 | 351 | WB | Large T | A0201 |
| 217 | CTFSFLICKGV | 0.447 | 398 | WB | Large T | A0201 |
| 152 | FSNRTLACFAV | 0.439 | 431 | WB | Large T | A0201 |
| 269 | VSWKLITEYAV | 0.439 | 432 | WB | Large T | A0201 |
| 570 | LQSGMTLLLLL | 0.434 | 457 | WB | Large T | A0201 |
| 2 | KVLNREESMEL | 0.432 | 467 | WB | Large T | A0201 |
| 388 | YMAGVAWLHCL | 0.869 | 4 | SB | Large T | A0202 |
| 175 | KLMEKYSVTFI | 0.858 | 4 | SB | Large T | A0202 |
| 189 | MCAGHNIIFFL | 0.726 | 19 | SB | Large T | A0202 |
| 198 | FLTPHRHRVSA | 0.718 | 21 | SB | Large T | A0202 |
| 146 | FLSQAVFSNRT | 0.718 | 21 | SB | Large T | A0202 |
| 570 | LQSGMTLLLLL | 0.667 | 36 | SB | Large T | A0202 |
| 569 | ILQSGMTLLLL | 0.666 | 36 | SB | Large T | A0202 |
| 448 | ALNVNLPMERL | 0.624 | 58 | WB | Large T | A0202 |
| 576 | LLLLLIWFRPV | 0.621 | 60 | WB | Large T | A0202 |
| 152 | FSNRTLACFAV | 0.601 | 74 | WB | Large T | A0202 |
| 287 | FLLLGMYLEFQ | 0.593 | 82 | WB | Large T | A0202 |
| 528 | TMNEYPVPKTL | 0.587 | 87 | WB | Large T | A0202 |
| 11 | ELMDLLGLERA | 0.582 | 92 | WB | Large T | A0202 |
| 243 | HIIEESIQGGL | 0.571 | 103 | WB | Large T | A0202 |
| 369 | ILDKMDLIFGA | 0.561 | 115 | WB | Large T | A0202 |
| 212 | FCQKLCTFSFL | 0.560 | 116 | WB | Large T | A0202 |
| 375 | LIFGAHGNAVL | 0.541 | 142 | WB | Large T | A0202 |
| 461 | ELGVAIDQYMV | 0.541 | 143 | WB | Large T | A0202 |
| 409 | FLHCVVFNVPK | 0.524 | 171 | WB | Large T | A0202 |
| 439 | GLLDLCGGKAL | 0.519 | 181 | WB | Large T | A0202 |
| 452 | NLPMERLTFEL | 0.515 | 189 | WB | Large T | A0202 |
| 407 | FDFLHCVVFNV | 0.493 | 239 | WB | Large T | A0202 |
| 3 | VLNREESMELM | 0.491 | 245 | WB | Large T | A0202 |
| 268 | QVSWKLITEYA | 0.488 | 255 | WB | Large T | A0202 |
| 290 | LGMYLEFQYNV | 0.481 | 273 | WB | Large T | A0202 |
| 217 | CTFSFLICKGV | 0.464 | 330 | WB | Large T | A0202 |
| 564 | LLEKRILQSGM | 0.447 | 398 | WB | Large T | A0202 |
| 222 | LICKGVNKEYL | 0.436 | 448 | WB | Large T | A0202 |
| 226 | GVNKEYLLYSA | 0.428 | 485 | WB | Large T | A0202 |
| 388 | YMAGVAWLHCL | 0.868 | 4 | SB | Large T | A0203 |
| 175 | KLMEKYSVTFI | 0.862 | 4 | SB | Large T | A0203 |
| 198 | FLTPHRHRVSA | 0.779 | 10 | SB | Large T | A0203 |
| 528 | TMNEYPVPKTL | 0.766 | 12 | SB | Large T | A0203 |
| 576 | LLLLLIWFRPV | 0.728 | 19 | SB | Large T | A0203 |
| 569 | ILQSGMTLLLL | 0.703 | 24 | SB | Large T | A0203 |
| 146 | FLSQAVFSNRT | 0.702 | 25 | SB | Large T | A0203 |
| 448 | ALNVNLPMERL | 0.668 | 36 | SB | Large T | A0203 |
| 11 | ELMDLLGLERA | 0.652 | 42 | SB | Large T | A0203 |
| 439 | GLLDLCGGKAL | 0.593 | 81 | WB | Large T | A0203 |
| 268 | QVSWKLITEYA | 0.577 | 97 | WB | Large T | A0203 |
| 570 | LQSGMTLLLLL | 0.548 | 132 | WB | Large T | A0203 |
| 226 | GVNKEYLLYSA | 0.540 | 144 | WB | Large T | A0203 |
| 243 | HIIEESIQGGL | 0.523 | 174 | WB | Large T | A0203 |
| 375 | LIFGAHGNAVL | 0.522 | 176 | WB | Large T | A0203 |
| 382 | NAVLEQYMAGV | 0.516 | 188 | WB | Large T | A0203 |
| 217 | CTFSFLICKGV | 0.515 | 190 | WB | Large T | A0203 |
| 374 | DLIFGAHGNAV | 0.511 | 197 | WB | Large T | A0203 |
| 404 | SVIFDFLHCVV | 0.498 | 229 | WB | Large T | A0203 |
| 152 | FSNRTLACFAV | 0.491 | 245 | WB | Large T | A0203 |
| 3 | VLNREESMELM | 0.473 | 298 | WB | Large T | A0203 |
| 287 | FLLLGMYLEFQ | 0.469 | 312 | WB | Large T | A0203 |
| 452 | NLPMERLTFEL | 0.465 | 327 | WB | Large T | A0203 |
| 369 | ILDKMDLIFGA | 0.464 | 328 | WB | Large T | A0203 |
| 568 | RILQSGMTLLL | 0.457 | 356 | WB | Large T | A0203 |
| 199 | LTPHRHRVSAI | 0.453 | 373 | WB | Large T | A0203 |
| 471 | VVFEDVKGTGA | 0.450 | 383 | WB | Large T | A0203 |
| 469 | YMVVFEDVKGT | 0.450 | 385 | WB | Large T | A0203 |
| 388 | YMAGVAWLHCL | 0.691 | 28 | SB | Large T | A0204 |
| 528 | TMNEYPVPKTL | 0.687 | 29 | SB | Large T | A0204 |
| 175 | KLMEKYSVTFI | 0.670 | 35 | SB | Large T | A0204 |
| 576 | LLLLLIWFRPV | 0.616 | 63 | WB | Large T | A0204 |
| 198 | FLTPHRHRVSA | 0.583 | 91 | WB | Large T | A0204 |
| 2 | KVLNREESMEL | 0.525 | 170 | WB | Large T | A0204 |
| 569 | ILQSGMTLLLL | 0.449 | 386 | WB | Large T | A0204 |
| 336 | SICQQAVDTVL | 0.431 | 472 | WB | Large T | A0204 |
| 544 | RQIDFRPKIYL | 0.801 | 8 | SB | Large T | A0206 |
| 388 | YMAGVAWLHCL | 0.796 | 9 | SB | Large T | A0206 |
| 175 | KLMEKYSVTFI | 0.743 | 16 | SB | Large T | A0206 |
| 576 | LLLLLIWFRPV | 0.738 | 16 | SB | Large T | A0206 |
| 570 | LQSGMTLLLLL | 0.711 | 22 | SB | Large T | A0206 |
| 198 | FLTPHRHRVSA | 0.706 | 24 | SB | Large T | A0206 |
| 404 | SVIFDFLHCVV | 0.688 | 29 | SB | Large T | A0206 |
| 152 | FSNRTLACFAV | 0.646 | 46 | SB | Large T | A0206 |
| 568 | RILQSGMTLLL | 0.644 | 47 | SB | Large T | A0206 |
| 369 | ILDKMDLIFGA | 0.622 | 59 | WB | Large T | A0206 |
| 2 | KVLNREESMEL | 0.620 | 61 | WB | Large T | A0206 |
| 148 | SQAVFSNRTLA | 0.618 | 62 | WB | Large T | A0206 |
| 335 | KSICQQAVDTV | 0.568 | 106 | WB | Large T | A0206 |
| 382 | NAVLEQYMAGV | 0.548 | 133 | WB | Large T | A0206 |
| 519 | TQIFPPGLVTM | 0.539 | 146 | WB | Large T | A0206 |
| 243 | HIIEESIQGGL | 0.519 | 182 | WB | Large T | A0206 |
| 287 | FLLLGMYLEFQ | 0.515 | 191 | WB | Large T | A0206 |
| 146 | FLSQAVFSNRT | 0.506 | 210 | WB | Large T | A0206 |
| 569 | ILQSGMTLLLL | 0.487 | 256 | WB | Large T | A0206 |
| 439 | GLLDLCGGKAL | 0.478 | 284 | WB | Large T | A0206 |
| 213 | CQKLCTFSFLI | 0.469 | 312 | WB | Large T | A0206 |
| 542 | FVRQIDFRPKI | 0.464 | 330 | WB | Large T | A0206 |
| 267 | KQVSWKLITEY | 0.462 | 336 | WB | Large T | A0206 |
| 471 | VVFEDVKGTGA | 0.460 | 343 | WB | Large T | A0206 |
| 383 | AVLEQYMAGVA | 0.445 | 407 | WB | Large T | A0206 |
| 577 | LLLLIWFRPVA | 0.444 | 408 | WB | Large T | A0206 |
| 155 | RTLACFAVYTT | 0.442 | 419 | WB | Large T | A0206 |
| 268 | QVSWKLITEYA | 0.438 | 437 | WB | Large T | A0206 |
| 375 | LIFGAHGNAVL | 0.437 | 441 | WB | Large T | A0206 |
| 452 | NLPMERLTFEL | 0.429 | 479 | WB | Large T | A0206 |
| 296 | FQYNVEECKKC | 0.427 | 490 | WB | Large T | A0206 |
| 388 | YMAGVAWLHCL | 0.966 | 1 | SB | Large T | A0211 |
| 198 | FLTPHRHRVSA | 0.943 | 1 | SB | Large T | A0211 |
| 576 | LLLLLIWFRPV | 0.898 | 3 | SB | Large T | A0211 |
| 569 | ILQSGMTLLLL | 0.893 | 3 | SB | Large T | A0211 |
| 439 | GLLDLCGGKAL | 0.887 | 3 | SB | Large T | A0211 |
| 452 | NLPMERLTFEL | 0.875 | 3 | SB | Large T | A0211 |
| 369 | ILDKMDLIFGA | 0.868 | 4 | SB | Large T | A0211 |
| 528 | TMNEYPVPKTL | 0.858 | 4 | SB | Large T | A0211 |
| 461 | ELGVAIDQYMV | 0.854 | 4 | SB | Large T | A0211 |
| 287 | FLLLGMYLEFQ | 0.832 | 6 | SB | Large T | A0211 |
| 454 | PMERLTFELGV | 0.823 | 6 | SB | Large T | A0211 |
| 11 | ELMDLLGLERA | 0.815 | 7 | SB | Large T | A0211 |
| 360 | EMLTERFNHIL | 0.779 | 10 | SB | Large T | A0211 |
| 374 | DLIFGAHGNAV | 0.775 | 11 | SB | Large T | A0211 |
| 175 | KLMEKYSVTFI | 0.773 | 11 | SB | Large T | A0211 |
| 577 | LLLLIWFRPVA | 0.765 | 12 | SB | Large T | A0211 |
| 568 | RILQSGMTLLL | 0.755 | 14 | SB | Large T | A0211 |
| 288 | LLLGMYLEFQY | 0.753 | 14 | SB | Large T | A0211 |
| 341 | AVDTVLAKKRV | 0.752 | 14 | SB | Large T | A0211 |
| 448 | ALNVNLPMERL | 0.747 | 15 | SB | Large T | A0211 |
| 375 | LIFGAHGNAVL | 0.691 | 28 | SB | Large T | A0211 |
| 603 | RLDSEISMYTF | 0.681 | 31 | SB | Large T | A0211 |
| 404 | SVIFDFLHCVV | 0.671 | 35 | SB | Large T | A0211 |
| 12 | LMDLLGLERAA | 0.669 | 35 | SB | Large T | A0211 |
| 146 | FLSQAVFSNRT | 0.648 | 45 | SB | Large T | A0211 |
| 485 | DLPSGHGINNL | 0.644 | 47 | SB | Large T | A0211 |
| 563 | FLLEKRILQSG | 0.601 | 74 | WB | Large T | A0211 |
| 2 | KVLNREESMEL | 0.597 | 77 | WB | Large T | A0211 |
| 501 | YLDGSVKVNLE | 0.596 | 78 | WB | Large T | A0211 |
| 189 | MCAGHNIIFFL | 0.591 | 83 | WB | Large T | A0211 |
| 428 | PIDSGKTTLAA | 0.577 | 97 | WB | Large T | A0211 |
| 405 | VIFDFLHCVVF | 0.563 | 112 | WB | Large T | A0211 |
| 196 | IFFLTPHRHRV | 0.551 | 128 | WB | Large T | A0211 |
| 217 | CTFSFLICKGV | 0.550 | 130 | WB | Large T | A0211 |
| 269 | VSWKLITEYAV | 0.549 | 132 | WB | Large T | A0211 |
| 109 | DMFASDEEATA | 0.544 | 138 | WB | Large T | A0211 |
| 544 | RQIDFRPKIYL | 0.542 | 141 | WB | Large T | A0211 |
| 3 | VLNREESMELM | 0.535 | 153 | WB | Large T | A0211 |
| 557 | SLQNSEFLLEK | 0.517 | 186 | WB | Large T | A0211 |
| 533 | PVPKTLQARFV | 0.511 | 198 | WB | Large T | A0211 |
| 243 | HIIEESIQGGL | 0.500 | 224 | WB | Large T | A0211 |
| 401 | KMDSVIFDFLH | 0.486 | 260 | WB | Large T | A0211 |
| 222 | LICKGVNKEYL | 0.462 | 338 | WB | Large T | A0211 |
| 353 | TLHMTREEMLT | 0.459 | 349 | WB | Large T | A0211 |
| 232 | LLYSALTRDPY | 0.435 | 449 | WB | Large T | A0211 |
| 215 | KLCTFSFLICK | 0.435 | 452 | WB | Large T | A0211 |
| 573 | GMTLLLLLIWF | 0.433 | 459 | WB | Large T | A0211 |
| 423 | WLFKGPIDSGK | 0.428 | 487 | WB | Large T | A0211 |
| 388 | YMAGVAWLHCL | 0.936 | 1 | SB | Large T | A0212 |
| 198 | FLTPHRHRVSA | 0.906 | 2 | SB | Large T | A0212 |
| 439 | GLLDLCGGKAL | 0.823 | 6 | SB | Large T | A0212 |
| 528 | TMNEYPVPKTL | 0.817 | 7 | SB | Large T | A0212 |
| 576 | LLLLLIWFRPV | 0.817 | 7 | SB | Large T | A0212 |
| 454 | PMERLTFELGV | 0.806 | 8 | SB | Large T | A0212 |
| 569 | ILQSGMTLLLL | 0.801 | 8 | SB | Large T | A0212 |
| 287 | FLLLGMYLEFQ | 0.777 | 11 | SB | Large T | A0212 |
| 369 | ILDKMDLIFGA | 0.756 | 13 | SB | Large T | A0212 |
| 374 | DLIFGAHGNAV | 0.706 | 24 | SB | Large T | A0212 |
| 360 | EMLTERFNHIL | 0.682 | 31 | SB | Large T | A0212 |
| 461 | ELGVAIDQYMV | 0.658 | 40 | SB | Large T | A0212 |
| 288 | LLLGMYLEFQY | 0.655 | 41 | SB | Large T | A0212 |
| 11 | ELMDLLGLERA | 0.654 | 42 | SB | Large T | A0212 |
| 452 | NLPMERLTFEL | 0.645 | 46 | SB | Large T | A0212 |
| 563 | FLLEKRILQSG | 0.643 | 47 | SB | Large T | A0212 |
| 375 | LIFGAHGNAVL | 0.631 | 54 | WB | Large T | A0212 |
| 175 | KLMEKYSVTFI | 0.620 | 60 | WB | Large T | A0212 |
| 577 | LLLLIWFRPVA | 0.601 | 74 | WB | Large T | A0212 |
| 269 | VSWKLITEYAV | 0.598 | 77 | WB | Large T | A0212 |
| 12 | LMDLLGLERAA | 0.577 | 96 | WB | Large T | A0212 |
| 146 | FLSQAVFSNRT | 0.577 | 97 | WB | Large T | A0212 |
| 448 | ALNVNLPMERL | 0.574 | 100 | WB | Large T | A0212 |
| 341 | AVDTVLAKKRV | 0.549 | 132 | WB | Large T | A0212 |
| 485 | DLPSGHGINNL | 0.537 | 149 | WB | Large T | A0212 |
| 405 | VIFDFLHCVVF | 0.536 | 151 | WB | Large T | A0212 |
| 3 | VLNREESMELM | 0.514 | 192 | WB | Large T | A0212 |
| 423 | WLFKGPIDSGK | 0.499 | 225 | WB | Large T | A0212 |
| 2 | KVLNREESMEL | 0.481 | 273 | WB | Large T | A0212 |
| 404 | SVIFDFLHCVV | 0.458 | 350 | WB | Large T | A0212 |
| 564 | LLEKRILQSGM | 0.452 | 374 | WB | Large T | A0212 |
| 469 | YMVVFEDVKGT | 0.452 | 377 | WB | Large T | A0212 |
| 243 | HIIEESIQGGL | 0.441 | 421 | WB | Large T | A0212 |
| 222 | LICKGVNKEYL | 0.440 | 428 | WB | Large T | A0212 |
| 217 | CTFSFLICKGV | 0.437 | 444 | WB | Large T | A0212 |
| 196 | IFFLTPHRHRV | 0.436 | 445 | WB | Large T | A0212 |
| 189 | MCAGHNIIFFL | 0.432 | 469 | WB | Large T | A0212 |
| 471 | VVFEDVKGTGA | 0.426 | 495 | WB | Large T | A0212 |
| 388 | YMAGVAWLHCL | 0.907 | 2 | SB | Large T | A0216 |
| 198 | FLTPHRHRVSA | 0.867 | 4 | SB | Large T | A0216 |
| 461 | ELGVAIDQYMV | 0.859 | 4 | SB | Large T | A0216 |
| 569 | ILQSGMTLLLL | 0.824 | 6 | SB | Large T | A0216 |
| 452 | NLPMERLTFEL | 0.778 | 11 | SB | Large T | A0216 |
| 454 | PMERLTFELGV | 0.771 | 11 | SB | Large T | A0216 |
| 576 | LLLLLIWFRPV | 0.754 | 14 | SB | Large T | A0216 |
| 528 | TMNEYPVPKTL | 0.752 | 14 | SB | Large T | A0216 |
| 374 | DLIFGAHGNAV | 0.737 | 17 | SB | Large T | A0216 |
| 287 | FLLLGMYLEFQ | 0.712 | 22 | SB | Large T | A0216 |
| 341 | AVDTVLAKKRV | 0.711 | 22 | SB | Large T | A0216 |
| 369 | ILDKMDLIFGA | 0.696 | 26 | SB | Large T | A0216 |
| 448 | ALNVNLPMERL | 0.693 | 27 | SB | Large T | A0216 |
| 175 | KLMEKYSVTFI | 0.691 | 28 | SB | Large T | A0216 |
| 439 | GLLDLCGGKAL | 0.678 | 32 | SB | Large T | A0216 |
| 146 | FLSQAVFSNRT | 0.661 | 39 | SB | Large T | A0216 |
| 11 | ELMDLLGLERA | 0.650 | 43 | SB | Large T | A0216 |
| 485 | DLPSGHGINNL | 0.642 | 48 | SB | Large T | A0216 |
| 375 | LIFGAHGNAVL | 0.639 | 49 | SB | Large T | A0216 |
| 360 | EMLTERFNHIL | 0.631 | 54 | WB | Large T | A0216 |
| 222 | LICKGVNKEYL | 0.620 | 60 | WB | Large T | A0216 |
| 568 | RILQSGMTLLL | 0.559 | 118 | WB | Large T | A0216 |
| 196 | IFFLTPHRHRV | 0.554 | 124 | WB | Large T | A0216 |
| 533 | PVPKTLQARFV | 0.551 | 128 | WB | Large T | A0216 |
| 404 | SVIFDFLHCVV | 0.528 | 165 | WB | Large T | A0216 |
| 189 | MCAGHNIIFFL | 0.523 | 173 | WB | Large T | A0216 |
| 288 | LLLGMYLEFQY | 0.517 | 186 | WB | Large T | A0216 |
| 2 | KVLNREESMEL | 0.514 | 191 | WB | Large T | A0216 |
| 577 | LLLLIWFRPVA | 0.493 | 240 | WB | Large T | A0216 |
| 544 | RQIDFRPKIYL | 0.485 | 264 | WB | Large T | A0216 |
| 269 | VSWKLITEYAV | 0.483 | 267 | WB | Large T | A0216 |
| 161 | AVYTTKEKAQI | 0.475 | 293 | WB | Large T | A0216 |
| 109 | DMFASDEEATA | 0.457 | 355 | WB | Large T | A0216 |
| 388 | YMAGVAWLHCL | 0.952 | 1 | SB | Large T | A0219 |
| 569 | ILQSGMTLLLL | 0.841 | 5 | SB | Large T | A0219 |
| 198 | FLTPHRHRVSA | 0.685 | 30 | SB | Large T | A0219 |
| 576 | LLLLLIWFRPV | 0.681 | 31 | SB | Large T | A0219 |
| 287 | FLLLGMYLEFQ | 0.664 | 37 | SB | Large T | A0219 |
| 461 | ELGVAIDQYMV | 0.655 | 41 | SB | Large T | A0219 |
| 369 | ILDKMDLIFGA | 0.647 | 45 | SB | Large T | A0219 |
| 11 | ELMDLLGLERA | 0.602 | 73 | WB | Large T | A0219 |
| 454 | PMERLTFELGV | 0.584 | 90 | WB | Large T | A0219 |
| 448 | ALNVNLPMERL | 0.562 | 114 | WB | Large T | A0219 |
| 146 | FLSQAVFSNRT | 0.559 | 118 | WB | Large T | A0219 |
| 374 | DLIFGAHGNAV | 0.556 | 121 | WB | Large T | A0219 |
| 360 | EMLTERFNHIL | 0.537 | 149 | WB | Large T | A0219 |
| 528 | TMNEYPVPKTL | 0.532 | 157 | WB | Large T | A0219 |
| 485 | DLPSGHGINNL | 0.524 | 172 | WB | Large T | A0219 |
| 452 | NLPMERLTFEL | 0.507 | 206 | WB | Large T | A0219 |
| 341 | AVDTVLAKKRV | 0.499 | 226 | WB | Large T | A0219 |
| 439 | GLLDLCGGKAL | 0.485 | 262 | WB | Large T | A0219 |
| 189 | MCAGHNIIFFL | 0.462 | 337 | WB | Large T | A0219 |
| 175 | KLMEKYSVTFI | 0.454 | 367 | WB | Large T | A0219 |
| 269 | VSWKLITEYAV | 0.448 | 394 | WB | Large T | A0219 |
| 156 | TLACFAVYTTK | 0.728 | 18 | SB | Large T | A0301 |
| 409 | FLHCVVFNVPK | 0.709 | 23 | SB | Large T | A0301 |
| 215 | KLCTFSFLICK | 0.671 | 35 | SB | Large T | A0301 |
| 50 | KMKRMNTLYKK | 0.667 | 36 | SB | Large T | A0301 |
| 391 | GVAWLHCLLPK | 0.656 | 41 | SB | Large T | A0301 |
| 205 | RVSAINNFCQK | 0.650 | 44 | SB | Large T | A0301 |
| 56 | TLYKKMEQDVK | 0.645 | 46 | SB | Large T | A0301 |
| 507 | KVNLEKKHLNK | 0.586 | 88 | WB | Large T | A0301 |
| 219 | FSFLICKGVNK | 0.581 | 92 | WB | Large T | A0301 |
| 195 | IIFFLTPHRHR | 0.575 | 99 | WB | Large T | A0301 |
| 164 | TTKEKAQILYK | 0.549 | 131 | WB | Large T | A0301 |
| 557 | SLQNSEFLLEK | 0.539 | 146 | WB | Large T | A0301 |
| 272 | KLITEYAVETK | 0.533 | 156 | WB | Large T | A0301 |
| 21 | AAWGNLPLMRK | 0.508 | 205 | WB | Large T | A0301 |
| 416 | NVPKRRYWLFK | 0.507 | 206 | WB | Large T | A0301 |
| 608 | ISMYTFSRMKY | 0.491 | 247 | WB | Large T | A0301 |
| 574 | MTLLLLLIWFR | 0.485 | 261 | WB | Large T | A0301 |
| 673 | HLCKGFQCFKR | 0.459 | 348 | WB | Large T | A0301 |
| 28 | LMRKAYLKKCK | 0.454 | 369 | WB | Large T | A0301 |
| 244 | IIEESIQGGLK | 0.448 | 393 | WB | Large T | A0301 |
| 497 | SLRDYLDGSVK | 0.443 | 416 | WB | Large T | A0301 |
| 423 | WLFKGPIDSGK | 0.432 | 464 | WB | Large T | A0301 |
| 401 | KMDSVIFDFLH | 0.427 | 490 | WB | Large T | A0301 |
| 391 | GVAWLHCLLPK | 0.825 | 6 | SB | Large T | A1101 |
| 215 | KLCTFSFLICK | 0.800 | 8 | SB | Large T | A1101 |
| 557 | SLQNSEFLLEK | 0.791 | 9 | SB | Large T | A1101 |
| 205 | RVSAINNFCQK | 0.784 | 10 | SB | Large T | A1101 |
| 574 | MTLLLLLIWFR | 0.768 | 12 | SB | Large T | A1101 |
| 21 | AAWGNLPLMRK | 0.742 | 16 | SB | Large T | A1101 |
| 164 | TTKEKAQILYK | 0.721 | 20 | SB | Large T | A1101 |
| 156 | TLACFAVYTTK | 0.719 | 20 | SB | Large T | A1101 |
| 526 | LVTMNEYPVPK | 0.716 | 21 | SB | Large T | A1101 |
| 507 | KVNLEKKHLNK | 0.706 | 24 | SB | Large T | A1101 |
| 325 | AIIFAESKNQK | 0.702 | 25 | SB | Large T | A1101 |
| 169 | AQILYKKLMEK | 0.699 | 25 | SB | Large T | A1101 |
| 118 | TADSQHSTPPK | 0.677 | 32 | SB | Large T | A1101 |
| 416 | NVPKRRYWLFK | 0.651 | 43 | SB | Large T | A1101 |
| 56 | TLYKKMEQDVK | 0.640 | 49 | SB | Large T | A1101 |
| 50 | KMKRMNTLYKK | 0.634 | 52 | WB | Large T | A1101 |
| 447 | KALNVNLPMER | 0.627 | 56 | WB | Large T | A1101 |
| 322 | FANAIIFAESK | 0.620 | 61 | WB | Large T | A1101 |
| 608 | ISMYTFSRMKY | 0.609 | 68 | WB | Large T | A1101 |
| 219 | FSFLICKGVNK | 0.594 | 80 | WB | Large T | A1101 |
| 338 | CQQAVDTVLAK | 0.593 | 81 | WB | Large T | A1101 |
| 362 | LTERFNHILDK | 0.588 | 86 | WB | Large T | A1101 |
| 409 | FLHCVVFNVPK | 0.555 | 122 | WB | Large T | A1101 |
| 195 | IIFFLTPHRHR | 0.547 | 134 | WB | Large T | A1101 |
| 437 | AAGLLDLCGGK | 0.547 | 134 | WB | Large T | A1101 |
| 20 | RAAWGNLPLMR | 0.531 | 160 | WB | Large T | A1101 |
| 272 | KLITEYAVETK | 0.526 | 169 | WB | Large T | A1101 |
| 607 | EISMYTFSRMK | 0.523 | 174 | WB | Large T | A1101 |
| 244 | IIEESIQGGLK | 0.506 | 209 | WB | Large T | A1101 |
| 339 | QQAVDTVLAKK | 0.471 | 307 | WB | Large T | A1101 |
| 467 | DQYMVVFEDVK | 0.445 | 404 | WB | Large T | A1101 |
| 497 | SLRDYLDGSVK | 0.436 | 448 | WB | Large T | A1101 |
| 581 | IWFRPVADFSK | 0.434 | 454 | WB | Large T | A1101 |
| 312 | PYHFKYHEKHF | 0.709 | 23 | SB | Large T | A2301 |
| 286 | VFLLLGMYLEF | 0.704 | 24 | SB | Large T | A2301 |
| 610 | MYTFSRMKYNI | 0.668 | 36 | SB | Large T | A2301 |
| 581 | IWFRPVADFSK | 0.626 | 57 | WB | Large T | A2301 |
| 500 | DYLDGSVKVNL | 0.598 | 77 | WB | Large T | A2301 |
| 211 | NFCQKLCTFSF | 0.575 | 99 | WB | Large T | A2301 |
| 83 | TYGTEEWESWW | 0.560 | 116 | WB | Large T | A2301 |
| 187 | RHMCAGHNIIF | 0.491 | 245 | WB | Large T | A2301 |
| 179 | KYSVTFISRHM | 0.485 | 263 | WB | Large T | A2301 |
| 316 | KYHEKHFANAI | 0.478 | 282 | WB | Large T | A2301 |
| 295 | EFQYNVEECKK | 0.478 | 283 | WB | Large T | A2301 |
| 617 | KYNICMGKCIL | 0.477 | 288 | WB | Large T | A2301 |
| 95 | SFNEKWDEDLF | 0.476 | 289 | WB | Large T | A2301 |
| 553 | YLRKSLQNSEF | 0.468 | 316 | WB | Large T | A2301 |
| 162 | VYTTKEKAQIL | 0.451 | 380 | WB | Large T | A2301 |
| 405 | VIFDFLHCVVF | 0.442 | 417 | WB | Large T | A2301 |
| 316 | KYHEKHFANAI | 0.677 | 33 | SB | Large T | A2402 |
| 286 | VFLLLGMYLEF | 0.676 | 33 | SB | Large T | A2402 |
| 312 | PYHFKYHEKHF | 0.617 | 62 | WB | Large T | A2402 |
| 610 | MYTFSRMKYNI | 0.570 | 105 | WB | Large T | A2402 |
| 83 | TYGTEEWESWW | 0.514 | 192 | WB | Large T | A2402 |
| 179 | KYSVTFISRHM | 0.513 | 193 | WB | Large T | A2402 |
| 162 | VYTTKEKAQIL | 0.482 | 272 | WB | Large T | A2402 |
| 211 | NFCQKLCTFSF | 0.461 | 341 | WB | Large T | A2402 |
| 286 | VFLLLGMYLEF | 0.742 | 16 | SB | Large T | A2403 |
| 316 | KYHEKHFANAI | 0.713 | 22 | SB | Large T | A2403 |
| 83 | TYGTEEWESWW | 0.653 | 42 | SB | Large T | A2403 |
| 312 | PYHFKYHEKHF | 0.613 | 66 | WB | Large T | A2403 |
| 397 | CLLPKMDSVIF | 0.571 | 103 | WB | Large T | A2403 |
| 162 | VYTTKEKAQIL | 0.563 | 112 | WB | Large T | A2403 |
| 365 | RFNHILDKMDL | 0.554 | 124 | WB | Large T | A2403 |
| 553 | YLRKSLQNSEF | 0.528 | 165 | WB | Large T | A2403 |
| 617 | KYNICMGKCIL | 0.509 | 202 | WB | Large T | A2403 |
| 211 | NFCQKLCTFSF | 0.504 | 213 | WB | Large T | A2403 |
| 95 | SFNEKWDEDLF | 0.478 | 285 | WB | Large T | A2403 |
| 187 | RHMCAGHNIIF | 0.466 | 321 | WB | Large T | A2403 |
| 163 | YTTKEKAQILY | 0.631 | 54 | WB | Large T | A2601 |
| 8 | ESMELMDLLGL | 0.474 | 297 | WB | Large T | A2601 |
| 163 | YTTKEKAQILY | 0.728 | 19 | SB | Large T | A2602 |
| 150 | AVFSNRTLACF | 0.703 | 24 | SB | Large T | A2602 |
| 170 | QILYKKLMEKY | 0.637 | 51 | WB | Large T | A2602 |
| 405 | VIFDFLHCVVF | 0.629 | 55 | WB | Large T | A2602 |
| 280 | ETKCEDVFLLL | 0.628 | 56 | WB | Large T | A2602 |
| 463 | GVAIDQYMVVF | 0.624 | 58 | WB | Large T | A2602 |
| 243 | HIIEESIQGGL | 0.535 | 153 | WB | Large T | A2602 |
| 356 | MTREEMLTERF | 0.491 | 247 | WB | Large T | A2602 |
| 142 | DLHQFLSQAVF | 0.472 | 304 | WB | Large T | A2602 |
| 450 | NVNLPMERLTF | 0.453 | 372 | WB | Large T | A2602 |
| 553 | YLRKSLQNSEF | 0.450 | 382 | WB | Large T | A2602 |
| 74 | GTWNSSEVPTY | 0.435 | 453 | WB | Large T | A2602 |
| 8 | ESMELMDLLGL | 0.433 | 462 | WB | Large T | A2602 |
| 221 | FLICKGVNKEY | 0.621 | 60 | WB | Large T | A2902 |
| 288 | LLLGMYLEFQY | 0.600 | 75 | WB | Large T | A2902 |
| 163 | YTTKEKAQILY | 0.475 | 293 | WB | Large T | A2902 |
| 286 | VFLLLGMYLEF | 0.470 | 307 | WB | Large T | A2902 |
| 170 | QILYKKLMEKY | 0.430 | 478 | WB | Large T | A2902 |
| 405 | VIFDFLHCVVF | 0.427 | 492 | WB | Large T | A2902 |
| 50 | KMKRMNTLYKK | 0.760 | 13 | SB | Large T | A3001 |
| 28 | LMRKAYLKKCK | 0.745 | 15 | SB | Large T | A3001 |
| 164 | TTKEKAQILYK | 0.727 | 19 | SB | Large T | A3001 |
| 507 | KVNLEKKHLNK | 0.707 | 23 | SB | Large T | A3001 |
| 680 | CFKRPKTPPPK | 0.688 | 29 | SB | Large T | A3001 |
| 409 | FLHCVVFNVPK | 0.668 | 36 | SB | Large T | A3001 |
| 497 | SLRDYLDGSVK | 0.662 | 38 | SB | Large T | A3001 |
| 158 | ACFAVYTTKEK | 0.661 | 39 | SB | Large T | A3001 |
| 416 | NVPKRRYWLFK | 0.594 | 80 | WB | Large T | A3001 |
| 541 | RFVRQIDFRPK | 0.587 | 87 | WB | Large T | A3001 |
| 215 | KLCTFSFLICK | 0.567 | 107 | WB | Large T | A3001 |
| 348 | KKRVDTLHMTR | 0.563 | 112 | WB | Large T | A3001 |
| 205 | RVSAINNFCQK | 0.546 | 136 | WB | Large T | A3001 |
| 526 | LVTMNEYPVPK | 0.536 | 151 | WB | Large T | A3001 |
| 306 | CQKKDQPYHFK | 0.508 | 204 | WB | Large T | A3001 |
| 118 | TADSQHSTPPK | 0.505 | 211 | WB | Large T | A3001 |
| 272 | KLITEYAVETK | 0.489 | 252 | WB | Large T | A3001 |
| 156 | TLACFAVYTTK | 0.486 | 259 | WB | Large T | A3001 |
| 557 | SLQNSEFLLEK | 0.482 | 271 | WB | Large T | A3001 |
| 169 | AQILYKKLMEK | 0.470 | 309 | WB | Large T | A3001 |
| 539 | QARFVRQIDFR | 0.458 | 353 | WB | Large T | A3001 |
| 581 | IWFRPVADFSK | 0.451 | 378 | WB | Large T | A3001 |
| 574 | MTLLLLLIWFR | 0.433 | 462 | WB | Large T | A3001 |
| 34 | LKKCKEFHPDK | 0.429 | 482 | WB | Large T | A3001 |
| 267 | KQVSWKLITEY | 0.523 | 175 | WB | Large T | A3002 |
| 170 | QILYKKLMEKY | 0.442 | 420 | WB | Large T | A3002 |
| 574 | MTLLLLLIWFR | 0.869 | 4 | SB | Large T | A3101 |
| 50 | KMKRMNTLYKK | 0.838 | 5 | SB | Large T | A3101 |
| 447 | KALNVNLPMER | 0.794 | 9 | SB | Large T | A3101 |
| 145 | QFLSQAVFSNR | 0.744 | 15 | SB | Large T | A3101 |
| 195 | IIFFLTPHRHR | 0.736 | 17 | SB | Large T | A3101 |
| 673 | HLCKGFQCFKR | 0.670 | 35 | SB | Large T | A3101 |
| 539 | QARFVRQIDFR | 0.653 | 42 | SB | Large T | A3101 |
| 355 | HMTREEMLTER | 0.647 | 45 | SB | Large T | A3101 |
| 205 | RVSAINNFCQK | 0.637 | 50 | WB | Large T | A3101 |
| 558 | LQNSEFLLEKR | 0.626 | 57 | WB | Large T | A3101 |
| 541 | RFVRQIDFRPK | 0.624 | 58 | WB | Large T | A3101 |
| 20 | RAAWGNLPLMR | 0.617 | 63 | WB | Large T | A3101 |
| 121 | SQHSTPPKKKR | 0.607 | 70 | WB | Large T | A3101 |
| 621 | CMGKCILDITR | 0.587 | 87 | WB | Large T | A3101 |
| 177 | MEKYSVTFISR | 0.582 | 91 | WB | Large T | A3101 |
| 215 | KLCTFSFLICK | 0.554 | 124 | WB | Large T | A3101 |
| 164 | TTKEKAQILYK | 0.536 | 151 | WB | Large T | A3101 |
| 680 | CFKRPKTPPPK | 0.526 | 169 | WB | Large T | A3101 |
| 534 | VPKTLQARFVR | 0.518 | 183 | WB | Large T | A3101 |
| 193 | HNIIFFLTPHR | 0.500 | 223 | WB | Large T | A3101 |
| 507 | KVNLEKKHLNK | 0.492 | 244 | WB | Large T | A3101 |
| 306 | CQKKDQPYHFK | 0.486 | 259 | WB | Large T | A3101 |
| 526 | LVTMNEYPVPK | 0.467 | 319 | WB | Large T | A3101 |
| 229 | KEYLLYSALTR | 0.466 | 321 | WB | Large T | A3101 |
| 593 | IQSRIVEWKER | 0.449 | 389 | WB | Large T | A3101 |
| 31 | KAYLKKCKEFH | 0.448 | 392 | WB | Large T | A3101 |
| 545 | QIDFRPKIYLR | 0.448 | 393 | WB | Large T | A3101 |
| 401 | KMDSVIFDFLH | 0.443 | 415 | WB | Large T | A3101 |
| 605 | DSEISMYTFSR | 0.438 | 435 | WB | Large T | A3101 |
| 28 | LMRKAYLKKCK | 0.433 | 461 | WB | Large T | A3101 |
| 574 | MTLLLLLIWFR | 0.838 | 5 | SB | Large T | A3301 |
| 195 | IIFFLTPHRHR | 0.685 | 30 | SB | Large T | A3301 |
| 605 | DSEISMYTFSR | 0.684 | 30 | SB | Large T | A3301 |
| 539 | QARFVRQIDFR | 0.650 | 44 | SB | Large T | A3301 |
| 145 | QFLSQAVFSNR | 0.639 | 49 | SB | Large T | A3301 |
| 355 | HMTREEMLTER | 0.625 | 57 | WB | Large T | A3301 |
| 673 | HLCKGFQCFKR | 0.606 | 70 | WB | Large T | A3301 |
| 531 | EYPVPKTLQAR | 0.582 | 92 | WB | Large T | A3301 |
| 545 | QIDFRPKIYLR | 0.484 | 264 | WB | Large T | A3301 |
| 285 | DVFLLLGMYLE | 0.462 | 337 | WB | Large T | A3301 |
| 416 | NVPKRRYWLFK | 0.441 | 424 | WB | Large T | A3301 |
| 177 | MEKYSVTFISR | 0.440 | 428 | WB | Large T | A3301 |
| 574 | MTLLLLLIWFR | 0.820 | 7 | SB | Large T | A6801 |
| 607 | EISMYTFSRMK | 0.808 | 7 | SB | Large T | A6801 |
| 322 | FANAIIFAESK | 0.780 | 10 | SB | Large T | A6801 |
| 605 | DSEISMYTFSR | 0.765 | 12 | SB | Large T | A6801 |
| 195 | IIFFLTPHRHR | 0.762 | 13 | SB | Large T | A6801 |
| 156 | TLACFAVYTTK | 0.756 | 14 | SB | Large T | A6801 |
| 205 | RVSAINNFCQK | 0.712 | 22 | SB | Large T | A6801 |
| 539 | QARFVRQIDFR | 0.695 | 27 | SB | Large T | A6801 |
| 219 | FSFLICKGVNK | 0.676 | 33 | SB | Large T | A6801 |
| 193 | HNIIFFLTPHR | 0.673 | 34 | SB | Large T | A6801 |
| 673 | HLCKGFQCFKR | 0.665 | 37 | SB | Large T | A6801 |
| 164 | TTKEKAQILYK | 0.656 | 41 | SB | Large T | A6801 |
| 355 | HMTREEMLTER | 0.654 | 42 | SB | Large T | A6801 |
| 526 | LVTMNEYPVPK | 0.641 | 48 | SB | Large T | A6801 |
| 416 | NVPKRRYWLFK | 0.635 | 51 | WB | Large T | A6801 |
| 340 | QAVDTVLAKKR | 0.620 | 61 | WB | Large T | A6801 |
| 409 | FLHCVVFNVPK | 0.589 | 85 | WB | Large T | A6801 |
| 20 | RAAWGNLPLMR | 0.562 | 114 | WB | Large T | A6801 |
| 325 | AIIFAESKNQK | 0.554 | 124 | WB | Large T | A6801 |
| 56 | TLYKKMEQDVK | 0.549 | 131 | WB | Large T | A6801 |
| 163 | YTTKEKAQILY | 0.548 | 132 | WB | Large T | A6801 |
| 467 | DQYMVVFEDVK | 0.534 | 155 | WB | Large T | A6801 |
| 391 | GVAWLHCLLPK | 0.521 | 178 | WB | Large T | A6801 |
| 608 | ISMYTFSRMKY | 0.493 | 240 | WB | Large T | A6801 |
| 295 | EFQYNVEECKK | 0.489 | 251 | WB | Large T | A6801 |
| 25 | NLPLMRKAYLK | 0.482 | 272 | WB | Large T | A6801 |
| 447 | KALNVNLPMER | 0.477 | 288 | WB | Large T | A6801 |
| 545 | QIDFRPKIYLR | 0.471 | 305 | WB | Large T | A6801 |
| 362 | LTERFNHILDK | 0.463 | 332 | WB | Large T | A6801 |
| 177 | MEKYSVTFISR | 0.463 | 335 | WB | Large T | A6801 |
| 145 | QFLSQAVFSNR | 0.460 | 343 | WB | Large T | A6801 |
| 423 | WLFKGPIDSGK | 0.456 | 361 | WB | Large T | A6801 |
| 118 | TADSQHSTPPK | 0.435 | 450 | WB | Large T | A6801 |
| 557 | SLQNSEFLLEK | 0.430 | 477 | WB | Large T | A6801 |
| 189 | MCAGHNIIFFL | 0.792 | 9 | SB | Large T | A6802 |
| 217 | CTFSFLICKGV | 0.752 | 14 | SB | Large T | A6802 |
| 404 | SVIFDFLHCVV | 0.734 | 17 | SB | Large T | A6802 |
| 382 | NAVLEQYMAGV | 0.680 | 31 | SB | Large T | A6802 |
| 403 | DSVIFDFLHCV | 0.654 | 42 | SB | Large T | A6802 |
| 8 | ESMELMDLLGL | 0.653 | 42 | SB | Large T | A6802 |
| 152 | FSNRTLACFAV | 0.617 | 62 | WB | Large T | A6802 |
| 290 | LGMYLEFQYNV | 0.606 | 70 | WB | Large T | A6802 |
| 462 | LGVAIDQYMVV | 0.591 | 83 | WB | Large T | A6802 |
| 268 | QVSWKLITEYA | 0.576 | 98 | WB | Large T | A6802 |
| 280 | ETKCEDVFLLL | 0.573 | 101 | WB | Large T | A6802 |
| 11 | ELMDLLGLERA | 0.570 | 105 | WB | Large T | A6802 |
| 234 | YSALTRDPYHI | 0.549 | 132 | WB | Large T | A6802 |
| 388 | YMAGVAWLHCL | 0.531 | 159 | WB | Large T | A6802 |
| 243 | HIIEESIQGGL | 0.507 | 206 | WB | Large T | A6802 |
| 181 | SVTFISRHMCA | 0.503 | 216 | WB | Large T | A6802 |
| 407 | FDFLHCVVFNV | 0.489 | 251 | WB | Large T | A6802 |
| 374 | DLIFGAHGNAV | 0.480 | 277 | WB | Large T | A6802 |
| 542 | FVRQIDFRPKI | 0.446 | 400 | WB | Large T | A6802 |
| 212 | FCQKLCTFSFL | 0.433 | 460 | WB | Large T | A6802 |
| 461 | ELGVAIDQYMV | 0.429 | 484 | WB | Large T | A6802 |
| 388 | YMAGVAWLHCL | 0.652 | 42 | SB | Large T | A6901 |
| 461 | ELGVAIDQYMV | 0.575 | 99 | WB | Large T | A6901 |
| 374 | DLIFGAHGNAV | 0.573 | 102 | WB | Large T | A6901 |
| 8 | ESMELMDLLGL | 0.560 | 116 | WB | Large T | A6901 |
| 152 | FSNRTLACFAV | 0.541 | 143 | WB | Large T | A6901 |
| 11 | ELMDLLGLERA | 0.539 | 145 | WB | Large T | A6901 |
| 576 | LLLLLIWFRPV | 0.519 | 182 | WB | Large T | A6901 |
| 404 | SVIFDFLHCVV | 0.512 | 196 | WB | Large T | A6901 |
| 360 | EMLTERFNHIL | 0.498 | 228 | WB | Large T | A6901 |
| 189 | MCAGHNIIFFL | 0.474 | 297 | WB | Large T | A6901 |
| 243 | HIIEESIQGGL | 0.472 | 303 | WB | Large T | A6901 |
| 382 | NAVLEQYMAGV | 0.470 | 309 | WB | Large T | A6901 |
| 217 | CTFSFLICKGV | 0.457 | 355 | WB | Large T | A6901 |
| 269 | VSWKLITEYAV | 0.443 | 414 | WB | Large T | A6901 |
| 55 | NTLYKKMEQDV | 0.432 | 464 | WB | Large T | A6901 |
| 532 | YPVPKTLQARF | 0.646 | 46 | SB | Large T | B0702 |
| 553 | YLRKSLQNSEF | 0.492 | 244 | WB | Large T | B0801 |
| 267 | KQVSWKLITEY | 0.566 | 109 | WB | Large T | B1501 |
| 538 | LQARFVRQIDF | 0.565 | 110 | WB | Large T | B1501 |
| 553 | YLRKSLQNSEF | 0.561 | 116 | WB | Large T | B1501 |
| 188 | HMCAGHNIIFF | 0.554 | 124 | WB | Large T | B1501 |
| 388 | YMAGVAWLHCL | 0.542 | 141 | WB | Large T | B1501 |
| 221 | FLICKGVNKEY | 0.541 | 142 | WB | Large T | B1501 |
| 544 | RQIDFRPKIYL | 0.521 | 178 | WB | Large T | B1501 |
| 579 | LLIWFRPVADF | 0.518 | 183 | WB | Large T | B1501 |
| 519 | TQIFPPGLVTM | 0.480 | 276 | WB | Large T | B1501 |
| 232 | LLYSALTRDPY | 0.478 | 283 | WB | Large T | B1501 |
| 405 | VIFDFLHCVVF | 0.474 | 295 | WB | Large T | B1501 |
| 608 | ISMYTFSRMKY | 0.450 | 384 | WB | Large T | B1501 |
| 150 | AVFSNRTLACF | 0.434 | 457 | WB | Large T | B1501 |
| 570 | LQSGMTLLLLL | 0.429 | 483 | WB | Large T | B1501 |
| 668 | HSQELHLCKGF | 0.426 | 495 | WB | Large T | B1501 |
| 86 | TEEWESWWSSF | 0.650 | 44 | SB | Large T | B1801 |
| 460 | FELGVAIDQYM | 0.643 | 47 | SB | Large T | B1801 |
| 318 | HEKHFANAIIF | 0.625 | 57 | WB | Large T | B1801 |
| 18 | LERAAWGNLPL | 0.572 | 102 | WB | Large T | B1801 |
| 79 | SEVPTYGTEEW | 0.556 | 122 | WB | Large T | B1801 |
| 601 | KERLDSEISMY | 0.505 | 210 | WB | Large T | B1801 |
| 664 | SENPHSQELHL | 0.497 | 230 | WB | Large T | B1801 |
| 532 | YPVPKTLQARF | 0.461 | 341 | WB | Large T | B1801 |
| 614 | SRMKYNICMGK | 0.547 | 134 | WB | Large T | B2705 |
| 567 | KRILQSGMTLL | 0.507 | 207 | WB | Large T | B2705 |
| 544 | RQIDFRPKIYL | 0.450 | 382 | WB | Large T | B2705 |
| 548 | FRPKIYLRKSL | 0.450 | 385 | WB | Large T | B2705 |
| 522 | FPPGLVTMNEY | 0.812 | 7 | SB | Large T | B3501 |
| 532 | YPVPKTLQARF | 0.780 | 10 | SB | Large T | B3501 |
| 277 | YAVETKCEDVF | 0.742 | 16 | SB | Large T | B3501 |
| 399 | LPKMDSVIFDF | 0.560 | 116 | WB | Large T | B3501 |
| 41 | HPDKGGDEDKM | 0.545 | 136 | WB | Large T | B3501 |
| 392 | VAWLHCLLPKM | 0.532 | 158 | WB | Large T | B3501 |
| 139 | FPSDLHQFLSQ | 0.494 | 238 | WB | Large T | B3501 |
| 232 | LLYSALTRDPY | 0.453 | 371 | WB | Large T | B3501 |
| 459 | TFELGVAIDQY | 0.442 | 417 | WB | Large T | B3501 |
| 317 | YHEKHFANAII | 0.586 | 88 | WB | Large T | B3901 |
| 388 | YMAGVAWLHCL | 0.549 | 130 | WB | Large T | B3901 |
| 6 | REESMELMDLL | 0.673 | 34 | SB | Large T | B4001 |
| 664 | SENPHSQELHL | 0.668 | 36 | SB | Large T | B4001 |
| 18 | LERAAWGNLPL | 0.630 | 54 | WB | Large T | B4001 |
| 385 | LEQYMAGVAWL | 0.562 | 114 | WB | Large T | B4001 |
| 460 | FELGVAIDQYM | 0.552 | 126 | WB | Large T | B4001 |
| 279 | VETKCEDVFLL | 0.540 | 145 | WB | Large T | B4001 |
| 606 | SEISMYTFSRM | 0.498 | 228 | WB | Large T | B4001 |
| 133 | VEDPKDFPSDL | 0.446 | 399 | WB | Large T | B4001 |
| 166 | KEKAQILYKKL | 0.440 | 428 | WB | Large T | B4001 |
| 47 | DEDKMKRMNTL | 0.434 | 458 | WB | Large T | B4001 |
| 664 | SENPHSQELHL | 0.540 | 144 | WB | Large T | B4002 |
| 6 | REESMELMDLL | 0.511 | 198 | WB | Large T | B4002 |
| 264 | EETKQVSWKLI | 0.502 | 219 | WB | Large T | B4002 |
| 318 | HEKHFANAIIF | 0.459 | 347 | WB | Large T | B4002 |
| 359 | EEMLTERFNHI | 0.445 | 403 | WB | Large T | B4002 |
| 279 | VETKCEDVFLL | 0.432 | 464 | WB | Large T | B4002 |
| 79 | SEVPTYGTEEW | 0.512 | 196 | WB | Large T | B4402 |
| 261 | EEPEETKQVSW | 0.484 | 267 | WB | Large T | B4402 |
| 561 | SEFLLEKRILQ | 0.477 | 287 | WB | Large T | B4403 |
| 664 | SENPHSQELHL | 0.464 | 331 | WB | Large T | B4403 |
| 606 | SEISMYTFSRM | 0.457 | 356 | WB | Large T | B4403 |
| 79 | SEVPTYGTEEW | 0.452 | 375 | WB | Large T | B4403 |
| 261 | EEPEETKQVSW | 0.438 | 438 | WB | Large T | B4403 |
| 359 | EEMLTERFNHI | 0.482 | 271 | WB | Large T | B4501 |
| 115 | EEATADSQHST | 0.450 | 383 | WB | Large T | B4501 |
| 453 | LPMERLTFELG | 0.470 | 309 | WB | Large T | B5101 |
| 532 | YPVPKTLQARF | 0.433 | 463 | WB | Large T | B5101 |
| 522 | FPPGLVTMNEY | 0.689 | 28 | SB | Large T | B5301 |
| 532 | YPVPKTLQARF | 0.645 | 46 | SB | Large T | B5301 |
| 399 | LPKMDSVIFDF | 0.555 | 122 | WB | Large T | B5301 |
| 277 | YAVETKCEDVF | 0.474 | 296 | WB | Large T | B5301 |
| 453 | LPMERLTFELG | 0.580 | 93 | WB | Large T | B5401 |
| 522 | FPPGLVTMNEY | 0.544 | 138 | WB | Large T | B5401 |
| 427 | GPIDSGKTTLA | 0.508 | 204 | WB | Large T | B5401 |
| 82 | PTYGTEEWESW | 0.576 | 98 | WB | Large T | B5701 |
| 90 | ESWWSSFNEKW | 0.678 | 32 | SB | Large T | B5801 |
| 66 | KVAHQPDFGTW | 0.658 | 40 | SB | Large T | B5801 |
| 572 | SGMTLLLLLIW | 0.539 | 146 | WB | Large T | B5801 |
| 413 | VVFNVPKRRYW | 0.527 | 167 | WB | Large T | B5801 |
| 277 | YAVETKCEDVF | 0.495 | 235 | WB | Large T | B5801 |
| 608 | ISMYTFSRMKY | 0.487 | 258 | WB | Large T | B5801 |
| 82 | PTYGTEEWESW | 0.458 | 353 | WB | Large T | B5801 |

[0901] Preferred BK virus fragments of agnoprotein capable of interacting with one or more MHC class I molecules are listed in Table N.

TABLE N
Prediction of BK virus Agnoprotein specific MHC
class 1, 8-, 9-, 10-, 11-mer peptide binders for
42 MHC class 1 alleles (see FIG. 11) using the
http://www.cbs.dtu.dk/services/NetMHC/ database.
The MHC class 1 molecules for which no
binders were found are not listed.

| | | | | | | |
|---|---|---|---|---|---|---|
| | | | | | Pro- | |
| | | | affinity | Bind | tein | |
| pos | peptide | logscore | (nM) | Level | Name | Allele |

8-mers

| | | | | | | |
|---|---|---|---|---|---|---|
| 36 | FIFILELL | 0.641 | 48 | SB | Agno | A0201 |
| 59 | STTALPAV | 0.453 | 373 | WB | Agno | A0201 |
| 36 | FIFILELL | 0.785 | 10 | SB | Agno | A0202 |
| 12 | QLSRQASV | 0.702 | 25 | SB | Agno | A0202 |
| 12 | QLSRQASV | 0.712 | 22 | SB | Agno | A0203 |
| 59 | STTALPAV | 0.537 | 149 | WB | Agno | A0203 |
| 36 | FIFILELL | 0.524 | 171 | WB | Agno | A0203 |
| 32 | AQRIFIFI | 0.503 | 216 | WB | Agno | A0203 |
| 6 | NLVVLRQL | 0.431 | 473 | WB | Agno | A0203 |
| 12 | QLSRQASV | 0.508 | 206 | WB | Agno | A0204 |
| 59 | STTALPAV | 0.489 | 252 | WB | Agno | A0204 |
| 32 | AQRIFIFI | 0.646 | 46 | SB | Agno | A0206 |
| 36 | FIFILELL | 0.585 | 89 | WB | Agno | A0206 |
| 59 | STTALPAV | 0.582 | 92 | WB | Agno | A0206 |
| 12 | QLSRQASV | 0.479 | 281 | WB | Agno | A0206 |
| 38 | FILELLLE | 0.474 | 297 | WB | Agno | A0206 |
| — | | | | | | |
| 12 | QLSRQASV | 0.883 | 3 | SB | Agno | A0211 |
| 36 | FIFILELL | 0.782 | 10 | SB | Agno | A0211 |
| 59 | STTALPAV | 0.695 | 27 | SB | Agno | A0211 |
| 6 | NLVVLRQL | 0.688 | 29 | SB | Agno | A0211 |
| 12 | QLSRQASV | 0.825 | 6 | SB | Agno | A0212 |
| 36 | FIFILELL | 0.705 | 24 | SB | Agno | A0212 |
| 59 | STTALPAV | 0.504 | 214 | WB | Agno | A0212 |
| 46 | FCRGEDSV | 0.502 | 219 | WB | Agno | A0212 |
| 12 | QLSRQASV | 0.877 | 3 | SB | Agno | A0216 |
| 36 | FIFILELL | 0.643 | 47 | SB | Agno | A0216 |
| 6 | NLVVLRQL | 0.580 | 93 | WB | Agno | A0216 |
| 59 | STTALPAV | 0.474 | 294 | WB | Agno | A0216 |
| 1 | FCEPKNLV | 0.427 | 494 | WB | Agno | A0216 |
| 12 | QLSRQASV | 0.746 | 15 | SB | Agno | A0219 |
| 59 | STTALPAV | 0.455 | 364 | WB | Agno | A0219 |
| 23 | KTWTGTKK | 0.662 | 38 | SB | Agno | A0301 |
| 60 | TTALPAVK | 0.568 | 107 | WB | Agno | A0301 |
| 8 | VVLRQLSR | 0.444 | 408 | WB | Agno | A0301 |
| 13 | LSRQASVK | 0.436 | 444 | WB | Agno | A0301 |
| 60 | TTALPAVK | 0.785 | 10 | SB | Agno | A1101 |
| 23 | KTWTGTKK | 0.637 | 50 | WB | Agno | A1101 |
| 8 | VVLRQLSR | 0.554 | 124 | WB | Agno | A1101 |
| 16 | QASVKVGK | 0.458 | 351 | WB | Agno | A1101 |
| 35 | IFIFILEL | 0.573 | 101 | WB | Agno | A2301 |
| 31 | RAQRIFIF | 0.514 | 191 | WB | Agno | A2301 |
| 37 | IFILELLL | 0.454 | 367 | WB | Agno | A2301 |
| 37 | IFILELLL | 0.536 | 150 | WB | Agno | A2402 |
| 35 | IFIFILEL | 0.478 | 284 | WB | Agno | A2402 |
| 31 | RAQRIFIF | 0.431 | 472 | WB | Agno | A2402 |
| 31 | RAQRIFIF | 0.449 | 386 | WB | Agno | A2403 |
| 13 | LSRQASVK | 0.690 | 28 | SB | Agno | A3001 |
| 23 | KTWTGTKK | 0.659 | 40 | SB | Agno | A3001 |
| 27 | GTKKRAQR | 0.803 | 8 | SB | Agno | A3101 |
| 23 | KTWTGTKK | 0.648 | 45 | SB | Agno | A3101 |
| 8 | VVLRQLSR | 0.587 | 87 | WB | Agno | A3101 |
| 41 | ELLLEFCR | 0.701 | 25 | SB | Agno | A3301 |
| 27 | GTKKRAQR | 0.564 | 111 | WB | Agno | A3301 |
| 8 | VVLRQLSR | 0.466 | 323 | WB | Agno | A3301 |
| 60 | TTALPAVK | 0.774 | 11 | SB | Agno | A6801 |
| 41 | ELLLEFCR | 0.627 | 56 | WB | Agno | A6801 |
| 27 | GTKKRAQR | 0.537 | 150 | WB | Agno | A6801 |
| 16 | QASVKVGK | 0.459 | 349 | WB | Agno | A6801 |
| 51 | DSVDGKNK | 0.431 | 473 | WB | Agno | A6801 |
| 59 | STTALPAV | 0.655 | 42 | SB | Agno | A6802 |
| 33 | QRIFIFIL | 0.552 | 127 | WB | Agno | A6802 |
| 36 | FIFILELL | 0.512 | 195 | WB | Agno | A6802 |
| 59 | STTALPAV | 0.674 | 34 | SB | Agno | A6901 |
| 36 | FIFILELL | 0.441 | 424 | WB | Agno | A6901 |
| 63 | LPAVKDSV | 0.582 | 91 | WB | Agno | B0702 |
| 3 | EPKNLVVL | 0.427 | 490 | WB | Agno | B0702 |
| 33 | QRIFIFIL | 0.431 | 472 | WB | Agno | B2705 |
| 3 | EPKNLVVL | 0.518 | 184 | WB | Agno | B3501 |
| 63 | LPAVKDSV | 0.585 | 88 | WB | Agno | B5101 |
| 3 | EPKNLVVL | 0.456 | 358 | WB | Agno | B5301 |
| 63 | LPAVKDSV | 0.745 | 15 | SB | Agno | B5401 |
| 31 | RAQRIFIF | 0.503 | 215 | WB | Agno | B5801 |

9-mers

| | | | | | | |
|---|---|---|---|---|---|---|
| 34 | RIFIFILEL | 0.674 | 34 | SB | Agno | A0201 |
| 36 | FIFILELLL | 0.613 | 66 | WB | Agno | A0201 |
| 11 | RQLSRQASV | 0.561 | 115 | WB | Agno | A0201 |
| 62 | ALPAVKDSV | 0.503 | 215 | WB | Agno | A0201 |
| 38 | FILELLLEF | 0.448 | 392 | WB | Agno | A0201 |
| 36 | FIFILELLL | 0.698 | 26 | SB | Agno | A0202 |
| 62 | ALPAVKDSV | 0.609 | 68 | WB | Agno | A0202 |
| 34 | RIFIFILEL | 0.540 | 144 | WB | Agno | A0202 |
| 11 | RQLSRQASV | 0.688 | 29 | SB | Agno | A0203 |
| 62 | ALPAVKDSV | 0.667 | 36 | SB | Agno | A0203 |
| 9 | VLRQLSRQA | 0.455 | 362 | WB | Agno | A0203 |
| 34 | RIFIFILEL | 0.439 | 433 | WB | Agno | A0203 |
| 62 | ALPAVKDSV | 0.515 | 190 | WB | Agno | A0204 |
| 11 | RQLSRQASV | 0.855 | 4 | SB | Agno | A0206 |
| 38 | FILELLLEF | 0.731 | 18 | SB | Agno | A0206 |
| 62 | ALPAVKDSV | 0.588 | 86 | WB | Agno | A0206 |
| 32 | AQRIFIFIL | 0.561 | 116 | WB | Agno | A0206 |
| 58 | KSTTALPAV | 0.559 | 118 | WB | Agno | A0206 |
| 34 | RIFIFILEL | 0.506 | 208 | WB | Agno | A0206 |
| 31 | RAQRIFIFI | 0.487 | 256 | WB | Agno | A0206 |
| 36 | FIFILELLL | 0.455 | 365 | WB | Agno | A0206 |
| 62 | ALPAVKDSV | 0.927 | 2 | SB | Agno | A0211 |
| 34 | RIFIFILEL | 0.836 | 5 | SB | Agno | A0211 |
| 36 | FIFILELLL | 0.796 | 9 | SB | Agno | A0211 |
| 38 | FILELLLEF | 0.621 | 60 | WB | Agno | A0211 |
| 9 | VLRQLSRQA | 0.546 | 135 | WB | Agno | A0211 |
| 11 | RQLSRQASV | 0.445 | 405 | WB | Agno | A0211 |
| 62 | ALPAVKDSV | 0.904 | 2 | SB | Agno | A0212 |
| 36 | FIFILELLL | 0.746 | 15 | SB | Agno | A0212 |
| 34 | RIFIFILEL | 0.679 | 32 | SB | Agno | A0212 |
| 38 | FILELLLEF | 0.614 | 65 | WB | Agno | A0212 |
| 11 | RQLSRQASV | 0.545 | 138 | WB | Agno | A0212 |
| 1 | FCEPKNLVV | 0.473 | 300 | WB | Agno | A0212 |
| 42 | LLLEFCRGE | 0.465 | 327 | WB | Agno | A0212 |
| 9 | VLRQLSRQA | 0.442 | 416 | WB | Agno | A0212 |
| 62 | ALPAVKDSV | 0.922 | 2 | SB | Agno | A0216 |
| 34 | RIFIFILEL | 0.732 | 18 | SB | Agno | A0216 |
| 36 | FIFILELLL | 0.654 | 42 | SB | Agno | A0216 |
| 11 | RQLSRQASV | 0.490 | 247 | WB | Agno | A0216 |
| 62 | ALPAVKDSV | 0.778 | 11 | SB | Agno | A0219 |
| 12 | QLSRQASVK | 0.643 | 47 | SB | Agno | A0301 |
| 15 | RQASVKVGK | 0.538 | 148 | WB | Agno | A0301 |
| 59 | STTALPAVK | 0.461 | 341 | WB | Agno | A0301 |
| 59 | STTALPAVK | 0.825 | 6 | SB | Agno | A1101 |
| 15 | RQASVKVGK | 0.624 | 58 | WB | Agno | A1101 |
| 7 | LVVLRQLSR | 0.460 | 345 | WB | Agno | A1101 |
| 35 | IFIFILELL | 0.514 | 192 | WB | Agno | A2301 |
| 38 | FILELLLEF | 0.473 | 300 | WB | Agno | A2301 |
| 35 | IFIFILELL | 0.610 | 67 | WB | Agno | A2402 |
| 38 | FILELLLEF | 0.532 | 157 | WB | Agno | A2403 |
| 38 | FILELLLEF | 0.598 | 77 | WB | Agno | A2602 |
| 38 | FILELLLEF | 0.463 | 334 | WB | Agno | A2902 |
| 21 | VGKTWTGTK | 0.528 | 165 | WB | Agno | A3001 |
| 59 | STTALPAVK | 0.477 | 285 | WB | Agno | A3001 |
| 29 | KKRAQRIFI | 0.452 | 377 | WB | Agno | A3001 |
| 23 | KTWTGTKKR | 0.727 | 19 | SB | Agno | A3101 |
| 15 | RQASVKVGK | 0.617 | 62 | WB | Agno | A3101 |
| 26 | TGTKKRAQR | 0.524 | 172 | WB | Agno | A3101 |
| 7 | LVVLRQLSR | 0.506 | 210 | WB | Agno | A3101 |
| 59 | STTALPAVK | 0.486 | 260 | WB | Agno | A3101 |
| 7 | LVVLRQLSR | 0.666 | 37 | SB | Agno | A3301 |
| 3 | EPKNLVVLR | 0.510 | 201 | WB | Agno | A3301 |
| 59 | STTALPAVK | 0.728 | 19 | SB | Agno | A6801 |
| 3 | EPKNLVVLR | 0.667 | 36 | SB | Agno | A6801 |
| 7 | LVVLRQLSR | 0.664 | 37 | SB | Agno | A6801 |
| 31 | RAQRIFIFI | 0.609 | 68 | WB | Agno | A6802 |
| 38 | FILELLLEF | 0.453 | 371 | WB | Agno | B1801 |
| 15 | RQASVKVGK | 0.566 | 109 | WB | Agno | B2705 |
| 30 | KRAQRIFIF | 0.523 | 174 | WB | Agno | B2705 |
| 11 | RQLSRQASV | 0.449 | 390 | WB | Agno | B2705 |
| 3 | | | | | | |
| 38 | FILELLLEF | 0.505 | 211 | WB | Agno | B3501 |
| 2 | CEPKNLVVL | 0.521 | 179 | WB | Agno | B4001 |
| 17 | ASVKVGKTW | 0.443 | 414 | WB | Agno | B5701 |
| 17 | ASVKVGKTW | 0.572 | 103 | WB | Agno | B5801 |

10-mers

| | | | | | | |
|---|---|---|---|---|---|---|
| 34 | RIFIFILELL | 0.605 | 71 | WB | Agno | A0201 |
| 38 | FILELLLEFC | 0.449 | 388 | WB | Agno | A0201 |
| 34 | RIFIFILELL | 0.719 | 20 | SB | Agno | A0202 |
| 38 | FILELLLEFC | 0.622 | 59 | WB | Agno | A0202 |
| 12 | QLSRQASVKV | 0.449 | 386 | WB | Agno | A0202 |
| 12 | QLSRQASVKV | 0.588 | 86 | WB | Agno | A0203 |
| 34 | RIFIFILELL | 0.456 | 359 | WB | Agno | A0203 |
| 12 | QLSRQASVKV | 0.503 | 215 | WB | Agno | A0204 |
| 38 | FILELLLEFC | 0.656 | 41 | SB | Agno | A0206 |
| 34 | RIFIFILELL | 0.549 | 131 | WB | Agno | A0206 |
| 61 | TALPAVKDSV | 0.450 | 382 | WB | Agno | A0206 |
| 12 | QLSRQASVKV | 0.859 | 4 | SB | Agno | A0211 |
| 34 | RIFIFILELL | 0.772 | 11 | SB | Agno | A0211 |
| 38 | FILELLLEFC | 0.626 | 57 | WB | Agno | A0211 |
| 61 | TALPAVKDSV | 0.569 | 106 | WB | Agno | A0211 |
| 12 | QLSRQASVKV | 0.754 | 14 | SB | Agno | A0212 |
| 38 | FILELLLEFC | 0.627 | 56 | WB | Agno | A0212 |
| 34 | RIFIFILELL | 0.497 | 231 | WB | Agno | A0212 |
| 61 | TALPAVKDSV | 0.433 | 461 | WB | Agno | A0212 |
| 12 | QLSRQASVKV | 0.843 | 5 | SB | Agno | A0216 |
| 34 | RIFIFILELL | 0.581 | 92 | WB | Agno | A0216 |
| 61 | TALPAVKDSV | 0.550 | 130 | WB | Agno | A0216 |
| 12 | QLSRQASVKV | 0.632 | 53 | WB | Agno | A0219 |
| 61 | TALPAVKDSV | 0.549 | 131 | WB | Agno | A0219 |
| 11 | RQLSRQASVK | 0.636 | 51 | WB | Agno | A0301 |
| 58 | KSTTALPAVK | 0.532 | 158 | WB | Agno | A0301 |
| 20 | KVGKTWTGTK | 0.496 | 234 | WB | Agno | A0301 |
| 62 | ALPAVKDSVK | 0.452 | 375 | WB | Agno | A0301 |
| 58 | KSTTALPAVK | 0.688 | 29 | SB | Agno | A1101 |
| 20 | KVGKTWTGTK | 0.671 | 35 | SB | Agno | A1101 |
| 11 | RQLSRQASVK | 0.620 | 60 | WB | Agno | A1101 |
| 62 | ALPAVKDSVK | 0.445 | 404 | WB | Agno | A1101 |
| 37 | IFILELLLEF | 0.695 | 27 | SB | Agno | A2301 |
| 35 | IFIFILELLL | 0.487 | 256 | WB | Agno | A2301 |
| 37 | IFILELLLEF | 0.663 | 38 | SB | Agno | A2402 |
| 35 | IFIFILELLL | 0.622 | 59 | WB | Agno | A2402 |
| 37 | IFILELLLEF | 0.663 | 38 | SB | Agno | A2403 |
| 37 | IFILELLLEF | 0.470 | 309 | WB | Agno | A2902 |
| 20 | KVGKTWTGTK | 0.787 | 10 | SB | Agno | A3001 |
| 58 | KSTTALPAVK | 0.557 | 120 | WB | Agno | A3001 |
| 11 | RQLSRQASVK | 0.509 | 202 | WB | Agno | A3001 |
| 6 | NLVVLRQLSR | 0.567 | 108 | WB | Agno | A3101 |
| 39 | ILELLLEFCR | 0.521 | 177 | WB | Agno | A3101 |
| 25 | WTGTKKRAQR | 0.504 | 214 | WB | Agno | A3101 |
| 39 | ILELLLEFCR | 0.523 | 173 | WB | Agno | A3301 |
| 6 | NLVVLRQLSR | 0.485 | 262 | WB | Agno | A3301 |
| 6 | NLVVLRQLSR | 0.604 | 72 | WB | Agno | A6801 |
| 39 | ILELLLEFCR | 0.479 | 279 | WB | Agno | A6801 |
| 25 | WTGTKKRAQR | 0.465 | 326 | WB | Agno | A6801 |
| 33 | QRIFIFILEL | 0.528 | 164 | WB | Agno | A6802 |
| 61 | TALPAVKDSV | 0.473 | 301 | WB | Agno | A6802 |
| 34 | RIFIFILELL | 0.467 | 321 | WB | Agno | A6802 |
| 61 | TALPAVKDSV | 0.448 | 394 | WB | Agno | A6901 |
| 11 | RQLSRQASVK | 0.534 | 154 | WB | Agno | B2705 |
| 14 | SRQASVKVGK | 0.516 | 188 | WB | Agno | B2705 |
| 33 | QRIFIFILEL | 0.469 | 312 | WB | Agno | B2705 |
| 16 | QASVKVGKTW | 0.632 | 53 | WB | Agno | B5801 |

11-mers

| | | | | | | |
|---|---|---|---|---|---|---|
| 34 | RIFIFILELLL | 0.552 | 127 | WB | Agno | A0201 |
| 11 | RQLSRQASVKV | 0.460 | 344 | WB | Agno | A0201 |
| 43 | LLEFCRGEDSV | 0.586 | 87 | WB | Agno | A0202 |
| 34 | RIFIFILELLL | 0.503 | 216 | WB | Agno | A0202 |
| 9 | VLRQLSRQASV | 0.497 | 229 | WB | Agno | A0202 |
| 9 | VLRQLSRQASV | 0.814 | 7 | SB | Agno | A0203 |
| 11 | RQLSRQASVKV | 0.508 | 205 | WB | Agno | A0203 |
| 43 | LLEFCRGEDSV | 0.483 | 267 | WB | Agno | A0203 |
| 32 | AQRIFIFILEL | 0.446 | 400 | WB | Agno | A0203 |
| 9 | VLRQLSRQASV | 0.447 | 398 | WB | Agno | A0204 |
| 11 | RQLSRQASVKV | 0.776 | 11 | SB | Agno | A0206 |
| 32 | AQRIFIFILEL | 0.584 | 90 | WB | Agno | A0206 |
| 9 | VLRQLSRQASV | 0.887 | 3 | SB | Agno | A0211 |
| 34 | RIFIFILELLL | 0.793 | 9 | SB | Agno | A0211 |
| 43 | LLEFCRGEDSV | 0.747 | 15 | SB | Agno | A0211 |
| 52 | SVDGKNKSTTA | 0.612 | 66 | WB | Agno | A0211 |
| 11 | RQLSRQASVKV | 0.433 | 463 | WB | Agno | A0211 |
| 36 | FIFILELLLEF | 0.429 | 481 | WB | Agno | A0211 |
| 9 | VLRQLSRQASV | 0.876 | 3 | SB | Agno | A0212 |
| 34 | RIFIFILELLL | 0.586 | 88 | WB | Agno | A0212 |
| 43 | LLEFCRGEDSV | 0.585 | 89 | WB | Agno | A0212 |
| 38 | FILELLLEFCR | 0.454 | 369 | WB | Agno | A0212 |
| 11 | RQLSRQASVKV | 0.442 | 417 | WB | Agno | A0212 |
| 9 | VLRQLSRQASV | 0.838 | 5 | SB | Agno | A0216 |
| 43 | LLEFCRGEDSV | 0.725 | 19 | SB | Agno | A0216 |
| 34 | RIFIFILELLL | 0.606 | 71 | WB | Agno | A0216 |
| 60 | TTALPAVKDSV | 0.460 | 346 | WB | Agno | A0216 |
| 52 | SVDGKNKSTTA | 0.455 | 365 | WB | Agno | A0216 |
| 9 | VLRQLSRQASV | 0.674 | 33 | SB | Agno | A0219 |
| 43 | LLEFCRGEDSV | 0.477 | 285 | WB | Agno | A0219 |
| 20 | KVGKTWTGTKK | 0.660 | 39 | SB | Agno | A0301 |
| 20 | KVGKTWTGTKK | 0.617 | 63 | WB | Agno | A1101 |
| 61 | TALPAVKDSVK | 0.508 | 204 | WB | Agno | A1101 |
| 36 | FIFILELLLEF | 0.535 | 152 | WB | Agno | A2602 |
| 36 | FIFILELLLEF | 0.571 | 103 | WB | Agno | A2902 |
| 13 | LSRQASVKVGK | 0.753 | 14 | SB | Agno | A3001 |
| 20 | KVGKTWTGTKK | 0.713 | 22 | SB | Agno | A3001 |
| 5 | KNLVVLRQLSR | 0.558 | 119 | WB | Agno | A3101 |
| 24 | TWTGTKKRAQR | 0.496 | 232 | WB | Agno | A3101 |
| 38 | FILELLLEFCR | 0.469 | 313 | WB | Agno | A3101 |
| 38 | FILELLLEFCR | 0.616 | 63 | WB | Agno | A3301 |
| 38 | FILELLLEFCR | 0.611 | 67 | WB | Agno | A6801 |
| 24 | TWTGTKKRAQR | 0.442 | 419 | WB | Agno | A6801 |
| 61 | TALPAVKDSVK | 0.439 | 434 | WB | Agno | A6801 |
| 60 | TTALPAVKDSV | 0.850 | 5 | SB | Agno | A6802 |
| 33 | QRIFIFILELL | 0.650 | 43 | SB | Agno | A6802 |
| 60 | TTALPAVKDSV | 0.545 | 136 | WB | Agno | A6901 |
| 32 | AQRIFIFILEL | 0.471 | 305 | WB | Agno | B1501 |
| 36 | FIFILELLLEF | 0.436 | 448 | WB | Agno | B1501 |
| 15 | RQASVKVGKTW | 0.427 | 491 | WB | Agno | B1501 |
| 30 | KRAQRIFIFIL | 0.478 | 284 | WB | Agno | B2705 |
| 36 | FIFILELLLEF | 0.451 | 378 | WB | Agno | B3501 |
| 30 | KRAQRIFIFIL | 0.455 | 362 | WB | Agno | B3901 |
| 15 | RQASVKVGKTW | 0.573 | 100 | WB | Agno | B5801 |

[0902] Preferred BK virus fragments capable of interacting with one or more MHC class 2 molecules are listed in Table O.

TABLE O

Predicted MHC class 2 BK virus peptide sequences.
Prediction of 13-, 14-, 15-, 16-mers from all 6 reading
frames of the genome (access no #V01108)
obtained using the program displayed in FIG. 2.
BK virus, reading frame 1
13 mers:

FCKNCKRIGISPN; CKNCKRIGISPNS; KNCKRIGISPNSF; NCKRIGISPNSFA;
CKRIGISPNSFAR; KRIGISPNSFARP; RIGISPNSFARPQ; IGISPNSFARPQK;
GISPNSFARPQKK; ISPNSFARPQKKP; SPNSFARPQKKPP; PNSFARPQKKPPH;
NSFARPQKKPPHP; SFARPQKKPPHPY; FARPQKKPPHPYY; ARPQKKPPHPYYL;
RPQKKPPHPYYLR; PQKKPPHPYYLRE; QKKPPHPYYLRER; KKPPHPYYLRERV;
KPPHPYYLRERVE; PPHPYYLRERVEA; PHPYYLRERVEAE; HPYYLRERVEAEA;
PYYLRERVEAEAA; YYLRERVEAEAAS; YLRERVEAEAASA; LRERVEAEAASAS;
RERVEAEAASASY; ERVEAEAASASYI; RVEAEAASASYIL; KKRPQGGAAYPWN;
KRPQGGAAYPWNA; RPQGGAAYPWNAA; PQGGAAYPWNAAK;
QGGAAYPWNAAKP; PQEGKCMTHRGMQ; QEGKCMTHRGMQP;
EGKCMTHRGMQPN; GKCMTHRGMQPNH; KCMTHRGMQPNHD;
CMTHRGMQPNHDL; MTHRGMQPNHDLR; THRGMQPNHDLRK;
HRGMQPNHDLRKE; RGMQPNHDLRKES; GMQPNHDLRKESA; LTGRSCLPMECSQ;
TGRSCLPMECSQT; GRSCLPMECSQTM; RSCLPMECSQTMT; SCLPMECSQTMTS;
CLPMECSQTMTSG; LPMECSQTMTSGR; PMECSQTMTSGRK; MECSQTMTSGRKV;
ECSQTMTSGRKVH; CSQTMTSGRKVHD; SQTMTSGRKVHDR;
QTMTSGRKVHDRH; TMTSGRKVHDRHV; MTSGRKVHDRHVL;
TSGRKVHDRHVLR; SGRKVHDRHVLRA; ESWPCPQLNWTKA;
SWPCPQLNWTKAM; WPCPQLNWTKAMV; PCPQLNWTKAMVL;
CPQLNWTKAMVLR; PQLNWTKAMVLRQ; QLNWTKAMVLRQL;
LNWTKAMVLRQLS; NWTKAMVLRQLSR; WTKAMVLRQLSRQ;
TKAMVLRQLSRQA; KAMVLRQLSRQAS; AMVLRQLSRQASV;
MVLRQLSRQASVK; VLRQLSRQASVKV; LRQLSRQASVKVG; RQLSRQASVKVGK;
QLSRQASVKVGKT; LSRQASVKVGKTW; SRQASVKVGKTWT;
RQASVKVGKTWTG; QASVKVGKTWTGT; ASVKVGKTWTGTK;
SVKVGKTWTGTKK; VKVGKTWTGTKKR; KVGKTWTGTKKRA;
VGKTWTGTKKRAQ; GKTWTGTKKRAQR; KTWTGTKKRAQRI;
TWTGTKKRAQRIF; WTGTKKRAQRIFI; TGTKKRAQRIFIF; GTKKRAQRIFIFI;
TKKRAQRIFIFIL; KKRAQRIFIFILE; KRAQRIFIFILEL; RAQRIFIFILELL;
AQRIFIFILELLL; QRIFIFILELLLE; RIFIFILELLLEF; IFIFILELLLEFC;
FIFILELLLEFCR; IFILELLLEFCRG; FILELLLEFCRGE; ILELLLEFCRGED;
LELLLEFCRGEDS; ELLLEFCRGEDSV; LLLEFCRGEDSVD; LLEFCRGEDSVDG;
LEFCRGEDSVDGK; EFCRGEDSVDGKN; FCRGEDSVDGKNK; CRGEDSVDGKNKS;
RGEDSVDGKNKST; GEDSVDGKNKSTT; EDSVDGKNKSTTA; DSVDGKNKSTTAL;
SVDGKNKSTTALP; VDGKNKSTTALPA; DGKNKSTTALPAV; GKNKSTTALPAVK;
KNKSTTALPAVKD; NKSTTALPAVKDS; KSTTALPAVKDSV; STTALPAVKDSVK;
TTALPAVKDSVKD; TALPAVKDSVKDS; VSNPFFFVFPGSW; SNPFFFVFPGSWV;
NPFFFVFPGSWVL; PFFFVFPGSWVLL; LPVYLRLLLPQDF; PVYLRLLLPQDFQ;
VYLRLLLPQDFQW; YLRLLLPQDFQWL; LRLLLPQDFQWLK; RLLLPQDFQWLKL;
LLLPQDFQWLKLL; LLPQDFQWLKLLL; LPQDFQWLKLLLG; PQDFQWLKLLLGR;
QDFQWLKLLLGRL; DFQWLKLLLGRLL; FQWLKLLLGRLLL; QWLKLLLGRLLLL;
LLVLLGLLLGLLL; GISSLMIGITKFP; ISSLMIGITKFPL; ASISNQAWLWNCL;
SISNQAWLWNCLT; ISNQAWLWNCLTQ; SNQAWLWNCLTQM;
NQAWLWNCLTQMS; QAWLWNCLTQMST; AWLWNCLTQMSTM;
WLWNCLTQMSTMI; LWNCLTQMSTMIF; WNCLTQMSTMIFC; NCLTQMSTMIFCF;
CLTQMSTMIFCFL; LTQMSTMIFCFLV; ILLLIIFNTLILG; LLLIIFNTLILGI;
LLIIFNTLILGIG; LIIFNTLILGIGV; IIFNTLILGIGVL; IFNTLILGIGVLL;
FNTLILGIGVLLC; NTLILGIGVLLCL; TLILGIGVLLCLL; LILGIGVLLCLLL;
ILGIGVLLCLLLF; LGIGVLLCLLLFP; GIGVLLCLLLFPR; IGVLLCLLLFPRL;
GVLLCLLLFPRLC; VLLCLLLFPRLCG; LLCLLLFPRLCGM; LCLLLFPRLCGML;
CLLLFPRLCGMLL; LLLFPRLCGMLLG; LLFPRLCGMLLGM; LFPRLCGMLLGMI;
FPRLCGMLLGMIY; PRLCGMLLGMIYL; RLCGMLLGMIYLL; PHRNCREEQKDFL;
HRNCREEQKDFLE; RNCREEQKDFLET; NCREEQKDFLETP; CREEQKDFLETPW;
REEQKDFLETPWL; EEQKDFLETPWLD; EQKDFLETPWLDF; QKDFLETPWLDFW;
KDFLETPWLDFWR; DFLETPWLDFWRK; FLETPWLDFWRKL; LETPWLDFWRKLP;
ETPWLDFWRKLPG; TPWLDFWRKLPGQ; PWLDFWRKLPGQL; TFIIIFNNIILIF;
FIIIFNNIILIFP; IIIFNNIILIFPL; IIFNNIILIFPLL; IFNNIILIFPLLG; FNNIILIFPLLGP;
NNIILIFPLLGPQ; NIILIFPLLGPQW; IILIFPLLGPQWL; ILIFPLLGPQWLD;
LIFPLLGPQWLDK; LKGKVPVYILAIL; KGKVPVYILAILI; GKVPVYILAILIV;
KKLLPQEVLIKEL; KLLPQEVLIKELL; LLPQEVLIKELLL; LPQEVLIKELLLN;
PQEVLIKELLLNG; QEVLIKELLLNGC; EVLIKELLLNGCC; VLIKELLLNGCCL;
LIKELLLNGCCLY; IKELLLNGCCLYF; HLLLKHMKMAPTK; LLLKHMKMAPTKR;
LLKHMKMAPTKRK; LKHMKMAPTKRKG; KHMKMAPTKRKGE;
HMKMAPTKRKGEC; MKMAPTKRKGECP; KMAPTKRKGECPG;
MAPTKRKGECPGA; APTKRKGECPGAA; PTKRKGECPGAAP; TKRKGECPGAAPK;
KRKGECPGAAPKK; RKGECPGAAPKKP; KGECPGAAPKKPK; GECPGAAPKKPKE;
ECPGAAPKKPKEP; CPGAAPKKPKEPV; PGAAPKKPKEPVQ; GAAPKKPKEPVQV;
AAPKKPKEPVQVP; APKKPKEPVQVPK; PKKPKEPVQVPKL; KKPKEPVQVPKLL;
KPKEPVQVPKLLI; PKEPVQVPKLLIK; KEPVQVPKLLIKG; EPVQVPKLLIKGG;
PVQVPKLLIKGGV; VQVPKLLIKGGVE; QVPKLLIKGGVEV; VPKLLIKGGVEVL;
PKLLIKGGVEVLE; KLLIKGGVEVLEV; LLIKGGVEVLEVK; LIKGGVEVLEVKT;
IKGGVEVLEVKTG; KGGVEVLEVKTGV; GGVEVLEVKTGVD; GVEVLEVKTGVDA;
VEVLEVKTGVDAI; EVLEVKTGVDAIT; VLEVKTGVDAITE; LEVKTGVDAITEV;
EVKTGVDAITEVE; VKTGVDAITEVEC; KTGVDAITEVECF; TGVDAITEVECFL;
GVDAITEVECFLN; VDAITEVECFLNP; DAITEVECFLNPE; AITEVECFLNPEM;
ITEVECFLNPEMG; TEVECFLNPEMGD; EVECFLNPEMGDP; VECFLNPEMGDPD;
ECFLNPEMGDPDE; CFLNPEMGDPDEN; FLNPEMGDPDENL; LNPEMGDPDENLR;
NPEMGDPDENLRG; PEMGDPDENLRGF; EMGDPDENLRGFS; MGDPDENLRGFSL;
GDPDENLRGFSLK; DPDENLRGFSLKL; PDENLRGFSLKLS; DENLRGFSLKLSA;
ENLRGFSLKLSAE; NLRGFSLKLSAEN; LRGFSLKLSAEND; RGFSLKLSAENDF;
GFSLKLSAENDFS; FSLKLSAENDFSS; SLKLSAENDFSSD; LKLSAENDFSSDS;
KLSAENDFSSDSP; LSAENDFSSDSPE; SAENDFSSDSPER; AENDFSSDSPERK;
ENDFSSDSPERKM; NDFSSDSPERKML; DFSSDSPERKMLP; FSSDSPERKMLPC;
SSDSPERKMLPCY; SDSPERKMLPCYS; DSPERKMLPCYST; SPERKMLPCYSTA;
PERKMLPCYSTAR; ERKMLPCYSTARI; RKMLPCYSTARIP; KMLPCYSTARIPL;
MLPCYSTARIPLP; LPCYSTARIPLPN; PCYSTARIPLPNL; CYSTARIPLPNLN;
YSTARIPLPNLNE; STARIPLPNLNED; TARIPLPNLNEDL; ARIPLPNLNEDLT;
RIPLPNLNEDLTC; IPLPNLNEDLTCG; PLPNLNEDLTCGN; LPNLNEDLTCGNL;
PNLNEDLTCGNLL; NLNEDLTCGNLLM; LNEDLTCGNLLMW;
NEDLTCGNLLMWE; EDLTCGNLLMWEA; DLTCGNLLMWEAV;
LTCGNLLMWEAVT; TCGNLLMWEAVTV; CGNLLMWEAVTVQ;
GNLLMWEAVTVQT; NLLMWEAVTVQTE; LLMWEAVTVQTEV;
LMWEAVTVQTEVI; MWEAVTVQTEVIG; WEAVTVQTEVIGI; EAVTVQTEVIGIT;
AVTVQTEVIGITS; VTVQTEVIGITSM; TVQTEVIGITSML; VQTEVIGITSMLN;
QTEVIGITSMLNL; TEVIGITSMLNLH; EVIGITSMLNLHA; VIGITSMLNLHAG;
IGITSMLNLHAGS; GITSMLNLHAGSQ; ITSMLNLHAGSQK; TSMLNLHAGSQKV;
SMLNLHAGSQKVH; MLNLHAGSQKVHE; LNLHAGSQKVHEH;
NLHAGSQKVHEHG; LHAGSQKVHEHGG; HAGSQKVHEHGGG;
AGSQKVHEHGGGK; GSQKVHEHGGGKP; SQKVHEHGGGKPI; QKVHEHGGGKPIQ;
KVHEHGGGKPIQG; VHEHGGGKPIQGS; HEHGGGKPIQGSN; EHGGGKPIQGSNF;
HGGGKPIQGSNFH; GGGKPIQGSNFHF; GGKPIQGSNFHFF; GKPIQGSNFHFFA;
KPIQGSNFHFFAV; PIQGSNFHFFAVG; IQGSNFHFFAVGG; QGSNFHFFAVGGE;
GSNFHFFAVGGEP; SNFHFFAVGGEPL; NFHFFAVGGEPLE; FHFFAVGGEPLEM;
HFFAVGGEPLEMQ; FFAVGGEPLEMQG; FAVGGEPLEMQGV; AVGGEPLEMQGVL;
VGGEPLEMQGVLM; GGEPLEMQGVLMN; GEPLEMQGVLMNY;
EPLEMQGVLMNYR; PLEMQGVLMNYRS; LEMQGVLMNYRSK;
EMQGVLMNYRSKY; MQGVLMNYRSKYP; QGVLMNYRSKYPD;
GVLMNYRSKYPDG; VLMNYRSKYPDGT; LMNYRSKYPDGTI; MNYRSKYPDGTIT;
NYRSKYPDGTITP; YRSKYPDGTITPK; RSKYPDGTITPKN; SKYPDGTITPKNP;
KYPDGTITPKNPT; YPDGTITPKNPTA; PDGTITPKNPTAQ; DGTITPKNPTAQS;
GTITPKNPTAQSQ; TITPKNPTAQSQV; ITPKNPTAQSQVM; TPKNPTAQSQVMN;
PKNPTAQSQVMNT; KNPTAQSQVMNTD; NPTAQSQVMNTDH;
PTAQSQVMNTDHK; TAQSQVMNTDHKA; AQSQVMNTDHKAY;
QSQVMNTDHKAYL; SQVMNTDHKAYLD; QVMNTDHKAYLDK;
VMNTDHKAYLDKN; MNTDHKAYLDKNN; NTDHKAYLDKNNA;
TDHKAYLDKNNAY; DHKAYLDKNNAYP; HKAYLDKNNAYPV;
KAYLDKNNAYPVE; AYLDKNNAYPVEC; YLDKNNAYPVECW;
LDKNNAYPVECWV; DKNNAYPVECWVP; KNNAYPVECWVPD;
NNAYPVECWVPDP; NAYPVECWVPDPS; AYPVECWVPDPSR; YPVECWVPDPSRN;
PVECWVPDPSRNE; VECWVPDPSRNEN; ECWVPDPSRNENA; CWVPDPSRNENAR;
WVPDPSRNENARY; VPDPSRNENARYF; PDPSRNENARYFG; DPSRNENARYFGT;
PSRNENARYFGTF; SRNENARYFGTFT; RNENARYFGTFTG; NENARYFGTFTGG;
ENARYFGTFTGGE; NARYFGTFTGGEN; ARYFGTFTGGENV; RYFGTFTGGENVP;
YFGTFTGGENVPP; FGTFTGGENVPPV; GTFTGGENVPPVL; TFTGGENVPPVLH;
FTGGENVPPVLHV; TGGENVPPVLHVT; GGENVPPVLHVTN; GENVPPVLHVTNT;
ENVPPVLHVTNTA; NVPPVLHVTNTAT; VPPVLHVTNTATT; PPVLHVTNTATTV;
PVLHVTNTATTVL; VLHVTNTATTVLL; LHVTNTATTVLLD; HVTNTATTVLLDE;
VTNTATTVLLDEQ; TNTATTVLLDEQG; NTATTVLLDEQGV; TATTVLLDEQGVG;
ATTVLLDEQGVGP; TTVLLDEQGVGPL; TVLLDEQGVGPLC; VLLDEQGVGPLCK;
LLDEQGVGPLCKA; LDEQGVGPLCKAD; DEQGVGPLCKADS; EQGVGPLCKADSL;
QGVGPLCKADSLY; GVGPLCKADSLYV; VGPLCKADSLYVS; GPLCKADSLYVSA;
PLCKADSLYVSAA; LCKADSLYVSAAD; CKADSLYVSAADI; KADSLYVSAADIC;
ADSLYVSAADICG; DSLYVSAADICGL; SLYVSAADICGLF; LYVSAADICGLFT;
YVSAADICGLFTN; VSAADICGLFTNS; SAADICGLFTNSS; AADICGLFTNSSG;
ADICGLFTNSSGT; DICGLFTNSSGTQ; ICGLFTNSSGTQQ; CGLFTNSSGTQQW;
GLFTNSSGTQQWR; LFTNSSGTQQWRG; FTNSSGTQQWRGL; TNSSGTQQWRGLA;
NSSGTQQWRGLAR; SSGTQQWRGLARY; SGTQQWRGLARYF;
GTQQWRGLARYFK; TQQWRGLARYFKI; QQWRGLARYFKIR; QWRGLARYFKIRL;
WRGLARYFKIRLR; RGLARYFKIRLRK; GLARYFKIRLRKR; LARYFKIRLRKRS;
ARYFKIRLRKRSV; RYFKIRLRKRSVK; YFKIRLRKRSVKN; FKIRLRKRSVKNP;
KIRLRKRSVKNPY; IRLRKRSVKNPYP; RLRKRSVKNPYPI; LRKRSVKNPYPIS;
RKRSVKNPYPISF; KRSVKNPYPISFL; RSVKNPYPISFLL; SVKNPYPISFLLS;
VKNPYPISFLLSD; KNPYPISFLLSDL; NPYPISFLLSDLI; PYPISFLLSDLIN;
YPISFLLSDLINR; PISFLLSDLINRR; ISFLLSDLINRRT; SFLLSDLINRRTQ;
FLLSDLINRRTQR; LLSDLINRRTQRV; LSDLINRRTQRVD; SDLINRRTQRVDG;
DLINRRTQRVDGQ; LINRRTQRVDGQP; INRRTQRVDGQPM; NRRTQRVDGQPMY;
RRTQRVDGQPMYG; RTQRVDGQPMYGM; TQRVDGQPMYGME;
QRVDGQPMYGMES; RVDGQPMYGMESQ; VDGQPMYGMESQV;
DGQPMYGMESQVE; GQPMYGMESQVEE; QPMYGMESQVEEV;
PMYGMESQVEEVR; MYGMESQVEEVRV; YGMESQVEEVRVF;
GMESQVEEVRVFD; MESQVEEVRVFDG; ESQVEEVRVFDGT; SQVEEVRVFDGTE;
QVEEVRVFDGTER; VEEVRVFDGTERL; EEVRVFDGTERLP; EVRVFDGTERLPG;
VRVFDGTERLPGD; RVFDGTERLPGDP; VFDGTERLPGDPD; FDGTERLPGDPDM;
DGTERLPGDPDMI; GTERLPGDPDMIR; TERLPGDPDMIRY; ERLPGDPDMIRYI;
RLPGDPDMIRYID; LPGDPDMIRYIDK; PGDPDMIRYIDKQ; GDPDMIRYIDKQG;
DPDMIRYIDKQGQ; PDMIRYIDKQGQL; DMIRYIDKQGQLQ; MIRYIDKQGQLQT;
IRYIDKQGQLQTK; RYIDKQGQLQTKM; YIDKQGQLQTKML; TGAFIVHIHLINA;
GAFIVHIHLINAA; AFIVHIHLINAAF; FIVHIHLINAAFV; ATFKLVLFWGWCF;
TFKLVLFWGWCFR; FKLVLFWGWCFRP; KLVLFWGWCFRPF; LVLFWGWCFRPFK;
VLFWGWCFRPFKT; LFWGWCFRPFKTL; FWGWCFRPFKTLK; WGWCFRPFKTLKA;
GWCFRPFKTLKAF; WCFRPFKTLKAFT; CFRPFKTLKAFTQ; FRPFKTLKAFTQM;
RPFKTLKAFTQMQ; PFKTLKAFTQMQL; FKTLKAFTQMQLL; KTLKAFTQMQLLT;
TLKAFTQMQLLTM; LKAFTQMQLLTMG; KAFTQMQLLTMGV; ILFSCNIKNTFPH;
LFSCNIKNTFPHA; FSCNIKNTFPHAY; SCNIKNTFPHAYI; CNIKNTFPHAYII;
NIKNTFPHAYIIF; IKNTFPHAYIIFH; KNTFPHAYIIFHP; KSIHTYLRIQPFL;
SIHTYLRIQPFLP; IHTYLRIQPFLPF; HTYLRIQPFLPFN; TYLRIQPFLPFNN;
YLRIQPFLPFNNS; LRIQPFLPFNNSR; RIQPFLPFNNSRL; IQPFLPFNNSRLY;
QPFLPFNNSRLYI; PFLPFNNSRLYIS; FLPFNNSRLYISC; LPFNNSRLYISCK;
PFNNSRLYISCKI; FNNSRLYISCKIS; NNSRLYISCKISY; NSRLYISCKISYR;
SRLYISCKISYRP; RLYISCKISYRPK; LYISCKISYRPKP; YISCKISYRPKPN;
IYFGPKIYLSYKS; YFGPKIYLSYKSS; FGPKIYLSYKSSL; GPKIYLSYKSSLQ;
PKIYLSYKSSLQG; KIYLSYKSSLQGF; IYLSYKSSLQGFR; YLSYKSSLQGFRD;
LSYKSSLQGFRDR; SYKSSLQGFRDRI; YKSSLQGFRDRIL; KSSLQGFRDRILI;
SSLQGFRDRILIH; SLQGFRDRILIHC; LQGFRDRILIHCN; QGFRDRILIHCNQ;
GFRDRILIHCNQA; FRDRILIHCNQAW; RDRILIHCNQAWW; DRILIHCNQAWWK;
RILIHCNQAWWKY; ILIHCNQAWWKYL; LIHCNQAWWKYLG;
IHCNQAWWKYLGS; HCNQAWWKYLGSF; CNQAWWKYLGSFV;
FSSCPFYIFKNNH; SSCPFYIFKNNHV; SCPFYIFKNNHVL; CPFYIFKNNHVLI;
PFYIFKNNHVLIY; FYIFKNNHVLIYS; YIFKNNHVLIYSY; IFKNNHVLIYSYT;
PVSSFRYIENNTV; VSSFRYIENNTVQ; SSFRYIENNTVQK; SFRYIENNTVQKI;
FRYIENNTVQKIK; RYIENNTVQKIKY; YIENNTVQKIKYY; IENNTVQKIKYYR;
ENNTVQKIKYYRI; NNTVQKIKYYRIH; NTVQKIKYYRIHF; TVQKIKYYRIHFR;
QTVQPSNTCHILF; HFFPGHMKGIYSF; FFPGHMKGIYSFF; FPGHMKGIYSFFS;
NCIYCLLTNTFLI; CIYCLLTNTFLIF; IYCLLTNTFLIFT; YCLLTNTFLIFTF;
CLLTNTFLIFTFC; LLTNTFLIFTFCK; LTNTFLIFTFCKN; TNTFLIFTFCKNN;
NTFLIFTFCKNNS; TFLIFTFCKNNSI; FLIFTFCKNNSIC; LIFTFCKNNSICK;
IFTFCKNNSICKV; FTFCKNNSICKVL; TFCKNNSICKVLF; FCKNNSICKVLFM;
CKNNSICKVLFMI; KNNSICKVLFMIL; NNSICKVLFMILK; NSICKVLFMILKV;
SICKVLFMILKVI; ICKVLFMILKVIR; CKVLFMILKVIRL; KVLFMILKVIRLV;
VLFMILKVIRLVF; LFMILKVIRLVFF; FMILKVIRLVFFL; MILKVIRLVFFLT;
ILKVIRLVFFLTL; LKVIRLVFFLTLF; KVIRLVFFLTLFT; VIRLVFFLTLFTL;
IRLVFFLTLFTLL; RLVFFLTLFTLLY; LVFFLTLFTLLYI; VFFLTLFTLLYIV;
FFLTLFTLLYIVL; FLTLFTLLYIVLK; LTLFTLLYIVLKF; KHILTLCLYCILS;
HILTLCLYCILSN; FPRHLLCFFRLFW; PRHLLCFFRLFWA; RHLLCFFRLFWAK;
HLLCFFRLFWAKI; LLCFFRLFWAKIM; LCFFRLFWAKIML; CFFRLFWAKIMLL;
APLNAFFYSMVWI; PLNAFFYSMVWIS; LNAFFYSMVWISS; KTKGTQLLTEIIN;
TKGTQLLTEIINC; KGTQLLTEIINCR; GTQLLTEIINCRN; TQLLTEIINCRNS;
QLLTEIINCRNSM; LLTEIINCRNSMS; LTEIINCRNSMSM; TEIINCRNSMSMW;
EIINCRNSMSMWS; KEYNIMPSTHVST; EYNIMPSTHVSTN; YNIMPSTHVSTNK;
NIMPSTHVSTNKS; IMPSTHVSTNKSY; MPSTHVSTNKSYR; PSTHVSTNKSYRI;
STHVSTNKSYRIF; THVSTNKSYRIFF; HVSTNKSYRIFFH; VSTNKSYRIFFHK;
STNKSYRIFFHKF; TNKSYRIFFHKFF; NKSYRIFFHKFFI; KSYRIFFHKFFIQ;
SYRIFFHKFFIQN; YRIFFHKFFIQNL; RIFFHKFFIQNLS; IFFHKFFIQNLSF;
FFHKFFIQNLSFF; FHKFFIQNLSFFF; HKFFIQNLSFFFS; KFFIQNLSFFFSS;
FFIQNLSFFFSSI; FIQNLSFFFSSIH; IQNLSFFFSSIHS; QNLSFFFSSIHSK;
NLSFFFSSIHSKA; LSFFFSSIHSKAG; SFFFSSIHSKAGK; FFFSSIHSKAGKG;
FFSSIHSKAGKGS; FSSIHSKAGKGSI; SSIHSKAGKGSIT; SIHSKAGKGSITK;
IHSKAGKGSITKY; HSKAGKGSITKYS; SKAGKGSITKYSL; KAGKGSITKYSLT;
AGKGSITKYSLTK; GKGSITKYSLTKK; KGSITKYSLTKKL; GSITKYSLTKKLV;
IRGKVFRVFYLSF; RGKVFRVFYLSFF; GKVFRVFYLSFFF; KVFRVFYLSFFFG;
VFRVFYLSFFFGW; FRVFYLSFFFGWC; VLRICCCFFITGK; LRICCCFFITGKH;
RICCCFFITGKHI; ICCCFFITGKHIF; CCCFFITGKHIFM; CCFFITGKHIFMA;
CFFITGKHIFMAK; IFIPFFIKGTPPG; FIPFFIKGTPPGL; IPFFIKGTPPGLP;
PFFIKGTPPGLPL; FFIKGTPPGLPLF; FIKGTPPGLPLFC; IKGTPPGLPLFCS;
KGTPPGLPLFCSI; GTPPGLPLFCSIG; TPPGLPLFCSIGW; PPGLPLFCSIGWH;
PGLPLFCSIGWHL; SFRSLKGVSPIIW; FRSLKGVSPIIWT; RSLKGVSPIIWTH;
SLKGVSPIIWTHH; LKGVSPIIWTHHC; KGVSPIIWTHHCR; GVSPIIWTHHCRV;
VSPIIWTHHCRVS; SPIIWTHHCRVSS; PIIWTHHCRVSSV; IIWTHHCRVSSVR;
IWTHHCRVSSVRS; WTHHCRVSSVRSK; THHCRVSSVRSKP; HHCRVSSVRSKPN;
HCRVSSVRSKPNH; CRVSSVRSKPNHC; RVSSVRSKPNHCV; VSSVRSKPNHCVK;
SSVRSKPNHCVKQ; SVRSKPNHCVKQS; VRSKPNHCVKQSM; RSKPNHCVKQSMQ;
QSIQTKGSFLKNF; SIQTKGSFLKNFL; IQTKGSFLKNFLF; QTKGSFLKNFLFK;
TKGSFLKNFLFKC; KGSFLKNFLFKCL; GSFLKNFLFKCLN; SFLKNFLFKCLNL;
FLKNFLFKCLNLS; HSMQGQCTEGFLE; SMQGQCTEGFLEQ; MQGQCTEGFLEQI;
QGQCTEGFLEQIG; GQCTEGFLEQIGH; QCTEGFLEQIGHS; CTEGFLEQIGHSL;
TEGFLEQIGHSLQ; EGFLEQIGHSLQY; GFLEQIGHSLQYR; FLEQIGHSLQYRV;
LEQIGHSLQYRVS; EQIGHSLQYRVSG; QIGHSLQYRVSGQ; IGHSLQYRVSGQR;
GHSLQYRVSGQRG; HSLQYRVSGQRGK; SLQYRVSGQRGKS; LQYRVSGQRGKSA;
QYRVSGQRGKSAQ; YRVSGQRGKSAQT; RVSGQRGKSAQTS; VSGQRGKSAQTSE;
SGQRGKSAQTSEL; GQRGKSAQTSELL; QRGKSAQTSELLQ; RGKSAQTSELLQV;
GKSAQTSELLQVP; KSAQTSELLQVPK; SAQTSELLQVPKS; AQTSELLQVPKSG;
ATFTSCSIFLYKV; TFTSCSIFLYKVF; FTSCSIFLYKVFI; TSCSIFLYKVFIL;
SCSIFLYKVFILF; CSIFLYKVFILFI; SIFLYKVFILFIL; IFLYKVFILFILS;
FLYKVFILFILSS; LYKVFILFILSSS; YKVFILFILSSSP; KVFILFILSSSPP;
VFILFILSSSPPL; FILFILSSSPPLS; ILFILSSSPPLSG; AFLIKGRFPQAAL;
FLIKGRFPQAALS; LIKGRFPQAALSR; IKGRFPQAALSRP; KGRFPQAALSRPK;
GRFPQAALSRPKR; RFPQAALSRPKRS; FPQAALSRPKRSM; PQAALSRPKRSMS;
QAALSRPKRSMSS; AALSRPKRSMSSM; ALSRPKRSMSSMD; LSRPKRSMSSMDS;
SRPKRSMSSMDSS; RPKRSMSSMDSSL; PKRSMSSMDSSLL; KRSMSSMDSSLLR;
RSMSSMDSSLLRT; SMSSMDSSLLRTL; MSSMDSSLLRTLS

14 mers:

FCKNCKRIGISPNS; CKNCKRIGISPNSF; KNCKRIGISPNSFA; NCKRIGISPNSFAR;
CKRIGISPNSFARP; KRIGISPNSFARPQ; RIGISPNSFARPQK; IGISPNSFARPQKK;
GISPNSFARPQKKP; ISPNSFARPQKKPP; SPNSFARPQKKPPH; PNSFARPQKKPPHP;
NSFARPQKKPPHPY; SFARPQKKPPHPYY; FARPQKKPPHPYYL;
ARPQKKPPHPYYLR; RPQKKPPHPYYLRE; PQKKPPHPYYLRER;
QKKPPHPYYLRERV; KKPPHPYYLRERVE; KPPHPYYLRERVEA;
PPHPYYLRERVEAE; PHPYYLRERVEAEA; HPYYLRERVEAEAA;
PYYLRERVEAEAAS; YYLRERVEAEAASA; YLRERVEAEAASAS;
LRERVEAEAASASY; RERVEAEAASASYI; ERVEAEAASASYIL;
KKRPQGGAAYPWNA; KRPQGGAAYPWNAA; RPQGGAAYPWNAAK;
PQGGAAYPWNAAKP; PQEGKCMTHRGMQP; QEGKCMTHRGMQPN;
EGKCMTHRGMQPNH; GKCMTHRGMQPNHD; KCMTHRGMQPNHDL;
CMTHRGMQPNHDLR; MTHRGMQPNHDLRK; THRGMQPNHDLRKE;
HRGMQPNHDLRKES; RGMQPNHDLRKESA; LTGRSCLPMECSQT;
TGRSCLPMECSQTM; GRSCLPMECSQTMT; RSCLPMECSQTMTS;
SCLPMECSQTMTSG; CLPMECSQTMTSGR; LPMECSQTMTSGRK;
PMECSQTMTSGRKV; MECSQTMTSGRKVH; ECSQTMTSGRKVHD;
CSQTMTSGRKVHDR; SQTMTSGRKVHDRH; QTMTSGRKVHDRHV;
TMTSGRKVHDRHVL; MTSGRKVHDRHVLR; TSGRKVHDRHVLRA;
ESWPCPQLNWTKAM; SWPCPQLNWTKAMV; WPCPQLNWTKAMVL;
PCPQLNWTKAMVLR; CPQLNWTKAMVLRQ; PQLNWTKAMVLRQL;
QLNWTKAMVLRQLS; LNWTKAMVLRQLSR; NWTKAMVLRQLSRQ;
WTKAMVLRQLSRQA; TKAMVLRQLSRQAS; KAMVLRQLSRQASV;
AMVLRQLSRQASVK; MVLRQLSRQASVKV; VLRQLSRQASVKVG;
LRQLSRQASVKVGK; RQLSRQASVKVGKT; QLSRQASVKVGKTW;
LSRQASVKVGKTWT; SRQASVKVGKTWTG; RQASVKVGKTWTGT;
QASVKVGKTWTGTK; ASVKVGKTWTGTKK; SVKVGKTWTGTKKR;
VKVGKTWTGTKKRA; KVGKTWTGTKKRAQ; VGKTWTGTKKRAQR;
GKTWTGTKKRAQRI; KTWTGTKKRAQRIF; TWTGTKKRAQRIFI;
WTGTKKRAQRIFIF; TGTKKRAQRIFIFI; GTKKRAQRIFIFIL; TKKRAQRIFIFILE;
KKRAQRIFIFILEL; KRAQRIFIFILELL; RAQRIFIFILELLL; AQRIFIFILELLLE;
QRIFIFILELLLEF; RIFIFILELLLEFC; IFIFILELLLEFCR; FIFILELLLEFCRG;
IFILELLLEFCRGE; FILELLLEFCRGED; ILELLLEFCRGEDS; LELLLEFCRGEDSV;
ELLLEFCRGEDSVD; LLLEFCRGEDSVDG; LLEFCRGEDSVDGK;
LEFCRGEDSVDGKN; EFCRGEDSVDGKNK; FCRGEDSVDGKNKS;
CRGEDSVDGKNKST; RGEDSVDGKNKSTT; GEDSVDGKNKSTTA;
EDSVDGKNKSTTAL; DSVDGKNKSTTALP; SVDGKNKSTTALPA;
VDGKNKSTTALPAV; DGKNKSTTALPAVK; GKNKSTTALPAVKD;
KNKSTTALPAVKDS; NKSTTALPAVKDSV; KSTTALPAVKDSVK;
STTALPAVKDSVKD; TTALPAVKDSVKDS; VSNPFFFVFPGSWV;
SNPFFFVFPGSWVL; NPFFFVFPGSWVLL; LPVYLRLLLPQDFQ;
PVYLRLLLPQDFQW; VYLRLLLPQDFQWL; YLRLLLPQDFQWLK;
LRLLLPQDFQWLKL; RLLLPQDFQWLKLL; LLLPQDFQWLKLLL;
LLPQDFQWLKLLLG; LPQDFQWLKLLLGR; PQDFQWLKLLLGRL;
QDFQWLKLLLGRLL; DFQWLKLLLGRLLL; FQWLKLLLGRLLLL;
GISSLMIGITKFPL; ASISNQAWLWNCLT; SISNQAWLWNCLTQ;
ISNQAWLWNCLTQM; SNQAWLWNCLTQMS; NQAWLWNCLTQMST;
QAWLWNCLTQMSTM; AWLWNCLTQMSTMI; WLWNCLTQMSTMIF;
LWNCLTQMSTMIFC; WNCLTQMSTMIFCF; NCLTQMSTMIFCFL;
CLTQMSTMIFCFLV; ILLLIIFNTLILGI; LLLIIFNTLILGIG; LLIIFNTLILGIGV;
LIIFNTLILGIGVL; IIFNTLILGIGVLL; IFNTLILGIGVLLC; FNTLILGIGVLLCL;
NTLILGIGVLLCLL; TLILGIGVLLCLLL; LILGIGVLLCLLLF; ILGIGVLLCLLLFP;
LGIGVLLCLLLFPR; GIGVLLCLLLFPRL; IGVLLCLLLFPRLC; GVLLCLLLFPRLCG;
VLLCLLLFPRLCGM; LLCLLLFPRLCGML; LCLLLFPRLCGMLL;
CLLLFPRLCGMLLG; LLLFPRLCGMLLGM; LLFPRLCGMLLGMI;
LFPRLCGMLLGMIY; FPRLCGMLLGMIYL; PRLCGMLLGMIYLL;
PHRNCREEQKDFLE; HRNCREEQKDFLET; RNCREEQKDFLETP;
NCREEQKDFLETPW; CREEQKDFLETPWL; REEQKDFLETPWLD;
EEQKDFLETPWLDF; EQKDFLETPWLDFW; QKDFLETPWLDFWR;
KDFLETPWLDFWRK; DFLETPWLDFWRKL; FLETPWLDFWRKLP;
LETPWLDFWRKLPG; ETPWLDFWRKLPGQ; TPWLDFWRKLPGQL;
TFIIIFNNIILIFP; FIIIFNNIILIFPL; IIIFNNIILIFPLL; IIFNNIILIFPLLG;
IFNNIILIFPLLGP; FNNIILIFPLLGPQ; NNIILIFPLLGPQW; NIILIFPLLGPQWL;
IILIFPLLGPQWLD; ILIFPLLGPQWLDK; LKGKVPVYILAILI; KGKVPVYILAILIV;
KKLLPQEVLIKELL; KLLPQEVLIKELLL; LLPQEVLIKELLLN; LPQEVLIKELLLNG;
PQEVLIKELLLNGC; QEVLIKELLLNGCC; EVLIKELLLNGCCL;
VLIKELLLNGCCLY; LIKELLLNGCCLYF; HLLLKHMKMAPTKR;
LLLKHMKMAPTKRK; LLKHMKMAPTKRKG; LKHMKMAPTKRKGE;
KHMKMAPTKRKGEC; HMKMAPTKRKGECP; MKMAPTKRKGECPG;
KMAPTKRKGECPGA; MAPTKRKGECPGAA; APTKRKGECPGAAP;
PTKRKGECPGAAPK; TKRKGECPGAAPKK; KRKGECPGAAPKKP;
RKGECPGAAPKKPK; KGECPGAAPKKPKE; GECPGAAPKKPKEP;
ECPGAAPKKPKEPV; CPGAAPKKPKEPVQ; PGAAPKKPKEPVQV;
GAAPKKPKEPVQVP; AAPKKPKEPVQVPK; APKKPKEPVQVPKL;
PKKPKEPVQVPKLL; KKPKEPVQVPKLLI; KPKEPVQVPKLLIK;
PKEPVQVPKLLIKG; KEPVQVPKLLIKGG; EPVQVPKLLIKGGV;
PVQVPKLLIKGGVE; VQVPKLLIKGGVEV; QVPKLLIKGGVEVL;
VPKLLIKGGVEVLE; PKLLIKGGVEVLEV; KLLIKGGVEVLEVK;
LLIKGGVEVLEVKT; LIKGGVEVLEVKTG; IKGGVEVLEVKTGV;
KGGVEVLEVKTGVD; GGVEVLEVKTGVDA; GVEVLEVKTGVDAI;
VEVLEVKTGVDAIT; EVLEVKTGVDAITE; VLEVKTGVDAITEV;
LEVKTGVDAITEVE; EVKTGVDAITEVEC; VKTGVDAITEVECF;
KTGVDAITEVECFL; TGVDAITEVECFLN; GVDAITEVECFLNP;
VDAITEVECFLNPE; DAITEVECFLNPEM; AITEVECFLNPEMG;
ITEVECFLNPEMGD; TEVECFLNPEMGDP; EVECFLNPEMGDPD;
VECFLNPEMGDPDE; ECFLNPEMGDPDEN; CFLNPEMGDPDENL;
FLNPEMGDPDENLR; LNPEMGDPDENLRG; NPEMGDPDENLRGF;
PEMGDPDENLRGFS; EMGDPDENLRGFSL; MGDPDENLRGFSLK;
GDPDENLRGFSLKL; DPDENLRGFSLKLS; PDENLRGFSLKLSA;
DENLRGFSLKLSAE; ENLRGFSLKLSAEN; NLRGFSLKLSAEND;
LRGFSLKLSAENDF; RGFSLKLSAENDFS; GFSLKLSAENDFSS; FSLKLSAENDFSSD;
SLKLSAENDFSSDS; LKLSAENDFSSDSP; KLSAENDFSSDSPE; LSAENDFSSDSPER;
SAENDFSSDSPERK; AENDFSSDSPERKM; ENDFSSDSPERKML;
NDFSSDSPERKMLP; DFSSDSPERKMLPC; FSSDSPERKMLPCY;
SSDSPERKMLPCYS; SDSPERKMLPCYST; DSPERKMLPCYSTA;
SPERKMLPCYSTAR; PERKMLPCYSTARI; ERKMLPCYSTARIP;
RKMLPCYSTARIPL; KMLPCYSTARIPLP; MLPCYSTARIPLPN; LPCYSTARIPLPNL;
PCYSTARIPLPNLN; CYSTARIPLPNLNE; YSTARIPLPNLNED; STARIPLPNLNEDL;
TARIPLPNLNEDLT; ARIPLPNLNEDLTC; RIPLPNLNEDLTCG; IPLPNLNEDLTCGN;
PLPNLNEDLTCGNL; LPNLNEDLTCGNLL; PNLNEDLTCGNLLM;
NLNEDLTCGNLLMW; LNEDLTCGNLLMWE; NEDLTCGNLLMWEA;
EDLTCGNLLMWEAV; DLTCGNLLMWEAVT; LTCGNLLMWEAVTV;
TCGNLLMWEAVTVQ; CGNLLMWEAVTVQT; GNLLMWEAVTVQTE;
NLLMWEAVTVQTEV; LLMWEAVTVQTEVI; LMWEAVTVQTEVIG;
MWEAVTVQTEVIGI; WEAVTVQTEVIGIT; EAVTVQTEVIGITS;
AVTVQTEVIGITSM; VTVQTEVIGITSML; TVQTEVIGITSMLN; VQTEVIGITSMLNL;
QTEVIGITSMLNLH; TEVIGITSMLNLHA; EVIGITSMLNLHAG; VIGITSMLNLHAGS;
IGITSMLNLHAGSQ; GITSMLNLHAGSQK; ITSMLNLHAGSQKV;
TSMLNLHAGSQKVH; SMLNLHAGSQKVHE; MLNLHAGSQKVHEH;
LNLHAGSQKVHEHG; NLHAGSQKVHEHGG; LHAGSQKVHEHGGG;
HAGSQKVHEHGGGK; AGSQKVHEHGGGKP; GSQKVHEHGGGKPI;
SQKVHEHGGGKPIQ; QKVHEHGGGKPIQG; KVHEHGGGKPIQGS;
VHEHGGGKPIQGSN; HEHGGGKPIQGSNF; EHGGGKPIQGSNFH;
HGGGKPIQGSNFHF; GGGKPIQGSNFHFF; GGKPIQGSNFHFFA;
GKPIQGSNFHFFAV; KPIQGSNFHFFAVG; PIQGSNFHFFAVGG;
IQGSNFHFFAVGGE; QGSNFHFFAVGGEP; GSNFHFFAVGGEPL;
SNFHFFAVGGEPLE; NFHFFAVGGEPLEM; FHFFAVGGEPLEMQ;
HFFAVGGEPLEMQG; FFAVGGEPLEMQGV; FAVGGEPLEMQGVL;
AVGGEPLEMQGVLM; VGGEPLEMQGVLMN; GGEPLEMQGVLMNY;
GEPLEMQGVLMNYR; EPLEMQGVLMNYRS; PLEMQGVLMNYRSK;
LEMQGVLMNYRSKY; EMQGVLMNYRSKYP; MQGVLMNYRSKYPD;
QGVLMNYRSKYPDG; GVLMNYRSKYPDGT; VLMNYRSKYPDGTI;
LMNYRSKYPDGTIT; MNYRSKYPDGTITP; NYRSKYPDGTITPK;
YRSKYPDGTITPKN; RSKYPDGTITPKNP; SKYPDGTITPKNPT; KYPDGTITPKNPTA;
YPDGTITPKNPTAQ; PDGTITPKNPTAQS; DGTITPKNPTAQSQ; GTITPKNPTAQSQV;
TITPKNPTAQSQVM; ITPKNPTAQSQVMN; TPKNPTAQSQVMNT;
PKNPTAQSQVMNTD; KNPTAQSQVMNTDH; NPTAQSQVMNTDHK;
PTAQSQVMNTDHKA; TAQSQVMNTDHKAY; AQSQVMNTDHKAYL;
QSQVMNTDHKAYLD; SQVMNTDHKAYLDK; QVMNTDHKAYLDKN;
VMNTDHKAYLDKNN; MNTDHKAYLDKNNA; NTDHKAYLDKNNAY;
TDHKAYLDKNNAYP; DHKAYLDKNNAYPV; HKAYLDKNNAYPVE;
KAYLDKNNAYPVEC; AYLDKNNAYPVECW; YLDKNNAYPVECWV;
LDKNNAYPVECWVP; DKNNAYPVECWVPD; KNNAYPVECWVPDP;
NNAYPVECWVPDPS; NAYPVECWVPDPSR; AYPVECWVPDPSRN;
YPVECWVPDPSRNE; PVECWVPDPSRNEN; VECWVPDPSRNENA;
ECWVPDPSRNENAR; CWVPDPSRNENARY; WVPDPSRNENARYF;
VPDPSRNENARYFG; PDPSRNENARYFGT; DPSRNENARYFGTF;
PSRNENARYFGTFT; SRNENARYFGTFTG; RNENARYFGTFTGG;
NENARYFGTFTGGE; ENARYFGTFTGGEN; NARYFGTFTGGENV;
ARYFGTFTGGENVP; RYFGTFTGGENVPP; YFGTFTGGENVPPV;
FGTFTGGENVPPVL; GTFTGGENVPPVLH; TFTGGENVPPVLHV;
FTGGENVPPVLHVT; TGGENVPPVLHVTN; GGENVPPVLHVTNT;
GENVPPVLHVTNTA; ENVPPVLHVTNTAT; NVPPVLHVTNTATT;
VPPVLHVTNTATTV; PPVLHVTNTATTVL; PVLHVTNTATTVLL;
VLHVTNTATTVLLD; LHVTNTATTVLLDE; HVTNTATTVLLDEQ;
VTNTATTVLLDEQG; TNTATTVLLDEQGV; NTATTVLLDEQGVG;
TATTVLLDEQGVGP; ATTVLLDEQGVGPL; TTVLLDEQGVGPLC;
TVLLDEQGVGPLCK; VLLDEQGVGPLCKA; LLDEQGVGPLCKAD;
LDEQGVGPLCKADS; DEQGVGPLCKADSL; EQGVGPLCKADSLY;
QGVGPLCKADSLYV; GVGPLCKADSLYVS; VGPLCKADSLYVSA;
GPLCKADSLYVSAA; PLCKADSLYVSAAD; LCKADSLYVSAADI;
CKADSLYVSAADIC; KADSLYVSAADICG; ADSLYVSAADICGL;
DSLYVSAADICGLF; SLYVSAADICGLFT; LYVSAADICGLFTN;
YVSAADICGLFTNS; VSAADICGLFTNSS; SAADICGLFTNSSG; AADICGLFTNSSGT;
ADICGLFTNSSGTQ; DICGLFTNSSGTQQ; ICGLFTNSSGTQQW;
CGLFTNSSGTQQWR; GLFTNSSGTQQWRG; LFTNSSGTQQWRGL;
FTNSSGTQQWRGLA; TNSSGTQQWRGLAR; NSSGTQQWRGLARY;
SSGTQQWRGLARYF; SGTQQWRGLARYFK; GTQQWRGLARYFKI;
TQQWRGLARYFKIR; QQWRGLARYFKIRL; QWRGLARYFKIRLR;
WRGLARYFKIRLRK; RGLARYFKIRLRKR; GLARYFKIRLRKRS;
LARYFKIRLRKRSV; ARYFKIRLRKRSVK; RYFKIRLRKRSVKN;
YFKIRLRKRSVKNP; FKIRLRKRSVKNPY; KIRLRKRSVKNPYP; IRLRKRSVKNPYPI;
RLRKRSVKNPYPIS; LRKRSVKNPYPISF; RKRSVKNPYPISFL; KRSVKNPYPISFLL;
RSVKNPYPISFLLS; SVKNPYPISFLLSD; VKNPYPISFLLSDL; KNPYPISFLLSDLI;
NPYPISFLLSDLIN; PYPISFLLSDLINR; YPISFLLSDLINRR; PISFLLSDLINRRT;
ISFLLSDLINRRTQ; SFLLSDLINRRTQR; FLLSDLINRRTQRV; LLSDLINRRTQRVD;
LSDLINRRTQRVDG; SDLINRRTQRVDGQ; DLINRRTQRVDGQP;
LINRRTQRVDGQPM; INRRTQRVDGQPMY; NRRTQRVDGQPMYG;
RRTQRVDGQPMYGM; RTQRVDGQPMYGME; TQRVDGQPMYGMES;
QRVDGQPMYGMESQ; RVDGQPMYGMESQV; VDGQPMYGMESQVE;
DGQPMYGMESQVEE; GQPMYGMESQVEEV; QPMYGMESQVEEVR;
PMYGMESQVEEVRV; MYGMESQVEEVRVF; YGMESQVEEVRVFD;
GMESQVEEVRVFDG; MESQVEEVRVFDGT; ESQVEEVRVFDGTE;
SQVEEVRVFDGTER; QVEEVRVFDGTERL; VEEVRVFDGTERLP;
EEVRVFDGTERLPG; EVRVFDGTERLPGD; VRVFDGTERLPGDP;
RVFDGTERLPGDPD; VFDGTERLPGDPDM; FDGTERLPGDPDMI;
DGTERLPGDPDMIR; GTERLPGDPDMIRY; TERLPGDPDMIRYI;
ERLPGDPDMIRYID; RLPGDPDMIRYIDK; LPGDPDMIRYIDKQ;
PGDPDMIRYIDKQG; GDPDMIRYIDKQGQ; DPDMIRYIDKQGQL;
PDMIRYIDKQGQLQ; DMIRYIDKQGQLQT; MIRYIDKQGQLQTK;
IRYIDKQGQLQTKM; RYIDKQGQLQTKML; TGAFIVHIHLINAA;
GAFIVHIHLINAAF; AFIVHIHLINAAFV; ATFKLVLFWGWCFR;
TFKLVLFWGWCFRP; FKLVLFWGWCFRPF; KLVLFWGWCFRPFK;
LVLFWGWCFRPFKT; VLFWGWCFRPFKTL; LFWGWCFRPFKTLK;
FWGWCFRPFKTLKA; WGWCFRPFKTLKAF; GWCFRPFKTLKAFT;
WCFRPFKTLKAFTQ; CFRPFKTLKAFTQM; FRPFKTLKAFTQMQ;
RPFKTLKAFTQMQL; PFKTLKAFTQMQLL; FKTLKAFTQMQLLT;
KTLKAFTQMQLLTM; TLKAFTQMQLLTMG; LKAFTQMQLLTMGV;
ILFSCNIKNTFPHA; LFSCNIKNTFPHAY; FSCNIKNTFPHAYI; SCNIKNTFPHAYII;
CNIKNTFPHAYIIF; NIKNTFPHAYIIFH; IKNTFPHAYIIFHP; KSIHTYLRIQPFLP;
SIHTYLRIQPFLPF; IHTYLRIQPFLPFN; HTYLRIQPFLPFNN; TYLRIQPFLPFNNS;
YLRIQPFLPFNNSR; LRIQPFLPFNNSRL; RIQPFLPFNNSRLY; IQPFLPFNNSRLYI;
QPFLPFNNSRLYIS; PFLPFNNSRLYISC; FLPFNNSRLYISCK; LPFNNSRLYISCKI;
PFNNSRLYISCKIS; FNNSRLYISCKISY; NNSRLYISCKISYR; NSRLYISCKISYRP;
SRLYISCKISYRPK; RLYISCKISYRPKP; LYISCKISYRPKPN; IYFGPKIYLSYKSS;
YFGPKIYLSYKSSL; FGPKIYLSYKSSLQ; GPKIYLSYKSSLQG; PKIYLSYKSSLQGF;
KIYLSYKSSLQGFR; IYLSYKSSLQGFRD; YLSYKSSLQGFRDR; LSYKSSLQGFRDRI;
SYKSSLQGFRDRIL; YKSSLQGFRDRILI; KSSLQGFRDRILIH; SSLQGFRDRILIHC;
SLQGFRDRILIHCN; LQGFRDRILIHCNQ; QGFRDRILIHCNQA; GFRDRILIHCNQAW;
FRDRILIHCNQAWW; RDRILIHCNQAWWK; DRILIHCNQAWWKY;
RILIHCNQAWWKYL; ILIHCNQAWWKYLG; LIHCNQAWWKYLGS;
IHCNQAWWKYLGSF; HCNQAWWKYLGSFV; FSSCPFYIFKNNHV;
SSCPFYIFKNNHVL; SCPFYIFKNNHVLI; CPFYIFKNNHVLIY; PFYIFKNNHVLIYS;
FYIFKNNHVLIYSY; YIFKNNHVLIYSYT; PVSSFRYIENNTVQ; VSSFRYIENNTVQK;
SSFRYIENNTVQKI; SFRYIENNTVQKIK; FRYIENNTVQKIKY; RYIENNTVQKIKYY;
YIENNTVQKIKYYR; IENNTVQKIKYYRI; ENNTVQKIKYYRIH;
NNTVQKIKYYRIHF; NTVQKIKYYRIHFR; HFFPGHMKGIYSFF;
FFPGHMKGIYSFFS; NCIYCLLTNTFLIF; CIYCLLTNTFLIFT; IYCLLTNTFLIFTF;
YCLLTNTFLIFTFC; CLLTNTFLIFTFCK; LLTNTFLIFTFCKN; LTNTFLIFTFCKNN;
TNTFLIFTFCKNNS; NTFLIFTFCKNNSI; TFLIFTFCKNNSIC; FLIFTFCKNNSICK;
LIFTFCKNNSICKV; IFTFCKNNSICKVL; FTFCKNNSICKVLF; TFCKNNSICKVLFM;
FCKNNSICKVLFMI; CKNNSICKVLFMIL; KNNSICKVLFMILK; NNSICKVLFMILKV;
NSICKVLFMILKVI; SICKVLFMILKVIR; ICKVLFMILKVIRL; CKVLFMILKVIRLV;
KVLFMILKVIRLVF; VLFMILKVIRLVFF; LFMILKVIRLVFFL; FMILKVIRLVFFLT;
MILKVIRLVFFLTL; ILKVIRLVFFLTLF; LKVIRLVFFLTLFT; KVIRLVFFLTLFTL;
VIRLVFFLTLFTLL; IRLVFFLTLFTLLY; RLVFFLTLFTLLYI; LVFFLTLFTLLYIV;
VFFLTLFTLLYIVL; FFLTLFTLLYIVLK; FLTLFTLLYIVLKF; KHILTLCLYCILSN;
FPRHLLCFFRLFWA; PRHLLCFFRLFWAK; RHLLCFFRLFWAKI;
HLLCFFRLFWAKIM; LLCFFRLFWAKIML; LCFFRLFWAKIMLL;
APLNAFFYSMVWIS; PLNAFFYSMVWISS; KTKGTQLLTEIINC; TKGTQLLTEIINCR;
KGTQLLTEIINCRN; GTQLLTEIINCRNS; TQLLTEIINCRNSM; QLLTEIINCRNSMS;
LLTEIINCRNSMSM; LTEIINCRNSMSMW; TEIINCRNSMSMWS;
KEYNIMPSTHVSTN; EYNIMPSTHVSTNK; YNIMPSTHVSTNKS;
NIMPSTHVSTNKSY; IMPSTHVSTNKSYR; MPSTHVSTNKSYRI;
PSTHVSTNKSYRIF; STHVSTNKSYRIFF; THVSTNKSYRIFFH; HVSTNKSYRIFFHK;
VSTNKSYRIFFHKF; STNKSYRIFFHKFF; TNKSYRIFFHKFFI; NKSYRIFFHKFFIQ;
KSYRIFFHKFFIQN; SYRIFFHKFFIQNL; YRIFFHKFFIQNLS; RIFFHKFFIQNLSF;
IFFHKFFIQNLSFF; FFHKFFIQNLSFFF; FHKFFIQNLSFFFS; HKFFIQNLSFFFSS;
KFFIQNLSFFFSSI; FFIQNLSFFFSSIH; FIQNLSFFFSSIHS; IQNLSFFFSSIHSK;
QNLSFFFSSIHSKA; NLSFFFSSIHSKAG; LSFFFSSIHSKAGK; SFFFSSIHSKAGKG;
FFFSSIHSKAGKGS; FFSSIHSKAGKGSI; FSSIHSKAGKGSIT; SSIHSKAGKGSITK;
SIHSKAGKGSITKY; IHSKAGKGSITKYS; HSKAGKGSITKYSL; SKAGKGSITKYSLT;
KAGKGSITKYSLTK; AGKGSITKYSLTKK; GKGSITKYSLTKKL;
KGSITKYSLTKKLV; IRGKVFRVFYLSFF; RGKVFRVFYLSFFF;
GKVFRVFYLSFFFG; KVFRVFYLSFFFGW; VFRVFYLSFFFGWC;
VLRICCCFFITGKH; LRICCCFFITGKHI; RICCCFFITGKHIF; ICCCFFITGKHIFM;
CCCFFITGKHIFMA; CCFFITGKHIFMAK; IFIPFFIKGTPPGL; FIPFFIKGTPPGLP;
IPFFIKGTPPGLPL; PFFIKGTPPGLPLF; FFIKGTPPGLPLFC; FIKGTPPGLPLFCS;
IKGTPPGLPLFCSI; KGTPPGLPLFCSIG; GTPPGLPLFCSIGW; TPPGLPLFCSIGWH;
PPGLPLFCSIGWHL; SFRSLKGVSPIIWT; FRSLKGVSPIIWTH; RSLKGVSPIIWTHH;
SLKGVSPIIWTHHC; LKGVSPIIWTHHCR; KGVSPIIWTHHCRV;
GVSPIIWTHHCRVS; VSPIIWTHHCRVSS; SPIIWTHHCRVSSV; PIIWTHHCRVSSVR;
IIWTHHCRVSSVRS; IWTHHCRVSSVRSK; WTHHCRVSSVRSKP;
THHCRVSSVRSKPN; HHCRVSSVRSKPNH; HCRVSSVRSKPNHC;
CRVSSVRSKPNHCV; RVSSVRSKPNHCVK; VSSVRSKPNHCVKQ;
SSVRSKPNHCVKQS; SVRSKPNHCVKQSM; VRSKPNHCVKQSMQ;
QSIQTKGSFLKNFL; SIQTKGSFLKNFLF; IQTKGSFLKNFLFK; QTKGSFLKNFLFKC;
TKGSFLKNFLFKCL; KGSFLKNFLFKCLN; GSFLKNFLFKCLNL;
SFLKNFLFKCLNLS; HSMQGQCTEGFLEQ; SMQGQCTEGFLEQI;
MQGQCTEGFLEQIG; QGQCTEGFLEQIGH; GQCTEGFLEQIGHS;
QCTEGFLEQIGHSL; CTEGFLEQIGHSLQ; TEGFLEQIGHSLQY; EGFLEQIGHSLQYR;
GFLEQIGHSLQYRV; FLEQIGHSLQYRVS; LEQIGHSLQYRVSG;
EQIGHSLQYRVSGQ; QIGHSLQYRVSGQR; IGHSLQYRVSGQRG;
GHSLQYRVSGQRGK; HSLQYRVSGQRGKS; SLQYRVSGQRGKSA;
LQYRVSGQRGKSAQ; QYRVSGQRGKSAQT; YRVSGQRGKSAQTS;
RVSGQRGKSAQTSE; VSGQRGKSAQTSEL; SGQRGKSAQTSELL;
GQRGKSAQTSELLQ; QRGKSAQTSELLQV; RGKSAQTSELLQVP;
GKSAQTSELLQVPK; KSAQTSELLQVPKS; SAQTSELLQVPKSG;
ATFTSCSIFLYKVF; TFTSCSIFLYKVFI; FTSCSIFLYKVFIL; TSCSIFLYKVFILF;
SCSIFLYKVFILFI; CSIFLYKVFILFIL; SIFLYKVFILFILS; IFLYKVFILFILSS;
FLYKVFILFILSSS; LYKVFILFILSSSP; YKVFILFILSSSPP; KVFILFILSSSPPL;
VFILFILSSSPPLS; FILFILSSSPPLSG; AFLIKGRFPQAALS; FLIKGRFPQAALSR;
LIKGRFPQAALSRP; IKGRFPQAALSRPK; KGRFPQAALSRPKR;
GRFPQAALSRPKRS; RFPQAALSRPKRSM; FPQAALSRPKRSMS;
PQAALSRPKRSMSS; QAALSRPKRSMSSM; AALSRPKRSMSSMD;
ALSRPKRSMSSMDS; LSRPKRSMSSMDSS; SRPKRSMSSMDSSL;
RPKRSMSSMDSSLL; PKRSMSSMDSSLLR; KRSMSSMDSSLLRT;
RSMSSMDSSLLRTL; SMSSMDSSLLRTLS

15 mers:

FCKNCKRIGISPNSF; CKNCKRIGISPNSFA; KNCKRIGISPNSFAR;
NCKRIGISPNSFARP; CKRIGISPNSFARPQ; KRIGISPNSFARPQK;
RIGISPNSFARPQKK; IGISPNSFARPQKKP; GISPNSFARPQKKPP;
ISPNSFARPQKKPPH; SPNSFARPQKKPPHP; PNSFARPQKKPPHPY;
NSFARPQKKPPHPYY; SFARPQKKPPHPYYL; FARPQKKPPHPYYLR;
ARPQKKPPHPYYLRE; RPQKKPPHPYYLRER; PQKKPPHPYYLRERV;
QKKPPHPYYLRERVE; KKPPHPYYLRERVEA; KPPHPYYLRERVEAE;
PPHPYYLRERVEAEA; PHPYYLRERVEAEAA; HPYYLRERVEAEAAS;
PYYLRERVEAEAASA; YYLRERVEAEAASAS; YLRERVEAEAASASY;
LRERVEAEAASASYI; RERVEAEAASASYIL; KKRPQGGAAYPWNAA;
KRPQGGAAYPWNAAK; RPQGGAAYPWNAAKP; PQEGKCMTHRGMQPN;
QEGKCMTHRGMQPNH; EGKCMTHRGMQPNHD; GKCMTHRGMQPNHDL;
KCMTHRGMQPNHDLR; CMTHRGMQPNHDLRK; MTHRGMQPNHDLRKE;
THRGMQPNHDLRKES; HRGMQPNHDLRKESA; LTGRSCLPMECSQTM;
TGRSCLPMECSQTMT; GRSCLPMECSQTMTS; RSCLPMECSQTMTSG;
SCLPMECSQTMTSGR; CLPMECSQTMTSGRK; LPMECSQTMTSGRKV;
PMECSQTMTSGRKVH; MECSQTMTSGRKVHD; ECSQTMTSGRKVHDR;
CSQTMTSGRKVHDRH; SQTMTSGRKVHDRHV; QTMTSGRKVHDRHVL;
TMTSGRKVHDRHVLR; MTSGRKVHDRHVLRA; ESWPCPQLNWTKAMV;
SWPCPQLNWTKAMVL; WPCPQLNWTKAMVLR; PCPQLNWTKAMVLRQ;
CPQLNWTKAMVLRQL; PQLNWTKAMVLRQLS; QLNWTKAMVLRQLSR;
LNWTKAMVLRQLSRQ; NWTKAMVLRQLSRQA; WTKAMVLRQLSRQAS;
TKAMVLRQLSRQASV; KAMVLRQLSRQASVK; AMVLRQLSRQASVKV;
MVLRQLSRQASVKVG; VLRQLSRQASVKVGK; LRQLSRQASVKVGKT;
RQLSRQASVKVGKTW; QLSRQASVKVGKTWT; LSRQASVKVGKTWTG;
SRQASVKVGKTWTGT; RQASVKVGKTWTGTK; QASVKVGKTWTGTKK;
ASVKVGKTWTGTKKR; SVKVGKTWTGTKKRA; VKVGKTWTGTKKRAQ;
KVGKTWTGTKKRAQR; VGKTWTGTKKRAQRI; GKTWTGTKKRAQRIF;
KTWTGTKKRAQRIFI; TWTGTKKRAQRIFIF; WTGTKKRAQRIFIFI;
TGTKKRAQRIFIFIL; GTKKRAQRIFIFILE; TKKRAQRIFIFILEL; KKRAQRIFIFILELL;
KRAQRIFIFILELLL; RAQRIFIFILELLLE; AQRIFIFILELLLEF; QRIFIFILELLLEFC;
RIFIFILELLLEFCR; IFIFILELLLEFCRG; FIFILELLLEFCRGE; IFILELLLEFCRGED;
FILELLLEFCRGEDS; ILELLLEFCRGEDSV; LELLLEFCRGEDSVD;
ELLLEFCRGEDSVDG; LLLEFCRGEDSVDGK; LLEFCRGEDSVDGKN;
LEFCRGEDSVDGKNK; EFCRGEDSVDGKNKS; FCRGEDSVDGKNKST;
CRGEDSVDGKNKSTT; RGEDSVDGKNKSTTA; GEDSVDGKNKSTTAL;
EDSVDGKNKSTTALP; DSVDGKNKSTTALPA; SVDGKNKSTTALPAV;
VDGKNKSTTALPAVK; DGKNKSTTALPAVKD; GKNKSTTALPAVKDS;
KNKSTTALPAVKDSV; NKSTTALPAVKDSVK; KSTTALPAVKDSVKD;
STTALPAVKDSVKDS; VSNPFFFVFPGSWVL; SNPFFFVFPGSWVLL;
LPVYLRLLLPQDFQW; PVYLRLLLPQDFQWL; VYLRLLLPQDFQWLK;
YLRLLLPQDFQWLKL; LRLLLPQDFQWLKLL; RLLLPQDFQWLKLLL;
LLLPQDFQWLKLLLG; LLPQDFQWLKLLLGR; LPQDFQWLKLLLGRL;
PQDFQWLKLLLGRLL; QDFQWLKLLLGRLLL; DFQWLKLLLGRLLLL;
ASISNQAWLWNCLTQ; SISNQAWLWNCLTQM; ISNQAWLWNCLTQMS;
SNQAWLWNCLTQMST; NQAWLWNCLTQMSTM; QAWLWNCLTQMSTMI;
AWLWNCLTQMSTMIF; WLWNCLTQMSTMIFC; LWNCLTQMSTMIFCF;
WNCLTQMSTMIFCFL; NCLTQMSTMIFCFLV; ILLLIIFNTLILGIG;
LLLIIFNTLILGIGV; LLIIFNTLILGIGVL; LIIFNTLILGIGVLL; IIFNTLILGIGVLLC;
IFNTLILGIGVLLCL; FNTLILGIGVLLCLL; NTLILGIGVLLCLLL;
TLILGIGVLLCLLLF; LILGIGVLLCLLLFP; ILGIGVLLCLLLFPR;
LGIGVLLCLLLFPRL; GIGVLLCLLLFPRLC; IGVLLCLLLFPRLCG;
GVLLCLLLFPRLCGM; VLLCLLLFPRLCGML; LLCLLLFPRLCGMLL;
LCLLLFPRLCGMLLG; CLLLFPRLCGMLLGM; LLLFPRLCGMLLGMI;
LLFPRLCGMLLGMIY; LFPRLCGMLLGMIYL; FPRLCGMLLGMTYLL;
PHRNCREEQKDFLET; HRNCREEQKDFLETP; RNCREEQKDFLETPW;
NCREEQKDFLETPWL; CREEQKDFLETPWLD; REEQKDFLETPWLDF;
EEQKDFLETPWLDFW; EQKDFLETPWLDFWR; QKDFLETPWLDFWRK;
KDFLETPWLDFWRKL; DFLETPWLDFWRKLP; FLETPWLDFWRKLPG;
LETPWLDFWRKLPGQ; ETPWLDFWRKLPGQL; TFIIIFNNIILIFPL; FIIIFNNIILIFPLL;
IIIFNNIILIFPLLG; IIFNNIILIFPLLGP; IFNNIILIFPLLGPQ; FNNIILIFPLLGPQW;
NNIILIFPLLGPQWL; NIILIFPLLGPQWLD; IILIFPLLGPQWLDK;
LKGKVPVYILAILIV; KKLLPQEVLIKELLL; KLLPQEVLIKELLLN;
LLPQEVLIKELLLNG; LPQEVLIKELLLNGC; PQEVLIKELLLNGCC;
QEVLIKELLLNGCCL; EVLIKELLLNGCCLY; VLIKELLLNGCCLYF;
HLLLKHMKMAPTKRK; LLLKHMKMAPTKRKG; LLKHMKMAPTKRKGE;
LKHMKMAPTKRKGEC; KHMKMAPTKRKGECP; HMKMAPTKRKGECPG;
MKMAPTKRKGECPGA; KMAPTKRKGECPGAA; MAPTKRKGECPGAAP;
APTKRKGECPGAAPK; PTKRKGECPGAAPKK; TKRKGECPGAAPKKP;
KRKGECPGAAPKKPK; RKGECPGAAPKKPKE; KGECPGAAPKKPKEP;
GECPGAAPKKPKEPV; ECPGAAPKKPKEPVQ; CPGAAPKKPKEPVQV;
PGAAPKKPKEPVQVP; GAAPKKPKEPVQVPK; AAPKKPKEPVQVPKL;
APKKPKEPVQVPKLL; PKKPKEPVQVPKLLI; KKPKEPVQVPKLLIK;
KPKEPVQVPKLLIKG; PKEPVQVPKLLIKGG; KEPVQVPKLLIKGGV;
EPVQVPKLLIKGGVE; PVQVPKLLIKGGVEV; VQVPKLLIKGGVEVL;
QVPKLLIKGGVEVLE; VPKLLIKGGVEVLEV; PKLLIKGGVEVLEVK;
KLLIKGGVEVLEVKT; LLIKGGVEVLEVKTG; LIKGGVEVLEVKTGV;
IKGGVEVLEVKTGVD; KGGVEVLEVKTGVDA; GGVEVLEVKTGVDAI;
GVEVLEVKTGVDAIT; VEVLEVKTGVDAITE; EVLEVKTGVDAITEV;
VLEVKTGVDAITEVE; LEVKTGVDAITEVEC; EVKTGVDAITEVECF;
VKTGVDAITEVECFL; KTGVDAITEVECFLN; TGVDAITEVECFLNP;
GVDAITEVECFLNPE; VDAITEVECFLNPEM; DAITEVECFLNPEMG;
AITEVECFLNPEMGD; ITEVECFLNPEMGDP; TEVECFLNPEMGDPD;
EVECFLNPEMGDPDE; VECFLNPEMGDPDEN; ECFLNPEMGDPDENL;
CFLNPEMGDPDENLR; FLNPEMGDPDENLRG; LNPEMGDPDENLRGF;
NPEMGDPDENLRGFS; PEMGDPDENLRGFSL; EMGDPDENLRGFSLK;
MGDPDENLRGFSLKL; GDPDENLRGFSLKLS; DPDENLRGFSLKLSA;
PDENLRGFSLKLSAE; DENLRGFSLKLSAEN; ENLRGFSLKLSAEND;
NLRGFSLKLSAENDF; LRGFSLKLSAENDFS; RGFSLKLSAENDFSS;
GFSLKLSAENDFSSD; FSLKLSAENDFSSDS; SLKLSAENDFSSDSP;
LKLSAENDFSSDSPE; KLSAENDFSSDSPER; LSAENDFSSDSPERK;
SAENDFSSDSPERKM; AENDFSSDSPERKML; ENDFSSDSPERKMLP;
NDFSSDSPERKMLPC; DFSSDSPERKMLPCY; FSSDSPERKMLPCYS;
SSDSPERKMLPCYST; SDSPERKMLPCYSTA; DSPERKMLPCYSTAR;
SPERKMLPCYSTARI; PERKMLPCYSTARIP; ERKMLPCYSTARIPL;
RKMLPCYSTARIPLP; KMLPCYSTARIPLPN; MLPCYSTARIPLPNL;
LPCYSTARIPLPNLN; PCYSTARIPLPNLNE; CYSTARIPLPNLNED;
YSTARIPLPNLNEDL; STARIPLPNLNEDLT; TARIPLPNLNEDLTC;
ARIPLPNLNEDLTCG; RIPLPNLNEDLTCGN; IPLPNLNEDLTCGNL;
PLPNLNEDLTCGNLL; LPNLNEDLTCGNLLM; PNLNEDLTCGNLLMW;
NLNEDLTCGNLLMWE; LNEDLTCGNLLMWEA; NEDLTCGNLLMWEAV;
EDLTCGNLLMWEAVT; DLTCGNLLMWEAVTV; LTCGNLLMWEAVTVQ;
TCGNLLMWEAVTVQT; CGNLLMWEAVTVQTE; GNLLMWEAVTVQTEV;
NLLMWEAVTVQTEVI; LLMWEAVTVQTEVIG; LMWEAVTVQTEVIGI;
MWEAVTVQTEVIGIT; WEAVTVQTEVIGITS; EAVTVQTEVIGITSM;
AVTVQTEVIGITSML; VTVQTEVIGITSMLN; TVQTEVIGITSMLNL;
VQTEVIGITSMLNLH; QTEVIGITSMLNLHA; TEVIGITSMLNLHAG;
EVIGITSMLNLHAGS; VIGITSMLNLHAGSQ; IGITSMLNLHAGSQK;
GITSMLNLHAGSQKV; ITSMLNLHAGSQKVH; TSMLNLHAGSQKVHE;
SMLNLHAGSQKVHEH; MLNLHAGSQKVHEHG; LNLHAGSQKVHEHGG;
NLHAGSQKVHEHGGG; LHAGSQKVHEHGGGK; HAGSQKVHEHGGGKP;
AGSQKVHEHGGGKPI; GSQKVHEHGGGKPIQ; SQKVHEHGGGKPIQG;
QKVHEHGGGKPIQGS; KVHEHGGGKPIQGSN; VHEHGGGKPIQGSNF;
HEHGGGKPIQGSNFH; EHGGGKPIQGSNFHF; HGGGKPIQGSNFHFF;
GGGKPIQGSNFHFFA; GGKPIQGSNFHFFAV; GKPIQGSNFHFFAVG;
KPIQGSNFHFFAVGG; PIQGSNFHFFAVGGE; IQGSNFHFFAVGGEP;
QGSNFHFFAVGGEPL; GSNFHFFAVGGEPLE; SNFHFFAVGGEPLEM;
NFHFFAVGGEPLEMQ; FHFFAVGGEPLEMQG; HFFAVGGEPLEMQGV;
FFAVGGEPLEMQGVL; FAVGGEPLEMQGVLM; AVGGEPLEMQGVLMN;
VGGEPLEMQGVLMNY; GGEPLEMQGVLMNYR; GEPLEMQGVLMNYRS;
EPLEMQGVLMNYRSK; PLEMQGVLMNYRSKY; LEMQGVLMNYRSKYP;
EMQGVLMNYRSKYPD; MQGVLMNYRSKYPDG; QGVLMNYRSKYPDGT;
GVLMNYRSKYPDGTI; VLMNYRSKYPDGTIT; LMNYRSKYPDGTITP;
MNYRSKYPDGTITPK; NYRSKYPDGTITPKN; YRSKYPDGTITPKNP;
RSKYPDGTITPKNPT; SKYPDGTITPKNPTA; KYPDGTITPKNPTAQ;
YPDGTITPKNPTAQS; PDGTITPKNPTAQSQ; DGTITPKNPTAQSQV;
GTITPKNPTAQSQVM; TITPKNPTAQSQVMN; ITPKNPTAQSQVMNT;
TPKNPTAQSQVMNTD; PKNPTAQSQVMNTDH; KNPTAQSQVMNTDHK;
NPTAQSQVMNTDHKA; PTAQSQVMNTDHKAY; TAQSQVMNTDHKAYL;
AQSQVMNTDHKAYLD; QSQVMNTDHKAYLDK; SQVMNTDHKAYLDKN;
QVMNTDHKAYLDKNN; VMNTDHKAYLDKNNA; MNTDHKAYLDKNNAY;
NTDHKAYLDKNNAYP; TDHKAYLDKNNAYPV; DHKAYLDKNNAYPVE;
HKAYLDKNNAYPVEC; KAYLDKNNAYPVECW; AYLDKNNAYPVECWV;
YLDKNNAYPVECWVP; LDKNNAYPVECWVPD; DKNNAYPVECWVPDP;
KNNAYPVECWVPDPS; NNAYPVECWVPDPSR; NAYPVECWVPDPSRN;
AYPVECWVPDPSRNE; YPVECWVPDPSRNEN; PVECWVPDPSRNENA;
VECWVPDPSRNENAR; ECWVPDPSRNENARY; CWVPDPSRNENARYF;
WVPDPSRNENARYFG; VPDPSRNENARYFGT; PDPSRNENARYFGTF;
DPSRNENARYFGTFT; PSRNENARYFGTFTG; SRNENARYFGTFTGG;
RNENARYFGTFTGGE; NENARYFGTFTGGEN; ENARYFGTFTGGENV;
NARYFGTFTGGENVP; ARYFGTFTGGENVPP; RYFGTFTGGENVPPV;
YFGTFTGGENVPPVL; FGTFTGGENVPPVLH; GTFTGGENVPPVLHV;
TFTGGENVPPVLHVT; FTGGENVPPVLHVTN; TGGENVPPVLHVTNT;
GGENVPPVLHVTNTA; GENVPPVLHVTNTAT; ENVPPVLHVTNTATT;
NVPPVLHVTNTATTV; VPPVLHVTNTATTVL; PPVLHVTNTATTVLL;
PVLHVTNTATTVLLD; VLHVTNTATTVLLDE; LHVTNTATTVLLDEQ;
HVTNTATTVLLDEQG; VTNTATTVLLDEQGV; TNTATTVLLDEQGVG;
NTATTVLLDEQGVGP; TATTVLLDEQGVGPL; ATTVLLDEQGVGPLC;
TTVLLDEQGVGPLCK; TVLLDEQGVGPLCKA; VLLDEQGVGPLCKAD;
LLDEQGVGPLCKADS; LDEQGVGPLCKADSL; DEQGVGPLCKADSLY;
EQGVGPLCKADSLYV; QGVGPLCKADSLYVS; GVGPLCKADSLYVSA;
VGPLCKADSLYVSAA; GPLCKADSLYVSAAD; PLCKADSLYVSAADI;
LCKADSLYVSAADIC; CKADSLYVSAADICG; KADSLYVSAADICGL;
ADSLYVSAADICGLF; DSLYVSAADICGLFT; SLYVSAADICGLFTN;
LYVSAADICGLFTNS; YVSAADICGLFTNSS; VSAADICGLFTNSSG;
SAADICGLFTNSSGT; AADICGLFTNSSGTQ; ADICGLFTNSSGTQQ;
DICGLFTNSSGTQQW; ICGLFTNSSGTQQWR; CGLFTNSSGTQQWRG;
GLFTNSSGTQQWRGL; LFTNSSGTQQWRGLA; FTNSSGTQQWRGLAR;
TNSSGTQQWRGLARY; NSSGTQQWRGLARYF; SSGTQQWRGLARYFK;
SGTQQWRGLARYFKI; GTQQWRGLARYFKIR; TQQWRGLARYFKIRL;
QQWRGLARYFKIRLR; QWRGLARYFKIRLRK; WRGLARYFKIRLRKR;
RGLARYFKIRLRKRS; GLARYFKIRLRKRSV; LARYFKIRLRKRSVK;
ARYFKIRLRKRSVKN; RYFKIRLRKRSVKNP; YFKIRLRKRSVKNPY;
FKIRLRKRSVKNPYP; KIRLRKRSVKNPYPI; IRLRKRSVKNPYPIS;
RLRKRSVKNPYPISF; LRKRSVKNPYPISFL; RKRSVKNPYPISFLL;
KRSVKNPYPISFLLS; RSVKNPYPISFLLSD; SVKNPYPISFLLSDL;
VKNPYPISFLLSDLI; KNPYPISFLLSDLIN; NPYPISFLLSDLINR; PYPISFLLSDLINRR;
YPISFLLSDLINRRT; PISFLLSDLINRRTQ; ISFLLSDLINRRTQR;
SFLLSDLINRRTQRV; FLLSDLINRRTQRVD; LLSDLINRRTQRVDG;
LSDLINRRTQRVDGQ; SDLINRRTQRVDGQP; DLINRRTQRVDGQPM;
LINRRTQRVDGQPMY; INRRTQRVDGQPMYG; NRRTQRVDGQPMYGM;
RRTQRVDGQPMYGME; RTQRVDGQPMYGMES; TQRVDGQPMYGMESQ;
QRVDGQPMYGMESQV; RVDGQPMYGMESQVE; VDGQPMYGMESQVEE;
DGQPMYGMESQVEEV; GQPMYGMESQVEEVR; QPMYGMESQVEEVRV;
PMYGMESQVEEVRVF; MYGMESQVEEVRVFD; YGMESQVEEVRVFDG;
GMESQVEEVRVFDGT; MESQVEEVRVFDGTE; ESQVEEVRVFDGTER;
SQVEEVRVFDGTERL; QVEEVRVFDGTERLP; VEEVRVFDGTERLPG;
EEVRVFDGTERLPGD; EVRVFDGTERLPGDP; VRVFDGTERLPGDPD;
RVFDGTERLPGDPDM; VFDGTERLPGDPDMI; FDGTERLPGDPDMIR;
DGTERLPGDPDMIRY; GTERLPGDPDMIRYI; TERLPGDPDMIRYID;
ERLPGDPDMIRYIDK; RLPGDPDMIRYIDKQ; LPGDPDMIRYIDKQG;
PGDPDMIRYIDKQGQ; GDPDMIRYIDKQGQL; DPDMIRYIDKQGQLQ;
PDMIRYIDKQGQLQT; DMIRYIDKQGQLQTK; MIRYIDKQGQLQTKM;
IRYIDKQGQLQTKML; TGAFIVHIHLINAAF; GAFIVHIHLINAAFV;
ATFKLVLFWGWCFRP; TFKLVLFWGWCFRPF; FKLVLFWGWCFRPFK;
KLVLFWGWCFRPFKT; LVLFWGWCFRPFKTL; VLFWGWCFRPFKTLK;
LFWGWCFRPFKTLKA; FWGWCFRPFKTLKAF; WGWCFRPFKTLKAFT;
GWCFRPFKTLKAFTQ; WCFRPFKTLKAFTQM; CFRPFKTLKAFTQMQ;
FRPFKTLKAFTQMQL; RPFKTLKAFTQMQLL; PFKTLKAFTQMQLLT;
FKTLKAFTQMQLLTM; KTLKAFTQMQLLTMG; TLKAFTQMQLLTMGV;
ILFSCNIKNTFPHAY; LFSCNIKNTFPHAYI; FSCNIKNTFPHAYII;
SCNIKNTFPHAYIIF; CNIKNTFPHAYIIFH; NIKNTFPHAYIIFHP;
KSIHTYLRIQPFLPF; SIHTYLRIQPFLPFN; IHTYLRIQPFLPFNN;
HTYLRIQPFLPFNNS; TYLRIQPFLPFNNSR; YLRIQPFLPFNNSRL;
LRIQPFLPFNNSRLY; RIQPFLPFNNSRLYI; IQPFLPFNNSRLYIS;
QPFLPFNNSRLYISC; PFLPFNNSRLYISCK; FLPFNNSRLYISCKI;
LPFNNSRLYISCKIS; PFNNSRLYISCKISY; FNNSRLYISCKISYR;
NNSRLYISCKISYRP; NSRLYISCKISYRPK; SRLYISCKISYRPKP;
RLYISCKISYRPKPN; IYFGPKIYLSYKSSL; YFGPKIYLSYKSSLQ;
FGPKIYLSYKSSLQG; GPKIYLSYKSSLQGF; PKIYLSYKSSLQGFR;
KIYLSYKSSLQGFRD; IYLSYKSSLQGFRDR; YLSYKSSLQGFRDRI;
LSYKSSLQGFRDRIL; SYKSSLQGFRDRILI; YKSSLQGFRDRILIH;
KSSLQGFRDRILIHC; SSLQGFRDRILIHCN; SLQGFRDRILIHCNQ;
LQGFRDRILIHCNQA; QGFRDRILIHCNQAW; GFRDRILIHCNQAWW;
FRDRILIHCNQAWWK; RDRILIHCNQAWWKY; DRILIHCNQAWWKYL;
RILIHCNQAWWKYLG; ILIHCNQAWWKYLGS; LIHCNQAWWKYLGSF;
IHCNQAWWKYLGSFV; FSSCPFYIFKNNHVL; SSCPFYIFKNNHVLI;
SCPFYIFKNNHVLIY; CPFYIFKNNHVLIYS; PFYIFKNNHVLIYSY;
FYIFKNNHVLIYSYT; PVSSFRYIENNTVQK; VSSFRYIENNTVQKI;
SSFRYIENNTVQKIK; SFRYIENNTVQKIKY; FRYIENNTVQKIKYY;
RYIENNTVQKIKYYR; YIENNTVQKIKYYRI; IENNTVQKIKYYRIH;
ENNTVQKIKYYRIHF; NNTVQKIKYYRIHFR; HFFPGHMKGIYSFFS;
NCIYCLLTNTFLIFT; CIYCLLTNTFLIFTF; IYCLLTNTFLIFTFC;
YCLLTNTFLIFTFCK; CLLTNTFLIFTFCKN; LLTNTFLIFTFCKNN;
LTNTFLIFTFCKNNS; TNTFLIFTFCKNNSI; NTFLIFTFCKNNSIC;
TFLIFTFCKNNSICK; FLIFTFCKNNSICKV; LIFTFCKNNSICKVL;
IFTFCKNNSICKVLF; FTFCKNNSICKVLFM; TFCKNNSICKVLFMI;
FCKNNSICKVLFMIL; CKNNSICKVLFMILK; KNNSICKVLFMILKV;
NNSICKVLFMILKVI; NSICKVLFMILKVIR; SICKVLFMILKVIRL;
ICKVLFMILKVIRLV; CKVLFMILKVIRLVF; KVLFMILKVIRLVFF;
VLFMILKVIRLVFFL; LFMILKVIRLVFFLT; FMILKVIRLVFFLTL;
MILKVIRLVFFLTLF; ILKVIRLVFFLTLFT; LKVIRLVFFLTLFTL;
KVIRLVFFLTLFTLL; VIRLVFFLTLFTLLY; IRLVFFLTLFTLLYI;
RLVFFLTLFTLLYIV; LVFFLTLFTLLYIVL; VFFLTLFTLLYIVLK;
FFLTLFTLLYIVLKF; FPRHLLCFFRLFWAK; PRHLLCFFRLFWAKI;
RHLLCFFRLFWAKIM; HLLCFFRLFWAKIML; LLCFFRLFWAKIMLL;
APLNAFFYSMVWISS; KTKGTQLLTEIINCR; TKGTQLLTEIINCRN;
KGTQLLTEIINCRNS; GTQLLTEIINCRNSM; TQLLTEIINCRNSMS;
QLLTEIINCRNSMSM; LLTEIINCRNSMSMW; LTEIINCRNSMSMWS;
KEYNIMPSTHVSTNK; EYNIMPSTHVSTNKS; YNIMPSTHVSTNKSY;
NIMPSTHVSTNKSYR; IMPSTHVSTNKSYRI; MPSTHVSTNKSYRIF;
PSTHVSTNKSYRIFF; STHVSTNKSYRIFFH; THVSTNKSYRIFFHK;
HVSTNKSYRIFFHKF; VSTNKSYRIFFHKFF; STNKSYRIFFHKFFI;
TNKSYRIFFHKFFIQ; NKSYRIFFHKFFIQN; KSYRIFFHKFFIQNL;
SYRIFFHKFFIQNLS; YRIFFHKFFIQNLSF; RIFFHKFFIQNLSFF; IFFHKFFIQNLSFFF;
FFHKFFIQNLSFFFS; FHKFFIQNLSFFFSS; HKFFIQNLSFFFSSI; KFFIQNLSFFFSSIH;
FFIQNLSFFFSSIHS; FIQNLSFFFSSIHSK; IQNLSFFFSSIHSKA; QNLSFFFSSIHSKAG;
NLSFFFSSIHSKAGK; LSFFFSSIHSKAGKG; SFFFSSIHSKAGKGS;
FFFSSIHSKAGKGSI; FFSSIHSKAGKGSIT; FSSIHSKAGKGSITK;
SSIHSKAGKGSITKY; SIHSKAGKGSITKYS; IHSKAGKGSITKYSL;
HSKAGKGSITKYSLT; SKAGKGSITKYSLTK; KAGKGSITKYSLTKK;
AGKGSITKYSLTKKL; GKGSITKYSLTKKLV; IRGKVFRVFYLSFFF;
RGKVFRVFYLSFFFG; GKVFRVFYLSFFFGW; KVFRVFYLSFFFGWC;
VLRICCCFFITGKHI; LRICCCFFITGKHIF; RICCCFFITGKHIFM;
ICCCFFITGKHIFMA; CCCFFITGKHIFMAK; IFIPFFIKGTPPGLP; FIPFFIKGTPPGLPL;
IPFFIKGTPPGLPLF; PFFIKGTPPGLPLFC; FFIKGTPPGLPLFCS; FIKGTPPGLPLFCSI;
IKGTPPGLPLFCSIG; KGTPPGLPLFCSIGW; GTPPGLPLFCSIGWH;
TPPGLPLFCSIGWHL; SFRSLKGVSPIIWTH; FRSLKGVSPIIWTHH;
RSLKGVSPIIWTHHC; SLKGVSPIIWTHHCR; LKGVSPIIWTHHCRV;
KGVSPIIWTHHCRVS; GVSPIIWTHHCRVSS; VSPIIWTHHCRVSSV;
SPIIWTHHCRVSSVR; PIIWTHHCRVSSVRS; IIWTHHCRVSSVRSK;
IWTHHCRVSSVRSKP; WTHHCRVSSVRSKPN; THHCRVSSVRSKPNH;
HHCRVSSVRSKPNHC; HCRVSSVRSKPNHCV; CRVSSVRSKPNHCVK;
RVSSVRSKPNHCVKQ; VSSVRSKPNHCVKQS; SSVRSKPNHCVKQSM;
SVRSKPNHCVKQSMQ; QSIQTKGSFLKNFLF; SIQTKGSFLKNFLFK;
IQTKGSFLKNFLFKC; QTKGSFLKNFLFKCL; TKGSFLKNFLFKCLN;
KGSFLKNFLFKCLNL; GSFLKNFLFKCLNLS; HSMQGQCTEGFLEQI;
SMQGQCTEGFLEQIG; MQGQCTEGFLEQIGH; QGQCTEGFLEQIGHS;
GQCTEGFLEQIGHSL; QCTEGFLEQIGHSLQ; CTEGFLEQIGHSLQY;
TEGFLEQIGHSLQYR; EGFLEQIGHSLQYRV; GFLEQIGHSLQYRVS;
FLEQIGHSLQYRVSG; LEQIGHSLQYRVSGQ; EQIGHSLQYRVSGQR;
QIGHSLQYRVSGQRG; IGHSLQYRVSGQRGK; GHSLQYRVSGQRGKS;
HSLQYRVSGQRGKSA; SLQYRVSGQRGKSAQ; LQYRVSGQRGKSAQT;
QYRVSGQRGKSAQTS; YRVSGQRGKSAQTSE; RVSGQRGKSAQTSEL;
VSGQRGKSAQTSELL; SGQRGKSAQTSELLQ; GQRGKSAQTSELLQV;
QRGKSAQTSELLQVP; RGKSAQTSELLQVPK; GKSAQTSELLQVPKS;
KSAQTSELLQVPKSG; ATFTSCSIFLYKVFI; TFTSCSIFLYKVFIL;
FTSCSIFLYKVFILF; TSCSIFLYKVFILFI; SCSIFLYKVFILFIL; CSIFLYKVFILFILS;
SIFLYKVFILFILSS; IFLYKVFILFILSSS; FLYKVFILFILSSSP; LYKVFILFILSSSPP;
YKVFILFILSSSPPL; KVFILFILSSSPPLS; VFILFILSSSPPLSG; AFLIKGRFPQAALSR;
FLIKGRFPQAALSRP; LIKGRFPQAALSRPK; IKGRFPQAALSRPKR;
KGRFPQAALSRPKRS; GRFPQAALSRPKRSM; RFPQAALSRPKRSMS;
FPQAALSRPKRSMSS; PQAALSRPKRSMSSM; QAALSRPKRSMSSMD;
AALSRPKRSMSSMDS; ALSRPKRSMSSMDSS; LSRPKRSMSSMDSSL;
SRPKRSMSSMDSSLL; RPKRSMSSMDSSLLR; PKRSMSSMDSSLLRT;
KRSMSSMDSSLLRTL; RSMSSMDSSLLRTLS

16 mers:

FCKNCKRIGISPNSFA; CKNCKRIGISPNSFAR; KNCKRIGISPNSFARP;
NCKRIGISPNSFARPQ; CKRIGISPNSFARPQK; KRIGISPNSFARPQKK;
RIGISPNSFARPQKKP; IGISPNSFARPQKKPP; GISPNSFARPQKKPPH;
ISPNSFARPQKKPPHP; SPNSFARPQKKPPHPY; PNSFARPQKKPPHPYY;
NSFARPQKKPPHPYYL; SFARPQKKPPHPYYLR; FARPQKKPPHPYYLRE;
ARPQKKPPHPYYLRER; RPQKKPPHPYYLRERV; PQKKPPHPYYLRERVE;
QKKPPHPYYLRERVEA; KKPPHPYYLRERVEAE; KPPHPYYLRERVEAEA;
PPHPYYLRERVEAEAA; PHPYYLRERVEAEAAS; HPYYLRERVEAEAASA;
PYYLRERVEAEAASAS; YYLRERVEAEAASASY; YLRERVEAEAASASYI;
LRERVEAEAASASYIL; KKRPQGGAAYPWNAAK; KRPQGGAAYPWNAAKP;
PQEGKCMTHRGMQPNH; QEGKCMTHRGMQPNHD; EGKCMTHRGMQPNHDL;
GKCMTHRGMQPNHDLR; KCMTHRGMQPNHDLRK; CMTHRGMQPNHDLRKE;
MTHRGMQPNHDLRKES; THRGMQPNHDLRKESA; LTGRSCLPMECSQTMT;
TGRSCLPMECSQTMTS; GRSCLPMECSQTMTSG; RSCLPMECSQTMTSGR;
SCLPMECSQTMTSGRK; CLPMECSQTMTSGRKV; LPMECSQTMTSGRKVH;
PMECSQTMTSGRKVHD; MECSQTMTSGRKVHDR; ECSQTMTSGRKVHDRH;
CSQTMTSGRKVHDRHV; SQTMTSGRKVHDRHVL; QTMTSGRKVHDRHVLR;
TMTSGRKVHDRHVLRA; ESWPCPQLNWTKAMVL; SWPCPQLNWTKAMVLR;
WPCPQLNWTKAMVLRQ; PCPQLNWTKAMVLRQL; CPQLNWTKAMVLRQLS;
PQLNWTKAMVLRQLSR; QLNWTKAMVLRQLSRQ; LNWTKAMVLRQLSRQA;
NWTKAMVLRQLSRQAS; WTKAMVLRQLSRQASV; TKAMVLRQLSRQASVK;
KAMVLRQLSRQASVKV; AMVLRQLSRQASVKVG; MVLRQLSRQASVKVGK;
VLRQLSRQASVKVGKT; LRQLSRQASVKVGKTW; RQLSRQASVKVGKTWT;
QLSRQASVKVGKTWTG; LSRQASVKVGKTWTGT; SRQASVKVGKTWTGTK;
RQASVKVGKTWTGTKK; QASVKVGKTWTGTKKR; ASVKVGKTWTGTKKRA;
SVKVGKTWTGTKKRAQ; VKVGKTWTGTKKRAQR; KVGKTWTGTKKRAQRI;
VGKTWTGTKKRAQRIF; GKTWTGTKKRAQRIFI; KTWTGTKKRAQRIFIF;
TWTGTKKRAQRIFIFI; WTGTKKRAQRIFIFIL; TGTKKRAQRIFIFILE;
GTKKRAQRIFIFILEL; TKKRAQRIFIFILELL; KKRAQRIFIFILELLL;
KRAQRIFIFILELLLE; RAQRIFIFILELLLEF; AQRIFIFILELLLEFC;
QRIFIFILELLLEFCR; RIFIFILELLLEFCRG; IFIFILELLLEFCRGE;
FIFILELLLEFCRGED; IFILELLLEFCRGEDS; FILELLLEFCRGEDSV;
ILELLLEFCRGEDSVD; LELLLEFCRGEDSVDG; ELLLEFCRGEDSVDGK;
LLLEFCRGEDSVDGKN; LLEFCRGEDSVDGKNK; LEFCRGEDSVDGKNKS;
EFCRGEDSVDGKNKST; FCRGEDSVDGKNKSTT; CRGEDSVDGKNKSTTA;
RGEDSVDGKNKSTTAL; GEDSVDGKNKSTTALP; EDSVDGKNKSTTALPA;
DSVDGKNKSTTALPAV; SVDGKNKSTTALPAVK; VDGKNKSTTALPAVKD;
DGKNKSTTALPAVKDS; GKNKSTTALPAVKDSV; KNKSTTALPAVKDSVK;
NKSTTALPAVKDSVKD; KSTTALPAVKDSVKDS; VSNPFFFVFPGSWVLL;
LPVYLRLLLPQDFQWL; PVYLRLLLPQDFQWLK; VYLRLLLPQDFQWLKL;
YLRLLLPQDFQWLKLL; LRLLLPQDFQWLKLLL; RLLLPQDFQWLKLLLG;
LLLPQDFQWLKLLLGR; LLPQDFQWLKLLLGRL; LPQDFQWLKLLLGRLL;
PQDFQWLKLLLGRLLL; QDFQWLKLLLGRLLLL; ASISNQAWLWNCLTQM;
SISNQAWLWNCLTQMS; ISNQAWLWNCLTQMST; SNQAWLWNCLTQMSTM;
NQAWLWNCLTQMSTMI; QAWLWNCLTQMSTMIF; AWLWNCLTQMSTMIFC;
WLWNCLTQMSTMIFCF; LWNCLTQMSTMIFCFL; WNCLTQMSTMIFCFLV;
ILLLIIFNTLILGIGV; LLLIIFNTLILGIGVL; LLIIFNTLILGIGVLL;
LIIFNTLILGIGVLLC; IIFNTLILGIGVLLCL; IFNTLILGIGVLLCLL;
FNTLILGIGVLLCLLL; NTLILGIGVLLCLLLF; TLILGIGVLLCLLLFP;
LILGIGVLLCLLLFPR; ILGIGVLLCLLLFPRL; LGIGVLLCLLLFPRLC;
GIGVLLCLLLFPRLCG; IGVLLCLLLFPRLCGM; GVLLCLLLFPRLCGML;
VLLCLLLFPRLCGMLL; LLCLLLFPRLCGMLLG; LCLLLFPRLCGMLLGM;
CLLLFPRLCGMLLGMI; LLLFPRLCGMLLGMIY; LLFPRLCGMLLGMIYL;
LFPRLCGMLLGMIYLL; PHRNCREEQKDFLETP; HRNCREEQKDFLETPW;
RNCREEQKDFLETPWL; NCREEQKDFLETPWLD; CREEQKDFLETPWLDF;
REEQKDFLETPWLDFW; EEQKDFLETPWLDFWR; EQKDFLETPWLDFWRK;
QKDFLETPWLDFWRKL; KDFLETPWLDFWRKLP; DFLETPWLDFWRKLPG;
FLETPWLDFWRKLPGQ; LETPWLDFWRKLPGQL; TFIIIFNNIILIFPLL;
FIIIFNNIILIFPLLG; IIIFNNIILIFPLLGP; IIFNNIILIFPLLGPQ; IFNNIILIFPLLGPQW;
FNNIILIFPLLGPQWL; NNIILIFPLLGPQWLD; NIILIFPLLGPQWLDK;
KKLLPQEVLIKELLLN; KLLPQEVLIKELLLNG; LLPQEVLIKELLLNGC;
LPQEVLIKELLLNGCC; PQEVLIKELLLNGCCL; QEVLIKELLLNGCCLY;
EVLIKELLLNGCCLYF; HLLLKHMKMAPTKRKG; LLLKHMKMAPTKRKGE;
LLKHMKMAPTKRKGEC; LKHMKMAPTKRKGECP; KHMKMAPTKRKGECPG;
HMKMAPTKRKGECPGA; MKMAPTKRKGECPGAA; KMAPTKRKGECPGAAP;
MAPTKRKGECPGAAPK; APTKRKGECPGAAPKK; PTKRKGECPGAAPKKP;
TKRKGECPGAAPKKPK; KRKGECPGAAPKKPKE; RKGECPGAAPKKPKEP;
KGECPGAAPKKPKEPV; GECPGAAPKKPKEPVQ; ECPGAAPKKPKEPVQV;
CPGAAPKKPKEPVQVP; PGAAPKKPKEPVQVPK; GAAPKKPKEPVQVPKL;
AAPKKPKEPVQVPKLL; APKKPKEPVQVPKLLI; PKKPKEPVQVPKLLIK;
KKPKEPVQVPKLLIKG; KPKEPVQVPKLLIKGG; PKEPVQVPKLLIKGGV;
KEPVQVPKLLIKGGVE; EPVQVPKLLIKGGVEV; PVQVPKLLIKGGVEVL;
VQVPKLLIKGGVEVLE; QVPKLLIKGGVEVLEV; VPKLLIKGGVEVLEVK;
PKLLIKGGVEVLEVKT; KLLIKGGVEVLEVKTG; LLIKGGVEVLEVKTGV;
LIKGGVEVLEVKTGVD; IKGGVEVLEVKTGVDA; KGGVEVLEVKTGVDAI;
GGVEVLEVKTGVDAIT; GVEVLEVKTGVDAITE; VEVLEVKTGVDAITEV;
EVLEVKTGVDAITEVE; VLEVKTGVDAITEVEC; LEVKTGVDAITEVECF;
EVKTGVDAITEVECFL; VKTGVDAITEVECFLN; KTGVDAITEVECFLNP;
TGVDAITEVECFLNPE; GVDAITEVECFLNPEM; VDAITEVECFLNPEMG;
DAITEVECFLNPEMGD; AITEVECFLNPEMGDP; ITEVECFLNPEMGDPD;
TEVECFLNPEMGDPDE; EVECFLNPEMGDPDEN; VECFLNPEMGDPDENL;
ECFLNPEMGDPDENLR; CFLNPEMGDPDENLRG; FLNPEMGDPDENLRGF;
LNPEMGDPDENLRGFS; NPEMGDPDENLRGFSL; PEMGDPDENLRGFSLK;
EMGDPDENLRGFSLKL; MGDPDENLRGFSLKLS; GDPDENLRGFSLKLSA;
DPDENLRGFSLKLSAE; PDENLRGFSLKLSAEN; DENLRGFSLKLSAEND;
ENLRGFSLKLSAENDF; NLRGFSLKLSAENDFS; LRGFSLKLSAENDFSS;
RGFSLKLSAENDFSSD; GFSLKLSAENDFSSDS; FSLKLSAENDFSSDSP;
SLKLSAENDFSSDSPE; LKLSAENDFSSDSPER; KLSAENDFSSDSPERK;
LSAENDFSSDSPERKM; SAENDFSSDSPERKML; AENDFSSDSPERKMLP;
ENDFSSDSPERKMLPC; NDFSSDSPERKMLPCY; DFSSDSPERKMLPCYS;
FSSDSPERKMLPCYST; SSDSPERKMLPCYSTA; SDSPERKMLPCYSTAR;
DSPERKMLPCYSTARI; SPERKMLPCYSTARIP; PERKMLPCYSTARIPL;
ERKMLPCYSTARIPLP; RKMLPCYSTARIPLPN; KMLPCYSTARIPLPNL;
MLPCYSTARIPLPNLN; LPCYSTARIPLPNLNE; PCYSTARIPLPNLNED;
CYSTARIPLPNLNEDL; YSTARIPLPNLNEDLT; STARIPLPNLNEDLTC;
TARIPLPNLNEDLTCG; ARIPLPNLNEDLTCGN; RIPLPNLNEDLTCGNL;
IPLPNLNEDLTCGNLL; PLPNLNEDLTCGNLLM; LPNLNEDLTCGNLLMW;
PNLNEDLTCGNLLMWE; NLNEDLTCGNLLMWEA; LNEDLTCGNLLMWEAV;
NEDLTCGNLLMWEAVT; EDLTCGNLLMWEAVTV; DLTCGNLLMWEAVTVQ;
LTCGNLLMWEAVTVQT; TCGNLLMWEAVTVQTE; CGNLLMWEAVTVQTEV;
GNLLMWEAVTVQTEVI; NLLMWEAVTVQTEVIG; LLMWEAVTVQTEVIGI;
LMWEAVTVQTEVIGIT; MWEAVTVQTEVIGITS; WEAVTVQTEVIGITSM;
EAVTVQTEVIGITSML; AVTVQTEVIGITSMLN; VTVQTEVIGITSMLNL;
TVQTEVIGITSMLNLH; VQTEVIGITSMLNLHA; QTEVIGITSMLNLHAG;
TEVIGITSMLNLHAGS; EVIGITSMLNLHAGSQ; VIGITSMLNLHAGSQK;
IGITSMLNLHAGSQKV; GITSMLNLHAGSQKVH; ITSMLNLHAGSQKVHE;
TSMLNLHAGSQKVHEH; SMLNLHAGSQKVHEHG; MLNLHAGSQKVHEHGG;
LNLHAGSQKVHEHGGG; NLHAGSQKVHEHGGGK; LHAGSQKVHEHGGGKP;
HAGSQKVHEHGGGKPI; AGSQKVHEHGGGKPIQ; GSQKVHEHGGGKPIQG;
SQKVHEHGGGKPIQGS; QKVHEHGGGKPIQGSN; KVHEHGGGKPIQGSNF;
VHEHGGGKPIQGSNFH; HEHGGGKPIQGSNFHF; EHGGGKPIQGSNFHFF;
HGGGKPIQGSNFHFFA; GGGKPIQGSNFHFFAV; GGKPIQGSNFHFFAVG;
GKPIQGSNFHFFAVGG; KPIQGSNFHFFAVGGE; PIQGSNFHFFAVGGEP;
IQGSNFHFFAVGGEPL; QGSNFHFFAVGGEPLE; GSNFHFFAVGGEPLEM;
SNFHFFAVGGEPLEMQ; NFHFFAVGGEPLEMQG; FHFFAVGGEPLEMQGV;
HFFAVGGEPLEMQGVL; FFAVGGEPLEMQGVLM; FAVGGEPLEMQGVLMN;
AVGGEPLEMQGVLMNY; VGGEPLEMQGVLMNYR; GGEPLEMQGVLMNYRS;
GEPLEMQGVLMNYRSK; EPLEMQGVLMNYRSKY; PLEMQGVLMNYRSKYP;
LEMQGVLMNYRSKYPD; EMQGVLMNYRSKYPDG; MQGVLMNYRSKYPDGT;
QGVLMNYRSKYPDGTI; GVLMNYRSKYPDGTIT; VLMNYRSKYPDGTITP;
LMNYRSKYPDGTITPK; MNYRSKYPDGTITPKN; NYRSKYPDGTITPKNP;
YRSKYPDGTITPKNPT; RSKYPDGTITPKNPTA; SKYPDGTITPKNPTAQ;
KYPDGTITPKNPTAQS; YPDGTITPKNPTAQSQ; PDGTITPKNPTAQSQV;
DGTITPKNPTAQSQVM; GTITPKNPTAQSQVMN; TITPKNPTAQSQVMNT;
ITPKNPTAQSQVMNTD; TPKNPTAQSQVMNTDH; PKNPTAQSQVMNTDHK;
KNPTAQSQVMNTDHKA; NPTAQSQVMNTDHKAY; PTAQSQVMNTDHKAYL;
TAQSQVMNTDHKAYLD; AQSQVMNTDHKAYLDK; QSQVMNTDHKAYLDKN;
SQVMNTDHKAYLDKNN; QVMNTDHKAYLDKNNA; VMNTDHKAYLDKNNAY;
MNTDHKAYLDKNNAYP; NTDHKAYLDKNNAYPV; TDHKAYLDKNNAYPVE;
DHKAYLDKNNAYPVEC; HKAYLDKNNAYPVECW; KAYLDKNNAYPVECWV;
AYLDKNNAYPVECWVP; YLDKNNAYPVECWVPD; LDKNNAYPVECWVPDP;
DKNNAYPVECWVPDPS; KNNAYPVECWVPDPSR; NNAYPVECWVPDPSRN;
NAYPVECWVPDPSRNE; AYPVECWVPDPSRNEN; YPVECWVPDPSRNENA;
PVECWVPDPSRNENAR; VECWVPDPSRNENARY; ECWVPDPSRNENARYF;
CWVPDPSRNENARYFG; WVPDPSRNENARYFGT; VPDPSRNENARYFGTF;
PDPSRNENARYFGTFT; DPSRNENARYFGTFTG; PSRNENARYFGTFTGG;
SRNENARYFGTFTGGE; RNENARYFGTFTGGEN; NENARYFGTFTGGENV;
ENARYFGTFTGGENVP; NARYFGTFTGGENVPP; ARYFGTFTGGENVPPV;
RYFGTFTGGENVPPVL; YFGTFTGGENVPPVLH; FGTFTGGENVPPVLHV;
GTFTGGENVPPVLHVT; TFTGGENVPPVLHVTN; FTGGENVPPVLHVTNT;
TGGENVPPVLHVTNTA; GGENVPPVLHVTNTAT; GENVPPVLHVTNTATT;
ENVPPVLHVTNTATTV; NVPPVLHVTNTATTVL; VPPVLHVTNTATTVLL;
PPVLHVTNTATTVLLD; PVLHVTNTATTVLLDE; VLHVTNTATTVLLDEQ;
LHVTNTATTVLLDEQG; HVTNTATTVLLDEQGV; VTNTATTVLLDEQGVG;
TNTATTVLLDEQGVGP; NTATTVLLDEQGVGPL; TATTVLLDEQGVGPLC;
ATTVLLDEQGVGPLCK; TTVLLDEQGVGPLCKA; TVLLDEQGVGPLCKAD;
VLLDEQGVGPLCKADS; LLDEQGVGPLCKADSL; LDEQGVGPLCKADSLY;
DEQGVGPLCKADSLYV; EQGVGPLCKADSLYVS; QGVGPLCKADSLYVSA;
GVGPLCKADSLYVSAA; VGPLCKADSLYVSAAD; GPLCKADSLYVSAADI;
PLCKADSLYVSAADIC; LCKADSLYVSAADICG; CKADSLYVSAADICGL;
KADSLYVSAADICGLF; ADSLYVSAADICGLFT; DSLYVSAADICGLFTN;
SLYVSAADICGLFTNS; LYVSAADICGLFTNSS; YVSAADICGLFTNSSG;
VSAADICGLFTNSSGT; SAADICGLFTNSSGTQ; AADICGLFTNSSGTQQ;
ADICGLFTNSSGTQQW; DICGLFTNSSGTQQWR; ICGLFTNSSGTQQWRG;
CGLFTNSSGTQQWRGL; GLFTNSSGTQQWRGLA; LFTNSSGTQQWRGLAR;
FTNSSGTQQWRGLARY; TNSSGTQQWRGLARYF; NSSGTQQWRGLARYFK;
SSGTQQWRGLARYFKI; SGTQQWRGLARYFKIR; GTQQWRGLARYFKIRL;
TQQWRGLARYFKIRLR; QQWRGLARYFKIRLRK; QWRGLARYFKIRLRKR;
WRGLARYFKIRLRKRS; RGLARYFKIRLRKRSV; GLARYFKIRLRKRSVK;
LARYFKIRLRKRSVKN; ARYFKIRLRKRSVKNP; RYFKIRLRKRSVKNPY;
YFKIRLRKRSVKNPYP; FKIRLRKRSVKNPYPI; KIRLRKRSVKNPYPIS;
IRLRKRSVKNPYPISF; RLRKRSVKNPYPISFL; LRKRSVKNPYPISFLL;
RKRSVKNPYPISFLLS; KRSVKNPYPISFLLSD; RSVKNPYPISFLLSDL;
SVKNPYPISFLLSDLI; VKNPYPISFLLSDLIN; KNPYPISFLLSDLINR;
NPYPISFLLSDLINRR; PYPISFLLSDLINRRT; YPISFLLSDLINRRTQ;
PISFLLSDLINRRTQR; ISFLLSDLINRRTQRV; SFLLSDLINRRTQRVD;
FLLSDLINRRTQRVDG; LLSDLINRRTQRVDGQ; LSDLINRRTQRVDGQP;
SDLINRRTQRVDGQPM; DLINRRTQRVDGQPMY; LINRRTQRVDGQPMYG;
INRRTQRVDGQPMYGM; NRRTQRVDGQPMYGME; RRTQRVDGQPMYGMES;
RTQRVDGQPMYGMESQ; TQRVDGQPMYGMESQV; QRVDGQPMYGMESQVE;
RVDGQPMYGMESQVEE; VDGQPMYGMESQVEEV; DGQPMYGMESQVEEVR;
GQPMYGMESQVEEVRV; QPMYGMESQVEEVRVF; PMYGMESQVEEVRVFD;
MYGMESQVEEVRVFDG; YGMESQVEEVRVFDGT; GMESQVEEVRVFDGTE;
MESQVEEVRVFDGTER; ESQVEEVRVFDGTERL; SQVEEVRVFDGTERLP;
QVEEVRVFDGTERLPG; VEEVRVFDGTERLPGD; EEVRVFDGTERLPGDP;
EVRVFDGTERLPGDPD; VRVFDGTERLPGDPDM; RVFDGTERLPGDPDMI;
VFDGTERLPGDPDMIR; FDGTERLPGDPDMIRY; DGTERLPGDPDMIRYI;
GTERLPGDPDMIRYID; TERLPGDPDMIRYIDK; ERLPGDPDMIRYIDKQ;
RLPGDPDMIRYIDKQG; LPGDPDMIRYIDKQGQ; PGDPDMIRYIDKQGQL;
GDPDMIRYIDKQGQLQ; DPDMIRYIDKQGQLQT; PDMIRYIDKQGQLQTK;
DMIRYIDKQGQLQTKM; MIRYIDKQGQLQTKML; TGAFIVHIHLINAAFV;
ATFKLVLFWGWCFRPF; TFKLVLFWGWCFRPFK; FKLVLFWGWCFRPFKT;
KLVLFWGWCFRPFKTL; LVLFWGWCFRPFKTLK; VLFWGWCFRPFKTLKA;
LFWGWCFRPFKTLKAF; FWGWCFRPFKTLKAFT; WGWCFRPFKTLKAFTQ;
GWCFRPFKTLKAFTQM; WCFRPFKTLKAFTQMQ; CFRPFKTLKAFTQMQL;
FRPFKTLKAFTQMQLL; RPFKTLKAFTQMQLLT; PFKTLKAFTQMQLLTM;
FKTLKAFTQMQLLTMG; KTLKAFTQMQLLTMGV; ILFSCNIKNTFPHAYI;
LFSCNIKNTFPHAYII; FSCNIKNTFPHAYIIF; SCNIKNTFPHAYIIFH;
CNIKNTFPHAYIIFHP; KSIHTYLRIQPFLPFN; SIHTYLRIQPFLPFNN;
IHTYLRIQPFLPFNNS; HTYLRIQPFLPFNNSR; TYLRIQPFLPFNNSRL;
YLRIQPFLPFNNSRLY; LRIQPFLPFNNSRLYI; RIQPFLPFNNSRLYIS;
IQPFLPFNNSRLYISC; QPFLPFNNSRLYISCK; PFLPFNNSRLYISCKI;
FLPFNNSRLYISCKIS; LPFNNSRLYISCKISY; PFNNSRLYISCKISYR;
FNNSRLYISCKISYRP; NNSRLYISCKISYRPK; NSRLYISCKISYRPKP;
SRLYISCKISYRPKPN; IYFGPKIYLSYKSSLQ; YFGPKIYLSYKSSLQG;
FGPKIYLSYKSSLQGF; GPKIYLSYKSSLQGFR; PKIYLSYKSSLQGFRD;
KIYLSYKSSLQGFRDR; IYLSYKSSLQGFRDRI; YLSYKSSLQGFRDRIL;
LSYKSSLQGFRDRILI; SYKSSLQGFRDRILIH; YKSSLQGFRDRILIHC;
KSSLQGFRDRILIHCN; SSLQGFRDRILIHCNQ; SLQGFRDRILIHCNQA;
LQGFRDRILIHCNQAW; QGFRDRILIHCNQAWW; GFRDRILIHCNQAWWK;
FRDRILIHCNQAWWKY; RDRILIHCNQAWWKYL; DRILIHCNQAWWKYLG;
RILIHCNQAWWKYLGS; ILIHCNQAWWKYLGSF; LIHCNQAWWKYLGSFV;
FSSCPFYIFKNNHVLI; SSCPFYIFKNNHVLIY; SCPFYIFKNNHVLIYS;
CPFYIFKNNHVLIYSY; PFYIFKNNHVLIYSYT; PVSSFRYIENNTVQKI;
VSSFRYIENNTVQKIK; SSFRYIENNTVQKIKY; SFRYIENNTVQKIKYY;
FRYIENNTVQKIKYYR; RYIENNTVQKIKYYRI; YIENNTVQKIKYYRIH;
IENNTVQKIKYYRIHF; ENNTVQKIKYYRIHFR; NCIYCLLTNTFLIFTF;
CIYCLLTNTFLIFTFC; IYCLLTNTFLIFTFCK; YCLLTNTFLIFTFCKN;
CLLTNTFLIFTFCKNN; LLTNTFLIFTFCKNNS; LTNTFLIFTFCKNNSI;
TNTFLIFTFCKNNSIC; NTFLIFTFCKNNSICK; TFLIFTFCKNNSICKV;
FLIFTFCKNNSICKVL; LIFTFCKNNSICKVLF; IFTFCKNNSICKVLFM;
FTFCKNNSICKVLFMI; TFCKNNSICKVLFMIL; FCKNNSICKVLFMILK;
CKNNSICKVLFMILKV; KNNSICKVLFMILKVI; NNSICKVLFMILKVIR;
NSICKVLFMILKVIRL; SICKVLFMILKVIRLV; ICKVLFMILKVIRLVF;
CKVLFMILKVIRLVFF; KVLFMILKVIRLVFFL; VLFMILKVIRLVFFLT;
LFMILKVIRLVFFLTL; FMILKVIRLVFFLTLF; MILKVIRLVFFLTLFT;
ILKVIRLVFFLTLFTL; LKVIRLVFFLTLFTLL; KVIRLVFFLTLFTLLY;
VIRLVFFLTLFTLLYI; IRLVFFLTLFTLLYIV; RLVFFLTLFTLLYIVL;
LVFFLTLFTLLYIVLK; VFFLTLFTLLYIVLKF; FPRHLLCFFRLFWAKI;
PRHLLCFFRLFWAKIM; RHLLCFFRLFWAKIML; HLLCFFRLFWAKIMLL;
KTKGTQLLTEIINCRN; TKGTQLLTEIINCRNS; KGTQLLTEIINCRNSM;
GTQLLTEIINCRNSMS; TQLLTEIINCRNSMSM; QLLTEIINCRNSMSMW;
LLTEIINCRNSMSMWS; KEYNIMPSTHVSTNKS; EYNIMPSTHVSTNKSY;
YNIMPSTHVSTNKSYR; NIMPSTHVSTNKSYRI; IMPSTHVSTNKSYRIF;
MPSTHVSTNKSYRIFF; PSTHVSTNKSYRIFFH; STHVSTNKSYRIFFHK;
THVSTNKSYRIFFHKF; HVSTNKSYRIFFHKFF; VSTNKSYRIFFHKFFI;
STNKSYRIFFHKFFIQ; TNKSYRIFFHKFFIQN; NKSYRIFFHKFFIQNL;
KSYRIFFHKFFIQNLS; SYRIFFHKFFIQNLSF; YRIFFHKFFIQNLSFF;
RIFFHKFFIQNLSFFF; IFFHKFFIQNLSFFFS; FFHKFFIQNLSFFFSS;
FHKFFIQNLSFFFSSI; HKFFIQNLSFFFSSIH; KFFIQNLSFFFSSIHS;
FFIQNLSFFFSSIHSK; FIQNLSFFFSSIHSKA; IQNLSFFFSSIHSKAG;
QNLSFFFSSIHSKAGK; NLSFFFSSIHSKAGKG; LSFFFSSIHSKAGKGS;
SFFFSSIHSKAGKGSI; FFFSSIHSKAGKGSIT; FFSSIHSKAGKGSITK;
FSSIHSKAGKGSITKY; SSIHSKAGKGSITKYS; SIHSKAGKGSITKYSL;
IHSKAGKGSITKYSLT; HSKAGKGSITKYSLTK; SKAGKGSITKYSLTKK;
KAGKGSITKYSLTKKL; AGKGSITKYSLTKKLV; IRGKVFRVFYLSFFFG;
RGKVFRVFYLSFFFGW; GKVFRVFYLSFFFGWC; VLRICCCFFITGKHIF;
LRICCCFFITGKHIFM; RICCCFFITGKHIFMA; ICCCFFITGKHIFMAK;
IFIPFFIKGTPPGLPL; FIPFFIKGTPPGLPLF; IPFFIKGTPPGLPLFC;
PFFIKGTPPGLPLFCS; FFIKGTPPGLPLFCSI; FIKGTPPGLPLFCSIG;
IKGTPPGLPLFCSIGW; KGTPPGLPLFCSIGWH; GTPPGLPLFCSIGWHL;
SFRSLKGVSPIIWTHH; FRSLKGVSPIIWTHHC; RSLKGVSPIIWTHHCR;
SLKGVSPIIWTHHCRV; LKGVSPIIWTHHCRVS; KGVSPIIWTHHCRVSS;
GVSPIIWTHHCRVSSV; VSPIIWTHHCRVSSVR; SPIIWTHHCRVSSVRS;
PIIWTHHCRVSSVRSK; IIWTHHCRVSSVRSKP; IWTHHCRVSSVRSKPN;
WTHHCRVSSVRSKPNH; THHCRVSSVRSKPNHC; HHCRVSSVRSKPNHCV;
HCRVSSVRSKPNHCVK; CRVSSVRSKPNHCVKQ; RVSSVRSKPNHCVKQS;
VSSVRSKPNHCVKQSM; SSVRSKPNHCVKQSMQ; QSIQTKGSFLKNFLFK;
SIQTKGSFLKNFLFKC; IQTKGSFLKNFLFKCL; QTKGSFLKNFLFKCLN;
TKGSFLKNFLFKCLNL; KGSFLKNFLFKCLNLS; HSMQGQCTEGFLEQIG;
SMQGQCTEGFLEQIGH; MQGQCTEGFLEQIGHS; QGQCTEGFLEQIGHSL;
GQCTEGFLEQIGHSLQ; QCTEGFLEQIGHSLQY; CTEGFLEQIGHSLQYR;
TEGFLEQIGHSLQYRV; EGFLEQIGHSLQYRVS; GFLEQIGHSLQYRVSG;
FLEQIGHSLQYRVSGQ; LEQIGHSLQYRVSGQR; EQIGHSLQYRVSGQRG;
QIGHSLQYRVSGQRGK; IGHSLQYRVSGQRGKS; GHSLQYRVSGQRGKSA;
HSLQYRVSGQRGKSAQ; SLQYRVSGQRGKSAQT; LQYRVSGQRGKSAQTS;
QYRVSGQRGKSAQTSE; YRVSGQRGKSAQTSEL; RVSGQRGKSAQTSELL;
VSGQRGKSAQTSELLQ; SGQRGKSAQTSELLQV; GQRGKSAQTSELLQVP;
QRGKSAQTSELLQVPK; RGKSAQTSELLQVPKS; GKSAQTSELLQVPKSG;
ATFTSCSIFLYKVFIL; TFTSCSIFLYKVFILF; FTSCSIFLYKVFILFI;
TSCSIFLYKVFILFIL; SCSIFLYKVFILFILS; CSIFLYKVFILFILSS;
SIFLYKVFILFILSSS; IFLYKVFILFILSSSP; FLYKVFILFILSSSPP;
LYKVFILFILSSSPPL; YKVFILFILSSSPPLS; KVFILFILSSSPPLSG;
AFLIKGRFPQAALSRP; FLIKGRFPQAALSRPK; LIKGRFPQAALSRPKR;
IKGRFPQAALSRPKRS; KGRFPQAALSRPKRSM; GRFPQAALSRPKRSMS;
RFPQAALSRPKRSMSS; FPQAALSRPKRSMSSM; PQAALSRPKRSMSSMD;
QAALSRPKRSMSSMDS; AALSRPKRSMSSMDSS; ALSRPKRSMSSMDSSL;
LSRPKRSMSSMDSSLL; SRPKRSMSSMDSSLLR; RPKRSMSSMDSSLLRT;
PKRSMSSMDSSLLRTL; KRSMSSMDSSLLRTLS

BK virus, reading frame 2
13 mers

GFPQIVLLGLRKS; FPQIVLLGLRKSL; PQIVLLGLRKSLH; QIVLLGLRKSLHT;
IVLLGLRKSLHTL; VLLGLRKSLHTLT; LLGLRKSLHTLTT; EKGWRQRRPRPLI;
KGWRQRRPRPLIY; GWRQRRPRPLIYY; WRQRRPRPLIYYK; RQRRPRPLIYYKK;
QRRPRPLIYYKKK; RRPRPLIYYKKKG; RPRPLIYYKKKGH; PRPLIYYKKKGHR;
RPLIYYKKKGHRE; PLIYYKKKGHREE; LIYYKKKGHREEL; IYYKKKGHREELL;
YYKKKGHREELLT; YKKKGHREELLTH; KKKGHREELLTHG; KKGHREELLTHGM;
KGHREELLTHGMQ; GHREELLTHGMQP; HREELLTHGMQPN; REELLTHGMQPNH;
EELLTHGMQPNHD; ELLTHGMQPNHDL; LLTHGMQPNHDLR;
LTHGMQPNHDLRK; THGMQPNHDLRKE; HGMQPNHDLRKES;
GMQPNHDLRKESA; LTGECSQTMTSGR; TGECSQTMTSGRK; GECSQTMTSGRKV;
ECSQTMTSGRKVH; CSQTMTSGRKVHD; SQTMTSGRKVHDS; QTMTSGRKVHDSQ;
TMTSGRKVHDSQG; MTSGRKVHDSQGG; TSGRKVHDSQGGA;
SGRKVHDSQGGAA; GRKVHDSQGGAAY; RKVHDSQGGAAYP;
KVHDSQGGAAYPW; VHDSQGGAAYPWN; HDSQGGAAYPWNA;
DSQGGAAYPWNAA; SQGGAAYPWNAAK; QGGAAYPWNAAKP;
PQEGKCMTDMFCE; QEGKCMTDMFCEP; EGKCMTDMFCEPR;
GKCMTDMFCEPRN; KCMTDMFCEPRNL; CMTDMFCEPRNLG;
MTDMFCEPRNLGL; TDMFCEPRNLGLV; DMFCEPRNLGLVP; MFCEPRNLGLVPS;
TGQRPWFCASCHD; GQRPWFCASCHDK; QRPWFCASCHDKL;
RPWFCASCHDKLQ; KLVKPGLEQKKEL; LVKPGLEQKKELR; VKPGLEQKKELRG;
KPGLEQKKELRGF; PGLEQKKELRGFL; GLEQKKELRGFLF; LEQKKELRGFLFL;
EQKKELRGFLFLF; VIPFFLYFQVHGC; IPFFLYFQVHGCC; PFFLYFQVHGCCS;
FFLYFQVHGCCSS; FLYFQVHGCCSST; LYFQVHGCCSSTF; YFQVHGCCSSTFG;
FQVHGCCSSTFGG; QVHGCCSSTFGGP; VHGCCSSTFGGPS; HGCCSSTFGGPSC;
GCCSSTFGGPSCQ; CCSSTFGGPSCQC; CSSTFGGPSCQCI; NCCWGGCCCYRSS;
CCWGGCCCYRSSN; CWGGCCCYRSSNC; WGGCCCYRSSNCI; GGCCCYRSSNCIP;
GCCCYRSSNCIPC; CCCYRSSNCIPCY; CCYRSSNCIPCYC; CYRSSNCIPCYCR;
YRSSNCIPCYCRG; RSSNCIPCYCRGH; SSNCIPCYCRGHN; SNCIPCYCRGHNK;
NCIPCYCRGHNKY; CIPCYCRGHNKYL; IPCYCRGHNKYLR; PCYCRGHNKYLRG;
CYCRGHNKYLRGY; YCRGHNKYLRGYS; CRGHNKYLRGYSC;
RGHNKYLRGYSCY; GHNKYLRGYSCYR; HNKYLRGYSCYRP;
NKYLRGYSCYRPN; KYLRGYSCYRPNS; YLRGYSCYRPNSS; LRGYSCYRPNSSN;
RGYSCYRPNSSNI; GYSCYRPNSSNIC; YSCYRPNSSNICC; SCYRPNSSNICCN;
CYRPNSSNICCNC; YRPNSSNICCNCW; RPNSSNICCNCWC; PNSSNICCNCWCS;
NSSNICCNCWCSW; SSNICCNCWCSWG; SNICCNCWCSWGY; NICCNCWCSWGYC;
ICCNCWCSWGYCW; CCNCWCSWGYCWV; CNCWCSWGYCWVC;
NCWCSWGYCWVCC; CWCSWGYCWVCCF; WCSWGYCWVCCFN;
CSWGYCWVCCFNS; SWGYCWVCCFNSN; WGYCWVCCFNSNC;
LGSQSFHCRPLSA; GSQSFHCRPLSAI; SQSFHCRPLSAIR; QSFHCRPLSAIRH;
SFHCRPLSAIRHG; FHCRPLSAIRHGF; HCRPLSAIRHGFG; CRPLSAIRHGFGI;
RPLSAIRHGFGIV; ALGSFFVCYYFPG; LGSFFVCYYFPGF; GSFFVCYYFPGFV;
SFFVCYYFPGFVA; FFVCYYFPGFVAC; FVCYYFPGFVACY; YTFYNLTGIAEKN;
TFYNLTGIAEKNR; FYNLTGIAEKNRK; YNLTGIAEKNRKI; NLTGIAEKNRKIF;
IFGGNYLDNCKCP; FGGNYLDNCKCPY; GGNYLDNCKCPYK; GNYLDNCKCPYKL;
NYLDNCKCPYKLL; QYRRSYTKNGLKK; YRRSYTKNGLKKS; RRSYTKNGLKKST;
RSYTKNGLKKSTK; SYTKNGLKKSTKC; YTKNGLKKSTKCT; TKNGLKKSTKCTF;
KNGLKKSTKCTFR; NGLKKSTKCTFRR; GLKKSTKCTFRRV; LKKSTKCTFRRVY;
KKSTKCTFRRVYR; KSTKCTFRRVYRK; STKCTFRRVYRKN; TKCTFRRVYRKNY;
KCTFRRVYRKNYC; CTFRRVYRKNYCP; TFRRVYRKNYCPR; FRRVYRKNYCPRR;
RRVYRKNYCPRRC; SKNCSSMDVAFTS; KNCSSMDVAFTSR; NCSSMDVAFTSRP;
CSSMDVAFTSRPV; SSMDVAFTSRPVR; SMDVAFTSRPVRD; MDVAFTSRPVRDC;
DVAFTSRPVRDCN; VAFTSRPVRDCNT; AFTSRPVRDCNTC; FTSRPVRDCNTCS;
RWPQPKEKESVQG; WPQPKEKESVQGQ; PQPKEKESVQGQL; QPKEKESVQGQLP;
PKEKESVQGQLPK; KEKESVQGQLPKS; EKESVQGQLPKSQ; KESVQGQLPKSQR;
ESVQGQLPKSQRN; SVQGQLPKSQRNP; VQGQLPKSQRNPC; QGQLPKSQRNPCK;
GQLPKSQRNPCKC; QLPKSQRNPCKCQ; LPKSQRNPCKCQN; PKSQRNPCKCQNY;
TQKWGIQMKTLGA; QKWGIQMKTLGAL; KWGIQMKTLGALV;
VLKMTLAVIAQRE; LKMTLAVIAQREK; KMTLAVIAQRFKC; MTLAVIAQREKCF;
TLAVIAQREKCFP; LAVIAQREKCFPV; AVIAQREKCFPVT; VIAQREKCFPVTA;
IAQREKCFPVTAQ; AQREKCFPVTAQQ; QREKCFPVTAQQE; REKCFPVTAQQEF;
EKCFPVTAQQEFP; KCFPVTAQQEFPS; CFPVTAQQEFPSP; FPVTAQQEFPSPI;
LACLTFMQGHKKC; ACLTFMQGHKKCM; CLTFMQGHKKCMS;
LTFMQGHKKCMSM; TFMQGHKKCMSMV; FMQGHKKCMSMVE;
MQGHKKCMSMVEE; QGHKKCMSMVEEN; GHKKCMSMVEENL;
HKKCMSMVEENLF; KKCMSMVEENLFK; KCMSMVEENLFKA;
CMSMVEENLFKAV; MSMVEENLFKAVI; SMVEENLFKAVIS; MVEENLFKAVIST;
VEENLFKAVISTS; EENLFKAVISTSL; ENLFKAVISTSLL; ILTIRPIWTKTML;
LTIRPIWTKTMLI; TIRPIWTKTMLIQ; IRPIWTKTMLIQL; RPIWTKTMLIQLS;
PIWTKTMLIQLSA; IWTKTMLIQLSAG; WTKTMLIQLSAGY; TKTMLIQLSAGYL;
KTMLIQLSAGYLI; TMLIQLSAGYLIP; MLIQLSAGYLIPV; LIQLSAGYLIPVE;
IQLSAGYLIPVEM; QLSAGYLIPVEMK; LSAGYLIPVEMKM; SAGYLIPVEMKML;
AGYLIPVEMKMLG; GYLIPVEMKMLGI; YLIPVEMKMLGIL; LIPVEMKMLGILG;
IPVEMKMLGILGL; PVEMKMLGILGLS; VEMKMLGILGLSQ; EMKMLGILGLSQE;
MKMLGILGLSQEG; KMLGILGLSQEGK; MLGILGLSQEGKM; LGILGLSQEGKMF;
GILGLSQEGKMFP; ILGLSQEGKMFPQ; LGLSQEGKMFPQY; GLSQEGKMFPQYF;
LSQEGKMFPQYFM; MNRVWGLFVKLIA; NRVWGLFVKLIAC; RVWGLFVKLIACM;
VWGLFVKLIACMF; WGLFVKLIACMFQ; GLFVKLIACMFQL; LFVKLIACMFQLL;
FVKLIACMFQLLI; VKLIACMFQLLIF; KLIACMFQLLIFV; LIACMFQLLIFVA;
IACMFQLLIFVAC; ACMFQLLIFVACL; CMFQLLIFVACLL; MFQLLIFVACLLT;
FQLLIFVACLLTA; QLLIFVACLLTAL; LLIFVACLLTALE; LIFVACLLTALEH;
IFVACLLTALEHN; FVACLLTALEHNS; VACLLTALEHNSG; ACLLTALEHNSGE;
CLLTALEHNSGEA; LLTALEHNSGEAL; LTALEHNSGEALQ; TALEHNSGEALQD;
ALEHNSGEALQDI; LEHNSGEALQDIL; EHNSGEALQDILR; HNSGEALQDILRS;
NSGEALQDILRSA; TGEPREWMGSLCM; GEPREWMGSLCMV;
EPREWMGSLCMVW; PREWMGSLCMVWN; REWMGSLCMVWNP;
EWMGSLCMVWNPR; KRLGCLMAQKDFQ; RLGCLMAQKDFQG;
LGCLMAQKDFQGT; GCLMAQKDFQGTQ; CLMAQKDFQGTQI; DILTNRDNCKPKC;
ILTNRDNCKPKCF; LTNRDNCKPKCFK; TNRDNCKPKCFKQ; NRDNCKPKCFKQV;
RDNCKPKCFKQVL; DNCKPKCFKQVLL; NCKPKCFKQVLLL; CKPKCFKQVLLLY;
KPKCFKQVLLLYI; PKCFKQVLLLYIY; KCFKQVLLLYIYI; MLLLYKPLLSLCY;
LLLYKPLLSLCYF; LLYKPLLSLCYFG; LYKPLLSLCYFGG; YKPLLSLCYFGGG;
KPLLSLCYFGGGV; PLLSLCYFGGGVL; LLSLCYFGGGVLG; LSLCYFGGGVLGL;
SLCYFGGGVLGLL; LCYFGGGVLGLLK; CYFGGGVLGLLKH; LWGSDLWESSAGA;
WGSDLWESSAGAE; GSDLWESSAGAEV; SDLWESSAGAEVS; DLWESSAGAEVSE;
LWESSAGAEVSET; WESSAGAEVSETW; ESSAGAEVSETWE; SSAGAEVSETWEE;
SAGAEVSETWEEH; AGAEVSETWEEHC; GAEVSETWEEHCD;
AEVSETWEEHCDW; EVSETWEEHCDWD; VSETWEEHCDWDS;
SETWEEHCDWDSV; ETWEEHCDWDSVL; TWEEHCDWDSVLD;
WEEHCDWDSVLDP; EEHCDWDSVLDPC; EHCDWDSVLDPCP;
HCDWDSVLDPCPE; CDWDSVLDPCPES; DWDSVLDPCPESS; WDSVLDPCPESSV;
DSVLDPCPESSVS; SVLDPCPESSVSE; VLDPCPESSVSES; LDPCPESSVSESS;
DPCPESSVSESSS; PCPESSVSESSSL; CPESSVSESSSLV; PESSVSESSSLVI;
ESSVSESSSLVIS; SSVSESSSLVISR; SVSESSSLVISRI; VSESSSLVISRIH;
SESSSLVISRIHF; ESSSLVISRIHFP; SSSLVISRIHFPM; SSLVISRIHFPMH;
SLVISRIHFPMHI; LVISRIHFPMHIL; VISRIHFPMHILY; ISRIHFPMHILYF;
SRIHFPMHILYFI; RIHFPMHILYFIL; IHFPMHILYFILE; HFPMHILYFILEK;
FPMHILYFILEKV; PMHILYFILEKVY; MHILYFILEKVYI; HILYFILEKVYIL;
ILYFILEKVYILI; LYFILEKVYILIS; YFILEKVYILISE; FILEKVYILISES;
ILEKVYILISESS; LEKVYILISESSL; EKVYILISESSLS; KVYILISESSLSF;
VYILISESSLSFH; YILISESSLSFHS; ILISESSLSFHST; LISESSLSFHSTI;
ISESSLSFHSTIL; SESSLSFHSTILD; ESSLSFHSTILDC; SSLSFHSTILDCI;
SLSFHSTILDCIS; LSFHSTILDCISV; SFHSTILDCISVA; FHSTILDCISVAK;
HSTILDCISVAKS; STILDCISVAKSA; TILDCISVAKSAT; ILDCISVAKSATG;
LDCISVAKSATGL; DCISVAKSATGLN; CISVAKSATGLNQ; ISVAKSATGLNQI;
SVAKSATGLNQIS; VAKSATGLNQISS; AKSATGLNQISSS; KSATGLNQISSSN;
SATGLNQISSSNK; ATGLNQISSSNKV; TGLNQISSSNKVI; GLNQISSSNKVIP;
LNQISSSNKVIPL; NQISSSNKVIPLC; QISSSNKVIPLCK; ISSSNKVIPLCKI;
SSSNKVIPLCKIL; SSNKVIPLCKILF; SNKVIPLCKILFS; NKVIPLCKILFSS;
KVIPLCKILFSSK; VIPLCKILFSSKN; IPLCKILFSSKNS; PLCKILFSSKNSE;
LCKILFSSKNSEF; CKILFSSKNSEFC; KIEFSSKNSEFCK; ILFSSKNSEFCKD;
LFSSKNSEFCKDF; FSSKNSEFCKDFL; SSKNSEFCKDFLK; SKNSEFCKDFLKY;
KNSEFCKDFLKYI; NSEFCKDFLKYIL; SEFCKDFLKYILG; EFCKDFLKYILGL;
FCKDFLKYILGLK; CKDFLKYILGLKS; KDFLKYILGLKSI; DFLKYILGLKSIC;
FLKYILGLKSICL; LKYILGLKSICLT; KYILGLKSICLTN; YILGLKSICLTNL;
ILGLKSICLTNLA; LGLKSICLTNLAC; GLKSICLTNLACR; LKSICLTNLACRV;
KSICLTNLACRVL; SICLTNLACRVLG; ICLTNLACRVLGT; CLTNLACRVLGTG;
LTNLACRVLGTGY; TNLACRVLGTGYS; NLACRVLGTGYSF; LACRVLGTGYSFI;
ACRVLGTGYSFIV; CRVLGTGYSFIVT; RVLGTGYSFIVTK; VLGTGYSFIVTKP;
LGTGYSFIVTKPG; GTGYSFIVTKPGG; TGYSFIVTKPGGN; GYSFIVTKPGGNI;
YSFIVTKPGGNIW; SFIVTKPGGNIWV; FIVTKPGGNIWVL; IVTKPGGNIWVLL;
VTKPGGNIWVLLF; TKPGGNIWVLLFK; KPGGNIWVLLFKC; PGGNIWVLLFKCF;
GGNIWVLLFKCFF; GNIWVLLFKCFFS; NIWVLLFKCFFSK; IWVLLFKCFFSKF;
WVLLFKCFFSKFT; VLLFKCFFSKFTL; LLFKCFFSKFTLT; LFKCFFSKFTLTL;
FKCFFSKFTLTLP; KCFFSKFTLTLPS; CFFSKFTLTLPSK; SLKLSKLFIPCPE;
LKLSKLFIPCPEG; KLSKLFIPCPEGK; LSKLFIPCPEGKS; SKLFIPCPEGKSF;
KLFIPCPEGKSFD; LFIPCPEGKSFDS; FIPCPEGKSFDSA; IPCPEGKSFDSAP;
PCPEGKSFDSAPV; CPEGKSFDSAPVP; PEGKSFDSAPVPF; EGKSFDSAPVPFT;
GKSFDSAPVPFTS; KSFDSAPVPFTSS; SFDSAPVPFTSSK; FDSAPVPFTSSKT;
DSAPVPFTSSKTT; SAPVPFTSSKTTM; APVPFTSSKTTMY; SIATPSSKVSLSM;
IATPSSKVSLSMG; ATPSSKVSLSMGR; TPSSKVSLSMGRF; PSSKVSLSMGRFT;
SSKVSLSMGRFTF; SKVSLSMGRFTFK; KVSLSMGRFTFKA; VSLSMGRFTFKAL;
SLSMGRFTFKALP; LSMGRFTFKALPP; SMGRFTFKALPPH; MGRFTFKALPPHK;
GRFTFKALPPHKS; RFTFKALPPHKSN; FTFKALPPHKSNN; TFKALPPHKSNNP;
FKALPPHKSNNPA; KALPPHKSNNPAA; ALPPHKSNNPAAS; LPPHKSNNPAASV;
PPHKSNNPAASVV; PHKSNNPAASVVF; HKSNNPAASVVFP; KSNNPAASVVFPL;
SNNPAASVVFPLS; NNPAASVVFPLSM; NPAASVVFPLSMG; PAASVVFPLSMGP;
AASVVFPLSMGPL; ASVVFPLSMGPLN; SVVFPLSMGPLNN; VVFPLSMGPLNNQ;
VFPLSMGPLNNQY; FPLSMGPLNNQYL; PLSMGPLNNQYLL; LSMGPLNNQYLLL;
SMGPLNNQYLLLG; MGPLNNQYLLLGT; GPLNNQYLLLGTL; PLNNQYLLLGTLK;
LNNQYLLLGTLKT; NNQYLLLGTLKTI; NQYLLLGTLKTIQ; QYLLLGTLKTIQC;
YLLLGTLKTIQCK; LLLGTLKTIQCKK; LLGTLKTIQCKKS; LGTLKTIQCKKSN;
GTLKTIQCKKSNI; TLKTIQCKKSNIT; LKTIQCKKSNITE; KTIQCKKSNITES;
TIQCKKSNITESI; IQCKKSNITESIL; QCKKSNITESILG; CKKSNITESILGS;
KKSNITESILGSK; KSNITESILGSKQ; SNITESILGSKQC; NITESILGSKQCS;
ITESILGSKQCSQ; TESILGSKQCSQA; ESILGSKQCSQAT; SILGSKQCSQATP;
ILGSKQCSQATPA; LGSKQCSQATPAI; GSKQCSQATPAIY; SKQCSQATPAIYC;
KQCSQATPAIYCS; QCSQATPAIYCSS; CSQATPAIYCSST; SQATPAIYCSSTA;
QATPAIYCSSTAF; ATPAIYCSSTAFP; RVSTLFLAKTVST; VSTLFLAKTVSTA;
STLFLAKTVSTAC; FLLSAKIIAFAKC; LLSAKIIAFAKCF; LSAKIIAFAKCFS;
NSKYIPNNKNTSS; SKYIPNNKNTSSH; KYIPNNKNTSSHF; YIPNNKNTSSHFV;
IPNNKNTSSHFVS; PNNKNTSSHFVST; NNKNTSSHFVSTA; NKNTSSHFVSTAY;
KNTSSHFVSTAYS; NTSSHFVSTAYSV; TSSHFVSTAYSVI; SSHFVSTAYSVIN;
SHFVSTAYSVINF; HFVSTAYSVINFQ; FVSTAYSVINFQD; VSTAYSVINFQDT;
STAYSVINFQDTC; TAYSVINFQDTCF; AYSVINFQDTCFV; YSVINFQDTCFVS;
SVINFQDTCFVSS; VINFQDTCFVSSG; INFQDTCFVSSGS; NFQDTCFVSSGSS;
FQDTCFVSSGSSG; QDTCFVSSGSSGL; DTCFVSSGSSGLK; TCFVSSGSSGLKS;
CFVSSGSSGLKSC; FVSSGSSGLKSCS; VSSGSSGLKSCSF; SSGSSGLKSCSFK;
SGSSGLKSCSFKP; GSSGLKSCSFKPP; MLSSIVWYGSLVK; LSSIVWYGSLVKA;
SSIVWYGSLVKAL; SIVWYGSLVKALY; IVWYGSLVKALYS; VWYGSLVKALYSK;
WYGSLVKALYSKY; YGSLVKALYSKYS; GSLVKALYSKYSL; SLVKALYSKYSLL;
LVKALYSKYSLLT; VKALYSKYSLLTP; KALYSKYSLLTPL; ALYSKYSLLTPLQ;
LYSKYSLLTPLQI; YSKYSLLTPLQIK; SKYSLLTPLQIKK; KYSLLTPLQIKKL;
YSLLTPLQIKKLK; SLLTPLQIKKLKV; LLTPLQIKKLKVH; LTPLQIKKLKVHS;
TPLQIKKLKVHSF; QKLLIAETLCLCG; KLLIAETLCLCGV; LLIAETLCLCGVK;
LIAETLCLCGVKK; IAETLCLCGVKKN; AETLCLCGVKKNI; ETLCLCGVKKNII;
TLCLCGVKKNIIL; LCLCGVKKNIILC; CLCGVKKNIILCP; LCGVKKNIILCPA;
CGVKKNIILCPAH; GVKKNIILCPAHM; VKKNIILCPAHMC; KKNIILCPAHMCL;
KNIILCPAHMCLL; NIILCPAHMCLLI; IILCPAHMCLLIK; ILCPAHMCLLIKV;
LCPAHMCLLIKVT; CPAHMCLLIKVTE; PAHMCLLIKVTEY; AHMCLLIKVTEYF;
HMCLLIKVTEYFS; MCLLIKVTEYFSI; CLLIKVTEYFSIS; LLIKVTEYFSISF;
LIKVTEYFSISFL; IKVTEYFSISFLY; KVTEYFSISFLYR; VTEYFSISFLYRI;
AFSLVVYTAKQAR; FSLVVYTAKQARV; SLVVYTAKQARVL; LVVYTAKQARVLL;
VVYTAKQARVLLL; VYTAKQARVLLLN; YTAKQARVLLLNT; TAKQARVLLLNTA;
LRNWCRSEGKSLG; RNWCRSEGKSLGS; NWCRSEGKSLGSS; WCRSEGKSLGSST;
CRSEGKSLGSSTF; RSEGKSLGSSTFL; SEGKSLGSSTFLF; EGKSLGSSTFLFF;
GKSLGSSTFLFFL; KSLGSSTFLFFLG; SLGSSTFLFFLGG; LGSSTFLFFLGGV;
GSSTFLFFLGGVE; SSTFLFFLGGVEC; ESAVASSSLANIS; SAVASSSLANISS;
AVASSSLANISSW; VASSSLANISSWQ; ASSSLANISSWQN; SSSLANISSWQNK;
SSLANISSWQNKS; SLANISSWQNKSS; LANISSWQNKSSS; ANISSWQNKSSSH;
NISSWQNKSSSHF; ISSWQNKSSSHFS; SSWQNKSSSHFSL; SWQNKSSSHFSLK;
WQNKSSSHFSLKE; QNKSSSHFSLKEL; NKSSSHFSLKELH; KSSSHFSLKELHQ;
SSSHFSLKELHQD; SSHFSLKELHQDS; SHFSLKELHQDSH; HFSLKELHQDSHS;
FSLKELHQDSHSS; SLKELHQDSHSSV; LKELHQDSHSSVP; VGTYKKNNYLGPF;
GTYKKNNYLGPFN; TYKKNNYLGPFNI; YKKNNYLGPFNIL; KKNNYLGPFNILL;
KNNYLGPFNILLF; NNYLGPFNILLFI; REFLQLFGPTIAE; EFLQLFGPTIAEF;
FLQLFGPTIAEFL; LQLFGPTIAEFLQ; QLFGPTIAEFLQL; LFGPTIAEFLQLG;
FGPTIAEFLQLGL; GPTIAEFLQLGLS; PTIAEFLQLGLSQ; TIAEFLQLGLSQT;
IAEFLQLGLSQTT; AEFLQLGLSQTTV; SSQCSSNLSKPRA; SQCSSNLSKPRAL;
QCSSNLSKPRALF; CSSNLSKPRALFL; SSNLSKPRALFLK; SNLSKPRALFLKI;
NLSKPRALFLKIF; LSKPRALFLKIFY; SKPRALFLKIFYL; KPRALFLKIFYLN;
PRALFLKIFYLNA; RALFLKIFYLNAL; ALFLKIFYLNALI; ADIACKGSAQKAF;
DIACKGSAQKAFW; IACKGSAQKAFWN; ACKGSAQKAFWNK; AIPCSTGYLGKEE;
IPCSTGYLGKEEN; PCSTGYLGKEENQ; CSTGYLGKEENQH; STGYLGKEENQHK;
TGYLGKEENQHKP; GYLGKEENQHKPL; YLGKEENQHKPLS; LGKEENQHKPLSY;
GKEENQHKPLSYS; KEENQHKPLSYSR; EENQHKPLSYSRF; ENQHKPLSYSRFQ;
NQHKPLSYSRFQN; QHKPLSYSRFQNQ; HKPLSYSRFQNQA; KPLSYSRFQNQAD;
PLSYSRFQNQADE; LSYSRFQNQADEL; SYSRFQNQADELP; YSRFQNQADELPL;
SRFQNQADELPLH; RFQNQADELPLHP; FQNQADELPLHPA; QNQADELPLHPAP;
NQADELPLHPAPF; QADELPLHPAPFF; ADELPLHPAPFFY; DELPLHPAPFFYT;
ELPLHPAPFFYTK; LPLHPAPFFYTKY; PLHPAPFFYTKYS; LHPAPFFYTKYSF;
HPAPFFYTKYSFS; PAPFFYTKYSFSS; APFFYTKYSFSSF; PFFYTKYSFSSFY;
FFYTKYSFSSFYP; FYTKYSFSSFYPR; YTKYSFSSFYPRR; TKYSFSSFYPRRP;
KYSFSSFYPRRPL; YSFSSFYPRRPLC; SFSSFYPRRPLCQ; FSSFYPRRPLCQG;
SSFYPRRPLCQGE; SFYPRRPLCQGEI; FYPRRPLCQGEIP; YPRRPLCQGEIPY;
PRRPLCQGEIPYT; RRPLCQGEIPYTS; RPLCQGEIPYTSL; PLCQGEIPYTSLN;
LCQGEIPYTSLNK; CQGEIPYTSLNKL; QGEIPYTSLNKLF; GEIPYTSLNKLFS;
EIPYTSLNKLFSL; IPYTSLNKLFSLR; PYTSLNKLFSLRE; YTSLNKLFSLRED;
TSLNKLFSLREDF; SLNKLFSLREDFP; LNKLFSLREDFPR; NKLFSLREDFPRQ;
KLFSLREDFPRQL; LFSLREDFPRQLF; FSLREDFPRQLFQ; SLREDFPRQLFQG;
LREDFPRQLFQGL; REDFPRQLFQGLK; EDFPRQLFQGLKG; DFPRQLFQGLKGP

14 mers:

GFPQIVLLGLRKSL; FPQIVLLGLRKSLH; PQIVLLGLRKSLHT; QIVLLGLRKSLHTL;
IVLLGLRKSLHTLT; VLLGLRKSLHTLTT; EKGWRQRRPRPLIY;
KGWRQRRPRPLIYY; GWRQRRPRPLIYYK; WRQRRPRPLIYYKK;
RQRRPRPLIYYKKK; QRRPRPLIYYKKKG; RRPRPLIYYKKKGH;
RPRPLIYYKKKGHR; PRPLIYYKKKGHRE; RPLIYYKKKGHREE;
PLIYYKKKGHREEL; LIYYKKKGHREELL; IYYKKKGHREELLT;
YYKKKGHREELLTH; YKKKGHREELLTHG; KKKGHREELLTHGM;
KKGHREELLTHGMQ; KGHREELLTHGMQP; GHREELLTHGMQPN;
HREELLTHGMQPNH; REELLTHGMQPNHD; EELLTHGMQPNHDL;
ELLTHGMQPNHDLR; LLTHGMQPNHDLRK; LTHGMQPNHDLRKE;
THGMQPNHDLRKES; HGMQPNHDLRKESA; LTGECSQTMTSGRK;
TGECSQTMTSGRKV; GECSQTMTSGRKVH; ECSQTMTSGRKVHD;
CSQTMTSGRKVHDS; SQTMTSGRKVHDSQ; QTMTSGRKVHDSQG;
TMTSGRKVHDSQGG; MTSGRKVHDSQGGA; TSGRKVHDSQGGAA;
SGRKVHDSQGGAAY; GRKVHDSQGGAAYP; RKVHDSQGGAAYPW;
KVHDSQGGAAYPWN; VHDSQGGAAYPWNA; HDSQGGAAYPWNAA;
DSQGGAAYPWNAAK; SQGGAAYPWNAAKP; PQEGKCMTDMFCEP;
QEGKCMTDMFCEPR; EGKCMTDMFCEPRN; GKCMTDMFCEPRNL;
KCMTDMFCEPRNLG; CMTDMFCEPRNLGL; MTDMFCEPRNLGLV;
TDMFCEPRNLGLVP; DMFCEPRNLGLVPS; TGQRPWFCASCHDK;
GQRPWFCASCHDKL; QRPWFCASCHDKLQ; KLVKPGLEQKKELR;
LVKPGLEQKKELRG; VKPGLEQKKELRGF; KPGLEQKKELRGFL;
PGLEQKKELRGFLF; GLEQKKELRGFLFL; LEQKKELRGFLFLF;
VIPFFLYFQVHGCC; IPFFLYFQVHGCCS; PFFLYFQVHGCCSS; FFLYFQVHGCCSST;
FLYFQVHGCCSSTF; LYFQVHGCCSSTFG; YFQVHGCCSSTFGG;
FQVHGCCSSTFGGP; QVHGCCSSTFGGPS; VHGCCSSTFGGPSC;
HGCCSSTFGGPSCQ; GCCSSTFGGPSCQC; CCSSTFGGPSCQCI;
NCCWGGCCCYRSSN; CCWGGCCCYRSSNC; CWGGCCCYRSSNCI;
WGGCCCYRSSNCIP; GGCCCYRSSNCIPC; GCCCYRSSNCIPCY;
CCCYRSSNCIPCYC; CCYRSSNCIPCYCR; CYRSSNCIPCYCRG;
YRSSNCIPCYCRGH; RSSNCIPCYCRGHN; SSNCIPCYCRGHNK;
SNCIPCYCRGHNKY; NCIPCYCRGHNKYL; CIPCYCRGHNKYLR;
IPCYCRGHNKYLRG; PCYCRGHNKYLRGY; CYCRGHNKYLRGYS;
YCRGHNKYLRGYSC; CRGHNKYLRGYSCY; RGHNKYLRGYSCYR;
GHNKYLRGYSCYRP; HNKYLRGYSCYRPN; NKYLRGYSCYRPNS;
KYLRGYSCYRPNSS; YLRGYSCYRPNSSN; LRGYSCYRPNSSNI;
RGYSCYRPNSSNIC; GYSCYRPNSSNICC; YSCYRPNSSNICCN; SCYRPNSSNICCNC;
CYRPNSSNICCNCW; YRPNSSNICCNCWC; RPNSSNICCNCWCS;
PNSSNICCNCWCSW; NSSNICCNCWCSWG; SSNICCNCWCSWGY;
SNICCNCWCSWGYC; NICCNCWCSWGYCW; ICCNCWCSWGYCWV;
CCNCWCSWGYCWVC; CNCWCSWGYCWVCC; NCWCSWGYCWVCCF;
CWCSWGYCWVCCFN; WCSWGYCWVCCFNS; CSWGYCWVCCFNSN;
SWGYCWVCCFNSNC; LGSQSFHCRPLSAI; GSQSFHCRPLSAIR;
SQSFHCRPLSAIRH; QSFHCRPLSAIRHG; SFHCRPLSAIRHGF; FHCRPLSAIRHGFG;
HCRPLSAIRHGFGI; CRPLSAIRHGFGIV; ALGSFFVCYYFPGF; LGSFFVCYYFPGFV;
GSFFVCYYFPGFVA; SFFVCYYFPGFVAC; FFVCYYFPGFVACY;
YTFYNLTGIAEKNR; TFYNLTGIAEKNRK; FYNLTGIAEKNRKI;
YNLTGIAEKNRKIF; IFGGNYLDNCKCPY; FGGNYLDNCKCPYK;
GGNYLDNCKCPYKL; GNYLDNCKCPYKLL; QYRRSYTKNGLKKS;
YRRSYTKNGLKKST; RRSYTKNGLKKSTK; RSYTKNGLKKSTKC;
SYTKNGLKKSTKCT; YTKNGLKKSTKCTF; TKNGLKKSTKCTFR;
KNGLKKSTKCTFRR; NGLKKSTKCTFRRV; GLKKSTKCTFRRVY;
LKKSTKCTFRRVYR; KKSTKCTFRRVYRK; KSTKCTFRRVYRKN;
STKCTFRRVYRKNY; TKCTFRRVYRKNYC; KCTFRRVYRKNYCP;
CTFRRVYRKNYCPR; TFRRVYRKNYCPRR; FRRVYRKNYCPRRC;
SKNCSSMDVAFTSR; KNCSSMDVAFTSRP; NCSSMDVAFTSRPV;
CSSMDVAFTSRPVR; SSMDVAFTSRPVRD; SMDVAFTSRPVRDC;
MDVAFTSRPVRDCN; DVAFTSRPVRDCNT; VAFTSRPVRDCNTC;
AFTSRPVRDCNTCS; RWPQPKEKESVQGQ; WPQPKEKESVQGQL;
PQPKEKESVQGQLP; QPKEKESVQGQLPK; PKEKESVQGQLPKS;
KEKESVQGQLPKSQ; EKESVQGQLPKSQR; KESVQGQLPKSQRN;
ESVQGQLPKSQRNP; SVQGQLPKSQRNPC; VQGQLPKSQRNPCK;
QGQLPKSQRNPCKC; GQLPKSQRNPCKCQ; QLPKSQRNPCKCQN;
LPKSQRNPCKCQNY; TQKWGIQMKTLGAL; QKWGIQMKTLGALV;
VLKMTLAVIAQREK; LKMTLAVIAQREKC; KMTLAVIAQREKCF;
MTLAVIAQREKCFP; TLAVIAQREKCFPV; LAVIAQREKCFPVT;
AVIAQREKCFPVTA; VIAQREKCFPVTAQ; IAQREKCFPVTAQQ;
AQREKCFPVTAQQE; QREKCFPVTAQQEF; REKCFPVTAQQEFP;
EKCFPVTAQQEFPS; KCFPVTAQQEFPSP; CFPVTAQQEFPSPI;
LACLTFMQGHKKCM; ACLTFMQGHKKCMS; CLTFMQGHKKCMSM;
LTFMQGHKKCMSMV; TFMQGHKKCMSMVE; FMQGHKKCMSMVEE;
MQGHKKCMSMVEEN; QGHKKCMSMVEENL; GHKKCMSMVEENLF;
HKKCMSMVEENLFK; KKCMSMVEENLFKA; KCMSMVEENLFKAV;
CMSMVEENLFKAVI; MSMVEENLFKAVIS; SMVEENLFKAVIST;
MVEENLFKAVISTS; VEENLFKAVISTSL; EENLFKAVISTSLL; ILTIRPIWTKTMLI;
LTIRPIWTKTMLIQ; TIRPIWTKTMLIQL; IRPIWTKTMLIQLS; RPIWTKTMLIQLSA;
PIWTKTMLIQLSAG; IWTKTMLIQLSAGY; WTKTMLIQLSAGYL;
TKTMLIQLSAGYLI; KTMLIQLSAGYLIP; TMLIQLSAGYLIPV; MLIQLSAGYLIPVE;
LIQLSAGYLIPVEM; IQLSAGYLIPVEMK; QLSAGYLIPVEMKM;
LSAGYLIPVEMKML; SAGYLIPVEMKMLG; AGYLIPVEMKMLGI;
GYLIPVEMKMLGIL; YLIPVEMKMLGILG; LIPVEMKMLGILGL;
IPVEMKMLGILGLS; PVEMKMLGILGLSQ; VEMKMLGILGLSQE;
EMKMLGILGLSQEG; MKMLGILGLSQEGK; KMLGILGLSQEGKM;
MLGILGLSQEGKMF; LGILGLSQEGKMFP; GILGLSQEGKMFPQ,
ILGLSQEGKMFPQY; LGLSQEGKMFPQYF; GLSQEGKMFPQYFM;
MNRVWGLFVKLIAC; NRVWGLFVKLIACM; RVWGLFVKLIACMF;
VWGLFVKLIACMFQ; WGLFVKLIACMFQL; GLFVKLIACMFQLL;
LFVKLIACMFQLLI; FVKLIACMFQLLIF; VKLIACMFQLLIFV; KLIACMFQLLIFVA;
LIACMFQLLIFVAC; IACMFQLLIFVACL; ACMFQLLIFVACLL; CMFQLLIFVACLLT;
MFQLLIFVACLLTA; FQLLIFVACLLTAL; QLLIFVACLLTALE; LLIFVACLLTALEH;
LIFVACLLTALEHN; IFVACLLTALEHNS; FVACLLTALEHNSG;
VACLLTALEHNSGE; ACLLTALEHNSGEA; CLLTALEHNSGEAL;
LLTALEHNSGEALQ; LTALEHNSGEALQD; TALEHNSGEALQDI;
ALEHNSGEALQDIL; LEHNSGEALQDILR; EHNSGEALQDILRS;
HNSGEALQDILRSA; TGEPREWMGSLCMV; GEPREWMGSLCMVW;
EPREWMGSLCMVWN; PREWMGSLCMVWNP; REWMGSLCMVWNPR;
KRLGCLMAQKDFQG; RLGCLMAQKDFQGT; LGCLMAQKDFQGTQ;
GCLMAQKDFQGTQI; DILTNRDNCKPKCF; ILTNRDNCKPKCFK;
LTNRDNCKPKCFKQ; TNRDNCKPKCFKQV; NRDNCKPKCFKQVL;
RDNCKPKCFKQVLL; DNCKPKCFKQVLLL; NCKPKCFKQVLLLY;
CKPKCFKQVLLLYI; KPKCFKQVLLLYIY; PKCFKQVLLLYIYI;
MLLLYKPLLSLCYF; LLLYKPLLSLCYFG; LLYKPLLSLCYFGG;
LYKPLLSLCYFGGG; YKPLLSLCYFGGGV; KPLLSLCYFGGGVL;
PLLSLCYFGGGVLG; LLSLCYFGGGVLGL; LSLCYFGGGVLGLL;
SLCYFGGGVLGLLK; LCYFGGGVLGLLKH; LWGSDLWESSAGAE;
WGSDLWESSAGAEV; GSDLWESSAGAEVS; SDLWESSAGAEVSE;
DLWESSAGAEVSET; LWESSAGAEVSETW; WESSAGAEVSETWE;
ESSAGAEVSETWEE; SSAGAEVSETWEEH; SAGAEVSETWEEHC;
AGAEVSETWEEHCD; GAEVSETWEEHCDW; AEVSETWEEHCDWD;
EVSETWEEHCDWDS; VSETWEEHCDWDSV; SETWEEHCDWDSVL;
ETWEEHCDWDSVLD; TWEEHCDWDSVLDP; WEEHCDWDSVLDPC;
EEHCDWDSVLDPCP; EHCDWDSVLDPCPE; HCDWDSVLDPCPES;
CDWDSVLDPCPESS; DWDSVLDPCPESSV; WDSVLDPCPESSVS;
DSVLDPCPESSVSE; SVLDPCPESSVSES; VLDPCPESSVSESS; LDPCPESSVSESSS;
DPCPESSVSESSSL; PCPESSVSESSSLV; CPESSVSESSSLVI; PESSVSESSSLVIS;
ESSVSESSSLVISR; SSVSESSSLVISRI; SVSESSSLVISRIH; VSESSSLVISRIHF;
SESSSLVISRIHFP; ESSSLVISRIHFPM; SSSLVISRIHFPMH; SSLVISRIHFPMHI;
SLVISRIHFPMHIL; LVISRIHFPMHILY; VISRIHFPMHILYF; ISRIHFPMHILYFI;
SRIHFPMHILYFIL; RIHFPMHILYFILE; IHFPMHILYFILEK; HFPMHILYFILEKV;
FPMHILYFILEKVY; PMHILYFILEKVYI; MHILYFILEKVYIL; HILYFILEKVYILI;
ILYFILEKVYILIS; LYFILEKVYILISE; YFILEKVYILISES; FILEKVYILISESS;
ILEKVYILISESSL; LEKVYILISESSLS; EKVYILISESSLSF; KVYILISESSLSFH;
VYILISESSLSFHS; YILISESSLSFHST; ILISESSLSFHSTI; LISESSLSFHSTIL;
ISESSLSFHSTILD; SESSLSFHSTILDC; ESSLSFHSTILDCI; SSLSFHSTILDCIS;
SLSFHSTILDCISV; LSFHSTILDCISVA; SFHSTILDCISVAK; FHSTILDCISVAKS;
HSTILDCISVAKSA; STILDCISVAKSAT; TILDCISVAKSATG; ILDCISVAKSATGL;
LDCISVAKSATGLN; DCISVAKSATGLNQ; CISVAKSATGLNQI;
ISVAKSATGLNQIS; SVAKSATGLNQISS; VAKSATGLNQISSS; AKSATGLNQISSSN;
KSATGLNQISSSNK; SATGLNQISSSNKV; ATGLNQISSSNKVI; TGLNQISSSNKVIP;
GLNQISSSNKVIPL; LNQISSSNKVIPLC; NQISSSNKVIPLCK; QISSSNKVIPLCKI;
ISSSNKVIPLCKIL; SSSNKVIPLCKILF; SSNKVIPLCKILFS; SNKVIPLCKILFSS;
NKVIPLCKILFSSK; KVIPLCKILFSSKN; VIPLCKILFSSKNS; IPLCKILFSSKNSE;
PLCKILFSSKNSEF; LCKILFSSKNSEFC; CKILFSSKNSEFCK; KILFSSKNSEFCKD;
ILFSSKNSEFCKDF; LFSSKNSEFCKDFL; FSSKNSEFCKDFLK; SSKNSEFCKDFLKY;
SKNSEFCKDFLKYI; KNSEFCKDFLKYIL; NSEFCKDFLKYILG; SEFCKDFLKYILGL;
EFCKDFLKYILGLK; FCKDFLKYILGLKS; CKDFLKYILGLKSI; KDFLKYILGLKSIC;
DFLKYILGLKSICL; FLKYILGLKSICLT; LKYILGLKSICLTN; KYILGLKSICLTNL;
YILGLKSICLTNLA; ILGLKSICLTNLAC; LGLKSICLTNLACR; GLKSICLTNLACRV;
LKSICLTNLACRVL; KSICLTNLACRVLG; SICLTNLACRVLGT;
ICLTNLACRVLGTG; CLTNLACRVLGTGY; LTNLACRVLGTGYS;
TNLACRVLGTGYSF; NLACRVLGTGYSFI; LACRVLGTGYSFIV;
ACRVLGTGYSFIVT; CRVLGTGYSFIVTK; RVLGTGYSFIVTKP;
VLGTGYSFIVTKPG; LGTGYSFIVTKPGG; GTGYSFIVTKPGGN; TGYSFIVTKPGGNI;
GYSFIVTKPGGNIW; YSFIVTKPGGNIWV; SFIVTKPGGNIWVL;
FIVTKPGGNIWVLL; IVTKPGGNIWVLLF; VTKPGGNIWVLLFK;
TKPGGNIWVLLFKC; KPGGNIWVLLFKCF; PGGNIWVLLFKCFF;
GGNIWVLLFKCFFS; GNIWVLLFKCFFSK; NIWVLLFKCFFSKF;
IWVLLFKCFFSKFT; WVLLFKCFFSKFTL; VLLFKCFFSKFTLT; LLFKCFFSKFTLTL;
LFKCFFSKFTLTLP; FKCFFSKFTLTLPS; KCFFSKFTLTLPSK; SLKLSKLFIPCPEG;
LKLSKLFIPCPEGK; KLSKLFIPCPEGKS; LSKLFIPCPEGKSF; SKLFIPCPEGKSFD;
KLFIPCPEGKSFDS; LFIPCPEGKSFDSA; FIPCPEGKSFDSAP; IPCPEGKSFDSAPV;
PCPEGKSFDSAPVP; CPEGKSFDSAPVPF; PEGKSFDSAPVPFT; EGKSFDSAPVPFTS;
GKSFDSAPVPFTSS; KSFDSAPVPFTSSK; SFDSAPVPFTSSKT; FDSAPVPFTSSKTT;
DSAPVPFTSSKTTM; SAPVPFTSSKTTMY; SIATPSSKVSLSMG; IATPSSKVSLSMGR;
ATPSSKVSLSMGRF; TPSSKVSLSMGRFT; PSSKVSLSMGRFTF;
SSKVSLSMGRFTFK; SKVSLSMGRFTFKA; KVSLSMGRFTFKAL;
VSLSMGRFTFKALP; SLSMGRFTFKALPP; LSMGRFTFKALPPH;
SMGRFTFKALPPHK; MGRFTFKALPPHKS; GRFTFKALPPHKSN;
RFTFKALPPHKSNN; FTFKALPPHKSNNP; TFKALPPHKSNNPA;
FKALPPHKSNNPAA; KALPPHKSNNPAAS; ALPPHKSNNPAASV;
LPPHKSNNPAASVV; PPHKSNNPAASVVF; PHKSNNPAASVVFP;
HKSNNPAASVVFPL; KSNNPAASVVFPLS; SNNPAASVVFPLSM;
NNPAASVVFPLSMG; NPAASVVFPLSMGP; PAASVVFPLSMGPL;
AASVVFPLSMGPLN; ASVVFPLSMGPLNN; SVVFPLSMGPLNNQ;
VVFPLSMGPLNNQY; VFPLSMGPLNNQYL; FPLSMGPLNNQYLL;
PLSMGPLNNQYLLL; LSMGPLNNQYLLLG; SMGPLNNQYLLLGT;
MGPLNNQYLLLGTL; GPLNNQYLLLGTLK; PLNNQYLLLGTLKT;
LNNQYLLLGTLKTI; NNQYLLLGTLKTIQ; NQYLLLGTLKTIQC;
QYLLLGTLKTIQCK; YLLLGTLKTIQCKK; LLLGTLKTIQCKKS;
LLGTLKTIQCKKSN; LGTLKTIQCKKSNI; GTLKTIQCKKSNIT; TLKTIQCKKSNITE;
LKTIQCKKSNITES; KTIQCKKSNITESI; TIQCKKSNITESIL; IQCKKSNITESILG;
QCKKSNITESILGS; CKKSNITESILGSK; KKSNITESILGSKQ; KSNITESILGSKQC;
SNITESILGSKQCS; NITESILGSKQCSQ; ITESILGSKQCSQA; TESILGSKQCSQAT;
ESILGSKQCSQATP; SILGSKQCSQATPA; ILGSKQCSQATPAI; LGSKQCSQATPAIY;
GSKQCSQATPAIYC; SKQCSQATPAIYCS; KQCSQATPAIYCSS; QCSQATPAIYCSST;
CSQATPAIYCSSTA; SQATPAIYCSSTAF; QATPAIYCSSTAFP; RVSTLFLAKTVSTA;
VSTLFLAKTVSTAC; FLLSAKIIAFAKCF; LLSAKIIAFAKCFS; NSKYIPNNKNTSSH;
SKYIPNNKNTSSHF; KYIPNNKNTSSHFV; YIPNNKNTSSHFVS; IPNNKNTSSHFVST;
PNNKNTSSHFVSTA; NNKNTSSHFVSTAY; NKNTSSHFVSTAYS;
KNTSSHFVSTAYSV; NTSSHFVSTAYSVI; TSSHFVSTAYSVIN; SSHFVSTAYSVINF;
SHFVSTAYSVINFQ; HFVSTAYSVINFQD; FVSTAYSVINFQDT;
VSTAYSVINFQDTC; STAYSVINFQDTCF; TAYSVINFQDTCFV;
AYSVINFQDTCFVS; YSVINFQDTCFVSS; SVINFQDTCFVSSG; VINFQDTCFVSSGS;
INFQDTCFVSSGSS; NFQDTCFVSSGSSG; FQDTCFVSSGSSGL; QDTCFVSSGSSGLK;
DTCFVSSGSSGLKS; TCFVSSGSSGLKSC; CFVSSGSSGLKSCS; FVSSGSSGLKSCSF;
VSSGSSGLKSCSFK; SSGSSGLKSCSFKP; SGSSGLKSCSFKPP;
MLSSIVWYGSLVKA; LSSIVWYGSLVKAL; SSIVWYGSLVKALY;
SIVWYGSLVKALYS; IVWYGSLVKALYSK; VWYGSLVKALYSKY;
WYGSLVKALYSKYS; YGSLVKALYSKYSL; GSLVKALYSKYSLL;
SLVKALYSKYSLLT; LVKALYSKYSLLTP; VKALYSKYSLLTPL;
KALYSKYSLLTPLQ; ALYSKYSLLTPLQI; LYSKYSLLTPLQIK; YSKYSLLTPLQIKK;
SKYSLLTPLQIKKL; KYSLLTPLQIKKLK; YSLLTPLQIKKLKV; SLLTPLQIKKLKVH;
LLTPLQIKKLKVHS; LTPLQIKKLKVHSF; QKLLIAETLCLCGV;
KLLIAETLCLCGVK; LLIAETLCLCGVKK; LIAETLCLCGVKKN;
IAETLCLCGVKKNI; AETLCLCGVKKNII; ETLCLCGVKKNIIL; TLCLCGVKKNIILC;
LCLCGVKKNIILCP; CLCGVKKNIILCPA; LCGVKKNIILCPAH; CGVKKNIILCPAHM;
GVKKNIILCPAHMC; VKKNIILCPAHMCL; KKNIILCPAHMCLL;
KNIILCPAHMCLLI; NIILCPAHMCLLIK; IILCPAHMCLLIKV; ILCPAHMCLLIKVT;
LCPAHMCLLIKVTE; CPAHMCLLIKVTEY; PAHMCLLIKVTEYF;
AHMCLLIKVTEYFS; HMCLLIKVTEYFSI; MCLLIKVTEYFSIS; CLLIKVTEYFSISF;
LLIKVTEYFSISFL; LIKVTEYFSISFLY; IKVTEYFSISFLYR; KVTEYFSISFLYRI;
AFSLVVYTAKQARV; FSLVVYTAKQARVL; SLVVYTAKQARVLL;
LVVYTAKQARVLLL; VVYTAKQARVLLLN; VYTAKQARVLLLNT;
YTAKQARVLLLNTA; LRNWCRSEGKSLGS; RNWCRSEGKSLGSS;
NWCRSEGKSLGSST; WCRSEGKSLGSSTF; CRSEGKSLGSSTFL;
RSEGKSLGSSTFLF; SEGKSLGSSTFLFF; EGKSLGSSTFLFFL; GKSLGSSTFLFFLG;
KSLGSSTFLFFLGG; SLGSSTFLFFLGGV; LGSSTFLFFLGGVE; GSSTFLFFLGGVEC;
ESAVASSSLANISS; SAVASSSLANISSW; AVASSSLANISSWQ; VASSSLANISSWQN;
ASSSLANISSWQNK; SSSLANISSWQNKS; SSLANISSWQNKSS;
SLANISSWQNKSSS; LANISSWQNKSSSH; ANISSWQNKSSSHF;
NISSWQNKSSSHFS; ISSWQNKSSSHFSL; SSWQNKSSSHFSLK;
SWQNKSSSHFSLKE; WQNKSSSHFSLKEL; QNKSSSHFSLKELH;
NKSSSHFSLKELHQ; KSSSHFSLKELHQD; SSSHFSLKELHQDS;
SSHFSLKELHQDSH; SHFSLKELHQDSHS; HFSLKELHQDSHSS;
FSLKELHQDSHSSV; SLKELHQDSHSSVP; VGTYKKNNYLGPFN;
GTYKKNNYLGPFNI; TYKKNNYLGPFNIL; YKKNNYLGPFNILL;
KKNNYLGPFNILLF; KNNYLGPFNILLFI; RFFLQLFGPTIAEF; EFLQLFGPTIAEFL;
FLQLFGPTIAEFLQ; LQLFGPTIAEFLQL; QLFGPTIAEFLQLG; LFGPTIAEFLQLGL;
FGPTIAEFLQLGLS; GPTIAEFLQLGLSQ; PTIAEFLQLGLSQT; TIAEFLQLGLSQTT;
IAEFLQLGLSQTTV; SSQCSSNLSKPRAL; SQCSSNLSKPRALF; QCSSNLSKPRALFL;
CSSNLSKPRALFLK; SSNLSKPRALFLKI; SNLSKPRALFLKIF; NLSKPRALFLKIFY;
LSKPRALFLKIFYL; SKPRALFLKIFYLN; KPRALFLKIFYLNA; PRALFLKIFYLNAL;
RALFLKIFYLNALI; ADIACKGSAQKAFW; DIACKGSAQKAFWN;
IACKGSAQKAFWNK; AIPCSTGYLGKEEN; IPCSTGYLGKEENQ;
PCSTGYLGKEENQH; CSTGYLGKEENQHK; STGYLGKEENQHKP;
TGYLGKEENQHKPL; GYLGKEENQHKPLS; YLGKEENQHKPLSY;
LGKEENQHKPLSYS; GKEENQHKPLSYSR; KEENQHKPLSYSRF;
EENQHKPLSYSRFQ; ENQHKPLSYSRFQN; NQHKPLSYSRFQNQ;
QHKPLSYSRFQNQA; HKPLSYSRFQNQAD; KPLSYSRFQNQADE;
PLSYSRFQNQADEL; LSYSRFQNQADELP; SYSRFQNQADELPL;
YSRFQNQADELPLH; SRFQNQADELPLHP; RFQNQADELPLHPA;
FQNQADELPLHPAP; QNQADELPLHPAPF; NQADELPLHPAPFF;
QADELPLHPAPFFY; ADELPLHPAPFFYT; DELPLHPAPFFYTK;
ELPLHPAPFFYTKY; LPLHPAPFFYTKYS; PLHPAPFFYTKYSF; LHPAPFFYTKYSFS;
HPAPFFYTKYSFSS; PAPFFYTKYSFSSF; APFFYTKYSFSSFY; PFFYTKYSFSSFYP;
FFYTKYSFSSFYPR; FYTKYSFSSFYPRR; YTKYSFSSFYPRRP; TKYSFSSFYPRRPL;
KYSFSSFYPRRPLC; YSFSSFYPRRPLCQ; SFSSFYPRRPLCQG; FSSFYPRRPLCQGE;
SSFYPRRPLCQGEI; SFYPRRPLCQGEIP; FYPRRPLCQGEIPY; YPRRPLCQGEIPYT;
PRRPLCQGEIPYTS; RRPLCQGEIPYTSL; RPLCQGEIPYTSLN; PLCQGEIPYTSLNK;
LCQGEIPYTSLNKL; CQGEIPYTSLNKLF; QGEIPYTSLNKLFS; GEIPYTSLNKLFSL;
EIPYTSLNKLFSLR; IPYTSLNKLFSLRE; PYTSLNKLFSLRED; YTSLNKLFSLREDF;
TSLNKLFSLREDFP; SLNKLFSLREDFPR; LNKLFSLREDFPRQ; NKLFSLREDFPRQL;
KLFSLREDFPRQLF; LFSLREDFPRQLFQ; FSLREDFPRQLFQG; SLREDFPRQLFQGL;
LREDFPRQLFQGLK; REDFPRQLFQGLKG; EDFPRQLFQGLKGP

15 mers:

GFPQIVLLGLRKSLH; FPQIVLLGLRKSLHT; PQIVLLGLRKSLHTL;
QIVLLGLRKSLHTLT; IVLLGLRKSLHTLTT; EKGWRQRRPRPLIYY;
KGWRQRRPRPLIYYK; GWRQRRPRPLIYYKK; WRQRRPRPLIYYKKK;
RQRRPRPLIYYKKKG; QRRPRPLIYYKKKGH; RRPRPLIYYKKKGHR;
RPRPLIYYKKKGHRE; PRPLIYYKKKGHREE; RPLIYYKKKGHREEL;
PLIYYKKKGHREELL; LIYYKKKGHREELLT; IYYKKKGHREELLTH;
YYKKKGHREELLTHG; YKKKGHREELLTHGM; KKKGHREELLTHGMQ;
KKGHREELLTHGMQP; KGHREELLTHGMQPN; GHREELLTHGMQPNH;
HREELLTHGMQPNHD; REELLTHGMQPNHDL; EELLTHGMQPNHDLR;
ELLTHGMQPNHDLRK; LLTHGMQPNHDLRKE; LTHGMQPNHDLRKES;
THGMQPNHDLRKESA; LTGECSQTMTSGRKV; TGECSQTMTSGRKVH;
GECSQTMTSGRKVHD; ECSQTMTSGRKVHDS; CSQTMTSGRKVHDSQ;
SQTMTSGRKVHDSQG; QTMTSGRKVHDSQGG; TMTSGRKVHDSQGGA;
MTSGRKVHDSQGGAA; TSGRKVHDSQGGAAY; SGRKVHDSQGGAAYP;
GRKVHDSQGGAAYPW; RKVHDSQGGAAYPWN; KVHDSQGGAAYPWNA;
VHDSQGGAAYPWNAA; HDSQGGAAYPWNAAK; DSQGGAAYPWNAAKP;
PQEGKCMTDMFCEPR; QEGKCMTDMFCEPRN; EGKCMTDMFCEPRNL;
GKCMTDMFCEPRNLG; KCMTDMFCEPRNLGL; CMTDMFCEPRNLGLV;
MTDMFCEPRNLGLVP; TDMFCEPRNLGLVPS; TGQRPWFCASCHDKL;
GQRPWFCASCHDKLQ; KLVKPGLEQKKELRG; LVKPGLEQKKELRGF;
VKPGLEQKKELRGFL; KPGLEQKKELRGFLF; PGLEQKKELRGFLFL;
GLEQKKELRGFLFLF; VIPFFLYFQVHGCCS; IPFFLYFQVHGCCSS;
PFFLYFQVHGCCSST; FFLYFQVHGCCSSTF; FLYFQVHGCCSSTFG;
LYFQVHGCCSSTFGG; YFQVHGCCSSTFGGP; FQVHGCCSSTFGGPS;
QVHGCCSSTFGGPSC; VHGCCSSTFGGPSCQ; HGCCSSTFGGPSCQC;
GCCSSTFGGPSCQCI; NCCWGGCCCYRSSNC; CCWGGCCCYRSSNCI;
CWGGCCCYRSSNCIP; WGGCCCYRSSNCIPC; GGCCCYRSSNCIPCY;
GCCCYRSSNCIPCYC; CCCYRSSNCIPCYCR; CCYRSSNCIPCYCRG;
CYRSSNCIPCYCRGH; YRSSNCIPCYCRGHN; RSSNCIPCYCRGHNK;
SSNCIPCYCRGHNKY; SNCIPCYCRGHNKYL; NCIPCYCRGHNKYLR;
CIPCYCRGHNKYLRG; IPCYCRGHNKYLRGY; PCYCRGHNKYLRGYS;
CYCRGHNKYLRGYSC; YCRGHNKYLRGYSCY; CRGHNKYLRGYSCYR;
RGHNKYLRGYSCYRP; GHNKYLRGYSCYRPN; HNKYLRGYSCYRPNS;
NKYLRGYSCYRPNSS; KYLRGYSCYRPNSSN; YLRGYSCYRPNSSNI;
LRGYSCYRPNSSNIC; RGYSCYRPNSSNICC; GYSCYRPNSSNICCN;
YSCYRPNSSNICCNC; SCYRPNSSNICCNCW; CYRPNSSNICCNCWC;
YRPNSSNICCNCWCS; RPNSSNICCNCWCSW; PNSSNICCNCWCSWG;
NSSNICCNCWCSWGY; SSNICCNCWCSWGYC; SNICCNCWCSWGYCW;
NICCNCWCSWGYCWV; ICCNCWCSWGYCWVC; CCNCWCSWGYCWVCC;
CNCWCSWGYCWVCCF; NCWCSWGYCWVCCFN; CWCSWGYCWVCCFNS;
WCSWGYCWVCCFNSN; CSWGYCWVCCFNSNC; LGSQSFHCRPLSAIR;
GSQSFHCRPLSAIRH; SQSFHCRPLSAIRHG; QSFHCRPLSAIRHGF;
SFHCRPLSAIRHGFG; FHCRPLSAIRHGFGI; HCRPLSAIRHGFGIV;
ALGSFFVCYYFPGFV; LGSFFVCYYFPGFVA; GSFFVCYYFPGFVAC;
SFFVCYYFPGFVACY; YTFYNLTGIAEKNRK; TFYNLTGIAEKNRKI;
FYNLTGIAEKNRKIF; IFGGNYLDNCKCPYK; FGGNYLDNCKCPYKL;
GGNYLDNCKCPYKLL; QYRRSYTKNGLKKST; YRRSYTKNGLKKSTK;
RRSYTKNGLKKSTKC; RSYTKNGLKKSTKCT; SYTKNGLKKSTKCTF;
YTKNGLKKSTKCTFR; TKNGLKKSTKCTFRR; KNGLKKSTKCTFRRV;
NGLKKSTKCTFRRVY; GLKKSTKCTFRRVYR; LKKSTKCTFRRVYRK;
KKSTKCTFRRVYRKN; KSTKCTFRRVYRKNY; STKCTFRRVYRKNYC;
TKCTFRRVYRKNYCP; KCTFRRVYRKNYCPR; CTFRRVYRKNYCPRR;
TFRRVYRKNYCPRRC; SKNCSSMDVAFTSRP; KNCSSMDVAFTSRPV;
NCSSMDVAFTSRPVR; CSSMDVAFTSRPVRD; SSMDVAFTSRPVRDC;
SMDVAFTSRPVRDCN; MDVAFTSRPVRDCNT; DVAFTSRPVRDCNTC;
VAFTSRPVRDCNTCS; RWPQPKEKESVQGQL; WPQPKEKESVQGQLP;
PQPKEKESVQGQLPK; QPKEKESVQGQLPKS; PKEKESVQGQLPKSQ;
KEKESVQGQLPKSQR; EKESVQGQLPKSQRN; KESVQGQLPKSQRNP;
ESVQGQLPKSQRNPC; SVQGQLPKSQRNPCK; VQGQLPKSQRNPCKC;
QGQLPKSQRNPCKCQ; GQLPKSQRNPCKCQN; QLPKSQRNPCKCQNY;
TQKWGIQMKTLGALV; VLKMTLAVIAQREKC; LKMTLAVIAQREKCF;
KMTLAVIAQREKCFP; MTLAVIAQREKCFPV; TLAVIAQREKCFPVT;
LAVIAQREKCFPVTA; AVIAQREKCFPVTAQ; VIAQREKCFPVTAQQ;
IAQREKCFPVTAQQE; AQREKCFPVTAQQEF; QREKCFPVTAQQEFP;
REKCFPVTAQQEFPS; EKCFPVTAQQEFPSP; KCFPVTAQQEFPSPI;
LACLTFMQGHKKCMS; ACLTFMQGHKKCMSM; CLTFMQGHKKCMSMV;
LTFMQGHKKCMSMVE; TFMQGHKKCMSMVEE; FMQGHKKCMSMVEEN;
MQGHKKCMSMVEENL; QGHKKCMSMVEENLF; GHKKCMSMVEENLFK;
HKKCMSMVEENLFKA; KKCMSMVEENLFKAV; KCMSMVEENLFKAVI;
CMSMVEENLFKAVIS; MSMVEENLFKAVIST; SMVEENLFKAVISTS;
MVEENLFKAVISTSL; VEENLFKAVISTSLL; ILTIRPIWTKTMLIQ;
LTIRPIWTKTMLIQL; TIRPIWTKTMLIQLS; IRPIWTKTMLIQLSA;
RPIWTKTMLIQLSAG; PIWTKTMLIQLSAGY; IWTKTMLIQLSAGYL;
WTKTMLIQLSAGYLI; TKTMLIQLSAGYLIP; KTMLIQLSAGYLIPV;
TMLIQLSAGYLIPVE; MLIQLSAGYLIPVEM; LIQLSAGYLIPVEMK;
IQLSAGYLIPVEMKM; QLSAGYLIPVEMKML; LSAGYLIPVEMKMLG;
SAGYLIPVEMKMLGI; AGYLIPVEMKMLGIL; GYLIPVEMKMLGILG;
YLIPVEMKMLGILGL; LIPVEMKMLGILGLS; IPVEMKMLGILGLSQ;
PVEMKMLGILGLSQE; VEMKMLGILGLSQEG; EMKMLGILGLSQEGK;
MKMLGILGLSQEGKM; KMLGILGLSQEGKMF; MLGILGLSQEGKMFP;
LGILGLSQEGKMFPQ; GILGLSQEGKMFPQY; ILGLSQEGKMFPQYF;
LGLSQEGKMFPQYFM; MNRVWGLFVKLIACM; NRVWGLFVKLIACMF;
RVWGLFVKLIACMFQ; VWGLFVKLIACMFQL; WGLFVKLIACMFQLL;
GLFVKLIACMFQLLI; LFVKLIACMFQLLIF; FVKLIACMFQLLIFV;
VKLIACMFQLLIFVA; KLIACMFQLLIFVAC; LIACMFQLLIFVACL;
IACMFQLLIFVACLL; ACMFQLLIFVACLLT; CMFQLLIFVACLLTA;
MFQLLIFVACLLTAL; FQLLIFVACLLTALE; QLLIFVACLLTALEH;
LLIFVACLLTALEHN; LIFVACLLTALEHNS; IFVACLLTALEHNSG;
FVACLLTALEHNSGE; VACLLTALEHNSGEA; ACLLTALEHNSGEAL;
CLLTALEHNSGEALQ; LLTALEHNSGEALQD; LTALEHNSGEALQDI;
TALEHNSGEALQDIL; ALEHNSGEALQDILR; LEHNSGEALQDILRS;
EHNSGEALQDILRSA; TGEPREWMGSLCMVW; GEPREWMGSLCMVWN;
EPREWMGSLCMVWNP; PREWMGSLCMVWNPR; KRLGCLMAQKDFQGT;
RLGCLMAQKDFQGTQ; LGCLMAQKDFQGTQI; DILTNRDNCKPKCFK;
ILTNRDNCKPKCFKQ; LTNRDNCKPKCFKQV; TNRDNCKPKCFKQVL;
NRDNCKPKCFKQVLL; RDNCKPKCFKQVLLL; DNCKPKCFKQVLLLY;
NCKPKCFKQVLLLYI; CKPKCFKQVLLLYIY; KPKCFKQVLLLYIYI;
MLLLYKPLLSLCYFG; LLLYKPLLSLCYFGG; LLYKPLLSLCYFGGG;
LYKPLLSLCYFGGGV; YKPLLSLCYFGGGVL; KPLLSLCYFGGGVLG;
PLLSLCYFGGGVLGL; LLSLCYFGGGVLGLL; LSLCYFGGGVLGLLK;
SLCYFGGGVLGLLKH; LWGSDLWESSAGAEV; WGSDLWESSAGAEVS;
GSDLWESSAGAEVSE; SDLWESSAGAEVSET; DLWESSAGAEVSETW;
LWESSAGAEVSETWE; WESSAGAEVSETWEE; ESSAGAEVSETWEEH;
SSAGAEVSETWEEHC; SAGAEVSETWEEHCD; AGAEVSETWEEHCDW;
GAEVSETWEEHCDWD; AEVSETWEEHCDWDS; EVSETWEEHCDWDSV;
VSETWEEHCDWDSVL; SETWEEHCDWDSVLD; ETWEEHCDWDSVLDP;
TWEEHCDWDSVLDPC; WEEHCDWDSVLDPCP; EEHCDWDSVLDPCPE;
EHCDWDSVLDPCPES; HCDWDSVLDPCPESS; CDWDSVLDPCPESSV;
DWDSVLDPCPESSVS; WDSVLDPCPESSVSE; DSVLDPCPESSVSES;
SVLDPCPESSVSESS; VLDPCPESSVSESSS; LDPCPESSVSESSSL;
DPCPESSVSESSSLV; PCPESSVSESSSLVI; CPESSVSESSSLVIS; PESSVSESSSLVISR;
ESSVSESSSLVISRI; SSVSESSSLVISRIH; SVSESSSLVISRIHF; VSESSSLVISRIHFP;
SESSSLVISRIHFPM; ESSSLVISRIHFPMH; SSSLVISRIHFPMHI; SSLVISRIHFPMHIL;
SLVISRIHFPMHILY; LVISRIHFPMHILYF; VISRIHFPMHILYFI; ISRIHFPMHILYFIL;
SRIHFPMHILYFILE; RIHFPMHILYFILEK; IHFPMHILYFILEKV;
HFPMHILYFILEKVY; FPMHILYFILEKVYI; PMHILYFILEKVYIL;
MHILYFILEKVYILI; HILYFILEKVYILIS; ILYFILEKVYILISE; LYFILEKVYILISES;
YFILEKVYILISESS; FILEKVYILISESSL; ILEKVYILISESSLS; LEKVYILISESSLSF;
EKVYILISESSLSFH; KVYILISESSLSFHS; VYILISESSLSFHST; YILISESSLSFHSTI;
ILISESSLSFHSTIL; LISESSLSFHSTILD; ISESSLSFHSTILDC; SESSLSFHSTILDCI;
ESSLSFHSTILDCIS; SSLSFHSTILDCISV; SLSFHSTILDCISVA; LSFHSTILDCISVAK;
SFHSTILDCISVAKS; FHSTILDCISVAKSA; HSTILDCISVAKSAT;
STILDCISVAKSATG; TILDCISVAKSATGL; ILDCISVAKSATGLN;
LDCISVAKSATGLNQ; DCISVAKSATGLNQI; CISVAKSATGLNQIS;
ISVAKSATGLNQISS; SVAKSATGLNQISSS; VAKSATGLNQISSSN;
AKSATGLNQISSSNK; KSATGLNQISSSNKV; SATGLNQISSSNKVI;
ATGLNQISSSNKVIP; TGLNQISSSNKVIPL; GLNQISSSNKVIPLC;
LNQISSSNKVIPLCK; NQISSSNKVIPLCKI; QISSSNKVIPLCKIL; ISSSNKVIPLCKILF;
SSSNKVIPLCKILFS; SSNKVIPLCKILFSS; SNKVIPLCKILFSSK;
NKVIPLCKILFSSKN; KVIPLCKILFSSKNS; VIPLCKILFSSKNSE;
IPLCKILFSSKNSEF; PLCKILFSSKNSEFC; LCKILFSSKNSEFCK;
CKILFSSKNSEFCKD; KILFSSKNSEFCKDF; ILFSSKNSEFCKDFL;
LFSSKNSEFCKDFLK; FSSKNSEFCKDFLKY; SSKNSEFCKDFLKYI;
SKNSEFCKDFLKYIL; KNSEFCKDFLKYILG; NSEFCKDFLKYILGL;
SEFCKDFLKYILGLK; EFCKDFLKYILGLKS; FCKDFLKYILGLKSI;
CKDFLKYILGLKSIC; KDFLKYILGLKSICL; DFLKYILGLKSICLT;
FLKYILGLKSICLTN; LKYILGLKSICLTNL; KYILGLKSICLTNLA;
YILGLKSICLTNLAC; ILGLKSICLTNLACR; LGLKSICLTNLACRV;
GLKSICLTNLACRVL; LKSICLTNLACRVLG; KSICLTNLACRVLGT;
SICLTNLACRVLGTG; ICLTNLACRVLGTGY; CLTNLACRVLGTGYS;
LTNLACRVLGTGYSF; TNLACRVLGTGYSFI; NLACRVLGTGYSFIV;
LACRVLGTGYSFIVT; ACRVLGTGYSFIVTK; CRVLGTGYSFIVTKP;
RVLGTGYSFIVTKPG; VLGTGYSFIVTKPGG; LGTGYSFIVTKPGGN;
GTGYSFIVTKPGGNI; TGYSFIVTKPGGNIW; GYSFIVTKPGGNIWV;
YSFIVTKPGGNIWVL; SFIVTKPGGNIWVLL; FIVTKPGGNIWVLLF;
IVTKPGGNIWVLLFK; VTKPGGNIWVLLFKC; TKPGGNIWVLLFKCF;
KPGGNIWVLLFKCFF; PGGNIWVLLFKCFFS; GGNIWVLLFKCFFSK;
GNIWVLLFKCFFSKF; NIWVLLFKCFFSKFT; IWVLLFKCFFSKFTL;
WVLLFKCFFSKFTLT; VLLFKCFFSKFTLTL; LLFKCFFSKFTLTLP;
LFKCFFSKFTLTLPS; FKCFFSKFTLTLPSK; SLKLSKLFIPCPEGK;
LKLSKLFIPCPEGKS; KLSKLFIPCPEGKSF; LSKLFIPCPEGKSFD;
SKLFIPCPEGKSFDS; KLFIPCPEGKSFDSA; LFIPCPEGKSFDSAP;
FIPCPEGKSFDSAPV; IPCPEGKSFDSAPVP; PCPEGKSFDSAPVPF;
CPEGKSFDSAPVPFT; PEGKSFDSAPVPFTS; EGKSFDSAPVPFTSS;
GKSFDSAPVPFTSSK; KSFDSAPVPFTSSKT; SFDSAPVPFTSSKTT;
FDSAPVPFTSSKTTM; DSAPVPFTSSKTTMY; SIATPSSKVSLSMGR;
IATPSSKVSLSMGRF; ATPSSKVSLSMGRFT; TPSSKVSLSMGRFTF;
PSSKVSLSMGRFTFK; SSKVSLSMGRFTFKA; SKVSLSMGRFTFKAL;
KVSLSMGRFTFKALP; VSLSMGRFTFKALPP; SLSMGRFTFKALPPH;
LSMGRFTFKALPPHK; SMGRFTFKALPPHKS; MGRFTFKALPPHKSN;
GRFTFKALPPHKSNN; RFTFKALPPHKSNNP; FTFKALPPHKSNNPA;
TFKALPPHKSNNPAA; FKALPPHKSNNPAAS; KALPPHKSNNPAASV;
ALPPHKSNNPAASVV; LPPHKSNNPAASVVF; PPHKSNNPAASVVFP;
PHKSNNPAASVVFPL; HKSNNPAASVVFPLS; KSNNPAASVVFPLSM;
SNNPAASVVFPLSMG; NNPAASVVFPLSMGP; NPAASVVFPLSMGPL;
PAASVVFPLSMGPLN; AASVVFPLSMGPLNN; ASVVFPLSMGPLNNQ;
SVVFPLSMGPLNNQY; VVFPLSMGPLNNQYL; VFPLSMGPLNNQYLL;
FPLSMGPLNNQYLLL; PLSMGPLNNQYLLLG; LSMGPLNNQYLLLGT;
SMGPLNNQYLLLGTL; MGPLNNQYLLLGTLK; GPLNNQYLLLGTLKT;
PLNNQYLLLGTLKTI; LNNQYLLLGTLKTIQ; NNQYLLLGTLKTIQC;
NQYLLLGTLKTIQCK; QYLLLGTLKTIQCKK; YLLLGTLKTIQCKKS;
LLLGTLKTIQCKKSN; LLGTLKTIQCKKSNI; LGTLKTIQCKKSNIT;
GTLKTIQCKKSNITE; TLKTIQCKKSNITES; LKTIQCKKSNITESI;
KTIQCKKSNITESIL; TIQCKKSNITESILG; IQCKKSNITESILGS;
QCKKSNITESILGSK; CKKSNITESILGSKQ; KKSNITESILGSKQC;
KSNITESILGSKQCS; SNITESILGSKQCSQ; NITESILGSKQCSQA;
ITESILGSKQCSQAT; TESILGSKQCSQATP; ESILGSKQCSQATPA;
SILGSKQCSQATPAI; ILGSKQCSQATPAIY; LGSKQCSQATPAIYC;
GSKQCSQATPAIYCS; SKQCSQATPAIYCSS; KQCSQATPAIYCSST;
QCSQATPAIYCSSTA; CSQATPAIYCSSTAF; SQATPAIYCSSTAFP;
RVSTLFLAKTVSTAC; FLLSAKIIAFAKCFS; NSKYIPNNKNTSSHF;
SKYIPNNKNTSSHFV; KYIPNNKNTSSHFVS; YIPNNKNTSSHFVST;
IPNNKNTSSHFVSTA; PNNKNTSSHFVSTAY; NNKNTSSHFVSTAYS;
NKNTSSHFVSTAYSV; KNTSSHFVSTAYSVI; NTSSHFVSTAYSVIN;
TSSHFVSTAYSVINF; SSHFVSTAYSVINFQ; SHFVSTAYSVINFQD;
HFVSTAYSVINFQDT; FVSTAYSVINFQDTC; VSTAYSVINFQDTCF;
STAYSVINFQDTCFV; TAYSVINFQDTCFVS; AYSVINFQDTCFVSS;
YSVINFQDTCFVSSG; SVINFQDTCFVSSGS; VINFQDTCFVSSGSS;
INFQDTCFVSSGSSG; NFQDTCFVSSGSSGL; FQDTCFVSSGSSGLK;
QDTCFVSSGSSGLKS; DTCFVSSGSSGLKSC; TCFVSSGSSGLKSCS;
CFVSSGSSGLKSCSF; FVSSGSSGLKSCSFK; VSSGSSGLKSCSFKP;
SSGSSGLKSCSFKPP; MLSSIVWYGSLVKAL; LSSIVWYGSLVKALY;
SSIVWYGSLVKALYS; SIVWYGSLVKALYSK; IVWYGSLVKALYSKY;
VWYGSLVKALYSKYS; WYGSLVKALYSKYSL; YGSLVKALYSKYSLL;
GSLVKALYSKYSLLT; SLVKALYSKYSLLTP; LVKALYSKYSLLTPL;
VKALYSKYSLLTPLQ; KALYSKYSLLTPLQI; ALYSKYSLLTPLQIK;
LYSKYSLLTPLQIKK; YSKYSLLTPLQIKKL; SKYSLLTPLQIKKLK;
KYSLLTPLQIKKLKV; YSLLTPLQIKKLKVH; SLLTPLQIKKLKVHS;
LLTPLQIKKLKVHSF; QKLLIAETLCLCGVK; KLLIAETLCLCGVKK;
LLIAETLCLCGVKKN; LIAETLCLCGVKKNI; IAETLCLCGVKKNII;
AETLCLCGVKKNIIL; ETLCLCGVKKNIILC; TLCLCGVKKNIILCP;
LCLCGVKKNIILCPA; CLCGVKKNIILCPAH; LCGVKKNIILCPAHM;
CGVKKNIILCPAHMC; GVKKNIILCPAHMCL; VKKNIILCPAHMCLL;
KKNIILCPAHMCLLI; KNIILCPAHMCLLIK; NIILCPAHMCLLIKV;
IILCPAHMCLLIKVT; ILCPAHMCLLIKVTE; LCPAHMCLLIKVTEY;
CPAHMCLLIKVTEYF; PAHMCLLIKVTEYFS; AHMCLLIKVTEYFSI;
HMCLLIKVTEYFSIS; MCLLIKVTEYFSISF; CLLIKVTEYFSISFL;
LLIKVTEYFSISFLY; LIKVTEYFSISFLYR; IKVTEYFSISFLYRI;
AFSLVVYTAKQARVL; FSLVVYTAKQARVLL; SLVVYTAKQARVLLL;
LVVYTAKQARVLLLN; VVYTAKQARVLLLNT; VYTAKQARVLLLNTA;
LRNWCRSEGKSLGSS; RNWCRSEGKSLGSST; NWCRSEGKSLGSSTF;
WCRSEGKSLGSSTFL; CRSEGKSLGSSTFLF; RSEGKSLGSSTFLFF;
SEGKSLGSSTFLFFL; EGKSLGSSTFLFFLG; GKSLGSSTFLFFLGG;
KSLGSSTFLFFLGGV; SLGSSTFLFFLGGVE; LGSSTFLFFLGGVEC;
ESAVASSSLANISSW; SAVASSSLANISSWQ; AVASSSLANISSWQN;
VASSSLANISSWQNK; ASSSLANISSWQNKS; SSSLANISSWQNKSS;
SSLANISSWQNKSSS; SLANISSWQNKSSSH; LANISSWQNKSSSHF;
ANISSWQNKSSSHFS; NISSWQNKSSSHFSL; ISSWQNKSSSHFSLK;
SSWQNKSSSHFSLKE; SWQNKSSSHFSLKEL; WQNKSSSHFSLKELH;
QNKSSSHFSLKELHQ; NKSSSHFSLKELHQD; KSSSHFSLKELHQDS;
SSSHFSLKELHQDSH; SSHFSLKELHQDSHS; SHFSLKELHQDSHSS;
HFSLKELHQDSHSSV; FSLKELHQDSHSSVP; VGTYKKNNYLGPFNI;
GTYKKNNYLGPFNIL; TYKKNNYLGPFNILL; YKKNNYLGPFNILLF;
KKNNYLGPFNILLFI; REFLQLFGPTIAEFL; EFLQLFGPTIAEFLQ;
FLQLFGPTIAEFLQL; LQLFGPTIAEFLQLG; QLFGPTIAEFLQLGL;
LFGPTIAEFLQLGLS; FGPTIAEFLQLGLSQ; GPTIAEFLQLGLSQT;
PTIAEFLQLGLSQTT; TIAEFLQLGLSQTTV; SSQCSSNLSKPRALF;
SQCSSNLSKPRALFL; QCSSNLSKPRALFLK; CSSNLSKPRALFLKI;
SSNLSKPRALFLKIF; SNLSKPRALFLKIFY; NLSKPRALFLKIFYL;
LSKPRALFLKIFYLN; SKPRALFLKIFYLNA; KPRALFLKIFYLNAL;
PRALFLKIFYLNALI; ADIACKGSAQKAFWN; DIACKGSAQKAFWNK;
AIPCSTGYLGKEENQ; IPCSTGYLGKEENQH; PCSTGYLGKEENQHK;
CSTGYLGKEENQHKP; STGYLGKEENQHKPL; TGYLGKEENQHKPLS;
GYLGKEENQHKPLSY; YLGKEENQHKPLSYS; LGKEENQHKPLSYSR;
GKEENQHKPLSYSRF; KEENQHKPLSYSRFQ; EENQHKPLSYSRFQN;
ENQHKPLSYSRFQNQ; NQHKPLSYSRFQNQA; QHKPLSYSRFQNQAD;
HKPLSYSRFQNQADE; KPLSYSRFQNQADEL; PLSYSRFQNQADELP;
LSYSRFQNQADELPL; SYSRFQNQADELPLH; YSRFQNQADELPLHP;
SRFQNQADELPLHPA; RFQNQADELPLHPAP; FQNQADELPLHPAPF;
QNQADELPLHPAPFF; NQADELPLHPAPFFY; QADELPLHPAPFFYT;
ADELPLHPAPFFYTK; DELPLHPAPFFYTKY; ELPLHPAPFFYTKYS;
LPLHPAPFFYTKYSF; PLHPAPFFYTKYSFS; LHPAPFFYTKYSFSS;
HPAPFFYTKYSFSSF; PAPFFYTKYSFSSFY; APFFYTKYSFSSFYP;
PFFYTKYSFSSFYPR; FFYTKYSFSSFYPRR; FYTKYSFSSFYPRRP;
YTKYSFSSFYPRRPL; TKYSFSSFYPRRPLC; KYSFSSFYPRRPLCQ;
YSFSSFYPRRPLCQG; SFSSFYPRRPLCQGE; FSSFYPRRPLCQGEI;
SSFYPRRPLCQGEIP; SFYPRRPLCQGEIPY; FYPRRPLCQGEIPYT;
YPRRPLCQGEIPYTS; PRRPLCQGEIPYTSL; RRPLCQGEIPYTSLN;
RPLCQGEIPYTSLNK; PLCQGEIPYTSLNKL; LCQGEIPYTSLNKLF;
CQGEIPYTSLNKLFS; QGEIPYTSLNKLFSL; GEIPYTSLNKLFSLR;
EIPYTSLNKLFSLRE; IPYTSLNKLFSLRED; PYTSLNKLFSLREDF;
YTSLNKLFSLREDFP; TSLNKLFSLREDFPR; SLNKLFSLREDFPRQ;
LNKLFSLREDFPRQL; NKLFSLREDFPRQLF; KLFSLREDFPRQLFQ;
LFSLREDFPRQLFQG; FSLREDFPRQLFQGL; SLREDFPRQLFQGLK;
LREDFPRQLFQGLKG; REDFPRQLFQGLKGP

16 mers:

GFPQIVLLGLRKSLHT; FPQIVLLGLRKSLHTL; PQIVLLGLRKSLHTLT;
QIVLLGLRKSLHTLTT; EKGWRQRRPRPLIYYK; KGWRQRRPRPLIYYKK;
GWRQRRPRPLIYYKKK; WRQRRPRPLIYYKKKG; RQRRPRPLIYYKKKGH;
QRRPRPLIYYKKKGHR; RRPRPLIYYKKKGHRE; RPRPLIYYKKKGHREE;
PRPLIYYKKKGHREEL; RPLIYYKKKGHREELL; PLIYYKKKGHREELLT;
LIYYKKKGHREELLTH; IYYKKKGHREELLTHG; YYKKKGHREELLTHGM;
YKKKGHREELLTHGMQ; KKKGHREELLTHGMQP; KKGHREELLTHGMQPN;
KGHREELLTHGMQPNH; GHREELLTHGMQPNHD; HREELLTHGMQPNHDL;
REELLTHGMQPNHDLR; EELLTHGMQPNHDLRK; ELLTHGMQPNHDLRKE;
LLTHGMQPNHDLRKES; LTHGMQPNHDLRKESA; LTGECSQTMTSGRKVH;
TGECSQTMTSGRKVHD; GECSQTMTSGRKVHDS; ECSQTMTSGRKVHDSQ;
CSQTMTSGRKVHDSQG; SQTMTSGRKVHDSQGG; QTMTSGRKVHDSQGGA;
TMTSGRKVHDSQGGAA; MTSGRKVHDSQGGAAY; TSGRKVHDSQGGAAYP;
SGRKVHDSQGGAAYPW; GRKVHDSQGGAAYPWN; RKVHDSQGGAAYPWNA;
KVHDSQGGAAYPWNAA; VHDSQGGAAYPWNAAK; HDSQGGAAYPWNAAKP;
PQEGKCMTDMFCEPRN; QEGKCMTDMFCEPRNL; EGKCMTDMFCEPRNLG;
GKCMTDMFCEPRNLGL; KCMTDMFCEPRNLGLV; CMTDMFCEPRNLGLVP;
MTDMFCEPRNLGLVPS; TGQRPWFCASCHDKLQ; KLVKPGLEQKKELRGF;
LVKPGLEQKKELRGFL; VKPGLEQKKELRGFLF; KPGLEQKKELRGFLFL;
PGLEQKKELRGFLFLF; VIPFFLYFQVHGCCSS; IPFFLYFQVHGCCSST;
PFFLYFQVHGCCSSTF; FFLYFQVHGCCSSTFG; FLYFQVHGCCSSTFGG;
LYFQVHGCCSSTFGGP; YFQVHGCCSSTFGGPS; FQVHGCCSSTFGGPSC;
QVHGCCSSTFGGPSCQ; VHGCCSSTFGGPSCQC; HGCCSSTFGGPSCQCI;
NCCWGGCCCYRSSNCI; CCWGGCCCYRSSNCIP; CWGGCCCYRSSNCIPC;
WGGCCCYRSSNCIPCY; GGCCCYRSSNCIPCYC; GCCCYRSSNCIPCYCR;
CCCYRSSNCIPCYCRG; CCYRSSNCIPCYCRGH; CYRSSNCIPCYCRGHN;
YRSSNCIPCYCRGHNK; RSSNCIPCYCRGHNKY; SSNCIPCYCRGHNKYL;
SNCIPCYCRGHNKYLR; NCIPCYCRGHNKYLRG; CIPCYCRGHNKYLRGY;
IPCYCRGHNKYLRGYS; PCYCRGHNKYLRGYSC; CYCRGHNKYLRGYSCY;
YCRGHNKYLRGYSCYR; CRGHNKYLRGYSCYRP; RGHNKYLRGYSCYRPN;
GHNKYLRGYSCYRPNS; HNKYLRGYSCYRPNSS; NKYLRGYSCYRPNSSN;
KYLRGYSCYRPNSSNI; YLRGYSCYRPNSSNIC; LRGYSCYRPNSSNICC;
RGYSCYRPNSSNICCN; GYSCYRPNSSNICCNC; YSCYRPNSSNICCNCW;
SCYRPNSSNICCNCWC; CYRPNSSNICCNCWCS; YRPNSSNICCNCWCSW;
RPNSSNICCNCWCSWG; PNSSNICCNCWCSWGY; NSSNICCNCWCSWGYC;
SSNICCNCWCSWGYCW; SNICCNCWCSWGYCWV; NICCNCWCSWGYCWVC;
ICCNCWCSWGYCWVCC; CCNCWCSWGYCWVCCF; CNCWCSWGYCWVCCFN;
NCWCSWGYCWVCCFNS; CWCSWGYCWVCCFNSN; WCSWGYCWVCCFNSNC;
LGSQSFHCRPLSAIRH; GSQSFHCRPLSAIRHG; SQSFHCRPLSAIRHGF;
QSFHCRPLSAIRHGFG; SFHCRPLSAIRHGFGI; FHCRPLSAIRHGFGIV;
ALGSFFVCYYFPGFVA; LGSFFVCYYFPGFVAC; GSFFVCYYFPGFVACY;
YTFYNLTGIAEKNRKI; TFYNLTGIAEKNRKIF; IFGGNYLDNCKCPYKL;
FGGNYLDNCKCPYKLL; QYRRSYTKNGLKKSTK; YRRSYTKNGLKKSTKC;
RRSYTKNGLKKSTKCT; RSYTKNGLKKSTKCTF; SYTKNGLKKSTKCTFR;
YTKNGLKKSTKCTFRR; TKNGLKKSTKCTFRRV; KNGLKKSTKCTFRRVY;
NGLKKSTKCTFRRVYR; GLKKSTKCTFRRVYRK; LKKSTKCTFRRVYRKN;
KKSTKCTFRRVYRKNY; KSTKCTFRRVYRKNYC; STKCTFRRVYRKNYCP;
TKCTFRRVYRKNYCPR; KCTFRRVYRKNYCPRR; CTFRRVYRKNYCPRRC;
SKNCSSMDVAFTSRPV; KNCSSMDVAFTSRPVR; NCSSMDVAFTSRPVRD;
CSSMDVAFTSRPVRDC; SSMDVAFTSRPVRDCN; SMDVAFTSRPVRDCNT;
MDVAFTSRPVRDCNTC; DVAFTSRPVRDCNTCS; RWPQPKEKESVQGQLP;
WPQPKEKESVQGQLPK; PQPKEKESVQGQLPKS; QPKEKESVQGQLPKSQ;
PKEKESVQGQLPKSQR; KEKESVQGQLPKSQRN; EKESVQGQLPKSQRNP;
KESVQGQLPKSQRNPC; ESVQGQLPKSQRNPCK; SVQGQLPKSQRNPCKC;
VQGQLPKSQRNPCKCQ; QGQLPKSQRNPCKCQN; GQLPKSQRNPCKCQNY;
VLKMTLAVIAQREKCF; LKMTLAVIAQREKCFP; KMTLAVIAQREKCFPV;
MTLAVIAQREKCFPVT; TLAVIAQREKCFPVTA; LAVIAQREKCFPVTAQ;
AVIAQREKCFPVTAQQ; VIAQREKCFPVTAQQE; IAQREKCFPVTAQQEF;
AQREKCFPVTAQQEFP; QREKCFPVTAQQEFPS; REKCFPVTAQQEFPSP;
EKCFPVTAQQEFPSPI; LACLTFMQGHKKCMSM; ACLTFMQGHKKCMSMV;
CLTFMQGHKKCMSMVE; LTFMQGHKKCMSMVEE; TFMQGHKKCMSMVEEN;
FMQGHKKCMSMVEENL; MQGHKKCMSMVEENLF; QGHKKCMSMVEENLFK;
GHKKCMSMVEENLFKA; HKKCMSMVEENLFKAV; KKCMSMVEENLFKAVI;
KCMSMVEENLFKAVIS; CMSMVEENLFKAVIST; MSMVEENLFKAVISTS;
SMVEENLFKAVISTSL; MVEENLFKAVISTSLL; ILTIRPIWTKTMLIQL;
LTIRPIWTKTMLIQLS; TIRPIWTKTMLIQLSA; IRPIWTKTMLIQLSAG;
RPIWTKTMLIQLSAGY; PIWTKTMLIQLSAGYL; IWTKTMLIQLSAGYLI;
WTKTMLIQLSAGYLIP; TKTMLIQLSAGYLIPV; KTMLIQLSAGYLIPVE;
TMLIQLSAGYLIPVEM; MLIQLSAGYLIPVEMK; LIQLSAGYLIPVEMKM;
IQLSAGYLIPVEMKML; QLSAGYLIPVEMKMLG; LSAGYLIPVEMKMLGI;
SAGYLIPVEMKMLGIL; AGYLIPVEMKMLGILG; GYLIPVEMKMLGILGL;
YLIPVEMKMLGILGLS; LIPVEMKMLGILGLSQ; IPVEMKMLGILGLSQE;
PVEMKMLGILGLSQEG; VEMKMLGILGLSQEGK; EMKMLGILGLSQEGKM;
MKMLGILGLSQEGKMF; KMLGILGLSQEGKMFP; MLGILGLSQEGKMFPQ;
LGILGLSQEGKMFPQY; GILGLSQEGKMFPQYF; ILGLSQEGKMFPQYFM;
MNRVWGLFVKLIACMF; NRVWGLFVKLIACMFQ; RVWGLFVKLIACMFQL;
VWGLFVKLIACMFQLL; WGLFVKLIACMFQLLI; GLFVKLIACMFQLLIF;
LFVKLIACMFQLLIFV; FVKLIACMFQLLIFVA; VKLIACMFQLLIFVAC;
KLIACMFQLLIFVACL; LIACMFQLLIFVACLL; IACMFQLLIFVACLLT;
ACMFQLLIFVACLLTA; CMFQLLIFVACLLTAL; MFQLLIFVACLLTALE;
FQLLIFVACLLTALEH; QLLIFVACLLTALEHN; LLIFVACLLTALEHNS;
LIFVACLLTALEHNSG; IFVACLLTALEHNSGE; FVACLLTALEHNSGEA;
VACLLTALEHNSGEAL; ACLLTALEHNSGEALQ; CLLTALEHNSGEALQD;
LLTALEHNSGEALQDI; LTALEHNSGEALQDIL; TALEHNSGEALQDILR;
ALEHNSGEALQDILRS; LEHNSGEALQDILRSA; TGEPREWMGSLCMVWN;
GEPREWMGSLCMVWNP; EPREWMGSLCMVWNPR; KRLGCLMAQKDFQGTQ;
RLGCLMAQKDFQGTQI; DILTNRDNCKPKCFKQ; ILTNRDNCKPKCFKQV;
LTNRDNCKPKCFKQVL; TNRDNCKPKCFKQVLL; NRDNCKPKCFKQVLLL;
RDNCKPKCFKQVLLLY; DNCKPKCFKQVLLLYI; NCKPKCFKQVLLLYIY;
CKPKCFKQVLLLYIYI; MLLLYKPLLSLCYFGG; LLLYKPLLSLCYFGGG;
LLYKPLLSLCYFGGGV; LYKPLLSLCYFGGGVL; YKPLLSLCYFGGGVLG;
KPLLSLCYFGGGVLGL; PLLSLCYFGGGVLGLL; LLSLCYFGGGVLGLLK;
LSLCYFGGGVLGLLKH; LWGSDLWESSAGAEVS; WGSDLWESSAGAEVSE;
GSDLWESSAGAEVSET; SDLWESSAGAEVSETW; DLWESSAGAEVSETWE;
LWESSAGAEVSETWEE; WESSAGAEVSETWEEH; ESSAGAEVSETWEEHC;
SSAGAEVSETWEEHCD; SAGAEVSETWEEHCDW; AGAEVSETWEEHCDWD;
GAEVSETWEEHCDWDS; AEVSETWEEHCDWDSV; EVSETWEEHCDWDSVL;
VSETWEEHCDWDSVLD; SETWEEHCDWDSVLDP; ETWEEHCDWDSVLDPC;
TWEEHCDWDSVLDPCP; WEEHCDWDSVLDPCPE; EEHCDWDSVLDPCPES;
EHCDWDSVLDPCPESS; HCDWDSVLDPCPESSV; CDWDSVLDPCPESSVS;
DWDSVLDPCPESSVSE; WDSVLDPCPESSVSES; DSVLDPCPESSVSESS;
SVLDPCPESSVSESSS; VLDPCPESSVSESSSL; LDPCPESSVSESSSLV;
DPCPESSVSESSSLVI; PCPESSVSESSSLVIS; CPESSVSESSSLVISR;
PESSVSESSSLVISRI; ESSVSESSSLVISRIH; SSVSESSSLVISRIHF;
SVSESSSLVISRIHFP; VSESSSLVISRIHFPM; SESSSLVISRIHFPMH;
ESSSLVISRIHFPMHI; SSSLVISRIHFPMHIL; SSLVISRIHFPMHILY;
SLVISRIHFPMHILYF; LVISRIHFPMHILYFI; VISRIHFPMHILYFIL;
ISRIHFPMHILYFILE; SRIHFPMHILYFILEK; RIHFPMHILYFILEKV;
IHFPMHILYFILEKVY; HFPMHILYFILEKVYI; FPMHILYFILEKVYIL;
PMHILYFILEKVYILI; MHILYFILEKVYILIS; HILYFILEKVYILISE;
ILYFILEKVYILISES; LYFILEKVYILISESS; YFILEKVYILISESSL;
FILEKVYILISESSLS; ILEKVYILISESSLSF; LEKVYILISESSLSFH;
EKVYILISESSLSFHS; KVYILISESSLSFHST; VYILISESSLSFHSTI;
YILISESSLSFHSTIL; ILISESSLSFHSTILD; LISESSLSFHSTILDC;
ISESSLSFHSTILDCI; SESSLSFHSTILDCIS; ESSLSFHSTILDCISV;
SSLSFHSTILDCISVA; SLSFHSTILDCISVAK; LSFHSTILDCISVAKS;
SFHSTILDCISVAKSA; FHSTILDCISVAKSAT; HSTILDCISVAKSATG;
STILDCISVAKSATGL; TILDCISVAKSATGLN; ILDCISVAKSATGLNQ;
LDCISVAKSATGLNQI; DCISVAKSATGLNQIS; CISVAKSATGLNQISS;
ISVAKSATGLNQISSS; SVAKSATGLNQISSSN; VAKSATGLNQISSSNK;
AKSATGLNQISSSNKV; KSATGLNQISSSNKVI; SATGLNQISSSNKVIP;
ATGLNQISSSNKVIPL; TGLNQISSSNKVIPLC; GLNQISSSNKVIPLCK;
LNQISSSNKVIPLCKI; NQISSSNKVIPLCKIL; QISSSNKVIPLCKILF;
ISSSNKVIPLCKILFS; SSSNKVIPLCKILFSS; SSNKVIPLCKILFSSK;
SNKVIPLCKILFSSKN; NKVIPLCKILFSSKNS; KVIPLCKILFSSKNSE;
VIPLCKILFSSKNSEF; IPLCKILFSSKNSEFC; PLCKILFSSKNSEFCK;
LCKILFSSKNSEFCKD; CKILFSSKNSEFCKDF; KILFSSKNSEFCKDFL;
ILFSSKNSEFCKDFLK; LFSSKNSEFCKDFLKY; FSSKNSEFCKDFLKYI;
SSKNSEFCKDFLKYIL; SKNSEFCKDFLKYILG; KNSEFCKDFLKYILGL;
NSEFCKDFLKYILGLK; SEFCKDFLKYILGLKS; EFCKDFLKYILGLKSI;
FCKDFLKYILGLKSIC; CKDFLKYILGLKSICL; KDFLKYILGLKSICLT;
DFLKYILGLKSICLTN; FLKYILGLKSICLTNL; LKYILGLKSICLTNLA;
KYILGLKSICLTNLAC; YILGLKSICLTNLACR; ILGLKSICLTNLACRV;
LGLKSICLTNLACRVL; GLKSICLTNLACRVLG; LKSICLTNLACRVLGT;
KSICLTNLACRVLGTG; SICLTNLACRVLGTGY; ICLTNLACRVLGTGYS;
CLTNLACRVLGTGYSF; LTNLACRVLGTGYSFI; TNLACRVLGTGYSFIV;
NLACRVLGTGYSFIVT; LACRVLGTGYSFIVTK; ACRVLGTGYSFIVTKP;
CRVLGTGYSFIVTKPG; RVLGTGYSFIVTKPGG; VLGTGYSFIVTKPGGN;
LGTGYSFIVTKPGGNI; GTGYSFIVTKPGGNIW; TGYSFIVTKPGGNIWV;
GYSFIVTKPGGNIWVL; YSFIVTKPGGNIWVLL; SFIVTKPGGNIWVLLF;
FIVTKPGGNIWVLLFK; IVTKPGGNIWVLLFKC; VTKPGGNIWVLLFKCF;
TKPGGNIWVLLFKCFF; KPGGNIWVLLFKCFFS; PGGNIWVLLFKCFFSK;
GGNIWVLLFKCFFSKF; GNIWVLLFKCFFSKFT; NIWVLLFKCFFSKFTL;
IWVLLFKCFFSKFTLT; WVLLFKCFFSKFTLTL; VLLFKCFFSKFTLTLP;
LLFKCFFSKFTLTLPS; LFKCFFSKFTLTLPSK; SLKLSKLFIPCPEGKS;
LKLSKLFIPCPEGKSF; KLSKLFIPCPEGKSFD; LSKLFIPCPEGKSFDS;
SKLFIPCPEGKSFDSA; KLFIPCPEGKSFDSAP; LFIPCPEGKSFDSAPV;
FIPCPEGKSFDSAPVP; IPCPEGKSFDSAPVPF; PCPEGKSFDSAPVPFT;
CPEGKSFDSAPVPFTS; PEGKSFDSAPVPFTSS; EGKSFDSAPVPFTSSK;
GKSFDSAPVPFTSSKT; KSFDSAPVPFTSSKTT; SFDSAPVPFTSSKTTM;
FDSAPVPFTSSKTTMY; SIATPSSKVSLSMGRF; IATPSSKVSLSMGRFT;
ATPSSKVSLSMGRFTF; TPSSKVSLSMGRFTFK; PSSKVSLSMGRFTFKA;
SSKVSLSMGRFTFKAL; SKVSLSMGRFTFKALP; KVSLSMGRFTFKALPP;
VSLSMGRFTFKALPPH; SLSMGRFTFKALPPHK; LSMGRFTFKALPPHKS;
SMGRFTFKALPPHKSN; MGRFTFKALPPHKSNN; GRFTFKALPPHKSNNP;
RFTFKALPPHKSNNPA; FTFKALPPHKSNNPAA; TFKALPPHKSNNPAAS;
FKALPPHKSNNPAASV; KALPPHKSNNPAASVV; ALPPHKSNNPAASVVF;
LPPHKSNNPAASVVFP; PPHKSNNPAASVVFPL; PHKSNNPAASVVFPLS;
HKSNNPAASVVFPLSM; KSNNPAASVVFPLSMG; SNNPAASVVFPLSMGP;
NNPAASVVFPLSMGPL; NPAASVVFPLSMGPLN; PAASVVFPLSMGPLNN;
AASVVFPLSMGPLNNQ; ASVVFPLSMGPLNNQY; SVVFPLSMGPLNNQYL;
VVFPLSMGPLNNQYLL; VFPLSMGPLNNQYLLL; FPLSMGPLNNQYLLLG;
PLSMGPLNNQYLLLGT; LSMGPLNNQYLLLGTL; SMGPLNNQYLLLGTLK;
MGPLNNQYLLLGTLKT; GPLNNQYLLLGTLKTI; PLNNQYLLLGTLKTIQ;
LNNQYLLLGTLKTIQC; NNQYLLLGTLKTIQCK; NQYLLLGTLKTIQCKK;
QYLLLGTLKTIQCKKS; YLLLGTLKTIQCKKSN; LLLGTLKTIQCKKSNI;
LLGTLKTIQCKKSNIT; LGTLKTIQCKKSNITE; GTLKTIQCKKSNITES;
TLKTIQCKKSNITESI; LKTIQCKKSNITESIL; KTIQCKKSNITESILG;
TIQCKKSNITESILGS; IQCKKSNITESILGSK; QCKKSNITESILGSKQ;
CKKSNITESILGSKQC; KKSNITESILGSKQCS; KSNITESILGSKQCSQ;
SNITESILGSKQCSQA; NITESILGSKQCSQAT; ITESILGSKQCSQATP;
TESILGSKQCSQATPA; ESILGSKQCSQATPAI; SILGSKQCSQATPAIY;
ILGSKQCSQATPAIYC; LGSKQCSQATPAIYCS; GSKQCSQATPAIYCSS;
SKQCSQATPAIYCSST; KQCSQATPAIYCSSTA; QCSQATPAIYCSSTAF;
CSQATPAIYCSSTAFP; NSKYIPNNKNTSSHFV; SKYIPNNKNTSSHFVS;
KYIPNNKNTSSHFVST; YIPNNKNTSSHFVSTA; IPNNKNTSSHFVSTAY;
PNNKNTSSHFVSTAYS; NNKNTSSHFVSTAYSV; NKNTSSHFVSTAYSVI;
KNTSSHFVSTAYSVIN; NTSSHFVSTAYSVINF; TSSHFVSTAYSVINFQ;
SSHFVSTAYSVINFQD; SHFVSTAYSVINFQDT; HFVSTAYSVINFQDTC;
FVSTAYSVINFQDTCF; VSTAYSVINFQDTCFV; STAYSVINFQDTCFVS;
TAYSVINFQDTCFVSS; AYSVINFQDTCFVSSG; YSVINFQDTCFVSSGS;
SVINFQDTCFVSSGSS; VINFQDTCFVSSGSSG; INFQDTCFVSSGSSGL;
NFQDTCFVSSGSSGLK; FQDTCFVSSGSSGLKS; QDTCFVSSGSSGLKSC;
DTCFVSSGSSGLKSCS; TCFVSSGSSGLKSCSF; CFVSSGSSGLKSCSFK;
FVSSGSSGLKSCSFKP; VSSGSSGLKSCSFKPP; MLSSIVWYGSLVKALY;
LSSIVWYGSLVKALYS; SSIVWYGSLVKALYSK; SIVWYGSLVKALYSKY;
IVWYGSLVKALYSKYS; VWYGSLVKALYSKYSL; WYGSLVKALYSKYSLL;
YGSLVKALYSKYSLLT; GSLVKALYSKYSLLTP; SLVKALYSKYSLLTPL;
LVKALYSKYSLLTPLQ; VKALYSKYSLLTPLQI; KALYSKYSLLTPLQIK;
ALYSKYSLLTPLQIKK; LYSKYSLLTPLQIKKL; YSKYSLLTPLQIKKLK;
SKYSLLTPLQIKKLKV; KYSLLTPLQIKKLKVH; YSLLTPLQIKKLKVHS;
SLLTPLQIKKLKVHSF; QKLLIAETLCLCGVKK; KLLIAETLCLCGVKKN;
LLIAETLCLCGVKKNI; LIAETLCLCGVKKNII; IAETLCLCGVKKNIIL;
AETLCLCGVKKNIILC; ETLCLCGVKKNIILCP; TLCLCGVKKNIILCPA;
LCLCGVKKNIILCPAH; CLCGVKKNIILCPAHM; LCGVKKNIILCPAHMC;
CGVKKNIILCPAHMCL; GVKKNIILCPAHMCLL; VKKNIILCPAHMCLLI;
KKNIILCPAHMCLLIK; KNIILCPAHMCLLIKV; NIILCPAHMCLLIKVT;
IILCPAHMCLLIKVTE; ILCPAHMCLLIKVTEY; LCPAHMCLLIKVTEYF;
CPAHMCLLIKVTEYFS; PAHMCLLIKVTEYFSI; AHMCLLIKVTEYFSIS;
HMCLLIKVTEYFSISF; MCLLIKVTEYFSISFL; CLLIKVTEYFSISFLY;
LLIKVTEYFSISFLYR; LIKVTEYFSISFLYRI; AFSLVVYTAKQARVLL;
FSLVVYTAKQARVLLL; SLVVYTAKQARVLLLN; LVVYTAKQARVLLLNT;
VVYTAKQARVLLLNTA; LRNWCRSEGKSLGSST; RNWCRSEGKSLGSSTF;
NWCRSEGKSLGSSTFL; WCRSEGKSLGSSTFLF; CRSEGKSLGSSTFLFF;
RSEGKSLGSSTFLFFL; SEGKSLGSSTFLFFLG; EGKSLGSSTFLFFLGG;
GKSLGSSTFLFFLGGV; KSLGSSTFLFFLGGVE; SLGSSTFLFFLGGVEC;
ESAVASSSLANISSWQ; SAVASSSLANISSWQN; AVASSSLANISSWQNK;
VASSSLANISSWQNKS; ASSSLANISSWQNKSS; SSSLANISSWQNKSSS;
SSLANISSWQNKSSSH; SLANISSWQNKSSSHF; LANISSWQNKSSSHFS;
ANISSWQNKSSSHFSL; NISSWQNKSSSHFSLK; ISSWQNKSSSHFSLKE;
SSWQNKSSSHFSLKEL; SWQNKSSSHFSLKELH; WQNKSSSHFSLKELHQ;
QNKSSSHFSLKELHQD; NKSSSHFSLKELHQDS; KSSSHFSLKELHQDSH;
SSSHFSLKELHQDSHS; SSHFSLKELHQDSHSS; SHFSLKELHQDSHSSV;
HFSLKELHQDSHSSVP; VGTYKKNNYLGPFNIL; GTYKKNNYLGPFNILL;
TYKKNNYLGPFNILLF; YKKNNYLGPFNILLFI; RFFLQLFGPTIAEFLQ;
EFLQLFGPTIAEFLQL; FLQLFGPTIAEFLQLG; LQLFGPTIAEFLQLGL;
QLFGPTIAEFLQLGLS; LFGPTIAEFLQLGLSQ; FGPTIAEFLQLGLSQT;
GPTIAEFLQLGLSQTT; PTIAEFLQLGLSQTTV; SSQCSSNLSKPRALFL;
SQCSSNLSKPRALFLK; QCSSNLSKPRALFLKI; CSSNLSKPRALFLKIF;
SSNLSKPRALFLKIFY; SNLSKPRALFLKIFYL; NLSKPRALFLKIFYLN;
LSKPRALFLKIFYLNA; SKPRALFLKIFYLNAL; KPRALFLKIFYLNALI;
ADIACKGSAQKAFWNK; AIPCSTGYLGKEENQH; IPCSTGYLGKEENQHK;
PCSTGYLGKEENQHKP; CSTGYLGKEENQHKPL; STGYLGKEENQHKPLS;
TGYLGKEENQHKPLSY; GYLGKEENQHKPLSYS; YLGKEENQHKPLSYSR;
LGKEENQHKPLSYSRF; GKEENQHKPLSYSRFQ; KEENQHKPLSYSRFQN;
EENQHKPLSYSRFQNQ; ENQHKPLSYSRFQNQA; NQHKPLSYSRFQNQAD;
QHKPLSYSRFQNQADE; HKPLSYSRFQNQADEL; KPLSYSRFQNQADELP;
PLSYSRFQNQADELPL; LSYSRFQNQADELPLH; SYSRFQNQADELPLHP;
YSRFQNQADELPLHPA; SRFQNQADELPLHPAP; RFQNQADELPLHPAPF;
FQNQADELPLHPAPFF; QNQADELPLHPAPFFY; NQADELPLHPAPFFYT;
QADELPLHPAPFFYTK; ADELPLHPAPFFYTKY; DELPLHPAPFFYTKYS;
ELPLHPAPFFYTKYSF; LPLHPAPFFYTKYSFS; PLHPAPFFYTKYSFSS;
LHPAPFFYTKYSFSSF; HPAPFFYTKYSFSSFY; PAPFFYTKYSFSSFYP;
APFFYTKYSFSSFYPR; PFFYTKYSFSSFYPRR; FFYTKYSFSSFYPRRP;
FYTKYSFSSFYPRRPL; YTKYSFSSFYPRRPLC; TKYSFSSFYPRRPLCQ;
KYSFSSFYPRRPLCQG; YSFSSFYPRRPLCQGE; SFSSFYPRRPLCQGEI;
FSSFYPRRPLCQGEIP; SSFYPRRPLCQGEIPY; SFYPRRPLCQGEIPYT;
FYPRRPLCQGEIPYTS; YPRRPLCQGEIPYTSL; PRRPLCQGEIPYTSLN;
RRPLCQGEIPYTSLNK; RPLCQGEIPYTSLNKL; PLCQGEIPYTSLNKLF;
LCQGEIPYTSLNKLFS; CQGEIPYTSLNKLFSL; QGEIPYTSLNKLFSLR;
GEIPYTSLNKLFSLRE; EIPYTSLNKLFSLRED; IPYTSLNKLFSLREDF;
PYTSLNKLFSLREDFP; YTSLNKLFSLREDFPR; TSLNKLFSLREDFPRQ;
SLNKLFSLREDFPRQL; LNKLFSLREDFPRQLF; NKLFSLREDFPRQLFQ;
KLFSLREDFPRQLFQG; LFSLREDFPRQLFQGL; FSLREDFPRQLFQGLK;
SLREDFPRQLFQGLKG; LREDFPRQLFQGLKGP

BK virus, reading frame 3
13 mers:

ASEKASTPLLLER; SEKASTPLLLERK; EKASTPLLLERKG; KASTPLLLERKGG;
ASTPLLLERKGGG; STPLLLERKGGGR; TPLLLERKGGGRG; PLLLERKGGGRGG;
LLLERKGGGRGGL; LLERKGGGRGGLG; LERKGGGRGGLGL; ERKGGGRGGLGLL;
RKGGGRGGLGLLY; KGGGRGGLGLLYI; GGGRGGLGLLYII; GGRGGLGLLYIIK;
GRGGLGLLYIIKK; RGGLGLLYIIKKK; GGLGLLYIIKKKA; GLGLLYIIKKKAT;
LGLLYIIKKKATG; GLLYIIKKKATGR; LLYIIKKKATGRS; LYIIKKKATGRSC;
YIIKKKATGRSCL; IIKKKATGRSCLP; IKKKATGRSCLPM; KKKATGRSCLPME;
KKATGRSCLPMEC; KATGRSCLPMECS; ATGRSCLPMECSQ; TGRSCLPMECSQT;
GRSCLPMECSQTM; RSCLPMECSQTMT; SCLPMECSQTMTS; CLPMECSQTMTSG;
LPMECSQTMTSGR; PMECSQTMTSGRK; MECSQTMTSGRKV; ECSQTMTSGRKVH;
CSQTMTSGRKVHD; SQTMTSGRKVHDS; QTMTSGRKVHDSQ;
TMTSGRKVHDSQG; MTSGRKVHDSQGN; TSGRKVHDSQGNA;
SGRKVHDSQGNAA; GRKVHDSQGNAAK; RKVHDSQGNAAKP;
PQEGKCMTHREEL; QEGKCMTHREELL; EGKCMTHREELLT; GKCMTHREELLTH;
KCMTHREELLTHG; CMTHREELLTHGM; MTHREELLTHGMQ; THREELLTHGMQP;
HREELLTHGMQPN; REELLTHGMQPNH; EELLTHGMQPNHD; ELLTHGMQPNHDL;
LLTHGMQPNHDLR; LTHGMQPNHDLRK; THGMQPNHDLRKE;
HGMQPNHDLRKES; GMQPNHDLRKESA; QTCFASLGILALS; TCFASLGILALSP;
CFASLGILALSPV; FASLGILALSPVK; ASLGILALSPVKL; SLGILALSPVKLD;
LGILALSPVKLDK; GILALSPVKLDKG; ILALSPVKLDKGH; LALSPVKLDKGHG;
ALSPVKLDKGHGS; LSPVKLDKGHGSA; SPVKLDKGHGSAP; PVKLDKGHGSAPA;
VKLDKGHGSAPAV; KLDKGHGSAPAVT; LDKGHGSAPAVTT; DKGHGSAPAVTTS;
KGHGSAPAVTTSF; GHGSAPAVTTSFS; HGSAPAVTTSFSE; GSAPAVTTSFSES;
SAPAVTTSFSESW; NLDWNKKKSSEDF; LDWNKKKSSEDFY; DWNKKKSSEDFYF;
WNKKKSSEDFYFY; NKKKSSEDFYFYF; KKKSSEDFYFYFR; KKSSEDFYFYFRA;
KSSEDFYFYFRAF; SSEDFYFYFRAFA; SEDFYFYFRAFAG; EDFYFYFRAFAGI;
DFYFYFRAFAGIL; RQCRREKQKYHCF; QCRREKQKYHCFT; CRREKQKYHCFTC;
RREKQKYHCFTCC; REKQKYHCFTCCK; EKQKYHCFTCCKR; KQKYHCFTCCKRL;
QKYHCFTCCKRLC; KYHCFTCCKRLCK; YHCFTCCKRLCKR; HCFTCCKRLCKRL;
CFTCCKRLCKRLL; FTCCKRLCKRLLG; TCCKRLCKRLLGK; SLFFCISRFMGAA;
LFFCISRFMGAAL; FFCISRFMGAALA; FCISRFMGAALAL; CISRFMGAALALL;
ISRFMGAALALLG; SRFMGAALALLGD; RFMGAALALLGDL; FMGAALALLGDLV;
MGAALALLGDLVA; GAALALLGDLVAS; AALALLGDLVASV; ALALLGDLVASVS;
LALLGDLVASVSE; ALLGDLVASVSEA; LLGDLVASVSEAA; LGDLVASVSEAAA;
GDLVASVSEAAAA; DLVASVSEAAAAT; LVASVSEAAAATG; VASVSEAAAATGF;
ASVSEAAAATGFS; SVSEAAAATGFSV; VSEAAAATGFSVA; SEAAAATGFSVAE;
EAAAATGFSVAEI; AAAATGFSVAEIA; AAATGFSVAEIAA; AATGFSVAEIAAG;
ATGFSVAEIAAGE; TGFSVAEIAAGEA; GFSVAEIAAGEAA; FSVAEIAAGEAAA;
SVAEIAAGEAAAA; VAEIAAGEAAAAI; AEIAAGEAAAAIE; EIAAGEAAAAIEV;
IAAGEAAAAIEVQ; AAGEAAAAIEVQI; AGEAAAAIEVQIA; GEAAAAIEVQIAS;
EAAAAIEVQIASL; AAAAIEVQIASLA; AAAIEVQIASLAT; AAIEVQIASLATV;
AIEVQIASLATVE; IEVQIASLATVEG; EVQIASLATVEGI; VQIASLATVEGIT;
QIASLATVEGITS; IASLATVEGITST; ASLATVEGITSTS; SLATVEGITSTSE;
LATVEGITSTSEA; ATVEGITSTSEAI; TVEGITSTSEAIA; VEGITSTSEAIAA;
EGITSTSEAIAAI; GITSTSEAIAAIG; ITSTSEAIAAIGL; TSTSEAIAAIGLT;
STSEAIAAIGLTP; TSEAIAAIGLTPQ; SEAIAAIGLTPQT; EAIAAIGLTPQTY;
AIAAIGLTPQTYA; IAAIGLTPQTYAV; AAIGLTPQTYAVI; AIGLTPQTYAVIA;
IGLTPQTYAVIAG; GLTPQTYAVIAGA; LTPQTYAVIAGAP; TPQTYAVIAGAPG;
PQTYAVIAGAPGA; QTYAVIAGAPGAI; TYAVIAGAPGAIA; YAVIAGAPGAIAG;
AVIAGAPGAIAGF; VIAGAPGAIAGFA; IAGAPGAIAGFAA; AGAPGAIAGFAAL;
GAPGAIAGFAALI; APGAIAGFAALIQ; PGAIAGFAALIQT; GAIAGFAALIQTV;
AIAGFAALIQTVS; IAGFAALIQTVSG; AGFAALIQTVSGI; GFAALIQTVSGIS;
FAALIQTVSGISS; AALIQTVSGISSL; ALIQTVSGISSLA; LIQTVSGISSLAQ;
IQTVSGISSLAQV; QTVSGISSLAQVG; TVSGISSLAQVGY; VSGISSLAQVGYK;
SGISSLAQVGYKF; GISSLAQVGYKFF; ISSLAQVGYKFFD; SSLAQVGYKFFDD;
SLAQVGYKFFDDW; LAQVGYKFFDDWD; AQVGYKFFDDWDH;
QVGYKFFDDWDHK; VGYKFFDDWDHKV; GYKFFDDWDHKVS;
YKFFDDWDHKVST; KFFDDWDHKVSTV; FFDDWDHKVSTVG;
FDDWDHKVSTVGL; DDWDHKVSTVGLY; DWDHKVSTVGLYQ;
WDHKVSTVGLYQQ; DHKVSTVGLYQQS; HKVSTVGLYQQSG;
KVSTVGLYQQSGM; VSTVGLYQQSGMA; STVGLYQQSGMAL;
TVGLYQQSGMALE; VGLYQQSGMALEL; GLYQQSGMALELF;
LYQQSGMALELFN; YQQSGMALELFNP; QQSGMALELFNPD; QSGMALELFNPDE;
SGMALELFNPDEY; GMALELFNPDEYY; MALELFNPDEYYD; ALELFNPDEYYDI;
LELFNPDEYYDIL; ELFNPDEYYDILF; LFNPDEYYDILFP; FNPDEYYDILFPG;
NPDEYYDILFPGV; PDEYYDILFPGVN; DEYYDILFPGVNT; EYYDILFPGVNTF;
YYDILFPGVNTFV; YDILFPGVNTFVN; DILFPGVNTFVNN; ILFPGVNTFVNNI;
LFPGVNTFVNNIQ; FPGVNTFVNNIQY; PGVNTFVNNIQYL; GVNTFVNNIQYLD;
VNTFVNNIQYLDP; NTFVNNIQYLDPR; TFVNNIQYLDPRH; FVNNIQYLDPRHW;
VNNIQYLDPRHWG; NNIQYLDPRHWGP; NIQYLDPRHWGPS; IQYLDPRHWGPSL;
QYLDPRHWGPSLF; YLDPRHWGPSLFA; LDPRHWGPSLFAT; DPRHWGPSLFATI;
PRHWGPSLFATIS; RHWGPSLFATISQ; HWGPSLFATISQA; WGPSLFATISQAL;
GPSLFATISQALW; PSLFATISQALWH; SLFATISQALWHV; LFATISQALWHVI;
FATISQALWHVIR; ATISQALWHVIRD; TISQALWHVIRDD; ISQALWHVIRDDI;
SQALWHVIRDDIP; QALWHVIRDDIPS; ALWHVIRDDIPSI; LWHVIRDDIPSIT;
WHVIRDDIPSITS; HVIRDDIPSITSQ; VIRDDIPSITSQE; IRDDIPSITSQEL;
RDDIPSITSQELQ; DDIPSITSQELQR; DIPSITSQELQRR; IPSITSQELQRRT;
PSITSQELQRRTE; SITSQELQRRTER; ITSQELQRRTERF; TSQELQRRTERFF;
SQELQRRTERFFR; QELQRRTERFFRD; ELQRRTERFFRDS; LQRRTERFFRDSL;
QRRTERFFRDSLA; RRTERFFRDSLAR; RTERFFRDSLARF; TERFFRDSLARFL;
ERFFRDSLARFLE; RFFRDSLARFLEE; FFRDSLARFLEET; FRDSLARFLEETT;
RDSLARFLEETTW; DSLARFLEETTWT; SLARFLEETTWTI; LARFLEETTWTIV;
ARFLEETTWTIVN; RFLEETTWTIVNA; FLEETTWTIVNAP; LEETTWTIVNAPI;
EETTWTIVNAPIN; ETTWTIVNAPINF; TTWTIVNAPINFY; TWTIVNAPINFYN;
WTIVNAPINFYNY; TIVNAPINFYNYI; IVNAPINFYNYIQ; VNAPINFYNYIQQ;
NAPINFYNYIQQY; APINFYNYIQQYY; PINFYNYIQQYYS; INFYNYIQQYYSD;
NFYNYIQQYYSDL; FYNYIQQYYSDLS; YNYIQQYYSDLSP; NYIQQYYSDLSPI;
YIQQYYSDLSPIR; IQQYYSDLSPIRP; QQYYSDLSPIRPS; QYYSDLSPIRPSM;
YYSDLSPIRPSMV; YSDLSPIRPSMVR; SDLSPIRPSMVRQ; DLSPIRPSMVRQV;
LSPIRPSMVRQVA; SPIRPSMVRQVAE; PIRPSMVRQVAER; IRPSMVRQVAERE;
RPSMVRQVAEREG; PSMVRQVAEREGT; SMVRQVAEREGTR;
MVRQVAEREGTRV; VRQVAEREGTRVH; RQVAEREGTRVHF;
QVAEREGTRVHFG; VAEREGTRVHFGH; AEREGTRVHFGHT; EREGTRVHFGHTY;
REGTRVHFGHTYS; EGTRVHFGHTYSI; GTRVHFGHTYSID; TRVHFGHTYSIDD;
RVHFGHTYSIDDA; VHFGHTYSIDDAD; HFGHTYSIDDADS; FGHTYSIDDADSI;
GHTYSIDDADSIE; HTYSIDDADSIEE; TYSIDDADSIEEV; YSIDDADSIEEVT;
SIDDADSIEEVTQ; IDDADSIEEVTQR; DDADSIEEVTQRM; DADSIEEVTQRMD;
ADSIEEVTQRMDL; DSIEEVTQRMDLR; SIEEVTQRMDLRN; IEEVTQRMDLRNQ;
EEVTQRMDLRNQQ; EVTQRMDLRNQQS; VTQRMDLRNQQSV;
TQRMDLRNQQSVH; QRMDLRNQQSVHS; RMDLRNQQSVHSG;
MDLRNQQSVHSGE; DLRNQQSVHSGEF; LRNQQSVHSGEFI; RNQQSVHSGEFIE;
NQQSVHSGEFIEK; QQSVHSGEFIEKT; QSVHSGEFIEKTI; SVHSGEFIEKTIA;
VHSGEFIEKTIAP; HSGEFIEKTIAPG; SGEFIEKTIAPGG; GEFIEKTIAPGGA;
EFIEKTIAPGGAN; FIEKTIAPGGANQ; IEKTIAPGGANQR; EKTIAPGGANQRT;
KTIAPGGANQRTA; TIAPGGANQRTAP; IAPGGANQRTAPQ; APGGANQRTAPQW;
PGGANQRTAPQWM; GGANQRTAPQWML; GANQRTAPQWMLP;
ANQRTAPQWMLPL; NQRTAPQWMLPLL; QRTAPQWMLPLLL;
RTAPQWMLPLLLG; TAPQWMLPLLLGL; APQWMLPLLLGLY; PQWMLPLLLGLYG;
QWMLPLLLGLYGT; WMLPLLLGLYGTV; MLPLLLGLYGTVT; LPLLLGLYGTVTP;
PLLLGLYGTVTPA; LLLGLYGTVTPAL; LLGLYGTVTPALE; LGLYGTVTPALEA;
GLYGTVTPALEAY; LYGTVTPALEAYE; YGTVTPALEAYED; GTVTPALEAYEDG;
TVTPALEAYEDGP; VTPALEAYEDGPN; TPALEAYEDGPNQ; PALEAYEDGPNQK;
ALEAYEDGPNQKK; LEAYEDGPNQKKR; EAYEDGPNQKKRR;
AYEDGPNQKKRRV; YEDGPNQKKRRVS; EDGPNQKKRRVSR;
DGPNQKKRRVSRG; GPNQKKRRVSRGS; PNQKKRRVSRGSS; NQKKRRVSRGSSQ;
QKKRRVSRGSSQK; KKRRVSRGSSQKA; KRRVSRGSSQKAK; RRVSRGSSQKAKG;
RVSRGSSQKAKGT; VSRGSSQKAKGTR; SRGSSQKAKGTRA; RGSSQKAKGTRAS;
GSSQKAKGTRASA; SSQKAKGTRASAK; SQKAKGTRASAKT; QKAKGTRASAKTT;
KAKGTRASAKTTN; AKGTRASAKTTNK; KGTRASAKTTNKR; GTRASAKTTNKRR;
TRASAKTTNKRRS; RASAKTTNKRRSR; ASAKTTNKRRSRS; SAKTTNKRRSRSS;
AKTTNKRRSRSSR; KTTNKRRSRSSRS; NWGRCYYRGRMLP; WGRCYYRGRMLPK;
GRCYYRGRMLPKP; RCYYRGRMLPKPR; CYYRGRMLPKPRN;
YYRGRMLPKPRNG; YRGRMLPKPRNGG; RGRMLPKPRNGGS;
GRMLPKPRNGGSR; PREKNASLLQHSK; REKNASLLQHSKN; EKNASLLQHSKNS;
KNASLLQHSKNSP; NASLLQHSKNSPP; ASLLQHSKNSPPQ; SLLQHSKNSPPQF;
LLQHSKNSPPQFK; GPNLWKSTDVGGC; PNLWKSTDVGGCN;
NLWKSTDVGGCNC; LWKSTDVGGCNCT; WKSTDVGGCNCTN;
KSTDVGGCNCTNR; STDVGGCNCTNRG; TDVGGCNCTNRGY;
DVGGCNCTNRGYW; VGGCNCTNRGYWN; GGCNCTNRGYWNN;
FPLLCCRWRTLGN; PLLCCRWRTLGNA; LLCCRWRTLGNAG; LCCRWRTLGNAGS;
CCRWRTLGNAGSA; CRWRTLGNAGSAN; RWRTLGNAGSANE;
WRTLGNAGSANEL; RTLGNAGSANELQ; TLGNAGSANELQV; LGNAGSANELQVK;
GNAGSANELQVKV; NAGSANELQVKVP; VFWDFHRRGKCSP; FWDFHRRGKCSPS;
WDFHRRGKCSPST; DFHRRGKCSPSTS; FHRRGKCSPSTSC; HRRGKCSPSTSCD;
RRGKCSPSTSCDQ; RGKCSPSTSCDQH; GKCSPSTSCDQHS; KCSPSTSCDQHSY;
CSPSTSCDQHSYH; SPSTSCDQHSYHS; PSTSCDQHSYHSV; STSCDQHSYHSVA;
TSCDQHSYHSVAR; QLWNTTVERPCKI; LWNTTVERPCKIF; DPPEKKICKESLP;
PPEKKICKESLPN; PEKKICKESLPNF; EKKICKESLPNFL; KKICKESLPNFLF;
KICKESLPNFLFA; ICKESLPNFLFAK; PYKQENPESGWAA; YKQENPESGWAAY;
KQENPESGWAAYV; QENPESGWAAYVW; ENPESGWAAYVWY;
NPESGWAAYVWYG; PESGWAAYVWYGI; ESGWAAYVWYGIP;
SGWAAYVWYGIPG; GWAAYVWYGIPGR; WAAYVWYGIPGRR;
AAYVWYGIPGRRG; WHRKTSRGPRYDK; HRKTSRGPRYDKI; RKTSRGPRYDKIY;
QTGTIANQNALNR; TGTIANQNALNRC; GTIANQNALNRCF; TIANQNALNRCFY;
IANQNALNRCFYC; ANQNALNRCFYCT; NQNALNRCFYCTY; QNALNRCFYCTYT;
NALNRCFYCTYTF; ALNRCFYCTYTFN; LNRCFYCTYTFNK; NRCFYCTYTFNKC;
RCFYCTYTFNKCC; CFYCTYTFNKCCF; FYCTYTFNKCCFC; YCTYTFNKCCFCI;
CTYTFNKCCFCIS; TYTFNKCCFCISH; YTFNKCCFCISHF; NTESLYTNATLDY;
TESLYTNATLDYG; ESLYTNATLDYGG; SLYTNATLDYGGL; LYTNATLDYGGLT;
YTNATLDYGGLTF; TNATLDYGGLTFG; NATLDYGGLTFGN; ATLDYGGLTFGNL;
TLDYGGLTFGNLQ; LDYGGLTFGNLQQ; DYGGLTFGNLQQG; YGGLTFGNLQQGL;
GGLTFGNLQQGLK; GLTFGNLQQGLKY; LTFGNLQQGLKYL; TFGNLQQGLKYLR;
FGNLQQGLKYLRL; GNLQQGLKYLRLG; NLQQGLKYLRLGK; LQQGLKYLRLGKS;
QQGLKYLRLGKSI; QGLKYLRLGKSIV; GLKYLRLGKSIVI; LKYLRLGKSIVIG;
KYLRLGKSIVIGI; YLRLGKSIVIGIQ; LRLGKSIVIGIQC; RLGKSIVIGIQCL;
LGKSIVIGIQCLI; GKSIVIGIQCLIH; KSIVIGIQCLIHV; SIVIGIQCLIHVQ;
IVIGIQCLIHVQS; VIGIQCLIHVQSL; IGIQCLIHVQSLQ; GIQCLIHVQSLQF;
IQCLIHVQSLQFL; QCLIHVQSLQFLN; CLIHVQSLQFLNP; LIHVQSLQFLNPL;
IHVQSLQFLNPLL; HVQSLQFLNPLLL; YQEYISPCIYYIS; QEYISPCIYYISS;
EYISPCIYYISSL; YISPCIYYISSLK; ISPCIYYISSLKK; SPCIYYISSLKKY;
PCIYYISSLKKYT; CIYYISSLKKYTY; IYYISSLKKYTYL; YYISSLKKYTYLS;
YISSLKKYTYLSQ; ISSLKKYTYLSQN; SSLKKYTYLSQNP; SLKKYTYLSQNPA;
LKKYTYLSQNPAF; KKYTYLSQNPAFP; KYTYLSQNPAFPS; YTYLSQNPAFPSI;
TYLSQNPAFPSIQ; YLSQNPAFPSIQQ; LSQNPAFPSIQQF; TKLAVATRSFHFV;
KLAVATRSFHFVK; LAVATRSFHFVKF; AVATRSFHFVKFF; VATRSFHFVKFFF;
ATRSFHFVKFFFQ; TRSFHFVKFFFQV; RSFHFVKFFFQVR; SFHFVKFFFQVRT;
FHFVKFFFQVRTL; HFVKFFFQVRTLS; FVKFFFQVRTLSF; VKFFFQVRTLSFV;
KFFFQVRTLSFVR; FFFQVRTLSFVRI; FFQVRTLSFVRIF; FQVRTLSFVRIFL;
QVRTLSFVRIFLN; VRTLSFVRIFLNI; RTLSFVRIFLNIF; TLSFVRIFLNIFW;
LSFVRIFLNIFWA; PSLVEIFGFFCLN; SLVEIFGFFCLNV; LVEIFGFFCLNVS;
VEIFGFFCLNVSF; EIFGFFCLNVSFL; IFGFFCLNVSFLN; FGFFCLNVSFLNL;
GFFCLNVSFLNLP; HFHLNNLSNCLNC; FHLNNLSNCLNCL; HLNNLSNCLNCLF;
LNNLSNCLNCLFH; NNLSNCLNCLFHV; NLSNCLNCLFHVL; LSNCLNCLFHVLK;
SNCLNCLFHVLKA; NCLNCLFHVLKAN; CLNCLFHVLKANP; LNCLFHVLKANPL;
NCLFHVLKANPLI; CLFHVLKANPLIQ; LFHVLKANPLIQL; FHVLKANPLIQLL;
HVLKANPLIQLLS; VLKANPLIQLLSL; LKANPLIQLLSLL; KANPLIQLLSLLH;
ANPLIQLLSLLHL; NPLIQLLSLLHLQ; PLIQLLSLLHLQK; LIQLLSLLHLQKQ;
IQLLSLLHLQKQP; QLLSLLHLQKQPC; LLSLLHLQKQPCT; LSLLHLQKQPCTD;
SLLHLQKQPCTDL; LHLAQRLAFPWVG; HLAQRLAFPWVGL; LAQRLAFPWVGLH;
AQRLAFPWVGLHL; QRLAFPWVGLHLR; RLAFPWVGLHLRL; LAFPWVGLHLRLY;
AFPWVGLHLRLYH; FPWVGLHLRLYHH; PWVGLHLRLYHHT;
WVGLHLRLYHHTN; VGLHLRLYHHTNL; GLHLRLYHHTNLI; LHLRLYHHTNLIT;
HLRLYHHTNLITL; LRLYHHTNLITLQ; RLYHHTNLITLQL; LYHHTNLITLQLV;
YHHTNLITLQLVL; HHTNLITLQLVLF; HTNLITLQLVLFF; TNLITLQLVLFFH;
NLITLQLVLFFHY; LITLQLVLFFHYQ; ITLQLVLFFHYQW; TLQLVLFFHYQWD;
LQLVLFFHYQWDL; KQYSAKNQILQNP; QYSAKNQILQNPF; VANSAAKQHLPYI;
ANSAAKQHLPYIV; NSAAKQHLPYIVL; SAAKQHLPYIVLV; AAKQHLPYIVLVQ;
AKQHLPYIVLVQH; KQHLPYIVLVQHF; QHLPYIVLVQHFH; HLPYIVLVQHFHE;
LPYIVLVQHFHEL; PYIVLVQHFHELQ; YIVLVQHFHELQI; IVLVQHFHELQIL;
VLVQHFHELQILN; LVQHFHELQILNP; VQHFHELQILNPF; QHFHELQILNPFY;
HFHELQILNPFYL; FHELQILNPFYLI; HELQILNPFYLIY; ELQILNPFYLIYD;
IFLLAFLPWSYEG; FLLAFLPWSYEGY; LLAFLPWSYEGYL; LAFLPWSYEGYLL;
AFLPWSYEGYLLF; FLPWSYEGYLLFF; LKLYLLLADKYFF; KLYLLLADKYFFD;
LYLLLADKYFFDF; YLLLADKYFFDFY; LLLADKYFFDFYF; LLADKYFFDFYFL;
LADKYFFDFYFLQ; ADKYFFDFYFLQK; SDKAGLFSDTFYT; DKAGLFSDTFYTP;
KAGLFSDTFYTPL; AGLFSDTFYTPLH; GLFSDTFYTPLHC; LFSDTFYTPLHCI;
FSDTFYTPLHCIE; SDTFYTPLHCIEI; DTFYTPLHCIEIL; TFYTPLHCIEILN;
FYTPLHCIEILNT; YTPLHCIEILNTY; TPLHCIEILNTYL; PLHCIEILNTYLI;
LHCIEILNTYLII; HCIEILNTYLIIK; CIEILNTYLIIKT; IEILNTYLIIKTH;
EILNTYLIIKTHP; ILNTYLIIKTHPH; LNTYLIIKTHPHT; NTYLIIKTHPHTL;
TYLIIKTHPHTLS; YLIIKTHPHTLSL; LIIKTHPHTLSLL; IIKTHPHTLSLLH;
IKTHPHTLSLLHT; KTHPHTLSLLHTQ; LISKTPALFLQAL; ISKTPALFLQALL;
SKTPALFLQALLG; NHAPLSPLECFLL; LQKLYVYVELKRI; GLLPFFFFWVVLS;
LLPFFFFWVVLSV; LPFFFFWVVLSVE; PFFFFWVVLSVEN; FFFFWVVLSVENL;
FFFWVVLSVENLL; FFWVVLSVENLLL; FWVVLSVENLLLL; WVVLSVENLLLLL;
VVLSVENLLLLLH; VLSVENLLLLLHH; LSVENLLLLLHHW; SVENLLLLLHHWQ;
VENLLLLLHHWQT; ENLLLLLHHWQTY; NLLLLLHHWQTYL; LLLLLHHWQTYLH;
LLLLHHWQTYLHG; LLLHHWQTYLHGK; LLHHWQTYLHGKI;
LHHWQTYLHGKIN; HHWQTYLHGKINL; HWQTYLHGKINLH; WQTYLHGKINLHP;
QTYLHGKINLHPI; TYLHGKINLHPIF; YLHGKINLHPIFH; RNSTRTPTLLFHR;
NSTRTPTLLFHRL; STRTPTLLFHRLA; TRTPTLLFHRLAP; RTPTLLFHRLAPI;
TPTLLFHRLAPIK; PTLLFHRLAPIKK; TLLFHRLAPIKKI; LLFHRLAPIKKII;
LFHRLAPIKKIIT; GLLIFYYLSKYKL; LLIFYYLSKYKLV; LIFYYLSKYKLVT;
IFYYLSKYKLVTL; FYYLSKYKLVTLK; YYLSKYKLVTLKL; ISEGSFSNYLDPP;
SEGSFSNYLDPPL; EGSFSNYLDPPLQ; GSFSNYLDPPLQS; SFSNYLDPPLQSF;
FSNYLDPPLQSFF; SNYLDPPLQSFFS; AKPLCEAVNAVAI; KPLCEAVNAVAIY;
PLCEAVNAVAIYP; LCEAVNAVAIYPN; CEAVNAVAIYPNQ; EAVNAVAIYPNQG;
AVNAVAIYPNQGL; VNAVAIYPNQGLF; NAVAIYPNQGLFS; HARAVHRRLFGTN;
ARAVHRRLFGTNR; RAVHRRLFGTNRP; AVHRRLFGTNRPF; VHRRLFGTNRPFL;
HRRLFGTNRPFLA; RRLFGTNRPFLAV; RLFGTNRPFLAVQ; LFGTNRPFLAVQG;
FGTNRPFLAVQGI; GTNRPFLAVQGIW; TNRPFLAVQGIWA; NRPFLAVQGIWAK;
RPFLAVQGIWAKR; PFLAVQGIWAKRK; FLAVQGIWAKRKI; LAVQGIWAKRKIS;
AVQGIWAKRKIST; VQGIWAKRKISTN; QGIWAKRKISTNL; ATPGSKIRLMSYL;
TPGSKIRLMSYLY; PGSKIRLMSYLYI; GSKIRLMSYLYIL; SKIRLMSYLYILL;
KIRLMSYLYILLH; IRLMSYLYILLHF; RLMSYLYILLHFF; LMSYLYILLHFFI;
MSYLYILLHFFIQ; SYLYILLHFFIQS; YLYILLHFFIQSI; LYILLHFFIQSIH;
YILLHFFIQSIHS; ILLHFFIQSIHSL; LLHFFIQSIHSLH; LHFFIQSIHSLHF;
HFFIQSIHSLHFI; FFIQSIHSLHFIL; FIQSIHSLHFILV; IQSIHSLHFILVA;
QSIHSLHFILVAP; SIHSLHFILVAPF; IHSLHFILVAPFV; HSLHFILVAPFVR;
SLHFILVAPFVRV; LHFILVAPFVRVK; HFILVAPFVRVKF; FILVAPFVRVKFL;
ILVAPFVRVKFLT

14 mers:

ASEKASTPLLLERK; SEKASTPLLLERKG; EKASTPLLLERKGG;
KASTPLLLERKGGG; ASTPLLLERKGGGR; STPLLLERKGGGRG;
TPLLLERKGGGRGG; PLLLERKGGGRGGL; LLLERKGGGRGGLG;
LLERKGGGRGGLGL; LERKGGGRGGLGLL; ERKGGGRGGLGLLY;
RKGGGRGGLGLLYI; KGGGRGGLGLLYII; GGGRGGLGLLYIIK;
GGRGGLGLLYIIKK; GRGGLGLLYIIKKK; RGGLGLLYIIKKKA;
GGLGLLYIIKKKAT; GLGLLYIIKKKATG; LGLLYIIKKKATGR; GLLYIIKKKATGRS;
LLYIIKKKATGRSC; LYIIKKKATGRSCL; YIIKKKATGRSCLP; IIKKKATGRSCLPM;
IKKKATGRSCLPME; KKKATGRSCLPMEC; KKATGRSCLPMECS;
KATGRSCLPMECSQ; ATGRSCLPMECSQT; TGRSCLPMECSQTM;
GRSCLPMECSQTMT; RSCLPMECSQTMTS; SCLPMECSQTMTSG;
CLPMECSQTMTSGR; LPMECSQTMTSGRK; PMECSQTMTSGRKV;
MECSQTMTSGRKVH; ECSQTMTSGRKVHD; CSQTMTSGRKVHDS;
SQTMTSGRKVHDSQ; QTMTSGRKVHDSQG; TMTSGRKVHDSQGN;
MTSGRKVHDSQGNA; TSGRKVHDSQGNAA; SGRKVHDSQGNAAK;
GRKVHDSQGNAAKP; PQEGKCMTHREELL; QEGKCMTHREELLT;
EGKCMTHREELLTH; GKCMTHREELLTHG; KCMTHREELLTHGM;
CMTHREELLTHGMQ; MTHREELLTHGMQP; THREELLTHGMQPN;
HREELLTHGMQPNH; REELLTHGMQPNHD; EELLTHGMQPNHDL;
ELLTHGMQPNHDLR; LLTHGMQPNHDLRK; LTHGMQPNHDLRKE;
THGMQPNHDLRKES; HGMQPNHDLRKESA; QTCFASLGILALSP;
TCFASLGILALSPV; CFASLGILALSPVK; FASLGILALSPVKL; ASLGILALSPVKLD;
SLGILALSPVKLDK; LGILALSPVKLDKG; GILALSPVKLDKGH;
ILALSPVKLDKGHG; LALSPVKLDKGHGS; ALSPVKLDKGHGSA;
LSPVKLDKGHGSAP; SPVKLDKGHGSAPA; PVKLDKGHGSAPAV;
VKLDKGHGSAPAVT; KLDKGHGSAPAVTT; LDKGHGSAPAVTTS;
DKGHGSAPAVTTSF; KGHGSAPAVTTSFS; GHGSAPAVTTSFSE;
HGSAPAVTTSFSES; GSAPAVTTSFSESW; NLDWNKKKSSEDFY;
LDWNKKKSSEDFYF; DWNKKKSSEDFYFY; WNKKKSSEDFYFYF;
NKKKSSEDFYFYFR; KKKSSEDFYFYFRA; KKSSEDFYFYFRAF;
KSSEDFYFYFRAFA; SSEDFYFYFRAFAG; SEDFYFYFRAFAGI;
EDFYFYFRAFAGIL; RQCRREKQKYHCFT; QCRRFKQKYHCFTC;
CRRFKQKYHCFTCC; RREKQKYHCFTCCK; REKQKYHCFTCCKR;
EKQKYHCFTCCKRL; KQKYHCFTCCKRLC; QKYHCFTCCKRLCK;
KYHCFTCCKRLCKR; YHCFTCCKRLCKRL; HCFTCCKRLCKRLL;
CFTCCKRLCKRLLG; FTCCKRLCKRLLGK; SLFFCISRFMGAAL;
LFFCISRFMGAALA; FFCISRFMGAALAL; FCISRFMGAALALL;
CISRFMGAALALLG; ISRFMGAALALLGD; SRFMGAALALLGDL;
RFMGAALALLGDLV; FMGAALALLGDLVA; MGAALALLGDLVAS;
GAALALLGDLVASV; AALALLGDLVASVS; ALALLGDLVASVSE;
LALLGDLVASVSEA; ALLGDLVASVSEAA; LLGDLVASVSEAAA;
LGDLVASVSEAAAA; GDLVASVSEAAAAT; DLVASVSEAAAATG;
LVASVSEAAAATGF; VASVSEAAAATGFS; ASVSEAAAATGFSV;
SVSEAAAATGFSVA; VSEAAAATGFSVAE; SEAAAATGFSVAEI;
EAAAATGFSVAEIA; AAAATGFSVAEIAA; AAATGFSVAEIAAG;
AATGFSVAEIAAGE; ATGFSVAEIAAGEA; TGFSVAEIAAGEAA;
GFSVAEIAAGEAAA; FSVAEIAAGEAAAA; SVAEIAAGEAAAAI;
VAEIAAGEAAAAIE; AEIAAGEAAAAIEV; EIAAGEAAAAIEVQ;
IAAGEAAAAIEVQI; AAGEAAAAIEVQIA; AGEAAAAIEVQIAS;
GEAAAAIEVQIASL; EAAAAIEVQIASLA; AAAAIEVQIASLAT; AAAIEVQIASLATV;
AAIEVQIASLATVE; AIEVQIASLATVEG; IEVQIASLATVEGI; EVQIASLATVEGIT;
VQIASLATVEGITS; QIASLAIVEGITST; IASLAIVEGITSTS; ASLATVEGITSTSE;
SLATVEGITSTSFA; LATVEGITSTSEAI; ATVEGITSTSEAIA; TVEGITSTSEAIAA;
VEGITSTSEAIAAI; EGITSTSEAIAAIG; GITSTSEAIAAIGL; ITSTSEAIAAIGLT;
TSTSEAIAAIGLTP; STSEAIAAIGLTPQ; TSEAIAAIGLTPQT; SEAIAAIGLTPQTY;
EAIAAIGLTPQTYA; AIAAIGLTPQTYAV; IAAIGLTPQTYAVI; AAIGLTPQTYAVIA;
AIGLTPQTYAVIAG; IGLTPQTYAVIAGA; GLTPQTYAVIAGAP;
LTPQTYAVIAGAPG; TPQTYAVIAGAPGA; PQTYAVIAGAPGAI;
QTYAVIAGAPGAIA; TYAVIAGAPGAIAG; YAVIAGAPGAIAGF;
AVIAGAPGAIAGFA; VIAGAPGAIAGFAA; IAGAPGAIAGFAAL;
AGAPGAIAGFAALI; GAPGAIAGFAALIQ; APGAIAGFAALIQT; PGAIAGFAALIQTV;
GAIAGFAALIQTVS; AIAGFAALIQTVSG; IAGFAALIQTVSGI; AGFAALIQTVSGIS;
GFAALIQTVSGISS; FAALIQTVSGISSL; AALIQTVSGISSLA; ALIQTVSGISSLAQ;
LIQTVSGISSLAQV; IQTVSGISSLAQVG; QTVSGISSLAQVGY; TVSGISSLAQVGYK;
VSGISSLAQVGYKF; SGISSLAQVGYKFF; GISSLAQVGYKFFD;
ISSLAQVGYKFFDD; SSLAQVGYKFFDDW; SLAQVGYKFFDDWD;
LAQVGYKFFDDWDH; AQVGYKFFDDWDHK; QVGYKFFDDWDHKV;
VGYKFFDDWDHKVS; GYKFFDDWDHKVST; YKFFDDWDHKVSTV;
KFFDDWDHKVSTVG; FFDDWDHKVSTVGL; FDDWDHKVSTVGLY;
DDWDHKVSTVGLYQ; DWDHKVSTVGLYQQ; WDHKVSTVGLYQQS;
DHKVSTVGLYQQSG; HKVSTVGLYQQSGM; KVSTVGLYQQSGMA;
VSTVGLYQQSGMAL; STVGLYQQSGMALE; TVGLYQQSGMALEL;
VGLYQQSGMALELF; GLYQQSGMALELFN; LYQQSGMALELFNP;
YQQSGMALELFNPD; QQSGMALELFNPDE; QSGMALELFNPDEY;
SGMALELFNPDEYY; GMALELFNPDEYYD; MALELFNPDEYYDI;
ALELFNPDEYYDIL; LELFNPDEYYDILF; ELFNPDEYYDILFP; LFNPDEYYDILFPG;
FNPDEYYDILFPGV; NPDEYYDILFPGVN; PDEYYDILFPGVNT;
DEYYDILFPGVNTF; EYYDILFPGVNTFV; YYDILFPGVNTFVN;
YDILFPGVNTFVNN; DILFPGVNTFVNNI; ILFPGVNTFVNNIQ; LFPGVNTFVNNIQY;
FPGVNTFVNNIQYL; PGVNTFVNNIQYLD; GVNTFVNNIQYLDP;
VNTFVNNIQYLDPR; NTFVNNIQYLDPRH; TFVNNIQYLDPRHW;
FVNNIQYLDPRHWG; VNNIQYLDPRHWGP; NNIQYLDPRHWGPS;
NIQYLDPRHWGPSL; IQYLDPRHWGPSLF; QYLDPRHWGPSLFA;
YLDPRHWGPSLFAT; LDPRHWGPSLFATI; DPRHWGPSLFATIS;
PRHWGPSLFATISQ; RHWGPSLFATISQA; HWGPSLFATISQAL;
WGPSLFATISQALW; GPSLFATISQALWH; PSLFATISQALWHV;
SLFATISQALWHVI; LFATISQALWHVIR; FATISQALWHVIRD;
ATISQALWHVIRDD; TISQALWHVIRDDI; ISQALWHVIRDDIP; SQALWHVIRDDIPS;
QALWHVIRDDIPSI; ALWHVIRDDIPSIT; LWHVIRDDIPSITS; WHVIRDDIPSITSQ;
HVIRDDIPSITSQE; VIRDDIPSITSQEL; IRDDIPSITSQELQ; RDDIPSITSQELQR;
DDIPSITSQELQRR; DIPSITSQELQRRT; IPSITSQELQRRTE; PSITSQELQRRTER;
SITSQELQRRTERF; ITSQELQRRTERFF; TSQELQRRTERFFR; SQELQRRTERFFRD;
QELQRRTERFFRDS; ELQRRTERFFRDSL; LQRRTERFFRDSLA;
QRRTERFFRDSLAR; RRTERFFRDSLARF; RTERFFRDSLARFL; TERFFRDSLARFLE;
ERFFRDSLARFLEE; RFFRDSLARFLEET; FFRDSLARFLEETT; FRDSLARFLEETTW;
RDSLARFLEETTWT; DSLARFLEETTWTI; SLARFLEETTWTIV;
LARFLEETTWTIVN; ARFLEETTWTIVNA; RFLEETTWTIVNAP;
FLEETTWTIVNAPI; LEETTWTIVNAPIN; EETTWTIVNAPTNF; ETTWTIVNAPINFY;
TTWTIVNAPINFYN; TWTIVNAPINFYNY; WTIVNAPINFYNYI; TIVNAPINFYNYIQ;
IVNAPINFYNYIQQ; VNAPINFYNYIQQY; NAPINFYNYIQQYY;
APINFYNYIQQYYS; PINFYNYIQQYYSD; INFYNYIQQYYSDL;
NFYNYIQQYYSDLS; FYNYIQQYYSDLSP; YNYIQQYYSDLSPI;
NYIQQYYSDLSPIR; YIQQYYSDLSPIRP; IQQYYSDLSPIRPS; QQYYSDLSPIRPSM;
QYYSDLSPIRPSMV; YYSDLSPIRPSMVR; YSDLSPIRPSMVRQ;
SDLSPIRPSMVRQV; DLSPIRPSMVRQVA; LSPIRPSMVRQVAE;
SPIRPSMVRQVAER; PIRPSMVRQVAERE; IRPSMVRQVAEREG;
RPSMVRQVAEREGT; PSMVRQVAEREGTR; SMVRQVAEREGTRV;
MVRQVAEREGTRVH; VRQVAEREGTRVHF; RQVAERFGTRVHFG;
QVAEREGTRVHFGH; VAEREGTRVHFGHT; AERFGTRVHFGHTY;
EREGTRVHFGHTYS; REGTRVHFGHTYSI; EGTRVHFGHTYSID;
GTRVHFGHTYSIDD; TRVHFGHTYSIDDA; RVHFGHTYSIDDAD;
VHFGHTYSIDDADS; HFGHTYSIDDADSI; FGHTYSIDDADSIE; GHTYSIDDADSIEE;
HTYSIDDADSIEEV; TYSIDDADSIEEVT; YSIDDADSIEEVTQ; SIDDADSIEEVTQR;
IDDADSIEEVTQRM; DDADSIEEVTQRMD; DADSIEEVTQRMDL;
ADSIEEVTQRMDLR; DSIEEVTQRMDLRN; SIEEVTQRMDLRNQ;
IEEVTQRMDLRNQQ; EEVTQRMDLRNQQS; EVTQRMDLRNQQSV;
VTQRMDLRNQQSVH; TQRMDLRNQQSVHS; QRMDLRNQQSVHSG;
RMDLRNQQSVHSGE; MDLRNQQSVHSGEF; DLRNQQSVHSGEFI;
LRNQQSVHSGEFIE; RNQQSVHSGEFIEK; NQQSVHSGEFIEKT; QQSVHSGEFIEKTI;
QSVHSGEFIEKTIA; SVHSGEFIEKTIAP; VHSGEFIEKTIAPG; HSGEFIEKTIAPGG;
SGEFIEKTIAPGGA; GEFIEKTIAPGGAN; EFIEKTIAPGGANQ; FIEKTIAPGGANQR;
IEKTIAPGGANQRT; EKTIAPGGANQRTA; KTIAPGGANQRTAP;
TIAPGGANQRTAPQ; IAPGGANQRTAPQW; APGGANQRTAPQWM;
PGGANQRTAPQWML; GGANQRTAPQWMLP; GANQRTAPQWMLPL;
ANQRTAPQWMLPLL; NQRTAPQWMLPLLL; QRTAPQWMLPLLLG;
RTAPQWMLPLLLGL; TAPQWMLPLLLGLY; APQWMLPLLLGLYG;
PQWMLPLLLGLYGT; QWMLPLLLGLYGTV; WMLPLLLGLYGTVT;
MLPLLLGLYGTVTP; LPLLLGLYGTVTPA; PLLLGLYGTVTPAL;
LLLGLYGTVTPALE; LLGLYGTVTPALEA; LGLYGTVTPALEAY;
GLYGTVTPALEAYE; LYGTVTPALEAYED; YGTVTPALEAYEDG;
GTVTPALEAYEDGP; TVTPALEAYEDGPN; VTPALEAYEDGPNQ;
TPALEAYEDGPNQK; PALEAYEDGPNQKK; ALEAYEDGPNQKKR;
LEAYEDGPNQKKRR; EAYEDGPNQKKRRV; AYEDGPNQKKRRVS;
YEDGPNQKKRRVSR; EDGPNQKKRRVSRG; DGPNQKKRRVSRGS;
GPNQKKRRVSRGSS; PNQKKRRVSRGSSQ; NQKKRRVSRGSSQK;
QKKRRVSRGSSQKA; KKRRVSRGSSQKAK; KRRVSRGSSQKAKG;
RRVSRGSSQKAKGT; RVSRGSSQKAKGTR; VSRGSSQKAKGTRA;
SRGSSQKAKGTRAS; RGSSQKAKGTRASA; GSSQKAKGTRASAK;
SSQKAKGTRASAKT; SQKAKGTRASAKTT; QKAKGTRASAKTTN;
KAKGTRASAKTTNK; AKGTRASAKTTNKR; KGTRASAKTTNKRR;
GTRASAKTTNKRRS; TRASAKTTNKRRSR; RASAKTTNKRRSRS;
ASAKTTNKRRSRSS; SAKTTNKRRSRSSR; AKTTNKRRSRSSRS;
NWGRCYYRGRMLPK; WGRCYYRGRMLPKP; GRCYYRGRMLPKPR;
RCYYRGRMLPKPRN; CYYRGRMLPKPRNG; YYRGRMLPKPRNGG;
YRGRMLPKPRNGGS; RGRMLPKPRNGGSR; PREKNASLLQHSKN;
REKNASLLQHSKNS; EKNASLLQHSKNSP; KNASLLQHSKNSPP;
NASLLQHSKNSPPQ; ASLLQHSKNSPPQF; SLLQHSKNSPPQFK;
GPNLWKSTDVGGCN; PNLWKSTDVGGCNC; NLWKSTDVGGCNCT;
LWKSTDVGGCNCTN; WKSTDVGGCNCTNR; KSTDVGGCNCTNRG;
STDVGGCNCTNRGY; TDVGGCNCTNRGYW; DVGGCNCTNRGYWN;
VGGCNCTNRGYWNN; FPLLCCRWRTLGNA; PLLCCRWRTLGNAG;
LLCCRWRTLGNAGS; LCCRWRTLGNAGSA; CCRWRTLGNAGSAN;
CRWRTLGNAGSANE; RWRTLGNAGSANEL; WRTLGNAGSANELQ;
RTLGNAGSANELQV; TLGNAGSANELQVK; LGNAGSANELQVKV;
GNAGSANELQVKVP; VFWDFHRRGKCSPS; FWDFHRRGKCSPST;
WDFHRRGKCSPSTS; DFHRRGKCSPSTSC; FHRRGKCSPSTSCD;
HRRGKCSPSTSCDQ; RRGKCSPSTSCDQH; RGKCSPSTSCDQHS;
GKCSPSTSCDQHSY; KCSPSTSCDQHSYH; CSPSTSCDQHSYHS;
SPSTSCDQHSYHSV; PSTSCDQHSYHSVA; STSCDQHSYHSVAR;
QLWNTTVERPCKIF; DPPEKKICKESLPN; PPEKKICKESLPNF; PEKKICKESLPNFL;
EKKICKESLPNFLF; KKICKESLPNFLFA; KICKESLPNFLFAK;
PYKQENPESGWAAY; YKQENPESGWAAYV; KQENPESGWAAYVW;
QENPESGWAAYVWY; ENPESGWAAYVWYG; NPESGWAAYVWYGI;
PESGWAAYVWYGIP; ESGWAAYVWYGIPG; SGWAAYVWYGIPGR;
GWAAYVWYGIPGRR; WAAYVWYGIPGRRG; WHRKTSRGPRYDKI;
HRKTSRGPRYDKIY; QTGTIANQNALNRC; TGTIANQNALNRCF;
GTIANQNALNRCFY; TIANQNALNRCFYC; IANQNALNRCFYCT;
ANQNALNRCFYCTY; NQNALNRCFYCTYT; QNALNRCFYCTYTF;
NALNRCFYCTYTFN; ALNRCFYCTYTFNK; LNRCFYCTYTFNKC;
NRCFYCTYTFNKCC; RCFYCTYTFNKCCF; CFYCTYTFNKCCFC;
FYCTYTFNKCCFCI; YCTYTFNKCCFCIS; CTYTFNKCCFCISH; TYTFNKCCFCISHF;
NTESLYTNATLDYG; TESLYTNATLDYGG; ESLYTNATLDYGGL;
SLYTNATLDYGGLT; LYTNATLDYGGLTF; YTNATLDYGGLTFG;
TNATLDYGGLTFGN; NATLDYGGLTFGNL; ATLDYGGLTFGNLQ;
TLDYGGLTFGNLQQ; LDYGGLTFGNLQQG; DYGGLTFGNLQQGL;
YGGLTFGNLQQGLK; GGLTFGNLQQGLKY; GLTFGNLQQGLKYL;
LTFGNLQQGLKYLR; TFGNLQQGLKYLRL; FGNLQQGLKYLRLG;
GNLQQGLKYLRLGK; NLQQGLKYLRLGKS; LQQGLKYLRLGKSI;
QQGLKYLRLGKSIV; QGLKYLRLGKSIVI; GLKYLRLGKSIVIG; LKYLRLGKSIVIGI;
KYLRLGKSIVIGIQ; YLRLGKSIVIGIQC; LRLGKSIVIGIQCL; RLGKSIVIGIQCLI;
LGKSIVIGIQCLIH; GKSIVIGIQCLIHV; KSIVIGIQCLIHVQ; SIVIGIQCLIHVQS;
IVIGIQCLIHVQSL; VIGIQCLIHVQSLQ; IGIQCLIHVQSLQF; GIQCLIHVQSLQFL;
IQCLIHVQSLQFLN; QCLIHVQSLQFLNP; CLIHVQSLQFLNPL; LIHVQSLQFLNPLL;
IHVQSLQFLNPLLL; YQEYISPCIYYISS; QEYISPCIYYISSL; EYISPCIYYISSLK;
YISPCIYYISSLKK; ISPCIYYISSLKKY; SPCIYYISSLKKYT; PCTYYISSLKKYTY;
CIYYISSLKKYTYL; IYYISSLKKYTYLS; YYISSLKKYTYLSQ; YISSLKKYTYLSQN;
ISSLKKYTYLSQNP; SSLKKYTYLSQNPA; SLKKYTYLSQNPAF;
LKKYTYLSQNPAFP; KKYTYLSQNPAFPS; KYTYLSQNPAFPSI;
YTYLSQNPAFPSIQ; TYLSQNPAFPSIQQ; YLSQNPAFPSIQQF; TKLAVATRSFHFVK;
KLAVATRSFHFVKF; LAVATRSFHFVKFF; AVATRSFHFVKFFF;
VATRSFHFVKFFFQ; ATRSFHFVKFFFQV; TRSFHFVKFFFQVR;
RSFHFVKFFFQVRT; SFHFVKFFFQVRTL; FHFVKFFFQVRTLS;
HFVKFFFQVRTLSF; FVKFFFQVRTLSFV; VKFFFQVRTLSFVR; KFFFQVRTLSFVRI;
FFFQVRTLSFVRIF; FFQVRTLSFVRIFL; FQVRTLSFVRIFLN; QVRTLSFVRIFLNI;
VRTLSFVRIFLNIF; RTLSFVRIFLNIFW; TLSFVRIFLNIFWA; PSLVEIFGFFCLNV;
SLVEIFGFFCLNVS; LVEIFGFFCLNVSF; VEIFGFFCLNVSFL; EIFGFFCLNVSFLN;
IFGFFCLNVSFLNL; FGFFCLNVSFLNLP; HFHLNNLSNCLNCL;
FHLNNLSNCLNCLF; HLNNLSNCLNCLFH; LNNLSNCLNCLFHV;
NNLSNCLNCLFHVL; NLSNCLNCLFHVLK; LSNCLNCLFHVLKA;
SNCLNCLFHVLKAN; NCLNCLFHVLKANP; CLNCLFHVLKANPL;
LNCLFHVLKANPLI; NCLFHVLKANPLIQ; CLFHVLKANPLIQL;
LFHVLKANPLIQLL; FHVLKANPLIQLLS; HVLKANPLIQLLSL; VLKANPLIQLLSLL;
LKANPLIQLLSLLH; KANPLIQLLSLLHL; ANPLIQLLSLLHLQ; NPLIQLLSLLHLQK;
PLIQLLSLLHLQKQ; LIQLLSLLHLQKQP; IQLLSLLHLQKQPC; QLLSLLHLQKQPCT;
LLSLLHLQKQPCTD; LSLLHLQKQPCTDL; LHLAQRLAFPWVGL;
HLAQRLAFPWVGLH; LAQRLAFPWVGLHL; AQRLAFPWVGLHLR;
QRLAFPWVGLHLRL; RLAFPWVGLHLRLY; LAFPWVGLHLRLYH;
AFPWVGLHLRLYHH; FPWVGLHLRLYHHT; PWVGLHLRLYHHTN;
WVGLHLRLYHHTNL; VGLHLRLYHHTNLI; GLHLRLYHHTNLIT;
LHLRLYHHTNLITL; HLRLYHHTNLITLQ; LRLYHHTNLITLQL;
RLYHHTNLITLQLV; LYHHTNLITLQLVL; YHHTNLITLQLVLF;
HHTNLITLQLVLFF; HTNLITLQLVLFFH; TNLITLQLVLFFHY; NLITLQLVLFFHYQ;
LITLQLVLFFHYQW; ITLQLVLFFHYQWD; TLQLVLFFHYQWDL;
KQYSAKNQILQNPF; VANSAAKQHLPYIV; ANSAAKQHLPYIVL;
NSAAKQHLPYIVLV; SAAKQHLPYIVLVQ; AAKQHLPYIVLVQH;
AKQHLPYTVLVQHF; KQHLPYIVLVQHFH; QHLPYIVLVQHFHE;
HLPYIVLVQHFHEL; LPYIVLVQHFHELQ; PYIVLVQHFHELQI; YIVLVQHFHELQIL;
IVLVQHFHELQILN; VLVQHFHELQILNP; LVQHFHELQILNPF; VQHFHELQILNPFY;
QHFHELQILNPFYL; HFHELQILNPFYLI; FHELQILNPFYLIY; HELQILNPFYLIYD;
IFLLAFLPWSYEGY; FLLAFLPWSYEGYL; LLAFLPWSYEGYLL;
LAFLPWSYEGYLLF; AFLPWSYEGYLLFF; LKLYLLLADKYFFD;
KLYLLLADKYFFDF; LYLLLADKYFFDFY; YLLLADKYFFDFYF;
LLLADKYFFDFYFL; LLADKYFFDFYFLQ; LADKYFFDFYFLQK;
SDKAGLFSDTFYTP; DKAGLFSDTFYTPL; KAGLFSDTFYTPLH;
AGLFSDTFYTPLHC; GLFSDTFYTPLHCI; LFSDTFYTPLHCIE; FSDTFYTPLHCIEI;
SDTFYTPLHCIEIL; DTFYTPLHCIEILN; TFYTPLHCIEILNT; FYTPLHCIEILNTY;
YTPLHCIEILNTYL; TPLHCIEILNTYLI; PLHCIEILNTYLII; LHCIEILNTYLIIK;
HCIEILNTYLIIKT; CIEILNTYLIIKTH; IEILNTYLIIKTHP; EILNTYLIIKTHPH;
ILNTYLIIKTHPHT; LNTYLIIKTHPHTL; NTYLIIKTHPHTLS; TYLIIKTHPHTLSL;
YLIIKTHPHTLSLL; LIIKTHPHTLSLLH; IIKTHPHTLSLLHT; IKTHPHTLSLLHTQ;
LISKTPALFLQALL; ISKTPALFLQALLG; GLLPFFFFWVVLSV; LLPFFFFWVVLSVE;
LPFFFFWVVLSVEN; PFFFFWVVLSVENL; FFFFWVVLSVENLL;
FFFWVVLSVENLLL; FFWVVLSVENLLLL; FWVVLSVENLLLLL;
WVVLSVENLLLLLH; VVLSVENLLLLLHH; VLSVENLLLLLHHW;
LSVENLLLLLHHWQ; SVENLLLLLHHWQT; VENLLLLLHHWQTY;
ENLLLLLHHWQTYL; NLLLLLHHWQTYLH; LLLLLHHWQTYLHG;
LLLLHHWQTYLHGK; LLLHHWQTYLHGKI; LLHHWQTYLHGKIN;
LHHWQTYLHGKINL; HHWQTYLHGKINLH; HWQTYLHGKINLHP;
WQTYLHGKINLHPI; QTYLHGKINLHPIF; TYLHGKINLHPIFH; RNSTRTPTLLFHRL;
NSTRTPTLLFHRLA; STRTPTLLFHRLAP; TRTPTLLFHRLAPI; RTPTLLFHRLAPIK;
TPTLLFHRLAPIKK; PTLLFHRLAPIKKI; TLLFHRLAPIKKII; LLFHRLAPIKKIIT;
GLLIFYYLSKYKLV; LLIFYYLSKYKLVT; LIFYYLSKYKLVTL;
IFYYLSKYKLVTLK; FYYLSKYKLVTLKL; ISEGSFSNYLDPPL; SEGSFSNYLDPPLQ;
EGSFSNYLDPPLQS; GSFSNYLDPPLQSF; SFSNYLDPPLQSFF; FSNYLDPPLQSFFS;
AKPLCEAVNAVAIY; KPLCEAVNAVAIYP; PLCEAVNAVAIYPN;
LCEAVNAVAIYPNQ; CEAVNAVAIYPNQG; EAVNAVAIYPNQGL;
AVNAVAIYPNQGLF; VNAVAIYPNQGLFS; HARAVHRRLFGTNR;
ARAVHRRLFGTNRP; RAVHRRLFGTNRPF; AVHRRLFGTNRPFL;
VHRRLFGTNRPFLA; HRRLFGTNRPFLAV; RRLFGTNRPFLAVQ;
RLFGTNRPFLAVQG; LFGTNRPFLAVQGI; FGTNRPFLAVQGIW;
GTNRPFLAVQGIWA; TNRPFLAVQGIWAK; NRPFLAVQGIWAKR;
RPFLAVQGIWAKRK; PFLAVQGIWAKRKI; FLAVQGIWAKRKIS;
LAVQGIWAKRKIST; AVQGIWAKRKISTN; VQGIWAKRKISTNL;
ATPGSKIRLMSYLY; TPGSKIRLMSYLYI; PGSKIRLMSYLYIL; GSKIRLMSYLYILL;
SKIRLMSYLYILLH; KIRLMSYLYILLHF; IRLMSYLYILLHFF; RLMSYLYILLHFFI;
LMSYLYILLHFFIQ; MSYLYILLHFFIQS; SYLYILLHFFIQSI; YLYILLHFFIQSIH;
LYILLHFFIQSIHS; YILLHFFIQSIHSL; ILLHFFIQSIHSLH; LLHFFIQSIHSLHF;
LHFFIQSIHSLHFI; HFFIQSIHSLHFIL; FFIQSIHSLHFILV; FIQSIHSLHFILVA;
IQSIHSLHFILVAP; QSIHSLHFILVAPF; SIHSLHFILVAPFV; IHSLHFILVAPFVR;
HSLHFILVAPFVRV; SLHFILVAPFVRVK; LHFILVAPFVRVKF; HFILVAPFVRVKFL;
FILVAPFVRVKFLT

15 mers:

ASEKASTPLLLERKG; SEKASTPLLLERKGG; EKASTPLLLERKGGG;
KASTPLLLERKGGGR; ASTPLLLERKGGGRG; STPLLLERKGGGRGG;
TPLLLERKGGGRGGL; PLLLERKGGGRGGLG; LLLERKGGGRGGLGL;
LLERKGGGRGGLGLL; LERKGGGRGGLGLLY; ERKGGGRGGLGLLYI;
RKGGGRGGLGLLYII; KGGGRGGLGLLYIIK; GGGRGGLGLLYIIKK;
GGRGGLGLLYIIKKK; GRGGLGLLYIIKKKA; RGGLGLLYIIKKKAT;
GGLGLLYIIKKKATG; GLGLLYIIKKKATGR; LGLLYIIKKKATGRS;
GLLYIIKKKATGRSC; LLYIIKKKATGRSCL; LYIIKKKATGRSCLP;
YIIKKKATGRSCLPM; IIKKKATGRSCLPME; IKKKATGRSCLPMEC;
KKKATGRSCLPMECS; KKATGRSCLPMECSQ; KATGRSCLPMECSQT;
ATGRSCLPMECSQTM; TGRSCLPMECSQTMT; GRSCLPMECSQTMTS;
RSCLPMECSQTMTSG; SCLPMECSQTMTSGR; CLPMECSQTMTSGRK;
LPMECSQTMTSGRKV; PMECSQTMTSGRKVH; MECSQTMTSGRKVHD;
ECSQTMTSGRKVHDS; CSQTMTSGRKVHDSQ; SQTMTSGRKVHDSQG;
QTMTSGRKVHDSQGN; TMTSGRKVHDSQGNA; MTSGRKVHDSQGNAA;
TSGRKVHDSQGNAAK; SGRKVHDSQGNAAKP; PQEGKCMTHREELLT;
QEGKCMTHREELLTH; EGKCMTHREELLTHG; GKCMTHREELLTHGM;
KCMTHREELLTHGMQ; CMTHREELLTHGMQP; MTHREELLTHGMQPN;
THREELLTHGMQPNH; HREELLTHGMQPNHD; REELLTHGMQPNHDL;
EELLTHGMQPNHDLR; ELLTHGMQPNHDLRK; LLTHGMQPNHDLRKE;
LTHGMQPNHDLRKES; THGMQPNHDLRKESA; QTCFASLGILALSPV;
TCFASLGILALSPVK; CFASLGILALSPVKL; FASLGILALSPVKLD;
ASLGILALSPVKLDK; SLGILALSPVKLDKG; LGILALSPVKLDKGH;
GILALSPVKLDKGHG; ILALSPVKLDKGHGS; LALSPVKLDKGHGSA;
ALSPVKLDKGHGSAP; LSPVKLDKGHGSAPA; SPVKLDKGHGSAPAV;
PVKLDKGHGSAPAVT; VKLDKGHGSAPAVTT; KLDKGHGSAPAVTTS;
LDKGHGSAPAVTTSF; DKGHGSAPAVTTSFS; KGHGSAPAVTTSFSE;
GHGSAPAVTTSFSES; HGSAPAVTTSFSESW; NLDWNKKKSSEDFYF;
LDWNKKKSSEDFYFY; DWNKKKSSEDFYFYF; WNKKKSSEDFYFYFR;
NKKKSSEDFYFYFRA; KKKSSEDFYFYFRAF; KKSSEDFYFYFRAFA;
KSSEDFYFYFRAFAG; SSEDFYFYFRAFAGI; SEDFYFYFRAFAGIL;
RQCRREKQKYHCFTC; QCRREKQKYHCFTCC; CRREKQKYHCFTCCK;
RREKQKYHCFTCCKR; REKQKYHCFTCCKRL; EKQKYHCFTCCKRLC;
KQKYHCFTCCKRLCK; QKYHCFTCCKRLCKR; KYHCFTCCKRLCKRL;
YHCFTCCKRLCKRLL; HCFTCCKRLCKRLLG; CFTCCKRLCKRLLGK;
SLFFCISRFMGAALA; LFFCISRFMGAALAL; FFCISRFMGAALALL;
FCISRFMGAALALLG; CISRFMGAALALLGD; ISRFMGAALALLGDL;
SRFMGAALALLGDLV; RFMGAALALLGDLVA; FMGAALALLGDLVAS;
MGAALALLGDLVASV; GAALALLGDLVASVS; AALALLGDLVASVSE;
ALALLGDLVASVSEA; LALLGDLVASVSEAA; ALLGDLVASVSEAAA;
LLGDLVASVSEAAAA; LGDLVASVSEAAAAT; GDLVASVSEAAAATG;
DLVASVSEAAAATGF; LVASVSEAAAATGFS; VASVSEAAAATGFSV;
ASVSEAAAATGFSVA; SVSEAAAATGFSVAE; VSEAAAATGFSVAEI;
SEAAAATGFSVAEIA; EAAAATGFSVAEIAA; AAAATGFSVAEIAAG;
AAATGFSVAEIAAGE; AATGFSVAEIAAGEA; ATGFSVAEIAAGEAA;
TGFSVAEIAAGEAAA; GFSVAEIAAGEAAAA; FSVAEIAAGEAAAAI;
SVAEIAAGEAAAAIE; VAEIAAGEAAAAIEV; AEIAAGEAAAAIEVQ;
EIAAGEAAAAIEVQI; IAAGEAAAAIEVQIA; AAGEAAAAIEVQIAS;
AGEAAAAIEVQIASL; GEAAAAIEVQIASLA; EAAAAIEVQIASLAT;
AAAAIEVQIASLATV; AAAIEVQIASLATVE; AAIEVQIASLATVEG;
AIEVQIASLATVEGI; IEVQIASLATVEGIT; EVQIASLATVEGITS;
VQIASLATVEGITST; QIASLATVEGITSTS; IASLATVEGITSTSE;
ASLATVEGITSTSEA; SLATVEGITSTSEAI; LATVEGITSTSEAIA;
ATVEGITSTSEAIAA; TVEGITSTSEAIAAI; VEGITSTSEAIAAIG;
EGITSTSEAIAAIGL; GITSTSEAIAAIGLT; ITSTSEAIAAIGLTP; TSTSEAIAAIGLTPQ;
STSEAIAAIGLTPQT; TSEAIAAIGLTPQTY; SEAIAAIGLTPQTYA;
EAIAAIGLTPQTYAV; AIAAIGLTPQTYAVI; IAAIGLTPQTYAVIA;
AAIGLTPQTYAVIAG; AIGLTPQTYAVIAGA; IGLTPQTYAVIAGAP;
GLTPQTYAVIAGAPG; LTPQTYAVIAGAPGA; TPQTYAVIAGAPGAI;
PQTYAVIAGAPGAIA; QTYAVIAGAPGAIAG; TYAVIAGAPGAIAGF;
YAVIAGAPGAIAGFA; AVIAGAPGAIAGFAA; VIAGAPGAIAGFAAL;
IAGAPGAIAGFAALI; AGAPGAIAGFAALIQ; GAPGAIAGFAALIQT;
APGAIAGFAALIQTV; PGAIAGFAALIQTVS; GAIAGFAALIQTVSG;
AIAGFAALIQTVSGI; IAGFAALIQTVSGIS; AGFAALIQTVSGISS;
GFAALIQTVSGISSL; FAALIQTVSGISSLA; AALIQTVSGISSLAQ;
ALIQTVSGISSLAQV; LIQTVSGISSLAQVG; IQTVSGISSLAQVGY;
QTVSGISSLAQVGYK; TVSGISSLAQVGYKF; VSGISSLAQVGYKFF;
SGISSLAQVGYKFFD; GISSLAQVGYKFFDD; ISSLAQVGYKFFDDW;
SSLAQVGYKFFDDWD; SLAQVGYKFFDDWDH; LAQVGYKFFDDWDHK;
AQVGYKFFDDWDHKV; QVGYKFFDDWDHKVS; VGYKFFDDWDHKVST;
GYKFFDDWDHKVSTV; YKFFDDWDHKVSTVG; KFFDDWDHKVSTVGL;
FFDDWDHKVSTVGLY; FDDWDHKVSTVGLYQ; DDWDHKVSTVGLYQQ;
DWDHKVSTVGLYQQS; WDHKVSTVGLYQQSG; DHKVSTVGLYQQSGM;
HKVSTVGLYQQSGMA; KVSTVGLYQQSGMAL; VSTVGLYQQSGMALE;
STVGLYQQSGMALEL; TVGLYQQSGMALELF; VGLYQQSGMALELFN;
GLYQQSGMALELFNP; LYQQSGMALELFNPD; YQQSGMALELFNPDE;
QQSGMALELFNPDEY; QSGMALELFNPDEYY; SGMALELFNPDEYYD;
GMALELFNPDEYYDI; MALELFNPDEYYDIL; ALELFNPDEYYDILF;
LELFNPDEYYDILFP; ELFNPDEYYDILFPG; LFNPDEYYDILFPGV;
FNPDEYYDILFPGVN; NPDEYYDILFPGVNT; PDEYYDILFPGVNTF;
DEYYDILFPGVNTFV; EYYDILFPGVNTFVN; YYDILFPGVNTFVNN;
YDILFPGVNTFVNNI; DILFPGVNTFVNNIQ; ILFPGVNTFVNNIQY;
LFPGVNTFVNNIQYL; FPGVNTFVNNIQYLD; PGVNTFVNNIQYLDP;
GVNTFVNNIQYLDPR; VNTFVNNIQYLDPRH; NTFVNNIQYLDPRHW;
TFVNNIQYLDPRHWG; FVNNIQYLDPRHWGP; VNNIQYLDPRHWGPS;
NNIQYLDPRHWGPSL; NIQYLDPRHWGPSLF; IQYLDPRHWGPSLFA;
QYLDPRHWGPSLFAT; YLDPRHWGPSLFATI; LDPRHWGPSLFATIS;
DPRHWGPSLFATISQ; PRHWGPSLFATISQA; RHWGPSLFATISQAL;
HWGPSLFATISQALW; WGPSLFATISQALWH; GPSLFATISQALWHV;
PSLFATISQALWHVI; SLFATISQALWHVIR; LFATISQALWHVIRD;
FATISQALWHVIRDD; ATISQALWHVIRDDI; TISQALWHVIRDDIP;
ISQALWHVIRDDIPS; SQALWHVIRDDIPSI; QALWHVIRDDIPSIT;
ALWHVIRDDIPSITS; LWHVIRDDIPSITSQ; WHVIRDDIPSITSQE;
HVIRDDIPSITSQEL; VIRDDIPSITSQELQ; IRDDIPSITSQELQR; RDDIPSITSQELQRR;
DDIPSITSQELQRRT; DIPSITSQELQRRTE; IPSITSQELQRRTER;
PSITSQELQRRTERF; SITSQELQRRTERFF; ITSQELQRRTERFFR;
TSQELQRRTERFFRD; SQELQRRTERFFRDS; QELQRRTERFFRDSL;
ELQRRTERFFRDSLA; LQRRTERFFRDSLAR; QRRTERFFRDSLARF;
RRTERFFRDSLARFL; RTERFFRDSLARFLE; TERFFRDSLARFLEE;
ERFFRDSLARFLEET; RFFRDSLARFLEETT; FFRDSLARFLEETTW;
FRDSLARFLEETTWT; RDSLARFLEETTWTI; DSLARFLEETTWTIV;
SLARFLEETTWTIVN; LARFLEETTWTIVNA; ARFLEETTWTIVNAP;
RFLEETTWTIVNAPI; FLEETTWTIVNAPIN; LEETTWTIVNAPINF;
EETTWTIVNAPINFY; ETTWTIVNAPINFYN; TTWTIVNAPINFYNY;
TWTIVNAPINFYNYI; WTIVNAPINFYNYIQ; TIVNAPINFYNYIQQ;
IVNAPINFYNYIQQY; VNAPINFYNYIQQYY; NAPINFYNYIQQYYS;
APINFYNYIQQYYSD; PINFYNYIQQYYSDL; INFYNYIQQYYSDLS;
NFYNYIQQYYSDLSP; FYNYIQQYYSDLSPI; YNYIQQYYSDLSPIR;
NYIQQYYSDLSPIRP; YIQQYYSDLSPIRPS; IQQYYSDLSPIRPSM;
QQYYSDLSPIRPSMV; QYYSDLSPIRPSMVR; YYSDLSPIRPSMVRQ;
YSDLSPIRPSMVRQV; SDLSPIRPSMVRQVA; DLSPIRPSMVRQVAE;
LSPIRPSMVRQVAER; SPIRPSMVRQVAERE; PIRPSMVRQVAEREG;
IRPSMVRQVAEREGT; RPSMVRQVAEREGTR; PSMVRQVAEREGTRV;
SMVRQVAEREGTRVH; MVRQVAEREGTRVHF; VRQVAEREGTRVHFG;
RQVAEREGTRVHFGH; QVAEREGTRVHFGHT; VAEREGTRVHFGHTY;
AEREGTRVHFGHTYS; EREGTRVHFGHTYSI; REGTRVHFGHTYSID;
EGTRVHFGHTYSIDD; GTRVHFGHTYSIDDA; TRVHFGHTYSIDDAD;
RVHFGHTYSIDDADS; VHFGHTYSIDDADSI; HFGHTYSIDDADSIE;
FGHTYSIDDADSIEE; GHTYSIDDADSIEEV; HTYSIDDADSIEEVT;
TYSIDDADSIEEVTQ; YSIDDADSIEEVTQR; SIDDADSIEEVTQRM;
IDDADSIEEVTQRMD; DDADSIEEVTQRMDL; DADSIEEVTQRMDLR;
ADSIEEVTQRMDLRN; DSIEEVTQRMDLRNQ; SIEEVTQRMDLRNQQ;
IEEVTQRMDLRNQQS; EEVTQRMDLRNQQSV; EVTQRMDLRNQQSVH;
VTQRMDLRNQQSVHS; TQRMDLRNQQSVHSG; QRMDLRNQQSVHSGE;
RMDLRNQQSVHSGEF; MDLRNQQSVHSGEFI; DLRNQQSVHSGEFIE;
LRNQQSVHSGEFIEK; RNQQSVHSGEFIEKT; NQQSVHSGEFIEKTI;
QQSVHSGEFIEKTIA; QSVHSGEFIEKTIAP; SVHSGEFIEKTIAPG;
VHSGEFIEKTIAPGG; HSGEFIEKTIAPGGA; SGEFIEKTIAPGGAN;
GEFIEKTIAPGGANQ; EFIEKTIAPGGANQR; FIEKTIAPGGANQRT;
IEKTIAPGGANQRTA; EKTIAPGGANQRTAP; KTIAPGGANQRTAPQ;
TIAPGGANQRTAPQW; IAPGGANQRTAPQWM; APGGANQRTAPQWML;
PGGANQRTAPQWMLP; GGANQRTAPQWMLPL; GANQRTAPQWMLPLL;
ANQRTAPQWMLPLLL; NQRTAPQWMLPLLLG; QRTAPQWMLPLLLGL;
RTAPQWMLPLLLGLY; TAPQWMLPLLLGLYG; APQWMLPLLLGLYGT;
PQWMLPLLLGLYGTV; QWMLPLLLGLYGTVT; WMLPLLLGLYGTVTP;
MLPLLLGLYGTVTPA; LPLLLGLYGTVTPAL; PLLLGLYGTVTPALE;
LLLGLYGTVTPALEA; LLGLYGTVTPALEAY; LGLYGTVTPALEAYE;
GLYGTVTPALEAYED; LYGTVTPALEAYEDG; YGTVTPALEAYEDGP;
GTVTPALEAYEDGPN; TVTPALEAYEDGPNQ; VTPALEAYEDGPNQK;
TPALEAYEDGPNQKK; PALEAYEDGPNQKKR; ALEAYEDGPNQKKRR;
LEAYEDGPNQKKRRV; EAYEDGPNQKKRRVS; AYEDGPNQKKRRVSR;
YEDGPNQKKRRVSRG; EDGPNQKKRRVSRGS; DGPNQKKRRVSRGSS,
GPNQKKRRVSRGSSQ; PNQKKRRVSRGSSQK; NQKKRRVSRGSSQKA;
QKKRRVSRGSSQKAK; KKRRVSRGSSQKAKG; KRRVSRGSSQKAKGT;
RRVSRGSSQKAKGTR; RVSRGSSQKAKGTRA; VSRGSSQKAKGTRAS;
SRGSSQKAKGTRASA; RGSSQKAKGTRASAK; GSSQKAKGTRASAKT;
SSQKAKGTRASAKTT; SQKAKGTRASAKTTN; QKAKGTRASAKTTNK;
KAKGTRASAKTTNKR; AKGTRASAKTTNKRR; KGTRASAKTTNKRRS;
GTRASAKTTNKRRSR; TRASAKTTNKRRSRS; RASAKTTNKRRSRSS;
ASAKTTNKRRSRSSR; SAKTTNKRRSRSSRS; NWGRCYYRGRMLPKP;
WGRCYYRGRMLPKPR; GRCYYRGRMLPKPRN; RCYYRGRMLPKPRNG;
CYYRGRMLPKPRNGG; YYRGRMLPKPRNGGS; YRGRMLPKPRNGGSR;
PREKNASLLQHSKNS; REKNASLLQHSKNSP; EKNASLLQHSKNSPP;
KNASLLQHSKNSPPQ; NASLLQHSKNSPPQF; ASLLQHSKNSPPQFK;
GPNLWKSTDVGGCNC; PNLWKSTDVGGCNCT; NLWKSTDVGGCNCTN;
LWKSTDVGGCNCTNR; WKSTDVGGCNCTNRG; KSTDVGGCNCTNRGY;
STDVGGCNCTNRGYW; TDVGGCNCTNRGYWN; DVGGCNCTNRGYWNN
FPLLCCRWRTLGNAG; PLLCCRWRTLGNAGS; LLCCRWRTLGNAGSA;
LCCRWRTLGNAGSAN; CCRWRTLGNAGSANE; CRWRTLGNAGSANEL;
RWRTLGNAGSANELQ; WRTLGNAGSANELQV; RTLGNAGSANELQVK;
TLGNAGSANELQVKV; LGNAGSANELQVKVP; VFWDFHRRGKCSPST;
FWDFHRRGKCSPSTS; WDFHRRGKCSPSTSC; DFHRRGKCSPSTSCD;
FHRRGKCSPSTSCDQ; HRRGKCSPSTSCDQH; RRGKCSPSTSCDQHS;
RGKCSPSTSCDQHSY; GKCSPSTSCDQHSYH; KCSPSTSCDQHSYHS;
CSPSTSCDQHSYHSV; SPSTSCDQHSYHSVA; PSTSCDQHSYHSVAR;
DPPEKKICKESLPNF; PPEKKICKESLPNFL; PEKKICKESLPNFLF;
EKKICKESLPNFLFA; KKICKESLPNFLFAK; PYKQENPESGWAAYV;
YKQENPESGWAAYVW; KQENPESGWAAYVWY; QENPESGWAAYVWYG;
ENPESGWAAYVWYGI; NPESGWAAYVWYGIP; PESGWAAYVWYGIPG;
ESGWAAYVWYGIPGR; SGWAAYVWYGIPGRR; GWAAYVWYGIPGRRG;
WHRKTSRGPRYDKIY; QTGTIANQNALNRCF; TGTIANQNALNRCFY;
GTIANQNALNRCFYC; TIANQNALNRCFYCT; IANQNALNRCFYCTY;
ANQNALNRCFYCTYT; NQNALNRCFYCTYTF; QNALNRCFYCTYTFN;
NALNRCFYCTYTFNK; ALNRCFYCTYTFNKC; LNRCFYCTYTFNKCC;
NRCFYCTYTFNKCCF; RCFYCTYTFNKCCFC; CFYCTYTFNKCCFCI;
FYCTYTFNKCCFCIS; YCTYTFNKCCFCISH; CTYTFNKCCFCISHF;
NTESLYTNATLDYGG; TESLYTNATLDYGGL; ESLYTNATLDYGGLT;
SLYTNATLDYGGLTF; LYTNATLDYGGLTFG; YTNATLDYGGLTFGN;
TNATLDYGGLTFGNL; NATLDYGGLTFGNLQ; ATLDYGGLTFGNLQQ;
TLDYGGLTFGNLQQG; LDYGGLTFGNLQQGL; DYGGLTFGNLQQGLK;
YGGLTFGNLQQGLKY; GGLTFGNLQQGLKYL; GLTFGNLQQGLKYLR;
LTFGNLQQGLKYLRL; TFGNLQQGLKYLRLG; FGNLQQGLKYLRLGK;
GNLQQGLKYLRLGKS; NLQQGLKYLRLGKSI; LQQGLKYLRLGKSIV;
QQGLKYLRLGKSIVI; QGLKYLRLGKSIVIG; GLKYLRLGKSIVIGI;
LKYLRLGKSIVIGIQ; KYLRLGKSIVIGIQC; YLRLGKSIVIGIQCL;
LRLGKSIVIGIQCLI; RLGKSIVIGIQCLIH; LGKSIVIGIQCLIHV; GKSIVIGIQCLIHVQ;
KSIVIGIQCLIHVQS; SIVIGIQCLIHVQSL; IVIGIQCLIHVQSLQ; VIGIQCLIHVQSLQF;
IGIQCLIHVQSLQFL; GIQCLIHVQSLQFLN; IQCLIHVQSLQFLNP;
QCLIHVQSLQFLNPL; CLIHVQSLQFLNPLL; LIHVQSLQFLNPLLL;
YQEYISPCIYYISSL; QEYISPCIYYISSLK; EYISPCIYYISSLKK; YISPCIYYISSLKKY;
ISPCIYYISSLKKYT; SPCIYYISSLKKYTY; PCTYYISSLKKYTYL;
CIYYISSLKKYTYLS; IYYISSLKKYTYLSQ; YYISSLKKYTYLSQN;
YISSLKKYTYLSQNP; ISSLKKYTYLSQNPA; SSLKKYTYLSQNPAF;
SLKKYTYLSQNPAFP; LKKYTYLSQNPAFPS; KKYTYLSQNPAFPSI;
KYTYLSQNPAFPSIQ; YTYLSQNPAFPSIQQ; TYLSQNPAFPSIQQF;
TKLAVATRSFHFVKF; KLAVATRSFHFVKFF; LAVATRSFHFVKFFF;
AVATRSFHFVKFFFQ; VATRSFHFVKFFFQV; ATRSFHFVKFFFQVR;
TRSFHFVKFFFQVRT; RSFHFVKFFFQVRTL; SFHFVKFFFQVRTLS;
FHFVKFFFQVRTLSF; HFVKFFFQVRTLSFV; FVKFFFQVRTLSFVR;
VKFFFQVRTLSFVRI; KFFFQVRTLSFVRIF; FFFQVRTLSFVRIFL;
FFQVRTLSFVRIFLN; FQVRTLSFVRIFLNI; QVRTLSFVRIFLNIF;
VRTLSFVRIFLNIFW; RTLSFVRIFLNIFWA; PSLVEIFGFFCLNVS;
SLVEIFGFFCLNVSF; LVEIFGFFCLNVSFL; VEIFGFFCLNVSFLN;
EIFGFFCLNVSFLNL; IFGFFCLNVSFLNLP; HFHLNNLSNCLNCLF;
FHLNNLSNCLNCLFH; HLNNLSNCLNCLFHV; LNNLSNCLNCLFHVL;
NNLSNCLNCLFHVLK; NLSNCLNCLFHVLKA; LSNCLNCLFHVLKAN;
SNCLNCLFHVLKANP; NCLNCLFHVLKANPL; CLNCLFHVLKANPLI;
LNCLFHVLKANPLIQ; NCLFHVLKANPLIQL; CLFHVLKANPLIQLL;
LFHVLKANPLIQLLS; FHVLKANPLIQLLSL; HVLKANPLIQLLSLL;
VLKANPLIQLLSLLH; LKANPLIQLLSLLHL; KANPLIQLLSLLHLQ;
ANPLIQLLSLLHLQK; NPLIQLLSLLHLQKQ; PLIQLLSLLHLQKQP;
LIQLLSLLHLQKQPC; IQLLSLLHLQKQPCT; QLLSLLHLQKQPCTD;
LLSLLHLQKQPCTDL; LHLAQRLAFPWVGLH; HLAQRLAFPWVGLHL;
LAQRLAFPWVGLHLR; AQRLAFPWVGLHLRL; QRLAFPWVGLHLRLY;
RLAFPWVGLHLRLYH; LAFPWVGLHLRLYHH; AFPWVGLHLRLYHHT;
FPWVGLHLRLYHHTN; PWVGLHLRLYHHTNL; WVGLHLRLYHHTNLI;
VGLHLRLYHHTNLIT; GLHLRLYHHTNLITL; LHLRLYHHTNLITLQ;
HLRLYHHTNLITLQL; LRLYHHTNLITLQLV; RLYHHTNLITLQLVL;
LYHHTNLITLQLVLF; YHHTNLITLQLVLFF; HHTNLITLQLVLFFH;
HTNLITLQLVLFFHY; TNLITLQLVLFFHYQ; NLITLQLVLFFHYQW;
LITLQLVLFFHYQWD; ITLQLVLFFHYQWDL; VANSAAKQHLPYIVL;
ANSAAKQHLPYIVLV; NSAAKQHLPYIVLVQ; SAAKQHLPYIVLVQH;
AAKQHLPYIVLVQHF; AKQHLPYIVLVQHFH; KQHLPYIVLVQHFHE;
QHLPYIVLVQHFHEL; HLPYIVLVQHFHELQ; LPYIVLVQHFHELQI;
PYIVLVQHFHELQIL; YIVLVQHFHELQILN; IVLVQHFHELQILNP;
VLVQHFHELQILNPF; LVQHFHELQILNPFY; VQHFHELQILNPFYL;
QHFHELQILNPFYLI; HFHELQILNPFYLIY; FHELQILNPFYLIYD;
IFLLAFLPWSYEGYL; FLLAFLPWSYEGYLL; LLAFLPWSYFGYLLF;
LAFLPWSYEGYLLFF; LKLYLLLADKYFFDF; KLYLLLADKYFFDFY;
LYLLLADKYFFDFYF; YLLLADKYFFDFYFL; LLLADKYFFDFYFLQ;
LLADKYFFDFYFLQK; SDKAGLFSDTFYTPL; DKAGLFSDTFYTPLH;
KAGLFSDTFYTPLHC; AGLFSDTFYTPLHCI; GLFSDTFYTPLHCIE;
LFSDTFYTPLHCIEI; FSDTFYTPLHCIEIL; SDTFYTPLHCIEILN;
DTFYTPLHCIEILNT; TFYTPLHCIEILNTY; FYTPLHCIEILNTYL;
YTPLHCIEILNTYLI; TPLHCIEILNTYLII; PLHCIEILNTYLIIK; LHCIEILNTYLIIKT;
HCIEILNTYLIIKTH; CIEILNTYLIIKTHP; IEILNTYLIIKTHPH; EILNTYLIIKTHPHT;
ILNTYLIIKTHPHTL; LNTYLIIKTHPHTLS; NTYLIIKTHPHTLSL;
TYLIIKTHPHTLSLL; YLIIKTHPHTLSLLH; LIIKTHPHTLSLLHT;
IIKTHPHTLSLLHTQ; LISKTPALFLQALLG; GLLPFFFFWVVLSVE;
LLPFFFFWVVLSVEN; LPFFFFWVVLSVENL; PFFFFWVVLSVENLL;
FFFFWVVLSVENLLL; FFFWVVLSVENLLLL; FFWVVLSVENLLLLL;
FWVVLSVENLLLLLH; WVVLSVENLLLLLHH; VVLSVENLLLLLHHW;
VLSVENLLLLLHHWQ; LSVENLLLLLHHWQT; SVENLLLLLHHWQTY;
VENLLLLLHHWQTYL; ENLLLLLHHWQTYLH; NLLLLLHHWQTYLHG;
LLLLLHHWQTYLHGK; LLLLHHWQTYLHGKI; LLLHHWQTYLHGKIN;
LLHHWQTYLHGKINL; LHHWQTYLHGKINLH; HHWQTYLHGKINLHP;
HWQTYLHGKINLHPI; WQTYLHGKINLHPIF; QTYLHGKINLHPIFH;
RNSTRTPTLLFHRLA; NSTRTPTLLFHRLAP; STRTPTLLFHRLAPI;
TRTPTLLFHRLAPIK; RTPTLLFHRLAPIKK; TPTLLFHRLAPIKKI;
PTLLFHRLAPIKKII; TLLFHRLAPIKKIIT; GLLIFYYLSKYKLVT;
LLIFYYLSKYKLVTL; LIFYYLSKYKLVTLK; IFYYLSKYKLVTLKL;
ISEGSFSNYLDPPLQ; SEGSFSNYLDPPLQS; EGSFSNYLDPPLQSF;
GSFSNYLDPPLQSFF; SFSNYLDPPLQSFFS; AKPLCEAVNAVAIYP;
KPLCEAVNAVAIYPN; PLCEAVNAVAIYPNQ; LCEAVNAVAIYPNQG;
CEAVNAVAIYPNQGL; EAVNAVAIYPNQGLF; AVNAVAIYPNQGLFS;
HARAVHRRLFGTNRP; ARAVHRRLFGTNRPF; RAVHRRLFGTNRPFL;
AVHRRLFGTNRPFLA; VHRRLFGTNRPFLAV; HRRLFGTNRPFLAVQ;
RRLFGTNRPFLAVQG; RLFGTNRPFLAVQGI; LFGTNRPFLAVQGIW;
FGTNRPFLAVQGIWA; GTNRPFLAVQGIWAK; TNRPFLAVQGIWAKR;
NRPFLAVQGIWAKRK; RPFLAVQGIWAKRKI; PFLAVQGIWAKRKIS;
FLAVQGIWAKRKIST; LAVQGIWAKRKISTN; AVQGIWAKRKISTNL;
ATPGSKIRLMSYLYI; TPGSKIRLMSYLYIL; PGSKIRLMSYLYILL;
GSKIRLMSYLYILLH; SKIRLMSYLYILLHF; KIRLMSYLYILLHFF;
IRLMSYLYILLHFFI; RLMSYLYILLHFFIQ; LMSYLYILLHFFIQS;
MSYLYILLHFFIQSI; SYLYILLHFFIQSIH; YLYILLHFFIQSIHS; LYILLHFFIQSIHSL;
YILLHFFIQSIHSLH; ILLHFFIQSIHSLHF; LLHFFIQSIHSLHFI; LHFFIQSIHSLHFIL;
HFFIQSIHSLHFILV; FFIQSIHSLHFILVA; FIQSIHSLHFILVAP; IQSIHSLHFILVAPF;
QSIHSLHFILVAPFV; SIHSLHFILVAPFVR; IHSLHFILVAPFVRV;
HSLHFILVAPFVRVK; SLHFILVAPFVRVKF; LHFILVAPFVRVKFL;
HFILVAPFVRVKFLT; KVHELHGFFPVKNFI; VHELHGFFPVKNFIH

16 mers:

ASEKASTPLLLERKGG; SEKASTPLLLERKGGG; EKASTPLLLERKGGGR;
KASTPLLLERKGGGRG; ASTPLLLERKGGGRGG; STPLLLERKGGGRGGL;
TPLLLERKGGGRGGLG; PLLLERKGGGRGGLGL; LLLERKGGGRGGLGLL;
LLERKGGGRGGLGLLY; LERKGGGRGGLGLLYI; ERKGGGRGGLGLLYII;
RKGGGRGGLGLLYIIK; KGGGRGGLGLLYIIKK; GGGRGGLGLLYIIKKK;
GGRGGLGLLYIIKKKA; GRGGLGLLYIIKKKAT; RGGLGLLYIIKKKATG;
GGLGLLYIIKKKATGR; GLGLLYIIKKKATGRS; LGLLYIIKKKATGRSC;
GLLYIIKKKATGRSCL; LLYIIKKKATGRSCLP; LYIIKKKATGRSCLPM;
YIIKKKATGRSCLPME; IIKKKATGRSCLPMEC; IKKKATGRSCLPMECS;
KKKATGRSCLPMECSQ; KKATGRSCLPMECSQT; KATGRSCLPMECSQTM;
ATGRSCLPMECSQTMT; TGRSCLPMECSQTMTS; GRSCLPMECSQTMTSG;
RSCLPMECSQTMTSGR; SCLPMECSQTMTSGRK; CLPMECSQTMTSGRKV;
LPMECSQTMTSGRKVH; PMECSQTMTSGRKVHD; MECSQTMTSGRKVHDS;
ECSQTMTSGRKVHDSQ; CSQTMTSGRKVHDSQG; SQTMTSGRKVHDSQGN;
QTMTSGRKVHDSQGNA; TMTSGRKVHDSQGNAA; MTSGRKVHDSQGNAAK;
TSGRKVHDSQGNAAKP; PQEGKCMTHREELLTH; QEGKCMTHREELLTHG;
EGKCMTHREELLTHGM; GKCMTHREELLTHGMQ; KCMTHREELLTHGMQP;
CMTHREELLTHGMQPN; MTHREELLTHGMQPNH; THREELLTHGMQPNHD;
HREELLTHGMQPNHDL; REELLTHGMQPNHDLR; EELLTHGMQPNHDLRK;
ELLTHGMQPNHDLRKE; LLTHGMQPNHDLRKES; LTHGMQPNHDLRKESA;
QTCFASLGILALSPVK; TCFASLGILALSPVKL; CFASLGILALSPVKLD;
FASLGILALSPVKLDK; ASLGILALSPVKLDKG; SLGILALSPVKLDKGH;
LGILALSPVKLDKGHG; GILALSPVKLDKGHGS; ILALSPVKLDKGHGSA;
LALSPVKLDKGHGSAP; ALSPVKLDKGHGSAPA; LSPVKLDKGHGSAPAV;
SPVKLDKGHGSAPAVT; PVKLDKGHGSAPAVTT; VKLDKGHGSAPAVTTS;
KLDKGHGSAPAVTTSF; LDKGHGSAPAVTTSFS; DKGHGSAPAVTTSFSE;
KGHGSAPAVTTSFSES; GHGSAPAVTTSFSESW; NLDWNKKKSSEDFYFY;
LDWNKKKSSEDFYFYF; DWNKKKSSEDFYFYFR; WNKKKSSEDFYFYFRA;
NKKKSSEDFYFYFRAF; KKKSSEDFYFYFRAFA; KKSSEDFYFYFRAFAG;
KSSEDFYFYFRAFAGI; SSEDFYFYFRAFAGIL; RQCRREKQKYHCFTCC;
QCRREKQKYHCFTCCK; CRREKQKYHCFTCCKR; RREKQKYHCFTCCKRL;
REKQKYHCFTCCKRLC; EKQKYHCFTCCKRLCK; KQKYHCFTCCKRLCKR;
QKYHCFTCCKRLCKRL; KYHCFTCCKRLCKRLL; YHCFTCCKRLCKRLLG;
HCFTCCKRLCKRLLGK; SLFFCISRFMGAALAL; LFFCISRFMGAALALL;
FFCISRFMGAALALLG; FCISRFMGAALALLGD; CISRFMGAALALLGDL;
ISRFMGAALALLGDLV; SRFMGAALALLGDLVA; RFMGAALALLGDLVAS;
FMGAALALLGDLVASV; MGAALALLGDLVASVS; GAALALLGDLVASVSE;
AALALLGDLVASVSEA; ALALLGDLVASVSEAA; LALLGDLVASVSEAAA;
ALLGDLVASVSEAAAA; LLGDLVASVSEAAAAT; LGDLVASVSEAAAATG;
GDLVASVSEAAAATGF; DLVASVSEAAAATGFS; LVASVSEAAAATGFSV;
VASVSEAAAATGFSVA; ASVSEAAAATGFSVAE; SVSEAAAATGFSVAEI;
VSEAAAATGFSVAEIA; SEAAAATGFSVAEIAA; EAAAATGFSVAEIAAG;
AAAATGFSVAEIAAGE; AAATGFSVAEIAAGEA; AATGFSVAEIAAGEAA;
ATGFSVAEIAAGEAAA; TGFSVAEIAAGEAAAA; GFSVAEIAAGEAAAAI;
FSVAEIAAGEAAAAIE; SVAEIAAGEAAAAIEV; VAEIAAGEAAAAIEVQ;
AEIAAGEAAAAIEVQI; EIAAGEAAAAIEVQIA; IAAGEAAAAIEVQIAS;
AAGEAAAAIEVQIASL; AGEAAAAIEVQIASLA; GEAAAAIEVQIASLAT;
EAAAAIEVQIASLATV; AAAAIEVQIASLATVE; AAAIEVQIASLATVEG;
AAIEVQIASLATVEGI; AIEVQIASLATVEGIT; IEVQIASLATVEGITS;
EVQIASLATVEGITST; VQIASLATVEGITSTS; QIASLATVEGITSTSE;
IASLATVEGITSTSEA; ASLATVEGITSTSEAI; SLATVEGITSTSEAIA;
LATVEGITSTSEAIAA; ATVEGITSTSEAIAAI; TVEGITSTSEAIAAIG;
VEGITSTSEAIAAIGL; EGITSTSEAIAAIGLT; GITSTSEAIAAIGLTP;
ITSTSEAIAAIGLTPQ; TSTSEAIAAIGLTPQT; STSEAIAAIGLTPQTY;
TSEAIAAIGLTPQTYA; SEAIAAIGLTPQTYAV; EAIAAIGLTPQTYAVI;
AIAAIGLTPQTYAVIA; IAAIGLTPQTYAVIAG; AAIGLTPQTYAVIAGA;
AIGLTPQTYAVIAGAP; IGLTPQTYAVIAGAPG; GLTPQTYAVIAGAPGA;
LTPQTYAVIAGAPGAI; TPQTYAVIAGAPGAIA; PQTYAVIAGAPGAIAG;
QTYAVIAGAPGAIAGF; TYAVIAGAPGAIAGFA; YAVIAGAPGAIAGFAA;
AVIAGAPGAIAGFAAL; VIAGAPGAIAGFAALI; IAGAPGAIAGFAALIQ;
AGAPGAIAGFAALIQT; GAPGAIAGFAALIQTV; APGAIAGFAALIQTVS;
PGAIAGFAALIQTVSG; GAIAGFAALIQTVSGI; AIAGFAALIQTVSGIS;
IAGFAALIQTVSGISS; AGFAALIQTVSGISSL; GFAALIQTVSGISSLA;
FAALIQTVSGISSLAQ; AALIQTVSGISSLAQV; ALIQTVSGISSLAQVG;
LIQTVSGISSLAQVGY; IQTVSGISSLAQVGYK; QTVSGISSLAQVGYKF;
TVSGISSLAQVGYKFF; VSGISSLAQVGYKFFD; SGISSLAQVGYKFFDD;
GISSLAQVGYKFFDDW; ISSLAQVGYKFFDDWD; SSLAQVGYKFFDDWDH;
SLAQVGYKFFDDWDHK; LAQVGYKFFDDWDHKV; AQVGYKFFDDWDHKVS;
QVGYKFFDDWDHKVST; VGYKFFDDWDHKVSTV; GYKFFDDWDHKVSTVG;
YKFFDDWDHKVSTVGL; KFFDDWDHKVSTVGLY; FFDDWDHKVSTVGLYQ;
FDDWDHKVSTVGLYQQ; DDWDHKVSTVGLYQQS; DWDHKVSTVGLYQQSG;
WDHKVSTVGLYQQSGM; DHKVSTVGLYQQSGMA; HKVSTVGLYQQSGMAL;
KVSTVGLYQQSGMALE; VSTVGLYQQSGMALEL; STVGLYQQSGMALELF;
TVGLYQQSGMALELFN; VGLYQQSGMALELFNP; GLYQQSGMALELFNPD;
LYQQSGMALELFNPDE; YQQSGMALELFNPDEY; QQSGMALELFNPDEYY
QSGMALELFNPDEYYD; SGMALELFNPDEYYDI; GMALELFNPDEYYDIL;
MALELFNPDEYYDILF; ALELFNPDEYYDILFP; LELFNPDEYYDILFPG;
ELFNPDEYYDILFPGV; LFNPDEYYDILFPGVN; FNPDEYYDILFPGVNT;
NPDEYYDILFPGVNTF; PDEYYDILFPGVNTFV; DEYYDILFPGVNTFVN;
EYYDILFPGVNTFVNN; YYDILFPGVNTFVNNI; YDILFPGVNTFVNNIQ;
DILFPGVNTFVNNIQY; ILFPGVNTFVNNIQYL; LFPGVNTFVNNIQYLD;
FPGVNTFVNNIQYLDP; PGVNTFVNNIQYLDPR; GVNTFVNNIQYLDPRH;
VNTFVNNIQYLDPRHW; NTFVNNIQYLDPRHWG; TFVNNIQYLDPRHWGP;
FVNNIQYLDPRHWGPS; VNNIQYLDPRHWGPSL; NNIQYLDPRHWGPSLF;
NIQYLDPRHWGPSLFA; IQYLDPRHWGPSLFAT; QYLDPRHWGPSLFATI;
YLDPRHWGPSLFATIS; LDPRHWGPSLFATISQ; DPRHWGPSLFATISQA;
PRHWGPSLFATISQAL; RHWGPSLFATISQALW; HWGPSLFATISQALWH;
WGPSLFATISQALWHV; GPSLFATISQALWHVI; PSLFATISQALWHVIR;
SLFATISQALWHVIRD; LFATISQALWHVIRDD; FATISQALWHVIRDDI;
ATISQALWHVIRDDIP; TISQALWHVIRDDIPS; ISQALWHVIRDDIPSI;
SQALWHVIRDDIPSIT; QALWHVIRDDIPSITS; ALWHVIRDDIPSITSQ;
LWHVIRDDIPSITSQE; WHVIRDDIPSITSQEL; HVIRDDIPSITSQELQ;
VIRDDIPSITSQELQR; IRDDIPSITSQELQRR; RDDIPSITSQELQRRT;
DDIPSITSQELQRRTE; DIPSITSQELQRRTER; IPSITSQELQRRTERF;
PSITSQELQRRTERFF; SITSQELQRRTERFFR; ITSQELQRRTERFFRD;
TSQELQRRTERFFRDS; SQELQRRTERFFRDSL; QELQRRTERFFRDSLA;
ELQRRTERFFRDSLAR; LQRRTERFFRDSLARF; QRRTERFFRDSLARFL;
RRTERFFRDSLARFLE; RTERFFRDSLARFLEE; TERFFRDSLARFLEET;
ERFFRDSLARFLEETT; RFFRDSLARFLEETTW; FFRDSLARFLEETTWT;
FRDSLARFLEETTWTI; RDSLARFLEETTWTIV; DSLARFLEETTWTIVN;
SLARFLEETTWTIVNA; LARFLEETTWTIVNAP; ARFLEETTWTIVNAPI;
RFLEETTWTIVNAPIN; FLEETTWTIVNAPINF; LEETTWTIVNAPINFY;
EETTWTIVNAPINFYN; ETTWTIVNAPINFYNY; TTWTIVNAPINFYNYI;
TWTIVNAPINFYNYIQ; WTIVNAPINFYNYIQQ; TIVNAPINFYNYIQQY;
IVNAPINFYNYIQQYY; VNAPINFYNYIQQYYS; NAPINFYNYIQQYYSD;
APINFYNYIQQYYSDL; PINFYNYIQQYYSDLS; INFYNYIQQYYSDLSP;
NFYNYIQQYYSDLSPI; FYNYIQQYYSDLSPIR; YNYIQQYYSDLSPIRP;
NYIQQYYSDLSPIRPS; YIQQYYSDLSPIRPSM; IQQYYSDLSPIRPSMV;
QQYYSDLSPIRPSMVR; QYYSDLSPIRPSMVRQ; YYSDLSPIRPSMVRQV;
YSDLSPIRPSMVRQVA; SDLSPIRPSMVRQVAE; DLSPIRPSMVRQVAER;
LSPIRPSMVRQVAERE; SPIRPSMVRQVAEREG; PIRPSMVRQVAEREGT;
IRPSMVRQVAEREGTR; RPSMVRQVAEREGTRV; PSMVRQVAERFGTRVH;
SMVRQVAEREGTRVHF; MVRQVAEREGTRVHFG; VRQVAEREGTRVHFGH;
RQVAEREGTRVHFGHT; QVAEREGTRVHFGHTY; VAEREGTRVHFGHTYS;
AEREGTRVHFGHTYSI; EREGTRVHFGHTYSID; REGTRVHFGHTYSIDD;
EGTRVHFGHTYSIDDA; GTRVHFGHTYSIDDAD; TRVHFGHTYSIDDADS;
RVHFGHTYSIDDADSI; VHFGHTYSIDDADSIE; HFGHTYSIDDADSIEE;
FGHTYSIDDADSIEEV; GHTYSIDDADSIEEVT; HTYSIDDADSIEEVTQ;
TYSIDDADSIEEVTQR; YSIDDADSIEEVTQRM; SIDDADSIEEVTQRMD;
IDDADSIEEVTQRMDL; DDADSIEEVTQRMDLR; DADSIEEVTQRMDLRN;
ADSIEEVTQRMDLRNQ; DSIEEVTQRMDLRNQQ; SIEEVTQRMDLRNQQS;
IEEVTQRMDLRNQQSV; EEVTQRMDLRNQQSVH; EVTQRMDLRNQQSVHS;
VTQRMDLRNQQSVHSG; TQRMDLRNQQSVHSGE; QRMDLRNQQSVHSGEF;
RMDLRNQQSVHSGEFI; MDLRNQQSVHSGEFIE; DLRNQQSVHSGEFIEK;
LRNQQSVHSGEFIEKT; RNQQSVHSGEFIEKTI; NQQSVHSGEFIEKTIA;
QQSVHSGEFIEKTIAP; QSVHSGEFIEKTIAPG; SVHSGEFIEKTIAPGG;
VHSGEFIEKTIAPGGA; HSGEFIEKTIAPGGAN; SGEFIEKTIAPGGANQ;
GEFIEKTIAPGGANQR; EFIEKTIAPGGANQRT; FIEKTIAPGGANQRTA;
IEKTIAPGGANQRTAP; EKTIAPGGANQRTAPQ; KTIAPGGANQRTAPQW;
TIAPGGANQRTAPQWM; IAPGGANQRTAPQWML; APGGANQRTAPQWMLP;
PGGANQRTAPQWMLPL; GGANQRTAPQWMLPLL; GANQRTAPQWMLPLLL;
ANQRTAPQWMLPLLLG; NQRTAPQWMLPLLLGL; QRTAPQWMLPLLLGLY;
RTAPQWMLPLLLGLYG; TAPQWMLPLLLGLYGT; APQWMLPLLLGLYGTV;
PQWMLPLLLGLYGTVT; QWMLPLLLGLYGTVTP; WMLPLLLGLYGTVTPA;
MLPLLLGLYGTVTPAL; LPLLLGLYGTVTPALE; PLLLGLYGTVTPALEA;
LLLGLYGTVTPALEAY; LLGLYGTVTPALEAYE; LGLYGTVTPALEAYED;
GLYGTVTPALEAYEDG; LYGTVTPALEAYEDGP; YGTVTPALEAYEDGPN;
GTVTPALEAYEDGPNQ; TVTPALEAYEDGPNQK; VTPALEAYEDGPNQKK;
TPALEAYEDGPNQKKR; PALEAYEDGPNQKKRR; ALEAYEDGPNQKKRRV;
LEAYEDGPNQKKRRVS; EAYEDGPNQKKRRVSR; AYEDGPNQKKRRVSRG;
YEDGPNQKKRRVSRGS; EDGPNQKKRRVSRGSS; DGPNQKKRRVSRGSSQ;
GPNQKKRRVSRGSSQK; PNQKKRRVSRGSSQKA; NQKKRRVSRGSSQKAK;
QKKRRVSRGSSQKAKG; KKRRVSRGSSQKAKGT; KRRVSRGSSQKAKGTR;
RRVSRGSSQKAKGTRA; RVSRGSSQKAKGTRAS; VSRGSSQKAKGTRASA;
SRGSSQKAKGTRASAK; RGSSQKAKGTRASAKT; GSSQKAKGTRASAKTT;
SSQKAKGTRASAKTTN; SQKAKGTRASAKTTNK; QKAKGTRASAKTTNKR;
KAKGTRASAKTTNKRR; AKGTRASAKTTNKRRS; KGTRASAKTTNKRRSR;
GTRASAKTTNKRRSRS; TRASAKTTNKRRSRSS; RASAKTTNKRRSRSSR;
ASAKTTNKRRSRSSRS; NWGRCYYRGRMLPKPR; WGRCYYRGRMLPKPRN;
GRCYYRGRMLPKPRNG; RCYYRGRMLPKPRNGG; CYYRGRMLPKPRNGGS;
YYRGRMLPKPRNGGSR; PREKNASLLQHSKNSP; REKNASLLQHSKNSPP;
EKNASLLQHSKNSPPQ; KNASLLQHSKNSPPQF; NASLLQHSKNSPPQFK;
GPNLWKSTDVGGCNCT; PNLWKSTDVGGCNCTN; NLWKSTDVGGCNCTNR;
LWKSTDVGGCNCTNRG; WKSTDVGGCNCTNRGY; KSTDVGGCNCTNRGYW;
STDVGGCNCTNRGYWN; TDVGGCNCTNRGYWNN; FPLLCCRWRTLGNAGS;
PLLCCRWRTLGNAGSA; LLCCRWRTLGNAGSAN; LCCRWRTLGNAGSANE;
CCRWRTLGNAGSANEL; CRWRTLGNAGSANELQ; RWRTLGNAGSANELQV;
WRTLGNAGSANELQVK; RTLGNAGSANELQVKV; TLGNAGSANELQVKVP;
VFWDFHRRGKCSPSTS; FWDFHRRGKCSPSTSC; WDFHRRGKCSPSTSCD;
DFHRRGKCSPSTSCDQ; FHRRGKCSPSTSCDQH; HRRGKCSPSTSCDQHS;
RRGKCSPSTSCDQHSY; RGKCSPSTSCDQHSYH; GKCSPSTSCDQHSYHS;
KCSPSTSCDQHSYHSV; CSPSTSCDQHSYHSVA; SPSTSCDQHSYHSVAR;
DPPEKKICKESLPNFL; PPEKKICKEFSLPNFLF; PEKKICKESLPNFLFA;
EKKICKESLPNFLFAK; PYKQENPESGWAAYVW; YKQENPESGWAAYVWY;
KQENPESGWAAYVWYG; QENPESGWAAYVWYGI; ENPESGWAAYVWYGIP;
NPESGWAAYVWYGIPG; PESGWAAYVWYGIPGR; ESGWAAYVWYGIPGRR;
SGWAAYVWYGIPGRRG; QTGTIANQNALNRCFY; TGTIANQNALNRCFYC;
GTIANQNALNRCFYCT; TIANQNALNRCFYCTY; IANQNALNRCFYCTYT;
ANQNALNRCFYCTYTF; NQNALNRCFYCTYTFN; QNALNRCFYCTYTFNK;
NALNRCFYCTYTFNKC; ALNRCFYCTYTFNKCC; LNRCFYCTYTFNKCCF;
NRCFYCTYTFNKCCFC; RCFYCTYTFNKCCFCI; CFYCTYTFNKCCFCIS;
FYCTYTFNKCCFCISH; YCTYTFNKCCFCISHF; NTESLYTNATLDYGGL;
TESLYTNATLDYGGLT; ESLYTNATLDYGGLTF; SLYTNATLDYGGLTFG;
LYTNATLDYGGLTFGN; YTNATLDYGGLTFGNL; TNATLDYGGLTFGNLQ;
NATLDYGGLTFGNLQQ; ATLDYGGLTFGNLQQG; TLDYGGLTFGNLQQGL;
LDYGGLTFGNLQQGLK; DYGGLTFGNLQQGLKY; YGGLTFGNLQQGLKYL;
GGLTFGNLQQGLKYLR; GLTFGNLQQGLKYLRL; LTFGNLQQGLKYLRLG;
TFGNLQQGLKYLRLGK; FGNLQQGLKYLRLGKS; GNLQQGLKYLRLGKSI;
NLQQGLKYLRLGKSIV; LQQGLKYLRLGKSIVI; QQGLKYLRLGKSIVIG;
QGLKYLRLGKSIVIGI; GLKYLRLGKSIVIGIQ; LKYLRLGKSIVIGIQC;
KYLRLGKSIVIGIQCL; YLRLGKSIVIGIQCLI; LRLGKSIVIGIQCLIH;
RLGKSTVIGIQCLIHV; LGKSIVIGIQCLIHVQ; GKSIVIGIQCLIHVQS;
KSIVIGIQCLIHVQSL; SIVIGIQCLIHVQSLQ; IVIGIQCLIHVQSLQF;
VIGIQCLIHVQSLQFL; IGIQCLIHVQSLQFLN; GIQCLIHVQSLQFLNP;
IQCLIHVQSLQFLNPL; QCLIHVQSLQFLNPLL; CLIHVQSLQFLNPLLL;
YQEYISPCIYYISSLK; QEYISPCIYYISSLKK; EYISPCIYYISSLKKY;
YISPCIYYISSLKKYT; ISPCIYYISSLKKYTY; SPCIYYISSLKKYTYL;
PCIYYISSLKKYTYLS; CIYYISSLKKYTYLSQ; IYYISSLKKYTYLSQN;
YYISSLKKYTYLSQNP; YISSLKKYTYLSQNPA; ISSLKKYTYLSQNPAF;
SSLKKYTYLSQNPAFP; SLKKYTYLSQNPAFPS; LKKYTYLSQNPAFPSI;
KKYTYLSQNPAFPSIQ; KYTYLSQNPAFPSIQQ; YTYLSQNPAFPSIQQF;
TKLAVATRSFHFVKFF; KLAVATRSFHFVKFFF; LAVATRSFHFVKFFFQ;
AVATRSFHFVKFFFQV; VATRSFHFVKFFFQVR; ATRSFHFVKFFFQVRT;
TRSFHFVKFFFQVRTL; RSFHFVKFFFQVRTLS; SFHFVKFFFQVRTLSF;
FHFVKFFFQVRTLSFV; HFVKFFFQVRTLSFVR; FVKFFFQVRTLSFVRI;
VKFFFQVRTLSFVRIF; KFFFQVRTLSFVRIFL; FFFQVRTLSFVRIFLN;
FFQVRTLSFVRIFLNI; FQVRTLSFVRIFLNIF; QVRTLSFVRIFLNIFW;
VRTLSFVRIFLNIFWA; PSLVEIFGFFCLNVSF; SLVEIFGFFCLNVSFL;
LVEIFGFFCLNVSFLN; VEIFGFFCLNVSFLNL; EIFGFFCLNVSFLNLP;
HFHLNNLSNCLNCLFH; FHLNNLSNCLNCLFHV; HLNNLSNCLNCLFHVL;
LNNLSNCLNCLFHVLK; NNLSNCLNCLFHVLKA; NLSNCLNCLFHVLKAN
LSNCLNCLFHVLKANP; SNCLNCLFHVLKANPL; NCLNCLFHVLKANPLI;
CLNCLFHVLKANPLIQ; LNCLFHVLKANPLIQL; NCLFHVLKANPLIQLL;
CLFHVLKANPLIQLLS; LFHVLKANPLIQLLSL; FHVLKANPLIQLLSLL;
HVLKANPLIQLLSLLH; VLKANPLIQLLSLLHL; LKANPLIQLLSLLHLQ;
KANPLIQLLSLLHLQK; ANPLIQLLSLLHLQKQ; NPLIQLLSLLHLQKQP;
PLIQLLSLLHLQKQPC; LIQLLSLLHLQKQPCT; IQLLSLLHLQKQPCTD;
QLLSLLHLQKQPCTDL; LHLAQRLAFPWVGLHL; HLAQRLAFPWVGLHLR;
LAQRLAFPWVGLHLRL; AQRLAFPWVGLHLRLY; QRLAFPWVGLHLRLYH;
RLAFPWVGLHLRLYHH; LAFPWVGLHLRLYHHT; AFPWVGLHLRLYHHTN;
FPWVGLHLRLYHHTNL; PWVGLHLRLYHHTNLI; WVGLHLRLYHHTNLIT;
VGLHLRLYHHTNLITL; GLHLRLYHHTNLITLQ; LHLRLYHHTNLITLQL;
HLRLYHHTNLITLQLV; LRLYHHTNLITLQLVL; RLYHHTNLITLQLVLF;
LYHHTNLITLQLVLFF; YHHTNLITLQLVLFFH; HHTNLITLQLVLFFHY;
HTNLITLQLVLFFHYQ; TNLITLQLVLFFHYQW; NLITLQLVLFFHYQWD;
LITLQLVLFFHYQWDL; VANSAAKQHLPYIVLV; ANSAAKQHLPYIVLVQ;
NSAAKQHLPYIVLVQH; SAAKQHLPYIVLVQHF; AAKQHLPYIVLVQHFH;
AKQHLPYIVLVQHFHE; KQHLPYIVLVQHFHEL; QHLPYIVLVQHFHELQ;
HLPYIVLVQHFHELQI; LPYIVLVQHFHELQIL; PYIVLVQHFHELQILN;
YIVLVQHFHELQILNP; IVLVQHFHELQILNPF; VLVQHFHELQILNPFY;
LVQHFHELQILNPFYL; VQHFHELQILNPFYLI; QHFHELQILNPFYLIY;
HFHELQILNPFYLIYD; IFLLAFLPWSYEGYLL; FLLAFLPWSYEGYLLF;
LLAFLPWSYEGYLLFF; LKLYLLLADKYFFDFY; KLYLLLADKYFFDFYF;
LYLLLADKYFFDFYFL; YLLLADKYFFDFYFLQ; LLLADKYFFDFYFLQK;
SDKAGLFSDTFYTPLH; DKAGLFSDTFYTPLHC; KAGLFSDTFYTPLHCI;
AGLFSDTFYTPLHCIE; GLFSDTFYTPLHCIEI; LFSDTFYTPLHCIEIL;
FSDTFYTPLHCIEILN; SDTFYTPLHCIEILNT; DTFYTPLHCIEILNTY;
TFYTPLHCIEILNTYL; FYTPLHCIEILNTYLI; YTPLHCIEILNTYLII;
TPLHCIEILNTYLIIK; PLHCIEILNTYLIIKT; LHCIEILNTYLIIKTH;
HCIEILNTYLIIKTHP; CIEILNTYLIIKTHPH; IEILNTYLIIKTHPHT;
EILNTYLIIKTHPHTL; ILNTYLIIKTHPHTLS; LNTYLIIKTHPHTLSL;
NTYLIIKTHPHTLSLL; TYLIIKTHPHTLSLLH; YLIIKTHPHTLSLLHT;
LIIKTHPHTLSLLHTQ; GLLPFFFFWVVLSVEN; LLPFFFFWVVLSVENL;
LPFFFFWVVLSVENLL; PFFFFWVVLSVENLLL; FFFFWVVLSVENLLLL;
FFFWVVLSVENLLLLL; FFWVVLSVENLLLLLH; FWVVLSVENLLLLLHH;
WVVLSVENLLLLLHHW; VVLSVENLLLLLHHWQ; VLSVENLLLLLHHWQT;
LSVENLLLLLHHWQTY; SVENLLLLLHHWQTYL; VENLLLLLHHWQTYLH;
ENLLLLLHHWQTYLHG; NLLLLLHHWQTYLHGK; LLLLLHHWQTYLHGKI;
LLLLHHWQTYLHGKIN; LLLHHWQTYLHGKINL; LLHHWQTYLHGKINLH;
LHHWQTYLHGKINLHP; HHWQTYLHGKINLHPI; HWQTYLHGKINLHPIF;
WQTYLHGKINLHPIFH; RNSTRTPTLLFHRLAP; NSTRTPTLLFHRLAPI;
STRTPTLLFHRLAPIK; TRTPTLLFHRLAPIKK; RTPTLLFHRLAPIKKI;
TPTLLFHRLAPIKKII; PTLLFHRLAPIKKIIT; GLLIFYYLSKYKLVTL;
LLIFYYLSKYKLVTLK; LIFYYLSKYKLVTLKL; ISEGSFSNYLDPPLQS;
SEGSFSNYLDPPLQSF; EGSFSNYLDPPLQSFF; GSFSNYLDPPLQSFFS;
AKPLCEAVNAVAIYPN; KPLCEAVNAVAIYPNQ; PLCEAVNAVAIYPNQG;
LCEAVNAVAIYPNQGL; CEAVNAVAIYPNQGLF; EAVNAVAIYPNQGLFS;
HARAVHRRLFGTNRPF; ARAVHRRLFGTNRPFL; RAVHRRLFGTNRPFLA;
AVHRRLFGTNRPFLAV; VHRRLFGTNRPFLAVQ; HRRLFGTNRPFLAVQG;
RRLFGTNRPFLAVQGI; RLFGTNRPFLAVQGIW; LFGTNRPFLAVQGIWA;
FGTNRPFLAVQGIWAK; GTNRPFLAVQGIWAKR; TNRPFLAVQGIWAKRK;
NRPFLAVQGIWAKRKI; RPFLAVQGIWAKRKIS; PFLAVQGIWAKRKIST;
FLAVQGIWAKRKISTN; LAVQGIWAKRKISTNL; ATPGSKIRLMSYLYIL;
TPGSKIRLMSYLYILL; PGSKIRLMSYLYILLH; GSKIRLMSYLYILLHF;
SKIRLMSYLYILLHFF; KIRLMSYLYILLHFFI; IRLMSYLYILLHFFIQ;
RLMSYLYILLHFFIQS; LMSYLYILLHFFIQSI; MSYLYILLHFFIQSIH;
SYLYILLHFFIQSIHS; YLYILLHFFIQSIHSL; LYILLHFFIQSIHSLH;
YILLHFFIQSIHSLHF; ILLHFFIQSIHSLHFI; LLHFFIQSIHSLHFIL;
LHFFIQSIHSLHFILV; HFFIQSIHSLHFILVA; FFIQSIHSLHFILVAP;
FIQSIHSLHFILVAPF; IQSIHSLHFILVAPFV; QSIHSLHFILVAPFVR;
SIHSLHFILVAPFVRV; IHSLHFILVAPFVRVK; HSLHFILVAPFVRVKF;
SLHFILVAPFVRVKFL; LHFILVAPFVRVKFLT; HFILVAPFVRVKFLT

BK virus reverse reading frame 1
13 mers:

MDKVLNREESMEL; DKVLNREESMELM; KVLNREESMELMD;
VLNREESMELMDL; LNREESMELMDLL; NREESMELMDLLG; RFESMELMDLLGL;
EESMELMDLLGLE; ESMELMDLLGLER; SMELMDLLGLERA; MELMDLLGLERAA;
ELMDLLGLERAAW; LMDLLGLERAAWG; MDLLGLERAAWGN;
DLLGLERAAWGNL; LLGLERAAWGNLP; LGLERAAWGNLPL;
GLERAAWGNLPLM; LERAAWGNLPLMR; ERAAWGNLPLMRK
RAAWGNLPLMRKA; AAWGNLPLMRKAY; AWGNLPLMRKAYL;
WGNLPLMRKAYLR; GNLPLMRKAYLRK; NLPLMRKAYLRKC;
LPLMRKAYLRKCK; PLMRKAYLRKCKE; LMRKAYLRKCKEF;
MRKAYLRKCKEFH; RKAYLRKCKEFHP; KAYLRKCKEFHPD; AYLRKCKEFHPDK;
YLRKCKEFHPDKG; LRKCKEFHPDKGG; RKCKEFHPDKGGD; KCKEFHPDKGGDE;
CKEFHPDKGGDED; KEFHPDKGGDEDK; EFHPDKGGDEDKM;
FHPDKGGDEDKMK; HPDKGGDEDKMKR; PDKGGDEDKMKRM;
DKGGDEDKMKRMN; KGGDEDKMKRMNT; GGDEDKMKRMNTL;
GDEDKMKRMNTLY; DEDKMKRMNTLYK; EDKMKRMNTLYKK;
DKMKRMNTLYKKM; KMKRMNTLYKKME; MKRMNTLYKKMEQ;
KRMNTLYKKMEQD; RMNTLYKKMEQDV; MNTLYKKMEQDVK;
NTLYKKMEQDVKV; TLYKKMEQDVKVA; LYKKMEQDVKVAH;
YKKMEQDVKVAHQ; KKMEQDVKVAHQP; KMEQDVKVAHQPD;
MEQDVKVAHQPDF; EQDVKVAHQPDFG; QDVKVAHQPDFGT;
DVKVAHQPDFGTW; VKVAHQPDFGTWS; KVAHQPDFGTWSS;
VAHQPDFGTWSSS; AHQPDFGTWSSSE; HQPDFGTWSSSEV; QPDFGTWSSSEVC;
PDFGTWSSSEVCA; DFGTWSSSEVCAD; FGTWSSSEVCADF; GTWSSSEVCADFP;
TWSSSEVCADFPL; WSSSEVCADFPLC; SSSEVCADFPLCP; SSEVCADFPLCPD;
SEVCADFPLCPDT; EVCADFPLCPDTL; VCADFPLCPDTLY; CADFPLCPDTLYC;
ADFPLCPDTLYCK; DFPLCPDTLYCKE; FPLCPDTLYCKEW; PLCPDTLYCKEWP;
LCPDTLYCKEWPI; CPDTLYCKEWPIC; PDTLYCKEWPICS; DTLYCKEWPICSK;
TLYCKEWPICSKK; LYCKEWPICSKKP; YCKEWPICSKKPS; CKEWPICSKKPSV;
KEWPICSKKPSVH; EWPICSKKPSVHC; WPICSKKPSVHCP; PICSKKPSVHCPC;
ICSKKPSVHCPCM; CSKKPSVHCPCML; SKKPSVHCPCMLC; KKPSVHCPCMLCQ;
KPSVHCPCMLCQL; PSVHCPCMLCQLR; SVHCPCMLCQLRL; VHCPCMLCQLRLR;
HCPCMLCQLRLRH; CPCMLCQLRLRHL; PCMLCQLRLRHLN; CMLCQLRLRHLNR;
MLCQLRLRHLNRK; LCQLRLRHLNRKF; CQLRLRHLNRKFL; QLRLRHLNRKFLR;
LRLRHLNRKFLRK; RLRHLNRKFLRKE; LRHLNRKFLRKEP; RHLNRKFLRKEPL;
HLNRKFLRKEPLV; LNRKFLRKEPLVW; NRKFLRKEPLVWI; RKFLRKEPLVWID;
KFLRKEPLVWIDC; FLRKEPLVWIDCY; LRKEPLVWIDCYC; RKEPLVWIDCYCI;
KEPLVWIDCYCID; EPLVWIDCYCIDC; PLVWIDCYCIDCF; LVWIDCYCIDCFT;
VWIDCYCIDCFTQ; WIDCYCIDCFTQW; IDCYCIDCFTQWF; DCYCIDCFTQWFG;
CYCIDCFTQWFGL; YCIDCFTQWFGLD; CIDCFTQWFGLDL; IDCFTQWFGLDLT;
DCFTQWFGLDLTE; CFTQWFGLDLTEE; FTQWFGLDLTEET; TQWFGLDLTEETL;
QWFGLDLTEETLQ; WFGLDLTEETLQW; FGLDLTEETLQWW;
GLDLTEETLQWWV; LDLTEETLQWWVQ; DLTEETLQWWVQI; LTEETLQWWVQII;
TEETLQWWVQIIG; EETLQWWVQIIGE; ETLQWWVQIIGET; TLQWWVQIIGETP;
LQWWVQIIGETPF; QWWVQIIGETPFR; WWVQIIGETPFRD; WVQIIGETPFRDL;
VQIIGETPFRDLK; QIIGETPFRDLKL; KALSNYFFYRCQP; ALSNYFFYRCQPM;
LSNYFFYRCQPME; SNYFFYRCQPMEQ; NYFFYRCQPMEQK; YFFYRCQPMEQKS;
FFYRCQPMEQKSG; FYRCQPMEQKSGS; YRCQPMEQKSGSP; RCQPMEQKSGSPG;
CQPMEQKSGSPGG; QPMEQKSGSPGGV; PMEQKSGSPGGVP; MEQKSGSPGGVPL;
EQKSGSPGGVPLM; QKSGSPGGVPLMK; KSGSPGGVPLMKN; SGSPGGVPLMKNG;
GSPGGVPLMKNGM; SPGGVPLMKNGMK; PGGVPLMKNGMKI;
GGVPLMKNGMKIY; GVPLMKNGMKIYF; VPLMKNGMKIYFA;
PLMKNGMKIYFAM; LMKNGMKIYFAMK; MKNGMKIYFAMKI;
KNGMKIYFAMKIC; NGMKIYFAMKICL; GMKIYFAMKICLP; MKIYFAMKICLPV;
KIYFAMKICLPVM; IYFAMKICLPVMK; YFAMKICLPVMKK; FAMKICLPVMKKQ;
AMKICLPVMKKQQ; MKICLPVMKKQQQ; KICLPVMKKQQQI; ICLPVMKKQQQIL;
CLPVMKKQQQILN; LPVMKKQQQILNT; PVMKKQQQILNTQ; VMKKQQQILNTQH;
MKKQQQILNTQHH; KKQQQILNTQHHP; KQQQILNTQHHPK; QQQILNTQHHPKK;
QQILNTQHHPKKK; QILNTQHHPKKKE; ILNTQHHPKKKER; KTLKTFPLIYTSF;
TLKTFPLIYTSFL; LKTFPLIYTSFLV; KTFPLIYTSFLVK; TFPLIYTSFLVKL;
FPLIYTSFLVKLY; PLIYTSFLVKLYL; LIYTSFLVKLYLV; IYTSFLVKLYLVI;
YTSFLVKLYLVIE; TSFLVKLYLVIEP; SFLVKLYLVIEPL; FLVKLYLVIEPLP;
LVKLYLVIEPLPA; VKLYLVIEPLPAL; KLYLVIEPLPALL; LYLVIEPLPALLC;
YLVIEPLPALLCI; LVIEPLPALLCIL; VIEPLPALLCILL; IEPLPALLCILLK;
EPLPALLCILLKK; PLPALLCILLKKK; LPALLCILLKKKL; PALLCILLKKKLK;
ALLCILLKKKLKF; LLCILLKKKLKFC; LCILLKKKLKFCI; CILLKKKLKFCIK;
ILLKKKLKFCIKN; LLKKKLKFCIKNL; LKKKLKFCIKNLW; KKKLKFCIKNLWK;
KKLKFCIKNLWKN; KLKFCIKNLWKNI; LKFCIKNLWKNIL; LLLVDTCVLGIIL;
LLVDTCVLGIILY; LVDTCVLGIILYS; VDTCVLGIILYSF; LHIDIEFLQLIIS;
HIDIEFLQLIISV; IDIEFLQLIISVK; DIEFLQLIISVKS; IEFLQLIISVKSC;
EFLQLIISVKSCV; FLQLIISVKSCVP; LQLIISVKSCVPL; QLIISVKSCVPLV;
LIISVKSCVPLVF; FVRVLIRNTYYIV; VRVLIRNTYYIVP; RSMILAQKSLKKQ;
SMILAQKSLKKQS; MILAQKSLKKQSR; ILAQKSLKKQSRC; LAQKSLKKQSRCL;
AQKSLKKQSRCLG; QKSLKKQSRCLGN; RSVKSVRKKTSLI; SVKSVRKKTSLIT;
VKSVRKKTSLITL; KSVRKKTSLITLS; SVRKKTSLITLSI; VRKKTSLITLSIM;
RKKTSLITLSIMK; KKTSLITLSIMKS; KTSLITLSIMKST; TSLITLSIMKSTL;
SLITLSIMKSTLQ; LITLSIMKSTLQM; ITLSIMKSTLQML; TLSIMKSTLQMLL;
LSIMKSTLQMLLF; SIMKSTLQMLLFL; IMKSTLQMLLFLQ; MKSTLQMLLFLQK;
KSTLQMLLFLQKV; STLQMLLFLQKVK; TLQMLLFLQKVKI; LQMLLFLQKVKIK;
QMLLFLQKVKIKK; MLLFLQKVKIKKV; LLFLQKVKIKKVF; LFLQKVKIKKVFV;
FLQKVKIKKVFVS; LQKVKIKKVFVSK; QKVKIKKVFVSKQ; NNIWQVLLGCTVC;
NIWQVLLGCTVCY; IWQVLLGCTVCYL; WQVLLGCTVCYLK;
QVLLGCTVCYLKW; VLLGCTVCYLKWI; LLGCTVCYLKWIL; YLIFCTVLFSMYL;
LIFCTVLFSMYLK; IFCTVLFSMYLKE; FCTVLFSMYLKED; CTVLFSMYLKEDT;
TVLFSMYLKEDTG; VLFSMYLKEDTGY; LFSMYLKEDTGYL; FSMYLKEDTGYLK;
SMYLKEDTGYLKV; MYLKEDTGYLKVP; YLKEDTGYLKVPL; LKEDTGYLKVPLI;
KEDTGYLKVPLIV; EDTGYLKVPLIVE; DTGYLKVPLIVEK; TGYLKVPLIVEKQ;
GYLKVPLIVEKQH; KGQELNQRICLQD; GQELNQRICLQDM; QELNQRICLQDME;
TKEPKYFHQAWLQ; MSILSLKPCKLDL; ENPYKTQSSYLKK; NPYKTQSSYLKKE;
PYKTQSSYLKKEF; YKTQSSYLKKEFY; KTQSSYLKKEFYK; TQSSYLKKEFYKV;
QSSYLKKEFYKVE; LILQLIYNLELLN; ILQLIYNLELLNG; LQLIYNLELLNGR;
QLIYNLELLNGRK; LIYNLELLNGRKG; IYNLELLNGRKGW; YNLELLNGRKGWI;
NLELLNGRKGWIL; LELLNGRKGWILR; NIIYAWGNVFLIL; IIYAWGNVFLILQ;
IYAWGNVFLILQE; YAWGNVFLILQEK; AWGNVFLILQEKR; WGNVFLILQEKRI;
GNVFLILQEKRIQ; NVFLILQEKRIQK; VFLILQEKRIQKL; FLILQEKRIQKLK;
LILQEKRIQKLKT; ILQEKRIQKLKTL; LQEKRIQKLKTLD; QEKRIQKLKTLDM;
EKRIQKLKTLDMD; KRIQKLKTLDMDQ; RIQKLKTLDMDQA; IQKLKTLDMDQAL;
QKLKTLDMDQALN; KLKTLDMDQALNP; LKTLDMDQALNPN;
KTLDMDQALNPNH; TLDMDQALNPNHN; LDMDQALNPNHNA;
DMDQALNPNHNAL; MDQALNPNHNALP; DQALNPNHNALPK;
QALNPNHNALPKS; ALNPNHNALPKSQ; LNPNHNALPKSQI; NPNHNALPKSQIL;
PNHNALPKSQILQ; NHNALPKSQILQP; HNALPKSQILQPL; NALPKSQILQPLL;
ALPKSQILQPLLK; LPKSQILQPLLKI; PKSQILQPLLKIP; KSQILQPLLKIPK;
SQILQPLLKIPKG; QILQPLLKIPKGQ; ILQPLLKIPKGQT; LQPLLKIPKGQTP;
QPLLKIPKGQTPI; PLLKIPKGQTPIV; LLKIPKGQTPIVK; LKIPKGQTPIVKS;
KIPKGQTPIVKSC; IPKGQTPIVKSCI; PKGQTPIVKSCIC; KGQTPIVKSCICV;
GQTPIVKSCICVK; QTPIVKSCICVKA; TPIVKSCICVKAF; PIVKSCICVKAFS;
IVKSCICVKAFSV; VKSCICVKAFSVL; KSCICVKAFSVLK; SCICVKAFSVLKG;
CICVKAFSVLKGL; ICVKAFSVLKGLK; CVKAFSVLKGLKH; VKAFSVLKGLKHH;
KAFSVLKGLKHHP; AFSVLKGLKHHPQ; FSVLKGLKHHPQN; SVLKGLKHHPQNN;
VLKGLKHHPQNNT; LKGLKHHPQNNTS; KGLKHHPQNNTSL; GLKHHPQNNTSLK;
LKHHPQNNTSLKV; KHHPQNNTSLKVA; HHPQNNTSLKVAY; HPQNNTSLKVAYT;
PQNNTSLKVAYTK; QNNTSLKVAYTKA; NNTSLKVAYTKAA; NTSLKVAYTKAAF;
TSLKVAYTKAAFI; SLKVAYTKAAFIK; LKVAYTKAAFIKC; KVAYTKAAFIKCI;
VAYTKAAFIKCIC; AYTKAAFIKCICT; YTKAAFIKCICTI; TKAAFIKCICTIK;
KAAFIKCICTIKA; AAFIKCICTIKAP; AFIKCICTIKAPV; SILVCNCPCLSIY;
ILVCNCPCLSIYL; LVCNCPCLSIYLI; VCNCPCLSIYLII; CNCPCLSIYLIIS;
NCPCLSIYLIISG; CPCLSIYLIISGS; PCLSIYLIISGSP; CLSIYLIISGSPG;
LSIYLIISGSPGS; SIYLIISGSPGSL; IYLIISGSPGSLS; YLIISGSPGSLSV;
LIISGSPGSLSVP; IISGSPGSLSVPS; ISGSPGSLSVPSN; SGSPGSLSVPSNT;
GSPGSLSVPSNTL; SPGSLSVPSNTLT; PGSLSVPSNTLTS; GSLSVPSNTLTSS;
SLSVPSNTLTSST; LSVPSNTLTSSTW; SVPSNTLTSSTWD; VPSNTLTSSTWDS;
PSNTLTSSTWDSI; SNTLTSSTWDSIP; NTLTSSTWDSIPY; TLTSSTWDSIPYI;
LTSSTWDSIPYIG; TSSTWDSIPYIGC; SSTWDSIPYIGCP; STWDSIPYIGCPS;
TWDSIPYIGCPST; WDSIPYIGCPSTL; DSIPYIGCPSTLW; SIPYIGCPSTLWV;
IPYIGCPSTLWVL; PYIGCPSTLWVLL; YIGCPSTLWVLLF; IGCPSTLWVLLFI;
GCPSTLWVLLFIR; CPSTLWVLLFIRS; PSTLWVLLFIRSL; STLWVLLFIRSLS;
TLWVLLFIRSLSK; LWVLLFIRSLSKK; WVLLFIRSLSKKE; VLLFIRSLSKKEI;
LLFIRSLSKKEIG; GFFTDLFLRRILK; FFTDLFLRRILKY; FTDLFLRRILKYL;
TDLFLRRILKYLA; DLFLRRILKYLAR; LFLRRILKYLARP; FLRRILKYLARPL;
LRRILKYLARPLH; RRILKYLARPLHC; RILKYLARPLHCC; ILKYLARPLHCCV;
LKYLARPLHCCVP; KYLARPLHCCVPE; YLARPLHCCVPEL; LARPLHCCVPELL;
ARPLHCCVPELLV; RPLHCCVPELLVN; PLHCCVPELLVNR; LHCCVPELLVNRP;
HCCVPELLVNRPQ; CCVPELLVNRPQI; CVPELLVNRPQIS; VPELLVNRPQISA;
PELLVNRPQISAA; ELLVNRPQISAAE; LLVNRPQISAAET; LVNRPQISAAETY;
VNRPQISAAETYR; NRPQISAAETYRL; RPQISAAETYRLS; PQISAAETYRLSA;
QISAAETYRLSAL; ISAAETYRLSALQ; SAAETYRLSALQR; AAETYRLSALQRG;
AETYRLSALQRGP; ETYRLSALQRGPT; TYRLSALQRGPTP; YRLSALQRGPTPC;
RLSALQRGPTPCS; LSALQRGPTPCSS; SALQRGPTPCSSS; ALQRGPTPCSSSN;
LQRGPTPCSSSNT; QRGPTPCSSSNTV; RGPTPCSSSNTVV; GPTPCSSSNTVVA;
PTPCSSSNTVVAV; TPCSSSNTVVAVL; PCSSSNTVVAVLV; CSSSNTVVAVLVT;
STGGTFSPPVKVP; TGGTFSPPVKVPK; GGTFSPPVKVPKY; GTFSPPVKVPKYL;
TFSPPVKVPKYLA; FSPPVKVPKYLAF; SPPVKVPKYLAFS; PPVKVPKYLAFSF;
PVKVPKYLAFSFL; VKVPKYLAFSFLL; KVPKYLAFSFLLG; VPKYLAFSFLLGS;
PKYLAFSFLLGSG; KYLAFSFLLGSGT; YLAFSFLLGSGTQ; LAFSFLLGSGTQH;
AFSFLLGSGTQHS; FSFLLGSGTQHST; SFLLGSGTQHSTG; ALWSVFITWDWAV;
LWSVFITWDWAVG; WSVFITWDWAVGF; SVFITWDWAVGFL;
VFITWDWAVGFLG; FITWDWAVGFLGV; ITWDWAVGFLGVI;
TWDWAVGFLGVIV; WDWAVGFLGVIVP; DWAVGFLGVIVPS; WAVGFLGVIVPSG;
AVGFLGVIVPSGY; VGFLGVIVPSGYF; GFLGVIVPSGYFD; FLGVIVPSGYFDL;
FISTPCISKGSPP; ISTPCISKGSPPT; STPCISKGSPPTA; TPCISKGSPPTAK;
PCISKGSPPTAKK; CISKGSPPTAKKW; ISKGSPPTAKKWK; SKGSPPTAKKWKL;
KGSPPTAKKWKLL; GSPPTAKKWKLLP; IGFPPPCSCTFCD; GFPPPCSCTFCDP;
FPPPCSCTFCDPA; RLSMLVIPITSVC; LSMLVIPITSVCT; SMLVIPITSVCTV;
MLVIPITSVCTVT; LVIPITSVCTVTA; VIPITSVCTVTAS; IPITSVCTVTASH;
PITSVCTVTASHI; ITSVCTVTASHIS; TSVCTVTASHISR; SVCTVTASHISRF;
VCTVTASHISRFP; CTVTASHISRFPQ; TVTASHISRFPQV; VTASHISRFPQVR;
TASHISRFPQVRS; ASHISRFPQVRSS; SHISRFPQVRSSF; HISRFPQVRSSFK;
ISRFPQVRSSFKL; SRFPQVRSSFKLG; RFPQVRSSFKLGR; FPQVRSSFKLGRG;
PQVRSSFKLGRGI; QVRSSFKLGRGIL; VRSSFKLGRGILA; RSSFKLGRGILAV;
SSFKLGRGILAVL; QGSIFLSGLSLLK; GSIFLSGLSLLKS; SIFLSGLSLLKSF;
IFLSGLSLLKSFS; FLSGLSLLKSFSA; LSGLSLLKSFSAL; SGLSLLKSFSALS;
GLSLLKSFSALSF; LSLLKSFSALSFR; SLLKSFSALSFRL; LLKSFSALSFRLK;
LKSFSALSFRLKP; KSFSALSFRLKPL; SFSALSFRLKPLR; FSALSFRLKPLRF;
SALSFRLKPLRFS; ALSFRLKPLRFSS; LSFRLKPLRFSSG; SFRLKPLRFSSGS;
FRLKPLRFSSGSP; RLKPLRFSSGSPI; LKPLRFSSGSPIS; KPLRFSSGSPISG;
PLRFSSGSPISGF; LRFSSGSPISGFR; RFSSGSPISGFRK; FSSGSPISGFRKH;
SSGSPISGFRKHS; SGSPISGFRKHST; GSPISGFRKHSTS; SPISGFRKHSTSV;
PISGFRKHSTSVI; ISGFRKHSTSVIA; SGFRKHSTSVIAS; GFRKHSTSVIAST;
FRKHSTSVIASTP; RKHSTSVIASTPV; KHSTSVIASTPVL; HSTSVIASTPVLT;
STSVIASTPVLTS; TSVIASTPVLTSR; SVIASTPVLTSRT; VIASTPVLTSRTS;
IASTPVLTSRTST; ASTPVLTSRTSTP; STPVLTSRTSTPP; TPVLTSRTSTPPF;
PVLTSRTSTPPFI; VLTSRTSTPPFIS; LTSRTSTPPFISS; TSRTSTPPFISSF;
SRTSTPPFISSFG; RTSTPPFISSFGT; TSTPPFISSFGTC; STPPFISSFGTCT;
TPPFISSFGTCTG; PPFISSFGTCTGS; PFISSFGTCTGSF; FISSFGTCTGSFG;
ISSFGTCTGSFGF; SSFGTCTGSFGFL; SFGTCTGSFGFLG; FGTCTGSFGFLGA;
GTCTGSFGFLGAA; TCTGSFGFLGAAP; CTGSFGFLGAAPG; TGSFGFLGAAPGH;
GSFGFLGAAPGHS; SFGFLGAAPGHSP; FGFLGAAPGHSPF; GFLGAAPGHSPFL;
FLGAAPGHSPFLL; LGAAPGHSPFLLV; GAAPGHSPFLLVG; AAPGHSPFLLVGA;
APGHSPFLLVGAI; PGHSPFLLVGAIF; GHSPFLLVGAIFI; HSPFLLVGAIFIC;
SPFLLVGAIFICF; PFLLVGAIFICFK; FLLVGAIFICFKS; LLVGAIFICFKSR;
LVGAIFICFKSRC; VGAIFICFKSRCY; GAIFICFKSRCYS; AIFICFKSRCYSP;
IFICFKSRCYSPV; FICFKSRCYSPVQ; ICFKSRCYSPVQA; RQHPLRSSSLIST;
QHPLRSSSLISTS; HPLRSSSLISTSW; PLRSSSLISTSWG; LRSSSLISTSWGN;
RSSSLISTSWGNS; SSSLISTSWGNSF; SSLISTSWGNSFF; SLISTSWGNSFFY;
LISTSWGNSFFYK; ISTSWGNSFFYKL; STSWGNSFFYKLS; VHSLCNFFYTVSI;
HSLCNFFYTVSII; SLCNFFYTVSIIY; LCNFFYTVSIIYT; CNFFYTVSIIYTI;
NFFYTVSIIYTIS; FFYTVSIIYTISM; FYTVSIIYTISMA; YTVSIIYTISMAK;
TVSIIYTISMAKM; VSIIYTISMAKMY; SIIYTISMAKMYT; IIYTISMAKMYTG;
IYTISMAKMYTGT; YTISMAKMYTGTF; TISMAKMYTGTFP; ISMAKMYTGTFPF;
SMAKMYTGTFPFS; MAKMYTGTFPFSY; AKMYTGTFPFSYL; KMYTGTFPFSYLS;
MYTGTFPFSYLSN; YTGTFPFSYLSNH; GPNRGKIRIILLN; PNRGKIRIILLNI;
NRGKIRIILLNII; RGKIRIILLNIII; GKIRIILLNIIIK; KIRIILLNIIIKV; IRIILLNIIIKVY;
RIILLNIIIKVYR; IILLNIIIKVYRG; ILLNIIIKVYRGI; LLNIIIKVYRGIY;
LNIIIKVYRGIYN; NIIIKVYRGIYNC; IIIKVYRGIYNCP; IIKVYRGIYNCPG;
IKVYRGIYNCPGS; KVYRGIYNCPGSF; VYRGIYNCPGSFL; YRGIYNCPGSFLQ;
RGIYNCPGSFLQK; GIYNCPGSFLQKS; IYNCPGSFLQKSS; YNCPGSFLQKSSQ;
NCPGSFLQKSSQG; CPGSFLQKSSQGV; PGSFLQKSSQGVS; GSFLQKSSQGVSK;
SFLQKSSQGVSKK; FLQKSSQGVSKKS; LQKSSQGVSKKSF; QKSSQGVSKKSFC;
KSSQGVSKKSFCS; SSQGVSKKSFCSS; SQGVSKKSFCSSL; QGVSKKSFCSSLQ;
GVSKKSFCSSLQF; VSKKSFCSSLQFL; GYRRYIIPNNMPQ; YRRYIIPNNMPQS;
RRYIIPNNMPQSL; RYIIPNNMPQSLG; YIIPNNMPQSLGN; IIPNNMPQSLGNS;
IPNNMPQSLGNSS; PNNMPQSLGNSSK; NNMPQSLGNSSKQ; NMPQSLGNSSKQR;
MPQSLGNSSKQRR; PQSLGNSSKQRRT; QSLGNSSKQRRTP; SLGNSSKQRRTPM;
LGNSSKQRRTPMP; GNSSKQRRTPMPR; NSSKQRRTPMPRI; SSKQRRTPMPRIK;
SKQRRTPMPRIKV; KQRRTPMPRIKVL; QRRTPMPRIKVLN; RRTPMPRIKVLNI;
RTPMPRIKVLNII; TPMPRIKVLNIIN; PMPRIKVLNIINK; MPRIKVLNIINKS;
PRIKVLNIINKSI; RIKVLNIINKSIY; IKVLNIINKSIYT; KVLNIINKSIYTR;
VLNIINKSIYTRK; LNIINKSIYTRKQ; NIINKSIYTRKQN; IINKSIYTRKQNI;
INKSIYTRKQNII; NKSIYTRKQNIIV; KSIYTRKQNIIVL; SIYTRKQNIIVLI;
IYTRKQNIIVLIW; YTRKQNIIVLIWV; TRKQNIIVLIWVK; RKQNIIVLIWVKQ;
KQNIIVLIWVKQF; QNIIVLIWVKQFQ; NIIVLIWVKQFQS; IIVLIWVKQFQSH;
IVLIWVKQFQSHA; LLIEAYSGNFVIP; LIEAYSGNFVIPI; IEAYSGNFVIPII;
EAYSGNFVIPIIK; AYSGNFVIPIIKE; YSGNFVIPIIKEL; SGNFVIPIIKELI;
GNFVIPIIKELIP; NFVIPIIKELIPY; FVIPIIKELIPYL; VIPIIKELIPYLS;
SSKPSNSPRSTSN; SKPSNSPRSTSNY; KPSNSPRSTSNYS; PSNSPRSTSNYSI;
SNSPRSTSNYSIC; NSPRSTSNYSICL; SPRSTSNYSICLR; PRSTSNYSICLRS;
GTCYALYSSKGCN; TCYALYSSKGCNL; CYALYSSKGCNLN; YALYSSKGCNLNF;
ALYSSKGCNLNFY; LYSSKGCNLNFYS; YSSKGCNLNFYSS; SSKGCNLNFYSSS;
SKGCNLNFYSSSS; KGCNLNFYSSSSL; GCNLNFYSSSSLP; CNLNFYSSSSLPS;
NLNFYSSSSLPSS; LNFYSSSSLPSSN; NFYSSSSLPSSNF; FYSSSSLPSSNFS;
YSSSSLPSSNFSH; KSCGSSSLRYTGN; SSTHEPGNTKKKG; STHEPGNTKKKGL;
THEPGNTKKKGLL; HEPGNTKKKGLLT; ESFTESFTAGKAV; SFTESFTAGKAVV;
FTESFTAGKAVVL; TESFTAGKAVVLL; ESFTAGKAVVLLF; SFTAGKAVVLLFF;
FTAGKAVVLLFFP; TAGKAVVLLFFPS; AGKAVVLLFFPST; GKAVVLLFFPSTL;
KAVVLLFFPSTLS; AVVLLFFPSTLSS; VVLLFFPSTLSSP; VLLFFPSTLSSPL;
LLFFPSTLSSPLQ; LFFPSTLSSPLQN; FFPSTLSSPLQNS; FPSTLSSPLQNSS;
PSTLSSPLQNSSK; STLSSPLQNSSKS; TLSSPLQNSSKSS; LSSPLQNSSKSSK;
SSPLQNSSKSSKI; SPLQNSSKSSKIK; PLQNSSKSSKIKI; LQNSSKSSKIKIK;
QNSSKSSKIKIKI; NSSKSSKIKIKIL; ALFFVPVQVLPTF; LFFVPVQVLPTFT;
FFVPVQVLPTFTE; FVPVQVLPTFTEA; VPVQVLPTFTEAC; PVQVLPTFTEACR;
VQVLPTFTEACRD; QVLPTFTEACRDS; VLPTFTEACRDSW; LPTFTEACRDSWR;
PTFTEACRDSWRR; TFTEACRDSWRRT; FTEACRDSWRRTM; TEACRDSWRRTMA;
EACRDSWRRTMAF; ACRDSWRRTMAFV; CRDSWRRTMAFVQ;
RDSWRRTMAFVQF; DSWRRTMAFVQFN; SWRRTMAFVQFNW;
WRRTMAFVQFNWG; RRTMAFVQFNWGQ; RTMAFVQFNWGQG;
TMAFVQFNWGQGQ; MAFVQFNWGQGQD; AFVQFNWGQGQDS;
ARKTCLSCTFLPE; RKTCLSCTFLPEV; KTCLSCTFLPEVM; TCLSCTFLPEVMV;
CLSCTFLPEVMVW; LSCTFLPEVMVWL; SCTFLPEVMVWLH; CTFLPEVMVWLHS;
TFLPEVMVWLHSM; FLPEVMVWLHSMG; LPEVMVWLHSMGK;
PEVMVWLHSMGKQ; EVMVWLHSMGKQL; VMVWLHSMGKQLL;
MVWLHSMGKQLLP; VWLHSMGKQLLPV; WLHSMGKQLLPVS;
LHSMGKQLLPVSH; HSMGKQLLPVSHA; SMGKQLLPVSHAL; MGKQLLPVSHALS;
GKQLLPVSHALSF; KQLLPVSHALSFL; QLLPVSHALSFLR; LLPVSHALSFLRS;
LPVSHALSFLRSW; PVSHALSFLRSWF; VSHALSFLRSWFG; SHALSFLRSWFGC;
HALSFLRSWFGCI; ALSFLRSWFGCIP; LSFLRSWFGCIPL; EAEAASASTLSLK;
GLAKLFGEIPILL; LAKLFGEIPILLQ; AKLFGEIPILLQF; KLFGEIPILLQFL;
LFGEIPILLQFLQ

14 mers:

MDKVLNREESMELM; DKVLNREESMELMD; KVLNREESMELMDL;
VLNREESMELMDLL; LNREESMELMDLLG; NREESMELMDLLGL;
REESMELMDLLGLE; EESMELMDLLGLER; ESMELMDLLGLERA;
SMELMDLLGLERAA; MELMDLLGLERAAW; ELMDLLGLERAAWG;
LMDLLGLERAAWGN; MDLLGLERAAWGNL; DLLGLERAAWGNLP;
LLGLERAAWGNLPL; LGLERAAWGNLPLM; GLERAAWGNLPLMR;
LERAAWGNLPLMRK; ERAAWGNLPLMRKA; RAAWGNLPLMRKAY;
AAWGNLPLMRKAYL; AWGNLPLMRKAYLR; WGNLPLMRKAYLRK;
GNLPLMRKAYLRKC; NLPLMRKAYLRKCK; LPLMRKAYLRKCKE;
PLMRKAYLRKCKEF; LMRKAYLRKCKEFH; MRKAYLRKCKEFHP;
RKAYLRKCKEFHPD; KAYLRKCKEFHPDK; AYLRKCKEFHPDKG;
YLRKCKEFHPDKGG; LRKCKEFHPDKGGD; RKCKEFHPDKGGDE;
KCKEFHPDKGGDED; CKEFHPDKGGDEDK; KEFHPDKGGDEDKM;
EFHPDKGGDEDKMK; FHPDKGGDEDKMKR; HPDKGGDEDKMKRM;
PDKGGDEDKMKRMN; DKGGDEDKMKRMNT; KGGDEDKMKRMNTL;
GGDEDKMKRMNTLY; GDEDKMKRMNTLYK; DEDKMKRMNTLYKK;
EDKMKRMNTLYKKM; DKMKRMNTLYKKME; KMKRMNTLYKKMEQ;
MKRMNTLYKKMEQD; KRMNTLYKKMEQDV; RMNTLYKKMEQDVK;
MNTLYKKMEQDVKV; NTLYKKMEQDVKVA; TLYKKMEQDVKVAH;
LYKKMEQDVKVAHQ; YKKMEQDVKVAHQP; KKMEQDVKVAHQPD;
KMEQDVKVAHQPDF; MEQDVKVAHQPDFG; EQDVKVAHQPDFGT;
QDVKVAHQPDFGTW; DVKVAHQPDFGTWS; VKVAHQPDFGTWSS;
KVAHQPDFGTWSSS; VAHQPDFGTWSSSE; AHQPDFGTWSSSEV;
HQPDFGTWSSSEVC; QPDFGTWSSSEVCA; PDFGTWSSSEVCAD;
DFGTWSSSEVCADF; FGTWSSSEVCADFP; GTWSSSEVCADFPL;
TWSSSEVCADFPLC; WSSSEVCADFPLCP; SSSEVCADFPLCPD;
SSEVCADFPLCPDT; SEVCADFPLCPDTL; EVCADFPLCPDTLY;
VCADFPLCPDTLYC; CADFPLCPDTLYCK; ADFPLCPDTLYCKE;
DFPLCPDTLYCKEW; FPLCPDTLYCKEWP; PLCPDTLYCKEWPI;
LCPDTLYCKEWPIC; CPDTLYCKEWPICS; PDTLYCKEWPICSK;
DTLYCKEWPICSKK; TLYCKEWPICSKKP; LYCKEWPICSKKPS;
YCKEWPICSKKPSV; CKEWPICSKKPSVH; KEWPICSKKPSVHC;
EWPICSKKPSVHCP; WPICSKKPSVHCPC; PICSKKPSVHCPCM;
ICSKKPSVHCPCML; CSKKPSVHCPCMLC; SKKPSVHCPCMLCQ;
KKPSVHCPCMLCQL; KPSVHCPCMLCQLR; PSVHCPCMLCQLRL;
SVHCPCMLCQLRLR; VHCPCMLCQLRLRH; HCPCMLCQLRLRHL;
CPCMLCQLRLRHLN; PCMLCQLRLRHLNR; CMLCQLRLRHLNRK;
MLCQLRLRHLNRKF; LCQLRLRHLNRKFL; CQLRLRHLNRKFLR;
QLRLRHLNRKFLRK; LRLRHLNRKFLRKE; RLRHLNRKFLRKEP;
LRHLNRKFLRKEPL; RHLNRKFLRKEPLV; HLNRKFLRKEPLVW;
LNRKFLRKEPLVWI; NRKFLRKEPLVWID; RKFLRKEPLVWIDC;
KFLRKEPLVWIDCY; FLRKEPLVWIDCYC; LRKEPLVWIDCYCI;
RKEPLVWIDCYCID; KEPLVWIDCYCIDC; EPLVWIDCYCIDCF;
PLVWIDCYCIDCFT; LVWIDCYCIDCFTQ; VWIDCYCIDCFTQW;
WIDCYCIDCFTQWF; IDCYCIDCFTQWFG; DCYCIDCFTQWFGL;
CYCIDCFTQWFGLD; YCIDCFTQWFGLDL; CIDCFTQWFGLDLT;
IDCFTQWFGLDLTE; DCFTQWFGLDLTEE; CFTQWFGLDLTEET;
FTQWFGLDLTEETL; TQWFGLDLTEETLQ; QWFGLDLTEETLQW;
WFGLDLTEETLQWW; FGLDLTEETLQWWV; GLDLTEETLQWWVQ;
LDLTEETLQWWVQI; DLTEETLQWWVQII; LTEETLQWWVQIIG;
TEETLQWWVQIIGE; EETLQWWVQIIGET; ETLQWWVQIIGETP;
TLQWWVQIIGETPF; LQWWVQIIGETPFR; QWWVQIIGETPFRD;
WWVQIIGETPFRDL; WVQIIGETPFRDLK; VQIIGETPFRDLKL;
KALSNYFFYRCQPM; ALSNYFFYRCQPME; LSNYFFYRCQPMEQ;
SNYFFYRCQPMEQK; NYFFYRCQPMEQKS; YFFYRCQPMEQKSG;
FFYRCQPMEQKSGS; FYRCQPMEQKSGSP; YRCQPMEQKSGSPG;
RCQPMEQKSGSPGG; CQPMEQKSGSPGGV; QPMEQKSGSPGGVP;
PMEQKSGSPGGVPL; MEQKSGSPGGVPLM; EQKSGSPGGVPLMK;
QKSGSPGGVPLMKN; KSGSPGGVPLMKNG; SGSPGGVPLMKNGM;
GSPGGVPLMKNGMK; SPGGVPLMKNGMKI; PGGVPLMKNGMKIY;
GGVPLMKNGMKIYF; GVPLMKNGMKIYFA; VPLMKNGMKIYFAM;
PLMKNGMKIYFAMK; LMKNGMKIYFAMKI; MKNGMKIYFAMKIC;
KNGMKIYFAMKICL; NGMKIYFAMKICLP; GMKIYFAMKICLPV;
MKIYFAMKICLPVM; KIYFAMKICLPVMK; IYFAMKICLPVMKK;
YFAMKICLPVMKKQ; FAMKICLPVMKKQQ; AMKICLPVMKKQQQ;
MKICLPVMKKQQQI; KICLPVMKKQQQIL; ICLPVMKKQQQILN;
CLPVMKKQQQILNT; LPVMKKQQQILNTQ; PVMKKQQQILNTQH;
VMKKQQQILNTQHH; MKKQQQILNTQHHP; KKQQQILNTQHHPK;
KQQQILNTQHHPKK; QQQILNTQHHPKKK; QQILNTQHHPKKKE;
QILNTQHHPKKKER; KTLKTFPLIYTSFL; TLKTFPLIYTSFLV; LKTFPLIYTSFLVK;
KTFPLIYTSFLVKL; TFPLIYTSFLVKLY; FPLIYTSFLVKLYL; PLIYTSFLVKLYLV;
LIYTSFLVKLYLVI; IYTSFLVKLYLVIE; YTSFLVKLYLVIEP; TSFLVKLYLVIEPL;
SFLVKLYLVIEPLP; FLVKLYLVIEPLPA; LVKLYLVIEPLPAL; VKLYLVIEPLPALL;
KLYLVIEPLPALLC; LYLVIEPLPALLCI; YLVIEPLPALLCIL; LVIEPLPALLCILL;
VIEPLPALLCILLK; IEPLPALLCILLKK; EPLPALLCILLKKK; PLPALLCILLKKKL;
LPALLCILLKKKLK; PALLCILLKKKLKF; ALLCILLKKKLKFC; LLCILLKKKLKFCI;
LCILLKKKLKFCIK; CILLKKKLKFCIKN; ILLKKKLKFCIKNL; LLKKKLKFCIKNLW;
LKKKLKFCIKNLWK; KKKLKFCIKNLWKN; KKLKFCIKNLWKNI;
KLKFCIKNLWKNIL; LLLVDTCVLGIILY; LLVDTCVLGIILYS; LVDTCVLGIILYSF;
LHIDIEFLQLIISV; HIDIEFLQLIISVK; IDIEFLQLIISVKS; DIEFLQLIISVKSC;
IEFLQLIISVKSCV; EFLQLIISVKSCVP; FLQLIISVKSCVPL; LQLIISVKSCVPLV;
QLIISVKSCVPLVF; FVRVLIRNTYYIVP; RSMILAQKSLKKQS; SMILAQKSLKKQSR;
MILAQKSLKKQSRC; ILAQKSLKKQSRCL; LAQKSLKKQSRCLG;
AQKSLKKQSRCLGN; RSVKSVRKKTSLIT; SVKSVRKKTSLITL;
VKSVRKKTSLITLS; KSVRKKTSLITLSI; SVRKKTSLITLSIM; VRKKTSLITLSIMK;
RKKTSLITLSIMKS; KKTSLITLSIMKST; KTSLITLSIMKSTL; TSLITLSIMKSTLQ;
SLITLSIMKSTLQM; LITLSIMKSTLQML; ITLSIMKSTLQMLL; TLSIMKSTLQMLLF;
LSIMKSTLQMLLFL; SIMKSTLQMLLFLQ; IMKSTLQMLLFLQK;
MKSTLQMLLFLQKV; KSTLQMLLFLQKVK; STLQMLLFLQKVKI;
TLQMLLFLQKVKIK; LQMLLFLQKVKIKK; QMLLFLQKVKIKKV;
MLLFLQKVKIKKVF; LLFLQKVKIKKVFV; LFLQKVKIKKVFVS;
FLQKVKIKKVFVSK; LQKVKIKKVFVSKQ; NNIWQVLLGCTVCY;
NIWQVLLGCTVCYL; IWQVLLGCTVCYLK; WQVLLGCTVCYLKW;
QVLLGCTVCYLKWI; VLLGCTVCYLKWIL; YLIFCTVLFSMYLK;
LIFCTVLFSMYLKE; IFCTVLFSMYLKED; FCTVLFSMYLKEDT;
CTVLFSMYLKEDTG; TVLFSMYLKEDTGY; VLFSMYLKEDTGYL;
LFSMYLKEDTGYLK; FSMYLKEDTGYLKV; SMYLKEDTGYLKVP;
MYLKEDTGYLKVPL; YLKEDTGYLKVPLI; LKEDTGYLKVPLIV;
KEDTGYLKVPLIVE; EDTGYLKVPLIVEK; DTGYLKVPLIVEKQ;
TGYLKVPLIVEKQH; KGQELNQRICLQDM; GQELNQRICLQDME;
ENPYKTQSSYLKKE; NPYKTQSSYLKKEF; PYKTQSSYLKKEFY;
YKTQSSYLKKEFYK; KTQSSYLKKEFYKV; TQSSYLKKEFYKVE;
LILQLIYNLELLNG; ILQLIYNLELLNGR; LQLIYNLELLNGRK; QLIYNLELLNGRKG;
LIYNLELLNGRKGW; IYNLELLNGRKGWI; YNLELLNGRKGWIL;
NLELLNGRKGWILR; NIIYAWGNVFLILQ; IIYAWGNVFLILQE;
IYAWGNVFLILQEK; YAWGNVFLILQEKR; AWGNVFLILQEKRI;
WGNVFLILQEKRIQ; GNVFLILQEKRIQK; NVFLILQEKRIQKL; VFLILQEKRIQKLK;
FLILQEKRIQKLKT; LILQEKRIQKLKTL; ILQEKRIQKLKTLD; LQEKRIQKLKTLDM;
QEKRIQKLKTLDMD; EKRIQKLKTLDMDQ; KRIQKLKTLDMDQA;
RIQKLKTLDMDQAL; IQKLKTLDMDQALN; QKLKTLDMDQALNP;
KLKTLDMDQALNPN; LKTLDMDQALNPNH; KTLDMDQALNPNHN;
TLDMDQALNPNHNA; LDMDQALNPNHNAL; DMDQALNPNHNALP;
MDQALNPNHNALPK; DQALNPNHNALPKS; QALNPNHNALPKSQ;
ALNPNHNALPKSQI; LNPNHNALPKSQIL; NPNHNALPKSQILQ;
PNHNALPKSQILQP; NHNALPKSQILQPL; HNALPKSQILQPLL; NALPKSQILQPLLK;
ALPKSQILQPLLKI; LPKSQILQPLLKIP; PKSQILQPLLKIPK; KSQILQPLLKIPKG;
SQILQPLLKIPKGQ; QILQPLLKIPKGQT; ILQPLLKIPKGQTP; LQPLLKIPKGQTPI;
QPLLKIPKGQTPIV; PLLKIPKGQTPIVK; LLKIPKGQTPIVKS; LKIPKGQTPIVKSC;
KIPKGQTPIVKSCI; IPKGQTPIVKSCIC; PKGQTPIVKSCICV; KGQTPIVKSCICVK;
GQTPIVKSCICVKA; QTPIVKSCICVKAF; TPIVKSCICVKAFS; PIVKSCICVKAFSV;
IVKSCICVKAFSVL; VKSCICVKAFSVLK; KSCICVKAFSVLKG;
SCICVKAFSVLKGL; CICVKAFSVLKGLK; ICVKAFSVLKGLKH;
CVKAFSVLKGLKHH; VKAFSVLKGLKHHP; KAFSVLKGLKHHPQ;
AFSVLKGLKHHPQN; FSVLKGLKHHPQNN; SVLKGLKHHPQNNT;
VLKGLKHHPQNNTS; LKGLKHHPQNNTSL; KGLKHHPQNNTSLK;
GLKHHPQNNTSLKV; LKHHPQNNTSLKVA; KHHPQNNTSLKVAY;
HHPQNNTSLKVAYT; HPQNNTSLKVAYTK; PQNNTSLKVAYTKA;
QNNTSLKVAYTKAA; NNTSLKVAYTKAAF; NTSLKVAYTKAAFI;
TSLKVAYTKAAFIK; SLKVAYTKAAFIKC; LKVAYTKAAFIKCI;
KVAYTKAAFIKCIC; VAYTKAAFIKCICT; AYTKAAFIKCICTI; YTKAAFIKCICTIK;
TKAAFIKCICTIKA; KAAFIKCICTIKAP; AAFIKCICTIKAPV; SILVCNCPCLSIYL;
ILVCNCPCLSIYLI; LVCNCPCLSIYLII; VCNCPCLSIYLIIS; CNCPCLSIYLIISG;
NCPCLSIYLIISGS; CPCLSIYLIISGSP; PCLSIYLIISGSPG; CLSIYLIISGSPGS;
LSIYLIISGSPGSL; SIYLIISGSPGSLS; IYLIISGSPGSLSV; YLIISGSPGSLSVP;
LIISGSPGSLSVPS; IISGSPGSLSVPSN; ISGSPGSLSVPSNT; SGSPGSLSVPSNTL;
GSPGSLSVPSNTLT; SPGSLSVPSNTLTS; PGSLSVPSNTLTSS; GSLSVPSNTLTSST;
SLSVPSNTLTSSTW; LSVPSNTLTSSTWD; SVPSNTLTSSTWDS; VPSNTLTSSTWDSI;
PSNTLTSSTWDSIP; SNTLTSSTWDSIPY; NTLTSSTWDSIPYI; TLTSSTWDSIPYIG;
LTSSTWDSIPYIGC; TSSTWDSIPYIGCP; SSTWDSIPYIGCPS; STWDSIPYIGCPST;
TWDSIPYIGCPSTL; WDSIPYIGCPSTLW; DSIPYIGCPSTLWV; SIPYIGCPSTLWVL;
IPYIGCPSTLWVLL; PYIGCPSTLWVLLF; YIGCPSTLWVLLFI; IGCPSTLWVLLFIR;
GCPSTLWVLLFIRS; CPSTLWVLLFIRSL; PSTLWVLLFIRSLS; STLWVLLFIRSLSK;
TLWVLLFIRSLSKK; LWVLLFIRSLSKKF; WVLLFIRSLSKKFI; VLLFIRSLSKKEIG;
GFFTDLFLRRILKY; FFTDLFLRRILKYL; FTDLFLRRILKYLA; TDLFLRRILKYLAR;
DLFLRRILKYLARP; LFLRRILKYLARPL; FLRRILKYLARPLH; LRRILKYLARPLHC;
RRILKYLARPLHCC; RILKYLARPLHCCV; ILKYLARPLHCCVP;
LKYLARPLHCCVPE; KYLARPLHCCVPEL; YLARPLHCCVPELL;
LARPLHCCVPELLV; ARPLHCCVPELLVN; RPLHCCVPELLVNR;
PLHCCVPELLVNRP; LHCCVPELLVNRPQ; HCCVPELLVNRPQI;
CCVPELLVNRPQIS; CVPELLVNRPQISA; VPELLVNRPQISAA; PELLVNRPQISAAE;
ELLVNRPQISAAET; LLVNRPQISAAETY; LVNRPQISAAETYR;
VNRPQISAAETYRL; NRPQISAAETYRLS; RPQISAAETYRLSA; PQISAAETYRLSAL;
QISAAETYRLSALQ; ISAAETYRLSALQR; SAAETYRLSALQRG;
AAETYRLSALQRGP; AETYRLSALQRGPT; ETYRLSALQRGPTP;
TYRLSALQRGPTPC; YRLSALQRGPTPCS; RLSALQRGPTPCSS;
LSALQRGPTPCSSS; SALQRGPTPCSSSN; ALQRGPTPCSSSNT; LQRGPTPCSSSNTV;
QRGPTPCSSSNTVV; RGPTPCSSSNTVVA; GPTPCSSSNTVVAV;
PTPCSSSNTVVAVL; TPCSSSNTVVAVLV; PCSSSNTVVAVLVT;
STGGTFSPPVKVPK; TGGTFSPPVKVPKY; GGTFSPPVKVPKYL;
GTFSPPVKVPKYLA; TFSPPVKVPKYLAF; FSPPVKVPKYLAFS;
SPPVKVPKYLAFSF; PPVKVPKYLAFSFL; PVKVPKYLAFSFLL;
VKVPKYLAFSFLLG; KVPKYLAFSFLLGS; VPKYLAFSFLLGSG;
PKYLAFSFLLGSGT; KYLAFSFLLGSGTQ; YLAFSFLLGSGTQH;
LAFSFLLGSGTQHS; AFSFLLGSGTQHST; FSFLLGSGTQHSTG;
ALWSVFITWDWAVG; LWSVFITWDWAVGF; WSVFITWDWAVGFL;
SVFITWDWAVGFLG; VFITWDWAVGFLGV; FITWDWAVGFLGVI;
ITWDWAVGFLGVIV; TWDWAVGFLGVIVP; WDWAVGFLGVIVPS;
DWAVGFLGVIVPSG; WAVGFLGVIVPSGY; AVGFLGVIVPSGYF;
VGFLGVIVPSGYFD; GFLGVIVPSGYFDL; FISTPCISKGSPPT; ISTPCISKGSPPTA;
STPCISKGSPPTAK; TPCISKGSPPTAKK; PCISKGSPPTAKKW; CISKGSPPTAKKWK;
ISKGSPPTAKKWKL; SKGSPPTAKKWKLL; KGSPPTAKKWKLLP;
IGFPPPCSCTFCDP; GFPPPCSCTFCDPA; RLSMLVIPITSVCT; LSMLVIPITSVCTV;
SMLVIPITSVCTVT; MLVIPITSVCTVTA; LVIPITSVCTVTAS; VIPITSVCTVTASH;
IPITSVCTVTASHI; PITSVCTVTASHIS; ITSVCTVTASHISR; TSVCTVTASHISRF;
SVCTVTASHISRFP; VCTVTASHISRFPQ; CTVTASHISRFPQV; TVTASHISRFPQVR;
VTASHISRFPQVRS; TASHISRFPQVRSS; ASHISRFPQVRSSF; SHISRFPQVRSSFK;
HISRFPQVRSSFKL; ISRFPQVRSSFKLG; SRFPQVRSSFKLGR; RFPQVRSSFKLGRG;
FPQVRSSFKLGRGI; PQVRSSFKLGRGIL; QVRSSFKLGRGILA; VRSSFKLGRGILAV;
RSSFKLGRGILAVL; QGSIFLSGLSLLKS; GSIFLSGLSLLKSF; SIFLSGLSLLKSFS;
IFLSGLSLLKSFSA; FLSGLSLLKSFSAL; LSGLSLLKSFSALS; SGLSLLKSFSALSF;
GLSLLKSFSALSFR; LSLLKSFSALSFRL; SLLKSFSALSFRLK; LLKSFSALSFRLKP;
LKSFSALSFRLKPL; KSFSALSFRLKPLR; SFSALSFRLKPLRF; FSALSFRLKPLRFS;
SALSFRLKPLRFSS; ALSFRLKPLRFSSG; LSFRLKPLRFSSGS; SFRLKPLRFSSGSP;
FRLKPLRFSSGSPI; RLKPLRFSSGSPIS; LKPLRFSSGSPISG; KPLRFSSGSPISGF;
PLRFSSGSPISGFR; LRFSSGSPISGFRK; RFSSGSPISGFRKH; FSSGSPISGFRKHS;
SSGSPISGFRKHST; SGSPISGFRKHSTS; GSPISGFRKHSTSV; SPISGFRKHSTSVI;
PISGFRKHSTSVIA; ISGFRKHSTSVIAS; SGFRKHSTSVIAST; GFRKHSTSVIASTP;
FRKHSTSVIASTPV; RKHSTSVIASTPVL; KHSTSVIASTPVLT; HSTSVIASTPVLTS;
STSVIASTPVLTSR; TSVIASTPVLTSRT; SVIASTPVLTSRTS; VIASTPVLTSRTST;
IASTPVLTSRTSTP; ASTPVLTSRTSTPP; STPVLTSRTSTPPF; TPVLTSRTSTPPFI;
PVLTSRTSTPPFIS; VLTSRTSTPPFISS; LTSRTSTPPFISSF; TSRTSTPPFISSFG;
SRTSTPPFISSFGT; RTSTPPFISSFGTC; TSTPPFISSFGTCT; STPPFISSFGTCTG;
TPPFISSFGTCTGS; PPFISSFGTCTGSF; PFISSFGTCTGSFG; FISSFGTCTGSFGF;
ISSFGTCTGSFGFL; SSFGTCTGSFGFLG; SFGTCTGSFGFLGA; FGTCTGSFGFLGAA;
GTCTGSFGFLGAAP; TCTGSFGFLGAAPG; CTGSFGFLGAAPGH;
TGSFGFLGAAPGHS; GSFGFLGAAPGHSP; SFGFLGAAPGHSPF;
FGFLGAAPGHSPFL; GFLGAAPGHSPFLL; FLGAAPGHSPFLLV;
LGAAPGHSPFLLVG; GAAPGHSPFLLVGA; AAPGHSPFLLVGAI;
APGHSPFLLVGAIF; PGHSPFLLVGAIFI; GHSPFLLVGAIFIC; HSPFLLVGAIFICF;
SPFLLVGAIFICFK; PFLLVGAIFICFKS; FLLVGAIFICFKSR; LLVGAIFICFKSRC;
LVGAIFICFKSRCY; VGAIFICFKSRCYS; GAIFICFKSRCYSP; AIFICFKSRCYSPV;
IFICFKSRCYSPVQ; FICFKSRCYSPVQA; RQHPLRSSSLISTS; QHPLRSSSLISTSW;
HPLRSSSLISTSWG; PLRSSSLISTSWGN; LRSSSLISTSWGNS; RSSSLISTSWGNSF;
SSSLISTSWGNSFF; SSLISTSWGNSFFY; SLISTSWGNSFFYK; LISTSWGNSFFYKL;
ISTSWGNSFFYKLS; VHSLCNFFYTVSII; HSLCNFFYTVSIIY; SLCNFFYTVSIIYT;
LCNFFYTVSIIYTI; CNFFYTVSIIYTIS; NFFYTVSIIYTISM; FFYTVSIIYTISMA;
FYTVSIIYTISMAK; YTVSIIYTISMAKM; TVSIIYTISMAKMY; VSIIYTISMAKMYT;
SIIYTISMAKMYTG; IIYTISMAKMYTGT; IYTISMAKMYTGTF;
YTISMAKMYTGTFP; TISMAKMYTGTFPF; ISMAKMYTGTFPFS;
SMAKMYTGTFPFSY; MAKMYTGTFPFSYL; AKMYTGTFPFSYLS;
KMYTGTFPFSYLSN; MYTGTFPFSYLSNH; GPNRGKIRIILLNI; PNRGKIRIILLNII;
NRGKIRIILLNIII; RGKIRIILLNIIIK; GKIRIILLNIIIKV; KIRIILLNIIIKVY;
IRIILLNIIIKVYR; RIILLNIIIKVYRG; IILLNIIIKVYRGI; ILLNIIIKVYRGIY;
LLNIIIKVYRGIYN; LNIIIKVYRGIYNC; NIIIKVYRGIYNCP; IIIKVYRGIYNCPG;
IIKVYRGIYNCPGS; IKVYRGIYNCPGSF; KVYRGIYNCPGSFL; VYRGIYNCPGSFLQ;
YRGIYNCPGSFLQK; RGIYNCPGSFLQKS; GIYNCPGSFLQKSS; IYNCPGSFLQKSSQ;
YNCPGSFLQKSSQG; NCPGSFLQKSSQGV; CPGSFLQKSSQGVS;
PGSFLQKSSQGVSK; GSFLQKSSQGVSKK; SFLQKSSQGVSKKS;
FLQKSSQGVSKKSF; LQKSSQGVSKKSFC; QKSSQGVSKKSFCS;
KSSQGVSKKSFCSS; SSQGVSKKSFCSSL; SQGVSKKSFCSSLQ;
QGVSKKSFCSSLQF; GVSKKSFCSSLQFL; GYRRYIIPNNMPQS;
YRRYIIPNNMPQSL; RRYIIPNNMPQSLG; RYIIPNNMPQSLGN; YIIPNNMPQSLGNS;
IIPNNMPQSLGNSS; IPNNMPQSLGNSSK; PNNMPQSLGNSSKQ;
NNMPQSLGNSSKQR; NMPQSLGNSSKQRR; MPQSLGNSSKQRRT;
PQSLGNSSKQRRTP; QSLGNSSKQRRTPM; SLGNSSKQRRTPMP;
LGNSSKQRRTPMPR; GNSSKQRRTPMPRI; NSSKQRRTPMPRIK;
SSKQRRTPMPRIKV; SKQRRTPMPRIKVL; KQRRTPMPRIKVLN;
QRRTPMPRIKVLNI; RRTPMPRIKVLNII; RTPMPRIKVLNIIN; TPMPRIKVLNIINK;
PMPRIKVLNIINKS; MPRIKVLNIINKSI; PRIKVLNIINKSIY; RIKVLNIINKSIYT;
IKVLNIINKSIYTR; KVLNIINKSIYTRK; VLNIINKSIYTRKQ; LNIINKSIYTRKQN;
NIINKSIYTRKQNI; IINKSIYTRKQNII; INKSIYTRKQNIIV; NKSIYTRKQNIIVL;
KSIYTRKQNIIVLI; SIYTRKQNIIVLIW; IYTRKQNIIVLIWV; YTRKQNIIVLIWVK;
TRKQNIIVLIWVKQ; RKQNIIVLIWVKQF; KQNIIVLIWVKQFQ; QNIIVLIWVKQFQS;
NIIVLIWVKQFQSH; IIVLIWVKQFQSHA; LLIEAYSGNFVIPI; LIEAYSGNFVIPII;
IEAYSGNFVIPIIK; EAYSGNFVIPIIKE; AYSGNFVIPIIKEL; YSGNFVIPIIKELI;
SGNFVIPIIKELIP; GNFVIPIIKELIPY; NFVIPIIKFLIPYL; FVIPIIKELIPYLS;
SSKPSNSPRSTSNY; SKPSNSPRSTSNYS; KPSNSPRSTSNYSI; PSNSPRSTSNYSIC;
SNSPRSTSNYSICL; NSPRSTSNYSICLR; SPRSTSNYSICLRS; GTCYALYSSKGCNL;
TCYALYSSKGCNLN; CYALYSSKGCNLNF; YALYSSKGCNLNFY;
ALYSSKGCNLNFYS; LYSSKGCNLNFYSS; YSSKGCNLNFYSSS;
SSKGCNLNFYSSSS; SKGCNLNFYSSSSL; KGCNLNFYSSSSLP; GCNLNFYSSSSLPS;
CNLNFYSSSSLPSS; NLNFYSSSSLPSSN; LNFYSSSSLPSSNF; NFYSSSSLPSSNFS;
FYSSSSLPSSNFSH; SSTHEPGNTKKKGL; STHEPGNTKKKGLL;
THEPGNTKKKGLLT; ESFTESFTAGKAVV; SFTESFTAGKAVVL;
FTESFTAGKAVVLL; TESFTAGKAVVLLF; ESFTAGKAVVLLFF;
SFTAGKAVVLLFFP; FTAGKAVVLLFFPS; TAGKAVVLLFFPST;
AGKAVVLLFFPSTL; GKAVVLLFFPSTLS; KAVVLLFFPSTLSS; AVVLLFFPSTLSSP;
VVLLFFPSTLSSPL; VLLFFPSTLSSPLQ; LLFFPSTLSSPLQN; LFFPSTLSSPLQNS;
FFPSTLSSPLQNSS; FPSTLSSPLQNSSK; PSTLSSPLQNSSKS; STLSSPLQNSSKSS;
TLSSPLQNSSKSSK; LSSPLQNSSKSSKI; SSPLQNSSKSSKIK; SPLQNSSKSSKIKI;
PLQNSSKSSKIKIK; LQNSSKSSKIKIKI; QNSSKSSKIKIKIL; ALFFVPVQVLPTFT;
LFFVPVQVLPTFTE; FFVPVQVLPTFTEA; FVPVQVLPTFTEAC;
VPVQVLPTFTEACR; PVQVLPTFTEACRD; VQVLPTFTEACRDS;
QVLPTFTEACRDSW; VLPTFTEACRDSWR; LPTFTEACRDSWRR;
PTFTEACRDSWRRT; TFTEACRDSWRRTM; FTEACRDSWRRTMA;
TEACRDSWRRTMAF; EACRDSWRRTMAFV; ACRDSWRRTMAFVQ;
CRDSWRRTMAFVQF; RDSWRRTMAFVQFN; DSWRRTMAFVQFNW;
SWRRTMAFVQFNWG; WRRTMAFVQFNWGQ; RRTMAFVQFNWGQG;
RTMAFVQFNWGQGQ; TMAFVQFNWGQGQD; MAFVQFNWGQGQDS;
ARKTCLSCTFLPEV; RKTCLSCTFLPEVM; KTCLSCTFLPEVMV;
TCLSCTFLPEVMVW; CLSCTFLPEVMVWL; LSCTFLPEVMVWLH;
SCTFLPEVMVWLHS; CTFLPEVMVWLHSM; TFLPEVMVWLHSMG;
FLPEVMVWLHSMGK; LPEVMVWLHSMGKQ; PEVMVWLHSMGKQL;
EVMVWLHSMGKQLL; VMVWLHSMGKQLLP; MVWLHSMGKQLLPV;
VWLHSMGKQLLPVS; WLHSMGKQLLPVSH; LHSMGKQLLPVSHA;
HSMGKQLLPVSHAL; SMGKQLLPVSHALS; MGKQLLPVSHALSF;
GKQLLPVSHALSFL; KQLLPVSHALSFLR; QLLPVSHALSFLRS;
LLPVSHALSFLRSW; LPVSHALSFLRSWF; PVSHALSFLRSWFG;
VSHALSFLRSWFGC; SHALSFLRSWFGCI; HALSFLRSWFGCIP; ALSFLRSWFGCIPL;
GLAKLFGEIPILLQ; LAKLFGEIPILLQF; AKLFGEIPILLQFL; KLFGEIPILLQFLQ

15 mers:

MDKVLNREESMELMD; DKVLNREESMELMDL; KVLNREESMELMDLL;
VLNREESMELMDLLG; LNREESMELMDLLGL; NREESMELMDLLGLE;
REESMELMDLLGLER; EESMELMDLLGLERA; ESMELMDLLGLERAA;
SMELMDLLGLERAAW; MELMDLLGLERAAWG; ELMDLLGLERAAWGN;
LMDLLGLERAAWGNL; MDLLGLERAAWGNLP; DLLGLERAAWGNLPL;
LLGLERAAWGNLPLM; LGLERAAWGNLPLMR; GLERAAWGNLPLMRK;
LERAAWGNLPLMRKA; ERAAWGNLPLMRKAY; RAAWGNLPLMRKAYL;
AAWGNLPLMRKAYLR; AWGNLPLMRKAYLRK; WGNLPLMRKAYLRKC;
GNLPLMRKAYLRKCK; NLPLMRKAYLRKCKE; LPLMRKAYLRKCKEF;
PLMRKAYLRKCKEFH; LMRKAYLRKCKEFHP; MRKAYLRKCKEFHPD;
RKAYLRKCKEFHPDK; KAYLRKCKEFHPDKG; AYLRKCKEFHPDKGG;
YLRKCKEFHPDKGGD; LRKCKEFHPDKGGDE; RKCKEFHPDKGGDED;
KCKEFHPDKGGDEDK; CKEFHPDKGGDEDKM; KEFHPDKGGDEDKMK;
EFHPDKGGDEDKMKR; FHPDKGGDEDKMKRM; HPDKGGDEDKMKRMN;
PDKGGDEDKMKRMNT; DKGGDEDKMKRMNTL; KGGDEDKMKRMNTLY;
GGDEDKMKRMNTLYK; GDEDKMKRMNTLYKK; DEDKMKRMNTLYKKM;
EDKMKRMNTLYKKME; DKMKRMNTLYKKMEQ; KMKRMNTLYKKMEQD;
MKRMNTLYKKMEQDV; KRMNTLYKKMEQDVK; RMNTLYKKMEQDVKV;
MNTLYKKMEQDVKVA; NTLYKKMEQDVKVAH; TLYKKMEQDVKVAHQ;
LYKKMEQDVKVAHQP; YKKMEQDVKVAHQPD; KKMEQDVKVAHQPDF;
KMEQDVKVAHQPDFG; MEQDVKVAHQPDFGT; EQDVKVAHQPDFGTW;
QDVKVAHQPDFGTWS; DVKVAHQPDFGTWSS; VKVAHQPDFGTWSSS;
KVAHQPDFGTWSSSE; VAHQPDFGTWSSSEV; AHQPDFGTWSSSEVC;
HQPDFGTWSSSEVCA; QPDFGTWSSSEVCAD; PDFGTWSSSEVCADF;
DFGTWSSSEVCADFP; FGTWSSSEVCADFPL; GTWSSSEVCADFPLC;
TWSSSEVCADFPLCP; WSSSEVCADFPLCPD; SSSEVCADFPLCPDT;
SSEVCADFPLCPDTL; SEVCADFPLCPDTLY; EVCADFPLCPDTLYC;
VCADFPLCPDTLYCK; CADFPLCPDTLYCKE; ADFPLCPDTLYCKEW;
DFPLCPDTLYCKEWP; FPLCPDTLYCKEWPI; PLCPDTLYCKEWPIC;
LCPDTLYCKEWPICS; CPDTLYCKFWPICSK; PDTLYCKEWPICSKK;
DTLYCKEWPICSKKP; TLYCKEWPICSKKPS; LYCKEWPICSKKPSV;
YCKFWPICSKKPSVH; CKEWPICSKKPSVHC; KEWPICSKKPSVHCP;
EWPICSKKPSVHCPC; WPICSKKPSVHCPCM; PICSKKPSVHCPCML;
ICSKKPSVHCPCMLC; CSKKPSVHCPCMLCQ; SKKPSVHCPCMLCQL;
KKPSVHCPCMLCQLR; KPSVHCPCMLCQLRL; PSVHCPCMLCQLRLR;
SVHCPCMLCQLRLRH; VHCPCMLCQLRLRHL; HCPCMLCQLRLRHLN;
CPCMLCQLRLRHLNR; PCMLCQLRLRHLNRK; CMLCQLRLRHLNRKF;
MLCQLRLRHLNRKFL; LCQLRLRHLNRKFLR; CQLRLRHLNRKFLRK;
QLRLRHLNRKFLRKE; LRLRHLNRKFLRKEP; RLRHLNRKFLRKEPL;
LRHLNRKFLRKEPLV; RHLNRKFLRKEPLVW; HLNRKFLRKEPLVWI;
LNRKFLRKEPLVWID; NRKFLRKEPLVWIDC; RKFLRKEPLVWIDCY;
KFLRKEPLVWIDCYC; FLRKEPLVWIDCYCI; LRKEPLVWIDCYCID;
RKEPLVWIDCYCIDC; KEPLVWIDCYCIDCF; EPLVWIDCYCIDCFT;
PLVWIDCYCIDCFTQ; LVWIDCYCIDCFTQW; VWIDCYCIDCFTQWF;
WIDCYCIDCFTQWFG; IDCYCIDCFTQWFGL; DCYCIDCFTQWFGLD;
CYCIDCFTQWFGLDL; YCIDCFTQWFGLDLT; CIDCFTQWFGLDLTE;
IDCFTQWFGLDLTEE; DCFTQWFGLDLTEET; CFTQWFGLDLTEETL;
FTQWFGLDLTEETLQ; TQWFGLDLTEETLQW; QWFGLDLTEETLQWW;
WFGLDLTEETLQWWV; FGLDLTEETLQWWVQ; GLDLTEETLQWWVQI;
LDLTEETLQWWVQII; DLTEETLQWWVQIIG; LTEETLQWWVQIIGE;
TEETLQWWVQIIGET; EETLQWWVQIIGETP; ETLQWWVQIIGETPF;
TLQWWVQIIGETPFR; LQWWVQIIGETPFRD; QWWVQIIGETPFRDL;
WWVQIIGETPFRDLK; WVQIIGETPFRDLKL; KALSNYFFYRCQPME;
ALSNYFFYRCQPMEQ; LSNYFFYRCQPMEQK; SNYFFYRCQPMEQKS;
NYFFYRCQPMEQKSG; YFFYRCQPMEQKSGS; FFYRCQPMEQKSGSP;
FYRCQPMEQKSGSPG; YRCQPMEQKSGSPGG; RCQPMEQKSGSPGGV;
CQPMEQKSGSPGGVP; QPMEQKSGSPGGVPL; PMEQKSGSPGGVPLM;
MEQKSGSPGGVPLMK; EQKSGSPGGVPLMKN; QKSGSPGGVPLMKNG;
KSGSPGGVPLMKNGM; SGSPGGVPLMKNGMK; GSPGGVPLMKNGMKI;
SPGGVPLMKNGMKIY; PGGVPLMKNGMKIYF; GGVPLMKNGMKIYFA;
GVPLMKNGMKIYFAM; VPLMKNGMKIYFAMK; PLMKNGMKIYFAMKI;
LMKNGMKIYFAMKIC; MKNGMKIYFAMKICL; KNGMKIYFAMKICLP;
NGMKIYFAMKICLPV; GMKIYFAMKICLPVM; MKIYFAMKICLPVMK;
KIYFAMKICLPVMKK; IYFAMKICLPVMKKQ; YFAMKICLPVMKKQQ;
FAMKICLPVMKKQQQ; AMKICLPVMKKQQQI; MKICLPVMKKQQQIL;
KICLPVMKKQQQILN; ICLPVMKKQQQILNT; CLPVMKKQQQILNTQ;
LPVMKKQQQILNTQH; PVMKKQQQILNTQHH; VMKKQQQILNTQHHP;
MKKQQQILNTQHHPK; KKQQQILNTQHHPKK; KQQQILNTQHHPKKK;
QQQILNTQHHPKKKE; QQILNTQHHPKKKER; KTLKTFPLIYTSFLV;
TLKTFPLIYTSFLVK; LKTFPLIYTSFLVKL; KTFPLIYTSFLVKLY;
TFPLIYTSFLVKLYL; FPLIYTSFLVKLYLV; PLIYTSFLVKLYLVI;
LIYTSFLVKLYLVIE; IYTSFLVKLYLVIEP; YTSFLVKLYLVIEPL;
TSFLVKLYLVIEPLP; SFLVKLYLVIEPLPA; FLVKLYLVIEPLPAL;
LVKLYLVIEPLPALL; VKLYLVIEPLPALLC; KLYLVIEPLPALLCI;
LYLVIEPLPALLCIL; YLVIEPLPALLCILL; LVIEPLPALLCILLK;
VIEPLPALLCILLKK; IEPLPALLCILLKKK; EPLPALLCILLKKKL;
PLPALLCILLKKKLK; LPALLCILLKKKLKF; PALLCILLKKKLKFC;
ALLCILLKKKLKFCI; LLCILLKKKLKFCIK; LCILLKKKLKFCIKN;
CILLKKKLKFCIKNL; ILLKKKLKFCIKNLW; LLKKKLKFCIKNLWK;
LKKKLKFCIKNLWKN; KKKLKFCIKNLWKNI; KKLKFCIKNLWKNIL;
LLLVDTCVLGIILYS; LLVDTCVLGIILYSF; LHIDIEFLQLIISVK; HIDIEFLQLIISVKS;
IDIEFLQLIISVKSC; DIEFLQLIISVKSCV; IEFLQLIISVKSCVP; EFLQLIISVKSCVPL;
FLQLIISVKSCVPLV; LQLIISVKSCVPLVF; RSMILAQKSLKKQSR;
SMILAQKSLKKQSRC; MILAQKSLKKQSRCL; ILAQKSLKKQSRCLG;
LAQKSLKKQSRCLGN; RSVKSVRKKTSLITL; SVKSVRKKTSLITLS;
VKSVRKKTSLITLSI; KSVRKKTSLITLSIM; SVRKKTSLITLSIMK;
VRKKTSLITLSIMKS; RKKTSLITLSIMKST; KKTSLITLSIMKSTL;
KTSLITLSIMKSTLQ; TSLITLSIMKSTLQM; SLITLSIMKSTLQML;
LITLSIMKSTLQMLL; ITLSIMKSTLQMLLF; TLSIMKSTLQMLLFL;
LSIMKSTLQMLLFLQ; SIMKSTLQMLLFLQK; IMKSTLQMLLFLQKV;
MKSTLQMLLFLQKVK; KSTLQMLLFLQKVKI; STLQMLLFLQKVKIK;
TLQMLLFLQKVKIKK; LQMLLFLQKVKIKKV; QMLLFLQKVKIKKVF;
MLLFLQKVKIKKVFV; LLFLQKVKIKKVFVS; LFLQKVKIKKVFVSK;
FLQKVKIKKVFVSKQ; NNIWQVLLGCTVCYL; NIWQVLLGCTVCYLK;
IWQVLLGCTVCYLKW; WQVLLGCTVCYLKWI; QVLLGCTVCYLKWIL;
YLIFCTVLFSMYLKE; LIFCTVLFSMYLKED; IFCTVLFSMYLKEDT;
FCTVLFSMYLKEDTG; CTVLFSMYLKEDTGY; TVLFSMYLKEDTGYL;
VLFSMYLKEDTGYLK; LFSMYLKEDTGYLKV; FSMYLKEDTGYLKVP;
SMYLKEDTGYLKVPL; MYLKEDTGYLKVPLI; YLKEDTGYLKVPLIV;
LKFDTGYLKVPLIVE; KEDTGYLKVPLIVEK; EDTGYLKVPLIVEKQ;
DTGYLKVPLIVEKQH; KGQELNQRICLQDME; ENPYKTQSSYLKKEF;
NPYKTQSSYLKKEFY; PYKTQSSYLKKEFYK; YKTQSSYLKKEFYKV;
KTQSSYLKKEFYKVE; LILQLIYNLELLNGR; ILQLIYNLELLNGRK;
LQLIYNLELLNGRKG; QLTYNLELLNGRKGW; LIYNLELLNGRKGWI;
IYNLELLNGRKGWIL; YNLELLNGRKGWILR; NIIYAWGNVFLILQE;
IIYAWGNVFLILQEK; IYAWGNVFLILQEKR; YAWGNVFLILQEKRI;
AWGNVFLILQEKRIQ; WGNVFLILQEKRIQK; GNVFLILQEKRIQKL;
NVFLILQEKRIQKLK; VFLILQEKRIQKLKT; FLILQEKRIQKLKTL;
LILQEKRIQKLKTLD; ILQEKRIQKLKTLDM; LQEKRIQKLKTLDMD;
QEKRIQKLKTLDMDQ; EKRIQKLKTLDMDQA; KRIQKLKTLDMDQAL;
RIQKLKTLDMDQALN; IQKLKTLDMDQALNP; QKLKTLDMDQALNPN;
KLKTLDMDQALNPNH; LKTLDMDQALNPNHN; KTLDMDQALNPNHNA;
TLDMDQALNPNHNAL; LDMDQALNPNHNALP; DMDQALNPNHNALPK;
MDQALNPNHNALPKS; DQALNPNHNALPKSQ; QALNPNHNALPKSQI;
ALNPNHNALPKSQIL; LNPNHNALPKSQILQ; NPNHNALPKSQILQP;
PNHNALPKSQILQPL; NHNALPKSQILQPLL; HNALPKSQILQPLLK;
NALPKSQILQPLLKI; ALPKSQILQPLLKIP; LPKSQILQPLLKIPK;
PKSQILQPLLKIPKG; KSQILQPLLKIPKGQ; SQILQPLLKIPKGQT;
QILQPLLKIPKGQTP; ILQPLLKIPKGQTPI; LQPLLKIPKGQTPIV;
QPLLKIPKGQTPIVK; PLLKIPKGQTPIVKS; LLKIPKGQTPIVKSC;
LKIPKGQTPIVKSCI; KIPKGQTPIVKSCIC; IPKGQTPIVKSCICV;
PKGQTPIVKSCICVK; KGQTPIVKSCICVKA; GQTPIVKSCICVKAF;
QTPIVKSCICVKAFS; TPIVKSCICVKAFSV; PIVKSCICVKAFSVL;
IVKSCICVKAFSVLK; VKSCICVKAFSVLKG; KSCICVKAFSVLKGL;
SCICVKAFSVLKGLK; CICVKAFSVLKGLKH; ICVKAFSVLKGLKHH;
CVKAFSVLKGLKHHP; VKAFSVLKGLKHHPQ; KAFSVLKGLKHHPQN;
AFSVLKGLKHHPQNN; FSVLKGLKHHPQNNT; SVLKGLKHHPQNNTS;
VLKGLKHHPQNNTSL; LKGLKHHPQNNTSLK; KGLKHHPQNNTSLKV;
GLKHHPQNNTSLKVA; LKHHPQNNTSLKVAY; KHHPQNNTSLKVAYT;
HHPQNNTSLKVAYTK; HPQNNTSLKVAYTKA; PQNNTSLKVAYTKAA;
QNNTSLKVAYTKAAF; NNTSLKVAYTKAAFI; NTSLKVAYTKAAFIK;
TSLKVAYTKAAFIKC; SLKVAYTKAAFIKCI; LKVAYTKAAFIKCIC;
KVAYTKAAFIKCICT; VAYTKAAFIKCICTI; AYTKAAFIKCICTIK;
YTKAAFIKCICTIKA; TKAAFIKCICTIKAP; KAAFIKCICTIKAPV;
SILVCNCPCLSIYLI; ILVCNCPCLSIYLII; LVCNCPCLSIYLIIS; VCNCPCLSIYLIISG;
CNCPCLSIYLIISGS; NCPCLSIYLIISGSP; CPCLSIYLIISGSPG; PCLSIYLIISGSPGS;
CLSIYLIISGSPGSL; LSIYLIISGSPGSLS; SIYLIISGSPGSLSV; IYLIISGSPGSLSVP;
YLIISGSPGSLSVPS; LIISGSPGSLSVPSN; IISGSPGSLSVPSNT; ISGSPGSLSVPSNTL;
SGSPGSLSVPSNTLT; GSPGSLSVPSNTLTS; SPGSLSVPSNTLTSS;
PGSLSVPSNTLTSST; GSLSVPSNTLTSSTW; SLSVPSNTLTSSTWD;
LSVPSNTLTSSTWDS; SVPSNTLTSSTWDSI; VPSNTLTSSTWDSIP;
PSNTLTSSTWDSIPY; SNTLTSSTWDSIPYI; NTLTSSTWDSIPYIG;
TLTSSTWDSIPYIGC; LTSSTWDSIPYIGCP; TSSTWDSIPYIGCPS;
SSTWDSIPYIGCPST; STWDSIPYIGCPSTL; TWDSIPYIGCPSTLW;
WDSIPYIGCPSTLWV; DSIPYIGCPSTLWVL; SIPYIGCPSTLWVLL;
IPYIGCPSTLWVLLF; PYIGCPSTLWVLLFI; YIGCPSTLWVLLFIR;
IGCPSTLWVLLFIRS; GCPSTLWVLLFIRSL; CPSTLWVLLFIRSLS;
PSTLWVLLFIRSLSK; STLWVLLFIRSLSKK; TLWVLLFIRSLSKKE;
LWVLLFIRSLSKKEI; WVLLFIRSLSKKEIG; GFFTDLFLRRILKYL;
FFTDLFLRRILKYLA; FTDLFLRRILKYLAR; TDLFLRRILKYLARP;
DLFLRRILKYLARPL; LFLRRILKYLARPLH; FLRRILKYLARPLHC;
LRRILKYLARPLHCC; RRILKYLARPLHCCV; RILKYLARPLHCCVP;
ILKYLARPLHCCVPE; LKYLARPLHCCVPEL; KYLARPLHCCVPELL;
YLARPLHCCVPELLV; LARPLHCCVPELLVN; ARPLHCCVPELLVNR;
RPLHCCVPELLVNRP; PLHCCVPELLVNRPQ; LHCCVPELLVNRPQI;
HCCVPELLVNRPQIS; CCVPELLVNRPQISA; CVPELLVNRPQISAA;
VPELLVNRPQISAAE; PELLVNRPQISAAET; ELLVNRPQISAAETY;
LLVNRPQISAAETYR; LVNRPQISAAETYRL; VNRPQISAAETYRLS;
NRPQISAAETYRLSA; RPQISAAETYRLSAL; PQISAAETYRLSALQ;
QISAAETYRLSALQR; ISAAETYRLSALQRG; SAAETYRLSALQRGP;
AAETYRLSALQRGPT; AETYRLSALQRGPTP; ETYRLSALQRGPTPC;
TYRLSALQRGPTPCS; YRLSALQRGPTPCSS; RLSALQRGPTPCSSS;
LSALQRGPTPCSSSN; SALQRGPTPCSSSNT; ALQRGPTPCSSSNTV;
LQRGPTPCSSSNTVV; QRGPTPCSSSNTVVA; RGPTPCSSSNTVVAV;
GPTPCSSSNTVVAVL; PTPCSSSNTVVAVLV; TPCSSSNTVVAVLVT;
STGGTFSPPVKVPKY; TGGTFSPPVKVPKYL; GGTFSPPVKVPKYLA;
GTFSPPVKVPKYLAF; TFSPPVKVPKYLAFS; FSPPVKVPKYLAFSF;
SPPVKVPKYLAFSFL; PPVKVPKYLAFSFLL; PVKVPKYLAFSFLLG;
VKVPKYLAFSFLLGS; KVPKYLAFSFLLGSG; VPKYLAFSFLLGSGT;
PKYLAFSFLLGSGTQ; KYLAFSFLLGSGTQH; YLAFSFLLGSGTQHS;
LAFSFLLGSGTQHST; AFSFLLGSGTQHSTG; ALWSVFITWDWAVGF;
LWSVFITWDWAVGFL; WSVFITWDWAVGFLG; SVFITWDWAVGFLGV;
VFITWDWAVGFLGVI; FITWDWAVGFLGVIV; ITWDWAVGFLGVIVP;
TWDWAVGFLGVIVPS; WDWAVGFLGVIVPSG; DWAVGFLGVIVPSGY;
WAVGFLGVIVPSGYF; AVGFLGVIVPSGYFD; VGFLGVIVPSGYFDL;
FISTPCISKGSPPTA; ISTPCISKGSPPTAK; STPCISKGSPPTAKK;
TPCISKGSPPTAKKW; PCISKGSPPTAKKWK; CISKGSPPTAKKWKL;
ISKGSPPTAKKWKLL; SKGSPPTAKKWKLLP; IGFPPPCSCTFCDPA;
RLSMLVIPITSVCTV; LSMLVIPITSVCTVT; SMLVIPITSVCTVTA;
MLVIPITSVCTVTAS; LVIPITSVCTVTASH; VIPITSVCTVTASHI;
IPITSVCTVTASHIS; PITSVCTVTASHISR; ITSVCTVTASHISRF;
TSVCTVTASHISRFP; SVCTVTASHISRFPQ; VCTVTASHISRFPQV;
CTVTASHISRFPQVR; TVTASHISRFPQVRS; VTASHISRFPQVRSS;
TASHISRFPQVRSSF; ASHISRFPQVRSSFK; SHISRFPQVRSSFKL;
HISRFPQVRSSFKLG; ISRFPQVRSSFKLGR; SRFPQVRSSFKLGRG;
RFPQVRSSFKLGRGI; FPQVRSSFKLGRGIL; PQVRSSFKLGRGILA;
QVRSSFKLGRGILAV; VRSSFKLGRGILAVL; QGSIFLSGLSLLKSF;
GSIFLSGLSLLKSFS; SIFLSGLSLLKSFSA; IFLSGLSLLKSFSAL;
FLSGLSLLKSFSALS; LSGLSLLKSFSALSF; SGLSLLKSFSALSFR;
GLSLLKSFSALSFRL; LSLLKSFSALSFRLK; SLLKSFSALSFRLKP;
LLKSFSALSFRLKPL; LKSFSALSFRLKPLR; KSFSALSFRLKPLRF;
SFSALSFRLKPLRFS; FSALSFRLKPLRFSS; SALSFRLKPLRFSSG;
ALSFRLKPLRFSSGS; LSFRLKPLRFSSGSP; SFRLKPLRFSSGSPI;
FRLKPLRFSSGSPIS; RLKPLRFSSGSPISG; LKPLRFSSGSPISGF;
KPLRFSSGSPISGFR; PLRFSSGSPISGFRK; LRFSSGSPISGFRKH;
RFSSGSPISGFRKHS; FSSGSPISGFRKHST; SSGSPISGFRKHSTS;
SGSPISGFRKHSTSV; GSPISGFRKHSTSVI; SPISGFRKHSTSVIA;
PISGFRKHSTSVIAS; ISGFRKHSTSVIAST; SGFRKHSTSVIASTP;
GFRKHSTSVIASTPV; FRKHSTSVIASTPVL; RKHSTSVIASTPVLT;
KHSTSVIASTPVLTS; HSTSVIASTPVLTSR; STSVIASTPVLTSRT;
TSVIASTPVLTSRTS; SVIASTPVLTSRTST; VIASTPVLTSRTSTP;
IASTPVLTSRTSTPP; ASTPVLTSRTSTPPF; STPVLTSRTSTPPFI; TPVLTSRTSTPPFIS;
PVLTSRTSTPPFISS; VLTSRTSTPPFISSF; LTSRTSTPPFISSFG; TSRTSTPPFISSFGT;
SRTSTPPFISSFGTC; RTSTPPFISSFGTCT; TSTPPFISSFGTCTG; STPPFISSFGTCTGS;
TPPFISSFGTCTGSF; PPFISSFGTCTGSFG; PFISSFGTCTGSFGF; FISSFGTCTGSFGFL;
ISSFGTCTGSFGFLG; SSFGTCTGSFGFLGA; SFGTCTGSFGFLGAA;
FGTCTGSFGFLGAAP; GTCTGSFGFLGAAPG; TCTGSFGFLGAAPGH;
CTGSFGFLGAAPGHS; TGSFGFLGAAPGHSP; GSFGFLGAAPGHSPF;
SFGFLGAAPGHSPFL; FGFLGAAPGHSPFLL; GFLGAAPGHSPFLLV;
FLGAAPGHSPFLLVG; LGAAPGHSPFLLVGA; GAAPGHSPFLLVGAI;
AAPGHSPFLLVGAIF; APGHSPFLLVGAIFI; PGHSPFLLVGAIFIC;
GHSPFLLVGAIFICF; HSPFLLVGAIFICFK; SPFLLVGAIFICFKS;
PFLLVGAIFICFKSR; FLLVGAIFICFKSRC; LLVGAIFICFKSRCY;
LVGAIFICFKSRCYS; VGAIFICFKSRCYSP; GAIFICFKSRCYSPV;
AIFICFKSRCYSPVQ; IFICFKSRCYSPVQA; RQHPLRSSSLISTSW;
QHPLRSSSLISTSWG; HPLRSSSLISTSWGN; PLRSSSLISTSWGNS;
LRSSSLISTSWGNSF; RSSSLISTSWGNSFF; SSSLISTSWGNSFFY;
SSLISTSWGNSFFYK; SLISTSWGNSFFYKL; LISTSWGNSFFYKLS;
VHSLCNFFYTVSIIY; HSLCNFFYTVSIIYT; SLCNFFYTVSIIYTI; LCNFFYTVSIIYTIS;
CNFFYTVSIIYTISM; NFFYTVSIIYTISMA; FFYTVSIIYTISMAK;
FYTVSIIYTISMAKM; YTVSIIYTISMAKMY; TVSIIYTISMAKMYT;
VSIIYTISMAKMYTG; SIIYTISMAKMYTGT; IIYTISMAKMYTGTF;
IYTISMAKMYTGTFP; YTISMAKMYTGTFPF; TISMAKMYTGTFPFS;
ISMAKMYTGTFPFSY; SMAKMYTGTFPFSYL; MAKMYTGTFPFSYLS;
AKMYTGTFPFSYLSN; KMYTGTFPFSYLSNH; GPNRGKIRIILLNII;
PNRGKIRIILLNIII; NRGKIRIILLNIIIK; RGKIRIILLNIIIKV; GKIRIILLNIIIKVY;
KIRIILLNIIIKVYR; IRIILLNIIIKVYRG; RIILLNIIIKVYRGI; IILLNIIIKVYRGIY;
ILLNIIIKVYRGIYN; LLNIIIKVYRGIYNC; LNIIIKVYRGIYNCP;
NIIIKVYRGIYNCPG; IIIKVYRGIYNCPGS; IIKVYRGIYNCPGSF;
IKVYRGIYNCPGSFL; KVYRGIYNCPGSFLQ; VYRGIYNCPGSFLQK;
YRGIYNCPGSFLQKS; RGIYNCPGSFLQKSS; GIYNCPGSFLQKSSQ;
IYNCPGSFLQKSSQG; YNCPGSFLQKSSQGV; NCPGSFLQKSSQGVS;
CPGSFLQKSSQGVSK; PGSFLQKSSQGVSKK; GSFLQKSSQGVSKKS;
SFLQKSSQGVSKKSF; FLQKSSQGVSKKSFC; LQKSSQGVSKKSFCS;
QKSSQGVSKKSFCSS; KSSQGVSKKSFCSSL; SSQGVSKKSFCSSLQ;
SQGVSKKSFCSSLQF; QGVSKKSFCSSLQFL; GYRRYIIPNNMPQSL;
YRRYIIPNNMPQSLG; RRYIIPNNMPQSLGN; RYIIPNNMPQSLGNS;
YIIPNNMPQSLGNSS; IIPNNMPQSLGNSSK; IPNNMPQSLGNSSKQ;
PNNMPQSLGNSSKQR; NNMPQSLGNSSKQRR; NMPQSLGNSSKQRRT;
MPQSLGNSSKQRRTP; PQSLGNSSKQRRTPM; QSLGNSSKQRRTPMP;
SLGNSSKQRRTPMPR; LGNSSKQRRTPMPRI; GNSSKQRRTPMPRIK;
NSSKQRRTPMPRIKV; SSKQRRTPMPRIKVL; SKQRRTPMPRIKVLN;
KQRRTPMPRIKVLNI; QRRTPMPRIKVLNII; RRTPMPRIKVLNIIN;
RTPMPRIKVLNIINK; TPMPRIKVLNIINKS; PMPRIKVLNIINKSI;
MPRIKVLNIINKSIY; PRIKVLNIINKSIYT; RIKVLNIINKSIYTR; IKVLNIINKSIYTRK;
KVLNIINKSIYTRKQ; VLNIINKSIYTRKQN; LNIINKSIYTRKQNI;
NIINKSIYTRKQNII; IINKSIYTRKQNIIV; INKSIYTRKQNIIVL; NKSIYTRKQNIIVLI;
KSIYTRKQNIIVLIW; SIYTRKQNIIVLIWV; IYTRKQNIIVLIWVK;
YTRKQNIIVLIWVKQ; TRKQNIIVLIWVKQF; RKQNIIVLIWVKQFQ;
KQNIIVLIWVKQFQS; QNIIVLIWVKQFQSH; NIIVLIWVKQFQSHA;
LLIEAYSGNFVIPII; LIEAYSGNFVIPIIK; IEAYSGNFVIPIIKE; EAYSGNFVIPIIKEL;
AYSGNFVIPIIKELI; YSGNFVIPIIKELIP; SGNFVIPIIKELIPY; GNFVIPIIKELIPYL;
NFVIPIIKELIPYLS; SSKPSNSPRSTSNYS; SKPSNSPRSTSNYSI;
KPSNSPRSTSNYSIC; PSNSPRSTSNYSICL; SNSPRSTSNYSICLR;
NSPRSTSNYSICLRS; GTCYALYSSKGCNLN; TCYALYSSKGCNLNF;
CYALYSSKGCNLNFY; YALYSSKGCNLNFYS; ALYSSKGCNLNFYSS;
LYSSKGCNLNFYSSS; YSSKGCNLNFYSSSS; SSKGCNLNFYSSSSL;
SKGCNLNFYSSSSLP; KGCNLNFYSSSSLPS; GCNLNFYSSSSLPSS;
CNLNFYSSSSLPSSN; NLNFYSSSSLPSSNF; LNFYSSSSLPSSNFS;
NFYSSSSLPSSNFSH; SSTHEPGNTKKKGLL; STHEPGNTKKKGLLT;
ESFTESFTAGKAVVL; SFTESFTAGKAVVLL; FTESFTAGKAVVLLF;
TESFTAGKAVVLLFF; ESFTAGKAVVLLFFP; SFTAGKAVVLLFFPS;
FTAGKAVVLLFFPST; TAGKAVVLLFFPSTL; AGKAVVLLFFPSTLS;
GKAVVLLFFPSTLSS; KAVVLLFFPSTLSSP; AVVLLFFPSTLSSPL;
VVLLFFPSTLSSPLQ; VLLFFPSTLSSPLQN; LLFFPSTLSSPLQNS;
LFFPSTLSSPLQNSS; FFPSTLSSPLQNSSK; FPSTLSSPLQNSSKS;
PSTLSSPLQNSSKSS; STLSSPLQNSSKSSK; TLSSPLQNSSKSSKI;
LSSPLQNSSKSSKIK; SSPLQNSSKSSKIKI; SPLQNSSKSSKIKIK;
PLQNSSKSSKIKIKI; LQNSSKSSKIKIKIL; ALFFVPVQVLPTFTE;
LFFVPVQVLPTFTEA; FFVPVQVLPTFTEAC; FVPVQVLPTFTEACR;
VPVQVLPTFTEACRD; PVQVLPTFTEACRDS; VQVLPTFTEACRDSW;
QVLPTFTEACRDSWR; VLPTFTEACRDSWRR; LPTFTEACRDSWRRT;
PTFTEACRDSWRRTM; TFTEACRDSWRRTMA; FTEACRDSWRRTMAF;
TEACRDSWRRTMAFV; EACRDSWRRTMAFVQ; ACRDSWRRTMAFVQF;
CRDSWRRTMAFVQFN; RDSWRRTMAFVQFNW; DSWRRTMAFVQFNWG;
SWRRTMAFVQFNWGQ; WRRTMAFVQFNWGQG; RRTMAFVQFNWGQGQ;
RTMAFVQFNWGQGQD; TMAFVQFNWGQGQDS; ARKTCLSCTFLPEVM;
RKTCLSCTFLPEVMV; KTCLSCTFLPEVMVW; TCLSCTFLPEVMVWL;
CLSCTFLPEVMVWLH; LSCTFLPEVMVWLHS; SCTFLPEVMVWLHSM;
CTFLPEVMVWLHSMG; TFLPEVMVWLHSMGK; FLPEVMVWLHSMGKQ;
LPEVMVWLHSMGKQL; PEVMVWLHSMGKQLL; EVMVWLHSMGKQLLP;
VMVWLHSMGKQLLPV; MVWLHSMGKQLLPVS; VWLHSMGKQLLPVSH;
WLHSMGKQLLPVSHA; LHSMGKQLLPVSHAL; HSMGKQLLPVSHALS;
SMGKQLLPVSHALSF; MGKQLLPVSHALSFL; GKQLLPVSHALSFLR;
KQLLPVSHALSFLRS; QLLPVSHALSFLRSW; LLPVSHALSFLRSWF;
LPVSHALSFLRSWFG; PVSHALSFLRSWFGC; VSHALSFLRSWFGCI;
SHALSFLRSWFGCIP; HALSFLRSWFGCIPL; GLAKLFGEIPILLQF;
LAKLFGEIPILLQFL; AKLFGEIPILLQFLQ

16 mers:

MDKVLNREESMELMDL; DKVLNREESMELMDLL; KVLNREESMELMDLLG;
VLNREESMELMDLLGL; LNREESMELMDLLGLE; NREESMELMDLLGLER;
REESMELMDLLGLERA; EESMELMDLLGLERAA; ESMELMDLLGLERAAW;
SMELMDLLGLERAAWG; MELMDLLGLERAAWGN; ELMDLLGLERAAWGNL;
LMDLLGLERAAWGNLP; MDLLGLERAAWGNLPL; DLLGLERAAWGNLPLM;
LLGLERAAWGNLPLMR; LGLERAAWGNLPLMRK; GLERAAWGNLPLMRKA;
LERAAWGNLPLMRKAY; ERAAWGNLPLMRKAYL; RAAWGNLPLMRKAYLR;
AAWGNLPLMRKAYLRK; AWGNLPLMRKAYLRKC; WGNLPLMRKAYLRKCK;
GNLPLMRKAYLRKCKE; NLPLMRKAYLRKCKEF; LPLMRKAYLRKCKEFH;
PLMRKAYLRKCKEFHP; LMRKAYLRKCKEFHPD; MRKAYLRKCKEFHPDK;
RKAYLRKCKEFHPDKG; KAYLRKCKEFHPDKGG; AYLRKCKEFHPDKGGD;
YLRKCKEFHPDKGGDE; LRKCKEFHPDKGGDED; RKCKEFHPDKGGDEDK;
KCKEFHPDKGGDEDKM; CKEFHPDKGGDEDKMK; KEFHPDKGGDEDKMKR;
EFHPDKGGDEDKMKRM; FHPDKGGDEDKMKRMN; HPDKGGDEDKMKRMNT;
PDKGGDEDKMKRMNTL; DKGGDEDKMKRMNTLY; KGGDEDKMKRMNTLYK;
GGDEDKMKRMNTLYKK; GDEDKMKRMNTLYKKM; DEDKMKRMNTLYKKME;
EDKMKRMNTLYKKMEQ; DKMKRMNTLYKKMEQD; KMKRMNTLYKKMEQDV;
MKRMNTLYKKMEQDVK; KRMNTLYKKMEQDVKV; RMNTLYKKMEQDVKVA;
MNTLYKKMEQDVKVAH; NTLYKKMEQDVKVAHQ; TLYKKMEQDVKVAHQP;
LYKKMEQDVKVAHQPD; YKKMEQDVKVAHQPDF; KKMEQDVKVAHQPDFG;
KMEQDVKVAHQPDFGT; MEQDVKVAHQPDFGTW; EQDVKVAHQPDFGTWS;
QDVKVAHQPDFGTWSS; DVKVAHQPDFGTWSSS; VKVAHQPDFGTWSSSE;
KVAHQPDFGTWSSSEV; VAHQPDFGTWSSSEVC; AHQPDFGTWSSSEVCA;
HQPDFGTWSSSEVCAD; QPDFGTWSSSEVCADF; PDFGTWSSSEVCADFP;
DFGTWSSSEVCADFPL; FGTWSSSEVCADFPLC; GTWSSSEVCADFPLCP;
TWSSSEVCADFPLCPD; WSSSEVCADFPLCPDT; SSSEVCADFPLCPDTL;
SSEVCADFPLCPDTLY; SEVCADFPLCPDTLYC; EVCADFPLCPDTLYCK;
VCADFPLCPDTLYCKE; CADFPLCPDTLYCKEW; ADFPLCPDTLYCKEWP;
DFPLCPDTLYCKEWPI; FPLCPDTLYCKEWPIC; PLCPDTLYCKEWPICS;
LCPDTLYCKEWPICSK; CPDTLYCKEWPICSKK; PDTLYCKEWPICSKKP;
DTLYCKEWPICSKKPS; TLYCKEWPICSKKPSV; LYCKEWPICSKKPSVH;
YCKEWPICSKKPSVHC; CKEWPICSKKPSVHCP; KEWPICSKKPSVHCPC;
EWPICSKKPSVHCPCM; WPICSKKPSVHCPCML; PICSKKPSVHCPCMLC;
ICSKKPSVHCPCMLCQ; CSKKPSVHCPCMLCQL; SKKPSVHCPCMLCQLR;
KKPSVHCPCMLCQLRL; KPSVHCPCMLCQLRLR; PSVHCPCMLCQLRLRH;
SVHCPCMLCQLRLRHL; VHCPCMLCQLRLRHLN; HCPCMLCQLRLRHLNR;
CPCMLCQLRLRHLNRK; PCMLCQLRLRHLNRKF; CMLCQLRLRHLNRKFL;
MLCQLRLRHLNRKFLR; LCQLRLRHLNRKFLRK; CQLRLRHLNRKFLRKE;
QLRLRHLNRKFLRKEP; LRLRHLNRKFLRKEPL; RLRHLNRKFLRKEPLV;
LRHLNRKFLRKEPLVW; RHLNRKFLRKEPLVWI; HLNRKFLRKEPLVWID;
LNRKFLRKEPLVWIDC; NRKFLRKEPLVWIDCY; RKFLRKEPLVWIDCYC;
KFLRKEPLVWIDCYCI; FLRKEPLVWIDCYCID; LRKEPLVWIDCYCIDC;
RKEPLVWIDCYCIDCF; KEPLVWIDCYCIDCFT; EPLVWIDCYCIDCFTQ;
PLVWIDCYCIDCFTQW; LVWIDCYCIDCFTQWF; VWIDCYCIDCFTQWFG;
WIDCYCIDCFTQWFGL; IDCYCIDCFTQWFGLD; DCYCIDCFTQWFGLDL;
CYCIDCFTQWFGLDLT; YCIDCFTQWFGLDLTE; CIDCFTQWFGLDLTEE;
IDCFTQWFGLDLTEET; DCFTQWFGLDLTEETL; CFTQWFGLDLTEETLQ;
FTQWFGLDLTEETLQW; TQWFGLDLTEETLQWW; QWFGLDLTEETLQWWV;
WFGLDLTEETLQWWVQ; FGLDLTEETLQWWVQI; GLDLTEETLQWWVQII;
LDLTEETLQWWVQIIG; DLTEETLQWWVQIIGE; LTEETLQWWVQIIGET;
TEETLQWWVQIIGETP; EETLQWWVQIIGETPF; ETLQWWVQIIGETPFR;
TLQWWVQIIGETPFRD; LQWWVQIIGETPFRDL; QWWVQIIGETPFRDLK;
WWVQIIGETPFRDLKL; KALSNYFFYRCQPMEQ; ALSNYFFYRCQPMEQK;
LSNYFFYRCQPMEQKS; SNYFFYRCQPMEQKSG; NYFFYRCQPMEQKSGS;
YFFYRCQPMEQKSGSP; FFYRCQPMEQKSGSPG; FYRCQPMEQKSGSPGG;
YRCQPMEQKSGSPGGV; RCQPMEQKSGSPGGVP; CQPMEQKSGSPGGVPL;
QPMEQKSGSPGGVPLM; PMEQKSGSPGGVPLMK; MEQKSGSPGGVPLMKN;
EQKSGSPGGVPLMKNG; QKSGSPGGVPLMKNGM; KSGSPGGVPLMKNGMK;
SGSPGGVPLMKNGMKI; GSPGGVPLMKNGMKIY; SPGGVPLMKNGMKIYF;
PGGVPLMKNGMKIYFA; GGVPLMKNGMKIYFAM; GVPLMKNGMKIYFAMK;
VPLMKNGMKIYFAMKI; PLMKNGMKIYFAMKIC; LMKNGMKIYFAMKICL;
MKNGMKIYFAMKICLP; KNGMKIYFAMKICLPV; NGMKIYFAMKICLPVM;
GMKIYFAMKICLPVMK; MKIYFAMKICLPVMKK; KIYFAMKICLPVMKKQ;
IYFAMKICLPVMKKQQ; YFAMKICLPVMKKQQQ; FAMKICLPVMKKQQQI;
AMKICLPVMKKQQQIL; MKICLPVMKKQQQILN; KICLPVMKKQQQILNT;
ICLPVMKKQQQILNTQ; CLPVMKKQQQILNTQH; LPVMKKQQQILNTQHH;
PVMKKQQQILNTQHHP; VMKKQQQILNTQHHPK; MKKQQQILNTQHHPKK;
KKQQQILNTQHHPKKK; KQQQILNTQHHPKKKE; QQQILNTQHHPKKKER;
KTLKTFPLIYTSFLVK; TLKTFPLIYTSFLVKL; LKTFPLIYTSFLVKLY;
KTFPLIYTSFLVKLYL; TFPLIYTSFLVKLYLV; FPLIYTSFLVKLYLVI;
PLIYTSFLVKLYLVIE; LIYTSFLVKLYLVIEP; IYTSFLVKLYLVIEPL;
YTSFLVKLYLVIEPLP; TSFLVKLYLVIEPLPA; SFLVKLYLVIEPLPAL;
FLVKLYLVIEPLPALL; LVKLYLVIEPLPALLC; VKLYLVIEPLPALLCI;
KLYLVIEPLPALLCIL; LYLVIEPLPALLCILL; YLVIEPLPALLCILLK;
LVIEPLPALLCILLKK; VIEPLPALLCILLKKK; IEPLPALLCILLKKKL;
EPLPALLCILLKKKLK; PLPALLCILLKKKLKF; LPALLCILLKKKLKFC;
PALLCILLKKKLKFCI; ALLCILLKKKLKFCIK; LLCILLKKKLKFCIKN;
LCILLKKKLKFCIKNL; CILLKKKLKFCIKNLW; ILLKKKLKFCIKNLWK;
LLKKKLKFCIKNLWKN; LKKKLKFCIKNLWKNI; KKKLKFCIKNLWKNIL;
LLLVDTCVLGIILYSF; LHIDIEFLQLIISVKS; HIDIEFLQLIISVKSC;
IDIEFLQLIISVKSCV; DIEFLQLIISVKSCVP; IEFLQLIISVKSCVPL;
EFLQLIISVKSCVPLV; FLQLIISVKSCVPLVF; RSMILAQKSLKKQSRC;
SMILAQKSLKKQSRCL; MILAQKSLKKQSRCLG; ILAQKSLKKQSRCLGN;
RSVKSVRKKTSLITLS; SVKSVRKKTSLITLSI; VKSVRKKTSLITLSIM;
KSVRKKTSLITLSIMK; SVRKKTSLITLSIMKS; VRKKTSLITLSIMKST;
RKKTSLITLSIMKSTL; KKTSLITLSIMKSTLQ; KTSLITLSIMKSTLQM;
TSLITLSIMKSTLQML; SLITLSIMKSTLQMLL; LITLSIMKSTLQMLLF;
ITLSIMKSTLQMLLFL; TLSIMKSTLQMLLFLQ; LSIMKSTLQMLLFLQK;
SIMKSTLQMLLFLQKV; IMKSTLQMLLFLQKVK; MKSTLQMLLFLQKVKI;
KSTLQMLLFLQKVKIK; STLQMLLFLQKVKIKK; TLQMLLFLQKVKIKKV;
LQMLLFLQKVKIKKVF; QMLLFLQKVKIKKVFV; MLLFLQKVKIKKVFVS;
LLFLQKVKIKKVFVSK; LFLQKVKIKKVFVSKQ; NNIWQVLLGCTVCYLK;
NIWQVLLGCTVCYLKW; IWQVLLGCTVCYLKWI; WQVLLGCTVCYLKWIL;
YLIFCTVLFSMYLKED; LIFCTVLFSMYLKEDT; IFCTVLFSMYLKEDTG;
FCTVLFSMYLKEDTGY; CTVLFSMYLKEDTGYL; TVLFSMYLKEDTGYLK;
VLFSMYLKEDTGYLKV; LFSMYLKEDTGYLKVP; FSMYLKEDTGYLKVPL;
SMYLKEDTGYLKVPLI; MYLKEDTGYLKVPLIV; YLKEDTGYLKVPLIVE;
LKEDTGYLKVPLIVEK; KEDTGYLKVPLIVEKQ; EDTGYLKVPLIVEKQH;
ENPYKTQSSYLKKEFY; NPYKTQSSYLKKEFYK; PYKTQSSYLKKEFYKV;
YKTQSSYLKKEFYKVE; LILQLIYNLELLNGRK; ILQLIYNLELLNGRKG;
LQLIYNLELLNGRKGW; QLIYNLELLNGRKGWI; LIYNLELLNGRKGWIL;
IYNLELLNGRKGWILR; NIIYAWGNVFLILQEK; IIYAWGNVFLILQEKR;
IYAWGNVFLILQEKRI; YAWGNVFLILQEKRIQ; AWGNVFLILQEKRIQK;
WGNVFLILQEKRIQKL; GNVFLILQEKRIQKLK; NVFLILQEKRIQKLKT;
VFLILQEKRIQKLKTL; FLILQEKRIQKLKTLD; LILQEKRIQKLKTLDM;
ILQEKRIQKLKTLDMD; LQEKRIQKLKTLDMDQ; QEKRIQKLKTLDMDQA;
EKRIQKLKTLDMDQAL; KRIQKLKTLDMDQALN; RIQKLKTLDMDQALNP;
IQKLKTLDMDQALNPN; QKLKTLDMDQALNPNH; KLKTLDMDQALNPNHN;
LKTLDMDQALNPNHNA; KTLDMDQALNPNHNAL; TLDMDQALNPNHNALP;
LDMDQALNPNHNALPK; DMDQALNPNHNALPKS; MDQALNPNHNALPKSQ;
DQALNPNHNALPKSQI; QALNPNHNALPKSQIL; ALNPNHNALPKSQILQ;
LNPNHNALPKSQILQP; NPNHNALPKSQILQPL; PNHNALPKSQILQPLL;
NHNALPKSQILQPLLK; HNALPKSQILQPLLKI; NALPKSQILQPLLKIP;
ALPKSQILQPLLKIPK; LPKSQILQPLLKIPKG; PKSQILQPLLKIPKGQ;
KSQILQPLLKIPKGQT; SQILQPLLKIPKGQTP; QILQPLLKIPKGQTPI;
ILQPLLKIPKGQTPIV; LQPLLKIPKGQTPIVK; QPLLKIPKGQTPIVKS;
PLLKIPKGQTPIVKSC; LLKIPKGQTPIVKSCI; LKIPKGQTPIVKSCIC;
KIPKGQTPIVKSCICV; IPKGQTPIVKSCICVK; PKGQTPIVKSCICVKA;
KGQTPIVKSCICVKAF; GQTPIVKSCICVKAFS; QTPIVKSCICVKAFSV;
TPIVKSCICVKAFSVL; PIVKSCICVKAFSVLK; IVKSCICVKAFSVLKG;
VKSCICVKAFSVLKGL; KSCICVKAFSVLKGLK; SCICVKAFSVLKGLKH;
CICVKAFSVLKGLKHH; ICVKAFSVLKGLKHHP; CVKAFSVLKGLKHHPQ;
VKAFSVLKGLKHHPQN; KAFSVLKGLKHHPQNN; AFSVLKGLKHHPQNNT;
FSVLKGLKHHPQNNTS; SVLKGLKHHPQNNTSL; VLKGLKHHPQNNTSLK;
LKGLKHHPQNNTSLKV; KGLKHHPQNNTSLKVA; GLKHHPQNNTSLKVAY;
LKHHPQNNTSLKVAYT; KHHPQNNTSLKVAYTK; HHPQNNTSLKVAYTKA;
HPQNNTSLKVAYTKAA; PQNNTSLKVAYTKAAF; QNNTSLKVAYTKAAFI;
NNTSLKVAYTKAAFIK; NTSLKVAYTKAAFIKC; TSLKVAYTKAAFIKCI;
SLKVAYTKAAFIKCIC; LKVAYTKAAFIKCICT; KVAYTKAAFIKCICTI;
VAYTKAAFIKCICTIK; AYTKAAFIKCICTIKA; YTKAAFIKCICTIKAP;
TKAAFIKCICTIKAPV; SILVCNCPCLSIYLII; ILVCNCPCLSIYLIIS;
LVCNCPCLSIYLIISG; VCNCPCLSIYLIISGS; CNCPCLSIYLIISGSP;
NCPCLSIYLIISGSPG; CPCLSIYLIISGSPGS; PCLSIYLIISGSPGSL;
CLSIYLIISGSPGSLS; LSIYLIISGSPGSLSV; SIYLIISGSPGSLSVP;
IYLIISGSPGSLSVPS; YLIISGSPGSLSVPSN; LIISGSPGSLSVPSNT;
IISGSPGSLSVPSNTL; ISGSPGSLSVPSNTLT; SGSPGSLSVPSNTLTS;
GSPGSLSVPSNTLTSS; SPGSLSVPSNTLTSST; PGSLSVPSNTLTSSTW;
GSLSVPSNTLTSSTWD; SLSVPSNTLTSSTWDS; LSVPSNTLTSSTWDSI;
SVPSNTLTSSTWDSIP; VPSNTLTSSTWDSIPY; PSNTLTSSTWDSIPYI;
SNTLTSSTWDSIPYIG; NTLTSSTWDSIPYIGC; TLTSSTWDSIPYIGCP;
LTSSTWDSIPYIGCPS; TSSTWDSIPYIGCPST; SSTWDSIPYIGCPSTL;
STWDSIPYIGCPSTLW; TWDSIPYIGCPSTLWV; WDSIPYIGCPSTLWVL;
DSIPYIGCPSTLWVLL; SIPYIGCPSTLWVLLF; IPYIGCPSTLWVLLFI;
PYIGCPSTLWVLLFIR; YIGCPSTLWVLLFIRS; IGCPSTLWVLLFIRSL;
GCPSTLWVLLFIRSLS; CPSTLWVLLFIRSLSK; PSTLWVLLFIRSLSKK;
STLWVLLFIRSLSKKE; TLWVLLFIRSLSKKEI; LWVLLFIRSLSKKEIG;
GFFTDLFLRRILKYLA; FFTDLFLRRILKYLAR; FTDLFLRRILKYLARP;
TDLFLRRILKYLARPL; DLFLRRILKYLARPLH; LFLRRILKYLARPLHC;
FLRRILKYLARPLHCC; LRRILKYLARPLHCCV; RRILKYLARPLHCCVP;
RILKYLARPLHCCVPE; ILKYLARPLHCCVPEL; LKYLARPLHCCVPELL;
KYLARPLHCCVPELLV; YLARPLHCCVPELLVN; LARPLHCCVPELLVNR;
ARPLHCCVPELLVNRP; RPLHCCVPELLVNRPQ; PLHCCVPELLVNRPQI;
LHCCVPELLVNRPQIS; HCCVPELLVNRPQISA; CCVPELLVNRPQISAA;
CVPELLVNRPQISAAE; VPELLVNRPQISAAET; PELLVNRPQISAAETY;
ELLVNRPQISAAETYR; LLVNRPQISAAETYRL; LVNRPQISAAETYRLS;
VNRPQISAAETYRLSA; NRPQISAAETYRLSAL; RPQISAAETYRLSALQ;
PQISAAETYRLSALQR; QISAAETYRLSALQRG; ISAAETYRLSALQRGP;
SAAETYRLSALQRGPT; AAETYRLSALQRGPTP; AETYRLSALQRGPTPC;
ETYRLSALQRGPTPCS; TYRLSALQRGPTPCSS; YRLSALQRGPTPCSSS;
RLSALQRGPTPCSSSN; LSALQRGPTPCSSSNT; SALQRGPTPCSSSNTV;
ALQRGPTPCSSSNTVV; LQRGPTPCSSSNTVVA; QRGPTPCSSSNTVVAV;
RGPTPCSSSNTVVAVL; GPTPCSSSNTVVAVLV; PTPCSSSNTVVAVLVT;
STGGTFSPPVKVPKYL; TGGTFSPPVKVPKYLA; GGTFSPPVKVPKYLAF;
GTFSPPVKVPKYLAFS; TFSPPVKVPKYLAFSF; FSPPVKVPKYLAFSFL;
SPPVKVPKYLAFSFLL; PPVKVPKYLAFSFLLG; PVKVPKYLAFSFLLGS;
VKVPKYLAFSFLLGSG; KVPKYLAFSFLLGSGT; VPKYLAFSFLLGSGTQ;
PKYLAFSFLLGSGTQH; KYLAFSFLLGSGTQHS; YLAFSFLLGSGTQHST;
LAFSFLLGSGTQHSTG; ALWSVFITWDWAVGFL; LWSVFITWDWAVGFLG;
WSVFITWDWAVGFLGV; SVFITWDWAVGFLGVI; VFITWDWAVGFLGVIV;
FITWDWAVGFLGVIVP; ITWDWAVGFLGVIVPS; TWDWAVGFLGVIVPSG;
WDWAVGFLGVIVPSGY; DWAVGFLGVIVPSGYF; WAVGFLGVIVPSGYFD;
AVGFLGVIVPSGYFDL; FISTPCISKGSPPTAK; ISTPCISKGSPPTAKK;
STPCISKGSPPTAKKW; TPCISKGSPPTAKKWK; PCISKGSPPTAKKWKL;
CISKGSPPTAKKWKLL; ISKGSPPTAKKWKLLP; RLSMLVIPITSVCTVT;
LSMLVIPITSVCTVTA; SMLVIPITSVCTVTAS; MLVIPITSVCTVTASH;
LVIPITSVCTVTASHI; VIPITSVCTVTASHIS; IPITSVCTVTASHISR;
PITSVCTVTASHISRF; ITSVCTVTASHISRFP; TSVCTVTASHISRFPQ;
SVCTVTASHISRFPQV; VCTVTASHISRFPQVR; CTVTASHISRFPQVRS;
TVTASHISRFPQVRSS; VTASHISRFPQVRSSF; TASHISRFPQVRSSFK;
ASHISRFPQVRSSFKL; SHISRFPQVRSSFKLG; HISRFPQVRSSFKLGR;
ISRFPQVRSSFKLGRG; SRFPQVRSSFKLGRGI; RFPQVRSSFKLGRGIL;
FPQVRSSFKLGRGILA; PQVRSSFKLGRGILAV; QVRSSFKLGRGILAVL;
QGSIFLSGLSLLKSFS; GSIFLSGLSLLKSFSA; SIFLSGLSLLKSFSAL;
IFLSGLSLLKSFSALS; FLSGLSLLKSFSALSF; LSGLSLLKSFSALSFR;
SGLSLLKSFSALSFRL; GLSLLKSFSALSFRLK; LSLLKSFSALSFRLKP;
SLLKSFSALSFRLKPL; LLKSFSALSFRLKPLR; LKSFSALSFRLKPLRF;
KSFSALSFRLKPLRFS; SFSALSFRLKPLRFSS; FSALSFRLKPLRFSSG;
SALSFRLKPLRFSSGS; ALSFRLKPLRFSSGSP; LSFRLKPLRFSSGSPI;
SFRLKPLRFSSGSPIS; FRLKPLRFSSGSPISG; RLKPLRFSSGSPISGF;
LKPLRFSSGSPISGFR; KPLRFSSGSPISGFRK; PLRFSSGSPISGFRKH;
LRFSSGSPISGFRKHS; RFSSGSPISGFRKHST; FSSGSPISGFRKHSTS;
SSGSPISGFRKHSTSV; SGSPISGFRKHSTSVI; GSPISGFRKHSTSVIA;
SPISGFRKHSTSVIAS; PISGFRKHSTSVIAST; ISGFRKHSTSVIASTP;
SGFRKHSTSVIASTPV; GFRKHSTSVIASTPVL; FRKHSTSVIASTPVLT;
RKHSTSVIASTPVLTS; KHSTSVIASTPVLTSR; HSTSVIASTPVLTSRT;
STSVIASTPVLTSRTS; TSVIASTPVLTSRTST; SVIASTPVLTSRTSTP;
VIASTPVLTSRTSTPP; IASTPVLTSRTSTPPF; ASTPVLTSRTSTPPFI;
STPVLTSRTSTPPFIS; TPVLTSRTSTPPFISS; PVLTSRTSTPPFISSF;
VLTSRTSTPPFISSFG; LTSRTSTPPFISSFGT; TSRTSTPPFISSFGTC;
SRTSTPPFISSFGTCT; RTSTPPFISSFGTCTG; TSTPPFISSFGTCTGS;
STPPFISSFGTCTGSF; TPPFISSFGTCTGSFG; PPFISSFGTCTGSFGF;
PFISSFGTCTGSFGFL; FISSFGTCTGSFGFLG; ISSFGTCTGSFGFLGA;
SSFGTCTGSFGFLGAA; SFGTCTGSFGFLGAAP; FGTCTGSFGFLGAAPG;
GTCTGSFGFLGAAPGH; TCTGSFGFLGAAPGHS; CTGSFGFLGAAPGHSP;
TGSFGFLGAAPGHSPF; GSFGFLGAAPGHSPFL; SFGFLGAAPGHSPFLL;
FGFLGAAPGHSPFLLV; GFLGAAPGHSPFLLVG; FLGAAPGHSPFLLVGA;
LGAAPGHSPFLLVGAI; GAAPGHSPFLLVGAIF; AAPGHSPFLLVGAIFI;
APGHSPFLLVGAIFIC; PGHSPFLLVGAIFICF; GHSPFLLVGAIFICFK;
HSPFLLVGAIFICFKS; SPFLLVGAIFICFKSR; PFLLVGAIFICFKSRC;
FLLVGAIFICFKSRCY; LLVGAIFICFKSRCYS; LVGAIFICFKSRCYSP;
VGAIFICFKSRCYSPV; GAIFICFKSRCYSPVQ; AIFICFKSRCYSPVQA;
RQHPLRSSSLISTSWG; QHPLRSSSLISTSWGN; HPLRSSSLISTSWGNS;
PLRSSSLISTSWGNSF; LRSSSLISTSWGNSFF; RSSSLISTSWGNSFFY;
SSSLISTSWGNSFFYK; SSLISTSWGNSFFYKL; SLISTSWGNSFFYKLS;
VHSLCNFFYTVSIIYT; HSLCNFFYTVSIIYTI; SLCNFFYTVSIIYTIS;
LCNFFYTVSIIYTISM; CNFFYTVSIIYTISMA; NFFYTVSIIYTISMAK;
FFYTVSIIYTISMAKM; FYTVSIIYTISMAKMY; YTVSIIYTISMAKMYT;
TVSIIYTISMAKMYTG; VSIIYTISMAKMYTGT; SIIYTISMAKMYTGTF;
IIYTISMAKMYTGTFP; IYTISMAKMYTGTFPF; YTISMAKMYTGTFPFS;
TISMAKMYTGTFPFSY; ISMAKMYTGTFPFSYL; SMAKMYTGTFPFSYLS;
MAKMYTGTFPFSYLSN; AKMYTGTFPFSYLSNH; GPNRGKIRIILLNIII;
PNRGKIRIILLNIIIK; NRGKIRIILLNIIIKV; RGKIRIILLNIIIKVY; GKIRIILLNIIIKVYR;
KIRIILLNIIIKVYRG; IRIILLNIIIKVYRGI; RIILLNIIIKVYRGIY; IILLNIIIKVYRGIYN;
ILLNIIIKVYRGIYNC; LLNIIIKVYRGIYNCP; LNIIIKVYRGIYNCPG;
NIIIKVYRGIYNCPGS; IIIKVYRGIYNCPGSF; IIKVYRGIYNCPGSFL;
IKVYRGIYNCPGSFLQ; KVYRGIYNCPGSFLQK; VYRGIYNCPGSFLQKS;
YRGIYNCPGSFLQKSS; RGIYNCPGSFLQKSSQ; GIYNCPGSFLQKSSQG;
IYNCPGSFLQKSSQGV; YNCPGSFLQKSSQGVS; NCPGSFLQKSSQGVSK;
CPGSFLQKSSQGVSKK; PGSFLQKSSQGVSKKS; GSFLQKSSQGVSKKSF;
SFLQKSSQGVSKKSFC; FLQKSSQGVSKKSFCS; LQKSSQGVSKKSFCSS;
QKSSQGVSKKSFCSSL; KSSQGVSKKSFCSSLQ; SSQGVSKKSFCSSLQF;
SQGVSKKSFCSSLQFL; GYRRYIIPNNMPQSLG; YRRYIIPNNMPQSLGN;
RRYIIPNNMPQSLGNS; RYIIPNNMPQSLGNSS; YIIPNNMPQSLGNSSK;
IIPNNMPQSLGNSSKQ; IPNNMPQSLGNSSKQR; PNNMPQSLGNSSKQRR;
NNMPQSLGNSSKQRRT; NMPQSLGNSSKQRRTP; MPQSLGNSSKQRRTPM;
PQSLGNSSKQRRTPMP; QSLGNSSKQRRTPMPR; SLGNSSKQRRTPMPRI;
LGNSSKQRRTPMPRIK; GNSSKQRRTPMPRIKV; NSSKQRRTPMPRIKVL;
SSKQRRTPMPRIKVLN; SKQRRTPMPRIKVLNI; KQRRTPMPRIKVLNII;
QRRTPMPRIKVLNIIN; RRTPMPRIKVLNIINK; RTPMPRIKVLNIINKS;
TPMPRIKVLNIINKSI; PMPRIKVLNIINKSIY; MPRIKVLNIINKSIYT;
PRIKVLNIINKSIYTR; RIKVLNIINKSIYTRK; IKVLNIINKSIYTRKQ;
KVLNIINKSIYTRKQN; VLNIINKSIYTRKQNI; LNIINKSIYTRKQNII;
NIINKSIYTRKQNIIV; IINKSIYTRKQNIIVL; INKSIYTRKQNIIVLI;
NKSIYTRKQNIIVLIW; KSIYTRKQNIIVLIWV; SIYTRKQNIIVLIWVK;
IYTRKQNIIVLIWVKQ; YTRKQNIIVLIWVKQF; TRKQNIIVLIWVKQFQ;
RKQNIIVLIWVKQFQS; KQNIIVLIWVKQFQSH; QNIIVLIWVKQFQSHA;
LLIEAYSGNFVIPIIK; LIEAYSGNFVIPIIKE; IEAYSGNFVIPIIKEL;
EAYSGNFVIPIIKELI; AYSGNFVIPIIKELIP; YSGNFVIPIIKELIPY;
SGNFVIPIIKELIPYL; GNFVIPIIKELIPYLS; SSKPSNSPRSTSNYSI;
SKPSNSPRSTSNYSIC; KPSNSPRSTSNYSICL; PSNSPRSTSNYSICLR;
SNSPRSTSNYSICLRS; GTCYALYSSKGCNLNF; TCYALYSSKGCNLNFY;
CYALYSSKGCNLNFYS; YALYSSKGCNLNFYSS; ALYSSKGCNLNFYSSS;
LYSSKGCNLNFYSSSS; YSSKGCNLNFYSSSSL; SSKGCNLNFYSSSSLP;
SKGCNLNFYSSSSLPS; KGCNLNFYSSSSLPSS; GCNLNFYSSSSLPSSN;
CNLNFYSSSSLPSSNF; NLNFYSSSSLPSSNFS; LNFYSSSSLPSSNFSH;
SSTHEPGNTKKKGLLT; ESFTESFTAGKAVVLL; SFTESFTAGKAVVLLF;
FTESFTAGKAVVLLFF; TESFTAGKAVVLLFFP; ESFTAGKAVVLLFFPS;
SFTAGKAVVLLFFPST; FTAGKAVVLLFFPSTL; TAGKAVVLLFFPSTLS;
AGKAVVLLFFPSTLSS; GKAVVLLFFPSTLSSP; KAVVLLFFPSTLSSPL;
AVVLLFFPSTLSSPLQ; VVLLFFPSTLSSPLQN; VLLFFPSTLSSPLQNS;
LLFFPSTLSSPLQNSS; LFFPSTLSSPLQNSSK; FFPSTLSSPLQNSSKS;
FPSTLSSPLQNSSKSS; PSTLSSPLQNSSKSSK; STLSSPLQNSSKSSKI;
TLSSPLQNSSKSSKIK; LSSPLQNSSKSSKIKI; SSPLQNSSKSSKIKIK;
SPLQNSSKSSKIKIKI; PLQNSSKSSKIKIKIL; ALFFVPVQVLPTFTEA;
LFFVPVQVLPTFTEAC; FFVPVQVLPTFTEACR; FVPVQVLPTFTEACRD;
VPVQVLPTFTEACRDS; PVQVLPTFTEACRDSW; VQVLPTFTEACRDSWR;
QVLPTFTEACRDSWRR; VLPTFTEACRDSWRRT; LPTFTEACRDSWRRTM;
PTFTEACRDSWRRTMA; TFTEACRDSWRRTMAF; FTEACRDSWRRTMAFV;
TEACRDSWRRTMAFVQ; EACRDSWRRTMAFVQF; ACRDSWRRTMAFVQFN;
CRDSWRRTMAFVQFNW; RDSWRRTMAFVQFNWG; DSWRRTMAFVQFNWGQ;
SWRRTMAFVQFNWGQG; WRRTMAFVQFNWGQGQ; RRTMAFVQFNWGQGQD;
RTMAFVQFNWGQGQDS; ARKTCLSCTFLPEVMV; RKTCLSCTFLPEVMVW;
KTCLSCTFLPEVMVWL; TCLSCTFLPEVMVWLH; CLSCTFLPEVMVWLHS;
LSCTFLPEVMVWLHSM; SCTFLPEVMVWLHSMG; CTFLPEVMVWLHSMGK;
TFLPEVMVWLHSMGKQ; FLPEVMVWLHSMGKQL; LPEVMVWLHSMGKQLL;
PEVMVWLHSMGKQLLP; EVMVWLHSMGKQLLPV; VMVWLHSMGKQLLPVS;
MVWLHSMGKQLLPVSH; VWLHSMGKQLLPVSHA; WLHSMGKQLLPVSHAL;
LHSMGKQLLPVSHALS; HSMGKQLLPVSHALSF; SMGKQLLPVSHALSFL;
MGKQLLPVSHALSFLR; GKQLLPVSHALSFLRS; KQLLPVSHALSFLRSW;
QLLPVSHALSFLRSWF; LLPVSHALSFLRSWFG; LPVSHALSFLRSWFGC;
PVSHALSFLRSWFGCI; VSHALSFLRSWFGCIP; SHALSFLRSWFGCIPL;
GLAKLFGEIPILLQFL; LAKLFGEIPILLQFLQ

BK virus reverse reading frame 2
13 mers:

WIKFLTGKNPWSS; IKFLTGKNPWSSW; KFLTGKNPWSSWT; FLTGKNPWSSWTF;
GSVRNFTLTKGAT; SVRNFTLTKGATR; VRNFTLTKGATRI; RNFTLTKGATRIK;
LISLILEPGVAQR; ISLILEPGVAQRF; SLILEPGVAQRFV; LILEPGVAQRFVL;
ILEPGVAQRFVLI; LEPGVAQRFVLIF; EPGVAQRFVLIFL; PGVAQRFVLIFLF;
GVAQRFVLIFLFA; VAQRFVLIFLFAQ; AQRFVLIFLFAQI; QRFVLIFLFAQIP;
RFVLIFLFAQIPC; FVLIFLFAQIPCT; VLIFLFAQIPCTA; LIFLFAQIPCTAR;
IFLFAQIPCTARN; FLFAQIPCTARNG; LFAQIPCTARNGL; FAQIPCTARNGLF;
AQIPCTARNGLFV; QIPCTARNGLFVP; IPCTARNGLFVPK; PCTARNGLFVPKS;
CTARNGLFVPKSL; TARNGLFVPKSLL; ARNGLFVPKSLLC; RNGLFVPKSLLCT;
NGLFVPKSLLCTA; GLFVPKSLLCTAL; LFVPKSLLCTALA; FVPKSLLCTALAC;
VPKSLLCTALACY; PKSLLCTALACYV; KSLLCTALACYVS; SLLCTALACYVSL;
LLCTALACYVSLD; IATALTASHSGLA; VIIFFIGANLWNR; IIFFIGANLWNRR;
IFFIGANLWNRRV; FFIGANLWNRRVG; FIGANLWNRRVGV; IGANLWNRRVGVL;
GANLWNRRVGVLV; ANLWNRRVGVLVE; NLWNRRVGVLVEF;
LWNRRVGVLVEFL; RSNSRFSTLNTTQ; SNSRFSTLNTTQK; NSRFSTLNTTQKK;
SRFSTLNTTQKKK; RFSTLNTTQKKKK; FSTLNTTQKKKKG; STLNTTQKKKKGR;
TLNTTQKKKKGRR; LNTTQKKKKGRRP; RSIPYYRRKHSRG; SIPYYRRKHSRGL;
IPYYRRKHSRGLK; PYYRRKHSRGLKG; YYRRKHSRGLKGA; GCVFIIRYVFRIS;
CVFIIRYVFRISI; VFIIRYVFRISIQ; FIIRYVFRISIQC; IIRYVFRISIQCR;
IRYVFRISIQCRG; RYVFRISIQCRGV; KSKKYLSASSRYS; SKKYLSASSRYSF;
KKYLSASSRYSFS; KKSRYPSYDQGRN; KSRYPSYDQGRNA; SRYPSYDQGRNAN;
RYPSYDQGRNANR; YPSYDQGRNANRK; PSYDQGRNANRKI; SYDQGRNANRKIQ;
YDQGRNANRKIQS; DQGRNANRKIQSY; QGRNANRKIQSYI; GRNANRKIQSYIR;
NGFNIWSSWKCCT; GFNIWSSWKCCTR; FNIWSSWKCCTRT; NIWSSWKCCTRTI;
IWSSWKCCTRTIY; WSSWKCCTRTIYG; SSWKCCTRTIYGR; SWKCCTRTIYGRC;
WKCCTRTIYGRCC; KCCTRTIYGRCCL; CCTRTIYGRCCLA; CTRTIYGRCCLAA;
TRTIYGRCCLAAL; RTIYGRCCLAALF; TIYGRCCLAALFA; IYGRCCLAALFAT;
WKNNTSCRVIRFV; KNNTSCRVIRFVW; NNTSCRVIRFVWW; SLKCKPTHGKANL;
IKGFAFRTWNKQF; KGFAFRTWNKQFR; GFAFRTWNKQFRQ; FAFRTWNKQFRQF;
AFRTWNKQFRQFE; FRTWNKQFRQFER; RTWNKQFRQFERL; TWNKQFRQFERLF;
WNKQFRQFERLFR; NKQFRQFERLFRW; KQFRQFERLFRWK; QFRQFERLFRWKC;
GKFRKETFKQKNP; KFRKETFKQKNPN; FRKETFKQKNPNI; RKETFKQKNPNIS;
KETFKQKNPNIST; ETFKQKNPNISTR; TFKQKNPNISTRL; FKQKNPNISTRLG;
KQKNPNISTRLGY; QKNPNISTRLGYN; KNPNISTRLGYNE; AQNIFKKILTKLR;
QNIFKKILTKLRV; NIFKKILTKLRVL; IFKKILTKLRVLT; KKNFTKWNDLVAT;
KNFTKWNDLVATA; NFTKWNDLVATAN; FTKWNDLVATANL;
TKWNDLVATANLV; IPITMLFPSLRYF; PITMLFPSLRYFS; ITMLFPSLRYFSP;
TMLFPSLRYFSPC; KWLIQKQHLLNVY; WLIQKQHLLNVYV; LIQKQHLLNVYVQ;
KHLFKAFWFAIVP; HLFKAFWFAIVPV; LFKAFWFAIVPVC; FKAFWFAIVPVCQ;
KAFWFAIVPVCQY; AFWFAIVPVCQYI; FWFAIVPVCQYIL; WFAIVPVCQYILS;
FAIVPVCQYILSY; AIVPVCQYILSYL; IVPVCQYILSYLG; VPVCQYILSYLGP;
PVCQYILSYLGPL; VCQYILSYLGPLE; CQYILSYLGPLEV; QYILSYLGPLEVF;
YILSYLGPLEVFL; ILSYLGPLEVFLC; LSYLGPLEVFLCH; SYLGPLEVFLCHQ;
YLGPLEVFLCHQT; LGPLEVFLCHQTP; GHLAKRKLGKDSL; HLAKRKLGKDSLQ;
LAKRKLGKDSLQI; AKRKLGKDSLQIF; KRKLGKDSLQIFF; RKLGKDSLQIFFS;
KLGKDSLQIFFSG; LGKDSLQIFFSGG; GKDSLQIFFSGGS; NILQGLSTVVFQS;
ILQGLSTVVFQSC; TGHKYQQLKHTGY; GHKYQQLKHTGYQ; HKYQQLKHTGYQL;
KYQQLKHTGYQLY; YQQLKHTGYQLYK; QQLKHTGYQLYKE;
QLKHTGYQLYKEA; LKHTGYQLYKEAP; KHTGYQLYKEAPH; HTGYQLYKEAPHP;
TGYQLYKEAPHPV; GYQLYKEAPHPVH; YQLYKEAPHPVHL; QLYKEAPHPVHLA;
LYKEAPHPVHLAT; YKEAPHPVHLATL; KEAPHPVHLATLW; LCWSHEVLGEHFP;
CWSHEVLGEHFPL; WSHEVLGEHFPLL; HFHFYWDQVPSTQ; FHFYWDQVPSTQL;
HFYWDQVPSTQLD; FYWDQVPSTQLDK; YWDQVPSTQLDKH;
WDQVPSTQLDKHC; DQVPSTQLDKHCF; QVPSTQLDKHCFC; VPSTQLDKHCFCP;
PSTQLDKHCFCPN; STQLDKHCFCPNR; TQLDKHCFCPNRP; QLDKHCFCPNRPY;
LDKHCFCPNRPYG; DKHCFCPNRPYGQ; KHCFCPNRPYGQY; HCFCPNRPYGQYS;
CFCPNRPYGQYSL; FCPNRPYGQYSLP; CPNRPYGQYSLPG; PNRPYGQYSLPGT;
NRPYGQYSLPGTG; RPYGQYSLPGTGL; PYGQYSLPGTGLL; YGQYSLPGTGLLG;
GQYSLPGTGLLGF; YHQGTLTCNSLAL; HQGTLTCNSLALP; QGTLTCNSLALPA;
GTLTCNSLALPAF; TLTCNSLALPAFP; LTCNSLALPAFPR; TCNSLALPAFPRV;
CNSLALPAFPRVL; NSLALPAFPRVLH; SLALPAFPRVLHL; LALPAFPRVLHLQ;
ALPAFPRVLHLQQ; LPAFPRVLHLQQR; PAFPRVLHLQQRS; AFPRVLHLQQRSG;
FPRVLHLQQRSGN; PRVLHLQQRSGNY; RVLHLQQRSGNYC; VLHLQQRSGNYCL;
LHLQQRSGNYCLE; VFLHHAHALFVTL; FLHHAHALFVTLH; LHHAHALFVTLHE;
HHAHALFVTLHEG; PLFVQLQPPTSVD; LFVQLQPPTSVDF; FVQLQPPTSVDFH;
VQLQPPTSVDFHR; QLQPPTSVDFHRL; LQPPTSVDFHRLG; QPPTSVDFHRLGP;
PPTSVDFHRLGPH; PTSVDFHRLGPHL; TSVDFHRLGPHLN; SVDFHRLGPHLNW;
VDFHRLGPHLNWG; DFHRLGPHLNWGG; FHRLGPHLNWGGE;
HRLGPHLNWGGEF; RLGPHLNWGGEFL; LGPHLNWGGEFLL; GPHLNWGGEFLLC;
PHLNWGGEFLLCC; HLNWGGEFLLCCN; LNWGGEFLLCCNR; NWGGEFLLCCNRE;
WGGEFLLCCNREA; GGEFLLCCNREAF; GEFLLCCNREAFF; EFLLCCNREAFFS;
FLLCCNREAFFSL; LLCCNREAFFSLG; LCCNREAFFSLGY; CCNREAFFSLGYH;
CNREAFFSLGYHC; GFHLDPPFLGLGS; FHLDPPFLGLGSI; HLDPPFLGLGSIL;
LDPPFLGLGSILP; DPPFLGLGSILPL; LLELLLLLLLVVL; LELLLLLLLVVLA;
ELLLLLLLVVLAL; LLLLLLLVVLALA; LLLLLLVVLALAR; LLLLLVVLALARV;
LLLLVVLALARVP; LLLVVLALARVPL; LLVVLALARVPLA; LVVLALARVPLAF;
VVLALARVPLAFW; VLALARVPLAFWE; LALARVPLAFWEL; ALARVPLAFWELP;
LARVPLAFWELPL; ARVPLAFWELPLD; RVPLAFWELPLDT; VPLAFWELPLDTL;
PLAFWELPLDTLL; LAFWELPLDTLLF; AFWELPLDTLLFF; FWELPLDTLLFFW;
WELPLDTLLFFWL; ELPLDTLLFFWLG; LPLDTLLFFWLGP; PLDTLLFFWLGPS;
LDTLLFFWLGPSS; DTLLFFWLGPSSY; TLLFFWLGPSSYA; LLFFWLGPSSYAS;
LFFWLGPSSYASR; FFWLGPSSYASRA; FWLGPSSYASRAG; WLGPSSYASRAGV;
LGPSSYASRAGVT; GPSSYASRAGVTV; PSSYASRAGVTVP; SSYASRAGVTVPY;
SYASRAGVTVPYR; YASRAGVTVPYRP; ASRAGVTVPYRPR; SRAGVTVPYRPRS;
RAGVTVPYRPRSK; AGVTVPYRPRSKG; GVTVPYRPRSKGN; VTVPYRPRSKGNI;
TVPYRPRSKGNIH; LAPPGAIVFSINS; APPGAIVFSINSP; PPGAIVFSINSPE;
PGAIVFSINSPEC; GAIVFSINSPECT; AIVFSINSPECTL; IVFSINSPECTLC;
FLKSILCVTSSIL; LKSILCVTSSILS; KSILCVTSSILSA; SILCVTSSILSAS;
ILCVTSSILSASS; LCVTSSILSASSI; CVTSSILSASSIL; VWPKCTRVPSLSA;
WPKCTRVPSLSAT; PKCTRVPSLSATC; KCTRVPSLSATCL; CTRVPSLSATCLT;
TRVPSLSATCLTI; RVPSLSATCLTIE; VPSLSATCLTIEG; PSLSATCLTIEGL;
SLSATCLTIEGLI; LSATCLTIEGLIG; SATCLTIEGLIGE; ATCLTIEGLIGER;
TCLTIEGLIGERS; CLTIEGLIGERSE; KFIGAFTIVQVVS; FIGAFTIVQVVSS;
IGAFTIVQVVSSK; GAFTIVQVVSSKN; AFTIVQVVSSKNL; FTIVQVVSSKNLA;
TIVQVVSSKNLAK; IVQVVSSKNLAKE; VQVVSSKNLAKES; QVVSSKNLAKESL;
VVSSKNLAKESLK; VSSKNLAKESLKN; SSKNLAKESLKNL; SKNLAKESLKNLS;
KNLAKESLKNLSV; NLAKESLKNLSVL; LAKESLKNLSVLL; AKESLKNLSVLLC;
KESLKNLSVLLCN; ESLKNLSVLLCNS; SLKNLSVLLCNSC; LKNLSVLLCNSCE;
KNLSVLLCNSCEV; NLSVLLCNSCEVI; LSVLLCNSCEVIE; SVLLCNSCEVIEG;
VLLCNSCEVIEGI; LLCNSCEVIEGIS; LCNSCEVIEGISS; CNSCEVIEGISSL;
NSCEVIEGISSLI; SCEVIEGISSLIT; CEVIEGISSLITC; EVIEGISSLITCH;
VIEGISSLITCHK; IEGISSLITCHKA; EGISSLITCHKAW; GISSLITCHKAWE;
ISSLITCHKAWEI; SSLITCHKAWEIV; SLITCHKAWEIVA; LITCHKAWEIVAN;
ITCHKAWEIVANK; TCHKAWEIVANKE; CHKAWEIVANKEG; HKAWEIVANKEGP;
KAWEIVANKEGPQ; AWEIVANKEGPQC; WEIVANKEGPQCL; EIVANKEGPQCLG;
IVANKEGPQCLGS; VANKEGPQCLGSR; ANKEGPQCLGSRY; ILLTKVFTPGNRI;
LLTKVFTPGNRIS; YSSGLNNSKAMPD; SSGLNNSKAMPDC; IKAANPAIAPGAP;
KAANPAIAPGAPA; AANPAIAPGAPAI; ANPAIAPGAPAIT; NPAIAPGAPAITA;
PAIAPGAPAITAY; AIAPGAPAITAYV; GVRPIAAIASEVL; VRPIAAIASEVLV;
RPIAAIASEVLVM; PIAAIASEVLVMP; IAAIASEVLVMPS; AAIASEVLVMPST;
AIASEVLVMPSTV; IASEVLVMPSTVA; ASEVLVMPSTVAR; SEVLVMPSTVARD;
EVLVMPSTVARDA; VLVMPSTVARDAI; TSIAAAASPAAIS; SIAAAASPAAISA;
IAAAASPAAISAT; AAAASPAAISATE; AAASPAAISATEN; AASPAAISATENP;
ASPAAISATENPV; SPAAISATENPVA; PAAISATENPVAA; AAISATENPVAAA;
AISATENPVAAAA; ISATENPVAAAAS; SATENPVAAAASD; ATENPVAAAASDT;
TENPVAAAASDTL; ENPVAAAASDTLA; NPVAAAASDTLAT; PVAAAASDTLATR;
VAAAASDTLATRS; AAAASDTLATRSP; AAASDTLATRSPK; AASDTLATRSPKS;
ASDTLATRSPKSA; SDTLATRSPKSAR; DTLATRSPKSARA; TLATRSPKSARAA;
LATRSPKSARAAP; ATRSPKSARAAPM; TRSPKSARAAPMN; RSPKSARAAPMNL;
SPKSARAAPMNLE; PKSARAAPMNLEI; KSARAAPMNLEIQ; SARAAPMNLEIQK;
ARAAPMNLEIQKK; RAAPMNLEIQKKR; AAPMNLEIQKKRD; APMNLEIQKKRDY;
PMNLEIQKKRDYL; MNLEIQKKRDYLP; NLEIQKKRDYLPR; LEIQKKRDYLPRS;
EIQKKRDYLPRSL; IQKKRDYLPRSLL; QKKRDYLPRSLLQ; KKRDYLPRSLLQS;
KRDYLPRSLLQSL; RDYLPRSLLQSLL; DYLPRSLLQSLLQ; YLPRSLLQSLLQQ;
LPRSLLQSLLQQV; PRSLLQSLLQQVK; RSLLQSLLQQVKQ; SLLQSLLQQVKQW;
LLQSLLQQVKQWY; LQSLLQQVKQWYF; QSLLQQVKQWYFC;
SLLQQVKQWYFCF; LLQQVKQWYFCFS; LQQVKQWYFCFSR;
QQVKQWYFCFSRL; QVKQWYFCFSRLH; VKQWYFCFSRLHC; KQWYFCFSRLHCL;
QWYFCFSRLHCLH; WYFCFSRLHCLHL; YFCFSRLHCLHLY; FCFSRLHCLHLYK;
CFSRLHCLHLYKI; FSRLHCLHLYKIP; SRLHCLHLYKIPA; RLHCLHLYKIPAK;
LHCLHLYKIPAKA; HCLHLYKIPAKAL; CLHLYKIPAKALK; KSSELFFLFQSRF;
SSELFFLFQSRFY; SELFFLFQSRFYQ; ELFFLFQSRFYQL; LFFLFQSRFYQLS;
FFLFQSRFYQLSL; FLFQSRFYQLSLK; LFQSRFYQLSLKL; FQSRFYQLSLKLV;
QSRFYQLSLKLVV; SRFYQLSLKLVVT; RFYQLSLKLVVTA; FYQLSLKLVVTAG;
YQLSLKLVVTAGA; QLSLKLVVTAGAE; LSLKLVVTAGAEP; SLKLVVTAGAEPW;
LKLVVTAGAEPWP; KLVVTAGAEPWPL; LVVTAGAEPWPLS; VVTAGAEPWPLSS;
VTAGAEPWPLSSL; TAGAEPWPLSSLT; AGAEPWPLSSLTG; GAEPWPLSSLTGD;
AEPWPLSSLTGDK; EPWPLSSLTGDKA; PWPLSSLTGDKAK; WPLSSLTGDKAKI;
PLSSLTGDKAKIP; LSSLTGDKAKIPR; SSLTGDKAKIPRL; SLTGDKAKIPRLA;
LTGDKAKIPRLAK; TGDKAKIPRLAKH; GDKAKIPRLAKHV; DKAKIPRLAKHVC;
KAKIPRLAKHVCH; AKIPRLAKHVCHA; KIPRLAKHVCHAL; IPRLAKHVCHALS;
PRLAKHVCHALSF; RLAKHVCHALSFL; LAKHVCHALSFLR; AKHVCHALSFLRS;
KHVCHALSFLRSW; HVCHALSFLRSWF; VCHALSFLRSWFG; CHALSFLRSWFGC;
HALSFLRSWFGCI; ALSFLRSWFGCIP; LSFLRSWFGCIPW; SFLRSWFGCIPWV;
FLRSWFGCIPWVS; LRSWFGCIPWVSS; RSWFGCIPWVSSS; SWFGCIPWVSSSS;
WFGCIPWVSSSSL; GHGLAAFPCESCT; HGLAAFPCESCTF; GLAAFPCESCTFL;
LAAFPCESCTFLP; AAFPCESCTFLPE; AFPCESCTFLPEV; FPCESCTFLPEVM;
PCESCTFLPEVMV; CESCTFLPEVMVW; ESCTFLPEVMVWL; SCTFLPEVMVWLH;
CTFLPEVMVWLHS; TFLPEVMVWLHSM; FLPEVMVWLHSMG;
LPEVMVWLHSMGK; PEVMVWLHSMGKQ; EVMVWLHSMGKQL;
VMVWLHSMGKQLL; MVWLHSMGKQLLP; VWLHSMGKQLLPV;
WLHSMGKQLLPVA; LHSMGKQLLPVAF; HSMGKQLLPVAFF; SMGKQLLPVAFFF;
MGKQLLPVAFFFI; GKQLLPVAFFFII; KQLLPVAFFFIIY; QLLPVAFFFIIYK;
LLPVAFFFIIYKR; LPVAFFFIIYKRP; PVAFFFIIYKRPR; VAFFFIIYKRPRP;
AFFFIIYKRPRPP; FFFIIYKRPRPPL; FFIIYKRPRPPLP; FIIYKRPRPPLPP;
IIYKRPRPPLPPP; IYKRPRPPLPPPF; YKRPRPPLPPPFL; KRPRPPLPPPFLS;
RPRPPLPPPFLSS; PRPPLPPPFLSSS; RPPLPPPFLSSSK; PPLPPPFLSSSKG;
PLPPPFLSSSKGV; LPPPFLSSSKGVE; PPPFLSSSKGVEA; PPFLSSSKGVEAF;
PFLSSSKGVEAFS; FLSSSKGVEAFSE; LSSSKGVEAFSEA; QNYLGKSLFFCNF;
NYLGKSLFFCNFC; YLGKSLFFCNFCK

14 mers:

WIKFLTGKNPWSSW; IKFLTGKNPWSSWT; KFLTGKNPWSSWTF;
GSVRNFTLTKGATR; SVRNFTLTKGATRI; VRNFTLTKGATRIK; LISLILEPGVAQRF;
ISLILEPGVAQRFV; SLILEPGVAQRFVL; LILEPGVAQRFVLI; ILEPGVAQRFVLIF;
LEPGVAQRFVLIFL; EPGVAQRFVLIFLF; PGVAQRFVLIFLFA; GVAQRFVLIFLFAQ;
VAQRFVLIFLFAQI; AQRFVLIFLFAQIP; QRFVLIFLFAQIPC; RFVLIFLFAQIPCT;
FVLIFLFAQIPCTA; VLIFLFAQIPCTAR; LIFLFAQIPCTARN; IFLFAQIPCTARNG;
FLFAQIPCTARNGL; LFAQIPCTARNGLF; FAQIPCTARNGLFV; AQIPCTARNGLFVP;
QIPCTARNGLFVPK; IPCTARNGLFVPKS; PCTARNGLFVPKSL;
CTARNGLFVPKSLL; TARNGLFVPKSLLC; ARNGLFVPKSLLCT;
RNGLFVPKSLLCTA; NGLFVPKSLLCTAL; GLFVPKSLLCTALA;
LFVPKSLLCTALAC; FVPKSLLCTALACY; VPKSLLCTALACYV;
PKSLLCTALACYVS; KSLLCTALACYVSL; SLLCTALACYVSLD;
VIIFFIGANLWNRR; IIFFIGANLWNRRV; IFFIGANLWNRRVG;
FFIGANLWNRRVGV; FIGANLWNRRVGVL; IGANLWNRRVGVLV;
GANLWNRRVGVLVE; ANLWNRRVGVLVEF; NLWNRRVGVLVEFL;
RSNSRFSTLNTTQK; SNSRFSTLNTTQKK; NSRFSTLNTTQKKK;
SRFSTLNTTQKKKK; RFSTLNTTQKKKKG; FSTLNTTQKKKKGR;
STLNTTQKKKKGRR; TLNTTQKKKKGRRP; RSIPYYRRKHSRGL;
SIPYYRRKHSRGLK; IPYYRRKHSRGLKG; PYYRRKHSRGLKGA;
GCVFIIRYVFRISI; CVFIIRYVFRISIQ; VFIIRYVFRISIQC; FIIRYVFRISIQCR;
IIRYVFRISIQCRG; IRYVFRISIQCRGV; KSKKYLSASSRYSF; SKKYLSASSRYSFS;
KKSRYPSYDQGRNA; KSRYPSYDQGRNAN; SRYPSYDQGRNANR;
RYPSYDQGRNANRK; YPSYDQGRNANRKI; PSYDQGRNANRKIQ;
SYDQGRNANRKIQS; YDQGRNANRKIQSY; DQGRNANRKIQSYI;
QGRNANRKIQSYIR; NGFNIWSSWKCCTR; GFNIWSSWKCCTRT;
FNIWSSWKCCTRTI; NIWSSWKCCTRTIY; IWSSWKCCTRTIYG;
WSSWKCCTRTIYGR; SSWKCCTRTIYGRC; SWKCCTRTIYGRCC;
WKCCTRTIYGRCCL; KCCTRTIYGRCCLA; CCTRTIYGRCCLAA;
CTRTIYGRCCLAAL; TRTIYGRCCLAALF; RTIYGRCCLAALFA;
TIYGRCCLAALFAT; WKNNTSCRVIRFVW; KNNTSCRVIRFVWW;
IKGFAFRTWNKQFR; KGFAFRTWNKQFRQ; GFAFRTWNKQFRQF;
FAFRTWNKQFRQFE; AFRTWNKQFRQFER; FRTWNKQFRQFERL;
RTWNKQFRQFERLF; TWNKQFRQFERLFR; WNKQFRQFERLFRW;
NKQFRQFERLFRWK; KQFRQFERLFRWKC; GKFRKETFKQKNPN;
KFRKETFKQKNPNI; FRKETFKQKNPNIS; RKETFKQKNPNIST; KETFKQKNPNISTR;
ETFKQKNPNISTRL; TFKQKNPNISTRLG; FKQKNPNISTRLGY;
KQKNPNISTRLGYN; QKNPNISTRLGYNE; AQNIFKKILTKLRV;
QNIFKKILTKLRVL; NIFKKILTKLRVLT; KKNFTKWNDLVATA;
KNFTKWNDLVATAN; NFTKWNDLVATANL; FTKWNDLVATANLV;
IPITMLFPSLRYFS; PITMLFPSLRYFSP; ITMLFPSLRYFSPC; KWLIQKQHLLNVYV;
WLIQKQHLLNVYVQ; KHLFKAFWFAIVPV; HLFKAFWFAIVPVC;
LFKAFWFAIVPVCQ; FKAFWFAIVPVCQY; KAFWFAIVPVCQYI;
AFWFAIVPVCQYIL; FWFAIVPVCQYILS; WFAIVPVCQYILSY; FAIVPVCQYILSYL;
AIVPVCQYILSYLG; IVPVCQYILSYLGP; VPVCQYILSYLGPL; PVCQYILSYLGPLE;
VCQYILSYLGPLEV; CQYILSYLGPLEVF; QYILSYLGPLEVFL; YILSYLGPLEVFLC;
ILSYLGPLEVFLCH; LSYLGPLEVFLCHQ; SYLGPLEVFLCHQT;
YLGPLEVFLCHQTP; GHLAKRKLGKDSLQ; HLAKRKLGKDSLQI;
LAKRKLGKDSLQIF; AKRKLGKDSLQIFF; KRKLGKDSLQIFFS;
RKLGKDSLQIFFSG; KLGKDSLQIFFSGG; LGKDSLQIFFSGGS; NILQGLSTVVFQSC;
TGHKYQQLKHTGYQ; GHKYQQLKHTGYQL; HKYQQLKHTGYQLY;
KYQQLKHTGYQLYK; YQQLKHTGYQLYKE; QQLKHTGYQLYKEA;
QLKHTGYQLYKEAP; LKHTGYQLYKEAPH; KHTGYQLYKEAPHP;
HTGYQLYKEAPHPV; TGYQLYKEAPHPVH; GYQLYKEAPHPVHL;
YQLYKEAPHPVHLA; QLYKEAPHPVHLAT; LYKEAPHPVHLATL;
YKEAPHPVHLATLW; LCWSHEVLGEHFPL; CWSHEVLGEHFPLL;
HFHFYWDQVPSTQL; FHFYWDQVPSTQLD; HFYWDQVPSTQLDK;
FYWDQVPSTQLDKH; YWDQVPSTQLDKHC; WDQVPSTQLDKHCF;
DQVPSTQLDKHCFC; QVPSTQLDKHCFCP; VPSTQLDKHCFCPN;
PSTQLDKHCFCPNR; STQLDKHCFCPNRP; TQLDKHCFCPNRPY;
QLDKHCFCPNRPYG; LDKHCFCPNRPYGQ; DKHCFCPNRPYGQY;
KHCFCPNRPYGQYS; HCFCPNRPYGQYSL; CFCPNRPYGQYSLP;
FCPNRPYGQYSLPG; CPNRPYGQYSLPGT; PNRPYGQYSLPGTG;
NRPYGQYSLPGTGL; RPYGQYSLPGTGLL; PYGQYSLPGTGLLG;
YGQYSLPGTGLLGF; YHQGTLTCNSLALP; HQGTLTCNSLALPA;
QGTLTCNSLALPAF; GTLTCNSLALPAFP; TLTCNSLALPAFPR;
LTCNSLALPAFPRV; TCNSLALPAFPRVL; CNSLALPAFPRVLH;
NSLALPAFPRVLHL; SLALPAFPRVLHLQ; LALPAFPRVLHLQQ;
ALPAFPRVLHLQQR; LPAFPRVLHLQQRS; PAFPRVLHLQQRSG;
AFPRVLHLQQRSGN; FPRVLHLQQRSGNY; PRVLHLQQRSGNYC;
RVLHLQQRSGNYCL; VLHLQQRSGNYCLE; VFLHHAHALFVTLH;
FLHHAHALFVTLHE; LHHAHALFVTLHEG; PLFVQLQPPTSVDF;
LFVQLQPPTSVDFH; FVQLQPPTSVDFHR; VQLQPPTSVDFHRL;
QLQPPTSVDFHRLG; LQPPTSVDFHRLGP; QPPTSVDFHRLGPH;
PPTSVDFHRLGPHL; PTSVDFHRLGPHLN; TSVDFHRLGPHLNW;
SVDFHRLGPHLNWG; VDFHRLGPHLNWGG; DFHRLGPHLNWGGE;
FHRLGPHLNWGGEF; HRLGPHLNWGGEFL; RLGPHLNWGGEFLL;
LGPHLNWGGEFLLC; GPHLNWGGEFLLCC; PHLNWGGEFLLCCN;
HLNWGGEFLLCCNR; LNWGGEFLLCCNRE; NWGGEFLLCCNREA;
WGGEFLLCCNREAF; GGEFLLCCNREAFF; GEFLLCCNREAFFS;
EFLLCCNREAFFSL; FLLCCNREAFFSLG; LLCCNREAFFSLGY;
LCCNREAFFSLGYH; CCNREAFFSLGYHC; GFHLDPPFLGLGSI; FHLDPPFLGLGSIL;
HLDPPFLGLGSILP; LDPPFLGLGSILPL; LLELLLLLLLVVLA; LELLLLLLLVVLAL;
ELLLLLLLVVLALA; LLLLLLLVVLALAR; LLLLLLVVLALARV;
LLLLLVVLALARVP; LLLLVVLALARVPL; LLLVVLALARVPLA;
LLVVLALARVPLAF; LVVLALARVPLAFW; VVLALARVPLAFWE;
VLALARVPLAFWEL; LALARVPLAFWELP; ALARVPLAFWELPL;
LARVPLAFWELPLD; ARVPLAFWELPLDT; RVPLAFWELPLDTL;
VPLAFWELPLDTLL; PLAFWELPLDTLLF; LAFWELPLDTLLFF;
AFWELPLDTLLFFW; FWELPLDTLLFFWL; WELPLDTLLFFWLG;
ELPLDTLLFFWLGP; LPLDTLLFFWLGPS; PLDTLLFFWLGPSS;
LDTLLFFWLGPSSY; DTLLFFWLGPSSYA; TLLFFWLGPSSYAS;
LLFFWLGPSSYASR; LFFWLGPSSYASRA; FFWLGPSSYASRAG;
FWLGPSSYASRAGV; WLGPSSYASRAGVT; LGPSSYASRAGVTV;
GPSSYASRAGVTVP; PSSYASRAGVTVPY; SSYASRAGVTVPYR;
SYASRAGVTVPYRP; YASRAGVTVPYRPR; ASRAGVTVPYRPRS;
SRAGVTVPYRPRSK; RAGVTVPYRPRSKG; AGVTVPYRPRSKGN;
GVTVPYRPRSKGNI; VTVPYRPRSKGNIH; LAPPGAIVFSINSP; APPGAIVFSINSPE;
PPGAIVFSINSPEC; PGAIVFSINSPECT; GAIVFSINSPECTL; AIVFSINSPECTLC;
FLKSILCVTSSILS; LKSILCVTSSILSA; KSILCVTSSILSAS; SILCVTSSILSASS;
ILCVTSSILSASSI; LCVTSSILSASSIL; VWPKCTRVPSLSAT; WPKCTRVPSLSATC;
PKCTRVPSLSATCL; KCTRVPSLSATCLT; CTRVPSLSATCLTI; TRVPSLSATCLTIE;
RVPSLSATCLTIEG; VPSLSATCLTIEGL; PSLSATCLTIEGLI; SLSATCLTIEGLIG;
LSATCLTIEGLIGE; SATCLTIEGLIGER; ATCLTIEGLIGERS; TCLTIEGLIGERSE;
KFIGAFTIVQVVSS; FIGAFTIVQVVSSK; IGAFTIVQVVSSKN; GAFTIVQVVSSKNL;
AFTIVQVVSSKNLA; FTIVQVVSSKNLAK; TIVQVVSSKNLAKE;
IVQVVSSKNLAKES; VQVVSSKNLAKESL; QVVSSKNLAKESLK;
VVSSKNLAKESLKN; VSSKNLAKESLKNL; SSKNLAKESLKNLS;
SKNLAKESLKNLSV; KNLAKESLKNLSVL; NLAKESLKNLSVLL;
LAKESLKNLSVLLC; AKESLKNLSVLLCN; KESLKNLSVLLCNS;
ESLKNLSVLLCNSC; SLKNLSVLLCNSCE; LKNLSVLLCNSCEV;
KNLSVLLCNSCEVI; NLSVLLCNSCEVIE; LSVLLCNSCEVIEG; SVLLCNSCEVIEGI;
VLLCNSCEVIEGIS; LLCNSCEVIEGISS; LCNSCEVIEGISSL; CNSCEVIEGISSLI;
NSCEVIEGISSLIT; SCEVIEGISSLITC; CEVIEGISSLITCH; EVIEGISSLITCHK;
VIEGISSLITCHKA; IEGISSLITCHKAW; EGISSLITCHKAWE; GISSLITCHKAWEI;
ISSLITCHKAWEIV; SSLITCHKAWEIVA; SLITCHKAWEIVAN;
LITCHKAWEIVANK; ITCHKAWEIVANKE; TCHKAWEIVANKEG;
CHKAWEIVANKEGP; HKAWEIVANKEGPQ; KAWEIVANKEGPQC;
AWEIVANKEGPQCL; WEIVANKEGPQCLG; EIVANKEGPQCLGS;
IVANKEGPQCLGSR; VANKEGPQCLGSRY; ILLTKVFTPGNRIS;
YSSGLNNSKAMPDC; IKAANPAIAPGAPA; KAANPAIAPGAPAI;
AANPAIAPGAPAIT; ANPAIAPGAPAITA; NPAIAPGAPAITAY; PAIAPGAPAITAYV;
GVRPIAAIASEVLV; VRPIAAIASEVLVM; RPIAAIASEVLVMP; PIAAIASEVLVMPS;
IAAIASEVLVMPST; AAIASEVLVMPSTV; AIASEVLVMPSTVA;
IASEVLVMPSTVAR; ASEVLVMPSTVARD; SEVLVMPSTVARDA;
EVLVMPSTVARDAI; TSIAAAASPAAISA; SIAAAASPAAISAT; IAAAASPAAISATE;
AAAASPAAISATEN; AAASPAAISATENP; AASPAAISATENPV;
ASPAAISATENPVA; SPAAISATENPVAA; PAAISATENPVAAA;
AAISATENPVAAAA; AISATENPVAAAAS; ISATENPVAAAASD;
SATENPVAAAASDT; ATENPVAAAASDTL; TENPVAAAASDTLA;
ENPVAAAASDTLAT; NPVAAAASDTLATR; PVAAAASDTLATRS;
VAAAASDTLATRSP; AAAASDTLATRSPK; AAASDTLATRSPKS;
AASDTLATRSPKSA; ASDTLATRSPKSAR; SDTLATRSPKSARA;
DTLATRSPKSARAA; TLATRSPKSARAAP; LATRSPKSARAAPM;
ATRSPKSARAAPMN; TRSPKSARAAPMNL; RSPKSARAAPMNLE;
SPKSARAAPMNLEI; PKSARAAPMNLEIQ; KSARAAPMNLEIQK;
SARAAPMNLEIQKK; ARAAPMNLEIQKKR; RAAPMNLEIQKKRD;
AAPMNLEIQKKRDY; APMNLEIQKKRDYL; PMNLEIQKKRDYLP;
MNLEIQKKRDYLPR; NLEIQKKRDYLPRS; LEIQKKRDYLPRSL;
EIQKKRDYLPRSLL; IQKKRDYLPRSLLQ; QKKRDYLPRSLLQS;
KKRDYLPRSLLQSL; KRDYLPRSLLQSLL; RDYLPRSLLQSLLQ;
DYLPRSLLQSLLQQ; YLPRSLLQSLLQQV; LPRSLLQSLLQQVK;
PRSLLQSLLQQVKQ; RSLLQSLLQQVKQW; SLLQSLLQQVKQWY;
LLQSLLQQVKQWYF; LQSLLQQVKQWYFC; QSLLQQVKQWYFCF;
SLLQQVKQWYFCFS; LLQQVKQWYFCFSR; LQQVKQWYFCFSRL;
QQVKQWYFCFSRLH; QVKQWYFCFSRLHC; VKQWYFCFSRLHCL;
KQWYFCFSRLHCLH; QWYFCFSRLHCLHL; WYFCFSRLHCLHLY;
YFCFSRLHCLHLYK; FCFSRLHCLHLYKI; CFSRLHCLHLYKIP; FSRLHCLHLYKIPA;
SRLHCLHLYKIPAK; RLHCLHLYKIPAKA; LHCLHLYKIPAKAL;
HCLHLYKIPAKALK; KSSELFFLFQSRFY; SSELFFLFQSRFYQ; SELFFLFQSRFYQL;
ELFFLFQSRFYQLS; LFFLFQSRFYQLSL; FFLFQSRFYQLSLK; FLFQSRFYQLSLKL;
LFQSRFYQLSLKLV; FQSRFYQLSLKLVV; QSRFYQLSLKLVVT;
SRFYQLSLKLVVTA; RFYQLSLKLVVTAG; FYQLSLKLVVTAGA;
YQLSLKLVVTAGAE; QLSLKLVVTAGAEP; LSLKLVVTAGAEPW;
SLKLVVTAGAEPWP; LKLVVTAGAEPWPL; KLVVTAGAEPWPLS;
LVVTAGAEPWPLSS; VVTAGAEPWPLSSL; VTAGAEPWPLSSLT;
TAGAEPWPLSSLTG; AGAEPWPLSSLTGD; GAEPWPLSSLTGDK;
AEPWPLSSLTGDKA; EPWPLSSLTGDKAK; PWPLSSLTGDKAKI;
WPLSSLTGDKAKIP; PLSSLTGDKAKIPR; LSSLTGDKAKIPRL; SSLTGDKAKIPRLA;
SLTGDKAKIPRLAK; LTGDKAKIPRLAKH; TGDKAKIPRLAKHV;
GDKAKIPRLAKHVC; DKAKIPRLAKHVCH; KAKIPRLAKHVCHA;
AKIPRLAKHVCHAL; KIPRLAKHVCHALS; IPRLAKHVCHALSF;
PRLAKHVCHALSFL; RLAKHVCHALSFLR; LAKHVCHALSFLRS;
AKHVCHALSFLRSW; KHVCHALSFLRSWF; HVCHALSFLRSWFG;
VCHALSFLRSWFGC; CHALSFLRSWFGCI; HALSFLRSWFGCIP;
ALSFLRSWFGCIPW; LSFLRSWFGCIPWV; SFLRSWFGCIPWVS;
FLRSWFGCIPWVSS; LRSWFGCIPWVSSS; RSWFGCIPWVSSSS;
SWFGCIPWVSSSSL; GHGLAAFPCESCTF; HGLAAFPCESCTFL;
GLAAFPCESCTFLP; LAAFPCESCTFLPE; AAFPCESCTFLPEV; AFPCESCTFLPEVM;
FPCESCTFLPEVMV; PCESCTFLPEVMVW; CESCTFLPEVMVWL;
ESCTFLPEVMVWLH; SCTFLPEVMVWLHS; CTFLPEVMVWLHSM;
TFLPEVMVWLHSMG; FLPEVMVWLHSMGK; LPEVMVWLHSMGKQ;
PEVMVWLHSMGKQL; EVMVWLHSMGKQLL; VMVWLHSMGKQLLP;
MVWLHSMGKQLLPV; VWLHSMGKQLLPVA; WLHSMGKQLLPVAF;
LHSMGKQLLPVAFF; HSMGKQLLPVAFFF; SMGKQLLPVAFFFI;
MGKQLLPVAFFFII; GKQLLPVAFFFIIY; KQLLPVAFFFIIYK; QLLPVAFFFIIYKR;
LLPVAFFFIIYKRP; LPVAFFFIIYKRPR; PVAFFFIIYKRPRP; VAFFFIIYKRPRPP;
AFFFIIYKRPRPPL; FFFIIYKRPRPPLP; FFIIYKRPRPPLPP; FIIYKRPRPPLPPP;
IIYKRPRPPLPPPF; IYKRPRPPLPPPFL; YKRPRPPLPPPFLS; KRPRPPLPPPFLSS;
RPRPPLPPPFLSSS; PRPPLPPPFLSSSK; RPPLPPPFLSSSKG; PPLPPPFLSSSKGV;
PLPPPFLSSSKGVE; LPPPFLSSSKGVEA; PPPFLSSSKGVEAF; PPFLSSSKGVEAFS;
PFLSSSKGVEAFSE; FLSSSKGVEAFSEA; QNYLGKSLFFCNFC; NYLGKSLFFCNFCK

15 mers:

WIKFLTGKNPWSSWT; IKFLTGKNPWSSWTF; GSVRNFTLTKGATRI;
SVRNFTLTKGATRIK; LISLILEPGVAQRFV; ISLILEPGVAQRFVL;
SLILEPGVAQRFVLI; LILEPGVAQRFVLIF; ILEPGVAQRFVLIFL;
LEPGVAQRFVLIFLF; EPGVAQRFVLIFLFA; PGVAQRFVLIFLFAQ;
GVAQRFVLIFLFAQI; VAQRFVLIFLFAQIP; AQRFVLIFLFAQIPC;
QRFVLIFLFAQIPCT; RFVLIFLFAQIPCTA; FVLIFLFAQIPCTAR;
VLIFLFAQIPCTARN; LIFLFAQIPCTARNG; IFLFAQIPCTARNGL;
FLFAQIPCTARNGLF; LFAQIPCTARNGLFV; FAQIPCTARNGLFVP;
AQIPCTARNGLFVPK; QIPCTARNGLFVPKS; IPCTARNGLFVPKSL;
PCTARNGLFVPKSLL; CTARNGLFVPKSLLC; TARNGLFVPKSLLCT;
ARNGLFVPKSLLCTA; RNGLFVPKSLLCTAL; NGLFVPKSLLCTALA;
GLFVPKSLLCTALAC; LFVPKSLLCTALACY; FVPKSLLCTALACYV;
VPKSLLCTALACYVS; PKSLLCTALACYVSL; KSLLCTALACYVSLD;
VIIFFIGANLWNRRV; IIFFIGANLWNRRVG; IFFIGANLWNRRVGV;
FFIGANLWNRRVGVL; FIGANLWNRRVGVLV; IGANLWNRRVGVLVE;
GANLWNRRVGVLVEF; ANLWNRRVGVLVEFL; RSNSRFSTLNTTQKK;
SNSRFSTLNTTQKKK; NSRFSTLNTTQKKKK; SRFSTLNTTQKKKKG;
RFSTLNTTQKKKKGR; FSTLNTTQKKKKGRR; STLNTTQKKKKGRRP;
RSIPYYRRKHSRGLK; SIPYYRRKHSRGLKG; IPYYRRKHSRGLKGA;
GCVFIIRYVFRISIQ; CVFIIRYVFRISIQC; VFIIRYVFRISIQCR; FIIRYVFRISIQCRG;
IIRYVFRISIQCRGV; KSKKYLSASSRYSFS; KKSRYPSYDQGRNAN;
KSRYPSYDQGRNANR; SRYPSYDQGRNANRK; RYPSYDQGRNANRKI;
YPSYDQGRNANRKIQ; PSYDQGRNANRKIQS; SYDQGRNANRKIQSY;
YDQGRNANRKIQSYI; DQGRNANRKIQSYIR; NGFNIWSSWKCCTRT;
GFNIWSSWKCCTRTI; FNIWSSWKCCTRTIY; NIWSSWKCCTRTIYG;
IWSSWKCCTRTIYGR; WSSWKCCTRTIYGRC; SSWKCCTRTIYGRCC;
SWKCCTRTIYGRCCL; WKCCTRTIYGRCCLA; KCCTRTIYGRCCLAA;
CCTRTIYGRCCLAAL; CTRTIYGRCCLAALF; TRTIYGRCCLAALFA;
RTIYGRCCLAALFAT; WKNNTSCRVIRFVWW; IKGFAFRTWNKQFRQ;
KGFAFRTWNKQFRQF; GFAFRTWNKQFRQFE; FAFRTWNKQFRQFER;
AFRTWNKQFRQFERL; FRTWNKQFRQFERLF; RTWNKQFRQFERLFR;
TWNKQFRQFERLFRW; WNKQFRQFERLFRWK; NKQFRQFERLFRWKC;
GKFRKETFKQKNPNI; KFRKETFKQKNPNIS; FRKETFKQKNPNIST;
RKETFKQKNPNISTR; KETFKQKNPNISTRL; ETFKQKNPNISTRLG;
TFKQKNPNISTRLGY; FKQKNPNISTRLGYN; KQKNPNISTRLGYNE;
AQNIFKKILTKLRVL; QNIFKKILTKLRVLT; KKNFTKWNDLVATAN;
KNFTKWNDLVATANL; NFTKWNDLVATANLV; IPITMLFPSLRYFSP;
PITMLFPSLRYFSPC; KWLIQKQHLLNVYVQ; KHLFKAFWFAIVPVC;
HLFKAFWFAIVPVCQ; LFKAFWFAIVPVCQY; FKAFWFAIVPVCQYI;
KAFWFAIVPVCQYIL; AFWFAIVPVCQYILS; FWFAIVPVCQYILSY;
WFAIVPVCQYILSYL; FAIVPVCQYILSYLG; AIVPVCQYILSYLGP;
IVPVCQYILSYLGPL; VPVCQYILSYLGPLE; PVCQYILSYLGPLEV;
VCQYILSYLGPLEVF; CQYILSYLGPLEVFL; QYILSYLGPLEVFLC;
YILSYLGPLEVFLCH; ILSYLGPLEVFLCHQ; LSYLGPLEVFLCHQT;
SYLGPLEVFLCHQTP; GHLAKRKLGKDSLQI; HLAKRKLGKDSLQIF;
LAKRKLGKDSLQIFF; AKRKLGKDSLQIFFS; KRKLGKDSLQIFFSG;
RKLGKDSLQIFFSGG; KLGKDSLQIFFSGGS; TGHKYQQLKHTGYQL;
GHKYQQLKHTGYQLY; HKYQQLKHTGYQLYK; KYQQLKHTGYQLYKE;
YQQLKHTGYQLYKEA; QQLKHTGYQLYKEAP; QLKHTGYQLYKEAPH;
LKHTGYQLYKEAPHP; KHTGYQLYKEAPHPV; HTGYQLYKEAPHPVH;
TGYQLYKEAPHPVHL; GYQLYKEAPHPVHLA; YQLYKEAPHPVHLAT;
QLYKEAPHPVHLATL; LYKEAPHPVHLATLW; LCWSHEVLGEHFPLL;
HFHFYWDQVPSTQLD; FHFYWDQVPSTQLDK; HFYWDQVPSTQLDKH;
FYWDQVPSTQLDKHC; YWDQVPSTQLDKHCF; WDQVPSTQLDKHCFC;
DQVPSTQLDKHCFCP; QVPSTQLDKHCFCPN; VPSTQLDKHCFCPNR;
PSTQLDKHCFCPNRP; STQLDKHCFCPNRPY; TQLDKHCFCPNRPYG;
QLDKHCFCPNRPYGQ; LDKHCFCPNRPYGQY; DKHCFCPNRPYGQYS;
KHCFCPNRPYGQYSL; HCFCPNRPYGQYSLP; CFCPNRPYGQYSLPG;
FCPNRPYGQYSLPGT; CPNRPYGQYSLPGTG; PNRPYGQYSLPGTGL;
NRPYGQYSLPGTGLL; RPYGQYSLPGTGLLG; PYGQYSLPGTGLLGF;
YHQGTLTCNSLALPA; HQGTLTCNSLALPAF; QGTLTCNSLALPAFP;
GTLTCNSLALPAFPR; TLTCNSLALPAFPRV; LTCNSLALPAFPRVL;
TCNSLALPAFPRVLH; CNSLALPAFPRVLHL; NSLALPAFPRVLHLQ;
SLALPAFPRVLHLQQ; LALPAFPRVLHLQQR; ALPAFPRVLHLQQRS;
LPAFPRVLHLQQRSG; PAFPRVLHLQQRSGN; AFPRVLHLQQRSGNY;
FPRVLHLQQRSGNYC; PRVLHLQQRSGNYCL; RVLHLQQRSGNYCLE;
VFLHHAHALFVTLHE; FLHHAHALFVTLHEG; PLFVQLQPPTSVDFH;
LFVQLQPPTSVDFHR; FVQLQPPTSVDFHRL; VQLQPPTSVDFHRLG;
QLQPPTSVDFHRLGP; LQPPTSVDFHRLGPH; QPPTSVDFHRLGPHL;
PPTSVDFHRLGPHLN; PTSVDFHRLGPHLNW; TSVDFHRLGPHLNWG;
SVDFHRLGPHLNWGG; VDFHRLGPHLNWGGE; DFHRLGPHLNWGGEF;
FHRLGPHLNWGGEFL; HRLGPHLNWGGEFLL; RLGPHLNWGGEFLLC;
LGPHLNWGGEFLLCC; GPHLNWGGEFLLCCN; PHLNWGGEFLLCCNR;
HLNWGGEFLLCCNRE; LNWGGEFLLCCNREA; NWGGEFLLCCNREAF;
WGGEFLLCCNREAFF; GGEFLLCCNREAFFS; GEFLLCCNREAFFSL;
EFLLCCNREAFFSLG; FLLCCNREAFFSLGY; LLCCNREAFFSLGYH;
LCCNREAFFSLGYHC; GFHLDPPFLGLGSIL; FHLDPPFLGLGSILP;
HLDPPFLGLGSILPL; LLELLLLLLLVVLAL; LELLLLLLLVVLALA;
ELLLLLLLVVLALAR; LLLLLLLVVLALARV; LLLLLLVVLALARVP;
LLLLLVVLALARVPL; LLLLVVLALARVPLA; LLLVVLALARVPLAF;
LLVVLALARVPLAFW; LVVLALARVPLAFWE; VVLALARVPLAFWEL;
VLALARVPLAFWELP; LALARVPLAFWELPL; ALARVPLAFWELPLD;
LARVPLAFWELPLDT; ARVPLAFWELPLDTL; RVPLAFWELPLDTLL;
VPLAFWELPLDTLLF; PLAFWELPLDTLLFF; LAFWELPLDTLLFFW;
AFWELPLDTLLFFWL; FWELPLDTLLFFWLG; WELPLDTLLFFWLGP;
ELPLDTLLFFWLGPS; LPLDTLLFFWLGPSS; PLDTLLFFWLGPSSY;
LDTLLFFWLGPSSYA; DTLLFFWLGPSSYAS; TLLFFWLGPSSYASR;
LLFFWLGPSSYASRA; LFFWLGPSSYASRAG; FFWLGPSSYASRAGV;
FWLGPSSYASRAGVT; WLGPSSYASRAGVTV; LGPSSYASRAGVTVP;
GPSSYASRAGVTVPY; PSSYASRAGVTVPYR; SSYASRAGVTVPYRP;
SYASRAGVTVPYRPR; YASRAGVTVPYRPRS; ASRAGVTVPYRPRSK;
SRAGVTVPYRPRSKG; RAGVTVPYRPRSKGN; AGVTVPYRPRSKGNI;
GVTVPYRPRSKGNIH; LAPPGAIVFSINSPE; APPGAIVFSINSPEC;
PPGAIVFSINSPECT; PGAIVFSINSPECTL; GAIVFSINSPECTLC; FLKSILCVTSSILSA;
LKSILCVTSSILSAS; KSILCVTSSILSASS; SILCVTSSILSASSI; ILCVTSSILSASSIL;
VWPKCTRVPSLSATC; WPKCTRVPSLSATCL; PKCTRVPSLSATCLT;
KCTRVPSLSATCLTI; CTRVPSLSATCLTIE; TRVPSLSATCLTIEG;
RVPSLSATCLTIEGL; VPSLSATCLTIEGLI; PSLSATCLTIEGLIG;
SLSATCLTIEGLIGE; LSATCLTIEGLIGER; SATCLTIEGLIGERS;
ATCLTIEGLIGERSE; KFIGAFTIVQVVSSK; FIGAFTIVQVVSSKN;
IGAFTIVQVVSSKNL; GAFTIVQVVSSKNLA; AFTIVQVVSSKNLAK;
FTIVQVVSSKNLAKE; TIVQVVSSKNLAKES; IVQVVSSKNLAKESL;
VQVVSSKNLAKESLK; QVVSSKNLAKESLKN; VVSSKNLAKESLKNL;
VSSKNLAKESLKNLS; SSKNLAKESLKNLSV; SKNLAKESLKNLSVL;
KNLAKESLKNLSVLL; NLAKESLKNLSVLLC; LAKESLKNLSVLLCN;
AKESLKNLSVLLCNS; KESLKNLSVLLCNSC; ESLKNLSVLLCNSCE;
SLKNLSVLLCNSCEV; LKNLSVLLCNSCEVI; KNLSVLLCNSCEVIE;
NLSVLLCNSCEVIEG; LSVLLCNSCEVIEGI; SVLLCNSCEVIEGIS;
VLLCNSCEVIEGISS; LLCNSCEVIEGISSL; LCNSCEVIEGISSLI; CNSCEVIEGISSLIT;
NSCEVIEGISSLITC; SCEVIEGISSLITCH; CEVIEGISSLITCHK; EVIEGISSLITCHKA;
VIEGISSLITCHKAW; IEGISSLITCHKAWE; EGISSLITCHKAWEI;
GISSLITCHKAWEIV; ISSLITCHKAWEIVA; SSLITCHKAWEIVAN;
SLITCHKAWEIVANK; LITCHKAWEIVANKE; ITCHKAWEIVANKEG;
TCHKAWEIVANKEGP; CHKAWEIVANKEGPQ; HKAWEIVANKEGPQC;
KAWEIVANKEGPQCL; AWEIVANKEGPQCLG; WEIVANKEGPQCLGS;
EIVANKEGPQCLGSR; IVANKEGPQCLGSRY; IKAANPAIAPGAPAI;
KAANPAIAPGAPAIT; AANPAIAPGAPAITA; ANPAIAPGAPAITAY;
NPAIAPGAPAITAYV; GVRPIAAIASEVLVM; VRPIAAIASEVLVMP;
RPIAAIASEVLVMPS; PIAAIASEVLVMPST; IAAIASEVLVMPSTV;
AAIASEVLVMPSTVA; AIASEVLVMPSTVAR; IASEVLVMPSTVARD;
ASEVLVMPSTVARDA; SEVLVMPSTVARDAI; TSIAAAASPAAISAT;
SIAAAASPAAISATE; IAAAASPAAISATEN; AAAASPAAISATENP;
AAASPAAISATENPV; AASPAAISATENPVA; ASPAAISATENPVAA;
SPAAISATENPVAAA; PAAISATENPVAAAA; AAISATENPVAAAAS;
AISATENPVAAAASD; ISATENPVAAAASDT; SATENPVAAAASDTL;
ATENPVAAAASDTLA; TENPVAAAASDTLAT; ENPVAAAASDTLATR;
NPVAAAASDTLATRS; PVAAAASDTLATRSP; VAAAASDTLATRSPK;
AAAASDTLATRSPKS; AAASDTLATRSPKSA; AASDTLATRSPKSAR;
ASDTLATRSPKSARA; SDTLATRSPKSARAA; DTLATRSPKSARAAP;
TLATRSPKSARAAPM; LATRSPKSARAAPMN; ATRSPKSARAAPMNL;
TRSPKSARAAPMNLE; RSPKSARAAPMNLEI; SPKSARAAPMNLEIQ;
PKSARAAPMNLEIQK; KSARAAPMNLEIQKK; SARAAPMNLEIQKKR;
ARAAPMNLEIQKKRD; RAAPMNLEIQKKRDY; AAPMNLEIQKKRDYL;
APMNLEIQKKRDYLP; PMNLEIQKKRDYLPR; MNLEIQKKRDYLPRS;
NLEIQKKRDYLPRSL; LEIQKKRDYLPRSLL; EIQKKRDYLPRSLLQ;
IQKKRDYLPRSLLQS; QKKRDYLPRSLLQSL; KKRDYLPRSLLQSLL;
KRDYLPRSLLQSLLQ; RDYLPRSLLQSLLQQ; DYLPRSLLQSLLQQV;
YLPRSLLQSLLQQVK; LPRSLLQSLLQQVKQ; PRSLLQSLLQQVKQW;
RSLLQSLLQQVKQWY; SLLQSLLQQVKQWYF; LLQSLLQQVKQWYFC;
LQSLLQQVKQWYFCF; QSLLQQVKQWYFCFS; SLLQQVKQWYFCFSR;
LLQQVKQWYFCFSRL; LQQVKQWYFCFSRLH; QQVKQWYFCFSRLHC;
QVKQWYFCFSRLHCL; VKQWYFCFSRLHCLH; KQWYFCFSRLHCLHL;
QWYFCFSRLHCLHLY; WYFCFSRLHCLHLYK; YFCFSRLHCLHLYKI;
FCFSRLHCLHLYKIP; CFSRLHCLHLYKIPA; FSRLHCLHLYKIPAK;
SRLHCLHLYKIPAKA; RLHCLHLYKIPAKAL; LHCLHLYKIPAKALK;
KSSELFFLFQSRFYQ; SSELFFLFQSRFYQL; SELFFLFQSRFYQLS;
ELFFLFQSRFYQLSL; LFFLFQSRFYQLSLK; FFLFQSRFYQLSLKL;
FLFQSRFYQLSLKLV; LFQSRFYQLSLKLVV; FQSRFYQLSLKLVVT;
QSRFYQLSLKLVVTA; SRFYQLSLKLVVTAG; RFYQLSLKLVVTAGA;
FYQLSLKLVVTAGAE; YQLSLKLVVTAGAEP; QLSLKLVVTAGAEPW;
LSLKLVVTAGAEPWP; SLKLVVTAGAEPWPL; LKLVVTAGAEPWPLS;
KLVVTAGAEPWPLSS; LVVTAGAEPWPLSSL; VVTAGAEPWPLSSLT;
VTAGAEPWPLSSLTG; TAGAEPWPLSSLTGD; AGAEPWPLSSLTGDK;
GAEPWPLSSLTGDKA; AEPWPLSSLTGDKAK; EPWPLSSLTGDKAKI;
PWPLSSLTGDKAKIP; WPLSSLTGDKAKIPR; PLSSLTGDKAKIPRL;
LSSLTGDKAKIPRLA; SSLTGDKAKIPRLAK; SLTGDKAKIPRLAKH;
LTGDKAKIPRLAKHV; TGDKAKIPRLAKHVC; GDKAKIPRLAKHVCH;
DKAKIPRLAKHVCHA; KAKIPRLAKHVCHAL; AKIPRLAKHVCHALS;
KIPRLAKHVCHALSF; IPRLAKHVCHALSFL; PRLAKHVCHALSFLR;
RLAKHVCHALSFLRS; LAKHVCHALSFLRSW; AKHVCHALSFLRSWF;
KHVCHALSFLRSWFG; HVCHALSFLRSWFGC; VCHALSFLRSWFGCI;
CHALSFLRSWFGCIP; HALSFLRSWFGCIPW; ALSFLRSWFGCIPWV;
LSFLRSWFGCIPWVS; SFLRSWFGCIPWVSS; FLRSWFGCIPWVSSS;
LRSWFGCIPWVSSSS; RSWFGCIPWVSSSSL; GHGLAAFPCESCTFL;
HGLAAFPCESCTFLP; GLAAFPCESCTFLPE; LAAFPCESCTFLPEV;
AAFPCESCTFLPEVM; AFPCESCTFLPEVMV; FPCESCTFLPEVMVW;
PCESCTFLPEVMVWL; CESCTFLPEVMVWLH; ESCTFLPEVMVWLHS;
SCTFLPEVMVWLHSM; CTFLPEVMVWLHSMG; TFLPEVMVWLHSMGK;
FLPEVMVWLHSMGKQ; LPEVMVWLHSMGKQL; PEVMVWLHSMGKQLL;
EVMVWLHSMGKQLLP; VMVWLHSMGKQLLPV; MVWLHSMGKQLLPVA;
VWLHSMGKQLLPVAF; WLHSMGKQLLPVAFF; LHSMGKQLLPVAFFF;
HSMGKQLLPVAFFFI; SMGKQLLPVAFFFII; MGKQLLPVAFFFIIY;
GKQLLPVAFFFIIYK; KQLLPVAFFFIIYKR; QLLPVAFFFIIYKRP;
LLPVAFFFIIYKRPR; LPVAFFFIIYKRPRP; PVAFFFIIYKRPRPP; VAFFFIIYKRPRPPL;
AFFFIIYKRPRPPLP; FFFIIYKRPRPPLPP; FFIIYKRPRPPLPPP; FIIYKRPRPPLPPPF;
IIYKRPRPPLPPPFL; IYKRPRPPLPPPFLS; YKRPRPPLPPPFLSS; KRPRPPLPPPFLSSS;
RPRPPLPPPFLSSSK; PRPPLPPPFLSSSKG; RPPLPPPFLSSSKGV;
PPLPPPFLSSSKGVE; PLPPPFLSSSKGVEA; LPPPFLSSSKGVEAF;
PPPFLSSSKGVEAFS; PPFLSSSKGVEAFSE; PFLSSSKGVEAFSEA;
QNYLGKSLFFCNFCK

16 mers:

WIKFLTGKNPWSSWTF; GSVRNFTLTKGATRIK; LISLILEPGVAQRFVL;
ISLILEPGVAQRFVLI; SLILEPGVAQRFVLIF; LILEPGVAQRFVLIFL;
ILEPGVAQRFVLIFLF; LEPGVAQRFVLIFLFA; EPGVAQRFVLIFLFAQ;
PGVAQRFVLIFLFAQI; GVAQRFVLIFLFAQIP; VAQRFVLIFLFAQIPC;
AQRFVLIFLFAQIPCT; QRFVLIFLFAQIPCTA; RFVLIFLFAQIPCTAR;
FVLIFLFAQIPCTARN; VLIFLFAQIPCTARNG; LIFLFAQIPCTARNGL;
IFLFAQIPCTARNGLF; FLFAQIPCTARNGLFV; LFAQIPCTARNGLFVP;
FAQIPCTARNGLFVPK; AQIPCTARNGLFVPKS; QIPCTARNGLFVPKSL;
IPCTARNGLFVPKSLL; PCTARNGLFVPKSLLC; CTARNGLFVPKSLLCT;
TARNGLFVPKSLLCTA; ARNGLFVPKSLLCTAL; RNGLFVPKSLLCTALA;
NGLFVPKSLLCTALAC; GLFVPKSLLCTALACY; LFVPKSLLCTALACYV;
FVPKSLLCTALACYVS; VPKSLLCTALACYVSL; PKSLLCTALACYVSLD;
VIIFFIGANLWNRRVG; IIFFIGANLWNRRVGV; IFFIGANLWNRRVGVL;
FFIGANLWNRRVGVLV; FIGANLWNRRVGVLVE; IGANLWNRRVGVLVEF;
GANLWNRRVGVLVEFL; RSNSRFSTLNTTQKKK; SNSRFSTLNTTQKKKK;
NSRFSTLNTTQKKKKG; SRFSTLNTTQKKKKGR; RFSTLNTTQKKKKGRR;
FSTLNTTQKKKKGRRP; RSIPYYRRKHSRGLKG; SIPYYRRKHSRGLKGA;
GCVFIIRYVFRISIQC; CVFIIRYVFRISIQCR; VFIIRYVFRISIQCRG;
FIIRYVFRISIQCRGV; KKSRYPSYDQGRNANR; KSRYPSYDQGRNANRK;
SRYPSYDQGRNANRKI; RYPSYDQGRNANRKIQ; YPSYDQGRNANRKIQS;
PSYDQGRNANRKIQSY; SYDQGRNANRKIQSYI; YDQGRNANRKIQSYIR;
NGFNIWSSWKCCTRTI; GFNIWSSWKCCTRTIY; FNIWSSWKCCTRTIYG;
NIWSSWKCCTRTIYGR; IWSSWKCCTRTIYGRC; WSSWKCCTRTIYGRCC;
SSWKCCTRTIYGRCCL; SWKCCTRTIYGRCCLA; WKCCTRTIYGRCCLAA;
KCCTRTIYGRCCLAAL; CCTRTIYGRCCLAALF; CTRTIYGRCCLAALFA;
TRTIYGRCCLAALFAT; IKGFAFRTWNKQFRQF; KGFAFRTWNKQFRQFE;
GFAFRTWNKQFRQFER; FAFRTWNKQFRQFERL; AFRTWNKQFRQFERLF;
FRTWNKQFRQFERLFR; RTWNKQFRQFERLFRW; TWNKQFRQFERLFRWK;
WNKQFRQFERLFRWKC; GKFRKETFKQKNPNIS; KFRKETFKQKNPNIST;
FRKETFKQKNPNISTR; RKETFKQKNPNISTRL; KETFKQKNPNISTRLG;
ETFKQKNPNISTRLGY; TFKQKNPNISTRLGYN; FKQKNPNISTRLGYNE;
AQNIFKKILTKLRVLT; KKNFTKWNDLVATANL; KNFTKWNDLVATANLV;
IPITMLFPSLRYFSPC; KHLFKAFWFAIVPVCQ; HLFKAFWFAIVPVCQY;
LFKAFWFAIVPVCQYI; FKAFWFAIVPVCQYIL; KAFWFAIVPVCQYILS;
AFWFAIVPVCQYILSY; FWFAIVPVCQYILSYL; WFAIVPVCQYILSYLG;
FAIVPVCQYILSYLGP; AIVPVCQYILSYLGPL; IVPVCQYILSYLGPLE;
VPVCQYILSYLGPLEV; PVCQYILSYLGPLEVF; VCQYILSYLGPLEVFL;
CQYILSYLGPLEVFLC; QYILSYLGPLEVFLCH; YILSYLGPLEVFLCHQ;
ILSYLGPLEVFLCHQT; LSYLGPLEVFLCHQTP; GHLAKRKLGKDSLQIF;
HLAKRKLGKDSLQIFF; LAKRKLGKDSLQIFFS; AKRKLGKDSLQIFFSG;
KRKLGKDSLQIFFSGG; RKLGKDSLQIFFSGGS; TGHKYQQLKHTGYQLY;
GHKYQQLKHTGYQLYK; HKYQQLKHTGYQLYKE; KYQQLKHTGYQLYKEA;
YQQLKHTGYQLYKEAP; QQLKHTGYQLYKEAPH; QLKHTGYQLYKEAPHP;
LKHTGYQLYKEAPHPV; KHTGYQLYKEAPHPVH; HTGYQLYKEAPHPVHL;
TGYQLYKEAPHPVHLA; GYQLYKEAPHPVHLAT; YQLYKEAPHPVHLATL;
QLYKFAPHPVHLATLW; HFHFYWDQVPSTQLDK; FHFYWDQVPSTQLDKH;
HFYWDQVPSTQLDKHC; FYWDQVPSTQLDKHCF; YWDQVPSTQLDKHCFC;
WDQVPSTQLDKHCFCP; DQVPSTQLDKHCFCPN; QVPSTQLDKHCFCPNR;
VPSTQLDKHCFCPNRP; PSTQLDKHCFCPNRPY; STQLDKHCFCPNRPYG;
TQLDKHCFCPNRPYGQ; QLDKHCFCPNRPYGQY; LDKHCFCPNRPYGQYS;
DKHCFCPNRPYGQYSL; KHCFCPNRPYGQYSLP; HCFCPNRPYGQYSLPG;
CFCPNRPYGQYSLPGT; FCPNRPYGQYSLPGTG; CPNRPYGQYSLPGTGL;
PNRPYGQYSLPGTGLL; NRPYGQYSLPGTGLLG; RPYGQYSLPGTGLLGF;
YHQGTLTCNSLALPAF; HQGTLTCNSLALPAFP; QGTLTCNSLALPAFPR;
GTLTCNSLALPAFPRV; TLTCNSLALPAFPRVL; LTCNSLALPAFPRVLH;
TCNSLALPAFPRVLHL; CNSLALPAFPRVLHLQ; NSLALPAFPRVLHLQQ;
SLALPAFPRVLHLQQR; LALPAFPRVLHLQQRS; ALPAFPRVLHLQQRSG;
LPAFPRVLHLQQRSGN; PAFPRVLHLQQRSGNY; AFPRVLHLQQRSGNYC;
FPRVLHLQQRSGNYCL; PRVLHLQQRSGNYCLE; VFLHHAHALFVTLHEG;
PLFVQLQPPTSVDFHR; LFVQLQPPTSVDFHRL; FVQLQPPTSVDFHRLG;
VQLQPPTSVDFHRLGP; QLQPPTSVDFHRLGPH; LQPPTSVDFHRLGPHL;
QPPTSVDFHRLGPHLN; PPTSVDFHRLGPHLNW; PTSVDFHRLGPHLNWG;
TSVDFHRLGPHLNWGG; SVDFHRLGPHLNWGGE; VDFHRLGPHLNWGGEF;
DFHRLGPHLNWGGEFL; FHRLGPHLNWGGEFLL; HRLGPHLNWGGEFLLC;
RLGPHLNWGGEFLLCC; LGPHLNWGGEFLLCCN; GPHLNWGGEFLLCCNR;
PHLNWGGEFLLCCNRE; HLNWGGEFLLCCNREA; LNWGGEFLLCCNREAF;
NWGGEFLLCCNREAFF; WGGEFLLCCNREAFFS; GGEFLLCCNREAFFSL;
GEFLLCCNREAFFSLG; EFLLCCNREAFFSLGY; FLLCCNREAFFSLGYH;
LLCCNREAFFSLGYHC; GFHLDPPFLGLGSILP; FHLDPPFLGLGSILPL;
LLELLLLLLLVVLALA; LELLLLLLLVVLALAR; ELLLLLLLVVLALARV;
LLLLLLLVVLALARVP; LLLLLLVVLALARVPL; LLLLLVVLALARVPLA;
LLLLVVLALARVPLAF; LLLVVLALARVPLAFW; LLVVLALARVPLAFWE;
LVVLALARVPLAFWEL; VVLALARVPLAFWELP; VLALARVPLAFWELPL;
LALARVPLAFWELPLD; ALARVPLAFWELPLDT; LARVPLAFWELPLDTL;
ARVPLAFWELPLDTLL; RVPLAFWELPLDTLLF; VPLAFWELPLDTLLFF;
PLAFWELPLDTLLFFW; LAFWELPLDTLLFFWL; AFWELPLDTLLFFWLG;
FWELPLDTLLFFWLGP; WELPLDTLLFFWLGPS; ELPLDTLLFFWLGPSS;
LPLDTLLFFWLGPSSY; PLDTLLFFWLGPSSYA; LDTLLFFWLGPSSYAS;
DTLLFFWLGPSSYASR; TLLFFWLGPSSYASRA; LLFFWLGPSSYASRAG;
LFFWLGPSSYASRAGV; FFWLGPSSYASRAGVT; FWLGPSSYASRAGVTV;
WLGPSSYASRAGVTVP; LGPSSYASRAGVTVPY; GPSSYASRAGVTVPYR;
PSSYASRAGVTVPYRP; SSYASRAGVTVPYRPR; SYASRAGVTVPYRPRS;
YASRAGVTVPYRPRSK; ASRAGVTVPYRPRSKG; SRAGVTVPYRPRSKGN;
RAGVTVPYRPRSKGNI; AGVTVPYRPRSKGNIH; LAPPGAIVFSINSPEC;
APPGAIVFSINSPECT; PPGAIVFSINSPECTL; PGAIVFSINSPECTLC;
FLKSILCVTSSILSAS; LKSILCVTSSILSASS; KSILCVTSSILSASSI;
SILCVTSSILSASSIL; VWPKCTRVPSLSATCL; WPKCTRVPSLSATCLT;
PKCTRVPSLSATCLTI; KCTRVPSLSATCLTIE; CTRVPSLSATCLTIEG;
TRVPSLSATCLTIEGL; RVPSLSATCLTIEGLI; VPSLSATCLTIEGLIG;
PSLSATCLTIEGLIGE; SLSATCLTIEGLIGER; LSATCLTIEGLIGERS;
SATCLTIEGLIGERSE; KFIGAFTIVQVVSSKN; FIGAFTIVQVVSSKNL;
IGAFTIVQVVSSKNLA; GAFTIVQVVSSKNLAK; AFTIVQVVSSKNLAKE;
FTIVQVVSSKNLAKES; TIVQVVSSKNLAKESL; IVQVVSSKNLAKESLK;
VQVVSSKNLAKESLKN; QVVSSKNLAKESLKNL; VVSSKNLAKESLKNLS;
VSSKNLAKESLKNLSV; SSKNLAKESLKNLSVL; SKNLAKESLKNLSVLL;
KNLAKESLKNLSVLLC; NLAKESLKNLSVLLCN; LAKESLKNLSVLLCNS;
AKESLKNLSVLLCNSC; KESLKNLSVLLCNSCE; ESLKNLSVLLCNSCEV;
SLKNLSVLLCNSCEVI; LKNLSVLLCNSCEVIE; KNLSVLLCNSCEVIEG;
NLSVLLCNSCEVIEGI; LSVLLCNSCEVIEGIS; SVLLCNSCEVIEGISS;
VLLCNSCEVIEGISSL; LLCNSCEVIEGISSLI; LCNSCEVIEGISSLIT;
CNSCEVIEGISSLITC; NSCEVIEGISSLITCH; SCEVIEGISSLITCHK;
CEVIEGISSLITCHKA; EVIEGISSLITCHKAW; VIEGISSLITCHKAWE;
IEGISSLITCHKAWEI; EGISSLITCHKAWEIV; GISSLITCHKAWEIVA;
ISSLITCHKAWEIVAN; SSLITCHKAWEIVANK; SLITCHKAWEIVANKE;
LITCHKAWEIVANKEG; ITCHKAWEIVANKEGP; TCHKAWEIVANKEGPQ;
CHKAWEIVANKEGPQC; HKAWEIVANKEGPQCL; KAWEIVANKEGPQCLG;
AWEIVANKEGPQCLGS; WEIVANKEGPQCLGSR; EIVANKEGPQCLGSRY;
IKAANPAIAPGAPAIT; KAANPAIAPGAPAITA; AANPAIAPGAPAITAY;
ANPAIAPGAPAITAYV; GVRPIAAIASEVLVMP; VRPIAAIASEVLVMPS;
RPIAAIASEVLVMPST; PIAAIASEVLVMPSTV; IAAIASEVLVMPSTVA;
AAIASEVLVMPSTVAR; AIASEVLVMPSTVARD; IASEVLVMPSTVARDA;
ASEVLVMPSTVARDAI; TSIAAAASPAAISATE; SIAAAASPAAISATEN;
IAAAASPAAISATENP; AAAASPAAISATENPV; AAASPAAISATENPVA;
AASPAAISATENPVAA; ASPAAISATENPVAAA; SPAAISATENPVAAAA;
PAAISATENPVAAAAS; AAISATENPVAAAASD; AISATENPVAAAASDT;
ISATENPVAAAASDTL; SATENPVAAAASDTLA; ATENPVAAAASDTLAT;
TENPVAAAASDTLATR; ENPVAAAASDTLATRS; NPVAAAASDTLATRSP;
PVAAAASDTLATRSPK; VAAAASDTLATRSPKS; AAAASDTLATRSPKSA;
AAASDTLATRSPKSAR; AASDTLATRSPKSARA; ASDTLATRSPKSARAA;
SDTLATRSPKSARAAP; DTLATRSPKSARAAPM; TLATRSPKSARAAPMN;
LATRSPKSARAAPMNL; ATRSPKSARAAPMNLE; TRSPKSARAAPMNLEI;
RSPKSARAAPMNLEIQ; SPKSARAAPMNLEIQK; PKSARAAPMNLEIQKK;
KSARAAPMNLEIQKKR; SARAAPMNLEIQKKRD; ARAAPMNLEIQKKRDY;
RAAPMNLEIQKKRDYL; AAPMNLEIQKKRDYLP; APMNLEIQKKRDYLPR;
PMNLEIQKKRDYLPRS; MNLEIQKKRDYLPRSL; NLEIQKKRDYLPRSLL;
LEIQKKRDYLPRSLLQ; EIQKKRDYLPRSLLQS; IQKKRDYLPRSLLQSL;
QKKRDYLPRSLLQSLL; KKRDYLPRSLLQSLLQ; KRDYLPRSLLQSLLQQ;
RDYLPRSLLQSLLQQV; DYLPRSLLQSLLQQVK; YLPRSLLQSLLQQVKQ;
LPRSLLQSLLQQVKQW; PRSLLQSLLQQVKQWY; RSLLQSLLQQVKQWYF;
SLLQSLLQQVKQWYFC; LLQSLLQQVKQWYFCF; LQSLLQQVKQWYFCFS;
QSLLQQVKQWYFCFSR; SLLQQVKQWYFCFSRL; LLQQVKQWYFCFSRLH;
LQQVKQWYFCFSRLHC; QQVKQWYFCFSRLHCL; QVKQWYFCFSRLHCLH;
VKQWYFCFSRLHCLHL; KQWYFCFSRLHCLHLY; QWYFCFSRLHCLHLYK;
WYFCFSRLHCLHLYKI; YFCFSRLHCLHLYKIP; FCFSRLHCLHLYKIPA;
CFSRLHCLHLYKIPAK; FSRLHCLHLYKIPAKA; SRLHCLHLYKIPAKAL;
RLHCLHLYKIPAKALK; KSSELFFLFQSRFYQL; SSELFFLFQSRFYQLS;
SELFFLFQSRFYQLSL; ELFFLFQSRFYQLSLK; LFFLFQSRFYQLSLKL;
FFLFQSRFYQLSLKLV; FLFQSRFYQLSLKLVV; LFQSRFYQLSLKLVVT;
FQSRFYQLSLKLVVTA; QSRFYQLSLKLVVTAG; SRFYQLSLKLVVTAGA;
RFYQLSLKLVVTAGAE; FYQLSLKLVVTAGAEP; YQLSLKLVVTAGAEPW;
QLSLKLVVTAGAEPWP; LSLKLVVTAGAEPWPL; SLKLVVTAGAEPWPLS;
LKLVVTAGAEPWPLSS; KLVVTAGAEPWPLSSL; LVVTAGAEPWPLSSLT;
VVTAGAEPWPLSSLTG; VTAGAEPWPLSSLTGD; TAGAEPWPLSSLTGDK;
AGAEPWPLSSLTGDKA; GAEPWPLSSLTGDKAK; AEPWPLSSLTGDKAKI;
EPWPLSSLTGDKAKIP; PWPLSSLTGDKAKIPR; WPLSSLTGDKAKIPRL;
PLSSLTGDKAKIPRLA; LSSLTGDKAKIPRLAK; SSLTGDKAKIPRLAKH;
SLTGDKAKIPRLAKHV; LTGDKAKIPRLAKHVC; TGDKAKIPRLAKHVCH;
GDKAKIPRLAKHVCHA; DKAKIPRLAKHVCHAL; KAKIPRLAKHVCHALS;
AKIPRLAKHVCHALSF; KIPRLAKHVCHALSFL; IPRLAKHVCHALSFLR;
PRLAKHVCHALSFLRS; RLAKHVCHALSFLRSW; LAKHVCHALSFLRSWF;
AKHVCHALSFLRSWFG; KHVCHALSFLRSWFGC; HVCHALSFLRSWFGCI;
VCHALSFLRSWFGCIP; CHALSFLRSWFGCIPW; HALSFLRSWFGCIPWV;
ALSFLRSWFGCIPWVS; LSFLRSWFGCIPWVSS; SFLRSWFGCIPWVSSS;
FLRSWFGCIPWVSSSS; LRSWFGCIPWVSSSSL; GHGLAAFPCESCTFLP;
HGLAAFPCESCTFLPE; GLAAFPCESCTFLPEV; LAAFPCESCTFLPEVM;
AAFPCESCTFLPEVMV; AFPCESCTFLPEVMVW; FPCESCTFLPEVMVWL;
PCESCTFLPEVMVWLH; CESCTFLPEVMVWLHS; ESCTFLPEVMVWLHSM;
SCTFLPEVMVWLHSMG; CTFLPEVMVWLHSMGK; TFLPEVMVWLHSMGKQ;
FLPEVMVWLHSMGKQL; LPEVMVWLHSMGKQLL; PEVMVWLHSMGKQLLP;
EVMVWLHSMGKQLLPV; VMVWLHSMGKQLLPVA; MVWLHSMGKQLLPVAF;
VWLHSMGKQLLPVAFF; WLHSMGKQLLPVAFFF; LHSMGKQLLPVAFFFI;
HSMGKQLLPVAFFFII; SMGKQLLPVAFFFIIY; MGKQLLPVAFFFIIYK;
GKQLLPVAFFFIIYKR; KQLLPVAFFFIIYKRP; QLLPVAFFFIIYKRPR;
LLPVAFFFIIYKRPRP; LPVAFFFIIYKRPRPP; PVAFFFIIYKRPRPPL;
VAFFFIIYKRPRPPLP; AFFFIIYKRPRPPLPP; FFFIIYKRPRPPLPPP;
FFIIYKRPRPPLPPPF; FIIYKRPRPPLPPPFL; IIYKRPRPPLPPPFLS;
IYKRPRPPLPPPFLSS; YKRPRPPLPPPFLSSS; KRPRPPLPPPFLSSSK;
RPRPPLPPPFLSSSKG; PRPPLPPPFLSSSKGV; RPPLPPPFLSSSKGVE;
PPLPPPFLSSSKGVEA; PLPPPFLSSSKGVEAF; LPPPFLSSSKGVEAFS;
PPPFLSSSKGVEAFSE; PPFLSSSKGVEAFSEA

BK virus, reverse reading frame 3
13 mers:

QGRIHGAHGPFRP; KSCLGKSSLNEKS; SCLGKSSLNEKSL; CLGKSSLNEKSLF;
LGKSSLNEKSLFK; GKSSLNEKSLFKE; KSSLNEKSLFKEV; FSSLPRYPVLQGM;
SSLPRYPVLQGMA; SLPRYPVLQGMAY; LPRYPVLQGMAYL; PRYPVLQGMAYLF;
RYPVLQGMAYLFQ; YPVLQGMAYLFQK; PVLQGMAYLFQKA;
VLQGMAYLFQKAF; LQGMAYLFQKAFC; QGMAYLFQKAFCA;
GMAYLFQKAFCAL; MAYLFQKAFCALP; AYLFQKAFCALPL; YLFQKAFCALPLH;
LFQKAFCALPLHA; FQKAFCALPLHAM; QKAFCALPLHAMS; KAFCALPLHAMSA;
KIFKKRALGLDRL; IFKKRALGLDRLL; FKKRALGLDRLLL; KKRALGLDRLLLH;
RNSAMVGPNNWRN; NSAMVGPNNWRNS; SAMVGPNNWRNSL;
AMVGPNNWRNSLQ; MVGPNNWRNSLQR; VGPNNWRNSLQRS;
GPNNWRNSLQRSK; PNNWRNSLQRSKA; NNWRNSLQRSKAL;
NWRNSLQRSKALR; VPTYGTEEWESWW; PTYGTEEWESWWS;
TYGTEEWESWWSS; YGTEEWESWWSSF; GTEEWESWWSSFN;
TEEWESWWSSFNE; EEWESWWSSFNEK; EWESWWSSFNEKW;
WESWWSSFNEKWD; ESWWSSFNEKWDE; SWWSSFNEKWDED;
WWSSFNEKWDEDL; WSSFNEKWDEDLF; SSFNEKWDEDLFC; SFNEKWDEDLFCH;
FNEKWDEDLFCHE; NEKWDEDLFCHED; EKWDEDLFCHEDM;
KWDEDLFCHEDMF; WDEDLFCHEDMFA; DEDLFCHEDMFAS;
EDLFCHEDMFASD; DLFCHEDMFASDE; LFCHEDMFASDEE; FCHEDMFASDEEA;
CHEDMFASDEEAT; HEDMFASDEEATA; EDMFASDEEATAD; DMFASDEEATADS;
MFASDEEATADSQ; FASDEEATADSQH; ASDEEATADSQHS; SDEEATADSQHST;
DEEATADSQHSTP; EEATADSQHSTPP; EATADSQHSTPPK; ATADSQHSTPPKK;
TADSQHSTPPKKK; ADSQHSTPPKKKR; DSQHSTPPKKKRK; SQHSTPPKKKRKV;
QHSTPPKKKRKVE; HSTPPKKKRKVED; STPPKKKRKVEDP; TPPKKKRKVEDPK;
PPKKKRKVEDPKD; PKKKRKVEDPKDF; KKKRKVEDPKDFP; KKRKVEDPKDFPS;
KRKVEDPKDFPSD; RKVEDPKDFPSDL; KVEDPKDFPSDLH; VEDPKDFPSDLHQ;
EDPKDFPSDLHQF; DPKDFPSDLHQFL; PKDFPSDLHQFLS; KDFPSDLHQFLSQ;
DFPSDLHQFLSQA; FPSDLHQFLSQAV; PSDLHQFLSQAVF; SDLHQFLSQAVFS;
DLHQFLSQAVFSN; LHQFLSQAVFSNR; HQFLSQAVFSNRT; QFLSQAVFSNRTL;
FLSQAVFSNRTLA; LSQAVFSNRTLAC; SQAVFSNRTLACF; QAVFSNRTLACFA;
AVFSNRTLACFAV; VFSNRTLACFAVY; FSNRTLACFAVYT; SNRTLACFAVYTT;
NRTLACFAVYTTK; RTLACFAVYTTKE; TLACFAVYTTKEK; LACFAVYTTKEKA;
ACFAVYTTKEKAQ; CFAVYTTKEKAQI; FAVYTTKEKAQIL; AVYTTKEKAQILY;
VYTTKEKAQILYK; YTTKEKAQILYKK; TTKEKAQILYKKL; TKEKAQILYKKLM;
KEKAQILYKKLME; EKAQILYKKLMEK; KAQILYKKLMEKY; AQILYKKLMEKYS;
QILYKKLMEKYSV; ILYKKLMEKYSVT; LYKKLMEKYSVTF; YKKLMEKYSVTFI;
KKLMEKYSVTFIS; KLMEKYSVTFISR; LMEKYSVTFISRH; MEKYSVTFISRHM;
EKYSVTFISRHMC; KYSVTFISRHMCA; YSVTFISRHMCAG; SVTFISRHMCAGH;
VTFISRHMCAGHN; TFISRHMCAGHNI; FISRHMCAGHNII; ISRHMCAGHNIIF;
SRHMCAGHNIIFF; RHMCAGHNIIFFL; HMCAGHNIIFFLT; MCAGHNIIFFLTP;
CAGHNIIFFLTPH; AGHNIIFFLTPHR; GHNIIFFLTPHRH; HNIIFFLTPHRHR;
NIIFFLTPHRHRV; IIFFLTPHRHRVS; IFFLTPHRHRVSA; FFLTPHRHRVSAI;
FLTPHRHRVSAIN; LTPHRHRVSAINN; TPHRHRVSAINNF; PHRHRVSAINNFC;
HRHRVSAINNFCQ; RHRVSAINNFCQK; HRVSAINNFCQKL; RVSAINNFCQKLC;
VSAINNFCQKLCT; SAINNFCQKLCTF; AINNFCQKLCTFS; INNFCQKLCTFSF;
NNFCQKLCTFSFL; NFCQKLCTFSFLI; FCQKLCTFSFLIC; CQKLCTFSFLICK;
QKLCTFSFLICKG; KLCTFSFLICKGV; LCTFSFLICKGVN; CTFSFLICKGVNK;
TFSFLICKGVNKE; FSFLICKGVNKEY; SFLICKGVNKEYL; FLICKGVNKEYLL;
LICKGVNKEYLLY; ICKGVNKEYLLYS; CKGVNKEYLLYSA; KGVNKEYLLYSAL;
GVNKEYLLYSALT; VNKEYLLYSALTR; NKEYLLYSALTRD; KEYLLYSALTRDP;
EYLLYSALTRDPY; YLLYSALTRDPYH; LLYSALTRDPYHT; LYSALTRDPYHTI;
YSALTRDPYHTIE; SALTRDPYHTIEE; ALTRDPYHTIEES; LTRDPYHTIEESI;
TRDPYHTIEESIQ; RDPYHTIEESIQG; DPYHTIEESIQGG; PYHTIEESIQGGL;
YHTIEESIQGGLK; HTIEESIQGGLKE; TIEESIQGGLKEH; IEESIQGGLKEHD;
EESIQGGLKEHDF; ESIQGGLKEHDFS; SIQGGLKEHDFSP; IQGGLKEHDFSPE;
QGGLKEHDFSPEE; GGLKEHDFSPEEP; GLKEHDFSPEEPE; LKEHDFSPEEPEE;
KEHDFSPEEPEET; EHDFSPEEPEETK; HDFSPEEPEETKQ; DFSPEEPEETKQV;
FSPEEPEETKQVS; SPEEPEETKQVSW; PEEPEETKQVSWK; EEPEETKQVSWKL;
EPEETKQVSWKLI; PEETKQVSWKLIT; EETKQVSWKLITE; ETKQVSWKLITEY;
TKQVSWKLITEYA; KQVSWKLITEYAV; QVSWKLITEYAVE; VSWKLITEYAVET;
SWKLITEYAVETK; WKLITEYAVETKC; KLITEYAVETKCE; LITEYAVETKCED;
ITEYAVETKCEDV; TEYAVETKCEDVF; EYAVETKCEDVFL; YAVETKCEDVFLL;
AVETKCEDVFLLL; VETKCEDVFLLLG; ETKCEDVFLLLGM; TKCEDVFLLLGMY;
KCEDVFLLLGMYL; CEDVFLLLGMYLE; EDVFLLLGMYLEF; DVFLLLGMYLEFQ;
VFLLLGMYLEFQY; FLLLGMYLEFQYN; LLLGMYLEFQYNV; LLGMYLEFQYNVE;
LGMYLEFQYNVEE; GMYLEFQYNVEEC; MYLEFQYNVEECK; YLEFQYNVEECKK;
LEFQYNVEECKKC; EFQYNVEECKKCQ; FQYNVEECKKCQK; QYNVEECKKCQKK;
YNVEECKKCQKKD; NVEECKKCQKKDQ; VEECKKCQKKDQP;
EECKKCQKKDQPY; ECKKCQKKDQPYH; CKKCQKKDQPYHF;
KKCQKKDQPYHFK; KCQKKDQPYHFKY; CQKKDQPYHFKYH;
QKKDQPYHFKYHE; KKDQPYHFKYHEK; KDQPYHFKYHEKH;
DQPYHFKYHEKHF; QPYHFKYHEKHFA; PYHFKYHEKHFAN; YHFKYHEKHFANA;
HFKYHEKHFANAI; FKYHEKHFANAII; KYHEKHFANAIIF; YHEKHFANAIIFA;
HEKHFANAIIFAE; EKHFANAIIFAES; KHFANAIIFAESK; HFANAIIFAESKN;
FANAIIFAESKNQ; ANAIIFAESKNQK; NAIIFAESKNQKS; AIIFAESKNQKSI;
IIFAFSKNQKSIC; IFAESKNQKSICQ; FAESKNQKSICQQ; AESKNQKSICQQA;
ESKNQKSICQQAV; SKNQKSICQQAVD; KNQKSICQQAVDT; NQKSICQQAVDTV;
QKSICQQAVDTVL; KSICQQAVDTVLA; SICQQAVDTVLAK; ICQQAVDTVLAKK;
CQQAVDTVLAKKR; QQAVDTVLAKKRV; QAVDTVLAKKRVD;
AVDTVLAKKRVDT; VDTVLAKKRVDTL; DTVLAKKRVDTLH;
TVLAKKRVDTLHM; VLAKKRVDTLHMT; LAKKRVDTLHMTR;
AKKRVDTLHMTRE; KKRVDTLHMTREE; KRVDTLHMTREEM;
RVDTLHMTREEML; VDTLHMTREEMLT; DTLHMTREEMLTE; TLHMTREEMLTER;
LHMTREEMLTERF; HMTREEMLTERFN; MTREEMLTERFNH; TREEMLTERFNHI;
REEMLTERFNHIL; EEMLTERFNHILD; EMLTERFNHILDK; MLTERFNHILDKM;
LTERFNHILDKMD; TERFNHILDKMDL; ERFNHILDKMDLI; RFNHILDKMDLIF;
FNHILDKMDLIFG; NHILDKMDLIFGA; HILDKMDLIFGAH; ILDKMDLIFGAHG;
LDKMDLIFGAHGN; DKMDLIFGAHGNA; KMDLIFGAHGNAV; MDLIFGAHGNAVL;
DLIFGAHGNAVLE; LIFGAHGNAVLEQ; IFGAHGNAVLEQY; FGAHGNAVLEQYM;
GAHGNAVLEQYMA; AHGNAVLEQYMAG; HGNAVLEQYMAGV;
GNAVLEQYMAGVA; NAVLEQYMAGVAW; AVLEQYMAGVAWL;
VLEQYMAGVAWLH; LEQYMAGVAWLHC; EQYMAGVAWLHCL;
QYMAGVAWLHCLL; YMAGVAWLHCLLP; MAGVAWLHCLLPK;
AGVAWLHCLLPKM; GVAWLHCLLPKMD; VAWLHCLLPKMDS;
AWLHCLLPKMDSV; WLHCLLPKMDSVI; LHCLLPKMDSVIF; HCLLPKMDSVIFD;
CLLPKMDSVIFDF; LLPKMDSVIFDFL; LPKMDSVIFDFLH; PKMDSVIFDFLHC;
KMDSVIFDFLHCI; MDSVIFDFLHCIV; DSVIFDFLHCIVF; SVIFDFLHCIVFN;
VIFDFLHCIVFNV; IFDFLHCIVFNVP; FDFLHCIVFNVPK; DFLHCIVFNVPKR;
FLHCIVFNVPKRR; LHCIVFNVPKRRY; HCIVFNVPKRRYW; CIVFNVPKRRYWL;
IVFNVPKRRYWLF; VFNVPKRRYWLFK; FNVPKRRYWLFKG; NVPKRRYWLFKGP;
VPKRRYWLFKGPI; PKRRYWLFKGPID; KRRYWLFKGPIDS; RRYWLFKGPIDSG;
RYWLFKGPIDSGK; YWLFKGPIDSGKT; WLFKGPIDSGKTT; LFKGPIDSGKTTL;
FKGPIDSGKTTLA; KGPIDSGKTTLAA; GPIDSGKTTLAAG; PIDSGKTTLAAGL;
IDSGKTTLAAGLL; DSGKTTLAAGLLD; SGKTTLAAGLLDL; GKTTLAAGLLDLC;
KTTLAAGLLDLCG; TTLAAGLLDLCGG; TLAAGLLDLCGGK; LAAGLLDLCGGKA;
AAGLLDLCGGKAL; AGLLDLCGGKALN; GLLDLCGGKALNV;
LLDLCGGKALNVN; LDLCGGKALNVNL; DLCGGKALNVNLP;
LCGGKALNVNLPM; CGGKALNVNLPME; GGKALNVNLPMER;
GKALNVNLPMERL; KALNVNLPMERLT; ALNVNLPMERLTF; LNVNLPMERLTFE;
NVNLPMERLTFEL; VNLPMERLTFELG; NLPMERLTFELGV; LPMERLTFELGVA;
PMERLTFELGVAI; MERLTFELGVAID; ERLTFELGVAIDQ; RLTFELGVAIDQY;
LTFELGVAIDQYM; TFELGVAIDQYMV; FELGVAIDQYMVV; ELGVAIDQYMVVF;
LGVAIDQYMVVFE; GVAIDQYMVVFED; VAIDQYMVVFEDV;
AIDQYMVVFEDVK; IDQYMVVFEDVKG; DQYMVVFEDVKGT;
QYMVVFEDVKGTG; YMVVFEDVKGTGA; MVVFEDVKGTGAE;
VVFEDVKGTGAES; VFEDVKGTGAESK; FEDVKGTGAESKD; EDVKGTGAESKDL;
DVKGTGAESKDLP; VKGTGAESKDLPS; KGTGAESKDLPSG; GTGAESKDLPSGH;
TGAESKDLPSGHG; GAESKDLPSGHGI; AESKDLPSGHGIN; ESKDLPSGHGINN;
SKDLPSGHGINNL; KDLPSGHGINNLD; DLPSGHGINNLDS; LPSGHGINNLDSL;
PSGHGINNLDSLR; SGHGINNLDSLRD; GHGINNLDSLRDY; HGINNLDSLRDYL;
GINNLDSLRDYLD; INNLDSLRDYLDG; NNLDSLRDYLDGS; NLDSLRDYLDGSV;
LDSLRDYLDGSVK; DSLRDYLDGSVKV; SLRDYLDGSVKVN; LRDYLDGSVKVNL;
RDYLDGSVKVNLE; DYLDGSVKVNLEK; YLDGSVKVNLEKK;
LDGSVKVNLEKKH; DGSVKVNLEKKHL; GSVKVNLEKKHLN;
SVKVNLEKKHLNK; VKVNLEKKHLNKR; KVNLEKKHLNKRT;
VNLEKKHLNKRTQ; NLEKKHLNKRTQI; LEKKHLNKRTQIF; EKKHLNKRTQIFP;
KKHLNKRTQIFPP; KHLNKRTQIFPPG; HLNKRTQIFPPGL; LNKRTQIFPPGLV;
NKRTQIFPPGLVT; KRTQIFPPGLVTM; RTQIFPPGLVTMN; TQIFPPGLVTMNE;
QIFPPGLVTMNEY; IFPPGLVTMNEYP; FPPGLVTMNEYPV; PPGLVTMNEYPVP;
PGLVTMNEYPVPK; GLVTMNEYPVPKT; LVTMNEYPVPKTL; VTMNEYPVPKTLQ;
TMNEYPVPKTLQA; MNEYPVPKTLQAR; NEYPVPKTLQARF; EYPVPKTLQARFV;
YPVPKTLQARFVR; PVPKTLQARFVRQ; VPKTLQARFVRQI; PKTLQARFVRQID;
KTLQARFVRQIDF; TLQARFVRQIDFR; LQARFVRQIDFRP; QARFVRQIDFRPK;
ARFVRQIDFRPKI; RFVRQIDFRPKIY; FVRQIDFRPKIYL; VRQIDFRPKIYLR;
RQIDFRPKIYLRK; QIDFRPKIYLRKS; IDFRPKIYLRKSL; DFRPKIYLRKSLQ;
FRPKIYLRKSLQN; RPKIYLRKSLQNS; PKIYLRKSLQNSE; KIYLRKSLQNSEF;
IYLRKSLQNSEFL; YLRKSLQNSEFLL; LRKSLQNSEFLLE; RKSLQNSEFLLEK;
KSLQNSEFLLEKR; SLQNSEFLLEKRI; LQNSEFLLEKRIL; QNSEFLLEKRILQ;
NSEFLLEKRILQS; SEFLLEKRILQSG; EFLLEKRILQSGM; FLLEKRILQSGMT;
LLEKRILQSGMTL; LEKRILQSGMTLL; EKRILQSGMTLLL; KRILQSGMTLLLL;
RILQSGMTLLLLL; ILQSGMTLLLLLI; LQSGMTLLLLLIW; QSGMTLLLLLIWF;
SGMTLLLLLIWFR; GMTLLLLLIWFRP; MTLLLLLIWFRPV; TLLLLLIWFRPVA;
LLLLLIWFRPVAD; LLLLIWFRPVADF; LLLIWFRPVADFA; LLIWFRPVADFAT;
LIWFRPVADFATD; IWFRPVADFATDI; WFRPVADFATDIQ; FRPVADFATDIQS;
RPVADFATDIQSR; PVADFATDIQSRI; VADFATDIQSRIV; ADFATDIQSRIVE;
DFATDIQSRIVEW; FATDIQSRIVEWK; ATDIQSRIVEWKE; TDIQSRIVEWKER;
DIQSRIVEWKERL; IQSRIVEWKERLD; QSRIVEWKERLDS; SRIVEWKERLDSE;
RIVEWKERLDSEI; IVEWKERLDSEIS; VEWKERLDSEISM; EWKERLDSEISMY;
WKERLDSEISMYT; KERLDSEISMYTF; ERLDSEISMYTFS; RLDSEISMYTFSR;
LDSEISMYTFSRM; DSEISMYTFSRMK; SEISMYTFSRMKY; EISMYTFSRMKYN;
ISMYTFSRMKYNI; SMYTFSRMKYNIC; MYTFSRMKYNICM; YTFSRMKYNICMG;
TFSRMKYNICMGK; FSRMKYNICMGKC; SRMKYNICMGKCI; RMKYNICMGKCIL;
MKYNICMGKCILD; KYNICMGKCILDI; YNICMGKCILDIT; NICMGKCILDITR;
ICMGKCILDITRE; CMGKCILDITREE; MGKCILDITREED; GKCILDITREEDS;
KCILDITREEDSE; CILDITREEDSET; ILDITREEDSETE; LDITREEDSETED;
DITREEDSETEDS; ITREEDSETEDSG; TREEDSETEDSGH; REEDSETEDSGHG;
EEDSETEDSGHGS; EDSETEDSGHGSS; DSETEDSGHGSST; SETEDSGHGSSTE;
ETEDSGHGSSTES; TEDSGHGSSTESQ; EDSGHGSSTESQS; DSGHGSSTESQSQ;
SGHGSSTESQSQC; GHGSSTESQSQCS; HGSSTESQSQCSS; GSSTESQSQCSSQ;
SSTESQSQCSSQV; STESQSQCSSQVS; TESQSQCSSQVSD; ESQSQCSSQVSDT;
SQSQCSSQVSDTS; QSQCSSQVSDTSA; SQCSSQVSDTSAP; QCSSQVSDTSAPA;
CSSQVSDTSAPAE; SSQVSDTSAPAED; SQVSDTSAPAEDS; QVSDTSAPAEDSQ;
VSDTSAPAEDSQR; SDTSAPAEDSQRS; DTSAPAEDSQRSD; TSAPAEDSQRSDP;
SAPAEDSQRSDPH; APAEDSQRSDPHS; PAEDSQRSDPHSQ; AEDSQRSDPHSQE;
EDSQRSDPHSQEL; DSQRSDPHSQELH; SQRSDPHSQELHL; QRSDPHSQELHLC;
RSDPHSQELHLCK; SDPHSQELHLCKG; DPHSQELHLCKGF; PHSQELHLCKGFQ;
HSQELHLCKGFQC; SQELHLCKGFQCF; QELHLCKGFQCFK; ELHLCKGFQCFKR;
LHLCKGFQCFKRP; HLCKGFQCFKRPK; LCKGFQCFKRPKT; CKGFQCFKRPKTP;
KGFQCFKRPKTPP; GFQCFKRPKTPPP; FQCFKRPKTPPPK; HKLKSGLYKSSIY;
MYMYNKSTCLKHF; YMYNKSTCLKHFG; MYNKSTCLKHFGL;
YNKSTCLKHFGLQ; NKSTCLKHFGLQL; KSTCLKHFGLQLS; STCLKHFGLQLSL;
TCLKHFGLQLSLF; CLKHFGLQLSLFV; LKHFGLQLSLFVN; KHFGLQLSLFVNI;
HFGLQLSLFVNIS; FGLQLSLFVNISY; GLQLSLFVNISYH; LQLSLFVNISYHI;
QLSLFVNISYHIW; LSLFVNISYHIWV; SLFVNISYHIWVP; LFVNISYHIWVPW;
FVNISYHIWVPWK; VNISYHIWVPWKS; NISYHIWVPWKSF; ISYHIWVPWKSFC;
SYHIWVPWKSFCA; YHIWVPWKSFCAI; HIWVPWKSFCAIK; IWVPWKSFCAIKH;
WVPWKSFCAIKHP; VPWKSFCAIKHPN; PWKSFCAIKHPNL; WKSFCAIKHPNLF;
KSFCAIKHPNLFY; SFCAIKHPNLFYL; FCAIKHPNLFYLG; CAIKHPNLFYLGF;
AIKHPNLFYLGFH; IKHPNLFYLGFHT; KHPNLFYLGFHTI; HPNLFYLGFHTIH;
PNLFYLGFHTIHR; NLFYLGFHTIHRL; LFYLGFHTIHRLP; FYLGFHTIHRLPI;
YLGFHTIHRLPIH; LGFHTIHRLPIHS; GFHTIHRLPIHSL; FHTIHRLPIHSLG;
HTIHRLPIHSLGS; TIHRLPIHSLGSP; IHRLPIHSLGSPV; HRLPIHSLGSPVY;
RLPIHSLGSPVYK; LPIHSLGSPVYKV; PIHSLGSPVYKVT; QKGNWVRILYRSF;
KGNWVRILYRSFS; GNWVRILYRSFSQ; NWVRILYRSFSQA; WVRILYRSFSQAD;
VRILYRSFSQADL; RILYRSFSQADLK; ILYRSFSQADLKI; LYRSFSQADLKIS;
YRSFSQADLKISC; RSFSQADLKISCK; SFSQADLKISCKA; FSQADLKISCKAS;
SQADLKISCKASP; QADLKISCKASPL; ADLKISCKASPLL; DLKISCKASPLLC;
LKISCKASPLLCS; KISCKASPLLCSR; ISCKASPLLCSRA; SCKASPLLCSRAV;
CKASPLLCSRAVS; KASPLLCSRAVSK; ASPLLCSRAVSKQ; SPLLCSRAVSKQA;
PLLCSRAVSKQAT; LLCSRAVSKQATN; LCSRAVSKQATNI; CSRAVSKQATNIS;
SRAVSKQATNISS; NIQAISFTKRPHT; IQAISFTKRPHTL; QAISFTKRPHTLF;
AISFTKRPHTLFI; QHCGSCVGHMKYW; HCGSCVGHMKYWG;
CGSCVGHMKYWGN; GSCVGHMKYWGNI; SCVGHMKYWGNIF;
CVGHMKYWGNIFP; VGHMKYWGNIFPS; GHMKYWGNIFPSC;
HMKYWGNIFPSCE; MKYWGNIFPSCES; KYWGNIFPSCESP; YWGNIFPSCESPK;
WGNIFPSCESPKI; GNIFPSCESPKIP; NIFPSCESPKIPS; IFPSCESPKIPSI;
FPSCESPKIPSIF; PSCESPKIPSIFI; SCESPKIPSIFIS; CESPKIPSIFIST; ESPKIPSIFISTG;
SPKIPSIFISTGI; PKIPSIFISTGIR; KIPSIFISTGIRY; IPSIFISTGIRYP; PSIFISTGIRYPA;
SIFISTGIRYPAL; IFISTGIRYPALN; FISTGIRYPALNW; ISTGIRYPALNWI;
STGIRYPALNWIS; TGIRYPALNWISI; GIRYPALNWISIV; IRYPALNWISIVF;
RYPALNWISIVFV; YPALNWISIVFVQ; PALNWISIVFVQI; ALNWISIVFVQIG;
LNWISIVFVQIGL; NWISIVFVQIGLM; WISIVFVQIGLMV; ISIVFVQIGLMVS;
SIVFVQIGLMVSI; IVFVQIGLMVSIH; VFVQIGLMVSIHY; FVQIGLMVSIHYL;
VQIGLMVSIHYLG; QIGLMVSIHYLGL; IGLMVSIHYLGLG; GLMVSIHYLGLGC;
LMVSHIYLGLGCW; MVSIHYLGLGCWV; VSIHYLGLGCWVF; SIHYLGLGCWVFR;
IHYLGLGCWVFRG; HYLGLGCWVFRGY; YLGLGCWVFRGYS;
LGLGCWVFRGYST; GLGCWVFRGYSTI; LGCWVFRGYSTIR; GCWVFRGYSTIRV;
CWVFRGYSTIRVL; HSLHFQGFSTYSK; SLHFQGFSTYSKE; LHFQGFSTYSKEV;
HFQGFSTYSKEVE; FQGFSTYSKEVEI; QGFSTYSKEVEIT; GFSTYSKEVEITA;
FSTYSKEVEITAL; STYSKEVEITALN; TYSKEVEITALNR; YSKEVEITALNRF;
SKEVEITALNRFS; KEVEITALNRFSS; EVEITALNRFSST; VEITALNRFSSTM;
EITALNRFSSTML; ITALNRFSSTMLM; TALNRFSSTMLMH; ALNRFSSTMLMHF;
LNRFSSTMLMHFL; PCMKVKHASYSNN; CMKVKHASYSNNL;
MKVKHASYSNNLC; KVKHASYSNNLCL; VKHASYSNNLCLY; KHASYSNNLCLYS;
HASYSNNLCLYSY; ASYSNNLCLYSYS; SYSNNLCLYSYSL; YSNNLCLYSYSLP;
SNNLCLYSYSLPH; NNLCLYSYSLPHQ; IGEGNSCCAVTGK; GEGNSCCAVTGKH;
EGNSCCAVTGKHF; GNSCCAVTGKHFS; NSCCAVTGKHFSL; SCCAVTGKHFSLW;
CCAVTGKHFSLWA; CAVTGKHFSLWAI; AVTGKHFSLWAIT; VTGKHFSLWAITA;
TGKHFSLWAITAK; GKHFSLWAITAKV; KHFSLWAITAKVI; HFSLWAITAKVIF;
FSLWAITAKVIFS; SLWAITAKVIFST; TKAPKVFIWIPHF; KAPKVFIWIPHFW;
APKVFIWIPHFWV; EAFYLCNSIYPSF; AFYLCNSIYPSFN; FYLCNSIYPSFNF;
FWHLHGFLWLFGS; WHLHGFLWLFGSC; HLHGFLWLFGSCP; LHGFLWLFGSCPW;
HGFLWLFGSCPWT; GFLWLFGSCPWTL; FLWLFGSCPWTLS; LWLFGSCPWTLSF;
WLFGSCPWTLSFS; LFGSCPWTLSFSF; FGSCPWTLSFSFG; GSCPWTLSFSFGW;
SCPWTLSFSFGWG; CPWTLSFSFGWGH; PWTLSFSFGWGHL; WTLSFSFGWGHLH;
TLSFSFGWGHLHM; LSFSFGWGHLHML; SFSFGWGHLHMLQ; FSFGWGHLHMLQE;
SFGWGHLHMLQEQ; FGWGHLHMLQEQV; GWGHLHMLQEQVL;
WGHLHMLQEQVLQ; GHLHMLQEQVLQS; HLHMLQEQVLQSR;
LHMLQEQVLQSRT; HMLQEQVLQSRTG; MLQEQVLQSRTGL; LQEQVLQSRTGLE;
QEQVLQSRTGLEV; EQVLQSRTGLEVK; QVLQSRTGLEVKA; VLQSRTGLEVKAT;
LQSRTGLEVKATS; QSRTGLEVKATSI; SRTGLEVKATSIE; RTGLEVKATSIEE;
TGLEVKATSIEEQ; GLEVKATSIEEQF; LEVKATSIEEQFF; EVKATSIEEQFFD;
TLLNVHFVDFLSP; LLNVHFVDFLSPF; LNVHFVDFLSPFF; NVHFVDFLSPFFV;
LLLYCQHHLYYKY; LLYCQHHLYYKYG; LYCQHHLYYKYGQ;
YCQHHLYYKYGQN; CQHHLYYKYGQNV; QHHLYYKYGQNVH;
HHLYYKYGQNVHG; HLYYKYGQNVHGY; LYYKYGQNVHGYL;
YYKYGQNVHGYLP; YKYGQNVHGYLPF; KYGQNVHGYLPFQ;
YGQNVHGYLPFQL; GQNVHGYLPFQLL; QNVHGYLPFQLLV; GKDQNNIVEYNYK;
KDQNNIVEYNYKS; DQNNIVEYNYKSL; KIFLFFSAIPVRL; QKYLHQETEYHST;
KYLHQETEYHSTH; YLHQETEYHSTHL; LHQETEYHSTHLG; TIPKPCLIADRGL;
IPKPCLIADRGLQ; PKPCLIADRGLQW; KPCLIADRGLQWK; PCLIADRGLQWKL;
CLIADRGLQWKLC; LIADRGLQWKLCD; IADRGLQWKLCDP; ADRGLQWKLCDPN;
DRGLQWKLCDPNH; RGLQWKLCDPNHQ; GLQWKLCDPNHQR;
LQWKLCDPNHQRT; QWKLCDPNHQRTY; WKLCDPNHQRTYT;
KLCDPNHQRTYTL; LCDPNHQRTYTLL; CDPNHQRTYTLLE; DPNHQRTYTLLEL;
PNHQRTYTLLELR; NHQRTYTLLELRN; PQEHQQLQHMFEE; QEHQQLQHMFEEL;
EHQQLQHMFEELG; HQQLQHMFEELGL; QQQPPQQQFQPLK; QQPPQQQFQPLKI;
QPPQQQFQPLKIL; PPQQQFQPLKILW; PQQQFQPLKILWQ; QQQFQPLKILWQQ;
QQFQPLKILWQQQ; QFQPLKILWQQQP; FQPLKILWQQQPQ; QPLKILWQQQPQI;
PLKILWQQQPQIH; LKILWQQQPQIHW; KILWQQQPQIHWQ; ILWQQQPQIHWQL;
LWQQQPQIHWQLG; WQQQPQIHWQLGP; QQQPQIHWQLGPP; QQPQIHWQLGPPK;
QPQIHWQLGPPKV; PQIHWQLGPPKVL; QIHWQLGPPKVLE; IHWQLGPPKVLEQ;
HWQLGPPKVLEQH; WQLGPPKVLEQHP; TWKYKKKGITYLG;
WKYKKKGITYLGV; KYKKKGITYLGVF; YKKKGITYLGVFY; KKKGITYLGVFYR;
KKGITYLGVFYRV; KGITYLGVFYRVF; GITYLGVFYRVFY; ITYLGVFYRVFYS;
TYLGVFYRVFYSR; SSGTFVFPVYTVF; SGTFVFPVYTVFT; GTFVFPVYTVFTS;
TFVFPVYTVFTST; FVFPVYTVFTSTK; VFPVYTVFTSTKF; FPVYTVFTSTKFQ;
PVYTVFTSTKFQQ; VYTVFTSTKFQQK; YTVFTSTKFQQKL; NKNKNPLSSFFCS;
KNKNPLSSFFCSS; NKNPLSSFFCSSP; KNPLSSFFCSSPG; NPLSSFFCSSPGF;
PLSSFFCSSPGFT; LSSFFCSSPGFTN; SSFFCSSPGFTNF; SFFCSSPGFTNFH;
LGTRPRFLGSQNM; GTRPRFLGSQNMS; TRPRFLGSQNMSV; RPRFLGSQNMSVM;
PRFLGSQNMSVMH; RFLGSQNMSVMHF; FLGSQNMSVMHFP; LGSQNMSVMHFPS;
AAPPCESCTFLPE; APPCESCTFLPEV; PPCESCTFLPEVM; PCESCTFLPEVMV;
CESCTFLPEVMVW; ESCTFLPEVMVWL; SCTFLPEVMVWLH; CTFLPEVMVWLHS;
TFLPEVMVWLHSP; FLPEVMVWLHSPV; LPEVMVWLHSPVS; PEVMVWLHSPVSH;
EVMVWLHSPVSHA; VMVWLHSPVSHAL; MVWLHSPVSHALS;
VWLHSPVSHALSF; WLHSPVSHALSFL; LHSPVSHALSFLR; HSPVSHALSFLRS;
SPVSHALSFLRSW; PVSHALSFLRSWF; VSHALSFLRSWFG; SHALSFLRSWFGC;
HALSFLRSWFGCI; ALSFLRSWFGCIP; LSFLRSWFGCIPW; SFLRSWFGCIPWV;
FLRSWFGCIPWVS; LRSWFGCIPWVSS; RSWFGCIPWVSSS; SWFGCIPWVSSSS;
WFGCIPWVSSSSL; FGCIPWVSSSSLW; GCIPWVSSSSLWP; CIPWVSSSSLWPF;
IPWVSSSSLWPFF; PWVSSSSLWPFFL; YIRGRGRLCLHPF; IRGRGRLCLHPFS;
RGRGRLCLHPFSQ; GRGRLCLHPFSQV; RGRLCLHPFSQVV; GRLCLHPFSQVVR;
RLCLHPFSQVVRV; LCLHPFSQVVRVW; CLHPFSQVVRVWR; LHPFSQVVRVWRL;
HPFSQVVRVWRLF; PFSQVVRVWRLFL; FSQVVRVWRLFLR; SQVVRVWRLFLRP;
QVVRVWRLFLRPS; VVRVWRLFLRPSK; VRVWRLFLRPSKT; RVWRLFLRPSKTI;
VWRLFLRPSKTIW; WRLFLRPSKTIWG; RLFLRPSKTIWGN; LFLRPSKTIWGNP;
FLRPSKTIWGNPY; LRPSKTIWGNPYS; RPSKTIWGNPYSF; PSKTIWGNPYSFA;
SKTIWGNPYSFAI; KTIWGNPYSFAIF; TIWGNPYSFAIFA; IWGNPYSFAIFAK

14 mers:

KSCLGKSSLNEKSL; SCLGKSSLNEKSLF; CLGKSSLNEKSLFK;
LGKSSLNEKSLFKE; GKSSLNEKSLFKEV; FSSLPRYPVLQGMA;
SSLPRYPVLQGMAY; SLPRYPVLQGMAYL; LPRYPVLQGMAYLF;
PRYPVLQGMAYLFQ; RYPVLQGMAYLFQK; YPVLQGMAYLFQKA;
PVLQGMAYLFQKAF; VLQGMAYLFQKAFC; LQGMAYLFQKAFCA;
QGMAYLFQKAFCAL; GMAYLFQKAFCALP; MAYLFQKAFCALPL;
AYLFQKAFCALPLH; YLFQKAFCALPLHA; LFQKAFCALPLHAM;
FQKAFCALPLHAMS; QKAFCALPLHAMSA; KIFKKRALGLDRLL;
IFKKRALGLDRLLL; FKKRALGLDRLLLH; RNSAMVGPNNWRNS;
NSAMVGPNNWRNSL; SAMVGPNNWRNSLQ; AMVGPNNWRNSLQR;
MVGPNNWRNSLQRS; VGPNNWRNSLQRSK; GPNNWRNSLQRSKA;
PNNWRNSLQRSKAL; NNWRNSLQRSKALR; VPTYGTEEWESWWS;
PTYGTEEWESWWSS; TYGTEEWESWWSSF; YGTEEWESWWSSFN;
GTEEWESWWSSFNE; TEEWESWWSSFNEK; EEWESWWSSFNEKW;
EWESWWSSFNEKWD; WESWWSSFNEKWDE; ESWWSSFNEKWDED;
SWWSSFNEKWDEDL; WWSSFNEKWDEDLF; WSSFNEKWDEDLFC;
SSFNEKWDEDLFCH; SFNEKWDEDLFCHE; FNEKWDEDLFCHED;
NEKWDEDLFCHEDM; EKWDEDLFCHEDMF; KWDEDLFCHEDMFA;
WDEDLFCHEDMFAS; DEDLFCHEDMFASD; EDLFCHEDMFASDE;
DLFCHEDMFASDEE; LFCHEDMFASDEEA; FCHEDMFASDEEAT;
CHEDMFASDEEATA; HEDMFASDEEATAD; EDMFASDEEATADS;
DMFASDEEATADSQ; MFASDEEATADSQH; FASDEEATADSQHS;
ASDEEATADSQHST; SDEEATADSQHSTP; DEEATADSQHSTPP;
EEATADSQHSTPPK; EATADSQHSTPPKK; ATADSQHSTPPKKK;
TADSQHSTPPKKKR; ADSQHSTPPKKKRK; DSQHSTPPKKKRKV;
SQHSTPPKKKRKVE; QHSTPPKKKRKVED; HSTPPKKKRKVEDP;
STPPKKKRKVEDPK; TPPKKKRKVEDPKD; PPKKKRKVEDPKDF;
PKKKRKVEDPKDFP; KKKRKVEDPKDFPS; KKRKVEDPKDFPSD;
KRKVEDPKDFPSDL; RKVEDPKDFPSDLH; KVEDPKDFPSDLHQ;
VEDPKDFPSDLHQF; EDPKDFPSDLHQFL; DPKDFPSDLHQFLS;
PKDFPSDLHQFLSQ; KDFPSDLHQFLSQA; DFPSDLHQFLSQAV;
FPSDLHQFLSQAVF; PSDLHQFLSQAVFS; SDLHQFLSQAVFSN;
DLHQFLSQAVFSNR; LHQFLSQAVFSNRT; HQFLSQAVFSNRTL;
QFLSQAVFSNRTLA; FLSQAVFSNRTLAC; LSQAVFSNRTLACF;
SQAVFSNRTLACFA; QAVFSNRTLACFAV; AVFSNRTLACFAVY;
VFSNRTLACFAVYT; FSNRTLACFAVYTT; SNRTLACFAVYTTK;
NRTLACFAVYTTKE; RTLACFAVYTTKEK; TLACFAVYTTKEKA;
LACFAVYTTKEKAQ; ACFAVYTTKEKAQI; CFAVYTTKEKAQIL;
FAVYTTKEKAQILY; AVYTTKEKAQILYK; VYTTKEKAQILYKK;
YTTKEKAQILYKKL; TTKEKAQILYKKLM; TKEKAQILYKKLME;
KEKAQILYKKLMEK; EKAQILYKKLMEKY; KAQILYKKLMEKYS;
AQILYKKLMEKYSV; QILYKKLMEKYSVT; ILYKKLMEKYSVTF;
LYKKLMEKYSVTFI; YKKLMEKYSVTFIS; KKLMEKYSVTFISR;
KLMEKYSVTFISRH; LMEKYSVTFISRHM; MEKYSVTFISRHMC;
EKYSVTFISRHMCA; KYSVTFISRHMCAG; YSVTFISRHMCAGH;
SVTFISRHMCAGHN; VTFISRHMCAGHNI; TFISRHMCAGHNII; FISRHMCAGHNIIF;
ISRHMCAGHNIIFF; SRHMCAGHNIIFFL; RHMCAGHNIIFFLT; HMCAGHNIIFFLTP;
MCAGHNIIFFLTPH; CAGHNIIFFLTPHR; AGHNIIFFLTPHRH; GHNIIFFLTPHRHR;
HNIIFFLTPHRHRV; NIIFFLTPHRHRVS; IIFFLTPHRHRVSA; IFFLTPHRHRVSAI;
FFLTPHRHRVSAIN; FLTPHRHRVSAINN; LTPHRHRVSAINNF;
TPHRHRVSAINNFC; PHRHRVSAINNFCQ; HRHRVSAINNFCQK;
RHRVSAINNFCQKL; HRVSAINNFCQKLC; RVSAINNFCQKLCT;
VSAINNFCQKLCTF; SAINNFCQKLCTFS; AINNFCQKLCTFSF; INNFCQKLCTFSFL;
NNFCQKLCTFSFLI; NFCQKLCTFSFLIC; FCQKLCTFSFLICK; CQKLCTFSFLICKG;
QKLCTFSFLICKGV; KLCTFSFLICKGVN; LCTFSFLICKGVNK; CTFSFLICKGVNKE;
TFSFLICKGVNKEY; FSFLICKGVNKEYL; SFLICKGVNKEYLL;
FLICKGVNKEYLLY; LICKGVNKEYLLYS; ICKGVNKEYLLYSA;
CKGVNKEYLLYSAL; KGVNKEYLLYSALT; GVNKEYLLYSALTR;
VNKEYLLYSALTRD; NKEYLLYSALTRDP; KEYLLYSALTRDPY;
EYLLYSALTRDPYH; YLLYSALTRDPYHT; LLYSALTRDPYHTI;
LYSALTRDPYHTIE; YSALTRDPYHTIEE; SALTRDPYHTIEES; ALTRDPYHTIEESI;
LTRDPYHTIEESIQ; TRDPYHTIEESIQG; RDPYHTIEESIQGG; DPYHTIEESIQGGL;
PYHTIEESIQGGLK; YHTIEESIQGGLKE; HTIEESIQGGLKEH; TIEESIQGGLKEHD;
IEESIQGGLKEHDF; EESIQGGLKEHDFS; ESIQGGLKEHDFSP; SIQGGLKEHDFSPE;
IQGGLKEHDFSPEE; QGGLKEHDFSPEEP; GGLKEHDFSPEEPE;
GLKEHDFSPEEPEE; LKEHDFSPEEPEET; KEHDFSPEEPEETK; EHDFSPEEPEETKQ;
HDFSPEEPEETKQV; DFSPEEPEETKQVS; FSPEEPEETKQVSW;
SPEEPEETKQVSWK; PEEPEETKQVSWKL; EEPEETKQVSWKLI;
EPEETKQVSWKLIT; PEETKQVSWKLITE; EETKQVSWKLITEY;
ETKQVSWKLITEYA; TKQVSWKLITEYAV; KQVSWKLITEYAVE;
QVSWKLITEYAVET; VSWKLITEYAVETK; SWKLITEYAVETKC;
WKLITEYAVETKCE; KLITEYAVETKCED; LITEYAVETKCEDV;
ITEYAVETKCEDVF; TEYAVETKCEDVFL; EYAVETKCEDVFLL;
YAVETKCEDVFLLL; AVETKCEDVFLLLG; VETKCEDVFLLLGM;
ETKCEDVFLLLGMY; TKCEDVFLLLGMYL; KCEDVFLLLGMYLE;
CEDVFLLLGMYLEF; EDVFLLLGMYLEFQ; DVFLLLGMYLEFQY;
VFLLLGMYLEFQYN; FLLLGMYLEFQYNV; LLLGMYLEFQYNVE;
LLGMYLEFQYNVEE; LGMYLEFQYNVEEC; GMYLEFQYNVEECK;
MYLEFQYNVEECKK; YLEFQYNVEECKKC; LEFQYNVEECKKCQ;
EFQYNVEECKKCQK; FQYNVEECKKCQKK; QYNVEECKKCQKKD;
YNVEECKKCQKKDQ; NVEECKKCQKKDQP; VEECKKCQKKDQPY;
EECKKCQKKDQPYH; ECKKCQKKDQPYHF; CKKCQKKDQPYHFK;
KKCQKKDQPYHFKY; KCQKKDQPYHFKYH; CQKKDQPYHFKYHE;
QKKDQPYHFKYHEK; KKDQPYHFKYHEKH; KDQPYHFKYHEKHF;
DQPYHFKYHEKHFA; QPYHFKYHEKHFAN; PYHFKYHEKHFANA;
YHFKYHEKHFANAI; HFKYHEKHFANAII; FKYHEKHFANAIIF;
KYHEKHFANAIIFA; YHEKHFANAIIFAE; HEKHFANAIIFAES; EKHFANAIIFAESK;
KHFANAIIFAESKN; HFANAIIFAESKNQ; FANAIIFAESKNQK; ANAIIFAESKNQKS;
NAIIFAESKNQKSI; AIIFAESKNQKSIC; IIFAESKNQKSICQ; IFAESKNQKSICQQ;
FAESKNQKSICQQA; AESKNQKSICQQAV; ESKNQKSICQQAVD;
SKNQKSICQQAVDT; KNQKSICQQAVDTV; NQKSICQQAVDTVL;
QKSICQQAVDTVLA; KSICQQAVDTVLAK; SICQQAVDTVLAKK;
ICQQAVDTVLAKKR; CQQAVDTVLAKKRV; QQAVDTVLAKKRVD;
QAVDTVLAKKRVDT; AVDTVLAKKRVDTL; VDTVLAKKRVDTLH;
DTVLAKKRVDTLHM; TVLAKKRVDTLHMT; VLAKKRVDTLHMTR;
LAKKRVDTLHMTRE; AKKRVDTLHMTREE; KKRVDTLHMTREEM;
KRVDTLHMTREEML; RVDTLHMTREEMLT; VDTLHMTREEMLTE;
DTLHMTREEMLTER; TLHMTREEMLTERF; LHMTREEMLTERFN;
HMTREEMLTERFNH; MTREEMLTERFNHI; TREEMLTERFNHIL;
REEMLTERFNHILD; EEMLTERFNHILDK; EMLTERFNHILDKM;
MLTERFNHILDKMD; LTERFNHILDKMDL; TERFNHILDKMDLI;
ERFNHILDKMDLIF; RFNHILDKMDLIFG; FNHILDKMDLIFGA;
NHILDKMDLIFGAH; HILDKMDLIFGAHG; ILDKMDLIFGAHGN;
LDKMDLIFGAHGNA; DKMDLIFGAHGNAV; KMDLIFGAHGNAVL;
MDLIFGAHGNAVLE; DLIFGAHGNAVLEQ; LIFGAHGNAVLEQY;
IFGAHGNAVLEQYM; FGAHGNAVLEQYMA; GAHGNAVLEQYMAG;
AHGNAVLEQYMAGV; HGNAVLEQYMAGVA; GNAVLEQYMAGVAW;
NAVLEQYMAGVAWL; AVLEQYMAGVAWLH; VLEQYMAGVAWLHC;
LEQYMAGVAWLHCL; EQYMAGVAWLHCLL; QYMAGVAWLHCLLP;
YMAGVAWLHCLLPK; MAGVAWLHCLLPKM; AGVAWLHCLLPKMD;
GVAWLHCLLPKMDS; VAWLHCLLPKMDSV; AWLHCLLPKMDSVI;
WLHCLLPKMDSVIF; LHCLLPKMDSVIFD; HCLLPKMDSVIFDF;
CLLPKMDSVIFDFL; LLPKMDSVIFDFLH; LPKMDSVIFDFLHC; PKMDSVIFDFLHCI;
KMDSVIFDFLHCIV; MDSVIFDFLHCIVF; DSVIFDFLHCIVFN; SVIFDFLHCIVFNV;
VIFDFLHCIVFNVP; IFDFLHCIVFNVPK; FDFLHCIVFNVPKR; DFLHCIVFNVPKRR;
FLHCIVFNVPKRRY; LHCIVFNVPKRRYW; HCIVFNVPKRRYWL;
CIVFNVPKRRYWLF; IVFNVPKRRYWLFK; VFNVPKRRYWLFKG;
FNVPKRRYWLFKGP; NVPKRRYWLFKGPI; VPKRRYWLFKGPID;
PKRRYWLFKGPIDS; KRRYWLFKGPIDSG; RRYWLFKGPIDSGK;
RYWLFKGPIDSGKT; YWLFKGPIDSGKTT; WLFKGPIDSGKTTL;
LFKGPIDSGKTTLA; FKGPIDSGKTTLAA; KGPIDSGKTTLAAG;
GPIDSGKTTLAAGL; PIDSGKTTLAAGLL; IDSGKTTLAAGLLD;
DSGKTTLAAGLLDL; SGKTTLAAGLLDLC; GKTTLAAGLLDLCG;
KTTLAAGLLDLCGG; TTLAAGLLDLCGGK; TLAAGLLDLCGGKA;
LAAGLLDLCGGKAL; AAGLLDLCGGKALN; AGLLDLCGGKALNV;
GLLDLCGGKALNVN; LLDLCGGKALNVNL; LDLCGGKALNVNLP;
DLCGGKALNVNLPM; LCGGKALNVNLPME; CGGKALNVNLPMER;
GGKALNVNLPMERL; GKALNVNLPMERLT; KALNVNLPMERLTF;
ALNVNLPMERLTFE; LNVNLPMERLTFEL; NVNLPMERLTFELG;
VNLPMERLTFELGV; NLPMERLTFELGVA; LPMERLTFELGVAI;
PMERLTFELGVAID; MERLTFELGVAIDQ; ERLTFELGVAIDQY;
RLTFELGVAIDQYM; LTFELGVAIDQYMV; TFELGVAIDQYMVV;
FELGVAIDQYMVVF; ELGVAIDQYMVVFE; LGVAIDQYMVVFED;
GVAIDQYMVVFEDV; VAIDQYMVVFEDVK; AIDQYMVVFEDVKG;
IDQYMVVFEDVKGT; DQYMVVFEDVKGTG; QYMVVFEDVKGTGA;
YMVVFEDVKGTGAE; MVVFEDVKGTGAES; VVFEDVKGTGAESK;
VFEDVKGTGAESKD; FEDVKGTGAESKDL; EDVKGTGAESKDLP;
DVKGTGAESKDLPS; VKGTGAESKDLPSG; KGTGAESKDLPSGH;
GTGAESKDLPSGHG; TGAESKDLPSGHGI; GAESKDLPSGHGIN;
AESKDLPSGHGINN; ESKDLPSGHGINNL; SKDLPSGHGINNLD;
KDLPSGHGINNLDS; DLPSGHGINNLDSL; LPSGHGINNLDSLR;
PSGHGINNLDSLRD; SGHGINNLDSLRDY; GHGINNLDSLRDYL;
HGINNLDSLRDYLD; GINNLDSLRDYLDG; INNLDSLRDYLDGS;
NNLDSLRDYLDGSV; NLDSLRDYLDGSVK; LDSLRDYLDGSVKV;
DSLRDYLDGSVKVN; SLRDYLDGSVKVNL; LRDYLDGSVKVNLE;
RDYLDGSVKVNLEK; DYLDGSVKVNLEKK; YLDGSVKVNLEKKH;
LDGSVKVNLEKKHL; DGSVKVNLEKKHLN; GSVKVNLEKKHLNK;
SVKVNLEKKHLNKR; VKVNLEKKHLNKRT; KVNLEKKHLNKRTQ;
VNLEKKHLNKRTQI; NLEKKHLNKRTQIF; LEKKHLNKRTQIFP;
EKKHLNKRTQIFPP; KKHLNKRTQIFPPG; KHLNKRTQIFPPGL;
HLNKRTQIFPPGLV; LNKRTQIFPPGLVT; NKRTQIFPPGLVTM;
KRTQIFPPGLVTMN; RTQIFPPGLVTMNE; TQIFPPGLVTMNEY;
QIFPPGLVTMNEYP; IFPPGLVTMNEYPV; FPPGLVTMNEYPVP;
PPGLVTMNEYPVPK; PGLVTMNEYPVPKT; GLVTMNEYPVPKTL;
LVTMNEYPVPKTLQ; VTMNEYPVPKTLQA; TMNEYPVPKTLQAR;
MNEYPVPKTLQARF; NEYPVPKTLQARFV; EYPVPKTLQARFVR;
YPVPKTLQARFVRQ; PVPKTLQARFVRQI; VPKTLQARFVRQID;
PKTLQARFVRQIDF; KTLQARFVRQIDFR; TLQARFVRQIDFRP;
LQARFVRQIDFRPK; QARFVRQIDFRPKI; ARFVRQIDFRPKIY; RFVRQIDFRPKIYL;
FVRQIDFRPKIYLR; VRQIDFRPKIYLRK; RQIDFRPKIYLRKS; QIDFRPKIYLRKSL;
IDFRPKIYLRKSLQ; DFRPKIYLRKSLQN; FRPKIYLRKSLQNS; RPKIYLRKSLQNSE;
PKIYLRKSLQNSEF; KIYLRKSLQNSEFL; IYLRKSLQNSEFLL; YLRKSLQNSEFLLE;
LRKSLQNSEFLLEK; RKSLQNSEFLLEKR; KSLQNSEFLLEKRI; SLQNSEFLLEKRIL;
LQNSEFLLEKRILQ; QNSEFLLEKRILQS; NSEFLLEKRILQSG; SEFLLEKRILQSGM;
EFLLEKRILQSGMT; FLLEKRILQSGMTL; LLEKRILQSGMTLL;
LEKRILQSGMTLLL; EKRILQSGMTLLLL; KRILQSGMTLLLLL; RILQSGMTLLLLLI;
ILQSGMTLLLLLIW; LQSGMTLLLLLIWF; QSGMTLLLLLIWFR;
SGMTLLLLLIWFRP; GMTLLLLLIWFRPV; MTLLLLLIWFRPVA;
TLLLLLIWFRPVAD; LLLLLIWFRPVADF; LLLLIWFRPVADFA;
LLLIWFRPVADFAT; LLIWFRPVADFATD; LIWFRPVADFATDI;
IWFRPVADFATDIQ; WFRPVADFATDIQS; FRPVADFATDIQSR;
RPVADFATDIQSRI; PVADFATDIQSRIV; VADFATDIQSRIVE; ADFATDIQSRIVEW;
DFATDIQSRIVEWK; FATDIQSRIVEWKE; ATDIQSRIVEWKER;
TDIQSRIVEWKERL; DIQSRIVEWKERLD; IQSRIVEWKERLDS;
QSRIVEWKERLDSE; SRIVEWKERLDSEI; RIVEWKERLDSEIS; IVEWKERLDSEISM;
VEWKERLDSEISMY; EWKERLDSEISMYT; WKERLDSEISMYTF;
KERLDSEISMYTFS; ERLDSEISMYTFSR; RLDSEISMYTFSRM; LDSEISMYTFSRMK;
DSEISMYTFSRMKY; SEISMYTFSRMKYN; EISMYTFSRMKYNI;
ISMYTFSRMKYNIC; SMYTFSRMKYNICM; MYTFSRMKYNICMG;
YTFSRMKYNICMGK; TFSRMKYNICMGKC; FSRMKYNICMGKCI;
SRMKYNICMGKCIL; RMKYNICMGKCILD; MKYNICMGKCILDI;
KYNICMGKCILDIT; YNICMGKCILDITR; NICMGKCILDITRE; ICMGKCILDITREE;
CMGKCILDITREED; MGKCILDITREEDS; GKCILDITREEDSE; KCILDITREEDSET;
CILDITREEDSETE; ILDITREEDSETED; LDITREEDSETEDS; DITREEDSETEDSG;
ITREEDSETEDSGH; TREEDSETEDSGHG; REEDSETEDSGHGS;
EEDSETEDSGHGSS; EDSETEDSGHGSST; DSETEDSGHGSSTE; SETEDSGHGSSTES;
ETEDSGHGSSTESQ; TEDSGHGSSTESQS; EDSGHGSSTESQSQ;
DSGHGSSTESQSQC; SGHGSSTESQSQCS; GHGSSTESQSQCSS;
HGSSTESQSQCSSQ; GSSTESQSQCSSQV; SSTESQSQCSSQVS; STESQSQCSSQVSD;
TESQSQCSSQVSDT; ESQSQCSSQVSDTS; SQSQCSSQVSDTSA;
QSQCSSQVSDTSAP; SQCSSQVSDTSAPA; QCSSQVSDTSAPAE;
CSSQVSDTSAPAED; SSQVSDTSAPAEDS; SQVSDTSAPAEDSQ;
QVSDTSAPAEDSQR; VSDTSAPAEDSQRS; SDTSAPAEDSQRSD;
DTSAPAEDSQRSDP; TSAPAEDSQRSDPH; SAPAEDSQRSDPHS;
APAEDSQRSDPHSQ; PAEDSQRSDPHSQE; AEDSQRSDPHSQEL;
EDSQRSDPHSQELH; DSQRSDPHSQELHL; SQRSDPHSQELHLC;
QRSDPHSQELHLCK; RSDPHSQELHLCKG; SDPHSQELHLCKGF;
DPHSQELHLCKGFQ; PHSQELHLCKGFQC; HSQELHLCKGFQCF;
SQELHLCKGFQCFK; QELHLCKGFQCFKR; ELHLCKGFQCFKRP;
LHLCKGFQCFKRPK; HLCKGFQCFKRPKT; LCKGFQCFKRPKTP;
CKGFQCFKRPKTPP; KGFQCFKRPKTPPP; GFQCFKRPKTPPPK;
MYMYNKSTCLKHFG; YMYNKSTCLKHFGL; MYNKSTCLKHFGLQ;
YNKSTCLKHFGLQL; NKSTCLKHFGLQLS; KSTCLKHFGLQLSL;
STCLKHFGLQLSLF; TCLKHFGLQLSLFV; CLKHFGLQLSLFVN;
LKHFGLQLSLFVNI; KHFGLQLSLFVNIS; HFGLQLSLFVNISY; FGLQLSLFVNISYH;
GLQLSLFVNISYHI; LQLSLFVNISYHIW; QLSLFVNISYHIWV; LSLFVNISYHIWVP;
SLFVNISYHIWVPW; LFVNISYHIWVPWK; FVNISYHIWVPWKS;
VNISYHIWVPWKSF; NISYHIWVPWKSFC; ISYHIWVPWKSFCA;
SYHIWVPWKSFCAI; YHIWVPWKSFCAIK; HIWVPWKSFCAIKH;
IWVPWKSFCAIKHP; WVPWKSFCAIKHPN; VPWKSFCAIKHPNL;
PWKSFCAIKHPNLF; WKSFCAIKHPNLFY; KSFCAIKHPNLFYL;
SFCAIKHPNLFYLG; FCAIKHPNLFYLGF; CAIKHPNLFYLGFH; AIKHPNLFYLGFHT;
IKHPNLFYLGFHTI; KHPNLFYLGFHTIH; HPNLFYLGFHTIHR; PNLFYLGFHTIHRL;
NLFYLGFHTIHRLP; LFYLGFHTIHRLPI; FYLGFHTIHRLPIH; YLGFHTIHRLPIHS;
LGFHTIHRLPIHSL; GFHTIHRLPIHSLG; FHTIHRLPIHSLGS; HTIHRLPIHSLGSP;
TIHRLPIHSLGSPV; IHRLPIHSLGSPVY; HRLPIHSLGSPVYK; RLPIHSLGSPVYKV;
LPIHSLGSPVYKVT; QKGNWVRILYRSFS; KGNWVRILYRSFSQ;
GNWVRILYRSFSQA; NWVRILYRSFSQAD; WVRILYRSFSQADL;
VRILYRSFSQADLK; RILYRSFSQADLKI; ILYRSFSQADLKIS; LYRSFSQADLKISC;
YRSFSQADLKISCK; RSFSQADLKISCKA; SFSQADLKISCKAS; FSQADLKISCKASP;
SQADLKISCKASPL; QADLKISCKASPLL; ADLKISCKASPLLC; DLKISCKASPLLCS;
LKISCKASPLLCSR; KISCKASPLLCSRA; ISCKASPLLCSRAV; SCKASPLLCSRAVS;
CKASPLLCSRAVSK; KASPLLCSRAVSKQ; ASPLLCSRAVSKQA;
SPLLCSRAVSKQAT; PLLCSRAVSKQATN; LLCSRAVSKQATNI;
LCSRAVSKQATNIS; CSRAVSKQATNISS; NIQAISFTKRPHTL; IQAISFTKRPHTLF;
QAISFTKRPHTLFI; QHCGSCVGHMKYWG; HCGSCVGHMKYWGN;
CGSCVGHMKYWGNI; GSCVGHMKYWGNIF; SCVGHMKYWGNIFP;
CVGHMKYWGNIFPS; VGHMKYWGNIFPSC; GHMKYWGNIFPSCE;
HMKYWGNIFPSCES; MKYWGNIFPSCESP; KYWGNIFPSCESPK;
YWGNIFPSCESPKI; WGNIFPSCESPKIP; GNIFPSCESPKIPS; NIFPSCESPKIPSI;
IFPSCESPKIPSIF; FPSCESPKIPSIFI; PSCESPKIPSIFIS; SCESPKIPSIFIST;
CESPKIPSIFISTG; ESPKIPSIFISTGI; SPKIPSIFISTGIR; PKIPSIFISTGIRY;
KIPSIFISTGIRYP; IPSIFISTGIRYPA; PSIFISTGIRYPAL; SIFISTGIRYPALN;
IFISTGIRYPALNW; FISTGIRYPALNWI; ISTGIRYPALNWIS; STGIRYPALNWISI;
TGIRYPALNWISIV; GIRYPALNWISIVF; IRYPALNWISIVFV; RYPALNWISIVFVQ;
YPALNWISIVFVQI; PALNWISIVFVQIG; ALNWISIVFVQIGL; LNWISIVFVQIGLM;
NWISIVFVQIGLMV; WISIVFVQIGLMVS; ISIVFVQIGLMVSI; SIVFVQIGLMVSIH;
IVFVQIGLMVSIHY; VFVQIGLMVSIHYL; FVQIGLMVSIHYLG;
VQIGLMVSIHYLGL; QIGLMVSIHYLGLG; IGLMVSIHYLGLGC;
GLMVSIHYLGLGCW; LMVSIHYLGLGCWV; MVSIHYLGLGCWVF;
VSIHYLGLGCWVFR; SIHYLGLGCWVFRG; IHYLGLGCWVFRGY;
HYLGLGCWVFRGYS; YLGLGCWVFRGYST; LGLGCWVFRGYSTI;
GLGCWVFRGYSTIR; LGCWVFRGYSTIRV; GCWVFRGYSTIRVL;
HSLHFQGFSTYSKE; SLHFQGFSTYSKEV; LHFQGFSTYSKEVE;
HFQGFSTYSKEVEI; FQGFSTYSKEVEIT; QGFSTYSKEVEITA; GFSTYSKEVEITAL;
FSTYSKEVEITALN; STYSKEVEITALNR; TYSKEVEITALNRF; YSKEVEITALNRFS;
SKEVEITALNRFSS; KEVEITALNRFSST; EVEITALNRFSSTM; VEITALNRFSSTML;
EITALNRFSSTMLM; ITALNRFSSTMLMH; TALNRFSSTMLMHF;
ALNRFSSTMLMHFL; PCMKVKHASYSNNL; CMKVKHASYSNNLC;
MKVKHASYSNNLCL; KVKHASYSNNLCLY; VKHASYSNNLCLYS;
KHASYSNNLCLYSY; HASYSNNLCLYSYS; ASYSNNLCLYSYSL;
SYSNNLCLYSYSLP; YSNNLCLYSYSLPH; SNNLCLYSYSLPHQ;
IGEGNSCCAVTGKH; GEGNSCCAVTGKHF; EGNSCCAVTGKHFS;
GNSCCAVTGKHFSL; NSCCAVTGKHFSLW; SCCAVTGKHFSLWA;
CCAVTGKHFSLWAI; CAVTGKHFSLWAIT; AVTGKHFSLWAITA;
VTGKHFSLWAITAK; TGKHFSLWAITAKV; GKHFSLWAITAKVI;
KHFSLWAITAKVIF; HFSLWAITAKVIFS; FSLWAITAKVIFST; TKAPKVFIWIPHFW;
KAPKVFIWIPHFWV; EAFYLCNSIYPSFN; AFYLCNSIYPSFNF;
FWHLHGFLWLFGSC; WHLHGFLWLFGSCP; HLHGFLWLFGSCPW;
LHGFLWLFGSCPWT; HGFLWLFGSCPWTL; GFLWLFGSCPWTLS;
FLWLFGSCPWTLSF; LWLFGSCPWTLSFS; WLFGSCPWTLSFSF;
LFGSCPWTLSFSFG; FGSCPWTLSFSFGW; GSCPWTLSFSFGWG;
SCPWTLSFSFGWGH; CPWTLSFSFGWGHL; PWTLSFSFGWGHLH;
WTLSFSFGWGHLHM; TLSFSFGWGHLHML; LSFSFGWGHLHMLQ;
SFSFGWGHLHMLQE; FSFGWGHLHMLQEQ; SFGWGHLHMLQEQV;
FGWGHLHMLQEQVL; GWGHLHMLQEQVLQ; WGHLHMLQEQVLQS;
GHLHMLQEQVLQSR; HLHMLQEQVLQSRT; LHMLQEQVLQSRTG;
HMLQEQVLQSRTGL; MLQEQVLQSRTGLE; LQEQVLQSRTGLEV;
QEQVLQSRTGLEVK; EQVLQSRTGLEVKA; QVLQSRTGLEVKAT;
VLQSRTGLEVKATS; LQSRTGLEVKATSI; QSRTGLEVKATSIE; SRTGLEVKATSIEE;
RTGLEVKATSIEEQ; TGLEVKATSIEEQF; GLEVKATSIEEQFF; LEVKATSIEEQFFD;
TLLNVHFVDFLSPF; LLNVHFVDFLSPFF; LNVHFVDFLSPFFV;
LLLYCQHHLYYKYG; LLYCQHHLYYKYGQ; LYCQHHLYYKYGQN;
YCQHHLYYKYGQNV; CQHHLYYKYGQNVH; QHHLYYKYGQNVHG;
HHLYYKYGQNVHGY; HLYYKYGQNVHGYL; LYYKYGQNVHGYLP;
YYKYGQNVHGYLPF; YKYGQNVHGYLPFQ; KYGQNVHGYLPFQL;
YGQNVHGYLPFQLL; GQNVHGYLPFQLLV; GKDQNNIVEYNYKS;
KDQNNIVEYNYKSL; QKYLHQETEYHSTH; KYLHQETEYHSTHL;
YLHQETEYHSTHLG; TIPKPCLIADRGLQ; IPKPCLIADRGLQW;
PKPCLIADRGLQWK; KPCLIADRGLQWKL; PCLIADRGLQWKLC;
CLIADRGLQWKLCD; LIADRGLQWKLCDP; IADRGLQWKLCDPN;
ADRGLQWKLCDPNH; DRGLQWKLCDPNHQ; RGLQWKLCDPNHQR;
GLQWKLCDPNHQRT; LQWKLCDPNHQRTY; QWKLCDPNHQRTYT;
WKLCDPNHQRTYTL; KLCDPNHQRTYTLL; LCDPNHQRTYTLLE;
CDPNHQRTYTLLEL; DPNHQRTYTLLELR; PNHQRTYTLLELRN;
PQEHQQLQHMFEEL; QEHQQLQHMFEELG; EHQQLQHMFEELGL;
QQQPPQQQFQPLKI; QQPPQQQFQPLKIL; QPPQQQFQPLKILW;
PPQQQFQPLKILWQ; PQQQFQPLKILWQQ; QQQFQPLKILWQQQ;
QQFQPLKILWQQQP; QFQPLKILWQQQPQ; FQPLKILWQQQPQI;
QPLKILWQQQPQIH; PLKILWQQQPQIHW; LKILWQQQPQIHWQ;
KILWQQQPQIHWQL; ILWQQQPQIHWQLG; LWQQQPQIHWQLGP;
WQQQPQIHWQLGPP; QQQPQIHWQLGPPK; QQPQIHWQLGPPKV;
QPQIHWQLGPPKVL; PQIHWQLGPPKVLE; QIHWQLGPPKVLEQ;
IHWQLGPPKVLEQH; HWQLGPPKVLEQHP; TWKYKKKGITYLGV;
WKYKKKGITYLGVF; KYKKKGITYLGVFY; YKKKGITYLGVFYR;
KKKGITYLGVFYRV; KKGITYLGVFYRVF; KGITYLGVFYRVFY;
GITYLGVFYRVFYS; ITYLGVFYRVFYSR; SSGTFVFPVYTVFT; SGTFVFPVYTVFTS;
GTFVFPVYTVFTST; TFVFPVYTVFTSTK; FVFPVYTVFTSTKF; VFPVYTVFTSTKFQ;
FPVYTVFTSTKFQQ; PVYTVFTSTKFQQK; VYTVFTSTKFQQKL;
NKNKNPLSSFFCSS; KNKNPLSSFFCSSP; NKNPLSSFFCSSPG; KNPLSSFFCSSPGF;
NPLSSFFCSSPGFT; PLSSFFCSSPGFTN; LSSFFCSSPGFTNF; SSFFCSSPGFTNFH;
LGTRPRFLGSQNMS; GTRPRFLGSQNMSV; TRPRFLGSQNMSVM;
RPRFLGSQNMSVMH; PRFLGSQNMSVMHF; RFLGSQNMSVMHFP;
FLGSQNMSVMHFPS; AAPPCESCTFLPEV; APPCESCTFLPEVM;
PPCESCTFLPEVMV; PCESCTFLPEVMVW; CESCTFLPEVMVWL;
ESCTFLPEVMVWLH; SCTFLPEVMVWLHS; CTFLPEVMVWLHSP;
TFLPEVMVWLHSPV; FLPEVMVWLHSPVS; LPEVMVWLHSPVSH;
PEVMVWLHSPVSHA; EVMVWLHSPVSHAL; VMVWLHSPVSHALS;
MVWLHSPVSHALSF; VWLHSPVSHALSFL; WLHSPVSHALSFLR;
LHSPVSHALSFLRS; HSPVSHALSFLRSW; SPVSHALSFLRSWF;
PVSHALSFLRSWFG; VSHALSFLRSWFGC; SHALSFLRSWFGCI;
HALSFLRSWFGCIP; ALSFLRSWFGCIPW; LSFLRSWFGCIPWV;
SFLRSWFGCIPWVS; FLRSWFGCIPWVSS; LRSWFGCIPWVSSS;
RSWFGCIPWVSSSS; SWFGCIPWVSSSSL; WFGCIPWVSSSSLW;
FGCIPWVSSSSLWP; GCIPWVSSSSLWPF; CIPWVSSSSLWPFF; IPWVSSSSLWPFFL;
YIRGRGRLCLHPFS; IRGRGRLCLHPFSQ; RGRGRLCLHPFSQV;
GRGRLCLHPFSQVV; RGRLCLHPFSQVVR; GRLCLHPFSQVVRV;
RLCLHPFSQVVRVW; LCLHPFSQVVRVWR; CLHPFSQVVRVWRL;
LHPFSQVVRVWRLF; HPFSQVVRVWRLFL; PFSQVVRVWRLFLR;
FSQVVRVWRLFLRP; SQVVRVWRLFLRPS; QVVRVWRLFLRPSK;
VVRVWRLFLRPSKT; VRVWRLFLRPSKTI; RVWRLFLRPSKTIW;
VWRLFLRPSKTIWG; WRLFLRPSKTIWGN; RLFLRPSKTIWGNP;
LFLRPSKTIWGNPY; FLRPSKTIWGNPYS; LRPSKTIWGNPYSF;
RPSKTIWGNPYSFA; PSKTIWGNPYSFAI; SKTIWGNPYSFAIF; KTIWGNPYSFAIFA;
TIWGNPYSFAIFAK

15 mers:

KSCLGKSSLNEKSLF; SCLGKSSLNEKSLFK; CLGKSSLNEKSLFKE;
LGKSSLNEKSLFKEV; FSSLPRYPVLQGMAY; SSLPRYPVLQGMAYL;
SLPRYPVLQGMAYLF; LPRYPVLQGMAYLFQ; PRYPVLQGMAYLFQK;
RYPVLQGMAYLFQKA; YPVLQGMAYLFQKAF; PVLQGMAYLFQKAFC;
VLQGMAYLFQKAFCA; LQGMAYLFQKAFCAL; QGMAYLFQKAFCALP;
GMAYLFQKAFCALPL; MAYLFQKAFCALPLH; AYLFQKAFCALPLHA;
YLFQKAFCALPLHAM; LFQKAFCALPLHAMS; FQKAFCALPLHAMSA;
KIFKKRALGLDRLLL; IFKKRALGLDRLLLH; RNSAMVGPNNWRNSL;
NSAMVGPNNWRNSLQ; SAMVGPNNWRNSLQR; AMVGPNNWRNSLQRS;
MVGPNNWRNSLQRSK; VGPNNWRNSLQRSKA; GPNNWRNSLQRSKAL;
PNNWRNSLQRSKALR; VPTYGTEEWESWWSS; PTYGTEEWESWWSSF;
TYGTEEWESWWSSFN; YGTEEWESWWSSFNE; GTEEWESWWSSFNEK;
TEEWESWWSSFNEKW; EEWESWWSSFNEKWD; EWESWWSSFNEKWDE;
WESWWSSFNEKWDED; ESWWSSFNEKWDEDL; SWWSSFNEKWDEDLF;
WWSSFNEKWDEDLFC; WSSFNEKWDEDLFCH; SSFNEKWDEDLFCHE;
SFNEKWDEDLFCHED; FNEKWDEDLFCHEDM; NEKWDEDLFCHEDMF;
EKWDEDLFCHEDMFA; KWDEDLFCHEDMFAS; WDEDLFCHEDMFASD;
DEDLFCHEDMFASDE; EDLFCHEDMFASDEE; DLFCHEDMFASDEEA;
LFCHEDMFASDEEAT; FCHEDMFASDEEATA; CHEDMFASDEEATAD;
HEDMFASDEEATADS; EDMFASDEEATADSQ; DMFASDEEATADSQH;
MFASDEEATADSQHS; FASDEEATADSQHST; ASDEEATADSQHSTP;
SDEEATADSQHSTPP; DEEATADSQHSTPPK; EEATADSQHSTPPKK;
EATADSQHSTPPKKK; ATADSQHSTPPKKKR; TADSQHSTPPKKKRK;
ADSQHSTPPKKKRKV; DSQHSTPPKKKRKVE; SQHSTPPKKKRKVED;
QHSTPPKKKRKVEDP; HSTPPKKKRKVEDPK; STPPKKKRKVEDPKD;
TPPKKKRKVEDPKDF; PPKKKRKVEDPKDFP; PKKKRKVEDPKDFPS;
KKKRKVEDPKDFPSD; KKRKVEDPKDFPSDL; KRKVEDPKDFPSDLH;
RKVEDPKDFPSDLHQ; KVEDPKDFPSDLHQF; VEDPKDFPSDLHQFL;
EDPKDFPSDLHQFLS; DPKDFPSDLHQFLSQ; PKDFPSDLHQFLSQA;
KDFPSDLHQFLSQAV; DFPSDLHQFLSQAVF; FPSDLHQFLSQAVFS;
PSDLHQFLSQAVFSN; SDLHQFLSQAVFSNR; DLHQFLSQAVFSNRT;
LHQFLSQAVFSNRTL; HQFLSQAVFSNRTLA; QFLSQAVFSNRTLAC;
FLSQAVFSNRTLACF; LSQAVFSNRTLACFA; SQAVFSNRTLACFAV;
QAVFSNRTLACFAVY; AVFSNRTLACFAVYT; VFSNRTLACFAVYTT;
FSNRTLACFAVYTTK; SNRTLACFAVYTTKE; NRTLACFAVYTTKEK;
RTLACFAVYTTKEKA; TLACFAVYTTKEKAQ; LACFAVYTTKEKAQI;
ACFAVYTTKEKAQIL; CFAVYTTKEKAQILY; FAVYTTKEKAQILYK;
AVYTTKEKAQILYKK; VYTTKEKAQILYKKL; YTTKEKAQILYKKLM;
TTKEKAQILYKKLME; TKEKAQILYKKLMEK; KEKAQILYKKLMEKY;
EKAQILYKKLMEKYS; KAQILYKKLMEKYSV; AQILYKKLMEKYSVT;
QILYKKLMEKYSVTF; ILYKKLMEKYSVTFI; LYKKLMEKYSVTFIS;
YKKLMEKYSVTFISR; KKLMEKYSVTFISRH; KLMEKYSVTFISRHM;
LMEKYSVTFISRHMC; MEKYSVTFISRHMCA; EKYSVTFISRHMCAG;
KYSVTFISRHMCAGH; YSVTFISRHMCAGHN; SVTFISRHMCAGHNI;
VTFISRHMCAGHNII; TFISRHMCAGHNIIF; FISRHMCAGHNIIFF;
ISRHMCAGHNIIFFL; SRHMCAGHNIIFFLT; RHMCAGHNIIFFLTP;
HMCAGHNIIFFLTPH; MCAGHNIIFFLTPHR; CAGHNIIFFLTPHRH;
AGHNIIFFLTPHRHR; GHNIIFFLTPHRHRV; HNIIFFLTPHRHRVS;
NIIFFLTPHRHRVSA; IIFFLTPHRHRVSAI; IFFLTPHRHRVSAIN;
FFLTPHRHRVSAINN; FLTPHRHRVSAINNF; LTPHRHRVSAINNFC;
TPHRHRVSAINNFCQ; PHRHRVSAINNFCQK; HRHRVSAINNFCQKL;
RHRVSAINNFCQKLC; HRVSAINNFCQKLCT; RVSAINNFCQKLCTF;
VSAINNFCQKLCTFS; SAINNFCQKLCTFSF; AINNFCQKLCTFSFL;
INNFCQKLCTFSFLI; NNFCQKLCTFSFLIC; NFCQKLCTFSFLICK;
FCQKLCTFSFLICKG; CQKLCTFSFLICKGV; QKLCTFSFLICKGVN;
KLCTFSFLICKGVNK; LCTFSFLICKGVNKF; CTFSFLICKGVNKEY;
TFSFLICKGVNKEYL; FSFLICKGVNKEYLL; SFLICKGVNKEYLLY;
FLICKGVNKEYLLYS; LICKGVNKEYLLYSA; ICKGVNKEYLLYSAL;
CKGVNKEYLLYSALT; KGVNKEYLLYSALTR; GVNKEYLLYSALTRD;
VNKEYLLYSALTRDP; NKEYLLYSALTRDPY; KEYLLYSALTRDPYH;
EYLLYSALTRDPYHT; YLLYSALTRDPYHTI; LLYSALTRDPYHTIE;
LYSALTRDPYHTIEE; YSALTRDPYHTIEES; SALTRDPYHTIEESI;
ALTRDPYHTIEESIQ; LTRDPYHTIEESIQG; TRDPYHTIEESIQGG;
RDPYHTIEESIQGGL; DPYHTIEESIQGGLK; PYHTIEESIQGGLKE;
YHTIEESIQGGLKEH; HTIEESIQGGLKEHD; TIEESIQGGLKEHDF;
IEESIQGGLKEHDFS; EESIQGGLKEHDFSP; ESIQGGLKEHDFSPE;
SIQGGLKEHDFSPEE; IQGGLKEHDFSPEEP; QGGLKEHDFSPEEPE;
GGLKEHDFSPEEPEE; GLKEHDFSPEEPEET; LKEHDFSPEEPEETK;
KEHDFSPEEPEETKQ; EHDFSPEEPEETKQV; HDFSPEEPEETKQVS;
DFSPEEPEETKQVSW; FSPEEPEETKQVSWK; SPEEPEETKQVSWKL;
PEEPEETKQVSWKLI; EEPEETKQVSWKLIT; EPEETKQVSWKLITE;
PEETKQVSWKLITEY; EETKQVSWKLITEYA; ETKQVSWKLITEYAV;
TKQVSWKLITEYAVE; KQVSWKLITEYAVET; QVSWKLITEYAVETK;
VSWKLITEYAVETKC; SWKLITEYAVETKCE; WKLITEYAVETKCED;
KLITEYAVETKCEDV; LITEYAVETKCEDVF; ITEYAVETKCEDVFL;
TEYAVETKCEDVFLL; EYAVETKCEDVFLLL; YAVETKCEDVFLLLG;
AVETKCEDVFLLLGM; VETKCEDVFLLLGMY; ETKCEDVFLLLGMYL;
TKCEDVFLLLGMYLE; KCEDVFLLLGMYLEF; CEDVFLLLGMYLEFQ;
EDVFLLLGMYLEFQY; DVFLLLGMYLEFQYN; VFLLLGMYLEFQYNV;
FLLLGMYLEFQYNVE; LLLGMYLEFQYNVEE; LLGMYLEFQYNVEEC;
LGMYLEFQYNVEECK; GMYLEFQYNVEECKK; MYLEFQYNVEECKKC;
YLEFQYNVEECKKCQ; LEFQYNVEECKKCQK; EFQYNVEECKKCQKK;
FQYNVEECKKCQKKD; QYNVEECKKCQKKDQ; YNVEECKKCQKKDQP;
NVEECKKCQKKDQPY; VEECKKCQKKDQPYH; EECKKCQKKDQPYHF;
ECKKCQKKDQPYHFK; CKKCQKKDQPYHFKY; KKCQKKDQPYHFKYH;
KCQKKDQPYHFKYHE; CQKKDQPYHFKYHEK; QKKDQPYHFKYHEKH;
KKDQPYHFKYHEKHF; KDQPYHFKYHEKHFA; DQPYHFKYHEKHFAN;
QPYHFKYHEKHFANA; PYHFKYHEKHFANAI; YHFKYHEKHFANAII;
HFKYHEKHFANAIIF; FKYHEKHFANAIIFA; KYHEKHFANAIIFAE;
YHEKHFANAIIFAES; HEKHFANAIIFAESK; EKHFANAIIFAESKN;
KHFANAIIFAESKNQ; HFANAIIFAESKNQK; FANAIIFAESKNQKS;
ANAIIFAESKNQKSI; NAIIFAESKNQKSIC; AIIFAESKNQKSICQ;
IIFAESKNQKSICQQ; IFAESKNQKSICQQA; FAESKNQKSICQQAV;
AESKNQKSICQQAVD; ESKNQKSICQQAVDT; SKNQKSICQQAVDTV;
KNQKSICQQAVDTVL; NQKSICQQAVDTVLA; QKSICQQAVDTVLAK;
KSICQQAVDTVLAKK; SICQQAVDTVLAKKR; ICQQAVDTVLAKKRV;
CQQAVDTVLAKKRVD; QQAVDTVLAKKRVDT; QAVDTVLAKKRVDTL;
AVDTVLAKKRVDTLH; VDTVLAKKRVDTLHM; DTVLAKKRVDTLHMT;
TVLAKKRVDTLHMTR; VLAKKRVDTLHMTRF; LAKKRVDTLHMTRFE;
AKKRVDTLHMTREEM; KKRVDTLHMTREEML; KRVDTLHMTREEMLT;
RVDTLHMTREEMLTE; VDTLHMTREEMLTER; DTLHMTREEMLTERF;
TLHMTREEMLTERFN; LHMTREEMLTERFNH; HMTREEMLTERFNHI;
MTREEMLTERFNHIL; TREEMLTERENHILD; REEMLTERFNHILDK;
EEMLTERFNHILDKM; EMLTERFNHILDKMD; MLTERFNHILDKMDL;
LTERFNHILDKMDLI; TERFNHILDKMDLIF; ERFNHILDKMDLIFG;
RFNHILDKMDLIFGA; FNHILDKMDLIFGAH; NHILDKMDLIFGAHG;
HILDKMDLIFGAHGN; ILDKMDLIFGAHGNA; LDKMDLIFGAHGNAV;
DKMDLIFGAHGNAVL; KMDLIFGAHGNAVLE; MDLIFGAHGNAVLEQ;
DLIFGAHGNAVLEQY; LIFGAHGNAVLEQYM; IFGAHGNAVLEQYMA;
FGAHGNAVLEQYMAG; GAHGNAVLEQYMAGV; AHGNAVLEQYMAGVA;
HGNAVLEQYMAGVAW; GNAVLEQYMAGVAWL; NAVLEQYMAGVAWLH;
AVLEQYMAGVAWLHC; VLEQYMAGVAWLHCL; LEQYMAGVAWLHCLL;
EQYMAGVAWLHCLLP; QYMAGVAWLHCLLPK; YMAGVAWLHCLLPKM;
MAGVAWLHCLLPKMD; AGVAWLHCLLPKMDS; GVAWLHCLLPKMDSV;
VAWLHCLLPKMDSVI; AWLHCLLPKMDSVIF; WLHCLLPKMDSVIFD;
LHCLLPKMDSVIFDF; HCLLPKMDSVIFDFL; CLLPKMDSVIFDFLH;
LLPKMDSVIFDFLHC; LPKMDSVIFDFLHCI; PKMDSVIFDFLHCIV;
KMDSVIFDFLHCIVF; MDSVIFDFLHCIVFN; DSVIFDFLHCIVFNV;
SVIFDFLHCIVFNVP; VIFDFLHCIVFNVPK; IFDFLHCIVFNVPKR;
FDFLHCIVFNVPKRR; DFLHCIVFNVPKRRY; FLHCIVFNVPKRRYW;
LHCIVFNVPKRRYWL; HCIVFNVPKRRYWLF; CIVFNVPKRRYWLFK;
IVFNVPKRRYWLFKG; VFNVPKRRYWLFKGP; FNVPKRRYWLFKGPI;
NVPKRRYWLFKGPID; VPKRRYWLFKGPIDS; PKRRYWLFKGPIDSG;
KRRYWLFKGPIDSGK; RRYWLFKGPIDSGKT; RYWLFKGPIDSGKTT;
YWLFKGPIDSGKTTL; WLFKGPIDSGKTTLA; LFKGPIDSGKTTLAA;
FKGPIDSGKTTLAAG; KGPIDSGKTTLAAGL; GPIDSGKTTLAAGLL;
PIDSGKTTLAAGLLD; IDSGKTTLAAGLLDL; DSGKTTLAAGLLDLC;
SGKTTLAAGLLDLCG; GKTTLAAGLLDLCGG; KTTLAAGLLDLCGGK;
TTLAAGLLDLCGGKA; TLAAGLLDLCGGKAL; LAAGLLDLCGGKALN;
AAGLLDLCGGKALNV; AGLLDLCGGKALNVN; GLLDLCGGKALNVNL;
LLDLCGGKALNVNLP; LDLCGGKALNVNLPM; DLCGGKALNVNLPME;
LCGGKALNVNLPMER; CGGKALNVNLPMERL; GGKALNVNLPMERLT;
GKALNVNLPMERLTF; KALNVNLPMERLTFE; ALNVNLPMERLTFEL;
LNVNLPMERLTFELG; NVNLPMERLTFELGV; VNLPMERLTFELGVA;
NLPMERLTFELGVAI; LPMERLTFELGVAID; PMERLTFELGVAIDQ;
MERLTFELGVAIDQY; ERLTFELGVAIDQYM; RLTFELGVAIDQYMV;
LTFELGVAIDQYMVV; TFELGVAIDQYMVVF; FELGVAIDQYMVVFE;
ELGVAIDQYMVVFED; LGVAIDQYMVVFEDV; GVAIDQYMVVFEDVK;
VAIDQYMVVFEDVKG; AIDQYMVVFEDVKGT; IDQYMVVFEDVKGTG;
DQYMVVFEDVKGTGA; QYMVVFEDVKGTGAE; YMVVFEDVKGTGAES;
MVVFEDVKGTGAESK; VVFEDVKGTGAESKD; VFEDVKGTGAESKDL;
FEDVKGTGAESKDLP; EDVKGTGAESKDLPS; DVKGTGAESKDLPSG;
VKGTGAESKDLPSGH; KGTGAESKDLPSGHG; GTGAESKDLPSGHGI;
TGAESKDLPSGHGIN; GAESKDLPSGHGINN; AESKDLPSGHGINNL;
ESKDLPSGHGINNLD; SKDLPSGHGINNLDS; KDLPSGHGINNLDSL;
DLPSGHGINNLDSLR; LPSGHGINNLDSLRD; PSGHGINNLDSLRDY;
SGHGINNLDSLRDYL; GHGINNLDSLRDYLD; HGINNLDSLRDYLDG;
GINNLDSLRDYLDGS; INNLDSLRDYLDGSV; NNLDSLRDYLDGSVK;
NLDSLRDYLDGSVKV; LDSLRDYLDGSVKVN; DSLRDYLDGSVKVNL;
SLRDYLDGSVKVNLE; LRDYLDGSVKVNLEK; RDYLDGSVKVNLEKK;
DYLDGSVKVNLEKKH; YLDGSVKVNLEKKHL; LDGSVKVNLEKKHLN;
DGSVKVNLEKKHLNK; GSVKVNLEKKHLNKR; SVKVNLEKKHLNKRT;
VKVNLEKKHLNKRTQ; KVNLEKKHLNKRTQI; VNLEKKHLNKRTQIF;
NLEKKHLNKRTQIFP; LEKKHLNKRTQIFPP; EKKHLNKRTQIFPPG;
KKHLNKRTQIFPPGL; KHLNKRTQIFPPGLV; HLNKRTQIFPPGLVT;
LNKRTQIFPPGLVTM; NKRTQIFPPGLVTMN; KRTQIFPPGLVTMNE;
RTQIFPPGLVTMNEY; TQIFPPGLVTMNEYP; QIFPPGLVTMNEYPV;
IFPPGLVTMNEYPVP; FPPGLVTMNEYPVPK; PPGLVTMNEYPVPKT;
PGLVTMNEYPVPKTL; GLVTMNEYPVPKTLQ; LVTMNEYPVPKTLQA;
VTMNEYPVPKTLQAR; TMNEYPVPKTLQARF; MNEYPVPKTLQARFV;
NEYPVPKTLQARFVR; EYPVPKTLQARFVRQ; YPVPKTLQARFVRQI;
PVPKTLQARFVRQID; VPKTLQARFVRQIDF; PKTLQARFVRQIDFR;
KTLQARFVRQIDFRP; TLQARFVRQIDFRPK; LQARFVRQIDFRPKI;
QARFVRQIDFRPKIY; ARFVRQIDFRPKIYL; RFVRQIDFRPKIYLR;
FVRQIDFRPKIYLRK; VRQIDFRPKIYLRKS; RQIDFRPKIYLRKSL;
QIDFRPKIYLRKSLQ; IDFRPKIYLRKSLQN; DFRPKIYLRKSLQNS;
FRPKIYLRKSLQNSE; RPKIYLRKSLQNSEF; PKIYLRKSLQNSEFL;
KIYLRKSLQNSEFLL; IYLRKSLQNSEFLLE; YLRKSLQNSEFLLEK;
LRKSLQNSEFLLEKR; RKSLQNSEFLLEKRI; KSLQNSEFLLEKRIL;
SLQNSEFLLEKRILQ; LQNSEFLLEKRILQS; QNSEFLLEKRILQSG;
NSEFLLEKRILQSGM; SEFLLEKRILQSGMT; EFLLEKRILQSGMTL;
FLLEKRILQSGMTLL; LLEKRILQSGMTLLL; LEKRILQSGMTLLLL;
EKRILQSGMTLLLLL; KRILQSGMTLLLLLI; RILQSGMTLLLLLIW;
ILQSGMTLLLLLIWF; LQSGMTLLLLLIWFR; QSGMTLLLLLIWFRP;
SGMTLLLLLIWFRPV; GMTLLLLLIWFRPVA; MTLLLLLIWFRPVAD;
TLLLLLIWFRPVADF; LLLLLIWFRPVADFA; LLLLIWFRPVADFAT;
LLLIWFRPVADFATD; LLIWFRPVADFATDI; LIWFRPVADFATDIQ;
IWFRPVADFATDIQS; WFRPVADFATDIQSR; FRPVADFATDIQSRI;
RPVADFATDIQSRIV; PVADFATDIQSRIVE; VADFATDIQSRIVEW;
ADFATDIQSRIVEWK; DFATDIQSRIVEWKE; FATDIQSRIVEWKER;
ATDIQSRIVEWKERL; TDIQSRIVEWKERLD; DIQSRIVEWKERLDS;
IQSRIVEWKERLDSE; QSRIVEWKERLDSEI; SRIVEWKERLDSEIS;
RIVEWKERLDSEISM; IVEWKERLDSEISMY; VEWKERLDSEISMYT;
EWKERLDSEISMYTF; WKERLDSEISMYTFS; KERLDSEISMYTFSR;
ERLDSEISMYTFSRM; RLDSEISMYTFSRMK; LDSEISMYTFSRMKY;
DSEISMYTFSRMKYN; SEISMYTFSRMKYNI; EISMYTFSRMKYNIC;
ISMYTFSRMKYNICM; SMYTFSRMKYNICMG; MYTFSRMKYNICMGK;
YTFSRMKYNICMGKC; TFSRMKYNICMGKCI; FSRMKYNICMGKCIL;
SRMKYNICMGKCILD; RMKYNICMGKCILDI; MKYNICMGKCILDIT;
KYNICMGKCILDITR; YNICMGKCILDITRE; NICMGKCILDITREE;
ICMGKCILDITREED; CMGKCILDITREEDS; MGKCILDITREEDSE;
GKCILDITREEDSET; KCILDITREEDSETE; CILDITREEDSETED;
ILDITREEDSETEDS; LDITREEDSETEDSG; DITREEDSETEDSGH;
ITREEDSETEDSGHG; TREEDSETEDSGHGS; REEDSETEDSGHGSS;
EEDSETEDSGHGSST; EDSETEDSGHGSSTE; DSETEDSGHGSSTES;
SETEDSGHGSSTESQ; ETEDSGHGSSTESQS; TEDSGHGSSTESQSQ;
EDSGHGSSTESQSQC; DSGHGSSTESQSQCS; SGHGSSTESQSQCSS;
GHGSSTESQSQCSSQ; HGSSTESQSQCSSQV; GSSTESQSQCSSQVS;
SSTESQSQCSSQVSD; STESQSQCSSQVSDT; TESQSQCSSQVSDTS;
ESQSQCSSQVSDTSA; SQSQCSSQVSDTSAP; QSQCSSQVSDTSAPA;
SQCSSQVSDTSAPAE; QCSSQVSDTSAPAED; CSSQVSDTSAPAEDS;
SSQVSDTSAPAEDSQ; SQVSDTSAPAEDSQR; QVSDTSAPAEDSQRS;
VSDTSAPAEDSQRSD; SDTSAPAEDSQRSDP; DTSAPAEDSQRSDPH;
TSAPAEDSQRSDPHS; SAPAEDSQRSDPHSQ; APAEDSQRSDPHSQE;
PAEDSQRSDPHSQEL; AEDSQRSDPHSQELH; EDSQRSDPHSQELHL;
DSQRSDPHSQELHLC; SQRSDPHSQELHLCK; QRSDPHSQELHLCKG;
RSDPHSQELHLCKGF; SDPHSQELHLCKGFQ; DPHSQELHLCKGFQC;
PHSQELHLCKGFQCF; HSQELHLCKGFQCFK; SQELHLCKGFQCFKR;
QELHLCKGFQCFKRP; ELHLCKGFQCFKRPK; LHLCKGFQCFKRPKT;
HLCKGFQCFKRPKTP; LCKGFQCFKRPKTPP; CKGFQCFKRPKTPPP;
KGFQCFKRPKTPPPK; MYMYNKSTCLKHFGL; YMYNKSTCLKHFGLQ;
MYNKSTCLKHFGLQL; YNKSTCLKHFGLQLS; NKSTCLKHFGLQLSL;
KSTCLKHFGLQLSLF; STCLKHFGLQLSLFV; TCLKHFGLQLSLFVN;
CLKHFGLQLSLFVNI; LKHFGLQLSLFVNIS; KHFGLQLSLFVNISY;
HFGLQLSLFVNISYH; FGLQLSLFVNISYHI; GLQLSLFVNISYHIW;
LQLSLFVNISYHIWV; QLSLFVNISYHIWVP; LSLFVNISYHIWVPW;
SLFVNISYHIWVPWK; LFVNISYHIWVPWKS; FVNISYHIWVPWKSF;
VNISYHIWVPWKSFC; NISYHIWVPWKSFCA; ISYHIWVPWKSFCAI;
SYHIWVPWKSFCAIK; YHIWVPWKSFCAIKH; HIWVPWKSFCAIKHP;
IWVPWKSFCAIKHPN; WVPWKSFCAIKHPNL; VPWKSFCAIKHPNLF;
PWKSFCAIKHPNLFY; WKSFCAIKHPNLFYL; KSFCAIKHPNLFYLG;
SFCAIKHPNLFYLGF; FCAIKHPNLFYLGFH; CAIKHPNLFYLGFHT;
AIKHPNLFYLGFHTI; IKHPNLFYLGFHTIH; KHPNLFYLGFHTIHR;
HPNLFYLGFHTIHRL; PNLFYLGFHTIHRLP; NLFYLGFHTIHRLPI;
LFYLGFHTIHRLPIH; FYLGFHTIHRLPIHS; YLGFHTIHRLPIHSL;
LGFHTIHRLPIHSLG; GFHTIHRLPIHSLGS; FHTIHRLPIHSLGSP;
HTIHRLPIHSLGSPV; TIHRLPIHSLGSPVY; IHRLPIHSLGSPVYK;
HRLPIHSLGSPVYKV; RLPIHSLGSPVYKVT; QKGNWVRILYRSFSQ;
KGNWVRILYRSFSQA; GNWVRILYRSFSQAD; NWVRILYRSFSQADL;
WVRILYRSFSQADLK; VRILYRSFSQADLKI; RILYRSFSQADLKIS;
ILYRSFSQADLKISC; LYRSFSQADLKISCK; YRSFSQADLKISCKA;
RSFSQADLKISCKAS; SFSQADLKISCKASP; FSQADLKISCKASPL;
SQADLKISCKASPLL; QADLKISCKASPLLC; ADLKISCKASPLLCS;
DLKISCKASPLLCSR; LKISCKASPLLCSRA; KISCKASPLLCSRAV;
ISCKASPLLCSRAVS; SCKASPLLCSRAVSK; CKASPLLCSRAVSKQ;
KASPLLCSRAVSKQA; ASPLLCSRAVSKQAT; SPLLCSRAVSKQATN;
PLLCSRAVSKQATNI; LLCSRAVSKQATNIS; LCSRAVSKQATNISS;
NIQAISFTKRPHTLF; IQAISFTKRPHTLFI; QHCGSCVGHMKYWGN;
HCGSCVGHMKYWGNI; CGSCVGHMKYWGNIF; GSCVGHMKYWGNIFP;
SCVGHMKYWGNIFPS; CVGHMKYWGNIFPSC; VGHMKYWGNIFPSCE;
GHMKYWGNIFPSCES; HMKYWGNIFPSCESP; MKYWGNIFPSCESPK;
KYWGNIFPSCESPKI; YWGNIFPSCESPKIP; WGNIFPSCESPKIPS;
GNIFPSCESPKIPSI; NIFPSCESPKIPSIF; IFPSCESPKIPSIFI; FPSCESPKIPSIFIS;
PSCESPKIPSIFIST; SCESPKIPSIFISTG; CESPKIPSIFISTGI; ESPKIPSIFISTGIR;
SPKIPSIFISTGIRY; PKIPSIFISTGIRYP; KIPSIFISTGIRYPA; IPSIFISTGIRYPAL;
PSIFISTGIRYPALN; SIFISTGIRYPALNW; IFISTGIRYPALNWI; FISTGIRYPALNWIS;
ISTGIRYPALNWISI; STGIRYPALNWISIV; TGIRYPALNWISIVF;
GIRYPALNWISIVFV; IRYPALNWISIVFVQ; RYPALNWISIVFVQI;
YPALNWISIVFVQIG; PALNWISIVFVQIGL; ALNWISIVFVQIGLM;
LNWISIVFVQIGLMV; NWISIVFVQIGLMVS; WISIVFVQIGLMVSI;
ISIVFVQIGLMVSIH; SIVFVQIGLMVSIHY; IVFVQIGLMVSIHYL;
VFVQIGLMVSIHYLG; FVQIGLMVSIHYLGL; VQIGLMVSIHYLGLG;
QIGLMVSIHYLGLGC; IGLMVSIHYLGLGCW; GLMVSIHYLGLGCWV;
LMVSIHYLGLGCWVF; MVSIHYLGLGCWVFR; VSIHYLGLGCWVFRG;
SIHYLGLGCWVFRGY; IHYLGLGCWVFRGYS; HYLGLGCWVFRGYST;
YLGLGCWVFRGYSTI; LGLGCWVFRGYSTIR; GLGCWVFRGYSTIRV;
LGCWVFRGYSTIRVL; HSLHFQGFSTYSKEV; SLHFQGFSTYSKEVE;
LHFQGFSTYSKEVEI; HFQGFSTYSKEVEIT; FQGFSTYSKEVEITA;
QGFSTYSKEVEITAL; GFSTYSKEVEITALN; FSTYSKEVEITALNR;
STYSKEVEITALNRF; TYSKEVEITALNRFS; YSKEVEITALNRFSS;
SKEVEITALNRFSST; KEVEITALNRFSSTM; EVEITALNRFSSTML;
VEITALNRFSSTMLM; EITALNRFSSTMLMH; ITALNRFSSTMLMHF;
TALNRFSSTMLMHFL; PCMKVKHASYSNNLC; CMKVKHASYSNNLCL;
MKVKHASYSNNLCLY; KVKHASYSNNLCLYS; VKHASYSNNLCLYSY;
KHASYSNNLCLYSYS; HASYSNNLCLYSYSL; ASYSNNLCLYSYSLP;
SYSNNLCLYSYSLPH; YSNNLCLYSYSLPHQ; IGEGNSCCAVTGKHF;
GEGNSCCAVTGKHFS; EGNSCCAVTGKHFSL; GNSCCAVTGKHFSLW;
NSCCAVTGKHFSLWA; SCCAVTGKHFSLWAI; CCAVTGKHFSLWAIT;
CAVTGKHFSLWAITA; AVTGKHFSLWAITAK; VTGKHFSLWAITAKV;
TGKHFSLWAITAKVI; GKHFSLWAITAKVIF; KHFSLWAITAKVIFS;
HFSLWAITAKVIFST; TKAPKVFIWIPHFWV; EAFYLCNSIYPSFNF;
FWHLHGFLWLFGSCP; WHLHGFLWLFGSCPW; HLHGFLWLFGSCPWT;
LHGFLWLFGSCPWTL; HGFLWLFGSCPWTLS; GFLWLFGSCPWTLSF;
FLWLFGSCPWTLSFS; LWLFGSCPWTLSFSF; WLFGSCPWTLSFSFG;
LFGSCPWTLSFSFGW; FGSCPWTLSFSFGWG; GSCPWTLSFSFGWGH;
SCPWTLSFSFGWGHL; CPWTLSFSFGWGHLH; PWTLSFSFGWGHLHM;
WTLSFSFGWGHLHML; TLSFSFGWGHLHMLQ; LSFSFGWGHLHMLQE;
SFSFGWGHLHMLQEQ; FSFGWGHLHMLQEQV; SFGWGHLHMLQEQVL;
FGWGHLHMLQEQVLQ; GWGHLHMLQEQVLQS; WGHLHMLQEQVLQSR;
GHLHMLQEQVLQSRT; HLHMLQEQVLQSRTG; LHMLQEQVLQSRTGL;
HMLQEQVLQSRTGLE; MLQEQVLQSRTGLEV; LQEQVLQSRTGLEVK;
QEQVLQSRTGLEVKA; EQVLQSRTGLEVKAT; QVLQSRTGLEVKATS;
VLQSRTGLEVKATSI; LQSRTGLEVKATSIE; QSRTGLEVKATSIEE;
SRTGLEVKATSIEEQ; RTGLEVKATSIEEQF; TGLEVKATSIEEQFF;
GLEVKATSIEEQFFD; TLLNVHFVDFLSPFF; LLNVHFVDFLSPFFV;
LLLYCQHHLYYKYGQ; LLYCQHHLYYKYGQN; LYCQHHLYYKYGQNV;
YCQHHLYYKYGQNVH; CQHHLYYKYGQNVHG; QHHLYYKYGQNVHGY;
HHLYYKYGQNVHGYL; HLYYKYGQNVHGYLP; LYYKYGQNVHGYLPF;
YYKYGQNVHGYLPFQ; YKYGQNVHGYLPFQL; KYGQNVHGYLPFQLL;
YGQNVHGYLPFQLLV; GKDQNNIVEYNYKSL; QKYLHQETEYHSTHL;
KYLHQETEYHSTHLG; TIPKPCLIADRGLQW; IPKPCLIADRGLQWK;
PKPCLIADRGLQWKL; KPCLIADRGLQWKLC; PCLIADRGLQWKLCD;
CLIADRGLQWKLCDP; LIADRGLQWKLCDPN; IADRGLQWKLCDPNH;
ADRGLQWKLCDPNHQ; DRGLQWKLCDPNHQR; RGLQWKLCDPNHQRT;
GLQWKLCDPNHQRTY; LQWKLCDPNHQRTYT; QWKLCDPNHQRTYTL;
WKLCDPNHQRTYTLL; KLCDPNHQRTYTLLE; LCDPNHQRTYTLLEL;
CDPNHQRTYTLLELR; DPNHQRTYTLLELRN; PQEHQQLQHMFEELG;
QEHQQLQHMFEELGL; QQQPPQQQFQPLKIL; QQPPQQQFQPLKILW;
QPPQQQFQPLKILWQ; PPQQQFQPLKILWQQ; PQQQFQPLKILWQQQ;
QQQFQPLKILWQQQP; QQFQPLKILWQQQPQ; QFQPLKILWQQQPQI;
FQPLKILWQQQPQIH; QPLKILWQQQPQIHW; PLKILWQQQPQIHWQ;
LKILWQQQPQIHWQL; KILWQQQPQIHWQLG; ILWQQQPQIHWQLGP;
LWQQQPQIHWQLGPP; WQQQPQIHWQLGPPK; QQQPQIHWQLGPPKV;
QQPQIHWQLGPPKVL; QPQIHWQLGPPKVLE; PQIHWQLGPPKVLEQ;
QIHWQLGPPKVLEQH; IHWQLGPPKVLEQHP; TWKYKKKGITYLGVF;
WKYKKKGITYLGVFY; KYKKKGITYLGVFYR; YKKKGITYLGVFYRV;
KKKGITYLGVFYRVF; KKGITYLGVFYRVFY; KGITYLGVFYRVFYS;
GITYLGVFYRVFYSR; SSGTFVFPVYTVFTS; SGTFVFPVYTVFTST;
GTFVFPVYTVFTSTK; TFVFPVYTVFTSTKF; FVFPVYTVFTSTKFQ;
VFPVYTVFTSTKFQQ; FPVYTVFTSTKFQQK; PVYTVFTSTKFQQKL;
NKNKNPLSSFFCSSP; KNKNPLSSFFCSSPG; NKNPLSSFFCSSPGF;
KNPLSSFFCSSPGFT; NPLSSFFCSSPGFTN; PLSSFFCSSPGFTNF;
LSSFFCSSPGFTNFH; LGTRPRFLGSQNMSV; GTRPRFLGSQNMSVM;
TRPRFLGSQNMSVMH; RPRFLGSQNMSVMHF; PRFLGSQNMSVMHFP;
RFLGSQNMSVMHFPS; AAPPCESCTFLPEVM; APPCESCTFLPEVMV;
PPCESCTFLPEVMVW; PCESCTFLPEVMVWL; CESCTFLPEVMVWLH;
ESCTFLPEVMVWLHS; SCTFLPEVMVWLHSP; CTFLPEVMVWLHSPV;
TFLPEVMVWLHSPVS; FLPEVMVWLHSPVSH; LPEVMVWLHSPVSHA;
PEVMVWLHSPVSHAL; EVMVWLHSPVSHALS; VMVWLHSPVSHALSF;
MVWLHSPVSHALSFL; VWLHSPVSHALSFLR; WLHSPVSHALSFLRS;
LHSPVSHALSFLRSW; HSPVSHALSFLRSWF; SPVSHALSFLRSWFG;
PVSHALSFLRSWFGC; VSHALSFLRSWFGCI; SHALSFLRSWFGCIP;
HALSFLRSWFGCIPW; ALSFLRSWFGCIPWV; LSFLRSWFGCIPWVS;
SFLRSWFGCIPWVSS; FLRSWFGCIPWVSSS; LRSWFGCIPWVSSSS;
RSWFGCIPWVSSSSL; SWFGCIPWVSSSSLW; WFGCIPWVSSSSLWP;
FGCIPWVSSSSLWPF; GCIPWVSSSSLWPFF; CIPWVSSSSLWPFFL;
YIRGRGRLCLHPFSQ; IRGRGRLCLHPFSQV; RGRGRLCLHPFSQVV;
GRGRLCLHPFSQVVR; RGRLCLHPFSQVVRV; GRLCLHPFSQVVRVW;
RLCLHPFSQVVRVWR; LCLHPFSQVVRVWRL; CLHPFSQVVRVWRLF;
LHPFSQVVRVWRLFL; HPFSQVVRVWRLFLR; PFSQVVRVWRLFLRP;
FSQVVRVWRLFLRPS; SQVVRVWRLFLRPSK; QVVRVWRLFLRPSKT;
VVRVWRLFLRPSKTI; VRVWRLFLRPSKTIW; RVWRLFLRPSKTIWG;
VWRLFLRPSKTIWGN; WRLFLRPSKTIWGNP; RLFLRPSKTIWGNPY;
LFLRPSKTIWGNPYS; FLRPSKTIWGNPYSF; LRPSKTIWGNPYSFA;
RPSKTIWGNPYSFAI; PSKTIWGNPYSFAIF; SKTIWGNPYSFAIFA;
KTIWGNPYSFAIFAK

16 mers:

KSCLGKSSLNEKSLFK; SCLGKSSLNEKSLFKE; CLGKSSLNEKSLFKEV;
FSSLPRYPVLQGMAYL; SSLPRYPVLQGMAYLF; SLPRYPVLQGMAYLFQ;
LPRYPVLQGMAYLFQK; PRYPVLQGMAYLFQKA; RYPVLQGMAYLFQKAF;
YPVLQGMAYLFQKAFC; PVLQGMAYLFQKAFCA; VLQGMAYLFQKAFCAL;
LQGMAYLFQKAFCALP; QGMAYLFQKAFCALPL; GMAYLFQKAFCALPLH;
MAYLFQKAFCALPLHA; AYLFQKAFCALPLHAM; YLFQKAFCALPLHAMS;
LFQKAFCALPLHAMSA; KIFKKRALGLDRLLLH; RNSAMVGPNNWRNSLQ;
NSAMVGPNNWRNSLQR; SAMVGPNNWRNSLQRS; AMVGPNNWRNSLQRSK;
MVGPNNWRNSLQRSKA; VGPNNWRNSLQRSKAL; GPNNWRNSLQRSKALR;
VPTYGTEEWESWWSSF; PTYGTEEWESWWSSFN; TYGTEEWESWWSSFNE;
YGTEEWESWWSSFNEK; GTEEWESWWSSFNEKW; TEEWESWWSSFNEKWD;
EEWESWWSSFNEKWDE; EWESWWSSFNEKWDED; WESWWSSFNEKWDEDL;
ESWWSSFNEKWDEDLF; SWWSSFNEKWDEDLFC; WWSSFNEKWDEDLFCH;
WSSFNEKWDEDLFCHE; SSFNEKWDEDLFCHED; SFNEKWDEDLFCHEDM;
FNEKWDEDLFCHEDMF; NEKWDEDLFCHEDMFA; EKWDEDLFCHEDMFAS;
KWDEDLFCHEDMFASD; WDEDLFCHEDMFASDE; DEDLFCHEDMFASDEE;
EDLFCHEDMFASDEEA; DLFCHEDMFASDEEAT; LFCHEDMFASDEEATA;
FCHEDMFASDEEATAD; CHEDMFASDEEATADS; HEDMFASDEEATADSQ;
EDMFASDEEATADSQH; DMFASDEEATADSQHS; MFASDEEATADSQHST;
FASDEEATADSQHSTP; ASDEEATADSQHSTPP; SDEEATADSQHSTPPK;
DEEATADSQHSTPPKK; EEATADSQHSTPPKKK; EATADSQHSTPPKKKR;
ATADSQHSTPPKKKRK; TADSQHSTPPKKKRKV; ADSQHSTPPKKKRKVE;
DSQHSTPPKKKRKVED; SQHSTPPKKKRKVEDP; QHSTPPKKKRKVEDPK;
HSTPPKKKRKVEDPKD; STPPKKKRKVEDPKDF; TPPKKKRKVEDPKDFP;
PPKKKRKVEDPKDFPS; PKKKRKVEDPKDFPSD; KKKRKVEDPKDFPSDL;
KKRKVEDPKDFPSDLH; KRKVEDPKDFPSDLHQ; RKVEDPKDFPSDLHQF;
KVEDPKDFPSDLHQFL; VEDPKDFPSDLHQFLS; EDPKDFPSDLHQFLSQ;
DPKDFPSDLHQFLSQA; PKDFPSDLHQFLSQAV; KDFPSDLHQFLSQAVF;
DFPSDLHQFLSQAVFS; FPSDLHQFLSQAVFSN; PSDLHQFLSQAVFSNR;
SDLHQFLSQAVFSNRT; DLHQFLSQAVFSNRTL; LHQFLSQAVFSNRTLA;
HQFLSQAVFSNRTLAC; QFLSQAVFSNRTLACF; FLSQAVFSNRTLACFA;
LSQAVFSNRTLACFAV; SQAVFSNRTLACFAVY; QAVFSNRTLACFAVYT;
AVFSNRTLACFAVYTT; VFSNRTLACFAVYTTK; FSNRTLACFAVYTTKE;
SNRTLACFAVYTTKEK; NRTLACFAVYTTKEKA; RTLACFAVYTTKEKAQ;
TLACFAVYTTKEKAQI; LACFAVYTTKEKAQIL; ACFAVYTTKEKAQILY;
CFAVYTTKEKAQILYK; FAVYTTKEKAQILYKK; AVYTTKEKAQILYKKL;
VYTTKEKAQILYKKLM; YTTKEKAQILYKKLME; TTKEKAQILYKKLMEK;
TKEKAQILYKKLMEKY; KEKAQILYKKLMEKYS; EKAQILYKKLMEKYSV;
KAQILYKKLMEKYSVT; AQILYKKLMEKYSVTF; QILYKKLMEKYSVTFI;
ILYKKLMEKYSVTFIS; LYKKLMEKYSVTFISR; YKKLMEKYSVTFISRH;
KKLMEKYSVTFISRHM; KLMEKYSVTFISRHMC; LMEKYSVTFISRHMCA;
MEKYSVTFISRHMCAG; EKYSVTFISRHMCAGH; KYSVTFISRHMCAGHN;
YSVTFISRHMCAGHNI; SVTFISRHMCAGHNII; VTFISRHMCAGHNIIF;
TFISRHMCAGHNIIFF; FISRHMCAGHNIIFFL; ISRHMCAGHNIIFFLT;
SRHMCAGHNIIFFLTP; RHMCAGHNIIFFLTPH; HMCAGHNIIFFLTPHR;
MCAGHNIIFFLTPHRH; CAGHNIIFFLTPHRHR; AGHNIIFFLTPHRHRV;
GHNIIFFLTPHRHRVS; HNIIFFLTPHRHRVSA; NIIFFLTPHRHRVSAI;
IIFFLTPHRHRVSAIN; IFFLTPHRHRVSAINN; FFLTPHRHRVSAINNF;
FLTPHRHRVSAINNFC; LTPHRHRVSAINNFCQ; TPHRHRVSAINNFCQK;
PHRHRVSAINNFCQKL; HRHRVSAINNFCQKLC; RHRVSAINNFCQKLCT;
HRVSAINNFCQKLCTF; RVSAINNFCQKLCTFS; VSAINNFCQKLCTFSF;
SAINNFCQKLCTFSFL; AINNFCQKLCTFSFLI; INNFCQKLCTFSFLIC;
NNFCQKLCTFSFLICK; NFCQKLCTFSFLICKG; FCQKLCTFSFLICKGV;
CQKLCTFSFLICKGVN; QKLCTFSFLICKGVNK; KLCTFSFLICKGVNKE;
LCTFSFLICKGVNKEY; CTFSFLICKGVNKEYL; TFSFLICKGVNKEYLL;
FSFLICKGVNKEYLLY; SFLICKGVNKEYLLYS; FLICKGVNKEYLLYSA;
LICKGVNKEYLLYSAL; ICKGVNKEYLLYSALT; CKGVNKEYLLYSALTR;
KGVNKEYLLYSALTRD; GVNKEYLLYSALTRDP; VNKEYLLYSALTRDPY;
NKEYLLYSALTRDPYH; KEYLLYSALTRDPYHT; EYLLYSALTRDPYHTI;
YLLYSALTRDPYHTIE; LLYSALTRDPYHTIEE; LYSALTRDPYHTIEES;
YSALTRDPYHTIEESI; SALTRDPYHTIEESIQ; ALTRDPYHTIEESIQG;
LTRDPYHTIEESIQGG; TRDPYHTIEESIQGGL; RDPYHTIEESIQGGLK;
DPYHTIEESIQGGLKE; PYHTIEESIQGGLKEH; YHTIEESIQGGLKEHD;
HTIEESIQGGLKEHDF; TIEESIQGGLKEHDFS; IEESIQGGLKEHDFSP;
EESIQGGLKEHDFSPE; ESIQGGLKEHDFSPEE; SIQGGLKEHDFSPEEP;
IQGGLKEHDFSPEEPE; QGGLKEHDFSPEEPEE; GGLKEHDFSPEEPEET;
GLKEHDFSPEEPEETK; LKEHDFSPEEPEETKQ; KEHDFSPEEPEETKQV;
EHDFSPEEPEETKQVS; HDFSPEEPEETKQVSW; DFSPEEPEETKQVSWK;
FSPEEPEETKQVSWKL; SPEEPEETKQVSWKLI; PEEPEETKQVSWKLIT;
EEPEETKQVSWKLITE; EPEETKQVSWKLITEY; PEETKQVSWKLITEYA;
EETKQVSWKLITEYAV; ETKQVSWKLITEYAVE; TKQVSWKLITEYAVET;
KQVSWKLITEYAVETK; QVSWKLITEYAVETKC; VSWKLITEYAVETKCE;
SWKLITEYAVETKCED; WKLITEYAVETKCEDV; KLITEYAVETKCEDVF;
LITEYAVETKCEDVFL; ITEYAVETKCEDVFLL; TEYAVETKCEDVFLLL;
EYAVETKCEDVFLLLG; YAVETKCEDVFLLLGM; AVETKCEDVFLLLGMY;
VETKCEDVFLLLGMYL; ETKCEDVFLLLGMYLE; TKCEDVFLLLGMYLEF;
KCEDVFLLLGMYLEFQ; CEDVFLLLGMYLEFQY; EDVFLLLGMYLEFQYN;
DVFLLLGMYLEFQYNV; VFLLLGMYLEFQYNVE; FLLLGMYLEFQYNVEE;
LLLGMYLEFQYNVEEC; LLGMYLEFQYNVEECK; LGMYLEFQYNVEECKK;
GMYLEFQYNVEECKKC; MYLEFQYNVEECKKCQ; YLEFQYNVEECKKCQK;
LEFQYNVEECKKCQKK; EFQYNVEECKKCQKKD; FQYNVEECKKCQKKDQ;
QYNVEECKKCQKKDQP; YNVEECKKCQKKDQPY; NVEECKKCQKKDQPYH;
VEECKKCQKKDQPYHF; EECKKCQKKDQPYHFK; ECKKCQKKDQPYHFKY;
CKKCQKKDQPYHFKYH; KKCQKKDQPYHFKYHE; KCQKKDQPYHFKYHEK;
CQKKDQPYHFKYHEKH; QKKDQPYHFKYHEKHF; KKDQPYHFKYHEKHFA;
KDQPYHFKYHEKHFAN; DQPYHFKYHEKHFANA; QPYHFKYHEKHFANAI;
PYHFKYHEKHFANAII; YHFKYHEKHFANAIIF; HFKYHEKHFANAIIFA;
FKYHEKHFANAIIFAE; KYHEKHFANAIIFAES; YHEKHFANAIIFAESK;
HEKHFANAIIFAESKN; EKHFANAIIFAESKNQ; KHFANAIIFAESKNQK;
HFANAIIFAESKNQKS; FANAIIFAESKNQKSI; ANAIIFAESKNQKSIC;
NAIIFAESKNQKSICQ; AIIFAESKNQKSICQQ; IIFAESKNQKSICQQA;
IFAESKNQKSICQQAV; FAESKNQKSICQQAVD; AESKNQKSICQQAVDT;
ESKNQKSICQQAVDTV; SKNQKSICQQAVDTVL; KNQKSICQQAVDTVLA;
NQKSICQQAVDTVLAK; QKSICQQAVDTVLAKK; KSICQQAVDTVLAKKR;
SICQQAVDTVLAKKRV; ICQQAVDTVLAKKRVD; CQQAVDTVLAKKRVDT;
QQAVDTVLAKKRVDTL; QAVDTVLAKKRVDTLH; AVDTVLAKKRVDTLHM;
VDTVLAKKRVDTLHMT; DTVLAKKRVDTLHMTR; TVLAKKRVDTLHMTRE;
VLAKKRVDTLHMTREE; LAKKRVDTLHMTREEM; AKKRVDTLHMTREEML;
KKRVDTLHMTREEMLT; KRVDTLHMTREEMLTE; RVDTLHMTREEMLTER;
VDTLHMTREEMLTERF; DTLHMTREEMLTERFN; TLHMTRFEMLTERFNH;
LHMTREEMLTERFNHI; HMTREEMLTERFNHIL; MTREEMLTERFNHILD;
TREEMLTERFNHILDK; REEMLTERFNHILDKM; EEMLTERFNHILDKMD;
EMLTERFNHILDKMDL; MLTERFNHILDKMDLI; LTERFNHILDKMDLIF;
TERFNHILDKMDLIFG; ERFNHILDKMDLIFGA; RFNHILDKMDLIFGAH;
FNHILDKMDLIFGAHG; NHILDKMDLIFGAHGN; HILDKMDLIFGAHGNA;
ILDKMDLIFGAHGNAV; LDKMDLIFGAHGNAVL; DKMDLIFGAHGNAVLE;
KMDLIFGAHGNAVLEQ; MDLIFGAHGNAVLEQY; DLIFGAHGNAVLEQYM;
LIFGAHGNAVLEQYMA; IFGAHGNAVLEQYMAG; FGAHGNAVLEQYMAGV;
GAHGNAVLEQYMAGVA; AHGNAVLEQYMAGVAW; HGNAVLEQYMAGVAWL;
GNAVLEQYMAGVAWLH; NAVLEQYMAGVAWLHC; AVLEQYMAGVAWLHCL;
VLEQYMAGVAWLHCLL; LEQYMAGVAWLHCLLP; EQYMAGVAWLHCLLPK;
QYMAGVAWLHCLLPKM; YMAGVAWLHCLLPKMD; MAGVAWLHCLLPKMDS;
AGVAWLHCLLPKMDSV; GVAWLHCLLPKMDSVI; VAWLHCLLPKMDSVIF;
AWLHCLLPKMDSVIFD; WLHCLLPKMDSVIFDF; LHCLLPKMDSVIFDFL;
HCLLPKMDSVIFDFLH; CLLPKMDSVIFDFLHC; LLPKMDSVIFDFLHCI;
LPKMDSVIFDFLHCIV; PKMDSVIFDFLHCIVF; KMDSVIFDFLHCIVFN;
MDSVIFDFLHCIVFNV; DSVIFDFLHCIVFNVP; SVIFDFLHCIVFNVPK;
VIFDFLHCIVFNVPKR; IFDFLHCIVFNVPKRR; FDFLHCIVFNVPKRRY;
DFLHCIVFNVPKRRYW; FLHCIVFNVPKRRYWL; LHCIVFNVPKRRYWLF;
HCIVFNVPKRRYWLFK; CIVFNVPKRRYWLFKG; IVFNVPKRRYWLFKGP;
VFNVPKRRYWLFKGPI; FNVPKRRYWLFKGPID; NVPKRRYWLFKGPIDS;
VPKRRYWLFKGPIDSG; PKRRYWLFKGPIDSGK; KRRYWLFKGPIDSGKT;
RRYWLFKGPIDSGKTT; RYWLFKGPIDSGKTTL; YWLFKGPIDSGKTTLA;
WLFKGPIDSGKTTLAA; LFKGPIDSGKTTLAAG; FKGPIDSGKTTLAAGL;
KGPIDSGKTTLAAGLL; GPIDSGKTTLAAGLLD; PIDSGKTTLAAGLLDL;
IDSGKTTLAAGLLDLC; DSGKTTLAAGLLDLCG; SGKTTLAAGLLDLCGG;
GKTTLAAGLLDLCGGK; KTTLAAGLLDLCGGKA; TTLAAGLLDLCGGKAL;
TLAAGLLDLCGGKALN; LAAGLLDLCGGKALNV; AAGLLDLCGGKALNVN;
AGLLDLCGGKALNVNL; GLLDLCGGKALNVNLP; LLDLCGGKALNVNLPM;
LDLCGGKALNVNLPME; DLCGGKALNVNLPMER; LCGGKALNVNLPMERL;
CGGKALNVNLPMERLT; GGKALNVNLPMERLTF; GKALNVNLPMERLTFE;
KALNVNLPMERLTFEL; ALNVNLPMERLTFELG; LNVNLPMERLTFELGV;
NVNLPMERLTFELGVA; VNLPMERLTFELGVAI; NLPMERLTFELGVAID;
LPMERLTFELGVAIDQ; PMERLTFELGVAIDQY; MERLTFELGVAIDQYM;
ERLTFELGVAIDQYMV; RLTFELGVAIDQYMVV; LTFELGVAIDQYMVVF;
TFELGVAIDQYMVVFE; FELGVAIDQYMVVFED; ELGVAIDQYMVVFEDV;
LGVAIDQYMVVFEDVK; GVAIDQYMVVFEDVKG; VAIDQYMVVFEDVKGT;
AIDQYMVVFEDVKGTG; IDQYMVVFEDVKGTGA; DQYMVVFEDVKGTGAE;
QYMVVFEDVKGTGAES; YMVVFEDVKGTGAESK; MVVFEDVKGTGAESKD;
VVFEDVKGTGAESKDL; VFEDVKGTGAESKDLP; FEDVKGTGAESKDLPS;
EDVKGTGAESKDLPSG; DVKGTGAESKDLPSGH; VKGTGAESKDLPSGHG;
KGTGAESKDLPSGHGI; GTGAESKDLPSGHGIN; TGAESKDLPSGHGINN;
GAESKDLPSGHGINNL; AESKDLPSGHGINNLD; ESKDLPSGHGINNLDS;
SKDLPSGHGINNLDSL; KDLPSGHGINNLDSLR; DLPSGHGINNLDSLRD;
LPSGHGINNLDSLRDY; PSGHGINNLDSLRDYL; SGHGINNLDSLRDYLD;
GHGINNLDSLRDYLDG; HGINNLDSLRDYLDGS; GINNLDSLRDYLDGSV;
INNLDSLRSYLDGSVK; NNLDSLRDYLDGSVKV; NLDSLRDYLDGSVKVN;
LDSLRDYLDGSVKVNL; DSLRDYLDGSVKVNLE; SLRDYLDGSVKVNLEK;
LRDYLDGSVKVNLEKK; RDYLDGSVKVNLEKKH; DYLDGSVKVNLEKKHL;
YLDGSVKVNLEKKHLN; LDGSVKVNLEKKHLNK; DGSVKVNLEKKHLNKR;
GSVKVNLEKKHLNKRT; SVKVNLEKKHLNKRTQ; VKVNLEKKHLNKRTQI;
KVNLEKKHLNKRTQIF; VNLEKKHLNKRTQIFP; NLEKKHLNKRTQIFPP;
LEKKHLNKRTQIFPPG; EKKHLNKRTQIFPPGL; KKHLNKRTQIFPPGLV;
KHLNKRTQIFPPGLVT; HLNKRTQIFPPGLVTM; LNKRTQIFPPGLVTMN;
NKRTQIFPPGLVTMNE; KRTQIFPPGLVTMNEY; RTQIFPPGLVTMNEYP;
TQIFPPGLVTMNEYPV; QIFPPGLVTMNEYPVP; IFPPGLVTMNEYPVPK;
FPPGLVTMNEYPVPKT; PPGLVTMNEYPVPKTL; PGLVTMNEYPVPKTLQ;
GLVTMNEYPVPKTLQA; LVTMNEYPVPKTLQAR; VTMNEYPVPKTLQARF;
TMNEYPVPKTLQARFV; MNEYPVPKTLQARFVR; NEYPVPKTLQARFVRQ;
EYPVPKTLQARFVRQI; YPVPKTLQARFVRQID; PVPKTLQARFVRQIDF;
VPKTLQARFVRQIDFR; PKTLQARFVRQIDFRP; KTLQARFVRQIDFRPK;
TLQARFVRQIDFRPKI; LQARFVRQIDFRPKIY; QARFVRQIDFRPKIYL;
ARFVRQIDFRPKIYLR; RFVRQIDFRPKIYLRK; FVRQIDFRPKIYLRKS;
VRQIDFRPKIYLRKSL; RQIDFRPKIYLRKSLQ; QIDFRPKIYLRKSLQN;
IDFRPKIYLRKSLQNS; DFRPKIYLRKSLQNSE; FRPKIYLRKSLQNSEF;
RPKIYLRKSLQNSEFL; PKIYLRKSLQNSEFLL; KIYLRKSLQNSEFLLE;
IYLRKSLQNSEFLLEK; YLRKSLQNSEFLLEKR; LRKSLQNSEFLLEKRI;
RKSLQNSEFLLEKRIL; KSLQNSEFLLEKRILQ; SLQNSEFLLEKRILQS;
LQNSEFLLEKRILQSG; QNSEFLLEKRILQSGM; NSEFLLEKRILQSGMT;
SEFLLEKRILQSGMTL; EFLLEKRILQSGMTLL; FLLEKRILQSGMTLLL;
LLEKRILQSGMTLLLL; LEKRILQSGMTLLLLL; EKRILQSGMTLLLLLI;
KRILQSGMTLLLLLIW; RILQSGMTLLLLLIWF; ILQSGMTLLLLLIWFR;
LQSGMTLLLLLIWFRP; QSGMTLLLLLIWFRPV; SGMTLLLLLIWFRPVA;
GMTLLLLLIWFRPVAD; MTLLLLLIWFRPVADF; TLLLLLIWFRPVADFA;
LLLLLIWFRPVADFAT; LLLLIWFRPVADFATD; LLLIWFRPVADFATDI;
LLIWFRPVADFATDIQ; LIWFRPVADFATDIQS; IWFRPVADFATDIQSR;
WFRPVADFATDIQSRI; FRPVADFATDIQSRIV; RPVADFATDIQSRIVE;
PVADFATDIQSRIVEW; VADFATDIQSRIVEWK; ADFATDIQSRIVEWKE;
DFATDIQSRIVEWKER; FATDIQSRIVEWKERL; ATDIQSRIVEWKERLD;
TDIQSRIVEWKERLDS; DIQSRIVEWKERLDSE; IQSRIVEWKERLDSEI;
QSRIVEWKERLDSEIS; SRIVEWKERLDSEISM; RIVEWKERLDSEISMY;
IVEWKERLDSEISMYT; VEWKERLDSEISMYTF; EWKERLDSEISMYTFS;
WKERLDSEISMYTFSR; KERLDSEISMYTFSRM; ERLDSEISMYTFSRMK;
RLDSEISMYTFSRMKY; LDSEISMYTFSRMKYN; DSEISMYTFSRMKYNI;
SEISMYTFSRMKYNIC; EISMYTFSRMKYNICM; ISMYTFSRMKYNICMG;
SMYTFSRMKYNICMGK; MYTFSRMKYNICMGKC; YTFSRMKYNICMGKCI;
TFSRMKYNICMGKCIL; FSRMKYNICMGKCILD; SRMKYNICMGKCILDI;
RMKYNICMGKCILDIT; MKYNICMGKCILDITR; KYNICMGKCILDITRE;
YNICMGKCILDITREE; NICMGKCILDITREED; ICMGKCILDITREEDS;
CMGKCILDITREEDSE; MGKCILDITREEDSET; GKCILDITREEDSETE;
KCILDITREEDSETED; CILDITREEDSETEDS; ILDITREEDSETEDSG;
LDITREEDSETEDSGH; DITREEDSETEDSGHG; ITREEDSETEDSGHGS;
TREEDSETEDSGHGSS; REEDSETEDSGHGSST; EEDSETEDSGHGSSTE;
EDSETEDSGHGSSTES; DSETEDSGHGSSTESQ; SETEDSGHGSSTESQS;
ETEDSGHGSSTESQSQ; TEDSGHGSSTESQSQC; EDSGHGSSTESQSQCS;
DSGHGSSTESQSQCSS; SGHGSSTESQSQCSSQ; GHGSSTESQSQCSSQV;
HGSSTESQSQCSSQVS; GSSTESQSQCSSQVSD; SSTESQSQCSSQVSDT;
STESQSQCSSQVSDTS; TESQSQCSSQVSDTSA; ESQSQCSSQVSDTSAP;
SQSQCSSQVSDTSAPA; QSQCSSQVSDTSAPAE; SQCSSQVSDTSAPAED;
QCSSQVSDTSAPAEDS; CSSQVSDTSAPAEDSQ; SSQVSDTSAPAEDSQR;
SQVSDTSAPAEDSQRS; QVSDTSAPAEDSQRSD; VSDTSAPAEDSQRSDP;
SDTSAPAEDSQRSDPH; DTSAPAEDSQRSDPHS; TSAPAEDSQRSDPHSQ;
SAPAEDSQRSDPHSQE; APAEDSQRSDPHSQEL; PAEDSQRSDPHSQELH;
AEDSQRSDPHSQELHL; EDSQRSDPHSQELHLC; DSQRSDPHSQELHLCK;
SQRSDPHSQELHLCKG; QRSDPHSQELHLCKGF; RSDPHSQELHLCKGFQ;
SDPHSQELHLCKGFQC; DPHSQELHLCKGFQCF; PHSQELHLCKGFQCFK;
HSQELHLCKGFQCFKR; SQELHLCKGFQCFKRP; QELHLCKGFQCFKRPK;
ELHLCKGFQCFKRPKT; LHLCKGFQCFKRPKTP; HLCKGFQCFKRPKTPP;
LCKGFQCFKRPKTPPP; CKGFQCFKRPKTPPPK; MYMYNKSTCLKHFGLQ;
YMYNKSTCLKHFGLQL; MYNKSTCLKHFGLQLS; YNKSTCLKHFGLQLSL;
NKSTCLKHFGLQLSLF; KSTCLKHFGLQLSLFV; STCLKHFGLQLSLFVN;
TCLKHFGLQLSLFVNI; CLKHFGLQLSLFVNIS; LKHFGLQLSLFVNISY;
KHFGLQLSLFVNISYH; HFGLQLSLFVNISYHI; FGLQLSLFVNISYHIW;
GLQLSLFVNISYHIWV; LQLSLFVNISYHIWVP; QLSLFVNISYHIWVPW;
LSLFVNISYHIWVPWK; SLFVNISYHIWVPWKS; LFVNISYHIWVPWKSF;
FVNISYHIWVPWKSFC; VNISYHIWVPWKSFCA; NISYHIWVPWKSFCAI;
ISYHIWVPWKSFCAIK; SYHIWVPWKSFCAIKH; YHIWVPWKSFCAIKHP;
HIWVPWKSFCAIKHPN; IWVPWKSFCAIKHPNL; WVPWKSFCAIKHPNLF;
VPWKSFCAIKHPNLFY; PWKSFCAIKHPNLFYL; WKSFCAIKHPNLFYLG;
KSFCAIKHPNLFYLGF; SFCAIKHPNLFYLGFH; FCAIKHPNLFYLGFHT;
CAIKHPNLFYLGFHTI; AIKHPNLFYLGFHTIH; IKHPNLFYLGFHTIHR;
KHPNLFYLGFHTIHRL; HPNLFYLGFHTIHRLP; PNLFYLGFHTIHRLPI;
NLFYLGFHTIHRLPIH; LFYLGFHTIHRLPIHS; FYLGFHTIHRLPIHSL;
YLGFHTIHRLPIHSLG; LGFHTIHRLPIHSLGS; GFHTIHRLPIHSLGSP;
FHTIHRLPIHSLGSPV; HTIHRLPIHSLGSPVY; TIHRLPIHSLGSPVYK;
IHRLPIHSLGSPVYKV; HRLPIHSLGSPVYKVT; QKGNWVRILYRSFSQA;
KGNWVRILYRSFSQAD; GNWVRILYRSFSQADL; NWVRILYRSFSQADLK;
WVRILYRSFSQADLKI; VRILYRSFSQADLKIS; RILYRSFSQADLKISC;
ILYRSFSQADLKISCK; LYRSFSQADLKISCKA; YRSFSQADLKISCKAS;
RSFSQADLKISCKASP; SFSQADLKISCKASPL; FSQADLKISCKASPLL;
SQADLKISCKASPLLC; QADLKISCKASPLLCS; ADLKISCKASPLLCSR;
DLKISCKASPLLCSRA; LKISCKASPLLCSRAV; KISCKASPLLCSRAVS;
ISCKASPLLCSRAVSK; SCKASPLLCSRAVSKQ; CKASPLLCSRAVSKQA;
KASPLLCSRAVSKQAT; ASPLLCSRAVSKQATN; SPLLCSRAVSKQATNI;
PLLCSRAVSKQATNIS; LLCSRAVSKQATNISS; NIQAISFTKRPHTLFI;
QHCGSCVGHMKYWGNI; HCGSCVGHMKYWGNIF; CGSCVGHMKYWGNIFP;
GSCVGHMKYWGNIFPS; SCVGHMKYWGNIFPSC; CVGHMKYWGNIFPSCE;
VGHMKYWGNIFPSCES; GHMKYWGNIFPSCESP; HMKYWGNIFPSCESPK;
MKYWGNIFPSCESPKI; KYWGNIFPSCESPKIP; YWGNIFPSCESPKIPS;
WGNIFPSCESPKIPSI; GNIFPSCESPKIPSIF; NIFPSCESPKIPSIFI; IFPSCESPKIPSIFIS;
FPSCESPKIPSIFIST; PSCESPKIPSIFISTG; SCESPKIPSIFISTGI; CESPKIPSIFISTGIR;
ESPKIPSIFISTGIRY; SPKIPSIFISTGIRYP; PKIPSIFISTGIRYPA; KIPSIFISTGIRYPAL;
IPSIFISTGIRYPALN; PSIFISTGIRYPALNW; SIFISTGIRYPALNWI;
IFISTGIRYPALNWIS; FISTGIRYPALNWISI; ISTGIRYPALNWISIV;
STGIRYPALNWISIVF; TGIRYPALNWISIVFV; GIRYPALNWISIVFVQ;
IRYPALNWISIVFVQI; RYPALNWISIVFVQIG; YPALNWISIVFVQIGL;
PALNWISIVFVQIGLM; ALNWISIVFVQIGLMV; LNWISIVFVQIGLMVS;
NWISIVFVQIGLMVSI; WISIVFVQIGLMVSIH; ISIVFVQIGLMVSIHY;
SIVFVQIGLMVSIHYL; IVFVQIGLMVSIHYLG; VFVQIGLMVSIHYLGL;
FVQIGLMVSIHYLGLG; VQIGLMVSIHYLGLGC; QIGLMVSIHYLGLGCW;
IGLMVSIHYLGLGCWV; GLMVSIHYLGLGCWVF; LMVSIHYLGLGCWVFR;
MVSIHYLGLGCWVFRG; VSIHYLGLGCWVFRGY; SIHYLGLGCWVFRGYS;
IHYLGLGCWVFRGYST; HYLGLGCWVFRGYSTI; YLGLGCWVFRGYSTIR;
LGLGCWVFRGYSTIRV; GLGCWVFRGYSTIRVL; HSLHFQGFSTYSKEVE;
SLHFQGFSTYSKEVEI; LHFQGFSTYSKEVEIT; HFQGFSTYSKEVEITA;
FQGFSTYSKEVEITAL; QGFSTYSKEVEITALN; GFSTYSKEVEITALNR;
FSTYSKEVEITALNRF; STYSKEVEITALNRFS; TYSKEVEITALNRFSS;
YSKEVEITALNRFSST; SKEVEITALNRFSSTM; KEVEITALNRFSSTML;
EVEITALNRFSSTMLM; VEITALNRFSSTMLMH; EITALNRFSSTMLMHF;
ITALNRFSSTMLMHFL; PCMKVKHASYSNNLCL; CMKVKHASYSNNLCLY;
MKVKHASYSNNLCLYS; KVKHASYSNNLCLYSY; VKHASYSNNLCLYSYS;
KHASYSNNLCLYSYSL; HASYSNNLCLYSYSLP; ASYSNNLCLYSYSLPH;
SYSNNLCLYSYSLPHQ; IGEGNSCCAVTGKHFS; GEGNSCCAVTGKHFSL;
EGNSCCAVTGKHFSLW; GNSCCAVTGKHFSLWA; NSCCAVTGKHFSLWAI;
SCCAVTGKHFSLWAIT; CCAVTGKHFSLWAITA; CAVTGKHFSLWAITAK;
AVTGKHFSLWAITAKV; VTGKHFSLWAITAKVI; TGKHFSLWAITAKVIF;
GKHFSLWAITAKVIFS; KHFSLWAITAKVIFST; FWHLHGFLWLFGSCPW;
WHLHGFLWLFGSCPWT; HLHGFLWLFGSCPWTL; LHGFLWLFGSCPWTLS;
HGFLWLFGSCPWTLSF; GFLWLFGSCPWTLSFS; FLWLFGSCPWTLSFSF;
LWLFGSCPWTLSFSFG; WLFGSCPWTLSFSFGW; LFGSCPWTLSFSFGWG;
FGSCPWTLSFSFGWGH; GSCPWTLSFSFGWGHL; SCPWTLSFSFGWGHLH;
CPWTLSFSFGWGHLHM; PWTLSFSFGWGHLHML; WTLSFSFGWGHLHMLQ;
TLSFSFGWGHLHMLQE; LSFSFGWGHLHMLQEQ; SFSFGWGHLHMLQEQV;
FSFGWGHLHMLQEQVL; SFGWGHLHMLQEQVLQ; FGWGHLHMLQEQVLQS;
GWGHLHMLQEQVLQSR; WGHLHMLQEQVLQSRT; GHLHMLQEQVLQSRTG;
HLHMLQEQVLQSRTGL; LHMLQEQVLQSRTGLE; HMLQEQVLQSRTGLEV;
MLQEQVLQSRTGLEVK; LQEQVLQSRTGLEVKA; QEQVLQSRTGLEVKAT;
EQVLQSRTGLEVKATS; QVLQSRTGLEVKATSI; VLQSRTGLEVKATSIE;
LQSRTGLEVKATSIEE; QSRTGLEVKATSIEEQ; SRTGLEVKATSIEEQF;
RTGLEVKATSIEEQFF; TGLEVKATSIEEQFFD; TLLNVHFVDFLSPFFV;
LLLYCQHHLYYKYGQN; LLYCQHHLYYKYGQNV; LYCQHHLYYKYGQNVH;
YCQHHLYYKYGQNVHG; CQHHLYYKYGQNVHGY; QHHLYYKYGQNVHGYL;
HHLYYKYGQNVHGYLP; HLYYKYGQNVHGYLPF; LYYKYGQNVHGYLPFQ;
YYKYGQNVHGYLPFQL; YKYGQNVHGYLPFQLL; KYGQNVHGYLPFQLLV;
QKYLHQETEYHSTHLG; TIPKPCLIADRGLQWK; IPKPCLIADRGLQWKL;
PKPCLIADRGLQWKLC; KPCLIADRGLQWKLCD; PCLIADRGLQWKLCDP;
CLIADRGLQWKLCDPN; LIADRGLQWKLCDPNH; IADRGLQWKLCDPNHQ;
ADRGLQWKLCDPNHQR; DRGLQWKLCDPNHQRT; RGLQWKLCDPNHQRTY;
GLQWKLCDPNHQRTYT; LQWKLCDPNHQRTYTL; QWKLCDPNHQRTYTLL;
WKLCDPNHQRTYTLLE; KLCDPNHQRTYTLLEL; LCDPNHQRTYTLLELR;
CDPNHQRTYTLLELRN; PQEHQQLQHMFEELGL; QQQPPQQQFQPLKILW;
QQPPQQQFQPLKILWQ; QPPQQQFQPLKILWQQ; PPQQQFQPLKILWQQQ;
PQQQFQPLKILWQQQP; QQQFQPLKILWQQQPQ; QQFQPLKILWQQQPQI;
QFQPLKILWQQQPQIH; FQPLKILWQQQPQIHW; QPLKILWQQQPQIHWQ;
PLKILWQQQPQIHWQL; LKILWQQQPQIHWQLG; KILWQQQPQIHWQLGP;
ILWQQQPQIHWQLGPP; LWQQQPQIHWQLGPPK; WQQQPQIHWQLGPPKV;
QQQPQIHWQLGPPKVL; QQPQIHWQLGPPKVLE; QPQIHWQLGPPKVLEQ;
PQIHWQLGPPKVLEQH; QIHWQLGPPKVLEQHP; TWKYKKKGITYLGVFY;
WKYKKKGITYLGVFYR; KYKKKGITYLGVFYRV; YKKKGITYLGVFYRVF;
KKKGITYLGVFYRVFY; KKGITYLGVFYRVFYS; KGITYLGVFYRVFYSR;
SSGTFVFPVYTVFTST; SGTFVFPVYTVFTSTK; GTFVFPVYTVFTSTKF;
TFVFPVYTVFTSTKFQ; FVFPVYTVFTSTKFQQ; VFPVYTVFTSTKFQQK;
FPVYTVFTSTKFQQKL; NKNKNPLSSFFCSSPG; KNKNPLSSFFCSSPGF;
NKNPLSSFFCSSPGFT; KNPLSSFFCSSPGFTN; NPLSSFFCSSPGFTNF;
PLSSFFCSSPGFTNFH; LGTRPRFLGSQNMSVM; GTRPRFLGSQNMSVMH;
TRPRFLGSQNMSVMHF; RPRFLGSQNMSVMHFP; PRFLGSQNMSVMHFPS;
AAPPCESCTFLPEVMV; APPCESCTFLPEVMVW; PPCESCTFLPEVMVWL;
PCESCTFLPEVMVWLH; CESCTFLPEVMVWLHS; ESCTFLPEVMVWLHSP;
SCTFLPEVMVWLHSPV; CTFLPEVMVWLHSPVS; TFLPEVMVWLHSPVSH;
FLPEVMVWLHSPVSHA; LPEVMVWLHSPVSHAL; PEVMVWLHSPVSHALS;
EVMVWLHSPVSHALSF; VMVWLHSPVSHALSFL; MVWLHSPVSHALSFLR;
VWLHSPVSHALSFLRS; WLHSPVSHALSFLRSW; LHSPVSHALSFLRSWF;
HSPVSHALSFLRSWFG; SPVSHALSFLRSWFGC; PVSHALSFLRSWFGCI;
VSHALSFLRSWFGCIP; SHALSFLRSWFGCIPW; HALSFLRSWFGCIPWV;
ALSFLRSWFGCIPWVS; LSFLRSWFGCIPWVSS; SFLRSWFGCIPWVSSS;
FLRSWFGCIPWVSSSS; LRSWFGCIPWVSSSSL; RSWFGCIPWVSSSSLW;
SWFGCIPWVSSSSLWP; WFGCIPWVSSSSLWPF; FGCIPWVSSSSLWPFF;
GCIPWVSSSSLWPFFL; YIRGRGRLCLHPFSQV; IRGRGRLCLHPFSQVV;
RGRGRLCLHPFSQVVR; GRGRLCLHPFSQVVRV; RGRLCLHPFSQVVRVW;
GRLCLHPFSQVVRVWR; RLCLHPFSQVVRVWRL; LCLHPFSQVVRVWRLF;
CLHPFSQVVRVWRLFL; LHPFSQVVRVWRLFLR; HPFSQVVRVWRLFLRP;
PFSQVVRVWRLFLRPS; FSQVVRVWRLFLRPSK; SQVVRVWRLFLRPSKT;
QVVRVWRLFLRPSKTI; VVRVWRLFLRPSKTIW; VRVWRLFLRPSKTIWG;
RVWRLFLRPSKTIWGN; VWRLFLRPSKTIWGNP; WRLFLRPSKTIWGNPY;
RLFLRPSKTIWGNPYS; LFLRPSKTIWGNPYSF; FLRPSKTIWGNPYSFA;
LRPSKTIWGNPYSFAI; RPSKTIWGNPYSFAIF; PSKTIWGNPYSFAIFA;
SKTIWGNPYSFAIFAK

[0903] Preferred BK virus fragments of VP2-3 capable of interacting with one or more MHC class 2 molecules are listed in Table P.

TABLE P

Prediction of BK virus VP2-3 protein specific MHC class 2, 15-mer
peptide binders for 14 MHC class 2 alleles (see FIG. 11) using the
http://www.cbs.dtu.dk/services/NetMHCII/ database. The MHC
class 2 molecules for which no binders were found are not listed.

| | | | | | |
|---|---|---|---|---|---|
| Allele | pos | peptide | core | 1-log50k(aff) aff(nM) | B.L. Identity |

| | | | | | |
|---|---|---|---|---|---|
| DRB1_0101 | 36 | AAIEVQIASLATVEG VQIASLATV | 0.7655 | 13 | SB BK VP2-3 |
| DRB1_0101 | 37 | AIEVQIASLATVEGI IASLATVEG | 0.7653 | 13 | SB BK VP2-3 |
| DRB1_0101 | 38 | IEVQIASLATVEGIT IASLATVEG | 0.7535 | 14 | SB BK VP2-3 |
| DRB1_0101 | 39 | EVQIASLATVEGITT IASLATVEG | 0.7419 | 16 | SB BK VP2-3 |
| DRB1_0101 | 216 | QDYYSNLSPIRPSMV YSNLSPIRP | 0.7369 | 17 | SB BK VP2-3 |
| DRB1_0101 | 258 | VTQRMDLRNKESVHS VTQRMDLRN | 0.7362 | 17 | SB BK VP2-3 |
| DRB1_0101 | 259 | TQRMDLRNKESVHSG LRNKESVHS | 0.7390 | 17 | SB BK VP2-3 |
| DRB1_0101 | 260 | QRMDLRNKESVHSGE LRNKESVHS | 0.7399 | 17 | SB BK VP2-3 |
| DRB1_0101 | 261 | RMDLRNKESVHSGEF LRNKESVHS | 0.7383 | 17 | SB BK VP2-3 |
| DRB1_0101 | 262 | MDLRNKESVHSGEFI LRNKESVHS | 0.7362 | 17 | SB BK VP2-3 |
| DRB1_0101 | 217 | DYYSNLSPIRPSMVR YSNLSPIRP | 0.7308 | 18 | SB BK VP2-3 |
| DRB1_0101 | 82 | AALIQTVTGISSLAQ IQTVTGISS | 0.7316 | 18 | SB BK VP2-3 |
| DRB1_0101 | 83 | ALIQTVTGISSLAQV VTGISSLAQ | 0.7288 | 19 | SB BK VP2-3 |
| DRB1_0101 | 40 | VQIASLATVEGITTT IASLATVEG | 0.7231 | 20 | SB BK VP2-3 |
| DRB1_0101 | 66 | QTYAVIAGAPGAIAG IAGAPGAIA | 0.7250 | 20 | SB BK VP2-3 |
| DRB1_0101 | 65 | PQTYAVIAGAPGAIA VIAGAPGAI | 0.7203 | 21 | SB BK VP2-3 |
| DRB1_0101 | 67 | TYAVIAGAPGAIAGF IAGAPGAIA | 0.7196 | 21 | SB BK VP2-3 |
| DRB1_0101 | 68 | YAVIAGAPGAIAGFA IAGAPGAIA | 0.7188 | 21 | SB BK VP2-3 |
| DRB1_0101 | 213 | NYIQDYYSNLSPIRP YYSNLSPIR | 0.7087 | 23 | SB BK VP2-3 |
| DRB1_0101 | 214 | YIQDYYSNLSPIRPS YSNLSPIRP | 0.7104 | 23 | SB BK VP2-3 |
| DRB1_0101 | 215 | IQDYYSNLSPIRPSM YSNLSPIRP | 0.7116 | 23 | SB BK VP2-3 |
| DRB1_0101 | 219 | YSNLSPIRPSMVRQV YSNLSPIRP | 0.7018 | 25 | SB BK VP2-3 |
| DRB1_0101 | 84 | LIQTVTGISSLAQVG VTGISSLAQ | 0.7012 | 25 | SB BK VP2-3 |
| DRB1_0101 | 69 | AVIAGAPGAIAGFAA IAGAPGAIA | 0.6972 | 26 | SB BK VP2-3 |
| DRB1_0101 | 85 | IQTVTGISSLAQVGY VTGISSLAQ | 0.7004 | 26 | SB BK VP2-3 |
| DRB1_0101 | 24 | FSVAEIAAGEAAAAI IAAGEAAAA | 0.6947 | 27 | SB BK VP2-3 |
| DRB1_0101 | 26 | VAEIAAGEAAAAIEV IAAGEAAAA | 0.6967 | 27 | SB BK VP2-3 |
| DRB1_0101 | 27 | AEIAAGEAAAAIEVQ IAAGEAAAA | 0.6963 | 27 | SB BK VP2-3 |
| DRB1_0101 | 25 | SVAEIAAGEAAAAIE IAAGEAAAA | 0.6933 | 28 | SB BK VP2-3 |
| DRB1_0101 | 34 | AAAAIEVQIASLATV EVQIASLAT | 0.6919 | 28 | SB BK VP2-3 |
| DRB1_0101 | 35 | AAAIEVQIASLATVE VQIASLATV | 0.6928 | 28 | SB BK VP2-3 |
| DRB1_0101 | 23 | GFSVAEIAAGEAAAA VAEIAAGEA | 0.6867 | 30 | SB BK VP2-3 |
| DRB1_0101 | 292 | QWMLPLLLGLYGTVT QWMLPLLLG | 0.6800 | 32 | SB BK VP2-3 |
| DRB1_0101 | 1 | MGAALALLGDLVASV MGAALALLG | 0.6779 | 33 | SB BK VP2-3 |
| DRB1_0101 | 296 | PLLLGLYGTVTPALE LLGLYGTVT | 0.6771 | 33 | SB BK VP2-3 |
| DRB1_0101 | 289 | TAPQWMLPLLLGLYG PQWMLPLLL | 0.6746 | 34 | SB BK VP2-3 |
| DRB1_0101 | 295 | LPLLLGLYGTVTPAL LLGLYGTVT | 0.6709 | 35 | SB BK VP2-3 |
| DRB1_0101 | 218 | YYSNLSPIRPSMVRQ YSNLSPIRP | 0.6689 | 36 | SB BK VP2-3 |
| DRB1_0101 | 293 | WMLPLLLGLYGTVTP LLGLYGTVT | 0.6559 | 41 | SB BK VP2-3 |
| DRB1_0101 | 294 | MLPLLLGLYGTVTPA LLGLYGTVT | 0.6545 | 42 | SB BK VP2-3 |
| DRB1_0101 | 220 | SNLSPIRPSMVRQVA IRPSMVRQV | 0.6515 | 43 | SB BK VP2-3 |
| DRB1_0101 | 288 | RTAPQWMLPLLLGLY PQWMLPLLL | 0.6514 | 43 | SB BK VP2-3 |
| DRB1_0101 | 86 | QTVTGISSLAQVGYR VTGISSLAQ | 0.6515 | 43 | SB BK VP2-3 |
| DRB1_0101 | 9 | GDLVASVSEAAAATG LVASVSEAA | 0.6476 | 45 | SB BK VP2-3 |
| DRB1_0101 | 287 | QRTAPQWMLPLLLGL PQWMLPLLL | 0.6469 | 46 | SB BK VP2-3 |
| DRB1_0101 | 290 | APQWMLPLLLGLYGT QWMLPLLLG | 0.6444 | 47 | SB BK VP2-3 |
| DRB1_0101 | 263 | DLRNKESVHSGEFIE LRNKESVHS | 0.6362 | 51 | WB BK VP2-3 |
| DRB1_0101 | 264 | LRNKESVHSGEFIEK LRNKESVHS | 0.6346 | 52 | WB BK VP2-3 |
| DRB1_0101 | 42 | IASLATVEGITTTSE IASLATVEG | 0.6326 | 53 | WB BK VP2-3 |
| DRB1_0101 | 5 | LALLGDLVASVSEAA LGDLVASVS | 0.6322 | 53 | WB BK VP2-3 |
| DRB1_0101 | 170 | RDDIPAITSQELQRR IPAITSQEL | 0.6313 | 54 | WB BK VP2-3 |
| DRB1_0101 | 171 | DDIPAITSQELQRRT IPAITSQEL | 0.6309 | 54 | WB BK VP2-3 |
| DRB1_0101 | 186 | ERFFRDSLARFLEET FRDSLARFL | 0.6320 | 54 | WB BK VP2-3 |
| DRB1_0101 | 184 | RTERFFRDSLARFLE FRDSLARFL | 0.6295 | 55 | WB BK VP2-3 |
| DRB1_0101 | 185 | TERFFRDSLARFLEE FRDSLARFL | 0.6304 | 55 | WB BK VP2-3 |
| DRB1_0101 | 183 | RRTERFFRDSLARFL FFRDSLARF | 0.6285 | 56 | WB BK VP2-3 |
| DRB1_0101 | 187 | RFFRDSLARFLEETT FRDSLARFL | 0.6286 | 56 | WB BK VP2-3 |
| DRB1_0101 | 70 | VIAGAPGAIAGFAAL IAGAPGAIA | 0.6277 | 56 | WB BK VP2-3 |
| DRB1_0101 | 75 | PGAIAGFAALIQTVT IAGFAALIQ | 0.6288 | 56 | WB BK VP2-3 |
| DRB1_0101 | 76 | GAIAGFAALIQTVTG FAALIQTVT | 0.6280 | 56 | WB BK VP2-3 |
| DRB1_0101 | 41 | QIASLATVEGITTTS IASLATVEG | 0.6263 | 57 | WB BK VP2-3 |
| DRB1_0101 | 6 | ALLGDLVASVSEAAA LVASVSEAA | 0.6253 | 58 | WB BK VP2-3 |
| DRB1_0101 | 221 | NLSPIRPSMVRQVAE IRPSMVRQV | 0.6218 | 60 | WB BK VP2-3 |
| DRB1_0101 | 297 | LLLGLYGTVTPALEA LLGLYGTVT | 0.6216 | 60 | WB BK VP2-3 |
| DRB1_0101 | 222 | LSPIRPSMVRQVAER IRPSMVRQV | 0.6206 | 61 | WB BK VP2-3 |
| DRB1_0101 | 291 | PQWMLPLLLGLYGTV PQWMLPLLL | 0.6197 | 61 | WB BK VP2-3 |
| DRB1_0101 | 298 | LLGLYGTVTPALEAY LLGLYGTVT | 0.6201 | 61 | WB BK VP2-3 |
| DRB1_0101 | 79 | AGFAALIQTVTGISS FAALIQTVT | 0.6202 | 61 | WB BK VP2-3 |
| DRB1_0101 | 8 | LGDLVASVSEAAAAT LVASVSEAA | 0.6196 | 61 | WB BK VP2-3 |
| DRB1_0101 | 155 | PSLFATISQALWHVI LFATISQAL | 0.6154 | 64 | WB BK VP2-3 |
| DRB1_0101 | 28 | EIAAGEAAAAIEVQI IAAGEAAAA | 0.6146 | 65 | WB BK VP2-3 |
| DRB1_0101 | 286 | NQRTAPQWMLPLLLG PQWMLPLLL | 0.6139 | 65 | WB BK VP2-3 |
| DRB1_0101 | 151 | RHWGPSLFATISQAL RHWGPSLFA | 0.6126 | 66 | WB BK VP2-3 |
| DRB1_0101 | 275 | FIEKTIAPGGANQRT IAPGGANQR | 0.6093 | 69 | WB BK VP2-3 |
| DRB1_0101 | 29 | IAAGEAAAAIEVQIA IAAGEAAAA | 0.6093 | 69 | WB BK VP2-3 |
| DRB1_0101 | 7 | LLGDLVASVSEAAAA LVASVSEAA | 0.6068 | 70 | WB BK VP2-3 |
| DRB1_0101 | 11 | LVASVSEAAAATGFS VSEAAAATG | 0.6048 | 72 | WB BK VP2-3 |
| DRB1_0101 | 152 | HWGPSLFATISQALW LFATISQAL | 0.6052 | 72 | WB BK VP2-3 |
| DRB1_0101 | 276 | IEKTIAPGGANQRTA IAPGGANQR | 0.6053 | 72 | WB BK VP2-3 |
| DRB1_0101 | 154 | GPSLFATISQALWHV LFATISQAL | 0.6040 | 73 | WB BK VP2-3 |
| DRB1_0101 | 111 | TVGLYQQSGMALELF LYQQSGMAL | 0.6024 | 74 | WB BK VP2-3 |
| DRB1_0101 | 10 | DLVASVSEAAAATGF VSEAAAATG | 0.6015 | 75 | WB BK VP2-3 |
| DRB1_0101 | 112 | VGLYQQSGMALELFN LYQQSGMAL | 0.6010 | 75 | WB BK VP2-3 |
| DRB1_0101 | 277 | EKTIAPGGANQRTAP IAPGGANQR | 0.6011 | 75 | WB BK VP2-3 |
| DRB1_0101 | 71 | IAGAPGAIAGFAALI IAGAPGAIA | 0.6015 | 75 | WB BK VP2-3 |
| DRB1_0101 | 153 | WGPSLFATISQALWH LFATISQAL | 0.5994 | 76 | WB BK VP2-3 |
| DRB1_0101 | 223 | SPIRPSMVRQVAERE IRPSMVRQV | 0.6003 | 76 | WB BK VP2-3 |
| DRB1_0101 | 110 | STVGLYQQSGMALEL LYQQSGMAL | 0.5977 | 78 | WB BK VP2-3 |
| DRB1_0101 | 78 | IAGFAALIQTVTGIS FAALIQTVT | 0.5963 | 79 | WB BK VP2-3 |
| DRB1_0101 | 77 | AIAGFAALIQTVTGI FAALIQTVT | 0.5949 | 80 | WB BK VP2-3 |
| DRB1_0101 | 278 | KTIAPGGANQRTAPQ IAPGGANQR | 0.5943 | 81 | WB BK VP2-3 |
| DRB1_0101 | 2 | GAALALLGDLVASVS LALLGDLVA | 0.5930 | 82 | WB BK VP2-3 |
| DRB1_0101 | 3 | AALALLGDLVASVSE LGDLVASVS | 0.5912 | 83 | WB BK VP2-3 |
| DRB1_0101 | 81 | FAALIQTVTGISSLA IQTVTGISS | 0.5912 | 83 | WB BK VP2-3 |
| DRB1_0101 | 173 | IPAITSQELQRRTER ITSQELQRR | 0.5853 | 89 | WB BK VP2-3 |
| DRB1_0101 | 172 | DIPAITSQELQRRTE ITSQELQRR | 0.5840 | 90 | WB BK VP2-3 |
| DRB1_0101 | 88 | VTGISSLAQVGYRFF VTGISSLAQ | 0.5828 | 91 | WB BK VP2-3 |
| DRB1_0101 | 80 | GFAALIQTVTGISSL IQTVTGISS | 0.5817 | 92 | WB BK VP2-3 |
| DRB1_0101 | 274 | EFIEKTIAPGGANQR IEKTIAPGG | 0.5781 | 96 | WB BK VP2-3 |
| DRB1_0101 | 320 | KRRVSRGSSQKAKGT VSRGSSQKA | 0.5786 | 96 | WB BK VP2-3 |
| DRB1_0101 | 167 | HVIRDDIPAITSQEL IRDDIPAIT | 0.5761 | 98 | WB BK VP2-3 |
| DRB1_0101 | 109 | VSTVGLYQQSGMALE LYQQSGMAL | 0.5756 | 99 | WB BK VP2-3 |
| DRB1_0101 | 64 | TPQTYAVIAGAPGAI YAVIAGAPG | 0.5756 | 99 | WB BK VP2-3 |
| DRB1_0101 | 321 | RRVSRGSSQKAKGTR VSRGSSQKA | 0.5746 | 100 | WB BK VP2-3 |
| DRB1_0101 | 323 | VSRGSSQKAKGTRAS VSRGSSQKA | 0.5730 | 101 | WB BK VP2-3 |
| DRB1_0101 | 319 | KKRRVSRGSSQKAKG VSRGSSQKA | 0.5712 | 104 | WB BK VP2-3 |
| DRB1_0101 | 318 | QKKRRVSRGSSQKAK VSRGSSQKA | 0.5695 | 105 | WB BK VP2-3 |
| DRB1_0101 | 87 | TVTGISSLAQVGYRF VTGISSLAQ | 0.5702 | 105 | WB BK VP2-3 |
| DRB1_0101 | 299 | LGLYGTVTPALEAYE LYGTVTPAL | 0.5689 | 106 | WB BK VP2-3 |
| DRB1_0101 | 4 | ALALLGDLVASVSEA LGDLVASVS | 0.5688 | 106 | WB BK VP2-3 |
| DRB1_0101 | 317 | NQKKRRVSRGSSQKA RVSRGSSQK | 0.5685 | 107 | WB BK VP2-3 |
| DRB1_0101 | 12 | VASVSEAAAATGFSV VSEAAAATG | 0.5666 | 109 | WB BK VP2-3 |
| DRB1_0101 | 169 | IRDDIPAITSQELQR IPAITSQEL | 0.5628 | 113 | WB BK VP2-3 |
| DRB1_0101 | 285 | ANQRTAPQWMLPLLL RTAPQWMLP | 0.5629 | 113 | WB BK VP2-3 |
| DRB1_0101 | 33 | EAAAAIEVQIASLAT IEVQIASLA | 0.5628 | 113 | WB BK VP2-3 |
| DRB1_0101 | 74 | APGAIAGFAALIQTV IAGFAALIQ | 0.5631 | 113 | WB BK VP2-3 |
| DRB1_0101 | 168 | VIRDDIPAITSQELQ IPAITSQEL | 0.5596 | 117 | WB BK VP2-3 |
| DRB1_0101 | 212 | YNYIQDYYSNLSPIR IQDYYSNLS | 0.5601 | 117 | WB BK VP2-3 |
| DRB1_0101 | 72 | AGAPGAIAGFAALIQ AIAGFAALI | 0.5598 | 117 | WB BK VP2-3 |
| DRB1_0101 | 73 | GAPGAIAGFAALIQT IAGFAALIQ | 0.5602 | 117 | WB BK VP2-3 |
| DRB1_0101 | 108 | KVSTVGLYQQSGMAL TVGLYQQSG | 0.5550 | 123 | WB BK VP2-3 |
| DRB1_0101 | 156 | SLFATISQALWHVIR LFATISQAL | 0.5526 | 127 | WB BK VP2-3 |
| DRB1_0101 | 13 | ASVSEAAAATGFSVA VSEAAAATG | 0.5482 | 133 | WB BK VP2-3 |
| DRB1_0101 | 113 | GLYQQSGMALELFNP LYQQSGMAL | 0.5426 | 141 | WB BK VP2-3 |
| DRB1_0101 | 157 | LFATISQALWHVIRD LFATISQAL | 0.5415 | 143 | WB BK VP2-3 |
| DRB1_0101 | 188 | FFRDSLARFLEETTW FRDSLARFL | 0.5345 | 154 | WB BK VP2-3 |
| DRB1_0101 | 43 | ASLATVEGITTTSEA LATVEGITT | 0.5345 | 154 | WB BK VP2-3 |
| DRB1_0101 | 149 | DPRHWGPSLFATISQ RHWGPSLFA | 0.5298 | 162 | WB BK VP2-3 |
| DRB1_0101 | 148 | LDPRHWGPSLFATIS RHWGPSLFA | 0.5294 | 163 | WB BK VP2-3 |
| DRB1_0101 | 57 | AIAAIGLTPQTYAVI IAAIGLTPQ | 0.5280 | 165 | WB BK VP2-3 |
| DRB1_0101 | 189 | FRDSLARFLEETTWT FRDSLARFL | 0.5271 | 167 | WB BK VP2-3 |
| DRB1_0101 | 279 | TIAPGGANQRTAPQW IAPGGANQR | 0.5252 | 170 | WB BK VP2-3 |
| DRB1_0101 | 174 | PAITSQELQRRTERF ITSQELQRR | 0.5214 | 177 | WB BK VP2-3 |
| DRB1_0101 | 114 | LYQQSGMALELFNPD LYQQSGMAL | 0.5213 | 178 | WB BK VP2-3 |
| DRB1_0101 | 199 | ETTWTIVNAPINFYN IVNAPINFY | 0.5209 | 178 | WB BK VP2-3 |
| DRB1_0101 | 58 | IAAIGLTPQTYAVIA LTPQTYAVI | 0.5203 | 180 | WB BK VP2-3 |
| DRB1_0101 | 147 | YLDPRHWGPSLFATI RHWGPSLFA | 0.5192 | 182 | WB BK VP2-3 |
| DRB1_0101 | 56 | EAIAAIGLTPQTYAV IAAIGLTPQ | 0.5190 | 182 | WB BK VP2-3 |
| DRB1_0101 | 200 | TTWTIVNAPINFYNY IVNAPINFY | 0.5185 | 183 | WB BK VP2-3 |
| DRB1_0101 | 198 | EETTWTIVNAPINFY WTIVNAPIN | 0.5179 | 184 | WB BK VP2-3 |
| DRB1_0101 | 224 | PIRPSMVRQVAEREG IRPSMVRQV | 0.5170 | 186 | WB BK VP2-3 |
| DRB1_0101 | 63 | LTPQTYAVIAGAPGA YAVIAGAPG | 0.5172 | 186 | WB BK VP2-3 |
| DRB1_0101 | 225 | IRPSMVRQVAEREGT IRPSMVRQV | 0.5152 | 190 | WB BK VP2-3 |
| DRB1_0101 | 209 | INFYNYIQDYYSNLS YNYIQDYYS | 0.5135 | 193 | WB BK VP2-3 |
| DRB1_0101 | 55 | SEAIAAIGLTPQTYA IAAIGLTPQ | 0.5133 | 194 | WB BK VP2-3 |
| DRB1_0101 | 210 | NFYNYIQDYYSNLSP IQDYYSNLS | 0.5129 | 195 | WB BK VP2-3 |
| DRB1_0101 | 145 | IQYLDPRHWGPSLFA IQYLDPRHW | 0.5100 | 201 | WB BK VP2-3 |
| DRB1_0101 | 300 | GLYGTVTPALEAYED LYGTVTPAL | 0.5097 | 201 | WB BK VP2-3 |
| DRB1_0101 | 322 | RVSRGSSQKAKGTRA VSRGSSQKA | 0.5073 | 207 | WB BK VP2-3 |
| DRB1_0101 | 201 | TWTIVNAPINFYNYI IVNAPINFY | 0.5050 | 212 | WB BK VP2-3 |
| DRB1_0101 | 202 | WTIVNAPINFYNYIQ IVNAPINFY | 0.5004 | 223 | WB BK VP2-3 |
| DRB1_0101 | 140 | TFVNNIQYLDPRHWG IQYLDPRHW | 0.4969 | 231 | WB BK VP2-3 |
| DRB1_0101 | 327 | SSQKAKGTRASAKTT QKAKGTRAS | 0.4971 | 231 | WB BK VP2-3 |
| DRB1_0101 | 139 | NTFVNNIQYLDPRHW VNNIQYLDP | 0.4965 | 232 | WB BK VP2-3 |
| DRB1_0101 | 45 | LATVEGITTTSEAIA VEGITTTSE | 0.4966 | 232 | WB BK VP2-3 |
| DRB1_0101 | 62 | GLTPQTYAVIAGAPG TPQTYAVIA | 0.4959 | 234 | WB BK VP2-3 |
| DRB1_0101 | 280 | IAPGGANQRTAPQWM IAPGGANQR | 0.4948 | 237 | WB BK VP2-3 |
| DRB1_0101 | 54 | TSEAIAAIGLTPQTY IAAIGLTPQ | 0.4931 | 241 | WB BK VP2-3 |
| DRB1_0101 | 142 | VNNIQYLDPRHWGPS IQYLDPRHW | 0.4908 | 247 | WB BK VP2-3 |
| DRB1_0101 | 211 | FYNYIQDYYSNLSPI IQDYYSNLS | 0.4889 | 252 | WB BK VP2-3 |
| DRB1_0101 | 53 | TTSEAIAAIGLTPQT IAAIGLTPQ | 0.4889 | 252 | WB BK VP2-3 |
| DRB1_0101 | 141 | FVNNIQYLDPRHWGP IQYLDPRHW | 0.4885 | 253 | WB BK VP2-3 |
| DRB1_0101 | 143 | NNIQYLDPRHWGPSL IQYLDPRHW | 0.4867 | 258 | WB BK VP2-3 |
| DRB1_0101 | 44 | SLATVEGITTTSEAI VEGITTTSE | 0.4868 | 258 | WB BK VP2-3 |
| DRB1_0101 | 59 | AAIGLTPQTYAVIAG LTPQTYAVI | 0.4849 | 263 | WB BK VP2-3 |
| DRB1_0101 | 326 | GSSQKAKGTRASAKT QKAKGTRAS | 0.4838 | 267 | WB BK VP2-3 |
| DRB1_0101 | 14 | SVSEAAAATGFSVAE VSEAAAATG | 0.4826 | 270 | WB BK VP2-3 |
| DRB1_0101 | 150 | PRHWGPSLFATISQA WGPSLFATI | 0.4823 | 271 | WB BK VP2-3 |
| DRB1_0101 | 301 | LYGTVTPALEAYEDG LYGTVTPAL | 0.4803 | 277 | WB BK VP2-3 |
| DRB1_0101 | 129 | EYYDILFPGVNTFVN LFPGVNTFV | 0.4778 | 284 | WB BK VP2-3 |
| DRB1_0101 | 60 | AIGLTPQTYAVIAGA LTPQTYAVI | 0.4766 | 288 | WB BK VP2-3 |
| DRB1_0101 | 146 | QYLDPRHWGPSLFAT RHWGPSLFA | 0.4756 | 291 | WB BK VP2-3 |
| DRB1_0101 | 52 | TTTSEAIAAIGLTPQ SEAIAAIGL | 0.4719 | 303 | WB BK VP2-3 |
| DRB1_0101 | 130 | YYDILFPGVNTFVNN LFPGVNTFV | 0.4703 | 308 | WB BK VP2-3 |
| DRB1_0101 | 128 | DEYYDILFPGVNTFV YYDILFPGV | 0.4673 | 318 | WB BK VP2-3 |
| DRB1_0101 | 325 | RGSSQKAKGTRASAK QKAKGTRAS | 0.4649 | 327 | WB BK VP2-3 |
| DRB1_0101 | 131 | YDILFPGVNTFVNNI LFPGVNTFV | 0.4632 | 333 | WB BK VP2-3 |
| DRB1_0101 | 46 | ATVEGITTTSEAIAA VEGITTTSE | 0.4606 | 342 | WB BK VP2-3 |
| DRB1_0101 | 15 | VSEAAAATGFSVAEI VSEAAAATG | 0.4598 | 345 | WB BK VP2-3 |
| DRB1_0101 | 328 | SQKAKGTRASAKTTN QKAKGTRAS | 0.4565 | 358 | WB BK VP2-3 |
| DRB1_0101 | 132 | DILFPGVNTFVNNIQ LFPGVNTFV | 0.4558 | 361 | WB BK VP2-3 |
| DRB1_0101 | 61 | IGLTPQTYAVIAGAP LTPQTYAVI | 0.4557 | 361 | WB BK VP2-3 |
| DRB1_0101 | 324 | SRGSSQKAKGTRASA QKAKGTRAS | 0.4547 | 365 | WB BK VP2-3 |
| DRB1_0101 | 329 | QKAKGTRASAKTTNK QKAKGTRAS | 0.4538 | 369 | WB BK VP2-3 |
| DRB1_0101 | 22 | TGFSVAEIAAGEAAA FSVAEIAAG | 0.4532 | 371 | WB BK VP2-3 |
| DRB1_0101 | 32 | GEAAAAIEVQIASLA AAAIEVQIA | 0.4528 | 372 | WB BK VP2-3 |
| DRB1_0101 | 21 | ATGFSVAEIAAGEAA FSVAEIAAG | 0.4520 | 376 | WB BK VP2-3 |
| DRB1_0101 | 20 | AATGFSVAEIAAGEA FSVAEIAAG | 0.4471 | 396 | WB BK VP2-3 |
| DRB1_0101 | 227 | PSMVRQVAEREGTHV MVRQVAERE | 0.4426 | 416 | WB BK VP2-3 |
| DRB1_0101 | 101 | FFSDWDHKVSTVGLY WDHKVSTVG | 0.4398 | 429 | WB BK VP2-3 |
| DRB1_0101 | 100 | RFFSDWDHKVSTVGL WDHKVSTVG | 0.4393 | 431 | WB BK VP2-3 |
| DRB1_0101 | 103 | SDWDHKVSTVGLYQQ WDHKVSTVG | 0.4367 | 443 | WB BK VP2-3 |
| DRB1_0101 | 158 | FATISQALWHVIRDD ISQALWHVI | 0.4312 | 471 | WB BK VP2-3 |
| DRB1_0101 | 175 | AITSQELQRRTERFF ITSQELQRR | 0.4287 | 483 | WB BK VP2-3 |
| DRB1_0101 | 49 | EGITTTSEAIAAIGL ITTTSEAIA | 0.4284 | 485 | WB BK VP2-3 |
| DRB1_0101 | 102 | FSDWDHKVSTVGLYQ WDHKVSTVG | 0.4283 | 486 | WB BK VP2-3 |
| DRB1_0301 | 182 | QRRTERFFRDSLARF RFFRDSLAR | 0.4487 | 390 | WB BK VP2-3 |
| DRB1_0301 | 183 | RRTERFFRDSLARFL FFRDSLARF | 0.4472 | 396 | WB BK VP2-3 |
| DRB1_0301 | 186 | ERFFRDSLARFLEET FFRDSLARF | 0.4469 | 397 | WB BK VP2-3 |
| DRB1_0301 | 184 | RTERFFRDSLARFLE FFRDSLARF | 0.4468 | 398 | WB BK VP2-3 |
| DRB1_0301 | 185 | TERFFRDSLARFLEE FFRDSLARF | 0.4464 | 399 | WB BK VP2-3 |
| DRB1_0401 | 213 | NYIQDYYSNLSPIRP YYSNLSPIR | 0.5927 | 82 | WB BK VP2-3 |
| DRB1_0401 | 212 | YNYIQDYYSNLSPIR IQDYYSNLS | 0.5864 | 88 | WB BK VP2-3 |
| DRB1_0401 | 214 | YIQDYYSNLSPIRPS YYSNLSPIR | 0.5789 | 95 | WB BK VP2-3 |
| DRB1_0401 | 215 | IQDYYSNLSPIRPSM YYSNLSPIR | 0.5767 | 97 | WB BK VP2-3 |
| DRB1_0401 | 216 | QDYYSNLSPIRPSMV YYSNLSPIR | 0.5674 | 108 | WB BK VP2-3 |
| DRB1_0401 | 258 | VTQRMDLRNKESVHS VTQRMDLRN | 0.5284 | 164 | WB BK VP2-3 |
| DRB1_0401 | 259 | TQRMDLRNKESVHSG LRNKESVHS | 0.5237 | 173 | WB BK VP2-3 |
| DRB1_0401 | 260 | QRMDLRNKESVHSGE LRNKESVHS | 0.5240 | 173 | WB BK VP2-3 |
| DRB1_0401 | 261 | RMDLRNKESVHSGEF LRNKESVHS | 0.5213 | 178 | WB BK VP2-3 |
| DRB1_0401 | 262 | MDLRNKESVHSGEFI LRNKESVHS | 0.5168 | 187 | WB BK VP2-3 |
| DRB1_0401 | 5 | LALLGDLVASVSEAA LLGDLVASV | 0.5166 | 187 | WB BK VP2-3 |
| DRB1_0401 | 6 | ALLGDLVASVSEAAA LVASVSEAA | 0.5140 | 192 | WB BK VP2-3 |
| DRB1_0401 | 7 | LLGDLVASVSEAAAA LVASVSEAA | 0.5130 | 194 | WB BK VP2-3 |
| DRB1_0401 | 8 | LGDLVASVSEAAAAT LVASVSEAA | 0.5130 | 194 | WB BK VP2-3 |
| DRB1_0401 | 9 | GDLVASVSEAAAATG LVASVSEAA | 0.5118 | 197 | WB BK VP2-3 |
| DRB1_0401 | 82 | AALIQTVTGISSLAQ LIQTVTGIS | 0.5068 | 208 | WB BK VP2-3 |
| DRB1_0401 | 217 | DYYSNLSPIRPSMVR YYSNLSPIR | 0.4779 | 284 | WB BK VP2-3 |
| DRB1_0401 | 83 | ALIQTVTGISSLAQV VTGISSLAQ | 0.4763 | 289 | WB BK VP2-3 |
| DRB1_0401 | 84 | LIQTVTGISSLAQVG VTGISSLAQ | 0.4711 | 306 | WB BK VP2-3 |
| DRB1_0401 | 218 | YYSNLSPIRPSMVRQ YYSNLSPIR | 0.4694 | 312 | WB BK VP2-3 |
| DRB1_0401 | 198 | EETTWTIVNAPINFY WTIVNAPIN | 0.4557 | 361 | WB BK VP2-3 |
| DRB1_0401 | 199 | ETTWTIVNAPINFYN IVNAPINFY | 0.4556 | 362 | WB BK VP2-3 |
| DRB1_0401 | 200 | TTWTIVNAPINFYNY IVNAPINFY | 0.4527 | 373 | WB BK VP2-3 |
| DRB1_0401 | 85 | IQTVTGISSLAQVGY VTGISSLAQ | 0.4432 | 414 | WB BK VP2-3 |
| DRB1_0401 | 202 | WTIVNAPINFYNYIQ IVNAPINFY | 0.4421 | 418 | WB BK VP2-3 |
| DRB1_0401 | 201 | TWTIVNAPINFYNYI IVNAPINFY | 0.4401 | 427 | WB BK VP2-3 |
| DRB1_0401 | 81 | FAALIQTVTGISSLA LIQTVTGIS | 0.4399 | 428 | WB BK VP2-3 |
| DRB1_0401 | 36 | AAIEVQIASLATVEG IEVQIASLA | 0.4327 | 463 | WB BK VP2-3 |
| DRB1_0401 | 132 | DILFPGVNTFVNNIQ GVNTFVNNI | 0.4289 | 483 | WB BK VP2-3 |
| DRB1_0404 | 213 | NYIQDYYSNLSPIRP IQDYYSNLS | 0.5128 | 195 | WB BK VP2-3 |
| DRB1_0404 | 82 | AALIQTVTGISSLAQ LIQTVTGIS | 0.4868 | 258 | WB BK VP2-3 |
| DRB1_0404 | 198 | EETTWTIVNAPINFY TTWTIVNAP | 0.4822 | 271 | WB BK VP2-3 |
| DRB1_0404 | 215 | IQDYYSNLSPIRPSM IQDYYSNLS | 0.4815 | 273 | WB BK VP2-3 |
| DRB1_0404 | 295 | LPLLLGLYGTVTPAL LLGLYGTVT | 0.4754 | 292 | WB BK VP2-3 |
| DRB1_0404 | 214 | YIQDYYSNLSPIRPS IQDYYSNLS | 0.4645 | 328 | WB BK VP2-3 |
| DRB1_0404 | 296 | PLLLGLYGTVTPALE LLGLYGTVT | 0.4620 | 337 | WB BK VP2-3 |
| DRB1_0404 | 293 | WMLPLLLGLYGTVTP LLGLYGTVT | 0.4571 | 356 | WB BK VP2-3 |
| DRB1_0404 | 294 | MLPLLLGLYGTVTPA LLGLYGTVT | 0.4547 | 365 | WB BK VP2-3 |
| DRB1_0404 | 36 | AAIEVQIASLATVEG IEVQIASLA | 0.4515 | 378 | WB BK VP2-3 |
| DRB1_0404 | 200 | TTWTIVNAPINFYNY IVNAPINFY | 0.4472 | 396 | WB BK VP2-3 |
| DRB1_0404 | 194 | ARFLEETTWTIVNAP FLEETTWTI | 0.4467 | 398 | WB BK VP2-3 |
| DRB1_0404 | 212 | YNYIQDYYSNLSPIR IQDYYSNLS | 0.4449 | 406 | WB BK VP2-3 |
| DRB1_0404 | 199 | ETTWTIVNAPINFYN IVNAPINFY | 0.4444 | 408 | WB BK VP2-3 |
| DRB1_0404 | 81 | FAALIQTVTGISSLA LIQTVTGIS | 0.4428 | 415 | WB BK VP2-3 |
| DRB1_0404 | 292 | QWMLPLLLGLYGTVT MLPLLLGLY | 0.4376 | 439 | WB BK VP2-3 |
| DRB1_0404 | 297 | LLLGLYGTVTPALEA LGLYGTVTP | 0.4365 | 445 | WB BK VP2-3 |
| DRB1_0404 | 84 | LIQTVTGISSLAQVG LIQTVTGIS | 0.4287 | 483 | WB BK VP2-3 |
| DRB1_0404 | 38 | IEVQIASLATVEGIT IASLATVEG | 0.4281 | 487 | WB BK VP2-3 |
| DRB1_0404 | 78 | IAGFAALIQTVTGIS AALIQTVTG | 0.4270 | 493 | WB BK VP2-3 |
| DRB1_0404 | 196 | FLEETTWTIVNAPIN TTWTIVNAP | 0.4258 | 499 | WB BK VP2-3 |
| DRB1_0405 | 213 | NYIQDYYSNLSPIRP IQDYYSNLS | 0.5630 | 113 | WB BK VP2-3 |
| DRB1_0405 | 212 | YNYIQDYYSNLSPIR IQDYYSNLS | 0.5391 | 146 | WB BK VP2-3 |
| DRB1_0405 | 209 | INFYNYIQDYYSNLS YNYIQDYYS | 0.5339 | 155 | WB BK VP2-3 |
| DRB1_0405 | 96 | QVGYRFFSDWDHKVS YRFFSDWDH | 0.5285 | 164 | WB BK VP2-3 |
| DRB1_0405 | 210 | NFYNYIQDYYSNLSP IQDYYSNLS | 0.5274 | 166 | WB BK VP2-3 |
| DRB1_0405 | 196 | FLEETTWTIVNAPIN EETTWTIVN | 0.5259 | 169 | WB BK VP2-3 |
| DRB1_0405 | 214 | YIQDYYSNLSPIRPS IQDYYSNLS | 0.5183 | 184 | WB BK VP2-3 |
| DRB1_0405 | 215 | IQDYYSNLSPIRPSM IQDYYSNLS | 0.5155 | 189 | WB BK VP2-3 |
| DRB1_0405 | 135 | FPGVNTFVNNIQYLD VNTFVNNIQ | 0.5129 | 194 | WB BK VP2-3 |
| DRB1_0405 | 211 | FYNYIQDYYSNLSPI IQDYYSNLS | 0.5093 | 202 | WB BK VP2-3 |
| DRB1_0405 | 198 | EETTWTIVNAPINFY WTIVNAPIN | 0.5089 | 203 | WB BK VP2-3 |
| DRB1_0405 | 136 | PGVNTFVNNIQYLDP VNTFVNNIQ | 0.5073 | 207 | WB BK VP2-3 |
| DRB1_0405 | 95 | AQVGYRFFSDWDHKV YRFFSDWDH | 0.5059 | 210 | WB BK VP2-3 |
| DRB1_0405 | 132 | DILFPGVNTFVNNIQ FPGVNTFVN | 0.5008 | 222 | WB BK VP2-3 |
| DRB1_0405 | 133 | ILFPGVNTFVNNIQY VNTFVNNIQ | 0.4983 | 228 | WB BK VP2-3 |
| DRB1_0405 | 97 | VGYRFFSDWDHKVST YRFFSDWDH | 0.4930 | 241 | WB BK VP2-3 |
| DRB1_0405 | 194 | ARFLEETTWTIVNAP EETTWTIVN | 0.4887 | 253 | WB BK VP2-3 |
| DRB1_0405 | 197 | LEETTWTIVNAPINF WTIVNAPIN | 0.4832 | 268 | WB BK VP2-3 |
| DRB1_0405 | 199 | ETTWTIVNAPINFYN WTIVNAPIN | 0.4813 | 274 | WB BK VP2-3 |
| DRB1_0405 | 195 | RFLEETTWTIVNAPI EETTWTIVN | 0.4799 | 278 | WB BK VP2-3 |
| DRB1_0405 | 94 | LAQVGYRFFSDWDHK GYRFFSDWD | 0.4772 | 286 | WB BK VP2-3 |
| DRB1_0405 | 93 | SLAQVGYRFFSDWDH GYRFFSDWD | 0.4758 | 291 | WB BK VP2-3 |
| DRB1_0405 | 134 | LFPGVNTFVNNIQYL VNTFVNNIQ | 0.4752 | 292 | WB BK VP2-3 |
| DRB1_0405 | 193 | LARFLEETTWTIVNA EETTWTIVN | 0.4694 | 312 | WB BK VP2-3 |
| DRB1_0405 | 158 | FATISQALWHVIRDD QALWHVIRD | 0.4626 | 335 | WB BK VP2-3 |
| DRB1_0405 | 157 | LFATISQALWHVIRD SQALWHVIR | 0.4616 | 339 | WB BK VP2-3 |
| DRB1_0405 | 200 | TTWTIVNAPINFYNY IVNAPINFY | 0.4599 | 345 | WB BK VP2-3 |
| DRB1_0405 | 98 | GYRFFSDWDHKVSTV YRFFSDWDH | 0.4557 | 361 | WB BK VP2-3 |
| DRB1_0405 | 192 | SLARFLEETTWTIVN FLEETTWTI | 0.4451 | 405 | WB BK VP2-3 |
| DRB1_0405 | 137 | GVNTFVNNIQYLDPR VNTFVNNIQ | 0.4315 | 469 | WB BK VP2-3 |
| DRB1_0405 | 138 | VNTFVNNIQYLDPRH VNTFVNNIQ | 0.4315 | 469 | WB BK VP2-3 |
| DRB1_0701 | 155 | PSLFATISQALWHVI LFATISQAL | 0.6499 | 44 | SB BK VP2-3 |
| DRB1_0701 | 154 | GPSLFATISQALWHV LFATISQAL | 0.6324 | 53 | WB BK VP2-3 |
| DRB1_0701 | 153 | WGPSLFATISQALWH LFATISQAL | 0.6252 | 58 | WB BK VP2-3 |
| DRB1_0701 | 152 | HWGPSLFATISQALW LFATISQAL | 0.6229 | 59 | WB BK VP2-3 |
| DRB1_0701 | 151 | RHWGPSLFATISQAL WGPSLFATI | 0.6204 | 61 | WB BK VP2-3 |
| DRB1_0701 | 219 | YSNLSPIRPSMVRQV LSPIRPSMV | 0.6186 | 62 | WB BK VP2-3 |
| DRB1_0701 | 220 | SNLSPIRPSMVRQVA LSPIRPSMV | 0.6184 | 62 | WB BK VP2-3 |
| DRB1_0701 | 216 | QDYYSNLSPIRPSMV YYSNLSPIR | 0.6145 | 65 | WB BK VP2-3 |
| DRB1_0701 | 217 | DYYSNLSPIRPSMVR LSPIRPSMV | 0.6117 | 67 | WB BK VP2-3 |
| DRB1_0701 | 218 | YYSNLSPIRPSMVRQ LSPIRPSMV | 0.6108 | 67 | WB BK VP2-3 |
| DRB1_0701 | 194 | ARFLEETTWTIVNAP FLEETTWTI | 0.6047 | 72 | WB BK VP2-3 |
| DRB1_0701 | 191 | DSLARFLEETTWTIV FLEETTWTI | 0.6040 | 73 | WB BK VP2-3 |
| DRB1_0701 | 193 | LARFLEETTWTIVNA FLEETTWTI | 0.6028 | 73 | WB BK VP2-3 |
| DRB1_0701 | 192 | SLARFLEETTWTIVN FLEETTWTI | 0.6024 | 74 | WB BK VP2-3 |
| DRB1_0701 | 156 | SLFATISQALWHVIR LFATISQAL | 0.5732 | 101 | WB BK VP2-3 |
| DRB1_0701 | 157 | LFATISQALWHVIRD LFATISQAL | 0.5709 | 104 | WB BK VP2-3 |
| DRB1_0701 | 195 | RFLEETTWTIVNAPI LEETTWTIV | 0.5523 | 127 | WB BK VP2-3 |
| DRB1_0701 | 221 | NLSPIRPSMVRQVAE LSPIRPSMV | 0.5258 | 169 | WB BK VP2-3 |
| DRB1_0701 | 222 | LSPIRPSMVRQVAER LSPIRPSMV | 0.5249 | 171 | WB BK VP2-3 |
| DRB1_0701 | 196 | FLEETTWTIVNAPIN FLEETTWTI | 0.5082 | 205 | WB BK VP2-3 |
| DRB1_0701 | 58 | IAAIGLTPQTYAVIA LTPQTYAVI | 0.4999 | 224 | WB BK VP2-3 |
| DRB1_0701 | 57 | AIAAIGLTPQTYAVI AIGLTPQTY | 0.4992 | 226 | WB BK VP2-3 |
| DRB1_0701 | 59 | AAIGLTPQTYAVIAG LTPQTYAVI | 0.4959 | 234 | WB BK VP2-3 |
| DRB1_0701 | 60 | AIGLTPQTYAVIAGA LTPQTYAVI | 0.4955 | 235 | WB BK VP2-3 |
| DRB1_0701 | 61 | IGLTPQTYAVIAGAP LTPQTYAVI | 0.4924 | 243 | WB BK VP2-3 |
| DRB1_0701 | 190 | RDSLARFLEETTWTI RDSLARFLE | 0.4903 | 248 | WB BK VP2-3 |
| DRB1_0701 | 167 | HVIRDDIPAITSQEL VIRDDIPAI | 0.4747 | 294 | WB BK VP2-3 |
| DRB1_0701 | 131 | YDILFPGVNTFVNNI LFPGVNTFV | 0.4730 | 299 | WB BK VP2-3 |
| DRB1_0701 | 168 | VIRDDIPAITSQELQ IPAITSQEL | 0.4729 | 300 | WB BK VP2-3 |
| DRB1_0701 | 132 | DILFPGVNTFVNNIQ LFPGVNTFV | 0.4725 | 301 | WB BK VP2-3 |
| DRB1_0701 | 169 | IRDDIPAITSQELQR IPAITSQEL | 0.4681 | 316 | WB BK VP2-3 |
| DRB1_0701 | 170 | RDDIPAITSQELQRR IPAITSQEL | 0.4671 | 319 | WB BK VP2-3 |
| DRB1_0701 | 171 | DDIPAITSQELQRRT IPAITSQEL | 0.4635 | 332 | WB BK VP2-3 |
| DRB1_0701 | 129 | EYYDILFPGVNTFVN LFPGVNTFV | 0.4503 | 383 | WB BK VP2-3 |
| DRB1_0701 | 130 | YYDILFPGVNTFVNN FPGVNTFVN | 0.4488 | 389 | WB BK VP2-3 |
| DRB1_0701 | 133 | ILFPGVNTFVNNIQY FPGVNTFVN | 0.4334 | 459 | WB BK VP2-3 |
| DRB1_0701 | 158 | FATISQALWHVIRDD ISQALWHVI | 0.4279 | 488 | WB BK VP2-3 |
| DRB1_0802 | 214 | YIQDYYSNLSPIRPS YSNLSPIRP | 0.4370 | 442 | WB BK VP2-3 |
| DRB1_0802 | 213 | NYIQDYYSNLSPIRP YYSNLSPIR | 0.4360 | 447 | WB BK VP2-3 |
| DRB1_0802 | 215 | IQDYYSNLSPIRPSM YSNLSPIRP | 0.4360 | 447 | WB BK VP2-3 |
| DRB1_0802 | 216 | QDYYSNLSPIRPSMV YSNLSPIRP | 0.4358 | 448 | WB BK VP2-3 |
| DRB1_0901 | 110 | STVGLYQQSGMALEL YQQSGMALE | 0.4827 | 270 | WB BK VP2-3 |
| DRB1_0901 | 111 | TVGLYQQSGMALELF YQQSGMALE | 0.4750 | 293 | WB BK VP2-3 |
| DRB1_0901 | 112 | VGLYQQSGMALELFN YQQSGMALE | 0.4750 | 293 | WB BK VP2-3 |
| DRB1_0901 | 109 | VSTVGLYQQSGMALE LYQQSGMAL | 0.4737 | 297 | WB BK VP2-3 |
| DRB1_0901 | 36 | AAIEVQIASLATVEG VQIASLATV | 0.4709 | 306 | WB BK VP2-3 |
| DRB1_0901 | 35 | AAAIEVQIASLATVE VQIASLATV | 0.4664 | 322 | WB BK VP2-3 |
| DRB1_0901 | 198 | EETTWTIVNAPINFY WTIVNAPIN | 0.4656 | 324 | WB BK VP2-3 |
| DRB1_0901 | 199 | ETTWTIVNAPINFYN WTIVNAPIN | 0.4657 | 324 | WB BK VP2-3 |
| DRB1_0901 | 37 | AIEVQIASLATVEGI VQIASLATV | 0.4650 | 326 | WB BK VP2-3 |
| DRB1_0901 | 34 | AAAAIEVQIASLATV IEVQIASLA | 0.4647 | 328 | WB BK VP2-3 |
| DRB1_0901 | 38 | IEVQIASLATVEGIT VQIASLATV | 0.4639 | 331 | WB BK VP2-3 |
| DRB1_0901 | 297 | LLLGLYGTVTPALEA LYGTVTPAL | 0.4627 | 335 | WB BK VP2-3 |
| DRB1_0901 | 200 | TTWTIVNAPINFYNY WTIVNAPIN | 0.4612 | 340 | WB BK VP2-3 |
| DRB1_0901 | 296 | PLLLGLYGTVTPALE LYGTVTPAL | 0.4611 | 341 | WB BK VP2-3 |
| DRB1_0901 | 299 | LGLYGTVTPALEAYE LYGTVTPAL | 0.4598 | 346 | WB BK VP2-3 |
| DRB1_0901 | 298 | LLGLYGTVTPALEAY LYGTVTPAL | 0.4531 | 372 | WB BK VP2-3 |
| DRB1_0901 | 113 | GLYQQSGMALELFNP YQQSGMALE | 0.4451 | 405 | WB BK VP2-3 |
| DRB1_0901 | 183 | RRTERFFRDSLARFL FFRDSLARF | 0.4413 | 422 | WB BK VP2-3 |
| DRB1_0901 | 184 | RTERFFRDSLARFLE FRDSLARFL | 0.4404 | 426 | WB BK VP2-3 |
| DRB1_0901 | 186 | ERFFRDSLARFLEET FRDSLARFL | 0.4393 | 431 | WB BK VP2-3 |
| DRB1_0901 | 185 | TERFFRDSLARFLEE FRDSLARFL | 0.4382 | 436 | WB BK VP2-3 |
| DRB1_0901 | 187 | RFFRDSLARFLEETT FRDSLARFL | 0.4306 | 474 | WB BK VP2-3 |
| DRB1_0901 | 295 | LPLLLGLYGTVTPAL LGLYGTVTP | 0.4290 | 482 | WB BK VP2-3 |
| DRB1_0901 | 65 | PQTYAVIAGAPGAIA VIAGAPGAI | 0.4281 | 487 | WB BK VP2-3 |
| DRB1_0901 | 66 | QTYAVIAGAPGAIAG VIAGAPGAI | 0.4279 | 488 | WB BK VP2-3 |
| DRB1_0901 | 67 | TYAVIAGAPGAIAGF VIAGAPGAI | 0.4259 | 499 | WB BK VP2-3 |
| DRB1_1302 | 135 | FPGVNTFVNNIQYLD VNTFVNNIQ | 0.7008 | 25 | SB BK VP2-3 |
| DRB1_1302 | 136 | PGVNTFVNNIQYLDP FVNNIQYLD | 0.6940 | 27 | SB BK VP2-3 |
| DRB1_1302 | 137 | GVNTFVNNIQYLDPR FVNNIQYLD | 0.6861 | 30 | SB BK VP2-3 |
| DRB1_1302 | 138 | VNTFVNNIQYLDPRH FVNNIQYLD | 0.6825 | 31 | SB BK VP2-3 |
| DRB1_1302 | 139 | NTFVNNIQYLDPRHW FVNNIQYLD | 0.6608 | 39 | SB BK VP2-3 |
| DRB1_1302 | 213 | NYIQDYYSNLSPIRP IQDYYSNLS | 0.6338 | 53 | WB BK VP2-3 |
| DRB1_1302 | 216 | QDYYSNLSPIRPSMV YSNLSPIRP | 0.6265 | 57 | WB BK VP2-3 |
| DRB1_1302 | 215 | IQDYYSNLSPIRPSM YSNLSPIRP | 0.6245 | 58 | WB BK VP2-3 |
| DRB1_1302 | 214 | YIQDYYSNLSPIRPS YSNLSPIRP | 0.6230 | 59 | WB BK VP2-3 |
| DRB1_1302 | 217 | DYYSNLSPIRPSMVR YSNLSPIRP | 0.6216 | 60 | WB BK VP2-3 |
| DRB1_1302 | 293 | WMLPLLLGLYGTVTP LLGLYGTVT | 0.6200 | 61 | WB BK VP2-3 |
| DRB1_1302 | 296 | PLLLGLYGTVTPALE LGLYGTVTP | 0.6167 | 63 | WB BK VP2-3 |
| DRB1_1302 | 294 | MLPLLLGLYGTVTPA LGLYGTVTP | 0.6126 | 66 | WB BK VP2-3 |
| DRB1_1302 | 295 | LPLLLGLYGTVTPAL LGLYGTVTP | 0.6083 | 69 | WB BK VP2-3 |
| DRB1_1302 | 297 | LLLGLYGTVTPALEA LGLYGTVTP | 0.6067 | 70 | WB BK VP2-3 |
| DRB1_1302 | 140 | TFVNNIQYLDPRHWG FVNNIQYLD | 0.5962 | 79 | WB BK VP2-3 |
| DRB1_1302 | 36 | AAIEVQIASLATVEG VQIASLATV | 0.5884 | 86 | WB BK VP2-3 |
| DRB1_1302 | 141 | FVNNIQYLDPRHWGP FVNNIQYLD | 0.5710 | 104 | WB BK VP2-3 |
| DRB1_1302 | 37 | AIEVQIASLATVEGI VQIASLATV | 0.5647 | 111 | WB BK VP2-3 |
| DRB1_1302 | 38 | IEVQIASLATVEGIT VQIASLATV | 0.5646 | 111 | WB BK VP2-3 |
| DRB1_1302 | 218 | YYSNLSPIRPSMVRQ YSNLSPIRP | 0.5481 | 133 | WB BK VP2-3 |
| DRB1_1302 | 199 | ETTWTIVNAPINFYN IVNAPINFY | 0.5463 | 135 | WB BK VP2-3 |
| DRB1_1302 | 200 | TTWTIVNAPINFYNY IVNAPINFY | 0.5452 | 137 | WB BK VP2-3 |
| DRB1_1302 | 198 | EETTWTIVNAPINFY WTIVNAPIN | 0.5445 | 138 | WB BK VP2-3 |
| DRB1_1302 | 298 | LLGLYGTVTPALEAY LGLYGTVTP | 0.5383 | 148 | WB BK VP2-3 |
| DRB1_1302 | 219 | YSNLSPIRPSMVRQV YSNLSPIRP | 0.5366 | 150 | WB BK VP2-3 |
| DRB1_1302 | 201 | TWTIVNAPINFYNYI IVNAPINFY | 0.5349 | 153 | WB BK VP2-3 |
| DRB1_1302 | 79 | AGFAALIQTVTGISS FAALIQTVT | 0.5306 | 161 | WB BK VP2-3 |
| DRB1_1302 | 34 | AAAAIEVQIASLATV IEVQIASLA | 0.5257 | 169 | WB BK VP2-3 |
| DRB1_1302 | 202 | WTIVNAPINFYNYIQ IVNAPINFY | 0.5240 | 172 | WB BK VP2-3 |
| DRB1_1302 | 35 | AAAIEVQIASLATVE VQIASLATV | 0.5233 | 174 | WB BK VP2-3 |
| DRB1_1302 | 299 | LGLYGTVTPALEAYE LGLYGTVTP | 0.5095 | 202 | WB BK VP2-3 |
| DRB1_1302 | 40 | VQIASLATVEGITTT IASLATVEG | 0.5094 | 202 | WB BK VP2-3 |
| DRB1_1302 | 80 | GFAALIQTVTGISSL IQTVTGISS | 0.5080 | 205 | WB BK VP2-3 |
| DRB1_1302 | 39 | EVQIASLATVEGITT IASLATVEG | 0.5076 | 206 | WB BK VP2-3 |
| DRB1_1302 | 81 | FAALIQTVTGISSLA IQTVTGISS | 0.5054 | 211 | WB BK VP2-3 |
| DRB1_1302 | 78 | IAGFAALIQTVTGIS FAALIQTVT | 0.4783 | 283 | WB BK VP2-3 |
| DRB1_1302 | 82 | AALIQTVTGISSLAQ IQTVTGISS | 0.4693 | 312 | WB BK VP2-3 |
| DRB1_1302 | 83 | ALIQTVTGISSLAQV IQTVTGISS | 0.4437 | 411 | WB BK VP2-3 |
| DRB1_1302 | 109 | VSTVGLYQQSGMALE VGLYQQSGM | 0.4417 | 420 | WB BK VP2-3 |
| DRB1_1302 | 132 | DILFPGVNTFVNNIQ FPGVNTFVN | 0.4394 | 431 | WB BK VP2-3 |
| DRB1_1302 | 133 | ILFPGVNTFVNNIQY VNTFVNNIQ | 0.4339 | 457 | WB BK VP2-3 |
| DRB1_1302 | 203 | TIVNAPINFYNYIQD IVNAPINFY | 0.4317 | 468 | WB BK VP2-3 |
| DRB1_1302 | 110 | STVGLYQQSGMALEL VGLYQQSGM | 0.4274 | 490 | WB BK VP2-3 |
| DRB1_1501 | 259 | TQRMDLRNKESVHSG LRNKESVHS | 0.5055 | 211 | WB BK VP2-3 |
| DRB1_1501 | 258 | VTQRMDLRNKESVHS TQRMDLRNK | 0.4963 | 233 | WB BK VP2-3 |
| DRB1_1501 | 260 | QRMDLRNKESVHSGE LRNKESVHS | 0.4888 | 252 | WB BK VP2-3 |
| DRB1_1501 | 261 | RMDLRNKESVHSGEF LRNKESVHS | 0.4818 | 272 | WB BK VP2-3 |
| DRB1_1501 | 292 | QWMLPLLLGLYGTVT MLPLLLGLY | 0.4818 | 272 | WB BK VP2-3 |
| DRB1_1501 | 293 | WMLPLLLGLYGTVTP LLGLYGTVT | 0.4703 | 308 | WB BK VP2-3 |
| DRB1_1501 | 262 | MDLRNKESVHSGEFI LRNKESVHS | 0.4652 | 326 | WB BK VP2-3 |
| DRB1_1501 | 294 | MLPLLLGLYGTVTPA LLGLYGTVT | 0.4567 | 357 | WB BK VP2-3 |
| DRB1_1501 | 295 | LPLLLGLYGTVTPAL LLGLYGTVT | 0.4514 | 378 | WB BK VP2-3 |
| DRB1_1501 | 296 | PLLLGLYGTVTPALE LLGLYGTVT | 0.4387 | 434 | WB BK VP2-3 |
| DRB4_0101 | 213 | NYIQDYYSNLSPIRP IQDYYSNLS | 0.4336 | 458 | WB BK VP2-3 |
| DRB5_0101 | 216 | QDYYSNLSPIRPSMV YYSNLSPIR | 0.5417 | 142 | WB BK VP2-3 |
| DRB5_0101 | 214 | YIQDYYSNLSPIRPS YSNLSPIRP | 0.5315 | 159 | WB BK VP2-3 |
| DRB5_0101 | 215 | IQDYYSNLSPIRPSM YSNLSPIRP | 0.5316 | 159 | WB BK VP2-3 |
| DRB5_0101 | 213 | NYIQDYYSNLSPIRP YYSNLSPIR | 0.5308 | 160 | WB BK VP2-3 |
| DRB5_0101 | 217 | DYYSNLSPIRPSMVR YSNLSPIRP | 0.5081 | 205 | WB BK VP2-3 |
| DRB5_0101 | 218 | YYSNLSPIRPSMVRQ YYSNLSPIR | 0.4623 | 336 | WB BK VP2-3 |
| DRB5_0101 | 174 | PAITSQELQRRTERF ITSQELQRR | 0.4449 | 406 | WB BK VP2-3 |
| DRB5_0101 | 173 | IPAITSQELQRRTER ITSQELQRR | 0.4422 | 418 | WB BK VP2-3 |

[0904] Preferred BK virus fragments of VP1 capable of interacting with one or more MHC class 2 molecules are listed in Table Q.

TABLE Q

Prediction of BK virus VP1 protein specific MHC class 2, 15-mer
peptide binders for 14 MHC class 2 alleles (see FIG. 11) using the
http://www.cbs.dtu.dk/services/NetMHCII/ database. The MHC
class 2 molecules for which no binders were found are not listed.

| | | | | | |
|---|---|---|---|---|---|
| | | | | | Bind Identity |
| Allel | pos | peptide | core | 1-log50k(aff) aff(nM) | level |

| | | | | | |
|---|---|---|---|---|---|
| DRB1_0101 | 164 | QGVLMNYRTKYPQGT LMNYRTKYP | 0.7782 | 11 | SB VP1 |
| DRB1_0101 | 165 | GVLMNYRTKYPQGTI YRTKYPQGT | 0.7768 | 11 | SB VP1 |
| DRB1_0101 | 166 | VLMNYRTKYPQGTIT YRTKYPQGT | 0.7796 | 11 | SB VP1 |
| DRB1_0101 | 167 | LMNYRTKYPQGTITP YRTKYPQGT | 0.7798 | 11 | SB VP1 |
| DRB1_0101 | 168 | MNYRTKYPQGTITPK YRTKYPQGT | 0.7778 | 11 | SB VP1 |
| DRB1_0101 | 118 | KTEVIGITSMLNLHA VIGITSMLN | 0.7623 | 13 | SB VP1 |
| DRB1_0101 | 119 | TEVIGITSMLNLHAG VIGITSMLN | 0.7621 | 13 | SB VP1 |
| DRB1_0101 | 233 | PPVLHVTNTATTVLL VTNTATTVL | 0.7280 | 19 | SB VP1 |
| DRB1_0101 | 234 | PVLHVTNTATTVLLD VTNTATTVL | 0.7252 | 20 | SB VP1 |
| DRB1_0101 | 235 | VLHVTNTATTVLLDE VTNTATTVL | 0.7244 | 20 | SB VP1 |
| DRB1_0101 | 232 | VPPVLHVTNTATTVL VLHVTNTAT | 0.7197 | 21 | SB VP1 |
| DRB1_0101 | 236 | LHVTNTATTVLLDEQ VTNTATTVL | 0.7207 | 21 | SB VP1 |
| DRB1_0101 | 121 | VIGITSMLNLHAGSQ VIGITSMLN | 0.7107 | 23 | SB VP1 |
| DRB1_0101 | 120 | EVIGITSMLNLHAGS VIGITSMLN | 0.7035 | 25 | SB VP1 |
| DRB1_0101 | 266 | ADICGLFTNSSGTQQ ICGLFTNSS | 0.7009 | 25 | SB VP1 |
| DRB1_0101 | 262 | YVSAADICGLFTNSS YVSAADICG | 0.6956 | 27 | SB VP1 |
| DRB1_0101 | 117 | VKTEVIGITSMLNLH VIGITSMLN | 0.6913 | 28 | SB VP1 |
| DRB1_0101 | 116 | TVKTEVIGITSMLNL VIGITSMLN | 0.6903 | 29 | SB VP1 |
| DRB1_0101 | 115 | VTVKTEVIGITSMLN EVIGITSML | 0.6842 | 30 | SB VP1 |
| DRB1_0101 | 169 | NYRTKYPQGTITPKN YRTKYPQGT | 0.6853 | 30 | SB VP1 |
| DRB1_0101 | 265 | AADICGLFTNSSGTQ ICGLFTNSS | 0.6859 | 30 | SB VP1 |
| DRB1_0101 | 170 | YRTKYPQGTITPKNP YRTKYPQGT | 0.6835 | 31 | SB VP1 |
| DRB1_0101 | 264 | SAADICGLFTNSSGT ICGLFTNSS | 0.6829 | 31 | SB VP1 |
| DRB1_0101 | 263 | VSAADICGLFTNSSG ICGLFTNSS | 0.6809 | 32 | SB VP1 |
| DRB1_0101 | 305 | FLLSDLINRRTQKVD LINRRTQKV | 0.6730 | 34 | SB VP1 |
| DRB1_0101 | 304 | SFLLSDLINRRTQKV LSDLINRRT | 0.6723 | 35 | SB VP1 |
| DRB1_0101 | 105 | TCGNLLMWEAVTVKT LLMWEAVTV | 0.6651 | 37 | SB VP1 |
| DRB1_0101 | 106 | CGNLLMWEAVTVKTE LLMWEAVTV | 0.6660 | 37 | SB VP1 |
| DRB1_0101 | 107 | GNLLMWEAVTVKTEV LLMWEAVTV | 0.6675 | 37 | SB VP1 |
| DRB1_0101 | 306 | LLSDLIRRTQKVDG LINRRTQKV | 0.6610 | 39 | SB VP1 |
| DRB1_0101 | 307 | LSDLINRRTQKVDGQ LINRRTQKV | 0.6620 | 39 | SB VP1 |
| DRB1_0101 | 308 | SDLINRRTQKVDGQP LINRRTQKV | 0.6493 | 44 | SB VP1 |
| DRB1_0101 | 122 | IGITSMLNLHAGSQK ITSMLNLHA | 0.6472 | 45 | SB VP1 |
| DRB1_0101 | 108 | NLLMWEAVTVKTEVI MWEAVTVKT | 0.6381 | 50 | WB VP1 |
| DRB1_0101 | 237 | HVTNTATTVLLDEQG VTNTATTVL | 0.6362 | 51 | WB VP1 |
| DRB1_0101 | 267 | DICGLFTNSSGTQQW ICGLFTNSS | 0.6283 | 56 | WB VP1 |
| DRB1_0101 | 268 | ICGLFTNSSGTQQWR ICGLFTNSS | 0.6286 | 56 | WB VP1 |
| DRB1_0101 | 104 | LTCGNLLMWEAVTVK LLMWEAVTV | 0.6269 | 57 | WB VP1 |
| DRB1_0101 | 317 | KVDGQPMYGMESQVE VDGQPMYGM | 0.6232 | 59 | WB VP1 |
| DRB1_0101 | 318 | VDGQPMYGMESQVEE MYGMESQVE | 0.6230 | 59 | WB VP1 |
| DRB1_0101 | 238 | VTNTATTVLLDEQGV VTNTATTVL | 0.6202 | 61 | WB VP1 |
| DRB1_0101 | 252 | VGPLCKADSLYVSAA LCKADSLYV | 0.6161 | 64 | WB VP1 |
| DRB1_0101 | 253 | GPLCKADSLYVSAAD LCKADSLYV | 0.6146 | 65 | WB VP1 |
| DRB1_0101 | 250 | QGVGPLCKADSLYVS LCKADSLYV | 0.6129 | 66 | WB VP1 |
| DRB1_0101 | 251 | GVGPLCKADSLYVSA LCKADSLYV | 0.6115 | 67 | WB VP1 |
| DRB1_0101 | 109 | LLMWEAVTVKTEVIG MWEAVTVKT | 0.6104 | 68 | WB VP1 |
| DRB1_0101 | 249 | EQGVGPLCKADSLYV VGPLCKADS | 0.6000 | 76 | WB VP1 |
| DRB1_0101 | 123 | GITSMLNLHAGSQKV ITSMLNLHA | 0.5940 | 81 | WB VP1 |
| DRB1_0101 | 124 | ITSMLNLHAGSQKVH ITSMLNLHA | 0.5895 | 85 | WB VP1 |
| DRB1_0101 | 320 | GQPMYGMESQVEEVR MYGMESQVE | 0.5805 | 94 | WB VP1 |
| DRB1_0101 | 103 | DLTCGNLLMWEAVTV LTCGNLLMW | 0.5786 | 96 | WB VP1 |
| DRB1_0101 | 319 | DGQPMYGMESQVEEV MYGMESQVE | 0.5779 | 96 | WB VP1 |
| DRB1_0101 | 315 | TQKVDGQPMYGMESQ VDGQPMYGM | 0.5631 | 113 | WB VP1 |
| DRB1_0101 | 309 | DLINRRTQKVDGQPM LINRRTQKV | 0.5612 | 115 | WB VP1 |
| DRB1_0101 | 314 | RTQKVDGQPMYGMES VDGQPMYGM | 0.5605 | 116 | WB VP1 |
| DRB1_0101 | 316 | QKVDGQPMYGMESQV VDGQPMYGM | 0.5604 | 116 | WB VP1 |
| DRB1_0101 | 321 | QPMYGMESQVEEVRV MYGMESQVE | 0.5604 | 116 | WB VP1 |
| DRB1_0101 | 310 | LINRRTQKVDGQPMY LINRRTQKV | 0.5595 | 117 | WB VP1 |
| DRB1_0101 | 161 | LEMQGVLMNYRTKYP MQGVLMNYR | 0.5570 | 121 | WB VP1 |
| DRB1_0101 | 158 | GDPLEMQGVLMNYRT MQGVLMNYR | 0.5484 | 132 | WB VP1 |
| DRB1_0101 | 256 | CKADSLYVSAADICG ADSLYVSAA | 0.5470 | 135 | WB VP1 |
| DRB1_0101 | 257 | KADSLYVSAADICGL YVSAADICG | 0.5462 | 136 | WB VP1 |
| DRB1_0101 | 84 | RKMLPCYSTARIPLP RKMLPCYST | 0.5450 | 137 | WB VP1 |
| DRB1_0101 | 258 | ADSLYVSAADICGLF YVSAADICG | 0.5446 | 138 | WB VP1 |
| DRB1_0101 | 259 | DSLYVSAADICGLFT YVSAADICG | 0.5443 | 138 | WB VP1 |
| DRB1_0101 | 159 | DPLEMQGVLMNYRTK MQGVLMNYR | 0.5441 | 139 | WB VP1 |
| DRB1_0101 | 260 | SLYVSAADICGLFTN YVSAADICG | 0.5396 | 146 | WB VP1 |
| DRB1_0101 | 81 | SPDRKMLPCYSTARI RKMLPCYST | 0.5323 | 158 | WB VP1 |
| DRB1_0101 | 110 | LMWEAVTVKTEVIGI MWEAVTVKT | 0.5308 | 160 | WB VP1 |
| DRB1_0101 | 231 | NVPPVLHVTNTATTV LHVTNTATT | 0.5288 | 164 | WB VP1 |
| DRB1_0101 | 177 | GTITPKNPTAQSQVM ITPKNPTAQ | 0.5283 | 165 | WB VP1 |
| DRB1_0101 | 82 | PDRKMLPCYSTARIP RKMLPCYST | 0.5256 | 170 | WB VP1 |
| DRB1_0101 | 254 | PLCKADSLYVSAADI LCKADSLYV | 0.5231 | 174 | WB VP1 |
| DRB1_0101 | 162 | EMQGVLMNYRTKYPQ LMNYRTKYP | 0.5203 | 179 | WB VP1 |
| DRB1_0101 | 80 | DSPDRKMLPCYSTAR RKMLPCYST | 0.5206 | 179 | WB VP1 |
| DRB1_0101 | 255 | LCKADSLYVSAADIC LCKADSLYV | 0.5180 | 184 | WB VP1 |
| DRB1_0101 | 294 | KRSVKNPYPISFLLS VKNPYPISF | 0.5180 | 184 | WB VP1 |
| DRB1_0101 | 313 | RRTQKVDGQPMYGME VDGQPMYGM | 0.5170 | 186 | WB VP1 |
| DRB1_0101 | 157 | GGDPLEMQGVLMNYR LEMQGVLMN | 0.5164 | 187 | WB VP1 |
| DRB1_0101 | 295 | RSVKNPYPISFLLSD VKNPYPISF | 0.5161 | 188 | WB VP1 |
| DRB1_0101 | 312 | NRRTQKVDGQPMYGM KVDGQPMYG | 0.5163 | 188 | WB VP1 |
| DRB1_0101 | 160 | PLEMQGVLMNYRTKY MQGVLMNYR | 0.5148 | 190 | WB VP1 |
| DRB1_0101 | 269 | CGLFTNSSGTQQWRG FTNSSGTQQ | 0.5138 | 193 | WB VP1 |
| DRB1_0101 | 292 | LRKRSVKNPYPISFL VKNPYPISF | 0.5094 | 202 | WB VP1 |
| DRB1_0101 | 163 | MQGVLMNYRTKYPQG LMNYRTKYP | 0.5072 | 207 | WB VP1 |
| DRB1_0101 | 230 | ENVPPVLHVTNTATT VLHVTNTAT | 0.5053 | 211 | WB VP1 |
| DRB1_0101 | 293 | RKRSVKNPYPISFLL VKNPYPISF | 0.5053 | 211 | WB VP1 |
| DRB1_0101 | 270 | GLFTNSSGTQQWRGL FTNSSGTQQ | 0.5035 | 215 | WB VP1 |
| DRB1_0101 | 175 | PQGTITPKNPTAQSQ ITPKNPTAQ | 0.5026 | 217 | WB VP1 |
| DRB1_0101 | 176 | QGTITPKNPTAQSQV ITPKNPTAQ | 0.5007 | 222 | WB VP1 |
| DRB1_0101 | 291 | RLRKRSVKNPYPISF LRKRSVKNP | 0.5005 | 222 | WB VP1 |
| DRB1_0101 | 125 | TSMLNLHAGSQKVHE MLNLHAGSQ | 0.4968 | 231 | WB VP1 |
| DRB1_0101 | 62 | DNLRGYSQHLSAENA LRGYSQHLS | 0.4929 | 241 | WB VP1 |
| DRB1_0101 | 83 | DRKMLPCYSTARIPL MLPCYSTAR | 0.4902 | 249 | WB VP1 |
| DRB1_0101 | 87 | LPCYSTARIPLPNLN YSTARIPLP | 0.4891 | 252 | WB VP1 |
| DRB1_0101 | 85 | KMLPCYSTARIPLPN YSTARIPLP | 0.4865 | 259 | WB VP1 |
| DRB1_0101 | 349 | IRYIDRQGQLQTKMV YIDRQGQLQ | 0.4856 | 261 | WB VP1 |
| DRB1_0101 | 111 | MWEAVTVKTEVIGIT MWEAVTVKT | 0.4847 | 264 | WB VP1 |
| DRB1_0101 | 88 | PCYSTARIPLPNLNE YSTARIPLP | 0.4819 | 272 | WB VP1 |
| DRB1_0101 | 86 | MLPCYSTARIPLPNL YSTARIPLP | 0.4817 | 273 | WB VP1 |
| DRB1_0101 | 23 | VQVPKLLIKGGVEVL LLIKGGVEV | 0.4803 | 277 | WB VP1 |
| DRB1_0101 | 61 | DDNLRGYSQHLSAEN LRGYSQHLS | 0.4800 | 278 | WB VP1 |
| DRB1_0101 | 179 | ITPKNPTAQSQVMNT ITPKNPTAQ | 0.4786 | 282 | WB VP1 |
| DRB1_0101 | 285 | ARYFKIRLRKRSVKN FKIRLRKRS | 0.4787 | 282 | WB VP1 |
| DRB1_0101 | 155 | AVGGDPLEMQGVLMN GDPLEMQGV | 0.4780 | 284 | WB VP1 |
| DRB1_0101 | 284 | LARYFKIRLRKRSVK FKIRLRKRS | 0.4764 | 289 | WB VP1 |
| DRB1_0101 | 178 | TITPKNPTAQSQVMN ITPKNPTAQ | 0.4755 | 291 | WB VP1 |
| DRB1_0101 | 282 | RGLARYFKIRLRKRS YFKIRLRKR | 0.4754 | 292 | WB VP1 |
| DRB1_0101 | 283 | GLARYFKIRLRKRSV FKIRLRKRS | 0.4744 | 295 | WB VP1 |
| DRB1_0101 | 173 | KYPQGTITPKNPTAQ PQGTITPKN | 0.4716 | 304 | WB VP1 |
| DRB1_0101 | 174 | YPQGTITPKNPTAQS ITPKNPTAQ | 0.4716 | 304 | WB VP1 |
| DRB1_0101 | 224 | GTYTGGENVPPVLHV YTGGENVPP | 0.4697 | 310 | WB VP1 |
| DRB1_0101 | 322 | PMYGMESQVEEVRVF MYGMESQVE | 0.4691 | 312 | WB VP1 |
| DRB1_0101 | 156 | VGGDPLEMQGVLMNY LEMQGVLMN | 0.4685 | 314 | WB VP1 |
| DRB1_0101 | 25 | VPKLLIKGGVEVLEV LLIKGGVEV | 0.4678 | 317 | WB VP1 |
| DRB1_0101 | 24 | QVPKLLIKGGVEVLE LLIKGGVEV | 0.4674 | 318 | WB VP1 |
| DRB1_0101 | 22 | PVQVPKLLIKGGVEV VPKLLIKGG | 0.4668 | 320 | WB VP1 |
| DRB1_0101 | 261 | LYVSAADICGLFTNS YVSAADICG | 0.4665 | 321 | WB VP1 |
| DRB1_0101 | 26 | PKLLIKGGVEVLEVK LLIKGGVEV | 0.4633 | 332 | WB VP1 |
| DRB1_0101 | 151 | FHFFAVGGDPLEMQG VGGDPLEMQ | 0.4633 | 333 | WB VP1 |
| DRB1_0101 | 323 | MYGMESQVEEVRVFD MYGMESQVE | 0.4626 | 335 | WB VP1 |
| DRB1_0101 | 150 | NFHFFAVGGDPLEMQ AVGGDPLEM | 0.4611 | 340 | WB VP1 |
| DRB1_0101 | 223 | FGTYTGGENVPPVLH YTGGENVPP | 0.4596 | 346 | WB VP1 |
| DRB1_0101 | 297 | VKNPYPISFLLSDLI VKNPYPISF | 0.4588 | 349 | WB VP1 |
| DRB1_0101 | 63 | NLRGYSQHLSAENAF YSQHLSAEN | 0.4583 | 351 | WB VP1 |
| DRB1_0101 | 152 | HFFAVGGDPLEMQGV VGGDPLEMQ | 0.4576 | 354 | WB VP1 |
| DRB1_0101 | 286 | RYFKIRLRKRSVKNP FKIRLRKRS | 0.4564 | 358 | WB VP1 |
| DRB1_0101 | 64 | LRGYSQHLSAENAFE YSQHLSAEN | 0.4559 | 360 | WB VP1 |
| DRB1_0101 | 220 | TRYFGTYTGGENVPP YFGTYTGGE | 0.4546 | 365 | WB VP1 |
| DRB1_0101 | 301 | YPISFLLSDLINRRT ISFLLSDLI | 0.4540 | 368 | WB VP1 |
| DRB1_0101 | 126 | SMLNLHAGSQKVHEN MLNLHAGSQ | 0.4520 | 376 | WB VP1 |
| DRB1_0101 | 34 | VEVLEVKTGVDAITE VKTGVDAIT | 0.4507 | 381 | WB VP1 |
| DRB1_0101 | 33 | GVEVLEVKTGVDAIT VEVLEVKTG | 0.4499 | 385 | WB VP1 |
| DRB1_0101 | 226 | YTGGENVPPVLHVTN YTGGENVPP | 0.4471 | 397 | WB VP1 |
| DRB1_0101 | 303 | ISFLLSDLINRRTQK LSDLINRRT | 0.4468 | 397 | WB VP1 |
| DRB1_0101 | 153 | FFAVGGDPLEMQGVL VGGDPLEMQ | 0.4446 | 407 | WB VP1 |
| DRB1_0101 | 225 | TYTGGENVPPVLHVT YTGGENVPP | 0.4439 | 410 | WB VP1 |
| DRB1_0101 | 302 | PISFLLSDLINRRTQ LSDLINRRT | 0.4439 | 411 | WB VP1 |
| DRB1_0101 | 36 | VLEVKTGVDAITEVE VKTGVDAIT | 0.4399 | 429 | WB VP1 |
| DRB1_0101 | 35 | EVLEVKTGVDAITEV VKTGVDAIT | 0.4395 | 430 | WB VP1 |
| DRB1_0101 | 37 | LEVKTGVDAITEVEC VKTGVDAIT | 0.4381 | 437 | WB VP1 |
| DRB1_0101 | 127 | MLNLHAGSQKVHENG MLNLHAGSQ | 0.4375 | 440 | WB VP1 |
| DRB1_0101 | 229 | GENVPPVLHVTNTAT NVPPVLHVT | 0.4368 | 443 | WB VP1 |
| DRB1_0101 | 60 | PDDNLRGYSQHLSAE LRGYSQHLS | 0.4346 | 454 | WB VP1 |
| DRB1_0101 | 59 | DPDDNLRGYSQHLSA LRGYSQHLS | 0.4337 | 458 | WB VP1 |
| DRB1_0101 | 65 | RGYSQHLSAENAFES YSQHLSAEN | 0.4335 | 459 | WB VP1 |
| DRB1_0101 | 27 | KLLIKGGVEVLEVKT LIKGGVEVL | 0.4331 | 461 | WB VP1 |
| DRB1_0101 | 221 | RYFGTYTGGENVPPV YTGGENVPP | 0.4318 | 468 | WB VP1 |
| DRB1_0101 | 296 | SVKNPYPISFLLSDL VKNPYPISF | 0.4317 | 468 | WB VP1 |
| DRB1_0101 | 222 | YFGTYTGGENVPPVL YTGGENVPP | 0.4313 | 470 | WB VP1 |
| DRB1_0101 | 271 | LFTNSSGTQQWRGLA FTNSSGTQQ | 0.4313 | 470 | WB VP1 |
| DRB1_0101 | 58 | GDPDDNLRGYSQHLS NLRGYSQHL | 0.4305 | 474 | WB VP1 |
| DRB1_0101 | 281 | WRGLARYFKIRLRKR WRGLARYFK | 0.4285 | 485 | WB VP1 |
| DRB1_0101 | 276 | SGTQQWRGLARYFKI WRGLARYFK | 0.4263 | 496 | WB VP1 |
| DRB1_0101 | 154 | FAVGGDPLEMQGVLM VGGDPLEMQ | 0.4261 | 498 | WB VP1 |
| DRB1_0101 | 277 | GTQQWRGLARYFKIR WRGLARYFK | 0.4259 | 498 | WB VP1 |
| DRB1_0101 | 275 | SSGTQQWRGLARYFK QQWRGLARY | 0.4258 | 499 | WB VP1 |
| DRB1_0401 | 118 | KTEVIGITSMLNLHA VIGITSMLN | 0.5278 | 165 | WB VP1 |
| DRB1_0401 | 119 | TEVIGITSMLNLHAG ITSMLNLHA | 0.5243 | 172 | WB VP1 |
| DRB1_0401 | 266 | ADICGLFTNSSGTQQ ICGLFTNSS | 0.5078 | 206 | WB VP1 |
| DRB1_0401 | 265 | AADICGLFTNSSGTQ ICGLFTNSS | 0.5038 | 215 | WB VP1 |
| DRB1_0401 | 120 | EVIGITSMLNLHAGS ITSMLNLHA | 0.4938 | 239 | WB VP1 |
| DRB1_0401 | 121 | VIGITSMLNLHAGSQ ITSMLNLHA | 0.4931 | 241 | WB VP1 |
| DRB1_0401 | 262 | YVSAADICGLFTNSS YVSAADICG | 0.4874 | 256 | WB VP1 |
| DRB1_0401 | 264 | SAADICGLFTNSSGT ICGLFTNSS | 0.4849 | 263 | WB VP1 |
| DRB1_0401 | 263 | VSAADICGLFTNSSG ICGLFTNSS | 0.4805 | 276 | WB VP1 |
| DRB1_0401 | 287 | YFKIRLRKRSVKNPY RLRKRSVKN | 0.4585 | 350 | WB VP1 |
| DRB1_0401 | 304 | SFLLSDLINRRTQKV LLSDLINRR | 0.4554 | 362 | WB VP1 |
| DRB1_0401 | 288 | FKIRLRKRSVKNPYP RKRSVKNPY | 0.4485 | 390 | WB VP1 |
| DRB1_0401 | 122 | IGITSMLNLHAGSQK ITSMLNLHA | 0.4473 | 395 | WB VP1 |
| DRB1_0401 | 291 | RLRKRSVKNPYPISF RKRSVKNPY | 0.4444 | 408 | WB VP1 |
| DRB1_0401 | 232 | VPPVLHVTNTATTVL PVLHVTNTA | 0.4431 | 414 | WB VP1 |
| DRB1_0401 | 115 | VTVKTEVIGITSMLN VKTEVIGIT | 0.4422 | 418 | WB VP1 |
| DRB1_0401 | 289 | KIRLRKRSVKNPYPI RKRSVKNPY | 0.4410 | 424 | WB VP1 |
| DRB1_0401 | 117 | VKTEVIGITSMLNLH VIGITSMLN | 0.4404 | 426 | WB VP1 |
| DRB1_0401 | 268 | ICGLFTNSSGTQQWR ICGLFTNSS | 0.4395 | 430 | WB VP1 |
| DRB1_0401 | 267 | DICGLFTNSSGTQQW ICGLFTNSS | 0.4385 | 435 | WB VP1 |
| DRB1_0401 | 230 | ENVPPVLHVTNTATT PVLHVTNTA | 0.4370 | 442 | WB VP1 |
| DRB1_0401 | 290 | IRLRKRSVKNPYPIS RKRSVKNPY | 0.4334 | 460 | WB VP1 |
| DRB1_0401 | 231 | NVPPVLHVTNTATTV PVLHVTNTA | 0.4332 | 461 | WB VP1 |
| DRB1_0401 | 301 | YPISFLLSDLINRRT LLSDLINRR | 0.4287 | 483 | WB VP1 |
| DRB1_0401 | 116 | TVKTEVIGITSMLNL VIGITSMLN | 0.4285 | 485 | WB VP1 |
| DRB1_0401 | 300 | PYPISFLLSDLINRR ISFLLSDLI | 0.4265 | 495 | WB VP1 |
| DRB1_0404 | 121 | VIGITSMLNLHAGSQ ITSMLNLHA | 0.6731 | 34 | SB VP1 |
| DRB1_0404 | 122 | IGITSMLNLHAGSQK MLNLHAGSQ | 0.6665 | 37 | SB VP1 |
| DRB1_0404 | 124 | ITSMLNLHAGSQKVH MLNLHAGSQ | 0.6499 | 44 | SB VP1 |
| DRB1_0404 | 123 | GITSMLNLHAGSQKV MLNLHAGSQ | 0.6491 | 45 | SB VP1 |
| DRB1_0404 | 163 | MQGVLMNYRTKYPQG LMNYRTKYP | 0.6123 | 66 | WB VP1 |
| DRB1_0404 | 125 | TSMLNLHAGSQKVHE MLNLHAGSQ | 0.6117 | 67 | WB VP1 |
| DRB1_0404 | 161 | LEMQGVLMNYRTKYP MQGVLMNYR | 0.6109 | 67 | WB VP1 |
| DRB1_0404 | 164 | QGVLMNYRTKYPQGT LMNYRTKYP | 0.6092 | 69 | WB VP1 |
| DRB1_0404 | 162 | EMQGVLMNYRTKYPQ LMNYRTKYP | 0.6059 | 71 | WB VP1 |
| DRB1_0404 | 165 | GVLMNYRTKYPQGTI LMNYRTKYP | 0.6046 | 72 | WB VP1 |
| DRB1_0404 | 126 | SMLNLHAGSQKVHEN MLNLHAGSQ | 0.5148 | 190 | WB VP1 |
| DRB1_0404 | 127 | MLNLHAGSQKVHENG MLNLHAGSQ | 0.5132 | 194 | WB VP1 |
| DRB1_0404 | 166 | VLMNYRTKYPQGTIT LMNYRTKYP | 0.5108 | 199 | WB VP1 |
| DRB1_0404 | 266 | ADICGLFTNSSGTQQ ICGLFTNSS | 0.5092 | 202 | WB VP1 |
| DRB1_0404 | 265 | AADICGLFTNSSGTQ ICGLFTNSS | 0.5081 | 205 | WB VP1 |
| DRB1_0404 | 167 | LMNYRTKYPQGTITP LMNYRTKYP | 0.5069 | 208 | WB VP1 |
| DRB1_0404 | 304 | SFLLSDLINRRTQKV LLSDLINRR | 0.4931 | 241 | WB VP1 |
| DRB1_0404 | 301 | YPISFLLSDLINRRT LLSDLINRR | 0.4876 | 256 | WB VP1 |
| DRB1_0404 | 119 | TEVIGITSMLNLHAG ITSMLNLHA | 0.4851 | 263 | WB VP1 |
| DRB1_0404 | 302 | PISFLLSDLINRRTQ LLSDLINRR | 0.4821 | 271 | WB VP1 |
| DRB1_0404 | 303 | ISFLLSDLINRRTQK LLSDLINRR | 0.4816 | 273 | WB VP1 |
| DRB1_0404 | 118 | KTEVIGITSMLNLHA VIGITSMLN | 0.4807 | 275 | WB VP1 |
| DRB1_0404 | 46 | ITEVECFLNPEMGDP TEVECFLNP | 0.4807 | 275 | WB VP1 |
| DRB1_0404 | 47 | TEVECFLNPEMGDPD FLNPEMGDP | 0.4801 | 277 | WB VP1 |
| DRB1_0404 | 48 | EVECFLNPEMGDPDD FLNPEMGDP | 0.4754 | 292 | WB VP1 |
| DRB1_0404 | 50 | ECFLNPEMGDPDDNL FLNPEMGDP | 0.4751 | 293 | WB VP1 |
| DRB1_0404 | 49 | VECFLNPEMGDPDDN FLNPEMGDP | 0.4745 | 295 | WB VP1 |
| DRB1_0404 | 267 | DICGLFTNSSGTQQW LFTNSSGTQ | 0.4682 | 315 | WB VP1 |
| DRB1_0404 | 268 | ICGLFTNSSGTQQWR LFTNSSGTQ | 0.4665 | 321 | WB VP1 |
| DRB1_0404 | 84 | RKMLPCYSTARIPLP MLPCYSTAR | 0.4629 | 334 | WB VP1 |
| DRB1_0404 | 105 | TCGNLLMWEAVTVKT LMWEAVTVK | 0.4618 | 338 | WB VP1 |
| DRB1_0404 | 106 | CGNLLMWEAVTVKTE LMWEAVTVK | 0.4597 | 346 | WB VP1 |
| DRB1_0404 | 232 | VPPVLHVTNTATTVL LHVTNTATT | 0.4584 | 351 | WB VP1 |
| DRB1_0404 | 300 | PYPISFLLSDLINRR FLLSDLINR | 0.4582 | 351 | WB VP1 |
| DRB1_0404 | 120 | EVIGITSMLNLHAGS ITSMLNLHA | 0.4575 | 354 | WB VP1 |
| DRB1_0404 | 107 | GNLLMWEAVTVKTEV LMWEAVTVK | 0.4552 | 363 | WB VP1 |
| DRB1_0404 | 233 | PPVLHVTNTATTVLL LHVTNTATT | 0.4466 | 398 | WB VP1 |
| DRB1_0404 | 230 | ENVPPVLHVTNTATT VLHVTNTAT | 0.4465 | 399 | WB VP1 |
| DRB1_0404 | 108 | NLLMWEAVTVKTEVI LMWEAVTVK | 0.4456 | 403 | WB VP1 |
| DRB1_0404 | 305 | FLLSDLINRRTQKVD LLSDLINRR | 0.4431 | 414 | WB VP1 |
| DRB1_0404 | 192 | NTDHKAYLDKNNAYP KAYLDKNNA | 0.4422 | 418 | WB VP1 |
| DRB1_0404 | 193 | TDHKAYLDKNNAYPV YLDKNNAYP | 0.4402 | 427 | WB VP1 |
| DRB1_0404 | 231 | NVPPVLHVTNTATTV LHVTNTATT | 0.4401 | 428 | WB VP1 |
| DRB1_0404 | 194 | DHKAYLDKNNAYPVE YLDKNNAYP | 0.4393 | 431 | WB VP1 |
| DRB1_0404 | 85 | KMLPCYSTARIPLPN YSTARIPLP | 0.4335 | 459 | WB VP1 |
| DRB1_0404 | 234 | PVLHVTNTATTVLLD LHVTNTATT | 0.4328 | 463 | WB VP1 |
| DRB1_0404 | 195 | HKAYLDKNNAYPVEC YLDKNNAYP | 0.4303 | 476 | WB VP1 |
| DRB1_0404 | 196 | KAYLDKNNAYPVECW YLDKNNAYP | 0.4288 | 483 | WB VP1 |
| DRB1_0404 | 104 | LTCGNLLMWEAVTVK LLMWEAVTV | 0.4272 | 492 | WB VP1 |
| DRB1_0405 | 205 | YPVECWIPDPSRNEN WIPDPSRNE | 0.4758 | 291 | WB VP1 |
| DRB1_0405 | 204 | AYPVECWIPDPSRNE ECWIPDPSR | 0.4737 | 297 | WB VP1 |
| DRB1_0405 | 118 | KTEVIGITSMLNLHA VIGITSMLN | 0.4649 | 327 | WB VP1 |
| DRB1_0405 | 119 | TEVIGITSMLNLHAG VIGITSMLN | 0.4617 | 338 | WB VP1 |
| DRB1_0405 | 88 | PCYSTARIPLPNLNE YSTARIPLP | 0.4515 | 378 | WB VP1 |
| DRB1_0405 | 206 | PVECWIPDPSRNENT WIPDPSRNE | 0.4387 | 434 | WB VP1 |
| DRB1_0405 | 115 | VTVKTEVIGITSMLN TVKTEVIGI | 0.4272 | 492 | WB VP1 |
| DRB1_0701 | 232 | VPPVLHVTNTATTVL VLHVTNTAT | 0.7832 | 10 | SB VP1 |
| DRB1_0701 | 233 | PPVLHVTNTATTVLL VTNTATTVL | 0.7867 | 10 | SB VP1 |
| DRB1_0701 | 234 | PVLHVTNTATTVLLD VTNTATTVL | 0.7821 | 11 | SB VP1 |
| DRB1_0701 | 235 | VLHVTNTATTVLLDE VTNTATTVL | 0.7792 | 11 | SB VP1 |
| DRB1_0701 | 236 | LHVTNTATTVLLDEQ VTNTATTVL | 0.7807 | 11 | SB VP1 |
| DRB1_0701 | 237 | HVTNTATTVLLDEQG VTNTATTVL | 0.6865 | 30 | SB VP1 |
| DRB1_0701 | 238 | VTNTATTVLLDEQGV VTNTATTVL | 0.6833 | 31 | SB VP1 |
| DRB1_0701 | 304 | SFLLSDLINRRTQKV LSDLINRRT | 0.5382 | 148 | WB VP1 |
| DRB1_0701 | 308 | SDLINRRTQKVDGQP LINRRTQKV | 0.5370 | 150 | WB VP1 |
| DRB1_0701 | 305 | FLLSDLINRRTQKVD LINRRTQKV | 0.5365 | 151 | WB VP1 |
| DRB1_0701 | 306 | LLSDLINRRTQKVDG LINRRTQKV | 0.5340 | 155 | WB VP1 |
| DRB1_0701 | 307 | LSDLINRRTQKVDGQ LINRRTQKV | 0.5332 | 156 | WB VP1 |
| DRB1_0701 | 231 | NVPPVLHVTNTATTV VLHVTNTAT | 0.4751 | 293 | WB VP1 |
| DRB1_0701 | 107 | GNLLMWEAVTVKTEV LLMWEAVTV | 0.4593 | 347 | WB VP1 |
| DRB1_0701 | 105 | TCGNLLMWEAVTVKT LLMWEAVTV | 0.4539 | 368 | WB VP1 |
| DRB1_0701 | 106 | CGNLLMWEAVTVKTE LLMWEAVTV | 0.4530 | 372 | WB VP1 |
| DRB1_0701 | 104 | LTCGNLLMWEAVTVK LLMWEAVTV | 0.4517 | 377 | WB VP1 |
| DRB1_0701 | 103 | DLTCGNLLMWEAVTV LTCGNLLMW | 0.4475 | 395 | WB VP1 |
| DRB1_0701 | 230 | ENVPPVLHVTNTATT VLHVTNTAT | 0.4461 | 401 | WB VP1 |
| DRB1_0701 | 309 | DLINRRTQKVDGQPM LINRRTQKV | 0.4383 | 436 | WB VP1 |
| DRB1_0701 | 310 | LINRRTQKVDGQPMY LINRRTQKV | 0.4370 | 442 | WB VP1 |
| DRB1_0701 | 285 | ARYFKIRLRKRSVKN YFKIRLRKR | 0.4289 | 483 | WB VP1 |
| DRB1_0701 | 249 | EQGVGPLCKADSLYV PLCKADSLY | 0.4260 | 498 | WB VP1 |
| DRB1_0802 | 282 | RGLARYFKIRLRKRS RGLARYFKI | 0.5826 | 91 | WB VP1 |
| DRB1_0802 | 283 | GLARYFKIRLRKRSV FKIRLRKRS | 0.5827 | 91 | WB VP1 |
| DRB1_0802 | 284 | LARYFKIRLRKRSVK FKIRLRKRS | 0.5824 | 92 | WB VP1 |
| DRB1_0802 | 285 | ARYFKIRLRKRSVKN FKIRLRKRS | 0.5816 | 92 | WB VP1 |
| DRB1_0802 | 286 | RYFKIRLRKRSVKNP FKIRLRKRS | 0.5825 | 92 | WB VP1 |
| DRB1_0802 | 287 | YFKIRLRKRSVKNPY FKIRLRKRS | 0.4907 | 247 | WB VP1 |
| DRB1_0802 | 288 | FKIRLRKRSVKNPYP FKIRLRKRS | 0.4905 | 248 | WB VP1 |
| DRB1_0901 | 84 | RKMLPCYSTARIPLP LPCYSTARI | 0.5150 | 190 | WB VP1 |
| DRB1_0901 | 85 | KMLPCYSTARIPLPN YSTARIPLP | 0.5124 | 195 | WB VP1 |
| DRB1_0901 | 86 | MLPCYSTARIPLPNL YSTARIPLP | 0.4991 | 226 | WB VP1 |
| DRB1_0901 | 87 | LPCYSTARIPLPNLN YSTARIPLP | 0.4968 | 231 | WB VP1 |
| DRB1_0901 | 88 | PCYSTARIPLPNLNE YSTARIPLP | 0.4598 | 345 | WB VP1 |
| DRB1_1101 | 276 | SGTQQWRGLARYFKI WRGLARYFK | 0.5202 | 180 | WB VP1 |
| DRB1_1101 | 277 | GTQQWRGLARYFKIR WRGLARYFK | 0.5200 | 180 | WB VP1 |
| DRB1_1101 | 278 | TQQWRGLARYFKIRL WRGLARYFK | 0.5165 | 187 | WB VP1 |
| DRB1_1101 | 275 | SSGTQQWRGLARYFK QQWRGLARY | 0.5148 | 191 | WB VP1 |
| DRB1_1101 | 279 | QQWRGLARYFKIRLR WRGLARYFK | 0.5146 | 191 | WB VP1 |
| DRB1_1101 | 281 | WRGLARYFKIRLRKR WRGLARYFK | 0.4569 | 357 | WB VP1 |
| DRB1_1101 | 280 | QWRGLARYFKIRLRK WRGLARYFK | 0.4404 | 426 | WB VP1 |
| DRB1_1302 | 161 | LEMQGVLMNYRTKYP VLMNYRTKY | 0.6366 | 51 | WB VP1 |
| DRB1_1302 | 162 | EMQGVLMNYRTKYPQ VLMNYRTKY | 0.6357 | 51 | WB VP1 |
| DRB1_1302 | 163 | MQGVLMNYRTKYPQG VLMNYRTKY | 0.6190 | 62 | WB VP1 |
| DRB1_1302 | 164 | QGVLMNYRTKYPQGT VLMNYRTKY | 0.6178 | 63 | WB VP1 |
| DRB1_1302 | 160 | PLEMQGVLMNYRTKY QGVLMNYRT | 0.6118 | 67 | WB VP1 |
| DRB1_1302 | 233 | PPVLHVTNTATTVLL VTNTATTVL | 0.6016 | 75 | WB VP1 |
| DRB1_1302 | 234 | PVLHVTNTATTVLLD VTNTATTVL | 0.5831 | 91 | WB VP1 |
| DRB1_1302 | 232 | VPPVLHVTNTATTVL VLHVTNTAT | 0.5808 | 93 | WB VP1 |
| DRB1_1302 | 235 | VLHVTNTATTVLLDE VTNTATTVL | 0.5658 | 110 | WB VP1 |
| DRB1_1302 | 284 | LARYFKIRLRKRSVK FKIRLRKRS | 0.5521 | 127 | WB VP1 |
| DRB1_1302 | 165 | GVLMNYRTKYPQGTI VLMNYRTKY | 0.5482 | 133 | WB VP1 |
| DRB1_1302 | 285 | ARYFKIRLRKRSVKN FKIRLRKRS | 0.5453 | 137 | WB VP1 |
| DRB1_1302 | 286 | RYFKIRLRKRSVKNP FKIRLRKRS | 0.5448 | 138 | WB VP1 |
| DRB1_1302 | 287 | YFKIRLRKRSVKNPY IRLRKRSVK | 0.5427 | 141 | WB VP1 |
| DRB1_1302 | 236 | LHVTNTATTVLLDEQ VTNTATTVL | 0.5416 | 143 | WB VP1 |
| DRB1_1302 | 288 | FKIRLRKRSVKNPYP IRLRKRSVK | 0.5351 | 153 | WB VP1 |
| DRB1_1302 | 117 | VKTEVIGITSMLNLH IGITSMLNL | 0.5226 | 175 | WB VP1 |
| DRB1_1302 | 166 | VLMNYRTKYPQGTIT VLMNYRTKY | 0.5220 | 176 | WB VP1 |
| DRB1_1302 | 116 | TVKTEVIGITSMLNL EVIGITSML | 0.5120 | 196 | WB VP1 |
| DRB1_1302 | 282 | RGLARYFKIRLRKRS LARYFKIRL | 0.4951 | 236 | WB VP1 |
| DRB1_1302 | 118 | KTEVIGITSMLNLHA IGITSMLNL | 0.4947 | 237 | WB VP1 |
| DRB1_1302 | 283 | GLARYFKIRLRKRSV FKIRLRKRS | 0.4916 | 245 | WB VP1 |
| DRB1_1302 | 304 | SFLLSDLINRRTQKV LLSDLINRR | 0.4893 | 251 | WB VP1 |
| DRB1_1302 | 305 | FLLSDLINRRTQKVD LINRRTQKV | 0.4877 | 255 | WB VP1 |
| DRB1_1302 | 119 | TEVIGITSMLNLHAG IGITSMLNL | 0.4792 | 280 | WB VP1 |
| DRB1_1302 | 120 | EVIGITSMLNLHAGS IGITSMLNL | 0.4786 | 282 | WB VP1 |
| DRB1_1302 | 91 | STARIPLPNLNEDLT ARIPLPNLN | 0.4726 | 301 | WB VP1 |
| DRB1_1302 | 237 | HVTNTATTVLLDEQG VTNTATTVL | 0.4703 | 308 | WB VP1 |
| DRB1_1302 | 95 | IPLPNLNEDLTCGNL LPNLNEDLT | 0.4680 | 316 | WB VP1 |
| DRB1_1302 | 93 | ARIPLPNLNEDLTCG LPNLNEDLT | 0.4675 | 318 | WB VP1 |
| DRB1_1302 | 94 | RIPLPNLNEDLTCGN LPNLNEDLT | 0.4673 | 318 | WB VP1 |
| DRB1_1302 | 159 | DPLEMQGVLMNYRTK QGVLMNYRT | 0.4669 | 320 | WB VP1 |
| DRB1_1302 | 92 | TARIPLPNLNEDLTC LPNLNEDLT | 0.4645 | 328 | WB VP1 |
| DRB1_1302 | 158 | GDPLEMQGVLMNYRT LEMQGVLMN | 0.4643 | 329 | WB VP1 |
| DRB1_1302 | 289 | KIRLRKRSVKNPYPI RKRSVKNPY | 0.4576 | 354 | WB VP1 |
| DRB1_1302 | 290 | IRLRKRSVKNPYPIS RKRSVKNPY | 0.4565 | 358 | WB VP1 |
| DRB1_1302 | 306 | LLSDLINRRTQKVDG LINRRTQKV | 0.4527 | 373 | WB VP1 |
| DRB1_1302 | 122 | IGITSMLNLHAGSQK IGITSMLNL | 0.4502 | 383 | WB VP1 |
| DRB1_1302 | 115 | VTVKTEVIGITSMLN VKTEVIGIT | 0.4481 | 392 | WB VP1 |
| DRB1_1302 | 114 | AVTVKTEVIGITSML VKTEVIGIT | 0.4425 | 417 | WB VP1 |
| DRB1_1302 | 238 | VTNTATTVLLDEQGV VTNTATTVL | 0.4366 | 444 | WB VP1 |
| DRB1_1302 | 307 | LSDLINRRTQKVDGQ LINRRTQKV | 0.4354 | 450 | WB VP1 |
| DRB1_1302 | 23 | VQVPKLLIKGGVEVL LLIKGGVEV | 0.4322 | 466 | WB VP1 |
| DRB1_1302 | 266 | ADICGLFTNSSGTQQ LFTNSSGTQ | 0.4320 | 466 | WB VP1 |
| DRB1_1302 | 267 | DICGLFTNSSGTQQW FTNSSGTQQ | 0.4291 | 481 | WB VP1 |
| DRB1_1501 | 283 | GLARYFKIRLRKRSV YFKIRLRKR | 0.6573 | 41 | SB VP1 |
| DRB1_1501 | 282 | RGLARYFKIRLRKRS YFKIRLRKR | 0.6478 | 45 | SB VP1 |
| DRB1_1501 | 284 | LARYFKIRLRKRSVK YFKIRLRKR | 0.6478 | 45 | SB VP1 |
| DRB1_1501 | 285 | ARYFKIRLRKRSVKN YFKIRLRKR | 0.6480 | 45 | SB VP1 |
| DRB1_1501 | 281 | WRGLARYFKIRLRKR ARYFKIRLR | 0.6307 | 54 | WB VP1 |
| DRB1_1501 | 286 | RYFKIRLRKRSVKNP YFKIRLRKR | 0.5738 | 101 | WB VP1 |
| DRB1_1501 | 279 | QQWRGLARYFKIRLR WRGLARYFK | 0.5664 | 109 | WB VP1 |
| DRB1_1501 | 287 | YFKIRLRKRSVKNPY YFKIRLRKR | 0.5644 | 111 | WB VP1 |
| DRB1_1501 | 301 | YPISFLLSDLINRRT FLLSDLINR | 0.5442 | 139 | WB VP1 |
| DRB1_1501 | 280 | QWRGLARYFKIRLRK ARYFKIRLR | 0.5432 | 140 | WB VP1 |
| DRB1_1501 | 302 | PISFLLSDLINRRTQ FLLSDLINR | 0.5326 | 157 | WB VP1 |
| DRB1_1501 | 303 | ISFLLSDLINRRTQK FLLSDLINR | 0.5312 | 160 | WB VP1 |
| DRB1_1501 | 304 | SFLLSDLINRRTQKV LLSDLINRR | 0.5284 | 165 | WB VP1 |
| DRB1_1501 | 300 | PYPISFLLSDLINRR FLLSDLINR | 0.5247 | 171 | WB VP1 |
| DRB1_1501 | 305 | FLLSDLINRRTQKVD FLLSDLINR | 0.5067 | 208 | WB VP1 |
| DRB1_1501 | 104 | LTCGNLLMWEAVTVK LLMWEAVTV | 0.5050 | 212 | WB VP1 |
| DRB1_1501 | 105 | TCGNLLMWEAVTVKT LLMWEAVTV | 0.5048 | 212 | WB VP1 |
| DRB1_1501 | 107 | GNLLMWEAVTVKTEV LLMWEAVTV | 0.5033 | 216 | WB VP1 |
| DRB1_1501 | 106 | CGNLLMWEAVTVKTE LLMWEAVTV | 0.5029 | 217 | WB VP1 |
| DRB1_1501 | 161 | LEMQGVLMNYRTKYP MQGVLMNYR | 0.4970 | 231 | WB VP1 |
| DRB1_1501 | 278 | TQQWRGLARYFKIRL WRGLARYFK | 0.4915 | 245 | WB VP1 |
| DRB1_1501 | 275 | SSGTQQWRGLARYFK TQQWRGLAR | 0.4823 | 271 | WB VP1 |
| DRB1_1501 | 276 | SGTQQWRGLARYFKI TQQWRGLAR | 0.4818 | 272 | WB VP1 |
| DRB1_1501 | 163 | MQGVLMNYRTKYPQG MQGVLMNYR | 0.4769 | 287 | WB VP1 |
| DRB1_1501 | 299 | NPYPISFLLSDLINR ISFLLSDLI | 0.4742 | 296 | WB VP1 |
| DRB1_1501 | 162 | EMQGVLMNYRTKYPQ MQGVLMNYR | 0.4707 | 307 | WB VP1 |
| DRB1_1501 | 288 | FKIRLRKRSVKNPYP IRLRKRSVK | 0.4578 | 353 | WB VP1 |
| DRB1_1501 | 277 | GTQQWRGLARYFKIR WRGLARYFK | 0.4564 | 358 | WB VP1 |
| DRB1_1501 | 108 | NLLMWEAVTVKTEVI LLMWEAVTV | 0.4524 | 374 | WB VP1 |
| DRB1_1501 | 160 | PLEMQGVLMNYRTKY MQGVLMNYR | 0.4445 | 408 | WB VP1 |
| DRB1_1501 | 122 | IGITSMLNLHAGSQK ITSMLNLHA | 0.4316 | 469 | WB VP1 |
| DRB4_0101 | 205 | YPVECWIPDPSRNEN VECWIPDPS | 0.5233 | 174 | WB VP1 |
| DRB4_0101 | 203 | NAYPVECWIPDPSRN VECWIPDPS | 0.5154 | 189 | WB VP1 |
| DRB4_0101 | 204 | AYPVECWIPDPSRNE VECWIPDPS | 0.5145 | 191 | WB VP1 |
| DRB4_0101 | 202 | NNAYPVECWIPDPSR VECWIPDPS | 0.5002 | 223 | WB VP1 |
| DRB4_0101 | 201 | KNNAYPVECWIPDPS YPVECWIPD | 0.4824 | 271 | WB VP1 |
| DRB4_0101 | 206 | PVECWIPDPSRNENT VECWIPDPS | 0.4517 | 377 | WB VP1 |
| DRB4_0101 | 207 | VECWIPDPSRNENTR VECWIPDPS | 0.4492 | 388 | WB VP1 |
| DRB5_0101 | 285 | ARYFKIRLRKRSVKN FKIRLRKRS | 0.6288 | 55 | WB VP1 |
| DRB5_0101 | 284 | LARYFKIRLRKRSVK FKIRLRKRS | 0.6287 | 56 | WB VP1 |
| DRB5_0101 | 282 | RGLARYFKIRLRKRS YFKIRLRKR | 0.6211 | 60 | WB VP1 |
| DRB5_0101 | 283 | GLARYFKIRLRKRSV FKIRLRKRS | 0.6196 | 61 | WB VP1 |
| DRB5_0101 | 286 | RYFKIRLRKRSVKNP FKIRLRKRS | 0.5991 | 77 | WB VP1 |
| DRB5_0101 | 287 | YFKIRLRKRSVKNPY FKIRLRKRS | 0.5403 | 145 | WB VP1 |
| DRB5_0101 | 281 | WRGLARYFKIRLRKR WRGLARYFK | 0.4956 | 235 | WB VP1 |
| DRB5_0101 | 288 | FKIRLRKRSVKNPYP FKIRLRKRS | 0.4834 | 267 | WB VP1 |
| DRB5_0101 | 164 | QGVLMNYRTKYPQGT LMNYRTKYP | 0.4622 | 337 | WB VP1 |
| DRB5_0101 | 165 | GVLMNYRTKYPQGTI YRTKYPQGT | 0.4558 | 361 | WB VP1 |
| DRB5_0101 | 177 | GTITPKNPTAQSQVM ITPKNPTAQ | 0.4497 | 386 | WB VP1 |
| DRB5_0101 | 71 | LSAENAFESDSPDRK AFESDSPDR | 0.4477 | 394 | WB VP1 |
| DRB5_0101 | 72 | SAENAFESDSPDRKM FESDSPDRK | 0.4472 | 396 | WB VP1 |
| DRB5_0101 | 73 | AENAFESDSPDRKML FESDSPDRK | 0.4469 | 397 | WB VP1 |
| DRB5_0101 | 173 | KYPQGTITPKNPTAQ QGTITPKNP | 0.4468 | 398 | WB VP1 |
| DRB5_0101 | 74 | ENAFESDSPDRKMLP FESDSPDRK | 0.4464 | 400 | WB VP1 |
| DRB5_0101 | 275 | SSGTQQWRGLARYFK TQQWRGLAR | 0.4455 | 403 | WB VP1 |
| DRB5_0101 | 174 | YPQGTITPKNPTAQS ITPKNPTAQ | 0.4442 | 409 | WB VP1 |
| DRB5_0101 | 276 | SGTQQWRGLARYFKI WRGLARYFK | 0.4440 | 410 | WB VP1 |
| DRB5_0101 | 279 | QQWRGLARYFKIRLR WRGLARYFK | 0.4423 | 417 | WB VP1 |
| DRB5_0101 | 277 | GTQQWRGLARYFKIR WRGLARYFK | 0.4408 | 424 | WB VP1 |
| DRB5_0101 | 278 | TQQWRGLARYFKIRL WRGLARYFK | 0.4408 | 424 | WB VP1 |
| DRB5_0101 | 176 | QGTITPKNPTAQSQV ITPKNPTAQ | 0.4392 | 432 | WB VP1 |
| DRB5_0101 | 175 | PQGTITPKNPTAQSQ ITPKNPTAQ | 0.4390 | 433 | WB VP1 |
| DRB5_0101 | 166 | VLMNYRTKYPQGTIT YRTKYPQGT | 0.4344 | 455 | WB VP1 |
| DRB5_0101 | 168 | MNYRTKYPQGTITPK YRTKYPQGT | 0.4342 | 456 | WB VP1 |
| DRB5_0101 | 75 | NAFESDSPDRKMLPC FESDSPDRK | 0.4294 | 480 | WB VP1 |

[0905] Preferred BK virus fragments of small T antigen capable of interacting with one or more MHC class 2 molecules are listed in Table R.

TABLE R

Prediction of BK virus small t protein specific MHC class 2, 15-mer
peptide binders for 14 MHC class 2 alleles (see FIG. 11) using the
http://www.cbs.dtu.dk/services/NetMHCII/ database. The MHC
class 2 molecules for which no binders were found are not listed.

| | | | | | |
|---|---|---|---|---|---|
| Allele | pos | peptide | core | 1-log50k(aff) aff(nM) | B.L. Identity |

| | | | | | |
|---|---|---|---|---|---|
| DRB1_0101 | 21 | RAAWGNLPLMRKAYL WGNLPLMRK | 0.6972 | 26 | SB Small t |
| DRB1_0101 | 19 | LERAAWGNLPLMRKA WGNLPLMRK | 0.6958 | 27 | SB Small t |
| DRB1_0101 | 20 | ERAAWGNLPLMRKAY WGNLPLMRK | 0.6940 | 27 | SB Small t |
| DRB1_0101 | 22 | AAWGNLPLMRKAYLK WGNLPLMRK | 0.6954 | 27 | SB Small t |
| DRB1_0101 | 18 | GLERAAWGNLPLMRK ERAAWGNLP | 0.6928 | 28 | SB Small t |
| DRB1_0101 | 24 | WGNLPLMRKAYLKKC WGNLPLMRK | 0.6020 | 74 | WB Small t |
| DRB1_0101 | 23 | AWGNLPLMRKAYLKK WGNLPLMRK | 0.6000 | 76 | WB Small t |
| DRB1_0101 | 110 | PCMLCQLRLRHLNRK LCQLRLRHL | 0.5884 | 86 | WB Small t |
| DRB1_0101 | 111 | CMLCQLRLRHLNRKF LCQLRLRHL | 0.5833 | 91 | WB Small t |
| DRB1_0101 | 108 | HCPCMLCQLRLRHLN LCQLRLRHL | 0.5732 | 101 | WB Small t |
| DRB1_0101 | 107 | VHCPCMLCQLRLRHL PCMLCQLRL | 0.5712 | 104 | WB Small t |
| DRB1_0101 | 109 | CPCMLCQLRLRHLNR LCQLRLRHL | 0.5711 | 104 | WB Small t |
| DRB1_0101 | 11 | MELMDLLGLERAAWG MDLLGLERA | 0.5102 | 200 | WB Small t |
| DRB1_0101 | 113 | LCQLRLRHLNRKFLR LCQLRLRHL | 0.5082 | 205 | WB Small t |
| DRB1_0101 | 112 | MLCQLRLRHLNRKFL LCQLRLRHL | 0.5077 | 206 | WB Small t |
| DRB1_0101 | 121 | LNRKFLRKEPLVWID LRKEPLVWI | 0.4900 | 249 | WB Small t |
| DRB1_0101 | 120 | HLNRKFLRKEPLVWI FLRKEPLVW | 0.4888 | 252 | WB Small t |
| DRB1_0101 | 12 | ELMDLLGLERAAWGN MDLLGLERA | 0.4876 | 256 | WB Small t |
| DRB1_0101 | 122 | NRKFLRKEPLVWIDC LRKEPLVWI | 0.4836 | 267 | WB Small t |
| DRB1_0101 | 8 | EESMELMDLLGLERA LMDLLGLER | 0.4834 | 268 | WB Small t |
| DRB1_0101 | 123 | RKFLRKEPLVWIDCY LRKEPLVWI | 0.4822 | 271 | WB Small t |
| DRB1_0101 | 9 | ESMELMDLLGLERAA LMDLLGLER | 0.4823 | 271 | WB Small t |
| DRB1_0101 | 48 | DEDKMKRMNTLYKKM MKRMNTLYK | 0.4796 | 279 | WB Small t |
| DRB1_0101 | 47 | GDEDKMKRMNTLYKK MKRMNTLYK | 0.4754 | 292 | WB Small t |
| DRB1_0101 | 10 | SMELMDLLGLERAAW MDLLGLERA | 0.4730 | 299 | WB Small t |
| DRB1_0101 | 49 | EDKMKRMNTLYKKME MKRMNTLYK | 0.4724 | 302 | WB Small t |
| DRB1_0101 | 50 | DKMKRMNTLYKKMEQ MKRMNTLYK | 0.4699 | 310 | WB Small t |
| DRB1_0101 | 46 | GGDEDKMKRMNTLYK DKMKRMNTL | 0.4690 | 313 | WB Small t |
| DRB1_0101 | 2 | DKVLNREESMELMDL LNREESMEL | 0.4683 | 315 | WB Small t |
| DRB1_0101 | 3 | KVLNREESMELMDLL LNREESMEL | 0.4672 | 319 | WB Small t |
| DRB1_0101 | 125 | FLRKEPLVWIDCYCI LRKEPLVWI | 0.4622 | 337 | WB Small t |
| DRB1_0101 | 13 | LMDLLGLERAAWGNL LGLERAAWG | 0.4572 | 355 | WB Small t |
| DRB1_0101 | 1 | MDKVLNREESMELMD LNREESMEL | 0.4521 | 376 | WB Small t |
| DRB1_0101 | 124 | KFLRKEPLVWIDCYC LRKEPLVWI | 0.4493 | 387 | WB Small t |
| DRB1_0101 | 14 | MDLLGLERAAWGNLP LGLERAAWG | 0.4451 | 405 | WB Small t |
| DRB1_0101 | 5 | LNREESMELMDLLGL LNREESMEL | 0.4397 | 429 | WB Small t |
| DRB1_0101 | 126 | LRKEPLVWIDCYCID LRKEPLVWI | 0.4391 | 432 | WB Small t |
| DRB1_0101 | 7 | REESMELMDLLGLER MELMDLLGL | 0.4355 | 449 | WB Small t |
| DRB1_0101 | 91 | DTLYCKEWPICSKKP YCKEWPICS | 0.4339 | 457 | WB Small t |
| DRB1_0101 | 92 | TLYCKEWPICSKKPS YCKEWPICS | 0.4323 | 465 | WB Small t |
| DRB1_0101 | 140 | DCFTQWFGLDLTEET FTQWFGLDL | 0.4291 | 482 | WB Small t |
| DRB1_0401 | 92 | TLYCKEWPICSKKPS YCKEWPICS | 0.5564 | 121 | WB Small t |
| DRB1_0401 | 91 | DTLYCKEWPICSKKP YCKEWPICS | 0.5500 | 130 | WB Small t |
| DRB1_0401 | 90 | PDTLYCKEWPICSKK YCKEWPICS | 0.5447 | 138 | WB Small t |
| DRB1_0401 | 89 | CPDTLYCKEWPICSK YCKEWPICS | 0.5423 | 141 | WB Small t |
| DRB1_0401 | 88 | LCPDTLYCKEWPICS LYCKEWPIC | 0.5400 | 145 | WB Small t |
| DRB1_0401 | 47 | GDEDKMKRMNTLYKK MKRMNTLYK | 0.5015 | 220 | WB Small t |
| DRB1_0401 | 48 | DEDKMKRMNTLYKKM MKRMNTLYK | 0.4994 | 225 | WB Small t |
| DRB1_0401 | 46 | GGDEDKMKRMNTLYK KMKRMNTLY | 0.4992 | 226 | WB Small t |
| DRB1_0401 | 49 | EDKMKRMNTLYKKME MKRMNTLYK | 0.4991 | 226 | WB Small t |
| DRB1_0401 | 50 | DKMKRMNTLYKKMEQ MKRMNTLYK | 0.4948 | 237 | WB Small t |
| DRB1_0401 | 94 | YCKEWPICSKKPSVH YCKEWPICS | 0.4689 | 313 | WB Small t |
| DRB1_0401 | 93 | LYCKEWPICSKKPSV YCKEWPICS | 0.4677 | 317 | WB Small t |
| DRB1_0405 | 49 | EDKMKRMNTLYKKME MKRMNTLYK | 0.5687 | 106 | WB Small t |
| DRB1_0405 | 50 | DKMKRMNTLYKKMEQ MKRMNTLYK | 0.5662 | 109 | WB Small t |
| DRB1_0405 | 47 | GDEDKMKRMNTLYKK MKRMNTLYK | 0.5447 | 138 | WB Small t |
| DRB1_0405 | 46 | GGDEDKMKRMNTLYK DKMKRMNTL | 0.5432 | 140 | WB Small t |
| DRB1_0405 | 48 | DEDKMKRMNTLYKKM MKRMNTLYK | 0.5413 | 143 | WB Small t |
| DRB1_0405 | 152 | EETLQWWVQIIGETP LQWWVQIIG | 0.5365 | 151 | WB Small t |
| DRB1_0405 | 151 | TEETLQWWVQIIGET LQWWVQIIG | 0.5328 | 157 | WB Small t |
| DRB1_0405 | 150 | LTEETLQWWVQIIGE LQWWVQIIG | 0.5314 | 159 | WB Small t |
| DRB1_0405 | 153 | ETLQWWVQIIGETPF LQWWVQIIG | 0.5290 | 163 | WB Small t |
| DRB1_0405 | 149 | DLTEETLQWWVQIIG TLQWWVQII | 0.5260 | 169 | WB Small t |
| DRB1_0405 | 18 | GLERAAWGNLPLMRK RAAWGNLPL | 0.5095 | 202 | WB Small t |
| DRB1_0405 | 19 | LERAAWGNLPLMRKA RAAWGNLPL | 0.4956 | 235 | WB Small t |
| DRB1_0405 | 137 | YCIDCFTQWFGLDLT FTQWFGLDL | 0.4951 | 236 | WB Small t |
| DRB1_0405 | 139 | IDCFTQWFGLDLTEE TQWFGLDLT | 0.4864 | 259 | WB Small t |
| DRB1_0405 | 51 | KMKRMNTLYKKMEQD MKRMNTLYK | 0.4857 | 261 | WB Small t |
| DRB1_0405 | 52 | MKRMNTLYKKMEQDV MKRMNTLYK | 0.4857 | 261 | WB Small t |
| DRB1_0405 | 138 | CIDCFTQWFGLDLTE TQWFGLDLT | 0.4851 | 263 | WB Small t |
| DRB1_0405 | 155 | LQWWVQIIGETPFRD LQWWVQIIG | 0.4691 | 312 | WB Small t |
| DRB1_0405 | 140 | DCFTQWFGLDLTEET TQWFGLDLT | 0.4671 | 319 | WB Small t |
| DRB1_0405 | 69 | AHQPDFGTWNSSEVC FGTWNSSEV | 0.4648 | 327 | WB Small t |
| DRB1_0405 | 68 | VAHQPDFGTWNSSEV QPDFGTWNS | 0.4624 | 336 | WB Small t |
| DRB1_0405 | 20 | ERAAWGNLPLMRKAY WGNLPLMRK | 0.4570 | 356 | WB Small t |
| DRB1_0405 | 71 | QPDFGTWNSSEVCAD FGTWNSSEV | 0.4550 | 364 | WB Small t |
| DRB1_0405 | 17 | LGLERAAWGNLPLMR RAAWGNLPL | 0.4515 | 378 | WB Small t |
| DRB1_0405 | 70 | HQPDFGTWNSSEVCA FGTWNSSEV | 0.4467 | 398 | WB Small t |
| DRB1_0405 | 154 | TLQWWVQIIGETPFR LQWWVQIIG | 0.4465 | 399 | WB Small t |
| DRB1_0405 | 16 | LLGLERAAWGNLPLM RAAWGNLPL | 0.4465 | 399 | WB Small t |
| DRB1_0405 | 15 | DLLGLERAAWGNLPL ERAAWGNLP | 0.4401 | 427 | WB Small t |
| DRB1_0405 | 136 | CYCIDCFTQWFGLDL IDCFTQWFG | 0.4322 | 465 | WB Small t |
| DRB1_0405 | 141 | CFTQWFGLDLTEETL TQWFGLDLT | 0.4323 | 465 | WB Small t |
| DRB1_0405 | 72 | PDFGTWNSSEVCADF FGTWNSSEV | 0.4300 | 477 | WB Small t |
| DRB1_0701 | 95 | CKEWPICSKKPSVHC ICSKKPSVH | 0.4880 | 255 | WB Small t |
| DRB1_0701 | 96 | KEWPICSKKPSVHCP ICSKKPSVH | 0.4829 | 269 | WB Small t |
| DRB1_0701 | 97 | EWPICSKKPSVHCPC ICSKKPSVH | 0.4823 | 271 | WB Small t |
| DRB1_0701 | 98 | WPICSKKPSVHCPCM ICSKKPSVH | 0.4807 | 276 | WB Small t |
| DRB1_0701 | 94 | YCKEWPICSKKPSVH PICSKKPSV | 0.4738 | 297 | WB Small t |
| DRB1_0701 | 70 | HQPDFGTWNSSEVCA FGTWNSSEV | 0.4721 | 303 | WB Small t |
| DRB1_0701 | 71 | QPDFGTWNSSEVCAD FGTWNSSEV | 0.4716 | 304 | WB Small t |
| DRB1_0701 | 68 | VAHQPDFGTWNSSEV DFGTWNSSE | 0.4709 | 306 | WB Small t |
| DRB1_0701 | 69 | AHQPDFGTWNSSEVC FGTWNSSEV | 0.4705 | 308 | WB Small t |
| DRB1_0701 | 72 | PDFGTWNSSEVCADF FGTWNSSEV | 0.4685 | 314 | WB Small t |
| DRB1_1101 | 47 | GDEDKMKRMNTLYKK MKRMNTLYK | 0.4550 | 364 | WB Small t |
| DRB1_1101 | 49 | EDKMKRMNTLYKKME MKRMNTLYK | 0.4498 | 385 | WB Small t |
| DRB1_1101 | 48 | DEDKMKRMNTLYKKM MKRMNTLYK | 0.4495 | 386 | WB Small t |
| DRB1_1101 | 50 | DKMKRMNTLYKKMEQ MKRMNTLYK | 0.4483 | 391 | WB Small t |
| DRB1_1101 | 46 | GGDEDKMKRMNTLYK EDKMKRMNT | 0.4433 | 413 | WB Small t |
| DRB1_1101 | 18 | GLERAAWGNLPLMRK AWGNLPLMR | 0.4312 | 471 | WB Small t |
| DRB1_1101 | 19 | LERAAWGNLPLMRKA WGNLPLMRK | 0.4311 | 471 | WB Small t |
| DRB1_1101 | 21 | RAAWGNLPLMRKAYL WGNLPLMRK | 0.4288 | 483 | WB Small t |
| DRB1_1101 | 20 | ERAAWGNLPLMRKAY WGNLPLMRK | 0.4279 | 488 | WB Small t |
| DRB1_1302 | 18 | GLERAAWGNLPLMRK LERAAWGNL | 0.5752 | 99 | WB Small t |
| DRB1_1302 | 21 | RAAWGNLPLMRKAYL WGNLPLMRK | 0.5714 | 103 | WB Small t |
| DRB1_1302 | 22 | AAWGNLPLMRKAYLK WGNLPLMRK | 0.5704 | 104 | WB Small t |
| DRB1_1302 | 19 | LERAAWGNLPLMRKA WGNLPLMRK | 0.5702 | 105 | WB Small t |
| DRB1_1302 | 20 | ERAAWGNLPLMRKAY WGNLPLMRK | 0.5531 | 126 | WB Small t |
| DRB1_1302 | 48 | DEDKMKRMNTLYKKM MKRMNTLYK | 0.5012 | 221 | WB Small t |
| DRB1_1302 | 49 | EDKMKRMNTLYKKME MKRMNTLYK | 0.4986 | 227 | WB Small t |
| DRB1_1302 | 50 | DKMKRMNTLYKKMEQ MKRMNTLYK | 0.4966 | 232 | WB Small t |
| DRB1_1302 | 47 | GDEDKMKRMNTLYKK MKRMNTLYK | 0.4940 | 239 | WB Small t |
| DRB1_1302 | 24 | WGNLPLMRKAYLKKC WGNLPLMRK | 0.4926 | 242 | WB Small t |
| DRB1_1302 | 23 | AWGNLPLMRKAYLKK WGNLPLMRK | 0.4885 | 253 | WB Small t |
| DRB1_1302 | 153 | ETLQWWVQIIGETPF WWVQIIGET | 0.4827 | 270 | WB Small t |
| DRB1_1302 | 46 | GGDEDKMKRMNTLYK DKMKRMNTL | 0.4800 | 278 | WB Small t |
| DRB1_1302 | 155 | LQWWVQIIGETPFRD VQIIGETPF | 0.4679 | 317 | WB Small t |
| DRB1_1302 | 154 | TLQWWVQIIGETPFR VQIIGETPF | 0.4659 | 323 | WB Small t |
| DRB1_1302 | 113 | LCQLRLRHLNRKFLR LRLRHLNRK | 0.4607 | 342 | WB Small t |
| DRB1_1302 | 112 | MLCQLRLRHLNRKFL LRLRHLNRK | 0.4561 | 360 | WB Small t |
| DRB1_1302 | 114 | CQLRLRHLNRKFLRK LRLRHLNRK | 0.4549 | 364 | WB Small t |
| DRB1_1302 | 156 | QWWVQIIGETPFRDL VQIIGETPF | 0.4401 | 427 | WB Small t |
| DRB1_1302 | 51 | KMKRMNTLYKKMEQD MKRMNTLYK | 0.4272 | 492 | WB Small t |
| DRB1_1501 | 111 | CMLCQLRLRHLNRKF LRLRHLNRK | 0.5327 | 157 | WB Small t |
| DRB1_1501 | 110 | PCMLCQLRLRHLNRK QLRLRHLNR | 0.5274 | 166 | WB Small t |
| DRB1_1501 | 48 | DEDKMKRMNTLYKKM MKRMNTLYK | 0.5229 | 174 | WB Small t |
| DRB1_1501 | 49 | EDKMKRMNTLYKKME MKRMNTLYK | 0.5190 | 182 | WB Small t |
| DRB1_1501 | 24 | WGNLPLMRKAYLKKC LMRKAYLKK | 0.5176 | 185 | WB Small t |
| DRB1_1501 | 113 | LCQLRLRHLNRKFLR LRLRHLNRK | 0.5166 | 187 | WB Small t |
| DRB1_1501 | 50 | DKMKRMNTLYKKMEQ MKRMNTLYK | 0.5153 | 190 | WB Small t |
| DRB1_1501 | 47 | GDEDKMKRMNTLYKK MKRMNTLYK | 0.5147 | 191 | WB Small t |
| DRB1_1501 | 112 | MLCQLRLRHLNRKFL LRLRHLNRK | 0.5140 | 192 | WB Small t |
| DRB1_1501 | 23 | AWGNLPLMRKAYLKK LPLMRKAYL | 0.5076 | 206 | WB Small t |
| DRB1_1501 | 25 | GNLPLMRKAYLKKCK LMRKAYLKK | 0.5063 | 209 | WB Small t |
| DRB1_1501 | 46 | GGDEDKMKRMNTLYK DKMKRMNTL | 0.5026 | 217 | WB Small t |
| DRB1_1501 | 26 | NLPLMRKAYLKKCKE LMRKAYLKK | 0.4961 | 233 | WB Small t |
| DRB1_1501 | 114 | CQLRLRHLNRKFLRK LRLRHLNRK | 0.4919 | 244 | WB Small t |
| DRB1_1501 | 27 | LPLMRKAYLKKCKEF LMRKAYLKK | 0.4850 | 263 | WB Small t |
| DRB1_1501 | 13 | LMDLLGLERAAWGNL LMDLLGLER | 0.4683 | 315 | WB Small t |
| DRB1_1501 | 11 | MELMDLLGLERAAWG LMDLLGLER | 0.4651 | 326 | WB Small t |
| DRB1_1501 | 115 | QLRLRHLNRKFLRKE LRLRHLNRK | 0.4643 | 329 | WB Small t |
| DRB1_1501 | 120 | HLNRKFLRKEPLVWI FLRKEPLVW | 0.4621 | 337 | WB Small t |
| DRB1_1501 | 121 | LNRKFLRKEPLVWID FLRKEPLVW | 0.4374 | 440 | WB Small t |
| DRB1_1501 | 28 | PLMRKAYLKKCKEFH LMRKAYLKK | 0.4332 | 461 | WB Small t |
| DRB1_1501 | 51 | KMKRMNTLYKKMEQD MKRMNTLYK | 0.4331 | 461 | WB Small t |
| DRB1_1501 | 123 | RKFLRKEPLVWIDCY FLRKEPLVW | 0.4300 | 477 | WB Small t |
| DRB1_1501 | 10 | SMELMDLLGLERAAW LMDLLGLER | 0.4261 | 497 | WB Small t |
| DRB4_0101 | 94 | YCKEWPICSKKPSVH YCKEWPICS | 0.5706 | 104 | WB Small t |
| DRB4_0101 | 112 | MLCQLRLRHLNRKFL LRLRHLNRK | 0.5364 | 151 | WB Small t |
| DRB4_0101 | 113 | LCQLRLRHLNRKFLR LRLRHLNRK | 0.5342 | 155 | WB Small t |
| DRB4_0101 | 111 | CMLCQLRLRHLNRKF LRLRHLNRK | 0.5331 | 156 | WB Small t |
| DRB4_0101 | 110 | PCMLCQLRLRHLNRK LCQLRLRHL | 0.5322 | 158 | WB Small t |
| DRB4_0101 | 95 | CKEWPICSKKPSVHC ICSKKPSVH | 0.5323 | 158 | WB Small t |
| DRB4_0101 | 114 | CQLRLRHLNRKFLRK LRLRHLNRK | 0.5291 | 163 | WB Small t |
| DRB4_0101 | 96 | KEWPICSKKPSVHCP ICSKKPSVH | 0.5267 | 167 | WB Small t |
| DRB4_0101 | 97 | EWPICSKKPSVHCPC ICSKKPSVH | 0.5247 | 171 | WB Small t |
| DRB4_0101 | 98 | WPICSKKPSVHCPCM ICSKKPSVH | 0.5172 | 186 | WB Small t |
| DRB4_0101 | 115 | QLRLRHLNRKFLRKE LRLRHLNRK | 0.4556 | 361 | WB Small t |
| DRB4_0101 | 116 | LRLRHLNRKFLRKEP LRLRHLNRK | 0.4510 | 380 | WB Small t |
| DRB4_0101 | 100 | ICSKKPSVHCPCMLC ICSKKPSVH | 0.4432 | 413 | WB Small t |
| DRB4_0101 | 99 | PICSKKPSVHCPCML ICSKKPSVH | 0.4374 | 440 | WB Small t |
| DRB5_0101 | 49 | EDKMKRMNTLYKKME MKRMNTLYK | 0.4763 | 289 | WB Small t |
| DRB5_0101 | 50 | DKMKRMNTLYKKMEQ MKRMNTLYK | 0.4758 | 290 | WB Small t |
| DRB5_0101 | 48 | DEDKMKRMNTLYKKM MKRMNTLYK | 0.4726 | 301 | WB Small t |
| DRB5_0101 | 47 | GDEDKMKRMNTLYKK MKRMNTLYK | 0.4617 | 338 | WB Small t |
| DRB5_0101 | 46 | GGDEDKMKRMNTLYK DKMKRMNTL | 0.4567 | 357 | WB Small t |
| DRB5_0101 | 112 | MLCQLRLRHLNRKFL LRLRHLNRK | 0.4397 | 429 | WB Small t |
| DRB5_0101 | 114 | CQLRLRHLNRKFLRK LRHLNRKFL | 0.4398 | 429 | WB Small t |
| DRB5_0101 | 53 | KRMNTLYKKMEQDVK KRMNTLYKK | 0.4284 | 485 | WB Small t |
| DRB5_0101 | 22 | AAWGNLPLMRKAYLK WGNLPLMRK | 0.4268 | 494 | WB Small t |

[0906] Preferred BK virus fragments of large T antigen capable of interacting with one or more MHC class 2 molecules are listed in Table S.

TABLE S

Prediction of BK virus Large T protein specific MHC class 2, 15-mer
peptide binders for 14 MHC class 2 alleles (see FIG. 11) using the
http://www.cbs.dtu.dk/services/NetMHCII/database. The MHC
class 2 molecules for which no binders were found are not listed.

| | | | | | |
|---|---|---|---|---|---|
| Allele | pos | peptide | core | 1-log50k(aff) aff(nM) | B.L. Identity |

| | | | | | |
|---|---|---|---|---|---|
| DRB1_0101 | 566 | LEKRILQSGMTLLLL LQSGMTLLL | 0.7526 | 15 | SB Large T |
| DRB1_0101 | 567 | EKRILQSGMTLLLLL LQSGMTLLL | 0.7519 | 15 | SB Large T |
| DRB1_0101 | 568 | KRILQSGMTLLLLLI LQSGMTLLL | 0.7525 | 15 | SB Large T |
| DRB1_0101 | 569 | RILQSGMTLLLLLIW LQSGMTLLL | 0.7504 | 15 | SB Large T |
| DRB1_0101 | 565 | LLEKRILQSGMTLLL KRILQSGMT | 0.7441 | 16 | SB Large T |
| DRB1_0101 | 21 | RAAWGNLPLMRKAYL WGNLPLMRK | 0.6972 | 26 | SB Large T |
| DRB1_0101 | 19 | LERAAWGNLPLMRKA WGNLPLMRK | 0.6958 | 27 | SB Large T |
| DRB1_0101 | 20 | ERAAWGNLPLMRKAY WGNLPLMRK | 0.6940 | 27 | SB Large T |
| DRB1_0101 | 22 | AAWGNLPLMRKAYLK WGNLPLMRK | 0.6954 | 27 | SB Large T |
| DRB1_0101 | 18 | GLERAAWGNLPLMRK ERAAWGNLP | 0.6928 | 28 | SB Large T |
| DRB1_0101 | 570 | ILQSGMTLLLLLIWF LQSGMTLLL | 0.6646 | 38 | SB Large T |
| DRB1_0101 | 571 | LQSGMTLLLLLIWFR LQSGMTLLL | 0.6561 | 41 | SB Large T |
| DRB1_0101 | 383 | NAVLEQYMAGVAWLH EQYMAGVAW | 0.6528 | 43 | SB Large T |
| DRB1_0101 | 387 | EQYMAGVAWLHCLLP YMAGVAWLH | 0.6516 | 43 | SB Large T |
| DRB1_0101 | 385 | VLEQYMAGVAWLHCL YMAGVAWLH | 0.6507 | 44 | SB Large T |
| DRB1_0101 | 384 | AVLEQYMAGVAWLHC YMAGVAWLH | 0.6486 | 45 | SB Large T |
| DRB1_0101 | 386 | LEQYMAGVAWLHCLL YMAGVAWLH | 0.6483 | 45 | SB Large T |
| DRB1_0101 | 441 | LLDLCGGKALNVNLP LCGGKALNV | 0.6340 | 52 | WB Large T |
| DRB1_0101 | 144 | LHQFLSQAVFSNRTL LHQFLSQAV | 0.6329 | 53 | WB Large T |
| DRB1_0101 | 143 | DLHQFLSQAVFSNRT LHQFLSQAV | 0.6318 | 54 | WB Large T |
| DRB1_0101 | 442 | LDLCGGKALNVNLPM LCGGKALNV | 0.6310 | 54 | WB Large T |
| DRB1_0101 | 439 | AGLLDLCGGKALNVN LCGGKALNV | 0.6263 | 57 | WB Large T |
| DRB1_0101 | 440 | GLLDLCGGKALNVNL LCGGKALNV | 0.6223 | 60 | WB Large T |
| DRB1_0101 | 438 | AAGLLDLCGGKALNV LLDLCGGKA | 0.6207 | 61 | WB Large T |
| DRB1_0101 | 142 | SDLHQFLSQAVFSNR LHQFLSQAV | 0.6178 | 62 | WB Large T |
| DRB1_0101 | 141 | PSDLHQFLSQAVFSN LHQFLSQAV | 0.6165 | 63 | WB Large T |
| DRB1_0101 | 533 | YPVPKTLQARFVRQI PKTLQARFV | 0.6160 | 64 | WB Large T |
| DRB1_0101 | 534 | PVPKTLQARFVRQID LQARFVRQI | 0.6136 | 65 | WB Large T |
| DRB1_0101 | 140 | FPSDLHQFLSQAVFS LHQFLSQAV | 0.6083 | 69 | WB Large T |
| DRB1_0101 | 138 | KDFPSDLHQFLSQAV FPSDLHQFL | 0.6036 | 73 | WB Large T |
| DRB1_0101 | 139 | DFPSDLHQFLSQAVF LHQFLSQAV | 0.6019 | 74 | WB Large T |
| DRB1_0101 | 24 | WGNLPLMRKAYLKKC WGNLPLMRK | 0.6020 | 74 | WB Large T |
| DRB1_0101 | 23 | AWGNLPLMRKAYLKK WGNLPLMRK | 0.6000 | 76 | WB Large T |
| DRB1_0101 | 517 | NKRTQIFPPGLVTMN IFPPGLVTM | 0.5951 | 80 | WB Large T |
| DRB1_0101 | 518 | KRTQIFPPGLVTMNE IFPPGLVTM | 0.5907 | 84 | WB Large T |
| DRB1_0101 | 428 | GPIDSGKTTLAAGLL IDSGKTTLA | 0.5880 | 86 | WB Large T |
| DRB1_0101 | 519 | RTQIFPPGLVTMNEY IFPPGLVTM | 0.5871 | 87 | WB Large T |
| DRB1_0101 | 520 | TQIFPPGLVTMNEYP IFPPGLVTM | 0.5843 | 90 | WB Large T |
| DRB1_0101 | 268 | KQVSWKLITEYAVET WKLITEYAV | 0.5795 | 95 | WB Large T |
| DRB1_0101 | 269 | QVSWKLITEYAVETK LITEYAVET | 0.5780 | 96 | WB Large T |
| DRB1_0101 | 284 | CEDVFLLLGMYLEFQ VFLLLGMYL | 0.5771 | 97 | WB Large T |
| DRB1_0101 | 285 | EDVFLLLGMYLEFQY VFLLLGMYL | 0.5774 | 97 | WB Large T |
| DRB1_0101 | 535 | VPKTLQARFVRQIDF LQARFVRQI | 0.5743 | 100 | WB Large T |
| DRB1_0101 | 536 | PKTLQARFVRQIDFR LQARFVRQI | 0.5746 | 100 | WB Large T |
| DRB1_0101 | 270 | VSWKLITEYAVETKC LITEYAVET | 0.5715 | 103 | WB Large T |
| DRB1_0101 | 147 | FLSQAVFSNRTLACF SQAVFSNRT | 0.5698 | 105 | WB Large T |
| DRB1_0101 | 388 | QYMAGVAWLHCLLPK YMAGVAWLH | 0.5680 | 107 | WB Large T |
| DRB1_0101 | 603 | ERLDSEISMYTFSRM LDSEISMYT | 0.5669 | 108 | WB Large T |
| DRB1_0101 | 389 | YMAGVAWLHCLLPKM YMAGVAWLH | 0.5664 | 109 | WB Large T |
| DRB1_0101 | 448 | KALNVNLPMERLTFE LNVNLPMER | 0.5655 | 110 | WB Large T |
| DRB1_0101 | 444 | LCGGKALNVNLPMER LCGGKALNV | 0.5641 | 112 | WB Large T |
| DRB1_0101 | 446 | GGKALNVNLPMERLT LNVNLPMER | 0.5640 | 112 | WB Large T |
| DRB1_0101 | 425 | LFKGPIDSGKTTLAA IDSGKTTLA | 0.5627 | 113 | WB Large T |
| DRB1_0101 | 447 | GKALNVNLPMERLTF LNVNLPMER | 0.5619 | 114 | WB Large T |
| DRB1_0101 | 427 | KGPIDSGKTTLAAGL IDSGKTTLA | 0.5613 | 115 | WB Large T |
| DRB1_0101 | 599 | VEWKERLDSEISMYT KERLDSEIS | 0.5611 | 115 | WB Large T |
| DRB1_0101 | 445 | CGGKALNVNLPMERL LNVNLPMER | 0.5598 | 117 | WB Large T |
| DRB1_0101 | 490 | GHGINNLDSLRDYLD INNLDSLRD | 0.5597 | 117 | WB Large T |
| DRB1_0101 | 271 | SWKLITEYAVETKCE LITEYAVET | 0.5583 | 119 | WB Large T |
| DRB1_0101 | 489 | SGHGINNLDSLRDYL INNLDSLRD | 0.5574 | 120 | WB Large T |
| DRB1_0101 | 491 | HGINNLDSLRDYLDG INNLDSLRD | 0.5573 | 120 | WB Large T |
| DRB1_0101 | 424 | WLFKGPIDSGKTTLA KGPIDSGKT | 0.5567 | 121 | WB Large T |
| DRB1_0101 | 487 | LPSGHGINNLDSLRD LPSGHGINN | 0.5568 | 121 | WB Large T |
| DRB1_0101 | 530 | MNEYPVPKTLQARFV YPVPKTLQA | 0.5570 | 121 | WB Large T |
| DRB1_0101 | 426 | FKGPIDSGKTTLAAG IDSGKTTLA | 0.5562 | 122 | WB Large T |
| DRB1_0101 | 600 | EWKERLDSEISMYTF LDSEISMYT | 0.5562 | 122 | WB Large T |
| DRB1_0101 | 602 | KERLDSEISMYTFSR LDSEISMYT | 0.5560 | 122 | WB Large T |
| DRB1_0101 | 488 | PSGHGINNLDSLRDY INNLDSLRD | 0.5554 | 123 | WB Large T |
| DRB1_0101 | 601 | WKERLDSEISMYTFS LDSEISMYT | 0.5538 | 125 | WB Large T |
| DRB1_0101 | 272 | WKLITEYAVETKCED LITEYAVET | 0.5514 | 128 | WB Large T |
| DRB1_0101 | 531 | NEYPVPKTLQARFVR PKTLQARFV | 0.5518 | 128 | WB Large T |
| DRB1_0101 | 521 | QIFPPGLVTMNEYPV FPPGLVTMN | 0.5507 | 129 | WB Large T |
| DRB1_0101 | 443 | DLCGGKALNVNLPME LCGGKALNV | 0.5488 | 132 | WB Large T |
| DRB1_0101 | 228 | VNKEYLLYSALTRDP YLLYSALTR | 0.5454 | 137 | WB Large T |
| DRB1_0101 | 145 | HQFLSQAVFSNRTLA SQAVFSNRT | 0.5437 | 139 | WB Large T |
| DRB1_0101 | 374 | MDLIFGAHGNAVLEQ IFGAHGNAV | 0.5440 | 139 | WB Large T |
| DRB1_0101 | 375 | DLIFGAHGNAVLEQY IFGAHGNAV | 0.5439 | 139 | WB Large T |
| DRB1_0101 | 229 | NKEYLLYSALTRDPY LYSALTRDP | 0.5434 | 140 | WB Large T |
| DRB1_0101 | 146 | QFLSQAVFSNRTLAC SQAVFSNRT | 0.5423 | 141 | WB Large T |
| DRB1_0101 | 373 | KMDLIFGAHGNAVLE IFGAHGNAV | 0.5366 | 150 | WB Large T |
| DRB1_0101 | 564 | FLLEKRILQSGMTLL KRILQSGMT | 0.5369 | 150 | WB Large T |
| DRB1_0101 | 372 | DKMDLIFGAHGNAVL IFGAHGNAV | 0.5366 | 151 | WB Large T |
| DRB1_0101 | 230 | KEYLLYSALTRDPYH LYSALTRDP | 0.5334 | 156 | WB Large T |
| DRB1_0101 | 449 | ALNVNLPMERLTFEL NVNLPMERL | 0.5320 | 158 | WB Large T |
| DRB1_0101 | 286 | DVFLLLGMYLEFQYN LLGMYLEFQ | 0.5310 | 160 | WB Large T |
| DRB1_0101 | 232 | YLLYSALTRDPYHII LYSALTRDP | 0.5298 | 162 | WB Large T |
| DRB1_0101 | 338 | ICQQAVDTVLAKKRV QQAVDTVLA | 0.5273 | 166 | WB Large T |
| DRB1_0101 | 430 | IDSGKTTLAAGLLDL IDSGKTTLA | 0.5269 | 167 | WB Large T |
| DRB1_0101 | 149 | SQAVFSNRTLACFAV FSNRTLACF | 0.5259 | 169 | WB Large T |
| DRB1_0101 | 337 | SICQQAVDTVLAKKR QQAVDTVLA | 0.5252 | 170 | WB Large T |
| DRB1_0101 | 148 | LSQAVFSNRTLACFA FSNRTLACF | 0.5244 | 172 | WB Large T |
| DRB1_0101 | 231 | EYLLYSALTRDPYHI LYSALTRDP | 0.5238 | 173 | WB Large T |
| DRB1_0101 | 522 | IFPPGLVTMNEYPVP IFPPGLVTM | 0.5236 | 173 | WB Large T |
| DRB1_0101 | 532 | EYPVPKTLQARFVRQ PKTLQARFV | 0.5222 | 176 | WB Large T |
| DRB1_0101 | 429 | PIDSGKTTLAAGLLD IDSGKTTLA | 0.5198 | 180 | WB Large T |
| DRB1_0101 | 516 | LNKRTQIFPPGLVTM RTQIFPPGL | 0.5156 | 189 | WB Large T |
| DRB1_0101 | 287 | VFLLLGMYLEFQYNV VFLLLGMYL | 0.5144 | 191 | WB Large T |
| DRB1_0101 | 11 | MELMDLLGLERAAWG MDLLGLERA | 0.5102 | 200 | WB Large T |
| DRB1_0101 | 473 | VFEDVKGTGAESKDL VKGTGAESK | 0.5100 | 201 | WB Large T |
| DRB1_0101 | 474 | FEDVKGTGAESKDLP VKGTGAESK | 0.5088 | 203 | WB Large T |
| DRB1_0101 | 537 | KTLQARFVRQIDFRP LQARFVRQI | 0.5092 | 203 | WB Large T |
| DRB1_0101 | 475 | EDVKGTGAESKDLPS VKGTGAESK | 0.5068 | 208 | WB Large T |
| DRB1_0101 | 195 | NIIFFLTPHRHRVSA IFFLTPHRH | 0.5062 | 209 | WB Large T |
| DRB1_0101 | 335 | QKSICQQAVDTVLAK ICQQAVDTV | 0.5063 | 209 | WB Large T |
| DRB1_0101 | 194 | HNIIFFLTPHRHRVS IFFLTPHRH | 0.5053 | 211 | WB Large T |
| DRB1_0101 | 336 | KSICQQAVDTVLAKK ICQQAVDTV | 0.5051 | 212 | WB Large T |
| DRB1_0101 | 334 | NQKSICQQAVDTVLA ICQQAVDTV | 0.5035 | 215 | WB Large T |
| DRB1_0101 | 450 | LNVNLPMERLTFELG NVNLPMERL | 0.5031 | 216 | WB Large T |
| DRB1_0101 | 527 | LVTMNEYPVPKTLQA MNEYPVPKT | 0.5027 | 217 | WB Large T |
| DRB1_0101 | 528 | VTMNEYPVPKTLQAR YPVPKTLQA | 0.5012 | 221 | WB Large T |
| DRB1_0101 | 371 | LDKMDLIFGAHGNAV LDKMDLIFG | 0.4990 | 226 | WB Large T |
| DRB1_0101 | 572 | QSGMTLLLLLIWFRP MTLLLLLIW | 0.4975 | 230 | WB Large T |
| DRB1_0101 | 282 | TKCEDVFLLLGMYLE VFLLLGMYL | 0.4937 | 239 | WB Large T |
| DRB1_0101 | 283 | KCEDVFLLLGMYLEF VFLLLGMYL | 0.4920 | 244 | WB Large T |
| DRB1_0101 | 376 | LIFGAHGNAVLEQYM FGAHGNAVL | 0.4919 | 244 | WB Large T |
| DRB1_0101 | 394 | AWLHCLLPKMDSVIF LLPKMDSVI | 0.4910 | 246 | WB Large T |
| DRB1_0101 | 604 | RLDSEISMYTFSRMK LDSEISMYT | 0.4900 | 249 | WB Large T |
| DRB1_0101 | 605 | LDSEISMYTFSRMKY LDSEISMYT | 0.4889 | 252 | WB Large T |
| DRB1_0101 | 12 | ELMDLLGLERAAWGN MDLLGLERA | 0.4876 | 256 | WB Large T |
| DRB1_0101 | 472 | VVFEDVKGTGAESKD VKGTGAESK | 0.4858 | 261 | WB Large T |
| DRB1_0101 | 471 | MVVFEDVKGTGAESK FEDVKGTGA | 0.4853 | 262 | WB Large T |
| DRB1_0101 | 340 | QQAVDTVLAKKRVDT VDTVLAKKR | 0.4843 | 265 | WB Large T |
| DRB1_0101 | 172 | ILYKKLMEKYSVTFI YKKLMEKYS | 0.4836 | 267 | WB Large T |
| DRB1_0101 | 339 | CQQAVDTVLAKKRVD VDTVLAKKR | 0.4837 | 267 | WB Large T |
| DRB1_0101 | 8 | EESMELMDLLGLERA LMDLLGLER | 0.4834 | 268 | WB Large T |
| DRB1_0101 | 9 | ESMELMDLLGLERAA LMDLLGLER | 0.4823 | 271 | WB Large T |
| DRB1_0101 | 395 | WLHCLLPKMDSVIFD LPKMDSVIF | 0.4815 | 273 | WB Large T |
| DRB1_0101 | 256 | EHDFNPEEPEETKQV FNPEEPEET | 0.4804 | 276 | WB Large T |
| DRB1_0101 | 152 | VFSNRTLACFAVYTT TLACFAVYT | 0.4803 | 277 | WB Large T |
| DRB1_0101 | 257 | HDFNPEEPEETKQVS FNPEEPEET | 0.4796 | 279 | WB Large T |
| DRB1_0101 | 48 | DEDKMKRMNTLYKKM MKRMNTLYK | 0.4796 | 279 | WB Large T |
| DRB1_0101 | 255 | KEHDFNPEEPEETKQ FNPEEPEET | 0.4792 | 280 | WB Large T |
| DRB1_0101 | 396 | LHCLLPKMDSVIFDF LPKMDSVIF | 0.4778 | 284 | WB Large T |
| DRB1_0101 | 254 | LKEHDFNPEEPEETK FNPEEPEET | 0.4775 | 285 | WB Large T |
| DRB1_0101 | 150 | QAVFSNRTLACFAVY FSNRTLACF | 0.4767 | 288 | WB Large T |
| DRB1_0101 | 563 | EFLLEKRILQSGMTL KRILQSGMT | 0.4767 | 288 | WB Large T |
| DRB1_0101 | 226 | KGVNKEYLLYSALTR EYLLYSALT | 0.4763 | 289 | WB Large T |
| DRB1_0101 | 548 | DFRPKIYLRKSLQNS FRPKIYLRK | 0.4755 | 291 | WB Large T |
| DRB1_0101 | 47 | GDEDKMKRMNTLYKK MKRMNTLYK | 0.4754 | 292 | WB Large T |
| DRB1_0101 | 549 | FRPKIYLRKSLQNSE YLRKSLQNS | 0.4751 | 293 | WB Large T |
| DRB1_0101 | 171 | QILYKKLMEKYSVTF YKKLMEKYS | 0.4745 | 295 | WB Large T |
| DRB1_0101 | 253 | GLKEHDFNPEEPEET GLKEHDFNP | 0.4744 | 295 | WB Large T |
| DRB1_0101 | 196 | IIFFLTPHRHRVSAI LTPHRHRVS | 0.4734 | 298 | WB Large T |
| DRB1_0101 | 397 | HCLLPKMDSVIFDFL LPKMDSVIF | 0.4735 | 298 | WB Large T |
| DRB1_0101 | 10 | SMELMDLLGLERAAW MDLLGLERA | 0.4730 | 299 | WB Large T |
| DRB1_0101 | 578 | LLLLIWFRPVADFSK LIWFRPVAD | 0.4729 | 300 | WB Large T |
| DRB1_0101 | 49 | EDKMKRMNTLYKKME MKRMNTLYK | 0.4724 | 302 | WB Large T |
| DRB1_0101 | 562 | SEFLLEKRILQSGMT LEKRILQSG | 0.4722 | 302 | WB Large T |
| DRB1_0101 | 579 | LLLIWFRPVADFSKD LIWFRPVAD | 0.4723 | 302 | WB Large T |
| DRB1_0101 | 551 | PKIYLRKSLQNSEFL YLRKSLQNS | 0.4719 | 303 | WB Large T |
| DRB1_0101 | 523 | FPPGLVTMNEYPVPK FPPGLVTMN | 0.4709 | 306 | WB Large T |
| DRB1_0101 | 197 | IFFLTPHRHRVSAIN LTPHRHRVS | 0.4697 | 310 | WB Large T |
| DRB1_0101 | 50 | DKMKRMNTLYKKMEQ MKRMNTLYK | 0.4699 | 310 | WB Large T |
| DRB1_0101 | 550 | RPKIYLRKSLQNSEF YLRKSLQNS | 0.4698 | 310 | WB Large T |
| DRB1_0101 | 46 | GGDEDKMKRMNTLYK DKMKRMNTL | 0.4690 | 313 | WB Large T |
| DRB1_0101 | 2 | DKVLNREESMELMDL LNREESMEL | 0.4683 | 315 | WB Large T |
| DRB1_0101 | 577 | LLLLLIWFRPVADFS LIWFRPVAD | 0.4684 | 315 | WB Large T |
| DRB1_0101 | 153 | FSNRTLACFAVYTTK LACFAVYTT | 0.4677 | 317 | WB Large T |
| DRB1_0101 | 3 | KVLNREESMELMDLL LNREESMEL | 0.4672 | 319 | WB Large T |
| DRB1_0101 | 281 | ETKCEDVFLLLGMYL EDVFLLLGM | 0.4666 | 321 | WB Large T |
| DRB1_0101 | 573 | SGMTLLLLLIWFRPV MTLLLLLIW | 0.4649 | 327 | WB Large T |
| DRB1_0101 | 493 | INNLDSLRDYLDGSV INNLDSLRD | 0.4638 | 331 | WB Large T |
| DRB1_0101 | 524 | PPGLVTMNEYPVPKT LVTMNEYPV | 0.4635 | 332 | WB Large T |
| DRB1_0101 | 525 | PGLVTMNEYPVPKTL MNEYPVPKT | 0.4633 | 333 | WB Large T |
| DRB1_0101 | 151 | AVFSNRTLACFAVYT FSNRTLACF | 0.4625 | 336 | WB Large T |
| DRB1_0101 | 492 | GINNLDSLRDYLDGS INNLDSLRD | 0.4622 | 336 | WB Large T |
| DRB1_0101 | 227 | GVNKEYLLYSALTRD YLLYSALTR | 0.4619 | 338 | WB Large T |
| DRB1_0101 | 529 | TMNEYPVPKTLQARF YPVPKTLQA | 0.4598 | 345 | WB Large T |
| DRB1_0101 | 459 | LTFELGVAIDQYMVV LGVAIDQYM | 0.4589 | 349 | WB Large T |
| DRB1_0101 | 457 | ERLTFELGVAIDQYM LTFELGVAI | 0.4584 | 351 | WB Large T |
| DRB1_0101 | 398 | CLLPKMDSVIFDFLH LPKMDSVIF | 0.4578 | 353 | WB Large T |
| DRB1_0101 | 552 | KIYLRKSLQNSEFLL YLRKSLQNS | 0.4575 | 354 | WB Large T |
| DRB1_0101 | 13 | LMDLLGLERAAWGNL LGLERAAWG | 0.4572 | 355 | WB Large T |
| DRB1_0101 | 575 | MTLLLLLIWFRPVAD MTLLLLLIW | 0.4574 | 355 | WB Large T |
| DRB1_0101 | 451 | NVNLPMERLTFELGV NVNLPMERL | 0.4555 | 362 | WB Large T |
| DRB1_0101 | 193 | GHNIIFFLTPHRHRV IFFLTPHRH | 0.4529 | 372 | WB Large T |
| DRB1_0101 | 1 | MDKVLNREESMELMD LNREESMEL | 0.4521 | 376 | WB Large T |
| DRB1_0101 | 432 | SGKTTLAAGLLDLCG KTTLAAGLL | 0.4504 | 382 | WB Large T |
| DRB1_0101 | 233 | LLYSALTRDPYHIIE LYSALTRDP | 0.4500 | 384 | WB Large T |
| DRB1_0101 | 377 | IFGAHGNAVLEQYMA IFGAHGNAV | 0.4493 | 387 | WB Large T |
| DRB1_0101 | 273 | KLITEYAVETKCEDV LITEYAVET | 0.4490 | 388 | WB Large T |
| DRB1_0101 | 458 | RLTFELGVAIDQYMV LGVAIDQYM | 0.4476 | 394 | WB Large T |
| DRB1_0101 | 234 | LYSALTRDPYHIIEE LYSALTRDP | 0.4472 | 396 | WB Large T |
| DRB1_0101 | 422 | RYWLFKGPIDSGKTT WLFKGPIDS | 0.4473 | 396 | WB Large T |
| DRB1_0101 | 421 | RRYWLFKGPIDSGKT WLFKGPIDS | 0.4465 | 399 | WB Large T |
| DRB1_0101 | 274 | LITEYAVETKCEDVF LITEYAVET | 0.4460 | 401 | WB Large T |
| DRB1_0101 | 14 | MDLLGLERAAWGNLP LGLERAAWG | 0.4451 | 405 | WB Large T |
| DRB1_0101 | 476 | DVKGTGAESKDLPSG VKGTGAESK | 0.4428 | 415 | WB Large T |
| DRB1_0101 | 477 | VKGTGAESKDLPSGH VKGTGAESK | 0.4412 | 422 | WB Large T |
| DRB1_0101 | 526 | GLVTMNEYPVPKTLQ MNEYPVPKT | 0.4408 | 424 | WB Large T |
| DRB1_0101 | 174 | YKKLMEKYSVTFISR LMEKYSVTF | 0.4406 | 425 | WB Large T |
| DRB1_0101 | 390 | MAGVAWLHCLLPKMD VAWLHCLLP | 0.4407 | 425 | WB Large T |
| DRB1_0101 | 173 | LYKKLMEKYSVTFIS LMEKYSVTF | 0.4405 | 426 | WB Large T |
| DRB1_0101 | 5 | LNREESMELMDLLGL LNREESMEL | 0.4397 | 429 | WB Large T |
| DRB1_0101 | 580 | LLIWFRPVADFSKDI WFRPVADFS | 0.4370 | 442 | WB Large T |
| DRB1_0101 | 391 | AGVAWLHCLLPKMDS VAWLHCLLP | 0.4368 | 443 | WB Large T |
| DRB1_0101 | 7 | REESMELMDLLGLER MELMDLLGL | 0.4355 | 449 | WB Large T |
| DRB1_0101 | 341 | QAVDTVLAKKRVDTL VDTVLAKKR | 0.4341 | 456 | WB Large T |
| DRB1_0101 | 431 | DSGKTTLAAGLLDLC KTTLAAGLL | 0.4339 | 457 | WB Large T |
| DRB1_0101 | 155 | NRTLACFAVYTTKEK LACFAVYTT | 0.4312 | 471 | WB Large T |
| DRB1_0101 | 192 | AGHNIIFFLTPHRHR IFFLTPHRH | 0.4310 | 472 | WB Large T |
| DRB1_0101 | 538 | TLQARFVRQIDFRPK LQARFVRQI | 0.4309 | 472 | WB Large T |
| DRB1_0101 | 266 | ETKQVSWKLITEYAV VSWKLITEY | 0.4307 | 473 | WB Large T |
| DRB1_0101 | 267 | TKQVSWKLITEYAVE WKLITEYAV | 0.4303 | 475 | WB Large T |
| DRB1_0101 | 539 | LQARFVRQIDFRPKI LQARFVRQI | 0.4290 | 482 | WB Large T |
| DRB1_0101 | 225 | CKGVNKEYLLYSALT VNKEYLLYS | 0.4288 | 483 | WB Large T |
| DRB1_0101 | 677 | KGFQCFKRPKTPPPK FKRPKTPPP | 0.4281 | 487 | WB Large T |
| DRB1_0101 | 333 | KNQKSICQQAVDTVL ICQQAVDTV | 0.4261 | 498 | WB Large T |
| DRB1_0101 | 72 | PDFGTWNSSEVPTYG FGTWNSSEV | 0.4258 | 499 | WB Large T |
| DRB1_0401 | 47 | GDEDKMKRMNTLYKK MKRMNTLYK | 0.5015 | 220 | WB Large T |
| DRB1_0401 | 48 | DEDKMKRMNTLYKKM MKRMNTLYK | 0.4994 | 225 | WB Large T |
| DRB1_0401 | 46 | GGDEDKMKRMNTLYK KMKRMNTLY | 0.4992 | 226 | WB Large T |
| DRB1_0401 | 49 | EDKMKRMNTLYKKME MKRMNTLYK | 0.4991 | 226 | WB Large T |
| DRB1_0401 | 50 | DKMKRMNTLYKKMEQ MKRMNTLYK | 0.4948 | 237 | WB Large T |
| DRB1_0401 | 192 | AGHNIIFFLTPHRHR IIFFLTPHR | 0.4859 | 261 | WB Large T |
| DRB1_0401 | 194 | HNIIFFLTPHRHRVS IIFFLTPHR | 0.4856 | 261 | WB Large T |
| DRB1_0401 | 193 | GHNIIFFLTPHRHRV IIFFLTPHR | 0.4820 | 272 | WB Large T |
| DRB1_0401 | 191 | CAGHNIIFFLTPHRH IIFFLTPHR | 0.4700 | 309 | WB Large T |
| DRB1_0401 | 190 | MCAGHNIIFFLTPHR MCAGHNIIF | 0.4533 | 371 | WB Large T |
| DRB1_0404 | 194 | HNIIFFLTPHRHRVS IIFFLTPHR | 0.5594 | 118 | WB Large T |
| DRB1_0404 | 193 | GHNIIFFLTPHRHRV IIFFLTPHR | 0.5580 | 119 | WB Large T |
| DRB1_0404 | 284 | CEDVFLLLGMYLEFQ FLLLGMYLE | 0.5487 | 132 | WB Large T |
| DRB1_0404 | 286 | DVFLLLGMYLEFQYN LLGMYLEFQ | 0.5479 | 133 | WB Large T |
| DRB1_0404 | 285 | EDVFLLLGMYLEFQY LLGMYLEFQ | 0.5470 | 135 | WB Large T |
| DRB1_0404 | 288 | FLLLGMYLEFQYNVE LLGMYLEFQ | 0.5425 | 141 | WB Large T |
| DRB1_0404 | 287 | VFLLLGMYLEFQYNV LLGMYLEFQ | 0.5417 | 142 | WB Large T |
| DRB1_0404 | 192 | AGHNIIFFLTPHRHR IIFFLTPHR | 0.5303 | 161 | WB Large T |
| DRB1_0404 | 191 | CAGHNIIFFLTPHRH IIFFLTPHR | 0.5272 | 167 | WB Large T |
| DRB1_0404 | 575 | MTLLLLLIWFRPVAD LLLLIWFRP | 0.5188 | 182 | WB Large T |
| DRB1_0404 | 389 | YMAGVAWLHCLLPKM VAWLHCLLP | 0.5113 | 198 | WB Large T |
| DRB1_0404 | 387 | EQYMAGVAWLHCLLP YMAGVAWLH | 0.5087 | 203 | WB Large T |
| DRB1_0404 | 576 | TLLLLLIWFRPVADF LLLLIWFRP | 0.5091 | 203 | WB Large T |
| DRB1_0404 | 190 | MCAGHNIIFFLTPHR HNIIFFLTP | 0.5052 | 211 | WB Large T |
| DRB1_0404 | 390 | MAGVAWLHCLLPKMD VAWLHCLLP | 0.5054 | 211 | WB Large T |
| DRB1_0404 | 175 | KKLMEKYSVTFISRH LMEKYSVTF | 0.5033 | 216 | WB Large T |
| DRB1_0404 | 391 | AGVAWLHCLLPKMDS VAWLHCLLP | 0.5004 | 223 | WB Large T |
| DRB1_0404 | 577 | LLLLLIWFRPVADFS LLIWFRPVA | 0.5001 | 223 | WB Large T |
| DRB1_0404 | 388 | QYMAGVAWLHCLLPK VAWLHCLLP | 0.4995 | 225 | WB Large T |
| DRB1_0404 | 195 | NIIFFLTPHRHRVSA IIFFLTPHR | 0.4985 | 227 | WB Large T |
| DRB1_0404 | 179 | EKYSVTFISRHMCAG YSVTFISRH | 0.4981 | 228 | WB Large T |
| DRB1_0404 | 177 | LMEKYSVTFISRHMC YSVTFISRH | 0.4969 | 231 | WB Large T |
| DRB1_0404 | 176 | KLMEKYSVTFISRHM YSVTFISRH | 0.4952 | 236 | WB Large T |
| DRB1_0404 | 178 | MEKYSVTFISRHMCA YSVTFISRH | 0.4940 | 239 | WB Large T |
| DRB1_0404 | 578 | LLLLIWFRPVADFSK LLIWFRPVA | 0.4909 | 247 | WB Large T |
| DRB1_0404 | 196 | IIFFLTPHRHRVSAI IIFFLTPHR | 0.4866 | 258 | WB Large T |
| DRB1_0404 | 574 | GMTLLLLLIWFRPVA LLLLIWFRP | 0.4835 | 267 | WB Large T |
| DRB1_0404 | 371 | LDKMDLIFGAHGNAV MDLIFGAHG | 0.4592 | 348 | WB Large T |
| DRB1_0404 | 290 | LLGMYLEFQYNVEEC LLGMYLEFQ | 0.4448 | 406 | WB Large T |
| DRB1_0404 | 289 | LLLGMYLEFQYNVEE LLGMYLEFQ | 0.4447 | 407 | WB Large T |
| DRB1_0404 | 372 | DKMDLIFGAHGNAVL IFGAHGNAV | 0.4437 | 411 | WB Large T |
| DRB1_0405 | 575 | MTLLLLLIWFRPVAD LLIWFRPVA | 0.7757 | 11 | SB Large T |
| DRB1_0405 | 576 | TLLLLLIWFRPVADF LIWFRPVAD | 0.7721 | 12 | SB Large T |
| DRB1_0405 | 577 | LLLLLIWFRPVADFS LIWFRPVAD | 0.7733 | 12 | SB Large T |
| DRB1_0405 | 578 | LLLLIWFRPVADFSK LIWFRPVAD | 0.7738 | 12 | SB Large T |
| DRB1_0405 | 579 | LLLIWFRPVADFSKD LIWFRPVAD | 0.7712 | 12 | SB Large T |
| DRB1_0405 | 85 | YGTEEWESWWSSFNE WESWWSSFN | 0.7453 | 16 | SB Large T |
| DRB1_0405 | 87 | TEEWESWWSSFNEKW WESWWSSFN | 0.7451 | 16 | SB Large T |
| DRB1_0405 | 86 | GTEEWESWWSSFNEK WESWWSSFN | 0.7381 | 17 | SB Large T |
| DRB1_0405 | 88 | EEWESWWSSFNEKWD WESWWSSFN | 0.7402 | 17 | SB Large T |
| DRB1_0405 | 84 | TYGTEEWESWWSSFN TEEWESWWS | 0.7216 | 20 | SB Large T |
| DRB1_0405 | 580 | LLIWFRPVADFSKDI LIWFRPVAD | 0.6804 | 32 | SB Large T |
| DRB1_0405 | 581 | LIWFRPVADFSKDIQ LIWFRPVAD | 0.6771 | 33 | SB Large T |
| DRB1_0405 | 89 | EWESWWSSFNEKWDE WESWWSSFN | 0.6771 | 33 | SB Large T |
| DRB1_0405 | 90 | WESWWSSFNEKWDED WESWWSSFN | 0.6504 | 44 | SB Large T |
| DRB1_0405 | 49 | EDKMKRMNTLYKKME MKRMNTLYK | 0.5687 | 106 | WB Large T |
| DRB1_0405 | 50 | DKMKRMNTLYKKMEQ MKRMNTLYK | 0.5662 | 109 | WB Large T |
| DRB1_0405 | 47 | GDEDKMKRMNTLYKK MKRMNTLYK | 0.5447 | 138 | WB Large T |
| DRB1_0405 | 46 | GGDEDKMKRMNTLYK DKMKRMNTL | 0.5432 | 140 | WB Large T |
| DRB1_0405 | 48 | DEDKMKRMNTLYKKM MKRMNTLYK | 0.5413 | 143 | WB Large T |
| DRB1_0405 | 490 | GHGINNLDSLRDYLD INNLDSLRD | 0.5182 | 184 | WB Large T |
| DRB1_0405 | 491 | HGINNLDSLRDYLDG INNLDSLRD | 0.5113 | 198 | WB Large T |
| DRB1_0405 | 18 | GLERAAWGNLPLMRK RAAWGNLPL | 0.5095 | 202 | WB Large T |
| DRB1_0405 | 487 | LPSGHGINNLDSLRD GHGINNLDS | 0.4979 | 229 | WB Large T |
| DRB1_0405 | 19 | LERAAWGNLPLMRKA RAAWGNLPL | 0.4956 | 235 | WB Large T |
| DRB1_0405 | 488 | PSGHGINNLDSLRDY INNLDSLRD | 0.4948 | 237 | WB Large T |
| DRB1_0405 | 489 | SGHGINNLDSLRDYL INNLDSLRD | 0.4858 | 261 | WB Large T |
| DRB1_0405 | 51 | KMKRMNTLYKKMEQD MKRMNTLYK | 0.4857 | 261 | WB Large T |
| DRB1_0405 | 52 | MKRMNTLYKKMEQDV MKRMNTLYK | 0.4857 | 261 | WB Large T |
| DRB1_0405 | 391 | AGVAWLHCLLPKMDS VAWLHCLLP | 0.4831 | 269 | WB Large T |
| DRB1_0405 | 91 | ESWWSSFNEKWDEDL WSSFNEKWD | 0.4812 | 274 | WB Large T |
| DRB1_0405 | 390 | MAGVAWLHCLLPKMD VAWLHCLLP | 0.4697 | 310 | WB Large T |
| DRB1_0405 | 387 | EQYMAGVAWLHCLLP YMAGVAWLH | 0.4648 | 327 | WB Large T |
| DRB1_0405 | 68 | VAHQPDFGTWNSSEV QPDFGTWNS | 0.4624 | 336 | WB Large T |
| DRB1_0405 | 418 | VPKRRYWLFKGPIDS YWLFKGPID | 0.4620 | 337 | WB Large T |
| DRB1_0405 | 388 | QYMAGVAWLHCLLPK VAWLHCLLP | 0.4614 | 339 | WB Large T |
| DRB1_0405 | 420 | KRRYWLFKGPIDSGK YWLFKGPID | 0.4599 | 345 | WB Large T |
| DRB1_0405 | 419 | PKRRYWLFKGPIDSG YWLFKGPID | 0.4586 | 350 | WB Large T |
| DRB1_0405 | 20 | ERAAWGNLPLMRKAY WGNLPLMRK | 0.4570 | 356 | WB Large T |
| DRB1_0405 | 69 | AHQPDFGTWNSSEVP FGTWNSSEV | 0.4571 | 356 | WB Large T |
| DRB1_0405 | 389 | YMAGVAWLHCLLPKM VAWLHCLLP | 0.4547 | 365 | WB Large T |
| DRB1_0405 | 421 | RRYWLFKGPIDSGKT YWLFKGPID | 0.4540 | 368 | WB Large T |
| DRB1_0405 | 417 | NVPKRRYWLFKGPID RYWLFKGPI | 0.4530 | 372 | WB Large T |
| DRB1_0405 | 17 | LGLERAAWGNLPLMR RAAWGNLPL | 0.4515 | 378 | WB Large T |
| DRB1_0405 | 16 | LLGLERAAWGNLPLM RAAWGNLPL | 0.4465 | 399 | WB Large T |
| DRB1_0405 | 493 | INNLDSLRDYLDGSV INNLDSLRD | 0.4409 | 424 | WB Large T |
| DRB1_0405 | 492 | GINNLDSLRDYLDGS INNLDSLRD | 0.4405 | 426 | WB Large T |
| DRB1_0405 | 15 | DLLGLERAAWGNLPL ERAAWGNLP | 0.4401 | 427 | WB Large T |
| DRB1_0405 | 70 | HQPDFGTWNSSEVPT FGTWNSSEV | 0.4392 | 432 | WB Large T |
| DRB1_0405 | 653 | CSSQVSDTSAPDSEN QVSDTSAPD | 0.4296 | 479 | WB Large T |
| DRB1_0405 | 654 | SSQVSDTSAPDSENP QVSDTSAPD | 0.4282 | 486 | WB Large T |
| DRB1_0701 | 412 | HCVVFNVPKRRYWLF VFNVPKRRY | 0.5438 | 139 | WB Large T |
| DRB1_0701 | 413 | CVVFNVPKRRYWLFK VPKRRYWLF | 0.5406 | 144 | WB Large T |
| DRB1_0701 | 414 | VVFNVPKRRYWLFKG VPKRRYWLF | 0.5149 | 190 | WB Large T |
| DRB1_0701 | 415 | VFNVPKRRYWLFKGP VPKRRYWLF | 0.5009 | 221 | WB Large T |
| DRB1_0701 | 71 | QPDFGTWNSSEVPTY FGTWNSSEV | 0.4820 | 272 | WB Large T |
| DRB1_0701 | 72 | PDFGTWNSSEVPTYG FGTWNSSEV | 0.4789 | 281 | WB Large T |
| DRB1_0701 | 68 | VAHQPDFGTWNSSEV DFGTWNSSE | 0.4709 | 306 | WB Large T |
| DRB1_0701 | 69 | AHQPDFGTWNSSEVP FGTWNSSEV | 0.4658 | 324 | WB Large T |
| DRB1_0701 | 70 | HQPDFGTWNSSEVPT FGTWNSSEV | 0.4657 | 324 | WB Large T |
| DRB1_0701 | 416 | FNVPKRRYWLFKGPI VPKRRYWLF | 0.4627 | 335 | WB Large T |
| DRB1_0701 | 194 | HNIIFFLTPHRHRVS IFFLTPHRH | 0.4550 | 364 | WB Large T |
| DRB1_0701 | 195 | NIIFFLTPHRHRVSA IFFLTPHRH | 0.4521 | 375 | WB Large T |
| DRB1_0701 | 193 | GHNIIFFLTPHRHRV IFFLTPHRH | 0.4386 | 434 | WB Large T |
| DRB1_0701 | 176 | KLMEKYSVTFISRHM YSVTFISRH | 0.4346 | 454 | WB Large T |
| DRB1_0701 | 196 | IIFFLTPHRHRVSAI IFFLTPHRH | 0.4331 | 461 | WB Large T |
| DRB1_0701 | 177 | LMEKYSVTFISRHMC YSVTFISRH | 0.4315 | 469 | WB Large T |
| DRB1_0701 | 387 | EQYMAGVAWLHCLLP YMAGVAWLH | 0.4303 | 475 | WB Large T |
| DRB1_0701 | 386 | LEQYMAGVAWLHCLL YMAGVAWLH | 0.4292 | 481 | WB Large T |
| DRB1_0701 | 192 | AGHNIIFFLTPHRHR IFFLTPHRH | 0.4288 | 483 | WB Large T |
| DRB1_0701 | 197 | IFFLTPHRHRVSAIN IFFLTPHRH | 0.4289 | 483 | WB Large T |
| DRB1_0901 | 229 | NKEYLLYSALTRDPY YLLYSALTR | 0.4376 | 439 | WB Large T |
| DRB1_0901 | 230 | KEYLLYSALTRDPYH YLLYSALTR | 0.4372 | 441 | WB Large T |
| DRB1_0901 | 72 | PDFGTWNSSEVPTYG WNSSEVPTY | 0.4364 | 445 | WB Large T |
| DRB1_0901 | 71 | QPDFGTWNSSEVPTY FGTWNSSEV | 0.4355 | 449 | WB Large T |
| DRB1_0901 | 228 | VNKEYLLYSALTRDP YLLYSALTR | 0.4325 | 464 | WB Large T |
| DRB1_0901 | 384 | AVLEQYMAGVAWLHC LEQYMAGVA | 0.4270 | 493 | WB Large T |
| DRB1_0901 | 383 | NAVLEQYMAGVAWLH LEQYMAGVA | 0.4259 | 499 | WB Large T |
| DRB1_1101 | 232 | YLLYSALTRDPYHII YSALTRDPY | 0.4594 | 347 | WB Large T |
| DRB1_1101 | 233 | LLYSALTRDPYHIIE YSALTRDPY | 0.4586 | 350 | WB Large T |
| DRB1_1101 | 231 | EYLLYSALTRDPYHI YSALTRDPY | 0.4552 | 363 | WB Large T |
| DRB1_1101 | 229 | NKEYLLYSALTRDPY YLLYSALTR | 0.4548 | 364 | WB Large T |
| DRB1_1101 | 47 | GDEDKMKRMNTLYKK MKRMNTLYK | 0.4550 | 364 | WB Large T |
| DRB1_1101 | 230 | KEYLLYSALTRDPYH YSALTRDPY | 0.4537 | 369 | WB Large T |
| DRB1_1101 | 49 | EDKMKRMNTLYKKME MKRMNTLYK | 0.4498 | 385 | WB Large T |
| DRB1_1101 | 48 | DEDKMKRMNTLYKKM MKRMNTLYK | 0.4495 | 386 | WB Large T |
| DRB1_1101 | 50 | DKMKRMNTLYKKMEQ MKRMNTLYK | 0.4483 | 391 | WB Large T |
| DRB1_1101 | 46 | GGDEDKMKRMNTLYK EDKMKRMNT | 0.4433 | 413 | WB Large T |
| DRB1_1101 | 18 | GLERAAWGNLPLMRK AWGNLPLMR | 0.4312 | 471 | WB Large T |
| DRB1_1101 | 19 | LERAAWGNLPLMRKA WGNLPLMRK | 0.4311 | 471 | WB LargeT |
| DRB1_1101 | 21 | RAAWGNLPLMRKAYL WGNLPLMRK | 0.4288 | 483 | WB Large T |
| DRB1_1101 | 20 | ERAAWGNLPLMRKAY WGNLPLMRK | 0.4279 | 488 | WB Large T |
| DRB1_1302 | 18 | GLERAAWGNLPLMRK LERAAWGNL | 0.5752 | 99 | WB Large T |
| DRB1_1302 | 21 | RAAWGNLPLMRKAYL WGNLPLMRK | 0.5714 | 103 | WB Large T |
| DRB1_1302 | 22 | AAWGNLPLMRKAYLK WGNLPLMRK | 0.5704 | 104 | WB Large T |
| DRB1_1302 | 19 | LERAAWGNLPLMRKA WGNLPLMRK | 0.5702 | 105 | WB Large T |
| DRB1_1302 | 20 | ERAAWGNLPLMRKAY WGNLPLMRK | 0.5531 | 126 | WB Large T |
| DRB1_1302 | 285 | EDVFLLLGMYLEFQY FLLLGMYLE | 0.5498 | 130 | WB Large T |
| DRB1_1302 | 445 | CGGKALNVNLPMERL LNVNLPMER | 0.5476 | 134 | WB Large T |
| DRB1_1302 | 446 | GGKALNVNLPMERLT LNVNLPMER | 0.5454 | 137 | WB Large T |
| DRB1_1302 | 566 | LEKRILQSGMTLLLL ILQSGMTLL | 0.5431 | 140 | WB Large T |
| DRB1_1302 | 444 | LCGGKALNVNLPMER GKALNVNLP | 0.5427 | 141 | WB Large T |
| DRB1_1302 | 565 | LLEKRILQSGMTLLL ILQSGMTLL | 0.5420 | 142 | WB Large T |
| DRB1_1302 | 447 | GKALNVNLPMERLTF LNVNLPMER | 0.5392 | 146 | WB Large T |
| DRB1_1302 | 284 | CEDVFLLLGMYLEFQ FLLLGMYLE | 0.5383 | 148 | WB Large T |
| DRB1_1302 | 283 | KCEDVFLLLGMYLEF FLLLGMYLE | 0.5363 | 151 | WB Large T |
| DRB1_1302 | 567 | EKRILQSGMTLLLLL ILQSGMTLL | 0.5327 | 157 | WB Large T |
| DRB1_1302 | 282 | TKCEDVFLLLGMYLE VFLLLGMYL | 0.5292 | 163 | WB Large T |
| DRB1_1302 | 568 | KRILQSGMTLLLLLI ILQSGMTLL | 0.5282 | 165 | WB Large T |
| DRB1_1302 | 286 | DVFLLLGMYLEFQYN FLLLGMYLE | 0.5258 | 169 | WB Large T |
| DRB1_1302 | 409 | DFLHCVVFNVPKRRY VVFNVPKRR | 0.5112 | 198 | WB Large T |
| DRB1_1302 | 411 | LHCVVFNVPKRRYWL VFNVPKRRY | 0.5079 | 205 | WB Large T |
| DRB1_1302 | 410 | FLHCVVFNVPKRRYW VFNVPKRRY | 0.5074 | 206 | WB Large T |
| DRB1_1302 | 48 | DEDKMKRMNTLYKKM MKRMNTLYK | 0.5012 | 221 | WB Large T |
| DRB1_1302 | 448 | KALNVNLPMERLTFE LNVNLPMER | 0.4996 | 225 | WB Large T |
| DRB1_1302 | 49 | EDKMKRMNTLYKKME MKRMNTLYK | 0.4986 | 227 | WB Large T |
| DRB1_1302 | 609 | ISMYTFSRMKYNICM MYTFSRMKY | 0.4969 | 231 | WB Large T |
| DRB1_1302 | 50 | DKMKRMNTLYKKMEQ MKRMNTLYK | 0.4966 | 232 | WB Large T |
| DRB1_1302 | 412 | HCVVFNVPKRRYWLF VFNVPKRRY | 0.4955 | 235 | WB Large T |
| DRB1_1302 | 47 | GDEDKMKRMNTLYKK MKRMNTLYK | 0.4940 | 239 | WB Large T |
| DRB1_1302 | 564 | FLLEKRILQSGMTLL KRILQSGMT | 0.4938 | 239 | WB Large T |
| DRB1_1302 | 608 | EISMYTFSRMKYNIC ISMYTFSRM | 0.4935 | 240 | WB Large T |
| DRB1_1302 | 24 | WGNLPLMRKAYLKKC WGNLPLMRK | 0.4926 | 242 | WB Large T |
| DRB1_1302 | 23 | AWGNLPLMRKAYLKK WGNLPLMRK | 0.4885 | 253 | WB Large T |
| DRB1_1302 | 46 | GGDEDKMKRMNTLYK DKMKRMNTL | 0.4800 | 278 | WB Large T |
| DRB1_1302 | 487 | LPSGHGINNLDSLRD HGINNLDSL | 0.4764 | 289 | WB Large T |
| DRB1_1302 | 489 | SGHGINNLDSLRDYL INNLDSLRD | 0.4752 | 293 | WB Large T |
| DRB1_1302 | 488 | PSGHGINNLDSLRDY INNLDSLRD | 0.4736 | 298 | WB Large T |
| DRB1_1302 | 569 | RILQSGMTLLLLLIW LQSGMTLLL | 0.4720 | 303 | WB Large T |
| DRB1_1302 | 287 | VFLLLGMYLEFQYNV FLLLGMYLE | 0.4711 | 306 | WB Large T |
| DRB1_1302 | 413 | CVVFNVPKRRYWLFK VFNVPKRRY | 0.4581 | 352 | WB Large T |
| DRB1_1302 | 522 | IFPPGLVTMNEYPVP PGLVTMNEY | 0.4560 | 360 | WB Large T |
| DRB1_1302 | 490 | GHGINNLDSLRDYLD INNLDSLRD | 0.4532 | 371 | WB Large T |
| DRB1_1302 | 523 | FPPGLVTMNEYPVPK PGLVTMNEY | 0.4489 | 389 | WB Large T |
| DRB1_1302 | 232 | YLLYSALTRDPYHII YSALTRDPY | 0.4367 | 444 | WB Large T |
| DRB1_1302 | 491 | HGINNLDSLRDYLDG INNLDSLRD | 0.4358 | 448 | WB Large T |
| DRB1_1302 | 570 | ILQSGMTLLLLLIWF ILQSGMTLL | 0.4330 | 462 | WB Large T |
| DRB1_1302 | 449 | ALNVNLPMERLTFEL LNVNLPMER | 0.4326 | 463 | WB Large T |
| DRB1_1302 | 607 | SEISMYTFSRMKYNI ISMYTFSRM | 0.4327 | 463 | WB Large T |
| DRB1_1302 | 51 | KMKRMNTLYKKMEQD MKRMNTLYK | 0.4272 | 492 | WB Large T |
| DRB1_1501 | 192 | AGHNIIFFLTPHRHR IIFFLTPHR | 0.6526 | 43 | SB Large T |
| DRB1_1501 | 193 | GHNIIFFLTPHRHRV IIFFLTPHR | 0.6507 | 44 | SB Large T |
| DRB1_1501 | 575 | MTLLLLLIWFRPVAD LLLLLIWFR | 0.6509 | 44 | SB Large T |
| DRB1_1501 | 574 | GMTLLLLLIWFRPVA LLLLLIWFR | 0.6462 | 46 | SB Large T |
| DRB1_1501 | 191 | CAGHNIIFFLTPHRH IIFFLTPHR | 0.6427 | 48 | SB Large T |
| DRB1_1501 | 194 | HNIIFFLTPHRHRVS IIFFLTPHR | 0.6416 | 48 | SB Large T |
| DRB1_1501 | 576 | TLLLLLIWFRPVADF LLLLLIWFR | 0.6127 | 66 | WB Large T |
| DRB1_1501 | 577 | LLLLLIWFRPVADFS LLIWFRPVA | 0.5958 | 79 | WB Large T |
| DRB1_1501 | 190 | MCAGHNIIFFLTPHR NIIFFLTPH | 0.5914 | 83 | WB Large T |
| DRB1_1501 | 573 | SGMTLLLLLIWFRPV LLLLLIWFR | 0.5875 | 87 | WB Large T |
| DRB1_1501 | 195 | NIIFFLTPHRHRVSA IIFFLTPHR | 0.5848 | 89 | WB Large T |
| DRB1_1501 | 572 | QSGMTLLLLLIWFRP LLLLLIWFR | 0.5640 | 112 | WB Large T |
| DRB1_1501 | 196 | IIFFLTPHRHRVSAI IIFFLTPHR | 0.5515 | 128 | WB Large T |
| DRB1_1501 | 578 | LLLLIWFRPVADFSK LLIWFRPVA | 0.5410 | 144 | WB Large T |
| DRB1_1501 | 571 | LQSGMTLLLLLIWFR TLLLLLIWF | 0.5272 | 167 | WB Large T |
| DRB1_1501 | 48 | DEDKMKRMNTLYKKM MKRMNTLYK | 0.5229 | 174 | WB Large T |
| DRB1_1501 | 49 | EDKMKRMNTLYKKME MKRMNTLYK | 0.5190 | 182 | WB Large T |
| DRB1_1501 | 24 | WGNLPLMRKAYLKKC LMRKAYLKK | 0.5176 | 185 | WB Large T |
| DRB1_1501 | 50 | DKMKRMNTLYKKMEQ MKRMNTLYK | 0.5153 | 190 | WB Large T |
| DRB1_1501 | 47 | GDEDKMKRMNTLYKK MKRMNTLYK | 0.5147 | 191 | WB Large T |
| DRB1_1501 | 23 | AWGNLPLMRKAYLKK LPLMRKAYL | 0.5076 | 206 | WB Large T |
| DRB1_1501 | 25 | GNLPLMRKAYLKKCK LMRKAYLKK | 0.5063 | 209 | WB Large T |
| DRB1_1501 | 46 | GGDEDKMKRMNTLYK DKMKRMNTL | 0.5026 | 217 | WB Large T |
| DRB1_1501 | 26 | NLPLMRKAYLKKCKE LMRKAYLKK | 0.4961 | 233 | WB Large T |
| DRB1_1501 | 548 | DFRPKIYLRKSLQNS DFRPKIYLR | 0.4942 | 238 | WB Large T |
| DRB1_1501 | 227 | GVNKEYLLYSALTRD YLLYSALTR | 0.4878 | 255 | WB Large T |
| DRB1_1501 | 228 | VNKEYLLYSALTRDP YLLYSALTR | 0.4864 | 259 | WB Large T |
| DRB1_1501 | 229 | NKEYLLYSALTRDPY YLLYSALTR | 0.4863 | 259 | WB Large T |
| DRB1_1501 | 230 | KEYLLYSALTRDPYH YLLYSALTR | 0.4859 | 260 | WB Large T |
| DRB1_1501 | 27 | LPLMRKAYLKKCKEF LMRKAYLKK | 0.4850 | 263 | WB Large T |
| DRB1_1501 | 409 | DFLHCVVFNVPKRRY CVVFNVPKR | 0.4823 | 271 | WB Large T |
| DRB1_1501 | 410 | FLHCVVFNVPKRRYW CVVFNVPKR | 0.4819 | 272 | WB Large T |
| DRB1_1501 | 226 | KGVNKEYLLYSALTR VNKEYLLYS | 0.4792 | 280 | WB Large T |
| DRB1_1501 | 411 | LHCVVFNVPKRRYWL CVVFNVPKR | 0.4791 | 280 | WB Large T |
| DRB1_1501 | 543 | FVRQIDFRPKIYLRK DFRPKIYLR | 0.4749 | 293 | WB Large T |
| DRB1_1501 | 544 | VRQIDFRPKIYLRKS DFRPKIYLR | 0.4739 | 297 | WB Large T |
| DRB1_1501 | 542 | RFVRQIDFRPKIYLR VRQIDFRPK | 0.4731 | 299 | WB Large T |
| DRB1_1501 | 408 | FDFLHCVVFNVPKRR CVVFNVPKR | 0.4728 | 300 | WB Large T |
| DRB1_1501 | 579 | LLLIWFRPVADFSKD LLIWFRPVA | 0.4695 | 311 | WB Large T |
| DRB1_1501 | 13 | LMDLLGLERAAWGNL LMDLLGLER | 0.4683 | 315 | WB Large T |
| DRB1_1501 | 549 | FRPKIYLRKSLQNSE YLRKSLQNS | 0.4683 | 315 | WB Large T |
| DRB1_1501 | 11 | MELMDLLGLERAAWG LMDLLGLER | 0.4651 | 326 | WB Large T |
| DRB1_1501 | 142 | SDLHQFLSQAVFSNR LHQFLSQAV | 0.4611 | 341 | WB Large T |
| DRB1_1501 | 413 | CVVFNVPKRRYWLFK CVVFNVPKR | 0.4554 | 362 | WB Large T |
| DRB1_1501 | 169 | KAQILYKKLMEKYSV ILYKKLMEK | 0.4523 | 375 | WB Large T |
| DRB1_1501 | 170 | AQILYKKLMEKYSVT ILYKKLMEK | 0.4511 | 379 | WB Large T |
| DRB1_1501 | 546 | QIDFRPKIYLRKSLQ DFRPKIYLR | 0.4502 | 383 | WB Large T |
| DRB1_1501 | 419 | PKRRYWLFKGPIDSG WLFKGPIDS | 0.4498 | 385 | WB Large T |
| DRB1_1501 | 418 | VPKRRYWLFKGPIDS KRRYWLFKG | 0.4458 | 402 | WB Large T |
| DRB1_1501 | 547 | IDFRPKIYLRKSLQN FRPKIYLRK | 0.4373 | 440 | WB Large T |
| DRB1_1501 | 420 | KRRYWLFKGPIDSGK WLFKGPIDS | 0.4350 | 452 | WB Large T |
| DRB1_1501 | 414 | VVFNVPKRRYWLFKG PKRRYWLFK | 0.4334 | 460 | WB Large T |
| DRB1_1501 | 28 | PLMRKAYLKKCKEFH LMRKAYLKK | 0.4332 | 461 | WB Large T |
| DRB1_1501 | 51 | KMKRMNTLYKKMEQD MKRMNTLYK | 0.4331 | 461 | WB Large T |
| DRB1_1501 | 172 | ILYKKLMEKYSVTFI ILYKKLMEK | 0.4319 | 467 | WB Large T |
| DRB1_1501 | 550 | RPKIYLRKSLQNSEF YLRKSLQNS | 0.4316 | 469 | WB Large T |
| DRB1_1501 | 545 | RQIDFRPKIYLRKSL DFRPKIYLR | 0.4312 | 471 | WB Large T |
| DRB1_1501 | 580 | LLIWFRPVADFSKDI LLIWFRPVA | 0.4297 | 479 | WB Large T |
| DRB1_1501 | 412 | HCVVFNVPKRRYWLF CVVFNVPKR | 0.4294 | 480 | WB Large T |
| DRB1_1501 | 10 | SMELMDLLGLERAAW LMDLLGLER | 0.4261 | 497 | WB Large T |
| DRB4_0101 | 609 | ISMYTFSRMKYNICM FSRMKYNIC | 0.5682 | 107 | WB Large T |
| DRB4_0101 | 611 | MYTFSRMKYNICMGK FSRMKYNIC | 0.5289 | 163 | WB Large T |
| DRB4_0101 | 608 | EISMYTFSRMKYNIC ISMYTFSRM | 0.5272 | 167 | WB Large T |
| DRB4_0101 | 612 | YTFSRMKYNICMGKC FSRMKYNIC | 0.5271 | 167 | WB Large T |
| DRB4_0101 | 610 | SMYTFSRMKYNICMG FSRMKYNIC | 0.5243 | 172 | WB Large T |
| DRB4_0101 | 576 | TLLLLLIWFRPVADF LIWFRPVAD | 0.4721 | 302 | WB Large T |
| DRB4_0101 | 194 | HNIIFFLTPHRHRVS IFFLTPHRH | 0.4700 | 309 | WB Large T |
| DRB4_0101 | 193 | GHNIIFFLTPHRHRV IFFLTPHRH | 0.4668 | 320 | WB Large T |
| DRB4_0101 | 192 | AGHNIIFFLTPHRHR IFFLTPHRH | 0.4660 | 323 | WB Large T |
| DRB4_0101 | 195 | NIIFFLTPHRHRVSA IFFLTPHRH | 0.4640 | 330 | WB Large T |
| DRB4_0101 | 541 | ARFVRQIDFRPKIYL VRQIDFRPK | 0.4637 | 331 | WB Large T |
| DRB4_0101 | 577 | LLLLLIWFRPVADFS LIWFRPVAD | 0.4628 | 334 | WB Large T |
| DRB4_0101 | 191 | CAGHNIIFFLTPHRH IIFFLTPHR | 0.4583 | 351 | WB Large T |
| DRB4_0101 | 613 | TFSRMKYNICMGKCI FSRMKYNIC | 0.4575 | 354 | WB Large T |
| DRB4_0101 | 542 | RFVRQIDFRPKIYLR VRQIDFRPK | 0.4556 | 362 | WB Large T |
| DRB4_0101 | 578 | LLLLIWFRPVADFSK LIWFRPVAD | 0.4526 | 373 | WB Large T |
| DRB4_0101 | 614 | FSRMKYNICMGKCIL FSRMKYNIC | 0.4368 | 443 | WB Large T |
| DRB4_0101 | 579 | LLLIWFRPVADFSKD LIWFRPVAD | 0.4362 | 446 | WB Large T |
| DRB4_0101 | 539 | LQARFVRQIDFRPKI VRQIDFRPK | 0.4355 | 449 | WB Large T |
| DRB4_0101 | 575 | MTLLLLLIWFRPVAD LLLIWFRPV | 0.4344 | 455 | WB Large T |
| DRB4_0101 | 538 | TLQARFVRQIDFRPK FVRQIDFRP | 0.4341 | 456 | WB Large T |
| DRB4_0101 | 540 | QARFVRQIDFRPKIY VRQIDFRPK | 0.4260 | 498 | WB Large T |
| DRB5_0101 | 543 | FVRQIDFRPKIYLRK RQIDFRPKI | 0.6349 | 52 | WB Large T |
| DRB5_0101 | 544 | VRQIDFRPKIYLRKS FRPKIYLRK | 0.6346 | 52 | WB Large T |
| DRB5_0101 | 545 | RQIDFRPKIYLRKSL FRPKIYLRK | 0.6343 | 52 | WB Large T |
| DRB5_0101 | 546 | QIDFRPKIYLRKSLQ FRPKIYLRK | 0.6326 | 53 | WB Large T |
| DRB5_0101 | 547 | IDFRPKIYLRKSLQN FRPKIYLRK | 0.6322 | 53 | WB Large T |
| DRB5_0101 | 411 | LHCVVFNVPKRRYWL VVFNVPKRR | 0.5655 | 110 | WB Large T |
| DRB5_0101 | 412 | HCVVFNVPKRRYWLF VVFNVPKRR | 0.5631 | 113 | WB Large T |
| DRB5_0101 | 410 | FLHCVVFNVPKRRYW VVFNVPKRR | 0.5614 | 115 | WB Large T |
| DRB5_0101 | 409 | DFLHCVVFNVPKRRY VVFNVPKRR | 0.5437 | 139 | WB Large T |
| DRB5_0101 | 548 | DFRPKIYLRKSLQNS FRPKIYLRK | 0.5361 | 151 | WB Large T |
| DRB5_0101 | 549 | FRPKIYLRKSLQNSE FRPKIYLRK | 0.5359 | 152 | WB Large T |
| DRB5_0101 | 255 | KEHDFNPEEPEETKQ FNPEEPEET | 0.5183 | 183 | WB Large T |
| DRB5_0101 | 254 | LKEHDFNPEEPEETK FNPEEPEET | 0.5181 | 184 | WB Large T |
| DRB5_0101 | 256 | EHDFNPEEPEETKQV FNPEEPEET | 0.5168 | 186 | WB Large T |
| DRB5_0101 | 253 | GLKEHDFNPEEPEET GLKEHDFNP | 0.5161 | 188 | WB Large T |
| DRB5_0101 | 257 | HDFNPEEPEETKQVS FNPEEPEET | 0.5162 | 188 | WB Large T |
| DRB5_0101 | 408 | FDFLHCVVFNVPKRR CVVFNVPKR | 0.5052 | 211 | WB Large T |
| DRB5_0101 | 413 | CVVFNVPKRRYWLFK VVFNVPKRR | 0.5006 | 222 | WB Large T |
| DRB5_0101 | 84 | TYGTEEWESWWSSFN TEEWESWWS | 0.4988 | 227 | WB Large T |
| DRB5_0101 | 85 | YGTEEWESWWSSFNE WESWWSSFN | 0.4977 | 229 | WB Large T |
| DRB5_0101 | 88 | EEWESWWSSFNEKWD WESWWSSFN | 0.4975 | 230 | WB Large T |
| DRB5_0101 | 87 | TEEWESWWSSFNEKW WESWWSSFN | 0.4963 | 233 | WB Large T |
| DRB5_0101 | 86 | GTEEWESWWSSFNEK WESWWSSFN | 0.4952 | 235 | WB Large T |
| DRB5_0101 | 677 | KGFQCFKRPKTPPPK FQCFKRPKT | 0.4816 | 273 | WB Large T |
| DRB5_0101 | 49 | EDKMKRMNTLYKKME MKRMNTLYK | 0.4763 | 289 | WB Large T |
| DRB5_0101 | 50 | DKMKRMNTLYKKMEQ MKRMNTLYK | 0.4758 | 290 | WB Large T |
| DRB5_0101 | 48 | DEDKMKRMNTLYKKM MKRMNTLYK | 0.4726 | 301 | WB Large T |
| DRB5_0101 | 414 | VVFNVPKRRYWLFKG VVFNVPKRR | 0.4695 | 311 | WB Large T |
| DRB5_0101 | 47 | GDEDKMKRMNTLYKK MKRMNTLYK | 0.4617 | 338 | WB Large T |
| DRB5_0101 | 194 | HNIIFFLTPHRHRVS FFLTPHRHR | 0.4587 | 350 | WB Large T |
| DRB5_0101 | 46 | GGDEDKMKRMNTLYK DKMKRMNTL | 0.4567 | 357 | WB Large T |
| DRB5_0101 | 193 | GHNIIFFLTPHRHRV FFLTPHRHR | 0.4542 | 367 | WB Large T |
| DRB5_0101 | 195 | NIIFFLTPHRHRVSA FFLTPHRHR | 0.4419 | 419 | WB Large T |
| DRB5_0101 | 119 | TADSQHSTPPKKKRK QHSTPPKKK | 0.4363 | 446 | WB Large T |
| DRB5_0101 | 120 | ADSQHSTPPKKKRKV QHSTPPKKK | 0.4331 | 461 | WB Large T |
| DRB5_0101 | 259 | FNPEEPEETKQVSWK FNPEEPEET | 0.4320 | 467 | WB Large T |
| DRB5_0101 | 53 | KRMNTLYKKMEQDVK KRMNTLYKK | 0.4284 | 485 | WB Large T |
| DRB5_0101 | 22 | AAWGNLPLMRKAYLK WGNLPLMRK | 0.4268 | 494 | WB Large T |

[0907] Preferred BK virus fragments of Agnoprotein capable of interacting with one or more MHC class 2 molecules are listed in Table T.

TABLE T

Prediction of BK virus Agnoprotein specific MHC class 2, 15-mer
peptide binders for 14 MHC class 2 alleles (see FIG. 11) using the
http://www.cbs.dtu.dk/services/NetMHCII/ database. The MHC class
2 molecules for which no binders were found are not listed.

| | | | | | |
|---|---|---|---|---|---|
| | | | core 1-log50k | affinity | Bind Level |
| Allele | pos | peptide | (aff) | (nM) | Identity |

| | | | | | |
|---|---|---|---|---|---|
| DRB1_0101 | 8 | LVVLRQLSRQASVKV LRQLSRQAS | 0.6877 | 29 | SB Agno |
| DRB1_0101 | 9 | VVLRQLSRQASVKVG LSRQASVKV | 0.6820 | 31 | SB Agno |
| DRB1_0101 | 10 | VLRQLSRQASVKVGK LSRQASVKV | 0.6587 | 40 | SB Agno |
| DRB1_0101 | 11 | LRQLSRQASVKVGKT LSRQASVKV | 0.6595 | 40 | SB Agno |
| DRB1_0101 | 5 | PKNLVVLRQLSRQAS VLRQLSRQA | 0.6455 | 46 | SB Agno |
| DRB1_0101 | 7 | NLVVLRQLSRQASVK VLRQLSRQA | 0.6439 | 47 | SB Agno |
| DRB1_0101 | 6 | KNLVVLRQLSRQASV VLRQLSRQA | 0.6410 | 49 | SB Agno |
| DRB1_0101 | 12 | RQLSRQASVKVGKTW LSRQASVKV | 0.6369 | 51 | WB Agno |
| DRB1_0101 | 14 | LSRQASVKVGKTWTG LSRQASVKV | 0.6206 | 61 | WB Agno |
| DRB1_0101 | 18 | ASVKVGKTWTGTKKR VKVGKTWTG | 0.5679 | 107 | WB Agno |
| DRB1_0101 | 17 | QASVKVGKTWTGTKK VKVGKTWTG | 0.5669 | 108 | WB Agno |
| DRB1_0101 | 15 | SRQASVKVGKTWTGT VKVGKTWTG | 0.5640 | 112 | WB Agno |
| DRB1_0101 | 16 | RQASVKVGKTWTGTK VKVGKTWTG | 0.5640 | 112 | WB Agno |
| DRB1_0101 | 4 | EPKNLVVLRQLSRQA PKNLVVLRQ | 0.5604 | 116 | WB Agno |
| DRB1_0101 | 13 | QLSRQASVKVGKTWT LSRQASVKV | 0.5447 | 138 | WB Agno |
| DRB1_0101 | 19 | SVKVGKTWTGTKKRA VKVGKTWTG | 0.4852 | 263 | WB Agno |
| DRB1_0101 | 20 | VKVGKTWTGTKKRAQ VKVGKTWTG | 0.4749 | 293 | WB Agno |
| DRB1_0401 | 8 | LVVLRQLSRQASVKV VLRQLSRQA | 0.4745 | 295 | WB Agno |
| DRB1_0401 | 10 | VLRQLSRQASVKVGK LSRQASVKV | 0.4500 | 384 | WB Agno |
| DRB1_0401 | 9 | VVLRQLSRQASVKVG LSRQASVKV | 0.4476 | 394 | WB Agno |
| DRB1_0401 | 11 | LRQLSRQASVKVGKT LSRQASVKV | 0.4393 | 431 | WB Agno |
| DRB1_0401 | 12 | RQLSRQASVKVGKTW LSRQASVKV | 0.4380 | 437 | WB Agno |
| DRB1_0405 | 55 | DGKNKSTTALPAVKD NKSTTALPA | 0.4704 | 308 | WB Agno |
| DRB1_0405 | 56 | GKNKSTTALPAVKDS TTALPAVKD | 0.4657 | 324 | WB Agno |
| DRB1_0405 | 57 | KNKSTTALPAVKDSV TTALPAVKD | 0.4367 | 443 | WB Agno |
| DRB1_0405 | 58 | NKSTTALPAVKDSVK TTALPAVKD | 0.4330 | 462 | WB Agno |
| DRB1_1101 | 8 | LVVLRQLSRQASVKV LRQLSRQAS | 0.4614 | 340 | WB Agno |
| DRB1_1101 | 5 | PKNLVVLRQLSRQAS PKNLVVLRQ | 0.4605 | 343 | WB Agno |
| DRB1_1101 | 6 | KNLVVLRQLSRQASV LRQLSRQAS | 0.4594 | 347 | WB Agno |
| DRB1_1101 | 9 | VVLRQLSRQASVKVG LRQLSRQAS | 0.4595 | 347 | WB Agno |
| DRB1_1101 | 7 | NLVVLRQLSRQASVK LRQLSRQAS | 0.4579 | 352 | WB Agno |
| DRB1_1302 | 5 | PKNLVVLRQLSRQAS VVLRQLSRQ | 0.5120 | 196 | WB Agno |
| DRB1_1302 | 8 | LVVLRQLSRQASVKV LRQLSRQAS | 0.5035 | 215 | WB Agno |
| DRB1_1302 | 6 | KNLVVLRQLSRQASV LRQLSRQAS | 0.5031 | 216 | WB Agno |
| DRB1_1302 | 9 | VVLRQLSRQASVKVG LRQLSRQAS | 0.4904 | 248 | WB Agno |
| DRB1_1302 | 7 | NLVVLRQLSRQASVK LRQLSRQAS | 0.4893 | 251 | WB Agno |
| DRB1_1302 | 3 | CEPKNLVVLRQLSRQ LVVLRQLSR | 0.4329 | 462 | WB Agno |
| DRB1_1501 | 5 | PKNLVVLRQLSRQAS LVVLRQLSR | 0.6754 | 34 | SB Agno |
| DRB1_1501 | 6 | KNLVVLRQLSRQASV LVVLRQLSR | 0.6742 | 34 | SB Agno |
| DRB1_1501 | 4 | EPKNLVVLRQLSRQA LVVLRQLSR | 0.6596 | 40 | SB Agno |
| DRB1_1501 | 3 | CEPKNLVVLRQLSRQ LVVLRQLSR | 0.6209 | 60 | WB Agno |
| DRB1_1501 | 7 | NLVVLRQLSRQASVK LVVLRQLSR | 0.6093 | 69 | WB Agno |
| DRB1_1501 | 8 | LVVLRQLSRQASVKV LVVLRQLSR | 0.6010 | 75 | WB Agno |
| DRB1_1501 | 2 | FCEPKNLVVLRQLSR NLVVLRQLS | 0.5977 | 78 | WB Agno |
| DRB1_1501 | 9 | VVLRQLSRQASVKVG LRQLSRQAS | 0.4406 | 425 | WB Agno |
| DRB4_0101 | 35 | RIFIFILELLLEFCR ILELLLEFC | 0.4266 | 494 | WB Agno |

[0908] Preferred Borrelia afzelli fragments of Osp C capable of interacting with one or more MHC class 1 and/or MHC class 2 molecules are listed in Table U.

TABLE U

Prediction of MHC class 1 and 2 Borrelia afzelii OspC peptide
binders. Prediction of 8-, 9-, 10-, 11-, 13-, 14-, 15-, 16-mer
peptides were using the program displayed in FIG. 2

8 mers:

MKKNTLSA; KKNTLSAI; KNTLSAIL; NTLSAILM; TLSAILMT; LSAILMTL; SAILMTLF;
AILMTLFL; ILMTLFLF; LMTLFLFI; MTLFLFIS; TLFLFISC; LFLFISCN; FLFISCNN;
LFISCNNS; FISCNNSG; ISCNNSGK; SCNNSGKG; CNNSGKGG; NNSGKGGD;
NSGKGGDS; SGKGGDSA; GKGGDSAS; KGGDSAST; GGDSASTN; GDSASTNP;
DSASTNPA; SASTNPAD; ASTNPADE; STNPADES; TNPADESA; NPADESAK; PADESAKG;
ADESAKGP; DESAKGPN; ESAKGPNL; SAKGPNLT; AKGPNLTE; KGPNLTEI; GPNLTEIS;
PNLTEISK; NLTEISKK; LTEISKKI; TEISKKIT; EISKKITD; ISKKITDS; SKKITDSN;
KKITDSNA; KITDSNAF; ITDSNAFV; TDSNAFVL; DSNAFVLA; SNAFVLAV; NAFVLAVK;
AFVLAVKE; FVLAVKEV; VLAVKEVE; LAVKEVET; AVKEVETL; VKEVETLV;
KEVETLVS; EVETLVSS; VETLVSSI; ETLVSSID; TLVSSIDE; LVSSIDEL; VSSIDELA;
SSIDELAN; SIDELANK; IDELANKA; DELANKAI; ELANKAIG; LANKAIGK; ANKAIGKK;
NKAIGKKI; KAIGKKIQ; AIGKKIQQ; IGKKIQQN; GKKIQQNG; KKIQQNGL; KIQQNGLG;
IQQNGLGA; QQNGLGAE; QNGLGAEA; NGLGAEAN; GLGAEANR; LGAEANRN;
GAEANRNE; AEANRNES; EANRNESL; ANRNESLL; NRNESLLA; RNESLLAG;
NESLLAGV; ESLLAGVH; SLLAGVHE; LLAGVHEI; LAGVHEIS; AGVHEIST; GVHEISTL;
VHEISTLI; HEISTLIT; EISTLITE; ISTLITEK; STLITEKL; TLITEKLS; LITEKLSK;
ITEKLSKL; TEKLSKLK; EKLSKLKN; KLSKLKNS; LSKLKNSG; SKLKNSGE; KLKNSGEL;
LKNSGELK; KNSGELKA; NSGELKAK; SGELKAKI; GELKAKIE; ELKAKIED; LKAKIEDA;
KAKIEDAK; AKIEDAKK; KIEDAKKC; IEDAKKCS; EDAKKCSE; DAKKCSEE;
AKKCSEEF; KKCSEEFT; KCSEEFTN; CSEEFTNK; SEEFTNKL; EEFTNKLR; EFTNKLRV;
FTNKLRVS; TNKLRVSH; NKLRVSHA; KLRVSHAD; LRVSHADL; RVSHADLG;
VSHADLGK; SHADLGKQ; HADLGKQG; ADLGKQGV; DLGKQGVN; LGKQGVND;
GKQGVNDD; KQGVNDDD; QGVNDDDA; GVNDDDAK; VNDDDAKK; NDDDAKKA;
DDDAKKAI; DDAKKAIL; DAKKAILK; AKKAILKT; KKAILKTN; KAILKTNA;
AILKTNAD; ILKTNADK; LKTNADKT; KTNADKTK; TNADKTKG; NADKTKGA;
ADKTKGAE; DKTKGAEE; KTKGAEEL; TKGAEELG; KGAEELGK; GAEELGKL;
AEELGKLF; EELGKLFK; ELGKLFKS; LGKLFKSV; GKLFKSVE; KLFKSVEG; LFKSVEGL;
FKSVEGLV; KSVEGLVK; SVEGLVKA; VEGLVKAA; EGLVKAAQ; GLVKAAQE;
LVKAAQEA; VKAAQEAL; KAAQEALT; AAQEALTN; AQEALTNS; QEALTNSV;
EALTNSVK; ALTNSVKE; LTNSVKEL; TNSVKELT; NSVKELTS; SVKELTSP; VKELTSPV;
KELTSPVV; ELTSPVVA; LTSPVVAE; TSPVVAES; SPVVAESP; PVVAESPK; VVAESPKK;
VAESPKKP

9 mers:

MKKNTLSAI; KKNTLSAIL; KNTLSAILM; NTLSAILMI; TLSAILMTL; LSAILMTLF;
SAILMTLFL; AILMTLFLF; ILMTLFLFI; LMTLFLFIS; MTLFLFISC; TLFLFISCN;
LFLFISCNN; FLFISCNNS; LFISCNNSG; FISCNNSGK; ISCNNSGKG; SCNNSGKGG;
CNNSGKGGD; NNSGKGGDS; NSGKGGDSA; SGKGGDSAS; GKGGDSAST; KGGDSASTN;
GGDSASTNP; GDSASTNPA; DSASTNPAD; SASTNPADE; ASTNPADES; STNPADESA;
TNPADESAK; NPADESAKG; PADESAKGP; ADESAKGPN; DESAKGPNL; ESAKGPNLT;
SAKGPNLTE; AKGPNLTEI; KGPNLTEIS; GPNLTEISK; PNLTEISKK; NLTEISKKI;
LTEISKKIT; TEISKKITD; EISKKITDS; ISKKITDSN; SKKITDSNA; KKITDSNAF;
KITDSNAFV; ITDSNAFVL; TDSNAFVLA; DSNAFVLAV; SNAFVLAVK; NAFVLAVKE;
AFVLAVKEV; FVLAVKEVE; VLAVKEVET; LAVKEVETL; AVKEVETLV; VKEVETLVS;
KEVETLVSS; EVETLVSSI; VETLVSSID; ETLVSSIDE; TLVSSIDEL; LVSSIDELA;
VSSIDELAN; SSIDELANK; SIDELANKA; IDELANKAI; DELANKAIG; ELANKAIGK;
LANKAIGKK; ANKAIGKKI; NKAIGKKIQ; KAIGKKIQQ; AIGKKIQQN; IGKKIQQNG;
GKKIQQNGL; KKIQQNGLG; KIQQNGLGA; IQQNGLGAE; QQNGLGAEA; QNGLGAEAN;
NGLGAEANR; GLGAEANRN; LGAEANRNE; GAEANRNES; AEANRNESL; EANRNESLL;
ANRNESLLA; NRNESLLAG; RNESLLAGV; NESLLAGVH; ESLLAGVHE; SLLAGVHEI;
LLAGVHEIS; LAGVHEIST; AGVHEISTL; GVHEISTLI; VHEISTLIT; HEISTLITE;
EISTLITEK; ISTLITEKL; STLITEKLS; TLITEKLSK; LITEKLSKL; ITEKLSKLK;
TEKLSKLKN; EKLSKLKNS; KLSKLKNSG; LSKLKNSGE; SKLKNSGEL; KLKNSGELK;
LKNSGELKA; KNSGELKAK; NSGELKAKI; SGELKAKIE; GELKAKIED; ELKAKIEDA;
LKAKIEDAK; KAKIEDAKK; AKIEDAKKC; KIEDAKKCS; IEDAKKCSE; EDAKKCSEE;
DAKKCSEEF; AKKCSEEFT; KKCSEEFTN; KCSEEFTNK; CSEEFTNKL; SEEFTNKLR;
EEFTNKLRV; EFTNKLRVS; FTNKLRVSH; TNKLRVSHA; NKLRVSHAD; KLRVSHADL;
LRVSHADLG; RVSHADLGK; VSHADLGKQ; SHADLGKQG; HADLGKQGV;
ADLGKQGVN; DLGKQGVND; LGKQGVNDD; GKQGVNDDD; KQGVNDDDA;
QGVNDDDAK; GVNDDDAKK; VNDDDAKKA; NDDDAKKAI; DDDAKKAIL;
DDAKKAILK; DAKKAILKT; AKKAILKTN; KKAILKTNA; KAILKTNAD; AILKTNADK;
ILKTNADKT; LKTNADKTK; KTNADKTKG; TNADKTKGA; NADKTKGAE; ADKTKGAEE;
DKTKGAEEL; KTKGAEELG; TKGAEELGK; KGAEELGKL; GAEELGKLF; AEELGKLFK;
EELGKLFKS; ELGKLFKSV; LGKLFKSVE; GKLFKSVEG; KLFKSVEGL; LFKSVEGLV;
FKSVEGLVK; KSVEGLVKA; SVEGLVKAA; VEGLVKAAQ; EGLVKAAQE; GLVKAAQEA;
LVKAAQEAL; VKAAQEALT; KAAQEALTN; AAQEALTNS; AQEALTNSV; QEALTNSVK;
EALTNSVKE; ALTNSVKEL; LTNSVKELT; TNSVKELTS; NSVKELTSP; SVKELTSPV;
VKELTSPVV; KELTSPVVA; ELTSPVVAE; LTSPVVAES; TSPVVAESP; SPVVAESPK;
PVVAESPKK; VVAESPKKP

10 mers:

MKKNTLSAIL; KKNTLSAILM; KNTLSAILMT; NTLSAILMTL; TLSAILMTLF;
LSAILMTLFL; SAILMTLFLF; AILMTLFLFI; ILMTLFLFIS; LMTLFLFISC; MTLFLFISCN;
TLFLFISCNN; LFLFISCNNS; FLFISCNNSG; LFISCNNSGK; FISCNNSGKG; ISCNNSGKGG;
SCNNSGKGGD; CNNSGKGGDS; NNSGKGGDSA; NSGKGGDSAS; SGKGGDSAST;
GKGGDSASTN; KGGDSASTNP; GGDSASTNPA; GDSASTNPAD; DSASTNPADE;
SASTNPADES; ASTNPADESA; STNPADESAK; TNPADESAKG; NPADESAKGP;
PADESAKGPN; ADESAKGPNL; DESAKGPNLT; ESAKGPNLTE; SAKGPNLTEI;
AKGPNLTEIS; KGPNLTEISK; GPNLTEISKK; PNLTEISKKI; NLTEISKKIT; LTEISKKITD;
TEISKKITDS; EISKKITDSN; ISKKITDSNA; SKKITDSNAF; KKITDSNAFV; KITDSNAFVL;
ITDSNAFVLA; TDSNAFVLAV; DSNAFVLAVK; SNAFVLAVKE; NAFVLAVKEV;
AFVLAVKEVE; FVLAVKEVET; VLAVKEVETL; LAVKEVETLV; AVKEVETLVS;
VKEVETLVSS; KEVETLVSSI; EVETLVSSID; VETLVSSIDE; ETLVSSIDEL; TLVSSIDELA;
LVSSIDELAN; VSSIDELANK; SSIDELANKA; SIDELANKAI; IDELANKAIG;
DELANKAIGK; ELANKAIGKK; LANKAIGKKI; ANKAIGKKIQ; NKAIGKKIQQ;
KAIGKKIQQN; AIGKKIQQNG; IGKKIQQNGL; GKKIQQNGLG; KKIQQNGLGA;
KIQQNGLGAE; IQQNGLGAEA; QQNGLGAEAN; QNGLGAEANR; NGLGAEANRN;
GLGAEANRNE; LGAEANRNES; GAEANRNESL; AEANRNESLL; EANRNESLLA;
ANRNESLLAG; NRNESLLAGV; RNESLLAGVH; NESLLAGVHE; ESLLAGVHEI;
SLLAGVHEIS; LLAGVHEIST; LAGVHEISTL; AGVHEISTLI; GVHEISTLIT; VHEISTLITE;
HEISTLITEK; EISTLITEKL; ISTLITEKLS; STLITEKLSK; TLITEKLSKL; LITEKLSKLK;
ITEKLSKLKN; TEKLSKLKNS; EKLSKLKNSG; KLSKLKNSGE; LSKLKNSGEL;
SKLKNSGELK; KLKNSGELKA; LKNSGELKAK; KNSGELKAKI; NSGELKAKIE;
SGELKAKIED; GELKAKIEDA; ELKAKIEDAK; LKAKIEDAKK; KAKIEDAKKC;
AKIEDAKKCS; KIEDAKKCSE; IEDAKKCSEE; EDAKKCSEEF; DAKKCSEEFT;
AKKCSEEFTN; KKCSEEFTNK; KCSEEFTNKL; CSEEFTNKLR; SEEFTNKLRV;
EEFTNKLRVS; EFTNKLRVSH; FTNKLRVSHA; TNKLRVSHAD; NKLRVSHADL;
KLRVSHADLG; LRVSHADLGK; RVSHADLGKQ; VSHADLGKQG; SHADLGKQGV;
HADLGKQGVN; ADLGKQGVND; DLGKQGVNDD; LGKQGVNDDD; GKQGVNDDDA;
KQGVNDDDAK; QGVNDDDAKK; GVNDDDAKKA; VNDDDAKKAI; NDDDAKKAIL;
DDDAKKAILK; DDAKKAILKT; DAKKAILKTN; AKKAILKTNA; KKAILKTNAD;
KAILKTNADK; AILKTNADKT; ILKTNADKTK; LKTNADKTKG; KTNADKTKGA;
TNADKTKGAE; NADKTKGAEE; ADKTKGAEEL; DKTKGAEELG; KTKGAEELGK;
TKGAEELGKL; KGAEELGKLF; GAEELGKLFK; AEELGKLFKS; EELGKLFKSV;
ELGKLFKSVE; LGKLFKSVEG; GKLFKSVEGL; KLFKSVEGLV; LFKSVEGLVK;
FKSVEGLVKA; KSVEGLVKAA; SVEGLVKAAQ; VEGLVKAAQE; EGLVKAAQEA;
GLVKAAQEAL; LVKAAQEALT; VKAAQEALTN; KAAQEALTNS; AAQEALTNSV;
AQEALTNSVK; QEALTNSVKE; EALTNSVKEL; ALTNSVKELT; LTNSVKELTS;
TNSVKELTSP; NSVKELTSPV; SVKELTSPVV; VKELTSPVVA; KELTSPVVAE;
ELTSPVVAES; LTSPVVAESP; TSPVVAESPK; SPVVAESPKK; PVVAESPKKP

11 mers:

MKKNTLSAILM; KKNTLSAILMT; KNILSAILMTL; NTLSAILMTLF; TLSAILMTLFL;
LSAILMTLFLF; SAILMTLFLFI; AILMTLFLFIS; ILMTLFLFISC; LMTLFLFISCN;
MTLFLFISCNN; TLFLFISCNNS; LFLFISCNNSG; FLFISCNNSGK; LFISCNNSGKG;
FISCNNSGKGG; ISCNNSGKGGD; SCNNSGKGGDS; CNNSGKGGDSA; NNSGKGGDSAS;
NSGKGGDSAST; SGKGGDSASTN; GKGGDSASTNP; KGGDSASTNPA; GGDSASTNPAD;
GDSASTNPADE; DSASTNPADES; SASTNPADESA; ASTNPADESAK; STNPADESAKG;
TNPADESAKGP; NPADESAKGPN; PADESAKGPNL; ADESAKGPNLT; DESAKGPNLTE;
ESAKGPNLTEI; SAKGPNLTEIS; AKGPNLTEISK; KGPNLTEISKK; GPNLTEISKKI;
PNLTEISKKIT; NLTEISKKITD; LTEISKKITDS; TEISKKITDSN; EISKKITDSNA;
ISKKITDSNAF; SKKITDSNAFV; KKITDSNAFVL; KITDSNAFVLA; ITDSNAFVLAV;
TDSNAFVLAVK; DSNAFVLAVKE; SNAFVLAVKEV; NAFVLAVKEVE; AFVLAVKEVET;
FVLAVKEVETL; VLAVKEVETLV; LAVKEVETLVS; AVKEVETLVSS; VKEVETLVSSI;
KEVETLVSSID; EVETLVSSIDE; VETLVSSIDEL; ETLVSSIDELA; TLVSSIDELAN;
LVSSIDELANK; VSSIDELANKA; SSIDELANKAI; SIDELANKAIG; IDELANKAIGK;
DELANKAIGKK; ELANKAIGKKI; LANKAIGKKIQ; ANKAIGKKIQQ; NKAIGKKIQQN;
KAIGKKIQQNG; AIGKKIQQNGL; IGKKIQQNGLG; GKKIQQNGLGA; KKIQQNGLGAE;
KIQQNGLGAEA; IQQNGLGAEAN; QQNGLGAEANR; QNGLGAEANRN; NGLGAEANRNE;
GLGAEANRNES; LGAEANRNESL; GAEANRNESLL; AEANRNESLLA; EANRNESLLAG;
ANRNESLLAGV; NRNESLLAGVH; RNESLLAGVHE; NESLLAGVHEI; ESLLAGVHEIS;
SLLAGVHEIST; LLAGVHEISTL; LAGVHEISTLI; AGVHEISTLIT; GVHEISTLITE;
VHEISTLITEK; HEISTLITEKL; EISTLITEKLS; ISTLITEKLSK; STLITEKLSKL;
TLITEKLSKLK; LITEKLSKLKN; ITEKLSKLKNS; TEKLSKLKNSG; EKLSKLKNSGE;
KLSKLKNSGEL; LSKLKNSGELK; SKLKNSGELKA; KLKNSGELKAK; LKNSGELKAKI;
KNSGELKAKIE; NSGELKAKIED; SGELKAKIEDA; GELKAKIEDAK; ELKAKIEDAKK;
LKAKIEDAKKC; KAKIEDAKKCS; AKIEDAKKCSE; KIEDAKKCSEE; IEDAKKCSEEF;
EDAKKCSEEFT; DAKKCSEEFTN; AKKCSEEFTNK; KKCSEEFTNKL; KCSEEFTNKLR;
CSEEFTNKLRV; SEEFTNKLRVS; EEFTNKLRVSH; EFTNKLRVSHA; FTNKLRVSHAD;
TNKLRVSHADL; NKLRVSHADLG; KLRVSHADLGK; LRVSHADLGKQ; RVSHADLGKQG;
VSHADLGKQGV; SHADLGKQGVN; HADLGKQGVND; ADLGKQGVNDD;
DLGKQGVNDDD; LGKQGVNDDDA; GKQGVNDDDAK; KQGVNDDDAKK;
QGVNDDDAKKA; GVNDDDAKKAI; VNDDDAKKAIL; NDDDAKKAILK;
DDDAKKAILKT; DDAKKAILKTN; DAKKAILKTNA; AKKAILKTNAD; KKAILKTNADK;
KAILKTNADKT; AILKTNADKTK; ILKTNADKTKG; LKTNADKTKGA; KTNADKTKGAE;
TNADKTKGAEE; NADKTKGAEEL; ADKTKGAEELG; DKTKGAEELGK; KTKGAEELGKL;
TKGAEELGKLF; KGAEELGKLFK; GAEELGKLFKS; AEELGKLFKSV; EELGKLFKSVE;
ELGKLFKSVEG; LGKLFKSVEGL; GKLFKSVEGLV; KLFKSVEGLVK; LFKSVEGLVKA;
FKSVEGLVKAA; KSVEGLVKAAQ; SVEGLVKAAQE; VEGLVKAAQEA; EGLVKAAQEAL;
GLVKAAQEALT; LVKAAQEALTN; VKAAQEALTNS; KAAQEALTNSV; AAQEALTNSVK;
AQEALTNSVKE; QEALTNSVKEL; EALTNSVKELT; ALTNSVKELTS; LTNSVKELTSP;
TNSVKELTSPV; NSVKELTSPVV; SVKELTSPVVA; VKELTSPVVAE; KELTSPVVAES;
ELTSPVVAESP; LTSPVVAESPK; TSPVVAESPKK; SPVVAESPKKP;

13 mers:

MKKNTLSAILMTL; KKNTLSAILMTLF; KNTLSAILMTLFL; NTLSAILMTLFLF;
TLSAILMTLFLFI; LSAILMTLFLFIS; SAILMTLFLFISC; AILMTLFLFISCN;
ILMTLFLFISCNN; LMTLFLFISCNNS; MTLFLFISCNNSG; TLFLFISCNNSGK;
LFLFISCNNSGKG; FLFISCNNSGKGG; LFISCNNSGKGGD; FISCNNSGKGGDS;
ISCNNSGKGGDSA; SCNNSGKGGDSAS; CNNSGKGGDSAST; NNSGKGGDSASTN;
NSGKGGDSASTNP; SGKGGDSASTNPA; GKGGDSASTNPAD; KGGDSASTNPADE;
GGDSASTNPADES; GDSASTNPADESA; DSASTNPADESAK; SASTNPADESAKG;
ASTNPADESAKGP; STNPADESAKGPN; TNPADESAKGPNL; NPADESAKGPNLT;
PADESAKGPNLTE; ADESAKGPNLTEI; DESAKGPNLTEIS; ESAKGPNLTEISK;
SAKGPNLTEISKK; AKGPNLTEISKKI; KGPNLTEISKKIT; GPNLTEISKKITD;
PNLTEISKKITDS; NLTEISKKITDSN; LTEISKKITDSNA; TEISKKITDSNAF;
EISKKITDSNAFV; ISKKITDSNAFVL; SKKITDSNAFVLA; KKITDSNAFVLAV;
KITDSNAFVLAVK; ITDSNAFVLAVKE; TDSNAFVLAVKEV; DSNAFVLAVKEVE;
SNAFVLAVKEVET; NAFVLAVKEVETL; AFVLAVKEVETLV; FVLAVKEVETLVS;
VLAVKEVETLVSS; LAVKEVETLVSSI; AVKEVETLVSSID; VKEVETLVSSIDE;
KEVETLVSSIDEL; EVETLVSSIDELA; VETLVSSIDELAN; ETLVSSIDELANK;
TLVSSIDELANKA; LVSSIDELANKAI; VSSIDELANKAIG; SSIDELANKAIGK;
SIDELANKAIGKK; IDELANKAIGKKI; DELANKAIGKKIQ; ELANKAIGKKIQQ;
LANKAIGKKIQQN; ANKAIGKKIQQNG; NKAIGKKIQQNGL; KAIGKKIQQNGLG;
AIGKKIQQNGLGA; IGKKIQQNGLGAE; GKKIQQNGLGAEA; KKIQQNGLGAEAN;
KIQQNGLGAEANR; IQQNGLGAEANRN; QQNGLGAEANRNE; QNGLGAEANRNES;
NGLGAEANRNESL; GLGAEANRNESLL; LGAEANRNESLLA; GAEANRNESLLAG;
AEANRNESLLAGV; EANRNESLLAGVH; ANRNESLLAGVHE; NRNESLLAGVHEI;
RNESLLAGVHEIS; NESLLAGVHEIST; ESLLAGVHEISTL; SLLAGVHEISTLI;
LLAGVHEISTLIT; LAGVHEISTLITE; AGVHEISTLITEK; GVHEISTLITEKL;
VHEISTLITEKLS; HEISTLITEKLSK; EISTLITEKLSKL; ISTLITEKLSKLK;
STLITEKLSKLKN; TLITEKLSKLKNS; LITEKLSKLKNSG; ITEKLSKLKNSGE;
TEKLSKLKNSGEL; EKLSKLKNSGELK; KLSKLKNSGELKA; LSKLKNSGELKAK;
SKLKNSGELKAKI; KLKNSGELKAKIE; LKNSGELKAKIED; KNSGELKAKIEDA;
NSGELKAKIEDAK; SGELKAKIEDAKK; GELKAKIEDAKKC; ELKAKIEDAKKCS;
LKAKIEDAKKCSE; KAKIEDAKKCSEE; AKIEDAKKCSEEF; KIEDAKKCSEEFT;
IEDAKKCSEEFTN; EDAKKCSEEFTNK; DAKKCSEEFTNKL; AKKCSEEFTNKLR;
KKCSEEFTNKLRV; KCSEEFTNKLRVS; CSEEFTNKLRVSH; SEEFTNKLRVSHA;
EEFTNKLRVSHAD; EFTNKLRVSHADL; FTNKLRVSHADLG; TNKLRVSHADLGK;
NKLRVSHADLGKQ; KLRVSHADLGKQG; LRVSHADLGKQGV; RVSHADLGKQGVN;
VSHADLGKQGVND; SHADLGKQGVNDD; HADLGKQGVNDDD; ADLGKQGVNDDDA;
DLGKQGVNDDDAK; LGKQGVNDDDAKK; GKQGVNDDDAKKA; KQGVNDDDAKKAI;
QGVNDDDAKKAIL; GVNDDDAKKAILK; VNDDDAKKAILKT; NDDDAKKAILKTN;
DDDAKKAILKTNA; DDAKKAILKTNAD; DAKKAILKTNADK; AKKAILKTNADKT;
KKAILKTNADKTK; KAILKTNADKTKG; AILKTNADKTKGA; ILKTNADKTKGAE;
LKTNADKTKGAEE; KTNADKTKGAEEL; TNADKTKGAEELG; NADKTKGAEELGK;
ADKTKGAEELGKL; DKTKGAEELGKLF; KTKGAEELGKLFK; TKGAEELGKLFKS;
KGAEELGKLFKSV; GAEELGKLFKSVE; AEELGKLFKSVEG; EELGKLFKSVEGL;
ELGKLFKSVEGLV; LGKLFKSVEGLVK; GKLFKSVEGLVKA; KLFKSVEGLVKAA;
LFKSVEGLVKAAQ; FKSVEGLVKAAQE; KSVEGLVKAAQEA; SVEGLVKAAQEAL;
VEGLVKAAQEALT; EGLVKAAQEALTN; GLVKAAQEALTNS; LVKAAQEALTNSV;
VKAAQEALTNSVK; KAAQEALTNSVKE; AAQEALTNSVKEL; AQEALTNSVKELT;
QEALTNSVKELTS; EALTNSVKELTSP; ALTNSVKELTSPV; LTNSVKELTSPVV;
TNSVKELTSPVVA; NSVKELTSPVVAE; SVKELTSPVVAES; VKELTSPVVAESP;
KELTSPVVAESPK; ELTSPVVAESPKK; LTSPVVAESPKKP

14 mers:

MKKNTLSAILMTLF; KKNTLSAILMTLFL; KNTLSAILMTLFLF; NTLSAILMTLFLFI;
TLSAILMTLFLFIS; LSAILMTLFLFISC; SAILMTLFLFISCN; AILMTLFLFISCNN;
ILMTLFLFISCNNS; LMTLFLFISCNNSG; MTLFLFISCNNSGK; TLFLFISCNNSGKG;
LFLFISCNNSGKGG; FLFISCNNSGKGGD; LFISCNNSGKGGDS; FISCNNSGKGGDSA;
ISCNNSGKGGDSAS; SCNNSGKGGDSAST; CNNSGKGGDSASTN; NNSGKGGDSASTNP;
NSGKGGDSASTNPA; SGKGGDSASTNPAD; GKGGDSASTNPADE; KGGDSASTNPADES;
GGDSASTNPADESA; GDSASTNPADESAK; DSASTNPADESAKG; SASTNPADESAKGP;
ASTNPADESAKGPN; STNPADESAKGPNL; TNPADESAKGPNLT; NPADESAKGPNLTE;
PADESAKGPNLTEI; ADESAKGPNLTEIS; DESAKGPNLTEISK; ESAKGPNLTEISKK;
SAKGPNLTEISKKI; AKGPNLTEISKKIT; KGPNLTEISKKITD; GPNLTEISKKITDS;
PNLTEISKKITDSN; NLTEISKKITDSNA; LTEISKKITDSNAF; TEISKKITDSNAFV;
EISKKITDSNAFVL; ISKKITDSNAFVLA; SKKITDSNAFVLAV; KKITDSNAFVLAVK;
KITDSNAFVLAVKE; ITDSNAFVLAVKEV; TDSNAFVLAVKEVE; DSNAFVLAVKEVET;
SNAFVLAVKEVETL; NAFVLAVKEVETLV; AFVLAVKEVETLVS; FVLAVKEVETLVSS;
VLAVKEVETLVSSI; LAVKEVETLVSSID; AVKEVETLVSSIDE; VKEVETLVSSIDEL;
KEVETLVSSIDELA; EVETLVSSIDELAN; VETLVSSIDELANK; ETLVSSIDELANKA;
TLVSSIDELANKAI; LVSSIDELANKAIG; VSSIDELANKAIGK; SSIDELANKAIGKK;
SIDELANKAIGKKI; IDELANKAIGKKIQ; DELANKAIGKKIQQ; ELANKAIGKKIQQN;
LANKAIGKKIQQNG; ANKAIGKKIQQNGL; NKAIGKKIQQNGLG; KAIGKKIQQNGLGA;
AIGKKIQQNGLGAE; IGKKIQQNGLGAEA; GKKIQQNGLGAEAN; KKIQQNGLGAEANR;
KIQQNGLGAEANRN; IQQNGLGAEANRNE; QQNGLGAEANRNES; QNGLGAEANRNESL;
NGLGAEANRNESLL; GLGAEANRNESLLA; LGAEANRNESLLAG; GAEANRNESLLAGV;
AEANRNESLLAGVH; EANRNESLLAGVHE; ANRNESLLAGVHEI; NRNESLLAGVHEIS;
RNESLLAGVHEIST; NESLLAGVHEISTL; ESLLAGVHEISTLI; SLLAGVHEISTLIT;
LLAGVHEISTLITE; LAGVHEISTLITEK; AGVHEISTLITEKL; GVHEISTLITEKLS;
VHEISTLITEKLSK; HEISTLITEKLSKL; EISTLITEKLSKLK; ISTLITEKLSKLKN;
STLITEKLSKLKNS; TLITEKLSKLKNSG; LITEKLSKLKNSGE; ITEKLSKLKNSGEL;
TEKLSKLKNSGELK; EKLSKLKNSGELKA; KLSKLKNSGELKAK; LSKLKNSGELKAKI;
SKLKNSGELKAKIE; KLKNSGELKAKIED; LKNSGELKAKIEDA; KNSGELKAKIEDAK;
NSGELKAKIEDAKK; SGELKAKIEDAKKC; GELKAKIEDAKKCS; ELKAKIEDAKKCSE;
LKAKIEDAKKCSEE; KAKIEDAKKCSEEF; AKIEDAKKCSEEFT; KIEDAKKCSEEFTN;
IEDAKKCSEEFTNK; EDAKKCSEEFTNKL; DAKKCSEEFTNKLR; AKKCSEEFTNKLRV;
KKCSEEFTNKLRVS; KCSEEFTNKLRVSH; CSEEFTNKLRVSHA; SEEFTNKLRVSHAD;
EEFTNKLRVSHADL; EFTNKLRVSHADLG; FTNKLRVSHADLGK; TNKLRVSHADLGKQ;
NKLRVSHADLGKQG; KLRVSHADLGKQGV; LRVSHADLGKQGVN;
RVSHADLGKQGVND; VSHADLGKQGVNDD; SHADLGKQGVNDDD;
HADLGKQGVNDDDA; ADLGKQGVNDDDAK; DLGKQGVNDDDAKK;
LGKQGVNDDDAKKA; GKQGVNDDDAKKAI; KQGVNDDDAKKAIL;
QGVNDDDAKKAILK; GVNDDDAKKAILKT; VNDDDAKKAILKTN;
NDDDAKKAILKTNA; DDDAKKAILKTNAD; DDAKKAILKTNADK; DAKKAILKTNADKT;
AKKAILKTNADKTK; KKAILKTNADKTKG; KAILKTNADKTKGA; AILKTNADKTKGAE;
ILKTNADKTKGAEE; LKTNADKTKGAEEL; KTNADKTKGAEELG; TNADKTKGAEELGK;
NADKTKGAEELGKL; ADKTKGAEELGKLF; DKTKGAEELGKLFK; KTKGAEELGKLFKS;
TKGAEELGKLFKSV; KGAEELGKLFKSVE; GAEELGKLFKSVEG; AEELGKLFKSVEGL;
EELGKLFKSVEGLV; ELGKLFKSVEGLVK; LGKLFKSVEGLVKA; GKLFKSVEGLVKAA;
KLFKSVEGLVKAAQ; LFKSVEGLVKAAQE; FKSVEGLVKAAQEA; KSVEGLVKAAQEAL;
SVEGLVKAAQEALT; VEGLVKAAQEALTN; EGLVKAAQEALTNS; GLVKAAQEALTNSV;
LVKAAQEALTNSVK; VKAAQEALTNSVKE; KAAQEALTNSVKEL; AAQEALTNSVKELT;
AQEALTNSVKELTS; QEALTNSVKELTSP; EALTNSVKELTSPV; ALTNSVKELTSPVV;
LTNSVKELTSPVVA; TNSVKELTSPVVAE; NSVKELTSPVVAES; SVKELTSPVVAESP;
VKELTSPVVAESPK; KELTSPVVAESPKK; ELTSPVVAESPKKP

15 mers:

MKKNTLSAILMTLFL; KKNTLSAILMTLFLF; KNTLSAILMTLFLFI; NTLSAILMTLFLFIS;
TLSAILMTLFLFISC; LSAILMTLFLFISCN; SAILMTLFLFISCNN; AILMTLFLFISCNNS;
ILMTLFLFISCNNSG; LMTLFLFISCNNSGK; MTLFLFISCNNSGKG; TLFLFISCNNSGKGG;
LFLFISCNNSGKGGD; FLFISCNNSGKGGDS; LFISCNNSGKGGDSA;
FISCNNSGKGGDSAS; ISCNNSGKGGDSAST; SCNNSGKGGDSASTN;
CNNSGKGGDSASTNP; NNSGKGGDSASTNPA; NSGKGGDSASTNPAD;
SGKGGDSASTNPADE; GKGGDSASTNPADES; KGGDSASTNPADESA;
GGDSASTNPADESAK; GDSASTNPADESAKG; DSASTNPADESAKGP;
SASTNPADESAKGPN; ASTNPADESAKGPNL; STNPADESAKGPNLT;
TNPADESAKGPNLTE; NPADESAKGPNLTEI; PADESAKGPNLTEIS;
ADESAKGPNLTEISK; DESAKGPNLTEISKK; ESAKGPNLTEISKKI; SAKGPNLTEISKKIT;
AKGPNLTEISKKITD; KGPNLTEISKKITDS; GPNLTEISKKITDSN; PNLTEISKKITDSNA;
NLTEISKKITDSNAF; LTEISKKITDSNAFV; TEISKKITDSNAFVL; EISKKITDSNAFVLA;
ISKKITDSNAFVLAV; SKKITDSNAFVLAVK; KKITDSNAFVLAVKE;
KITDSNAFVLAVKEV; ITDSNAFVLAVKEVE; TDSNAFVLAVKEVET;
DSNAFVLAVKEVETL; SNAFVLAVKEVETLV; NAFVLAVKEVETLVS;
AFVLAVKEVETLVSS; FVLAVKEVETLVSSI; VLAVKEVETLVSSID;
LAVKEVETLVSSIDE; AVKEVETLVSSIDEL; VKEVETLVSSIDELA; KEVETLVSSIDELAN;
EVETLVSSIDELANK; VETLVSSIDELANKA; ETLVSSIDELANKAI; TLVSSIDELANKAIG;
LVSSIDELANKAIGK; VSSIDELANKAIGKK; SSIDELANKAIGKKI; SIDELANKAIGKKIQ;
IDELANKAIGKKIQQ; DELANKAIGKKIQQN; ELANKAIGKKIQQNG;
LANKAIGKKIQQNGL; ANKAIGKKIQQNGLG; NKAIGKKIQQNGLGA;
KAIGKKIQQNGLGAE; AIGKKIQQNGLGAEA; IGKKIQQNGLGAEAN;
GKKIQQNGLGAEANR; KKIQQNGLGAEANRN; KIQQNGLGAEANRNE;
IQQNGLGAEANRNES; QQNGLGAEANRNESL; QNGLGAEANRNESLL;
NGLGAEANRNESLLA; GLGAEANRNESLLAG; LGAEANRNESLLAGV;
GAEANRNESLLAGVH; AEANRNESLLAGVHE; EANRNESLLAGVHEI;
ANRNESLLAGVHEIS; NRNESLLAGVHEIST; RNESLLAGVHEISTL; NESLLAGVHEISTLI;
ESLLAGVHEISTLIT; SLLAGVHEISTLITE; LLAGVHEISTLITEK; LAGVHEISTLITEKL;
AGVHEISTLITEKLS; GVHEISTLITEKLSK; VHEISTLITEKLSKL; HEISTLITEKLSKLK;
EISTLITEKLSKLKN; ISTLITEKLSKLKNS; STLITEKLSKLKNSG; TLITEKLSKLKNSGE;
LITEKLSKLKNSGEL; ITEKLSKLKNSGELK; TEKLSKLKNSGELKA;
EKLSKLKNSGELKAK; KLSKLKNSGELKAKI; LSKLKNSGELKAKIE;
SKLKNSGELKAKIED; KLKNSGELKAKIEDA; LKNSGELKAKIEDAK;
KNSGELKAKIEDAKK; NSGELKAKIEDAKKC; SGELKAKIEDAKKCS;
GELKAKIEDAKKCSE; ELKAKIEDAKKCSEE; LKAKIEDAKKCSEEF;
KAKIEDAKKCSEEFT; AKIEDAKKCSEEFTN; KIEDAKKCSEEFTNK;
IEDAKKCSEEFTNKL; EDAKKCSEEFTNKLR; DAKKCSEEFTNKLRV;
AKKCSEEFTNKLRVS; KKCSEEFTNKLRVSH; KCSEEFTNKLRVSHA;
CSEEFTNKLRVSHAD; SEEFTNKLRVSHADL; EEFTNKLRVSHADLG;
EFTNKLRVSHADLGK; FTNKLRVSHADLGKQ; TNKLRVSHADLGKQG;
NKLRVSHADLGKQGV; KLRVSHADLGKQGVN; LRVSHADLGKQGVND;
RVSHADLGKQGVNDD; VSHADLGKQGVNDDD; SHADLGKQGVNDDDA;
HADLGKQGVNDDDAK; ADLGKQGVNDDDAKK; DLGKQGVNDDDAKKA;
LGKQGVNDDDAKKAI; GKQGVNDDDAKKAIL; KQGVNDDDAKKAILK;
QGVNDDDAKKAILKT; GVNDDDAKKAILKTN; VNDDDAKKAILKTNA;
NDDDAKKAILKTNAD; DDDAKKAILKTNADK; DDAKKAILKTNADKT;
DAKKAILKTNADKTK; AKKAILKTNADKTKG; KKAILKTNADKTKGA;
KAILKTNADKTKGAE; AILKTNADKTKGAEE; ILKTNADKTKGAEEL;
LKTNADKTKGAEELG; KTNADKTKGAEELGK; TNADKTKGAEELGKL;
NADKTKGAEELGKLF; ADKTKGAEELGKLFK; DKTKGAEELGKLFKS;
KTKGAEELGKLFKSV; TKGAEELGKLFKSVE; KGAEELGKLFKSVEG;
GAEELGKLFKSVEGL; AEELGKLFKSVEGLV; EELGKLFKSVEGLVK;
ELGKLFKSVEGLVKA; LGKLFKSVEGLVKAA; GKLFKSVEGLVKAAQ;
KLFKSVEGLVKAAQE; LFKSVEGLVKAAQEA; FKSVEGLVKAAQEAL;
KSVEGLVKAAQEALT; SVEGLVKAAQEALTN; VEGLVKAAQEALTNS;
EGLVKAAQEALTNSV; GLVKAAQEALTNSVK; LVKAAQEALTNSVKE;
VKAAQEALTNSVKEL; KAAQEALTNSVKELT; AAQEALTNSVKELTS;
AQEALTNSVKELTSP; QEALTNSVKELTSPV; EALTNSVKELTSPVV;
ALTNSVKELTSPVVA; LTNSVKELTSPVVAE; TNSVKELTSPVVAES;
NSVKELTSPVVAESP; SVKELTSPVVAESPK; VKELTSPVVAESPKK;
KELTSPVVAESPKKP

16 mers:

MKKNTLSAILMTLFLF; KKNTLSAILMTLFLFI; KNTLSAILMTLFLFIS;
NTLSAILMTLFLFISC; TLSAILMTLFLFISCN; LSAILMTLFLFISCNN;
SAILMTLFLFISCNNS; AILMTLFLFISCNNSG; ILMTLFLFISCNNSGK;
LMTLFLFISCNNSGKG; MTLFLFISCNNSGKGG; TLFLFISCNNSGKGGD;
LFLFISCNNSGKGGDS; FLFISCNNSGKGGDSA; LFISCNNSGKGGDSAS;
FISCNNSGKGGDSAST; ISCNNSGKGGDSASTN; SCNNSGKGGDSASTNP;
CNNSGKGGDSASTNPA; NNSGKGGDSASTNPAD; NSGKGGDSASTNPADE;
SGKGGDSASTNPADES; GKGGDSASTNPADESA; KGGDSASTNPADESAK;
GGDSASTNPADESAKG; GDSASTNPADESAKGP; DSASTNPADESAKGPN;
SASTNPADESAKGPNL; ASTNPADESAKGPNLT; STNPADESAKGPNLTE;
TNPADESAKGPNLTEI; NPADESAKGPNLTEIS; PADESAKGPNLTEISK;
ADESAKGPNLTEISKK; DESAKGPNLTEISKKI; ESAKGPNLTEISKKIT;
SAKGPNLTEISKKITD; AKGPNLTEISKKITDS; KGPNLTEISKKITDSN;
GPNLTEISKKITDSNA; PNLTEISKKITDSNAF; NLTEISKKITDSNAFV;
LTEISKKITDSNAFVL; TEISKKITDSNAFVLA; EISKKITDSNAFVLAV;
ISKKITDSNAFVLAVK; SKKITDSNAFVLAVKE; KKITDSNAFVLAVKEV;
KITDSNAFVLAVKEVE; ITDSNAFVLAVKEVET; TDSNAFVLAVKEVETL;
DSNAFVLAVKEVETLV; SNAFVLAVKEVETLVS; NAFVLAVKEVETLVSS;
AFVLAVKEVETLVSSI; FVLAVKEVETLVSSID; VLAVKEVETLVSSIDE;
LAVKEVETLVSSIDEL; AVKEVETLVSSIDELA; VKEVETLVSSIDELAN;
KEVETLVSSIDELANK; EVETLVSSIDELANKA; VETLVSSIDELANKAI;
ETLVSSIDELANKAIG; TLVSSIDELANKAIGK; LVSSIDELANKAIGKK;
VSSIDELANKAIGKKI; SSIDELANKAIGKKIQ; SIDELANKAIGKKIQQ;
IDELANKAIGKKIQQN; DELANKAIGKKIQQNG; ELANKAIGKKIQQNGL;
LANKAIGKKIQQNGLG; ANKAIGKKIQQNGLGA; NKAIGKKIQQNGLGAE;
KAIGKKIQQNGLGAEA; AIGKKIQQNGLGAEAN; IGKKIQQNGLGAEANR;
GKKIQQNGLGAEANRN; KKIQQNGLGAEANRNE; KIQQNGLGAEANRNES;
IQQNGLGAEANRNESL; QQNGLGAEANRNESLL; QNGLGAEANRNESLLA;
NGLGAEANRNESLLAG; GLGAEANRNESLLAGV; LGAEANRNESLLAGVH;
GAEANRNESLLAGVHE; AEANRNESLLAGVHEI; EANRNESLLAGVHEIS;
ANRNESLLAGVHEIST; NRNESLLAGVHEISTL; RNESLLAGVHEISTLI;
NESLLAGVHEISTLIT; ESLLAGVHEISTLITE; SLLAGVHEISTLITEK;
LLAGVHEISTLITEKL; LAGVHEISTLITEKLS; AGVHEISTLITEKLSK;
GVHEISTLITEKLSKL; VHEISTLITEKLSKLK; HEISTLITEKLSKLKN;
EISTLITEKLSKLKNS; ISTLITEKLSKLKNSG; STLITEKLSKLKNSGE;
TLITEKLSKLKNSGEL; LITEKLSKLKNSGELK; ITEKLSKLKNSGELKA;
TEKLSKLKNSGELKAK; EKLSKLKNSGELKAKI; KLSKLKNSGELKAKIE;
LSKLKNSGELKAKIED; SKLKNSGELKAKIEDA; KLKNSGELKAKIEDAK;
LKNSGELKAKIEDAKK; KNSGELKAKIEDAKKC; NSGELKAKIEDAKKCS;
SGELKAKIEDAKKCSE; GELKAKIEDAKKCSEE; ELKAKIEDAKKCSEEF;
LKAKIEDAKKCSEEFT; KAKIEDAKKCSEEFTN; AKIEDAKKCSEEFTNK;
KIEDAKKCSEEFTNKL; IEDAKKCSEEFTNKLR; EDAKKCSEEFTNKLRV;
DAKKCSEEFTNKLRVS; AKKCSEEFTNKLRVSH; KKCSEEFTNKLRVSHA;
KCSEEFTNKLRVSHAD; CSEEFTNKLRVSHADL; SEEFTNKLRVSHADLG;
EEFTNKLRVSHADLGK; EFTNKLRVSHADLGKQ; FTNKLRVSHADLGKQG;
TNKLRVSHADLGKQGV; NKLRVSHADLGKQGVN; KLRVSHADLGKQGVND;
LRVSHADLGKQGVNDD; RVSHADLGKQGVNDDD; VSHADLGKQGVNDDDA;
SHADLGKQGVNDDDAK; HADLGKQGVNDDDAKK; ADLGKQGVNDDDAKKA;
DLGKQGVNDDDAKKAI; LGKQGVNDDDAKKAIL; GKQGVNDDDAKKAILK;
KQGVNDDDAKKAILKT; QGVNDDDAKKAILKTN; GVNDDDAKKAILKTNA;
VNDDDAKKAILKTNAD; NDDDAKKAILKTNADK; DDDAKKAILKTNADKT;
DDAKKAILKTNADKTK; DAKKAILKTNADKTKG; AKKAILKTNADKTKGA;
KKAILKTNADKTKGAE; KAILKTNADKTKGAEE; AILKTNADKTKGAEEL;
ILKTNADKTKGAEELG; LKTNADKTKGAEELGK; KTNADKTKGAEELGKL;
TNADKTKGAEELGKLF; NADKTKGAEELGKLFK; ADKTKGAEELGKLFKS;
DKTKGAEELGKLFKSV; KTKGAEELGKLFKSVE; TKGAEELGKLFKSVEG;
KGAEELGKLFKSVEGL; GAEELGKLFKSVEGLV; AEELGKLFKSVEGLVK;
EELGKLFKSVEGLVKA; ELGKLFKSVEGLVKAA; LGKLFKSVEGLVKAAQ;
GKLFKSVEGLVKAAQE; KLFKSVEGLVKAAQEA; LFKSVEGLVKAAQEAL;
FKSVEGLVKAAQEALT; KSVEGLVKAAQEALTN; SVEGLVKAAQEALTNS;
VEGLVKAAQEALTNSV; EGLVKAAQEALTNSVK; GLVKAAQEALTNSVKE;
LVKAAQEALTNSVKEL; VKAAQEALTNSVKELT; KAAQEALTNSVKELTS;
AAQEALTNSVKELTSP; AQEALTNSVKELTSPV; QEALTNSVKELTSPVV;
EALTNSVKELTSPVVA; ALTNSVKELTSPVVAE; LTNSVKELTSPVVAES;
TNSVKELTSPVVAESP; NSVKELTSPVVAESPK; SVKELTSPVVAESPKK;
VKELTSPVVAESPKKP

[0909] Preferred Borrelia burgdorferi fragments of Osp A capable of interacting with one or more MHC molecules are listed in Table V.

TABLE V
Prediction of Borrelia burgdorferi OspA protein
specific MHC class1, 8-, 9-, 10-, 11-mer peptide
binders for 42 MHC class 1 alleles (see FIG. 11)
using the http://www.cbs.dtu.dk/services/NetMHC/
database. The MHC class 1 molecules for which no
binders were found are not listed.

| | | |
|---|---|---|
| CAA44492.1\|Outer | HLA- | |
| surface protein A | A0101 | |
| [Borrelia burgdorferi] | HLA- | YLLGIGLIL |
| Seq9 | A0201 | FTLEGTLAA |
| | | KTSTLTISV |
| | | FTKFDTITV |
| | | ALIACKQNV |
| | | LLGIGLILA |
| | | SLEATVDKL |
| | | ILKSGEITV |
| | | KVTEGTVVL |
| | | STLDEKNSV |
| | | TLVSKKVTL |
| | | GIGLILALI |
| | | YLLGIGLILA |
| | | TLDEKNSVSV |
| | | ALDDSDTTQA |
| | | LLGIGLILAL |
| | | NILKSGEITV |
| | | TLAADGKTTL |
| | | VLKDFTLEGT |
| | | YSLEATVDKL |
| | | YLLGIGLILAL |
| | | LVFTKFDTITV |
| | | LLGIGLILALI |
| | | ILALIACKQNV |
| | | STLDEKNSVSV |
| | | ALDDSDTTQAT |
| | | VLKDFTLEGTL |
| | | SLEATVDKLEL |
| | | ILKSGEITVAL |
| | | ALIACKQNVST |
| | | TTLKVTEGTVV |
| | | LAADGKTTLKV |
| | | LIACKQNVSTL |
| | HLA- | VVLSKNILK |
| | A0301 | KTKNLVFTK |
| | | LVSKKVTLK |
| | | LILALIACK |
| | | LTISVNSQK |
| | | KAVEITTLK |
| | | AADGKTTLK |
| | | ISVNSQKTK |
| | | RANGTRLEY |
| | | SQTKFEIFK |
| | | KSDGSGKAK |
| | | TQATKKTGK |
| | | MTELVSKEK |
| | | TLVSKKVTLK |
| | | TLTISVNSQK |
| | | TVVLSKNILK |
| | | GLILALIACK |
| | | TLKELKNALK |
| | | LSQTKFEIFK |
| | | LAADGKTTLK |
| | | VTEGTVVLSK |
| | | KLELKGTSDK |
| | | TTQATKKTGK |
| | | GMTELVSKEK |
| | | KYSLEATVDK |
| | | KQNVSTLDEK |
| | | TIADDLSQTK |
| | | TISVNSQKTK |
| | | KEDAKTLVSK |
| | | GSGKAKEVLK |
| | | KTIVRANGTR |
| | | GTLEGEKTDK |
| | | GKAVEITTLK |
| | | GTRLEYTDIK |
| | | VSKKVTLKDK |
| | | IKSDGSGKAK |
| | | TLAADGKTTLK |
| | | STLTISVNSQK |
| | | KTLVSKKVTLK |
| | | KVTEGTVVLSK |
| | | TTLKELKNALK |
| | | LTISVNSQKTK |
| | | GTVVLSKNILK |
| | | FTKEDTITVQK |
| | | IVRANGTRLEY |
| | | TLKDKSSTEEK |
| | | LVSKKVTLKDK |
| | | KFNEKGETSEK |
| | | LTIADDLSQTK |
| | | SQKTKNLVFTK |
| | | KSSTEEKFNEK |
| | | ATKKTGKWDSK |
| | HLA- | VVLSKNILK |
| | A1101 | KTKNLVFTK |
| | | SQTKFEIFK |
| | | LTISVNSQK |
| | | ATVDKLELK |
| | | LILALIACK |
| | | STEEKFNEK |
| | | KAVEITTLK |
| | | LVSKKVTLK |
| | | MTELVSKEK |
| | | AADGKTTLK |
| | | SAGTNLEGK |
| | | YSLEATVDK |
| | | GSGTLEGEK |
| | | TQATKKTGK |
| | | RANGTRLEY |
| | | IADDLSQTK |
| | | ISVNSQKTK |
| | | KSDGSGKAK |
| | | GGMTELVSK |
| | | TEGTVVLSK |
| | | EITTLKELK |
| | | TIVRANGTR |
| | | TVVLSKNILK |
| | | TTQATKKTGK |
| | | TIADDLSQTK |
| | | VTEGTVVLSK |
| | | LSQTKFEIFK |
| | | SSTEEKFNEK |
| | | GLILALIACK |
| | | KQNVSTLDEK |
| | | TLTISVNSQK |
| | | TLVSKKVTLK |
| | | TISVNSQKTK |
| | | LAADGKTTLK |
| | | GMTELVSKEK |
| | | TLKELKNALK |
| | | KTIVRANGTR |
| | | GSGKAKEVLK |
| | | GTLEGEKTDK |
| | | VSKKVTLKDK |
| | | GTRLEYTDIK |
| | | KLELKGTSDK |
| | | DSAGTNLEGK |
| | | STLTISVNSQK |
| | | TTLKELKNALK |
| | | KVTEGTVVLSK |
| | | KTLVSKKVTLK |
| | | GTVVLSKNILK |
| | | LTIADDLSQTK |
| | | TLAADGKTTLK |
| | | AVEITTLKELK |
| | | LTISVNSQKTK |
| | | SQKTKNLVFTK |
| | | KSSTEEKFNEK |
| | | ATKKTGKWDSK |
| | | TLKDKSSTEEK |
| | | FTKEDTITVQK |
| | | TLEGTLAADGK |
| | | LVSKKVTLKDK |
| | | MTELVSKEKDK |
| | | DLSQTKFEIFK |
| | | YTDIKSDGSGK |
| | | LVSKEKDKDGK |
| | | KFNEKGETSEK |
| | | IGLILALIACK |
| | HLA- | KYLLGIGLI |
| | A2402 | KWDSKTSTL |
| | | KYDSAGTNL |
| | | KYLLGIGLIL |
| | | KWDSKTSTLTI |
| | | KYSLEATVDKL |
| | HLA- | IVRANGTRLEY |
| | A2902 | TIADDLSQTKF |
| | HLA- | LTISVNSQK |
| | A6801 | ETSEKTIVR |
| | | MTELVSKEK |
| | | EITTLKELK |
| | | TIVRANGTR |
| | | KAVEITTLK |
| | | DAKTLVSKK |
| | | KTKNLVFTK |
| | | STEEKFNEK |
| | | ATVDKLELK |
| | | LVSKKVTLK |
| | | SQTKFEIFK |
| | | YSLEATVDK |
| | | EGTLAADGK |
| | | ISVNSQKTK |
| | | LILALIACK |
| | | DIKSDGSGK |
| | | VVLSKNILK |
| | | EDAKTLVSK |
| | | DSDTTQATK |
| | | SAGTNLEGK |
| | | TVVLSKNILK |
| | | TLTISVNSQK |
| | | EATVDKLELK |
| | | TIADDLSQTK |
| | | DSAGTNLEGK |
| | | TTQATKKTGK |
| | | LAADGKTTLK |
| | | KTIVRANGTR |
| | | TISVNSQKTK |
| | | TLVSKKVTLK |
| | | SSTEEKFNEK |
| | | TLKELKNALK |
| | | LSQTKFEIFK |
| | | VTEGTVVLSK |
| | | EDAKTLVSKK |
| | | DSDTTQATKK |
| | | GLILALIACK |
| | HLA- | IVRANGTRL |
| | B0702 | KVTEGTVVL |
| | | LAADGKTTL |
| | | LPGGMTELV |
| | | TVVLSKNIL |
| | | KAVEITTLKEL |
| | HLA- | TLKELKNAL |
| | B0801 | ILKSGEITVAL |
| | | YLLGIGLILAL |
| | | TLKVTEGTVVL |
| | HLA- | SQKTKNLVF |
| | B1501 | RANGTRLEY |
| | | YLLGIGLIL |
| | | KVTEGTVVL |
| | | TLKELKNAL |
| | | KAKEVLKDF |
| | | IVRANGTRL |
| | | LGIGLILAL |
| | | TLAADGKTTL |
| | | IVRANGTRLEY |
| | | YLLGIGLILAL |
| | | VQKYDSAGTNL |
| | | ILKSGEITVAL |
| | | VSKEKDKDGKY |
| | | VLKDFTLEGTL |
| | | TLKVTEGTVVL |
| | | VNSQKTKNLVF |
| | HLA- | KKYLLGIGL |
| | B2705 | VRANGTRLEY |
| | | GKWDSKTSTL |
| | | KKYLLGIGLIL |
| | HLA- | LAADGKTTL |
| | B3501 | RANGTRLEY |
| | | FTLEGTLAA |
| | | TVVLSKNIL |
| | | VALDDSDTT |
| | | YLLGIGLIL |
| | | LPGGMTELV |
| | | IADDLSQTKF |
| | | LPGGMTELVS |
| | | LKVTEGTVVL |
| | | YSLEATVDKL |
| | | YLLGIGLILAL |
| | | NSVSVDLPGGM |
| | | IVRANGTRLEY |
| | | TIADDLSQTKF |
| | | KAVEITTLKEL |
| | HLA- | KEVLKDFTL |
| | B4403 | GEITVALDD |
| | | KEKDKDGKY |
| | | KEDAKTLVS |
| | | GEITVALDDS |
| | | KEDTITVQKY |
| | | GEITVALDDSD |
| | | KEVLKDFTLEG |
| | HLA- | LPGGMTELV |
| | B5101 | |
| | HLA- | TTQATKKTGKW |
| | B5701 | |

[0910] Preferred Borrelia garinii fragments of FlaB capable of interacting with one or more MHC molecules are listed in Table X.

TABLE X
Prediction of Borrelia garinii FlaB protein
specific MHC class 2, 15-mer peptide binders
for 14 MHC class 2 alleles (see FIG. 11) using
the http://www.cbs.dtu.dk/services/NetMHCII/
database. The MHC class 2 molecules for which
no binders were found are not listed.

| | | |
|---|---|---|
| BAD18055.1 | HLA-A0101 | NQDEAIAVNIY |
| FlaB protein | | ELAVQSGNGTY |
| [Borrelia garinii] | HLA-A0201 | SQASWTLRV |
| Seq15 | | QLTDEINRI |
| | | AQAAQTAPV |
| | | AIAVNIYAA |
| | | SLAKIENAI |
| | | AVNIYAANV |
| | | AQYNQMHML |
| | | TTVDANTSL |
| | | SQGGVNSPV |
| | | QTAPVQEGV |
| | | NIYAANVANL |
| | | NLNEVEKVLV |
| | | VLVRMKELAV |
| | | QLTDEINRIA |
| | | NLFSGEGAQA |
| | | IAVNIYAANV |
| | | SLSGSQASWTL |
| | | MLSNKSASQNV |
| | | AIAVNIYAANV |
| | | SQASWTLRVHV |
| | | GMQPAKINTPA |
| | | KVLVRMKELAV |
| | | SLAKIENAIRM |
| | | NLFSGEGAQAA |
| | HLA-A0301 | NQMHMLSNK |
| | | GSQASWTLR |
| | | TVDANTSLAK |
| | | YNQMHMLSNK |
| | | LSGSQASWTLR |
| | | TTVDANTSLAK |
| | | LSNKSASQNVR |
| | HLA-A1101 | NQMHMLSNK |
| | | GSQASWTLR |
| | | AVQSGNGTY |
| | | TVDANTSLAK |
| | | YNQMHMLSNK |
| | | EVEKVLVRMK |
| | | TTVDANTSLAK |
| | | TTEGNLNEVEK |
| | | TAEELGMQPAK |
| | | TSLAKIENAIR |
| | | QYNQMHMLSNK |
| | | LSGSQASWTLR |
| | | LSNKSASQNVR |
| | HLA-A2402 | IYAANVANL |
| | | YAANVANLF |
| | | IYAANVANLF |
| | | TYSDADRGSI |
| | | IYAANVANLFS |
| | HLA-A2902 | AVQSGNGTY |
| | | YAANVANLF |
| | | ELAVQSGNGTY |
| | | EINRIADQAQY |
| | HLA-A6801 | LAKIENAIR |
| | | EGNLNEVEK |
| | | YAANVANLF |
| | | NGTYSDADR |
| | | GSQASWTLR |
| | | NQMHMLSNK |
| | | TSKAINFIQ |
| | | NKSASQNVR |
| | | EVEKVLVRMK |
| | | SLAKIENAIR |
| | | TVDANTSLAK |
| | | NTSKAINFIQ |
| | | SGSQASWTLR |
| | | TTVDANTSLA |
| | | TTVDANTSLAK |
| | | TTEGNLNEVEK |
| | | EIEQLTDEINR |
| | | LSNKSASQNVR |
| | | TSLAKIENAIR |
| | | EINRIADQAQY |
| | | NLNEVEKVLVR |
| | | LSGSQASWTLR |
| | | TAEELGMQPAK |
| | | QYNQMHMLSNK |
| | | NIYAANVANLF |
| | | QTAPVQEGVQQ |
| | HLA-B0702 | SPVNVTTTV |
| | | QPAKINTPA |
| | | QPAPATAPS |
| | | LVRMKELAV |
| | | TPASLSGSQ |
| | | APSQGGVNS |
| | | APATAPSQG |
| | | APVQEGVQQ |
| | | TPASLSGSQA |
| | | SPVNVTTTVD |
| | | APSQGGVNSP |
| | | QPAKINTPAS |
| | | APSQGGVNSPV |
| | | QPAKINTPASL |
| | | APATAPSQGGV |
| | | SPVNVTTTVDA |
| | | TPASLSGSQAS |
| | HLA-B0801 | KVLVRMKEL |
| | | VEKVLVRMKEL |
| | HLA-B1501 | YAANVANLF |
| | | AVQSGNGTY |
| | | AQAAQTAPV |
| | | AQYNQMHML |
| | | SQGGVNSPV |
| | | SLSGSQASW |
| | | SQASWTLRV |
| | | IQIEIEQLT |
| | | LAVQSGNGTY |
| | | SQASWTLRVH |
| | | SQNVRTAEEL |
| | | VQQEGAQQPA |
| | | INRIADQAQY |
| | | AQAAQTAPVQ |
| | | MQPAKINTPA |
| | | ELAVQSGNGTY |
| | | NIYAANVANLF |
| | | NQDEAIAVNIY |
| | | SLSGSQASWTL |
| | HLA-B2705 | NRIADQAQY |
| | HLA-B3501 | YAANVANLF |
| | | QPAPATAPS |
| | | SPVNVTTTV |
| | | DEAIAVNIY |
| | | TTVDANTSL |
| | | LAVQSGNGT |
| | | QPAKINTPA |
| | | AVQSGNGTY |
| | | QASWTLRVH |
| | | IAVNIYAAN |
| | | LAVQSGNGTY |
| | | IADQAQYNQM |
| | | QPAKINTPAS |
| | | LAKIENAIRM |
| | | QPAPATAPSQ |
| | | YAANVANLFS |
| | | TAEELGMQPA |
| | | EAIAVNIYAA |
| | | QAQYNQMHML |
| | | TPASLSGSQA |
| | | SPVNVTTTVD |
| | | TPASLSGSQAS |
| | | ELAVQSGNGTY |
| | | NQDEAIAVNIY |
| | | QPAKINTPASL |
| | | IAVNIYAANVA |
| | | NIYAANVANLF |
| | | SPVNVTTTVDA |
| | | EINRIADQAQY |
| | | IADQAQYNQMH |
| | | APSQGGVNSPV |
| | | LAVQSGNGTYS |
| | HLA-B4403 | EELGMQPAKI |
| | | NEVEKVLVRM |
| | | DEINRIADQA |
| | | DEINRIADQAQ |
| | HLA-B5101 | SPVNVTTTV |
| | | APATAPSQGGV |
| | | APSQGGVNSPV |
| | HLA-B5701 | ASLSGSQASW |

[0911] Preferred Mycobacterium tuberculosis fragments of CFP10 protein (Rv3874) capable of interacting with one or more class 1 and/or one or more class 2 MHC molecules are listed in Table Y.

TABLE Y

Prediction of MHC class 1 and 2 Mycobacterium tuberculosis CFP10
peptide binders. Prediction of 8-, 9-, 10-, 11-, 13-, 14-, 15-, 16-mer
peptides were using the program displayed in FIG. 2

8 mers:

MAEMKTDA; AEMKTDAA; EMKTDAAT; MKTDAATL; KTDAATLA; TDAATLAQ;
DAATLAQE; AATLAQEA; ATLAQEAG; TLAQEAGN; LAQEAGNF; AQEAGNFE;
QEAGNFER; EAGNFERI; AGNFERIS; GNFERISG; NFERISGD; FERISGDL; ERISGDLK;
RISGDLKT; ISGDLKTQ; SGDLKTQI; GDLKTQID; DLKTQIDQ; LKTQIDQV; KTQIDQVE;
TQIDQVES; QIDQVEST; IDQVESTA; DQVESTAG; QVESTAGS; VESTAGSL; ESTAGSLQ;
STAGSLQG; TAGSLQGQ; AGSLQGQW; GSLQGQWR; SLQGQWRG; LQGQWRGA;
QGQWRGAA; GQWRGAAG; QWRGAAGT; WRGAAGTA; RGAAGTAA; GAAGTAAQ;
AAGTAAQA; AGTAAQAA; GTAAQAAV; TAAQAAVV; AAQAAVVR; AQAAVVRF;
QAAVVRFQ; AAVVRFQE; AVVRFQEA; VVRFQEAA; VRFQEAAN; RFQEAANK;
FQEAANKQ; QEAANKQK; EAANKQKQ; AANKQKQE; ANKQKQEL; NKQKQELD;
KQKQELDE; QKQELDEI; KQELDEIS; QELDEIST; ELDEISTN; LDEISTNI; DEISTNIR;
EISTNIRQ; ISTNIRQA; STNIRQAG; TNIRQAGV; NIRQAGVQ; IRQAGVQY; RQAGVQYS;
QAGVQYSR; AGVQYSRA; GVQYSRAD; VQYSRADE; QYSRADEE; YSRADEEQ;
SRADEEQQ; RADEEQQQ; ADEEQQQA; DEEQQQAL; EEQQQALS; EQQQALSS;
QQQALSSQ; QQALSSQM; QALSSQMG; ALSSQMGF

9 mers:

MAEMKTDAA; AEMKTDAAT; EMKTDAATL; MKTDAATLA; KTDAATLAQ; TDAATLAQE;
DAATLAQEA; AATLAQEAG; ATLAQEAGN; TLAQEAGNF; LAQEAGNFE; AQEAGNFER;
QEAGNFERI; EAGNFERIS; AGNFERISG; GNFERISGD; NFERISGDL; FERISGDLK;
ERISGDLKT; RISGDLKTQ; ISGDLKTQI; SGDLKTQID; GDLKTQIDQ; DLKTQIDQV;
LKTQIDQVE; KTQIDQVES; TQIDQVEST; QIDQVESTA; IDQVESTAG; DQVESTAGS;
QVESTAGSL; VESTAGSLQ; ESTAGSLQG; STAGSLQGQ; TAGSLQGQW; AGSLQGQWR;
GSLQGQWRG; SLQGQWRGA; LQGQWRGAA; QGQWRGAAG; GQWRGAAGT;
QWRGAAGTA; WRGAAGTAA; RGAAGTAAQ; GAAGTAAQA; AAGTAAQAA;
AGTAAQAAV; GTAAQAAVV; TAAQAAVVR; AAQAAVVRF; AQAAVVRFQ; QAAVVRFQE;
AAVVRFQEA; AVVRFQEAA; VVRFQEAAN; VRFQEAANK; RFQEAANKQ; FQEAANKQK;
QEAANKQKQ; EAANKQKQE; AANKQKQEL; ANKQKQELD; NKQKQELDE; KQKQELDEI;
QKQELDEIS; KQELDEIST; QELDEISTN; ELDEISTNI; LDEISTNIR; DEISTNIRQ;
EISTNIRQA; ISTNIRQAG; STNIRQAGV; TNIRQAGVQ; NIRQAGVQY; IRQAGVQYS;
RQAGVQYSR; QAGVQYSRA; AGVQYSRAD; GVQYSRADE; VQYSRADEE; QYSRADEEQ;
YSRADEEQQ; SRADEEQQQ; RADEEQQQA; ADEEQQQAL; DEEQQQALS; EEQQQALSS;
EQQQALSSQ; QQQALSSQM; QQALSSQMG; QALSSQMGF;

10 mers:

MAEMKTDAAT; AEMKTDAATL; EMKTDAATLA; MKTDAATLAQ; KTDAATLAQE;
TDAATLAQEA; DAATLAQEAG; AATLAQEAGN; ATLAQEAGNF; TLAQEAGNFE;
LAQEAGNFER; AQEAGNFERI; QEAGNFERIS; EAGNFERISG; AGNFERISGD;
GNFERISGDL; NFERISGDLK; FERISGDLKT; ERISGDLKTQ; RISGDLKTQI; ISGDLKTQID;
SGDLKTQIDQ; GDLKTQIDQV; DLKTQIDQVE; LKTQIDQVES; KTQIDQVEST;
TQIDQVESTA; QIDQVESTAG; IDQVESTAGS; DQVESTAGSL; QVESTAGSLQ;
VESTAGSLQG; ESTAGSLQGQ; STAGSLQGQW; TAGSLQGQWR; AGSLQGQWRG;
GSLQGQWRGA; SLQGQWRGAA; LQGQWRGAAG; QGQWRGAAGT; GQWRGAAGTA;
QWRGAAGTAA; WRGAAGTAAQ; RGAAGTAAQA; GAAGTAAQAA; AAGTAAQAAV;
AGTAAQAAVV; GTAAQAAVVR; TAAQAAVVRF; AAQAAVVRFQ; AQAAVVRFQE;
QAAVVRFQEA; AAVVRFQEAA; AVVRFQEAAN; VVRFQEAANK; VRFQEAANKQ;
RFQEAANKQK; FQEAANKQKQ; QEAANKQKQE; EAANKQKQEL; AANKQKQELD;
ANKQKQELDE; NKQKQELDEI; KQKQELDEIS; QKQELDEIST; KQELDEISTN;
QELDEISTNI; ELDEISTNIR; LDEISTNIRQ; DEISTNIRQA; EISTNIRQAG; ISTNIRQAGV;
STNIRQAGVQ; TNIRQAGVQY; NIRQAGVQYS; IRQAGVQYSR; RQAGVQYSRA;
QAGVQYSRAD; AGVQYSRADE; GVQYSRADEE; VQYSRADEEQ; QYSRADEEQQ;
YSRADEEQQQ; SRADEEQQQA; RADEEQQQAL; ADEEQQQALS; DEEQQQALSS;
EEQQQALSSQ; EQQQALSSQM; QQQALSSQMG; QQALSSQMGF;

11 mers:

MAEMKTDAATL; AEMKTDAATLA; EMKTDAATLAQ; MKTDAATLAQE; KTDAATLAQEA;
TDAATLAQEAG; DAATLAQEAGN; AATLAQEAGNF; ATLAQEAGNFE; TLAQEAGNFER;
LAQEAGNFERI; AQEAGNFERIS; QEAGNFERISG; EAGNFERISGD; AGNFERISGDL;
GNFERISGDLK; NFERISGDLKT; FERISGDLKTQ; ERISGDLKTQI; RISGDLKTQID;
ISGDLKTQIDQ; SGDLKTQIDQV; GDLKTQIDQVE; DLKTQIDQVES; LKTQIDQVEST;
KTQIDQVESTA; TQIDQVESTAG; QIDQVESTAGS; IDQVESTAGSL; DQVESTAGSLQ;
QVESTAGSLQG; VESTAGSLQGQ; ESTAGSLQGQW; STAGSLQGQWR; TAGSLQGQWRG;
AGSLQGQWRGA; GSLQGQWRGAA; SLQGQWRGAAG; LQGQWRGAAGT;
QGQWRGAAGTA; GQWRGAAGTAA; QWRGAAGTAAQ; WRGAAGTAAQA;
RGAAGTAAQAA; GAAGTAAQAAV; AAGTAAQAAVV; AGTAAQAAVVR;
GTAAQAAVVRF; TAAQAAVVRFQ; AAQAAVVRFQE; AQAAVVRFQEA; QAAVVRFQEAA;
AAVVRFQEAAN; AVVRFQEAANK; VVRFQEAANKQ; VRFQEAANKQK; RFQEAANKQKQ;
FQEAANKQKQE; QEAANKQKQEL; EAANKQKQELD; AANKQKQELDE; ANKQKQELDEI;
NKQKQELDEIS; KQKQELDEIST; QKQELDEISTN; KQELDEISTNI; QELDEISTNIR;
ELDEISTNIRQ; LDEISTNIRQA; DEISTNIRQAG; EISTNIRQAGV; ISTNIRQAGVQ;
STNIRQAGVQY; TNIRQAGVQYS; NIRQAGVQYSR; IRQAGVQYSRA; RQAGVQYSRAD;
QAGVQYSRADE; AGVQYSRADEE; GVQYSRADEEQ; VQYSRADEEQQ; QYSRADEEQQQ;
YSRADEEQQQA; SRADEEQQQAL; RADEEQQQALS; ADEEQQQALSS; DEEQQQALSSQ;
EEQQQALSSQM; EQQQALSSQMG; QQQALSSQMGF

13 mers:

MAEMKTDAATLAQ; AEMKTDAATLAQE; EMKTDAATLAQEA; MKTDAATLAQEAG;
KTDAATLAQEAGN; TDAATLAQEAGNF; DAATLAQEAGNFE; AATLAQEAGNFER;
ATLAQEAGNFERI; TLAQEAGNFERIS; LAQEAGNFERISG; AQEAGNFERISGD;
QEAGNFERISGDL; EAGNFERISGDLK; AGNFERISGDLKT; GNFERISGDLKTQ;
NFERISGDLKTQI; FERISGDLKTQID; ERISGDLKTQIDQ; RISGDLKTQIDQV;
ISGDLKTQIDQVE; SGDLKTQIDQVES; GDLKTQIDQVEST; DLKTQIDQVESTA;
LKTQIDQVESTAG; KTQIDQVESTAGS; TQIDQVESTAGSL; QIDQVESTAGSLQ;
IDQVESTAGSLQG; DQVESTAGSLQGQ; QVESTAGSLQGQW; VESTAGSLQGQWR;
ESTAGSLQGQWRG; STAGSLQGQWRGA; TAGSLQGQWRGAA; AGSLQGQWRGAAG;
GSLQGQWRGAAGT; SLQGQWRGAAGTA; LQGQWRGAAGTAA; QGQWRGAAGTAAQ;
GQWRGAAGTAAQA; QWRGAAGTAAQAA; WRGAAGTAAQAAV; RGAAGTAAQAAVV;
GAAGTAAQAAVVR; AAGTAAQAAVVRF; AGTAAQAAVVRFQ; GTAAQAAVVRFQE;
TAAQAAVVRFQEA; AAQAAVVRFQEAA; AQAAVVRFQEAAN; QAAVVRFQEAANK;
AAVVRFQEAANKQ; AVVRFQEAANKQK; VVRFQEAANKQKQ; VRFQEAANKQKQE;
RFQEAANKQKQEL; FQEAANKQKQELD; QEAANKQKQELDE; EAANKQKQELDEI;
AANKQKQELDEIS; ANKQKQELDEIST; NKQKQELDEISTN; KQKQELDEISTNI;
QKQELDEISTNIR; KQELDEISTNIRQ; QELDEISTNIRQA; ELDEISTNIRQAG;
LDEISTNIRQAGV; DEISTNIRQAGVQ; EISTNIRQAGVQY; ISTNIRQAGVQYS;
STNIRQAGVQYSR; TNIRQAGVQYSRA; NIRQAGVQYSRAD; IRQAGVQYSRADE;
RQAGVQYSRADEE; QAGVQYSRADEEQ; AGVQYSRADEEQQ; GVQYSRADEEQQQ;
VQYSRADEEQQQA; QYSRADEEQQQAL; YSRADEEQQQALS; SRADEEQQQALSS;
RADEEQQQALSSQ; ADEEQQQALSSQM; DEEQQQALSSQMG; EEQQQALSSQMGF;

14 mers:

MAEMKTDAATLAQE; AEMKTDAATLAQEA; EMKTDAATLAQEAG;
MKTDAATLAQEAGN; KTDAATLAQEAGNF; TDAATLAQEAGNFE; DAATLAQEAGNFER;
AATLAQEAGNFERI; ATLAQEAGNFERIS; TLAQEAGNFERISG; LAQEAGNFERISGD;
AQEAGNFERISGDL; QEAGNFERISGDLK; EAGNFERISGDLKT; AGNFERISGDLKTQ;
GNFERISGDLKTQI; NFERISGDLKTQID; FERISGDLKTQIDQ; ERISGDLKTQIDQV;
RISGDLKTQIDQVE; ISGDLKTQIDQVES; SGDLKTQIDQVEST; GDLKTQIDQVESTA;
DLKTQIDQVESTAG; LKTQIDQVESTAGS; KTQIDQVESTAGSL; TQIDQVESTAGSLQ;
QIDQVESTAGSLQG; IDQVESTAGSLQGQ; DQVESTAGSLQGQW; QVESTAGSLQGQWR;
VESTAGSLQGQWRG; ESTAGSLQGQWRGA; STAGSLQGQWRGAA; TAGSLQGQWRGAAG;
AGSLQGQWRGAAGT; GSLQGQWRGAAGTA; SLQGQWRGAAGTAA;
LQGQWRGAAGTAAQ; QGQWRGAAGTAAQA; GQWRGAAGTAAQAA;
QWRGAAGTAAQAAV; WRGAAGTAAQAAVV; RGAAGTAAQAAVVR;
GAAGTAAQAAVVRF; AAGTAAQAAVVRFQ; AGTAAQAAVVRFQE; GTAAQAAVVRFQEA;
TAAQAAVVRFQEAA; AAQAAVVRFQEAAN; AQAAVVRFQEAANK;
QAAVVRFQEAANKQ; AAVVRFQEAANKQK; AVVRFQEAANKQKQ;
VVRFQEAANKQKQE; VRFQEAANKQKQEL; RFQEAANKQKQELD; FQEAANKQKQELDE;
QEAANKQKQELDEI; EAANKQKQELDEIS; AANKQKQELDEIST; ANKQKQELDEISTN;
NKQKQELDEISTNI; KQKQELDEISTNIR; QKQELDEISTNIRQ; KQELDEISTNIRQA;
QELDEISTNIRQAG; ELDEISTNIRQAGV; LDEISTNIRQAGVQ; DEISTNIRQAGVQY;
EISTNIRQAGVQYS; ISTNIRQAGVQYSR; STNIRQAGVQYSRA; TNIRQAGVQYSRAD;
NIRQAGVQYSRADE; IRQAGVQYSRADEE; RQAGVQYSRADEEQ; QAGVQYSRADEEQQ;
AGVQYSRADEEQQQ; GVQYSRADEEQQQA; VQYSRADEEQQQAL; QYSRADEEQQQALS;
YSRADEEQQQALSS; SRADEEQQQALSSQ; RADEEQQQALSSQM; ADEEQQQALSSQMG;
DEEQQQALSSQMGF

15 mers:

MAEMKTDAATLAQEA; AEMKTDAATLAQEAG; EMKTDAATLAQEAGN;
MKTDAATLAQEAGNF; KTDAATLAQEAGNFE; TDAATLAQEAGNFER;
DAATLAQEAGNFERI; AATLAQEAGNFERIS; ATLAQEAGNFERISG; TLAQEAGNFERISGD;
LAQEAGNFERISGDL; AQEAGNFERISGDLK; QEAGNFERISGDLKT; EAGNFERISGDLKTQ;
AGNFERISGDLKTQI; GNFERISGDLKTQID; NFERISGDLKTQIDQ; FERISGDLKTQIDQV;
ERISGDLKTQIDQVE; RISGDLKTQIDQVES; ISGDLKTQIDQVEST; SGDLKTQIDQVESTA;
GDLKTQIDQVESTAG; DLKTQIDQVESTAGS; LKTQIDQVESTAGSL; KTQIDQVESTAGSLQ;
TQIDQVESTAGSLQG; QIDQVESTAGSLQGQ; IDQVESTAGSLQGQW;
DQVESTAGSLQGQWR; QVESTAGSLQGQWRG; VESTAGSLQGQWRGA;
ESTAGSLQGQWRGAA; STAGSLQGQWRGAAG; TAGSLQGQWRGAAGT;
AGSLQGQWRGAAGTA; GSLQGQWRGAAGTAA; SLQGQWRGAAGTAAQ;
LQGQWRGAAGTAAQA; QGQWRGAAGTAAQAA; GQWRGAAGTAAQAAV;
QWRGAAGTAAQAAVV; WRGAAGTAAQAAVVR; RGAAGTAAQAAVVRF;
GAAGTAAQAAVVRFQ; AAGTAAQAAVVRFQE; AGTAAQAAVVRFQEA;
GTAAQAAVVRFQEAA; TAAQAAVVRFQEAAN; AAQAAVVRFQEAANK;
AQAAVVRFQEAANKQ; QAAVVRFQEAANKQK; AAVVRFQEAANKQKQ;
AVVRFQEAANKQKQE; VVRFQEAANKQKQEL; VRFQEAANKQKQELD;
RFQEAANKQKQELDE; FQEAANKQKQELDEI; QEAANKQKQELDEIS;
EAANKQKQELDEIST; AANKQKQELDEISTN; ANKQKQELDEISTNI; NKQKQELDEISTNIR;
KQKQELDEISTNIRQ; QKQELDEISTNIRQA; KQELDEISTNIRQAG; QELDEISTNIRQAGV;
ELDEISTNIRQAGVQ; LDEISTNIRQAGVQY; DEISTNIRQAGVQYS; EISTNIRQAGVQYSR;
ISTNIRQAGVQYSRA; STNIRQAGVQYSRAD; TNIRQAGVQYSRADE;
NIRQAGVQYSRADEE; IRQAGVQYSRADEEQ; RQAGVQYSRADEEQQ;
QAGVQYSRADEEQQQ; AGVQYSRADEEQQQA; GVQYSRADEEQQQAL;
VQYSRADEEQQQALS; QYSRADEEQQQALSS; YSRADEEQQQALSSQ;
SRADEEQQQALSSQM; RADEEQQQALSSQMG; ADEEQQQALSSQMGF

16 mers:

MAEMKTDAATLAQEAG; AEMKTDAATLAQEAGN; EMKTDAATLAQEAGNF;
MKTDAATLAQEAGNFE; KTDAATLAQEAGNFER; TDAATLAQEAGNFERI;
DAATLAQEAGNFERIS; AATLAQEAGNFERISG; ATLAQEAGNFERISGD;
TLAQEAGNFERISGDL; LAQEAGNFERISGDLK; AQEAGNFERISGDLKT;
QEAGNFERISGDLKTQ; EAGNFERISGDLKTQI; AGNFERISGDLKTQID;
GNFERISGDLKTQIDQ; NFERISGDLKTQIDQV; FERISGDLKTQIDQVE;
ERISGDLKTQIDQVES; RISGDLKTQIDQVEST; ISGDLKTQIDQVESTA;
SGDLKTQIDQVESTAG; GDLKTQIDQVESTAGS; DLKTQIDQVESTAGSL;
LKTQIDQVESTAGSLQ; KTQIDQVESTAGSLQG; TQIDQVESTAGSLQGQ;
QIDQVESTAGSLQGQW; IDQVESTAGSLQGQWR; DQVESTAGSLQGQWRG;
QVESTAGSLQGQWRGA; VESTAGSLQGQWRGAA; ESTAGSLQGQWRGAAG;
STAGSLQGQWRGAAGT; TAGSLQGQWRGAAGTA; AGSLQGQWRGAAGTAA;
GSLQGQWRGAAGTAAQ; SLQGQWRGAAGTAAQA; LQGQWRGAAGTAAQAA;
QGQWRGAAGTAAQAAV; GQWRGAAGTAAQAAVV; QWRGAAGTAAQAAVVR;
WRGAAGTAAQAAVVRF; RGAAGTAAQAAVVRFQ; GAAGTAAQAAVVRFQE;
AAGTAAQAAVVRFQEA; AGTAAQAAVVRFQEAA; GTAAQAAVVRFQEAAN;
TAAQAAVVRFQEAANK; AAQAAVVRFQEAANKQ; AQAAVVRFQEAANKQK;
QAAVVRFQEAANKQKQ; AAVVRFQEAANKQKQE; AVVRFQEAANKQKQEL;
VVRFQEAANKQKQELD; VRFQEAANKQKQELDE; RFQEAANKQKQELDEI;
FQEAANKQKQELDEIS; QEAANKQKQELDEIST; EAANKQKQELDEISTN;
AANKQKQELDEISTNI; ANKQKQELDEISTNIR; NKQKQELDEISTNIRQ;
KQKQELDEISTNIRQA; QKQELDEISTNIRQAG; KQELDEISTNIRQAGV;
QELDEISTNIRQAGVQ; ELDEISTNIRQAGVQY; LDEISTNIRQAGVQYS;
DEISTNIRQAGVQYSR; EISTNIRQAGVQYSRA; ISTNIRQAGVQYSRAD;
STNIRQAGVQYSRADE; TNIRQAGVQYSRADEE; NIRQAGVQYSRADEEQ;
IRQAGVQYSRADEEQQ; RQAGVQYSRADEEQQQ; QAGVQYSRADEEQQQA;
AGVQYSRADEEQQQAL; GVQYSRADEEQQQALS; VQYSRADEEQQQALSS;
QYSRADEEQQQALSSQ; YSRADEEQQQALSSQM; SRADEEQQQALSSQMG;
RADEEQQQALSSQMGF

### INDEX TO SEQUENCE LIST

| | SEQ ID NO |
|---|---|
| Bcl-2 fragments (class I) | 44893-45800 |
| BclX(L) fragments (class I) | 45801-46593 |
| Cancer antigens | 44889-44892 |
| BK virus antigens | 1-6 |
| BK virus 8-11 mers class I | 7-24956 |
| Bcl-2 fragments (class II) | 46594-47133 |
| BclX(L) fragments (class II) | 47134-47645 |
| BK 13-16 mers class II | 24957-44888 |
| Survivin fragments (class I) | 47646-48180 |
| Mcl-1 fragments (class II) | 48181-49526 |
| Borrelia OspC 8-11 mers and 13-16 mers | 49527-51126 |
| Borrelia OspA fragments | 51127-51380 |
| Borrelia FlaB fragments | 51381-51540 |
| Mycobacterium tuberculosis CFP10 8-11 mers | 51541-52252 |
| mers and 13-16 mers | |

### FIGURE LEGENDS

[0913] FIG. 1 Schematic representation of MHC multimer. A MHC multimer consist of a multimerization domain whereto one or more MHC-peptide complexes are attached through one or more linkers. The multimerization domain comprice one or more carriers and/or one or more scaffolds. The MHC-peptide complexes comprice a peptide and a MHC molecule

[0914] FIG. 2 Program for peptide sequence motifs prediction

[0915] FIG. 3 Full List of HLA Class I alleles assigned as of January 2007 from http://www.anthonynolan.org.uk/HIG/lists/class1list.html

[0916] FIG. 4 List of top 30 HLA class 1 alleles in different human ethnic groups

[0917] FIG. 5 Illustration of selected reaction groups

[0918] FIG. 6 Illustration of selected cleavable linkers

[0919] FIG. 7 Prediction of MHC class 1 mouse virus LCMV gp 1 protein nonamer peptide binders for H-2 Kd using the Syfpeithi database. Peptides are ranked according to their binding score. Only peptides with binding scores above the value of 11 are listed.

[0920] FIG. 8. Size exclusion chromatography of folded HLA-A*0201-β2m-QLFEELQEL peptide-complex. Purification of HLA-A*0201-β2m-QLFEELQEL peptide-complex by size exclusion chromatography on a HiLoad 16/60 Superdex 75 column. Eluted protein was followed by measurement of the absorbance at 280 nm. The elution profile consisted of 4 peaks, corresponding to aggregated Heavy Chain, correctly folded MHC-complex, β2m and excess biotin and peptide.

[0921] FIG. 9. MHC-SHIFT Assay. The SHIFT Assay shows that heavy chain is efficiently biotinylated, since the band corresponding to biotinylated heavy chain (lane 2) is shifted up-wards upon incubation with streptavidin. Lane 1: Benchmark protein-ladder Lane 2: Folded HLA-A*0201-β2m-QLFEELQEL peptide-complex Lane 3: Folded HLA-A*0201-β2m-QLFEELQEL peptide-complex incubated with molar excess Streptavidin.

[0922] FIG. 10. Composition of Fluorescein-linker molecule. (A) Schematic representation of an example of a Fluorescein-linker molecule. (B) Composition of a L15 linker.

[0923] FIG. 11 List of the 24 MHC class 1 alleles used for peptide prediction by the database http://www.cbs.dtu.dk/services/NetMHC/and the 14 MHC class 2 alleles used for peptide prediction by the database http://www.cbs.dtu.dk/services/NetMHCII/

[0924] FIG. 12 Prediction of MHC class 1 mouse virus LCMV gp 1 protein nonamer peptide binders for H-2 Kd using the Syfpeithi database. Peptides are ranked according to their binding score. Only peptides with binding scores above the value of 11 are listed.

[0925] FIG. 13 Full List of HLA Class I alleles assigned as of January 2007 from http://www.anthonynolan.org.uk/HIG/lists/classllist.html

[0926] FIG. 14 List of top 30 HLA class 1 alleles in different human ethnic groups

[0927] FIG. 15 Ex vivo ELISPOT analysis of BclX(L)-specific, CD8 positive T cells in PBL from a breast cancer patient either with or without the BclX(L) YLNDHLEPWI peptide. Analysis were performed in doublets and number of IFN-gamma producing T-cells are presented. (Reference: Sorensen R B, Hadrup S R, Kollgaard T, Svane I M, Thor Straten P, Andersen M H (2006) Efficient tumor cell lysis mediated by a Bcl-X(L) specific T cell clone isolated from a breast cancer patient. Cancer Immunol Immunother April; 56(4)527-33)

[0928] FIG. 16 PBL from a breast cancer patient was analyzed by flow cytometry to identify Bcl-X(L)173-182 (peptide YLNDHLEPWI) specific CD8 T cells using the dextramer complex HLA-A2/Bcl-X(L)173-182-APC, 7-AAD-PerCP, CD3-FITC, and CD8-APC-Cy7. The dextramer complex HLA-A2/HIV-1 pol476-484-APC was used as negative control. (Reference: Sorensen R B, Hadrup S R, Kollgaard T, Svane I M, Thor Straten P, Andersen M H (2006) Efficient tumor cell lysis mediated by a Bcl-X(L) specific T cell clone isolated from a breast cancer patient. Cancer Immunol Immunother April; 56(4)527-33)

[0929] FIG. 17 Ten expanded T cell clones isolated by Flow sorting and then expanded were tested for their specificity by analysis in a standard 51-Cr release assay. For this purpose, T2 cells loaded with either Bcl-X(L)173-182, YLNDHLEPWI peptide or an irrelevant peptide (BA4697-105, GLQHWVPEL) were used as target cells. (Reference: Sorensen R B, Hadrup S R, Kollgaard T, Svane I M, Thor Straten P, Andersen M H (2006) Efficient tumor cell lysis mediated by a Bcl-X(L) specific T cell clone isolated from a breast cancer patient. Cancer Immunol Immunother April; 56(4)527-33)

[0930] FIG. 18 A Bcl-X(L)173-182 specific clone was tested for its cytotoxic potential in 51Cr-release assays. Two assays were performed a Cell lysis of T2 cells pulsed with Bcl-X(L)173-182 peptide or an irrelevant peptide (BA4697-105, GLQHWVPEL) in three E:T ratios. b Cell lysis of T2 cells pulsed with different concentrations of Bcl-X(L)173-182 peptide at the E:T ratio 1:1 (Reference: Sorensen R B, Hadrup S R, Kollgaard T, Svane I M, Thor Straten P, Andersen M H (2006) Efficient tumor cell lysis mediated by a Bcl-X(L) specific T cell clone isolated from a breast cancer patient. Cancer Immunol Immunother April; 56(4)527-33)

[0931] FIG. 19. Detection of Borrelia specific T cells using MHC dextramers Dot plots showing live gated CD3⁺/CD4⁻ lymphocytes from Borrelia patient stained with (A) Negative Control MHC Dextramer (HLA-A*0201(GLAGDVSAV) or (B) pool of MHC Dextramers containing peptides from Borrelia antigen Osp A and Fla B. pool of MHC Dextramers containing peptides from Borrelia antigen. 0.05% of the live gated CD3⁺/CD4⁻ lymphocytes are positive for one or more of the MHC Dextramers in the pool.

[0932] FIG. 20. Detection of CMV specific T cells using MHC dextramers Dot plots showing live gated CD3⁺/CD4⁻ lymphocytes from CMV infected patient stained with (A) Negative Control MHC Dextramers (HLA-A*0201(GLAGDVSAV)) or (B) MHC Dextramers containing peptides from CMV pp 65 antigen (HLA-A*0201(NLVPMVATV)).

### EXAMPLES

### Example 1

[0933] This example describes how to make a MHC class I complex with a peptide in the peptide binding-groove using in vitro refolding. The MHC-complex in this example consisted of light chain β2m, the MHC class I Heavy Chain allele HLA-A*0201 (a truncated version in which the intracellular and transmembrane domains have been deleted) and the peptide QLFEELQEL. MHC I-complexes consists of 3 components; Light Chain (β2m), Heavy Chain and a peptide of typically 8-10 amino acids. In this example MHC-complexes was generated by in vitro refolding of heavy chain, β2m and peptide in a buffer containing reduced and oxidized glutathione. By incubation in this buffer a non-covalent complex between Heavy Chain, β2m and peptide was formed. Heavy chain and β2m was expressed as inclusion bodies in E. coli prior to in vitro refolding following standard procedures as described in Garboczi et al., (1996), Nature 384, 134-141. Following refolding the MHC complexes was biotinylated using BirA enzyme able to biotinylate a specific amino acid residue in a recognition sequence fused to the C-terminal of the Heavy Chain by genetic fusion. Monomer MHC complexes was then purified by size exclusion chromatography.
[0934] 1. 200 ml of refolding buffer (100 mM Tris, 400 mM L-arginin-HCL, 2 mM NaEDTA, 0.5 mM oxidized Gluthathione, 5 mM reduced Glutathione, pH 8.0) was supplied with protease inhibitors PMSF (phenylmethylsulphonyl fluoride), Pepstatin A and Leupeptin (to a final concentration of 1 mM, 1 mg/l and 1 mg/l, respectively). The refolding buffer was placed at 10° C. on a stirrer.
[0935] 2. 12 mg of peptide QLFEELQEL was dissolved in DMSO or another suitable solvent (300-500 μl), and added drop-wise to the refolding buffer at vigorous stirring.
[0936] 3. 4.4 mg of human Light Chain β2m was added drop-wise to the refolding buffer at vigorous stirring.
[0937] 4. 6.2 mg of Heavy Chain HLA-A*0201 (supplied with DTT to a concentration of 0.1 mM) was added drop-wise to the refolding buffer at vigorous stirring.
[0938] 5. The folding reaction was placed at 10° C. at slow stirring for 4-8 hours.
[0939] 6. After 4-8 hours, step 3 and 4 was repeated and the folding reaction is placed at 10° C. at slow stirring O/N.
[0940] 7. Step 3 and 4 was repeated, and the folding reaction is placed at 10° C. at slow stirring for 6-8 hours.

[0941] Optionally, steps 5-7 may be done in less time, e.g. a total of 0.5-5 hours.
[0942] 8. After 6-8 hours the folding reaction was filtrated through a 0.2 μm filter to remove aggregates.
[0943] 9. The folding reaction was concentrated 0/N at 10° C. shaking gently in a suitable concentrator with a 5000 mw cut-off filter. The folding reaction was concentrated to approximately 5-10 ml. (Optionally the filtrate can be stored at 4° C. and reused for another folding with the same peptide and heavy chain.)
[0944] 10. The concentrated folding reaction was buffer-exchanged at least 8 times, into a MHC-buffer (20 mM Tris-HCl, 50 mM NaCl, pH 8.0) and concentrated (at 10° C. in a suitable concentrator with a 5000 mw cut-off filter) down to approximately 1 ml.
[0945] 11. The heavy chain part of the MHC-complex was biotinylated by mixing the following components: approximately 1000 μl folded MHC-complex, 100 μl each of Biomix-A, Biomix-B and d-Biotin (all 3 from Biotin Protein Ligase Kit from Avidity, 10 μl birA enzyme (3 mg/ml, from Biotin Protein Ligase Kit from Avidity, 0.5 μl Pepstatin A (2 mg/ml) and 0.5 μl Leupeptin (2 mg/ml). The above was gently mixed and incubated 0/N at room temperature.
[0946] 12. The biotinylated and folded MHC-complex solution was centrifuged for 5 min. at 1700×g, room temperature.
[0947] 13. Correctly folded MHC-complex was separated and purified from excess biotin, excess β2m, excess heavy chain and aggregates thereof, by size exclusion chromatography on a column that separates proteins in the 10-100 kDa range. Correctly folded monomer MHC-complex was eluted with a MHC-buffer (20 mM Tris-HCl, 50 mM NaCl, pH 8.0). The elution profile consisted of 4 peaks, corresponding to aggregated Heavy Chain, correctly folded monomer MHC-complex, β2m and excess biotin and peptide (See FIG. 8).
[0948] 14. Fractions containing the folded MHC-complex were pooled and concentrated to approximately 1 ml in a suitable concentrator with a 5000 mw cut-off filter. The protein-concentration was estimated from its absorption at 280 nm.
[0949] 15. Folded MHC-complex can optionally be stored at −170° C. before further use.
[0950] 16. The grade of biotinylation was analyzed by a SDS PAGE SHIFT-assay with Streptavidin (FIG. 9) and correct folding was confirmed by ELISA, using the antibody W6/32 that recognizes correctly folded MHC-peptide complex.
[0951] 17.

[0952] The above procedure may be used for folding any MHC I complexes consisting of any β2m, any heavy chain and any peptide approx. 8-11 amino acids long. Either of the components can be truncated or otherwise modified. The above procedure can also be used for generation of “empty” MHC I complexes consisting of β2m and heavy chain without peptide.

### Example 2

[0953] This example describes how to generate soluble biotinylated MHC II complexes using a baculovirus expression system, where the MHC II complex was DR4 consisting of the α-chain DRA1*0101 and the β-chain DRB1*0401 as described by Svendsen et al., (2004), J. Immunol. 173(11):7037-45. Briefly, The hydrophobic transmembrane regions of the DRα and DRβ chains of DR4 were replaced by leucine zipper dimerization domains from the transcription factors Fos and Jun to promote DR α/β assembly. This was done by ligating cytoplasmic cDNA sequences of DRA1*0101 and DRB1*0401 to fos- and jun-encoding sequences. A birA site GLNDIFEAQKIEWH was added to the 3′ end of the DRA1*0101-fos template. Covalently bound peptide AGFKGEQGPKGEP derived from collagen II amino acid 261-273 were genetically attached by a flexible linker peptide to the N terminus of the DRβ-chain. Finally, the modified DRA1*0101 and DRB1*0401 inserts were cloned into the expression vector pAcAb3. The pAcAB3-DRA1*0101/DRB1*0401 plasmids were cotransfected with linearized baculovirus DNA (BD Pharmingen; BaculoGold kit) into Sf9 insect cells, according to the manufacturer's instructions. Following two rounds of plaque purification, clonal virus isolates were further amplified three times before preparation of high-titer virus (10⁸-10¹⁰/ml). These stocks were used to infect High Five or serum-free Sf21 insect cells (Invitrogen Life Technologies, Carlsbad, Calif.) for protein production. Spinner cultures (2−3×10⁶ cells/ml) were infected at a multiplicity of infection of 1-3 in a volume of 150 ml per 2 L spinner flask. Supernatants were harvested and proteinase inhibitor tablets (Roche, Basel, Switzerland) were added before affinity purification on MiniLeak-Low columns (Kem-En-Tec) coupled with the anti-HLA-DR monoclonal antibody L243. HLA-DR4 complexes were eluted with diethylamine (pH 11) into neutralization buffer (2 M Tris, pH 6.5) and immediately buffer exchanged and concentrated in PBS, 0.01% NaN₃, using Millipore (Bedford, Mass.) concentrators. The purity of protein was confirmed by SDS-PAGE. The purified DR4 complexes were biotinylated in vitro as described for MHC I complexes elsewhere herein. These complexes may now be used for coupling to any dimerization domain, e.g. divinylsulfone activated dextran 270 coupled with SA and a fluorochrome.

### Example 3

[0954] This example describes how to generate empty biotinylated MHC II complexes using a baculovirus expression system, where the MHC II complex consist of any α-chain and any β-chain, including truncated and otherwise modified versions of the two. Briefly, The hydrophobic transmembrane regions of the DRα and DRβ chains of MHC II are replaced by leucine zipper dimerization domains from the transcription factors Fos and Jun to promote DR α/β assembly. This is done by ligating cytoplasmic cDNA sequences of DRα and DRβ to fos- and jun-encoding sequences. A birA site GLNDIFEAQKIEWH is added to the 3′ end of either the DRα-fos/DRα-jun or the DRβ-jun/DRβ-fos template. The modified DRα and DRβ inserts is cloned into the expression vector pAcAb3 and cotransfected with linearized baculovirus DNA into Sf9 insect cells, according to the manufacturer's instructions. Following rounds of plaque purification, clonal virus isolates is further amplified before preparation of high-titer virus. These stocks are used to infect High Five or serum-free Sf21 insect cells (Invitrogen Life Technologies, Carlsbad, Calif.) for protein production, e.g. as Spinner cultures. Supernatants are harvested and proteinase inhibitors added before affinity purification, e.g. using a MiniLeak-Low columns (Kem-En-Tec) coupled with anti-MHC II antibody. The purified MHC II complexes is biotinylated in vitro as described for MHC I complexes elsewhere herein. These biotinylated MHC II complexes may now be used for coupling to any dimerization domain, e.g. divinylsulfone activated dextran 270 coupled with SA and a fluorochrome.

### Example 4

[0955] This example describes how to generate biotinylated MHC II complexes using a cell based protein expression system, where the MHC II complex consist of any α-chain and any β-chain, including truncated and otherwise modified versions of the two. The MHC II complex may also have a peptide bound in the peptide binding cleft.

[0956] The hydrophobic transmembrane regions of the MHC II α-chain and MHC II β-chain are replaced by leucine zipper dimerization domains from the transcription factors Fos and Jun to promote α/β chain assembly. This is done by ligating cytoplasmic cDNA sequences of α-chain and β-chain to fos- and jun-encoding sequences. A birA site GLNDIFEAQKIEWH is added to the 3′ end of the DRα-fos template. Optionally covalently bound peptide is genetically attached by a flexible linker peptide to the N terminus of the DRβ-chain. The modified DRα and DRβ inserts is cloned into a suitable expression vector and transfected into a cell line capable of protein expression, e.g. insect cells, CHO cells or similar. Transfected cells are grown in culture, supernatants are harvested and proteinase inhibitors added before affinity purification, e.g. using a MiniLeak-Low columns (Kem-En-Tec) coupled with anti-MHC II antibody. Alternatively the expressed MHC II complexes may be purified by anion- or cation-exchange chromatography. The purified MHC II complexes is biotinylated in vitro as described for MHC I complexes elsewhere herein. These biotinylated MHC II complexes may now be used for coupling to any dimerization domain, e.g. divinylsulfone activated dextran 270 coupled with SA and a fluorochrome.

### Example 5

[0957] This is an example of how to make a MHC multimer that is a tetramer and where the MHC are attached to the multimerization domain through a non-covalent interaction The multimerization domain consist of Streptavidin. The MHC molecule was biotinylated DR4 consisting of the α-chain DRA1*0101 and the β-chain DRB1*0401 and the peptide AGFKGEQGPKGEP derived from collagen II amino acid 261-273. The biotinylated MHC-peptide complexes was generated as described in a previous example herein.

[0958] Fluorescent DR4-peptide tetramer complexes were assembled by addition of ultra-avidin-R-PE (Leinco Technologies, St. Louis, Mo.) at a final molar ratio of biotinylated to DR4-peptide ultra-avidin-R-PE of 6:1. The resulting DR4-peptide multimer complexes were subjected to size exclusion on a Superdex-200 column to separate the tetramer complexes from protein aggregates and lower molecular weight complexes and excess fre DR4-peptide. The tetramer complexes were concentrated using Centicon-30 concentrators and stored at 0.1-0.3 mg/ml in a mixture of protease inhibitors.

[0959] These complexes could be used to detect specific T cells in a flow cytometry assay as described by Svendsen et al. (2004) Tracking of Proinflammatory Collagen-Specific T cells in Early and Late Collagen-Induced Arthritis in Humanized mice. J. Immunol. 173:7037-7045.

### Example 6

[0960] This example describes how an activated divinylsylfone-dextran(270 kDa)(VS-dex270) was coupled with streptavidin (SA) and Allophycocyanin (APC).
[0961] 1. Streptavidin (approx. 100 mg SA/ml in 10 mM HEPES, 0.1M NaCl, pH 7.85) was dialysed with gentle stirring for 2 days against 10 mM HEPES, 0.1M NaCl, pH 7.85 (20 fold excess volume) at 2-8° C. with 1 buffer change/day.
[0962] 2. 5 ml of APC from a homogen suspension (approx. 10 mg/ml) was centrifuged 40 min. at 3000 rpm. The supernatant was discharged and the precipitate dissolved in 5 ml of 10 mM HEPES, 0.1M NaCl, pH 7.85. This APC solution was dialysed with gentle stirring in the dark for 2 days against 10 mM HEPES, 0.1M NaCl, pH 7.85 (20 fold excess volume) at 2-8° C. with 1 buffer change/day.
[0963] 3. The APC-solution was concentrated to 1 ml and the concentration measured to 47 g/L at UV 650 nm. The A650/A278-ratio was measured to 4.2.
[0964] 4. The SA-solution was filtrated through a 0.45 μm filter and the protein concentration was measured to 61.8 g SA/L at UV 278 nm.
[0965] 5. Conjugation: The reagents was mixed to a total volume of 500 μl in the following order with 8.1 mol SA/mol Dex and 27 mol APC/mol Dex.:
   [0966] a) 90 μl water
   [0967] b) 160 μl activated VS-dex270
   [0968] c) 23 μl SA (61.8 g/L) ˜8.1 equivalents,
   [0969] d) 177 μl APC (47 g/L) ˜27 equivalents,
   [0970] e) 50 μl of 100 mM HEPES, 1M NaCl, pH 8
[0971] The reaction was placed in a water bath with stirring at 30° C. in the dark for 18 hours.
[0972] 6. The coupling was stopped by adding 50 μl 0.1M ethanolamine, pH 8.0.
[0973] 7. The conjugate was purified on a Sephacryl S-200 column with 10 mM HEPES, 0.1M NaCl buffer, pH 7.2.
[0974] 8. 3 peaks were collected (peak 1: APC-SA-dex270; peak 2: Free APC; peak 3: Free SA). Volume, UV A650 and UV A278 were measured.
[0975] 9. The concentration of dextran270, APC/Dex and SA/Dex were calculated to 22.4×10⁻⁸ M; 3.48 and 9.54 respectively.
[0976] 10. The conjugate were added NaN₃ and BSA to a final concentration of 15 mM and 1% respectively. The volume was adjusted with 10 mM HEPES, 0.1M NaCl, pH 7.2 to a final concentration of 16×10⁻⁸M Dex270.
[0977] 11. The conjugate were kept at 2-8° C. in dark until further use.

### Example 7

[0978] This example describes how an activated divinylsylfone-dextran(270 kDa)(VS-dex270) was coupled with streptavidin (SA) and R-phycoerythrin (RPE).

[0979] The coupling procedure described for coupling of SA and APC to VS-dex270 (as described elsewhere herein) were followed with the exception that APC were replaced with RPE

### Example 8

[0980] This example describes how to couple an empty MHC or a MHC-complex to a dextran multimerization domain through a non-covalent coupling, to generate a MHC-dextramer. The MHC-dextramer in this example consisted of APC-streptavidin (APC-SA)-conjugated 270 kDA dextran and a biotinylated, folded MHC-complex composed of β2m, HLA-A*0201 heavy chain and the peptide NLVPMVATV.

[0981] The APC-SA conjugated 270 kDA dextran contained 3.7 molecules of SA per dextran (each SA can bind 3 MHC-complexes) and the concentration was 16×10⁻⁸ M. The concentration of the HLA-A*0201/NLVPMVATV-complex was 4 mg/ml (1 μg=20.663 μmol). The molecular concentration of the MHC-complex was 8.27×10⁻⁵M.

[0982] The MHC-complex was attached to the dextran by a non-covalent Biotin-Streptavidin interaction between the biotinylated Heavy Chain part of the MHC-complex and the SA, conjugated to dextran.

[0983] Here follows a protocol for how to produce 1000 μl of a MHC-dextramer solution with a final concentration of approximately 32×10⁻⁹M:
[0984] 1. 200 μL 270 kDA vinylsulfone-activated dextran, corresponding to 3.2×10⁻¹¹ mol, and 4 μl MHC-complex, corresponding to 3.55×10⁻¹⁰ mol was mixed and incubated at room temperature in the dark for 30 min.
[0985] 2. A buffer of 0.05M Tris-HCl, 15 mM NaN₃, 1% BSA, pH 7.2 was added to a total volume of 1000 μl.
[0986] 3. The resulting MHC-dextramer preparation may now be used in flow cytometry experiments.

### Example 9

[0987] This is an example of how to make and use MHC multimers that are trimers consisting of a streptavidin multimerization domain with 3 biotinylated MHC complexes and 1 fluorophore molecule attached to the biotin binding pockets of streptavidin.

[0988] MHC complexes consisting of HLA-A*0201 heavy chain, beta2 microglobulin and NLVPMVATV peptide or the negative control peptide GLAGDVSAV were generated as described elsewhere herein. The fluorophore in this example was Fluorescein-linker molecules as shown in FIG. 10. Each of these molecules consist of a linker-biotin molecule mounted with 4 trippel fluorescein-linker molecules. The linker-biotin molecule was here H-L30-Lys(NH₂)-L30-Lys(NH₂)-L30-Lys(NH₂)L300Lys(caproylamidobiotin)-NH₂ where L30 was a 30 atom large linker and L300 was a 300 atom large linker. Both L30 and L300 was composed of multiple L15 linkers with the structure shown in FIG. 10B. Linker-biotin molecules were generated as follows: Downloaded Boc-L300-Lys(Fmoc) resin (100 mg) was deprotected and subjected to coupling with Boc-Lys(2ClZ)-OH, Boc-L30-OH, Boc-Lys(2ClZ)-OH, Boc-L30-OH, Boc-Lys(2ClZ)-OH then Boc-L30-OH. The resin was Fmoc deprotected and reacted twice (2×2 h) with caproylamido biotin NHS ester (25 mg in 0.5 mL NMP+25 microL DIPEA). The resin was washed with TFA and the product cleaved off with TFA:TFMSA:mCresol:thioanisol (6:2:1:1), 1 mL, precipitated with diethyl ether and purified by RP-HPLC. MS calculated for C₃₀₀H₅₄₄N₆₄O₁₃₇S is 7272.009 Da, found 7271.19 Da.

[0989] Alternatively linker-biotin molecule was H-L60-Lys(NH₂)-L60-Lys(NH₂)-L60-Lys(NH₂)L300Lys(caproylamidobiotin)-NH₂ and made from downloaded Boc-L300-Lys(Fmoc) resin (100 mg), and then prepared analogously to H-L30-Lys(NH₂)-L30-Lys(NH₂)-L30-Lys(NH₂)L300Lys(caproylamidobiotin)-NH₂. MS calculated for C₃₆₀H₆₅₂N₇₆O₁₆₇S is 8749.5848 Da and was found to be 7271.19 Da. Yield 3 mg.

[0990] The trippel fluorescein-linker molecules was here betaalanin-L90-Lys(Flu)-L90-Lys(Flu)-L90-Lys(Flu)-NH₂ where Lys=Lysine, Flu=Fluorescein and L90 is a 90 atom linker (se FIG. 10 for further details). The trippel-fluorescein-linker molecule was generated as follows: Downloaded Boc-Lys(Fmoc) resin, 2 g, was Boc deprotected and subjected to 3× coupling with Boc-L30-OH, Boc-Lys(Fmoc)-OH, 3×Boc-L30-OH, Boc-Lys(Fmoc)-OH, 3×Boc-L30-OH. The three Fmoc groups were removed and carboxyfluorescein, 301 mg, activated with HATU, 274 mg, and DIPEA, 139 μL, in 8 mL NMP, was added to the resin twice for 30 min. The resin was Boc deprotected and subjected to 2×30 min coupling with beta-alanine-N,N-diacetic acid benzyl ester, followed by 5 min treatment with 20% piperidine in NMP. The resin was washed with DCM, then TFA and the product was cleaved off the resin, precipitated with diethyl ether and purified by RP-HPLC. Yield was 621 mg. MS calculated for C268H402N44O116 is 6096.384 Da, while MS found was 6096 Da.

[0991] Biotin-linker molecule were coupled together with 4 trippel fluorescein-linker molecules as follows: (500 nmol) was dissolved in 88 microliter NMP+2 μl pyridine and activated for 10 min at room temperature (conversion to cyclic anhydride) by addition of 10 μl N,N′ diisopropylcarbodiimide. Following activation the trippel fluorescein-linker was precipitated with diethyl ether and redissolved in 100 microliter NMP containing 10 nmol biotin-linker. Once dissolved the coupling was initiated by addition of 5 μl diisopropyl ethyl amine, and was complete after 30 min.

[0992] Streptavidin and Fluorescein-linker molecules are then mixed in a molar ration of 1:1 and incubated for ½ hour. Then MHC complexes are added in 3-fold molar excess in respect to streptavidin and incubated for another ½ hour. Alternatively, MHC complexes are added first, then Fluorescein-linker molecules or MHC complexes are mixed with Fluorescein-linker molecules before addition to Streptavidin.

[0993] These MHC multimers are then used to stain CMV specific T cells in a flow Cytometry experiment. 1×10⁶ purified HPBMC from a donor with T cells specific for HLA-A*0201(NLVPMVATV) are incubated with 10 μl of each of the two HLA-A*0201(peptide)/Fluorescein constructs described above for 10 minutes in the dark at room temperature with a cell concentration of 2×10⁷ cells/ml. 10 μl of mouse-anti-human CD8/PB (clone DK25 from Dako) are added and the incubation continued for another 20 minutes at 4° C. in the dark. The samples are then washed by adding 2 ml PBS; pH=7.2 followed by centrifugation for 5 minutes at 200×g and the supernatant removed. The cells are resuspended in 400-500 μl PBS; pH=7.2 and analyzed on a flowcytometer.

[0994] In the above described example the Fluorescein-linker is as shown in FIG. 10 but the linker molecule can be any linker molecule as described in patent application WO 2007/015168 A2 (Lohse (2007)) or alternatively chemical biotinylated fluorochrom can be used instead of Fluorescein-linker molecules. The MHC complexes described in this example is a MHC I molecule composed of HLA-A*0201 heavy chain, beta2 microglobulin and NLVPMVATV peptide but can in principle be any MHC complex or MHC like molecule as described elsewhere herein.

### Example 10

[0995] This is an example of how to make MHC multimers consisting of a streptavidin multimerization domain with 3 biotinylated MHC complexes attached to the biotin binding pockets of streptavidin and how to use such trimer MHC complexes to detect specific T cells by direct detection of individual cells in a flow cytometry experiment by addition of a biotinylated fluorophore molecule. In this example the fluorophore is Fluorescein linker molecules constructed as described elsewhere herein.

[0996] MHC complexes consisting of HLA-A*0201 heavy chain, beta2 microglobulin and peptide are generated as described elsewhere. MHC complexes are incubated with streptavidin in a molar ratio of 3:1 for ½ hour.

[0997] These trimer MHC multimers are then used to stain CMV specific T cells in a flow Cytometry experiment. 1×10⁶ purified HPBMC from a donor with T cells specific for HLA-A*0201(NLVPMVATV) are incubated with 10 μl HLA-A*0201(peptide) multimer construct for 10 minutes in the dark at room temperature with a cell concentration of 2×10⁷ cells/ml. Then Fluorescein linker molecules (as described in Example 42) are added and incubation continued for 5 minutes. 10 μl mouse-anti-human CD8/PB antibody (clone DK25 from Dako) is added and the incubation continued for another 20 minutes at 4° C. in the dark. The samples are then washed by addition of 2 ml PBS; pH=7.2 followed by centrifugation for 5 minutes at 200×g and the supernatant removed. Cells are resuspended in 400-500 μl PBS; pH=7.2 and analyzed on a flowcytometer.

[0998] In this example the Fluorescein-linker is as shown in FIG. 10 but the linker molecule can be any linker molecule as described in Lohse, Jesper, (2007), WO 2007/015168 A2 or alternative chemically biotinylated fluorochrome may be used. The MHC complexes described in this example is a MHC I molecule composed of HLA-A*0201 heavy chain, beta2 microglobulin and NLVPMVATV peptide but can in principle be any MHC complex or MHC like molecule as described elsewhere herein.

### Example 11

[0999] This is an example of how to make MHC multimers where the multimerization domain is dextran and the MHC complexes are chemically conjugated to the dextran multimerization domain.

[1000] MHC complexes consisting of HLA-A*0201 heavy chain, beta2 microglobulin and NLVPMVATV peptide or the negative control peptide GLAGDVSAV are generated as described elsewhere herein. Dextran with a molecular weight of 270 kDa is activated with divinylsulfone. Activated Dextran is then incubated with MHC and RPE in a 0.05 M NaCHO₃ buffer; pH=9.5 with a molar ratio between MHC and Dextran of 30-60 and a molar ratio between RPE and dextran of 3-7:1 The mixture is placed in a water bath at 30° C. for 16 hours. Excess fluorochrome, MHC and dextran are removed by FPLC using a sephacryl S-300 column.

[1001] These MHC/RPE dextramers are then used to stain CMV specific T cells in a flow Cytometry experiment. Briefly, 1×10⁶ purified HPBMC from a donor with T cells specific for HLA-A*0201(NLVPMVATV) are incubated with 10 μl of each of the two HLA-A*0201(peptide)/RPE constructs described above for 10 minutes in the dark at room temperature with a cell concentration of 2×10⁷ cells/ml. 10 μl mouse-anti-human CD8/PB antibody (clone DK25 from Dako) are added and the incubation continued for another 20 minutes at 4° C. in the dark. The samples are then washed by adding 2 ml PBS; pH=7.2 followed by centrifugation for 5 minutes at 200×g and the supernatant removed. The cells are then resuspended in 400-500 μl PBS; pH=7.2 and analyzed on a flow cytometer.

### Example 12

[1002] This is an example of how to make MHC multimers where the multimerization domain is dextran and MHC complexes are MHC I molecules chemically conjugated to dextran multimerization domain and the dextran multimerization domain also have fluorochrome chemically coupled.

[1003] Human beta2 microglobulin is coupled to dextran as follows. Dextran with a molecular weight of 270 kDa is activated with divinylsulfone. Activated dextran is incubated with human beta2 microglobulin and RPE in a 0.05 M NaCHO₃ buffer; pH=9.5 with a molar ratio between beta2 microglobulin and Dextran of 30-60 and a molar ratio between RPE and dextran of 3-7:1. The molar ratio of the final product is preferable 4-6 RPE and 15-24 beta2 microglobulin per dextran. The mixture is placed in a water bath at 30° C. for 16 hours. Excess fluorochrome, beta2 microglobulin and dextran are removed by FPLC using a sephacryl S-300 column. The beta2 microglobulin-RPE-dextran construct is then refolded in vitro together with heavy chain and peptide using the following procedure. 200 ml refolding buffer (100 mM Tris, 400 mM L-arginin-HCL, 2 mM NaEDTA, 0.5 mM oxidized Gluthathione, 5 mM reduced Glutathione, pH 8.0) supplied with protease inhibitors PMSF, Pepstatin A and Leupeptin (to a final concentration of 1 mM, 1 mg/l and 1 mg/l, respectively) is made and cooled to 10° C. 12 mg NLVPMVATV peptide is dissolved in DMSO and added to the refolding buffer together with 20-30 mg beta2 microglobulin-RPE-dex and 6 mg HLA-A*0201 heavy chain. Incubation at 10° C. for 4-8 hours, then 20-30 mg beta2 microglobulin-RPE-dex and 6 mg HLA-A*0201 heavy chain is added and incubation continued for 4-8 hours. Another 20-30 mg beta2 microglobulin-RPE-dex and 6 mg HLA-A*0201 heavy chain is added and incubation continued for 6-8 hours. The folding reaction is filtrated through a 0.2 μm filter to remove larger aggregates and then buffer exchanged into a buffer containing 20 mM Tris-HCl, 50 nM NaCl; pH=8.0 followed by concentration to 1-2 ml sample. Dextran-RPE-MHC complexes are then separated from excess heavy chain and peptide by size exclusion chromatography using a sephacryl S-300, S-400 or sephacryl S-500 column.

[1004] These MHC/RPE dextramers may be used to stain CMV specific T cells in a flow Cytometry experiment. Briefly, 1×10⁶ purified HPBMC from a donor with T cells specific for HLA-A*0201(NLVPMVATV) are incubated with 10 μl of each of the two HLA-A*0201(peptide)/RPE constructs described above for 10 minutes in the dark at room temperature with a cell concentration of 2×10⁷ cells/ml. 10 μl of mouse-anti-human CD8/PB antibody (clone DK25 from Dako) are added and the incubation continued for another 20 minutes at 4° C. in the dark. The samples are then washed by adding 2 ml PBS; pH=7.2 followed by centrifugation for 5 minutes at 200×g and the supernatant removed. The cells are then resuspended in 400-500 μl PBS; pH=7.2 and analyzed on a flowcytometer.

### Example 13

[1005] The preparation of a Pentamer is described in e.g. (United States Patent application 20040209295). Briefly, the following steps lead to a fluorescent Pentamer reagent:

[1006] The following is a detailed example for cloning, expressing, and purifying a pentameric class I MHC complex, which comprises a chimeric fusion of .beta.2m with COMP. The chimeric .beta.2m-COMP protein is expressed in insoluble inclusion bodies in E. coli and subsequently assembled as pentameric. beta.2m-COMP in vitro. The pentameric class I MHC peptide complex is then formed in a second refolding reaction by combining beta.2m-COMP pentamers and the human MHC class I .alpha. molecule known as HLA-A*0201, in the presence of an appropriate synthetic binding peptide representing the T cell antigen. In this example, a well characterized antigen derived from Epstein-Barr virus BMLF1 protein, GLCTLVAML (a.a. 289-297) [SEQ ID NO: 1], is used. The resultant complex is labelled with a fluorescent entity and used as a staining reagent for detecting antigen-specific T cells from a mixed lymphocyte population, in a flow cytometry application.

[1007] The strategy involves the sequential cloning into pET-24c vector of .beta.2m, yielding a construct referred to as pETBMC01, followed by the insertion of the oligomerisation domain of cartilage oligomeric matrix protein (COMP) with a biotin acceptor sequence (BP) for site-specific biotinylation with the biotin-protein ligase BirA, yielding a construct referred to as pETBMC02. Thirdly a polyglycine linker is cloned in between .beta.2m and COMP, yielding a construct referred to as pETBMC03, and finally, a serine-residue is removed by site-directed mutagenesis, which serine residue precedes the poly-glycine linker, to give the final .beta.2m-COMP/pET-24c construct, referred to as pETBMC04 (see also FIG. 3). Removal of the serine residue is carried out to avoid steric hindrance when the .beta.2m molecule is associated with the MHC class I chain protein.

[1008] The extracellular portion of .beta.2m comprises of 99 amino acids (equivalent to Ile1-Met99 of the mature protein) encoded by 74 bp-370 by of the DNA sequence. This region of the .beta.2m sequence is amplified from a normal human lymphocyte cDNA library, by polymerase chain reaction (PCR) beta.2m PCR product is purified from the above reaction mix using a QIAquick® PCR purification kit according to the manufacturer's instructions (Qiagen). 200 ng of purified PCR product and 1.mu.g pET-24c vector (Novagen) are each digested with BamH I (10 U) and Nde I (10 U) restriction enzymes (New England Biolabs, NEB) for 4 h at 37.degree. C., in accordance with the manufacturer's instructions, and purified.

[1009] The gel-purified insert and vector DNA are ligated at a 1:3 molar ratio (vector:insert, 50 ng: 7.5 ng) using T4 DNA ligase (5 U; Bioline), in T4 DNA ligase buffer (as supplied) for 16 hrs at 16.degree. C.

[1010] The ligation mixtures and appropriate controls are subsequently transformed into XL1-Blue strain competent E. coli cells, according to the manufacturer's instructions (Stratagene). Successful transformants are selected by plating the cells on Luria-Bertani (LB) agar plates containing 30.mu.g/ml kanamycin, and incubating overnight at 37.degree. C.

[1011] A selection of single colonies from the bacterial transformation plates are screened by PCR with T7 promoter [SEQ ID NO: 4] (1.mu.M) and T7 terminator [SEQ ID NO: 5] (1.mu.M) primers (Sigma Genosys, see Appendix I for primer sequences), which are complementary to regions of the pET vector flanking the cloning site. Amplification is carried out using Taq DNA polymerase (1 U, Bioline) in Taq reaction buffer (as supplied), supplemented with 2 mM MgSO.sub.4 and 0.2 mM dNTPs, using 25 thermal-cycling reactions as detailed above. Successful transformants generated a DNA fragment of approximately 500 bp, ascertained by 1.5% agarose gel electrophoresis.

[1012] Bacterial transformants that generated the correct size of PCR products are inoculated into 6 ml of sterile LB-kanamycin medium and incubated overnight at 37.degree. C. with 200 rpm shaking. pETBMC01 plasmid DNA is recovered from the bacterial cultures using a QIAprep® Spin Mini-prep kit according to the manufacturer's instructions (Qiagen). The presence of the .beta.2m fragment in these plasmids is further verified by automated DNA sequencing.

[1013] The sequence of the oligomerisation domain of COMP is obtained from the Genbank database (accession #1705995) and a region encoding the coiled-coil domain (amino acids 21-85) is selected based on self-association experiments of COMP (Efinov et al., FEB S Letters 341:54-58 (1994)). A biotin acceptor sequence ‘BP’: SLNDIFEAQKIEWHE [SEQ ID NO: 6] is incorporated at the C terminus and an additional 14 amino acid linker, PQPQPKPQPKPEPET [SEQ ID NO:7] is included to provide a physical separation between the COMP oligomerising domain and BP.

[1014] The whole region is synthesized using the overlapping complementary oligonucleotides, and purified COMP-BP and 1.mu.g pETBMC01 vector are digested for 4 hrs at 37.degree. C. using Hind III (10 U) and Xho I (10 U) restriction enzymes (NEB), as described in Section 1.1. The digestion products are purified, ligated, transformed and PCR screened as in Section 1.1. Plasmids positive from the screen are purified and sequenced as described in Section 1.1.

[1015] The poly-glycine linker is synthesized by annealing overlapping oligonucleotides. Since the nucleotide sequence of the polyGlycine linker only incorporates the 5′ overhang of the cut BamH I restriction site, and the 3′ overhang of the cut Hind III nucleotide recognition motifs, there is no need to digest the annealed product to produce the complementary single-stranded overhangs suitable for subsequent ligation. The oligonucleotides are phosphorylated and annealed as described in Section 1.2.

[1016] pETBMC02 is digested with BamH I (10 U) and Hind III (10 U). Ligation of the annealed poly-glycine linker into pETBMC02 was as described previously (Section 1.1), assuming 96 fmoles of annealed oligonucleotide/.mu.l. The transformation and PCR-screening reactions are as described in Section 1.1, but in addition, the presence of an inserted linker is verified by a restriction enzyme digestion of the PCR screen product to ascertain the presence or absence of a Sal I restriction site. Successful transformants are not susceptible to Sal I digestion, given the removal of the site from the plasmid vector backbone. Purification of pETBMC03 and automated sequencing is as described in Section 1.1.

[1017] Analysis of X-ray crystallography models of MHC class I molecules reveal that the C terminus of .beta.2m closely abuts the .alpha.3 domain of the .alpha. chain. It is therefore desirable to achieve maximum flexibility at the start of the poly-glycine linker.

[1018] The extracellular portion of HLA-A*0201.alpha. chain (EMBL M84379) comprises of 276 amino acids (equivalent to Gly1-Pro276 of the mature protein) encoded by bases 73-900 of the messenger RNA sequence. This region of the A*0201 sequence is amplified from a normal human lymphocyte cDNA library by PCR, using the primers A2S#1 [SEQ ID NO: 20] and A2S#2 [SEQ ID NO: 21] which incorporated NcoI and BamHI restriction sites respectively.

[1019] The procedure for cloning the A*0201 insert into Nco I/BamH I-digested pET-11d vector (Novagen) is essentially as described for .beta.2m in Section 1.1.

[1020] An identical procedure is carried out to produce either .beta.2m-COMP or A*0201.alpha. chain proteins. Plasmid DNA is transformed into an E. coli expression host strain in preparation for a large scale bacterial prep. Protein is produced as insoluble inclusion bodies within the bacterial cells, and is recovered by sonication. Purified inclusion bodies are solubilised in denaturing buffer and stored at −80.degree. C. until required.

[1021] Purified plasmid DNA is transformed into the BL21(DE3)pLysS E. coli strain, which carries a chromosomal copy of the T7 RNA polymerase required to drive protein expression from pET-based constructs. Transformations into BL21(DE3)pLysS competent cells (Stratagene) are carried out with appropriate controls.

[1022] A single bacterial transformant colony is innoculated into 60 ml sterile LB medium, containing appropriate antibiotics for selection, and left to stand overnight in a warm room (.about.24.degree. C.) The resulting overnight culture is added to 6 litres of LB and grown at 37.degree. C. with shaking (.about.240 rpm), up to mid-log phase (OD.sub.600=0.3-0.4). Protein expression is induced at this stage by addition of 1.0 ml of 1M IPTG to each flask. The cultures are left for a further 4 h at 37.degree. C. with shaking, after which the cells are harvested by centrifugation and the supernatant discarded.

[1023] The bacterial cell pellet is resuspended in ice-cold balanced salt solution and sonicated (XL series sonicator; Misonix Inc., USA) in a small glass beaker on ice in order to lyse the cells and release the protein inclusion bodies. Once the cells are completely lysed the inclusion bodies are spun down in 50 ml polycarbonate Oak Ridge centrifuge tubes in a Beckman high-speed centrifuge (J2 series) at 15,000 rpm for 10 min. The inclusion bodies are then washed three times in chilled Triton® wash This is followed by a final wash in detergent-free wash buffer.

[1024] The resultant purified protein preparation is solubilised in 20-50 ml of 8 M urea buffer, containing 50 mM MES, pH 6.5, 0.1 mM EDTA and 1 mM DTT, and left on an end-over-end rotator overnight at 4.degree. C. Insoluble particles are removed by centrifugation and the protein yield is determined using Bradford's protein assay reagent (Bio-Rad Laboratories) and by comparison with known standards. Urea-solubilised protein is dispensed in 10 mg aliquots and stored at −80.degree. C. for future use.

[1025] Assembly of .beta.2m-COMP from the urea-solubilised inclusion bodies is performed by diluting the protein into 20 mM CAPS buffer, pH 11.0, containing 0.2 M sodium chloride and 1 mM EDTA, to give a final protein concentration of 1.5 mg/ml. The protein is oxidised at room temperature by addition of oxidised and reduced glutathione to final concentrations of 20 mM and 2 mM, respectively. Following an overnight incubation, disulphide bond formation is analysed by non-reducing SDS-PAGE on 10% bis-tricine gels (Invitrogen).

[1026] The protein mixture is subsequently buffer exchanged into 20 mM Tris, pH 8.0, 50 mM sodium chloride (‘S200 buffer’), and concentrated to a final volume of 4.5 ml, in preparation for enzymatic biotinylation with BirA (Affinity, Denver, Colo.). 0.5 ml of 10.times. BirA reaction buffer (as supplied) is added, and recombinant BirA enzyme at 10.mu.M final concentration, supplemented with 10 mM ATP, pH 7.0. A selection of protease inhibitors is also used to preserve the proteins: 0.2 mM PMSF, 2.mu.g/ml pepstatin and 2.mu.g/ml leupeptin. The reaction is left for 4 hours at room temperature.

[1027] Biotinylated .beta.2m-COMP is purified by size exclusion chromatography (SEC) on a Superdex® 200 HR 26/60 column (Amersham Biosciences), running 5200 buffer.

[1028] 500 ml of refolding buffer is prepared as follows: 100 mM Tris, pH 8.0, 400 mM Larginine hydrochloride, 2 mM EDTA, 5 mM reduced glutathione and 0.5 mM oxidised glutathione, dissolved in deionised water and left stirring at 4.degree. C. 15 mg of lyophilised synthetic peptide GLCTLVAML is dissolved in 0.5 ml dimethylsulfoxide and added to the refolding buffer whilst stirring. 50 mg of biotinylated pentameric .beta.2m-COMP and 30 mg of A*0201 .alpha. chain is added sequentially, injected through a 23 gauge hypodermic needle directly into the vigorously-stirred buffer, to ensure adequate dispersion. The refolding mixture is then left stirring gently for 16 hours at 4.degree. C.

[1029] The protein refolding mixture is subsequently concentrated from 500 ml to 20 ml using a MiniKros hollow fibre ultrafiltration cartridge (Spectrum Labs, Rancho Dominguez, Calif.) with a 30 kD molecular weight cutoff. Further concentration of the complex from 20 ml to 5 ml is carried out in Centricon Plus-20 centrifugal concentrators (30 kD molecular weight cut-off) according to the manufacturers instructions, followed by buffer exchange into 5200 buffer using disposable PD10 desalting columns (Amersham Biosciences), according to the manufacturer's instructions. Final volume is 7.5 ml. The concentrated protein refold mixture is first purified by SEC on a Superdex® 200 HR 26/60 gel filtration chromatography column, as in Section 4.2. Fractions containing protein complexes in the region of 310 kD is collected.

[1030] Fractions collected from SEC are pooled and subjected to further purification by anion exchange chromatography on a MonoQ® HR 5/5 column (Amersham Biosciences), running a salt gradient from 0-0.5 M sodium chloride in 20 mM Tris over 15 column volumes. The dominant peak is collected. Protein recovery is determined using the Bradford assay.

[1031] Since each streptavidin molecule is able to bind up to 4 biotin entities, final labelling with phycoerythrin (PE)-conjugated streptavidin is carried out in a molar ratio of 1:0.8, streptavidin to biotinylated pentamer complex respectively, taking into account the initial biotinylation efficiency measurement made for .beta.2m-COMP in Section 4.2. The total required amount of pentamer complex is subdivided (e.g. into 5 equal amounts) and titrated successively into streptavidin-PE. The concentration of A*0201 pentamer-streptavidin complex is adjusted to 1 mg/ml with phosphate buffered saline (PBS), supplemented with 0.01% azide and 1% BSA.

[1032] This resultant fluorescent Pentamer reagent is stored at 4.degree. C.

### Example 14

### Prediction of MHC Class 1 BK Virus Peptide Binders

[1033] This example describes the total approach, applied to the BK virus genome. It thus involves the translation of the genome in both directions, i.e. in six possible reading frames. Prediction of MHC class 1 BK virus peptide sequences for use in construction of MHC'mers designed to be used for analytical, diagnostic, prognostic, therapeutic and vaccine purposes, through the interaction of the MHC'mers with BK virus-specific T-cells. Prediction is carried out using the total approach. Thus, the 8-, 9-, 10- and 11-mer peptide sequences are generated from six amino acid sequences representing direct translation of the BK virus genome sequence in all six reading frames. The 8-, 9-, 10- and 11-mer peptide sequences are derived from the genome sequence by application of the software program described in (FIG. 2). The 8-, 9-, 10- and 11-mer peptide sequences are shown in table I.

### Example 15

### Prediction of MHC Class 2 BK Virus Peptide Binders

[1034] This example describes the total approach, applied to the BK virus genome. It thus involves the translation of the genome in both directions, i.e. in six possible reading frames. Prediction of MHC class 2 BK virus peptide sequences for use in construction of MHC'mers designed to be used for analytical, diagnostic, prognostic, therapeutic and vaccine purposes, through the interaction of the MHC'mers with BK virus-specific T-cells. Prediction is carried out using the total approach. Thus, the 13-, 14-, 15- and 16-mer peptide sequences are generated from six amino acid sequences representing direct translation of the BK virus genome sequence in all six reading frames. The 13-, 14-, 15- and 16-mer peptide sequences are derived from the genome sequence by application of the software program described in (FIG. 2). The 13-, 14-, 15- and 16-mer peptide sequences are shown in table 0.

### Example 16

### Prediction of MHC Class 1 Peptide Binders for BK Agnoprotein using Directed Approach

[1035] This example describes the directed approach, applied to a known protein sequence, the Agnoprotein encoded by the BK virus genome. The purpose is to predict BK virus peptide sequences that binds to MHC class I molecules for use in construction of MHC'mers designed to be used for analytical, diagnostic, prognostic, therapeutic and vaccine purposes, through the interaction of the MHC'mers with BK virus specific T-cells. Prediction is carried out using the known preferences of the 42 HLA class 1 alleles included in the http://www.cbs.dtu.dk/services/NetMHC/database (FIG. 11).

[1036] The result of the prediction software is used to find all strong and weak 8-, 9-, 10- and 11-mer peptide binders of the 42 HLA class 1 alleles. The result can be seen in table N. The MHC class 1 alleles for whom no binders are predicted are omitted from the list. The listed peptides are ranked according to decreased binding affinity for the individual MHC alleles. Strong binders are defined as binders with an affinity value of less than 50 nM and weak binders with a value of less than 500 nM. Only peptides defined as weak or strong binders are shown.

### Example 17

### Prediction of MHC Class 1 Peptide Binders for BK small t Protein using Directed Approach

[1037] This example describes the directed approach, applied to a known protein sequence, the small t protein encoded by the BK virus genome. The purpose is to predict BK virus peptide sequences that binds to MHC class I molecules for use in construction of MHC'mers designed to be used for analytical, diagnostic, prognostic, therapeutic and vaccine purposes, through the interaction of the MHC'mers with BK virus specific T-cells. Prediction is carried out using the known preferences of the 42 HLA class 1 alleles included in the http://www.cbs.dtu.dk/services/NetMHC/database (FIG. 11).

[1038] The result of the prediction software is used to find all strong and weak 8-, 9-, 10- and 11-mer peptide binders of the 42 HLA class 1 alleles. The result can be seen in table L. The MHC class 1 alleles for whom no binders are predicted are omitted from the list. The listed peptides are ranked according to decreased binding affinity for the individual MHC alleles. Strong binders are defined as binders with an affinity value of less than 50 nM and weak binders with a value of less than 500 nM. Only peptides defined as weak or strong binders are shown.

### Example 18

### Prediction of MHC Class 1 Peptide Binders for BK Large T Protein using Directed Approach

[1039] This example describes the directed approach, applied to a known protein sequence, the Large T protein encoded by the BK virus genome. The purpose is to predict BK virus peptide sequences that binds to MHC class I molecules for use in construction of MHC'mers designed to be used for analytical, diagnostic, prognostic, therapeutic and vaccine purposes, through the interaction of the MHC'mers with BK virus specific T-cells. Prediction is carried out using the known preferences of the 42 HLA class 1 alleles included in the http://www.cbs.dtu.dk/services/NetMHC/database (FIG. 11).

[1040] The result of the prediction software is used to find all strong and weak 8-, 9-, 10- and 11-mer peptide binders of the 42 HLA class 1 alleles. The result can be seen in table M. The MHC class 1 alleles for whom no binders are predicted are omitted from the list. The listed peptides are ranked according to decreased binding affinity for the individual MHC alleles. Strong binders are defined as binders with an affinity value of less than 50 nM and weak binders with a value of less than 500 nM. Only peptides defined as weak or strong binders are shown.

### Example 19

### Prediction of MHC Class 1 Peptide Binders for BK VP1 Protein using Directed Approach

[1041] This example describes the directed approach, applied to a known protein sequence, the VP1 protein encoded by the BK virus genome. The purpose is to predict BK virus peptide sequences that binds to MHC class I molecules for use in construction of MHC'mers designed to be used for analytical, diagnostic, prognostic, therapeutic and vaccine purposes, through the interaction of the MHC'mers with BK virus specific T-cells. Prediction is carried out using the known preferences of the 42 HLA class 1 alleles included in the http://www.cbs.dtu.dk/services/NetMHC/database (FIG. 11).

[1042] The result of the prediction software is used to find all strong and weak 8-, 9-, 10- and 11-mer peptide binders of the 42 HLA class 1 alleles. The result can be seen in table K. The MHC class 1 alleles for whom no binders are predicted are omitted from the list. The listed peptides are ranked according to decreased binding affinity for the individual MHC alleles. Strong binders are defined as binders with an affinity value of less than 50 nM and weak binders with a value of less than 500 nM. Only peptides defined as weak or strong binders are shown.

### Example 20

### Prediction of MHC Class 1 Peptide Binders for BK VP2-3 Protein using Directed Approach

[1043] This example describes the directed approach, applied to a known protein sequence, the VP2-3 protein encoded by the human genome. The purpose is to predict BK virus peptide sequences that binds to MHC class I molecules for use in construction of MHC'mers designed to be used for analytical, diagnostic, prognostic, therapeutic and vaccine purposes, through the interaction of the MHC'mers with BK virus specific T-cells. Prediction is carried out using the known preferences of the 42 HLA class 1 alleles included in the http://www.cbs.dtu.dk/services/NetMHC/database (FIG. 11).

[1044] The result of the prediction software is used to find all strong and weak 8-, 9-, 10- and 11-mer peptide binders of the 42 HLA class 1 alleles. The result can be seen in table J. The MHC class 1 alleles for whom no binders are predicted are omitted from the list. The listed peptides are ranked according to decreased binding affinity for the individual MHC alleles. Strong binders are defined as binders with an affinity value of less than 50 nM and weak binders with a value of less than 500 nM. Only peptides defined as weak or strong binders are shown.

### Example 21

### Prediction of MHC Class 1 Peptide Binders for Human Cancer Protein Bcl-2 using Directed Approach

[1045] This example describes the directed approach, applied to a known protein sequence, the cancer protein Bcl-2 encoded by the human genome. The purpose is to predict Bcl-2 peptide sequences that binds to MHC class I molecules for use in construction of MHC'mers designed to be used for analytical, diagnostic, prognostic, therapeutic and vaccine purposes, through the interaction of the MHC'mers with human Bcl-2 specific T-cells. Prediction is carried out using the known preferences of the 42 HLA class 1 alleles included in the http://www.cbs.dtu.dk/services/NetMHC/database (FIG. 11).

[1046] The result of the prediction software is used to find all strong and weak 8-, 9-, 10- and 11-mer peptide binders of the 42 HLA class 1 alleles. The result can be seen in table C. The MHC class 1 alleles for whom no binders are predicted are omitted from the list. The listed peptides are ranked according to decreased binding affinity for the individual MHC alleles. Strong binders are defined as binders with an affinity value of less than 50 nM and weak binders with a value of less than 500 nM. Only peptides defined as weak or strong binders are shown.

### Example 22

### Prediction of MHC Class 1 Peptide Binders for Human Cancer Protein BclX(L) using Directed Approach

[1047] This example describes the directed approach, applied to a known protein sequence, the cancer protein BclX(L) encoded by the human genome. The purpose is to predict BclX(L) peptide sequences that binds to MHC class I molecules for use in construction of MHC'mers designed to be used for analytical, diagnostic, prognostic, therapeutic and vaccine purposes, through the interaction of the MHC'mers with human BclX(L) specific T-cells. Prediction is carried out using the known preferences of the 42 HLA class 1 alleles included in the http://www.cbs.dtu.dk/services/NetMHC/database (FIG. 11).

[1048] The result of the prediction software is used to find all strong and weak 8-, 9-, 10- and 11-mer peptide binders of the 42 HLA class 1 alleles. The result can be seen in table B. The MHC class 1 alleles for whom no binders are predicted are omitted from the list. The listed peptides are ranked according to decreased binding affinity for the individual MHC alleles. Strong binders are defined as binders with an affinity value of less than 50 nM and weak binders with a value of less than 500 nM. Only peptides defined as weak or strong binders are shown.

### Example 23

### Prediction of MHC Class 1 Human Cancer Protein Survivin Peptide Binders

[1049] This example describes the prediction of MHC class 1 human Survivin peptide sequences for use in construction of MHC'mers designed to be used for analytical, diagnostic, prognostic, therapeutic and vaccine purposes, through the interaction of the MHC'mers with human Survivin specific T-cells. Prediction of the 8-, 9-, 10- and 11-mer peptide sequences are carried out using the peptide generation software program described in FIG. 2. The outcome is shown in table F.

### Example 24

### Prediction of MHC Class 2 Peptide Binders for BK Agnoprotein using Directed Approach

[1050] This example describes the directed approach, applied to a known protein sequence, the Agnoprotein encoded by the BK virus genome. The purpose is to predict BK virus peptide sequences that binds to MHC class 2 molecules for use in construction of MHC'mers designed to be used for analytical, diagnostic, prognostic, therapeutic and vaccine purposes, through the interaction of the MHC'mers with BK virus specific T-cells. Prediction is carried out using the known preferences of the 14 HLA class 2 alleles included in the http://www.cbs.dtu.dk/services/NetMHC/database (FIG. 11).

[1051] The result of the prediction software is used to find all strong and weak 15-mer peptide binders of the 14 HLA class 2 alleles. It also finds the important central nonamer core peptide sequence of each binding peptide. The result can be seen in table T. The MHC class 2 alleles for whom no binders are predicted are omitted from the list. The listed peptides are ranked according to decreased binding affinity for the individual MHC alleles. Strong binders are defined as binders with an affinity value of less than 50 nM and weak binders with a value of less than 500 nM. Only peptides defined as weak or strong binders are shown.

### Example 25

### Prediction of MHC Class 2 Peptide Binders for BK Small t Protein using Directed Approach

[1052] This example describes the directed approach, applied to a known protein sequence, the small t protein encoded by the BK virus genome. The purpose is to predict BK virus peptide sequences that binds to MHC class 2 molecules for use in construction of MHC'mers designed to be used for analytical, diagnostic, prognostic, therapeutic and vaccine purposes, through the interaction of the MHC'mers with BK virus specific T-cells. Prediction is carried out using the known preferences of the 14 HLA class 2 alleles included in the http://www.cbs.dtu.dk/services/NetMHC/database (FIG. 11).

[1053] The result of the prediction software is used to find all strong and weak 15-mer peptide binders of the 14 HLA class 2 alleles. It also finds the important central nonamer core peptide sequence of each binding peptide. The result can be seen in table R. The MHC class 2 alleles for whom no binders are predicted are omitted from the list. The listed peptides are ranked according to decreased binding affinity for the individual MHC alleles. Strong binders are defined as binders with an affinity value of less than 50 nM and weak binders with a value of less than 500 nM. Only peptides defined as weak or strong binders are shown.

### Example 26

### Prediction of MHC Class 2 Peptide Binders for BK Large T Protein using Directed Approach

[1054] This example describes the directed approach, applied to a known protein sequence, the Large T protein encoded by the BK virus genome. The purpose is to predict BK virus peptide sequences that binds to MHC class 2 molecules for use in construction of MHC'mers designed to be used for analytical, diagnostic, prognostic, therapeutic and vaccine purposes, through the interaction of the MHC'mers with BK virus specific T-cells. Prediction is carried out using the known preferences of the 14 HLA class 2 alleles included in the http://www.cbs.dtu.dk/services/NetMHC/database (FIG. 11).

[1055] The result of the prediction software is used to find all strong and weak 15-mer peptide binders of the 14 HLA class 2 alleles. It also finds the important central nonamer core peptide sequence of each binding peptide. The result can be seen in table S. The MHC class 2 alleles for whom no binders are predicted are omitted from the list. The listed peptides are ranked according to decreased binding affinity for the individual MHC alleles. Strong binders are defined as binders with an affinity value of less than 50 nM and weak binders with a value of less than 500 nM. Only peptides defined as weak or strong binders are shown.

### Example 27

### Prediction of MHC Class 2 Peptide Binders for BK VP1 Protein using Directed Approach

[1056] This example describes the directed approach, applied to a known protein sequence, the VP1 protein encoded by the BK virus genome. The purpose is to predict BK virus peptide sequences that binds to MHC class 2 molecules for use in construction of MHC'mers designed to be used for analytical, diagnostic, prognostic, therapeutic and vaccine purposes, through the interaction of the MHC'mers with BK virus specific T-cells. Prediction is carried out using the known preferences of the 14 HLA class 2 alleles included in the http://www.cbs.dtu.dk/services/NetMHC/database (FIG. 11).

[1057] The result of the prediction software is used to find all strong and weak 15-mer peptide binders of the 14 HLA class 2 alleles. It also finds the important central nonamer core peptide sequence of each binding peptide. The result can be seen in table Q. The MHC class 2 alleles for whom no binders are predicted are omitted from the list. The listed peptides are ranked according to decreased binding affinity for the individual MHC alleles. Strong binders are defined as binders with an affinity value of less than 50 nM and weak binders with a value of less than 500 nM. Only peptides defined as weak or strong binders are shown.

### Example 28

### Prediction of MHC Class 2 Peptide Binders for BK VP2-3 Protein using Directed Approach

[1058] This example describes the directed approach, applied to a known protein sequence, the VP2-3 protein encoded by the BK virus genome. The purpose is to predict BK virus peptide sequences that binds to MHC class 2 molecules for use in construction of MHC'mers designed to be used for analytical, diagnostic, prognostic, therapeutic and vaccine purposes, through the interaction of the MHC'mers with BK virus specific T-cells. Prediction is carried out using the known preferences of the 14 HLA class 2 alleles included in the http://www.cbs.dtu.dk/services/NetMHC/database (FIG. 11).

[1059] The result of the prediction software is used to find all strong and weak 15-mer peptide binders of the 14 HLA class 2 alleles. It also finds the important central nonamer core peptide sequence of each binding peptide. The result can be seen in table P. The MHC class 2 alleles for whom no binders are predicted are omitted from the list. The listed peptides are ranked according to decreased binding affinity for the individual MHC alleles. Strong binders are defined as binders with an affinity value of less than 50 nM and weak binders with a value of less than 500 nM. Only peptides defined as weak or strong binders are shown.

### Example 29

### Prediction of MHC Class 2 Human Cancer Protein Mcl-1 Peptide Binders

[1060] This example describes the prediction of MHC class 2 human Mcl-1 peptide sequences for use in construction of MHC'mers designed to be used for analytical, diagnostic, prognostic, therapeutic and vaccine purposes, through the interaction of the MHC'mers with human Mcl-1 specific T-cells. Prediction of the 13-, 14-, 15- and 16-mer peptide sequences are carried out using the peptide generation software program described in FIG. 2. The outcome is shown in table G.

### Example 30

### Prediction of MHC Class 2 Peptide Binders for Human Cancer Protein Bcl-2 using Directed Approach

[1061] This example describes the directed approach, applied to a known protein sequence, the cancer protein Bcl-2 encoded by the human genome. The purpose is to predict Bcl-2 peptide sequences that binds to MHC class 2 molecules for use in construction of MHC'mers designed to be used for analytical, diagnostic, prognostic, therapeutic and vaccine purposes, through the interaction of the MHC'mers with human Bcl-2 specific T-cells. Prediction is carried out using the known preferences of the 14 HLA class 2 alleles included in the http://www.cbs.dtu.dk/services/NetMHCII/database (FIG. 11).

[1062] The result of the prediction software is used to find all strong and weak 15-mer peptide binders of the 14 HLA class 2 alleles. It also finds the important central nonamer core peptide sequence of each binding peptide. The result can be seen in table E. The MHC class 2 alleles for whom no binders are predicted are omitted from the list. The listed peptides are ranked according to decreased binding affinity for the individual MHC alleles. Strong binders are defined as binders with an affinity value of less than 50 nM and weak binders with a value of less than 500 nM. Only peptides defined as weak or strong binders are shown.

### Example 31

### Prediction of MHC Class 2 Peptide Binders for Human Cancer Protein BclX(L) using Directed Approach

[1063] This example describes the directed approach, applied to a known protein sequence, the cancer protein BclX(L) encoded by the human genome. The purpose is to predict BclX(L) peptide sequences that binds to MHC class 2 molecules for use in construction of MHC'mers designed to be used for analytical, diagnostic, prognostic, therapeutic and vaccine purposes, through the interaction of the MHC'mers with human BclX(L) specific T-cells. Prediction is carried out using the known preferences of the 14 HLA class 2 alleles included in the http://www.cbs.dtu.dk/services/NetMHCII/database (FIG. 11).

[1064] The result of the prediction software is used to find all strong and weak 15-mer peptide binders of the 14 HLA class 2 alleles. It also finds the important central nonamer core peptide sequence of each binding peptide. The result can be seen in table D. The MHC class 2 alleles for whom no binders are predicted are omitted from the list. The listed peptides are ranked according to decreased binding affinity for the individual MHC alleles. Strong binders are defined as binders with an affinity value of less than 50 nM and weak binders with a value of less than 500 nM. Only peptides defined as weak or strong binders are shown.

### Example 32

### Prediction of MHC Class 1 and 2 Borrelia afzelii OspC Peptide Binders

[1065] This example describes the prediction of MHC class 1 and 2 Borrelia afzelii OspC peptide sequences for use in construction of MHC'mers designed to be used for analytical, diagnostic, prognostic, therapeutic and vaccine purposes, through the interaction of the MHC'mers with Borrelia afzelii OspC specific T-cells. Prediction of the 8-, 9-, 10-, 11-, 13-, 14-, 15- and 16-mer peptide sequences are carried out using the peptide generation software program described in FIG. 2. The outcome is shown in table U.

### Example 33

### Prediction of MHC Class 1 Borrelia burgdorferi OspA Peptide Binders

[1066] This example describes the directed approach, applied to a known protein sequence, the Borrelia burgdorferi protein OspA encoded by the Borrelia genome. The purpose is to predict OspA peptide sequences that binds to MHC class I molecules for use in construction of MHC'mers designed to be used for analytical, diagnostic, prognostic, therapeutic and vaccine purposes, through the interaction of the MHC'mers with human OspA specific T-cells. Prediction is carried out using the known preferences of the 42 HLA class 1 alleles included in the http://www.cbs.dtu.dk/services/NetMHC/database (FIG. 11).

[1067] The result of the prediction software is used to find all strong and weak 8-, 9-, 10- and 11-mer peptide binders of the 42 HLA class 1 alleles. The result can be seen in table V. The MHC class 1 alleles for whom no binders are predicted are omitted from the list. The listed peptides are ranked according to decreased binding affinity for the individual MHC alleles. Strong binders are defined as binders with an affinity value of less than 50 nM and weak binders with a value of less than 500 nM. Only peptides defined as weak or strong binders are shown.

### Example 34

### Prediction of MHC Class 1 Borrelia garinii FlaB Peptide Binders

[1068] This example describes the directed approach, applied to a known protein sequence, the Borrelia garinii protein FlaB encoded by the Borrelia genome. The purpose is to predict FlaB peptide sequences that binds to MHC class I molecules for use in construction of MHC'mers designed to be used for analytical, diagnostic, prognostic, therapeutic and vaccine purposes, through the interaction of the MHC'mers with human FlaB specific T-cells. Prediction is carried out using the known preferences of the 42 HLA class 1 alleles included in the http://www.cbs.dtu.dk/services/NetMHC/database (FIG. 11).

[1069] The result of the prediction software is used to find all strong and weak 8-, 9-, 10- and 11-mer peptide binders of the 42 HLA class 1 alleles. The result can be seen in table X. The MHC class 1 alleles for whom no binders are predicted are omitted from the list. The listed peptides are ranked according to decreased binding affinity for the individual MHC alleles. Strong binders are defined as binders with an affinity value of less than 50 nM and weak binders with a value of less than 500 nM. Only peptides defined as weak or strong binders are shown.

### Example 35

### Prediction of MHC Class 1 and 2 Mycobacterium tuberculosis CFP10 Peptide Binders

[1070] This example describes the prediction of MHC class 1 and 2 Mycobacterium tuberculosis CFP10 peptide sequences for use in construction of MHC'mers designed to be used for analytical, diagnostic, prognostic, therapeutic and vaccine purposes, through the interaction of the MHC'mers with Mycobacterium tuberculosis CFP10 specific T-cells. Prediction of the 8-, 9-, 10-, 11-, 13-, 14-, 15- and 16-mer peptide sequences are carried out using the peptide generation software program described in FIG. 2. The outcome is shown in table Y.

### Example 36

### Prediction of MHC Class 1 LCMV gp1 Nonamer Peptide Binders for Mouse H-2 Kd. An Example of Non-Human MHC Peptide Binding Motifs

[1071] This example describes the directed approach, applied to the known protein sequence of a mouse virus protein LCMV gp1 in context of mouse MHC class 1.

[1072] Prediction of LCMV gp1 peptide sequences that binds to the MHC class I molecule H-2 Kd for use in construction of MHC'mers designed to be used for as analytical, diagnostic, prognostic, therapeutic and vaccine purposes, through the interaction of the MHC'mers with LCMV specific mouse T-cells. Prediction is carried out using the known preferences of the given H-2 molecules for peptide binding as laid down in the prediction program found on www.syfpeithi.de. The generated 9-mer peptides are ranked according to their binding efficiency to the individual HLA class I molecules. The output is shown in FIG. 2.

### Example 37

### Test of Predicted BclX(L) 10-Mer Binding Peptide Functionality in ELISPOT

[1073] In example 22 the best binding BclX(L) 10-mer peptide for HLA-A*0201 was identified to be YLNRHLHTWI. This peptide has then been tested in ELISPOT to see if it were able to detect the presence Bcl-X(L)-specific, CD8 positive T cells in PBL (Peripheral Blood Lymphocytes) from a breast cancer patient. PBL from a breast cancer patient was analyzed by ELISPOT ex vivo either with or without the Bcl-X(L)173-182 peptide (YLNRHLHTWI), 106 PBL/well in doublets. The number of spots was counted using the Immunospot Series 2.0 Analyzer (CTL Analysers). The result is given as number of spots above the pictures of the result as shown in FIG. 15 and it clearly shows the presence of BclX(L) specific T-cells and thereby the functionality of the peptide as compared to the absence of added peptide.

### Example 38

### Test of Predicted BclX(L) 10-Mer Binding Peptide Functionality in Flow Cytometry

[1074] In example 22 the best binding BclX(L) 10-mer peptide for HLA-A*0201 was identified to be YLNRHLHTWI. In the present example the functionality of the peptide is shown in a flow cytometric analysis of PBL from the patient was analyzed ex vivo by Flow cytometry to identify Bcl-X(L)173-182 specific CD8 T cells using the dextramer complex HLA-A2/Bc1-X(L)173-182-APC, 7-AAD-PerCP, CD3-FITC, and CD8-APC-Cy7. The dextramer complex HLA-A2/HIV-1 pol476-484-APC was used as negative control. The result (FIG. 16) clearly demonstrate that a MHC Dextramer HLA-A*0201/YLNRHLHTWI complex detects BclX(L) antigen specific CD-8 cells in the patient sample at a level of 0.03% as compared with the negative control using HIV specific MHC Dextramer.

### Example 39

### Use of BclX(L) Specific MHC Dextramer for Sorting of Antigen Specific CD8 T Cells from Patient Sample

[1075] The antigen specific CD8 positive T-cells of example 38 were sorted out during the flow cytometric analysis using the MHC Dextramer HLA-A*0201/YLNRHLHTWI. The detectable population of dextramer positive CD8 T cells was sorted as single cells into 96 well plates using the following protocol:

[1076] Small lymphocytes were gated by forward and side scatter profile, before cloning according to CD8/MHC-multimer double staining. CD8/MHC-multimer double-positive cells were sorted as single cells into 96 well plates (Nunc) already containing 10⁵ cloning mix cells/well. The cloning mix was prepared containing 10⁶ irradiated (20 Gy) lymphocytes from three healthy donors per ml in X-vivo with 5% heat-inactivated human serum, 25 mM HEPES buffer (GibcoBRL), 1 μg/ml phytohemagglutinin (PHA) (Peprotech) and 120 U/ml IL-2. The cloning mix was incubated for two hours at 37° C./5% CO₂, prior to cloning. After cloning, the plates were incubated at 37° C./5% CO₂. Every 3-4 days 50 μl fresh media were added containing IL-2 to a final concentration of 120 U/ml. Following 10-14 days of incubation, growing clones were further expanded using cloning mix cells. Consequently, each of the growing clones were transferred (split) into two or three wells (depending on the number of growing cells) of a new 96 well plate containing 5×10⁴ cloning mix cells/well. Clones that were not growing at this time were incubated for another week with IL-2, and then expanded. Subsequently, the specificity of the growing clones was tested in a ⁵¹Cr-release assay or by FACS.

[1077] Out of twenty-isolated dextramer positive CD8 T cells, ten were able to be expanded into T-cell clones.

### Example 40

### Demonstration of Specific Cytolytic Activity of Isolated BclX(L) Specific CD8 T-Cells

[1078] The ten expanded T cell clones isolated by Flow sorting as shown in example 39 were tested for their specificity by analysis in a standard 51-Cr release assay. For this purpose, T2 cells loaded with either Bcl-X(L)173-182 peptide or an irrelevant peptide (BA4697-105, GLQHWVPEL) were used as target cells. Five CD8 T-cell clones (Clone 8, 9, 10, 11, and 12) effectively lysed T2 cells pulsed with Bcl-X(L)173-182 without killing of T2 cells pulsed with an irrelevant peptide (FIG. 17). One of these BclX(L)173-182 specific CD8 T-cell clones [Clone 9] were expanded for further analyses. The remaining five expanded clones (Clone 7, 13, 15, 17, and 18) did not show specific lysis against T2 cells pulsed with Bcl-X(L)173-182 peptide (FIG. 8).

### Example 41

### Demonstration of the Cytotoxic Capacity of a BclX(L)173-182 Specific CD8 T Cell Clone Isolated by Flow Aided Sorting of Antigen (HLA-A*0201/YLNRHLHTWI) Specific T Cells

[1079] The Bcl-X(L)173-182 specific clone 9 was expanded for additional 2 weeks before the cytotoxic potential was examined further in 51Cr-release assays. Two assays were performed a Cell lysis of T2 cells pulsed with Bcl-X(L)173-182 peptide or an irrelevant peptide (BA4697-105, GLQHWVPEL) in three E:T ratios. b Cell lysis of T2 cells pulsed with different concentrations of Bcl-X(L)173-182 peptide at the E:T ratio 1:1 The result is given in FIG. 18. As can be seen the presence of the specific peptide is necessary to get killing of the target cell and the effect of the peptide is significant even at low concentrations.

### Example 42

### Synthesis of a Comprehensive Library of Antigenic Peptides of Variable Size Derived from a Full-Length Antigen Sequence

[1080] In this example it is described how virtually all of the possible 8′- to 20′-mer peptide epitopes of an antigen may be synthetically prepared by modification of the standard Fmoc peptide synthesis protocol.

[1081] N-amino acids are incorporated into a peptide of the desired sequence with one end of the sequence remaining attached to a solid support matrix. All soluble reagents can be removed from the peptide-solid support matrix by filtration and washed away at the end of each coupling step. After each of the coupling steps, and after the removal of reagents, a fraction of the generated peptides are removed and recovered from the polymeric support by cleavage of the cleavable linker that links the growing peptide to solid support.

[1082] The solid support can be a synthetic polymer that bears reactive groups such as —OH. These groups are made so that they can react easily with the carboxyl group of an N-protected amino acid, thereby covalently binding it to the polymer. The amino protecting group can then be removed and a second N-protected amino acid can be coupled to the attached amino acid. These steps are repeated until the desired sequence is obtained. At the end of the synthesis, a different reagent is applied to cleave the bond between the C-terminal amino acid and the polymer support; the peptide then goes into solution and can be obtained from the solution.

[1083] Initially, the first Fmoc amino acid (starting at the C-terminal end of the antigen sequence) is coupled to a precursor molecule on an insoluble support resin via an acid labile linker. Deprotection of Fmoc is accomplished by treatment of the amino acid with a base, usually piperidine. Before coupling the next amino acid, a fraction of the synthesized peptide (for example 0.1%) is detached from the solid support, and recovered. Then additional beads carrying only the precursor molecule including the linker (for example corresponding to 0.1% of the total amount of solid support in the reaction) is added. Then the next Fmoc amino acid is coupled utilizing a pre-activated species or in situ activation.

[1084] This cycle of amino acid coupling, removal of reagents, detachment of a small fraction of synthesized peptide and recovery of these, and activation of the immobilized peptide to prepare for the next round of coupling, goes on until the entire antigen sequence has been processed.

[1085] The recovered peptides thus represent different fragments of the antigen, with varying lengths. The peptide pool thus contains most or all of the possible peptide epitopes of the antigen, and may be used in the preparation of MHC multimers as a pool.

[1086] The entire process, including the detachment of a fraction of the peptides after each round of coupling, follows standard Fmoc peptide synthesis protocols, and involves weak acids such as TFA or TMSBr, typical scavengers such as thiol compounds, phenol and water, and involves standard protecting groups.

### Example 43

[1087] This is an example of how MHC multimers may be used for detection of cancer specific T cells in blood samples from patients.

[1088] In this example the MHC multimer used are MHC complexes coupled to fluorophor-labelled dextran (Dextramers). The dextramers are used for direct detection of TCR in flow Cytometry. The antigen origin is cancer, thus, immune monitoring of a cancer.

[1089] MHC multimers carrying cancer specific peptides is in this example used to detect the presence of cancer specific T cells in the blood from cancer patients.

[1090] Purified MHC-peptide complexes consisting of HLA-A*1101 heavy chain, human beta2 microglobulin and peptide derived from a region in Survivin (Table F) or a negative control peptide were generated by in vitro refolding, purified and biotinylated as described elsewhere herein. Biotinylated MHC-peptide complexes were then coupled to a 270 kDa dextran multimerization domain labelled with APC by interaction with streptavidin (SA) on the dextran multimerization domain. The dextran-APC-SA multimerization domain was generated as described elsewhere herein. MHC-peptide complexes were added in an amount corresponding to a ratio of three MHC-peptide molecules per SA molecule and each molecule dextran contains 3.7 SA molecule and 8.95 molecules APC. The final concentration of dextran was 3.8×10e-8 M. The following MHC(peptide)/APC dextran constructs were made:
[1091] 1. APC-SA conjugated 270 kDa dextran coupled with HLA-A*1101 in complex with beta2 microglobulin and the peptide DLAQCFFCFK derived from Survivin.
[1092] 2. APC-SA conjugated 270 kDa dextran coupled with HLA-A*1101 in complex with beta2 microglobulin and the non-sense peptide.

[1093] The binding of the above described MHC(peptide)/APC dextran was used to determine the presence of Survivin specific T cells in the blood from cancer patients by flow cytometry following a standard flow cytometry protocol.

[1094] Blood from a cancer patient is isolated and 100 ul of this blood is incubated with 10 μl of the MHC(peptide)/APC dextran constructs described above for 10 minutes in the dark at room temperature. 5 μl of each of each of the antibodies mouse-anti-human CD3/PB (clone UCHT1 from Dako), and mouse-anti-human CD8/PE (clone DK25 from Dako) are added and the incubation continues for another 20 minutes at 4° C. in the dark. The samples are then washed by adding 2 ml PBS; pH=7.2 followed by centrifugation for 5 minutes at 200×g and the supernatant removed. The washing step is repeated. The washed cells are resuspended in 400-500 μl PBS; pH=7.2 and analyzed on flowcytometer.

[1095] The presence of cells labeled with anti-CD3/PB, anti-CD8/PE and the MHC(peptide)/APC dextran construct 1 described above and thereby the presence of Survivin specific T cells in the blood. Blood analysed with MHC(peptide)/APC dextran construct 2 show no staining of CD3 and CD8 positive cells with this MHC(peptide)/APC dextran construct.

[1096] The sensitivity of the above described test may be enhanced by addition of labeled antibodies specific for activation markers expressed in or on the surface of the Survivin specific T cells.

[1097] We conclude that the MHC(peptide)/APC dextran constructs can be used to detect the presence of Survivin specific T cells in the blood of cancer.

### Example 44

[1098] This is an example of how MHC multimers may be used for detection of cancer specific T cells in blood samples from patients.

[1099] In this example the MHC multimer used are MHC complexes coupled to fluorophor-labelled multimerisation domain Streptavidin (SA, used for direct detection of TCR in flow Cytometry.

[1100] The antigen origin is cancer, thus, immune monitoring of a cancer.

[1101] MHC multimers carrying cancer specific peptides is in this example used to detect the presence of cancer specific T cells in the blood from cancer patients.

[1102] Purified MHC-peptide complexes consisting of HLA-A*1101 heavy chain, human beta2 microglobulin and peptide derived from a region in Survivin (Table F) or a negative control peptide were generated by in vitro refolding, purified and biotinylated as described elsewhere herein. Biotinylated MHC-peptide complexes are then coupled SA labelled with APC. MHC-peptide complexes were added in an amount corresponding to a ratio of 5 MHC-peptide molecules per SA molecule. Then SA/APC carrying four MHC complexes were purified from free SA, free monomeric MHC complex, SA carrying three, two and one MHC complexes.

[1103] The following SA-MHC(peptide)/APC tetramers are made:
[1104] 3. APC-SA coupled with HLA-A*1101 in complex with beta2 microglobulin and the peptide DLAQCFFCFK derived from Survivin.
[1105] 4. APC-SA coupled with HLA-A*1101 in complex with beta2 microglobulin and the non-sense peptide.

[1106] The binding of the above described MHC(peptide)/APC dextran can be used to determine the presence of Survivin specific T cells in the blood from cancer patients by flow cytometry following a standard flow cytometry protocol.

[1107] Blood from a cancer patient is isolated and 100 ul of this blood is incubated with either of the SA-MHC(peptide)/APC tetramers described above for 10 minutes in the dark at room temperature. 5 μl of each of each of the antibodies mouse-anti-human CD3/PB (clone UCHT1 from Dako) and mouse-anti-human CD8/PE (clone DK25 from Dako) are added and the incubation continued for another 20 minutes at 4° C. in the dark. The samples are then washed by adding 2 ml PBS; pH=7.2 followed by centrifugation for 5 minutes at 200×g and the supernatant removed. The washing step is repeated. The washed cells are resuspended in 400-500 μl PBS; pH=7.2 and analyzed on flowcytometer.

[1108] The presence of cells labeled with anti-CD3/PB, anti-CD8/PE and the SA-MHC(peptide)/APC tetramers 3 described above and thereby the presence of Survivin specific T cells in the blood. Blood analysed with SA-MHC(peptide)/APC tetramers 4 should show no staining of CD3 and CD8 positive cells with this SA-MHC(peptide)/APC tetramer.

[1109] The sensitivity of the above described test may be enhanced by addition of labeled antibodies specific for activation markers expressed in or on the surface of the Survivin specific T cells.

[1110] We conclude that the APC-SA coupled MHC(peptide) constructs may be used to detect the presence of Survivin specific T cells in the blood of cancer patients.

### Example 45

[1111] This is an example of how MHC multimers may be used for detection of cancer specific T cells in blood samples from patients.

[1112] In this example the MHC multimer used are MHC complexes coupled to any fluorophor-labelled multimerisation as described elsewhere herein. The MHC multimers are used for direct detection of TCR in flow Cytometry. The antigen origin is cancer, thus, immune monitoring of a cancer.

[1113] MHC multimers carrying cancer specific peptides is in this example used to detect the presence of cancer specific T cells in the blood from cancer patients.

[1114] Purified MHC-peptide complexes consisting of HLA-A*1101 heavy chain, human beta2 microglobulin and peptide derived a region in Survivin (Table F) or a negative control peptide were generated by in vitro refolding and purified or purified from antigen presenting cells. MHC-peptide complexes are then coupled to a multimerisation domain together with APC.

[1115] The following MHC(peptide)/APC multimers are made:
[1116] 5. APC-multimerisation domain coupled with HLA-A*1101 in complex with beta2 microglobulin and the peptide DLAQCFFCFK derived from Survivin.
[1117] 6. APC-multimerisation domain coupled with HLA-A*1101 in complex with beta2 microglobulin and the non-sense peptide.

[1118] The binding of the above described MHC(peptide)/APC multimers can be used to determine the presence of Survivin specific T cells in the blood from cancer patients by flow cytometry following a standard flow cytometry protocol.

[1119] Blood from a cancer patient is isolated and 100 ul of this blood is incubated with either of the MHC(peptide)/APC multimers described above for 10 minutes in the dark at room temperature. 5 μl of each of each of the antibodies mouse-anti-human CD3/PB (clone UCHT1 from Dako) and mouse-anti-human CD8/PE (clone DK25 from Dako) are added and the incubation continued for another 20 minutes at 4° C. in the dark. The samples are then washed by adding 2 ml PBS; pH=7.2 followed by centrifugation for 5 minutes at 200×g and the supernatant removed. The washing step is repeated. The washed cells are resuspended in 400-500 μl PBS; pH=7.2 and analyzed on flowcytometer.

[1120] The presence of cells labeled with anti-CD3/PB, anti-CD8/PE and the MHC(peptide)/APC multimers 5 described above and thereby the presence of Survivin specific T cells in the blood. Blood analysed with MHC(peptide)/APC multimer 6 should show no staining of CD3 and CD8 positive cells with this SA-MHC(peptide)/APC multimer.

[1121] The sensitivity of the above described test may be enhanced by addition of labeled antibodies specific for activation markers expressed in or on the surface of the Survivin specific T cells.

[1122] We conclude that the APC-multimerisation domain coupled MHC(peptide) constructs may be used to detect the presence of Survivin specific T cells in the blood of cancer patients.

### Example 46

[1123] This is an example of how MHC multimers may be used for detection of Epstein-Barr Virus (EBV) specific T cells in blood samples from humans infected with EBV.

[1124] In this example the MHC multimer used are MHC complexes coupled to fluorophor-labelled dextran (Dextramers). The dextramers are used for direct detection of TCR in flow cytometry.

[1125] The antigen origin is EBV, thus, immune monitoring of EBV infection MHC multimers carrying EBV specific peptides is in this example used to detect the presence of EBV specific T cells in the blood of patients infected with Epstein-Barr virus.

[1126] Purified MHC-peptide complexes consisting of HLA-B*0702 heavy chain, human beta2 microglobulin and peptide derived from a region in EBV nuclear antigen (EBNA) or a negative control peptide are generated by in vitro refolding, purified and biotinylated as described elsewhere herein. Biotinylated MHC-peptide complexes are then coupled to a 270 kDa dextran multimerization domain labelled with APC by interaction with streptavidin (SA) on the dextran multimerization domain. The dextran-APC-SA multimerization domain is generated as described elsewhere herein. MHC-peptide complexes are added in an amount corresponding to a ratio of three MHC-peptide molecules per SA molecule and each molecule dextran contains 3.7 SA molecule and 8.95 molecules APC. The final concentration of dextran is 3.8×10e-8 M. The following MHC(peptide)/APC dextran constructs are made:
[1127] 7. APC-SA conjugated 270 kDa dextran coupled with HLA-B*0702 in complex with beta2 microglobulin and the peptide RPPIFIRRL derived from EBNA 3A.
[1128] 8. APC-SA conjugated 270 kDa dextran coupled with HLA-B*0702 in complex with beta2 microglobulin and the peptide QPRAPIRPI derived from EBNA 6.
[1129] 9. APC-SA conjugated 270 kDa dextran coupled with HLA-B*0702 in complex with beta2 microglobulin and the HIV peptide TPGPGVRYPL.

[1130] The binding of the above described MHC(peptide)/APC dextran is used to determine the presence of EBV specific T cells in the blood from EBV infected individuals by flow cytometry following a standard flow cytometry protocol.

[1131] Blood from a patient with EBV infection is isolated and 100 ul of this blood is incubated with 10 μl of the MHC(peptide)/APC dextran constructs described above for 10 minutes in the dark at room temperature. 5 μl of each of each of the antibodies mouse-anti-human CD3/PB (clone UCHT1 from Dako), and mouse-anti-human CD8/PE (clone DK25 from Dako) are added and the incubation continues for another 20 minutes at 4° C. in the dark. The samples are then washed by adding 2 ml PBS; pH=7.2 followed by centrifugation for 5 minutes at 300×g and the supernatant removed. The washing step is repeated. The washed cells are resuspended in 400-500 μl PBS; pH=7.2 and analyzed on flowcytometer.

[1132] The presence of cells labeled with anti-CD3/PB, anti-CD8/PE and either of the MHC(peptide)/APC dextran construct 1 or 2 described above and thereby the presence of EBV specific T cells indicate that the patient are infected with Epstein-Barr virus. Blood analysed with MHC(peptide)/APC dextran construct 3 show no staining of CD3 and CD8 positive cells with this MHC(peptide)/APC dextran construct.

[1133] The sensitivity of the above described test may be enhanced by addition of labeled antibodies specific for activation markers expressed in or on the surface of the EBV specific T cells.

[1134] We conclude that the MHC(peptide)/APC dextran constructs can be used to detect the presence of EBV specific T cells in the blood of patients infected with Epstein-Barr virus.

### Example 47

[1135] This is an example of how MHC multimers may be used for detection of Epstein-Barr Virus (EBV) specific T cells in blood samples from humans infected with EBV.

[1136] In this example the MHC multimer used are MHC complexes coupled to fluorophor-labelled multimerisation domain Streptavidin (SA), used for direct detection of TCR in flow cytometry.

[1137] The antigen origin is EBV, thus, immune monitoring of EBV infection MHC multimers carrying EBV specific peptides is in this example used to detect the presence of EBV specific T cells in the blood of patients infected with Epstein-Barr virus.

[1138] Purified MHC-peptide complexes consisting of HLA-B*0702 heavy chain, human beta2 microglobulin and peptide derived from a region in EBV nuclear antigen (EBNA) or a negative control peptide were generated by in vitro refolding, purified and biotinylated as described elsewhere herein. Biotinylated MHC-peptide complexes are then coupled SA labelled with APC. MHC-peptide complexes were added in an amount corresponding to a ratio of 5 MHC-peptide molecules per SA molecule. Then SA/APC carrying four MHC complexes were purified from free SA, free monomeric MHC complex, SA carrying three, two and one MHC complexes.

[1139] The following SA-MHC(peptide)/APC tetramers are made:
[1140] 10. APC-SA coupled with HLA-B*0702 in complex with beta2 microglobulin and the peptide RPPIFIRRL derived from EBNA 3A.
[1141] 11. APC-SA coupled with HLA-B*0702 in complex with beta2 microglobulin and the peptide QPRAPIRPI derived from EBNA 6.
[1142] 12. APC-SA coupled with HLA-B*0702 in complex with beta2 microglobulin and the HIV peptide TPGPGVRYPL.

[1143] The binding of the above described MHC(peptide)/APC dextran can be used to determine the presence of EBV specific T cells in the blood from Epstein-Barr virus infected individuals by flow cytometry following a standard flow cytometry protocol.

[1144] Blood from a patient with EBV is isolated and 100 ul of this blood is incubated with either of the SA-MHC(peptide)/APC tetramers described above for 10 minutes in the dark at room temperature. 5 μl of each of each of the antibodies mouse-anti-human CD3/PB (clone UCHT1 from Dako) and mouse-anti-human CD8/PE (clone DK25 from Dako) are added and the incubation continued for another 20 minutes at 4° C. in the dark. The samples are then washed by adding 2 ml PBS; pH=7.2 followed by centrifugation for 5 minutes at 200×g and the supernatant removed. The washing step is repeated. The washed cells are resuspended in 400-500 μl PBS; pH=7.2 and analyzed on flowcytometer.

[1145] The presence of cells labeled with anti-CD3/PB, anti-CD8/PE and either of the SA-MHC(peptide)/APC tetramers 4 or 5 described above and thereby the presence of EBV specific T cells will indicate that the patient are infected with Epstein-Barr virus. Blood analysed with SA-MHC(peptide)/APC tetramers 6 should show no staining of CD3 and CD8 positive cells with this SA-MHC(peptide)/APC tetramer.

[1146] The sensitivity of the above described test may be enhanced by addition of labeled antibodies specific for activation markers expressed in or on the surface of the EBV specific T cells.

[1147] We conclude that the APC-SA coupled MHC(peptide) constructs may be used to detect the presence of EBV specific T cells in the blood of patients infected with Epstein-Barr virus

### Example 48

[1148] This is an example of how MHC multimers may be used for detection of Epstein-Barr Virus (EBV) specific T cells in blood samples from humans infected with EBV.

[1149] In this example the MHC multimer used are MHC complexes coupled to any fluorophor-labelled multimerisation as described elsewhere herein. The MHC multimers are used for direct detection of TCR in flow cytometry. The antigen origin is EBV, thus, immune monitoring of EBV infection

[1150] MHC multimers carrying EBV specific peptides is in this example used to detect the presence of EBV specific T cells in the blood of patients infected with Epstein-Barr virus.

[1151] Purified MHC-peptide complexes consisting of HLA-B*0702 heavy chain, human beta2 microglobulin and peptide derived a region in EBV nuclear antigen (EBNA) or a negative control peptide were generated by in vitro refolding and purified or purified from antigen presenting cells. MHC-peptide complexes are then coupled to a multimerisation domain together with APC.

[1152] The following MHC(peptide)/APC multimers are made:
[1153] 13. APC-multimerisation domain coupled with HLA-B*0702 in complex with beta2 microglobulin and the peptide RPPIFIRRL derived from EBNA 3A.
[1154] 14. APC-multimerisation domain coupled with HLA-B*0702 in complex with beta2 microglobulin and the peptide QPRAPIRPI derived from EBNA 6.
[1155] 15. APC-multimerisation domain coupled with HLA-A*0201 in complex with beta2 microglobulin and the HIV peptide TPGPGVRYPL.

[1156] The binding of the above described MHC(peptide)/APC multimers can be used to determine the presence of EBV specific T cells in the blood from EBV infected individuals by flow cytometry following a standard flow cytometry protocol.

[1157] Blood from a patient with EBV infection is isolated and 100 ul of this blood is incubated with either of the MHC(peptide)/APC multimers described above for 10 minutes in the dark at room temperature. 5 μl of each of each of the antibodies mouse-anti-human CD3/PB (clone UCHT1 from Dako) and mouse-anti-human CD8/PE (clone DK25 from Dako) are added and the incubation continued for another 20 minutes at 4° C. in the dark. The samples are then washed by adding 2 ml PBS; pH=7.2 followed by centrifugation for 5 minutes at 200×g and the supernatant removed. The washing step is repeated. The washed cells are resuspended in 400-500 μl PBS; pH=7.2 and analyzed on flowcytometer.

[1158] The presence of cells labeled with anti-CD3/PB, anti-CD8/PE and either of the MHC(peptide)/APC multimers 7 or 8 described above and thereby the presence of EBV specific T cells will indicate that the patient are infected with Epstein-Barr virus. Blood analysed with MHC(peptide)/APC multimer 9 should show no staining of CD3 and CD8 positive cells with this SA-MHC(peptide)/APC multimer.

[1159] The sensitivity of the above described test may be enhanced by addition of labeled antibodies specific for activation markers expressed in or on the surface of the EBV specific T cells.

[1160] We conclude that the APC-multimerisation domain coupled MHC(peptide) constructs may be used to detect the presence of EBV specific T cells in the blood of patients infected with Epstein-Barr virus.

### Example 49

[1161] This is an example of how MHC multimers may be used for detection of influenza matrix peptide in blood samples from humans infected with influenza.

[1162] In this example the MHC multimer used are MHC complexes coupled to fluorophor-labelled dextran (Dextramers). The dextramers are used for direct detection of TCR in flow cytometry. The antigen origin is Influenza, thus, immune monitoring of influenza.

[1163] The MHC multimer used are MHC complexes coupled to labeled dextran.

[1164] MHC multimers carrying influenza specific peptides is in this example used to detect the presence of influenza specific T cells in the blood of patients infected with influenza virus.

[1165] Purified MHC-peptide complexes consisting of HLA-A*0201 heavy chain, human beta2 microglobulin and peptide derived from a region in influenza matrix peptide (Flu-MP) or a negative control peptide were generated by in vitro refolding, purified and biotinylated as described elsewhere herein. Biotinylated MHC-peptide complexes were then coupled to a 270 kDa dextran multimerization domain labelled with APC by interaction with streptavidin (SA) on the dextran multimerization domain. The dextran-APC-SA multimerization domain was generated as described elsewhere herein. MHC-peptide complexes were added in an amount corresponding to a ratio of three MHC-peptide molecules per SA molecule and each molecule dextran contains 3.7 SA molecule and 8.95 molecules APC. The final concentration of dextran was 3.8×10e-8 M. The following MHC(peptide)/APC dextran constructs were made:
[1166] 16. APC-SA conjugated 270 kDa dextran coupled with HLA-A*0201 in complex with beta2 microglobulin and the peptide GILGFVFTL derived from Flu-MP.
[1167] 17. APC-SA conjugated 270 kDa dextran coupled with HLA-A*0201 in complex with beta2 microglobulin and the non-sense peptide GLAGDVSAV.

[1168] The binding of the above described MHC(peptide)/APC dextran was used to determine the presence of influenza specific T cells in the blood from influenza infected individuals by flow cytometry following a standard flow cytometry protocol.

[1169] Blood from a influenza infected patient is isolated and 100 ul of this blood is incubated with 10 μl of the MHC(peptide)/APC dextran constructs described above for 10 minutes in the dark at room temperature. 5 μl of each of each of the antibodies mouse-anti-human CD3/PB (clone UCHT1 from Dako), and mouse-anti-human CD8/PE (clone DK25 from Dako) are added and the incubation continues for another 20 minutes at 4° C. in the dark. The samples are then washed by adding 2 ml PBS; pH=7.2 followed by centrifugation for 5 minutes at 200×g and the supernatant removed. The washing step is repeated. The washed cells are resuspended in 400-500 μl PBS; pH=7.2 and analyzed on flowcytometer.

[1170] The presence of cells labeled with anti-CD3/PB, anti-CD8/PE and the MHC(peptide)/APC dextran construct 1 described above and thereby the presence of influenza specific T cells indicate that the patient are infected with influenza virus. Blood analysed with MHC(peptide)/APC dextran construct 2 show no staining of CD3 and CD8 positive cells with this MHC(peptide)/APC dextran construct.

[1171] The sensitivity of the above described test may be enhanced by addition of labeled antibodies specific for activation markers expressed in or on the surface of the influenza specific T cells.

[1172] We conclude that the MHC(peptide)/APC dextran constructs can be used to detect the presence of influenza specific T cells in the blood of patients infected with influenza virus.

### Example 50

[1173] This is an example of how MHC multimers may be used for detection of influenza matrix peptide in blood samples from humans infected with influenza.

[1174] In this example the MHC multimer used are MHC complexes coupled to fluorophor-labelled multimerisation domain Streptavidin (SA), used for direct detection of TCR in flow cytometry. The antigen origin is Influenza, thus, immune monitoring of influenza.

[1175] The MHC multimer used are MHC complexes coupled to labeled dextran.

[1176] MHC multimers carrying influenza specific peptides is in this example used to detect the presence of influenza specific T cells in the blood of patients infected with influenza virus.

[1177] Purified MHC-peptide complexes consisting of HLA-A*0201 heavy chain, human beta2 microglobulin and peptide derived from a region in influenza matrix peptide (Flu-MP) or a negative control peptide were generated by in vitro refolding, purified and biotinylated as described elsewhere herein. Biotinylated MHC-peptide complexes are then coupled SA labelled with APC. MHC-peptide complexes were added in an amount corresponding to a ratio of 5 MHC-peptide molecules per SA molecule. Then SA/APC carrying four MHC complexes were purified from free SA, free monomeric MHC complex, SA carrying three, two and one MHC complexes.

[1178] The following SA-MHC(peptide)/APC tetramers are made:
[1179] 18. APC-SA coupled with HLA-A*0201 in complex with beta2 microglobulin and the peptide GILGFVFTL derived from Flu-MP.
[1180] 19. APC-SA coupled with HLA-A*0201 in complex with beta2 microglobulin and the non-sense peptide GLAGDVSAV.

[1181] The binding of the above described MHC(peptide)/APC dextran can be used to determine the presence of influenza specific T cells in the blood from influenza infected individuals by flow cytometry following a standard flow cytometry protocol.

[1182] Blood from a cancer patient is isolated and 100 ul of this blood is incubated with either of the SA-MHC(peptide)/APC tetramers described above for 10 minutes in the dark at room temperature. 5 μl of each of each of the antibodies mouse-anti-human CD3/PB (clone UCHT1 from Dako) and mouse-anti-human CD8/PE (clone DK25 from Dako) are added and the incubation continued for another 20 minutes at 4° C. in the dark. The samples are then washed by adding 2 ml PBS; pH=7.2 followed by centrifugation for 5 minutes at 200×g and the supernatant removed. The washing step is repeated. The washed cells are resuspended in 400-500 μl PBS; pH=7.2 and analyzed on flowcytometer.

[1183] The presence of cells labeled with anti-CD3/PB, anti-CD8/PE and the SA-MHC(peptide)/APC tetramers 3 described above and thereby the presence of influenza specific T cells will indicate that the patient are infected with influenza virus. Blood analysed with SA-MHC(peptide)/APC tetramers 4 should show no staining of CD3 and CD8 positive cells with this SA-MHC(peptide)/APC tetramer.

[1184] The sensitivity of the above described test may be enhanced by addition of labeled antibodies specific for activation markers expressed in or on the surface of the influenza specific T cells.

[1185] We conclude that the APC-SA coupled MHC(peptide) constructs may be used to detect the presence of influenza specific T cells in the blood of patients infected with influenza virus.

### Example 51

[1186] This is an example of how MHC multimers may be used for detection of influenza matrix peptide in blood samples from humans infected with influenza.

[1187] In this example the MHC multimer used are MHC complexes coupled to any fluorophor-labelled multimerisation as described elsewhere herein. The MHC multimers are used for direct detection of TCR in flow cytometry. The antigen origin is Influenza, thus, immune monitoring of influenza.

[1188] The MHC multimer used are MHC complexes coupled to labeled dextran.

[1189] MHC multimers carrying influenza specific peptides is in this example used to detect the presence of influenza specific T cells in the blood of patients infected with influenza virus.

[1190] Purified MHC-peptide complexes consisting of HLA-A*0201 heavy chain, human beta2 microglobulin and peptide derived a region in influenza matrix peptide (Flu-MP) or a negative control peptide were generated by in vitro refolding and purified or purified from antigen presenting cells. MHC-peptide complexes are then coupled to a multimerisation domain together with APC.

[1191] The following MHC(peptide)/APC multimers are made:
[1192] 20. APC-multimerisation domain coupled with HLA-A*0201 in complex with beta2 microglobulin and the peptide GILGFVFTL derived from Flu-MP.
[1193] 21. APC-multimerisation domain coupled with HLA-A*0201 in complex with beta2 microglobulin and the non-sense peptide GLAGDVSAV.

[1194] The binding of the above described MHC(peptide)/APC multimers can be used to determine the presence of influenza specific T cells in the blood from influenza infected by flow cytometry following a standard flow cytometry protocol.

[1195] Blood from a influenza infected patient is isolated and 100 ul of this blood is incubated with either of the MHC(peptide)/APC multimers described above for 10 minutes in the dark at room temperature. 5 μl of each of each of the antibodies mouse-anti-human CD3/PB (clone UCHT1 from Dako) and mouse-anti-human CD8/PE (clone DK25 from Dako) are added and the incubation continued for another 20 minutes at 4° C. in the dark. The samples are then washed by adding 2 ml PBS; pH=7.2 followed by centrifugation for 5 minutes at 200×g and the supernatant removed. The washing step is repeated. The washed cells are resuspended in 400-500 μl PBS; pH=7.2 and analyzed on flowcytometer.

[1196] The presence of cells labeled with anti-CD3/PB, anti-CD8/PE and the MHC(peptide)/APC multimers 5 described above and thereby the presence of influenza specific T cells will indicate that the patient are infected with influenza virus. Blood analysed with MHC(peptide)/APC multimer 6 should show no staining of CD3 and CD8 positive cells with this SA-MHC(peptide)/APC multimer.

[1197] The sensitivity of the above described test may be enhanced by addition of labeled antibodies specific for activation markers expressed in or on the surface of the influenza specific T cells.

[1198] We conclude that the APC-multimerisation domain coupled MHC(peptide) constructs may be used to detect the presence of influenza specific T cells in the blood of patients infected with influenza virus.

### Example 52

[1199] This is an example of how MHC multimers may be used for detection of Multiple sclerosis (MS) specific T cells in blood samples from MS patients.

[1200] In this example the MHC multimer used are MHC complexes coupled to fluorophor-labelled dextran (Dextramers). The dextramers are used for direct detection of TCR in flow Cytometry. The antigen origin is MS, thus, immune monitoring of MS.

[1201] MHC multimers carrying MS specific peptides is in this example used to detect the presence of MS specific T cells in the blood of MS patients.

[1202] Purified MHC-peptide complexes consisting of HLA-DR2 heavy chains and peptide derived from a region in Myelin Basic Protein (MBP) in MS or a negative control peptide are generated as described elsewhere herein. Biotinylated MHC-peptide complexes are then coupled to a 270 kDa dextran multimerization domain labelled with APC by interaction with streptavidin (SA) on the dextran multimerization domain. The dextran-APC-SA multimerization domain was generated as described elsewhere herein. MHC-peptide complexes are added in an amount corresponding to a ratio of three MHC-peptide molecules per SA molecule and each molecule dextran contains 3.7 SA molecule and 8.95 molecules APC. The final concentration of dextran was 3.8×10e-8 M. The following MHC(peptide)/APC dextran constructs are made:
[1203] 22. APC-SA conjugated 270 kDa dextran coupled with HLA-DR2 in complex with the peptide MBP 83-102 YDENPVVHFF KNIVTPRTPP derived from Multiple sclerosis.
[1204] 23. APC-SA conjugated 270 kDa dextran coupled with HLA-DR2 in complex with the peptide MBP 144-163 VDAQGTLSKIFKLGGRDSRS derived from Multiple sclerosis.
[1205] 24. APC-SA conjugated 270 kDa dextran coupled with HLA-DR2 in complex with a non-sense peptide.

[1206] The binding of the above described MHC(peptide)/APC dextran was used to determine the presence of MS specific T cells in the blood from MS patients by flow cytometry following a standard flow cytometry protocol.

[1207] Blood from a MS patient is isolated and 100 ul of this blood is incubated with 10 μl of the MHC(peptide)/APC dextran constructs described above for 10 minutes in the dark at room temperature. 5 μl of each of each of the antibodies mouse-anti-human CD3/PB (clone UCHT1 from Dako), and mouse-anti-human CD4/PE (clone MT310 from Dako) are added and the incubation continues for another 20 minutes at 4° C. in the dark. The samples are then washed by adding 2 ml PBS; pH=7.2 followed by centrifugation for 5 minutes at 200×g and the supernatant removed. The washing step is repeated. The washed cells are resuspended in 400-500 μl PBS; pH=7.2 and analyzed on flowcytometer.

[1208] The presence of cells labeled with anti-CD3/PB, anti-CD4/PE and either of the MHC(peptide)/APC dextran construct 1 or 2 described above and thereby the presence of MS specific T cells in the blood. Blood analysed with MHC(peptide)/APC dextran construct 3 show no staining of CD3 and CD4 positive cells with this MHC(peptide)/APC dextran construct.

[1209] The sensitivity of the above described test may be enhanced by addition of labeled antibodies specific for activation markers expressed in or on the surface of the MS specific T cells.

[1210] We conclude that the MHC(peptide)/APC dextran constructs can be used to detect the presence of MS specific T cells in the blood of MS patients.

### Example 53

[1211] This is an example of how MHC multimers may be used for detection of Multiple sclerosis (MS) specific T cells in blood samples from MS patients.

[1212] In this example the MHC multimer used are MHC complexes coupled to fluorophor-labelled multimerisation domain Streptavidin (SA, used for direct detection of TCR in flow Cytometry. The antigen origin is MS, thus, immune monitoring of MS.

[1213] MHC multimers carrying MS specific peptides is in this example used to detect the presence of MS specific T cells in the blood of MS patients.

[1214] Purified MHC-peptide complexes consisting of HLA-DR2 heavy chains and peptide derived from a region in Myelin Basic Protein (MBP) in MS or a negative control peptide are generated as described elsewhere herein. Biotinylated MHC-peptide complexes are then coupled SA labelled with APC. MHC-peptide complexes are added in an amount corresponding to a ratio of 5 MHC-peptide molecules per SA molecule. Then SA/APC carrying four MHC complexes are purified from free SA, free monomeric MHC complex, SA carrying three, two and one MHC complexes.

[1215] The following SA-MHC(peptide)/APC tetramers are made:
[1216] 25. APC-SA coupled with HLA-DR2 in complex with the peptide MBP 83-102 YDENPVVHFFKNIVTPRTPP derived from Multiple sclerosis.
[1217] 26. APC-SA coupled with HLA-DR2 in complex with the peptide MBP 144-163 VDAQGTLSKIFKLGGRDSRS derived from Multiple sclerosis.
[1218] 27. APC-SA coupled with HLA-DR2 in complex with a non-sense peptide.

[1219] The binding of the above described MHC(peptide)/APC dextran can be used to determine the presence of MS specific T cells in the blood from MS patients by flow cytometry following a standard flow cytometry protocol.

[1220] Blood from a MS patient is isolated and 100 ul of this blood is incubated with either of the SA-MHC(peptide)/APC tetramers described above for 10 minutes in the dark at room temperature. 5 μl of each of each of the antibodies mouse-anti-human CD3/PB (clone UCHT1 from Dako) and mouse-anti-human CD4/PE (clone MT310 from Dako) are added and the incubation continued for another 20 minutes at 4° C. in the dark. The samples are then washed by adding 2 ml PBS; pH=7.2 followed by centrifugation for 5 minutes at 200×g and the supernatant removed. The washing step is repeated. The washed cells are resuspended in 400-500 μl PBS; pH=7.2 and analyzed on flowcytometer.

[1221] The presence of cells labeled with anti-CD3/PB, anti-CD4/PE and either of the SA-MHC(peptide)/APC tetramers 4 or 5 described above and thereby the presence of MS specific T cells in the blood. Blood analysed with SA-MHC(peptide)/APC tetramers 6 should show no staining of CD3 and CD4 positive cells with this SA-MHC(peptide)/APC tetramer.

[1222] The sensitivity of the above described test may be enhanced by addition of labeled antibodies specific for activation markers expressed in or on the surface of the MS specific T cells.

[1223] We conclude that the APC-SA coupled MHC(peptide) constructs may be used to detect the presence of MS specific T cells in the blood of MS patients.

### Example 54

[1224] This is an example of how MHC multimers may be used for detection of Multiple sclerosis (MS) specific T cells in blood samples from MS patients.

[1225] In this example the MHC multimer used are MHC complexes coupled to any fluorophor-labelled multimerisation as described elsewhere herein. The MHC multimers are used for direct detection of TCR in flow Cytometry. The antigen origin is MS, thus, immune monitoring of MS.

[1226] MHC multimers carrying MS specific peptides is in this example used to detect the presence of MS specific T cells in the blood of MS patients.

[1227] Purified MHC-peptide complexes consisting of HLA-DR2 heavy chains and peptide derived from a region in Myelin Basic Protein (MBP) in MS or a negative control peptide are generated. MHC-peptide complexes are then coupled to a multimerisation domain together with APC. The following MHC(peptide)/APC multimers are made:
[1228] 28. APC-multimerisation domain coupled with HLA-DR2 in complex with the peptide MBP 83-102 YDENPVVHFFKNIVTPRTPP derived from Multiple sclerosis.
[1229] 29. APC-multimerisation domain coupled with HLA-DR2 in complex with the peptide MBP 144-163 VDAQGTLSKIFKLGGRDSRS derived from Multiple sclerosis.
[1230] 30. APC-multimerisation domain coupled with HLA-DR2 in complex with a non-sense peptide.

[1231] The binding of the above described MHC(peptide)/APC multimers can be used to determine the presence of MS specific T cells in the blood from MS patients by flow cytometry following a standard flow cytometry protocol.

[1232] Blood from a MS patient is isolated and 100 ul of this blood is incubated with either of the MHC(peptide)/APC multimers described above for 10 minutes in the dark at room temperature. 5 μl of each of each of the antibodies mouse-anti-human CD3/PB (clone UCHT1 from Dako) and mouse-anti-human CD4/PE (clone MT310 from Dako) are added and the incubation continued for another 20 minutes at 4° C. in the dark. The samples are then washed by adding 2 ml PBS; pH=7.2 followed by centrifugation for 5 minutes at 200×g and the supernatant removed. The washing step is repeated. The washed cells are resuspended in 400-500 μl PBS; pH=7.2 and analyzed on flowcytometer.

[1233] The presence of cells labeled with anti-CD3/PB, anti-CD4/PE and either of the MHC(peptide)/APC multimers 7 or 8 described above and thereby the presence of MS specific T cells in the blood. Blood analysed with MHC(peptide)/APC multimer 9 should show no staining of CD3 and CD4 positive cells with this SA-MHC(peptide)/APC multimer.

[1234] The sensitivity of the above described test may be enhanced by addition of labeled antibodies specific for activation markers expressed in or on the surface of the MS specific T cells.

[1235] We conclude that the APC-multimerisation domain coupled MHC(peptide) constructs may be used to detect the presence of MS specific T cells in the blood of MS patients.

### Example 55

[1236] This is an example of how MHC multimers may be used for detection of Rheumatoid arthritis (RA) specific T cells in blood samples from RA patients.

[1237] In this example the MHC multimer used are MHC complexes coupled to fluorophor-labelled dextran (Dextramers). The dextramers are used for direct detection of TCR in flow cytometry. The antigen origin is RA, thus, immune monitoring of RA.

[1238] MHC multimers carrying RA specific peptides is in this example used to detect the presence of RA specific T cells in the blood of MS patients.

[1239] Purified MHC-peptide complexes consisting of HLA-DR4 heavy chains and peptide derived from a region in Collagen Type II (CII) in RA or a negative control peptide are generated as described elsewhere herein. Biotinylated MHC-peptide complexes are then coupled to a 270 kDa dextran multimerization domain labelled with APC by interaction with streptavidin (SA) on the dextran multimerization domain. The dextran-APC-SA multimerization domain was generated as described elsewhere herein. MHC-peptide complexes are added in an amount corresponding to a ratio of three MHC-peptide molecules per SA molecule and each molecule dextran contains 3.7 SA molecule and 8.95 molecules APC. The final concentration of dextran was 3.8×10e-8 M. The following MHC(peptide)/APC dextran constructs are made:
[1240] 31. APC-SA conjugated 270 kDa dextran coupled with HLA-DR4 in complex with the peptide CII 261-273 AGFKGEQGPKGEP derived from Rheumatoid arthritis
[1241] 32. APC-SA conjugated 270 kDa dextran coupled with HLA-DR4 in complex with a non-sense peptide.

[1242] The binding of the above described MHC(peptide)/APC dextran was used to determine the presence of RA specific T cells in the blood from RA patients by flow cytometry following a standard flow cytometry protocol.

Blood from a RA patient is isolated and 100 ul of this blood is incubated with 10 μl of the MHC(peptide)/APC dextran constructs described above for 10 minutes in the dark at room temperature. 5 μl of each of each of the antibodies mouse-anti-human CD3/PB (clone UCHT1 from Dako), and mouse-anti-human CD4/PE (clone MT310 from Dako) are added and the incubation continues for another 20 minutes at 4° C. in the dark. The samples are then washed by adding 2 ml PBS; pH=7.2 followed by centrifugation for 5 minutes at 200×g and the supernatant removed. The washing step is repeated. The washed cells are resuspended in 400-500 μl PBS; pH=7.2 and analyzed on flowcytometer.

[1243] The presence of cells labeled with anti-CD3/PB, anti-CD4/PE and the MHC(peptide)/APC dextran construct 1 described above and thereby the presence of RA specific T cells in the blood. Blood analysed with MHC(peptide)/APC dextran construct 2 show no staining of CD3 and CD4 positive cells with this MHC(peptide)/APC dextran construct.

[1244] The sensitivity of the above described test may be enhanced by addition of labeled antibodies specific for activation markers expressed in or on the surface of the RA specific T cells.

[1245] We conclude that the MHC(peptide)/APC dextran constructs can be used to detect the presence of RA specific T cells in the blood of RA patients.

### Example 56

[1246] This is an example of how MHC multimers may be used for detection of Rheumatoid arthritis (RA) specific T cells in blood samples from RA patients In this example the MHC multimer used are MHC complexes coupled to fluorophor-labelled multimerisation domain Streptavidin (SA), used for direct detection of TCR in flow cytometry. The antigen origin is RA, thus, immune monitoring of RA.

[1247] MHC multimers carrying RA specific peptides is in this example used to detect the presence of RA specific T cells in the blood of RA patients.

[1248] Purified MHC-peptide complexes consisting of HLA-DR4 heavy chains and peptide derived from a region in Collagen type II (CII) in RA or a negative control peptide are generated as described elsewhere herein. Biotinylated MHC-peptide complexes are then coupled SA labelled with APC. MHC-peptide complexes are added in an amount corresponding to a ratio of 5 MHC-peptide molecules per SA molecule. Then SA/APC carrying four MHC complexes are purified from free SA, free monomeric MHC complex, SA carrying three, two and one MHC complexes.

[1249] The following SA-MHC(peptide)/APC tetramers are made:
[1250] 33. APC-SA coupled with HLA-DR4 in complex with the peptide CII 261-273 AGFKGEQGPKGEP derived from Rheumatoid arthritis.
[1251] 34. APC-SA coupled with HLA-DR4 in complex with a non-sense peptide.

[1252] The binding of the above described MHC(peptide)/APC dextran can be used to determine the presence of RA specific T cells in the blood from RA patients by flow cytometry following a standard flow cytometry protocol.

[1253] Blood from a RA patient is isolated and 100 ul of this blood is incubated with either of the SA-MHC(peptide)/APC tetramers described above for 10 minutes in the dark at room temperature. 5 μl of each of each of the antibodies mouse-anti-human CD3/PB (clone UCHT1 from Dako) and mouse-anti-human CD4/PE (clone MT310 from Dako) are added and the incubation continued for another 20 minutes at 4° C. in the dark. The samples are then washed by adding 2 ml PBS; pH=7.2 followed by centrifugation for 5 minutes at 200×g and the supernatant removed. The washing step is repeated. The washed cells are resuspended in 400-500 μl PBS; pH=7.2 and analyzed on flowcytometer.

[1254] The presence of cells labeled with anti-CD3/PB, anti-CD4/PE and the SA-MHC(peptide)/APC tetramers 3 described above and thereby the presence of RA specific T cells in the blood. Blood analysed with SA-MHC(peptide)/APC tetramers 4 should show no staining of CD3 and CD4 positive cells with this SA-MHC(peptide)/APC tetramer.

[1255] The sensitivity of the above described test may be enhanced by addition of labeled antibodies specific for activation markers expressed in or on the surface of the RA specific T cells.

[1256] We conclude that the APC-SA coupled MHC(peptide) constructs may be used to detect the presence of RA specific T cells in the blood of RA patients.

### Example 57

[1257] This is an example of how MHC multimers may be used for detection of Rheumatoid arthritis (RA) specific T cells in blood samples from RA patients.

[1258] In this example the MHC multimer used are MHC complexes coupled to any fluorophor-labelled multimerisation as described elsewhere herein. The MHC multimers are used for direct detection of TCR in flow cytometry. The antigen origin is RA, thus, immune monitoring of RA. MHC multimers carrying RA specific peptides is in this example used to detect the presence of RA specific T cells in the blood of MS patients.

[1259] This is an example of how MHC multimers may be used for detection of Rheumatoid arthritis (RA) specific T cells in blood samples from RA patients. The MHC multimer used are MHC complexes coupled to

[1260] MHC multimers carrying RA specific peptides is in this example used to detect the presence of RA specific T cells in the blood of RA patients.

[1261] Purified MHC-peptide complexes consisting of HLA-DR4 heavy chains and peptide derived from a region in Myelin Basic Protein (MBP) in MS or a negative control peptide are generated. MHC-peptide complexes are then coupled to a multimerisation domain together with APC. The following MHC(peptide)/APC multimers are made:
[1262] 35. APC-multimerisation domain coupled with HLA-DR4 in complex with the peptide CII 261-273 AGFKGEQGPKGEP derived from Rheumatoid arthritis.
[1263] 36. APC-multimerisation domain coupled with HLA-DR4 in complex with a non-sense peptide.

[1264] The binding of the above described MHC(peptide)/APC multimers can be used to determine the presence of RA specific T cells in the blood from RA patients by flow cytometry following a standard flow cytometry protocol.

[1265] Blood from a RA patient is isolated and 100 ul of this blood is incubated with either of the MHC(peptide)/APC multimers described above for 10 minutes in the dark at room temperature. 5 μl of each of each of the antibodies mouse-anti-human CD3/PB (clone UCHT1 from Dako) and mouse-anti-human CD4/PE (clone MT310 from Dako) are added and the incubation continued for another 20 minutes at 4° C. in the dark. The samples are then washed by adding 2 ml PBS; pH=7.2 followed by centrifugation for 5 minutes at 200×g and the supernatant removed. The washing step is repeated. The washed cells are resuspended in 400-500 μl PBS; pH=7.2 and analyzed on flowcytometer.

[1266] The presence of cells labeled with anti-CD3/PB, anti-CD4/PE and the MHC(peptide)/APC multimers 5 described above and thereby the presence of RA specific T cells in the blood. Blood analysed with MHC(peptide)/APC multimer 6 should show no staining of CD3 and CD4 positive cells with this SA-MHC(peptide)/APC multimers.

[1267] The sensitivity of the above described test may be enhanced by addition of labeled antibodies specific for activation markers expressed in or on the surface of the RA specific T cells.

[1268] We conclude that the APC-multimerisation domain coupled MHC(peptide) constructs may be used to detect the presence of RA specific T cells in the blood of RA patients.

### Example 58

[1269] This is an example of how MHC multimers may be used for diagnosis of Tuberculosis (TB) in blood samples from humans infected with Mycobacterium tuberculosis.

[1270] In this example the MHC multimer used are MHC complexes coupled to fluorophor-labelled dextran (Dextramers). The dextramers are used for direct detection of TCR in flow cytometry. The antigen origin is TB, thus, immune monitoring of TB.

[1271] TB is caused by infection by Mycobacterium tuberculosis. During acute infection TB specific activated T cells will be present in increased amounts in an activated state compared to healthy individuals. The presences of an increased amount of activated TB specific T cells may thereby act as a surrogate marker for infection with Mycobacterium tuberculosis. MHC multimers carrying TB specific peptides is in this example used to detect the presence of TB specific T cells in the blood of patients infected with Mycobacterium tuberculosis.

[1272] Purified MHC-peptide complexes consisting of HLA-A*0201 heavy chain, human beta2 microglobulin and peptide derived from regions in Mycobacterium tuberculosis Antigen 85B (Ag85B) or a negative control peptide are generated by in vitro refolding, purified and biotinylated as described elsewhere herein. Biotinylated MHC-peptide complexes are then coupled to a 270 kDa dextran multimerization domain labelled with APC by interaction with streptavidin (SA) on the dextran multimerization domain. The dextran-APC-SA multimerization domain is generated as described elsewhere herein. MHC-peptide complexes are added in an amount corresponding to a ratio of three MHC-peptide molecules per SA molecule and each molecule dextran contained 3.7 SA molecule and 8.95 molecules APC. The final concentration of dextran was 3.8×10e-8 M. The following MHC(peptide)/APC dextran constructs are made:
[1273] 37. APC-SA conjugated 270 kDa dextran coupled with HLA-A*0201 in complex with beta2 microglobulin and the peptide KLVANNTRL derived from Ag85B.
[1274] 38. APC-SA conjugated 270 kDa dextran coupled with HLA-A*0201 in complex with beta2 microglobulin and the peptide YLLDGLRAQ derived from Ag85B.
[1275] 39. APC-SA conjugated 270 kDa dextran coupled with HLA-A*0201 in complex with beta2 microglobulin and the peptide FLTSELPQW derived from Ag85B.
[1276] 40. APC-SA conjugated 270 kDa dextran coupled with HLA-A*0201 in complex with beta2 microglobulin and the non-sense peptide GLAGDVSAV.

[1277] The binding of the above described MHC(peptide)/APC dextran can be used to determine the presence of Ag85B specific T cells in the blood from TB infected individuals by flow cytometry following a standard flow cytometry protocol.

[1278] Blood from a patient with TB is isolated and 100 ul of this blood is incubated with 10 μl of one of the MHC(peptide)/APC dextran constructs described above for 10 minutes in the dark at room temperature. 5 μl of each of each of the antibodies mouse-anti-human CD3/PB (clone UCHT1 from Dako) and mouse-anti-human CD8/PE (clone DK25 from Dako) are added and the incubation continued for another 20 minutes at 4° C. in the dark. The samples are then washed by adding 2 ml PBS; pH=7.2 followed by centrifugation for 5 minutes at 200×g and the supernatant removed. The washing step is repeated. The washed cells are resuspended in 400-500 μl PBS; pH=7.2 and analyzed on flowcytometer.

[1279] The presence of cells labeled with anti-CD3/PB, anti-CD8/PE and either of the MHC(peptide)/APC dextran constructs 1, 2 or 3 described above and thereby the presence of TB specific T cells will indicate that the patient are infected with Mycobacterium tuberculosis. Blood analysed with MHC(peptide)/APC dextran construct 4 should show no staining of CD3 and CD8 positive cells with this MHC(peptide)/APC dextran construct.

[1280] The sensitivity of the above described diagnostic test may be enhanced by addition of labeled antibodies specific for activation markers expressed in or on the surface of the TB specific T cells.

[1281] We conclude that the MHC(peptide)/APC dextran constructs can be used to detect the presence of TB specific T cells in the blood of patients infected with Mycobacterium tuberculosis.

### Example 59

[1282] This is an example of how MHC multimers may be used for diagnosis of Tuberculosis (TB) in blood samples from humans infected with Mycobacterium tuberculosis.

[1283] In this example the MHC multimer used are MHC complexes coupled to fluorophor-labelled the multimerisation domain Streptavidin (SA), used for direct detection of TCR in flow cytometry. The antigen origin is TB, thus, immune monitoring of TB.

[1284] TB is caused by infection by Mycobacterium tuberculosis. During acute infection TB specific activated T cells will be present in increased amounts in an activated state compared to healthy individuals. The presences of an increased amount of activated TB specific T cells may thereby act as a surrogate marker for infection with Mycobacterium tuberculosis. MHC multimers carrying TB specific peptides is in this example used to detect the presence of TB specific T cells in the blood of patients infected with Mycobacterium tuberculosis.

[1285] Purified MHC-peptide complexes consisting of HLA-A*0201 heavy chain, human beta2 microglobulin and peptide derived from regions in Mycobacterium tuberculosis Antigen 85B (Ag85B) or a negative control peptide were generated by in vitro refolding, purified and biotinylated as described elsewhere herein. Biotinylated MHC-peptide complexes are then coupled SA labelled with APC. MHC-peptide complexes were added in an amount corresponding to a ratio of 5 MHC-peptide molecules per SA molecule. Then SA/APC carrying four MHC complexes were purified from free SA, free monomeric MHC complex, SA carrying three, two and one MHC complexes.

[1286] The following SA-MHC(peptide)/APC tetramers are made:
[1287] 41. APC-SA coupled with HLA-A*0201 in complex with beta2 microglobulin and the peptide KLVANNTRL derived from Ag85B.
[1288] 42. APC-SA coupled with HLA-A*0201 in complex with beta2 microglobulin and the peptide YLLDGLRAQ derived from Ag85B.
[1289] 43. APC-SA coupled with HLA-A*0201 in complex with beta2 microglobulin and the peptide FLTSELPQW derived from Ag85B.
[1290] 44. APC-SA coupled with HLA-A*0201 in complex with beta2 microglobulin and the non-sense peptide GLAGDVSAV

[1291] The binding of the above described MHC(peptide)/APC dextran can be used to determine the presence of Ag85B specific T cells in the blood from TB infected individuals by flow cytometry following a standard flow cytometry protocol.

[1292] Blood from a patient with TB is isolated and 100 ul of this blood is incubated with either of the four SA-MHC(peptide)/APC tetramers described above for 10 minutes in the dark at room temperature. 5 μl of each of each of the antibodies mouse-anti-human CD3/PB (clone UCHT1 from Dako) and mouse-anti-human CD8/PE (clone DK25 from Dako) are added and the incubation continued for another 20 minutes at 4° C. in the dark. The samples are then washed by adding 2 ml PBS; pH=7.2 followed by centrifugation for 5 minutes at 200×g and the supernatant removed. The washing step is repeated. The washed cells are resuspended in 400-500 μl PBS; pH=7.2 and analyzed on flowcytometer.

[1293] The presence of cells labeled with anti-CD3/PB, anti-CD8/PE and either of the SA-MHC(peptide)/APC tetramers 5, 6 or 7 described above and thereby the presence of TB specific T cells will indicate that the patient are infected with Mycobacterium tuberculosis. Blood analysed with SA-MHC(peptide)/APC tetramers 8 should show no staining of CD3 and CD8 positive cells with this SA-MHC(peptide)/APC tetramer.

[1294] The sensitivity of the above described diagnostic test may be enhanced by addition of labeled antibodies specific for activation markers expressed in or on the surface of the TB specific T cells.

[1295] We conclude that the MHC(peptide)/APC dextran constructs can be used to detect the presence of TB specific T cells in the blood of patients infected with Mycobacterium tuberculosis.

### Example 60

[1296] This is an example of how MHC multimers may be used for diagnosis of Tuberculosis (TB) in blood samples from humans infected with Mycobacterium tuberculosis.

[1297] In this example the MHC multimer used are MHC complexes coupled to any fluorophor-labelled multimerisation as described elsewhere herein. The MHC multimers are used for direct detection of TCR in flow cytometry. The antigen origin is TB, thus, immune monitoring of TB. TB is caused by infection by Mycobacterium tuberculosis. During acute infection TB specific activated T cells will be present in increased amounts in an activated state compared to healthy individuals. The presences of an increased amount of activated TB specific T cells may thereby act as a surrogate marker for infection with Mycobacterium tuberculosis. MHC multimers carrying TB specific peptides is in this example used to detect the presence of TB specific T cells in the blood of patients infected with Mycobacterium tuberculosis.

[1298] This is an example of how MHC multimers may be used for diagnosis of Tuberculosis (TB) in blood samples from humans infected with Mycobacterium tuberculosis. The MHC multimer used are MHC complexes coupled to

[1299] TB is caused by infection by Mycobacterium tuberculosis. During acute infection TB specific activated T cells will be present in increased amounts in an activated state compared to healthy individuals. The presences of an increased amount of activated TB specific T cells may thereby act as a surrogate marker for infection with Mycobacterium tuberculosis. MHC multimers carrying TB specific peptides is in this example used to detect the presence of TB specific T cells in the blood of patients infected with Mycobacterium tuberculosis.

[1300] Purified MHC-peptide complexes consisting of HLA-A*0201 heavy chain, human beta2 microglobulin and peptide derived from regions in Mycobacterium tuberculosis Antigen 85B (Ag85B) or a negative control peptide are generated by in vitro refolding and purified or purified from antigen presenting cells. MHC-peptide complexes are then coupled to a multimerisation domain together with APC.

[1301] The following MHC(peptide)/APC multimers are made:
[1302] 45. APC-multimerisation domain coupled with HLA-A*0201 in complex with beta2 microglobulin and the peptide KLVANNTRL derived from Ag85B.
[1303] 46. APC-multimerisation domain coupled with HLA-A*0201 in complex with beta2 microglobulin and the peptide YLLDGLRAQ derived from Ag85B.
[1304] 47. APC-multimerisation domain coupled with HLA-A*0201 in complex with beta2 microglobulin and the peptide FLTSELPQW derived from Ag85B.
[1305] 48. APC-multimerisation domain coupled with HLA-A*0201 in complex with beta2 microglobulin and the non-sense peptide GLAGDVSAV

[1306] The binding of the above described MHC(peptide)/APC multimers can be used to determine the presence of Ag85B specific T cells in the blood from TB infected individuals by flow cytometry following a standard flow cytometry protocol.

[1307] Blood from a patient with TB is isolated and 100 ul of this blood is incubated with either of the four MHC(peptide)/APC multimers described above for 10 minutes in the dark at room temperature. 5 μl of each of each of the antibodies mouse-anti-human CD3/PB (clone UCHT1 from Dako) and mouse-anti-human CD8/PE (clone DK25 from Dako) are added and the incubation continued for another 20 minutes at 4° C. in the dark. The samples are then washed by adding 2 ml PBS; pH=7.2 followed by centrifugation for 5 minutes at 200×g and the supernatant removed. The washing step is repeated. The washed cells are resuspended in 400-500 μl PBS; pH=7.2 and analyzed on flowcytometer.

[1308] The presence of cells labeled with anti-CD3/PB, anti-CD8/PE and either of the MHC(peptide)/APC multimers 9, 10 or 11 described above and thereby the presence of TB specific T cells will indicate that the patient are infected with Mycobacterium tuberculosis. Blood analysed with MHC(peptide)/APC multimer 12 should show no staining of CD3 and CD8 positive cells with this SA-MHC(peptide)/APC multimer.

[1309] The sensitivity of the above described diagnostic test may be enhanced by addition of labeled antibodies specific for activation markers expressed in or on the surface of the TB specific T cells.

[1310] We conclude that the MHC(peptide)/APC dextran constructs can be used to detect the presence of TB specific T cells in the blood of patients infected with Mycobacterium tuberculosis.

### Example 61

[1311] This is an example of how MHC multimers may be used for diagnosis of Tuberculosis (TB) in blood samples from humans infected with Mycobacterium tuberculosis.

[1312] In this example the MHC multimer used are MHC complexes coupled to fluorophor-labelled dextran (Dextramers). The dextramers are used for direct detection of TCR in flow cytometry. The antigen origin is TB, thus, immune monitoring of TB.

[1313] TB is caused by infection by Mycobacterium tuberculosis. During acute infection TB specific activated T cells will be present in increased amounts in an activated state compared to healthy individuals. The presences of an increased amount of activated TB specific T cells may thereby act as a surrogate marker for infection with Mycobacterium tuberculosis. MHC multimers carrying TB specific peptides is in this example used to detect the presence of TB specific T cells in the blood of patients infected with Mycobacterium tuberculosis.

[1314] Purified MHC-peptide complexes consisting of HLA-B*0801 heavy chain, human beta2 microglobulin and peptide derived from regions in Mycobacterium tuberculosis Antigen 85B (Ag85B) or a negative control peptide are generated by in vitro refolding, purified and biotinylated as described elsewhere herein. Biotinylated MHC-peptide complexes are then coupled to a 270 kDa dextran multimerization domain labelled with APC by interaction with streptavidin (SA) on the dextran multimerization domain. The dextran-APC-SA multimerization domain is generated as described elsewhere herein. MHC-peptide complexes are added in an amount corresponding to a ratio of three MHC-peptide molecules per SA molecule and each molecule dextran contained 3.7 SA molecule and 8.95 molecules APC. The final concentration of dextran was 3.8×10e-8 M. The following MHC(peptide)/APC dextran constructs are made:
[1315] 49. APC-SA conjugated 270 kDa dextran coupled with HLA-B*0801 in complex with beta2 microglobulin and the peptide MGRDIKVQF derived from Ag85B.
[1316] 50. APC-SA conjugated 270 kDa dextran coupled with HLA-B*0801 in complex with beta2 microglobulin and the peptide DIKVQFQSG derived from Ag85B.
[1317] 51. APC-SA conjugated 270 kDa dextran coupled with HLA-B*0801 in complex with beta2 microglobulin and the peptide ENFVRSSNL derived from Ag85B.
[1318] 52. APC-SA conjugated 270 kDa dextran coupled with HLA-B*0801 in complex with beta2 microglobulin and the non-sense peptide.

[1319] The binding of the above described MHC(peptide)/APC dextran can be used to determine the presence of Ag85B specific T cells in the blood from TB infected individuals by flow cytometry following a standard flow cytometry protocol.

[1320] Blood from a patient with TB is isolated and 100 ul of this blood is incubated with 10 μl of one of the MHC(peptide)/APC dextran constructs described above for 10 minutes in the dark at room temperature. 5 μl of each of each of the antibodies mouse-anti-human CD3/PB (clone UCHT1 from Dako) and mouse-anti-human CD8/PE (clone DK25 from Dako) are added and the incubation continued for another 20 minutes at 4° C. in the dark. The samples are then washed by adding 2 ml PBS; pH=7.2 followed by centrifugation for 5 minutes at 200×g and the supernatant removed. The washing step is repeated. The washed cells are resuspended in 400-500 μl PBS; pH=7.2 and analyzed on flowcytometer.

[1321] The presence of cells labeled with anti-CD3/PB, anti-CD8/PE and either of the MHC(peptide)/APC dextran constructs 13, 14 or 15 described above and thereby the presence of TB specific T cells will indicate that the patient are infected with Mycobacterium tuberculosis. Blood analysed with MHC(peptide)/APC dextran construct 16 should show no staining of CD3 and CD8 positive cells with this MHC(peptide)/APC dextran construct.

[1322] The sensitivity of the above described diagnostic test may be enhanced by addition of labeled antibodies specific for activation markers expressed in or on the surface of the TB specific T cells.

[1323] We conclude that the MHC(peptide)/APC dextran constructs can be used to detect the presence of TB specific T cells in the blood of patients infected with Mycobacterium tuberculosis.

### Example 62

[1324] This is an example of how MHC multimers may be used for diagnosis of Tuberculosis (TB) in blood samples from humans infected with Mycobacterium tuberculosis.

[1325] In this example the MHC multimer used are MHC complexes coupled to fluorophor-labelled the multimerisation domain Streptavidin (SA), used for direct detection of TCR in flow cytometry. The antigen origin is TB, thus, immune monitoring of TB.

[1326] TB is caused by infection by Mycobacterium tuberculosis. During acute infection TB specific activated T cells will be present in increased amounts in an activated state compared to healthy individuals. The presences of an increased amount of activated TB specific T cells may thereby act as a surrogate marker for infection with Mycobacterium tuberculosis. MHC multimers carrying TB specific peptides is in this example used to detect the presence of TB specific T cells in the blood of patients infected with Mycobacterium tuberculosis.

[1327] Purified MHC-peptide complexes consisting of HLA-A*0201 heavy chain, human beta2 microglobulin and peptide derived from regions in Mycobacterium tuberculosis Antigen 85B (Ag85B) or a negative control peptide were generated by in vitro refolding, purified and biotinylated as described elsewhere herein. Biotinylated MHC-peptide complexes are then coupled SA labelled with APC. MHC-peptide complexes were added in an amount corresponding to a ratio of 5 MHC-peptide molecules per SA molecule. Then SA/APC carrying four MHC complexes were purified from free SA, free monomeric MHC complex, SA carrying three, two and one MHC complexes.

[1328] The following SA-MHC(peptide)/APC tetramers are made:
[1329] 53. APC-SA coupled with HLA-B*0801 in complex with beta2 microglobulin and the peptide MGRDIKVQF derived from Ag85B.
[1330] 54. APC-SA coupled with HLA-B*0801 in complex with beta2 microglobulin and the peptide DIKVQFQSG derived from Ag85B.
[1331] 55. APC-SA coupled with HLA-B*0801 in complex with beta2 microglobulin and the peptide ENFVRSSNL derived from Ag85B.
[1332] 56. APC-SA coupled with HLA-B*0801 in complex with beta2 microglobulin and the non-sense peptide.

[1333] The binding of the above described MHC(peptide)/APC dextran can be used to determine the presence of Ag85B specific T cells in the blood from TB infected individuals by flow cytometry following a standard flow cytometry protocol.

[1334] Blood from a patient with TB is isolated and 100 ul of this blood is incubated with either of the four SA-MHC(peptide)/APC tetramers described above for 10 minutes in the dark at room temperature. 5 μl of each of each of the antibodies mouse-anti-human CD3/PB (clone UCHT1 from Dako) and mouse-anti-human CD8/PE (clone DK25 from Dako) are added and the incubation continued for another 20 minutes at 4° C. in the dark. The samples are then washed by adding 2 ml PBS; pH=7.2 followed by centrifugation for 5 minutes at 200×g and the supernatant removed. The washing step is repeated. The washed cells are resuspended in 400-500 μl PBS; pH=7.2 and analyzed on flowcytometer.

[1335] The presence of cells labeled with anti-CD3/PB, anti-CD8/PE and either of the SA-MHC(peptide)/APC tetramers 17, 18 or 19 described above and thereby the presence of TB specific T cells will indicate that the patient are infected with Mycobacterium tuberculosis. Blood analysed with SA-MHC(peptide)/APC tetramers 20 should show no staining of CD3 and CD8 positive cells with this SA-MHC(peptide)/APC tetramer.

[1336] The sensitivity of the above described diagnostic test may be enhanced by addition of labeled antibodies specific for activation markers expressed in or on the surface of the TB specific T cells.

[1337] We conclude that the MHC(peptide)/APC dextran constructs can be used to detect the presence of TB specific T cells in the blood of patients infected with Mycobacterium tuberculosis.

### Example 63

[1338] This is an example of how MHC multimers may be used for diagnosis of Tuberculosis (TB) in blood samples from humans infected with Mycobacterium tuberculosis.

[1339] In this example the MHC multimer used are MHC complexes coupled to any fluorophor-labelled multimerisation as described elsewhere herein. The MHC multimers are used for direct detection of TCR in flow cytometry. The antigen origin is TB, thus, immune monitoring of TB.

[1340] TB is caused by infection by Mycobacterium tuberculosis. During acute infection TB specific activated T cells will be present in increased amounts in an activated state compared to healthy individuals. The presences of an increased amount of activated TB specific T cells may thereby act as a surrogate marker for infection with Mycobacterium tuberculosis. MHC multimers carrying TB specific peptides is in this example used to detect the presence of TB specific T cells in the blood of patients infected with Mycobacterium tuberculosis.

[1341] Purified MHC-peptide complexes consisting of HLA-B*0801 heavy chain, human beta2 microglobulin and peptide derived from regions in Mycobacterium tuberculosis Antigen 85B (Ag85B) or a negative control peptide are generated by in vitro refolding and purified or purified from antigen presenting cells. MHC-peptide complexes are then coupled to a multimerisation domain together with APC.

[1342] The following MHC(peptide)/APC multimers are made:
[1343] 57. APC-multimerisation domain coupled with HLA-B*0801 in complex with beta2 microglobulin and the peptide MGRDIKVQF derived from Ag85B.
[1344] 58. APC-multimerisation domain coupled with HLA-B*0801 in complex with beta2 microglobulin and the peptide DIKVQFQSG derived from Ag85B.
[1345] 59. APC-multimerisation domain coupled with HLA-B*0801 in complex with beta2 microglobulin and the peptide ENFVRSSNL derived from Ag85B.
[1346] 60. APC-multimerisation domain coupled with HLA-B*0801 in complex with beta2 microglobulin and the non-sense peptide.

[1347] The binding of the above described MHC(peptide)/APC multimers can be used to determine the presence of Ag85B specific T cells in the blood from TB infected individuals by flow cytometry following a standard flow cytometry protocol.

[1348] Blood from a patient with TB is isolated and 100 ul of this blood is incubated with either of the four MHC(peptide)/APC multimers described above for 10 minutes in the dark at room temperature. 5 μl of each of each of the antibodies mouse-anti-human CD3/PB (clone UCHT1 from Dako) and mouse-anti-human CD8/PE (clone DK25 from Dako) are added and the incubation continued for another 20 minutes at 4° C. in the dark. The samples are then washed by adding 2 ml PBS; pH=7.2 followed by centrifugation for 5 minutes at 200×g and the supernatant removed. The washing step is repeated. The washed cells are resuspended in 400-500 μl PBS; pH=7.2 and analyzed on flowcytometer.

[1349] The presence of cells labeled with anti-CD3/PB, anti-CD8/PE and either of the MHC(peptide)/APC multimers 21, 22 or 23 described above and thereby the presence of TB specific T cells will indicate that the patient are infected with Mycobacterium tuberculosis. Blood analysed with MHC(peptide)/APC multimer 24 should show no staining of CD3 and CD8 positive cells with this SA-MHC(peptide)/APC multimer.

[1350] The sensitivity of the above described diagnostic test may be enhanced by addition of labeled antibodies specific for activation markers expressed in or on the surface of the TB specific T cells.

[1351] We conclude that the MHC(peptide)/APC dextran constructs can be used to detect the presence of TB specific T cells in the blood of patients infected with Mycobacterium tuberculosis.

### Example 64

[1352] This is an example of how MHC multimers may be used for diagnosis of Tuberculosis (TB) in blood samples from humans infected with Mycobacterium tuberculosis.

[1353] In this example the MHC multimer used are MHC complexes coupled to fluorophor-labelled dextran (Dextramers). The dextramers are used for direct detection of TCR in flow cytometry. The antigen origin is TB, thus, immune monitoring of TB.

[1354] TB is caused by infection by Mycobacterium tuberculosis. During acute infection TB specific activated T cells will be present in increased amounts in an activated state compared to healthy individuals. The presences of an increased amount of activated TB specific T cells may thereby act as a surrogate marker for infection with Mycobacterium tuberculosis. MHC multimers carrying TB specific peptides is in this example used to detect the presence of TB specific T cells in the blood of patients infected with Mycobacterium tuberculosis.

[1355] Purified MHC-peptide complexes consisting of HLA-B*44 heavy chain, human beta2 microglobulin and peptide derived from regions in antigen Mtb39 or a negative control peptide are generated by in vitro refolding, purified and biotinylated as described elsewhere herein. Biotinylated MHC-peptide complexes are then coupled to a 270 kDa dextran multimerization domain labelled with APC by interaction with streptavidin (SA) on the dextran multimerization domain. The dextran-APC-SA multimerization domain is generated as described elsewhere herein. MHC-peptide complexes are added in an amount corresponding to a ratio of three MHC-peptide molecules per SA molecule and each molecule dextran contained 3.7 SA molecule and 8.95 molecules APC. The final concentration of dextran was 3.8×10e-8 M. The following MHC(peptide)/APC dextran constructs are made:
[1356] 61. APC-SA conjugated 270 kDa dextran coupled with HLA-B*44 in complex with beta2 microglobulin and the peptide MWAQDAAAMF derived from Mtb39.
[1357] 62. APC-SA conjugated 270 kDa dextran coupled with HLA-B*44 in complex with beta2 microglobulin and the peptide AAERGPGQML derived from Mtb39.
[1358] 63. APC-SA conjugated 270 kDa dextran coupled with HLA-B*44 in complex with beta2 microglobulin and the non-sense peptide.

[1359] The binding of the above described MHC(peptide)/APC dextran can be used to determine the presence of Mtb39 specific T cells in the blood from TB infected individuals by flow cytometry following a standard flow cytometry protocol.

[1360] Blood from a patient with TB is isolated and 100 ul of this blood is incubated with 10 μl of one of the MHC(peptide)/APC dextran constructs described above for 10 minutes in the dark at room temperature. 5 μl of each of each of the antibodies mouse-anti-human CD3/PB (clone UCHT1 from Dako) and mouse-anti-human CD8/PE (clone DK25 from Dako) are added and the incubation continued for another 20 minutes at 4° C. in the dark. The samples are then washed by adding 2 ml PBS; pH=7.2 followed by centrifugation for 5 minutes at 200×g and the supernatant removed. The washing step is repeated. The washed cells are resuspended in 400-500 μl PBS; pH=7.2 and analyzed on flowcytometer.

[1361] The presence of cells labeled with anti-CD3/PB, anti-CD8/PE and either of the MHC(peptide)/APC dextran constructs 25 or 26 described above and thereby the presence of TB specific T cells will indicate that the patient are infected with Mycobacterium tuberculosis. Blood analysed with MHC(peptide)/APC dextran construct 27 should show no staining of CD3 and CD8 positive cells with this MHC(peptide)/APC dextran construct.

[1362] The sensitivity of the above described diagnostic test may be enhanced by addition of labeled antibodies specific for activation markers expressed in or on the surface of the TB specific T cells.

[1363] We conclude that the MHC(peptide)/APC dextran constructs can be used to detect the presence of TB specific T cells in the blood of patients infected with Mycobacterium tuberculosis.

### Example 65

[1364] This is an example of how MHC multimers may be used for diagnosis of Tuberculosis (TB) in blood samples from humans infected with Mycobacterium tuberculosis.

[1365] In this example the MHC multimer used are MHC complexes coupled to fluorophor-labelled the multimerisation domain Streptavidin (SA), used for direct detection of TCR in flow cytometry. The antigen origin is TB, thus, immune monitoring of TB.

[1366] TB is caused by infection by Mycobacterium tuberculosis. During acute infection TB specific activated T cells will be present in increased amounts in an activated state compared to healthy individuals. The presences of an increased amount of activated TB specific T cells may thereby act as a surrogate marker for infection with Mycobacterium tuberculosis. MHC multimers carrying TB specific peptides is in this example used to detect the presence of TB specific T cells in the blood of patients infected with Mycobacterium tuberculosis.

[1367] Purified MHC-peptide complexes consisting of HLA-B*44 heavy chain, human beta2 microglobulin and peptide derived from regions in antigen Mtb39 or a negative control peptide are generated by in vitro refolding, purified and biotinylated as described elsewhere herein. Biotinylated MHC-peptide complexes are then coupled SA labelled with APC. MHC-peptide complexes are added in an amount corresponding to a ratio of 5 MHC-peptide molecules per SA molecule. Then SA/APC carrying four MHC complexes are purified from free SA, free monomeric MHC complex, SA carrying three, two and one MHC complexes. The following SA-MHC(peptide)/APC tetramers are made:
[1368] 64. APC-SA coupled with HLA-B*44 in complex with beta2 microglobulin and the peptide MWAQDAAAMF derived from Ag85B.
[1369] 65. APC-SA coupled with HLA-B*44 in complex with beta2 microglobulin and the peptide AAERGPGQML derived from Ag85B.
[1370] 66. APC-SA coupled with HLA-B*44 in complex with beta2 microglobulin and the non-sense peptide.

[1371] The binding of the above described MHC(peptide)/APC dextran can be used to determine the presence of Mtb39 specific T cells in the blood from TB infected individuals by flow cytometry following a standard flow cytometry protocol.

[1372] Blood from a patient with TB is isolated and 100 ul of this blood is incubated with either of the four SA-MHC(peptide)/APC tetramers described above for 10 minutes in the dark at room temperature. 5 μl of each of each of the antibodies mouse-anti-human CD3/PB (clone UCHT1 from Dako) and mouse-anti-human CD8/PE (clone DK25 from Dako) are added and the incubation continued for another 20 minutes at 4° C. in the dark. The samples are then washed by adding 2 ml PBS; pH=7.2 followed by centrifugation for 5 minutes at 200×g and the supernatant removed. The washing step is repeated. The washed cells are resuspended in 400-500 μl PBS; pH=7.2 and analyzed on flowcytometer.

[1373] The presence of cells labeled with anti-CD3/PB, anti-CD8/PE and either of the SA-MHC(peptide)/APC tetramers 28 or 29 described above and thereby the presence of TB specific T cells will indicate that the patient are infected with Mycobacterium tuberculosis. Blood analysed with SA-MHC(peptide)/APC tetramers 30 should show no staining of CD3 and CD8 positive cells with this SA-MHC(peptide)/APC tetramer.

[1374] The sensitivity of the above described diagnostic test may be enhanced by addition of labeled antibodies specific for activation markers expressed in or on the surface of the TB specific T cells.

[1375] We conclude that the MHC(peptide)/APC dextran constructs can be used to detect the presence of TB specific T cells in the blood of patients infected with Mycobacterium tuberculosis.

### Example 66

[1376] This is an example of how MHC multimers may be used for diagnosis of Tuberculosis (TB) in blood samples from humans infected with Mycobacterium tuberculosis.

[1377] In this example the MHC multimer used are MHC complexes coupled to any fluorophor-labelled multimerisation as described elsewhere herein. The MHC multimers are used for direct detection of TCR in flow cytometry. The antigen origin is TB, thus, immune monitoring of TB. TB is caused by infection by Mycobacterium tuberculosis. During acute infection TB specific activated T cells will be present in increased amounts in an activated state compared to healthy individuals. The presences of an increased amount of activated TB specific T cells may thereby act as a surrogate marker for infection with Mycobacterium tuberculosis. MHC multimers carrying TB specific peptides is in this example used to detect the presence of TB specific T cells in the blood of patients infected with Mycobacterium tuberculosis.

[1378] Purified MHC-peptide complexes consisting of HLA-B*44 heavy chain, human beta2 microglobulin and peptide derived from regions in antigen Mtb39 or a negative control peptide are generated by in vitro refolding and purified or purified from antigen presenting cells. MHC-peptide complexes are then coupled to a multimerisation domain together with APC.

[1379] The following MHC(peptide)/APC multimers are made:
[1380] 67. APC-multimerisation domain coupled with HLA-B*44 in complex with beta2 microglobulin and the peptide MWAQDAAAMF derived from Mtb39.
[1381] 68. APC-multimerisation domain coupled with HLA-B*44 in complex with beta2 microglobulin and the peptide AAERGPGQML derived from Mtb39.
[1382] 69. APC-multimerisation domain coupled with HLA-B*44 in complex with beta2 microglobulin and the non-sense peptide.

[1383] The binding of the above described MHC(peptide)/APC multimers can be used to determine the presence of Mtb39 specific T cells in the blood from TB infected individuals by flow cytometry following a standard flow cytometry protocol.

[1384] Blood from a patient with TB is isolated and 100 ul of this blood is incubated with either of the four MHC(peptide)/APC multimers described above for 10 minutes in the dark at room temperature. 5 μl of each of each of the antibodies mouse-anti-human CD3/PB (clone UCHT1 from Dako) and mouse-anti-human CD8/PE (clone DK25 from Dako) are added and the incubation continued for another 20 minutes at 4° C. in the dark. The samples are then washed by adding 2 ml PBS; pH=7.2 followed by centrifugation for 5 minutes at 200×g and the supernatant removed. The washing step is repeated. The washed cells are resuspended in 400-500 μl PBS; pH=7.2 and analyzed on flowcytometer.

[1385] The presence of cells labeled with anti-CD3/PB, anti-CD8/PE and either of the MHC(peptide)/APC multimers 31 or 32 described above and thereby the presence of TB specific T cells will indicate that the patient are infected with Mycobacterium tuberculosis. Blood analysed with MHC(peptide)/APC multimer 33 should show no staining of CD3 and CD8 positive cells with this SA-MHC(peptide)/APC multimer.

[1386] The sensitivity of the above described diagnostic test may be enhanced by addition of labeled antibodies specific for activation markers expressed in or on the surface of the TB specific T cells.

[1387] We conclude that the MHC(peptide)/APC dextran constructs can be used to detect the presence of TB specific T cells in the blood of patients infected with Mycobacterium tuberculosis.

### Example 67

[1388] This is an example of how MHC multimers may be used for diagnosis of Tuberculosis (TB) in blood samples from humans infected with Mycobacterium tuberculosis.

[1389] In this example the MHC multimer used are MHC complexes coupled to fluorophor-labelled dextran (Dextramers). The dextramers are used for direct detection of TCR in flow cytometry. The antigen origin is TB, thus, immune monitoring of TB.

[1390] TB is caused by infection by Mycobacterium tuberculosis. During acute infection TB specific activated T cells will be present in increased amounts in an activated state compared to healthy individuals. The presences of an increased amount of activated TB specific T cells may thereby act as a surrogate marker for infection with Mycobacterium tuberculosis. MHC multimers carrying TB specific peptides is in this example used to detect the presence of TB specific T cells in the blood of patients infected with Mycobacterium tuberculosis.

[1391] Purified MHC-peptide complexes consisting of HLA-B*14 heavy chain, human beta2 microglobulin and peptide derived from regions in culture filtrate protein 10 (CFP10) antigen (Table Y) or a negative control peptide are generated by in vitro refolding, purified and biotinylated as described elsewhere herein. Biotinylated MHC-peptide complexes are then coupled to a 270 kDa dextran multimerization domain labelled with APC by interaction with streptavidin (SA) on the dextran multimerization domain. The dextran-APC-SA multimerization domain is generated as described elsewhere herein. MHC-peptide complexes are added in an amount corresponding to a ratio of three MHC-peptide molecules per SA molecule and each molecule dextran contained 3.7 SA molecule and 8.95 molecules APC. The final concentration of dextran was 3.8×10e-8 M. The following MHC(peptide)/APC dextran constructs are made:
[1392] 70. APC-SA conjugated 270 kDa dextran coupled with HLA-B*14 in complex with beta2 microglobulin and the peptide RADEEQQQAL derived from CFP10.
[1393] 71. APC-SA conjugated 270 kDa dextran coupled with HLA-B*14 in complex with beta2 microglobulin and the non-sense peptide.

[1394] The binding of the above described MHC(peptide)/APC dextran can be used to determine the presence of CFP10 specific T cells in the blood from TB infected individuals by flow cytometry following a standard flow cytometry protocol.

[1395] Blood from a patient with TB is isolated and 100 ul of this blood is incubated with 10 μl of one of the MHC(peptide)/APC dextran constructs described above for 10 minutes in the dark at room temperature. 5 μl of each of each of the antibodies mouse-anti-human CD3/PB (clone UCHT1 from Dako) and mouse-anti-human CD8/PE (clone DK25 from Dako) are added and the incubation continued for another 20 minutes at 4° C. in the dark. The samples are then washed by adding 2 ml PBS; pH=7.2 followed by centrifugation for 5 minutes at 200×g and the supernatant removed. The washing step is repeated. The washed cells are resuspended in 400-500 μl PBS; pH=7.2 and analyzed on flowcytometer.

[1396] The presence of cells labeled with anti-CD3/PB, anti-CD8/PE and the MHC(peptide)/APC dextran constructs 34 described above and thereby the presence of TB specific T cells will indicate that the patient are infected with Mycobacterium tuberculosis. Blood analysed with MHC(peptide)/APC dextran construct 25 should show no staining of CD3 and CD8 positive cells with this MHC(peptide)/APC dextran construct.

[1397] The sensitivity of the above described diagnostic test may be enhanced by addition of labeled antibodies specific for activation markers expressed in or on the surface of the TB specific T cells.

[1398] We conclude that the MHC(peptide)/APC dextran constructs can be used to detect the presence of TB specific T cells in the blood of patients infected with Mycobacterium tuberculosis.

### Example 68

[1399] This is an example of how MHC multimers may be used for diagnosis of Tuberculosis (TB) in blood samples from humans infected with Mycobacterium tuberculosis.

[1400] In this example the MHC multimer used are MHC complexes coupled to fluorophor-labelled the multimerisation domain Streptavidin (SA), used for direct detection of TCR in flow cytometry. The antigen origin is TB, thus, immune monitoring of TB.

[1401] TB is caused by infection by Mycobacterium tuberculosis. During acute infection TB specific activated T cells will be present in increased amounts in an activated state compared to healthy individuals. The presences of an increased amount of activated TB specific T cells may thereby act as a surrogate marker for infection with Mycobacterium tuberculosis. MHC multimers carrying TB specific peptides is in this example used to detect the presence of TB specific T cells in the blood of patients infected with Mycobacterium tuberculosis.

[1402] Purified MHC-peptide complexes consisting of HLA-B*14 heavy chain, human beta2 microglobulin and peptide derived from regions in culture filtrate protein 10 (CFP10) antigen (Table Y) or a negative control peptide are generated by in vitro refolding, purified and biotinylated as described elsewhere herein. Biotinylated MHC-peptide complexes are then coupled SA labelled with APC. MHC-peptide complexes are added in an amount corresponding to a ratio of 5 MHC-peptide molecules per SA molecule. Then SA/APC carrying four MHC complexes are purified from free SA, free monomeric MHC complex, SA carrying three, two and one MHC complexes.

[1403] The following SA-MHC(peptide)/APC tetramers are made:
[1404] 72. APC-SA coupled with HLA-B*14 in complex with beta2 microglobulin and the peptide RADEEQQQAL derived from CFP10.
[1405] 73. APC-SA coupled with HLA-B*44 in complex with beta2 microglobulin and the non-sense peptide.

[1406] The binding of the above described MHC(peptide)/APC dextran can be used to determine the presence of CFP10 specific T cells in the blood from TB infected individuals by flow cytometry following a standard flow cytometry protocol.

[1407] Blood from a patient with TB is isolated and 100 ul of this blood is incubated with either of the four SA-MHC(peptide)/APC tetramers described above for 10 minutes in the dark at room temperature. 5 μl of each of each of the antibodies mouse-anti-human CD3/PB (clone UCHT1 from Dako) and mouse-anti-human CD8/PE (clone DK25 from Dako) are added and the incubation continued for another 20 minutes at 4° C. in the dark. The samples are then washed by adding 2 ml PBS; pH=7.2 followed by centrifugation for 5 minutes at 200×g and the supernatant removed. The washing step is repeated. The washed cells are resuspended in 400-500 μl PBS; pH=7.2 and analyzed on flowcytometer.

[1408] The presence of cells labeled with anti-CD3/PB, anti-CD8/PE and the SA-MHC(peptide)/APC tetramers 36 described above and thereby the presence of TB specific T cells will indicate that the patient are infected with Mycobacterium tuberculosis. Blood analysed with SA-MHC(peptide)/APC tetramers 37 should show no staining of CD3 and CD8 positive cells with this SA-MHC(peptide)/APC tetramer.

[1409] The sensitivity of the above described diagnostic test may be enhanced by addition of labeled antibodies specific for activation markers expressed in or on the surface of the TB specific T cells.

[1410] We conclude that the MHC(peptide)/APC dextran constructs can be used to detect the presence of TB specific T cells in the blood of patients infected with Mycobacterium tuberculosis.

### Example 69

[1411] This is an example of how MHC multimers may be used for diagnosis of Tuberculosis (TB) in blood samples from humans infected with Mycobacterium tuberculosis.

[1412] In this example the MHC multimer used are MHC complexes coupled to any fluorophor-labelled multimerisation as described elsewhere herein. The MHC multimers are used for direct detection of TCR in flow cytometry. The antigen origin is TB, thus, immune monitoring of TB. TB is caused by infection by Mycobacterium tuberculosis. During acute infection TB specific activated T cells will be present in increased amounts in an activated state compared to healthy individuals. The presences of an increased amount of activated TB specific T cells may thereby act as a surrogate marker for infection with Mycobacterium tuberculosis. MHC multimers carrying TB specific peptides is in this example used to detect the presence of TB specific T cells in the blood of patients infected with Mycobacterium tuberculosis.

[1413] Purified MHC-peptide complexes consisting of HLA-B*14 heavy chain, human beta2 microglobulin and peptide derived from regions in culture filtrate protein 10 (CFP10) antigen (Table Y) or a negative control peptide are generated by in vitro refolding and purified or purified from antigen presenting cells. MHC-peptide complexes are then coupled to a multimerisation domain together with APC.

[1414] The following MHC(peptide)/APC multimers are made:
[1415] 74. APC-multimerisation domain coupled with HLA-B*14 in complex with beta2 microglobulin and the peptide RADEEQQQAL derived from CFP10.
[1416] 75. APC-multimerisation domain coupled with HLA-B*14 in complex with beta2 microglobulin and the non-sense peptide.

[1417] The binding of the above described MHC(peptide)/APC multimers can be used to determine the presence of CFP10 specific T cells in the blood from TB infected individuals by flow cytometry following a standard flow cytometry protocol.

[1418] Blood from a patient with TB is isolated and 100 ul of this blood is incubated with either of the four MHC(peptide)/APC multimers described above for 10 minutes in the dark at room temperature. 5 μl of each of each of the antibodies mouse-anti-human CD3/PB (clone UCHT1 from Dako) and mouse-anti-human CD8/PE (clone DK25 from Dako) are added and the incubation continued for another 20 minutes at 4° C. in the dark. The samples are then washed by adding 2 ml PBS; pH=7.2 followed by centrifugation for 5 minutes at 200×g and the supernatant removed. The washing step is repeated. The washed cells are resuspended in 400-500 μl PBS; pH=7.2 and analyzed on flowcytometer.

[1419] The presence of cells labeled with anti-CD3/PB, anti-CD8/PE and the MHC(peptide)/APC multimers 38 described above and thereby the presence of TB specific T cells will indicate that the patient are infected with Mycobacterium tuberculosis. Blood analysed with MHC(peptide)/APC multimer 39 should show no staining of CD3 and CD8 positive cells with this SA-MHC(peptide)/APC multimer.

[1420] The sensitivity of the above described diagnostic test may be enhanced by addition of labeled antibodies specific for activation markers expressed in or on the surface of the TB specific T cells.

[1421] We conclude that the MHC(peptide)/APC dextran constructs can be used to detect the presence of TB specific T cells in the blood of patients infected with Mycobacterium tuberculosis.

### Example 70

[1422] This is an example of how MHC multimers may be used for diagnosis of Lyme Disease in blood samples from humans infected with Borrelia bacteria.

[1423] In this example the MHC multimer used are MHC complexes coupled to fluorophor-labelled dextran (Dextramers). The dextramers are used for direct detection of TCR in flow Cytometry. The antigen origin is Borrelia, thus, immune monitoring of a Borrelia infection.

[1424] Lyme disease is caused by infection by Borrelia bacteria. During acute infection Borrelia specific activated T cells will be present in increased amounts in an activated state compared to healthy individuals. The presences of an increased amount of activated Borrelia specific T cells may thereby act as a surrogate marker for infection with Borrelia bacterium. MHC multimers carrying borrelia specific peptides is in this example used to detect the presence of Borrelia specific T cells in the blood of patients infected with Borrelia.

[1425] Purified MHC-peptide complexes consisting of HLA-A*0201 heavy chain, human beta2 microglobulin and peptide derived from regions in Outer surface protein A (Table V) or Flagellin B (Table X) conserved among the three species Borrelia Burgdorferi, Borrelia Garinii and Borrelia Afzelii or a negative control peptide are generated by in vitro refolding, purified and biotinylated as described elsewhere herein. Biotinylated MHC-peptide complexes are then coupled to a 270 kDa dextran multimerization domain labelled with APC by interaction with streptavidin (SA) on the dextran multimerization domain. The dextran-APC-SA multimerization domain is generated as described elsewhere herein. MHC-peptide complexes are added in an amount corresponding to a ratio of three MHC-peptide molecules per SA molecule and each molecule dextran contains 3.7 SA molecule and 8.95 molecules APC. The final concentration of dextran is 3.8×10e-8 M. The following MHC(peptide)/APC dextran constructs are made:
[1426] 76. APC-SA conjugated 270 kDa dextran coupled with HLA-A*0201 in complex with beta2 microglobulin and the peptide ALIACKQNV derived from OspA.
[1427] 77. APC-SA conjugated 270 kDa dextran coupled with HLA-A*0201 in complex with beta2 microglobulin and the peptide FTKEDTIT derived from OspA.
[1428] 78. APC-SA conjugated 270 kDa dextran coupled with HLA-A*0201 in complex with beta2 microglobulin and the peptide SIQIEIEQL derived from Fla B
[1429] 79. APC-SA conjugated 270 kDa dextran coupled with HLA-A*0201 in complex with beta2 microglobulin and the peptide NLNEVEKVL derived from Fla B
[1430] 80. APC-SA conjugated 270 kDa dextran coupled with HLA-A*0201 in complex with beta2 microglobulin and the peptide SLAKIENAI derived from Fla B
[1431] 81. APC-SA conjugated 270 kDa dextran coupled with HLA-A*0201 in complex with beta2 microglobulin and the non-sense peptide GLAGDVSAV

[1432] The binding of the above described MHC(peptide)/APC dextran is used to determine the presence of Osp A or Fla B specific T cells in the blood from Borrelia infected individuals by flow cytometry following a standard flow cytometry protocol.

[1433] Blood from a patient with Lyme disease is isolated and 100 ul of this blood is incubated with 10 μl of each of the MHC(peptide)/APC dextran constructs described above for 10 minutes in the dark at room temperature. 5 μl of each of each of the antibodies mouse-anti-human CD3/PB (clone UCHT1 from Dako), mouse-anti-human CD4/FITC (clone MT310 from Dako) and mouse-anti-human CD8/PE (clone DK25 from Dako) are added and the incubation continues for another 20 minutes at 4° C. in the dark. The samples are then washed by adding 2 ml PBS; pH=7.2 followed by centrifugation for 5 minutes at 300×g and the supernatant removed. The washing step is repeated twice. The washed cells are resuspended in 400-500 μl PBS+1% BSA; pH=7.2 and analyzed on flowcytometer.

[1434] The presence of cells labeled with anti-CD3/PB, anti-CD8/PE and the MHC(peptide)/APC dextran constructs 1, 2, 3, 4 and 5 described above and thereby the presence of Borrelia specific T cells indicate that the patient are infected with Borrelia bacteria. Blood analysed with MHC(peptide)/APC dextran construct 6 show no staining of CD3 and CD8 positive cells with this MHC(peptide)/APC dextran construct.

[1435] The result is shown in FIG. 19.

[1436] The sensitivity of the above described diagnostic test may be enhanced by addition of labeled antibodies specific for activation markers expressed in or on the surface of the Borrelia specific T cells.

[1437] We conclude that the MHC(peptide)/APC dextran constructs can be used to detect the presence of Borrelia specific T cells in the blood of patients infected with Borrelia.

### Example 71

[1438] This is an example of how MHC multimers may be used for diagnosis of Lyme Disease in blood samples from humans infected with Borrelia bacteria.

[1439] In this example the MHC multimer used are MHC complexes coupled to the fluorophor-labelled multimerisation domain Streptavidin (SA), used for direct detection of TCR in flow Cytometry. The antigen origin is Borrelia, thus, immune monitoring of a Borrelia infection. Lyme disease is caused by infection by Borrelia bacteria. During acute infection Borrelia specific activated T cells will be present in increased amounts in an activated state compared to healthy individuals. The presences of an increased amount of activated Borrelia specific T cells may thereby act as a surrogate marker for infection with Borrelia bacterium. MHC multimers carrying borrelia specific peptides is in this example used to detect the presence of Borrelia specific T cells in the blood of patients infected with Borrelia.

[1440] Purified MHC-peptide complexes consisting of HLA-A*0201 heavy chain, human beta2 microglobulin and peptide derived from regions in Outer surface protein A (Table V) or Flagellin B (Table X) conserved among the three species Borrelia Burgdorferi, Borrelia Garinii and Borrelia Afzelii or a negative control peptide were generated by in vitro refolding, purified and biotinylated as described elsewhere herein. Biotinylated MHC-peptide complexes are then coupled SA labelled with APC. MHC-peptide complexes were added in an amount corresponding to a ratio of 5 MHC-peptide molecules per SA molecule. Then SA/APC carrying four MHC complexes were purified from free SA, free monomeric MHC complex, SA carrying three, two and one MHC complexes.

[1441] The following SA-MHC(peptide)/APC tetramers are made:
[1442] 82. APC-SA coupled with HLA-A*0201 in complex with beta2 microglobulin and the peptide ALIACKQNV derived from OspA.
[1443] 83. APC-SA coupled with HLA-A*0201 in complex with beta2 microglobulin and the peptide FTKEDTIT derived from OspA.
[1444] 84. APC-SA coupled with HLA-A*0201 in complex with beta2 microglobulin and the peptide SIQIEIEQL derived from Fla B.
[1445] 85. APC-SA coupled with HLA-A*0201 in complex with beta2 microglobulin and the peptide NLNEVEKVL derived from Fla B.
[1446] 86. APC-SA coupled with HLA-A*0201 in complex with beta2 microglobulin and the peptide SLAKIENAI derived from Fla B.
[1447] 87. APC-SA coupled with HLA-A*0201 in complex with beta2 microglobulin and the non-sense peptide GLAGDVSAV

[1448] The binding of the above described MHC(peptide)/APC dextran can be used to determine the presence of Osp A or Fla B specific T cells in the blood from Borrelia infected individuals by flow cytometry following a standard flow cytometry protocol.

[1449] Blood from a patient with Lyme disease is isolated and 100 ul of this blood is incubated with either of the four SA-MHC(peptide)/APC tetramers described above for 10 minutes in the dark at room temperature. 5 μl of each of each of the antibodies mouse-anti-human CD3/PB (clone UCHT1 from Dako) and mouse-anti-human CD8/PE (clone DK25 from Dako) are added and the incubation continued for another 20 minutes at 4° C. in the dark. The samples are then washed by adding 2 ml PBS; pH=7.2 followed by centrifugation for 5 minutes at 200×g and the supernatant removed. The washing step is repeated. The washed cells are resuspended in 400-500 μl PBS; pH=7.2 and analyzed on flowcytometer.

[1450] The presence of cells labeled with anti-CD3/PB, anti-CD8/PE and either of the SA-MHC(peptide)/APC tetramers 7, 8, 9, 10 or 11 described above and thereby the presence of Borrelia specific T cells will indicate that the patient are infected with Borrelia bacteria. Blood analysed with SA-MHC(peptide)/APC tetramers 12 should show no staining of CD3 and CD8 positive cells with this SA-MHC(peptide)/APC tetramer.

[1451] The sensitivity of the above described diagnostic test may be enhanced by addition of labeled antibodies specific for activation markers expressed in or on the surface of the Borrelia specific T cells.

[1452] We conclude that the APC-SA coupled MHC(peptide) constructs may be used to detect the presence of Borrelia specific T cells in the blood of patients infected with Borrelia.

### Example 72

[1453] This is an example of how MHC multimers may be used for diagnosis of Lyme Disease in blood samples from humans infected with Borrelia bacteria.

[1454] In this example the MHC multimer used are MHC complexes coupled to any fluorophor-labelled multimerisation as described elsewhere herein. The MHC multimers are used for direct detection of TCR in flow cytometry. The antigen origin is Borrelia, thus, immune monitoring of a Borrelia infection.

[1455] Lyme disease is caused by infection by Borrelia bacteria. During acute infection Borrelia specific activated T cells will be present in increased amounts in an activated state compared to healthy individuals. The presences of an increased amount of activated Borrelia specific T cells may thereby act as a surrogate marker for infection with Borrelia bacterium. MHC multimers carrying borrelia specific peptides is in this example used to detect the presence of Borrelia specific T cells in the blood of patients infected with Borrelia.

[1456] Purified MHC-peptide complexes consisting of HLA-A*0201 heavy chain, human beta2 microglobulin and peptide derived from regions in Outer surface protein A (Table V) or Flagellin B (Table X) conserved among the three species Borrelia Burgdorferi, Borrelia Garinii and Borrelia Afzelii or a negative control peptide were generated by in vitro refolding and purified or purified from antigen presenting cells. MHC-peptide complexes are then coupled to a multimerisation domain together with APC.

[1457] The following MHC(peptide)/APC multimers are made:
[1458] 88. APC-multimerisation domain coupled with HLA-A*0201 in complex with beta2 microglobulin and the peptide ALIACKQNV derived from OspA.
[1459] 89. APC-multimerisation domain coupled with HLA-A*0201 in complex with beta2 microglobulin and the peptide FTKEDTIT derived from OspA.
[1460] 90. APC-multimerisation domain coupled with HLA-A*0201 in complex with beta2 microglobulin and the peptide SIQIEIEQL derived from Fla B.
[1461] 91. APC-multimerisation domain coupled with HLA-A*0201 in complex with beta2 microglobulin and the peptide NLNEVEKVL derived from Fla B.
[1462] 92. APC-multimerisation domain coupled with HLA-A*0201 in complex with beta2 microglobulin and the peptide SLAKIENAI derived from Fla B.
[1463] 93. APC-multimerisation domain coupled with HLA-A*0201 in complex with beta2 microglobulin and the non-sense peptide GLAGDVSAV

[1464] The binding of the above described MHC(peptide)/APC multimers can be used to determine the presence of Osp A or Fla B specific T cells in the blood from Borrelia infected individuals by flow cytometry following a standard flow cytometry protocol.

[1465] Blood from a patient with Lyme disease is isolated and 100 ul of this blood is incubated with either of the four MHC(peptide)/APC multimers described above for 10 minutes in the dark at room temperature. 5 μl of each of each of the antibodies mouse-anti-human CD3/PB (clone UCHT1 from Dako) and mouse-anti-human CD8/PE (clone DK25 from Dako) are added and the incubation continued for another 20 minutes at 4° C. in the dark. The samples are then washed by adding 2 ml PBS; pH=7.2 followed by centrifugation for 5 minutes at 200×g and the supernatant removed. The washing step is repeated. The washed cells are resuspended in 400-500 μl PBS; pH=7.2 and analyzed on flowcytometer.

[1466] The presence of cells labeled with anti-CD3/PB, anti-CD8/PE and either of the MHC(peptide)/APC multimers 13, 14, 15, 16 or 17 described above and thereby the presence of Borrelia specific T cells will indicate that the patient are infected with Borrelia bacteria. Blood analysed with MHC(peptide)/APC multimer 18 should show no staining of CD3 and CD8 positive cells with this SA-MHC(peptide)/APC multimer.

[1467] The sensitivity of the above described diagnostic test may be enhanced by addition of labeled antibodies specific for activation markers expressed in or on the surface of the Borrelia specific T cells.

[1468] We conclude that the APC-multimerisation domain coupled MHC(peptide) constructs may be used to detect the presence of Borrelia specific T cells in the blood of patients infected with Borrelia.

### Example 73

[1469] This is an example of how MHC multimers may be used for diagnosis of Lyme Disease in blood samples from humans infected with Borrelia bacteria.

[1470] In this example the MHC multimer used are MHC complexes coupled to fluorophor-labelled dextran (Dextramers). The dextramers are used for direct detection of TCR in flow Cytometry. The antigen origin is Borrelia, thus, immune monitoring of a Borrelia infection.

[1471] Lyme disease is caused by infection by Borrelia bacteria. During acute infection Borrelia specific activated T cells will be present in increased amounts in an activated state compared to healthy individuals. The presences of an increased amount of activated Borrelia specific T cells may thereby act as a surrogate marker for infection with Borrelia bacterium. MHC multimers carrying borrelia specific peptides is in this example used to detect the presence of Borrelia specific T cells in the blood of patients infected with Borrelia.

[1472] Purified MHC-peptide complexes consisting of HLA-A*0301 heavy chain, human beta2 microglobulin and peptide derived from regions in Outer surface protein C (Table U) conserved among the three species Borrelia Burgdorferi, Borrelia Garinii and Borrelia Afzelii or a negative control peptide were generated by in vitro refolding, purified and biotinylated as described elsewhere herein. Biotinylated MHC-peptide complexes were then coupled to a 270 kDa dextran multimerization domain labelled with APC by interaction with streptavidin (SA) on the dextran multimerization domain. The dextran-APC-SA multimerization domain was generated as described elsewhere herein. MHC-peptide complexes were added in an amount corresponding to a ratio of three MHC-peptide molecules per SA molecule and each molecule dextran contained 3.7 SA molecule and 8.95 molecules APC. The final concentration of dextran was 3.8×10e-8 M. The following MHC(peptide)/APC dextran constructs were made:
[1473] 94. APC-SA conjugated 270 kDa dextran coupled with HLA-A*0301 in complex with beta2 microglobulin and the peptide TLITEKLSK derived from OspC.
[1474] 95. APC-SA conjugated 270 kDa dextran coupled with HLA-A*0301 in complex with beta2 microglobulin and the peptide ELANKAIGK derived from OspC.
[1475] 96. APC-SA conjugated 270 kDa dextran coupled with HLA-A*0301 in complex with beta2 microglobulin and the HIV peptide QVPLRPMTYK.

[1476] The binding of the above described MHC(peptide)/APC dextran can be used to determine the presence of Osp C specific T cells in the blood from Borrelia infected individuals by flow cytometry following a standard flow cytometry protocol.

[1477] Blood from a patient with Lyme disease is isolated and 100 ul of this blood is incubated with 10 μl of one of the MHC(peptide)/APC dextran constructs described above for 10 minutes in the dark at room temperature. 5 μl of each of each of the antibodies mouse-anti-human CD3/PB (clone UCHT1 from Dako) and mouse-anti-human CD8/PE (clone DK25 from Dako) are added and the incubation continued for another 20 minutes at 4° C. in the dark. The samples are then washed by adding 2 ml PBS; pH=7.2 followed by centrifugation for 5 minutes at 200×g and the supernatant removed. The washing step is repeated. The washed cells are resuspended in 400-500 μl PBS; pH=7.2 and analyzed on flowcytometer.

[1478] The presence of cells labeled with anti-CD3/PB, anti-CD8/PE and either of the MHC(peptide)/APC dextran constructs 19 or 20 described above and thereby the presence of Borrelia specific T cells will indicate that the patient are infected with Borrelia bacteria. Blood analysed with MHC(peptide)/APC dextran construct 21 should show no staining of CD3 and CD8 positive cells with this MHC(peptide)/APC dextran construct.

[1479] The sensitivity of the above described diagnostic test may be enhanced by addition of labeled antibodies specific for activation markers expressed in or on the surface of the Borrelia specific T cells.

[1480] We conclude that the APC-SA conjugated 270 kDa dextran coupled MHC(peptide) constructs may be used to detect the presence of Borrelia specific T cells in the blood of patients infected with Borrelia.

### Example 74

[1481] This is an example of how MHC multimers may be used for diagnosis of Lyme Disease in blood samples from humans infected with Borrelia bacteria.

[1482] In this example the MHC multimer used are MHC complexes coupled to the fluorophor-labelled multimerisation domain Streptavidin (SA), used for direct detection of TCR in flow Cytometry. The antigen origin is Borrelia, thus, immune monitoring of a Borrelia infection.

[1483] Lyme disease is caused by infection by Borrelia bacteria. During acute infection Borrelia specific activated T cells will be present in increased amounts in an activated state compared to healthy individuals. The presences of an increased amount of activated Borrelia specific T cells may thereby act as a surrogate marker for infection with Borrelia bacterium. MHC multimers carrying borrelia specific peptides is in this example used to detect the presence of Borrelia specific T cells in the blood of patients infected with Borrelia.

[1484] Purified MHC-peptide complexes consisting of HLA-A*0301 heavy chain, human beta2 microglobulin and peptide derived from regions in Outer surface protein C (Table U) conserved among the three species Borrelia Burgdorferi, Borrelia Garinii and Borrelia Afzelii or a negative control peptide were generated by in vitro refolding, purified and biotinylated as described elsewhere herein. Biotinylated MHC-peptide complexes are then coupled SA labelled with APC. MHC-peptide complexes were added in an amount corresponding to a ratio of 5 MHC-peptide molecules per SA molecule. Then SA/APC carrying four MHC complexes were purified from free SA, free monomeric MHC complex, SA carrying three, two and one MHC complexes.

[1485] The following SA-MHC(peptide)/APC tetramers are made:
[1486] 97. APC-SA coupled with HLA-A*0301 in complex with beta2 microglobulin and the peptide TLITEKLSK derived from OspC.
[1487] 98. APC-SA coupled with HLA-A*0301 in complex with beta2 microglobulin and the peptide ELANKAIGK derived from OspC.
[1488] 99. APC-SA coupled with HLA-A*0201 in complex with beta2 microglobulin and the HIV peptide QVPLRPMTYK.

[1489] The binding of the above described MHC(peptide)/APC dextran can be used to determine the presence of Osp C specific T cells in the blood from Borrelia infected individuals by flow cytometry following a standard flow cytometry protocol.

[1490] Blood from a patient with Lyme disease is isolated and 100 ul of this blood is incubated with either of the four SA-MHC(peptide)/APC tetramers described above for 10 minutes in the dark at room temperature. 5 μl of each of each of the antibodies mouse-anti-human CD3/PB (clone UCHT1 from Dako) and mouse-anti-human CD8/PE (clone DK25 from Dako) are added and the incubation continued for another 20 minutes at 4° C. in the dark. The samples are then washed by adding 2 ml PBS; pH=7.2 followed by centrifugation for 5 minutes at 200×g and the supernatant removed. The washing step is repeated. The washed cells are resuspended in 400-500 μl PBS; pH=7.2 and analyzed on flowcytometer.

[1491] The presence of cells labeled with anti-CD3/PB, anti-CD8/PE and either of the SA-MHC(peptide)/APC tetramers 22 or 23 described above and thereby the presence of Borrelia specific T cells will indicate that the patient are infected with Borrelia bacteria. Blood analysed with SA-MHC(peptide)/APC tetramers 24 should show no staining of CD3 and CD8 positive cells with this SA-MHC(peptide)/APC tetramer.

[1492] The sensitivity of the above described diagnostic test may be enhanced by addition of labeled antibodies specific for activation markers expressed in or on the surface of the Borrelia specific T cells.

[1493] We conclude that the APC-SA coupled MHC(peptide) constructs may be used to detect the presence of Borrelia specific T cells in the blood of patients infected with Borrelia.

### Example 75

[1494] This is an example of how MHC multimers may be used for diagnosis of Lyme Disease in blood samples from humans infected with Borrelia bacteria.

[1495] In this example the MHC multimer used are MHC complexes coupled to any fluorophor-labelled multimerisation as described elsewhere herein. The MHC multimers are used for direct detection of TCR in flow cytometry. The antigen origin is Borrelia, thus, immune monitoring of a Borrelia infection.

[1496] Lyme disease is caused by infection by Borrelia bacteria. During acute infection Borrelia specific activated T cells will be present in increased amounts in an activated state compared to healthy individuals. The presences of an increased amount of activated Borrelia specific T cells may thereby act as a surrogate marker for infection with Borrelia bacterium. MHC multimers carrying borrelia specific peptides is in this example used to detect the presence of Borrelia specific T cells in the blood of patients infected with Borrelia.

[1497] Purified MHC-peptide complexes consisting of HLA-A*0201 heavy chain, human beta2 microglobulin and peptide derived from regions in Outer surface protein C (Table U) conserved among the three species Borrelia Burgdorferi, Borrelia Garinii and Borrelia Afzelii or a negative control peptide were generated by in vitro refolding and purified or purified from antigen presenting cells. MHC-peptide complexes are then coupled to a multimerisation domain together with APC.

[1498] The following MHC(peptide)/APC multimers are made:
[1499] 100. APC-multimerisation domain coupled with HLA-A*0201 in complex with beta2 microglobulin and the peptide TLITEKLSK derived from OspC.
[1500] 101. APC-multimerisation domain coupled with HLA-A*0201 in complex with beta2 microglobulin and the peptide ELANKAIG derived from OspC.
[1501] 102. APC-multimerisation domain coupled with HLA-A*0201 in complex with beta2 microglobulin and the HIV peptide QVPLRPMTYK.

[1502] The binding of the above described MHC(peptide)/APC multimers can be used to determine the presence of Osp C specific T cells in the blood from Borrelia infected individuals by flow cytometry following a standard flow cytometry protocol.

[1503] Blood from a patient with Lyme disease is isolated and 100 ul of this blood is incubated with either of the four MHC(peptide)/APC multimers described above for 10 minutes in the dark at room temperature. 5 μl of each of each of the antibodies mouse-anti-human CD3/PB (clone UCHT1 from Dako) and mouse-anti-human CD8/PE (clone DK25 from Dako) are added and the incubation continued for another 20 minutes at 4° C. in the dark. The samples are then washed by adding 2 ml PBS; pH=7.2 followed by centrifugation for 5 minutes at 200×g and the supernatant removed. The washing step is repeated. The washed cells are resuspended in 400-500 μl PBS; pH=7.2 and analyzed on flowcytometer.

[1504] The presence of cells labeled with anti-CD3/PB, anti-CD8/PE and either of the MHC(peptide)/APC multimers 25 or 26 described above and thereby the presence of Borrelia specific T cells will indicate that the patient are infected with Borrelia bacteria. Blood analysed with MHC(peptide)/APC multimer 27 should show no staining of CD3 and CD8 positive cells with this SA-MHC(peptide)/APC multimer.

[1505] The sensitivity of the above described diagnostic test may be enhanced by addition of labeled antibodies specific for activation markers expressed in or on the surface of the Borrelia specific T cells.

[1506] We conclude that the APC-multimerisation domain coupled MHC(peptide) constructs may be used to detect the presence of Borrelia specific T cells in the blood of patients infected with Borrelia.

### Example 76

[1507] This is an example of how MHC multimers may be used for detection of Cytomegalovirus (CMV) specific T cells in blood samples from humans infected with CMV.

[1508] In this example the MHC multimer used are MHC complexes coupled to fluorophor-labelled dextran (Dextramers). The dextramers are used for direct detection of TCR in flow cytometry. The antigen origin is CMV, thus, immune monitoring of CMV.

[1509] MHC multimers carrying CMV specific peptides is in this example used to detect the presence of CMV specific T cells in the blood of patients infected with Cytomegalovirus.

[1510] Purified MHC-peptide complexes consisting of HLA-A*0201 heavy chain, human beta2 microglobulin and peptide derived from a region in CMV internal matrix protein pp 65 or a negative control peptide are generated by in vitro refolding, purified and biotinylated as described elsewhere herein. Biotinylated MHC-peptide complexes are then coupled to a 270 kDa dextran multimerization domain labelled with APC by interaction with streptavidin (SA) on the dextran multimerization domain. The dextran-APC-SA multimerization domain is generated as described elsewhere herein. MHC-peptide complexes are added in an amount corresponding to a ratio of three MHC-peptide molecules per SA molecule and each molecule dextran contains 3.7 SA molecule and 8.95 molecules APC. The final concentration of dextran is 3.8×10e-8 M. The following MHC(peptide)/APC dextran constructs are made:
[1511] 103. APC-SA conjugated 270 kDa dextran coupled with HLA-A*0201 in complex with beta2 microglobulin and the peptide NLVPMVATV derived from CMV pp 65.
[1512] 104. APC-SA conjugated 270 kDa dextran coupled with HLA-A*0201 in complex with beta2 microglobulin and the non-sense peptide GLAGDVSAV

[1513] The binding of the above described MHC(peptide)/APC dextran is used to determine the presence of CMV pp 65 specific T cells in the blood from CMV infected individuals by flow cytometry following a standard flow cytometry protocol.

[1514] Blood from a patient with CMV infection is isolated and 100 ul of this blood is incubated with 10 μl of the MHC(peptide)/APC dextran constructs described above for 10 minutes in the dark at room temperature. 5 μl of each of each of the antibodies mouse-anti-human CD3/PB (clone UCHT1 from Dako), and mouse-anti-human CD8/PE (clone DK25 from Dako) are added and the incubation continues for another 20 minutes at 4° C. in the dark. The samples are then washed by adding 2 ml PBS; pH=7.2 followed by centrifugation for 5 minutes at 300×g and the supernatant removed. The washing step is repeated twice. The washed cells are resuspended in 400-500 μl PBS+1% BSA; pH=7.2 and analyzed on flowcytometer. The presence of cells labeled with anti-CD3/PB, anti-CD8/PE and the MHC(peptide)/APC dextran construct 1 described above and thereby the presence of CMV specific T cells indicate that the patient are infected with Cytomegalovirus. Blood analysed with MHC(peptide)/APC dextran construct 2 show no staining of CD3 and CD8 positive cells with this MHC(peptide)/APC dextran construct. The result is shown I FIG. 20

[1515] The sensitivity of the above described test may be enhanced by addition of labeled antibodies specific for activation markers expressed in or on the surface of the CMV specific T cells.

[1516] We conclude that the MHC(peptide)/APC dextran constructs can be used to detect the presence of CMV specific T cells in the blood of patients infected with Cytomegalovirus.

### Example 77

[1517] This is an example of how MHC multimers may be used for detection of Cytomegalovirus (CMV) specific T cells in blood samples from humans infected with CMV.

[1518] In this example the MHC multimer used are MHC complexes coupled to fluorophor-labelled multimerisation domain Streptavidin (SA), used for direct detection of TCR in flow cytometry. The antigen origin is CMV, thus, immune monitoring of CMV.

[1519] MHC multimers carrying CMV specific peptides is in this example used to detect the presence of CMV specific T cells in the blood of patients infected with Cytomegalovirus.

[1520] Purified MHC-peptide complexes consisting of HLA-A*0201 heavy chain, human beta2 microglobulin and peptide derived from a region in CMV internal matrix protein pp 65 or a negative control peptide were generated by in vitro refolding, purified and biotinylated as described elsewhere herein. Biotinylated MHC-peptide complexes are then coupled SA labelled with APC. MHC-peptide complexes were added in an amount corresponding to a ratio of 5 MHC-peptide molecules per SA molecule. Then SA/APC carrying four MHC complexes were purified from free SA, free monomeric MHC complex, SA carrying three, two and one MHC complexes.

[1521] The following SA-MHC(peptide)/APC tetramers are made:
[1522] 105. APC-SA coupled with HLA-A*0201 in complex with beta2 microglobulin and the peptide NLVPMVATV derived from CMV pp 65.
[1523] 106. APC-SA coupled with HLA-A*0201 in complex with beta2 microglobulin and the non-sense peptide GLAGDVSAV

[1524] The binding of the above described MHC(peptide)/APC dextran can be used to determine the presence of CMV pp 65 specific T cells in the blood from Cytomegalovirus infected individuals by flow cytometry following a standard flow cytometry protocol.

[1525] Blood from a patient with CMV is isolated and 100 ul of this blood is incubated with either of the SA-MHC(peptide)/APC tetramers described above for 10 minutes in the dark at room temperature. 5 μl of each of each of the antibodies mouse-anti-human CD3/PB (clone UCHT1 from Dako) and mouse-anti-human CD8/PE (clone DK25 from Dako) are added and the incubation continued for another 20 minutes at 4° C. in the dark. The samples are then washed by adding 2 ml PBS; pH=7.2 followed by centrifugation for 5 minutes at 200×g and the supernatant removed. The washing step is repeated. The washed cells are resuspended in 400-500 μl PBS; pH=7.2 and analyzed on flowcytometer.

[1526] The presence of cells labeled with anti-CD3/PB, anti-CD8/PE and the SA-MHC(peptide)/APC tetramers 3 described above and thereby the presence of CMV specific T cells will indicate that the patient are infected with Cytomegalovirus. Blood analysed with SA-MHC(peptide)/APC tetramers 4 should show no staining of CD3 and CD8 positive cells with this SA-MHC(peptide)/APC tetramer.

[1527] The sensitivity of the above described test may be enhanced by addition of labeled antibodies specific for activation markers expressed in or on the surface of the CMV specific T cells.

[1528] We conclude that the APC-SA coupled MHC(peptide) constructs may be used to detect the presence of CMV specific T cells in the blood of patients infected with Cytomegalovirus.

### Example 78

[1529] This is an example of how MHC multimers may be used for detection of Cytomegalovirus (CMV) specific T cells in blood samples from humans infected with CMV.

[1530] In this example the MHC multimer used are MHC complexes coupled to any fluorophor-labelled multimerisation as described elsewhere herein. The MHC multimers are used for direct detection of TCR in flow cytometry. The antigen origin is CMV, thus, immune monitoring of CMV.

[1531] MHC multimers carrying CMV specific peptides is in this example used to detect the presence of CMV specific T cells in the blood of patients infected with Cytomegalovirus.

[1532] Purified MHC-peptide complexes consisting of HLA-A*0201 heavy chain, human beta2 microglobulin and peptide derived a region in CMV internal matrix protein pp 65 or a negative control peptide were generated by in vitro refolding and purified or purified from antigen presenting cells. MHC-peptide complexes are then coupled to a multimerisation domain together with APC.

[1533] The following MHC(peptide)/APC multimers are made:
[1534] 107. APC-multimerisation domain coupled with HLA-A*0201 in complex with beta2 microglobulin and the peptide NLVPMVATV derived from CMV pp 65.
[1535] 108. APC-multimerisation domain coupled with HLA-A*0201 in complex with beta2 microglobulin and the non-sense peptide GLAGDVSAV.

[1536] The binding of the above described MHC(peptide)/APC multimers can be used to determine the presence of CMV pp 65 specific T cells in the blood from CMV infected individuals by flow cytometry following a standard flow cytometry protocol.

[1537] Blood from a patient with CMV infection is isolated and 100 ul of this blood is incubated with either of the MHC(peptide)/APC multimers described above for 10 minutes in the dark at room temperature. 5 μl of each of each of the antibodies mouse-anti-human CD3/PB (clone UCHT1 from Dako) and mouse-anti-human CD8/PE (clone DK25 from Dako) are added and the incubation continued for another 20 minutes at 4° C. in the dark. The samples are then washed by adding 2 ml PBS; pH=7.2 followed by centrifugation for 5 minutes at 200×g and the supernatant removed. The washing step is repeated. The washed cells are resuspended in 400-500 μl PBS; pH=7.2 and analyzed on flowcytometer.

[1538] The presence of cells labeled with anti-CD3/PB, anti-CD8/PE and the MHC(peptide)/APC multimers 5 described above and thereby the presence of CMV specific T cells will indicate that the patient are infected with Cytomegalovirus. Blood analysed with MHC(peptide)/APC multimer 6 should show no staining of CD3 and CD8 positive cells with this SA-MHC(peptide)/APC multimer.

[1539] The sensitivity of the above described test may be enhanced by addition of labeled antibodies specific for activation markers expressed in or on the surface of the CMV specific T cells.

[1540] We conclude that the APC-multimerisation domain coupled MHC(peptide) constructs may be used to detect the presence of CMV specific T cells in the blood of patients infected with Cytomegalovirus.

### Example 79

[1541] This is an example of how MHC multimers may be used for detection of Cytomegalovirus (CMV) specific T cells in blood samples from humans infected with CMV.

[1542] In this example the MHC multimer used are MHC complexes coupled to fluorophor-labelled dextran (Dextramers). The dextramers are used for direct detection of TCR in flow cytometry. The antigen origin is CMV, thus, immune monitoring of CMV.

[1543] MHC multimers carrying CMV specific peptides is in this example used to detect the presence of CMV specific T cells in the blood of patients infected with Cytomegalovirus.

[1544] Purified MHC-peptide complexes consisting of HLA-A*2402 heavy chain, human beta2 microglobulin and peptide derived from a region in CMV internal matrix protein pp 65 or a negative control peptide are generated by in vitro refolding, purified and biotinylated as described elsewhere herein. Biotinylated MHC-peptide complexes are then coupled to a 270 kDa dextran multimerization domain labelled with APC by interaction with streptavidin (SA) on the dextran multimerization domain. The dextran-APC-SA multimerization domain is generated as described elsewhere herein. MHC-peptide complexes are added in an amount corresponding to a ratio of three MHC-peptide molecules per SA molecule and each molecule dextran contains 3.7 SA molecule and 8.95 molecules APC. The final concentration of dextran is 3.8×10e-8 M. The following MHC(peptide)/APC dextran constructs are made:
[1545] 109. APC-SA conjugated 270 kDa dextran coupled with HLA-A*2402 in complex with beta2 microglobulin and the peptide QYDPVAALF derived from CMV pp 65.
[1546] 110. APC-SA conjugated 270 kDa dextran coupled with HLA-A*2402 in complex with beta2 microglobulin and the peptide VYALPLKML derived from CMV pp 65.
[1547] 111. APC-SA conjugated 270 kDa dextran coupled with HLA-A*2402 in complex with beta2 microglobulin and the non-sense peptide.

[1548] The binding of the above described MHC(peptide)/APC dextran is used to determine the presence of CMV pp 65 specific T cells in the blood from CMV infected individuals by flow cytometry following a standard flow cytometry protocol.

[1549] Blood from a patient with CMV infection is isolated and 100 ul of this blood is incubated with 10 μl of the MHC(peptide)/APC dextran constructs described above for 10 minutes in the dark at room temperature. 5 μl of each of each of the antibodies mouse-anti-human CD3/PB (clone UCHT1 from Dako), and mouse-anti-human CD8/PE (clone DK25 from Dako) are added and the incubation continues for another 20 minutes at 4° C. in the dark. The samples are then washed by adding 2 ml PBS; pH=7.2 followed by centrifugation for 5 minutes at 300×g and the supernatant removed. The washing step is repeated. The washed cells are resuspended in 400-500 μl PBS+1% BSA; pH=7.2 and analyzed on flowcytometer.

[1550] The presence of cells labeled with anti-CD3/PB, anti-CD8/PE and the MHC(peptide)/APC dextran constructs 7 or 8 described above and thereby the presence of CMV specific T cells indicate that the patient are infected with Cytomegalovirus. Blood analysed with MHC(peptide)/APC dextran construct 9 show no staining of CD3 and CD8 positive cells with this MHC(peptide)/APC dextran construct.

[1551] The sensitivity of the above described test may be enhanced by addition of labeled antibodies specific for activation markers expressed in or on the surface of the CMV specific T cells.

[1552] We conclude that the MHC(peptide)/APC dextran constructs can be used to detect the presence of CMV specific T cells in the blood of patients infected with Cytomegalovirus.

### Example 80

[1553] This is an example of how MHC multimers may be used for detection of Cytomegalovirus (CMV) specific T cells in blood samples from humans infected with CMV.

[1554] In this example the MHC multimer used are MHC complexes coupled to fluorophor-labelled multimerisation domain Streptavidin (SA), used for direct detection of TCR in flow cytometry. The antigen origin is CMV, thus, immune monitoring of CMV.

[1555] MHC multimers carrying CMV specific peptides is in this example used to detect the presence of CMV specific T cells in the blood of patients infected with Cytomegalovirus.

[1556] Purified MHC-peptide complexes consisting of HLA-A*2402 heavy chain, human beta2 microglobulin and peptide derived from a region in CMV internal matrix protein pp 65 or a negative control peptide were generated by in vitro refolding, purified and biotinylated as described elsewhere herein. Biotinylated MHC-peptide complexes are then coupled SA labelled with APC. MHC-peptide complexes were added in an amount corresponding to a ratio of 5 MHC-peptide molecules per SA molecule. Then SA/APC carrying four MHC complexes were purified from free SA, free monomeric MHC complex, SA carrying three, two and one MHC complexes.

[1557] The following SA-MHC(peptide)/APC tetramers are made:
[1558] 112. APC-SA coupled with HLA-A*2402 in complex with beta2 microglobulin and the peptide QYDPVAALF derived from CMV pp 65.
[1559] 113. APC-SA coupled with HLA-A*2402 in complex with beta2 microglobulin and the peptide VYALPLKML derived from CMV pp 65.
[1560] 114. APC-SA coupled with HLA-A*2402 in complex with beta2 microglobulin and the non-sense peptide.

[1561] The binding of the above described MHC(peptide)/APC dextran can be used to determine the presence of CMV pp 65 specific T cells in the blood from Cytomegalovirus infected individuals by flow cytometry following a standard flow cytometry protocol.

[1562] Blood from a patient with CMV is isolated and 100 ul of this blood is incubated with either of the SA-MHC(peptide)/APC tetramers described above for 10 minutes in the dark at room temperature. 5 μl of each of each of the antibodies mouse-anti-human CD3/PB (clone UCHT1 from Dako) and mouse-anti-human CD8/PE (clone DK25 from Dako) are added and the incubation continued for another 20 minutes at 4° C. in the dark. The samples are then washed by adding 2 ml PBS; pH=7.2 followed by centrifugation for 5 minutes at 200×g and the supernatant removed. The washing step is repeated. The washed cells are resuspended in 400-500 μl PBS; pH=7.2 and analyzed on flowcytometer.

[1563] The presence of cells labeled with anti-CD3/PB, anti-CD8/PE and either of the SA-MHC(peptide)/APC tetramers 10 or 11 described above and thereby the presence of CMV specific T cells will indicate that the patient are infected with Cytomegalovirus. Blood analysed with SA-MHC(peptide)/APC tetramers 12 should show no staining of CD3 and CD8 positive cells with this SA-MHC(peptide)/APC tetramer.

[1564] The sensitivity of the above described test may be enhanced by addition of labeled antibodies specific for activation markers expressed in or on the surface of the CMV specific T cells.

[1565] We conclude that the APC-SA coupled MHC(peptide) constructs may be used to detect the presence of CMV specific T cells in the blood of patients infected with Cytomegalovirus.

### Example 81

[1566] This is an example of how MHC multimers may be used for detection of Cytomegalovirus (CMV) specific T cells in blood samples from humans infected with CMV.

[1567] In this example the MHC multimer used are MHC complexes coupled to any fluorophor-labelled multimerisation as described elsewhere herein. The MHC multimers are used for direct detection of TCR in flow cytometry. The antigen origin is CMV, thus, immune monitoring of CMV.

[1568] MHC multimers carrying CMV specific peptides is in this example used to detect the presence of CMV specific T cells in the blood of patients infected with Cytomegalovirus.

[1569] Purified MHC-peptide complexes consisting of HLA-A*2402 heavy chain, human beta2 microglobulin and peptide derived a region in CMV internal matrix protein pp 65 or a negative control peptide were generated by in vitro refolding and purified or purified from antigen presenting cells. MHC-peptide complexes are then coupled to a multimerisation domain together with APC.

[1570] The following MHC(peptide)/APC multimers are made:
[1571] 115. APC-multimerisation domain coupled with HLA-A*2402 in complex with beta2 microglobulin and the peptide QYDPVAALF derived from CMV pp 65.
[1572] 116. APC-multimerisation domain coupled with HLA-A*2402 in complex with beta2 microglobulin and the peptide VYALPLKML derived from CMV pp 65.
[1573] 117. APC-multimerisation domain coupled with HLA-A*2402 in complex with beta2 microglobulin and the non-sense peptide.

[1574] The binding of the above described MHC(peptide)/APC multimers can be used to determine the presence of CMV pp 65 specific T cells in the blood from CMV infected individuals by flow cytometry following a standard flow cytometry protocol.

[1575] Blood from a patient with CMV infection is isolated and 100 ul of this blood is incubated with either of the MHC(peptide)/APC multimers described above for 10 minutes in the dark at room temperature. 5 μl of each of each of the antibodies mouse-anti-human CD3/PB (clone UCHT1 from Dako) and mouse-anti-human CD8/PE (clone DK25 from Dako) are added and the incubation continued for another 20 minutes at 4° C. in the dark. The samples are then washed by adding 2 ml PBS; pH=7.2 followed by centrifugation for 5 minutes at 200×g and the supernatant removed. The washing step is repeated. The washed cells are resuspended in 400-500 μl PBS; pH=7.2 and analyzed on flowcytometer.

[1576] The presence of cells labeled with anti-CD3/PB, anti-CD8/PE and either of the MHC(peptide)/APC multimers 13 or 14 described above and thereby the presence of CMV specific T cells will indicate that the patient are infected with Cytomegalovirus. Blood analysed with MHC(peptide)/APC multimer 15 should show no staining of CD3 and CD8 positive cells with this SA-MHC(peptide)/APC multimer.

[1577] The sensitivity of the above described test may be enhanced by addition of labeled antibodies specific for activation markers expressed in or on the surface of the CMV specific T cells.

[1578] We conclude that the APC-multimerisation domain coupled MHC(peptide) constructs may be used to detect the presence of CMV specific T cells in the blood of patients infected with Cytomegalovirus.

### Example 82

[1579] This is an example of measurement of antigen reactive T-Cells by IFN-γ capture in blood samples by ELISPOT.

[1580] This is an example of indirect detection of TCR, where individual cells are immobilized and measured by a chromogen assay.

[1581] The example provides a sensitive assay for the detection of T-cells reactive to an antigen by detecting a soluble factor whose secretion is induced by stimulation of the T-cell by the antigen.

[1582] A summary flow chart of the method is shown in FIG. 20. In brief, peripheral blood is diluted threefold in Dulbecco's phosphate buffered saline (DPBS), underlain with 15 ml of Ficoll (Pharmacia Ficoll-Paque #17-0840-O₂, Piscataway, N.J.) per 40 ml diluted blood in a 50 ml polypropylene centrifuge tube, and spun at 2000 RPM for 20 minutes in a Beckman CS-6R centrifuge (Beckman Inc., Palo Alto, Calif.). The buffy layer at the DPBS/Ficoll interface is removed, washed twice with DPBS and once with human tissue culture medium (hTCM: αMEM+5% heat inactivated human AB serum (Ultraserum, BioWhittaker, Walkersville, Md.), penicillin/streptomycin, 1-glutamine) at low RCF to remove platelets. Sixty percent of the PBMCs are resuspended in freezing medium (10% dimethyl sulfoxide(Sigma Chemical Co., St. Louis, Mo.), 90% fetal bovine serum to a concentration of 5×10⁶ cells/ml, frozen in a programmable Cryo-Med (New Baltimore, Mich.) cell freezer, and stored under liquid nitrogen until needed.

[1583] The purified PBMCs are plated at 2×10⁵ cells/well at a volume of 0.1 ml in 96 well Costar cell culture plates. An equal volume of antigen at 10 μg/ml is added to triplicate or sextuplet sets of wells and the plate is incubated in a 37° C., 5% CO₂ incubator. On day five, 10 μl/well of 100 U/ml stock recombinant IL-2 (Advanced Biotechnologies Inc., Columbia, Md.) is added to each well. On day 8, frozen PBMCs are thawed, washed in DPBS+0.5% bovine serum albumin (BSA) to remove DMSO, resuspended to a concentration of 4×10⁶ cells/ml in hTCM, and γ-irradiated (3,000 RADS). Fifty microliters/well are dispensed along with 50 μl of the appropriate antigen at a stock concentration of 40 μl/ml to give a final antigen concentration of 10 μg/ml.

[1584] To prepare a capture plate, IFN-γ capture antibody (monoclonal mouse anti-human IFN-g, Endogen #M700A, Cambridge, Mass.) is diluted to 10 μg/ml in sterile 0.1 M Na(CO₃)₂ pH 8.2 buffer, aliquotted at 50 μl/well in flat bottomed 96 well sterile microtiter plates (Corning Costar Corp.), and incubated at 4° C. for a minimum of 24 hours. Prior to use, excess antibody is removed and wells are washed twice with dPB S+1% Tween 20 (PBST). To block further nonspecific protein binding, plates are incubated with 250 μl/well of PB S+5% BSA at room temperature for 1 hour. After discarding the blocking solution, wells are washed once with PBST (0.1% Tween), followed by hTCM in preparation for the antigen stimulated cells.

[1585] On day 9 of the assay, twenty four hours after the second antigen stimulation, the stimulation plate is spun for 5 minutes at 1500 RPM in a Beckman CS-6R centrifuge and 90 μl of supernatant is carefully removed from each well with a micropipette. The pelleted cells are resuspended in 100 μl of hTCM, pooled in sterile tubes (Corning Costar corp sterile ClusterTAb #4411, Cambridge, Mass.), mixed and transferred into an equal number of wells of an anti IFN-γ capture plate. Capture plates are incubated undisturbed at 37° C. for 16-20 hours. At the end of the IFN-γ secretion phase, the cells are discarded and the plates are washed three times with 0.1% PBST. A final aliquot of PBST is added to the wells for ten minutes, removed, and 100 μl of a 1:500 dilution of rabbit anti-human IFN-γ polyclonal antibody (Endogen #P700, Cambridge, Mass.) in PBST+1% BSA is added to each well for 3.5 hours at room temperature with gentle rocking. Unbound anti-IFN-γ polyclonal antibody is removed by three washes with PBST, followed by a wash with 250 μl of lx Tris-buffered saline+0.05% Tween 20 (TBST). Next, a 100 μl aliquot of 1:5000 alkaline phosphatase-conjugated mouse anti-rabbit polyclonal antibody (Jackson Immunological #211-055-109, West Grove, Pa.) diluted in TBST is added to each well and incubated at room temperature for 1.5-2 hours with gentle rocking. Excess enzyme-conjugated antibody is removed by three washes with PBST and two washes with alkaline phosphatase buffer (APB=0.1 M NaCl, 0.05 M MgCl.sub.2, 0.1 M Tris HCl, pH 9.5) followed by addition of the substrate mix of p-Toluidine salt and nitroblue tetrazolium chloride (BCIP/NBT, GIBCO BRL #18280-016, Gaithersburg, Md.). To stop the calorimetric reaction, plates were washed three times in dH₂O, inverted to minimize deposition of dust in the wells, and dried overnight at 28° C. in a dust free drying oven.

[1586] Images of the spots corresponding to the lymphokine secreted by individual antigen-stimulated T cells are captured with a CCD video camera and the image is analyzed by NIH image software. Captured images are enhanced using the Look Up Table which contrasts the images. Thresholding is then applied to every image and a wand tool is used to highlight the border to effectively subtract the edge of the well so that background counts won't be high and artificial. Density slicing over a narrow range is then used to highlight the spots produced from secreting cells. Pixel limits are set to subtract out small debris and large particles, and the number of spots falling within the prescribed pixel range are counted by the software program. Totals from each well are then manually recorded for future analysis. Alternatively, spots can be counted by other commercially available or customized software applications, or may be quantitated manually by a technician using standard light microscopy. Spots can also be counted manually under a light microscope.

[1587] We conclude that the protocol detailed above can be used for the enumeration of single IFN-γ secreting T cells.

### Example 83

[1588] This is an example of measurement of antigen reactive T-Cells by IFN-γ capture in blood samples from Multiple Sclerosis (MS) patients by ELISPOT.

[1589] This is an example of indirect detection of TCR, where individual cells are immobilized and measured by a chromogen assay. The antigenic peptide origin is MS, thus, immune monitoring of MS.

[1590] The example provides a sensitive assay for the detection of T-cells reactive to the antigen Myelin Basic Protein (MBP), by detecting a soluble factor whose secretion is induced by stimulation of the T-cell by the antigen.

[1591] This example is similar to the experiment above. PBMCs from Multiple Sclerosis patients are isolated, prepared and stored as described in the example above.

[1592] The purified PBMCs are plated at 2×10⁵ cells/well at a volume of 0.1 ml in 96 well Costar cell culture plates. An equal volume of antigen, MBP 83-102 (YDENPVVHFF KNIVTPRTPP) or 144-163 (VDAQGTLSKIFKLGGRDSRS), at 10 μg/ml is added to triplicate or sextuplet sets of wells and the plate is incubated in a 37° C., 5% CO₂ incubator. On day five, 10 μl/well of 100 U/ml stock recombinant IL-2 is added to each well. On day 8, frozen PBMCs are thawed, washed in DPBS+0.5% BSA to remove DMSO, resuspended to a concentration of 4×10⁶ cells/ml in hTCM, and y-irradiated (3,000 RADS). 50 μl/well are dispensed along with 50 μl of the appropriate antigen at a stock concentration of 40 μl/ml to give a final antigen concentration of 10 μg/ml.

[1593] A capture plate with IFN-γ antibody is prepared, washed and blocked as described in the example above.

[1594] On day 9 of the assay, twenty four hours after the second antigen stimulation, the stimulation plate is spun for 5 minutes at 1500 RPM and 90 μl of supernatant is carefully removed from each well with a micropipette. The pelleted cells are resuspended in 100 μl of hTCM, pooled in sterile tubes, mixed and transferred into an equal number of wells of an anti IFN-γ capture plate. Capture plates are incubated undisturbed at 37° C. for 16-20 hours. At the end of the IFN-γ secretion phase, the cells are discarded and the plates are washed three times with 0.1% PBST. A final aliquot of PBST is added to the wells for ten minutes, removed, and 100 μl of a 1:500 dilution of rabbit anti-human IFN-γ polyclonal antibody in PBST+1% BSA is added to each well for 3.5 hours at room temperature with gentle rocking. Unbound anti-IFN-γ polyclonal antibody is removed by three washes with PBST, followed by a wash with 250 μl of 1× Tris-buffered saline+0.05% Tween 20 (TBST). Next, a 100 μl aliquot of 1:5000 alkaline phosphatase-conjugated mouse anti-rabbit polyclonal antibody diluted in TBST is added to each well and incubated at room temperature for 1.5-2 hours with gentle rocking. Excess enzyme-conjugated antibody is removed by three washes with PBST and two washes with alkaline phosphatase followed by addition of the substrate mix of p-Toluidine salt and nitroblue tetrazolium chloride. To stop the calorimetric reaction, plates were washed three times in dH₂O, inverted to minimize deposition of dust in the wells, and dried overnight at 28° C. in a dust free drying oven.

[1595] Images of the spots corresponding to the lymphokine secreted by individual antigen-stimulated T cells are captured with a CCD video camera and the image is analyzed as described in the example above

[1596] We conclude that the experiment detailed above can be used for the enumeration of single IFN-γ secreting T cells in blood from Multiple Sclerosis patients.

### Example 84

[1597] This is an example of measurement of antigen reactive T-Cells by IFN-γ capture in blood samples from Multiple Sclerosis (MS) patients by ELISPOT.

[1598] This is an example of indirect detection of TCR, where individual cells are immobilized and measured by a chromogen assay. Antigenic peptide origin is MS, thus, immune monitoring of MS.

[1599] The example provides a sensitive assay for the detection of T-cells reactive to the antigen Myelin Oligodendrocyte Glycoprotein (MOG), by detecting a soluble factor whose secretion is induced by stimulation of the T-cell by the antigen.

[1600] This example is similar to the experiment above PBMCs from Multiple Sclerosis patients are isolated, prepared and stored as described in the example above.

[1601] The purified PBMCs are plated at 2×10⁵ cells/well at a volume of 0.1 ml in 96 well Costar cell culture plates. An equal volume of antigen, MOG 1-20 (GQFRVIGPRHPIRALVGDEV) or 41-60 (RPPFSRVVHLYRNGKDQDGD), at 10 μg/ml is added to triplicate or sextuplet sets of wells and the plate is incubated in a 37° C., 5% CO₂ incubator. On day five, 10 μl/well of 100 U/ml stock recombinant IL-2 is added to each well. On day 8, frozen PBMCs are thawed, washed in DPBS+0.5% BSA to remove DMSO, resuspended to a concentration of 4×10⁶ cells/ml in hTCM, and y-irradiated (3,000 RADS). 50 μl/well are dispensed along with 50 μl of the appropriate antigen at a stock concentration of 40 μl/ml to give a final antigen concentration of 10 μg/ml.

[1602] A capture plate with IFN-γ antibody is prepared, washed and blocked as described in the example above.

[1603] On day 9 of the assay, twenty four hours after the second antigen stimulation, the stimulation plate is spun for 5 minutes at 1500 RPM and 90 μl of supernatant is carefully removed from each well with a micropipette. The pelleted cells are resuspended in 100 μl of hTCM, pooled in sterile tubes, mixed and transferred into an equal number of wells of an anti IFN-γ capture plate. Capture plates are incubated undisturbed at 37° C. for 16-20 hours. At the end of the IFN-γ secretion phase, the cells are discarded and the plates are washed three times with 0.1% PBST. A final aliquot of PBST is added to the wells for ten minutes, removed, and 100 μl of a 1:500 dilution of rabbit anti-human IFN-γ polyclonal antibody in PBST+1% BSA is added to each well for 3.5 hours at room temperature with gentle rocking. Unbound anti-IFN-γ polyclonal antibody is removed by three washes with PBST, followed by a wash with 250 μl of 1× Tris-buffered saline+0.05% Tween 20 (TBST). Next, a 100 μl aliquot of 1:5000 alkaline phosphatase-conjugated mouse anti-rabbit polyclonal antibody diluted in TBST is added to each well and incubated at room temperature for 1.5-2 hours with gentle rocking. Excess enzyme-conjugated antibody is removed by three washes with PBST and two washes with alkaline phosphatase followed by addition of the substrate mix of p-Toluidine salt and nitroblue tetrazolium chloride. To stop the calorimetric reaction, plates were washed three times in dH₂O, inverted to minimize deposition of dust in the wells, and dried overnight at 28° C. in a dust free drying oven.

[1604] Images of the spots corresponding to the lymphokine secreted by individual antigen-stimulated T cells are captured with a CCD video camera and the image is analyzed as described in the example above

[1605] We conclude that the experiment detailed above can be used for the enumeration of single IFN-γ secreting T cells in blood from Multiple Sclerosis patients.

### Example 85

[1606] This is an example of measurement of antigen reactive T-Cells by IFN-γ capture in blood samples from Rheumatoid Arthritis (RA) patients by ELISPOT.

[1607] This is an example of indirect detection of TCR, where individual cells are immobilized and measured by a chromogen assay. Antigenic peptide origin is RA, thus, immune monitoring of RA.

[1608] The example provides a sensitive assay for the detection of T-cells reactive to the antigen type II collagen (CII) 261-273, by detecting a soluble factor whose secretion is induced by stimulation of the T-cell by the antigen.

[1609] This example is similar to the experiment above. PBMCs from Rheumatoid Arthritis patients are isolated, prepared and stored as described in the example above.

[1610] The purified PBMCs are plated at 2×10⁵ cells/well at a volume of 0.1 ml in 96 well Costar cell culture plates. An equal volume of antigen, CII 261-273 (AGFKGEQGPKGEP), at 10 μg/ml is added to triplicate or sextuplet sets of wells and the plate is incubated in a 37° C., 5% CO₂ incubator. On day five, 10 μl/well of 100 U/ml stock recombinant IL-2 is added to each well. On day 8, frozen PBMCs are thawed, washed in DPBS+0.5% BSA to remove DMSO, resuspended to a concentration of 4×10⁶ cells/ml in hTCM, and γ-irradiated (3,000 RADS). 50 μl/well are dispensed along with 50 μl of the appropriate antigen at a stock concentration of 40 μl/ml to give a final antigen concentration of 10 pg/ml.

[1611] A capture plate with IFN-γ antibody is prepared, washed and blocked as described in the example above.

[1612] On day 9 of the assay, twenty four hours after the second antigen stimulation, the stimulation plate is spun for 5 minutes at 1500 RPM and 90 μl of supernatant is carefully removed from each well with a micropipette. The pelleted cells are resuspended in 100 μl of hTCM, pooled in sterile tubes, mixed and transferred into an equal number of wells of an anti IFN-γ capture plate. Capture plates are incubated undisturbed at 37° C. for 16-20 hours. At the end of the IFN-γ secretion phase, the cells are discarded and the plates are washed three times with 0.1% PBST. A final aliquot of PBST is added to the wells for ten minutes, removed, and 100 μl of a 1:500 dilution of rabbit anti-human IFN-γ polyclonal antibody in PBST+1% BSA is added to each well for 3.5 hours at room temperature with gentle rocking. Unbound anti-IFN-γ polyclonal antibody is removed by three washes with PBST, followed by a wash with 250 μl of 1× Tris-buffered saline+0.05% Tween 20 (TBST). Next, a 100 μl aliquot of 1:5000 alkaline phosphatase-conjugated mouse anti-rabbit polyclonal antibody diluted in TBST is added to each well and incubated at room temperature for 1.5-2 hours with gentle rocking. Excess enzyme-conjugated antibody is removed by three washes with PBST and two washes with alkaline phosphatase followed by addition of the substrate mix of p-Toluidine salt and nitroblue tetrazolium chloride. To stop the calorimetric reaction, plates were washed three times in dH₂O, inverted to minimize deposition of dust in the wells, and dried overnight at 28° C. in a dust free drying oven.

[1613] Images of the spots corresponding to the lymphokine secreted by individual antigen-stimulated T cells are captured with a CCD video camera and the image is analyzed as described in the example above

[1614] We conclude that the experiment detailed above can be used for the enumeration of single IFN-γ secreting T cells in blood from Rheumatoid Arthritis patients.'

### Example 86

[1615] This is an example of measurement of antigen reactive T-Cells by IFN-γ capture in blood samples from Melanoma patients by ELISPOT.

[1616] This is an example of indirect detection of TCR, where individual cells are immobilized and measured by a chromogen assay. The antigenic peptide origin is Melanoma, thus, immune monitoring of cancer.

[1617] The example provides a sensitive assay for the detection of T-cells reactive to the antigen MELAN-A/MART-1 27-35, by detecting a soluble factor whose secretion is induced by stimulation of the T-cell by the antigen.

[1618] This example is similar to the experiment above. PBMCs from Melanoma patients are isolated, prepared and stored as described in the example above.

[1619] The purified PBMCs are plated at 2×10⁵ cells/well at a volume of 0.1 ml in 96 well Costar cell culture plates. An equal volume of antigen, MELAN-A/MART-1 27-35 (AAGIGILTV), at 10 μg/ml is added to triplicate or sextuplet sets of wells and the plate is incubated in a 37° C., 5% CO₂ incubator. On day five, 10 μl/well of 100 U/ml stock recombinant IL-2 is added to each well. On day 8, frozen PBMCs are thawed, washed in DPBS+0.5% BSA to remove DMSO, resuspended to a concentration of 4×10⁶ cells/ml in hTCM, and γ-irradiated (3,000 RADS). 50 μl/well are dispensed along with 50 μl of the appropriate antigen at a stock concentration of 40 μl/ml to give a final antigen concentration of 10 μg/ml.

[1620] A capture plate with IFN-γ antibody is prepared, washed and blocked as described in the example above.

[1621] On day 9 of the assay, twenty four hours after the second antigen stimulation, the stimulation plate is spun for 5 minutes at 1500 RPM and 90 μl of supernatant is carefully removed from each well with a micropipette. The pelleted cells are resuspended in 100 μl of hTCM, pooled in sterile tubes, mixed and transferred into an equal number of wells of an anti IFN-γ capture plate. Capture plates are incubated undisturbed at 37° C. for 16-20 hours. At the end of the IFN-γ secretion phase, the cells are discarded and the plates are washed three times with 0.1% PBST. A final aliquot of PBST is added to the wells for ten minutes, removed, and 100 μl of a 1:500 dilution of rabbit anti-human IFN-γ polyclonal antibody in PBST+1% BSA is added to each well for 3.5 hours at room temperature with gentle rocking. Unbound anti-IFN-γ polyclonal antibody is removed by three washes with PBST, followed by a wash with 250 μl of 1× Tris-buffered saline+0.05% Tween 20 (TBST). Next, a 100 μl aliquot of 1:5000 alkaline phosphatase-conjugated mouse anti-rabbit polyclonal antibody diluted in TBST is added to each well and incubated at room temperature for 1.5-2 hours with gentle rocking. Excess enzyme-conjugated antibody is removed by three washes with PBST and two washes with alkaline phosphatase followed by addition of the substrate mix of p-Toluidine salt and nitroblue tetrazolium chloride. To stop the calorimetric reaction, plates were washed three times in dH₂O, inverted to minimize deposition of dust in the wells, and dried overnight at 28° C. in a dust free drying oven.

[1622] Images of the spots corresponding to the lymphokine secreted by individual antigen-stimulated T cells are captured with a CCD video camera and the image is analyzed as described in the example above

[1623] We conclude that the experiment detailed above can be used for the enumeration of single IFN-γ secreting T cells in blood from Melanoma patients.

### Example 87

[1624] This is an example of measurement of antigen reactive T-Cells by IFN-γ capture in blood samples by ELISPOT.

[1625] This is an example of indirect detection of TCR, where individual cells are immobilized and measured by a chromogen assay. The antigenic peptide origin is a library of antigens.

[1626] The example provides a sensitive assay for the detection of T-cells reactive to the antigen of a library generated as described in example 42, by detecting a soluble factor whose secretion is induced by stimulation of the T-cell by the antigen.

[1627] This example is similar to the experiment above. PMBC are isolated, prepared and stored as described in the example above.

[1628] The purified PBMCs are plated at 2×10⁵ cells/well at a volume of 0.1 ml in 96 well Costar cell culture plates. An equal volume of antigens from the library, at 10 μg/ml is added to triplicate or sextuplet sets of wells and the plate is incubated in a 37° C., 5% CO₂ incubator. On day five, 10 μl/well of 100 U/ml stock recombinant IL-2 is added to each well. On day 8, frozen PBMCs are thawed, washed in DPBS+0.5% BSA to remove DMSO, resuspended to a concentration of 4×10⁶ cells/ml in hTCM, and y-irradiated (3,000 RADS). 50 μl/well are dispensed along with 50 μl of the appropriate antigen at a stock concentration of 40 μl/ml to give a final antigen concentration of 10 μg/ml.

[1629] A capture plate with IFN-γ antibody is prepared, washed and blocked as described in the example above.

[1630] On day 9 of the assay, twenty four hours after the second antigen stimulation, the stimulation plate is spun for 5 minutes at 1500 RPM and 90 μl of supernatant is carefully removed from each well with a micropipette. The pelleted cells are resuspended in 100 μl of hTCM, pooled in sterile tubes, mixed and transferred into an equal number of wells of an anti IFN-γ capture plate. Capture plates are incubated undisturbed at 37° C. for 16-20 hours. At the end of the IFN-γ secretion phase, the cells are discarded and the plates are washed three times with 0.1% PBST. A final aliquot of PBST is added to the wells for ten minutes, removed, and 100 μl of a 1:500 dilution of rabbit anti-human IFN-γ polyclonal antibody in PBST+1% BSA is added to each well for 3.5 hours at room temperature with gentle rocking. Unbound anti-IFN-γ polyclonal antibody is removed by three washes with PBST, followed by a wash with 250 μl of 1× Tris-buffered saline+0.05% Tween 20 (TBST). Next, a 100 μl aliquot of 1:5000 alkaline phosphatase-conjugated mouse anti-rabbit polyclonal antibody diluted in TBST is added to each well and incubated at room temperature for 1.5-2 hours with gentle rocking. Excess enzyme-conjugated antibody is removed by three washes with PBST and two washes with alkaline phosphatase followed by addition of the substrate mix of p-Toluidine salt and nitroblue tetrazolium chloride. To stop the calorimetric reaction, plates were washed three times in dH₂O, inverted to minimize deposition of dust in the wells, and dried overnight at 28° C. in a dust free drying oven.

[1631] Images of the spots corresponding to the lymphokine secreted by individual antigen-stimulated T cells are captured with a CCD video camera and the image is analyzed as described in the example above

[1632] We conclude that the experiment detailed above can be used for the enumeration of single IFN-γ secreting T cells in blood.

### Example 88

[1633] This is an example of how antigen specific T-cells can be detected using a direct detection method detecting T cell immobilized in solid tissue. In this example MHC dextramers are used to detect antigen specific T cells on frozen tissue sections using enzymatic chromogenic precipitation detection.

[1634] Equilibrate the cryosection tissue (e.g. section of spleen from transgenic mice) to −20° C. in the cryostate. Cut 5 μm sections and then dry sections on slides at room temperature. Store slides frozen until use at −20° C.

[1635] Equilibrate frozen sections to room temperature. Fix with acetone for 5 min.

[1636] Immediately after fixation transfer slides to TBS buffer (50 mM Tris-HCL pH 7.6, 150 mM NaCl) for 10 min.

[1637] Incubate slides with FITC-conjugated MHC-dextramers at appropriate dilution (1:40-1:80) and incubate for 30 min at room temperature. Other dilution ranges, as well as incubation time and temperature, may be desirable.

[1638] Decant solution and gently tap slides against filter paper, submerge in TB S buffer.

[1639] Decant and wash for 10 min in TBS buffer.

[1640] Incubate with rabbit polyclonal anti-FITC antibody (Dako P5100) at 1:100 dilution in TB S at room temperature for 30 min.

[1641] Repeat step 5 and 6.

[1642] Incubate with Envision anti-Rabbit HRP (Dako K4003) at room temperature for 30 min. Other visualization systems may be used.

[1643] Repeat step 5 and 6.

[1644] Develop with DAB+ (Dako K3468) in fume hood for 10 min. Other substrates may be used Rinse slides in tap-water for 5 min.

[1645] Counterstain with hematoxylin (Dako 53309) for 2 min.

[1646] Repeat step 12, mount slides.

[1647] The slides stained with MHC-Dextramers can now be evaluated by microscopy.

### Example 89

[1648] This is an example of how antigen specific T-cells can be detected using a direct detection method detecting T cell immobilized in solid tissue. In this example MHC dextramers are used to detect antigen specific T cells on paraffin embedded tissue sections using enzymatic chromogenic precipitation detection.

[1649] Formaldehyde fixed paraffin-embedded tissue are cut in section and mounted on the glass slice, for subsequent IHC staining with MHC-dextramers. Tissue fixed and prepared according to other protocols may be used as well. E.g. fresh tissue, lightly fixed tissue section (e.g. tissue fixed in 2% formaldehyde) or formalin-fixed, paraffin-embedded tissue section.

[1650] Optimal staining may require target retrieval treatment with enzymes as well as heating in a suitable buffer before incubation with antibodies and MHC-dextramer.

[1651] The sample is stained for DNA using DAPI stain, followed by incubated with an antigen specific MHCdex/FITC reagent, followed by addition of anti-FITC antibody labeled with HRP. Then the substrate for HRP, “DAP” is added and the reaction allows to progress.

[1652] The sample is analyzed by light microscopy for the present of a colored precipitate on the cells (DAPI stained nucleus) positive for the specific MHC/dex reagent.

[1653] A digital image of the stained sample is obtained, and this can be analyzed manually in the same way as by microscopy. However, a digital image may be used for automatic determination of where and how many cells that are positive, related to the total amount of cells, determined by the DAPI staining, or other criteria or stainings.

The application's sequence listing, which the Patent Office published only in electronic form, follows.

SEQUENCE LISTING (52252 sequences)

SEQ ID NO: 1 - protein, 74 aa, BK virus
MFCEPKNLVVLRQLSRQASVKVGKTWTGTKKRAQRIFIFILELLLEFCRGEDSVDGKNKSTTALPAVKDSVKDS

SEQ ID NO: 2 - protein, 172 aa, BK virus
MDKVLNREESMELMDLLGLERAAWGNLPLMRKAYLKKCKEFHPDKGGDEDKMKRMNTLYKKMEQDVKVAHQPDFGTWNSSEVCADFPLCPDTLYCKEWPICSKKPSVHCPCMLCQLRLRHLNRKFLRKEPLVWIDCYCIDCFTQWFGLDLTEETLQWWVQIIGETPFRDLKL

SEQ ID NO: 3 - protein, 691 aa, BK virus
MDKVLNREESMELMDLLGLERAAWGNLPLMRKAYLKKCKEFHPDKGGDEDKMKRMNTLYKKMEQDVKVAHQPDFGTWNSSEVPTYGTEEWESWWSSFNEKWDEDLFCHEDMFASDEEATADSQHSTPPKKKRKVEDPKDFPSDLHQFLSQAVFSNRTLACFAVYTTKEKAQILYKKLMEKYSVTFISRHMCAGHNIIFFLTPHRHRVSAINNFCQKLCTFSFLICKGVNKEYLLYSALTRDPYHIIEESIQGGLKEHDFNPEEPEETKQVSWKLITEYAVETKCEDVFLLLGMYLEFQYNVEECKKCQKKDQPYHFKYHEKHFANAIIFAESKNQKSICQQAVDTVLAKKRVDTLHMTREEMLTERFNHILDKMDLIFGAHGNAVLEQYMAGVAWLHCLLPKMDSVIFDFLHCVVFNVPKRRYWLFKGPIDSGKTTLAAGLLDLCGGKALNVNLPMERLTFELGVAIDQYMVVFEDVKGTGAESKDLPSGHGINNLDSLRDYLDGSVKVNLEKKHLNKRTQIFPPGLVTMNEYPVPKTLQARFVRQIDFRPKIYLRKSLQNSEFLLEKRILQSGMTLLLLLIWFRPVADFSKDIQSRIVEWKERLDSEISMYTFSRMKYNICMGKCILDITREEDSETEDSGHGSSTESQSQCSSQVSDTSAPDSENPHSQELHLCKGFQCFKRPKTPPPK

SEQ ID NO: 4 - protein, 362 aa, BK virus
MAPTKRKGECPGAAPKKPKEPVQVPKLLIKGGVEVLEVKTGVDAITEVECFLNPEMGDPDDNLRGYSQHLSAENAFESDSPDRKMLPCYSTARIPLPNLNEDLTCGNLLMWEAVTVKTEVIGITSMLNLHAGSQKVHENGGGKPVQGSNFHFFAVGGDPLEMQGVLMNYRTKYPQGTITPKNPTAQSQVMNTDHKAYLDKNNAYPVECWIPDPSRNENTRYFGTYTGGENVPPVLHVTNTATTVLLDEQGVGPLCKADSLYVSAADICGLFTNSSGTQQWRGLARYFKIRLRKRSVKNPYPISFLLSDLINRRTQKVDGQPMYGMESQVEEVRVFDGTEQLPGDPDMIRYIDRQGQLQTKMV

SEQ ID NO: 5 - protein, 351 aa, BK virus
MGAALALLGDLVASVSEAAAATGFSVAEIAAGEAAAAIEVQIASLATVEGITTTSEAIAAIGLTPQTYAVIAGAPGAIAGFAALIQTVTGISSLAQVGYRFFSDWDHKVSTVGLYQQSGMALELFNPDEYYDILFPGVNTFVNNIQYLDPRHWGPSLFATISQALWHVIRDDIPAITSQELQRRTERFFRDSLARFLEETTWTIVNAPINFYNYIQDYYSNLSPIRPSMVRQVAEREGTHVNFGHTYSIDNADSIEEVTQRMDLRNKESVHSGEFIEKTIAPGGANQRTAPQWMLPLLLGLYGTVTPALEAYEDGPNQKKRRVSRGSSQKAKGTRASAKTTNKRRSRSSRS

SEQ ID NO: 6 - protein, 239 aa, BK virus
MAHAGRTGYDNREIVMKYIHYKLSQRGYEWDAGDVGAAPPGAAPAPGIFSSQPGHTPHPAASRDPVARTSPLQTPAAPGAAAGPALSPVPPVVHLTLRQAGDDFSRRYRRDFAEMSSQLHLTPFTARGRFATVVEELFRDGVNWGRIVAFFEFGGVMCVESVNREMSPLVDNIALWMTEYLNRHLHTWIQDNGGWDAFVELYGPSMRPLFDFSWLSLKTLLSLALVGACITLGAYLGHK

SEQ ID NO: 7 - protein, 8 aa, BK virus
FCKNCKRI

SEQ ID NO: 8 - protein, 8 aa, BK virus
CKNCKRIG

SEQ ID NO: 9 - protein, 8 aa, BK virus
KNCKRIGI

SEQ ID NO: 10 - protein, 8 aa, BK virus
NCKRIGIS

SEQ ID NO: 11 - protein, 8 aa, BK virus
CKRIGISP

SEQ ID NO: 12 - protein, 8 aa, BK virus
KRIGISPN

SEQ ID NO: 13 - protein, 8 aa, BK virus
RIGISPNS

SEQ ID NO: 14 - protein, 8 aa, BK virus
IGISPNSF

SEQ ID NO: 15 - protein, 8 aa, BK virus
GISPNSFA

SEQ ID NO: 16 - protein, 8 aa, BK virus
ISPNSFAR

SEQ ID NO: 17 - protein, 8 aa, BK virus
SPNSFARP

SEQ ID NO: 18 - protein, 8 aa, BK virus
PNSFARPQ

SEQ ID NO: 19 - protein, 8 aa, BK virus
NSFARPQK

SEQ ID NO: 20 - protein, 8 aa, BK virus
SFARPQKK

SEQ ID NO: 21 - protein, 8 aa, BK virus
FARPQKKP

SEQ ID NO: 22 - protein, 8 aa, BK virus
ARPQKKPP

SEQ ID NO: 23 - protein, 8 aa, BK virus
RPQKKPPH

SEQ ID NO: 24 - protein, 8 aa, BK virus
PQKKPPHP

SEQ ID NO: 25 - protein, 8 aa, BK virus
QKKPPHPY

SEQ ID NO: 26 - protein, 8 aa, BK virus
KKPPHPYY

SEQ ID NO: 27 - protein, 8 aa, BK virus
KPPHPYYL

SEQ ID NO: 28 - protein, 8 aa, BK virus
PPHPYYLR

SEQ ID NO: 29 - protein, 8 aa, BK virus
PHPYYLRE

SEQ ID NO: 30 - protein, 8 aa, BK virus
HPYYLRER

SEQ ID NO: 31 - protein, 8 aa, BK virus
PYYLRERV

SEQ ID NO: 32 - protein, 8 aa, BK virus
YYLRERVE

SEQ ID NO: 33 - protein, 8 aa, BK virus
YLRERVEA

SEQ ID NO: 34 - protein, 8 aa, BK virus
LRERVEAE

SEQ ID NO: 35 - protein, 8 aa, BK virus
RERVEAEA

SEQ ID NO: 36 - protein, 8 aa, BK virus
ERVEAEAA

SEQ ID NO: 37 - protein, 8 aa, BK virus
RVEAEAAS

SEQ ID NO: 38 - protein, 8 aa, BK virus
VEAEAASA

SEQ ID NO: 39 - protein, 8 aa, BK virus
EAEAASAS

SEQ ID NO: 40 - protein, 8 aa, BK virus
AEAASASY

SEQ ID NO: 41 - protein, 8 aa, BK virus
EAASASYI

SEQ ID NO: 42 - protein, 8 aa, BK virus
AASASYIL

SEQ ID NO: 43 - protein, 8 aa, BK virus
KKRPQGGA

SEQ ID NO: 44 - protein, 8 aa, BK virus
KRPQGGAA

SEQ ID NO: 45 - protein, 8 aa, BK virus
RPQGGAAY

SEQ ID NO: 46 - protein, 8 aa, BK virus
PQGGAAYP

SEQ ID NO: 47 - protein, 8 aa, BK virus
QGGAAYPW

SEQ ID NO: 48 - protein, 8 aa, BK virus
GGAAYPWN

SEQ ID NO: 49 - protein, 8 aa, BK virus
GAAYPWNA

SEQ ID NO: 50 - protein, 8 aa, BK virus
AAYPWNAA

SEQ ID NO: 51 - protein, 8 aa, BK virus
AYPWNAAK

SEQ ID NO: 52 - protein, 8 aa, BK virus
YPWNAAKP

SEQ ID NO: 53 - protein, 8 aa, BK virus
PQEGKCMT

SEQ ID NO: 54 - protein, 8 aa, BK virus
QEGKCMTH

SEQ ID NO: 55 - protein, 8 aa, BK virus
EGKCMTHR

SEQ ID NO: 56 - protein, 8 aa, BK virus
GKCMTHRG

SEQ ID NO: 57 - protein, 8 aa, BK virus
KCMTHRGM

SEQ ID NO: 58 - protein, 8 aa, BK virus
CMTHRGMQ

SEQ ID NO: 59 - protein, 8 aa, BK virus
MTHRGMQP

SEQ ID NO: 60 - protein, 8 aa, BK virus
THRGMQPN

SEQ ID NO: 61 - protein, 8 aa, BK virus
HRGMQPNH

SEQ ID NO: 62 - protein, 8 aa, BK virus
RGMQPNHD

SEQ ID NO: 63 - protein, 8 aa, BK virus
GMQPNHDL

SEQ ID NO: 64 - protein, 8 aa, BK virus
MQPNHDLR

SEQ ID NO: 65 - protein, 8 aa, BK virus
QPNHDLRK

SEQ ID NO: 66 - protein, 8 aa, BK virus
PNHDLRKE

SEQ ID NO: 67 - protein, 8 aa, BK virus
NHDLRKES

SEQ ID NO: 68 - protein, 8 aa, BK virus
HDLRKESA

SEQ ID NO: 69 - protein, 8 aa, BK virus
LTGRSCLP

SEQ ID NO: 70 - protein, 8 aa, BK virus
TGRSCLPM

SEQ ID NO: 71 - protein, 8 aa, BK virus
GRSCLPME

SEQ ID NO: 72 - protein, 8 aa, BK virus
RSCLPMEC

SEQ ID NO: 73 - protein, 8 aa, BK virus
SCLPMECS

SEQ ID NO: 74 - protein, 8 aa, BK virus
CLPMECSQ

SEQ ID NO: 75 - protein, 8 aa, BK virus
LPMECSQT

SEQ ID NO: 76 - protein, 8 aa, BK virus
PMECSQTM

SEQ ID NO: 77 - protein, 8 aa, BK virus
MECSQTMT

SEQ ID NO: 78 - protein, 8 aa, BK virus
ECSQTMTS

SEQ ID NO: 79 - protein, 8 aa, BK virus
CSQTMTSG

SEQ ID NO: 80 - protein, 8 aa, BK virus
SQTMTSGR

SEQ ID NO: 81 - protein, 8 aa, BK virus
QTMTSGRK

SEQ ID NO: 82 - protein, 8 aa, BK virus
TMTSGRKV

SEQ ID NO: 83 - protein, 8 aa, BK virus
MTSGRKVH

SEQ ID NO: 84 - protein, 8 aa, BK virus
TSGRKVHD

SEQ ID NO: 85 - protein, 8 aa, BK virus
SGRKVHDR

SEQ ID NO: 86 - protein, 8 aa, BK virus
GRKVHDRH

SEQ ID NO: 87 - protein, 8 aa, BK virus
RKVHDRHV

SEQ ID NO: 88 - protein, 8 aa, BK virus
KVHDRHVL

SEQ ID NO: 89 - protein, 8 aa, BK virus
VHDRHVLR

SEQ ID NO: 90 - protein, 8 aa, BK virus
HDRHVLRA

SEQ ID NO: 91 - protein, 8 aa, BK virus
ESWPCPQL

SEQ ID NO: 92 - protein, 8 aa, BK virus
SWPCPQLN

SEQ ID NO: 93 - protein, 8 aa, BK virus
WPCPQLNW

SEQ ID NO: 94 - protein, 8 aa, BK virus
PCPQLNWT

SEQ ID NO: 95 - protein, 8 aa, BK virus
CPQLNWTK

SEQ ID NO: 96 - protein, 8 aa, BK virus
PQLNWTKA

SEQ ID NO: 97 - protein, 8 aa, BK virus
QLNWTKAM

SEQ ID NO: 98 - protein, 8 aa, BK virus
LNWTKAMV

SEQ ID NO: 99 - protein, 8 aa, BK virus
NWTKAMVL

SEQ ID NO: 100 - protein, 8 aa, BK virus
WTKAMVLR

SEQ ID NO: 101 - protein, 8 aa, BK virus
TKAMVLRQ

SEQ ID NO: 102 - protein, 8 aa, BK virus
KAMVLRQL

SEQ ID NO: 103 - protein, 8 aa, BK virus
AMVLRQLS

SEQ ID NO: 104 - protein, 8 aa, BK virus
MVLRQLSR

SEQ ID NO: 105 - protein, 8 aa, BK virus
VLRQLSRQ

SEQ ID NO: 106 - protein, 8 aa, BK virus
LRQLSRQA

SEQ ID NO: 107 - protein, 8 aa, BK virus
RQLSRQAS

SEQ ID NO: 108 - protein, 8 aa, BK virus
QLSRQASV

SEQ ID NO: 109 - protein, 8 aa, BK virus
LSRQASVK

SEQ ID NO: 110 - protein, 8 aa, BK virus
SRQASVKV

SEQ ID NO: 111 - protein, 8 aa, BK virus
RQASVKVG

SEQ ID NO: 112 - protein, 8 aa, BK virus
QASVKVGK

SEQ ID NO: 113 - protein, 8 aa, BK virus
ASVKVGKT

SEQ ID NO: 114 - protein, 8 aa, BK virus
SVKVGKTW

SEQ ID NO: 115 - protein, 8 aa, BK virus
VKVGKTWT

SEQ ID NO: 116 - protein, 8 aa, BK virus
KVGKTWTG

SEQ ID NO: 117 - protein, 8 aa, BK virus
VGKTWTGT

SEQ ID NO: 118 - protein, 8 aa, BK virus
GKTWTGTK

SEQ ID NO: 119 - protein, 8 aa, BK virus
KTWTGTKK

SEQ ID NO: 120 - protein, 8 aa, BK virus
TWTGTKKR

SEQ ID NO: 121 - protein, 8 aa, BK virus
WTGTKKRA

SEQ ID NO: 122 - protein, 8 aa, BK virus
TGTKKRAQ

SEQ ID NO: 123 - protein, 8 aa, BK virus
GTKKRAQR

SEQ ID NO: 124 - protein, 8 aa, BK virus
TKKRAQRI

SEQ ID NO: 125 - protein, 8 aa, BK virus
KKRAQRIF

SEQ ID NO: 126 - protein, 8 aa, BK virus
KRAQRIFI

SEQ ID NO: 127 - protein, 8 aa, BK virus
RAQRIFIF

SEQ ID NO: 128 - protein, 8 aa, BK virus
AQRIFIFI

SEQ ID NO: 129 - protein, 8 aa, BK virus
QRIFIFIL

SEQ ID NO: 130 - protein, 8 aa, BK virus
RIFIFILE

SEQ ID NO: 131 - protein, 8 aa, BK virus
IFIFILEL

SEQ ID NO: 132 - protein, 8 aa, BK virus
FIFILELL

SEQ ID NO: 133 - protein, 8 aa, BK virus
IFILELLL

SEQ ID NO: 134 - protein, 8 aa, BK virus
FILELLLE

SEQ ID NO: 135 - protein, 8 aa, BK virus
ILELLLEF

SEQ ID NO: 136 - protein, 8 aa, BK virus
LELLLEFC

SEQ ID NO: 137 - protein, 8 aa, BK virus
ELLLEFCR

SEQ ID NO: 138 - protein, 8 aa, BK virus
LLLEFCRG

SEQ ID NO: 139 - protein, 8 aa, BK virus
LLEFCRGE

SEQ ID NO: 140 - protein, 8 aa, BK virus
LEFCRGED

SEQ ID NO: 141 - protein, 8 aa, BK virus
EFCRGEDS

SEQ ID NO: 142 - protein, 8 aa, BK virus
FCRGEDSV

SEQ ID NO: 143 - protein, 8 aa, BK virus
CRGEDSVD

SEQ ID NO: 144 - protein, 8 aa, BK virus
RGEDSVDG

SEQ ID NO: 145 - protein, 8 aa, BK virus
GEDSVDGK

SEQ ID NO: 146 - protein, 8 aa, BK virus
EDSVDGKN

SEQ ID NO: 147 - protein, 8 aa, BK virus
DSVDGKNK

SEQ ID NO: 148 - protein, 8 aa, BK virus
SVDGKNKS

SEQ ID NO: 149 - protein, 8 aa, BK virus
VDGKNKST

SEQ ID NO: 150 - protein, 8 aa, BK virus
DGKNKSTT

SEQ ID NO: 151 - protein, 8 aa, BK virus
GKNKSTTA

SEQ ID NO: 152 - protein, 8 aa, BK virus
KNKSTTAL

SEQ ID NO: 153 - protein, 8 aa, BK virus
NKSTTALP

SEQ ID NO: 154 - protein, 8 aa, BK virus
KSTTALPA

SEQ ID NO: 155 - protein, 8 aa, BK virus
STTALPAV

SEQ ID NO: 156 - protein, 8 aa, BK virus
TTALPAVK

SEQ ID NO: 157 - protein, 8 aa, BK virus
TALPAVKD

SEQ ID NO: 158 - protein, 8 aa, BK virus
ALPAVKDS

SEQ ID NO: 159 - protein, 8 aa, BK virus
LPAVKDSV

SEQ ID NO: 160 - protein, 8 aa, BK virus
PAVKDSVK

SEQ ID NO: 161 - protein, 8 aa, BK virus
AVKDSVKD

SEQ ID NO: 162 - protein, 8 aa, BK virus
VKDSVKDS

SEQ ID NO: 163 - protein, 8 aa, BK virus
VSNPFFFV

SEQ ID NO: 164 - protein, 8 aa, BK virus
SNPFFFVF

SEQ ID NO: 165 - protein, 8 aa, BK virus
NPFFFVFP

SEQ ID NO: 166 - protein, 8 aa, BK virus
PFFFVFPG

SEQ ID NO: 167 - protein, 8 aa, BK virus
FFFVFPGS

SEQ ID NO: 168 - protein, 8 aa, BK virus
FFVFPGSW

SEQ ID NO: 169 - protein, 8 aa, BK virus
FVFPGSWV

SEQ ID NO: 170 - protein, 8 aa, BK virus
VFPGSWVL

SEQ ID NO: 171 - protein, 8 aa, BK virus
FPGSWVLL

SEQ ID NO: 172 - protein, 8 aa, BK virus
LPVYLRLL

SEQ ID NO: 173 - protein, 8 aa, BK virus
PVYLRLLL

SEQ ID NO: 174 - protein, 8 aa, BK virus
VYLRLLLP

SEQ ID NO: 175 - protein, 8 aa, BK virus
YLRLLLPQ

SEQ ID NO: 176 - protein, 8 aa, BK virus
LRLLLPQD

SEQ ID NO: 177 - protein, 8 aa, BK virus
RLLLPQDF

SEQ ID NO: 178 - protein, 8 aa, BK virus
LLLPQDFQ

SEQ ID NO: 179 - protein, 8 aa, BK virus
LLPQDFQW

SEQ ID NO: 180 - protein, 8 aa, BK virus
LPQDFQWL

SEQ ID NO: 181 - protein, 8 aa, BK virus
PQDFQWLK

SEQ ID NO: 182 - protein, 8 aa, BK virus
QDFQWLKL

SEQ ID NO: 183 - protein, 8 aa, BK virus
DFQWLKLL

SEQ ID NO: 184 - protein, 8 aa, BK virus
FQWLKLLL

SEQ ID NO: 185 - protein, 8 aa, BK virus
QWLKLLLG

SEQ ID NO: 186 - protein, 8 aa, BK virus
WLKLLLGR

SEQ ID NO: 187 - protein, 8 aa, BK virus
LKLLLGRL

SEQ ID NO: 188 - protein, 8 aa, BK virus
KLLLGRLL

SEQ ID NO: 189 - protein, 8 aa, BK virus
LLLGRLLL

SEQ ID NO: 190 - protein, 8 aa, BK virus
LLGRLLLL

SEQ ID NO: 191 - protein, 8 aa, BK virus
KFKLHPLL

SEQ ID NO: 192 - protein, 8 aa, BK virus
FKLHPLLL

SEQ ID NO: 193 - protein, 8 aa, BK virus
LLVLLGLL

SEQ ID NO: 194 - protein, 8 aa, BK virus
LVLLGLLL

SEQ ID NO: 195 - protein, 8 aa, BK virus
VLLGLLLG

SEQ ID NO: 196 - protein, 8 aa, BK virus
LLGLLLGL

SEQ ID NO: 197 - protein, 8 aa, BK virus
LGLLLGLL

SEQ ID NO: 198 - protein, 8 aa, BK virus
GLLLGLLL

SEQ ID NO: 199 - protein, 8 aa, BK virus
FKLLVVLV

SEQ ID NO: 200 - protein, 8 aa, BK virus
KLLVVLVP

SEQ ID NO: 201 - protein, 8 aa, BK virus
GISSLMIG

SEQ ID NO: 202 - protein, 8 aa, BK virus
ISSLMIGI

SEQ ID NO: 203 - protein, 8 aa, BK virus
SSLMIGIT

SEQ ID NO: 204 - protein, 8 aa, BK virus
SLMIGITK

SEQ ID NO: 205 - protein, 8 aa, BK virus
LMIGITKF

SEQ ID NO: 206 - protein, 8 aa, BK virus
MIGITKFP

SEQ ID NO: 207 - protein, 8 aa, BK virus
IGITKFPL

SEQ ID NO: 208 - protein, 8 aa, BK virus
ASISNQAW

SEQ ID NO: 209 - protein, 8 aa, BK virus
SISNQAWL

SEQ ID NO: 210 - protein, 8 aa, BK virus
ISNQAWLW

SEQ ID NO: 211 - protein, 8 aa, BK virus
SNQAWLWN

SEQ ID NO: 212 - protein, 8 aa, BK virus
NQAWLWNC

SEQ ID NO: 213 - protein, 8 aa, BK virus
QAWLWNCL

SEQ ID NO: 214 - protein, 8 aa, BK virus
AWLWNCLT

SEQ ID NO: 215 - protein, 8 aa, BK virus
WLWNCLTQ

SEQ ID NO: 216 - protein, 8 aa, BK virus
LWNCLTQM

SEQ ID NO: 217 - protein, 8 aa, BK virus
WNCLTQMS

SEQ ID NO: 218 - protein, 8 aa, BK virus
NCLTQMST

SEQ ID NO: 219 - protein, 8 aa, BK virus
CLTQMSTM

SEQ ID NO: 220 - protein, 8 aa, BK virus
LTQMSTMI

SEQ ID NO: 221 - protein, 8 aa, BK virus
TQMSTMIF

SEQ ID NO: 222 - protein, 8 aa, BK virus
QMSTMIFC

SEQ ID NO: 223 - protein, 8 aa, BK virus
MSTMIFCF

SEQ ID NO: 224 - protein, 8 aa, BK virus
STMIFCFL

SEQ ID NO: 225 - protein, 8 aa, BK virus
TMIFCFLV

SEQ ID NO: 226 - protein, 8 aa, BK virus
ILLLIIFN

SEQ ID NO: 227 - protein, 8 aa, BK virus
LLLIIFNT

SEQ ID NO: 228 - protein, 8 aa, BK virus
LLIIFNTL

SEQ ID NO: 229 - protein, 8 aa, BK virus
LIIFNTLI

SEQ ID NO: 230 - protein, 8 aa, BK virus
IIFNTLIL

SEQ ID NO: 231 - protein, 8 aa, BK virus
IFNTLILG

SEQ ID NO: 232 - protein, 8 aa, BK virus
FNTLILGI

SEQ ID NO: 233 - protein, 8 aa, BK virus
NTLILGIG

SEQ ID NO: 234 - protein, 8 aa, BK virus
TLILGIGV

SEQ ID NO: 235 - protein, 8 aa, BK virus
LILGIGVL

SEQ ID NO: 236 - protein, 8 aa, BK virus
ILGIGVLL

SEQ ID NO: 237 - protein, 8 aa, BK virus
LGIGVLLC

SEQ ID NO: 238 - protein, 8 aa, BK virus
GIGVLLCL

SEQ ID NO: 239 - protein, 8 aa, BK virus
IGVLLCLL

SEQ ID NO: 240 - protein, 8 aa, BK virus
GVLLCLLL

SEQ ID NO: 241 - protein, 8 aa, BK virus
VLLCLLLF

SEQ ID NO: 242 - protein, 8 aa, BK virus
LLCLLLFP

SEQ ID NO: 243 - protein, 8 aa, BK virus
LCLLLFPR

SEQ ID NO: 244 - protein, 8 aa, BK virus
CLLLFPRL

SEQ ID NO: 245 - protein, 8 aa, BK virus
LLLFPRLC

SEQ ID NO: 246 - protein, 8 aa, BK virus
LLFPRLCG

SEQ ID NO: 247 - protein, 8 aa, BK virus
LFPRLCGM

SEQ ID NO: 248 - protein, 8 aa, BK virus
FPRLCGML

SEQ ID NO: 249 - protein, 8 aa, BK virus
PRLCGMLL

SEQ ID NO: 250 - protein, 8 aa, BK virus
RLCGMLLG

SEQ ID NO: 251 - protein, 8 aa, BK virus
LCGMLLGM

SEQ ID NO: 252 - protein, 8 aa, BK virus
CGMLLGMI

SEQ ID NO: 253 - protein, 8 aa, BK virus
GMLLGMIY

SEQ ID NO: 254 - protein, 8 aa, BK virus
MLLGMIYL

SEQ ID NO: 255 - protein, 8 aa, BK virus
LLGMIYLL

SEQ ID NO: 256 - protein, 8 aa, BK virus
PHRNCREE

SEQ ID NO: 257 - protein, 8 aa, BK virus
HRNCREEQ

SEQ ID NO: 258 - protein, 8 aa, BK virus
RNCREEQK

SEQ ID NO: 259 - protein, 8 aa, BK virus
NCREEQKD

SEQ ID NO: 260 - protein, 8 aa, BK virus
CREEQKDF

SEQ ID NO: 261 - protein, 8 aa, BK virus
REEQKDFL

SEQ ID NO: 262 - protein, 8 aa, BK virus
EEQKDFLE

SEQ ID NO: 263 - protein, 8 aa, BK virus
EQKDFLET

SEQ ID NO: 264 - protein, 8 aa, BK virus
QKDFLETP

SEQ ID NO: 265 - protein, 8 aa, BK virus
KDFLETPW

SEQ ID NO: 266 - protein, 8 aa, BK virus
DFLETPWL

SEQ ID NO: 267 - protein, 8 aa, BK virus
FLETPWLD

SEQ ID NO: 268 - protein, 8 aa, BK virus
LETPWLDF

SEQ ID NO: 269 - protein, 8 aa, BK virus
ETPWLDFW

SEQ ID NO: 270 - protein, 8 aa, BK virus
TPWLDFWR

SEQ ID NO: 271 - protein, 8 aa, BK virus
PWLDFWRK

SEQ ID NO: 272 - protein, 8 aa, BK virus
WLDFWRKL

SEQ ID NO: 273 - protein, 8 aa, BK virus
LDFWRKLP

SEQ ID NO: 274 - protein, 8 aa, BK virus
DFWRKLPG

SEQ ID NO: 275 - protein, 8 aa, BK virus
FWRKLPGQ

SEQ ID NO: 276 - protein, 8 aa, BK virus
WRKLPGQL

SEQ ID NO: 277 - protein, 8 aa, BK virus
TFIIIFNN

SEQ ID NO: 278 - protein, 8 aa, BK virus
FIIIFNNI

SEQ ID NO: 279 - protein, 8 aa, BK virus
IIIFNNII

SEQ ID NO: 280 - protein, 8 aa, BK virus
IIFNNIIL

SEQ ID NO: 281 - protein, 8 aa, BK virus
IFNNIILI

SEQ ID NO: 282 - protein, 8 aa, BK virus
FNNIILIF

SEQ ID NO: 283 - protein, 8 aa, BK virus
NNIILIFP

SEQ ID NO: 284 - protein, 8 aa, BK virus
NIILIFPL

SEQ ID NO: 285 - protein, 8 aa, BK virus
IILIFPLL

SEQ ID NO: 286 - protein, 8 aa, BK virus
ILIFPLLG

SEQ ID NO: 287 - protein, 8 aa, BK virus
LIFPLLGP

SEQ ID NO: 288 - protein, 8 aa, BK virus
IFPLLGPQ

SEQ ID NO: 289 - protein, 8 aa, BK virus
FPLLGPQW

SEQ ID NO: 290 - protein, 8 aa, BK virus
PLLGPQWL

SEQ ID NO: 291 - protein, 8 aa, BK virus
LLGPQWLD

SEQ ID NO: 292 - protein, 8 aa, BK virus
LGPQWLDK

SEQ ID NO: 293 - protein, 8 aa, BK virus
LKGKVPVY

SEQ ID NO: 294 - protein, 8 aa, BK virus
KGKVPVYI

SEQ ID NO: 295 - protein, 8 aa, BK virus
GKVPVYIL

SEQ ID NO: 296 - protein, 8 aa, BK virus
KVPVYILA

SEQ ID NO: 297 - protein, 8 aa, BK virus
VPVYILAI

SEQ ID NO: 298 - protein, 8 aa, BK virus
PVYILAIL

SEQ ID NO: 299 - protein, 8 aa, BK virus
VYILAILI

SEQ ID NO: 300 - protein, 8 aa, BK virus
YILAILIV

SEQ ID NO: 301 - protein, 8 aa, BK virus
KKLHKEWT

SEQ ID NO: 302 - protein, 8 aa, BK virus
EINKVYIQ

SEQ ID NO: 303 - protein, 8 aa, BK virus
INKVYIQE

SEQ ID NO: 304 - protein, 8 aa, BK virus
NKVYIQES

SEQ ID NO: 305 - protein, 8 aa, BK virus
KVYIQESL

SEQ ID NO: 306 - protein, 8 aa, BK virus
KKLLPQEV

SEQ ID NO: 307 - protein, 8 aa, BK virus
KLLPQEVL

SEQ ID NO: 308 - protein, 8 aa, BK virus
LLPQEVLI

SEQ ID NO: 309 - protein, 8 aa, BK virus
LPQEVLIK

SEQ ID NO: 310 - protein, 8 aa, BK virus
PQEVLIKE

SEQ ID NO: 311 - protein, 8 aa, BK virus
QEVLIKEL

SEQ ID NO: 312 - protein, 8 aa, BK virus
EVLIKELL

SEQ ID NO: 313 - protein, 8 aa, BK virus
VLIKELLL

SEQ ID NO: 314 - protein, 8 aa, BK virus
LIKELLLN

SEQ ID NO: 315 - protein, 8 aa, BK virus
IKELLLNG

SEQ ID NO: 316 - protein, 8 aa, BK virus
KELLLNGC

SEQ ID NO: 317 - protein, 8 aa, BK virus
ELLLNGCC

SEQ ID NO: 318 - protein, 8 aa, BK virus
LLLNGCCL

SEQ ID NO: 319 - protein, 8 aa, BK virus
LLNGCCLY

SEQ ID NO: 320 - protein, 8 aa, BK virus
LNGCCLYF

SEQ ID NO: 321 - protein, 8 aa, BK virus
HLLLKHMK

SEQ ID NO: 322 - protein, 8 aa, BK virus
LLLKHMKM

SEQ ID NO: 323 - protein, 8 aa, BK virus
LLKHMKMA

SEQ ID NO: 324 - protein, 8 aa, BK virus
LKHMKMAP

SEQ ID NO: 325 - protein, 8 aa, BK virus
KHMKMAPT

SEQ ID NO: 326 - protein, 8 aa, BK virus
HMKMAPTK

SEQ ID NO: 327 - protein, 8 aa, BK virus
MKMAPTKR

SEQ ID NO: 328 - protein, 8 aa, BK virus
KMAPTKRK

SEQ ID NO: 329 - protein, 8 aa, BK virus
MAPTKRKG

SEQ ID NO: 330 - protein, 8 aa, BK virus
APTKRKGE

SEQ ID NO: 331 - protein, 8 aa, BK virus
PTKRKGEC

SEQ ID NO: 332 - protein, 8 aa, BK virus
TKRKGECP

SEQ ID NO: 333 - protein, 8 aa, BK virus
KRKGECPG

SEQ ID NO: 334 - protein, 8 aa, BK virus
RKGECPGA

SEQ ID NO: 335 - protein, 8 aa, BK virus
KGECPGAA

SEQ ID NO: 336 - protein, 8 aa, BK virus
GECPGAAP

SEQ ID NO: 337 - protein, 8 aa, BK virus
ECPGAAPK

SEQ ID NO: 338 - protein, 8 aa, BK virus
CPGAAPKK

SEQ ID NO: 339 - protein, 8 aa, BK virus
PGAAPKKP

SEQ ID NO: 340 - protein, 8 aa, BK virus
GAAPKKPK

SEQ ID NO: 341 - protein, 8 aa, BK virus
AAPKKPKE

SEQ ID NO: 342 - protein, 8 aa, BK virus
APKKPKEP

SEQ ID NO: 343 - protein, 8 aa, BK virus
PKKPKEPV

SEQ ID NO: 344 - protein, 8 aa, BK virus
KKPKEPVQ

SEQ ID NO: 345 - protein, 8 aa, BK virus
KPKEPVQV

SEQ ID NO: 346 - protein, 8 aa, BK virus
PKEPVQVP

SEQ ID NO: 347 - protein, 8 aa, BK virus
KEPVQVPK

SEQ ID NO: 348 - protein, 8 aa, BK virus
EPVQVPKL

SEQ ID NO: 349 - protein, 8 aa, BK virus
PVQVPKLL

SEQ ID NO: 350 - protein, 8 aa, BK virus
VQVPKLLI

SEQ ID NO: 351 - protein, 8 aa, BK virus
QVPKLLIK

SEQ ID NO: 352 - protein, 8 aa, BK virus
VPKLLIKG

SEQ ID NO: 353 - protein, 8 aa, BK virus
PKLLIKGG

SEQ ID NO: 354 - protein, 8 aa, BK virus
KLLIKGGV

SEQ ID NO: 355 - protein, 8 aa, BK virus
LLIKGGVE

SEQ ID NO: 356 - protein, 8 aa, BK virus
LIKGGVEV

SEQ ID NO: 357 - protein, 8 aa, BK virus
IKGGVEVL

SEQ ID NO: 358 - protein, 8 aa, BK virus
KGGVEVLE

SEQ ID NO: 359 - protein, 8 aa, BK virus
GGVEVLEV

SEQ ID NO: 360 - protein, 8 aa, BK virus
GVEVLEVK

SEQ ID NO: 361 - protein, 8 aa, BK virus
VEVLEVKT

SEQ ID NO: 362 - protein, 8 aa, BK virus
EVLEVKTG

SEQ ID NO: 363 - protein, 8 aa, BK virus
VLEVKTGV

SEQ ID NO: 364 - protein, 8 aa, BK virus
LEVKTGVD

SEQ ID NO: 365 - protein, 8 aa, BK virus
EVKTGVDA

SEQ ID NO: 366 - protein, 8 aa, BK virus
VKTGVDAI

SEQ ID NO: 367 - protein, 8 aa, BK virus
KTGVDAIT

SEQ ID NO: 368 - protein, 8 aa, BK virus
TGVDAITE

SEQ ID NO: 369 - protein, 8 aa, BK virus
GVDAITEV

SEQ ID NO: 370 - protein, 8 aa, BK virus
VDAITEVE

SEQ ID NO: 371 - protein, 8 aa, BK virus
DAITEVEC

SEQ ID NO: 372 - protein, 8 aa, BK virus
AITEVECF

SEQ ID NO: 373 - protein, 8 aa, BK virus
ITEVECFL

SEQ ID NO: 374 - protein, 8 aa, BK virus
TEVECFLN

SEQ ID NO: 375 - protein, 8 aa, BK virus
EVECFLNP

SEQ ID NO: 376 - protein, 8 aa, BK virus
VECFLNPE

SEQ ID NO: 377 - protein, 8 aa, BK virus
ECFLNPEM

SEQ ID NO: 378 - protein, 8 aa, BK virus
CFLNPEMG

SEQ ID NO: 379 - protein, 8 aa, BK virus
FLNPEMGD

SEQ ID NO: 380 - protein, 8 aa, BK virus
LNPEMGDP

SEQ ID NO: 381 - protein, 8 aa, BK virus
NPEMGDPD

SEQ ID NO: 382 - protein, 8 aa, BK virus
PEMGDPDE

SEQ ID NO: 383 - protein, 8 aa, BK virus
EMGDPDEN

SEQ ID NO: 384 - protein, 8 aa, BK virus
MGDPDENL

SEQ ID NO: 385 - protein, 8 aa, BK virus
GDPDENLR

SEQ ID NO: 386 - protein, 8 aa, BK virus
DPDENLRG

SEQ ID NO: 387 - protein, 8 aa, BK virus
PDENLRGF

SEQ ID NO: 388 - protein, 8 aa, BK virus
DENLRGFS

SEQ ID NO: 389 - protein, 8 aa, BK virus
ENLRGFSL

SEQ ID NO: 390 - protein, 8 aa, BK virus
NLRGFSLK

SEQ ID NO: 391 - protein, 8 aa, BK virus
LRGFSLKL

SEQ ID NO: 392 - protein, 8 aa, BK virus
RGFSLKLS

SEQ ID NO: 393 - protein, 8 aa, BK virus
GFSLKLSA

SEQ ID NO: 394 - protein, 8 aa, BK virus
FSLKLSAE

SEQ ID NO: 395 - protein, 8 aa, BK virus
SLKLSAEN

SEQ ID NO: 396 - protein, 8 aa, BK virus
LKLSAEND

SEQ ID NO: 397 - protein, 8 aa, BK virus
KLSAENDF

SEQ ID NO: 398 - protein, 8 aa, BK virus
LSAENDFS

SEQ ID NO: 399 - protein, 8 aa, BK virus
SAENDFSS

SEQ ID NO: 400 - protein, 8 aa, BK virus
AENDFSSD

SEQ ID NO: 401 - protein, 8 aa, BK virus
ENDFSSDS

SEQ ID NO: 402 - protein, 8 aa, BK virus
NDFSSDSP

SEQ ID NO: 403 - protein, 8 aa, BK virus
DFSSDSPE

SEQ ID NO: 404 - protein, 8 aa, BK virus
FSSDSPER

SEQ ID NO: 405 - protein, 8 aa, BK virus
SSDSPERK

SEQ ID NO: 406 - protein, 8 aa, BK virus
SDSPERKM

SEQ ID NO: 407 - protein, 8 aa, BK virus
DSPERKML

SEQ ID NO: 408 - protein, 8 aa, BK virus
SPERKMLP

SEQ ID NO: 409 - protein, 8 aa, BK virus
PERKMLPC

SEQ ID NO: 410 - protein, 8 aa, BK virus
ERKMLPCY

SEQ ID NO: 411 - protein, 8 aa, BK virus
RKMLPCYS

SEQ ID NO: 412 - protein, 8 aa, BK virus
KMLPCYST

SEQ ID NO: 413 - protein, 8 aa, BK virus
MLPCYSTA

SEQ ID NO: 414 - protein, 8 aa, BK virus
LPCYSTAR

SEQ ID NO: 415 - protein, 8 aa, BK virus
PCYSTARI

SEQ ID NO: 416 - protein, 8 aa, BK virus
CYSTARIP

SEQ ID NO: 417 - protein, 8 aa, BK virus
YSTARIPL

SEQ ID NO: 418 - protein, 8 aa, BK virus
STARIPLP

SEQ ID NO: 419 - protein, 8 aa, BK virus
TARIPLPN

SEQ ID NO: 420 - protein, 8 aa, BK virus
ARIPLPNL

SEQ ID NO: 421 - protein, 8 aa, BK virus
RIPLPNLN

SEQ ID NO: 422 - protein, 8 aa, BK virus
IPLPNLNE

SEQ ID NO: 423 - protein, 8 aa, BK virus
PLPNLNED

SEQ ID NO: 424 - protein, 8 aa, BK virus
LPNLNEDL

SEQ ID NO: 425 - protein, 8 aa, BK virus
PNLNEDLT

SEQ ID NO: 426 - protein, 8 aa, BK virus
NLNEDLTC

SEQ ID NO: 427 - protein, 8 aa, BK virus
LNEDLTCG

SEQ ID NO: 428 - protein, 8 aa, BK virus
NEDLTCGN

SEQ ID NO: 429 - protein, 8 aa, BK virus
EDLTCGNL

SEQ ID NO: 430 - protein, 8 aa, BK virus
DLTCGNLL

SEQ ID NO: 431 - protein, 8 aa, BK virus
LTCGNLLM

SEQ ID NO: 432 - protein, 8 aa, BK virus
TCGNLLMW

SEQ ID NO: 433 - protein, 8 aa, BK virus
CGNLLMWE

SEQ ID NO: 434 - protein, 8 aa, BK virus
GNLLMWEA

SEQ ID NO: 435 - protein, 8 aa, BK virus
NLLMWEAV

SEQ ID NO: 436 - protein, 8 aa, BK virus
LLMWEAVT

SEQ ID NO: 437 - protein, 8 aa, BK virus
LMWEAVTV

SEQ ID NO: 438 - protein, 8 aa, BK virus
MWEAVTVQ

SEQ ID NO: 439 - protein, 8 aa, BK virus
WEAVTVQT

SEQ ID NO: 440 - protein, 8 aa, BK virus
EAVTVQTE

SEQ ID NO: 441 - protein, 8 aa, BK virus
AVTVQTEV

SEQ ID NO: 442 - protein, 8 aa, BK virus
VTVQTEVI

SEQ ID NO: 443 - protein, 8 aa, BK virus
TVQTEVIG

SEQ ID NO: 444 - protein, 8 aa, BK virus
VQTEVIGI

SEQ ID NO: 445 - protein, 8 aa, BK virus
QTEVIGIT

SEQ ID NO: 446 - protein, 8 aa, BK virus
TEVIGITS

SEQ ID NO: 447 - protein, 8 aa, BK virus
EVIGITSM

SEQ ID NO: 448 - protein, 8 aa, BK virus
VIGITSML

SEQ ID NO: 449 - protein, 8 aa, BK virus
IGITSMLN

SEQ ID NO: 450 - protein, 8 aa, BK virus
GITSMLNL

SEQ ID NO: 451 - protein, 8 aa, BK virus
ITSMLNLH

SEQ ID NO: 452 - protein, 8 aa, BK virus
TSMLNLHA

SEQ ID NO: 453 - protein, 8 aa, BK virus
SMLNLHAG

SEQ ID NO: 454 - protein, 8 aa, BK virus
MLNLHAGS

SEQ ID NO: 455 - protein, 8 aa, BK virus
LNLHAGSQ

SEQ ID NO: 456 - protein, 8 aa, BK virus
NLHAGSQK

SEQ ID NO: 457 - protein, 8 aa, BK virus
LHAGSQKV

SEQ ID NO: 458 - protein, 8 aa, BK virus
HAGSQKVH

SEQ ID NO: 459 - protein, 8 aa, BK virus
AGSQKVHE

SEQ ID NO: 460 - protein, 8 aa, BK virus
GSQKVHEH

SEQ ID NO: 461 - protein, 8 aa, BK virus
SQKVHEHG

SEQ ID NO: 462 - protein, 8 aa, BK virus
QKVHEHGG

SEQ ID NO: 463 - protein, 8 aa, BK virus
KVHEHGGG

SEQ ID NO: 464 - protein, 8 aa, BK virus
VHEHGGGK

SEQ ID NO: 465 - protein, 8 aa, BK virus
HEHGGGKP

SEQ ID NO: 466 - protein, 8 aa, BK virus
EHGGGKPI

SEQ ID NO: 467 - protein, 8 aa, BK virus
HGGGKPIQ

SEQ ID NO: 468 - protein, 8 aa, BK virus
GGGKPIQG

SEQ ID NO: 469 - protein, 8 aa, BK virus
GGKPIQGS

SEQ ID NO: 470 - protein, 8 aa, BK virus
GKPIQGSN

SEQ ID NO: 471 - protein, 8 aa, BK virus
KPIQGSNF

SEQ ID NO: 472 - protein, 8 aa, BK virus
PIQGSNFH

SEQ ID NO: 473 - protein, 8 aa, BK virus
IQGSNFHF

SEQ ID NO: 474 - protein, 8 aa, BK virus
QGSNFHFF

SEQ ID NO: 475 - protein, 8 aa, BK virus
GSNFHFFA

SEQ ID NO: 476 - protein, 8 aa, BK virus
SNFHFFAV

SEQ ID NO: 477 - protein, 8 aa, BK virus
NFHFFAVG

SEQ ID NO: 478 - protein, 8 aa, BK virus
FHFFAVGG

SEQ ID NO: 479 - protein, 8 aa, BK virus
HFFAVGGE

SEQ ID NO: 480 - protein, 8 aa, BK virus
FFAVGGEP

SEQ ID NO: 481 - protein, 8 aa, BK virus
FAVGGEPL

SEQ ID NO: 482 - protein, 8 aa, BK virus
AVGGEPLE

SEQ ID NO: 483 - protein, 8 aa, BK virus
VGGEPLEM

SEQ ID NO: 484 - protein, 8 aa, BK virus
GGEPLEMQ

SEQ ID NO: 485 - protein, 8 aa, BK virus
GEPLEMQG

SEQ ID NO: 486 - protein, 8 aa, BK virus
EPLEMQGV

SEQ ID NO: 487 - protein, 8 aa, BK virus
PLEMQGVL

SEQ ID NO: 488 - protein, 8 aa, BK virus
LEMQGVLM

SEQ ID NO: 489 - protein, 8 aa, BK virus
EMQGVLMN

SEQ ID NO: 490 - protein, 8 aa, BK virus
MQGVLMNY

SEQ ID NO: 491 - protein, 8 aa, BK virus
QGVLMNYR

SEQ ID NO: 492 - protein, 8 aa, BK virus
GVLMNYRS

SEQ ID NO: 493 - protein, 8 aa, BK virus
VLMNYRSK

SEQ ID NO: 494 - protein, 8 aa, BK virus
LMNYRSKY

SEQ ID NO: 495 - protein, 8 aa, BK virus
MNYRSKYP

SEQ ID NO: 496 - protein, 8 aa, BK virus
NYRSKYPD

SEQ ID NO: 497 - protein, 8 aa, BK virus
YRSKYPDG

SEQ ID NO: 498 - protein, 8 aa, BK virus
RSKYPDGT

SEQ ID NO: 499 - protein, 8 aa, BK virus
SKYPDGTI

SEQ ID NO: 500 - protein, 8 aa, BK virus
KYPDGTIT

SEQ ID NO: 501 - protein, 8 aa, BK virus
YPDGTITP

SEQ ID NO: 502 - protein, 8 aa, BK virus
PDGTITPK

SEQ ID NO: 503 - protein, 8 aa, BK virus
DGTITPKN

SEQ ID NO: 504 - protein, 8 aa, BK virus
GTITPKNP

SEQ ID NO: 505 - protein, 8 aa, BK virus
TITPKNPT

SEQ ID NO: 506 - protein, 8 aa, BK virus
ITPKNPTA

SEQ ID NO: 507 - protein, 8 aa, BK virus
TPKNPTAQ

SEQ ID NO: 508 - protein, 8 aa, BK virus
PKNPTAQS

SEQ ID NO: 509 - protein, 8 aa, BK virus
KNPTAQSQ

SEQ ID NO: 510 - protein, 8 aa, BK virus
NPTAQSQV

SEQ ID NO: 511 - protein, 8 aa, BK virus
PTAQSQVM

SEQ ID NO: 512 - protein, 8 aa, BK virus
TAQSQVMN

SEQ ID NO: 513 - protein, 8 aa, BK virus
AQSQVMNT

SEQ ID NO: 514 - protein, 8 aa, BK virus
QSQVMNTD

SEQ ID NO: 515 - protein, 8 aa, BK virus
SQVMNTDH

SEQ ID NO: 516 - protein, 8 aa, BK virus
QVMNTDHK

SEQ ID NO: 517 - protein, 8 aa, BK virus
VMNTDHKA

SEQ ID NO: 518 - protein, 8 aa, BK virus
MNTDHKAY

SEQ ID NO: 519 - protein, 8 aa, BK virus
NTDHKAYL

SEQ ID NO: 520 - protein, 8 aa, BK virus
TDHKAYLD

SEQ ID NO: 521 - protein, 8 aa, BK virus
DHKAYLDK

SEQ ID NO: 522 - protein, 8 aa, BK virus
HKAYLDKN

SEQ ID NO: 523 - protein, 8 aa, BK virus
KAYLDKNN

SEQ ID NO: 524 - protein, 8 aa, BK virus
AYLDKNNA

SEQ ID NO: 525 - protein, 8 aa, BK virus
YLDKNNAY

SEQ ID NO: 526 - protein, 8 aa, BK virus
LDKNNAYP

SEQ ID NO: 527 - protein, 8 aa, BK virus
DKNNAYPV

SEQ ID NO: 528 - protein, 8 aa, BK virus
KNNAYPVE

SEQ ID NO: 529 - protein, 8 aa, BK virus
NNAYPVEC

SEQ ID NO: 530 - protein, 8 aa, BK virus
NAYPVECW

SEQ ID NO: 531 - protein, 8 aa, BK virus
AYPVECWV

SEQ ID NO: 532 - protein, 8 aa, BK virus
YPVECWVP

SEQ ID NO: 533 - protein, 8 aa, BK virus
PVECWVPD

SEQ ID NO: 534 - protein, 8 aa, BK virus
VECWVPDP

SEQ ID NO: 535 - protein, 8 aa, BK virus
ECWVPDPS

SEQ ID NO: 536 - protein, 8 aa, BK virus
CWVPDPSR

SEQ ID NO: 537 - protein, 8 aa, BK virus
WVPDPSRN

SEQ ID NO: 538 - protein, 8 aa, BK virus
VPDPSRNE

SEQ ID NO: 539 - protein, 8 aa, BK virus
PDPSRNEN

SEQ ID NO: 540 - protein, 8 aa, BK virus
DPSRNENA

SEQ ID NO: 541 - protein, 8 aa, BK virus
PSRNENAR

SEQ ID NO: 542 - protein, 8 aa, BK virus
SRNENARY

SEQ ID NO: 543 - protein, 8 aa, BK virus
RNENARYF

SEQ ID NO: 544 - protein, 8 aa, BK virus
NENARYFG

SEQ ID NO: 545 - protein, 8 aa, BK virus
ENARYFGT

SEQ ID NO: 546 - protein, 8 aa, BK virus
NARYFGTF

SEQ ID NO: 547 - protein, 8 aa, BK virus
ARYFGTFT

SEQ ID NO: 548 - protein, 8 aa, BK virus
RYFGTFTG

SEQ ID NO: 549 - protein, 8 aa, BK virus
YFGTFTGG

SEQ ID NO: 550 - protein, 8 aa, BK virus
FGTFTGGE

SEQ ID NO: 551 - protein, 8 aa, BK virus
GTFTGGEN

SEQ ID NO: 552 - protein, 8 aa, BK virus
TFTGGENV

SEQ ID NO: 553 - protein, 8 aa, BK virus
FTGGENVP

SEQ ID NO: 554 - protein, 8 aa, BK virus
TGGENVPP

SEQ ID NO: 555 - protein, 8 aa, BK virus
GGENVPPV

SEQ ID NO: 556 - protein, 8 aa, BK virus
GENVPPVL

SEQ ID NO: 557 - protein, 8 aa, BK virus
ENVPPVLH

SEQ ID NO: 558 - protein, 8 aa, BK virus
NVPPVLHV

SEQ ID NO: 559 - protein, 8 aa, BK virus
VPPVLHVT

SEQ ID NO: 560 - protein, 8 aa, BK virus
PPVLHVTN

SEQ ID NO: 561 - protein, 8 aa, BK virus
PVLHVTNT

SEQ ID NO: 562 - protein, 8 aa, BK virus
VLHVTNTA

SEQ ID NO: 563 - protein, 8 aa, BK virus
LHVTNTAT

SEQ ID NO: 564 - protein, 8 aa, BK virus
HVTNTATT

SEQ ID NO: 565 - protein, 8 aa, BK virus
VTNTATTV

SEQ ID NO: 566 - protein, 8 aa, BK virus
TNTATTVL

SEQ ID NO: 567 - protein, 8 aa, BK virus
NTATTVLL

SEQ ID NO: 568 - protein, 8 aa, BK virus
TATTVLLD

SEQ ID NO: 569 - protein, 8 aa, BK virus
ATTVLLDE

SEQ ID NO: 570 - protein, 8 aa, BK virus
TTVLLDEQ

SEQ ID NO: 571 - protein, 8 aa, BK virus
TVLLDEQG

SEQ ID NO: 572 - protein, 8 aa, BK virus
VLLDEQGV

SEQ ID NO: 573 - protein, 8 aa, BK virus
LLDEQGVG

SEQ ID NO: 574 - protein, 8 aa, BK virus
LDEQGVGP

SEQ ID NO: 575 - protein, 8 aa, BK virus
DEQGVGPL

SEQ ID NO: 576 - protein, 8 aa, BK virus
EQGVGPLC

SEQ ID NO: 577 - protein, 8 aa, BK virus
QGVGPLCK

SEQ ID NO: 578 - protein, 8 aa, BK virus
GVGPLCKA

SEQ ID NO: 579 - protein, 8 aa, BK virus
VGPLCKAD

SEQ ID NO: 580 - protein, 8 aa, BK virus
GPLCKADS

SEQ ID NO: 581 - protein, 8 aa, BK virus
PLCKADSL

SEQ ID NO: 582 - protein, 8 aa, BK virus
LCKADSLY

SEQ ID NO: 583 - protein, 8 aa, BK virus
CKADSLYV

SEQ ID NO: 584 - protein, 8 aa, BK virus
KADSLYVS

SEQ ID NO: 585 - protein, 8 aa, BK virus
ADSLYVSA

SEQ ID NO: 586 - protein, 8 aa, BK virus
DSLYVSAA

SEQ ID NO: 587 - protein, 8 aa, BK virus
SLYVSAAD

SEQ ID NO: 588 - protein, 8 aa, BK virus
LYVSAADI

SEQ ID NO: 589 - protein, 8 aa, BK virus
YVSAADIC

SEQ ID NO: 590 - protein, 8 aa, BK virus
VSAADICG

SEQ ID NO: 591 - protein, 8 aa, BK virus
SAADICGL

SEQ ID NO: 592 - protein, 8 aa, BK virus
AADICGLF

SEQ ID NO: 593 - protein, 8 aa, BK virus
ADICGLFT

SEQ ID NO: 594 - protein, 8 aa, BK virus
DICGLFTN

SEQ ID NO: 595 - protein, 8 aa, BK virus
ICGLFTNS

SEQ ID NO: 596 - protein, 8 aa, BK virus
CGLFTNSS

SEQ ID NO: 597 - protein, 8 aa, BK virus
GLFTNSSG

SEQ ID NO: 598 - protein, 8 aa, BK virus
LFTNSSGT

SEQ ID NO: 599 - protein, 8 aa, BK virus
FTNSSGTQ

SEQ ID NO: 600 - protein, 8 aa, BK virus
TNSSGTQQ

SEQ ID NO: 601 - protein, 8 aa, BK virus
NSSGTQQW

SEQ ID NO: 602 - protein, 8 aa, BK virus
SSGTQQWR

SEQ ID NO: 603 - protein, 8 aa, BK virus
SGTQQWRG

SEQ ID NO: 604 - protein, 8 aa, BK virus
GTQQWRGL

SEQ ID NO: 605 - protein, 8 aa, BK virus
TQQWRGLA

SEQ ID NO: 606 - protein, 8 aa, BK virus
QQWRGLAR

SEQ ID NO: 607 - protein, 8 aa, BK virus
QWRGLARY

SEQ ID NO: 608 - protein, 8 aa, BK virus
WRGLARYF

SEQ ID NO: 609 - protein, 8 aa, BK virus
RGLARYFK

SEQ ID NO: 610 - protein, 8 aa, BK virus
GLARYFKI

SEQ ID NO: 611 - protein, 8 aa, BK virus
LARYFKIR

SEQ ID NO: 612 - protein, 8 aa, BK virus
ARYFKIRL

SEQ ID NO: 613 - protein, 8 aa, BK virus
RYFKIRLR

SEQ ID NO: 614 - protein, 8 aa, BK virus
YFKIRLRK

SEQ ID NO: 615 - protein, 8 aa, BK virus
FKIRLRKR

SEQ ID NO: 616 - protein, 8 aa, BK virus
KIRLRKRS

SEQ ID NO: 617 - protein, 8 aa, BK virus
IRLRKRSV

SEQ ID NO: 618 - protein, 8 aa, BK virus
RLRKRSVK

SEQ ID NO: 619 - protein, 8 aa, BK virus
LRKRSVKN

SEQ ID NO: 620 - protein, 8 aa, BK virus
RKRSVKNP

SEQ ID NO: 621 - protein, 8 aa, BK virus
KRSVKNPY

SEQ ID NO: 622 - protein, 8 aa, BK virus
RSVKNPYP

SEQ ID NO: 623 - protein, 8 aa, BK virus
SVKNPYPI

SEQ ID NO: 624 - protein, 8 aa, BK virus
VKNPYPIS

SEQ ID NO: 625 - protein, 8 aa, BK virus
KNPYPISF

SEQ ID NO: 626 - protein, 8 aa, BK virus
NPYPISFL

SEQ ID NO: 627 - protein, 8 aa, BK virus
PYPISFLL

SEQ ID NO: 628 - protein, 8 aa, BK virus
YPISFLLS

SEQ ID NO: 629 - protein, 8 aa, BK virus
PISFLLSD

SEQ ID NO: 630 - protein, 8 aa, BK virus
ISFLLSDL

SEQ ID NO: 631 - protein, 8 aa, BK virus
SFLLSDLI

SEQ ID NO: 632 - protein, 8 aa, BK virus
FLLSDLIN

SEQ ID NO: 633 - protein, 8 aa, BK virus
LLSDLINR

SEQ ID NO: 634 - protein, 8 aa, BK virus
LSDLINRR

SEQ ID NO: 635 - protein, 8 aa, BK virus
SDLINRRT

SEQ ID NO: 636 - protein, 8 aa, BK virus
DLINRRTQ

SEQ ID NO: 637 - protein, 8 aa, BK virus
LINRRTQR

SEQ ID NO: 638 - protein, 8 aa, BK virus
INRRTQRV

SEQ ID NO: 639 - protein, 8 aa, BK virus
NRRTQRVD

SEQ ID NO: 640 - protein, 8 aa, BK virus
RRTQRVDG

SEQ ID NO: 641 - protein, 8 aa, BK virus
RTQRVDGQ

SEQ ID NO: 642 - protein, 8 aa, BK virus
TQRVDGQP

SEQ ID NO: 643 - protein, 8 aa, BK virus
QRVDGQPM

SEQ ID NO: 644 - protein, 8 aa, BK virus
RVDGQPMY

SEQ ID NO: 645 - protein, 8 aa, BK virus
VDGQPMYG

SEQ ID NO: 646 - protein, 8 aa, BK virus
DGQPMYGM

SEQ ID NO: 647 - protein, 8 aa, BK virus
GQPMYGME

SEQ ID NO: 648 - protein, 8 aa, BK virus
QPMYGMES

SEQ ID NO: 649 - protein, 8 aa, BK virus
PMYGMESQ

SEQ ID NO: 650 - protein, 8 aa, BK virus
MYGMESQV

SEQ ID NO: 651 - protein, 8 aa, BK virus
YGMESQVE

SEQ ID NO: 652 - protein, 8 aa, BK virus
GMESQVEE

SEQ ID NO: 653 - protein, 8 aa, BK virus
MESQVEEV

SEQ ID NO: 654 - protein, 8 aa, BK virus
ESQVEEVR

SEQ ID NO: 655 - protein, 8 aa, BK virus
SQVEEVRV

SEQ ID NO: 656 - protein, 8 aa, BK virus
QVEEVRVF

SEQ ID NO: 657 - protein, 8 aa, BK virus
VEEVRVFD

SEQ ID NO: 658 - protein, 8 aa, BK virus
EEVRVFDG

SEQ ID NO: 659 - protein, 8 aa, BK virus
EVRVFDGT

SEQ ID NO: 660 - protein, 8 aa, BK virus
VRVFDGTE

SEQ ID NO: 661 - protein, 8 aa, BK virus
RVFDGTER

SEQ ID NO: 662 - protein, 8 aa, BK virus
VFDGTERL

SEQ ID NO: 663 - protein, 8 aa, BK virus
FDGTERLP

SEQ ID NO: 664 - protein, 8 aa, BK virus
DGTERLPG

SEQ ID NO: 665 - protein, 8 aa, BK virus
GTERLPGD

SEQ ID NO: 666 - protein, 8 aa, BK virus
TERLPGDP

SEQ ID NO: 667 - protein, 8 aa, BK virus
ERLPGDPD

SEQ ID NO: 668 - protein, 8 aa, BK virus
RLPGDPDM

SEQ ID NO: 669 - protein, 8 aa, BK virus
LPGDPDMI

SEQ ID NO: 670 - protein, 8 aa, BK virus
PGDPDMIR

SEQ ID NO: 671 - protein, 8 aa, BK virus
GDPDMIRY

SEQ ID NO: 672 - protein, 8 aa, BK virus
DPDMIRYI

SEQ ID NO: 673 - protein, 8 aa, BK virus
PDMIRYID

SEQ ID NO: 674 - protein, 8 aa, BK virus
DMIRYIDK

SEQ ID NO: 675 - protein, 8 aa, BK virus
MIRYIDKQ

SEQ ID NO: 676 - protein, 8 aa, BK virus
IRYIDKQG

SEQ ID NO: 677 - protein, 8 aa, BK virus
RYIDKQGQ

SEQ ID NO: 678 - protein, 8 aa, BK virus
YIDKQGQL

SEQ ID NO: 679 - protein, 8 aa, BK virus
IDKQGQLQ

SEQ ID NO: 680 - protein, 8 aa, BK virus
DKQGQLQT

SEQ ID NO: 681 - protein, 8 aa, BK virus
KQGQLQTK

SEQ ID NO: 682 - protein, 8 aa, BK virus
QGQLQTKM

SEQ ID NO: 683 - protein, 8 aa, BK virus
GQLQTKML

SEQ ID NO: 684 - protein, 8 aa, BK virus
TGAFIVHI

SEQ ID NO: 685 - protein, 8 aa, BK virus
GAFIVHIH

SEQ ID NO: 686 - protein, 8 aa, BK virus
AFIVHIHL

SEQ ID NO: 687 - protein, 8 aa, BK virus
FIVHIHLI

SEQ ID NO: 688 - protein, 8 aa, BK virus
IVHIHLIN

SEQ ID NO: 689 - protein, 8 aa, BK virus
VHIHLINA

SEQ ID NO: 690 - protein, 8 aa, BK virus
HIHLINAA

SEQ ID NO: 691 - protein, 8 aa, BK virus
IHLINAAF

SEQ ID NO: 692 - protein, 8 aa, BK virus
HLINAAFV

SEQ ID NO: 693 - protein, 8 aa, BK virus
ATFKLVLF

SEQ ID NO: 694 - protein, 8 aa, BK virus
TFKLVLFW

SEQ ID NO: 695 - protein, 8 aa, BK virus
FKLVLFWG

SEQ ID NO: 696 - protein, 8 aa, BK virus
KLVLFWGW

SEQ ID NO: 697 - protein, 8 aa, BK virus
LVLFWGWC

SEQ ID NO: 698 - protein, 8 aa, BK virus
VLFWGWCF

SEQ ID NO: 699 - protein, 8 aa, BK virus
LFWGWCFR

SEQ ID NO: 700 - protein, 8 aa, BK virus
FWGWCFRP

SEQ ID NO: 701 - protein, 8 aa, BK virus
WGWCFRPF

SEQ ID NO: 702 - protein, 8 aa, BK virus
GWCFRPFK

SEQ ID NO: 703 - protein, 8 aa, BK virus
WCFRPFKT

SEQ ID NO: 704 - protein, 8 aa, BK virus
CFRPFKTL

SEQ ID NO: 705 - protein, 8 aa, BK virus
FRPFKTLK

SEQ ID NO: 706 - protein, 8 aa, BK virus
RPFKTLKA

SEQ ID NO: 707 - protein, 8 aa, BK virus
PFKTLKAF

SEQ ID NO: 708 - protein, 8 aa, BK virus
FKTLKAFT

SEQ ID NO: 709 - protein, 8 aa, BK virus
KTLKAFTQ

SEQ ID NO: 710 - protein, 8 aa, BK virus
TLKAFTQM

SEQ ID NO: 711 - protein, 8 aa, BK virus
LKAFTQMQ

SEQ ID NO: 712 - protein, 8 aa, BK virus
KAFTQMQL

SEQ ID NO: 713 - protein, 8 aa, BK virus
AFTQMQLL

SEQ ID NO: 714 - protein, 8 aa, BK virus
FTQMQLLT

SEQ ID NO: 715 - protein, 8 aa, BK virus
TQMQLLTM

SEQ ID NO: 716 - protein, 8 aa, BK virus
QMQLLTMG

SEQ ID NO: 717 - protein, 8 aa, BK virus
MQLLTMGV

SEQ ID NO: 718 - protein, 8 aa, BK virus
PLGIFSRG

SEQ ID NO: 719 - protein, 8 aa, BK virus
SMSRVFSF

SEQ ID NO: 720 - protein, 8 aa, BK virus
ILFSCNIK

SEQ ID NO: 721 - protein, 8 aa, BK virus
LFSCNIKN

SEQ ID NO: 722 - protein, 8 aa, BK virus
FSCNIKNT

SEQ ID NO: 723 - protein, 8 aa, BK virus
SCNIKNTF

SEQ ID NO: 724 - protein, 8 aa, BK virus
CNIKNTFP

SEQ ID NO: 725 - protein, 8 aa, BK virus
NIKNTFPH

SEQ ID NO: 726 - protein, 8 aa, BK virus
IKNTFPHA

SEQ ID NO: 727 - protein, 8 aa, BK virus
KNTFPHAY

SEQ ID NO: 728 - protein, 8 aa, BK virus
NTFPHAYI

SEQ ID NO: 729 - protein, 8 aa, BK virus
TFPHAYII

SEQ ID NO: 730 - protein, 8 aa, BK virus
FPHAYIIF

SEQ ID NO: 731 - protein, 8 aa, BK virus
PHAYIIFH

SEQ ID NO: 732 - protein, 8 aa, BK virus
HAYIIFHP

SEQ ID NO: 733 - protein, 8 aa, BK virus
KSIHTYLR

SEQ ID NO: 734 - protein, 8 aa, BK virus
SIHTYLRI

SEQ ID NO: 735 - protein, 8 aa, BK virus
IHTYLRIQ

SEQ ID NO: 736 - protein, 8 aa, BK virus
HTYLRIQP

SEQ ID NO: 737 - protein, 8 aa, BK virus
TYLRIQPF

SEQ ID NO: 738 - protein, 8 aa, BK virus
YLRIQPFL

SEQ ID NO: 739 - protein, 8 aa, BK virus
LRIQPFLP

SEQ ID NO: 740 - protein, 8 aa, BK virus
RIQPFLPF

SEQ ID NO: 741 - protein, 8 aa, BK virus
IQPFLPFN

SEQ ID NO: 742 - protein, 8 aa, BK virus
QPFLPFNN

SEQ ID NO: 743 - protein, 8 aa, BK virus
PFLPFNNS

SEQ ID NO: 744 - protein, 8 aa, BK virus
FLPFNNSR

SEQ ID NO: 745 - protein, 8 aa, BK virus
LPFNNSRL

SEQ ID NO: 746 - protein, 8 aa, BK virus
PFNNSRLY

SEQ ID NO: 747 - protein, 8 aa, BK virus
FNNSRLYI

SEQ ID NO: 748 - protein, 8 aa, BK virus
NNSRLYIS

SEQ ID NO: 749 - protein, 8 aa, BK virus
NSRLYISC

SEQ ID NO: 750 - protein, 8 aa, BK virus
SRLYISCK

SEQ ID NO: 751 - protein, 8 aa, BK virus
RLYISCKI

SEQ ID NO: 752 - protein, 8 aa, BK virus
LYISCKIS

SEQ ID NO: 753 - protein, 8 aa, BK virus
YISCKISY

SEQ ID NO: 754 - protein, 8 aa, BK virus
ISCKISYR

SEQ ID NO: 755 - protein, 8 aa, BK virus
SCKISYRP

SEQ ID NO: 756 - protein, 8 aa, BK virus
CKISYRPK

SEQ ID NO: 757 - protein, 8 aa, BK virus
KISYRPKP

SEQ ID NO: 758 - protein, 8 aa, BK virus
ISYRPKPN

SEQ ID NO: 759 - protein, 8 aa, BK virus
IYFGPKIY

SEQ ID NO: 760 - protein, 8 aa, BK virus
YFGPKIYL

SEQ ID NO: 761 - protein, 8 aa, BK virus
FGPKIYLS

SEQ ID NO: 762 - protein, 8 aa, BK virus
GPKIYLSY

SEQ ID NO: 763 - protein, 8 aa, BK virus
PKIYLSYK

SEQ ID NO: 764 - protein, 8 aa, BK virus
KIYLSYKS

SEQ ID NO: 765 - protein, 8 aa, BK virus
IYLSYKSS

SEQ ID NO: 766 - protein, 8 aa, BK virus
YLSYKSSL

SEQ ID NO: 767 - protein, 8 aa, BK virus
LSYKSSLQ

SEQ ID NO: 768 - protein, 8 aa, BK virus
SYKSSLQG

SEQ ID NO: 769 - protein, 8 aa, BK virus
YKSSLQGF

SEQ ID NO: 770 - protein, 8 aa, BK virus
KSSLQGFR

SEQ ID NO: 771 - protein, 8 aa, BK virus
SSLQGFRD

SEQ ID NO: 772 - protein, 8 aa, BK virus
SLQGFRDR

SEQ ID NO: 773 - protein, 8 aa, BK virus
LQGFRDRI

SEQ ID NO: 774 - protein, 8 aa, BK virus
QGFRDRIL

SEQ ID NO: 775 - protein, 8 aa, BK virus
GFRDRILI

SEQ ID NO: 776 - protein, 8 aa, BK virus
FRDRILIH

SEQ ID NO: 777 - protein, 8 aa, BK virus
RDRILIHC

SEQ ID NO: 778 - protein, 8 aa, BK virus
DRILIHCN

SEQ ID NO: 779 - protein, 8 aa, BK virus
RILIHCNQ

SEQ ID NO: 780 - protein, 8 aa, BK virus
ILIHCNQA

SEQ ID NO: 781 - protein, 8 aa, BK virus
LIHCNQAW

SEQ ID NO: 782 - protein, 8 aa, BK virus
IHCNQAWW

SEQ ID NO: 783 - protein, 8 aa, BK virus
HCNQAWWK

SEQ ID NO: 784 - protein, 8 aa, BK virus
CNQAWWKY

SEQ ID NO: 785 - protein, 8 aa, BK virus
NQAWWKYL

SEQ ID NO: 786 - protein, 8 aa, BK virus
QAWWKYLG

SEQ ID NO: 787 - protein, 8 aa, BK virus
AWWKYLGS

SEQ ID NO: 788 - protein, 8 aa, BK virus
WWKYLGSF

SEQ ID NO: 789 - protein, 8 aa, BK virus
WKYLGSFV

SEQ ID NO: 790 - protein, 8 aa, BK virus
FSSCPFYI

SEQ ID NO: 791 - protein, 8 aa, BK virus
SSCPFYIF

SEQ ID NO: 792 - protein, 8 aa, BK virus
SCPFYIFK

SEQ ID NO: 793 - protein, 8 aa, BK virus
CPFYIFKN

SEQ ID NO: 794 - protein, 8 aa, BK virus
PFYIFKNN

SEQ ID NO: 795 - protein, 8 aa, BK virus
FYIFKNNH

SEQ ID NO: 796 - protein, 8 aa, BK virus
YIFKNNHV

SEQ ID NO: 797 - protein, 8 aa, BK virus
IFKNNHVL

SEQ ID NO: 798 - protein, 8 aa, BK virus
FKNNHVLI

SEQ ID NO: 799 - protein, 8 aa, BK virus
KNNHVLIY

SEQ ID NO: 800 - protein, 8 aa, BK virus
NNHVLIYS

SEQ ID NO: 801 - protein, 8 aa, BK virus
NHVLIYSY

SEQ ID NO: 802 - protein, 8 aa, BK virus
HVLIYSYT

SEQ ID NO: 803 - protein, 8 aa, BK virus
CCFSTING

SEQ ID NO: 804 - protein, 8 aa, BK virus
CFSTINGT

SEQ ID NO: 805 - protein, 8 aa, BK virus
FSTINGTF

SEQ ID NO: 806 - protein, 8 aa, BK virus
STINGTFK

SEQ ID NO: 807 - protein, 8 aa, BK virus
PVSSFRYI

SEQ ID NO: 808 - protein, 8 aa, BK virus
VSSFRYIE

SEQ ID NO: 809 - protein, 8 aa, BK virus
SSFRYIEN

SEQ ID NO: 810 - protein, 8 aa, BK virus
SFRYIENN

SEQ ID NO: 811 - protein, 8 aa, BK virus
FRYIENNT

SEQ ID NO: 812 - protein, 8 aa, BK virus
RYIENNTV

SEQ ID NO: 813 - protein, 8 aa, BK virus
YIENNTVQ

SEQ ID NO: 814 - protein, 8 aa, BK virus
IENNTVQK

SEQ ID NO: 815 - protein, 8 aa, BK virus
ENNTVQKI

SEQ ID NO: 816 - protein, 8 aa, BK virus
NNTVQKIK

SEQ ID NO: 817 - protein, 8 aa, BK virus
NTVQKIKY

SEQ ID NO: 818 - protein, 8 aa, BK virus
TVQKIKYY

SEQ ID NO: 819 - protein, 8 aa, BK virus
VQKIKYYR

SEQ ID NO: 820 - protein, 8 aa, BK virus
QKIKYYRI

SEQ ID NO: 821 - protein, 8 aa, BK virus
KIKYYRIH

SEQ ID NO: 822 - protein, 8 aa, BK virus
IKYYRIHF

SEQ ID NO: 823 - protein, 8 aa, BK virus
KYYRIHFR

SEQ ID NO: 824 - protein, 8 aa, BK virus
QTVQPSNT

SEQ ID NO: 825 - protein, 8 aa, BK virus
TVQPSNTC

SEQ ID NO: 826 - protein, 8 aa, BK virus
VQPSNTCH

SEQ ID NO: 827 - protein, 8 aa, BK virus
QPSNTCHI

SEQ ID NO: 828 - protein, 8 aa, BK virus
PSNTCHIL

SEQ ID NO: 829 - protein, 8 aa, BK virus
SNTCHILF

SEQ ID NO: 830 - protein, 8 aa, BK virus
YSISMSSK

SEQ ID NO: 831 - protein, 8 aa, BK virus
SISMSSKY

SEQ ID NO: 832 - protein, 8 aa, BK virus
HFFPGHMK

SEQ ID NO: 833 - protein, 8 aa, BK virus
FFPGHMKG

SEQ ID NO: 834 - protein, 8 aa, BK virus
FPGHMKGI

SEQ ID NO: 835 - protein, 8 aa, BK virus
PGHMKGIY

SEQ ID NO: 836 - protein, 8 aa, BK virus
GHMKGIYS

SEQ ID NO: 837 - protein, 8 aa, BK virus
HMKGIYSF

SEQ ID NO: 838 - protein, 8 aa, BK virus
MKGIYSFF

SEQ ID NO: 839 - protein, 8 aa, BK virus
KGIYSFFS

SEQ ID NO: 840 - protein, 8 aa, BK virus
NCIYCLLT

SEQ ID NO: 841 - protein, 8 aa, BK virus
CIYCLLTN

SEQ ID NO: 842 - protein, 8 aa, BK virus
IYCLLTNT

SEQ ID NO: 843 - protein, 8 aa, BK virus
YCLLTNTF

SEQ ID NO: 844 - protein, 8 aa, BK virus
CLLTNTFL

SEQ ID NO: 845 - protein, 8 aa, BK virus
LLTNTFLI

SEQ ID NO: 846 - protein, 8 aa, BK virus
LTNTFLIF

SEQ ID NO: 847 - protein, 8 aa, BK virus
TNTFLIFT

SEQ ID NO: 848 - protein, 8 aa, BK virus
NTFLIFTF

SEQ ID NO: 849 - protein, 8 aa, BK virus
TFLIFTFC

SEQ ID NO: 850 - protein, 8 aa, BK virus
FLIFTFCK

SEQ ID NO: 851 - protein, 8 aa, BK virus
LIFTFCKN

SEQ ID NO: 852 - protein, 8 aa, BK virus
IFTFCKNN

SEQ ID NO: 853 - protein, 8 aa, BK virus
FTFCKNNS

SEQ ID NO: 854 - protein, 8 aa, BK virus
TFCKNNSI

SEQ ID NO: 855 - protein, 8 aa, BK virus
FCKNNSIC

SEQ ID NO: 856 - protein, 8 aa, BK virus
CKNNSICK

SEQ ID NO: 857 - protein, 8 aa, BK virus
KNNSICKV

SEQ ID NO: 858 - protein, 8 aa, BK virus
NNSICKVL

SEQ ID NO: 859 - protein, 8 aa, BK virus
NSICKVLF

SEQ ID NO: 860 - protein, 8 aa, BK virus
SICKVLFM

SEQ ID NO: 861 - protein, 8 aa, BK virus
ICKVLFMI

SEQ ID NO: 862 - protein, 8 aa, BK virus
CKVLFMIL

SEQ ID NO: 863 - protein, 8 aa, BK virus
KVLFMILK

SEQ ID NO: 864 - protein, 8 aa, BK virus
VLFMILKV

SEQ ID NO: 865 - protein, 8 aa, BK virus
LFMILKVI

SEQ ID NO: 866 - protein, 8 aa, BK virus
FMILKVIR

SEQ ID NO: 867 - protein, 8 aa, BK virus
MILKVIRL

SEQ ID NO: 868 - protein, 8 aa, BK virus
ILKVIRLV

SEQ ID NO: 869 - protein, 8 aa, BK virus
LKVIRLVF

SEQ ID NO: 870 - protein, 8 aa, BK virus
KVIRLVFF

SEQ ID NO: 871 - protein, 8 aa, BK virus
VIRLVFFL

SEQ ID NO: 872 - protein, 8 aa, BK virus
IRLVFFLT

SEQ ID NO: 873 - protein, 8 aa, BK virus
RLVFFLTL

SEQ ID NO: 874 - protein, 8 aa, BK virus
LVFFLTLF

SEQ ID NO: 875 - protein, 8 aa, BK virus
VFFLTLFT

SEQ ID NO: 876 - protein, 8 aa, BK virus
FFLTLFTL

SEQ ID NO: 877 - protein, 8 aa, BK virus
FLTLFTLL

SEQ ID NO: 878 - protein, 8 aa, BK virus
LTLFTLLY

SEQ ID NO: 879 - protein, 8 aa, BK virus
TLFTLLYI

SEQ ID NO: 880 - protein, 8 aa, BK virus
LFTLLYIV

SEQ ID NO: 881 - protein, 8 aa, BK virus
FTLLYIVL

SEQ ID NO: 882 - protein, 8 aa, BK virus
TLLYIVLK

SEQ ID NO: 883 - protein, 8 aa, BK virus
LLYIVLKF

SEQ ID NO: 884 - protein, 8 aa, BK virus
KHILTLCL

SEQ ID NO: 885 - protein, 8 aa, BK virus
HILTLCLY

SEQ ID NO: 886 - protein, 8 aa, BK virus
ILTLCLYC

SEQ ID NO: 887 - protein, 8 aa, BK virus
LTLCLYCI

SEQ ID NO: 888 - protein, 8 aa, BK virus
TLCLYCIL

SEQ ID NO: 889 - protein, 8 aa, BK virus
LCLYCILS

SEQ ID NO: 890 - protein, 8 aa, BK virus
CLYCILSN

SEQ ID NO: 891 - protein, 8 aa, BK virus
FPRHLLCF

SEQ ID NO: 892 - protein, 8 aa, BK virus
PRHLLCFF

SEQ ID NO: 893 - protein, 8 aa, BK virus
RHLLCFFR

SEQ ID NO: 894 - protein, 8 aa, BK virus
HLLCFFRL

SEQ ID NO: 895 - protein, 8 aa, BK virus
LLCFFRLF

SEQ ID NO: 896 - protein, 8 aa, BK virus
LCFFRLFW

SEQ ID NO: 897 - protein, 8 aa, BK virus
CFFRLFWA

SEQ ID NO: 898 - protein, 8 aa, BK virus
FFRLFWAK

SEQ ID NO: 899 - protein, 8 aa, BK virus
FRLFWAKI

SEQ ID NO: 900 - protein, 8 aa, BK virus
RLFWAKIM

SEQ ID NO: 901 - protein, 8 aa, BK virus
LFWAKIML

SEQ ID NO: 902 - protein, 8 aa, BK virus
FWAKIMLL

SEQ ID NO: 903 - protein, 8 aa, BK virus
APLNAFFY

SEQ ID NO: 904 - protein, 8 aa, BK virus
PLNAFFYS

SEQ ID NO: 905 - protein, 8 aa, BK virus
LNAFFYSM

SEQ ID NO: 906 - protein, 8 aa, BK virus
NAFFYSMV

SEQ ID NO: 907 - protein, 8 aa, BK virus
AFFYSMVW

SEQ ID NO: 908 - protein, 8 aa, BK virus
FFYSMVWI

SEQ ID NO: 909 - protein, 8 aa, BK virus
FYSMVWIS

SEQ ID NO: 910 - protein, 8 aa, BK virus
YSMVWISS

SEQ ID NO: 911 - protein, 8 aa, BK virus
VFLINTLT

SEQ ID NO: 912 - protein, 8 aa, BK virus
FLINTLTN

SEQ ID NO: 913 - protein, 8 aa, BK virus
KTKGTQLL

SEQ ID NO: 914 - protein, 8 aa, BK virus
TKGTQLLT

SEQ ID NO: 915 - protein, 8 aa, BK virus
KGTQLLTE

SEQ ID NO: 916 - protein, 8 aa, BK virus
GTQLLTEI

SEQ ID NO: 917 - protein, 8 aa, BK virus
TQLLTEII

SEQ ID NO: 918 - protein, 8 aa, BK virus
QLLTEIIN

SEQ ID NO: 919 - protein, 8 aa, BK virus
LLTEIINC

SEQ ID NO: 920 - protein, 8 aa, BK virus
LTEIINCR

SEQ ID NO: 921 - protein, 8 aa, BK virus
TEIINCRN

SEQ ID NO: 922 - protein, 8 aa, BK virus
EIINCRNS

SEQ ID NO: 923 - protein, 8 aa, BK virus
IINCRNSM

SEQ ID NO: 924 - protein, 8 aa, BK virus
INCRNSMS

SEQ ID NO: 925 - protein, 8 aa, BK virus
NCRNSMSM

SEQ ID NO: 926 - protein, 8 aa, BK virus
CRNSMSMW

SEQ ID NO: 927 - protein, 8 aa, BK virus
RNSMSMWS

SEQ ID NO: 928 - protein, 8 aa, BK virus
KEYNIMPS

SEQ ID NO: 929 - protein, 8 aa, BK virus
EYNIMPST

SEQ ID NO: 930 - protein, 8 aa, BK virus
YNIMPSTH

SEQ ID NO: 931 - protein, 8 aa, BK virus
NIMPSTHV

SEQ ID NO: 932 - protein, 8 aa, BK virus
IMPSTHVS

SEQ ID NO: 933 - protein, 8 aa, BK virus
MPSTHVST

SEQ ID NO: 934 - protein, 8 aa, BK virus
PSTHVSTN

SEQ ID NO: 935 - protein, 8 aa, BK virus
STHVSTNK

SEQ ID NO: 936 - protein, 8 aa, BK virus
THVSTNKS

SEQ ID NO: 937 - protein, 8 aa, BK virus
HVSTNKSY

SEQ ID NO: 938 - protein, 8 aa, BK virus
VSTNKSYR

SEQ ID NO: 939 - protein, 8 aa, BK virus
STNKSYRI

SEQ ID NO: 940 - protein, 8 aa, BK virus
TNKSYRIF

SEQ ID NO: 941 - protein, 8 aa, BK virus
NKSYRIFF

SEQ ID NO: 942 - protein, 8 aa, BK virus
KSYRIFFH

SEQ ID NO: 943 - protein, 8 aa, BK virus
SYRIFFHK

SEQ ID NO: 944 - protein, 8 aa, BK virus
YRIFFHKF

SEQ ID NO: 945 - protein, 8 aa, BK virus
RIFFHKFF

SEQ ID NO: 946 - protein, 8 aa, BK virus
IFFHKFFI

SEQ ID NO: 947 - protein, 8 aa, BK virus
FFHKFFIQ

SEQ ID NO: 948 - protein, 8 aa, BK virus
FHKFFIQN

SEQ ID NO: 949 - protein, 8 aa, BK virus
HKFFIQNL

SEQ ID NO: 950 - protein, 8 aa, BK virus
KFFIQNLS

SEQ ID NO: 951 - protein, 8 aa, BK virus
FFIQNLSF

SEQ ID NO: 952 - protein, 8 aa, BK virus
FIQNLSFF

SEQ ID NO: 953 - protein, 8 aa, BK virus
IQNLSFFF

SEQ ID NO: 954 - protein, 8 aa, BK virus
QNLSFFFS

SEQ ID NO: 955 - protein, 8 aa, BK virus
NLSFFFSS

SEQ ID NO: 956 - protein, 8 aa, BK virus
LSFFFSSI

SEQ ID NO: 957 - protein, 8 aa, BK virus
SFFFSSIH

SEQ ID NO: 958 - protein, 8 aa, BK virus
FFFSSIHS

SEQ ID NO: 959 - protein, 8 aa, BK virus
FFSSIHSK

SEQ ID NO: 960 - protein, 8 aa, BK virus
FSSIHSKA

SEQ ID NO: 961 - protein, 8 aa, BK virus
SSIHSKAG

SEQ ID NO: 962 - protein, 8 aa, BK virus
SIHSKAGK

SEQ ID NO: 963 - protein, 8 aa, BK virus
IHSKAGKG

SEQ ID NO: 964 - protein, 8 aa, BK virus
HSKAGKGS

SEQ ID NO: 965 - protein, 8 aa, BK virus
SKAGKGSI

SEQ ID NO: 966 - protein, 8 aa, BK virus
KAGKGSIT

SEQ ID NO: 967 - protein, 8 aa, BK virus
AGKGSITK

SEQ ID NO: 968 - protein, 8 aa, BK virus
GKGSITKY

SEQ ID NO: 969 - protein, 8 aa, BK virus
KGSITKYS

SEQ ID NO: 970 - protein, 8 aa, BK virus
GSITKYSL

SEQ ID NO: 971 - protein, 8 aa, BK virus
SITKYSLT

SEQ ID NO: 972 - protein, 8 aa, BK virus
ITKYSLTK

SEQ ID NO: 973 - protein, 8 aa, BK virus
TKYSLTKK

SEQ ID NO: 974 - protein, 8 aa, BK virus
KYSLTKKL

SEQ ID NO: 975 - protein, 8 aa, BK virus
YSLTKKLV

SEQ ID NO: 976 - protein, 8 aa, BK virus
IRGKVFRV

SEQ ID NO: 977 - protein, 8 aa, BK virus
RGKVFRVF

SEQ ID NO: 978 - protein, 8 aa, BK virus
GKVFRVFY

SEQ ID NO: 979 - protein, 8 aa, BK virus
KVFRVFYL

SEQ ID NO: 980 - protein, 8 aa, BK virus
VFRVFYLS

SEQ ID NO: 981 - protein, 8 aa, BK virus
FRVFYLSF

SEQ ID NO: 982 - protein, 8 aa, BK virus
RVFYLSFF

SEQ ID NO: 983 - protein, 8 aa, BK virus
VFYLSFFF

SEQ ID NO: 984 - protein, 8 aa, BK virus
FYLSFFFG

SEQ ID NO: 985 - protein, 8 aa, BK virus
YLSFFFGW

SEQ ID NO: 986 - protein, 8 aa, BK virus
LSFFFGWC

SEQ ID NO: 987 - protein, 8 aa, BK virus
VLRICCCF

SEQ ID NO: 988 - protein, 8 aa, BK virus
LRICCCFF

SEQ ID NO: 989 - protein, 8 aa, BK virus
RICCCFFI

SEQ ID NO: 990 - protein, 8 aa, BK virus
ICCCFFIT

SEQ ID NO: 991 - protein, 8 aa, BK virus
CCCFFITG

SEQ ID NO: 992 - protein, 8 aa, BK virus
CCFFITGK

SEQ ID NO: 993 - protein, 8 aa, BK virus
CFFITGKH

SEQ ID NO: 994 - protein, 8 aa, BK virus
FFITGKHI

SEQ ID NO: 995 - protein, 8 aa, BK virus
FITGKHIF

SEQ ID NO: 996 - protein, 8 aa, BK virus
ITGKHIFM

SEQ ID NO: 997 - protein, 8 aa, BK virus
TGKHIFMA

SEQ ID NO: 998 - protein, 8 aa, BK virus
GKHIFMAK

SEQ ID NO: 999 - protein, 8 aa, BK virus
IFIPFFIK

SEQ ID NO: 1000 - protein, 8 aa, BK virus
FIPFFIKG

SEQ ID NO: 1001 - protein, 8 aa, BK virus
IPFFIKGT

SEQ ID NO: 1002 - protein, 8 aa, BK virus
PFFIKGTP

SEQ ID NO: 1003 - protein, 8 aa, BK virus
FFIKGTPP

SEQ ID NO: 1004 - protein, 8 aa, BK virus
FIKGTPPG

SEQ ID NO: 1005 - protein, 8 aa, BK virus
IKGTPPGL

SEQ ID NO: 1006 - protein, 8 aa, BK virus
KGTPPGLP

SEQ ID NO: 1007 - protein, 8 aa, BK virus
GTPPGLPL

SEQ ID NO: 1008 - protein, 8 aa, BK virus
TPPGLPLF

SEQ ID NO: 1009 - protein, 8 aa, BK virus
PPGLPLFC

SEQ ID NO: 1010 - protein, 8 aa, BK virus
PGLPLFCS

SEQ ID NO: 1011 - protein, 8 aa, BK virus
GLPLFCSI

SEQ ID NO: 1012 - protein, 8 aa, BK virus
LPLFCSIG

SEQ ID NO: 1013 - protein, 8 aa, BK virus
PLFCSIGW

SEQ ID NO: 1014 - protein, 8 aa, BK virus
LFCSIGWH

SEQ ID NO: 1015 - protein, 8 aa, BK virus
FCSIGWHL

SEQ ID NO: 1016 - protein, 8 aa, BK virus
YFIIYLNI

SEQ ID NO: 1017 - protein, 8 aa, BK virus
FIIYLNIS

SEQ ID NO: 1018 - protein, 8 aa, BK virus
SFRSLKGV

SEQ ID NO: 1019 - protein, 8 aa, BK virus
FRSLKGVS

SEQ ID NO: 1020 - protein, 8 aa, BK virus
RSLKGVSP

SEQ ID NO: 1021 - protein, 8 aa, BK virus
SLKGVSPI

SEQ ID NO: 1022 - protein, 8 aa, BK virus
LKGVSPII

SEQ ID NO: 1023 - protein, 8 aa, BK virus
KGVSPIIW

SEQ ID NO: 1024 - protein, 8 aa, BK virus
GVSPIIWT

SEQ ID NO: 1025 - protein, 8 aa, BK virus
VSPIIWTH

SEQ ID NO: 1026 - protein, 8 aa, BK virus
SPIIWTHH

SEQ ID NO: 1027 - protein, 8 aa, BK virus
PIIWTHHC

SEQ ID NO: 1028 - protein, 8 aa, BK virus
IIWTHHCR

SEQ ID NO: 1029 - protein, 8 aa, BK virus
IWTHHCRV

SEQ ID NO: 1030 - protein, 8 aa, BK virus
WTHHCRVS

SEQ ID NO: 1031 - protein, 8 aa, BK virus
THHCRVSS

SEQ ID NO: 1032 - protein, 8 aa, BK virus
HHCRVSSV

SEQ ID NO: 1033 - protein, 8 aa, BK virus
HCRVSSVR

SEQ ID NO: 1034 - protein, 8 aa, BK virus
CRVSSVRS

SEQ ID NO: 1035 - protein, 8 aa, BK virus
RVSSVRSK

SEQ ID NO: 1036 - protein, 8 aa, BK virus
VSSVRSKP

SEQ ID NO: 1037 - protein, 8 aa, BK virus
SSVRSKPN

SEQ ID NO: 1038 - protein, 8 aa, BK virus
SVRSKPNH

SEQ ID NO: 1039 - protein, 8 aa, BK virus
VRSKPNHC

SEQ ID NO: 1040 - protein, 8 aa, BK virus
RSKPNHCV

SEQ ID NO: 1041 - protein, 8 aa, BK virus
SKPNHCVK

SEQ ID NO: 1042 - protein, 8 aa, BK virus
KPNHCVKQ

SEQ ID NO: 1043 - protein, 8 aa, BK virus
PNHCVKQS

SEQ ID NO: 1044 - protein, 8 aa, BK virus
NHCVKQSM

SEQ ID NO: 1045 - protein, 8 aa, BK virus
HCVKQSMQ

SEQ ID NO: 1046 - protein, 8 aa, BK virus
QSIQTKGS

SEQ ID NO: 1047 - protein, 8 aa, BK virus
SIQTKGSF

SEQ ID NO: 1048 - protein, 8 aa, BK virus
IQTKGSFL

SEQ ID NO: 1049 - protein, 8 aa, BK virus
QTKGSFLK

SEQ ID NO: 1050 - protein, 8 aa, BK virus
TKGSFLKN

SEQ ID NO: 1051 - protein, 8 aa, BK virus
KGSFLKNF

SEQ ID NO: 1052 - protein, 8 aa, BK virus
GSFLKNFL

SEQ ID NO: 1053 - protein, 8 aa, BK virus
SFLKNFLF

SEQ ID NO: 1054 - protein, 8 aa, BK virus
FLKNFLFK

SEQ ID NO: 1055 - protein, 8 aa, BK virus
LKNFLFKC

SEQ ID NO: 1056 - protein, 8 aa, BK virus
KNFLFKCL

SEQ ID NO: 1057 - protein, 8 aa, BK virus
NFLFKCLN

SEQ ID NO: 1058 - protein, 8 aa, BK virus
FLFKCLNL

SEQ ID NO: 1059 - protein, 8 aa, BK virus
LFKCLNLS

SEQ ID NO: 1060 - protein, 8 aa, BK virus
HSMQGQCT

SEQ ID NO: 1061 - protein, 8 aa, BK virus
SMQGQCTE

SEQ ID NO: 1062 - protein, 8 aa, BK virus
MQGQCTEG

SEQ ID NO: 1063 - protein, 8 aa, BK virus
QGQCTEGF

SEQ ID NO: 1064 - protein, 8 aa, BK virus
GQCTEGFL

SEQ ID NO: 1065 - protein, 8 aa, BK virus
QCTEGFLE

SEQ ID NO: 1066 - protein, 8 aa, BK virus
CTEGFLEQ

SEQ ID NO: 1067 - protein, 8 aa, BK virus
TEGFLEQI

SEQ ID NO: 1068 - protein, 8 aa, BK virus
EGFLEQIG

SEQ ID NO: 1069 - protein, 8 aa, BK virus
GFLEQIGH

SEQ ID NO: 1070 - protein, 8 aa, BK virus
FLEQIGHS

SEQ ID NO: 1071 - protein, 8 aa, BK virus
LEQIGHSL

SEQ ID NO: 1072 - protein, 8 aa, BK virus
EQIGHSLQ

SEQ ID NO: 1073 - protein, 8 aa, BK virus
QIGHSLQY

SEQ ID NO: 1074 - protein, 8 aa, BK virus
IGHSLQYR

SEQ ID NO: 1075 - protein, 8 aa, BK virus
GHSLQYRV

SEQ ID NO: 1076 - protein, 8 aa, BK virus
HSLQYRVS

SEQ ID NO: 1077 - protein, 8 aa, BK virus
SLQYRVSG

SEQ ID NO: 1078 - protein, 8 aa, BK virus
LQYRVSGQ

SEQ ID NO: 1079 - protein, 8 aa, BK virus
QYRVSGQR

SEQ ID NO: 1080 - protein, 8 aa, BK virus
YRVSGQRG

SEQ ID NO: 1081 - protein, 8 aa, BK virus
RVSGQRGK

SEQ ID NO: 1082 - protein, 8 aa, BK virus
VSGQRGKS

SEQ ID NO: 1083 - protein, 8 aa, BK virus
SGQRGKSA

SEQ ID NO: 1084 - protein, 8 aa, BK virus
GQRGKSAQ

SEQ ID NO: 1085 - protein, 8 aa, BK virus
QRGKSAQT

SEQ ID NO: 1086 - protein, 8 aa, BK virus
RGKSAQTS

SEQ ID NO: 1087 - protein, 8 aa, BK virus
GKSAQTSE

SEQ ID NO: 1088 - protein, 8 aa, BK virus
KSAQTSEL

SEQ ID NO: 1089 - protein, 8 aa, BK virus
SAQTSELL

SEQ ID NO: 1090 - protein, 8 aa, BK virus
AQTSELLQ

SEQ ID NO: 1091 - protein, 8 aa, BK virus
QTSELLQV

SEQ ID NO: 1092 - protein, 8 aa, BK virus
TSELLQVP

SEQ ID NO: 1093 - protein, 8 aa, BK virus
SELLQVPK

SEQ ID NO: 1094 - protein, 8 aa, BK virus
ELLQVPKS

SEQ ID NO: 1095 - protein, 8 aa, BK virus
LLQVPKSG

SEQ ID NO: 1096 - protein, 8 aa, BK virus
ATFTSCSI

SEQ ID NO: 1097 - protein, 8 aa, BK virus
TFTSCSIF

SEQ ID NO: 1098 - protein, 8 aa, BK virus
FTSCSIFL

SEQ ID NO: 1099 - protein, 8 aa, BK virus
TSCSIFLY

SEQ ID NO: 1100 - protein, 8 aa, BK virus
SCSIFLYK

SEQ ID NO: 1101 - protein, 8 aa, BK virus
CSIFLYKV

SEQ ID NO: 1102 - protein, 8 aa, BK virus
SIFLYKVF

SEQ ID NO: 1103 - protein, 8 aa, BK virus
IFLYKVFI

SEQ ID NO: 1104 - protein, 8 aa, BK virus
FLYKVFIL

SEQ ID NO: 1105 - protein, 8 aa, BK virus
LYKVFILF

SEQ ID NO: 1106 - protein, 8 aa, BK virus
YKVFILFI

SEQ ID NO: 1107 - protein, 8 aa, BK virus
KVFILFIL

SEQ ID NO: 1108 - protein, 8 aa, BK virus
VFILFILS

SEQ ID NO: 1109 - protein, 8 aa, BK virus
FILFILSS

SEQ ID NO: 1110 - protein, 8 aa, BK virus
ILFILSSS

SEQ ID NO: 1111 - protein, 8 aa, BK virus
LFILSSSP

SEQ ID NO: 1112 - protein, 8 aa, BK virus
FILSSSPP

SEQ ID NO: 1113 - protein, 8 aa, BK virus
ILSSSPPL

SEQ ID NO: 1114 - protein, 8 aa, BK virus
LSSSPPLS

SEQ ID NO: 1115 - protein, 8 aa, BK virus
SSSPPLSG

SEQ ID NO: 1116 - protein, 8 aa, BK virus
AFLIKGRF

SEQ ID NO: 1117 - protein, 8 aa, BK virus
FLIKGRFP

SEQ ID NO: 1118 - protein, 8 aa, BK virus
LIKGRFPQ

SEQ ID NO: 1119 - protein, 8 aa, BK virus
IKGRFPQA

SEQ ID NO: 1120 - protein, 8 aa, BK virus
KGRFPQAA

SEQ ID NO: 1121 - protein, 8 aa, BK virus
GRFPQAAL

SEQ ID NO: 1122 - protein, 8 aa, BK virus
RFPQAALS

SEQ ID NO: 1123 - protein, 8 aa, BK virus
FPQAALSR

SEQ ID NO: 1124 - protein, 8 aa, BK virus
PQAALSRP

SEQ ID NO: 1125 - protein, 8 aa, BK virus
QAALSRPK

SEQ ID NO: 1126 - protein, 8 aa, BK virus
AALSRPKR

SEQ ID NO: 1127 - protein, 8 aa, BK virus
ALSRPKRS

SEQ ID NO: 1128 - protein, 8 aa, BK virus
LSRPKRSM

SEQ ID NO: 1129 - protein, 8 aa, BK virus
SRPKRSMS

SEQ ID NO: 1130 - protein, 8 aa, BK virus
RPKRSMSS

SEQ ID NO: 1131 - protein, 8 aa, BK virus
PKRSMSSM

SEQ ID NO: 1132 - protein, 8 aa, BK virus
KRSMSSMD

SEQ ID NO: 1133 - protein, 8 aa, BK virus
RSMSSMDS

SEQ ID NO: 1134 - protein, 8 aa, BK virus
SMSSMDSS

SEQ ID NO: 1135 - protein, 8 aa, BK virus
MSSMDSSL

SEQ ID NO: 1136 - protein, 8 aa, BK virus
SSMDSSLL

SEQ ID NO: 1137 - protein, 8 aa, BK virus
SMDSSLLR

SEQ ID NO: 1138 - protein, 8 aa, BK virus
MDSSLLRT

SEQ ID NO: 1139 - protein, 8 aa, BK virus
DSSLLRTL

SEQ ID NO: 1140 - protein, 8 aa, BK virus
SSLLRTLS

SEQ ID NO: 1141 - protein, 9 aa, BK virus
FCKNCKRIG

SEQ ID NO: 1142 - protein, 9 aa, BK virus
CKNCKRIGI

SEQ ID NO: 1143 - protein, 9 aa, BK virus
KNCKRIGIS

SEQ ID NO: 1144 - protein, 9 aa, BK virus
NCKRIGISP

SEQ ID NO: 1145 - protein, 9 aa, BK virus
CKRIGISPN

SEQ ID NO: 1146 - protein, 9 aa, BK virus
KRIGISPNS

SEQ ID NO: 1147 - protein, 9 aa, BK virus
RIGISPNSF

SEQ ID NO: 1148 - protein, 9 aa, BK virus
IGISPNSFA

SEQ ID NO: 1149 - protein, 9 aa, BK virus
GISPNSFAR

SEQ ID NO: 1150 - protein, 9 aa, BK virus
ISPNSFARP

SEQ ID NO: 1151 - protein, 9 aa, BK virus
SPNSFARPQ

SEQ ID NO: 1152 - protein, 9 aa, BK virus
PNSFARPQK

SEQ ID NO: 1153 - protein, 9 aa, BK virus
NSFARPQKK

SEQ ID NO: 1154 - protein, 9 aa, BK virus
SFARPQKKP

SEQ ID NO: 1155 - protein, 9 aa, BK virus
FARPQKKPP

SEQ ID NO: 1156 - protein, 9 aa, BK virus
ARPQKKPPH

SEQ ID NO: 1157 - protein, 9 aa, BK virus
RPQKKPPHP

SEQ ID NO: 1158 - protein, 9 aa, BK virus
PQKKPPHPY

SEQ ID NO: 1159 - protein, 9 aa, BK virus
QKKPPHPYY

SEQ ID NO: 1160 - protein, 9 aa, BK virus
KKPPHPYYL

SEQ ID NO: 1161 - protein, 9 aa, BK virus
KPPHPYYLR

SEQ ID NO: 1162 - protein, 9 aa, BK virus
PPHPYYLRE

SEQ ID NO: 1163 - protein, 9 aa, BK virus
PHPYYLRER

SEQ ID NO: 1164 - protein, 9 aa, BK virus
HPYYLRERV

SEQ ID NO: 1165 - protein, 9 aa, BK virus
PYYLRERVE

SEQ ID NO: 1166 - protein, 9 aa, BK virus
YYLRERVEA

SEQ ID NO: 1167 - protein, 9 aa, BK virus
YLRERVEAE

SEQ ID NO: 1168 - protein, 9 aa, BK virus
LRERVEAEA

SEQ ID NO: 1169 - protein, 9 aa, BK virus
RERVEAEAA

SEQ ID NO: 1170 - protein, 9 aa, BK virus
ERVEAEAAS

SEQ ID NO: 1171 - protein, 9 aa, BK virus
RVEAEAASA

SEQ ID NO: 1172 - protein, 9 aa, BK virus
VEAEAASAS

SEQ ID NO: 1173 - protein, 9 aa, BK virus
EAEAASASY

SEQ ID NO: 1174 - protein, 9 aa, BK virus
AEAASASYI

SEQ ID NO: 1175 - protein, 9 aa, BK virus
EAASASYIL

SEQ ID NO: 1176 - protein, 9 aa, BK virus
KKRPQGGAA

SEQ ID NO: 1177 - protein, 9 aa, BK virus
KRPQGGAAY

SEQ ID NO: 1178 - protein, 9 aa, BK virus
RPQGGAAYP

SEQ ID NO: 1179 - protein, 9 aa, BK virus
PQGGAAYPW

SEQ ID NO: 1180 - protein, 9 aa, BK virus
QGGAAYPWN

SEQ ID NO: 1181 - protein, 9 aa, BK virus
GGAAYPWNA

SEQ ID NO: 1182 - protein, 9 aa, BK virus
GAAYPWNAA

SEQ ID NO: 1183 - protein, 9 aa, BK virus
AAYPWNAAK

SEQ ID NO: 1184 - protein, 9 aa, BK virus
AYPWNAAKP

SEQ ID NO: 1185 - protein, 9 aa, BK virus
PQEGKCMTH

SEQ ID NO: 1186 - protein, 9 aa, BK virus
QEGKCMTHR

SEQ ID NO: 1187 - protein, 9 aa, BK virus
EGKCMTHRG

SEQ ID NO: 1188 - protein, 9 aa, BK virus
GKCMTHRGM

SEQ ID NO: 1189 - protein, 9 aa, BK virus
KCMTHRGMQ

SEQ ID NO: 1190 - protein, 9 aa, BK virus
CMTHRGMQP

SEQ ID NO: 1191 - protein, 9 aa, BK virus
MTHRGMQPN

SEQ ID NO: 1192 - protein, 9 aa, BK virus
THRGMQPNH

SEQ ID NO: 1193 - protein, 9 aa, BK virus
HRGMQPNHD

SEQ ID NO: 1194 - protein, 9 aa, BK virus
RGMQPNHDL

SEQ ID NO: 1195 - protein, 9 aa, BK virus
GMQPNHDLR

SEQ ID NO: 1196 - protein, 9 aa, BK virus
MQPNHDLRK

SEQ ID NO: 1197 - protein, 9 aa, BK virus
QPNHDLRKE

SEQ ID NO: 1198 - protein, 9 aa, BK virus
PNHDLRKES

SEQ ID NO: 1199 - protein, 9 aa, BK virus
NHDLRKESA

SEQ ID NO: 1200 - protein, 9 aa, BK virus
LTGRSCLPM

SEQ ID NO: 1201 - protein, 9 aa, BK virus
TGRSCLPME

SEQ ID NO: 1202 - protein, 9 aa, BK virus
GRSCLPMEC

SEQ ID NO: 1203 - protein, 9 aa, BK virus
RSCLPMECS

SEQ ID NO: 1204 - protein, 9 aa, BK virus
SCLPMECSQ

SEQ ID NO: 1205 - protein, 9 aa, BK virus
CLPMECSQT

SEQ ID NO: 1206 - protein, 9 aa, BK virus
LPMECSQTM

SEQ ID NO: 1207 - protein, 9 aa, BK virus
PMECSQTMT

SEQ ID NO: 1208 - protein, 9 aa, BK virus
MECSQTMTS

SEQ ID NO: 1209 - protein, 9 aa, BK virus
ECSQTMTSG

SEQ ID NO: 1210 - protein, 9 aa, BK virus
CSQTMTSGR

SEQ ID NO: 1211 - protein, 9 aa, BK virus
SQTMTSGRK

SEQ ID NO: 1212 - protein, 9 aa, BK virus
QTMTSGRKV

SEQ ID NO: 1213 - protein, 9 aa, BK virus
TMTSGRKVH

SEQ ID NO: 1214 - protein, 9 aa, BK virus
MTSGRKVHD

SEQ ID NO: 1215 - protein, 9 aa, BK virus
TSGRKVHDR

SEQ ID NO: 1216 - protein, 9 aa, BK virus
SGRKVHDRH

SEQ ID NO: 1217 - protein, 9 aa, BK virus
GRKVHDRHV

SEQ ID NO: 1218 - protein, 9 aa, BK virus
RKVHDRHVL

SEQ ID NO: 1219 - protein, 9 aa, BK virus
KVHDRHVLR

SEQ ID NO: 1220 - protein, 9 aa, BK virus
VHDRHVLRA

SEQ ID NO: 1221 - protein, 9 aa, BK virus
ESWPCPQLN

SEQ ID NO: 1222 - protein, 9 aa, BK virus
SWPCPQLNW

SEQ ID NO: 1223 - protein, 9 aa, BK virus
WPCPQLNWT

SEQ ID NO: 1224 - protein, 9 aa, BK virus
PCPQLNWTK

SEQ ID NO: 1225 - protein, 9 aa, BK virus
CPQLNWTKA

SEQ ID NO: 1226 - protein, 9 aa, BK virus
PQLNWTKAM

SEQ ID NO: 1227 - protein, 9 aa, BK virus
QLNWTKAMV

SEQ ID NO: 1228 - protein, 9 aa, BK virus
LNWTKAMVL

SEQ ID NO: 1229 - protein, 9 aa, BK virus
NWTKAMVLR

SEQ ID NO: 1230 - protein, 9 aa, BK virus
WTKAMVLRQ

SEQ ID NO: 1231 - protein, 9 aa, BK virus
TKAMVLRQL

SEQ ID NO: 1232 - protein, 9 aa, BK virus
KAMVLRQLS

SEQ ID NO: 1233 - protein, 9 aa, BK virus
AMVLRQLSR

SEQ ID NO: 1234 - protein, 9 aa, BK virus
MVLRQLSRQ

SEQ ID NO: 1235 - protein, 9 aa, BK virus
VLRQLSRQA

SEQ ID NO: 1236 - protein, 9 aa, BK virus
LRQLSRQAS

SEQ ID NO: 1237 - protein, 9 aa, BK virus
RQLSRQASV

SEQ ID NO: 1238 - protein, 9 aa, BK virus
QLSRQASVK

SEQ ID NO: 1239 - protein, 9 aa, BK virus
LSRQASVKV

SEQ ID NO: 1240 - protein, 9 aa, BK virus
SRQASVKVG

SEQ ID NO: 1241 - protein, 9 aa, BK virus
RQASVKVGK

SEQ ID NO: 1242 - protein, 9 aa, BK virus
QASVKVGKT

SEQ ID NO: 1243 - protein, 9 aa, BK virus
ASVKVGKTW

SEQ ID NO: 1244 - protein, 9 aa, BK virus
SVKVGKTWT

SEQ ID NO: 1245 - protein, 9 aa, BK virus
VKVGKTWTG

SEQ ID NO: 1246 - protein, 9 aa, BK virus
KVGKTWTGT

SEQ ID NO: 1247 - protein, 9 aa, BK virus
VGKTWTGTK

SEQ ID NO: 1248 - protein, 9 aa, BK virus
GKTWTGTKK

SEQ ID NO: 1249 - protein, 9 aa, BK virus
KTWTGTKKR

SEQ ID NO: 1250 - protein, 9 aa, BK virus
TWTGTKKRA

SEQ ID NO: 1251 - protein, 9 aa, BK virus
WTGTKKRAQ

SEQ ID NO: 1252 - protein, 9 aa, BK virus
TGTKKRAQR

SEQ ID NO: 1253 - protein, 9 aa, BK virus
GTKKRAQRI

SEQ ID NO: 1254 - protein, 9 aa, BK virus
TKKRAQRIF

SEQ ID NO: 1255 - protein, 9 aa, BK virus
KKRAQRIFI

SEQ ID NO: 1256 - protein, 9 aa, BK virus
KRAQRIFIF

SEQ ID NO: 1257 - protein, 9 aa, BK virus
RAQRIFIFI

SEQ ID NO: 1258 - protein, 9 aa, BK virus
AQRIFIFIL

SEQ ID NO: 1259 - protein, 9 aa, BK virus
QRIFIFILE

SEQ ID NO: 1260 - protein, 9 aa, BK virus
RIFIFILEL

SEQ ID NO: 1261 - protein, 9 aa, BK virus
IFIFILELL

SEQ ID NO: 1262 - protein, 9 aa, BK virus
FIFILELLL

SEQ ID NO: 1263 - protein, 9 aa, BK virus
IFILELLLE

SEQ ID NO: 1264 - protein, 9 aa, BK virus
FILELLLEF

SEQ ID NO: 1265 - protein, 9 aa, BK virus
ILELLLEFC

SEQ ID NO: 1266 - protein, 9 aa, BK virus
LELLLEFCR

SEQ ID NO: 1267 - protein, 9 aa, BK virus
ELLLEFCRG

SEQ ID NO: 1268 - protein, 9 aa, BK virus
LLLEFCRGE

SEQ ID NO: 1269 - protein, 9 aa, BK virus
LLEFCRGED

SEQ ID NO: 1270 - protein, 9 aa, BK virus
LEFCRGEDS

SEQ ID NO: 1271 - protein, 9 aa, BK virus
EFCRGEDSV

SEQ ID NO: 1272 - protein, 9 aa, BK virus
FCRGEDSVD

SEQ ID NO: 1273 - protein, 9 aa, BK virus
CRGEDSVDG

SEQ ID NO: 1274 - protein, 9 aa, BK virus
RGEDSVDGK

SEQ ID NO: 1275 - protein, 9 aa, BK virus
GEDSVDGKN

SEQ ID NO: 1276 - protein, 9 aa, BK virus
EDSVDGKNK

SEQ ID NO: 1277 - protein, 9 aa, BK virus
DSVDGKNKS

SEQ ID NO: 1278 - protein, 9 aa, BK virus
SVDGKNKST

SEQ ID NO: 1279 - protein, 9 aa, BK virus
VDGKNKSTT

SEQ ID NO: 1280 - protein, 9 aa, BK virus
DGKNKSTTA

SEQ ID NO: 1281 - protein, 9 aa, BK virus
GKNKSTTAL

SEQ ID NO: 1282 - protein, 9 aa, BK virus
KNKSTTALP

SEQ ID NO: 1283 - protein, 9 aa, BK virus
NKSTTALPA

SEQ ID NO: 1284 - protein, 9 aa, BK virus
KSTTALPAV

SEQ ID NO: 1285 - protein, 9 aa, BK virus
STTALPAVK

SEQ ID NO: 1286 - protein, 9 aa, BK virus
TTALPAVKD

SEQ ID NO: 1287 - protein, 9 aa, BK virus
TALPAVKDS

SEQ ID NO: 1288 - protein, 9 aa, BK virus
ALPAVKDSV

SEQ ID NO: 1289 - protein, 9 aa, BK virus
LPAVKDSVK

SEQ ID NO: 1290 - protein, 9 aa, BK virus
PAVKDSVKD

SEQ ID NO: 1291 - protein, 9 aa, BK virus
AVKDSVKDS

SEQ ID NO: 1292 - protein, 9 aa, BK virus
VSNPFFFVF

SEQ ID NO: 1293 - protein, 9 aa, BK virus
SNPFFFVFP

SEQ ID NO: 1294 - protein, 9 aa, BK virus
NPFFFVFPG

SEQ ID NO: 1295 - protein, 9 aa, BK virus
PFFFVFPGS

SEQ ID NO: 1296 - protein, 9 aa, BK virus
FFFVFPGSW

SEQ ID NO: 1297 - protein, 9 aa, BK virus
FFVFPGSWV

SEQ ID NO: 1298 - protein, 9 aa, BK virus
FVFPGSWVL

SEQ ID NO: 1299 - protein, 9 aa, BK virus
VFPGSWVLL

SEQ ID NO: 1300 - protein, 9 aa, BK virus
LPVYLRLLL

SEQ ID NO: 1301 - protein, 9 aa, BK virus
PVYLRLLLP

SEQ ID NO: 1302 - protein, 9 aa, BK virus
VYLRLLLPQ

SEQ ID NO: 1303 - protein, 9 aa, BK virus
YLRLLLPQD

SEQ ID NO: 1304 - protein, 9 aa, BK virus
LRLLLPQDF

SEQ ID NO: 1305 - protein, 9 aa, BK virus
RLLLPQDFQ

SEQ ID NO: 1306 - protein, 9 aa, BK virus
LLLPQDFQW

SEQ ID NO: 1307 - protein, 9 aa, BK virus
LLPQDFQWL

SEQ ID NO: 1308 - protein, 9 aa, BK virus
LPQDFQWLK

SEQ ID NO: 1309 - protein, 9 aa, BK virus
PQDFQWLKL

SEQ ID NO: 1310 - protein, 9 aa, BK virus
QDFQWLKLL

SEQ ID NO: 1311 - protein, 9 aa, BK virus
DFQWLKLLL

SEQ ID NO: 1312 - protein, 9 aa, BK virus
FQWLKLLLG

SEQ ID NO: 1313 - protein, 9 aa, BK virus
QWLKLLLGR

SEQ ID NO: 1314 - protein, 9 aa, BK virus
WLKLLLGRL

SEQ ID NO: 1315 - protein, 9 aa, BK virus
LKLLLGRLL

SEQ ID NO: 1316 - protein, 9 aa, BK virus
KLLLGRLLL

SEQ ID NO: 1317 - protein, 9 aa, BK virus
LLLGRLLLL

SEQ ID NO: 1318 - protein, 9 aa, BK virus
KFKLHPLLL

SEQ ID NO: 1319 - protein, 9 aa, BK virus
LLVLLGLLL

SEQ ID NO: 1320 - protein, 9 aa, BK virus
LVLLGLLLG

SEQ ID NO: 1321 - protein, 9 aa, BK virus
VLLGLLLGL

SEQ ID NO: 1322 - protein, 9 aa, BK virus
LLGLLLGLL

SEQ ID NO: 1323 - protein, 9 aa, BK virus
LGLLLGLLL

SEQ ID NO: 1324 - protein, 9 aa, BK virus
FKLLVVLVP

SEQ ID NO: 1325 - protein, 9 aa, BK virus
GISSLMIGI

SEQ ID NO: 1326 - protein, 9 aa, BK virus
ISSLMIGIT

SEQ ID NO: 1327 - protein, 9 aa, BK virus
SSLMIGITK

SEQ ID NO: 1328 - protein, 9 aa, BK virus
SLMIGITKF

SEQ ID NO: 1329 - protein, 9 aa, BK virus
LMIGITKFP

SEQ ID NO: 1330 - protein, 9 aa, BK virus
MIGITKFPL

SEQ ID NO: 1331 - protein, 9 aa, BK virus
ASISNQAWL

SEQ ID NO: 1332 - protein, 9 aa, BK virus
SISNQAWLW

SEQ ID NO: 1333 - protein, 9 aa, BK virus
ISNQAWLWN

SEQ ID NO: 1334 - protein, 9 aa, BK virus
SNQAWLWNC

SEQ ID NO: 1335 - protein, 9 aa, BK virus
NQAWLWNCL

SEQ ID NO: 1336 - protein, 9 aa, BK virus
QAWLWNCLT

SEQ ID NO: 1337 - protein, 9 aa, BK virus
AWLWNCLTQ

SEQ ID NO: 1338 - protein, 9 aa, BK virus
WLWNCLTQM

SEQ ID NO: 1339 - protein, 9 aa, BK virus
LWNCLTQMS

SEQ ID NO: 1340 - protein, 9 aa, BK virus
WNCLTQMST

SEQ ID NO: 1341 - protein, 9 aa, BK virus
NCLTQMSTM

SEQ ID NO: 1342 - protein, 9 aa, BK virus
CLTQMSTMI

SEQ ID NO: 1343 - protein, 9 aa, BK virus
LTQMSTMIF

SEQ ID NO: 1344 - protein, 9 aa, BK virus
TQMSTMIFC

SEQ ID NO: 1345 - protein, 9 aa, BK virus
QMSTMIFCF

SEQ ID NO: 1346 - protein, 9 aa, BK virus
MSTMIFCFL

SEQ ID NO: 1347 - protein, 9 aa, BK virus
STMIFCFLV

SEQ ID NO: 1348 - protein, 9 aa, BK virus
ILLLIIFNT

SEQ ID NO: 1349 - protein, 9 aa, BK virus
LLLIIFNTL

SEQ ID NO: 1350 - protein, 9 aa, BK virus
LLIIFNTLI

SEQ ID NO: 1351 - protein, 9 aa, BK virus
LIIFNTLIL

SEQ ID NO: 1352 - protein, 9 aa, BK virus
IIFNTLILG

SEQ ID NO: 1353 - protein, 9 aa, BK virus
IFNTLILGI

SEQ ID NO: 1354 - protein, 9 aa, BK virus
FNTLILGIG

SEQ ID NO: 1355 - protein, 9 aa, BK virus
NTLILGIGV

SEQ ID NO: 1356 - protein, 9 aa, BK virus
TLILGIGVL

SEQ ID NO: 1357 - protein, 9 aa, BK virus
LILGIGVLL

SEQ ID NO: 1358 - protein, 9 aa, BK virus
ILGIGVLLC

SEQ ID NO: 1359 - protein, 9 aa, BK virus
LGIGVLLCL

SEQ ID NO: 1360 - protein, 9 aa, BK virus
GIGVLLCLL

SEQ ID NO: 1361 - protein, 9 aa, BK virus
IGVLLCLLL

SEQ ID NO: 1362 - protein, 9 aa, BK virus
GVLLCLLLF

SEQ ID NO: 1363 - protein, 9 aa, BK virus
VLLCLLLFP

SEQ ID NO: 1364 - protein, 9 aa, BK virus
LLCLLLFPR

SEQ ID NO: 1365 - protein, 9 aa, BK virus
LCLLLFPRL

SEQ ID NO: 1366 - protein, 9 aa, BK virus
CLLLFPRLC

SEQ ID NO: 1367 - protein, 9 aa, BK virus
LLLFPRLCG

SEQ ID NO: 1368 - protein, 9 aa, BK virus
LLFPRLCGM

SEQ ID NO: 1369 - protein, 9 aa, BK virus
LFPRLCGML

SEQ ID NO: 1370 - protein, 9 aa, BK virus
FPRLCGMLL

SEQ ID NO: 1371 - protein, 9 aa, BK virus
PRLCGMLLG

SEQ ID NO: 1372 - protein, 9 aa, BK virus
RLCGMLLGM

SEQ ID NO: 1373 - protein, 9 aa, BK virus
LCGMLLGMI

SEQ ID NO: 1374 - protein, 9 aa, BK virus
CGMLLGMIY

SEQ ID NO: 1375 - protein, 9 aa, BK virus
GMLLGMIYL

SEQ ID NO: 1376 - protein, 9 aa, BK virus
MLLGMIYLL

SEQ ID NO: 1377 - protein, 9 aa, BK virus
PHRNCREEQ

SEQ ID NO: 1378 - protein, 9 aa, BK virus
HRNCREEQK

SEQ ID NO: 1379 - protein, 9 aa, BK virus
RNCREEQKD

SEQ ID NO: 1380 - protein, 9 aa, BK virus
NCREEQKDF

SEQ ID NO: 1381 - protein, 9 aa, BK virus
CREEQKDFL

SEQ ID NO: 1382 - protein, 9 aa, BK virus
REEQKDFLE

SEQ ID NO: 1383 - protein, 9 aa, BK virus
EEQKDFLET

SEQ ID NO: 1384 - protein, 9 aa, BK virus
EQKDFLETP

SEQ ID NO: 1385 - protein, 9 aa, BK virus
QKDFLETPW

SEQ ID NO: 1386 - protein, 9 aa, BK virus
KDFLETPWL

SEQ ID NO: 1387 - protein, 9 aa, BK virus
DFLETPWLD

SEQ ID NO: 1388 - protein, 9 aa, BK virus
FLETPWLDF

SEQ ID NO: 1389 - protein, 9 aa, BK virus
LETPWLDFW

SEQ ID NO: 1390 - protein, 9 aa, BK virus
ETPWLDFWR

SEQ ID NO: 1391 - protein, 9 aa, BK virus
TPWLDFWRK

SEQ ID NO: 1392 - protein, 9 aa, BK virus
PWLDFWRKL

SEQ ID NO: 1393 - protein, 9 aa, BK virus
WLDFWRKLP

SEQ ID NO: 1394 - protein, 9 aa, BK virus
LDFWRKLPG

SEQ ID NO: 1395 - protein, 9 aa, BK virus
DFWRKLPGQ

SEQ ID NO: 1396 - protein, 9 aa, BK virus
FWRKLPGQL

SEQ ID NO: 1397 - protein, 9 aa, BK virus
TFIIIFNNI

SEQ ID NO: 1398 - protein, 9 aa, BK virus
FIIIFNNII

SEQ ID NO: 1399 - protein, 9 aa, BK virus
IIIFNNIIL

SEQ ID NO: 1400 - protein, 9 aa, BK virus
IIFNNIILI

SEQ ID NO: 1401 - protein, 9 aa, BK virus
IFNNIILIF

SEQ ID NO: 1402 - protein, 9 aa, BK virus
FNNIILIFP

SEQ ID NO: 1403 - protein, 9 aa, BK virus
NNIILIFPL

SEQ ID NO: 1404 - protein, 9 aa, BK virus
NIILIFPLL

SEQ ID NO: 1405 - protein, 9 aa, BK virus
IILIFPLLG

SEQ ID NO: 1406 - protein, 9 aa, BK virus
ILIFPLLGP

SEQ ID NO: 1407 - protein, 9 aa, BK virus
LIFPLLGPQ

SEQ ID NO: 1408 - protein, 9 aa, BK virus
IFPLLGPQW

SEQ ID NO: 1409 - protein, 9 aa, BK virus
FPLLGPQWL

SEQ ID NO: 1410 - protein, 9 aa, BK virus
PLLGPQWLD

SEQ ID NO: 1411 - protein, 9 aa, BK virus
LLGPQWLDK

SEQ ID NO: 1412 - protein, 9 aa, BK virus
LKGKVPVYI

SEQ ID NO: 1413 - protein, 9 aa, BK virus
KGKVPVYIL

SEQ ID NO: 1414 - protein, 9 aa, BK virus
GKVPVYILA

SEQ ID NO: 1415 - protein, 9 aa, BK virus
KVPVYILAI

SEQ ID NO: 1416 - protein, 9 aa, BK virus
VPVYILAIL

SEQ ID NO: 1417 - protein, 9 aa, BK virus
PVYILAILI

SEQ ID NO: 1418 - protein, 9 aa, BK virus
VYILAILIV

SEQ ID NO: 1419 - protein, 9 aa, BK virus
EINKVYIQE

SEQ ID NO: 1420 - protein, 9 aa, BK virus
INKVYIQES

SEQ ID NO: 1421 - protein, 9 aa, BK virus
NKVYIQESL

SEQ ID NO: 1422 - protein, 9 aa, BK virus
KKLLPQEVL

SEQ ID NO: 1423 - protein, 9 aa, BK virus
KLLPQEVLI

SEQ ID NO: 1424 - protein, 9 aa, BK virus
LLPQEVLIK

SEQ ID NO: 1425 - protein, 9 aa, BK virus
LPQEVLIKE

SEQ ID NO: 1426 - protein, 9 aa, BK virus
PQEVLIKEL

SEQ ID NO: 1427 - protein, 9 aa, BK virus
QEVLIKELL

SEQ ID NO: 1428 - protein, 9 aa, BK virus
EVLIKELLL

SEQ ID NO: 1429 - protein, 9 aa, BK virus
VLIKELLLN

SEQ ID NO: 1430 - protein, 9 aa, BK virus
LIKELLLNG

SEQ ID NO: 1431 - protein, 9 aa, BK virus
IKELLLNGC

SEQ ID NO: 1432 - protein, 9 aa, BK virus
KELLLNGCC

SEQ ID NO: 1433 - protein, 9 aa, BK virus
ELLLNGCCL

SEQ ID NO: 1434 - protein, 9 aa, BK virus
LLLNGCCLY

SEQ ID NO: 1435 - protein, 9 aa, BK virus
LLNGCCLYF

SEQ ID NO: 1436 - protein, 9 aa, BK virus
HLLLKHMKM

SEQ ID NO: 1437 - protein, 9 aa, BK virus
LLLKHMKMA

SEQ ID NO: 1438 - protein, 9 aa, BK virus
LLKHMKMAP

SEQ ID NO: 1439 - protein, 9 aa, BK virus
LKHMKMAPT

SEQ ID NO: 1440 - protein, 9 aa, BK virus
KHMKMAPTK

SEQ ID NO: 1441 - protein, 9 aa, BK virus
HMKMAPTKR

SEQ ID NO: 1442 - protein, 9 aa, BK virus
MKMAPTKRK

SEQ ID NO: 1443 - protein, 9 aa, BK virus
KMAPTKRKG

SEQ ID NO: 1444 - protein, 9 aa, BK virus
MAPTKRKGE

SEQ ID NO: 1445 - protein, 9 aa, BK virus
APTKRKGEC

SEQ ID NO: 1446 - protein, 9 aa, BK virus
PTKRKGECP

SEQ ID NO: 1447 - protein, 9 aa, BK virus
TKRKGECPG

SEQ ID NO: 1448 - protein, 9 aa, BK virus
KRKGECPGA

SEQ ID NO: 1449 - protein, 9 aa, BK virus
RKGECPGAA

SEQ ID NO: 1450 - protein, 9 aa, BK virus
KGECPGAAP

SEQ ID NO: 1451 - protein, 9 aa, BK virus
GECPGAAPK

SEQ ID NO: 1452 - protein, 9 aa, BK virus
ECPGAAPKK

SEQ ID NO: 1453 - protein, 9 aa, BK virus
CPGAAPKKP

SEQ ID NO: 1454 - protein, 9 aa, BK virus
PGAAPKKPK

SEQ ID NO: 1455 - protein, 9 aa, BK virus
GAAPKKPKE

SEQ ID NO: 1456 - protein, 9 aa, BK virus
AAPKKPKEP

SEQ ID NO: 1457 - protein, 9 aa, BK virus
APKKPKEPV

SEQ ID NO: 1458 - protein, 9 aa, BK virus
PKKPKEPVQ

SEQ ID NO: 1459 - protein, 9 aa, BK virus
KKPKEPVQV

SEQ ID NO: 1460 - protein, 9 aa, BK virus
KPKEPVQVP

SEQ ID NO: 1461 - protein, 9 aa, BK virus
PKEPVQVPK

SEQ ID NO: 1462 - protein, 9 aa, BK virus
KEPVQVPKL

SEQ ID NO: 1463 - protein, 9 aa, BK virus
EPVQVPKLL

SEQ ID NO: 1464 - protein, 9 aa, BK virus
PVQVPKLLI

SEQ ID NO: 1465 - protein, 9 aa, BK virus
VQVPKLLIK

SEQ ID NO: 1466 - protein, 9 aa, BK virus
QVPKLLIKG

SEQ ID NO: 1467 - protein, 9 aa, BK virus
VPKLLIKGG

SEQ ID NO: 1468 - protein, 9 aa, BK virus
PKLLIKGGV

SEQ ID NO: 1469 - protein, 9 aa, BK virus
KLLIKGGVE

SEQ ID NO: 1470 - protein, 9 aa, BK virus
LLIKGGVEV

SEQ ID NO: 1471 - protein, 9 aa, BK virus
LIKGGVEVL

SEQ ID NO: 1472 - protein, 9 aa, BK virus
IKGGVEVLE

SEQ ID NO: 1473 - protein, 9 aa, BK virus
KGGVEVLEV

SEQ ID NO: 1474 - protein, 9 aa, BK virus
GGVEVLEVK

SEQ ID NO: 1475 - protein, 9 aa, BK virus
GVEVLEVKT

SEQ ID NO: 1476 - protein, 9 aa, BK virus
VEVLEVKTG

SEQ ID NO: 1477 - protein, 9 aa, BK virus
EVLEVKTGV

SEQ ID NO: 1478 - protein, 9 aa, BK virus
VLEVKTGVD

SEQ ID NO: 1479 - protein, 9 aa, BK virus
LEVKTGVDA

SEQ ID NO: 1480 - protein, 9 aa, BK virus
EVKTGVDAI

SEQ ID NO: 1481 - protein, 9 aa, BK virus
VKTGVDAIT

SEQ ID NO: 1482 - protein, 9 aa, BK virus
KTGVDAITE

SEQ ID NO: 1483 - protein, 9 aa, BK virus
TGVDAITEV

SEQ ID NO: 1484 - protein, 9 aa, BK virus
GVDAITEVE

SEQ ID NO: 1485 - protein, 9 aa, BK virus
VDAITEVEC

SEQ ID NO: 1486 - protein, 9 aa, BK virus
DAITEVECF

SEQ ID NO: 1487 - protein, 9 aa, BK virus
AITEVECFL

SEQ ID NO: 1488 - protein, 9 aa, BK virus
ITEVECFLN

SEQ ID NO: 1489 - protein, 9 aa, BK virus
TEVECFLNP

SEQ ID NO: 1490 - protein, 9 aa, BK virus
EVECFLNPE

SEQ ID NO: 1491 - protein, 9 aa, BK virus
VECFLNPEM

SEQ ID NO: 1492 - protein, 9 aa, BK virus
ECFLNPEMG

SEQ ID NO: 1493 - protein, 9 aa, BK virus
CFLNPEMGD

SEQ ID NO: 1494 - protein, 9 aa, BK virus
FLNPEMGDP

SEQ ID NO: 1495 - protein, 9 aa, BK virus
LNPEMGDPD

SEQ ID NO: 1496 - protein, 9 aa, BK virus
NPEMGDPDE

SEQ ID NO: 1497 - protein, 9 aa, BK virus
PEMGDPDEN

SEQ ID NO: 1498 - protein, 9 aa, BK virus
EMGDPDENL

SEQ ID NO: 1499 - protein, 9 aa, BK virus
MGDPDENLR

SEQ ID NO: 1500 - protein, 9 aa, BK virus
GDPDENLRG

SEQ ID NO: 1501 - protein, 9 aa, BK virus
DPDENLRGF

SEQ ID NO: 1502 - protein, 9 aa, BK virus
PDENLRGFS

SEQ ID NO: 1503 - protein, 9 aa, BK virus
DENLRGFSL

SEQ ID NO: 1504 - protein, 9 aa, BK virus
ENLRGFSLK

SEQ ID NO: 1505 - protein, 9 aa, BK virus
NLRGFSLKL

SEQ ID NO: 1506 - protein, 9 aa, BK virus
LRGFSLKLS

SEQ ID NO: 1507 - protein, 9 aa, BK virus
RGFSLKLSA

SEQ ID NO: 1508 - protein, 9 aa, BK virus
GFSLKLSAE

SEQ ID NO: 1509 - protein, 9 aa, BK virus
FSLKLSAEN

SEQ ID NO: 1510 - protein, 9 aa, BK virus
SLKLSAEND

SEQ ID NO: 1511 - protein, 9 aa, BK virus
LKLSAENDF

SEQ ID NO: 1512 - protein, 9 aa, BK virus
KLSAENDFS

SEQ ID NO: 1513 - protein, 9 aa, BK virus
LSAENDFSS

SEQ ID NO: 1514 - protein, 9 aa, BK virus
SAENDFSSD

SEQ ID NO: 1515 - protein, 9 aa, BK virus
AENDFSSDS

SEQ ID NO: 1516 - protein, 9 aa, BK virus
ENDFSSDSP

SEQ ID NO: 1517 - protein, 9 aa, BK virus
NDFSSDSPE

SEQ ID NO: 1518 - protein, 9 aa, BK virus
DFSSDSPER

SEQ ID NO: 1519 - protein, 9 aa, BK virus
FSSDSPERK

SEQ ID NO: 1520 - protein, 9 aa, BK virus
SSDSPERKM

SEQ ID NO: 1521 - protein, 9 aa, BK virus
SDSPERKML

SEQ ID NO: 1522 - protein, 9 aa, BK virus
DSPERKMLP

SEQ ID NO: 1523 - protein, 9 aa, BK virus
SPERKMLPC

SEQ ID NO: 1524 - protein, 9 aa, BK virus
PERKMLPCY

SEQ ID NO: 1525 - protein, 9 aa, BK virus
ERKMLPCYS

SEQ ID NO: 1526 - protein, 9 aa, BK virus
RKMLPCYST

SEQ ID NO: 1527 - protein, 9 aa, BK virus
KMLPCYSTA

SEQ ID NO: 1528 - protein, 9 aa, BK virus
MLPCYSTAR

SEQ ID NO: 1529 - protein, 9 aa, BK virus
LPCYSTARI

SEQ ID NO: 1530 - protein, 9 aa, BK virus
PCYSTARIP

SEQ ID NO: 1531 - protein, 9 aa, BK virus
CYSTARIPL

SEQ ID NO: 1532 - protein, 9 aa, BK virus
YSTARIPLP

SEQ ID NO: 1533 - protein, 9 aa, BK virus
STARIPLPN

SEQ ID NO: 1534 - protein, 9 aa, BK virus
TARIPLPNL

SEQ ID NO: 1535 - protein, 9 aa, BK virus
ARIPLPNLN

SEQ ID NO: 1536 - protein, 9 aa, BK virus
RIPLPNLNE

SEQ ID NO: 1537 - protein, 9 aa, BK virus
IPLPNLNED

SEQ ID NO: 1538 - protein, 9 aa, BK virus
PLPNLNEDL

SEQ ID NO: 1539 - protein, 9 aa, BK virus
LPNLNEDLT

SEQ ID NO: 1540 - protein, 9 aa, BK virus
PNLNEDLTC

SEQ ID NO: 1541 - protein, 9 aa, BK virus
NLNEDLTCG

SEQ ID NO: 1542 - protein, 9 aa, BK virus
LNEDLTCGN

SEQ ID NO: 1543 - protein, 9 aa, BK virus
NEDLTCGNL

SEQ ID NO: 1544 - protein, 9 aa, BK virus
EDLTCGNLL

SEQ ID NO: 1545 - protein, 9 aa, BK virus
DLTCGNLLM

SEQ ID NO: 1546 - protein, 9 aa, BK virus
LTCGNLLMW

SEQ ID NO: 1547 - protein, 9 aa, BK virus
TCGNLLMWE

SEQ ID NO: 1548 - protein, 9 aa, BK virus
CGNLLMWEA

SEQ ID NO: 1549 - protein, 9 aa, BK virus
GNLLMWEAV

SEQ ID NO: 1550 - protein, 9 aa, BK virus
NLLMWEAVT

SEQ ID NO: 1551 - protein, 9 aa, BK virus
LLMWEAVTV

SEQ ID NO: 1552 - protein, 9 aa, BK virus
LMWEAVTVQ

SEQ ID NO: 1553 - protein, 9 aa, BK virus
MWEAVTVQT

SEQ ID NO: 1554 - protein, 9 aa, BK virus
WEAVTVQTE

SEQ ID NO: 1555 - protein, 9 aa, BK virus
EAVTVQTEV

SEQ ID NO: 1556 - protein, 9 aa, BK virus
AVTVQTEVI

SEQ ID NO: 1557 - protein, 9 aa, BK virus
VTVQTEVIG

SEQ ID NO: 1558 - protein, 9 aa, BK virus
TVQTEVIGI

SEQ ID NO: 1559 - protein, 9 aa, BK virus
VQTEVIGIT

SEQ ID NO: 1560 - protein, 9 aa, BK virus
QTEVIGITS

SEQ ID NO: 1561 - protein, 9 aa, BK virus
TEVIGITSM

SEQ ID NO: 1562 - protein, 9 aa, BK virus
EVIGITSML

SEQ ID NO: 1563 - protein, 9 aa, BK virus
VIGITSMLN

SEQ ID NO: 1564 - protein, 9 aa, BK virus
IGITSMLNL

SEQ ID NO: 1565 - protein, 9 aa, BK virus
GITSMLNLH

SEQ ID NO: 1566 - protein, 9 aa, BK virus
ITSMLNLHA

SEQ ID NO: 1567 - protein, 9 aa, BK virus
TSMLNLHAG

SEQ ID NO: 1568 - protein, 9 aa, BK virus
SMLNLHAGS

SEQ ID NO: 1569 - protein, 9 aa, BK virus
MLNLHAGSQ

SEQ ID NO: 1570 - protein, 9 aa, BK virus
LNLHAGSQK

SEQ ID NO: 1571 - protein, 9 aa, BK virus
NLHAGSQKV

SEQ ID NO: 1572 - protein, 9 aa, BK virus
LHAGSQKVH

SEQ ID NO: 1573 - protein, 9 aa, BK virus
HAGSQKVHE

SEQ ID NO: 1574 - protein, 9 aa, BK virus
AGSQKVHEH

SEQ ID NO: 1575 - protein, 9 aa, BK virus
GSQKVHEHG

SEQ ID NO: 1576 - protein, 9 aa, BK virus
SQKVHEHGG

SEQ ID NO: 1577 - protein, 9 aa, BK virus
QKVHEHGGG

SEQ ID NO: 1578 - protein, 9 aa, BK virus
KVHEHGGGK

SEQ ID NO: 1579 - protein, 9 aa, BK virus
VHEHGGGKP

SEQ ID NO: 1580 - protein, 9 aa, BK virus
HEHGGGKPI

SEQ ID NO: 1581 - protein, 9 aa, BK virus
EHGGGKPIQ

SEQ ID NO: 1582 - protein, 9 aa, BK virus
HGGGKPIQG

SEQ ID NO: 1583 - protein, 9 aa, BK virus
GGGKPIQGS

SEQ ID NO: 1584 - protein, 9 aa, BK virus
GGKPIQGSN

SEQ ID NO: 1585 - protein, 9 aa, BK virus
GKPIQGSNF

SEQ ID NO: 1586 - protein, 9 aa, BK virus
KPIQGSNFH

SEQ ID NO: 1587 - protein, 9 aa, BK virus
PIQGSNFHF

SEQ ID NO: 1588 - protein, 9 aa, BK virus
IQGSNFHFF

SEQ ID NO: 1589 - protein, 9 aa, BK virus
QGSNFHFFA

SEQ ID NO: 1590 - protein, 9 aa, BK virus
GSNFHFFAV

SEQ ID NO: 1591 - protein, 9 aa, BK virus
SNFHFFAVG

SEQ ID NO: 1592 - protein, 9 aa, BK virus
NFHFFAVGG

SEQ ID NO: 1593 - protein, 9 aa, BK virus
FHFFAVGGE

SEQ ID NO: 1594 - protein, 9 aa, BK virus
HFFAVGGEP

SEQ ID NO: 1595 - protein, 9 aa, BK virus
FFAVGGEPL

SEQ ID NO: 1596 - protein, 9 aa, BK virus
FAVGGEPLE

SEQ ID NO: 1597 - protein, 9 aa, BK virus
AVGGEPLEM

SEQ ID NO: 1598 - protein, 9 aa, BK virus
VGGEPLEMQ

SEQ ID NO: 1599 - protein, 9 aa, BK virus
GGEPLEMQG

SEQ ID NO: 1600 - protein, 9 aa, BK virus
GEPLEMQGV

SEQ ID NO: 1601 - protein, 9 aa, BK virus
EPLEMQGVL

SEQ ID NO: 1602 - protein, 9 aa, BK virus
PLEMQGVLM

SEQ ID NO: 1603 - protein, 9 aa, BK virus
LEMQGVLMN

SEQ ID NO: 1604 - protein, 9 aa, BK virus
EMQGVLMNY

SEQ ID NO: 1605 - protein, 9 aa, BK virus
MQGVLMNYR

SEQ ID NO: 1606 - protein, 9 aa, BK virus
QGVLMNYRS

SEQ ID NO: 1607 - protein, 9 aa, BK virus
GVLMNYRSK

SEQ ID NO: 1608 - protein, 9 aa, BK virus
VLMNYRSKY

SEQ ID NO: 1609 - protein, 9 aa, BK virus
LMNYRSKYP

SEQ ID NO: 1610 - protein, 9 aa, BK virus
MNYRSKYPD

SEQ ID NO: 1611 - protein, 9 aa, BK virus
NYRSKYPDG

SEQ ID NO: 1612 - protein, 9 aa, BK virus
YRSKYPDGT

SEQ ID NO: 1613 - protein, 9 aa, BK virus
RSKYPDGTI

SEQ ID NO: 1614 - protein, 9 aa, BK virus
SKYPDGTIT

SEQ ID NO: 1615 - protein, 9 aa, BK virus
KYPDGTITP

SEQ ID NO: 1616 - protein, 9 aa, BK virus
YPDGTITPK

SEQ ID NO: 1617 - protein, 9 aa, BK virus
PDGTITPKN

SEQ ID NO: 1618 - protein, 9 aa, BK virus
DGTITPKNP

SEQ ID NO: 1619 - protein, 9 aa, BK virus
GTITPKNPT

SEQ ID NO: 1620 - protein, 9 aa, BK virus
TITPKNPTA

SEQ ID NO: 1621 - protein, 9 aa, BK virus
ITPKNPTAQ

SEQ ID NO: 1622 - protein, 9 aa, BK virus
TPKNPTAQS

SEQ ID NO: 1623 - protein, 9 aa, BK virus
PKNPTAQSQ

SEQ ID NO: 1624 - protein, 9 aa, BK virus
KNPTAQSQV

SEQ ID NO: 1625 - protein, 9 aa, BK virus
NPTAQSQVM

SEQ ID NO: 1626 - protein, 9 aa, BK virus
PTAQSQVMN

SEQ ID NO: 1627 - protein, 9 aa, BK virus
TAQSQVMNT

SEQ ID NO: 1628 - protein, 9 aa, BK virus
AQSQVMNTD

SEQ ID NO: 1629 - protein, 9 aa, BK virus
QSQVMNTDH

SEQ ID NO: 1630 - protein, 9 aa, BK virus
SQVMNTDHK

SEQ ID NO: 1631 - protein, 9 aa, BK virus
QVMNTDHKA

SEQ ID NO: 1632 - protein, 9 aa, BK virus
VMNTDHKAY

SEQ ID NO: 1633 - protein, 9 aa, BK virus
MNTDHKAYL

SEQ ID NO: 1634 - protein, 9 aa, BK virus
NTDHKAYLD

SEQ ID NO: 1635 - protein, 9 aa, BK virus
TDHKAYLDK

SEQ ID NO: 1636 - protein, 9 aa, BK virus
DHKAYLDKN

SEQ ID NO: 1637 - protein, 9 aa, BK virus
HKAYLDKNN

SEQ ID NO: 1638 - protein, 9 aa, BK virus
KAYLDKNNA

SEQ ID NO: 1639 - protein, 9 aa, BK virus
AYLDKNNAY

SEQ ID NO: 1640 - protein, 9 aa, BK virus
YLDKNNAYP

SEQ ID NO: 1641 - protein, 9 aa, BK virus
LDKNNAYPV

SEQ ID NO: 1642 - protein, 9 aa, BK virus
DKNNAYPVE

SEQ ID NO: 1643 - protein, 9 aa, BK virus
KNNAYPVEC

SEQ ID NO: 1644 - protein, 9 aa, BK virus
NNAYPVECW

SEQ ID NO: 1645 - protein, 9 aa, BK virus
NAYPVECWV

SEQ ID NO: 1646 - protein, 9 aa, BK virus
AYPVECWVP

SEQ ID NO: 1647 - protein, 9 aa, BK virus
YPVECWVPD

SEQ ID NO: 1648 - protein, 9 aa, BK virus
PVECWVPDP

SEQ ID NO: 1649 - protein, 9 aa, BK virus
VECWVPDPS

SEQ ID NO: 1650 - protein, 9 aa, BK virus
ECWVPDPSR

SEQ ID NO: 1651 - protein, 9 aa, BK virus
CWVPDPSRN

SEQ ID NO: 1652 - protein, 9 aa, BK virus
WVPDPSRNE

SEQ ID NO: 1653 - protein, 9 aa, BK virus
VPDPSRNEN

SEQ ID NO: 1654 - protein, 9 aa, BK virus
PDPSRNENA

SEQ ID NO: 1655 - protein, 9 aa, BK virus
DPSRNENAR

SEQ ID NO: 1656 - protein, 9 aa, BK virus
PSRNENARY

SEQ ID NO: 1657 - protein, 9 aa, BK virus
SRNENARYF

SEQ ID NO: 1658 - protein, 9 aa, BK virus
RNENARYFG

SEQ ID NO: 1659 - protein, 9 aa, BK virus
NENARYFGT

SEQ ID NO: 1660 - protein, 9 aa, BK virus
ENARYFGTF

SEQ ID NO: 1661 - protein, 9 aa, BK virus
NARYFGTFT

SEQ ID NO: 1662 - protein, 9 aa, BK virus
ARYFGTFTG

SEQ ID NO: 1663 - protein, 9 aa, BK virus
RYFGTFTGG

SEQ ID NO: 1664 - protein, 9 aa, BK virus
YFGTFTGGE

SEQ ID NO: 1665 - protein, 9 aa, BK virus
FGTFTGGEN

SEQ ID NO: 1666 - protein, 9 aa, BK virus
GTFTGGENV

SEQ ID NO: 1667 - protein, 9 aa, BK virus
TFTGGENVP

SEQ ID NO: 1668 - protein, 9 aa, BK virus
FTGGENVPP

SEQ ID NO: 1669 - protein, 9 aa, BK virus
TGGENVPPV

SEQ ID NO: 1670 - protein, 9 aa, BK virus
GGENVPPVL

SEQ ID NO: 1671 - protein, 9 aa, BK virus
GENVPPVLH

SEQ ID NO: 1672 - protein, 9 aa, BK virus
ENVPPVLHV

SEQ ID NO: 1673 - protein, 9 aa, BK virus
NVPPVLHVT

SEQ ID NO: 1674 - protein, 9 aa, BK virus
VPPVLHVTN

SEQ ID NO: 1675 - protein, 9 aa, BK virus
PPVLHVTNT

SEQ ID NO: 1676 - protein, 9 aa, BK virus
PVLHVTNTA

SEQ ID NO: 1677 - protein, 9 aa, BK virus
VLHVTNTAT

SEQ ID NO: 1678 - protein, 9 aa, BK virus
LHVTNTATT

SEQ ID NO: 1679 - protein, 9 aa, BK virus
HVTNTATTV

SEQ ID NO: 1680 - protein, 9 aa, BK virus
VTNTATTVL

SEQ ID NO: 1681 - protein, 9 aa, BK virus
TNTATTVLL

SEQ ID NO: 1682 - protein, 9 aa, BK virus
NTATTVLLD

SEQ ID NO: 1683 - protein, 9 aa, BK virus
TATTVLLDE

SEQ ID NO: 1684 - protein, 9 aa, BK virus
ATTVLLDEQ

SEQ ID NO: 1685 - protein, 9 aa, BK virus
TTVLLDEQG

SEQ ID NO: 1686 - protein, 9 aa, BK virus
TVLLDEQGV

SEQ ID NO: 1687 - protein, 9 aa, BK virus
VLLDEQGVG

SEQ ID NO: 1688 - protein, 9 aa, BK virus
LLDEQGVGP

SEQ ID NO: 1689 - protein, 9 aa, BK virus
LDEQGVGPL

SEQ ID NO: 1690 - protein, 9 aa, BK virus
DEQGVGPLC

SEQ ID NO: 1691 - protein, 9 aa, BK virus
EQGVGPLCK

SEQ ID NO: 1692 - protein, 9 aa, BK virus
QGVGPLCKA

SEQ ID NO: 1693 - protein, 9 aa, BK virus
GVGPLCKAD

SEQ ID NO: 1694 - protein, 9 aa, BK virus
VGPLCKADS

SEQ ID NO: 1695 - protein, 9 aa, BK virus
GPLCKADSL

SEQ ID NO: 1696 - protein, 9 aa, BK virus
PLCKADSLY

SEQ ID NO: 1697 - protein, 9 aa, BK virus
LCKADSLYV

SEQ ID NO: 1698 - protein, 9 aa, BK virus
CKADSLYVS

SEQ ID NO: 1699 - protein, 9 aa, BK virus
KADSLYVSA

SEQ ID NO: 1700 - protein, 9 aa, BK virus
ADSLYVSAA

SEQ ID NO: 1701 - protein, 9 aa, BK virus
DSLYVSAAD

SEQ ID NO: 1702 - protein, 9 aa, BK virus
SLYVSAADI

SEQ ID NO: 1703 - protein, 9 aa, BK virus
LYVSAADIC

SEQ ID NO: 1704 - protein, 9 aa, BK virus
YVSAADICG

SEQ ID NO: 1705 - protein, 9 aa, BK virus
VSAADICGL

SEQ ID NO: 1706 - protein, 9 aa, BK virus
SAADICGLF

SEQ ID NO: 1707 - protein, 9 aa, BK virus
AADICGLFT

SEQ ID NO: 1708 - protein, 9 aa, BK virus
ADICGLFTN

SEQ ID NO: 1709 - protein, 9 aa, BK virus
DICGLFTNS

SEQ ID NO: 1710 - protein, 9 aa, BK virus
ICGLFTNSS

SEQ ID NO: 1711 - protein, 9 aa, BK virus
CGLFTNSSG

SEQ ID NO: 1712 - protein, 9 aa, BK virus
GLFTNSSGT

SEQ ID NO: 1713 - protein, 9 aa, BK virus
LFTNSSGTQ

SEQ ID NO: 1714 - protein, 9 aa, BK virus
FTNSSGTQQ

SEQ ID NO: 1715 - protein, 9 aa, BK virus
TNSSGTQQW

SEQ ID NO: 1716 - protein, 9 aa, BK virus
NSSGTQQWR

SEQ ID NO: 1717 - protein, 9 aa, BK virus
SSGTQQWRG

SEQ ID NO: 1718 - protein, 9 aa, BK virus
SGTQQWRGL

SEQ ID NO: 1719 - protein, 9 aa, BK virus
GTQQWRGLA

SEQ ID NO: 1720 - protein, 9 aa, BK virus
TQQWRGLAR

SEQ ID NO: 1721 - protein, 9 aa, BK virus
QQWRGLARY

SEQ ID NO: 1722 - protein, 9 aa, BK virus
QWRGLARYF

SEQ ID NO: 1723 - protein, 9 aa, BK virus
WRGLARYFK

SEQ ID NO: 1724 - protein, 9 aa, BK virus
RGLARYFKI

SEQ ID NO: 1725 - protein, 9 aa, BK virus
GLARYFKIR

SEQ ID NO: 1726 - protein, 9 aa, BK virus
LARYFKIRL

SEQ ID NO: 1727 - protein, 9 aa, BK virus
ARYFKIRLR

SEQ ID NO: 1728 - protein, 9 aa, BK virus
RYFKIRLRK

SEQ ID NO: 1729 - protein, 9 aa, BK virus
YFKIRLRKR

SEQ ID NO: 1730 - protein, 9 aa, BK virus
FKIRLRKRS

SEQ ID NO: 1731 - protein, 9 aa, BK virus
KIRLRKRSV

SEQ ID NO: 1732 - protein, 9 aa, BK virus
IRLRKRSVK

SEQ ID NO: 1733 - protein, 9 aa, BK virus
RLRKRSVKN

SEQ ID NO: 1734 - protein, 9 aa, BK virus
LRKRSVKNP

SEQ ID NO: 1735 - protein, 9 aa, BK virus
RKRSVKNPY

SEQ ID NO: 1736 - protein, 9 aa, BK virus
KRSVKNPYP

SEQ ID NO: 1737 - protein, 9 aa, BK virus
RSVKNPYPI

SEQ ID NO: 1738 - protein, 9 aa, BK virus
SVKNPYPIS

SEQ ID NO: 1739 - protein, 9 aa, BK virus
VKNPYPISF

SEQ ID NO: 1740 - protein, 9 aa, BK virus
KNPYPISFL

SEQ ID NO: 1741 - protein, 9 aa, BK virus
NPYPISFLL

SEQ ID NO: 1742 - protein, 9 aa, BK virus
PYPISFLLS

SEQ ID NO: 1743 - protein, 9 aa, BK virus
YPISFLLSD

SEQ ID NO: 1744 - protein, 9 aa, BK virus
PISFLLSDL

SEQ ID NO: 1745 - protein, 9 aa, BK virus
ISFLLSDLI

SEQ ID NO: 1746 - protein, 9 aa, BK virus
SFLLSDLIN

SEQ ID NO: 1747 - protein, 9 aa, BK virus
FLLSDLINR

SEQ ID NO: 1748 - protein, 9 aa, BK virus
LLSDLINRR

SEQ ID NO: 1749 - protein, 9 aa, BK virus
LSDLINRRT

SEQ ID NO: 1750 - protein, 9 aa, BK virus
SDLINRRTQ

SEQ ID NO: 1751 - protein, 9 aa, BK virus
DLINRRTQR

SEQ ID NO: 1752 - protein, 9 aa, BK virus
LINRRTQRV

SEQ ID NO: 1753 - protein, 9 aa, BK virus
INRRTQRVD

SEQ ID NO: 1754 - protein, 9 aa, BK virus
NRRTQRVDG

SEQ ID NO: 1755 - protein, 9 aa, BK virus
RRTQRVDGQ

SEQ ID NO: 1756 - protein, 9 aa, BK virus
RTQRVDGQP

SEQ ID NO: 1757 - protein, 9 aa, BK virus
TQRVDGQPM

SEQ ID NO: 1758 - protein, 9 aa, BK virus
QRVDGQPMY

SEQ ID NO: 1759 - protein, 9 aa, BK virus
RVDGQPMYG

SEQ ID NO: 1760 - protein, 9 aa, BK virus
VDGQPMYGM

SEQ ID NO: 1761 - protein, 9 aa, BK virus
DGQPMYGME

SEQ ID NO: 1762 - protein, 9 aa, BK virus
GQPMYGMES

SEQ ID NO: 1763 - protein, 9 aa, BK virus
QPMYGMESQ

SEQ ID NO: 1764 - protein, 9 aa, BK virus
PMYGMESQV

SEQ ID NO: 1765 - protein, 9 aa, BK virus
MYGMESQVE

SEQ ID NO: 1766 - protein, 9 aa, BK virus
YGMESQVEE

SEQ ID NO: 1767 - protein, 9 aa, BK virus
GMESQVEEV

SEQ ID NO: 1768 - protein, 9 aa, BK virus
MESQVEEVR

SEQ ID NO: 1769 - protein, 9 aa, BK virus
ESQVEEVRV

SEQ ID NO: 1770 - protein, 9 aa, BK virus
SQVEEVRVF

SEQ ID NO: 1771 - protein, 9 aa, BK virus
QVEEVRVFD

SEQ ID NO: 1772 - protein, 9 aa, BK virus
VEEVRVFDG

SEQ ID NO: 1773 - protein, 9 aa, BK virus
EEVRVFDGT

SEQ ID NO: 1774 - protein, 9 aa, BK virus
EVRVFDGTE

SEQ ID NO: 1775 - protein, 9 aa, BK virus
VRVFDGTER

SEQ ID NO: 1776 - protein, 9 aa, BK virus
RVFDGTERL

SEQ ID NO: 1777 - protein, 9 aa, BK virus
VFDGTERLP

SEQ ID NO: 1778 - protein, 9 aa, BK virus
FDGTERLPG

SEQ ID NO: 1779 - protein, 9 aa, BK virus
DGTERLPGD

SEQ ID NO: 1780 - protein, 9 aa, BK virus
GTERLPGDP

SEQ ID NO: 1781 - protein, 9 aa, BK virus
TERLPGDPD

SEQ ID NO: 1782 - protein, 9 aa, BK virus
ERLPGDPDM

SEQ ID NO: 1783 - protein, 9 aa, BK virus
RLPGDPDMI

SEQ ID NO: 1784 - protein, 9 aa, BK virus
LPGDPDMIR

SEQ ID NO: 1785 - protein, 9 aa, BK virus
PGDPDMIRY

SEQ ID NO: 1786 - protein, 9 aa, BK virus
GDPDMIRYI

SEQ ID NO: 1787 - protein, 9 aa, BK virus
DPDMIRYID

SEQ ID NO: 1788 - protein, 9 aa, BK virus
PDMIRYIDK

SEQ ID NO: 1789 - protein, 9 aa, BK virus
DMIRYIDKQ

SEQ ID NO: 1790 - protein, 9 aa, BK virus
MIRYIDKQG

SEQ ID NO: 1791 - protein, 9 aa, BK virus
IRYIDKQGQ

SEQ ID NO: 1792 - protein, 9 aa, BK virus
RYIDKQGQL

SEQ ID NO: 1793 - protein, 9 aa, BK virus
YIDKQGQLQ

SEQ ID NO: 1794 - protein, 9 aa, BK virus
IDKQGQLQT

SEQ ID NO: 1795 - protein, 9 aa, BK virus
DKQGQLQTK

SEQ ID NO: 1796 - protein, 9 aa, BK virus
KQGQLQTKM

SEQ ID NO: 1797 - protein, 9 aa, BK virus
QGQLQTKML

SEQ ID NO: 1798 - protein, 9 aa, BK virus
TGAFIVHIH

SEQ ID NO: 1799 - protein, 9 aa, BK virus
GAFIVHIHL

SEQ ID NO: 1800 - protein, 9 aa, BK virus
AFIVHIHLI

SEQ ID NO: 1801 - protein, 9 aa, BK virus
FIVHIHLIN

SEQ ID NO: 1802 - protein, 9 aa, BK virus
IVHIHLINA

SEQ ID NO: 1803 - protein, 9 aa, BK virus
VHIHLINAA

SEQ ID NO: 1804 - protein, 9 aa, BK virus
HIHLINAAF

SEQ ID NO: 1805 - protein, 9 aa, BK virus
IHLINAAFV

SEQ ID NO: 1806 - protein, 9 aa, BK virus
ATFKLVLFW

SEQ ID NO: 1807 - protein, 9 aa, BK virus
TFKLVLFWG

SEQ ID NO: 1808 - protein, 9 aa, BK virus
FKLVLFWGW

SEQ ID NO: 1809 - protein, 9 aa, BK virus
KLVLFWGWC

SEQ ID NO: 1810 - protein, 9 aa, BK virus
LVLFWGWCF

SEQ ID NO: 1811 - protein, 9 aa, BK virus
VLFWGWCFR

SEQ ID NO: 1812 - protein, 9 aa, BK virus
LFWGWCFRP

SEQ ID NO: 1813 - protein, 9 aa, BK virus
FWGWCFRPF

SEQ ID NO: 1814 - protein, 9 aa, BK virus
WGWCFRPFK

SEQ ID NO: 1815 - protein, 9 aa, BK virus
GWCFRPFKT

SEQ ID NO: 1816 - protein, 9 aa, BK virus
WCFRPFKTL

SEQ ID NO: 1817 - protein, 9 aa, BK virus
CFRPFKTLK

SEQ ID NO: 1818 - protein, 9 aa, BK virus
FRPFKTLKA

SEQ ID NO: 1819 - protein, 9 aa, BK virus
RPFKTLKAF

SEQ ID NO: 1820 - protein, 9 aa, BK virus
PFKTLKAFT

SEQ ID NO: 1821 - protein, 9 aa, BK virus
FKTLKAFTQ

SEQ ID NO: 1822 - protein, 9 aa, BK virus
KTLKAFTQM

SEQ ID NO: 1823 - protein, 9 aa, BK virus
TLKAFTQMQ

SEQ ID NO: 1824 - protein, 9 aa, BK virus
LKAFTQMQL

SEQ ID NO: 1825 - protein, 9 aa, BK virus
KAFTQMQLL

SEQ ID NO: 1826 - protein, 9 aa, BK virus
AFTQMQLLT

SEQ ID NO: 1827 - protein, 9 aa, BK virus
FTQMQLLTM

SEQ ID NO: 1828 - protein, 9 aa, BK virus
TQMQLLTMG

SEQ ID NO: 1829 - protein, 9 aa, BK virus
QMQLLTMGV

SEQ ID NO: 1830 - protein, 9 aa, BK virus
ILFSCNIKN

SEQ ID NO: 1831 - protein, 9 aa, BK virus
LFSCNIKNT

SEQ ID NO: 1832 - protein, 9 aa, BK virus
FSCNIKNTF

SEQ ID NO: 1833 - protein, 9 aa, BK virus
SCNIKNTFP

SEQ ID NO: 1834 - protein, 9 aa, BK virus
CNIKNTFPH

SEQ ID NO: 1835 - protein, 9 aa, BK virus
NIKNTFPHA

SEQ ID NO: 1836 - protein, 9 aa, BK virus
IKNTFPHAY

SEQ ID NO: 1837 - protein, 9 aa, BK virus
KNTFPHAYI

SEQ ID NO: 1838 - protein, 9 aa, BK virus
NTFPHAYII

SEQ ID NO: 1839 - protein, 9 aa, BK virus
TFPHAYIIF

SEQ ID NO: 1840 - protein, 9 aa, BK virus
FPHAYIIFH

SEQ ID NO: 1841 - protein, 9 aa, BK virus
PHAYIIFHP

SEQ ID NO: 1842 - protein, 9 aa, BK virus
KSIHTYLRI

SEQ ID NO: 1843 - protein, 9 aa, BK virus
SIHTYLRIQ

SEQ ID NO: 1844 - protein, 9 aa, BK virus
IHTYLRIQP

SEQ ID NO: 1845 - protein, 9 aa, BK virus
HTYLRIQPF

SEQ ID NO: 1846 - protein, 9 aa, BK virus
TYLRIQPFL

SEQ ID NO: 1847 - protein, 9 aa, BK virus
YLRIQPFLP

SEQ ID NO: 1848 - protein, 9 aa, BK virus
LRIQPFLPF

SEQ ID NO: 1849 - protein, 9 aa, BK virus
RIQPFLPFN

SEQ ID NO: 1850 - protein, 9 aa, BK virus
IQPFLPFNN

SEQ ID NO: 1851 - protein, 9 aa, BK virus
QPFLPFNNS

SEQ ID NO: 1852 - protein, 9 aa, BK virus
PFLPFNNSR

SEQ ID NO: 1853 - protein, 9 aa, BK virus
FLPFNNSRL

SEQ ID NO: 1854 - protein, 9 aa, BK virus
LPFNNSRLY

SEQ ID NO: 1855 - protein, 9 aa, BK virus
PFNNSRLYI

SEQ ID NO: 1856 - protein, 9 aa, BK virus
FNNSRLYIS

SEQ ID NO: 1857 - protein, 9 aa, BK virus
NNSRLYISC

SEQ ID NO: 1858 - protein, 9 aa, BK virus
NSRLYISCK

SEQ ID NO: 1859 - protein, 9 aa, BK virus
SRLYISCKI

SEQ ID NO: 1860 - protein, 9 aa, BK virus
RLYISCKIS

SEQ ID NO: 1861 - protein, 9 aa, BK virus
LYISCKISY

SEQ ID NO: 1862 - protein, 9 aa, BK virus
YISCKISYR

SEQ ID NO: 1863 - protein, 9 aa, BK virus
ISCKISYRP

SEQ ID NO: 1864 - protein, 9 aa, BK virus
SCKISYRPK

SEQ ID NO: 1865 - protein, 9 aa, BK virus
CKISYRPKP

SEQ ID NO: 1866 - protein, 9 aa, BK virus
KISYRPKPN

SEQ ID NO: 1867 - protein, 9 aa, BK virus
IYFGPKIYL

SEQ ID NO: 1868 - protein, 9 aa, BK virus
YFGPKIYLS

SEQ ID NO: 1869 - protein, 9 aa, BK virus
FGPKIYLSY

SEQ ID NO: 1870 - protein, 9 aa, BK virus
GPKIYLSYK

SEQ ID NO: 1871 - protein, 9 aa, BK virus
PKIYLSYKS

SEQ ID NO: 1872 - protein, 9 aa, BK virus
KIYLSYKSS

SEQ ID NO: 1873 - protein, 9 aa, BK virus
IYLSYKSSL

SEQ ID NO: 1874 - protein, 9 aa, BK virus
YLSYKSSLQ

SEQ ID NO: 1875 - protein, 9 aa, BK virus
LSYKSSLQG

SEQ ID NO: 1876 - protein, 9 aa, BK virus
SYKSSLQGF

SEQ ID NO: 1877 - protein, 9 aa, BK virus
YKSSLQGFR

SEQ ID NO: 1878 - protein, 9 aa, BK virus
KSSLQGFRD

SEQ ID NO: 1879 - protein, 9 aa, BK virus
SSLQGFRDR

SEQ ID NO: 1880 - protein, 9 aa, BK virus
SLQGFRDRI

SEQ ID NO: 1881 - protein, 9 aa, BK virus
LQGFRDRIL

SEQ ID NO: 1882 - protein, 9 aa, BK virus
QGFRDRILI

SEQ ID NO: 1883 - protein, 9 aa, BK virus
GFRDRILIH

SEQ ID NO: 1884 - protein, 9 aa, BK virus
FRDRILIHC

SEQ ID NO: 1885 - protein, 9 aa, BK virus
RDRILIHCN

SEQ ID NO: 1886 - protein, 9 aa, BK virus
DRILIHCNQ

SEQ ID NO: 1887 - protein, 9 aa, BK virus
RILIHCNQA

SEQ ID NO: 1888 - protein, 9 aa, BK virus
ILIHCNQAW

SEQ ID NO: 1889 - protein, 9 aa, BK virus
LIHCNQAWW

SEQ ID NO: 1890 - protein, 9 aa, BK virus
IHCNQAWWK

SEQ ID NO: 1891 - protein, 9 aa, BK virus
HCNQAWWKY

SEQ ID NO: 1892 - protein, 9 aa, BK virus
CNQAWWKYL

SEQ ID NO: 1893 - protein, 9 aa, BK virus
NQAWWKYLG

SEQ ID NO: 1894 - protein, 9 aa, BK virus
QAWWKYLGS

SEQ ID NO: 1895 - protein, 9 aa, BK virus
AWWKYLGSF

SEQ ID NO: 1896 - protein, 9 aa, BK virus
WWKYLGSFV

SEQ ID NO: 1897 - protein, 9 aa, BK virus
FSSCPFYIF

SEQ ID NO: 1898 - protein, 9 aa, BK virus
SSCPFYIFK

SEQ ID NO: 1899 - protein, 9 aa, BK virus
SCPFYIFKN

SEQ ID NO: 1900 - protein, 9 aa, BK virus
CPFYIFKNN

SEQ ID NO: 1901 - protein, 9 aa, BK virus
PFYIFKNNH

SEQ ID NO: 1902 - protein, 9 aa, BK virus
FYIFKNNHV

SEQ ID NO: 1903 - protein, 9 aa, BK virus
YIFKNNHVL

SEQ ID NO: 1904 - protein, 9 aa, BK virus
IFKNNHVLI

SEQ ID NO: 1905 - protein, 9 aa, BK virus
FKNNHVLIY

SEQ ID NO: 1906 - protein, 9 aa, BK virus
KNNHVLIYS

SEQ ID NO: 1907 - protein, 9 aa, BK virus
NNHVLIYSY

SEQ ID NO: 1908 - protein, 9 aa, BK virus
NHVLIYSYT

SEQ ID NO: 1909 - protein, 9 aa, BK virus
CCFSTINGT

SEQ ID NO: 1910 - protein, 9 aa, BK virus
CFSTINGTF

SEQ ID NO: 1911 - protein, 9 aa, BK virus
FSTINGTFK

SEQ ID NO: 1912 - protein, 9 aa, BK virus
PVSSFRYIE

SEQ ID NO: 1913 - protein, 9 aa, BK virus
VSSFRYIEN

SEQ ID NO: 1914 - protein, 9 aa, BK virus
SSFRYIENN

SEQ ID NO: 1915 - protein, 9 aa, BK virus
SFRYIENNT

SEQ ID NO: 1916 - protein, 9 aa, BK virus
FRYIENNTV

SEQ ID NO: 1917 - protein, 9 aa, BK virus
RYIENNTVQ

SEQ ID NO: 1918 - protein, 9 aa, BK virus
YIENNTVQK

SEQ ID NO: 1919 - protein, 9 aa, BK virus
IENNTVQKI

SEQ ID NO: 1920 - protein, 9 aa, BK virus
ENNTVQKIK

SEQ ID NO: 1921 - protein, 9 aa, BK virus
NNTVQKIKY

SEQ ID NO: 1922 - protein, 9 aa, BK virus
NTVQKIKYY

SEQ ID NO: 1923 - protein, 9 aa, BK virus
TVQKIKYYR

SEQ ID NO: 1924 - protein, 9 aa, BK virus
VQKIKYYRI

SEQ ID NO: 1925 - protein, 9 aa, BK virus
QKIKYYRIH

SEQ ID NO: 1926 - protein, 9 aa, BK virus
KIKYYRIHF

SEQ ID NO: 1927 - protein, 9 aa, BK virus
IKYYRIHFR

SEQ ID NO: 1928 - protein, 9 aa, BK virus
QTVQPSNTC

SEQ ID NO: 1929 - protein, 9 aa, BK virus
TVQPSNTCH

SEQ ID NO: 1930 - protein, 9 aa, BK virus
VQPSNTCHI

SEQ ID NO: 1931 - protein, 9 aa, BK virus
QPSNTCHIL

SEQ ID NO: 1932 - protein, 9 aa, BK virus
PSNTCHILF

SEQ ID NO: 1933 - protein, 9 aa, BK virus
YSISMSSKY

SEQ ID NO: 1934 - protein, 9 aa, BK virus
HFFPGHMKG

SEQ ID NO: 1935 - protein, 9 aa, BK virus
FFPGHMKGI

SEQ ID NO: 1936 - protein, 9 aa, BK virus
FPGHMKGIY

SEQ ID NO: 1937 - protein, 9 aa, BK virus
PGHMKGIYS

SEQ ID NO: 1938 - protein, 9 aa, BK virus
GHMKGIYSF

SEQ ID NO: 1939 - protein, 9 aa, BK virus
HMKGIYSFF

SEQ ID NO: 1940 - protein, 9 aa, BK virus
MKGIYSFFS

SEQ ID NO: 1941 - protein, 9 aa, BK virus
NCIYCLLTN

SEQ ID NO: 1942 - protein, 9 aa, BK virus
CIYCLLTNT

SEQ ID NO: 1943 - protein, 9 aa, BK virus
IYCLLTNTF

SEQ ID NO: 1944 - protein, 9 aa, BK virus
YCLLTNTFL

SEQ ID NO: 1945 - protein, 9 aa, BK virus
CLLTNTFLI

SEQ ID NO: 1946 - protein, 9 aa, BK virus
LLTNTFLIF

SEQ ID NO: 1947 - protein, 9 aa, BK virus
LTNTFLIFT

SEQ ID NO: 1948 - protein, 9 aa, BK virus
TNTFLIFTF

SEQ ID NO: 1949 - protein, 9 aa, BK virus
NTFLIFTFC

SEQ ID NO: 1950 - protein, 9 aa, BK virus
TFLIFTFCK

SEQ ID NO: 1951 - protein, 9 aa, BK virus
FLIFTFCKN

SEQ ID NO: 1952 - protein, 9 aa, BK virus
LIFTFCKNN

SEQ ID NO: 1953 - protein, 9 aa, BK virus
IFTFCKNNS

SEQ ID NO: 1954 - protein, 9 aa, BK virus
FTFCKNNSI

SEQ ID NO: 1955 - protein, 9 aa, BK virus
TFCKNNSIC

SEQ ID NO: 1956 - protein, 9 aa, BK virus
FCKNNSICK

SEQ ID NO: 1957 - protein, 9 aa, BK virus
CKNNSICKV

SEQ ID NO: 1958 - protein, 9 aa, BK virus
KNNSICKVL

SEQ ID NO: 1959 - protein, 9 aa, BK virus
NNSICKVLF

SEQ ID NO: 1960 - protein, 9 aa, BK virus
NSICKVLFM

SEQ ID NO: 1961 - protein, 9 aa, BK virus
SICKVLFMI

SEQ ID NO: 1962 - protein, 9 aa, BK virus
ICKVLFMIL

SEQ ID NO: 1963 - protein, 9 aa, BK virus
CKVLFMILK

SEQ ID NO: 1964 - protein, 9 aa, BK virus
KVLFMILKV

SEQ ID NO: 1965 - protein, 9 aa, BK virus
VLFMILKVI

SEQ ID NO: 1966 - protein, 9 aa, BK virus
LFMILKVIR

SEQ ID NO: 1967 - protein, 9 aa, BK virus
FMILKVIRL

SEQ ID NO: 1968 - protein, 9 aa, BK virus
MILKVIRLV

SEQ ID NO: 1969 - protein, 9 aa, BK virus
ILKVIRLVF

SEQ ID NO: 1970 - protein, 9 aa, BK virus
LKVIRLVFF

SEQ ID NO: 1971 - protein, 9 aa, BK virus
KVIRLVFFL

SEQ ID NO: 1972 - protein, 9 aa, BK virus
VIRLVFFLT

SEQ ID NO: 1973 - protein, 9 aa, BK virus
IRLVFFLTL

SEQ ID NO: 1974 - protein, 9 aa, BK virus
RLVFFLTLF

SEQ ID NO: 1975 - protein, 9 aa, BK virus
LVFFLTLFT

SEQ ID NO: 1976 - protein, 9 aa, BK virus
VFFLTLFTL

SEQ ID NO: 1977 - protein, 9 aa, BK virus
FFLTLFTLL

SEQ ID NO: 1978 - protein, 9 aa, BK virus
FLTLFTLLY

SEQ ID NO: 1979 - protein, 9 aa, BK virus
LTLFTLLYI

SEQ ID NO: 1980 - protein, 9 aa, BK virus
TLFTLLYIV

SEQ ID NO: 1981 - protein, 9 aa, BK virus
LFTLLYIVL

SEQ ID NO: 1982 - protein, 9 aa, BK virus
FTLLYIVLK

SEQ ID NO: 1983 - protein, 9 aa, BK virus
TLLYIVLKF

SEQ ID NO: 1984 - protein, 9 aa, BK virus
KHILTLCLY

SEQ ID NO: 1985 - protein, 9 aa, BK virus
HILTLCLYC

SEQ ID NO: 1986 - protein, 9 aa, BK virus
ILTLCLYCI

SEQ ID NO: 1987 - protein, 9 aa, BK virus
LTLCLYCIL

SEQ ID NO: 1988 - protein, 9 aa, BK virus
TLCLYCILS

SEQ ID NO: 1989 - protein, 9 aa, BK virus
LCLYCILSN

SEQ ID NO: 1990 - protein, 9 aa, BK virus
FPRHLLCFF

SEQ ID NO: 1991 - protein, 9 aa, BK virus
PRHLLCFFR

SEQ ID NO: 1992 - protein, 9 aa, BK virus
RHLLCFFRL

SEQ ID NO: 1993 - protein, 9 aa, BK virus
HLLCFFRLF

SEQ ID NO: 1994 - protein, 9 aa, BK virus
LLCFFRLFW

SEQ ID NO: 1995 - protein, 9 aa, BK virus
LCFFRLFWA

SEQ ID NO: 1996 - protein, 9 aa, BK virus
CFFRLFWAK

SEQ ID NO: 1997 - protein, 9 aa, BK virus
FFRLFWAKI

SEQ ID NO: 1998 - protein, 9 aa, BK virus
FRLFWAKIM

SEQ ID NO: 1999 - protein, 9 aa, BK virus
RLFWAKIML

SEQ ID NO: 2000 - protein, 9 aa, BK virus
LFWAKIMLL

SEQ ID NO: 2001 - protein, 9 aa, BK virus
APLNAFFYS

SEQ ID NO: 2002 - protein, 9 aa, BK virus
PLNAFFYSM

SEQ ID NO: 2003 - protein, 9 aa, BK virus
LNAFFYSMV

SEQ ID NO: 2004 - protein, 9 aa, BK virus
NAFFYSMVW

SEQ ID NO: 2005 - protein, 9 aa, BK virus
AFFYSMVWI

SEQ ID NO: 2006 - protein, 9 aa, BK virus
FFYSMVWIS

SEQ ID NO: 2007 - protein, 9 aa, BK virus
FYSMVWISS

SEQ ID NO: 2008 - protein, 9 aa, BK virus
VFLINTLTN

SEQ ID NO: 2009 - protein, 9 aa, BK virus
KTKGTQLLT

SEQ ID NO: 2010 - protein, 9 aa, BK virus
TKGTQLLTE

SEQ ID NO: 2011 - protein, 9 aa, BK virus
KGTQLLTEI

SEQ ID NO: 2012 - protein, 9 aa, BK virus
GTQLLTEII

SEQ ID NO: 2013 - protein, 9 aa, BK virus
TQLLTEIIN

SEQ ID NO: 2014 - protein, 9 aa, BK virus
QLLTEIINC

SEQ ID NO: 2015 - protein, 9 aa, BK virus
LLTEIINCR

SEQ ID NO: 2016 - protein, 9 aa, BK virus
LTEIINCRN

SEQ ID NO: 2017 - protein, 9 aa, BK virus
TEIINCRNS

SEQ ID NO: 2018 - protein, 9 aa, BK virus
EIINCRNSM

SEQ ID NO: 2019 - protein, 9 aa, BK virus
IINCRNSMS

SEQ ID NO: 2020 - protein, 9 aa, BK virus
INCRNSMSM

SEQ ID NO: 2021 - protein, 9 aa, BK virus
NCRNSMSMW

SEQ ID NO: 2022 - protein, 9 aa, BK virus
CRNSMSMWS

SEQ ID NO: 2023 - protein, 9 aa, BK virus
KEYNIMPST

SEQ ID NO: 2024 - protein, 9 aa, BK virus
EYNIMPSTH

SEQ ID NO: 2025 - protein, 9 aa, BK virus
YNIMPSTHV

SEQ ID NO: 2026 - protein, 9 aa, BK virus
NIMPSTHVS

SEQ ID NO: 2027 - protein, 9 aa, BK virus
IMPSTHVST

SEQ ID NO: 2028 - protein, 9 aa, BK virus
MPSTHVSTN

SEQ ID NO: 2029 - protein, 9 aa, BK virus
PSTHVSTNK

SEQ ID NO: 2030 - protein, 9 aa, BK virus
STHVSTNKS

SEQ ID NO: 2031 - protein, 9 aa, BK virus
THVSTNKSY

SEQ ID NO: 2032 - protein, 9 aa, BK virus
HVSTNKSYR

SEQ ID NO: 2033 - protein, 9 aa, BK virus
VSTNKSYRI

SEQ ID NO: 2034 - protein, 9 aa, BK virus
STNKSYRIF

SEQ ID NO: 2035 - protein, 9 aa, BK virus
TNKSYRIFF

SEQ ID NO: 2036 - protein, 9 aa, BK virus
NKSYRIFFH

SEQ ID NO: 2037 - protein, 9 aa, BK virus
KSYRIFFHK

SEQ ID NO: 2038 - protein, 9 aa, BK virus
SYRIFFHKF

SEQ ID NO: 2039 - protein, 9 aa, BK virus
YRIFFHKFF

SEQ ID NO: 2040 - protein, 9 aa, BK virus
RIFFHKFFI

SEQ ID NO: 2041 - protein, 9 aa, BK virus
IFFHKFFIQ

SEQ ID NO: 2042 - protein, 9 aa, BK virus
FFHKFFIQN

SEQ ID NO: 2043 - protein, 9 aa, BK virus
FHKFFIQNL

SEQ ID NO: 2044 - protein, 9 aa, BK virus
HKFFIQNLS

SEQ ID NO: 2045 - protein, 9 aa, BK virus
KFFIQNLSF

SEQ ID NO: 2046 - protein, 9 aa, BK virus
FFIQNLSFF

SEQ ID NO: 2047 - protein, 9 aa, BK virus
FIQNLSFFF

SEQ ID NO: 2048 - protein, 9 aa, BK virus
IQNLSFFFS

SEQ ID NO: 2049 - protein, 9 aa, BK virus
QNLSFFFSS

SEQ ID NO: 2050 - protein, 9 aa, BK virus
NLSFFFSSI

SEQ ID NO: 2051 - protein, 9 aa, BK virus
LSFFFSSIH

SEQ ID NO: 2052 - protein, 9 aa, BK virus
SFFFSSIHS

SEQ ID NO: 2053 - protein, 9 aa, BK virus
FFFSSIHSK

SEQ ID NO: 2054 - protein, 9 aa, BK virus
FFSSIHSKA

SEQ ID NO: 2055 - protein, 9 aa, BK virus
FSSIHSKAG

SEQ ID NO: 2056 - protein, 9 aa, BK virus
SSIHSKAGK

SEQ ID NO: 2057 - protein, 9 aa, BK virus
SIHSKAGKG

SEQ ID NO: 2058 - protein, 9 aa, BK virus
IHSKAGKGS

SEQ ID NO: 2059 - protein, 9 aa, BK virus
HSKAGKGSI

SEQ ID NO: 2060 - protein, 9 aa, BK virus
SKAGKGSIT

SEQ ID NO: 2061 - protein, 9 aa, BK virus
KAGKGSITK

SEQ ID NO: 2062 - protein, 9 aa, BK virus
AGKGSITKY

SEQ ID NO: 2063 - protein, 9 aa, BK virus
GKGSITKYS

SEQ ID NO: 2064 - protein, 9 aa, BK virus
KGSITKYSL

SEQ ID NO: 2065 - protein, 9 aa, BK virus
GSITKYSLT

SEQ ID NO: 2066 - protein, 9 aa, BK virus
SITKYSLTK

SEQ ID NO: 2067 - protein, 9 aa, BK virus
ITKYSLTKK

SEQ ID NO: 2068 - protein, 9 aa, BK virus
TKYSLTKKL

SEQ ID NO: 2069 - protein, 9 aa, BK virus
KYSLTKKLV

SEQ ID NO: 2070 - protein, 9 aa, BK virus
IRGKVFRVF

SEQ ID NO: 2071 - protein, 9 aa, BK virus
RGKVFRVFY

SEQ ID NO: 2072 - protein, 9 aa, BK virus
GKVFRVFYL

SEQ ID NO: 2073 - protein, 9 aa, BK virus
KVFRVFYLS

SEQ ID NO: 2074 - protein, 9 aa, BK virus
VFRVFYLSF

SEQ ID NO: 2075 - protein, 9 aa, BK virus
FRVFYLSFF

SEQ ID NO: 2076 - protein, 9 aa, BK virus
RVFYLSFFF

SEQ ID NO: 2077 - protein, 9 aa, BK virus
VFYLSFFFG

SEQ ID NO: 2078 - protein, 9 aa, BK virus
FYLSFFFGW

SEQ ID NO: 2079 - protein, 9 aa, BK virus
YLSFFFGWC

SEQ ID NO: 2080 - protein, 9 aa, BK virus
VLRICCCFF

SEQ ID NO: 2081 - protein, 9 aa, BK virus
LRICCCFFI

SEQ ID NO: 2082 - protein, 9 aa, BK virus
RICCCFFIT

SEQ ID NO: 2083 - protein, 9 aa, BK virus
ICCCFFITG

SEQ ID NO: 2084 - protein, 9 aa, BK virus
CCCFFITGK

SEQ ID NO: 2085 - protein, 9 aa, BK virus
CCFFITGKH

SEQ ID NO: 2086 - protein, 9 aa, BK virus
CFFITGKHI

SEQ ID NO: 2087 - protein, 9 aa, BK virus
FFITGKHIF

SEQ ID NO: 2088 - protein, 9 aa, BK virus
FITGKHIFM

SEQ ID NO: 2089 - protein, 9 aa, BK virus
ITGKHIFMA

SEQ ID NO: 2090 - protein, 9 aa, BK virus
TGKHIFMAK

SEQ ID NO: 2091 - protein, 9 aa, BK virus
IFIPFFIKG

SEQ ID NO: 2092 - protein, 9 aa, BK virus
FIPFFIKGT

SEQ ID NO: 2093 - protein, 9 aa, BK virus
IPFFIKGTP

SEQ ID NO: 2094 - protein, 9 aa, BK virus
PFFIKGTPP

SEQ ID NO: 2095 - protein, 9 aa, BK virus
FFIKGTPPG

SEQ ID NO: 2096 - protein, 9 aa, BK virus
FIKGTPPGL

SEQ ID NO: 2097 - protein, 9 aa, BK virus
IKGTPPGLP

SEQ ID NO: 2098 - protein, 9 aa, BK virus
KGTPPGLPL

SEQ ID NO: 2099 - protein, 9 aa, BK virus
GTPPGLPLF

SEQ ID NO: 2100 - protein, 9 aa, BK virus
TPPGLPLFC

SEQ ID NO: 2101 - protein, 9 aa, BK virus
PPGLPLFCS

SEQ ID NO: 2102 - protein, 9 aa, BK virus
PGLPLFCSI

SEQ ID NO: 2103 - protein, 9 aa, BK virus
GLPLFCSIG

SEQ ID NO: 2104 - protein, 9 aa, BK virus
LPLFCSIGW

SEQ ID NO: 2105 - protein, 9 aa, BK virus
PLFCSIGWH

SEQ ID NO: 2106 - protein, 9 aa, BK virus
LFCSIGWHL

SEQ ID NO: 2107 - protein, 9 aa, BK virus
YFIIYLNIS

SEQ ID NO: 2108 - protein, 9 aa, BK virus
SFRSLKGVS

SEQ ID NO: 2109 - protein, 9 aa, BK virus
FRSLKGVSP

SEQ ID NO: 2110 - protein, 9 aa, BK virus
RSLKGVSPI

SEQ ID NO: 2111 - protein, 9 aa, BK virus
SLKGVSPII

SEQ ID NO: 2112 - protein, 9 aa, BK virus
LKGVSPIIW

SEQ ID NO: 2113 - protein, 9 aa, BK virus
KGVSPIIWT

SEQ ID NO: 2114 - protein, 9 aa, BK virus
GVSPIIWTH

SEQ ID NO: 2115 - protein, 9 aa, BK virus
VSPIIWTHH

SEQ ID NO: 2116 - protein, 9 aa, BK virus
SPIIWTHHC

SEQ ID NO: 2117 - protein, 9 aa, BK virus
PIIWTHHCR

SEQ ID NO: 2118 - protein, 9 aa, BK virus
IIWTHHCRV

SEQ ID NO: 2119 - protein, 9 aa, BK virus
IWTHHCRVS

SEQ ID NO: 2120 - protein, 9 aa, BK virus
WTHHCRVSS

SEQ ID NO: 2121 - protein, 9 aa, BK virus
THHCRVSSV

SEQ ID NO: 2122 - protein, 9 aa, BK virus
HHCRVSSVR

SEQ ID NO: 2123 - protein, 9 aa, BK virus
HCRVSSVRS

SEQ ID NO: 2124 - protein, 9 aa, BK virus
CRVSSVRSK

SEQ ID NO: 2125 - protein, 9 aa, BK virus
RVSSVRSKP

SEQ ID NO: 2126 - protein, 9 aa, BK virus
VSSVRSKPN

SEQ ID NO: 2127 - protein, 9 aa, BK virus
SSVRSKPNH

SEQ ID NO: 2128 - protein, 9 aa, BK virus
SVRSKPNHC

SEQ ID NO: 2129 - protein, 9 aa, BK virus
VRSKPNHCV

SEQ ID NO: 2130 - protein, 9 aa, BK virus
RSKPNHCVK

SEQ ID NO: 2131 - protein, 9 aa, BK virus
SKPNHCVKQ

SEQ ID NO: 2132 - protein, 9 aa, BK virus
KPNHCVKQS

SEQ ID NO: 2133 - protein, 9 aa, BK virus
PNHCVKQSM

SEQ ID NO: 2134 - protein, 9 aa, BK virus
NHCVKQSMQ

SEQ ID NO: 2135 - protein, 9 aa, BK virus
QSIQTKGSF

SEQ ID NO: 2136 - protein, 9 aa, BK virus
SIQTKGSFL

SEQ ID NO: 2137 - protein, 9 aa, BK virus
IQTKGSFLK

SEQ ID NO: 2138 - protein, 9 aa, BK virus
QTKGSFLKN

SEQ ID NO: 2139 - protein, 9 aa, BK virus
TKGSFLKNF

SEQ ID NO: 2140 - protein, 9 aa, BK virus
KGSFLKNFL

SEQ ID NO: 2141 - protein, 9 aa, BK virus
GSFLKNFLF

SEQ ID NO: 2142 - protein, 9 aa, BK virus
SFLKNFLFK

SEQ ID NO: 2143 - protein, 9 aa, BK virus
FLKNFLFKC

SEQ ID NO: 2144 - protein, 9 aa, BK virus
LKNFLFKCL

SEQ ID NO: 2145 - protein, 9 aa, BK virus
KNFLFKCLN

SEQ ID NO: 2146 - protein, 9 aa, BK virus
NFLFKCLNL

SEQ ID NO: 2147 - protein, 9 aa, BK virus
FLFKCLNLS

SEQ ID NO: 2148 - protein, 9 aa, BK virus
HSMQGQCTE

SEQ ID NO: 2149 - protein, 9 aa, BK virus
SMQGQCTEG

SEQ ID NO: 2150 - protein, 9 aa, BK virus
MQGQCTEGF

SEQ ID NO: 2151 - protein, 9 aa, BK virus
QGQCTEGFL

SEQ ID NO: 2152 - protein, 9 aa, BK virus
GQCTEGFLE

SEQ ID NO: 2153 - protein, 9 aa, BK virus
QCTEGFLEQ

SEQ ID NO: 2154 - protein, 9 aa, BK virus
CTEGFLEQI

SEQ ID NO: 2155 - protein, 9 aa, BK virus
TEGFLEQIG

SEQ ID NO: 2156 - protein, 9 aa, BK virus
EGFLEQIGH

SEQ ID NO: 2157 - protein, 9 aa, BK virus
GFLEQIGHS

SEQ ID NO: 2158 - protein, 9 aa, BK virus
FLEQIGHSL

SEQ ID NO: 2159 - protein, 9 aa, BK virus
LEQIGHSLQ

SEQ ID NO: 2160 - protein, 9 aa, BK virus
EQIGHSLQY

SEQ ID NO: 2161 - protein, 9 aa, BK virus
QIGHSLQYR

SEQ ID NO: 2162 - protein, 9 aa, BK virus
IGHSLQYRV

SEQ ID NO: 2163 - protein, 9 aa, BK virus
GHSLQYRVS

SEQ ID NO: 2164 - protein, 9 aa, BK virus
HSLQYRVSG

SEQ ID NO: 2165 - protein, 9 aa, BK virus
SLQYRVSGQ

SEQ ID NO: 2166 - protein, 9 aa, BK virus
LQYRVSGQR

SEQ ID NO: 2167 - protein, 9 aa, BK virus
QYRVSGQRG

SEQ ID NO: 2168 - protein, 9 aa, BK virus
YRVSGQRGK

SEQ ID NO: 2169 - protein, 9 aa, BK virus
RVSGQRGKS

SEQ ID NO: 2170 - protein, 9 aa, BK virus
VSGQRGKSA

SEQ ID NO: 2171 - protein, 9 aa, BK virus
SGQRGKSAQ

SEQ ID NO: 2172 - protein, 9 aa, BK virus
GQRGKSAQT

SEQ ID NO: 2173 - protein, 9 aa, BK virus
QRGKSAQTS

SEQ ID NO: 2174 - protein, 9 aa, BK virus
RGKSAQTSE

SEQ ID NO: 2175 - protein, 9 aa, BK virus
GKSAQTSEL

SEQ ID NO: 2176 - protein, 9 aa, BK virus
KSAQTSELL

SEQ ID NO: 2177 - protein, 9 aa, BK virus
SAQTSELLQ

SEQ ID NO: 2178 - protein, 9 aa, BK virus
AQTSELLQV

SEQ ID NO: 2179 - protein, 9 aa, BK virus
QTSELLQVP

SEQ ID NO: 2180 - protein, 9 aa, BK virus
TSELLQVPK

SEQ ID NO: 2181 - protein, 9 aa, BK virus
SELLQVPKS

SEQ ID NO: 2182 - protein, 9 aa, BK virus
ELLQVPKSG

SEQ ID NO: 2183 - protein, 9 aa, BK virus
ATFTSCSIF

SEQ ID NO: 2184 - protein, 9 aa, BK virus
TFTSCSIFL

SEQ ID NO: 2185 - protein, 9 aa, BK virus
FTSCSIFLY

SEQ ID NO: 2186 - protein, 9 aa, BK virus
TSCSIFLYK

SEQ ID NO: 2187 - protein, 9 aa, BK virus
SCSIFLYKV

SEQ ID NO: 2188 - protein, 9 aa, BK virus
CSIFLYKVF

SEQ ID NO: 2189 - protein, 9 aa, BK virus
SIFLYKVFI

SEQ ID NO: 2190 - protein, 9 aa, BK virus
IFLYKVFIL

SEQ ID NO: 2191 - protein, 9 aa, BK virus
FLYKVFILF

SEQ ID NO: 2192 - protein, 9 aa, BK virus
LYKVFILFI

SEQ ID NO: 2193 - protein, 9 aa, BK virus
YKVFILFIL

SEQ ID NO: 2194 - protein, 9 aa, BK virus
KVFILFILS

SEQ ID NO: 2195 - protein, 9 aa, BK virus
VFILFILSS

SEQ ID NO: 2196 - protein, 9 aa, BK virus
FILFILSSS

SEQ ID NO: 2197 - protein, 9 aa, BK virus
ILFILSSSP

SEQ ID NO: 2198 - protein, 9 aa, BK virus
LFILSSSPP

SEQ ID NO: 2199 - protein, 9 aa, BK virus
FILSSSPPL

SEQ ID NO: 2200 - protein, 9 aa, BK virus
ILSSSPPLS

SEQ ID NO: 2201 - protein, 9 aa, BK virus
LSSSPPLSG

SEQ ID NO: 2202 - protein, 9 aa, BK virus
AFLIKGRFP

SEQ ID NO: 2203 - protein, 9 aa, BK virus
FLIKGRFPQ

SEQ ID NO: 2204 - protein, 9 aa, BK virus
LIKGRFPQA

SEQ ID NO: 2205 - protein, 9 aa, BK virus
IKGRFPQAA

SEQ ID NO: 2206 - protein, 9 aa, BK virus
KGRFPQAAL

SEQ ID NO: 2207 - protein, 9 aa, BK virus
GRFPQAALS

SEQ ID NO: 2208 - protein, 9 aa, BK virus
RFPQAALSR

SEQ ID NO: 2209 - protein, 9 aa, BK virus
FPQAALSRP

SEQ ID NO: 2210 - protein, 9 aa, BK virus
PQAALSRPK

SEQ ID NO: 2211 - protein, 9 aa, BK virus
QAALSRPKR

SEQ ID NO: 2212 - protein, 9 aa, BK virus
AALSRPKRS

SEQ ID NO: 2213 - protein, 9 aa, BK virus
ALSRPKRSM

SEQ ID NO: 2214 - protein, 9 aa, BK virus
LSRPKRSMS

SEQ ID NO: 2215 - protein, 9 aa, BK virus
SRPKRSMSS

SEQ ID NO: 2216 - protein, 9 aa, BK virus
RPKRSMSSM

SEQ ID NO: 2217 - protein, 9 aa, BK virus
PKRSMSSMD

SEQ ID NO: 2218 - protein, 9 aa, BK virus
KRSMSSMDS

SEQ ID NO: 2219 - protein, 9 aa, BK virus
RSMSSMDSS

SEQ ID NO: 2220 - protein, 9 aa, BK virus
SMSSMDSSL

SEQ ID NO: 2221 - protein, 9 aa, BK virus
MSSMDSSLL

SEQ ID NO: 2222 - protein, 9 aa, BK virus
SSMDSSLLR

SEQ ID NO: 2223 - protein, 9 aa, BK virus
SMDSSLLRT

SEQ ID NO: 2224 - protein, 9 aa, BK virus
MDSSLLRTL

SEQ ID NO: 2225 - protein, 9 aa, BK virus
DSSLLRTLS

SEQ ID NO: 2226 - protein, 10 aa, BK virus
FCKNCKRIGI

SEQ ID NO: 2227 - protein, 10 aa, BK virus
CKNCKRIGIS

SEQ ID NO: 2228 - protein, 10 aa, BK virus
KNCKRIGISP

SEQ ID NO: 2229 - protein, 10 aa, BK virus
NCKRIGISPN

SEQ ID NO: 2230 - protein, 10 aa, BK virus
CKRIGISPNS

SEQ ID NO: 2231 - protein, 10 aa, BK virus
KRIGISPNSF

SEQ ID NO: 2232 - protein, 10 aa, BK virus
RIGISPNSFA

SEQ ID NO: 2233 - protein, 10 aa, BK virus
IGISPNSFAR

SEQ ID NO: 2234 - protein, 10 aa, BK virus
GISPNSFARP

SEQ ID NO: 2235 - protein, 10 aa, BK virus
ISPNSFARPQ

SEQ ID NO: 2236 - protein, 10 aa, BK virus
SPNSFARPQK

SEQ ID NO: 2237 - protein, 10 aa, BK virus
PNSFARPQKK

SEQ ID NO: 2238 - protein, 10 aa, BK virus
NSFARPQKKP

SEQ ID NO: 2239 - protein, 10 aa, BK virus
SFARPQKKPP

SEQ ID NO: 2240 - protein, 10 aa, BK virus
FARPQKKPPH

SEQ ID NO: 2241 - protein, 10 aa, BK virus
ARPQKKPPHP

SEQ ID NO: 2242 - protein, 10 aa, BK virus
RPQKKPPHPY

SEQ ID NO: 2243 - protein, 10 aa, BK virus
PQKKPPHPYY

SEQ ID NO: 2244 - protein, 10 aa, BK virus
QKKPPHPYYL

SEQ ID NO: 2245 - protein, 10 aa, BK virus
KKPPHPYYLR

SEQ ID NO: 2246 - protein, 10 aa, BK virus
KPPHPYYLRE

SEQ ID NO: 2247 - protein, 10 aa, BK virus
PPHPYYLRER

SEQ ID NO: 2248 - protein, 10 aa, BK virus
PHPYYLRERV

SEQ ID NO: 2249 - protein, 10 aa, BK virus
HPYYLRERVE

SEQ ID NO: 2250 - protein, 10 aa, BK virus
PYYLRERVEA

SEQ ID NO: 2251 - protein, 10 aa, BK virus
YYLRERVEAE

SEQ ID NO: 2252 - protein, 10 aa, BK virus
YLRERVEAEA

SEQ ID NO: 2253 - protein, 10 aa, BK virus
LRERVEAEAA

SEQ ID NO: 2254 - protein, 10 aa, BK virus
RERVEAEAAS

SEQ ID NO: 2255 - protein, 10 aa, BK virus
ERVEAEAASA

SEQ ID NO: 2256 - protein, 10 aa, BK virus
RVEAEAASAS

SEQ ID NO: 2257 - protein, 10 aa, BK virus
VEAEAASASY

SEQ ID NO: 2258 - protein, 10 aa, BK virus
EAEAASASYI

SEQ ID NO: 2259 - protein, 10 aa, BK virus
AEAASASYIL

SEQ ID NO: 2260 - protein, 10 aa, BK virus
KKRPQGGAAY

SEQ ID NO: 2261 - protein, 10 aa, BK virus
KRPQGGAAYP

SEQ ID NO: 2262 - protein, 10 aa, BK virus
RPQGGAAYPW

SEQ ID NO: 2263 - protein, 10 aa, BK virus
PQGGAAYPWN

SEQ ID NO: 2264 - protein, 10 aa, BK virus
QGGAAYPWNA

SEQ ID NO: 2265 - protein, 10 aa, BK virus
GGAAYPWNAA

SEQ ID NO: 2266 - protein, 10 aa, BK virus
GAAYPWNAAK

SEQ ID NO: 2267 - protein, 10 aa, BK virus
AAYPWNAAKP

SEQ ID NO: 2268 - protein, 10 aa, BK virus
PQEGKCMTHR

SEQ ID NO: 2269 - protein, 10 aa, BK virus
QEGKCMTHRG

SEQ ID NO: 2270 - protein, 10 aa, BK virus
EGKCMTHRGM

SEQ ID NO: 2271 - protein, 10 aa, BK virus
GKCMTHRGMQ

SEQ ID NO: 2272 - protein, 10 aa, BK virus
KCMTHRGMQP

SEQ ID NO: 2273 - protein, 10 aa, BK virus
CMTHRGMQPN

SEQ ID NO: 2274 - protein, 10 aa, BK virus
MTHRGMQPNH

SEQ ID NO: 2275 - protein, 10 aa, BK virus
THRGMQPNHD

SEQ ID NO: 2276 - protein, 10 aa, BK virus
HRGMQPNHDL

SEQ ID NO: 2277 - protein, 10 aa, BK virus
RGMQPNHDLR

SEQ ID NO: 2278 - protein, 10 aa, BK virus
GMQPNHDLRK

SEQ ID NO: 2279 - protein, 10 aa, BK virus
MQPNHDLRKE

SEQ ID NO: 2280 - protein, 10 aa, BK virus
QPNHDLRKES

SEQ ID NO: 2281 - protein, 10 aa, BK virus
PNHDLRKESA

SEQ ID NO: 2282 - protein, 10 aa, BK virus
LTGRSCLPME

SEQ ID NO: 2283 - protein, 10 aa, BK virus
TGRSCLPMEC

SEQ ID NO: 2284 - protein, 10 aa, BK virus
GRSCLPMECS

SEQ ID NO: 2285 - protein, 10 aa, BK virus
RSCLPMECSQ

SEQ ID NO: 2286 - protein, 10 aa, BK virus
SCLPMECSQT

SEQ ID NO: 2287 - protein, 10 aa, BK virus
CLPMECSQTM

SEQ ID NO: 2288 - protein, 10 aa, BK virus
LPMECSQTMT

SEQ ID NO: 2289 - protein, 10 aa, BK virus
PMECSQTMTS

SEQ ID NO: 2290 - protein, 10 aa, BK virus
MECSQTMTSG

SEQ ID NO: 2291 - protein, 10 aa, BK virus
ECSQTMTSGR

SEQ ID NO: 2292 - protein, 10 aa, BK virus
CSQTMTSGRK

SEQ ID NO: 2293 - protein, 10 aa, BK virus
SQTMTSGRKV

SEQ ID NO: 2294 - protein, 10 aa, BK virus
QTMTSGRKVH

SEQ ID NO: 2295 - protein, 10 aa, BK virus
TMTSGRKVHD

SEQ ID NO: 2296 - protein, 10 aa, BK virus
MTSGRKVHDR

SEQ ID NO: 2297 - protein, 10 aa, BK virus
TSGRKVHDRH

SEQ ID NO: 2298 - protein, 10 aa, BK virus
SGRKVHDRHV

SEQ ID NO: 2299 - protein, 10 aa, BK virus
GRKVHDRHVL

SEQ ID NO: 2300 - protein, 10 aa, BK virus
RKVHDRHVLR

SEQ ID NO: 2301 - protein, 10 aa, BK virus
KVHDRHVLRA

SEQ ID NO: 2302 - protein, 10 aa, BK virus
ESWPCPQLNW

SEQ ID NO: 2303 - protein, 10 aa, BK virus
SWPCPQLNWT

SEQ ID NO: 2304 - protein, 10 aa, BK virus
WPCPQLNWTK

SEQ ID NO: 2305 - protein, 10 aa, BK virus
PCPQLNWTKA

SEQ ID NO: 2306 - protein, 10 aa, BK virus
CPQLNWTKAM

SEQ ID NO: 2307 - protein, 10 aa, BK virus
PQLNWTKAMV

SEQ ID NO: 2308 - protein, 10 aa, BK virus
QLNWTKAMVL

SEQ ID NO: 2309 - protein, 10 aa, BK virus
LNWTKAMVLR

SEQ ID NO: 2310 - protein, 10 aa, BK virus
NWTKAMVLRQ

SEQ ID NO: 2311 - protein, 10 aa, BK virus
WTKAMVLRQL

SEQ ID NO: 2312 - protein, 10 aa, BK virus
TKAMVLRQLS

SEQ ID NO: 2313 - protein, 10 aa, BK virus
KAMVLRQLSR

SEQ ID NO: 2314 - protein, 10 aa, BK virus
AMVLRQLSRQ

SEQ ID NO: 2315 - protein, 10 aa, BK virus
MVLRQLSRQA

SEQ ID NO: 2316 - protein, 10 aa, BK virus
VLRQLSRQAS

SEQ ID NO: 2317 - protein, 10 aa, BK virus
LRQLSRQASV

SEQ ID NO: 2318 - protein, 10 aa, BK virus
RQLSRQASVK

SEQ ID NO: 2319 - protein, 10 aa, BK virus
QLSRQASVKV

SEQ ID NO: 2320 - protein, 10 aa, BK virus
LSRQASVKVG

SEQ ID NO: 2321 - protein, 10 aa, BK virus
SRQASVKVGK

SEQ ID NO: 2322 - protein, 10 aa, BK virus
RQASVKVGKT

SEQ ID NO: 2323 - protein, 10 aa, BK virus
QASVKVGKTW

SEQ ID NO: 2324 - protein, 10 aa, BK virus
ASVKVGKTWT

SEQ ID NO: 2325 - protein, 10 aa, BK virus
SVKVGKTWTG

SEQ ID NO: 2326 - protein, 10 aa, BK virus
VKVGKTWTGT

SEQ ID NO: 2327 - protein, 10 aa, BK virus
KVGKTWTGTK

SEQ ID NO: 2328 - protein, 10 aa, BK virus
VGKTWTGTKK

SEQ ID NO: 2329 - protein, 10 aa, BK virus
GKTWTGTKKR

SEQ ID NO: 2330 - protein, 10 aa, BK virus
KTWTGTKKRA

SEQ ID NO: 2331 - protein, 10 aa, BK virus
TWTGTKKRAQ

SEQ ID NO: 2332 - protein, 10 aa, BK virus
WTGTKKRAQR

SEQ ID NO: 2333 - protein, 10 aa, BK virus
TGTKKRAQRI

SEQ ID NO: 2334 - protein, 10 aa, BK virus
GTKKRAQRIF

SEQ ID NO: 2335 - protein, 10 aa, BK virus
TKKRAQRIFI

SEQ ID NO: 2336 - protein, 10 aa, BK virus
KKRAQRIFIF

SEQ ID NO: 2337 - protein, 10 aa, BK virus
KRAQRIFIFI

SEQ ID NO: 2338 - protein, 10 aa, BK virus
RAQRIFIFIL

SEQ ID NO: 2339 - protein, 10 aa, BK virus
AQRIFIFILE

SEQ ID NO: 2340 - protein, 10 aa, BK virus
QRIFIFILEL

SEQ ID NO: 2341 - protein, 10 aa, BK virus
RIFIFILELL

SEQ ID NO: 2342 - protein, 10 aa, BK virus
IFIFILELLL

SEQ ID NO: 2343 - protein, 10 aa, BK virus
FIFILELLLE

SEQ ID NO: 2344 - protein, 10 aa, BK virus
IFILELLLEF

SEQ ID NO: 2345 - protein, 10 aa, BK virus
FILELLLEFC

SEQ ID NO: 2346 - protein, 10 aa, BK virus
ILELLLEFCR

SEQ ID NO: 2347 - protein, 10 aa, BK virus
LELLLEFCRG

SEQ ID NO: 2348 - protein, 10 aa, BK virus
ELLLEFCRGE

SEQ ID NO: 2349 - protein, 10 aa, BK virus
LLLEFCRGED

SEQ ID NO: 2350 - protein, 10 aa, BK virus
LLEFCRGEDS

SEQ ID NO: 2351 - protein, 10 aa, BK virus
LEFCRGEDSV

SEQ ID NO: 2352 - protein, 10 aa, BK virus
EFCRGEDSVD

SEQ ID NO: 2353 - protein, 10 aa, BK virus
FCRGEDSVDG

SEQ ID NO: 2354 - protein, 10 aa, BK virus
CRGEDSVDGK

SEQ ID NO: 2355 - protein, 10 aa, BK virus
RGEDSVDGKN

SEQ ID NO: 2356 - protein, 10 aa, BK virus
GEDSVDGKNK

SEQ ID NO: 2357 - protein, 10 aa, BK virus
EDSVDGKNKS

SEQ ID NO: 2358 - protein, 10 aa, BK virus
DSVDGKNKST

SEQ ID NO: 2359 - protein, 10 aa, BK virus
SVDGKNKSTT

SEQ ID NO: 2360 - protein, 10 aa, BK virus
VDGKNKSTTA

SEQ ID NO: 2361 - protein, 10 aa, BK virus
DGKNKSTTAL

SEQ ID NO: 2362 - protein, 10 aa, BK virus
GKNKSTTALP

SEQ ID NO: 2363 - protein, 10 aa, BK virus
KNKSTTALPA

SEQ ID NO: 2364 - protein, 10 aa, BK virus
NKSTTALPAV

SEQ ID NO: 2365 - protein, 10 aa, BK virus
KSTTALPAVK

SEQ ID NO: 2366 - protein, 10 aa, BK virus
STTALPAVKD

SEQ ID NO: 2367 - protein, 10 aa, BK virus
TTALPAVKDS

SEQ ID NO: 2368 - protein, 10 aa, BK virus
TALPAVKDSV

SEQ ID NO: 2369 - protein, 10 aa, BK virus
ALPAVKDSVK

SEQ ID NO: 2370 - protein, 10 aa, BK virus
LPAVKDSVKD

SEQ ID NO: 2371 - protein, 10 aa, BK virus
PAVKDSVKDS

SEQ ID NO: 2372 - protein, 10 aa, BK virus
VSNPFFFVFP

SEQ ID NO: 2373 - protein, 10 aa, BK virus
SNPFFFVFPG

SEQ ID NO: 2374 - protein, 10 aa, BK virus
NPFFFVFPGS

SEQ ID NO: 2375 - protein, 10 aa, BK virus
PFFFVFPGSW

SEQ ID NO: 2376 - protein, 10 aa, BK virus
FFFVFPGSWV

SEQ ID NO: 2377 - protein, 10 aa, BK virus
FFVFPGSWVL

SEQ ID NO: 2378 - protein, 10 aa, BK virus
FVFPGSWVLL

SEQ ID NO: 2379 - protein, 10 aa, BK virus
LPVYLRLLLP

SEQ ID NO: 2380 - protein, 10 aa, BK virus
PVYLRLLLPQ

SEQ ID NO: 2381 - protein, 10 aa, BK virus
VYLRLLLPQD

SEQ ID NO: 2382 - protein, 10 aa, BK virus
YLRLLLPQDF

SEQ ID NO: 2383 - protein, 10 aa, BK virus
LRLLLPQDFQ

SEQ ID NO: 2384 - protein, 10 aa, BK virus
RLLLPQDFQW

SEQ ID NO: 2385 - protein, 10 aa, BK virus
LLLPQDFQWL

SEQ ID NO: 2386 - protein, 10 aa, BK virus
LLPQDFQWLK

SEQ ID NO: 2387 - protein, 10 aa, BK virus
LPQDFQWLKL

SEQ ID NO: 2388 - protein, 10 aa, BK virus
PQDFQWLKLL

SEQ ID NO: 2389 - protein, 10 aa, BK virus
QDFQWLKLLL

SEQ ID NO: 2390 - protein, 10 aa, BK virus
DFQWLKLLLG

SEQ ID NO: 2391 - protein, 10 aa, BK virus
FQWLKLLLGR

SEQ ID NO: 2392 - protein, 10 aa, BK virus
QWLKLLLGRL

SEQ ID NO: 2393 - protein, 10 aa, BK virus
WLKLLLGRLL

SEQ ID NO: 2394 - protein, 10 aa, BK virus
LKLLLGRLLL

SEQ ID NO: 2395 - protein, 10 aa, BK virus
KLLLGRLLLL

SEQ ID NO: 2396 - protein, 10 aa, BK virus
LLVLLGLLLG

SEQ ID NO: 2397 - protein, 10 aa, BK virus
LVLLGLLLGL

SEQ ID NO: 2398 - protein, 10 aa, BK virus
VLLGLLLGLL

SEQ ID NO: 2399 - protein, 10 aa, BK virus
LLGLLLGLLL

SEQ ID NO: 2400 - protein, 10 aa, BK virus
GISSLMIGIT

SEQ ID NO: 2401 - protein, 10 aa, BK virus
ISSLMIGITK

SEQ ID NO: 2402 - protein, 10 aa, BK virus
SSLMIGITKF

SEQ ID NO: 2403 - protein, 10 aa, BK virus
SLMIGITKFP

SEQ ID NO: 2404 - protein, 10 aa, BK virus
LMIGITKFPL

SEQ ID NO: 2405 - protein, 10 aa, BK virus
ASISNQAWLW

SEQ ID NO: 2406 - protein, 10 aa, BK virus
SISNQAWLWN

SEQ ID NO: 2407 - protein, 10 aa, BK virus
ISNQAWLWNC

SEQ ID NO: 2408 - protein, 10 aa, BK virus
SNQAWLWNCL

SEQ ID NO: 2409 - protein, 10 aa, BK virus
NQAWLWNCLT

SEQ ID NO: 2410 - protein, 10 aa, BK virus
QAWLWNCLTQ

SEQ ID NO: 2411 - protein, 10 aa, BK virus
AWLWNCLTQM

SEQ ID NO: 2412 - protein, 10 aa, BK virus
WLWNCLTQMS

SEQ ID NO: 2413 - protein, 10 aa, BK virus
LWNCLTQMST

SEQ ID NO: 2414 - protein, 10 aa, BK virus
WNCLTQMSTM

SEQ ID NO: 2415 - protein, 10 aa, BK virus
NCLTQMSTMI

SEQ ID NO: 2416 - protein, 10 aa, BK virus
CLTQMSTMIF

SEQ ID NO: 2417 - protein, 10 aa, BK virus
LTQMSTMIFC

SEQ ID NO: 2418 - protein, 10 aa, BK virus
TQMSTMIFCF

SEQ ID NO: 2419 - protein, 10 aa, BK virus
QMSTMIFCFL

SEQ ID NO: 2420 - protein, 10 aa, BK virus
MSTMIFCFLV

SEQ ID NO: 2421 - protein, 10 aa, BK virus
ILLLIIFNTL

SEQ ID NO: 2422 - protein, 10 aa, BK virus
LLLIIFNTLI

SEQ ID NO: 2423 - protein, 10 aa, BK virus
LLIIFNTLIL

SEQ ID NO: 2424 - protein, 10 aa, BK virus
LIIFNTLILG

SEQ ID NO: 2425 - protein, 10 aa, BK virus
IIFNTLILGI

SEQ ID NO: 2426 - protein, 10 aa, BK virus
IFNTLILGIG

SEQ ID NO: 2427 - protein, 10 aa, BK virus
FNTLILGIGV

SEQ ID NO: 2428 - protein, 10 aa, BK virus
NTLILGIGVL

SEQ ID NO: 2429 - protein, 10 aa, BK virus
TLILGIGVLL

SEQ ID NO: 2430 - protein, 10 aa, BK virus
LILGIGVLLC

SEQ ID NO: 2431 - protein, 10 aa, BK virus
ILGIGVLLCL

SEQ ID NO: 2432 - protein, 10 aa, BK virus
LGIGVLLCLL

SEQ ID NO: 2433 - protein, 10 aa, BK virus
GIGVLLCLLL

SEQ ID NO: 2434 - protein, 10 aa, BK virus
IGVLLCLLLF

SEQ ID NO: 2435 - protein, 10 aa, BK virus
GVLLCLLLFP

SEQ ID NO: 2436 - protein, 10 aa, BK virus
VLLCLLLFPR

SEQ ID NO: 2437 - protein, 10 aa, BK virus
LLCLLLFPRL

SEQ ID NO: 2438 - protein, 10 aa, BK virus
LCLLLFPRLC

SEQ ID NO: 2439 - protein, 10 aa, BK virus
CLLLFPRLCG

SEQ ID NO: 2440 - protein, 10 aa, BK virus
LLLFPRLCGM

SEQ ID NO: 2441 - protein, 10 aa, BK virus
LLFPRLCGML

SEQ ID NO: 2442 - protein, 10 aa, BK virus
LFPRLCGMLL

SEQ ID NO: 2443 - protein, 10 aa, BK virus
FPRLCGMLLG

SEQ ID NO: 2444 - protein, 10 aa, BK virus
PRLCGMLLGM

SEQ ID NO: 2445 - protein, 10 aa, BK virus
RLCGMLLGMI

SEQ ID NO: 2446 - protein, 10 aa, BK virus
LCGMLLGMIY

SEQ ID NO: 2447 - protein, 10 aa, BK virus
CGMLLGMIYL

SEQ ID NO: 2448 - protein, 10 aa, BK virus
GMLLGMIYLL

SEQ ID NO: 2449 - protein, 10 aa, BK virus
PHRNCREEQK

SEQ ID NO: 2450 - protein, 10 aa, BK virus
HRNCREEQKD

SEQ ID NO: 2451 - protein, 10 aa, BK virus
RNCREEQKDF

SEQ ID NO: 2452 - protein, 10 aa, BK virus
NCREEQKDFL

SEQ ID NO: 2453 - protein, 10 aa, BK virus
CREEQKDFLE

SEQ ID NO: 2454 - protein, 10 aa, BK virus
REEQKDFLET

SEQ ID NO: 2455 - protein, 10 aa, BK virus
EEQKDFLETP

SEQ ID NO: 2456 - protein, 10 aa, BK virus
EQKDFLETPW

SEQ ID NO: 2457 - protein, 10 aa, BK virus
QKDFLETPWL

SEQ ID NO: 2458 - protein, 10 aa, BK virus
KDFLETPWLD

SEQ ID NO: 2459 - protein, 10 aa, BK virus
DFLETPWLDF

SEQ ID NO: 2460 - protein, 10 aa, BK virus
FLETPWLDFW

SEQ ID NO: 2461 - protein, 10 aa, BK virus
LETPWLDFWR

SEQ ID NO: 2462 - protein, 10 aa, BK virus
ETPWLDFWRK

SEQ ID NO: 2463 - protein, 10 aa, BK virus
TPWLDFWRKL

SEQ ID NO: 2464 - protein, 10 aa, BK virus
PWLDFWRKLP

SEQ ID NO: 2465 - protein, 10 aa, BK virus
WLDFWRKLPG

SEQ ID NO: 2466 - protein, 10 aa, BK virus
LDFWRKLPGQ

SEQ ID NO: 2467 - protein, 10 aa, BK virus
DFWRKLPGQL

SEQ ID NO: 2468 - protein, 10 aa, BK virus
TFIIIFNNII

SEQ ID NO: 2469 - protein, 10 aa, BK virus
FIIIFNNIIL

SEQ ID NO: 2470 - protein, 10 aa, BK virus
IIIFNNIILI

SEQ ID NO: 2471 - protein, 10 aa, BK virus
IIFNNIILIF

SEQ ID NO: 2472 - protein, 10 aa, BK virus
IFNNIILIFP

SEQ ID NO: 2473 - protein, 10 aa, BK virus
FNNIILIFPL

SEQ ID NO: 2474 - protein, 10 aa, BK virus
NNIILIFPLL

SEQ ID NO: 2475 - protein, 10 aa, BK virus
NIILIFPLLG

SEQ ID NO: 2476 - protein, 10 aa, BK virus
IILIFPLLGP

SEQ ID NO: 2477 - protein, 10 aa, BK virus
ILIFPLLGPQ

SEQ ID NO: 2478 - protein, 10 aa, BK virus
LIFPLLGPQW

SEQ ID NO: 2479 - protein, 10 aa, BK virus
IFPLLGPQWL

SEQ ID NO: 2480 - protein, 10 aa, BK virus
FPLLGPQWLD

SEQ ID NO: 2481 - protein, 10 aa, BK virus
PLLGPQWLDK

SEQ ID NO: 2482 - protein, 10 aa, BK virus
LKGKVPVYIL

SEQ ID NO: 2483 - protein, 10 aa, BK virus
KGKVPVYILA

SEQ ID NO: 2484 - protein, 10 aa, BK virus
GKVPVYILAI

SEQ ID NO: 2485 - protein, 10 aa, BK virus
KVPVYILAIL

SEQ ID NO: 2486 - protein, 10 aa, BK virus
VPVYILAILI

SEQ ID NO: 2487 - protein, 10 aa, BK virus
PVYILAILIV

SEQ ID NO: 2488 - protein, 10 aa, BK virus
EINKVYIQES

SEQ ID NO: 2489 - protein, 10 aa, BK virus
INKVYIQESL

SEQ ID NO: 2490 - protein, 10 aa, BK virus
KKLLPQEVLI

SEQ ID NO: 2491 - protein, 10 aa, BK virus
KLLPQEVLIK

SEQ ID NO: 2492 - protein, 10 aa, BK virus
LLPQEVLIKE

SEQ ID NO: 2493 - protein, 10 aa, BK virus
LPQEVLIKEL

SEQ ID NO: 2494 - protein, 10 aa, BK virus
PQEVLIKELL

SEQ ID NO: 2495 - protein, 10 aa, BK virus
QEVLIKELLL

SEQ ID NO: 2496 - protein, 10 aa, BK virus
EVLIKELLLN

SEQ ID NO: 2497 - protein, 10 aa, BK virus
VLIKELLLNG

SEQ ID NO: 2498 - protein, 10 aa, BK virus
LIKELLLNGC

SEQ ID NO: 2499 - protein, 10 aa, BK virus
IKELLLNGCC

SEQ ID NO: 2500 - protein, 10 aa, BK virus
KELLLNGCCL

SEQ ID NO: 2501 - protein, 10 aa, BK virus
ELLLNGCCLY

SEQ ID NO: 2502 - protein, 10 aa, BK virus
LLLNGCCLYF

SEQ ID NO: 2503 - protein, 10 aa, BK virus
HLLLKHMKMA

SEQ ID NO: 2504 - protein, 10 aa, BK virus
LLLKHMKMAP

SEQ ID NO: 2505 - protein, 10 aa, BK virus
LLKHMKMAPT

SEQ ID NO: 2506 - protein, 10 aa, BK virus
LKHMKMAPTK

SEQ ID NO: 2507 - protein, 10 aa, BK virus
KHMKMAPTKR

SEQ ID NO: 2508 - protein, 10 aa, BK virus
HMKMAPTKRK

SEQ ID NO: 2509 - protein, 10 aa, BK virus
MKMAPTKRKG

SEQ ID NO: 2510 - protein, 10 aa, BK virus
KMAPTKRKGE

SEQ ID NO: 2511 - protein, 10 aa, BK virus
MAPTKRKGEC

SEQ ID NO: 2512 - protein, 10 aa, BK virus
APTKRKGECP

SEQ ID NO: 2513 - protein, 10 aa, BK virus
PTKRKGECPG

SEQ ID NO: 2514 - protein, 10 aa, BK virus
TKRKGECPGA

SEQ ID NO: 2515 - protein, 10 aa, BK virus
KRKGECPGAA

SEQ ID NO: 2516 - protein, 10 aa, BK virus
RKGECPGAAP

SEQ ID NO: 2517 - protein, 10 aa, BK virus
KGECPGAAPK

SEQ ID NO: 2518 - protein, 10 aa, BK virus
GECPGAAPKK

SEQ ID NO: 2519 - protein, 10 aa, BK virus
ECPGAAPKKP

SEQ ID NO: 2520 - protein, 10 aa, BK virus
CPGAAPKKPK

SEQ ID NO: 2521 - protein, 10 aa, BK virus
PGAAPKKPKE

SEQ ID NO: 2522 - protein, 10 aa, BK virus
GAAPKKPKEP

SEQ ID NO: 2523 - protein, 10 aa, BK virus
AAPKKPKEPV

SEQ ID NO: 2524 - protein, 10 aa, BK virus
APKKPKEPVQ

SEQ ID NO: 2525 - protein, 10 aa, BK virus
PKKPKEPVQV

SEQ ID NO: 2526 - protein, 10 aa, BK virus
KKPKEPVQVP

SEQ ID NO: 2527 - protein, 10 aa, BK virus
KPKEPVQVPK

SEQ ID NO: 2528 - protein, 10 aa, BK virus
PKEPVQVPKL

SEQ ID NO: 2529 - protein, 10 aa, BK virus
KEPVQVPKLL

SEQ ID NO: 2530 - protein, 10 aa, BK virus
EPVQVPKLLI

SEQ ID NO: 2531 - protein, 10 aa, BK virus
PVQVPKLLIK

SEQ ID NO: 2532 - protein, 10 aa, BK virus
VQVPKLLIKG

SEQ ID NO: 2533 - protein, 10 aa, BK virus
QVPKLLIKGG

SEQ ID NO: 2534 - protein, 10 aa, BK virus
VPKLLIKGGV

SEQ ID NO: 2535 - protein, 10 aa, BK virus
PKLLIKGGVE

SEQ ID NO: 2536 - protein, 10 aa, BK virus
KLLIKGGVEV

SEQ ID NO: 2537 - protein, 10 aa, BK virus
LLIKGGVEVL

SEQ ID NO: 2538 - protein, 10 aa, BK virus
LIKGGVEVLE

SEQ ID NO: 2539 - protein, 10 aa, BK virus
IKGGVEVLEV

SEQ ID NO: 2540 - protein, 10 aa, BK virus
KGGVEVLEVK

SEQ ID NO: 2541 - protein, 10 aa, BK virus
GGVEVLEVKT

SEQ ID NO: 2542 - protein, 10 aa, BK virus
GVEVLEVKTG

SEQ ID NO: 2543 - protein, 10 aa, BK virus
VEVLEVKTGV

SEQ ID NO: 2544 - protein, 10 aa, BK virus
EVLEVKTGVD

SEQ ID NO: 2545 - protein, 10 aa, BK virus
VLEVKTGVDA

SEQ ID NO: 2546 - protein, 10 aa, BK virus
LEVKTGVDAI

SEQ ID NO: 2547 - protein, 10 aa, BK virus
EVKTGVDAIT

SEQ ID NO: 2548 - protein, 10 aa, BK virus
VKTGVDAITE

SEQ ID NO: 2549 - protein, 10 aa, BK virus
KTGVDAITEV

SEQ ID NO: 2550 - protein, 10 aa, BK virus
TGVDAITEVE

SEQ ID NO: 2551 - protein, 10 aa, BK virus
GVDAITEVEC

SEQ ID NO: 2552 - protein, 10 aa, BK virus
VDAITEVECF

SEQ ID NO: 2553 - protein, 10 aa, BK virus
DAITEVECFL

SEQ ID NO: 2554 - protein, 10 aa, BK virus
AITEVECFLN

SEQ ID NO: 2555 - protein, 10 aa, BK virus
ITEVECFLNP

SEQ ID NO: 2556 - protein, 10 aa, BK virus
TEVECFLNPE

SEQ ID NO: 2557 - protein, 10 aa, BK virus
EVECFLNPEM

SEQ ID NO: 2558 - protein, 10 aa, BK virus
VECFLNPEMG

SEQ ID NO: 2559 - protein, 10 aa, BK virus
ECFLNPEMGD

SEQ ID NO: 2560 - protein, 10 aa, BK virus
CFLNPEMGDP

SEQ ID NO: 2561 - protein, 10 aa, BK virus
FLNPEMGDPD

SEQ ID NO: 2562 - protein, 10 aa, BK virus
LNPEMGDPDE

SEQ ID NO: 2563 - protein, 10 aa, BK virus
NPEMGDPDEN

SEQ ID NO: 2564 - protein, 10 aa, BK virus
PEMGDPDENL

SEQ ID NO: 2565 - protein, 10 aa, BK virus
EMGDPDENLR

SEQ ID NO: 2566 - protein, 10 aa, BK virus
MGDPDENLRG

SEQ ID NO: 2567 - protein, 10 aa, BK virus
GDPDENLRGF

SEQ ID NO: 2568 - protein, 10 aa, BK virus
DPDENLRGFS

SEQ ID NO: 2569 - protein, 10 aa, BK virus
PDENLRGFSL

SEQ ID NO: 2570 - protein, 10 aa, BK virus
DENLRGFSLK

SEQ ID NO: 2571 - protein, 10 aa, BK virus
ENLRGFSLKL

SEQ ID NO: 2572 - protein, 10 aa, BK virus
NLRGFSLKLS

SEQ ID NO: 2573 - protein, 10 aa, BK virus
LRGFSLKLSA

SEQ ID NO: 2574 - protein, 10 aa, BK virus
RGFSLKLSAE

SEQ ID NO: 2575 - protein, 10 aa, BK virus
GFSLKLSAEN

SEQ ID NO: 2576 - protein, 10 aa, BK virus
FSLKLSAEND

SEQ ID NO: 2577 - protein, 10 aa, BK virus
SLKLSAENDF

SEQ ID NO: 2578 - protein, 10 aa, BK virus
LKLSAENDFS

SEQ ID NO: 2579 - protein, 10 aa, BK virus
KLSAENDFSS

SEQ ID NO: 2580 - protein, 10 aa, BK virus
LSAENDFSSD

SEQ ID NO: 2581 - protein, 10 aa, BK virus
SAENDFSSDS

SEQ ID NO: 2582 - protein, 10 aa, BK virus
AENDFSSDSP

SEQ ID NO: 2583 - protein, 10 aa, BK virus
ENDFSSDSPE

SEQ ID NO: 2584 - protein, 10 aa, BK virus
NDFSSDSPER

SEQ ID NO: 2585 - protein, 10 aa, BK virus
DFSSDSPERK

SEQ ID NO: 2586 - protein, 10 aa, BK virus
FSSDSPERKM

SEQ ID NO: 2587 - protein, 10 aa, BK virus
SSDSPERKML

SEQ ID NO: 2588 - protein, 10 aa, BK virus
SDSPERKMLP

SEQ ID NO: 2589 - protein, 10 aa, BK virus
DSPERKMLPC

SEQ ID NO: 2590 - protein, 10 aa, BK virus
SPERKMLPCY

SEQ ID NO: 2591 - protein, 10 aa, BK virus
PERKMLPCYS

SEQ ID NO: 2592 - protein, 10 aa, BK virus
ERKMLPCYST

SEQ ID NO: 2593 - protein, 10 aa, BK virus
RKMLPCYSTA

SEQ ID NO: 2594 - protein, 10 aa, BK virus
KMLPCYSTAR

SEQ ID NO: 2595 - protein, 10 aa, BK virus
MLPCYSTARI

SEQ ID NO: 2596 - protein, 10 aa, BK virus
LPCYSTARIP

SEQ ID NO: 2597 - protein, 10 aa, BK virus
PCYSTARIPL

SEQ ID NO: 2598 - protein, 10 aa, BK virus
CYSTARIPLP

SEQ ID NO: 2599 - protein, 10 aa, BK virus
YSTARIPLPN

SEQ ID NO: 2600 - protein, 10 aa, BK virus
STARIPLPNL

SEQ ID NO: 2601 - protein, 10 aa, BK virus
TARIPLPNLN

SEQ ID NO: 2602 - protein, 10 aa, BK virus
ARIPLPNLNE

SEQ ID NO: 2603 - protein, 10 aa, BK virus
RIPLPNLNED

SEQ ID NO: 2604 - protein, 10 aa, BK virus
IPLPNLNEDL

SEQ ID NO: 2605 - protein, 10 aa, BK virus
PLPNLNEDLT

SEQ ID NO: 2606 - protein, 10 aa, BK virus
LPNLNEDLTC

SEQ ID NO: 2607 - protein, 10 aa, BK virus
PNLNEDLTCG

SEQ ID NO: 2608 - protein, 10 aa, BK virus
NLNEDLTCGN

SEQ ID NO: 2609 - protein, 10 aa, BK virus
LNEDLTCGNL

SEQ ID NO: 2610 - protein, 10 aa, BK virus
NEDLTCGNLL

SEQ ID NO: 2611 - protein, 10 aa, BK virus
EDLTCGNLLM

SEQ ID NO: 2612 - protein, 10 aa, BK virus
DLTCGNLLMW

SEQ ID NO: 2613 - protein, 10 aa, BK virus
LTCGNLLMWE

SEQ ID NO: 2614 - protein, 10 aa, BK virus
TCGNLLMWEA

SEQ ID NO: 2615 - protein, 10 aa, BK virus
CGNLLMWEAV

SEQ ID NO: 2616 - protein, 10 aa, BK virus
GNLLMWEAVT

SEQ ID NO: 2617 - protein, 10 aa, BK virus
NLLMWEAVTV

SEQ ID NO: 2618 - protein, 10 aa, BK virus
LLMWEAVTVQ

SEQ ID NO: 2619 - protein, 10 aa, BK virus
LMWEAVTVQT

SEQ ID NO: 2620 - protein, 10 aa, BK virus
MWEAVTVQTE

SEQ ID NO: 2621 - protein, 10 aa, BK virus
WEAVTVQTEV

SEQ ID NO: 2622 - protein, 10 aa, BK virus
EAVTVQTEVI

SEQ ID NO: 2623 - protein, 10 aa, BK virus
AVTVQTEVIG

SEQ ID NO: 2624 - protein, 10 aa, BK virus
VTVQTEVIGI

SEQ ID NO: 2625 - protein, 10 aa, BK virus
TVQTEVIGIT

SEQ ID NO: 2626 - protein, 10 aa, BK virus
VQTEVIGITS

SEQ ID NO: 2627 - protein, 10 aa, BK virus
QTEVIGITSM

SEQ ID NO: 2628 - protein, 10 aa, BK virus
TEVIGITSML

SEQ ID NO: 2629 - protein, 10 aa, BK virus
EVIGITSMLN

SEQ ID NO: 2630 - protein, 10 aa, BK virus
VIGITSMLNL

SEQ ID NO: 2631 - protein, 10 aa, BK virus
IGITSMLNLH

SEQ ID NO: 2632 - protein, 10 aa, BK virus
GITSMLNLHA

SEQ ID NO: 2633 - protein, 10 aa, BK virus
ITSMLNLHAG

SEQ ID NO: 2634 - protein, 10 aa, BK virus
TSMLNLHAGS

SEQ ID NO: 2635 - protein, 10 aa, BK virus
SMLNLHAGSQ

SEQ ID NO: 2636 - protein, 10 aa, BK virus
MLNLHAGSQK

SEQ ID NO: 2637 - protein, 10 aa, BK virus
LNLHAGSQKV

SEQ ID NO: 2638 - protein, 10 aa, BK virus
NLHAGSQKVH

SEQ ID NO: 2639 - protein, 10 aa, BK virus
LHAGSQKVHE

SEQ ID NO: 2640 - protein, 10 aa, BK virus
HAGSQKVHEH

SEQ ID NO: 2641 - protein, 10 aa, BK virus
AGSQKVHEHG

SEQ ID NO: 2642 - protein, 10 aa, BK virus
GSQKVHEHGG

SEQ ID NO: 2643 - protein, 10 aa, BK virus
SQKVHEHGGG

SEQ ID NO: 2644 - protein, 10 aa, BK virus
QKVHEHGGGK

SEQ ID NO: 2645 - protein, 10 aa, BK virus
KVHEHGGGKP

SEQ ID NO: 2646 - protein, 10 aa, BK virus
VHEHGGGKPI

SEQ ID NO: 2647 - protein, 10 aa, BK virus
HEHGGGKPIQ

SEQ ID NO: 2648 - protein, 10 aa, BK virus
EHGGGKPIQG

SEQ ID NO: 2649 - protein, 10 aa, BK virus
HGGGKPIQGS

SEQ ID NO: 2650 - protein, 10 aa, BK virus
GGGKPIQGSN

SEQ ID NO: 2651 - protein, 10 aa, BK virus
GGKPIQGSNF

SEQ ID NO: 2652 - protein, 10 aa, BK virus
GKPIQGSNFH

SEQ ID NO: 2653 - protein, 10 aa, BK virus
KPIQGSNFHF

SEQ ID NO: 2654 - protein, 10 aa, BK virus
PIQGSNFHFF

SEQ ID NO: 2655 - protein, 10 aa, BK virus
IQGSNFHFFA

SEQ ID NO: 2656 - protein, 10 aa, BK virus
QGSNFHFFAV

SEQ ID NO: 2657 - protein, 10 aa, BK virus
GSNFHFFAVG

SEQ ID NO: 2658 - protein, 10 aa, BK virus
SNFHFFAVGG

SEQ ID NO: 2659 - protein, 10 aa, BK virus
NFHFFAVGGE

SEQ ID NO: 2660 - protein, 10 aa, BK virus
FHFFAVGGEP

SEQ ID NO: 2661 - protein, 10 aa, BK virus
HFFAVGGEPL

SEQ ID NO: 2662 - protein, 10 aa, BK virus
FFAVGGEPLE

SEQ ID NO: 2663 - protein, 10 aa, BK virus
FAVGGEPLEM

SEQ ID NO: 2664 - protein, 10 aa, BK virus
AVGGEPLEMQ

SEQ ID NO: 2665 - protein, 10 aa, BK virus
VGGEPLEMQG

SEQ ID NO: 2666 - protein, 10 aa, BK virus
GGEPLEMQGV

SEQ ID NO: 2667 - protein, 10 aa, BK virus
GEPLEMQGVL

SEQ ID NO: 2668 - protein, 10 aa, BK virus
EPLEMQGVLM

SEQ ID NO: 2669 - protein, 10 aa, BK virus
PLEMQGVLMN

SEQ ID NO: 2670 - protein, 10 aa, BK virus
LEMQGVLMNY

SEQ ID NO: 2671 - protein, 10 aa, BK virus
EMQGVLMNYR

SEQ ID NO: 2672 - protein, 10 aa, BK virus
MQGVLMNYRS

SEQ ID NO: 2673 - protein, 10 aa, BK virus
QGVLMNYRSK

SEQ ID NO: 2674 - protein, 10 aa, BK virus
GVLMNYRSKY

SEQ ID NO: 2675 - protein, 10 aa, BK virus
VLMNYRSKYP

SEQ ID NO: 2676 - protein, 10 aa, BK virus
LMNYRSKYPD

SEQ ID NO: 2677 - protein, 10 aa, BK virus
MNYRSKYPDG

SEQ ID NO: 2678 - protein, 10 aa, BK virus
NYRSKYPDGT

SEQ ID NO: 2679 - protein, 10 aa, BK virus
YRSKYPDGTI

SEQ ID NO: 2680 - protein, 10 aa, BK virus
RSKYPDGTIT

SEQ ID NO: 2681 - protein, 10 aa, BK virus
SKYPDGTITP

SEQ ID NO: 2682 - protein, 10 aa, BK virus
KYPDGTITPK

SEQ ID NO: 2683 - protein, 10 aa, BK virus
YPDGTITPKN

SEQ ID NO: 2684 - protein, 10 aa, BK virus
PDGTITPKNP

SEQ ID NO: 2685 - protein, 10 aa, BK virus
DGTITPKNPT

SEQ ID NO: 2686 - protein, 10 aa, BK virus
GTITPKNPTA

SEQ ID NO: 2687 - protein, 10 aa, BK virus
TITPKNPTAQ

SEQ ID NO: 2688 - protein, 10 aa, BK virus
ITPKNPTAQS

SEQ ID NO: 2689 - protein, 10 aa, BK virus
TPKNPTAQSQ

SEQ ID NO: 2690 - protein, 10 aa, BK virus
PKNPTAQSQV

SEQ ID NO: 2691 - protein, 10 aa, BK virus
KNPTAQSQVM

SEQ ID NO: 2692 - protein, 10 aa, BK virus
NPTAQSQVMN

SEQ ID NO: 2693 - protein, 10 aa, BK virus
PTAQSQVMNT

SEQ ID NO: 2694 - protein, 10 aa, BK virus
TAQSQVMNTD

SEQ ID NO: 2695 - protein, 10 aa, BK virus
AQSQVMNTDH

SEQ ID NO: 2696 - protein, 10 aa, BK virus
QSQVMNTDHK

SEQ ID NO: 2697 - protein, 10 aa, BK virus
SQVMNTDHKA

SEQ ID NO: 2698 - protein, 10 aa, BK virus
QVMNTDHKAY

SEQ ID NO: 2699 - protein, 10 aa, BK virus
VMNTDHKAYL

SEQ ID NO: 2700 - protein, 10 aa, BK virus
MNTDHKAYLD

SEQ ID NO: 2701 - protein, 10 aa, BK virus
NTDHKAYLDK

SEQ ID NO: 2702 - protein, 10 aa, BK virus
TDHKAYLDKN

SEQ ID NO: 2703 - protein, 10 aa, BK virus
DHKAYLDKNN

SEQ ID NO: 2704 - protein, 10 aa, BK virus
HKAYLDKNNA

SEQ ID NO: 2705 - protein, 10 aa, BK virus
KAYLDKNNAY

SEQ ID NO: 2706 - protein, 10 aa, BK virus
AYLDKNNAYP

SEQ ID NO: 2707 - protein, 10 aa, BK virus
YLDKNNAYPV

SEQ ID NO: 2708 - protein, 10 aa, BK virus
LDKNNAYPVE

SEQ ID NO: 2709 - protein, 10 aa, BK virus
DKNNAYPVEC

SEQ ID NO: 2710 - protein, 10 aa, BK virus
KNNAYPVECW

SEQ ID NO: 2711 - protein, 10 aa, BK virus
NNAYPVECWV

SEQ ID NO: 2712 - protein, 10 aa, BK virus
NAYPVECWVP

SEQ ID NO: 2713 - protein, 10 aa, BK virus
AYPVECWVPD

SEQ ID NO: 2714 - protein, 10 aa, BK virus
YPVECWVPDP

SEQ ID NO: 2715 - protein, 10 aa, BK virus
PVECWVPDPS

SEQ ID NO: 2716 - protein, 10 aa, BK virus
VECWVPDPSR

SEQ ID NO: 2717 - protein, 10 aa, BK virus
ECWVPDPSRN

SEQ ID NO: 2718 - protein, 10 aa, BK virus
CWVPDPSRNE

SEQ ID NO: 2719 - protein, 10 aa, BK virus
WVPDPSRNEN

SEQ ID NO: 2720 - protein, 10 aa, BK virus
VPDPSRNENA

SEQ ID NO: 2721 - protein, 10 aa, BK virus
PDPSRNENAR

SEQ ID NO: 2722 - protein, 10 aa, BK virus
DPSRNENARY

SEQ ID NO: 2723 - protein, 10 aa, BK virus
PSRNENARYF

SEQ ID NO: 2724 - protein, 10 aa, BK virus
SRNENARYFG

SEQ ID NO: 2725 - protein, 10 aa, BK virus
RNENARYFGT

SEQ ID NO: 2726 - protein, 10 aa, BK virus
NENARYFGTF

SEQ ID NO: 2727 - protein, 10 aa, BK virus
ENARYFGTFT

SEQ ID NO: 2728 - protein, 10 aa, BK virus
NARYFGTFTG

SEQ ID NO: 2729 - protein, 10 aa, BK virus
ARYFGTFTGG

SEQ ID NO: 2730 - protein, 10 aa, BK virus
RYFGTFTGGE

SEQ ID NO: 2731 - protein, 10 aa, BK virus
YFGTFTGGEN

SEQ ID NO: 2732 - protein, 10 aa, BK virus
FGTFTGGENV

SEQ ID NO: 2733 - protein, 10 aa, BK virus
GTFTGGENVP

SEQ ID NO: 2734 - protein, 10 aa, BK virus
TFTGGENVPP

SEQ ID NO: 2735 - protein, 10 aa, BK virus
FTGGENVPPV

SEQ ID NO: 2736 - protein, 10 aa, BK virus
TGGENVPPVL

SEQ ID NO: 2737 - protein, 10 aa, BK virus
GGENVPPVLH

SEQ ID NO: 2738 - protein, 10 aa, BK virus
GENVPPVLHV

SEQ ID NO: 2739 - protein, 10 aa, BK virus
ENVPPVLHVT

SEQ ID NO: 2740 - protein, 10 aa, BK virus
NVPPVLHVTN

SEQ ID NO: 2741 - protein, 10 aa, BK virus
VPPVLHVTNT

SEQ ID NO: 2742 - protein, 10 aa, BK virus
PPVLHVTNTA

SEQ ID NO: 2743 - protein, 10 aa, BK virus
PVLHVTNTAT

SEQ ID NO: 2744 - protein, 10 aa, BK virus
VLHVTNTATT

SEQ ID NO: 2745 - protein, 10 aa, BK virus
LHVTNTATTV

SEQ ID NO: 2746 - protein, 10 aa, BK virus
HVTNTATTVL

SEQ ID NO: 2747 - protein, 10 aa, BK virus
VTNTATTVLL

SEQ ID NO: 2748 - protein, 10 aa, BK virus
TNTATTVLLD

SEQ ID NO: 2749 - protein, 10 aa, BK virus
NTATTVLLDE

SEQ ID NO: 2750 - protein, 10 aa, BK virus
TATTVLLDEQ

SEQ ID NO: 2751 - protein, 10 aa, BK virus
ATTVLLDEQG

SEQ ID NO: 2752 - protein, 10 aa, BK virus
TTVLLDEQGV

SEQ ID NO: 2753 - protein, 10 aa, BK virus
TVLLDEQGVG

SEQ ID NO: 2754 - protein, 10 aa, BK virus
VLLDEQGVGP

SEQ ID NO: 2755 - protein, 10 aa, BK virus
LLDEQGVGPL

SEQ ID NO: 2756 - protein, 10 aa, BK virus
LDEQGVGPLC

SEQ ID NO: 2757 - protein, 10 aa, BK virus
DEQGVGPLCK

SEQ ID NO: 2758 - protein, 10 aa, BK virus
EQGVGPLCKA

SEQ ID NO: 2759 - protein, 10 aa, BK virus
QGVGPLCKAD

SEQ ID NO: 2760 - protein, 10 aa, BK virus
GVGPLCKADS

SEQ ID NO: 2761 - protein, 10 aa, BK virus
VGPLCKADSL

SEQ ID NO: 2762 - protein, 10 aa, BK virus
GPLCKADSLY

SEQ ID NO: 2763 - protein, 10 aa, BK virus
PLCKADSLYV

SEQ ID NO: 2764 - protein, 10 aa, BK virus
LCKADSLYVS

SEQ ID NO: 2765 - protein, 10 aa, BK virus
CKADSLYVSA

SEQ ID NO: 2766 - protein, 10 aa, BK virus
KADSLYVSAA

SEQ ID NO: 2767 - protein, 10 aa, BK virus
ADSLYVSAAD

SEQ ID NO: 2768 - protein, 10 aa, BK virus
DSLYVSAADI

SEQ ID NO: 2769 - protein, 10 aa, BK virus
SLYVSAADIC

SEQ ID NO: 2770 - protein, 10 aa, BK virus
LYVSAADICG

SEQ ID NO: 2771 - protein, 10 aa, BK virus
YVSAADICGL

SEQ ID NO: 2772 - protein, 10 aa, BK virus
VSAADICGLF

SEQ ID NO: 2773 - protein, 10 aa, BK virus
SAADICGLFT

SEQ ID NO: 2774 - protein, 10 aa, BK virus
AADICGLFTN

SEQ ID NO: 2775 - protein, 10 aa, BK virus
ADICGLFTNS

SEQ ID NO: 2776 - protein, 10 aa, BK virus
DICGLFTNSS

SEQ ID NO: 2777 - protein, 10 aa, BK virus
ICGLFTNSSG

SEQ ID NO: 2778 - protein, 10 aa, BK virus
CGLFTNSSGT

SEQ ID NO: 2779 - protein, 10 aa, BK virus
GLFTNSSGTQ

SEQ ID NO: 2780 - protein, 10 aa, BK virus
LFTNSSGTQQ

SEQ ID NO: 2781 - protein, 10 aa, BK virus
FTNSSGTQQW

SEQ ID NO: 2782 - protein, 10 aa, BK virus
TNSSGTQQWR

SEQ ID NO: 2783 - protein, 10 aa, BK virus
NSSGTQQWRG

SEQ ID NO: 2784 - protein, 10 aa, BK virus
SSGTQQWRGL

SEQ ID NO: 2785 - protein, 10 aa, BK virus
SGTQQWRGLA

SEQ ID NO: 2786 - protein, 10 aa, BK virus
GTQQWRGLAR

SEQ ID NO: 2787 - protein, 10 aa, BK virus
TQQWRGLARY

SEQ ID NO: 2788 - protein, 10 aa, BK virus
QQWRGLARYF

SEQ ID NO: 2789 - protein, 10 aa, BK virus
QWRGLARYFK

SEQ ID NO: 2790 - protein, 10 aa, BK virus
WRGLARYFKI

SEQ ID NO: 2791 - protein, 10 aa, BK virus
RGLARYFKIR

SEQ ID NO: 2792 - protein, 10 aa, BK virus
GLARYFKIRL

SEQ ID NO: 2793 - protein, 10 aa, BK virus
LARYFKIRLR

SEQ ID NO: 2794 - protein, 10 aa, BK virus
ARYFKIRLRK

SEQ ID NO: 2795 - protein, 10 aa, BK virus
RYFKIRLRKR

SEQ ID NO: 2796 - protein, 10 aa, BK virus
YFKIRLRKRS

SEQ ID NO: 2797 - protein, 10 aa, BK virus
FKIRLRKRSV

SEQ ID NO: 2798 - protein, 10 aa, BK virus
KIRLRKRSVK

SEQ ID NO: 2799 - protein, 10 aa, BK virus
IRLRKRSVKN

SEQ ID NO: 2800 - protein, 10 aa, BK virus
RLRKRSVKNP

SEQ ID NO: 2801 - protein, 10 aa, BK virus
LRKRSVKNPY

SEQ ID NO: 2802 - protein, 10 aa, BK virus
RKRSVKNPYP

SEQ ID NO: 2803 - protein, 10 aa, BK virus
KRSVKNPYPI

SEQ ID NO: 2804 - protein, 10 aa, BK virus
RSVKNPYPIS

SEQ ID NO: 2805 - protein, 10 aa, BK virus
SVKNPYPISF

SEQ ID NO: 2806 - protein, 10 aa, BK virus
VKNPYPISFL

SEQ ID NO: 2807 - protein, 10 aa, BK virus
KNPYPISFLL

SEQ ID NO: 2808 - protein, 10 aa, BK virus
NPYPISFLLS

SEQ ID NO: 2809 - protein, 10 aa, BK virus
PYPISFLLSD

SEQ ID NO: 2810 - protein, 10 aa, BK virus
YPISFLLSDL

SEQ ID NO: 2811 - protein, 10 aa, BK virus
PISFLLSDLI

SEQ ID NO: 2812 - protein, 10 aa, BK virus
ISFLLSDLIN

SEQ ID NO: 2813 - protein, 10 aa, BK virus
SFLLSDLINR

SEQ ID NO: 2814 - protein, 10 aa, BK virus
FLLSDLINRR

SEQ ID NO: 2815 - protein, 10 aa, BK virus
LLSDLINRRT

SEQ ID NO: 2816 - protein, 10 aa, BK virus
LSDLINRRTQ

SEQ ID NO: 2817 - protein, 10 aa, BK virus
SDLINRRTQR

SEQ ID NO: 2818 - protein, 10 aa, BK virus
DLINRRTQRV

SEQ ID NO: 2819 - protein, 10 aa, BK virus
LINRRTQRVD

SEQ ID NO: 2820 - protein, 10 aa, BK virus
INRRTQRVDG

SEQ ID NO: 2821 - protein, 10 aa, BK virus
NRRTQRVDGQ

SEQ ID NO: 2822 - protein, 10 aa, BK virus
RRTQRVDGQP

SEQ ID NO: 2823 - protein, 10 aa, BK virus
RTQRVDGQPM

SEQ ID NO: 2824 - protein, 10 aa, BK virus
TQRVDGQPMY

SEQ ID NO: 2825 - protein, 10 aa, BK virus
QRVDGQPMYG

SEQ ID NO: 2826 - protein, 10 aa, BK virus
RVDGQPMYGM

SEQ ID NO: 2827 - protein, 10 aa, BK virus
VDGQPMYGME

SEQ ID NO: 2828 - protein, 10 aa, BK virus
DGQPMYGMES

SEQ ID NO: 2829 - protein, 10 aa, BK virus
GQPMYGMESQ

SEQ ID NO: 2830 - protein, 10 aa, BK virus
QPMYGMESQV

SEQ ID NO: 2831 - protein, 10 aa, BK virus
PMYGMESQVE

SEQ ID NO: 2832 - protein, 10 aa, BK virus
MYGMESQVEE

SEQ ID NO: 2833 - protein, 10 aa, BK virus
YGMESQVEEV

SEQ ID NO: 2834 - protein, 10 aa, BK virus
GMESQVEEVR

SEQ ID NO: 2835 - protein, 10 aa, BK virus
MESQVEEVRV

SEQ ID NO: 2836 - protein, 10 aa, BK virus
ESQVEEVRVF

SEQ ID NO: 2837 - protein, 10 aa, BK virus
SQVEEVRVFD

SEQ ID NO: 2838 - protein, 10 aa, BK virus
QVEEVRVFDG

SEQ ID NO: 2839 - protein, 10 aa, BK virus
VEEVRVFDGT

SEQ ID NO: 2840 - protein, 10 aa, BK virus
EEVRVFDGTE

SEQ ID NO: 2841 - protein, 10 aa, BK virus
EVRVFDGTER

SEQ ID NO: 2842 - protein, 10 aa, BK virus
VRVFDGTERL

SEQ ID NO: 2843 - protein, 10 aa, BK virus
RVFDGTERLP

SEQ ID NO: 2844 - protein, 10 aa, BK virus
VFDGTERLPG

SEQ ID NO: 2845 - protein, 10 aa, BK virus
FDGTERLPGD

SEQ ID NO: 2846 - protein, 10 aa, BK virus
DGTERLPGDP

SEQ ID NO: 2847 - protein, 10 aa, BK virus
GTERLPGDPD

SEQ ID NO: 2848 - protein, 10 aa, BK virus
TERLPGDPDM

SEQ ID NO: 2849 - protein, 10 aa, BK virus
ERLPGDPDMI

SEQ ID NO: 2850 - protein, 10 aa, BK virus
RLPGDPDMIR

SEQ ID NO: 2851 - protein, 10 aa, BK virus
LPGDPDMIRY

SEQ ID NO: 2852 - protein, 10 aa, BK virus
PGDPDMIRYI

SEQ ID NO: 2853 - protein, 10 aa, BK virus
GDPDMIRYID

SEQ ID NO: 2854 - protein, 10 aa, BK virus
DPDMIRYIDK

SEQ ID NO: 2855 - protein, 10 aa, BK virus
PDMIRYIDKQ

SEQ ID NO: 2856 - protein, 10 aa, BK virus
DMIRYIDKQG

SEQ ID NO: 2857 - protein, 10 aa, BK virus
MIRYIDKQGQ

SEQ ID NO: 2858 - protein, 10 aa, BK virus
IRYIDKQGQL

SEQ ID NO: 2859 - protein, 10 aa, BK virus
RYIDKQGQLQ

SEQ ID NO: 2860 - protein, 10 aa, BK virus
YIDKQGQLQT

SEQ ID NO: 2861 - protein, 10 aa, BK virus
IDKQGQLQTK

SEQ ID NO: 2862 - protein, 10 aa, BK virus
DKQGQLQTKM

SEQ ID NO: 2863 - protein, 10 aa, BK virus
KQGQLQTKML

SEQ ID NO: 2864 - protein, 10 aa, BK virus
TGAFIVHIHL

SEQ ID NO: 2865 - protein, 10 aa, BK virus
GAFIVHIHLI

SEQ ID NO: 2866 - protein, 10 aa, BK virus
AFIVHIHLIN

SEQ ID NO: 2867 - protein, 10 aa, BK virus
FIVHIHLINA

SEQ ID NO: 2868 - protein, 10 aa, BK virus
IVHIHLINAA

SEQ ID NO: 2869 - protein, 10 aa, BK virus
VHIHLINAAF

SEQ ID NO: 2870 - protein, 10 aa, BK virus
HIHLINAAFV

SEQ ID NO: 2871 - protein, 10 aa, BK virus
ATFKLVLFWG

SEQ ID NO: 2872 - protein, 10 aa, BK virus
TFKLVLFWGW

SEQ ID NO: 2873 - protein, 10 aa, BK virus
FKLVLFWGWC

SEQ ID NO: 2874 - protein, 10 aa, BK virus
KLVLFWGWCF

SEQ ID NO: 2875 - protein, 10 aa, BK virus
LVLFWGWCFR

SEQ ID NO: 2876 - protein, 10 aa, BK virus
VLFWGWCFRP

SEQ ID NO: 2877 - protein, 10 aa, BK virus
LFWGWCFRPF

SEQ ID NO: 2878 - protein, 10 aa, BK virus
FWGWCFRPFK

SEQ ID NO: 2879 - protein, 10 aa, BK virus
WGWCFRPFKT

SEQ ID NO: 2880 - protein, 10 aa, BK virus
GWCFRPFKTL

SEQ ID NO: 2881 - protein, 10 aa, BK virus
WCFRPFKTLK

SEQ ID NO: 2882 - protein, 10 aa, BK virus
CFRPFKTLKA

SEQ ID NO: 2883 - protein, 10 aa, BK virus
FRPFKTLKAF

SEQ ID NO: 2884 - protein, 10 aa, BK virus
RPFKTLKAFT

SEQ ID NO: 2885 - protein, 10 aa, BK virus
PFKTLKAFTQ

SEQ ID NO: 2886 - protein, 10 aa, BK virus
FKTLKAFTQM

SEQ ID NO: 2887 - protein, 10 aa, BK virus
KTLKAFTQMQ

SEQ ID NO: 2888 - protein, 10 aa, BK virus
TLKAFTQMQL

SEQ ID NO: 2889 - protein, 10 aa, BK virus
LKAFTQMQLL

SEQ ID NO: 2890 - protein, 10 aa, BK virus
KAFTQMQLLT

SEQ ID NO: 2891 - protein, 10 aa, BK virus
AFTQMQLLTM

SEQ ID NO: 2892 - protein, 10 aa, BK virus
FTQMQLLTMG

SEQ ID NO: 2893 - protein, 10 aa, BK virus
TQMQLLTMGV

SEQ ID NO: 2894 - protein, 10 aa, BK virus
ILFSCNIKNT

SEQ ID NO: 2895 - protein, 10 aa, BK virus
LFSCNIKNTF

SEQ ID NO: 2896 - protein, 10 aa, BK virus
FSCNIKNTFP

SEQ ID NO: 2897 - protein, 10 aa, BK virus
SCNIKNTFPH

SEQ ID NO: 2898 - protein, 10 aa, BK virus
CNIKNTFPHA

SEQ ID NO: 2899 - protein, 10 aa, BK virus
NIKNTFPHAY

SEQ ID NO: 2900 - protein, 10 aa, BK virus
IKNTFPHAYI

SEQ ID NO: 2901 - protein, 10 aa, BK virus
KNTFPHAYII

SEQ ID NO: 2902 - protein, 10 aa, BK virus
NTFPHAYIIF

SEQ ID NO: 2903 - protein, 10 aa, BK virus
TFPHAYIIFH

SEQ ID NO: 2904 - protein, 10 aa, BK virus
FPHAYIIFHP

SEQ ID NO: 2905 - protein, 10 aa, BK virus
KSIHTYLRIQ

SEQ ID NO: 2906 - protein, 10 aa, BK virus
SIHTYLRIQP

SEQ ID NO: 2907 - protein, 10 aa, BK virus
IHTYLRIQPF

SEQ ID NO: 2908 - protein, 10 aa, BK virus
HTYLRIQPFL

SEQ ID NO: 2909 - protein, 10 aa, BK virus
TYLRIQPFLP

SEQ ID NO: 2910 - protein, 10 aa, BK virus
YLRIQPFLPF

SEQ ID NO: 2911 - protein, 10 aa, BK virus
LRIQPFLPFN

SEQ ID NO: 2912 - protein, 10 aa, BK virus
RIQPFLPFNN

SEQ ID NO: 2913 - protein, 10 aa, BK virus
IQPFLPFNNS

SEQ ID NO: 2914 - protein, 10 aa, BK virus
QPFLPFNNSR

SEQ ID NO: 2915 - protein, 10 aa, BK virus
PFLPFNNSRL

SEQ ID NO: 2916 - protein, 10 aa, BK virus
FLPFNNSRLY

SEQ ID NO: 2917 - protein, 10 aa, BK virus
LPFNNSRLYI

SEQ ID NO: 2918 - protein, 10 aa, BK virus
PFNNSRLYIS

SEQ ID NO: 2919 - protein, 10 aa, BK virus
FNNSRLYISC

SEQ ID NO: 2920 - protein, 10 aa, BK virus
NNSRLYISCK

SEQ ID NO: 2921 - protein, 10 aa, BK virus
NSRLYISCKI

SEQ ID NO: 2922 - protein, 10 aa, BK virus
SRLYISCKIS

SEQ ID NO: 2923 - protein, 10 aa, BK virus
RLYISCKISY

SEQ ID NO: 2924 - protein, 10 aa, BK virus
LYISCKISYR

SEQ ID NO: 2925 - protein, 10 aa, BK virus
YISCKISYRP

SEQ ID NO: 2926 - protein, 10 aa, BK virus
ISCKISYRPK

SEQ ID NO: 2927 - protein, 10 aa, BK virus
SCKISYRPKP

SEQ ID NO: 2928 - protein, 10 aa, BK virus
CKISYRPKPN

SEQ ID NO: 2929 - protein, 10 aa, BK virus
IYFGPKIYLS

SEQ ID NO: 2930 - protein, 10 aa, BK virus
YFGPKIYLSY

SEQ ID NO: 2931 - protein, 10 aa, BK virus
FGPKIYLSYK

SEQ ID NO: 2932 - protein, 10 aa, BK virus
GPKIYLSYKS

SEQ ID NO: 2933 - protein, 10 aa, BK virus
PKIYLSYKSS

SEQ ID NO: 2934 - protein, 10 aa, BK virus
KIYLSYKSSL

SEQ ID NO: 2935 - protein, 10 aa, BK virus
IYLSYKSSLQ

SEQ ID NO: 2936 - protein, 10 aa, BK virus
YLSYKSSLQG

SEQ ID NO: 2937 - protein, 10 aa, BK virus
LSYKSSLQGF

SEQ ID NO: 2938 - protein, 10 aa, BK virus
SYKSSLQGFR

SEQ ID NO: 2939 - protein, 10 aa, BK virus
YKSSLQGFRD

SEQ ID NO: 2940 - protein, 10 aa, BK virus
KSSLQGFRDR

SEQ ID NO: 2941 - protein, 10 aa, BK virus
SSLQGFRDRI

SEQ ID NO: 2942 - protein, 10 aa, BK virus
SLQGFRDRIL

SEQ ID NO: 2943 - protein, 10 aa, BK virus
LQGFRDRILI

SEQ ID NO: 2944 - protein, 10 aa, BK virus
QGFRDRILIH

SEQ ID NO: 2945 - protein, 10 aa, BK virus
GFRDRILIHC

SEQ ID NO: 2946 - protein, 10 aa, BK virus
FRDRILIHCN

SEQ ID NO: 2947 - protein, 10 aa, BK virus
RDRILIHCNQ

SEQ ID NO: 2948 - protein, 10 aa, BK virus
DRILIHCNQA

SEQ ID NO: 2949 - protein, 10 aa, BK virus
RILIHCNQAW

SEQ ID NO: 2950 - protein, 10 aa, BK virus
ILIHCNQAWW

SEQ ID NO: 2951 - protein, 10 aa, BK virus
LIHCNQAWWK

SEQ ID NO: 2952 - protein, 10 aa, BK virus
IHCNQAWWKY

SEQ ID NO: 2953 - protein, 10 aa, BK virus
HCNQAWWKYL

SEQ ID NO: 2954 - protein, 10 aa, BK virus
CNQAWWKYLG

SEQ ID NO: 2955 - protein, 10 aa, BK virus
NQAWWKYLGS

SEQ ID NO: 2956 - protein, 10 aa, BK virus
QAWWKYLGSF

SEQ ID NO: 2957 - protein, 10 aa, BK virus
AWWKYLGSFV

SEQ ID NO: 2958 - protein, 10 aa, BK virus
FSSCPFYIFK

SEQ ID NO: 2959 - protein, 10 aa, BK virus
SSCPFYIFKN

SEQ ID NO: 2960 - protein, 10 aa, BK virus
SCPFYIFKNN

SEQ ID NO: 2961 - protein, 10 aa, BK virus
CPFYIFKNNH

SEQ ID NO: 2962 - protein, 10 aa, BK virus
PFYIFKNNHV

SEQ ID NO: 2963 - protein, 10 aa, BK virus
FYIFKNNHVL

SEQ ID NO: 2964 - protein, 10 aa, BK virus
YIFKNNHVLI

SEQ ID NO: 2965 - protein, 10 aa, BK virus
IFKNNHVLIY

SEQ ID NO: 2966 - protein, 10 aa, BK virus
FKNNHVLIYS

SEQ ID NO: 2967 - protein, 10 aa, BK virus
KNNHVLIYSY

SEQ ID NO: 2968 - protein, 10 aa, BK virus
NNHVLIYSYT

SEQ ID NO: 2969 - protein, 10 aa, BK virus
CCFSTINGTF

SEQ ID NO: 2970 - protein, 10 aa, BK virus
CFSTINGTFK

SEQ ID NO: 2971 - protein, 10 aa, BK virus
PVSSFRYIEN

SEQ ID NO: 2972 - protein, 10 aa, BK virus
VSSFRYIENN

SEQ ID NO: 2973 - protein, 10 aa, BK virus
SSFRYIENNT

SEQ ID NO: 2974 - protein, 10 aa, BK virus
SFRYIENNTV

SEQ ID NO: 2975 - protein, 10 aa, BK virus
FRYIENNTVQ

SEQ ID NO: 2976 - protein, 10 aa, BK virus
RYIENNTVQK

SEQ ID NO: 2977 - protein, 10 aa, BK virus
YIENNTVQKI

SEQ ID NO: 2978 - protein, 10 aa, BK virus
IENNTVQKIK

SEQ ID NO: 2979 - protein, 10 aa, BK virus
ENNTVQKIKY

SEQ ID NO: 2980 - protein, 10 aa, BK virus
NNTVQKIKYY

SEQ ID NO: 2981 - protein, 10 aa, BK virus
NTVQKIKYYR

SEQ ID NO: 2982 - protein, 10 aa, BK virus
TVQKIKYYRI

SEQ ID NO: 2983 - protein, 10 aa, BK virus
VQKIKYYRIH

SEQ ID NO: 2984 - protein, 10 aa, BK virus
QKIKYYRIHF

SEQ ID NO: 2985 - protein, 10 aa, BK virus
KIKYYRIHFR

SEQ ID NO: 2986 - protein, 10 aa, BK virus
QTVQPSNTCH

SEQ ID NO: 2987 - protein, 10 aa, BK virus
TVQPSNTCHI

SEQ ID NO: 2988 - protein, 10 aa, BK virus
VQPSNTCHIL

SEQ ID NO: 2989 - protein, 10 aa, BK virus
QPSNTCHILF

SEQ ID NO: 2990 - protein, 10 aa, BK virus
HFFPGHMKGI

SEQ ID NO: 2991 - protein, 10 aa, BK virus
FFPGHMKGIY

SEQ ID NO: 2992 - protein, 10 aa, BK virus
FPGHMKGIYS

SEQ ID NO: 2993 - protein, 10 aa, BK virus
PGHMKGIYSF

SEQ ID NO: 2994 - protein, 10 aa, BK virus
GHMKGIYSFF

SEQ ID NO: 2995 - protein, 10 aa, BK virus
HMKGIYSFFS

SEQ ID NO: 2996 - protein, 10 aa, BK virus
NCIYCLLTNT

SEQ ID NO: 2997 - protein, 10 aa, BK virus
CIYCLLTNTF

SEQ ID NO: 2998 - protein, 10 aa, BK virus
IYCLLTNTFL

SEQ ID NO: 2999 - protein, 10 aa, BK virus
YCLLTNTFLI

SEQ ID NO: 3000 - protein, 10 aa, BK virus
CLLTNTFLIF

SEQ ID NO: 3001 - protein, 10 aa, BK virus
LLTNTFLIFT

SEQ ID NO: 3002 - protein, 10 aa, BK virus
LTNTFLIFTF

SEQ ID NO: 3003 - protein, 10 aa, BK virus
TNTFLIFTFC

SEQ ID NO: 3004 - protein, 10 aa, BK virus
NTFLIFTFCK

SEQ ID NO: 3005 - protein, 10 aa, BK virus
TFLIFTFCKN

SEQ ID NO: 3006 - protein, 10 aa, BK virus
FLIFTFCKNN

SEQ ID NO: 3007 - protein, 10 aa, BK virus
LIFTFCKNNS

SEQ ID NO: 3008 - protein, 10 aa, BK virus
IFTFCKNNSI

SEQ ID NO: 3009 - protein, 10 aa, BK virus
FTFCKNNSIC

SEQ ID NO: 3010 - protein, 10 aa, BK virus
TFCKNNSICK

SEQ ID NO: 3011 - protein, 10 aa, BK virus
FCKNNSICKV

SEQ ID NO: 3012 - protein, 10 aa, BK virus
CKNNSICKVL

SEQ ID NO: 3013 - protein, 10 aa, BK virus
KNNSICKVLF

SEQ ID NO: 3014 - protein, 10 aa, BK virus
NNSICKVLFM

SEQ ID NO: 3015 - protein, 10 aa, BK virus
NSICKVLFMI

SEQ ID NO: 3016 - protein, 10 aa, BK virus
SICKVLFMIL

SEQ ID NO: 3017 - protein, 10 aa, BK virus
ICKVLFMILK

SEQ ID NO: 3018 - protein, 10 aa, BK virus
CKVLFMILKV

SEQ ID NO: 3019 - protein, 10 aa, BK virus
KVLFMILKVI

SEQ ID NO: 3020 - protein, 10 aa, BK virus
VLFMILKVIR

SEQ ID NO: 3021 - protein, 10 aa, BK virus
LFMILKVIRL

SEQ ID NO: 3022 - protein, 10 aa, BK virus
FMILKVIRLV

SEQ ID NO: 3023 - protein, 10 aa, BK virus
MILKVIRLVF

SEQ ID NO: 3024 - protein, 10 aa, BK virus
ILKVIRLVFF

SEQ ID NO: 3025 - protein, 10 aa, BK virus
LKVIRLVFFL

SEQ ID NO: 3026 - protein, 10 aa, BK virus
KVIRLVFFLT

SEQ ID NO: 3027 - protein, 10 aa, BK virus
VIRLVFFLTL

SEQ ID NO: 3028 - protein, 10 aa, BK virus
IRLVFFLTLF

SEQ ID NO: 3029 - protein, 10 aa, BK virus
RLVFFLTLFT

SEQ ID NO: 3030 - protein, 10 aa, BK virus
LVFFLTLFTL

SEQ ID NO: 3031 - protein, 10 aa, BK virus
VFFLTLFTLL

SEQ ID NO: 3032 - protein, 10 aa, BK virus
FFLTLFTLLY

SEQ ID NO: 3033 - protein, 10 aa, BK virus
FLTLFTLLYI

SEQ ID NO: 3034 - protein, 10 aa, BK virus
LTLFTLLYIV

SEQ ID NO: 3035 - protein, 10 aa, BK virus
TLFTLLYIVL

SEQ ID NO: 3036 - protein, 10 aa, BK virus
LFTLLYIVLK

SEQ ID NO: 3037 - protein, 10 aa, BK virus
FTLLYIVLKF

SEQ ID NO: 3038 - protein, 10 aa, BK virus
KHILTLCLYC

SEQ ID NO: 3039 - protein, 10 aa, BK virus
HILTLCLYCI

SEQ ID NO: 3040 - protein, 10 aa, BK virus
ILTLCLYCIL

SEQ ID NO: 3041 - protein, 10 aa, BK virus
LTLCLYCILS

SEQ ID NO: 3042 - protein, 10 aa, BK virus
TLCLYCILSN

SEQ ID NO: 3043 - protein, 10 aa, BK virus
FPRHLLCFFR

SEQ ID NO: 3044 - protein, 10 aa, BK virus
PRHLLCFFRL

SEQ ID NO: 3045 - protein, 10 aa, BK virus
RHLLCFFRLF

SEQ ID NO: 3046 - protein, 10 aa, BK virus
HLLCFFRLFW

SEQ ID NO: 3047 - protein, 10 aa, BK virus
LLCFFRLFWA

SEQ ID NO: 3048 - protein, 10 aa, BK virus
LCFFRLFWAK

SEQ ID NO: 3049 - protein, 10 aa, BK virus
CFFRLFWAKI

SEQ ID NO: 3050 - protein, 10 aa, BK virus
FFRLFWAKIM

SEQ ID NO: 3051 - protein, 10 aa, BK virus
FRLFWAKIML

SEQ ID NO: 3052 - protein, 10 aa, BK virus
RLFWAKIMLL

SEQ ID NO: 3053 - protein, 10 aa, BK virus
APLNAFFYSM

SEQ ID NO: 3054 - protein, 10 aa, BK virus
PLNAFFYSMV

SEQ ID NO: 3055 - protein, 10 aa, BK virus
LNAFFYSMVW

SEQ ID NO: 3056 - protein, 10 aa, BK virus
NAFFYSMVWI

SEQ ID NO: 3057 - protein, 10 aa, BK virus
AFFYSMVWIS

SEQ ID NO: 3058 - protein, 10 aa, BK virus
FFYSMVWISS

SEQ ID NO: 3059 - protein, 10 aa, BK virus
KTKGTQLLTE

SEQ ID NO: 3060 - protein, 10 aa, BK virus
TKGTQLLTEI

SEQ ID NO: 3061 - protein, 10 aa, BK virus
KGTQLLTEII

SEQ ID NO: 3062 - protein, 10 aa, BK virus
GTQLLTEIIN

SEQ ID NO: 3063 - protein, 10 aa, BK virus
TQLLTEIINC

SEQ ID NO: 3064 - protein, 10 aa, BK virus
QLLTEIINCR

SEQ ID NO: 3065 - protein, 10 aa, BK virus
LLTEIINCRN

SEQ ID NO: 3066 - protein, 10 aa, BK virus
LTEIINCRNS

SEQ ID NO: 3067 - protein, 10 aa, BK virus
TEIINCRNSM

SEQ ID NO: 3068 - protein, 10 aa, BK virus
EIINCRNSMS

SEQ ID NO: 3069 - protein, 10 aa, BK virus
IINCRNSMSM

SEQ ID NO: 3070 - protein, 10 aa, BK virus
INCRNSMSMW

SEQ ID NO: 3071 - protein, 10 aa, BK virus
NCRNSMSMWS

SEQ ID NO: 3072 - protein, 10 aa, BK virus
KEYNIMPSTH

SEQ ID NO: 3073 - protein, 10 aa, BK virus
EYNIMPSTHV

SEQ ID NO: 3074 - protein, 10 aa, BK virus
YNIMPSTHVS

SEQ ID NO: 3075 - protein, 10 aa, BK virus
NIMPSTHVST

SEQ ID NO: 3076 - protein, 10 aa, BK virus
IMPSTHVSTN

SEQ ID NO: 3077 - protein, 10 aa, BK virus
MPSTHVSTNK

SEQ ID NO: 3078 - protein, 10 aa, BK virus
PSTHVSTNKS

SEQ ID NO: 3079 - protein, 10 aa, BK virus
STHVSTNKSY

SEQ ID NO: 3080 - protein, 10 aa, BK virus
THVSTNKSYR

SEQ ID NO: 3081 - protein, 10 aa, BK virus
HVSTNKSYRI

SEQ ID NO: 3082 - protein, 10 aa, BK virus
VSTNKSYRIF

SEQ ID NO: 3083 - protein, 10 aa, BK virus
STNKSYRIFF

SEQ ID NO: 3084 - protein, 10 aa, BK virus
TNKSYRIFFH

SEQ ID NO: 3085 - protein, 10 aa, BK virus
NKSYRIFFHK

SEQ ID NO: 3086 - protein, 10 aa, BK virus
KSYRIFFHKF

SEQ ID NO: 3087 - protein, 10 aa, BK virus
SYRIFFHKFF

SEQ ID NO: 3088 - protein, 10 aa, BK virus
YRIFFHKFFI

SEQ ID NO: 3089 - protein, 10 aa, BK virus
RIFFHKFFIQ

SEQ ID NO: 3090 - protein, 10 aa, BK virus
IFFHKFFIQN

SEQ ID NO: 3091 - protein, 10 aa, BK virus
FFHKFFIQNL

SEQ ID NO: 3092 - protein, 10 aa, BK virus
FHKFFIQNLS

SEQ ID NO: 3093 - protein, 10 aa, BK virus
HKFFIQNLSF

SEQ ID NO: 3094 - protein, 10 aa, BK virus
KFFIQNLSFF

SEQ ID NO: 3095 - protein, 10 aa, BK virus
FFIQNLSFFF

SEQ ID NO: 3096 - protein, 10 aa, BK virus
FIQNLSFFFS

SEQ ID NO: 3097 - protein, 10 aa, BK virus
IQNLSFFFSS

SEQ ID NO: 3098 - protein, 10 aa, BK virus
QNLSFFFSSI

SEQ ID NO: 3099 - protein, 10 aa, BK virus
NLSFFFSSIH

SEQ ID NO: 3100 - protein, 10 aa, BK virus
LSFFFSSIHS

SEQ ID NO: 3101 - protein, 10 aa, BK virus
SFFFSSIHSK

SEQ ID NO: 3102 - protein, 10 aa, BK virus
FFFSSIHSKA

SEQ ID NO: 3103 - protein, 10 aa, BK virus
FFSSIHSKAG

SEQ ID NO: 3104 - protein, 10 aa, BK virus
FSSIHSKAGK

SEQ ID NO: 3105 - protein, 10 aa, BK virus
SSIHSKAGKG

SEQ ID NO: 3106 - protein, 10 aa, BK virus
SIHSKAGKGS

SEQ ID NO: 3107 - protein, 10 aa, BK virus
IHSKAGKGSI

SEQ ID NO: 3108 - protein, 10 aa, BK virus
HSKAGKGSIT

SEQ ID NO: 3109 - protein, 10 aa, BK virus
SKAGKGSITK

SEQ ID NO: 3110 - protein, 10 aa, BK virus
KAGKGSITKY

SEQ ID NO: 3111 - protein, 10 aa, BK virus
AGKGSITKYS

SEQ ID NO: 3112 - protein, 10 aa, BK virus
GKGSITKYSL

SEQ ID NO: 3113 - protein, 10 aa, BK virus
KGSITKYSLT

SEQ ID NO: 3114 - protein, 10 aa, BK virus
GSITKYSLTK

SEQ ID NO: 3115 - protein, 10 aa, BK virus
SITKYSLTKK

SEQ ID NO: 3116 - protein, 10 aa, BK virus
ITKYSLTKKL

SEQ ID NO: 3117 - protein, 10 aa, BK virus
TKYSLTKKLV

SEQ ID NO: 3118 - protein, 10 aa, BK virus
IRGKVFRVFY

SEQ ID NO: 3119 - protein, 10 aa, BK virus
RGKVFRVFYL

SEQ ID NO: 3120 - protein, 10 aa, BK virus
GKVFRVFYLS

SEQ ID NO: 3121 - protein, 10 aa, BK virus
KVFRVFYLSF

SEQ ID NO: 3122 - protein, 10 aa, BK virus
VFRVFYLSFF

SEQ ID NO: 3123 - protein, 10 aa, BK virus
FRVFYLSFFF

SEQ ID NO: 3124 - protein, 10 aa, BK virus
RVFYLSFFFG

SEQ ID NO: 3125 - protein, 10 aa, BK virus
VFYLSFFFGW

SEQ ID NO: 3126 - protein, 10 aa, BK virus
FYLSFFFGWC

SEQ ID NO: 3127 - protein, 10 aa, BK virus
VLRICCCFFI

SEQ ID NO: 3128 - protein, 10 aa, BK virus
LRICCCFFIT

SEQ ID NO: 3129 - protein, 10 aa, BK virus
RICCCFFITG

SEQ ID NO: 3130 - protein, 10 aa, BK virus
ICCCFFITGK

SEQ ID NO: 3131 - protein, 10 aa, BK virus
CCCFFITGKH

SEQ ID NO: 3132 - protein, 10 aa, BK virus
CCFFITGKHI

SEQ ID NO: 3133 - protein, 10 aa, BK virus
CFFITGKHIF

SEQ ID NO: 3134 - protein, 10 aa, BK virus
FFITGKHIFM

SEQ ID NO: 3135 - protein, 10 aa, BK virus
FITGKHIFMA

SEQ ID NO: 3136 - protein, 10 aa, BK virus
ITGKHIFMAK

SEQ ID NO: 3137 - protein, 10 aa, BK virus
IFIPFFIKGT

SEQ ID NO: 3138 - protein, 10 aa, BK virus
FIPFFIKGTP

SEQ ID NO: 3139 - protein, 10 aa, BK virus
IPFFIKGTPP

SEQ ID NO: 3140 - protein, 10 aa, BK virus
PFFIKGTPPG

SEQ ID NO: 3141 - protein, 10 aa, BK virus
FFIKGTPPGL

SEQ ID NO: 3142 - protein, 10 aa, BK virus
FIKGTPPGLP

SEQ ID NO: 3143 - protein, 10 aa, BK virus
IKGTPPGLPL

SEQ ID NO: 3144 - protein, 10 aa, BK virus
KGTPPGLPLF

SEQ ID NO: 3145 - protein, 10 aa, BK virus
GTPPGLPLFC

SEQ ID NO: 3146 - protein, 10 aa, BK virus
TPPGLPLFCS

SEQ ID NO: 3147 - protein, 10 aa, BK virus
PPGLPLFCSI

SEQ ID NO: 3148 - protein, 10 aa, BK virus
PGLPLFCSIG

SEQ ID NO: 3149 - protein, 10 aa, BK virus
GLPLFCSIGW

SEQ ID NO: 3150 - protein, 10 aa, BK virus
LPLFCSIGWH

SEQ ID NO: 3151 - protein, 10 aa, BK virus
PLFCSIGWHL

SEQ ID NO: 3152 - protein, 10 aa, BK virus
SFRSLKGVSP

SEQ ID NO: 3153 - protein, 10 aa, BK virus
FRSLKGVSPI

SEQ ID NO: 3154 - protein, 10 aa, BK virus
RSLKGVSPII

SEQ ID NO: 3155 - protein, 10 aa, BK virus
SLKGVSPIIW

SEQ ID NO: 3156 - protein, 10 aa, BK virus
LKGVSPIIWT

SEQ ID NO: 3157 - protein, 10 aa, BK virus
KGVSPIIWTH

SEQ ID NO: 3158 - protein, 10 aa, BK virus
GVSPIIWTHH

SEQ ID NO: 3159 - protein, 10 aa, BK virus
VSPIIWTHHC

SEQ ID NO: 3160 - protein, 10 aa, BK virus
SPIIWTHHCR

SEQ ID NO: 3161 - protein, 10 aa, BK virus
PIIWTHHCRV

SEQ ID NO: 3162 - protein, 10 aa, BK virus
IIWTHHCRVS

SEQ ID NO: 3163 - protein, 10 aa, BK virus
IWTHHCRVSS

SEQ ID NO: 3164 - protein, 10 aa, BK virus
WTHHCRVSSV

SEQ ID NO: 3165 - protein, 10 aa, BK virus
THHCRVSSVR

SEQ ID NO: 3166 - protein, 10 aa, BK virus
HHCRVSSVRS

SEQ ID NO: 3167 - protein, 10 aa, BK virus
HCRVSSVRSK

SEQ ID NO: 3168 - protein, 10 aa, BK virus
CRVSSVRSKP

SEQ ID NO: 3169 - protein, 10 aa, BK virus
RVSSVRSKPN

SEQ ID NO: 3170 - protein, 10 aa, BK virus
VSSVRSKPNH

SEQ ID NO: 3171 - protein, 10 aa, BK virus
SSVRSKPNHC

SEQ ID NO: 3172 - protein, 10 aa, BK virus
SVRSKPNHCV

SEQ ID NO: 3173 - protein, 10 aa, BK virus
VRSKPNHCVK

SEQ ID NO: 3174 - protein, 10 aa, BK virus
RSKPNHCVKQ

SEQ ID NO: 3175 - protein, 10 aa, BK virus
SKPNHCVKQS

SEQ ID NO: 3176 - protein, 10 aa, BK virus
KPNHCVKQSM

SEQ ID NO: 3177 - protein, 10 aa, BK virus
PNHCVKQSMQ

SEQ ID NO: 3178 - protein, 10 aa, BK virus
QSIQTKGSFL

SEQ ID NO: 3179 - protein, 10 aa, BK virus
SIQTKGSFLK

SEQ ID NO: 3180 - protein, 10 aa, BK virus
IQTKGSFLKN

SEQ ID NO: 3181 - protein, 10 aa, BK virus
QTKGSFLKNF

SEQ ID NO: 3182 - protein, 10 aa, BK virus
TKGSFLKNFL

SEQ ID NO: 3183 - protein, 10 aa, BK virus
KGSFLKNFLF

SEQ ID NO: 3184 - protein, 10 aa, BK virus
GSFLKNFLFK

SEQ ID NO: 3185 - protein, 10 aa, BK virus
SFLKNFLFKC

SEQ ID NO: 3186 - protein, 10 aa, BK virus
FLKNFLFKCL

SEQ ID NO: 3187 - protein, 10 aa, BK virus
LKNFLFKCLN

SEQ ID NO: 3188 - protein, 10 aa, BK virus
KNFLFKCLNL

SEQ ID NO: 3189 - protein, 10 aa, BK virus
NFLFKCLNLS

SEQ ID NO: 3190 - protein, 10 aa, BK virus
HSMQGQCTEG

SEQ ID NO: 3191 - protein, 10 aa, BK virus
SMQGQCTEGF

SEQ ID NO: 3192 - protein, 10 aa, BK virus
MQGQCTEGFL

SEQ ID NO: 3193 - protein, 10 aa, BK virus
QGQCTEGFLE

SEQ ID NO: 3194 - protein, 10 aa, BK virus
GQCTEGFLEQ

SEQ ID NO: 3195 - protein, 10 aa, BK virus
QCTEGFLEQI

SEQ ID NO: 3196 - protein, 10 aa, BK virus
CTEGFLEQIG

SEQ ID NO: 3197 - protein, 10 aa, BK virus
TEGFLEQIGH

SEQ ID NO: 3198 - protein, 10 aa, BK virus
EGFLEQIGHS

SEQ ID NO: 3199 - protein, 10 aa, BK virus
GFLEQIGHSL

SEQ ID NO: 3200 - protein, 10 aa, BK virus
FLEQIGHSLQ

SEQ ID NO: 3201 - protein, 10 aa, BK virus
LEQIGHSLQY

SEQ ID NO: 3202 - protein, 10 aa, BK virus
EQIGHSLQYR

SEQ ID NO: 3203 - protein, 10 aa, BK virus
QIGHSLQYRV

SEQ ID NO: 3204 - protein, 10 aa, BK virus
IGHSLQYRVS

SEQ ID NO: 3205 - protein, 10 aa, BK virus
GHSLQYRVSG

SEQ ID NO: 3206 - protein, 10 aa, BK virus
HSLQYRVSGQ

SEQ ID NO: 3207 - protein, 10 aa, BK virus
SLQYRVSGQR

SEQ ID NO: 3208 - protein, 10 aa, BK virus
LQYRVSGQRG

SEQ ID NO: 3209 - protein, 10 aa, BK virus
QYRVSGQRGK

SEQ ID NO: 3210 - protein, 10 aa, BK virus
YRVSGQRGKS

SEQ ID NO: 3211 - protein, 10 aa, BK virus
RVSGQRGKSA

SEQ ID NO: 3212 - protein, 10 aa, BK virus
VSGQRGKSAQ

SEQ ID NO: 3213 - protein, 10 aa, BK virus
SGQRGKSAQT

SEQ ID NO: 3214 - protein, 10 aa, BK virus
GQRGKSAQTS

SEQ ID NO: 3215 - protein, 10 aa, BK virus
QRGKSAQTSE

SEQ ID NO: 3216 - protein, 10 aa, BK virus
RGKSAQTSEL

SEQ ID NO: 3217 - protein, 10 aa, BK virus
GKSAQTSELL

SEQ ID NO: 3218 - protein, 10 aa, BK virus
KSAQTSELLQ

SEQ ID NO: 3219 - protein, 10 aa, BK virus
SAQTSELLQV

SEQ ID NO: 3220 - protein, 10 aa, BK virus
AQTSELLQVP

SEQ ID NO: 3221 - protein, 10 aa, BK virus
QTSELLQVPK

SEQ ID NO: 3222 - protein, 10 aa, BK virus
TSELLQVPKS

SEQ ID NO: 3223 - protein, 10 aa, BK virus
SELLQVPKSG

SEQ ID NO: 3224 - protein, 10 aa, BK virus
ATFTSCSIFL

SEQ ID NO: 3225 - protein, 10 aa, BK virus
TFTSCSIFLY

SEQ ID NO: 3226 - protein, 10 aa, BK virus
FTSCSIFLYK

SEQ ID NO: 3227 - protein, 10 aa, BK virus
TSCSIFLYKV

SEQ ID NO: 3228 - protein, 10 aa, BK virus
SCSIFLYKVF

SEQ ID NO: 3229 - protein, 10 aa, BK virus
CSIFLYKVFI

SEQ ID NO: 3230 - protein, 10 aa, BK virus
SIFLYKVFIL

SEQ ID NO: 3231 - protein, 10 aa, BK virus
IFLYKVFILF

SEQ ID NO: 3232 - protein, 10 aa, BK virus
FLYKVFILFI

SEQ ID NO: 3233 - protein, 10 aa, BK virus
LYKVFILFIL

SEQ ID NO: 3234 - protein, 10 aa, BK virus
YKVFILFILS

SEQ ID NO: 3235 - protein, 10 aa, BK virus
KVFILFILSS

SEQ ID NO: 3236 - protein, 10 aa, BK virus
VFILFILSSS

SEQ ID NO: 3237 - protein, 10 aa, BK virus
FILFILSSSP

SEQ ID NO: 3238 - protein, 10 aa, BK virus
ILFILSSSPP

SEQ ID NO: 3239 - protein, 10 aa, BK virus
LFILSSSPPL

SEQ ID NO: 3240 - protein, 10 aa, BK virus
FILSSSPPLS

SEQ ID NO: 3241 - protein, 10 aa, BK virus
ILSSSPPLSG

SEQ ID NO: 3242 - protein, 10 aa, BK virus
AFLIKGRFPQ

SEQ ID NO: 3243 - protein, 10 aa, BK virus
FLIKGRFPQA

SEQ ID NO: 3244 - protein, 10 aa, BK virus
LIKGRFPQAA

SEQ ID NO: 3245 - protein, 10 aa, BK virus
IKGRFPQAAL

SEQ ID NO: 3246 - protein, 10 aa, BK virus
KGRFPQAALS

SEQ ID NO: 3247 - protein, 10 aa, BK virus
GRFPQAALSR

SEQ ID NO: 3248 - protein, 10 aa, BK virus
RFPQAALSRP

SEQ ID NO: 3249 - protein, 10 aa, BK virus
FPQAALSRPK

SEQ ID NO: 3250 - protein, 10 aa, BK virus
PQAALSRPKR

SEQ ID NO: 3251 - protein, 10 aa, BK virus
QAALSRPKRS

SEQ ID NO: 3252 - protein, 10 aa, BK virus
AALSRPKRSM

SEQ ID NO: 3253 - protein, 10 aa, BK virus
ALSRPKRSMS

SEQ ID NO: 3254 - protein, 10 aa, BK virus
LSRPKRSMSS

SEQ ID NO: 3255 - protein, 10 aa, BK virus
SRPKRSMSSM

SEQ ID NO: 3256 - protein, 10 aa, BK virus
RPKRSMSSMD

SEQ ID NO: 3257 - protein, 10 aa, BK virus
PKRSMSSMDS

SEQ ID NO: 3258 - protein, 10 aa, BK virus
KRSMSSMDSS

SEQ ID NO: 3259 - protein, 10 aa, BK virus
RSMSSMDSSL

SEQ ID NO: 3260 - protein, 10 aa, BK virus
SMSSMDSSLL

SEQ ID NO: 3261 - protein, 10 aa, BK virus
MSSMDSSLLR

SEQ ID NO: 3262 - protein, 10 aa, BK virus
SSMDSSLLRT

SEQ ID NO: 3263 - protein, 10 aa, BK virus
SMDSSLLRTL

SEQ ID NO: 3264 - protein, 10 aa, BK virus
MDSSLLRTLS

SEQ ID NO: 3265 - protein, 11 aa, BK virus
FCKNCKRIGIS

SEQ ID NO: 3266 - protein, 11 aa, BK virus
CKNCKRIGISP

SEQ ID NO: 3267 - protein, 11 aa, BK virus
KNCKRIGISPN

SEQ ID NO: 3268 - protein, 11 aa, BK virus
NCKRIGISPNS

SEQ ID NO: 3269 - protein, 11 aa, BK virus
CKRIGISPNSF

SEQ ID NO: 3270 - protein, 11 aa, BK virus
KRIGISPNSFA

SEQ ID NO: 3271 - protein, 11 aa, BK virus
RIGISPNSFAR

SEQ ID NO: 3272 - protein, 11 aa, BK virus
IGISPNSFARP

SEQ ID NO: 3273 - protein, 11 aa, BK virus
GISPNSFARPQ

SEQ ID NO: 3274 - protein, 11 aa, BK virus
ISPNSFARPQK

SEQ ID NO: 3275 - protein, 11 aa, BK virus
SPNSFARPQKK

SEQ ID NO: 3276 - protein, 11 aa, BK virus
PNSFARPQKKP

SEQ ID NO: 3277 - protein, 11 aa, BK virus
NSFARPQKKPP

SEQ ID NO: 3278 - protein, 11 aa, BK virus
SFARPQKKPPH

SEQ ID NO: 3279 - protein, 11 aa, BK virus
FARPQKKPPHP

SEQ ID NO: 3280 - protein, 11 aa, BK virus
ARPQKKPPHPY

SEQ ID NO: 3281 - protein, 11 aa, BK virus
RPQKKPPHPYY

SEQ ID NO: 3282 - protein, 11 aa, BK virus
PQKKPPHPYYL

SEQ ID NO: 3283 - protein, 11 aa, BK virus
QKKPPHPYYLR

SEQ ID NO: 3284 - protein, 11 aa, BK virus
KKPPHPYYLRE

SEQ ID NO: 3285 - protein, 11 aa, BK virus
KPPHPYYLRER

SEQ ID NO: 3286 - protein, 11 aa, BK virus
PPHPYYLRERV

SEQ ID NO: 3287 - protein, 11 aa, BK virus
PHPYYLRERVE

SEQ ID NO: 3288 - protein, 11 aa, BK virus
HPYYLRERVEA

SEQ ID NO: 3289 - protein, 11 aa, BK virus
PYYLRERVEAE

SEQ ID NO: 3290 - protein, 11 aa, BK virus
YYLRERVEAEA

SEQ ID NO: 3291 - protein, 11 aa, BK virus
YLRERVEAEAA

SEQ ID NO: 3292 - protein, 11 aa, BK virus
LRERVEAEAAS

SEQ ID NO: 3293 - protein, 11 aa, BK virus
RERVEAEAASA

SEQ ID NO: 3294 - protein, 11 aa, BK virus
ERVEAEAASAS

SEQ ID NO: 3295 - protein, 11 aa, BK virus
RVEAEAASASY

SEQ ID NO: 3296 - protein, 11 aa, BK virus
VEAEAASASYI

SEQ ID NO: 3297 - protein, 11 aa, BK virus
EAEAASASYIL

SEQ ID NO: 3298 - protein, 11 aa, BK virus
KKRPQGGAAYP

SEQ ID NO: 3299 - protein, 11 aa, BK virus
KRPQGGAAYPW

SEQ ID NO: 3300 - protein, 11 aa, BK virus
RPQGGAAYPWN

SEQ ID NO: 3301 - protein, 11 aa, BK virus
PQGGAAYPWNA

SEQ ID NO: 3302 - protein, 11 aa, BK virus
QGGAAYPWNAA

SEQ ID NO: 3303 - protein, 11 aa, BK virus
GGAAYPWNAAK

SEQ ID NO: 3304 - protein, 11 aa, BK virus
GAAYPWNAAKP

SEQ ID NO: 3305 - protein, 11 aa, BK virus
PQEGKCMTHRG

SEQ ID NO: 3306 - protein, 11 aa, BK virus
QEGKCMTHRGM

SEQ ID NO: 3307 - protein, 11 aa, BK virus
EGKCMTHRGMQ

SEQ ID NO: 3308 - protein, 11 aa, BK virus
GKCMTHRGMQP

SEQ ID NO: 3309 - protein, 11 aa, BK virus
KCMTHRGMQPN

SEQ ID NO: 3310 - protein, 11 aa, BK virus
CMTHRGMQPNH

SEQ ID NO: 3311 - protein, 11 aa, BK virus
MTHRGMQPNHD

SEQ ID NO: 3312 - protein, 11 aa, BK virus
THRGMQPNHDL

SEQ ID NO: 3313 - protein, 11 aa, BK virus
HRGMQPNHDLR

SEQ ID NO: 3314 - protein, 11 aa, BK virus
RGMQPNHDLRK

SEQ ID NO: 3315 - protein, 11 aa, BK virus
GMQPNHDLRKE

SEQ ID NO: 3316 - protein, 11 aa, BK virus
MQPNHDLRKES

SEQ ID NO: 3317 - protein, 11 aa, BK virus
QPNHDLRKESA

SEQ ID NO: 3318 - protein, 11 aa, BK virus
LTGRSCLPMEC

SEQ ID NO: 3319 - protein, 11 aa, BK virus
TGRSCLPMECS

SEQ ID NO: 3320 - protein, 11 aa, BK virus
GRSCLPMECSQ

SEQ ID NO: 3321 - protein, 11 aa, BK virus
RSCLPMECSQT

SEQ ID NO: 3322 - protein, 11 aa, BK virus
SCLPMECSQTM

SEQ ID NO: 3323 - protein, 11 aa, BK virus
CLPMECSQTMT

SEQ ID NO: 3324 - protein, 11 aa, BK virus
LPMECSQTMTS

SEQ ID NO: 3325 - protein, 11 aa, BK virus
PMECSQTMTSG

SEQ ID NO: 3326 - protein, 11 aa, BK virus
MECSQTMTSGR

SEQ ID NO: 3327 - protein, 11 aa, BK virus
ECSQTMTSGRK

SEQ ID NO: 3328 - protein, 11 aa, BK virus
CSQTMTSGRKV

SEQ ID NO: 3329 - protein, 11 aa, BK virus
SQTMTSGRKVH

SEQ ID NO: 3330 - protein, 11 aa, BK virus
QTMTSGRKVHD

SEQ ID NO: 3331 - protein, 11 aa, BK virus
TMTSGRKVHDR

SEQ ID NO: 3332 - protein, 11 aa, BK virus
MTSGRKVHDRH

SEQ ID NO: 3333 - protein, 11 aa, BK virus
TSGRKVHDRHV

SEQ ID NO: 3334 - protein, 11 aa, BK virus
SGRKVHDRHVL

SEQ ID NO: 3335 - protein, 11 aa, BK virus
GRKVHDRHVLR

SEQ ID NO: 3336 - protein, 11 aa, BK virus
RKVHDRHVLRA

SEQ ID NO: 3337 - protein, 11 aa, BK virus
ESWPCPQLNWT

SEQ ID NO: 3338 - protein, 11 aa, BK virus
SWPCPQLNWTK

SEQ ID NO: 3339 - protein, 11 aa, BK virus
WPCPQLNWTKA

SEQ ID NO: 3340 - protein, 11 aa, BK virus
PCPQLNWTKAM

SEQ ID NO: 3341 - protein, 11 aa, BK virus
CPQLNWTKAMV

SEQ ID NO: 3342 - protein, 11 aa, BK virus
PQLNWTKAMVL

SEQ ID NO: 3343 - protein, 11 aa, BK virus
QLNWTKAMVLR

SEQ ID NO: 3344 - protein, 11 aa, BK virus
LNWTKAMVLRQ

SEQ ID NO: 3345 - protein, 11 aa, BK virus
NWTKAMVLRQL

SEQ ID NO: 3346 - protein, 11 aa, BK virus
WTKAMVLRQLS

SEQ ID NO: 3347 - protein, 11 aa, BK virus
TKAMVLRQLSR

SEQ ID NO: 3348 - protein, 11 aa, BK virus
KAMVLRQLSRQ

SEQ ID NO: 3349 - protein, 11 aa, BK virus
AMVLRQLSRQA

SEQ ID NO: 3350 - protein, 11 aa, BK virus
MVLRQLSRQAS

SEQ ID NO: 3351 - protein, 11 aa, BK virus
VLRQLSRQASV

SEQ ID NO: 3352 - protein, 11 aa, BK virus
LRQLSRQASVK

SEQ ID NO: 3353 - protein, 11 aa, BK virus
RQLSRQASVKV

SEQ ID NO: 3354 - protein, 11 aa, BK virus
QLSRQASVKVG

SEQ ID NO: 3355 - protein, 11 aa, BK virus
LSRQASVKVGK

SEQ ID NO: 3356 - protein, 11 aa, BK virus
SRQASVKVGKT

SEQ ID NO: 3357 - protein, 11 aa, BK virus
RQASVKVGKTW

SEQ ID NO: 3358 - protein, 11 aa, BK virus
QASVKVGKTWT

SEQ ID NO: 3359 - protein, 11 aa, BK virus
ASVKVGKTWTG

SEQ ID NO: 3360 - protein, 11 aa, BK virus
SVKVGKTWTGT

SEQ ID NO: 3361 - protein, 11 aa, BK virus
VKVGKTWTGTK

SEQ ID NO: 3362 - protein, 11 aa, BK virus
KVGKTWTGTKK

SEQ ID NO: 3363 - protein, 11 aa, BK virus
VGKTWTGTKKR

SEQ ID NO: 3364 - protein, 11 aa, BK virus
GKTWTGTKKRA

SEQ ID NO: 3365 - protein, 11 aa, BK virus
KTWTGTKKRAQ

SEQ ID NO: 3366 - protein, 11 aa, BK virus
TWTGTKKRAQR

SEQ ID NO: 3367 - protein, 11 aa, BK virus
WTGTKKRAQRI

SEQ ID NO: 3368 - protein, 11 aa, BK virus
TGTKKRAQRIF

SEQ ID NO: 3369 - protein, 11 aa, BK virus
GTKKRAQRIFI

SEQ ID NO: 3370 - protein, 11 aa, BK virus
TKKRAQRIFIF

SEQ ID NO: 3371 - protein, 11 aa, BK virus
KKRAQRIFIFI

SEQ ID NO: 3372 - protein, 11 aa, BK virus
KRAQRIFIFIL

SEQ ID NO: 3373 - protein, 11 aa, BK virus
RAQRIFIFILE

SEQ ID NO: 3374 - protein, 11 aa, BK virus
AQRIFIFILEL

SEQ ID NO: 3375 - protein, 11 aa, BK virus
QRIFIFILELL

SEQ ID NO: 3376 - protein, 11 aa, BK virus
RIFIFILELLL

SEQ ID NO: 3377 - protein, 11 aa, BK virus
IFIFILELLLE

SEQ ID NO: 3378 - protein, 11 aa, BK virus
FIFILELLLEF

SEQ ID NO: 3379 - protein, 11 aa, BK virus
IFILELLLEFC

SEQ ID NO: 3380 - protein, 11 aa, BK virus
FILELLLEFCR

SEQ ID NO: 3381 - protein, 11 aa, BK virus
ILELLLEFCRG

SEQ ID NO: 3382 - protein, 11 aa, BK virus
LELLLEFCRGE

SEQ ID NO: 3383 - protein, 11 aa, BK virus
ELLLEFCRGED

SEQ ID NO: 3384 - protein, 11 aa, BK virus
LLLEFCRGEDS

SEQ ID NO: 3385 - protein, 11 aa, BK virus
LLEFCRGEDSV

SEQ ID NO: 3386 - protein, 11 aa, BK virus
LEFCRGEDSVD

SEQ ID NO: 3387 - protein, 11 aa, BK virus
EFCRGEDSVDG

SEQ ID NO: 3388 - protein, 11 aa, BK virus
FCRGEDSVDGK

SEQ ID NO: 3389 - protein, 11 aa, BK virus
CRGEDSVDGKN

SEQ ID NO: 3390 - protein, 11 aa, BK virus
RGEDSVDGKNK

SEQ ID NO: 3391 - protein, 11 aa, BK virus
GEDSVDGKNKS

SEQ ID NO: 3392 - protein, 11 aa, BK virus
EDSVDGKNKST

SEQ ID NO: 3393 - protein, 11 aa, BK virus
DSVDGKNKSTT

SEQ ID NO: 3394 - protein, 11 aa, BK virus
SVDGKNKSTTA

SEQ ID NO: 3395 - protein, 11 aa, BK virus
VDGKNKSTTAL

SEQ ID NO: 3396 - protein, 11 aa, BK virus
DGKNKSTTALP

SEQ ID NO: 3397 - protein, 11 aa, BK virus
GKNKSTTALPA

SEQ ID NO: 3398 - protein, 11 aa, BK virus
KNKSTTALPAV

SEQ ID NO: 3399 - protein, 11 aa, BK virus
NKSTTALPAVK

SEQ ID NO: 3400 - protein, 11 aa, BK virus
KSTTALPAVKD

SEQ ID NO: 3401 - protein, 11 aa, BK virus
STTALPAVKDS

SEQ ID NO: 3402 - protein, 11 aa, BK virus
TTALPAVKDSV

SEQ ID NO: 3403 - protein, 11 aa, BK virus
TALPAVKDSVK

SEQ ID NO: 3404 - protein, 11 aa, BK virus
ALPAVKDSVKD

SEQ ID NO: 3405 - protein, 11 aa, BK virus
LPAVKDSVKDS

SEQ ID NO: 3406 - protein, 11 aa, BK virus
VSNPFFFVFPG

SEQ ID NO: 3407 - protein, 11 aa, BK virus
SNPFFFVFPGS

SEQ ID NO: 3408 - protein, 11 aa, BK virus
NPFFFVFPGSW

SEQ ID NO: 3409 - protein, 11 aa, BK virus
PFFFVFPGSWV

SEQ ID NO: 3410 - protein, 11 aa, BK virus
FFFVFPGSWVL

SEQ ID NO: 3411 - protein, 11 aa, BK virus
FFVFPGSWVLL

SEQ ID NO: 3412 - protein, 11 aa, BK virus
LPVYLRLLLPQ

SEQ ID NO: 3413 - protein, 11 aa, BK virus
PVYLRLLLPQD

SEQ ID NO: 3414 - protein, 11 aa, BK virus
VYLRLLLPQDF

SEQ ID NO: 3415 - protein, 11 aa, BK virus
YLRLLLPQDFQ

SEQ ID NO: 3416 - protein, 11 aa, BK virus
LRLLLPQDFQW

SEQ ID NO: 3417 - protein, 11 aa, BK virus
RLLLPQDFQWL

SEQ ID NO: 3418 - protein, 11 aa, BK virus
LLLPQDFQWLK

SEQ ID NO: 3419 - protein, 11 aa, BK virus
LLPQDFQWLKL

SEQ ID NO: 3420 - protein, 11 aa, BK virus
LPQDFQWLKLL

SEQ ID NO: 3421 - protein, 11 aa, BK virus
PQDFQWLKLLL

SEQ ID NO: 3422 - protein, 11 aa, BK virus
QDFQWLKLLLG

SEQ ID NO: 3423 - protein, 11 aa, BK virus
DFQWLKLLLGR

SEQ ID NO: 3424 - protein, 11 aa, BK virus
FQWLKLLLGRL

SEQ ID NO: 3425 - protein, 11 aa, BK virus
QWLKLLLGRLL

SEQ ID NO: 3426 - protein, 11 aa, BK virus
WLKLLLGRLLL

SEQ ID NO: 3427 - protein, 11 aa, BK virus
LKLLLGRLLLL

SEQ ID NO: 3428 - protein, 11 aa, BK virus
LLVLLGLLLGL

SEQ ID NO: 3429 - protein, 11 aa, BK virus
LVLLGLLLGLL

SEQ ID NO: 3430 - protein, 11 aa, BK virus
VLLGLLLGLLL

SEQ ID NO: 3431 - protein, 11 aa, BK virus
GISSLMIGITK

SEQ ID NO: 3432 - protein, 11 aa, BK virus
ISSLMIGITKF

SEQ ID NO: 3433 - protein, 11 aa, BK virus
SSLMIGITKFP

SEQ ID NO: 3434 - protein, 11 aa, BK virus
SLMIGITKFPL

SEQ ID NO: 3435 - protein, 11 aa, BK virus
ASISNQAWLWN

SEQ ID NO: 3436 - protein, 11 aa, BK virus
SISNQAWLWNC

SEQ ID NO: 3437 - protein, 11 aa, BK virus
ISNQAWLWNCL

SEQ ID NO: 3438 - protein, 11 aa, BK virus
SNQAWLWNCLT

SEQ ID NO: 3439 - protein, 11 aa, BK virus
NQAWLWNCLTQ

SEQ ID NO: 3440 - protein, 11 aa, BK virus
QAWLWNCLTQM

SEQ ID NO: 3441 - protein, 11 aa, BK virus
AWLWNCLTQMS

SEQ ID NO: 3442 - protein, 11 aa, BK virus
WLWNCLTQMST

SEQ ID NO: 3443 - protein, 11 aa, BK virus
LWNCLTQMSTM

SEQ ID NO: 3444 - protein, 11 aa, BK virus
WNCLTQMSTMI

SEQ ID NO: 3445 - protein, 11 aa, BK virus
NCLTQMSTMIF

SEQ ID NO: 3446 - protein, 11 aa, BK virus
CLTQMSTMIFC

SEQ ID NO: 3447 - protein, 11 aa, BK virus
LTQMSTMIFCF

SEQ ID NO: 3448 - protein, 11 aa, BK virus
TQMSTMIFCFL

SEQ ID NO: 3449 - protein, 11 aa, BK virus
QMSTMIFCFLV

SEQ ID NO: 3450 - protein, 11 aa, BK virus
ILLLIIFNTLI

SEQ ID NO: 3451 - protein, 11 aa, BK virus
LLLIIFNTLIL

SEQ ID NO: 3452 - protein, 11 aa, BK virus
LLIIFNTLILG

SEQ ID NO: 3453 - protein, 11 aa, BK virus
LIIFNTLILGI

SEQ ID NO: 3454 - protein, 11 aa, BK virus
IIFNTLILGIG

SEQ ID NO: 3455 - protein, 11 aa, BK virus
IFNTLILGIGV

SEQ ID NO: 3456 - protein, 11 aa, BK virus
FNTLILGIGVL

SEQ ID NO: 3457 - protein, 11 aa, BK virus
NTLILGIGVLL

SEQ ID NO: 3458 - protein, 11 aa, BK virus
TLILGIGVLLC

SEQ ID NO: 3459 - protein, 11 aa, BK virus
LILGIGVLLCL

SEQ ID NO: 3460 - protein, 11 aa, BK virus
ILGIGVLLCLL

SEQ ID NO: 3461 - protein, 11 aa, BK virus
LGIGVLLCLLL

SEQ ID NO: 3462 - protein, 11 aa, BK virus
GIGVLLCLLLF

SEQ ID NO: 3463 - protein, 11 aa, BK virus
IGVLLCLLLFP

SEQ ID NO: 3464 - protein, 11 aa, BK virus
GVLLCLLLFPR

SEQ ID NO: 3465 - protein, 11 aa, BK virus
VLLCLLLFPRL

SEQ ID NO: 3466 - protein, 11 aa, BK virus
LLCLLLFPRLC

SEQ ID NO: 3467 - protein, 11 aa, BK virus
LCLLLFPRLCG

SEQ ID NO: 3468 - protein, 11 aa, BK virus
CLLLFPRLCGM

SEQ ID NO: 3469 - protein, 11 aa, BK virus
LLLFPRLCGML

SEQ ID NO: 3470 - protein, 11 aa, BK virus
LLFPRLCGMLL

SEQ ID NO: 3471 - protein, 11 aa, BK virus
LFPRLCGMLLG

SEQ ID NO: 3472 - protein, 11 aa, BK virus
FPRLCGMLLGM

SEQ ID NO: 3473 - protein, 11 aa, BK virus
PRLCGMLLGMI

SEQ ID NO: 3474 - protein, 11 aa, BK virus
RLCGMLLGMIY

SEQ ID NO: 3475 - protein, 11 aa, BK virus
LCGMLLGMIYL

SEQ ID NO: 3476 - protein, 11 aa, BK virus
CGMLLGMIYLL

SEQ ID NO: 3477 - protein, 11 aa, BK virus
PHRNCREEQKD

SEQ ID NO: 3478 - protein, 11 aa, BK virus
HRNCREEQKDF

SEQ ID NO: 3479 - protein, 11 aa, BK virus
RNCREEQKDFL

SEQ ID NO: 3480 - protein, 11 aa, BK virus
NCREEQKDFLE

SEQ ID NO: 3481 - protein, 11 aa, BK virus
CREEQKDFLET

SEQ ID NO: 3482 - protein, 11 aa, BK virus
REEQKDFLETP

SEQ ID NO: 3483 - protein, 11 aa, BK virus
EEQKDFLETPW

SEQ ID NO: 3484 - protein, 11 aa, BK virus
EQKDFLETPWL

SEQ ID NO: 3485 - protein, 11 aa, BK virus
QKDFLETPWLD

SEQ ID NO: 3486 - protein, 11 aa, BK virus
KDFLETPWLDF

SEQ ID NO: 3487 - protein, 11 aa, BK virus
DFLETPWLDFW

SEQ ID NO: 3488 - protein, 11 aa, BK virus
FLETPWLDFWR

SEQ ID NO: 3489 - protein, 11 aa, BK virus
LETPWLDFWRK

SEQ ID NO: 3490 - protein, 11 aa, BK virus
ETPWLDFWRKL

SEQ ID NO: 3491 - protein, 11 aa, BK virus
TPWLDFWRKLP

SEQ ID NO: 3492 - protein, 11 aa, BK virus
PWLDFWRKLPG

SEQ ID NO: 3493 - protein, 11 aa, BK virus
WLDFWRKLPGQ

SEQ ID NO: 3494 - protein, 11 aa, BK virus
LDFWRKLPGQL

SEQ ID NO: 3495 - protein, 11 aa, BK virus
TFIIIFNNIIL

SEQ ID NO: 3496 - protein, 11 aa, BK virus
FIIIFNNIILI

SEQ ID NO: 3497 - protein, 11 aa, BK virus
IIIFNNIILIF

SEQ ID NO: 3498 - protein, 11 aa, BK virus
IIFNNIILIFP

SEQ ID NO: 3499 - protein, 11 aa, BK virus
IFNNIILIFPL

SEQ ID NO: 3500 - protein, 11 aa, BK virus
FNNIILIFPLL

SEQ ID NO: 3501 - protein, 11 aa, BK virus
NNIILIFPLLG

SEQ ID NO: 3502 - protein, 11 aa, BK virus
NIILIFPLLGP

SEQ ID NO: 3503 - protein, 11 aa, BK virus
IILIFPLLGPQ

SEQ ID NO: 3504 - protein, 11 aa, BK virus
ILIFPLLGPQW

SEQ ID NO: 3505 - protein, 11 aa, BK virus
LIFPLLGPQWL

SEQ ID NO: 3506 - protein, 11 aa, BK virus
IFPLLGPQWLD

SEQ ID NO: 3507 - protein, 11 aa, BK virus
FPLLGPQWLDK

SEQ ID NO: 3508 - protein, 11 aa, BK virus
LKGKVPVYILA

SEQ ID NO: 3509 - protein, 11 aa, BK virus
KGKVPVYILAI

SEQ ID NO: 3510 - protein, 11 aa, BK virus
GKVPVYILAIL

SEQ ID NO: 3511 - protein, 11 aa, BK virus
KVPVYILAILI

SEQ ID NO: 3512 - protein, 11 aa, BK virus
VPVYILAILIV

SEQ ID NO: 3513 - protein, 11 aa, BK virus
EINKVYIQESL

SEQ ID NO: 3514 - protein, 11 aa, BK virus
KKLLPQEVLIK

SEQ ID NO: 3515 - protein, 11 aa, BK virus
KLLPQEVLIKE

SEQ ID NO: 3516 - protein, 11 aa, BK virus
LLPQEVLIKEL

SEQ ID NO: 3517 - protein, 11 aa, BK virus
LPQEVLIKELL

SEQ ID NO: 3518 - protein, 11 aa, BK virus
PQEVLIKELLL

SEQ ID NO: 3519 - protein, 11 aa, BK virus
QEVLIKELLLN

SEQ ID NO: 3520 - protein, 11 aa, BK virus
EVLIKELLLNG

SEQ ID NO: 3521 - protein, 11 aa, BK virus
VLIKELLLNGC

SEQ ID NO: 3522 - protein, 11 aa, BK virus
LIKELLLNGCC

SEQ ID NO: 3523 - protein, 11 aa, BK virus
IKELLLNGCCL

SEQ ID NO: 3524 - protein, 11 aa, BK virus
KELLLNGCCLY

SEQ ID NO: 3525 - protein, 11 aa, BK virus
ELLLNGCCLYF

SEQ ID NO: 3526 - protein, 11 aa, BK virus
HLLLKHMKMAP

SEQ ID NO: 3527 - protein, 11 aa, BK virus
LLLKHMKMAPT

SEQ ID NO: 3528 - protein, 11 aa, BK virus
LLKHMKMAPTK

SEQ ID NO: 3529 - protein, 11 aa, BK virus
LKHMKMAPTKR

SEQ ID NO: 3530 - protein, 11 aa, BK virus
KHMKMAPTKRK

SEQ ID NO: 3531 - protein, 11 aa, BK virus
HMKMAPTKRKG

SEQ ID NO: 3532 - protein, 11 aa, BK virus
MKMAPTKRKGE

SEQ ID NO: 3533 - protein, 11 aa, BK virus
KMAPTKRKGEC

SEQ ID NO: 3534 - protein, 11 aa, BK virus
MAPTKRKGECP

SEQ ID NO: 3535 - protein, 11 aa, BK virus
APTKRKGECPG

SEQ ID NO: 3536 - protein, 11 aa, BK virus
PTKRKGECPGA

SEQ ID NO: 3537 - protein, 11 aa, BK virus
TKRKGECPGAA

SEQ ID NO: 3538 - protein, 11 aa, BK virus
KRKGECPGAAP

SEQ ID NO: 3539 - protein, 11 aa, BK virus
RKGECPGAAPK

SEQ ID NO: 3540 - protein, 11 aa, BK virus
KGECPGAAPKK

SEQ ID NO: 3541 - protein, 11 aa, BK virus
GECPGAAPKKP

SEQ ID NO: 3542 - protein, 11 aa, BK virus
ECPGAAPKKPK

SEQ ID NO: 3543 - protein, 11 aa, BK virus
CPGAAPKKPKE

SEQ ID NO: 3544 - protein, 11 aa, BK virus
PGAAPKKPKEP

SEQ ID NO: 3545 - protein, 11 aa, BK virus
GAAPKKPKEPV

SEQ ID NO: 3546 - protein, 11 aa, BK virus
AAPKKPKEPVQ

SEQ ID NO: 3547 - protein, 11 aa, BK virus
APKKPKEPVQV

SEQ ID NO: 3548 - protein, 11 aa, BK virus
PKKPKEPVQVP

SEQ ID NO: 3549 - protein, 11 aa, BK virus
KKPKEPVQVPK

SEQ ID NO: 3550 - protein, 11 aa, BK virus
KPKEPVQVPKL

SEQ ID NO: 3551 - protein, 11 aa, BK virus
PKEPVQVPKLL

SEQ ID NO: 3552 - protein, 11 aa, BK virus
KEPVQVPKLLI

SEQ ID NO: 3553 - protein, 11 aa, BK virus
EPVQVPKLLIK

SEQ ID NO: 3554 - protein, 11 aa, BK virus
PVQVPKLLIKG

SEQ ID NO: 3555 - protein, 11 aa, BK virus
VQVPKLLIKGG

SEQ ID NO: 3556 - protein, 11 aa, BK virus
QVPKLLIKGGV

SEQ ID NO: 3557 - protein, 11 aa, BK virus
VPKLLIKGGVE

SEQ ID NO: 3558 - protein, 11 aa, BK virus
PKLLIKGGVEV

SEQ ID NO: 3559 - protein, 11 aa, BK virus
KLLIKGGVEVL

SEQ ID NO: 3560 - protein, 11 aa, BK virus
LLIKGGVEVLE

SEQ ID NO: 3561 - protein, 11 aa, BK virus
LIKGGVEVLEV

SEQ ID NO: 3562 - protein, 11 aa, BK virus
IKGGVEVLEVK

SEQ ID NO: 3563 - protein, 11 aa, BK virus
KGGVEVLEVKT

SEQ ID NO: 3564 - protein, 11 aa, BK virus
GGVEVLEVKTG

SEQ ID NO: 3565 - protein, 11 aa, BK virus
GVEVLEVKTGV

SEQ ID NO: 3566 - protein, 11 aa, BK virus
VEVLEVKTGVD

SEQ ID NO: 3567 - protein, 11 aa, BK virus
EVLEVKTGVDA

SEQ ID NO: 3568 - protein, 11 aa, BK virus
VLEVKTGVDAI

SEQ ID NO: 3569 - protein, 11 aa, BK virus
LEVKTGVDAIT

SEQ ID NO: 3570 - protein, 11 aa, BK virus
EVKTGVDAITE

SEQ ID NO: 3571 - protein, 11 aa, BK virus
VKTGVDAITEV

SEQ ID NO: 3572 - protein, 11 aa, BK virus
KTGVDAITEVE

SEQ ID NO: 3573 - protein, 11 aa, BK virus
TGVDAITEVEC

SEQ ID NO: 3574 - protein, 11 aa, BK virus
GVDAITEVECF

SEQ ID NO: 3575 - protein, 11 aa, BK virus
VDAITEVECFL

SEQ ID NO: 3576 - protein, 11 aa, BK virus
DAITEVECFLN

SEQ ID NO: 3577 - protein, 11 aa, BK virus
AITEVECFLNP

SEQ ID NO: 3578 - protein, 11 aa, BK virus
ITEVECFLNPE

SEQ ID NO: 3579 - protein, 11 aa, BK virus
TEVECFLNPEM

SEQ ID NO: 3580 - protein, 11 aa, BK virus
EVECFLNPEMG

SEQ ID NO: 3581 - protein, 11 aa, BK virus
VECFLNPEMGD

SEQ ID NO: 3582 - protein, 11 aa, BK virus
ECFLNPEMGDP

SEQ ID NO: 3583 - protein, 11 aa, BK virus
CFLNPEMGDPD

SEQ ID NO: 3584 - protein, 11 aa, BK virus
FLNPEMGDPDE

SEQ ID NO: 3585 - protein, 11 aa, BK virus
LNPEMGDPDEN

SEQ ID NO: 3586 - protein, 11 aa, BK virus
NPEMGDPDENL

SEQ ID NO: 3587 - protein, 11 aa, BK virus
PEMGDPDENLR

SEQ ID NO: 3588 - protein, 11 aa, BK virus
EMGDPDENLRG

SEQ ID NO: 3589 - protein, 11 aa, BK virus
MGDPDENLRGF

SEQ ID NO: 3590 - protein, 11 aa, BK virus
GDPDENLRGFS

SEQ ID NO: 3591 - protein, 11 aa, BK virus
DPDENLRGFSL

SEQ ID NO: 3592 - protein, 11 aa, BK virus
PDENLRGFSLK

SEQ ID NO: 3593 - protein, 11 aa, BK virus
DENLRGFSLKL

SEQ ID NO: 3594 - protein, 11 aa, BK virus
ENLRGFSLKLS

SEQ ID NO: 3595 - protein, 11 aa, BK virus
NLRGFSLKLSA

SEQ ID NO: 3596 - protein, 11 aa, BK virus
LRGFSLKLSAE

SEQ ID NO: 3597 - protein, 11 aa, BK virus
RGFSLKLSAEN

SEQ ID NO: 3598 - protein, 11 aa, BK virus
GFSLKLSAEND

SEQ ID NO: 3599 - protein, 11 aa, BK virus
FSLKLSAENDF

SEQ ID NO: 3600 - protein, 11 aa, BK virus
SLKLSAENDFS

SEQ ID NO: 3601 - protein, 11 aa, BK virus
LKLSAENDFSS

SEQ ID NO: 3602 - protein, 11 aa, BK virus
KLSAENDFSSD

SEQ ID NO: 3603 - protein, 11 aa, BK virus
LSAENDFSSDS

SEQ ID NO: 3604 - protein, 11 aa, BK virus
SAENDFSSDSP

SEQ ID NO: 3605 - protein, 11 aa, BK virus
AENDFSSDSPE

SEQ ID NO: 3606 - protein, 11 aa, BK virus
ENDFSSDSPER

SEQ ID NO: 3607 - protein, 11 aa, BK virus
NDFSSDSPERK

SEQ ID NO: 3608 - protein, 11 aa, BK virus
DFSSDSPERKM

SEQ ID NO: 3609 - protein, 11 aa, BK virus
FSSDSPERKML

SEQ ID NO: 3610 - protein, 11 aa, BK virus
SSDSPERKMLP

SEQ ID NO: 3611 - protein, 11 aa, BK virus
SDSPERKMLPC

SEQ ID NO: 3612 - protein, 11 aa, BK virus
DSPERKMLPCY

SEQ ID NO: 3613 - protein, 11 aa, BK virus
SPERKMLPCYS

SEQ ID NO: 3614 - protein, 11 aa, BK virus
PERKMLPCYST

SEQ ID NO: 3615 - protein, 11 aa, BK virus
ERKMLPCYSTA

SEQ ID NO: 3616 - protein, 11 aa, BK virus
RKMLPCYSTAR

SEQ ID NO: 3617 - protein, 11 aa, BK virus
KMLPCYSTARI

SEQ ID NO: 3618 - protein, 11 aa, BK virus
MLPCYSTARIP

SEQ ID NO: 3619 - protein, 11 aa, BK virus
LPCYSTARIPL

SEQ ID NO: 3620 - protein, 11 aa, BK virus
PCYSTARIPLP

SEQ ID NO: 3621 - protein, 11 aa, BK virus
CYSTARIPLPN

SEQ ID NO: 3622 - protein, 11 aa, BK virus
YSTARIPLPNL

SEQ ID NO: 3623 - protein, 11 aa, BK virus
STARIPLPNLN

SEQ ID NO: 3624 - protein, 11 aa, BK virus
TARIPLPNLNE

SEQ ID NO: 3625 - protein, 11 aa, BK virus
ARIPLPNLNED

SEQ ID NO: 3626 - protein, 11 aa, BK virus
RIPLPNLNEDL

SEQ ID NO: 3627 - protein, 11 aa, BK virus
IPLPNLNEDLT

SEQ ID NO: 3628 - protein, 11 aa, BK virus
PLPNLNEDLTC

SEQ ID NO: 3629 - protein, 11 aa, BK virus
LPNLNEDLTCG

SEQ ID NO: 3630 - protein, 11 aa, BK virus
PNLNEDLTCGN

SEQ ID NO: 3631 - protein, 11 aa, BK virus
NLNEDLTCGNL

SEQ ID NO: 3632 - protein, 11 aa, BK virus
LNEDLTCGNLL

SEQ ID NO: 3633 - protein, 11 aa, BK virus
NEDLTCGNLLM

SEQ ID NO: 3634 - protein, 11 aa, BK virus
EDLTCGNLLMW

SEQ ID NO: 3635 - protein, 11 aa, BK virus
DLTCGNLLMWE

SEQ ID NO: 3636 - protein, 11 aa, BK virus
LTCGNLLMWEA

SEQ ID NO: 3637 - protein, 11 aa, BK virus
TCGNLLMWEAV

SEQ ID NO: 3638 - protein, 11 aa, BK virus
CGNLLMWEAVT

SEQ ID NO: 3639 - protein, 11 aa, BK virus
GNLLMWEAVTV

SEQ ID NO: 3640 - protein, 11 aa, BK virus
NLLMWEAVTVQ

SEQ ID NO: 3641 - protein, 11 aa, BK virus
LLMWEAVTVQT

SEQ ID NO: 3642 - protein, 11 aa, BK virus
LMWEAVTVQTE

SEQ ID NO: 3643 - protein, 11 aa, BK virus
MWEAVTVQTEV

SEQ ID NO: 3644 - protein, 11 aa, BK virus
WEAVTVQTEVI

SEQ ID NO: 3645 - protein, 11 aa, BK virus
EAVTVQTEVIG

SEQ ID NO: 3646 - protein, 11 aa, BK virus
AVTVQTEVIGI

SEQ ID NO: 3647 - protein, 11 aa, BK virus
VTVQTEVIGIT

SEQ ID NO: 3648 - protein, 11 aa, BK virus
TVQTEVIGITS

SEQ ID NO: 3649 - protein, 11 aa, BK virus
VQTEVIGITSM

SEQ ID NO: 3650 - protein, 11 aa, BK virus
QTEVIGITSML

SEQ ID NO: 3651 - protein, 11 aa, BK virus
TEVIGITSMLN

SEQ ID NO: 3652 - protein, 11 aa, BK virus
EVIGITSMLNL

SEQ ID NO: 3653 - protein, 11 aa, BK virus
VIGITSMLNLH

SEQ ID NO: 3654 - protein, 11 aa, BK virus
IGITSMLNLHA

SEQ ID NO: 3655 - protein, 11 aa, BK virus
GITSMLNLHAG

SEQ ID NO: 3656 - protein, 11 aa, BK virus
ITSMLNLHAGS

SEQ ID NO: 3657 - protein, 11 aa, BK virus
TSMLNLHAGSQ

SEQ ID NO: 3658 - protein, 11 aa, BK virus
SMLNLHAGSQK

SEQ ID NO: 3659 - protein, 11 aa, BK virus
MLNLHAGSQKV

SEQ ID NO: 3660 - protein, 11 aa, BK virus
LNLHAGSQKVH

SEQ ID NO: 3661 - protein, 11 aa, BK virus
NLHAGSQKVHE

SEQ ID NO: 3662 - protein, 11 aa, BK virus
LHAGSQKVHEH

SEQ ID NO: 3663 - protein, 11 aa, BK virus
HAGSQKVHEHG

SEQ ID NO: 3664 - protein, 11 aa, BK virus
AGSQKVHEHGG

SEQ ID NO: 3665 - protein, 11 aa, BK virus
GSQKVHEHGGG

SEQ ID NO: 3666 - protein, 11 aa, BK virus
SQKVHEHGGGK

SEQ ID NO: 3667 - protein, 11 aa, BK virus
QKVHEHGGGKP

SEQ ID NO: 3668 - protein, 11 aa, BK virus
KVHEHGGGKPI

SEQ ID NO: 3669 - protein, 11 aa, BK virus
VHEHGGGKPIQ

SEQ ID NO: 3670 - protein, 11 aa, BK virus
HEHGGGKPIQG

SEQ ID NO: 3671 - protein, 11 aa, BK virus
EHGGGKPIQGS

SEQ ID NO: 3672 - protein, 11 aa, BK virus
HGGGKPIQGSN

SEQ ID NO: 3673 - protein, 11 aa, BK virus
GGGKPIQGSNF

SEQ ID NO: 3674 - protein, 11 aa, BK virus
GGKPIQGSNFH

SEQ ID NO: 3675 - protein, 11 aa, BK virus
GKPIQGSNFHF

SEQ ID NO: 3676 - protein, 11 aa, BK virus
KPIQGSNFHFF

SEQ ID NO: 3677 - protein, 11 aa, BK virus
PIQGSNFHFFA

SEQ ID NO: 3678 - protein, 11 aa, BK virus
IQGSNFHFFAV

SEQ ID NO: 3679 - protein, 11 aa, BK virus
QGSNFHFFAVG

SEQ ID NO: 3680 - protein, 11 aa, BK virus
GSNFHFFAVGG

SEQ ID NO: 3681 - protein, 11 aa, BK virus
SNFHFFAVGGE

SEQ ID NO: 3682 - protein, 11 aa, BK virus
NFHFFAVGGEP

SEQ ID NO: 3683 - protein, 11 aa, BK virus
FHFFAVGGEPL

SEQ ID NO: 3684 - protein, 11 aa, BK virus
HFFAVGGEPLE

SEQ ID NO: 3685 - protein, 11 aa, BK virus
FFAVGGEPLEM

SEQ ID NO: 3686 - protein, 11 aa, BK virus
FAVGGEPLEMQ

SEQ ID NO: 3687 - protein, 11 aa, BK virus
AVGGEPLEMQG

SEQ ID NO: 3688 - protein, 11 aa, BK virus
VGGEPLEMQGV

SEQ ID NO: 3689 - protein, 11 aa, BK virus
GGEPLEMQGVL

SEQ ID NO: 3690 - protein, 11 aa, BK virus
GEPLEMQGVLM

SEQ ID NO: 3691 - protein, 11 aa, BK virus
EPLEMQGVLMN

SEQ ID NO: 3692 - protein, 11 aa, BK virus
PLEMQGVLMNY

SEQ ID NO: 3693 - protein, 11 aa, BK virus
LEMQGVLMNYR

SEQ ID NO: 3694 - protein, 11 aa, BK virus
EMQGVLMNYRS

SEQ ID NO: 3695 - protein, 11 aa, BK virus
MQGVLMNYRSK

SEQ ID NO: 3696 - protein, 11 aa, BK virus
QGVLMNYRSKY

SEQ ID NO: 3697 - protein, 11 aa, BK virus
GVLMNYRSKYP

SEQ ID NO: 3698 - protein, 11 aa, BK virus
VLMNYRSKYPD

SEQ ID NO: 3699 - protein, 11 aa, BK virus
LMNYRSKYPDG

SEQ ID NO: 3700 - protein, 11 aa, BK virus
MNYRSKYPDGT

SEQ ID NO: 3701 - protein, 11 aa, BK virus
NYRSKYPDGTI

SEQ ID NO: 3702 - protein, 11 aa, BK virus
YRSKYPDGTIT

SEQ ID NO: 3703 - protein, 11 aa, BK virus
RSKYPDGTITP

SEQ ID NO: 3704 - protein, 11 aa, BK virus
SKYPDGTITPK

SEQ ID NO: 3705 - protein, 11 aa, BK virus
KYPDGTITPKN

SEQ ID NO: 3706 - protein, 11 aa, BK virus
YPDGTITPKNP

SEQ ID NO: 3707 - protein, 11 aa, BK virus
PDGTITPKNPT

SEQ ID NO: 3708 - protein, 11 aa, BK virus
DGTITPKNPTA

SEQ ID NO: 3709 - protein, 11 aa, BK virus
GTITPKNPTAQ

SEQ ID NO: 3710 - protein, 11 aa, BK virus
TITPKNPTAQS

SEQ ID NO: 3711 - protein, 11 aa, BK virus
ITPKNPTAQSQ

SEQ ID NO: 3712 - protein, 11 aa, BK virus
TPKNPTAQSQV

SEQ ID NO: 3713 - protein, 11 aa, BK virus
PKNPTAQSQVM

SEQ ID NO: 3714 - protein, 11 aa, BK virus
KNPTAQSQVMN

SEQ ID NO: 3715 - protein, 11 aa, BK virus
NPTAQSQVMNT

SEQ ID NO: 3716 - protein, 11 aa, BK virus
PTAQSQVMNTD

SEQ ID NO: 3717 - protein, 11 aa, BK virus
TAQSQVMNTDH

SEQ ID NO: 3718 - protein, 11 aa, BK virus
AQSQVMNTDHK

SEQ ID NO: 3719 - protein, 11 aa, BK virus
QSQVMNTDHKA

SEQ ID NO: 3720 - protein, 11 aa, BK virus
SQVMNTDHKAY

SEQ ID NO: 3721 - protein, 11 aa, BK virus
QVMNTDHKAYL

SEQ ID NO: 3722 - protein, 11 aa, BK virus
VMNTDHKAYLD

SEQ ID NO: 3723 - protein, 11 aa, BK virus
MNTDHKAYLDK

SEQ ID NO: 3724 - protein, 11 aa, BK virus
NTDHKAYLDKN

SEQ ID NO: 3725 - protein, 11 aa, BK virus
TDHKAYLDKNN

SEQ ID NO: 3726 - protein, 11 aa, BK virus
DHKAYLDKNNA

SEQ ID NO: 3727 - protein, 11 aa, BK virus
HKAYLDKNNAY

SEQ ID NO: 3728 - protein, 11 aa, BK virus
KAYLDKNNAYP

SEQ ID NO: 3729 - protein, 11 aa, BK virus
AYLDKNNAYPV

SEQ ID NO: 3730 - protein, 11 aa, BK virus
YLDKNNAYPVE

SEQ ID NO: 3731 - protein, 11 aa, BK virus
LDKNNAYPVEC

SEQ ID NO: 3732 - protein, 11 aa, BK virus
DKNNAYPVECW

SEQ ID NO: 3733 - protein, 11 aa, BK virus
KNNAYPVECWV

SEQ ID NO: 3734 - protein, 11 aa, BK virus
NNAYPVECWVP

SEQ ID NO: 3735 - protein, 11 aa, BK virus
NAYPVECWVPD

SEQ ID NO: 3736 - protein, 11 aa, BK virus
AYPVECWVPDP

SEQ ID NO: 3737 - protein, 11 aa, BK virus
YPVECWVPDPS

SEQ ID NO: 3738 - protein, 11 aa, BK virus
PVECWVPDPSR

SEQ ID NO: 3739 - protein, 11 aa, BK virus
VECWVPDPSRN

SEQ ID NO: 3740 - protein, 11 aa, BK virus
ECWVPDPSRNE

SEQ ID NO: 3741 - protein, 11 aa, BK virus
CWVPDPSRNEN

SEQ ID NO: 3742 - protein, 11 aa, BK virus
WVPDPSRNENA

SEQ ID NO: 3743 - protein, 11 aa, BK virus
VPDPSRNENAR

SEQ ID NO: 3744 - protein, 11 aa, BK virus
PDPSRNENARY

SEQ ID NO: 3745 - protein, 11 aa, BK virus
DPSRNENARYF

SEQ ID NO: 3746 - protein, 11 aa, BK virus
PSRNENARYFG

SEQ ID NO: 3747 - protein, 11 aa, BK virus
SRNENARYFGT

SEQ ID NO: 3748 - protein, 11 aa, BK virus
RNENARYFGTF

SEQ ID NO: 3749 - protein, 11 aa, BK virus
NENARYFGTFT

SEQ ID NO: 3750 - protein, 11 aa, BK virus
ENARYFGTFTG

SEQ ID NO: 3751 - protein, 11 aa, BK virus
NARYFGTFTGG

SEQ ID NO: 3752 - protein, 11 aa, BK virus
ARYFGTFTGGE

SEQ ID NO: 3753 - protein, 11 aa, BK virus
RYFGTFTGGEN

SEQ ID NO: 3754 - protein, 11 aa, BK virus
YFGTFTGGENV

SEQ ID NO: 3755 - protein, 11 aa, BK virus
FGTFTGGENVP

SEQ ID NO: 3756 - protein, 11 aa, BK virus
GTFTGGENVPP

SEQ ID NO: 3757 - protein, 11 aa, BK virus
TFTGGENVPPV

SEQ ID NO: 3758 - protein, 11 aa, BK virus
FTGGENVPPVL

SEQ ID NO: 3759 - protein, 11 aa, BK virus
TGGENVPPVLH

SEQ ID NO: 3760 - protein, 11 aa, BK virus
GGENVPPVLHV

SEQ ID NO: 3761 - protein, 11 aa, BK virus
GENVPPVLHVT

SEQ ID NO: 3762 - protein, 11 aa, BK virus
ENVPPVLHVTN

SEQ ID NO: 3763 - protein, 11 aa, BK virus
NVPPVLHVTNT

SEQ ID NO: 3764 - protein, 11 aa, BK virus
VPPVLHVTNTA

SEQ ID NO: 3765 - protein, 11 aa, BK virus
PPVLHVTNTAT

SEQ ID NO: 3766 - protein, 11 aa, BK virus
PVLHVTNTATT

SEQ ID NO: 3767 - protein, 11 aa, BK virus
VLHVTNTATTV

SEQ ID NO: 3768 - protein, 11 aa, BK virus
LHVTNTATTVL

SEQ ID NO: 3769 - protein, 11 aa, BK virus
HVTNTATTVLL

SEQ ID NO: 3770 - protein, 11 aa, BK virus
VTNTATTVLLD

SEQ ID NO: 3771 - protein, 11 aa, BK virus
TNTATTVLLDE

SEQ ID NO: 3772 - protein, 11 aa, BK virus
NTATTVLLDEQ

SEQ ID NO: 3773 - protein, 11 aa, BK virus
TATTVLLDEQG

SEQ ID NO: 3774 - protein, 11 aa, BK virus
ATTVLLDEQGV

SEQ ID NO: 3775 - protein, 11 aa, BK virus
TTVLLDEQGVG

SEQ ID NO: 3776 - protein, 11 aa, BK virus
TVLLDEQGVGP

SEQ ID NO: 3777 - protein, 11 aa, BK virus
VLLDEQGVGPL

SEQ ID NO: 3778 - protein, 11 aa, BK virus
LLDEQGVGPLC

SEQ ID NO: 3779 - protein, 11 aa, BK virus
LDEQGVGPLCK

SEQ ID NO: 3780 - protein, 11 aa, BK virus
DEQGVGPLCKA

SEQ ID NO: 3781 - protein, 11 aa, BK virus
EQGVGPLCKAD

SEQ ID NO: 3782 - protein, 11 aa, BK virus
QGVGPLCKADS

SEQ ID NO: 3783 - protein, 11 aa, BK virus
GVGPLCKADSL

SEQ ID NO: 3784 - protein, 11 aa, BK virus
VGPLCKADSLY

SEQ ID NO: 3785 - protein, 11 aa, BK virus
GPLCKADSLYV

SEQ ID NO: 3786 - protein, 11 aa, BK virus
PLCKADSLYVS

SEQ ID NO: 3787 - protein, 11 aa, BK virus
LCKADSLYVSA

SEQ ID NO: 3788 - protein, 11 aa, BK virus
CKADSLYVSAA

SEQ ID NO: 3789 - protein, 11 aa, BK virus
KADSLYVSAAD

SEQ ID NO: 3790 - protein, 11 aa, BK virus
ADSLYVSAADI

SEQ ID NO: 3791 - protein, 11 aa, BK virus
DSLYVSAADIC

SEQ ID NO: 3792 - protein, 11 aa, BK virus
SLYVSAADICG

SEQ ID NO: 3793 - protein, 11 aa, BK virus
LYVSAADICGL

SEQ ID NO: 3794 - protein, 11 aa, BK virus
YVSAADICGLF

SEQ ID NO: 3795 - protein, 11 aa, BK virus
VSAADICGLFT

SEQ ID NO: 3796 - protein, 11 aa, BK virus
SAADICGLFTN

SEQ ID NO: 3797 - protein, 11 aa, BK virus
AADICGLFTNS

SEQ ID NO: 3798 - protein, 11 aa, BK virus
ADICGLFTNSS

SEQ ID NO: 3799 - protein, 11 aa, BK virus
DICGLFTNSSG

SEQ ID NO: 3800 - protein, 11 aa, BK virus
ICGLFTNSSGT

SEQ ID NO: 3801 - protein, 11 aa, BK virus
CGLFTNSSGTQ

SEQ ID NO: 3802 - protein, 11 aa, BK virus
GLFTNSSGTQQ

SEQ ID NO: 3803 - protein, 11 aa, BK virus
LFTNSSGTQQW

SEQ ID NO: 3804 - protein, 11 aa, BK virus
FTNSSGTQQWR

SEQ ID NO: 3805 - protein, 11 aa, BK virus
TNSSGTQQWRG

SEQ ID NO: 3806 - protein, 11 aa, BK virus
NSSGTQQWRGL

SEQ ID NO: 3807 - protein, 11 aa, BK virus
SSGTQQWRGLA

SEQ ID NO: 3808 - protein, 11 aa, BK virus
SGTQQWRGLAR

SEQ ID NO: 3809 - protein, 11 aa, BK virus
GTQQWRGLARY

SEQ ID NO: 3810 - protein, 11 aa, BK virus
TQQWRGLARYF

SEQ ID NO: 3811 - protein, 11 aa, BK virus
QQWRGLARYFK

SEQ ID NO: 3812 - protein, 11 aa, BK virus
QWRGLARYFKI

SEQ ID NO: 3813 - protein, 11 aa, BK virus
WRGLARYFKIR

SEQ ID NO: 3814 - protein, 11 aa, BK virus
RGLARYFKIRL

SEQ ID NO: 3815 - protein, 11 aa, BK virus
GLARYFKIRLR

SEQ ID NO: 3816 - protein, 11 aa, BK virus
LARYFKIRLRK

SEQ ID NO: 3817 - protein, 11 aa, BK virus
ARYFKIRLRKR

SEQ ID NO: 3818 - protein, 11 aa, BK virus
RYFKIRLRKRS

SEQ ID NO: 3819 - protein, 11 aa, BK virus
YFKIRLRKRSV

SEQ ID NO: 3820 - protein, 11 aa, BK virus
FKIRLRKRSVK

SEQ ID NO: 3821 - protein, 11 aa, BK virus
KIRLRKRSVKN

SEQ ID NO: 3822 - protein, 11 aa, BK virus
IRLRKRSVKNP

SEQ ID NO: 3823 - protein, 11 aa, BK virus
RLRKRSVKNPY

SEQ ID NO: 3824 - protein, 11 aa, BK virus
LRKRSVKNPYP

SEQ ID NO: 3825 - protein, 11 aa, BK virus
RKRSVKNPYPI

SEQ ID NO: 3826 - protein, 11 aa, BK virus
KRSVKNPYPIS

SEQ ID NO: 3827 - protein, 11 aa, BK virus
RSVKNPYPISF

SEQ ID NO: 3828 - protein, 11 aa, BK virus
SVKNPYPISFL

SEQ ID NO: 3829 - protein, 11 aa, BK virus
VKNPYPISFLL

SEQ ID NO: 3830 - protein, 11 aa, BK virus
KNPYPISFLLS

SEQ ID NO: 3831 - protein, 11 aa, BK virus
NPYPISFLLSD

SEQ ID NO: 3832 - protein, 11 aa, BK virus
PYPISFLLSDL

SEQ ID NO: 3833 - protein, 11 aa, BK virus
YPISFLLSDLI

SEQ ID NO: 3834 - protein, 11 aa, BK virus
PISFLLSDLIN

SEQ ID NO: 3835 - protein, 11 aa, BK virus
ISFLLSDLINR

SEQ ID NO: 3836 - protein, 11 aa, BK virus
SFLLSDLINRR

SEQ ID NO: 3837 - protein, 11 aa, BK virus
FLLSDLINRRT

SEQ ID NO: 3838 - protein, 11 aa, BK virus
LLSDLINRRTQ

SEQ ID NO: 3839 - protein, 11 aa, BK virus
LSDLINRRTQR

SEQ ID NO: 3840 - protein, 11 aa, BK virus
SDLINRRTQRV

SEQ ID NO: 3841 - protein, 11 aa, BK virus
DLINRRTQRVD

SEQ ID NO: 3842 - protein, 11 aa, BK virus
LINRRTQRVDG

SEQ ID NO: 3843 - protein, 11 aa, BK virus
INRRTQRVDGQ

SEQ ID NO: 3844 - protein, 11 aa, BK virus
NRRTQRVDGQP

SEQ ID NO: 3845 - protein, 11 aa, BK virus
RRTQRVDGQPM

SEQ ID NO: 3846 - protein, 11 aa, BK virus
RTQRVDGQPMY

SEQ ID NO: 3847 - protein, 11 aa, BK virus
TQRVDGQPMYG

SEQ ID NO: 3848 - protein, 11 aa, BK virus
QRVDGQPMYGM

SEQ ID NO: 3849 - protein, 11 aa, BK virus
RVDGQPMYGME

SEQ ID NO: 3850 - protein, 11 aa, BK virus
VDGQPMYGMES

SEQ ID NO: 3851 - protein, 11 aa, BK virus
DGQPMYGMESQ

SEQ ID NO: 3852 - protein, 11 aa, BK virus
GQPMYGMESQV

SEQ ID NO: 3853 - protein, 11 aa, BK virus
QPMYGMESQVE

SEQ ID NO: 3854 - protein, 11 aa, BK virus
PMYGMESQVEE

SEQ ID NO: 3855 - protein, 11 aa, BK virus
MYGMESQVEEV

SEQ ID NO: 3856 - protein, 11 aa, BK virus
YGMESQVEEVR

SEQ ID NO: 3857 - protein, 11 aa, BK virus
GMESQVEEVRV

SEQ ID NO: 3858 - protein, 11 aa, BK virus
MESQVEEVRVF

SEQ ID NO: 3859 - protein, 11 aa, BK virus
ESQVEEVRVFD

SEQ ID NO: 3860 - protein, 11 aa, BK virus
SQVEEVRVFDG

SEQ ID NO: 3861 - protein, 11 aa, BK virus
QVEEVRVFDGT

SEQ ID NO: 3862 - protein, 11 aa, BK virus
VEEVRVFDGTE

SEQ ID NO: 3863 - protein, 11 aa, BK virus
EEVRVFDGTER

SEQ ID NO: 3864 - protein, 11 aa, BK virus
EVRVFDGTERL

SEQ ID NO: 3865 - protein, 11 aa, BK virus
VRVFDGTERLP

SEQ ID NO: 3866 - protein, 11 aa, BK virus
RVFDGTERLPG

SEQ ID NO: 3867 - protein, 11 aa, BK virus
VFDGTERLPGD

SEQ ID NO: 3868 - protein, 11 aa, BK virus
FDGTERLPGDP

SEQ ID NO: 3869 - protein, 11 aa, BK virus
DGTERLPGDPD

SEQ ID NO: 3870 - protein, 11 aa, BK virus
GTERLPGDPDM

SEQ ID NO: 3871 - protein, 11 aa, BK virus
TERLPGDPDMI

SEQ ID NO: 3872 - protein, 11 aa, BK virus
ERLPGDPDMIR

SEQ ID NO: 3873 - protein, 11 aa, BK virus
RLPGDPDMIRY

SEQ ID NO: 3874 - protein, 11 aa, BK virus
LPGDPDMIRYI

SEQ ID NO: 3875 - protein, 11 aa, BK virus
PGDPDMIRYID

SEQ ID NO: 3876 - protein, 11 aa, BK virus
GDPDMIRYIDK

SEQ ID NO: 3877 - protein, 11 aa, BK virus
DPDMIRYIDKQ

SEQ ID NO: 3878 - protein, 11 aa, BK virus
PDMIRYIDKQG

SEQ ID NO: 3879 - protein, 11 aa, BK virus
DMIRYIDKQGQ

SEQ ID NO: 3880 - protein, 11 aa, BK virus
MIRYIDKQGQL

SEQ ID NO: 3881 - protein, 11 aa, BK virus
IRYIDKQGQLQ

SEQ ID NO: 3882 - protein, 11 aa, BK virus
RYIDKQGQLQT

SEQ ID NO: 3883 - protein, 11 aa, BK virus
YIDKQGQLQTK

SEQ ID NO: 3884 - protein, 11 aa, BK virus
IDKQGQLQTKM

SEQ ID NO: 3885 - protein, 11 aa, BK virus
DKQGQLQTKML

SEQ ID NO: 3886 - protein, 11 aa, BK virus
TGAFIVHIHLI

SEQ ID NO: 3887 - protein, 11 aa, BK virus
GAFIVHIHLIN

SEQ ID NO: 3888 - protein, 11 aa, BK virus
AFIVHIHLINA

SEQ ID NO: 3889 - protein, 11 aa, BK virus
FIVHIHLINAA

SEQ ID NO: 3890 - protein, 11 aa, BK virus
IVHIHLINAAF

SEQ ID NO: 3891 - protein, 11 aa, BK virus
VHIHLINAAFV

SEQ ID NO: 3892 - protein, 11 aa, BK virus
ATFKLVLFWGW

SEQ ID NO: 3893 - protein, 11 aa, BK virus
TFKLVLFWGWC

SEQ ID NO: 3894 - protein, 11 aa, BK virus
FKLVLFWGWCF

SEQ ID NO: 3895 - protein, 11 aa, BK virus
KLVLFWGWCFR

SEQ ID NO: 3896 - protein, 11 aa, BK virus
LVLFWGWCFRP

SEQ ID NO: 3897 - protein, 11 aa, BK virus
VLFWGWCFRPF

SEQ ID NO: 3898 - protein, 11 aa, BK virus
LFWGWCFRPFK

SEQ ID NO: 3899 - protein, 11 aa, BK virus
FWGWCFRPFKT

SEQ ID NO: 3900 - protein, 11 aa, BK virus
WGWCFRPFKTL

SEQ ID NO: 3901 - protein, 11 aa, BK virus
GWCFRPFKTLK

SEQ ID NO: 3902 - protein, 11 aa, BK virus
WCFRPFKTLKA

SEQ ID NO: 3903 - protein, 11 aa, BK virus
CFRPFKTLKAF

SEQ ID NO: 3904 - protein, 11 aa, BK virus
FRPFKTLKAFT

SEQ ID NO: 3905 - protein, 11 aa, BK virus
RPFKTLKAFTQ

SEQ ID NO: 3906 - protein, 11 aa, BK virus
PFKTLKAFTQM

SEQ ID NO: 3907 - protein, 11 aa, BK virus
FKTLKAFTQMQ

SEQ ID NO: 3908 - protein, 11 aa, BK virus
KTLKAFTQMQL

SEQ ID NO: 3909 - protein, 11 aa, BK virus
TLKAFTQMQLL

SEQ ID NO: 3910 - protein, 11 aa, BK virus
LKAFTQMQLLT

SEQ ID NO: 3911 - protein, 11 aa, BK virus
KAFTQMQLLTM

SEQ ID NO: 3912 - protein, 11 aa, BK virus
AFTQMQLLTMG

SEQ ID NO: 3913 - protein, 11 aa, BK virus
FTQMQLLTMGV

SEQ ID NO: 3914 - protein, 11 aa, BK virus
ILFSCNIKNTF

SEQ ID NO: 3915 - protein, 11 aa, BK virus
LFSCNIKNTFP

SEQ ID NO: 3916 - protein, 11 aa, BK virus
FSCNIKNTFPH

SEQ ID NO: 3917 - protein, 11 aa, BK virus
SCNIKNTFPHA

SEQ ID NO: 3918 - protein, 11 aa, BK virus
CNIKNTFPHAY

SEQ ID NO: 3919 - protein, 11 aa, BK virus
NIKNTFPHAYI

SEQ ID NO: 3920 - protein, 11 aa, BK virus
IKNTFPHAYII

SEQ ID NO: 3921 - protein, 11 aa, BK virus
KNTFPHAYIIF

SEQ ID NO: 3922 - protein, 11 aa, BK virus
NTFPHAYIIFH

SEQ ID NO: 3923 - protein, 11 aa, BK virus
TFPHAYIIFHP

SEQ ID NO: 3924 - protein, 11 aa, BK virus
KSIHTYLRIQP

SEQ ID NO: 3925 - protein, 11 aa, BK virus
SIHTYLRIQPF

SEQ ID NO: 3926 - protein, 11 aa, BK virus
IHTYLRIQPFL

SEQ ID NO: 3927 - protein, 11 aa, BK virus
HTYLRIQPFLP

SEQ ID NO: 3928 - protein, 11 aa, BK virus
TYLRIQPFLPF

SEQ ID NO: 3929 - protein, 11 aa, BK virus
YLRIQPFLPFN

SEQ ID NO: 3930 - protein, 11 aa, BK virus
LRIQPFLPFNN

SEQ ID NO: 3931 - protein, 11 aa, BK virus
RIQPFLPFNNS

SEQ ID NO: 3932 - protein, 11 aa, BK virus
IQPFLPFNNSR

SEQ ID NO: 3933 - protein, 11 aa, BK virus
QPFLPFNNSRL

SEQ ID NO: 3934 - protein, 11 aa, BK virus
PFLPFNNSRLY

SEQ ID NO: 3935 - protein, 11 aa, BK virus
FLPFNNSRLYI

SEQ ID NO: 3936 - protein, 11 aa, BK virus
LPFNNSRLYIS

SEQ ID NO: 3937 - protein, 11 aa, BK virus
PFNNSRLYISC

SEQ ID NO: 3938 - protein, 11 aa, BK virus
FNNSRLYISCK

SEQ ID NO: 3939 - protein, 11 aa, BK virus
NNSRLYISCKI

SEQ ID NO: 3940 - protein, 11 aa, BK virus
NSRLYISCKIS

SEQ ID NO: 3941 - protein, 11 aa, BK virus
SRLYISCKISY

SEQ ID NO: 3942 - protein, 11 aa, BK virus
RLYISCKISYR

SEQ ID NO: 3943 - protein, 11 aa, BK virus
LYISCKISYRP

SEQ ID NO: 3944 - protein, 11 aa, BK virus
YISCKISYRPK

SEQ ID NO: 3945 - protein, 11 aa, BK virus
ISCKISYRPKP

SEQ ID NO: 3946 - protein, 11 aa, BK virus
SCKISYRPKPN

SEQ ID NO: 3947 - protein, 11 aa, BK virus
IYFGPKIYLSY

SEQ ID NO: 3948 - protein, 11 aa, BK virus
YFGPKIYLSYK

SEQ ID NO: 3949 - protein, 11 aa, BK virus
FGPKIYLSYKS

SEQ ID NO: 3950 - protein, 11 aa, BK virus
GPKIYLSYKSS

SEQ ID NO: 3951 - protein, 11 aa, BK virus
PKIYLSYKSSL

SEQ ID NO: 3952 - protein, 11 aa, BK virus
KIYLSYKSSLQ

SEQ ID NO: 3953 - protein, 11 aa, BK virus
IYLSYKSSLQG

SEQ ID NO: 3954 - protein, 11 aa, BK virus
YLSYKSSLQGF

SEQ ID NO: 3955 - protein, 11 aa, BK virus
LSYKSSLQGFR

SEQ ID NO: 3956 - protein, 11 aa, BK virus
SYKSSLQGFRD

SEQ ID NO: 3957 - protein, 11 aa, BK virus
YKSSLQGFRDR

SEQ ID NO: 3958 - protein, 11 aa, BK virus
KSSLQGFRDRI

SEQ ID NO: 3959 - protein, 11 aa, BK virus
SSLQGFRDRIL

SEQ ID NO: 3960 - protein, 11 aa, BK virus
SLQGFRDRILI

SEQ ID NO: 3961 - protein, 11 aa, BK virus
LQGFRDRILIH

SEQ ID NO: 3962 - protein, 11 aa, BK virus
QGFRDRILIHC

SEQ ID NO: 3963 - protein, 11 aa, BK virus
GFRDRILIHCN

SEQ ID NO: 3964 - protein, 11 aa, BK virus
FRDRILIHCNQ

SEQ ID NO: 3965 - protein, 11 aa, BK virus
RDRILIHCNQA

SEQ ID NO: 3966 - protein, 11 aa, BK virus
DRILIHCNQAW

SEQ ID NO: 3967 - protein, 11 aa, BK virus
RILIHCNQAWW

SEQ ID NO: 3968 - protein, 11 aa, BK virus
ILIHCNQAWWK

SEQ ID NO: 3969 - protein, 11 aa, BK virus
LIHCNQAWWKY

SEQ ID NO: 3970 - protein, 11 aa, BK virus
IHCNQAWWKYL

SEQ ID NO: 3971 - protein, 11 aa, BK virus
HCNQAWWKYLG

SEQ ID NO: 3972 - protein, 11 aa, BK virus
CNQAWWKYLGS

SEQ ID NO: 3973 - protein, 11 aa, BK virus
NQAWWKYLGSF

SEQ ID NO: 3974 - protein, 11 aa, BK virus
QAWWKYLGSFV

SEQ ID NO: 3975 - protein, 11 aa, BK virus
FSSCPFYIFKN

SEQ ID NO: 3976 - protein, 11 aa, BK virus
SSCPFYIFKNN

SEQ ID NO: 3977 - protein, 11 aa, BK virus
SCPFYIFKNNH

SEQ ID NO: 3978 - protein, 11 aa, BK virus
CPFYIFKNNHV

SEQ ID NO: 3979 - protein, 11 aa, BK virus
PFYIFKNNHVL

SEQ ID NO: 3980 - protein, 11 aa, BK virus
FYIFKNNHVLI

SEQ ID NO: 3981 - protein, 11 aa, BK virus
YIFKNNHVLIY

SEQ ID NO: 3982 - protein, 11 aa, BK virus
IFKNNHVLIYS

SEQ ID NO: 3983 - protein, 11 aa, BK virus
FKNNHVLIYSY

SEQ ID NO: 3984 - protein, 11 aa, BK virus
KNNHVLIYSYT

SEQ ID NO: 3985 - protein, 11 aa, BK virus
CCFSTINGTFK

SEQ ID NO: 3986 - protein, 11 aa, BK virus
PVSSFRYIENN

SEQ ID NO: 3987 - protein, 11 aa, BK virus
VSSFRYIENNT

SEQ ID NO: 3988 - protein, 11 aa, BK virus
SSFRYIENNTV

SEQ ID NO: 3989 - protein, 11 aa, BK virus
SFRYIENNTVQ

SEQ ID NO: 3990 - protein, 11 aa, BK virus
FRYIENNTVQK

SEQ ID NO: 3991 - protein, 11 aa, BK virus
RYIENNTVQKI

SEQ ID NO: 3992 - protein, 11 aa, BK virus
YIENNTVQKIK

SEQ ID NO: 3993 - protein, 11 aa, BK virus
IENNTVQKIKY

SEQ ID NO: 3994 - protein, 11 aa, BK virus
ENNTVQKIKYY

SEQ ID NO: 3995 - protein, 11 aa, BK virus
NNTVQKIKYYR

SEQ ID NO: 3996 - protein, 11 aa, BK virus
NTVQKIKYYRI

SEQ ID NO: 3997 - protein, 11 aa, BK virus
TVQKIKYYRIH

SEQ ID NO: 3998 - protein, 11 aa, BK virus
VQKIKYYRIHF

SEQ ID NO: 3999 - protein, 11 aa, BK virus
QKIKYYRIHFR

SEQ ID NO: 4000 - protein, 11 aa, BK virus
QTVQPSNTCHI

SEQ ID NO: 4001 - protein, 11 aa, BK virus
TVQPSNTCHIL

SEQ ID NO: 4002 - protein, 11 aa, BK virus
VQPSNTCHILF

SEQ ID NO: 4003 - protein, 11 aa, BK virus
HFFPGHMKGIY

SEQ ID NO: 4004 - protein, 11 aa, BK virus
FFPGHMKGIYS

SEQ ID NO: 4005 - protein, 11 aa, BK virus
FPGHMKGIYSF

SEQ ID NO: 4006 - protein, 11 aa, BK virus
PGHMKGIYSFF

SEQ ID NO: 4007 - protein, 11 aa, BK virus
GHMKGIYSFFS

SEQ ID NO: 4008 - protein, 11 aa, BK virus
NCIYCLLTNTF

SEQ ID NO: 4009 - protein, 11 aa, BK virus
CIYCLLTNTFL

SEQ ID NO: 4010 - protein, 11 aa, BK virus
IYCLLTNTFLI

SEQ ID NO: 4011 - protein, 11 aa, BK virus
YCLLTNTFLIF

SEQ ID NO: 4012 - protein, 11 aa, BK virus
CLLTNTFLIFT

SEQ ID NO: 4013 - protein, 11 aa, BK virus
LLTNTFLIFTF

SEQ ID NO: 4014 - protein, 11 aa, BK virus
LTNTFLIFTFC

SEQ ID NO: 4015 - protein, 11 aa, BK virus
TNTFLIFTFCK

SEQ ID NO: 4016 - protein, 11 aa, BK virus
NTFLIFTFCKN

SEQ ID NO: 4017 - protein, 11 aa, BK virus
TFLIFTFCKNN

SEQ ID NO: 4018 - protein, 11 aa, BK virus
FLIFTFCKNNS

SEQ ID NO: 4019 - protein, 11 aa, BK virus
LIFTFCKNNSI

SEQ ID NO: 4020 - protein, 11 aa, BK virus
IFTFCKNNSIC

SEQ ID NO: 4021 - protein, 11 aa, BK virus
FTFCKNNSICK

SEQ ID NO: 4022 - protein, 11 aa, BK virus
TFCKNNSICKV

SEQ ID NO: 4023 - protein, 11 aa, BK virus
FCKNNSICKVL

SEQ ID NO: 4024 - protein, 11 aa, BK virus
CKNNSICKVLF

SEQ ID NO: 4025 - protein, 11 aa, BK virus
KNNSICKVLFM

SEQ ID NO: 4026 - protein, 11 aa, BK virus
NNSICKVLFMI

SEQ ID NO: 4027 - protein, 11 aa, BK virus
NSICKVLFMIL

SEQ ID NO: 4028 - protein, 11 aa, BK virus
SICKVLFMILK

SEQ ID NO: 4029 - protein, 11 aa, BK virus
ICKVLFMILKV

SEQ ID NO: 4030 - protein, 11 aa, BK virus
CKVLFMILKVI

SEQ ID NO: 4031 - protein, 11 aa, BK virus
KVLFMILKVIR

SEQ ID NO: 4032 - protein, 11 aa, BK virus
VLFMILKVIRL

SEQ ID NO: 4033 - protein, 11 aa, BK virus
LFMILKVIRLV

SEQ ID NO: 4034 - protein, 11 aa, BK virus
FMILKVIRLVF

SEQ ID NO: 4035 - protein, 11 aa, BK virus
MILKVIRLVFF

SEQ ID NO: 4036 - protein, 11 aa, BK virus
ILKVIRLVFFL

SEQ ID NO: 4037 - protein, 11 aa, BK virus
LKVIRLVFFLT

SEQ ID NO: 4038 - protein, 11 aa, BK virus
KVIRLVFFLTL

SEQ ID NO: 4039 - protein, 11 aa, BK virus
VIRLVFFLTLF

SEQ ID NO: 4040 - protein, 11 aa, BK virus
IRLVFFLTLFT

SEQ ID NO: 4041 - protein, 11 aa, BK virus
RLVFFLTLFTL

SEQ ID NO: 4042 - protein, 11 aa, BK virus
LVFFLTLFTLL

SEQ ID NO: 4043 - protein, 11 aa, BK virus
VFFLTLFTLLY

SEQ ID NO: 4044 - protein, 11 aa, BK virus
FFLTLFTLLYI

SEQ ID NO: 4045 - protein, 11 aa, BK virus
FLTLFTLLYIV

SEQ ID NO: 4046 - protein, 11 aa, BK virus
LTLFTLLYIVL

SEQ ID NO: 4047 - protein, 11 aa, BK virus
TLFTLLYIVLK

SEQ ID NO: 4048 - protein, 11 aa, BK virus
LFTLLYIVLKF

SEQ ID NO: 4049 - protein, 11 aa, BK virus
KHILTLCLYCI

SEQ ID NO: 4050 - protein, 11 aa, BK virus
HILTLCLYCIL

SEQ ID NO: 4051 - protein, 11 aa, BK virus
ILTLCLYCILS

SEQ ID NO: 4052 - protein, 11 aa, BK virus
LTLCLYCILSN

SEQ ID NO: 4053 - protein, 11 aa, BK virus
FPRHLLCFFRL

SEQ ID NO: 4054 - protein, 11 aa, BK virus
PRHLLCFFRLF

SEQ ID NO: 4055 - protein, 11 aa, BK virus
RHLLCFFRLFW

SEQ ID NO: 4056 - protein, 11 aa, BK virus
HLLCFFRLFWA

SEQ ID NO: 4057 - protein, 11 aa, BK virus
LLCFFRLFWAK

SEQ ID NO: 4058 - protein, 11 aa, BK virus
LCFFRLFWAKI

SEQ ID NO: 4059 - protein, 11 aa, BK virus
CFFRLFWAKIM

SEQ ID NO: 4060 - protein, 11 aa, BK virus
FFRLFWAKIML

SEQ ID NO: 4061 - protein, 11 aa, BK virus
FRLFWAKIMLL

SEQ ID NO: 4062 - protein, 11 aa, BK virus
APLNAFFYSMV

SEQ ID NO: 4063 - protein, 11 aa, BK virus
PLNAFFYSMVW

SEQ ID NO: 4064 - protein, 11 aa, BK virus
LNAFFYSMVWI

SEQ ID NO: 4065 - protein, 11 aa, BK virus
NAFFYSMVWIS

SEQ ID NO: 4066 - protein, 11 aa, BK virus
AFFYSMVWISS

SEQ ID NO: 4067 - protein, 11 aa, BK virus
KTKGTQLLTEI

SEQ ID NO: 4068 - protein, 11 aa, BK virus
TKGTQLLTEII

SEQ ID NO: 4069 - protein, 11 aa, BK virus
KGTQLLTEIIN

SEQ ID NO: 4070 - protein, 11 aa, BK virus
GTQLLTEIINC

SEQ ID NO: 4071 - protein, 11 aa, BK virus
TQLLTEIINCR

SEQ ID NO: 4072 - protein, 11 aa, BK virus
QLLTEIINCRN

SEQ ID NO: 4073 - protein, 11 aa, BK virus
LLTEIINCRNS

SEQ ID NO: 4074 - protein, 11 aa, BK virus
LTEIINCRNSM

SEQ ID NO: 4075 - protein, 11 aa, BK virus
TEIINCRNSMS

SEQ ID NO: 4076 - protein, 11 aa, BK virus
EIINCRNSMSM

SEQ ID NO: 4077 - protein, 11 aa, BK virus
IINCRNSMSMW

SEQ ID NO: 4078 - protein, 11 aa, BK virus
INCRNSMSMWS

SEQ ID NO: 4079 - protein, 11 aa, BK virus
KEYNIMPSTHV

SEQ ID NO: 4080 - protein, 11 aa, BK virus
EYNIMPSTHVS

SEQ ID NO: 4081 - protein, 11 aa, BK virus
YNIMPSTHVST

SEQ ID NO: 4082 - protein, 11 aa, BK virus
NIMPSTHVSTN

SEQ ID NO: 4083 - protein, 11 aa, BK virus
IMPSTHVSTNK

SEQ ID NO: 4084 - protein, 11 aa, BK virus
MPSTHVSTNKS

SEQ ID NO: 4085 - protein, 11 aa, BK virus
PSTHVSTNKSY

SEQ ID NO: 4086 - protein, 11 aa, BK virus
STHVSTNKSYR

SEQ ID NO: 4087 - protein, 11 aa, BK virus
THVSTNKSYRI

SEQ ID NO: 4088 - protein, 11 aa, BK virus
HVSTNKSYRIF

SEQ ID NO: 4089 - protein, 11 aa, BK virus
VSTNKSYRIFF

SEQ ID NO: 4090 - protein, 11 aa, BK virus
STNKSYRIFFH

SEQ ID NO: 4091 - protein, 11 aa, BK virus
TNKSYRIFFHK

SEQ ID NO: 4092 - protein, 11 aa, BK virus
NKSYRIFFHKF

SEQ ID NO: 4093 - protein, 11 aa, BK virus
KSYRIFFHKFF

SEQ ID NO: 4094 - protein, 11 aa, BK virus
SYRIFFHKFFI

SEQ ID NO: 4095 - protein, 11 aa, BK virus
YRIFFHKFFIQ

SEQ ID NO: 4096 - protein, 11 aa, BK virus
RIFFHKFFIQN

SEQ ID NO: 4097 - protein, 11 aa, BK virus
IFFHKFFIQNL

SEQ ID NO: 4098 - protein, 11 aa, BK virus
FFHKFFIQNLS

SEQ ID NO: 4099 - protein, 11 aa, BK virus
FHKFFIQNLSF

SEQ ID NO: 4100 - protein, 11 aa, BK virus
HKFFIQNLSFF

SEQ ID NO: 4101 - protein, 11 aa, BK virus
KFFIQNLSFFF

SEQ ID NO: 4102 - protein, 11 aa, BK virus
FFIQNLSFFFS

SEQ ID NO: 4103 - protein, 11 aa, BK virus
FIQNLSFFFSS

SEQ ID NO: 4104 - protein, 11 aa, BK virus
IQNLSFFFSSI

SEQ ID NO: 4105 - protein, 11 aa, BK virus
QNLSFFFSSIH

SEQ ID NO: 4106 - protein, 11 aa, BK virus
NLSFFFSSIHS

SEQ ID NO: 4107 - protein, 11 aa, BK virus
LSFFFSSIHSK

SEQ ID NO: 4108 - protein, 11 aa, BK virus
SFFFSSIHSKA

SEQ ID NO: 4109 - protein, 11 aa, BK virus
FFFSSIHSKAG

SEQ ID NO: 4110 - protein, 11 aa, BK virus
FFSSIHSKAGK

SEQ ID NO: 4111 - protein, 11 aa, BK virus
FSSIHSKAGKG

SEQ ID NO: 4112 - protein, 11 aa, BK virus
SSIHSKAGKGS

SEQ ID NO: 4113 - protein, 11 aa, BK virus
SIHSKAGKGSI

SEQ ID NO: 4114 - protein, 11 aa, BK virus
IHSKAGKGSIT

SEQ ID NO: 4115 - protein, 11 aa, BK virus
HSKAGKGSITK

SEQ ID NO: 4116 - protein, 11 aa, BK virus
SKAGKGSITKY

SEQ ID NO: 4117 - protein, 11 aa, BK virus
KAGKGSITKYS

SEQ ID NO: 4118 - protein, 11 aa, BK virus
AGKGSITKYSL

SEQ ID NO: 4119 - protein, 11 aa, BK virus
GKGSITKYSLT

SEQ ID NO: 4120 - protein, 11 aa, BK virus
KGSITKYSLTK

SEQ ID NO: 4121 - protein, 11 aa, BK virus
GSITKYSLTKK

SEQ ID NO: 4122 - protein, 11 aa, BK virus
SITKYSLTKKL

SEQ ID NO: 4123 - protein, 11 aa, BK virus
ITKYSLTKKLV

SEQ ID NO: 4124 - protein, 11 aa, BK virus
IRGKVFRVFYL

SEQ ID NO: 4125 - protein, 11 aa, BK virus
RGKVFRVFYLS

SEQ ID NO: 4126 - protein, 11 aa, BK virus
GKVFRVFYLSF

SEQ ID NO: 4127 - protein, 11 aa, BK virus
KVFRVFYLSFF

SEQ ID NO: 4128 - protein, 11 aa, BK virus
VFRVFYLSFFF

SEQ ID NO: 4129 - protein, 11 aa, BK virus
FRVFYLSFFFG

SEQ ID NO: 4130 - protein, 11 aa, BK virus
RVFYLSFFFGW

SEQ ID NO: 4131 - protein, 11 aa, BK virus
VFYLSFFFGWC

SEQ ID NO: 4132 - protein, 11 aa, BK virus
VLRICCCFFIT

SEQ ID NO: 4133 - protein, 11 aa, BK virus
LRICCCFFITG

SEQ ID NO: 4134 - protein, 11 aa, BK virus
RICCCFFITGK

SEQ ID NO: 4135 - protein, 11 aa, BK virus
ICCCFFITGKH

SEQ ID NO: 4136 - protein, 11 aa, BK virus
CCCFFITGKHI

SEQ ID NO: 4137 - protein, 11 aa, BK virus
CCFFITGKHIF

SEQ ID NO: 4138 - protein, 11 aa, BK virus
CFFITGKHIFM

SEQ ID NO: 4139 - protein, 11 aa, BK virus
FFITGKHIFMA

SEQ ID NO: 4140 - protein, 11 aa, BK virus
FITGKHIFMAK

SEQ ID NO: 4141 - protein, 11 aa, BK virus
IFIPFFIKGTP

SEQ ID NO: 4142 - protein, 11 aa, BK virus
FIPFFIKGTPP

SEQ ID NO: 4143 - protein, 11 aa, BK virus
IPFFIKGTPPG

SEQ ID NO: 4144 - protein, 11 aa, BK virus
PFFIKGTPPGL

SEQ ID NO: 4145 - protein, 11 aa, BK virus
FFIKGTPPGLP

SEQ ID NO: 4146 - protein, 11 aa, BK virus
FIKGTPPGLPL

SEQ ID NO: 4147 - protein, 11 aa, BK virus
IKGTPPGLPLF

SEQ ID NO: 4148 - protein, 11 aa, BK virus
KGTPPGLPLFC

SEQ ID NO: 4149 - protein, 11 aa, BK virus
GTPPGLPLFCS

SEQ ID NO: 4150 - protein, 11 aa, BK virus
TPPGLPLFCSI

SEQ ID NO: 4151 - protein, 11 aa, BK virus
PPGLPLFCSIG

SEQ ID NO: 4152 - protein, 11 aa, BK virus
PGLPLFCSIGW

SEQ ID NO: 4153 - protein, 11 aa, BK virus
GLPLFCSIGWH

SEQ ID NO: 4154 - protein, 11 aa, BK virus
LPLFCSIGWHL

SEQ ID NO: 4155 - protein, 11 aa, BK virus
SFRSLKGVSPI

SEQ ID NO: 4156 - protein, 11 aa, BK virus
FRSLKGVSPII

SEQ ID NO: 4157 - protein, 11 aa, BK virus
RSLKGVSPIIW

SEQ ID NO: 4158 - protein, 11 aa, BK virus
SLKGVSPIIWT

SEQ ID NO: 4159 - protein, 11 aa, BK virus
LKGVSPIIWTH

SEQ ID NO: 4160 - protein, 11 aa, BK virus
KGVSPIIWTHH

SEQ ID NO: 4161 - protein, 11 aa, BK virus
GVSPIIWTHHC

SEQ ID NO: 4162 - protein, 11 aa, BK virus
VSPIIWTHHCR

SEQ ID NO: 4163 - protein, 11 aa, BK virus
SPIIWTHHCRV

SEQ ID NO: 4164 - protein, 11 aa, BK virus
PIIWTHHCRVS

SEQ ID NO: 4165 - protein, 11 aa, BK virus
IIWTHHCRVSS

SEQ ID NO: 4166 - protein, 11 aa, BK virus
IWTHHCRVSSV

SEQ ID NO: 4167 - protein, 11 aa, BK virus
WTHHCRVSSVR

SEQ ID NO: 4168 - protein, 11 aa, BK virus
THHCRVSSVRS

SEQ ID NO: 4169 - protein, 11 aa, BK virus
HHCRVSSVRSK

SEQ ID NO: 4170 - protein, 11 aa, BK virus
HCRVSSVRSKP

SEQ ID NO: 4171 - protein, 11 aa, BK virus
CRVSSVRSKPN

SEQ ID NO: 4172 - protein, 11 aa, BK virus
RVSSVRSKPNH

SEQ ID NO: 4173 - protein, 11 aa, BK virus
VSSVRSKPNHC

SEQ ID NO: 4174 - protein, 11 aa, BK virus
SSVRSKPNHCV

SEQ ID NO: 4175 - protein, 11 aa, BK virus
SVRSKPNHCVK

SEQ ID NO: 4176 - protein, 11 aa, BK virus
VRSKPNHCVKQ

SEQ ID NO: 4177 - protein, 11 aa, BK virus
RSKPNHCVKQS

SEQ ID NO: 4178 - protein, 11 aa, BK virus
SKPNHCVKQSM

SEQ ID NO: 4179 - protein, 11 aa, BK virus
KPNHCVKQSMQ

SEQ ID NO: 4180 - protein, 11 aa, BK virus
QSIQTKGSFLK

SEQ ID NO: 4181 - protein, 11 aa, BK virus
SIQTKGSFLKN

SEQ ID NO: 4182 - protein, 11 aa, BK virus
IQTKGSFLKNF

SEQ ID NO: 4183 - protein, 11 aa, BK virus
QTKGSFLKNFL

SEQ ID NO: 4184 - protein, 11 aa, BK virus
TKGSFLKNFLF

SEQ ID NO: 4185 - protein, 11 aa, BK virus
KGSFLKNFLFK

SEQ ID NO: 4186 - protein, 11 aa, BK virus
GSFLKNFLFKC

SEQ ID NO: 4187 - protein, 11 aa, BK virus
SFLKNFLFKCL

SEQ ID NO: 4188 - protein, 11 aa, BK virus
FLKNFLFKCLN

SEQ ID NO: 4189 - protein, 11 aa, BK virus
LKNFLFKCLNL

SEQ ID NO: 4190 - protein, 11 aa, BK virus
KNFLFKCLNLS

SEQ ID NO: 4191 - protein, 11 aa, BK virus
HSMQGQCTEGF

SEQ ID NO: 4192 - protein, 11 aa, BK virus
SMQGQCTEGFL

SEQ ID NO: 4193 - protein, 11 aa, BK virus
MQGQCTEGFLE

SEQ ID NO: 4194 - protein, 11 aa, BK virus
QGQCTEGFLEQ

SEQ ID NO: 4195 - protein, 11 aa, BK virus
GQCTEGFLEQI

SEQ ID NO: 4196 - protein, 11 aa, BK virus
QCTEGFLEQIG

SEQ ID NO: 4197 - protein, 11 aa, BK virus
CTEGFLEQIGH

SEQ ID NO: 4198 - protein, 11 aa, BK virus
TEGFLEQIGHS

SEQ ID NO: 4199 - protein, 11 aa, BK virus
EGFLEQIGHSL

SEQ ID NO: 4200 - protein, 11 aa, BK virus
GFLEQIGHSLQ

SEQ ID NO: 4201 - protein, 11 aa, BK virus
FLEQIGHSLQY

SEQ ID NO: 4202 - protein, 11 aa, BK virus
LEQIGHSLQYR

SEQ ID NO: 4203 - protein, 11 aa, BK virus
EQIGHSLQYRV

SEQ ID NO: 4204 - protein, 11 aa, BK virus
QIGHSLQYRVS

SEQ ID NO: 4205 - protein, 11 aa, BK virus
IGHSLQYRVSG

SEQ ID NO: 4206 - protein, 11 aa, BK virus
GHSLQYRVSGQ

SEQ ID NO: 4207 - protein, 11 aa, BK virus
HSLQYRVSGQR

SEQ ID NO: 4208 - protein, 11 aa, BK virus
SLQYRVSGQRG

SEQ ID NO: 4209 - protein, 11 aa, BK virus
LQYRVSGQRGK

SEQ ID NO: 4210 - protein, 11 aa, BK virus
QYRVSGQRGKS

SEQ ID NO: 4211 - protein, 11 aa, BK virus
YRVSGQRGKSA

SEQ ID NO: 4212 - protein, 11 aa, BK virus
RVSGQRGKSAQ

SEQ ID NO: 4213 - protein, 11 aa, BK virus
VSGQRGKSAQT

SEQ ID NO: 4214 - protein, 11 aa, BK virus
SGQRGKSAQTS

SEQ ID NO: 4215 - protein, 11 aa, BK virus
GQRGKSAQTSE

SEQ ID NO: 4216 - protein, 11 aa, BK virus
QRGKSAQTSEL

SEQ ID NO: 4217 - protein, 11 aa, BK virus
RGKSAQTSELL

SEQ ID NO: 4218 - protein, 11 aa, BK virus
GKSAQTSELLQ

SEQ ID NO: 4219 - protein, 11 aa, BK virus
KSAQTSELLQV

SEQ ID NO: 4220 - protein, 11 aa, BK virus
SAQTSELLQVP

SEQ ID NO: 4221 - protein, 11 aa, BK virus
AQTSELLQVPK

SEQ ID NO: 4222 - protein, 11 aa, BK virus
QTSELLQVPKS

SEQ ID NO: 4223 - protein, 11 aa, BK virus
TSELLQVPKSG

SEQ ID NO: 4224 - protein, 11 aa, BK virus
ATFTSCSIFLY

SEQ ID NO: 4225 - protein, 11 aa, BK virus
TFTSCSIFLYK

SEQ ID NO: 4226 - protein, 11 aa, BK virus
FTSCSIFLYKV

SEQ ID NO: 4227 - protein, 11 aa, BK virus
TSCSIFLYKVF

SEQ ID NO: 4228 - protein, 11 aa, BK virus
SCSIFLYKVFI

SEQ ID NO: 4229 - protein, 11 aa, BK virus
CSIFLYKVFIL

SEQ ID NO: 4230 - protein, 11 aa, BK virus
SIFLYKVFILF

SEQ ID NO: 4231 - protein, 11 aa, BK virus
IFLYKVFILFI

SEQ ID NO: 4232 - protein, 11 aa, BK virus
FLYKVFILFIL

SEQ ID NO: 4233 - protein, 11 aa, BK virus
LYKVFILFILS

SEQ ID NO: 4234 - protein, 11 aa, BK virus
YKVFILFILSS

SEQ ID NO: 4235 - protein, 11 aa, BK virus
KVFILFILSSS

SEQ ID NO: 4236 - protein, 11 aa, BK virus
VFILFILSSSP

SEQ ID NO: 4237 - protein, 11 aa, BK virus
FILFILSSSPP

SEQ ID NO: 4238 - protein, 11 aa, BK virus
ILFILSSSPPL

SEQ ID NO: 4239 - protein, 11 aa, BK virus
LFILSSSPPLS

SEQ ID NO: 4240 - protein, 11 aa, BK virus
FILSSSPPLSG

SEQ ID NO: 4241 - protein, 11 aa, BK virus
AFLIKGRFPQA

SEQ ID NO: 4242 - protein, 11 aa, BK virus
FLIKGRFPQAA

SEQ ID NO: 4243 - protein, 11 aa, BK virus
LIKGRFPQAAL

SEQ ID NO: 4244 - protein, 11 aa, BK virus
IKGRFPQAALS

SEQ ID NO: 4245 - protein, 11 aa, BK virus
KGRFPQAALSR

SEQ ID NO: 4246 - protein, 11 aa, BK virus
GRFPQAALSRP

SEQ ID NO: 4247 - protein, 11 aa, BK virus
RFPQAALSRPK

SEQ ID NO: 4248 - protein, 11 aa, BK virus
FPQAALSRPKR

SEQ ID NO: 4249 - protein, 11 aa, BK virus
PQAALSRPKRS

SEQ ID NO: 4250 - protein, 11 aa, BK virus
QAALSRPKRSM

SEQ ID NO: 4251 - protein, 11 aa, BK virus
AALSRPKRSMS

SEQ ID NO: 4252 - protein, 11 aa, BK virus
ALSRPKRSMSS

SEQ ID NO: 4253 - protein, 11 aa, BK virus
LSRPKRSMSSM

SEQ ID NO: 4254 - protein, 11 aa, BK virus
SRPKRSMSSMD

SEQ ID NO: 4255 - protein, 11 aa, BK virus
RPKRSMSSMDS

SEQ ID NO: 4256 - protein, 11 aa, BK virus
PKRSMSSMDSS

SEQ ID NO: 4257 - protein, 11 aa, BK virus
KRSMSSMDSSL

SEQ ID NO: 4258 - protein, 11 aa, BK virus
RSMSSMDSSLL

SEQ ID NO: 4259 - protein, 11 aa, BK virus
SMSSMDSSLLR

SEQ ID NO: 4260 - protein, 11 aa, BK virus
MSSMDSSLLRT

SEQ ID NO: 4261 - protein, 11 aa, BK virus
SSMDSSLLRTL

SEQ ID NO: 4262 - protein, 11 aa, BK virus
SMDSSLLRTLS

SEQ ID NO: 4263 - protein, 8 aa, BK virus
GFPQIVLL

SEQ ID NO: 4264 - protein, 8 aa, BK virus
FPQIVLLG

SEQ ID NO: 4265 - protein, 8 aa, BK virus
PQIVLLGL

SEQ ID NO: 4266 - protein, 8 aa, BK virus
QIVLLGLR

SEQ ID NO: 4267 - protein, 8 aa, BK virus
IVLLGLRK

SEQ ID NO: 4268 - protein, 8 aa, BK virus
VLLGLRKS

SEQ ID NO: 4269 - protein, 8 aa, BK virus
LLGLRKSL

SEQ ID NO: 4270 - protein, 8 aa, BK virus
LGLRKSLH

SEQ ID NO: 4271 - protein, 8 aa, BK virus
GLRKSLHT

SEQ ID NO: 4272 - protein, 8 aa, BK virus
LRKSLHTL

SEQ ID NO: 4273 - protein, 8 aa, BK virus
RKSLHTLT

SEQ ID NO: 4274 - protein, 8 aa, BK virus
KSLHTLTT

SEQ ID NO: 4275 - protein, 8 aa, BK virus
EKGWRQRR

SEQ ID NO: 4276 - protein, 8 aa, BK virus
KGWRQRRP

SEQ ID NO: 4277 - protein, 8 aa, BK virus
GWRQRRPR

SEQ ID NO: 4278 - protein, 8 aa, BK virus
WRQRRPRP

SEQ ID NO: 4279 - protein, 8 aa, BK virus
RQRRPRPL

SEQ ID NO: 4280 - protein, 8 aa, BK virus
QRRPRPLI

SEQ ID NO: 4281 - protein, 8 aa, BK virus
RRPRPLIY

SEQ ID NO: 4282 - protein, 8 aa, BK virus
RPRPLIYY

SEQ ID NO: 4283 - protein, 8 aa, BK virus
PRPLIYYK

SEQ ID NO: 4284 - protein, 8 aa, BK virus
RPLIYYKK

SEQ ID NO: 4285 - protein, 8 aa, BK virus
PLIYYKKK

SEQ ID NO: 4286 - protein, 8 aa, BK virus
LIYYKKKG

SEQ ID NO: 4287 - protein, 8 aa, BK virus
IYYKKKGH

SEQ ID NO: 4288 - protein, 8 aa, BK virus
YYKKKGHR

SEQ ID NO: 4289 - protein, 8 aa, BK virus
YKKKGHRE

SEQ ID NO: 4290 - protein, 8 aa, BK virus
KKKGHREE

SEQ ID NO: 4291 - protein, 8 aa, BK virus
KKGHREEL

SEQ ID NO: 4292 - protein, 8 aa, BK virus
KGHREELL

SEQ ID NO: 4293 - protein, 8 aa, BK virus
GHREELLT

SEQ ID NO: 4294 - protein, 8 aa, BK virus
HREELLTH

SEQ ID NO: 4295 - protein, 8 aa, BK virus
REELLTHG

SEQ ID NO: 4296 - protein, 8 aa, BK virus
EELLTHGM

SEQ ID NO: 4297 - protein, 8 aa, BK virus
ELLTHGMQ

SEQ ID NO: 4298 - protein, 8 aa, BK virus
LLTHGMQP

SEQ ID NO: 4299 - protein, 8 aa, BK virus
LTHGMQPN

SEQ ID NO: 4300 - protein, 8 aa, BK virus
THGMQPNH

SEQ ID NO: 4301 - protein, 8 aa, BK virus
HGMQPNHD

SEQ ID NO: 4302 - protein, 8 aa, BK virus
GMQPNHDL

SEQ ID NO: 4303 - protein, 8 aa, BK virus
MQPNHDLR

SEQ ID NO: 4304 - protein, 8 aa, BK virus
QPNHDLRK

SEQ ID NO: 4305 - protein, 8 aa, BK virus
PNHDLRKE

SEQ ID NO: 4306 - protein, 8 aa, BK virus
NHDLRKES

SEQ ID NO: 4307 - protein, 8 aa, BK virus
HDLRKESA

SEQ ID NO: 4308 - protein, 8 aa, BK virus
LTGECSQT

SEQ ID NO: 4309 - protein, 8 aa, BK virus
TGECSQTM

SEQ ID NO: 4310 - protein, 8 aa, BK virus
GECSQTMT

SEQ ID NO: 4311 - protein, 8 aa, BK virus
ECSQTMTS

SEQ ID NO: 4312 - protein, 8 aa, BK virus
CSQTMTSG

SEQ ID NO: 4313 - protein, 8 aa, BK virus
SQTMTSGR

SEQ ID NO: 4314 - protein, 8 aa, BK virus
QTMTSGRK

SEQ ID NO: 4315 - protein, 8 aa, BK virus
TMTSGRKV

SEQ ID NO: 4316 - protein, 8 aa, BK virus
MTSGRKVH

SEQ ID NO: 4317 - protein, 8 aa, BK virus
TSGRKVHD

SEQ ID NO: 4318 - protein, 8 aa, BK virus
SGRKVHDS

SEQ ID NO: 4319 - protein, 8 aa, BK virus
GRKVHDSQ

SEQ ID NO: 4320 - protein, 8 aa, BK virus
RKVHDSQG

SEQ ID NO: 4321 - protein, 8 aa, BK virus
KVHDSQGG

SEQ ID NO: 4322 - protein, 8 aa, BK virus
VHDSQGGA

SEQ ID NO: 4323 - protein, 8 aa, BK virus
HDSQGGAA

SEQ ID NO: 4324 - protein, 8 aa, BK virus
DSQGGAAY

SEQ ID NO: 4325 - protein, 8 aa, BK virus
SQGGAAYP

SEQ ID NO: 4326 - protein, 8 aa, BK virus
QGGAAYPW

SEQ ID NO: 4327 - protein, 8 aa, BK virus
GGAAYPWN

SEQ ID NO: 4328 - protein, 8 aa, BK virus
GAAYPWNA

SEQ ID NO: 4329 - protein, 8 aa, BK virus
AAYPWNAA

SEQ ID NO: 4330 - protein, 8 aa, BK virus
AYPWNAAK

SEQ ID NO: 4331 - protein, 8 aa, BK virus
YPWNAAKP

SEQ ID NO: 4332 - protein, 8 aa, BK virus
PQEGKCMT

SEQ ID NO: 4333 - protein, 8 aa, BK virus
QEGKCMTD

SEQ ID NO: 4334 - protein, 8 aa, BK virus
EGKCMTDM

SEQ ID NO: 4335 - protein, 8 aa, BK virus
GKCMTDMF

SEQ ID NO: 4336 - protein, 8 aa, BK virus
KCMTDMFC

SEQ ID NO: 4337 - protein, 8 aa, BK virus
CMTDMFCE

SEQ ID NO: 4338 - protein, 8 aa, BK virus
MTDMFCEP

SEQ ID NO: 4339 - protein, 8 aa, BK virus
TDMFCEPR

SEQ ID NO: 4340 - protein, 8 aa, BK virus
DMFCEPRN

SEQ ID NO: 4341 - protein, 8 aa, BK virus
MFCEPRNL

SEQ ID NO: 4342 - protein, 8 aa, BK virus
FCEPRNLG

SEQ ID NO: 4343 - protein, 8 aa, BK virus
CEPRNLGL

SEQ ID NO: 4344 - protein, 8 aa, BK virus
EPRNLGLV

SEQ ID NO: 4345 - protein, 8 aa, BK virus
PRNLGLVP

SEQ ID NO: 4346 - protein, 8 aa, BK virus
RNLGLVPS

SEQ ID NO: 4347 - protein, 8 aa, BK virus
TGQRPWFC

SEQ ID NO: 4348 - protein, 8 aa, BK virus
GQRPWFCA

SEQ ID NO: 4349 - protein, 8 aa, BK virus
QRPWFCAS

SEQ ID NO: 4350 - protein, 8 aa, BK virus
RPWFCASC

SEQ ID NO: 4351 - protein, 8 aa, BK virus
PWFCASCH

SEQ ID NO: 4352 - protein, 8 aa, BK virus
WFCASCHD

SEQ ID NO: 4353 - protein, 8 aa, BK virus
FCASCHDK

SEQ ID NO: 4354 - protein, 8 aa, BK virus
CASCHDKL

SEQ ID NO: 4355 - protein, 8 aa, BK virus
ASCHDKLQ

SEQ ID NO: 4356 - protein, 8 aa, BK virus
KLVKPGLE

SEQ ID NO: 4357 - protein, 8 aa, BK virus
LVKPGLEQ

SEQ ID NO: 4358 - protein, 8 aa, BK virus
VKPGLEQK

SEQ ID NO: 4359 - protein, 8 aa, BK virus
KPGLEQKK

SEQ ID NO: 4360 - protein, 8 aa, BK virus
PGLEQKKE

SEQ ID NO: 4361 - protein, 8 aa, BK virus
GLEQKKEL

SEQ ID NO: 4362 - protein, 8 aa, BK virus
LEQKKELR

SEQ ID NO: 4363 - protein, 8 aa, BK virus
EQKKELRG

SEQ ID NO: 4364 - protein, 8 aa, BK virus
QKKELRGF

SEQ ID NO: 4365 - protein, 8 aa, BK virus
KKELRGFL

SEQ ID NO: 4366 - protein, 8 aa, BK virus
KELRGFLF

SEQ ID NO: 4367 - protein, 8 aa, BK virus
ELRGFLFL

SEQ ID NO: 4368 - protein, 8 aa, BK virus
LRGFLFLF

SEQ ID NO: 4369 - protein, 8 aa, BK virus
SFCWNFVE

SEQ ID NO: 4370 - protein, 8 aa, BK virus
FCWNFVEV

SEQ ID NO: 4371 - protein, 8 aa, BK virus
CWNFVEVK

SEQ ID NO: 4372 - protein, 8 aa, BK virus
WNFVEVKT

SEQ ID NO: 4373 - protein, 8 aa, BK virus
NFVEVKTV

SEQ ID NO: 4374 - protein, 8 aa, BK virus
TGKTKVPL

SEQ ID NO: 4375 - protein, 8 aa, BK virus
GKTKVPLL

SEQ ID NO: 4376 - protein, 8 aa, BK virus
KTKVPLLY

SEQ ID NO: 4377 - protein, 8 aa, BK virus
TKVPLLYL

SEQ ID NO: 4378 - protein, 8 aa, BK virus
KVPLLYLL

SEQ ID NO: 4379 - protein, 8 aa, BK virus
VIPFFLYF

SEQ ID NO: 4380 - protein, 8 aa, BK virus
IPFFLYFQ

SEQ ID NO: 4381 - protein, 8 aa, BK virus
PFFLYFQV

SEQ ID NO: 4382 - protein, 8 aa, BK virus
FFLYFQVH

SEQ ID NO: 4383 - protein, 8 aa, BK virus
FLYFQVHG

SEQ ID NO: 4384 - protein, 8 aa, BK virus
LYFQVHGC

SEQ ID NO: 4385 - protein, 8 aa, BK virus
YFQVHGCC

SEQ ID NO: 4386 - protein, 8 aa, BK virus
FQVHGCCS

SEQ ID NO: 4387 - protein, 8 aa, BK virus
QVHGCCSS

SEQ ID NO: 4388 - protein, 8 aa, BK virus
VHGCCSST

SEQ ID NO: 4389 - protein, 8 aa, BK virus
HGCCSSTF

SEQ ID NO: 4390 - protein, 8 aa, BK virus
GCCSSTFG

SEQ ID NO: 4391 - protein, 8 aa, BK virus
CCSSTFGG

SEQ ID NO: 4392 - protein, 8 aa, BK virus
CSSTFGGP

SEQ ID NO: 4393 - protein, 8 aa, BK virus
SSTFGGPS

SEQ ID NO: 4394 - protein, 8 aa, BK virus
STFGGPSC

SEQ ID NO: 4395 - protein, 8 aa, BK virus
TFGGPSCQ

SEQ ID NO: 4396 - protein, 8 aa, BK virus
FGGPSCQC

SEQ ID NO: 4397 - protein, 8 aa, BK virus
GGPSCQCI

SEQ ID NO: 4398 - protein, 8 aa, BK virus
GCCCHRIF

SEQ ID NO: 4399 - protein, 8 aa, BK virus
CCCHRIFS

SEQ ID NO: 4400 - protein, 8 aa, BK virus
CCHRIFSG

SEQ ID NO: 4401 - protein, 8 aa, BK virus
NCCWGGCC

SEQ ID NO: 4402 - protein, 8 aa, BK virus
CCWGGCCC

SEQ ID NO: 4403 - protein, 8 aa, BK virus
CWGGCCCY

SEQ ID NO: 4404 - protein, 8 aa, BK virus
WGGCCCYR

SEQ ID NO: 4405 - protein, 8 aa, BK virus
GGCCCYRS

SEQ ID NO: 4406 - protein, 8 aa, BK virus
GCCCYRSS

SEQ ID NO: 4407 - protein, 8 aa, BK virus
CCCYRSSN

SEQ ID NO: 4408 - protein, 8 aa, BK virus
CCYRSSNC

SEQ ID NO: 4409 - protein, 8 aa, BK virus
CYRSSNCI

SEQ ID NO: 4410 - protein, 8 aa, BK virus
YRSSNCIP

SEQ ID NO: 4411 - protein, 8 aa, BK virus
RSSNCIPC

SEQ ID NO: 4412 - protein, 8 aa, BK virus
SSNCIPCY

SEQ ID NO: 4413 - protein, 8 aa, BK virus
SNCIPCYC

SEQ ID NO: 4414 - protein, 8 aa, BK virus
NCIPCYCR

SEQ ID NO: 4415 - protein, 8 aa, BK virus
CIPCYCRG

SEQ ID NO: 4416 - protein, 8 aa, BK virus
IPCYCRGH

SEQ ID NO: 4417 - protein, 8 aa, BK virus
PCYCRGHN

SEQ ID NO: 4418 - protein, 8 aa, BK virus
CYCRGHNK

SEQ ID NO: 4419 - protein, 8 aa, BK virus
YCRGHNKY

SEQ ID NO: 4420 - protein, 8 aa, BK virus
CRGHNKYL

SEQ ID NO: 4421 - protein, 8 aa, BK virus
RGHNKYLR

SEQ ID NO: 4422 - protein, 8 aa, BK virus
GHNKYLRG

SEQ ID NO: 4423 - protein, 8 aa, BK virus
HNKYLRGY

SEQ ID NO: 4424 - protein, 8 aa, BK virus
NKYLRGYS

SEQ ID NO: 4425 - protein, 8 aa, BK virus
KYLRGYSC

SEQ ID NO: 4426 - protein, 8 aa, BK virus
YLRGYSCY

SEQ ID NO: 4427 - protein, 8 aa, BK virus
LRGYSCYR

SEQ ID NO: 4428 - protein, 8 aa, BK virus
RGYSCYRP

SEQ ID NO: 4429 - protein, 8 aa, BK virus
GYSCYRPN

SEQ ID NO: 4430 - protein, 8 aa, BK virus
YSCYRPNS

SEQ ID NO: 4431 - protein, 8 aa, BK virus
SCYRPNSS

SEQ ID NO: 4432 - protein, 8 aa, BK virus
CYRPNSSN

SEQ ID NO: 4433 - protein, 8 aa, BK virus
YRPNSSNI

SEQ ID NO: 4434 - protein, 8 aa, BK virus
RPNSSNIC

SEQ ID NO: 4435 - protein, 8 aa, BK virus
PNSSNICC

SEQ ID NO: 4436 - protein, 8 aa, BK virus
NSSNICCN

SEQ ID NO: 4437 - protein, 8 aa, BK virus
SSNICCNC

SEQ ID NO: 4438 - protein, 8 aa, BK virus
SNICCNCW

SEQ ID NO: 4439 - protein, 8 aa, BK virus
NICCNCWC

SEQ ID NO: 4440 - protein, 8 aa, BK virus
ICCNCWCS

SEQ ID NO: 4441 - protein, 8 aa, BK virus
CCNCWCSW

SEQ ID NO: 4442 - protein, 8 aa, BK virus
CNCWCSWG

SEQ ID NO: 4443 - protein, 8 aa, BK virus
NCWCSWGY

SEQ ID NO: 4444 - protein, 8 aa, BK virus
CWCSWGYC

SEQ ID NO: 4445 - protein, 8 aa, BK virus
WCSWGYCW

SEQ ID NO: 4446 - protein, 8 aa, BK virus
CSWGYCWV

SEQ ID NO: 4447 - protein, 8 aa, BK virus
SWGYCWVC

SEQ ID NO: 4448 - protein, 8 aa, BK virus
WGYCWVCC

SEQ ID NO: 4449 - protein, 8 aa, BK virus
GYCWVCCF

SEQ ID NO: 4450 - protein, 8 aa, BK virus
YCWVCCFN

SEQ ID NO: 4451 - protein, 8 aa, BK virus
CWVCCFNS

SEQ ID NO: 4452 - protein, 8 aa, BK virus
WVCCFNSN

SEQ ID NO: 4453 - protein, 8 aa, BK virus
VCCFNSNC

SEQ ID NO: 4454 - protein, 8 aa, BK virus
LGSQSFHC

SEQ ID NO: 4455 - protein, 8 aa, BK virus
GSQSFHCR

SEQ ID NO: 4456 - protein, 8 aa, BK virus
SQSFHCRP

SEQ ID NO: 4457 - protein, 8 aa, BK virus
QSFHCRPL

SEQ ID NO: 4458 - protein, 8 aa, BK virus
SFHCRPLS

SEQ ID NO: 4459 - protein, 8 aa, BK virus
FHCRPLSA

SEQ ID NO: 4460 - protein, 8 aa, BK virus
HCRPLSAI

SEQ ID NO: 4461 - protein, 8 aa, BK virus
CRPLSAIR

SEQ ID NO: 4462 - protein, 8 aa, BK virus
RPLSAIRH

SEQ ID NO: 4463 - protein, 8 aa, BK virus
PLSAIRHG

SEQ ID NO: 4464 - protein, 8 aa, BK virus
LSAIRHGF

SEQ ID NO: 4465 - protein, 8 aa, BK virus
SAIRHGFG

SEQ ID NO: 4466 - protein, 8 aa, BK virus
AIRHGFGI

SEQ ID NO: 4467 - protein, 8 aa, BK virus
IRHGFGIV

SEQ ID NO: 4468 - protein, 8 aa, BK virus
YSVSWCKY

SEQ ID NO: 4469 - protein, 8 aa, BK virus
SVSWCKYF

SEQ ID NO: 4470 - protein, 8 aa, BK virus
VSWCKYFC

SEQ ID NO: 4471 - protein, 8 aa, BK virus
ALGSFFVC

SEQ ID NO: 4472 - protein, 8 aa, BK virus
LGSFFVCY

SEQ ID NO: 4473 - protein, 8 aa, BK virus
GSFFVCYY

SEQ ID NO: 4474 - protein, 8 aa, BK virus
SFFVCYYF

SEQ ID NO: 4475 - protein, 8 aa, BK virus
FFVCYYFP

SEQ ID NO: 4476 - protein, 8 aa, BK virus
FVCYYFPG

SEQ ID NO: 4477 - protein, 8 aa, BK virus
VCYYFPGF

SEQ ID NO: 4478 - protein, 8 aa, BK virus
CYYFPGFV

SEQ ID NO: 4479 - protein, 8 aa, BK virus
YYFPGFVA

SEQ ID NO: 4480 - protein, 8 aa, BK virus
YFPGFVAC

SEQ ID NO: 4481 - protein, 8 aa, BK virus
FPGFVACY

SEQ ID NO: 4482 - protein, 8 aa, BK virus
YTFYNLTG

SEQ ID NO: 4483 - protein, 8 aa, BK virus
TFYNLTGI

SEQ ID NO: 4484 - protein, 8 aa, BK virus
FYNLTGIA

SEQ ID NO: 4485 - protein, 8 aa, BK virus
YNLTGIAE

SEQ ID NO: 4486 - protein, 8 aa, BK virus
NLTGIAEK

SEQ ID NO: 4487 - protein, 8 aa, BK virus
LTGIAEKN

SEQ ID NO: 4488 - protein, 8 aa, BK virus
TGIAEKNR

SEQ ID NO: 4489 - protein, 8 aa, BK virus
GIAEKNRK

SEQ ID NO: 4490 - protein, 8 aa, BK virus
IAEKNRKI

SEQ ID NO: 4491 - protein, 8 aa, BK virus
AEKNRKIF

SEQ ID NO: 4492 - protein, 8 aa, BK virus
IFGGNYLD

SEQ ID NO: 4493 - protein, 8 aa, BK virus
FGGNYLDN

SEQ ID NO: 4494 - protein, 8 aa, BK virus
GGNYLDNC

SEQ ID NO: 4495 - protein, 8 aa, BK virus
GNYLDNCK

SEQ ID NO: 4496 - protein, 8 aa, BK virus
NYLDNCKC

SEQ ID NO: 4497 - protein, 8 aa, BK virus
YLDNCKCP

SEQ ID NO: 4498 - protein, 8 aa, BK virus
LDNCKCPY

SEQ ID NO: 4499 - protein, 8 aa, BK virus
DNCKCPYK

SEQ ID NO: 4500 - protein, 8 aa, BK virus
NCKCPYKL

SEQ ID NO: 4501 - protein, 8 aa, BK virus
CKCPYKLL

SEQ ID NO: 4502 - protein, 8 aa, BK virus
KGRYPCTF

SEQ ID NO: 4503 - protein, 8 aa, BK virus
GRYPCTFW

SEQ ID NO: 4504 - protein, 8 aa, BK virus
RYPCTFWP

SEQ ID NO: 4505 - protein, 8 aa, BK virus
YPCTFWPY

SEQ ID NO: 4506 - protein, 8 aa, BK virus
PCTFWPYL

SEQ ID NO: 4507 - protein, 8 aa, BK virus
QYRRSYTK

SEQ ID NO: 4508 - protein, 8 aa, BK virus
YRRSYTKN

SEQ ID NO: 4509 - protein, 8 aa, BK virus
RRSYTKNG

SEQ ID NO: 4510 - protein, 8 aa, BK virus
RSYTKNGL

SEQ ID NO: 4511 - protein, 8 aa, BK virus
SYTKNGLK

SEQ ID NO: 4512 - protein, 8 aa, BK virus
YTKNGLKK

SEQ ID NO: 4513 - protein, 8 aa, BK virus
TKNGLKKS

SEQ ID NO: 4514 - protein, 8 aa, BK virus
KNGLKKST

SEQ ID NO: 4515 - protein, 8 aa, BK virus
NGLKKSTK

SEQ ID NO: 4516 - protein, 8 aa, BK virus
GLKKSTKC

SEQ ID NO: 4517 - protein, 8 aa, BK virus
LKKSTKCT

SEQ ID NO: 4518 - protein, 8 aa, BK virus
KKSTKCTF

SEQ ID NO: 4519 - protein, 8 aa, BK virus
KSTKCTFR

SEQ ID NO: 4520 - protein, 8 aa, BK virus
STKCTFRR

SEQ ID NO: 4521 - protein, 8 aa, BK virus
TKCTFRRV

SEQ ID NO: 4522 - protein, 8 aa, BK virus
KCTFRRVY

SEQ ID NO: 4523 - protein, 8 aa, BK virus
CTFRRVYR

SEQ ID NO: 4524 - protein, 8 aa, BK virus
TFRRVYRK

SEQ ID NO: 4525 - protein, 8 aa, BK virus
FRRVYRKN

SEQ ID NO: 4526 - protein, 8 aa, BK virus
RRVYRKNY

SEQ ID NO: 4527 - protein, 8 aa, BK virus
RVYRKNYC

SEQ ID NO: 4528 - protein, 8 aa, BK virus
VYRKNYCP

SEQ ID NO: 4529 - protein, 8 aa, BK virus
YRKNYCPR

SEQ ID NO: 4530 - protein, 8 aa, BK virus
RKNYCPRR

SEQ ID NO: 4531 - protein, 8 aa, BK virus
KNYCPRRC

SEQ ID NO: 4532 - protein, 8 aa, BK virus
SKNCSSMD

SEQ ID NO: 4533 - protein, 8 aa, BK virus
KNCSSMDV

SEQ ID NO: 4534 - protein, 8 aa, BK virus
NCSSMDVA

SEQ ID NO: 4535 - protein, 8 aa, BK virus
CSSMDVAF

SEQ ID NO: 4536 - protein, 8 aa, BK virus
SSMDVAFT

SEQ ID NO: 4537 - protein, 8 aa, BK virus
SMDVAFTS

SEQ ID NO: 4538 - protein, 8 aa, BK virus
MDVAFTSR

SEQ ID NO: 4539 - protein, 8 aa, BK virus
DVAFTSRP

SEQ ID NO: 4540 - protein, 8 aa, BK virus
VAFTSRPV

SEQ ID NO: 4541 - protein, 8 aa, BK virus
AFTSRPVR

SEQ ID NO: 4542 - protein, 8 aa, BK virus
FTSRPVRD

SEQ ID NO: 4543 - protein, 8 aa, BK virus
TSRPVRDC

SEQ ID NO: 4544 - protein, 8 aa, BK virus
SRPVRDCN

SEQ ID NO: 4545 - protein, 8 aa, BK virus
RPVRDCNT

SEQ ID NO: 4546 - protein, 8 aa, BK virus
PVRDCNTC

SEQ ID NO: 4547 - protein, 8 aa, BK virus
VRDCNTCS

SEQ ID NO: 4548 - protein, 8 aa, BK virus
RWPQPKEK

SEQ ID NO: 4549 - protein, 8 aa, BK virus
WPQPKEKE

SEQ ID NO: 4550 - protein, 8 aa, BK virus
PQPKEKES

SEQ ID NO: 4551 - protein, 8 aa, BK virus
QPKEKESV

SEQ ID NO: 4552 - protein, 8 aa, BK virus
PKEKESVQ

SEQ ID NO: 4553 - protein, 8 aa, BK virus
KEKESVQG

SEQ ID NO: 4554 - protein, 8 aa, BK virus
EKESVQGQ

SEQ ID NO: 4555 - protein, 8 aa, BK virus
KESVQGQL

SEQ ID NO: 4556 - protein, 8 aa, BK virus
ESVQGQLP

SEQ ID NO: 4557 - protein, 8 aa, BK virus
SVQGQLPK

SEQ ID NO: 4558 - protein, 8 aa, BK virus
VQGQLPKS

SEQ ID NO: 4559 - protein, 8 aa, BK virus
QGQLPKSQ

SEQ ID NO: 4560 - protein, 8 aa, BK virus
GQLPKSQR

SEQ ID NO: 4561 - protein, 8 aa, BK virus
QLPKSQRN

SEQ ID NO: 4562 - protein, 8 aa, BK virus
LPKSQRNP

SEQ ID NO: 4563 - protein, 8 aa, BK virus
PKSQRNPC

SEQ ID NO: 4564 - protein, 8 aa, BK virus
KSQRNPCK

SEQ ID NO: 4565 - protein, 8 aa, BK virus
SQRNPCKC

SEQ ID NO: 4566 - protein, 8 aa, BK virus
QRNPCKCQ

SEQ ID NO: 4567 - protein, 8 aa, BK virus
RNPCKCQN

SEQ ID NO: 4568 - protein, 8 aa, BK virus
NPCKCQNY

SEQ ID NO: 4569 - protein, 8 aa, BK virus
TQKWGIQM

SEQ ID NO: 4570 - protein, 8 aa, BK virus
QKWGIQMK

SEQ ID NO: 4571 - protein, 8 aa, BK virus
KWGIQMKT

SEQ ID NO: 4572 - protein, 8 aa, BK virus
WGIQMKTL

SEQ ID NO: 4573 - protein, 8 aa, BK virus
GIQMKTLG

SEQ ID NO: 4574 - protein, 8 aa, BK virus
IQMKTLGA

SEQ ID NO: 4575 - protein, 8 aa, BK virus
QMKTLGAL

SEQ ID NO: 4576 - protein, 8 aa, BK virus
MKTLGALV

SEQ ID NO: 4577 - protein, 8 aa, BK virus
VLKMTLAV

SEQ ID NO: 4578 - protein, 8 aa, BK virus
LKMTLAVI

SEQ ID NO: 4579 - protein, 8 aa, BK virus
KMTLAVIA

SEQ ID NO: 4580 - protein, 8 aa, BK virus
MTLAVIAQ

SEQ ID NO: 4581 - protein, 8 aa, BK virus
TLAVIAQR

SEQ ID NO: 4582 - protein, 8 aa, BK virus
LAVIAQRE

SEQ ID NO: 4583 - protein, 8 aa, BK virus
AVIAQREK

SEQ ID NO: 4584 - protein, 8 aa, BK virus
VIAQREKC

SEQ ID NO: 4585 - protein, 8 aa, BK virus
IAQREKCF

SEQ ID NO: 4586 - protein, 8 aa, BK virus
AQREKCFP

SEQ ID NO: 4587 - protein, 8 aa, BK virus
QREKCFPV

SEQ ID NO: 4588 - protein, 8 aa, BK virus
REKCFPVT

SEQ ID NO: 4589 - protein, 8 aa, BK virus
EKCFPVTA

SEQ ID NO: 4590 - protein, 8 aa, BK virus
KCFPVTAQ

SEQ ID NO: 4591 - protein, 8 aa, BK virus
CFPVTAQQ

SEQ ID NO: 4592 - protein, 8 aa, BK virus
FPVTAQQE

SEQ ID NO: 4593 - protein, 8 aa, BK virus
PVTAQQEF

SEQ ID NO: 4594 - protein, 8 aa, BK virus
VTAQQEFP

SEQ ID NO: 4595 - protein, 8 aa, BK virus
TAQQEFPS

SEQ ID NO: 4596 - protein, 8 aa, BK virus
AQQEFPSP

SEQ ID NO: 4597 - protein, 8 aa, BK virus
QQEFPSPI

SEQ ID NO: 4598 - protein, 8 aa, BK virus
LYKQRLLE

SEQ ID NO: 4599 - protein, 8 aa, BK virus
LACLTFMQ

SEQ ID NO: 4600 - protein, 8 aa, BK virus
ACLTFMQG

SEQ ID NO: 4601 - protein, 8 aa, BK virus
CLTFMQGH

SEQ ID NO: 4602 - protein, 8 aa, BK virus
LTFMQGHK

SEQ ID NO: 4603 - protein, 8 aa, BK virus
TFMQGHKK

SEQ ID NO: 4604 - protein, 8 aa, BK virus
FMQGHKKC

SEQ ID NO: 4605 - protein, 8 aa, BK virus
MQGHKKCM

SEQ ID NO: 4606 - protein, 8 aa, BK virus
QGHKKCMS

SEQ ID NO: 4607 - protein, 8 aa, BK virus
GHKKCMSM

SEQ ID NO: 4608 - protein, 8 aa, BK virus
HKKCMSMV

SEQ ID NO: 4609 - protein, 8 aa, BK virus
KKCMSMVE

SEQ ID NO: 4610 - protein, 8 aa, BK virus
KCMSMVEE

SEQ ID NO: 4611 - protein, 8 aa, BK virus
CMSMVEEN

SEQ ID NO: 4612 - protein, 8 aa, BK virus
MSMVEENL

SEQ ID NO: 4613 - protein, 8 aa, BK virus
SMVEENLF

SEQ ID NO: 4614 - protein, 8 aa, BK virus
MVEENLFK

SEQ ID NO: 4615 - protein, 8 aa, BK virus
VEENLFKA

SEQ ID NO: 4616 - protein, 8 aa, BK virus
EENLFKAV

SEQ ID NO: 4617 - protein, 8 aa, BK virus
ENLFKAVI

SEQ ID NO: 4618 - protein, 8 aa, BK virus
NLFKAVIS

SEQ ID NO: 4619 - protein, 8 aa, BK virus
LFKAVIST

SEQ ID NO: 4620 - protein, 8 aa, BK virus
FKAVISTS

SEQ ID NO: 4621 - protein, 8 aa, BK virus
KAVISTSL

SEQ ID NO: 4622 - protein, 8 aa, BK virus
AVISTSLL

SEQ ID NO: 4623 - protein, 8 aa, BK virus
VENPWKCR

SEQ ID NO: 4624 - protein, 8 aa, BK virus
ENPWKCRE

SEQ ID NO: 4625 - protein, 8 aa, BK virus
NPWKCREC

SEQ ID NO: 4626 - protein, 8 aa, BK virus
ITGQSTLM

SEQ ID NO: 4627 - protein, 8 aa, BK virus
TGQSTLMV

SEQ ID NO: 4628 - protein, 8 aa, BK virus
GQSTLMVL

SEQ ID NO: 4629 - protein, 8 aa, BK virus
PLKTQQPS

SEQ ID NO: 4630 - protein, 8 aa, BK virus
LKTQQPSP

SEQ ID NO: 4631 - protein, 8 aa, BK virus
KTQQPSPR

SEQ ID NO: 4632 - protein, 8 aa, BK virus
ILTIRPIW

SEQ ID NO: 4633 - protein, 8 aa, BK virus
LTIRPIWT

SEQ ID NO: 4634 - protein, 8 aa, BK virus
TIRPIWTK

SEQ ID NO: 4635 - protein, 8 aa, BK virus
IRPIWTKT

SEQ ID NO: 4636 - protein, 8 aa, BK virus
RPIWTKTM

SEQ ID NO: 4637 - protein, 8 aa, BK virus
PIWTKTML

SEQ ID NO: 4638 - protein, 8 aa, BK virus
IWTKTMLI

SEQ ID NO: 4639 - protein, 8 aa, BK virus
WTKTMLIQ

SEQ ID NO: 4640 - protein, 8 aa, BK virus
TKTMLIQL

SEQ ID NO: 4641 - protein, 8 aa, BK virus
KTMLIQLS

SEQ ID NO: 4642 - protein, 8 aa, BK virus
TMLIQLSA

SEQ ID NO: 4643 - protein, 8 aa, BK virus
MLIQLSAG

SEQ ID NO: 4644 - protein, 8 aa, BK virus
LIQLSAGY

SEQ ID NO: 4645 - protein, 8 aa, BK virus
IQLSAGYL

SEQ ID NO: 4646 - protein, 8 aa, BK virus
QLSAGYLI

SEQ ID NO: 4647 - protein, 8 aa, BK virus
LSAGYLIP

SEQ ID NO: 4648 - protein, 8 aa, BK virus
SAGYLIPV

SEQ ID NO: 4649 - protein, 8 aa, BK virus
AGYLIPVE

SEQ ID NO: 4650 - protein, 8 aa, BK virus
GYLIPVEM

SEQ ID NO: 4651 - protein, 8 aa, BK virus
YLIPVEMK

SEQ ID NO: 4652 - protein, 8 aa, BK virus
LIPVEMKM

SEQ ID NO: 4653 - protein, 8 aa, BK virus
IPVEMKML

SEQ ID NO: 4654 - protein, 8 aa, BK virus
PVEMKMLG

SEQ ID NO: 4655 - protein, 8 aa, BK virus
VEMKMLGI

SEQ ID NO: 4656 - protein, 8 aa, BK virus
EMKMLGIL

SEQ ID NO: 4657 - protein, 8 aa, BK virus
MKMLGILG

SEQ ID NO: 4658 - protein, 8 aa, BK virus
KMLGILGL

SEQ ID NO: 4659 - protein, 8 aa, BK virus
MLGILGLS

SEQ ID NO: 4660 - protein, 8 aa, BK virus
LGILGLSQ

SEQ ID NO: 4661 - protein, 8 aa, BK virus
GILGLSQE

SEQ ID NO: 4662 - protein, 8 aa, BK virus
ILGLSQEG

SEQ ID NO: 4663 - protein, 8 aa, BK virus
LGLSQEGK

SEQ ID NO: 4664 - protein, 8 aa, BK virus
GLSQEGKM

SEQ ID NO: 4665 - protein, 8 aa, BK virus
LSQEGKMF

SEQ ID NO: 4666 - protein, 8 aa, BK virus
SQEGKMFP

SEQ ID NO: 4667 - protein, 8 aa, BK virus
QEGKMFPQ

SEQ ID NO: 4668 - protein, 8 aa, BK virus
EGKMFPQY

SEQ ID NO: 4669 - protein, 8 aa, BK virus
GKMFPQYF

SEQ ID NO: 4670 - protein, 8 aa, BK virus
KMFPQYFM

SEQ ID NO: 4671 - protein, 8 aa, BK virus
PTQLPQCC

SEQ ID NO: 4672 - protein, 8 aa, BK virus
MNRVWGLF

SEQ ID NO: 4673 - protein, 8 aa, BK virus
NRVWGLFV

SEQ ID NO: 4674 - protein, 8 aa, BK virus
RVWGLFVK

SEQ ID NO: 4675 - protein, 8 aa, BK virus
VWGLFVKL

SEQ ID NO: 4676 - protein, 8 aa, BK virus
WGLFVKLI

SEQ ID NO: 4677 - protein, 8 aa, BK virus
GLFVKLIA

SEQ ID NO: 4678 - protein, 8 aa, BK virus
LFVKLIAC

SEQ ID NO: 4679 - protein, 8 aa, BK virus
FVKLIACM

SEQ ID NO: 4680 - protein, 8 aa, BK virus
VKLIACMF

SEQ ID NO: 4681 - protein, 8 aa, BK virus
KLIACMFQ

SEQ ID NO: 4682 - protein, 8 aa, BK virus
LIACMFQL

SEQ ID NO: 4683 - protein, 8 aa, BK virus
IACMFQLL

SEQ ID NO: 4684 - protein, 8 aa, BK virus
ACMFQLLI

SEQ ID NO: 4685 - protein, 8 aa, BK virus
CMFQLLIF

SEQ ID NO: 4686 - protein, 8 aa, BK virus
MFQLLIFV

SEQ ID NO: 4687 - protein, 8 aa, BK virus
FQLLIFVA

SEQ ID NO: 4688 - protein, 8 aa, BK virus
QLLIFVAC

SEQ ID NO: 4689 - protein, 8 aa, BK virus
LLIFVACL

SEQ ID NO: 4690 - protein, 8 aa, BK virus
LIFVACLL

SEQ ID NO: 4691 - protein, 8 aa, BK virus
IFVACLLT

SEQ ID NO: 4692 - protein, 8 aa, BK virus
FVACLLTA

SEQ ID NO: 4693 - protein, 8 aa, BK virus
VACLLTAL

SEQ ID NO: 4694 - protein, 8 aa, BK virus
ACLLTALE

SEQ ID NO: 4695 - protein, 8 aa, BK virus
CLLTALEH

SEQ ID NO: 4696 - protein, 8 aa, BK virus
LLTALEHN

SEQ ID NO: 4697 - protein, 8 aa, BK virus
LTALEHNS

SEQ ID NO: 4698 - protein, 8 aa, BK virus
TALEHNSG

SEQ ID NO: 4699 - protein, 8 aa, BK virus
ALEHNSGE

SEQ ID NO: 4700 - protein, 8 aa, BK virus
LEHNSGEA

SEQ ID NO: 4701 - protein, 8 aa, BK virus
EHNSGEAL

SEQ ID NO: 4702 - protein, 8 aa, BK virus
HNSGEALQ

SEQ ID NO: 4703 - protein, 8 aa, BK virus
NSGEALQD

SEQ ID NO: 4704 - protein, 8 aa, BK virus
SGEALQDI

SEQ ID NO: 4705 - protein, 8 aa, BK virus
GEALQDIL

SEQ ID NO: 4706 - protein, 8 aa, BK virus
EALQDILR

SEQ ID NO: 4707 - protein, 8 aa, BK virus
ALQDILRS

SEQ ID NO: 4708 - protein, 8 aa, BK virus
LQDILRSA

SEQ ID NO: 4709 - protein, 8 aa, BK virus
RILTQFPF

SEQ ID NO: 4710 - protein, 8 aa, BK virus
ILTQFPFC

SEQ ID NO: 4711 - protein, 8 aa, BK virus
TGEPREWM

SEQ ID NO: 4712 - protein, 8 aa, BK virus
GEPREWMG

SEQ ID NO: 4713 - protein, 8 aa, BK virus
EPREWMGS

SEQ ID NO: 4714 - protein, 8 aa, BK virus
PREWMGSL

SEQ ID NO: 4715 - protein, 8 aa, BK virus
REWMGSLC

SEQ ID NO: 4716 - protein, 8 aa, BK virus
EWMGSLCM

SEQ ID NO: 4717 - protein, 8 aa, BK virus
WMGSLCMV

SEQ ID NO: 4718 - protein, 8 aa, BK virus
MGSLCMVW

SEQ ID NO: 4719 - protein, 8 aa, BK virus
GSLCMVWN

SEQ ID NO: 4720 - protein, 8 aa, BK virus
SLCMVWNP

SEQ ID NO: 4721 - protein, 8 aa, BK virus
LCMVWNPR

SEQ ID NO: 4722 - protein, 8 aa, BK virus
KRLGCLMA

SEQ ID NO: 4723 - protein, 8 aa, BK virus
RLGCLMAQ

SEQ ID NO: 4724 - protein, 8 aa, BK virus
LGCLMAQK

SEQ ID NO: 4725 - protein, 8 aa, BK virus
GCLMAQKD

SEQ ID NO: 4726 - protein, 8 aa, BK virus
CLMAQKDF

SEQ ID NO: 4727 - protein, 8 aa, BK virus
LMAQKDFQ

SEQ ID NO: 4728 - protein, 8 aa, BK virus
MAQKDFQG

SEQ ID NO: 4729 - protein, 8 aa, BK virus
AQKDFQGT

SEQ ID NO: 4730 - protein, 8 aa, BK virus
QKDFQGTQ

SEQ ID NO: 4731 - protein, 8 aa, BK virus
KDFQGTQI

SEQ ID NO: 4732 - protein, 8 aa, BK virus
DILTNRDN

SEQ ID NO: 4733 - protein, 8 aa, BK virus
ILTNRDNC

SEQ ID NO: 4734 - protein, 8 aa, BK virus
LTNRDNCK

SEQ ID NO: 4735 - protein, 8 aa, BK virus
TNRDNCKP

SEQ ID NO: 4736 - protein, 8 aa, BK virus
NRDNCKPK

SEQ ID NO: 4737 - protein, 8 aa, BK virus
RDNCKPKC

SEQ ID NO: 4738 - protein, 8 aa, BK virus
DNCKPKCF

SEQ ID NO: 4739 - protein, 8 aa, BK virus
NCKPKCFK

SEQ ID NO: 4740 - protein, 8 aa, BK virus
CKPKCFKQ

SEQ ID NO: 4741 - protein, 8 aa, BK virus
KPKCFKQV

SEQ ID NO: 4742 - protein, 8 aa, BK virus
PKCFKQVL

SEQ ID NO: 4743 - protein, 8 aa, BK virus
KCFKQVLL

SEQ ID NO: 4744 - protein, 8 aa, BK virus
CFKQVLLL

SEQ ID NO: 4745 - protein, 8 aa, BK virus
FKQVLLLY

SEQ ID NO: 4746 - protein, 8 aa, BK virus
KQVLLLYI

SEQ ID NO: 4747 - protein, 8 aa, BK virus
QVLLLYIY

SEQ ID NO: 4748 - protein, 8 aa, BK virus
VLLLYIYI

SEQ ID NO: 4749 - protein, 8 aa, BK virus
MLLLYKPL

SEQ ID NO: 4750 - protein, 8 aa, BK virus
LLLYKPLL

SEQ ID NO: 4751 - protein, 8 aa, BK virus
LLYKPLLS

SEQ ID NO: 4752 - protein, 8 aa, BK virus
LYKPLLSL

SEQ ID NO: 4753 - protein, 8 aa, BK virus
YKPLLSLC

SEQ ID NO: 4754 - protein, 8 aa, BK virus
KPLLSLCY

SEQ ID NO: 4755 - protein, 8 aa, BK virus
PLLSLCYF

SEQ ID NO: 4756 - protein, 8 aa, BK virus
LLSLCYFG

SEQ ID NO: 4757 - protein, 8 aa, BK virus
LSLCYFGG

SEQ ID NO: 4758 - protein, 8 aa, BK virus
SLCYFGGG

SEQ ID NO: 4759 - protein, 8 aa, BK virus
LCYFGGGV

SEQ ID NO: 4760 - protein, 8 aa, BK virus
CYFGGGVL

SEQ ID NO: 4761 - protein, 8 aa, BK virus
YFGGGVLG

SEQ ID NO: 4762 - protein, 8 aa, BK virus
FGGGVLGL

SEQ ID NO: 4763 - protein, 8 aa, BK virus
GGGVLGLL

SEQ ID NO: 4764 - protein, 8 aa, BK virus
GGVLGLLK

SEQ ID NO: 4765 - protein, 8 aa, BK virus
GVLGLLKH

SEQ ID NO: 4766 - protein, 8 aa, BK virus
KPLHKCNS

SEQ ID NO: 4767 - protein, 8 aa, BK virus
LWGSDLWE

SEQ ID NO: 4768 - protein, 8 aa, BK virus
WGSDLWES

SEQ ID NO: 4769 - protein, 8 aa, BK virus
GSDLWESS

SEQ ID NO: 4770 - protein, 8 aa, BK virus
SDLWESSA

SEQ ID NO: 4771 - protein, 8 aa, BK virus
DLWESSAG

SEQ ID NO: 4772 - protein, 8 aa, BK virus
LWESSAGA

SEQ ID NO: 4773 - protein, 8 aa, BK virus
WESSAGAE

SEQ ID NO: 4774 - protein, 8 aa, BK virus
ESSAGAEV

SEQ ID NO: 4775 - protein, 8 aa, BK virus
SSAGAEVS

SEQ ID NO: 4776 - protein, 8 aa, BK virus
SAGAEVSE

SEQ ID NO: 4777 - protein, 8 aa, BK virus
AGAEVSET

SEQ ID NO: 4778 - protein, 8 aa, BK virus
GAEVSETW

SEQ ID NO: 4779 - protein, 8 aa, BK virus
AEVSETWE

SEQ ID NO: 4780 - protein, 8 aa, BK virus
EVSETWEE

SEQ ID NO: 4781 - protein, 8 aa, BK virus
VSETWEEH

SEQ ID NO: 4782 - protein, 8 aa, BK virus
SETWEEHC

SEQ ID NO: 4783 - protein, 8 aa, BK virus
ETWEEHCD

SEQ ID NO: 4784 - protein, 8 aa, BK virus
TWEEHCDW

SEQ ID NO: 4785 - protein, 8 aa, BK virus
WEEHCDWD

SEQ ID NO: 4786 - protein, 8 aa, BK virus
EEHCDWDS

SEQ ID NO: 4787 - protein, 8 aa, BK virus
EHCDWDSV

SEQ ID NO: 4788 - protein, 8 aa, BK virus
HCDWDSVL

SEQ ID NO: 4789 - protein, 8 aa, BK virus
CDWDSVLD

SEQ ID NO: 4790 - protein, 8 aa, BK virus
DWDSVLDP

SEQ ID NO: 4791 - protein, 8 aa, BK virus
WDSVLDPC

SEQ ID NO: 4792 - protein, 8 aa, BK virus
DSVLDPCP

SEQ ID NO: 4793 - protein, 8 aa, BK virus
SVLDPCPE

SEQ ID NO: 4794 - protein, 8 aa, BK virus
VLDPCPES

SEQ ID NO: 4795 - protein, 8 aa, BK virus
LDPCPESS

SEQ ID NO: 4796 - protein, 8 aa, BK virus
DPCPESSV

SEQ ID NO: 4797 - protein, 8 aa, BK virus
PCPESSVS

SEQ ID NO: 4798 - protein, 8 aa, BK virus
CPESSVSE

SEQ ID NO: 4799 - protein, 8 aa, BK virus
PESSVSES

SEQ ID NO: 4800 - protein, 8 aa, BK virus
ESSVSESS

SEQ ID NO: 4801 - protein, 8 aa, BK virus
SSVSESSS

SEQ ID NO: 4802 - protein, 8 aa, BK virus
SVSESSSL

SEQ ID NO: 4803 - protein, 8 aa, BK virus
VSESSSLV

SEQ ID NO: 4804 - protein, 8 aa, BK virus
SESSSLVI

SEQ ID NO: 4805 - protein, 8 aa, BK virus
ESSSLVIS

SEQ ID NO: 4806 - protein, 8 aa, BK virus
SSSLVISR

SEQ ID NO: 4807 - protein, 8 aa, BK virus
SSLVISRI

SEQ ID NO: 4808 - protein, 8 aa, BK virus
SLVISRIH

SEQ ID NO: 4809 - protein, 8 aa, BK virus
LVISRIHF

SEQ ID NO: 4810 - protein, 8 aa, BK virus
VISRIHFP

SEQ ID NO: 4811 - protein, 8 aa, BK virus
ISRIHFPM

SEQ ID NO: 4812 - protein, 8 aa, BK virus
SRIHFPMH

SEQ ID NO: 4813 - protein, 8 aa, BK virus
RIHFPMHI

SEQ ID NO: 4814 - protein, 8 aa, BK virus
IHFPMHIL

SEQ ID NO: 4815 - protein, 8 aa, BK virus
HFPMHILY

SEQ ID NO: 4816 - protein, 8 aa, BK virus
FPMHILYF

SEQ ID NO: 4817 - protein, 8 aa, BK virus
PMHILYFI

SEQ ID NO: 4818 - protein, 8 aa, BK virus
MHILYFIL

SEQ ID NO: 4819 - protein, 8 aa, BK virus
HILYFILE

SEQ ID NO: 4820 - protein, 8 aa, BK virus
ILYFILEK

SEQ ID NO: 4821 - protein, 8 aa, BK virus
LYFILEKV

SEQ ID NO: 4822 - protein, 8 aa, BK virus
YFILEKVY

SEQ ID NO: 4823 - protein, 8 aa, BK virus
FILEKVYI

SEQ ID NO: 4824 - protein, 8 aa, BK virus
ILEKVYIL

SEQ ID NO: 4825 - protein, 8 aa, BK virus
LEKVYILI

SEQ ID NO: 4826 - protein, 8 aa, BK virus
EKVYILIS

SEQ ID NO: 4827 - protein, 8 aa, BK virus
KVYILISE

SEQ ID NO: 4828 - protein, 8 aa, BK virus
VYILISES

SEQ ID NO: 4829 - protein, 8 aa, BK virus
YILISESS

SEQ ID NO: 4830 - protein, 8 aa, BK virus
ILISESSL

SEQ ID NO: 4831 - protein, 8 aa, BK virus
LISESSLS

SEQ ID NO: 4832 - protein, 8 aa, BK virus
ISESSLSF

SEQ ID NO: 4833 - protein, 8 aa, BK virus
SESSLSFH

SEQ ID NO: 4834 - protein, 8 aa, BK virus
ESSLSFHS

SEQ ID NO: 4835 - protein, 8 aa, BK virus
SSLSFHST

SEQ ID NO: 4836 - protein, 8 aa, BK virus
SLSFHSTI

SEQ ID NO: 4837 - protein, 8 aa, BK virus
LSFHSTIL

SEQ ID NO: 4838 - protein, 8 aa, BK virus
SFHSTILD

SEQ ID NO: 4839 - protein, 8 aa, BK virus
FHSTILDC

SEQ ID NO: 4840 - protein, 8 aa, BK virus
HSTILDCI

SEQ ID NO: 4841 - protein, 8 aa, BK virus
STILDCIS

SEQ ID NO: 4842 - protein, 8 aa, BK virus
TILDCISV

SEQ ID NO: 4843 - protein, 8 aa, BK virus
ILDCISVA

SEQ ID NO: 4844 - protein, 8 aa, BK virus
LDCISVAK

SEQ ID NO: 4845 - protein, 8 aa, BK virus
DCISVAKS

SEQ ID NO: 4846 - protein, 8 aa, BK virus
CISVAKSA

SEQ ID NO: 4847 - protein, 8 aa, BK virus
ISVAKSAT

SEQ ID NO: 4848 - protein, 8 aa, BK virus
SVAKSATG

SEQ ID NO: 4849 - protein, 8 aa, BK virus
VAKSATGL

SEQ ID NO: 4850 - protein, 8 aa, BK virus
AKSATGLN

SEQ ID NO: 4851 - protein, 8 aa, BK virus
KSATGLNQ

SEQ ID NO: 4852 - protein, 8 aa, BK virus
SATGLNQI

SEQ ID NO: 4853 - protein, 8 aa, BK virus
ATGLNQIS

SEQ ID NO: 4854 - protein, 8 aa, BK virus
TGLNQISS

SEQ ID NO: 4855 - protein, 8 aa, BK virus
GLNQISSS

SEQ ID NO: 4856 - protein, 8 aa, BK virus
LNQISSSN

SEQ ID NO: 4857 - protein, 8 aa, BK virus
NQISSSNK

SEQ ID NO: 4858 - protein, 8 aa, BK virus
QISSSNKV

SEQ ID NO: 4859 - protein, 8 aa, BK virus
ISSSNKVI

SEQ ID NO: 4860 - protein, 8 aa, BK virus
SSSNKVIP

SEQ ID NO: 4861 - protein, 8 aa, BK virus
SSNKVIPL

SEQ ID NO: 4862 - protein, 8 aa, BK virus
SNKVIPLC

SEQ ID NO: 4863 - protein, 8 aa, BK virus
NKVIPLCK

SEQ ID NO: 4864 - protein, 8 aa, BK virus
KVIPLCKI

SEQ ID NO: 4865 - protein, 8 aa, BK virus
VIPLCKIL

SEQ ID NO: 4866 - protein, 8 aa, BK virus
IPLCKILF

SEQ ID NO: 4867 - protein, 8 aa, BK virus
PLCKILFS

SEQ ID NO: 4868 - protein, 8 aa, BK virus
LCKILFSS

SEQ ID NO: 4869 - protein, 8 aa, BK virus
CKILFSSK

SEQ ID NO: 4870 - protein, 8 aa, BK virus
KILFSSKN

SEQ ID NO: 4871 - protein, 8 aa, BK virus
ILFSSKNS

SEQ ID NO: 4872 - protein, 8 aa, BK virus
LFSSKNSE

SEQ ID NO: 4873 - protein, 8 aa, BK virus
FSSKNSEF

SEQ ID NO: 4874 - protein, 8 aa, BK virus
SSKNSEFC

SEQ ID NO: 4875 - protein, 8 aa, BK virus
SKNSEFCK

SEQ ID NO: 4876 - protein, 8 aa, BK virus
KNSEFCKD

SEQ ID NO: 4877 - protein, 8 aa, BK virus
NSEFCKDF

SEQ ID NO: 4878 - protein, 8 aa, BK virus
SEFCKDFL

SEQ ID NO: 4879 - protein, 8 aa, BK virus
EFCKDFLK

SEQ ID NO: 4880 - protein, 8 aa, BK virus
FCKDFLKY

SEQ ID NO: 4881 - protein, 8 aa, BK virus
CKDFLKYI

SEQ ID NO: 4882 - protein, 8 aa, BK virus
KDFLKYIL

SEQ ID NO: 4883 - protein, 8 aa, BK virus
DFLKYILG

SEQ ID NO: 4884 - protein, 8 aa, BK virus
FLKYILGL

SEQ ID NO: 4885 - protein, 8 aa, BK virus
LKYILGLK

SEQ ID NO: 4886 - protein, 8 aa, BK virus
KYILGLKS

SEQ ID NO: 4887 - protein, 8 aa, BK virus
YILGLKSI

SEQ ID NO: 4888 - protein, 8 aa, BK virus
ILGLKSIC

SEQ ID NO: 4889 - protein, 8 aa, BK virus
LGLKSICL

SEQ ID NO: 4890 - protein, 8 aa, BK virus
GLKSICLT

SEQ ID NO: 4891 - protein, 8 aa, BK virus
LKSICLTN

SEQ ID NO: 4892 - protein, 8 aa, BK virus
KSICLTNL

SEQ ID NO: 4893 - protein, 8 aa, BK virus
SICLTNLA

SEQ ID NO: 4894 - protein, 8 aa, BK virus
ICLTNLAC

SEQ ID NO: 4895 - protein, 8 aa, BK virus
CLTNLACR

SEQ ID NO: 4896 - protein, 8 aa, BK virus
LTNLACRV

SEQ ID NO: 4897 - protein, 8 aa, BK virus
TNLACRVL

SEQ ID NO: 4898 - protein, 8 aa, BK virus
NLACRVLG

SEQ ID NO: 4899 - protein, 8 aa, BK virus
LACRVLGT

SEQ ID NO: 4900 - protein, 8 aa, BK virus
ACRVLGTG

SEQ ID NO: 4901 - protein, 8 aa, BK virus
CRVLGTGY

SEQ ID NO: 4902 - protein, 8 aa, BK virus
RVLGTGYS

SEQ ID NO: 4903 - protein, 8 aa, BK virus
VLGTGYSF

SEQ ID NO: 4904 - protein, 8 aa, BK virus
LGTGYSFI

SEQ ID NO: 4905 - protein, 8 aa, BK virus
GTGYSFIV

SEQ ID NO: 4906 - protein, 8 aa, BK virus
TGYSFIVT

SEQ ID NO: 4907 - protein, 8 aa, BK virus
GYSFIVTK

SEQ ID NO: 4908 - protein, 8 aa, BK virus
YSFIVTKP

SEQ ID NO: 4909 - protein, 8 aa, BK virus
SFIVTKPG

SEQ ID NO: 4910 - protein, 8 aa, BK virus
FIVTKPGG

SEQ ID NO: 4911 - protein, 8 aa, BK virus
IVTKPGGN

SEQ ID NO: 4912 - protein, 8 aa, BK virus
VTKPGGNI

SEQ ID NO: 4913 - protein, 8 aa, BK virus
TKPGGNIW

SEQ ID NO: 4914 - protein, 8 aa, BK virus
KPGGNIWV

SEQ ID NO: 4915 - protein, 8 aa, BK virus
PGGNIWVL

SEQ ID NO: 4916 - protein, 8 aa, BK virus
GGNIWVLL

SEQ ID NO: 4917 - protein, 8 aa, BK virus
GNIWVLLF

SEQ ID NO: 4918 - protein, 8 aa, BK virus
NIWVLLFK

SEQ ID NO: 4919 - protein, 8 aa, BK virus
IWVLLFKC

SEQ ID NO: 4920 - protein, 8 aa, BK virus
WVLLFKCF

SEQ ID NO: 4921 - protein, 8 aa, BK virus
VLLFKCFF

SEQ ID NO: 4922 - protein, 8 aa, BK virus
LLFKCFFS

SEQ ID NO: 4923 - protein, 8 aa, BK virus
LFKCFFSK

SEQ ID NO: 4924 - protein, 8 aa, BK virus
FKCFFSKF

SEQ ID NO: 4925 - protein, 8 aa, BK virus
KCFFSKFT

SEQ ID NO: 4926 - protein, 8 aa, BK virus
CFFSKFTL

SEQ ID NO: 4927 - protein, 8 aa, BK virus
FFSKFTLT

SEQ ID NO: 4928 - protein, 8 aa, BK virus
FSKFTLTL

SEQ ID NO: 4929 - protein, 8 aa, BK virus
SKFTLTLP

SEQ ID NO: 4930 - protein, 8 aa, BK virus
KFTLTLPS

SEQ ID NO: 4931 - protein, 8 aa, BK virus
FTLTLPSK

SEQ ID NO: 4932 - protein, 8 aa, BK virus
SLKLSKLF

SEQ ID NO: 4933 - protein, 8 aa, BK virus
LKLSKLFI

SEQ ID NO: 4934 - protein, 8 aa, BK virus
KLSKLFIP

SEQ ID NO: 4935 - protein, 8 aa, BK virus
LSKLFIPC

SEQ ID NO: 4936 - protein, 8 aa, BK virus
SKLFIPCP

SEQ ID NO: 4937 - protein, 8 aa, BK virus
KLFIPCPE

SEQ ID NO: 4938 - protein, 8 aa, BK virus
LFIPCPEG

SEQ ID NO: 4939 - protein, 8 aa, BK virus
FIPCPEGK

SEQ ID NO: 4940 - protein, 8 aa, BK virus
IPCPEGKS

SEQ ID NO: 4941 - protein, 8 aa, BK virus
PCPEGKSF

SEQ ID NO: 4942 - protein, 8 aa, BK virus
CPEGKSFD

SEQ ID NO: 4943 - protein, 8 aa, BK virus
PEGKSFDS

SEQ ID NO: 4944 - protein, 8 aa, BK virus
EGKSFDSA

SEQ ID NO: 4945 - protein, 8 aa, BK virus
GKSFDSAP

SEQ ID NO: 4946 - protein, 8 aa, BK virus
KSFDSAPV

SEQ ID NO: 4947 - protein, 8 aa, BK virus
SFDSAPVP

SEQ ID NO: 4948 - protein, 8 aa, BK virus
FDSAPVPF

SEQ ID NO: 4949 - protein, 8 aa, BK virus
DSAPVPFT

SEQ ID NO: 4950 - protein, 8 aa, BK virus
SAPVPFTS

SEQ ID NO: 4951 - protein, 8 aa, BK virus
APVPFTSS

SEQ ID NO: 4952 - protein, 8 aa, BK virus
PVPFTSSK

SEQ ID NO: 4953 - protein, 8 aa, BK virus
VPFTSSKT

SEQ ID NO: 4954 - protein, 8 aa, BK virus
PFTSSKTT

SEQ ID NO: 4955 - protein, 8 aa, BK virus
FTSSKTTM

SEQ ID NO: 4956 - protein, 8 aa, BK virus
TSSKTTMY

SEQ ID NO: 4957 - protein, 8 aa, BK virus
SIATPSSK

SEQ ID NO: 4958 - protein, 8 aa, BK virus
IATPSSKV

SEQ ID NO: 4959 - protein, 8 aa, BK virus
ATPSSKVS

SEQ ID NO: 4960 - protein, 8 aa, BK virus
TPSSKVSL

SEQ ID NO: 4961 - protein, 8 aa, BK virus
PSSKVSLS

SEQ ID NO: 4962 - protein, 8 aa, BK virus
SSKVSLSM

SEQ ID NO: 4963 - protein, 8 aa, BK virus
SKVSLSMG

SEQ ID NO: 4964 - protein, 8 aa, BK virus
KVSLSMGR

SEQ ID NO: 4965 - protein, 8 aa, BK virus
VSLSMGRF

SEQ ID NO: 4966 - protein, 8 aa, BK virus
SLSMGRFT

SEQ ID NO: 4967 - protein, 8 aa, BK virus
LSMGRFTF

SEQ ID NO: 4968 - protein, 8 aa, BK virus
SMGRFTFK

SEQ ID NO: 4969 - protein, 8 aa, BK virus
MGRFTFKA

SEQ ID NO: 4970 - protein, 8 aa, BK virus
GRFTFKAL

SEQ ID NO: 4971 - protein, 8 aa, BK virus
RFTFKALP

SEQ ID NO: 4972 - protein, 8 aa, BK virus
FTFKALPP

SEQ ID NO: 4973 - protein, 8 aa, BK virus
TFKALPPH

SEQ ID NO: 4974 - protein, 8 aa, BK virus
FKALPPHK

SEQ ID NO: 4975 - protein, 8 aa, BK virus
KALPPHKS

SEQ ID NO: 4976 - protein, 8 aa, BK virus
ALPPHKSN

SEQ ID NO: 4977 - protein, 8 aa, BK virus
LPPHKSNN

SEQ ID NO: 4978 - protein, 8 aa, BK virus
PPHKSNNP

SEQ ID NO: 4979 - protein, 8 aa, BK virus
PHKSNNPA

SEQ ID NO: 4980 - protein, 8 aa, BK virus
HKSNNPAA

SEQ ID NO: 4981 - protein, 8 aa, BK virus
KSNNPAAS

SEQ ID NO: 4982 - protein, 8 aa, BK virus
SNNPAASV

SEQ ID NO: 4983 - protein, 8 aa, BK virus
NNPAASVV

SEQ ID NO: 4984 - protein, 8 aa, BK virus
NPAASVVF

SEQ ID NO: 4985 - protein, 8 aa, BK virus
PAASVVFP

SEQ ID NO: 4986 - protein, 8 aa, BK virus
AASVVFPL

SEQ ID NO: 4987 - protein, 8 aa, BK virus
ASVVFPLS

SEQ ID NO: 4988 - protein, 8 aa, BK virus
SVVFPLSM

SEQ ID NO: 4989 - protein, 8 aa, BK virus
VVFPLSMG

SEQ ID NO: 4990 - protein, 8 aa, BK virus
VFPLSMGP

SEQ ID NO: 4991 - protein, 8 aa, BK virus
FPLSMGPL

SEQ ID NO: 4992 - protein, 8 aa, BK virus
PLSMGPLN

SEQ ID NO: 4993 - protein, 8 aa, BK virus
LSMGPLNN

SEQ ID NO: 4994 - protein, 8 aa, BK virus
SMGPLNNQ

SEQ ID NO: 4995 - protein, 8 aa, BK virus
MGPLNNQY

SEQ ID NO: 4996 - protein, 8 aa, BK virus
GPLNNQYL

SEQ ID NO: 4997 - protein, 8 aa, BK virus
PLNNQYLL

SEQ ID NO: 4998 - protein, 8 aa, BK virus
LNNQYLLL

SEQ ID NO: 4999 - protein, 8 aa, BK virus
NNQYLLLG

SEQ ID NO: 5000 - protein, 8 aa, BK virus
NQYLLLGT

SEQ ID NO: 5001 - protein, 8 aa, BK virus
QYLLLGTL

SEQ ID NO: 5002 - protein, 8 aa, BK virus
YLLLGTLK

SEQ ID NO: 5003 - protein, 8 aa, BK virus
LLLGTLKT

SEQ ID NO: 5004 - protein, 8 aa, BK virus
LLGTLKTI

SEQ ID NO: 5005 - protein, 8 aa, BK virus
LGTLKTIQ

SEQ ID NO: 5006 - protein, 8 aa, BK virus
GTLKTIQC

SEQ ID NO: 5007 - protein, 8 aa, BK virus
TLKTIQCK

SEQ ID NO: 5008 - protein, 8 aa, BK virus
LKTIQCKK

SEQ ID NO: 5009 - protein, 8 aa, BK virus
KTIQCKKS

SEQ ID NO: 5010 - protein, 8 aa, BK virus
TIQCKKSN

SEQ ID NO: 5011 - protein, 8 aa, BK virus
IQCKKSNI

SEQ ID NO: 5012 - protein, 8 aa, BK virus
QCKKSNIT

SEQ ID NO: 5013 - protein, 8 aa, BK virus
CKKSNITE

SEQ ID NO: 5014 - protein, 8 aa, BK virus
KKSNITES

SEQ ID NO: 5015 - protein, 8 aa, BK virus
KSNITESI

SEQ ID NO: 5016 - protein, 8 aa, BK virus
SNITESIL

SEQ ID NO: 5017 - protein, 8 aa, BK virus
NITESILG

SEQ ID NO: 5018 - protein, 8 aa, BK virus
ITESILGS

SEQ ID NO: 5019 - protein, 8 aa, BK virus
TESILGSK

SEQ ID NO: 5020 - protein, 8 aa, BK virus
ESILGSKQ

SEQ ID NO: 5021 - protein, 8 aa, BK virus
SILGSKQC

SEQ ID NO: 5022 - protein, 8 aa, BK virus
ILGSKQCS

SEQ ID NO: 5023 - protein, 8 aa, BK virus
LGSKQCSQ

SEQ ID NO: 5024 - protein, 8 aa, BK virus
GSKQCSQA

SEQ ID NO: 5025 - protein, 8 aa, BK virus
SKQCSQAT

SEQ ID NO: 5026 - protein, 8 aa, BK virus
KQCSQATP

SEQ ID NO: 5027 - protein, 8 aa, BK virus
QCSQATPA

SEQ ID NO: 5028 - protein, 8 aa, BK virus
CSQATPAI

SEQ ID NO: 5029 - protein, 8 aa, BK virus
SQATPAIY

SEQ ID NO: 5030 - protein, 8 aa, BK virus
QATPAIYC

SEQ ID NO: 5031 - protein, 8 aa, BK virus
ATPAIYCS

SEQ ID NO: 5032 - protein, 8 aa, BK virus
TPAIYCSS

SEQ ID NO: 5033 - protein, 8 aa, BK virus
PAIYCSST

SEQ ID NO: 5034 - protein, 8 aa, BK virus
AIYCSSTA

SEQ ID NO: 5035 - protein, 8 aa, BK virus
IYCSSTAF

SEQ ID NO: 5036 - protein, 8 aa, BK virus
YCSSTAFP

SEQ ID NO: 5037 - protein, 8 aa, BK virus
APNIKSIL

SEQ ID NO: 5038 - protein, 8 aa, BK virus
PNIKSILS

SEQ ID NO: 5039 - protein, 8 aa, BK virus
NIKSILSN

SEQ ID NO: 5040 - protein, 8 aa, BK virus
IKSILSNI

SEQ ID NO: 5041 - protein, 8 aa, BK virus
LNLSVSIS

SEQ ID NO: 5042 - protein, 8 aa, BK virus
NLSVSISS

SEQ ID NO: 5043 - protein, 8 aa, BK virus
LSVSISSL

SEQ ID NO: 5044 - protein, 8 aa, BK virus
SVSISSLV

SEQ ID NO: 5045 - protein, 8 aa, BK virus
VSISSLVI

SEQ ID NO: 5046 - protein, 8 aa, BK virus
RVSTLFLA

SEQ ID NO: 5047 - protein, 8 aa, BK virus
VSTLFLAK

SEQ ID NO: 5048 - protein, 8 aa, BK virus
STLFLAKT

SEQ ID NO: 5049 - protein, 8 aa, BK virus
TLFLAKTV

SEQ ID NO: 5050 - protein, 8 aa, BK virus
LFLAKTVS

SEQ ID NO: 5051 - protein, 8 aa, BK virus
FLAKTVST

SEQ ID NO: 5052 - protein, 8 aa, BK virus
LAKTVSTA

SEQ ID NO: 5053 - protein, 8 aa, BK virus
AKTVSTAC

SEQ ID NO: 5054 - protein, 8 aa, BK virus
FLLSAKII

SEQ ID NO: 5055 - protein, 8 aa, BK virus
LLSAKIIA

SEQ ID NO: 5056 - protein, 8 aa, BK virus
LSAKIIAF

SEQ ID NO: 5057 - protein, 8 aa, BK virus
SAKIIAFA

SEQ ID NO: 5058 - protein, 8 aa, BK virus
AKIIAFAK

SEQ ID NO: 5059 - protein, 8 aa, BK virus
KIIAFAKC

SEQ ID NO: 5060 - protein, 8 aa, BK virus
IIAFAKCF

SEQ ID NO: 5061 - protein, 8 aa, BK virus
IAFAKCFS

SEQ ID NO: 5062 - protein, 8 aa, BK virus
HFLHSSTL

SEQ ID NO: 5063 - protein, 8 aa, BK virus
FLHSSTLY

SEQ ID NO: 5064 - protein, 8 aa, BK virus
NSKYIPNN

SEQ ID NO: 5065 - protein, 8 aa, BK virus
SKYIPNNK

SEQ ID NO: 5066 - protein, 8 aa, BK virus
KYIPNNKN

SEQ ID NO: 5067 - protein, 8 aa, BK virus
YIPNNKNT

SEQ ID NO: 5068 - protein, 8 aa, BK virus
IPNNKNTS

SEQ ID NO: 5069 - protein, 8 aa, BK virus
PNNKNTSS

SEQ ID NO: 5070 - protein, 8 aa, BK virus
NNKNTSSH

SEQ ID NO: 5071 - protein, 8 aa, BK virus
NKNTSSHF

SEQ ID NO: 5072 - protein, 8 aa, BK virus
KNTSSHFV

SEQ ID NO: 5073 - protein, 8 aa, BK virus
NTSSHFVS

SEQ ID NO: 5074 - protein, 8 aa, BK virus
TSSHFVST

SEQ ID NO: 5075 - protein, 8 aa, BK virus
SSHFVSTA

SEQ ID NO: 5076 - protein, 8 aa, BK virus
SHFVSTAY

SEQ ID NO: 5077 - protein, 8 aa, BK virus
HFVSTAYS

SEQ ID NO: 5078 - protein, 8 aa, BK virus
FVSTAYSV

SEQ ID NO: 5079 - protein, 8 aa, BK virus
VSTAYSVI

SEQ ID NO: 5080 - protein, 8 aa, BK virus
STAYSVIN

SEQ ID NO: 5081 - protein, 8 aa, BK virus
TAYSVINF

SEQ ID NO: 5082 - protein, 8 aa, BK virus
AYSVINFQ

SEQ ID NO: 5083 - protein, 8 aa, BK virus
YSVINFQD

SEQ ID NO: 5084 - protein, 8 aa, BK virus
SVINFQDT

SEQ ID NO: 5085 - protein, 8 aa, BK virus
VINFQDTC

SEQ ID NO: 5086 - protein, 8 aa, BK virus
INFQDTCF

SEQ ID NO: 5087 - protein, 8 aa, BK virus
NFQDTCFV

SEQ ID NO: 5088 - protein, 8 aa, BK virus
FQDTCFVS

SEQ ID NO: 5089 - protein, 8 aa, BK virus
QDTCFVSS

SEQ ID NO: 5090 - protein, 8 aa, BK virus
DTCFVSSG

SEQ ID NO: 5091 - protein, 8 aa, BK virus
TCFVSSGS

SEQ ID NO: 5092 - protein, 8 aa, BK virus
CFVSSGSS

SEQ ID NO: 5093 - protein, 8 aa, BK virus
FVSSGSSG

SEQ ID NO: 5094 - protein, 8 aa, BK virus
VSSGSSGL

SEQ ID NO: 5095 - protein, 8 aa, BK virus
SSGSSGLK

SEQ ID NO: 5096 - protein, 8 aa, BK virus
SGSSGLKS

SEQ ID NO: 5097 - protein, 8 aa, BK virus
GSSGLKSC

SEQ ID NO: 5098 - protein, 8 aa, BK virus
SSGLKSCS

SEQ ID NO: 5099 - protein, 8 aa, BK virus
SGLKSCSF

SEQ ID NO: 5100 - protein, 8 aa, BK virus
GLKSCSFK

SEQ ID NO: 5101 - protein, 8 aa, BK virus
LKSCSFKP

SEQ ID NO: 5102 - protein, 8 aa, BK virus
KSCSFKPP

SEQ ID NO: 5103 - protein, 8 aa, BK virus
MLSSIVWY

SEQ ID NO: 5104 - protein, 8 aa, BK virus
LSSIVWYG

SEQ ID NO: 5105 - protein, 8 aa, BK virus
SSIVWYGS

SEQ ID NO: 5106 - protein, 8 aa, BK virus
SIVWYGSL

SEQ ID NO: 5107 - protein, 8 aa, BK virus
IVWYGSLV

SEQ ID NO: 5108 - protein, 8 aa, BK virus
VWYGSLVK

SEQ ID NO: 5109 - protein, 8 aa, BK virus
WYGSLVKA

SEQ ID NO: 5110 - protein, 8 aa, BK virus
YGSLVKAL

SEQ ID NO: 5111 - protein, 8 aa, BK virus
GSLVKALY

SEQ ID NO: 5112 - protein, 8 aa, BK virus
SLVKALYS

SEQ ID NO: 5113 - protein, 8 aa, BK virus
LVKALYSK

SEQ ID NO: 5114 - protein, 8 aa, BK virus
VKALYSKY

SEQ ID NO: 5115 - protein, 8 aa, BK virus
KALYSKYS

SEQ ID NO: 5116 - protein, 8 aa, BK virus
ALYSKYSL

SEQ ID NO: 5117 - protein, 8 aa, BK virus
LYSKYSLL

SEQ ID NO: 5118 - protein, 8 aa, BK virus
YSKYSLLT

SEQ ID NO: 5119 - protein, 8 aa, BK virus
SKYSLLTP

SEQ ID NO: 5120 - protein, 8 aa, BK virus
KYSLLTPL

SEQ ID NO: 5121 - protein, 8 aa, BK virus
YSLLTPLQ

SEQ ID NO: 5122 - protein, 8 aa, BK virus
SLLTPLQI

SEQ ID NO: 5123 - protein, 8 aa, BK virus
LLTPLQIK

SEQ ID NO: 5124 - protein, 8 aa, BK virus
LTPLQIKK

SEQ ID NO: 5125 - protein, 8 aa, BK virus
TPLQIKKL

SEQ ID NO: 5126 - protein, 8 aa, BK virus
PLQIKKLK

SEQ ID NO: 5127 - protein, 8 aa, BK virus
LQIKKLKV

SEQ ID NO: 5128 - protein, 8 aa, BK virus
QIKKLKVH

SEQ ID NO: 5129 - protein, 8 aa, BK virus
IKKLKVHS

SEQ ID NO: 5130 - protein, 8 aa, BK virus
KKLKVHSF

SEQ ID NO: 5131 - protein, 8 aa, BK virus
QKLLIAET

SEQ ID NO: 5132 - protein, 8 aa, BK virus
KLLIAETL

SEQ ID NO: 5133 - protein, 8 aa, BK virus
LLIAETLC

SEQ ID NO: 5134 - protein, 8 aa, BK virus
LIAETLCL

SEQ ID NO: 5135 - protein, 8 aa, BK virus
IAETLCLC

SEQ ID NO: 5136 - protein, 8 aa, BK virus
AETLCLCG

SEQ ID NO: 5137 - protein, 8 aa, BK virus
ETLCLCGV

SEQ ID NO: 5138 - protein, 8 aa, BK virus
TLCLCGVK

SEQ ID NO: 5139 - protein, 8 aa, BK virus
LCLCGVKK

SEQ ID NO: 5140 - protein, 8 aa, BK virus
CLCGVKKN

SEQ ID NO: 5141 - protein, 8 aa, BK virus
LCGVKKNI

SEQ ID NO: 5142 - protein, 8 aa, BK virus
CGVKKNII

SEQ ID NO: 5143 - protein, 8 aa, BK virus
GVKKNIIL

SEQ ID NO: 5144 - protein, 8 aa, BK virus
VKKNIILC

SEQ ID NO: 5145 - protein, 8 aa, BK virus
KKNIILCP

SEQ ID NO: 5146 - protein, 8 aa, BK virus
KNIILCPA

SEQ ID NO: 5147 - protein, 8 aa, BK virus
NIILCPAH

SEQ ID NO: 5148 - protein, 8 aa, BK virus
IILCPAHM

SEQ ID NO: 5149 - protein, 8 aa, BK virus
ILCPAHMC

SEQ ID NO: 5150 - protein, 8 aa, BK virus
LCPAHMCL

SEQ ID NO: 5151 - protein, 8 aa, BK virus
CPAHMCLL

SEQ ID NO: 5152 - protein, 8 aa, BK virus
PAHMCLLI

SEQ ID NO: 5153 - protein, 8 aa, BK virus
AHMCLLIK

SEQ ID NO: 5154 - protein, 8 aa, BK virus
HMCLLIKV

SEQ ID NO: 5155 - protein, 8 aa, BK virus
MCLLIKVT

SEQ ID NO: 5156 - protein, 8 aa, BK virus
CLLIKVTE

SEQ ID NO: 5157 - protein, 8 aa, BK virus
LLIKVTEY

SEQ ID NO: 5158 - protein, 8 aa, BK virus
LIKVTEYF

SEQ ID NO: 5159 - protein, 8 aa, BK virus
IKVTEYFS

SEQ ID NO: 5160 - protein, 8 aa, BK virus
KVTEYFSI

SEQ ID NO: 5161 - protein, 8 aa, BK virus
VTEYFSIS

SEQ ID NO: 5162 - protein, 8 aa, BK virus
TEYFSISF

SEQ ID NO: 5163 - protein, 8 aa, BK virus
EYFSISFL

SEQ ID NO: 5164 - protein, 8 aa, BK virus
YFSISFLY

SEQ ID NO: 5165 - protein, 8 aa, BK virus
FSISFLYR

SEQ ID NO: 5166 - protein, 8 aa, BK virus
SISFLYRI

SEQ ID NO: 5167 - protein, 8 aa, BK virus
AFSLVVYT

SEQ ID NO: 5168 - protein, 8 aa, BK virus
FSLVVYTA

SEQ ID NO: 5169 - protein, 8 aa, BK virus
SLVVYTAK

SEQ ID NO: 5170 - protein, 8 aa, BK virus
LVVYTAKQ

SEQ ID NO: 5171 - protein, 8 aa, BK virus
VVYTAKQA

SEQ ID NO: 5172 - protein, 8 aa, BK virus
VYTAKQAR

SEQ ID NO: 5173 - protein, 8 aa, BK virus
YTAKQARV

SEQ ID NO: 5174 - protein, 8 aa, BK virus
TAKQARVL

SEQ ID NO: 5175 - protein, 8 aa, BK virus
AKQARVLL

SEQ ID NO: 5176 - protein, 8 aa, BK virus
KQARVLLL

SEQ ID NO: 5177 - protein, 8 aa, BK virus
QARVLLLN

SEQ ID NO: 5178 - protein, 8 aa, BK virus
ARVLLLNT

SEQ ID NO: 5179 - protein, 8 aa, BK virus
RVLLLNTA

SEQ ID NO: 5180 - protein, 8 aa, BK virus
LRNWCRSE

SEQ ID NO: 5181 - protein, 8 aa, BK virus
RNWCRSEG

SEQ ID NO: 5182 - protein, 8 aa, BK virus
NWCRSEGK

SEQ ID NO: 5183 - protein, 8 aa, BK virus
WCRSEGKS

SEQ ID NO: 5184 - protein, 8 aa, BK virus
CRSEGKSL

SEQ ID NO: 5185 - protein, 8 aa, BK virus
RSEGKSLG

SEQ ID NO: 5186 - protein, 8 aa, BK virus
SEGKSLGS

SEQ ID NO: 5187 - protein, 8 aa, BK virus
EGKSLGSS

SEQ ID NO: 5188 - protein, 8 aa, BK virus
GKSLGSST

SEQ ID NO: 5189 - protein, 8 aa, BK virus
KSLGSSTF

SEQ ID NO: 5190 - protein, 8 aa, BK virus
SLGSSTFL

SEQ ID NO: 5191 - protein, 8 aa, BK virus
LGSSTFLF

SEQ ID NO: 5192 - protein, 8 aa, BK virus
GSSTFLFF

SEQ ID NO: 5193 - protein, 8 aa, BK virus
SSTFLFFL

SEQ ID NO: 5194 - protein, 8 aa, BK virus
STFLFFLG

SEQ ID NO: 5195 - protein, 8 aa, BK virus
TFLFFLGG

SEQ ID NO: 5196 - protein, 8 aa, BK virus
FLFFLGGV

SEQ ID NO: 5197 - protein, 8 aa, BK virus
LFFLGGVE

SEQ ID NO: 5198 - protein, 8 aa, BK virus
FFLGGVEC

SEQ ID NO: 5199 - protein, 8 aa, BK virus
ESAVASSS

SEQ ID NO: 5200 - protein, 8 aa, BK virus
SAVASSSL

SEQ ID NO: 5201 - protein, 8 aa, BK virus
AVASSSLA

SEQ ID NO: 5202 - protein, 8 aa, BK virus
VASSSLAN

SEQ ID NO: 5203 - protein, 8 aa, BK virus
ASSSLANI

SEQ ID NO: 5204 - protein, 8 aa, BK virus
SSSLANIS

SEQ ID NO: 5205 - protein, 8 aa, BK virus
SSLANISS

SEQ ID NO: 5206 - protein, 8 aa, BK virus
SLANISSW

SEQ ID NO: 5207 - protein, 8 aa, BK virus
LANISSWQ

SEQ ID NO: 5208 - protein, 8 aa, BK virus
ANISSWQN

SEQ ID NO: 5209 - protein, 8 aa, BK virus
NISSWQNK

SEQ ID NO: 5210 - protein, 8 aa, BK virus
ISSWQNKS

SEQ ID NO: 5211 - protein, 8 aa, BK virus
SSWQNKSS

SEQ ID NO: 5212 - protein, 8 aa, BK virus
SWQNKSSS

SEQ ID NO: 5213 - protein, 8 aa, BK virus
WQNKSSSH

SEQ ID NO: 5214 - protein, 8 aa, BK virus
QNKSSSHF

SEQ ID NO: 5215 - protein, 8 aa, BK virus
NKSSSHFS

SEQ ID NO: 5216 - protein, 8 aa, BK virus
KSSSHFSL

SEQ ID NO: 5217 - protein, 8 aa, BK virus
SSSHFSLK

SEQ ID NO: 5218 - protein, 8 aa, BK virus
SSHFSLKE

SEQ ID NO: 5219 - protein, 8 aa, BK virus
SHFSLKEL

SEQ ID NO: 5220 - protein, 8 aa, BK virus
HFSLKELH

SEQ ID NO: 5221 - protein, 8 aa, BK virus
FSLKELHQ

SEQ ID NO: 5222 - protein, 8 aa, BK virus
SLKELHQD

SEQ ID NO: 5223 - protein, 8 aa, BK virus
LKELHQDS

SEQ ID NO: 5224 - protein, 8 aa, BK virus
KELHQDSH

SEQ ID NO: 5225 - protein, 8 aa, BK virus
ELHQDSHS

SEQ ID NO: 5226 - protein, 8 aa, BK virus
LHQDSHSS

SEQ ID NO: 5227 - protein, 8 aa, BK virus
HQDSHSSV

SEQ ID NO: 5228 - protein, 8 aa, BK virus
QDSHSSVP

SEQ ID NO: 5229 - protein, 8 aa, BK virus
VGTYKKNN

SEQ ID NO: 5230 - protein, 8 aa, BK virus
GTYKKNNY

SEQ ID NO: 5231 - protein, 8 aa, BK virus
TYKKNNYL

SEQ ID NO: 5232 - protein, 8 aa, BK virus
YKKNNYLG

SEQ ID NO: 5233 - protein, 8 aa, BK virus
KKNNYLGP

SEQ ID NO: 5234 - protein, 8 aa, BK virus
KNNYLGPF

SEQ ID NO: 5235 - protein, 8 aa, BK virus
NNYLGPFN

SEQ ID NO: 5236 - protein, 8 aa, BK virus
NYLGPFNI

SEQ ID NO: 5237 - protein, 8 aa, BK virus
YLGPFNIL

SEQ ID NO: 5238 - protein, 8 aa, BK virus
LGPFNILL

SEQ ID NO: 5239 - protein, 8 aa, BK virus
GPFNILLF

SEQ ID NO: 5240 - protein, 8 aa, BK virus
PFNILLFI

SEQ ID NO: 5241 - protein, 8 aa, BK virus
VSYLKALD

SEQ ID NO: 5242 - protein, 8 aa, BK virus
SYLKALDL

SEQ ID NO: 5243 - protein, 8 aa, BK virus
REFLQLFG

SEQ ID NO: 5244 - protein, 8 aa, BK virus
EFLQLFGP

SEQ ID NO: 5245 - protein, 8 aa, BK virus
FLQLFGPT

SEQ ID NO: 5246 - protein, 8 aa, BK virus
LQLFGPTI

SEQ ID NO: 5247 - protein, 8 aa, BK virus
QLFGPTIA

SEQ ID NO: 5248 - protein, 8 aa, BK virus
LFGPTIAE

SEQ ID NO: 5249 - protein, 8 aa, BK virus
FGPTIAEF

SEQ ID NO: 5250 - protein, 8 aa, BK virus
GPTIAEFL

SEQ ID NO: 5251 - protein, 8 aa, BK virus
PTIAEFLQ

SEQ ID NO: 5252 - protein, 8 aa, BK virus
TIAEFLQL

SEQ ID NO: 5253 - protein, 8 aa, BK virus
IAEFLQLG

SEQ ID NO: 5254 - protein, 8 aa, BK virus
AEFLQLGL

SEQ ID NO: 5255 - protein, 8 aa, BK virus
EFLQLGLS

SEQ ID NO: 5256 - protein, 8 aa, BK virus
FLQLGLSQ

SEQ ID NO: 5257 - protein, 8 aa, BK virus
LQLGLSQT

SEQ ID NO: 5258 - protein, 8 aa, BK virus
QLGLSQTT

SEQ ID NO: 5259 - protein, 8 aa, BK virus
LGLSQTTV

SEQ ID NO: 5260 - protein, 8 aa, BK virus
SSQCSSNL

SEQ ID NO: 5261 - protein, 8 aa, BK virus
SQCSSNLS

SEQ ID NO: 5262 - protein, 8 aa, BK virus
QCSSNLSK

SEQ ID NO: 5263 - protein, 8 aa, BK virus
CSSNLSKP

SEQ ID NO: 5264 - protein, 8 aa, BK virus
SSNLSKPR

SEQ ID NO: 5265 - protein, 8 aa, BK virus
SNLSKPRA

SEQ ID NO: 5266 - protein, 8 aa, BK virus
NLSKPRAL

SEQ ID NO: 5267 - protein, 8 aa, BK virus
LSKPRALF

SEQ ID NO: 5268 - protein, 8 aa, BK virus
SKPRALFL

SEQ ID NO: 5269 - protein, 8 aa, BK virus
KPRALFLK

SEQ ID NO: 5270 - protein, 8 aa, BK virus
PRALFLKI

SEQ ID NO: 5271 - protein, 8 aa, BK virus
RALFLKIF

SEQ ID NO: 5272 - protein, 8 aa, BK virus
ALFLKIFY

SEQ ID NO: 5273 - protein, 8 aa, BK virus
LFLKIFYL

SEQ ID NO: 5274 - protein, 8 aa, BK virus
FLKIFYLN

SEQ ID NO: 5275 - protein, 8 aa, BK virus
LKIFYLNA

SEQ ID NO: 5276 - protein, 8 aa, BK virus
KIFYLNAL

SEQ ID NO: 5277 - protein, 8 aa, BK virus
IFYLNALI

SEQ ID NO: 5278 - protein, 8 aa, BK virus
ADIACKGS

SEQ ID NO: 5279 - protein, 8 aa, BK virus
DIACKGSA

SEQ ID NO: 5280 - protein, 8 aa, BK virus
IACKGSAQ

SEQ ID NO: 5281 - protein, 8 aa, BK virus
ACKGSAQK

SEQ ID NO: 5282 - protein, 8 aa, BK virus
CKGSAQKA

SEQ ID NO: 5283 - protein, 8 aa, BK virus
KGSAQKAF

SEQ ID NO: 5284 - protein, 8 aa, BK virus
GSAQKAFW

SEQ ID NO: 5285 - protein, 8 aa, BK virus
SAQKAFWN

SEQ ID NO: 5286 - protein, 8 aa, BK virus
AQKAFWNK

SEQ ID NO: 5287 - protein, 8 aa, BK virus
AIPCSTGY

SEQ ID NO: 5288 - protein, 8 aa, BK virus
IPCSTGYL

SEQ ID NO: 5289 - protein, 8 aa, BK virus
PCSTGYLG

SEQ ID NO: 5290 - protein, 8 aa, BK virus
CSTGYLGK

SEQ ID NO: 5291 - protein, 8 aa, BK virus
STGYLGKE

SEQ ID NO: 5292 - protein, 8 aa, BK virus
TGYLGKEE

SEQ ID NO: 5293 - protein, 8 aa, BK virus
GYLGKEEN

SEQ ID NO: 5294 - protein, 8 aa, BK virus
YLGKEENQ

SEQ ID NO: 5295 - protein, 8 aa, BK virus
LGKEENQH

SEQ ID NO: 5296 - protein, 8 aa, BK virus
GKEENQHK

SEQ ID NO: 5297 - protein, 8 aa, BK virus
KEENQHKP

SEQ ID NO: 5298 - protein, 8 aa, BK virus
EENQHKPL

SEQ ID NO: 5299 - protein, 8 aa, BK virus
ENQHKPLS

SEQ ID NO: 5300 - protein, 8 aa, BK virus
NQHKPLSY

SEQ ID NO: 5301 - protein, 8 aa, BK virus
QHKPLSYS

SEQ ID NO: 5302 - protein, 8 aa, BK virus
HKPLSYSR

SEQ ID NO: 5303 - protein, 8 aa, BK virus
KPLSYSRF

SEQ ID NO: 5304 - protein, 8 aa, BK virus
PLSYSRFQ

SEQ ID NO: 5305 - protein, 8 aa, BK virus
LSYSRFQN

SEQ ID NO: 5306 - protein, 8 aa, BK virus
SYSRFQNQ

SEQ ID NO: 5307 - protein, 8 aa, BK virus
YSRFQNQA

SEQ ID NO: 5308 - protein, 8 aa, BK virus
SRFQNQAD

SEQ ID NO: 5309 - protein, 8 aa, BK virus
RFQNQADE

SEQ ID NO: 5310 - protein, 8 aa, BK virus
FQNQADEL

SEQ ID NO: 5311 - protein, 8 aa, BK virus
QNQADELP

SEQ ID NO: 5312 - protein, 8 aa, BK virus
NQADELPL

SEQ ID NO: 5313 - protein, 8 aa, BK virus
QADELPLH

SEQ ID NO: 5314 - protein, 8 aa, BK virus
ADELPLHP

SEQ ID NO: 5315 - protein, 8 aa, BK virus
DELPLHPA

SEQ ID NO: 5316 - protein, 8 aa, BK virus
ELPLHPAP

SEQ ID NO: 5317 - protein, 8 aa, BK virus
LPLHPAPF

SEQ ID NO: 5318 - protein, 8 aa, BK virus
PLHPAPFF

SEQ ID NO: 5319 - protein, 8 aa, BK virus
LHPAPFFY

SEQ ID NO: 5320 - protein, 8 aa, BK virus
HPAPFFYT

SEQ ID NO: 5321 - protein, 8 aa, BK virus
PAPFFYTK

SEQ ID NO: 5322 - protein, 8 aa, BK virus
APFFYTKY

SEQ ID NO: 5323 - protein, 8 aa, BK virus
PFFYTKYS

SEQ ID NO: 5324 - protein, 8 aa, BK virus
FFYTKYSF

SEQ ID NO: 5325 - protein, 8 aa, BK virus
FYTKYSFS

SEQ ID NO: 5326 - protein, 8 aa, BK virus
YTKYSFSS

SEQ ID NO: 5327 - protein, 8 aa, BK virus
TKYSFSSF

SEQ ID NO: 5328 - protein, 8 aa, BK virus
KYSFSSFY

SEQ ID NO: 5329 - protein, 8 aa, BK virus
YSFSSFYP

SEQ ID NO: 5330 - protein, 8 aa, BK virus
SFSSFYPR

SEQ ID NO: 5331 - protein, 8 aa, BK virus
FSSFYPRR

SEQ ID NO: 5332 - protein, 8 aa, BK virus
SSFYPRRP

SEQ ID NO: 5333 - protein, 8 aa, BK virus
SFYPRRPL

SEQ ID NO: 5334 - protein, 8 aa, BK virus
FYPRRPLC

SEQ ID NO: 5335 - protein, 8 aa, BK virus
YPRRPLCQ

SEQ ID NO: 5336 - protein, 8 aa, BK virus
PRRPLCQG

SEQ ID NO: 5337 - protein, 8 aa, BK virus
RRPLCQGE

SEQ ID NO: 5338 - protein, 8 aa, BK virus
RPLCQGEI

SEQ ID NO: 5339 - protein, 8 aa, BK virus
PLCQGEIP

SEQ ID NO: 5340 - protein, 8 aa, BK virus
LCQGEIPY

SEQ ID NO: 5341 - protein, 8 aa, BK virus
CQGEIPYT

SEQ ID NO: 5342 - protein, 8 aa, BK virus
QGEIPYTS

SEQ ID NO: 5343 - protein, 8 aa, BK virus
GEIPYTSL

SEQ ID NO: 5344 - protein, 8 aa, BK virus
EIPYTSLN

SEQ ID NO: 5345 - protein, 8 aa, BK virus
IPYTSLNK

SEQ ID NO: 5346 - protein, 8 aa, BK virus
PYTSLNKL

SEQ ID NO: 5347 - protein, 8 aa, BK virus
YTSLNKLF

SEQ ID NO: 5348 - protein, 8 aa, BK virus
TSLNKLFS

SEQ ID NO: 5349 - protein, 8 aa, BK virus
SLNKLFSL

SEQ ID NO: 5350 - protein, 8 aa, BK virus
LNKLFSLR

SEQ ID NO: 5351 - protein, 8 aa, BK virus
NKLFSLRE

SEQ ID NO: 5352 - protein, 8 aa, BK virus
KLFSLRED

SEQ ID NO: 5353 - protein, 8 aa, BK virus
LFSLREDF

SEQ ID NO: 5354 - protein, 8 aa, BK virus
FSLREDFP

SEQ ID NO: 5355 - protein, 8 aa, BK virus
SLREDFPR

SEQ ID NO: 5356 - protein, 8 aa, BK virus
LREDFPRQ

SEQ ID NO: 5357 - protein, 8 aa, BK virus
REDFPRQL

SEQ ID NO: 5358 - protein, 8 aa, BK virus
EDFPRQLF

SEQ ID NO: 5359 - protein, 8 aa, BK virus
DFPRQLFQ

SEQ ID NO: 5360 - protein, 8 aa, BK virus
FPRQLFQG

SEQ ID NO: 5361 - protein, 8 aa, BK virus
PRQLFQGL

SEQ ID NO: 5362 - protein, 8 aa, BK virus
RQLFQGLK

SEQ ID NO: 5363 - protein, 8 aa, BK virus
QLFQGLKG

SEQ ID NO: 5364 - protein, 8 aa, BK virus
LFQGLKGP

SEQ ID NO: 5365 - protein, 9 aa, BK virus
GFPQIVLLG

SEQ ID NO: 5366 - protein, 9 aa, BK virus
FPQIVLLGL

SEQ ID NO: 5367 - protein, 9 aa, BK virus
PQIVLLGLR

SEQ ID NO: 5368 - protein, 9 aa, BK virus
QIVLLGLRK

SEQ ID NO: 5369 - protein, 9 aa, BK virus
IVLLGLRKS

SEQ ID NO: 5370 - protein, 9 aa, BK virus
VLLGLRKSL

SEQ ID NO: 5371 - protein, 9 aa, BK virus
LLGLRKSLH

SEQ ID NO: 5372 - protein, 9 aa, BK virus
LGLRKSLHT

SEQ ID NO: 5373 - protein, 9 aa, BK virus
GLRKSLHTL

SEQ ID NO: 5374 - protein, 9 aa, BK virus
LRKSLHTLT

SEQ ID NO: 5375 - protein, 9 aa, BK virus
RKSLHTLTT

SEQ ID NO: 5376 - protein, 9 aa, BK virus
EKGWRQRRP

SEQ ID NO: 5377 - protein, 9 aa, BK virus
KGWRQRRPR

SEQ ID NO: 5378 - protein, 9 aa, BK virus
GWRQRRPRP

SEQ ID NO: 5379 - protein, 9 aa, BK virus
WRQRRPRPL

SEQ ID NO: 5380 - protein, 9 aa, BK virus
RQRRPRPLI

SEQ ID NO: 5381 - protein, 9 aa, BK virus
QRRPRPLIY

SEQ ID NO: 5382 - protein, 9 aa, BK virus
RRPRPLIYY

SEQ ID NO: 5383 - protein, 9 aa, BK virus
RPRPLIYYK

SEQ ID NO: 5384 - protein, 9 aa, BK virus
PRPLIYYKK

SEQ ID NO: 5385 - protein, 9 aa, BK virus
RPLIYYKKK

SEQ ID NO: 5386 - protein, 9 aa, BK virus
PLIYYKKKG

SEQ ID NO: 5387 - protein, 9 aa, BK virus
LIYYKKKGH

SEQ ID NO: 5388 - protein, 9 aa, BK virus
IYYKKKGHR

SEQ ID NO: 5389 - protein, 9 aa, BK virus
YYKKKGHRE

SEQ ID NO: 5390 - protein, 9 aa, BK virus
YKKKGHREE

SEQ ID NO: 5391 - protein, 9 aa, BK virus
KKKGHREEL

SEQ ID NO: 5392 - protein, 9 aa, BK virus
KKGHREELL

SEQ ID NO: 5393 - protein, 9 aa, BK virus
KGHREELLT

SEQ ID NO: 5394 - protein, 9 aa, BK virus
GHREELLTH

SEQ ID NO: 5395 - protein, 9 aa, BK virus
HREELLTHG

SEQ ID NO: 5396 - protein, 9 aa, BK virus
REELLTHGM

SEQ ID NO: 5397 - protein, 9 aa, BK virus
EELLTHGMQ

SEQ ID NO: 5398 - protein, 9 aa, BK virus
ELLTHGMQP

SEQ ID NO: 5399 - protein, 9 aa, BK virus
LLTHGMQPN

SEQ ID NO: 5400 - protein, 9 aa, BK virus
LTHGMQPNH

SEQ ID NO: 5401 - protein, 9 aa, BK virus
THGMQPNHD

SEQ ID NO: 5402 - protein, 9 aa, BK virus
HGMQPNHDL

SEQ ID NO: 5403 - protein, 9 aa, BK virus
GMQPNHDLR

SEQ ID NO: 5404 - protein, 9 aa, BK virus
MQPNHDLRK

SEQ ID NO: 5405 - protein, 9 aa, BK virus
QPNHDLRKE

SEQ ID NO: 5406 - protein, 9 aa, BK virus
PNHDLRKES

SEQ ID NO: 5407 - protein, 9 aa, BK virus
NHDLRKESA

SEQ ID NO: 5408 - protein, 9 aa, BK virus
LTGECSQTM

SEQ ID NO: 5409 - protein, 9 aa, BK virus
TGECSQTMT

SEQ ID NO: 5410 - protein, 9 aa, BK virus
GECSQTMTS

SEQ ID NO: 5411 - protein, 9 aa, BK virus
ECSQTMTSG

SEQ ID NO: 5412 - protein, 9 aa, BK virus
CSQTMTSGR

SEQ ID NO: 5413 - protein, 9 aa, BK virus
SQTMTSGRK

SEQ ID NO: 5414 - protein, 9 aa, BK virus
QTMTSGRKV

SEQ ID NO: 5415 - protein, 9 aa, BK virus
TMTSGRKVH

SEQ ID NO: 5416 - protein, 9 aa, BK virus
MTSGRKVHD

SEQ ID NO: 5417 - protein, 9 aa, BK virus
TSGRKVHDS

SEQ ID NO: 5418 - protein, 9 aa, BK virus
SGRKVHDSQ

SEQ ID NO: 5419 - protein, 9 aa, BK virus
GRKVHDSQG

SEQ ID NO: 5420 - protein, 9 aa, BK virus
RKVHDSQGG

SEQ ID NO: 5421 - protein, 9 aa, BK virus
KVHDSQGGA

SEQ ID NO: 5422 - protein, 9 aa, BK virus
VHDSQGGAA

SEQ ID NO: 5423 - protein, 9 aa, BK virus
HDSQGGAAY

SEQ ID NO: 5424 - protein, 9 aa, BK virus
DSQGGAAYP

SEQ ID NO: 5425 - protein, 9 aa, BK virus
SQGGAAYPW

SEQ ID NO: 5426 - protein, 9 aa, BK virus
QGGAAYPWN

SEQ ID NO: 5427 - protein, 9 aa, BK virus
GGAAYPWNA

SEQ ID NO: 5428 - protein, 9 aa, BK virus
GAAYPWNAA

SEQ ID NO: 5429 - protein, 9 aa, BK virus
AAYPWNAAK

SEQ ID NO: 5430 - protein, 9 aa, BK virus
AYPWNAAKP

SEQ ID NO: 5431 - protein, 9 aa, BK virus
PQEGKCMTD

SEQ ID NO: 5432 - protein, 9 aa, BK virus
QEGKCMTDM

SEQ ID NO: 5433 - protein, 9 aa, BK virus
EGKCMTDMF

SEQ ID NO: 5434 - protein, 9 aa, BK virus
GKCMTDMFC

SEQ ID NO: 5435 - protein, 9 aa, BK virus
KCMTDMFCE

SEQ ID NO: 5436 - protein, 9 aa, BK virus
CMTDMFCEP

SEQ ID NO: 5437 - protein, 9 aa, BK virus
MTDMFCEPR

SEQ ID NO: 5438 - protein, 9 aa, BK virus
TDMFCEPRN

SEQ ID NO: 5439 - protein, 9 aa, BK virus
DMFCEPRNL

SEQ ID NO: 5440 - protein, 9 aa, BK virus
MFCEPRNLG

SEQ ID NO: 5441 - protein, 9 aa, BK virus
FCEPRNLGL

SEQ ID NO: 5442 - protein, 9 aa, BK virus
CEPRNLGLV

SEQ ID NO: 5443 - protein, 9 aa, BK virus
EPRNLGLVP

SEQ ID NO: 5444 - protein, 9 aa, BK virus
PRNLGLVPS

SEQ ID NO: 5445 - protein, 9 aa, BK virus
TGQRPWFCA

SEQ ID NO: 5446 - protein, 9 aa, BK virus
GQRPWFCAS

SEQ ID NO: 5447 - protein, 9 aa, BK virus
QRPWFCASC

SEQ ID NO: 5448 - protein, 9 aa, BK virus
RPWFCASCH

SEQ ID NO: 5449 - protein, 9 aa, BK virus
PWFCASCHD

SEQ ID NO: 5450 - protein, 9 aa, BK virus
WFCASCHDK

SEQ ID NO: 5451 - protein, 9 aa, BK virus
FCASCHDKL

SEQ ID NO: 5452 - protein, 9 aa, BK virus
CASCHDKLQ

SEQ ID NO: 5453 - protein, 9 aa, BK virus
KLVKPGLEQ

SEQ ID NO: 5454 - protein, 9 aa, BK virus
LVKPGLEQK

SEQ ID NO: 5455 - protein, 9 aa, BK virus
VKPGLEQKK

SEQ ID NO: 5456 - protein, 9 aa, BK virus
KPGLEQKKE

SEQ ID NO: 5457 - protein, 9 aa, BK virus
PGLEQKKEL

SEQ ID NO: 5458 - protein, 9 aa, BK virus
GLEQKKELR

SEQ ID NO: 5459 - protein, 9 aa, BK virus
LEQKKELRG

SEQ ID NO: 5460 - protein, 9 aa, BK virus
EQKKELRGF

SEQ ID NO: 5461 - protein, 9 aa, BK virus
QKKELRGFL

SEQ ID NO: 5462 - protein, 9 aa, BK virus
KKELRGFLF

SEQ ID NO: 5463 - protein, 9 aa, BK virus
KELRGFLFL

SEQ ID NO: 5464 - protein, 9 aa, BK virus
ELRGFLFLF

SEQ ID NO: 5465 - protein, 9 aa, BK virus
SFCWNFVEV

SEQ ID NO: 5466 - protein, 9 aa, BK virus
FCWNFVEVK

SEQ ID NO: 5467 - protein, 9 aa, BK virus
CWNFVEVKT

SEQ ID NO: 5468 - protein, 9 aa, BK virus
WNFVEVKTV

SEQ ID NO: 5469 - protein, 9 aa, BK virus
TGKTKVPLL

SEQ ID NO: 5470 - protein, 9 aa, BK virus
GKTKVPLLY

SEQ ID NO: 5471 - protein, 9 aa, BK virus
KTKVPLLYL

SEQ ID NO: 5472 - protein, 9 aa, BK virus
TKVPLLYLL

SEQ ID NO: 5473 - protein, 9 aa, BK virus
VIPFFLYFQ

SEQ ID NO: 5474 - protein, 9 aa, BK virus
IPFFLYFQV

SEQ ID NO: 5475 - protein, 9 aa, BK virus
PFFLYFQVH

SEQ ID NO: 5476 - protein, 9 aa, BK virus
FFLYFQVHG

SEQ ID NO: 5477 - protein, 9 aa, BK virus
FLYFQVHGC

SEQ ID NO: 5478 - protein, 9 aa, BK virus
LYFQVHGCC

SEQ ID NO: 5479 - protein, 9 aa, BK virus
YFQVHGCCS

SEQ ID NO: 5480 - protein, 9 aa, BK virus
FQVHGCCSS

SEQ ID NO: 5481 - protein, 9 aa, BK virus
QVHGCCSST

SEQ ID NO: 5482 - protein, 9 aa, BK virus
VHGCCSSTF

SEQ ID NO: 5483 - protein, 9 aa, BK virus
HGCCSSTFG

SEQ ID NO: 5484 - protein, 9 aa, BK virus
GCCSSTFGG

SEQ ID NO: 5485 - protein, 9 aa, BK virus
CCSSTFGGP

SEQ ID NO: 5486 - protein, 9 aa, BK virus
CSSTFGGPS

SEQ ID NO: 5487 - protein, 9 aa, BK virus
SSTFGGPSC

SEQ ID NO: 5488 - protein, 9 aa, BK virus
STFGGPSCQ

SEQ ID NO: 5489 - protein, 9 aa, BK virus
TFGGPSCQC

SEQ ID NO: 5490 - protein, 9 aa, BK virus
FGGPSCQCI

SEQ ID NO: 5491 - protein, 9 aa, BK virus
GCCCHRIFS

SEQ ID NO: 5492 - protein, 9 aa, BK virus
CCCHRIFSG

SEQ ID NO: 5493 - protein, 9 aa, BK virus
NCCWGGCCC

SEQ ID NO: 5494 - protein, 9 aa, BK virus
CCWGGCCCY

SEQ ID NO: 5495 - protein, 9 aa, BK virus
CWGGCCCYR

SEQ ID NO: 5496 - protein, 9 aa, BK virus
WGGCCCYRS

SEQ ID NO: 5497 - protein, 9 aa, BK virus
GGCCCYRSS

SEQ ID NO: 5498 - protein, 9 aa, BK virus
GCCCYRSSN

SEQ ID NO: 5499 - protein, 9 aa, BK virus
CCCYRSSNC

SEQ ID NO: 5500 - protein, 9 aa, BK virus
CCYRSSNCI

SEQ ID NO: 5501 - protein, 9 aa, BK virus
CYRSSNCIP

SEQ ID NO: 5502 - protein, 9 aa, BK virus
YRSSNCIPC

SEQ ID NO: 5503 - protein, 9 aa, BK virus
RSSNCIPCY

SEQ ID NO: 5504 - protein, 9 aa, BK virus
SSNCIPCYC

SEQ ID NO: 5505 - protein, 9 aa, BK virus
SNCIPCYCR

SEQ ID NO: 5506 - protein, 9 aa, BK virus
NCIPCYCRG

SEQ ID NO: 5507 - protein, 9 aa, BK virus
CIPCYCRGH

SEQ ID NO: 5508 - protein, 9 aa, BK virus
IPCYCRGHN

SEQ ID NO: 5509 - protein, 9 aa, BK virus
PCYCRGHNK

SEQ ID NO: 5510 - protein, 9 aa, BK virus
CYCRGHNKY

SEQ ID NO: 5511 - protein, 9 aa, BK virus
YCRGHNKYL

SEQ ID NO: 5512 - protein, 9 aa, BK virus
CRGHNKYLR

SEQ ID NO: 5513 - protein, 9 aa, BK virus
RGHNKYLRG

SEQ ID NO: 5514 - protein, 9 aa, BK virus
GHNKYLRGY

SEQ ID NO: 5515 - protein, 9 aa, BK virus
HNKYLRGYS

SEQ ID NO: 5516 - protein, 9 aa, BK virus
NKYLRGYSC

SEQ ID NO: 5517 - protein, 9 aa, BK virus
KYLRGYSCY

SEQ ID NO: 5518 - protein, 9 aa, BK virus
YLRGYSCYR

SEQ ID NO: 5519 - protein, 9 aa, BK virus
LRGYSCYRP

SEQ ID NO: 5520 - protein, 9 aa, BK virus
RGYSCYRPN

SEQ ID NO: 5521 - protein, 9 aa, BK virus
GYSCYRPNS

SEQ ID NO: 5522 - protein, 9 aa, BK virus
YSCYRPNSS

SEQ ID NO: 5523 - protein, 9 aa, BK virus
SCYRPNSSN

SEQ ID NO: 5524 - protein, 9 aa, BK virus
CYRPNSSNI

SEQ ID NO: 5525 - protein, 9 aa, BK virus
YRPNSSNIC

SEQ ID NO: 5526 - protein, 9 aa, BK virus
RPNSSNICC

SEQ ID NO: 5527 - protein, 9 aa, BK virus
PNSSNICCN

SEQ ID NO: 5528 - protein, 9 aa, BK virus
NSSNICCNC

SEQ ID NO: 5529 - protein, 9 aa, BK virus
SSNICCNCW

SEQ ID NO: 5530 - protein, 9 aa, BK virus
SNICCNCWC

SEQ ID NO: 5531 - protein, 9 aa, BK virus
NICCNCWCS

SEQ ID NO: 5532 - protein, 9 aa, BK virus
ICCNCWCSW

SEQ ID NO: 5533 - protein, 9 aa, BK virus
CCNCWCSWG

SEQ ID NO: 5534 - protein, 9 aa, BK virus
CNCWCSWGY

SEQ ID NO: 5535 - protein, 9 aa, BK virus
NCWCSWGYC

SEQ ID NO: 5536 - protein, 9 aa, BK virus
CWCSWGYCW

SEQ ID NO: 5537 - protein, 9 aa, BK virus
WCSWGYCWV

SEQ ID NO: 5538 - protein, 9 aa, BK virus
CSWGYCWVC

SEQ ID NO: 5539 - protein, 9 aa, BK virus
SWGYCWVCC

SEQ ID NO: 5540 - protein, 9 aa, BK virus
WGYCWVCCF

SEQ ID NO: 5541 - protein, 9 aa, BK virus
GYCWVCCFN

SEQ ID NO: 5542 - protein, 9 aa, BK virus
YCWVCCFNS

SEQ ID NO: 5543 - protein, 9 aa, BK virus
CWVCCFNSN

SEQ ID NO: 5544 - protein, 9 aa, BK virus
WVCCFNSNC

SEQ ID NO: 5545 - protein, 9 aa, BK virus
LGSQSFHCR

SEQ ID NO: 5546 - protein, 9 aa, BK virus
GSQSFHCRP

SEQ ID NO: 5547 - protein, 9 aa, BK virus
SQSFHCRPL

SEQ ID NO: 5548 - protein, 9 aa, BK virus
QSFHCRPLS

SEQ ID NO: 5549 - protein, 9 aa, BK virus
SFHCRPLSA

SEQ ID NO: 5550 - protein, 9 aa, BK virus
FHCRPLSAI

SEQ ID NO: 5551 - protein, 9 aa, BK virus
HCRPLSAIR

SEQ ID NO: 5552 - protein, 9 aa, BK virus
CRPLSAIRH

SEQ ID NO: 5553 - protein, 9 aa, BK virus
RPLSAIRHG

SEQ ID NO: 5554 - protein, 9 aa, BK virus
PLSAIRHGF

SEQ ID NO: 5555 - protein, 9 aa, BK virus
LSAIRHGFG

SEQ ID NO: 5556 - protein, 9 aa, BK virus
SAIRHGFGI

SEQ ID NO: 5557 - protein, 9 aa, BK virus
AIRHGFGIV

SEQ ID NO: 5558 - protein, 9 aa, BK virus
YSVSWCKYF

SEQ ID NO: 5559 - protein, 9 aa, BK virus
SVSWCKYFC

SEQ ID NO: 5560 - protein, 9 aa, BK virus
ALGSFFVCY

SEQ ID NO: 5561 - protein, 9 aa, BK virus
LGSFFVCYY

SEQ ID NO: 5562 - protein, 9 aa, BK virus
GSFFVCYYF

SEQ ID NO: 5563 - protein, 9 aa, BK virus
SFFVCYYFP

SEQ ID NO: 5564 - protein, 9 aa, BK virus
FFVCYYFPG

SEQ ID NO: 5565 - protein, 9 aa, BK virus
FVCYYFPGF

SEQ ID NO: 5566 - protein, 9 aa, BK virus
VCYYFPGFV

SEQ ID NO: 5567 - protein, 9 aa, BK virus
CYYFPGFVA

SEQ ID NO: 5568 - protein, 9 aa, BK virus
YYFPGFVAC

SEQ ID NO: 5569 - protein, 9 aa, BK virus
YFPGFVACY

SEQ ID NO: 5570 - protein, 9 aa, BK virus
YTFYNLTGI

SEQ ID NO: 5571 - protein, 9 aa, BK virus
TFYNLTGIA

SEQ ID NO: 5572 - protein, 9 aa, BK virus
FYNLTGIAE

SEQ ID NO: 5573 - protein, 9 aa, BK virus
YNLTGIAEK

SEQ ID NO: 5574 - protein, 9 aa, BK virus
NLTGIAEKN

SEQ ID NO: 5575 - protein, 9 aa, BK virus
LTGIAEKNR

SEQ ID NO: 5576 - protein, 9 aa, BK virus
TGIAEKNRK

SEQ ID NO: 5577 - protein, 9 aa, BK virus
GIAEKNRKI

SEQ ID NO: 5578 - protein, 9 aa, BK virus
IAEKNRKIF

SEQ ID NO: 5579 - protein, 9 aa, BK virus
IFGGNYLDN

SEQ ID NO: 5580 - protein, 9 aa, BK virus
FGGNYLDNC

SEQ ID NO: 5581 - protein, 9 aa, BK virus
GGNYLDNCK

SEQ ID NO: 5582 - protein, 9 aa, BK virus
GNYLDNCKC

SEQ ID NO: 5583 - protein, 9 aa, BK virus
NYLDNCKCP

SEQ ID NO: 5584 - protein, 9 aa, BK virus
YLDNCKCPY

SEQ ID NO: 5585 - protein, 9 aa, BK virus
LDNCKCPYK

SEQ ID NO: 5586 - protein, 9 aa, BK virus
DNCKCPYKL

SEQ ID NO: 5587 - protein, 9 aa, BK virus
NCKCPYKLL

SEQ ID NO: 5588 - protein, 9 aa, BK virus
KGRYPCTFW

SEQ ID NO: 5589 - protein, 9 aa, BK virus
GRYPCTFWP

SEQ ID NO: 5590 - protein, 9 aa, BK virus
RYPCTFWPY

SEQ ID NO: 5591 - protein, 9 aa, BK virus
YPCTFWPYL

SEQ ID NO: 5592 - protein, 9 aa, BK virus
QYRRSYTKN

SEQ ID NO: 5593 - protein, 9 aa, BK virus
YRRSYTKNG

SEQ ID NO: 5594 - protein, 9 aa, BK virus
RRSYTKNGL

SEQ ID NO: 5595 - protein, 9 aa, BK virus
RSYTKNGLK

SEQ ID NO: 5596 - protein, 9 aa, BK virus
SYTKNGLKK

SEQ ID NO: 5597 - protein, 9 aa, BK virus
YTKNGLKKS

SEQ ID NO: 5598 - protein, 9 aa, BK virus
TKNGLKKST

SEQ ID NO: 5599 - protein, 9 aa, BK virus
KNGLKKSTK

SEQ ID NO: 5600 - protein, 9 aa, BK virus
NGLKKSTKC

SEQ ID NO: 5601 - protein, 9 aa, BK virus
GLKKSTKCT

SEQ ID NO: 5602 - protein, 9 aa, BK virus
LKKSTKCTF

SEQ ID NO: 5603 - protein, 9 aa, BK virus
KKSTKCTFR

SEQ ID NO: 5604 - protein, 9 aa, BK virus
KSTKCTFRR

SEQ ID NO: 5605 - protein, 9 aa, BK virus
STKCTFRRV

SEQ ID NO: 5606 - protein, 9 aa, BK virus
TKCTFRRVY

SEQ ID NO: 5607 - protein, 9 aa, BK virus
KCTFRRVYR

SEQ ID NO: 5608 - protein, 9 aa, BK virus
CTFRRVYRK

SEQ ID NO: 5609 - protein, 9 aa, BK virus
TFRRVYRKN

SEQ ID NO: 5610 - protein, 9 aa, BK virus
FRRVYRKNY

SEQ ID NO: 5611 - protein, 9 aa, BK virus
RRVYRKNYC

SEQ ID NO: 5612 - protein, 9 aa, BK virus
RVYRKNYCP

SEQ ID NO: 5613 - protein, 9 aa, BK virus
VYRKNYCPR

SEQ ID NO: 5614 - protein, 9 aa, BK virus
YRKNYCPRR

SEQ ID NO: 5615 - protein, 9 aa, BK virus
RKNYCPRRC

SEQ ID NO: 5616 - protein, 9 aa, BK virus
SKNCSSMDV

SEQ ID NO: 5617 - protein, 9 aa, BK virus
KNCSSMDVA

SEQ ID NO: 5618 - protein, 9 aa, BK virus
NCSSMDVAF

SEQ ID NO: 5619 - protein, 9 aa, BK virus
CSSMDVAFT

SEQ ID NO: 5620 - protein, 9 aa, BK virus
SSMDVAFTS

SEQ ID NO: 5621 - protein, 9 aa, BK virus
SMDVAFTSR

SEQ ID NO: 5622 - protein, 9 aa, BK virus
MDVAFTSRP

SEQ ID NO: 5623 - protein, 9 aa, BK virus
DVAFTSRPV

SEQ ID NO: 5624 - protein, 9 aa, BK virus
VAFTSRPVR

SEQ ID NO: 5625 - protein, 9 aa, BK virus
AFTSRPVRD

SEQ ID NO: 5626 - protein, 9 aa, BK virus
FTSRPVRDC

SEQ ID NO: 5627 - protein, 9 aa, BK virus
TSRPVRDCN

SEQ ID NO: 5628 - protein, 9 aa, BK virus
SRPVRDCNT

SEQ ID NO: 5629 - protein, 9 aa, BK virus
RPVRDCNTC

SEQ ID NO: 5630 - protein, 9 aa, BK virus
PVRDCNTCS

SEQ ID NO: 5631 - protein, 9 aa, BK virus
RWPQPKEKE

SEQ ID NO: 5632 - protein, 9 aa, BK virus
WPQPKEKES

SEQ ID NO: 5633 - protein, 9 aa, BK virus
PQPKEKESV

SEQ ID NO: 5634 - protein, 9 aa, BK virus
QPKEKESVQ

SEQ ID NO: 5635 - protein, 9 aa, BK virus
PKEKESVQG

SEQ ID NO: 5636 - protein, 9 aa, BK virus
KEKESVQGQ

SEQ ID NO: 5637 - protein, 9 aa, BK virus
EKESVQGQL

SEQ ID NO: 5638 - protein, 9 aa, BK virus
KESVQGQLP

SEQ ID NO: 5639 - protein, 9 aa, BK virus
ESVQGQLPK

SEQ ID NO: 5640 - protein, 9 aa, BK virus
SVQGQLPKS

SEQ ID NO: 5641 - protein, 9 aa, BK virus
VQGQLPKSQ

SEQ ID NO: 5642 - protein, 9 aa, BK virus
QGQLPKSQR

SEQ ID NO: 5643 - protein, 9 aa, BK virus
GQLPKSQRN

SEQ ID NO: 5644 - protein, 9 aa, BK virus
QLPKSQRNP

SEQ ID NO: 5645 - protein, 9 aa, BK virus
LPKSQRNPC

SEQ ID NO: 5646 - protein, 9 aa, BK virus
PKSQRNPCK

SEQ ID NO: 5647 - protein, 9 aa, BK virus
KSQRNPCKC

SEQ ID NO: 5648 - protein, 9 aa, BK virus
SQRNPCKCQ

SEQ ID NO: 5649 - protein, 9 aa, BK virus
QRNPCKCQN

SEQ ID NO: 5650 - protein, 9 aa, BK virus
RNPCKCQNY

SEQ ID NO: 5651 - protein, 9 aa, BK virus
TQKWGIQMK

SEQ ID NO: 5652 - protein, 9 aa, BK virus
QKWGIQMKT

SEQ ID NO: 5653 - protein, 9 aa, BK virus
KWGIQMKTL

SEQ ID NO: 5654 - protein, 9 aa, BK virus
WGIQMKTLG

SEQ ID NO: 5655 - protein, 9 aa, BK virus
GIQMKTLGA

SEQ ID NO: 5656 - protein, 9 aa, BK virus
IQMKTLGAL

SEQ ID NO: 5657 - protein, 9 aa, BK virus
QMKTLGALV

SEQ ID NO: 5658 - protein, 9 aa, BK virus
VLKMTLAVI

SEQ ID NO: 5659 - protein, 9 aa, BK virus
LKMTLAVIA

SEQ ID NO: 5660 - protein, 9 aa, BK virus
KMTLAVIAQ

SEQ ID NO: 5661 - protein, 9 aa, BK virus
MTLAVIAQR

SEQ ID NO: 5662 - protein, 9 aa, BK virus
TLAVIAQRE

SEQ ID NO: 5663 - protein, 9 aa, BK virus
LAVIAQREK

SEQ ID NO: 5664 - protein, 9 aa, BK virus
AVIAQREKC

SEQ ID NO: 5665 - protein, 9 aa, BK virus
VIAQREKCF

SEQ ID NO: 5666 - protein, 9 aa, BK virus
IAQREKCFP

SEQ ID NO: 5667 - protein, 9 aa, BK virus
AQREKCFPV

SEQ ID NO: 5668 - protein, 9 aa, BK virus
QREKCFPVT

SEQ ID NO: 5669 - protein, 9 aa, BK virus
REKCFPVTA

SEQ ID NO: 5670 - protein, 9 aa, BK virus
EKCFPVTAQ

SEQ ID NO: 5671 - protein, 9 aa, BK virus
KCFPVTAQQ

SEQ ID NO: 5672 - protein, 9 aa, BK virus
CFPVTAQQE

SEQ ID NO: 5673 - protein, 9 aa, BK virus
FPVTAQQEF

SEQ ID NO: 5674 - protein, 9 aa, BK virus
PVTAQQEFP

SEQ ID NO: 5675 - protein, 9 aa, BK virus
VTAQQEFPS

SEQ ID NO: 5676 - protein, 9 aa, BK virus
TAQQEFPSP

SEQ ID NO: 5677 - protein, 9 aa, BK virus
AQQEFPSPI

SEQ ID NO: 5678 - protein, 9 aa, BK virus
LACLTFMQG

SEQ ID NO: 5679 - protein, 9 aa, BK virus
ACLTFMQGH

SEQ ID NO: 5680 - protein, 9 aa, BK virus
CLTFMQGHK

SEQ ID NO: 5681 - protein, 9 aa, BK virus
LTFMQGHKK

SEQ ID NO: 5682 - protein, 9 aa, BK virus
TFMQGHKKC

SEQ ID NO: 5683 - protein, 9 aa, BK virus
FMQGHKKCM

SEQ ID NO: 5684 - protein, 9 aa, BK virus
MQGHKKCMS

SEQ ID NO: 5685 - protein, 9 aa, BK virus
QGHKKCMSM

SEQ ID NO: 5686 - protein, 9 aa, BK virus
GHKKCMSMV

SEQ ID NO: 5687 - protein, 9 aa, BK virus
HKKCMSMVE

SEQ ID NO: 5688 - protein, 9 aa, BK virus
KKCMSMVEE

SEQ ID NO: 5689 - protein, 9 aa, BK virus
KCMSMVEEN

SEQ ID NO: 5690 - protein, 9 aa, BK virus
CMSMVEENL

SEQ ID NO: 5691 - protein, 9 aa, BK virus
MSMVEENLF

SEQ ID NO: 5692 - protein, 9 aa, BK virus
SMVEENLFK

SEQ ID NO: 5693 - protein, 9 aa, BK virus
MVEENLFKA

SEQ ID NO: 5694 - protein, 9 aa, BK virus
VEENLFKAV

SEQ ID NO: 5695 - protein, 9 aa, BK virus
EENLFKAVI

SEQ ID NO: 5696 - protein, 9 aa, BK virus
ENLFKAVIS

SEQ ID NO: 5697 - protein, 9 aa, BK virus
NLFKAVIST

SEQ ID NO: 5698 - protein, 9 aa, BK virus
LFKAVISTS

SEQ ID NO: 5699 - protein, 9 aa, BK virus
FKAVISTSL

SEQ ID NO: 5700 - protein, 9 aa, BK virus
KAVISTSLL

SEQ ID NO: 5701 - protein, 9 aa, BK virus
VENPWKCRE

SEQ ID NO: 5702 - protein, 9 aa, BK virus
ENPWKCREC

SEQ ID NO: 5703 - protein, 9 aa, BK virus
ITGQSTLMV

SEQ ID NO: 5704 - protein, 9 aa, BK virus
TGQSTLMVL

SEQ ID NO: 5705 - protein, 9 aa, BK virus
PLKTQQPSP

SEQ ID NO: 5706 - protein, 9 aa, BK virus
LKTQQPSPR

SEQ ID NO: 5707 - protein, 9 aa, BK virus
ILTIRPIWT

SEQ ID NO: 5708 - protein, 9 aa, BK virus
LTIRPIWTK

SEQ ID NO: 5709 - protein, 9 aa, BK virus
TIRPIWTKT

SEQ ID NO: 5710 - protein, 9 aa, BK virus
IRPIWTKTM

SEQ ID NO: 5711 - protein, 9 aa, BK virus
RPIWTKTML

SEQ ID NO: 5712 - protein, 9 aa, BK virus
PIWTKTMLI

SEQ ID NO: 5713 - protein, 9 aa, BK virus
IWTKTMLIQ

SEQ ID NO: 5714 - protein, 9 aa, BK virus
WTKTMLIQL

SEQ ID NO: 5715 - protein, 9 aa, BK virus
TKTMLIQLS

SEQ ID NO: 5716 - protein, 9 aa, BK virus
KTMLIQLSA

SEQ ID NO: 5717 - protein, 9 aa, BK virus
TMLIQLSAG

SEQ ID NO: 5718 - protein, 9 aa, BK virus
MLIQLSAGY

SEQ ID NO: 5719 - protein, 9 aa, BK virus
LIQLSAGYL

SEQ ID NO: 5720 - protein, 9 aa, BK virus
IQLSAGYLI

SEQ ID NO: 5721 - protein, 9 aa, BK virus
QLSAGYLIP

SEQ ID NO: 5722 - protein, 9 aa, BK virus
LSAGYLIPV

SEQ ID NO: 5723 - protein, 9 aa, BK virus
SAGYLIPVE

SEQ ID NO: 5724 - protein, 9 aa, BK virus
AGYLIPVEM

SEQ ID NO: 5725 - protein, 9 aa, BK virus
GYLIPVEMK

SEQ ID NO: 5726 - protein, 9 aa, BK virus
YLIPVEMKM

SEQ ID NO: 5727 - protein, 9 aa, BK virus
LIPVEMKML

SEQ ID NO: 5728 - protein, 9 aa, BK virus
IPVEMKMLG

SEQ ID NO: 5729 - protein, 9 aa, BK virus
PVEMKMLGI

SEQ ID NO: 5730 - protein, 9 aa, BK virus
VEMKMLGIL

SEQ ID NO: 5731 - protein, 9 aa, BK virus
EMKMLGILG

SEQ ID NO: 5732 - protein, 9 aa, BK virus
MKMLGILGL

SEQ ID NO: 5733 - protein, 9 aa, BK virus
KMLGILGLS

SEQ ID NO: 5734 - protein, 9 aa, BK virus
MLGILGLSQ

SEQ ID NO: 5735 - protein, 9 aa, BK virus
LGILGLSQE

SEQ ID NO: 5736 - protein, 9 aa, BK virus
GILGLSQEG

SEQ ID NO: 5737 - protein, 9 aa, BK virus
ILGLSQEGK

SEQ ID NO: 5738 - protein, 9 aa, BK virus
LGLSQEGKM

SEQ ID NO: 5739 - protein, 9 aa, BK virus
GLSQEGKMF

SEQ ID NO: 5740 - protein, 9 aa, BK virus
LSQEGKMFP

SEQ ID NO: 5741 - protein, 9 aa, BK virus
SQEGKMFPQ

SEQ ID NO: 5742 - protein, 9 aa, BK virus
QEGKMFPQY

SEQ ID NO: 5743 - protein, 9 aa, BK virus
EGKMFPQYF

SEQ ID NO: 5744 - protein, 9 aa, BK virus
GKMFPQYFM

SEQ ID NO: 5745 - protein, 9 aa, BK virus
MNRVWGLFV

SEQ ID NO: 5746 - protein, 9 aa, BK virus
NRVWGLFVK

SEQ ID NO: 5747 - protein, 9 aa, BK virus
RVWGLFVKL

SEQ ID NO: 5748 - protein, 9 aa, BK virus
VWGLFVKLI

SEQ ID NO: 5749 - protein, 9 aa, BK virus
WGLFVKLIA

SEQ ID NO: 5750 - protein, 9 aa, BK virus
GLFVKLIAC

SEQ ID NO: 5751 - protein, 9 aa, BK virus
LFVKLIACM

SEQ ID NO: 5752 - protein, 9 aa, BK virus
FVKLIACMF

SEQ ID NO: 5753 - protein, 9 aa, BK virus
VKLIACMFQ

SEQ ID NO: 5754 - protein, 9 aa, BK virus
KLIACMFQL

SEQ ID NO: 5755 - protein, 9 aa, BK virus
LIACMFQLL

SEQ ID NO: 5756 - protein, 9 aa, BK virus
IACMFQLLI

SEQ ID NO: 5757 - protein, 9 aa, BK virus
ACMFQLLIF

SEQ ID NO: 5758 - protein, 9 aa, BK virus
CMFQLLIFV

SEQ ID NO: 5759 - protein, 9 aa, BK virus
MFQLLIFVA

SEQ ID NO: 5760 - protein, 9 aa, BK virus
FQLLIFVAC

SEQ ID NO: 5761 - protein, 9 aa, BK virus
QLLIFVACL

SEQ ID NO: 5762 - protein, 9 aa, BK virus
LLIFVACLL

SEQ ID NO: 5763 - protein, 9 aa, BK virus
LIFVACLLT

SEQ ID NO: 5764 - protein, 9 aa, BK virus
IFVACLLTA

SEQ ID NO: 5765 - protein, 9 aa, BK virus
FVACLLTAL

SEQ ID NO: 5766 - protein, 9 aa, BK virus
VACLLTALE

SEQ ID NO: 5767 - protein, 9 aa, BK virus
ACLLTALEH

SEQ ID NO: 5768 - protein, 9 aa, BK virus
CLLTALEHN

SEQ ID NO: 5769 - protein, 9 aa, BK virus
LLTALEHNS

SEQ ID NO: 5770 - protein, 9 aa, BK virus
LTALEHNSG

SEQ ID NO: 5771 - protein, 9 aa, BK virus
TALEHNSGE

SEQ ID NO: 5772 - protein, 9 aa, BK virus
ALEHNSGEA

SEQ ID NO: 5773 - protein, 9 aa, BK virus
LEHNSGEAL

SEQ ID NO: 5774 - protein, 9 aa, BK virus
EHNSGEALQ

SEQ ID NO: 5775 - protein, 9 aa, BK virus
HNSGEALQD

SEQ ID NO: 5776 - protein, 9 aa, BK virus
NSGEALQDI

SEQ ID NO: 5777 - protein, 9 aa, BK virus
SGEALQDIL

SEQ ID NO: 5778 - protein, 9 aa, BK virus
GEALQDILR

SEQ ID NO: 5779 - protein, 9 aa, BK virus
EALQDILRS

SEQ ID NO: 5780 - protein, 9 aa, BK virus
ALQDILRSA

SEQ ID NO: 5781 - protein, 9 aa, BK virus
RILTQFPFC

SEQ ID NO: 5782 - protein, 9 aa, BK virus
TGEPREWMG

SEQ ID NO: 5783 - protein, 9 aa, BK virus
GEPREWMGS

SEQ ID NO: 5784 - protein, 9 aa, BK virus
EPREWMGSL

SEQ ID NO: 5785 - protein, 9 aa, BK virus
PREWMGSLC

SEQ ID NO: 5786 - protein, 9 aa, BK virus
REWMGSLCM

SEQ ID NO: 5787 - protein, 9 aa, BK virus
EWMGSLCMV

SEQ ID NO: 5788 - protein, 9 aa, BK virus
WMGSLCMVW

SEQ ID NO: 5789 - protein, 9 aa, BK virus
MGSLCMVWN

SEQ ID NO: 5790 - protein, 9 aa, BK virus
GSLCMVWNP

SEQ ID NO: 5791 - protein, 9 aa, BK virus
SLCMVWNPR

SEQ ID NO: 5792 - protein, 9 aa, BK virus
KRLGCLMAQ

SEQ ID NO: 5793 - protein, 9 aa, BK virus
RLGCLMAQK

SEQ ID NO: 5794 - protein, 9 aa, BK virus
LGCLMAQKD

SEQ ID NO: 5795 - protein, 9 aa, BK virus
GCLMAQKDF

SEQ ID NO: 5796 - protein, 9 aa, BK virus
CLMAQKDFQ

SEQ ID NO: 5797 - protein, 9 aa, BK virus
LMAQKDFQG

SEQ ID NO: 5798 - protein, 9 aa, BK virus
MAQKDFQGT

SEQ ID NO: 5799 - protein, 9 aa, BK virus
AQKDFQGTQ

SEQ ID NO: 5800 - protein, 9 aa, BK virus
QKDFQGTQI

SEQ ID NO: 5801 - protein, 9 aa, BK virus
DILTNRDNC

SEQ ID NO: 5802 - protein, 9 aa, BK virus
ILTNRDNCK

SEQ ID NO: 5803 - protein, 9 aa, BK virus
LTNRDNCKP

SEQ ID NO: 5804 - protein, 9 aa, BK virus
TNRDNCKPK

SEQ ID NO: 5805 - protein, 9 aa, BK virus
NRDNCKPKC

SEQ ID NO: 5806 - protein, 9 aa, BK virus
RDNCKPKCF

SEQ ID NO: 5807 - protein, 9 aa, BK virus
DNCKPKCFK

SEQ ID NO: 5808 - protein, 9 aa, BK virus
NCKPKCFKQ

SEQ ID NO: 5809 - protein, 9 aa, BK virus
CKPKCFKQV

SEQ ID NO: 5810 - protein, 9 aa, BK virus
KPKCFKQVL

SEQ ID NO: 5811 - protein, 9 aa, BK virus
PKCFKQVLL

SEQ ID NO: 5812 - protein, 9 aa, BK virus
KCFKQVLLL

SEQ ID NO: 5813 - protein, 9 aa, BK virus
CFKQVLLLY

SEQ ID NO: 5814 - protein, 9 aa, BK virus
FKQVLLLYI

SEQ ID NO: 5815 - protein, 9 aa, BK virus
KQVLLLYIY

SEQ ID NO: 5816 - protein, 9 aa, BK virus
QVLLLYIYI

SEQ ID NO: 5817 - protein, 9 aa, BK virus
MLLLYKPLL

SEQ ID NO: 5818 - protein, 9 aa, BK virus
LLLYKPLLS

SEQ ID NO: 5819 - protein, 9 aa, BK virus
LLYKPLLSL

SEQ ID NO: 5820 - protein, 9 aa, BK virus
LYKPLLSLC

SEQ ID NO: 5821 - protein, 9 aa, BK virus
YKPLLSLCY

SEQ ID NO: 5822 - protein, 9 aa, BK virus
KPLLSLCYF

SEQ ID NO: 5823 - protein, 9 aa, BK virus
PLLSLCYFG

SEQ ID NO: 5824 - protein, 9 aa, BK virus
LLSLCYFGG

SEQ ID NO: 5825 - protein, 9 aa, BK virus
LSLCYFGGG

SEQ ID NO: 5826 - protein, 9 aa, BK virus
SLCYFGGGV

SEQ ID NO: 5827 - protein, 9 aa, BK virus
LCYFGGGVL

SEQ ID NO: 5828 - protein, 9 aa, BK virus
CYFGGGVLG

SEQ ID NO: 5829 - protein, 9 aa, BK virus
YFGGGVLGL

SEQ ID NO: 5830 - protein, 9 aa, BK virus
FGGGVLGLL

SEQ ID NO: 5831 - protein, 9 aa, BK virus
GGGVLGLLK

SEQ ID NO: 5832 - protein, 9 aa, BK virus
GGVLGLLKH

SEQ ID NO: 5833 - protein, 9 aa, BK virus
LWGSDLWES

SEQ ID NO: 5834 - protein, 9 aa, BK virus
WGSDLWESS

SEQ ID NO: 5835 - protein, 9 aa, BK virus
GSDLWESSA

SEQ ID NO: 5836 - protein, 9 aa, BK virus
SDLWESSAG

SEQ ID NO: 5837 - protein, 9 aa, BK virus
DLWESSAGA

SEQ ID NO: 5838 - protein, 9 aa, BK virus
LWESSAGAE

SEQ ID NO: 5839 - protein, 9 aa, BK virus
WESSAGAEV

SEQ ID NO: 5840 - protein, 9 aa, BK virus
ESSAGAEVS

SEQ ID NO: 5841 - protein, 9 aa, BK virus
SSAGAEVSE

SEQ ID NO: 5842 - protein, 9 aa, BK virus
SAGAEVSET

SEQ ID NO: 5843 - protein, 9 aa, BK virus
AGAEVSETW

SEQ ID NO: 5844 - protein, 9 aa, BK virus
GAEVSETWE

SEQ ID NO: 5845 - protein, 9 aa, BK virus
AEVSETWEE

SEQ ID NO: 5846 - protein, 9 aa, BK virus
EVSETWEEH

SEQ ID NO: 5847 - protein, 9 aa, BK virus
VSETWEEHC

SEQ ID NO: 5848 - protein, 9 aa, BK virus
SETWEEHCD

SEQ ID NO: 5849 - protein, 9 aa, BK virus
ETWEEHCDW

SEQ ID NO: 5850 - protein, 9 aa, BK virus
TWEEHCDWD

SEQ ID NO: 5851 - protein, 9 aa, BK virus
WEEHCDWDS

SEQ ID NO: 5852 - protein, 9 aa, BK virus
EEHCDWDSV

SEQ ID NO: 5853 - protein, 9 aa, BK virus
EHCDWDSVL

SEQ ID NO: 5854 - protein, 9 aa, BK virus
HCDWDSVLD

SEQ ID NO: 5855 - protein, 9 aa, BK virus
CDWDSVLDP

SEQ ID NO: 5856 - protein, 9 aa, BK virus
DWDSVLDPC

SEQ ID NO: 5857 - protein, 9 aa, BK virus
WDSVLDPCP

SEQ ID NO: 5858 - protein, 9 aa, BK virus
DSVLDPCPE

SEQ ID NO: 5859 - protein, 9 aa, BK virus
SVLDPCPES

SEQ ID NO: 5860 - protein, 9 aa, BK virus
VLDPCPESS

SEQ ID NO: 5861 - protein, 9 aa, BK virus
LDPCPESSV

SEQ ID NO: 5862 - protein, 9 aa, BK virus
DPCPESSVS

SEQ ID NO: 5863 - protein, 9 aa, BK virus
PCPESSVSE

SEQ ID NO: 5864 - protein, 9 aa, BK virus
CPESSVSES

SEQ ID NO: 5865 - protein, 9 aa, BK virus
PESSVSESS

SEQ ID NO: 5866 - protein, 9 aa, BK virus
ESSVSESSS

SEQ ID NO: 5867 - protein, 9 aa, BK virus
SSVSESSSL

SEQ ID NO: 5868 - protein, 9 aa, BK virus
SVSESSSLV

SEQ ID NO: 5869 - protein, 9 aa, BK virus
VSESSSLVI

SEQ ID NO: 5870 - protein, 9 aa, BK virus
SESSSLVIS

SEQ ID NO: 5871 - protein, 9 aa, BK virus
ESSSLVISR

SEQ ID NO: 5872 - protein, 9 aa, BK virus
SSSLVISRI

SEQ ID NO: 5873 - protein, 9 aa, BK virus
SSLVISRIH

SEQ ID NO: 5874 - protein, 9 aa, BK virus
SLVISRIHF

SEQ ID NO: 5875 - protein, 9 aa, BK virus
LVISRIHFP

SEQ ID NO: 5876 - protein, 9 aa, BK virus
VISRIHFPM

SEQ ID NO: 5877 - protein, 9 aa, BK virus
ISRIHFPMH

SEQ ID NO: 5878 - protein, 9 aa, BK virus
SRIHFPMHI

SEQ ID NO: 5879 - protein, 9 aa, BK virus
RIHFPMHIL

SEQ ID NO: 5880 - protein, 9 aa, BK virus
IHFPMHILY

SEQ ID NO: 5881 - protein, 9 aa, BK virus
HFPMHILYF

SEQ ID NO: 5882 - protein, 9 aa, BK virus
FPMHILYFI

SEQ ID NO: 5883 - protein, 9 aa, BK virus
PMHILYFIL

SEQ ID NO: 5884 - protein, 9 aa, BK virus
MHILYFILE

SEQ ID NO: 5885 - protein, 9 aa, BK virus
HILYFILEK

SEQ ID NO: 5886 - protein, 9 aa, BK virus
ILYFILEKV

SEQ ID NO: 5887 - protein, 9 aa, BK virus
LYFILEKVY

SEQ ID NO: 5888 - protein, 9 aa, BK virus
YFILEKVYI

SEQ ID NO: 5889 - protein, 9 aa, BK virus
FILEKVYIL

SEQ ID NO: 5890 - protein, 9 aa, BK virus
ILEKVYILI

SEQ ID NO: 5891 - protein, 9 aa, BK virus
LEKVYILIS

SEQ ID NO: 5892 - protein, 9 aa, BK virus
EKVYILISE

SEQ ID NO: 5893 - protein, 9 aa, BK virus
KVYILISES

SEQ ID NO: 5894 - protein, 9 aa, BK virus
VYILISESS

SEQ ID NO: 5895 - protein, 9 aa, BK virus
YILISESSL

SEQ ID NO: 5896 - protein, 9 aa, BK virus
ILISESSLS

SEQ ID NO: 5897 - protein, 9 aa, BK virus
LISESSLSF

SEQ ID NO: 5898 - protein, 9 aa, BK virus
ISESSLSFH

SEQ ID NO: 5899 - protein, 9 aa, BK virus
SESSLSFHS

SEQ ID NO: 5900 - protein, 9 aa, BK virus
ESSLSFHST

SEQ ID NO: 5901 - protein, 9 aa, BK virus
SSLSFHSTI

SEQ ID NO: 5902 - protein, 9 aa, BK virus
SLSFHSTIL

SEQ ID NO: 5903 - protein, 9 aa, BK virus
LSFHSTILD

SEQ ID NO: 5904 - protein, 9 aa, BK virus
SFHSTILDC

SEQ ID NO: 5905 - protein, 9 aa, BK virus
FHSTILDCI

SEQ ID NO: 5906 - protein, 9 aa, BK virus
HSTILDCIS

SEQ ID NO: 5907 - protein, 9 aa, BK virus
STILDCISV

SEQ ID NO: 5908 - protein, 9 aa, BK virus
TILDCISVA

SEQ ID NO: 5909 - protein, 9 aa, BK virus
ILDCISVAK

SEQ ID NO: 5910 - protein, 9 aa, BK virus
LDCISVAKS

SEQ ID NO: 5911 - protein, 9 aa, BK virus
DCISVAKSA

SEQ ID NO: 5912 - protein, 9 aa, BK virus
CISVAKSAT

SEQ ID NO: 5913 - protein, 9 aa, BK virus
ISVAKSATG

SEQ ID NO: 5914 - protein, 9 aa, BK virus
SVAKSATGL

SEQ ID NO: 5915 - protein, 9 aa, BK virus
VAKSATGLN

SEQ ID NO: 5916 - protein, 9 aa, BK virus
AKSATGLNQ

SEQ ID NO: 5917 - protein, 9 aa, BK virus
KSATGLNQI

SEQ ID NO: 5918 - protein, 9 aa, BK virus
SATGLNQIS

SEQ ID NO: 5919 - protein, 9 aa, BK virus
ATGLNQISS

SEQ ID NO: 5920 - protein, 9 aa, BK virus
TGLNQISSS

SEQ ID NO: 5921 - protein, 9 aa, BK virus
GLNQISSSN

SEQ ID NO: 5922 - protein, 9 aa, BK virus
LNQISSSNK

SEQ ID NO: 5923 - protein, 9 aa, BK virus
NQISSSNKV

SEQ ID NO: 5924 - protein, 9 aa, BK virus
QISSSNKVI

SEQ ID NO: 5925 - protein, 9 aa, BK virus
ISSSNKVIP

SEQ ID NO: 5926 - protein, 9 aa, BK virus
SSSNKVIPL

SEQ ID NO: 5927 - protein, 9 aa, BK virus
SSNKVIPLC

SEQ ID NO: 5928 - protein, 9 aa, BK virus
SNKVIPLCK

SEQ ID NO: 5929 - protein, 9 aa, BK virus
NKVIPLCKI

SEQ ID NO: 5930 - protein, 9 aa, BK virus
KVIPLCKIL

SEQ ID NO: 5931 - protein, 9 aa, BK virus
VIPLCKILF

SEQ ID NO: 5932 - protein, 9 aa, BK virus
IPLCKILFS

SEQ ID NO: 5933 - protein, 9 aa, BK virus
PLCKILFSS

SEQ ID NO: 5934 - protein, 9 aa, BK virus
LCKILFSSK

SEQ ID NO: 5935 - protein, 9 aa, BK virus
CKILFSSKN

SEQ ID NO: 5936 - protein, 9 aa, BK virus
KILFSSKNS

SEQ ID NO: 5937 - protein, 9 aa, BK virus
ILFSSKNSE

SEQ ID NO: 5938 - protein, 9 aa, BK virus
LFSSKNSEF

SEQ ID NO: 5939 - protein, 9 aa, BK virus
FSSKNSEFC

SEQ ID NO: 5940 - protein, 9 aa, BK virus
SSKNSEFCK

SEQ ID NO: 5941 - protein, 9 aa, BK virus
SKNSEFCKD

SEQ ID NO: 5942 - protein, 9 aa, BK virus
KNSEFCKDF

SEQ ID NO: 5943 - protein, 9 aa, BK virus
NSEFCKDFL

SEQ ID NO: 5944 - protein, 9 aa, BK virus
SEFCKDFLK

SEQ ID NO: 5945 - protein, 9 aa, BK virus
EFCKDFLKY

SEQ ID NO: 5946 - protein, 9 aa, BK virus
FCKDFLKYI

SEQ ID NO: 5947 - protein, 9 aa, BK virus
CKDFLKYIL

SEQ ID NO: 5948 - protein, 9 aa, BK virus
KDFLKYILG

SEQ ID NO: 5949 - protein, 9 aa, BK virus
DFLKYILGL

SEQ ID NO: 5950 - protein, 9 aa, BK virus
FLKYILGLK

SEQ ID NO: 5951 - protein, 9 aa, BK virus
LKYILGLKS

SEQ ID NO: 5952 - protein, 9 aa, BK virus
KYILGLKSI

SEQ ID NO: 5953 - protein, 9 aa, BK virus
YILGLKSIC

SEQ ID NO: 5954 - protein, 9 aa, BK virus
ILGLKSICL

SEQ ID NO: 5955 - protein, 9 aa, BK virus
LGLKSICLT

SEQ ID NO: 5956 - protein, 9 aa, BK virus
GLKSICLTN

SEQ ID NO: 5957 - protein, 9 aa, BK virus
LKSICLTNL

SEQ ID NO: 5958 - protein, 9 aa, BK virus
KSICLTNLA

SEQ ID NO: 5959 - protein, 9 aa, BK virus
SICLTNLAC

SEQ ID NO: 5960 - protein, 9 aa, BK virus
ICLTNLACR

SEQ ID NO: 5961 - protein, 9 aa, BK virus
CLTNLACRV

SEQ ID NO: 5962 - protein, 9 aa, BK virus
LTNLACRVL

SEQ ID NO: 5963 - protein, 9 aa, BK virus
TNLACRVLG

SEQ ID NO: 5964 - protein, 9 aa, BK virus
NLACRVLGT

SEQ ID NO: 5965 - protein, 9 aa, BK virus
LACRVLGTG

SEQ ID NO: 5966 - protein, 9 aa, BK virus
ACRVLGTGY

SEQ ID NO: 5967 - protein, 9 aa, BK virus
CRVLGTGYS

SEQ ID NO: 5968 - protein, 9 aa, BK virus
RVLGTGYSF

SEQ ID NO: 5969 - protein, 9 aa, BK virus
VLGTGYSFI

SEQ ID NO: 5970 - protein, 9 aa, BK virus
LGTGYSFIV

SEQ ID NO: 5971 - protein, 9 aa, BK virus
GTGYSFIVT

SEQ ID NO: 5972 - protein, 9 aa, BK virus
TGYSFIVTK

SEQ ID NO: 5973 - protein, 9 aa, BK virus
GYSFIVTKP

SEQ ID NO: 5974 - protein, 9 aa, BK virus
YSFIVTKPG

SEQ ID NO: 5975 - protein, 9 aa, BK virus
SFIVTKPGG

SEQ ID NO: 5976 - protein, 9 aa, BK virus
FIVTKPGGN

SEQ ID NO: 5977 - protein, 9 aa, BK virus
IVTKPGGNI

SEQ ID NO: 5978 - protein, 9 aa, BK virus
VTKPGGNIW

SEQ ID NO: 5979 - protein, 9 aa, BK virus
TKPGGNIWV

SEQ ID NO: 5980 - protein, 9 aa, BK virus
KPGGNIWVL

SEQ ID NO: 5981 - protein, 9 aa, BK virus
PGGNIWVLL

SEQ ID NO: 5982 - protein, 9 aa, BK virus
GGNIWVLLF

SEQ ID NO: 5983 - protein, 9 aa, BK virus
GNIWVLLFK

SEQ ID NO: 5984 - protein, 9 aa, BK virus
NIWVLLFKC

SEQ ID NO: 5985 - protein, 9 aa, BK virus
IWVLLFKCF

SEQ ID NO: 5986 - protein, 9 aa, BK virus
WVLLFKCFF

SEQ ID NO: 5987 - protein, 9 aa, BK virus
VLLFKCFFS

SEQ ID NO: 5988 - protein, 9 aa, BK virus
LLFKCFFSK

SEQ ID NO: 5989 - protein, 9 aa, BK virus
LFKCFFSKF

SEQ ID NO: 5990 - protein, 9 aa, BK virus
FKCFFSKFT

SEQ ID NO: 5991 - protein, 9 aa, BK virus
KCFFSKFTL

SEQ ID NO: 5992 - protein, 9 aa, BK virus
CFFSKFTLT

SEQ ID NO: 5993 - protein, 9 aa, BK virus
FFSKFTLTL

SEQ ID NO: 5994 - protein, 9 aa, BK virus
FSKFTLTLP

SEQ ID NO: 5995 - protein, 9 aa, BK virus
SKFTLTLPS

SEQ ID NO: 5996 - protein, 9 aa, BK virus
KFTLTLPSK

SEQ ID NO: 5997 - protein, 9 aa, BK virus
SLKLSKLFI

SEQ ID NO: 5998 - protein, 9 aa, BK virus
LKLSKLFIP

SEQ ID NO: 5999 - protein, 9 aa, BK virus
KLSKLFIPC

SEQ ID NO: 6000 - protein, 9 aa, BK virus
LSKLFIPCP

SEQ ID NO: 6001 - protein, 9 aa, BK virus
SKLFIPCPE

SEQ ID NO: 6002 - protein, 9 aa, BK virus
KLFIPCPEG

SEQ ID NO: 6003 - protein, 9 aa, BK virus
LFIPCPEGK

SEQ ID NO: 6004 - protein, 9 aa, BK virus
FIPCPEGKS

SEQ ID NO: 6005 - protein, 9 aa, BK virus
IPCPEGKSF

SEQ ID NO: 6006 - protein, 9 aa, BK virus
PCPEGKSFD

SEQ ID NO: 6007 - protein, 9 aa, BK virus
CPEGKSFDS

SEQ ID NO: 6008 - protein, 9 aa, BK virus
PEGKSFDSA

SEQ ID NO: 6009 - protein, 9 aa, BK virus
EGKSFDSAP

SEQ ID NO: 6010 - protein, 9 aa, BK virus
GKSFDSAPV

SEQ ID NO: 6011 - protein, 9 aa, BK virus
KSFDSAPVP

SEQ ID NO: 6012 - protein, 9 aa, BK virus
SFDSAPVPF

SEQ ID NO: 6013 - protein, 9 aa, BK virus
FDSAPVPFT

SEQ ID NO: 6014 - protein, 9 aa, BK virus
DSAPVPFTS

SEQ ID NO: 6015 - protein, 9 aa, BK virus
SAPVPFTSS

SEQ ID NO: 6016 - protein, 9 aa, BK virus
APVPFTSSK

SEQ ID NO: 6017 - protein, 9 aa, BK virus
PVPFTSSKT

SEQ ID NO: 6018 - protein, 9 aa, BK virus
VPFTSSKTT

SEQ ID NO: 6019 - protein, 9 aa, BK virus
PFTSSKTTM

SEQ ID NO: 6020 - protein, 9 aa, BK virus
FTSSKTTMY

SEQ ID NO: 6021 - protein, 9 aa, BK virus
SIATPSSKV

SEQ ID NO: 6022 - protein, 9 aa, BK virus
IATPSSKVS

SEQ ID NO: 6023 - protein, 9 aa, BK virus
ATPSSKVSL

SEQ ID NO: 6024 - protein, 9 aa, BK virus
TPSSKVSLS

SEQ ID NO: 6025 - protein, 9 aa, BK virus
PSSKVSLSM

SEQ ID NO: 6026 - protein, 9 aa, BK virus
SSKVSLSMG

SEQ ID NO: 6027 - protein, 9 aa, BK virus
SKVSLSMGR

SEQ ID NO: 6028 - protein, 9 aa, BK virus
KVSLSMGRF

SEQ ID NO: 6029 - protein, 9 aa, BK virus
VSLSMGRFT

SEQ ID NO: 6030 - protein, 9 aa, BK virus
SLSMGRFTF

SEQ ID NO: 6031 - protein, 9 aa, BK virus
LSMGRFTFK

SEQ ID NO: 6032 - protein, 9 aa, BK virus
SMGRFTFKA

SEQ ID NO: 6033 - protein, 9 aa, BK virus
MGRFTFKAL

SEQ ID NO: 6034 - protein, 9 aa, BK virus
GRFTFKALP

SEQ ID NO: 6035 - protein, 9 aa, BK virus
RFTFKALPP

SEQ ID NO: 6036 - protein, 9 aa, BK virus
FTFKALPPH

SEQ ID NO: 6037 - protein, 9 aa, BK virus
TFKALPPHK

SEQ ID NO: 6038 - protein, 9 aa, BK virus
FKALPPHKS

SEQ ID NO: 6039 - protein, 9 aa, BK virus
KALPPHKSN

SEQ ID NO: 6040 - protein, 9 aa, BK virus
ALPPHKSNN

SEQ ID NO: 6041 - protein, 9 aa, BK virus
LPPHKSNNP

SEQ ID NO: 6042 - protein, 9 aa, BK virus
PPHKSNNPA

SEQ ID NO: 6043 - protein, 9 aa, BK virus
PHKSNNPAA

SEQ ID NO: 6044 - protein, 9 aa, BK virus
HKSNNPAAS

SEQ ID NO: 6045 - protein, 9 aa, BK virus
KSNNPAASV

SEQ ID NO: 6046 - protein, 9 aa, BK virus
SNNPAASVV

SEQ ID NO: 6047 - protein, 9 aa, BK virus
NNPAASVVF

SEQ ID NO: 6048 - protein, 9 aa, BK virus
NPAASVVFP

SEQ ID NO: 6049 - protein, 9 aa, BK virus
PAASVVFPL

SEQ ID NO: 6050 - protein, 9 aa, BK virus
AASVVFPLS

SEQ ID NO: 6051 - protein, 9 aa, BK virus
ASVVFPLSM

SEQ ID NO: 6052 - protein, 9 aa, BK virus
SVVFPLSMG

SEQ ID NO: 6053 - protein, 9 aa, BK virus
VVFPLSMGP

SEQ ID NO: 6054 - protein, 9 aa, BK virus
VFPLSMGPL

SEQ ID NO: 6055 - protein, 9 aa, BK virus
FPLSMGPLN

SEQ ID NO: 6056 - protein, 9 aa, BK virus
PLSMGPLNN

SEQ ID NO: 6057 - protein, 9 aa, BK virus
LSMGPLNNQ

SEQ ID NO: 6058 - protein, 9 aa, BK virus
SMGPLNNQY

SEQ ID NO: 6059 - protein, 9 aa, BK virus
MGPLNNQYL

SEQ ID NO: 6060 - protein, 9 aa, BK virus
GPLNNQYLL

SEQ ID NO: 6061 - protein, 9 aa, BK virus
PLNNQYLLL

SEQ ID NO: 6062 - protein, 9 aa, BK virus
LNNQYLLLG

SEQ ID NO: 6063 - protein, 9 aa, BK virus
NNQYLLLGT

SEQ ID NO: 6064 - protein, 9 aa, BK virus
NQYLLLGTL

SEQ ID NO: 6065 - protein, 9 aa, BK virus
QYLLLGTLK

SEQ ID NO: 6066 - protein, 9 aa, BK virus
YLLLGTLKT

SEQ ID NO: 6067 - protein, 9 aa, BK virus
LLLGTLKTI

SEQ ID NO: 6068 - protein, 9 aa, BK virus
LLGTLKTIQ

SEQ ID NO: 6069 - protein, 9 aa, BK virus
LGTLKTIQC

SEQ ID NO: 6070 - protein, 9 aa, BK virus
GTLKTIQCK

SEQ ID NO: 6071 - protein, 9 aa, BK virus
TLKTIQCKK

SEQ ID NO: 6072 - protein, 9 aa, BK virus
LKTIQCKKS

SEQ ID NO: 6073 - protein, 9 aa, BK virus
KTIQCKKSN

SEQ ID NO: 6074 - protein, 9 aa, BK virus
TIQCKKSNI

SEQ ID NO: 6075 - protein, 9 aa, BK virus
IQCKKSNIT

SEQ ID NO: 6076 - protein, 9 aa, BK virus
QCKKSNITE

SEQ ID NO: 6077 - protein, 9 aa, BK virus
CKKSNITES

SEQ ID NO: 6078 - protein, 9 aa, BK virus
KKSNITESI

SEQ ID NO: 6079 - protein, 9 aa, BK virus
KSNITESIL

SEQ ID NO: 6080 - protein, 9 aa, BK virus
SNITESILG

SEQ ID NO: 6081 - protein, 9 aa, BK virus
NITESILGS

SEQ ID NO: 6082 - protein, 9 aa, BK virus
ITESILGSK

SEQ ID NO: 6083 - protein, 9 aa, BK virus
TESILGSKQ

SEQ ID NO: 6084 - protein, 9 aa, BK virus
ESILGSKQC

SEQ ID NO: 6085 - protein, 9 aa, BK virus
SILGSKQCS

SEQ ID NO: 6086 - protein, 9 aa, BK virus
ILGSKQCSQ

SEQ ID NO: 6087 - protein, 9 aa, BK virus
LGSKQCSQA

SEQ ID NO: 6088 - protein, 9 aa, BK virus
GSKQCSQAT

SEQ ID NO: 6089 - protein, 9 aa, BK virus
SKQCSQATP

SEQ ID NO: 6090 - protein, 9 aa, BK virus
KQCSQATPA

SEQ ID NO: 6091 - protein, 9 aa, BK virus
QCSQATPAI

SEQ ID NO: 6092 - protein, 9 aa, BK virus
CSQATPAIY

SEQ ID NO: 6093 - protein, 9 aa, BK virus
SQATPAIYC

SEQ ID NO: 6094 - protein, 9 aa, BK virus
QATPAIYCS

SEQ ID NO: 6095 - protein, 9 aa, BK virus
ATPAIYCSS

SEQ ID NO: 6096 - protein, 9 aa, BK virus
TPAIYCSST

SEQ ID NO: 6097 - protein, 9 aa, BK virus
PAIYCSSTA

SEQ ID NO: 6098 - protein, 9 aa, BK virus
AIYCSSTAF

SEQ ID NO: 6099 - protein, 9 aa, BK virus
IYCSSTAFP

SEQ ID NO: 6100 - protein, 9 aa, BK virus
APNIKSILS

SEQ ID NO: 6101 - protein, 9 aa, BK virus
PNIKSILSN

SEQ ID NO: 6102 - protein, 9 aa, BK virus
NIKSILSNI

SEQ ID NO: 6103 - protein, 9 aa, BK virus
LNLSVSISS

SEQ ID NO: 6104 - protein, 9 aa, BK virus
NLSVSISSL

SEQ ID NO: 6105 - protein, 9 aa, BK virus
LSVSISSLV

SEQ ID NO: 6106 - protein, 9 aa, BK virus
SVSISSLVI

SEQ ID NO: 6107 - protein, 9 aa, BK virus
RVSTLFLAK

SEQ ID NO: 6108 - protein, 9 aa, BK virus
VSTLFLAKT

SEQ ID NO: 6109 - protein, 9 aa, BK virus
STLFLAKTV

SEQ ID NO: 6110 - protein, 9 aa, BK virus
TLFLAKTVS

SEQ ID NO: 6111 - protein, 9 aa, BK virus
LFLAKTVST

SEQ ID NO: 6112 - protein, 9 aa, BK virus
FLAKTVSTA

SEQ ID NO: 6113 - protein, 9 aa, BK virus
LAKTVSTAC

SEQ ID NO: 6114 - protein, 9 aa, BK virus
FLLSAKIIA

SEQ ID NO: 6115 - protein, 9 aa, BK virus
LLSAKIIAF

SEQ ID NO: 6116 - protein, 9 aa, BK virus
LSAKIIAFA

SEQ ID NO: 6117 - protein, 9 aa, BK virus
SAKIIAFAK

SEQ ID NO: 6118 - protein, 9 aa, BK virus
AKIIAFAKC

SEQ ID NO: 6119 - protein, 9 aa, BK virus
KIIAFAKCF

SEQ ID NO: 6120 - protein, 9 aa, BK virus
IIAFAKCFS

SEQ ID NO: 6121 - protein, 9 aa, BK virus
HFLHSSTLY

SEQ ID NO: 6122 - protein, 9 aa, BK virus
NSKYIPNNK

SEQ ID NO: 6123 - protein, 9 aa, BK virus
SKYIPNNKN

SEQ ID NO: 6124 - protein, 9 aa, BK virus
KYIPNNKNT

SEQ ID NO: 6125 - protein, 9 aa, BK virus
YIPNNKNTS

SEQ ID NO: 6126 - protein, 9 aa, BK virus
IPNNKNTSS

SEQ ID NO: 6127 - protein, 9 aa, BK virus
PNNKNTSSH

SEQ ID NO: 6128 - protein, 9 aa, BK virus
NNKNTSSHF

SEQ ID NO: 6129 - protein, 9 aa, BK virus
NKNTSSHFV

SEQ ID NO: 6130 - protein, 9 aa, BK virus
KNTSSHFVS

SEQ ID NO: 6131 - protein, 9 aa, BK virus
NTSSHFVST

SEQ ID NO: 6132 - protein, 9 aa, BK virus
TSSHFVSTA

SEQ ID NO: 6133 - protein, 9 aa, BK virus
SSHFVSTAY

SEQ ID NO: 6134 - protein, 9 aa, BK virus
SHFVSTAYS

SEQ ID NO: 6135 - protein, 9 aa, BK virus
HFVSTAYSV

SEQ ID NO: 6136 - protein, 9 aa, BK virus
FVSTAYSVI

SEQ ID NO: 6137 - protein, 9 aa, BK virus
VSTAYSVIN

SEQ ID NO: 6138 - protein, 9 aa, BK virus
STAYSVINF

SEQ ID NO: 6139 - protein, 9 aa, BK virus
TAYSVINFQ

SEQ ID NO: 6140 - protein, 9 aa, BK virus
AYSVINFQD

SEQ ID NO: 6141 - protein, 9 aa, BK virus
YSVINFQDT

SEQ ID NO: 6142 - protein, 9 aa, BK virus
SVINFQDTC

SEQ ID NO: 6143 - protein, 9 aa, BK virus
VINFQDTCF

SEQ ID NO: 6144 - protein, 9 aa, BK virus
INFQDTCFV

SEQ ID NO: 6145 - protein, 9 aa, BK virus
NFQDTCFVS

SEQ ID NO: 6146 - protein, 9 aa, BK virus
FQDTCFVSS

SEQ ID NO: 6147 - protein, 9 aa, BK virus
QDTCFVSSG

SEQ ID NO: 6148 - protein, 9 aa, BK virus
DTCFVSSGS

SEQ ID NO: 6149 - protein, 9 aa, BK virus
TCFVSSGSS

SEQ ID NO: 6150 - protein, 9 aa, BK virus
CFVSSGSSG

SEQ ID NO: 6151 - protein, 9 aa, BK virus
FVSSGSSGL

SEQ ID NO: 6152 - protein, 9 aa, BK virus
VSSGSSGLK

SEQ ID NO: 6153 - protein, 9 aa, BK virus
SSGSSGLKS

SEQ ID NO: 6154 - protein, 9 aa, BK virus
SGSSGLKSC

SEQ ID NO: 6155 - protein, 9 aa, BK virus
GSSGLKSCS

SEQ ID NO: 6156 - protein, 9 aa, BK virus
SSGLKSCSF

SEQ ID NO: 6157 - protein, 9 aa, BK virus
SGLKSCSFK

SEQ ID NO: 6158 - protein, 9 aa, BK virus
GLKSCSFKP

SEQ ID NO: 6159 - protein, 9 aa, BK virus
LKSCSFKPP

SEQ ID NO: 6160 - protein, 9 aa, BK virus
MLSSIVWYG

SEQ ID NO: 6161 - protein, 9 aa, BK virus
LSSIVWYGS

SEQ ID NO: 6162 - protein, 9 aa, BK virus
SSIVWYGSL

SEQ ID NO: 6163 - protein, 9 aa, BK virus
SIVWYGSLV

SEQ ID NO: 6164 - protein, 9 aa, BK virus
IVWYGSLVK

SEQ ID NO: 6165 - protein, 9 aa, BK virus
VWYGSLVKA

SEQ ID NO: 6166 - protein, 9 aa, BK virus
WYGSLVKAL

SEQ ID NO: 6167 - protein, 9 aa, BK virus
YGSLVKALY

SEQ ID NO: 6168 - protein, 9 aa, BK virus
GSLVKALYS

SEQ ID NO: 6169 - protein, 9 aa, BK virus
SLVKALYSK

SEQ ID NO: 6170 - protein, 9 aa, BK virus
LVKALYSKY

SEQ ID NO: 6171 - protein, 9 aa, BK virus
VKALYSKYS

SEQ ID NO: 6172 - protein, 9 aa, BK virus
KALYSKYSL

SEQ ID NO: 6173 - protein, 9 aa, BK virus
ALYSKYSLL

SEQ ID NO: 6174 - protein, 9 aa, BK virus
LYSKYSLLT

SEQ ID NO: 6175 - protein, 9 aa, BK virus
YSKYSLLTP

SEQ ID NO: 6176 - protein, 9 aa, BK virus
SKYSLLTPL

SEQ ID NO: 6177 - protein, 9 aa, BK virus
KYSLLTPLQ

SEQ ID NO: 6178 - protein, 9 aa, BK virus
YSLLTPLQI

SEQ ID NO: 6179 - protein, 9 aa, BK virus
SLLTPLQIK

SEQ ID NO: 6180 - protein, 9 aa, BK virus
LLTPLQIKK

SEQ ID NO: 6181 - protein, 9 aa, BK virus
LTPLQIKKL

SEQ ID NO: 6182 - protein, 9 aa, BK virus
TPLQIKKLK

SEQ ID NO: 6183 - protein, 9 aa, BK virus
PLQIKKLKV

SEQ ID NO: 6184 - protein, 9 aa, BK virus
LQIKKLKVH

SEQ ID NO: 6185 - protein, 9 aa, BK virus
QIKKLKVHS

SEQ ID NO: 6186 - protein, 9 aa, BK virus
IKKLKVHSF

SEQ ID NO: 6187 - protein, 9 aa, BK virus
QKLLIAETL

SEQ ID NO: 6188 - protein, 9 aa, BK virus
KLLIAETLC

SEQ ID NO: 6189 - protein, 9 aa, BK virus
LLIAETLCL

SEQ ID NO: 6190 - protein, 9 aa, BK virus
LIAETLCLC

SEQ ID NO: 6191 - protein, 9 aa, BK virus
IAETLCLCG

SEQ ID NO: 6192 - protein, 9 aa, BK virus
AETLCLCGV

SEQ ID NO: 6193 - protein, 9 aa, BK virus
ETLCLCGVK

SEQ ID NO: 6194 - protein, 9 aa, BK virus
TLCLCGVKK

SEQ ID NO: 6195 - protein, 9 aa, BK virus
LCLCGVKKN

SEQ ID NO: 6196 - protein, 9 aa, BK virus
CLCGVKKNI

SEQ ID NO: 6197 - protein, 9 aa, BK virus
LCGVKKNII

SEQ ID NO: 6198 - protein, 9 aa, BK virus
CGVKKNIIL

SEQ ID NO: 6199 - protein, 9 aa, BK virus
GVKKNIILC

SEQ ID NO: 6200 - protein, 9 aa, BK virus
VKKNIILCP

SEQ ID NO: 6201 - protein, 9 aa, BK virus
KKNIILCPA

SEQ ID NO: 6202 - protein, 9 aa, BK virus
KNIILCPAH

SEQ ID NO: 6203 - protein, 9 aa, BK virus
NIILCPAHM

SEQ ID NO: 6204 - protein, 9 aa, BK virus
IILCPAHMC

SEQ ID NO: 6205 - protein, 9 aa, BK virus
ILCPAHMCL

SEQ ID NO: 6206 - protein, 9 aa, BK virus
LCPAHMCLL

SEQ ID NO: 6207 - protein, 9 aa, BK virus
CPAHMCLLI

SEQ ID NO: 6208 - protein, 9 aa, BK virus
PAHMCLLIK

SEQ ID NO: 6209 - protein, 9 aa, BK virus
AHMCLLIKV

SEQ ID NO: 6210 - protein, 9 aa, BK virus
HMCLLIKVT

SEQ ID NO: 6211 - protein, 9 aa, BK virus
MCLLIKVTE

SEQ ID NO: 6212 - protein, 9 aa, BK virus
CLLIKVTEY

SEQ ID NO: 6213 - protein, 9 aa, BK virus
LLIKVTEYF

SEQ ID NO: 6214 - protein, 9 aa, BK virus
LIKVTEYFS

SEQ ID NO: 6215 - protein, 9 aa, BK virus
IKVTEYFSI

SEQ ID NO: 6216 - protein, 9 aa, BK virus
KVTEYFSIS

SEQ ID NO: 6217 - protein, 9 aa, BK virus
VTEYFSISF

SEQ ID NO: 6218 - protein, 9 aa, BK virus
TEYFSISFL

SEQ ID NO: 6219 - protein, 9 aa, BK virus
EYFSISFLY

SEQ ID NO: 6220 - protein, 9 aa, BK virus
YFSISFLYR

SEQ ID NO: 6221 - protein, 9 aa, BK virus
FSISFLYRI

SEQ ID NO: 6222 - protein, 9 aa, BK virus
AFSLVVYTA

SEQ ID NO: 6223 - protein, 9 aa, BK virus
FSLVVYTAK

SEQ ID NO: 6224 - protein, 9 aa, BK virus
SLVVYTAKQ

SEQ ID NO: 6225 - protein, 9 aa, BK virus
LVVYTAKQA

SEQ ID NO: 6226 - protein, 9 aa, BK virus
VVYTAKQAR

SEQ ID NO: 6227 - protein, 9 aa, BK virus
VYTAKQARV

SEQ ID NO: 6228 - protein, 9 aa, BK virus
YTAKQARVL

SEQ ID NO: 6229 - protein, 9 aa, BK virus
TAKQARVLL

SEQ ID NO: 6230 - protein, 9 aa, BK virus
AKQARVLLL

SEQ ID NO: 6231 - protein, 9 aa, BK virus
KQARVLLLN

SEQ ID NO: 6232 - protein, 9 aa, BK virus
QARVLLLNT

SEQ ID NO: 6233 - protein, 9 aa, BK virus
ARVLLLNTA

SEQ ID NO: 6234 - protein, 9 aa, BK virus
LRNWCRSEG

SEQ ID NO: 6235 - protein, 9 aa, BK virus
RNWCRSEGK

SEQ ID NO: 6236 - protein, 9 aa, BK virus
NWCRSEGKS

SEQ ID NO: 6237 - protein, 9 aa, BK virus
WCRSEGKSL

SEQ ID NO: 6238 - protein, 9 aa, BK virus
CRSEGKSLG

SEQ ID NO: 6239 - protein, 9 aa, BK virus
RSEGKSLGS

SEQ ID NO: 6240 - protein, 9 aa, BK virus
SEGKSLGSS

SEQ ID NO: 6241 - protein, 9 aa, BK virus
EGKSLGSST

SEQ ID NO: 6242 - protein, 9 aa, BK virus
GKSLGSSTF

SEQ ID NO: 6243 - protein, 9 aa, BK virus
KSLGSSTFL

SEQ ID NO: 6244 - protein, 9 aa, BK virus
SLGSSTFLF

SEQ ID NO: 6245 - protein, 9 aa, BK virus
LGSSTFLFF

SEQ ID NO: 6246 - protein, 9 aa, BK virus
GSSTFLFFL

SEQ ID NO: 6247 - protein, 9 aa, BK virus
SSTFLFFLG

SEQ ID NO: 6248 - protein, 9 aa, BK virus
STFLFFLGG

SEQ ID NO: 6249 - protein, 9 aa, BK virus
TFLFFLGGV

SEQ ID NO: 6250 - protein, 9 aa, BK virus
FLFFLGGVE

SEQ ID NO: 6251 - protein, 9 aa, BK virus
LFFLGGVEC

SEQ ID NO: 6252 - protein, 9 aa, BK virus
ESAVASSSL

SEQ ID NO: 6253 - protein, 9 aa, BK virus
SAVASSSLA

SEQ ID NO: 6254 - protein, 9 aa, BK virus
AVASSSLAN

SEQ ID NO: 6255 - protein, 9 aa, BK virus
VASSSLANI

SEQ ID NO: 6256 - protein, 9 aa, BK virus
ASSSLANIS

SEQ ID NO: 6257 - protein, 9 aa, BK virus
SSSLANISS

SEQ ID NO: 6258 - protein, 9 aa, BK virus
SSLANISSW

SEQ ID NO: 6259 - protein, 9 aa, BK virus
SLANISSWQ

SEQ ID NO: 6260 - protein, 9 aa, BK virus
LANISSWQN

SEQ ID NO: 6261 - protein, 9 aa, BK virus
ANISSWQNK

SEQ ID NO: 6262 - protein, 9 aa, BK virus
NISSWQNKS

SEQ ID NO: 6263 - protein, 9 aa, BK virus
ISSWQNKSS

SEQ ID NO: 6264 - protein, 9 aa, BK virus
SSWQNKSSS

SEQ ID NO: 6265 - protein, 9 aa, BK virus
SWQNKSSSH

SEQ ID NO: 6266 - protein, 9 aa, BK virus
WQNKSSSHF

SEQ ID NO: 6267 - protein, 9 aa, BK virus
QNKSSSHFS

SEQ ID NO: 6268 - protein, 9 aa, BK virus
NKSSSHFSL

SEQ ID NO: 6269 - protein, 9 aa, BK virus
KSSSHFSLK

SEQ ID NO: 6270 - protein, 9 aa, BK virus
SSSHFSLKE

SEQ ID NO: 6271 - protein, 9 aa, BK virus
SSHFSLKEL

SEQ ID NO: 6272 - protein, 9 aa, BK virus
SHFSLKELH

SEQ ID NO: 6273 - protein, 9 aa, BK virus
HFSLKELHQ

SEQ ID NO: 6274 - protein, 9 aa, BK virus
FSLKELHQD

SEQ ID NO: 6275 - protein, 9 aa, BK virus
SLKELHQDS

SEQ ID NO: 6276 - protein, 9 aa, BK virus
LKELHQDSH

SEQ ID NO: 6277 - protein, 9 aa, BK virus
KELHQDSHS

SEQ ID NO: 6278 - protein, 9 aa, BK virus
ELHQDSHSS

SEQ ID NO: 6279 - protein, 9 aa, BK virus
LHQDSHSSV

SEQ ID NO: 6280 - protein, 9 aa, BK virus
HQDSHSSVP

SEQ ID NO: 6281 - protein, 9 aa, BK virus
VGTYKKNNY

SEQ ID NO: 6282 - protein, 9 aa, BK virus
GTYKKNNYL

SEQ ID NO: 6283 - protein, 9 aa, BK virus
TYKKNNYLG

SEQ ID NO: 6284 - protein, 9 aa, BK virus
YKKNNYLGP

SEQ ID NO: 6285 - protein, 9 aa, BK virus
KKNNYLGPF

SEQ ID NO: 6286 - protein, 9 aa, BK virus
KNNYLGPFN

SEQ ID NO: 6287 - protein, 9 aa, BK virus
NNYLGPFNI

SEQ ID NO: 6288 - protein, 9 aa, BK virus
NYLGPFNIL

SEQ ID NO: 6289 - protein, 9 aa, BK virus
YLGPFNILL

SEQ ID NO: 6290 - protein, 9 aa, BK virus
LGPFNILLF

SEQ ID NO: 6291 - protein, 9 aa, BK virus
GPFNILLFI

SEQ ID NO: 6292 - protein, 9 aa, BK virus
VSYLKALDL

SEQ ID NO: 6293 - protein, 9 aa, BK virus
REFLQLFGP

SEQ ID NO: 6294 - protein, 9 aa, BK virus
EFLQLFGPT

SEQ ID NO: 6295 - protein, 9 aa, BK virus
FLQLFGPTI

SEQ ID NO: 6296 - protein, 9 aa, BK virus
LQLFGPTIA

SEQ ID NO: 6297 - protein, 9 aa, BK virus
QLFGPTIAE

SEQ ID NO: 6298 - protein, 9 aa, BK virus
LFGPTIAEF

SEQ ID NO: 6299 - protein, 9 aa, BK virus
FGPTIAEFL

SEQ ID NO: 6300 - protein, 9 aa, BK virus
GPTIAEFLQ

SEQ ID NO: 6301 - protein, 9 aa, BK virus
PTIAEFLQL

SEQ ID NO: 6302 - protein, 9 aa, BK virus
TIAEFLQLG

SEQ ID NO: 6303 - protein, 9 aa, BK virus
IAEFLQLGL

SEQ ID NO: 6304 - protein, 9 aa, BK virus
AEFLQLGLS

SEQ ID NO: 6305 - protein, 9 aa, BK virus
EFLQLGLSQ

SEQ ID NO: 6306 - protein, 9 aa, BK virus
FLQLGLSQT

SEQ ID NO: 6307 - protein, 9 aa, BK virus
LQLGLSQTT

SEQ ID NO: 6308 - protein, 9 aa, BK virus
QLGLSQTTV

SEQ ID NO: 6309 - protein, 9 aa, BK virus
SSQCSSNLS

SEQ ID NO: 6310 - protein, 9 aa, BK virus
SQCSSNLSK

SEQ ID NO: 6311 - protein, 9 aa, BK virus
QCSSNLSKP

SEQ ID NO: 6312 - protein, 9 aa, BK virus
CSSNLSKPR

SEQ ID NO: 6313 - protein, 9 aa, BK virus
SSNLSKPRA

SEQ ID NO: 6314 - protein, 9 aa, BK virus
SNLSKPRAL

SEQ ID NO: 6315 - protein, 9 aa, BK virus
NLSKPRALF

SEQ ID NO: 6316 - protein, 9 aa, BK virus
LSKPRALFL

SEQ ID NO: 6317 - protein, 9 aa, BK virus
SKPRALFLK

SEQ ID NO: 6318 - protein, 9 aa, BK virus
KPRALFLKI

SEQ ID NO: 6319 - protein, 9 aa, BK virus
PRALFLKIF

SEQ ID NO: 6320 - protein, 9 aa, BK virus
RALFLKIFY

SEQ ID NO: 6321 - protein, 9 aa, BK virus
ALFLKIFYL

SEQ ID NO: 6322 - protein, 9 aa, BK virus
LFLKIFYLN

SEQ ID NO: 6323 - protein, 9 aa, BK virus
FLKIFYLNA

SEQ ID NO: 6324 - protein, 9 aa, BK virus
LKIFYLNAL

SEQ ID NO: 6325 - protein, 9 aa, BK virus
KIFYLNALI

SEQ ID NO: 6326 - protein, 9 aa, BK virus
ADIACKGSA

SEQ ID NO: 6327 - protein, 9 aa, BK virus
DIACKGSAQ

SEQ ID NO: 6328 - protein, 9 aa, BK virus
IACKGSAQK

SEQ ID NO: 6329 - protein, 9 aa, BK virus
ACKGSAQKA

SEQ ID NO: 6330 - protein, 9 aa, BK virus
CKGSAQKAF

SEQ ID NO: 6331 - protein, 9 aa, BK virus
KGSAQKAFW

SEQ ID NO: 6332 - protein, 9 aa, BK virus
GSAQKAFWN

SEQ ID NO: 6333 - protein, 9 aa, BK virus
SAQKAFWNK

SEQ ID NO: 6334 - protein, 9 aa, BK virus
AIPCSTGYL

SEQ ID NO: 6335 - protein, 9 aa, BK virus
IPCSTGYLG

SEQ ID NO: 6336 - protein, 9 aa, BK virus
PCSTGYLGK

SEQ ID NO: 6337 - protein, 9 aa, BK virus
CSTGYLGKE

SEQ ID NO: 6338 - protein, 9 aa, BK virus
STGYLGKEE

SEQ ID NO: 6339 - protein, 9 aa, BK virus
TGYLGKEEN

SEQ ID NO: 6340 - protein, 9 aa, BK virus
GYLGKEENQ

SEQ ID NO: 6341 - protein, 9 aa, BK virus
YLGKEENQH

SEQ ID NO: 6342 - protein, 9 aa, BK virus
LGKEENQHK

SEQ ID NO: 6343 - protein, 9 aa, BK virus
GKEENQHKP

SEQ ID NO: 6344 - protein, 9 aa, BK virus
KEENQHKPL

SEQ ID NO: 6345 - protein, 9 aa, BK virus
EENQHKPLS

SEQ ID NO: 6346 - protein, 9 aa, BK virus
ENQHKPLSY

SEQ ID NO: 6347 - protein, 9 aa, BK virus
NQHKPLSYS

SEQ ID NO: 6348 - protein, 9 aa, BK virus
QHKPLSYSR

SEQ ID NO: 6349 - protein, 9 aa, BK virus
HKPLSYSRF

SEQ ID NO: 6350 - protein, 9 aa, BK virus
KPLSYSRFQ

SEQ ID NO: 6351 - protein, 9 aa, BK virus
PLSYSRFQN

SEQ ID NO: 6352 - protein, 9 aa, BK virus
LSYSRFQNQ

SEQ ID NO: 6353 - protein, 9 aa, BK virus
SYSRFQNQA

SEQ ID NO: 6354 - protein, 9 aa, BK virus
YSRFQNQAD

SEQ ID NO: 6355 - protein, 9 aa, BK virus
SRFQNQADE

SEQ ID NO: 6356 - protein, 9 aa, BK virus
RFQNQADEL

SEQ ID NO: 6357 - protein, 9 aa, BK virus
FQNQADELP

SEQ ID NO: 6358 - protein, 9 aa, BK virus
QNQADELPL

SEQ ID NO: 6359 - protein, 9 aa, BK virus
NQADELPLH

SEQ ID NO: 6360 - protein, 9 aa, BK virus
QADELPLHP

SEQ ID NO: 6361 - protein, 9 aa, BK virus
ADELPLHPA

SEQ ID NO: 6362 - protein, 9 aa, BK virus
DELPLHPAP

SEQ ID NO: 6363 - protein, 9 aa, BK virus
ELPLHPAPF

SEQ ID NO: 6364 - protein, 9 aa, BK virus
LPLHPAPFF

SEQ ID NO: 6365 - protein, 9 aa, BK virus
PLHPAPFFY

SEQ ID NO: 6366 - protein, 9 aa, BK virus
LHPAPFFYT

SEQ ID NO: 6367 - protein, 9 aa, BK virus
HPAPFFYTK

SEQ ID NO: 6368 - protein, 9 aa, BK virus
PAPFFYTKY

SEQ ID NO: 6369 - protein, 9 aa, BK virus
APFFYTKYS

SEQ ID NO: 6370 - protein, 9 aa, BK virus
PFFYTKYSF

SEQ ID NO: 6371 - protein, 9 aa, BK virus
FFYTKYSFS

SEQ ID NO: 6372 - protein, 9 aa, BK virus
FYTKYSFSS

SEQ ID NO: 6373 - protein, 9 aa, BK virus
YTKYSFSSF

SEQ ID NO: 6374 - protein, 9 aa, BK virus
TKYSFSSFY

SEQ ID NO: 6375 - protein, 9 aa, BK virus
KYSFSSFYP

SEQ ID NO: 6376 - protein, 9 aa, BK virus
YSFSSFYPR

SEQ ID NO: 6377 - protein, 9 aa, BK virus
SFSSFYPRR

SEQ ID NO: 6378 - protein, 9 aa, BK virus
FSSFYPRRP

SEQ ID NO: 6379 - protein, 9 aa, BK virus
SSFYPRRPL

SEQ ID NO: 6380 - protein, 9 aa, BK virus
SFYPRRPLC

SEQ ID NO: 6381 - protein, 9 aa, BK virus
FYPRRPLCQ

SEQ ID NO: 6382 - protein, 9 aa, BK virus
YPRRPLCQG

SEQ ID NO: 6383 - protein, 9 aa, BK virus
PRRPLCQGE

SEQ ID NO: 6384 - protein, 9 aa, BK virus
RRPLCQGEI

SEQ ID NO: 6385 - protein, 9 aa, BK virus
RPLCQGEIP

SEQ ID NO: 6386 - protein, 9 aa, BK virus
PLCQGEIPY

SEQ ID NO: 6387 - protein, 9 aa, BK virus
LCQGEIPYT

SEQ ID NO: 6388 - protein, 9 aa, BK virus
CQGEIPYTS

SEQ ID NO: 6389 - protein, 9 aa, BK virus
QGEIPYTSL

SEQ ID NO: 6390 - protein, 9 aa, BK virus
GEIPYTSLN

SEQ ID NO: 6391 - protein, 9 aa, BK virus
EIPYTSLNK

SEQ ID NO: 6392 - protein, 9 aa, BK virus
IPYTSLNKL

SEQ ID NO: 6393 - protein, 9 aa, BK virus
PYTSLNKLF

SEQ ID NO: 6394 - protein, 9 aa, BK virus
YTSLNKLFS

SEQ ID NO: 6395 - protein, 9 aa, BK virus
TSLNKLFSL

SEQ ID NO: 6396 - protein, 9 aa, BK virus
SLNKLFSLR

SEQ ID NO: 6397 - protein, 9 aa, BK virus
LNKLFSLRE

SEQ ID NO: 6398 - protein, 9 aa, BK virus
NKLFSLRED

SEQ ID NO: 6399 - protein, 9 aa, BK virus
KLFSLREDF

SEQ ID NO: 6400 - protein, 9 aa, BK virus
LFSLREDFP

SEQ ID NO: 6401 - protein, 9 aa, BK virus
FSLREDFPR

SEQ ID NO: 6402 - protein, 9 aa, BK virus
SLREDFPRQ

SEQ ID NO: 6403 - protein, 9 aa, BK virus
LREDFPRQL

SEQ ID NO: 6404 - protein, 9 aa, BK virus
REDFPRQLF

SEQ ID NO: 6405 - protein, 9 aa, BK virus
EDFPRQLFQ

SEQ ID NO: 6406 - protein, 9 aa, BK virus
DFPRQLFQG

SEQ ID NO: 6407 - protein, 9 aa, BK virus
FPRQLFQGL

SEQ ID NO: 6408 - protein, 9 aa, BK virus
PRQLFQGLK

SEQ ID NO: 6409 - protein, 9 aa, BK virus
RQLFQGLKG

SEQ ID NO: 6410 - protein, 9 aa, BK virus
QLFQGLKGP

SEQ ID NO: 6411 - protein, 10 aa, BK virus
GFPQIVLLGL

SEQ ID NO: 6412 - protein, 10 aa, BK virus
FPQIVLLGLR

SEQ ID NO: 6413 - protein, 10 aa, BK virus
PQIVLLGLRK

SEQ ID NO: 6414 - protein, 10 aa, BK virus
QIVLLGLRKS

SEQ ID NO: 6415 - protein, 10 aa, BK virus
IVLLGLRKSL

SEQ ID NO: 6416 - protein, 10 aa, BK virus
VLLGLRKSLH

SEQ ID NO: 6417 - protein, 10 aa, BK virus
LLGLRKSLHT

SEQ ID NO: 6418 - protein, 10 aa, BK virus
LGLRKSLHTL

SEQ ID NO: 6419 - protein, 10 aa, BK virus
GLRKSLHTLT

SEQ ID NO: 6420 - protein, 10 aa, BK virus
LRKSLHTLTT

SEQ ID NO: 6421 - protein, 10 aa, BK virus
EKGWRQRRPR

SEQ ID NO: 6422 - protein, 10 aa, BK virus
KGWRQRRPRP

SEQ ID NO: 6423 - protein, 10 aa, BK virus
GWRQRRPRPL

SEQ ID NO: 6424 - protein, 10 aa, BK virus
WRQRRPRPLI

SEQ ID NO: 6425 - protein, 10 aa, BK virus
RQRRPRPLIY

SEQ ID NO: 6426 - protein, 10 aa, BK virus
QRRPRPLIYY

SEQ ID NO: 6427 - protein, 10 aa, BK virus
RRPRPLIYYK

SEQ ID NO: 6428 - protein, 10 aa, BK virus
RPRPLIYYKK

SEQ ID NO: 6429 - protein, 10 aa, BK virus
PRPLIYYKKK

SEQ ID NO: 6430 - protein, 10 aa, BK virus
RPLIYYKKKG

SEQ ID NO: 6431 - protein, 10 aa, BK virus
PLIYYKKKGH

SEQ ID NO: 6432 - protein, 10 aa, BK virus
LIYYKKKGHR

SEQ ID NO: 6433 - protein, 10 aa, BK virus
IYYKKKGHRE

SEQ ID NO: 6434 - protein, 10 aa, BK virus
YYKKKGHREE

SEQ ID NO: 6435 - protein, 10 aa, BK virus
YKKKGHREEL

SEQ ID NO: 6436 - protein, 10 aa, BK virus
KKKGHREELL

SEQ ID NO: 6437 - protein, 10 aa, BK virus
KKGHREELLT

SEQ ID NO: 6438 - protein, 10 aa, BK virus
KGHREELLTH

SEQ ID NO: 6439 - protein, 10 aa, BK virus
GHREELLTHG

SEQ ID NO: 6440 - protein, 10 aa, BK virus
HREELLTHGM

SEQ ID NO: 6441 - protein, 10 aa, BK virus
REELLTHGMQ

SEQ ID NO: 6442 - protein, 10 aa, BK virus
EELLTHGMQP

SEQ ID NO: 6443 - protein, 10 aa, BK virus
ELLTHGMQPN

SEQ ID NO: 6444 - protein, 10 aa, BK virus
LLTHGMQPNH

SEQ ID NO: 6445 - protein, 10 aa, BK virus
LTHGMQPNHD

SEQ ID NO: 6446 - protein, 10 aa, BK virus
THGMQPNHDL

SEQ ID NO: 6447 - protein, 10 aa, BK virus
HGMQPNHDLR

SEQ ID NO: 6448 - protein, 10 aa, BK virus
GMQPNHDLRK

SEQ ID NO: 6449 - protein, 10 aa, BK virus
MQPNHDLRKE

SEQ ID NO: 6450 - protein, 10 aa, BK virus
QPNHDLRKES

SEQ ID NO: 6451 - protein, 10 aa, BK virus
PNHDLRKESA

SEQ ID NO: 6452 - protein, 10 aa, BK virus
LTGECSQTMT

SEQ ID NO: 6453 - protein, 10 aa, BK virus
TGECSQTMTS

SEQ ID NO: 6454 - protein, 10 aa, BK virus
GECSQTMTSG

SEQ ID NO: 6455 - protein, 10 aa, BK virus
ECSQTMTSGR

SEQ ID NO: 6456 - protein, 10 aa, BK virus
CSQTMTSGRK

SEQ ID NO: 6457 - protein, 10 aa, BK virus
SQTMTSGRKV

SEQ ID NO: 6458 - protein, 10 aa, BK virus
QTMTSGRKVH

SEQ ID NO: 6459 - protein, 10 aa, BK virus
TMTSGRKVHD

SEQ ID NO: 6460 - protein, 10 aa, BK virus
MTSGRKVHDS

SEQ ID NO: 6461 - protein, 10 aa, BK virus
TSGRKVHDSQ

SEQ ID NO: 6462 - protein, 10 aa, BK virus
SGRKVHDSQG

SEQ ID NO: 6463 - protein, 10 aa, BK virus
GRKVHDSQGG

SEQ ID NO: 6464 - protein, 10 aa, BK virus
RKVHDSQGGA

SEQ ID NO: 6465 - protein, 10 aa, BK virus
KVHDSQGGAA

SEQ ID NO: 6466 - protein, 10 aa, BK virus
VHDSQGGAAY

SEQ ID NO: 6467 - protein, 10 aa, BK virus
HDSQGGAAYP

SEQ ID NO: 6468 - protein, 10 aa, BK virus
DSQGGAAYPW

SEQ ID NO: 6469 - protein, 10 aa, BK virus
SQGGAAYPWN

SEQ ID NO: 6470 - protein, 10 aa, BK virus
QGGAAYPWNA

SEQ ID NO: 6471 - protein, 10 aa, BK virus
GGAAYPWNAA

SEQ ID NO: 6472 - protein, 10 aa, BK virus
GAAYPWNAAK

SEQ ID NO: 6473 - protein, 10 aa, BK virus
AAYPWNAAKP

SEQ ID NO: 6474 - protein, 10 aa, BK virus
PQEGKCMTDM

SEQ ID NO: 6475 - protein, 10 aa, BK virus
QEGKCMTDMF

SEQ ID NO: 6476 - protein, 10 aa, BK virus
EGKCMTDMFC

SEQ ID NO: 6477 - protein, 10 aa, BK virus
GKCMTDMFCE

SEQ ID NO: 6478 - protein, 10 aa, BK virus
KCMTDMFCEP

SEQ ID NO: 6479 - protein, 10 aa, BK virus
CMTDMFCEPR

SEQ ID NO: 6480 - protein, 10 aa, BK virus
MTDMFCEPRN

SEQ ID NO: 6481 - protein, 10 aa, BK virus
TDMFCEPRNL

SEQ ID NO: 6482 - protein, 10 aa, BK virus
DMFCEPRNLG

SEQ ID NO: 6483 - protein, 10 aa, BK virus
MFCEPRNLGL

SEQ ID NO: 6484 - protein, 10 aa, BK virus
FCEPRNLGLV

SEQ ID NO: 6485 - protein, 10 aa, BK virus
CEPRNLGLVP

SEQ ID NO: 6486 - protein, 10 aa, BK virus
EPRNLGLVPS

SEQ ID NO: 6487 - protein, 10 aa, BK virus
TGQRPWFCAS

SEQ ID NO: 6488 - protein, 10 aa, BK virus
GQRPWFCASC

SEQ ID NO: 6489 - protein, 10 aa, BK virus
QRPWFCASCH

SEQ ID NO: 6490 - protein, 10 aa, BK virus
RPWFCASCHD

SEQ ID NO: 6491 - protein, 10 aa, BK virus
PWFCASCHDK

SEQ ID NO: 6492 - protein, 10 aa, BK virus
WFCASCHDKL

SEQ ID NO: 6493 - protein, 10 aa, BK virus
FCASCHDKLQ

SEQ ID NO: 6494 - protein, 10 aa, BK virus
KLVKPGLEQK

SEQ ID NO: 6495 - protein, 10 aa, BK virus
LVKPGLEQKK

SEQ ID NO: 6496 - protein, 10 aa, BK virus
VKPGLEQKKE

SEQ ID NO: 6497 - protein, 10 aa, BK virus
KPGLEQKKEL

SEQ ID NO: 6498 - protein, 10 aa, BK virus
PGLEQKKELR

SEQ ID NO: 6499 - protein, 10 aa, BK virus
GLEQKKELRG

SEQ ID NO: 6500 - protein, 10 aa, BK virus
LEQKKELRGF

SEQ ID NO: 6501 - protein, 10 aa, BK virus
EQKKELRGFL

SEQ ID NO: 6502 - protein, 10 aa, BK virus
QKKELRGFLF

SEQ ID NO: 6503 - protein, 10 aa, BK virus
KKELRGFLFL

SEQ ID NO: 6504 - protein, 10 aa, BK virus
KELRGFLFLF

SEQ ID NO: 6505 - protein, 10 aa, BK virus
SFCWNFVEVK

SEQ ID NO: 6506 - protein, 10 aa, BK virus
FCWNFVEVKT

SEQ ID NO: 6507 - protein, 10 aa, BK virus
CWNFVEVKTV

SEQ ID NO: 6508 - protein, 10 aa, BK virus
TGKTKVPLLY

SEQ ID NO: 6509 - protein, 10 aa, BK virus
GKTKVPLLYL

SEQ ID NO: 6510 - protein, 10 aa, BK virus
KTKVPLLYLL

SEQ ID NO: 6511 - protein, 10 aa, BK virus
VIPFFLYFQV

SEQ ID NO: 6512 - protein, 10 aa, BK virus
IPFFLYFQVH

SEQ ID NO: 6513 - protein, 10 aa, BK virus
PFFLYFQVHG

SEQ ID NO: 6514 - protein, 10 aa, BK virus
FFLYFQVHGC

SEQ ID NO: 6515 - protein, 10 aa, BK virus
FLYFQVHGCC

SEQ ID NO: 6516 - protein, 10 aa, BK virus
LYFQVHGCCS

SEQ ID NO: 6517 - protein, 10 aa, BK virus
YFQVHGCCSS

SEQ ID NO: 6518 - protein, 10 aa, BK virus
FQVHGCCSST

SEQ ID NO: 6519 - protein, 10 aa, BK virus
QVHGCCSSTF

SEQ ID NO: 6520 - protein, 10 aa, BK virus
VHGCCSSTFG

SEQ ID NO: 6521 - protein, 10 aa, BK virus
HGCCSSTFGG

SEQ ID NO: 6522 - protein, 10 aa, BK virus
GCCSSTFGGP

SEQ ID NO: 6523 - protein, 10 aa, BK virus
CCSSTFGGPS

SEQ ID NO: 6524 - protein, 10 aa, BK virus
CSSTFGGPSC

SEQ ID NO: 6525 - protein, 10 aa, BK virus
SSTFGGPSCQ

SEQ ID NO: 6526 - protein, 10 aa, BK virus
STFGGPSCQC

SEQ ID NO: 6527 - protein, 10 aa, BK virus
TFGGPSCQCI

SEQ ID NO: 6528 - protein, 10 aa, BK virus
GCCCHRIFSG

SEQ ID NO: 6529 - protein, 10 aa, BK virus
NCCWGGCCCY

SEQ ID NO: 6530 - protein, 10 aa, BK virus
CCWGGCCCYR

SEQ ID NO: 6531 - protein, 10 aa, BK virus
CWGGCCCYRS

SEQ ID NO: 6532 - protein, 10 aa, BK virus
WGGCCCYRSS

SEQ ID NO: 6533 - protein, 10 aa, BK virus
GGCCCYRSSN

SEQ ID NO: 6534 - protein, 10 aa, BK virus
GCCCYRSSNC

SEQ ID NO: 6535 - protein, 10 aa, BK virus
CCCYRSSNCI

SEQ ID NO: 6536 - protein, 10 aa, BK virus
CCYRSSNCIP

SEQ ID NO: 6537 - protein, 10 aa, BK virus
CYRSSNCIPC

SEQ ID NO: 6538 - protein, 10 aa, BK virus
YRSSNCIPCY

SEQ ID NO: 6539 - protein, 10 aa, BK virus
RSSNCIPCYC

SEQ ID NO: 6540 - protein, 10 aa, BK virus
SSNCIPCYCR

SEQ ID NO: 6541 - protein, 10 aa, BK virus
SNCIPCYCRG

SEQ ID NO: 6542 - protein, 10 aa, BK virus
NCIPCYCRGH

SEQ ID NO: 6543 - protein, 10 aa, BK virus
CIPCYCRGHN

SEQ ID NO: 6544 - protein, 10 aa, BK virus
IPCYCRGHNK

SEQ ID NO: 6545 - protein, 10 aa, BK virus
PCYCRGHNKY

SEQ ID NO: 6546 - protein, 10 aa, BK virus
CYCRGHNKYL

SEQ ID NO: 6547 - protein, 10 aa, BK virus
YCRGHNKYLR

SEQ ID NO: 6548 - protein, 10 aa, BK virus
CRGHNKYLRG

SEQ ID NO: 6549 - protein, 10 aa, BK virus
RGHNKYLRGY

SEQ ID NO: 6550 - protein, 10 aa, BK virus
GHNKYLRGYS

SEQ ID NO: 6551 - protein, 10 aa, BK virus
HNKYLRGYSC

SEQ ID NO: 6552 - protein, 10 aa, BK virus
NKYLRGYSCY

SEQ ID NO: 6553 - protein, 10 aa, BK virus
KYLRGYSCYR

SEQ ID NO: 6554 - protein, 10 aa, BK virus
YLRGYSCYRP

SEQ ID NO: 6555 - protein, 10 aa, BK virus
LRGYSCYRPN

SEQ ID NO: 6556 - protein, 10 aa, BK virus
RGYSCYRPNS

SEQ ID NO: 6557 - protein, 10 aa, BK virus
GYSCYRPNSS

SEQ ID NO: 6558 - protein, 10 aa, BK virus
YSCYRPNSSN

SEQ ID NO: 6559 - protein, 10 aa, BK virus
SCYRPNSSNI

SEQ ID NO: 6560 - protein, 10 aa, BK virus
CYRPNSSNIC

SEQ ID NO: 6561 - protein, 10 aa, BK virus
YRPNSSNICC

SEQ ID NO: 6562 - protein, 10 aa, BK virus
RPNSSNICCN

SEQ ID NO: 6563 - protein, 10 aa, BK virus
PNSSNICCNC

SEQ ID NO: 6564 - protein, 10 aa, BK virus
NSSNICCNCW

SEQ ID NO: 6565 - protein, 10 aa, BK virus
SSNICCNCWC

SEQ ID NO: 6566 - protein, 10 aa, BK virus
SNICCNCWCS

SEQ ID NO: 6567 - protein, 10 aa, BK virus
NICCNCWCSW

SEQ ID NO: 6568 - protein, 10 aa, BK virus
ICCNCWCSWG

SEQ ID NO: 6569 - protein, 10 aa, BK virus
CCNCWCSWGY

SEQ ID NO: 6570 - protein, 10 aa, BK virus
CNCWCSWGYC

SEQ ID NO: 6571 - protein, 10 aa, BK virus
NCWCSWGYCW

SEQ ID NO: 6572 - protein, 10 aa, BK virus
CWCSWGYCWV

SEQ ID NO: 6573 - protein, 10 aa, BK virus
WCSWGYCWVC

SEQ ID NO: 6574 - protein, 10 aa, BK virus
CSWGYCWVCC

SEQ ID NO: 6575 - protein, 10 aa, BK virus
SWGYCWVCCF

SEQ ID NO: 6576 - protein, 10 aa, BK virus
WGYCWVCCFN

SEQ ID NO: 6577 - protein, 10 aa, BK virus
GYCWVCCFNS

SEQ ID NO: 6578 - protein, 10 aa, BK virus
YCWVCCFNSN

SEQ ID NO: 6579 - protein, 10 aa, BK virus
CWVCCFNSNC

SEQ ID NO: 6580 - protein, 10 aa, BK virus
LGSQSFHCRP

SEQ ID NO: 6581 - protein, 10 aa, BK virus
GSQSFHCRPL

SEQ ID NO: 6582 - protein, 10 aa, BK virus
SQSFHCRPLS

SEQ ID NO: 6583 - protein, 10 aa, BK virus
QSFHCRPLSA

SEQ ID NO: 6584 - protein, 10 aa, BK virus
SFHCRPLSAI

SEQ ID NO: 6585 - protein, 10 aa, BK virus
FHCRPLSAIR

SEQ ID NO: 6586 - protein, 10 aa, BK virus
HCRPLSAIRH

SEQ ID NO: 6587 - protein, 10 aa, BK virus
CRPLSAIRHG

SEQ ID NO: 6588 - protein, 10 aa, BK virus
RPLSAIRHGF

SEQ ID NO: 6589 - protein, 10 aa, BK virus
PLSAIRHGFG

SEQ ID NO: 6590 - protein, 10 aa, BK virus
LSAIRHGFGI

SEQ ID NO: 6591 - protein, 10 aa, BK virus
SAIRHGFGIV

SEQ ID NO: 6592 - protein, 10 aa, BK virus
YSVSWCKYFC

SEQ ID NO: 6593 - protein, 10 aa, BK virus
ALGSFFVCYY

SEQ ID NO: 6594 - protein, 10 aa, BK virus
LGSFFVCYYF

SEQ ID NO: 6595 - protein, 10 aa, BK virus
GSFFVCYYFP

SEQ ID NO: 6596 - protein, 10 aa, BK virus
SFFVCYYFPG

SEQ ID NO: 6597 - protein, 10 aa, BK virus
FFVCYYFPGF

SEQ ID NO: 6598 - protein, 10 aa, BK virus
FVCYYFPGFV

SEQ ID NO: 6599 - protein, 10 aa, BK virus
VCYYFPGFVA

SEQ ID NO: 6600 - protein, 10 aa, BK virus
CYYFPGFVAC

SEQ ID NO: 6601 - protein, 10 aa, BK virus
YYFPGFVACY

SEQ ID NO: 6602 - protein, 10 aa, BK virus
YTFYNLTGIA

SEQ ID NO: 6603 - protein, 10 aa, BK virus
TFYNLTGIAE

SEQ ID NO: 6604 - protein, 10 aa, BK virus
FYNLTGIAEK

SEQ ID NO: 6605 - protein, 10 aa, BK virus
YNLTGIAEKN

SEQ ID NO: 6606 - protein, 10 aa, BK virus
NLTGIAEKNR

SEQ ID NO: 6607 - protein, 10 aa, BK virus
LTGIAEKNRK

SEQ ID NO: 6608 - protein, 10 aa, BK virus
TGIAEKNRKI

SEQ ID NO: 6609 - protein, 10 aa, BK virus
GIAEKNRKIF

SEQ ID NO: 6610 - protein, 10 aa, BK virus
IFGGNYLDNC

SEQ ID NO: 6611 - protein, 10 aa, BK virus
FGGNYLDNCK

SEQ ID NO: 6612 - protein, 10 aa, BK virus
GGNYLDNCKC

SEQ ID NO: 6613 - protein, 10 aa, BK virus
GNYLDNCKCP

SEQ ID NO: 6614 - protein, 10 aa, BK virus
NYLDNCKCPY

SEQ ID NO: 6615 - protein, 10 aa, BK virus
YLDNCKCPYK

SEQ ID NO: 6616 - protein, 10 aa, BK virus
LDNCKCPYKL

SEQ ID NO: 6617 - protein, 10 aa, BK virus
DNCKCPYKLL

SEQ ID NO: 6618 - protein, 10 aa, BK virus
KGRYPCTFWP

SEQ ID NO: 6619 - protein, 10 aa, BK virus
GRYPCTFWPY

SEQ ID NO: 6620 - protein, 10 aa, BK virus
RYPCTFWPYL

SEQ ID NO: 6621 - protein, 10 aa, BK virus
QYRRSYTKNG

SEQ ID NO: 6622 - protein, 10 aa, BK virus
YRRSYTKNGL

SEQ ID NO: 6623 - protein, 10 aa, BK virus
RRSYTKNGLK

SEQ ID NO: 6624 - protein, 10 aa, BK virus
RSYTKNGLKK

SEQ ID NO: 6625 - protein, 10 aa, BK virus
SYTKNGLKKS

SEQ ID NO: 6626 - protein, 10 aa, BK virus
YTKNGLKKST

SEQ ID NO: 6627 - protein, 10 aa, BK virus
TKNGLKKSTK

SEQ ID NO: 6628 - protein, 10 aa, BK virus
KNGLKKSTKC

SEQ ID NO: 6629 - protein, 10 aa, BK virus
NGLKKSTKCT

SEQ ID NO: 6630 - protein, 10 aa, BK virus
GLKKSTKCTF

SEQ ID NO: 6631 - protein, 10 aa, BK virus
LKKSTKCTFR

SEQ ID NO: 6632 - protein, 10 aa, BK virus
KKSTKCTFRR

SEQ ID NO: 6633 - protein, 10 aa, BK virus
KSTKCTFRRV

SEQ ID NO: 6634 - protein, 10 aa, BK virus
STKCTFRRVY

SEQ ID NO: 6635 - protein, 10 aa, BK virus
TKCTFRRVYR

SEQ ID NO: 6636 - protein, 10 aa, BK virus
KCTFRRVYRK

SEQ ID NO: 6637 - protein, 10 aa, BK virus
CTFRRVYRKN

SEQ ID NO: 6638 - protein, 10 aa, BK virus
TFRRVYRKNY

SEQ ID NO: 6639 - protein, 10 aa, BK virus
FRRVYRKNYC

SEQ ID NO: 6640 - protein, 10 aa, BK virus
RRVYRKNYCP

SEQ ID NO: 6641 - protein, 10 aa, BK virus
RVYRKNYCPR

SEQ ID NO: 6642 - protein, 10 aa, BK virus
VYRKNYCPRR

SEQ ID NO: 6643 - protein, 10 aa, BK virus
YRKNYCPRRC

SEQ ID NO: 6644 - protein, 10 aa, BK virus
SKNCSSMDVA

SEQ ID NO: 6645 - protein, 10 aa, BK virus
KNCSSMDVAF

SEQ ID NO: 6646 - protein, 10 aa, BK virus
NCSSMDVAFT

SEQ ID NO: 6647 - protein, 10 aa, BK virus
CSSMDVAFTS

SEQ ID NO: 6648 - protein, 10 aa, BK virus
SSMDVAFTSR

SEQ ID NO: 6649 - protein, 10 aa, BK virus
SMDVAFTSRP

SEQ ID NO: 6650 - protein, 10 aa, BK virus
MDVAFTSRPV

SEQ ID NO: 6651 - protein, 10 aa, BK virus
DVAFTSRPVR

SEQ ID NO: 6652 - protein, 10 aa, BK virus
VAFTSRPVRD

SEQ ID NO: 6653 - protein, 10 aa, BK virus
AFTSRPVRDC

SEQ ID NO: 6654 - protein, 10 aa, BK virus
FTSRPVRDCN

SEQ ID NO: 6655 - protein, 10 aa, BK virus
TSRPVRDCNT

SEQ ID NO: 6656 - protein, 10 aa, BK virus
SRPVRDCNTC

SEQ ID NO: 6657 - protein, 10 aa, BK virus
RPVRDCNTCS

SEQ ID NO: 6658 - protein, 10 aa, BK virus
RWPQPKEKES

SEQ ID NO: 6659 - protein, 10 aa, BK virus
WPQPKEKESV

SEQ ID NO: 6660 - protein, 10 aa, BK virus
PQPKEKESVQ

SEQ ID NO: 6661 - protein, 10 aa, BK virus
QPKEKESVQG

SEQ ID NO: 6662 - protein, 10 aa, BK virus
PKEKESVQGQ

SEQ ID NO: 6663 - protein, 10 aa, BK virus
KEKESVQGQL

SEQ ID NO: 6664 - protein, 10 aa, BK virus
EKESVQGQLP

SEQ ID NO: 6665 - protein, 10 aa, BK virus
KESVQGQLPK

SEQ ID NO: 6666 - protein, 10 aa, BK virus
ESVQGQLPKS

SEQ ID NO: 6667 - protein, 10 aa, BK virus
SVQGQLPKSQ

SEQ ID NO: 6668 - protein, 10 aa, BK virus
VQGQLPKSQR

SEQ ID NO: 6669 - protein, 10 aa, BK virus
QGQLPKSQRN

SEQ ID NO: 6670 - protein, 10 aa, BK virus
GQLPKSQRNP

SEQ ID NO: 6671 - protein, 10 aa, BK virus
QLPKSQRNPC

SEQ ID NO: 6672 - protein, 10 aa, BK virus
LPKSQRNPCK

SEQ ID NO: 6673 - protein, 10 aa, BK virus
PKSQRNPCKC

SEQ ID NO: 6674 - protein, 10 aa, BK virus
KSQRNPCKCQ

SEQ ID NO: 6675 - protein, 10 aa, BK virus
SQRNPCKCQN

SEQ ID NO: 6676 - protein, 10 aa, BK virus
QRNPCKCQNY

SEQ ID NO: 6677 - protein, 10 aa, BK virus
TQKWGIQMKT

SEQ ID NO: 6678 - protein, 10 aa, BK virus
QKWGIQMKTL

SEQ ID NO: 6679 - protein, 10 aa, BK virus
KWGIQMKTLG

SEQ ID NO: 6680 - protein, 10 aa, BK virus
WGIQMKTLGA

SEQ ID NO: 6681 - protein, 10 aa, BK virus
GIQMKTLGAL

SEQ ID NO: 6682 - protein, 10 aa, BK virus
IQMKTLGALV

SEQ ID NO: 6683 - protein, 10 aa, BK virus
VLKMTLAVIA

SEQ ID NO: 6684 - protein, 10 aa, BK virus
LKMTLAVIAQ

SEQ ID NO: 6685 - protein, 10 aa, BK virus
KMTLAVIAQR

SEQ ID NO: 6686 - protein, 10 aa, BK virus
MTLAVIAQRE

SEQ ID NO: 6687 - protein, 10 aa, BK virus
TLAVIAQREK

SEQ ID NO: 6688 - protein, 10 aa, BK virus
LAVIAQREKC

SEQ ID NO: 6689 - protein, 10 aa, BK virus
AVIAQREKCF

SEQ ID NO: 6690 - protein, 10 aa, BK virus
VIAQREKCFP

SEQ ID NO: 6691 - protein, 10 aa, BK virus
IAQREKCFPV

SEQ ID NO: 6692 - protein, 10 aa, BK virus
AQREKCFPVT

SEQ ID NO: 6693 - protein, 10 aa, BK virus
QREKCFPVTA

SEQ ID NO: 6694 - protein, 10 aa, BK virus
REKCFPVTAQ

SEQ ID NO: 6695 - protein, 10 aa, BK virus
EKCFPVTAQQ

SEQ ID NO: 6696 - protein, 10 aa, BK virus
KCFPVTAQQE

SEQ ID NO: 6697 - protein, 10 aa, BK virus
CFPVTAQQEF

SEQ ID NO: 6698 - protein, 10 aa, BK virus
FPVTAQQEFP

SEQ ID NO: 6699 - protein, 10 aa, BK virus
PVTAQQEFPS

SEQ ID NO: 6700 - protein, 10 aa, BK virus
VTAQQEFPSP

SEQ ID NO: 6701 - protein, 10 aa, BK virus
TAQQEFPSPI

SEQ ID NO: 6702 - protein, 10 aa, BK virus
LACLTFMQGH

SEQ ID NO: 6703 - protein, 10 aa, BK virus
ACLTFMQGHK

SEQ ID NO: 6704 - protein, 10 aa, BK virus
CLTFMQGHKK

SEQ ID NO: 6705 - protein, 10 aa, BK virus
LTFMQGHKKC

SEQ ID NO: 6706 - protein, 10 aa, BK virus
TFMQGHKKCM

SEQ ID NO: 6707 - protein, 10 aa, BK virus
FMQGHKKCMS

SEQ ID NO: 6708 - protein, 10 aa, BK virus
MQGHKKCMSM

SEQ ID NO: 6709 - protein, 10 aa, BK virus
QGHKKCMSMV

SEQ ID NO: 6710 - protein, 10 aa, BK virus
GHKKCMSMVE

SEQ ID NO: 6711 - protein, 10 aa, BK virus
HKKCMSMVEE

SEQ ID NO: 6712 - protein, 10 aa, BK virus
KKCMSMVEEN

SEQ ID NO: 6713 - protein, 10 aa, BK virus
KCMSMVEENL

SEQ ID NO: 6714 - protein, 10 aa, BK virus
CMSMVEENLF

SEQ ID NO: 6715 - protein, 10 aa, BK virus
MSMVEENLFK

SEQ ID NO: 6716 - protein, 10 aa, BK virus
SMVEENLFKA

SEQ ID NO: 6717 - protein, 10 aa, BK virus
MVEENLFKAV

SEQ ID NO: 6718 - protein, 10 aa, BK virus
VEENLFKAVI

SEQ ID NO: 6719 - protein, 10 aa, BK virus
EENLFKAVIS

SEQ ID NO: 6720 - protein, 10 aa, BK virus
ENLFKAVIST

SEQ ID NO: 6721 - protein, 10 aa, BK virus
NLFKAVISTS

SEQ ID NO: 6722 - protein, 10 aa, BK virus
LFKAVISTSL

SEQ ID NO: 6723 - protein, 10 aa, BK virus
FKAVISTSLL

SEQ ID NO: 6724 - protein, 10 aa, BK virus
VENPWKCREC

SEQ ID NO: 6725 - protein, 10 aa, BK virus
ITGQSTLMVL

SEQ ID NO: 6726 - protein, 10 aa, BK virus
PLKTQQPSPR

SEQ ID NO: 6727 - protein, 10 aa, BK virus
ILTIRPIWTK

SEQ ID NO: 6728 - protein, 10 aa, BK virus
LTIRPIWTKT

SEQ ID NO: 6729 - protein, 10 aa, BK virus
TIRPIWTKTM

SEQ ID NO: 6730 - protein, 10 aa, BK virus
IRPIWTKTML

SEQ ID NO: 6731 - protein, 10 aa, BK virus
RPIWTKTMLI

SEQ ID NO: 6732 - protein, 10 aa, BK virus
PIWTKTMLIQ

SEQ ID NO: 6733 - protein, 10 aa, BK virus
IWTKTMLIQL

SEQ ID NO: 6734 - protein, 10 aa, BK virus
WTKTMLIQLS

SEQ ID NO: 6735 - protein, 10 aa, BK virus
TKTMLIQLSA

SEQ ID NO: 6736 - protein, 10 aa, BK virus
KTMLIQLSAG

SEQ ID NO: 6737 - protein, 10 aa, BK virus
TMLIQLSAGY

SEQ ID NO: 6738 - protein, 10 aa, BK virus
MLIQLSAGYL

SEQ ID NO: 6739 - protein, 10 aa, BK virus
LIQLSAGYLI

SEQ ID NO: 6740 - protein, 10 aa, BK virus
IQLSAGYLIP

SEQ ID NO: 6741 - protein, 10 aa, BK virus
QLSAGYLIPV

SEQ ID NO: 6742 - protein, 10 aa, BK virus
LSAGYLIPVE

SEQ ID NO: 6743 - protein, 10 aa, BK virus
SAGYLIPVEM

SEQ ID NO: 6744 - protein, 10 aa, BK virus
AGYLIPVEMK

SEQ ID NO: 6745 - protein, 10 aa, BK virus
GYLIPVEMKM

SEQ ID NO: 6746 - protein, 10 aa, BK virus
YLIPVEMKML

SEQ ID NO: 6747 - protein, 10 aa, BK virus
LIPVEMKMLG

SEQ ID NO: 6748 - protein, 10 aa, BK virus
IPVEMKMLGI

SEQ ID NO: 6749 - protein, 10 aa, BK virus
PVEMKMLGIL

SEQ ID NO: 6750 - protein, 10 aa, BK virus
VEMKMLGILG

SEQ ID NO: 6751 - protein, 10 aa, BK virus
EMKMLGILGL

SEQ ID NO: 6752 - protein, 10 aa, BK virus
MKMLGILGLS

SEQ ID NO: 6753 - protein, 10 aa, BK virus
KMLGILGLSQ

SEQ ID NO: 6754 - protein, 10 aa, BK virus
MLGILGLSQE

SEQ ID NO: 6755 - protein, 10 aa, BK virus
LGILGLSQEG

SEQ ID NO: 6756 - protein, 10 aa, BK virus
GILGLSQEGK

SEQ ID NO: 6757 - protein, 10 aa, BK virus
ILGLSQEGKM

SEQ ID NO: 6758 - protein, 10 aa, BK virus
LGLSQEGKMF

SEQ ID NO: 6759 - protein, 10 aa, BK virus
GLSQEGKMFP

SEQ ID NO: 6760 - protein, 10 aa, BK virus
LSQEGKMFPQ

SEQ ID NO: 6761 - protein, 10 aa, BK virus
SQEGKMFPQY

SEQ ID NO: 6762 - protein, 10 aa, BK virus
QEGKMFPQYF

SEQ ID NO: 6763 - protein, 10 aa, BK virus
EGKMFPQYFM

SEQ ID NO: 6764 - protein, 10 aa, BK virus
MNRVWGLFVK

SEQ ID NO: 6765 - protein, 10 aa, BK virus
NRVWGLFVKL

SEQ ID NO: 6766 - protein, 10 aa, BK virus
RVWGLFVKLI

SEQ ID NO: 6767 - protein, 10 aa, BK virus
VWGLFVKLIA

SEQ ID NO: 6768 - protein, 10 aa, BK virus
WGLFVKLIAC

SEQ ID NO: 6769 - protein, 10 aa, BK virus
GLFVKLIACM

SEQ ID NO: 6770 - protein, 10 aa, BK virus
LFVKLIACMF

SEQ ID NO: 6771 - protein, 10 aa, BK virus
FVKLIACMFQ

SEQ ID NO: 6772 - protein, 10 aa, BK virus
VKLIACMFQL

SEQ ID NO: 6773 - protein, 10 aa, BK virus
KLIACMFQLL

SEQ ID NO: 6774 - protein, 10 aa, BK virus
LIACMFQLLI

SEQ ID NO: 6775 - protein, 10 aa, BK virus
IACMFQLLIF

SEQ ID NO: 6776 - protein, 10 aa, BK virus
ACMFQLLIFV

SEQ ID NO: 6777 - protein, 10 aa, BK virus
CMFQLLIFVA

SEQ ID NO: 6778 - protein, 10 aa, BK virus
MFQLLIFVAC

SEQ ID NO: 6779 - protein, 10 aa, BK virus
FQLLIFVACL

SEQ ID NO: 6780 - protein, 10 aa, BK virus
QLLIFVACLL

SEQ ID NO: 6781 - protein, 10 aa, BK virus
LLIFVACLLT

SEQ ID NO: 6782 - protein, 10 aa, BK virus
LIFVACLLTA

SEQ ID NO: 6783 - protein, 10 aa, BK virus
IFVACLLTAL

SEQ ID NO: 6784 - protein, 10 aa, BK virus
FVACLLTALE

SEQ ID NO: 6785 - protein, 10 aa, BK virus
VACLLTALEH

SEQ ID NO: 6786 - protein, 10 aa, BK virus
ACLLTALEHN

SEQ ID NO: 6787 - protein, 10 aa, BK virus
CLLTALEHNS

SEQ ID NO: 6788 - protein, 10 aa, BK virus
LLTALEHNSG

SEQ ID NO: 6789 - protein, 10 aa, BK virus
LTALEHNSGE

SEQ ID NO: 6790 - protein, 10 aa, BK virus
TALEHNSGEA

SEQ ID NO: 6791 - protein, 10 aa, BK virus
ALEHNSGEAL

SEQ ID NO: 6792 - protein, 10 aa, BK virus
LEHNSGEALQ

SEQ ID NO: 6793 - protein, 10 aa, BK virus
EHNSGEALQD

SEQ ID NO: 6794 - protein, 10 aa, BK virus
HNSGEALQDI

SEQ ID NO: 6795 - protein, 10 aa, BK virus
NSGEALQDIL

SEQ ID NO: 6796 - protein, 10 aa, BK virus
SGEALQDILR

SEQ ID NO: 6797 - protein, 10 aa, BK virus
GEALQDILRS

SEQ ID NO: 6798 - protein, 10 aa, BK virus
EALQDILRSA

SEQ ID NO: 6799 - protein, 10 aa, BK virus
TGEPREWMGS

SEQ ID NO: 6800 - protein, 10 aa, BK virus
GEPREWMGSL

SEQ ID NO: 6801 - protein, 10 aa, BK virus
EPREWMGSLC

SEQ ID NO: 6802 - protein, 10 aa, BK virus
PREWMGSLCM

SEQ ID NO: 6803 - protein, 10 aa, BK virus
REWMGSLCMV

SEQ ID NO: 6804 - protein, 10 aa, BK virus
EWMGSLCMVW

SEQ ID NO: 6805 - protein, 10 aa, BK virus
WMGSLCMVWN

SEQ ID NO: 6806 - protein, 10 aa, BK virus
MGSLCMVWNP

SEQ ID NO: 6807 - protein, 10 aa, BK virus
GSLCMVWNPR

SEQ ID NO: 6808 - protein, 10 aa, BK virus
KRLGCLMAQK

SEQ ID NO: 6809 - protein, 10 aa, BK virus
RLGCLMAQKD

SEQ ID NO: 6810 - protein, 10 aa, BK virus
LGCLMAQKDF

SEQ ID NO: 6811 - protein, 10 aa, BK virus
GCLMAQKDFQ

SEQ ID NO: 6812 - protein, 10 aa, BK virus
CLMAQKDFQG

SEQ ID NO: 6813 - protein, 10 aa, BK virus
LMAQKDFQGT

SEQ ID NO: 6814 - protein, 10 aa, BK virus
MAQKDFQGTQ

SEQ ID NO: 6815 - protein, 10 aa, BK virus
AQKDFQGTQI

SEQ ID NO: 6816 - protein, 10 aa, BK virus
DILTNRDNCK

SEQ ID NO: 6817 - protein, 10 aa, BK virus
ILTNRDNCKP

SEQ ID NO: 6818 - protein, 10 aa, BK virus
LTNRDNCKPK

SEQ ID NO: 6819 - protein, 10 aa, BK virus
TNRDNCKPKC

SEQ ID NO: 6820 - protein, 10 aa, BK virus
NRDNCKPKCF

SEQ ID NO: 6821 - protein, 10 aa, BK virus
RDNCKPKCFK

SEQ ID NO: 6822 - protein, 10 aa, BK virus
DNCKPKCFKQ

SEQ ID NO: 6823 - protein, 10 aa, BK virus
NCKPKCFKQV

SEQ ID NO: 6824 - protein, 10 aa, BK virus
CKPKCFKQVL

SEQ ID NO: 6825 - protein, 10 aa, BK virus
KPKCFKQVLL

SEQ ID NO: 6826 - protein, 10 aa, BK virus
PKCFKQVLLL

SEQ ID NO: 6827 - protein, 10 aa, BK virus
KCFKQVLLLY

SEQ ID NO: 6828 - protein, 10 aa, BK virus
CFKQVLLLYI

SEQ ID NO: 6829 - protein, 10 aa, BK virus
FKQVLLLYIY

SEQ ID NO: 6830 - protein, 10 aa, BK virus
KQVLLLYIYI

SEQ ID NO: 6831 - protein, 10 aa, BK virus
MLLLYKPLLS

SEQ ID NO: 6832 - protein, 10 aa, BK virus
LLLYKPLLSL

SEQ ID NO: 6833 - protein, 10 aa, BK virus
LLYKPLLSLC

SEQ ID NO: 6834 - protein, 10 aa, BK virus
LYKPLLSLCY

SEQ ID NO: 6835 - protein, 10 aa, BK virus
YKPLLSLCYF

SEQ ID NO: 6836 - protein, 10 aa, BK virus
KPLLSLCYFG

SEQ ID NO: 6837 - protein, 10 aa, BK virus
PLLSLCYFGG

SEQ ID NO: 6838 - protein, 10 aa, BK virus
LLSLCYFGGG

SEQ ID NO: 6839 - protein, 10 aa, BK virus
LSLCYFGGGV

SEQ ID NO: 6840 - protein, 10 aa, BK virus
SLCYFGGGVL

SEQ ID NO: 6841 - protein, 10 aa, BK virus
LCYFGGGVLG

SEQ ID NO: 6842 - protein, 10 aa, BK virus
CYFGGGVLGL

SEQ ID NO: 6843 - protein, 10 aa, BK virus
YFGGGVLGLL

SEQ ID NO: 6844 - protein, 10 aa, BK virus
FGGGVLGLLK

SEQ ID NO: 6845 - protein, 10 aa, BK virus
GGGVLGLLKH

SEQ ID NO: 6846 - protein, 10 aa, BK virus
LWGSDLWESS

SEQ ID NO: 6847 - protein, 10 aa, BK virus
WGSDLWESSA

SEQ ID NO: 6848 - protein, 10 aa, BK virus
GSDLWESSAG

SEQ ID NO: 6849 - protein, 10 aa, BK virus
SDLWESSAGA

SEQ ID NO: 6850 - protein, 10 aa, BK virus
DLWESSAGAE

SEQ ID NO: 6851 - protein, 10 aa, BK virus
LWESSAGAEV

SEQ ID NO: 6852 - protein, 10 aa, BK virus
WESSAGAEVS

SEQ ID NO: 6853 - protein, 10 aa, BK virus
ESSAGAEVSE

SEQ ID NO: 6854 - protein, 10 aa, BK virus
SSAGAEVSET

SEQ ID NO: 6855 - protein, 10 aa, BK virus
SAGAEVSETW

SEQ ID NO: 6856 - protein, 10 aa, BK virus
AGAEVSETWE

SEQ ID NO: 6857 - protein, 10 aa, BK virus
GAEVSETWEE

SEQ ID NO: 6858 - protein, 10 aa, BK virus
AEVSETWEEH

SEQ ID NO: 6859 - protein, 10 aa, BK virus
EVSETWEEHC

SEQ ID NO: 6860 - protein, 10 aa, BK virus
VSETWEEHCD

SEQ ID NO: 6861 - protein, 10 aa, BK virus
SETWEEHCDW

SEQ ID NO: 6862 - protein, 10 aa, BK virus
ETWEEHCDWD

SEQ ID NO: 6863 - protein, 10 aa, BK virus
TWEEHCDWDS

SEQ ID NO: 6864 - protein, 10 aa, BK virus
WEEHCDWDSV

SEQ ID NO: 6865 - protein, 10 aa, BK virus
EEHCDWDSVL

SEQ ID NO: 6866 - protein, 10 aa, BK virus
EHCDWDSVLD

SEQ ID NO: 6867 - protein, 10 aa, BK virus
HCDWDSVLDP

SEQ ID NO: 6868 - protein, 10 aa, BK virus
CDWDSVLDPC

SEQ ID NO: 6869 - protein, 10 aa, BK virus
DWDSVLDPCP

SEQ ID NO: 6870 - protein, 10 aa, BK virus
WDSVLDPCPE

SEQ ID NO: 6871 - protein, 10 aa, BK virus
DSVLDPCPES

SEQ ID NO: 6872 - protein, 10 aa, BK virus
SVLDPCPESS

SEQ ID NO: 6873 - protein, 10 aa, BK virus
VLDPCPESSV

SEQ ID NO: 6874 - protein, 10 aa, BK virus
LDPCPESSVS

SEQ ID NO: 6875 - protein, 10 aa, BK virus
DPCPESSVSE

SEQ ID NO: 6876 - protein, 10 aa, BK virus
PCPESSVSES

SEQ ID NO: 6877 - protein, 10 aa, BK virus
CPESSVSESS

SEQ ID NO: 6878 - protein, 10 aa, BK virus
PESSVSESSS

SEQ ID NO: 6879 - protein, 10 aa, BK virus
ESSVSESSSL

SEQ ID NO: 6880 - protein, 10 aa, BK virus
SSVSESSSLV

SEQ ID NO: 6881 - protein, 10 aa, BK virus
SVSESSSLVI

SEQ ID NO: 6882 - protein, 10 aa, BK virus
VSESSSLVIS

SEQ ID NO: 6883 - protein, 10 aa, BK virus
SESSSLVISR

SEQ ID NO: 6884 - protein, 10 aa, BK virus
ESSSLVISRI

SEQ ID NO: 6885 - protein, 10 aa, BK virus
SSSLVISRIH

SEQ ID NO: 6886 - protein, 10 aa, BK virus
SSLVISRIHF

SEQ ID NO: 6887 - protein, 10 aa, BK virus
SLVISRIHFP

SEQ ID NO: 6888 - protein, 10 aa, BK virus
LVISRIHFPM

SEQ ID NO: 6889 - protein, 10 aa, BK virus
VISRIHFPMH

SEQ ID NO: 6890 - protein, 10 aa, BK virus
ISRIHFPMHI

SEQ ID NO: 6891 - protein, 10 aa, BK virus
SRIHFPMHIL

SEQ ID NO: 6892 - protein, 10 aa, BK virus
RIHFPMHILY

SEQ ID NO: 6893 - protein, 10 aa, BK virus
IHFPMHILYF

SEQ ID NO: 6894 - protein, 10 aa, BK virus
HFPMHILYFI

SEQ ID NO: 6895 - protein, 10 aa, BK virus
FPMHILYFIL

SEQ ID NO: 6896 - protein, 10 aa, BK virus
PMHILYFILE

SEQ ID NO: 6897 - protein, 10 aa, BK virus
MHILYFILEK

SEQ ID NO: 6898 - protein, 10 aa, BK virus
HILYFILEKV

SEQ ID NO: 6899 - protein, 10 aa, BK virus
ILYFILEKVY

SEQ ID NO: 6900 - protein, 10 aa, BK virus
LYFILEKVYI

SEQ ID NO: 6901 - protein, 10 aa, BK virus
YFILEKVYIL

SEQ ID NO: 6902 - protein, 10 aa, BK virus
FILEKVYILI

SEQ ID NO: 6903 - protein, 10 aa, BK virus
ILEKVYILIS

SEQ ID NO: 6904 - protein, 10 aa, BK virus
LEKVYILISE

SEQ ID NO: 6905 - protein, 10 aa, BK virus
EKVYILISES

SEQ ID NO: 6906 - protein, 10 aa, BK virus
KVYILISESS

SEQ ID NO: 6907 - protein, 10 aa, BK virus
VYILISESSL

SEQ ID NO: 6908 - protein, 10 aa, BK virus
YILISESSLS

SEQ ID NO: 6909 - protein, 10 aa, BK virus
ILISESSLSF

SEQ ID NO: 6910 - protein, 10 aa, BK virus
LISESSLSFH

SEQ ID NO: 6911 - protein, 10 aa, BK virus
ISESSLSFHS

SEQ ID NO: 6912 - protein, 10 aa, BK virus
SESSLSFHST

SEQ ID NO: 6913 - protein, 10 aa, BK virus
ESSLSFHSTI

SEQ ID NO: 6914 - protein, 10 aa, BK virus
SSLSFHSTIL

SEQ ID NO: 6915 - protein, 10 aa, BK virus
SLSFHSTILD

SEQ ID NO: 6916 - protein, 10 aa, BK virus
LSFHSTILDC

SEQ ID NO: 6917 - protein, 10 aa, BK virus
SFHSTILDCI

SEQ ID NO: 6918 - protein, 10 aa, BK virus
FHSTILDCIS

SEQ ID NO: 6919 - protein, 10 aa, BK virus
HSTILDCISV

SEQ ID NO: 6920 - protein, 10 aa, BK virus
STILDCISVA

SEQ ID NO: 6921 - protein, 10 aa, BK virus
TILDCISVAK

SEQ ID NO: 6922 - protein, 10 aa, BK virus
ILDCISVAKS

SEQ ID NO: 6923 - protein, 10 aa, BK virus
LDCISVAKSA

SEQ ID NO: 6924 - protein, 10 aa, BK virus
DCISVAKSAT

SEQ ID NO: 6925 - protein, 10 aa, BK virus
CISVAKSATG

SEQ ID NO: 6926 - protein, 10 aa, BK virus
ISVAKSATGL

SEQ ID NO: 6927 - protein, 10 aa, BK virus
SVAKSATGLN

SEQ ID NO: 6928 - protein, 10 aa, BK virus
VAKSATGLNQ

SEQ ID NO: 6929 - protein, 10 aa, BK virus
AKSATGLNQI

SEQ ID NO: 6930 - protein, 10 aa, BK virus
KSATGLNQIS

SEQ ID NO: 6931 - protein, 10 aa, BK virus
SATGLNQISS

SEQ ID NO: 6932 - protein, 10 aa, BK virus
ATGLNQISSS

SEQ ID NO: 6933 - protein, 10 aa, BK virus
TGLNQISSSN

SEQ ID NO: 6934 - protein, 10 aa, BK virus
GLNQISSSNK

SEQ ID NO: 6935 - protein, 10 aa, BK virus
LNQISSSNKV

SEQ ID NO: 6936 - protein, 10 aa, BK virus
NQISSSNKVI

SEQ ID NO: 6937 - protein, 10 aa, BK virus
QISSSNKVIP

SEQ ID NO: 6938 - protein, 10 aa, BK virus
ISSSNKVIPL

SEQ ID NO: 6939 - protein, 10 aa, BK virus
SSSNKVIPLC

SEQ ID NO: 6940 - protein, 10 aa, BK virus
SSNKVIPLCK

SEQ ID NO: 6941 - protein, 10 aa, BK virus
SNKVIPLCKI

SEQ ID NO: 6942 - protein, 10 aa, BK virus
NKVIPLCKIL

SEQ ID NO: 6943 - protein, 10 aa, BK virus
KVIPLCKILF

SEQ ID NO: 6944 - protein, 10 aa, BK virus
VIPLCKILFS

SEQ ID NO: 6945 - protein, 10 aa, BK virus
IPLCKILFSS

SEQ ID NO: 6946 - protein, 10 aa, BK virus
PLCKILFSSK

SEQ ID NO: 6947 - protein, 10 aa, BK virus
LCKILFSSKN

SEQ ID NO: 6948 - protein, 10 aa, BK virus
CKILFSSKNS

SEQ ID NO: 6949 - protein, 10 aa, BK virus
KILFSSKNSE

SEQ ID NO: 6950 - protein, 10 aa, BK virus
ILFSSKNSEF

SEQ ID NO: 6951 - protein, 10 aa, BK virus
LFSSKNSEFC

SEQ ID NO: 6952 - protein, 10 aa, BK virus
FSSKNSEFCK

SEQ ID NO: 6953 - protein, 10 aa, BK virus
SSKNSEFCKD

SEQ ID NO: 6954 - protein, 10 aa, BK virus
SKNSEFCKDF

SEQ ID NO: 6955 - protein, 10 aa, BK virus
KNSEFCKDFL

SEQ ID NO: 6956 - protein, 10 aa, BK virus
NSEFCKDFLK

SEQ ID NO: 6957 - protein, 10 aa, BK virus
SEFCKDFLKY

SEQ ID NO: 6958 - protein, 10 aa, BK virus
EFCKDFLKYI

SEQ ID NO: 6959 - protein, 10 aa, BK virus
FCKDFLKYIL

SEQ ID NO: 6960 - protein, 10 aa, BK virus
CKDFLKYILG

SEQ ID NO: 6961 - protein, 10 aa, BK virus
KDFLKYILGL

SEQ ID NO: 6962 - protein, 10 aa, BK virus
DFLKYILGLK

SEQ ID NO: 6963 - protein, 10 aa, BK virus
FLKYILGLKS

SEQ ID NO: 6964 - protein, 10 aa, BK virus
LKYILGLKSI

SEQ ID NO: 6965 - protein, 10 aa, BK virus
KYILGLKSIC

SEQ ID NO: 6966 - protein, 10 aa, BK virus
YILGLKSICL

SEQ ID NO: 6967 - protein, 10 aa, BK virus
ILGLKSICLT

SEQ ID NO: 6968 - protein, 10 aa, BK virus
LGLKSICLTN

SEQ ID NO: 6969 - protein, 10 aa, BK virus
GLKSICLTNL

SEQ ID NO: 6970 - protein, 10 aa, BK virus
LKSICLTNLA

SEQ ID NO: 6971 - protein, 10 aa, BK virus
KSICLTNLAC

SEQ ID NO: 6972 - protein, 10 aa, BK virus
SICLTNLACR

SEQ ID NO: 6973 - protein, 10 aa, BK virus
ICLTNLACRV

SEQ ID NO: 6974 - protein, 10 aa, BK virus
CLTNLACRVL

SEQ ID NO: 6975 - protein, 10 aa, BK virus
LTNLACRVLG

SEQ ID NO: 6976 - protein, 10 aa, BK virus
TNLACRVLGT

SEQ ID NO: 6977 - protein, 10 aa, BK virus
NLACRVLGTG

SEQ ID NO: 6978 - protein, 10 aa, BK virus
LACRVLGTGY

SEQ ID NO: 6979 - protein, 10 aa, BK virus
ACRVLGTGYS

SEQ ID NO: 6980 - protein, 10 aa, BK virus
CRVLGTGYSF

SEQ ID NO: 6981 - protein, 10 aa, BK virus
RVLGTGYSFI

SEQ ID NO: 6982 - protein, 10 aa, BK virus
VLGTGYSFIV

SEQ ID NO: 6983 - protein, 10 aa, BK virus
LGTGYSFIVT

SEQ ID NO: 6984 - protein, 10 aa, BK virus
GTGYSFIVTK

SEQ ID NO: 6985 - protein, 10 aa, BK virus
TGYSFIVTKP

SEQ ID NO: 6986 - protein, 10 aa, BK virus
GYSFIVTKPG

SEQ ID NO: 6987 - protein, 10 aa, BK virus
YSFIVTKPGG

SEQ ID NO: 6988 - protein, 10 aa, BK virus
SFIVTKPGGN

SEQ ID NO: 6989 - protein, 10 aa, BK virus
FIVTKPGGNI

SEQ ID NO: 6990 - protein, 10 aa, BK virus
IVTKPGGNIW

SEQ ID NO: 6991 - protein, 10 aa, BK virus
VTKPGGNIWV

SEQ ID NO: 6992 - protein, 10 aa, BK virus
TKPGGNIWVL

SEQ ID NO: 6993 - protein, 10 aa, BK virus
KPGGNIWVLL

SEQ ID NO: 6994 - protein, 10 aa, BK virus
PGGNIWVLLF

SEQ ID NO: 6995 - protein, 10 aa, BK virus
GGNIWVLLFK

SEQ ID NO: 6996 - protein, 10 aa, BK virus
GNIWVLLFKC

SEQ ID NO: 6997 - protein, 10 aa, BK virus
NIWVLLFKCF

SEQ ID NO: 6998 - protein, 10 aa, BK virus
IWVLLFKCFF

SEQ ID NO: 6999 - protein, 10 aa, BK virus
WVLLFKCFFS

SEQ ID NO: 7000 - protein, 10 aa, BK virus
VLLFKCFFSK

SEQ ID NO: 7001 - protein, 10 aa, BK virus
LLFKCFFSKF

SEQ ID NO: 7002 - protein, 10 aa, BK virus
LFKCFFSKFT

SEQ ID NO: 7003 - protein, 10 aa, BK virus
FKCFFSKFTL

SEQ ID NO: 7004 - protein, 10 aa, BK virus
KCFFSKFTLT

SEQ ID NO: 7005 - protein, 10 aa, BK virus
CFFSKFTLTL

SEQ ID NO: 7006 - protein, 10 aa, BK virus
FFSKFTLTLP

SEQ ID NO: 7007 - protein, 10 aa, BK virus
FSKFTLTLPS

SEQ ID NO: 7008 - protein, 10 aa, BK virus
SKFTLTLPSK

SEQ ID NO: 7009 - protein, 10 aa, BK virus
SLKLSKLFIP

SEQ ID NO: 7010 - protein, 10 aa, BK virus
LKLSKLFIPC

SEQ ID NO: 7011 - protein, 10 aa, BK virus
KLSKLFIPCP

SEQ ID NO: 7012 - protein, 10 aa, BK virus
LSKLFIPCPE

SEQ ID NO: 7013 - protein, 10 aa, BK virus
SKLFIPCPEG

SEQ ID NO: 7014 - protein, 10 aa, BK virus
KLFIPCPEGK

SEQ ID NO: 7015 - protein, 10 aa, BK virus
LFIPCPEGKS

SEQ ID NO: 7016 - protein, 10 aa, BK virus
FIPCPEGKSF

SEQ ID NO: 7017 - protein, 10 aa, BK virus
IPCPEGKSFD

SEQ ID NO: 7018 - protein, 10 aa, BK virus
PCPEGKSFDS

SEQ ID NO: 7019 - protein, 10 aa, BK virus
CPEGKSFDSA

SEQ ID NO: 7020 - protein, 10 aa, BK virus
PEGKSFDSAP

SEQ ID NO: 7021 - protein, 10 aa, BK virus
EGKSFDSAPV

SEQ ID NO: 7022 - protein, 10 aa, BK virus
GKSFDSAPVP

SEQ ID NO: 7023 - protein, 10 aa, BK virus
KSFDSAPVPF

SEQ ID NO: 7024 - protein, 10 aa, BK virus
SFDSAPVPFT

SEQ ID NO: 7025 - protein, 10 aa, BK virus
FDSAPVPFTS

SEQ ID NO: 7026 - protein, 10 aa, BK virus
DSAPVPFTSS

SEQ ID NO: 7027 - protein, 10 aa, BK virus
SAPVPFTSSK

SEQ ID NO: 7028 - protein, 10 aa, BK virus
APVPFTSSKT

SEQ ID NO: 7029 - protein, 10 aa, BK virus
PVPFTSSKTT

SEQ ID NO: 7030 - protein, 10 aa, BK virus
VPFTSSKTTM

SEQ ID NO: 7031 - protein, 10 aa, BK virus
PFTSSKTTMY

SEQ ID NO: 7032 - protein, 10 aa, BK virus
SIATPSSKVS

SEQ ID NO: 7033 - protein, 10 aa, BK virus
IATPSSKVSL

SEQ ID NO: 7034 - protein, 10 aa, BK virus
ATPSSKVSLS

SEQ ID NO: 7035 - protein, 10 aa, BK virus
TPSSKVSLSM

SEQ ID NO: 7036 - protein, 10 aa, BK virus
PSSKVSLSMG

SEQ ID NO: 7037 - protein, 10 aa, BK virus
SSKVSLSMGR

SEQ ID NO: 7038 - protein, 10 aa, BK virus
SKVSLSMGRF

SEQ ID NO: 7039 - protein, 10 aa, BK virus
KVSLSMGRFT

SEQ ID NO: 7040 - protein, 10 aa, BK virus
VSLSMGRFTF

SEQ ID NO: 7041 - protein, 10 aa, BK virus
SLSMGRFTFK

SEQ ID NO: 7042 - protein, 10 aa, BK virus
LSMGRFTFKA

SEQ ID NO: 7043 - protein, 10 aa, BK virus
SMGRFTFKAL

SEQ ID NO: 7044 - protein, 10 aa, BK virus
MGRFTFKALP

SEQ ID NO: 7045 - protein, 10 aa, BK virus
GRFTFKALPP

SEQ ID NO: 7046 - protein, 10 aa, BK virus
RFTFKALPPH

SEQ ID NO: 7047 - protein, 10 aa, BK virus
FTFKALPPHK

SEQ ID NO: 7048 - protein, 10 aa, BK virus
TFKALPPHKS

SEQ ID NO: 7049 - protein, 10 aa, BK virus
FKALPPHKSN

SEQ ID NO: 7050 - protein, 10 aa, BK virus
KALPPHKSNN

SEQ ID NO: 7051 - protein, 10 aa, BK virus
ALPPHKSNNP

SEQ ID NO: 7052 - protein, 10 aa, BK virus
LPPHKSNNPA

SEQ ID NO: 7053 - protein, 10 aa, BK virus
PPHKSNNPAA

SEQ ID NO: 7054 - protein, 10 aa, BK virus
PHKSNNPAAS

SEQ ID NO: 7055 - protein, 10 aa, BK virus
HKSNNPAASV

SEQ ID NO: 7056 - protein, 10 aa, BK virus
KSNNPAASVV

SEQ ID NO: 7057 - protein, 10 aa, BK virus
SNNPAASVVF

SEQ ID NO: 7058 - protein, 10 aa, BK virus
NNPAASVVFP

SEQ ID NO: 7059 - protein, 10 aa, BK virus
NPAASVVFPL

SEQ ID NO: 7060 - protein, 10 aa, BK virus
PAASVVFPLS

SEQ ID NO: 7061 - protein, 10 aa, BK virus
AASVVFPLSM

SEQ ID NO: 7062 - protein, 10 aa, BK virus
ASVVFPLSMG

SEQ ID NO: 7063 - protein, 10 aa, BK virus
SVVFPLSMGP

SEQ ID NO: 7064 - protein, 10 aa, BK virus
VVFPLSMGPL

SEQ ID NO: 7065 - protein, 10 aa, BK virus
VFPLSMGPLN

SEQ ID NO: 7066 - protein, 10 aa, BK virus
FPLSMGPLNN

SEQ ID NO: 7067 - protein, 10 aa, BK virus
PLSMGPLNNQ

SEQ ID NO: 7068 - protein, 10 aa, BK virus
LSMGPLNNQY

SEQ ID NO: 7069 - protein, 10 aa, BK virus
SMGPLNNQYL

SEQ ID NO: 7070 - protein, 10 aa, BK virus
MGPLNNQYLL

SEQ ID NO: 7071 - protein, 10 aa, BK virus
GPLNNQYLLL

SEQ ID NO: 7072 - protein, 10 aa, BK virus
PLNNQYLLLG

SEQ ID NO: 7073 - protein, 10 aa, BK virus
LNNQYLLLGT

SEQ ID NO: 7074 - protein, 10 aa, BK virus
NNQYLLLGTL

SEQ ID NO: 7075 - protein, 10 aa, BK virus
NQYLLLGTLK

SEQ ID NO: 7076 - protein, 10 aa, BK virus
QYLLLGTLKT

SEQ ID NO: 7077 - protein, 10 aa, BK virus
YLLLGTLKTI

SEQ ID NO: 7078 - protein, 10 aa, BK virus
LLLGTLKTIQ

SEQ ID NO: 7079 - protein, 10 aa, BK virus
LLGTLKTIQC

SEQ ID NO: 7080 - protein, 10 aa, BK virus
LGTLKTIQCK

SEQ ID NO: 7081 - protein, 10 aa, BK virus
GTLKTIQCKK

SEQ ID NO: 7082 - protein, 10 aa, BK virus
TLKTIQCKKS

SEQ ID NO: 7083 - protein, 10 aa, BK virus
LKTIQCKKSN

SEQ ID NO: 7084 - protein, 10 aa, BK virus
KTIQCKKSNI

SEQ ID NO: 7085 - protein, 10 aa, BK virus
TIQCKKSNIT

SEQ ID NO: 7086 - protein, 10 aa, BK virus
IQCKKSNITE

SEQ ID NO: 7087 - protein, 10 aa, BK virus
QCKKSNITES

SEQ ID NO: 7088 - protein, 10 aa, BK virus
CKKSNITESI

SEQ ID NO: 7089 - protein, 10 aa, BK virus
KKSNITESIL

SEQ ID NO: 7090 - protein, 10 aa, BK virus
KSNITESILG

SEQ ID NO: 7091 - protein, 10 aa, BK virus
SNITESILGS

SEQ ID NO: 7092 - protein, 10 aa, BK virus
NITESILGSK

SEQ ID NO: 7093 - protein, 10 aa, BK virus
ITESILGSKQ

SEQ ID NO: 7094 - protein, 10 aa, BK virus
TESILGSKQC

SEQ ID NO: 7095 - protein, 10 aa, BK virus
ESILGSKQCS

SEQ ID NO: 7096 - protein, 10 aa, BK virus
SILGSKQCSQ

SEQ ID NO: 7097 - protein, 10 aa, BK virus
ILGSKQCSQA

SEQ ID NO: 7098 - protein, 10 aa, BK virus
LGSKQCSQAT

SEQ ID NO: 7099 - protein, 10 aa, BK virus
GSKQCSQATP

SEQ ID NO: 7100 - protein, 10 aa, BK virus
SKQCSQATPA

SEQ ID NO: 7101 - protein, 10 aa, BK virus
KQCSQATPAI

SEQ ID NO: 7102 - protein, 10 aa, BK virus
QCSQATPAIY

SEQ ID NO: 7103 - protein, 10 aa, BK virus
CSQATPAIYC

SEQ ID NO: 7104 - protein, 10 aa, BK virus
SQATPAIYCS

SEQ ID NO: 7105 - protein, 10 aa, BK virus
QATPAIYCSS

SEQ ID NO: 7106 - protein, 10 aa, BK virus
ATPAIYCSST

SEQ ID NO: 7107 - protein, 10 aa, BK virus
TPAIYCSSTA

SEQ ID NO: 7108 - protein, 10 aa, BK virus
PAIYCSSTAF

SEQ ID NO: 7109 - protein, 10 aa, BK virus
AIYCSSTAFP

SEQ ID NO: 7110 - protein, 10 aa, BK virus
APNIKSILSN

SEQ ID NO: 7111 - protein, 10 aa, BK virus
PNIKSILSNI

SEQ ID NO: 7112 - protein, 10 aa, BK virus
LNLSVSISSL

SEQ ID NO: 7113 - protein, 10 aa, BK virus
NLSVSISSLV

SEQ ID NO: 7114 - protein, 10 aa, BK virus
LSVSISSLVI

SEQ ID NO: 7115 - protein, 10 aa, BK virus
RVSTLFLAKT

SEQ ID NO: 7116 - protein, 10 aa, BK virus
VSTLFLAKTV

SEQ ID NO: 7117 - protein, 10 aa, BK virus
STLFLAKTVS

SEQ ID NO: 7118 - protein, 10 aa, BK virus
TLFLAKTVST

SEQ ID NO: 7119 - protein, 10 aa, BK virus
LFLAKTVSTA

SEQ ID NO: 7120 - protein, 10 aa, BK virus
FLAKTVSTAC

SEQ ID NO: 7121 - protein, 10 aa, BK virus
FLLSAKIIAF

SEQ ID NO: 7122 - protein, 10 aa, BK virus
LLSAKIIAFA

SEQ ID NO: 7123 - protein, 10 aa, BK virus
LSAKIIAFAK

SEQ ID NO: 7124 - protein, 10 aa, BK virus
SAKIIAFAKC

SEQ ID NO: 7125 - protein, 10 aa, BK virus
AKIIAFAKCF

SEQ ID NO: 7126 - protein, 10 aa, BK virus
KIIAFAKCFS

SEQ ID NO: 7127 - protein, 10 aa, BK virus
NSKYIPNNKN

SEQ ID NO: 7128 - protein, 10 aa, BK virus
SKYIPNNKNT

SEQ ID NO: 7129 - protein, 10 aa, BK virus
KYIPNNKNTS

SEQ ID NO: 7130 - protein, 10 aa, BK virus
YIPNNKNTSS

SEQ ID NO: 7131 - protein, 10 aa, BK virus
IPNNKNTSSH

SEQ ID NO: 7132 - protein, 10 aa, BK virus
PNNKNTSSHF

SEQ ID NO: 7133 - protein, 10 aa, BK virus
NNKNTSSHFV

SEQ ID NO: 7134 - protein, 10 aa, BK virus
NKNTSSHFVS

SEQ ID NO: 7135 - protein, 10 aa, BK virus
KNTSSHFVST

SEQ ID NO: 7136 - protein, 10 aa, BK virus
NTSSHFVSTA

SEQ ID NO: 7137 - protein, 10 aa, BK virus
TSSHFVSTAY

SEQ ID NO: 7138 - protein, 10 aa, BK virus
SSHFVSTAYS

SEQ ID NO: 7139 - protein, 10 aa, BK virus
SHFVSTAYSV

SEQ ID NO: 7140 - protein, 10 aa, BK virus
HFVSTAYSVI

SEQ ID NO: 7141 - protein, 10 aa, BK virus
FVSTAYSVIN

SEQ ID NO: 7142 - protein, 10 aa, BK virus
VSTAYSVINF

SEQ ID NO: 7143 - protein, 10 aa, BK virus
STAYSVINFQ

SEQ ID NO: 7144 - protein, 10 aa, BK virus
TAYSVINFQD

SEQ ID NO: 7145 - protein, 10 aa, BK virus
AYSVINFQDT

SEQ ID NO: 7146 - protein, 10 aa, BK virus
YSVINFQDTC

SEQ ID NO: 7147 - protein, 10 aa, BK virus
SVINFQDTCF

SEQ ID NO: 7148 - protein, 10 aa, BK virus
VINFQDTCFV

SEQ ID NO: 7149 - protein, 10 aa, BK virus
INFQDTCFVS

SEQ ID NO: 7150 - protein, 10 aa, BK virus
NFQDTCFVSS

SEQ ID NO: 7151 - protein, 10 aa, BK virus
FQDTCFVSSG

SEQ ID NO: 7152 - protein, 10 aa, BK virus
QDTCFVSSGS

SEQ ID NO: 7153 - protein, 10 aa, BK virus
DTCFVSSGSS

SEQ ID NO: 7154 - protein, 10 aa, BK virus
TCFVSSGSSG

SEQ ID NO: 7155 - protein, 10 aa, BK virus
CFVSSGSSGL

SEQ ID NO: 7156 - protein, 10 aa, BK virus
FVSSGSSGLK

SEQ ID NO: 7157 - protein, 10 aa, BK virus
VSSGSSGLKS

SEQ ID NO: 7158 - protein, 10 aa, BK virus
SSGSSGLKSC

SEQ ID NO: 7159 - protein, 10 aa, BK virus
SGSSGLKSCS

SEQ ID NO: 7160 - protein, 10 aa, BK virus
GSSGLKSCSF

SEQ ID NO: 7161 - protein, 10 aa, BK virus
SSGLKSCSFK

SEQ ID NO: 7162 - protein, 10 aa, BK virus
SGLKSCSFKP

SEQ ID NO: 7163 - protein, 10 aa, BK virus
GLKSCSFKPP

SEQ ID NO: 7164 - protein, 10 aa, BK virus
MLSSIVWYGS

SEQ ID NO: 7165 - protein, 10 aa, BK virus
LSSIVWYGSL

SEQ ID NO: 7166 - protein, 10 aa, BK virus
SSIVWYGSLV

SEQ ID NO: 7167 - protein, 10 aa, BK virus
SIVWYGSLVK

SEQ ID NO: 7168 - protein, 10 aa, BK virus
IVWYGSLVKA

SEQ ID NO: 7169 - protein, 10 aa, BK virus
VWYGSLVKAL

SEQ ID NO: 7170 - protein, 10 aa, BK virus
WYGSLVKALY

SEQ ID NO: 7171 - protein, 10 aa, BK virus
YGSLVKALYS

SEQ ID NO: 7172 - protein, 10 aa, BK virus
GSLVKALYSK

SEQ ID NO: 7173 - protein, 10 aa, BK virus
SLVKALYSKY

SEQ ID NO: 7174 - protein, 10 aa, BK virus
LVKALYSKYS

SEQ ID NO: 7175 - protein, 10 aa, BK virus
VKALYSKYSL

SEQ ID NO: 7176 - protein, 10 aa, BK virus
KALYSKYSLL

SEQ ID NO: 7177 - protein, 10 aa, BK virus
ALYSKYSLLT

SEQ ID NO: 7178 - protein, 10 aa, BK virus
LYSKYSLLTP

SEQ ID NO: 7179 - protein, 10 aa, BK virus
YSKYSLLTPL

SEQ ID NO: 7180 - protein, 10 aa, BK virus
SKYSLLTPLQ

SEQ ID NO: 7181 - protein, 10 aa, BK virus
KYSLLTPLQI

SEQ ID NO: 7182 - protein, 10 aa, BK virus
YSLLTPLQIK

SEQ ID NO: 7183 - protein, 10 aa, BK virus
SLLTPLQIKK

SEQ ID NO: 7184 - protein, 10 aa, BK virus
LLTPLQIKKL

SEQ ID NO: 7185 - protein, 10 aa, BK virus
LTPLQIKKLK

SEQ ID NO: 7186 - protein, 10 aa, BK virus
TPLQIKKLKV

SEQ ID NO: 7187 - protein, 10 aa, BK virus
PLQIKKLKVH

SEQ ID NO: 7188 - protein, 10 aa, BK virus
LQIKKLKVHS

SEQ ID NO: 7189 - protein, 10 aa, BK virus
QIKKLKVHSF

SEQ ID NO: 7190 - protein, 10 aa, BK virus
QKLLIAETLC

SEQ ID NO: 7191 - protein, 10 aa, BK virus
KLLIAETLCL

SEQ ID NO: 7192 - protein, 10 aa, BK virus
LLIAETLCLC

SEQ ID NO: 7193 - protein, 10 aa, BK virus
LIAETLCLCG

SEQ ID NO: 7194 - protein, 10 aa, BK virus
IAETLCLCGV

SEQ ID NO: 7195 - protein, 10 aa, BK virus
AETLCLCGVK

SEQ ID NO: 7196 - protein, 10 aa, BK virus
ETLCLCGVKK

SEQ ID NO: 7197 - protein, 10 aa, BK virus
TLCLCGVKKN

SEQ ID NO: 7198 - protein, 10 aa, BK virus
LCLCGVKKNI

SEQ ID NO: 7199 - protein, 10 aa, BK virus
CLCGVKKNII

SEQ ID NO: 7200 - protein, 10 aa, BK virus
LCGVKKNIIL

SEQ ID NO: 7201 - protein, 10 aa, BK virus
CGVKKNIILC

SEQ ID NO: 7202 - protein, 10 aa, BK virus
GVKKNIILCP

SEQ ID NO: 7203 - protein, 10 aa, BK virus
VKKNIILCPA

SEQ ID NO: 7204 - protein, 10 aa, BK virus
KKNIILCPAH

SEQ ID NO: 7205 - protein, 10 aa, BK virus
KNIILCPAHM

SEQ ID NO: 7206 - protein, 10 aa, BK virus
NIILCPAHMC

SEQ ID NO: 7207 - protein, 10 aa, BK virus
IILCPAHMCL

SEQ ID NO: 7208 - protein, 10 aa, BK virus
ILCPAHMCLL

SEQ ID NO: 7209 - protein, 10 aa, BK virus
LCPAHMCLLI

SEQ ID NO: 7210 - protein, 10 aa, BK virus
CPAHMCLLIK

SEQ ID NO: 7211 - protein, 10 aa, BK virus
PAHMCLLIKV

SEQ ID NO: 7212 - protein, 10 aa, BK virus
AHMCLLIKVT

SEQ ID NO: 7213 - protein, 10 aa, BK virus
HMCLLIKVTE

SEQ ID NO: 7214 - protein, 10 aa, BK virus
MCLLIKVTEY

SEQ ID NO: 7215 - protein, 10 aa, BK virus
CLLIKVTEYF

SEQ ID NO: 7216 - protein, 10 aa, BK virus
LLIKVTEYFS

SEQ ID NO: 7217 - protein, 10 aa, BK virus
LIKVTEYFSI

SEQ ID NO: 7218 - protein, 10 aa, BK virus
IKVTEYFSIS

SEQ ID NO: 7219 - protein, 10 aa, BK virus
KVTEYFSISF

SEQ ID NO: 7220 - protein, 10 aa, BK virus
VTEYFSISFL

SEQ ID NO: 7221 - protein, 10 aa, BK virus
TEYFSISFLY

SEQ ID NO: 7222 - protein, 10 aa, BK virus
EYFSISFLYR

SEQ ID NO: 7223 - protein, 10 aa, BK virus
YFSISFLYRI

SEQ ID NO: 7224 - protein, 10 aa, BK virus
AFSLVVYTAK

SEQ ID NO: 7225 - protein, 10 aa, BK virus
FSLVVYTAKQ

SEQ ID NO: 7226 - protein, 10 aa, BK virus
SLVVYTAKQA

SEQ ID NO: 7227 - protein, 10 aa, BK virus
LVVYTAKQAR

SEQ ID NO: 7228 - protein, 10 aa, BK virus
VVYTAKQARV

SEQ ID NO: 7229 - protein, 10 aa, BK virus
VYTAKQARVL

SEQ ID NO: 7230 - protein, 10 aa, BK virus
YTAKQARVLL

SEQ ID NO: 7231 - protein, 10 aa, BK virus
TAKQARVLLL

SEQ ID NO: 7232 - protein, 10 aa, BK virus
AKQARVLLLN

SEQ ID NO: 7233 - protein, 10 aa, BK virus
KQARVLLLNT

SEQ ID NO: 7234 - protein, 10 aa, BK virus
QARVLLLNTA

SEQ ID NO: 7235 - protein, 10 aa, BK virus
LRNWCRSEGK

SEQ ID NO: 7236 - protein, 10 aa, BK virus
RNWCRSEGKS

SEQ ID NO: 7237 - protein, 10 aa, BK virus
NWCRSEGKSL

SEQ ID NO: 7238 - protein, 10 aa, BK virus
WCRSEGKSLG

SEQ ID NO: 7239 - protein, 10 aa, BK virus
CRSEGKSLGS

SEQ ID NO: 7240 - protein, 10 aa, BK virus
RSEGKSLGSS

SEQ ID NO: 7241 - protein, 10 aa, BK virus
SEGKSLGSST

SEQ ID NO: 7242 - protein, 10 aa, BK virus
EGKSLGSSTF

SEQ ID NO: 7243 - protein, 10 aa, BK virus
GKSLGSSTFL

SEQ ID NO: 7244 - protein, 10 aa, BK virus
KSLGSSTFLF

SEQ ID NO: 7245 - protein, 10 aa, BK virus
SLGSSTFLFF

SEQ ID NO: 7246 - protein, 10 aa, BK virus
LGSSTFLFFL

SEQ ID NO: 7247 - protein, 10 aa, BK virus
GSSTFLFFLG

SEQ ID NO: 7248 - protein, 10 aa, BK virus
SSTFLFFLGG

SEQ ID NO: 7249 - protein, 10 aa, BK virus
STFLFFLGGV

SEQ ID NO: 7250 - protein, 10 aa, BK virus
TFLFFLGGVE

SEQ ID NO: 7251 - protein, 10 aa, BK virus
FLFFLGGVEC

SEQ ID NO: 7252 - protein, 10 aa, BK virus
ESAVASSSLA

SEQ ID NO: 7253 - protein, 10 aa, BK virus
SAVASSSLAN

SEQ ID NO: 7254 - protein, 10 aa, BK virus
AVASSSLANI

SEQ ID NO: 7255 - protein, 10 aa, BK virus
VASSSLANIS

SEQ ID NO: 7256 - protein, 10 aa, BK virus
ASSSLANISS

SEQ ID NO: 7257 - protein, 10 aa, BK virus
SSSLANISSW

SEQ ID NO: 7258 - protein, 10 aa, BK virus
SSLANISSWQ

SEQ ID NO: 7259 - protein, 10 aa, BK virus
SLANISSWQN

SEQ ID NO: 7260 - protein, 10 aa, BK virus
LANISSWQNK

SEQ ID NO: 7261 - protein, 10 aa, BK virus
ANISSWQNKS

SEQ ID NO: 7262 - protein, 10 aa, BK virus
NISSWQNKSS

SEQ ID NO: 7263 - protein, 10 aa, BK virus
ISSWQNKSSS

SEQ ID NO: 7264 - protein, 10 aa, BK virus
SSWQNKSSSH

SEQ ID NO: 7265 - protein, 10 aa, BK virus
SWQNKSSSHF

SEQ ID NO: 7266 - protein, 10 aa, BK virus
WQNKSSSHFS

SEQ ID NO: 7267 - protein, 10 aa, BK virus
QNKSSSHFSL

SEQ ID NO: 7268 - protein, 10 aa, BK virus
NKSSSHFSLK

SEQ ID NO: 7269 - protein, 10 aa, BK virus
KSSSHFSLKE

SEQ ID NO: 7270 - protein, 10 aa, BK virus
SSSHFSLKEL

SEQ ID NO: 7271 - protein, 10 aa, BK virus
SSHFSLKELH

SEQ ID NO: 7272 - protein, 10 aa, BK virus
SHFSLKELHQ

SEQ ID NO: 7273 - protein, 10 aa, BK virus
HFSLKELHQD

SEQ ID NO: 7274 - protein, 10 aa, BK virus
FSLKELHQDS

SEQ ID NO: 7275 - protein, 10 aa, BK virus
SLKELHQDSH

SEQ ID NO: 7276 - protein, 10 aa, BK virus
LKELHQDSHS

SEQ ID NO: 7277 - protein, 10 aa, BK virus
KELHQDSHSS

SEQ ID NO: 7278 - protein, 10 aa, BK virus
ELHQDSHSSV

SEQ ID NO: 7279 - protein, 10 aa, BK virus
LHQDSHSSVP

SEQ ID NO: 7280 - protein, 10 aa, BK virus
VGTYKKNNYL

SEQ ID NO: 7281 - protein, 10 aa, BK virus
GTYKKNNYLG

SEQ ID NO: 7282 - protein, 10 aa, BK virus
TYKKNNYLGP

SEQ ID NO: 7283 - protein, 10 aa, BK virus
YKKNNYLGPF

SEQ ID NO: 7284 - protein, 10 aa, BK virus
KKNNYLGPFN

SEQ ID NO: 7285 - protein, 10 aa, BK virus
KNNYLGPFNI

SEQ ID NO: 7286 - protein, 10 aa, BK virus
NNYLGPFNIL

SEQ ID NO: 7287 - protein, 10 aa, BK virus
NYLGPFNILL

SEQ ID NO: 7288 - protein, 10 aa, BK virus
YLGPFNILLF

SEQ ID NO: 7289 - protein, 10 aa, BK virus
LGPFNILLFI

SEQ ID NO: 7290 - protein, 10 aa, BK virus
REFLQLFGPT

SEQ ID NO: 7291 - protein, 10 aa, BK virus
EFLQLFGPTI

SEQ ID NO: 7292 - protein, 10 aa, BK virus
FLQLFGPTIA

SEQ ID NO: 7293 - protein, 10 aa, BK virus
LQLFGPTIAE

SEQ ID NO: 7294 - protein, 10 aa, BK virus
QLFGPTIAEF

SEQ ID NO: 7295 - protein, 10 aa, BK virus
LFGPTIAEFL

SEQ ID NO: 7296 - protein, 10 aa, BK virus
FGPTIAEFLQ

SEQ ID NO: 7297 - protein, 10 aa, BK virus
GPTIAEFLQL

SEQ ID NO: 7298 - protein, 10 aa, BK virus
PTIAEFLQLG

SEQ ID NO: 7299 - protein, 10 aa, BK virus
TIAEFLQLGL

SEQ ID NO: 7300 - protein, 10 aa, BK virus
IAEFLQLGLS

SEQ ID NO: 7301 - protein, 10 aa, BK virus
AEFLQLGLSQ

SEQ ID NO: 7302 - protein, 10 aa, BK virus
EFLQLGLSQT

SEQ ID NO: 7303 - protein, 10 aa, BK virus
FLQLGLSQTT

SEQ ID NO: 7304 - protein, 10 aa, BK virus
LQLGLSQTTV

SEQ ID NO: 7305 - protein, 10 aa, BK virus
SSQCSSNLSK

SEQ ID NO: 7306 - protein, 10 aa, BK virus
SQCSSNLSKP

SEQ ID NO: 7307 - protein, 10 aa, BK virus
QCSSNLSKPR

SEQ ID NO: 7308 - protein, 10 aa, BK virus
CSSNLSKPRA

SEQ ID NO: 7309 - protein, 10 aa, BK virus
SSNLSKPRAL

SEQ ID NO: 7310 - protein, 10 aa, BK virus
SNLSKPRALF

SEQ ID NO: 7311 - protein, 10 aa, BK virus
NLSKPRALFL

SEQ ID NO: 7312 - protein, 10 aa, BK virus
LSKPRALFLK

SEQ ID NO: 7313 - protein, 10 aa, BK virus
SKPRALFLKI

SEQ ID NO: 7314 - protein, 10 aa, BK virus
KPRALFLKIF

SEQ ID NO: 7315 - protein, 10 aa, BK virus
PRALFLKIFY

SEQ ID NO: 7316 - protein, 10 aa, BK virus
RALFLKIFYL

SEQ ID NO: 7317 - protein, 10 aa, BK virus
ALFLKIFYLN

SEQ ID NO: 7318 - protein, 10 aa, BK virus
LFLKIFYLNA

SEQ ID NO: 7319 - protein, 10 aa, BK virus
FLKIFYLNAL

SEQ ID NO: 7320 - protein, 10 aa, BK virus
LKIFYLNALI

SEQ ID NO: 7321 - protein, 10 aa, BK virus
ADIACKGSAQ

SEQ ID NO: 7322 - protein, 10 aa, BK virus
DIACKGSAQK

SEQ ID NO: 7323 - protein, 10 aa, BK virus
IACKGSAQKA

SEQ ID NO: 7324 - protein, 10 aa, BK virus
ACKGSAQKAF

SEQ ID NO: 7325 - protein, 10 aa, BK virus
CKGSAQKAFW

SEQ ID NO: 7326 - protein, 10 aa, BK virus
KGSAQKAFWN

SEQ ID NO: 7327 - protein, 10 aa, BK virus
GSAQKAFWNK

SEQ ID NO: 7328 - protein, 10 aa, BK virus
AIPCSTGYLG

SEQ ID NO: 7329 - protein, 10 aa, BK virus
IPCSTGYLGK

SEQ ID NO: 7330 - protein, 10 aa, BK virus
PCSTGYLGKE

SEQ ID NO: 7331 - protein, 10 aa, BK virus
CSTGYLGKEE

SEQ ID NO: 7332 - protein, 10 aa, BK virus
STGYLGKEEN

SEQ ID NO: 7333 - protein, 10 aa, BK virus
TGYLGKEENQ

SEQ ID NO: 7334 - protein, 10 aa, BK virus
GYLGKEENQH

SEQ ID NO: 7335 - protein, 10 aa, BK virus
YLGKEENQHK

SEQ ID NO: 7336 - protein, 10 aa, BK virus
LGKEENQHKP

SEQ ID NO: 7337 - protein, 10 aa, BK virus
GKEENQHKPL

SEQ ID NO: 7338 - protein, 10 aa, BK virus
KEENQHKPLS

SEQ ID NO: 7339 - protein, 10 aa, BK virus
EENQHKPLSY

SEQ ID NO: 7340 - protein, 10 aa, BK virus
ENQHKPLSYS

SEQ ID NO: 7341 - protein, 10 aa, BK virus
NQHKPLSYSR

SEQ ID NO: 7342 - protein, 10 aa, BK virus
QHKPLSYSRF

SEQ ID NO: 7343 - protein, 10 aa, BK virus
HKPLSYSRFQ

SEQ ID NO: 7344 - protein, 10 aa, BK virus
KPLSYSRFQN

SEQ ID NO: 7345 - protein, 10 aa, BK virus
PLSYSRFQNQ

SEQ ID NO: 7346 - protein, 10 aa, BK virus
LSYSRFQNQA

SEQ ID NO: 7347 - protein, 10 aa, BK virus
SYSRFQNQAD

SEQ ID NO: 7348 - protein, 10 aa, BK virus
YSRFQNQADE

SEQ ID NO: 7349 - protein, 10 aa, BK virus
SRFQNQADEL

SEQ ID NO: 7350 - protein, 10 aa, BK virus
RFQNQADELP

SEQ ID NO: 7351 - protein, 10 aa, BK virus
FQNQADELPL

SEQ ID NO: 7352 - protein, 10 aa, BK virus
QNQADELPLH

SEQ ID NO: 7353 - protein, 10 aa, BK virus
NQADELPLHP

SEQ ID NO: 7354 - protein, 10 aa, BK virus
QADELPLHPA

SEQ ID NO: 7355 - protein, 10 aa, BK virus
ADELPLHPAP

SEQ ID NO: 7356 - protein, 10 aa, BK virus
DELPLHPAPF

SEQ ID NO: 7357 - protein, 10 aa, BK virus
ELPLHPAPFF

SEQ ID NO: 7358 - protein, 10 aa, BK virus
LPLHPAPFFY

SEQ ID NO: 7359 - protein, 10 aa, BK virus
PLHPAPFFYT

SEQ ID NO: 7360 - protein, 10 aa, BK virus
LHPAPFFYTK

SEQ ID NO: 7361 - protein, 10 aa, BK virus
HPAPFFYTKY

SEQ ID NO: 7362 - protein, 10 aa, BK virus
PAPFFYTKYS

SEQ ID NO: 7363 - protein, 10 aa, BK virus
APFFYTKYSF

SEQ ID NO: 7364 - protein, 10 aa, BK virus
PFFYTKYSFS

SEQ ID NO: 7365 - protein, 10 aa, BK virus
FFYTKYSFSS

SEQ ID NO: 7366 - protein, 10 aa, BK virus
FYTKYSFSSF

SEQ ID NO: 7367 - protein, 10 aa, BK virus
YTKYSFSSFY

SEQ ID NO: 7368 - protein, 10 aa, BK virus
TKYSFSSFYP

SEQ ID NO: 7369 - protein, 10 aa, BK virus
KYSFSSFYPR

SEQ ID NO: 7370 - protein, 10 aa, BK virus
YSFSSFYPRR

SEQ ID NO: 7371 - protein, 10 aa, BK virus
SFSSFYPRRP

SEQ ID NO: 7372 - protein, 10 aa, BK virus
FSSFYPRRPL

SEQ ID NO: 7373 - protein, 10 aa, BK virus
SSFYPRRPLC

SEQ ID NO: 7374 - protein, 10 aa, BK virus
SFYPRRPLCQ

SEQ ID NO: 7375 - protein, 10 aa, BK virus
FYPRRPLCQG

SEQ ID NO: 7376 - protein, 10 aa, BK virus
YPRRPLCQGE

SEQ ID NO: 7377 - protein, 10 aa, BK virus
PRRPLCQGEI

SEQ ID NO: 7378 - protein, 10 aa, BK virus
RRPLCQGEIP

SEQ ID NO: 7379 - protein, 10 aa, BK virus
RPLCQGEIPY

SEQ ID NO: 7380 - protein, 10 aa, BK virus
PLCQGEIPYT

SEQ ID NO: 7381 - protein, 10 aa, BK virus
LCQGEIPYTS

SEQ ID NO: 7382 - protein, 10 aa, BK virus
CQGEIPYTSL

SEQ ID NO: 7383 - protein, 10 aa, BK virus
QGEIPYTSLN

SEQ ID NO: 7384 - protein, 10 aa, BK virus
GEIPYTSLNK

SEQ ID NO: 7385 - protein, 10 aa, BK virus
EIPYTSLNKL

SEQ ID NO: 7386 - protein, 10 aa, BK virus
IPYTSLNKLF

SEQ ID NO: 7387 - protein, 10 aa, BK virus
PYTSLNKLFS

SEQ ID NO: 7388 - protein, 10 aa, BK virus
YTSLNKLFSL

SEQ ID NO: 7389 - protein, 10 aa, BK virus
TSLNKLFSLR

SEQ ID NO: 7390 - protein, 10 aa, BK virus
SLNKLFSLRE

SEQ ID NO: 7391 - protein, 10 aa, BK virus
LNKLFSLRED

SEQ ID NO: 7392 - protein, 10 aa, BK virus
NKLFSLREDF

SEQ ID NO: 7393 - protein, 10 aa, BK virus
KLFSLREDFP

SEQ ID NO: 7394 - protein, 10 aa, BK virus
LFSLREDFPR

SEQ ID NO: 7395 - protein, 10 aa, BK virus
FSLREDFPRQ

SEQ ID NO: 7396 - protein, 10 aa, BK virus
SLREDFPRQL

SEQ ID NO: 7397 - protein, 10 aa, BK virus
LREDFPRQLF

SEQ ID NO: 7398 - protein, 10 aa, BK virus
REDFPRQLFQ

SEQ ID NO: 7399 - protein, 10 aa, BK virus
EDFPRQLFQG

SEQ ID NO: 7400 - protein, 10 aa, BK virus
DFPRQLFQGL

SEQ ID NO: 7401 - protein, 10 aa, BK virus
FPRQLFQGLK

SEQ ID NO: 7402 - protein, 10 aa, BK virus
PRQLFQGLKG

SEQ ID NO: 7403 - protein, 10 aa, BK virus
RQLFQGLKGP

SEQ ID NO: 7404 - protein, 11 aa, BK virus
GFPQIVLLGLR

SEQ ID NO: 7405 - protein, 11 aa, BK virus
FPQIVLLGLRK

SEQ ID NO: 7406 - protein, 11 aa, BK virus
PQIVLLGLRKS

SEQ ID NO: 7407 - protein, 11 aa, BK virus
QIVLLGLRKSL

SEQ ID NO: 7408 - protein, 11 aa, BK virus
IVLLGLRKSLH

SEQ ID NO: 7409 - protein, 11 aa, BK virus
VLLGLRKSLHT

SEQ ID NO: 7410 - protein, 11 aa, BK virus
LLGLRKSLHTL

SEQ ID NO: 7411 - protein, 11 aa, BK virus
LGLRKSLHTLT

SEQ ID NO: 7412 - protein, 11 aa, BK virus
GLRKSLHTLTT

SEQ ID NO: 7413 - protein, 11 aa, BK virus
EKGWRQRRPRP

SEQ ID NO: 7414 - protein, 11 aa, BK virus
KGWRQRRPRPL

SEQ ID NO: 7415 - protein, 11 aa, BK virus
GWRQRRPRPLI

SEQ ID NO: 7416 - protein, 11 aa, BK virus
WRQRRPRPLIY

SEQ ID NO: 7417 - protein, 11 aa, BK virus
RQRRPRPLIYY

SEQ ID NO: 7418 - protein, 11 aa, BK virus
QRRPRPLIYYK

SEQ ID NO: 7419 - protein, 11 aa, BK virus
RRPRPLIYYKK

SEQ ID NO: 7420 - protein, 11 aa, BK virus
RPRPLIYYKKK

SEQ ID NO: 7421 - protein, 11 aa, BK virus
PRPLIYYKKKG

SEQ ID NO: 7422 - protein, 11 aa, BK virus
RPLIYYKKKGH

SEQ ID NO: 7423 - protein, 11 aa, BK virus
PLIYYKKKGHR

SEQ ID NO: 7424 - protein, 11 aa, BK virus
LIYYKKKGHRE

SEQ ID NO: 7425 - protein, 11 aa, BK virus
IYYKKKGHREE

SEQ ID NO: 7426 - protein, 11 aa, BK virus
YYKKKGHREEL

SEQ ID NO: 7427 - protein, 11 aa, BK virus
YKKKGHREELL

SEQ ID NO: 7428 - protein, 11 aa, BK virus
KKKGHREELLT

SEQ ID NO: 7429 - protein, 11 aa, BK virus
KKGHREELLTH

SEQ ID NO: 7430 - protein, 11 aa, BK virus
KGHREELLTHG

SEQ ID NO: 7431 - protein, 11 aa, BK virus
GHREELLTHGM

SEQ ID NO: 7432 - protein, 11 aa, BK virus
HREELLTHGMQ

SEQ ID NO: 7433 - protein, 11 aa, BK virus
REELLTHGMQP

SEQ ID NO: 7434 - protein, 11 aa, BK virus
EELLTHGMQPN

SEQ ID NO: 7435 - protein, 11 aa, BK virus
ELLTHGMQPNH

SEQ ID NO: 7436 - protein, 11 aa, BK virus
LLTHGMQPNHD

SEQ ID NO: 7437 - protein, 11 aa, BK virus
LTHGMQPNHDL

SEQ ID NO: 7438 - protein, 11 aa, BK virus
THGMQPNHDLR

SEQ ID NO: 7439 - protein, 11 aa, BK virus
HGMQPNHDLRK

SEQ ID NO: 7440 - protein, 11 aa, BK virus
GMQPNHDLRKE

SEQ ID NO: 7441 - protein, 11 aa, BK virus
MQPNHDLRKES

SEQ ID NO: 7442 - protein, 11 aa, BK virus
QPNHDLRKESA

SEQ ID NO: 7443 - protein, 11 aa, BK virus
LTGECSQTMTS

SEQ ID NO: 7444 - protein, 11 aa, BK virus
TGECSQTMTSG

SEQ ID NO: 7445 - protein, 11 aa, BK virus
GECSQTMTSGR

SEQ ID NO: 7446 - protein, 11 aa, BK virus
ECSQTMTSGRK

SEQ ID NO: 7447 - protein, 11 aa, BK virus
CSQTMTSGRKV

SEQ ID NO: 7448 - protein, 11 aa, BK virus
SQTMTSGRKVH

SEQ ID NO: 7449 - protein, 11 aa, BK virus
QTMTSGRKVHD

SEQ ID NO: 7450 - protein, 11 aa, BK virus
TMTSGRKVHDS

SEQ ID NO: 7451 - protein, 11 aa, BK virus
MTSGRKVHDSQ

SEQ ID NO: 7452 - protein, 11 aa, BK virus
TSGRKVHDSQG

SEQ ID NO: 7453 - protein, 11 aa, BK virus
SGRKVHDSQGG

SEQ ID NO: 7454 - protein, 11 aa, BK virus
GRKVHDSQGGA

SEQ ID NO: 7455 - protein, 11 aa, BK virus
RKVHDSQGGAA

SEQ ID NO: 7456 - protein, 11 aa, BK virus
KVHDSQGGAAY

SEQ ID NO: 7457 - protein, 11 aa, BK virus
VHDSQGGAAYP

SEQ ID NO: 7458 - protein, 11 aa, BK virus
HDSQGGAAYPW

SEQ ID NO: 7459 - protein, 11 aa, BK virus
DSQGGAAYPWN

SEQ ID NO: 7460 - protein, 11 aa, BK virus
SQGGAAYPWNA

SEQ ID NO: 7461 - protein, 11 aa, BK virus
QGGAAYPWNAA

SEQ ID NO: 7462 - protein, 11 aa, BK virus
GGAAYPWNAAK

SEQ ID NO: 7463 - protein, 11 aa, BK virus
GAAYPWNAAKP

SEQ ID NO: 7464 - protein, 11 aa, BK virus
PQEGKCMTDMF

SEQ ID NO: 7465 - protein, 11 aa, BK virus
QEGKCMTDMFC

SEQ ID NO: 7466 - protein, 11 aa, BK virus
EGKCMTDMFCE

SEQ ID NO: 7467 - protein, 11 aa, BK virus
GKCMTDMFCEP

SEQ ID NO: 7468 - protein, 11 aa, BK virus
KCMTDMFCEPR

SEQ ID NO: 7469 - protein, 11 aa, BK virus
CMTDMFCEPRN

SEQ ID NO: 7470 - protein, 11 aa, BK virus
MTDMFCEPRNL

SEQ ID NO: 7471 - protein, 11 aa, BK virus
TDMFCEPRNLG

SEQ ID NO: 7472 - protein, 11 aa, BK virus
DMFCEPRNLGL

SEQ ID NO: 7473 - protein, 11 aa, BK virus
MFCEPRNLGLV

SEQ ID NO: 7474 - protein, 11 aa, BK virus
FCEPRNLGLVP

SEQ ID NO: 7475 - protein, 11 aa, BK virus
CEPRNLGLVPS

SEQ ID NO: 7476 - protein, 11 aa, BK virus
TGQRPWFCASC

SEQ ID NO: 7477 - protein, 11 aa, BK virus
GQRPWFCASCH

SEQ ID NO: 7478 - protein, 11 aa, BK virus
QRPWFCASCHD

SEQ ID NO: 7479 - protein, 11 aa, BK virus
RPWFCASCHDK

SEQ ID NO: 7480 - protein, 11 aa, BK virus
PWFCASCHDKL

SEQ ID NO: 7481 - protein, 11 aa, BK virus
WFCASCHDKLQ

SEQ ID NO: 7482 - protein, 11 aa, BK virus
KLVKPGLEQKK

SEQ ID NO: 7483 - protein, 11 aa, BK virus
LVKPGLEQKKE

SEQ ID NO: 7484 - protein, 11 aa, BK virus
VKPGLEQKKEL

SEQ ID NO: 7485 - protein, 11 aa, BK virus
KPGLEQKKELR

SEQ ID NO: 7486 - protein, 11 aa, BK virus
PGLEQKKELRG

SEQ ID NO: 7487 - protein, 11 aa, BK virus
GLEQKKELRGF

SEQ ID NO: 7488 - protein, 11 aa, BK virus
LEQKKELRGFL

SEQ ID NO: 7489 - protein, 11 aa, BK virus
EQKKELRGFLF

SEQ ID NO: 7490 - protein, 11 aa, BK virus
QKKELRGFLFL

SEQ ID NO: 7491 - protein, 11 aa, BK virus
KKELRGFLFLF

SEQ ID NO: 7492 - protein, 11 aa, BK virus
SFCWNFVEVKT

SEQ ID NO: 7493 - protein, 11 aa, BK virus
FCWNFVEVKTV

SEQ ID NO: 7494 - protein, 11 aa, BK virus
TGKTKVPLLYL

SEQ ID NO: 7495 - protein, 11 aa, BK virus
GKTKVPLLYLL

SEQ ID NO: 7496 - protein, 11 aa, BK virus
VIPFFLYFQVH

SEQ ID NO: 7497 - protein, 11 aa, BK virus
IPFFLYFQVHG

SEQ ID NO: 7498 - protein, 11 aa, BK virus
PFFLYFQVHGC

SEQ ID NO: 7499 - protein, 11 aa, BK virus
FFLYFQVHGCC

SEQ ID NO: 7500 - protein, 11 aa, BK virus
FLYFQVHGCCS

SEQ ID NO: 7501 - protein, 11 aa, BK virus
LYFQVHGCCSS

SEQ ID NO: 7502 - protein, 11 aa, BK virus
YFQVHGCCSST

SEQ ID NO: 7503 - protein, 11 aa, BK virus
FQVHGCCSSTF

SEQ ID NO: 7504 - protein, 11 aa, BK virus
QVHGCCSSTFG

SEQ ID NO: 7505 - protein, 11 aa, BK virus
VHGCCSSTFGG

SEQ ID NO: 7506 - protein, 11 aa, BK virus
HGCCSSTFGGP

SEQ ID NO: 7507 - protein, 11 aa, BK virus
GCCSSTFGGPS

SEQ ID NO: 7508 - protein, 11 aa, BK virus
CCSSTFGGPSC

SEQ ID NO: 7509 - protein, 11 aa, BK virus
CSSTFGGPSCQ

SEQ ID NO: 7510 - protein, 11 aa, BK virus
SSTFGGPSCQC

SEQ ID NO: 7511 - protein, 11 aa, BK virus
STFGGPSCQCI

SEQ ID NO: 7512 - protein, 11 aa, BK virus
NCCWGGCCCYR

SEQ ID NO: 7513 - protein, 11 aa, BK virus
CCWGGCCCYRS

SEQ ID NO: 7514 - protein, 11 aa, BK virus
CWGGCCCYRSS

SEQ ID NO: 7515 - protein, 11 aa, BK virus
WGGCCCYRSSN

SEQ ID NO: 7516 - protein, 11 aa, BK virus
GGCCCYRSSNC

SEQ ID NO: 7517 - protein, 11 aa, BK virus
GCCCYRSSNCI

SEQ ID NO: 7518 - protein, 11 aa, BK virus
CCCYRSSNCIP

SEQ ID NO: 7519 - protein, 11 aa, BK virus
CCYRSSNCIPC

SEQ ID NO: 7520 - protein, 11 aa, BK virus
CYRSSNCIPCY

SEQ ID NO: 7521 - protein, 11 aa, BK virus
YRSSNCIPCYC

SEQ ID NO: 7522 - protein, 11 aa, BK virus
RSSNCIPCYCR

SEQ ID NO: 7523 - protein, 11 aa, BK virus
SSNCIPCYCRG

SEQ ID NO: 7524 - protein, 11 aa, BK virus
SNCIPCYCRGH

SEQ ID NO: 7525 - protein, 11 aa, BK virus
NCIPCYCRGHN

SEQ ID NO: 7526 - protein, 11 aa, BK virus
CIPCYCRGHNK

SEQ ID NO: 7527 - protein, 11 aa, BK virus
IPCYCRGHNKY

SEQ ID NO: 7528 - protein, 11 aa, BK virus
PCYCRGHNKYL

SEQ ID NO: 7529 - protein, 11 aa, BK virus
CYCRGHNKYLR

SEQ ID NO: 7530 - protein, 11 aa, BK virus
YCRGHNKYLRG

SEQ ID NO: 7531 - protein, 11 aa, BK virus
CRGHNKYLRGY

SEQ ID NO: 7532 - protein, 11 aa, BK virus
RGHNKYLRGYS

SEQ ID NO: 7533 - protein, 11 aa, BK virus
GHNKYLRGYSC

SEQ ID NO: 7534 - protein, 11 aa, BK virus
HNKYLRGYSCY

SEQ ID NO: 7535 - protein, 11 aa, BK virus
NKYLRGYSCYR

SEQ ID NO: 7536 - protein, 11 aa, BK virus
KYLRGYSCYRP

SEQ ID NO: 7537 - protein, 11 aa, BK virus
YLRGYSCYRPN

SEQ ID NO: 7538 - protein, 11 aa, BK virus
LRGYSCYRPNS

SEQ ID NO: 7539 - protein, 11 aa, BK virus
RGYSCYRPNSS

SEQ ID NO: 7540 - protein, 11 aa, BK virus
GYSCYRPNSSN

SEQ ID NO: 7541 - protein, 11 aa, BK virus
YSCYRPNSSNI

SEQ ID NO: 7542 - protein, 11 aa, BK virus
SCYRPNSSNIC

SEQ ID NO: 7543 - protein, 11 aa, BK virus
CYRPNSSNICC

SEQ ID NO: 7544 - protein, 11 aa, BK virus
YRPNSSNICCN

SEQ ID NO: 7545 - protein, 11 aa, BK virus
RPNSSNICCNC

SEQ ID NO: 7546 - protein, 11 aa, BK virus
PNSSNICCNCW

SEQ ID NO: 7547 - protein, 11 aa, BK virus
NSSNICCNCWC

SEQ ID NO: 7548 - protein, 11 aa, BK virus
SSNICCNCWCS

SEQ ID NO: 7549 - protein, 11 aa, BK virus
SNICCNCWCSW

SEQ ID NO: 7550 - protein, 11 aa, BK virus
NICCNCWCSWG

SEQ ID NO: 7551 - protein, 11 aa, BK virus
ICCNCWCSWGY

SEQ ID NO: 7552 - protein, 11 aa, BK virus
CCNCWCSWGYC

SEQ ID NO: 7553 - protein, 11 aa, BK virus
CNCWCSWGYCW

SEQ ID NO: 7554 - protein, 11 aa, BK virus
NCWCSWGYCWV

SEQ ID NO: 7555 - protein, 11 aa, BK virus
CWCSWGYCWVC

SEQ ID NO: 7556 - protein, 11 aa, BK virus
WCSWGYCWVCC

SEQ ID NO: 7557 - protein, 11 aa, BK virus
CSWGYCWVCCF

SEQ ID NO: 7558 - protein, 11 aa, BK virus
SWGYCWVCCFN

SEQ ID NO: 7559 - protein, 11 aa, BK virus
WGYCWVCCFNS

SEQ ID NO: 7560 - protein, 11 aa, BK virus
GYCWVCCFNSN

SEQ ID NO: 7561 - protein, 11 aa, BK virus
YCWVCCFNSNC

SEQ ID NO: 7562 - protein, 11 aa, BK virus
LGSQSFHCRPL

SEQ ID NO: 7563 - protein, 11 aa, BK virus
GSQSFHCRPLS

SEQ ID NO: 7564 - protein, 11 aa, BK virus
SQSFHCRPLSA

SEQ ID NO: 7565 - protein, 11 aa, BK virus
QSFHCRPLSAI

SEQ ID NO: 7566 - protein, 11 aa, BK virus
SFHCRPLSAIR

SEQ ID NO: 7567 - protein, 11 aa, BK virus
FHCRPLSAIRH

SEQ ID NO: 7568 - protein, 11 aa, BK virus
HCRPLSAIRHG

SEQ ID NO: 7569 - protein, 11 aa, BK virus
CRPLSAIRHGF

SEQ ID NO: 7570 - protein, 11 aa, BK virus
RPLSAIRHGFG

SEQ ID NO: 7571 - protein, 11 aa, BK virus
PLSAIRHGFGI

SEQ ID NO: 7572 - protein, 11 aa, BK virus
LSAIRHGFGIV

SEQ ID NO: 7573 - protein, 11 aa, BK virus
ALGSFFVCYYF

SEQ ID NO: 7574 - protein, 11 aa, BK virus
LGSFFVCYYFP

SEQ ID NO: 7575 - protein, 11 aa, BK virus
GSFFVCYYFPG

SEQ ID NO: 7576 - protein, 11 aa, BK virus
SFFVCYYFPGF

SEQ ID NO: 7577 - protein, 11 aa, BK virus
FFVCYYFPGFV

SEQ ID NO: 7578 - protein, 11 aa, BK virus
FVCYYFPGFVA

SEQ ID NO: 7579 - protein, 11 aa, BK virus
VCYYFPGFVAC

SEQ ID NO: 7580 - protein, 11 aa, BK virus
CYYFPGFVACY

SEQ ID NO: 7581 - protein, 11 aa, BK virus
YTFYNLTGIAE

SEQ ID NO: 7582 - protein, 11 aa, BK virus
TFYNLTGIAEK

SEQ ID NO: 7583 - protein, 11 aa, BK virus
FYNLTGIAEKN

SEQ ID NO: 7584 - protein, 11 aa, BK virus
YNLTGIAEKNR

SEQ ID NO: 7585 - protein, 11 aa, BK virus
NLTGIAEKNRK

SEQ ID NO: 7586 - protein, 11 aa, BK virus
LTGIAEKNRKI

SEQ ID NO: 7587 - protein, 11 aa, BK virus
TGIAEKNRKIF

SEQ ID NO: 7588 - protein, 11 aa, BK virus
IFGGNYLDNCK

SEQ ID NO: 7589 - protein, 11 aa, BK virus
FGGNYLDNCKC

SEQ ID NO: 7590 - protein, 11 aa, BK virus
GGNYLDNCKCP

SEQ ID NO: 7591 - protein, 11 aa, BK virus
GNYLDNCKCPY

SEQ ID NO: 7592 - protein, 11 aa, BK virus
NYLDNCKCPYK

SEQ ID NO: 7593 - protein, 11 aa, BK virus
YLDNCKCPYKL

SEQ ID NO: 7594 - protein, 11 aa, BK virus
LDNCKCPYKLL

SEQ ID NO: 7595 - protein, 11 aa, BK virus
KGRYPCTFWPY

SEQ ID NO: 7596 - protein, 11 aa, BK virus
GRYPCTFWPYL

SEQ ID NO: 7597 - protein, 11 aa, BK virus
QYRRSYTKNGL

SEQ ID NO: 7598 - protein, 11 aa, BK virus
YRRSYTKNGLK

SEQ ID NO: 7599 - protein, 11 aa, BK virus
RRSYTKNGLKK

SEQ ID NO: 7600 - protein, 11 aa, BK virus
RSYTKNGLKKS

SEQ ID NO: 7601 - protein, 11 aa, BK virus
SYTKNGLKKST

SEQ ID NO: 7602 - protein, 11 aa, BK virus
YTKNGLKKSTK

SEQ ID NO: 7603 - protein, 11 aa, BK virus
TKNGLKKSTKC

SEQ ID NO: 7604 - protein, 11 aa, BK virus
KNGLKKSTKCT

SEQ ID NO: 7605 - protein, 11 aa, BK virus
NGLKKSTKCTF

SEQ ID NO: 7606 - protein, 11 aa, BK virus
GLKKSTKCTFR

SEQ ID NO: 7607 - protein, 11 aa, BK virus
LKKSTKCTFRR

SEQ ID NO: 7608 - protein, 11 aa, BK virus
KKSTKCTFRRV

SEQ ID NO: 7609 - protein, 11 aa, BK virus
KSTKCTFRRVY

SEQ ID NO: 7610 - protein, 11 aa, BK virus
STKCTFRRVYR

SEQ ID NO: 7611 - protein, 11 aa, BK virus
TKCTFRRVYRK

SEQ ID NO: 7612 - protein, 11 aa, BK virus
KCTFRRVYRKN

SEQ ID NO: 7613 - protein, 11 aa, BK virus
CTFRRVYRKNY

SEQ ID NO: 7614 - protein, 11 aa, BK virus
TFRRVYRKNYC

SEQ ID NO: 7615 - protein, 11 aa, BK virus
FRRVYRKNYCP

SEQ ID NO: 7616 - protein, 11 aa, BK virus
RRVYRKNYCPR

SEQ ID NO: 7617 - protein, 11 aa, BK virus
RVYRKNYCPRR

SEQ ID NO: 7618 - protein, 11 aa, BK virus
VYRKNYCPRRC

SEQ ID NO: 7619 - protein, 11 aa, BK virus
SKNCSSMDVAF

SEQ ID NO: 7620 - protein, 11 aa, BK virus
KNCSSMDVAFT

SEQ ID NO: 7621 - protein, 11 aa, BK virus
NCSSMDVAFTS

SEQ ID NO: 7622 - protein, 11 aa, BK virus
CSSMDVAFTSR

SEQ ID NO: 7623 - protein, 11 aa, BK virus
SSMDVAFTSRP

SEQ ID NO: 7624 - protein, 11 aa, BK virus
SMDVAFTSRPV

SEQ ID NO: 7625 - protein, 11 aa, BK virus
MDVAFTSRPVR

SEQ ID NO: 7626 - protein, 11 aa, BK virus
DVAFTSRPVRD

SEQ ID NO: 7627 - protein, 11 aa, BK virus
VAFTSRPVRDC

SEQ ID NO: 7628 - protein, 11 aa, BK virus
AFTSRPVRDCN

SEQ ID NO: 7629 - protein, 11 aa, BK virus
FTSRPVRDCNT

SEQ ID NO: 7630 - protein, 11 aa, BK virus
TSRPVRDCNTC

SEQ ID NO: 7631 - protein, 11 aa, BK virus
SRPVRDCNTCS

SEQ ID NO: 7632 - protein, 11 aa, BK virus
RWPQPKEKESV

SEQ ID NO: 7633 - protein, 11 aa, BK virus
WPQPKEKESVQ

SEQ ID NO: 7634 - protein, 11 aa, BK virus
PQPKEKESVQG

SEQ ID NO: 7635 - protein, 11 aa, BK virus
QPKEKESVQGQ

SEQ ID NO: 7636 - protein, 11 aa, BK virus
PKEKESVQGQL

SEQ ID NO: 7637 - protein, 11 aa, BK virus
KEKESVQGQLP

SEQ ID NO: 7638 - protein, 11 aa, BK virus
EKESVQGQLPK

SEQ ID NO: 7639 - protein, 11 aa, BK virus
KESVQGQLPKS

SEQ ID NO: 7640 - protein, 11 aa, BK virus
ESVQGQLPKSQ

SEQ ID NO: 7641 - protein, 11 aa, BK virus
SVQGQLPKSQR

SEQ ID NO: 7642 - protein, 11 aa, BK virus
VQGQLPKSQRN

SEQ ID NO: 7643 - protein, 11 aa, BK virus
QGQLPKSQRNP

SEQ ID NO: 7644 - protein, 11 aa, BK virus
GQLPKSQRNPC

SEQ ID NO: 7645 - protein, 11 aa, BK virus
QLPKSQRNPCK

SEQ ID NO: 7646 - protein, 11 aa, BK virus
LPKSQRNPCKC

SEQ ID NO: 7647 - protein, 11 aa, BK virus
PKSQRNPCKCQ

SEQ ID NO: 7648 - protein, 11 aa, BK virus
KSQRNPCKCQN

SEQ ID NO: 7649 - protein, 11 aa, BK virus
SQRNPCKCQNY

SEQ ID NO: 7650 - protein, 11 aa, BK virus
TQKWGIQMKTL

SEQ ID NO: 7651 - protein, 11 aa, BK virus
QKWGIQMKTLG

SEQ ID NO: 7652 - protein, 11 aa, BK virus
KWGIQMKTLGA

SEQ ID NO: 7653 - protein, 11 aa, BK virus
WGIQMKTLGAL

SEQ ID NO: 7654 - protein, 11 aa, BK virus
GIQMKTLGALV

SEQ ID NO: 7655 - protein, 11 aa, BK virus
VLKMTLAVIAQ

SEQ ID NO: 7656 - protein, 11 aa, BK virus
LKMTLAVIAQR

SEQ ID NO: 7657 - protein, 11 aa, BK virus
KMTLAVIAQRE

SEQ ID NO: 7658 - protein, 11 aa, BK virus
MTLAVIAQREK

SEQ ID NO: 7659 - protein, 11 aa, BK virus
TLAVIAQREKC

SEQ ID NO: 7660 - protein, 11 aa, BK virus
LAVIAQREKCF

SEQ ID NO: 7661 - protein, 11 aa, BK virus
AVIAQREKCFP

SEQ ID NO: 7662 - protein, 11 aa, BK virus
VIAQREKCFPV

SEQ ID NO: 7663 - protein, 11 aa, BK virus
IAQREKCFPVT

SEQ ID NO: 7664 - protein, 11 aa, BK virus
AQREKCFPVTA

SEQ ID NO: 7665 - protein, 11 aa, BK virus
QREKCFPVTAQ

SEQ ID NO: 7666 - protein, 11 aa, BK virus
REKCFPVTAQQ

SEQ ID NO: 7667 - protein, 11 aa, BK virus
EKCFPVTAQQE

SEQ ID NO: 7668 - protein, 11 aa, BK virus
KCFPVTAQQEF

SEQ ID NO: 7669 - protein, 11 aa, BK virus
CFPVTAQQEFP

SEQ ID NO: 7670 - protein, 11 aa, BK virus
FPVTAQQEFPS

SEQ ID NO: 7671 - protein, 11 aa, BK virus
PVTAQQEFPSP

SEQ ID NO: 7672 - protein, 11 aa, BK virus
VTAQQEFPSPI

SEQ ID NO: 7673 - protein, 11 aa, BK virus
LACLTFMQGHK

SEQ ID NO: 7674 - protein, 11 aa, BK virus
ACLTFMQGHKK

SEQ ID NO: 7675 - protein, 11 aa, BK virus
CLTFMQGHKKC

SEQ ID NO: 7676 - protein, 11 aa, BK virus
LTFMQGHKKCM

SEQ ID NO: 7677 - protein, 11 aa, BK virus
TFMQGHKKCMS

SEQ ID NO: 7678 - protein, 11 aa, BK virus
FMQGHKKCMSM

SEQ ID NO: 7679 - protein, 11 aa, BK virus
MQGHKKCMSMV

SEQ ID NO: 7680 - protein, 11 aa, BK virus
QGHKKCMSMVE

SEQ ID NO: 7681 - protein, 11 aa, BK virus
GHKKCMSMVEE

SEQ ID NO: 7682 - protein, 11 aa, BK virus
HKKCMSMVEEN

SEQ ID NO: 7683 - protein, 11 aa, BK virus
KKCMSMVEENL

SEQ ID NO: 7684 - protein, 11 aa, BK virus
KCMSMVEENLF

SEQ ID NO: 7685 - protein, 11 aa, BK virus
CMSMVEENLFK

SEQ ID NO: 7686 - protein, 11 aa, BK virus
MSMVEENLFKA

SEQ ID NO: 7687 - protein, 11 aa, BK virus
SMVEENLFKAV

SEQ ID NO: 7688 - protein, 11 aa, BK virus
MVEENLFKAVI

SEQ ID NO: 7689 - protein, 11 aa, BK virus
VEENLFKAVIS

SEQ ID NO: 7690 - protein, 11 aa, BK virus
EENLFKAVIST

SEQ ID NO: 7691 - protein, 11 aa, BK virus
ENLFKAVISTS

SEQ ID NO: 7692 - protein, 11 aa, BK virus
NLFKAVISTSL

SEQ ID NO: 7693 - protein, 11 aa, BK virus
LFKAVISTSLL

SEQ ID NO: 7694 - protein, 11 aa, BK virus
ILTIRPIWTKT

SEQ ID NO: 7695 - protein, 11 aa, BK virus
LTIRPIWTKTM

SEQ ID NO: 7696 - protein, 11 aa, BK virus
TIRPIWTKTML

SEQ ID NO: 7697 - protein, 11 aa, BK virus
IRPIWTKTMLI

SEQ ID NO: 7698 - protein, 11 aa, BK virus
RPIWTKTMLIQ

SEQ ID NO: 7699 - protein, 11 aa, BK virus
PIWTKTMLIQL

SEQ ID NO: 7700 - protein, 11 aa, BK virus
IWTKTMLIQLS

SEQ ID NO: 7701 - protein, 11 aa, BK virus
WTKTMLIQLSA

SEQ ID NO: 7702 - protein, 11 aa, BK virus
TKTMLIQLSAG

SEQ ID NO: 7703 - protein, 11 aa, BK virus
KTMLIQLSAGY

SEQ ID NO: 7704 - protein, 11 aa, BK virus
TMLIQLSAGYL

SEQ ID NO: 7705 - protein, 11 aa, BK virus
MLIQLSAGYLI

SEQ ID NO: 7706 - protein, 11 aa, BK virus
LIQLSAGYLIP

SEQ ID NO: 7707 - protein, 11 aa, BK virus
IQLSAGYLIPV

SEQ ID NO: 7708 - protein, 11 aa, BK virus
QLSAGYLIPVE

SEQ ID NO: 7709 - protein, 11 aa, BK virus
LSAGYLIPVEM

SEQ ID NO: 7710 - protein, 11 aa, BK virus
SAGYLIPVEMK

SEQ ID NO: 7711 - protein, 11 aa, BK virus
AGYLIPVEMKM

SEQ ID NO: 7712 - protein, 11 aa, BK virus
GYLIPVEMKML

SEQ ID NO: 7713 - protein, 11 aa, BK virus
YLIPVEMKMLG

SEQ ID NO: 7714 - protein, 11 aa, BK virus
LIPVEMKMLGI

SEQ ID NO: 7715 - protein, 11 aa, BK virus
IPVEMKMLGIL

SEQ ID NO: 7716 - protein, 11 aa, BK virus
PVEMKMLGILG

SEQ ID NO: 7717 - protein, 11 aa, BK virus
VEMKMLGILGL

SEQ ID NO: 7718 - protein, 11 aa, BK virus
EMKMLGILGLS

SEQ ID NO: 7719 - protein, 11 aa, BK virus
MKMLGILGLSQ

SEQ ID NO: 7720 - protein, 11 aa, BK virus
KMLGILGLSQE

SEQ ID NO: 7721 - protein, 11 aa, BK virus
MLGILGLSQEG

SEQ ID NO: 7722 - protein, 11 aa, BK virus
LGILGLSQEGK

SEQ ID NO: 7723 - protein, 11 aa, BK virus
GILGLSQEGKM

SEQ ID NO: 7724 - protein, 11 aa, BK virus
ILGLSQEGKMF

SEQ ID NO: 7725 - protein, 11 aa, BK virus
LGLSQEGKMFP

SEQ ID NO: 7726 - protein, 11 aa, BK virus
GLSQEGKMFPQ

SEQ ID NO: 7727 - protein, 11 aa, BK virus
LSQEGKMFPQY

SEQ ID NO: 7728 - protein, 11 aa, BK virus
SQEGKMFPQYF

SEQ ID NO: 7729 - protein, 11 aa, BK virus
QEGKMFPQYFM

SEQ ID NO: 7730 - protein, 11 aa, BK virus
MNRVWGLFVKL

SEQ ID NO: 7731 - protein, 11 aa, BK virus
NRVWGLFVKLI

SEQ ID NO: 7732 - protein, 11 aa, BK virus
RVWGLFVKLIA

SEQ ID NO: 7733 - protein, 11 aa, BK virus
VWGLFVKLIAC

SEQ ID NO: 7734 - protein, 11 aa, BK virus
WGLFVKLIACM

SEQ ID NO: 7735 - protein, 11 aa, BK virus
GLFVKLIACMF

SEQ ID NO: 7736 - protein, 11 aa, BK virus
LFVKLIACMFQ

SEQ ID NO: 7737 - protein, 11 aa, BK virus
FVKLIACMFQL

SEQ ID NO: 7738 - protein, 11 aa, BK virus
VKLIACMFQLL

SEQ ID NO: 7739 - protein, 11 aa, BK virus
KLIACMFQLLI

SEQ ID NO: 7740 - protein, 11 aa, BK virus
LIACMFQLLIF

SEQ ID NO: 7741 - protein, 11 aa, BK virus
IACMFQLLIFV

SEQ ID NO: 7742 - protein, 11 aa, BK virus
ACMFQLLIFVA

SEQ ID NO: 7743 - protein, 11 aa, BK virus
CMFQLLIFVAC

SEQ ID NO: 7744 - protein, 11 aa, BK virus
MFQLLIFVACL

SEQ ID NO: 7745 - protein, 11 aa, BK virus
FQLLIFVACLL

SEQ ID NO: 7746 - protein, 11 aa, BK virus
QLLIFVACLLT

SEQ ID NO: 7747 - protein, 11 aa, BK virus
LLIFVACLLTA

SEQ ID NO: 7748 - protein, 11 aa, BK virus
LIFVACLLTAL

SEQ ID NO: 7749 - protein, 11 aa, BK virus
IFVACLLTALE

SEQ ID NO: 7750 - protein, 11 aa, BK virus
FVACLLTALEH

SEQ ID NO: 7751 - protein, 11 aa, BK virus
VACLLTALEHN

SEQ ID NO: 7752 - protein, 11 aa, BK virus
ACLLTALEHNS

SEQ ID NO: 7753 - protein, 11 aa, BK virus
CLLTALEHNSG

SEQ ID NO: 7754 - protein, 11 aa, BK virus
LLTALEHNSGE

SEQ ID NO: 7755 - protein, 11 aa, BK virus
LTALEHNSGEA

SEQ ID NO: 7756 - protein, 11 aa, BK virus
TALEHNSGEAL

SEQ ID NO: 7757 - protein, 11 aa, BK virus
ALEHNSGEALQ

SEQ ID NO: 7758 - protein, 11 aa, BK virus
LEHNSGEALQD

SEQ ID NO: 7759 - protein, 11 aa, BK virus
EHNSGEALQDI

SEQ ID NO: 7760 - protein, 11 aa, BK virus
HNSGEALQDIL

SEQ ID NO: 7761 - protein, 11 aa, BK virus
NSGEALQDILR

SEQ ID NO: 7762 - protein, 11 aa, BK virus
SGEALQDILRS

SEQ ID NO: 7763 - protein, 11 aa, BK virus
GEALQDILRSA

SEQ ID NO: 7764 - protein, 11 aa, BK virus
TGEPREWMGSL

SEQ ID NO: 7765 - protein, 11 aa, BK virus
GEPREWMGSLC

SEQ ID NO: 7766 - protein, 11 aa, BK virus
EPREWMGSLCM

SEQ ID NO: 7767 - protein, 11 aa, BK virus
PREWMGSLCMV

SEQ ID NO: 7768 - protein, 11 aa, BK virus
REWMGSLCMVW

SEQ ID NO: 7769 - protein, 11 aa, BK virus
EWMGSLCMVWN

SEQ ID NO: 7770 - protein, 11 aa, BK virus
WMGSLCMVWNP

SEQ ID NO: 7771 - protein, 11 aa, BK virus
MGSLCMVWNPR

SEQ ID NO: 7772 - protein, 11 aa, BK virus
KRLGCLMAQKD

SEQ ID NO: 7773 - protein, 11 aa, BK virus
RLGCLMAQKDF

SEQ ID NO: 7774 - protein, 11 aa, BK virus
LGCLMAQKDFQ

SEQ ID NO: 7775 - protein, 11 aa, BK virus
GCLMAQKDFQG

SEQ ID NO: 7776 - protein, 11 aa, BK virus
CLMAQKDFQGT

SEQ ID NO: 7777 - protein, 11 aa, BK virus
LMAQKDFQGTQ

SEQ ID NO: 7778 - protein, 11 aa, BK virus
MAQKDFQGTQI

SEQ ID NO: 7779 - protein, 11 aa, BK virus
DILTNRDNCKP

SEQ ID NO: 7780 - protein, 11 aa, BK virus
ILTNRDNCKPK

SEQ ID NO: 7781 - protein, 11 aa, BK virus
LTNRDNCKPKC

SEQ ID NO: 7782 - protein, 11 aa, BK virus
TNRDNCKPKCF

SEQ ID NO: 7783 - protein, 11 aa, BK virus
NRDNCKPKCFK

SEQ ID NO: 7784 - protein, 11 aa, BK virus
RDNCKPKCFKQ

SEQ ID NO: 7785 - protein, 11 aa, BK virus
DNCKPKCFKQV

SEQ ID NO: 7786 - protein, 11 aa, BK virus
NCKPKCFKQVL

SEQ ID NO: 7787 - protein, 11 aa, BK virus
CKPKCFKQVLL

SEQ ID NO: 7788 - protein, 11 aa, BK virus
KPKCFKQVLLL

SEQ ID NO: 7789 - protein, 11 aa, BK virus
PKCFKQVLLLY

SEQ ID NO: 7790 - protein, 11 aa, BK virus
KCFKQVLLLYI

SEQ ID NO: 7791 - protein, 11 aa, BK virus
CFKQVLLLYIY

SEQ ID NO: 7792 - protein, 11 aa, BK virus
FKQVLLLYIYI

SEQ ID NO: 7793 - protein, 11 aa, BK virus
MLLLYKPLLSL

SEQ ID NO: 7794 - protein, 11 aa, BK virus
LLLYKPLLSLC

SEQ ID NO: 7795 - protein, 11 aa, BK virus
LLYKPLLSLCY

SEQ ID NO: 7796 - protein, 11 aa, BK virus
LYKPLLSLCYF

SEQ ID NO: 7797 - protein, 11 aa, BK virus
YKPLLSLCYFG

SEQ ID NO: 7798 - protein, 11 aa, BK virus
KPLLSLCYFGG

SEQ ID NO: 7799 - protein, 11 aa, BK virus
PLLSLCYFGGG

SEQ ID NO: 7800 - protein, 11 aa, BK virus
LLSLCYFGGGV

SEQ ID NO: 7801 - protein, 11 aa, BK virus
LSLCYFGGGVL

SEQ ID NO: 7802 - protein, 11 aa, BK virus
SLCYFGGGVLG

SEQ ID NO: 7803 - protein, 11 aa, BK virus
LCYFGGGVLGL

SEQ ID NO: 7804 - protein, 11 aa, BK virus
CYFGGGVLGLL

SEQ ID NO: 7805 - protein, 11 aa, BK virus
YFGGGVLGLLK

SEQ ID NO: 7806 - protein, 11 aa, BK virus
FGGGVLGLLKH

SEQ ID NO: 7807 - protein, 11 aa, BK virus
LWGSDLWESSA

SEQ ID NO: 7808 - protein, 11 aa, BK virus
WGSDLWESSAG

SEQ ID NO: 7809 - protein, 11 aa, BK virus
GSDLWESSAGA

SEQ ID NO: 7810 - protein, 11 aa, BK virus
SDLWESSAGAE

SEQ ID NO: 7811 - protein, 11 aa, BK virus
DLWESSAGAEV

SEQ ID NO: 7812 - protein, 11 aa, BK virus
LWESSAGAEVS

SEQ ID NO: 7813 - protein, 11 aa, BK virus
WESSAGAEVSE

SEQ ID NO: 7814 - protein, 11 aa, BK virus
ESSAGAEVSET

SEQ ID NO: 7815 - protein, 11 aa, BK virus
SSAGAEVSETW

SEQ ID NO: 7816 - protein, 11 aa, BK virus
SAGAEVSETWE

SEQ ID NO: 7817 - protein, 11 aa, BK virus
AGAEVSETWEE

SEQ ID NO: 7818 - protein, 11 aa, BK virus
GAEVSETWEEH

SEQ ID NO: 7819 - protein, 11 aa, BK virus
AEVSETWEEHC

SEQ ID NO: 7820 - protein, 11 aa, BK virus
EVSETWEEHCD

SEQ ID NO: 7821 - protein, 11 aa, BK virus
VSETWEEHCDW

SEQ ID NO: 7822 - protein, 11 aa, BK virus
SETWEEHCDWD

SEQ ID NO: 7823 - protein, 11 aa, BK virus
ETWEEHCDWDS

SEQ ID NO: 7824 - protein, 11 aa, BK virus
TWEEHCDWDSV

SEQ ID NO: 7825 - protein, 11 aa, BK virus
WEEHCDWDSVL

SEQ ID NO: 7826 - protein, 11 aa, BK virus
EEHCDWDSVLD

SEQ ID NO: 7827 - protein, 11 aa, BK virus
EHCDWDSVLDP

SEQ ID NO: 7828 - protein, 11 aa, BK virus
HCDWDSVLDPC

SEQ ID NO: 7829 - protein, 11 aa, BK virus
CDWDSVLDPCP

SEQ ID NO: 7830 - protein, 11 aa, BK virus
DWDSVLDPCPE

SEQ ID NO: 7831 - protein, 11 aa, BK virus
WDSVLDPCPES

SEQ ID NO: 7832 - protein, 11 aa, BK virus
DSVLDPCPESS

SEQ ID NO: 7833 - protein, 11 aa, BK virus
SVLDPCPESSV

SEQ ID NO: 7834 - protein, 11 aa, BK virus
VLDPCPESSVS

SEQ ID NO: 7835 - protein, 11 aa, BK virus
LDPCPESSVSE

SEQ ID NO: 7836 - protein, 11 aa, BK virus
DPCPESSVSES

SEQ ID NO: 7837 - protein, 11 aa, BK virus
PCPESSVSESS

SEQ ID NO: 7838 - protein, 11 aa, BK virus
CPESSVSESSS

SEQ ID NO: 7839 - protein, 11 aa, BK virus
PESSVSESSSL

SEQ ID NO: 7840 - protein, 11 aa, BK virus
ESSVSESSSLV

SEQ ID NO: 7841 - protein, 11 aa, BK virus
SSVSESSSLVI

SEQ ID NO: 7842 - protein, 11 aa, BK virus
SVSESSSLVIS

SEQ ID NO: 7843 - protein, 11 aa, BK virus
VSESSSLVISR

SEQ ID NO: 7844 - protein, 11 aa, BK virus
SESSSLVISRI

SEQ ID NO: 7845 - protein, 11 aa, BK virus
ESSSLVISRIH

SEQ ID NO: 7846 - protein, 11 aa, BK virus
SSSLVISRIHF

SEQ ID NO: 7847 - protein, 11 aa, BK virus
SSLVISRIHFP

SEQ ID NO: 7848 - protein, 11 aa, BK virus
SLVISRIHFPM

SEQ ID NO: 7849 - protein, 11 aa, BK virus
LVISRIHFPMH

SEQ ID NO: 7850 - protein, 11 aa, BK virus
VISRIHFPMHI

SEQ ID NO: 7851 - protein, 11 aa, BK virus
ISRIHFPMHIL

SEQ ID NO: 7852 - protein, 11 aa, BK virus
SRIHFPMHILY

SEQ ID NO: 7853 - protein, 11 aa, BK virus
RIHFPMHILYF

SEQ ID NO: 7854 - protein, 11 aa, BK virus
IHFPMHILYFI

SEQ ID NO: 7855 - protein, 11 aa, BK virus
HFPMHILYFIL

SEQ ID NO: 7856 - protein, 11 aa, BK virus
FPMHILYFILE

SEQ ID NO: 7857 - protein, 11 aa, BK virus
PMHILYFILEK

SEQ ID NO: 7858 - protein, 11 aa, BK virus
MHILYFILEKV

SEQ ID NO: 7859 - protein, 11 aa, BK virus
HILYFILEKVY

SEQ ID NO: 7860 - protein, 11 aa, BK virus
ILYFILEKVYI

SEQ ID NO: 7861 - protein, 11 aa, BK virus
LYFILEKVYIL

SEQ ID NO: 7862 - protein, 11 aa, BK virus
YFILEKVYILI

SEQ ID NO: 7863 - protein, 11 aa, BK virus
FILEKVYILIS

SEQ ID NO: 7864 - protein, 11 aa, BK virus
ILEKVYILISE

SEQ ID NO: 7865 - protein, 11 aa, BK virus
LEKVYILISES

SEQ ID NO: 7866 - protein, 11 aa, BK virus
EKVYILISESS

SEQ ID NO: 7867 - protein, 11 aa, BK virus
KVYILISESSL

SEQ ID NO: 7868 - protein, 11 aa, BK virus
VYILISESSLS

SEQ ID NO: 7869 - protein, 11 aa, BK virus
YILISESSLSF

SEQ ID NO: 7870 - protein, 11 aa, BK virus
ILISESSLSFH

SEQ ID NO: 7871 - protein, 11 aa, BK virus
LISESSLSFHS

SEQ ID NO: 7872 - protein, 11 aa, BK virus
ISESSLSFHST

SEQ ID NO: 7873 - protein, 11 aa, BK virus
SESSLSFHSTI

SEQ ID NO: 7874 - protein, 11 aa, BK virus
ESSLSFHSTIL

SEQ ID NO: 7875 - protein, 11 aa, BK virus
SSLSFHSTILD

SEQ ID NO: 7876 - protein, 11 aa, BK virus
SLSFHSTILDC

SEQ ID NO: 7877 - protein, 11 aa, BK virus
LSFHSTILDCI

SEQ ID NO: 7878 - protein, 11 aa, BK virus
SFHSTILDCIS

SEQ ID NO: 7879 - protein, 11 aa, BK virus
FHSTILDCISV

SEQ ID NO: 7880 - protein, 11 aa, BK virus
HSTILDCISVA

SEQ ID NO: 7881 - protein, 11 aa, BK virus
STILDCISVAK

SEQ ID NO: 7882 - protein, 11 aa, BK virus
TILDCISVAKS

SEQ ID NO: 7883 - protein, 11 aa, BK virus
ILDCISVAKSA

SEQ ID NO: 7884 - protein, 11 aa, BK virus
LDCISVAKSAT

SEQ ID NO: 7885 - protein, 11 aa, BK virus
DCISVAKSATG

SEQ ID NO: 7886 - protein, 11 aa, BK virus
CISVAKSATGL

SEQ ID NO: 7887 - protein, 11 aa, BK virus
ISVAKSATGLN

SEQ ID NO: 7888 - protein, 11 aa, BK virus
SVAKSATGLNQ

SEQ ID NO: 7889 - protein, 11 aa, BK virus
VAKSATGLNQI

SEQ ID NO: 7890 - protein, 11 aa, BK virus
AKSATGLNQIS

SEQ ID NO: 7891 - protein, 11 aa, BK virus
KSATGLNQISS

SEQ ID NO: 7892 - protein, 11 aa, BK virus
SATGLNQISSS

SEQ ID NO: 7893 - protein, 11 aa, BK virus
ATGLNQISSSN

SEQ ID NO: 7894 - protein, 11 aa, BK virus
TGLNQISSSNK

SEQ ID NO: 7895 - protein, 11 aa, BK virus
GLNQISSSNKV

SEQ ID NO: 7896 - protein, 11 aa, BK virus
LNQISSSNKVI

SEQ ID NO: 7897 - protein, 11 aa, BK virus
NQISSSNKVIP

SEQ ID NO: 7898 - protein, 11 aa, BK virus
QISSSNKVIPL

SEQ ID NO: 7899 - protein, 11 aa, BK virus
ISSSNKVIPLC

SEQ ID NO: 7900 - protein, 11 aa, BK virus
SSSNKVIPLCK

SEQ ID NO: 7901 - protein, 11 aa, BK virus
SSNKVIPLCKI

SEQ ID NO: 7902 - protein, 11 aa, BK virus
SNKVIPLCKIL

SEQ ID NO: 7903 - protein, 11 aa, BK virus
NKVIPLCKILF

SEQ ID NO: 7904 - protein, 11 aa, BK virus
KVIPLCKILFS

SEQ ID NO: 7905 - protein, 11 aa, BK virus
VIPLCKILFSS

SEQ ID NO: 7906 - protein, 11 aa, BK virus
IPLCKILFSSK

SEQ ID NO: 7907 - protein, 11 aa, BK virus
PLCKILFSSKN

SEQ ID NO: 7908 - protein, 11 aa, BK virus
LCKILFSSKNS

SEQ ID NO: 7909 - protein, 11 aa, BK virus
CKILFSSKNSE

SEQ ID NO: 7910 - protein, 11 aa, BK virus
KILFSSKNSEF

SEQ ID NO: 7911 - protein, 11 aa, BK virus
ILFSSKNSEFC

SEQ ID NO: 7912 - protein, 11 aa, BK virus
LFSSKNSEFCK

SEQ ID NO: 7913 - protein, 11 aa, BK virus
FSSKNSEFCKD

SEQ ID NO: 7914 - protein, 11 aa, BK virus
SSKNSEFCKDF

SEQ ID NO: 7915 - protein, 11 aa, BK virus
SKNSEFCKDFL

SEQ ID NO: 7916 - protein, 11 aa, BK virus
KNSEFCKDFLK

SEQ ID NO: 7917 - protein, 11 aa, BK virus
NSEFCKDFLKY

SEQ ID NO: 7918 - protein, 11 aa, BK virus
SEFCKDFLKYI

SEQ ID NO: 7919 - protein, 11 aa, BK virus
EFCKDFLKYIL

SEQ ID NO: 7920 - protein, 11 aa, BK virus
FCKDFLKYILG

SEQ ID NO: 7921 - protein, 11 aa, BK virus
CKDFLKYILGL

SEQ ID NO: 7922 - protein, 11 aa, BK virus
KDFLKYILGLK

SEQ ID NO: 7923 - protein, 11 aa, BK virus
DFLKYILGLKS

SEQ ID NO: 7924 - protein, 11 aa, BK virus
FLKYILGLKSI

SEQ ID NO: 7925 - protein, 11 aa, BK virus
LKYILGLKSIC

SEQ ID NO: 7926 - protein, 11 aa, BK virus
KYILGLKSICL

SEQ ID NO: 7927 - protein, 11 aa, BK virus
YILGLKSICLT

SEQ ID NO: 7928 - protein, 11 aa, BK virus
ILGLKSICLTN

SEQ ID NO: 7929 - protein, 11 aa, BK virus
LGLKSICLTNL

SEQ ID NO: 7930 - protein, 11 aa, BK virus
GLKSICLTNLA

SEQ ID NO: 7931 - protein, 11 aa, BK virus
LKSICLTNLAC

SEQ ID NO: 7932 - protein, 11 aa, BK virus
KSICLTNLACR

SEQ ID NO: 7933 - protein, 11 aa, BK virus
SICLTNLACRV

SEQ ID NO: 7934 - protein, 11 aa, BK virus
ICLTNLACRVL

SEQ ID NO: 7935 - protein, 11 aa, BK virus
CLTNLACRVLG

SEQ ID NO: 7936 - protein, 11 aa, BK virus
LTNLACRVLGT

SEQ ID NO: 7937 - protein, 11 aa, BK virus
TNLACRVLGTG

SEQ ID NO: 7938 - protein, 11 aa, BK virus
NLACRVLGTGY

SEQ ID NO: 7939 - protein, 11 aa, BK virus
LACRVLGTGYS

SEQ ID NO: 7940 - protein, 11 aa, BK virus
ACRVLGTGYSF

SEQ ID NO: 7941 - protein, 11 aa, BK virus
CRVLGTGYSFI

SEQ ID NO: 7942 - protein, 11 aa, BK virus
RVLGTGYSFIV

SEQ ID NO: 7943 - protein, 11 aa, BK virus
VLGTGYSFIVT

SEQ ID NO: 7944 - protein, 11 aa, BK virus
LGTGYSFIVTK

SEQ ID NO: 7945 - protein, 11 aa, BK virus
GTGYSFIVTKP

SEQ ID NO: 7946 - protein, 11 aa, BK virus
TGYSFIVTKPG

SEQ ID NO: 7947 - protein, 11 aa, BK virus
GYSFIVTKPGG

SEQ ID NO: 7948 - protein, 11 aa, BK virus
YSFIVTKPGGN

SEQ ID NO: 7949 - protein, 11 aa, BK virus
SFIVTKPGGNI

SEQ ID NO: 7950 - protein, 11 aa, BK virus
FIVTKPGGNIW

SEQ ID NO: 7951 - protein, 11 aa, BK virus
IVTKPGGNIWV

SEQ ID NO: 7952 - protein, 11 aa, BK virus
VTKPGGNIWVL

SEQ ID NO: 7953 - protein, 11 aa, BK virus
TKPGGNIWVLL

SEQ ID NO: 7954 - protein, 11 aa, BK virus
KPGGNIWVLLF

SEQ ID NO: 7955 - protein, 11 aa, BK virus
PGGNIWVLLFK

SEQ ID NO: 7956 - protein, 11 aa, BK virus
GGNIWVLLFKC

SEQ ID NO: 7957 - protein, 11 aa, BK virus
GNIWVLLFKCF

SEQ ID NO: 7958 - protein, 11 aa, BK virus
NIWVLLFKCFF

SEQ ID NO: 7959 - protein, 11 aa, BK virus
IWVLLFKCFFS

SEQ ID NO: 7960 - protein, 11 aa, BK virus
WVLLFKCFFSK

SEQ ID NO: 7961 - protein, 11 aa, BK virus
VLLFKCFFSKF

SEQ ID NO: 7962 - protein, 11 aa, BK virus
LLFKCFFSKFT

SEQ ID NO: 7963 - protein, 11 aa, BK virus
LFKCFFSKFTL

SEQ ID NO: 7964 - protein, 11 aa, BK virus
FKCFFSKFTLT

SEQ ID NO: 7965 - protein, 11 aa, BK virus
KCFFSKFTLTL

SEQ ID NO: 7966 - protein, 11 aa, BK virus
CFFSKFTLTLP

SEQ ID NO: 7967 - protein, 11 aa, BK virus
FFSKFTLTLPS

SEQ ID NO: 7968 - protein, 11 aa, BK virus
FSKFTLTLPSK

SEQ ID NO: 7969 - protein, 11 aa, BK virus
SLKLSKLFIPC

SEQ ID NO: 7970 - protein, 11 aa, BK virus
LKLSKLFIPCP

SEQ ID NO: 7971 - protein, 11 aa, BK virus
KLSKLFIPCPE

SEQ ID NO: 7972 - protein, 11 aa, BK virus
LSKLFIPCPEG

SEQ ID NO: 7973 - protein, 11 aa, BK virus
SKLFIPCPEGK

SEQ ID NO: 7974 - protein, 11 aa, BK virus
KLFIPCPEGKS

SEQ ID NO: 7975 - protein, 11 aa, BK virus
LFIPCPEGKSF

SEQ ID NO: 7976 - protein, 11 aa, BK virus
FIPCPEGKSFD

SEQ ID NO: 7977 - protein, 11 aa, BK virus
IPCPEGKSFDS

SEQ ID NO: 7978 - protein, 11 aa, BK virus
PCPEGKSFDSA

SEQ ID NO: 7979 - protein, 11 aa, BK virus
CPEGKSFDSAP

SEQ ID NO: 7980 - protein, 11 aa, BK virus
PEGKSFDSAPV

SEQ ID NO: 7981 - protein, 11 aa, BK virus
EGKSFDSAPVP

SEQ ID NO: 7982 - protein, 11 aa, BK virus
GKSFDSAPVPF

SEQ ID NO: 7983 - protein, 11 aa, BK virus
KSFDSAPVPFT

SEQ ID NO: 7984 - protein, 11 aa, BK virus
SFDSAPVPFTS

SEQ ID NO: 7985 - protein, 11 aa, BK virus
FDSAPVPFTSS

SEQ ID NO: 7986 - protein, 11 aa, BK virus
DSAPVPFTSSK

SEQ ID NO: 7987 - protein, 11 aa, BK virus
SAPVPFTSSKT

SEQ ID NO: 7988 - protein, 11 aa, BK virus
APVPFTSSKTT

SEQ ID NO: 7989 - protein, 11 aa, BK virus
PVPFTSSKTTM

SEQ ID NO: 7990 - protein, 11 aa, BK virus
VPFTSSKTTMY

SEQ ID NO: 7991 - protein, 11 aa, BK virus
SIATPSSKVSL

SEQ ID NO: 7992 - protein, 11 aa, BK virus
IATPSSKVSLS

SEQ ID NO: 7993 - protein, 11 aa, BK virus
ATPSSKVSLSM

SEQ ID NO: 7994 - protein, 11 aa, BK virus
TPSSKVSLSMG

SEQ ID NO: 7995 - protein, 11 aa, BK virus
PSSKVSLSMGR

SEQ ID NO: 7996 - protein, 11 aa, BK virus
SSKVSLSMGRF

SEQ ID NO: 7997 - protein, 11 aa, BK virus
SKVSLSMGRFT

SEQ ID NO: 7998 - protein, 11 aa, BK virus
KVSLSMGRFTF

SEQ ID NO: 7999 - protein, 11 aa, BK virus
VSLSMGRFTFK

SEQ ID NO: 8000 - protein, 11 aa, BK virus
SLSMGRFTFKA

SEQ ID NO: 8001 - protein, 11 aa, BK virus
LSMGRFTFKAL

SEQ ID NO: 8002 - protein, 11 aa, BK virus
SMGRFTFKALP

SEQ ID NO: 8003 - protein, 11 aa, BK virus
MGRFTFKALPP

SEQ ID NO: 8004 - protein, 11 aa, BK virus
GRFTFKALPPH

SEQ ID NO: 8005 - protein, 11 aa, BK virus
RFTFKALPPHK

SEQ ID NO: 8006 - protein, 11 aa, BK virus
FTFKALPPHKS

SEQ ID NO: 8007 - protein, 11 aa, BK virus
TFKALPPHKSN

SEQ ID NO: 8008 - protein, 11 aa, BK virus
FKALPPHKSNN

SEQ ID NO: 8009 - protein, 11 aa, BK virus
KALPPHKSNNP

SEQ ID NO: 8010 - protein, 11 aa, BK virus
ALPPHKSNNPA

SEQ ID NO: 8011 - protein, 11 aa, BK virus
LPPHKSNNPAA

SEQ ID NO: 8012 - protein, 11 aa, BK virus
PPHKSNNPAAS

SEQ ID NO: 8013 - protein, 11 aa, BK virus
PHKSNNPAASV

SEQ ID NO: 8014 - protein, 11 aa, BK virus
HKSNNPAASVV

SEQ ID NO: 8015 - protein, 11 aa, BK virus
KSNNPAASVVF

SEQ ID NO: 8016 - protein, 11 aa, BK virus
SNNPAASVVFP

SEQ ID NO: 8017 - protein, 11 aa, BK virus
NNPAASVVFPL

SEQ ID NO: 8018 - protein, 11 aa, BK virus
NPAASVVFPLS

SEQ ID NO: 8019 - protein, 11 aa, BK virus
PAASVVFPLSM

SEQ ID NO: 8020 - protein, 11 aa, BK virus
AASVVFPLSMG

SEQ ID NO: 8021 - protein, 11 aa, BK virus
ASVVFPLSMGP

SEQ ID NO: 8022 - protein, 11 aa, BK virus
SVVFPLSMGPL

SEQ ID NO: 8023 - protein, 11 aa, BK virus
VVFPLSMGPLN

SEQ ID NO: 8024 - protein, 11 aa, BK virus
VFPLSMGPLNN

SEQ ID NO: 8025 - protein, 11 aa, BK virus
FPLSMGPLNNQ

SEQ ID NO: 8026 - protein, 11 aa, BK virus
PLSMGPLNNQY

SEQ ID NO: 8027 - protein, 11 aa, BK virus
LSMGPLNNQYL

SEQ ID NO: 8028 - protein, 11 aa, BK virus
SMGPLNNQYLL

SEQ ID NO: 8029 - protein, 11 aa, BK virus
MGPLNNQYLLL

SEQ ID NO: 8030 - protein, 11 aa, BK virus
GPLNNQYLLLG

SEQ ID NO: 8031 - protein, 11 aa, BK virus
PLNNQYLLLGT

SEQ ID NO: 8032 - protein, 11 aa, BK virus
LNNQYLLLGTL

SEQ ID NO: 8033 - protein, 11 aa, BK virus
NNQYLLLGTLK

SEQ ID NO: 8034 - protein, 11 aa, BK virus
NQYLLLGTLKT

SEQ ID NO: 8035 - protein, 11 aa, BK virus
QYLLLGTLKTI

SEQ ID NO: 8036 - protein, 11 aa, BK virus
YLLLGTLKTIQ

SEQ ID NO: 8037 - protein, 11 aa, BK virus
LLLGTLKTIQC

SEQ ID NO: 8038 - protein, 11 aa, BK virus
LLGTLKTIQCK

SEQ ID NO: 8039 - protein, 11 aa, BK virus
LGTLKTIQCKK

SEQ ID NO: 8040 - protein, 11 aa, BK virus
GTLKTIQCKKS

SEQ ID NO: 8041 - protein, 11 aa, BK virus
TLKTIQCKKSN

SEQ ID NO: 8042 - protein, 11 aa, BK virus
LKTIQCKKSNI

SEQ ID NO: 8043 - protein, 11 aa, BK virus
KTIQCKKSNIT

SEQ ID NO: 8044 - protein, 11 aa, BK virus
TIQCKKSNITE

SEQ ID NO: 8045 - protein, 11 aa, BK virus
IQCKKSNITES

SEQ ID NO: 8046 - protein, 11 aa, BK virus
QCKKSNITESI

SEQ ID NO: 8047 - protein, 11 aa, BK virus
CKKSNITESIL

SEQ ID NO: 8048 - protein, 11 aa, BK virus
KKSNITESILG

SEQ ID NO: 8049 - protein, 11 aa, BK virus
KSNITESILGS

SEQ ID NO: 8050 - protein, 11 aa, BK virus
SNITESILGSK

SEQ ID NO: 8051 - protein, 11 aa, BK virus
NITESILGSKQ

SEQ ID NO: 8052 - protein, 11 aa, BK virus
ITESILGSKQC

SEQ ID NO: 8053 - protein, 11 aa, BK virus
TESILGSKQCS

SEQ ID NO: 8054 - protein, 11 aa, BK virus
ESILGSKQCSQ

SEQ ID NO: 8055 - protein, 11 aa, BK virus
SILGSKQCSQA

SEQ ID NO: 8056 - protein, 11 aa, BK virus
ILGSKQCSQAT

SEQ ID NO: 8057 - protein, 11 aa, BK virus
LGSKQCSQATP

SEQ ID NO: 8058 - protein, 11 aa, BK virus
GSKQCSQATPA

SEQ ID NO: 8059 - protein, 11 aa, BK virus
SKQCSQATPAI

SEQ ID NO: 8060 - protein, 11 aa, BK virus
KQCSQATPAIY

SEQ ID NO: 8061 - protein, 11 aa, BK virus
QCSQATPAIYC

SEQ ID NO: 8062 - protein, 11 aa, BK virus
CSQATPAIYCS

SEQ ID NO: 8063 - protein, 11 aa, BK virus
SQATPAIYCSS

SEQ ID NO: 8064 - protein, 11 aa, BK virus
QATPAIYCSST

SEQ ID NO: 8065 - protein, 11 aa, BK virus
ATPAIYCSSTA

SEQ ID NO: 8066 - protein, 11 aa, BK virus
TPAIYCSSTAF

SEQ ID NO: 8067 - protein, 11 aa, BK virus
PAIYCSSTAFP

SEQ ID NO: 8068 - protein, 11 aa, BK virus
APNIKSILSNI

SEQ ID NO: 8069 - protein, 11 aa, BK virus
LNLSVSISSLV

SEQ ID NO: 8070 - protein, 11 aa, BK virus
NLSVSISSLVI

SEQ ID NO: 8071 - protein, 11 aa, BK virus
RVSTLFLAKTV

SEQ ID NO: 8072 - protein, 11 aa, BK virus
VSTLFLAKTVS

SEQ ID NO: 8073 - protein, 11 aa, BK virus
STLFLAKTVST

SEQ ID NO: 8074 - protein, 11 aa, BK virus
TLFLAKTVSTA

SEQ ID NO: 8075 - protein, 11 aa, BK virus
LFLAKTVSTAC

SEQ ID NO: 8076 - protein, 11 aa, BK virus
FLLSAKIIAFA

SEQ ID NO: 8077 - protein, 11 aa, BK virus
LLSAKIIAFAK

SEQ ID NO: 8078 - protein, 11 aa, BK virus
LSAKIIAFAKC

SEQ ID NO: 8079 - protein, 11 aa, BK virus
SAKIIAFAKCF

SEQ ID NO: 8080 - protein, 11 aa, BK virus
AKIIAFAKCFS

SEQ ID NO: 8081 - protein, 11 aa, BK virus
NSKYIPNNKNT

SEQ ID NO: 8082 - protein, 11 aa, BK virus
SKYIPNNKNTS

SEQ ID NO: 8083 - protein, 11 aa, BK virus
KYIPNNKNTSS

SEQ ID NO: 8084 - protein, 11 aa, BK virus
YIPNNKNTSSH

SEQ ID NO: 8085 - protein, 11 aa, BK virus
IPNNKNTSSHF

SEQ ID NO: 8086 - protein, 11 aa, BK virus
PNNKNTSSHFV

SEQ ID NO: 8087 - protein, 11 aa, BK virus
NNKNTSSHFVS

SEQ ID NO: 8088 - protein, 11 aa, BK virus
NKNTSSHFVST

SEQ ID NO: 8089 - protein, 11 aa, BK virus
KNTSSHFVSTA

SEQ ID NO: 8090 - protein, 11 aa, BK virus
NTSSHFVSTAY

SEQ ID NO: 8091 - protein, 11 aa, BK virus
TSSHFVSTAYS

SEQ ID NO: 8092 - protein, 11 aa, BK virus
SSHFVSTAYSV

SEQ ID NO: 8093 - protein, 11 aa, BK virus
SHFVSTAYSVI

SEQ ID NO: 8094 - protein, 11 aa, BK virus
HFVSTAYSVIN

SEQ ID NO: 8095 - protein, 11 aa, BK virus
FVSTAYSVINF

SEQ ID NO: 8096 - protein, 11 aa, BK virus
VSTAYSVINFQ

SEQ ID NO: 8097 - protein, 11 aa, BK virus
STAYSVINFQD

SEQ ID NO: 8098 - protein, 11 aa, BK virus
TAYSVINFQDT

SEQ ID NO: 8099 - protein, 11 aa, BK virus
AYSVINFQDTC

SEQ ID NO: 8100 - protein, 11 aa, BK virus
YSVINFQDTCF

SEQ ID NO: 8101 - protein, 11 aa, BK virus
SVINFQDTCFV

SEQ ID NO: 8102 - protein, 11 aa, BK virus
VINFQDTCFVS

SEQ ID NO: 8103 - protein, 11 aa, BK virus
INFQDTCFVSS

SEQ ID NO: 8104 - protein, 11 aa, BK virus
NFQDTCFVSSG

SEQ ID NO: 8105 - protein, 11 aa, BK virus
FQDTCFVSSGS

SEQ ID NO: 8106 - protein, 11 aa, BK virus
QDTCFVSSGSS

SEQ ID NO: 8107 - protein, 11 aa, BK virus
DTCFVSSGSSG

SEQ ID NO: 8108 - protein, 11 aa, BK virus
TCFVSSGSSGL

SEQ ID NO: 8109 - protein, 11 aa, BK virus
CFVSSGSSGLK

SEQ ID NO: 8110 - protein, 11 aa, BK virus
FVSSGSSGLKS

SEQ ID NO: 8111 - protein, 11 aa, BK virus
VSSGSSGLKSC

SEQ ID NO: 8112 - protein, 11 aa, BK virus
SSGSSGLKSCS

SEQ ID NO: 8113 - protein, 11 aa, BK virus
SGSSGLKSCSF

SEQ ID NO: 8114 - protein, 11 aa, BK virus
GSSGLKSCSFK

SEQ ID NO: 8115 - protein, 11 aa, BK virus
SSGLKSCSFKP

SEQ ID NO: 8116 - protein, 11 aa, BK virus
SGLKSCSFKPP

SEQ ID NO: 8117 - protein, 11 aa, BK virus
MLSSIVWYGSL

SEQ ID NO: 8118 - protein, 11 aa, BK virus
LSSIVWYGSLV

SEQ ID NO: 8119 - protein, 11 aa, BK virus
SSIVWYGSLVK

SEQ ID NO: 8120 - protein, 11 aa, BK virus
SIVWYGSLVKA

SEQ ID NO: 8121 - protein, 11 aa, BK virus
IVWYGSLVKAL

SEQ ID NO: 8122 - protein, 11 aa, BK virus
VWYGSLVKALY

SEQ ID NO: 8123 - protein, 11 aa, BK virus
WYGSLVKALYS

SEQ ID NO: 8124 - protein, 11 aa, BK virus
YGSLVKALYSK

SEQ ID NO: 8125 - protein, 11 aa, BK virus
GSLVKALYSKY

SEQ ID NO: 8126 - protein, 11 aa, BK virus
SLVKALYSKYS

SEQ ID NO: 8127 - protein, 11 aa, BK virus
LVKALYSKYSL

SEQ ID NO: 8128 - protein, 11 aa, BK virus
VKALYSKYSLL

SEQ ID NO: 8129 - protein, 11 aa, BK virus
KALYSKYSLLT

SEQ ID NO: 8130 - protein, 11 aa, BK virus
ALYSKYSLLTP

SEQ ID NO: 8131 - protein, 11 aa, BK virus
LYSKYSLLTPL

SEQ ID NO: 8132 - protein, 11 aa, BK virus
YSKYSLLTPLQ

SEQ ID NO: 8133 - protein, 11 aa, BK virus
SKYSLLTPLQI

SEQ ID NO: 8134 - protein, 11 aa, BK virus
KYSLLTPLQIK

SEQ ID NO: 8135 - protein, 11 aa, BK virus
YSLLTPLQIKK

SEQ ID NO: 8136 - protein, 11 aa, BK virus
SLLTPLQIKKL

SEQ ID NO: 8137 - protein, 11 aa, BK virus
LLTPLQIKKLK

SEQ ID NO: 8138 - protein, 11 aa, BK virus
LTPLQIKKLKV

SEQ ID NO: 8139 - protein, 11 aa, BK virus
TPLQIKKLKVH

SEQ ID NO: 8140 - protein, 11 aa, BK virus
PLQIKKLKVHS

SEQ ID NO: 8141 - protein, 11 aa, BK virus
LQIKKLKVHSF

SEQ ID NO: 8142 - protein, 11 aa, BK virus
QKLLIAETLCL

SEQ ID NO: 8143 - protein, 11 aa, BK virus
KLLIAETLCLC

SEQ ID NO: 8144 - protein, 11 aa, BK virus
LLIAETLCLCG

SEQ ID NO: 8145 - protein, 11 aa, BK virus
LIAETLCLCGV

SEQ ID NO: 8146 - protein, 11 aa, BK virus
IAETLCLCGVK

SEQ ID NO: 8147 - protein, 11 aa, BK virus
AETLCLCGVKK

SEQ ID NO: 8148 - protein, 11 aa, BK virus
ETLCLCGVKKN

SEQ ID NO: 8149 - protein, 11 aa, BK virus
TLCLCGVKKNI

SEQ ID NO: 8150 - protein, 11 aa, BK virus
LCLCGVKKNII

SEQ ID NO: 8151 - protein, 11 aa, BK virus
CLCGVKKNIIL

SEQ ID NO: 8152 - protein, 11 aa, BK virus
LCGVKKNIILC

SEQ ID NO: 8153 - protein, 11 aa, BK virus
CGVKKNIILCP

SEQ ID NO: 8154 - protein, 11 aa, BK virus
GVKKNIILCPA

SEQ ID NO: 8155 - protein, 11 aa, BK virus
VKKNIILCPAH

SEQ ID NO: 8156 - protein, 11 aa, BK virus
KKNIILCPAHM

SEQ ID NO: 8157 - protein, 11 aa, BK virus
KNIILCPAHMC

SEQ ID NO: 8158 - protein, 11 aa, BK virus
NIILCPAHMCL

SEQ ID NO: 8159 - protein, 11 aa, BK virus
IILCPAHMCLL

SEQ ID NO: 8160 - protein, 11 aa, BK virus
ILCPAHMCLLI

SEQ ID NO: 8161 - protein, 11 aa, BK virus
LCPAHMCLLIK

SEQ ID NO: 8162 - protein, 11 aa, BK virus
CPAHMCLLIKV

SEQ ID NO: 8163 - protein, 11 aa, BK virus
PAHMCLLIKVT

SEQ ID NO: 8164 - protein, 11 aa, BK virus
AHMCLLIKVTE

SEQ ID NO: 8165 - protein, 11 aa, BK virus
HMCLLIKVTEY

SEQ ID NO: 8166 - protein, 11 aa, BK virus
MCLLIKVTEYF

SEQ ID NO: 8167 - protein, 11 aa, BK virus
CLLIKVTEYFS

SEQ ID NO: 8168 - protein, 11 aa, BK virus
LLIKVTEYFSI

SEQ ID NO: 8169 - protein, 11 aa, BK virus
LIKVTEYFSIS

SEQ ID NO: 8170 - protein, 11 aa, BK virus
IKVTEYFSISF

SEQ ID NO: 8171 - protein, 11 aa, BK virus
KVTEYFSISFL

SEQ ID NO: 8172 - protein, 11 aa, BK virus
VTEYFSISFLY

SEQ ID NO: 8173 - protein, 11 aa, BK virus
TEYFSISFLYR

SEQ ID NO: 8174 - protein, 11 aa, BK virus
EYFSISFLYRI

SEQ ID NO: 8175 - protein, 11 aa, BK virus
AFSLVVYTAKQ

SEQ ID NO: 8176 - protein, 11 aa, BK virus
FSLVVYTAKQA

SEQ ID NO: 8177 - protein, 11 aa, BK virus
SLVVYTAKQAR

SEQ ID NO: 8178 - protein, 11 aa, BK virus
LVVYTAKQARV

SEQ ID NO: 8179 - protein, 11 aa, BK virus
VVYTAKQARVL

SEQ ID NO: 8180 - protein, 11 aa, BK virus
VYTAKQARVLL

SEQ ID NO: 8181 - protein, 11 aa, BK virus
YTAKQARVLLL

SEQ ID NO: 8182 - protein, 11 aa, BK virus
TAKQARVLLLN

SEQ ID NO: 8183 - protein, 11 aa, BK virus
AKQARVLLLNT

SEQ ID NO: 8184 - protein, 11 aa, BK virus
KQARVLLLNTA

SEQ ID NO: 8185 - protein, 11 aa, BK virus
LRNWCRSEGKS

SEQ ID NO: 8186 - protein, 11 aa, BK virus
RNWCRSEGKSL

SEQ ID NO: 8187 - protein, 11 aa, BK virus
NWCRSEGKSLG

SEQ ID NO: 8188 - protein, 11 aa, BK virus
WCRSEGKSLGS

SEQ ID NO: 8189 - protein, 11 aa, BK virus
CRSEGKSLGSS

SEQ ID NO: 8190 - protein, 11 aa, BK virus
RSEGKSLGSST

SEQ ID NO: 8191 - protein, 11 aa, BK virus
SEGKSLGSSTF

SEQ ID NO: 8192 - protein, 11 aa, BK virus
EGKSLGSSTFL

SEQ ID NO: 8193 - protein, 11 aa, BK virus
GKSLGSSTFLF

SEQ ID NO: 8194 - protein, 11 aa, BK virus
KSLGSSTFLFF

SEQ ID NO: 8195 - protein, 11 aa, BK virus
SLGSSTFLFFL

SEQ ID NO: 8196 - protein, 11 aa, BK virus
LGSSTFLFFLG

SEQ ID NO: 8197 - protein, 11 aa, BK virus
GSSTFLFFLGG

SEQ ID NO: 8198 - protein, 11 aa, BK virus
SSTFLFFLGGV

SEQ ID NO: 8199 - protein, 11 aa, BK virus
STFLFFLGGVE

SEQ ID NO: 8200 - protein, 11 aa, BK virus
TFLFFLGGVEC

SEQ ID NO: 8201 - protein, 11 aa, BK virus
ESAVASSSLAN

SEQ ID NO: 8202 - protein, 11 aa, BK virus
SAVASSSLANI

SEQ ID NO: 8203 - protein, 11 aa, BK virus
AVASSSLANIS

SEQ ID NO: 8204 - protein, 11 aa, BK virus
VASSSLANISS

SEQ ID NO: 8205 - protein, 11 aa, BK virus
ASSSLANISSW

SEQ ID NO: 8206 - protein, 11 aa, BK virus
SSSLANISSWQ

SEQ ID NO: 8207 - protein, 11 aa, BK virus
SSLANISSWQN

SEQ ID NO: 8208 - protein, 11 aa, BK virus
SLANISSWQNK

SEQ ID NO: 8209 - protein, 11 aa, BK virus
LANISSWQNKS

SEQ ID NO: 8210 - protein, 11 aa, BK virus
ANISSWQNKSS

SEQ ID NO: 8211 - protein, 11 aa, BK virus
NISSWQNKSSS

SEQ ID NO: 8212 - protein, 11 aa, BK virus
ISSWQNKSSSH

SEQ ID NO: 8213 - protein, 11 aa, BK virus
SSWQNKSSSHF

SEQ ID NO: 8214 - protein, 11 aa, BK virus
SWQNKSSSHFS

SEQ ID NO: 8215 - protein, 11 aa, BK virus
WQNKSSSHFSL

SEQ ID NO: 8216 - protein, 11 aa, BK virus
QNKSSSHFSLK

SEQ ID NO: 8217 - protein, 11 aa, BK virus
NKSSSHFSLKE

SEQ ID NO: 8218 - protein, 11 aa, BK virus
KSSSHFSLKEL

SEQ ID NO: 8219 - protein, 11 aa, BK virus
SSSHFSLKELH

SEQ ID NO: 8220 - protein, 11 aa, BK virus
SSHFSLKELHQ

SEQ ID NO: 8221 - protein, 11 aa, BK virus
SHFSLKELHQD

SEQ ID NO: 8222 - protein, 11 aa, BK virus
HFSLKELHQDS

SEQ ID NO: 8223 - protein, 11 aa, BK virus
FSLKELHQDSH

SEQ ID NO: 8224 - protein, 11 aa, BK virus
SLKELHQDSHS

SEQ ID NO: 8225 - protein, 11 aa, BK virus
LKELHQDSHSS

SEQ ID NO: 8226 - protein, 11 aa, BK virus
KELHQDSHSSV

SEQ ID NO: 8227 - protein, 11 aa, BK virus
ELHQDSHSSVP

SEQ ID NO: 8228 - protein, 11 aa, BK virus
VGTYKKNNYLG

SEQ ID NO: 8229 - protein, 11 aa, BK virus
GTYKKNNYLGP

SEQ ID NO: 8230 - protein, 11 aa, BK virus
TYKKNNYLGPF

SEQ ID NO: 8231 - protein, 11 aa, BK virus
YKKNNYLGPFN

SEQ ID NO: 8232 - protein, 11 aa, BK virus
KKNNYLGPFNI

SEQ ID NO: 8233 - protein, 11 aa, BK virus
KNNYLGPFNIL

SEQ ID NO: 8234 - protein, 11 aa, BK virus
NNYLGPFNILL

SEQ ID NO: 8235 - protein, 11 aa, BK virus
NYLGPFNILLF

SEQ ID NO: 8236 - protein, 11 aa, BK virus
YLGPFNILLFI

SEQ ID NO: 8237 - protein, 11 aa, BK virus
REFLQLFGPTI

SEQ ID NO: 8238 - protein, 11 aa, BK virus
EFLQLFGPTIA

SEQ ID NO: 8239 - protein, 11 aa, BK virus
FLQLFGPTIAE

SEQ ID NO: 8240 - protein, 11 aa, BK virus
LQLFGPTIAEF

SEQ ID NO: 8241 - protein, 11 aa, BK virus
QLFGPTIAEFL

SEQ ID NO: 8242 - protein, 11 aa, BK virus
LFGPTIAEFLQ

SEQ ID NO: 8243 - protein, 11 aa, BK virus
FGPTIAEFLQL

SEQ ID NO: 8244 - protein, 11 aa, BK virus
GPTIAEFLQLG

SEQ ID NO: 8245 - protein, 11 aa, BK virus
PTIAEFLQLGL

SEQ ID NO: 8246 - protein, 11 aa, BK virus
TIAEFLQLGLS

SEQ ID NO: 8247 - protein, 11 aa, BK virus
IAEFLQLGLSQ

SEQ ID NO: 8248 - protein, 11 aa, BK virus
AEFLQLGLSQT

SEQ ID NO: 8249 - protein, 11 aa, BK virus
EFLQLGLSQTT

SEQ ID NO: 8250 - protein, 11 aa, BK virus
FLQLGLSQTTV

SEQ ID NO: 8251 - protein, 11 aa, BK virus
SSQCSSNLSKP

SEQ ID NO: 8252 - protein, 11 aa, BK virus
SQCSSNLSKPR

SEQ ID NO: 8253 - protein, 11 aa, BK virus
QCSSNLSKPRA

SEQ ID NO: 8254 - protein, 11 aa, BK virus
CSSNLSKPRAL

SEQ ID NO: 8255 - protein, 11 aa, BK virus
SSNLSKPRALF

SEQ ID NO: 8256 - protein, 11 aa, BK virus
SNLSKPRALFL

SEQ ID NO: 8257 - protein, 11 aa, BK virus
NLSKPRALFLK

SEQ ID NO: 8258 - protein, 11 aa, BK virus
LSKPRALFLKI

SEQ ID NO: 8259 - protein, 11 aa, BK virus
SKPRALFLKIF

SEQ ID NO: 8260 - protein, 11 aa, BK virus
KPRALFLKIFY

SEQ ID NO: 8261 - protein, 11 aa, BK virus
PRALFLKIFYL

SEQ ID NO: 8262 - protein, 11 aa, BK virus
RALFLKIFYLN

SEQ ID NO: 8263 - protein, 11 aa, BK virus
ALFLKIFYLNA

SEQ ID NO: 8264 - protein, 11 aa, BK virus
LFLKIFYLNAL

SEQ ID NO: 8265 - protein, 11 aa, BK virus
FLKIFYLNALI

SEQ ID NO: 8266 - protein, 11 aa, BK virus
ADIACKGSAQK

SEQ ID NO: 8267 - protein, 11 aa, BK virus
DIACKGSAQKA

SEQ ID NO: 8268 - protein, 11 aa, BK virus
IACKGSAQKAF

SEQ ID NO: 8269 - protein, 11 aa, BK virus
ACKGSAQKAFW

SEQ ID NO: 8270 - protein, 11 aa, BK virus
CKGSAQKAFWN

SEQ ID NO: 8271 - protein, 11 aa, BK virus
KGSAQKAFWNK

SEQ ID NO: 8272 - protein, 11 aa, BK virus
AIPCSTGYLGK

SEQ ID NO: 8273 - protein, 11 aa, BK virus
IPCSTGYLGKE

SEQ ID NO: 8274 - protein, 11 aa, BK virus
PCSTGYLGKEE

SEQ ID NO: 8275 - protein, 11 aa, BK virus
CSTGYLGKEEN

SEQ ID NO: 8276 - protein, 11 aa, BK virus
STGYLGKEENQ

SEQ ID NO: 8277 - protein, 11 aa, BK virus
TGYLGKEENQH

SEQ ID NO: 8278 - protein, 11 aa, BK virus
GYLGKEENQHK

SEQ ID NO: 8279 - protein, 11 aa, BK virus
YLGKEENQHKP

SEQ ID NO: 8280 - protein, 11 aa, BK virus
LGKEENQHKPL

SEQ ID NO: 8281 - protein, 11 aa, BK virus
GKEENQHKPLS

SEQ ID NO: 8282 - protein, 11 aa, BK virus
KEENQHKPLSY

SEQ ID NO: 8283 - protein, 11 aa, BK virus
EENQHKPLSYS

SEQ ID NO: 8284 - protein, 11 aa, BK virus
ENQHKPLSYSR

SEQ ID NO: 8285 - protein, 11 aa, BK virus
NQHKPLSYSRF

SEQ ID NO: 8286 - protein, 11 aa, BK virus
QHKPLSYSRFQ

SEQ ID NO: 8287 - protein, 11 aa, BK virus
HKPLSYSRFQN

SEQ ID NO: 8288 - protein, 11 aa, BK virus
KPLSYSRFQNQ

SEQ ID NO: 8289 - protein, 11 aa, BK virus
PLSYSRFQNQA

SEQ ID NO: 8290 - protein, 11 aa, BK virus
LSYSRFQNQAD

SEQ ID NO: 8291 - protein, 11 aa, BK virus
SYSRFQNQADE

SEQ ID NO: 8292 - protein, 11 aa, BK virus
YSRFQNQADEL

SEQ ID NO: 8293 - protein, 11 aa, BK virus
SRFQNQADELP

SEQ ID NO: 8294 - protein, 11 aa, BK virus
RFQNQADELPL

SEQ ID NO: 8295 - protein, 11 aa, BK virus
FQNQADELPLH

SEQ ID NO: 8296 - protein, 11 aa, BK virus
QNQADELPLHP

SEQ ID NO: 8297 - protein, 11 aa, BK virus
NQADELPLHPA

SEQ ID NO: 8298 - protein, 11 aa, BK virus
QADELPLHPAP

SEQ ID NO: 8299 - protein, 11 aa, BK virus
ADELPLHPAPF

SEQ ID NO: 8300 - protein, 11 aa, BK virus
DELPLHPAPFF

SEQ ID NO: 8301 - protein, 11 aa, BK virus
ELPLHPAPFFY

SEQ ID NO: 8302 - protein, 11 aa, BK virus
LPLHPAPFFYT

SEQ ID NO: 8303 - protein, 11 aa, BK virus
PLHPAPFFYTK

SEQ ID NO: 8304 - protein, 11 aa, BK virus
LHPAPFFYTKY

SEQ ID NO: 8305 - protein, 11 aa, BK virus
HPAPFFYTKYS

SEQ ID NO: 8306 - protein, 11 aa, BK virus
PAPFFYTKYSF

SEQ ID NO: 8307 - protein, 11 aa, BK virus
APFFYTKYSFS

SEQ ID NO: 8308 - protein, 11 aa, BK virus
PFFYTKYSFSS

SEQ ID NO: 8309 - protein, 11 aa, BK virus
FFYTKYSFSSF

SEQ ID NO: 8310 - protein, 11 aa, BK virus
FYTKYSFSSFY

SEQ ID NO: 8311 - protein, 11 aa, BK virus
YTKYSFSSFYP

SEQ ID NO: 8312 - protein, 11 aa, BK virus
TKYSFSSFYPR

SEQ ID NO: 8313 - protein, 11 aa, BK virus
KYSFSSFYPRR

SEQ ID NO: 8314 - protein, 11 aa, BK virus
YSFSSFYPRRP

SEQ ID NO: 8315 - protein, 11 aa, BK virus
SFSSFYPRRPL

SEQ ID NO: 8316 - protein, 11 aa, BK virus
FSSFYPRRPLC

SEQ ID NO: 8317 - protein, 11 aa, BK virus
SSFYPRRPLCQ

SEQ ID NO: 8318 - protein, 11 aa, BK virus
SFYPRRPLCQG

SEQ ID NO: 8319 - protein, 11 aa, BK virus
FYPRRPLCQGE

SEQ ID NO: 8320 - protein, 11 aa, BK virus
YPRRPLCQGEI

SEQ ID NO: 8321 - protein, 11 aa, BK virus
PRRPLCQGEIP

SEQ ID NO: 8322 - protein, 11 aa, BK virus
RRPLCQGEIPY

SEQ ID NO: 8323 - protein, 11 aa, BK virus
RPLCQGEIPYT

SEQ ID NO: 8324 - protein, 11 aa, BK virus
PLCQGEIPYTS

SEQ ID NO: 8325 - protein, 11 aa, BK virus
LCQGEIPYTSL

SEQ ID NO: 8326 - protein, 11 aa, BK virus
CQGEIPYTSLN

SEQ ID NO: 8327 - protein, 11 aa, BK virus
QGEIPYTSLNK

SEQ ID NO: 8328 - protein, 11 aa, BK virus
GEIPYTSLNKL

SEQ ID NO: 8329 - protein, 11 aa, BK virus
EIPYTSLNKLF

SEQ ID NO: 8330 - protein, 11 aa, BK virus
IPYTSLNKLFS

SEQ ID NO: 8331 - protein, 11 aa, BK virus
PYTSLNKLFSL

SEQ ID NO: 8332 - protein, 11 aa, BK virus
YTSLNKLFSLR

SEQ ID NO: 8333 - protein, 11 aa, BK virus
TSLNKLFSLRE

SEQ ID NO: 8334 - protein, 11 aa, BK virus
SLNKLFSLRED

SEQ ID NO: 8335 - protein, 11 aa, BK virus
LNKLFSLREDF

SEQ ID NO: 8336 - protein, 11 aa, BK virus
NKLFSLREDFP

SEQ ID NO: 8337 - protein, 11 aa, BK virus
KLFSLREDFPR

SEQ ID NO: 8338 - protein, 11 aa, BK virus
LFSLREDFPRQ

SEQ ID NO: 8339 - protein, 11 aa, BK virus
FSLREDFPRQL

SEQ ID NO: 8340 - protein, 11 aa, BK virus
SLREDFPRQLF

SEQ ID NO: 8341 - protein, 11 aa, BK virus
LREDFPRQLFQ

SEQ ID NO: 8342 - protein, 11 aa, BK virus
REDFPRQLFQG

SEQ ID NO: 8343 - protein, 11 aa, BK virus
EDFPRQLFQGL

SEQ ID NO: 8344 - protein, 11 aa, BK virus
DFPRQLFQGLK

SEQ ID NO: 8345 - protein, 11 aa, BK virus
FPRQLFQGLKG

SEQ ID NO: 8346 - protein, 11 aa, BK virus
PRQLFQGLKGP

SEQ ID NO: 8347 - protein, 8 aa, BK virus
LQKLQKNR

SEQ ID NO: 8348 - protein, 8 aa, BK virus
QKLQKNRD

SEQ ID NO: 8349 - protein, 8 aa, BK virus
KLQKNRDF

SEQ ID NO: 8350 - protein, 8 aa, BK virus
LQKNRDFP

SEQ ID NO: 8351 - protein, 8 aa, BK virus
QKNRDFPK

SEQ ID NO: 8352 - protein, 8 aa, BK virus
ASEKASTP

SEQ ID NO: 8353 - protein, 8 aa, BK virus
SEKASTPL

SEQ ID NO: 8354 - protein, 8 aa, BK virus
EKASTPLL

SEQ ID NO: 8355 - protein, 8 aa, BK virus
KASTPLLL

SEQ ID NO: 8356 - protein, 8 aa, BK virus
ASTPLLLE

SEQ ID NO: 8357 - protein, 8 aa, BK virus
STPLLLER

SEQ ID NO: 8358 - protein, 8 aa, BK virus
TPLLLERK

SEQ ID NO: 8359 - protein, 8 aa, BK virus
PLLLERKG

SEQ ID NO: 8360 - protein, 8 aa, BK virus
LLLERKGG

SEQ ID NO: 8361 - protein, 8 aa, BK virus
LLERKGGG

SEQ ID NO: 8362 - protein, 8 aa, BK virus
LERKGGGR

SEQ ID NO: 8363 - protein, 8 aa, BK virus
ERKGGGRG

SEQ ID NO: 8364 - protein, 8 aa, BK virus
RKGGGRGG

SEQ ID NO: 8365 - protein, 8 aa, BK virus
KGGGRGGL

SEQ ID NO: 8366 - protein, 8 aa, BK virus
GGGRGGLG

SEQ ID NO: 8367 - protein, 8 aa, BK virus
GGRGGLGL

SEQ ID NO: 8368 - protein, 8 aa, BK virus
GRGGLGLL

SEQ ID NO: 8369 - protein, 8 aa, BK virus
RGGLGLLY

SEQ ID NO: 8370 - protein, 8 aa, BK virus
GGLGLLYI

SEQ ID NO: 8371 - protein, 8 aa, BK virus
GLGLLYII

SEQ ID NO: 8372 - protein, 8 aa, BK virus
LGLLYIIK

SEQ ID NO: 8373 - protein, 8 aa, BK virus
GLLYIIKK

SEQ ID NO: 8374 - protein, 8 aa, BK virus
LLYIIKKK

SEQ ID NO: 8375 - protein, 8 aa, BK virus
LYIIKKKA

SEQ ID NO: 8376 - protein, 8 aa, BK virus
YIIKKKAT

SEQ ID NO: 8377 - protein, 8 aa, BK virus
IIKKKATG

SEQ ID NO: 8378 - protein, 8 aa, BK virus
IKKKATGR

SEQ ID NO: 8379 - protein, 8 aa, BK virus
KKKATGRS

SEQ ID NO: 8380 - protein, 8 aa, BK virus
KKATGRSC

SEQ ID NO: 8381 - protein, 8 aa, BK virus
KATGRSCL

SEQ ID NO: 8382 - protein, 8 aa, BK virus
ATGRSCLP

SEQ ID NO: 8383 - protein, 8 aa, BK virus
TGRSCLPM

SEQ ID NO: 8384 - protein, 8 aa, BK virus
GRSCLPME

SEQ ID NO: 8385 - protein, 8 aa, BK virus
RSCLPMEC

SEQ ID NO: 8386 - protein, 8 aa, BK virus
SCLPMECS

SEQ ID NO: 8387 - protein, 8 aa, BK virus
CLPMECSQ

SEQ ID NO: 8388 - protein, 8 aa, BK virus
LPMECSQT

SEQ ID NO: 8389 - protein, 8 aa, BK virus
PMECSQTM

SEQ ID NO: 8390 - protein, 8 aa, BK virus
MECSQTMT

SEQ ID NO: 8391 - protein, 8 aa, BK virus
ECSQTMTS

SEQ ID NO: 8392 - protein, 8 aa, BK virus
CSQTMTSG

SEQ ID NO: 8393 - protein, 8 aa, BK virus
SQTMTSGR

SEQ ID NO: 8394 - protein, 8 aa, BK virus
QTMTSGRK

SEQ ID NO: 8395 - protein, 8 aa, BK virus
TMTSGRKV

SEQ ID NO: 8396 - protein, 8 aa, BK virus
MTSGRKVH

SEQ ID NO: 8397 - protein, 8 aa, BK virus
TSGRKVHD

SEQ ID NO: 8398 - protein, 8 aa, BK virus
SGRKVHDS

SEQ ID NO: 8399 - protein, 8 aa, BK virus
GRKVHDSQ

SEQ ID NO: 8400 - protein, 8 aa, BK virus
RKVHDSQG

SEQ ID NO: 8401 - protein, 8 aa, BK virus
KVHDSQGN

SEQ ID NO: 8402 - protein, 8 aa, BK virus
VHDSQGNA

SEQ ID NO: 8403 - protein, 8 aa, BK virus
HDSQGNAA

SEQ ID NO: 8404 - protein, 8 aa, BK virus
DSQGNAAK

SEQ ID NO: 8405 - protein, 8 aa, BK virus
SQGNAAKP

SEQ ID NO: 8406 - protein, 8 aa, BK virus
PQEGKCMT

SEQ ID NO: 8407 - protein, 8 aa, BK virus
QEGKCMTH

SEQ ID NO: 8408 - protein, 8 aa, BK virus
EGKCMTHR

SEQ ID NO: 8409 - protein, 8 aa, BK virus
GKCMTHRE

SEQ ID NO: 8410 - protein, 8 aa, BK virus
KCMTHREE

SEQ ID NO: 8411 - protein, 8 aa, BK virus
CMTHREEL

SEQ ID NO: 8412 - protein, 8 aa, BK virus
MTHREELL

SEQ ID NO: 8413 - protein, 8 aa, BK virus
THREELLT

SEQ ID NO: 8414 - protein, 8 aa, BK virus
HREELLTH

SEQ ID NO: 8415 - protein, 8 aa, BK virus
REELLTHG

SEQ ID NO: 8416 - protein, 8 aa, BK virus
EELLTHGM

SEQ ID NO: 8417 - protein, 8 aa, BK virus
ELLTHGMQ

SEQ ID NO: 8418 - protein, 8 aa, BK virus
LLTHGMQP

SEQ ID NO: 8419 - protein, 8 aa, BK virus
LTHGMQPN

SEQ ID NO: 8420 - protein, 8 aa, BK virus
THGMQPNH

SEQ ID NO: 8421 - protein, 8 aa, BK virus
HGMQPNHD

SEQ ID NO: 8422 - protein, 8 aa, BK virus
GMQPNHDL

SEQ ID NO: 8423 - protein, 8 aa, BK virus
MQPNHDLR

SEQ ID NO: 8424 - protein, 8 aa, BK virus
QPNHDLRK

SEQ ID NO: 8425 - protein, 8 aa, BK virus
PNHDLRKE

SEQ ID NO: 8426 - protein, 8 aa, BK virus
NHDLRKES

SEQ ID NO: 8427 - protein, 8 aa, BK virus
HDLRKESA

SEQ ID NO: 8428 - protein, 8 aa, BK virus
QTCFASLG

SEQ ID NO: 8429 - protein, 8 aa, BK virus
TCFASLGI

SEQ ID NO: 8430 - protein, 8 aa, BK virus
CFASLGIL

SEQ ID NO: 8431 - protein, 8 aa, BK virus
FASLGILA

SEQ ID NO: 8432 - protein, 8 aa, BK virus
ASLGILAL

SEQ ID NO: 8433 - protein, 8 aa, BK virus
SLGILALS

SEQ ID NO: 8434 - protein, 8 aa, BK virus
LGILALSP

SEQ ID NO: 8435 - protein, 8 aa, BK virus
GILALSPV

SEQ ID NO: 8436 - protein, 8 aa, BK virus
ILALSPVK

SEQ ID NO: 8437 - protein, 8 aa, BK virus
LALSPVKL

SEQ ID NO: 8438 - protein, 8 aa, BK virus
ALSPVKLD

SEQ ID NO: 8439 - protein, 8 aa, BK virus
LSPVKLDK

SEQ ID NO: 8440 - protein, 8 aa, BK virus
SPVKLDKG

SEQ ID NO: 8441 - protein, 8 aa, BK virus
PVKLDKGH

SEQ ID NO: 8442 - protein, 8 aa, BK virus
VKLDKGHG

SEQ ID NO: 8443 - protein, 8 aa, BK virus
KLDKGHGS

SEQ ID NO: 8444 - protein, 8 aa, BK virus
LDKGHGSA

SEQ ID NO: 8445 - protein, 8 aa, BK virus
DKGHGSAP

SEQ ID NO: 8446 - protein, 8 aa, BK virus
KGHGSAPA

SEQ ID NO: 8447 - protein, 8 aa, BK virus
GHGSAPAV

SEQ ID NO: 8448 - protein, 8 aa, BK virus
HGSAPAVT

SEQ ID NO: 8449 - protein, 8 aa, BK virus
GSAPAVTT

SEQ ID NO: 8450 - protein, 8 aa, BK virus
SAPAVTTS

SEQ ID NO: 8451 - protein, 8 aa, BK virus
APAVTTSF

SEQ ID NO: 8452 - protein, 8 aa, BK virus
PAVTTSFS

SEQ ID NO: 8453 - protein, 8 aa, BK virus
AVTTSFSE

SEQ ID NO: 8454 - protein, 8 aa, BK virus
VTTSFSES

SEQ ID NO: 8455 - protein, 8 aa, BK virus
TTSFSESW

SEQ ID NO: 8456 - protein, 8 aa, BK virus
NLDWNKKK

SEQ ID NO: 8457 - protein, 8 aa, BK virus
LDWNKKKS

SEQ ID NO: 8458 - protein, 8 aa, BK virus
DWNKKKSS

SEQ ID NO: 8459 - protein, 8 aa, BK virus
WNKKKSSE

SEQ ID NO: 8460 - protein, 8 aa, BK virus
NKKKSSED

SEQ ID NO: 8461 - protein, 8 aa, BK virus
KKKSSEDF

SEQ ID NO: 8462 - protein, 8 aa, BK virus
KKSSEDFY

SEQ ID NO: 8463 - protein, 8 aa, BK virus
KSSEDFYF

SEQ ID NO: 8464 - protein, 8 aa, BK virus
SSEDFYFY

SEQ ID NO: 8465 - protein, 8 aa, BK virus
SEDFYFYF

SEQ ID NO: 8466 - protein, 8 aa, BK virus
EDFYFYFR

SEQ ID NO: 8467 - protein, 8 aa, BK virus
DFYFYFRA

SEQ ID NO: 8468 - protein, 8 aa, BK virus
FYFYFRAF

SEQ ID NO: 8469 - protein, 8 aa, BK virus
YFYFRAFA

SEQ ID NO: 8470 - protein, 8 aa, BK virus
FYFRAFAG

SEQ ID NO: 8471 - protein, 8 aa, BK virus
YFRAFAGI

SEQ ID NO: 8472 - protein, 8 aa, BK virus
FRAFAGIL

SEQ ID NO: 8473 - protein, 8 aa, BK virus
RQCRREKQ

SEQ ID NO: 8474 - protein, 8 aa, BK virus
QCRREKQK

SEQ ID NO: 8475 - protein, 8 aa, BK virus
CRREKQKY

SEQ ID NO: 8476 - protein, 8 aa, BK virus
RREKQKYH

SEQ ID NO: 8477 - protein, 8 aa, BK virus
REKQKYHC

SEQ ID NO: 8478 - protein, 8 aa, BK virus
EKQKYHCF

SEQ ID NO: 8479 - protein, 8 aa, BK virus
KQKYHCFT

SEQ ID NO: 8480 - protein, 8 aa, BK virus
QKYHCFTC

SEQ ID NO: 8481 - protein, 8 aa, BK virus
KYHCFTCC

SEQ ID NO: 8482 - protein, 8 aa, BK virus
YHCFTCCK

SEQ ID NO: 8483 - protein, 8 aa, BK virus
HCFTCCKR

SEQ ID NO: 8484 - protein, 8 aa, BK virus
CFTCCKRL

SEQ ID NO: 8485 - protein, 8 aa, BK virus
FTCCKRLC

SEQ ID NO: 8486 - protein, 8 aa, BK virus
TCCKRLCK

SEQ ID NO: 8487 - protein, 8 aa, BK virus
CCKRLCKR

SEQ ID NO: 8488 - protein, 8 aa, BK virus
CKRLCKRL

SEQ ID NO: 8489 - protein, 8 aa, BK virus
KRLCKRLL

SEQ ID NO: 8490 - protein, 8 aa, BK virus
RLCKRLLG

SEQ ID NO: 8491 - protein, 8 aa, BK virus
LCKRLLGK

SEQ ID NO: 8492 - protein, 8 aa, BK virus
SLFFCISR

SEQ ID NO: 8493 - protein, 8 aa, BK virus
LFFCISRF

SEQ ID NO: 8494 - protein, 8 aa, BK virus
FFCISRFM

SEQ ID NO: 8495 - protein, 8 aa, BK virus
FCISRFMG

SEQ ID NO: 8496 - protein, 8 aa, BK virus
CISRFMGA

SEQ ID NO: 8497 - protein, 8 aa, BK virus
ISRFMGAA

SEQ ID NO: 8498 - protein, 8 aa, BK virus
SRFMGAAL

SEQ ID NO: 8499 - protein, 8 aa, BK virus
RFMGAALA

SEQ ID NO: 8500 - protein, 8 aa, BK virus
FMGAALAL

SEQ ID NO: 8501 - protein, 8 aa, BK virus
MGAALALL

SEQ ID NO: 8502 - protein, 8 aa, BK virus
GAALALLG

SEQ ID NO: 8503 - protein, 8 aa, BK virus
AALALLGD

SEQ ID NO: 8504 - protein, 8 aa, BK virus
ALALLGDL

SEQ ID NO: 8505 - protein, 8 aa, BK virus
LALLGDLV

SEQ ID NO: 8506 - protein, 8 aa, BK virus
ALLGDLVA

SEQ ID NO: 8507 - protein, 8 aa, BK virus
LLGDLVAS

SEQ ID NO: 8508 - protein, 8 aa, BK virus
LGDLVASV

SEQ ID NO: 8509 - protein, 8 aa, BK virus
GDLVASVS

SEQ ID NO: 8510 - protein, 8 aa, BK virus
DLVASVSE

SEQ ID NO: 8511 - protein, 8 aa, BK virus
LVASVSEA

SEQ ID NO: 8512 - protein, 8 aa, BK virus
VASVSEAA

SEQ ID NO: 8513 - protein, 8 aa, BK virus
ASVSEAAA

SEQ ID NO: 8514 - protein, 8 aa, BK virus
SVSEAAAA

SEQ ID NO: 8515 - protein, 8 aa, BK virus
VSEAAAAT

SEQ ID NO: 8516 - protein, 8 aa, BK virus
SEAAAATG

SEQ ID NO: 8517 - protein, 8 aa, BK virus
EAAAATGF

SEQ ID NO: 8518 - protein, 8 aa, BK virus
AAAATGFS

SEQ ID NO: 8519 - protein, 8 aa, BK virus
AAATGFSV

SEQ ID NO: 8520 - protein, 8 aa, BK virus
AATGFSVA

SEQ ID NO: 8521 - protein, 8 aa, BK virus
ATGFSVAE

SEQ ID NO: 8522 - protein, 8 aa, BK virus
TGFSVAEI

SEQ ID NO: 8523 - protein, 8 aa, BK virus
GFSVAEIA

SEQ ID NO: 8524 - protein, 8 aa, BK virus
FSVAEIAA

SEQ ID NO: 8525 - protein, 8 aa, BK virus
SVAEIAAG

SEQ ID NO: 8526 - protein, 8 aa, BK virus
VAEIAAGE

SEQ ID NO: 8527 - protein, 8 aa, BK virus
AEIAAGEA

SEQ ID NO: 8528 - protein, 8 aa, BK virus
EIAAGEAA

SEQ ID NO: 8529 - protein, 8 aa, BK virus
IAAGEAAA

SEQ ID NO: 8530 - protein, 8 aa, BK virus
AAGEAAAA

SEQ ID NO: 8531 - protein, 8 aa, BK virus
AGEAAAAI

SEQ ID NO: 8532 - protein, 8 aa, BK virus
GEAAAAIE

SEQ ID NO: 8533 - protein, 8 aa, BK virus
EAAAAIEV

SEQ ID NO: 8534 - protein, 8 aa, BK virus
AAAAIEVQ

SEQ ID NO: 8535 - protein, 8 aa, BK virus
AAAIEVQI

SEQ ID NO: 8536 - protein, 8 aa, BK virus
AAIEVQIA

SEQ ID NO: 8537 - protein, 8 aa, BK virus
AIEVQIAS

SEQ ID NO: 8538 - protein, 8 aa, BK virus
IEVQIASL

SEQ ID NO: 8539 - protein, 8 aa, BK virus
EVQIASLA

SEQ ID NO: 8540 - protein, 8 aa, BK virus
VQIASLAT

SEQ ID NO: 8541 - protein, 8 aa, BK virus
QIASLATV

SEQ ID NO: 8542 - protein, 8 aa, BK virus
IASLATVE

SEQ ID NO: 8543 - protein, 8 aa, BK virus
ASLATVEG

SEQ ID NO: 8544 - protein, 8 aa, BK virus
SLATVEGI

SEQ ID NO: 8545 - protein, 8 aa, BK virus
LATVEGIT

SEQ ID NO: 8546 - protein, 8 aa, BK virus
ATVEGITS

SEQ ID NO: 8547 - protein, 8 aa, BK virus
TVEGITST

SEQ ID NO: 8548 - protein, 8 aa, BK virus
VEGITSTS

SEQ ID NO: 8549 - protein, 8 aa, BK virus
EGITSTSE

SEQ ID NO: 8550 - protein, 8 aa, BK virus
GITSTSEA

SEQ ID NO: 8551 - protein, 8 aa, BK virus
ITSTSEAI

SEQ ID NO: 8552 - protein, 8 aa, BK virus
TSTSEAIA

SEQ ID NO: 8553 - protein, 8 aa, BK virus
STSEAIAA

SEQ ID NO: 8554 - protein, 8 aa, BK virus
TSEAIAAI

SEQ ID NO: 8555 - protein, 8 aa, BK virus
SEAIAAIG

SEQ ID NO: 8556 - protein, 8 aa, BK virus
EAIAAIGL

SEQ ID NO: 8557 - protein, 8 aa, BK virus
AIAAIGLT

SEQ ID NO: 8558 - protein, 8 aa, BK virus
IAAIGLTP

SEQ ID NO: 8559 - protein, 8 aa, BK virus
AAIGLTPQ

SEQ ID NO: 8560 - protein, 8 aa, BK virus
AIGLTPQT

SEQ ID NO: 8561 - protein, 8 aa, BK virus
IGLTPQTY

SEQ ID NO: 8562 - protein, 8 aa, BK virus
GLTPQTYA

SEQ ID NO: 8563 - protein, 8 aa, BK virus
LTPQTYAV

SEQ ID NO: 8564 - protein, 8 aa, BK virus
TPQTYAVI

SEQ ID NO: 8565 - protein, 8 aa, BK virus
PQTYAVIA

SEQ ID NO: 8566 - protein, 8 aa, BK virus
QTYAVIAG

SEQ ID NO: 8567 - protein, 8 aa, BK virus
TYAVIAGA

SEQ ID NO: 8568 - protein, 8 aa, BK virus
YAVIAGAP

SEQ ID NO: 8569 - protein, 8 aa, BK virus
AVIAGAPG

SEQ ID NO: 8570 - protein, 8 aa, BK virus
VIAGAPGA

SEQ ID NO: 8571 - protein, 8 aa, BK virus
IAGAPGAI

SEQ ID NO: 8572 - protein, 8 aa, BK virus
AGAPGAIA

SEQ ID NO: 8573 - protein, 8 aa, BK virus
GAPGAIAG

SEQ ID NO: 8574 - protein, 8 aa, BK virus
APGAIAGF

SEQ ID NO: 8575 - protein, 8 aa, BK virus
PGAIAGFA

SEQ ID NO: 8576 - protein, 8 aa, BK virus
GAIAGFAA

SEQ ID NO: 8577 - protein, 8 aa, BK virus
AIAGFAAL

SEQ ID NO: 8578 - protein, 8 aa, BK virus
IAGFAALI

SEQ ID NO: 8579 - protein, 8 aa, BK virus
AGFAALIQ

SEQ ID NO: 8580 - protein, 8 aa, BK virus
GFAALIQT

SEQ ID NO: 8581 - protein, 8 aa, BK virus
FAALIQTV

SEQ ID NO: 8582 - protein, 8 aa, BK virus
AALIQTVS

SEQ ID NO: 8583 - protein, 8 aa, BK virus
ALIQTVSG

SEQ ID NO: 8584 - protein, 8 aa, BK virus
LIQTVSGI

SEQ ID NO: 8585 - protein, 8 aa, BK virus
IQTVSGIS

SEQ ID NO: 8586 - protein, 8 aa, BK virus
QTVSGISS

SEQ ID NO: 8587 - protein, 8 aa, BK virus
TVSGISSL

SEQ ID NO: 8588 - protein, 8 aa, BK virus
VSGISSLA

SEQ ID NO: 8589 - protein, 8 aa, BK virus
SGISSLAQ

SEQ ID NO: 8590 - protein, 8 aa, BK virus
GISSLAQV

SEQ ID NO: 8591 - protein, 8 aa, BK virus
ISSLAQVG

SEQ ID NO: 8592 - protein, 8 aa, BK virus
SSLAQVGY

SEQ ID NO: 8593 - protein, 8 aa, BK virus
SLAQVGYK

SEQ ID NO: 8594 - protein, 8 aa, BK virus
LAQVGYKF

SEQ ID NO: 8595 - protein, 8 aa, BK virus
AQVGYKFF

SEQ ID NO: 8596 - protein, 8 aa, BK virus
QVGYKFFD

SEQ ID NO: 8597 - protein, 8 aa, BK virus
VGYKFFDD

SEQ ID NO: 8598 - protein, 8 aa, BK virus
GYKFFDDW

SEQ ID NO: 8599 - protein, 8 aa, BK virus
YKFFDDWD

SEQ ID NO: 8600 - protein, 8 aa, BK virus
KFFDDWDH

SEQ ID NO: 8601 - protein, 8 aa, BK virus
FFDDWDHK

SEQ ID NO: 8602 - protein, 8 aa, BK virus
FDDWDHKV

SEQ ID NO: 8603 - protein, 8 aa, BK virus
DDWDHKVS

SEQ ID NO: 8604 - protein, 8 aa, BK virus
DWDHKVST

SEQ ID NO: 8605 - protein, 8 aa, BK virus
WDHKVSTV

SEQ ID NO: 8606 - protein, 8 aa, BK virus
DHKVSTVG

SEQ ID NO: 8607 - protein, 8 aa, BK virus
HKVSTVGL

SEQ ID NO: 8608 - protein, 8 aa, BK virus
KVSTVGLY

SEQ ID NO: 8609 - protein, 8 aa, BK virus
VSTVGLYQ

SEQ ID NO: 8610 - protein, 8 aa, BK virus
STVGLYQQ

SEQ ID NO: 8611 - protein, 8 aa, BK virus
TVGLYQQS

SEQ ID NO: 8612 - protein, 8 aa, BK virus
VGLYQQSG

SEQ ID NO: 8613 - protein, 8 aa, BK virus
GLYQQSGM

SEQ ID NO: 8614 - protein, 8 aa, BK virus
LYQQSGMA

SEQ ID NO: 8615 - protein, 8 aa, BK virus
YQQSGMAL

SEQ ID NO: 8616 - protein, 8 aa, BK virus
QQSGMALE

SEQ ID NO: 8617 - protein, 8 aa, BK virus
QSGMALEL

SEQ ID NO: 8618 - protein, 8 aa, BK virus
SGMALELF

SEQ ID NO: 8619 - protein, 8 aa, BK virus
GMALELFN

SEQ ID NO: 8620 - protein, 8 aa, BK virus
MALELFNP

SEQ ID NO: 8621 - protein, 8 aa, BK virus
ALELFNPD

SEQ ID NO: 8622 - protein, 8 aa, BK virus
LELFNPDE

SEQ ID NO: 8623 - protein, 8 aa, BK virus
ELFNPDEY

SEQ ID NO: 8624 - protein, 8 aa, BK virus
LFNPDEYY

SEQ ID NO: 8625 - protein, 8 aa, BK virus
FNPDEYYD

SEQ ID NO: 8626 - protein, 8 aa, BK virus
NPDEYYDI

SEQ ID NO: 8627 - protein, 8 aa, BK virus
PDEYYDIL

SEQ ID NO: 8628 - protein, 8 aa, BK virus
DEYYDILF

SEQ ID NO: 8629 - protein, 8 aa, BK virus
EYYDILFP

SEQ ID NO: 8630 - protein, 8 aa, BK virus
YYDILFPG

SEQ ID NO: 8631 - protein, 8 aa, BK virus
YDILFPGV

SEQ ID NO: 8632 - protein, 8 aa, BK virus
DILFPGVN

SEQ ID NO: 8633 - protein, 8 aa, BK virus
ILFPGVNT

SEQ ID NO: 8634 - protein, 8 aa, BK virus
LFPGVNTF

SEQ ID NO: 8635 - protein, 8 aa, BK virus
FPGVNTFV

SEQ ID NO: 8636 - protein, 8 aa, BK virus
PGVNTFVN

SEQ ID NO: 8637 - protein, 8 aa, BK virus
GVNTFVNN

SEQ ID NO: 8638 - protein, 8 aa, BK virus
VNTFVNNI

SEQ ID NO: 8639 - protein, 8 aa, BK virus
NTFVNNIQ

SEQ ID NO: 8640 - protein, 8 aa, BK virus
TFVNNIQY

SEQ ID NO: 8641 - protein, 8 aa, BK virus
FVNNIQYL

SEQ ID NO: 8642 - protein, 8 aa, BK virus
VNNIQYLD

SEQ ID NO: 8643 - protein, 8 aa, BK virus
NNIQYLDP

SEQ ID NO: 8644 - protein, 8 aa, BK virus
NIQYLDPR

SEQ ID NO: 8645 - protein, 8 aa, BK virus
IQYLDPRH

SEQ ID NO: 8646 - protein, 8 aa, BK virus
QYLDPRHW

SEQ ID NO: 8647 - protein, 8 aa, BK virus
YLDPRHWG

SEQ ID NO: 8648 - protein, 8 aa, BK virus
LDPRHWGP

SEQ ID NO: 8649 - protein, 8 aa, BK virus
DPRHWGPS

SEQ ID NO: 8650 - protein, 8 aa, BK virus
PRHWGPSL

SEQ ID NO: 8651 - protein, 8 aa, BK virus
RHWGPSLF

SEQ ID NO: 8652 - protein, 8 aa, BK virus
HWGPSLFA

SEQ ID NO: 8653 - protein, 8 aa, BK virus
WGPSLFAT

SEQ ID NO: 8654 - protein, 8 aa, BK virus
GPSLFATI

SEQ ID NO: 8655 - protein, 8 aa, BK virus
PSLFATIS

SEQ ID NO: 8656 - protein, 8 aa, BK virus
SLFATISQ

SEQ ID NO: 8657 - protein, 8 aa, BK virus
LFATISQA

SEQ ID NO: 8658 - protein, 8 aa, BK virus
FATISQAL

SEQ ID NO: 8659 - protein, 8 aa, BK virus
ATISQALW

SEQ ID NO: 8660 - protein, 8 aa, BK virus
TISQALWH

SEQ ID NO: 8661 - protein, 8 aa, BK virus
ISQALWHV

SEQ ID NO: 8662 - protein, 8 aa, BK virus
SQALWHVI

SEQ ID NO: 8663 - protein, 8 aa, BK virus
QALWHVIR

SEQ ID NO: 8664 - protein, 8 aa, BK virus
ALWHVIRD

SEQ ID NO: 8665 - protein, 8 aa, BK virus
LWHVIRDD

SEQ ID NO: 8666 - protein, 8 aa, BK virus
WHVIRDDI

SEQ ID NO: 8667 - protein, 8 aa, BK virus
HVIRDDIP

SEQ ID NO: 8668 - protein, 8 aa, BK virus
VIRDDIPS

SEQ ID NO: 8669 - protein, 8 aa, BK virus
IRDDIPSI

SEQ ID NO: 8670 - protein, 8 aa, BK virus
RDDIPSIT

SEQ ID NO: 8671 - protein, 8 aa, BK virus
DDIPSITS

SEQ ID NO: 8672 - protein, 8 aa, BK virus
DIPSITSQ

SEQ ID NO: 8673 - protein, 8 aa, BK virus
IPSITSQE

SEQ ID NO: 8674 - protein, 8 aa, BK virus
PSITSQEL

SEQ ID NO: 8675 - protein, 8 aa, BK virus
SITSQELQ

SEQ ID NO: 8676 - protein, 8 aa, BK virus
ITSQELQR

SEQ ID NO: 8677 - protein, 8 aa, BK virus
TSQELQRR

SEQ ID NO: 8678 - protein, 8 aa, BK virus
SQELQRRT

SEQ ID NO: 8679 - protein, 8 aa, BK virus
QELQRRTE

SEQ ID NO: 8680 - protein, 8 aa, BK virus
ELQRRTER

SEQ ID NO: 8681 - protein, 8 aa, BK virus
LQRRTERF

SEQ ID NO: 8682 - protein, 8 aa, BK virus
QRRTERFF

SEQ ID NO: 8683 - protein, 8 aa, BK virus
RRTERFFR

SEQ ID NO: 8684 - protein, 8 aa, BK virus
RTERFFRD

SEQ ID NO: 8685 - protein, 8 aa, BK virus
TERFFRDS

SEQ ID NO: 8686 - protein, 8 aa, BK virus
ERFFRDSL

SEQ ID NO: 8687 - protein, 8 aa, BK virus
RFFRDSLA

SEQ ID NO: 8688 - protein, 8 aa, BK virus
FFRDSLAR

SEQ ID NO: 8689 - protein, 8 aa, BK virus
FRDSLARF

SEQ ID NO: 8690 - protein, 8 aa, BK virus
RDSLARFL

SEQ ID NO: 8691 - protein, 8 aa, BK virus
DSLARFLE

SEQ ID NO: 8692 - protein, 8 aa, BK virus
SLARFLEE

SEQ ID NO: 8693 - protein, 8 aa, BK virus
LARFLEET

SEQ ID NO: 8694 - protein, 8 aa, BK virus
ARFLEETT

SEQ ID NO: 8695 - protein, 8 aa, BK virus
RFLEETTW

SEQ ID NO: 8696 - protein, 8 aa, BK virus
FLEETTWT

SEQ ID NO: 8697 - protein, 8 aa, BK virus
LEETTWTI

SEQ ID NO: 8698 - protein, 8 aa, BK virus
EETTWTIV

SEQ ID NO: 8699 - protein, 8 aa, BK virus
ETTWTIVN

SEQ ID NO: 8700 - protein, 8 aa, BK virus
TTWTIVNA

SEQ ID NO: 8701 - protein, 8 aa, BK virus
TWTIVNAP

SEQ ID NO: 8702 - protein, 8 aa, BK virus
WTIVNAPI

SEQ ID NO: 8703 - protein, 8 aa, BK virus
TIVNAPIN

SEQ ID NO: 8704 - protein, 8 aa, BK virus
IVNAPINF

SEQ ID NO: 8705 - protein, 8 aa, BK virus
VNAPINFY

SEQ ID NO: 8706 - protein, 8 aa, BK virus
NAPINFYN

SEQ ID NO: 8707 - protein, 8 aa, BK virus
APINFYNY

SEQ ID NO: 8708 - protein, 8 aa, BK virus
PINFYNYI

SEQ ID NO: 8709 - protein, 8 aa, BK virus
INFYNYIQ

SEQ ID NO: 8710 - protein, 8 aa, BK virus
NFYNYIQQ

SEQ ID NO: 8711 - protein, 8 aa, BK virus
FYNYIQQY

SEQ ID NO: 8712 - protein, 8 aa, BK virus
YNYIQQYY

SEQ ID NO: 8713 - protein, 8 aa, BK virus
NYIQQYYS

SEQ ID NO: 8714 - protein, 8 aa, BK virus
YIQQYYSD

SEQ ID NO: 8715 - protein, 8 aa, BK virus
IQQYYSDL

SEQ ID NO: 8716 - protein, 8 aa, BK virus
QQYYSDLS

SEQ ID NO: 8717 - protein, 8 aa, BK virus
QYYSDLSP

SEQ ID NO: 8718 - protein, 8 aa, BK virus
YYSDLSPI

SEQ ID NO: 8719 - protein, 8 aa, BK virus
YSDLSPIR

SEQ ID NO: 8720 - protein, 8 aa, BK virus
SDLSPIRP

SEQ ID NO: 8721 - protein, 8 aa, BK virus
DLSPIRPS

SEQ ID NO: 8722 - protein, 8 aa, BK virus
LSPIRPSM

SEQ ID NO: 8723 - protein, 8 aa, BK virus
SPIRPSMV

SEQ ID NO: 8724 - protein, 8 aa, BK virus
PIRPSMVR

SEQ ID NO: 8725 - protein, 8 aa, BK virus
IRPSMVRQ

SEQ ID NO: 8726 - protein, 8 aa, BK virus
RPSMVRQV

SEQ ID NO: 8727 - protein, 8 aa, BK virus
PSMVRQVA

SEQ ID NO: 8728 - protein, 8 aa, BK virus
SMVRQVAE

SEQ ID NO: 8729 - protein, 8 aa, BK virus
MVRQVAER

SEQ ID NO: 8730 - protein, 8 aa, BK virus
VRQVAERE

SEQ ID NO: 8731 - protein, 8 aa, BK virus
RQVAEREG

SEQ ID NO: 8732 - protein, 8 aa, BK virus
QVAEREGT

SEQ ID NO: 8733 - protein, 8 aa, BK virus
VAEREGTR

SEQ ID NO: 8734 - protein, 8 aa, BK virus
AEREGTRV

SEQ ID NO: 8735 - protein, 8 aa, BK virus
EREGTRVH

SEQ ID NO: 8736 - protein, 8 aa, BK virus
REGTRVHF

SEQ ID NO: 8737 - protein, 8 aa, BK virus
EGTRVHFG

SEQ ID NO: 8738 - protein, 8 aa, BK virus
GTRVHFGH

SEQ ID NO: 8739 - protein, 8 aa, BK virus
TRVHFGHT

SEQ ID NO: 8740 - protein, 8 aa, BK virus
RVHFGHTY

SEQ ID NO: 8741 - protein, 8 aa, BK virus
VHFGHTYS

SEQ ID NO: 8742 - protein, 8 aa, BK virus
HFGHTYSI

SEQ ID NO: 8743 - protein, 8 aa, BK virus
FGHTYSID

SEQ ID NO: 8744 - protein, 8 aa, BK virus
GHTYSIDD

SEQ ID NO: 8745 - protein, 8 aa, BK virus
HTYSIDDA

SEQ ID NO: 8746 - protein, 8 aa, BK virus
TYSIDDAD

SEQ ID NO: 8747 - protein, 8 aa, BK virus
YSIDDADS

SEQ ID NO: 8748 - protein, 8 aa, BK virus
SIDDADSI

SEQ ID NO: 8749 - protein, 8 aa, BK virus
IDDADSIE

SEQ ID NO: 8750 - protein, 8 aa, BK virus
DDADSIEE

SEQ ID NO: 8751 - protein, 8 aa, BK virus
DADSIEEV

SEQ ID NO: 8752 - protein, 8 aa, BK virus
ADSIEEVT

SEQ ID NO: 8753 - protein, 8 aa, BK virus
DSIEEVTQ

SEQ ID NO: 8754 - protein, 8 aa, BK virus
SIEEVTQR

SEQ ID NO: 8755 - protein, 8 aa, BK virus
IEEVTQRM

SEQ ID NO: 8756 - protein, 8 aa, BK virus
EEVTQRMD

SEQ ID NO: 8757 - protein, 8 aa, BK virus
EVTQRMDL

SEQ ID NO: 8758 - protein, 8 aa, BK virus
VTQRMDLR

SEQ ID NO: 8759 - protein, 8 aa, BK virus
TQRMDLRN

SEQ ID NO: 8760 - protein, 8 aa, BK virus
QRMDLRNQ

SEQ ID NO: 8761 - protein, 8 aa, BK virus
RMDLRNQQ

SEQ ID NO: 8762 - protein, 8 aa, BK virus
MDLRNQQS

SEQ ID NO: 8763 - protein, 8 aa, BK virus
DLRNQQSV

SEQ ID NO: 8764 - protein, 8 aa, BK virus
LRNQQSVH

SEQ ID NO: 8765 - protein, 8 aa, BK virus
RNQQSVHS

SEQ ID NO: 8766 - protein, 8 aa, BK virus
NQQSVHSG

SEQ ID NO: 8767 - protein, 8 aa, BK virus
QQSVHSGE

SEQ ID NO: 8768 - protein, 8 aa, BK virus
QSVHSGEF

SEQ ID NO: 8769 - protein, 8 aa, BK virus
SVHSGEFI

SEQ ID NO: 8770 - protein, 8 aa, BK virus
VHSGEFIE

SEQ ID NO: 8771 - protein, 8 aa, BK virus
HSGEFIEK

SEQ ID NO: 8772 - protein, 8 aa, BK virus
SGEFIEKT

SEQ ID NO: 8773 - protein, 8 aa, BK virus
GEFIEKTI

SEQ ID NO: 8774 - protein, 8 aa, BK virus
EFIEKTIA

SEQ ID NO: 8775 - protein, 8 aa, BK virus
FIEKTIAP

SEQ ID NO: 8776 - protein, 8 aa, BK virus
IEKTIAPG

SEQ ID NO: 8777 - protein, 8 aa, BK virus
EKTIAPGG

SEQ ID NO: 8778 - protein, 8 aa, BK virus
KTIAPGGA

SEQ ID NO: 8779 - protein, 8 aa, BK virus
TIAPGGAN

SEQ ID NO: 8780 - protein, 8 aa, BK virus
IAPGGANQ

SEQ ID NO: 8781 - protein, 8 aa, BK virus
APGGANQR

SEQ ID NO: 8782 - protein, 8 aa, BK virus
PGGANQRT

SEQ ID NO: 8783 - protein, 8 aa, BK virus
GGANQRTA

SEQ ID NO: 8784 - protein, 8 aa, BK virus
GANQRTAP

SEQ ID NO: 8785 - protein, 8 aa, BK virus
ANQRTAPQ

SEQ ID NO: 8786 - protein, 8 aa, BK virus
NQRTAPQW

SEQ ID NO: 8787 - protein, 8 aa, BK virus
QRTAPQWM

SEQ ID NO: 8788 - protein, 8 aa, BK virus
RTAPQWML

SEQ ID NO: 8789 - protein, 8 aa, BK virus
TAPQWMLP

SEQ ID NO: 8790 - protein, 8 aa, BK virus
APQWMLPL

SEQ ID NO: 8791 - protein, 8 aa, BK virus
PQWMLPLL

SEQ ID NO: 8792 - protein, 8 aa, BK virus
QWMLPLLL

SEQ ID NO: 8793 - protein, 8 aa, BK virus
WMLPLLLG

SEQ ID NO: 8794 - protein, 8 aa, BK virus
MLPLLLGL

SEQ ID NO: 8795 - protein, 8 aa, BK virus
LPLLLGLY

SEQ ID NO: 8796 - protein, 8 aa, BK virus
PLLLGLYG

SEQ ID NO: 8797 - protein, 8 aa, BK virus
LLLGLYGT

SEQ ID NO: 8798 - protein, 8 aa, BK virus
LLGLYGTV

SEQ ID NO: 8799 - protein, 8 aa, BK virus
LGLYGTVT

SEQ ID NO: 8800 - protein, 8 aa, BK virus
GLYGTVTP

SEQ ID NO: 8801 - protein, 8 aa, BK virus
LYGTVTPA

SEQ ID NO: 8802 - protein, 8 aa, BK virus
YGTVTPAL

SEQ ID NO: 8803 - protein, 8 aa, BK virus
GTVTPALE

SEQ ID NO: 8804 - protein, 8 aa, BK virus
TVTPALEA

SEQ ID NO: 8805 - protein, 8 aa, BK virus
VTPALEAY

SEQ ID NO: 8806 - protein, 8 aa, BK virus
TPALEAYE

SEQ ID NO: 8807 - protein, 8 aa, BK virus
PALEAYED

SEQ ID NO: 8808 - protein, 8 aa, BK virus
ALEAYEDG

SEQ ID NO: 8809 - protein, 8 aa, BK virus
LEAYEDGP

SEQ ID NO: 8810 - protein, 8 aa, BK virus
EAYEDGPN

SEQ ID NO: 8811 - protein, 8 aa, BK virus
AYEDGPNQ

SEQ ID NO: 8812 - protein, 8 aa, BK virus
YEDGPNQK

SEQ ID NO: 8813 - protein, 8 aa, BK virus
EDGPNQKK

SEQ ID NO: 8814 - protein, 8 aa, BK virus
DGPNQKKR

SEQ ID NO: 8815 - protein, 8 aa, BK virus
GPNQKKRR

SEQ ID NO: 8816 - protein, 8 aa, BK virus
PNQKKRRV

SEQ ID NO: 8817 - protein, 8 aa, BK virus
NQKKRRVS

SEQ ID NO: 8818 - protein, 8 aa, BK virus
QKKRRVSR

SEQ ID NO: 8819 - protein, 8 aa, BK virus
KKRRVSRG

SEQ ID NO: 8820 - protein, 8 aa, BK virus
KRRVSRGS

SEQ ID NO: 8821 - protein, 8 aa, BK virus
RRVSRGSS

SEQ ID NO: 8822 - protein, 8 aa, BK virus
RVSRGSSQ

SEQ ID NO: 8823 - protein, 8 aa, BK virus
VSRGSSQK

SEQ ID NO: 8824 - protein, 8 aa, BK virus
SRGSSQKA

SEQ ID NO: 8825 - protein, 8 aa, BK virus
RGSSQKAK

SEQ ID NO: 8826 - protein, 8 aa, BK virus
GSSQKAKG

SEQ ID NO: 8827 - protein, 8 aa, BK virus
SSQKAKGT

SEQ ID NO: 8828 - protein, 8 aa, BK virus
SQKAKGTR

SEQ ID NO: 8829 - protein, 8 aa, BK virus
QKAKGTRA

SEQ ID NO: 8830 - protein, 8 aa, BK virus
KAKGTRAS

SEQ ID NO: 8831 - protein, 8 aa, BK virus
AKGTRASA

SEQ ID NO: 8832 - protein, 8 aa, BK virus
KGTRASAK

SEQ ID NO: 8833 - protein, 8 aa, BK virus
GTRASAKT

SEQ ID NO: 8834 - protein, 8 aa, BK virus
TRASAKTT

SEQ ID NO: 8835 - protein, 8 aa, BK virus
RASAKTTN

SEQ ID NO: 8836 - protein, 8 aa, BK virus
ASAKTTNK

SEQ ID NO: 8837 - protein, 8 aa, BK virus
SAKTTNKR

SEQ ID NO: 8838 - protein, 8 aa, BK virus
AKTTNKRR

SEQ ID NO: 8839 - protein, 8 aa, BK virus
KTTNKRRS

SEQ ID NO: 8840 - protein, 8 aa, BK virus
TTNKRRSR

SEQ ID NO: 8841 - protein, 8 aa, BK virus
TNKRRSRS

SEQ ID NO: 8842 - protein, 8 aa, BK virus
NKRRSRSS

SEQ ID NO: 8843 - protein, 8 aa, BK virus
KRRSRSSR

SEQ ID NO: 8844 - protein, 8 aa, BK virus
RRSRSSRS

SEQ ID NO: 8845 - protein, 8 aa, BK virus
NWGRCYYR

SEQ ID NO: 8846 - protein, 8 aa, BK virus
WGRCYYRG

SEQ ID NO: 8847 - protein, 8 aa, BK virus
GRCYYRGR

SEQ ID NO: 8848 - protein, 8 aa, BK virus
RCYYRGRM

SEQ ID NO: 8849 - protein, 8 aa, BK virus
CYYRGRML

SEQ ID NO: 8850 - protein, 8 aa, BK virus
YYRGRMLP

SEQ ID NO: 8851 - protein, 8 aa, BK virus
YRGRMLPK

SEQ ID NO: 8852 - protein, 8 aa, BK virus
RGRMLPKP

SEQ ID NO: 8853 - protein, 8 aa, BK virus
GRMLPKPR

SEQ ID NO: 8854 - protein, 8 aa, BK virus
RMLPKPRN

SEQ ID NO: 8855 - protein, 8 aa, BK virus
MLPKPRNG

SEQ ID NO: 8856 - protein, 8 aa, BK virus
LPKPRNGG

SEQ ID NO: 8857 - protein, 8 aa, BK virus
PKPRNGGS

SEQ ID NO: 8858 - protein, 8 aa, BK virus
KPRNGGSR

SEQ ID NO: 8859 - protein, 8 aa, BK virus
PREKNASL

SEQ ID NO: 8860 - protein, 8 aa, BK virus
REKNASLL

SEQ ID NO: 8861 - protein, 8 aa, BK virus
EKNASLLQ

SEQ ID NO: 8862 - protein, 8 aa, BK virus
KNASLLQH

SEQ ID NO: 8863 - protein, 8 aa, BK virus
NASLLQHS

SEQ ID NO: 8864 - protein, 8 aa, BK virus
ASLLQHSK

SEQ ID NO: 8865 - protein, 8 aa, BK virus
SLLQHSKN

SEQ ID NO: 8866 - protein, 8 aa, BK virus
LLQHSKNS

SEQ ID NO: 8867 - protein, 8 aa, BK virus
LQHSKNSP

SEQ ID NO: 8868 - protein, 8 aa, BK virus
QHSKNSPP

SEQ ID NO: 8869 - protein, 8 aa, BK virus
HSKNSPPQ

SEQ ID NO: 8870 - protein, 8 aa, BK virus
SKNSPPQF

SEQ ID NO: 8871 - protein, 8 aa, BK virus
KNSPPQFK

SEQ ID NO: 8872 - protein, 8 aa, BK virus
GPNLWKST

SEQ ID NO: 8873 - protein, 8 aa, BK virus
PNLWKSTD

SEQ ID NO: 8874 - protein, 8 aa, BK virus
NLWKSTDV

SEQ ID NO: 8875 - protein, 8 aa, BK virus
LWKSTDVG

SEQ ID NO: 8876 - protein, 8 aa, BK virus
WKSTDVGG

SEQ ID NO: 8877 - protein, 8 aa, BK virus
KSTDVGGC

SEQ ID NO: 8878 - protein, 8 aa, BK virus
STDVGGCN

SEQ ID NO: 8879 - protein, 8 aa, BK virus
TDVGGCNC

SEQ ID NO: 8880 - protein, 8 aa, BK virus
DVGGCNCT

SEQ ID NO: 8881 - protein, 8 aa, BK virus
VGGCNCTN

SEQ ID NO: 8882 - protein, 8 aa, BK virus
GGCNCTNR

SEQ ID NO: 8883 - protein, 8 aa, BK virus
GCNCTNRG

SEQ ID NO: 8884 - protein, 8 aa, BK virus
CNCTNRGY

SEQ ID NO: 8885 - protein, 8 aa, BK virus
NCTNRGYW

SEQ ID NO: 8886 - protein, 8 aa, BK virus
CTNRGYWN

SEQ ID NO: 8887 - protein, 8 aa, BK virus
TNRGYWNN

SEQ ID NO: 8888 - protein, 8 aa, BK virus
PSCRVTKS

SEQ ID NO: 8889 - protein, 8 aa, BK virus
SCRVTKSA

SEQ ID NO: 8890 - protein, 8 aa, BK virus
AWWRKTYS

SEQ ID NO: 8891 - protein, 8 aa, BK virus
WWRKTYSR

SEQ ID NO: 8892 - protein, 8 aa, BK virus
WRKTYSRQ

SEQ ID NO: 8893 - protein, 8 aa, BK virus
FPLLCCRW

SEQ ID NO: 8894 - protein, 8 aa, BK virus
PLLCCRWR

SEQ ID NO: 8895 - protein, 8 aa, BK virus
LLCCRWRT

SEQ ID NO: 8896 - protein, 8 aa, BK virus
LCCRWRTL

SEQ ID NO: 8897 - protein, 8 aa, BK virus
CCRWRTLG

SEQ ID NO: 8898 - protein, 8 aa, BK virus
CRWRTLGN

SEQ ID NO: 8899 - protein, 8 aa, BK virus
RWRTLGNA

SEQ ID NO: 8900 - protein, 8 aa, BK virus
WRTLGNAG

SEQ ID NO: 8901 - protein, 8 aa, BK virus
RTLGNAGS

SEQ ID NO: 8902 - protein, 8 aa, BK virus
TLGNAGSA

SEQ ID NO: 8903 - protein, 8 aa, BK virus
LGNAGSAN

SEQ ID NO: 8904 - protein, 8 aa, BK virus
GNAGSANE

SEQ ID NO: 8905 - protein, 8 aa, BK virus
NAGSANEL

SEQ ID NO: 8906 - protein, 8 aa, BK virus
AGSANELQ

SEQ ID NO: 8907 - protein, 8 aa, BK virus
GSANELQV

SEQ ID NO: 8908 - protein, 8 aa, BK virus
SANELQVK

SEQ ID NO: 8909 - protein, 8 aa, BK virus
ANELQVKV

SEQ ID NO: 8910 - protein, 8 aa, BK virus
NELQVKVP

SEQ ID NO: 8911 - protein, 8 aa, BK virus
KPNSPVPG

SEQ ID NO: 8912 - protein, 8 aa, BK virus
PNSPVPGN

SEQ ID NO: 8913 - protein, 8 aa, BK virus
NSPVPGNE

SEQ ID NO: 8914 - protein, 8 aa, BK virus
SPVPGNEY

SEQ ID NO: 8915 - protein, 8 aa, BK virus
GLFGQKQC

SEQ ID NO: 8916 - protein, 8 aa, BK virus
LFGQKQCL

SEQ ID NO: 8917 - protein, 8 aa, BK virus
FGQKQCLS

SEQ ID NO: 8918 - protein, 8 aa, BK virus
GQKQCLSS

SEQ ID NO: 8919 - protein, 8 aa, BK virus
VFWDFHRR

SEQ ID NO: 8920 - protein, 8 aa, BK virus
FWDFHRRG

SEQ ID NO: 8921 - protein, 8 aa, BK virus
WDFHRRGK

SEQ ID NO: 8922 - protein, 8 aa, BK virus
DFHRRGKC

SEQ ID NO: 8923 - protein, 8 aa, BK virus
FHRRGKCS

SEQ ID NO: 8924 - protein, 8 aa, BK virus
HRRGKCSP

SEQ ID NO: 8925 - protein, 8 aa, BK virus
RRGKCSPS

SEQ ID NO: 8926 - protein, 8 aa, BK virus
RGKCSPST

SEQ ID NO: 8927 - protein, 8 aa, BK virus
GKCSPSTS

SEQ ID NO: 8928 - protein, 8 aa, BK virus
KCSPSTSC

SEQ ID NO: 8929 - protein, 8 aa, BK virus
CSPSTSCD

SEQ ID NO: 8930 - protein, 8 aa, BK virus
SPSTSCDQ

SEQ ID NO: 8931 - protein, 8 aa, BK virus
PSTSCDQH

SEQ ID NO: 8932 - protein, 8 aa, BK virus
STSCDQHS

SEQ ID NO: 8933 - protein, 8 aa, BK virus
TSCDQHSY

SEQ ID NO: 8934 - protein, 8 aa, BK virus
SCDQHSYH

SEQ ID NO: 8935 - protein, 8 aa, BK virus
CDQHSYHS

SEQ ID NO: 8936 - protein, 8 aa, BK virus
DQHSYHSV

SEQ ID NO: 8937 - protein, 8 aa, BK virus
QHSYHSVA

SEQ ID NO: 8938 - protein, 8 aa, BK virus
HSYHSVAR

SEQ ID NO: 8939 - protein, 8 aa, BK virus
QLWNTTVE

SEQ ID NO: 8940 - protein, 8 aa, BK virus
LWNTTVER

SEQ ID NO: 8941 - protein, 8 aa, BK virus
WNTTVERP

SEQ ID NO: 8942 - protein, 8 aa, BK virus
NTTVERPC

SEQ ID NO: 8943 - protein, 8 aa, BK virus
TTVERPCK

SEQ ID NO: 8944 - protein, 8 aa, BK virus
TVERPCKI

SEQ ID NO: 8945 - protein, 8 aa, BK virus
VERPCKIF

SEQ ID NO: 8946 - protein, 8 aa, BK virus
DPPEKKIC

SEQ ID NO: 8947 - protein, 8 aa, BK virus
PPEKKICK

SEQ ID NO: 8948 - protein, 8 aa, BK virus
PEKKICKE

SEQ ID NO: 8949 - protein, 8 aa, BK virus
EKKICKES

SEQ ID NO: 8950 - protein, 8 aa, BK virus
KKICKESL

SEQ ID NO: 8951 - protein, 8 aa, BK virus
KICKESLP

SEQ ID NO: 8952 - protein, 8 aa, BK virus
ICKESLPN

SEQ ID NO: 8953 - protein, 8 aa, BK virus
CKESLPNF

SEQ ID NO: 8954 - protein, 8 aa, BK virus
KESLPNFL

SEQ ID NO: 8955 - protein, 8 aa, BK virus
ESLPNFLF

SEQ ID NO: 8956 - protein, 8 aa, BK virus
SLPNFLFA

SEQ ID NO: 8957 - protein, 8 aa, BK virus
LPNFLFAK

SEQ ID NO: 8958 - protein, 8 aa, BK virus
PYKQENPE

SEQ ID NO: 8959 - protein, 8 aa, BK virus
YKQENPES

SEQ ID NO: 8960 - protein, 8 aa, BK virus
KQENPESG

SEQ ID NO: 8961 - protein, 8 aa, BK virus
QENPESGW

SEQ ID NO: 8962 - protein, 8 aa, BK virus
ENPESGWA

SEQ ID NO: 8963 - protein, 8 aa, BK virus
NPESGWAA

SEQ ID NO: 8964 - protein, 8 aa, BK virus
PESGWAAY

SEQ ID NO: 8965 - protein, 8 aa, BK virus
ESGWAAYV

SEQ ID NO: 8966 - protein, 8 aa, BK virus
SGWAAYVW

SEQ ID NO: 8967 - protein, 8 aa, BK virus
GWAAYVWY

SEQ ID NO: 8968 - protein, 8 aa, BK virus
WAAYVWYG

SEQ ID NO: 8969 - protein, 8 aa, BK virus
AAYVWYGI

SEQ ID NO: 8970 - protein, 8 aa, BK virus
AYVWYGIP

SEQ ID NO: 8971 - protein, 8 aa, BK virus
YVWYGIPG

SEQ ID NO: 8972 - protein, 8 aa, BK virus
VWYGIPGR

SEQ ID NO: 8973 - protein, 8 aa, BK virus
WYGIPGRR

SEQ ID NO: 8974 - protein, 8 aa, BK virus
YGIPGRRG

SEQ ID NO: 8975 - protein, 8 aa, BK virus
WHRKTSRG

SEQ ID NO: 8976 - protein, 8 aa, BK virus
HRKTSRGP

SEQ ID NO: 8977 - protein, 8 aa, BK virus
RKTSRGPR

SEQ ID NO: 8978 - protein, 8 aa, BK virus
KTSRGPRY

SEQ ID NO: 8979 - protein, 8 aa, BK virus
TSRGPRYD

SEQ ID NO: 8980 - protein, 8 aa, BK virus
SRGPRYDK

SEQ ID NO: 8981 - protein, 8 aa, BK virus
RGPRYDKI

SEQ ID NO: 8982 - protein, 8 aa, BK virus
GPRYDKIY

SEQ ID NO: 8983 - protein, 8 aa, BK virus
QTGTIANQ

SEQ ID NO: 8984 - protein, 8 aa, BK virus
TGTIANQN

SEQ ID NO: 8985 - protein, 8 aa, BK virus
GTIANQNA

SEQ ID NO: 8986 - protein, 8 aa, BK virus
TIANQNAL

SEQ ID NO: 8987 - protein, 8 aa, BK virus
IANQNALN

SEQ ID NO: 8988 - protein, 8 aa, BK virus
ANQNALNR

SEQ ID NO: 8989 - protein, 8 aa, BK virus
NQNALNRC

SEQ ID NO: 8990 - protein, 8 aa, BK virus
QNALNRCF

SEQ ID NO: 8991 - protein, 8 aa, BK virus
NALNRCFY

SEQ ID NO: 8992 - protein, 8 aa, BK virus
ALNRCFYC

SEQ ID NO: 8993 - protein, 8 aa, BK virus
LNRCFYCT

SEQ ID NO: 8994 - protein, 8 aa, BK virus
NRCFYCTY

SEQ ID NO: 8995 - protein, 8 aa, BK virus
RCFYCTYT

SEQ ID NO: 8996 - protein, 8 aa, BK virus
CFYCTYTF

SEQ ID NO: 8997 - protein, 8 aa, BK virus
FYCTYTFN

SEQ ID NO: 8998 - protein, 8 aa, BK virus
YCTYTFNK

SEQ ID NO: 8999 - protein, 8 aa, BK virus
CTYTFNKC

SEQ ID NO: 9000 - protein, 8 aa, BK virus
TYTFNKCC

SEQ ID NO: 9001 - protein, 8 aa, BK virus
YTFNKCCF

SEQ ID NO: 9002 - protein, 8 aa, BK virus
TFNKCCFC

SEQ ID NO: 9003 - protein, 8 aa, BK virus
FNKCCFCI

SEQ ID NO: 9004 - protein, 8 aa, BK virus
NKCCFCIS

SEQ ID NO: 9005 - protein, 8 aa, BK virus
KCCFCISH

SEQ ID NO: 9006 - protein, 8 aa, BK virus
CCFCISHF

SEQ ID NO: 9007 - protein, 8 aa, BK virus
ACVILGVV

SEQ ID NO: 9008 - protein, 8 aa, BK virus
CVILGVVF

SEQ ID NO: 9009 - protein, 8 aa, BK virus
NTESLYTN

SEQ ID NO: 9010 - protein, 8 aa, BK virus
TESLYTNA

SEQ ID NO: 9011 - protein, 8 aa, BK virus
ESLYTNAT

SEQ ID NO: 9012 - protein, 8 aa, BK virus
SLYTNATL

SEQ ID NO: 9013 - protein, 8 aa, BK virus
LYTNATLD

SEQ ID NO: 9014 - protein, 8 aa, BK virus
YTNATLDY

SEQ ID NO: 9015 - protein, 8 aa, BK virus
TNATLDYG

SEQ ID NO: 9016 - protein, 8 aa, BK virus
NATLDYGG

SEQ ID NO: 9017 - protein, 8 aa, BK virus
ATLDYGGL

SEQ ID NO: 9018 - protein, 8 aa, BK virus
TLDYGGLT

SEQ ID NO: 9019 - protein, 8 aa, BK virus
LDYGGLTF

SEQ ID NO: 9020 - protein, 8 aa, BK virus
DYGGLTFG

SEQ ID NO: 9021 - protein, 8 aa, BK virus
YGGLTFGN

SEQ ID NO: 9022 - protein, 8 aa, BK virus
GGLTFGNL

SEQ ID NO: 9023 - protein, 8 aa, BK virus
GLTFGNLQ

SEQ ID NO: 9024 - protein, 8 aa, BK virus
LTFGNLQQ

SEQ ID NO: 9025 - protein, 8 aa, BK virus
TFGNLQQG

SEQ ID NO: 9026 - protein, 8 aa, BK virus
FGNLQQGL

SEQ ID NO: 9027 - protein, 8 aa, BK virus
GNLQQGLK

SEQ ID NO: 9028 - protein, 8 aa, BK virus
NLQQGLKY

SEQ ID NO: 9029 - protein, 8 aa, BK virus
LQQGLKYL

SEQ ID NO: 9030 - protein, 8 aa, BK virus
QQGLKYLR

SEQ ID NO: 9031 - protein, 8 aa, BK virus
QGLKYLRL

SEQ ID NO: 9032 - protein, 8 aa, BK virus
GLKYLRLG

SEQ ID NO: 9033 - protein, 8 aa, BK virus
LKYLRLGK

SEQ ID NO: 9034 - protein, 8 aa, BK virus
KYLRLGKS

SEQ ID NO: 9035 - protein, 8 aa, BK virus
YLRLGKSI

SEQ ID NO: 9036 - protein, 8 aa, BK virus
LRLGKSIV

SEQ ID NO: 9037 - protein, 8 aa, BK virus
RLGKSIVI

SEQ ID NO: 9038 - protein, 8 aa, BK virus
LGKSIVIG

SEQ ID NO: 9039 - protein, 8 aa, BK virus
GKSIVIGI

SEQ ID NO: 9040 - protein, 8 aa, BK virus
KSIVIGIQ

SEQ ID NO: 9041 - protein, 8 aa, BK virus
SIVIGIQC

SEQ ID NO: 9042 - protein, 8 aa, BK virus
IVIGIQCL

SEQ ID NO: 9043 - protein, 8 aa, BK virus
VIGIQCLI

SEQ ID NO: 9044 - protein, 8 aa, BK virus
IGIQCLIH

SEQ ID NO: 9045 - protein, 8 aa, BK virus
GIQCLIHV

SEQ ID NO: 9046 - protein, 8 aa, BK virus
IQCLIHVQ

SEQ ID NO: 9047 - protein, 8 aa, BK virus
QCLIHVQS

SEQ ID NO: 9048 - protein, 8 aa, BK virus
CLIHVQSL

SEQ ID NO: 9049 - protein, 8 aa, BK virus
LIHVQSLQ

SEQ ID NO: 9050 - protein, 8 aa, BK virus
IHVQSLQF

SEQ ID NO: 9051 - protein, 8 aa, BK virus
HVQSLQFL

SEQ ID NO: 9052 - protein, 8 aa, BK virus
VQSLQFLN

SEQ ID NO: 9053 - protein, 8 aa, BK virus
QSLQFLNP

SEQ ID NO: 9054 - protein, 8 aa, BK virus
SLQFLNPL

SEQ ID NO: 9055 - protein, 8 aa, BK virus
LQFLNPLL

SEQ ID NO: 9056 - protein, 8 aa, BK virus
QFLNPLLL

SEQ ID NO: 9057 - protein, 8 aa, BK virus
YQEYISPC

SEQ ID NO: 9058 - protein, 8 aa, BK virus
QEYISPCI

SEQ ID NO: 9059 - protein, 8 aa, BK virus
EYISPCIY

SEQ ID NO: 9060 - protein, 8 aa, BK virus
YISPCIYY

SEQ ID NO: 9061 - protein, 8 aa, BK virus
ISPCIYYI

SEQ ID NO: 9062 - protein, 8 aa, BK virus
SPCIYYIS

SEQ ID NO: 9063 - protein, 8 aa, BK virus
PCIYYISS

SEQ ID NO: 9064 - protein, 8 aa, BK virus
CIYYISSL

SEQ ID NO: 9065 - protein, 8 aa, BK virus
IYYISSLK

SEQ ID NO: 9066 - protein, 8 aa, BK virus
YYISSLKK

SEQ ID NO: 9067 - protein, 8 aa, BK virus
YISSLKKY

SEQ ID NO: 9068 - protein, 8 aa, BK virus
ISSLKKYT

SEQ ID NO: 9069 - protein, 8 aa, BK virus
SSLKKYTY

SEQ ID NO: 9070 - protein, 8 aa, BK virus
SLKKYTYL

SEQ ID NO: 9071 - protein, 8 aa, BK virus
LKKYTYLS

SEQ ID NO: 9072 - protein, 8 aa, BK virus
KKYTYLSQ

SEQ ID NO: 9073 - protein, 8 aa, BK virus
KYTYLSQN

SEQ ID NO: 9074 - protein, 8 aa, BK virus
YTYLSQNP

SEQ ID NO: 9075 - protein, 8 aa, BK virus
TYLSQNPA

SEQ ID NO: 9076 - protein, 8 aa, BK virus
YLSQNPAF

SEQ ID NO: 9077 - protein, 8 aa, BK virus
LSQNPAFP

SEQ ID NO: 9078 - protein, 8 aa, BK virus
SQNPAFPS

SEQ ID NO: 9079 - protein, 8 aa, BK virus
QNPAFPSI

SEQ ID NO: 9080 - protein, 8 aa, BK virus
NPAFPSIQ

SEQ ID NO: 9081 - protein, 8 aa, BK virus
PAFPSIQQ

SEQ ID NO: 9082 - protein, 8 aa, BK virus
AFPSIQQF

SEQ ID NO: 9083 - protein, 8 aa, BK virus
IVYQLQNQ

SEQ ID NO: 9084 - protein, 8 aa, BK virus
VYQLQNQL

SEQ ID NO: 9085 - protein, 8 aa, BK virus
YQLQNQLQ

SEQ ID NO: 9086 - protein, 8 aa, BK virus
QLQNQLQA

SEQ ID NO: 9087 - protein, 8 aa, BK virus
TKLAVATR

SEQ ID NO: 9088 - protein, 8 aa, BK virus
KLAVATRS

SEQ ID NO: 9089 - protein, 8 aa, BK virus
LAVATRSF

SEQ ID NO: 9090 - protein, 8 aa, BK virus
AVATRSFH

SEQ ID NO: 9091 - protein, 8 aa, BK virus
VATRSFHF

SEQ ID NO: 9092 - protein, 8 aa, BK virus
ATRSFHFV

SEQ ID NO: 9093 - protein, 8 aa, BK virus
TRSFHFVK

SEQ ID NO: 9094 - protein, 8 aa, BK virus
RSFHFVKF

SEQ ID NO: 9095 - protein, 8 aa, BK virus
SFHFVKFF

SEQ ID NO: 9096 - protein, 8 aa, BK virus
FHFVKFFF

SEQ ID NO: 9097 - protein, 8 aa, BK virus
HFVKFFFQ

SEQ ID NO: 9098 - protein, 8 aa, BK virus
FVKFFFQV

SEQ ID NO: 9099 - protein, 8 aa, BK virus
VKFFFQVR

SEQ ID NO: 9100 - protein, 8 aa, BK virus
KFFFQVRT

SEQ ID NO: 9101 - protein, 8 aa, BK virus
FFFQVRTL

SEQ ID NO: 9102 - protein, 8 aa, BK virus
FFQVRTLS

SEQ ID NO: 9103 - protein, 8 aa, BK virus
FQVRTLSF

SEQ ID NO: 9104 - protein, 8 aa, BK virus
QVRTLSFV

SEQ ID NO: 9105 - protein, 8 aa, BK virus
VRTLSFVR

SEQ ID NO: 9106 - protein, 8 aa, BK virus
RTLSFVRI

SEQ ID NO: 9107 - protein, 8 aa, BK virus
TLSFVRIF

SEQ ID NO: 9108 - protein, 8 aa, BK virus
LSFVRIFL

SEQ ID NO: 9109 - protein, 8 aa, BK virus
SFVRIFLN

SEQ ID NO: 9110 - protein, 8 aa, BK virus
FVRIFLNI

SEQ ID NO: 9111 - protein, 8 aa, BK virus
VRIFLNIF

SEQ ID NO: 9112 - protein, 8 aa, BK virus
RIFLNIFW

SEQ ID NO: 9113 - protein, 8 aa, BK virus
IFLNIFWA

SEQ ID NO: 9114 - protein, 8 aa, BK virus
PSLVEIFG

SEQ ID NO: 9115 - protein, 8 aa, BK virus
SLVEIFGF

SEQ ID NO: 9116 - protein, 8 aa, BK virus
LVEIFGFF

SEQ ID NO: 9117 - protein, 8 aa, BK virus
VEIFGFFC

SEQ ID NO: 9118 - protein, 8 aa, BK virus
EIFGFFCL

SEQ ID NO: 9119 - protein, 8 aa, BK virus
IFGFFCLN

SEQ ID NO: 9120 - protein, 8 aa, BK virus
FGFFCLNV

SEQ ID NO: 9121 - protein, 8 aa, BK virus
GFFCLNVS

SEQ ID NO: 9122 - protein, 8 aa, BK virus
FFCLNVSF

SEQ ID NO: 9123 - protein, 8 aa, BK virus
FCLNVSFL

SEQ ID NO: 9124 - protein, 8 aa, BK virus
CLNVSFLN

SEQ ID NO: 9125 - protein, 8 aa, BK virus
LNVSFLNL

SEQ ID NO: 9126 - protein, 8 aa, BK virus
NVSFLNLP

SEQ ID NO: 9127 - protein, 8 aa, BK virus
HFHLNNLS

SEQ ID NO: 9128 - protein, 8 aa, BK virus
FHLNNLSN

SEQ ID NO: 9129 - protein, 8 aa, BK virus
HLNNLSNC

SEQ ID NO: 9130 - protein, 8 aa, BK virus
LNNLSNCL

SEQ ID NO: 9131 - protein, 8 aa, BK virus
NNLSNCLN

SEQ ID NO: 9132 - protein, 8 aa, BK virus
NLSNCLNC

SEQ ID NO: 9133 - protein, 8 aa, BK virus
LSNCLNCL

SEQ ID NO: 9134 - protein, 8 aa, BK virus
SNCLNCLF

SEQ ID NO: 9135 - protein, 8 aa, BK virus
NCLNCLFH

SEQ ID NO: 9136 - protein, 8 aa, BK virus
CLNCLFHV

SEQ ID NO: 9137 - protein, 8 aa, BK virus
LNCLFHVL

SEQ ID NO: 9138 - protein, 8 aa, BK virus
NCLFHVLK

SEQ ID NO: 9139 - protein, 8 aa, BK virus
CLFHVLKA

SEQ ID NO: 9140 - protein, 8 aa, BK virus
LFHVLKAN

SEQ ID NO: 9141 - protein, 8 aa, BK virus
FHVLKANP

SEQ ID NO: 9142 - protein, 8 aa, BK virus
HVLKANPL

SEQ ID NO: 9143 - protein, 8 aa, BK virus
VLKANPLI

SEQ ID NO: 9144 - protein, 8 aa, BK virus
LKANPLIQ

SEQ ID NO: 9145 - protein, 8 aa, BK virus
KANPLIQL

SEQ ID NO: 9146 - protein, 8 aa, BK virus
ANPLIQLL

SEQ ID NO: 9147 - protein, 8 aa, BK virus
NPLIQLLS

SEQ ID NO: 9148 - protein, 8 aa, BK virus
PLIQLLSL

SEQ ID NO: 9149 - protein, 8 aa, BK virus
LIQLLSLL

SEQ ID NO: 9150 - protein, 8 aa, BK virus
IQLLSLLH

SEQ ID NO: 9151 - protein, 8 aa, BK virus
QLLSLLHL

SEQ ID NO: 9152 - protein, 8 aa, BK virus
LLSLLHLQ

SEQ ID NO: 9153 - protein, 8 aa, BK virus
LSLLHLQK

SEQ ID NO: 9154 - protein, 8 aa, BK virus
SLLHLQKQ

SEQ ID NO: 9155 - protein, 8 aa, BK virus
LLHLQKQP

SEQ ID NO: 9156 - protein, 8 aa, BK virus
LHLQKQPC

SEQ ID NO: 9157 - protein, 8 aa, BK virus
HLQKQPCT

SEQ ID NO: 9158 - protein, 8 aa, BK virus
LQKQPCTD

SEQ ID NO: 9159 - protein, 8 aa, BK virus
QKQPCTDL

SEQ ID NO: 9160 - protein, 8 aa, BK virus
LHLAQRLA

SEQ ID NO: 9161 - protein, 8 aa, BK virus
HLAQRLAF

SEQ ID NO: 9162 - protein, 8 aa, BK virus
LAQRLAFP

SEQ ID NO: 9163 - protein, 8 aa, BK virus
AQRLAFPW

SEQ ID NO: 9164 - protein, 8 aa, BK virus
QRLAFPWV

SEQ ID NO: 9165 - protein, 8 aa, BK virus
RLAFPWVG

SEQ ID NO: 9166 - protein, 8 aa, BK virus
LAFPWVGL

SEQ ID NO: 9167 - protein, 8 aa, BK virus
AFPWVGLH

SEQ ID NO: 9168 - protein, 8 aa, BK virus
FPWVGLHL

SEQ ID NO: 9169 - protein, 8 aa, BK virus
PWVGLHLR

SEQ ID NO: 9170 - protein, 8 aa, BK virus
WVGLHLRL

SEQ ID NO: 9171 - protein, 8 aa, BK virus
VGLHLRLY

SEQ ID NO: 9172 - protein, 8 aa, BK virus
GLHLRLYH

SEQ ID NO: 9173 - protein, 8 aa, BK virus
LHLRLYHH

SEQ ID NO: 9174 - protein, 8 aa, BK virus
HLRLYHHT

SEQ ID NO: 9175 - protein, 8 aa, BK virus
LRLYHHTN

SEQ ID NO: 9176 - protein, 8 aa, BK virus
RLYHHTNL

SEQ ID NO: 9177 - protein, 8 aa, BK virus
LYHHTNLI

SEQ ID NO: 9178 - protein, 8 aa, BK virus
YHHTNLIT

SEQ ID NO: 9179 - protein, 8 aa, BK virus
HHTNLITL

SEQ ID NO: 9180 - protein, 8 aa, BK virus
HTNLITLQ

SEQ ID NO: 9181 - protein, 8 aa, BK virus
TNLITLQL

SEQ ID NO: 9182 - protein, 8 aa, BK virus
NLITLQLV

SEQ ID NO: 9183 - protein, 8 aa, BK virus
LITLQLVL

SEQ ID NO: 9184 - protein, 8 aa, BK virus
ITLQLVLF

SEQ ID NO: 9185 - protein, 8 aa, BK virus
TLQLVLFF

SEQ ID NO: 9186 - protein, 8 aa, BK virus
LQLVLFFH

SEQ ID NO: 9187 - protein, 8 aa, BK virus
QLVLFFHY

SEQ ID NO: 9188 - protein, 8 aa, BK virus
LVLFFHYQ

SEQ ID NO: 9189 - protein, 8 aa, BK virus
VLFFHYQW

SEQ ID NO: 9190 - protein, 8 aa, BK virus
LFFHYQWD

SEQ ID NO: 9191 - protein, 8 aa, BK virus
FFHYQWDL

SEQ ID NO: 9192 - protein, 8 aa, BK virus
KQYSAKNQ

SEQ ID NO: 9193 - protein, 8 aa, BK virus
QYSAKNQI

SEQ ID NO: 9194 - protein, 8 aa, BK virus
YSAKNQIL

SEQ ID NO: 9195 - protein, 8 aa, BK virus
SAKNQILQ

SEQ ID NO: 9196 - protein, 8 aa, BK virus
AKNQILQN

SEQ ID NO: 9197 - protein, 8 aa, BK virus
KNQILQNP

SEQ ID NO: 9198 - protein, 8 aa, BK virus
NQILQNPF

SEQ ID NO: 9199 - protein, 8 aa, BK virus
VANSAAKQ

SEQ ID NO: 9200 - protein, 8 aa, BK virus
ANSAAKQH

SEQ ID NO: 9201 - protein, 8 aa, BK virus
NSAAKQHL

SEQ ID NO: 9202 - protein, 8 aa, BK virus
SAAKQHLP

SEQ ID NO: 9203 - protein, 8 aa, BK virus
AAKQHLPY

SEQ ID NO: 9204 - protein, 8 aa, BK virus
AKQHLPYI

SEQ ID NO: 9205 - protein, 8 aa, BK virus
KQHLPYIV

SEQ ID NO: 9206 - protein, 8 aa, BK virus
QHLPYIVL

SEQ ID NO: 9207 - protein, 8 aa, BK virus
HLPYIVLV

SEQ ID NO: 9208 - protein, 8 aa, BK virus
LPYIVLVQ

SEQ ID NO: 9209 - protein, 8 aa, BK virus
PYIVLVQH

SEQ ID NO: 9210 - protein, 8 aa, BK virus
YIVLVQHF

SEQ ID NO: 9211 - protein, 8 aa, BK virus
IVLVQHFH

SEQ ID NO: 9212 - protein, 8 aa, BK virus
VLVQHFHE

SEQ ID NO: 9213 - protein, 8 aa, BK virus
LVQHFHEL

SEQ ID NO: 9214 - protein, 8 aa, BK virus
VQHFHELQ

SEQ ID NO: 9215 - protein, 8 aa, BK virus
QHFHELQI

SEQ ID NO: 9216 - protein, 8 aa, BK virus
HFHELQIL

SEQ ID NO: 9217 - protein, 8 aa, BK virus
FHELQILN

SEQ ID NO: 9218 - protein, 8 aa, BK virus
HELQILNP

SEQ ID NO: 9219 - protein, 8 aa, BK virus
ELQILNPF

SEQ ID NO: 9220 - protein, 8 aa, BK virus
LQILNPFY

SEQ ID NO: 9221 - protein, 8 aa, BK virus
QILNPFYL

SEQ ID NO: 9222 - protein, 8 aa, BK virus
ILNPFYLI

SEQ ID NO: 9223 - protein, 8 aa, BK virus
LNPFYLIY

SEQ ID NO: 9224 - protein, 8 aa, BK virus
NPFYLIYD

SEQ ID NO: 9225 - protein, 8 aa, BK virus
IFLLAFLP

SEQ ID NO: 9226 - protein, 8 aa, BK virus
FLLAFLPW

SEQ ID NO: 9227 - protein, 8 aa, BK virus
LLAFLPWS

SEQ ID NO: 9228 - protein, 8 aa, BK virus
LAFLPWSY

SEQ ID NO: 9229 - protein, 8 aa, BK virus
AFLPWSYE

SEQ ID NO: 9230 - protein, 8 aa, BK virus
FLPWSYEG

SEQ ID NO: 9231 - protein, 8 aa, BK virus
LPWSYEGY

SEQ ID NO: 9232 - protein, 8 aa, BK virus
PWSYEGYL

SEQ ID NO: 9233 - protein, 8 aa, BK virus
WSYEGYLL

SEQ ID NO: 9234 - protein, 8 aa, BK virus
SYEGYLLF

SEQ ID NO: 9235 - protein, 8 aa, BK virus
YEGYLLFF

SEQ ID NO: 9236 - protein, 8 aa, BK virus
LKLYLLLA

SEQ ID NO: 9237 - protein, 8 aa, BK virus
KLYLLLAD

SEQ ID NO: 9238 - protein, 8 aa, BK virus
LYLLLADK

SEQ ID NO: 9239 - protein, 8 aa, BK virus
YLLLADKY

SEQ ID NO: 9240 - protein, 8 aa, BK virus
LLLADKYF

SEQ ID NO: 9241 - protein, 8 aa, BK virus
LLADKYFF

SEQ ID NO: 9242 - protein, 8 aa, BK virus
LADKYFFD

SEQ ID NO: 9243 - protein, 8 aa, BK virus
ADKYFFDF

SEQ ID NO: 9244 - protein, 8 aa, BK virus
DKYFFDFY

SEQ ID NO: 9245 - protein, 8 aa, BK virus
KYFFDFYF

SEQ ID NO: 9246 - protein, 8 aa, BK virus
YFFDFYFL

SEQ ID NO: 9247 - protein, 8 aa, BK virus
FFDFYFLQ

SEQ ID NO: 9248 - protein, 8 aa, BK virus
FDFYFLQK

SEQ ID NO: 9249 - protein, 8 aa, BK virus
HLQSAFHD

SEQ ID NO: 9250 - protein, 8 aa, BK virus
LQSAFHDT

SEQ ID NO: 9251 - protein, 8 aa, BK virus
SDKAGLFS

SEQ ID NO: 9252 - protein, 8 aa, BK virus
DKAGLFSD

SEQ ID NO: 9253 - protein, 8 aa, BK virus
KAGLFSDT

SEQ ID NO: 9254 - protein, 8 aa, BK virus
AGLFSDTF

SEQ ID NO: 9255 - protein, 8 aa, BK virus
GLFSDTFY

SEQ ID NO: 9256 - protein, 8 aa, BK virus
LFSDTFYT

SEQ ID NO: 9257 - protein, 8 aa, BK virus
FSDTFYTP

SEQ ID NO: 9258 - protein, 8 aa, BK virus
SDTFYTPL

SEQ ID NO: 9259 - protein, 8 aa, BK virus
DTFYTPLH

SEQ ID NO: 9260 - protein, 8 aa, BK virus
TFYTPLHC

SEQ ID NO: 9261 - protein, 8 aa, BK virus
FYTPLHCI

SEQ ID NO: 9262 - protein, 8 aa, BK virus
YTPLHCIE

SEQ ID NO: 9263 - protein, 8 aa, BK virus
TPLHCIEI

SEQ ID NO: 9264 - protein, 8 aa, BK virus
PLHCIEIL

SEQ ID NO: 9265 - protein, 8 aa, BK virus
LHCIEILN

SEQ ID NO: 9266 - protein, 8 aa, BK virus
HCIEILNT

SEQ ID NO: 9267 - protein, 8 aa, BK virus
CIEILNTY

SEQ ID NO: 9268 - protein, 8 aa, BK virus
IEILNTYL

SEQ ID NO: 9269 - protein, 8 aa, BK virus
EILNTYLI

SEQ ID NO: 9270 - protein, 8 aa, BK virus
ILNTYLII

SEQ ID NO: 9271 - protein, 8 aa, BK virus
LNTYLIIK

SEQ ID NO: 9272 - protein, 8 aa, BK virus
NTYLIIKT

SEQ ID NO: 9273 - protein, 8 aa, BK virus
TYLIIKTH

SEQ ID NO: 9274 - protein, 8 aa, BK virus
YLIIKTHP

SEQ ID NO: 9275 - protein, 8 aa, BK virus
LIIKTHPH

SEQ ID NO: 9276 - protein, 8 aa, BK virus
IIKTHPHT

SEQ ID NO: 9277 - protein, 8 aa, BK virus
IKTHPHTL

SEQ ID NO: 9278 - protein, 8 aa, BK virus
KTHPHTLS

SEQ ID NO: 9279 - protein, 8 aa, BK virus
THPHTLSL

SEQ ID NO: 9280 - protein, 8 aa, BK virus
HPHTLSLL

SEQ ID NO: 9281 - protein, 8 aa, BK virus
PHTLSLLH

SEQ ID NO: 9282 - protein, 8 aa, BK virus
HTLSLLHT

SEQ ID NO: 9283 - protein, 8 aa, BK virus
TLSLLHTQ

SEQ ID NO: 9284 - protein, 8 aa, BK virus
LISKTPAL

SEQ ID NO: 9285 - protein, 8 aa, BK virus
ISKTPALF

SEQ ID NO: 9286 - protein, 8 aa, BK virus
SKTPALFL

SEQ ID NO: 9287 - protein, 8 aa, BK virus
KTPALFLQ

SEQ ID NO: 9288 - protein, 8 aa, BK virus
TPALFLQA

SEQ ID NO: 9289 - protein, 8 aa, BK virus
PALFLQAL

SEQ ID NO: 9290 - protein, 8 aa, BK virus
ALFLQALL

SEQ ID NO: 9291 - protein, 8 aa, BK virus
LFLQALLG

SEQ ID NO: 9292 - protein, 8 aa, BK virus
NHAPLSPL

SEQ ID NO: 9293 - protein, 8 aa, BK virus
HAPLSPLE

SEQ ID NO: 9294 - protein, 8 aa, BK virus
APLSPLEC

SEQ ID NO: 9295 - protein, 8 aa, BK virus
PLSPLECF

SEQ ID NO: 9296 - protein, 8 aa, BK virus
LSPLECFL

SEQ ID NO: 9297 - protein, 8 aa, BK virus
SPLECFLL

SEQ ID NO: 9298 - protein, 8 aa, BK virus
LRHYIVSI

SEQ ID NO: 9299 - protein, 8 aa, BK virus
RHYIVSIP

SEQ ID NO: 9300 - protein, 8 aa, BK virus
HYIVSIPY

SEQ ID NO: 9301 - protein, 8 aa, BK virus
RYTAFDRN

SEQ ID NO: 9302 - protein, 8 aa, BK virus
YTAFDRNY

SEQ ID NO: 9303 - protein, 8 aa, BK virus
LQKLYVYV

SEQ ID NO: 9304 - protein, 8 aa, BK virus
QKLYVYVE

SEQ ID NO: 9305 - protein, 8 aa, BK virus
KLYVYVEL

SEQ ID NO: 9306 - protein, 8 aa, BK virus
LYVYVELK

SEQ ID NO: 9307 - protein, 8 aa, BK virus
YVYVELKR

SEQ ID NO: 9308 - protein, 8 aa, BK virus
VYVELKRI

SEQ ID NO: 9309 - protein, 8 aa, BK virus
YYAQHTCV

SEQ ID NO: 9310 - protein, 8 aa, BK virus
YAQHTCVY

SEQ ID NO: 9311 - protein, 8 aa, BK virus
VFYTEFEL

SEQ ID NO: 9312 - protein, 8 aa, BK virus
FYTEFELF

SEQ ID NO: 9313 - protein, 8 aa, BK virus
YTEFELFL

SEQ ID NO: 9314 - protein, 8 aa, BK virus
YTQQSRQG

SEQ ID NO: 9315 - protein, 8 aa, BK virus
TQQSRQGF

SEQ ID NO: 9316 - protein, 8 aa, BK virus
QQSRQGFY

SEQ ID NO: 9317 - protein, 8 aa, BK virus
QSRQGFYY

SEQ ID NO: 9318 - protein, 8 aa, BK virus
ETGVDQRE

SEQ ID NO: 9319 - protein, 8 aa, BK virus
TGVDQRES

SEQ ID NO: 9320 - protein, 8 aa, BK virus
GVDQRESL

SEQ ID NO: 9321 - protein, 8 aa, BK virus
GLLPFFFF

SEQ ID NO: 9322 - protein, 8 aa, BK virus
LLPFFFFW

SEQ ID NO: 9323 - protein, 8 aa, BK virus
LPFFFFWV

SEQ ID NO: 9324 - protein, 8 aa, BK virus
PFFFFWVV

SEQ ID NO: 9325 - protein, 8 aa, BK virus
FFFFWVVL

SEQ ID NO: 9326 - protein, 8 aa, BK virus
FFFWVVLS

SEQ ID NO: 9327 - protein, 8 aa, BK virus
FFWVVLSV

SEQ ID NO: 9328 - protein, 8 aa, BK virus
FWVVLSVE

SEQ ID NO: 9329 - protein, 8 aa, BK virus
WVVLSVEN

SEQ ID NO: 9330 - protein, 8 aa, BK virus
VVLSVENL

SEQ ID NO: 9331 - protein, 8 aa, BK virus
VLSVENLL

SEQ ID NO: 9332 - protein, 8 aa, BK virus
LSVENLLL

SEQ ID NO: 9333 - protein, 8 aa, BK virus
SVENLLLL

SEQ ID NO: 9334 - protein, 8 aa, BK virus
VENLLLLL

SEQ ID NO: 9335 - protein, 8 aa, BK virus
ENLLLLLH

SEQ ID NO: 9336 - protein, 8 aa, BK virus
NLLLLLHH

SEQ ID NO: 9337 - protein, 8 aa, BK virus
LLLLLHHW

SEQ ID NO: 9338 - protein, 8 aa, BK virus
LLLLHHWQ

SEQ ID NO: 9339 - protein, 8 aa, BK virus
LLLHHWQT

SEQ ID NO: 9340 - protein, 8 aa, BK virus
LLHHWQTY

SEQ ID NO: 9341 - protein, 8 aa, BK virus
LHHWQTYL

SEQ ID NO: 9342 - protein, 8 aa, BK virus
HHWQTYLH

SEQ ID NO: 9343 - protein, 8 aa, BK virus
HWQTYLHG

SEQ ID NO: 9344 - protein, 8 aa, BK virus
WQTYLHGK

SEQ ID NO: 9345 - protein, 8 aa, BK virus
QTYLHGKI

SEQ ID NO: 9346 - protein, 8 aa, BK virus
TYLHGKIN

SEQ ID NO: 9347 - protein, 8 aa, BK virus
YLHGKINL

SEQ ID NO: 9348 - protein, 8 aa, BK virus
LHGKINLH

SEQ ID NO: 9349 - protein, 8 aa, BK virus
HGKINLHP

SEQ ID NO: 9350 - protein, 8 aa, BK virus
GKINLHPI

SEQ ID NO: 9351 - protein, 8 aa, BK virus
KINLHPIF

SEQ ID NO: 9352 - protein, 8 aa, BK virus
INLHPIFH

SEQ ID NO: 9353 - protein, 8 aa, BK virus
RNSTRTPT

SEQ ID NO: 9354 - protein, 8 aa, BK virus
NSTRTPTL

SEQ ID NO: 9355 - protein, 8 aa, BK virus
STRTPTLL

SEQ ID NO: 9356 - protein, 8 aa, BK virus
TRTPTLLF

SEQ ID NO: 9357 - protein, 8 aa, BK virus
RTPTLLFH

SEQ ID NO: 9358 - protein, 8 aa, BK virus
TPTLLFHR

SEQ ID NO: 9359 - protein, 8 aa, BK virus
PTLLFHRL

SEQ ID NO: 9360 - protein, 8 aa, BK virus
TLLFHRLA

SEQ ID NO: 9361 - protein, 8 aa, BK virus
LLFHRLAP

SEQ ID NO: 9362 - protein, 8 aa, BK virus
LFHRLAPI

SEQ ID NO: 9363 - protein, 8 aa, BK virus
FHRLAPIK

SEQ ID NO: 9364 - protein, 8 aa, BK virus
HRLAPIKK

SEQ ID NO: 9365 - protein, 8 aa, BK virus
RLAPIKKI

SEQ ID NO: 9366 - protein, 8 aa, BK virus
LAPIKKII

SEQ ID NO: 9367 - protein, 8 aa, BK virus
APIKKIIT

SEQ ID NO: 9368 - protein, 8 aa, BK virus
GLLIFYYL

SEQ ID NO: 9369 - protein, 8 aa, BK virus
LLIFYYLS

SEQ ID NO: 9370 - protein, 8 aa, BK virus
LIFYYLSK

SEQ ID NO: 9371 - protein, 8 aa, BK virus
IFYYLSKY

SEQ ID NO: 9372 - protein, 8 aa, BK virus
FYYLSKYK

SEQ ID NO: 9373 - protein, 8 aa, BK virus
YYLSKYKL

SEQ ID NO: 9374 - protein, 8 aa, BK virus
YLSKYKLV

SEQ ID NO: 9375 - protein, 8 aa, BK virus
LSKYKLVT

SEQ ID NO: 9376 - protein, 8 aa, BK virus
SKYKLVTL

SEQ ID NO: 9377 - protein, 8 aa, BK virus
KYKLVTLK

SEQ ID NO: 9378 - protein, 8 aa, BK virus
YKLVTLKL

SEQ ID NO: 9379 - protein, 8 aa, BK virus
ISEGSFSN

SEQ ID NO: 9380 - protein, 8 aa, BK virus
SEGSFSNY

SEQ ID NO: 9381 - protein, 8 aa, BK virus
EGSFSNYL

SEQ ID NO: 9382 - protein, 8 aa, BK virus
GSFSNYLD

SEQ ID NO: 9383 - protein, 8 aa, BK virus
SFSNYLDP

SEQ ID NO: 9384 - protein, 8 aa, BK virus
FSNYLDPP

SEQ ID NO: 9385 - protein, 8 aa, BK virus
SNYLDPPL

SEQ ID NO: 9386 - protein, 8 aa, BK virus
NYLDPPLQ

SEQ ID NO: 9387 - protein, 8 aa, BK virus
YLDPPLQS

SEQ ID NO: 9388 - protein, 8 aa, BK virus
LDPPLQSF

SEQ ID NO: 9389 - protein, 8 aa, BK virus
DPPLQSFF

SEQ ID NO: 9390 - protein, 8 aa, BK virus
PPLQSFFS

SEQ ID NO: 9391 - protein, 8 aa, BK virus
AKPLCEAV

SEQ ID NO: 9392 - protein, 8 aa, BK virus
KPLCEAVN

SEQ ID NO: 9393 - protein, 8 aa, BK virus
PLCEAVNA

SEQ ID NO: 9394 - protein, 8 aa, BK virus
LCEAVNAV

SEQ ID NO: 9395 - protein, 8 aa, BK virus
CEAVNAVA

SEQ ID NO: 9396 - protein, 8 aa, BK virus
EAVNAVAI

SEQ ID NO: 9397 - protein, 8 aa, BK virus
AVNAVAIY

SEQ ID NO: 9398 - protein, 8 aa, BK virus
VNAVAIYP

SEQ ID NO: 9399 - protein, 8 aa, BK virus
NAVAIYPN

SEQ ID NO: 9400 - protein, 8 aa, BK virus
AVAIYPNQ

SEQ ID NO: 9401 - protein, 8 aa, BK virus
VAIYPNQG

SEQ ID NO: 9402 - protein, 8 aa, BK virus
AIYPNQGL

SEQ ID NO: 9403 - protein, 8 aa, BK virus
IYPNQGLF

SEQ ID NO: 9404 - protein, 8 aa, BK virus
YPNQGLFS

SEQ ID NO: 9405 - protein, 8 aa, BK virus
HARAVHRR

SEQ ID NO: 9406 - protein, 8 aa, BK virus
ARAVHRRL

SEQ ID NO: 9407 - protein, 8 aa, BK virus
RAVHRRLF

SEQ ID NO: 9408 - protein, 8 aa, BK virus
AVHRRLFG

SEQ ID NO: 9409 - protein, 8 aa, BK virus
VHRRLFGT

SEQ ID NO: 9410 - protein, 8 aa, BK virus
HRRLFGTN

SEQ ID NO: 9411 - protein, 8 aa, BK virus
RRLFGTNR

SEQ ID NO: 9412 - protein, 8 aa, BK virus
RLFGTNRP

SEQ ID NO: 9413 - protein, 8 aa, BK virus
LFGTNRPF

SEQ ID NO: 9414 - protein, 8 aa, BK virus
FGTNRPFL

SEQ ID NO: 9415 - protein, 8 aa, BK virus
GTNRPFLA

SEQ ID NO: 9416 - protein, 8 aa, BK virus
TNRPFLAV

SEQ ID NO: 9417 - protein, 8 aa, BK virus
NRPFLAVQ

SEQ ID NO: 9418 - protein, 8 aa, BK virus
RPFLAVQG

SEQ ID NO: 9419 - protein, 8 aa, BK virus
PFLAVQGI

SEQ ID NO: 9420 - protein, 8 aa, BK virus
FLAVQGIW

SEQ ID NO: 9421 - protein, 8 aa, BK virus
LAVQGIWA

SEQ ID NO: 9422 - protein, 8 aa, BK virus
AVQGIWAK

SEQ ID NO: 9423 - protein, 8 aa, BK virus
VQGIWAKR

SEQ ID NO: 9424 - protein, 8 aa, BK virus
QGIWAKRK

SEQ ID NO: 9425 - protein, 8 aa, BK virus
GIWAKRKI

SEQ ID NO: 9426 - protein, 8 aa, BK virus
IWAKRKIS

SEQ ID NO: 9427 - protein, 8 aa, BK virus
WAKRKIST

SEQ ID NO: 9428 - protein, 8 aa, BK virus
AKRKISTN

SEQ ID NO: 9429 - protein, 8 aa, BK virus
KRKISTNL

SEQ ID NO: 9430 - protein, 8 aa, BK virus
ATPGSKIR

SEQ ID NO: 9431 - protein, 8 aa, BK virus
TPGSKIRL

SEQ ID NO: 9432 - protein, 8 aa, BK virus
PGSKIRLM

SEQ ID NO: 9433 - protein, 8 aa, BK virus
GSKIRLMS

SEQ ID NO: 9434 - protein, 8 aa, BK virus
SKIRLMSY

SEQ ID NO: 9435 - protein, 8 aa, BK virus
KIRLMSYL

SEQ ID NO: 9436 - protein, 8 aa, BK virus
IRLMSYLY

SEQ ID NO: 9437 - protein, 8 aa, BK virus
RLMSYLYI

SEQ ID NO: 9438 - protein, 8 aa, BK virus
LMSYLYIL

SEQ ID NO: 9439 - protein, 8 aa, BK virus
MSYLYILL

SEQ ID NO: 9440 - protein, 8 aa, BK virus
SYLYILLH

SEQ ID NO: 9441 - protein, 8 aa, BK virus
YLYILLHF

SEQ ID NO: 9442 - protein, 8 aa, BK virus
LYILLHFF

SEQ ID NO: 9443 - protein, 8 aa, BK virus
YILLHFFI

SEQ ID NO: 9444 - protein, 8 aa, BK virus
ILLHFFIQ

SEQ ID NO: 9445 - protein, 8 aa, BK virus
LLHFFIQS

SEQ ID NO: 9446 - protein, 8 aa, BK virus
LHFFIQSI

SEQ ID NO: 9447 - protein, 8 aa, BK virus
HFFIQSIH

SEQ ID NO: 9448 - protein, 8 aa, BK virus
FFIQSIHS

SEQ ID NO: 9449 - protein, 8 aa, BK virus
FIQSIHSL

SEQ ID NO: 9450 - protein, 8 aa, BK virus
IQSIHSLH

SEQ ID NO: 9451 - protein, 8 aa, BK virus
QSIHSLHF

SEQ ID NO: 9452 - protein, 8 aa, BK virus
SIHSLHFI

SEQ ID NO: 9453 - protein, 8 aa, BK virus
IHSLHFIL

SEQ ID NO: 9454 - protein, 8 aa, BK virus
HSLHFILV

SEQ ID NO: 9455 - protein, 8 aa, BK virus
SLHFILVA

SEQ ID NO: 9456 - protein, 8 aa, BK virus
LHFILVAP

SEQ ID NO: 9457 - protein, 8 aa, BK virus
HFILVAPF

SEQ ID NO: 9458 - protein, 8 aa, BK virus
FILVAPFV

SEQ ID NO: 9459 - protein, 8 aa, BK virus
ILVAPFVR

SEQ ID NO: 9460 - protein, 8 aa, BK virus
LVAPFVRV

SEQ ID NO: 9461 - protein, 8 aa, BK virus
VAPFVRVK

SEQ ID NO: 9462 - protein, 8 aa, BK virus
APFVRVKF

SEQ ID NO: 9463 - protein, 8 aa, BK virus
PFVRVKFL

SEQ ID NO: 9464 - protein, 8 aa, BK virus
FVRVKFLT

SEQ ID NO: 9465 - protein, 8 aa, BK virus
VRVKFLTL

SEQ ID NO: 9466 - protein, 8 aa, BK virus
RVKFLTLP

SEQ ID NO: 9467 - protein, 8 aa, BK virus
GKISPGSS

SEQ ID NO: 9468 - protein, 8 aa, BK virus
KISPGSSF

SEQ ID NO: 9469 - protein, 8 aa, BK virus
ISPGSSFK

SEQ ID NO: 9470 - protein, 8 aa, BK virus
SPGSSFKA

SEQ ID NO: 9471 - protein, 8 aa, BK virus
KVHELHGF

SEQ ID NO: 9472 - protein, 8 aa, BK virus
VHELHGFF

SEQ ID NO: 9473 - protein, 8 aa, BK virus
HELHGFFP

SEQ ID NO: 9474 - protein, 8 aa, BK virus
ELHGFFPV

SEQ ID NO: 9475 - protein, 8 aa, BK virus
LHGFFPVK

SEQ ID NO: 9476 - protein, 8 aa, BK virus
HGFFPVKN

SEQ ID NO: 9477 - protein, 8 aa, BK virus
GFFPVKNF

SEQ ID NO: 9478 - protein, 8 aa, BK virus
FFPVKNFI

SEQ ID NO: 9479 - protein, 8 aa, BK virus
FPVKNFIH

SEQ ID NO: 9480 - protein, 9 aa, BK virus
LQKLQKNRD

SEQ ID NO: 9481 - protein, 9 aa, BK virus
QKLQKNRDF

SEQ ID NO: 9482 - protein, 9 aa, BK virus
KLQKNRDFP

SEQ ID NO: 9483 - protein, 9 aa, BK virus
LQKNRDFPK

SEQ ID NO: 9484 - protein, 9 aa, BK virus
ASEKASTPL

SEQ ID NO: 9485 - protein, 9 aa, BK virus
SEKASTPLL

SEQ ID NO: 9486 - protein, 9 aa, BK virus
EKASTPLLL

SEQ ID NO: 9487 - protein, 9 aa, BK virus
KASTPLLLE

SEQ ID NO: 9488 - protein, 9 aa, BK virus
ASTPLLLER

SEQ ID NO: 9489 - protein, 9 aa, BK virus
STPLLLERK

SEQ ID NO: 9490 - protein, 9 aa, BK virus
TPLLLERKG

SEQ ID NO: 9491 - protein, 9 aa, BK virus
PLLLERKGG

SEQ ID NO: 9492 - protein, 9 aa, BK virus
LLLERKGGG

SEQ ID NO: 9493 - protein, 9 aa, BK virus
LLERKGGGR

SEQ ID NO: 9494 - protein, 9 aa, BK virus
LERKGGGRG

SEQ ID NO: 9495 - protein, 9 aa, BK virus
ERKGGGRGG

SEQ ID NO: 9496 - protein, 9 aa, BK virus
RKGGGRGGL

SEQ ID NO: 9497 - protein, 9 aa, BK virus
KGGGRGGLG

SEQ ID NO: 9498 - protein, 9 aa, BK virus
GGGRGGLGL

SEQ ID NO: 9499 - protein, 9 aa, BK virus
GGRGGLGLL

SEQ ID NO: 9500 - protein, 9 aa, BK virus
GRGGLGLLY

SEQ ID NO: 9501 - protein, 9 aa, BK virus
RGGLGLLYI

SEQ ID NO: 9502 - protein, 9 aa, BK virus
GGLGLLYII

SEQ ID NO: 9503 - protein, 9 aa, BK virus
GLGLLYIIK

SEQ ID NO: 9504 - protein, 9 aa, BK virus
LGLLYIIKK

SEQ ID NO: 9505 - protein, 9 aa, BK virus
GLLYIIKKK

SEQ ID NO: 9506 - protein, 9 aa, BK virus
LLYIIKKKA

SEQ ID NO: 9507 - protein, 9 aa, BK virus
LYIIKKKAT

SEQ ID NO: 9508 - protein, 9 aa, BK virus
YIIKKKATG

SEQ ID NO: 9509 - protein, 9 aa, BK virus
IIKKKATGR

SEQ ID NO: 9510 - protein, 9 aa, BK virus
IKKKATGRS

SEQ ID NO: 9511 - protein, 9 aa, BK virus
KKKATGRSC

SEQ ID NO: 9512 - protein, 9 aa, BK virus
KKATGRSCL

SEQ ID NO: 9513 - protein, 9 aa, BK virus
KATGRSCLP

SEQ ID NO: 9514 - protein, 9 aa, BK virus
ATGRSCLPM

SEQ ID NO: 9515 - protein, 9 aa, BK virus
TGRSCLPME

SEQ ID NO: 9516 - protein, 9 aa, BK virus
GRSCLPMEC

SEQ ID NO: 9517 - protein, 9 aa, BK virus
RSCLPMECS

SEQ ID NO: 9518 - protein, 9 aa, BK virus
SCLPMECSQ

SEQ ID NO: 9519 - protein, 9 aa, BK virus
CLPMECSQT

SEQ ID NO: 9520 - protein, 9 aa, BK virus
LPMECSQTM

SEQ ID NO: 9521 - protein, 9 aa, BK virus
PMECSQTMT

SEQ ID NO: 9522 - protein, 9 aa, BK virus
MECSQTMTS

SEQ ID NO: 9523 - protein, 9 aa, BK virus
ECSQTMTSG

SEQ ID NO: 9524 - protein, 9 aa, BK virus
CSQTMTSGR

SEQ ID NO: 9525 - protein, 9 aa, BK virus
SQTMTSGRK

SEQ ID NO: 9526 - protein, 9 aa, BK virus
QTMTSGRKV

SEQ ID NO: 9527 - protein, 9 aa, BK virus
TMTSGRKVH

SEQ ID NO: 9528 - protein, 9 aa, BK virus
MTSGRKVHD

SEQ ID NO: 9529 - protein, 9 aa, BK virus
TSGRKVHDS

SEQ ID NO: 9530 - protein, 9 aa, BK virus
SGRKVHDSQ

SEQ ID NO: 9531 - protein, 9 aa, BK virus
GRKVHDSQG

SEQ ID NO: 9532 - protein, 9 aa, BK virus
RKVHDSQGN

SEQ ID NO: 9533 - protein, 9 aa, BK virus
KVHDSQGNA

SEQ ID NO: 9534 - protein, 9 aa, BK virus
VHDSQGNAA

SEQ ID NO: 9535 - protein, 9 aa, BK virus
HDSQGNAAK

SEQ ID NO: 9536 - protein, 9 aa, BK virus
DSQGNAAKP

SEQ ID NO: 9537 - protein, 9 aa, BK virus
PQEGKCMTH

SEQ ID NO: 9538 - protein, 9 aa, BK virus
QEGKCMTHR

SEQ ID NO: 9539 - protein, 9 aa, BK virus
EGKCMTHRE

SEQ ID NO: 9540 - protein, 9 aa, BK virus
GKCMTHREE

SEQ ID NO: 9541 - protein, 9 aa, BK virus
KCMTHREEL

SEQ ID NO: 9542 - protein, 9 aa, BK virus
CMTHREELL

SEQ ID NO: 9543 - protein, 9 aa, BK virus
MTHREELLT

SEQ ID NO: 9544 - protein, 9 aa, BK virus
THREELLTH

SEQ ID NO: 9545 - protein, 9 aa, BK virus
HREELLTHG

SEQ ID NO: 9546 - protein, 9 aa, BK virus
REELLTHGM

SEQ ID NO: 9547 - protein, 9 aa, BK virus
EELLTHGMQ

SEQ ID NO: 9548 - protein, 9 aa, BK virus
ELLTHGMQP

SEQ ID NO: 9549 - protein, 9 aa, BK virus
LLTHGMQPN

SEQ ID NO: 9550 - protein, 9 aa, BK virus
LTHGMQPNH

SEQ ID NO: 9551 - protein, 9 aa, BK virus
THGMQPNHD

SEQ ID NO: 9552 - protein, 9 aa, BK virus
HGMQPNHDL

SEQ ID NO: 9553 - protein, 9 aa, BK virus
GMQPNHDLR

SEQ ID NO: 9554 - protein, 9 aa, BK virus
MQPNHDLRK

SEQ ID NO: 9555 - protein, 9 aa, BK virus
QPNHDLRKE

SEQ ID NO: 9556 - protein, 9 aa, BK virus
PNHDLRKES

SEQ ID NO: 9557 - protein, 9 aa, BK virus
NHDLRKESA

SEQ ID NO: 9558 - protein, 9 aa, BK virus
QTCFASLGI

SEQ ID NO: 9559 - protein, 9 aa, BK virus
TCFASLGIL

SEQ ID NO: 9560 - protein, 9 aa, BK virus
CFASLGILA

SEQ ID NO: 9561 - protein, 9 aa, BK virus
FASLGILAL

SEQ ID NO: 9562 - protein, 9 aa, BK virus
ASLGILALS

SEQ ID NO: 9563 - protein, 9 aa, BK virus
SLGILALSP

SEQ ID NO: 9564 - protein, 9 aa, BK virus
LGILALSPV

SEQ ID NO: 9565 - protein, 9 aa, BK virus
GILALSPVK

SEQ ID NO: 9566 - protein, 9 aa, BK virus
ILALSPVKL

SEQ ID NO: 9567 - protein, 9 aa, BK virus
LALSPVKLD

SEQ ID NO: 9568 - protein, 9 aa, BK virus
ALSPVKLDK

SEQ ID NO: 9569 - protein, 9 aa, BK virus
LSPVKLDKG

SEQ ID NO: 9570 - protein, 9 aa, BK virus
SPVKLDKGH

SEQ ID NO: 9571 - protein, 9 aa, BK virus
PVKLDKGHG

SEQ ID NO: 9572 - protein, 9 aa, BK virus
VKLDKGHGS

SEQ ID NO: 9573 - protein, 9 aa, BK virus
KLDKGHGSA

SEQ ID NO: 9574 - protein, 9 aa, BK virus
LDKGHGSAP

SEQ ID NO: 9575 - protein, 9 aa, BK virus
DKGHGSAPA

SEQ ID NO: 9576 - protein, 9 aa, BK virus
KGHGSAPAV

SEQ ID NO: 9577 - protein, 9 aa, BK virus
GHGSAPAVT

SEQ ID NO: 9578 - protein, 9 aa, BK virus
HGSAPAVTT

SEQ ID NO: 9579 - protein, 9 aa, BK virus
GSAPAVTTS

SEQ ID NO: 9580 - protein, 9 aa, BK virus
SAPAVTTSF

SEQ ID NO: 9581 - protein, 9 aa, BK virus
APAVTTSFS

SEQ ID NO: 9582 - protein, 9 aa, BK virus
PAVTTSFSE

SEQ ID NO: 9583 - protein, 9 aa, BK virus
AVTTSFSES

SEQ ID NO: 9584 - protein, 9 aa, BK virus
VTTSFSESW

SEQ ID NO: 9585 - protein, 9 aa, BK virus
NLDWNKKKS

SEQ ID NO: 9586 - protein, 9 aa, BK virus
LDWNKKKSS

SEQ ID NO: 9587 - protein, 9 aa, BK virus
DWNKKKSSE

SEQ ID NO: 9588 - protein, 9 aa, BK virus
WNKKKSSED

SEQ ID NO: 9589 - protein, 9 aa, BK virus
NKKKSSEDF

SEQ ID NO: 9590 - protein, 9 aa, BK virus
KKKSSEDFY

SEQ ID NO: 9591 - protein, 9 aa, BK virus
KKSSEDFYF

SEQ ID NO: 9592 - protein, 9 aa, BK virus
KSSEDFYFY

SEQ ID NO: 9593 - protein, 9 aa, BK virus
SSEDFYFYF

SEQ ID NO: 9594 - protein, 9 aa, BK virus
SEDFYFYFR

SEQ ID NO: 9595 - protein, 9 aa, BK virus
EDFYFYFRA

SEQ ID NO: 9596 - protein, 9 aa, BK virus
DFYFYFRAF

SEQ ID NO: 9597 - protein, 9 aa, BK virus
FYFYFRAFA

SEQ ID NO: 9598 - protein, 9 aa, BK virus
YFYFRAFAG

SEQ ID NO: 9599 - protein, 9 aa, BK virus
FYFRAFAGI

SEQ ID NO: 9600 - protein, 9 aa, BK virus
YFRAFAGIL

SEQ ID NO: 9601 - protein, 9 aa, BK virus
RQCRREKQK

SEQ ID NO: 9602 - protein, 9 aa, BK virus
QCRREKQKY

SEQ ID NO: 9603 - protein, 9 aa, BK virus
CRREKQKYH

SEQ ID NO: 9604 - protein, 9 aa, BK virus
RREKQKYHC

SEQ ID NO: 9605 - protein, 9 aa, BK virus
REKQKYHCF

SEQ ID NO: 9606 - protein, 9 aa, BK virus
EKQKYHCFT

SEQ ID NO: 9607 - protein, 9 aa, BK virus
KQKYHCFTC

SEQ ID NO: 9608 - protein, 9 aa, BK virus
QKYHCFTCC

SEQ ID NO: 9609 - protein, 9 aa, BK virus
KYHCFTCCK

SEQ ID NO: 9610 - protein, 9 aa, BK virus
YHCFTCCKR

SEQ ID NO: 9611 - protein, 9 aa, BK virus
HCFTCCKRL

SEQ ID NO: 9612 - protein, 9 aa, BK virus
CFTCCKRLC

SEQ ID NO: 9613 - protein, 9 aa, BK virus
FTCCKRLCK

SEQ ID NO: 9614 - protein, 9 aa, BK virus
TCCKRLCKR

SEQ ID NO: 9615 - protein, 9 aa, BK virus
CCKRLCKRL

SEQ ID NO: 9616 - protein, 9 aa, BK virus
CKRLCKRLL

SEQ ID NO: 9617 - protein, 9 aa, BK virus
KRLCKRLLG

SEQ ID NO: 9618 - protein, 9 aa, BK virus
RLCKRLLGK

SEQ ID NO: 9619 - protein, 9 aa, BK virus
SLFFCISRF

SEQ ID NO: 9620 - protein, 9 aa, BK virus
LFFCISRFM

SEQ ID NO: 9621 - protein, 9 aa, BK virus
FFCISRFMG

SEQ ID NO: 9622 - protein, 9 aa, BK virus
FCISRFMGA

SEQ ID NO: 9623 - protein, 9 aa, BK virus
CISRFMGAA

SEQ ID NO: 9624 - protein, 9 aa, BK virus
ISRFMGAAL

SEQ ID NO: 9625 - protein, 9 aa, BK virus
SRFMGAALA

SEQ ID NO: 9626 - protein, 9 aa, BK virus
RFMGAALAL

SEQ ID NO: 9627 - protein, 9 aa, BK virus
FMGAALALL

SEQ ID NO: 9628 - protein, 9 aa, BK virus
MGAALALLG

SEQ ID NO: 9629 - protein, 9 aa, BK virus
GAALALLGD

SEQ ID NO: 9630 - protein, 9 aa, BK virus
AALALLGDL

SEQ ID NO: 9631 - protein, 9 aa, BK virus
ALALLGDLV

SEQ ID NO: 9632 - protein, 9 aa, BK virus
LALLGDLVA

SEQ ID NO: 9633 - protein, 9 aa, BK virus
ALLGDLVAS

SEQ ID NO: 9634 - protein, 9 aa, BK virus
LLGDLVASV

SEQ ID NO: 9635 - protein, 9 aa, BK virus
LGDLVASVS

SEQ ID NO: 9636 - protein, 9 aa, BK virus
GDLVASVSE

SEQ ID NO: 9637 - protein, 9 aa, BK virus
DLVASVSEA

SEQ ID NO: 9638 - protein, 9 aa, BK virus
LVASVSEAA

SEQ ID NO: 9639 - protein, 9 aa, BK virus
VASVSEAAA

SEQ ID NO: 9640 - protein, 9 aa, BK virus
ASVSEAAAA

SEQ ID NO: 9641 - protein, 9 aa, BK virus
SVSEAAAAT

SEQ ID NO: 9642 - protein, 9 aa, BK virus
VSEAAAATG

SEQ ID NO: 9643 - protein, 9 aa, BK virus
SEAAAATGF

SEQ ID NO: 9644 - protein, 9 aa, BK virus
EAAAATGFS

SEQ ID NO: 9645 - protein, 9 aa, BK virus
AAAATGFSV

SEQ ID NO: 9646 - protein, 9 aa, BK virus
AAATGFSVA

SEQ ID NO: 9647 - protein, 9 aa, BK virus
AATGFSVAE

SEQ ID NO: 9648 - protein, 9 aa, BK virus
ATGFSVAEI

SEQ ID NO: 9649 - protein, 9 aa, BK virus
TGFSVAEIA

SEQ ID NO: 9650 - protein, 9 aa, BK virus
GFSVAEIAA

SEQ ID NO: 9651 - protein, 9 aa, BK virus
FSVAEIAAG

SEQ ID NO: 9652 - protein, 9 aa, BK virus
SVAEIAAGE

SEQ ID NO: 9653 - protein, 9 aa, BK virus
VAEIAAGEA

SEQ ID NO: 9654 - protein, 9 aa, BK virus
AEIAAGEAA

SEQ ID NO: 9655 - protein, 9 aa, BK virus
EIAAGEAAA

SEQ ID NO: 9656 - protein, 9 aa, BK virus
IAAGEAAAA

SEQ ID NO: 9657 - protein, 9 aa, BK virus
AAGEAAAAI

SEQ ID NO: 9658 - protein, 9 aa, BK virus
AGEAAAAIE

SEQ ID NO: 9659 - protein, 9 aa, BK virus
GEAAAAIEV

SEQ ID NO: 9660 - protein, 9 aa, BK virus
EAAAAIEVQ

SEQ ID NO: 9661 - protein, 9 aa, BK virus
AAAAIEVQI

SEQ ID NO: 9662 - protein, 9 aa, BK virus
AAAIEVQIA

SEQ ID NO: 9663 - protein, 9 aa, BK virus
AAIEVQIAS

SEQ ID NO: 9664 - protein, 9 aa, BK virus
AIEVQIASL

SEQ ID NO: 9665 - protein, 9 aa, BK virus
IEVQIASLA

SEQ ID NO: 9666 - protein, 9 aa, BK virus
EVQIASLAT

SEQ ID NO: 9667 - protein, 9 aa, BK virus
VQIASLATV

SEQ ID NO: 9668 - protein, 9 aa, BK virus
QIASLATVE

SEQ ID NO: 9669 - protein, 9 aa, BK virus
IASLATVEG

SEQ ID NO: 9670 - protein, 9 aa, BK virus
ASLATVEGI

SEQ ID NO: 9671 - protein, 9 aa, BK virus
SLATVEGIT

SEQ ID NO: 9672 - protein, 9 aa, BK virus
LATVEGITS

SEQ ID NO: 9673 - protein, 9 aa, BK virus
ATVEGITST

SEQ ID NO: 9674 - protein, 9 aa, BK virus
TVEGITSTS

SEQ ID NO: 9675 - protein, 9 aa, BK virus
VEGITSTSE

SEQ ID NO: 9676 - protein, 9 aa, BK virus
EGITSTSEA

SEQ ID NO: 9677 - protein, 9 aa, BK virus
GITSTSEAI

SEQ ID NO: 9678 - protein, 9 aa, BK virus
ITSTSEAIA

SEQ ID NO: 9679 - protein, 9 aa, BK virus
TSTSEAIAA

SEQ ID NO: 9680 - protein, 9 aa, BK virus
STSEAIAAI

SEQ ID NO: 9681 - protein, 9 aa, BK virus
TSEAIAAIG

SEQ ID NO: 9682 - protein, 9 aa, BK virus
SEAIAAIGL

SEQ ID NO: 9683 - protein, 9 aa, BK virus
EAIAAIGLT

SEQ ID NO: 9684 - protein, 9 aa, BK virus
AIAAIGLTP

SEQ ID NO: 9685 - protein, 9 aa, BK virus
IAAIGLTPQ

SEQ ID NO: 9686 - protein, 9 aa, BK virus
AAIGLTPQT

SEQ ID NO: 9687 - protein, 9 aa, BK virus
AIGLTPQTY

SEQ ID NO: 9688 - protein, 9 aa, BK virus
IGLTPQTYA

SEQ ID NO: 9689 - protein, 9 aa, BK virus
GLTPQTYAV

SEQ ID NO: 9690 - protein, 9 aa, BK virus
LTPQTYAVI

SEQ ID NO: 9691 - protein, 9 aa, BK virus
TPQTYAVIA

SEQ ID NO: 9692 - protein, 9 aa, BK virus
PQTYAVIAG

SEQ ID NO: 9693 - protein, 9 aa, BK virus
QTYAVIAGA

SEQ ID NO: 9694 - protein, 9 aa, BK virus
TYAVIAGAP

SEQ ID NO: 9695 - protein, 9 aa, BK virus
YAVIAGAPG

SEQ ID NO: 9696 - protein, 9 aa, BK virus
AVIAGAPGA

SEQ ID NO: 9697 - protein, 9 aa, BK virus
VIAGAPGAI

SEQ ID NO: 9698 - protein, 9 aa, BK virus
IAGAPGAIA

SEQ ID NO: 9699 - protein, 9 aa, BK virus
AGAPGAIAG

SEQ ID NO: 9700 - protein, 9 aa, BK virus
GAPGAIAGF

SEQ ID NO: 9701 - protein, 9 aa, BK virus
APGAIAGFA

SEQ ID NO: 9702 - protein, 9 aa, BK virus
PGAIAGFAA

SEQ ID NO: 9703 - protein, 9 aa, BK virus
GAIAGFAAL

SEQ ID NO: 9704 - protein, 9 aa, BK virus
AIAGFAALI

SEQ ID NO: 9705 - protein, 9 aa, BK virus
IAGFAALIQ

SEQ ID NO: 9706 - protein, 9 aa, BK virus
AGFAALIQT

SEQ ID NO: 9707 - protein, 9 aa, BK virus
GFAALIQTV

SEQ ID NO: 9708 - protein, 9 aa, BK virus
FAALIQTVS

SEQ ID NO: 9709 - protein, 9 aa, BK virus
AALIQTVSG

SEQ ID NO: 9710 - protein, 9 aa, BK virus
ALIQTVSGI

SEQ ID NO: 9711 - protein, 9 aa, BK virus
LIQTVSGIS

SEQ ID NO: 9712 - protein, 9 aa, BK virus
IQTVSGISS

SEQ ID NO: 9713 - protein, 9 aa, BK virus
QTVSGISSL

SEQ ID NO: 9714 - protein, 9 aa, BK virus
TVSGISSLA

SEQ ID NO: 9715 - protein, 9 aa, BK virus
VSGISSLAQ

SEQ ID NO: 9716 - protein, 9 aa, BK virus
SGISSLAQV

SEQ ID NO: 9717 - protein, 9 aa, BK virus
GISSLAQVG

SEQ ID NO: 9718 - protein, 9 aa, BK virus
ISSLAQVGY

SEQ ID NO: 9719 - protein, 9 aa, BK virus
SSLAQVGYK

SEQ ID NO: 9720 - protein, 9 aa, BK virus
SLAQVGYKF

SEQ ID NO: 9721 - protein, 9 aa, BK virus
LAQVGYKFF

SEQ ID NO: 9722 - protein, 9 aa, BK virus
AQVGYKFFD

SEQ ID NO: 9723 - protein, 9 aa, BK virus
QVGYKFFDD

SEQ ID NO: 9724 - protein, 9 aa, BK virus
VGYKFFDDW

SEQ ID NO: 9725 - protein, 9 aa, BK virus
GYKFFDDWD

SEQ ID NO: 9726 - protein, 9 aa, BK virus
YKFFDDWDH

SEQ ID NO: 9727 - protein, 9 aa, BK virus
KFFDDWDHK

SEQ ID NO: 9728 - protein, 9 aa, BK virus
FFDDWDHKV

SEQ ID NO: 9729 - protein, 9 aa, BK virus
FDDWDHKVS

SEQ ID NO: 9730 - protein, 9 aa, BK virus
DDWDHKVST

SEQ ID NO: 9731 - protein, 9 aa, BK virus
DWDHKVSTV

SEQ ID NO: 9732 - protein, 9 aa, BK virus
WDHKVSTVG

SEQ ID NO: 9733 - protein, 9 aa, BK virus
DHKVSTVGL

SEQ ID NO: 9734 - protein, 9 aa, BK virus
HKVSTVGLY

SEQ ID NO: 9735 - protein, 9 aa, BK virus
KVSTVGLYQ

SEQ ID NO: 9736 - protein, 9 aa, BK virus
VSTVGLYQQ

SEQ ID NO: 9737 - protein, 9 aa, BK virus
STVGLYQQS

SEQ ID NO: 9738 - protein, 9 aa, BK virus
TVGLYQQSG

SEQ ID NO: 9739 - protein, 9 aa, BK virus
VGLYQQSGM

SEQ ID NO: 9740 - protein, 9 aa, BK virus
GLYQQSGMA

SEQ ID NO: 9741 - protein, 9 aa, BK virus
LYQQSGMAL

SEQ ID NO: 9742 - protein, 9 aa, BK virus
YQQSGMALE

SEQ ID NO: 9743 - protein, 9 aa, BK virus
QQSGMALEL

SEQ ID NO: 9744 - protein, 9 aa, BK virus
QSGMALELF

SEQ ID NO: 9745 - protein, 9 aa, BK virus
SGMALELFN

SEQ ID NO: 9746 - protein, 9 aa, BK virus
GMALELFNP

SEQ ID NO: 9747 - protein, 9 aa, BK virus
MALELFNPD

SEQ ID NO: 9748 - protein, 9 aa, BK virus
ALELFNPDE

SEQ ID NO: 9749 - protein, 9 aa, BK virus
LELFNPDEY

SEQ ID NO: 9750 - protein, 9 aa, BK virus
ELFNPDEYY

SEQ ID NO: 9751 - protein, 9 aa, BK virus
LFNPDEYYD

SEQ ID NO: 9752 - protein, 9 aa, BK virus
FNPDEYYDI

SEQ ID NO: 9753 - protein, 9 aa, BK virus
NPDEYYDIL

SEQ ID NO: 9754 - protein, 9 aa, BK virus
PDEYYDILF

SEQ ID NO: 9755 - protein, 9 aa, BK virus
DEYYDILFP

SEQ ID NO: 9756 - protein, 9 aa, BK virus
EYYDILFPG

SEQ ID NO: 9757 - protein, 9 aa, BK virus
YYDILFPGV

SEQ ID NO: 9758 - protein, 9 aa, BK virus
YDILFPGVN

SEQ ID NO: 9759 - protein, 9 aa, BK virus
DILFPGVNT

SEQ ID NO: 9760 - protein, 9 aa, BK virus
ILFPGVNTF

SEQ ID NO: 9761 - protein, 9 aa, BK virus
LFPGVNTFV

SEQ ID NO: 9762 - protein, 9 aa, BK virus
FPGVNTFVN

SEQ ID NO: 9763 - protein, 9 aa, BK virus
PGVNTFVNN

SEQ ID NO: 9764 - protein, 9 aa, BK virus
GVNTFVNNI

SEQ ID NO: 9765 - protein, 9 aa, BK virus
VNTFVNNIQ

SEQ ID NO: 9766 - protein, 9 aa, BK virus
NTFVNNIQY

SEQ ID NO: 9767 - protein, 9 aa, BK virus
TFVNNIQYL

SEQ ID NO: 9768 - protein, 9 aa, BK virus
FVNNIQYLD

SEQ ID NO: 9769 - protein, 9 aa, BK virus
VNNIQYLDP

SEQ ID NO: 9770 - protein, 9 aa, BK virus
NNIQYLDPR

SEQ ID NO: 9771 - protein, 9 aa, BK virus
NIQYLDPRH

SEQ ID NO: 9772 - protein, 9 aa, BK virus
IQYLDPRHW

SEQ ID NO: 9773 - protein, 9 aa, BK virus
QYLDPRHWG

SEQ ID NO: 9774 - protein, 9 aa, BK virus
YLDPRHWGP

SEQ ID NO: 9775 - protein, 9 aa, BK virus
LDPRHWGPS

SEQ ID NO: 9776 - protein, 9 aa, BK virus
DPRHWGPSL

SEQ ID NO: 9777 - protein, 9 aa, BK virus
PRHWGPSLF

SEQ ID NO: 9778 - protein, 9 aa, BK virus
RHWGPSLFA

SEQ ID NO: 9779 - protein, 9 aa, BK virus
HWGPSLFAT

SEQ ID NO: 9780 - protein, 9 aa, BK virus
WGPSLFATI

SEQ ID NO: 9781 - protein, 9 aa, BK virus
GPSLFATIS

SEQ ID NO: 9782 - protein, 9 aa, BK virus
PSLFATISQ

SEQ ID NO: 9783 - protein, 9 aa, BK virus
SLFATISQA

SEQ ID NO: 9784 - protein, 9 aa, BK virus
LFATISQAL

SEQ ID NO: 9785 - protein, 9 aa, BK virus
FATISQALW

SEQ ID NO: 9786 - protein, 9 aa, BK virus
ATISQALWH

SEQ ID NO: 9787 - protein, 9 aa, BK virus
TISQALWHV

SEQ ID NO: 9788 - protein, 9 aa, BK virus
ISQALWHVI

SEQ ID NO: 9789 - protein, 9 aa, BK virus
SQALWHVIR

SEQ ID NO: 9790 - protein, 9 aa, BK virus
QALWHVIRD

SEQ ID NO: 9791 - protein, 9 aa, BK virus
ALWHVIRDD

SEQ ID NO: 9792 - protein, 9 aa, BK virus
LWHVIRDDI

SEQ ID NO: 9793 - protein, 9 aa, BK virus
WHVIRDDIP

SEQ ID NO: 9794 - protein, 9 aa, BK virus
HVIRDDIPS

SEQ ID NO: 9795 - protein, 9 aa, BK virus
VIRDDIPSI

SEQ ID NO: 9796 - protein, 9 aa, BK virus
IRDDIPSIT

SEQ ID NO: 9797 - protein, 9 aa, BK virus
RDDIPSITS

SEQ ID NO: 9798 - protein, 9 aa, BK virus
DDIPSITSQ

SEQ ID NO: 9799 - protein, 9 aa, BK virus
DIPSITSQE

SEQ ID NO: 9800 - protein, 9 aa, BK virus
IPSITSQEL

SEQ ID NO: 9801 - protein, 9 aa, BK virus
PSITSQELQ

SEQ ID NO: 9802 - protein, 9 aa, BK virus
SITSQELQR

SEQ ID NO: 9803 - protein, 9 aa, BK virus
ITSQELQRR

SEQ ID NO: 9804 - protein, 9 aa, BK virus
TSQELQRRT

SEQ ID NO: 9805 - protein, 9 aa, BK virus
SQELQRRTE

SEQ ID NO: 9806 - protein, 9 aa, BK virus
QELQRRTER

SEQ ID NO: 9807 - protein, 9 aa, BK virus
ELQRRTERF

SEQ ID NO: 9808 - protein, 9 aa, BK virus
LQRRTERFF

SEQ ID NO: 9809 - protein, 9 aa, BK virus
QRRTERFFR

SEQ ID NO: 9810 - protein, 9 aa, BK virus
RRTERFFRD

SEQ ID NO: 9811 - protein, 9 aa, BK virus
RTERFFRDS

SEQ ID NO: 9812 - protein, 9 aa, BK virus
TERFFRDSL

SEQ ID NO: 9813 - protein, 9 aa, BK virus
ERFFRDSLA

SEQ ID NO: 9814 - protein, 9 aa, BK virus
RFFRDSLAR

SEQ ID NO: 9815 - protein, 9 aa, BK virus
FFRDSLARF

SEQ ID NO: 9816 - protein, 9 aa, BK virus
FRDSLARFL

SEQ ID NO: 9817 - protein, 9 aa, BK virus
RDSLARFLE

SEQ ID NO: 9818 - protein, 9 aa, BK virus
DSLARFLEE

SEQ ID NO: 9819 - protein, 9 aa, BK virus
SLARFLEET

SEQ ID NO: 9820 - protein, 9 aa, BK virus
LARFLEETT

SEQ ID NO: 9821 - protein, 9 aa, BK virus
ARFLEETTW

SEQ ID NO: 9822 - protein, 9 aa, BK virus
RFLEETTWT

SEQ ID NO: 9823 - protein, 9 aa, BK virus
FLEETTWTI

SEQ ID NO: 9824 - protein, 9 aa, BK virus
LEETTWTIV

SEQ ID NO: 9825 - protein, 9 aa, BK virus
EETTWTIVN

SEQ ID NO: 9826 - protein, 9 aa, BK virus
ETTWTIVNA

SEQ ID NO: 9827 - protein, 9 aa, BK virus
TTWTIVNAP

SEQ ID NO: 9828 - protein, 9 aa, BK virus
TWTIVNAPI

SEQ ID NO: 9829 - protein, 9 aa, BK virus
WTIVNAPIN

SEQ ID NO: 9830 - protein, 9 aa, BK virus
TIVNAPINF

SEQ ID NO: 9831 - protein, 9 aa, BK virus
IVNAPINFY

SEQ ID NO: 9832 - protein, 9 aa, BK virus
VNAPINFYN

SEQ ID NO: 9833 - protein, 9 aa, BK virus
NAPINFYNY

SEQ ID NO: 9834 - protein, 9 aa, BK virus
APINFYNYI

SEQ ID NO: 9835 - protein, 9 aa, BK virus
PINFYNYIQ

SEQ ID NO: 9836 - protein, 9 aa, BK virus
INFYNYIQQ

SEQ ID NO: 9837 - protein, 9 aa, BK virus
NFYNYIQQY

SEQ ID NO: 9838 - protein, 9 aa, BK virus
FYNYIQQYY

SEQ ID NO: 9839 - protein, 9 aa, BK virus
YNYIQQYYS

SEQ ID NO: 9840 - protein, 9 aa, BK virus
NYIQQYYSD

SEQ ID NO: 9841 - protein, 9 aa, BK virus
YIQQYYSDL

SEQ ID NO: 9842 - protein, 9 aa, BK virus
IQQYYSDLS

SEQ ID NO: 9843 - protein, 9 aa, BK virus
QQYYSDLSP

SEQ ID NO: 9844 - protein, 9 aa, BK virus
QYYSDLSPI

SEQ ID NO: 9845 - protein, 9 aa, BK virus
YYSDLSPIR

SEQ ID NO: 9846 - protein, 9 aa, BK virus
YSDLSPIRP

SEQ ID NO: 9847 - protein, 9 aa, BK virus
SDLSPIRPS

SEQ ID NO: 9848 - protein, 9 aa, BK virus
DLSPIRPSM

SEQ ID NO: 9849 - protein, 9 aa, BK virus
LSPIRPSMV

SEQ ID NO: 9850 - protein, 9 aa, BK virus
SPIRPSMVR

SEQ ID NO: 9851 - protein, 9 aa, BK virus
PIRPSMVRQ

SEQ ID NO: 9852 - protein, 9 aa, BK virus
IRPSMVRQV

SEQ ID NO: 9853 - protein, 9 aa, BK virus
RPSMVRQVA

SEQ ID NO: 9854 - protein, 9 aa, BK virus
PSMVRQVAE

SEQ ID NO: 9855 - protein, 9 aa, BK virus
SMVRQVAER

SEQ ID NO: 9856 - protein, 9 aa, BK virus
MVRQVAERE

SEQ ID NO: 9857 - protein, 9 aa, BK virus
VRQVAEREG

SEQ ID NO: 9858 - protein, 9 aa, BK virus
RQVAEREGT

SEQ ID NO: 9859 - protein, 9 aa, BK virus
QVAEREGTR

SEQ ID NO: 9860 - protein, 9 aa, BK virus
VAEREGTRV

SEQ ID NO: 9861 - protein, 9 aa, BK virus
AEREGTRVH

SEQ ID NO: 9862 - protein, 9 aa, BK virus
EREGTRVHF

SEQ ID NO: 9863 - protein, 9 aa, BK virus
REGTRVHFG

SEQ ID NO: 9864 - protein, 9 aa, BK virus
EGTRVHFGH

SEQ ID NO: 9865 - protein, 9 aa, BK virus
GTRVHFGHT

SEQ ID NO: 9866 - protein, 9 aa, BK virus
TRVHFGHTY

SEQ ID NO: 9867 - protein, 9 aa, BK virus
RVHFGHTYS

SEQ ID NO: 9868 - protein, 9 aa, BK virus
VHFGHTYSI

SEQ ID NO: 9869 - protein, 9 aa, BK virus
HFGHTYSID

SEQ ID NO: 9870 - protein, 9 aa, BK virus
FGHTYSIDD

SEQ ID NO: 9871 - protein, 9 aa, BK virus
GHTYSIDDA

SEQ ID NO: 9872 - protein, 9 aa, BK virus
HTYSIDDAD

SEQ ID NO: 9873 - protein, 9 aa, BK virus
TYSIDDADS

SEQ ID NO: 9874 - protein, 9 aa, BK virus
YSIDDADSI

SEQ ID NO: 9875 - protein, 9 aa, BK virus
SIDDADSIE

SEQ ID NO: 9876 - protein, 9 aa, BK virus
IDDADSIEE

SEQ ID NO: 9877 - protein, 9 aa, BK virus
DDADSIEEV

SEQ ID NO: 9878 - protein, 9 aa, BK virus
DADSIEEVT

SEQ ID NO: 9879 - protein, 9 aa, BK virus
ADSIEEVTQ

SEQ ID NO: 9880 - protein, 9 aa, BK virus
DSIEEVTQR

SEQ ID NO: 9881 - protein, 9 aa, BK virus
SIEEVTQRM

SEQ ID NO: 9882 - protein, 9 aa, BK virus
IEEVTQRMD

SEQ ID NO: 9883 - protein, 9 aa, BK virus
EEVTQRMDL

SEQ ID NO: 9884 - protein, 9 aa, BK virus
EVTQRMDLR

SEQ ID NO: 9885 - protein, 9 aa, BK virus
VTQRMDLRN

SEQ ID NO: 9886 - protein, 9 aa, BK virus
TQRMDLRNQ

SEQ ID NO: 9887 - protein, 9 aa, BK virus
QRMDLRNQQ

SEQ ID NO: 9888 - protein, 9 aa, BK virus
RMDLRNQQS

SEQ ID NO: 9889 - protein, 9 aa, BK virus
MDLRNQQSV

SEQ ID NO: 9890 - protein, 9 aa, BK virus
DLRNQQSVH

SEQ ID NO: 9891 - protein, 9 aa, BK virus
LRNQQSVHS

SEQ ID NO: 9892 - protein, 9 aa, BK virus
RNQQSVHSG

SEQ ID NO: 9893 - protein, 9 aa, BK virus
NQQSVHSGE

SEQ ID NO: 9894 - protein, 9 aa, BK virus
QQSVHSGEF

SEQ ID NO: 9895 - protein, 9 aa, BK virus
QSVHSGEFI

SEQ ID NO: 9896 - protein, 9 aa, BK virus
SVHSGEFIE

SEQ ID NO: 9897 - protein, 9 aa, BK virus
VHSGEFIEK

SEQ ID NO: 9898 - protein, 9 aa, BK virus
HSGEFIEKT

SEQ ID NO: 9899 - protein, 9 aa, BK virus
SGEFIEKTI

SEQ ID NO: 9900 - protein, 9 aa, BK virus
GEFIEKTIA

SEQ ID NO: 9901 - protein, 9 aa, BK virus
EFIEKTIAP

SEQ ID NO: 9902 - protein, 9 aa, BK virus
FIEKTIAPG

SEQ ID NO: 9903 - protein, 9 aa, BK virus
IEKTIAPGG

SEQ ID NO: 9904 - protein, 9 aa, BK virus
EKTIAPGGA

SEQ ID NO: 9905 - protein, 9 aa, BK virus
KTIAPGGAN

SEQ ID NO: 9906 - protein, 9 aa, BK virus
TIAPGGANQ

SEQ ID NO: 9907 - protein, 9 aa, BK virus
IAPGGANQR

SEQ ID NO: 9908 - protein, 9 aa, BK virus
APGGANQRT

SEQ ID NO: 9909 - protein, 9 aa, BK virus
PGGANQRTA

SEQ ID NO: 9910 - protein, 9 aa, BK virus
GGANQRTAP

SEQ ID NO: 9911 - protein, 9 aa, BK virus
GANQRTAPQ

SEQ ID NO: 9912 - protein, 9 aa, BK virus
ANQRTAPQW

SEQ ID NO: 9913 - protein, 9 aa, BK virus
NQRTAPQWM

SEQ ID NO: 9914 - protein, 9 aa, BK virus
QRTAPQWML

SEQ ID NO: 9915 - protein, 9 aa, BK virus
RTAPQWMLP

SEQ ID NO: 9916 - protein, 9 aa, BK virus
TAPQWMLPL

SEQ ID NO: 9917 - protein, 9 aa, BK virus
APQWMLPLL

SEQ ID NO: 9918 - protein, 9 aa, BK virus
PQWMLPLLL

SEQ ID NO: 9919 - protein, 9 aa, BK virus
QWMLPLLLG

SEQ ID NO: 9920 - protein, 9 aa, BK virus
WMLPLLLGL

SEQ ID NO: 9921 - protein, 9 aa, BK virus
MLPLLLGLY

SEQ ID NO: 9922 - protein, 9 aa, BK virus
LPLLLGLYG

SEQ ID NO: 9923 - protein, 9 aa, BK virus
PLLLGLYGT

SEQ ID NO: 9924 - protein, 9 aa, BK virus
LLLGLYGTV

SEQ ID NO: 9925 - protein, 9 aa, BK virus
LLGLYGTVT

SEQ ID NO: 9926 - protein, 9 aa, BK virus
LGLYGTVTP

SEQ ID NO: 9927 - protein, 9 aa, BK virus
GLYGTVTPA

SEQ ID NO: 9928 - protein, 9 aa, BK virus
LYGTVTPAL

SEQ ID NO: 9929 - protein, 9 aa, BK virus
YGTVTPALE

SEQ ID NO: 9930 - protein, 9 aa, BK virus
GTVTPALEA

SEQ ID NO: 9931 - protein, 9 aa, BK virus
TVTPALEAY

SEQ ID NO: 9932 - protein, 9 aa, BK virus
VTPALEAYE

SEQ ID NO: 9933 - protein, 9 aa, BK virus
TPALEAYED

SEQ ID NO: 9934 - protein, 9 aa, BK virus
PALEAYEDG

SEQ ID NO: 9935 - protein, 9 aa, BK virus
ALEAYEDGP

SEQ ID NO: 9936 - protein, 9 aa, BK virus
LEAYEDGPN

SEQ ID NO: 9937 - protein, 9 aa, BK virus
EAYEDGPNQ

SEQ ID NO: 9938 - protein, 9 aa, BK virus
AYEDGPNQK

SEQ ID NO: 9939 - protein, 9 aa, BK virus
YEDGPNQKK

SEQ ID NO: 9940 - protein, 9 aa, BK virus
EDGPNQKKR

SEQ ID NO: 9941 - protein, 9 aa, BK virus
DGPNQKKRR

SEQ ID NO: 9942 - protein, 9 aa, BK virus
GPNQKKRRV

SEQ ID NO: 9943 - protein, 9 aa, BK virus
PNQKKRRVS

SEQ ID NO: 9944 - protein, 9 aa, BK virus
NQKKRRVSR

SEQ ID NO: 9945 - protein, 9 aa, BK virus
QKKRRVSRG

SEQ ID NO: 9946 - protein, 9 aa, BK virus
KKRRVSRGS

SEQ ID NO: 9947 - protein, 9 aa, BK virus
KRRVSRGSS

SEQ ID NO: 9948 - protein, 9 aa, BK virus
RRVSRGSSQ

SEQ ID NO: 9949 - protein, 9 aa, BK virus
RVSRGSSQK

SEQ ID NO: 9950 - protein, 9 aa, BK virus
VSRGSSQKA

SEQ ID NO: 9951 - protein, 9 aa, BK virus
SRGSSQKAK

SEQ ID NO: 9952 - protein, 9 aa, BK virus
RGSSQKAKG

SEQ ID NO: 9953 - protein, 9 aa, BK virus
GSSQKAKGT

SEQ ID NO: 9954 - protein, 9 aa, BK virus
SSQKAKGTR

SEQ ID NO: 9955 - protein, 9 aa, BK virus
SQKAKGTRA

SEQ ID NO: 9956 - protein, 9 aa, BK virus
QKAKGTRAS

SEQ ID NO: 9957 - protein, 9 aa, BK virus
KAKGTRASA

SEQ ID NO: 9958 - protein, 9 aa, BK virus
AKGTRASAK

SEQ ID NO: 9959 - protein, 9 aa, BK virus
KGTRASAKT

SEQ ID NO: 9960 - protein, 9 aa, BK virus
GTRASAKTT

SEQ ID NO: 9961 - protein, 9 aa, BK virus
TRASAKTTN

SEQ ID NO: 9962 - protein, 9 aa, BK virus
RASAKTTNK

SEQ ID NO: 9963 - protein, 9 aa, BK virus
ASAKTTNKR

SEQ ID NO: 9964 - protein, 9 aa, BK virus
SAKTTNKRR

SEQ ID NO: 9965 - protein, 9 aa, BK virus
AKTTNKRRS

SEQ ID NO: 9966 - protein, 9 aa, BK virus
KTTNKRRSR

SEQ ID NO: 9967 - protein, 9 aa, BK virus
TTNKRRSRS

SEQ ID NO: 9968 - protein, 9 aa, BK virus
TNKRRSRSS

SEQ ID NO: 9969 - protein, 9 aa, BK virus
NKRRSRSSR

SEQ ID NO: 9970 - protein, 9 aa, BK virus
KRRSRSSRS

SEQ ID NO: 9971 - protein, 9 aa, BK virus
NWGRCYYRG

SEQ ID NO: 9972 - protein, 9 aa, BK virus
WGRCYYRGR

SEQ ID NO: 9973 - protein, 9 aa, BK virus
GRCYYRGRM

SEQ ID NO: 9974 - protein, 9 aa, BK virus
RCYYRGRML

SEQ ID NO: 9975 - protein, 9 aa, BK virus
CYYRGRMLP

SEQ ID NO: 9976 - protein, 9 aa, BK virus
YYRGRMLPK

SEQ ID NO: 9977 - protein, 9 aa, BK virus
YRGRMLPKP

SEQ ID NO: 9978 - protein, 9 aa, BK virus
RGRMLPKPR

SEQ ID NO: 9979 - protein, 9 aa, BK virus
GRMLPKPRN

SEQ ID NO: 9980 - protein, 9 aa, BK virus
RMLPKPRNG

SEQ ID NO: 9981 - protein, 9 aa, BK virus
MLPKPRNGG

SEQ ID NO: 9982 - protein, 9 aa, BK virus
LPKPRNGGS

SEQ ID NO: 9983 - protein, 9 aa, BK virus
PKPRNGGSR

SEQ ID NO: 9984 - protein, 9 aa, BK virus
PREKNASLL

SEQ ID NO: 9985 - protein, 9 aa, BK virus
REKNASLLQ

SEQ ID NO: 9986 - protein, 9 aa, BK virus
EKNASLLQH

SEQ ID NO: 9987 - protein, 9 aa, BK virus
KNASLLQHS

SEQ ID NO: 9988 - protein, 9 aa, BK virus
NASLLQHSK

SEQ ID NO: 9989 - protein, 9 aa, BK virus
ASLLQHSKN

SEQ ID NO: 9990 - protein, 9 aa, BK virus
SLLQHSKNS

SEQ ID NO: 9991 - protein, 9 aa, BK virus
LLQHSKNSP

SEQ ID NO: 9992 - protein, 9 aa, BK virus
LQHSKNSPP

SEQ ID NO: 9993 - protein, 9 aa, BK virus
QHSKNSPPQ

SEQ ID NO: 9994 - protein, 9 aa, BK virus
HSKNSPPQF

SEQ ID NO: 9995 - protein, 9 aa, BK virus
SKNSPPQFK

SEQ ID NO: 9996 - protein, 9 aa, BK virus
GPNLWKSTD

SEQ ID NO: 9997 - protein, 9 aa, BK virus
PNLWKSTDV

SEQ ID NO: 9998 - protein, 9 aa, BK virus
NLWKSTDVG

SEQ ID NO: 9999 - protein, 9 aa, BK virus
LWKSTDVGG

SEQ ID NO: 10000 - protein, 9 aa, BK virus
WKSTDVGGC

SEQ ID NO: 10001 - protein, 9 aa, BK virus
KSTDVGGCN

SEQ ID NO: 10002 - protein, 9 aa, BK virus
STDVGGCNC

SEQ ID NO: 10003 - protein, 9 aa, BK virus
TDVGGCNCT

SEQ ID NO: 10004 - protein, 9 aa, BK virus
DVGGCNCTN

SEQ ID NO: 10005 - protein, 9 aa, BK virus
VGGCNCTNR

SEQ ID NO: 10006 - protein, 9 aa, BK virus
GGCNCTNRG

SEQ ID NO: 10007 - protein, 9 aa, BK virus
GCNCTNRGY

SEQ ID NO: 10008 - protein, 9 aa, BK virus
CNCTNRGYW

SEQ ID NO: 10009 - protein, 9 aa, BK virus
NCTNRGYWN

SEQ ID NO: 10010 - protein, 9 aa, BK virus
CTNRGYWNN

SEQ ID NO: 10011 - protein, 9 aa, BK virus
PSCRVTKSA

SEQ ID NO: 10012 - protein, 9 aa, BK virus
AWWRKTYSR

SEQ ID NO: 10013 - protein, 9 aa, BK virus
WWRKTYSRQ

SEQ ID NO: 10014 - protein, 9 aa, BK virus
FPLLCCRWR

SEQ ID NO: 10015 - protein, 9 aa, BK virus
PLLCCRWRT

SEQ ID NO: 10016 - protein, 9 aa, BK virus
LLCCRWRTL

SEQ ID NO: 10017 - protein, 9 aa, BK virus
LCCRWRTLG

SEQ ID NO: 10018 - protein, 9 aa, BK virus
CCRWRTLGN

SEQ ID NO: 10019 - protein, 9 aa, BK virus
CRWRTLGNA

SEQ ID NO: 10020 - protein, 9 aa, BK virus
RWRTLGNAG

SEQ ID NO: 10021 - protein, 9 aa, BK virus
WRTLGNAGS

SEQ ID NO: 10022 - protein, 9 aa, BK virus
RTLGNAGSA

SEQ ID NO: 10023 - protein, 9 aa, BK virus
TLGNAGSAN

SEQ ID NO: 10024 - protein, 9 aa, BK virus
LGNAGSANE

SEQ ID NO: 10025 - protein, 9 aa, BK virus
GNAGSANEL

SEQ ID NO: 10026 - protein, 9 aa, BK virus
NAGSANELQ

SEQ ID NO: 10027 - protein, 9 aa, BK virus
AGSANELQV

SEQ ID NO: 10028 - protein, 9 aa, BK virus
GSANELQVK

SEQ ID NO: 10029 - protein, 9 aa, BK virus
SANELQVKV

SEQ ID NO: 10030 - protein, 9 aa, BK virus
ANELQVKVP

SEQ ID NO: 10031 - protein, 9 aa, BK virus
KPNSPVPGN

SEQ ID NO: 10032 - protein, 9 aa, BK virus
PNSPVPGNE

SEQ ID NO: 10033 - protein, 9 aa, BK virus
NSPVPGNEY

SEQ ID NO: 10034 - protein, 9 aa, BK virus
GLFGQKQCL

SEQ ID NO: 10035 - protein, 9 aa, BK virus
LFGQKQCLS

SEQ ID NO: 10036 - protein, 9 aa, BK virus
FGQKQCLSS

SEQ ID NO: 10037 - protein, 9 aa, BK virus
VFWDFHRRG

SEQ ID NO: 10038 - protein, 9 aa, BK virus
FWDFHRRGK

SEQ ID NO: 10039 - protein, 9 aa, BK virus
WDFHRRGKC

SEQ ID NO: 10040 - protein, 9 aa, BK virus
DFHRRGKCS

SEQ ID NO: 10041 - protein, 9 aa, BK virus
FHRRGKCSP

SEQ ID NO: 10042 - protein, 9 aa, BK virus
HRRGKCSPS

SEQ ID NO: 10043 - protein, 9 aa, BK virus
RRGKCSPST

SEQ ID NO: 10044 - protein, 9 aa, BK virus
RGKCSPSTS

SEQ ID NO: 10045 - protein, 9 aa, BK virus
GKCSPSTSC

SEQ ID NO: 10046 - protein, 9 aa, BK virus
KCSPSTSCD

SEQ ID NO: 10047 - protein, 9 aa, BK virus
CSPSTSCDQ

SEQ ID NO: 10048 - protein, 9 aa, BK virus
SPSTSCDQH

SEQ ID NO: 10049 - protein, 9 aa, BK virus
PSTSCDQHS

SEQ ID NO: 10050 - protein, 9 aa, BK virus
STSCDQHSY

SEQ ID NO: 10051 - protein, 9 aa, BK virus
TSCDQHSYH

SEQ ID NO: 10052 - protein, 9 aa, BK virus
SCDQHSYHS

SEQ ID NO: 10053 - protein, 9 aa, BK virus
CDQHSYHSV

SEQ ID NO: 10054 - protein, 9 aa, BK virus
DQHSYHSVA

SEQ ID NO: 10055 - protein, 9 aa, BK virus
QHSYHSVAR

SEQ ID NO: 10056 - protein, 9 aa, BK virus
QLWNTTVER

SEQ ID NO: 10057 - protein, 9 aa, BK virus
LWNTTVERP

SEQ ID NO: 10058 - protein, 9 aa, BK virus
WNTTVERPC

SEQ ID NO: 10059 - protein, 9 aa, BK virus
NTTVERPCK

SEQ ID NO: 10060 - protein, 9 aa, BK virus
TTVERPCKI

SEQ ID NO: 10061 - protein, 9 aa, BK virus
TVERPCKIF

SEQ ID NO: 10062 - protein, 9 aa, BK virus
DPPEKKICK

SEQ ID NO: 10063 - protein, 9 aa, BK virus
PPEKKICKE

SEQ ID NO: 10064 - protein, 9 aa, BK virus
PEKKICKES

SEQ ID NO: 10065 - protein, 9 aa, BK virus
EKKICKESL

SEQ ID NO: 10066 - protein, 9 aa, BK virus
KKICKESLP

SEQ ID NO: 10067 - protein, 9 aa, BK virus
KICKESLPN

SEQ ID NO: 10068 - protein, 9 aa, BK virus
ICKESLPNF

SEQ ID NO: 10069 - protein, 9 aa, BK virus
CKESLPNFL

SEQ ID NO: 10070 - protein, 9 aa, BK virus
KESLPNFLF

SEQ ID NO: 10071 - protein, 9 aa, BK virus
ESLPNFLFA

SEQ ID NO: 10072 - protein, 9 aa, BK virus
SLPNFLFAK

SEQ ID NO: 10073 - protein, 9 aa, BK virus
PYKQENPES

SEQ ID NO: 10074 - protein, 9 aa, BK virus
YKQENPESG

SEQ ID NO: 10075 - protein, 9 aa, BK virus
KQENPESGW

SEQ ID NO: 10076 - protein, 9 aa, BK virus
QENPESGWA

SEQ ID NO: 10077 - protein, 9 aa, BK virus
ENPESGWAA

SEQ ID NO: 10078 - protein, 9 aa, BK virus
NPESGWAAY

SEQ ID NO: 10079 - protein, 9 aa, BK virus
PESGWAAYV

SEQ ID NO: 10080 - protein, 9 aa, BK virus
ESGWAAYVW

SEQ ID NO: 10081 - protein, 9 aa, BK virus
SGWAAYVWY

SEQ ID NO: 10082 - protein, 9 aa, BK virus
GWAAYVWYG

SEQ ID NO: 10083 - protein, 9 aa, BK virus
WAAYVWYGI

SEQ ID NO: 10084 - protein, 9 aa, BK virus
AAYVWYGIP

SEQ ID NO: 10085 - protein, 9 aa, BK virus
AYVWYGIPG

SEQ ID NO: 10086 - protein, 9 aa, BK virus
YVWYGIPGR

SEQ ID NO: 10087 - protein, 9 aa, BK virus
VWYGIPGRR

SEQ ID NO: 10088 - protein, 9 aa, BK virus
WYGIPGRRG

SEQ ID NO: 10089 - protein, 9 aa, BK virus
WHRKTSRGP

SEQ ID NO: 10090 - protein, 9 aa, BK virus
HRKTSRGPR

SEQ ID NO: 10091 - protein, 9 aa, BK virus
RKTSRGPRY

SEQ ID NO: 10092 - protein, 9 aa, BK virus
KTSRGPRYD

SEQ ID NO: 10093 - protein, 9 aa, BK virus
TSRGPRYDK

SEQ ID NO: 10094 - protein, 9 aa, BK virus
SRGPRYDKI

SEQ ID NO: 10095 - protein, 9 aa, BK virus
RGPRYDKIY

SEQ ID NO: 10096 - protein, 9 aa, BK virus
QTGTIANQN

SEQ ID NO: 10097 - protein, 9 aa, BK virus
TGTIANQNA

SEQ ID NO: 10098 - protein, 9 aa, BK virus
GTIANQNAL

SEQ ID NO: 10099 - protein, 9 aa, BK virus
TIANQNALN

SEQ ID NO: 10100 - protein, 9 aa, BK virus
IANQNALNR

SEQ ID NO: 10101 - protein, 9 aa, BK virus
ANQNALNRC

SEQ ID NO: 10102 - protein, 9 aa, BK virus
NQNALNRCF

SEQ ID NO: 10103 - protein, 9 aa, BK virus
QNALNRCFY

SEQ ID NO: 10104 - protein, 9 aa, BK virus
NALNRCFYC

SEQ ID NO: 10105 - protein, 9 aa, BK virus
ALNRCFYCT

SEQ ID NO: 10106 - protein, 9 aa, BK virus
LNRCFYCTY

SEQ ID NO: 10107 - protein, 9 aa, BK virus
NRCFYCTYT

SEQ ID NO: 10108 - protein, 9 aa, BK virus
RCFYCTYTF

SEQ ID NO: 10109 - protein, 9 aa, BK virus
CFYCTYTFN

SEQ ID NO: 10110 - protein, 9 aa, BK virus
FYCTYTFNK

SEQ ID NO: 10111 - protein, 9 aa, BK virus
YCTYTFNKC

SEQ ID NO: 10112 - protein, 9 aa, BK virus
CTYTFNKCC

SEQ ID NO: 10113 - protein, 9 aa, BK virus
TYTFNKCCF

SEQ ID NO: 10114 - protein, 9 aa, BK virus
YTFNKCCFC

SEQ ID NO: 10115 - protein, 9 aa, BK virus
TFNKCCFCI

SEQ ID NO: 10116 - protein, 9 aa, BK virus
FNKCCFCIS

SEQ ID NO: 10117 - protein, 9 aa, BK virus
NKCCFCISH

SEQ ID NO: 10118 - protein, 9 aa, BK virus
KCCFCISHF

SEQ ID NO: 10119 - protein, 9 aa, BK virus
ACVILGVVF

SEQ ID NO: 10120 - protein, 9 aa, BK virus
NTESLYTNA

SEQ ID NO: 10121 - protein, 9 aa, BK virus
TESLYTNAT

SEQ ID NO: 10122 - protein, 9 aa, BK virus
ESLYTNATL

SEQ ID NO: 10123 - protein, 9 aa, BK virus
SLYTNATLD

SEQ ID NO: 10124 - protein, 9 aa, BK virus
LYTNATLDY

SEQ ID NO: 10125 - protein, 9 aa, BK virus
YTNATLDYG

SEQ ID NO: 10126 - protein, 9 aa, BK virus
TNATLDYGG

SEQ ID NO: 10127 - protein, 9 aa, BK virus
NATLDYGGL

SEQ ID NO: 10128 - protein, 9 aa, BK virus
ATLDYGGLT

SEQ ID NO: 10129 - protein, 9 aa, BK virus
TLDYGGLTF

SEQ ID NO: 10130 - protein, 9 aa, BK virus
LDYGGLTFG

SEQ ID NO: 10131 - protein, 9 aa, BK virus
DYGGLTFGN

SEQ ID NO: 10132 - protein, 9 aa, BK virus
YGGLTFGNL

SEQ ID NO: 10133 - protein, 9 aa, BK virus
GGLTFGNLQ

SEQ ID NO: 10134 - protein, 9 aa, BK virus
GLTFGNLQQ

SEQ ID NO: 10135 - protein, 9 aa, BK virus
LTFGNLQQG

SEQ ID NO: 10136 - protein, 9 aa, BK virus
TFGNLQQGL

SEQ ID NO: 10137 - protein, 9 aa, BK virus
FGNLQQGLK

SEQ ID NO: 10138 - protein, 9 aa, BK virus
GNLQQGLKY

SEQ ID NO: 10139 - protein, 9 aa, BK virus
NLQQGLKYL

SEQ ID NO: 10140 - protein, 9 aa, BK virus
LQQGLKYLR

SEQ ID NO: 10141 - protein, 9 aa, BK virus
QQGLKYLRL

SEQ ID NO: 10142 - protein, 9 aa, BK virus
QGLKYLRLG

SEQ ID NO: 10143 - protein, 9 aa, BK virus
GLKYLRLGK

SEQ ID NO: 10144 - protein, 9 aa, BK virus
LKYLRLGKS

SEQ ID NO: 10145 - protein, 9 aa, BK virus
KYLRLGKSI

SEQ ID NO: 10146 - protein, 9 aa, BK virus
YLRLGKSIV

SEQ ID NO: 10147 - protein, 9 aa, BK virus
LRLGKSIVI

SEQ ID NO: 10148 - protein, 9 aa, BK virus
RLGKSIVIG

SEQ ID NO: 10149 - protein, 9 aa, BK virus
LGKSIVIGI

SEQ ID NO: 10150 - protein, 9 aa, BK virus
GKSIVIGIQ

SEQ ID NO: 10151 - protein, 9 aa, BK virus
KSIVIGIQC

SEQ ID NO: 10152 - protein, 9 aa, BK virus
SIVIGIQCL

SEQ ID NO: 10153 - protein, 9 aa, BK virus
IVIGIQCLI

SEQ ID NO: 10154 - protein, 9 aa, BK virus
VIGIQCLIH

SEQ ID NO: 10155 - protein, 9 aa, BK virus
IGIQCLIHV

SEQ ID NO: 10156 - protein, 9 aa, BK virus
GIQCLIHVQ

SEQ ID NO: 10157 - protein, 9 aa, BK virus
IQCLIHVQS

SEQ ID NO: 10158 - protein, 9 aa, BK virus
QCLIHVQSL

SEQ ID NO: 10159 - protein, 9 aa, BK virus
CLIHVQSLQ

SEQ ID NO: 10160 - protein, 9 aa, BK virus
LIHVQSLQF

SEQ ID NO: 10161 - protein, 9 aa, BK virus
IHVQSLQFL

SEQ ID NO: 10162 - protein, 9 aa, BK virus
HVQSLQFLN

SEQ ID NO: 10163 - protein, 9 aa, BK virus
VQSLQFLNP

SEQ ID NO: 10164 - protein, 9 aa, BK virus
QSLQFLNPL

SEQ ID NO: 10165 - protein, 9 aa, BK virus
SLQFLNPLL

SEQ ID NO: 10166 - protein, 9 aa, BK virus
LQFLNPLLL

SEQ ID NO: 10167 - protein, 9 aa, BK virus
YQEYISPCI

SEQ ID NO: 10168 - protein, 9 aa, BK virus
QEYISPCIY

SEQ ID NO: 10169 - protein, 9 aa, BK virus
EYISPCIYY

SEQ ID NO: 10170 - protein, 9 aa, BK virus
YISPCIYYI

SEQ ID NO: 10171 - protein, 9 aa, BK virus
ISPCIYYIS

SEQ ID NO: 10172 - protein, 9 aa, BK virus
SPCIYYISS

SEQ ID NO: 10173 - protein, 9 aa, BK virus
PCIYYISSL

SEQ ID NO: 10174 - protein, 9 aa, BK virus
CIYYISSLK

SEQ ID NO: 10175 - protein, 9 aa, BK virus
IYYISSLKK

SEQ ID NO: 10176 - protein, 9 aa, BK virus
YYISSLKKY

SEQ ID NO: 10177 - protein, 9 aa, BK virus
YISSLKKYT

SEQ ID NO: 10178 - protein, 9 aa, BK virus
ISSLKKYTY

SEQ ID NO: 10179 - protein, 9 aa, BK virus
SSLKKYTYL

SEQ ID NO: 10180 - protein, 9 aa, BK virus
SLKKYTYLS

SEQ ID NO: 10181 - protein, 9 aa, BK virus
LKKYTYLSQ

SEQ ID NO: 10182 - protein, 9 aa, BK virus
KKYTYLSQN

SEQ ID NO: 10183 - protein, 9 aa, BK virus
KYTYLSQNP

SEQ ID NO: 10184 - protein, 9 aa, BK virus
YTYLSQNPA

SEQ ID NO: 10185 - protein, 9 aa, BK virus
TYLSQNPAF

SEQ ID NO: 10186 - protein, 9 aa, BK virus
YLSQNPAFP

SEQ ID NO: 10187 - protein, 9 aa, BK virus
LSQNPAFPS

SEQ ID NO: 10188 - protein, 9 aa, BK virus
SQNPAFPSI

SEQ ID NO: 10189 - protein, 9 aa, BK virus
QNPAFPSIQ

SEQ ID NO: 10190 - protein, 9 aa, BK virus
NPAFPSIQQ

SEQ ID NO: 10191 - protein, 9 aa, BK virus
PAFPSIQQF

SEQ ID NO: 10192 - protein, 9 aa, BK virus
IVYQLQNQL

SEQ ID NO: 10193 - protein, 9 aa, BK virus
VYQLQNQLQ

SEQ ID NO: 10194 - protein, 9 aa, BK virus
YQLQNQLQA

SEQ ID NO: 10195 - protein, 9 aa, BK virus
TKLAVATRS

SEQ ID NO: 10196 - protein, 9 aa, BK virus
KLAVATRSF

SEQ ID NO: 10197 - protein, 9 aa, BK virus
LAVATRSFH

SEQ ID NO: 10198 - protein, 9 aa, BK virus
AVATRSFHF

SEQ ID NO: 10199 - protein, 9 aa, BK virus
VATRSFHFV

SEQ ID NO: 10200 - protein, 9 aa, BK virus
ATRSFHFVK

SEQ ID NO: 10201 - protein, 9 aa, BK virus
TRSFHFVKF

SEQ ID NO: 10202 - protein, 9 aa, BK virus
RSFHFVKFF

SEQ ID NO: 10203 - protein, 9 aa, BK virus
SFHFVKFFF

SEQ ID NO: 10204 - protein, 9 aa, BK virus
FHFVKFFFQ

SEQ ID NO: 10205 - protein, 9 aa, BK virus
HFVKFFFQV

SEQ ID NO: 10206 - protein, 9 aa, BK virus
FVKFFFQVR

SEQ ID NO: 10207 - protein, 9 aa, BK virus
VKFFFQVRT

SEQ ID NO: 10208 - protein, 9 aa, BK virus
KFFFQVRTL

SEQ ID NO: 10209 - protein, 9 aa, BK virus
FFFQVRTLS

SEQ ID NO: 10210 - protein, 9 aa, BK virus
FFQVRTLSF

SEQ ID NO: 10211 - protein, 9 aa, BK virus
FQVRTLSFV

SEQ ID NO: 10212 - protein, 9 aa, BK virus
QVRTLSFVR

SEQ ID NO: 10213 - protein, 9 aa, BK virus
VRTLSFVRI

SEQ ID NO: 10214 - protein, 9 aa, BK virus
RTLSFVRIF

SEQ ID NO: 10215 - protein, 9 aa, BK virus
TLSFVRIFL

SEQ ID NO: 10216 - protein, 9 aa, BK virus
LSFVRIFLN

SEQ ID NO: 10217 - protein, 9 aa, BK virus
SFVRIFLNI

SEQ ID NO: 10218 - protein, 9 aa, BK virus
FVRIFLNIF

SEQ ID NO: 10219 - protein, 9 aa, BK virus
VRIFLNIFW

SEQ ID NO: 10220 - protein, 9 aa, BK virus
RIFLNIFWA

SEQ ID NO: 10221 - protein, 9 aa, BK virus
PSLVEIFGF

SEQ ID NO: 10222 - protein, 9 aa, BK virus
SLVEIFGFF

SEQ ID NO: 10223 - protein, 9 aa, BK virus
LVEIFGFFC

SEQ ID NO: 10224 - protein, 9 aa, BK virus
VEIFGFFCL

SEQ ID NO: 10225 - protein, 9 aa, BK virus
EIFGFFCLN

SEQ ID NO: 10226 - protein, 9 aa, BK virus
IFGFFCLNV

SEQ ID NO: 10227 - protein, 9 aa, BK virus
FGFFCLNVS

SEQ ID NO: 10228 - protein, 9 aa, BK virus
GFFCLNVSF

SEQ ID NO: 10229 - protein, 9 aa, BK virus
FFCLNVSFL

SEQ ID NO: 10230 - protein, 9 aa, BK virus
FCLNVSFLN

SEQ ID NO: 10231 - protein, 9 aa, BK virus
CLNVSFLNL

SEQ ID NO: 10232 - protein, 9 aa, BK virus
LNVSFLNLP

SEQ ID NO: 10233 - protein, 9 aa, BK virus
HFHLNNLSN

SEQ ID NO: 10234 - protein, 9 aa, BK virus
FHLNNLSNC

SEQ ID NO: 10235 - protein, 9 aa, BK virus
HLNNLSNCL

SEQ ID NO: 10236 - protein, 9 aa, BK virus
LNNLSNCLN

SEQ ID NO: 10237 - protein, 9 aa, BK virus
NNLSNCLNC

SEQ ID NO: 10238 - protein, 9 aa, BK virus
NLSNCLNCL

SEQ ID NO: 10239 - protein, 9 aa, BK virus
LSNCLNCLF

SEQ ID NO: 10240 - protein, 9 aa, BK virus
SNCLNCLFH

SEQ ID NO: 10241 - protein, 9 aa, BK virus
NCLNCLFHV

SEQ ID NO: 10242 - protein, 9 aa, BK virus
CLNCLFHVL

SEQ ID NO: 10243 - protein, 9 aa, BK virus
LNCLFHVLK

SEQ ID NO: 10244 - protein, 9 aa, BK virus
NCLFHVLKA

SEQ ID NO: 10245 - protein, 9 aa, BK virus
CLFHVLKAN

SEQ ID NO: 10246 - protein, 9 aa, BK virus
LFHVLKANP

SEQ ID NO: 10247 - protein, 9 aa, BK virus
FHVLKANPL

SEQ ID NO: 10248 - protein, 9 aa, BK virus
HVLKANPLI

SEQ ID NO: 10249 - protein, 9 aa, BK virus
VLKANPLIQ

SEQ ID NO: 10250 - protein, 9 aa, BK virus
LKANPLIQL

SEQ ID NO: 10251 - protein, 9 aa, BK virus
KANPLIQLL

SEQ ID NO: 10252 - protein, 9 aa, BK virus
ANPLIQLLS

SEQ ID NO: 10253 - protein, 9 aa, BK virus
NPLIQLLSL

SEQ ID NO: 10254 - protein, 9 aa, BK virus
PLIQLLSLL

SEQ ID NO: 10255 - protein, 9 aa, BK virus
LIQLLSLLH

SEQ ID NO: 10256 - protein, 9 aa, BK virus
IQLLSLLHL

SEQ ID NO: 10257 - protein, 9 aa, BK virus
QLLSLLHLQ

SEQ ID NO: 10258 - protein, 9 aa, BK virus
LLSLLHLQK

SEQ ID NO: 10259 - protein, 9 aa, BK virus
LSLLHLQKQ

SEQ ID NO: 10260 - protein, 9 aa, BK virus
SLLHLQKQP

SEQ ID NO: 10261 - protein, 9 aa, BK virus
LLHLQKQPC

SEQ ID NO: 10262 - protein, 9 aa, BK virus
LHLQKQPCT

SEQ ID NO: 10263 - protein, 9 aa, BK virus
HLQKQPCTD

SEQ ID NO: 10264 - protein, 9 aa, BK virus
LQKQPCTDL

SEQ ID NO: 10265 - protein, 9 aa, BK virus
LHLAQRLAF

SEQ ID NO: 10266 - protein, 9 aa, BK virus
HLAQRLAFP

SEQ ID NO: 10267 - protein, 9 aa, BK virus
LAQRLAFPW

SEQ ID NO: 10268 - protein, 9 aa, BK virus
AQRLAFPWV

SEQ ID NO: 10269 - protein, 9 aa, BK virus
QRLAFPWVG

SEQ ID NO: 10270 - protein, 9 aa, BK virus
RLAFPWVGL

SEQ ID NO: 10271 - protein, 9 aa, BK virus
LAFPWVGLH

SEQ ID NO: 10272 - protein, 9 aa, BK virus
AFPWVGLHL

SEQ ID NO: 10273 - protein, 9 aa, BK virus
FPWVGLHLR

SEQ ID NO: 10274 - protein, 9 aa, BK virus
PWVGLHLRL

SEQ ID NO: 10275 - protein, 9 aa, BK virus
WVGLHLRLY

SEQ ID NO: 10276 - protein, 9 aa, BK virus
VGLHLRLYH

SEQ ID NO: 10277 - protein, 9 aa, BK virus
GLHLRLYHH

SEQ ID NO: 10278 - protein, 9 aa, BK virus
LHLRLYHHT

SEQ ID NO: 10279 - protein, 9 aa, BK virus
HLRLYHHTN

SEQ ID NO: 10280 - protein, 9 aa, BK virus
LRLYHHTNL

SEQ ID NO: 10281 - protein, 9 aa, BK virus
RLYHHTNLI

SEQ ID NO: 10282 - protein, 9 aa, BK virus
LYHHTNLIT

SEQ ID NO: 10283 - protein, 9 aa, BK virus
YHHTNLITL

SEQ ID NO: 10284 - protein, 9 aa, BK virus
HHTNLITLQ

SEQ ID NO: 10285 - protein, 9 aa, BK virus
HTNLITLQL

SEQ ID NO: 10286 - protein, 9 aa, BK virus
TNLITLQLV

SEQ ID NO: 10287 - protein, 9 aa, BK virus
NLITLQLVL

SEQ ID NO: 10288 - protein, 9 aa, BK virus
LITLQLVLF

SEQ ID NO: 10289 - protein, 9 aa, BK virus
ITLQLVLFF

SEQ ID NO: 10290 - protein, 9 aa, BK virus
TLQLVLFFH

SEQ ID NO: 10291 - protein, 9 aa, BK virus
LQLVLFFHY

SEQ ID NO: 10292 - protein, 9 aa, BK virus
QLVLFFHYQ

SEQ ID NO: 10293 - protein, 9 aa, BK virus
LVLFFHYQW

SEQ ID NO: 10294 - protein, 9 aa, BK virus
VLFFHYQWD

SEQ ID NO: 10295 - protein, 9 aa, BK virus
LFFHYQWDL

SEQ ID NO: 10296 - protein, 9 aa, BK virus
KQYSAKNQI

SEQ ID NO: 10297 - protein, 9 aa, BK virus
QYSAKNQIL

SEQ ID NO: 10298 - protein, 9 aa, BK virus
YSAKNQILQ

SEQ ID NO: 10299 - protein, 9 aa, BK virus
SAKNQILQN

SEQ ID NO: 10300 - protein, 9 aa, BK virus
AKNQILQNP

SEQ ID NO: 10301 - protein, 9 aa, BK virus
KNQILQNPF

SEQ ID NO: 10302 - protein, 9 aa, BK virus
VANSAAKQH

SEQ ID NO: 10303 - protein, 9 aa, BK virus
ANSAAKQHL

SEQ ID NO: 10304 - protein, 9 aa, BK virus
NSAAKQHLP

SEQ ID NO: 10305 - protein, 9 aa, BK virus
SAAKQHLPY

SEQ ID NO: 10306 - protein, 9 aa, BK virus
AAKQHLPYI

SEQ ID NO: 10307 - protein, 9 aa, BK virus
AKQHLPYIV

SEQ ID NO: 10308 - protein, 9 aa, BK virus
KQHLPYIVL

SEQ ID NO: 10309 - protein, 9 aa, BK virus
QHLPYIVLV

SEQ ID NO: 10310 - protein, 9 aa, BK virus
HLPYIVLVQ

SEQ ID NO: 10311 - protein, 9 aa, BK virus
LPYIVLVQH

SEQ ID NO: 10312 - protein, 9 aa, BK virus
PYIVLVQHF

SEQ ID NO: 10313 - protein, 9 aa, BK virus
YIVLVQHFH

SEQ ID NO: 10314 - protein, 9 aa, BK virus
IVLVQHFHE

SEQ ID NO: 10315 - protein, 9 aa, BK virus
VLVQHFHEL

SEQ ID NO: 10316 - protein, 9 aa, BK virus
LVQHFHELQ

SEQ ID NO: 10317 - protein, 9 aa, BK virus
VQHFHELQI

SEQ ID NO: 10318 - protein, 9 aa, BK virus
QHFHELQIL

SEQ ID NO: 10319 - protein, 9 aa, BK virus
HFHELQILN

SEQ ID NO: 10320 - protein, 9 aa, BK virus
FHELQILNP

SEQ ID NO: 10321 - protein, 9 aa, BK virus
HELQILNPF

SEQ ID NO: 10322 - protein, 9 aa, BK virus
ELQILNPFY

SEQ ID NO: 10323 - protein, 9 aa, BK virus
LQILNPFYL

SEQ ID NO: 10324 - protein, 9 aa, BK virus
QILNPFYLI

SEQ ID NO: 10325 - protein, 9 aa, BK virus
ILNPFYLIY

SEQ ID NO: 10326 - protein, 9 aa, BK virus
LNPFYLIYD

SEQ ID NO: 10327 - protein, 9 aa, BK virus
IFLLAFLPW

SEQ ID NO: 10328 - protein, 9 aa, BK virus
FLLAFLPWS

SEQ ID NO: 10329 - protein, 9 aa, BK virus
LLAFLPWSY

SEQ ID NO: 10330 - protein, 9 aa, BK virus
LAFLPWSYE

SEQ ID NO: 10331 - protein, 9 aa, BK virus
AFLPWSYEG

SEQ ID NO: 10332 - protein, 9 aa, BK virus
FLPWSYEGY

SEQ ID NO: 10333 - protein, 9 aa, BK virus
LPWSYEGYL

SEQ ID NO: 10334 - protein, 9 aa, BK virus
PWSYEGYLL

SEQ ID NO: 10335 - protein, 9 aa, BK virus
WSYEGYLLF

SEQ ID NO: 10336 - protein, 9 aa, BK virus
SYEGYLLFF

SEQ ID NO: 10337 - protein, 9 aa, BK virus
LKLYLLLAD

SEQ ID NO: 10338 - protein, 9 aa, BK virus
KLYLLLADK

SEQ ID NO: 10339 - protein, 9 aa, BK virus
LYLLLADKY

SEQ ID NO: 10340 - protein, 9 aa, BK virus
YLLLADKYF

SEQ ID NO: 10341 - protein, 9 aa, BK virus
LLLADKYFF

SEQ ID NO: 10342 - protein, 9 aa, BK virus
LLADKYFFD

SEQ ID NO: 10343 - protein, 9 aa, BK virus
LADKYFFDF

SEQ ID NO: 10344 - protein, 9 aa, BK virus
ADKYFFDFY

SEQ ID NO: 10345 - protein, 9 aa, BK virus
DKYFFDFYF

SEQ ID NO: 10346 - protein, 9 aa, BK virus
KYFFDFYFL

SEQ ID NO: 10347 - protein, 9 aa, BK virus
YFFDFYFLQ

SEQ ID NO: 10348 - protein, 9 aa, BK virus
FFDFYFLQK

SEQ ID NO: 10349 - protein, 9 aa, BK virus
HLQSAFHDT

SEQ ID NO: 10350 - protein, 9 aa, BK virus
SDKAGLFSD

SEQ ID NO: 10351 - protein, 9 aa, BK virus
DKAGLFSDT

SEQ ID NO: 10352 - protein, 9 aa, BK virus
KAGLFSDTF

SEQ ID NO: 10353 - protein, 9 aa, BK virus
AGLFSDTFY

SEQ ID NO: 10354 - protein, 9 aa, BK virus
GLFSDTFYT

SEQ ID NO: 10355 - protein, 9 aa, BK virus
LFSDTFYTP

SEQ ID NO: 10356 - protein, 9 aa, BK virus
FSDTFYTPL

SEQ ID NO: 10357 - protein, 9 aa, BK virus
SDTFYTPLH

SEQ ID NO: 10358 - protein, 9 aa, BK virus
DTFYTPLHC

SEQ ID NO: 10359 - protein, 9 aa, BK virus
TFYTPLHCI

SEQ ID NO: 10360 - protein, 9 aa, BK virus
FYTPLHCIE

SEQ ID NO: 10361 - protein, 9 aa, BK virus
YTPLHCIEI

SEQ ID NO: 10362 - protein, 9 aa, BK virus
TPLHCIEIL

SEQ ID NO: 10363 - protein, 9 aa, BK virus
PLHCIEILN

SEQ ID NO: 10364 - protein, 9 aa, BK virus
LHCIEILNT

SEQ ID NO: 10365 - protein, 9 aa, BK virus
HCIEILNTY

SEQ ID NO: 10366 - protein, 9 aa, BK virus
CIEILNTYL

SEQ ID NO: 10367 - protein, 9 aa, BK virus
IEILNTYLI

SEQ ID NO: 10368 - protein, 9 aa, BK virus
EILNTYLII

SEQ ID NO: 10369 - protein, 9 aa, BK virus
ILNTYLIIK

SEQ ID NO: 10370 - protein, 9 aa, BK virus
LNTYLIIKT

SEQ ID NO: 10371 - protein, 9 aa, BK virus
NTYLIIKTH

SEQ ID NO: 10372 - protein, 9 aa, BK virus
TYLIIKTHP

SEQ ID NO: 10373 - protein, 9 aa, BK virus
YLIIKTHPH

SEQ ID NO: 10374 - protein, 9 aa, BK virus
LIIKTHPHT

SEQ ID NO: 10375 - protein, 9 aa, BK virus
IIKTHPHTL

SEQ ID NO: 10376 - protein, 9 aa, BK virus
IKTHPHTLS

SEQ ID NO: 10377 - protein, 9 aa, BK virus
KTHPHTLSL

SEQ ID NO: 10378 - protein, 9 aa, BK virus
THPHTLSLL

SEQ ID NO: 10379 - protein, 9 aa, BK virus
HPHTLSLLH

SEQ ID NO: 10380 - protein, 9 aa, BK virus
PHTLSLLHT

SEQ ID NO: 10381 - protein, 9 aa, BK virus
HTLSLLHTQ

SEQ ID NO: 10382 - protein, 9 aa, BK virus
LISKTPALF

SEQ ID NO: 10383 - protein, 9 aa, BK virus
ISKTPALFL

SEQ ID NO: 10384 - protein, 9 aa, BK virus
SKTPALFLQ

SEQ ID NO: 10385 - protein, 9 aa, BK virus
KTPALFLQA

SEQ ID NO: 10386 - protein, 9 aa, BK virus
TPALFLQAL

SEQ ID NO: 10387 - protein, 9 aa, BK virus
PALFLQALL

SEQ ID NO: 10388 - protein, 9 aa, BK virus
ALFLQALLG

SEQ ID NO: 10389 - protein, 9 aa, BK virus
NHAPLSPLE

SEQ ID NO: 10390 - protein, 9 aa, BK virus
HAPLSPLEC

SEQ ID NO: 10391 - protein, 9 aa, BK virus
APLSPLECF

SEQ ID NO: 10392 - protein, 9 aa, BK virus
PLSPLECFL

SEQ ID NO: 10393 - protein, 9 aa, BK virus
LSPLECFLL

SEQ ID NO: 10394 - protein, 9 aa, BK virus
LRHYIVSIP

SEQ ID NO: 10395 - protein, 9 aa, BK virus
RHYIVSIPY

SEQ ID NO: 10396 - protein, 9 aa, BK virus
RYTAFDRNY

SEQ ID NO: 10397 - protein, 9 aa, BK virus
LQKLYVYVE

SEQ ID NO: 10398 - protein, 9 aa, BK virus
QKLYVYVEL

SEQ ID NO: 10399 - protein, 9 aa, BK virus
KLYVYVELK

SEQ ID NO: 10400 - protein, 9 aa, BK virus
LYVYVELKR

SEQ ID NO: 10401 - protein, 9 aa, BK virus
YVYVELKRI

SEQ ID NO: 10402 - protein, 9 aa, BK virus
YYAQHTCVY

SEQ ID NO: 10403 - protein, 9 aa, BK virus
VFYTEFELF

SEQ ID NO: 10404 - protein, 9 aa, BK virus
FYTEFELFL

SEQ ID NO: 10405 - protein, 9 aa, BK virus
YTQQSRQGF

SEQ ID NO: 10406 - protein, 9 aa, BK virus
TQQSRQGFY

SEQ ID NO: 10407 - protein, 9 aa, BK virus
QQSRQGFYY

SEQ ID NO: 10408 - protein, 9 aa, BK virus
ETGVDQRES

SEQ ID NO: 10409 - protein, 9 aa, BK virus
TGVDQRESL

SEQ ID NO: 10410 - protein, 9 aa, BK virus
GLLPFFFFW

SEQ ID NO: 10411 - protein, 9 aa, BK virus
LLPFFFFWV

SEQ ID NO: 10412 - protein, 9 aa, BK virus
LPFFFFWVV

SEQ ID NO: 10413 - protein, 9 aa, BK virus
PFFFFWVVL

SEQ ID NO: 10414 - protein, 9 aa, BK virus
FFFFWVVLS

SEQ ID NO: 10415 - protein, 9 aa, BK virus
FFFWVVLSV

SEQ ID NO: 10416 - protein, 9 aa, BK virus
FFWVVLSVE

SEQ ID NO: 10417 - protein, 9 aa, BK virus
FWVVLSVEN

SEQ ID NO: 10418 - protein, 9 aa, BK virus
WVVLSVENL

SEQ ID NO: 10419 - protein, 9 aa, BK virus
VVLSVENLL

SEQ ID NO: 10420 - protein, 9 aa, BK virus
VLSVENLLL

SEQ ID NO: 10421 - protein, 9 aa, BK virus
LSVENLLLL

SEQ ID NO: 10422 - protein, 9 aa, BK virus
SVENLLLLL

SEQ ID NO: 10423 - protein, 9 aa, BK virus
VENLLLLLH

SEQ ID NO: 10424 - protein, 9 aa, BK virus
ENLLLLLHH

SEQ ID NO: 10425 - protein, 9 aa, BK virus
NLLLLLHHW

SEQ ID NO: 10426 - protein, 9 aa, BK virus
LLLLLHHWQ

SEQ ID NO: 10427 - protein, 9 aa, BK virus
LLLLHHWQT

SEQ ID NO: 10428 - protein, 9 aa, BK virus
LLLHHWQTY

SEQ ID NO: 10429 - protein, 9 aa, BK virus
LLHHWQTYL

SEQ ID NO: 10430 - protein, 9 aa, BK virus
LHHWQTYLH

SEQ ID NO: 10431 - protein, 9 aa, BK virus
HHWQTYLHG

SEQ ID NO: 10432 - protein, 9 aa, BK virus
HWQTYLHGK

SEQ ID NO: 10433 - protein, 9 aa, BK virus
WQTYLHGKI

SEQ ID NO: 10434 - protein, 9 aa, BK virus
QTYLHGKIN

SEQ ID NO: 10435 - protein, 9 aa, BK virus
TYLHGKINL

SEQ ID NO: 10436 - protein, 9 aa, BK virus
YLHGKINLH

SEQ ID NO: 10437 - protein, 9 aa, BK virus
LHGKINLHP

SEQ ID NO: 10438 - protein, 9 aa, BK virus
HGKINLHPI

SEQ ID NO: 10439 - protein, 9 aa, BK virus
GKINLHPIF

SEQ ID NO: 10440 - protein, 9 aa, BK virus
KINLHPIFH

SEQ ID NO: 10441 - protein, 9 aa, BK virus
RNSTRTPTL

SEQ ID NO: 10442 - protein, 9 aa, BK virus
NSTRTPTLL

SEQ ID NO: 10443 - protein, 9 aa, BK virus
STRTPTLLF

SEQ ID NO: 10444 - protein, 9 aa, BK virus
TRTPTLLFH

SEQ ID NO: 10445 - protein, 9 aa, BK virus
RTPTLLFHR

SEQ ID NO: 10446 - protein, 9 aa, BK virus
TPTLLFHRL

SEQ ID NO: 10447 - protein, 9 aa, BK virus
PTLLFHRLA

SEQ ID NO: 10448 - protein, 9 aa, BK virus
TLLFHRLAP

SEQ ID NO: 10449 - protein, 9 aa, BK virus
LLFHRLAPI

SEQ ID NO: 10450 - protein, 9 aa, BK virus
LFHRLAPIK

SEQ ID NO: 10451 - protein, 9 aa, BK virus
FHRLAPIKK

SEQ ID NO: 10452 - protein, 9 aa, BK virus
HRLAPIKKI

SEQ ID NO: 10453 - protein, 9 aa, BK virus
RLAPIKKII

SEQ ID NO: 10454 - protein, 9 aa, BK virus
LAPIKKIIT

SEQ ID NO: 10455 - protein, 9 aa, BK virus
GLLIFYYLS

SEQ ID NO: 10456 - protein, 9 aa, BK virus
LLIFYYLSK

SEQ ID NO: 10457 - protein, 9 aa, BK virus
LIFYYLSKY

SEQ ID NO: 10458 - protein, 9 aa, BK virus
IFYYLSKYK

SEQ ID NO: 10459 - protein, 9 aa, BK virus
FYYLSKYKL

SEQ ID NO: 10460 - protein, 9 aa, BK virus
YYLSKYKLV

SEQ ID NO: 10461 - protein, 9 aa, BK virus
YLSKYKLVT

SEQ ID NO: 10462 - protein, 9 aa, BK virus
LSKYKLVTL

SEQ ID NO: 10463 - protein, 9 aa, BK virus
SKYKLVTLK

SEQ ID NO: 10464 - protein, 9 aa, BK virus
KYKLVTLKL

SEQ ID NO: 10465 - protein, 9 aa, BK virus
ISEGSFSNY

SEQ ID NO: 10466 - protein, 9 aa, BK virus
SEGSFSNYL

SEQ ID NO: 10467 - protein, 9 aa, BK virus
EGSFSNYLD

SEQ ID NO: 10468 - protein, 9 aa, BK virus
GSFSNYLDP

SEQ ID NO: 10469 - protein, 9 aa, BK virus
SFSNYLDPP

SEQ ID NO: 10470 - protein, 9 aa, BK virus
FSNYLDPPL

SEQ ID NO: 10471 - protein, 9 aa, BK virus
SNYLDPPLQ

SEQ ID NO: 10472 - protein, 9 aa, BK virus
NYLDPPLQS

SEQ ID NO: 10473 - protein, 9 aa, BK virus
YLDPPLQSF

SEQ ID NO: 10474 - protein, 9 aa, BK virus
LDPPLQSFF

SEQ ID NO: 10475 - protein, 9 aa, BK virus
DPPLQSFFS

SEQ ID NO: 10476 - protein, 9 aa, BK virus
AKPLCEAVN

SEQ ID NO: 10477 - protein, 9 aa, BK virus
KPLCEAVNA

SEQ ID NO: 10478 - protein, 9 aa, BK virus
PLCEAVNAV

SEQ ID NO: 10479 - protein, 9 aa, BK virus
LCEAVNAVA

SEQ ID NO: 10480 - protein, 9 aa, BK virus
CEAVNAVAI

SEQ ID NO: 10481 - protein, 9 aa, BK virus
EAVNAVAIY

SEQ ID NO: 10482 - protein, 9 aa, BK virus
AVNAVAIYP

SEQ ID NO: 10483 - protein, 9 aa, BK virus
VNAVAIYPN

SEQ ID NO: 10484 - protein, 9 aa, BK virus
NAVAIYPNQ

SEQ ID NO: 10485 - protein, 9 aa, BK virus
AVAIYPNQG

SEQ ID NO: 10486 - protein, 9 aa, BK virus
VAIYPNQGL

SEQ ID NO: 10487 - protein, 9 aa, BK virus
AIYPNQGLF

SEQ ID NO: 10488 - protein, 9 aa, BK virus
IYPNQGLFS

SEQ ID NO: 10489 - protein, 9 aa, BK virus
HARAVHRRL

SEQ ID NO: 10490 - protein, 9 aa, BK virus
ARAVHRRLF

SEQ ID NO: 10491 - protein, 9 aa, BK virus
RAVHRRLFG

SEQ ID NO: 10492 - protein, 9 aa, BK virus
AVHRRLFGT

SEQ ID NO: 10493 - protein, 9 aa, BK virus
VHRRLFGTN

SEQ ID NO: 10494 - protein, 9 aa, BK virus
HRRLFGTNR

SEQ ID NO: 10495 - protein, 9 aa, BK virus
RRLFGTNRP

SEQ ID NO: 10496 - protein, 9 aa, BK virus
RLFGTNRPF

SEQ ID NO: 10497 - protein, 9 aa, BK virus
LFGTNRPFL

SEQ ID NO: 10498 - protein, 9 aa, BK virus
FGTNRPFLA

SEQ ID NO: 10499 - protein, 9 aa, BK virus
GTNRPFLAV

SEQ ID NO: 10500 - protein, 9 aa, BK virus
TNRPFLAVQ

SEQ ID NO: 10501 - protein, 9 aa, BK virus
NRPFLAVQG

SEQ ID NO: 10502 - protein, 9 aa, BK virus
RPFLAVQGI

SEQ ID NO: 10503 - protein, 9 aa, BK virus
PFLAVQGIW

SEQ ID NO: 10504 - protein, 9 aa, BK virus
FLAVQGIWA

SEQ ID NO: 10505 - protein, 9 aa, BK virus
LAVQGIWAK

SEQ ID NO: 10506 - protein, 9 aa, BK virus
AVQGIWAKR

SEQ ID NO: 10507 - protein, 9 aa, BK virus
VQGIWAKRK

SEQ ID NO: 10508 - protein, 9 aa, BK virus
QGIWAKRKI

SEQ ID NO: 10509 - protein, 9 aa, BK virus
GIWAKRKIS

SEQ ID NO: 10510 - protein, 9 aa, BK virus
IWAKRKIST

SEQ ID NO: 10511 - protein, 9 aa, BK virus
WAKRKISTN

SEQ ID NO: 10512 - protein, 9 aa, BK virus
AKRKISTNL

SEQ ID NO: 10513 - protein, 9 aa, BK virus
ATPGSKIRL

SEQ ID NO: 10514 - protein, 9 aa, BK virus
TPGSKIRLM

SEQ ID NO: 10515 - protein, 9 aa, BK virus
PGSKIRLMS

SEQ ID NO: 10516 - protein, 9 aa, BK virus
GSKIRLMSY

SEQ ID NO: 10517 - protein, 9 aa, BK virus
SKIRLMSYL

SEQ ID NO: 10518 - protein, 9 aa, BK virus
KIRLMSYLY

SEQ ID NO: 10519 - protein, 9 aa, BK virus
IRLMSYLYI

SEQ ID NO: 10520 - protein, 9 aa, BK virus
RLMSYLYIL

SEQ ID NO: 10521 - protein, 9 aa, BK virus
LMSYLYILL

SEQ ID NO: 10522 - protein, 9 aa, BK virus
MSYLYILLH

SEQ ID NO: 10523 - protein, 9 aa, BK virus
SYLYILLHF

SEQ ID NO: 10524 - protein, 9 aa, BK virus
YLYILLHFF

SEQ ID NO: 10525 - protein, 9 aa, BK virus
LYILLHFFI

SEQ ID NO: 10526 - protein, 9 aa, BK virus
YILLHFFIQ

SEQ ID NO: 10527 - protein, 9 aa, BK virus
ILLHFFIQS

SEQ ID NO: 10528 - protein, 9 aa, BK virus
LLHFFIQSI

SEQ ID NO: 10529 - protein, 9 aa, BK virus
LHFFIQSIH

SEQ ID NO: 10530 - protein, 9 aa, BK virus
HFFIQSIHS

SEQ ID NO: 10531 - protein, 9 aa, BK virus
FFIQSIHSL

SEQ ID NO: 10532 - protein, 9 aa, BK virus
FIQSIHSLH

SEQ ID NO: 10533 - protein, 9 aa, BK virus
IQSIHSLHF

SEQ ID NO: 10534 - protein, 9 aa, BK virus
QSIHSLHFI

SEQ ID NO: 10535 - protein, 9 aa, BK virus
SIHSLHFIL

SEQ ID NO: 10536 - protein, 9 aa, BK virus
IHSLHFILV

SEQ ID NO: 10537 - protein, 9 aa, BK virus
HSLHFILVA

SEQ ID NO: 10538 - protein, 9 aa, BK virus
SLHFILVAP

SEQ ID NO: 10539 - protein, 9 aa, BK virus
LHFILVAPF

SEQ ID NO: 10540 - protein, 9 aa, BK virus
HFILVAPFV

SEQ ID NO: 10541 - protein, 9 aa, BK virus
FILVAPFVR

SEQ ID NO: 10542 - protein, 9 aa, BK virus
ILVAPFVRV

SEQ ID NO: 10543 - protein, 9 aa, BK virus
LVAPFVRVK

SEQ ID NO: 10544 - protein, 9 aa, BK virus
VAPFVRVKF

SEQ ID NO: 10545 - protein, 9 aa, BK virus
APFVRVKFL

SEQ ID NO: 10546 - protein, 9 aa, BK virus
PFVRVKFLT

SEQ ID NO: 10547 - protein, 9 aa, BK virus
FVRVKFLTL

SEQ ID NO: 10548 - protein, 9 aa, BK virus
VRVKFLTLP

SEQ ID NO: 10549 - protein, 9 aa, BK virus
GKISPGSSF

SEQ ID NO: 10550 - protein, 9 aa, BK virus
KISPGSSFK

SEQ ID NO: 10551 - protein, 9 aa, BK virus
ISPGSSFKA

SEQ ID NO: 10552 - protein, 9 aa, BK virus
KVHELHGFF

SEQ ID NO: 10553 - protein, 9 aa, BK virus
VHELHGFFP

SEQ ID NO: 10554 - protein, 9 aa, BK virus
HELHGFFPV

SEQ ID NO: 10555 - protein, 9 aa, BK virus
ELHGFFPVK

SEQ ID NO: 10556 - protein, 9 aa, BK virus
LHGFFPVKN

SEQ ID NO: 10557 - protein, 9 aa, BK virus
HGFFPVKNF

SEQ ID NO: 10558 - protein, 9 aa, BK virus
GFFPVKNFI

SEQ ID NO: 10559 - protein, 9 aa, BK virus
FFPVKNFIH

SEQ ID NO: 10560 - protein, 10 aa, BK virus
LQKLQKNRDF

SEQ ID NO: 10561 - protein, 10 aa, BK virus
QKLQKNRDFP

SEQ ID NO: 10562 - protein, 10 aa, BK virus
KLQKNRDFPK

SEQ ID NO: 10563 - protein, 10 aa, BK virus
ASEKASTPLL

SEQ ID NO: 10564 - protein, 10 aa, BK virus
SEKASTPLLL

SEQ ID NO: 10565 - protein, 10 aa, BK virus
EKASTPLLLE

SEQ ID NO: 10566 - protein, 10 aa, BK virus
KASTPLLLER

SEQ ID NO: 10567 - protein, 10 aa, BK virus
ASTPLLLERK

SEQ ID NO: 10568 - protein, 10 aa, BK virus
STPLLLERKG

SEQ ID NO: 10569 - protein, 10 aa, BK virus
TPLLLERKGG

SEQ ID NO: 10570 - protein, 10 aa, BK virus
PLLLERKGGG

SEQ ID NO: 10571 - protein, 10 aa, BK virus
LLLERKGGGR

SEQ ID NO: 10572 - protein, 10 aa, BK virus
LLERKGGGRG

SEQ ID NO: 10573 - protein, 10 aa, BK virus
LERKGGGRGG

SEQ ID NO: 10574 - protein, 10 aa, BK virus
ERKGGGRGGL

SEQ ID NO: 10575 - protein, 10 aa, BK virus
RKGGGRGGLG

SEQ ID NO: 10576 - protein, 10 aa, BK virus
KGGGRGGLGL

SEQ ID NO: 10577 - protein, 10 aa, BK virus
GGGRGGLGLL

SEQ ID NO: 10578 - protein, 10 aa, BK virus
GGRGGLGLLY

SEQ ID NO: 10579 - protein, 10 aa, BK virus
GRGGLGLLYI

SEQ ID NO: 10580 - protein, 10 aa, BK virus
RGGLGLLYII

SEQ ID NO: 10581 - protein, 10 aa, BK virus
GGLGLLYIIK

SEQ ID NO: 10582 - protein, 10 aa, BK virus
GLGLLYIIKK

SEQ ID NO: 10583 - protein, 10 aa, BK virus
LGLLYIIKKK

SEQ ID NO: 10584 - protein, 10 aa, BK virus
GLLYIIKKKA

SEQ ID NO: 10585 - protein, 10 aa, BK virus
LLYIIKKKAT

SEQ ID NO: 10586 - protein, 10 aa, BK virus
LYIIKKKATG

SEQ ID NO: 10587 - protein, 10 aa, BK virus
YIIKKKATGR

SEQ ID NO: 10588 - protein, 10 aa, BK virus
IIKKKATGRS

SEQ ID NO: 10589 - protein, 10 aa, BK virus
IKKKATGRSC

SEQ ID NO: 10590 - protein, 10 aa, BK virus
KKKATGRSCL

SEQ ID NO: 10591 - protein, 10 aa, BK virus
KKATGRSCLP

SEQ ID NO: 10592 - protein, 10 aa, BK virus
KATGRSCLPM

SEQ ID NO: 10593 - protein, 10 aa, BK virus
ATGRSCLPME

SEQ ID NO: 10594 - protein, 10 aa, BK virus
TGRSCLPMEC

SEQ ID NO: 10595 - protein, 10 aa, BK virus
GRSCLPMECS

SEQ ID NO: 10596 - protein, 10 aa, BK virus
RSCLPMECSQ

SEQ ID NO: 10597 - protein, 10 aa, BK virus
SCLPMECSQT

SEQ ID NO: 10598 - protein, 10 aa, BK virus
CLPMECSQTM

SEQ ID NO: 10599 - protein, 10 aa, BK virus
LPMECSQTMT

SEQ ID NO: 10600 - protein, 10 aa, BK virus
PMECSQTMTS

SEQ ID NO: 10601 - protein, 10 aa, BK virus
MECSQTMTSG

SEQ ID NO: 10602 - protein, 10 aa, BK virus
ECSQTMTSGR

SEQ ID NO: 10603 - protein, 10 aa, BK virus
CSQTMTSGRK

SEQ ID NO: 10604 - protein, 10 aa, BK virus
SQTMTSGRKV

SEQ ID NO: 10605 - protein, 10 aa, BK virus
QTMTSGRKVH

SEQ ID NO: 10606 - protein, 10 aa, BK virus
TMTSGRKVHD

SEQ ID NO: 10607 - protein, 10 aa, BK virus
MTSGRKVHDS

SEQ ID NO: 10608 - protein, 10 aa, BK virus
TSGRKVHDSQ

SEQ ID NO: 10609 - protein, 10 aa, BK virus
SGRKVHDSQG

SEQ ID NO: 10610 - protein, 10 aa, BK virus
GRKVHDSQGN

SEQ ID NO: 10611 - protein, 10 aa, BK virus
RKVHDSQGNA

SEQ ID NO: 10612 - protein, 10 aa, BK virus
KVHDSQGNAA

SEQ ID NO: 10613 - protein, 10 aa, BK virus
VHDSQGNAAK

SEQ ID NO: 10614 - protein, 10 aa, BK virus
HDSQGNAAKP

SEQ ID NO: 10615 - protein, 10 aa, BK virus
PQEGKCMTHR

SEQ ID NO: 10616 - protein, 10 aa, BK virus
QEGKCMTHRE

SEQ ID NO: 10617 - protein, 10 aa, BK virus
EGKCMTHREE

SEQ ID NO: 10618 - protein, 10 aa, BK virus
GKCMTHREEL

SEQ ID NO: 10619 - protein, 10 aa, BK virus
KCMTHREELL

SEQ ID NO: 10620 - protein, 10 aa, BK virus
CMTHREELLT

SEQ ID NO: 10621 - protein, 10 aa, BK virus
MTHREELLTH

SEQ ID NO: 10622 - protein, 10 aa, BK virus
THREELLTHG

SEQ ID NO: 10623 - protein, 10 aa, BK virus
HREELLTHGM

SEQ ID NO: 10624 - protein, 10 aa, BK virus
REELLTHGMQ

SEQ ID NO: 10625 - protein, 10 aa, BK virus
EELLTHGMQP

SEQ ID NO: 10626 - protein, 10 aa, BK virus
ELLTHGMQPN

SEQ ID NO: 10627 - protein, 10 aa, BK virus
LLTHGMQPNH

SEQ ID NO: 10628 - protein, 10 aa, BK virus
LTHGMQPNHD

SEQ ID NO: 10629 - protein, 10 aa, BK virus
THGMQPNHDL

SEQ ID NO: 10630 - protein, 10 aa, BK virus
HGMQPNHDLR

SEQ ID NO: 10631 - protein, 10 aa, BK virus
GMQPNHDLRK

SEQ ID NO: 10632 - protein, 10 aa, BK virus
MQPNHDLRKE

SEQ ID NO: 10633 - protein, 10 aa, BK virus
QPNHDLRKES

SEQ ID NO: 10634 - protein, 10 aa, BK virus
PNHDLRKESA

SEQ ID NO: 10635 - protein, 10 aa, BK virus
QTCFASLGIL

SEQ ID NO: 10636 - protein, 10 aa, BK virus
TCFASLGILA

SEQ ID NO: 10637 - protein, 10 aa, BK virus
CFASLGILAL

SEQ ID NO: 10638 - protein, 10 aa, BK virus
FASLGILALS

SEQ ID NO: 10639 - protein, 10 aa, BK virus
ASLGILALSP

SEQ ID NO: 10640 - protein, 10 aa, BK virus
SLGILALSPV

SEQ ID NO: 10641 - protein, 10 aa, BK virus
LGILALSPVK

SEQ ID NO: 10642 - protein, 10 aa, BK virus
GILALSPVKL

SEQ ID NO: 10643 - protein, 10 aa, BK virus
ILALSPVKLD

SEQ ID NO: 10644 - protein, 10 aa, BK virus
LALSPVKLDK

SEQ ID NO: 10645 - protein, 10 aa, BK virus
ALSPVKLDKG

SEQ ID NO: 10646 - protein, 10 aa, BK virus
LSPVKLDKGH

SEQ ID NO: 10647 - protein, 10 aa, BK virus
SPVKLDKGHG

SEQ ID NO: 10648 - protein, 10 aa, BK virus
PVKLDKGHGS

SEQ ID NO: 10649 - protein, 10 aa, BK virus
VKLDKGHGSA

SEQ ID NO: 10650 - protein, 10 aa, BK virus
KLDKGHGSAP

SEQ ID NO: 10651 - protein, 10 aa, BK virus
LDKGHGSAPA

SEQ ID NO: 10652 - protein, 10 aa, BK virus
DKGHGSAPAV

SEQ ID NO: 10653 - protein, 10 aa, BK virus
KGHGSAPAVT

SEQ ID NO: 10654 - protein, 10 aa, BK virus
GHGSAPAVTT

SEQ ID NO: 10655 - protein, 10 aa, BK virus
HGSAPAVTTS

SEQ ID NO: 10656 - protein, 10 aa, BK virus
GSAPAVTTSF

SEQ ID NO: 10657 - protein, 10 aa, BK virus
SAPAVTTSFS

SEQ ID NO: 10658 - protein, 10 aa, BK virus
APAVTTSFSE

SEQ ID NO: 10659 - protein, 10 aa, BK virus
PAVTTSFSES

SEQ ID NO: 10660 - protein, 10 aa, BK virus
AVTTSFSESW

SEQ ID NO: 10661 - protein, 10 aa, BK virus
NLDWNKKKSS

SEQ ID NO: 10662 - protein, 10 aa, BK virus
LDWNKKKSSE

SEQ ID NO: 10663 - protein, 10 aa, BK virus
DWNKKKSSED

SEQ ID NO: 10664 - protein, 10 aa, BK virus
WNKKKSSEDF

SEQ ID NO: 10665 - protein, 10 aa, BK virus
NKKKSSEDFY

SEQ ID NO: 10666 - protein, 10 aa, BK virus
KKKSSEDFYF

SEQ ID NO: 10667 - protein, 10 aa, BK virus
KKSSEDFYFY

SEQ ID NO: 10668 - protein, 10 aa, BK virus
KSSEDFYFYF

SEQ ID NO: 10669 - protein, 10 aa, BK virus
SSEDFYFYFR

SEQ ID NO: 10670 - protein, 10 aa, BK virus
SEDFYFYFRA

SEQ ID NO: 10671 - protein, 10 aa, BK virus
EDFYFYFRAF

SEQ ID NO: 10672 - protein, 10 aa, BK virus
DFYFYFRAFA

SEQ ID NO: 10673 - protein, 10 aa, BK virus
FYFYFRAFAG

SEQ ID NO: 10674 - protein, 10 aa, BK virus
YFYFRAFAGI

SEQ ID NO: 10675 - protein, 10 aa, BK virus
FYFRAFAGIL

SEQ ID NO: 10676 - protein, 10 aa, BK virus
RQCRREKQKY

SEQ ID NO: 10677 - protein, 10 aa, BK virus
QCRREKQKYH

SEQ ID NO: 10678 - protein, 10 aa, BK virus
CRREKQKYHC

SEQ ID NO: 10679 - protein, 10 aa, BK virus
RREKQKYHCF

SEQ ID NO: 10680 - protein, 10 aa, BK virus
REKQKYHCFT

SEQ ID NO: 10681 - protein, 10 aa, BK virus
EKQKYHCFTC

SEQ ID NO: 10682 - protein, 10 aa, BK virus
KQKYHCFTCC

SEQ ID NO: 10683 - protein, 10 aa, BK virus
QKYHCFTCCK

SEQ ID NO: 10684 - protein, 10 aa, BK virus
KYHCFTCCKR

SEQ ID NO: 10685 - protein, 10 aa, BK virus
YHCFTCCKRL

SEQ ID NO: 10686 - protein, 10 aa, BK virus
HCFTCCKRLC

SEQ ID NO: 10687 - protein, 10 aa, BK virus
CFTCCKRLCK

SEQ ID NO: 10688 - protein, 10 aa, BK virus
FTCCKRLCKR

SEQ ID NO: 10689 - protein, 10 aa, BK virus
TCCKRLCKRL

SEQ ID NO: 10690 - protein, 10 aa, BK virus
CCKRLCKRLL

SEQ ID NO: 10691 - protein, 10 aa, BK virus
CKRLCKRLLG

SEQ ID NO: 10692 - protein, 10 aa, BK virus
KRLCKRLLGK

SEQ ID NO: 10693 - protein, 10 aa, BK virus
SLFFCISRFM

SEQ ID NO: 10694 - protein, 10 aa, BK virus
LFFCISRFMG

SEQ ID NO: 10695 - protein, 10 aa, BK virus
FFCISRFMGA

SEQ ID NO: 10696 - protein, 10 aa, BK virus
FCISRFMGAA

SEQ ID NO: 10697 - protein, 10 aa, BK virus
CISRFMGAAL

SEQ ID NO: 10698 - protein, 10 aa, BK virus
ISRFMGAALA

SEQ ID NO: 10699 - protein, 10 aa, BK virus
SRFMGAALAL

SEQ ID NO: 10700 - protein, 10 aa, BK virus
RFMGAALALL

SEQ ID NO: 10701 - protein, 10 aa, BK virus
FMGAALALLG

SEQ ID NO: 10702 - protein, 10 aa, BK virus
MGAALALLGD

SEQ ID NO: 10703 - protein, 10 aa, BK virus
GAALALLGDL

SEQ ID NO: 10704 - protein, 10 aa, BK virus
AALALLGDLV

SEQ ID NO: 10705 - protein, 10 aa, BK virus
ALALLGDLVA

SEQ ID NO: 10706 - protein, 10 aa, BK virus
LALLGDLVAS

SEQ ID NO: 10707 - protein, 10 aa, BK virus
ALLGDLVASV

SEQ ID NO: 10708 - protein, 10 aa, BK virus
LLGDLVASVS

SEQ ID NO: 10709 - protein, 10 aa, BK virus
LGDLVASVSE

SEQ ID NO: 10710 - protein, 10 aa, BK virus
GDLVASVSEA

SEQ ID NO: 10711 - protein, 10 aa, BK virus
DLVASVSEAA

SEQ ID NO: 10712 - protein, 10 aa, BK virus
LVASVSEAAA

SEQ ID NO: 10713 - protein, 10 aa, BK virus
VASVSEAAAA

SEQ ID NO: 10714 - protein, 10 aa, BK virus
ASVSEAAAAT

SEQ ID NO: 10715 - protein, 10 aa, BK virus
SVSEAAAATG

SEQ ID NO: 10716 - protein, 10 aa, BK virus
VSEAAAATGF

SEQ ID NO: 10717 - protein, 10 aa, BK virus
SEAAAATGFS

SEQ ID NO: 10718 - protein, 10 aa, BK virus
EAAAATGFSV

SEQ ID NO: 10719 - protein, 10 aa, BK virus
AAAATGFSVA

SEQ ID NO: 10720 - protein, 10 aa, BK virus
AAATGFSVAE

SEQ ID NO: 10721 - protein, 10 aa, BK virus
AATGFSVAEI

SEQ ID NO: 10722 - protein, 10 aa, BK virus
ATGFSVAEIA

SEQ ID NO: 10723 - protein, 10 aa, BK virus
TGFSVAEIAA

SEQ ID NO: 10724 - protein, 10 aa, BK virus
GFSVAEIAAG

SEQ ID NO: 10725 - protein, 10 aa, BK virus
FSVAEIAAGE

SEQ ID NO: 10726 - protein, 10 aa, BK virus
SVAEIAAGEA

SEQ ID NO: 10727 - protein, 10 aa, BK virus
VAEIAAGEAA

SEQ ID NO: 10728 - protein, 10 aa, BK virus
AEIAAGEAAA

SEQ ID NO: 10729 - protein, 10 aa, BK virus
EIAAGEAAAA

SEQ ID NO: 10730 - protein, 10 aa, BK virus
IAAGEAAAAI

SEQ ID NO: 10731 - protein, 10 aa, BK virus
AAGEAAAAIE

SEQ ID NO: 10732 - protein, 10 aa, BK virus
AGEAAAAIEV

SEQ ID NO: 10733 - protein, 10 aa, BK virus
GEAAAAIEVQ

SEQ ID NO: 10734 - protein, 10 aa, BK virus
EAAAAIEVQI

SEQ ID NO: 10735 - protein, 10 aa, BK virus
AAAAIEVQIA

SEQ ID NO: 10736 - protein, 10 aa, BK virus
AAAIEVQIAS

SEQ ID NO: 10737 - protein, 10 aa, BK virus
AAIEVQIASL

SEQ ID NO: 10738 - protein, 10 aa, BK virus
AIEVQIASLA

SEQ ID NO: 10739 - protein, 10 aa, BK virus
IEVQIASLAT

SEQ ID NO: 10740 - protein, 10 aa, BK virus
EVQIASLATV

SEQ ID NO: 10741 - protein, 10 aa, BK virus
VQIASLATVE

SEQ ID NO: 10742 - protein, 10 aa, BK virus
QIASLATVEG

SEQ ID NO: 10743 - protein, 10 aa, BK virus
IASLATVEGI

SEQ ID NO: 10744 - protein, 10 aa, BK virus
ASLATVEGIT

SEQ ID NO: 10745 - protein, 10 aa, BK virus
SLATVEGITS

SEQ ID NO: 10746 - protein, 10 aa, BK virus
LATVEGITST

SEQ ID NO: 10747 - protein, 10 aa, BK virus
ATVEGITSTS

SEQ ID NO: 10748 - protein, 10 aa, BK virus
TVEGITSTSE

SEQ ID NO: 10749 - protein, 10 aa, BK virus
VEGITSTSEA

SEQ ID NO: 10750 - protein, 10 aa, BK virus
EGITSTSEAI

SEQ ID NO: 10751 - protein, 10 aa, BK virus
GITSTSEAIA

SEQ ID NO: 10752 - protein, 10 aa, BK virus
ITSTSEAIAA

SEQ ID NO: 10753 - protein, 10 aa, BK virus
TSTSEAIAAI

SEQ ID NO: 10754 - protein, 10 aa, BK virus
STSEAIAAIG

SEQ ID NO: 10755 - protein, 10 aa, BK virus
TSEAIAAIGL

SEQ ID NO: 10756 - protein, 10 aa, BK virus
SEAIAAIGLT

SEQ ID NO: 10757 - protein, 10 aa, BK virus
EAIAAIGLTP

SEQ ID NO: 10758 - protein, 10 aa, BK virus
AIAAIGLTPQ

SEQ ID NO: 10759 - protein, 10 aa, BK virus
IAAIGLTPQT

SEQ ID NO: 10760 - protein, 10 aa, BK virus
AAIGLTPQTY

SEQ ID NO: 10761 - protein, 10 aa, BK virus
AIGLTPQTYA

SEQ ID NO: 10762 - protein, 10 aa, BK virus
IGLTPQTYAV

SEQ ID NO: 10763 - protein, 10 aa, BK virus
GLTPQTYAVI

SEQ ID NO: 10764 - protein, 10 aa, BK virus
LTPQTYAVIA

SEQ ID NO: 10765 - protein, 10 aa, BK virus
TPQTYAVIAG

SEQ ID NO: 10766 - protein, 10 aa, BK virus
PQTYAVIAGA

SEQ ID NO: 10767 - protein, 10 aa, BK virus
QTYAVIAGAP

SEQ ID NO: 10768 - protein, 10 aa, BK virus
TYAVIAGAPG

SEQ ID NO: 10769 - protein, 10 aa, BK virus
YAVIAGAPGA

SEQ ID NO: 10770 - protein, 10 aa, BK virus
AVIAGAPGAI

SEQ ID NO: 10771 - protein, 10 aa, BK virus
VIAGAPGAIA

SEQ ID NO: 10772 - protein, 10 aa, BK virus
IAGAPGAIAG

SEQ ID NO: 10773 - protein, 10 aa, BK virus
AGAPGAIAGF

SEQ ID NO: 10774 - protein, 10 aa, BK virus
GAPGAIAGFA

SEQ ID NO: 10775 - protein, 10 aa, BK virus
APGAIAGFAA

SEQ ID NO: 10776 - protein, 10 aa, BK virus
PGAIAGFAAL

SEQ ID NO: 10777 - protein, 10 aa, BK virus
GAIAGFAALI

SEQ ID NO: 10778 - protein, 10 aa, BK virus
AIAGFAALIQ

SEQ ID NO: 10779 - protein, 10 aa, BK virus
IAGFAALIQT

SEQ ID NO: 10780 - protein, 10 aa, BK virus
AGFAALIQTV

SEQ ID NO: 10781 - protein, 10 aa, BK virus
GFAALIQTVS

SEQ ID NO: 10782 - protein, 10 aa, BK virus
FAALIQTVSG

SEQ ID NO: 10783 - protein, 10 aa, BK virus
AALIQTVSGI

SEQ ID NO: 10784 - protein, 10 aa, BK virus
ALIQTVSGIS

SEQ ID NO: 10785 - protein, 10 aa, BK virus
LIQTVSGISS

SEQ ID NO: 10786 - protein, 10 aa, BK virus
IQTVSGISSL

SEQ ID NO: 10787 - protein, 10 aa, BK virus
QTVSGISSLA

SEQ ID NO: 10788 - protein, 10 aa, BK virus
TVSGISSLAQ

SEQ ID NO: 10789 - protein, 10 aa, BK virus
VSGISSLAQV

SEQ ID NO: 10790 - protein, 10 aa, BK virus
SGISSLAQVG

SEQ ID NO: 10791 - protein, 10 aa, BK virus
GISSLAQVGY

SEQ ID NO: 10792 - protein, 10 aa, BK virus
ISSLAQVGYK

SEQ ID NO: 10793 - protein, 10 aa, BK virus
SSLAQVGYKF

SEQ ID NO: 10794 - protein, 10 aa, BK virus
SLAQVGYKFF

SEQ ID NO: 10795 - protein, 10 aa, BK virus
LAQVGYKFFD

SEQ ID NO: 10796 - protein, 10 aa, BK virus
AQVGYKFFDD

SEQ ID NO: 10797 - protein, 10 aa, BK virus
QVGYKFFDDW

SEQ ID NO: 10798 - protein, 10 aa, BK virus
VGYKFFDDWD

SEQ ID NO: 10799 - protein, 10 aa, BK virus
GYKFFDDWDH

SEQ ID NO: 10800 - protein, 10 aa, BK virus
YKFFDDWDHK

SEQ ID NO: 10801 - protein, 10 aa, BK virus
KFFDDWDHKV

SEQ ID NO: 10802 - protein, 10 aa, BK virus
FFDDWDHKVS

SEQ ID NO: 10803 - protein, 10 aa, BK virus
FDDWDHKVST

SEQ ID NO: 10804 - protein, 10 aa, BK virus
DDWDHKVSTV

SEQ ID NO: 10805 - protein, 10 aa, BK virus
DWDHKVSTVG

SEQ ID NO: 10806 - protein, 10 aa, BK virus
WDHKVSTVGL

SEQ ID NO: 10807 - protein, 10 aa, BK virus
DHKVSTVGLY

SEQ ID NO: 10808 - protein, 10 aa, BK virus
HKVSTVGLYQ

SEQ ID NO: 10809 - protein, 10 aa, BK virus
KVSTVGLYQQ

SEQ ID NO: 10810 - protein, 10 aa, BK virus
VSTVGLYQQS

SEQ ID NO: 10811 - protein, 10 aa, BK virus
STVGLYQQSG

SEQ ID NO: 10812 - protein, 10 aa, BK virus
TVGLYQQSGM

SEQ ID NO: 10813 - protein, 10 aa, BK virus
VGLYQQSGMA

SEQ ID NO: 10814 - protein, 10 aa, BK virus
GLYQQSGMAL

SEQ ID NO: 10815 - protein, 10 aa, BK virus
LYQQSGMALE

SEQ ID NO: 10816 - protein, 10 aa, BK virus
YQQSGMALEL

SEQ ID NO: 10817 - protein, 10 aa, BK virus
QQSGMALELF

SEQ ID NO: 10818 - protein, 10 aa, BK virus
QSGMALELFN

SEQ ID NO: 10819 - protein, 10 aa, BK virus
SGMALELFNP

SEQ ID NO: 10820 - protein, 10 aa, BK virus
GMALELFNPD

SEQ ID NO: 10821 - protein, 10 aa, BK virus
MALELFNPDE

SEQ ID NO: 10822 - protein, 10 aa, BK virus
ALELFNPDEY

SEQ ID NO: 10823 - protein, 10 aa, BK virus
LELFNPDEYY

SEQ ID NO: 10824 - protein, 10 aa, BK virus
ELFNPDEYYD

SEQ ID NO: 10825 - protein, 10 aa, BK virus
LFNPDEYYDI

SEQ ID NO: 10826 - protein, 10 aa, BK virus
FNPDEYYDIL

SEQ ID NO: 10827 - protein, 10 aa, BK virus
NPDEYYDILF

SEQ ID NO: 10828 - protein, 10 aa, BK virus
PDEYYDILFP

SEQ ID NO: 10829 - protein, 10 aa, BK virus
DEYYDILFPG

SEQ ID NO: 10830 - protein, 10 aa, BK virus
EYYDILFPGV

SEQ ID NO: 10831 - protein, 10 aa, BK virus
YYDILFPGVN

SEQ ID NO: 10832 - protein, 10 aa, BK virus
YDILFPGVNT

SEQ ID NO: 10833 - protein, 10 aa, BK virus
DILFPGVNTF

SEQ ID NO: 10834 - protein, 10 aa, BK virus
ILFPGVNTFV

SEQ ID NO: 10835 - protein, 10 aa, BK virus
LFPGVNTFVN

SEQ ID NO: 10836 - protein, 10 aa, BK virus
FPGVNTFVNN

SEQ ID NO: 10837 - protein, 10 aa, BK virus
PGVNTFVNNI

SEQ ID NO: 10838 - protein, 10 aa, BK virus
GVNTFVNNIQ

SEQ ID NO: 10839 - protein, 10 aa, BK virus
VNTFVNNIQY

SEQ ID NO: 10840 - protein, 10 aa, BK virus
NTFVNNIQYL

SEQ ID NO: 10841 - protein, 10 aa, BK virus
TFVNNIQYLD

SEQ ID NO: 10842 - protein, 10 aa, BK virus
FVNNIQYLDP

SEQ ID NO: 10843 - protein, 10 aa, BK virus
VNNIQYLDPR

SEQ ID NO: 10844 - protein, 10 aa, BK virus
NNIQYLDPRH

SEQ ID NO: 10845 - protein, 10 aa, BK virus
NIQYLDPRHW

SEQ ID NO: 10846 - protein, 10 aa, BK virus
IQYLDPRHWG

SEQ ID NO: 10847 - protein, 10 aa, BK virus
QYLDPRHWGP

SEQ ID NO: 10848 - protein, 10 aa, BK virus
YLDPRHWGPS

SEQ ID NO: 10849 - protein, 10 aa, BK virus
LDPRHWGPSL

SEQ ID NO: 10850 - protein, 10 aa, BK virus
DPRHWGPSLF

SEQ ID NO: 10851 - protein, 10 aa, BK virus
PRHWGPSLFA

SEQ ID NO: 10852 - protein, 10 aa, BK virus
RHWGPSLFAT

SEQ ID NO: 10853 - protein, 10 aa, BK virus
HWGPSLFATI

SEQ ID NO: 10854 - protein, 10 aa, BK virus
WGPSLFATIS

SEQ ID NO: 10855 - protein, 10 aa, BK virus
GPSLFATISQ

SEQ ID NO: 10856 - protein, 10 aa, BK virus
PSLFATISQA

SEQ ID NO: 10857 - protein, 10 aa, BK virus
SLFATISQAL

SEQ ID NO: 10858 - protein, 10 aa, BK virus
LFATISQALW

SEQ ID NO: 10859 - protein, 10 aa, BK virus
FATISQALWH

SEQ ID NO: 10860 - protein, 10 aa, BK virus
ATISQALWHV

SEQ ID NO: 10861 - protein, 10 aa, BK virus
TISQALWHVI

SEQ ID NO: 10862 - protein, 10 aa, BK virus
ISQALWHVIR

SEQ ID NO: 10863 - protein, 10 aa, BK virus
SQALWHVIRD

SEQ ID NO: 10864 - protein, 10 aa, BK virus
QALWHVIRDD

SEQ ID NO: 10865 - protein, 10 aa, BK virus
ALWHVIRDDI

SEQ ID NO: 10866 - protein, 10 aa, BK virus
LWHVIRDDIP

SEQ ID NO: 10867 - protein, 10 aa, BK virus
WHVIRDDIPS

SEQ ID NO: 10868 - protein, 10 aa, BK virus
HVIRDDIPSI

SEQ ID NO: 10869 - protein, 10 aa, BK virus
VIRDDIPSIT

SEQ ID NO: 10870 - protein, 10 aa, BK virus
IRDDIPSITS

SEQ ID NO: 10871 - protein, 10 aa, BK virus
RDDIPSITSQ

SEQ ID NO: 10872 - protein, 10 aa, BK virus
DDIPSITSQE

SEQ ID NO: 10873 - protein, 10 aa, BK virus
DIPSITSQEL

SEQ ID NO: 10874 - protein, 10 aa, BK virus
IPSITSQELQ

SEQ ID NO: 10875 - protein, 10 aa, BK virus
PSITSQELQR

SEQ ID NO: 10876 - protein, 10 aa, BK virus
SITSQELQRR

SEQ ID NO: 10877 - protein, 10 aa, BK virus
ITSQELQRRT

SEQ ID NO: 10878 - protein, 10 aa, BK virus
TSQELQRRTE

SEQ ID NO: 10879 - protein, 10 aa, BK virus
SQELQRRTER

SEQ ID NO: 10880 - protein, 10 aa, BK virus
QELQRRTERF

SEQ ID NO: 10881 - protein, 10 aa, BK virus
ELQRRTERFF

SEQ ID NO: 10882 - protein, 10 aa, BK virus
LQRRTERFFR

SEQ ID NO: 10883 - protein, 10 aa, BK virus
QRRTERFFRD

SEQ ID NO: 10884 - protein, 10 aa, BK virus
RRTERFFRDS

SEQ ID NO: 10885 - protein, 10 aa, BK virus
RTERFFRDSL

SEQ ID NO: 10886 - protein, 10 aa, BK virus
TERFFRDSLA

SEQ ID NO: 10887 - protein, 10 aa, BK virus
ERFFRDSLAR

SEQ ID NO: 10888 - protein, 10 aa, BK virus
RFFRDSLARF

SEQ ID NO: 10889 - protein, 10 aa, BK virus
FFRDSLARFL

SEQ ID NO: 10890 - protein, 10 aa, BK virus
FRDSLARFLE

SEQ ID NO: 10891 - protein, 10 aa, BK virus
RDSLARFLEE

SEQ ID NO: 10892 - protein, 10 aa, BK virus
DSLARFLEET

SEQ ID NO: 10893 - protein, 10 aa, BK virus
SLARFLEETT

SEQ ID NO: 10894 - protein, 10 aa, BK virus
LARFLEETTW

SEQ ID NO: 10895 - protein, 10 aa, BK virus
ARFLEETTWT

SEQ ID NO: 10896 - protein, 10 aa, BK virus
RFLEETTWTI

SEQ ID NO: 10897 - protein, 10 aa, BK virus
FLEETTWTIV

SEQ ID NO: 10898 - protein, 10 aa, BK virus
LEETTWTIVN

SEQ ID NO: 10899 - protein, 10 aa, BK virus
EETTWTIVNA

SEQ ID NO: 10900 - protein, 10 aa, BK virus
ETTWTIVNAP

SEQ ID NO: 10901 - protein, 10 aa, BK virus
TTWTIVNAPI

SEQ ID NO: 10902 - protein, 10 aa, BK virus
TWTIVNAPIN

SEQ ID NO: 10903 - protein, 10 aa, BK virus
WTIVNAPINF

SEQ ID NO: 10904 - protein, 10 aa, BK virus
TIVNAPINFY

SEQ ID NO: 10905 - protein, 10 aa, BK virus
IVNAPINFYN

SEQ ID NO: 10906 - protein, 10 aa, BK virus
VNAPINFYNY

SEQ ID NO: 10907 - protein, 10 aa, BK virus
NAPINFYNYI

SEQ ID NO: 10908 - protein, 10 aa, BK virus
APINFYNYIQ

SEQ ID NO: 10909 - protein, 10 aa, BK virus
PINFYNYIQQ

SEQ ID NO: 10910 - protein, 10 aa, BK virus
INFYNYIQQY

SEQ ID NO: 10911 - protein, 10 aa, BK virus
NFYNYIQQYY

SEQ ID NO: 10912 - protein, 10 aa, BK virus
FYNYIQQYYS

SEQ ID NO: 10913 - protein, 10 aa, BK virus
YNYIQQYYSD

SEQ ID NO: 10914 - protein, 10 aa, BK virus
NYIQQYYSDL

SEQ ID NO: 10915 - protein, 10 aa, BK virus
YIQQYYSDLS

SEQ ID NO: 10916 - protein, 10 aa, BK virus
IQQYYSDLSP

SEQ ID NO: 10917 - protein, 10 aa, BK virus
QQYYSDLSPI

SEQ ID NO: 10918 - protein, 10 aa, BK virus
QYYSDLSPIR

SEQ ID NO: 10919 - protein, 10 aa, BK virus
YYSDLSPIRP

SEQ ID NO: 10920 - protein, 10 aa, BK virus
YSDLSPIRPS

SEQ ID NO: 10921 - protein, 10 aa, BK virus
SDLSPIRPSM

SEQ ID NO: 10922 - protein, 10 aa, BK virus
DLSPIRPSMV

SEQ ID NO: 10923 - protein, 10 aa, BK virus
LSPIRPSMVR

SEQ ID NO: 10924 - protein, 10 aa, BK virus
SPIRPSMVRQ

SEQ ID NO: 10925 - protein, 10 aa, BK virus
PIRPSMVRQV

SEQ ID NO: 10926 - protein, 10 aa, BK virus
IRPSMVRQVA

SEQ ID NO: 10927 - protein, 10 aa, BK virus
RPSMVRQVAE

SEQ ID NO: 10928 - protein, 10 aa, BK virus
PSMVRQVAER

SEQ ID NO: 10929 - protein, 10 aa, BK virus
SMVRQVAERE

SEQ ID NO: 10930 - protein, 10 aa, BK virus
MVRQVAEREG

SEQ ID NO: 10931 - protein, 10 aa, BK virus
VRQVAEREGT

SEQ ID NO: 10932 - protein, 10 aa, BK virus
RQVAEREGTR

SEQ ID NO: 10933 - protein, 10 aa, BK virus
QVAEREGTRV

SEQ ID NO: 10934 - protein, 10 aa, BK virus
VAEREGTRVH

SEQ ID NO: 10935 - protein, 10 aa, BK virus
AEREGTRVHF

SEQ ID NO: 10936 - protein, 10 aa, BK virus
EREGTRVHFG

SEQ ID NO: 10937 - protein, 10 aa, BK virus
REGTRVHFGH

SEQ ID NO: 10938 - protein, 10 aa, BK virus
EGTRVHFGHT

SEQ ID NO: 10939 - protein, 10 aa, BK virus
GTRVHFGHTY

SEQ ID NO: 10940 - protein, 10 aa, BK virus
TRVHFGHTYS

SEQ ID NO: 10941 - protein, 10 aa, BK virus
RVHFGHTYSI

SEQ ID NO: 10942 - protein, 10 aa, BK virus
VHFGHTYSID

SEQ ID NO: 10943 - protein, 10 aa, BK virus
HFGHTYSIDD

SEQ ID NO: 10944 - protein, 10 aa, BK virus
FGHTYSIDDA

SEQ ID NO: 10945 - protein, 10 aa, BK virus
GHTYSIDDAD

SEQ ID NO: 10946 - protein, 10 aa, BK virus
HTYSIDDADS

SEQ ID NO: 10947 - protein, 10 aa, BK virus
TYSIDDADSI

SEQ ID NO: 10948 - protein, 10 aa, BK virus
YSIDDADSIE

SEQ ID NO: 10949 - protein, 10 aa, BK virus
SIDDADSIEE

SEQ ID NO: 10950 - protein, 10 aa, BK virus
IDDADSIEEV

SEQ ID NO: 10951 - protein, 10 aa, BK virus
DDADSIEEVT

SEQ ID NO: 10952 - protein, 10 aa, BK virus
DADSIEEVTQ

SEQ ID NO: 10953 - protein, 10 aa, BK virus
ADSIEEVTQR

SEQ ID NO: 10954 - protein, 10 aa, BK virus
DSIEEVTQRM

SEQ ID NO: 10955 - protein, 10 aa, BK virus
SIEEVTQRMD

SEQ ID NO: 10956 - protein, 10 aa, BK virus
IEEVTQRMDL

SEQ ID NO: 10957 - protein, 10 aa, BK virus
EEVTQRMDLR

SEQ ID NO: 10958 - protein, 10 aa, BK virus
EVTQRMDLRN

SEQ ID NO: 10959 - protein, 10 aa, BK virus
VTQRMDLRNQ

SEQ ID NO: 10960 - protein, 10 aa, BK virus
TQRMDLRNQQ

SEQ ID NO: 10961 - protein, 10 aa, BK virus
QRMDLRNQQS

SEQ ID NO: 10962 - protein, 10 aa, BK virus
RMDLRNQQSV

SEQ ID NO: 10963 - protein, 10 aa, BK virus
MDLRNQQSVH

SEQ ID NO: 10964 - protein, 10 aa, BK virus
DLRNQQSVHS

SEQ ID NO: 10965 - protein, 10 aa, BK virus
LRNQQSVHSG

SEQ ID NO: 10966 - protein, 10 aa, BK virus
RNQQSVHSGE

SEQ ID NO: 10967 - protein, 10 aa, BK virus
NQQSVHSGEF

SEQ ID NO: 10968 - protein, 10 aa, BK virus
QQSVHSGEFI

SEQ ID NO: 10969 - protein, 10 aa, BK virus
QSVHSGEFIE

SEQ ID NO: 10970 - protein, 10 aa, BK virus
SVHSGEFIEK

SEQ ID NO: 10971 - protein, 10 aa, BK virus
VHSGEFIEKT

SEQ ID NO: 10972 - protein, 10 aa, BK virus
HSGEFIEKTI

SEQ ID NO: 10973 - protein, 10 aa, BK virus
SGEFIEKTIA

SEQ ID NO: 10974 - protein, 10 aa, BK virus
GEFIEKTIAP

SEQ ID NO: 10975 - protein, 10 aa, BK virus
EFIEKTIAPG

SEQ ID NO: 10976 - protein, 10 aa, BK virus
FIEKTIAPGG

SEQ ID NO: 10977 - protein, 10 aa, BK virus
IEKTIAPGGA

SEQ ID NO: 10978 - protein, 10 aa, BK virus
EKTIAPGGAN

SEQ ID NO: 10979 - protein, 10 aa, BK virus
KTIAPGGANQ

SEQ ID NO: 10980 - protein, 10 aa, BK virus
TIAPGGANQR

SEQ ID NO: 10981 - protein, 10 aa, BK virus
IAPGGANQRT

SEQ ID NO: 10982 - protein, 10 aa, BK virus
APGGANQRTA

SEQ ID NO: 10983 - protein, 10 aa, BK virus
PGGANQRTAP

SEQ ID NO: 10984 - protein, 10 aa, BK virus
GGANQRTAPQ

SEQ ID NO: 10985 - protein, 10 aa, BK virus
GANQRTAPQW

SEQ ID NO: 10986 - protein, 10 aa, BK virus
ANQRTAPQWM

SEQ ID NO: 10987 - protein, 10 aa, BK virus
NQRTAPQWML

SEQ ID NO: 10988 - protein, 10 aa, BK virus
QRTAPQWMLP

SEQ ID NO: 10989 - protein, 10 aa, BK virus
RTAPQWMLPL

SEQ ID NO: 10990 - protein, 10 aa, BK virus
TAPQWMLPLL

SEQ ID NO: 10991 - protein, 10 aa, BK virus
APQWMLPLLL

SEQ ID NO: 10992 - protein, 10 aa, BK virus
PQWMLPLLLG

SEQ ID NO: 10993 - protein, 10 aa, BK virus
QWMLPLLLGL

SEQ ID NO: 10994 - protein, 10 aa, BK virus
WMLPLLLGLY

SEQ ID NO: 10995 - protein, 10 aa, BK virus
MLPLLLGLYG

SEQ ID NO: 10996 - protein, 10 aa, BK virus
LPLLLGLYGT

SEQ ID NO: 10997 - protein, 10 aa, BK virus
PLLLGLYGTV

SEQ ID NO: 10998 - protein, 10 aa, BK virus
LLLGLYGTVT

SEQ ID NO: 10999 - protein, 10 aa, BK virus
LLGLYGTVTP

SEQ ID NO: 11000 - protein, 10 aa, BK virus
LGLYGTVTPA

SEQ ID NO: 11001 - protein, 10 aa, BK virus
GLYGTVTPAL

SEQ ID NO: 11002 - protein, 10 aa, BK virus
LYGTVTPALE

SEQ ID NO: 11003 - protein, 10 aa, BK virus
YGTVTPALEA

SEQ ID NO: 11004 - protein, 10 aa, BK virus
GTVTPALEAY

SEQ ID NO: 11005 - protein, 10 aa, BK virus
TVTPALEAYE

SEQ ID NO: 11006 - protein, 10 aa, BK virus
VTPALEAYED

SEQ ID NO: 11007 - protein, 10 aa, BK virus
TPALEAYEDG

SEQ ID NO: 11008 - protein, 10 aa, BK virus
PALEAYEDGP

SEQ ID NO: 11009 - protein, 10 aa, BK virus
ALEAYEDGPN

SEQ ID NO: 11010 - protein, 10 aa, BK virus
LEAYEDGPNQ

SEQ ID NO: 11011 - protein, 10 aa, BK virus
EAYEDGPNQK

SEQ ID NO: 11012 - protein, 10 aa, BK virus
AYEDGPNQKK

SEQ ID NO: 11013 - protein, 10 aa, BK virus
YEDGPNQKKR

SEQ ID NO: 11014 - protein, 10 aa, BK virus
EDGPNQKKRR

SEQ ID NO: 11015 - protein, 10 aa, BK virus
DGPNQKKRRV

SEQ ID NO: 11016 - protein, 10 aa, BK virus
GPNQKKRRVS

SEQ ID NO: 11017 - protein, 10 aa, BK virus
PNQKKRRVSR

SEQ ID NO: 11018 - protein, 10 aa, BK virus
NQKKRRVSRG

SEQ ID NO: 11019 - protein, 10 aa, BK virus
QKKRRVSRGS

SEQ ID NO: 11020 - protein, 10 aa, BK virus
KKRRVSRGSS

SEQ ID NO: 11021 - protein, 10 aa, BK virus
KRRVSRGSSQ

SEQ ID NO: 11022 - protein, 10 aa, BK virus
RRVSRGSSQK

SEQ ID NO: 11023 - protein, 10 aa, BK virus
RVSRGSSQKA

SEQ ID NO: 11024 - protein, 10 aa, BK virus
VSRGSSQKAK

SEQ ID NO: 11025 - protein, 10 aa, BK virus
SRGSSQKAKG

SEQ ID NO: 11026 - protein, 10 aa, BK virus
RGSSQKAKGT

SEQ ID NO: 11027 - protein, 10 aa, BK virus
GSSQKAKGTR

SEQ ID NO: 11028 - protein, 10 aa, BK virus
SSQKAKGTRA

SEQ ID NO: 11029 - protein, 10 aa, BK virus
SQKAKGTRAS

SEQ ID NO: 11030 - protein, 10 aa, BK virus
QKAKGTRASA

SEQ ID NO: 11031 - protein, 10 aa, BK virus
KAKGTRASAK

SEQ ID NO: 11032 - protein, 10 aa, BK virus
AKGTRASAKT

SEQ ID NO: 11033 - protein, 10 aa, BK virus
KGTRASAKTT

SEQ ID NO: 11034 - protein, 10 aa, BK virus
GTRASAKTTN

SEQ ID NO: 11035 - protein, 10 aa, BK virus
TRASAKTTNK

SEQ ID NO: 11036 - protein, 10 aa, BK virus
RASAKTTNKR

SEQ ID NO: 11037 - protein, 10 aa, BK virus
ASAKTTNKRR

SEQ ID NO: 11038 - protein, 10 aa, BK virus
SAKTTNKRRS

SEQ ID NO: 11039 - protein, 10 aa, BK virus
AKTTNKRRSR

SEQ ID NO: 11040 - protein, 10 aa, BK virus
KTTNKRRSRS

SEQ ID NO: 11041 - protein, 10 aa, BK virus
TTNKRRSRSS

SEQ ID NO: 11042 - protein, 10 aa, BK virus
TNKRRSRSSR

SEQ ID NO: 11043 - protein, 10 aa, BK virus
NKRRSRSSRS

SEQ ID NO: 11044 - protein, 10 aa, BK virus
NWGRCYYRGR

SEQ ID NO: 11045 - protein, 10 aa, BK virus
WGRCYYRGRM

SEQ ID NO: 11046 - protein, 10 aa, BK virus
GRCYYRGRML

SEQ ID NO: 11047 - protein, 10 aa, BK virus
RCYYRGRMLP

SEQ ID NO: 11048 - protein, 10 aa, BK virus
CYYRGRMLPK

SEQ ID NO: 11049 - protein, 10 aa, BK virus
YYRGRMLPKP

SEQ ID NO: 11050 - protein, 10 aa, BK virus
YRGRMLPKPR

SEQ ID NO: 11051 - protein, 10 aa, BK virus
RGRMLPKPRN

SEQ ID NO: 11052 - protein, 10 aa, BK virus
GRMLPKPRNG

SEQ ID NO: 11053 - protein, 10 aa, BK virus
RMLPKPRNGG

SEQ ID NO: 11054 - protein, 10 aa, BK virus
MLPKPRNGGS

SEQ ID NO: 11055 - protein, 10 aa, BK virus
LPKPRNGGSR

SEQ ID NO: 11056 - protein, 10 aa, BK virus
PREKNASLLQ

SEQ ID NO: 11057 - protein, 10 aa, BK virus
REKNASLLQH

SEQ ID NO: 11058 - protein, 10 aa, BK virus
EKNASLLQHS

SEQ ID NO: 11059 - protein, 10 aa, BK virus
KNASLLQHSK

SEQ ID NO: 11060 - protein, 10 aa, BK virus
NASLLQHSKN

SEQ ID NO: 11061 - protein, 10 aa, BK virus
ASLLQHSKNS

SEQ ID NO: 11062 - protein, 10 aa, BK virus
SLLQHSKNSP

SEQ ID NO: 11063 - protein, 10 aa, BK virus
LLQHSKNSPP

SEQ ID NO: 11064 - protein, 10 aa, BK virus
LQHSKNSPPQ

SEQ ID NO: 11065 - protein, 10 aa, BK virus
QHSKNSPPQF

SEQ ID NO: 11066 - protein, 10 aa, BK virus
HSKNSPPQFK

SEQ ID NO: 11067 - protein, 10 aa, BK virus
GPNLWKSTDV

SEQ ID NO: 11068 - protein, 10 aa, BK virus
PNLWKSTDVG

SEQ ID NO: 11069 - protein, 10 aa, BK virus
NLWKSTDVGG

SEQ ID NO: 11070 - protein, 10 aa, BK virus
LWKSTDVGGC

SEQ ID NO: 11071 - protein, 10 aa, BK virus
WKSTDVGGCN

SEQ ID NO: 11072 - protein, 10 aa, BK virus
KSTDVGGCNC

SEQ ID NO: 11073 - protein, 10 aa, BK virus
STDVGGCNCT

SEQ ID NO: 11074 - protein, 10 aa, BK virus
TDVGGCNCTN

SEQ ID NO: 11075 - protein, 10 aa, BK virus
DVGGCNCTNR

SEQ ID NO: 11076 - protein, 10 aa, BK virus
VGGCNCTNRG

SEQ ID NO: 11077 - protein, 10 aa, BK virus
GGCNCTNRGY

SEQ ID NO: 11078 - protein, 10 aa, BK virus
GCNCTNRGYW

SEQ ID NO: 11079 - protein, 10 aa, BK virus
CNCTNRGYWN

SEQ ID NO: 11080 - protein, 10 aa, BK virus
NCTNRGYWNN

SEQ ID NO: 11081 - protein, 10 aa, BK virus
AWWRKTYSRQ

SEQ ID NO: 11082 - protein, 10 aa, BK virus
FPLLCCRWRT

SEQ ID NO: 11083 - protein, 10 aa, BK virus
PLLCCRWRTL

SEQ ID NO: 11084 - protein, 10 aa, BK virus
LLCCRWRTLG

SEQ ID NO: 11085 - protein, 10 aa, BK virus
LCCRWRTLGN

SEQ ID NO: 11086 - protein, 10 aa, BK virus
CCRWRTLGNA

SEQ ID NO: 11087 - protein, 10 aa, BK virus
CRWRTLGNAG

SEQ ID NO: 11088 - protein, 10 aa, BK virus
RWRTLGNAGS

SEQ ID NO: 11089 - protein, 10 aa, BK virus
WRTLGNAGSA

SEQ ID NO: 11090 - protein, 10 aa, BK virus
RTLGNAGSAN

SEQ ID NO: 11091 - protein, 10 aa, BK virus
TLGNAGSANE

SEQ ID NO: 11092 - protein, 10 aa, BK virus
LGNAGSANEL

SEQ ID NO: 11093 - protein, 10 aa, BK virus
GNAGSANELQ

SEQ ID NO: 11094 - protein, 10 aa, BK virus
NAGSANELQV

SEQ ID NO: 11095 - protein, 10 aa, BK virus
AGSANELQVK

SEQ ID NO: 11096 - protein, 10 aa, BK virus
GSANELQVKV

SEQ ID NO: 11097 - protein, 10 aa, BK virus
SANELQVKVP

SEQ ID NO: 11098 - protein, 10 aa, BK virus
KPNSPVPGNE

SEQ ID NO: 11099 - protein, 10 aa, BK virus
PNSPVPGNEY

SEQ ID NO: 11100 - protein, 10 aa, BK virus
GLFGQKQCLS

SEQ ID NO: 11101 - protein, 10 aa, BK virus
LFGQKQCLSS

SEQ ID NO: 11102 - protein, 10 aa, BK virus
VFWDFHRRGK

SEQ ID NO: 11103 - protein, 10 aa, BK virus
FWDFHRRGKC

SEQ ID NO: 11104 - protein, 10 aa, BK virus
WDFHRRGKCS

SEQ ID NO: 11105 - protein, 10 aa, BK virus
DFHRRGKCSP

SEQ ID NO: 11106 - protein, 10 aa, BK virus
FHRRGKCSPS

SEQ ID NO: 11107 - protein, 10 aa, BK virus
HRRGKCSPST

SEQ ID NO: 11108 - protein, 10 aa, BK virus
RRGKCSPSTS

SEQ ID NO: 11109 - protein, 10 aa, BK virus
RGKCSPSTSC

SEQ ID NO: 11110 - protein, 10 aa, BK virus
GKCSPSTSCD

SEQ ID NO: 11111 - protein, 10 aa, BK virus
KCSPSTSCDQ

SEQ ID NO: 11112 - protein, 10 aa, BK virus
CSPSTSCDQH

SEQ ID NO: 11113 - protein, 10 aa, BK virus
SPSTSCDQHS

SEQ ID NO: 11114 - protein, 10 aa, BK virus
PSTSCDQHSY

SEQ ID NO: 11115 - protein, 10 aa, BK virus
STSCDQHSYH

SEQ ID NO: 11116 - protein, 10 aa, BK virus
TSCDQHSYHS

SEQ ID NO: 11117 - protein, 10 aa, BK virus
SCDQHSYHSV

SEQ ID NO: 11118 - protein, 10 aa, BK virus
CDQHSYHSVA

SEQ ID NO: 11119 - protein, 10 aa, BK virus
DQHSYHSVAR

SEQ ID NO: 11120 - protein, 10 aa, BK virus
QLWNTTVERP

SEQ ID NO: 11121 - protein, 10 aa, BK virus
LWNTTVERPC

SEQ ID NO: 11122 - protein, 10 aa, BK virus
WNTTVERPCK

SEQ ID NO: 11123 - protein, 10 aa, BK virus
NTTVERPCKI

SEQ ID NO: 11124 - protein, 10 aa, BK virus
TTVERPCKIF

SEQ ID NO: 11125 - protein, 10 aa, BK virus
DPPEKKICKE

SEQ ID NO: 11126 - protein, 10 aa, BK virus
PPEKKICKES

SEQ ID NO: 11127 - protein, 10 aa, BK virus
PEKKICKESL

SEQ ID NO: 11128 - protein, 10 aa, BK virus
EKKICKESLP

SEQ ID NO: 11129 - protein, 10 aa, BK virus
KKICKESLPN

SEQ ID NO: 11130 - protein, 10 aa, BK virus
KICKESLPNF

SEQ ID NO: 11131 - protein, 10 aa, BK virus
ICKESLPNFL

SEQ ID NO: 11132 - protein, 10 aa, BK virus
CKESLPNFLF

SEQ ID NO: 11133 - protein, 10 aa, BK virus
KESLPNFLFA

SEQ ID NO: 11134 - protein, 10 aa, BK virus
ESLPNFLFAK

SEQ ID NO: 11135 - protein, 10 aa, BK virus
PYKQENPESG

SEQ ID NO: 11136 - protein, 10 aa, BK virus
YKQENPESGW

SEQ ID NO: 11137 - protein, 10 aa, BK virus
KQENPESGWA

SEQ ID NO: 11138 - protein, 10 aa, BK virus
QENPESGWAA

SEQ ID NO: 11139 - protein, 10 aa, BK virus
ENPESGWAAY

SEQ ID NO: 11140 - protein, 10 aa, BK virus
NPESGWAAYV

SEQ ID NO: 11141 - protein, 10 aa, BK virus
PESGWAAYVW

SEQ ID NO: 11142 - protein, 10 aa, BK virus
ESGWAAYVWY

SEQ ID NO: 11143 - protein, 10 aa, BK virus
SGWAAYVWYG

SEQ ID NO: 11144 - protein, 10 aa, BK virus
GWAAYVWYGI

SEQ ID NO: 11145 - protein, 10 aa, BK virus
WAAYVWYGIP

SEQ ID NO: 11146 - protein, 10 aa, BK virus
AAYVWYGIPG

SEQ ID NO: 11147 - protein, 10 aa, BK virus
AYVWYGIPGR

SEQ ID NO: 11148 - protein, 10 aa, BK virus
YVWYGIPGRR

SEQ ID NO: 11149 - protein, 10 aa, BK virus
VWYGIPGRRG

SEQ ID NO: 11150 - protein, 10 aa, BK virus
WHRKTSRGPR

SEQ ID NO: 11151 - protein, 10 aa, BK virus
HRKTSRGPRY

SEQ ID NO: 11152 - protein, 10 aa, BK virus
RKTSRGPRYD

SEQ ID NO: 11153 - protein, 10 aa, BK virus
KTSRGPRYDK

SEQ ID NO: 11154 - protein, 10 aa, BK virus
TSRGPRYDKI

SEQ ID NO: 11155 - protein, 10 aa, BK virus
SRGPRYDKIY

SEQ ID NO: 11156 - protein, 10 aa, BK virus
QTGTIANQNA

SEQ ID NO: 11157 - protein, 10 aa, BK virus
TGTIANQNAL

SEQ ID NO: 11158 - protein, 10 aa, BK virus
GTIANQNALN

SEQ ID NO: 11159 - protein, 10 aa, BK virus
TIANQNALNR

SEQ ID NO: 11160 - protein, 10 aa, BK virus
IANQNALNRC

SEQ ID NO: 11161 - protein, 10 aa, BK virus
ANQNALNRCF

SEQ ID NO: 11162 - protein, 10 aa, BK virus
NQNALNRCFY

SEQ ID NO: 11163 - protein, 10 aa, BK virus
QNALNRCFYC

SEQ ID NO: 11164 - protein, 10 aa, BK virus
NALNRCFYCT

SEQ ID NO: 11165 - protein, 10 aa, BK virus
ALNRCFYCTY

SEQ ID NO: 11166 - protein, 10 aa, BK virus
LNRCFYCTYT

SEQ ID NO: 11167 - protein, 10 aa, BK virus
NRCFYCTYTF

SEQ ID NO: 11168 - protein, 10 aa, BK virus
RCFYCTYTFN

SEQ ID NO: 11169 - protein, 10 aa, BK virus
CFYCTYTFNK

SEQ ID NO: 11170 - protein, 10 aa, BK virus
FYCTYTFNKC

SEQ ID NO: 11171 - protein, 10 aa, BK virus
YCTYTFNKCC

SEQ ID NO: 11172 - protein, 10 aa, BK virus
CTYTFNKCCF

SEQ ID NO: 11173 - protein, 10 aa, BK virus
TYTFNKCCFC

SEQ ID NO: 11174 - protein, 10 aa, BK virus
YTFNKCCFCI

SEQ ID NO: 11175 - protein, 10 aa, BK virus
TFNKCCFCIS

SEQ ID NO: 11176 - protein, 10 aa, BK virus
FNKCCFCISH

SEQ ID NO: 11177 - protein, 10 aa, BK virus
NKCCFCISHF

SEQ ID NO: 11178 - protein, 10 aa, BK virus
NTESLYTNAT

SEQ ID NO: 11179 - protein, 10 aa, BK virus
TESLYTNATL

SEQ ID NO: 11180 - protein, 10 aa, BK virus
ESLYTNATLD

SEQ ID NO: 11181 - protein, 10 aa, BK virus
SLYTNATLDY

SEQ ID NO: 11182 - protein, 10 aa, BK virus
LYTNATLDYG

SEQ ID NO: 11183 - protein, 10 aa, BK virus
YTNATLDYGG

SEQ ID NO: 11184 - protein, 10 aa, BK virus
TNATLDYGGL

SEQ ID NO: 11185 - protein, 10 aa, BK virus
NATLDYGGLT

SEQ ID NO: 11186 - protein, 10 aa, BK virus
ATLDYGGLTF

SEQ ID NO: 11187 - protein, 10 aa, BK virus
TLDYGGLTFG

SEQ ID NO: 11188 - protein, 10 aa, BK virus
LDYGGLTFGN

SEQ ID NO: 11189 - protein, 10 aa, BK virus
DYGGLTFGNL

SEQ ID NO: 11190 - protein, 10 aa, BK virus
YGGLTFGNLQ

SEQ ID NO: 11191 - protein, 10 aa, BK virus
GGLTFGNLQQ

SEQ ID NO: 11192 - protein, 10 aa, BK virus
GLTFGNLQQG

SEQ ID NO: 11193 - protein, 10 aa, BK virus
LTFGNLQQGL

SEQ ID NO: 11194 - protein, 10 aa, BK virus
TFGNLQQGLK

SEQ ID NO: 11195 - protein, 10 aa, BK virus
FGNLQQGLKY

SEQ ID NO: 11196 - protein, 10 aa, BK virus
GNLQQGLKYL

SEQ ID NO: 11197 - protein, 10 aa, BK virus
NLQQGLKYLR

SEQ ID NO: 11198 - protein, 10 aa, BK virus
LQQGLKYLRL

SEQ ID NO: 11199 - protein, 10 aa, BK virus
QQGLKYLRLG

SEQ ID NO: 11200 - protein, 10 aa, BK virus
QGLKYLRLGK

SEQ ID NO: 11201 - protein, 10 aa, BK virus
GLKYLRLGKS

SEQ ID NO: 11202 - protein, 10 aa, BK virus
LKYLRLGKSI

SEQ ID NO: 11203 - protein, 10 aa, BK virus
KYLRLGKSIV

SEQ ID NO: 11204 - protein, 10 aa, BK virus
YLRLGKSIVI

SEQ ID NO: 11205 - protein, 10 aa, BK virus
LRLGKSIVIG

SEQ ID NO: 11206 - protein, 10 aa, BK virus
RLGKSIVIGI

SEQ ID NO: 11207 - protein, 10 aa, BK virus
LGKSIVIGIQ

SEQ ID NO: 11208 - protein, 10 aa, BK virus
GKSIVIGIQC

SEQ ID NO: 11209 - protein, 10 aa, BK virus
KSIVIGIQCL

SEQ ID NO: 11210 - protein, 10 aa, BK virus
SIVIGIQCLI

SEQ ID NO: 11211 - protein, 10 aa, BK virus
IVIGIQCLIH

SEQ ID NO: 11212 - protein, 10 aa, BK virus
VIGIQCLIHV

SEQ ID NO: 11213 - protein, 10 aa, BK virus
IGIQCLIHVQ

SEQ ID NO: 11214 - protein, 10 aa, BK virus
GIQCLIHVQS

SEQ ID NO: 11215 - protein, 10 aa, BK virus
IQCLIHVQSL

SEQ ID NO: 11216 - protein, 10 aa, BK virus
QCLIHVQSLQ

SEQ ID NO: 11217 - protein, 10 aa, BK virus
CLIHVQSLQF

SEQ ID NO: 11218 - protein, 10 aa, BK virus
LIHVQSLQFL

SEQ ID NO: 11219 - protein, 10 aa, BK virus
IHVQSLQFLN

SEQ ID NO: 11220 - protein, 10 aa, BK virus
HVQSLQFLNP

SEQ ID NO: 11221 - protein, 10 aa, BK virus
VQSLQFLNPL

SEQ ID NO: 11222 - protein, 10 aa, BK virus
QSLQFLNPLL

SEQ ID NO: 11223 - protein, 10 aa, BK virus
SLQFLNPLLL

SEQ ID NO: 11224 - protein, 10 aa, BK virus
YQEYISPCIY

SEQ ID NO: 11225 - protein, 10 aa, BK virus
QEYISPCIYY

SEQ ID NO: 11226 - protein, 10 aa, BK virus
EYISPCIYYI

SEQ ID NO: 11227 - protein, 10 aa, BK virus
YISPCIYYIS

SEQ ID NO: 11228 - protein, 10 aa, BK virus
ISPCIYYISS

SEQ ID NO: 11229 - protein, 10 aa, BK virus
SPCIYYISSL

SEQ ID NO: 11230 - protein, 10 aa, BK virus
PCIYYISSLK

SEQ ID NO: 11231 - protein, 10 aa, BK virus
CIYYISSLKK

SEQ ID NO: 11232 - protein, 10 aa, BK virus
IYYISSLKKY

SEQ ID NO: 11233 - protein, 10 aa, BK virus
YYISSLKKYT

SEQ ID NO: 11234 - protein, 10 aa, BK virus
YISSLKKYTY

SEQ ID NO: 11235 - protein, 10 aa, BK virus
ISSLKKYTYL

SEQ ID NO: 11236 - protein, 10 aa, BK virus
SSLKKYTYLS

SEQ ID NO: 11237 - protein, 10 aa, BK virus
SLKKYTYLSQ

SEQ ID NO: 11238 - protein, 10 aa, BK virus
LKKYTYLSQN

SEQ ID NO: 11239 - protein, 10 aa, BK virus
KKYTYLSQNP

SEQ ID NO: 11240 - protein, 10 aa, BK virus
KYTYLSQNPA

SEQ ID NO: 11241 - protein, 10 aa, BK virus
YTYLSQNPAF

SEQ ID NO: 11242 - protein, 10 aa, BK virus
TYLSQNPAFP

SEQ ID NO: 11243 - protein, 10 aa, BK virus
YLSQNPAFPS

SEQ ID NO: 11244 - protein, 10 aa, BK virus
LSQNPAFPSI

SEQ ID NO: 11245 - protein, 10 aa, BK virus
SQNPAFPSIQ

SEQ ID NO: 11246 - protein, 10 aa, BK virus
QNPAFPSIQQ

SEQ ID NO: 11247 - protein, 10 aa, BK virus
NPAFPSIQQF

SEQ ID NO: 11248 - protein, 10 aa, BK virus
IVYQLQNQLQ

SEQ ID NO: 11249 - protein, 10 aa, BK virus
VYQLQNQLQA

SEQ ID NO: 11250 - protein, 10 aa, BK virus
TKLAVATRSF

SEQ ID NO: 11251 - protein, 10 aa, BK virus
KLAVATRSFH

SEQ ID NO: 11252 - protein, 10 aa, BK virus
LAVATRSFHF

SEQ ID NO: 11253 - protein, 10 aa, BK virus
AVATRSFHFV

SEQ ID NO: 11254 - protein, 10 aa, BK virus
VATRSFHFVK

SEQ ID NO: 11255 - protein, 10 aa, BK virus
ATRSFHFVKF

SEQ ID NO: 11256 - protein, 10 aa, BK virus
TRSFHFVKFF

SEQ ID NO: 11257 - protein, 10 aa, BK virus
RSFHFVKFFF

SEQ ID NO: 11258 - protein, 10 aa, BK virus
SFHFVKFFFQ

SEQ ID NO: 11259 - protein, 10 aa, BK virus
FHFVKFFFQV

SEQ ID NO: 11260 - protein, 10 aa, BK virus
HFVKFFFQVR

SEQ ID NO: 11261 - protein, 10 aa, BK virus
FVKFFFQVRT

SEQ ID NO: 11262 - protein, 10 aa, BK virus
VKFFFQVRTL

SEQ ID NO: 11263 - protein, 10 aa, BK virus
KFFFQVRTLS

SEQ ID NO: 11264 - protein, 10 aa, BK virus
FFFQVRTLSF

SEQ ID NO: 11265 - protein, 10 aa, BK virus
FFQVRTLSFV

SEQ ID NO: 11266 - protein, 10 aa, BK virus
FQVRTLSFVR

SEQ ID NO: 11267 - protein, 10 aa, BK virus
QVRTLSFVRI

SEQ ID NO: 11268 - protein, 10 aa, BK virus
VRTLSFVRIF

SEQ ID NO: 11269 - protein, 10 aa, BK virus
RTLSFVRIFL

SEQ ID NO: 11270 - protein, 10 aa, BK virus
TLSFVRIFLN

SEQ ID NO: 11271 - protein, 10 aa, BK virus
LSFVRIFLNI

SEQ ID NO: 11272 - protein, 10 aa, BK virus
SFVRIFLNIF

SEQ ID NO: 11273 - protein, 10 aa, BK virus
FVRIFLNIFW

SEQ ID NO: 11274 - protein, 10 aa, BK virus
VRIFLNIFWA

SEQ ID NO: 11275 - protein, 10 aa, BK virus
PSLVEIFGFF

SEQ ID NO: 11276 - protein, 10 aa, BK virus
SLVEIFGFFC

SEQ ID NO: 11277 - protein, 10 aa, BK virus
LVEIFGFFCL

SEQ ID NO: 11278 - protein, 10 aa, BK virus
VEIFGFFCLN

SEQ ID NO: 11279 - protein, 10 aa, BK virus
EIFGFFCLNV

SEQ ID NO: 11280 - protein, 10 aa, BK virus
IFGFFCLNVS

SEQ ID NO: 11281 - protein, 10 aa, BK virus
FGFFCLNVSF

SEQ ID NO: 11282 - protein, 10 aa, BK virus
GFFCLNVSFL

SEQ ID NO: 11283 - protein, 10 aa, BK virus
FFCLNVSFLN

SEQ ID NO: 11284 - protein, 10 aa, BK virus
FCLNVSFLNL

SEQ ID NO: 11285 - protein, 10 aa, BK virus
CLNVSFLNLP

SEQ ID NO: 11286 - protein, 10 aa, BK virus
HFHLNNLSNC

SEQ ID NO: 11287 - protein, 10 aa, BK virus
FHLNNLSNCL

SEQ ID NO: 11288 - protein, 10 aa, BK virus
HLNNLSNCLN

SEQ ID NO: 11289 - protein, 10 aa, BK virus
LNNLSNCLNC

SEQ ID NO: 11290 - protein, 10 aa, BK virus
NNLSNCLNCL

SEQ ID NO: 11291 - protein, 10 aa, BK virus
NLSNCLNCLF

SEQ ID NO: 11292 - protein, 10 aa, BK virus
LSNCLNCLFH

SEQ ID NO: 11293 - protein, 10 aa, BK virus
SNCLNCLFHV

SEQ ID NO: 11294 - protein, 10 aa, BK virus
NCLNCLFHVL

SEQ ID NO: 11295 - protein, 10 aa, BK virus
CLNCLFHVLK

SEQ ID NO: 11296 - protein, 10 aa, BK virus
LNCLFHVLKA

SEQ ID NO: 11297 - protein, 10 aa, BK virus
NCLFHVLKAN

SEQ ID NO: 11298 - protein, 10 aa, BK virus
CLFHVLKANP

SEQ ID NO: 11299 - protein, 10 aa, BK virus
LFHVLKANPL

SEQ ID NO: 11300 - protein, 10 aa, BK virus
FHVLKANPLI

SEQ ID NO: 11301 - protein, 10 aa, BK virus
HVLKANPLIQ

SEQ ID NO: 11302 - protein, 10 aa, BK virus
VLKANPLIQL

SEQ ID NO: 11303 - protein, 10 aa, BK virus
LKANPLIQLL

SEQ ID NO: 11304 - protein, 10 aa, BK virus
KANPLIQLLS

SEQ ID NO: 11305 - protein, 10 aa, BK virus
ANPLIQLLSL

SEQ ID NO: 11306 - protein, 10 aa, BK virus
NPLIQLLSLL

SEQ ID NO: 11307 - protein, 10 aa, BK virus
PLIQLLSLLH

SEQ ID NO: 11308 - protein, 10 aa, BK virus
LIQLLSLLHL

SEQ ID NO: 11309 - protein, 10 aa, BK virus
IQLLSLLHLQ

SEQ ID NO: 11310 - protein, 10 aa, BK virus
QLLSLLHLQK

SEQ ID NO: 11311 - protein, 10 aa, BK virus
LLSLLHLQKQ

SEQ ID NO: 11312 - protein, 10 aa, BK virus
LSLLHLQKQP

SEQ ID NO: 11313 - protein, 10 aa, BK virus
SLLHLQKQPC

SEQ ID NO: 11314 - protein, 10 aa, BK virus
LLHLQKQPCT

SEQ ID NO: 11315 - protein, 10 aa, BK virus
LHLQKQPCTD

SEQ ID NO: 11316 - protein, 10 aa, BK virus
HLQKQPCTDL

SEQ ID NO: 11317 - protein, 10 aa, BK virus
LHLAQRLAFP

SEQ ID NO: 11318 - protein, 10 aa, BK virus
HLAQRLAFPW

SEQ ID NO: 11319 - protein, 10 aa, BK virus
LAQRLAFPWV

SEQ ID NO: 11320 - protein, 10 aa, BK virus
AQRLAFPWVG

SEQ ID NO: 11321 - protein, 10 aa, BK virus
QRLAFPWVGL

SEQ ID NO: 11322 - protein, 10 aa, BK virus
RLAFPWVGLH

SEQ ID NO: 11323 - protein, 10 aa, BK virus
LAFPWVGLHL

SEQ ID NO: 11324 - protein, 10 aa, BK virus
AFPWVGLHLR

SEQ ID NO: 11325 - protein, 10 aa, BK virus
FPWVGLHLRL

SEQ ID NO: 11326 - protein, 10 aa, BK virus
PWVGLHLRLY

SEQ ID NO: 11327 - protein, 10 aa, BK virus
WVGLHLRLYH

SEQ ID NO: 11328 - protein, 10 aa, BK virus
VGLHLRLYHH

SEQ ID NO: 11329 - protein, 10 aa, BK virus
GLHLRLYHHT

SEQ ID NO: 11330 - protein, 10 aa, BK virus
LHLRLYHHTN

SEQ ID NO: 11331 - protein, 10 aa, BK virus
HLRLYHHTNL

SEQ ID NO: 11332 - protein, 10 aa, BK virus
LRLYHHTNLI

SEQ ID NO: 11333 - protein, 10 aa, BK virus
RLYHHTNLIT

SEQ ID NO: 11334 - protein, 10 aa, BK virus
LYHHTNLITL

SEQ ID NO: 11335 - protein, 10 aa, BK virus
YHHTNLITLQ

SEQ ID NO: 11336 - protein, 10 aa, BK virus
HHTNLITLQL

SEQ ID NO: 11337 - protein, 10 aa, BK virus
HTNLITLQLV

SEQ ID NO: 11338 - protein, 10 aa, BK virus
TNLITLQLVL

SEQ ID NO: 11339 - protein, 10 aa, BK virus
NLITLQLVLF

SEQ ID NO: 11340 - protein, 10 aa, BK virus
LITLQLVLFF

SEQ ID NO: 11341 - protein, 10 aa, BK virus
ITLQLVLFFH

SEQ ID NO: 11342 - protein, 10 aa, BK virus
TLQLVLFFHY

SEQ ID NO: 11343 - protein, 10 aa, BK virus
LQLVLFFHYQ

SEQ ID NO: 11344 - protein, 10 aa, BK virus
QLVLFFHYQW

SEQ ID NO: 11345 - protein, 10 aa, BK virus
LVLFFHYQWD

SEQ ID NO: 11346 - protein, 10 aa, BK virus
VLFFHYQWDL

SEQ ID NO: 11347 - protein, 10 aa, BK virus
KQYSAKNQIL

SEQ ID NO: 11348 - protein, 10 aa, BK virus
QYSAKNQILQ

SEQ ID NO: 11349 - protein, 10 aa, BK virus
YSAKNQILQN

SEQ ID NO: 11350 - protein, 10 aa, BK virus
SAKNQILQNP

SEQ ID NO: 11351 - protein, 10 aa, BK virus
AKNQILQNPF

SEQ ID NO: 11352 - protein, 10 aa, BK virus
VANSAAKQHL

SEQ ID NO: 11353 - protein, 10 aa, BK virus
ANSAAKQHLP

SEQ ID NO: 11354 - protein, 10 aa, BK virus
NSAAKQHLPY

SEQ ID NO: 11355 - protein, 10 aa, BK virus
SAAKQHLPYI

SEQ ID NO: 11356 - protein, 10 aa, BK virus
AAKQHLPYIV

SEQ ID NO: 11357 - protein, 10 aa, BK virus
AKQHLPYIVL

SEQ ID NO: 11358 - protein, 10 aa, BK virus
KQHLPYIVLV

SEQ ID NO: 11359 - protein, 10 aa, BK virus
QHLPYIVLVQ

SEQ ID NO: 11360 - protein, 10 aa, BK virus
HLPYIVLVQH

SEQ ID NO: 11361 - protein, 10 aa, BK virus
LPYIVLVQHF

SEQ ID NO: 11362 - protein, 10 aa, BK virus
PYIVLVQHFH

SEQ ID NO: 11363 - protein, 10 aa, BK virus
YIVLVQHFHE

SEQ ID NO: 11364 - protein, 10 aa, BK virus
IVLVQHFHEL

SEQ ID NO: 11365 - protein, 10 aa, BK virus
VLVQHFHELQ

SEQ ID NO: 11366 - protein, 10 aa, BK virus
LVQHFHELQI

SEQ ID NO: 11367 - protein, 10 aa, BK virus
VQHFHELQIL

SEQ ID NO: 11368 - protein, 10 aa, BK virus
QHFHELQILN

SEQ ID NO: 11369 - protein, 10 aa, BK virus
HFHELQILNP

SEQ ID NO: 11370 - protein, 10 aa, BK virus
FHELQILNPF

SEQ ID NO: 11371 - protein, 10 aa, BK virus
HELQILNPFY

SEQ ID NO: 11372 - protein, 10 aa, BK virus
ELQILNPFYL

SEQ ID NO: 11373 - protein, 10 aa, BK virus
LQILNPFYLI

SEQ ID NO: 11374 - protein, 10 aa, BK virus
QILNPFYLIY

SEQ ID NO: 11375 - protein, 10 aa, BK virus
ILNPFYLIYD

SEQ ID NO: 11376 - protein, 10 aa, BK virus
IFLLAFLPWS

SEQ ID NO: 11377 - protein, 10 aa, BK virus
FLLAFLPWSY

SEQ ID NO: 11378 - protein, 10 aa, BK virus
LLAFLPWSYE

SEQ ID NO: 11379 - protein, 10 aa, BK virus
LAFLPWSYEG

SEQ ID NO: 11380 - protein, 10 aa, BK virus
AFLPWSYEGY

SEQ ID NO: 11381 - protein, 10 aa, BK virus
FLPWSYEGYL

SEQ ID NO: 11382 - protein, 10 aa, BK virus
LPWSYEGYLL

SEQ ID NO: 11383 - protein, 10 aa, BK virus
PWSYEGYLLF

SEQ ID NO: 11384 - protein, 10 aa, BK virus
WSYEGYLLFF

SEQ ID NO: 11385 - protein, 10 aa, BK virus
LKLYLLLADK

SEQ ID NO: 11386 - protein, 10 aa, BK virus
KLYLLLADKY

SEQ ID NO: 11387 - protein, 10 aa, BK virus
LYLLLADKYF

SEQ ID NO: 11388 - protein, 10 aa, BK virus
YLLLADKYFF

SEQ ID NO: 11389 - protein, 10 aa, BK virus
LLLADKYFFD

SEQ ID NO: 11390 - protein, 10 aa, BK virus
LLADKYFFDF

SEQ ID NO: 11391 - protein, 10 aa, BK virus
LADKYFFDFY

SEQ ID NO: 11392 - protein, 10 aa, BK virus
ADKYFFDFYF

SEQ ID NO: 11393 - protein, 10 aa, BK virus
DKYFFDFYFL

SEQ ID NO: 11394 - protein, 10 aa, BK virus
KYFFDFYFLQ

SEQ ID NO: 11395 - protein, 10 aa, BK virus
YFFDFYFLQK

SEQ ID NO: 11396 - protein, 10 aa, BK virus
SDKAGLFSDT

SEQ ID NO: 11397 - protein, 10 aa, BK virus
DKAGLFSDTF

SEQ ID NO: 11398 - protein, 10 aa, BK virus
KAGLFSDTFY

SEQ ID NO: 11399 - protein, 10 aa, BK virus
AGLFSDTFYT

SEQ ID NO: 11400 - protein, 10 aa, BK virus
GLFSDTFYTP

SEQ ID NO: 11401 - protein, 10 aa, BK virus
LFSDTFYTPL

SEQ ID NO: 11402 - protein, 10 aa, BK virus
FSDTFYTPLH

SEQ ID NO: 11403 - protein, 10 aa, BK virus
SDTFYTPLHC

SEQ ID NO: 11404 - protein, 10 aa, BK virus
DTFYTPLHCI

SEQ ID NO: 11405 - protein, 10 aa, BK virus
TFYTPLHCIE

SEQ ID NO: 11406 - protein, 10 aa, BK virus
FYTPLHCIEI

SEQ ID NO: 11407 - protein, 10 aa, BK virus
YTPLHCIEIL

SEQ ID NO: 11408 - protein, 10 aa, BK virus
TPLHCIEILN

SEQ ID NO: 11409 - protein, 10 aa, BK virus
PLHCIEILNT

SEQ ID NO: 11410 - protein, 10 aa, BK virus
LHCIEILNTY

SEQ ID NO: 11411 - protein, 10 aa, BK virus
HCIEILNTYL

SEQ ID NO: 11412 - protein, 10 aa, BK virus
CIEILNTYLI

SEQ ID NO: 11413 - protein, 10 aa, BK virus
IEILNTYLII

SEQ ID NO: 11414 - protein, 10 aa, BK virus
EILNTYLIIK

SEQ ID NO: 11415 - protein, 10 aa, BK virus
ILNTYLIIKT

SEQ ID NO: 11416 - protein, 10 aa, BK virus
LNTYLIIKTH

SEQ ID NO: 11417 - protein, 10 aa, BK virus
NTYLIIKTHP

SEQ ID NO: 11418 - protein, 10 aa, BK virus
TYLIIKTHPH

SEQ ID NO: 11419 - protein, 10 aa, BK virus
YLIIKTHPHT

SEQ ID NO: 11420 - protein, 10 aa, BK virus
LIIKTHPHTL

SEQ ID NO: 11421 - protein, 10 aa, BK virus
IIKTHPHTLS

SEQ ID NO: 11422 - protein, 10 aa, BK virus
IKTHPHTLSL

SEQ ID NO: 11423 - protein, 10 aa, BK virus
KTHPHTLSLL

SEQ ID NO: 11424 - protein, 10 aa, BK virus
THPHTLSLLH

SEQ ID NO: 11425 - protein, 10 aa, BK virus
HPHTLSLLHT

SEQ ID NO: 11426 - protein, 10 aa, BK virus
PHTLSLLHTQ

SEQ ID NO: 11427 - protein, 10 aa, BK virus
LISKTPALFL

SEQ ID NO: 11428 - protein, 10 aa, BK virus
ISKTPALFLQ

SEQ ID NO: 11429 - protein, 10 aa, BK virus
SKTPALFLQA

SEQ ID NO: 11430 - protein, 10 aa, BK virus
KTPALFLQAL

SEQ ID NO: 11431 - protein, 10 aa, BK virus
TPALFLQALL

SEQ ID NO: 11432 - protein, 10 aa, BK virus
PALFLQALLG

SEQ ID NO: 11433 - protein, 10 aa, BK virus
NHAPLSPLEC

SEQ ID NO: 11434 - protein, 10 aa, BK virus
HAPLSPLECF

SEQ ID NO: 11435 - protein, 10 aa, BK virus
APLSPLECFL

SEQ ID NO: 11436 - protein, 10 aa, BK virus
PLSPLECFLL

SEQ ID NO: 11437 - protein, 10 aa, BK virus
LRHYIVSIPY

SEQ ID NO: 11438 - protein, 10 aa, BK virus
LQKLYVYVEL

SEQ ID NO: 11439 - protein, 10 aa, BK virus
QKLYVYVELK

SEQ ID NO: 11440 - protein, 10 aa, BK virus
KLYVYVELKR

SEQ ID NO: 11441 - protein, 10 aa, BK virus
LYVYVELKRI

SEQ ID NO: 11442 - protein, 10 aa, BK virus
VFYTEFELFL

SEQ ID NO: 11443 - protein, 10 aa, BK virus
YTQQSRQGFY

SEQ ID NO: 11444 - protein, 10 aa, BK virus
TQQSRQGFYY

SEQ ID NO: 11445 - protein, 10 aa, BK virus
ETGVDQRESL

SEQ ID NO: 11446 - protein, 10 aa, BK virus
GLLPFFFFWV

SEQ ID NO: 11447 - protein, 10 aa, BK virus
LLPFFFFWVV

SEQ ID NO: 11448 - protein, 10 aa, BK virus
LPFFFFWVVL

SEQ ID NO: 11449 - protein, 10 aa, BK virus
PFFFFWVVLS

SEQ ID NO: 11450 - protein, 10 aa, BK virus
FFFFWVVLSV

SEQ ID NO: 11451 - protein, 10 aa, BK virus
FFFWVVLSVE

SEQ ID NO: 11452 - protein, 10 aa, BK virus
FFWVVLSVEN

SEQ ID NO: 11453 - protein, 10 aa, BK virus
FWVVLSVENL

SEQ ID NO: 11454 - protein, 10 aa, BK virus
WVVLSVENLL

SEQ ID NO: 11455 - protein, 10 aa, BK virus
VVLSVENLLL

SEQ ID NO: 11456 - protein, 10 aa, BK virus
VLSVENLLLL

SEQ ID NO: 11457 - protein, 10 aa, BK virus
LSVENLLLLL

SEQ ID NO: 11458 - protein, 10 aa, BK virus
SVENLLLLLH

SEQ ID NO: 11459 - protein, 10 aa, BK virus
VENLLLLLHH

SEQ ID NO: 11460 - protein, 10 aa, BK virus
ENLLLLLHHW

SEQ ID NO: 11461 - protein, 10 aa, BK virus
NLLLLLHHWQ

SEQ ID NO: 11462 - protein, 10 aa, BK virus
LLLLLHHWQT

SEQ ID NO: 11463 - protein, 10 aa, BK virus
LLLLHHWQTY

SEQ ID NO: 11464 - protein, 10 aa, BK virus
LLLHHWQTYL

SEQ ID NO: 11465 - protein, 10 aa, BK virus
LLHHWQTYLH

SEQ ID NO: 11466 - protein, 10 aa, BK virus
LHHWQTYLHG

SEQ ID NO: 11467 - protein, 10 aa, BK virus
HHWQTYLHGK

SEQ ID NO: 11468 - protein, 10 aa, BK virus
HWQTYLHGKI

SEQ ID NO: 11469 - protein, 10 aa, BK virus
WQTYLHGKIN

SEQ ID NO: 11470 - protein, 10 aa, BK virus
QTYLHGKINL

SEQ ID NO: 11471 - protein, 10 aa, BK virus
TYLHGKINLH

SEQ ID NO: 11472 - protein, 10 aa, BK virus
YLHGKINLHP

SEQ ID NO: 11473 - protein, 10 aa, BK virus
LHGKINLHPI

SEQ ID NO: 11474 - protein, 10 aa, BK virus
HGKINLHPIF

SEQ ID NO: 11475 - protein, 10 aa, BK virus
GKINLHPIFH

SEQ ID NO: 11476 - protein, 10 aa, BK virus
RNSTRTPTLL

SEQ ID NO: 11477 - protein, 10 aa, BK virus
NSTRTPTLLF

SEQ ID NO: 11478 - protein, 10 aa, BK virus
STRTPTLLFH

SEQ ID NO: 11479 - protein, 10 aa, BK virus
TRTPTLLFHR

SEQ ID NO: 11480 - protein, 10 aa, BK virus
RTPTLLFHRL

SEQ ID NO: 11481 - protein, 10 aa, BK virus
TPTLLFHRLA

SEQ ID NO: 11482 - protein, 10 aa, BK virus
PTLLFHRLAP

SEQ ID NO: 11483 - protein, 10 aa, BK virus
TLLFHRLAPI

SEQ ID NO: 11484 - protein, 10 aa, BK virus
LLFHRLAPIK

SEQ ID NO: 11485 - protein, 10 aa, BK virus
LFHRLAPIKK

SEQ ID NO: 11486 - protein, 10 aa, BK virus
FHRLAPIKKI

SEQ ID NO: 11487 - protein, 10 aa, BK virus
HRLAPIKKII

SEQ ID NO: 11488 - protein, 10 aa, BK virus
RLAPIKKIIT

SEQ ID NO: 11489 - protein, 10 aa, BK virus
GLLIFYYLSK

SEQ ID NO: 11490 - protein, 10 aa, BK virus
LLIFYYLSKY

SEQ ID NO: 11491 - protein, 10 aa, BK virus
LIFYYLSKYK

SEQ ID NO: 11492 - protein, 10 aa, BK virus
IFYYLSKYKL

SEQ ID NO: 11493 - protein, 10 aa, BK virus
FYYLSKYKLV

SEQ ID NO: 11494 - protein, 10 aa, BK virus
YYLSKYKLVT

SEQ ID NO: 11495 - protein, 10 aa, BK virus
YLSKYKLVTL

SEQ ID NO: 11496 - protein, 10 aa, BK virus
LSKYKLVTLK

SEQ ID NO: 11497 - protein, 10 aa, BK virus
SKYKLVTLKL

SEQ ID NO: 11498 - protein, 10 aa, BK virus
ISEGSFSNYL

SEQ ID NO: 11499 - protein, 10 aa, BK virus
SEGSFSNYLD

SEQ ID NO: 11500 - protein, 10 aa, BK virus
EGSFSNYLDP

SEQ ID NO: 11501 - protein, 10 aa, BK virus
GSFSNYLDPP

SEQ ID NO: 11502 - protein, 10 aa, BK virus
SFSNYLDPPL

SEQ ID NO: 11503 - protein, 10 aa, BK virus
FSNYLDPPLQ

SEQ ID NO: 11504 - protein, 10 aa, BK virus
SNYLDPPLQS

SEQ ID NO: 11505 - protein, 10 aa, BK virus
NYLDPPLQSF

SEQ ID NO: 11506 - protein, 10 aa, BK virus
YLDPPLQSFF

SEQ ID NO: 11507 - protein, 10 aa, BK virus
LDPPLQSFFS

SEQ ID NO: 11508 - protein, 10 aa, BK virus
AKPLCEAVNA

SEQ ID NO: 11509 - protein, 10 aa, BK virus
KPLCEAVNAV

SEQ ID NO: 11510 - protein, 10 aa, BK virus
PLCEAVNAVA

SEQ ID NO: 11511 - protein, 10 aa, BK virus
LCEAVNAVAI

SEQ ID NO: 11512 - protein, 10 aa, BK virus
CEAVNAVAIY

SEQ ID NO: 11513 - protein, 10 aa, BK virus
EAVNAVAIYP

SEQ ID NO: 11514 - protein, 10 aa, BK virus
AVNAVAIYPN

SEQ ID NO: 11515 - protein, 10 aa, BK virus
VNAVAIYPNQ

SEQ ID NO: 11516 - protein, 10 aa, BK virus
NAVAIYPNQG

SEQ ID NO: 11517 - protein, 10 aa, BK virus
AVAIYPNQGL

SEQ ID NO: 11518 - protein, 10 aa, BK virus
VAIYPNQGLF

SEQ ID NO: 11519 - protein, 10 aa, BK virus
AIYPNQGLFS

SEQ ID NO: 11520 - protein, 10 aa, BK virus
HARAVHRRLF

SEQ ID NO: 11521 - protein, 10 aa, BK virus
ARAVHRRLFG

SEQ ID NO: 11522 - protein, 10 aa, BK virus
RAVHRRLFGT

SEQ ID NO: 11523 - protein, 10 aa, BK virus
AVHRRLFGTN

SEQ ID NO: 11524 - protein, 10 aa, BK virus
VHRRLFGTNR

SEQ ID NO: 11525 - protein, 10 aa, BK virus
HRRLFGTNRP

SEQ ID NO: 11526 - protein, 10 aa, BK virus
RRLFGTNRPF

SEQ ID NO: 11527 - protein, 10 aa, BK virus
RLFGTNRPFL

SEQ ID NO: 11528 - protein, 10 aa, BK virus
LFGTNRPFLA

SEQ ID NO: 11529 - protein, 10 aa, BK virus
FGTNRPFLAV

SEQ ID NO: 11530 - protein, 10 aa, BK virus
GTNRPFLAVQ

SEQ ID NO: 11531 - protein, 10 aa, BK virus
TNRPFLAVQG

SEQ ID NO: 11532 - protein, 10 aa, BK virus
NRPFLAVQGI

SEQ ID NO: 11533 - protein, 10 aa, BK virus
RPFLAVQGIW

SEQ ID NO: 11534 - protein, 10 aa, BK virus
PFLAVQGIWA

SEQ ID NO: 11535 - protein, 10 aa, BK virus
FLAVQGIWAK

SEQ ID NO: 11536 - protein, 10 aa, BK virus
LAVQGIWAKR

SEQ ID NO: 11537 - protein, 10 aa, BK virus
AVQGIWAKRK

SEQ ID NO: 11538 - protein, 10 aa, BK virus
VQGIWAKRKI

SEQ ID NO: 11539 - protein, 10 aa, BK virus
QGIWAKRKIS

SEQ ID NO: 11540 - protein, 10 aa, BK virus
GIWAKRKIST

SEQ ID NO: 11541 - protein, 10 aa, BK virus
IWAKRKISTN

SEQ ID NO: 11542 - protein, 10 aa, BK virus
WAKRKISTNL

SEQ ID NO: 11543 - protein, 10 aa, BK virus
ATPGSKIRLM

SEQ ID NO: 11544 - protein, 10 aa, BK virus
TPGSKIRLMS

SEQ ID NO: 11545 - protein, 10 aa, BK virus
PGSKIRLMSY

SEQ ID NO: 11546 - protein, 10 aa, BK virus
GSKIRLMSYL

SEQ ID NO: 11547 - protein, 10 aa, BK virus
SKIRLMSYLY

SEQ ID NO: 11548 - protein, 10 aa, BK virus
KIRLMSYLYI

SEQ ID NO: 11549 - protein, 10 aa, BK virus
IRLMSYLYIL

SEQ ID NO: 11550 - protein, 10 aa, BK virus
RLMSYLYILL

SEQ ID NO: 11551 - protein, 10 aa, BK virus
LMSYLYILLH

SEQ ID NO: 11552 - protein, 10 aa, BK virus
MSYLYILLHF

SEQ ID NO: 11553 - protein, 10 aa, BK virus
SYLYILLHFF

SEQ ID NO: 11554 - protein, 10 aa, BK virus
YLYILLHFFI

SEQ ID NO: 11555 - protein, 10 aa, BK virus
LYILLHFFIQ

SEQ ID NO: 11556 - protein, 10 aa, BK virus
YILLHFFIQS

SEQ ID NO: 11557 - protein, 10 aa, BK virus
ILLHFFIQSI

SEQ ID NO: 11558 - protein, 10 aa, BK virus
LLHFFIQSIH

SEQ ID NO: 11559 - protein, 10 aa, BK virus
LHFFIQSIHS

SEQ ID NO: 11560 - protein, 10 aa, BK virus
HFFIQSIHSL

SEQ ID NO: 11561 - protein, 10 aa, BK virus
FFIQSIHSLH

SEQ ID NO: 11562 - protein, 10 aa, BK virus
FIQSIHSLHF

SEQ ID NO: 11563 - protein, 10 aa, BK virus
IQSIHSLHFI

SEQ ID NO: 11564 - protein, 10 aa, BK virus
QSIHSLHFIL

SEQ ID NO: 11565 - protein, 10 aa, BK virus
SIHSLHFILV

SEQ ID NO: 11566 - protein, 10 aa, BK virus
IHSLHFILVA

SEQ ID NO: 11567 - protein, 10 aa, BK virus
HSLHFILVAP

SEQ ID NO: 11568 - protein, 10 aa, BK virus
SLHFILVAPF

SEQ ID NO: 11569 - protein, 10 aa, BK virus
LHFILVAPFV

SEQ ID NO: 11570 - protein, 10 aa, BK virus
HFILVAPFVR

SEQ ID NO: 11571 - protein, 10 aa, BK virus
FILVAPFVRV

SEQ ID NO: 11572 - protein, 10 aa, BK virus
ILVAPFVRVK

SEQ ID NO: 11573 - protein, 10 aa, BK virus
LVAPFVRVKF

SEQ ID NO: 11574 - protein, 10 aa, BK virus
VAPFVRVKFL

SEQ ID NO: 11575 - protein, 10 aa, BK virus
APFVRVKFLT

SEQ ID NO: 11576 - protein, 10 aa, BK virus
PFVRVKFLTL

SEQ ID NO: 11577 - protein, 10 aa, BK virus
FVRVKFLTLP

SEQ ID NO: 11578 - protein, 10 aa, BK virus
GKISPGSSFK

SEQ ID NO: 11579 - protein, 10 aa, BK virus
KISPGSSFKA

SEQ ID NO: 11580 - protein, 10 aa, BK virus
KVHELHGFFP

SEQ ID NO: 11581 - protein, 10 aa, BK virus
VHELHGFFPV

SEQ ID NO: 11582 - protein, 10 aa, BK virus
HELHGFFPVK

SEQ ID NO: 11583 - protein, 10 aa, BK virus
ELHGFFPVKN

SEQ ID NO: 11584 - protein, 10 aa, BK virus
LHGFFPVKNF

SEQ ID NO: 11585 - protein, 10 aa, BK virus
HGFFPVKNFI

SEQ ID NO: 11586 - protein, 10 aa, BK virus
GFFPVKNFIH

SEQ ID NO: 11587 - protein, 11 aa, BK virus
LQKLQKNRDFP

SEQ ID NO: 11588 - protein, 11 aa, BK virus
QKLQKNRDFPK

SEQ ID NO: 11589 - protein, 11 aa, BK virus
ASEKASTPLLL

SEQ ID NO: 11590 - protein, 11 aa, BK virus
SEKASTPLLLE

SEQ ID NO: 11591 - protein, 11 aa, BK virus
EKASTPLLLER

SEQ ID NO: 11592 - protein, 11 aa, BK virus
KASTPLLLERK

SEQ ID NO: 11593 - protein, 11 aa, BK virus
ASTPLLLERKG

SEQ ID NO: 11594 - protein, 11 aa, BK virus
STPLLLERKGG

SEQ ID NO: 11595 - protein, 11 aa, BK virus
TPLLLERKGGG

SEQ ID NO: 11596 - protein, 11 aa, BK virus
PLLLERKGGGR

SEQ ID NO: 11597 - protein, 11 aa, BK virus
LLLERKGGGRG

SEQ ID NO: 11598 - protein, 11 aa, BK virus
LLERKGGGRGG

SEQ ID NO: 11599 - protein, 11 aa, BK virus
LERKGGGRGGL

SEQ ID NO: 11600 - protein, 11 aa, BK virus
ERKGGGRGGLG

SEQ ID NO: 11601 - protein, 11 aa, BK virus
RKGGGRGGLGL

SEQ ID NO: 11602 - protein, 11 aa, BK virus
KGGGRGGLGLL

SEQ ID NO: 11603 - protein, 11 aa, BK virus
GGGRGGLGLLY

SEQ ID NO: 11604 - protein, 11 aa, BK virus
GGRGGLGLLYI

SEQ ID NO: 11605 - protein, 11 aa, BK virus
GRGGLGLLYII

SEQ ID NO: 11606 - protein, 11 aa, BK virus
RGGLGLLYIIK

SEQ ID NO: 11607 - protein, 11 aa, BK virus
GGLGLLYIIKK

SEQ ID NO: 11608 - protein, 11 aa, BK virus
GLGLLYIIKKK

SEQ ID NO: 11609 - protein, 11 aa, BK virus
LGLLYIIKKKA

SEQ ID NO: 11610 - protein, 11 aa, BK virus
GLLYIIKKKAT

SEQ ID NO: 11611 - protein, 11 aa, BK virus
LLYIIKKKATG

SEQ ID NO: 11612 - protein, 11 aa, BK virus
LYIIKKKATGR

SEQ ID NO: 11613 - protein, 11 aa, BK virus
YIIKKKATGRS

SEQ ID NO: 11614 - protein, 11 aa, BK virus
IIKKKATGRSC

SEQ ID NO: 11615 - protein, 11 aa, BK virus
IKKKATGRSCL

SEQ ID NO: 11616 - protein, 11 aa, BK virus
KKKATGRSCLP

SEQ ID NO: 11617 - protein, 11 aa, BK virus
KKATGRSCLPM

SEQ ID NO: 11618 - protein, 11 aa, BK virus
KATGRSCLPME

SEQ ID NO: 11619 - protein, 11 aa, BK virus
ATGRSCLPMEC

SEQ ID NO: 11620 - protein, 11 aa, BK virus
TGRSCLPMECS

SEQ ID NO: 11621 - protein, 11 aa, BK virus
GRSCLPMECSQ

SEQ ID NO: 11622 - protein, 11 aa, BK virus
RSCLPMECSQT

SEQ ID NO: 11623 - protein, 11 aa, BK virus
SCLPMECSQTM

SEQ ID NO: 11624 - protein, 11 aa, BK virus
CLPMECSQTMT

SEQ ID NO: 11625 - protein, 11 aa, BK virus
LPMECSQTMTS

SEQ ID NO: 11626 - protein, 11 aa, BK virus
PMECSQTMTSG

SEQ ID NO: 11627 - protein, 11 aa, BK virus
MECSQTMTSGR

SEQ ID NO: 11628 - protein, 11 aa, BK virus
ECSQTMTSGRK

SEQ ID NO: 11629 - protein, 11 aa, BK virus
CSQTMTSGRKV

SEQ ID NO: 11630 - protein, 11 aa, BK virus
SQTMTSGRKVH

SEQ ID NO: 11631 - protein, 11 aa, BK virus
QTMTSGRKVHD

SEQ ID NO: 11632 - protein, 11 aa, BK virus
TMTSGRKVHDS

SEQ ID NO: 11633 - protein, 11 aa, BK virus
MTSGRKVHDSQ

SEQ ID NO: 11634 - protein, 11 aa, BK virus
TSGRKVHDSQG

SEQ ID NO: 11635 - protein, 11 aa, BK virus
SGRKVHDSQGN

SEQ ID NO: 11636 - protein, 11 aa, BK virus
GRKVHDSQGNA

SEQ ID NO: 11637 - protein, 11 aa, BK virus
RKVHDSQGNAA

SEQ ID NO: 11638 - protein, 11 aa, BK virus
KVHDSQGNAAK

SEQ ID NO: 11639 - protein, 11 aa, BK virus
VHDSQGNAAKP

SEQ ID NO: 11640 - protein, 11 aa, BK virus
PQEGKCMTHRE

SEQ ID NO: 11641 - protein, 11 aa, BK virus
QEGKCMTHREE

SEQ ID NO: 11642 - protein, 11 aa, BK virus
EGKCMTHREEL

SEQ ID NO: 11643 - protein, 11 aa, BK virus
GKCMTHREELL

SEQ ID NO: 11644 - protein, 11 aa, BK virus
KCMTHREELLT

SEQ ID NO: 11645 - protein, 11 aa, BK virus
CMTHREELLTH

SEQ ID NO: 11646 - protein, 11 aa, BK virus
MTHREELLTHG

SEQ ID NO: 11647 - protein, 11 aa, BK virus
THREELLTHGM

SEQ ID NO: 11648 - protein, 11 aa, BK virus
HREELLTHGMQ

SEQ ID NO: 11649 - protein, 11 aa, BK virus
REELLTHGMQP

SEQ ID NO: 11650 - protein, 11 aa, BK virus
EELLTHGMQPN

SEQ ID NO: 11651 - protein, 11 aa, BK virus
ELLTHGMQPNH

SEQ ID NO: 11652 - protein, 11 aa, BK virus
LLTHGMQPNHD

SEQ ID NO: 11653 - protein, 11 aa, BK virus
LTHGMQPNHDL

SEQ ID NO: 11654 - protein, 11 aa, BK virus
THGMQPNHDLR

SEQ ID NO: 11655 - protein, 11 aa, BK virus
HGMQPNHDLRK

SEQ ID NO: 11656 - protein, 11 aa, BK virus
GMQPNHDLRKE

SEQ ID NO: 11657 - protein, 11 aa, BK virus
MQPNHDLRKES

SEQ ID NO: 11658 - protein, 11 aa, BK virus
QPNHDLRKESA

SEQ ID NO: 11659 - protein, 11 aa, BK virus
QTCFASLGILA

SEQ ID NO: 11660 - protein, 11 aa, BK virus
TCFASLGILAL

SEQ ID NO: 11661 - protein, 11 aa, BK virus
CFASLGILALS

SEQ ID NO: 11662 - protein, 11 aa, BK virus
FASLGILALSP

SEQ ID NO: 11663 - protein, 11 aa, BK virus
ASLGILALSPV

SEQ ID NO: 11664 - protein, 11 aa, BK virus
SLGILALSPVK

SEQ ID NO: 11665 - protein, 11 aa, BK virus
LGILALSPVKL

SEQ ID NO: 11666 - protein, 11 aa, BK virus
GILALSPVKLD

SEQ ID NO: 11667 - protein, 11 aa, BK virus
ILALSPVKLDK

SEQ ID NO: 11668 - protein, 11 aa, BK virus
LALSPVKLDKG

SEQ ID NO: 11669 - protein, 11 aa, BK virus
ALSPVKLDKGH

SEQ ID NO: 11670 - protein, 11 aa, BK virus
LSPVKLDKGHG

SEQ ID NO: 11671 - protein, 11 aa, BK virus
SPVKLDKGHGS

SEQ ID NO: 11672 - protein, 11 aa, BK virus
PVKLDKGHGSA

SEQ ID NO: 11673 - protein, 11 aa, BK virus
VKLDKGHGSAP

SEQ ID NO: 11674 - protein, 11 aa, BK virus
KLDKGHGSAPA

SEQ ID NO: 11675 - protein, 11 aa, BK virus
LDKGHGSAPAV

SEQ ID NO: 11676 - protein, 11 aa, BK virus
DKGHGSAPAVT

SEQ ID NO: 11677 - protein, 11 aa, BK virus
KGHGSAPAVTT

SEQ ID NO: 11678 - protein, 11 aa, BK virus
GHGSAPAVTTS

SEQ ID NO: 11679 - protein, 11 aa, BK virus
HGSAPAVTTSF

SEQ ID NO: 11680 - protein, 11 aa, BK virus
GSAPAVTTSFS

SEQ ID NO: 11681 - protein, 11 aa, BK virus
SAPAVTTSFSE

SEQ ID NO: 11682 - protein, 11 aa, BK virus
APAVTTSFSES

SEQ ID NO: 11683 - protein, 11 aa, BK virus
PAVTTSFSESW

SEQ ID NO: 11684 - protein, 11 aa, BK virus
NLDWNKKKSSE

SEQ ID NO: 11685 - protein, 11 aa, BK virus
LDWNKKKSSED

SEQ ID NO: 11686 - protein, 11 aa, BK virus
DWNKKKSSEDF

SEQ ID NO: 11687 - protein, 11 aa, BK virus
WNKKKSSEDFY

SEQ ID NO: 11688 - protein, 11 aa, BK virus
NKKKSSEDFYF

SEQ ID NO: 11689 - protein, 11 aa, BK virus
KKKSSEDFYFY

SEQ ID NO: 11690 - protein, 11 aa, BK virus
KKSSEDFYFYF

SEQ ID NO: 11691 - protein, 11 aa, BK virus
KSSEDFYFYFR

SEQ ID NO: 11692 - protein, 11 aa, BK virus
SSEDFYFYFRA

SEQ ID NO: 11693 - protein, 11 aa, BK virus
SEDFYFYFRAF

SEQ ID NO: 11694 - protein, 11 aa, BK virus
EDFYFYFRAFA

SEQ ID NO: 11695 - protein, 11 aa, BK virus
DFYFYFRAFAG

SEQ ID NO: 11696 - protein, 11 aa, BK virus
FYFYFRAFAGI

SEQ ID NO: 11697 - protein, 11 aa, BK virus
YFYFRAFAGIL

SEQ ID NO: 11698 - protein, 11 aa, BK virus
RQCRREKQKYH

SEQ ID NO: 11699 - protein, 11 aa, BK virus
QCRREKQKYHC

SEQ ID NO: 11700 - protein, 11 aa, BK virus
CRREKQKYHCF

SEQ ID NO: 11701 - protein, 11 aa, BK virus
RREKQKYHCFT

SEQ ID NO: 11702 - protein, 11 aa, BK virus
REKQKYHCFTC

SEQ ID NO: 11703 - protein, 11 aa, BK virus
EKQKYHCFTCC

SEQ ID NO: 11704 - protein, 11 aa, BK virus
KQKYHCFTCCK

SEQ ID NO: 11705 - protein, 11 aa, BK virus
QKYHCFTCCKR

SEQ ID NO: 11706 - protein, 11 aa, BK virus
KYHCFTCCKRL

SEQ ID NO: 11707 - protein, 11 aa, BK virus
YHCFTCCKRLC

SEQ ID NO: 11708 - protein, 11 aa, BK virus
HCFTCCKRLCK

SEQ ID NO: 11709 - protein, 11 aa, BK virus
CFTCCKRLCKR

SEQ ID NO: 11710 - protein, 11 aa, BK virus
FTCCKRLCKRL

SEQ ID NO: 11711 - protein, 11 aa, BK virus
TCCKRLCKRLL

SEQ ID NO: 11712 - protein, 11 aa, BK virus
CCKRLCKRLLG

SEQ ID NO: 11713 - protein, 11 aa, BK virus
CKRLCKRLLGK

SEQ ID NO: 11714 - protein, 11 aa, BK virus
SLFFCISRFMG

SEQ ID NO: 11715 - protein, 11 aa, BK virus
LFFCISRFMGA

SEQ ID NO: 11716 - protein, 11 aa, BK virus
FFCISRFMGAA

SEQ ID NO: 11717 - protein, 11 aa, BK virus
FCISRFMGAAL

SEQ ID NO: 11718 - protein, 11 aa, BK virus
CISRFMGAALA

SEQ ID NO: 11719 - protein, 11 aa, BK virus
ISRFMGAALAL

SEQ ID NO: 11720 - protein, 11 aa, BK virus
SRFMGAALALL

SEQ ID NO: 11721 - protein, 11 aa, BK virus
RFMGAALALLG

SEQ ID NO: 11722 - protein, 11 aa, BK virus
FMGAALALLGD

SEQ ID NO: 11723 - protein, 11 aa, BK virus
MGAALALLGDL

SEQ ID NO: 11724 - protein, 11 aa, BK virus
GAALALLGDLV

SEQ ID NO: 11725 - protein, 11 aa, BK virus
AALALLGDLVA

SEQ ID NO: 11726 - protein, 11 aa, BK virus
ALALLGDLVAS

SEQ ID NO: 11727 - protein, 11 aa, BK virus
LALLGDLVASV

SEQ ID NO: 11728 - protein, 11 aa, BK virus
ALLGDLVASVS

SEQ ID NO: 11729 - protein, 11 aa, BK virus
LLGDLVASVSE

SEQ ID NO: 11730 - protein, 11 aa, BK virus
LGDLVASVSEA

SEQ ID NO: 11731 - protein, 11 aa, BK virus
GDLVASVSEAA

SEQ ID NO: 11732 - protein, 11 aa, BK virus
DLVASVSEAAA

SEQ ID NO: 11733 - protein, 11 aa, BK virus
LVASVSEAAAA

SEQ ID NO: 11734 - protein, 11 aa, BK virus
VASVSEAAAAT

SEQ ID NO: 11735 - protein, 11 aa, BK virus
ASVSEAAAATG

SEQ ID NO: 11736 - protein, 11 aa, BK virus
SVSEAAAATGF

SEQ ID NO: 11737 - protein, 11 aa, BK virus
VSEAAAATGFS

SEQ ID NO: 11738 - protein, 11 aa, BK virus
SEAAAATGFSV

SEQ ID NO: 11739 - protein, 11 aa, BK virus
EAAAATGFSVA

SEQ ID NO: 11740 - protein, 11 aa, BK virus
AAAATGFSVAE

SEQ ID NO: 11741 - protein, 11 aa, BK virus
AAATGFSVAEI

SEQ ID NO: 11742 - protein, 11 aa, BK virus
AATGFSVAEIA

SEQ ID NO: 11743 - protein, 11 aa, BK virus
ATGFSVAEIAA

SEQ ID NO: 11744 - protein, 11 aa, BK virus
TGFSVAEIAAG

SEQ ID NO: 11745 - protein, 11 aa, BK virus
GFSVAEIAAGE

SEQ ID NO: 11746 - protein, 11 aa, BK virus
FSVAEIAAGEA

SEQ ID NO: 11747 - protein, 11 aa, BK virus
SVAEIAAGEAA

SEQ ID NO: 11748 - protein, 11 aa, BK virus
VAEIAAGEAAA

SEQ ID NO: 11749 - protein, 11 aa, BK virus
AEIAAGEAAAA

SEQ ID NO: 11750 - protein, 11 aa, BK virus
EIAAGEAAAAI

SEQ ID NO: 11751 - protein, 11 aa, BK virus
IAAGEAAAAIE

SEQ ID NO: 11752 - protein, 11 aa, BK virus
AAGEAAAAIEV

SEQ ID NO: 11753 - protein, 11 aa, BK virus
AGEAAAAIEVQ

SEQ ID NO: 11754 - protein, 11 aa, BK virus
GEAAAAIEVQI

SEQ ID NO: 11755 - protein, 11 aa, BK virus
EAAAAIEVQIA

SEQ ID NO: 11756 - protein, 11 aa, BK virus
AAAAIEVQIAS

SEQ ID NO: 11757 - protein, 11 aa, BK virus
AAAIEVQIASL

SEQ ID NO: 11758 - protein, 11 aa, BK virus
AAIEVQIASLA

SEQ ID NO: 11759 - protein, 11 aa, BK virus
AIEVQIASLAT

SEQ ID NO: 11760 - protein, 11 aa, BK virus
IEVQIASLATV

SEQ ID NO: 11761 - protein, 11 aa, BK virus
EVQIASLATVE

SEQ ID NO: 11762 - protein, 11 aa, BK virus
VQIASLATVEG

SEQ ID NO: 11763 - protein, 11 aa, BK virus
QIASLATVEGI

SEQ ID NO: 11764 - protein, 11 aa, BK virus
IASLATVEGIT

SEQ ID NO: 11765 - protein, 11 aa, BK virus
ASLATVEGITS

SEQ ID NO: 11766 - protein, 11 aa, BK virus
SLATVEGITST

SEQ ID NO: 11767 - protein, 11 aa, BK virus
LATVEGITSTS

SEQ ID NO: 11768 - protein, 11 aa, BK virus
ATVEGITSTSE

SEQ ID NO: 11769 - protein, 11 aa, BK virus
TVEGITSTSEA

SEQ ID NO: 11770 - protein, 11 aa, BK virus
VEGITSTSEAI

SEQ ID NO: 11771 - protein, 11 aa, BK virus
EGITSTSEAIA

SEQ ID NO: 11772 - protein, 11 aa, BK virus
GITSTSEAIAA

SEQ ID NO: 11773 - protein, 11 aa, BK virus
ITSTSEAIAAI

SEQ ID NO: 11774 - protein, 11 aa, BK virus
TSTSEAIAAIG

SEQ ID NO: 11775 - protein, 11 aa, BK virus
STSEAIAAIGL

SEQ ID NO: 11776 - protein, 11 aa, BK virus
TSEAIAAIGLT

SEQ ID NO: 11777 - protein, 11 aa, BK virus
SEAIAAIGLTP

SEQ ID NO: 11778 - protein, 11 aa, BK virus
EAIAAIGLTPQ

SEQ ID NO: 11779 - protein, 11 aa, BK virus
AIAAIGLTPQT

SEQ ID NO: 11780 - protein, 11 aa, BK virus
IAAIGLTPQTY

SEQ ID NO: 11781 - protein, 11 aa, BK virus
AAIGLTPQTYA

SEQ ID NO: 11782 - protein, 11 aa, BK virus
AIGLTPQTYAV

SEQ ID NO: 11783 - protein, 11 aa, BK virus
IGLTPQTYAVI

SEQ ID NO: 11784 - protein, 11 aa, BK virus
GLTPQTYAVIA

SEQ ID NO: 11785 - protein, 11 aa, BK virus
LTPQTYAVIAG

SEQ ID NO: 11786 - protein, 11 aa, BK virus
TPQTYAVIAGA

SEQ ID NO: 11787 - protein, 11 aa, BK virus
PQTYAVIAGAP

SEQ ID NO: 11788 - protein, 11 aa, BK virus
QTYAVIAGAPG

SEQ ID NO: 11789 - protein, 11 aa, BK virus
TYAVIAGAPGA

SEQ ID NO: 11790 - protein, 11 aa, BK virus
YAVIAGAPGAI

SEQ ID NO: 11791 - protein, 11 aa, BK virus
AVIAGAPGAIA

SEQ ID NO: 11792 - protein, 11 aa, BK virus
VIAGAPGAIAG

SEQ ID NO: 11793 - protein, 11 aa, BK virus
IAGAPGAIAGF

SEQ ID NO: 11794 - protein, 11 aa, BK virus
AGAPGAIAGFA

SEQ ID NO: 11795 - protein, 11 aa, BK virus
GAPGAIAGFAA

SEQ ID NO: 11796 - protein, 11 aa, BK virus
APGAIAGFAAL

SEQ ID NO: 11797 - protein, 11 aa, BK virus
PGAIAGFAALI

SEQ ID NO: 11798 - protein, 11 aa, BK virus
GAIAGFAALIQ

SEQ ID NO: 11799 - protein, 11 aa, BK virus
AIAGFAALIQT

SEQ ID NO: 11800 - protein, 11 aa, BK virus
IAGFAALIQTV

SEQ ID NO: 11801 - protein, 11 aa, BK virus
AGFAALIQTVS

SEQ ID NO: 11802 - protein, 11 aa, BK virus
GFAALIQTVSG

SEQ ID NO: 11803 - protein, 11 aa, BK virus
FAALIQTVSGI

SEQ ID NO: 11804 - protein, 11 aa, BK virus
AALIQTVSGIS

SEQ ID NO: 11805 - protein, 11 aa, BK virus
ALIQTVSGISS

SEQ ID NO: 11806 - protein, 11 aa, BK virus
LIQTVSGISSL

SEQ ID NO: 11807 - protein, 11 aa, BK virus
IQTVSGISSLA

SEQ ID NO: 11808 - protein, 11 aa, BK virus
QTVSGISSLAQ

SEQ ID NO: 11809 - protein, 11 aa, BK virus
TVSGISSLAQV

SEQ ID NO: 11810 - protein, 11 aa, BK virus
VSGISSLAQVG

SEQ ID NO: 11811 - protein, 11 aa, BK virus
SGISSLAQVGY

SEQ ID NO: 11812 - protein, 11 aa, BK virus
GISSLAQVGYK

SEQ ID NO: 11813 - protein, 11 aa, BK virus
ISSLAQVGYKF

SEQ ID NO: 11814 - protein, 11 aa, BK virus
SSLAQVGYKFF

SEQ ID NO: 11815 - protein, 11 aa, BK virus
SLAQVGYKFFD

SEQ ID NO: 11816 - protein, 11 aa, BK virus
LAQVGYKFFDD

SEQ ID NO: 11817 - protein, 11 aa, BK virus
AQVGYKFFDDW

SEQ ID NO: 11818 - protein, 11 aa, BK virus
QVGYKFFDDWD

SEQ ID NO: 11819 - protein, 11 aa, BK virus
VGYKFFDDWDH

SEQ ID NO: 11820 - protein, 11 aa, BK virus
GYKFFDDWDHK

SEQ ID NO: 11821 - protein, 11 aa, BK virus
YKFFDDWDHKV

SEQ ID NO: 11822 - protein, 11 aa, BK virus
KFFDDWDHKVS

SEQ ID NO: 11823 - protein, 11 aa, BK virus
FFDDWDHKVST

SEQ ID NO: 11824 - protein, 11 aa, BK virus
FDDWDHKVSTV

SEQ ID NO: 11825 - protein, 11 aa, BK virus
DDWDHKVSTVG

SEQ ID NO: 11826 - protein, 11 aa, BK virus
DWDHKVSTVGL

SEQ ID NO: 11827 - protein, 11 aa, BK virus
WDHKVSTVGLY

SEQ ID NO: 11828 - protein, 11 aa, BK virus
DHKVSTVGLYQ

SEQ ID NO: 11829 - protein, 11 aa, BK virus
HKVSTVGLYQQ

SEQ ID NO: 11830 - protein, 11 aa, BK virus
KVSTVGLYQQS

SEQ ID NO: 11831 - protein, 11 aa, BK virus
VSTVGLYQQSG

SEQ ID NO: 11832 - protein, 11 aa, BK virus
STVGLYQQSGM

SEQ ID NO: 11833 - protein, 11 aa, BK virus
TVGLYQQSGMA

SEQ ID NO: 11834 - protein, 11 aa, BK virus
VGLYQQSGMAL

SEQ ID NO: 11835 - protein, 11 aa, BK virus
GLYQQSGMALE

SEQ ID NO: 11836 - protein, 11 aa, BK virus
LYQQSGMALEL

SEQ ID NO: 11837 - protein, 11 aa, BK virus
YQQSGMALELF

SEQ ID NO: 11838 - protein, 11 aa, BK virus
QQSGMALELFN

SEQ ID NO: 11839 - protein, 11 aa, BK virus
QSGMALELFNP

SEQ ID NO: 11840 - protein, 11 aa, BK virus
SGMALELFNPD

SEQ ID NO: 11841 - protein, 11 aa, BK virus
GMALELFNPDE

SEQ ID NO: 11842 - protein, 11 aa, BK virus
MALELFNPDEY

SEQ ID NO: 11843 - protein, 11 aa, BK virus
ALELFNPDEYY

SEQ ID NO: 11844 - protein, 11 aa, BK virus
LELFNPDEYYD

SEQ ID NO: 11845 - protein, 11 aa, BK virus
ELFNPDEYYDI

SEQ ID NO: 11846 - protein, 11 aa, BK virus
LFNPDEYYDIL

SEQ ID NO: 11847 - protein, 11 aa, BK virus
FNPDEYYDILF

SEQ ID NO: 11848 - protein, 11 aa, BK virus
NPDEYYDILFP

SEQ ID NO: 11849 - protein, 11 aa, BK virus
PDEYYDILFPG

SEQ ID NO: 11850 - protein, 11 aa, BK virus
DEYYDILFPGV

SEQ ID NO: 11851 - protein, 11 aa, BK virus
EYYDILFPGVN

SEQ ID NO: 11852 - protein, 11 aa, BK virus
YYDILFPGVNT

SEQ ID NO: 11853 - protein, 11 aa, BK virus
YDILFPGVNTF

SEQ ID NO: 11854 - protein, 11 aa, BK virus
DILFPGVNTFV

SEQ ID NO: 11855 - protein, 11 aa, BK virus
ILFPGVNTFVN

SEQ ID NO: 11856 - protein, 11 aa, BK virus
LFPGVNTFVNN

SEQ ID NO: 11857 - protein, 11 aa, BK virus
FPGVNTFVNNI

SEQ ID NO: 11858 - protein, 11 aa, BK virus
PGVNTFVNNIQ

SEQ ID NO: 11859 - protein, 11 aa, BK virus
GVNTFVNNIQY

SEQ ID NO: 11860 - protein, 11 aa, BK virus
VNTFVNNIQYL

SEQ ID NO: 11861 - protein, 11 aa, BK virus
NTFVNNIQYLD

SEQ ID NO: 11862 - protein, 11 aa, BK virus
TFVNNIQYLDP

SEQ ID NO: 11863 - protein, 11 aa, BK virus
FVNNIQYLDPR

SEQ ID NO: 11864 - protein, 11 aa, BK virus
VNNIQYLDPRH

SEQ ID NO: 11865 - protein, 11 aa, BK virus
NNIQYLDPRHW

SEQ ID NO: 11866 - protein, 11 aa, BK virus
NIQYLDPRHWG

SEQ ID NO: 11867 - protein, 11 aa, BK virus
IQYLDPRHWGP

SEQ ID NO: 11868 - protein, 11 aa, BK virus
QYLDPRHWGPS

SEQ ID NO: 11869 - protein, 11 aa, BK virus
YLDPRHWGPSL

SEQ ID NO: 11870 - protein, 11 aa, BK virus
LDPRHWGPSLF

SEQ ID NO: 11871 - protein, 11 aa, BK virus
DPRHWGPSLFA

SEQ ID NO: 11872 - protein, 11 aa, BK virus
PRHWGPSLFAT

SEQ ID NO: 11873 - protein, 11 aa, BK virus
RHWGPSLFATI

SEQ ID NO: 11874 - protein, 11 aa, BK virus
HWGPSLFATIS

SEQ ID NO: 11875 - protein, 11 aa, BK virus
WGPSLFATISQ

SEQ ID NO: 11876 - protein, 11 aa, BK virus
GPSLFATISQA

SEQ ID NO: 11877 - protein, 11 aa, BK virus
PSLFATISQAL

SEQ ID NO: 11878 - protein, 11 aa, BK virus
SLFATISQALW

SEQ ID NO: 11879 - protein, 11 aa, BK virus
LFATISQALWH

SEQ ID NO: 11880 - protein, 11 aa, BK virus
FATISQALWHV

SEQ ID NO: 11881 - protein, 11 aa, BK virus
ATISQALWHVI

SEQ ID NO: 11882 - protein, 11 aa, BK virus
TISQALWHVIR

SEQ ID NO: 11883 - protein, 11 aa, BK virus
ISQALWHVIRD

SEQ ID NO: 11884 - protein, 11 aa, BK virus
SQALWHVIRDD

SEQ ID NO: 11885 - protein, 11 aa, BK virus
QALWHVIRDDI

SEQ ID NO: 11886 - protein, 11 aa, BK virus
ALWHVIRDDIP

SEQ ID NO: 11887 - protein, 11 aa, BK virus
LWHVIRDDIPS

SEQ ID NO: 11888 - protein, 11 aa, BK virus
WHVIRDDIPSI

SEQ ID NO: 11889 - protein, 11 aa, BK virus
HVIRDDIPSIT

SEQ ID NO: 11890 - protein, 11 aa, BK virus
VIRDDIPSITS

SEQ ID NO: 11891 - protein, 11 aa, BK virus
IRDDIPSITSQ

SEQ ID NO: 11892 - protein, 11 aa, BK virus
RDDIPSITSQE

SEQ ID NO: 11893 - protein, 11 aa, BK virus
DDIPSITSQEL

SEQ ID NO: 11894 - protein, 11 aa, BK virus
DIPSITSQELQ

SEQ ID NO: 11895 - protein, 11 aa, BK virus
IPSITSQELQR

SEQ ID NO: 11896 - protein, 11 aa, BK virus
PSITSQELQRR

SEQ ID NO: 11897 - protein, 11 aa, BK virus
SITSQELQRRT

SEQ ID NO: 11898 - protein, 11 aa, BK virus
ITSQELQRRTE

SEQ ID NO: 11899 - protein, 11 aa, BK virus
TSQELQRRTER

SEQ ID NO: 11900 - protein, 11 aa, BK virus
SQELQRRTERF

SEQ ID NO: 11901 - protein, 11 aa, BK virus
QELQRRTERFF

SEQ ID NO: 11902 - protein, 11 aa, BK virus
ELQRRTERFFR

SEQ ID NO: 11903 - protein, 11 aa, BK virus
LQRRTERFFRD

SEQ ID NO: 11904 - protein, 11 aa, BK virus
QRRTERFFRDS

SEQ ID NO: 11905 - protein, 11 aa, BK virus
RRTERFFRDSL

SEQ ID NO: 11906 - protein, 11 aa, BK virus
RTERFFRDSLA

SEQ ID NO: 11907 - protein, 11 aa, BK virus
TERFFRDSLAR

SEQ ID NO: 11908 - protein, 11 aa, BK virus
ERFFRDSLARF

SEQ ID NO: 11909 - protein, 11 aa, BK virus
RFFRDSLARFL

SEQ ID NO: 11910 - protein, 11 aa, BK virus
FFRDSLARFLE

SEQ ID NO: 11911 - protein, 11 aa, BK virus
FRDSLARFLEE

SEQ ID NO: 11912 - protein, 11 aa, BK virus
RDSLARFLEET

SEQ ID NO: 11913 - protein, 11 aa, BK virus
DSLARFLEETT

SEQ ID NO: 11914 - protein, 11 aa, BK virus
SLARFLEETTW

SEQ ID NO: 11915 - protein, 11 aa, BK virus
LARFLEETTWT

SEQ ID NO: 11916 - protein, 11 aa, BK virus
ARFLEETTWTI

SEQ ID NO: 11917 - protein, 11 aa, BK virus
RFLEETTWTIV

SEQ ID NO: 11918 - protein, 11 aa, BK virus
FLEETTWTIVN

SEQ ID NO: 11919 - protein, 11 aa, BK virus
LEETTWTIVNA

SEQ ID NO: 11920 - protein, 11 aa, BK virus
EETTWTIVNAP

SEQ ID NO: 11921 - protein, 11 aa, BK virus
ETTWTIVNAPI

SEQ ID NO: 11922 - protein, 11 aa, BK virus
TTWTIVNAPIN

SEQ ID NO: 11923 - protein, 11 aa, BK virus
TWTIVNAPINF

SEQ ID NO: 11924 - protein, 11 aa, BK virus
WTIVNAPINFY

SEQ ID NO: 11925 - protein, 11 aa, BK virus
TIVNAPINFYN

SEQ ID NO: 11926 - protein, 11 aa, BK virus
IVNAPINFYNY

SEQ ID NO: 11927 - protein, 11 aa, BK virus
VNAPINFYNYI

SEQ ID NO: 11928 - protein, 11 aa, BK virus
NAPINFYNYIQ

SEQ ID NO: 11929 - protein, 11 aa, BK virus
APINFYNYIQQ

SEQ ID NO: 11930 - protein, 11 aa, BK virus
PINFYNYIQQY

SEQ ID NO: 11931 - protein, 11 aa, BK virus
INFYNYIQQYY

SEQ ID NO: 11932 - protein, 11 aa, BK virus
NFYNYIQQYYS

SEQ ID NO: 11933 - protein, 11 aa, BK virus
FYNYIQQYYSD

SEQ ID NO: 11934 - protein, 11 aa, BK virus
YNYIQQYYSDL

SEQ ID NO: 11935 - protein, 11 aa, BK virus
NYIQQYYSDLS

SEQ ID NO: 11936 - protein, 11 aa, BK virus
YIQQYYSDLSP

SEQ ID NO: 11937 - protein, 11 aa, BK virus
IQQYYSDLSPI

SEQ ID NO: 11938 - protein, 11 aa, BK virus
QQYYSDLSPIR

SEQ ID NO: 11939 - protein, 11 aa, BK virus
QYYSDLSPIRP

SEQ ID NO: 11940 - protein, 11 aa, BK virus
YYSDLSPIRPS

SEQ ID NO: 11941 - protein, 11 aa, BK virus
YSDLSPIRPSM

SEQ ID NO: 11942 - protein, 11 aa, BK virus
SDLSPIRPSMV

SEQ ID NO: 11943 - protein, 11 aa, BK virus
DLSPIRPSMVR

SEQ ID NO: 11944 - protein, 11 aa, BK virus
LSPIRPSMVRQ

SEQ ID NO: 11945 - protein, 11 aa, BK virus
SPIRPSMVRQV

SEQ ID NO: 11946 - protein, 11 aa, BK virus
PIRPSMVRQVA

SEQ ID NO: 11947 - protein, 11 aa, BK virus
IRPSMVRQVAE

SEQ ID NO: 11948 - protein, 11 aa, BK virus
RPSMVRQVAER

SEQ ID NO: 11949 - protein, 11 aa, BK virus
PSMVRQVAERE

SEQ ID NO: 11950 - protein, 11 aa, BK virus
SMVRQVAEREG

SEQ ID NO: 11951 - protein, 11 aa, BK virus
MVRQVAEREGT

SEQ ID NO: 11952 - protein, 11 aa, BK virus
VRQVAEREGTR

SEQ ID NO: 11953 - protein, 11 aa, BK virus
RQVAEREGTRV

SEQ ID NO: 11954 - protein, 11 aa, BK virus
QVAEREGTRVH

SEQ ID NO: 11955 - protein, 11 aa, BK virus
VAEREGTRVHF

SEQ ID NO: 11956 - protein, 11 aa, BK virus
AEREGTRVHFG

SEQ ID NO: 11957 - protein, 11 aa, BK virus
EREGTRVHFGH

SEQ ID NO: 11958 - protein, 11 aa, BK virus
REGTRVHFGHT

SEQ ID NO: 11959 - protein, 11 aa, BK virus
EGTRVHFGHTY

SEQ ID NO: 11960 - protein, 11 aa, BK virus
GTRVHFGHTYS

SEQ ID NO: 11961 - protein, 11 aa, BK virus
TRVHFGHTYSI

SEQ ID NO: 11962 - protein, 11 aa, BK virus
RVHFGHTYSID

SEQ ID NO: 11963 - protein, 11 aa, BK virus
VHFGHTYSIDD

SEQ ID NO: 11964 - protein, 11 aa, BK virus
HFGHTYSIDDA

SEQ ID NO: 11965 - protein, 11 aa, BK virus
FGHTYSIDDAD

SEQ ID NO: 11966 - protein, 11 aa, BK virus
GHTYSIDDADS

SEQ ID NO: 11967 - protein, 11 aa, BK virus
HTYSIDDADSI

SEQ ID NO: 11968 - protein, 11 aa, BK virus
TYSIDDADSIE

SEQ ID NO: 11969 - protein, 11 aa, BK virus
YSIDDADSIEE

SEQ ID NO: 11970 - protein, 11 aa, BK virus
SIDDADSIEEV

SEQ ID NO: 11971 - protein, 11 aa, BK virus
IDDADSIEEVT

SEQ ID NO: 11972 - protein, 11 aa, BK virus
DDADSIEEVTQ

SEQ ID NO: 11973 - protein, 11 aa, BK virus
DADSIEEVTQR

SEQ ID NO: 11974 - protein, 11 aa, BK virus
ADSIEEVTQRM

SEQ ID NO: 11975 - protein, 11 aa, BK virus
DSIEEVTQRMD

SEQ ID NO: 11976 - protein, 11 aa, BK virus
SIEEVTQRMDL

SEQ ID NO: 11977 - protein, 11 aa, BK virus
IEEVTQRMDLR

SEQ ID NO: 11978 - protein, 11 aa, BK virus
EEVTQRMDLRN

SEQ ID NO: 11979 - protein, 11 aa, BK virus
EVTQRMDLRNQ

SEQ ID NO: 11980 - protein, 11 aa, BK virus
VTQRMDLRNQQ

SEQ ID NO: 11981 - protein, 11 aa, BK virus
TQRMDLRNQQS

SEQ ID NO: 11982 - protein, 11 aa, BK virus
QRMDLRNQQSV

SEQ ID NO: 11983 - protein, 11 aa, BK virus
RMDLRNQQSVH

SEQ ID NO: 11984 - protein, 11 aa, BK virus
MDLRNQQSVHS

SEQ ID NO: 11985 - protein, 11 aa, BK virus
DLRNQQSVHSG

SEQ ID NO: 11986 - protein, 11 aa, BK virus
LRNQQSVHSGE

SEQ ID NO: 11987 - protein, 11 aa, BK virus
RNQQSVHSGEF

SEQ ID NO: 11988 - protein, 11 aa, BK virus
NQQSVHSGEFI

SEQ ID NO: 11989 - protein, 11 aa, BK virus
QQSVHSGEFIE

SEQ ID NO: 11990 - protein, 11 aa, BK virus
QSVHSGEFIEK

SEQ ID NO: 11991 - protein, 11 aa, BK virus
SVHSGEFIEKT

SEQ ID NO: 11992 - protein, 11 aa, BK virus
VHSGEFIEKTI

SEQ ID NO: 11993 - protein, 11 aa, BK virus
HSGEFIEKTIA

SEQ ID NO: 11994 - protein, 11 aa, BK virus
SGEFIEKTIAP

SEQ ID NO: 11995 - protein, 11 aa, BK virus
GEFIEKTIAPG

SEQ ID NO: 11996 - protein, 11 aa, BK virus
EFIEKTIAPGG

SEQ ID NO: 11997 - protein, 11 aa, BK virus
FIEKTIAPGGA

SEQ ID NO: 11998 - protein, 11 aa, BK virus
IEKTIAPGGAN

SEQ ID NO: 11999 - protein, 11 aa, BK virus
EKTIAPGGANQ

SEQ ID NO: 12000 - protein, 11 aa, BK virus
KTIAPGGANQR

SEQ ID NO: 12001 - protein, 11 aa, BK virus
TIAPGGANQRT

SEQ ID NO: 12002 - protein, 11 aa, BK virus
IAPGGANQRTA

SEQ ID NO: 12003 - protein, 11 aa, BK virus
APGGANQRTAP

SEQ ID NO: 12004 - protein, 11 aa, BK virus
PGGANQRTAPQ

SEQ ID NO: 12005 - protein, 11 aa, BK virus
GGANQRTAPQW

SEQ ID NO: 12006 - protein, 11 aa, BK virus
GANQRTAPQWM

SEQ ID NO: 12007 - protein, 11 aa, BK virus
ANQRTAPQWML

SEQ ID NO: 12008 - protein, 11 aa, BK virus
NQRTAPQWMLP

SEQ ID NO: 12009 - protein, 11 aa, BK virus
QRTAPQWMLPL

SEQ ID NO: 12010 - protein, 11 aa, BK virus
RTAPQWMLPLL

SEQ ID NO: 12011 - protein, 11 aa, BK virus
TAPQWMLPLLL

SEQ ID NO: 12012 - protein, 11 aa, BK virus
APQWMLPLLLG

SEQ ID NO: 12013 - protein, 11 aa, BK virus
PQWMLPLLLGL

SEQ ID NO: 12014 - protein, 11 aa, BK virus
QWMLPLLLGLY

SEQ ID NO: 12015 - protein, 11 aa, BK virus
WMLPLLLGLYG

SEQ ID NO: 12016 - protein, 11 aa, BK virus
MLPLLLGLYGT

SEQ ID NO: 12017 - protein, 11 aa, BK virus
LPLLLGLYGTV

SEQ ID NO: 12018 - protein, 11 aa, BK virus
PLLLGLYGTVT

SEQ ID NO: 12019 - protein, 11 aa, BK virus
LLLGLYGTVTP

SEQ ID NO: 12020 - protein, 11 aa, BK virus
LLGLYGTVTPA

SEQ ID NO: 12021 - protein, 11 aa, BK virus
LGLYGTVTPAL

SEQ ID NO: 12022 - protein, 11 aa, BK virus
GLYGTVTPALE

SEQ ID NO: 12023 - protein, 11 aa, BK virus
LYGTVTPALEA

SEQ ID NO: 12024 - protein, 11 aa, BK virus
YGTVTPALEAY

SEQ ID NO: 12025 - protein, 11 aa, BK virus
GTVTPALEAYE

SEQ ID NO: 12026 - protein, 11 aa, BK virus
TVTPALEAYED

SEQ ID NO: 12027 - protein, 11 aa, BK virus
VTPALEAYEDG

SEQ ID NO: 12028 - protein, 11 aa, BK virus
TPALEAYEDGP

SEQ ID NO: 12029 - protein, 11 aa, BK virus
PALEAYEDGPN

SEQ ID NO: 12030 - protein, 11 aa, BK virus
ALEAYEDGPNQ

SEQ ID NO: 12031 - protein, 11 aa, BK virus
LEAYEDGPNQK

SEQ ID NO: 12032 - protein, 11 aa, BK virus
EAYEDGPNQKK

SEQ ID NO: 12033 - protein, 11 aa, BK virus
AYEDGPNQKKR

SEQ ID NO: 12034 - protein, 11 aa, BK virus
YEDGPNQKKRR

SEQ ID NO: 12035 - protein, 11 aa, BK virus
EDGPNQKKRRV

SEQ ID NO: 12036 - protein, 11 aa, BK virus
DGPNQKKRRVS

SEQ ID NO: 12037 - protein, 11 aa, BK virus
GPNQKKRRVSR

SEQ ID NO: 12038 - protein, 11 aa, BK virus
PNQKKRRVSRG

SEQ ID NO: 12039 - protein, 11 aa, BK virus
NQKKRRVSRGS

SEQ ID NO: 12040 - protein, 11 aa, BK virus
QKKRRVSRGSS

SEQ ID NO: 12041 - protein, 11 aa, BK virus
KKRRVSRGSSQ

SEQ ID NO: 12042 - protein, 11 aa, BK virus
KRRVSRGSSQK

SEQ ID NO: 12043 - protein, 11 aa, BK virus
RRVSRGSSQKA

SEQ ID NO: 12044 - protein, 11 aa, BK virus
RVSRGSSQKAK

SEQ ID NO: 12045 - protein, 11 aa, BK virus
VSRGSSQKAKG

SEQ ID NO: 12046 - protein, 11 aa, BK virus
SRGSSQKAKGT

SEQ ID NO: 12047 - protein, 11 aa, BK virus
RGSSQKAKGTR

SEQ ID NO: 12048 - protein, 11 aa, BK virus
GSSQKAKGTRA

SEQ ID NO: 12049 - protein, 11 aa, BK virus
SSQKAKGTRAS

SEQ ID NO: 12050 - protein, 11 aa, BK virus
SQKAKGTRASA

SEQ ID NO: 12051 - protein, 11 aa, BK virus
QKAKGTRASAK

SEQ ID NO: 12052 - protein, 11 aa, BK virus
KAKGTRASAKT

SEQ ID NO: 12053 - protein, 11 aa, BK virus
AKGTRASAKTT

SEQ ID NO: 12054 - protein, 11 aa, BK virus
KGTRASAKTTN

SEQ ID NO: 12055 - protein, 11 aa, BK virus
GTRASAKTTNK

SEQ ID NO: 12056 - protein, 11 aa, BK virus
TRASAKTTNKR

SEQ ID NO: 12057 - protein, 11 aa, BK virus
RASAKTTNKRR

SEQ ID NO: 12058 - protein, 11 aa, BK virus
ASAKTTNKRRS

SEQ ID NO: 12059 - protein, 11 aa, BK virus
SAKTTNKRRSR

SEQ ID NO: 12060 - protein, 11 aa, BK virus
AKTTNKRRSRS

SEQ ID NO: 12061 - protein, 11 aa, BK virus
KTTNKRRSRSS

SEQ ID NO: 12062 - protein, 11 aa, BK virus
TTNKRRSRSSR

SEQ ID NO: 12063 - protein, 11 aa, BK virus
TNKRRSRSSRS

SEQ ID NO: 12064 - protein, 11 aa, BK virus
NWGRCYYRGRM

SEQ ID NO: 12065 - protein, 11 aa, BK virus
WGRCYYRGRML

SEQ ID NO: 12066 - protein, 11 aa, BK virus
GRCYYRGRMLP

SEQ ID NO: 12067 - protein, 11 aa, BK virus
RCYYRGRMLPK

SEQ ID NO: 12068 - protein, 11 aa, BK virus
CYYRGRMLPKP

SEQ ID NO: 12069 - protein, 11 aa, BK virus
YYRGRMLPKPR

SEQ ID NO: 12070 - protein, 11 aa, BK virus
YRGRMLPKPRN

SEQ ID NO: 12071 - protein, 11 aa, BK virus
RGRMLPKPRNG

SEQ ID NO: 12072 - protein, 11 aa, BK virus
GRMLPKPRNGG

SEQ ID NO: 12073 - protein, 11 aa, BK virus
RMLPKPRNGGS

SEQ ID NO: 12074 - protein, 11 aa, BK virus
MLPKPRNGGSR

SEQ ID NO: 12075 - protein, 11 aa, BK virus
PREKNASLLQH

SEQ ID NO: 12076 - protein, 11 aa, BK virus
REKNASLLQHS

SEQ ID NO: 12077 - protein, 11 aa, BK virus
EKNASLLQHSK

SEQ ID NO: 12078 - protein, 11 aa, BK virus
KNASLLQHSKN

SEQ ID NO: 12079 - protein, 11 aa, BK virus
NASLLQHSKNS

SEQ ID NO: 12080 - protein, 11 aa, BK virus
ASLLQHSKNSP

SEQ ID NO: 12081 - protein, 11 aa, BK virus
SLLQHSKNSPP

SEQ ID NO: 12082 - protein, 11 aa, BK virus
LLQHSKNSPPQ

SEQ ID NO: 12083 - protein, 11 aa, BK virus
LQHSKNSPPQF

SEQ ID NO: 12084 - protein, 11 aa, BK virus
QHSKNSPPQFK

SEQ ID NO: 12085 - protein, 11 aa, BK virus
GPNLWKSTDVG

SEQ ID NO: 12086 - protein, 11 aa, BK virus
PNLWKSTDVGG

SEQ ID NO: 12087 - protein, 11 aa, BK virus
NLWKSTDVGGC

SEQ ID NO: 12088 - protein, 11 aa, BK virus
LWKSTDVGGCN

SEQ ID NO: 12089 - protein, 11 aa, BK virus
WKSTDVGGCNC

SEQ ID NO: 12090 - protein, 11 aa, BK virus
KSTDVGGCNCT

SEQ ID NO: 12091 - protein, 11 aa, BK virus
STDVGGCNCTN

SEQ ID NO: 12092 - protein, 11 aa, BK virus
TDVGGCNCTNR

SEQ ID NO: 12093 - protein, 11 aa, BK virus
DVGGCNCTNRG

SEQ ID NO: 12094 - protein, 11 aa, BK virus
VGGCNCTNRGY

SEQ ID NO: 12095 - protein, 11 aa, BK virus
GGCNCTNRGYW

SEQ ID NO: 12096 - protein, 11 aa, BK virus
GCNCTNRGYWN

SEQ ID NO: 12097 - protein, 11 aa, BK virus
CNCTNRGYWNN

SEQ ID NO: 12098 - protein, 11 aa, BK virus
FPLLCCRWRTL

SEQ ID NO: 12099 - protein, 11 aa, BK virus
PLLCCRWRTLG

SEQ ID NO: 12100 - protein, 11 aa, BK virus
LLCCRWRTLGN

SEQ ID NO: 12101 - protein, 11 aa, BK virus
LCCRWRTLGNA

SEQ ID NO: 12102 - protein, 11 aa, BK virus
CCRWRTLGNAG

SEQ ID NO: 12103 - protein, 11 aa, BK virus
CRWRTLGNAGS

SEQ ID NO: 12104 - protein, 11 aa, BK virus
RWRTLGNAGSA

SEQ ID NO: 12105 - protein, 11 aa, BK virus
WRTLGNAGSAN

SEQ ID NO: 12106 - protein, 11 aa, BK virus
RTLGNAGSANE

SEQ ID NO: 12107 - protein, 11 aa, BK virus
TLGNAGSANEL

SEQ ID NO: 12108 - protein, 11 aa, BK virus
LGNAGSANELQ

SEQ ID NO: 12109 - protein, 11 aa, BK virus
GNAGSANELQV

SEQ ID NO: 12110 - protein, 11 aa, BK virus
NAGSANELQVK

SEQ ID NO: 12111 - protein, 11 aa, BK virus
AGSANELQVKV

SEQ ID NO: 12112 - protein, 11 aa, BK virus
GSANELQVKVP

SEQ ID NO: 12113 - protein, 11 aa, BK virus
KPNSPVPGNEY

SEQ ID NO: 12114 - protein, 11 aa, BK virus
GLFGQKQCLSS

SEQ ID NO: 12115 - protein, 11 aa, BK virus
VFWDFHRRGKC

SEQ ID NO: 12116 - protein, 11 aa, BK virus
FWDFHRRGKCS

SEQ ID NO: 12117 - protein, 11 aa, BK virus
WDFHRRGKCSP

SEQ ID NO: 12118 - protein, 11 aa, BK virus
DFHRRGKCSPS

SEQ ID NO: 12119 - protein, 11 aa, BK virus
FHRRGKCSPST

SEQ ID NO: 12120 - protein, 11 aa, BK virus
HRRGKCSPSTS

SEQ ID NO: 12121 - protein, 11 aa, BK virus
RRGKCSPSTSC

SEQ ID NO: 12122 - protein, 11 aa, BK virus
RGKCSPSTSCD

SEQ ID NO: 12123 - protein, 11 aa, BK virus
GKCSPSTSCDQ

SEQ ID NO: 12124 - protein, 11 aa, BK virus
KCSPSTSCDQH

SEQ ID NO: 12125 - protein, 11 aa, BK virus
CSPSTSCDQHS

SEQ ID NO: 12126 - protein, 11 aa, BK virus
SPSTSCDQHSY

SEQ ID NO: 12127 - protein, 11 aa, BK virus
PSTSCDQHSYH

SEQ ID NO: 12128 - protein, 11 aa, BK virus
STSCDQHSYHS

SEQ ID NO: 12129 - protein, 11 aa, BK virus
TSCDQHSYHSV

SEQ ID NO: 12130 - protein, 11 aa, BK virus
SCDQHSYHSVA

SEQ ID NO: 12131 - protein, 11 aa, BK virus
CDQHSYHSVAR

SEQ ID NO: 12132 - protein, 11 aa, BK virus
QLWNTTVERPC

SEQ ID NO: 12133 - protein, 11 aa, BK virus
LWNTTVERPCK

SEQ ID NO: 12134 - protein, 11 aa, BK virus
WNTTVERPCKI

SEQ ID NO: 12135 - protein, 11 aa, BK virus
NTTVERPCKIF

SEQ ID NO: 12136 - protein, 11 aa, BK virus
DPPEKKICKES

SEQ ID NO: 12137 - protein, 11 aa, BK virus
PPEKKICKESL

SEQ ID NO: 12138 - protein, 11 aa, BK virus
PEKKICKESLP

SEQ ID NO: 12139 - protein, 11 aa, BK virus
EKKICKESLPN

SEQ ID NO: 12140 - protein, 11 aa, BK virus
KKICKESLPNF

SEQ ID NO: 12141 - protein, 11 aa, BK virus
KICKESLPNFL

SEQ ID NO: 12142 - protein, 11 aa, BK virus
ICKESLPNFLF

SEQ ID NO: 12143 - protein, 11 aa, BK virus
CKESLPNFLFA

SEQ ID NO: 12144 - protein, 11 aa, BK virus
KESLPNFLFAK

SEQ ID NO: 12145 - protein, 11 aa, BK virus
PYKQENPESGW

SEQ ID NO: 12146 - protein, 11 aa, BK virus
YKQENPESGWA

SEQ ID NO: 12147 - protein, 11 aa, BK virus
KQENPESGWAA

SEQ ID NO: 12148 - protein, 11 aa, BK virus
QENPESGWAAY

SEQ ID NO: 12149 - protein, 11 aa, BK virus
ENPESGWAAYV

SEQ ID NO: 12150 - protein, 11 aa, BK virus
NPESGWAAYVW

SEQ ID NO: 12151 - protein, 11 aa, BK virus
PESGWAAYVWY

SEQ ID NO: 12152 - protein, 11 aa, BK virus
ESGWAAYVWYG

SEQ ID NO: 12153 - protein, 11 aa, BK virus
SGWAAYVWYGI

SEQ ID NO: 12154 - protein, 11 aa, BK virus
GWAAYVWYGIP

SEQ ID NO: 12155 - protein, 11 aa, BK virus
WAAYVWYGIPG

SEQ ID NO: 12156 - protein, 11 aa, BK virus
AAYVWYGIPGR

SEQ ID NO: 12157 - protein, 11 aa, BK virus
AYVWYGIPGRR

SEQ ID NO: 12158 - protein, 11 aa, BK virus
YVWYGIPGRRG

SEQ ID NO: 12159 - protein, 11 aa, BK virus
WHRKTSRGPRY

SEQ ID NO: 12160 - protein, 11 aa, BK virus
HRKTSRGPRYD

SEQ ID NO: 12161 - protein, 11 aa, BK virus
RKTSRGPRYDK

SEQ ID NO: 12162 - protein, 11 aa, BK virus
KTSRGPRYDKI

SEQ ID NO: 12163 - protein, 11 aa, BK virus
TSRGPRYDKIY

SEQ ID NO: 12164 - protein, 11 aa, BK virus
QTGTIANQNAL

SEQ ID NO: 12165 - protein, 11 aa, BK virus
TGTIANQNALN

SEQ ID NO: 12166 - protein, 11 aa, BK virus
GTIANQNALNR

SEQ ID NO: 12167 - protein, 11 aa, BK virus
TIANQNALNRC

SEQ ID NO: 12168 - protein, 11 aa, BK virus
IANQNALNRCF

SEQ ID NO: 12169 - protein, 11 aa, BK virus
ANQNALNRCFY

SEQ ID NO: 12170 - protein, 11 aa, BK virus
NQNALNRCFYC

SEQ ID NO: 12171 - protein, 11 aa, BK virus
QNALNRCFYCT

SEQ ID NO: 12172 - protein, 11 aa, BK virus
NALNRCFYCTY

SEQ ID NO: 12173 - protein, 11 aa, BK virus
ALNRCFYCTYT

SEQ ID NO: 12174 - protein, 11 aa, BK virus
LNRCFYCTYTF

SEQ ID NO: 12175 - protein, 11 aa, BK virus
NRCFYCTYTFN

SEQ ID NO: 12176 - protein, 11 aa, BK virus
RCFYCTYTFNK

SEQ ID NO: 12177 - protein, 11 aa, BK virus
CFYCTYTFNKC

SEQ ID NO: 12178 - protein, 11 aa, BK virus
FYCTYTFNKCC

SEQ ID NO: 12179 - protein, 11 aa, BK virus
YCTYTFNKCCF

SEQ ID NO: 12180 - protein, 11 aa, BK virus
CTYTFNKCCFC

SEQ ID NO: 12181 - protein, 11 aa, BK virus
TYTFNKCCFCI

SEQ ID NO: 12182 - protein, 11 aa, BK virus
YTFNKCCFCIS

SEQ ID NO: 12183 - protein, 11 aa, BK virus
TFNKCCFCISH

SEQ ID NO: 12184 - protein, 11 aa, BK virus
FNKCCFCISHF

SEQ ID NO: 12185 - protein, 11 aa, BK virus
NTESLYTNATL

SEQ ID NO: 12186 - protein, 11 aa, BK virus
TESLYTNATLD

SEQ ID NO: 12187 - protein, 11 aa, BK virus
ESLYTNATLDY

SEQ ID NO: 12188 - protein, 11 aa, BK virus
SLYTNATLDYG

SEQ ID NO: 12189 - protein, 11 aa, BK virus
LYTNATLDYGG

SEQ ID NO: 12190 - protein, 11 aa, BK virus
YTNATLDYGGL

SEQ ID NO: 12191 - protein, 11 aa, BK virus
TNATLDYGGLT

SEQ ID NO: 12192 - protein, 11 aa, BK virus
NATLDYGGLTF

SEQ ID NO: 12193 - protein, 11 aa, BK virus
ATLDYGGLTFG

SEQ ID NO: 12194 - protein, 11 aa, BK virus
TLDYGGLTFGN

SEQ ID NO: 12195 - protein, 11 aa, BK virus
LDYGGLTFGNL

SEQ ID NO: 12196 - protein, 11 aa, BK virus
DYGGLTFGNLQ

SEQ ID NO: 12197 - protein, 11 aa, BK virus
YGGLTFGNLQQ

SEQ ID NO: 12198 - protein, 11 aa, BK virus
GGLTFGNLQQG

SEQ ID NO: 12199 - protein, 11 aa, BK virus
GLTFGNLQQGL

SEQ ID NO: 12200 - protein, 11 aa, BK virus
LTFGNLQQGLK

SEQ ID NO: 12201 - protein, 11 aa, BK virus
TFGNLQQGLKY

SEQ ID NO: 12202 - protein, 11 aa, BK virus
FGNLQQGLKYL

SEQ ID NO: 12203 - protein, 11 aa, BK virus
GNLQQGLKYLR

SEQ ID NO: 12204 - protein, 11 aa, BK virus
NLQQGLKYLRL

SEQ ID NO: 12205 - protein, 11 aa, BK virus
LQQGLKYLRLG

SEQ ID NO: 12206 - protein, 11 aa, BK virus
QQGLKYLRLGK

SEQ ID NO: 12207 - protein, 11 aa, BK virus
QGLKYLRLGKS

SEQ ID NO: 12208 - protein, 11 aa, BK virus
GLKYLRLGKSI

SEQ ID NO: 12209 - protein, 11 aa, BK virus
LKYLRLGKSIV

SEQ ID NO: 12210 - protein, 11 aa, BK virus
KYLRLGKSIVI

SEQ ID NO: 12211 - protein, 11 aa, BK virus
YLRLGKSIVIG

SEQ ID NO: 12212 - protein, 11 aa, BK virus
LRLGKSIVIGI

SEQ ID NO: 12213 - protein, 11 aa, BK virus
RLGKSIVIGIQ

SEQ ID NO: 12214 - protein, 11 aa, BK virus
LGKSIVIGIQC

SEQ ID NO: 12215 - protein, 11 aa, BK virus
GKSIVIGIQCL

SEQ ID NO: 12216 - protein, 11 aa, BK virus
KSIVIGIQCLI

SEQ ID NO: 12217 - protein, 11 aa, BK virus
SIVIGIQCLIH

SEQ ID NO: 12218 - protein, 11 aa, BK virus
IVIGIQCLIHV

SEQ ID NO: 12219 - protein, 11 aa, BK virus
VIGIQCLIHVQ

SEQ ID NO: 12220 - protein, 11 aa, BK virus
IGIQCLIHVQS

SEQ ID NO: 12221 - protein, 11 aa, BK virus
GIQCLIHVQSL

SEQ ID NO: 12222 - protein, 11 aa, BK virus
IQCLIHVQSLQ

SEQ ID NO: 12223 - protein, 11 aa, BK virus
QCLIHVQSLQF

SEQ ID NO: 12224 - protein, 11 aa, BK virus
CLIHVQSLQFL

SEQ ID NO: 12225 - protein, 11 aa, BK virus
LIHVQSLQFLN

SEQ ID NO: 12226 - protein, 11 aa, BK virus
IHVQSLQFLNP

SEQ ID NO: 12227 - protein, 11 aa, BK virus
HVQSLQFLNPL

SEQ ID NO: 12228 - protein, 11 aa, BK virus
VQSLQFLNPLL

SEQ ID NO: 12229 - protein, 11 aa, BK virus
QSLQFLNPLLL

SEQ ID NO: 12230 - protein, 11 aa, BK virus
YQEYISPCIYY

SEQ ID NO: 12231 - protein, 11 aa, BK virus
QEYISPCIYYI

SEQ ID NO: 12232 - protein, 11 aa, BK virus
EYISPCIYYIS

SEQ ID NO: 12233 - protein, 11 aa, BK virus
YISPCIYYISS

SEQ ID NO: 12234 - protein, 11 aa, BK virus
ISPCIYYISSL

SEQ ID NO: 12235 - protein, 11 aa, BK virus
SPCIYYISSLK

SEQ ID NO: 12236 - protein, 11 aa, BK virus
PCIYYISSLKK

SEQ ID NO: 12237 - protein, 11 aa, BK virus
CIYYISSLKKY

SEQ ID NO: 12238 - protein, 11 aa, BK virus
IYYISSLKKYT

SEQ ID NO: 12239 - protein, 11 aa, BK virus
YYISSLKKYTY

SEQ ID NO: 12240 - protein, 11 aa, BK virus
YISSLKKYTYL

SEQ ID NO: 12241 - protein, 11 aa, BK virus
ISSLKKYTYLS

SEQ ID NO: 12242 - protein, 11 aa, BK virus
SSLKKYTYLSQ

SEQ ID NO: 12243 - protein, 11 aa, BK virus
SLKKYTYLSQN

SEQ ID NO: 12244 - protein, 11 aa, BK virus
LKKYTYLSQNP

SEQ ID NO: 12245 - protein, 11 aa, BK virus
KKYTYLSQNPA

SEQ ID NO: 12246 - protein, 11 aa, BK virus
KYTYLSQNPAF

SEQ ID NO: 12247 - protein, 11 aa, BK virus
YTYLSQNPAFP

SEQ ID NO: 12248 - protein, 11 aa, BK virus
TYLSQNPAFPS

SEQ ID NO: 12249 - protein, 11 aa, BK virus
YLSQNPAFPSI

SEQ ID NO: 12250 - protein, 11 aa, BK virus
LSQNPAFPSIQ

SEQ ID NO: 12251 - protein, 11 aa, BK virus
SQNPAFPSIQQ

SEQ ID NO: 12252 - protein, 11 aa, BK virus
QNPAFPSIQQF

SEQ ID NO: 12253 - protein, 11 aa, BK virus
IVYQLQNQLQA

SEQ ID NO: 12254 - protein, 11 aa, BK virus
TKLAVATRSFH

SEQ ID NO: 12255 - protein, 11 aa, BK virus
KLAVATRSFHF

SEQ ID NO: 12256 - protein, 11 aa, BK virus
LAVATRSFHFV

SEQ ID NO: 12257 - protein, 11 aa, BK virus
AVATRSFHFVK

SEQ ID NO: 12258 - protein, 11 aa, BK virus
VATRSFHFVKF

SEQ ID NO: 12259 - protein, 11 aa, BK virus
ATRSFHFVKFF

SEQ ID NO: 12260 - protein, 11 aa, BK virus
TRSFHFVKFFF

SEQ ID NO: 12261 - protein, 11 aa, BK virus
RSFHFVKFFFQ

SEQ ID NO: 12262 - protein, 11 aa, BK virus
SFHFVKFFFQV

SEQ ID NO: 12263 - protein, 11 aa, BK virus
FHFVKFFFQVR

SEQ ID NO: 12264 - protein, 11 aa, BK virus
HFVKFFFQVRT

SEQ ID NO: 12265 - protein, 11 aa, BK virus
FVKFFFQVRTL

SEQ ID NO: 12266 - protein, 11 aa, BK virus
VKFFFQVRTLS

SEQ ID NO: 12267 - protein, 11 aa, BK virus
KFFFQVRTLSF

SEQ ID NO: 12268 - protein, 11 aa, BK virus
FFFQVRTLSFV

SEQ ID NO: 12269 - protein, 11 aa, BK virus
FFQVRTLSFVR

SEQ ID NO: 12270 - protein, 11 aa, BK virus
FQVRTLSFVRI

SEQ ID NO: 12271 - protein, 11 aa, BK virus
QVRTLSFVRIF

SEQ ID NO: 12272 - protein, 11 aa, BK virus
VRTLSFVRIFL

SEQ ID NO: 12273 - protein, 11 aa, BK virus
RTLSFVRIFLN

SEQ ID NO: 12274 - protein, 11 aa, BK virus
TLSFVRIFLNI

SEQ ID NO: 12275 - protein, 11 aa, BK virus
LSFVRIFLNIF

SEQ ID NO: 12276 - protein, 11 aa, BK virus
SFVRIFLNIFW

SEQ ID NO: 12277 - protein, 11 aa, BK virus
FVRIFLNIFWA

SEQ ID NO: 12278 - protein, 11 aa, BK virus
PSLVEIFGFFC

SEQ ID NO: 12279 - protein, 11 aa, BK virus
SLVEIFGFFCL

SEQ ID NO: 12280 - protein, 11 aa, BK virus
LVEIFGFFCLN

SEQ ID NO: 12281 - protein, 11 aa, BK virus
VEIFGFFCLNV

SEQ ID NO: 12282 - protein, 11 aa, BK virus
EIFGFFCLNVS

SEQ ID NO: 12283 - protein, 11 aa, BK virus
IFGFFCLNVSF

SEQ ID NO: 12284 - protein, 11 aa, BK virus
FGFFCLNVSFL

SEQ ID NO: 12285 - protein, 11 aa, BK virus
GFFCLNVSFLN

SEQ ID NO: 12286 - protein, 11 aa, BK virus
FFCLNVSFLNL

SEQ ID NO: 12287 - protein, 11 aa, BK virus
FCLNVSFLNLP

SEQ ID NO: 12288 - protein, 11 aa, BK virus
HFHLNNLSNCL

SEQ ID NO: 12289 - protein, 11 aa, BK virus
FHLNNLSNCLN

SEQ ID NO: 12290 - protein, 11 aa, BK virus
HLNNLSNCLNC

SEQ ID NO: 12291 - protein, 11 aa, BK virus
LNNLSNCLNCL

SEQ ID NO: 12292 - protein, 11 aa, BK virus
NNLSNCLNCLF

SEQ ID NO: 12293 - protein, 11 aa, BK virus
NLSNCLNCLFH

SEQ ID NO: 12294 - protein, 11 aa, BK virus
LSNCLNCLFHV

SEQ ID NO: 12295 - protein, 11 aa, BK virus
SNCLNCLFHVL

SEQ ID NO: 12296 - protein, 11 aa, BK virus
NCLNCLFHVLK

SEQ ID NO: 12297 - protein, 11 aa, BK virus
CLNCLFHVLKA

SEQ ID NO: 12298 - protein, 11 aa, BK virus
LNCLFHVLKAN

SEQ ID NO: 12299 - protein, 11 aa, BK virus
NCLFHVLKANP

SEQ ID NO: 12300 - protein, 11 aa, BK virus
CLFHVLKANPL

SEQ ID NO: 12301 - protein, 11 aa, BK virus
LFHVLKANPLI

SEQ ID NO: 12302 - protein, 11 aa, BK virus
FHVLKANPLIQ

SEQ ID NO: 12303 - protein, 11 aa, BK virus
HVLKANPLIQL

SEQ ID NO: 12304 - protein, 11 aa, BK virus
VLKANPLIQLL

SEQ ID NO: 12305 - protein, 11 aa, BK virus
LKANPLIQLLS

SEQ ID NO: 12306 - protein, 11 aa, BK virus
KANPLIQLLSL

SEQ ID NO: 12307 - protein, 11 aa, BK virus
ANPLIQLLSLL

SEQ ID NO: 12308 - protein, 11 aa, BK virus
NPLIQLLSLLH

SEQ ID NO: 12309 - protein, 11 aa, BK virus
PLIQLLSLLHL

SEQ ID NO: 12310 - protein, 11 aa, BK virus
LIQLLSLLHLQ

SEQ ID NO: 12311 - protein, 11 aa, BK virus
IQLLSLLHLQK

SEQ ID NO: 12312 - protein, 11 aa, BK virus
QLLSLLHLQKQ

SEQ ID NO: 12313 - protein, 11 aa, BK virus
LLSLLHLQKQP

SEQ ID NO: 12314 - protein, 11 aa, BK virus
LSLLHLQKQPC

SEQ ID NO: 12315 - protein, 11 aa, BK virus
SLLHLQKQPCT

SEQ ID NO: 12316 - protein, 11 aa, BK virus
LLHLQKQPCTD

SEQ ID NO: 12317 - protein, 11 aa, BK virus
LHLQKQPCTDL

SEQ ID NO: 12318 - protein, 11 aa, BK virus
LHLAQRLAFPW

SEQ ID NO: 12319 - protein, 11 aa, BK virus
HLAQRLAFPWV

SEQ ID NO: 12320 - protein, 11 aa, BK virus
LAQRLAFPWVG

SEQ ID NO: 12321 - protein, 11 aa, BK virus
AQRLAFPWVGL

SEQ ID NO: 12322 - protein, 11 aa, BK virus
QRLAFPWVGLH

SEQ ID NO: 12323 - protein, 11 aa, BK virus
RLAFPWVGLHL

SEQ ID NO: 12324 - protein, 11 aa, BK virus
LAFPWVGLHLR

SEQ ID NO: 12325 - protein, 11 aa, BK virus
AFPWVGLHLRL

SEQ ID NO: 12326 - protein, 11 aa, BK virus
FPWVGLHLRLY

SEQ ID NO: 12327 - protein, 11 aa, BK virus
PWVGLHLRLYH

SEQ ID NO: 12328 - protein, 11 aa, BK virus
WVGLHLRLYHH

SEQ ID NO: 12329 - protein, 11 aa, BK virus
VGLHLRLYHHT

SEQ ID NO: 12330 - protein, 11 aa, BK virus
GLHLRLYHHTN

SEQ ID NO: 12331 - protein, 11 aa, BK virus
LHLRLYHHTNL

SEQ ID NO: 12332 - protein, 11 aa, BK virus
HLRLYHHTNLI

SEQ ID NO: 12333 - protein, 11 aa, BK virus
LRLYHHTNLIT

SEQ ID NO: 12334 - protein, 11 aa, BK virus
RLYHHTNLITL

SEQ ID NO: 12335 - protein, 11 aa, BK virus
LYHHTNLITLQ

SEQ ID NO: 12336 - protein, 11 aa, BK virus
YHHTNLITLQL

SEQ ID NO: 12337 - protein, 11 aa, BK virus
HHTNLITLQLV

SEQ ID NO: 12338 - protein, 11 aa, BK virus
HTNLITLQLVL

SEQ ID NO: 12339 - protein, 11 aa, BK virus
TNLITLQLVLF

SEQ ID NO: 12340 - protein, 11 aa, BK virus
NLITLQLVLFF

SEQ ID NO: 12341 - protein, 11 aa, BK virus
LITLQLVLFFH

SEQ ID NO: 12342 - protein, 11 aa, BK virus
ITLQLVLFFHY

SEQ ID NO: 12343 - protein, 11 aa, BK virus
TLQLVLFFHYQ

SEQ ID NO: 12344 - protein, 11 aa, BK virus
LQLVLFFHYQW

SEQ ID NO: 12345 - protein, 11 aa, BK virus
QLVLFFHYQWD

SEQ ID NO: 12346 - protein, 11 aa, BK virus
LVLFFHYQWDL

SEQ ID NO: 12347 - protein, 11 aa, BK virus
KQYSAKNQILQ

SEQ ID NO: 12348 - protein, 11 aa, BK virus
QYSAKNQILQN

SEQ ID NO: 12349 - protein, 11 aa, BK virus
YSAKNQILQNP

SEQ ID NO: 12350 - protein, 11 aa, BK virus
SAKNQILQNPF

SEQ ID NO: 12351 - protein, 11 aa, BK virus
VANSAAKQHLP

SEQ ID NO: 12352 - protein, 11 aa, BK virus
ANSAAKQHLPY

SEQ ID NO: 12353 - protein, 11 aa, BK virus
NSAAKQHLPYI

SEQ ID NO: 12354 - protein, 11 aa, BK virus
SAAKQHLPYIV

SEQ ID NO: 12355 - protein, 11 aa, BK virus
AAKQHLPYIVL

SEQ ID NO: 12356 - protein, 11 aa, BK virus
AKQHLPYIVLV

SEQ ID NO: 12357 - protein, 11 aa, BK virus
KQHLPYIVLVQ

SEQ ID NO: 12358 - protein, 11 aa, BK virus
QHLPYIVLVQH

SEQ ID NO: 12359 - protein, 11 aa, BK virus
HLPYIVLVQHF

SEQ ID NO: 12360 - protein, 11 aa, BK virus
LPYIVLVQHFH

SEQ ID NO: 12361 - protein, 11 aa, BK virus
PYIVLVQHFHE

SEQ ID NO: 12362 - protein, 11 aa, BK virus
YIVLVQHFHEL

SEQ ID NO: 12363 - protein, 11 aa, BK virus
IVLVQHFHELQ

SEQ ID NO: 12364 - protein, 11 aa, BK virus
VLVQHFHELQI

SEQ ID NO: 12365 - protein, 11 aa, BK virus
LVQHFHELQIL

SEQ ID NO: 12366 - protein, 11 aa, BK virus
VQHFHELQILN

SEQ ID NO: 12367 - protein, 11 aa, BK virus
QHFHELQILNP

SEQ ID NO: 12368 - protein, 11 aa, BK virus
HFHELQILNPF

SEQ ID NO: 12369 - protein, 11 aa, BK virus
FHELQILNPFY

SEQ ID NO: 12370 - protein, 11 aa, BK virus
HELQILNPFYL

SEQ ID NO: 12371 - protein, 11 aa, BK virus
ELQILNPFYLI

SEQ ID NO: 12372 - protein, 11 aa, BK virus
LQILNPFYLIY

SEQ ID NO: 12373 - protein, 11 aa, BK virus
QILNPFYLIYD

SEQ ID NO: 12374 - protein, 11 aa, BK virus
IFLLAFLPWSY

SEQ ID NO: 12375 - protein, 11 aa, BK virus
FLLAFLPWSYE

SEQ ID NO: 12376 - protein, 11 aa, BK virus
LLAFLPWSYEG

SEQ ID NO: 12377 - protein, 11 aa, BK virus
LAFLPWSYEGY

SEQ ID NO: 12378 - protein, 11 aa, BK virus
AFLPWSYEGYL

SEQ ID NO: 12379 - protein, 11 aa, BK virus
FLPWSYEGYLL

SEQ ID NO: 12380 - protein, 11 aa, BK virus
LPWSYEGYLLF

SEQ ID NO: 12381 - protein, 11 aa, BK virus
PWSYEGYLLFF

SEQ ID NO: 12382 - protein, 11 aa, BK virus
LKLYLLLADKY

SEQ ID NO: 12383 - protein, 11 aa, BK virus
KLYLLLADKYF

SEQ ID NO: 12384 - protein, 11 aa, BK virus
LYLLLADKYFF

SEQ ID NO: 12385 - protein, 11 aa, BK virus
YLLLADKYFFD

SEQ ID NO: 12386 - protein, 11 aa, BK virus
LLLADKYFFDF

SEQ ID NO: 12387 - protein, 11 aa, BK virus
LLADKYFFDFY

SEQ ID NO: 12388 - protein, 11 aa, BK virus
LADKYFFDFYF

SEQ ID NO: 12389 - protein, 11 aa, BK virus
ADKYFFDFYFL

SEQ ID NO: 12390 - protein, 11 aa, BK virus
DKYFFDFYFLQ

SEQ ID NO: 12391 - protein, 11 aa, BK virus
KYFFDFYFLQK

SEQ ID NO: 12392 - protein, 11 aa, BK virus
SDKAGLFSDTF

SEQ ID NO: 12393 - protein, 11 aa, BK virus
DKAGLFSDTFY

SEQ ID NO: 12394 - protein, 11 aa, BK virus
KAGLFSDTFYT

SEQ ID NO: 12395 - protein, 11 aa, BK virus
AGLFSDTFYTP

SEQ ID NO: 12396 - protein, 11 aa, BK virus
GLFSDTFYTPL

SEQ ID NO: 12397 - protein, 11 aa, BK virus
LFSDTFYTPLH

SEQ ID NO: 12398 - protein, 11 aa, BK virus
FSDTFYTPLHC

SEQ ID NO: 12399 - protein, 11 aa, BK virus
SDTFYTPLHCI

SEQ ID NO: 12400 - protein, 11 aa, BK virus
DTFYTPLHCIE

SEQ ID NO: 12401 - protein, 11 aa, BK virus
TFYTPLHCIEI

SEQ ID NO: 12402 - protein, 11 aa, BK virus
FYTPLHCIEIL

SEQ ID NO: 12403 - protein, 11 aa, BK virus
YTPLHCIEILN

SEQ ID NO: 12404 - protein, 11 aa, BK virus
TPLHCIEILNT

SEQ ID NO: 12405 - protein, 11 aa, BK virus
PLHCIEILNTY

SEQ ID NO: 12406 - protein, 11 aa, BK virus
LHCIEILNTYL

SEQ ID NO: 12407 - protein, 11 aa, BK virus
HCIEILNTYLI

SEQ ID NO: 12408 - protein, 11 aa, BK virus
CIEILNTYLII

SEQ ID NO: 12409 - protein, 11 aa, BK virus
IEILNTYLIIK

SEQ ID NO: 12410 - protein, 11 aa, BK virus
EILNTYLIIKT

SEQ ID NO: 12411 - protein, 11 aa, BK virus
ILNTYLIIKTH

SEQ ID NO: 12412 - protein, 11 aa, BK virus
LNTYLIIKTHP

SEQ ID NO: 12413 - protein, 11 aa, BK virus
NTYLIIKTHPH

SEQ ID NO: 12414 - protein, 11 aa, BK virus
TYLIIKTHPHT

SEQ ID NO: 12415 - protein, 11 aa, BK virus
YLIIKTHPHTL

SEQ ID NO: 12416 - protein, 11 aa, BK virus
LIIKTHPHTLS

SEQ ID NO: 12417 - protein, 11 aa, BK virus
IIKTHPHTLSL

SEQ ID NO: 12418 - protein, 11 aa, BK virus
IKTHPHTLSLL

SEQ ID NO: 12419 - protein, 11 aa, BK virus
KTHPHTLSLLH

SEQ ID NO: 12420 - protein, 11 aa, BK virus
THPHTLSLLHT

SEQ ID NO: 12421 - protein, 11 aa, BK virus
HPHTLSLLHTQ

SEQ ID NO: 12422 - protein, 11 aa, BK virus
LISKTPALFLQ

SEQ ID NO: 12423 - protein, 11 aa, BK virus
ISKTPALFLQA

SEQ ID NO: 12424 - protein, 11 aa, BK virus
SKTPALFLQAL

SEQ ID NO: 12425 - protein, 11 aa, BK virus
KTPALFLQALL

SEQ ID NO: 12426 - protein, 11 aa, BK virus
TPALFLQALLG

SEQ ID NO: 12427 - protein, 11 aa, BK virus
NHAPLSPLECF

SEQ ID NO: 12428 - protein, 11 aa, BK virus
HAPLSPLECFL

SEQ ID NO: 12429 - protein, 11 aa, BK virus
APLSPLECFLL

SEQ ID NO: 12430 - protein, 11 aa, BK virus
LQKLYVYVELK

SEQ ID NO: 12431 - protein, 11 aa, BK virus
QKLYVYVELKR

SEQ ID NO: 12432 - protein, 11 aa, BK virus
KLYVYVELKRI

SEQ ID NO: 12433 - protein, 11 aa, BK virus
YTQQSRQGFYY

SEQ ID NO: 12434 - protein, 11 aa, BK virus
GLLPFFFFWVV

SEQ ID NO: 12435 - protein, 11 aa, BK virus
LLPFFFFWVVL

SEQ ID NO: 12436 - protein, 11 aa, BK virus
LPFFFFWVVLS

SEQ ID NO: 12437 - protein, 11 aa, BK virus
PFFFFWVVLSV

SEQ ID NO: 12438 - protein, 11 aa, BK virus
FFFFWVVLSVE

SEQ ID NO: 12439 - protein, 11 aa, BK virus
FFFWVVLSVEN

SEQ ID NO: 12440 - protein, 11 aa, BK virus
FFWVVLSVENL

SEQ ID NO: 12441 - protein, 11 aa, BK virus
FWVVLSVENLL

SEQ ID NO: 12442 - protein, 11 aa, BK virus
WVVLSVENLLL

SEQ ID NO: 12443 - protein, 11 aa, BK virus
VVLSVENLLLL

SEQ ID NO: 12444 - protein, 11 aa, BK virus
VLSVENLLLLL

SEQ ID NO: 12445 - protein, 11 aa, BK virus
LSVENLLLLLH

SEQ ID NO: 12446 - protein, 11 aa, BK virus
SVENLLLLLHH

SEQ ID NO: 12447 - protein, 11 aa, BK virus
VENLLLLLHHW

SEQ ID NO: 12448 - protein, 11 aa, BK virus
ENLLLLLHHWQ

SEQ ID NO: 12449 - protein, 11 aa, BK virus
NLLLLLHHWQT

SEQ ID NO: 12450 - protein, 11 aa, BK virus
LLLLLHHWQTY

SEQ ID NO: 12451 - protein, 11 aa, BK virus
LLLLHHWQTYL

SEQ ID NO: 12452 - protein, 11 aa, BK virus
LLLHHWQTYLH

SEQ ID NO: 12453 - protein, 11 aa, BK virus
LLHHWQTYLHG

SEQ ID NO: 12454 - protein, 11 aa, BK virus
LHHWQTYLHGK

SEQ ID NO: 12455 - protein, 11 aa, BK virus
HHWQTYLHGKI

SEQ ID NO: 12456 - protein, 11 aa, BK virus
HWQTYLHGKIN

SEQ ID NO: 12457 - protein, 11 aa, BK virus
WQTYLHGKINL

SEQ ID NO: 12458 - protein, 11 aa, BK virus
QTYLHGKINLH

SEQ ID NO: 12459 - protein, 11 aa, BK virus
TYLHGKINLHP

SEQ ID NO: 12460 - protein, 11 aa, BK virus
YLHGKINLHPI

SEQ ID NO: 12461 - protein, 11 aa, BK virus
LHGKINLHPIF

SEQ ID NO: 12462 - protein, 11 aa, BK virus
HGKINLHPIFH

SEQ ID NO: 12463 - protein, 11 aa, BK virus
RNSTRTPTLLF

SEQ ID NO: 12464 - protein, 11 aa, BK virus
NSTRTPTLLFH

SEQ ID NO: 12465 - protein, 11 aa, BK virus
STRTPTLLFHR

SEQ ID NO: 12466 - protein, 11 aa, BK virus
TRTPTLLFHRL

SEQ ID NO: 12467 - protein, 11 aa, BK virus
RTPTLLFHRLA

SEQ ID NO: 12468 - protein, 11 aa, BK virus
TPTLLFHRLAP

SEQ ID NO: 12469 - protein, 11 aa, BK virus
PTLLFHRLAPI

SEQ ID NO: 12470 - protein, 11 aa, BK virus
TLLFHRLAPIK

SEQ ID NO: 12471 - protein, 11 aa, BK virus
LLFHRLAPIKK

SEQ ID NO: 12472 - protein, 11 aa, BK virus
LFHRLAPIKKI

SEQ ID NO: 12473 - protein, 11 aa, BK virus
FHRLAPIKKII

SEQ ID NO: 12474 - protein, 11 aa, BK virus
HRLAPIKKIIT

SEQ ID NO: 12475 - protein, 11 aa, BK virus
GLLIFYYLSKY

SEQ ID NO: 12476 - protein, 11 aa, BK virus
LLIFYYLSKYK

SEQ ID NO: 12477 - protein, 11 aa, BK virus
LIFYYLSKYKL

SEQ ID NO: 12478 - protein, 11 aa, BK virus
IFYYLSKYKLV

SEQ ID NO: 12479 - protein, 11 aa, BK virus
FYYLSKYKLVT

SEQ ID NO: 12480 - protein, 11 aa, BK virus
YYLSKYKLVTL

SEQ ID NO: 12481 - protein, 11 aa, BK virus
YLSKYKLVTLK

SEQ ID NO: 12482 - protein, 11 aa, BK virus
LSKYKLVTLKL

SEQ ID NO: 12483 - protein, 11 aa, BK virus
ISEGSFSNYLD

SEQ ID NO: 12484 - protein, 11 aa, BK virus
SEGSFSNYLDP

SEQ ID NO: 12485 - protein, 11 aa, BK virus
EGSFSNYLDPP

SEQ ID NO: 12486 - protein, 11 aa, BK virus
GSFSNYLDPPL

SEQ ID NO: 12487 - protein, 11 aa, BK virus
SFSNYLDPPLQ

SEQ ID NO: 12488 - protein, 11 aa, BK virus
FSNYLDPPLQS

SEQ ID NO: 12489 - protein, 11 aa, BK virus
SNYLDPPLQSF

SEQ ID NO: 12490 - protein, 11 aa, BK virus
NYLDPPLQSFF

SEQ ID NO: 12491 - protein, 11 aa, BK virus
YLDPPLQSFFS

SEQ ID NO: 12492 - protein, 11 aa, BK virus
AKPLCEAVNAV

SEQ ID NO: 12493 - protein, 11 aa, BK virus
KPLCEAVNAVA

SEQ ID NO: 12494 - protein, 11 aa, BK virus
PLCEAVNAVAI

SEQ ID NO: 12495 - protein, 11 aa, BK virus
LCEAVNAVAIY

SEQ ID NO: 12496 - protein, 11 aa, BK virus
CEAVNAVAIYP

SEQ ID NO: 12497 - protein, 11 aa, BK virus
EAVNAVAIYPN

SEQ ID NO: 12498 - protein, 11 aa, BK virus
AVNAVAIYPNQ

SEQ ID NO: 12499 - protein, 11 aa, BK virus
VNAVAIYPNQG

SEQ ID NO: 12500 - protein, 11 aa, BK virus
NAVAIYPNQGL

SEQ ID NO: 12501 - protein, 11 aa, BK virus
AVAIYPNQGLF

SEQ ID NO: 12502 - protein, 11 aa, BK virus
VAIYPNQGLFS

SEQ ID NO: 12503 - protein, 11 aa, BK virus
HARAVHRRLFG

SEQ ID NO: 12504 - protein, 11 aa, BK virus
ARAVHRRLFGT

SEQ ID NO: 12505 - protein, 11 aa, BK virus
RAVHRRLFGTN

SEQ ID NO: 12506 - protein, 11 aa, BK virus
AVHRRLFGTNR

SEQ ID NO: 12507 - protein, 11 aa, BK virus
VHRRLFGTNRP

SEQ ID NO: 12508 - protein, 11 aa, BK virus
HRRLFGTNRPF

SEQ ID NO: 12509 - protein, 11 aa, BK virus
RRLFGTNRPFL

SEQ ID NO: 12510 - protein, 11 aa, BK virus
RLFGTNRPFLA

SEQ ID NO: 12511 - protein, 11 aa, BK virus
LFGTNRPFLAV

SEQ ID NO: 12512 - protein, 11 aa, BK virus
FGTNRPFLAVQ

SEQ ID NO: 12513 - protein, 11 aa, BK virus
GTNRPFLAVQG

SEQ ID NO: 12514 - protein, 11 aa, BK virus
TNRPFLAVQGI

SEQ ID NO: 12515 - protein, 11 aa, BK virus
NRPFLAVQGIW

SEQ ID NO: 12516 - protein, 11 aa, BK virus
RPFLAVQGIWA

SEQ ID NO: 12517 - protein, 11 aa, BK virus
PFLAVQGIWAK

SEQ ID NO: 12518 - protein, 11 aa, BK virus
FLAVQGIWAKR

SEQ ID NO: 12519 - protein, 11 aa, BK virus
LAVQGIWAKRK

SEQ ID NO: 12520 - protein, 11 aa, BK virus
AVQGIWAKRKI

SEQ ID NO: 12521 - protein, 11 aa, BK virus
VQGIWAKRKIS

SEQ ID NO: 12522 - protein, 11 aa, BK virus
QGIWAKRKIST

SEQ ID NO: 12523 - protein, 11 aa, BK virus
GIWAKRKISTN

SEQ ID NO: 12524 - protein, 11 aa, BK virus
IWAKRKISTNL

SEQ ID NO: 12525 - protein, 11 aa, BK virus
ATPGSKIRLMS

SEQ ID NO: 12526 - protein, 11 aa, BK virus
TPGSKIRLMSY

SEQ ID NO: 12527 - protein, 11 aa, BK virus
PGSKIRLMSYL

SEQ ID NO: 12528 - protein, 11 aa, BK virus
GSKIRLMSYLY

SEQ ID NO: 12529 - protein, 11 aa, BK virus
SKIRLMSYLYI

SEQ ID NO: 12530 - protein, 11 aa, BK virus
KIRLMSYLYIL

SEQ ID NO: 12531 - protein, 11 aa, BK virus
IRLMSYLYILL

SEQ ID NO: 12532 - protein, 11 aa, BK virus
RLMSYLYILLH

SEQ ID NO: 12533 - protein, 11 aa, BK virus
LMSYLYILLHF

SEQ ID NO: 12534 - protein, 11 aa, BK virus
MSYLYILLHFF

SEQ ID NO: 12535 - protein, 11 aa, BK virus
SYLYILLHFFI

SEQ ID NO: 12536 - protein, 11 aa, BK virus
YLYILLHFFIQ

SEQ ID NO: 12537 - protein, 11 aa, BK virus
LYILLHFFIQS

SEQ ID NO: 12538 - protein, 11 aa, BK virus
YILLHFFIQSI

SEQ ID NO: 12539 - protein, 11 aa, BK virus
ILLHFFIQSIH

SEQ ID NO: 12540 - protein, 11 aa, BK virus
LLHFFIQSIHS

SEQ ID NO: 12541 - protein, 11 aa, BK virus
LHFFIQSIHSL

SEQ ID NO: 12542 - protein, 11 aa, BK virus
HFFIQSIHSLH

SEQ ID NO: 12543 - protein, 11 aa, BK virus
FFIQSIHSLHF

SEQ ID NO: 12544 - protein, 11 aa, BK virus
FIQSIHSLHFI

SEQ ID NO: 12545 - protein, 11 aa, BK virus
IQSIHSLHFIL

SEQ ID NO: 12546 - protein, 11 aa, BK virus
QSIHSLHFILV

SEQ ID NO: 12547 - protein, 11 aa, BK virus
SIHSLHFILVA

SEQ ID NO: 12548 - protein, 11 aa, BK virus
IHSLHFILVAP

SEQ ID NO: 12549 - protein, 11 aa, BK virus
HSLHFILVAPF

SEQ ID NO: 12550 - protein, 11 aa, BK virus
SLHFILVAPFV

SEQ ID NO: 12551 - protein, 11 aa, BK virus
LHFILVAPFVR

SEQ ID NO: 12552 - protein, 11 aa, BK virus
HFILVAPFVRV

SEQ ID NO: 12553 - protein, 11 aa, BK virus
FILVAPFVRVK

SEQ ID NO: 12554 - protein, 11 aa, BK virus
ILVAPFVRVKF

SEQ ID NO: 12555 - protein, 11 aa, BK virus
LVAPFVRVKFL

SEQ ID NO: 12556 - protein, 11 aa, BK virus
VAPFVRVKFLT

SEQ ID NO: 12557 - protein, 11 aa, BK virus
APFVRVKFLTL

SEQ ID NO: 12558 - protein, 11 aa, BK virus
PFVRVKFLTLP

SEQ ID NO: 12559 - protein, 11 aa, BK virus
GKISPGSSFKA

SEQ ID NO: 12560 - protein, 11 aa, BK virus
KVHELHGFFPV

SEQ ID NO: 12561 - protein, 11 aa, BK virus
VHELHGFFPVK

SEQ ID NO: 12562 - protein, 11 aa, BK virus
HELHGFFPVKN

SEQ ID NO: 12563 - protein, 11 aa, BK virus
ELHGFFPVKNF

SEQ ID NO: 12564 - protein, 11 aa, BK virus
LHGFFPVKNFI

SEQ ID NO: 12565 - protein, 11 aa, BK virus
HGFFPVKNFIH

SEQ ID NO: 12566 - protein, 8 aa, BK virus
MDKVLNRE

SEQ ID NO: 12567 - protein, 8 aa, BK virus
DKVLNREE

SEQ ID NO: 12568 - protein, 8 aa, BK virus
KVLNREES

SEQ ID NO: 12569 - protein, 8 aa, BK virus
VLNREESM

SEQ ID NO: 12570 - protein, 8 aa, BK virus
LNREESME

SEQ ID NO: 12571 - protein, 8 aa, BK virus
NREESMEL

SEQ ID NO: 12572 - protein, 8 aa, BK virus
REESMELM

SEQ ID NO: 12573 - protein, 8 aa, BK virus
EESMELMD

SEQ ID NO: 12574 - protein, 8 aa, BK virus
ESMELMDL

SEQ ID NO: 12575 - protein, 8 aa, BK virus
SMELMDLL

SEQ ID NO: 12576 - protein, 8 aa, BK virus
MELMDLLG

SEQ ID NO: 12577 - protein, 8 aa, BK virus
ELMDLLGL

SEQ ID NO: 12578 - protein, 8 aa, BK virus
LMDLLGLE

SEQ ID NO: 12579 - protein, 8 aa, BK virus
MDLLGLER

SEQ ID NO: 12580 - protein, 8 aa, BK virus
DLLGLERA

SEQ ID NO: 12581 - protein, 8 aa, BK virus
LLGLERAA

SEQ ID NO: 12582 - protein, 8 aa, BK virus
LGLERAAW

SEQ ID NO: 12583 - protein, 8 aa, BK virus
GLERAAWG

SEQ ID NO: 12584 - protein, 8 aa, BK virus
LERAAWGN

SEQ ID NO: 12585 - protein, 8 aa, BK virus
ERAAWGNL

SEQ ID NO: 12586 - protein, 8 aa, BK virus
RAAWGNLP

SEQ ID NO: 12587 - protein, 8 aa, BK virus
AAWGNLPL

SEQ ID NO: 12588 - protein, 8 aa, BK virus
AWGNLPLM

SEQ ID NO: 12589 - protein, 8 aa, BK virus
WGNLPLMR

SEQ ID NO: 12590 - protein, 8 aa, BK virus
GNLPLMRK

SEQ ID NO: 12591 - protein, 8 aa, BK virus
NLPLMRKA

SEQ ID NO: 12592 - protein, 8 aa, BK virus
LPLMRKAY

SEQ ID NO: 12593 - protein, 8 aa, BK virus
PLMRKAYL

SEQ ID NO: 12594 - protein, 8 aa, BK virus
LMRKAYLR

SEQ ID NO: 12595 - protein, 8 aa, BK virus
MRKAYLRK

SEQ ID NO: 12596 - protein, 8 aa, BK virus
RKAYLRKC

SEQ ID NO: 12597 - protein, 8 aa, BK virus
KAYLRKCK

SEQ ID NO: 12598 - protein, 8 aa, BK virus
AYLRKCKE

SEQ ID NO: 12599 - protein, 8 aa, BK virus
YLRKCKEF

SEQ ID NO: 12600 - protein, 8 aa, BK virus
LRKCKEFH

SEQ ID NO: 12601 - protein, 8 aa, BK virus
RKCKEFHP

SEQ ID NO: 12602 - protein, 8 aa, BK virus
KCKEFHPD

SEQ ID NO: 12603 - protein, 8 aa, BK virus
CKEFHPDK

SEQ ID NO: 12604 - protein, 8 aa, BK virus
KEFHPDKG

SEQ ID NO: 12605 - protein, 8 aa, BK virus
EFHPDKGG

SEQ ID NO: 12606 - protein, 8 aa, BK virus
FHPDKGGD

SEQ ID NO: 12607 - protein, 8 aa, BK virus
HPDKGGDE

SEQ ID NO: 12608 - protein, 8 aa, BK virus
PDKGGDED

SEQ ID NO: 12609 - protein, 8 aa, BK virus
DKGGDEDK

SEQ ID NO: 12610 - protein, 8 aa, BK virus
KGGDEDKM

SEQ ID NO: 12611 - protein, 8 aa, BK virus
GGDEDKMK

SEQ ID NO: 12612 - protein, 8 aa, BK virus
GDEDKMKR

SEQ ID NO: 12613 - protein, 8 aa, BK virus
DEDKMKRM

SEQ ID NO: 12614 - protein, 8 aa, BK virus
EDKMKRMN

SEQ ID NO: 12615 - protein, 8 aa, BK virus
DKMKRMNT

SEQ ID NO: 12616 - protein, 8 aa, BK virus
KMKRMNTL

SEQ ID NO: 12617 - protein, 8 aa, BK virus
MKRMNTLY

SEQ ID NO: 12618 - protein, 8 aa, BK virus
KRMNTLYK

SEQ ID NO: 12619 - protein, 8 aa, BK virus
RMNTLYKK

SEQ ID NO: 12620 - protein, 8 aa, BK virus
MNTLYKKM

SEQ ID NO: 12621 - protein, 8 aa, BK virus
NTLYKKME

SEQ ID NO: 12622 - protein, 8 aa, BK virus
TLYKKMEQ

SEQ ID NO: 12623 - protein, 8 aa, BK virus
LYKKMEQD

SEQ ID NO: 12624 - protein, 8 aa, BK virus
YKKMEQDV

SEQ ID NO: 12625 - protein, 8 aa, BK virus
KKMEQDVK

SEQ ID NO: 12626 - protein, 8 aa, BK virus
KMEQDVKV

SEQ ID NO: 12627 - protein, 8 aa, BK virus
MEQDVKVA

SEQ ID NO: 12628 - protein, 8 aa, BK virus
EQDVKVAH

SEQ ID NO: 12629 - protein, 8 aa, BK virus
QDVKVAHQ

SEQ ID NO: 12630 - protein, 8 aa, BK virus
DVKVAHQP

SEQ ID NO: 12631 - protein, 8 aa, BK virus
VKVAHQPD

SEQ ID NO: 12632 - protein, 8 aa, BK virus
KVAHQPDF

SEQ ID NO: 12633 - protein, 8 aa, BK virus
VAHQPDFG

SEQ ID NO: 12634 - protein, 8 aa, BK virus
AHQPDFGT

SEQ ID NO: 12635 - protein, 8 aa, BK virus
HQPDFGTW

SEQ ID NO: 12636 - protein, 8 aa, BK virus
QPDFGTWS

SEQ ID NO: 12637 - protein, 8 aa, BK virus
PDFGTWSS

SEQ ID NO: 12638 - protein, 8 aa, BK virus
DFGTWSSS

SEQ ID NO: 12639 - protein, 8 aa, BK virus
FGTWSSSE

SEQ ID NO: 12640 - protein, 8 aa, BK virus
GTWSSSEV

SEQ ID NO: 12641 - protein, 8 aa, BK virus
TWSSSEVC

SEQ ID NO: 12642 - protein, 8 aa, BK virus
WSSSEVCA

SEQ ID NO: 12643 - protein, 8 aa, BK virus
SSSEVCAD

SEQ ID NO: 12644 - protein, 8 aa, BK virus
SSEVCADF

SEQ ID NO: 12645 - protein, 8 aa, BK virus
SEVCADFP

SEQ ID NO: 12646 - protein, 8 aa, BK virus
EVCADFPL

SEQ ID NO: 12647 - protein, 8 aa, BK virus
VCADFPLC

SEQ ID NO: 12648 - protein, 8 aa, BK virus
CADFPLCP

SEQ ID NO: 12649 - protein, 8 aa, BK virus
ADFPLCPD

SEQ ID NO: 12650 - protein, 8 aa, BK virus
DFPLCPDT

SEQ ID NO: 12651 - protein, 8 aa, BK virus
FPLCPDTL

SEQ ID NO: 12652 - protein, 8 aa, BK virus
PLCPDTLY

SEQ ID NO: 12653 - protein, 8 aa, BK virus
LCPDTLYC

SEQ ID NO: 12654 - protein, 8 aa, BK virus
CPDTLYCK

SEQ ID NO: 12655 - protein, 8 aa, BK virus
PDTLYCKE

SEQ ID NO: 12656 - protein, 8 aa, BK virus
DTLYCKEW

SEQ ID NO: 12657 - protein, 8 aa, BK virus
TLYCKEWP

SEQ ID NO: 12658 - protein, 8 aa, BK virus
LYCKEWPI

SEQ ID NO: 12659 - protein, 8 aa, BK virus
YCKEWPIC

SEQ ID NO: 12660 - protein, 8 aa, BK virus
CKEWPICS

SEQ ID NO: 12661 - protein, 8 aa, BK virus
KEWPICSK

SEQ ID NO: 12662 - protein, 8 aa, BK virus
EWPICSKK

SEQ ID NO: 12663 - protein, 8 aa, BK virus
WPICSKKP

SEQ ID NO: 12664 - protein, 8 aa, BK virus
PICSKKPS

SEQ ID NO: 12665 - protein, 8 aa, BK virus
ICSKKPSV

SEQ ID NO: 12666 - protein, 8 aa, BK virus
CSKKPSVH

SEQ ID NO: 12667 - protein, 8 aa, BK virus
SKKPSVHC

SEQ ID NO: 12668 - protein, 8 aa, BK virus
KKPSVHCP

SEQ ID NO: 12669 - protein, 8 aa, BK virus
KPSVHCPC

SEQ ID NO: 12670 - protein, 8 aa, BK virus
PSVHCPCM

SEQ ID NO: 12671 - protein, 8 aa, BK virus
SVHCPCML

SEQ ID NO: 12672 - protein, 8 aa, BK virus
VHCPCMLC

SEQ ID NO: 12673 - protein, 8 aa, BK virus
HCPCMLCQ

SEQ ID NO: 12674 - protein, 8 aa, BK virus
CPCMLCQL

SEQ ID NO: 12675 - protein, 8 aa, BK virus
PCMLCQLR

SEQ ID NO: 12676 - protein, 8 aa, BK virus
CMLCQLRL

SEQ ID NO: 12677 - protein, 8 aa, BK virus
MLCQLRLR

SEQ ID NO: 12678 - protein, 8 aa, BK virus
LCQLRLRH

SEQ ID NO: 12679 - protein, 8 aa, BK virus
CQLRLRHL

SEQ ID NO: 12680 - protein, 8 aa, BK virus
QLRLRHLN

SEQ ID NO: 12681 - protein, 8 aa, BK virus
LRLRHLNR

SEQ ID NO: 12682 - protein, 8 aa, BK virus
RLRHLNRK

SEQ ID NO: 12683 - protein, 8 aa, BK virus
LRHLNRKF

SEQ ID NO: 12684 - protein, 8 aa, BK virus
RHLNRKFL

SEQ ID NO: 12685 - protein, 8 aa, BK virus
HLNRKFLR

SEQ ID NO: 12686 - protein, 8 aa, BK virus
LNRKFLRK

SEQ ID NO: 12687 - protein, 8 aa, BK virus
NRKFLRKE

SEQ ID NO: 12688 - protein, 8 aa, BK virus
RKFLRKEP

SEQ ID NO: 12689 - protein, 8 aa, BK virus
KFLRKEPL

SEQ ID NO: 12690 - protein, 8 aa, BK virus
FLRKEPLV

SEQ ID NO: 12691 - protein, 8 aa, BK virus
LRKEPLVW

SEQ ID NO: 12692 - protein, 8 aa, BK virus
RKEPLVWI

SEQ ID NO: 12693 - protein, 8 aa, BK virus
KEPLVWID

SEQ ID NO: 12694 - protein, 8 aa, BK virus
EPLVWIDC

SEQ ID NO: 12695 - protein, 8 aa, BK virus
PLVWIDCY

SEQ ID NO: 12696 - protein, 8 aa, BK virus
LVWIDCYC

SEQ ID NO: 12697 - protein, 8 aa, BK virus
VWIDCYCI

SEQ ID NO: 12698 - protein, 8 aa, BK virus
WIDCYCID

SEQ ID NO: 12699 - protein, 8 aa, BK virus
IDCYCIDC

SEQ ID NO: 12700 - protein, 8 aa, BK virus
DCYCIDCF

SEQ ID NO: 12701 - protein, 8 aa, BK virus
CYCIDCFT

SEQ ID NO: 12702 - protein, 8 aa, BK virus
YCIDCFTQ

SEQ ID NO: 12703 - protein, 8 aa, BK virus
CIDCFTQW

SEQ ID NO: 12704 - protein, 8 aa, BK virus
IDCFTQWF

SEQ ID NO: 12705 - protein, 8 aa, BK virus
DCFTQWFG

SEQ ID NO: 12706 - protein, 8 aa, BK virus
CFTQWFGL

SEQ ID NO: 12707 - protein, 8 aa, BK virus
FTQWFGLD

SEQ ID NO: 12708 - protein, 8 aa, BK virus
TQWFGLDL

SEQ ID NO: 12709 - protein, 8 aa, BK virus
QWFGLDLT

SEQ ID NO: 12710 - protein, 8 aa, BK virus
WFGLDLTE

SEQ ID NO: 12711 - protein, 8 aa, BK virus
FGLDLTEE

SEQ ID NO: 12712 - protein, 8 aa, BK virus
GLDLTEET

SEQ ID NO: 12713 - protein, 8 aa, BK virus
LDLTEETL

SEQ ID NO: 12714 - protein, 8 aa, BK virus
DLTEETLQ

SEQ ID NO: 12715 - protein, 8 aa, BK virus
LTEETLQW

SEQ ID NO: 12716 - protein, 8 aa, BK virus
TEETLQWW

SEQ ID NO: 12717 - protein, 8 aa, BK virus
EETLQWWV

SEQ ID NO: 12718 - protein, 8 aa, BK virus
ETLQWWVQ

SEQ ID NO: 12719 - protein, 8 aa, BK virus
TLQWWVQI

SEQ ID NO: 12720 - protein, 8 aa, BK virus
LQWWVQII

SEQ ID NO: 12721 - protein, 8 aa, BK virus
QWWVQIIG

SEQ ID NO: 12722 - protein, 8 aa, BK virus
WWVQIIGE

SEQ ID NO: 12723 - protein, 8 aa, BK virus
WVQIIGET

SEQ ID NO: 12724 - protein, 8 aa, BK virus
VQIIGETP

SEQ ID NO: 12725 - protein, 8 aa, BK virus
QIIGETPF

SEQ ID NO: 12726 - protein, 8 aa, BK virus
IIGETPFR

SEQ ID NO: 12727 - protein, 8 aa, BK virus
IGETPFRD

SEQ ID NO: 12728 - protein, 8 aa, BK virus
GETPFRDL

SEQ ID NO: 12729 - protein, 8 aa, BK virus
ETPFRDLK

SEQ ID NO: 12730 - protein, 8 aa, BK virus
TPFRDLKL

SEQ ID NO: 12731 - protein, 8 aa, BK virus
KALSNYFF

SEQ ID NO: 12732 - protein, 8 aa, BK virus
ALSNYFFY

SEQ ID NO: 12733 - protein, 8 aa, BK virus
LSNYFFYR

SEQ ID NO: 12734 - protein, 8 aa, BK virus
SNYFFYRC

SEQ ID NO: 12735 - protein, 8 aa, BK virus
NYFFYRCQ

SEQ ID NO: 12736 - protein, 8 aa, BK virus
YFFYRCQP

SEQ ID NO: 12737 - protein, 8 aa, BK virus
FFYRCQPM

SEQ ID NO: 12738 - protein, 8 aa, BK virus
FYRCQPME

SEQ ID NO: 12739 - protein, 8 aa, BK virus
YRCQPMEQ

SEQ ID NO: 12740 - protein, 8 aa, BK virus
RCQPMEQK

SEQ ID NO: 12741 - protein, 8 aa, BK virus
CQPMEQKS

SEQ ID NO: 12742 - protein, 8 aa, BK virus
QPMEQKSG

SEQ ID NO: 12743 - protein, 8 aa, BK virus
PMEQKSGS

SEQ ID NO: 12744 - protein, 8 aa, BK virus
MEQKSGSP

SEQ ID NO: 12745 - protein, 8 aa, BK virus
EQKSGSPG

SEQ ID NO: 12746 - protein, 8 aa, BK virus
QKSGSPGG

SEQ ID NO: 12747 - protein, 8 aa, BK virus
KSGSPGGV

SEQ ID NO: 12748 - protein, 8 aa, BK virus
SGSPGGVP

SEQ ID NO: 12749 - protein, 8 aa, BK virus
GSPGGVPL

SEQ ID NO: 12750 - protein, 8 aa, BK virus
SPGGVPLM

SEQ ID NO: 12751 - protein, 8 aa, BK virus
PGGVPLMK

SEQ ID NO: 12752 - protein, 8 aa, BK virus
GGVPLMKN

SEQ ID NO: 12753 - protein, 8 aa, BK virus
GVPLMKNG

SEQ ID NO: 12754 - protein, 8 aa, BK virus
VPLMKNGM

SEQ ID NO: 12755 - protein, 8 aa, BK virus
PLMKNGMK

SEQ ID NO: 12756 - protein, 8 aa, BK virus
LMKNGMKI

SEQ ID NO: 12757 - protein, 8 aa, BK virus
MKNGMKIY

SEQ ID NO: 12758 - protein, 8 aa, BK virus
KNGMKIYF

SEQ ID NO: 12759 - protein, 8 aa, BK virus
NGMKIYFA

SEQ ID NO: 12760 - protein, 8 aa, BK virus
GMKIYFAM

SEQ ID NO: 12761 - protein, 8 aa, BK virus
MKIYFAMK

SEQ ID NO: 12762 - protein, 8 aa, BK virus
KIYFAMKI

SEQ ID NO: 12763 - protein, 8 aa, BK virus
IYFAMKIC

SEQ ID NO: 12764 - protein, 8 aa, BK virus
YFAMKICL

SEQ ID NO: 12765 - protein, 8 aa, BK virus
FAMKICLP

SEQ ID NO: 12766 - protein, 8 aa, BK virus
AMKICLPV

SEQ ID NO: 12767 - protein, 8 aa, BK virus
MKICLPVM

SEQ ID NO: 12768 - protein, 8 aa, BK virus
KICLPVMK

SEQ ID NO: 12769 - protein, 8 aa, BK virus
ICLPVMKK

SEQ ID NO: 12770 - protein, 8 aa, BK virus
CLPVMKKQ

SEQ ID NO: 12771 - protein, 8 aa, BK virus
LPVMKKQQ

SEQ ID NO: 12772 - protein, 8 aa, BK virus
PVMKKQQQ

SEQ ID NO: 12773 - protein, 8 aa, BK virus
VMKKQQQI

SEQ ID NO: 12774 - protein, 8 aa, BK virus
MKKQQQIL

SEQ ID NO: 12775 - protein, 8 aa, BK virus
KKQQQILN

SEQ ID NO: 12776 - protein, 8 aa, BK virus
KQQQILNT

SEQ ID NO: 12777 - protein, 8 aa, BK virus
QQQILNTQ

SEQ ID NO: 12778 - protein, 8 aa, BK virus
QQILNTQH

SEQ ID NO: 12779 - protein, 8 aa, BK virus
QILNTQHH

SEQ ID NO: 12780 - protein, 8 aa, BK virus
ILNTQHHP

SEQ ID NO: 12781 - protein, 8 aa, BK virus
LNTQHHPK

SEQ ID NO: 12782 - protein, 8 aa, BK virus
NTQHHPKK

SEQ ID NO: 12783 - protein, 8 aa, BK virus
TQHHPKKK

SEQ ID NO: 12784 - protein, 8 aa, BK virus
QHHPKKKE

SEQ ID NO: 12785 - protein, 8 aa, BK virus
HHPKKKER

SEQ ID NO: 12786 - protein, 8 aa, BK virus
KTLKTFPL

SEQ ID NO: 12787 - protein, 8 aa, BK virus
TLKTFPLI

SEQ ID NO: 12788 - protein, 8 aa, BK virus
LKTFPLIY

SEQ ID NO: 12789 - protein, 8 aa, BK virus
KTFPLIYT

SEQ ID NO: 12790 - protein, 8 aa, BK virus
TFPLIYTS

SEQ ID NO: 12791 - protein, 8 aa, BK virus
FPLIYTSF

SEQ ID NO: 12792 - protein, 8 aa, BK virus
PLIYTSFL

SEQ ID NO: 12793 - protein, 8 aa, BK virus
LIYTSFLV

SEQ ID NO: 12794 - protein, 8 aa, BK virus
IYTSFLVK

SEQ ID NO: 12795 - protein, 8 aa, BK virus
YTSFLVKL

SEQ ID NO: 12796 - protein, 8 aa, BK virus
TSFLVKLY

SEQ ID NO: 12797 - protein, 8 aa, BK virus
SFLVKLYL

SEQ ID NO: 12798 - protein, 8 aa, BK virus
FLVKLYLV

SEQ ID NO: 12799 - protein, 8 aa, BK virus
LVKLYLVI

SEQ ID NO: 12800 - protein, 8 aa, BK virus
VKLYLVIE

SEQ ID NO: 12801 - protein, 8 aa, BK virus
KLYLVIEP

SEQ ID NO: 12802 - protein, 8 aa, BK virus
LYLVIEPL

SEQ ID NO: 12803 - protein, 8 aa, BK virus
YLVIEPLP

SEQ ID NO: 12804 - protein, 8 aa, BK virus
LVIEPLPA

SEQ ID NO: 12805 - protein, 8 aa, BK virus
VIEPLPAL

SEQ ID NO: 12806 - protein, 8 aa, BK virus
IEPLPALL

SEQ ID NO: 12807 - protein, 8 aa, BK virus
EPLPALLC

SEQ ID NO: 12808 - protein, 8 aa, BK virus
PLPALLCI

SEQ ID NO: 12809 - protein, 8 aa, BK virus
LPALLCIL

SEQ ID NO: 12810 - protein, 8 aa, BK virus
PALLCILL

SEQ ID NO: 12811 - protein, 8 aa, BK virus
ALLCILLK

SEQ ID NO: 12812 - protein, 8 aa, BK virus
LLCILLKK

SEQ ID NO: 12813 - protein, 8 aa, BK virus
LCILLKKK

SEQ ID NO: 12814 - protein, 8 aa, BK virus
CILLKKKL

SEQ ID NO: 12815 - protein, 8 aa, BK virus
ILLKKKLK

SEQ ID NO: 12816 - protein, 8 aa, BK virus
LLKKKLKF

SEQ ID NO: 12817 - protein, 8 aa, BK virus
LKKKLKFC

SEQ ID NO: 12818 - protein, 8 aa, BK virus
KKKLKFCI

SEQ ID NO: 12819 - protein, 8 aa, BK virus
KKLKFCIK

SEQ ID NO: 12820 - protein, 8 aa, BK virus
KLKFCIKN

SEQ ID NO: 12821 - protein, 8 aa, BK virus
LKFCIKNL

SEQ ID NO: 12822 - protein, 8 aa, BK virus
KFCIKNLW

SEQ ID NO: 12823 - protein, 8 aa, BK virus
FCIKNLWK

SEQ ID NO: 12824 - protein, 8 aa, BK virus
CIKNLWKN

SEQ ID NO: 12825 - protein, 8 aa, BK virus
IKNLWKNI

SEQ ID NO: 12826 - protein, 8 aa, BK virus
KNLWKNIL

SEQ ID NO: 12827 - protein, 8 aa, BK virus
LLLVDTCV

SEQ ID NO: 12828 - protein, 8 aa, BK virus
LLVDTCVL

SEQ ID NO: 12829 - protein, 8 aa, BK virus
LVDTCVLG

SEQ ID NO: 12830 - protein, 8 aa, BK virus
VDTCVLGI

SEQ ID NO: 12831 - protein, 8 aa, BK virus
DTCVLGII

SEQ ID NO: 12832 - protein, 8 aa, BK virus
TCVLGIIL

SEQ ID NO: 12833 - protein, 8 aa, BK virus
CVLGIILY

SEQ ID NO: 12834 - protein, 8 aa, BK virus
VLGIILYS

SEQ ID NO: 12835 - protein, 8 aa, BK virus
LGIILYSF

SEQ ID NO: 12836 - protein, 8 aa, BK virus
LHIDIEFL

SEQ ID NO: 12837 - protein, 8 aa, BK virus
HIDIEFLQ

SEQ ID NO: 12838 - protein, 8 aa, BK virus
IDIEFLQL

SEQ ID NO: 12839 - protein, 8 aa, BK virus
DIEFLQLI

SEQ ID NO: 12840 - protein, 8 aa, BK virus
IEFLQLII

SEQ ID NO: 12841 - protein, 8 aa, BK virus
EFLQLIIS

SEQ ID NO: 12842 - protein, 8 aa, BK virus
FLQLIISV

SEQ ID NO: 12843 - protein, 8 aa, BK virus
LQLIISVK

SEQ ID NO: 12844 - protein, 8 aa, BK virus
QLIISVKS

SEQ ID NO: 12845 - protein, 8 aa, BK virus
LIISVKSC

SEQ ID NO: 12846 - protein, 8 aa, BK virus
IISVKSCV

SEQ ID NO: 12847 - protein, 8 aa, BK virus
ISVKSCVP

SEQ ID NO: 12848 - protein, 8 aa, BK virus
SVKSCVPL

SEQ ID NO: 12849 - protein, 8 aa, BK virus
VKSCVPLV

SEQ ID NO: 12850 - protein, 8 aa, BK virus
KSCVPLVF

SEQ ID NO: 12851 - protein, 8 aa, BK virus
FVRVLIRN

SEQ ID NO: 12852 - protein, 8 aa, BK virus
VRVLIRNT

SEQ ID NO: 12853 - protein, 8 aa, BK virus
RVLIRNTY

SEQ ID NO: 12854 - protein, 8 aa, BK virus
VLIRNTYY

SEQ ID NO: 12855 - protein, 8 aa, BK virus
LIRNTYYI

SEQ ID NO: 12856 - protein, 8 aa, BK virus
IRNTYYIV

SEQ ID NO: 12857 - protein, 8 aa, BK virus
RNTYYIVP

SEQ ID NO: 12858 - protein, 8 aa, BK virus
RSMILAQK

SEQ ID NO: 12859 - protein, 8 aa, BK virus
SMILAQKS

SEQ ID NO: 12860 - protein, 8 aa, BK virus
MILAQKSL

SEQ ID NO: 12861 - protein, 8 aa, BK virus
ILAQKSLK

SEQ ID NO: 12862 - protein, 8 aa, BK virus
LAQKSLKK

SEQ ID NO: 12863 - protein, 8 aa, BK virus
AQKSLKKQ

SEQ ID NO: 12864 - protein, 8 aa, BK virus
QKSLKKQS

SEQ ID NO: 12865 - protein, 8 aa, BK virus
KSLKKQSR

SEQ ID NO: 12866 - protein, 8 aa, BK virus
SLKKQSRC

SEQ ID NO: 12867 - protein, 8 aa, BK virus
LKKQSRCL

SEQ ID NO: 12868 - protein, 8 aa, BK virus
KKQSRCLG

SEQ ID NO: 12869 - protein, 8 aa, BK virus
KQSRCLGN

SEQ ID NO: 12870 - protein, 8 aa, BK virus
RQSVRMCF

SEQ ID NO: 12871 - protein, 8 aa, BK virus
QSVRMCFY

SEQ ID NO: 12872 - protein, 8 aa, BK virus
SVRMCFYY

SEQ ID NO: 12873 - protein, 8 aa, BK virus
RSVKSVRK

SEQ ID NO: 12874 - protein, 8 aa, BK virus
SVKSVRKK

SEQ ID NO: 12875 - protein, 8 aa, BK virus
VKSVRKKT

SEQ ID NO: 12876 - protein, 8 aa, BK virus
KSVRKKTS

SEQ ID NO: 12877 - protein, 8 aa, BK virus
SVRKKTSL

SEQ ID NO: 12878 - protein, 8 aa, BK virus
VRKKTSLI

SEQ ID NO: 12879 - protein, 8 aa, BK virus
RKKTSLIT

SEQ ID NO: 12880 - protein, 8 aa, BK virus
KKTSLITL

SEQ ID NO: 12881 - protein, 8 aa, BK virus
KTSLITLS

SEQ ID NO: 12882 - protein, 8 aa, BK virus
TSLITLSI

SEQ ID NO: 12883 - protein, 8 aa, BK virus
SLITLSIM

SEQ ID NO: 12884 - protein, 8 aa, BK virus
LITLSIMK

SEQ ID NO: 12885 - protein, 8 aa, BK virus
ITLSIMKS

SEQ ID NO: 12886 - protein, 8 aa, BK virus
TLSIMKST

SEQ ID NO: 12887 - protein, 8 aa, BK virus
LSIMKSTL

SEQ ID NO: 12888 - protein, 8 aa, BK virus
SIMKSTLQ

SEQ ID NO: 12889 - protein, 8 aa, BK virus
IMKSTLQM

SEQ ID NO: 12890 - protein, 8 aa, BK virus
MKSTLQML

SEQ ID NO: 12891 - protein, 8 aa, BK virus
KSTLQMLL

SEQ ID NO: 12892 - protein, 8 aa, BK virus
STLQMLLF

SEQ ID NO: 12893 - protein, 8 aa, BK virus
TLQMLLFL

SEQ ID NO: 12894 - protein, 8 aa, BK virus
LQMLLFLQ

SEQ ID NO: 12895 - protein, 8 aa, BK virus
QMLLFLQK

SEQ ID NO: 12896 - protein, 8 aa, BK virus
MLLFLQKV

SEQ ID NO: 12897 - protein, 8 aa, BK virus
LLFLQKVK

SEQ ID NO: 12898 - protein, 8 aa, BK virus
LFLQKVKI

SEQ ID NO: 12899 - protein, 8 aa, BK virus
FLQKVKIK

SEQ ID NO: 12900 - protein, 8 aa, BK virus
LQKVKIKK

SEQ ID NO: 12901 - protein, 8 aa, BK virus
QKVKIKKV

SEQ ID NO: 12902 - protein, 8 aa, BK virus
KVKIKKVF

SEQ ID NO: 12903 - protein, 8 aa, BK virus
VKIKKVFV

SEQ ID NO: 12904 - protein, 8 aa, BK virus
KIKKVFVS

SEQ ID NO: 12905 - protein, 8 aa, BK virus
IKKVFVSK

SEQ ID NO: 12906 - protein, 8 aa, BK virus
KKVFVSKQ

SEQ ID NO: 12907 - protein, 8 aa, BK virus
YLELMEML

SEQ ID NO: 12908 - protein, 8 aa, BK virus
LELMEMLY

SEQ ID NO: 12909 - protein, 8 aa, BK virus
NNIWQVLL

SEQ ID NO: 12910 - protein, 8 aa, BK virus
NIWQVLLG

SEQ ID NO: 12911 - protein, 8 aa, BK virus
IWQVLLGC

SEQ ID NO: 12912 - protein, 8 aa, BK virus
WQVLLGCT

SEQ ID NO: 12913 - protein, 8 aa, BK virus
QVLLGCTV

SEQ ID NO: 12914 - protein, 8 aa, BK virus
VLLGCTVC

SEQ ID NO: 12915 - protein, 8 aa, BK virus
LLGCTVCY

SEQ ID NO: 12916 - protein, 8 aa, BK virus
LGCTVCYL

SEQ ID NO: 12917 - protein, 8 aa, BK virus
GCTVCYLK

SEQ ID NO: 12918 - protein, 8 aa, BK virus
CTVCYLKW

SEQ ID NO: 12919 - protein, 8 aa, BK virus
TVCYLKWI

SEQ ID NO: 12920 - protein, 8 aa, BK virus
VCYLKWIL

SEQ ID NO: 12921 - protein, 8 aa, BK virus
YLIFCTVL

SEQ ID NO: 12922 - protein, 8 aa, BK virus
LIFCTVLF

SEQ ID NO: 12923 - protein, 8 aa, BK virus
IFCTVLFS

SEQ ID NO: 12924 - protein, 8 aa, BK virus
FCTVLFSM

SEQ ID NO: 12925 - protein, 8 aa, BK virus
CTVLFSMY

SEQ ID NO: 12926 - protein, 8 aa, BK virus
TVLFSMYL

SEQ ID NO: 12927 - protein, 8 aa, BK virus
VLFSMYLK

SEQ ID NO: 12928 - protein, 8 aa, BK virus
LFSMYLKE

SEQ ID NO: 12929 - protein, 8 aa, BK virus
FSMYLKED

SEQ ID NO: 12930 - protein, 8 aa, BK virus
SMYLKEDT

SEQ ID NO: 12931 - protein, 8 aa, BK virus
MYLKEDTG

SEQ ID NO: 12932 - protein, 8 aa, BK virus
YLKEDTGY

SEQ ID NO: 12933 - protein, 8 aa, BK virus
LKEDTGYL

SEQ ID NO: 12934 - protein, 8 aa, BK virus
KEDTGYLK

SEQ ID NO: 12935 - protein, 8 aa, BK virus
EDTGYLKV

SEQ ID NO: 12936 - protein, 8 aa, BK virus
DTGYLKVP

SEQ ID NO: 12937 - protein, 8 aa, BK virus
TGYLKVPL

SEQ ID NO: 12938 - protein, 8 aa, BK virus
GYLKVPLI

SEQ ID NO: 12939 - protein, 8 aa, BK virus
YLKVPLIV

SEQ ID NO: 12940 - protein, 8 aa, BK virus
LKVPLIVE

SEQ ID NO: 12941 - protein, 8 aa, BK virus
KVPLIVEK

SEQ ID NO: 12942 - protein, 8 aa, BK virus
VPLIVEKQ

SEQ ID NO: 12943 - protein, 8 aa, BK virus
PLIVEKQH

SEQ ID NO: 12944 - protein, 8 aa, BK virus
ISTWLFLK

SEQ ID NO: 12945 - protein, 8 aa, BK virus
STWLFLKM

SEQ ID NO: 12946 - protein, 8 aa, BK virus
KGQELNQR

SEQ ID NO: 12947 - protein, 8 aa, BK virus
GQELNQRI

SEQ ID NO: 12948 - protein, 8 aa, BK virus
QELNQRIC

SEQ ID NO: 12949 - protein, 8 aa, BK virus
ELNQRICL

SEQ ID NO: 12950 - protein, 8 aa, BK virus
LNQRICLQ

SEQ ID NO: 12951 - protein, 8 aa, BK virus
NQRICLQD

SEQ ID NO: 12952 - protein, 8 aa, BK virus
QRICLQDM

SEQ ID NO: 12953 - protein, 8 aa, BK virus
RICLQDME

SEQ ID NO: 12954 - protein, 8 aa, BK virus
TKEPKYFH

SEQ ID NO: 12955 - protein, 8 aa, BK virus
KEPKYFHQ

SEQ ID NO: 12956 - protein, 8 aa, BK virus
EPKYFHQA

SEQ ID NO: 12957 - protein, 8 aa, BK virus
PKYFHQAW

SEQ ID NO: 12958 - protein, 8 aa, BK virus
KYFHQAWL

SEQ ID NO: 12959 - protein, 8 aa, BK virus
YFHQAWLQ

SEQ ID NO: 12960 - protein, 8 aa, BK virus
MSILSLKP

SEQ ID NO: 12961 - protein, 8 aa, BK virus
SILSLKPC

SEQ ID NO: 12962 - protein, 8 aa, BK virus
ILSLKPCK

SEQ ID NO: 12963 - protein, 8 aa, BK virus
LSLKPCKL

SEQ ID NO: 12964 - protein, 8 aa, BK virus
SLKPCKLD

SEQ ID NO: 12965 - protein, 8 aa, BK virus
LKPCKLDL

SEQ ID NO: 12966 - protein, 8 aa, BK virus
ENPYKTQS

SEQ ID NO: 12967 - protein, 8 aa, BK virus
NPYKTQSS

SEQ ID NO: 12968 - protein, 8 aa, BK virus
PYKTQSSY

SEQ ID NO: 12969 - protein, 8 aa, BK virus
YKTQSSYL

SEQ ID NO: 12970 - protein, 8 aa, BK virus
KTQSSYLK

SEQ ID NO: 12971 - protein, 8 aa, BK virus
TQSSYLKK

SEQ ID NO: 12972 - protein, 8 aa, BK virus
QSSYLKKE

SEQ ID NO: 12973 - protein, 8 aa, BK virus
SSYLKKEF

SEQ ID NO: 12974 - protein, 8 aa, BK virus
SYLKKEFY

SEQ ID NO: 12975 - protein, 8 aa, BK virus
YLKKEFYK

SEQ ID NO: 12976 - protein, 8 aa, BK virus
LKKEFYKV

SEQ ID NO: 12977 - protein, 8 aa, BK virus
KKEFYKVE

SEQ ID NO: 12978 - protein, 8 aa, BK virus
LILQLIYN

SEQ ID NO: 12979 - protein, 8 aa, BK virus
ILQLIYNL

SEQ ID NO: 12980 - protein, 8 aa, BK virus
LQLIYNLE

SEQ ID NO: 12981 - protein, 8 aa, BK virus
QLIYNLEL

SEQ ID NO: 12982 - protein, 8 aa, BK virus
LIYNLELL

SEQ ID NO: 12983 - protein, 8 aa, BK virus
IYNLELLN

SEQ ID NO: 12984 - protein, 8 aa, BK virus
YNLELLNG

SEQ ID NO: 12985 - protein, 8 aa, BK virus
NLELLNGR

SEQ ID NO: 12986 - protein, 8 aa, BK virus
LELLNGRK

SEQ ID NO: 12987 - protein, 8 aa, BK virus
ELLNGRKG

SEQ ID NO: 12988 - protein, 8 aa, BK virus
LLNGRKGW

SEQ ID NO: 12989 - protein, 8 aa, BK virus
LNGRKGWI

SEQ ID NO: 12990 - protein, 8 aa, BK virus
NGRKGWIL

SEQ ID NO: 12991 - protein, 8 aa, BK virus
GRKGWILR

SEQ ID NO: 12992 - protein, 8 aa, BK virus
NIIYAWGN

SEQ ID NO: 12993 - protein, 8 aa, BK virus
IIYAWGNV

SEQ ID NO: 12994 - protein, 8 aa, BK virus
IYAWGNVF

SEQ ID NO: 12995 - protein, 8 aa, BK virus
YAWGNVFL

SEQ ID NO: 12996 - protein, 8 aa, BK virus
AWGNVFLI

SEQ ID NO: 12997 - protein, 8 aa, BK virus
WGNVFLIL

SEQ ID NO: 12998 - protein, 8 aa, BK virus
GNVFLILQ

SEQ ID NO: 12999 - protein, 8 aa, BK virus
NVFLILQE

SEQ ID NO: 13000 - protein, 8 aa, BK virus
VFLILQEK

SEQ ID NO: 13001 - protein, 8 aa, BK virus
FLILQEKR

SEQ ID NO: 13002 - protein, 8 aa, BK virus
LILQEKRI

SEQ ID NO: 13003 - protein, 8 aa, BK virus
ILQEKRIQ

SEQ ID NO: 13004 - protein, 8 aa, BK virus
LQEKRIQK

SEQ ID NO: 13005 - protein, 8 aa, BK virus
QEKRIQKL

SEQ ID NO: 13006 - protein, 8 aa, BK virus
EKRIQKLK

SEQ ID NO: 13007 - protein, 8 aa, BK virus
KRIQKLKT

SEQ ID NO: 13008 - protein, 8 aa, BK virus
RIQKLKTL

SEQ ID NO: 13009 - protein, 8 aa, BK virus
IQKLKTLD

SEQ ID NO: 13010 - protein, 8 aa, BK virus
QKLKTLDM

SEQ ID NO: 13011 - protein, 8 aa, BK virus
KLKTLDMD

SEQ ID NO: 13012 - protein, 8 aa, BK virus
LKTLDMDQ

SEQ ID NO: 13013 - protein, 8 aa, BK virus
KTLDMDQA

SEQ ID NO: 13014 - protein, 8 aa, BK virus
TLDMDQAL

SEQ ID NO: 13015 - protein, 8 aa, BK virus
LDMDQALN

SEQ ID NO: 13016 - protein, 8 aa, BK virus
DMDQALNP

SEQ ID NO: 13017 - protein, 8 aa, BK virus
MDQALNPN

SEQ ID NO: 13018 - protein, 8 aa, BK virus
DQALNPNH

SEQ ID NO: 13019 - protein, 8 aa, BK virus
QALNPNHN

SEQ ID NO: 13020 - protein, 8 aa, BK virus
ALNPNHNA

SEQ ID NO: 13021 - protein, 8 aa, BK virus
LNPNHNAL

SEQ ID NO: 13022 - protein, 8 aa, BK virus
NPNHNALP

SEQ ID NO: 13023 - protein, 8 aa, BK virus
PNHNALPK

SEQ ID NO: 13024 - protein, 8 aa, BK virus
NHNALPKS

SEQ ID NO: 13025 - protein, 8 aa, BK virus
HNALPKSQ

SEQ ID NO: 13026 - protein, 8 aa, BK virus
NALPKSQI

SEQ ID NO: 13027 - protein, 8 aa, BK virus
ALPKSQIL

SEQ ID NO: 13028 - protein, 8 aa, BK virus
LPKSQILQ

SEQ ID NO: 13029 - protein, 8 aa, BK virus
PKSQILQP

SEQ ID NO: 13030 - protein, 8 aa, BK virus
KSQILQPL

SEQ ID NO: 13031 - protein, 8 aa, BK virus
SQILQPLL

SEQ ID NO: 13032 - protein, 8 aa, BK virus
QILQPLLK

SEQ ID NO: 13033 - protein, 8 aa, BK virus
ILQPLLKI

SEQ ID NO: 13034 - protein, 8 aa, BK virus
LQPLLKIP

SEQ ID NO: 13035 - protein, 8 aa, BK virus
QPLLKIPK

SEQ ID NO: 13036 - protein, 8 aa, BK virus
PLLKIPKG

SEQ ID NO: 13037 - protein, 8 aa, BK virus
LLKIPKGQ

SEQ ID NO: 13038 - protein, 8 aa, BK virus
LKIPKGQT

SEQ ID NO: 13039 - protein, 8 aa, BK virus
KIPKGQTP

SEQ ID NO: 13040 - protein, 8 aa, BK virus
IPKGQTPI

SEQ ID NO: 13041 - protein, 8 aa, BK virus
PKGQTPIV

SEQ ID NO: 13042 - protein, 8 aa, BK virus
KGQTPIVK

SEQ ID NO: 13043 - protein, 8 aa, BK virus
GQTPIVKS

SEQ ID NO: 13044 - protein, 8 aa, BK virus
QTPIVKSC

SEQ ID NO: 13045 - protein, 8 aa, BK virus
TPIVKSCI

SEQ ID NO: 13046 - protein, 8 aa, BK virus
PIVKSCIC

SEQ ID NO: 13047 - protein, 8 aa, BK virus
IVKSCICV

SEQ ID NO: 13048 - protein, 8 aa, BK virus
VKSCICVK

SEQ ID NO: 13049 - protein, 8 aa, BK virus
KSCICVKA

SEQ ID NO: 13050 - protein, 8 aa, BK virus
SCICVKAF

SEQ ID NO: 13051 - protein, 8 aa, BK virus
CICVKAFS

SEQ ID NO: 13052 - protein, 8 aa, BK virus
ICVKAFSV

SEQ ID NO: 13053 - protein, 8 aa, BK virus
CVKAFSVL

SEQ ID NO: 13054 - protein, 8 aa, BK virus
VKAFSVLK

SEQ ID NO: 13055 - protein, 8 aa, BK virus
KAFSVLKG

SEQ ID NO: 13056 - protein, 8 aa, BK virus
AFSVLKGL

SEQ ID NO: 13057 - protein, 8 aa, BK virus
FSVLKGLK

SEQ ID NO: 13058 - protein, 8 aa, BK virus
SVLKGLKH

SEQ ID NO: 13059 - protein, 8 aa, BK virus
VLKGLKHH

SEQ ID NO: 13060 - protein, 8 aa, BK virus
LKGLKHHP

SEQ ID NO: 13061 - protein, 8 aa, BK virus
KGLKHHPQ

SEQ ID NO: 13062 - protein, 8 aa, BK virus
GLKHHPQN

SEQ ID NO: 13063 - protein, 8 aa, BK virus
LKHHPQNN

SEQ ID NO: 13064 - protein, 8 aa, BK virus
KHHPQNNT

SEQ ID NO: 13065 - protein, 8 aa, BK virus
HHPQNNTS

SEQ ID NO: 13066 - protein, 8 aa, BK virus
HPQNNTSL

SEQ ID NO: 13067 - protein, 8 aa, BK virus
PQNNTSLK

SEQ ID NO: 13068 - protein, 8 aa, BK virus
QNNTSLKV

SEQ ID NO: 13069 - protein, 8 aa, BK virus
NNTSLKVA

SEQ ID NO: 13070 - protein, 8 aa, BK virus
NTSLKVAY

SEQ ID NO: 13071 - protein, 8 aa, BK virus
TSLKVAYT

SEQ ID NO: 13072 - protein, 8 aa, BK virus
SLKVAYTK

SEQ ID NO: 13073 - protein, 8 aa, BK virus
LKVAYTKA

SEQ ID NO: 13074 - protein, 8 aa, BK virus
KVAYTKAA

SEQ ID NO: 13075 - protein, 8 aa, BK virus
VAYTKAAF

SEQ ID NO: 13076 - protein, 8 aa, BK virus
AYTKAAFI

SEQ ID NO: 13077 - protein, 8 aa, BK virus
YTKAAFIK

SEQ ID NO: 13078 - protein, 8 aa, BK virus
TKAAFIKC

SEQ ID NO: 13079 - protein, 8 aa, BK virus
KAAFIKCI

SEQ ID NO: 13080 - protein, 8 aa, BK virus
AAFIKCIC

SEQ ID NO: 13081 - protein, 8 aa, BK virus
AFIKCICT

SEQ ID NO: 13082 - protein, 8 aa, BK virus
FIKCICTI

SEQ ID NO: 13083 - protein, 8 aa, BK virus
IKCICTIK

SEQ ID NO: 13084 - protein, 8 aa, BK virus
KCICTIKA

SEQ ID NO: 13085 - protein, 8 aa, BK virus
CICTIKAP

SEQ ID NO: 13086 - protein, 8 aa, BK virus
ICTIKAPV

SEQ ID NO: 13087 - protein, 8 aa, BK virus
SILVCNCP

SEQ ID NO: 13088 - protein, 8 aa, BK virus
ILVCNCPC

SEQ ID NO: 13089 - protein, 8 aa, BK virus
LVCNCPCL

SEQ ID NO: 13090 - protein, 8 aa, BK virus
VCNCPCLS

SEQ ID NO: 13091 - protein, 8 aa, BK virus
CNCPCLSI

SEQ ID NO: 13092 - protein, 8 aa, BK virus
NCPCLSIY

SEQ ID NO: 13093 - protein, 8 aa, BK virus
CPCLSIYL

SEQ ID NO: 13094 - protein, 8 aa, BK virus
PCLSIYLI

SEQ ID NO: 13095 - protein, 8 aa, BK virus
CLSIYLII

SEQ ID NO: 13096 - protein, 8 aa, BK virus
LSIYLIIS

SEQ ID NO: 13097 - protein, 8 aa, BK virus
SIYLIISG

SEQ ID NO: 13098 - protein, 8 aa, BK virus
IYLIISGS

SEQ ID NO: 13099 - protein, 8 aa, BK virus
YLIISGSP

SEQ ID NO: 13100 - protein, 8 aa, BK virus
LIISGSPG

SEQ ID NO: 13101 - protein, 8 aa, BK virus
IISGSPGS

SEQ ID NO: 13102 - protein, 8 aa, BK virus
ISGSPGSL

SEQ ID NO: 13103 - protein, 8 aa, BK virus
SGSPGSLS

SEQ ID NO: 13104 - protein, 8 aa, BK virus
GSPGSLSV

SEQ ID NO: 13105 - protein, 8 aa, BK virus
SPGSLSVP

SEQ ID NO: 13106 - protein, 8 aa, BK virus
PGSLSVPS

SEQ ID NO: 13107 - protein, 8 aa, BK virus
GSLSVPSN

SEQ ID NO: 13108 - protein, 8 aa, BK virus
SLSVPSNT

SEQ ID NO: 13109 - protein, 8 aa, BK virus
LSVPSNTL

SEQ ID NO: 13110 - protein, 8 aa, BK virus
SVPSNTLT

SEQ ID NO: 13111 - protein, 8 aa, BK virus
VPSNTLTS

SEQ ID NO: 13112 - protein, 8 aa, BK virus
PSNTLTSS

SEQ ID NO: 13113 - protein, 8 aa, BK virus
SNTLTSST

SEQ ID NO: 13114 - protein, 8 aa, BK virus
NTLTSSTW

SEQ ID NO: 13115 - protein, 8 aa, BK virus
TLTSSTWD

SEQ ID NO: 13116 - protein, 8 aa, BK virus
LTSSTWDS

SEQ ID NO: 13117 - protein, 8 aa, BK virus
TSSTWDSI

SEQ ID NO: 13118 - protein, 8 aa, BK virus
SSTWDSIP

SEQ ID NO: 13119 - protein, 8 aa, BK virus
STWDSIPY

SEQ ID NO: 13120 - protein, 8 aa, BK virus
TWDSIPYI

SEQ ID NO: 13121 - protein, 8 aa, BK virus
WDSIPYIG

SEQ ID NO: 13122 - protein, 8 aa, BK virus
DSIPYIGC

SEQ ID NO: 13123 - protein, 8 aa, BK virus
SIPYIGCP

SEQ ID NO: 13124 - protein, 8 aa, BK virus
IPYIGCPS

SEQ ID NO: 13125 - protein, 8 aa, BK virus
PYIGCPST

SEQ ID NO: 13126 - protein, 8 aa, BK virus
YIGCPSTL

SEQ ID NO: 13127 - protein, 8 aa, BK virus
IGCPSTLW

SEQ ID NO: 13128 - protein, 8 aa, BK virus
GCPSTLWV

SEQ ID NO: 13129 - protein, 8 aa, BK virus
CPSTLWVL

SEQ ID NO: 13130 - protein, 8 aa, BK virus
PSTLWVLL

SEQ ID NO: 13131 - protein, 8 aa, BK virus
STLWVLLF

SEQ ID NO: 13132 - protein, 8 aa, BK virus
TLWVLLFI

SEQ ID NO: 13133 - protein, 8 aa, BK virus
LWVLLFIR

SEQ ID NO: 13134 - protein, 8 aa, BK virus
WVLLFIRS

SEQ ID NO: 13135 - protein, 8 aa, BK virus
VLLFIRSL

SEQ ID NO: 13136 - protein, 8 aa, BK virus
LLFIRSLS

SEQ ID NO: 13137 - protein, 8 aa, BK virus
LFIRSLSK

SEQ ID NO: 13138 - protein, 8 aa, BK virus
FIRSLSKK

SEQ ID NO: 13139 - protein, 8 aa, BK virus
IRSLSKKE

SEQ ID NO: 13140 - protein, 8 aa, BK virus
RSLSKKEI

SEQ ID NO: 13141 - protein, 8 aa, BK virus
SLSKKEIG

SEQ ID NO: 13142 - protein, 8 aa, BK virus
GFFTDLFL

SEQ ID NO: 13143 - protein, 8 aa, BK virus
FFTDLFLR

SEQ ID NO: 13144 - protein, 8 aa, BK virus
FTDLFLRR

SEQ ID NO: 13145 - protein, 8 aa, BK virus
TDLFLRRI

SEQ ID NO: 13146 - protein, 8 aa, BK virus
DLFLRRIL

SEQ ID NO: 13147 - protein, 8 aa, BK virus
LFLRRILK

SEQ ID NO: 13148 - protein, 8 aa, BK virus
FLRRILKY

SEQ ID NO: 13149 - protein, 8 aa, BK virus
LRRILKYL

SEQ ID NO: 13150 - protein, 8 aa, BK virus
RRILKYLA

SEQ ID NO: 13151 - protein, 8 aa, BK virus
RILKYLAR

SEQ ID NO: 13152 - protein, 8 aa, BK virus
ILKYLARP

SEQ ID NO: 13153 - protein, 8 aa, BK virus
LKYLARPL

SEQ ID NO: 13154 - protein, 8 aa, BK virus
KYLARPLH

SEQ ID NO: 13155 - protein, 8 aa, BK virus
YLARPLHC

SEQ ID NO: 13156 - protein, 8 aa, BK virus
LARPLHCC

SEQ ID NO: 13157 - protein, 8 aa, BK virus
ARPLHCCV

SEQ ID NO: 13158 - protein, 8 aa, BK virus
RPLHCCVP

SEQ ID NO: 13159 - protein, 8 aa, BK virus
PLHCCVPE

SEQ ID NO: 13160 - protein, 8 aa, BK virus
LHCCVPEL

SEQ ID NO: 13161 - protein, 8 aa, BK virus
HCCVPELL

SEQ ID NO: 13162 - protein, 8 aa, BK virus
CCVPELLV

SEQ ID NO: 13163 - protein, 8 aa, BK virus
CVPELLVN

SEQ ID NO: 13164 - protein, 8 aa, BK virus
VPELLVNR

SEQ ID NO: 13165 - protein, 8 aa, BK virus
PELLVNRP

SEQ ID NO: 13166 - protein, 8 aa, BK virus
ELLVNRPQ

SEQ ID NO: 13167 - protein, 8 aa, BK virus
LLVNRPQI

SEQ ID NO: 13168 - protein, 8 aa, BK virus
LVNRPQIS

SEQ ID NO: 13169 - protein, 8 aa, BK virus
VNRPQISA

SEQ ID NO: 13170 - protein, 8 aa, BK virus
NRPQISAA

SEQ ID NO: 13171 - protein, 8 aa, BK virus
RPQISAAE

SEQ ID NO: 13172 - protein, 8 aa, BK virus
PQISAAET

SEQ ID NO: 13173 - protein, 8 aa, BK virus
QISAAETY

SEQ ID NO: 13174 - protein, 8 aa, BK virus
ISAAETYR

SEQ ID NO: 13175 - protein, 8 aa, BK virus
SAAETYRL

SEQ ID NO: 13176 - protein, 8 aa, BK virus
AAETYRLS

SEQ ID NO: 13177 - protein, 8 aa, BK virus
AETYRLSA

SEQ ID NO: 13178 - protein, 8 aa, BK virus
ETYRLSAL

SEQ ID NO: 13179 - protein, 8 aa, BK virus
TYRLSALQ

SEQ ID NO: 13180 - protein, 8 aa, BK virus
YRLSALQR

SEQ ID NO: 13181 - protein, 8 aa, BK virus
RLSALQRG

SEQ ID NO: 13182 - protein, 8 aa, BK virus
LSALQRGP

SEQ ID NO: 13183 - protein, 8 aa, BK virus
SALQRGPT

SEQ ID NO: 13184 - protein, 8 aa, BK virus
ALQRGPTP

SEQ ID NO: 13185 - protein, 8 aa, BK virus
LQRGPTPC

SEQ ID NO: 13186 - protein, 8 aa, BK virus
QRGPTPCS

SEQ ID NO: 13187 - protein, 8 aa, BK virus
RGPTPCSS

SEQ ID NO: 13188 - protein, 8 aa, BK virus
GPTPCSSS

SEQ ID NO: 13189 - protein, 8 aa, BK virus
PTPCSSSN

SEQ ID NO: 13190 - protein, 8 aa, BK virus
TPCSSSNT

SEQ ID NO: 13191 - protein, 8 aa, BK virus
PCSSSNTV

SEQ ID NO: 13192 - protein, 8 aa, BK virus
CSSSNTVV

SEQ ID NO: 13193 - protein, 8 aa, BK virus
SSSNTVVA

SEQ ID NO: 13194 - protein, 8 aa, BK virus
SSNTVVAV

SEQ ID NO: 13195 - protein, 8 aa, BK virus
SNTVVAVL

SEQ ID NO: 13196 - protein, 8 aa, BK virus
NTVVAVLV

SEQ ID NO: 13197 - protein, 8 aa, BK virus
TVVAVLVT

SEQ ID NO: 13198 - protein, 8 aa, BK virus
STGGTFSP

SEQ ID NO: 13199 - protein, 8 aa, BK virus
TGGTFSPP

SEQ ID NO: 13200 - protein, 8 aa, BK virus
GGTFSPPV

SEQ ID NO: 13201 - protein, 8 aa, BK virus
GTFSPPVK

SEQ ID NO: 13202 - protein, 8 aa, BK virus
TFSPPVKV

SEQ ID NO: 13203 - protein, 8 aa, BK virus
FSPPVKVP

SEQ ID NO: 13204 - protein, 8 aa, BK virus
SPPVKVPK

SEQ ID NO: 13205 - protein, 8 aa, BK virus
PPVKVPKY

SEQ ID NO: 13206 - protein, 8 aa, BK virus
PVKVPKYL

SEQ ID NO: 13207 - protein, 8 aa, BK virus
VKVPKYLA

SEQ ID NO: 13208 - protein, 8 aa, BK virus
KVPKYLAF

SEQ ID NO: 13209 - protein, 8 aa, BK virus
VPKYLAFS

SEQ ID NO: 13210 - protein, 8 aa, BK virus
PKYLAFSF

SEQ ID NO: 13211 - protein, 8 aa, BK virus
KYLAFSFL

SEQ ID NO: 13212 - protein, 8 aa, BK virus
YLAFSFLL

SEQ ID NO: 13213 - protein, 8 aa, BK virus
LAFSFLLG

SEQ ID NO: 13214 - protein, 8 aa, BK virus
AFSFLLGS

SEQ ID NO: 13215 - protein, 8 aa, BK virus
FSFLLGSG

SEQ ID NO: 13216 - protein, 8 aa, BK virus
SFLLGSGT

SEQ ID NO: 13217 - protein, 8 aa, BK virus
FLLGSGTQ

SEQ ID NO: 13218 - protein, 8 aa, BK virus
LLGSGTQH

SEQ ID NO: 13219 - protein, 8 aa, BK virus
LGSGTQHS

SEQ ID NO: 13220 - protein, 8 aa, BK virus
GSGTQHST

SEQ ID NO: 13221 - protein, 8 aa, BK virus
SGTQHSTG

SEQ ID NO: 13222 - protein, 8 aa, BK virus
ALWSVFIT

SEQ ID NO: 13223 - protein, 8 aa, BK virus
LWSVFITW

SEQ ID NO: 13224 - protein, 8 aa, BK virus
WSVFITWD

SEQ ID NO: 13225 - protein, 8 aa, BK virus
SVFITWDW

SEQ ID NO: 13226 - protein, 8 aa, BK virus
VFITWDWA

SEQ ID NO: 13227 - protein, 8 aa, BK virus
FITWDWAV

SEQ ID NO: 13228 - protein, 8 aa, BK virus
ITWDWAVG

SEQ ID NO: 13229 - protein, 8 aa, BK virus
TWDWAVGF

SEQ ID NO: 13230 - protein, 8 aa, BK virus
WDWAVGFL

SEQ ID NO: 13231 - protein, 8 aa, BK virus
DWAVGFLG

SEQ ID NO: 13232 - protein, 8 aa, BK virus
WAVGFLGV

SEQ ID NO: 13233 - protein, 8 aa, BK virus
AVGFLGVI

SEQ ID NO: 13234 - protein, 8 aa, BK virus
VGFLGVIV

SEQ ID NO: 13235 - protein, 8 aa, BK virus
GFLGVIVP

SEQ ID NO: 13236 - protein, 8 aa, BK virus
FLGVIVPS

SEQ ID NO: 13237 - protein, 8 aa, BK virus
LGVIVPSG

SEQ ID NO: 13238 - protein, 8 aa, BK virus
GVIVPSGY

SEQ ID NO: 13239 - protein, 8 aa, BK virus
VIVPSGYF

SEQ ID NO: 13240 - protein, 8 aa, BK virus
IVPSGYFD

SEQ ID NO: 13241 - protein, 8 aa, BK virus
VPSGYFDL

SEQ ID NO: 13242 - protein, 8 aa, BK virus
FISTPCIS

SEQ ID NO: 13243 - protein, 8 aa, BK virus
ISTPCISK

SEQ ID NO: 13244 - protein, 8 aa, BK virus
STPCISKG

SEQ ID NO: 13245 - protein, 8 aa, BK virus
TPCISKGS

SEQ ID NO: 13246 - protein, 8 aa, BK virus
PCISKGSP

SEQ ID NO: 13247 - protein, 8 aa, BK virus
CISKGSPP

SEQ ID NO: 13248 - protein, 8 aa, BK virus
ISKGSPPT

SEQ ID NO: 13249 - protein, 8 aa, BK virus
SKGSPPTA

SEQ ID NO: 13250 - protein, 8 aa, BK virus
KGSPPTAK

SEQ ID NO: 13251 - protein, 8 aa, BK virus
GSPPTAKK

SEQ ID NO: 13252 - protein, 8 aa, BK virus
SPPTAKKW

SEQ ID NO: 13253 - protein, 8 aa, BK virus
PPTAKKWK

SEQ ID NO: 13254 - protein, 8 aa, BK virus
PTAKKWKL

SEQ ID NO: 13255 - protein, 8 aa, BK virus
TAKKWKLL

SEQ ID NO: 13256 - protein, 8 aa, BK virus
AKKWKLLP

SEQ ID NO: 13257 - protein, 8 aa, BK virus
IGFPPPCS

SEQ ID NO: 13258 - protein, 8 aa, BK virus
GFPPPCSC

SEQ ID NO: 13259 - protein, 8 aa, BK virus
FPPPCSCT

SEQ ID NO: 13260 - protein, 8 aa, BK virus
PPPCSCTF

SEQ ID NO: 13261 - protein, 8 aa, BK virus
PPCSCTFC

SEQ ID NO: 13262 - protein, 8 aa, BK virus
PCSCTFCD

SEQ ID NO: 13263 - protein, 8 aa, BK virus
CSCTFCDP

SEQ ID NO: 13264 - protein, 8 aa, BK virus
SCTFCDPA

SEQ ID NO: 13265 - protein, 8 aa, BK virus
RLSMLVIP

SEQ ID NO: 13266 - protein, 8 aa, BK virus
LSMLVIPI

SEQ ID NO: 13267 - protein, 8 aa, BK virus
SMLVIPIT

SEQ ID NO: 13268 - protein, 8 aa, BK virus
MLVIPITS

SEQ ID NO: 13269 - protein, 8 aa, BK virus
LVIPITSV

SEQ ID NO: 13270 - protein, 8 aa, BK virus
VIPITSVC

SEQ ID NO: 13271 - protein, 8 aa, BK virus
IPITSVCT

SEQ ID NO: 13272 - protein, 8 aa, BK virus
PITSVCTV

SEQ ID NO: 13273 - protein, 8 aa, BK virus
ITSVCTVT

SEQ ID NO: 13274 - protein, 8 aa, BK virus
TSVCTVTA

SEQ ID NO: 13275 - protein, 8 aa, BK virus
SVCTVTAS

SEQ ID NO: 13276 - protein, 8 aa, BK virus
VCTVTASH

SEQ ID NO: 13277 - protein, 8 aa, BK virus
CTVTASHI

SEQ ID NO: 13278 - protein, 8 aa, BK virus
TVTASHIS

SEQ ID NO: 13279 - protein, 8 aa, BK virus
VTASHISR

SEQ ID NO: 13280 - protein, 8 aa, BK virus
TASHISRF

SEQ ID NO: 13281 - protein, 8 aa, BK virus
ASHISRFP

SEQ ID NO: 13282 - protein, 8 aa, BK virus
SHISRFPQ

SEQ ID NO: 13283 - protein, 8 aa, BK virus
HISRFPQV

SEQ ID NO: 13284 - protein, 8 aa, BK virus
ISRFPQVR

SEQ ID NO: 13285 - protein, 8 aa, BK virus
SRFPQVRS

SEQ ID NO: 13286 - protein, 8 aa, BK virus
RFPQVRSS

SEQ ID NO: 13287 - protein, 8 aa, BK virus
FPQVRSSF

SEQ ID NO: 13288 - protein, 8 aa, BK virus
PQVRSSFK

SEQ ID NO: 13289 - protein, 8 aa, BK virus
QVRSSFKL

SEQ ID NO: 13290 - protein, 8 aa, BK virus
VRSSFKLG

SEQ ID NO: 13291 - protein, 8 aa, BK virus
RSSFKLGR

SEQ ID NO: 13292 - protein, 8 aa, BK virus
SSFKLGRG

SEQ ID NO: 13293 - protein, 8 aa, BK virus
SFKLGRGI

SEQ ID NO: 13294 - protein, 8 aa, BK virus
FKLGRGIL

SEQ ID NO: 13295 - protein, 8 aa, BK virus
KLGRGILA

SEQ ID NO: 13296 - protein, 8 aa, BK virus
LGRGILAV

SEQ ID NO: 13297 - protein, 8 aa, BK virus
GRGILAVL

SEQ ID NO: 13298 - protein, 8 aa, BK virus
QGSIFLSG

SEQ ID NO: 13299 - protein, 8 aa, BK virus
GSIFLSGL

SEQ ID NO: 13300 - protein, 8 aa, BK virus
SIFLSGLS

SEQ ID NO: 13301 - protein, 8 aa, BK virus
IFLSGLSL

SEQ ID NO: 13302 - protein, 8 aa, BK virus
FLSGLSLL

SEQ ID NO: 13303 - protein, 8 aa, BK virus
LSGLSLLK

SEQ ID NO: 13304 - protein, 8 aa, BK virus
SGLSLLKS

SEQ ID NO: 13305 - protein, 8 aa, BK virus
GLSLLKSF

SEQ ID NO: 13306 - protein, 8 aa, BK virus
LSLLKSFS

SEQ ID NO: 13307 - protein, 8 aa, BK virus
SLLKSFSA

SEQ ID NO: 13308 - protein, 8 aa, BK virus
LLKSFSAL

SEQ ID NO: 13309 - protein, 8 aa, BK virus
LKSFSALS

SEQ ID NO: 13310 - protein, 8 aa, BK virus
KSFSALSF

SEQ ID NO: 13311 - protein, 8 aa, BK virus
SFSALSFR

SEQ ID NO: 13312 - protein, 8 aa, BK virus
FSALSFRL

SEQ ID NO: 13313 - protein, 8 aa, BK virus
SALSFRLK

SEQ ID NO: 13314 - protein, 8 aa, BK virus
ALSFRLKP

SEQ ID NO: 13315 - protein, 8 aa, BK virus
LSFRLKPL

SEQ ID NO: 13316 - protein, 8 aa, BK virus
SFRLKPLR

SEQ ID NO: 13317 - protein, 8 aa, BK virus
FRLKPLRF

SEQ ID NO: 13318 - protein, 8 aa, BK virus
RLKPLRFS

SEQ ID NO: 13319 - protein, 8 aa, BK virus
LKPLRFSS

SEQ ID NO: 13320 - protein, 8 aa, BK virus
KPLRFSSG

SEQ ID NO: 13321 - protein, 8 aa, BK virus
PLRFSSGS

SEQ ID NO: 13322 - protein, 8 aa, BK virus
LRFSSGSP

SEQ ID NO: 13323 - protein, 8 aa, BK virus
RFSSGSPI

SEQ ID NO: 13324 - protein, 8 aa, BK virus
FSSGSPIS

SEQ ID NO: 13325 - protein, 8 aa, BK virus
SSGSPISG

SEQ ID NO: 13326 - protein, 8 aa, BK virus
SGSPISGF

SEQ ID NO: 13327 - protein, 8 aa, BK virus
GSPISGFR

SEQ ID NO: 13328 - protein, 8 aa, BK virus
SPISGFRK

SEQ ID NO: 13329 - protein, 8 aa, BK virus
PISGFRKH

SEQ ID NO: 13330 - protein, 8 aa, BK virus
ISGFRKHS

SEQ ID NO: 13331 - protein, 8 aa, BK virus
SGFRKHST

SEQ ID NO: 13332 - protein, 8 aa, BK virus
GFRKHSTS

SEQ ID NO: 13333 - protein, 8 aa, BK virus
FRKHSTSV

SEQ ID NO: 13334 - protein, 8 aa, BK virus
RKHSTSVI

SEQ ID NO: 13335 - protein, 8 aa, BK virus
KHSTSVIA

SEQ ID NO: 13336 - protein, 8 aa, BK virus
HSTSVIAS

SEQ ID NO: 13337 - protein, 8 aa, BK virus
STSVIAST

SEQ ID NO: 13338 - protein, 8 aa, BK virus
TSVIASTP

SEQ ID NO: 13339 - protein, 8 aa, BK virus
SVIASTPV

SEQ ID NO: 13340 - protein, 8 aa, BK virus
VIASTPVL

SEQ ID NO: 13341 - protein, 8 aa, BK virus
IASTPVLT

SEQ ID NO: 13342 - protein, 8 aa, BK virus
ASTPVLTS

SEQ ID NO: 13343 - protein, 8 aa, BK virus
STPVLTSR

SEQ ID NO: 13344 - protein, 8 aa, BK virus
TPVLTSRT

SEQ ID NO: 13345 - protein, 8 aa, BK virus
PVLTSRTS

SEQ ID NO: 13346 - protein, 8 aa, BK virus
VLTSRTST

SEQ ID NO: 13347 - protein, 8 aa, BK virus
LTSRTSTP

SEQ ID NO: 13348 - protein, 8 aa, BK virus
TSRTSTPP

SEQ ID NO: 13349 - protein, 8 aa, BK virus
SRTSTPPF

SEQ ID NO: 13350 - protein, 8 aa, BK virus
RTSTPPFI

SEQ ID NO: 13351 - protein, 8 aa, BK virus
TSTPPFIS

SEQ ID NO: 13352 - protein, 8 aa, BK virus
STPPFISS

SEQ ID NO: 13353 - protein, 8 aa, BK virus
TPPFISSF

SEQ ID NO: 13354 - protein, 8 aa, BK virus
PPFISSFG

SEQ ID NO: 13355 - protein, 8 aa, BK virus
PFISSFGT

SEQ ID NO: 13356 - protein, 8 aa, BK virus
FISSFGTC

SEQ ID NO: 13357 - protein, 8 aa, BK virus
ISSFGTCT

SEQ ID NO: 13358 - protein, 8 aa, BK virus
SSFGTCTG

SEQ ID NO: 13359 - protein, 8 aa, BK virus
SFGTCTGS

SEQ ID NO: 13360 - protein, 8 aa, BK virus
FGTCTGSF

SEQ ID NO: 13361 - protein, 8 aa, BK virus
GTCTGSFG

SEQ ID NO: 13362 - protein, 8 aa, BK virus
TCTGSFGF

SEQ ID NO: 13363 - protein, 8 aa, BK virus
CTGSFGFL

SEQ ID NO: 13364 - protein, 8 aa, BK virus
TGSFGFLG

SEQ ID NO: 13365 - protein, 8 aa, BK virus
GSFGFLGA

SEQ ID NO: 13366 - protein, 8 aa, BK virus
SFGFLGAA

SEQ ID NO: 13367 - protein, 8 aa, BK virus
FGFLGAAP

SEQ ID NO: 13368 - protein, 8 aa, BK virus
GFLGAAPG

SEQ ID NO: 13369 - protein, 8 aa, BK virus
FLGAAPGH

SEQ ID NO: 13370 - protein, 8 aa, BK virus
LGAAPGHS

SEQ ID NO: 13371 - protein, 8 aa, BK virus
GAAPGHSP

SEQ ID NO: 13372 - protein, 8 aa, BK virus
AAPGHSPF

SEQ ID NO: 13373 - protein, 8 aa, BK virus
APGHSPFL

SEQ ID NO: 13374 - protein, 8 aa, BK virus
PGHSPFLL

SEQ ID NO: 13375 - protein, 8 aa, BK virus
GHSPFLLV

SEQ ID NO: 13376 - protein, 8 aa, BK virus
HSPFLLVG

SEQ ID NO: 13377 - protein, 8 aa, BK virus
SPFLLVGA

SEQ ID NO: 13378 - protein, 8 aa, BK virus
PFLLVGAI

SEQ ID NO: 13379 - protein, 8 aa, BK virus
FLLVGAIF

SEQ ID NO: 13380 - protein, 8 aa, BK virus
LLVGAIFI

SEQ ID NO: 13381 - protein, 8 aa, BK virus
LVGAIFIC

SEQ ID NO: 13382 - protein, 8 aa, BK virus
VGAIFICF

SEQ ID NO: 13383 - protein, 8 aa, BK virus
GAIFICFK

SEQ ID NO: 13384 - protein, 8 aa, BK virus
AIFICFKS

SEQ ID NO: 13385 - protein, 8 aa, BK virus
IFICFKSR

SEQ ID NO: 13386 - protein, 8 aa, BK virus
FICFKSRC

SEQ ID NO: 13387 - protein, 8 aa, BK virus
ICFKSRCY

SEQ ID NO: 13388 - protein, 8 aa, BK virus
CFKSRCYS

SEQ ID NO: 13389 - protein, 8 aa, BK virus
FKSRCYSP

SEQ ID NO: 13390 - protein, 8 aa, BK virus
KSRCYSPV

SEQ ID NO: 13391 - protein, 8 aa, BK virus
SRCYSPVQ

SEQ ID NO: 13392 - protein, 8 aa, BK virus
RCYSPVQA

SEQ ID NO: 13393 - protein, 8 aa, BK virus
RQHPLRSS

SEQ ID NO: 13394 - protein, 8 aa, BK virus
QHPLRSSS

SEQ ID NO: 13395 - protein, 8 aa, BK virus
HPLRSSSL

SEQ ID NO: 13396 - protein, 8 aa, BK virus
PLRSSSLI

SEQ ID NO: 13397 - protein, 8 aa, BK virus
LRSSSLIS

SEQ ID NO: 13398 - protein, 8 aa, BK virus
RSSSLIST

SEQ ID NO: 13399 - protein, 8 aa, BK virus
SSSLISTS

SEQ ID NO: 13400 - protein, 8 aa, BK virus
SSLISTSW

SEQ ID NO: 13401 - protein, 8 aa, BK virus
SLISTSWG

SEQ ID NO: 13402 - protein, 8 aa, BK virus
LISTSWGN

SEQ ID NO: 13403 - protein, 8 aa, BK virus
ISTSWGNS

SEQ ID NO: 13404 - protein, 8 aa, BK virus
STSWGNSF

SEQ ID NO: 13405 - protein, 8 aa, BK virus
TSWGNSFF

SEQ ID NO: 13406 - protein, 8 aa, BK virus
SWGNSFFY

SEQ ID NO: 13407 - protein, 8 aa, BK virus
WGNSFFYK

SEQ ID NO: 13408 - protein, 8 aa, BK virus
GNSFFYKL

SEQ ID NO: 13409 - protein, 8 aa, BK virus
NSFFYKLS

SEQ ID NO: 13410 - protein, 8 aa, BK virus
VHSLCNFF

SEQ ID NO: 13411 - protein, 8 aa, BK virus
HSLCNFFY

SEQ ID NO: 13412 - protein, 8 aa, BK virus
SLCNFFYT

SEQ ID NO: 13413 - protein, 8 aa, BK virus
LCNFFYTV

SEQ ID NO: 13414 - protein, 8 aa, BK virus
CNFFYTVS

SEQ ID NO: 13415 - protein, 8 aa, BK virus
NFFYTVSI

SEQ ID NO: 13416 - protein, 8 aa, BK virus
FFYTVSII

SEQ ID NO: 13417 - protein, 8 aa, BK virus
FYTVSIIY

SEQ ID NO: 13418 - protein, 8 aa, BK virus
YTVSIIYT

SEQ ID NO: 13419 - protein, 8 aa, BK virus
TVSIIYTI

SEQ ID NO: 13420 - protein, 8 aa, BK virus
VSIIYTIS

SEQ ID NO: 13421 - protein, 8 aa, BK virus
SIIYTISM

SEQ ID NO: 13422 - protein, 8 aa, BK virus
IIYTISMA

SEQ ID NO: 13423 - protein, 8 aa, BK virus
IYTISMAK

SEQ ID NO: 13424 - protein, 8 aa, BK virus
YTISMAKM

SEQ ID NO: 13425 - protein, 8 aa, BK virus
TISMAKMY

SEQ ID NO: 13426 - protein, 8 aa, BK virus
ISMAKMYT

SEQ ID NO: 13427 - protein, 8 aa, BK virus
SMAKMYTG

SEQ ID NO: 13428 - protein, 8 aa, BK virus
MAKMYTGT

SEQ ID NO: 13429 - protein, 8 aa, BK virus
AKMYTGTF

SEQ ID NO: 13430 - protein, 8 aa, BK virus
KMYTGTFP

SEQ ID NO: 13431 - protein, 8 aa, BK virus
MYTGTFPF

SEQ ID NO: 13432 - protein, 8 aa, BK virus
YTGTFPFS

SEQ ID NO: 13433 - protein, 8 aa, BK virus
TGTFPFSY

SEQ ID NO: 13434 - protein, 8 aa, BK virus
GTFPFSYL

SEQ ID NO: 13435 - protein, 8 aa, BK virus
TFPFSYLS

SEQ ID NO: 13436 - protein, 8 aa, BK virus
FPFSYLSN

SEQ ID NO: 13437 - protein, 8 aa, BK virus
PFSYLSNH

SEQ ID NO: 13438 - protein, 8 aa, BK virus
GPNRGKIR

SEQ ID NO: 13439 - protein, 8 aa, BK virus
PNRGKIRI

SEQ ID NO: 13440 - protein, 8 aa, BK virus
NRGKIRII

SEQ ID NO: 13441 - protein, 8 aa, BK virus
RGKIRIIL

SEQ ID NO: 13442 - protein, 8 aa, BK virus
GKIRIILL

SEQ ID NO: 13443 - protein, 8 aa, BK virus
KIRIILLN

SEQ ID NO: 13444 - protein, 8 aa, BK virus
IRIILLNI

SEQ ID NO: 13445 - protein, 8 aa, BK virus
RIILLNII

SEQ ID NO: 13446 - protein, 8 aa, BK virus
IILLNIII

SEQ ID NO: 13447 - protein, 8 aa, BK virus
ILLNIIIK

SEQ ID NO: 13448 - protein, 8 aa, BK virus
LLNIIIKV

SEQ ID NO: 13449 - protein, 8 aa, BK virus
LNIIIKVY

SEQ ID NO: 13450 - protein, 8 aa, BK virus
NIIIKVYR

SEQ ID NO: 13451 - protein, 8 aa, BK virus
IIIKVYRG

SEQ ID NO: 13452 - protein, 8 aa, BK virus
IIKVYRGI

SEQ ID NO: 13453 - protein, 8 aa, BK virus
IKVYRGIY

SEQ ID NO: 13454 - protein, 8 aa, BK virus
KVYRGIYN

SEQ ID NO: 13455 - protein, 8 aa, BK virus
VYRGIYNC

SEQ ID NO: 13456 - protein, 8 aa, BK virus
YRGIYNCP

SEQ ID NO: 13457 - protein, 8 aa, BK virus
RGIYNCPG

SEQ ID NO: 13458 - protein, 8 aa, BK virus
GIYNCPGS

SEQ ID NO: 13459 - protein, 8 aa, BK virus
IYNCPGSF

SEQ ID NO: 13460 - protein, 8 aa, BK virus
YNCPGSFL

SEQ ID NO: 13461 - protein, 8 aa, BK virus
NCPGSFLQ

SEQ ID NO: 13462 - protein, 8 aa, BK virus
CPGSFLQK

SEQ ID NO: 13463 - protein, 8 aa, BK virus
PGSFLQKS

SEQ ID NO: 13464 - protein, 8 aa, BK virus
GSFLQKSS

SEQ ID NO: 13465 - protein, 8 aa, BK virus
SFLQKSSQ

SEQ ID NO: 13466 - protein, 8 aa, BK virus
FLQKSSQG

SEQ ID NO: 13467 - protein, 8 aa, BK virus
LQKSSQGV

SEQ ID NO: 13468 - protein, 8 aa, BK virus
QKSSQGVS

SEQ ID NO: 13469 - protein, 8 aa, BK virus
KSSQGVSK

SEQ ID NO: 13470 - protein, 8 aa, BK virus
SSQGVSKK

SEQ ID NO: 13471 - protein, 8 aa, BK virus
SQGVSKKS

SEQ ID NO: 13472 - protein, 8 aa, BK virus
QGVSKKSF

SEQ ID NO: 13473 - protein, 8 aa, BK virus
GVSKKSFC

SEQ ID NO: 13474 - protein, 8 aa, BK virus
VSKKSFCS

SEQ ID NO: 13475 - protein, 8 aa, BK virus
SKKSFCSS

SEQ ID NO: 13476 - protein, 8 aa, BK virus
KKSFCSSL

SEQ ID NO: 13477 - protein, 8 aa, BK virus
KSFCSSLQ

SEQ ID NO: 13478 - protein, 8 aa, BK virus
SFCSSLQF

SEQ ID NO: 13479 - protein, 8 aa, BK virus
FCSSLQFL

SEQ ID NO: 13480 - protein, 8 aa, BK virus
GYRRYIIP

SEQ ID NO: 13481 - protein, 8 aa, BK virus
YRRYIIPN

SEQ ID NO: 13482 - protein, 8 aa, BK virus
RRYIIPNN

SEQ ID NO: 13483 - protein, 8 aa, BK virus
RYIIPNNM

SEQ ID NO: 13484 - protein, 8 aa, BK virus
YIIPNNMP

SEQ ID NO: 13485 - protein, 8 aa, BK virus
IIPNNMPQ

SEQ ID NO: 13486 - protein, 8 aa, BK virus
IPNNMPQS

SEQ ID NO: 13487 - protein, 8 aa, BK virus
PNNMPQSL

SEQ ID NO: 13488 - protein, 8 aa, BK virus
NNMPQSLG

SEQ ID NO: 13489 - protein, 8 aa, BK virus
NMPQSLGN

SEQ ID NO: 13490 - protein, 8 aa, BK virus
MPQSLGNS

SEQ ID NO: 13491 - protein, 8 aa, BK virus
PQSLGNSS

SEQ ID NO: 13492 - protein, 8 aa, BK virus
QSLGNSSK

SEQ ID NO: 13493 - protein, 8 aa, BK virus
SLGNSSKQ

SEQ ID NO: 13494 - protein, 8 aa, BK virus
LGNSSKQR

SEQ ID NO: 13495 - protein, 8 aa, BK virus
GNSSKQRR

SEQ ID NO: 13496 - protein, 8 aa, BK virus
NSSKQRRT

SEQ ID NO: 13497 - protein, 8 aa, BK virus
SSKQRRTP

SEQ ID NO: 13498 - protein, 8 aa, BK virus
SKQRRTPM

SEQ ID NO: 13499 - protein, 8 aa, BK virus
KQRRTPMP

SEQ ID NO: 13500 - protein, 8 aa, BK virus
QRRTPMPR

SEQ ID NO: 13501 - protein, 8 aa, BK virus
RRTPMPRI

SEQ ID NO: 13502 - protein, 8 aa, BK virus
RTPMPRIK

SEQ ID NO: 13503 - protein, 8 aa, BK virus
TPMPRIKV

SEQ ID NO: 13504 - protein, 8 aa, BK virus
PMPRIKVL

SEQ ID NO: 13505 - protein, 8 aa, BK virus
MPRIKVLN

SEQ ID NO: 13506 - protein, 8 aa, BK virus
PRIKVLNI

SEQ ID NO: 13507 - protein, 8 aa, BK virus
RIKVLNII

SEQ ID NO: 13508 - protein, 8 aa, BK virus
IKVLNIIN

SEQ ID NO: 13509 - protein, 8 aa, BK virus
KVLNIINK

SEQ ID NO: 13510 - protein, 8 aa, BK virus
VLNIINKS

SEQ ID NO: 13511 - protein, 8 aa, BK virus
LNIINKSI

SEQ ID NO: 13512 - protein, 8 aa, BK virus
NIINKSIY

SEQ ID NO: 13513 - protein, 8 aa, BK virus
IINKSIYT

SEQ ID NO: 13514 - protein, 8 aa, BK virus
INKSIYTR

SEQ ID NO: 13515 - protein, 8 aa, BK virus
NKSIYTRK

SEQ ID NO: 13516 - protein, 8 aa, BK virus
KSIYTRKQ

SEQ ID NO: 13517 - protein, 8 aa, BK virus
SIYTRKQN

SEQ ID NO: 13518 - protein, 8 aa, BK virus
IYTRKQNI

SEQ ID NO: 13519 - protein, 8 aa, BK virus
YTRKQNII

SEQ ID NO: 13520 - protein, 8 aa, BK virus
TRKQNIIV

SEQ ID NO: 13521 - protein, 8 aa, BK virus
RKQNIIVL

SEQ ID NO: 13522 - protein, 8 aa, BK virus
KQNIIVLI

SEQ ID NO: 13523 - protein, 8 aa, BK virus
QNIIVLIW

SEQ ID NO: 13524 - protein, 8 aa, BK virus
NIIVLIWV

SEQ ID NO: 13525 - protein, 8 aa, BK virus
IIVLIWVK

SEQ ID NO: 13526 - protein, 8 aa, BK virus
IVLIWVKQ

SEQ ID NO: 13527 - protein, 8 aa, BK virus
VLIWVKQF

SEQ ID NO: 13528 - protein, 8 aa, BK virus
LIWVKQFQ

SEQ ID NO: 13529 - protein, 8 aa, BK virus
IWVKQFQS

SEQ ID NO: 13530 - protein, 8 aa, BK virus
WVKQFQSH

SEQ ID NO: 13531 - protein, 8 aa, BK virus
VKQFQSHA

SEQ ID NO: 13532 - protein, 8 aa, BK virus
LLIEAYSG

SEQ ID NO: 13533 - protein, 8 aa, BK virus
LIEAYSGN

SEQ ID NO: 13534 - protein, 8 aa, BK virus
IEAYSGNF

SEQ ID NO: 13535 - protein, 8 aa, BK virus
EAYSGNFV

SEQ ID NO: 13536 - protein, 8 aa, BK virus
AYSGNFVI

SEQ ID NO: 13537 - protein, 8 aa, BK virus
YSGNFVIP

SEQ ID NO: 13538 - protein, 8 aa, BK virus
SGNFVIPI

SEQ ID NO: 13539 - protein, 8 aa, BK virus
GNFVIPII

SEQ ID NO: 13540 - protein, 8 aa, BK virus
NFVIPIIK

SEQ ID NO: 13541 - protein, 8 aa, BK virus
FVIPIIKE

SEQ ID NO: 13542 - protein, 8 aa, BK virus
VIPIIKEL

SEQ ID NO: 13543 - protein, 8 aa, BK virus
IPIIKELI

SEQ ID NO: 13544 - protein, 8 aa, BK virus
PIIKELIP

SEQ ID NO: 13545 - protein, 8 aa, BK virus
IIKELIPY

SEQ ID NO: 13546 - protein, 8 aa, BK virus
IKELIPYL

SEQ ID NO: 13547 - protein, 8 aa, BK virus
KELIPYLS

SEQ ID NO: 13548 - protein, 8 aa, BK virus
GTNTTNSL

SEQ ID NO: 13549 - protein, 8 aa, BK virus
TNTTNSLN

SEQ ID NO: 13550 - protein, 8 aa, BK virus
SSKPSNSP

SEQ ID NO: 13551 - protein, 8 aa, BK virus
SKPSNSPR

SEQ ID NO: 13552 - protein, 8 aa, BK virus
KPSNSPRS

SEQ ID NO: 13553 - protein, 8 aa, BK virus
PSNSPRST

SEQ ID NO: 13554 - protein, 8 aa, BK virus
SNSPRSTS

SEQ ID NO: 13555 - protein, 8 aa, BK virus
NSPRSTSN

SEQ ID NO: 13556 - protein, 8 aa, BK virus
SPRSTSNY

SEQ ID NO: 13557 - protein, 8 aa, BK virus
PRSTSNYS

SEQ ID NO: 13558 - protein, 8 aa, BK virus
RSTSNYSI

SEQ ID NO: 13559 - protein, 8 aa, BK virus
STSNYSIC

SEQ ID NO: 13560 - protein, 8 aa, BK virus
TSNYSICL

SEQ ID NO: 13561 - protein, 8 aa, BK virus
SNYSICLR

SEQ ID NO: 13562 - protein, 8 aa, BK virus
NYSICLRS

SEQ ID NO: 13563 - protein, 8 aa, BK virus
GTCYALYS

SEQ ID NO: 13564 - protein, 8 aa, BK virus
TCYALYSS

SEQ ID NO: 13565 - protein, 8 aa, BK virus
CYALYSSK

SEQ ID NO: 13566 - protein, 8 aa, BK virus
YALYSSKG

SEQ ID NO: 13567 - protein, 8 aa, BK virus
ALYSSKGC

SEQ ID NO: 13568 - protein, 8 aa, BK virus
LYSSKGCN

SEQ ID NO: 13569 - protein, 8 aa, BK virus
YSSKGCNL

SEQ ID NO: 13570 - protein, 8 aa, BK virus
SSKGCNLN

SEQ ID NO: 13571 - protein, 8 aa, BK virus
SKGCNLNF

SEQ ID NO: 13572 - protein, 8 aa, BK virus
KGCNLNFY

SEQ ID NO: 13573 - protein, 8 aa, BK virus
GCNLNFYS

SEQ ID NO: 13574 - protein, 8 aa, BK virus
CNLNFYSS

SEQ ID NO: 13575 - protein, 8 aa, BK virus
NLNFYSSS

SEQ ID NO: 13576 - protein, 8 aa, BK virus
LNFYSSSS

SEQ ID NO: 13577 - protein, 8 aa, BK virus
NFYSSSSL

SEQ ID NO: 13578 - protein, 8 aa, BK virus
FYSSSSLP

SEQ ID NO: 13579 - protein, 8 aa, BK virus
YSSSSLPS

SEQ ID NO: 13580 - protein, 8 aa, BK virus
SSSSLPSS

SEQ ID NO: 13581 - protein, 8 aa, BK virus
SSSLPSSN

SEQ ID NO: 13582 - protein, 8 aa, BK virus
SSLPSSNF

SEQ ID NO: 13583 - protein, 8 aa, BK virus
SLPSSNFS

SEQ ID NO: 13584 - protein, 8 aa, BK virus
LPSSNFSH

SEQ ID NO: 13585 - protein, 8 aa, BK virus
KSCGSSSL

SEQ ID NO: 13586 - protein, 8 aa, BK virus
SCGSSSLR

SEQ ID NO: 13587 - protein, 8 aa, BK virus
CGSSSLRY

SEQ ID NO: 13588 - protein, 8 aa, BK virus
GSSSLRYT

SEQ ID NO: 13589 - protein, 8 aa, BK virus
SSSLRYTG

SEQ ID NO: 13590 - protein, 8 aa, BK virus
SSLRYTGN

SEQ ID NO: 13591 - protein, 8 aa, BK virus
SSTHEPGN

SEQ ID NO: 13592 - protein, 8 aa, BK virus
STHEPGNT

SEQ ID NO: 13593 - protein, 8 aa, BK virus
THEPGNTK

SEQ ID NO: 13594 - protein, 8 aa, BK virus
HEPGNTKK

SEQ ID NO: 13595 - protein, 8 aa, BK virus
EPGNTKKK

SEQ ID NO: 13596 - protein, 8 aa, BK virus
PGNTKKKG

SEQ ID NO: 13597 - protein, 8 aa, BK virus
GNTKKKGL

SEQ ID NO: 13598 - protein, 8 aa, BK virus
NTKKKGLL

SEQ ID NO: 13599 - protein, 8 aa, BK virus
TKKKGLLT

SEQ ID NO: 13600 - protein, 8 aa, BK virus
ESFTESFT

SEQ ID NO: 13601 - protein, 8 aa, BK virus
SFTESFTA

SEQ ID NO: 13602 - protein, 8 aa, BK virus
FTESFTAG

SEQ ID NO: 13603 - protein, 8 aa, BK virus
TESFTAGK

SEQ ID NO: 13604 - protein, 8 aa, BK virus
ESFTAGKA

SEQ ID NO: 13605 - protein, 8 aa, BK virus
SFTAGKAV

SEQ ID NO: 13606 - protein, 8 aa, BK virus
FTAGKAVV

SEQ ID NO: 13607 - protein, 8 aa, BK virus
TAGKAVVL

SEQ ID NO: 13608 - protein, 8 aa, BK virus
AGKAVVLL

SEQ ID NO: 13609 - protein, 8 aa, BK virus
GKAVVLLF

SEQ ID NO: 13610 - protein, 8 aa, BK virus
KAVVLLFF

SEQ ID NO: 13611 - protein, 8 aa, BK virus
AVVLLFFP

SEQ ID NO: 13612 - protein, 8 aa, BK virus
VVLLFFPS

SEQ ID NO: 13613 - protein, 8 aa, BK virus
VLLFFPST

SEQ ID NO: 13614 - protein, 8 aa, BK virus
LLFFPSTL

SEQ ID NO: 13615 - protein, 8 aa, BK virus
LFFPSTLS

SEQ ID NO: 13616 - protein, 8 aa, BK virus
FFPSTLSS

SEQ ID NO: 13617 - protein, 8 aa, BK virus
FPSTLSSP

SEQ ID NO: 13618 - protein, 8 aa, BK virus
PSTLSSPL

SEQ ID NO: 13619 - protein, 8 aa, BK virus
STLSSPLQ

SEQ ID NO: 13620 - protein, 8 aa, BK virus
TLSSPLQN

SEQ ID NO: 13621 - protein, 8 aa, BK virus
LSSPLQNS

SEQ ID NO: 13622 - protein, 8 aa, BK virus
SSPLQNSS

SEQ ID NO: 13623 - protein, 8 aa, BK virus
SPLQNSSK

SEQ ID NO: 13624 - protein, 8 aa, BK virus
PLQNSSKS

SEQ ID NO: 13625 - protein, 8 aa, BK virus
LQNSSKSS

SEQ ID NO: 13626 - protein, 8 aa, BK virus
QNSSKSSK

SEQ ID NO: 13627 - protein, 8 aa, BK virus
NSSKSSKI

SEQ ID NO: 13628 - protein, 8 aa, BK virus
SSKSSKIK

SEQ ID NO: 13629 - protein, 8 aa, BK virus
SKSSKIKI

SEQ ID NO: 13630 - protein, 8 aa, BK virus
KSSKIKIK

SEQ ID NO: 13631 - protein, 8 aa, BK virus
SSKIKIKI

SEQ ID NO: 13632 - protein, 8 aa, BK virus
SKIKIKIL

SEQ ID NO: 13633 - protein, 8 aa, BK virus
ALFFVPVQ

SEQ ID NO: 13634 - protein, 8 aa, BK virus
LFFVPVQV

SEQ ID NO: 13635 - protein, 8 aa, BK virus
FFVPVQVL

SEQ ID NO: 13636 - protein, 8 aa, BK virus
FVPVQVLP

SEQ ID NO: 13637 - protein, 8 aa, BK virus
VPVQVLPT

SEQ ID NO: 13638 - protein, 8 aa, BK virus
PVQVLPTF

SEQ ID NO: 13639 - protein, 8 aa, BK virus
VQVLPTFT

SEQ ID NO: 13640 - protein, 8 aa, BK virus
QVLPTFTE

SEQ ID NO: 13641 - protein, 8 aa, BK virus
VLPTFTEA

SEQ ID NO: 13642 - protein, 8 aa, BK virus
LPTFTEAC

SEQ ID NO: 13643 - protein, 8 aa, BK virus
PTFTEACR

SEQ ID NO: 13644 - protein, 8 aa, BK virus
TFTEACRD

SEQ ID NO: 13645 - protein, 8 aa, BK virus
FTEACRDS

SEQ ID NO: 13646 - protein, 8 aa, BK virus
TEACRDSW

SEQ ID NO: 13647 - protein, 8 aa, BK virus
EACRDSWR

SEQ ID NO: 13648 - protein, 8 aa, BK virus
ACRDSWRR

SEQ ID NO: 13649 - protein, 8 aa, BK virus
CRDSWRRT

SEQ ID NO: 13650 - protein, 8 aa, BK virus
RDSWRRTM

SEQ ID NO: 13651 - protein, 8 aa, BK virus
DSWRRTMA

SEQ ID NO: 13652 - protein, 8 aa, BK virus
SWRRTMAF

SEQ ID NO: 13653 - protein, 8 aa, BK virus
WRRTMAFV

SEQ ID NO: 13654 - protein, 8 aa, BK virus
RRTMAFVQ

SEQ ID NO: 13655 - protein, 8 aa, BK virus
RTMAFVQF

SEQ ID NO: 13656 - protein, 8 aa, BK virus
TMAFVQFN

SEQ ID NO: 13657 - protein, 8 aa, BK virus
MAFVQFNW

SEQ ID NO: 13658 - protein, 8 aa, BK virus
AFVQFNWG

SEQ ID NO: 13659 - protein, 8 aa, BK virus
FVQFNWGQ

SEQ ID NO: 13660 - protein, 8 aa, BK virus
VQFNWGQG

SEQ ID NO: 13661 - protein, 8 aa, BK virus
QFNWGQGQ

SEQ ID NO: 13662 - protein, 8 aa, BK virus
FNWGQGQD

SEQ ID NO: 13663 - protein, 8 aa, BK virus
NWGQGQDS

SEQ ID NO: 13664 - protein, 8 aa, BK virus
ARKTCLSC

SEQ ID NO: 13665 - protein, 8 aa, BK virus
RKTCLSCT

SEQ ID NO: 13666 - protein, 8 aa, BK virus
KTCLSCTF

SEQ ID NO: 13667 - protein, 8 aa, BK virus
TCLSCTFL

SEQ ID NO: 13668 - protein, 8 aa, BK virus
CLSCTFLP

SEQ ID NO: 13669 - protein, 8 aa, BK virus
LSCTFLPE

SEQ ID NO: 13670 - protein, 8 aa, BK virus
SCTFLPEV

SEQ ID NO: 13671 - protein, 8 aa, BK virus
CTFLPEVM

SEQ ID NO: 13672 - protein, 8 aa, BK virus
TFLPEVMV

SEQ ID NO: 13673 - protein, 8 aa, BK virus
FLPEVMVW

SEQ ID NO: 13674 - protein, 8 aa, BK virus
LPEVMVWL

SEQ ID NO: 13675 - protein, 8 aa, BK virus
PEVMVWLH

SEQ ID NO: 13676 - protein, 8 aa, BK virus
EVMVWLHS

SEQ ID NO: 13677 - protein, 8 aa, BK virus
VMVWLHSM

SEQ ID NO: 13678 - protein, 8 aa, BK virus
MVWLHSMG

SEQ ID NO: 13679 - protein, 8 aa, BK virus
VWLHSMGK

SEQ ID NO: 13680 - protein, 8 aa, BK virus
WLHSMGKQ

SEQ ID NO: 13681 - protein, 8 aa, BK virus
LHSMGKQL

SEQ ID NO: 13682 - protein, 8 aa, BK virus
HSMGKQLL

SEQ ID NO: 13683 - protein, 8 aa, BK virus
SMGKQLLP

SEQ ID NO: 13684 - protein, 8 aa, BK virus
MGKQLLPV

SEQ ID NO: 13685 - protein, 8 aa, BK virus
GKQLLPVS

SEQ ID NO: 13686 - protein, 8 aa, BK virus
KQLLPVSH

SEQ ID NO: 13687 - protein, 8 aa, BK virus
QLLPVSHA

SEQ ID NO: 13688 - protein, 8 aa, BK virus
LLPVSHAL

SEQ ID NO: 13689 - protein, 8 aa, BK virus
LPVSHALS

SEQ ID NO: 13690 - protein, 8 aa, BK virus
PVSHALSF

SEQ ID NO: 13691 - protein, 8 aa, BK virus
VSHALSFL

SEQ ID NO: 13692 - protein, 8 aa, BK virus
SHALSFLR

SEQ ID NO: 13693 - protein, 8 aa, BK virus
HALSFLRS

SEQ ID NO: 13694 - protein, 8 aa, BK virus
ALSFLRSW

SEQ ID NO: 13695 - protein, 8 aa, BK virus
LSFLRSWF

SEQ ID NO: 13696 - protein, 8 aa, BK virus
SFLRSWFG

SEQ ID NO: 13697 - protein, 8 aa, BK virus
FLRSWFGC

SEQ ID NO: 13698 - protein, 8 aa, BK virus
LRSWFGCI

SEQ ID NO: 13699 - protein, 8 aa, BK virus
RSWFGCIP

SEQ ID NO: 13700 - protein, 8 aa, BK virus
SWFGCIPL

SEQ ID NO: 13701 - protein, 8 aa, BK virus
GHGLAAFH

SEQ ID NO: 13702 - protein, 8 aa, BK virus
HGLAAFHG

SEQ ID NO: 13703 - protein, 8 aa, BK virus
AAPPCGLF

SEQ ID NO: 13704 - protein, 8 aa, BK virus
APPCGLFF

SEQ ID NO: 13705 - protein, 8 aa, BK virus
PPCGLFFY

SEQ ID NO: 13706 - protein, 8 aa, BK virus
PCGLFFYN

SEQ ID NO: 13707 - protein, 8 aa, BK virus
CGLFFYNI

SEQ ID NO: 13708 - protein, 8 aa, BK virus
EAEAASAS

SEQ ID NO: 13709 - protein, 8 aa, BK virus
AEAASAST

SEQ ID NO: 13710 - protein, 8 aa, BK virus
EAASASTL

SEQ ID NO: 13711 - protein, 8 aa, BK virus
AASASTLS

SEQ ID NO: 13712 - protein, 8 aa, BK virus
ASASTLSL

SEQ ID NO: 13713 - protein, 8 aa, BK virus
SASTLSLK

SEQ ID NO: 13714 - protein, 8 aa, BK virus
GLAKLFGE

SEQ ID NO: 13715 - protein, 8 aa, BK virus
LAKLFGEI

SEQ ID NO: 13716 - protein, 8 aa, BK virus
AKLFGEIP

SEQ ID NO: 13717 - protein, 8 aa, BK virus
KLFGEIPI

SEQ ID NO: 13718 - protein, 8 aa, BK virus
LFGEIPIL

SEQ ID NO: 13719 - protein, 8 aa, BK virus
FGEIPILL

SEQ ID NO: 13720 - protein, 8 aa, BK virus
GEIPILLQ

SEQ ID NO: 13721 - protein, 8 aa, BK virus
EIPILLQF

SEQ ID NO: 13722 - protein, 8 aa, BK virus
IPILLQFL

SEQ ID NO: 13723 - protein, 8 aa, BK virus
PILLQFLQ

SEQ ID NO: 13724 - protein, 9 aa, BK virus
MDKVLNREE

SEQ ID NO: 13725 - protein, 9 aa, BK virus
DKVLNREES

SEQ ID NO: 13726 - protein, 9 aa, BK virus
KVLNREESM

SEQ ID NO: 13727 - protein, 9 aa, BK virus
VLNREESME

SEQ ID NO: 13728 - protein, 9 aa, BK virus
LNREESMEL

SEQ ID NO: 13729 - protein, 9 aa, BK virus
NREESMELM

SEQ ID NO: 13730 - protein, 9 aa, BK virus
REESMELMD

SEQ ID NO: 13731 - protein, 9 aa, BK virus
EESMELMDL

SEQ ID NO: 13732 - protein, 9 aa, BK virus
ESMELMDLL

SEQ ID NO: 13733 - protein, 9 aa, BK virus
SMELMDLLG

SEQ ID NO: 13734 - protein, 9 aa, BK virus
MELMDLLGL

SEQ ID NO: 13735 - protein, 9 aa, BK virus
ELMDLLGLE

SEQ ID NO: 13736 - protein, 9 aa, BK virus
LMDLLGLER

SEQ ID NO: 13737 - protein, 9 aa, BK virus
MDLLGLERA

SEQ ID NO: 13738 - protein, 9 aa, BK virus
DLLGLERAA

SEQ ID NO: 13739 - protein, 9 aa, BK virus
LLGLERAAW

SEQ ID NO: 13740 - protein, 9 aa, BK virus
LGLERAAWG

SEQ ID NO: 13741 - protein, 9 aa, BK virus
GLERAAWGN

SEQ ID NO: 13742 - protein, 9 aa, BK virus
LERAAWGNL

SEQ ID NO: 13743 - protein, 9 aa, BK virus
ERAAWGNLP

SEQ ID NO: 13744 - protein, 9 aa, BK virus
RAAWGNLPL

SEQ ID NO: 13745 - protein, 9 aa, BK virus
AAWGNLPLM

SEQ ID NO: 13746 - protein, 9 aa, BK virus
AWGNLPLMR

SEQ ID NO: 13747 - protein, 9 aa, BK virus
WGNLPLMRK

SEQ ID NO: 13748 - protein, 9 aa, BK virus
GNLPLMRKA

SEQ ID NO: 13749 - protein, 9 aa, BK virus
NLPLMRKAY

SEQ ID NO: 13750 - protein, 9 aa, BK virus
LPLMRKAYL

SEQ ID NO: 13751 - protein, 9 aa, BK virus
PLMRKAYLR

SEQ ID NO: 13752 - protein, 9 aa, BK virus
LMRKAYLRK

SEQ ID NO: 13753 - protein, 9 aa, BK virus
MRKAYLRKC

SEQ ID NO: 13754 - protein, 9 aa, BK virus
RKAYLRKCK

SEQ ID NO: 13755 - protein, 9 aa, BK virus
KAYLRKCKE

SEQ ID NO: 13756 - protein, 9 aa, BK virus
AYLRKCKEF

SEQ ID NO: 13757 - protein, 9 aa, BK virus
YLRKCKEFH

SEQ ID NO: 13758 - protein, 9 aa, BK virus
LRKCKEFHP

SEQ ID NO: 13759 - protein, 9 aa, BK virus
RKCKEFHPD

SEQ ID NO: 13760 - protein, 9 aa, BK virus
KCKEFHPDK

SEQ ID NO: 13761 - protein, 9 aa, BK virus
CKEFHPDKG

SEQ ID NO: 13762 - protein, 9 aa, BK virus
KEFHPDKGG

SEQ ID NO: 13763 - protein, 9 aa, BK virus
EFHPDKGGD

SEQ ID NO: 13764 - protein, 9 aa, BK virus
FHPDKGGDE

SEQ ID NO: 13765 - protein, 9 aa, BK virus
HPDKGGDED

SEQ ID NO: 13766 - protein, 9 aa, BK virus
PDKGGDEDK

SEQ ID NO: 13767 - protein, 9 aa, BK virus
DKGGDEDKM

SEQ ID NO: 13768 - protein, 9 aa, BK virus
KGGDEDKMK

SEQ ID NO: 13769 - protein, 9 aa, BK virus
GGDEDKMKR

SEQ ID NO: 13770 - protein, 9 aa, BK virus
GDEDKMKRM

SEQ ID NO: 13771 - protein, 9 aa, BK virus
DEDKMKRMN

SEQ ID NO: 13772 - protein, 9 aa, BK virus
EDKMKRMNT

SEQ ID NO: 13773 - protein, 9 aa, BK virus
DKMKRMNTL

SEQ ID NO: 13774 - protein, 9 aa, BK virus
KMKRMNTLY

SEQ ID NO: 13775 - protein, 9 aa, BK virus
MKRMNTLYK

SEQ ID NO: 13776 - protein, 9 aa, BK virus
KRMNTLYKK

SEQ ID NO: 13777 - protein, 9 aa, BK virus
RMNTLYKKM

SEQ ID NO: 13778 - protein, 9 aa, BK virus
MNTLYKKME

SEQ ID NO: 13779 - protein, 9 aa, BK virus
NTLYKKMEQ

SEQ ID NO: 13780 - protein, 9 aa, BK virus
TLYKKMEQD

SEQ ID NO: 13781 - protein, 9 aa, BK virus
LYKKMEQDV

SEQ ID NO: 13782 - protein, 9 aa, BK virus
YKKMEQDVK

SEQ ID NO: 13783 - protein, 9 aa, BK virus
KKMEQDVKV

SEQ ID NO: 13784 - protein, 9 aa, BK virus
KMEQDVKVA

SEQ ID NO: 13785 - protein, 9 aa, BK virus
MEQDVKVAH

SEQ ID NO: 13786 - protein, 9 aa, BK virus
EQDVKVAHQ

SEQ ID NO: 13787 - protein, 9 aa, BK virus
QDVKVAHQP

SEQ ID NO: 13788 - protein, 9 aa, BK virus
DVKVAHQPD

SEQ ID NO: 13789 - protein, 9 aa, BK virus
VKVAHQPDF

SEQ ID NO: 13790 - protein, 9 aa, BK virus
KVAHQPDFG

SEQ ID NO: 13791 - protein, 9 aa, BK virus
VAHQPDFGT

SEQ ID NO: 13792 - protein, 9 aa, BK virus
AHQPDFGTW

SEQ ID NO: 13793 - protein, 9 aa, BK virus
HQPDFGTWS

SEQ ID NO: 13794 - protein, 9 aa, BK virus
QPDFGTWSS

SEQ ID NO: 13795 - protein, 9 aa, BK virus
PDFGTWSSS

SEQ ID NO: 13796 - protein, 9 aa, BK virus
DFGTWSSSE

SEQ ID NO: 13797 - protein, 9 aa, BK virus
FGTWSSSEV

SEQ ID NO: 13798 - protein, 9 aa, BK virus
GTWSSSEVC

SEQ ID NO: 13799 - protein, 9 aa, BK virus
TWSSSEVCA

SEQ ID NO: 13800 - protein, 9 aa, BK virus
WSSSEVCAD

SEQ ID NO: 13801 - protein, 9 aa, BK virus
SSSEVCADF

SEQ ID NO: 13802 - protein, 9 aa, BK virus
SSEVCADFP

SEQ ID NO: 13803 - protein, 9 aa, BK virus
SEVCADFPL

SEQ ID NO: 13804 - protein, 9 aa, BK virus
EVCADFPLC

SEQ ID NO: 13805 - protein, 9 aa, BK virus
VCADFPLCP

SEQ ID NO: 13806 - protein, 9 aa, BK virus
CADFPLCPD

SEQ ID NO: 13807 - protein, 9 aa, BK virus
ADFPLCPDT

SEQ ID NO: 13808 - protein, 9 aa, BK virus
DFPLCPDTL

SEQ ID NO: 13809 - protein, 9 aa, BK virus
FPLCPDTLY

SEQ ID NO: 13810 - protein, 9 aa, BK virus
PLCPDTLYC

SEQ ID NO: 13811 - protein, 9 aa, BK virus
LCPDTLYCK

SEQ ID NO: 13812 - protein, 9 aa, BK virus
CPDTLYCKE

SEQ ID NO: 13813 - protein, 9 aa, BK virus
PDTLYCKEW

SEQ ID NO: 13814 - protein, 9 aa, BK virus
DTLYCKEWP

SEQ ID NO: 13815 - protein, 9 aa, BK virus
TLYCKEWPI

SEQ ID NO: 13816 - protein, 9 aa, BK virus
LYCKEWPIC

SEQ ID NO: 13817 - protein, 9 aa, BK virus
YCKEWPICS

SEQ ID NO: 13818 - protein, 9 aa, BK virus
CKEWPICSK

SEQ ID NO: 13819 - protein, 9 aa, BK virus
KEWPICSKK

SEQ ID NO: 13820 - protein, 9 aa, BK virus
EWPICSKKP

SEQ ID NO: 13821 - protein, 9 aa, BK virus
WPICSKKPS

SEQ ID NO: 13822 - protein, 9 aa, BK virus
PICSKKPSV

SEQ ID NO: 13823 - protein, 9 aa, BK virus
ICSKKPSVH

SEQ ID NO: 13824 - protein, 9 aa, BK virus
CSKKPSVHC

SEQ ID NO: 13825 - protein, 9 aa, BK virus
SKKPSVHCP

SEQ ID NO: 13826 - protein, 9 aa, BK virus
KKPSVHCPC

SEQ ID NO: 13827 - protein, 9 aa, BK virus
KPSVHCPCM

SEQ ID NO: 13828 - protein, 9 aa, BK virus
PSVHCPCML

SEQ ID NO: 13829 - protein, 9 aa, BK virus
SVHCPCMLC

SEQ ID NO: 13830 - protein, 9 aa, BK virus
VHCPCMLCQ

SEQ ID NO: 13831 - protein, 9 aa, BK virus
HCPCMLCQL

SEQ ID NO: 13832 - protein, 9 aa, BK virus
CPCMLCQLR

SEQ ID NO: 13833 - protein, 9 aa, BK virus
PCMLCQLRL

SEQ ID NO: 13834 - protein, 9 aa, BK virus
CMLCQLRLR

SEQ ID NO: 13835 - protein, 9 aa, BK virus
MLCQLRLRH

SEQ ID NO: 13836 - protein, 9 aa, BK virus
LCQLRLRHL

SEQ ID NO: 13837 - protein, 9 aa, BK virus
CQLRLRHLN

SEQ ID NO: 13838 - protein, 9 aa, BK virus
QLRLRHLNR

SEQ ID NO: 13839 - protein, 9 aa, BK virus
LRLRHLNRK

SEQ ID NO: 13840 - protein, 9 aa, BK virus
RLRHLNRKF

SEQ ID NO: 13841 - protein, 9 aa, BK virus
LRHLNRKFL

SEQ ID NO: 13842 - protein, 9 aa, BK virus
RHLNRKFLR

SEQ ID NO: 13843 - protein, 9 aa, BK virus
HLNRKFLRK

SEQ ID NO: 13844 - protein, 9 aa, BK virus
LNRKFLRKE

SEQ ID NO: 13845 - protein, 9 aa, BK virus
NRKFLRKEP

SEQ ID NO: 13846 - protein, 9 aa, BK virus
RKFLRKEPL

SEQ ID NO: 13847 - protein, 9 aa, BK virus
KFLRKEPLV

SEQ ID NO: 13848 - protein, 9 aa, BK virus
FLRKEPLVW

SEQ ID NO: 13849 - protein, 9 aa, BK virus
LRKEPLVWI

SEQ ID NO: 13850 - protein, 9 aa, BK virus
RKEPLVWID

SEQ ID NO: 13851 - protein, 9 aa, BK virus
KEPLVWIDC

SEQ ID NO: 13852 - protein, 9 aa, BK virus
EPLVWIDCY

SEQ ID NO: 13853 - protein, 9 aa, BK virus
PLVWIDCYC

SEQ ID NO: 13854 - protein, 9 aa, BK virus
LVWIDCYCI

SEQ ID NO: 13855 - protein, 9 aa, BK virus
VWIDCYCID

SEQ ID NO: 13856 - protein, 9 aa, BK virus
WIDCYCIDC

SEQ ID NO: 13857 - protein, 9 aa, BK virus
IDCYCIDCF

SEQ ID NO: 13858 - protein, 9 aa, BK virus
DCYCIDCFT

SEQ ID NO: 13859 - protein, 9 aa, BK virus
CYCIDCFTQ

SEQ ID NO: 13860 - protein, 9 aa, BK virus
YCIDCFTQW

SEQ ID NO: 13861 - protein, 9 aa, BK virus
CIDCFTQWF

SEQ ID NO: 13862 - protein, 9 aa, BK virus
IDCFTQWFG

SEQ ID NO: 13863 - protein, 9 aa, BK virus
DCFTQWFGL

SEQ ID NO: 13864 - protein, 9 aa, BK virus
CFTQWFGLD

SEQ ID NO: 13865 - protein, 9 aa, BK virus
FTQWFGLDL

SEQ ID NO: 13866 - protein, 9 aa, BK virus
TQWFGLDLT

SEQ ID NO: 13867 - protein, 9 aa, BK virus
QWFGLDLTE

SEQ ID NO: 13868 - protein, 9 aa, BK virus
WFGLDLTEE

SEQ ID NO: 13869 - protein, 9 aa, BK virus
FGLDLTEET

SEQ ID NO: 13870 - protein, 9 aa, BK virus
GLDLTEETL

SEQ ID NO: 13871 - protein, 9 aa, BK virus
LDLTEETLQ

SEQ ID NO: 13872 - protein, 9 aa, BK virus
DLTEETLQW

SEQ ID NO: 13873 - protein, 9 aa, BK virus
LTEETLQWW

SEQ ID NO: 13874 - protein, 9 aa, BK virus
TEETLQWWV

SEQ ID NO: 13875 - protein, 9 aa, BK virus
EETLQWWVQ

SEQ ID NO: 13876 - protein, 9 aa, BK virus
ETLQWWVQI

SEQ ID NO: 13877 - protein, 9 aa, BK virus
TLQWWVQII

SEQ ID NO: 13878 - protein, 9 aa, BK virus
LQWWVQIIG

SEQ ID NO: 13879 - protein, 9 aa, BK virus
QWWVQIIGE

SEQ ID NO: 13880 - protein, 9 aa, BK virus
WWVQIIGET

SEQ ID NO: 13881 - protein, 9 aa, BK virus
WVQIIGETP

SEQ ID NO: 13882 - protein, 9 aa, BK virus
VQIIGETPF

SEQ ID NO: 13883 - protein, 9 aa, BK virus
QIIGETPFR

SEQ ID NO: 13884 - protein, 9 aa, BK virus
IIGETPFRD

SEQ ID NO: 13885 - protein, 9 aa, BK virus
IGETPFRDL

SEQ ID NO: 13886 - protein, 9 aa, BK virus
GETPFRDLK

SEQ ID NO: 13887 - protein, 9 aa, BK virus
ETPFRDLKL

SEQ ID NO: 13888 - protein, 9 aa, BK virus
KALSNYFFY

SEQ ID NO: 13889 - protein, 9 aa, BK virus
ALSNYFFYR

SEQ ID NO: 13890 - protein, 9 aa, BK virus
LSNYFFYRC

SEQ ID NO: 13891 - protein, 9 aa, BK virus
SNYFFYRCQ

SEQ ID NO: 13892 - protein, 9 aa, BK virus
NYFFYRCQP

SEQ ID NO: 13893 - protein, 9 aa, BK virus
YFFYRCQPM

SEQ ID NO: 13894 - protein, 9 aa, BK virus
FFYRCQPME

SEQ ID NO: 13895 - protein, 9 aa, BK virus
FYRCQPMEQ

SEQ ID NO: 13896 - protein, 9 aa, BK virus
YRCQPMEQK

SEQ ID NO: 13897 - protein, 9 aa, BK virus
RCQPMEQKS

SEQ ID NO: 13898 - protein, 9 aa, BK virus
CQPMEQKSG

SEQ ID NO: 13899 - protein, 9 aa, BK virus
QPMEQKSGS

SEQ ID NO: 13900 - protein, 9 aa, BK virus
PMEQKSGSP

SEQ ID NO: 13901 - protein, 9 aa, BK virus
MEQKSGSPG

SEQ ID NO: 13902 - protein, 9 aa, BK virus
EQKSGSPGG

SEQ ID NO: 13903 - protein, 9 aa, BK virus
QKSGSPGGV

SEQ ID NO: 13904 - protein, 9 aa, BK virus
KSGSPGGVP

SEQ ID NO: 13905 - protein, 9 aa, BK virus
SGSPGGVPL

SEQ ID NO: 13906 - protein, 9 aa, BK virus
GSPGGVPLM

SEQ ID NO: 13907 - protein, 9 aa, BK virus
SPGGVPLMK

SEQ ID NO: 13908 - protein, 9 aa, BK virus
PGGVPLMKN

SEQ ID NO: 13909 - protein, 9 aa, BK virus
GGVPLMKNG

SEQ ID NO: 13910 - protein, 9 aa, BK virus
GVPLMKNGM

SEQ ID NO: 13911 - protein, 9 aa, BK virus
VPLMKNGMK

SEQ ID NO: 13912 - protein, 9 aa, BK virus
PLMKNGMKI

SEQ ID NO: 13913 - protein, 9 aa, BK virus
LMKNGMKIY

SEQ ID NO: 13914 - protein, 9 aa, BK virus
MKNGMKIYF

SEQ ID NO: 13915 - protein, 9 aa, BK virus
KNGMKIYFA

SEQ ID NO: 13916 - protein, 9 aa, BK virus
NGMKIYFAM

SEQ ID NO: 13917 - protein, 9 aa, BK virus
GMKIYFAMK

SEQ ID NO: 13918 - protein, 9 aa, BK virus
MKIYFAMKI

SEQ ID NO: 13919 - protein, 9 aa, BK virus
KIYFAMKIC

SEQ ID NO: 13920 - protein, 9 aa, BK virus
IYFAMKICL

SEQ ID NO: 13921 - protein, 9 aa, BK virus
YFAMKICLP

SEQ ID NO: 13922 - protein, 9 aa, BK virus
FAMKICLPV

SEQ ID NO: 13923 - protein, 9 aa, BK virus
AMKICLPVM

SEQ ID NO: 13924 - protein, 9 aa, BK virus
MKICLPVMK

SEQ ID NO: 13925 - protein, 9 aa, BK virus
KICLPVMKK

SEQ ID NO: 13926 - protein, 9 aa, BK virus
ICLPVMKKQ

SEQ ID NO: 13927 - protein, 9 aa, BK virus
CLPVMKKQQ

SEQ ID NO: 13928 - protein, 9 aa, BK virus
LPVMKKQQQ

SEQ ID NO: 13929 - protein, 9 aa, BK virus
PVMKKQQQI

SEQ ID NO: 13930 - protein, 9 aa, BK virus
VMKKQQQIL

SEQ ID NO: 13931 - protein, 9 aa, BK virus
MKKQQQILN

SEQ ID NO: 13932 - protein, 9 aa, BK virus
KKQQQILNT

SEQ ID NO: 13933 - protein, 9 aa, BK virus
KQQQILNTQ

SEQ ID NO: 13934 - protein, 9 aa, BK virus
QQQILNTQH

SEQ ID NO: 13935 - protein, 9 aa, BK virus
QQILNTQHH

SEQ ID NO: 13936 - protein, 9 aa, BK virus
QILNTQHHP

SEQ ID NO: 13937 - protein, 9 aa, BK virus
ILNTQHHPK

SEQ ID NO: 13938 - protein, 9 aa, BK virus
LNTQHHPKK

SEQ ID NO: 13939 - protein, 9 aa, BK virus
NTQHHPKKK

SEQ ID NO: 13940 - protein, 9 aa, BK virus
TQHHPKKKE

SEQ ID NO: 13941 - protein, 9 aa, BK virus
QHHPKKKER

SEQ ID NO: 13942 - protein, 9 aa, BK virus
KTLKTFPLI

SEQ ID NO: 13943 - protein, 9 aa, BK virus
TLKTFPLIY

SEQ ID NO: 13944 - protein, 9 aa, BK virus
LKTFPLIYT

SEQ ID NO: 13945 - protein, 9 aa, BK virus
KTFPLIYTS

SEQ ID NO: 13946 - protein, 9 aa, BK virus
TFPLIYTSF

SEQ ID NO: 13947 - protein, 9 aa, BK virus
FPLIYTSFL

SEQ ID NO: 13948 - protein, 9 aa, BK virus
PLIYTSFLV

SEQ ID NO: 13949 - protein, 9 aa, BK virus
LIYTSFLVK

SEQ ID NO: 13950 - protein, 9 aa, BK virus
IYTSFLVKL

SEQ ID NO: 13951 - protein, 9 aa, BK virus
YTSFLVKLY

SEQ ID NO: 13952 - protein, 9 aa, BK virus
TSFLVKLYL

SEQ ID NO: 13953 - protein, 9 aa, BK virus
SFLVKLYLV

SEQ ID NO: 13954 - protein, 9 aa, BK virus
FLVKLYLVI

SEQ ID NO: 13955 - protein, 9 aa, BK virus
LVKLYLVIE

SEQ ID NO: 13956 - protein, 9 aa, BK virus
VKLYLVIEP

SEQ ID NO: 13957 - protein, 9 aa, BK virus
KLYLVIEPL

SEQ ID NO: 13958 - protein, 9 aa, BK virus
LYLVIEPLP

SEQ ID NO: 13959 - protein, 9 aa, BK virus
YLVIEPLPA

SEQ ID NO: 13960 - protein, 9 aa, BK virus
LVIEPLPAL

SEQ ID NO: 13961 - protein, 9 aa, BK virus
VIEPLPALL

SEQ ID NO: 13962 - protein, 9 aa, BK virus
IEPLPALLC

SEQ ID NO: 13963 - protein, 9 aa, BK virus
EPLPALLCI

SEQ ID NO: 13964 - protein, 9 aa, BK virus
PLPALLCIL

SEQ ID NO: 13965 - protein, 9 aa, BK virus
LPALLCILL

SEQ ID NO: 13966 - protein, 9 aa, BK virus
PALLCILLK

SEQ ID NO: 13967 - protein, 9 aa, BK virus
ALLCILLKK

SEQ ID NO: 13968 - protein, 9 aa, BK virus
LLCILLKKK

SEQ ID NO: 13969 - protein, 9 aa, BK virus
LCILLKKKL

SEQ ID NO: 13970 - protein, 9 aa, BK virus
CILLKKKLK

SEQ ID NO: 13971 - protein, 9 aa, BK virus
ILLKKKLKF

SEQ ID NO: 13972 - protein, 9 aa, BK virus
LLKKKLKFC

SEQ ID NO: 13973 - protein, 9 aa, BK virus
LKKKLKFCI

SEQ ID NO: 13974 - protein, 9 aa, BK virus
KKKLKFCIK

SEQ ID NO: 13975 - protein, 9 aa, BK virus
KKLKFCIKN

SEQ ID NO: 13976 - protein, 9 aa, BK virus
KLKFCIKNL

SEQ ID NO: 13977 - protein, 9 aa, BK virus
LKFCIKNLW

SEQ ID NO: 13978 - protein, 9 aa, BK virus
KFCIKNLWK

SEQ ID NO: 13979 - protein, 9 aa, BK virus
FCIKNLWKN

SEQ ID NO: 13980 - protein, 9 aa, BK virus
CIKNLWKNI

SEQ ID NO: 13981 - protein, 9 aa, BK virus
IKNLWKNIL

SEQ ID NO: 13982 - protein, 9 aa, BK virus
LLLVDTCVL

SEQ ID NO: 13983 - protein, 9 aa, BK virus
LLVDTCVLG

SEQ ID NO: 13984 - protein, 9 aa, BK virus
LVDTCVLGI

SEQ ID NO: 13985 - protein, 9 aa, BK virus
VDTCVLGII

SEQ ID NO: 13986 - protein, 9 aa, BK virus
DTCVLGIIL

SEQ ID NO: 13987 - protein, 9 aa, BK virus
TCVLGIILY

SEQ ID NO: 13988 - protein, 9 aa, BK virus
CVLGIILYS

SEQ ID NO: 13989 - protein, 9 aa, BK virus
VLGIILYSF

SEQ ID NO: 13990 - protein, 9 aa, BK virus
LHIDIEFLQ

SEQ ID NO: 13991 - protein, 9 aa, BK virus
HIDIEFLQL

SEQ ID NO: 13992 - protein, 9 aa, BK virus
IDIEFLQLI

SEQ ID NO: 13993 - protein, 9 aa, BK virus
DIEFLQLII

SEQ ID NO: 13994 - protein, 9 aa, BK virus
IEFLQLIIS

SEQ ID NO: 13995 - protein, 9 aa, BK virus
EFLQLIISV

SEQ ID NO: 13996 - protein, 9 aa, BK virus
FLQLIISVK

SEQ ID NO: 13997 - protein, 9 aa, BK virus
LQLIISVKS

SEQ ID NO: 13998 - protein, 9 aa, BK virus
QLIISVKSC

SEQ ID NO: 13999 - protein, 9 aa, BK virus
LIISVKSCV

SEQ ID NO: 14000 - protein, 9 aa, BK virus
IISVKSCVP

SEQ ID NO: 14001 - protein, 9 aa, BK virus
ISVKSCVPL

SEQ ID NO: 14002 - protein, 9 aa, BK virus
SVKSCVPLV

SEQ ID NO: 14003 - protein, 9 aa, BK virus
VKSCVPLVF

SEQ ID NO: 14004 - protein, 9 aa, BK virus
FVRVLIRNT

SEQ ID NO: 14005 - protein, 9 aa, BK virus
VRVLIRNTY

SEQ ID NO: 14006 - protein, 9 aa, BK virus
RVLIRNTYY

SEQ ID NO: 14007 - protein, 9 aa, BK virus
VLIRNTYYI

SEQ ID NO: 14008 - protein, 9 aa, BK virus
LIRNTYYIV

SEQ ID NO: 14009 - protein, 9 aa, BK virus
IRNTYYIVP

SEQ ID NO: 14010 - protein, 9 aa, BK virus
RSMILAQKS

SEQ ID NO: 14011 - protein, 9 aa, BK virus
SMILAQKSL

SEQ ID NO: 14012 - protein, 9 aa, BK virus
MILAQKSLK

SEQ ID NO: 14013 - protein, 9 aa, BK virus
ILAQKSLKK

SEQ ID NO: 14014 - protein, 9 aa, BK virus
LAQKSLKKQ

SEQ ID NO: 14015 - protein, 9 aa, BK virus
AQKSLKKQS

SEQ ID NO: 14016 - protein, 9 aa, BK virus
QKSLKKQSR

SEQ ID NO: 14017 - protein, 9 aa, BK virus
KSLKKQSRC

SEQ ID NO: 14018 - protein, 9 aa, BK virus
SLKKQSRCL

SEQ ID NO: 14019 - protein, 9 aa, BK virus
LKKQSRCLG

SEQ ID NO: 14020 - protein, 9 aa, BK virus
KKQSRCLGN

SEQ ID NO: 14021 - protein, 9 aa, BK virus
RQSVRMCFY

SEQ ID NO: 14022 - protein, 9 aa, BK virus
QSVRMCFYY

SEQ ID NO: 14023 - protein, 9 aa, BK virus
RSVKSVRKK

SEQ ID NO: 14024 - protein, 9 aa, BK virus
SVKSVRKKT

SEQ ID NO: 14025 - protein, 9 aa, BK virus
VKSVRKKTS

SEQ ID NO: 14026 - protein, 9 aa, BK virus
KSVRKKTSL

SEQ ID NO: 14027 - protein, 9 aa, BK virus
SVRKKTSLI

SEQ ID NO: 14028 - protein, 9 aa, BK virus
VRKKTSLIT

SEQ ID NO: 14029 - protein, 9 aa, BK virus
RKKTSLITL

SEQ ID NO: 14030 - protein, 9 aa, BK virus
KKTSLITLS

SEQ ID NO: 14031 - protein, 9 aa, BK virus
KTSLITLSI

SEQ ID NO: 14032 - protein, 9 aa, BK virus
TSLITLSIM

SEQ ID NO: 14033 - protein, 9 aa, BK virus
SLITLSIMK

SEQ ID NO: 14034 - protein, 9 aa, BK virus
LITLSIMKS

SEQ ID NO: 14035 - protein, 9 aa, BK virus
ITLSIMKST

SEQ ID NO: 14036 - protein, 9 aa, BK virus
TLSIMKSTL

SEQ ID NO: 14037 - protein, 9 aa, BK virus
LSIMKSTLQ

SEQ ID NO: 14038 - protein, 9 aa, BK virus
SIMKSTLQM

SEQ ID NO: 14039 - protein, 9 aa, BK virus
IMKSTLQML

SEQ ID NO: 14040 - protein, 9 aa, BK virus
MKSTLQMLL

SEQ ID NO: 14041 - protein, 9 aa, BK virus
KSTLQMLLF

SEQ ID NO: 14042 - protein, 9 aa, BK virus
STLQMLLFL

SEQ ID NO: 14043 - protein, 9 aa, BK virus
TLQMLLFLQ

SEQ ID NO: 14044 - protein, 9 aa, BK virus
LQMLLFLQK

SEQ ID NO: 14045 - protein, 9 aa, BK virus
QMLLFLQKV

SEQ ID NO: 14046 - protein, 9 aa, BK virus
MLLFLQKVK

SEQ ID NO: 14047 - protein, 9 aa, BK virus
LLFLQKVKI

SEQ ID NO: 14048 - protein, 9 aa, BK virus
LFLQKVKIK

SEQ ID NO: 14049 - protein, 9 aa, BK virus
FLQKVKIKK

SEQ ID NO: 14050 - protein, 9 aa, BK virus
LQKVKIKKV

SEQ ID NO: 14051 - protein, 9 aa, BK virus
QKVKIKKVF

SEQ ID NO: 14052 - protein, 9 aa, BK virus
KVKIKKVFV

SEQ ID NO: 14053 - protein, 9 aa, BK virus
VKIKKVFVS

SEQ ID NO: 14054 - protein, 9 aa, BK virus
KIKKVFVSK

SEQ ID NO: 14055 - protein, 9 aa, BK virus
IKKVFVSKQ

SEQ ID NO: 14056 - protein, 9 aa, BK virus
YLELMEMLY

SEQ ID NO: 14057 - protein, 9 aa, BK virus
NNIWQVLLG

SEQ ID NO: 14058 - protein, 9 aa, BK virus
NIWQVLLGC

SEQ ID NO: 14059 - protein, 9 aa, BK virus
IWQVLLGCT

SEQ ID NO: 14060 - protein, 9 aa, BK virus
WQVLLGCTV

SEQ ID NO: 14061 - protein, 9 aa, BK virus
QVLLGCTVC

SEQ ID NO: 14062 - protein, 9 aa, BK virus
VLLGCTVCY

SEQ ID NO: 14063 - protein, 9 aa, BK virus
LLGCTVCYL

SEQ ID NO: 14064 - protein, 9 aa, BK virus
LGCTVCYLK

SEQ ID NO: 14065 - protein, 9 aa, BK virus
GCTVCYLKW

SEQ ID NO: 14066 - protein, 9 aa, BK virus
CTVCYLKWI

SEQ ID NO: 14067 - protein, 9 aa, BK virus
TVCYLKWIL

SEQ ID NO: 14068 - protein, 9 aa, BK virus
YLIFCTVLF

SEQ ID NO: 14069 - protein, 9 aa, BK virus
LIFCTVLFS

SEQ ID NO: 14070 - protein, 9 aa, BK virus
IFCTVLFSM

SEQ ID NO: 14071 - protein, 9 aa, BK virus
FCTVLFSMY

SEQ ID NO: 14072 - protein, 9 aa, BK virus
CTVLFSMYL

SEQ ID NO: 14073 - protein, 9 aa, BK virus
TVLFSMYLK

SEQ ID NO: 14074 - protein, 9 aa, BK virus
VLFSMYLKE

SEQ ID NO: 14075 - protein, 9 aa, BK virus
LFSMYLKED

SEQ ID NO: 14076 - protein, 9 aa, BK virus
FSMYLKEDT

SEQ ID NO: 14077 - protein, 9 aa, BK virus
SMYLKEDTG

SEQ ID NO: 14078 - protein, 9 aa, BK virus
MYLKEDTGY

SEQ ID NO: 14079 - protein, 9 aa, BK virus
YLKEDTGYL

SEQ ID NO: 14080 - protein, 9 aa, BK virus
LKEDTGYLK

SEQ ID NO: 14081 - protein, 9 aa, BK virus
KEDTGYLKV

SEQ ID NO: 14082 - protein, 9 aa, BK virus
EDTGYLKVP

SEQ ID NO: 14083 - protein, 9 aa, BK virus
DTGYLKVPL

SEQ ID NO: 14084 - protein, 9 aa, BK virus
TGYLKVPLI

SEQ ID NO: 14085 - protein, 9 aa, BK virus
GYLKVPLIV

SEQ ID NO: 14086 - protein, 9 aa, BK virus
YLKVPLIVE

SEQ ID NO: 14087 - protein, 9 aa, BK virus
LKVPLIVEK

SEQ ID NO: 14088 - protein, 9 aa, BK virus
KVPLIVEKQ

SEQ ID NO: 14089 - protein, 9 aa, BK virus
VPLIVEKQH

SEQ ID NO: 14090 - protein, 9 aa, BK virus
ISTWLFLKM

SEQ ID NO: 14091 - protein, 9 aa, BK virus
KGQELNQRI

SEQ ID NO: 14092 - protein, 9 aa, BK virus
GQELNQRIC

SEQ ID NO: 14093 - protein, 9 aa, BK virus
QELNQRICL

SEQ ID NO: 14094 - protein, 9 aa, BK virus
ELNQRICLQ

SEQ ID NO: 14095 - protein, 9 aa, BK virus
LNQRICLQD

SEQ ID NO: 14096 - protein, 9 aa, BK virus
NQRICLQDM

SEQ ID NO: 14097 - protein, 9 aa, BK virus
QRICLQDME

SEQ ID NO: 14098 - protein, 9 aa, BK virus
TKEPKYFHQ

SEQ ID NO: 14099 - protein, 9 aa, BK virus
KEPKYFHQA

SEQ ID NO: 14100 - protein, 9 aa, BK virus
EPKYFHQAW

SEQ ID NO: 14101 - protein, 9 aa, BK virus
PKYFHQAWL

SEQ ID NO: 14102 - protein, 9 aa, BK virus
KYFHQAWLQ

SEQ ID NO: 14103 - protein, 9 aa, BK virus
MSILSLKPC

SEQ ID NO: 14104 - protein, 9 aa, BK virus
SILSLKPCK

SEQ ID NO: 14105 - protein, 9 aa, BK virus
ILSLKPCKL

SEQ ID NO: 14106 - protein, 9 aa, BK virus
LSLKPCKLD

SEQ ID NO: 14107 - protein, 9 aa, BK virus
SLKPCKLDL

SEQ ID NO: 14108 - protein, 9 aa, BK virus
ENPYKTQSS

SEQ ID NO: 14109 - protein, 9 aa, BK virus
NPYKTQSSY

SEQ ID NO: 14110 - protein, 9 aa, BK virus
PYKTQSSYL

SEQ ID NO: 14111 - protein, 9 aa, BK virus
YKTQSSYLK

SEQ ID NO: 14112 - protein, 9 aa, BK virus
KTQSSYLKK

SEQ ID NO: 14113 - protein, 9 aa, BK virus
TQSSYLKKE

SEQ ID NO: 14114 - protein, 9 aa, BK virus
QSSYLKKEF

SEQ ID NO: 14115 - protein, 9 aa, BK virus
SSYLKKEFY

SEQ ID NO: 14116 - protein, 9 aa, BK virus
SYLKKEFYK

SEQ ID NO: 14117 - protein, 9 aa, BK virus
YLKKEFYKV

SEQ ID NO: 14118 - protein, 9 aa, BK virus
LKKEFYKVE

SEQ ID NO: 14119 - protein, 9 aa, BK virus
LILQLIYNL

SEQ ID NO: 14120 - protein, 9 aa, BK virus
ILQLIYNLE

SEQ ID NO: 14121 - protein, 9 aa, BK virus
LQLIYNLEL

SEQ ID NO: 14122 - protein, 9 aa, BK virus
QLIYNLELL

SEQ ID NO: 14123 - protein, 9 aa, BK virus
LIYNLELLN

SEQ ID NO: 14124 - protein, 9 aa, BK virus
IYNLELLNG

SEQ ID NO: 14125 - protein, 9 aa, BK virus
YNLELLNGR

SEQ ID NO: 14126 - protein, 9 aa, BK virus
NLELLNGRK

SEQ ID NO: 14127 - protein, 9 aa, BK virus
LELLNGRKG

SEQ ID NO: 14128 - protein, 9 aa, BK virus
ELLNGRKGW

SEQ ID NO: 14129 - protein, 9 aa, BK virus
LLNGRKGWI

SEQ ID NO: 14130 - protein, 9 aa, BK virus
LNGRKGWIL

SEQ ID NO: 14131 - protein, 9 aa, BK virus
NGRKGWILR

SEQ ID NO: 14132 - protein, 9 aa, BK virus
NIIYAWGNV

SEQ ID NO: 14133 - protein, 9 aa, BK virus
IIYAWGNVF

SEQ ID NO: 14134 - protein, 9 aa, BK virus
IYAWGNVFL

SEQ ID NO: 14135 - protein, 9 aa, BK virus
YAWGNVFLI

SEQ ID NO: 14136 - protein, 9 aa, BK virus
AWGNVFLIL

SEQ ID NO: 14137 - protein, 9 aa, BK virus
WGNVFLILQ

SEQ ID NO: 14138 - protein, 9 aa, BK virus
GNVFLILQE

SEQ ID NO: 14139 - protein, 9 aa, BK virus
NVFLILQEK

SEQ ID NO: 14140 - protein, 9 aa, BK virus
VFLILQEKR

SEQ ID NO: 14141 - protein, 9 aa, BK virus
FLILQEKRI

SEQ ID NO: 14142 - protein, 9 aa, BK virus
LILQEKRIQ

SEQ ID NO: 14143 - protein, 9 aa, BK virus
ILQEKRIQK

SEQ ID NO: 14144 - protein, 9 aa, BK virus
LQEKRIQKL

SEQ ID NO: 14145 - protein, 9 aa, BK virus
QEKRIQKLK

SEQ ID NO: 14146 - protein, 9 aa, BK virus
EKRIQKLKT

SEQ ID NO: 14147 - protein, 9 aa, BK virus
KRIQKLKTL

SEQ ID NO: 14148 - protein, 9 aa, BK virus
RIQKLKTLD

SEQ ID NO: 14149 - protein, 9 aa, BK virus
IQKLKTLDM

SEQ ID NO: 14150 - protein, 9 aa, BK virus
QKLKTLDMD

SEQ ID NO: 14151 - protein, 9 aa, BK virus
KLKTLDMDQ

SEQ ID NO: 14152 - protein, 9 aa, BK virus
LKTLDMDQA

SEQ ID NO: 14153 - protein, 9 aa, BK virus
KTLDMDQAL

SEQ ID NO: 14154 - protein, 9 aa, BK virus
TLDMDQALN

SEQ ID NO: 14155 - protein, 9 aa, BK virus
LDMDQALNP

SEQ ID NO: 14156 - protein, 9 aa, BK virus
DMDQALNPN

SEQ ID NO: 14157 - protein, 9 aa, BK virus
MDQALNPNH

SEQ ID NO: 14158 - protein, 9 aa, BK virus
DQALNPNHN

SEQ ID NO: 14159 - protein, 9 aa, BK virus
QALNPNHNA

SEQ ID NO: 14160 - protein, 9 aa, BK virus
ALNPNHNAL

SEQ ID NO: 14161 - protein, 9 aa, BK virus
LNPNHNALP

SEQ ID NO: 14162 - protein, 9 aa, BK virus
NPNHNALPK

SEQ ID NO: 14163 - protein, 9 aa, BK virus
PNHNALPKS

SEQ ID NO: 14164 - protein, 9 aa, BK virus
NHNALPKSQ

SEQ ID NO: 14165 - protein, 9 aa, BK virus
HNALPKSQI

SEQ ID NO: 14166 - protein, 9 aa, BK virus
NALPKSQIL

SEQ ID NO: 14167 - protein, 9 aa, BK virus
ALPKSQILQ

SEQ ID NO: 14168 - protein, 9 aa, BK virus
LPKSQILQP

SEQ ID NO: 14169 - protein, 9 aa, BK virus
PKSQILQPL

SEQ ID NO: 14170 - protein, 9 aa, BK virus
KSQILQPLL

SEQ ID NO: 14171 - protein, 9 aa, BK virus
SQILQPLLK

SEQ ID NO: 14172 - protein, 9 aa, BK virus
QILQPLLKI

SEQ ID NO: 14173 - protein, 9 aa, BK virus
ILQPLLKIP

SEQ ID NO: 14174 - protein, 9 aa, BK virus
LQPLLKIPK

SEQ ID NO: 14175 - protein, 9 aa, BK virus
QPLLKIPKG

SEQ ID NO: 14176 - protein, 9 aa, BK virus
PLLKIPKGQ

SEQ ID NO: 14177 - protein, 9 aa, BK virus
LLKIPKGQT

SEQ ID NO: 14178 - protein, 9 aa, BK virus
LKIPKGQTP

SEQ ID NO: 14179 - protein, 9 aa, BK virus
KIPKGQTPI

SEQ ID NO: 14180 - protein, 9 aa, BK virus
IPKGQTPIV

SEQ ID NO: 14181 - protein, 9 aa, BK virus
PKGQTPIVK

SEQ ID NO: 14182 - protein, 9 aa, BK virus
KGQTPIVKS

SEQ ID NO: 14183 - protein, 9 aa, BK virus
GQTPIVKSC

SEQ ID NO: 14184 - protein, 9 aa, BK virus
QTPIVKSCI

SEQ ID NO: 14185 - protein, 9 aa, BK virus
TPIVKSCIC

SEQ ID NO: 14186 - protein, 9 aa, BK virus
PIVKSCICV

SEQ ID NO: 14187 - protein, 9 aa, BK virus
IVKSCICVK

SEQ ID NO: 14188 - protein, 9 aa, BK virus
VKSCICVKA

SEQ ID NO: 14189 - protein, 9 aa, BK virus
KSCICVKAF

SEQ ID NO: 14190 - protein, 9 aa, BK virus
SCICVKAFS

SEQ ID NO: 14191 - protein, 9 aa, BK virus
CICVKAFSV

SEQ ID NO: 14192 - protein, 9 aa, BK virus
ICVKAFSVL

SEQ ID NO: 14193 - protein, 9 aa, BK virus
CVKAFSVLK

SEQ ID NO: 14194 - protein, 9 aa, BK virus
VKAFSVLKG

SEQ ID NO: 14195 - protein, 9 aa, BK virus
KAFSVLKGL

SEQ ID NO: 14196 - protein, 9 aa, BK virus
AFSVLKGLK

SEQ ID NO: 14197 - protein, 9 aa, BK virus
FSVLKGLKH

SEQ ID NO: 14198 - protein, 9 aa, BK virus
SVLKGLKHH

SEQ ID NO: 14199 - protein, 9 aa, BK virus
VLKGLKHHP

SEQ ID NO: 14200 - protein, 9 aa, BK virus
LKGLKHHPQ

SEQ ID NO: 14201 - protein, 9 aa, BK virus
KGLKHHPQN

SEQ ID NO: 14202 - protein, 9 aa, BK virus
GLKHHPQNN

SEQ ID NO: 14203 - protein, 9 aa, BK virus
LKHHPQNNT

SEQ ID NO: 14204 - protein, 9 aa, BK virus
KHHPQNNTS

SEQ ID NO: 14205 - protein, 9 aa, BK virus
HHPQNNTSL

SEQ ID NO: 14206 - protein, 9 aa, BK virus
HPQNNTSLK

SEQ ID NO: 14207 - protein, 9 aa, BK virus
PQNNTSLKV

SEQ ID NO: 14208 - protein, 9 aa, BK virus
QNNTSLKVA

SEQ ID NO: 14209 - protein, 9 aa, BK virus
NNTSLKVAY

SEQ ID NO: 14210 - protein, 9 aa, BK virus
NTSLKVAYT

SEQ ID NO: 14211 - protein, 9 aa, BK virus
TSLKVAYTK

SEQ ID NO: 14212 - protein, 9 aa, BK virus
SLKVAYTKA

SEQ ID NO: 14213 - protein, 9 aa, BK virus
LKVAYTKAA

SEQ ID NO: 14214 - protein, 9 aa, BK virus
KVAYTKAAF

SEQ ID NO: 14215 - protein, 9 aa, BK virus
VAYTKAAFI

SEQ ID NO: 14216 - protein, 9 aa, BK virus
AYTKAAFIK

SEQ ID NO: 14217 - protein, 9 aa, BK virus
YTKAAFIKC

SEQ ID NO: 14218 - protein, 9 aa, BK virus
TKAAFIKCI

SEQ ID NO: 14219 - protein, 9 aa, BK virus
KAAFIKCIC

SEQ ID NO: 14220 - protein, 9 aa, BK virus
AAFIKCICT

SEQ ID NO: 14221 - protein, 9 aa, BK virus
AFIKCICTI

SEQ ID NO: 14222 - protein, 9 aa, BK virus
FIKCICTIK

SEQ ID NO: 14223 - protein, 9 aa, BK virus
IKCICTIKA

SEQ ID NO: 14224 - protein, 9 aa, BK virus
KCICTIKAP

SEQ ID NO: 14225 - protein, 9 aa, BK virus
CICTIKAPV

SEQ ID NO: 14226 - protein, 9 aa, BK virus
SILVCNCPC

SEQ ID NO: 14227 - protein, 9 aa, BK virus
ILVCNCPCL

SEQ ID NO: 14228 - protein, 9 aa, BK virus
LVCNCPCLS

SEQ ID NO: 14229 - protein, 9 aa, BK virus
VCNCPCLSI

SEQ ID NO: 14230 - protein, 9 aa, BK virus
CNCPCLSIY

SEQ ID NO: 14231 - protein, 9 aa, BK virus
NCPCLSIYL

SEQ ID NO: 14232 - protein, 9 aa, BK virus
CPCLSIYLI

SEQ ID NO: 14233 - protein, 9 aa, BK virus
PCLSIYLII

SEQ ID NO: 14234 - protein, 9 aa, BK virus
CLSIYLIIS

SEQ ID NO: 14235 - protein, 9 aa, BK virus
LSIYLIISG

SEQ ID NO: 14236 - protein, 9 aa, BK virus
SIYLIISGS

SEQ ID NO: 14237 - protein, 9 aa, BK virus
IYLIISGSP

SEQ ID NO: 14238 - protein, 9 aa, BK virus
YLIISGSPG

SEQ ID NO: 14239 - protein, 9 aa, BK virus
LIISGSPGS

SEQ ID NO: 14240 - protein, 9 aa, BK virus
IISGSPGSL

SEQ ID NO: 14241 - protein, 9 aa, BK virus
ISGSPGSLS

SEQ ID NO: 14242 - protein, 9 aa, BK virus
SGSPGSLSV

SEQ ID NO: 14243 - protein, 9 aa, BK virus
GSPGSLSVP

SEQ ID NO: 14244 - protein, 9 aa, BK virus
SPGSLSVPS

SEQ ID NO: 14245 - protein, 9 aa, BK virus
PGSLSVPSN

SEQ ID NO: 14246 - protein, 9 aa, BK virus
GSLSVPSNT

SEQ ID NO: 14247 - protein, 9 aa, BK virus
SLSVPSNTL

SEQ ID NO: 14248 - protein, 9 aa, BK virus
LSVPSNTLT

SEQ ID NO: 14249 - protein, 9 aa, BK virus
SVPSNTLTS

SEQ ID NO: 14250 - protein, 9 aa, BK virus
VPSNTLTSS

SEQ ID NO: 14251 - protein, 9 aa, BK virus
PSNTLTSST

SEQ ID NO: 14252 - protein, 9 aa, BK virus
SNTLTSSTW

SEQ ID NO: 14253 - protein, 9 aa, BK virus
NTLTSSTWD

SEQ ID NO: 14254 - protein, 9 aa, BK virus
TLTSSTWDS

SEQ ID NO: 14255 - protein, 9 aa, BK virus
LTSSTWDSI

SEQ ID NO: 14256 - protein, 9 aa, BK virus
TSSTWDSIP

SEQ ID NO: 14257 - protein, 9 aa, BK virus
SSTWDSIPY

SEQ ID NO: 14258 - protein, 9 aa, BK virus
STWDSIPYI

SEQ ID NO: 14259 - protein, 9 aa, BK virus
TWDSIPYIG

SEQ ID NO: 14260 - protein, 9 aa, BK virus
WDSIPYIGC

SEQ ID NO: 14261 - protein, 9 aa, BK virus
DSIPYIGCP

SEQ ID NO: 14262 - protein, 9 aa, BK virus
SIPYIGCPS

SEQ ID NO: 14263 - protein, 9 aa, BK virus
IPYIGCPST

SEQ ID NO: 14264 - protein, 9 aa, BK virus
PYIGCPSTL

SEQ ID NO: 14265 - protein, 9 aa, BK virus
YIGCPSTLW

SEQ ID NO: 14266 - protein, 9 aa, BK virus
IGCPSTLWV

SEQ ID NO: 14267 - protein, 9 aa, BK virus
GCPSTLWVL

SEQ ID NO: 14268 - protein, 9 aa, BK virus
CPSTLWVLL

SEQ ID NO: 14269 - protein, 9 aa, BK virus
PSTLWVLLF

SEQ ID NO: 14270 - protein, 9 aa, BK virus
STLWVLLFI

SEQ ID NO: 14271 - protein, 9 aa, BK virus
TLWVLLFIR

SEQ ID NO: 14272 - protein, 9 aa, BK virus
LWVLLFIRS

SEQ ID NO: 14273 - protein, 9 aa, BK virus
WVLLFIRSL

SEQ ID NO: 14274 - protein, 9 aa, BK virus
VLLFIRSLS

SEQ ID NO: 14275 - protein, 9 aa, BK virus
LLFIRSLSK

SEQ ID NO: 14276 - protein, 9 aa, BK virus
LFIRSLSKK

SEQ ID NO: 14277 - protein, 9 aa, BK virus
FIRSLSKKE

SEQ ID NO: 14278 - protein, 9 aa, BK virus
IRSLSKKEI

SEQ ID NO: 14279 - protein, 9 aa, BK virus
RSLSKKEIG

SEQ ID NO: 14280 - protein, 9 aa, BK virus
GFFTDLFLR

SEQ ID NO: 14281 - protein, 9 aa, BK virus
FFTDLFLRR

SEQ ID NO: 14282 - protein, 9 aa, BK virus
FTDLFLRRI

SEQ ID NO: 14283 - protein, 9 aa, BK virus
TDLFLRRIL

SEQ ID NO: 14284 - protein, 9 aa, BK virus
DLFLRRILK

SEQ ID NO: 14285 - protein, 9 aa, BK virus
LFLRRILKY

SEQ ID NO: 14286 - protein, 9 aa, BK virus
FLRRILKYL

SEQ ID NO: 14287 - protein, 9 aa, BK virus
LRRILKYLA

SEQ ID NO: 14288 - protein, 9 aa, BK virus
RRILKYLAR

SEQ ID NO: 14289 - protein, 9 aa, BK virus
RILKYLARP

SEQ ID NO: 14290 - protein, 9 aa, BK virus
ILKYLARPL

SEQ ID NO: 14291 - protein, 9 aa, BK virus
LKYLARPLH

SEQ ID NO: 14292 - protein, 9 aa, BK virus
KYLARPLHC

SEQ ID NO: 14293 - protein, 9 aa, BK virus
YLARPLHCC

SEQ ID NO: 14294 - protein, 9 aa, BK virus
LARPLHCCV

SEQ ID NO: 14295 - protein, 9 aa, BK virus
ARPLHCCVP

SEQ ID NO: 14296 - protein, 9 aa, BK virus
RPLHCCVPE

SEQ ID NO: 14297 - protein, 9 aa, BK virus
PLHCCVPEL

SEQ ID NO: 14298 - protein, 9 aa, BK virus
LHCCVPELL

SEQ ID NO: 14299 - protein, 9 aa, BK virus
HCCVPELLV

SEQ ID NO: 14300 - protein, 9 aa, BK virus
CCVPELLVN

SEQ ID NO: 14301 - protein, 9 aa, BK virus
CVPELLVNR

SEQ ID NO: 14302 - protein, 9 aa, BK virus
VPELLVNRP

SEQ ID NO: 14303 - protein, 9 aa, BK virus
PELLVNRPQ

SEQ ID NO: 14304 - protein, 9 aa, BK virus
ELLVNRPQI

SEQ ID NO: 14305 - protein, 9 aa, BK virus
LLVNRPQIS

SEQ ID NO: 14306 - protein, 9 aa, BK virus
LVNRPQISA

SEQ ID NO: 14307 - protein, 9 aa, BK virus
VNRPQISAA

SEQ ID NO: 14308 - protein, 9 aa, BK virus
NRPQISAAE

SEQ ID NO: 14309 - protein, 9 aa, BK virus
RPQISAAET

SEQ ID NO: 14310 - protein, 9 aa, BK virus
PQISAAETY

SEQ ID NO: 14311 - protein, 9 aa, BK virus
QISAAETYR

SEQ ID NO: 14312 - protein, 9 aa, BK virus
ISAAETYRL

SEQ ID NO: 14313 - protein, 9 aa, BK virus
SAAETYRLS

SEQ ID NO: 14314 - protein, 9 aa, BK virus
AAETYRLSA

SEQ ID NO: 14315 - protein, 9 aa, BK virus
AETYRLSAL

SEQ ID NO: 14316 - protein, 9 aa, BK virus
ETYRLSALQ

SEQ ID NO: 14317 - protein, 9 aa, BK virus
TYRLSALQR

SEQ ID NO: 14318 - protein, 9 aa, BK virus
YRLSALQRG

SEQ ID NO: 14319 - protein, 9 aa, BK virus
RLSALQRGP

SEQ ID NO: 14320 - protein, 9 aa, BK virus
LSALQRGPT

SEQ ID NO: 14321 - protein, 9 aa, BK virus
SALQRGPTP

SEQ ID NO: 14322 - protein, 9 aa, BK virus
ALQRGPTPC

SEQ ID NO: 14323 - protein, 9 aa, BK virus
LQRGPTPCS

SEQ ID NO: 14324 - protein, 9 aa, BK virus
QRGPTPCSS

SEQ ID NO: 14325 - protein, 9 aa, BK virus
RGPTPCSSS

SEQ ID NO: 14326 - protein, 9 aa, BK virus
GPTPCSSSN

SEQ ID NO: 14327 - protein, 9 aa, BK virus
PTPCSSSNT

SEQ ID NO: 14328 - protein, 9 aa, BK virus
TPCSSSNTV

SEQ ID NO: 14329 - protein, 9 aa, BK virus
PCSSSNTVV

SEQ ID NO: 14330 - protein, 9 aa, BK virus
CSSSNTVVA

SEQ ID NO: 14331 - protein, 9 aa, BK virus
SSSNTVVAV

SEQ ID NO: 14332 - protein, 9 aa, BK virus
SSNTVVAVL

SEQ ID NO: 14333 - protein, 9 aa, BK virus
SNTVVAVLV

SEQ ID NO: 14334 - protein, 9 aa, BK virus
NTVVAVLVT

SEQ ID NO: 14335 - protein, 9 aa, BK virus
STGGTFSPP

SEQ ID NO: 14336 - protein, 9 aa, BK virus
TGGTFSPPV

SEQ ID NO: 14337 - protein, 9 aa, BK virus
GGTFSPPVK

SEQ ID NO: 14338 - protein, 9 aa, BK virus
GTFSPPVKV

SEQ ID NO: 14339 - protein, 9 aa, BK virus
TFSPPVKVP

SEQ ID NO: 14340 - protein, 9 aa, BK virus
FSPPVKVPK

SEQ ID NO: 14341 - protein, 9 aa, BK virus
SPPVKVPKY

SEQ ID NO: 14342 - protein, 9 aa, BK virus
PPVKVPKYL

SEQ ID NO: 14343 - protein, 9 aa, BK virus
PVKVPKYLA

SEQ ID NO: 14344 - protein, 9 aa, BK virus
VKVPKYLAF

SEQ ID NO: 14345 - protein, 9 aa, BK virus
KVPKYLAFS

SEQ ID NO: 14346 - protein, 9 aa, BK virus
VPKYLAFSF

SEQ ID NO: 14347 - protein, 9 aa, BK virus
PKYLAFSFL

SEQ ID NO: 14348 - protein, 9 aa, BK virus
KYLAFSFLL

SEQ ID NO: 14349 - protein, 9 aa, BK virus
YLAFSFLLG

SEQ ID NO: 14350 - protein, 9 aa, BK virus
LAFSFLLGS

SEQ ID NO: 14351 - protein, 9 aa, BK virus
AFSFLLGSG

SEQ ID NO: 14352 - protein, 9 aa, BK virus
FSFLLGSGT

SEQ ID NO: 14353 - protein, 9 aa, BK virus
SFLLGSGTQ

SEQ ID NO: 14354 - protein, 9 aa, BK virus
FLLGSGTQH

SEQ ID NO: 14355 - protein, 9 aa, BK virus
LLGSGTQHS

SEQ ID NO: 14356 - protein, 9 aa, BK virus
LGSGTQHST

SEQ ID NO: 14357 - protein, 9 aa, BK virus
GSGTQHSTG

SEQ ID NO: 14358 - protein, 9 aa, BK virus
ALWSVFITW

SEQ ID NO: 14359 - protein, 9 aa, BK virus
LWSVFITWD

SEQ ID NO: 14360 - protein, 9 aa, BK virus
WSVFITWDW

SEQ ID NO: 14361 - protein, 9 aa, BK virus
SVFITWDWA

SEQ ID NO: 14362 - protein, 9 aa, BK virus
VFITWDWAV

SEQ ID NO: 14363 - protein, 9 aa, BK virus
FITWDWAVG

SEQ ID NO: 14364 - protein, 9 aa, BK virus
ITWDWAVGF

SEQ ID NO: 14365 - protein, 9 aa, BK virus
TWDWAVGFL

SEQ ID NO: 14366 - protein, 9 aa, BK virus
WDWAVGFLG

SEQ ID NO: 14367 - protein, 9 aa, BK virus
DWAVGFLGV

SEQ ID NO: 14368 - protein, 9 aa, BK virus
WAVGFLGVI

SEQ ID NO: 14369 - protein, 9 aa, BK virus
AVGFLGVIV

SEQ ID NO: 14370 - protein, 9 aa, BK virus
VGFLGVIVP

SEQ ID NO: 14371 - protein, 9 aa, BK virus
GFLGVIVPS

SEQ ID NO: 14372 - protein, 9 aa, BK virus
FLGVIVPSG

SEQ ID NO: 14373 - protein, 9 aa, BK virus
LGVIVPSGY

SEQ ID NO: 14374 - protein, 9 aa, BK virus
GVIVPSGYF

SEQ ID NO: 14375 - protein, 9 aa, BK virus
VIVPSGYFD

SEQ ID NO: 14376 - protein, 9 aa, BK virus
IVPSGYFDL

SEQ ID NO: 14377 - protein, 9 aa, BK virus
FISTPCISK

SEQ ID NO: 14378 - protein, 9 aa, BK virus
ISTPCISKG

SEQ ID NO: 14379 - protein, 9 aa, BK virus
STPCISKGS

SEQ ID NO: 14380 - protein, 9 aa, BK virus
TPCISKGSP

SEQ ID NO: 14381 - protein, 9 aa, BK virus
PCISKGSPP

SEQ ID NO: 14382 - protein, 9 aa, BK virus
CISKGSPPT

SEQ ID NO: 14383 - protein, 9 aa, BK virus
ISKGSPPTA

SEQ ID NO: 14384 - protein, 9 aa, BK virus
SKGSPPTAK

SEQ ID NO: 14385 - protein, 9 aa, BK virus
KGSPPTAKK

SEQ ID NO: 14386 - protein, 9 aa, BK virus
GSPPTAKKW

SEQ ID NO: 14387 - protein, 9 aa, BK virus
SPPTAKKWK

SEQ ID NO: 14388 - protein, 9 aa, BK virus
PPTAKKWKL

SEQ ID NO: 14389 - protein, 9 aa, BK virus
PTAKKWKLL

SEQ ID NO: 14390 - protein, 9 aa, BK virus
TAKKWKLLP

SEQ ID NO: 14391 - protein, 9 aa, BK virus
IGFPPPCSC

SEQ ID NO: 14392 - protein, 9 aa, BK virus
GFPPPCSCT

SEQ ID NO: 14393 - protein, 9 aa, BK virus
FPPPCSCTF

SEQ ID NO: 14394 - protein, 9 aa, BK virus
PPPCSCTFC

SEQ ID NO: 14395 - protein, 9 aa, BK virus
PPCSCTFCD

SEQ ID NO: 14396 - protein, 9 aa, BK virus
PCSCTFCDP

SEQ ID NO: 14397 - protein, 9 aa, BK virus
CSCTFCDPA

SEQ ID NO: 14398 - protein, 9 aa, BK virus
RLSMLVIPI

SEQ ID NO: 14399 - protein, 9 aa, BK virus
LSMLVIPIT

SEQ ID NO: 14400 - protein, 9 aa, BK virus
SMLVIPITS

SEQ ID NO: 14401 - protein, 9 aa, BK virus
MLVIPITSV

SEQ ID NO: 14402 - protein, 9 aa, BK virus
LVIPITSVC

SEQ ID NO: 14403 - protein, 9 aa, BK virus
VIPITSVCT

SEQ ID NO: 14404 - protein, 9 aa, BK virus
IPITSVCTV

SEQ ID NO: 14405 - protein, 9 aa, BK virus
PITSVCTVT

SEQ ID NO: 14406 - protein, 9 aa, BK virus
ITSVCTVTA

SEQ ID NO: 14407 - protein, 9 aa, BK virus
TSVCTVTAS

SEQ ID NO: 14408 - protein, 9 aa, BK virus
SVCTVTASH

SEQ ID NO: 14409 - protein, 9 aa, BK virus
VCTVTASHI

SEQ ID NO: 14410 - protein, 9 aa, BK virus
CTVTASHIS

SEQ ID NO: 14411 - protein, 9 aa, BK virus
TVTASHISR

SEQ ID NO: 14412 - protein, 9 aa, BK virus
VTASHISRF

SEQ ID NO: 14413 - protein, 9 aa, BK virus
TASHISRFP

SEQ ID NO: 14414 - protein, 9 aa, BK virus
ASHISRFPQ

SEQ ID NO: 14415 - protein, 9 aa, BK virus
SHISRFPQV

SEQ ID NO: 14416 - protein, 9 aa, BK virus
HISRFPQVR

SEQ ID NO: 14417 - protein, 9 aa, BK virus
ISRFPQVRS

SEQ ID NO: 14418 - protein, 9 aa, BK virus
SRFPQVRSS

SEQ ID NO: 14419 - protein, 9 aa, BK virus
RFPQVRSSF

SEQ ID NO: 14420 - protein, 9 aa, BK virus
FPQVRSSFK

SEQ ID NO: 14421 - protein, 9 aa, BK virus
PQVRSSFKL

SEQ ID NO: 14422 - protein, 9 aa, BK virus
QVRSSFKLG

SEQ ID NO: 14423 - protein, 9 aa, BK virus
VRSSFKLGR

SEQ ID NO: 14424 - protein, 9 aa, BK virus
RSSFKLGRG

SEQ ID NO: 14425 - protein, 9 aa, BK virus
SSFKLGRGI

SEQ ID NO: 14426 - protein, 9 aa, BK virus
SFKLGRGIL

SEQ ID NO: 14427 - protein, 9 aa, BK virus
FKLGRGILA

SEQ ID NO: 14428 - protein, 9 aa, BK virus
KLGRGILAV

SEQ ID NO: 14429 - protein, 9 aa, BK virus
LGRGILAVL

SEQ ID NO: 14430 - protein, 9 aa, BK virus
QGSIFLSGL

SEQ ID NO: 14431 - protein, 9 aa, BK virus
GSIFLSGLS

SEQ ID NO: 14432 - protein, 9 aa, BK virus
SIFLSGLSL

SEQ ID NO: 14433 - protein, 9 aa, BK virus
IFLSGLSLL

SEQ ID NO: 14434 - protein, 9 aa, BK virus
FLSGLSLLK

SEQ ID NO: 14435 - protein, 9 aa, BK virus
LSGLSLLKS

SEQ ID NO: 14436 - protein, 9 aa, BK virus
SGLSLLKSF

SEQ ID NO: 14437 - protein, 9 aa, BK virus
GLSLLKSFS

SEQ ID NO: 14438 - protein, 9 aa, BK virus
LSLLKSFSA

SEQ ID NO: 14439 - protein, 9 aa, BK virus
SLLKSFSAL

SEQ ID NO: 14440 - protein, 9 aa, BK virus
LLKSFSALS

SEQ ID NO: 14441 - protein, 9 aa, BK virus
LKSFSALSF

SEQ ID NO: 14442 - protein, 9 aa, BK virus
KSFSALSFR

SEQ ID NO: 14443 - protein, 9 aa, BK virus
SFSALSFRL

SEQ ID NO: 14444 - protein, 9 aa, BK virus
FSALSFRLK

SEQ ID NO: 14445 - protein, 9 aa, BK virus
SALSFRLKP

SEQ ID NO: 14446 - protein, 9 aa, BK virus
ALSFRLKPL

SEQ ID NO: 14447 - protein, 9 aa, BK virus
LSFRLKPLR

SEQ ID NO: 14448 - protein, 9 aa, BK virus
SFRLKPLRF

SEQ ID NO: 14449 - protein, 9 aa, BK virus
FRLKPLRFS

SEQ ID NO: 14450 - protein, 9 aa, BK virus
RLKPLRFSS

SEQ ID NO: 14451 - protein, 9 aa, BK virus
LKPLRFSSG

SEQ ID NO: 14452 - protein, 9 aa, BK virus
KPLRFSSGS

SEQ ID NO: 14453 - protein, 9 aa, BK virus
PLRFSSGSP

SEQ ID NO: 14454 - protein, 9 aa, BK virus
LRFSSGSPI

SEQ ID NO: 14455 - protein, 9 aa, BK virus
RFSSGSPIS

SEQ ID NO: 14456 - protein, 9 aa, BK virus
FSSGSPISG

SEQ ID NO: 14457 - protein, 9 aa, BK virus
SSGSPISGF

SEQ ID NO: 14458 - protein, 9 aa, BK virus
SGSPISGFR

SEQ ID NO: 14459 - protein, 9 aa, BK virus
GSPISGFRK

SEQ ID NO: 14460 - protein, 9 aa, BK virus
SPISGFRKH

SEQ ID NO: 14461 - protein, 9 aa, BK virus
PISGFRKHS

SEQ ID NO: 14462 - protein, 9 aa, BK virus
ISGFRKHST

SEQ ID NO: 14463 - protein, 9 aa, BK virus
SGFRKHSTS

SEQ ID NO: 14464 - protein, 9 aa, BK virus
GFRKHSTSV

SEQ ID NO: 14465 - protein, 9 aa, BK virus
FRKHSTSVI

SEQ ID NO: 14466 - protein, 9 aa, BK virus
RKHSTSVIA

SEQ ID NO: 14467 - protein, 9 aa, BK virus
KHSTSVIAS

SEQ ID NO: 14468 - protein, 9 aa, BK virus
HSTSVIAST

SEQ ID NO: 14469 - protein, 9 aa, BK virus
STSVIASTP

SEQ ID NO: 14470 - protein, 9 aa, BK virus
TSVIASTPV

SEQ ID NO: 14471 - protein, 9 aa, BK virus
SVIASTPVL

SEQ ID NO: 14472 - protein, 9 aa, BK virus
VIASTPVLT

SEQ ID NO: 14473 - protein, 9 aa, BK virus
IASTPVLTS

SEQ ID NO: 14474 - protein, 9 aa, BK virus
ASTPVLTSR

SEQ ID NO: 14475 - protein, 9 aa, BK virus
STPVLTSRT

SEQ ID NO: 14476 - protein, 9 aa, BK virus
TPVLTSRTS

SEQ ID NO: 14477 - protein, 9 aa, BK virus
PVLTSRTST

SEQ ID NO: 14478 - protein, 9 aa, BK virus
VLTSRTSTP

SEQ ID NO: 14479 - protein, 9 aa, BK virus
LTSRTSTPP

SEQ ID NO: 14480 - protein, 9 aa, BK virus
TSRTSTPPF

SEQ ID NO: 14481 - protein, 9 aa, BK virus
SRTSTPPFI

SEQ ID NO: 14482 - protein, 9 aa, BK virus
RTSTPPFIS

SEQ ID NO: 14483 - protein, 9 aa, BK virus
TSTPPFISS

SEQ ID NO: 14484 - protein, 9 aa, BK virus
STPPFISSF

SEQ ID NO: 14485 - protein, 9 aa, BK virus
TPPFISSFG

SEQ ID NO: 14486 - protein, 9 aa, BK virus
PPFISSFGT

SEQ ID NO: 14487 - protein, 9 aa, BK virus
PFISSFGTC

SEQ ID NO: 14488 - protein, 9 aa, BK virus
FISSFGTCT

SEQ ID NO: 14489 - protein, 9 aa, BK virus
ISSFGTCTG

SEQ ID NO: 14490 - protein, 9 aa, BK virus
SSFGTCTGS

SEQ ID NO: 14491 - protein, 9 aa, BK virus
SFGTCTGSF

SEQ ID NO: 14492 - protein, 9 aa, BK virus
FGTCTGSFG

SEQ ID NO: 14493 - protein, 9 aa, BK virus
GTCTGSFGF

SEQ ID NO: 14494 - protein, 9 aa, BK virus
TCTGSFGFL

SEQ ID NO: 14495 - protein, 9 aa, BK virus
CTGSFGFLG

SEQ ID NO: 14496 - protein, 9 aa, BK virus
TGSFGFLGA

SEQ ID NO: 14497 - protein, 9 aa, BK virus
GSFGFLGAA

SEQ ID NO: 14498 - protein, 9 aa, BK virus
SFGFLGAAP

SEQ ID NO: 14499 - protein, 9 aa, BK virus
FGFLGAAPG

SEQ ID NO: 14500 - protein, 9 aa, BK virus
GFLGAAPGH

SEQ ID NO: 14501 - protein, 9 aa, BK virus
FLGAAPGHS

SEQ ID NO: 14502 - protein, 9 aa, BK virus
LGAAPGHSP

SEQ ID NO: 14503 - protein, 9 aa, BK virus
GAAPGHSPF

SEQ ID NO: 14504 - protein, 9 aa, BK virus
AAPGHSPFL

SEQ ID NO: 14505 - protein, 9 aa, BK virus
APGHSPFLL

SEQ ID NO: 14506 - protein, 9 aa, BK virus
PGHSPFLLV

SEQ ID NO: 14507 - protein, 9 aa, BK virus
GHSPFLLVG

SEQ ID NO: 14508 - protein, 9 aa, BK virus
HSPFLLVGA

SEQ ID NO: 14509 - protein, 9 aa, BK virus
SPFLLVGAI

SEQ ID NO: 14510 - protein, 9 aa, BK virus
PFLLVGAIF

SEQ ID NO: 14511 - protein, 9 aa, BK virus
FLLVGAIFI

SEQ ID NO: 14512 - protein, 9 aa, BK virus
LLVGAIFIC

SEQ ID NO: 14513 - protein, 9 aa, BK virus
LVGAIFICF

SEQ ID NO: 14514 - protein, 9 aa, BK virus
VGAIFICFK

SEQ ID NO: 14515 - protein, 9 aa, BK virus
GAIFICFKS

SEQ ID NO: 14516 - protein, 9 aa, BK virus
AIFICFKSR

SEQ ID NO: 14517 - protein, 9 aa, BK virus
IFICFKSRC

SEQ ID NO: 14518 - protein, 9 aa, BK virus
FICFKSRCY

SEQ ID NO: 14519 - protein, 9 aa, BK virus
ICFKSRCYS

SEQ ID NO: 14520 - protein, 9 aa, BK virus
CFKSRCYSP

SEQ ID NO: 14521 - protein, 9 aa, BK virus
FKSRCYSPV

SEQ ID NO: 14522 - protein, 9 aa, BK virus
KSRCYSPVQ

SEQ ID NO: 14523 - protein, 9 aa, BK virus
SRCYSPVQA

SEQ ID NO: 14524 - protein, 9 aa, BK virus
RQHPLRSSS

SEQ ID NO: 14525 - protein, 9 aa, BK virus
QHPLRSSSL

SEQ ID NO: 14526 - protein, 9 aa, BK virus
HPLRSSSLI

SEQ ID NO: 14527 - protein, 9 aa, BK virus
PLRSSSLIS

SEQ ID NO: 14528 - protein, 9 aa, BK virus
LRSSSLIST

SEQ ID NO: 14529 - protein, 9 aa, BK virus
RSSSLISTS

SEQ ID NO: 14530 - protein, 9 aa, BK virus
SSSLISTSW

SEQ ID NO: 14531 - protein, 9 aa, BK virus
SSLISTSWG

SEQ ID NO: 14532 - protein, 9 aa, BK virus
SLISTSWGN

SEQ ID NO: 14533 - protein, 9 aa, BK virus
LISTSWGNS

SEQ ID NO: 14534 - protein, 9 aa, BK virus
ISTSWGNSF

SEQ ID NO: 14535 - protein, 9 aa, BK virus
STSWGNSFF

SEQ ID NO: 14536 - protein, 9 aa, BK virus
TSWGNSFFY

SEQ ID NO: 14537 - protein, 9 aa, BK virus
SWGNSFFYK

SEQ ID NO: 14538 - protein, 9 aa, BK virus
WGNSFFYKL

SEQ ID NO: 14539 - protein, 9 aa, BK virus
GNSFFYKLS

SEQ ID NO: 14540 - protein, 9 aa, BK virus
VHSLCNFFY

SEQ ID NO: 14541 - protein, 9 aa, BK virus
HSLCNFFYT

SEQ ID NO: 14542 - protein, 9 aa, BK virus
SLCNFFYTV

SEQ ID NO: 14543 - protein, 9 aa, BK virus
LCNFFYTVS

SEQ ID NO: 14544 - protein, 9 aa, BK virus
CNFFYTVSI

SEQ ID NO: 14545 - protein, 9 aa, BK virus
NFFYTVSII

SEQ ID NO: 14546 - protein, 9 aa, BK virus
FFYTVSIIY

SEQ ID NO: 14547 - protein, 9 aa, BK virus
FYTVSIIYT

SEQ ID NO: 14548 - protein, 9 aa, BK virus
YTVSIIYTI

SEQ ID NO: 14549 - protein, 9 aa, BK virus
TVSIIYTIS

SEQ ID NO: 14550 - protein, 9 aa, BK virus
VSIIYTISM

SEQ ID NO: 14551 - protein, 9 aa, BK virus
SIIYTISMA

SEQ ID NO: 14552 - protein, 9 aa, BK virus
IIYTISMAK

SEQ ID NO: 14553 - protein, 9 aa, BK virus
IYTISMAKM

SEQ ID NO: 14554 - protein, 9 aa, BK virus
YTISMAKMY

SEQ ID NO: 14555 - protein, 9 aa, BK virus
TISMAKMYT

SEQ ID NO: 14556 - protein, 9 aa, BK virus
ISMAKMYTG

SEQ ID NO: 14557 - protein, 9 aa, BK virus
SMAKMYTGT

SEQ ID NO: 14558 - protein, 9 aa, BK virus
MAKMYTGTF

SEQ ID NO: 14559 - protein, 9 aa, BK virus
AKMYTGTFP

SEQ ID NO: 14560 - protein, 9 aa, BK virus
KMYTGTFPF

SEQ ID NO: 14561 - protein, 9 aa, BK virus
MYTGTFPFS

SEQ ID NO: 14562 - protein, 9 aa, BK virus
YTGTFPFSY

SEQ ID NO: 14563 - protein, 9 aa, BK virus
TGTFPFSYL

SEQ ID NO: 14564 - protein, 9 aa, BK virus
GTFPFSYLS

SEQ ID NO: 14565 - protein, 9 aa, BK virus
TFPFSYLSN

SEQ ID NO: 14566 - protein, 9 aa, BK virus
FPFSYLSNH

SEQ ID NO: 14567 - protein, 9 aa, BK virus
GPNRGKIRI

SEQ ID NO: 14568 - protein, 9 aa, BK virus
PNRGKIRII

SEQ ID NO: 14569 - protein, 9 aa, BK virus
NRGKIRIIL

SEQ ID NO: 14570 - protein, 9 aa, BK virus
RGKIRIILL

SEQ ID NO: 14571 - protein, 9 aa, BK virus
GKIRIILLN

SEQ ID NO: 14572 - protein, 9 aa, BK virus
KIRIILLNI

SEQ ID NO: 14573 - protein, 9 aa, BK virus
IRIILLNII

SEQ ID NO: 14574 - protein, 9 aa, BK virus
RIILLNIII

SEQ ID NO: 14575 - protein, 9 aa, BK virus
IILLNIIIK

SEQ ID NO: 14576 - protein, 9 aa, BK virus
ILLNIIIKV

SEQ ID NO: 14577 - protein, 9 aa, BK virus
LLNIIIKVY

SEQ ID NO: 14578 - protein, 9 aa, BK virus
LNIIIKVYR

SEQ ID NO: 14579 - protein, 9 aa, BK virus
NIIIKVYRG

SEQ ID NO: 14580 - protein, 9 aa, BK virus
IIIKVYRGI

SEQ ID NO: 14581 - protein, 9 aa, BK virus
IIKVYRGIY

SEQ ID NO: 14582 - protein, 9 aa, BK virus
IKVYRGIYN

SEQ ID NO: 14583 - protein, 9 aa, BK virus
KVYRGIYNC

SEQ ID NO: 14584 - protein, 9 aa, BK virus
VYRGIYNCP

SEQ ID NO: 14585 - protein, 9 aa, BK virus
YRGIYNCPG

SEQ ID NO: 14586 - protein, 9 aa, BK virus
RGIYNCPGS

SEQ ID NO: 14587 - protein, 9 aa, BK virus
GIYNCPGSF

SEQ ID NO: 14588 - protein, 9 aa, BK virus
IYNCPGSFL

SEQ ID NO: 14589 - protein, 9 aa, BK virus
YNCPGSFLQ

SEQ ID NO: 14590 - protein, 9 aa, BK virus
NCPGSFLQK

SEQ ID NO: 14591 - protein, 9 aa, BK virus
CPGSFLQKS

SEQ ID NO: 14592 - protein, 9 aa, BK virus
PGSFLQKSS

SEQ ID NO: 14593 - protein, 9 aa, BK virus
GSFLQKSSQ

SEQ ID NO: 14594 - protein, 9 aa, BK virus
SFLQKSSQG

SEQ ID NO: 14595 - protein, 9 aa, BK virus
FLQKSSQGV

SEQ ID NO: 14596 - protein, 9 aa, BK virus
LQKSSQGVS

SEQ ID NO: 14597 - protein, 9 aa, BK virus
QKSSQGVSK

SEQ ID NO: 14598 - protein, 9 aa, BK virus
KSSQGVSKK

SEQ ID NO: 14599 - protein, 9 aa, BK virus
SSQGVSKKS

SEQ ID NO: 14600 - protein, 9 aa, BK virus
SQGVSKKSF

SEQ ID NO: 14601 - protein, 9 aa, BK virus
QGVSKKSFC

SEQ ID NO: 14602 - protein, 9 aa, BK virus
GVSKKSFCS

SEQ ID NO: 14603 - protein, 9 aa, BK virus
VSKKSFCSS

SEQ ID NO: 14604 - protein, 9 aa, BK virus
SKKSFCSSL

SEQ ID NO: 14605 - protein, 9 aa, BK virus
KKSFCSSLQ

SEQ ID NO: 14606 - protein, 9 aa, BK virus
KSFCSSLQF

SEQ ID NO: 14607 - protein, 9 aa, BK virus
SFCSSLQFL

SEQ ID NO: 14608 - protein, 9 aa, BK virus
GYRRYIIPN

SEQ ID NO: 14609 - protein, 9 aa, BK virus
YRRYIIPNN

SEQ ID NO: 14610 - protein, 9 aa, BK virus
RRYIIPNNM

SEQ ID NO: 14611 - protein, 9 aa, BK virus
RYIIPNNMP

SEQ ID NO: 14612 - protein, 9 aa, BK virus
YIIPNNMPQ

SEQ ID NO: 14613 - protein, 9 aa, BK virus
IIPNNMPQS

SEQ ID NO: 14614 - protein, 9 aa, BK virus
IPNNMPQSL

SEQ ID NO: 14615 - protein, 9 aa, BK virus
PNNMPQSLG

SEQ ID NO: 14616 - protein, 9 aa, BK virus
NNMPQSLGN

SEQ ID NO: 14617 - protein, 9 aa, BK virus
NMPQSLGNS

SEQ ID NO: 14618 - protein, 9 aa, BK virus
MPQSLGNSS

SEQ ID NO: 14619 - protein, 9 aa, BK virus
PQSLGNSSK

SEQ ID NO: 14620 - protein, 9 aa, BK virus
QSLGNSSKQ

SEQ ID NO: 14621 - protein, 9 aa, BK virus
SLGNSSKQR

SEQ ID NO: 14622 - protein, 9 aa, BK virus
LGNSSKQRR

SEQ ID NO: 14623 - protein, 9 aa, BK virus
GNSSKQRRT

SEQ ID NO: 14624 - protein, 9 aa, BK virus
NSSKQRRTP

SEQ ID NO: 14625 - protein, 9 aa, BK virus
SSKQRRTPM

SEQ ID NO: 14626 - protein, 9 aa, BK virus
SKQRRTPMP

SEQ ID NO: 14627 - protein, 9 aa, BK virus
KQRRTPMPR

SEQ ID NO: 14628 - protein, 9 aa, BK virus
QRRTPMPRI

SEQ ID NO: 14629 - protein, 9 aa, BK virus
RRTPMPRIK

SEQ ID NO: 14630 - protein, 9 aa, BK virus
RTPMPRIKV

SEQ ID NO: 14631 - protein, 9 aa, BK virus
TPMPRIKVL

SEQ ID NO: 14632 - protein, 9 aa, BK virus
PMPRIKVLN

SEQ ID NO: 14633 - protein, 9 aa, BK virus
MPRIKVLNI

SEQ ID NO: 14634 - protein, 9 aa, BK virus
PRIKVLNII

SEQ ID NO: 14635 - protein, 9 aa, BK virus
RIKVLNIIN

SEQ ID NO: 14636 - protein, 9 aa, BK virus
IKVLNIINK

SEQ ID NO: 14637 - protein, 9 aa, BK virus
KVLNIINKS

SEQ ID NO: 14638 - protein, 9 aa, BK virus
VLNIINKSI

SEQ ID NO: 14639 - protein, 9 aa, BK virus
LNIINKSIY

SEQ ID NO: 14640 - protein, 9 aa, BK virus
NIINKSIYT

SEQ ID NO: 14641 - protein, 9 aa, BK virus
IINKSIYTR

SEQ ID NO: 14642 - protein, 9 aa, BK virus
INKSIYTRK

SEQ ID NO: 14643 - protein, 9 aa, BK virus
NKSIYTRKQ

SEQ ID NO: 14644 - protein, 9 aa, BK virus
KSIYTRKQN

SEQ ID NO: 14645 - protein, 9 aa, BK virus
SIYTRKQNI

SEQ ID NO: 14646 - protein, 9 aa, BK virus
IYTRKQNII

SEQ ID NO: 14647 - protein, 9 aa, BK virus
YTRKQNIIV

SEQ ID NO: 14648 - protein, 9 aa, BK virus
TRKQNIIVL

SEQ ID NO: 14649 - protein, 9 aa, BK virus
RKQNIIVLI

SEQ ID NO: 14650 - protein, 9 aa, BK virus
KQNIIVLIW

SEQ ID NO: 14651 - protein, 9 aa, BK virus
QNIIVLIWV

SEQ ID NO: 14652 - protein, 9 aa, BK virus
NIIVLIWVK

SEQ ID NO: 14653 - protein, 9 aa, BK virus
IIVLIWVKQ

SEQ ID NO: 14654 - protein, 9 aa, BK virus
IVLIWVKQF

SEQ ID NO: 14655 - protein, 9 aa, BK virus
VLIWVKQFQ

SEQ ID NO: 14656 - protein, 9 aa, BK virus
LIWVKQFQS

SEQ ID NO: 14657 - protein, 9 aa, BK virus
IWVKQFQSH

SEQ ID NO: 14658 - protein, 9 aa, BK virus
WVKQFQSHA

SEQ ID NO: 14659 - protein, 9 aa, BK virus
LLIEAYSGN

SEQ ID NO: 14660 - protein, 9 aa, BK virus
LIEAYSGNF

SEQ ID NO: 14661 - protein, 9 aa, BK virus
IEAYSGNFV

SEQ ID NO: 14662 - protein, 9 aa, BK virus
EAYSGNFVI

SEQ ID NO: 14663 - protein, 9 aa, BK virus
AYSGNFVIP

SEQ ID NO: 14664 - protein, 9 aa, BK virus
YSGNFVIPI

SEQ ID NO: 14665 - protein, 9 aa, BK virus
SGNFVIPII

SEQ ID NO: 14666 - protein, 9 aa, BK virus
GNFVIPIIK

SEQ ID NO: 14667 - protein, 9 aa, BK virus
NFVIPIIKE

SEQ ID NO: 14668 - protein, 9 aa, BK virus
FVIPIIKEL

SEQ ID NO: 14669 - protein, 9 aa, BK virus
VIPIIKELI

SEQ ID NO: 14670 - protein, 9 aa, BK virus
IPIIKELIP

SEQ ID NO: 14671 - protein, 9 aa, BK virus
PIIKELIPY

SEQ ID NO: 14672 - protein, 9 aa, BK virus
IIKELIPYL

SEQ ID NO: 14673 - protein, 9 aa, BK virus
IKELIPYLS

SEQ ID NO: 14674 - protein, 9 aa, BK virus
GTNTTNSLN

SEQ ID NO: 14675 - protein, 9 aa, BK virus
SSKPSNSPR

SEQ ID NO: 14676 - protein, 9 aa, BK virus
SKPSNSPRS

SEQ ID NO: 14677 - protein, 9 aa, BK virus
KPSNSPRST

SEQ ID NO: 14678 - protein, 9 aa, BK virus
PSNSPRSTS

SEQ ID NO: 14679 - protein, 9 aa, BK virus
SNSPRSTSN

SEQ ID NO: 14680 - protein, 9 aa, BK virus
NSPRSTSNY

SEQ ID NO: 14681 - protein, 9 aa, BK virus
SPRSTSNYS

SEQ ID NO: 14682 - protein, 9 aa, BK virus
PRSTSNYSI

SEQ ID NO: 14683 - protein, 9 aa, BK virus
RSTSNYSIC

SEQ ID NO: 14684 - protein, 9 aa, BK virus
STSNYSICL

SEQ ID NO: 14685 - protein, 9 aa, BK virus
TSNYSICLR

SEQ ID NO: 14686 - protein, 9 aa, BK virus
SNYSICLRS

SEQ ID NO: 14687 - protein, 9 aa, BK virus
GTCYALYSS

SEQ ID NO: 14688 - protein, 9 aa, BK virus
TCYALYSSK

SEQ ID NO: 14689 - protein, 9 aa, BK virus
CYALYSSKG

SEQ ID NO: 14690 - protein, 9 aa, BK virus
YALYSSKGC

SEQ ID NO: 14691 - protein, 9 aa, BK virus
ALYSSKGCN

SEQ ID NO: 14692 - protein, 9 aa, BK virus
LYSSKGCNL

SEQ ID NO: 14693 - protein, 9 aa, BK virus
YSSKGCNLN

SEQ ID NO: 14694 - protein, 9 aa, BK virus
SSKGCNLNF

SEQ ID NO: 14695 - protein, 9 aa, BK virus
SKGCNLNFY

SEQ ID NO: 14696 - protein, 9 aa, BK virus
KGCNLNFYS

SEQ ID NO: 14697 - protein, 9 aa, BK virus
GCNLNFYSS

SEQ ID NO: 14698 - protein, 9 aa, BK virus
CNLNFYSSS

SEQ ID NO: 14699 - protein, 9 aa, BK virus
NLNFYSSSS

SEQ ID NO: 14700 - protein, 9 aa, BK virus
LNFYSSSSL

SEQ ID NO: 14701 - protein, 9 aa, BK virus
NFYSSSSLP

SEQ ID NO: 14702 - protein, 9 aa, BK virus
FYSSSSLPS

SEQ ID NO: 14703 - protein, 9 aa, BK virus
YSSSSLPSS

SEQ ID NO: 14704 - protein, 9 aa, BK virus
SSSSLPSSN

SEQ ID NO: 14705 - protein, 9 aa, BK virus
SSSLPSSNF

SEQ ID NO: 14706 - protein, 9 aa, BK virus
SSLPSSNFS

SEQ ID NO: 14707 - protein, 9 aa, BK virus
SLPSSNFSH

SEQ ID NO: 14708 - protein, 9 aa, BK virus
KSCGSSSLR

SEQ ID NO: 14709 - protein, 9 aa, BK virus
SCGSSSLRY

SEQ ID NO: 14710 - protein, 9 aa, BK virus
CGSSSLRYT

SEQ ID NO: 14711 - protein, 9 aa, BK virus
GSSSLRYTG

SEQ ID NO: 14712 - protein, 9 aa, BK virus
SSSLRYTGN

SEQ ID NO: 14713 - protein, 9 aa, BK virus
SSTHEPGNT

SEQ ID NO: 14714 - protein, 9 aa, BK virus
STHEPGNTK

SEQ ID NO: 14715 - protein, 9 aa, BK virus
THEPGNTKK

SEQ ID NO: 14716 - protein, 9 aa, BK virus
HEPGNTKKK

SEQ ID NO: 14717 - protein, 9 aa, BK virus
EPGNTKKKG

SEQ ID NO: 14718 - protein, 9 aa, BK virus
PGNTKKKGL

SEQ ID NO: 14719 - protein, 9 aa, BK virus
GNTKKKGLL

SEQ ID NO: 14720 - protein, 9 aa, BK virus
NTKKKGLLT

SEQ ID NO: 14721 - protein, 9 aa, BK virus
ESFTESFTA

SEQ ID NO: 14722 - protein, 9 aa, BK virus
SFTESFTAG

SEQ ID NO: 14723 - protein, 9 aa, BK virus
FTESFTAGK

SEQ ID NO: 14724 - protein, 9 aa, BK virus
TESFTAGKA

SEQ ID NO: 14725 - protein, 9 aa, BK virus
ESFTAGKAV

SEQ ID NO: 14726 - protein, 9 aa, BK virus
SFTAGKAVV

SEQ ID NO: 14727 - protein, 9 aa, BK virus
FTAGKAVVL

SEQ ID NO: 14728 - protein, 9 aa, BK virus
TAGKAVVLL

SEQ ID NO: 14729 - protein, 9 aa, BK virus
AGKAVVLLF

SEQ ID NO: 14730 - protein, 9 aa, BK virus
GKAVVLLFF

SEQ ID NO: 14731 - protein, 9 aa, BK virus
KAVVLLFFP

SEQ ID NO: 14732 - protein, 9 aa, BK virus
AVVLLFFPS

SEQ ID NO: 14733 - protein, 9 aa, BK virus
VVLLFFPST

SEQ ID NO: 14734 - protein, 9 aa, BK virus
VLLFFPSTL

SEQ ID NO: 14735 - protein, 9 aa, BK virus
LLFFPSTLS

SEQ ID NO: 14736 - protein, 9 aa, BK virus
LFFPSTLSS

SEQ ID NO: 14737 - protein, 9 aa, BK virus
FFPSTLSSP

SEQ ID NO: 14738 - protein, 9 aa, BK virus
FPSTLSSPL

SEQ ID NO: 14739 - protein, 9 aa, BK virus
PSTLSSPLQ

SEQ ID NO: 14740 - protein, 9 aa, BK virus
STLSSPLQN

SEQ ID NO: 14741 - protein, 9 aa, BK virus
TLSSPLQNS

SEQ ID NO: 14742 - protein, 9 aa, BK virus
LSSPLQNSS

SEQ ID NO: 14743 - protein, 9 aa, BK virus
SSPLQNSSK

SEQ ID NO: 14744 - protein, 9 aa, BK virus
SPLQNSSKS

SEQ ID NO: 14745 - protein, 9 aa, BK virus
PLQNSSKSS

SEQ ID NO: 14746 - protein, 9 aa, BK virus
LQNSSKSSK

SEQ ID NO: 14747 - protein, 9 aa, BK virus
QNSSKSSKI

SEQ ID NO: 14748 - protein, 9 aa, BK virus
NSSKSSKIK

SEQ ID NO: 14749 - protein, 9 aa, BK virus
SSKSSKIKI

SEQ ID NO: 14750 - protein, 9 aa, BK virus
SKSSKIKIK

SEQ ID NO: 14751 - protein, 9 aa, BK virus
KSSKIKIKI

SEQ ID NO: 14752 - protein, 9 aa, BK virus
SSKIKIKIL

SEQ ID NO: 14753 - protein, 9 aa, BK virus
ALFFVPVQV

SEQ ID NO: 14754 - protein, 9 aa, BK virus
LFFVPVQVL

SEQ ID NO: 14755 - protein, 9 aa, BK virus
FFVPVQVLP

SEQ ID NO: 14756 - protein, 9 aa, BK virus
FVPVQVLPT

SEQ ID NO: 14757 - protein, 9 aa, BK virus
VPVQVLPTF

SEQ ID NO: 14758 - protein, 9 aa, BK virus
PVQVLPTFT

SEQ ID NO: 14759 - protein, 9 aa, BK virus
VQVLPTFTE

SEQ ID NO: 14760 - protein, 9 aa, BK virus
QVLPTFTEA

SEQ ID NO: 14761 - protein, 9 aa, BK virus
VLPTFTEAC

SEQ ID NO: 14762 - protein, 9 aa, BK virus
LPTFTEACR

SEQ ID NO: 14763 - protein, 9 aa, BK virus
PTFTEACRD

SEQ ID NO: 14764 - protein, 9 aa, BK virus
TFTEACRDS

SEQ ID NO: 14765 - protein, 9 aa, BK virus
FTEACRDSW

SEQ ID NO: 14766 - protein, 9 aa, BK virus
TEACRDSWR

SEQ ID NO: 14767 - protein, 9 aa, BK virus
EACRDSWRR

SEQ ID NO: 14768 - protein, 9 aa, BK virus
ACRDSWRRT

SEQ ID NO: 14769 - protein, 9 aa, BK virus
CRDSWRRTM

SEQ ID NO: 14770 - protein, 9 aa, BK virus
RDSWRRTMA

SEQ ID NO: 14771 - protein, 9 aa, BK virus
DSWRRTMAF

SEQ ID NO: 14772 - protein, 9 aa, BK virus
SWRRTMAFV

SEQ ID NO: 14773 - protein, 9 aa, BK virus
WRRTMAFVQ

SEQ ID NO: 14774 - protein, 9 aa, BK virus
RRTMAFVQF

SEQ ID NO: 14775 - protein, 9 aa, BK virus
RTMAFVQFN

SEQ ID NO: 14776 - protein, 9 aa, BK virus
TMAFVQFNW

SEQ ID NO: 14777 - protein, 9 aa, BK virus
MAFVQFNWG

SEQ ID NO: 14778 - protein, 9 aa, BK virus
AFVQFNWGQ

SEQ ID NO: 14779 - protein, 9 aa, BK virus
FVQFNWGQG

SEQ ID NO: 14780 - protein, 9 aa, BK virus
VQFNWGQGQ

SEQ ID NO: 14781 - protein, 9 aa, BK virus
QFNWGQGQD

SEQ ID NO: 14782 - protein, 9 aa, BK virus
FNWGQGQDS

SEQ ID NO: 14783 - protein, 9 aa, BK virus
ARKTCLSCT

SEQ ID NO: 14784 - protein, 9 aa, BK virus
RKTCLSCTF

SEQ ID NO: 14785 - protein, 9 aa, BK virus
KTCLSCTFL

SEQ ID NO: 14786 - protein, 9 aa, BK virus
TCLSCTFLP

SEQ ID NO: 14787 - protein, 9 aa, BK virus
CLSCTFLPE

SEQ ID NO: 14788 - protein, 9 aa, BK virus
LSCTFLPEV

SEQ ID NO: 14789 - protein, 9 aa, BK virus
SCTFLPEVM

SEQ ID NO: 14790 - protein, 9 aa, BK virus
CTFLPEVMV

SEQ ID NO: 14791 - protein, 9 aa, BK virus
TFLPEVMVW

SEQ ID NO: 14792 - protein, 9 aa, BK virus
FLPEVMVWL

SEQ ID NO: 14793 - protein, 9 aa, BK virus
LPEVMVWLH

SEQ ID NO: 14794 - protein, 9 aa, BK virus
PEVMVWLHS

SEQ ID NO: 14795 - protein, 9 aa, BK virus
EVMVWLHSM

SEQ ID NO: 14796 - protein, 9 aa, BK virus
VMVWLHSMG

SEQ ID NO: 14797 - protein, 9 aa, BK virus
MVWLHSMGK

SEQ ID NO: 14798 - protein, 9 aa, BK virus
VWLHSMGKQ

SEQ ID NO: 14799 - protein, 9 aa, BK virus
WLHSMGKQL

SEQ ID NO: 14800 - protein, 9 aa, BK virus
LHSMGKQLL

SEQ ID NO: 14801 - protein, 9 aa, BK virus
HSMGKQLLP

SEQ ID NO: 14802 - protein, 9 aa, BK virus
SMGKQLLPV

SEQ ID NO: 14803 - protein, 9 aa, BK virus
MGKQLLPVS

SEQ ID NO: 14804 - protein, 9 aa, BK virus
GKQLLPVSH

SEQ ID NO: 14805 - protein, 9 aa, BK virus
KQLLPVSHA

SEQ ID NO: 14806 - protein, 9 aa, BK virus
QLLPVSHAL

SEQ ID NO: 14807 - protein, 9 aa, BK virus
LLPVSHALS

SEQ ID NO: 14808 - protein, 9 aa, BK virus
LPVSHALSF

SEQ ID NO: 14809 - protein, 9 aa, BK virus
PVSHALSFL

SEQ ID NO: 14810 - protein, 9 aa, BK virus
VSHALSFLR

SEQ ID NO: 14811 - protein, 9 aa, BK virus
SHALSFLRS

SEQ ID NO: 14812 - protein, 9 aa, BK virus
HALSFLRSW

SEQ ID NO: 14813 - protein, 9 aa, BK virus
ALSFLRSWF

SEQ ID NO: 14814 - protein, 9 aa, BK virus
LSFLRSWFG

SEQ ID NO: 14815 - protein, 9 aa, BK virus
SFLRSWFGC

SEQ ID NO: 14816 - protein, 9 aa, BK virus
FLRSWFGCI

SEQ ID NO: 14817 - protein, 9 aa, BK virus
LRSWFGCIP

SEQ ID NO: 14818 - protein, 9 aa, BK virus
RSWFGCIPL

SEQ ID NO: 14819 - protein, 9 aa, BK virus
GHGLAAFHG

SEQ ID NO: 14820 - protein, 9 aa, BK virus
AAPPCGLFF

SEQ ID NO: 14821 - protein, 9 aa, BK virus
APPCGLFFY

SEQ ID NO: 14822 - protein, 9 aa, BK virus
PPCGLFFYN

SEQ ID NO: 14823 - protein, 9 aa, BK virus
PCGLFFYNI

SEQ ID NO: 14824 - protein, 9 aa, BK virus
EAEAASAST

SEQ ID NO: 14825 - protein, 9 aa, BK virus
AEAASASTL

SEQ ID NO: 14826 - protein, 9 aa, BK virus
EAASASTLS

SEQ ID NO: 14827 - protein, 9 aa, BK virus
AASASTLSL

SEQ ID NO: 14828 - protein, 9 aa, BK virus
ASASTLSLK

SEQ ID NO: 14829 - protein, 9 aa, BK virus
GLAKLFGEI

SEQ ID NO: 14830 - protein, 9 aa, BK virus
LAKLFGEIP

SEQ ID NO: 14831 - protein, 9 aa, BK virus
AKLFGEIPI

SEQ ID NO: 14832 - protein, 9 aa, BK virus
KLFGEIPIL

SEQ ID NO: 14833 - protein, 9 aa, BK virus
LFGEIPILL

SEQ ID NO: 14834 - protein, 9 aa, BK virus
FGEIPILLQ

SEQ ID NO: 14835 - protein, 9 aa, BK virus
GEIPILLQF

SEQ ID NO: 14836 - protein, 9 aa, BK virus
EIPILLQFL

SEQ ID NO: 14837 - protein, 9 aa, BK virus
IPILLQFLQ

SEQ ID NO: 14838 - protein, 10 aa, BK virus
MDKVLNREES

SEQ ID NO: 14839 - protein, 10 aa, BK virus
DKVLNREESM

SEQ ID NO: 14840 - protein, 10 aa, BK virus
KVLNREESME

SEQ ID NO: 14841 - protein, 10 aa, BK virus
VLNREESMEL

SEQ ID NO: 14842 - protein, 10 aa, BK virus
LNREESMELM

SEQ ID NO: 14843 - protein, 10 aa, BK virus
NREESMELMD

SEQ ID NO: 14844 - protein, 10 aa, BK virus
REESMELMDL

SEQ ID NO: 14845 - protein, 10 aa, BK virus
EESMELMDLL

SEQ ID NO: 14846 - protein, 10 aa, BK virus
ESMELMDLLG

SEQ ID NO: 14847 - protein, 10 aa, BK virus
SMELMDLLGL

SEQ ID NO: 14848 - protein, 10 aa, BK virus
MELMDLLGLE

SEQ ID NO: 14849 - protein, 10 aa, BK virus
ELMDLLGLER

SEQ ID NO: 14850 - protein, 10 aa, BK virus
LMDLLGLERA

SEQ ID NO: 14851 - protein, 10 aa, BK virus
MDLLGLERAA

SEQ ID NO: 14852 - protein, 10 aa, BK virus
DLLGLERAAW

SEQ ID NO: 14853 - protein, 10 aa, BK virus
LLGLERAAWG

SEQ ID NO: 14854 - protein, 10 aa, BK virus
LGLERAAWGN

SEQ ID NO: 14855 - protein, 10 aa, BK virus
GLERAAWGNL

SEQ ID NO: 14856 - protein, 10 aa, BK virus
LERAAWGNLP

SEQ ID NO: 14857 - protein, 10 aa, BK virus
ERAAWGNLPL

SEQ ID NO: 14858 - protein, 10 aa, BK virus
RAAWGNLPLM

SEQ ID NO: 14859 - protein, 10 aa, BK virus
AAWGNLPLMR

SEQ ID NO: 14860 - protein, 10 aa, BK virus
AWGNLPLMRK

SEQ ID NO: 14861 - protein, 10 aa, BK virus
WGNLPLMRKA

SEQ ID NO: 14862 - protein, 10 aa, BK virus
GNLPLMRKAY

SEQ ID NO: 14863 - protein, 10 aa, BK virus
NLPLMRKAYL

SEQ ID NO: 14864 - protein, 10 aa, BK virus
LPLMRKAYLR

SEQ ID NO: 14865 - protein, 10 aa, BK virus
PLMRKAYLRK

SEQ ID NO: 14866 - protein, 10 aa, BK virus
LMRKAYLRKC

SEQ ID NO: 14867 - protein, 10 aa, BK virus
MRKAYLRKCK

SEQ ID NO: 14868 - protein, 10 aa, BK virus
RKAYLRKCKE

SEQ ID NO: 14869 - protein, 10 aa, BK virus
KAYLRKCKEF

SEQ ID NO: 14870 - protein, 10 aa, BK virus
AYLRKCKEFH

SEQ ID NO: 14871 - protein, 10 aa, BK virus
YLRKCKEFHP

SEQ ID NO: 14872 - protein, 10 aa, BK virus
LRKCKEFHPD

SEQ ID NO: 14873 - protein, 10 aa, BK virus
RKCKEFHPDK

SEQ ID NO: 14874 - protein, 10 aa, BK virus
KCKEFHPDKG

SEQ ID NO: 14875 - protein, 10 aa, BK virus
CKEFHPDKGG

SEQ ID NO: 14876 - protein, 10 aa, BK virus
KEFHPDKGGD

SEQ ID NO: 14877 - protein, 10 aa, BK virus
EFHPDKGGDE

SEQ ID NO: 14878 - protein, 10 aa, BK virus
FHPDKGGDED

SEQ ID NO: 14879 - protein, 10 aa, BK virus
HPDKGGDEDK

SEQ ID NO: 14880 - protein, 10 aa, BK virus
PDKGGDEDKM

SEQ ID NO: 14881 - protein, 10 aa, BK virus
DKGGDEDKMK

SEQ ID NO: 14882 - protein, 10 aa, BK virus
KGGDEDKMKR

SEQ ID NO: 14883 - protein, 10 aa, BK virus
GGDEDKMKRM

SEQ ID NO: 14884 - protein, 10 aa, BK virus
GDEDKMKRMN

SEQ ID NO: 14885 - protein, 10 aa, BK virus
DEDKMKRMNT

SEQ ID NO: 14886 - protein, 10 aa, BK virus
EDKMKRMNTL

SEQ ID NO: 14887 - protein, 10 aa, BK virus
DKMKRMNTLY

SEQ ID NO: 14888 - protein, 10 aa, BK virus
KMKRMNTLYK

SEQ ID NO: 14889 - protein, 10 aa, BK virus
MKRMNTLYKK

SEQ ID NO: 14890 - protein, 10 aa, BK virus
KRMNTLYKKM

SEQ ID NO: 14891 - protein, 10 aa, BK virus
RMNTLYKKME

SEQ ID NO: 14892 - protein, 10 aa, BK virus
MNTLYKKMEQ

SEQ ID NO: 14893 - protein, 10 aa, BK virus
NTLYKKMEQD

SEQ ID NO: 14894 - protein, 10 aa, BK virus
TLYKKMEQDV

SEQ ID NO: 14895 - protein, 10 aa, BK virus
LYKKMEQDVK

SEQ ID NO: 14896 - protein, 10 aa, BK virus
YKKMEQDVKV

SEQ ID NO: 14897 - protein, 10 aa, BK virus
KKMEQDVKVA

SEQ ID NO: 14898 - protein, 10 aa, BK virus
KMEQDVKVAH

SEQ ID NO: 14899 - protein, 10 aa, BK virus
MEQDVKVAHQ

SEQ ID NO: 14900 - protein, 10 aa, BK virus
EQDVKVAHQP

SEQ ID NO: 14901 - protein, 10 aa, BK virus
QDVKVAHQPD

SEQ ID NO: 14902 - protein, 10 aa, BK virus
DVKVAHQPDF

SEQ ID NO: 14903 - protein, 10 aa, BK virus
VKVAHQPDFG

SEQ ID NO: 14904 - protein, 10 aa, BK virus
KVAHQPDFGT

SEQ ID NO: 14905 - protein, 10 aa, BK virus
VAHQPDFGTW

SEQ ID NO: 14906 - protein, 10 aa, BK virus
AHQPDFGTWS

SEQ ID NO: 14907 - protein, 10 aa, BK virus
HQPDFGTWSS

SEQ ID NO: 14908 - protein, 10 aa, BK virus
QPDFGTWSSS

SEQ ID NO: 14909 - protein, 10 aa, BK virus
PDFGTWSSSE

SEQ ID NO: 14910 - protein, 10 aa, BK virus
DFGTWSSSEV

SEQ ID NO: 14911 - protein, 10 aa, BK virus
FGTWSSSEVC

SEQ ID NO: 14912 - protein, 10 aa, BK virus
GTWSSSEVCA

SEQ ID NO: 14913 - protein, 10 aa, BK virus
TWSSSEVCAD

SEQ ID NO: 14914 - protein, 10 aa, BK virus
WSSSEVCADF

SEQ ID NO: 14915 - protein, 10 aa, BK virus
SSSEVCADFP

SEQ ID NO: 14916 - protein, 10 aa, BK virus
SSEVCADFPL

SEQ ID NO: 14917 - protein, 10 aa, BK virus
SEVCADFPLC

SEQ ID NO: 14918 - protein, 10 aa, BK virus
EVCADFPLCP

SEQ ID NO: 14919 - protein, 10 aa, BK virus
VCADFPLCPD

SEQ ID NO: 14920 - protein, 10 aa, BK virus
CADFPLCPDT

SEQ ID NO: 14921 - protein, 10 aa, BK virus
ADFPLCPDTL

SEQ ID NO: 14922 - protein, 10 aa, BK virus
DFPLCPDTLY

SEQ ID NO: 14923 - protein, 10 aa, BK virus
FPLCPDTLYC

SEQ ID NO: 14924 - protein, 10 aa, BK virus
PLCPDTLYCK

SEQ ID NO: 14925 - protein, 10 aa, BK virus
LCPDTLYCKE

SEQ ID NO: 14926 - protein, 10 aa, BK virus
CPDTLYCKEW

SEQ ID NO: 14927 - protein, 10 aa, BK virus
PDTLYCKEWP

SEQ ID NO: 14928 - protein, 10 aa, BK virus
DTLYCKEWPI

SEQ ID NO: 14929 - protein, 10 aa, BK virus
TLYCKEWPIC

SEQ ID NO: 14930 - protein, 10 aa, BK virus
LYCKEWPICS

SEQ ID NO: 14931 - protein, 10 aa, BK virus
YCKEWPICSK

SEQ ID NO: 14932 - protein, 10 aa, BK virus
CKEWPICSKK

SEQ ID NO: 14933 - protein, 10 aa, BK virus
KEWPICSKKP

SEQ ID NO: 14934 - protein, 10 aa, BK virus
EWPICSKKPS

SEQ ID NO: 14935 - protein, 10 aa, BK virus
WPICSKKPSV

SEQ ID NO: 14936 - protein, 10 aa, BK virus
PICSKKPSVH

SEQ ID NO: 14937 - protein, 10 aa, BK virus
ICSKKPSVHC

SEQ ID NO: 14938 - protein, 10 aa, BK virus
CSKKPSVHCP

SEQ ID NO: 14939 - protein, 10 aa, BK virus
SKKPSVHCPC

SEQ ID NO: 14940 - protein, 10 aa, BK virus
KKPSVHCPCM

SEQ ID NO: 14941 - protein, 10 aa, BK virus
KPSVHCPCML

SEQ ID NO: 14942 - protein, 10 aa, BK virus
PSVHCPCMLC

SEQ ID NO: 14943 - protein, 10 aa, BK virus
SVHCPCMLCQ

SEQ ID NO: 14944 - protein, 10 aa, BK virus
VHCPCMLCQL

SEQ ID NO: 14945 - protein, 10 aa, BK virus
HCPCMLCQLR

SEQ ID NO: 14946 - protein, 10 aa, BK virus
CPCMLCQLRL

SEQ ID NO: 14947 - protein, 10 aa, BK virus
PCMLCQLRLR

SEQ ID NO: 14948 - protein, 10 aa, BK virus
CMLCQLRLRH

SEQ ID NO: 14949 - protein, 10 aa, BK virus
MLCQLRLRHL

SEQ ID NO: 14950 - protein, 10 aa, BK virus
LCQLRLRHLN

SEQ ID NO: 14951 - protein, 10 aa, BK virus
CQLRLRHLNR

SEQ ID NO: 14952 - protein, 10 aa, BK virus
QLRLRHLNRK

SEQ ID NO: 14953 - protein, 10 aa, BK virus
LRLRHLNRKF

SEQ ID NO: 14954 - protein, 10 aa, BK virus
RLRHLNRKFL

SEQ ID NO: 14955 - protein, 10 aa, BK virus
LRHLNRKFLR

SEQ ID NO: 14956 - protein, 10 aa, BK virus
RHLNRKFLRK

SEQ ID NO: 14957 - protein, 10 aa, BK virus
HLNRKFLRKE

SEQ ID NO: 14958 - protein, 10 aa, BK virus
LNRKFLRKEP

SEQ ID NO: 14959 - protein, 10 aa, BK virus
NRKFLRKEPL

SEQ ID NO: 14960 - protein, 10 aa, BK virus
RKFLRKEPLV

SEQ ID NO: 14961 - protein, 10 aa, BK virus
KFLRKEPLVW

SEQ ID NO: 14962 - protein, 10 aa, BK virus
FLRKEPLVWI

SEQ ID NO: 14963 - protein, 10 aa, BK virus
LRKEPLVWID

SEQ ID NO: 14964 - protein, 10 aa, BK virus
RKEPLVWIDC

SEQ ID NO: 14965 - protein, 10 aa, BK virus
KEPLVWIDCY

SEQ ID NO: 14966 - protein, 10 aa, BK virus
EPLVWIDCYC

SEQ ID NO: 14967 - protein, 10 aa, BK virus
PLVWIDCYCI

SEQ ID NO: 14968 - protein, 10 aa, BK virus
LVWIDCYCID

SEQ ID NO: 14969 - protein, 10 aa, BK virus
VWIDCYCIDC

SEQ ID NO: 14970 - protein, 10 aa, BK virus
WIDCYCIDCF

SEQ ID NO: 14971 - protein, 10 aa, BK virus
IDCYCIDCFT

SEQ ID NO: 14972 - protein, 10 aa, BK virus
DCYCIDCFTQ

SEQ ID NO: 14973 - protein, 10 aa, BK virus
CYCIDCFTQW

SEQ ID NO: 14974 - protein, 10 aa, BK virus
YCIDCFTQWF

SEQ ID NO: 14975 - protein, 10 aa, BK virus
CIDCFTQWFG

SEQ ID NO: 14976 - protein, 10 aa, BK virus
IDCFTQWFGL

SEQ ID NO: 14977 - protein, 10 aa, BK virus
DCFTQWFGLD

SEQ ID NO: 14978 - protein, 10 aa, BK virus
CFTQWFGLDL

SEQ ID NO: 14979 - protein, 10 aa, BK virus
FTQWFGLDLT

SEQ ID NO: 14980 - protein, 10 aa, BK virus
TQWFGLDLTE

SEQ ID NO: 14981 - protein, 10 aa, BK virus
QWFGLDLTEE

SEQ ID NO: 14982 - protein, 10 aa, BK virus
WFGLDLTEET

SEQ ID NO: 14983 - protein, 10 aa, BK virus
FGLDLTEETL

SEQ ID NO: 14984 - protein, 10 aa, BK virus
GLDLTEETLQ

SEQ ID NO: 14985 - protein, 10 aa, BK virus
LDLTEETLQW

SEQ ID NO: 14986 - protein, 10 aa, BK virus
DLTEETLQWW

SEQ ID NO: 14987 - protein, 10 aa, BK virus
LTEETLQWWV

SEQ ID NO: 14988 - protein, 10 aa, BK virus
TEETLQWWVQ

SEQ ID NO: 14989 - protein, 10 aa, BK virus
EETLQWWVQI

SEQ ID NO: 14990 - protein, 10 aa, BK virus
ETLQWWVQII

SEQ ID NO: 14991 - protein, 10 aa, BK virus
TLQWWVQIIG

SEQ ID NO: 14992 - protein, 10 aa, BK virus
LQWWVQIIGE

SEQ ID NO: 14993 - protein, 10 aa, BK virus
QWWVQIIGET

SEQ ID NO: 14994 - protein, 10 aa, BK virus
WWVQIIGETP

SEQ ID NO: 14995 - protein, 10 aa, BK virus
WVQIIGETPF

SEQ ID NO: 14996 - protein, 10 aa, BK virus
VQIIGETPFR

SEQ ID NO: 14997 - protein, 10 aa, BK virus
QIIGETPFRD

SEQ ID NO: 14998 - protein, 10 aa, BK virus
IIGETPFRDL

SEQ ID NO: 14999 - protein, 10 aa, BK virus
IGETPFRDLK

SEQ ID NO: 15000 - protein, 10 aa, BK virus
GETPFRDLKL

SEQ ID NO: 15001 - protein, 10 aa, BK virus
KALSNYFFYR

SEQ ID NO: 15002 - protein, 10 aa, BK virus
ALSNYFFYRC

SEQ ID NO: 15003 - protein, 10 aa, BK virus
LSNYFFYRCQ

SEQ ID NO: 15004 - protein, 10 aa, BK virus
SNYFFYRCQP

SEQ ID NO: 15005 - protein, 10 aa, BK virus
NYFFYRCQPM

SEQ ID NO: 15006 - protein, 10 aa, BK virus
YFFYRCQPME

SEQ ID NO: 15007 - protein, 10 aa, BK virus
FFYRCQPMEQ

SEQ ID NO: 15008 - protein, 10 aa, BK virus
FYRCQPMEQK

SEQ ID NO: 15009 - protein, 10 aa, BK virus
YRCQPMEQKS

SEQ ID NO: 15010 - protein, 10 aa, BK virus
RCQPMEQKSG

SEQ ID NO: 15011 - protein, 10 aa, BK virus
CQPMEQKSGS

SEQ ID NO: 15012 - protein, 10 aa, BK virus
QPMEQKSGSP

SEQ ID NO: 15013 - protein, 10 aa, BK virus
PMEQKSGSPG

SEQ ID NO: 15014 - protein, 10 aa, BK virus
MEQKSGSPGG

SEQ ID NO: 15015 - protein, 10 aa, BK virus
EQKSGSPGGV

SEQ ID NO: 15016 - protein, 10 aa, BK virus
QKSGSPGGVP

SEQ ID NO: 15017 - protein, 10 aa, BK virus
KSGSPGGVPL

SEQ ID NO: 15018 - protein, 10 aa, BK virus
SGSPGGVPLM

SEQ ID NO: 15019 - protein, 10 aa, BK virus
GSPGGVPLMK

SEQ ID NO: 15020 - protein, 10 aa, BK virus
SPGGVPLMKN

SEQ ID NO: 15021 - protein, 10 aa, BK virus
PGGVPLMKNG

SEQ ID NO: 15022 - protein, 10 aa, BK virus
GGVPLMKNGM

SEQ ID NO: 15023 - protein, 10 aa, BK virus
GVPLMKNGMK

SEQ ID NO: 15024 - protein, 10 aa, BK virus
VPLMKNGMKI

SEQ ID NO: 15025 - protein, 10 aa, BK virus
PLMKNGMKIY

SEQ ID NO: 15026 - protein, 10 aa, BK virus
LMKNGMKIYF

SEQ ID NO: 15027 - protein, 10 aa, BK virus
MKNGMKIYFA

SEQ ID NO: 15028 - protein, 10 aa, BK virus
KNGMKIYFAM

SEQ ID NO: 15029 - protein, 10 aa, BK virus
NGMKIYFAMK

SEQ ID NO: 15030 - protein, 10 aa, BK virus
GMKIYFAMKI

SEQ ID NO: 15031 - protein, 10 aa, BK virus
MKIYFAMKIC

SEQ ID NO: 15032 - protein, 10 aa, BK virus
KIYFAMKICL

SEQ ID NO: 15033 - protein, 10 aa, BK virus
IYFAMKICLP

SEQ ID NO: 15034 - protein, 10 aa, BK virus
YFAMKICLPV

SEQ ID NO: 15035 - protein, 10 aa, BK virus
FAMKICLPVM

SEQ ID NO: 15036 - protein, 10 aa, BK virus
AMKICLPVMK

SEQ ID NO: 15037 - protein, 10 aa, BK virus
MKICLPVMKK

SEQ ID NO: 15038 - protein, 10 aa, BK virus
KICLPVMKKQ

SEQ ID NO: 15039 - protein, 10 aa, BK virus
ICLPVMKKQQ

SEQ ID NO: 15040 - protein, 10 aa, BK virus
CLPVMKKQQQ

SEQ ID NO: 15041 - protein, 10 aa, BK virus
LPVMKKQQQI

SEQ ID NO: 15042 - protein, 10 aa, BK virus
PVMKKQQQIL

SEQ ID NO: 15043 - protein, 10 aa, BK virus
VMKKQQQILN

SEQ ID NO: 15044 - protein, 10 aa, BK virus
MKKQQQILNT

SEQ ID NO: 15045 - protein, 10 aa, BK virus
KKQQQILNTQ

SEQ ID NO: 15046 - protein, 10 aa, BK virus
KQQQILNTQH

SEQ ID NO: 15047 - protein, 10 aa, BK virus
QQQILNTQHH

SEQ ID NO: 15048 - protein, 10 aa, BK virus
QQILNTQHHP

SEQ ID NO: 15049 - protein, 10 aa, BK virus
QILNTQHHPK

SEQ ID NO: 15050 - protein, 10 aa, BK virus
ILNTQHHPKK

SEQ ID NO: 15051 - protein, 10 aa, BK virus
LNTQHHPKKK

SEQ ID NO: 15052 - protein, 10 aa, BK virus
NTQHHPKKKE

SEQ ID NO: 15053 - protein, 10 aa, BK virus
TQHHPKKKER

SEQ ID NO: 15054 - protein, 10 aa, BK virus
KTLKTFPLIY

SEQ ID NO: 15055 - protein, 10 aa, BK virus
TLKTFPLIYT

SEQ ID NO: 15056 - protein, 10 aa, BK virus
LKTFPLIYTS

SEQ ID NO: 15057 - protein, 10 aa, BK virus
KTFPLIYTSF

SEQ ID NO: 15058 - protein, 10 aa, BK virus
TFPLIYTSFL

SEQ ID NO: 15059 - protein, 10 aa, BK virus
FPLIYTSFLV

SEQ ID NO: 15060 - protein, 10 aa, BK virus
PLIYTSFLVK

SEQ ID NO: 15061 - protein, 10 aa, BK virus
LIYTSFLVKL

SEQ ID NO: 15062 - protein, 10 aa, BK virus
IYTSFLVKLY

SEQ ID NO: 15063 - protein, 10 aa, BK virus
YTSFLVKLYL

SEQ ID NO: 15064 - protein, 10 aa, BK virus
TSFLVKLYLV

SEQ ID NO: 15065 - protein, 10 aa, BK virus
SFLVKLYLVI

SEQ ID NO: 15066 - protein, 10 aa, BK virus
FLVKLYLVIE

SEQ ID NO: 15067 - protein, 10 aa, BK virus
LVKLYLVIEP

SEQ ID NO: 15068 - protein, 10 aa, BK virus
VKLYLVIEPL

SEQ ID NO: 15069 - protein, 10 aa, BK virus
KLYLVIEPLP

SEQ ID NO: 15070 - protein, 10 aa, BK virus
LYLVIEPLPA

SEQ ID NO: 15071 - protein, 10 aa, BK virus
YLVIEPLPAL

SEQ ID NO: 15072 - protein, 10 aa, BK virus
LVIEPLPALL

SEQ ID NO: 15073 - protein, 10 aa, BK virus
VIEPLPALLC

SEQ ID NO: 15074 - protein, 10 aa, BK virus
IEPLPALLCI

SEQ ID NO: 15075 - protein, 10 aa, BK virus
EPLPALLCIL

SEQ ID NO: 15076 - protein, 10 aa, BK virus
PLPALLCILL

SEQ ID NO: 15077 - protein, 10 aa, BK virus
LPALLCILLK

SEQ ID NO: 15078 - protein, 10 aa, BK virus
PALLCILLKK

SEQ ID NO: 15079 - protein, 10 aa, BK virus
ALLCILLKKK

SEQ ID NO: 15080 - protein, 10 aa, BK virus
LLCILLKKKL

SEQ ID NO: 15081 - protein, 10 aa, BK virus
LCILLKKKLK

SEQ ID NO: 15082 - protein, 10 aa, BK virus
CILLKKKLKF

SEQ ID NO: 15083 - protein, 10 aa, BK virus
ILLKKKLKFC

SEQ ID NO: 15084 - protein, 10 aa, BK virus
LLKKKLKFCI

SEQ ID NO: 15085 - protein, 10 aa, BK virus
LKKKLKFCIK

SEQ ID NO: 15086 - protein, 10 aa, BK virus
KKKLKFCIKN

SEQ ID NO: 15087 - protein, 10 aa, BK virus
KKLKFCIKNL

SEQ ID NO: 15088 - protein, 10 aa, BK virus
KLKFCIKNLW

SEQ ID NO: 15089 - protein, 10 aa, BK virus
LKFCIKNLWK

SEQ ID NO: 15090 - protein, 10 aa, BK virus
KFCIKNLWKN

SEQ ID NO: 15091 - protein, 10 aa, BK virus
FCIKNLWKNI

SEQ ID NO: 15092 - protein, 10 aa, BK virus
CIKNLWKNIL

SEQ ID NO: 15093 - protein, 10 aa, BK virus
LLLVDTCVLG

SEQ ID NO: 15094 - protein, 10 aa, BK virus
LLVDTCVLGI

SEQ ID NO: 15095 - protein, 10 aa, BK virus
LVDTCVLGII

SEQ ID NO: 15096 - protein, 10 aa, BK virus
VDTCVLGIIL

SEQ ID NO: 15097 - protein, 10 aa, BK virus
DTCVLGIILY

SEQ ID NO: 15098 - protein, 10 aa, BK virus
TCVLGIILYS

SEQ ID NO: 15099 - protein, 10 aa, BK virus
CVLGIILYSF

SEQ ID NO: 15100 - protein, 10 aa, BK virus
LHIDIEFLQL

SEQ ID NO: 15101 - protein, 10 aa, BK virus
HIDIEFLQLI

SEQ ID NO: 15102 - protein, 10 aa, BK virus
IDIEFLQLII

SEQ ID NO: 15103 - protein, 10 aa, BK virus
DIEFLQLIIS

SEQ ID NO: 15104 - protein, 10 aa, BK virus
IEFLQLIISV

SEQ ID NO: 15105 - protein, 10 aa, BK virus
EFLQLIISVK

SEQ ID NO: 15106 - protein, 10 aa, BK virus
FLQLIISVKS

SEQ ID NO: 15107 - protein, 10 aa, BK virus
LQLIISVKSC

SEQ ID NO: 15108 - protein, 10 aa, BK virus
QLIISVKSCV

SEQ ID NO: 15109 - protein, 10 aa, BK virus
LIISVKSCVP

SEQ ID NO: 15110 - protein, 10 aa, BK virus
IISVKSCVPL

SEQ ID NO: 15111 - protein, 10 aa, BK virus
ISVKSCVPLV

SEQ ID NO: 15112 - protein, 10 aa, BK virus
SVKSCVPLVF

SEQ ID NO: 15113 - protein, 10 aa, BK virus
FVRVLIRNTY

SEQ ID NO: 15114 - protein, 10 aa, BK virus
VRVLIRNTYY

SEQ ID NO: 15115 - protein, 10 aa, BK virus
RVLIRNTYYI

SEQ ID NO: 15116 - protein, 10 aa, BK virus
VLIRNTYYIV

SEQ ID NO: 15117 - protein, 10 aa, BK virus
LIRNTYYIVP

SEQ ID NO: 15118 - protein, 10 aa, BK virus
RSMILAQKSL

SEQ ID NO: 15119 - protein, 10 aa, BK virus
SMILAQKSLK

SEQ ID NO: 15120 - protein, 10 aa, BK virus
MILAQKSLKK

SEQ ID NO: 15121 - protein, 10 aa, BK virus
ILAQKSLKKQ

SEQ ID NO: 15122 - protein, 10 aa, BK virus
LAQKSLKKQS

SEQ ID NO: 15123 - protein, 10 aa, BK virus
AQKSLKKQSR

SEQ ID NO: 15124 - protein, 10 aa, BK virus
QKSLKKQSRC

SEQ ID NO: 15125 - protein, 10 aa, BK virus
KSLKKQSRCL

SEQ ID NO: 15126 - protein, 10 aa, BK virus
SLKKQSRCLG

SEQ ID NO: 15127 - protein, 10 aa, BK virus
LKKQSRCLGN

SEQ ID NO: 15128 - protein, 10 aa, BK virus
RQSVRMCFYY

SEQ ID NO: 15129 - protein, 10 aa, BK virus
RSVKSVRKKT

SEQ ID NO: 15130 - protein, 10 aa, BK virus
SVKSVRKKTS

SEQ ID NO: 15131 - protein, 10 aa, BK virus
VKSVRKKTSL

SEQ ID NO: 15132 - protein, 10 aa, BK virus
KSVRKKTSLI

SEQ ID NO: 15133 - protein, 10 aa, BK virus
SVRKKTSLIT

SEQ ID NO: 15134 - protein, 10 aa, BK virus
VRKKTSLITL

SEQ ID NO: 15135 - protein, 10 aa, BK virus
RKKTSLITLS

SEQ ID NO: 15136 - protein, 10 aa, BK virus
KKTSLITLSI

SEQ ID NO: 15137 - protein, 10 aa, BK virus
KTSLITLSIM

SEQ ID NO: 15138 - protein, 10 aa, BK virus
TSLITLSIMK

SEQ ID NO: 15139 - protein, 10 aa, BK virus
SLITLSIMKS

SEQ ID NO: 15140 - protein, 10 aa, BK virus
LITLSIMKST

SEQ ID NO: 15141 - protein, 10 aa, BK virus
ITLSIMKSTL

SEQ ID NO: 15142 - protein, 10 aa, BK virus
TLSIMKSTLQ

SEQ ID NO: 15143 - protein, 10 aa, BK virus
LSIMKSTLQM

SEQ ID NO: 15144 - protein, 10 aa, BK virus
SIMKSTLQML

SEQ ID NO: 15145 - protein, 10 aa, BK virus
IMKSTLQMLL

SEQ ID NO: 15146 - protein, 10 aa, BK virus
MKSTLQMLLF

SEQ ID NO: 15147 - protein, 10 aa, BK virus
KSTLQMLLFL

SEQ ID NO: 15148 - protein, 10 aa, BK virus
STLQMLLFLQ

SEQ ID NO: 15149 - protein, 10 aa, BK virus
TLQMLLFLQK

SEQ ID NO: 15150 - protein, 10 aa, BK virus
LQMLLFLQKV

SEQ ID NO: 15151 - protein, 10 aa, BK virus
QMLLFLQKVK

SEQ ID NO: 15152 - protein, 10 aa, BK virus
MLLFLQKVKI

SEQ ID NO: 15153 - protein, 10 aa, BK virus
LLFLQKVKIK

SEQ ID NO: 15154 - protein, 10 aa, BK virus
LFLQKVKIKK

SEQ ID NO: 15155 - protein, 10 aa, BK virus
FLQKVKIKKV

SEQ ID NO: 15156 - protein, 10 aa, BK virus
LQKVKIKKVF

SEQ ID NO: 15157 - protein, 10 aa, BK virus
QKVKIKKVFV

SEQ ID NO: 15158 - protein, 10 aa, BK virus
KVKIKKVFVS

SEQ ID NO: 15159 - protein, 10 aa, BK virus
VKIKKVFVSK

SEQ ID NO: 15160 - protein, 10 aa, BK virus
KIKKVFVSKQ

SEQ ID NO: 15161 - protein, 10 aa, BK virus
NNIWQVLLGC

SEQ ID NO: 15162 - protein, 10 aa, BK virus
NIWQVLLGCT

SEQ ID NO: 15163 - protein, 10 aa, BK virus
IWQVLLGCTV

SEQ ID NO: 15164 - protein, 10 aa, BK virus
WQVLLGCTVC

SEQ ID NO: 15165 - protein, 10 aa, BK virus
QVLLGCTVCY

SEQ ID NO: 15166 - protein, 10 aa, BK virus
VLLGCTVCYL

SEQ ID NO: 15167 - protein, 10 aa, BK virus
LLGCTVCYLK

SEQ ID NO: 15168 - protein, 10 aa, BK virus
LGCTVCYLKW

SEQ ID NO: 15169 - protein, 10 aa, BK virus
GCTVCYLKWI

SEQ ID NO: 15170 - protein, 10 aa, BK virus
CTVCYLKWIL

SEQ ID NO: 15171 - protein, 10 aa, BK virus
YLIFCTVLFS

SEQ ID NO: 15172 - protein, 10 aa, BK virus
LIFCTVLFSM

SEQ ID NO: 15173 - protein, 10 aa, BK virus
IFCTVLFSMY

SEQ ID NO: 15174 - protein, 10 aa, BK virus
FCTVLFSMYL

SEQ ID NO: 15175 - protein, 10 aa, BK virus
CTVLFSMYLK

SEQ ID NO: 15176 - protein, 10 aa, BK virus
TVLFSMYLKE

SEQ ID NO: 15177 - protein, 10 aa, BK virus
VLFSMYLKED

SEQ ID NO: 15178 - protein, 10 aa, BK virus
LFSMYLKEDT

SEQ ID NO: 15179 - protein, 10 aa, BK virus
FSMYLKEDTG

SEQ ID NO: 15180 - protein, 10 aa, BK virus
SMYLKEDTGY

SEQ ID NO: 15181 - protein, 10 aa, BK virus
MYLKEDTGYL

SEQ ID NO: 15182 - protein, 10 aa, BK virus
YLKEDTGYLK

SEQ ID NO: 15183 - protein, 10 aa, BK virus
LKEDTGYLKV

SEQ ID NO: 15184 - protein, 10 aa, BK virus
KEDTGYLKVP

SEQ ID NO: 15185 - protein, 10 aa, BK virus
EDTGYLKVPL

SEQ ID NO: 15186 - protein, 10 aa, BK virus
DTGYLKVPLI

SEQ ID NO: 15187 - protein, 10 aa, BK virus
TGYLKVPLIV

SEQ ID NO: 15188 - protein, 10 aa, BK virus
GYLKVPLIVE

SEQ ID NO: 15189 - protein, 10 aa, BK virus
YLKVPLIVEK

SEQ ID NO: 15190 - protein, 10 aa, BK virus
LKVPLIVEKQ

SEQ ID NO: 15191 - protein, 10 aa, BK virus
KVPLIVEKQH

SEQ ID NO: 15192 - protein, 10 aa, BK virus
KGQELNQRIC

SEQ ID NO: 15193 - protein, 10 aa, BK virus
GQELNQRICL

SEQ ID NO: 15194 - protein, 10 aa, BK virus
QELNQRICLQ

SEQ ID NO: 15195 - protein, 10 aa, BK virus
ELNQRICLQD

SEQ ID NO: 15196 - protein, 10 aa, BK virus
LNQRICLQDM

SEQ ID NO: 15197 - protein, 10 aa, BK virus
NQRICLQDME

SEQ ID NO: 15198 - protein, 10 aa, BK virus
TKEPKYFHQA

SEQ ID NO: 15199 - protein, 10 aa, BK virus
KEPKYFHQAW

SEQ ID NO: 15200 - protein, 10 aa, BK virus
EPKYFHQAWL

SEQ ID NO: 15201 - protein, 10 aa, BK virus
PKYFHQAWLQ

SEQ ID NO: 15202 - protein, 10 aa, BK virus
MSILSLKPCK

SEQ ID NO: 15203 - protein, 10 aa, BK virus
SILSLKPCKL

SEQ ID NO: 15204 - protein, 10 aa, BK virus
ILSLKPCKLD

SEQ ID NO: 15205 - protein, 10 aa, BK virus
LSLKPCKLDL

SEQ ID NO: 15206 - protein, 10 aa, BK virus
ENPYKTQSSY

SEQ ID NO: 15207 - protein, 10 aa, BK virus
NPYKTQSSYL

SEQ ID NO: 15208 - protein, 10 aa, BK virus
PYKTQSSYLK

SEQ ID NO: 15209 - protein, 10 aa, BK virus
YKTQSSYLKK

SEQ ID NO: 15210 - protein, 10 aa, BK virus
KTQSSYLKKE

SEQ ID NO: 15211 - protein, 10 aa, BK virus
TQSSYLKKEF

SEQ ID NO: 15212 - protein, 10 aa, BK virus
QSSYLKKEFY

SEQ ID NO: 15213 - protein, 10 aa, BK virus
SSYLKKEFYK

SEQ ID NO: 15214 - protein, 10 aa, BK virus
SYLKKEFYKV

SEQ ID NO: 15215 - protein, 10 aa, BK virus
YLKKEFYKVE

SEQ ID NO: 15216 - protein, 10 aa, BK virus
LILQLIYNLE

SEQ ID NO: 15217 - protein, 10 aa, BK virus
ILQLIYNLEL

SEQ ID NO: 15218 - protein, 10 aa, BK virus
LQLIYNLELL

SEQ ID NO: 15219 - protein, 10 aa, BK virus
QLIYNLELLN

SEQ ID NO: 15220 - protein, 10 aa, BK virus
LIYNLELLNG

SEQ ID NO: 15221 - protein, 10 aa, BK virus
IYNLELLNGR

SEQ ID NO: 15222 - protein, 10 aa, BK virus
YNLELLNGRK

SEQ ID NO: 15223 - protein, 10 aa, BK virus
NLELLNGRKG

SEQ ID NO: 15224 - protein, 10 aa, BK virus
LELLNGRKGW

SEQ ID NO: 15225 - protein, 10 aa, BK virus
ELLNGRKGWI

SEQ ID NO: 15226 - protein, 10 aa, BK virus
LLNGRKGWIL

SEQ ID NO: 15227 - protein, 10 aa, BK virus
LNGRKGWILR

SEQ ID NO: 15228 - protein, 10 aa, BK virus
NIIYAWGNVF

SEQ ID NO: 15229 - protein, 10 aa, BK virus
IIYAWGNVFL

SEQ ID NO: 15230 - protein, 10 aa, BK virus
IYAWGNVFLI

SEQ ID NO: 15231 - protein, 10 aa, BK virus
YAWGNVFLIL

SEQ ID NO: 15232 - protein, 10 aa, BK virus
AWGNVFLILQ

SEQ ID NO: 15233 - protein, 10 aa, BK virus
WGNVFLILQE

SEQ ID NO: 15234 - protein, 10 aa, BK virus
GNVFLILQEK

SEQ ID NO: 15235 - protein, 10 aa, BK virus
NVFLILQEKR

SEQ ID NO: 15236 - protein, 10 aa, BK virus
VFLILQEKRI

SEQ ID NO: 15237 - protein, 10 aa, BK virus
FLILQEKRIQ

SEQ ID NO: 15238 - protein, 10 aa, BK virus
LILQEKRIQK

SEQ ID NO: 15239 - protein, 10 aa, BK virus
ILQEKRIQKL

SEQ ID NO: 15240 - protein, 10 aa, BK virus
LQEKRIQKLK

SEQ ID NO: 15241 - protein, 10 aa, BK virus
QEKRIQKLKT

SEQ ID NO: 15242 - protein, 10 aa, BK virus
EKRIQKLKTL

SEQ ID NO: 15243 - protein, 10 aa, BK virus
KRIQKLKTLD

SEQ ID NO: 15244 - protein, 10 aa, BK virus
RIQKLKTLDM

SEQ ID NO: 15245 - protein, 10 aa, BK virus
IQKLKTLDMD

SEQ ID NO: 15246 - protein, 10 aa, BK virus
QKLKTLDMDQ

SEQ ID NO: 15247 - protein, 10 aa, BK virus
KLKTLDMDQA

SEQ ID NO: 15248 - protein, 10 aa, BK virus
LKTLDMDQAL

SEQ ID NO: 15249 - protein, 10 aa, BK virus
KTLDMDQALN

SEQ ID NO: 15250 - protein, 10 aa, BK virus
TLDMDQALNP

SEQ ID NO: 15251 - protein, 10 aa, BK virus
LDMDQALNPN

SEQ ID NO: 15252 - protein, 10 aa, BK virus
DMDQALNPNH

SEQ ID NO: 15253 - protein, 10 aa, BK virus
MDQALNPNHN

SEQ ID NO: 15254 - protein, 10 aa, BK virus
DQALNPNHNA

SEQ ID NO: 15255 - protein, 10 aa, BK virus
QALNPNHNAL

SEQ ID NO: 15256 - protein, 10 aa, BK virus
ALNPNHNALP

SEQ ID NO: 15257 - protein, 10 aa, BK virus
LNPNHNALPK

SEQ ID NO: 15258 - protein, 10 aa, BK virus
NPNHNALPKS

SEQ ID NO: 15259 - protein, 10 aa, BK virus
PNHNALPKSQ

SEQ ID NO: 15260 - protein, 10 aa, BK virus
NHNALPKSQI

SEQ ID NO: 15261 - protein, 10 aa, BK virus
HNALPKSQIL

SEQ ID NO: 15262 - protein, 10 aa, BK virus
NALPKSQILQ

SEQ ID NO: 15263 - protein, 10 aa, BK virus
ALPKSQILQP

SEQ ID NO: 15264 - protein, 10 aa, BK virus
LPKSQILQPL

SEQ ID NO: 15265 - protein, 10 aa, BK virus
PKSQILQPLL

SEQ ID NO: 15266 - protein, 10 aa, BK virus
KSQILQPLLK

SEQ ID NO: 15267 - protein, 10 aa, BK virus
SQILQPLLKI

SEQ ID NO: 15268 - protein, 10 aa, BK virus
QILQPLLKIP

SEQ ID NO: 15269 - protein, 10 aa, BK virus
ILQPLLKIPK

SEQ ID NO: 15270 - protein, 10 aa, BK virus
LQPLLKIPKG

SEQ ID NO: 15271 - protein, 10 aa, BK virus
QPLLKIPKGQ

SEQ ID NO: 15272 - protein, 10 aa, BK virus
PLLKIPKGQT

SEQ ID NO: 15273 - protein, 10 aa, BK virus
LLKIPKGQTP

SEQ ID NO: 15274 - protein, 10 aa, BK virus
LKIPKGQTPI

SEQ ID NO: 15275 - protein, 10 aa, BK virus
KIPKGQTPIV

SEQ ID NO: 15276 - protein, 10 aa, BK virus
IPKGQTPIVK

SEQ ID NO: 15277 - protein, 10 aa, BK virus
PKGQTPIVKS

SEQ ID NO: 15278 - protein, 10 aa, BK virus
KGQTPIVKSC

SEQ ID NO: 15279 - protein, 10 aa, BK virus
GQTPIVKSCI

SEQ ID NO: 15280 - protein, 10 aa, BK virus
QTPIVKSCIC

SEQ ID NO: 15281 - protein, 10 aa, BK virus
TPIVKSCICV

SEQ ID NO: 15282 - protein, 10 aa, BK virus
PIVKSCICVK

SEQ ID NO: 15283 - protein, 10 aa, BK virus
IVKSCICVKA

SEQ ID NO: 15284 - protein, 10 aa, BK virus
VKSCICVKAF

SEQ ID NO: 15285 - protein, 10 aa, BK virus
KSCICVKAFS

SEQ ID NO: 15286 - protein, 10 aa, BK virus
SCICVKAFSV

SEQ ID NO: 15287 - protein, 10 aa, BK virus
CICVKAFSVL

SEQ ID NO: 15288 - protein, 10 aa, BK virus
ICVKAFSVLK

SEQ ID NO: 15289 - protein, 10 aa, BK virus
CVKAFSVLKG

SEQ ID NO: 15290 - protein, 10 aa, BK virus
VKAFSVLKGL

SEQ ID NO: 15291 - protein, 10 aa, BK virus
KAFSVLKGLK

SEQ ID NO: 15292 - protein, 10 aa, BK virus
AFSVLKGLKH

SEQ ID NO: 15293 - protein, 10 aa, BK virus
FSVLKGLKHH

SEQ ID NO: 15294 - protein, 10 aa, BK virus
SVLKGLKHHP

SEQ ID NO: 15295 - protein, 10 aa, BK virus
VLKGLKHHPQ

SEQ ID NO: 15296 - protein, 10 aa, BK virus
LKGLKHHPQN

SEQ ID NO: 15297 - protein, 10 aa, BK virus
KGLKHHPQNN

SEQ ID NO: 15298 - protein, 10 aa, BK virus
GLKHHPQNNT

SEQ ID NO: 15299 - protein, 10 aa, BK virus
LKHHPQNNTS

SEQ ID NO: 15300 - protein, 10 aa, BK virus
KHHPQNNTSL

SEQ ID NO: 15301 - protein, 10 aa, BK virus
HHPQNNTSLK

SEQ ID NO: 15302 - protein, 10 aa, BK virus
HPQNNTSLKV

SEQ ID NO: 15303 - protein, 10 aa, BK virus
PQNNTSLKVA

SEQ ID NO: 15304 - protein, 10 aa, BK virus
QNNTSLKVAY

SEQ ID NO: 15305 - protein, 10 aa, BK virus
NNTSLKVAYT

SEQ ID NO: 15306 - protein, 10 aa, BK virus
NTSLKVAYTK

SEQ ID NO: 15307 - protein, 10 aa, BK virus
TSLKVAYTKA

SEQ ID NO: 15308 - protein, 10 aa, BK virus
SLKVAYTKAA

SEQ ID NO: 15309 - protein, 10 aa, BK virus
LKVAYTKAAF

SEQ ID NO: 15310 - protein, 10 aa, BK virus
KVAYTKAAFI

SEQ ID NO: 15311 - protein, 10 aa, BK virus
VAYTKAAFIK

SEQ ID NO: 15312 - protein, 10 aa, BK virus
AYTKAAFIKC

SEQ ID NO: 15313 - protein, 10 aa, BK virus
YTKAAFIKCI

SEQ ID NO: 15314 - protein, 10 aa, BK virus
TKAAFIKCIC

SEQ ID NO: 15315 - protein, 10 aa, BK virus
KAAFIKCICT

SEQ ID NO: 15316 - protein, 10 aa, BK virus
AAFIKCICTI

SEQ ID NO: 15317 - protein, 10 aa, BK virus
AFIKCICTIK

SEQ ID NO: 15318 - protein, 10 aa, BK virus
FIKCICTIKA

SEQ ID NO: 15319 - protein, 10 aa, BK virus
IKCICTIKAP

SEQ ID NO: 15320 - protein, 10 aa, BK virus
KCICTIKAPV

SEQ ID NO: 15321 - protein, 10 aa, BK virus
SILVCNCPCL

SEQ ID NO: 15322 - protein, 10 aa, BK virus
ILVCNCPCLS

SEQ ID NO: 15323 - protein, 10 aa, BK virus
LVCNCPCLSI

SEQ ID NO: 15324 - protein, 10 aa, BK virus
VCNCPCLSIY

SEQ ID NO: 15325 - protein, 10 aa, BK virus
CNCPCLSIYL

SEQ ID NO: 15326 - protein, 10 aa, BK virus
NCPCLSIYLI

SEQ ID NO: 15327 - protein, 10 aa, BK virus
CPCLSIYLII

SEQ ID NO: 15328 - protein, 10 aa, BK virus
PCLSIYLIIS

SEQ ID NO: 15329 - protein, 10 aa, BK virus
CLSIYLIISG

SEQ ID NO: 15330 - protein, 10 aa, BK virus
LSIYLIISGS

SEQ ID NO: 15331 - protein, 10 aa, BK virus
SIYLIISGSP

SEQ ID NO: 15332 - protein, 10 aa, BK virus
IYLIISGSPG

SEQ ID NO: 15333 - protein, 10 aa, BK virus
YLIISGSPGS

SEQ ID NO: 15334 - protein, 10 aa, BK virus
LIISGSPGSL

SEQ ID NO: 15335 - protein, 10 aa, BK virus
IISGSPGSLS

SEQ ID NO: 15336 - protein, 10 aa, BK virus
ISGSPGSLSV

SEQ ID NO: 15337 - protein, 10 aa, BK virus
SGSPGSLSVP

SEQ ID NO: 15338 - protein, 10 aa, BK virus
GSPGSLSVPS

SEQ ID NO: 15339 - protein, 10 aa, BK virus
SPGSLSVPSN

SEQ ID NO: 15340 - protein, 10 aa, BK virus
PGSLSVPSNT

SEQ ID NO: 15341 - protein, 10 aa, BK virus
GSLSVPSNTL

SEQ ID NO: 15342 - protein, 10 aa, BK virus
SLSVPSNTLT

SEQ ID NO: 15343 - protein, 10 aa, BK virus
LSVPSNTLTS

SEQ ID NO: 15344 - protein, 10 aa, BK virus
SVPSNTLTSS

SEQ ID NO: 15345 - protein, 10 aa, BK virus
VPSNTLTSST

SEQ ID NO: 15346 - protein, 10 aa, BK virus
PSNTLTSSTW

SEQ ID NO: 15347 - protein, 10 aa, BK virus
SNTLTSSTWD

SEQ ID NO: 15348 - protein, 10 aa, BK virus
NTLTSSTWDS

SEQ ID NO: 15349 - protein, 10 aa, BK virus
TLTSSTWDSI

SEQ ID NO: 15350 - protein, 10 aa, BK virus
LTSSTWDSIP

SEQ ID NO: 15351 - protein, 10 aa, BK virus
TSSTWDSIPY

SEQ ID NO: 15352 - protein, 10 aa, BK virus
SSTWDSIPYI

SEQ ID NO: 15353 - protein, 10 aa, BK virus
STWDSIPYIG

SEQ ID NO: 15354 - protein, 10 aa, BK virus
TWDSIPYIGC

SEQ ID NO: 15355 - protein, 10 aa, BK virus
WDSIPYIGCP

SEQ ID NO: 15356 - protein, 10 aa, BK virus
DSIPYIGCPS

SEQ ID NO: 15357 - protein, 10 aa, BK virus
SIPYIGCPST

SEQ ID NO: 15358 - protein, 10 aa, BK virus
IPYIGCPSTL

SEQ ID NO: 15359 - protein, 10 aa, BK virus
PYIGCPSTLW

SEQ ID NO: 15360 - protein, 10 aa, BK virus
YIGCPSTLWV

SEQ ID NO: 15361 - protein, 10 aa, BK virus
IGCPSTLWVL

SEQ ID NO: 15362 - protein, 10 aa, BK virus
GCPSTLWVLL

SEQ ID NO: 15363 - protein, 10 aa, BK virus
CPSTLWVLLF

SEQ ID NO: 15364 - protein, 10 aa, BK virus
PSTLWVLLFI

SEQ ID NO: 15365 - protein, 10 aa, BK virus
STLWVLLFIR

SEQ ID NO: 15366 - protein, 10 aa, BK virus
TLWVLLFIRS

SEQ ID NO: 15367 - protein, 10 aa, BK virus
LWVLLFIRSL

SEQ ID NO: 15368 - protein, 10 aa, BK virus
WVLLFIRSLS

SEQ ID NO: 15369 - protein, 10 aa, BK virus
VLLFIRSLSK

SEQ ID NO: 15370 - protein, 10 aa, BK virus
LLFIRSLSKK

SEQ ID NO: 15371 - protein, 10 aa, BK virus
LFIRSLSKKE

SEQ ID NO: 15372 - protein, 10 aa, BK virus
FIRSLSKKEI

SEQ ID NO: 15373 - protein, 10 aa, BK virus
IRSLSKKEIG

SEQ ID NO: 15374 - protein, 10 aa, BK virus
GFFTDLFLRR

SEQ ID NO: 15375 - protein, 10 aa, BK virus
FFTDLFLRRI

SEQ ID NO: 15376 - protein, 10 aa, BK virus
FTDLFLRRIL

SEQ ID NO: 15377 - protein, 10 aa, BK virus
TDLFLRRILK

SEQ ID NO: 15378 - protein, 10 aa, BK virus
DLFLRRILKY

SEQ ID NO: 15379 - protein, 10 aa, BK virus
LFLRRILKYL

SEQ ID NO: 15380 - protein, 10 aa, BK virus
FLRRILKYLA

SEQ ID NO: 15381 - protein, 10 aa, BK virus
LRRILKYLAR

SEQ ID NO: 15382 - protein, 10 aa, BK virus
RRILKYLARP

SEQ ID NO: 15383 - protein, 10 aa, BK virus
RILKYLARPL

SEQ ID NO: 15384 - protein, 10 aa, BK virus
ILKYLARPLH

SEQ ID NO: 15385 - protein, 10 aa, BK virus
LKYLARPLHC

SEQ ID NO: 15386 - protein, 10 aa, BK virus
KYLARPLHCC

SEQ ID NO: 15387 - protein, 10 aa, BK virus
YLARPLHCCV

SEQ ID NO: 15388 - protein, 10 aa, BK virus
LARPLHCCVP

SEQ ID NO: 15389 - protein, 10 aa, BK virus
ARPLHCCVPE

SEQ ID NO: 15390 - protein, 10 aa, BK virus
RPLHCCVPEL

SEQ ID NO: 15391 - protein, 10 aa, BK virus
PLHCCVPELL

SEQ ID NO: 15392 - protein, 10 aa, BK virus
LHCCVPELLV

SEQ ID NO: 15393 - protein, 10 aa, BK virus
HCCVPELLVN

SEQ ID NO: 15394 - protein, 10 aa, BK virus
CCVPELLVNR

SEQ ID NO: 15395 - protein, 10 aa, BK virus
CVPELLVNRP

SEQ ID NO: 15396 - protein, 10 aa, BK virus
VPELLVNRPQ

SEQ ID NO: 15397 - protein, 10 aa, BK virus
PELLVNRPQI

SEQ ID NO: 15398 - protein, 10 aa, BK virus
ELLVNRPQIS

SEQ ID NO: 15399 - protein, 10 aa, BK virus
LLVNRPQISA

SEQ ID NO: 15400 - protein, 10 aa, BK virus
LVNRPQISAA

SEQ ID NO: 15401 - protein, 10 aa, BK virus
VNRPQISAAE

SEQ ID NO: 15402 - protein, 10 aa, BK virus
NRPQISAAET

SEQ ID NO: 15403 - protein, 10 aa, BK virus
RPQISAAETY

SEQ ID NO: 15404 - protein, 10 aa, BK virus
PQISAAETYR

SEQ ID NO: 15405 - protein, 10 aa, BK virus
QISAAETYRL

SEQ ID NO: 15406 - protein, 10 aa, BK virus
ISAAETYRLS

SEQ ID NO: 15407 - protein, 10 aa, BK virus
SAAETYRLSA

SEQ ID NO: 15408 - protein, 10 aa, BK virus
AAETYRLSAL

SEQ ID NO: 15409 - protein, 10 aa, BK virus
AETYRLSALQ

SEQ ID NO: 15410 - protein, 10 aa, BK virus
ETYRLSALQR

SEQ ID NO: 15411 - protein, 10 aa, BK virus
TYRLSALQRG

SEQ ID NO: 15412 - protein, 10 aa, BK virus
YRLSALQRGP

SEQ ID NO: 15413 - protein, 10 aa, BK virus
RLSALQRGPT

SEQ ID NO: 15414 - protein, 10 aa, BK virus
LSALQRGPTP

SEQ ID NO: 15415 - protein, 10 aa, BK virus
SALQRGPTPC

SEQ ID NO: 15416 - protein, 10 aa, BK virus
ALQRGPTPCS

SEQ ID NO: 15417 - protein, 10 aa, BK virus
LQRGPTPCSS

SEQ ID NO: 15418 - protein, 10 aa, BK virus
QRGPTPCSSS

SEQ ID NO: 15419 - protein, 10 aa, BK virus
RGPTPCSSSN

SEQ ID NO: 15420 - protein, 10 aa, BK virus
GPTPCSSSNT

SEQ ID NO: 15421 - protein, 10 aa, BK virus
PTPCSSSNTV

SEQ ID NO: 15422 - protein, 10 aa, BK virus
TPCSSSNTVV

SEQ ID NO: 15423 - protein, 10 aa, BK virus
PCSSSNTVVA

SEQ ID NO: 15424 - protein, 10 aa, BK virus
CSSSNTVVAV

SEQ ID NO: 15425 - protein, 10 aa, BK virus
SSSNTVVAVL

SEQ ID NO: 15426 - protein, 10 aa, BK virus
SSNTVVAVLV

SEQ ID NO: 15427 - protein, 10 aa, BK virus
SNTVVAVLVT

SEQ ID NO: 15428 - protein, 10 aa, BK virus
STGGTFSPPV

SEQ ID NO: 15429 - protein, 10 aa, BK virus
TGGTFSPPVK

SEQ ID NO: 15430 - protein, 10 aa, BK virus
GGTFSPPVKV

SEQ ID NO: 15431 - protein, 10 aa, BK virus
GTFSPPVKVP

SEQ ID NO: 15432 - protein, 10 aa, BK virus
TFSPPVKVPK

SEQ ID NO: 15433 - protein, 10 aa, BK virus
FSPPVKVPKY

SEQ ID NO: 15434 - protein, 10 aa, BK virus
SPPVKVPKYL

SEQ ID NO: 15435 - protein, 10 aa, BK virus
PPVKVPKYLA

SEQ ID NO: 15436 - protein, 10 aa, BK virus
PVKVPKYLAF

SEQ ID NO: 15437 - protein, 10 aa, BK virus
VKVPKYLAFS

SEQ ID NO: 15438 - protein, 10 aa, BK virus
KVPKYLAFSF

SEQ ID NO: 15439 - protein, 10 aa, BK virus
VPKYLAFSFL

SEQ ID NO: 15440 - protein, 10 aa, BK virus
PKYLAFSFLL

SEQ ID NO: 15441 - protein, 10 aa, BK virus
KYLAFSFLLG

SEQ ID NO: 15442 - protein, 10 aa, BK virus
YLAFSFLLGS

SEQ ID NO: 15443 - protein, 10 aa, BK virus
LAFSFLLGSG

SEQ ID NO: 15444 - protein, 10 aa, BK virus
AFSFLLGSGT

SEQ ID NO: 15445 - protein, 10 aa, BK virus
FSFLLGSGTQ

SEQ ID NO: 15446 - protein, 10 aa, BK virus
SFLLGSGTQH

SEQ ID NO: 15447 - protein, 10 aa, BK virus
FLLGSGTQHS

SEQ ID NO: 15448 - protein, 10 aa, BK virus
LLGSGTQHST

SEQ ID NO: 15449 - protein, 10 aa, BK virus
LGSGTQHSTG

SEQ ID NO: 15450 - protein, 10 aa, BK virus
ALWSVFITWD

SEQ ID NO: 15451 - protein, 10 aa, BK virus
LWSVFITWDW

SEQ ID NO: 15452 - protein, 10 aa, BK virus
WSVFITWDWA

SEQ ID NO: 15453 - protein, 10 aa, BK virus
SVFITWDWAV

SEQ ID NO: 15454 - protein, 10 aa, BK virus
VFITWDWAVG

SEQ ID NO: 15455 - protein, 10 aa, BK virus
FITWDWAVGF

SEQ ID NO: 15456 - protein, 10 aa, BK virus
ITWDWAVGFL

SEQ ID NO: 15457 - protein, 10 aa, BK virus
TWDWAVGFLG

SEQ ID NO: 15458 - protein, 10 aa, BK virus
WDWAVGFLGV

SEQ ID NO: 15459 - protein, 10 aa, BK virus
DWAVGFLGVI

SEQ ID NO: 15460 - protein, 10 aa, BK virus
WAVGFLGVIV

SEQ ID NO: 15461 - protein, 10 aa, BK virus
AVGFLGVIVP

SEQ ID NO: 15462 - protein, 10 aa, BK virus
VGFLGVIVPS

SEQ ID NO: 15463 - protein, 10 aa, BK virus
GFLGVIVPSG

SEQ ID NO: 15464 - protein, 10 aa, BK virus
FLGVIVPSGY

SEQ ID NO: 15465 - protein, 10 aa, BK virus
LGVIVPSGYF

SEQ ID NO: 15466 - protein, 10 aa, BK virus
GVIVPSGYFD

SEQ ID NO: 15467 - protein, 10 aa, BK virus
VIVPSGYFDL

SEQ ID NO: 15468 - protein, 10 aa, BK virus
FISTPCISKG

SEQ ID NO: 15469 - protein, 10 aa, BK virus
ISTPCISKGS

SEQ ID NO: 15470 - protein, 10 aa, BK virus
STPCISKGSP

SEQ ID NO: 15471 - protein, 10 aa, BK virus
TPCISKGSPP

SEQ ID NO: 15472 - protein, 10 aa, BK virus
PCISKGSPPT

SEQ ID NO: 15473 - protein, 10 aa, BK virus
CISKGSPPTA

SEQ ID NO: 15474 - protein, 10 aa, BK virus
ISKGSPPTAK

SEQ ID NO: 15475 - protein, 10 aa, BK virus
SKGSPPTAKK

SEQ ID NO: 15476 - protein, 10 aa, BK virus
KGSPPTAKKW

SEQ ID NO: 15477 - protein, 10 aa, BK virus
GSPPTAKKWK

SEQ ID NO: 15478 - protein, 10 aa, BK virus
SPPTAKKWKL

SEQ ID NO: 15479 - protein, 10 aa, BK virus
PPTAKKWKLL

SEQ ID NO: 15480 - protein, 10 aa, BK virus
PTAKKWKLLP

SEQ ID NO: 15481 - protein, 10 aa, BK virus
IGFPPPCSCT

SEQ ID NO: 15482 - protein, 10 aa, BK virus
GFPPPCSCTF

SEQ ID NO: 15483 - protein, 10 aa, BK virus
FPPPCSCTFC

SEQ ID NO: 15484 - protein, 10 aa, BK virus
PPPCSCTFCD

SEQ ID NO: 15485 - protein, 10 aa, BK virus
PPCSCTFCDP

SEQ ID NO: 15486 - protein, 10 aa, BK virus
PCSCTFCDPA

SEQ ID NO: 15487 - protein, 10 aa, BK virus
RLSMLVIPIT

SEQ ID NO: 15488 - protein, 10 aa, BK virus
LSMLVIPITS

SEQ ID NO: 15489 - protein, 10 aa, BK virus
SMLVIPITSV

SEQ ID NO: 15490 - protein, 10 aa, BK virus
MLVIPITSVC

SEQ ID NO: 15491 - protein, 10 aa, BK virus
LVIPITSVCT

SEQ ID NO: 15492 - protein, 10 aa, BK virus
VIPITSVCTV

SEQ ID NO: 15493 - protein, 10 aa, BK virus
IPITSVCTVT

SEQ ID NO: 15494 - protein, 10 aa, BK virus
PITSVCTVTA

SEQ ID NO: 15495 - protein, 10 aa, BK virus
ITSVCTVTAS

SEQ ID NO: 15496 - protein, 10 aa, BK virus
TSVCTVTASH

SEQ ID NO: 15497 - protein, 10 aa, BK virus
SVCTVTASHI

SEQ ID NO: 15498 - protein, 10 aa, BK virus
VCTVTASHIS

SEQ ID NO: 15499 - protein, 10 aa, BK virus
CTVTASHISR

SEQ ID NO: 15500 - protein, 10 aa, BK virus
TVTASHISRF

SEQ ID NO: 15501 - protein, 10 aa, BK virus
VTASHISRFP

SEQ ID NO: 15502 - protein, 10 aa, BK virus
TASHISRFPQ

SEQ ID NO: 15503 - protein, 10 aa, BK virus
ASHISRFPQV

SEQ ID NO: 15504 - protein, 10 aa, BK virus
SHISRFPQVR

SEQ ID NO: 15505 - protein, 10 aa, BK virus
HISRFPQVRS

SEQ ID NO: 15506 - protein, 10 aa, BK virus
ISRFPQVRSS

SEQ ID NO: 15507 - protein, 10 aa, BK virus
SRFPQVRSSF

SEQ ID NO: 15508 - protein, 10 aa, BK virus
RFPQVRSSFK

SEQ ID NO: 15509 - protein, 10 aa, BK virus
FPQVRSSFKL

SEQ ID NO: 15510 - protein, 10 aa, BK virus
PQVRSSFKLG

SEQ ID NO: 15511 - protein, 10 aa, BK virus
QVRSSFKLGR

SEQ ID NO: 15512 - protein, 10 aa, BK virus
VRSSFKLGRG

SEQ ID NO: 15513 - protein, 10 aa, BK virus
RSSFKLGRGI

SEQ ID NO: 15514 - protein, 10 aa, BK virus
SSFKLGRGIL

SEQ ID NO: 15515 - protein, 10 aa, BK virus
SFKLGRGILA

SEQ ID NO: 15516 - protein, 10 aa, BK virus
FKLGRGILAV

SEQ ID NO: 15517 - protein, 10 aa, BK virus
KLGRGILAVL

SEQ ID NO: 15518 - protein, 10 aa, BK virus
QGSIFLSGLS

SEQ ID NO: 15519 - protein, 10 aa, BK virus
GSIFLSGLSL

SEQ ID NO: 15520 - protein, 10 aa, BK virus
SIFLSGLSLL

SEQ ID NO: 15521 - protein, 10 aa, BK virus
IFLSGLSLLK

SEQ ID NO: 15522 - protein, 10 aa, BK virus
FLSGLSLLKS

SEQ ID NO: 15523 - protein, 10 aa, BK virus
LSGLSLLKSF

SEQ ID NO: 15524 - protein, 10 aa, BK virus
SGLSLLKSFS

SEQ ID NO: 15525 - protein, 10 aa, BK virus
GLSLLKSFSA

SEQ ID NO: 15526 - protein, 10 aa, BK virus
LSLLKSFSAL

SEQ ID NO: 15527 - protein, 10 aa, BK virus
SLLKSFSALS

SEQ ID NO: 15528 - protein, 10 aa, BK virus
LLKSFSALSF

SEQ ID NO: 15529 - protein, 10 aa, BK virus
LKSFSALSFR

SEQ ID NO: 15530 - protein, 10 aa, BK virus
KSFSALSFRL

SEQ ID NO: 15531 - protein, 10 aa, BK virus
SFSALSFRLK

SEQ ID NO: 15532 - protein, 10 aa, BK virus
FSALSFRLKP

SEQ ID NO: 15533 - protein, 10 aa, BK virus
SALSFRLKPL

SEQ ID NO: 15534 - protein, 10 aa, BK virus
ALSFRLKPLR

SEQ ID NO: 15535 - protein, 10 aa, BK virus
LSFRLKPLRF

SEQ ID NO: 15536 - protein, 10 aa, BK virus
SFRLKPLRFS

SEQ ID NO: 15537 - protein, 10 aa, BK virus
FRLKPLRFSS

SEQ ID NO: 15538 - protein, 10 aa, BK virus
RLKPLRFSSG

SEQ ID NO: 15539 - protein, 10 aa, BK virus
LKPLRFSSGS

SEQ ID NO: 15540 - protein, 10 aa, BK virus
KPLRFSSGSP

SEQ ID NO: 15541 - protein, 10 aa, BK virus
PLRFSSGSPI

SEQ ID NO: 15542 - protein, 10 aa, BK virus
LRFSSGSPIS

SEQ ID NO: 15543 - protein, 10 aa, BK virus
RFSSGSPISG

SEQ ID NO: 15544 - protein, 10 aa, BK virus
FSSGSPISGF

SEQ ID NO: 15545 - protein, 10 aa, BK virus
SSGSPISGFR

SEQ ID NO: 15546 - protein, 10 aa, BK virus
SGSPISGFRK

SEQ ID NO: 15547 - protein, 10 aa, BK virus
GSPISGFRKH

SEQ ID NO: 15548 - protein, 10 aa, BK virus
SPISGFRKHS

SEQ ID NO: 15549 - protein, 10 aa, BK virus
PISGFRKHST

SEQ ID NO: 15550 - protein, 10 aa, BK virus
ISGFRKHSTS

SEQ ID NO: 15551 - protein, 10 aa, BK virus
SGFRKHSTSV

SEQ ID NO: 15552 - protein, 10 aa, BK virus
GFRKHSTSVI

SEQ ID NO: 15553 - protein, 10 aa, BK virus
FRKHSTSVIA

SEQ ID NO: 15554 - protein, 10 aa, BK virus
RKHSTSVIAS

SEQ ID NO: 15555 - protein, 10 aa, BK virus
KHSTSVIAST

SEQ ID NO: 15556 - protein, 10 aa, BK virus
HSTSVIASTP

SEQ ID NO: 15557 - protein, 10 aa, BK virus
STSVIASTPV

SEQ ID NO: 15558 - protein, 10 aa, BK virus
TSVIASTPVL

SEQ ID NO: 15559 - protein, 10 aa, BK virus
SVIASTPVLT

SEQ ID NO: 15560 - protein, 10 aa, BK virus
VIASTPVLTS

SEQ ID NO: 15561 - protein, 10 aa, BK virus
IASTPVLTSR

SEQ ID NO: 15562 - protein, 10 aa, BK virus
ASTPVLTSRT

SEQ ID NO: 15563 - protein, 10 aa, BK virus
STPVLTSRTS

SEQ ID NO: 15564 - protein, 10 aa, BK virus
TPVLTSRTST

SEQ ID NO: 15565 - protein, 10 aa, BK virus
PVLTSRTSTP

SEQ ID NO: 15566 - protein, 10 aa, BK virus
VLTSRTSTPP

SEQ ID NO: 15567 - protein, 10 aa, BK virus
LTSRTSTPPF

SEQ ID NO: 15568 - protein, 10 aa, BK virus
TSRTSTPPFI

SEQ ID NO: 15569 - protein, 10 aa, BK virus
SRTSTPPFIS

SEQ ID NO: 15570 - protein, 10 aa, BK virus
RTSTPPFISS

SEQ ID NO: 15571 - protein, 10 aa, BK virus
TSTPPFISSF

SEQ ID NO: 15572 - protein, 10 aa, BK virus
STPPFISSFG

SEQ ID NO: 15573 - protein, 10 aa, BK virus
TPPFISSFGT

SEQ ID NO: 15574 - protein, 10 aa, BK virus
PPFISSFGTC

SEQ ID NO: 15575 - protein, 10 aa, BK virus
PFISSFGTCT

SEQ ID NO: 15576 - protein, 10 aa, BK virus
FISSFGTCTG

SEQ ID NO: 15577 - protein, 10 aa, BK virus
ISSFGTCTGS

SEQ ID NO: 15578 - protein, 10 aa, BK virus
SSFGTCTGSF

SEQ ID NO: 15579 - protein, 10 aa, BK virus
SFGTCTGSFG

SEQ ID NO: 15580 - protein, 10 aa, BK virus
FGTCTGSFGF

SEQ ID NO: 15581 - protein, 10 aa, BK virus
GTCTGSFGFL

SEQ ID NO: 15582 - protein, 10 aa, BK virus
TCTGSFGFLG

SEQ ID NO: 15583 - protein, 10 aa, BK virus
CTGSFGFLGA

SEQ ID NO: 15584 - protein, 10 aa, BK virus
TGSFGFLGAA

SEQ ID NO: 15585 - protein, 10 aa, BK virus
GSFGFLGAAP

SEQ ID NO: 15586 - protein, 10 aa, BK virus
SFGFLGAAPG

SEQ ID NO: 15587 - protein, 10 aa, BK virus
FGFLGAAPGH

SEQ ID NO: 15588 - protein, 10 aa, BK virus
GFLGAAPGHS

SEQ ID NO: 15589 - protein, 10 aa, BK virus
FLGAAPGHSP

SEQ ID NO: 15590 - protein, 10 aa, BK virus
LGAAPGHSPF

SEQ ID NO: 15591 - protein, 10 aa, BK virus
GAAPGHSPFL

SEQ ID NO: 15592 - protein, 10 aa, BK virus
AAPGHSPFLL

SEQ ID NO: 15593 - protein, 10 aa, BK virus
APGHSPFLLV

SEQ ID NO: 15594 - protein, 10 aa, BK virus
PGHSPFLLVG

SEQ ID NO: 15595 - protein, 10 aa, BK virus
GHSPFLLVGA

SEQ ID NO: 15596 - protein, 10 aa, BK virus
HSPFLLVGAI

SEQ ID NO: 15597 - protein, 10 aa, BK virus
SPFLLVGAIF

SEQ ID NO: 15598 - protein, 10 aa, BK virus
PFLLVGAIFI

SEQ ID NO: 15599 - protein, 10 aa, BK virus
FLLVGAIFIC

SEQ ID NO: 15600 - protein, 10 aa, BK virus
LLVGAIFICF

SEQ ID NO: 15601 - protein, 10 aa, BK virus
LVGAIFICFK

SEQ ID NO: 15602 - protein, 10 aa, BK virus
VGAIFICFKS

SEQ ID NO: 15603 - protein, 10 aa, BK virus
GAIFICFKSR

SEQ ID NO: 15604 - protein, 10 aa, BK virus
AIFICFKSRC

SEQ ID NO: 15605 - protein, 10 aa, BK virus
IFICFKSRCY

SEQ ID NO: 15606 - protein, 10 aa, BK virus
FICFKSRCYS

SEQ ID NO: 15607 - protein, 10 aa, BK virus
ICFKSRCYSP

SEQ ID NO: 15608 - protein, 10 aa, BK virus
CFKSRCYSPV

SEQ ID NO: 15609 - protein, 10 aa, BK virus
FKSRCYSPVQ

SEQ ID NO: 15610 - protein, 10 aa, BK virus
KSRCYSPVQA

SEQ ID NO: 15611 - protein, 10 aa, BK virus
RQHPLRSSSL

SEQ ID NO: 15612 - protein, 10 aa, BK virus
QHPLRSSSLI

SEQ ID NO: 15613 - protein, 10 aa, BK virus
HPLRSSSLIS

SEQ ID NO: 15614 - protein, 10 aa, BK virus
PLRSSSLIST

SEQ ID NO: 15615 - protein, 10 aa, BK virus
LRSSSLISTS

SEQ ID NO: 15616 - protein, 10 aa, BK virus
RSSSLISTSW

SEQ ID NO: 15617 - protein, 10 aa, BK virus
SSSLISTSWG

SEQ ID NO: 15618 - protein, 10 aa, BK virus
SSLISTSWGN

SEQ ID NO: 15619 - protein, 10 aa, BK virus
SLISTSWGNS

SEQ ID NO: 15620 - protein, 10 aa, BK virus
LISTSWGNSF

SEQ ID NO: 15621 - protein, 10 aa, BK virus
ISTSWGNSFF

SEQ ID NO: 15622 - protein, 10 aa, BK virus
STSWGNSFFY

SEQ ID NO: 15623 - protein, 10 aa, BK virus
TSWGNSFFYK

SEQ ID NO: 15624 - protein, 10 aa, BK virus
SWGNSFFYKL

SEQ ID NO: 15625 - protein, 10 aa, BK virus
WGNSFFYKLS

SEQ ID NO: 15626 - protein, 10 aa, BK virus
VHSLCNFFYT

SEQ ID NO: 15627 - protein, 10 aa, BK virus
HSLCNFFYTV

SEQ ID NO: 15628 - protein, 10 aa, BK virus
SLCNFFYTVS

SEQ ID NO: 15629 - protein, 10 aa, BK virus
LCNFFYTVSI

SEQ ID NO: 15630 - protein, 10 aa, BK virus
CNFFYTVSII

SEQ ID NO: 15631 - protein, 10 aa, BK virus
NFFYTVSIIY

SEQ ID NO: 15632 - protein, 10 aa, BK virus
FFYTVSIIYT

SEQ ID NO: 15633 - protein, 10 aa, BK virus
FYTVSIIYTI

SEQ ID NO: 15634 - protein, 10 aa, BK virus
YTVSIIYTIS

SEQ ID NO: 15635 - protein, 10 aa, BK virus
TVSIIYTISM

SEQ ID NO: 15636 - protein, 10 aa, BK virus
VSIIYTISMA

SEQ ID NO: 15637 - protein, 10 aa, BK virus
SIIYTISMAK

SEQ ID NO: 15638 - protein, 10 aa, BK virus
IIYTISMAKM

SEQ ID NO: 15639 - protein, 10 aa, BK virus
IYTISMAKMY

SEQ ID NO: 15640 - protein, 10 aa, BK virus
YTISMAKMYT

SEQ ID NO: 15641 - protein, 10 aa, BK virus
TISMAKMYTG

SEQ ID NO: 15642 - protein, 10 aa, BK virus
ISMAKMYTGT

SEQ ID NO: 15643 - protein, 10 aa, BK virus
SMAKMYTGTF

SEQ ID NO: 15644 - protein, 10 aa, BK virus
MAKMYTGTFP

SEQ ID NO: 15645 - protein, 10 aa, BK virus
AKMYTGTFPF

SEQ ID NO: 15646 - protein, 10 aa, BK virus
KMYTGTFPFS

SEQ ID NO: 15647 - protein, 10 aa, BK virus
MYTGTFPFSY

SEQ ID NO: 15648 - protein, 10 aa, BK virus
YTGTFPFSYL

SEQ ID NO: 15649 - protein, 10 aa, BK virus
TGTFPFSYLS

SEQ ID NO: 15650 - protein, 10 aa, BK virus
GTFPFSYLSN

SEQ ID NO: 15651 - protein, 10 aa, BK virus
TFPFSYLSNH

SEQ ID NO: 15652 - protein, 10 aa, BK virus
GPNRGKIRII

SEQ ID NO: 15653 - protein, 10 aa, BK virus
PNRGKIRIIL

SEQ ID NO: 15654 - protein, 10 aa, BK virus
NRGKIRIILL

SEQ ID NO: 15655 - protein, 10 aa, BK virus
RGKIRIILLN

SEQ ID NO: 15656 - protein, 10 aa, BK virus
GKIRIILLNI

SEQ ID NO: 15657 - protein, 10 aa, BK virus
KIRIILLNII

SEQ ID NO: 15658 - protein, 10 aa, BK virus
IRIILLNIII

SEQ ID NO: 15659 - protein, 10 aa, BK virus
RIILLNIIIK

SEQ ID NO: 15660 - protein, 10 aa, BK virus
IILLNIIIKV

SEQ ID NO: 15661 - protein, 10 aa, BK virus
ILLNIIIKVY

SEQ ID NO: 15662 - protein, 10 aa, BK virus
LLNIIIKVYR

SEQ ID NO: 15663 - protein, 10 aa, BK virus
LNIIIKVYRG

SEQ ID NO: 15664 - protein, 10 aa, BK virus
NIIIKVYRGI

SEQ ID NO: 15665 - protein, 10 aa, BK virus
IIIKVYRGIY

SEQ ID NO: 15666 - protein, 10 aa, BK virus
IIKVYRGIYN

SEQ ID NO: 15667 - protein, 10 aa, BK virus
IKVYRGIYNC

SEQ ID NO: 15668 - protein, 10 aa, BK virus
KVYRGIYNCP

SEQ ID NO: 15669 - protein, 10 aa, BK virus
VYRGIYNCPG

SEQ ID NO: 15670 - protein, 10 aa, BK virus
YRGIYNCPGS

SEQ ID NO: 15671 - protein, 10 aa, BK virus
RGIYNCPGSF

SEQ ID NO: 15672 - protein, 10 aa, BK virus
GIYNCPGSFL

SEQ ID NO: 15673 - protein, 10 aa, BK virus
IYNCPGSFLQ

SEQ ID NO: 15674 - protein, 10 aa, BK virus
YNCPGSFLQK

SEQ ID NO: 15675 - protein, 10 aa, BK virus
NCPGSFLQKS

SEQ ID NO: 15676 - protein, 10 aa, BK virus
CPGSFLQKSS

SEQ ID NO: 15677 - protein, 10 aa, BK virus
PGSFLQKSSQ

SEQ ID NO: 15678 - protein, 10 aa, BK virus
GSFLQKSSQG

SEQ ID NO: 15679 - protein, 10 aa, BK virus
SFLQKSSQGV

SEQ ID NO: 15680 - protein, 10 aa, BK virus
FLQKSSQGVS

SEQ ID NO: 15681 - protein, 10 aa, BK virus
LQKSSQGVSK

SEQ ID NO: 15682 - protein, 10 aa, BK virus
QKSSQGVSKK

SEQ ID NO: 15683 - protein, 10 aa, BK virus
KSSQGVSKKS

SEQ ID NO: 15684 - protein, 10 aa, BK virus
SSQGVSKKSF

SEQ ID NO: 15685 - protein, 10 aa, BK virus
SQGVSKKSFC

SEQ ID NO: 15686 - protein, 10 aa, BK virus
QGVSKKSFCS

SEQ ID NO: 15687 - protein, 10 aa, BK virus
GVSKKSFCSS

SEQ ID NO: 15688 - protein, 10 aa, BK virus
VSKKSFCSSL

SEQ ID NO: 15689 - protein, 10 aa, BK virus
SKKSFCSSLQ

SEQ ID NO: 15690 - protein, 10 aa, BK virus
KKSFCSSLQF

SEQ ID NO: 15691 - protein, 10 aa, BK virus
KSFCSSLQFL

SEQ ID NO: 15692 - protein, 10 aa, BK virus
GYRRYIIPNN

SEQ ID NO: 15693 - protein, 10 aa, BK virus
YRRYIIPNNM

SEQ ID NO: 15694 - protein, 10 aa, BK virus
RRYIIPNNMP

SEQ ID NO: 15695 - protein, 10 aa, BK virus
RYIIPNNMPQ

SEQ ID NO: 15696 - protein, 10 aa, BK virus
YIIPNNMPQS

SEQ ID NO: 15697 - protein, 10 aa, BK virus
IIPNNMPQSL

SEQ ID NO: 15698 - protein, 10 aa, BK virus
IPNNMPQSLG

SEQ ID NO: 15699 - protein, 10 aa, BK virus
PNNMPQSLGN

SEQ ID NO: 15700 - protein, 10 aa, BK virus
NNMPQSLGNS

SEQ ID NO: 15701 - protein, 10 aa, BK virus
NMPQSLGNSS

SEQ ID NO: 15702 - protein, 10 aa, BK virus
MPQSLGNSSK

SEQ ID NO: 15703 - protein, 10 aa, BK virus
PQSLGNSSKQ

SEQ ID NO: 15704 - protein, 10 aa, BK virus
QSLGNSSKQR

SEQ ID NO: 15705 - protein, 10 aa, BK virus
SLGNSSKQRR

SEQ ID NO: 15706 - protein, 10 aa, BK virus
LGNSSKQRRT

SEQ ID NO: 15707 - protein, 10 aa, BK virus
GNSSKQRRTP

SEQ ID NO: 15708 - protein, 10 aa, BK virus
NSSKQRRTPM

SEQ ID NO: 15709 - protein, 10 aa, BK virus
SSKQRRTPMP

SEQ ID NO: 15710 - protein, 10 aa, BK virus
SKQRRTPMPR

SEQ ID NO: 15711 - protein, 10 aa, BK virus
KQRRTPMPRI

SEQ ID NO: 15712 - protein, 10 aa, BK virus
QRRTPMPRIK

SEQ ID NO: 15713 - protein, 10 aa, BK virus
RRTPMPRIKV

SEQ ID NO: 15714 - protein, 10 aa, BK virus
RTPMPRIKVL

SEQ ID NO: 15715 - protein, 10 aa, BK virus
TPMPRIKVLN

SEQ ID NO: 15716 - protein, 10 aa, BK virus
PMPRIKVLNI

SEQ ID NO: 15717 - protein, 10 aa, BK virus
MPRIKVLNII

SEQ ID NO: 15718 - protein, 10 aa, BK virus
PRIKVLNIIN

SEQ ID NO: 15719 - protein, 10 aa, BK virus
RIKVLNIINK

SEQ ID NO: 15720 - protein, 10 aa, BK virus
IKVLNIINKS

SEQ ID NO: 15721 - protein, 10 aa, BK virus
KVLNIINKSI

SEQ ID NO: 15722 - protein, 10 aa, BK virus
VLNIINKSIY

SEQ ID NO: 15723 - protein, 10 aa, BK virus
LNIINKSIYT

SEQ ID NO: 15724 - protein, 10 aa, BK virus
NIINKSIYTR

SEQ ID NO: 15725 - protein, 10 aa, BK virus
IINKSIYTRK

SEQ ID NO: 15726 - protein, 10 aa, BK virus
INKSIYTRKQ

SEQ ID NO: 15727 - protein, 10 aa, BK virus
NKSIYTRKQN

SEQ ID NO: 15728 - protein, 10 aa, BK virus
KSIYTRKQNI

SEQ ID NO: 15729 - protein, 10 aa, BK virus
SIYTRKQNII

SEQ ID NO: 15730 - protein, 10 aa, BK virus
IYTRKQNIIV

SEQ ID NO: 15731 - protein, 10 aa, BK virus
YTRKQNIIVL

SEQ ID NO: 15732 - protein, 10 aa, BK virus
TRKQNIIVLI

SEQ ID NO: 15733 - protein, 10 aa, BK virus
RKQNIIVLIW

SEQ ID NO: 15734 - protein, 10 aa, BK virus
KQNIIVLIWV

SEQ ID NO: 15735 - protein, 10 aa, BK virus
QNIIVLIWVK

SEQ ID NO: 15736 - protein, 10 aa, BK virus
NIIVLIWVKQ

SEQ ID NO: 15737 - protein, 10 aa, BK virus
IIVLIWVKQF

SEQ ID NO: 15738 - protein, 10 aa, BK virus
IVLIWVKQFQ

SEQ ID NO: 15739 - protein, 10 aa, BK virus
VLIWVKQFQS

SEQ ID NO: 15740 - protein, 10 aa, BK virus
LIWVKQFQSH

SEQ ID NO: 15741 - protein, 10 aa, BK virus
IWVKQFQSHA

SEQ ID NO: 15742 - protein, 10 aa, BK virus
LLIEAYSGNF

SEQ ID NO: 15743 - protein, 10 aa, BK virus
LIEAYSGNFV

SEQ ID NO: 15744 - protein, 10 aa, BK virus
IEAYSGNFVI

SEQ ID NO: 15745 - protein, 10 aa, BK virus
EAYSGNFVIP

SEQ ID NO: 15746 - protein, 10 aa, BK virus
AYSGNFVIPI

SEQ ID NO: 15747 - protein, 10 aa, BK virus
YSGNFVIPII

SEQ ID NO: 15748 - protein, 10 aa, BK virus
SGNFVIPIIK

SEQ ID NO: 15749 - protein, 10 aa, BK virus
GNFVIPIIKE

SEQ ID NO: 15750 - protein, 10 aa, BK virus
NFVIPIIKEL

SEQ ID NO: 15751 - protein, 10 aa, BK virus
FVIPIIKELI

SEQ ID NO: 15752 - protein, 10 aa, BK virus
VIPIIKELIP

SEQ ID NO: 15753 - protein, 10 aa, BK virus
IPIIKELIPY

SEQ ID NO: 15754 - protein, 10 aa, BK virus
PIIKELIPYL

SEQ ID NO: 15755 - protein, 10 aa, BK virus
IIKELIPYLS

SEQ ID NO: 15756 - protein, 10 aa, BK virus
SSKPSNSPRS

SEQ ID NO: 15757 - protein, 10 aa, BK virus
SKPSNSPRST

SEQ ID NO: 15758 - protein, 10 aa, BK virus
KPSNSPRSTS

SEQ ID NO: 15759 - protein, 10 aa, BK virus
PSNSPRSTSN

SEQ ID NO: 15760 - protein, 10 aa, BK virus
SNSPRSTSNY

SEQ ID NO: 15761 - protein, 10 aa, BK virus
NSPRSTSNYS

SEQ ID NO: 15762 - protein, 10 aa, BK virus
SPRSTSNYSI

SEQ ID NO: 15763 - protein, 10 aa, BK virus
PRSTSNYSIC

SEQ ID NO: 15764 - protein, 10 aa, BK virus
RSTSNYSICL

SEQ ID NO: 15765 - protein, 10 aa, BK virus
STSNYSICLR

SEQ ID NO: 15766 - protein, 10 aa, BK virus
TSNYSICLRS

SEQ ID NO: 15767 - protein, 10 aa, BK virus
GTCYALYSSK

SEQ ID NO: 15768 - protein, 10 aa, BK virus
TCYALYSSKG

SEQ ID NO: 15769 - protein, 10 aa, BK virus
CYALYSSKGC

SEQ ID NO: 15770 - protein, 10 aa, BK virus
YALYSSKGCN

SEQ ID NO: 15771 - protein, 10 aa, BK virus
ALYSSKGCNL

SEQ ID NO: 15772 - protein, 10 aa, BK virus
LYSSKGCNLN

SEQ ID NO: 15773 - protein, 10 aa, BK virus
YSSKGCNLNF

SEQ ID NO: 15774 - protein, 10 aa, BK virus
SSKGCNLNFY

SEQ ID NO: 15775 - protein, 10 aa, BK virus
SKGCNLNFYS

SEQ ID NO: 15776 - protein, 10 aa, BK virus
KGCNLNFYSS

SEQ ID NO: 15777 - protein, 10 aa, BK virus
GCNLNFYSSS

SEQ ID NO: 15778 - protein, 10 aa, BK virus
CNLNFYSSSS

SEQ ID NO: 15779 - protein, 10 aa, BK virus
NLNFYSSSSL

SEQ ID NO: 15780 - protein, 10 aa, BK virus
LNFYSSSSLP

SEQ ID NO: 15781 - protein, 10 aa, BK virus
NFYSSSSLPS

SEQ ID NO: 15782 - protein, 10 aa, BK virus
FYSSSSLPSS

SEQ ID NO: 15783 - protein, 10 aa, BK virus
YSSSSLPSSN

SEQ ID NO: 15784 - protein, 10 aa, BK virus
SSSSLPSSNF

SEQ ID NO: 15785 - protein, 10 aa, BK virus
SSSLPSSNFS

SEQ ID NO: 15786 - protein, 10 aa, BK virus
SSLPSSNFSH

SEQ ID NO: 15787 - protein, 10 aa, BK virus
KSCGSSSLRY

SEQ ID NO: 15788 - protein, 10 aa, BK virus
SCGSSSLRYT

SEQ ID NO: 15789 - protein, 10 aa, BK virus
CGSSSLRYTG

SEQ ID NO: 15790 - protein, 10 aa, BK virus
GSSSLRYTGN

SEQ ID NO: 15791 - protein, 10 aa, BK virus
SSTHEPGNTK

SEQ ID NO: 15792 - protein, 10 aa, BK virus
STHEPGNTKK

SEQ ID NO: 15793 - protein, 10 aa, BK virus
THEPGNTKKK

SEQ ID NO: 15794 - protein, 10 aa, BK virus
HEPGNTKKKG

SEQ ID NO: 15795 - protein, 10 aa, BK virus
EPGNTKKKGL

SEQ ID NO: 15796 - protein, 10 aa, BK virus
PGNTKKKGLL

SEQ ID NO: 15797 - protein, 10 aa, BK virus
GNTKKKGLLT

SEQ ID NO: 15798 - protein, 10 aa, BK virus
ESFTESFTAG

SEQ ID NO: 15799 - protein, 10 aa, BK virus
SFTESFTAGK

SEQ ID NO: 15800 - protein, 10 aa, BK virus
FTESFTAGKA

SEQ ID NO: 15801 - protein, 10 aa, BK virus
TESFTAGKAV

SEQ ID NO: 15802 - protein, 10 aa, BK virus
ESFTAGKAVV

SEQ ID NO: 15803 - protein, 10 aa, BK virus
SFTAGKAVVL

SEQ ID NO: 15804 - protein, 10 aa, BK virus
FTAGKAVVLL

SEQ ID NO: 15805 - protein, 10 aa, BK virus
TAGKAVVLLF

SEQ ID NO: 15806 - protein, 10 aa, BK virus
AGKAVVLLFF

SEQ ID NO: 15807 - protein, 10 aa, BK virus
GKAVVLLFFP

SEQ ID NO: 15808 - protein, 10 aa, BK virus
KAVVLLFFPS

SEQ ID NO: 15809 - protein, 10 aa, BK virus
AVVLLFFPST

SEQ ID NO: 15810 - protein, 10 aa, BK virus
VVLLFFPSTL

SEQ ID NO: 15811 - protein, 10 aa, BK virus
VLLFFPSTLS

SEQ ID NO: 15812 - protein, 10 aa, BK virus
LLFFPSTLSS

SEQ ID NO: 15813 - protein, 10 aa, BK virus
LFFPSTLSSP

SEQ ID NO: 15814 - protein, 10 aa, BK virus
FFPSTLSSPL

SEQ ID NO: 15815 - protein, 10 aa, BK virus
FPSTLSSPLQ

SEQ ID NO: 15816 - protein, 10 aa, BK virus
PSTLSSPLQN

SEQ ID NO: 15817 - protein, 10 aa, BK virus
STLSSPLQNS

SEQ ID NO: 15818 - protein, 10 aa, BK virus
TLSSPLQNSS

SEQ ID NO: 15819 - protein, 10 aa, BK virus
LSSPLQNSSK

SEQ ID NO: 15820 - protein, 10 aa, BK virus
SSPLQNSSKS

SEQ ID NO: 15821 - protein, 10 aa, BK virus
SPLQNSSKSS

SEQ ID NO: 15822 - protein, 10 aa, BK virus
PLQNSSKSSK

SEQ ID NO: 15823 - protein, 10 aa, BK virus
LQNSSKSSKI

SEQ ID NO: 15824 - protein, 10 aa, BK virus
QNSSKSSKIK

SEQ ID NO: 15825 - protein, 10 aa, BK virus
NSSKSSKIKI

SEQ ID NO: 15826 - protein, 10 aa, BK virus
SSKSSKIKIK

SEQ ID NO: 15827 - protein, 10 aa, BK virus
SKSSKIKIKI

SEQ ID NO: 15828 - protein, 10 aa, BK virus
KSSKIKIKIL

SEQ ID NO: 15829 - protein, 10 aa, BK virus
ALFFVPVQVL

SEQ ID NO: 15830 - protein, 10 aa, BK virus
LFFVPVQVLP

SEQ ID NO: 15831 - protein, 10 aa, BK virus
FFVPVQVLPT

SEQ ID NO: 15832 - protein, 10 aa, BK virus
FVPVQVLPTF

SEQ ID NO: 15833 - protein, 10 aa, BK virus
VPVQVLPTFT

SEQ ID NO: 15834 - protein, 10 aa, BK virus
PVQVLPTFTE

SEQ ID NO: 15835 - protein, 10 aa, BK virus
VQVLPTFTEA

SEQ ID NO: 15836 - protein, 10 aa, BK virus
QVLPTFTEAC

SEQ ID NO: 15837 - protein, 10 aa, BK virus
VLPTFTEACR

SEQ ID NO: 15838 - protein, 10 aa, BK virus
LPTFTEACRD

SEQ ID NO: 15839 - protein, 10 aa, BK virus
PTFTEACRDS

SEQ ID NO: 15840 - protein, 10 aa, BK virus
TFTEACRDSW

SEQ ID NO: 15841 - protein, 10 aa, BK virus
FTEACRDSWR

SEQ ID NO: 15842 - protein, 10 aa, BK virus
TEACRDSWRR

SEQ ID NO: 15843 - protein, 10 aa, BK virus
EACRDSWRRT

SEQ ID NO: 15844 - protein, 10 aa, BK virus
ACRDSWRRTM

SEQ ID NO: 15845 - protein, 10 aa, BK virus
CRDSWRRTMA

SEQ ID NO: 15846 - protein, 10 aa, BK virus
RDSWRRTMAF

SEQ ID NO: 15847 - protein, 10 aa, BK virus
DSWRRTMAFV

SEQ ID NO: 15848 - protein, 10 aa, BK virus
SWRRTMAFVQ

SEQ ID NO: 15849 - protein, 10 aa, BK virus
WRRTMAFVQF

SEQ ID NO: 15850 - protein, 10 aa, BK virus
RRTMAFVQFN

SEQ ID NO: 15851 - protein, 10 aa, BK virus
RTMAFVQFNW

SEQ ID NO: 15852 - protein, 10 aa, BK virus
TMAFVQFNWG

SEQ ID NO: 15853 - protein, 10 aa, BK virus
MAFVQFNWGQ

SEQ ID NO: 15854 - protein, 10 aa, BK virus
AFVQFNWGQG

SEQ ID NO: 15855 - protein, 10 aa, BK virus
FVQFNWGQGQ

SEQ ID NO: 15856 - protein, 10 aa, BK virus
VQFNWGQGQD

SEQ ID NO: 15857 - protein, 10 aa, BK virus
QFNWGQGQDS

SEQ ID NO: 15858 - protein, 10 aa, BK virus
ARKTCLSCTF

SEQ ID NO: 15859 - protein, 10 aa, BK virus
RKTCLSCTFL

SEQ ID NO: 15860 - protein, 10 aa, BK virus
KTCLSCTFLP

SEQ ID NO: 15861 - protein, 10 aa, BK virus
TCLSCTFLPE

SEQ ID NO: 15862 - protein, 10 aa, BK virus
CLSCTFLPEV

SEQ ID NO: 15863 - protein, 10 aa, BK virus
LSCTFLPEVM

SEQ ID NO: 15864 - protein, 10 aa, BK virus
SCTFLPEVMV

SEQ ID NO: 15865 - protein, 10 aa, BK virus
CTFLPEVMVW

SEQ ID NO: 15866 - protein, 10 aa, BK virus
TFLPEVMVWL

SEQ ID NO: 15867 - protein, 10 aa, BK virus
FLPEVMVWLH

SEQ ID NO: 15868 - protein, 10 aa, BK virus
LPEVMVWLHS

SEQ ID NO: 15869 - protein, 10 aa, BK virus
PEVMVWLHSM

SEQ ID NO: 15870 - protein, 10 aa, BK virus
EVMVWLHSMG

SEQ ID NO: 15871 - protein, 10 aa, BK virus
VMVWLHSMGK

SEQ ID NO: 15872 - protein, 10 aa, BK virus
MVWLHSMGKQ

SEQ ID NO: 15873 - protein, 10 aa, BK virus
VWLHSMGKQL

SEQ ID NO: 15874 - protein, 10 aa, BK virus
WLHSMGKQLL

SEQ ID NO: 15875 - protein, 10 aa, BK virus
LHSMGKQLLP

SEQ ID NO: 15876 - protein, 10 aa, BK virus
HSMGKQLLPV

SEQ ID NO: 15877 - protein, 10 aa, BK virus
SMGKQLLPVS

SEQ ID NO: 15878 - protein, 10 aa, BK virus
MGKQLLPVSH

SEQ ID NO: 15879 - protein, 10 aa, BK virus
GKQLLPVSHA

SEQ ID NO: 15880 - protein, 10 aa, BK virus
KQLLPVSHAL

SEQ ID NO: 15881 - protein, 10 aa, BK virus
QLLPVSHALS

SEQ ID NO: 15882 - protein, 10 aa, BK virus
LLPVSHALSF

SEQ ID NO: 15883 - protein, 10 aa, BK virus
LPVSHALSFL

SEQ ID NO: 15884 - protein, 10 aa, BK virus
PVSHALSFLR

SEQ ID NO: 15885 - protein, 10 aa, BK virus
VSHALSFLRS

SEQ ID NO: 15886 - protein, 10 aa, BK virus
SHALSFLRSW

SEQ ID NO: 15887 - protein, 10 aa, BK virus
HALSFLRSWF

SEQ ID NO: 15888 - protein, 10 aa, BK virus
ALSFLRSWFG

SEQ ID NO: 15889 - protein, 10 aa, BK virus
LSFLRSWFGC

SEQ ID NO: 15890 - protein, 10 aa, BK virus
SFLRSWFGCI

SEQ ID NO: 15891 - protein, 10 aa, BK virus
FLRSWFGCIP

SEQ ID NO: 15892 - protein, 10 aa, BK virus
LRSWFGCIPL

SEQ ID NO: 15893 - protein, 10 aa, BK virus
AAPPCGLFFY

SEQ ID NO: 15894 - protein, 10 aa, BK virus
APPCGLFFYN

SEQ ID NO: 15895 - protein, 10 aa, BK virus
PPCGLFFYNI

SEQ ID NO: 15896 - protein, 10 aa, BK virus
EAEAASASTL

SEQ ID NO: 15897 - protein, 10 aa, BK virus
AEAASASTLS

SEQ ID NO: 15898 - protein, 10 aa, BK virus
EAASASTLSL

SEQ ID NO: 15899 - protein, 10 aa, BK virus
AASASTLSLK

SEQ ID NO: 15900 - protein, 10 aa, BK virus
GLAKLFGEIP

SEQ ID NO: 15901 - protein, 10 aa, BK virus
LAKLFGEIPI

SEQ ID NO: 15902 - protein, 10 aa, BK virus
AKLFGEIPIL

SEQ ID NO: 15903 - protein, 10 aa, BK virus
KLFGEIPILL

SEQ ID NO: 15904 - protein, 10 aa, BK virus
LFGEIPILLQ

SEQ ID NO: 15905 - protein, 10 aa, BK virus
FGEIPILLQF

SEQ ID NO: 15906 - protein, 10 aa, BK virus
GEIPILLQFL

SEQ ID NO: 15907 - protein, 10 aa, BK virus
EIPILLQFLQ

SEQ ID NO: 15908 - protein, 11 aa, BK virus
MDKVLNREESM

SEQ ID NO: 15909 - protein, 11 aa, BK virus
DKVLNREESME

SEQ ID NO: 15910 - protein, 11 aa, BK virus
KVLNREESMEL

SEQ ID NO: 15911 - protein, 11 aa, BK virus
VLNREESMELM

SEQ ID NO: 15912 - protein, 11 aa, BK virus
LNREESMELMD

SEQ ID NO: 15913 - protein, 11 aa, BK virus
NREESMELMDL

SEQ ID NO: 15914 - protein, 11 aa, BK virus
REESMELMDLL

SEQ ID NO: 15915 - protein, 11 aa, BK virus
EESMELMDLLG

SEQ ID NO: 15916 - protein, 11 aa, BK virus
ESMELMDLLGL

SEQ ID NO: 15917 - protein, 11 aa, BK virus
SMELMDLLGLE

SEQ ID NO: 15918 - protein, 11 aa, BK virus
MELMDLLGLER

SEQ ID NO: 15919 - protein, 11 aa, BK virus
ELMDLLGLERA

SEQ ID NO: 15920 - protein, 11 aa, BK virus
LMDLLGLERAA

SEQ ID NO: 15921 - protein, 11 aa, BK virus
MDLLGLERAAW

SEQ ID NO: 15922 - protein, 11 aa, BK virus
DLLGLERAAWG

SEQ ID NO: 15923 - protein, 11 aa, BK virus
LLGLERAAWGN

SEQ ID NO: 15924 - protein, 11 aa, BK virus
LGLERAAWGNL

SEQ ID NO: 15925 - protein, 11 aa, BK virus
GLERAAWGNLP

SEQ ID NO: 15926 - protein, 11 aa, BK virus
LERAAWGNLPL

SEQ ID NO: 15927 - protein, 11 aa, BK virus
ERAAWGNLPLM

SEQ ID NO: 15928 - protein, 11 aa, BK virus
RAAWGNLPLMR

SEQ ID NO: 15929 - protein, 11 aa, BK virus
AAWGNLPLMRK

SEQ ID NO: 15930 - protein, 11 aa, BK virus
AWGNLPLMRKA

SEQ ID NO: 15931 - protein, 11 aa, BK virus
WGNLPLMRKAY

SEQ ID NO: 15932 - protein, 11 aa, BK virus
GNLPLMRKAYL

SEQ ID NO: 15933 - protein, 11 aa, BK virus
NLPLMRKAYLR

SEQ ID NO: 15934 - protein, 11 aa, BK virus
LPLMRKAYLRK

SEQ ID NO: 15935 - protein, 11 aa, BK virus
PLMRKAYLRKC

SEQ ID NO: 15936 - protein, 11 aa, BK virus
LMRKAYLRKCK

SEQ ID NO: 15937 - protein, 11 aa, BK virus
MRKAYLRKCKE

SEQ ID NO: 15938 - protein, 11 aa, BK virus
RKAYLRKCKEF

SEQ ID NO: 15939 - protein, 11 aa, BK virus
KAYLRKCKEFH

SEQ ID NO: 15940 - protein, 11 aa, BK virus
AYLRKCKEFHP

SEQ ID NO: 15941 - protein, 11 aa, BK virus
YLRKCKEFHPD

SEQ ID NO: 15942 - protein, 11 aa, BK virus
LRKCKEFHPDK

SEQ ID NO: 15943 - protein, 11 aa, BK virus
RKCKEFHPDKG

SEQ ID NO: 15944 - protein, 11 aa, BK virus
KCKEFHPDKGG

SEQ ID NO: 15945 - protein, 11 aa, BK virus
CKEFHPDKGGD

SEQ ID NO: 15946 - protein, 11 aa, BK virus
KEFHPDKGGDE

SEQ ID NO: 15947 - protein, 11 aa, BK virus
EFHPDKGGDED

SEQ ID NO: 15948 - protein, 11 aa, BK virus
FHPDKGGDEDK

SEQ ID NO: 15949 - protein, 11 aa, BK virus
HPDKGGDEDKM

SEQ ID NO: 15950 - protein, 11 aa, BK virus
PDKGGDEDKMK

SEQ ID NO: 15951 - protein, 11 aa, BK virus
DKGGDEDKMKR

SEQ ID NO: 15952 - protein, 11 aa, BK virus
KGGDEDKMKRM

SEQ ID NO: 15953 - protein, 11 aa, BK virus
GGDEDKMKRMN

SEQ ID NO: 15954 - protein, 11 aa, BK virus
GDEDKMKRMNT

SEQ ID NO: 15955 - protein, 11 aa, BK virus
DEDKMKRMNTL

SEQ ID NO: 15956 - protein, 11 aa, BK virus
EDKMKRMNTLY

SEQ ID NO: 15957 - protein, 11 aa, BK virus
DKMKRMNTLYK

SEQ ID NO: 15958 - protein, 11 aa, BK virus
KMKRMNTLYKK

SEQ ID NO: 15959 - protein, 11 aa, BK virus
MKRMNTLYKKM

SEQ ID NO: 15960 - protein, 11 aa, BK virus
KRMNTLYKKME

SEQ ID NO: 15961 - protein, 11 aa, BK virus
RMNTLYKKMEQ

SEQ ID NO: 15962 - protein, 11 aa, BK virus
MNTLYKKMEQD

SEQ ID NO: 15963 - protein, 11 aa, BK virus
NTLYKKMEQDV

SEQ ID NO: 15964 - protein, 11 aa, BK virus
TLYKKMEQDVK

SEQ ID NO: 15965 - protein, 11 aa, BK virus
LYKKMEQDVKV

SEQ ID NO: 15966 - protein, 11 aa, BK virus
YKKMEQDVKVA

SEQ ID NO: 15967 - protein, 11 aa, BK virus
KKMEQDVKVAH

SEQ ID NO: 15968 - protein, 11 aa, BK virus
KMEQDVKVAHQ

SEQ ID NO: 15969 - protein, 11 aa, BK virus
MEQDVKVAHQP

SEQ ID NO: 15970 - protein, 11 aa, BK virus
EQDVKVAHQPD

SEQ ID NO: 15971 - protein, 11 aa, BK virus
QDVKVAHQPDF

SEQ ID NO: 15972 - protein, 11 aa, BK virus
DVKVAHQPDFG

SEQ ID NO: 15973 - protein, 11 aa, BK virus
VKVAHQPDFGT

SEQ ID NO: 15974 - protein, 11 aa, BK virus
KVAHQPDFGTW

SEQ ID NO: 15975 - protein, 11 aa, BK virus
VAHQPDFGTWS

SEQ ID NO: 15976 - protein, 11 aa, BK virus
AHQPDFGTWSS

SEQ ID NO: 15977 - protein, 11 aa, BK virus
HQPDFGTWSSS

SEQ ID NO: 15978 - protein, 11 aa, BK virus
QPDFGTWSSSE

SEQ ID NO: 15979 - protein, 11 aa, BK virus
PDFGTWSSSEV

SEQ ID NO: 15980 - protein, 11 aa, BK virus
DFGTWSSSEVC

SEQ ID NO: 15981 - protein, 11 aa, BK virus
FGTWSSSEVCA

SEQ ID NO: 15982 - protein, 11 aa, BK virus
GTWSSSEVCAD

SEQ ID NO: 15983 - protein, 11 aa, BK virus
TWSSSEVCADF

SEQ ID NO: 15984 - protein, 11 aa, BK virus
WSSSEVCADFP

SEQ ID NO: 15985 - protein, 11 aa, BK virus
SSSEVCADFPL

SEQ ID NO: 15986 - protein, 11 aa, BK virus
SSEVCADFPLC

SEQ ID NO: 15987 - protein, 11 aa, BK virus
SEVCADFPLCP

SEQ ID NO: 15988 - protein, 11 aa, BK virus
EVCADFPLCPD

SEQ ID NO: 15989 - protein, 11 aa, BK virus
VCADFPLCPDT

SEQ ID NO: 15990 - protein, 11 aa, BK virus
CADFPLCPDTL

SEQ ID NO: 15991 - protein, 11 aa, BK virus
ADFPLCPDTLY

SEQ ID NO: 15992 - protein, 11 aa, BK virus
DFPLCPDTLYC

SEQ ID NO: 15993 - protein, 11 aa, BK virus
FPLCPDTLYCK

SEQ ID NO: 15994 - protein, 11 aa, BK virus
PLCPDTLYCKE

SEQ ID NO: 15995 - protein, 11 aa, BK virus
LCPDTLYCKEW

SEQ ID NO: 15996 - protein, 11 aa, BK virus
CPDTLYCKEWP

SEQ ID NO: 15997 - protein, 11 aa, BK virus
PDTLYCKEWPI

SEQ ID NO: 15998 - protein, 11 aa, BK virus
DTLYCKEWPIC

SEQ ID NO: 15999 - protein, 11 aa, BK virus
TLYCKEWPICS

SEQ ID NO: 16000 - protein, 11 aa, BK virus
LYCKEWPICSK

SEQ ID NO: 16001 - protein, 11 aa, BK virus
YCKEWPICSKK

SEQ ID NO: 16002 - protein, 11 aa, BK virus
CKEWPICSKKP

SEQ ID NO: 16003 - protein, 11 aa, BK virus
KEWPICSKKPS

SEQ ID NO: 16004 - protein, 11 aa, BK virus
EWPICSKKPSV

SEQ ID NO: 16005 - protein, 11 aa, BK virus
WPICSKKPSVH

SEQ ID NO: 16006 - protein, 11 aa, BK virus
PICSKKPSVHC

SEQ ID NO: 16007 - protein, 11 aa, BK virus
ICSKKPSVHCP

SEQ ID NO: 16008 - protein, 11 aa, BK virus
CSKKPSVHCPC

SEQ ID NO: 16009 - protein, 11 aa, BK virus
SKKPSVHCPCM

SEQ ID NO: 16010 - protein, 11 aa, BK virus
KKPSVHCPCML

SEQ ID NO: 16011 - protein, 11 aa, BK virus
KPSVHCPCMLC

SEQ ID NO: 16012 - protein, 11 aa, BK virus
PSVHCPCMLCQ

SEQ ID NO: 16013 - protein, 11 aa, BK virus
SVHCPCMLCQL

SEQ ID NO: 16014 - protein, 11 aa, BK virus
VHCPCMLCQLR

SEQ ID NO: 16015 - protein, 11 aa, BK virus
HCPCMLCQLRL

SEQ ID NO: 16016 - protein, 11 aa, BK virus
CPCMLCQLRLR

SEQ ID NO: 16017 - protein, 11 aa, BK virus
PCMLCQLRLRH

SEQ ID NO: 16018 - protein, 11 aa, BK virus
CMLCQLRLRHL

SEQ ID NO: 16019 - protein, 11 aa, BK virus
MLCQLRLRHLN

SEQ ID NO: 16020 - protein, 11 aa, BK virus
LCQLRLRHLNR

SEQ ID NO: 16021 - protein, 11 aa, BK virus
CQLRLRHLNRK

SEQ ID NO: 16022 - protein, 11 aa, BK virus
QLRLRHLNRKF

SEQ ID NO: 16023 - protein, 11 aa, BK virus
LRLRHLNRKFL

SEQ ID NO: 16024 - protein, 11 aa, BK virus
RLRHLNRKFLR

SEQ ID NO: 16025 - protein, 11 aa, BK virus
LRHLNRKFLRK

SEQ ID NO: 16026 - protein, 11 aa, BK virus
RHLNRKFLRKE

SEQ ID NO: 16027 - protein, 11 aa, BK virus
HLNRKFLRKEP

SEQ ID NO: 16028 - protein, 11 aa, BK virus
LNRKFLRKEPL

SEQ ID NO: 16029 - protein, 11 aa, BK virus
NRKFLRKEPLV

SEQ ID NO: 16030 - protein, 11 aa, BK virus
RKFLRKEPLVW

SEQ ID NO: 16031 - protein, 11 aa, BK virus
KFLRKEPLVWI

SEQ ID NO: 16032 - protein, 11 aa, BK virus
FLRKEPLVWID

SEQ ID NO: 16033 - protein, 11 aa, BK virus
LRKEPLVWIDC

SEQ ID NO: 16034 - protein, 11 aa, BK virus
RKEPLVWIDCY

SEQ ID NO: 16035 - protein, 11 aa, BK virus
KEPLVWIDCYC

SEQ ID NO: 16036 - protein, 11 aa, BK virus
EPLVWIDCYCI

SEQ ID NO: 16037 - protein, 11 aa, BK virus
PLVWIDCYCID

SEQ ID NO: 16038 - protein, 11 aa, BK virus
LVWIDCYCIDC

SEQ ID NO: 16039 - protein, 11 aa, BK virus
VWIDCYCIDCF

SEQ ID NO: 16040 - protein, 11 aa, BK virus
WIDCYCIDCFT

SEQ ID NO: 16041 - protein, 11 aa, BK virus
IDCYCIDCFTQ

SEQ ID NO: 16042 - protein, 11 aa, BK virus
DCYCIDCFTQW

SEQ ID NO: 16043 - protein, 11 aa, BK virus
CYCIDCFTQWF

SEQ ID NO: 16044 - protein, 11 aa, BK virus
YCIDCFTQWFG

SEQ ID NO: 16045 - protein, 11 aa, BK virus
CIDCFTQWFGL

SEQ ID NO: 16046 - protein, 11 aa, BK virus
IDCFTQWFGLD

SEQ ID NO: 16047 - protein, 11 aa, BK virus
DCFTQWFGLDL

SEQ ID NO: 16048 - protein, 11 aa, BK virus
CFTQWFGLDLT

SEQ ID NO: 16049 - protein, 11 aa, BK virus
FTQWFGLDLTE

SEQ ID NO: 16050 - protein, 11 aa, BK virus
TQWFGLDLTEE

SEQ ID NO: 16051 - protein, 11 aa, BK virus
QWFGLDLTEET

SEQ ID NO: 16052 - protein, 11 aa, BK virus
WFGLDLTEETL

SEQ ID NO: 16053 - protein, 11 aa, BK virus
FGLDLTEETLQ

SEQ ID NO: 16054 - protein, 11 aa, BK virus
GLDLTEETLQW

SEQ ID NO: 16055 - protein, 11 aa, BK virus
LDLTEETLQWW

SEQ ID NO: 16056 - protein, 11 aa, BK virus
DLTEETLQWWV

SEQ ID NO: 16057 - protein, 11 aa, BK virus
LTEETLQWWVQ

SEQ ID NO: 16058 - protein, 11 aa, BK virus
TEETLQWWVQI

SEQ ID NO: 16059 - protein, 11 aa, BK virus
EETLQWWVQII

SEQ ID NO: 16060 - protein, 11 aa, BK virus
ETLQWWVQIIG

SEQ ID NO: 16061 - protein, 11 aa, BK virus
TLQWWVQIIGE

SEQ ID NO: 16062 - protein, 11 aa, BK virus
LQWWVQIIGET

SEQ ID NO: 16063 - protein, 11 aa, BK virus
QWWVQIIGETP

SEQ ID NO: 16064 - protein, 11 aa, BK virus
WWVQIIGETPF

SEQ ID NO: 16065 - protein, 11 aa, BK virus
WVQIIGETPFR

SEQ ID NO: 16066 - protein, 11 aa, BK virus
VQIIGETPFRD

SEQ ID NO: 16067 - protein, 11 aa, BK virus
QIIGETPFRDL

SEQ ID NO: 16068 - protein, 11 aa, BK virus
IIGETPFRDLK

SEQ ID NO: 16069 - protein, 11 aa, BK virus
IGETPFRDLKL

SEQ ID NO: 16070 - protein, 11 aa, BK virus
KALSNYFFYRC

SEQ ID NO: 16071 - protein, 11 aa, BK virus
ALSNYFFYRCQ

SEQ ID NO: 16072 - protein, 11 aa, BK virus
LSNYFFYRCQP

SEQ ID NO: 16073 - protein, 11 aa, BK virus
SNYFFYRCQPM

SEQ ID NO: 16074 - protein, 11 aa, BK virus
NYFFYRCQPME

SEQ ID NO: 16075 - protein, 11 aa, BK virus
YFFYRCQPMEQ

SEQ ID NO: 16076 - protein, 11 aa, BK virus
FFYRCQPMEQK

SEQ ID NO: 16077 - protein, 11 aa, BK virus
FYRCQPMEQKS

SEQ ID NO: 16078 - protein, 11 aa, BK virus
YRCQPMEQKSG

SEQ ID NO: 16079 - protein, 11 aa, BK virus
RCQPMEQKSGS

SEQ ID NO: 16080 - protein, 11 aa, BK virus
CQPMEQKSGSP

SEQ ID NO: 16081 - protein, 11 aa, BK virus
QPMEQKSGSPG

SEQ ID NO: 16082 - protein, 11 aa, BK virus
PMEQKSGSPGG

SEQ ID NO: 16083 - protein, 11 aa, BK virus
MEQKSGSPGGV

SEQ ID NO: 16084 - protein, 11 aa, BK virus
EQKSGSPGGVP

SEQ ID NO: 16085 - protein, 11 aa, BK virus
QKSGSPGGVPL

SEQ ID NO: 16086 - protein, 11 aa, BK virus
KSGSPGGVPLM

SEQ ID NO: 16087 - protein, 11 aa, BK virus
SGSPGGVPLMK

SEQ ID NO: 16088 - protein, 11 aa, BK virus
GSPGGVPLMKN

SEQ ID NO: 16089 - protein, 11 aa, BK virus
SPGGVPLMKNG

SEQ ID NO: 16090 - protein, 11 aa, BK virus
PGGVPLMKNGM

SEQ ID NO: 16091 - protein, 11 aa, BK virus
GGVPLMKNGMK

SEQ ID NO: 16092 - protein, 11 aa, BK virus
GVPLMKNGMKI

SEQ ID NO: 16093 - protein, 11 aa, BK virus
VPLMKNGMKIY

SEQ ID NO: 16094 - protein, 11 aa, BK virus
PLMKNGMKIYF

SEQ ID NO: 16095 - protein, 11 aa, BK virus
LMKNGMKIYFA

SEQ ID NO: 16096 - protein, 11 aa, BK virus
MKNGMKIYFAM

SEQ ID NO: 16097 - protein, 11 aa, BK virus
KNGMKIYFAMK

SEQ ID NO: 16098 - protein, 11 aa, BK virus
NGMKIYFAMKI

SEQ ID NO: 16099 - protein, 11 aa, BK virus
GMKIYFAMKIC

SEQ ID NO: 16100 - protein, 11 aa, BK virus
MKIYFAMKICL

SEQ ID NO: 16101 - protein, 11 aa, BK virus
KIYFAMKICLP

SEQ ID NO: 16102 - protein, 11 aa, BK virus
IYFAMKICLPV

SEQ ID NO: 16103 - protein, 11 aa, BK virus
YFAMKICLPVM

SEQ ID NO: 16104 - protein, 11 aa, BK virus
FAMKICLPVMK

SEQ ID NO: 16105 - protein, 11 aa, BK virus
AMKICLPVMKK

SEQ ID NO: 16106 - protein, 11 aa, BK virus
MKICLPVMKKQ

SEQ ID NO: 16107 - protein, 11 aa, BK virus
KICLPVMKKQQ

SEQ ID NO: 16108 - protein, 11 aa, BK virus
ICLPVMKKQQQ

SEQ ID NO: 16109 - protein, 11 aa, BK virus
CLPVMKKQQQI

SEQ ID NO: 16110 - protein, 11 aa, BK virus
LPVMKKQQQIL

SEQ ID NO: 16111 - protein, 11 aa, BK virus
PVMKKQQQILN

SEQ ID NO: 16112 - protein, 11 aa, BK virus
VMKKQQQILNT

SEQ ID NO: 16113 - protein, 11 aa, BK virus
MKKQQQILNTQ

SEQ ID NO: 16114 - protein, 11 aa, BK virus
KKQQQILNTQH

SEQ ID NO: 16115 - protein, 11 aa, BK virus
KQQQILNTQHH

SEQ ID NO: 16116 - protein, 11 aa, BK virus
QQQILNTQHHP

SEQ ID NO: 16117 - protein, 11 aa, BK virus
QQILNTQHHPK

SEQ ID NO: 16118 - protein, 11 aa, BK virus
QILNTQHHPKK

SEQ ID NO: 16119 - protein, 11 aa, BK virus
ILNTQHHPKKK

SEQ ID NO: 16120 - protein, 11 aa, BK virus
LNTQHHPKKKE

SEQ ID NO: 16121 - protein, 11 aa, BK virus
NTQHHPKKKER

SEQ ID NO: 16122 - protein, 11 aa, BK virus
KTLKTFPLIYT

SEQ ID NO: 16123 - protein, 11 aa, BK virus
TLKTFPLIYTS

SEQ ID NO: 16124 - protein, 11 aa, BK virus
LKTFPLIYTSF

SEQ ID NO: 16125 - protein, 11 aa, BK virus
KTFPLIYTSFL

SEQ ID NO: 16126 - protein, 11 aa, BK virus
TFPLIYTSFLV

SEQ ID NO: 16127 - protein, 11 aa, BK virus
FPLIYTSFLVK

SEQ ID NO: 16128 - protein, 11 aa, BK virus
PLIYTSFLVKL

SEQ ID NO: 16129 - protein, 11 aa, BK virus
LIYTSFLVKLY

SEQ ID NO: 16130 - protein, 11 aa, BK virus
IYTSFLVKLYL

SEQ ID NO: 16131 - protein, 11 aa, BK virus
YTSFLVKLYLV

SEQ ID NO: 16132 - protein, 11 aa, BK virus
TSFLVKLYLVI

SEQ ID NO: 16133 - protein, 11 aa, BK virus
SFLVKLYLVIE

SEQ ID NO: 16134 - protein, 11 aa, BK virus
FLVKLYLVIEP

SEQ ID NO: 16135 - protein, 11 aa, BK virus
LVKLYLVIEPL

SEQ ID NO: 16136 - protein, 11 aa, BK virus
VKLYLVIEPLP

SEQ ID NO: 16137 - protein, 11 aa, BK virus
KLYLVIEPLPA

SEQ ID NO: 16138 - protein, 11 aa, BK virus
LYLVIEPLPAL

SEQ ID NO: 16139 - protein, 11 aa, BK virus
YLVIEPLPALL

SEQ ID NO: 16140 - protein, 11 aa, BK virus
LVIEPLPALLC

SEQ ID NO: 16141 - protein, 11 aa, BK virus
VIEPLPALLCI

SEQ ID NO: 16142 - protein, 11 aa, BK virus
IEPLPALLCIL

SEQ ID NO: 16143 - protein, 11 aa, BK virus
EPLPALLCILL

SEQ ID NO: 16144 - protein, 11 aa, BK virus
PLPALLCILLK

SEQ ID NO: 16145 - protein, 11 aa, BK virus
LPALLCILLKK

SEQ ID NO: 16146 - protein, 11 aa, BK virus
PALLCILLKKK

SEQ ID NO: 16147 - protein, 11 aa, BK virus
ALLCILLKKKL

SEQ ID NO: 16148 - protein, 11 aa, BK virus
LLCILLKKKLK

SEQ ID NO: 16149 - protein, 11 aa, BK virus
LCILLKKKLKF

SEQ ID NO: 16150 - protein, 11 aa, BK virus
CILLKKKLKFC

SEQ ID NO: 16151 - protein, 11 aa, BK virus
ILLKKKLKFCI

SEQ ID NO: 16152 - protein, 11 aa, BK virus
LLKKKLKFCIK

SEQ ID NO: 16153 - protein, 11 aa, BK virus
LKKKLKFCIKN

SEQ ID NO: 16154 - protein, 11 aa, BK virus
KKKLKFCIKNL

SEQ ID NO: 16155 - protein, 11 aa, BK virus
KKLKFCIKNLW

SEQ ID NO: 16156 - protein, 11 aa, BK virus
KLKFCIKNLWK

SEQ ID NO: 16157 - protein, 11 aa, BK virus
LKFCIKNLWKN

SEQ ID NO: 16158 - protein, 11 aa, BK virus
KFCIKNLWKNI

SEQ ID NO: 16159 - protein, 11 aa, BK virus
FCIKNLWKNIL

SEQ ID NO: 16160 - protein, 11 aa, BK virus
LLLVDTCVLGI

SEQ ID NO: 16161 - protein, 11 aa, BK virus
LLVDTCVLGII

SEQ ID NO: 16162 - protein, 11 aa, BK virus
LVDTCVLGIIL

SEQ ID NO: 16163 - protein, 11 aa, BK virus
VDTCVLGIILY

SEQ ID NO: 16164 - protein, 11 aa, BK virus
DTCVLGIILYS

SEQ ID NO: 16165 - protein, 11 aa, BK virus
TCVLGIILYSF

SEQ ID NO: 16166 - protein, 11 aa, BK virus
LHIDIEFLQLI

SEQ ID NO: 16167 - protein, 11 aa, BK virus
HIDIEFLQLII

SEQ ID NO: 16168 - protein, 11 aa, BK virus
IDIEFLQLIIS

SEQ ID NO: 16169 - protein, 11 aa, BK virus
DIEFLQLIISV

SEQ ID NO: 16170 - protein, 11 aa, BK virus
IEFLQLIISVK

SEQ ID NO: 16171 - protein, 11 aa, BK virus
EFLQLIISVKS

SEQ ID NO: 16172 - protein, 11 aa, BK virus
FLQLIISVKSC

SEQ ID NO: 16173 - protein, 11 aa, BK virus
LQLIISVKSCV

SEQ ID NO: 16174 - protein, 11 aa, BK virus
QLIISVKSCVP

SEQ ID NO: 16175 - protein, 11 aa, BK virus
LIISVKSCVPL

SEQ ID NO: 16176 - protein, 11 aa, BK virus
IISVKSCVPLV

SEQ ID NO: 16177 - protein, 11 aa, BK virus
ISVKSCVPLVF

SEQ ID NO: 16178 - protein, 11 aa, BK virus
FVRVLIRNTYY

SEQ ID NO: 16179 - protein, 11 aa, BK virus
VRVLIRNTYYI

SEQ ID NO: 16180 - protein, 11 aa, BK virus
RVLIRNTYYIV

SEQ ID NO: 16181 - protein, 11 aa, BK virus
VLIRNTYYIVP

SEQ ID NO: 16182 - protein, 11 aa, BK virus
RSMILAQKSLK

SEQ ID NO: 16183 - protein, 11 aa, BK virus
SMILAQKSLKK

SEQ ID NO: 16184 - protein, 11 aa, BK virus
MILAQKSLKKQ

SEQ ID NO: 16185 - protein, 11 aa, BK virus
ILAQKSLKKQS

SEQ ID NO: 16186 - protein, 11 aa, BK virus
LAQKSLKKQSR

SEQ ID NO: 16187 - protein, 11 aa, BK virus
AQKSLKKQSRC

SEQ ID NO: 16188 - protein, 11 aa, BK virus
QKSLKKQSRCL

SEQ ID NO: 16189 - protein, 11 aa, BK virus
KSLKKQSRCLG

SEQ ID NO: 16190 - protein, 11 aa, BK virus
SLKKQSRCLGN

SEQ ID NO: 16191 - protein, 11 aa, BK virus
RSVKSVRKKTS

SEQ ID NO: 16192 - protein, 11 aa, BK virus
SVKSVRKKTSL

SEQ ID NO: 16193 - protein, 11 aa, BK virus
VKSVRKKTSLI

SEQ ID NO: 16194 - protein, 11 aa, BK virus
KSVRKKTSLIT

SEQ ID NO: 16195 - protein, 11 aa, BK virus
SVRKKTSLITL

SEQ ID NO: 16196 - protein, 11 aa, BK virus
VRKKTSLITLS

SEQ ID NO: 16197 - protein, 11 aa, BK virus
RKKTSLITLSI

SEQ ID NO: 16198 - protein, 11 aa, BK virus
KKTSLITLSIM

SEQ ID NO: 16199 - protein, 11 aa, BK virus
KTSLITLSIMK

SEQ ID NO: 16200 - protein, 11 aa, BK virus
TSLITLSIMKS

SEQ ID NO: 16201 - protein, 11 aa, BK virus
SLITLSIMKST

SEQ ID NO: 16202 - protein, 11 aa, BK virus
LITLSIMKSTL

SEQ ID NO: 16203 - protein, 11 aa, BK virus
ITLSIMKSTLQ

SEQ ID NO: 16204 - protein, 11 aa, BK virus
TLSIMKSTLQM

SEQ ID NO: 16205 - protein, 11 aa, BK virus
LSIMKSTLQML

SEQ ID NO: 16206 - protein, 11 aa, BK virus
SIMKSTLQMLL

SEQ ID NO: 16207 - protein, 11 aa, BK virus
IMKSTLQMLLF

SEQ ID NO: 16208 - protein, 11 aa, BK virus
MKSTLQMLLFL

SEQ ID NO: 16209 - protein, 11 aa, BK virus
KSTLQMLLFLQ

SEQ ID NO: 16210 - protein, 11 aa, BK virus
STLQMLLFLQK

SEQ ID NO: 16211 - protein, 11 aa, BK virus
TLQMLLFLQKV

SEQ ID NO: 16212 - protein, 11 aa, BK virus
LQMLLFLQKVK

SEQ ID NO: 16213 - protein, 11 aa, BK virus
QMLLFLQKVKI

SEQ ID NO: 16214 - protein, 11 aa, BK virus
MLLFLQKVKIK

SEQ ID NO: 16215 - protein, 11 aa, BK virus
LLFLQKVKIKK

SEQ ID NO: 16216 - protein, 11 aa, BK virus
LFLQKVKIKKV

SEQ ID NO: 16217 - protein, 11 aa, BK virus
FLQKVKIKKVF

SEQ ID NO: 16218 - protein, 11 aa, BK virus
LQKVKIKKVFV

SEQ ID NO: 16219 - protein, 11 aa, BK virus
QKVKIKKVFVS

SEQ ID NO: 16220 - protein, 11 aa, BK virus
KVKIKKVFVSK

SEQ ID NO: 16221 - protein, 11 aa, BK virus
VKIKKVFVSKQ

SEQ ID NO: 16222 - protein, 11 aa, BK virus
NNIWQVLLGCT

SEQ ID NO: 16223 - protein, 11 aa, BK virus
NIWQVLLGCTV

SEQ ID NO: 16224 - protein, 11 aa, BK virus
IWQVLLGCTVC

SEQ ID NO: 16225 - protein, 11 aa, BK virus
WQVLLGCTVCY

SEQ ID NO: 16226 - protein, 11 aa, BK virus
QVLLGCTVCYL

SEQ ID NO: 16227 - protein, 11 aa, BK virus
VLLGCTVCYLK

SEQ ID NO: 16228 - protein, 11 aa, BK virus
LLGCTVCYLKW

SEQ ID NO: 16229 - protein, 11 aa, BK virus
LGCTVCYLKWI

SEQ ID NO: 16230 - protein, 11 aa, BK virus
GCTVCYLKWIL

SEQ ID NO: 16231 - protein, 11 aa, BK virus
YLIFCTVLFSM

SEQ ID NO: 16232 - protein, 11 aa, BK virus
LIFCTVLFSMY

SEQ ID NO: 16233 - protein, 11 aa, BK virus
IFCTVLFSMYL

SEQ ID NO: 16234 - protein, 11 aa, BK virus
FCTVLFSMYLK

SEQ ID NO: 16235 - protein, 11 aa, BK virus
CTVLFSMYLKE

SEQ ID NO: 16236 - protein, 11 aa, BK virus
TVLFSMYLKED

SEQ ID NO: 16237 - protein, 11 aa, BK virus
VLFSMYLKEDT

SEQ ID NO: 16238 - protein, 11 aa, BK virus
LFSMYLKEDTG

SEQ ID NO: 16239 - protein, 11 aa, BK virus
FSMYLKEDTGY

SEQ ID NO: 16240 - protein, 11 aa, BK virus
SMYLKEDTGYL

SEQ ID NO: 16241 - protein, 11 aa, BK virus
MYLKEDTGYLK

SEQ ID NO: 16242 - protein, 11 aa, BK virus
YLKEDTGYLKV

SEQ ID NO: 16243 - protein, 11 aa, BK virus
LKEDTGYLKVP

SEQ ID NO: 16244 - protein, 11 aa, BK virus
KEDTGYLKVPL

SEQ ID NO: 16245 - protein, 11 aa, BK virus
EDTGYLKVPLI

SEQ ID NO: 16246 - protein, 11 aa, BK virus
DTGYLKVPLIV

SEQ ID NO: 16247 - protein, 11 aa, BK virus
TGYLKVPLIVE

SEQ ID NO: 16248 - protein, 11 aa, BK virus
GYLKVPLIVEK

SEQ ID NO: 16249 - protein, 11 aa, BK virus
YLKVPLIVEKQ

SEQ ID NO: 16250 - protein, 11 aa, BK virus
LKVPLIVEKQH

SEQ ID NO: 16251 - protein, 11 aa, BK virus
KGQELNQRICL

SEQ ID NO: 16252 - protein, 11 aa, BK virus
GQELNQRICLQ

SEQ ID NO: 16253 - protein, 11 aa, BK virus
QELNQRICLQD

SEQ ID NO: 16254 - protein, 11 aa, BK virus
ELNQRICLQDM

SEQ ID NO: 16255 - protein, 11 aa, BK virus
LNQRICLQDME

SEQ ID NO: 16256 - protein, 11 aa, BK virus
TKEPKYFHQAW

SEQ ID NO: 16257 - protein, 11 aa, BK virus
KEPKYFHQAWL

SEQ ID NO: 16258 - protein, 11 aa, BK virus
EPKYFHQAWLQ

SEQ ID NO: 16259 - protein, 11 aa, BK virus
MSILSLKPCKL

SEQ ID NO: 16260 - protein, 11 aa, BK virus
SILSLKPCKLD

SEQ ID NO: 16261 - protein, 11 aa, BK virus
ILSLKPCKLDL

SEQ ID NO: 16262 - protein, 11 aa, BK virus
ENPYKTQSSYL

SEQ ID NO: 16263 - protein, 11 aa, BK virus
NPYKTQSSYLK

SEQ ID NO: 16264 - protein, 11 aa, BK virus
PYKTQSSYLKK

SEQ ID NO: 16265 - protein, 11 aa, BK virus
YKTQSSYLKKE

SEQ ID NO: 16266 - protein, 11 aa, BK virus
KTQSSYLKKEF

SEQ ID NO: 16267 - protein, 11 aa, BK virus
TQSSYLKKEFY

SEQ ID NO: 16268 - protein, 11 aa, BK virus
QSSYLKKEFYK

SEQ ID NO: 16269 - protein, 11 aa, BK virus
SSYLKKEFYKV

SEQ ID NO: 16270 - protein, 11 aa, BK virus
SYLKKEFYKVE

SEQ ID NO: 16271 - protein, 11 aa, BK virus
LILQLIYNLEL

SEQ ID NO: 16272 - protein, 11 aa, BK virus
ILQLIYNLELL

SEQ ID NO: 16273 - protein, 11 aa, BK virus
LQLIYNLELLN

SEQ ID NO: 16274 - protein, 11 aa, BK virus
QLIYNLELLNG

SEQ ID NO: 16275 - protein, 11 aa, BK virus
LIYNLELLNGR

SEQ ID NO: 16276 - protein, 11 aa, BK virus
IYNLELLNGRK

SEQ ID NO: 16277 - protein, 11 aa, BK virus
YNLELLNGRKG

SEQ ID NO: 16278 - protein, 11 aa, BK virus
NLELLNGRKGW

SEQ ID NO: 16279 - protein, 11 aa, BK virus
LELLNGRKGWI

SEQ ID NO: 16280 - protein, 11 aa, BK virus
ELLNGRKGWIL

SEQ ID NO: 16281 - protein, 11 aa, BK virus
LLNGRKGWILR

SEQ ID NO: 16282 - protein, 11 aa, BK virus
NIIYAWGNVFL

SEQ ID NO: 16283 - protein, 11 aa, BK virus
IIYAWGNVFLI

SEQ ID NO: 16284 - protein, 11 aa, BK virus
IYAWGNVFLIL

SEQ ID NO: 16285 - protein, 11 aa, BK virus
YAWGNVFLILQ

SEQ ID NO: 16286 - protein, 11 aa, BK virus
AWGNVFLILQE

SEQ ID NO: 16287 - protein, 11 aa, BK virus
WGNVFLILQEK

SEQ ID NO: 16288 - protein, 11 aa, BK virus
GNVFLILQEKR

SEQ ID NO: 16289 - protein, 11 aa, BK virus
NVFLILQEKRI

SEQ ID NO: 16290 - protein, 11 aa, BK virus
VFLILQEKRIQ

SEQ ID NO: 16291 - protein, 11 aa, BK virus
FLILQEKRIQK

SEQ ID NO: 16292 - protein, 11 aa, BK virus
LILQEKRIQKL

SEQ ID NO: 16293 - protein, 11 aa, BK virus
ILQEKRIQKLK

SEQ ID NO: 16294 - protein, 11 aa, BK virus
LQEKRIQKLKT

SEQ ID NO: 16295 - protein, 11 aa, BK virus
QEKRIQKLKTL

SEQ ID NO: 16296 - protein, 11 aa, BK virus
EKRIQKLKTLD

SEQ ID NO: 16297 - protein, 11 aa, BK virus
KRIQKLKTLDM

SEQ ID NO: 16298 - protein, 11 aa, BK virus
RIQKLKTLDMD

SEQ ID NO: 16299 - protein, 11 aa, BK virus
IQKLKTLDMDQ

SEQ ID NO: 16300 - protein, 11 aa, BK virus
QKLKTLDMDQA

SEQ ID NO: 16301 - protein, 11 aa, BK virus
KLKTLDMDQAL

SEQ ID NO: 16302 - protein, 11 aa, BK virus
LKTLDMDQALN

SEQ ID NO: 16303 - protein, 11 aa, BK virus
KTLDMDQALNP

SEQ ID NO: 16304 - protein, 11 aa, BK virus
TLDMDQALNPN

SEQ ID NO: 16305 - protein, 11 aa, BK virus
LDMDQALNPNH

SEQ ID NO: 16306 - protein, 11 aa, BK virus
DMDQALNPNHN

SEQ ID NO: 16307 - protein, 11 aa, BK virus
MDQALNPNHNA

SEQ ID NO: 16308 - protein, 11 aa, BK virus
DQALNPNHNAL

SEQ ID NO: 16309 - protein, 11 aa, BK virus
QALNPNHNALP

SEQ ID NO: 16310 - protein, 11 aa, BK virus
ALNPNHNALPK

SEQ ID NO: 16311 - protein, 11 aa, BK virus
LNPNHNALPKS

SEQ ID NO: 16312 - protein, 11 aa, BK virus
NPNHNALPKSQ

SEQ ID NO: 16313 - protein, 11 aa, BK virus
PNHNALPKSQI

SEQ ID NO: 16314 - protein, 11 aa, BK virus
NHNALPKSQIL

SEQ ID NO: 16315 - protein, 11 aa, BK virus
HNALPKSQILQ

SEQ ID NO: 16316 - protein, 11 aa, BK virus
NALPKSQILQP

SEQ ID NO: 16317 - protein, 11 aa, BK virus
ALPKSQILQPL

SEQ ID NO: 16318 - protein, 11 aa, BK virus
LPKSQILQPLL

SEQ ID NO: 16319 - protein, 11 aa, BK virus
PKSQILQPLLK

SEQ ID NO: 16320 - protein, 11 aa, BK virus
KSQILQPLLKI

SEQ ID NO: 16321 - protein, 11 aa, BK virus
SQILQPLLKIP

SEQ ID NO: 16322 - protein, 11 aa, BK virus
QILQPLLKIPK

SEQ ID NO: 16323 - protein, 11 aa, BK virus
ILQPLLKIPKG

SEQ ID NO: 16324 - protein, 11 aa, BK virus
LQPLLKIPKGQ

SEQ ID NO: 16325 - protein, 11 aa, BK virus
QPLLKIPKGQT

SEQ ID NO: 16326 - protein, 11 aa, BK virus
PLLKIPKGQTP

SEQ ID NO: 16327 - protein, 11 aa, BK virus
LLKIPKGQTPI

SEQ ID NO: 16328 - protein, 11 aa, BK virus
LKIPKGQTPIV

SEQ ID NO: 16329 - protein, 11 aa, BK virus
KIPKGQTPIVK

SEQ ID NO: 16330 - protein, 11 aa, BK virus
IPKGQTPIVKS

SEQ ID NO: 16331 - protein, 11 aa, BK virus
PKGQTPIVKSC

SEQ ID NO: 16332 - protein, 11 aa, BK virus
KGQTPIVKSCI

SEQ ID NO: 16333 - protein, 11 aa, BK virus
GQTPIVKSCIC

SEQ ID NO: 16334 - protein, 11 aa, BK virus
QTPIVKSCICV

SEQ ID NO: 16335 - protein, 11 aa, BK virus
TPIVKSCICVK

SEQ ID NO: 16336 - protein, 11 aa, BK virus
PIVKSCICVKA

SEQ ID NO: 16337 - protein, 11 aa, BK virus
IVKSCICVKAF

SEQ ID NO: 16338 - protein, 11 aa, BK virus
VKSCICVKAFS

SEQ ID NO: 16339 - protein, 11 aa, BK virus
KSCICVKAFSV

SEQ ID NO: 16340 - protein, 11 aa, BK virus
SCICVKAFSVL

SEQ ID NO: 16341 - protein, 11 aa, BK virus
CICVKAFSVLK

SEQ ID NO: 16342 - protein, 11 aa, BK virus
ICVKAFSVLKG

SEQ ID NO: 16343 - protein, 11 aa, BK virus
CVKAFSVLKGL

SEQ ID NO: 16344 - protein, 11 aa, BK virus
VKAFSVLKGLK

SEQ ID NO: 16345 - protein, 11 aa, BK virus
KAFSVLKGLKH

SEQ ID NO: 16346 - protein, 11 aa, BK virus
AFSVLKGLKHH

SEQ ID NO: 16347 - protein, 11 aa, BK virus
FSVLKGLKHHP

SEQ ID NO: 16348 - protein, 11 aa, BK virus
SVLKGLKHHPQ

SEQ ID NO: 16349 - protein, 11 aa, BK virus
VLKGLKHHPQN

SEQ ID NO: 16350 - protein, 11 aa, BK virus
LKGLKHHPQNN

SEQ ID NO: 16351 - protein, 11 aa, BK virus
KGLKHHPQNNT

SEQ ID NO: 16352 - protein, 11 aa, BK virus
GLKHHPQNNTS

SEQ ID NO: 16353 - protein, 11 aa, BK virus
LKHHPQNNTSL

SEQ ID NO: 16354 - protein, 11 aa, BK virus
KHHPQNNTSLK

SEQ ID NO: 16355 - protein, 11 aa, BK virus
HHPQNNTSLKV

SEQ ID NO: 16356 - protein, 11 aa, BK virus
HPQNNTSLKVA

SEQ ID NO: 16357 - protein, 11 aa, BK virus
PQNNTSLKVAY

SEQ ID NO: 16358 - protein, 11 aa, BK virus
QNNTSLKVAYT

SEQ ID NO: 16359 - protein, 11 aa, BK virus
NNTSLKVAYTK

SEQ ID NO: 16360 - protein, 11 aa, BK virus
NTSLKVAYTKA

SEQ ID NO: 16361 - protein, 11 aa, BK virus
TSLKVAYTKAA

SEQ ID NO: 16362 - protein, 11 aa, BK virus
SLKVAYTKAAF

SEQ ID NO: 16363 - protein, 11 aa, BK virus
LKVAYTKAAFI

SEQ ID NO: 16364 - protein, 11 aa, BK virus
KVAYTKAAFIK

SEQ ID NO: 16365 - protein, 11 aa, BK virus
VAYTKAAFIKC

SEQ ID NO: 16366 - protein, 11 aa, BK virus
AYTKAAFIKCI

SEQ ID NO: 16367 - protein, 11 aa, BK virus
YTKAAFIKCIC

SEQ ID NO: 16368 - protein, 11 aa, BK virus
TKAAFIKCICT

SEQ ID NO: 16369 - protein, 11 aa, BK virus
KAAFIKCICTI

SEQ ID NO: 16370 - protein, 11 aa, BK virus
AAFIKCICTIK

SEQ ID NO: 16371 - protein, 11 aa, BK virus
AFIKCICTIKA

SEQ ID NO: 16372 - protein, 11 aa, BK virus
FIKCICTIKAP

SEQ ID NO: 16373 - protein, 11 aa, BK virus
IKCICTIKAPV

SEQ ID NO: 16374 - protein, 11 aa, BK virus
SILVCNCPCLS

SEQ ID NO: 16375 - protein, 11 aa, BK virus
ILVCNCPCLSI

SEQ ID NO: 16376 - protein, 11 aa, BK virus
LVCNCPCLSIY

SEQ ID NO: 16377 - protein, 11 aa, BK virus
VCNCPCLSIYL

SEQ ID NO: 16378 - protein, 11 aa, BK virus
CNCPCLSIYLI

SEQ ID NO: 16379 - protein, 11 aa, BK virus
NCPCLSIYLII

SEQ ID NO: 16380 - protein, 11 aa, BK virus
CPCLSIYLIIS

SEQ ID NO: 16381 - protein, 11 aa, BK virus
PCLSIYLIISG

SEQ ID NO: 16382 - protein, 11 aa, BK virus
CLSIYLIISGS

SEQ ID NO: 16383 - protein, 11 aa, BK virus
LSIYLIISGSP

SEQ ID NO: 16384 - protein, 11 aa, BK virus
SIYLIISGSPG

SEQ ID NO: 16385 - protein, 11 aa, BK virus
IYLIISGSPGS

SEQ ID NO: 16386 - protein, 11 aa, BK virus
YLIISGSPGSL

SEQ ID NO: 16387 - protein, 11 aa, BK virus
LIISGSPGSLS

SEQ ID NO: 16388 - protein, 11 aa, BK virus
IISGSPGSLSV

SEQ ID NO: 16389 - protein, 11 aa, BK virus
ISGSPGSLSVP

SEQ ID NO: 16390 - protein, 11 aa, BK virus
SGSPGSLSVPS

SEQ ID NO: 16391 - protein, 11 aa, BK virus
GSPGSLSVPSN

SEQ ID NO: 16392 - protein, 11 aa, BK virus
SPGSLSVPSNT

SEQ ID NO: 16393 - protein, 11 aa, BK virus
PGSLSVPSNTL

SEQ ID NO: 16394 - protein, 11 aa, BK virus
GSLSVPSNTLT

SEQ ID NO: 16395 - protein, 11 aa, BK virus
SLSVPSNTLTS

SEQ ID NO: 16396 - protein, 11 aa, BK virus
LSVPSNTLTSS

SEQ ID NO: 16397 - protein, 11 aa, BK virus
SVPSNTLTSST

SEQ ID NO: 16398 - protein, 11 aa, BK virus
VPSNTLTSSTW

SEQ ID NO: 16399 - protein, 11 aa, BK virus
PSNTLTSSTWD

SEQ ID NO: 16400 - protein, 11 aa, BK virus
SNTLTSSTWDS

SEQ ID NO: 16401 - protein, 11 aa, BK virus
NTLTSSTWDSI

SEQ ID NO: 16402 - protein, 11 aa, BK virus
TLTSSTWDSIP

SEQ ID NO: 16403 - protein, 11 aa, BK virus
LTSSTWDSIPY

SEQ ID NO: 16404 - protein, 11 aa, BK virus
TSSTWDSIPYI

SEQ ID NO: 16405 - protein, 11 aa, BK virus
SSTWDSIPYIG

SEQ ID NO: 16406 - protein, 11 aa, BK virus
STWDSIPYIGC

SEQ ID NO: 16407 - protein, 11 aa, BK virus
TWDSIPYIGCP

SEQ ID NO: 16408 - protein, 11 aa, BK virus
WDSIPYIGCPS

SEQ ID NO: 16409 - protein, 11 aa, BK virus
DSIPYIGCPST

SEQ ID NO: 16410 - protein, 11 aa, BK virus
SIPYIGCPSTL

SEQ ID NO: 16411 - protein, 11 aa, BK virus
IPYIGCPSTLW

SEQ ID NO: 16412 - protein, 11 aa, BK virus
PYIGCPSTLWV

SEQ ID NO: 16413 - protein, 11 aa, BK virus
YIGCPSTLWVL

SEQ ID NO: 16414 - protein, 11 aa, BK virus
IGCPSTLWVLL

SEQ ID NO: 16415 - protein, 11 aa, BK virus
GCPSTLWVLLF

SEQ ID NO: 16416 - protein, 11 aa, BK virus
CPSTLWVLLFI

SEQ ID NO: 16417 - protein, 11 aa, BK virus
PSTLWVLLFIR

SEQ ID NO: 16418 - protein, 11 aa, BK virus
STLWVLLFIRS

SEQ ID NO: 16419 - protein, 11 aa, BK virus
TLWVLLFIRSL

SEQ ID NO: 16420 - protein, 11 aa, BK virus
LWVLLFIRSLS

SEQ ID NO: 16421 - protein, 11 aa, BK virus
WVLLFIRSLSK

SEQ ID NO: 16422 - protein, 11 aa, BK virus
VLLFIRSLSKK

SEQ ID NO: 16423 - protein, 11 aa, BK virus
LLFIRSLSKKE

SEQ ID NO: 16424 - protein, 11 aa, BK virus
LFIRSLSKKEI

SEQ ID NO: 16425 - protein, 11 aa, BK virus
FIRSLSKKEIG

SEQ ID NO: 16426 - protein, 11 aa, BK virus
GFFTDLFLRRI

SEQ ID NO: 16427 - protein, 11 aa, BK virus
FFTDLFLRRIL

SEQ ID NO: 16428 - protein, 11 aa, BK virus
FTDLFLRRILK

SEQ ID NO: 16429 - protein, 11 aa, BK virus
TDLFLRRILKY

SEQ ID NO: 16430 - protein, 11 aa, BK virus
DLFLRRILKYL

SEQ ID NO: 16431 - protein, 11 aa, BK virus
LFLRRILKYLA

SEQ ID NO: 16432 - protein, 11 aa, BK virus
FLRRILKYLAR

SEQ ID NO: 16433 - protein, 11 aa, BK virus
LRRILKYLARP

SEQ ID NO: 16434 - protein, 11 aa, BK virus
RRILKYLARPL

SEQ ID NO: 16435 - protein, 11 aa, BK virus
RILKYLARPLH

SEQ ID NO: 16436 - protein, 11 aa, BK virus
ILKYLARPLHC

SEQ ID NO: 16437 - protein, 11 aa, BK virus
LKYLARPLHCC

SEQ ID NO: 16438 - protein, 11 aa, BK virus
KYLARPLHCCV

SEQ ID NO: 16439 - protein, 11 aa, BK virus
YLARPLHCCVP

SEQ ID NO: 16440 - protein, 11 aa, BK virus
LARPLHCCVPE

SEQ ID NO: 16441 - protein, 11 aa, BK virus
ARPLHCCVPEL

SEQ ID NO: 16442 - protein, 11 aa, BK virus
RPLHCCVPELL

SEQ ID NO: 16443 - protein, 11 aa, BK virus
PLHCCVPELLV

SEQ ID NO: 16444 - protein, 11 aa, BK virus
LHCCVPELLVN

SEQ ID NO: 16445 - protein, 11 aa, BK virus
HCCVPELLVNR

SEQ ID NO: 16446 - protein, 11 aa, BK virus
CCVPELLVNRP

SEQ ID NO: 16447 - protein, 11 aa, BK virus
CVPELLVNRPQ

SEQ ID NO: 16448 - protein, 11 aa, BK virus
VPELLVNRPQI

SEQ ID NO: 16449 - protein, 11 aa, BK virus
PELLVNRPQIS

SEQ ID NO: 16450 - protein, 11 aa, BK virus
ELLVNRPQISA

SEQ ID NO: 16451 - protein, 11 aa, BK virus
LLVNRPQISAA

SEQ ID NO: 16452 - protein, 11 aa, BK virus
LVNRPQISAAE

SEQ ID NO: 16453 - protein, 11 aa, BK virus
VNRPQISAAET

SEQ ID NO: 16454 - protein, 11 aa, BK virus
NRPQISAAETY

SEQ ID NO: 16455 - protein, 11 aa, BK virus
RPQISAAETYR

SEQ ID NO: 16456 - protein, 11 aa, BK virus
PQISAAETYRL

SEQ ID NO: 16457 - protein, 11 aa, BK virus
QISAAETYRLS

SEQ ID NO: 16458 - protein, 11 aa, BK virus
ISAAETYRLSA

SEQ ID NO: 16459 - protein, 11 aa, BK virus
SAAETYRLSAL

SEQ ID NO: 16460 - protein, 11 aa, BK virus
AAETYRLSALQ

SEQ ID NO: 16461 - protein, 11 aa, BK virus
AETYRLSALQR

SEQ ID NO: 16462 - protein, 11 aa, BK virus
ETYRLSALQRG

SEQ ID NO: 16463 - protein, 11 aa, BK virus
TYRLSALQRGP

SEQ ID NO: 16464 - protein, 11 aa, BK virus
YRLSALQRGPT

SEQ ID NO: 16465 - protein, 11 aa, BK virus
RLSALQRGPTP

SEQ ID NO: 16466 - protein, 11 aa, BK virus
LSALQRGPTPC

SEQ ID NO: 16467 - protein, 11 aa, BK virus
SALQRGPTPCS

SEQ ID NO: 16468 - protein, 11 aa, BK virus
ALQRGPTPCSS

SEQ ID NO: 16469 - protein, 11 aa, BK virus
LQRGPTPCSSS

SEQ ID NO: 16470 - protein, 11 aa, BK virus
QRGPTPCSSSN

SEQ ID NO: 16471 - protein, 11 aa, BK virus
RGPTPCSSSNT

SEQ ID NO: 16472 - protein, 11 aa, BK virus
GPTPCSSSNTV

SEQ ID NO: 16473 - protein, 11 aa, BK virus
PTPCSSSNTVV

SEQ ID NO: 16474 - protein, 11 aa, BK virus
TPCSSSNTVVA

SEQ ID NO: 16475 - protein, 11 aa, BK virus
PCSSSNTVVAV

SEQ ID NO: 16476 - protein, 11 aa, BK virus
CSSSNTVVAVL

SEQ ID NO: 16477 - protein, 11 aa, BK virus
SSSNTVVAVLV

SEQ ID NO: 16478 - protein, 11 aa, BK virus
SSNTVVAVLVT

SEQ ID NO: 16479 - protein, 11 aa, BK virus
STGGTFSPPVK

SEQ ID NO: 16480 - protein, 11 aa, BK virus
TGGTFSPPVKV

SEQ ID NO: 16481 - protein, 11 aa, BK virus
GGTFSPPVKVP

SEQ ID NO: 16482 - protein, 11 aa, BK virus
GTFSPPVKVPK

SEQ ID NO: 16483 - protein, 11 aa, BK virus
TFSPPVKVPKY

SEQ ID NO: 16484 - protein, 11 aa, BK virus
FSPPVKVPKYL

SEQ ID NO: 16485 - protein, 11 aa, BK virus
SPPVKVPKYLA

SEQ ID NO: 16486 - protein, 11 aa, BK virus
PPVKVPKYLAF

SEQ ID NO: 16487 - protein, 11 aa, BK virus
PVKVPKYLAFS

SEQ ID NO: 16488 - protein, 11 aa, BK virus
VKVPKYLAFSF

SEQ ID NO: 16489 - protein, 11 aa, BK virus
KVPKYLAFSFL

SEQ ID NO: 16490 - protein, 11 aa, BK virus
VPKYLAFSFLL

SEQ ID NO: 16491 - protein, 11 aa, BK virus
PKYLAFSFLLG

SEQ ID NO: 16492 - protein, 11 aa, BK virus
KYLAFSFLLGS

SEQ ID NO: 16493 - protein, 11 aa, BK virus
YLAFSFLLGSG

SEQ ID NO: 16494 - protein, 11 aa, BK virus
LAFSFLLGSGT

SEQ ID NO: 16495 - protein, 11 aa, BK virus
AFSFLLGSGTQ

SEQ ID NO: 16496 - protein, 11 aa, BK virus
FSFLLGSGTQH

SEQ ID NO: 16497 - protein, 11 aa, BK virus
SFLLGSGTQHS

SEQ ID NO: 16498 - protein, 11 aa, BK virus
FLLGSGTQHST

SEQ ID NO: 16499 - protein, 11 aa, BK virus
LLGSGTQHSTG

SEQ ID NO: 16500 - protein, 11 aa, BK virus
ALWSVFITWDW

SEQ ID NO: 16501 - protein, 11 aa, BK virus
LWSVFITWDWA

SEQ ID NO: 16502 - protein, 11 aa, BK virus
WSVFITWDWAV

SEQ ID NO: 16503 - protein, 11 aa, BK virus
SVFITWDWAVG

SEQ ID NO: 16504 - protein, 11 aa, BK virus
VFITWDWAVGF

SEQ ID NO: 16505 - protein, 11 aa, BK virus
FITWDWAVGFL

SEQ ID NO: 16506 - protein, 11 aa, BK virus
ITWDWAVGFLG

SEQ ID NO: 16507 - protein, 11 aa, BK virus
TWDWAVGFLGV

SEQ ID NO: 16508 - protein, 11 aa, BK virus
WDWAVGFLGVI

SEQ ID NO: 16509 - protein, 11 aa, BK virus
DWAVGFLGVIV

SEQ ID NO: 16510 - protein, 11 aa, BK virus
WAVGFLGVIVP

SEQ ID NO: 16511 - protein, 11 aa, BK virus
AVGFLGVIVPS

SEQ ID NO: 16512 - protein, 11 aa, BK virus
VGFLGVIVPSG

SEQ ID NO: 16513 - protein, 11 aa, BK virus
GFLGVIVPSGY

SEQ ID NO: 16514 - protein, 11 aa, BK virus
FLGVIVPSGYF

SEQ ID NO: 16515 - protein, 11 aa, BK virus
LGVIVPSGYFD

SEQ ID NO: 16516 - protein, 11 aa, BK virus
GVIVPSGYFDL

SEQ ID NO: 16517 - protein, 11 aa, BK virus
FISTPCISKGS

SEQ ID NO: 16518 - protein, 11 aa, BK virus
ISTPCISKGSP

SEQ ID NO: 16519 - protein, 11 aa, BK virus
STPCISKGSPP

SEQ ID NO: 16520 - protein, 11 aa, BK virus
TPCISKGSPPT

SEQ ID NO: 16521 - protein, 11 aa, BK virus
PCISKGSPPTA

SEQ ID NO: 16522 - protein, 11 aa, BK virus
CISKGSPPTAK

SEQ ID NO: 16523 - protein, 11 aa, BK virus
ISKGSPPTAKK

SEQ ID NO: 16524 - protein, 11 aa, BK virus
SKGSPPTAKKW

SEQ ID NO: 16525 - protein, 11 aa, BK virus
KGSPPTAKKWK

SEQ ID NO: 16526 - protein, 11 aa, BK virus
GSPPTAKKWKL

SEQ ID NO: 16527 - protein, 11 aa, BK virus
SPPTAKKWKLL

SEQ ID NO: 16528 - protein, 11 aa, BK virus
PPTAKKWKLLP

SEQ ID NO: 16529 - protein, 11 aa, BK virus
IGFPPPCSCTF

SEQ ID NO: 16530 - protein, 11 aa, BK virus
GFPPPCSCTFC

SEQ ID NO: 16531 - protein, 11 aa, BK virus
FPPPCSCTFCD

SEQ ID NO: 16532 - protein, 11 aa, BK virus
PPPCSCTFCDP

SEQ ID NO: 16533 - protein, 11 aa, BK virus
PPCSCTFCDPA

SEQ ID NO: 16534 - protein, 11 aa, BK virus
RLSMLVIPITS

SEQ ID NO: 16535 - protein, 11 aa, BK virus
LSMLVIPITSV

SEQ ID NO: 16536 - protein, 11 aa, BK virus
SMLVIPITSVC

SEQ ID NO: 16537 - protein, 11 aa, BK virus
MLVIPITSVCT

SEQ ID NO: 16538 - protein, 11 aa, BK virus
LVIPITSVCTV

SEQ ID NO: 16539 - protein, 11 aa, BK virus
VIPITSVCTVT

SEQ ID NO: 16540 - protein, 11 aa, BK virus
IPITSVCTVTA

SEQ ID NO: 16541 - protein, 11 aa, BK virus
PITSVCTVTAS

SEQ ID NO: 16542 - protein, 11 aa, BK virus
ITSVCTVTASH

SEQ ID NO: 16543 - protein, 11 aa, BK virus
TSVCTVTASHI

SEQ ID NO: 16544 - protein, 11 aa, BK virus
SVCTVTASHIS

SEQ ID NO: 16545 - protein, 11 aa, BK virus
VCTVTASHISR

SEQ ID NO: 16546 - protein, 11 aa, BK virus
CTVTASHISRF

SEQ ID NO: 16547 - protein, 11 aa, BK virus
TVTASHISRFP

SEQ ID NO: 16548 - protein, 11 aa, BK virus
VTASHISRFPQ

SEQ ID NO: 16549 - protein, 11 aa, BK virus
TASHISRFPQV

SEQ ID NO: 16550 - protein, 11 aa, BK virus
ASHISRFPQVR

SEQ ID NO: 16551 - protein, 11 aa, BK virus
SHISRFPQVRS

SEQ ID NO: 16552 - protein, 11 aa, BK virus
HISRFPQVRSS

SEQ ID NO: 16553 - protein, 11 aa, BK virus
ISRFPQVRSSF

SEQ ID NO: 16554 - protein, 11 aa, BK virus
SRFPQVRSSFK

SEQ ID NO: 16555 - protein, 11 aa, BK virus
RFPQVRSSFKL

SEQ ID NO: 16556 - protein, 11 aa, BK virus
FPQVRSSFKLG

SEQ ID NO: 16557 - protein, 11 aa, BK virus
PQVRSSFKLGR

SEQ ID NO: 16558 - protein, 11 aa, BK virus
QVRSSFKLGRG

SEQ ID NO: 16559 - protein, 11 aa, BK virus
VRSSFKLGRGI

SEQ ID NO: 16560 - protein, 11 aa, BK virus
RSSFKLGRGIL

SEQ ID NO: 16561 - protein, 11 aa, BK virus
SSFKLGRGILA

SEQ ID NO: 16562 - protein, 11 aa, BK virus
SFKLGRGILAV

SEQ ID NO: 16563 - protein, 11 aa, BK virus
FKLGRGILAVL

SEQ ID NO: 16564 - protein, 11 aa, BK virus
QGSIFLSGLSL

SEQ ID NO: 16565 - protein, 11 aa, BK virus
GSIFLSGLSLL

SEQ ID NO: 16566 - protein, 11 aa, BK virus
SIFLSGLSLLK

SEQ ID NO: 16567 - protein, 11 aa, BK virus
IFLSGLSLLKS

SEQ ID NO: 16568 - protein, 11 aa, BK virus
FLSGLSLLKSF

SEQ ID NO: 16569 - protein, 11 aa, BK virus
LSGLSLLKSFS

SEQ ID NO: 16570 - protein, 11 aa, BK virus
SGLSLLKSFSA

SEQ ID NO: 16571 - protein, 11 aa, BK virus
GLSLLKSFSAL

SEQ ID NO: 16572 - protein, 11 aa, BK virus
LSLLKSFSALS

SEQ ID NO: 16573 - protein, 11 aa, BK virus
SLLKSFSALSF

SEQ ID NO: 16574 - protein, 11 aa, BK virus
LLKSFSALSFR

SEQ ID NO: 16575 - protein, 11 aa, BK virus
LKSFSALSFRL

SEQ ID NO: 16576 - protein, 11 aa, BK virus
KSFSALSFRLK

SEQ ID NO: 16577 - protein, 11 aa, BK virus
SFSALSFRLKP

SEQ ID NO: 16578 - protein, 11 aa, BK virus
FSALSFRLKPL

SEQ ID NO: 16579 - protein, 11 aa, BK virus
SALSFRLKPLR

SEQ ID NO: 16580 - protein, 11 aa, BK virus
ALSFRLKPLRF

SEQ ID NO: 16581 - protein, 11 aa, BK virus
LSFRLKPLRFS

SEQ ID NO: 16582 - protein, 11 aa, BK virus
SFRLKPLRFSS

SEQ ID NO: 16583 - protein, 11 aa, BK virus
FRLKPLRFSSG

SEQ ID NO: 16584 - protein, 11 aa, BK virus
RLKPLRFSSGS

SEQ ID NO: 16585 - protein, 11 aa, BK virus
LKPLRFSSGSP

SEQ ID NO: 16586 - protein, 11 aa, BK virus
KPLRFSSGSPI

SEQ ID NO: 16587 - protein, 11 aa, BK virus
PLRFSSGSPIS

SEQ ID NO: 16588 - protein, 11 aa, BK virus
LRFSSGSPISG

SEQ ID NO: 16589 - protein, 11 aa, BK virus
RFSSGSPISGF

SEQ ID NO: 16590 - protein, 11 aa, BK virus
FSSGSPISGFR

SEQ ID NO: 16591 - protein, 11 aa, BK virus
SSGSPISGFRK

SEQ ID NO: 16592 - protein, 11 aa, BK virus
SGSPISGFRKH

SEQ ID NO: 16593 - protein, 11 aa, BK virus
GSPISGFRKHS

SEQ ID NO: 16594 - protein, 11 aa, BK virus
SPISGFRKHST

SEQ ID NO: 16595 - protein, 11 aa, BK virus
PISGFRKHSTS

SEQ ID NO: 16596 - protein, 11 aa, BK virus
ISGFRKHSTSV

SEQ ID NO: 16597 - protein, 11 aa, BK virus
SGFRKHSTSVI

SEQ ID NO: 16598 - protein, 11 aa, BK virus
GFRKHSTSVIA

SEQ ID NO: 16599 - protein, 11 aa, BK virus
FRKHSTSVIAS

SEQ ID NO: 16600 - protein, 11 aa, BK virus
RKHSTSVIAST

SEQ ID NO: 16601 - protein, 11 aa, BK virus
KHSTSVIASTP

SEQ ID NO: 16602 - protein, 11 aa, BK virus
HSTSVIASTPV

SEQ ID NO: 16603 - protein, 11 aa, BK virus
STSVIASTPVL

SEQ ID NO: 16604 - protein, 11 aa, BK virus
TSVIASTPVLT

SEQ ID NO: 16605 - protein, 11 aa, BK virus
SVIASTPVLTS

SEQ ID NO: 16606 - protein, 11 aa, BK virus
VIASTPVLTSR

SEQ ID NO: 16607 - protein, 11 aa, BK virus
IASTPVLTSRT

SEQ ID NO: 16608 - protein, 11 aa, BK virus
ASTPVLTSRTS

SEQ ID NO: 16609 - protein, 11 aa, BK virus
STPVLTSRTST

SEQ ID NO: 16610 - protein, 11 aa, BK virus
TPVLTSRTSTP

SEQ ID NO: 16611 - protein, 11 aa, BK virus
PVLTSRTSTPP

SEQ ID NO: 16612 - protein, 11 aa, BK virus
VLTSRTSTPPF

SEQ ID NO: 16613 - protein, 11 aa, BK virus
LTSRTSTPPFI

SEQ ID NO: 16614 - protein, 11 aa, BK virus
TSRTSTPPFIS

SEQ ID NO: 16615 - protein, 11 aa, BK virus
SRTSTPPFISS

SEQ ID NO: 16616 - protein, 11 aa, BK virus
RTSTPPFISSF

SEQ ID NO: 16617 - protein, 11 aa, BK virus
TSTPPFISSFG

SEQ ID NO: 16618 - protein, 11 aa, BK virus
STPPFISSFGT

SEQ ID NO: 16619 - protein, 11 aa, BK virus
TPPFISSFGTC

SEQ ID NO: 16620 - protein, 11 aa, BK virus
PPFISSFGTCT

SEQ ID NO: 16621 - protein, 11 aa, BK virus
PFISSFGTCTG

SEQ ID NO: 16622 - protein, 11 aa, BK virus
FISSFGTCTGS

SEQ ID NO: 16623 - protein, 11 aa, BK virus
ISSFGTCTGSF

SEQ ID NO: 16624 - protein, 11 aa, BK virus
SSFGTCTGSFG

SEQ ID NO: 16625 - protein, 11 aa, BK virus
SFGTCTGSFGF

SEQ ID NO: 16626 - protein, 11 aa, BK virus
FGTCTGSFGFL

SEQ ID NO: 16627 - protein, 11 aa, BK virus
GTCTGSFGFLG

SEQ ID NO: 16628 - protein, 11 aa, BK virus
TCTGSFGFLGA

SEQ ID NO: 16629 - protein, 11 aa, BK virus
CTGSFGFLGAA

SEQ ID NO: 16630 - protein, 11 aa, BK virus
TGSFGFLGAAP

SEQ ID NO: 16631 - protein, 11 aa, BK virus
GSFGFLGAAPG

SEQ ID NO: 16632 - protein, 11 aa, BK virus
SFGFLGAAPGH

SEQ ID NO: 16633 - protein, 11 aa, BK virus
FGFLGAAPGHS

SEQ ID NO: 16634 - protein, 11 aa, BK virus
GFLGAAPGHSP

SEQ ID NO: 16635 - protein, 11 aa, BK virus
FLGAAPGHSPF

SEQ ID NO: 16636 - protein, 11 aa, BK virus
LGAAPGHSPFL

SEQ ID NO: 16637 - protein, 11 aa, BK virus
GAAPGHSPFLL

SEQ ID NO: 16638 - protein, 11 aa, BK virus
AAPGHSPFLLV

SEQ ID NO: 16639 - protein, 11 aa, BK virus
APGHSPFLLVG

SEQ ID NO: 16640 - protein, 11 aa, BK virus
PGHSPFLLVGA

SEQ ID NO: 16641 - protein, 11 aa, BK virus
GHSPFLLVGAI

SEQ ID NO: 16642 - protein, 11 aa, BK virus
HSPFLLVGAIF

SEQ ID NO: 16643 - protein, 11 aa, BK virus
SPFLLVGAIFI

SEQ ID NO: 16644 - protein, 11 aa, BK virus
PFLLVGAIFIC

SEQ ID NO: 16645 - protein, 11 aa, BK virus
FLLVGAIFICF

SEQ ID NO: 16646 - protein, 11 aa, BK virus
LLVGAIFICFK

SEQ ID NO: 16647 - protein, 11 aa, BK virus
LVGAIFICFKS

SEQ ID NO: 16648 - protein, 11 aa, BK virus
VGAIFICFKSR

SEQ ID NO: 16649 - protein, 11 aa, BK virus
GAIFICFKSRC

SEQ ID NO: 16650 - protein, 11 aa, BK virus
AIFICFKSRCY

SEQ ID NO: 16651 - protein, 11 aa, BK virus
IFICFKSRCYS

SEQ ID NO: 16652 - protein, 11 aa, BK virus
FICFKSRCYSP

SEQ ID NO: 16653 - protein, 11 aa, BK virus
ICFKSRCYSPV

SEQ ID NO: 16654 - protein, 11 aa, BK virus
CFKSRCYSPVQ

SEQ ID NO: 16655 - protein, 11 aa, BK virus
FKSRCYSPVQA

SEQ ID NO: 16656 - protein, 11 aa, BK virus
RQHPLRSSSLI

SEQ ID NO: 16657 - protein, 11 aa, BK virus
QHPLRSSSLIS

SEQ ID NO: 16658 - protein, 11 aa, BK virus
HPLRSSSLIST

SEQ ID NO: 16659 - protein, 11 aa, BK virus
PLRSSSLISTS

SEQ ID NO: 16660 - protein, 11 aa, BK virus
LRSSSLISTSW

SEQ ID NO: 16661 - protein, 11 aa, BK virus
RSSSLISTSWG

SEQ ID NO: 16662 - protein, 11 aa, BK virus
SSSLISTSWGN

SEQ ID NO: 16663 - protein, 11 aa, BK virus
SSLISTSWGNS

SEQ ID NO: 16664 - protein, 11 aa, BK virus
SLISTSWGNSF

SEQ ID NO: 16665 - protein, 11 aa, BK virus
LISTSWGNSFF

SEQ ID NO: 16666 - protein, 11 aa, BK virus
ISTSWGNSFFY

SEQ ID NO: 16667 - protein, 11 aa, BK virus
STSWGNSFFYK

SEQ ID NO: 16668 - protein, 11 aa, BK virus
TSWGNSFFYKL

SEQ ID NO: 16669 - protein, 11 aa, BK virus
SWGNSFFYKLS

SEQ ID NO: 16670 - protein, 11 aa, BK virus
VHSLCNFFYTV

SEQ ID NO: 16671 - protein, 11 aa, BK virus
HSLCNFFYTVS

SEQ ID NO: 16672 - protein, 11 aa, BK virus
SLCNFFYTVSI

SEQ ID NO: 16673 - protein, 11 aa, BK virus
LCNFFYTVSII

SEQ ID NO: 16674 - protein, 11 aa, BK virus
CNFFYTVSIIY

SEQ ID NO: 16675 - protein, 11 aa, BK virus
NFFYTVSIIYT

SEQ ID NO: 16676 - protein, 11 aa, BK virus
FFYTVSIIYTI

SEQ ID NO: 16677 - protein, 11 aa, BK virus
FYTVSIIYTIS

SEQ ID NO: 16678 - protein, 11 aa, BK virus
YTVSIIYTISM

SEQ ID NO: 16679 - protein, 11 aa, BK virus
TVSIIYTISMA

SEQ ID NO: 16680 - protein, 11 aa, BK virus
VSIIYTISMAK

SEQ ID NO: 16681 - protein, 11 aa, BK virus
SIIYTISMAKM

SEQ ID NO: 16682 - protein, 11 aa, BK virus
IIYTISMAKMY

SEQ ID NO: 16683 - protein, 11 aa, BK virus
IYTISMAKMYT

SEQ ID NO: 16684 - protein, 11 aa, BK virus
YTISMAKMYTG

SEQ ID NO: 16685 - protein, 11 aa, BK virus
TISMAKMYTGT

SEQ ID NO: 16686 - protein, 11 aa, BK virus
ISMAKMYTGTF

SEQ ID NO: 16687 - protein, 11 aa, BK virus
SMAKMYTGTFP

SEQ ID NO: 16688 - protein, 11 aa, BK virus
MAKMYTGTFPF

SEQ ID NO: 16689 - protein, 11 aa, BK virus
AKMYTGTFPFS

SEQ ID NO: 16690 - protein, 11 aa, BK virus
KMYTGTFPFSY

SEQ ID NO: 16691 - protein, 11 aa, BK virus
MYTGTFPFSYL

SEQ ID NO: 16692 - protein, 11 aa, BK virus
YTGTFPFSYLS

SEQ ID NO: 16693 - protein, 11 aa, BK virus
TGTFPFSYLSN

SEQ ID NO: 16694 - protein, 11 aa, BK virus
GTFPFSYLSNH

SEQ ID NO: 16695 - protein, 11 aa, BK virus
GPNRGKIRIIL

SEQ ID NO: 16696 - protein, 11 aa, BK virus
PNRGKIRIILL

SEQ ID NO: 16697 - protein, 11 aa, BK virus
NRGKIRIILLN

SEQ ID NO: 16698 - protein, 11 aa, BK virus
RGKIRIILLNI

SEQ ID NO: 16699 - protein, 11 aa, BK virus
GKIRIILLNII

SEQ ID NO: 16700 - protein, 11 aa, BK virus
KIRIILLNIII

SEQ ID NO: 16701 - protein, 11 aa, BK virus
IRIILLNIIIK

SEQ ID NO: 16702 - protein, 11 aa, BK virus
RIILLNIIIKV

SEQ ID NO: 16703 - protein, 11 aa, BK virus
IILLNIIIKVY

SEQ ID NO: 16704 - protein, 11 aa, BK virus
ILLNIIIKVYR

SEQ ID NO: 16705 - protein, 11 aa, BK virus
LLNIIIKVYRG

SEQ ID NO: 16706 - protein, 11 aa, BK virus
LNIIIKVYRGI

SEQ ID NO: 16707 - protein, 11 aa, BK virus
NIIIKVYRGIY

SEQ ID NO: 16708 - protein, 11 aa, BK virus
IIIKVYRGIYN

SEQ ID NO: 16709 - protein, 11 aa, BK virus
IIKVYRGIYNC

SEQ ID NO: 16710 - protein, 11 aa, BK virus
IKVYRGIYNCP

SEQ ID NO: 16711 - protein, 11 aa, BK virus
KVYRGIYNCPG

SEQ ID NO: 16712 - protein, 11 aa, BK virus
VYRGIYNCPGS

SEQ ID NO: 16713 - protein, 11 aa, BK virus
YRGIYNCPGSF

SEQ ID NO: 16714 - protein, 11 aa, BK virus
RGIYNCPGSFL

SEQ ID NO: 16715 - protein, 11 aa, BK virus
GIYNCPGSFLQ

SEQ ID NO: 16716 - protein, 11 aa, BK virus
IYNCPGSFLQK

SEQ ID NO: 16717 - protein, 11 aa, BK virus
YNCPGSFLQKS

SEQ ID NO: 16718 - protein, 11 aa, BK virus
NCPGSFLQKSS

SEQ ID NO: 16719 - protein, 11 aa, BK virus
CPGSFLQKSSQ

SEQ ID NO: 16720 - protein, 11 aa, BK virus
PGSFLQKSSQG

SEQ ID NO: 16721 - protein, 11 aa, BK virus
GSFLQKSSQGV

SEQ ID NO: 16722 - protein, 11 aa, BK virus
SFLQKSSQGVS

SEQ ID NO: 16723 - protein, 11 aa, BK virus
FLQKSSQGVSK

SEQ ID NO: 16724 - protein, 11 aa, BK virus
LQKSSQGVSKK

SEQ ID NO: 16725 - protein, 11 aa, BK virus
QKSSQGVSKKS

SEQ ID NO: 16726 - protein, 11 aa, BK virus
KSSQGVSKKSF

SEQ ID NO: 16727 - protein, 11 aa, BK virus
SSQGVSKKSFC

SEQ ID NO: 16728 - protein, 11 aa, BK virus
SQGVSKKSFCS

SEQ ID NO: 16729 - protein, 11 aa, BK virus
QGVSKKSFCSS

SEQ ID NO: 16730 - protein, 11 aa, BK virus
GVSKKSFCSSL

SEQ ID NO: 16731 - protein, 11 aa, BK virus
VSKKSFCSSLQ

SEQ ID NO: 16732 - protein, 11 aa, BK virus
SKKSFCSSLQF

SEQ ID NO: 16733 - protein, 11 aa, BK virus
KKSFCSSLQFL

SEQ ID NO: 16734 - protein, 11 aa, BK virus
GYRRYIIPNNM

SEQ ID NO: 16735 - protein, 11 aa, BK virus
YRRYIIPNNMP

SEQ ID NO: 16736 - protein, 11 aa, BK virus
RRYIIPNNMPQ

SEQ ID NO: 16737 - protein, 11 aa, BK virus
RYIIPNNMPQS

SEQ ID NO: 16738 - protein, 11 aa, BK virus
YIIPNNMPQSL

SEQ ID NO: 16739 - protein, 11 aa, BK virus
IIPNNMPQSLG

SEQ ID NO: 16740 - protein, 11 aa, BK virus
IPNNMPQSLGN

SEQ ID NO: 16741 - protein, 11 aa, BK virus
PNNMPQSLGNS

SEQ ID NO: 16742 - protein, 11 aa, BK virus
NNMPQSLGNSS

SEQ ID NO: 16743 - protein, 11 aa, BK virus
NMPQSLGNSSK

SEQ ID NO: 16744 - protein, 11 aa, BK virus
MPQSLGNSSKQ

SEQ ID NO: 16745 - protein, 11 aa, BK virus
PQSLGNSSKQR

SEQ ID NO: 16746 - protein, 11 aa, BK virus
QSLGNSSKQRR

SEQ ID NO: 16747 - protein, 11 aa, BK virus
SLGNSSKQRRT

SEQ ID NO: 16748 - protein, 11 aa, BK virus
LGNSSKQRRTP

SEQ ID NO: 16749 - protein, 11 aa, BK virus
GNSSKQRRTPM

SEQ ID NO: 16750 - protein, 11 aa, BK virus
NSSKQRRTPMP

SEQ ID NO: 16751 - protein, 11 aa, BK virus
SSKQRRTPMPR

SEQ ID NO: 16752 - protein, 11 aa, BK virus
SKQRRTPMPRI

SEQ ID NO: 16753 - protein, 11 aa, BK virus
KQRRTPMPRIK

SEQ ID NO: 16754 - protein, 11 aa, BK virus
QRRTPMPRIKV

SEQ ID NO: 16755 - protein, 11 aa, BK virus
RRTPMPRIKVL

SEQ ID NO: 16756 - protein, 11 aa, BK virus
RTPMPRIKVLN

SEQ ID NO: 16757 - protein, 11 aa, BK virus
TPMPRIKVLNI

SEQ ID NO: 16758 - protein, 11 aa, BK virus
PMPRIKVLNII

SEQ ID NO: 16759 - protein, 11 aa, BK virus
MPRIKVLNIIN

SEQ ID NO: 16760 - protein, 11 aa, BK virus
PRIKVLNIINK

SEQ ID NO: 16761 - protein, 11 aa, BK virus
RIKVLNIINKS

SEQ ID NO: 16762 - protein, 11 aa, BK virus
IKVLNIINKSI

SEQ ID NO: 16763 - protein, 11 aa, BK virus
KVLNIINKSIY

SEQ ID NO: 16764 - protein, 11 aa, BK virus
VLNIINKSIYT

SEQ ID NO: 16765 - protein, 11 aa, BK virus
LNIINKSIYTR

SEQ ID NO: 16766 - protein, 11 aa, BK virus
NIINKSIYTRK

SEQ ID NO: 16767 - protein, 11 aa, BK virus
IINKSIYTRKQ

SEQ ID NO: 16768 - protein, 11 aa, BK virus
INKSIYTRKQN

SEQ ID NO: 16769 - protein, 11 aa, BK virus
NKSIYTRKQNI

SEQ ID NO: 16770 - protein, 11 aa, BK virus
KSIYTRKQNII

SEQ ID NO: 16771 - protein, 11 aa, BK virus
SIYTRKQNIIV

SEQ ID NO: 16772 - protein, 11 aa, BK virus
IYTRKQNIIVL

SEQ ID NO: 16773 - protein, 11 aa, BK virus
YTRKQNIIVLI

SEQ ID NO: 16774 - protein, 11 aa, BK virus
TRKQNIIVLIW

SEQ ID NO: 16775 - protein, 11 aa, BK virus
RKQNIIVLIWV

SEQ ID NO: 16776 - protein, 11 aa, BK virus
KQNIIVLIWVK

SEQ ID NO: 16777 - protein, 11 aa, BK virus
QNIIVLIWVKQ

SEQ ID NO: 16778 - protein, 11 aa, BK virus
NIIVLIWVKQF

SEQ ID NO: 16779 - protein, 11 aa, BK virus
IIVLIWVKQFQ

SEQ ID NO: 16780 - protein, 11 aa, BK virus
IVLIWVKQFQS

SEQ ID NO: 16781 - protein, 11 aa, BK virus
VLIWVKQFQSH

SEQ ID NO: 16782 - protein, 11 aa, BK virus
LIWVKQFQSHA

SEQ ID NO: 16783 - protein, 11 aa, BK virus
LLIEAYSGNFV

SEQ ID NO: 16784 - protein, 11 aa, BK virus
LIEAYSGNFVI

SEQ ID NO: 16785 - protein, 11 aa, BK virus
IEAYSGNFVIP

SEQ ID NO: 16786 - protein, 11 aa, BK virus
EAYSGNFVIPI

SEQ ID NO: 16787 - protein, 11 aa, BK virus
AYSGNFVIPII

SEQ ID NO: 16788 - protein, 11 aa, BK virus
YSGNFVIPIIK

SEQ ID NO: 16789 - protein, 11 aa, BK virus
SGNFVIPIIKE

SEQ ID NO: 16790 - protein, 11 aa, BK virus
GNFVIPIIKEL

SEQ ID NO: 16791 - protein, 11 aa, BK virus
NFVIPIIKELI

SEQ ID NO: 16792 - protein, 11 aa, BK virus
FVIPIIKELIP

SEQ ID NO: 16793 - protein, 11 aa, BK virus
VIPIIKELIPY

SEQ ID NO: 16794 - protein, 11 aa, BK virus
IPIIKELIPYL

SEQ ID NO: 16795 - protein, 11 aa, BK virus
PIIKELIPYLS

SEQ ID NO: 16796 - protein, 11 aa, BK virus
SSKPSNSPRST

SEQ ID NO: 16797 - protein, 11 aa, BK virus
SKPSNSPRSTS

SEQ ID NO: 16798 - protein, 11 aa, BK virus
KPSNSPRSTSN

SEQ ID NO: 16799 - protein, 11 aa, BK virus
PSNSPRSTSNY

SEQ ID NO: 16800 - protein, 11 aa, BK virus
SNSPRSTSNYS

SEQ ID NO: 16801 - protein, 11 aa, BK virus
NSPRSTSNYSI

SEQ ID NO: 16802 - protein, 11 aa, BK virus
SPRSTSNYSIC

SEQ ID NO: 16803 - protein, 11 aa, BK virus
PRSTSNYSICL

SEQ ID NO: 16804 - protein, 11 aa, BK virus
RSTSNYSICLR

SEQ ID NO: 16805 - protein, 11 aa, BK virus
STSNYSICLRS

SEQ ID NO: 16806 - protein, 11 aa, BK virus
GTCYALYSSKG

SEQ ID NO: 16807 - protein, 11 aa, BK virus
TCYALYSSKGC

SEQ ID NO: 16808 - protein, 11 aa, BK virus
CYALYSSKGCN

SEQ ID NO: 16809 - protein, 11 aa, BK virus
YALYSSKGCNL

SEQ ID NO: 16810 - protein, 11 aa, BK virus
ALYSSKGCNLN

SEQ ID NO: 16811 - protein, 11 aa, BK virus
LYSSKGCNLNF

SEQ ID NO: 16812 - protein, 11 aa, BK virus
YSSKGCNLNFY

SEQ ID NO: 16813 - protein, 11 aa, BK virus
SSKGCNLNFYS

SEQ ID NO: 16814 - protein, 11 aa, BK virus
SKGCNLNFYSS

SEQ ID NO: 16815 - protein, 11 aa, BK virus
KGCNLNFYSSS

SEQ ID NO: 16816 - protein, 11 aa, BK virus
GCNLNFYSSSS

SEQ ID NO: 16817 - protein, 11 aa, BK virus
CNLNFYSSSSL

SEQ ID NO: 16818 - protein, 11 aa, BK virus
NLNFYSSSSLP

SEQ ID NO: 16819 - protein, 11 aa, BK virus
LNFYSSSSLPS

SEQ ID NO: 16820 - protein, 11 aa, BK virus
NFYSSSSLPSS

SEQ ID NO: 16821 - protein, 11 aa, BK virus
FYSSSSLPSSN

SEQ ID NO: 16822 - protein, 11 aa, BK virus
YSSSSLPSSNF

SEQ ID NO: 16823 - protein, 11 aa, BK virus
SSSSLPSSNFS

SEQ ID NO: 16824 - protein, 11 aa, BK virus
SSSLPSSNFSH

SEQ ID NO: 16825 - protein, 11 aa, BK virus
KSCGSSSLRYT

SEQ ID NO: 16826 - protein, 11 aa, BK virus
SCGSSSLRYTG

SEQ ID NO: 16827 - protein, 11 aa, BK virus
CGSSSLRYTGN

SEQ ID NO: 16828 - protein, 11 aa, BK virus
SSTHEPGNTKK

SEQ ID NO: 16829 - protein, 11 aa, BK virus
STHEPGNTKKK

SEQ ID NO: 16830 - protein, 11 aa, BK virus
THEPGNTKKKG

SEQ ID NO: 16831 - protein, 11 aa, BK virus
HEPGNTKKKGL

SEQ ID NO: 16832 - protein, 11 aa, BK virus
EPGNTKKKGLL

SEQ ID NO: 16833 - protein, 11 aa, BK virus
PGNTKKKGLLT

SEQ ID NO: 16834 - protein, 11 aa, BK virus
ESFTESFTAGK

SEQ ID NO: 16835 - protein, 11 aa, BK virus
SFTESFTAGKA

SEQ ID NO: 16836 - protein, 11 aa, BK virus
FTESFTAGKAV

SEQ ID NO: 16837 - protein, 11 aa, BK virus
TESFTAGKAVV

SEQ ID NO: 16838 - protein, 11 aa, BK virus
ESFTAGKAVVL

SEQ ID NO: 16839 - protein, 11 aa, BK virus
SFTAGKAVVLL

SEQ ID NO: 16840 - protein, 11 aa, BK virus
FTAGKAVVLLF

SEQ ID NO: 16841 - protein, 11 aa, BK virus
TAGKAVVLLFF

SEQ ID NO: 16842 - protein, 11 aa, BK virus
AGKAVVLLFFP

SEQ ID NO: 16843 - protein, 11 aa, BK virus
GKAVVLLFFPS

SEQ ID NO: 16844 - protein, 11 aa, BK virus
KAVVLLFFPST

SEQ ID NO: 16845 - protein, 11 aa, BK virus
AVVLLFFPSTL

SEQ ID NO: 16846 - protein, 11 aa, BK virus
VVLLFFPSTLS

SEQ ID NO: 16847 - protein, 11 aa, BK virus
VLLFFPSTLSS

SEQ ID NO: 16848 - protein, 11 aa, BK virus
LLFFPSTLSSP

SEQ ID NO: 16849 - protein, 11 aa, BK virus
LFFPSTLSSPL

SEQ ID NO: 16850 - protein, 11 aa, BK virus
FFPSTLSSPLQ

SEQ ID NO: 16851 - protein, 11 aa, BK virus
FPSTLSSPLQN

SEQ ID NO: 16852 - protein, 11 aa, BK virus
PSTLSSPLQNS

SEQ ID NO: 16853 - protein, 11 aa, BK virus
STLSSPLQNSS

SEQ ID NO: 16854 - protein, 11 aa, BK virus
TLSSPLQNSSK

SEQ ID NO: 16855 - protein, 11 aa, BK virus
LSSPLQNSSKS

SEQ ID NO: 16856 - protein, 11 aa, BK virus
SSPLQNSSKSS

SEQ ID NO: 16857 - protein, 11 aa, BK virus
SPLQNSSKSSK

SEQ ID NO: 16858 - protein, 11 aa, BK virus
PLQNSSKSSKI

SEQ ID NO: 16859 - protein, 11 aa, BK virus
LQNSSKSSKIK

SEQ ID NO: 16860 - protein, 11 aa, BK virus
QNSSKSSKIKI

SEQ ID NO: 16861 - protein, 11 aa, BK virus
NSSKSSKIKIK

SEQ ID NO: 16862 - protein, 11 aa, BK virus
SSKSSKIKIKI

SEQ ID NO: 16863 - protein, 11 aa, BK virus
SKSSKIKIKIL

SEQ ID NO: 16864 - protein, 11 aa, BK virus
ALFFVPVQVLP

SEQ ID NO: 16865 - protein, 11 aa, BK virus
LFFVPVQVLPT

SEQ ID NO: 16866 - protein, 11 aa, BK virus
FFVPVQVLPTF

SEQ ID NO: 16867 - protein, 11 aa, BK virus
FVPVQVLPTFT

SEQ ID NO: 16868 - protein, 11 aa, BK virus
VPVQVLPTFTE

SEQ ID NO: 16869 - protein, 11 aa, BK virus
PVQVLPTFTEA

SEQ ID NO: 16870 - protein, 11 aa, BK virus
VQVLPTFTEAC

SEQ ID NO: 16871 - protein, 11 aa, BK virus
QVLPTFTEACR

SEQ ID NO: 16872 - protein, 11 aa, BK virus
VLPTFTEACRD

SEQ ID NO: 16873 - protein, 11 aa, BK virus
LPTFTEACRDS

SEQ ID NO: 16874 - protein, 11 aa, BK virus
PTFTEACRDSW

SEQ ID NO: 16875 - protein, 11 aa, BK virus
TFTEACRDSWR

SEQ ID NO: 16876 - protein, 11 aa, BK virus
FTEACRDSWRR

SEQ ID NO: 16877 - protein, 11 aa, BK virus
TEACRDSWRRT

SEQ ID NO: 16878 - protein, 11 aa, BK virus
EACRDSWRRTM

SEQ ID NO: 16879 - protein, 11 aa, BK virus
ACRDSWRRTMA

SEQ ID NO: 16880 - protein, 11 aa, BK virus
CRDSWRRTMAF

SEQ ID NO: 16881 - protein, 11 aa, BK virus
RDSWRRTMAFV

SEQ ID NO: 16882 - protein, 11 aa, BK virus
DSWRRTMAFVQ

SEQ ID NO: 16883 - protein, 11 aa, BK virus
SWRRTMAFVQF

SEQ ID NO: 16884 - protein, 11 aa, BK virus
WRRTMAFVQFN

SEQ ID NO: 16885 - protein, 11 aa, BK virus
RRTMAFVQFNW

SEQ ID NO: 16886 - protein, 11 aa, BK virus
RTMAFVQFNWG

SEQ ID NO: 16887 - protein, 11 aa, BK virus
TMAFVQFNWGQ

SEQ ID NO: 16888 - protein, 11 aa, BK virus
MAFVQFNWGQG

SEQ ID NO: 16889 - protein, 11 aa, BK virus
AFVQFNWGQGQ

SEQ ID NO: 16890 - protein, 11 aa, BK virus
FVQFNWGQGQD

SEQ ID NO: 16891 - protein, 11 aa, BK virus
VQFNWGQGQDS

SEQ ID NO: 16892 - protein, 11 aa, BK virus
ARKTCLSCTFL

SEQ ID NO: 16893 - protein, 11 aa, BK virus
RKTCLSCTFLP

SEQ ID NO: 16894 - protein, 11 aa, BK virus
KTCLSCTFLPE

SEQ ID NO: 16895 - protein, 11 aa, BK virus
TCLSCTFLPEV

SEQ ID NO: 16896 - protein, 11 aa, BK virus
CLSCTFLPEVM

SEQ ID NO: 16897 - protein, 11 aa, BK virus
LSCTFLPEVMV

SEQ ID NO: 16898 - protein, 11 aa, BK virus
SCTFLPEVMVW

SEQ ID NO: 16899 - protein, 11 aa, BK virus
CTFLPEVMVWL

SEQ ID NO: 16900 - protein, 11 aa, BK virus
TFLPEVMVWLH

SEQ ID NO: 16901 - protein, 11 aa, BK virus
FLPEVMVWLHS

SEQ ID NO: 16902 - protein, 11 aa, BK virus
LPEVMVWLHSM

SEQ ID NO: 16903 - protein, 11 aa, BK virus
PEVMVWLHSMG

SEQ ID NO: 16904 - protein, 11 aa, BK virus
EVMVWLHSMGK

SEQ ID NO: 16905 - protein, 11 aa, BK virus
VMVWLHSMGKQ

SEQ ID NO: 16906 - protein, 11 aa, BK virus
MVWLHSMGKQL

SEQ ID NO: 16907 - protein, 11 aa, BK virus
VWLHSMGKQLL

SEQ ID NO: 16908 - protein, 11 aa, BK virus
WLHSMGKQLLP

SEQ ID NO: 16909 - protein, 11 aa, BK virus
LHSMGKQLLPV

SEQ ID NO: 16910 - protein, 11 aa, BK virus
HSMGKQLLPVS

SEQ ID NO: 16911 - protein, 11 aa, BK virus
SMGKQLLPVSH

SEQ ID NO: 16912 - protein, 11 aa, BK virus
MGKQLLPVSHA

SEQ ID NO: 16913 - protein, 11 aa, BK virus
GKQLLPVSHAL

SEQ ID NO: 16914 - protein, 11 aa, BK virus
KQLLPVSHALS

SEQ ID NO: 16915 - protein, 11 aa, BK virus
QLLPVSHALSF

SEQ ID NO: 16916 - protein, 11 aa, BK virus
LLPVSHALSFL

SEQ ID NO: 16917 - protein, 11 aa, BK virus
LPVSHALSFLR

SEQ ID NO: 16918 - protein, 11 aa, BK virus
PVSHALSFLRS

SEQ ID NO: 16919 - protein, 11 aa, BK virus
VSHALSFLRSW

SEQ ID NO: 16920 - protein, 11 aa, BK virus
SHALSFLRSWF

SEQ ID NO: 16921 - protein, 11 aa, BK virus
HALSFLRSWFG

SEQ ID NO: 16922 - protein, 11 aa, BK virus
ALSFLRSWFGC

SEQ ID NO: 16923 - protein, 11 aa, BK virus
LSFLRSWFGCI

SEQ ID NO: 16924 - protein, 11 aa, BK virus
SFLRSWFGCIP

SEQ ID NO: 16925 - protein, 11 aa, BK virus
FLRSWFGCIPL

SEQ ID NO: 16926 - protein, 11 aa, BK virus
AAPPCGLFFYN

SEQ ID NO: 16927 - protein, 11 aa, BK virus
APPCGLFFYNI

SEQ ID NO: 16928 - protein, 11 aa, BK virus
EAEAASASTLS

SEQ ID NO: 16929 - protein, 11 aa, BK virus
AEAASASTLSL

SEQ ID NO: 16930 - protein, 11 aa, BK virus
EAASASTLSLK

SEQ ID NO: 16931 - protein, 11 aa, BK virus
GLAKLFGEIPI

SEQ ID NO: 16932 - protein, 11 aa, BK virus
LAKLFGEIPIL

SEQ ID NO: 16933 - protein, 11 aa, BK virus
AKLFGEIPILL

SEQ ID NO: 16934 - protein, 11 aa, BK virus
KLFGEIPILLQ

SEQ ID NO: 16935 - protein, 11 aa, BK virus
LFGEIPILLQF

SEQ ID NO: 16936 - protein, 11 aa, BK virus
FGEIPILLQFL

SEQ ID NO: 16937 - protein, 11 aa, BK virus
GEIPILLQFLQ

SEQ ID NO: 16938 - protein, 8 aa, BK virus
WIKFLTGK

SEQ ID NO: 16939 - protein, 8 aa, BK virus
IKFLTGKN

SEQ ID NO: 16940 - protein, 8 aa, BK virus
KFLTGKNP

SEQ ID NO: 16941 - protein, 8 aa, BK virus
FLTGKNPW

SEQ ID NO: 16942 - protein, 8 aa, BK virus
LTGKNPWS

SEQ ID NO: 16943 - protein, 8 aa, BK virus
TGKNPWSS

SEQ ID NO: 16944 - protein, 8 aa, BK virus
GKNPWSSW

SEQ ID NO: 16945 - protein, 8 aa, BK virus
KNPWSSWT

SEQ ID NO: 16946 - protein, 8 aa, BK virus
NPWSSWTF

SEQ ID NO: 16947 - protein, 8 aa, BK virus
ALKELPGE

SEQ ID NO: 16948 - protein, 8 aa, BK virus
LKELPGEI

SEQ ID NO: 16949 - protein, 8 aa, BK virus
KELPGEIF

SEQ ID NO: 16950 - protein, 8 aa, BK virus
ELPGEIFP

SEQ ID NO: 16951 - protein, 8 aa, BK virus
GSVRNFTL

SEQ ID NO: 16952 - protein, 8 aa, BK virus
SVRNFTLT

SEQ ID NO: 16953 - protein, 8 aa, BK virus
VRNFTLTK

SEQ ID NO: 16954 - protein, 8 aa, BK virus
RNFTLTKG

SEQ ID NO: 16955 - protein, 8 aa, BK virus
NFTLTKGA

SEQ ID NO: 16956 - protein, 8 aa, BK virus
FTLTKGAT

SEQ ID NO: 16957 - protein, 8 aa, BK virus
TLTKGATR

SEQ ID NO: 16958 - protein, 8 aa, BK virus
LTKGATRI

SEQ ID NO: 16959 - protein, 8 aa, BK virus
TKGATRIK

SEQ ID NO: 16960 - protein, 8 aa, BK virus
ILCIKKWS

SEQ ID NO: 16961 - protein, 8 aa, BK virus
LCIKKWSR

SEQ ID NO: 16962 - protein, 8 aa, BK virus
CIKKWSRM

SEQ ID NO: 16963 - protein, 8 aa, BK virus
LISLILEP

SEQ ID NO: 16964 - protein, 8 aa, BK virus
ISLILEPG

SEQ ID NO: 16965 - protein, 8 aa, BK virus
SLILEPGV

SEQ ID NO: 16966 - protein, 8 aa, BK virus
LILEPGVA

SEQ ID NO: 16967 - protein, 8 aa, BK virus
ILEPGVAQ

SEQ ID NO: 16968 - protein, 8 aa, BK virus
LEPGVAQR

SEQ ID NO: 16969 - protein, 8 aa, BK virus
EPGVAQRF

SEQ ID NO: 16970 - protein, 8 aa, BK virus
PGVAQRFV

SEQ ID NO: 16971 - protein, 8 aa, BK virus
GVAQRFVL

SEQ ID NO: 16972 - protein, 8 aa, BK virus
VAQRFVLI

SEQ ID NO: 16973 - protein, 8 aa, BK virus
AQRFVLIF

SEQ ID NO: 16974 - protein, 8 aa, BK virus
QRFVLIFL

SEQ ID NO: 16975 - protein, 8 aa, BK virus
RFVLIFLF

SEQ ID NO: 16976 - protein, 8 aa, BK virus
FVLIFLFA

SEQ ID NO: 16977 - protein, 8 aa, BK virus
VLIFLFAQ

SEQ ID NO: 16978 - protein, 8 aa, BK virus
LIFLFAQI

SEQ ID NO: 16979 - protein, 8 aa, BK virus
IFLFAQIP

SEQ ID NO: 16980 - protein, 8 aa, BK virus
FLFAQIPC

SEQ ID NO: 16981 - protein, 8 aa, BK virus
LFAQIPCT

SEQ ID NO: 16982 - protein, 8 aa, BK virus
FAQIPCTA

SEQ ID NO: 16983 - protein, 8 aa, BK virus
AQIPCTAR

SEQ ID NO: 16984 - protein, 8 aa, BK virus
QIPCTARN

SEQ ID NO: 16985 - protein, 8 aa, BK virus
IPCTARNG

SEQ ID NO: 16986 - protein, 8 aa, BK virus
PCTARNGL

SEQ ID NO: 16987 - protein, 8 aa, BK virus
CTARNGLF

SEQ ID NO: 16988 - protein, 8 aa, BK virus
TARNGLFV

SEQ ID NO: 16989 - protein, 8 aa, BK virus
ARNGLFVP

SEQ ID NO: 16990 - protein, 8 aa, BK virus
RNGLFVPK

SEQ ID NO: 16991 - protein, 8 aa, BK virus
NGLFVPKS

SEQ ID NO: 16992 - protein, 8 aa, BK virus
GLFVPKSL

SEQ ID NO: 16993 - protein, 8 aa, BK virus
LFVPKSLL

SEQ ID NO: 16994 - protein, 8 aa, BK virus
FVPKSLLC

SEQ ID NO: 16995 - protein, 8 aa, BK virus
VPKSLLCT

SEQ ID NO: 16996 - protein, 8 aa, BK virus
PKSLLCTA

SEQ ID NO: 16997 - protein, 8 aa, BK virus
KSLLCTAL

SEQ ID NO: 16998 - protein, 8 aa, BK virus
SLLCTALA

SEQ ID NO: 16999 - protein, 8 aa, BK virus
LLCTALAC

SEQ ID NO: 17000 - protein, 8 aa, BK virus
LCTALACY

SEQ ID NO: 17001 - protein, 8 aa, BK virus
CTALACYV

SEQ ID NO: 17002 - protein, 8 aa, BK virus
TALACYVS

SEQ ID NO: 17003 - protein, 8 aa, BK virus
ALACYVSL

SEQ ID NO: 17004 - protein, 8 aa, BK virus
LACYVSLD

SEQ ID NO: 17005 - protein, 8 aa, BK virus
IATALTAS

SEQ ID NO: 17006 - protein, 8 aa, BK virus
ATALTASH

SEQ ID NO: 17007 - protein, 8 aa, BK virus
TALTASHS

SEQ ID NO: 17008 - protein, 8 aa, BK virus
ALTASHSG

SEQ ID NO: 17009 - protein, 8 aa, BK virus
LTASHSGL

SEQ ID NO: 17010 - protein, 8 aa, BK virus
TASHSGLA

SEQ ID NO: 17011 - protein, 8 aa, BK virus
LKKLCNGG

SEQ ID NO: 17012 - protein, 8 aa, BK virus
KKLCNGGS

SEQ ID NO: 17013 - protein, 8 aa, BK virus
KLCNGGSK

SEQ ID NO: 17014 - protein, 8 aa, BK virus
LEKLPSEI

SEQ ID NO: 17015 - protein, 8 aa, BK virus
SFKVTNLY

SEQ ID NO: 17016 - protein, 8 aa, BK virus
FKVTNLYL

SEQ ID NO: 17017 - protein, 8 aa, BK virus
KVTNLYLD

SEQ ID NO: 17018 - protein, 8 aa, BK virus
VTNLYLDK

SEQ ID NO: 17019 - protein, 8 aa, BK virus
VIIFFIGA

SEQ ID NO: 17020 - protein, 8 aa, BK virus
IIFFIGAN

SEQ ID NO: 17021 - protein, 8 aa, BK virus
IFFIGANL

SEQ ID NO: 17022 - protein, 8 aa, BK virus
FFIGANLW

SEQ ID NO: 17023 - protein, 8 aa, BK virus
FIGANLWN

SEQ ID NO: 17024 - protein, 8 aa, BK virus
IGANLWNR

SEQ ID NO: 17025 - protein, 8 aa, BK virus
GANLWNRR

SEQ ID NO: 17026 - protein, 8 aa, BK virus
ANLWNRRV

SEQ ID NO: 17027 - protein, 8 aa, BK virus
NLWNRRVG

SEQ ID NO: 17028 - protein, 8 aa, BK virus
LWNRRVGV

SEQ ID NO: 17029 - protein, 8 aa, BK virus
WNRRVGVL

SEQ ID NO: 17030 - protein, 8 aa, BK virus
NRRVGVLV

SEQ ID NO: 17031 - protein, 8 aa, BK virus
RRVGVLVE

SEQ ID NO: 17032 - protein, 8 aa, BK virus
RVGVLVEF

SEQ ID NO: 17033 - protein, 8 aa, BK virus
VGVLVEFL

SEQ ID NO: 17034 - protein, 8 aa, BK virus
RSNSRFST

SEQ ID NO: 17035 - protein, 8 aa, BK virus
SNSRFSTL

SEQ ID NO: 17036 - protein, 8 aa, BK virus
NSRFSTLN

SEQ ID NO: 17037 - protein, 8 aa, BK virus
SRFSTLNT

SEQ ID NO: 17038 - protein, 8 aa, BK virus
RFSTLNTT

SEQ ID NO: 17039 - protein, 8 aa, BK virus
FSTLNTTQ

SEQ ID NO: 17040 - protein, 8 aa, BK virus
STLNTTQK

SEQ ID NO: 17041 - protein, 8 aa, BK virus
TLNTTQKK

SEQ ID NO: 17042 - protein, 8 aa, BK virus
LNTTQKKK

SEQ ID NO: 17043 - protein, 8 aa, BK virus
NTTQKKKK

SEQ ID NO: 17044 - protein, 8 aa, BK virus
TTQKKKKG

SEQ ID NO: 17045 - protein, 8 aa, BK virus
TQKKKKGR

SEQ ID NO: 17046 - protein, 8 aa, BK virus
QKKKKGRR

SEQ ID NO: 17047 - protein, 8 aa, BK virus
KKKKGRRP

SEQ ID NO: 17048 - protein, 8 aa, BK virus
NPCLLCCV

SEQ ID NO: 17049 - protein, 8 aa, BK virus
PCLLCCVY

SEQ ID NO: 17050 - protein, 8 aa, BK virus
CLLCCVYY

SEQ ID NO: 17051 - protein, 8 aa, BK virus
KTYGKIFC

SEQ ID NO: 17052 - protein, 8 aa, BK virus
TYGKIFCN

SEQ ID NO: 17053 - protein, 8 aa, BK virus
YGKIFCNF

SEQ ID NO: 17054 - protein, 8 aa, BK virus
GKIFCNFY

SEQ ID NO: 17055 - protein, 8 aa, BK virus
YYILFNST

SEQ ID NO: 17056 - protein, 8 aa, BK virus
FLSKAVYL

SEQ ID NO: 17057 - protein, 8 aa, BK virus
RSIPYYRR

SEQ ID NO: 17058 - protein, 8 aa, BK virus
SIPYYRRK

SEQ ID NO: 17059 - protein, 8 aa, BK virus
IPYYRRKH

SEQ ID NO: 17060 - protein, 8 aa, BK virus
PYYRRKHS

SEQ ID NO: 17061 - protein, 8 aa, BK virus
YYRRKHSR

SEQ ID NO: 17062 - protein, 8 aa, BK virus
YRRKHSRG

SEQ ID NO: 17063 - protein, 8 aa, BK virus
RRKHSRGL

SEQ ID NO: 17064 - protein, 8 aa, BK virus
RKHSRGLK

SEQ ID NO: 17065 - protein, 8 aa, BK virus
KHSRGLKG

SEQ ID NO: 17066 - protein, 8 aa, BK virus
HSRGLKGA

SEQ ID NO: 17067 - protein, 8 aa, BK virus
RNKAGVLE

SEQ ID NO: 17068 - protein, 8 aa, BK virus
NKAGVLEI

SEQ ID NO: 17069 - protein, 8 aa, BK virus
KAGVLEIN

SEQ ID NO: 17070 - protein, 8 aa, BK virus
AGVLEINY

SEQ ID NO: 17071 - protein, 8 aa, BK virus
GCVFIIRY

SEQ ID NO: 17072 - protein, 8 aa, BK virus
CVFIIRYV

SEQ ID NO: 17073 - protein, 8 aa, BK virus
VFIIRYVF

SEQ ID NO: 17074 - protein, 8 aa, BK virus
FIIRYVFR

SEQ ID NO: 17075 - protein, 8 aa, BK virus
IIRYVFRI

SEQ ID NO: 17076 - protein, 8 aa, BK virus
IRYVFRIS

SEQ ID NO: 17077 - protein, 8 aa, BK virus
RYVFRISI

SEQ ID NO: 17078 - protein, 8 aa, BK virus
YVFRISIQ

SEQ ID NO: 17079 - protein, 8 aa, BK virus
VFRISIQC

SEQ ID NO: 17080 - protein, 8 aa, BK virus
FRISIQCR

SEQ ID NO: 17081 - protein, 8 aa, BK virus
RISIQCRG

SEQ ID NO: 17082 - protein, 8 aa, BK virus
ISIQCRGV

SEQ ID NO: 17083 - protein, 8 aa, BK virus
KVSEKRPA

SEQ ID NO: 17084 - protein, 8 aa, BK virus
VSEKRPAL

SEQ ID NO: 17085 - protein, 8 aa, BK virus
SEKRPALS

SEQ ID NO: 17086 - protein, 8 aa, BK virus
EKRPALSL

SEQ ID NO: 17087 - protein, 8 aa, BK virus
KALCKCYY

SEQ ID NO: 17088 - protein, 8 aa, BK virus
ALCKCYYF

SEQ ID NO: 17089 - protein, 8 aa, BK virus
LCKCYYFC

SEQ ID NO: 17090 - protein, 8 aa, BK virus
CKCYYFCR

SEQ ID NO: 17091 - protein, 8 aa, BK virus
KCYYFCRK

SEQ ID NO: 17092 - protein, 8 aa, BK virus
KSKKYLSA

SEQ ID NO: 17093 - protein, 8 aa, BK virus
SKKYLSAS

SEQ ID NO: 17094 - protein, 8 aa, BK virus
KKYLSASS

SEQ ID NO: 17095 - protein, 8 aa, BK virus
KYLSASSR

SEQ ID NO: 17096 - protein, 8 aa, BK virus
YLSASSRY

SEQ ID NO: 17097 - protein, 8 aa, BK virus
LSASSRYS

SEQ ID NO: 17098 - protein, 8 aa, BK virus
SASSRYSF

SEQ ID NO: 17099 - protein, 8 aa, BK virus
ASSRYSFS

SEQ ID NO: 17100 - protein, 8 aa, BK virus
KKSRYPSY

SEQ ID NO: 17101 - protein, 8 aa, BK virus
KSRYPSYD

SEQ ID NO: 17102 - protein, 8 aa, BK virus
SRYPSYDQ

SEQ ID NO: 17103 - protein, 8 aa, BK virus
RYPSYDQG

SEQ ID NO: 17104 - protein, 8 aa, BK virus
YPSYDQGR

SEQ ID NO: 17105 - protein, 8 aa, BK virus
PSYDQGRN

SEQ ID NO: 17106 - protein, 8 aa, BK virus
SYDQGRNA

SEQ ID NO: 17107 - protein, 8 aa, BK virus
YDQGRNAN

SEQ ID NO: 17108 - protein, 8 aa, BK virus
DQGRNANR

SEQ ID NO: 17109 - protein, 8 aa, BK virus
QGRNANRK

SEQ ID NO: 17110 - protein, 8 aa, BK virus
GRNANRKI

SEQ ID NO: 17111 - protein, 8 aa, BK virus
RNANRKIQ

SEQ ID NO: 17112 - protein, 8 aa, BK virus
NANRKIQS

SEQ ID NO: 17113 - protein, 8 aa, BK virus
ANRKIQSY

SEQ ID NO: 17114 - protein, 8 aa, BK virus
NRKIQSYI

SEQ ID NO: 17115 - protein, 8 aa, BK virus
RKIQSYIR

SEQ ID NO: 17116 - protein, 8 aa, BK virus
NGFNIWSS

SEQ ID NO: 17117 - protein, 8 aa, BK virus
GFNIWSSW

SEQ ID NO: 17118 - protein, 8 aa, BK virus
FNIWSSWK

SEQ ID NO: 17119 - protein, 8 aa, BK virus
NIWSSWKC

SEQ ID NO: 17120 - protein, 8 aa, BK virus
IWSSWKCC

SEQ ID NO: 17121 - protein, 8 aa, BK virus
WSSWKCCT

SEQ ID NO: 17122 - protein, 8 aa, BK virus
SSWKCCTR

SEQ ID NO: 17123 - protein, 8 aa, BK virus
SWKCCTRT

SEQ ID NO: 17124 - protein, 8 aa, BK virus
WKCCTRTI

SEQ ID NO: 17125 - protein, 8 aa, BK virus
KCCTRTIY

SEQ ID NO: 17126 - protein, 8 aa, BK virus
CCTRTIYG

SEQ ID NO: 17127 - protein, 8 aa, BK virus
CTRTIYGR

SEQ ID NO: 17128 - protein, 8 aa, BK virus
TRTIYGRC

SEQ ID NO: 17129 - protein, 8 aa, BK virus
RTIYGRCC

SEQ ID NO: 17130 - protein, 8 aa, BK virus
TIYGRCCL

SEQ ID NO: 17131 - protein, 8 aa, BK virus
IYGRCCLA

SEQ ID NO: 17132 - protein, 8 aa, BK virus
YGRCCLAA

SEQ ID NO: 17133 - protein, 8 aa, BK virus
GRCCLAAL

SEQ ID NO: 17134 - protein, 8 aa, BK virus
RCCLAALF

SEQ ID NO: 17135 - protein, 8 aa, BK virus
CCLAALFA

SEQ ID NO: 17136 - protein, 8 aa, BK virus
CLAALFAT

SEQ ID NO: 17137 - protein, 8 aa, BK virus
FFALYCFQ

SEQ ID NO: 17138 - protein, 8 aa, BK virus
FALYCFQC

SEQ ID NO: 17139 - protein, 8 aa, BK virus
ALYCFQCT

SEQ ID NO: 17140 - protein, 8 aa, BK virus
WKNNTSCR

SEQ ID NO: 17141 - protein, 8 aa, BK virus
KNNTSCRV

SEQ ID NO: 17142 - protein, 8 aa, BK virus
NNTSCRVI

SEQ ID NO: 17143 - protein, 8 aa, BK virus
NTSCRVIR

SEQ ID NO: 17144 - protein, 8 aa, BK virus
TSCRVIRF

SEQ ID NO: 17145 - protein, 8 aa, BK virus
SCRVIRFV

SEQ ID NO: 17146 - protein, 8 aa, BK virus
CRVIRFVW

SEQ ID NO: 17147 - protein, 8 aa, BK virus
RVIRFVWW

SEQ ID NO: 17148 - protein, 8 aa, BK virus
SLKCKPTH

SEQ ID NO: 17149 - protein, 8 aa, BK virus
LKCKPTHG

SEQ ID NO: 17150 - protein, 8 aa, BK virus
KCKPTHGK

SEQ ID NO: 17151 - protein, 8 aa, BK virus
CKPTHGKA

SEQ ID NO: 17152 - protein, 8 aa, BK virus
KPTHGKAN

SEQ ID NO: 17153 - protein, 8 aa, BK virus
PTHGKANL

SEQ ID NO: 17154 - protein, 8 aa, BK virus
ARCSYRSV

SEQ ID NO: 17155 - protein, 8 aa, BK virus
RCSYRSVH

SEQ ID NO: 17156 - protein, 8 aa, BK virus
CSYRSVHG

SEQ ID NO: 17157 - protein, 8 aa, BK virus
SYRSVHGC

SEQ ID NO: 17158 - protein, 8 aa, BK virus
YRSVHGCF

SEQ ID NO: 17159 - protein, 8 aa, BK virus
IKGFAFRT

SEQ ID NO: 17160 - protein, 8 aa, BK virus
KGFAFRTW

SEQ ID NO: 17161 - protein, 8 aa, BK virus
GFAFRTWN

SEQ ID NO: 17162 - protein, 8 aa, BK virus
FAFRTWNK

SEQ ID NO: 17163 - protein, 8 aa, BK virus
AFRTWNKQ

SEQ ID NO: 17164 - protein, 8 aa, BK virus
FRTWNKQF

SEQ ID NO: 17165 - protein, 8 aa, BK virus
RTWNKQFR

SEQ ID NO: 17166 - protein, 8 aa, BK virus
TWNKQFRQ

SEQ ID NO: 17167 - protein, 8 aa, BK virus
WNKQFRQF

SEQ ID NO: 17168 - protein, 8 aa, BK virus
NKQFRQFE

SEQ ID NO: 17169 - protein, 8 aa, BK virus
KQFRQFER

SEQ ID NO: 17170 - protein, 8 aa, BK virus
QFRQFERL

SEQ ID NO: 17171 - protein, 8 aa, BK virus
FRQFERLF

SEQ ID NO: 17172 - protein, 8 aa, BK virus
RQFERLFR

SEQ ID NO: 17173 - protein, 8 aa, BK virus
QFERLFRW

SEQ ID NO: 17174 - protein, 8 aa, BK virus
FERLFRWK

SEQ ID NO: 17175 - protein, 8 aa, BK virus
ERLFRWKC

SEQ ID NO: 17176 - protein, 8 aa, BK virus
GKFRKETF

SEQ ID NO: 17177 - protein, 8 aa, BK virus
KFRKETFK

SEQ ID NO: 17178 - protein, 8 aa, BK virus
FRKETFKQ

SEQ ID NO: 17179 - protein, 8 aa, BK virus
RKETFKQK

SEQ ID NO: 17180 - protein, 8 aa, BK virus
KETFKQKN

SEQ ID NO: 17181 - protein, 8 aa, BK virus
ETFKQKNP

SEQ ID NO: 17182 - protein, 8 aa, BK virus
TFKQKNPN

SEQ ID NO: 17183 - protein, 8 aa, BK virus
FKQKNPNI

SEQ ID NO: 17184 - protein, 8 aa, BK virus
KQKNPNIS

SEQ ID NO: 17185 - protein, 8 aa, BK virus
QKNPNIST

SEQ ID NO: 17186 - protein, 8 aa, BK virus
KNPNISTR

SEQ ID NO: 17187 - protein, 8 aa, BK virus
NPNISTRL

SEQ ID NO: 17188 - protein, 8 aa, BK virus
PNISTRLG

SEQ ID NO: 17189 - protein, 8 aa, BK virus
NISTRLGY

SEQ ID NO: 17190 - protein, 8 aa, BK virus
ISTRLGYN

SEQ ID NO: 17191 - protein, 8 aa, BK virus
STRLGYNE

SEQ ID NO: 17192 - protein, 8 aa, BK virus
AQNIFKKI

SEQ ID NO: 17193 - protein, 8 aa, BK virus
QNIFKKIL

SEQ ID NO: 17194 - protein, 8 aa, BK virus
NIFKKILT

SEQ ID NO: 17195 - protein, 8 aa, BK virus
IFKKILTK

SEQ ID NO: 17196 - protein, 8 aa, BK virus
FKKILTKL

SEQ ID NO: 17197 - protein, 8 aa, BK virus
KKILTKLR

SEQ ID NO: 17198 - protein, 8 aa, BK virus
KILTKLRV

SEQ ID NO: 17199 - protein, 8 aa, BK virus
ILTKLRVL

SEQ ID NO: 17200 - protein, 8 aa, BK virus
LTKLRVLT

SEQ ID NO: 17201 - protein, 8 aa, BK virus
KKNFTKWN

SEQ ID NO: 17202 - protein, 8 aa, BK virus
KNFTKWND

SEQ ID NO: 17203 - protein, 8 aa, BK virus
NFTKWNDL

SEQ ID NO: 17204 - protein, 8 aa, BK virus
FTKWNDLV

SEQ ID NO: 17205 - protein, 8 aa, BK virus
TKWNDLVA

SEQ ID NO: 17206 - protein, 8 aa, BK virus
KWNDLVAT

SEQ ID NO: 17207 - protein, 8 aa, BK virus
WNDLVATA

SEQ ID NO: 17208 - protein, 8 aa, BK virus
NDLVATAN

SEQ ID NO: 17209 - protein, 8 aa, BK virus
DLVATANL

SEQ ID NO: 17210 - protein, 8 aa, BK virus
LVATANLV

SEQ ID NO: 17211 - protein, 8 aa, BK virus
DKYVYFFK

SEQ ID NO: 17212 - protein, 8 aa, BK virus
KYVYFFKD

SEQ ID NO: 17213 - protein, 8 aa, BK virus
YVYFFKDE

SEQ ID NO: 17214 - protein, 8 aa, BK virus
VYFFKDEI

SEQ ID NO: 17215 - protein, 8 aa, BK virus
YMHGEMYS

SEQ ID NO: 17216 - protein, 8 aa, BK virus
YYKRRGFR

SEQ ID NO: 17217 - protein, 8 aa, BK virus
YKRRGFRN

SEQ ID NO: 17218 - protein, 8 aa, BK virus
RLWTWIKH

SEQ ID NO: 17219 - protein, 8 aa, BK virus
IPITMLFP

SEQ ID NO: 17220 - protein, 8 aa, BK virus
PITMLFPS

SEQ ID NO: 17221 - protein, 8 aa, BK virus
ITMLFPSL

SEQ ID NO: 17222 - protein, 8 aa, BK virus
TMLFPSLR

SEQ ID NO: 17223 - protein, 8 aa, BK virus
MLFPSLRY

SEQ ID NO: 17224 - protein, 8 aa, BK virus
LFPSLRYF

SEQ ID NO: 17225 - protein, 8 aa, BK virus
FPSLRYFS

SEQ ID NO: 17226 - protein, 8 aa, BK virus
PSLRYFSP

SEQ ID NO: 17227 - protein, 8 aa, BK virus
SLRYFSPC

SEQ ID NO: 17228 - protein, 8 aa, BK virus
RFPKVRPP

SEQ ID NO: 17229 - protein, 8 aa, BK virus
NTTPKITQ

SEQ ID NO: 17230 - protein, 8 aa, BK virus
TTPKITQA

SEQ ID NO: 17231 - protein, 8 aa, BK virus
KWLIQKQH

SEQ ID NO: 17232 - protein, 8 aa, BK virus
WLIQKQHL

SEQ ID NO: 17233 - protein, 8 aa, BK virus
LIQKQHLL

SEQ ID NO: 17234 - protein, 8 aa, BK virus
IQKQHLLN

SEQ ID NO: 17235 - protein, 8 aa, BK virus
QKQHLLNV

SEQ ID NO: 17236 - protein, 8 aa, BK virus
KQHLLNVY

SEQ ID NO: 17237 - protein, 8 aa, BK virus
QHLLNVYV

SEQ ID NO: 17238 - protein, 8 aa, BK virus
HLLNVYVQ

SEQ ID NO: 17239 - protein, 8 aa, BK virus
KHLFKAFW

SEQ ID NO: 17240 - protein, 8 aa, BK virus
HLFKAFWF

SEQ ID NO: 17241 - protein, 8 aa, BK virus
LFKAFWFA

SEQ ID NO: 17242 - protein, 8 aa, BK virus
FKAFWFAI

SEQ ID NO: 17243 - protein, 8 aa, BK virus
KAFWFAIV

SEQ ID NO: 17244 - protein, 8 aa, BK virus
AFWFAIVP

SEQ ID NO: 17245 - protein, 8 aa, BK virus
FWFAIVPV

SEQ ID NO: 17246 - protein, 8 aa, BK virus
WFAIVPVC

SEQ ID NO: 17247 - protein, 8 aa, BK virus
FAIVPVCQ

SEQ ID NO: 17248 - protein, 8 aa, BK virus
AIVPVCQY

SEQ ID NO: 17249 - protein, 8 aa, BK virus
IVPVCQYI

SEQ ID NO: 17250 - protein, 8 aa, BK virus
VPVCQYIL

SEQ ID NO: 17251 - protein, 8 aa, BK virus
PVCQYILS

SEQ ID NO: 17252 - protein, 8 aa, BK virus
VCQYILSY

SEQ ID NO: 17253 - protein, 8 aa, BK virus
CQYILSYL

SEQ ID NO: 17254 - protein, 8 aa, BK virus
QYILSYLG

SEQ ID NO: 17255 - protein, 8 aa, BK virus
YILSYLGP

SEQ ID NO: 17256 - protein, 8 aa, BK virus
ILSYLGPL

SEQ ID NO: 17257 - protein, 8 aa, BK virus
LSYLGPLE

SEQ ID NO: 17258 - protein, 8 aa, BK virus
SYLGPLEV

SEQ ID NO: 17259 - protein, 8 aa, BK virus
YLGPLEVF

SEQ ID NO: 17260 - protein, 8 aa, BK virus
LGPLEVFL

SEQ ID NO: 17261 - protein, 8 aa, BK virus
GPLEVFLC

SEQ ID NO: 17262 - protein, 8 aa, BK virus
PLEVFLCH

SEQ ID NO: 17263 - protein, 8 aa, BK virus
LEVFLCHQ

SEQ ID NO: 17264 - protein, 8 aa, BK virus
EVFLCHQT

SEQ ID NO: 17265 - protein, 8 aa, BK virus
VFLCHQTP

SEQ ID NO: 17266 - protein, 8 aa, BK virus
PLLPGIPY

SEQ ID NO: 17267 - protein, 8 aa, BK virus
LLPGIPYH

SEQ ID NO: 17268 - protein, 8 aa, BK virus
LPGIPYHT

SEQ ID NO: 17269 - protein, 8 aa, BK virus
AAHPLSGF

SEQ ID NO: 17270 - protein, 8 aa, BK virus
AHPLSGFS

SEQ ID NO: 17271 - protein, 8 aa, BK virus
HPLSGFSC

SEQ ID NO: 17272 - protein, 8 aa, BK virus
PLSGFSCL

SEQ ID NO: 17273 - protein, 8 aa, BK virus
GHLAKRKL

SEQ ID NO: 17274 - protein, 8 aa, BK virus
HLAKRKLG

SEQ ID NO: 17275 - protein, 8 aa, BK virus
LAKRKLGK

SEQ ID NO: 17276 - protein, 8 aa, BK virus
AKRKLGKD

SEQ ID NO: 17277 - protein, 8 aa, BK virus
KRKLGKDS

SEQ ID NO: 17278 - protein, 8 aa, BK virus
RKLGKDSL

SEQ ID NO: 17279 - protein, 8 aa, BK virus
KLGKDSLQ

SEQ ID NO: 17280 - protein, 8 aa, BK virus
LGKDSLQI

SEQ ID NO: 17281 - protein, 8 aa, BK virus
GKDSLQIF

SEQ ID NO: 17282 - protein, 8 aa, BK virus
KDSLQIFF

SEQ ID NO: 17283 - protein, 8 aa, BK virus
DSLQIFFS

SEQ ID NO: 17284 - protein, 8 aa, BK virus
SLQIFFSG

SEQ ID NO: 17285 - protein, 8 aa, BK virus
LQIFFSGG

SEQ ID NO: 17286 - protein, 8 aa, BK virus
QIFFSGGS

SEQ ID NO: 17287 - protein, 8 aa, BK virus
NILQGLST

SEQ ID NO: 17288 - protein, 8 aa, BK virus
ILQGLSTV

SEQ ID NO: 17289 - protein, 8 aa, BK virus
LQGLSTVV

SEQ ID NO: 17290 - protein, 8 aa, BK virus
QGLSTVVF

SEQ ID NO: 17291 - protein, 8 aa, BK virus
GLSTVVFQ

SEQ ID NO: 17292 - protein, 8 aa, BK virus
LSTVVFQS

SEQ ID NO: 17293 - protein, 8 aa, BK virus
STVVFQSC

SEQ ID NO: 17294 - protein, 8 aa, BK virus
TGHKYQQL

SEQ ID NO: 17295 - protein, 8 aa, BK virus
GHKYQQLK

SEQ ID NO: 17296 - protein, 8 aa, BK virus
HKYQQLKH

SEQ ID NO: 17297 - protein, 8 aa, BK virus
KYQQLKHT

SEQ ID NO: 17298 - protein, 8 aa, BK virus
YQQLKHTG

SEQ ID NO: 17299 - protein, 8 aa, BK virus
QQLKHTGY

SEQ ID NO: 17300 - protein, 8 aa, BK virus
QLKHTGYQ

SEQ ID NO: 17301 - protein, 8 aa, BK virus
LKHTGYQL

SEQ ID NO: 17302 - protein, 8 aa, BK virus
KHTGYQLY

SEQ ID NO: 17303 - protein, 8 aa, BK virus
HTGYQLYK

SEQ ID NO: 17304 - protein, 8 aa, BK virus
TGYQLYKE

SEQ ID NO: 17305 - protein, 8 aa, BK virus
GYQLYKEA

SEQ ID NO: 17306 - protein, 8 aa, BK virus
YQLYKEAP

SEQ ID NO: 17307 - protein, 8 aa, BK virus
QLYKEAPH

SEQ ID NO: 17308 - protein, 8 aa, BK virus
LYKEAPHP

SEQ ID NO: 17309 - protein, 8 aa, BK virus
YKEAPHPV

SEQ ID NO: 17310 - protein, 8 aa, BK virus
KEAPHPVH

SEQ ID NO: 17311 - protein, 8 aa, BK virus
EAPHPVHL

SEQ ID NO: 17312 - protein, 8 aa, BK virus
APHPVHLA

SEQ ID NO: 17313 - protein, 8 aa, BK virus
PHPVHLAT

SEQ ID NO: 17314 - protein, 8 aa, BK virus
HPVHLATL

SEQ ID NO: 17315 - protein, 8 aa, BK virus
PVHLATLW

SEQ ID NO: 17316 - protein, 8 aa, BK virus
LCWSHEVL

SEQ ID NO: 17317 - protein, 8 aa, BK virus
CWSHEVLG

SEQ ID NO: 17318 - protein, 8 aa, BK virus
WSHEVLGE

SEQ ID NO: 17319 - protein, 8 aa, BK virus
SHEVLGEH

SEQ ID NO: 17320 - protein, 8 aa, BK virus
HEVLGEHF

SEQ ID NO: 17321 - protein, 8 aa, BK virus
EVLGEHFP

SEQ ID NO: 17322 - protein, 8 aa, BK virus
VLGEHFPL

SEQ ID NO: 17323 - protein, 8 aa, BK virus
LGEHFPLL

SEQ ID NO: 17324 - protein, 8 aa, BK virus
HFHFYWDQ

SEQ ID NO: 17325 - protein, 8 aa, BK virus
FHFYWDQV

SEQ ID NO: 17326 - protein, 8 aa, BK virus
HFYWDQVP

SEQ ID NO: 17327 - protein, 8 aa, BK virus
FYWDQVPS

SEQ ID NO: 17328 - protein, 8 aa, BK virus
YWDQVPST

SEQ ID NO: 17329 - protein, 8 aa, BK virus
WDQVPSTQ

SEQ ID NO: 17330 - protein, 8 aa, BK virus
DQVPSTQL

SEQ ID NO: 17331 - protein, 8 aa, BK virus
QVPSTQLD

SEQ ID NO: 17332 - protein, 8 aa, BK virus
VPSTQLDK

SEQ ID NO: 17333 - protein, 8 aa, BK virus
PSTQLDKH

SEQ ID NO: 17334 - protein, 8 aa, BK virus
STQLDKHC

SEQ ID NO: 17335 - protein, 8 aa, BK virus
TQLDKHCF

SEQ ID NO: 17336 - protein, 8 aa, BK virus
QLDKHCFC

SEQ ID NO: 17337 - protein, 8 aa, BK virus
LDKHCFCP

SEQ ID NO: 17338 - protein, 8 aa, BK virus
DKHCFCPN

SEQ ID NO: 17339 - protein, 8 aa, BK virus
KHCFCPNR

SEQ ID NO: 17340 - protein, 8 aa, BK virus
HCFCPNRP

SEQ ID NO: 17341 - protein, 8 aa, BK virus
CFCPNRPY

SEQ ID NO: 17342 - protein, 8 aa, BK virus
FCPNRPYG

SEQ ID NO: 17343 - protein, 8 aa, BK virus
CPNRPYGQ

SEQ ID NO: 17344 - protein, 8 aa, BK virus
PNRPYGQY

SEQ ID NO: 17345 - protein, 8 aa, BK virus
NRPYGQYS

SEQ ID NO: 17346 - protein, 8 aa, BK virus
RPYGQYSL

SEQ ID NO: 17347 - protein, 8 aa, BK virus
PYGQYSLP

SEQ ID NO: 17348 - protein, 8 aa, BK virus
YGQYSLPG

SEQ ID NO: 17349 - protein, 8 aa, BK virus
GQYSLPGT

SEQ ID NO: 17350 - protein, 8 aa, BK virus
QYSLPGTG

SEQ ID NO: 17351 - protein, 8 aa, BK virus
YSLPGTGL

SEQ ID NO: 17352 - protein, 8 aa, BK virus
SLPGTGLL

SEQ ID NO: 17353 - protein, 8 aa, BK virus
LPGTGLLG

SEQ ID NO: 17354 - protein, 8 aa, BK virus
PGTGLLGF

SEQ ID NO: 17355 - protein, 8 aa, BK virus
YHQGTLTC

SEQ ID NO: 17356 - protein, 8 aa, BK virus
HQGTLTCN

SEQ ID NO: 17357 - protein, 8 aa, BK virus
QGTLTCNS

SEQ ID NO: 17358 - protein, 8 aa, BK virus
GTLTCNSL

SEQ ID NO: 17359 - protein, 8 aa, BK virus
TLTCNSLA

SEQ ID NO: 17360 - protein, 8 aa, BK virus
LTCNSLAL

SEQ ID NO: 17361 - protein, 8 aa, BK virus
TCNSLALP

SEQ ID NO: 17362 - protein, 8 aa, BK virus
CNSLALPA

SEQ ID NO: 17363 - protein, 8 aa, BK virus
NSLALPAF

SEQ ID NO: 17364 - protein, 8 aa, BK virus
SLALPAFP

SEQ ID NO: 17365 - protein, 8 aa, BK virus
LALPAFPR

SEQ ID NO: 17366 - protein, 8 aa, BK virus
ALPAFPRV

SEQ ID NO: 17367 - protein, 8 aa, BK virus
LPAFPRVL

SEQ ID NO: 17368 - protein, 8 aa, BK virus
PAFPRVLH

SEQ ID NO: 17369 - protein, 8 aa, BK virus
AFPRVLHL

SEQ ID NO: 17370 - protein, 8 aa, BK virus
FPRVLHLQ

SEQ ID NO: 17371 - protein, 8 aa, BK virus
PRVLHLQQ

SEQ ID NO: 17372 - protein, 8 aa, BK virus
RVLHLQQR

SEQ ID NO: 17373 - protein, 8 aa, BK virus
VLHLQQRS

SEQ ID NO: 17374 - protein, 8 aa, BK virus
LHLQQRSG

SEQ ID NO: 17375 - protein, 8 aa, BK virus
HLQQRSGN

SEQ ID NO: 17376 - protein, 8 aa, BK virus
LQQRSGNY

SEQ ID NO: 17377 - protein, 8 aa, BK virus
QQRSGNYC

SEQ ID NO: 17378 - protein, 8 aa, BK virus
QRSGNYCL

SEQ ID NO: 17379 - protein, 8 aa, BK virus
RSGNYCLE

SEQ ID NO: 17380 - protein, 8 aa, BK virus
VFLHHAHA

SEQ ID NO: 17381 - protein, 8 aa, BK virus
FLHHAHAL

SEQ ID NO: 17382 - protein, 8 aa, BK virus
LHHAHALF

SEQ ID NO: 17383 - protein, 8 aa, BK virus
HHAHALFV

SEQ ID NO: 17384 - protein, 8 aa, BK virus
HAHALFVT

SEQ ID NO: 17385 - protein, 8 aa, BK virus
AHALFVTL

SEQ ID NO: 17386 - protein, 8 aa, BK virus
HALFVTLH

SEQ ID NO: 17387 - protein, 8 aa, BK virus
ALFVTLHE

SEQ ID NO: 17388 - protein, 8 aa, BK virus
LFVTLHEG

SEQ ID NO: 17389 - protein, 8 aa, BK virus
PLFVQLQP

SEQ ID NO: 17390 - protein, 8 aa, BK virus
LFVQLQPP

SEQ ID NO: 17391 - protein, 8 aa, BK virus
FVQLQPPT

SEQ ID NO: 17392 - protein, 8 aa, BK virus
VQLQPPTS

SEQ ID NO: 17393 - protein, 8 aa, BK virus
QLQPPTSV

SEQ ID NO: 17394 - protein, 8 aa, BK virus
LQPPTSVD

SEQ ID NO: 17395 - protein, 8 aa, BK virus
QPPTSVDF

SEQ ID NO: 17396 - protein, 8 aa, BK virus
PPTSVDFH

SEQ ID NO: 17397 - protein, 8 aa, BK virus
PTSVDFHR

SEQ ID NO: 17398 - protein, 8 aa, BK virus
TSVDFHRL

SEQ ID NO: 17399 - protein, 8 aa, BK virus
SVDFHRLG

SEQ ID NO: 17400 - protein, 8 aa, BK virus
VDFHRLGP

SEQ ID NO: 17401 - protein, 8 aa, BK virus
DFHRLGPH

SEQ ID NO: 17402 - protein, 8 aa, BK virus
FHRLGPHL

SEQ ID NO: 17403 - protein, 8 aa, BK virus
HRLGPHLN

SEQ ID NO: 17404 - protein, 8 aa, BK virus
RLGPHLNW

SEQ ID NO: 17405 - protein, 8 aa, BK virus
LGPHLNWG

SEQ ID NO: 17406 - protein, 8 aa, BK virus
GPHLNWGG

SEQ ID NO: 17407 - protein, 8 aa, BK virus
PHLNWGGE

SEQ ID NO: 17408 - protein, 8 aa, BK virus
HLNWGGEF

SEQ ID NO: 17409 - protein, 8 aa, BK virus
LNWGGEFL

SEQ ID NO: 17410 - protein, 8 aa, BK virus
NWGGEFLL

SEQ ID NO: 17411 - protein, 8 aa, BK virus
WGGEFLLC

SEQ ID NO: 17412 - protein, 8 aa, BK virus
GGEFLLCC

SEQ ID NO: 17413 - protein, 8 aa, BK virus
GEFLLCCN

SEQ ID NO: 17414 - protein, 8 aa, BK virus
EFLLCCNR

SEQ ID NO: 17415 - protein, 8 aa, BK virus
FLLCCNRE

SEQ ID NO: 17416 - protein, 8 aa, BK virus
LLCCNREA

SEQ ID NO: 17417 - protein, 8 aa, BK virus
LCCNREAF

SEQ ID NO: 17418 - protein, 8 aa, BK virus
CCNREAFF

SEQ ID NO: 17419 - protein, 8 aa, BK virus
CNREAFFS

SEQ ID NO: 17420 - protein, 8 aa, BK virus
NREAFFSL

SEQ ID NO: 17421 - protein, 8 aa, BK virus
REAFFSLG

SEQ ID NO: 17422 - protein, 8 aa, BK virus
EAFFSLGY

SEQ ID NO: 17423 - protein, 8 aa, BK virus
AFFSLGYH

SEQ ID NO: 17424 - protein, 8 aa, BK virus
FFSLGYHC

SEQ ID NO: 17425 - protein, 8 aa, BK virus
SHFQHLAL

SEQ ID NO: 17426 - protein, 8 aa, BK virus
HFQHLALD

SEQ ID NO: 17427 - protein, 8 aa, BK virus
GFHLDPPF

SEQ ID NO: 17428 - protein, 8 aa, BK virus
FHLDPPFL

SEQ ID NO: 17429 - protein, 8 aa, BK virus
HLDPPFLG

SEQ ID NO: 17430 - protein, 8 aa, BK virus
LDPPFLGL

SEQ ID NO: 17431 - protein, 8 aa, BK virus
DPPFLGLG

SEQ ID NO: 17432 - protein, 8 aa, BK virus
PPFLGLGS

SEQ ID NO: 17433 - protein, 8 aa, BK virus
PFLGLGSI

SEQ ID NO: 17434 - protein, 8 aa, BK virus
FLGLGSIL

SEQ ID NO: 17435 - protein, 8 aa, BK virus
LGLGSILP

SEQ ID NO: 17436 - protein, 8 aa, BK virus
GLGSILPL

SEQ ID NO: 17437 - protein, 8 aa, BK virus
LLELLLLL

SEQ ID NO: 17438 - protein, 8 aa, BK virus
LELLLLLL

SEQ ID NO: 17439 - protein, 8 aa, BK virus
ELLLLLLL

SEQ ID NO: 17440 - protein, 8 aa, BK virus
LLLLLLLV

SEQ ID NO: 17441 - protein, 8 aa, BK virus
LLLLLLVV

SEQ ID NO: 17442 - protein, 8 aa, BK virus
LLLLLVVL

SEQ ID NO: 17443 - protein, 8 aa, BK virus
LLLLVVLA

SEQ ID NO: 17444 - protein, 8 aa, BK virus
LLLVVLAL

SEQ ID NO: 17445 - protein, 8 aa, BK virus
LLVVLALA

SEQ ID NO: 17446 - protein, 8 aa, BK virus
LVVLALAR

SEQ ID NO: 17447 - protein, 8 aa, BK virus
VVLALARV

SEQ ID NO: 17448 - protein, 8 aa, BK virus
VLALARVP

SEQ ID NO: 17449 - protein, 8 aa, BK virus
LALARVPL

SEQ ID NO: 17450 - protein, 8 aa, BK virus
ALARVPLA

SEQ ID NO: 17451 - protein, 8 aa, BK virus
LARVPLAF

SEQ ID NO: 17452 - protein, 8 aa, BK virus
ARVPLAFW

SEQ ID NO: 17453 - protein, 8 aa, BK virus
RVPLAFWE

SEQ ID NO: 17454 - protein, 8 aa, BK virus
VPLAFWEL

SEQ ID NO: 17455 - protein, 8 aa, BK virus
PLAFWELP

SEQ ID NO: 17456 - protein, 8 aa, BK virus
LAFWELPL

SEQ ID NO: 17457 - protein, 8 aa, BK virus
AFWELPLD

SEQ ID NO: 17458 - protein, 8 aa, BK virus
FWELPLDT

SEQ ID NO: 17459 - protein, 8 aa, BK virus
WELPLDTL

SEQ ID NO: 17460 - protein, 8 aa, BK virus
ELPLDTLL

SEQ ID NO: 17461 - protein, 8 aa, BK virus
LPLDTLLF

SEQ ID NO: 17462 - protein, 8 aa, BK virus
PLDTLLFF

SEQ ID NO: 17463 - protein, 8 aa, BK virus
LDTLLFFW

SEQ ID NO: 17464 - protein, 8 aa, BK virus
DTLLFFWL

SEQ ID NO: 17465 - protein, 8 aa, BK virus
TLLFFWLG

SEQ ID NO: 17466 - protein, 8 aa, BK virus
LLFFWLGP

SEQ ID NO: 17467 - protein, 8 aa, BK virus
LFFWLGPS

SEQ ID NO: 17468 - protein, 8 aa, BK virus
FFWLGPSS

SEQ ID NO: 17469 - protein, 8 aa, BK virus
FWLGPSSY

SEQ ID NO: 17470 - protein, 8 aa, BK virus
WLGPSSYA

SEQ ID NO: 17471 - protein, 8 aa, BK virus
LGPSSYAS

SEQ ID NO: 17472 - protein, 8 aa, BK virus
GPSSYASR

SEQ ID NO: 17473 - protein, 8 aa, BK virus
PSSYASRA

SEQ ID NO: 17474 - protein, 8 aa, BK virus
SSYASRAG

SEQ ID NO: 17475 - protein, 8 aa, BK virus
SYASRAGV

SEQ ID NO: 17476 - protein, 8 aa, BK virus
YASRAGVT

SEQ ID NO: 17477 - protein, 8 aa, BK virus
ASRAGVTV

SEQ ID NO: 17478 - protein, 8 aa, BK virus
SRAGVTVP

SEQ ID NO: 17479 - protein, 8 aa, BK virus
RAGVTVPY

SEQ ID NO: 17480 - protein, 8 aa, BK virus
AGVTVPYR

SEQ ID NO: 17481 - protein, 8 aa, BK virus
GVTVPYRP

SEQ ID NO: 17482 - protein, 8 aa, BK virus
VTVPYRPR

SEQ ID NO: 17483 - protein, 8 aa, BK virus
TVPYRPRS

SEQ ID NO: 17484 - protein, 8 aa, BK virus
VPYRPRSK

SEQ ID NO: 17485 - protein, 8 aa, BK virus
PYRPRSKG

SEQ ID NO: 17486 - protein, 8 aa, BK virus
YRPRSKGN

SEQ ID NO: 17487 - protein, 8 aa, BK virus
RPRSKGNI

SEQ ID NO: 17488 - protein, 8 aa, BK virus
PRSKGNIH

SEQ ID NO: 17489 - protein, 8 aa, BK virus
LAPPGAIV

SEQ ID NO: 17490 - protein, 8 aa, BK virus
APPGAIVF

SEQ ID NO: 17491 - protein, 8 aa, BK virus
PPGAIVFS

SEQ ID NO: 17492 - protein, 8 aa, BK virus
PGAIVFSI

SEQ ID NO: 17493 - protein, 8 aa, BK virus
GAIVFSIN

SEQ ID NO: 17494 - protein, 8 aa, BK virus
AIVFSINS

SEQ ID NO: 17495 - protein, 8 aa, BK virus
IVFSINSP

SEQ ID NO: 17496 - protein, 8 aa, BK virus
VFSINSPE

SEQ ID NO: 17497 - protein, 8 aa, BK virus
FSINSPEC

SEQ ID NO: 17498 - protein, 8 aa, BK virus
SINSPECT

SEQ ID NO: 17499 - protein, 8 aa, BK virus
INSPECTL

SEQ ID NO: 17500 - protein, 8 aa, BK virus
NSPECTLC

SEQ ID NO: 17501 - protein, 8 aa, BK virus
FLKSILCV

SEQ ID NO: 17502 - protein, 8 aa, BK virus
LKSILCVT

SEQ ID NO: 17503 - protein, 8 aa, BK virus
KSILCVTS

SEQ ID NO: 17504 - protein, 8 aa, BK virus
SILCVTSS

SEQ ID NO: 17505 - protein, 8 aa, BK virus
ILCVTSSI

SEQ ID NO: 17506 - protein, 8 aa, BK virus
LCVTSSIL

SEQ ID NO: 17507 - protein, 8 aa, BK virus
CVTSSILS

SEQ ID NO: 17508 - protein, 8 aa, BK virus
VTSSILSA

SEQ ID NO: 17509 - protein, 8 aa, BK virus
TSSILSAS

SEQ ID NO: 17510 - protein, 8 aa, BK virus
SSILSASS

SEQ ID NO: 17511 - protein, 8 aa, BK virus
SILSASSI

SEQ ID NO: 17512 - protein, 8 aa, BK virus
ILSASSIL

SEQ ID NO: 17513 - protein, 8 aa, BK virus
VWPKCTRV

SEQ ID NO: 17514 - protein, 8 aa, BK virus
WPKCTRVP

SEQ ID NO: 17515 - protein, 8 aa, BK virus
PKCTRVPS

SEQ ID NO: 17516 - protein, 8 aa, BK virus
KCTRVPSL

SEQ ID NO: 17517 - protein, 8 aa, BK virus
CTRVPSLS

SEQ ID NO: 17518 - protein, 8 aa, BK virus
TRVPSLSA

SEQ ID NO: 17519 - protein, 8 aa, BK virus
RVPSLSAT

SEQ ID NO: 17520 - protein, 8 aa, BK virus
VPSLSATC

SEQ ID NO: 17521 - protein, 8 aa, BK virus
PSLSATCL

SEQ ID NO: 17522 - protein, 8 aa, BK virus
SLSATCLT

SEQ ID NO: 17523 - protein, 8 aa, BK virus
LSATCLTI

SEQ ID NO: 17524 - protein, 8 aa, BK virus
SATCLTIE

SEQ ID NO: 17525 - protein, 8 aa, BK virus
ATCLTIEG

SEQ ID NO: 17526 - protein, 8 aa, BK virus
TCLTIEGL

SEQ ID NO: 17527 - protein, 8 aa, BK virus
CLTIEGLI

SEQ ID NO: 17528 - protein, 8 aa, BK virus
LTIEGLIG

SEQ ID NO: 17529 - protein, 8 aa, BK virus
TIEGLIGE

SEQ ID NO: 17530 - protein, 8 aa, BK virus
IEGLIGER

SEQ ID NO: 17531 - protein, 8 aa, BK virus
EGLIGERS

SEQ ID NO: 17532 - protein, 8 aa, BK virus
GLIGERSE

SEQ ID NO: 17533 - protein, 8 aa, BK virus
KFIGAFTI

SEQ ID NO: 17534 - protein, 8 aa, BK virus
FIGAFTIV

SEQ ID NO: 17535 - protein, 8 aa, BK virus
IGAFTIVQ

SEQ ID NO: 17536 - protein, 8 aa, BK virus
GAFTIVQV

SEQ ID NO: 17537 - protein, 8 aa, BK virus
AFTIVQVV

SEQ ID NO: 17538 - protein, 8 aa, BK virus
FTIVQVVS

SEQ ID NO: 17539 - protein, 8 aa, BK virus
TIVQVVSS

SEQ ID NO: 17540 - protein, 8 aa, BK virus
IVQVVSSK

SEQ ID NO: 17541 - protein, 8 aa, BK virus
VQVVSSKN

SEQ ID NO: 17542 - protein, 8 aa, BK virus
QVVSSKNL

SEQ ID NO: 17543 - protein, 8 aa, BK virus
VVSSKNLA

SEQ ID NO: 17544 - protein, 8 aa, BK virus
VSSKNLAK

SEQ ID NO: 17545 - protein, 8 aa, BK virus
SSKNLAKE

SEQ ID NO: 17546 - protein, 8 aa, BK virus
SKNLAKES

SEQ ID NO: 17547 - protein, 8 aa, BK virus
KNLAKESL

SEQ ID NO: 17548 - protein, 8 aa, BK virus
NLAKESLK

SEQ ID NO: 17549 - protein, 8 aa, BK virus
LAKESLKN

SEQ ID NO: 17550 - protein, 8 aa, BK virus
AKESLKNL

SEQ ID NO: 17551 - protein, 8 aa, BK virus
KESLKNLS

SEQ ID NO: 17552 - protein, 8 aa, BK virus
ESLKNLSV

SEQ ID NO: 17553 - protein, 8 aa, BK virus
SLKNLSVL

SEQ ID NO: 17554 - protein, 8 aa, BK virus
LKNLSVLL

SEQ ID NO: 17555 - protein, 8 aa, BK virus
KNLSVLLC

SEQ ID NO: 17556 - protein, 8 aa, BK virus
NLSVLLCN

SEQ ID NO: 17557 - protein, 8 aa, BK virus
LSVLLCNS

SEQ ID NO: 17558 - protein, 8 aa, BK virus
SVLLCNSC

SEQ ID NO: 17559 - protein, 8 aa, BK virus
VLLCNSCE

SEQ ID NO: 17560 - protein, 8 aa, BK virus
LLCNSCEV

SEQ ID NO: 17561 - protein, 8 aa, BK virus
LCNSCEVI

SEQ ID NO: 17562 - protein, 8 aa, BK virus
CNSCEVIE

SEQ ID NO: 17563 - protein, 8 aa, BK virus
NSCEVIEG

SEQ ID NO: 17564 - protein, 8 aa, BK virus
SCEVIEGI

SEQ ID NO: 17565 - protein, 8 aa, BK virus
CEVIEGIS

SEQ ID NO: 17566 - protein, 8 aa, BK virus
EVIEGISS

SEQ ID NO: 17567 - protein, 8 aa, BK virus
VIEGISSL

SEQ ID NO: 17568 - protein, 8 aa, BK virus
IEGISSLI

SEQ ID NO: 17569 - protein, 8 aa, BK virus
EGISSLIT

SEQ ID NO: 17570 - protein, 8 aa, BK virus
GISSLITC

SEQ ID NO: 17571 - protein, 8 aa, BK virus
ISSLITCH

SEQ ID NO: 17572 - protein, 8 aa, BK virus
SSLITCHK

SEQ ID NO: 17573 - protein, 8 aa, BK virus
SLITCHKA

SEQ ID NO: 17574 - protein, 8 aa, BK virus
LITCHKAW

SEQ ID NO: 17575 - protein, 8 aa, BK virus
ITCHKAWE

SEQ ID NO: 17576 - protein, 8 aa, BK virus
TCHKAWEI

SEQ ID NO: 17577 - protein, 8 aa, BK virus
CHKAWEIV

SEQ ID NO: 17578 - protein, 8 aa, BK virus
HKAWEIVA

SEQ ID NO: 17579 - protein, 8 aa, BK virus
KAWEIVAN

SEQ ID NO: 17580 - protein, 8 aa, BK virus
AWEIVANK

SEQ ID NO: 17581 - protein, 8 aa, BK virus
WEIVANKE

SEQ ID NO: 17582 - protein, 8 aa, BK virus
EIVANKEG

SEQ ID NO: 17583 - protein, 8 aa, BK virus
IVANKEGP

SEQ ID NO: 17584 - protein, 8 aa, BK virus
VANKEGPQ

SEQ ID NO: 17585 - protein, 8 aa, BK virus
ANKEGPQC

SEQ ID NO: 17586 - protein, 8 aa, BK virus
NKEGPQCL

SEQ ID NO: 17587 - protein, 8 aa, BK virus
KEGPQCLG

SEQ ID NO: 17588 - protein, 8 aa, BK virus
EGPQCLGS

SEQ ID NO: 17589 - protein, 8 aa, BK virus
GPQCLGSR

SEQ ID NO: 17590 - protein, 8 aa, BK virus
PQCLGSRY

SEQ ID NO: 17591 - protein, 8 aa, BK virus
ILLTKVFT

SEQ ID NO: 17592 - protein, 8 aa, BK virus
LLTKVFTP

SEQ ID NO: 17593 - protein, 8 aa, BK virus
LTKVFTPG

SEQ ID NO: 17594 - protein, 8 aa, BK virus
TKVFTPGN

SEQ ID NO: 17595 - protein, 8 aa, BK virus
KVFTPGNR

SEQ ID NO: 17596 - protein, 8 aa, BK virus
VFTPGNRI

SEQ ID NO: 17597 - protein, 8 aa, BK virus
FTPGNRIS

SEQ ID NO: 17598 - protein, 8 aa, BK virus
YSSGLNNS

SEQ ID NO: 17599 - protein, 8 aa, BK virus
SSGLNNSK

SEQ ID NO: 17600 - protein, 8 aa, BK virus
SGLNNSKA

SEQ ID NO: 17601 - protein, 8 aa, BK virus
GLNNSKAM

SEQ ID NO: 17602 - protein, 8 aa, BK virus
LNNSKAMP

SEQ ID NO: 17603 - protein, 8 aa, BK virus
NNSKAMPD

SEQ ID NO: 17604 - protein, 8 aa, BK virus
NSKAMPDC

SEQ ID NO: 17605 - protein, 8 aa, BK virus
SQSSKNLY

SEQ ID NO: 17606 - protein, 8 aa, BK virus
QSSKNLYP

SEQ ID NO: 17607 - protein, 8 aa, BK virus
SSKNLYPT

SEQ ID NO: 17608 - protein, 8 aa, BK virus
AKELIPLT

SEQ ID NO: 17609 - protein, 8 aa, BK virus
KELIPLTV

SEQ ID NO: 17610 - protein, 8 aa, BK virus
IKAANPAI

SEQ ID NO: 17611 - protein, 8 aa, BK virus
KAANPAIA

SEQ ID NO: 17612 - protein, 8 aa, BK virus
AANPAIAP

SEQ ID NO: 17613 - protein, 8 aa, BK virus
ANPAIAPG

SEQ ID NO: 17614 - protein, 8 aa, BK virus
NPAIAPGA

SEQ ID NO: 17615 - protein, 8 aa, BK virus
PAIAPGAP

SEQ ID NO: 17616 - protein, 8 aa, BK virus
AIAPGAPA

SEQ ID NO: 17617 - protein, 8 aa, BK virus
IAPGAPAI

SEQ ID NO: 17618 - protein, 8 aa, BK virus
APGAPAIT

SEQ ID NO: 17619 - protein, 8 aa, BK virus
PGAPAITA

SEQ ID NO: 17620 - protein, 8 aa, BK virus
GAPAITAY

SEQ ID NO: 17621 - protein, 8 aa, BK virus
APAITAYV

SEQ ID NO: 17622 - protein, 8 aa, BK virus
GVRPIAAI

SEQ ID NO: 17623 - protein, 8 aa, BK virus
VRPIAAIA

SEQ ID NO: 17624 - protein, 8 aa, BK virus
RPIAAIAS

SEQ ID NO: 17625 - protein, 8 aa, BK virus
PIAAIASE

SEQ ID NO: 17626 - protein, 8 aa, BK virus
IAAIASEV

SEQ ID NO: 17627 - protein, 8 aa, BK virus
AAIASEVL

SEQ ID NO: 17628 - protein, 8 aa, BK virus
AIASEVLV

SEQ ID NO: 17629 - protein, 8 aa, BK virus
IASEVLVM

SEQ ID NO: 17630 - protein, 8 aa, BK virus
ASEVLVMP

SEQ ID NO: 17631 - protein, 8 aa, BK virus
SEVLVMPS

SEQ ID NO: 17632 - protein, 8 aa, BK virus
EVLVMPST

SEQ ID NO: 17633 - protein, 8 aa, BK virus
VLVMPSTV

SEQ ID NO: 17634 - protein, 8 aa, BK virus
LVMPSTVA

SEQ ID NO: 17635 - protein, 8 aa, BK virus
VMPSTVAR

SEQ ID NO: 17636 - protein, 8 aa, BK virus
MPSTVARD

SEQ ID NO: 17637 - protein, 8 aa, BK virus
PSTVARDA

SEQ ID NO: 17638 - protein, 8 aa, BK virus
STVARDAI

SEQ ID NO: 17639 - protein, 8 aa, BK virus
TSIAAAAS

SEQ ID NO: 17640 - protein, 8 aa, BK virus
SIAAAASP

SEQ ID NO: 17641 - protein, 8 aa, BK virus
IAAAASPA

SEQ ID NO: 17642 - protein, 8 aa, BK virus
AAAASPAA

SEQ ID NO: 17643 - protein, 8 aa, BK virus
AAASPAAI

SEQ ID NO: 17644 - protein, 8 aa, BK virus
AASPAAIS

SEQ ID NO: 17645 - protein, 8 aa, BK virus
ASPAAISA

SEQ ID NO: 17646 - protein, 8 aa, BK virus
SPAAISAT

SEQ ID NO: 17647 - protein, 8 aa, BK virus
PAAISATE

SEQ ID NO: 17648 - protein, 8 aa, BK virus
AAISATEN

SEQ ID NO: 17649 - protein, 8 aa, BK virus
AISATENP

SEQ ID NO: 17650 - protein, 8 aa, BK virus
ISATENPV

SEQ ID NO: 17651 - protein, 8 aa, BK virus
SATENPVA

SEQ ID NO: 17652 - protein, 8 aa, BK virus
ATENPVAA

SEQ ID NO: 17653 - protein, 8 aa, BK virus
TENPVAAA

SEQ ID NO: 17654 - protein, 8 aa, BK virus
ENPVAAAA

SEQ ID NO: 17655 - protein, 8 aa, BK virus
NPVAAAAS

SEQ ID NO: 17656 - protein, 8 aa, BK virus
PVAAAASD

SEQ ID NO: 17657 - protein, 8 aa, BK virus
VAAAASDT

SEQ ID NO: 17658 - protein, 8 aa, BK virus
AAAASDTL

SEQ ID NO: 17659 - protein, 8 aa, BK virus
AAASDTLA

SEQ ID NO: 17660 - protein, 8 aa, BK virus
AASDTLAT

SEQ ID NO: 17661 - protein, 8 aa, BK virus
ASDTLATR

SEQ ID NO: 17662 - protein, 8 aa, BK virus
SDTLATRS

SEQ ID NO: 17663 - protein, 8 aa, BK virus
DTLATRSP

SEQ ID NO: 17664 - protein, 8 aa, BK virus
TLATRSPK

SEQ ID NO: 17665 - protein, 8 aa, BK virus
LATRSPKS

SEQ ID NO: 17666 - protein, 8 aa, BK virus
ATRSPKSA

SEQ ID NO: 17667 - protein, 8 aa, BK virus
TRSPKSAR

SEQ ID NO: 17668 - protein, 8 aa, BK virus
RSPKSARA

SEQ ID NO: 17669 - protein, 8 aa, BK virus
SPKSARAA

SEQ ID NO: 17670 - protein, 8 aa, BK virus
PKSARAAP

SEQ ID NO: 17671 - protein, 8 aa, BK virus
KSARAAPM

SEQ ID NO: 17672 - protein, 8 aa, BK virus
SARAAPMN

SEQ ID NO: 17673 - protein, 8 aa, BK virus
ARAAPMNL

SEQ ID NO: 17674 - protein, 8 aa, BK virus
RAAPMNLE

SEQ ID NO: 17675 - protein, 8 aa, BK virus
AAPMNLEI

SEQ ID NO: 17676 - protein, 8 aa, BK virus
APMNLEIQ

SEQ ID NO: 17677 - protein, 8 aa, BK virus
PMNLEIQK

SEQ ID NO: 17678 - protein, 8 aa, BK virus
MNLEIQKK

SEQ ID NO: 17679 - protein, 8 aa, BK virus
NLEIQKKR

SEQ ID NO: 17680 - protein, 8 aa, BK virus
LEIQKKRD

SEQ ID NO: 17681 - protein, 8 aa, BK virus
EIQKKRDY

SEQ ID NO: 17682 - protein, 8 aa, BK virus
IQKKRDYL

SEQ ID NO: 17683 - protein, 8 aa, BK virus
QKKRDYLP

SEQ ID NO: 17684 - protein, 8 aa, BK virus
KKRDYLPR

SEQ ID NO: 17685 - protein, 8 aa, BK virus
KRDYLPRS

SEQ ID NO: 17686 - protein, 8 aa, BK virus
RDYLPRSL

SEQ ID NO: 17687 - protein, 8 aa, BK virus
DYLPRSLL

SEQ ID NO: 17688 - protein, 8 aa, BK virus
YLPRSLLQ

SEQ ID NO: 17689 - protein, 8 aa, BK virus
LPRSLLQS

SEQ ID NO: 17690 - protein, 8 aa, BK virus
PRSLLQSL

SEQ ID NO: 17691 - protein, 8 aa, BK virus
RSLLQSLL

SEQ ID NO: 17692 - protein, 8 aa, BK virus
SLLQSLLQ

SEQ ID NO: 17693 - protein, 8 aa, BK virus
LLQSLLQQ

SEQ ID NO: 17694 - protein, 8 aa, BK virus
LQSLLQQV

SEQ ID NO: 17695 - protein, 8 aa, BK virus
QSLLQQVK

SEQ ID NO: 17696 - protein, 8 aa, BK virus
SLLQQVKQ

SEQ ID NO: 17697 - protein, 8 aa, BK virus
LLQQVKQW

SEQ ID NO: 17698 - protein, 8 aa, BK virus
LQQVKQWY

SEQ ID NO: 17699 - protein, 8 aa, BK virus
QQVKQWYF

SEQ ID NO: 17700 - protein, 8 aa, BK virus
QVKQWYFC

SEQ ID NO: 17701 - protein, 8 aa, BK virus
VKQWYFCF

SEQ ID NO: 17702 - protein, 8 aa, BK virus
KQWYFCFS

SEQ ID NO: 17703 - protein, 8 aa, BK virus
QWYFCFSR

SEQ ID NO: 17704 - protein, 8 aa, BK virus
WYFCFSRL

SEQ ID NO: 17705 - protein, 8 aa, BK virus
YFCFSRLH

SEQ ID NO: 17706 - protein, 8 aa, BK virus
FCFSRLHC

SEQ ID NO: 17707 - protein, 8 aa, BK virus
CFSRLHCL

SEQ ID NO: 17708 - protein, 8 aa, BK virus
FSRLHCLH

SEQ ID NO: 17709 - protein, 8 aa, BK virus
SRLHCLHL

SEQ ID NO: 17710 - protein, 8 aa, BK virus
RLHCLHLY

SEQ ID NO: 17711 - protein, 8 aa, BK virus
LHCLHLYK

SEQ ID NO: 17712 - protein, 8 aa, BK virus
HCLHLYKI

SEQ ID NO: 17713 - protein, 8 aa, BK virus
CLHLYKIP

SEQ ID NO: 17714 - protein, 8 aa, BK virus
LHLYKIPA

SEQ ID NO: 17715 - protein, 8 aa, BK virus
HLYKIPAK

SEQ ID NO: 17716 - protein, 8 aa, BK virus
LYKIPAKA

SEQ ID NO: 17717 - protein, 8 aa, BK virus
YKIPAKAL

SEQ ID NO: 17718 - protein, 8 aa, BK virus
KIPAKALK

SEQ ID NO: 17719 - protein, 8 aa, BK virus
KSSELFFL

SEQ ID NO: 17720 - protein, 8 aa, BK virus
SSELFFLF

SEQ ID NO: 17721 - protein, 8 aa, BK virus
SELFFLFQ

SEQ ID NO: 17722 - protein, 8 aa, BK virus
ELFFLFQS

SEQ ID NO: 17723 - protein, 8 aa, BK virus
LFFLFQSR

SEQ ID NO: 17724 - protein, 8 aa, BK virus
FFLFQSRF

SEQ ID NO: 17725 - protein, 8 aa, BK virus
FLFQSRFY

SEQ ID NO: 17726 - protein, 8 aa, BK virus
LFQSRFYQ

SEQ ID NO: 17727 - protein, 8 aa, BK virus
FQSRFYQL

SEQ ID NO: 17728 - protein, 8 aa, BK virus
QSRFYQLS

SEQ ID NO: 17729 - protein, 8 aa, BK virus
SRFYQLSL

SEQ ID NO: 17730 - protein, 8 aa, BK virus
RFYQLSLK

SEQ ID NO: 17731 - protein, 8 aa, BK virus
FYQLSLKL

SEQ ID NO: 17732 - protein, 8 aa, BK virus
YQLSLKLV

SEQ ID NO: 17733 - protein, 8 aa, BK virus
QLSLKLVV

SEQ ID NO: 17734 - protein, 8 aa, BK virus
LSLKLVVT

SEQ ID NO: 17735 - protein, 8 aa, BK virus
SLKLVVTA

SEQ ID NO: 17736 - protein, 8 aa, BK virus
LKLVVTAG

SEQ ID NO: 17737 - protein, 8 aa, BK virus
KLVVTAGA

SEQ ID NO: 17738 - protein, 8 aa, BK virus
LVVTAGAE

SEQ ID NO: 17739 - protein, 8 aa, BK virus
VVTAGAEP

SEQ ID NO: 17740 - protein, 8 aa, BK virus
VTAGAEPW

SEQ ID NO: 17741 - protein, 8 aa, BK virus
TAGAEPWP

SEQ ID NO: 17742 - protein, 8 aa, BK virus
AGAEPWPL

SEQ ID NO: 17743 - protein, 8 aa, BK virus
GAEPWPLS

SEQ ID NO: 17744 - protein, 8 aa, BK virus
AEPWPLSS

SEQ ID NO: 17745 - protein, 8 aa, BK virus
EPWPLSSL

SEQ ID NO: 17746 - protein, 8 aa, BK virus
PWPLSSLT

SEQ ID NO: 17747 - protein, 8 aa, BK virus
WPLSSLTG

SEQ ID NO: 17748 - protein, 8 aa, BK virus
PLSSLTGD

SEQ ID NO: 17749 - protein, 8 aa, BK virus
LSSLTGDK

SEQ ID NO: 17750 - protein, 8 aa, BK virus
SSLTGDKA

SEQ ID NO: 17751 - protein, 8 aa, BK virus
SLTGDKAK

SEQ ID NO: 17752 - protein, 8 aa, BK virus
LTGDKAKI

SEQ ID NO: 17753 - protein, 8 aa, BK virus
TGDKAKIP

SEQ ID NO: 17754 - protein, 8 aa, BK virus
GDKAKIPR

SEQ ID NO: 17755 - protein, 8 aa, BK virus
DKAKIPRL

SEQ ID NO: 17756 - protein, 8 aa, BK virus
KAKIPRLA

SEQ ID NO: 17757 - protein, 8 aa, BK virus
AKIPRLAK

SEQ ID NO: 17758 - protein, 8 aa, BK virus
KIPRLAKH

SEQ ID NO: 17759 - protein, 8 aa, BK virus
IPRLAKHV

SEQ ID NO: 17760 - protein, 8 aa, BK virus
PRLAKHVC

SEQ ID NO: 17761 - protein, 8 aa, BK virus
RLAKHVCH

SEQ ID NO: 17762 - protein, 8 aa, BK virus
LAKHVCHA

SEQ ID NO: 17763 - protein, 8 aa, BK virus
AKHVCHAL

SEQ ID NO: 17764 - protein, 8 aa, BK virus
KHVCHALS

SEQ ID NO: 17765 - protein, 8 aa, BK virus
HVCHALSF

SEQ ID NO: 17766 - protein, 8 aa, BK virus
VCHALSFL

SEQ ID NO: 17767 - protein, 8 aa, BK virus
CHALSFLR

SEQ ID NO: 17768 - protein, 8 aa, BK virus
HALSFLRS

SEQ ID NO: 17769 - protein, 8 aa, BK virus
ALSFLRSW

SEQ ID NO: 17770 - protein, 8 aa, BK virus
LSFLRSWF

SEQ ID NO: 17771 - protein, 8 aa, BK virus
SFLRSWFG

SEQ ID NO: 17772 - protein, 8 aa, BK virus
FLRSWFGC

SEQ ID NO: 17773 - protein, 8 aa, BK virus
LRSWFGCI

SEQ ID NO: 17774 - protein, 8 aa, BK virus
RSWFGCIP

SEQ ID NO: 17775 - protein, 8 aa, BK virus
SWFGCIPW

SEQ ID NO: 17776 - protein, 8 aa, BK virus
WFGCIPWV

SEQ ID NO: 17777 - protein, 8 aa, BK virus
FGCIPWVS

SEQ ID NO: 17778 - protein, 8 aa, BK virus
GCIPWVSS

SEQ ID NO: 17779 - protein, 8 aa, BK virus
CIPWVSSS

SEQ ID NO: 17780 - protein, 8 aa, BK virus
IPWVSSSS

SEQ ID NO: 17781 - protein, 8 aa, BK virus
PWVSSSSL

SEQ ID NO: 17782 - protein, 8 aa, BK virus
GHGLAAFP

SEQ ID NO: 17783 - protein, 8 aa, BK virus
HGLAAFPC

SEQ ID NO: 17784 - protein, 8 aa, BK virus
GLAAFPCE

SEQ ID NO: 17785 - protein, 8 aa, BK virus
LAAFPCES

SEQ ID NO: 17786 - protein, 8 aa, BK virus
AAFPCESC

SEQ ID NO: 17787 - protein, 8 aa, BK virus
AFPCESCT

SEQ ID NO: 17788 - protein, 8 aa, BK virus
FPCESCTF

SEQ ID NO: 17789 - protein, 8 aa, BK virus
PCESCTFL

SEQ ID NO: 17790 - protein, 8 aa, BK virus
CESCTFLP

SEQ ID NO: 17791 - protein, 8 aa, BK virus
ESCTFLPE

SEQ ID NO: 17792 - protein, 8 aa, BK virus
SCTFLPEV

SEQ ID NO: 17793 - protein, 8 aa, BK virus
CTFLPEVM

SEQ ID NO: 17794 - protein, 8 aa, BK virus
TFLPEVMV

SEQ ID NO: 17795 - protein, 8 aa, BK virus
FLPEVMVW

SEQ ID NO: 17796 - protein, 8 aa, BK virus
LPEVMVWL

SEQ ID NO: 17797 - protein, 8 aa, BK virus
PEVMVWLH

SEQ ID NO: 17798 - protein, 8 aa, BK virus
EVMVWLHS

SEQ ID NO: 17799 - protein, 8 aa, BK virus
VMVWLHSM

SEQ ID NO: 17800 - protein, 8 aa, BK virus
MVWLHSMG

(The sequence listing continues in the following parts.)

1-1573. (canceled)

1574. An isolated MHC multimer comprising (a-b-P)n, wherein n>1,
wherein a and b together form a functional MHC protein capable of binding the peptide P, wherein (a-b-P) is the MHC-peptide complex formed when the peptide P binds to the functional MHC protein,
wherein each MHC peptide complex of a MHC multimer is associated with one or more multimerization domains,
wherein P comprises one or more epitopes selected from the group consisting of FTLEGTLAA (SEQ ID NO 51128), KTSTLTISV (SEQ ID NO 51129), FTKEDTITV (SEQ ID NO 51130), ALIACKQNV (SEQ ID NO 51131), TLVSKKVTL (SEQ ID NO 51137), KTKNLVFTK (SEQ ID NO 51161), LILALIACK (SEQ ID NO 51163), ISVNSQKTK (SEQ ID NO 51167), KITDSNAFV (SEQ ID NO 49779), SVKELTSPV (SEQ ID NO 49925), ALTNSVKEL (SEQ ID NO 49921), TLITEKLSK (SEQ ID NO 49836), ELANKAIGK (SEQ ID NO 49802) and LANKAIGKK (SEQ ID NO 49803).

1575. The MHC multimer according to claim 1574, wherein the MHC multimer comprises MHC class I molecules.

1576. The MHC multimer according to any of claims 1574 to 1575, wherein the MHC multimer comprises MHC class 2 molecules.

1577. The MHC multimer according to any of claims 1574 to 1576, wherein the MHC multimer comprises one or more covalently or non-covalently attached labels, and wherein said one or more labels can be selected from the group consisting of fluorescent labels, fluorophores, enzymes, radioioitopes, chemiluminescent labels, dyes, bioluminescent labels, metal particles, haptens, polymers, and antibodies.

1578. The MHC multimer according to any of claims 1574 to 1577, wherein the one or more multimerization domains can be selected from the group consisting of scaffolds, carriers, optionally substituted organic molecules, membranes, liposomes or micelles, polymers, polysaccharides, dextran moieties, an IgG domain, a coiled-coil polypeptide structure, a DNA duplex, a nucleic acid duplex, PNA-PNA, PNA-DNA, DNA-RNA, avidins, streptavidins, an antibody, small organic molecules, proteins, cells, cell-like structures, solid support, molecules, biological polymers and self-assembling multimeric structures.

1579. The MHC multimer according to any of claims 1574 to 1577, wherein the one or more multimerization domains comprises one or more biological cells.

1580. A composition comprising a plurality of MHC multimers according to any of claims 1574 to 1579 and a carrier, wherein the MHC multimers are identical.

1581. A composition comprising a plurality of MHC multimers according to any of claims 1574 to 1579 and a carrier, wherein the MHC multimers are different.

1582. A kit comprising a MHC multimer according to any of claims 1574 to 1579 or a composition according to any of claims 1580 to 1581, and at least one additional component, such as a positive control and/or instructions for use.

1583. A vaccine reagent comprising a MHC multimer according to any of claims 1574 to 1579.

1584. A method for immune monitoring an immune response comprising the following steps:
i) providing the MHC multimer according to any of claims 1574 to 1579, or the individual components thereof,
ii) providing a population of T cells, and
iii) measuring the number, activity or state of T cells specific for said MHC multimer, thereby immune monitoring said one or more immune responses.

1585. A method for diagnosing one or more diseases comprising the following steps:
i) providing the MHC multimer according to any of the claims 1574 to 1579, or individual components thereof,
ii) providing a population T cells, and
iii) measuring the number, activity or state T cells specific for said MHC multimer, thereby diagnosing said one or more diseases.

1586. A method for isolation of one or more antigen specific T cells, said method comprising the steps of
i) providing the MHC multimer according to any of the claims 1574 to 1579, or individual components thereof,
ii) providing a population of T cells, and
iii) isolating T cells specific for said MHC multimer.

1587. The method according to any of claims 1584 to 1586, wherein the method comprises direct detection of individual T cells.

1588. The method according to claim 1587, wherein the method comprises flow cytometry.

1589. The method according to claim 1587, wherein the method comprises direct detection of T cells immobilised on a solid support.

1590. The method according to any of claims 1584 to 1586, wherein the method comprises indirect detection of individual or populations of T cells.

1591. The method according to claim 1590, wherein the method comprises indirect detection of T cells by measurement of activation of T cells.

1592. The method according to claim 1591, wherein the activation is measured by measurement of secretion of soluble factors from activated T cells.
